United States Patent Application Publication US 2005/0255487 A1 - sequence listing, part 59

SEQ ID NO: 1617257 - RNA, 19 nt, Homo sapiens
  misc_RNA (1)...(19): siRNA sense strand
cgaaguguccagagaagaa

SEQ ID NO: 1617258 - RNA, 19 nt, Homo sapiens
  misc_RNA (1)...(19): siRNA sense strand
gccagauaguggucaguuu

SEQ ID NO: 1617259 - RNA, 19 nt, Homo sapiens
  misc_RNA (1)...(19): siRNA sense strand
gggaguggcuuuacuugcu

SEQ ID NO: 1617260 - RNA, 19 nt, Homo sapiens
  misc_RNA (1)...(19): siRNA sense strand
ggagcuuccugcccagaga

SEQ ID NO: 1617261 - RNA, 19 nt, Homo sapiens
  misc_RNA (1)...(19): siRNA sense strand
cgaaggcuacgaacaaaga

SEQ ID NO: 1617262 - RNA, 19 nt, Homo sapiens
  misc_RNA (1)...(19): siRNA sense strand
gaaggaacgguguaugaag

SEQ ID NO: 1617263 - RNA, 19 nt, Homo sapiens
  misc_RNA (1)...(19): siRNA sense strand
uuggaucuaugcaaacuaa

SEQ ID NO: 1617264 - RNA, 19 nt, Homo sapiens
  misc_RNA (1)...(19): siRNA sense strand
gcccauaccugcuuuaacc

SEQ ID NO: 1617265 - RNA, 19 nt, Homo sapiens
  misc_RNA (1)...(19): siRNA sense strand
gagcucaucccucaacauc

SEQ ID NO: 1617266 - RNA, 19 nt, Homo sapiens
  misc_RNA (1)...(19): siRNA sense strand
guuuacagacccaagguua

SEQ ID NO: 1617267 - RNA, 19 nt, Homo sapiens
  misc_RNA (1)...(19): siRNA sense strand
gaaaguccucagacacgaa

SEQ ID NO: 1617268 - RNA, 19 nt, Homo sapiens
  misc_RNA (1)...(19): siRNA sense strand
gacguucgaugaagaaagg

SEQ ID NO: 1617269 - RNA, 19 nt, Homo sapiens
  misc_RNA (1)...(19): siRNA sense strand
gaagaagguuuggauuacg

SEQ ID NO: 1617270 - RNA, 19 nt, Homo sapiens
  misc_RNA (1)...(19): siRNA sense strand
ggaaccagcacuaugaucu

SEQ ID NO: 1617271 - RNA, 19 nt, Homo sapiens
  misc_RNA (1)...(19): siRNA sense strand
ccgaccacuugucuuauuu

SEQ ID NO: 1617272 - RNA, 19 nt, Homo sapiens
  misc_RNA (1)...(19): siRNA sense strand
ugaucuauauguugggaaa

SEQ ID NO: 1617273 - RNA, 19 nt, Homo sapiens
  misc_RNA (1)...(19): siRNA sense strand
gaucauaauaaccgaacaa

SEQ ID NO: 1617274 - RNA, 19 nt, Homo sapiens
  misc_RNA (1)...(19): siRNA sense strand
gugcgagguucacuacaga

SEQ ID NO: 1617275 - RNA, 19 nt, Homo sapiens
  misc_RNA (1)...(19): siRNA sense strand
ggagacguucgaugaagaa

SEQ ID NO: 1617276 - RNA, 19 nt, Homo sapiens
  misc_RNA (1)...(19): siRNA sense strand
acccagagcugcauaagag

SEQ ID NO: 1617277 - RNA, 19 nt, Homo sapiens
  misc_RNA (1)...(19): siRNA sense strand
ccagagauacgaaagagau

SEQ ID NO: 1617278 - RNA, 19 nt, Homo sapiens
  misc_RNA (1)...(19): siRNA sense strand
gaaguguccagagaagaaa

SEQ ID NO: 1617279 - RNA, 19 nt, Homo sapiens
  misc_RNA (1)...(19): siRNA sense strand
gcccgaaggcuacgaacaa

SEQ ID NO: 1617280 - RNA, 19 nt, Homo sapiens
  misc_RNA (1)...(19): siRNA sense strand
uacguccgguuguauguaa

SEQ ID NO: 1617281 - RNA, 19 nt, Homo sapiens
  misc_RNA (1)...(19): siRNA sense strand
ugucuuauuuccacuuugu

SEQ ID NO: 1617282 - RNA, 19 nt, Homo sapiens
  misc_RNA (1)...(19): siRNA sense strand
cggauucgauaaccauuag

SEQ ID NO: 1617283 - RNA, 19 nt, Homo sapiens
  misc_RNA (1)...(19): siRNA sense strand
aggaacggcuccagcauca

SEQ ID NO: 1617284 - RNA, 19 nt, Homo sapiens
  misc_RNA (1)...(19): siRNA sense strand
caugaaaugcugaauccuu

SEQ ID NO: 1617285 - RNA, 19 nt, Homo sapiens
  misc_RNA (1)...(19): siRNA sense strand
ggagucuuaccgccagaua

SEQ ID NO: 1617286 - RNA, 19 nt, Homo sapiens
  misc_RNA (1)...(19): siRNA sense strand
ggaagucagaaguacaguu

SEQ ID NO: 1617287 - RNA, 19 nt, Homo sapiens
  misc_RNA (1)...(19): siRNA sense strand
ugugaacugugaugaacuu

SEQ ID NO: 1617288 - RNA, 19 nt, Homo sapiens
  misc_RNA (1)...(19): siRNA sense strand
acagacacgagacagaaua

SEQ ID NO: 1617289 - RNA, 19 nt, Homo sapiens
  misc_RNA (1)...(19): siRNA sense strand
cgacaucacgccuguacug

SEQ ID NO: 1617290 - RNA, 19 nt, Homo sapiens
  misc_RNA (1)...(19): siRNA sense strand
auuacgggcucuuccagua

SEQ ID NO: 1617291 - RNA, 19 nt, Homo sapiens
  misc_RNA (1)...(19): siRNA sense strand
gcacagcggcuucgaaacc

SEQ ID NO: 1617292 - RNA, 19 nt, Homo sapiens
  misc_RNA (1)...(19): siRNA sense strand
gaaucgaagcccaguucuu

SEQ ID NO: 1617293 - RNA, 19 nt, Homo sapiens
  misc_RNA (1)...(19): siRNA sense strand
cccgaccacuugucuuauu

SEQ ID NO: 1617294 - RNA, 19 nt, Homo sapiens
  misc_RNA (1)...(19): siRNA sense strand
gccaugaaaugcugaaucc

SEQ ID NO: 1617295 - RNA, 19 nt, Homo sapiens
  misc_RNA (1)...(19): siRNA sense strand
gaaggcuacgaacaaagaa

SEQ ID NO: 1617296 - RNA, 19 nt, Homo sapiens
  misc_RNA (1)...(19): siRNA sense strand
ggcggauccugcagcauga

SEQ ID NO: 1617297 - RNA, 19 nt, Homo sapiens
  misc_RNA (1)...(19): siRNA sense strand
ccauccagcucucagaucu

SEQ ID NO: 1617298 - RNA, 19 nt, Homo sapiens
  misc_RNA (1)...(19): siRNA sense strand
gcccagagauacgaaagag

SEQ ID NO: 1617299 - RNA, 19 nt, Homo sapiens
  misc_RNA (1)...(19): siRNA sense strand
gauaccagcguuuggaucu

SEQ ID NO: 1617300 - RNA, 19 nt, Homo sapiens
  misc_RNA (1)...(19): siRNA sense strand
uggagacguucgaugaaga

SEQ ID NO: 1617301 - RNA, 19 nt, Homo sapiens
  misc_RNA (1)...(19): siRNA sense strand
ugaaggaacgguguaugaa

SEQ ID NO: 1617302 - RNA, 19 nt, Homo sapiens
  misc_RNA (1)...(19): siRNA sense strand
gacacgagacagaauagga

SEQ ID NO: 1617303 - RNA, 19 nt, Homo sapiens
  misc_RNA (1)...(19): siRNA sense strand
gaugcgaccgaaagacuug

SEQ ID NO: 1617304 - RNA, 19 nt, Homo sapiens
  misc_RNA (1)...(19): siRNA sense strand
ugauagacgcgaacacaga

SEQ ID NO: 1617305 - RNA, 19 nt, Homo sapiens
  misc_RNA (1)...(19): siRNA sense strand
cuucaaggcuuugcaaggu

SEQ ID NO: 1617306 - RNA, 19 nt, Homo sapiens
  misc_RNA (1)...(19): siRNA sense strand
aacaucugcugaagccuuu

SEQ ID NO: 1617307 - RNA, 19 nt, Homo sapiens
  misc_RNA (1)...(19): siRNA sense strand
uacgggcucuuccaguauu

SEQ ID NO: 1617308 - RNA, 19 nt, Homo sapiens
  misc_RNA (1)...(19): siRNA sense strand
acacgagacagaauaggaa

SEQ ID NO: 1617309 - RNA, 19 nt, Homo sapiens
  misc_RNA (1)...(19): siRNA sense strand
ggagguuuaugagaggaau

SEQ ID NO: 1617310 - RNA, 19 nt, Homo sapiens
  misc_RNA (1)...(19): siRNA sense strand
caucgaaguguccagagaa

SEQ ID NO: 1617311 - RNA, 19 nt, Homo sapiens
  misc_RNA (1)...(19): siRNA sense strand
aaucaccagugccaacuca

SEQ ID NO: 1617312 - RNA, 19 nt, Homo sapiens
  misc_RNA (1)...(19): siRNA sense strand
uacaccacaucaugaauca

SEQ ID NO: 1617313 - RNA, 19 nt, Homo sapiens
  misc_RNA (1)...(19): siRNA sense strand
uuucugggaggauauauuu

SEQ ID NO: 1617314 - RNA, 19 nt, Homo sapiens
  misc_RNA (1)...(19): siRNA sense strand
gguuacaccacaucaugaa

SEQ ID NO: 1617315 - RNA, 19 nt, Homo sapiens
  misc_RNA (1)...(19): siRNA sense strand
guucaccauccaccugaua

SEQ ID NO: 1617316 - RNA, 19 nt, Homo sapiens
  misc_RNA (1)...(19): siRNA sense strand
gcaacaucgugcggugguu

SEQ ID NO: 1617317 - RNA, 19 nt, Homo sapiens
  misc_RNA (1)...(19): siRNA sense strand
gaggagaauaagaaagaau

SEQ ID NO: 1617318 - RNA, 19 nt, Homo sapiens
  misc_RNA (1)...(19): siRNA sense strand
gcacuaugaucuauauguu

SEQ ID NO: 1617319 - RNA, 19 nt, Homo sapiens
  misc_RNA (1)...(19): siRNA sense strand
gaacaacccaguuuacaga

SEQ ID NO: 1617320 - RNA, 19 nt, Homo sapiens
  misc_RNA (1)...(19): siRNA sense strand
ggacaauauuuacauguug

SEQ ID NO: 1617321 - RNA, 19 nt, Homo sapiens
  misc_RNA (1)...(19): siRNA sense strand
gaacugugaugaacuugga

SEQ ID NO: 1617322 - RNA, 19 nt, Homo sapiens
  misc_RNA (1)...(19): siRNA sense strand
gaagucagaaguacaguuu

SEQ ID NO: 1617323 - RNA, 19 nt, Homo sapiens
  misc_RNA (1)...(19): siRNA sense strand
gggaagaagguuuggauua

SEQ ID NO: 1617324 - RNA, 19 nt, Homo sapiens
  misc_RNA (1)...(19): siRNA sense strand
aaagagaucuaguccagaa

SEQ ID NO: 1617325 - RNA, 19 nt, Homo sapiens
  misc_RNA (1)...(19): siRNA sense strand
ggaagaagguuuggauuac

SEQ ID NO: 1617326 - RNA, 19 nt, Homo sapiens
  misc_RNA (1)...(19): siRNA sense strand
ggacugcagaggacuguua

SEQ ID NO: 1617327 - RNA, 19 nt, Homo sapiens
  misc_RNA (1)...(19): siRNA sense strand
ggaucgacauuccaccaua

SEQ ID NO: 1617328 - RNA, 19 nt, Homo sapiens
  misc_RNA (1)...(19): siRNA sense strand
gcagaggacuguuagaaaa

SEQ ID NO: 1617329 - RNA, 19 nt, Homo sapiens
  misc_RNA (1)...(19): siRNA sense strand
ucacagaggagaauaagaa

SEQ ID NO: 1617330 - RNA, 19 nt, Homo sapiens
  misc_RNA (1)...(19): siRNA sense strand
ccagauaguggucaguuua

SEQ ID NO: 1617331 - RNA, 19 nt, Homo sapiens
  misc_RNA (1)...(19): siRNA sense strand
gaggagaccugcggguuug

SEQ ID NO: 1617332 - RNA, 19 nt, Homo sapiens
  misc_RNA (1)...(19): siRNA sense strand
gaaacccaauggcagaaau

SEQ ID NO: 1617333 - RNA, 19 nt, Homo sapiens
  misc_RNA (1)...(19): siRNA sense strand
gaucgacauuccaccauau

SEQ ID NO: 1617334 - RNA, 19 nt, Homo sapiens
  misc_RNA (1)...(19): siRNA sense strand
augaaaugcugaauccuua

SEQ ID NO: 1617335 - RNA, 19 nt, Homo sapiens
  misc_RNA (1)...(19): siRNA sense strand
gaacuggagcugaucauag

SEQ ID NO: 1617336 - RNA, 19 nt, Homo sapiens
  misc_RNA (1)...(19): siRNA sense strand
aaucgaagcccaguucuua

SEQ ID NO: 1617337 - RNA, 19 nt, Homo sapiens
  misc_RNA (1)...(19): siRNA sense strand
gaaccagcacuaugaucua

SEQ ID NO: 1617338 - RNA, 19 nt, Homo sapiens
  misc_RNA (1)...(19): siRNA sense strand
gaaaugcugaauccuuauu

SEQ ID NO: 1617339 - RNA, 19 nt, Homo sapiens
  misc_RNA (1)...(19): siRNA sense strand
gaaggcccauaccugcuuu

SEQ ID NO: 1617340 - RNA, 19 nt, Homo sapiens
  misc_RNA (1)...(19): siRNA sense strand
gcucaucccucaacaucug

SEQ ID NO: 1617341 - RNA, 19 nt, Homo sapiens
  misc_RNA (1)...(19): siRNA sense strand
ccagcacuaugaucuauau

SEQ ID NO: 1617342 - RNA, 19 nt, Homo sapiens
  misc_RNA (1)...(19): siRNA sense strand
ggaggagaccugcggguuu

SEQ ID NO: 1617343 - RNA, 19 nt, Homo sapiens
  misc_RNA (1)...(19): siRNA sense strand
gcaucgaaguguccagaga

SEQ ID NO: 1617344 - RNA, 19 nt, Homo sapiens
  misc_RNA (1)...(19): siRNA sense strand
ggcaagcgguggagacguu

SEQ ID NO: 1617345 - RNA, 19 nt, Homo sapiens
  misc_RNA (1)...(19): siRNA sense strand
cagaggagaauaagaaaga

SEQ ID NO: 1617346 - RNA, 19 nt, Homo sapiens
  misc_RNA (1)...(19): siRNA sense strand
aagaauacguccgguugua

SEQ ID NO: 1617347 - RNA, 19 nt, Homo sapiens
  misc_RNA (1)...(19): siRNA sense strand
ccaaugccaucagcagauu

SEQ ID NO: 1617348 - RNA, 19 nt, Homo sapiens
  misc_RNA (1)...(19): siRNA sense strand
augagaagcucuacgagaa

SEQ ID NO: 1617349 - RNA, 19 nt, Homo sapiens
  misc_RNA (1)...(19): siRNA sense strand
agaaggaacuggagcugau

SEQ ID NO: 1617350 - RNA, 19 nt, Homo sapiens
  misc_RNA (1)...(19): siRNA sense strand
aaacuaaaccccucagaua

SEQ ID NO: 1617351 - RNA, 19 nt, Homo sapiens
  misc_RNA (1)...(19): siRNA sense strand
ggaacuggagcugaucaua

SEQ ID NO: 1617352 - RNA, 19 nt, Homo sapiens
  misc_RNA (1)...(19): siRNA sense strand
ucacagugcccuucuacaa

SEQ ID NO: 1617353 - RNA, 19 nt, Homo sapiens
  misc_RNA (1)...(19): siRNA sense strand
cggacaauauuuacauguu

SEQ ID NO: 1617354 - RNA, 19 nt, Homo sapiens
  misc_RNA (1)...(19): siRNA sense strand
uaaccgaacaacccaguuu

SEQ ID NO: 1617355 - RNA, 19 nt, Homo sapiens
  misc_RNA (1)...(19): siRNA sense strand
aaggaacgguguaugaaga

SEQ ID NO: 1617356 - RNA, 19 nt, Homo sapiens
  misc_RNA (1)...(19): siRNA sense strand
gaacggcuccagcaucaag

SEQ ID NO: 1617357 - RNA, 19 nt, Homo sapiens
  misc_RNA (1)...(19): siRNA sense strand
cgaaguguccagagaagaa

SEQ ID NO: 1617358 - RNA, 19 nt, Homo sapiens
  misc_RNA (1)...(19): siRNA sense strand
gccagauaguggucaguuu

SEQ ID NO: 1617359 - RNA, 19 nt, Homo sapiens
  misc_RNA (1)...(19): siRNA sense strand
gggaguggcuuuacuugcu

SEQ ID NO: 1617360 - RNA, 19 nt, Homo sapiens
  misc_RNA (1)...(19): siRNA sense strand
ggagcuuccugcccagaga

SEQ ID NO: 1617361 - RNA, 19 nt, Homo sapiens
  misc_RNA (1)...(19): siRNA sense strand
cgaaggcuacgaacaaaga

SEQ ID NO: 1617362 - RNA, 19 nt, Homo sapiens
  misc_RNA (1)...(19): siRNA sense strand
gaaggaacgguguaugaag

SEQ ID NO: 1617363 - RNA, 19 nt, Homo sapiens
  misc_RNA (1)...(19): siRNA sense strand
uuggaucuaugcaaacuaa

SEQ ID NO: 1617364 - RNA, 19 nt, Homo sapiens
  misc_RNA (1)...(19): siRNA sense strand
gcccauaccugcuuuaacc

SEQ ID NO: 1617365 - RNA, 19 nt, Homo sapiens
  misc_RNA (1)...(19): siRNA sense strand
gagcucaucccucaacauc

SEQ ID NO: 1617366 - RNA, 19 nt, Homo sapiens
  misc_RNA (1)...(19): siRNA sense strand
guuuacagacccaagguua

SEQ ID NO: 1617367 - RNA, 19 nt, Homo sapiens
  misc_RNA (1)...(19): siRNA sense strand
gaaaguccucagacacgaa

SEQ ID NO: 1617368 - RNA, 19 nt, Homo sapiens
  misc_RNA (1)...(19): siRNA sense strand
gacguucgaugaagaaagg

SEQ ID NO: 1617369 - RNA, 19 nt, Homo sapiens
  misc_RNA (1)...(19): siRNA sense strand
gaagaagguuuggauuacg

SEQ ID NO: 1617370 - RNA, 19 nt, Homo sapiens
  misc_RNA (1)...(19): siRNA sense strand
ggaaccagcacuaugaucu

SEQ ID NO: 1617371 - RNA, 19 nt, Homo sapiens
  misc_RNA (1)...(19): siRNA sense strand
ccgaccacuugucuuauuu

SEQ ID NO: 1617372 - RNA, 19 nt, Homo sapiens
  misc_RNA (1)...(19): siRNA sense strand
ugaucuauauguugggaaa

SEQ ID NO: 1617373 - RNA, 19 nt, Homo sapiens
  misc_RNA (1)...(19): siRNA sense strand
gaucauaauaaccgaacaa

SEQ ID NO: 1617374 - RNA, 19 nt, Homo sapiens
  misc_RNA (1)...(19): siRNA sense strand
gugcgagguucacuacaga

SEQ ID NO: 1617375 - RNA, 19 nt, Homo sapiens
  misc_RNA (1)...(19): siRNA sense strand
ggagacguucgaugaagaa

SEQ ID NO: 1617376 - RNA, 19 nt, Homo sapiens
  misc_RNA (1)...(19): siRNA sense strand
acccagagcugcauaagag

SEQ ID NO: 1617377 - RNA, 19 nt, Homo sapiens
  misc_RNA (1)...(19): siRNA sense strand
ccagagauacgaaagagau

SEQ ID NO: 1617378 - RNA, 19 nt, Homo sapiens
  misc_RNA (1)...(19): siRNA sense strand
gaaguguccagagaagaaa

SEQ ID NO: 1617379 - RNA, 19 nt, Homo sapiens
  misc_RNA (1)...(19): siRNA sense strand
gcccgaaggcuacgaacaa

SEQ ID NO: 1617380 - RNA, 19 nt, Homo sapiens
  misc_RNA (1)...(19): siRNA sense strand
uacguccgguuguauguaa

SEQ ID NO: 1617381 - RNA, 19 nt, Homo sapiens
  misc_RNA (1)...(19): siRNA sense strand
ugucuuauuuccacuuugu

SEQ ID NO: 1617382 - RNA, 19 nt, Homo sapiens
  misc_RNA (1)...(19): siRNA sense strand
cggauucgauaaccauuag

SEQ ID NO: 1617383 - RNA, 19 nt, Homo sapiens
  misc_RNA (1)...(19): siRNA sense strand
aggaacggcuccagcauca

SEQ ID NO: 1617384 - RNA, 19 nt, Homo sapiens
  misc_RNA (1)...(19): siRNA sense strand
caugaaaugcugaauccuu

SEQ ID NO: 1617385 - RNA, 19 nt, Homo sapiens
  misc_RNA (1)...(19): siRNA sense strand
ggagucuuaccgccagaua

SEQ ID NO: 1617386 - RNA, 19 nt, Homo sapiens
  misc_RNA (1)...(19): siRNA sense strand
ggaagucagaaguacaguu

SEQ ID NO: 1617387 - RNA, 19 nt, Homo sapiens
  misc_RNA (1)...(19): siRNA sense strand
ugugaacugugaugaacuu

SEQ ID NO: 1617388 - RNA, 19 nt, Homo sapiens
  misc_RNA (1)...(19): siRNA sense strand
acagacacgagacagaaua

SEQ ID NO: 1617389 - RNA, 19 nt, Homo sapiens
  misc_RNA (1)...(19): siRNA sense strand
cgacaucacgccuguacug

SEQ ID NO: 1617390 - RNA, 19 nt, Homo sapiens
  misc_RNA (1)...(19): siRNA sense strand
auuacgggcucuuccagua

SEQ ID NO: 1617391 - RNA, 19 nt, Homo sapiens
  misc_RNA (1)...(19): siRNA sense strand
gcacagcggcuucgaaacc

SEQ ID NO: 1617392 - RNA, 19 nt, Homo sapiens
  misc_RNA (1)...(19): siRNA sense strand
gaaucgaagcccaguucuu

SEQ ID NO: 1617393 - RNA, 19 nt, Homo sapiens
  misc_RNA (1)...(19): siRNA sense strand
cccgaccacuugucuuauu

SEQ ID NO: 1617394 - RNA, 19 nt, Homo sapiens
  misc_RNA (1)...(19): siRNA sense strand
gccaugaaaugcugaaucc

SEQ ID NO: 1617395 - RNA, 19 nt, Homo sapiens
  misc_RNA (1)...(19): siRNA sense strand
gaaggcuacgaacaaagaa

SEQ ID NO: 1617396 - RNA, 19 nt, Homo sapiens
  misc_RNA (1)...(19): siRNA sense strand
ggcggauccugcagcauga

SEQ ID NO: 1617397 - RNA, 19 nt, Homo sapiens
  misc_RNA (1)...(19): siRNA sense strand
ccauccagcucucagaucu

SEQ ID NO: 1617398 - RNA, 19 nt, Homo sapiens
  misc_RNA (1)...(19): siRNA sense strand
gcccagagauacgaaagag

SEQ ID NO: 1617399 - RNA, 19 nt, Homo sapiens
  misc_RNA (1)...(19): siRNA sense strand
gauaccagcguuuggaucu

SEQ ID NO: 1617400 - RNA, 19 nt, Homo sapiens
  misc_RNA (1)...(19): siRNA sense strand
uggagacguucgaugaaga

SEQ ID NO: 1617401 - RNA, 19 nt, Homo sapiens
  misc_RNA (1)...(19): siRNA sense strand
ugaaggaacgguguaugaa

SEQ ID NO: 1617402 - RNA, 19 nt, Homo sapiens
  misc_RNA (1)...(19): siRNA sense strand
gacacgagacagaauagga

SEQ ID NO: 1617403 - RNA, 19 nt, Homo sapiens
  misc_RNA (1)...(19): siRNA sense strand
gaugcgaccgaaagacuug

SEQ ID NO: 1617404 - RNA, 19 nt, Homo sapiens
  misc_RNA (1)...(19): siRNA sense strand
ugauagacgcgaacacaga

SEQ ID NO: 1617405 - RNA, 19 nt, Homo sapiens
  misc_RNA (1)...(19): siRNA sense strand
cuucaaggcuuugcaaggu

SEQ ID NO: 1617406 - RNA, 19 nt, Homo sapiens
  misc_RNA (1)...(19): siRNA sense strand
aacaucugcugaagccuuu

SEQ ID NO: 1617407 - RNA, 19 nt, Homo sapiens
  misc_RNA (1)...(19): siRNA sense strand
uacgggcucuuccaguauu

SEQ ID NO: 1617408 - RNA, 19 nt, Homo sapiens
  misc_RNA (1)...(19): siRNA sense strand
acacgagacagaauaggaa

SEQ ID NO: 1617409 - RNA, 19 nt, Homo sapiens
  misc_RNA (1)...(19): siRNA sense strand
ggagguuuaugagaggaau

SEQ ID NO: 1617410 - RNA, 19 nt, Homo sapiens
  misc_RNA (1)...(19): siRNA sense strand
caucgaaguguccagagaa

SEQ ID NO: 1617411 - RNA, 19 nt, Homo sapiens
  misc_RNA (1)...(19): siRNA sense strand
aaucaccagugccaacuca

SEQ ID NO: 1617412 - RNA, 19 nt, Homo sapiens
  misc_RNA (1)...(19): siRNA sense strand
uacaccacaucaugaauca

SEQ ID NO: 1617413 - RNA, 19 nt, Homo sapiens
  misc_RNA (1)...(19): siRNA sense strand
uuucugggaggauauauuu

SEQ ID NO: 1617414 - RNA, 19 nt, Homo sapiens
  misc_RNA (1)...(19): siRNA sense strand
gguuacaccacaucaugaa

SEQ ID NO: 1617415 - RNA, 19 nt, Homo sapiens
  misc_RNA (1)...(19): siRNA sense strand
guucaccauccaccugaua

SEQ ID NO: 1617416 - RNA, 19 nt, Homo sapiens
  misc_RNA (1)...(19): siRNA sense strand
gcaacaucgugcggugguu

SEQ ID NO: 1617417 - RNA, 19 nt, Homo sapiens
  misc_RNA (1)...(19): siRNA sense strand
gaggagaauaagaaagaau

SEQ ID NO: 1617418 - RNA, 19 nt, Homo sapiens
  misc_RNA (1)...(19): siRNA sense strand
ucagggaccuucaguugga

SEQ ID NO: 1617419 - RNA, 19 nt, Homo sapiens
  misc_RNA (1)...(19): siRNA sense strand
caucagggaccuucaguug

SEQ ID NO: 1617420 - RNA, 19 nt, Homo sapiens
  misc_RNA (1)...(19): siRNA sense strand
gagcagagcguggccaucu

SEQ ID NO: 1617421 - RNA, 19 nt, Homo sapiens
  misc_RNA (1)...(19): siRNA sense strand
ugagcaagguggagauucu

SEQ ID NO: 1617422 - RNA, 19 nt, Homo sapiens
  misc_RNA (1)...(19): siRNA sense strand
caugaacggcuguuacuca

SEQ ID NO: 1617423 - RNA, 19 nt, Homo sapiens
  misc_RNA (1)...(19): siRNA sense strand
gugcugcucuacgacauga

SEQ ID NO: 1617424 - RNA, 19 nt, Homo sapiens
  misc_RNA (1)...(19): siRNA sense strand
gcacgucaucgacuacauc

SEQ ID NO: 1617425 - RNA, 19 nt, Homo sapiens
  misc_RNA (1)...(19): siRNA sense strand
cgacaugaacggcuguuac

SEQ ID NO: 1617426 - RNA, 19 nt, Homo sapiens
  misc_RNA (1)...(19): siRNA sense strand
gacaugaacggcuguuacu

SEQ ID NO: 1617427 - RNA, 19 nt, Homo sapiens
  misc_RNA (1)...(19): siRNA sense strand
ggacgaucgcaucuugugu

SEQ ID NO: 1617428 - RNA, 19 nt, Homo sapiens
  misc_RNA (1)...(19): siRNA sense strand
uccagcacgucaucgacua

SEQ ID NO: 1617429 - RNA, 19 nt, Homo sapiens
  misc_RNA (1)...(19): siRNA sense strand
gagguggugcgcugucugu

SEQ ID NO: 1617430 - RNA, 19 nt, Homo sapiens
  misc_RNA (1)...(19): siRNA sense strand
ucagggaccuucaguugga

SEQ ID NO: 1617431 - RNA, 19 nt, Homo sapiens
  misc_RNA (1)...(19): siRNA sense strand
caucagggaccuucaguug

SEQ ID NO: 1617432 - RNA, 19 nt, Homo sapiens
  misc_RNA (1)...(19): siRNA sense strand
gagcagagcguggccaucu

SEQ ID NO: 1617433 - RNA, 19 nt, Homo sapiens
  misc_RNA (1)...(19): siRNA sense strand
ugagcaagguggagauucu

SEQ ID NO: 1617434 - RNA, 19 nt, Homo sapiens
  misc_RNA (1)...(19): siRNA sense strand
caugaacggcuguuacuca

SEQ ID NO: 1617435 - RNA, 19 nt, Homo sapiens
  misc_RNA (1)...(19): siRNA sense strand
gugcugcucuacgacauga

SEQ ID NO: 1617436 - RNA, 19 nt, Homo sapiens
  misc_RNA (1)...(19): siRNA sense strand
gcacgucaucgacuacauc

SEQ ID NO: 1617437 - RNA, 19 nt, Homo sapiens
  misc_RNA (1)...(19): siRNA sense strand
cgacaugaacggcuguuac

SEQ ID NO: 1617438 - RNA, 19 nt, Homo sapiens
  misc_RNA (1)...(19): siRNA sense strand
gacaugaacggcuguuacu

SEQ ID NO: 1617439 - RNA, 19 nt, Homo sapiens
  misc_RNA (1)...(19): siRNA sense strand
uccagcacgucaucgacua

SEQ ID NO: 1617440 - RNA, 19 nt, Homo sapiens
  misc_RNA (1)...(19): siRNA sense strand
gagguggugcgcugucugu

SEQ ID NO: 1617441 - RNA, 19 nt, Homo sapiens
  misc_RNA (1)...(19): siRNA sense strand
ggacugagauugcuuacaa

SEQ ID NO: 1617442 - RNA, 19 nt, Homo sapiens
  misc_RNA (1)...(19): siRNA sense strand
ucacugggcucccucuuua

SEQ ID NO: 1617443 - RNA, 19 nt, Homo sapiens
  misc_RNA (1)...(19): siRNA sense strand
gcaagaguauaguauggua

SEQ ID NO: 1617444 - RNA, 19 nt, Homo sapiens
  misc_RNA (1)...(19): siRNA sense strand
ggucauauuugagaacaua

SEQ ID NO: 1617445 - RNA, 19 nt, Homo sapiens
  misc_RNA (1)...(19): siRNA sense strand
cugaauaacuugaguguga

SEQ ID NO: 1617446 - RNA, 19 nt, Homo sapiens
  misc_RNA (1)...(19): siRNA sense strand
gcaaugagagcaagaguau

SEQ ID NO: 1617447 - RNA, 19 nt, Homo sapiens
  misc_RNA (1)...(19): siRNA sense strand
gaacucaucugugcagcuu

SEQ ID NO: 1617448 - RNA, 19 nt, Homo sapiens
  misc_RNA (1)...(19): siRNA sense strand
caaacuugcugaacauaug

SEQ ID NO: 1617449 - RNA, 19 nt, Homo sapiens
  misc_RNA (1)...(19): siRNA sense strand
gaauagaaagucaccauga

SEQ ID NO: 1617450 - RNA, 19 nt, Homo sapiens
  misc_RNA (1)...(19): siRNA sense strand
uauaaugacuggucugaug

SEQ ID NO: 1617451 - RNA, 19 nt, Homo sapiens
  misc_RNA (1)...(19): siRNA sense strand
uaacaaugcugcuuaugca

SEQ ID NO: 1617452 - RNA, 19 nt, Homo sapiens
  misc_RNA (1)...(19): siRNA sense strand
ucgcaaagauucucaauac

SEQ ID NO: 1617453 - RNA, 19 nt, Homo sapiens
  misc_RNA (1)...(19): siRNA sense strand
gagcaagaguauaguaugg

SEQ ID NO: 1617454 - RNA, 19 nt, Homo sapiens
  misc_RNA (1)...(19): siRNA sense strand
gaaaaucagcgcaggcuua

SEQ ID NO: 1617455 - RNA, 19 nt, Homo sapiens
  misc_RNA (1)...(19): siRNA sense strand
gaaaacagaacaaggaaaa

SEQ ID NO: 1617456 - RNA, 19 nt, Homo sapiens
  misc_RNA (1)...(19): siRNA sense strand
gaaaagccuuauauucuug

SEQ ID NO: 1617457 - RNA, 19 nt, Homo sapiens
  misc_RNA (1)...(19): siRNA sense strand
gcaaagauucucaauacuc

SEQ ID NO: 1617458 - RNA, 19 nt, Homo sapiens
  misc_RNA (1)...(19): siRNA sense strand
ugacuggucugaugaugau

SEQ ID NO: 1617459 - RNA, 19 nt, Homo sapiens
  misc_RNA (1)...(19): siRNA sense strand
uagaaagucaccaugauuu

SEQ ID NO: 1617460 - RNA, 19 nt, Homo sapiens
  misc_RNA (1)...(19): siRNA sense strand
gagauugcuuacaaauaug

SEQ ID NO: 1617461 - RNA, 19 nt, Homo sapiens
  misc_RNA (1)...(19): siRNA sense strand
gaagaaaacagaacaagga

SEQ ID NO: 1617462 - RNA, 19 nt, Homo sapiens
  misc_RNA (1)...(19): siRNA sense strand
aaaugaaccuacucagaau

SEQ ID NO: 1617463 - RNA, 19 nt, Homo sapiens
  misc_RNA (1)...(19): siRNA sense strand
gaugaugacagcaaugaga

SEQ ID NO: 1617464 - RNA, 19 nt, Homo sapiens
  misc_RNA (1)...(19): siRNA sense strand
ugauaagguucugggaaua

SEQ ID NO: 1617465 - RNA, 19 nt, Homo sapiens
  misc_RNA (1)...(19): siRNA sense strand
cuaauuccauuucugacuu

SEQ ID NO: 1617466 - RNA, 19 nt, Homo sapiens
  misc_RNA (1)...(19): siRNA sense strand
ugggcucccucuuuaauaa

SEQ ID NO: 1617467 - RNA, 19 nt, Homo sapiens
  misc_RNA (1)...(19): siRNA sense strand
gaaaugaagaaaccaaacu

SEQ ID NO: 1617468 - RNA, 19 nt, Homo sapiens
  misc_RNA (1)...(19): siRNA sense strand
ggucugaugaugaugauga

SEQ ID NO: 1617469 - RNA, 19 nt, Homo sapiens
  misc_RNA (1)...(19): siRNA sense strand
auacaugaaucaagugugu

SEQ ID NO: 1617470 - RNA, 19 nt, Homo sapiens
  misc_RNA (1)...(19): siRNA sense strand
gaaaaugaaccuacucaga

SEQ ID NO: 1617471 - RNA, 19 nt, Homo sapiens
  misc_RNA (1)...(19): siRNA sense strand
gcacaugcuugcuaauucc

SEQ ID NO: 1617472 - RNA, 19 nt, Homo sapiens
  misc_RNA (1)...(19): siRNA sense strand
ccaauugucgcaaagauuc

SEQ ID NO: 1617473 - RNA, 19 nt, Homo sapiens
  misc_RNA (1)...(19): siRNA sense strand
gaaccuacucagaaucaau

SEQ ID NO: 1617474 - RNA, 19 nt, Homo sapiens
  misc_RNA (1)...(19): siRNA sense strand
gagagcaagaguauaguau

SEQ ID NO: 1617475 - RNA, 19 nt, Homo sapiens
  misc_RNA (1)...(19): siRNA sense strand
ggguaacaaugcugcuuau

SEQ ID NO: 1617476 - RNA, 19 nt, Homo sapiens
  misc_RNA (1)...(19): siRNA sense strand
uaauugcucuggguaacaa

SEQ ID NO: 1617477 - RNA, 19 nt, Homo sapiens
  misc_RNA (1)...(19): siRNA sense strand
gggcuacgccaggaaagua

SEQ ID NO: 1617478 - RNA, 19 nt, Homo sapiens
  misc_RNA (1)...(19): siRNA sense strand
ggccaaacuugcugaacau

SEQ ID NO: 1617479 - RNA, 19 nt, Homo sapiens
  misc_RNA (1)...(19): siRNA sense strand
aauagaaagucaccaugau

SEQ ID NO: 1617480 - RNA, 19 nt, Homo sapiens
  misc_RNA (1)...(19): siRNA sense strand
ucaagugugugcugauaag

SEQ ID NO: 1617481 - RNA, 19 nt, Homo sapiens
  misc_RNA (1)...(19): siRNA sense strand
guucuuugcuugguugaga

SEQ ID NO: 1617482 - RNA, 19 nt, Homo sapiens
  misc_RNA (1)...(19): siRNA sense strand
ugaauaacuugagugugaa

SEQ ID NO: 1617483 - RNA, 19 nt, Homo sapiens
  misc_RNA (1)...(19): siRNA sense strand
cugauaagguucugggaau

SEQ ID NO: 1617484 - RNA, 19 nt, Homo sapiens
  misc_RNA (1)...(19): siRNA sense strand
aaacuucuggucauauuug

SEQ ID NO: 1617485 - RNA, 19 nt, Homo sapiens
  misc_RNA (1)...(19): siRNA sense strand
cagcgcaggcuuaaaguau

SEQ ID NO: 1617486 - RNA, 19 nt, Homo sapiens
  misc_RNA (1)...(19): siRNA sense strand
gcgcaggcuuaaaguauac

SEQ ID NO: 1617487 - RNA, 19 nt, Homo sapiens
  misc_RNA (1)...(19): siRNA sense strand
ucccaaagagccaggaaua

SEQ ID NO: 1617488 - RNA, 19 nt, Homo sapiens
  misc_RNA (1)...(19): siRNA sense strand
gaaaauucauggccaaacu

SEQ ID NO: 1617489 - RNA, 19 nt, Homo sapiens
  misc_RNA (1)...(19): siRNA sense strand
gcucagggcccaaguacca

SEQ ID NO: 1617490 - RNA, 19 nt, Homo sapiens
  misc_RNA (1)...(19): siRNA sense strand
acaaucacuucucgcuuga

SEQ ID NO: 1617491 - RNA, 19 nt, Homo sapiens
  misc_RNA (1)...(19): siRNA sense strand
gggcucggauugggacuga

SEQ ID NO: 1617492 - RNA, 19 nt, Homo sapiens
  misc_RNA (1)...(19): siRNA sense strand
uuucaagugugugcugaua

SEQ ID NO: 1617493 - RNA, 19 nt, Homo sapiens
  misc_RNA (1)...(19): siRNA sense strand
gaaaauccagccaugacua

SEQ ID NO: 1617494 - RNA, 19 nt, Homo sapiens
  misc_RNA (1)...(19): siRNA sense strand
gggaaaugaagaaaccaaa

SEQ ID NO: 1617495 - RNA, 19 nt, Homo sapiens
  misc_RNA (1)...(19): siRNA sense strand
gacugagauugcuuacaaa

SEQ ID NO: 1617496 - RNA, 19 nt, Homo sapiens
  misc_RNA (1)...(19): siRNA sense strand
ugagagcaagaguauagua

SEQ ID NO: 1617497 - RNA, 19 nt, Homo sapiens
  misc_RNA (1)...(19): siRNA sense strand
gcuggacugagauugcuua

SEQ ID NO: 1617498 - RNA, 19 nt, Homo sapiens
  misc_RNA (1)...(19): siRNA sense strand
gcuuuaauuguccugaaua

SEQ ID NO: 1617499 - RNA, 19 nt, Homo sapiens
  misc_RNA (1)...(19): siRNA sense strand
aaugagagcaagaguauag

SEQ ID NO: 1617500 - RNA, 19 nt, Homo sapiens
  misc_RNA (1)...(19): siRNA sense strand
uggccaaacuugcugaaca

SEQ ID NO: 1617501 - RNA, 19 nt, Homo sapiens
  misc_RNA (1)...(19): siRNA sense strand
ucuuaaacuucuggucaua

SEQ ID NO: 1617502 - RNA, 19 nt, Homo sapiens
  misc_RNA (1)...(19): siRNA sense strand
ggcuuaaaguauacaugaa

SEQ ID NO: 1617503 - RNA, 19 nt, Homo sapiens
  misc_RNA (1)...(19): siRNA sense strand
gggaucccauaguuaagga

SEQ ID NO: 1617504 - RNA, 19 nt, Homo sapiens
  misc_RNA (1)...(19): siRNA sense strand
guaacaaugcugcuuaugc

SEQ ID NO: 1617505 - RNA, 19 nt, Homo sapiens
  misc_RNA (1)...(19): siRNA sense strand
cgccugcuauugcauuuau

SEQ ID NO: 1617506 - RNA, 19 nt, Homo sapiens
  misc_RNA (1)...(19): siRNA sense strand
gauaagguucugggaauag

SEQ ID NO: 1617507 - RNA, 19 nt, Homo sapiens
  misc_RNA (1)...(19): siRNA sense strand
aaaaugaaccuacucagaa

SEQ ID NO: 1617508 - RNA, 19 nt, Homo sapiens
  misc_RNA (1)...(19): siRNA sense strand
gagaacaaagaaguuauuc

SEQ ID NO: 1617509 - RNA, 19 nt, Homo sapiens
  misc_RNA (1)...(19): siRNA sense strand
gguauaaugacuggucuga

SEQ ID NO: 1617510 - RNA, 19 nt, Homo sapiens
  misc_RNA (1)...(19): siRNA sense strand
ccaaacuugcugaacauau

SEQ ID NO: 1617511 - RNA, 19 nt, Homo sapiens
  misc_RNA (1)...(19): siRNA sense strand
caugcuugcuaauuccauu

SEQ ID NO: 1617512 - RNA, 19 nt, Homo sapiens
  misc_RNA (1)...(19): siRNA sense strand
gaucccauaguuaaggaaa

SEQ ID NO: 1617513 - RNA, 19 nt, Homo sapiens
  misc_RNA (1)...(19): siRNA sense strand
ggaagaaaaugaaccuacu

SEQ ID NO: 1617514 - RNA, 19 nt, Homo sapiens
  misc_RNA (1)...(19): siRNA sense strand
gaaacuccuuuugaauuug

SEQ ID NO: 1617515 - RNA, 19 nt, Homo sapiens
  misc_RNA (1)...(19): siRNA sense strand
ggaaaugaagaaaccaaac

SEQ ID NO: 1617516 - RNA, 19 nt, Homo sapiens
  misc_RNA (1)...(19): siRNA sense strand
uaaugaguaucagcacaug

SEQ ID NO: 1617517 - RNA, 19 nt, Homo sapiens
  misc_RNA (1)...(19): siRNA sense strand
agcgcaggcuuaaaguaua

SEQ ID NO: 1617518 - RNA, 19 nt, Homo sapiens
  misc_RNA (1)...(19): siRNA sense strand
gcauuuauagacugacuag

SEQ ID NO: 1617519 - RNA, 19 nt, Homo sapiens
  misc_RNA (1)...(19): siRNA sense strand
aaucagcgcaggcuuaaag

SEQ ID NO: 1617520 - RNA, 19 nt, Homo sapiens
  misc_RNA (1)...(19): siRNA sense strand
cuuaugcauuuaacagaga

SEQ ID NO: 1617521 - RNA, 19 nt, Homo sapiens
  misc_RNA (1)...(19): siRNA sense strand
auagaaagucaccaugauu

SEQ ID NO: 1617522 - RNA, 19 nt, Homo sapiens
  misc_RNA (1)...(19): siRNA sense strand
gggaauagaaagucaccau

SEQ ID NO: 1617523 - RNA, 19 nt, Homo sapiens
  misc_RNA (1)...(19): siRNA sense strand
agugugugcugauaagguu

SEQ ID NO: 1617524 - RNA, 19 nt, Homo sapiens
  misc_RNA (1)...(19): siRNA sense strand
cugagauugcuuacaaaua

SEQ ID NO: 1617525 - RNA, 19 nt, Homo sapiens
  misc_RNA (1)...(19): siRNA sense strand
gaauaacuugagugugaau

SEQ ID NO: 1617526 - RNA, 19 nt, Homo sapiens
  misc_RNA (1)...(19): siRNA sense strand
ggcuuuaauuguccugaau

SEQ ID NO: 1617527 - RNA, 19 nt, Homo sapiens
  misc_RNA (1)...(19): siRNA sense strand
gggcccaaguaccaucuuc

SEQ ID NO: 1617528 - RNA, 19 nt, Homo sapiens
  misc_RNA (1)...(19): siRNA sense strand
uggguaacaaugcugcuua

SEQ ID NO: 1617529 - RNA, 19 nt, Homo sapiens
  misc_RNA (1)...(19): siRNA sense strand
aggcuuaaaguauacauga

SEQ ID NO: 1617530 - RNA, 19 nt, Homo sapiens
  misc_RNA (1)...(19): siRNA sense strand
gaccgcaggccuggugauu

SEQ ID NO: 1617531 - RNA, 19 nt, Homo sapiens
  misc_RNA (1)...(19): siRNA sense strand
ugaugaugaugacagcaau

SEQ ID NO: 1617532 - RNA, 19 nt, Homo sapiens
  misc_RNA (1)...(19): siRNA sense strand
caaaugggaagaaaaugaa

SEQ ID NO: 1617533 - RNA, 19 nt, Homo sapiens
  misc_RNA (1)...(19): siRNA sense strand
uaacuugagugugaaugcu

SEQ ID NO: 1617534 - RNA, 19 nt, Homo sapiens
  misc_RNA (1)...(19): siRNA sense strand
cccaaagagccaggaauaa

SEQ ID NO: 1617535 - RNA, 19 nt, Homo sapiens
  misc_RNA (1)...(19): siRNA sense strand
ggcgccugcuauugcauuu

SEQ ID NO: 1617536 - RNA, 19 nt, Homo sapiens
  misc_RNA (1)...(19): siRNA sense strand
auaagguucugggaauaga

SEQ ID NO: 1617537 - RNA, 19 nt, Homo sapiens
  misc_RNA (1)...(19): siRNA sense strand
gcuggcgccugcuauugca

SEQ ID NO: 1617538 - RNA, 19 nt, Homo sapiens
  misc_RNA (1)...(19): siRNA sense strand
acaugaaucaaguguguga

SEQ ID NO: 1617539 - RNA, 19 nt, Homo sapiens
  misc_RNA (1)...(19): siRNA sense strand
aaccuacucagaaucaauu

SEQ ID NO: 1617540 - RNA, 19 nt, Homo sapiens
  misc_RNA (1)...(19): siRNA sense strand
gccaaacuugcugaacaua

SEQ ID NO: 1617541 - RNA, 19 nt, Homo sapiens
  misc_RNA (1)...(19): siRNA sense strand
ggacugagauugcuuacaa

SEQ ID NO: 1617542 - RNA, 19 nt, Homo sapiens
  misc_RNA (1)...(19): siRNA sense strand
ucacugggcucccucuuua

SEQ ID NO: 1617543 - RNA, 19 nt, Homo sapiens
  misc_RNA (1)...(19): siRNA sense strand
gcaagaguauaguauggua

SEQ ID NO: 1617544 - RNA, 19 nt, Homo sapiens
  misc_RNA (1)...(19): siRNA sense strand
ggucauauuugagaacaua

SEQ ID NO: 1617545 - RNA, 19 nt, Homo sapiens
  misc_RNA (1)...(19): siRNA sense strand
cugaauaacuugaguguga

SEQ ID NO: 1617546 - RNA, 19 nt, Homo sapiens
  misc_RNA (1)...(19): siRNA sense strand
gcaaugagagcaagaguau

SEQ ID NO: 1617547 - RNA, 19 nt, Homo sapiens
  misc_RNA (1)...(19): siRNA sense strand
gaacucaucugugcagcuu

SEQ ID NO: 1617548 - RNA, 19 nt, Homo sapiens
  misc_RNA (1)...(19): siRNA sense strand
caaacuugcugaacauaug

SEQ ID NO: 1617549 - RNA, 19 nt, Homo sapiens
  misc_RNA (1)...(19): siRNA sense strand
gaauagaaagucaccauga

SEQ ID NO: 1617550 - RNA, 19 nt, Homo sapiens
  misc_RNA (1)...(19): siRNA sense strand
uauaaugacuggucugaug

SEQ ID NO: 1617551 - RNA, 19 nt, Homo sapiens
  misc_RNA (1)...(19): siRNA sense strand
uaacaaugcugcuuaugca

SEQ ID NO: 1617552 - RNA, 19 nt, Homo sapiens
  misc_RNA (1)...(19): siRNA sense strand
ucgcaaagauucucaauac

SEQ ID NO: 1617553 - RNA, 19 nt, Homo sapiens
  misc_RNA (1)...(19): siRNA sense strand
gagcaagaguauaguaugg

SEQ ID NO: 1617554 - RNA, 19 nt, Homo sapiens
  misc_RNA (1)...(19): siRNA sense strand
gaaaaucagcgcaggcuua

SEQ ID NO: 1617555 - RNA, 19 nt, Homo sapiens
  misc_RNA (1)...(19): siRNA sense strand
gaaaacagaacaaggaaaa

SEQ ID NO: 1617556 - RNA, 19 nt, Homo sapiens
  misc_RNA (1)...(19): siRNA sense strand
gaaaagccuuauauucuug

SEQ ID NO: 1617557 - RNA, 19 nt, Homo sapiens
  misc_RNA (1)...(19): siRNA sense strand
gcaaagauucucaauacuc

SEQ ID NO: 1617558 - RNA, 19 nt, Homo sapiens
  misc_RNA (1)...(19): siRNA sense strand
ugacuggucugaugaugau

SEQ ID NO: 1617559 - RNA, 19 nt, Homo sapiens
  misc_RNA (1)...(19): siRNA sense strand
uagaaagucaccaugauuu

SEQ ID NO: 1617560 - RNA, 19 nt, Homo sapiens
  misc_RNA (1)...(19): siRNA sense strand
gagauugcuuacaaauaug

SEQ ID NO: 1617561 - RNA, 19 nt, Homo sapiens
  misc_RNA (1)...(19): siRNA sense strand
gaagaaaacagaacaagga

SEQ ID NO: 1617562 - RNA, 19 nt, Homo sapiens
  misc_RNA (1)...(19): siRNA sense strand
aaaugaaccuacucagaau

SEQ ID NO: 1617563 - RNA, 19 nt, Homo sapiens
  misc_RNA (1)...(19): siRNA sense strand
gaugaugacagcaaugaga

SEQ ID NO: 1617564 - RNA, 19 nt, Homo sapiens
  misc_RNA (1)...(19): siRNA sense strand
ugauaagguucugggaaua

SEQ ID NO: 1617565 - RNA, 19 nt, Homo sapiens
  misc_RNA (1)...(19): siRNA sense strand
cuaauuccauuucugacuu

SEQ ID NO: 1617566 - RNA, 19 nt, Homo sapiens
  misc_RNA (1)...(19): siRNA sense strand
ugggcucccucuuuaauaa

SEQ ID NO: 1617567 - RNA, 19 nt, Homo sapiens
  misc_RNA (1)...(19): siRNA sense strand
gaaaugaagaaaccaaacu

SEQ ID NO: 1617568 - RNA, 19 nt, Homo sapiens
  misc_RNA (1)...(19): siRNA sense strand
ggucugaugaugaugauga

SEQ ID NO: 1617569 - RNA, 19 nt, Homo sapiens
  misc_RNA (1)...(19): siRNA sense strand
auacaugaaucaagugugu

SEQ ID NO: 1617570 - RNA, 19 nt, Homo sapiens
  misc_RNA (1)...(19): siRNA sense strand
gaaaaugaaccuacucaga

SEQ ID NO: 1617571 - RNA, 19 nt, Homo sapiens
  misc_RNA (1)...(19): siRNA sense strand
gcacaugcuugcuaauucc

SEQ ID NO: 1617572 - RNA, 19 nt, Homo sapiens
  misc_RNA (1)...(19): siRNA sense strand
ccaauugucgcaaagauuc

SEQ ID NO: 1617573 - RNA, 19 nt, Homo sapiens
  misc_RNA (1)...(19): siRNA sense strand
gaaccuacucagaaucaau

SEQ ID NO: 1617574 - RNA, 19 nt, Homo sapiens
  misc_RNA (1)...(19): siRNA sense strand
gagagcaagaguauaguau

SEQ ID NO: 1617575 - RNA, 19 nt, Homo sapiens
  misc_RNA (1)...(19): siRNA sense strand
ggguaacaaugcugcuuau

SEQ ID NO: 1617576 - RNA, 19 nt, Homo sapiens
  misc_RNA (1)...(19): siRNA sense strand
uaauugcucuggguaacaa

SEQ ID NO: 1617577 - RNA, 19 nt, Homo sapiens
  misc_RNA (1)...(19): siRNA sense strand
gggcuacgccaggaaagua

SEQ ID NO: 1617578 - RNA, 19 nt, Homo sapiens
  misc_RNA (1)...(19): siRNA sense strand
ggccaaacuugcugaacau

SEQ ID NO: 1617579 - RNA, 19 nt, Homo sapiens
  misc_RNA (1)...(19): siRNA sense strand
aauagaaagucaccaugau

SEQ ID NO: 1617580 - RNA, 19 nt, Homo sapiens
  misc_RNA (1)...(19): siRNA sense strand
ucaagugugugcugauaag

SEQ ID NO: 1617581 - RNA, 19 nt, Homo sapiens
  misc_RNA (1)...(19): siRNA sense strand
guucuuugcuugguugaga

SEQ ID NO: 1617582 - RNA, 19 nt, Homo sapiens
  misc_RNA (1)...(19): siRNA sense strand
ugaauaacuugagugugaa

SEQ ID NO: 1617583 - RNA, 19 nt, Homo sapiens
  misc_RNA (1)...(19): siRNA sense strand
cugauaagguucugggaau

SEQ ID NO: 1617584 - RNA, 19 nt, Homo sapiens
  misc_RNA (1)...(19): siRNA sense strand
aaacuucuggucauauuug

SEQ ID NO: 1617585 - RNA, 19 nt, Homo sapiens
  misc_RNA (1)...(19): siRNA sense strand
cagcgcaggcuuaaaguau

SEQ ID NO: 1617586 - RNA, 19 nt, Homo sapiens
  misc_RNA (1)...(19): siRNA sense strand
gcgcaggcuuaaaguauac

SEQ ID NO: 1617587 - RNA, 19 nt, Homo sapiens
  misc_RNA (1)...(19): siRNA sense strand
ucccaaagagccaggaaua

SEQ ID NO: 1617588 - RNA, 19 nt, Homo sapiens
  misc_RNA (1)...(19): siRNA sense strand
gaaaauucauggccaaacu

SEQ ID NO: 1617589 - RNA, 19 nt, Homo sapiens
  misc_RNA (1)...(19): siRNA sense strand
gcucagggcccaaguacca

SEQ ID NO: 1617590 - RNA, 19 nt, Homo sapiens
  misc_RNA (1)...(19): siRNA sense strand
acaaucacuucucgcuuga

SEQ ID NO: 1617591 - RNA, 19 nt, Homo sapiens
  misc_RNA (1)...(19): siRNA sense strand
gggcucggauugggacuga

SEQ ID NO: 1617592 - RNA, 19 nt, Homo sapiens
  misc_RNA (1)...(19): siRNA sense strand
uuucaagugugugcugaua

SEQ ID NO: 1617593 - RNA, 19 nt, Homo sapiens
  misc_RNA (1)...(19): siRNA sense strand
gaaaauccagccaugacua

SEQ ID NO: 1617594 - RNA, 19 nt, Homo sapiens
  misc_RNA (1)...(19): siRNA sense strand
gggaaaugaagaaaccaaa

SEQ ID NO: 1617595 - RNA, 19 nt, Homo sapiens
  misc_RNA (1)...(19): siRNA sense strand
gacugagauugcuuacaaa

SEQ ID NO: 1617596 - RNA, 19 nt, Homo sapiens
  misc_RNA (1)...(19): siRNA sense strand
ugagagcaagaguauagua

SEQ ID NO: 1617597 - RNA, 19 nt, Homo sapiens
  misc_RNA (1)...(19): siRNA sense strand
gcuggacugagauugcuua

SEQ ID NO: 1617598 - RNA, 19 nt, Homo sapiens
  misc_RNA (1)...(19): siRNA sense strand
gcuuuaauuguccugaaua

SEQ ID NO: 1617599 - RNA, 19 nt, Homo sapiens
  misc_RNA (1)...(19): siRNA sense strand
aaugagagcaagaguauag

SEQ ID NO: 1617600 - RNA, 19 nt, Homo sapiens
  misc_RNA (1)...(19): siRNA sense strand
uggccaaacuugcugaaca

SEQ ID NO: 1617601 - RNA, 19 nt, Homo sapiens
  misc_RNA (1)...(19): siRNA sense strand
ucuuaaacuucuggucaua

SEQ ID NO: 1617602 - RNA, 19 nt, Homo sapiens
  misc_RNA (1)...(19): siRNA sense strand
ggcuuaaaguauacaugaa

SEQ ID NO: 1617603 - RNA, 19 nt, Homo sapiens
  misc_RNA (1)...(19): siRNA sense strand
gggaucccauaguuaagga

SEQ ID NO: 1617604 - RNA, 19 nt, Homo sapiens
  misc_RNA (1)...(19): siRNA sense strand
guaacaaugcugcuuaugc

SEQ ID NO: 1617605 - RNA, 19 nt, Homo sapiens
  misc_RNA (1)...(19): siRNA sense strand
cgccugcuauugcauuuau

SEQ ID NO: 1617606 - RNA, 19 nt, Homo sapiens
  misc_RNA (1)...(19): siRNA sense strand
gauaagguucugggaauag

SEQ ID NO: 1617607 - RNA, 19 nt, Homo sapiens
  misc_RNA (1)...(19): siRNA sense strand
aaaaugaaccuacucagaa

SEQ ID NO: 1617608 - RNA, 19 nt, Homo sapiens
  misc_RNA (1)...(19): siRNA sense strand
gagaacaaagaaguuauuc

SEQ ID NO: 1617609 - RNA, 19 nt, Homo sapiens
  misc_RNA (1)...(19): siRNA sense strand
gguauaaugacuggucuga

SEQ ID NO: 1617610 - RNA, 19 nt, Homo sapiens
  misc_RNA (1)...(19): siRNA sense strand
ccaaacuugcugaacauau

SEQ ID NO: 1617611 - RNA, 19 nt, Homo sapiens
  misc_RNA (1)...(19): siRNA sense strand
caugcuugcuaauuccauu

SEQ ID NO: 1617612 - RNA, 19 nt, Homo sapiens
  misc_RNA (1)...(19): siRNA sense strand
gaucccauaguuaaggaaa

SEQ ID NO: 1617613 - RNA, 19 nt, Homo sapiens
  misc_RNA (1)...(19): siRNA sense strand
ggaagaaaaugaaccuacu

SEQ ID NO: 1617614 - RNA, 19 nt, Homo sapiens
  misc_RNA (1)...(19): siRNA sense strand
gaaacuccuuuugaauuug

SEQ ID NO: 1617615 - RNA, 19 nt, Homo sapiens
  misc_RNA (1)...(19): siRNA sense strand
ggaaaugaagaaaccaaac

SEQ ID NO: 1617616 - RNA, 19 nt, Homo sapiens
  misc_RNA (1)...(19): siRNA sense strand
uaaugaguaucagcacaug

SEQ ID NO: 1617617 - RNA, 19 nt, Homo sapiens
  misc_RNA (1)...(19): siRNA sense strand
agcgcaggcuuaaaguaua

SEQ ID NO: 1617618 - RNA, 19 nt, Homo sapiens
  misc_RNA (1)...(19): siRNA sense strand
gcauuuauagacugacuag

SEQ ID NO: 1617619 - RNA, 19 nt, Homo sapiens
  misc_RNA (1)...(19): siRNA sense strand
aaucagcgcaggcuuaaag

SEQ ID NO: 1617620 - RNA, 19 nt, Homo sapiens
  misc_RNA (1)...(19): siRNA sense strand
cuuaugcauuuaacagaga

SEQ ID NO: 1617621 - RNA, 19 nt, Homo sapiens
  misc_RNA (1)...(19): siRNA sense strand
auagaaagucaccaugauu

SEQ ID NO: 1617622 - RNA, 19 nt, Homo sapiens
  misc_RNA (1)...(19): siRNA sense strand
gggaauagaaagucaccau

SEQ ID NO: 1617623 - RNA, 19 nt, Homo sapiens
  misc_RNA (1)...(19): siRNA sense strand
agugugugcugauaagguu

SEQ ID NO: 1617624 - RNA, 19 nt, Homo sapiens
  misc_RNA (1)...(19): siRNA sense strand
cugagauugcuuacaaaua

SEQ ID NO: 1617625 - RNA, 19 nt, Homo sapiens
  misc_RNA (1)...(19): siRNA sense strand
gaauaacuugagugugaau

SEQ ID NO: 1617626 - RNA, 19 nt, Homo sapiens
  misc_RNA (1)...(19): siRNA sense strand
ggcuuuaauuguccugaau

SEQ ID NO: 1617627 - RNA, 19 nt, Homo sapiens
  misc_RNA (1)...(19): siRNA sense strand
gggcccaaguaccaucuuc

SEQ ID NO: 1617628 - RNA, 19 nt, Homo sapiens
  misc_RNA (1)...(19): siRNA sense strand
uggguaacaaugcugcuua

SEQ ID NO: 1617629 - RNA, 19 nt, Homo sapiens
  misc_RNA (1)...(19): siRNA sense strand
aggcuuaaaguauacauga

SEQ ID NO: 1617630 - RNA, 19 nt, Homo sapiens
  misc_RNA (1)...(19): siRNA sense strand
gaccgcaggccuggugauu

SEQ ID NO: 1617631 - RNA, 19 nt, Homo sapiens
  misc_RNA (1)...(19): siRNA sense strand
ugaugaugaugacagcaau

SEQ ID NO: 1617632 - RNA, 19 nt, Homo sapiens
  misc_RNA (1)...(19): siRNA sense strand
caaaugggaagaaaaugaa

SEQ ID NO: 1617633 - RNA, 19 nt, Homo sapiens
  misc_RNA (1)...(19): siRNA sense strand
uaacuugagugugaaugcu

SEQ ID NO: 1617634 - RNA, 19 nt, Homo sapiens
  misc_RNA (1)...(19): siRNA sense strand
cccaaagagccaggaauaa

SEQ ID NO: 1617635 - RNA, 19 nt, Homo sapiens
  misc_RNA (1)...(19): siRNA sense strand
ggcgccugcuauugcauuu

SEQ ID NO: 1617636 - RNA, 19 nt, Homo sapiens
  misc_RNA (1)...(19): siRNA sense strand
auaagguucugggaauaga

SEQ ID NO: 1617637 - RNA, 19 nt, Homo sapiens
  misc_RNA (1)...(19): siRNA sense strand
gcuggcgccugcuauugca

SEQ ID NO: 1617638 - RNA, 19 nt, Homo sapiens
  misc_RNA (1)...(19): siRNA sense strand
acaugaaucaaguguguga

SEQ ID NO: 1617639 - RNA, 19 nt, Homo sapiens
  misc_RNA (1)...(19): siRNA sense strand
aaccuacucagaaucaauu

SEQ ID NO: 1617640 - RNA, 19 nt, Homo sapiens
  misc_RNA (1)...(19): siRNA sense strand
gccaaacuugcugaacaua

SEQ ID NO: 1617641 - RNA, 19 nt, Homo sapiens
  misc_RNA (1)...(19): siRNA sense strand
ggacugagauugcuuacaa

SEQ ID NO: 1617642 - RNA, 19 nt, Homo sapiens
  misc_RNA (1)...(19): siRNA sense strand
ucacugggcucccucuuua

SEQ ID NO: 1617643 - RNA, 19 nt, Homo sapiens
  misc_RNA (1)...(19): siRNA sense strand
gcaagaguauaguauggua

SEQ ID NO: 1617644 - RNA, 19 nt, Homo sapiens
  misc_RNA (1)...(19): siRNA sense strand
ggucauauuugagaacaua

SEQ ID NO: 1617645 - RNA, 19 nt, Homo sapiens
  misc_RNA (1)...(19): siRNA sense strand
cugaauaacuugaguguga

SEQ ID NO: 1617646 - RNA, 19 nt, Homo sapiens
  misc_RNA (1)...(19): siRNA sense strand
gcaaugagagcaagaguau

SEQ ID NO: 1617647 - RNA, 19 nt, Homo sapiens
  misc_RNA (1)...(19): siRNA sense strand
gaacucaucugugcagcuu

SEQ ID NO: 1617648 - RNA, 19 nt, Homo sapiens
  misc_RNA (1)...(19): siRNA sense strand
caaacuugcugaacauaug

SEQ ID NO: 1617649 - RNA, 19 nt, Homo sapiens
  misc_RNA (1)...(19): siRNA sense strand
gaauagaaagucaccauga

SEQ ID NO: 1617650 - RNA, 19 nt, Homo sapiens
  misc_RNA (1)...(19): siRNA sense strand
uauaaugacuggucugaug

SEQ ID NO: 1617651 - RNA, 19 nt, Homo sapiens
  misc_RNA (1)...(19): siRNA sense strand
uaacaaugcugcuuaugca

SEQ ID NO: 1617652 - RNA, 19 nt, Homo sapiens
  misc_RNA (1)...(19): siRNA sense strand
ucgcaaagauucucaauac

SEQ ID NO: 1617653 - RNA, 19 nt, Homo sapiens
  misc_RNA (1)...(19): siRNA sense strand
gagcaagaguauaguaugg

SEQ ID NO: 1617654 - RNA, 19 nt, Homo sapiens
  misc_RNA (1)...(19): siRNA sense strand
gaaaaucagcgcaggcuua

SEQ ID NO: 1617655 - RNA, 19 nt, Homo sapiens
  misc_RNA (1)...(19): siRNA sense strand
gaaaacagaacaaggaaaa

SEQ ID NO: 1617656 - RNA, 19 nt, Homo sapiens
  misc_RNA (1)...(19): siRNA sense strand
gaaaagccuuauauucuug

SEQ ID NO: 1617657 - RNA, 19 nt, Homo sapiens
  misc_RNA (1)...(19): siRNA sense strand
gcaaagauucucaauacuc

SEQ ID NO: 1617658 - RNA, 19 nt, Homo sapiens
  misc_RNA (1)...(19): siRNA sense strand
ugacuggucugaugaugau

SEQ ID NO: 1617659 - RNA, 19 nt, Homo sapiens
  misc_RNA (1)...(19): siRNA sense strand
uagaaagucaccaugauuu

SEQ ID NO: 1617660 - RNA, 19 nt, Homo sapiens
  misc_RNA (1)...(19): siRNA sense strand
gagauugcuuacaaauaug

SEQ ID NO: 1617661 - RNA, 19 nt, Homo sapiens
  misc_RNA (1)...(19): siRNA sense strand
gaagaaaacagaacaagga

SEQ ID NO: 1617662 - RNA, 19 nt, Homo sapiens
  misc_RNA (1)...(19): siRNA sense strand
aaaugaaccuacucagaau

SEQ ID NO: 1617663 - RNA, 19 nt, Homo sapiens
  misc_RNA (1)...(19): siRNA sense strand
gaugaugacagcaaugaga

SEQ ID NO: 1617664 - RNA, 19 nt, Homo sapiens
  misc_RNA (1)...(19): siRNA sense strand
ugauaagguucugggaaua

SEQ ID NO: 1617665 - RNA, 19 nt, Homo sapiens
  misc_RNA (1)...(19): siRNA sense strand
cuaauuccauuucugacuu

SEQ ID NO: 1617666 - RNA, 19 nt, Homo sapiens
  misc_RNA (1)...(19): siRNA sense strand
ugggcucccucuuuaauaa

SEQ ID NO: 1617667 - RNA, 19 nt, Homo sapiens
  misc_RNA (1)...(19): siRNA sense strand
gaaaugaagaaaccaaacu

SEQ ID NO: 1617668 - RNA, 19 nt, Homo sapiens
  misc_RNA (1)...(19): siRNA sense strand
ggucugaugaugaugauga

SEQ ID NO: 1617669 - RNA, 19 nt, Homo sapiens
  misc_RNA (1)...(19): siRNA sense strand
auacaugaaucaagugugu

SEQ ID NO: 1617670 - RNA, 19 nt, Homo sapiens
  misc_RNA (1)...(19): siRNA sense strand
gaaaaugaaccuacucaga

SEQ ID NO: 1617671 - RNA, 19 nt, Homo sapiens
  misc_RNA (1)...(19): siRNA sense strand
gcacaugcuugcuaauucc

SEQ ID NO: 1617672 - RNA, 19 nt, Homo sapiens
  misc_RNA (1)...(19): siRNA sense strand
ccaauugucgcaaagauuc

SEQ ID NO: 1617673 - RNA, 19 nt, Homo sapiens
  misc_RNA (1)...(19): siRNA sense strand
gaaccuacucagaaucaau

SEQ ID NO: 1617674 - RNA, 19 nt, Homo sapiens
  misc_RNA (1)...(19): siRNA sense strand
gagagcaagaguauaguau

SEQ ID NO: 1617675 - RNA, 19 nt, Homo sapiens
  misc_RNA (1)...(19): siRNA sense strand
ggguaacaaugcugcuuau

SEQ ID NO: 1617676 - RNA, 19 nt, Homo sapiens
  misc_RNA (1)...(19): siRNA sense strand
uaauugcucuggguaacaa

SEQ ID NO: 1617677 - RNA, 19 nt, Homo sapiens
  misc_RNA (1)...(19): siRNA sense strand
gggcuacgccaggaaagua

SEQ ID NO: 1617678 - RNA, 19 nt, Homo sapiens
  misc_RNA (1)...(19): siRNA sense strand
ggccaaacuugcugaacau

SEQ ID NO: 1617679 - RNA, 19 nt, Homo sapiens
  misc_RNA (1)...(19): siRNA sense strand
aauagaaagucaccaugau

SEQ ID NO: 1617680 - RNA, 19 nt, Homo sapiens
  misc_RNA (1)...(19): siRNA sense strand
ucaagugugugcugauaag

SEQ ID NO: 1617681 - RNA, 19 nt, Homo sapiens
  misc_RNA (1)...(19): siRNA sense strand
guucuuugcuugguugaga

SEQ ID NO: 1617682 - RNA, 19 nt, Homo sapiens
  misc_RNA (1)...(19): siRNA sense strand
ugaauaacuugagugugaa

SEQ ID NO: 1617683 - RNA, 19 nt, Homo sapiens
  misc_RNA (1)...(19): siRNA sense strand
cugauaagguucugggaau

SEQ ID NO: 1617684 - RNA, 19 nt, Homo sapiens
  misc_RNA (1)...(19): siRNA sense strand
aaacuucuggucauauuug

SEQ ID NO: 1617685 - RNA, 19 nt, Homo sapiens
  misc_RNA (1)...(19): siRNA sense strand
cagcgcaggcuuaaaguau

SEQ ID NO: 1617686 - RNA, 19 nt, Homo sapiens
  misc_RNA (1)...(19): siRNA sense strand
gcgcaggcuuaaaguauac

SEQ ID NO: 1617687 - RNA, 19 nt, Homo sapiens
  misc_RNA (1)...(19): siRNA sense strand
ucccaaagagccaggaaua

SEQ ID NO: 1617688 - RNA, 19 nt, Homo sapiens
  misc_RNA (1)...(19): siRNA sense strand
gaaaauucauggccaaacu

SEQ ID NO: 1617689 - RNA, 19 nt, Homo sapiens
  misc_RNA (1)...(19): siRNA sense strand
gcucagggcccaaguacca

SEQ ID NO: 1617690 - RNA, 19 nt, Homo sapiens
  misc_RNA (1)...(19): siRNA sense strand
acaaucacuucucgcuuga

SEQ ID NO: 1617691 - RNA, 19 nt, Homo sapiens
  misc_RNA (1)...(19): siRNA sense strand
gggcucggauugggacuga

SEQ ID NO: 1617692 - RNA, 19 nt, Homo sapiens
  misc_RNA (1)...(19): siRNA sense strand
uuucaagugugugcugaua

SEQ ID NO: 1617693 - RNA, 19 nt, Homo sapiens
  misc_RNA (1)...(19): siRNA sense strand
gaaaauccagccaugacua

SEQ ID NO: 1617694 - RNA, 19 nt, Homo sapiens
  misc_RNA (1)...(19): siRNA sense strand
gggaaaugaagaaaccaaa

SEQ ID NO: 1617695 - RNA, 19 nt, Homo sapiens
  misc_RNA (1)...(19): siRNA sense strand
gacugagauugcuuacaaa

SEQ ID NO: 1617696 - RNA, 19 nt, Homo sapiens
  misc_RNA (1)...(19): siRNA sense strand
ugagagcaagaguauagua

SEQ ID NO: 1617697 - RNA, 19 nt, Homo sapiens
  misc_RNA (1)...(19): siRNA sense strand
gcuggacugagauugcuua

SEQ ID NO: 1617698 - RNA, 19 nt, Homo sapiens
  misc_RNA (1)...(19): siRNA sense strand
gcuuuaauuguccugaaua

SEQ ID NO: 1617699 - RNA, 19 nt, Homo sapiens
  misc_RNA (1)...(19): siRNA sense strand
aaugagagcaagaguauag

SEQ ID NO: 1617700 - RNA, 19 nt, Homo sapiens
  misc_RNA (1)...(19): siRNA sense strand
uggccaaacuugcugaaca

SEQ ID NO: 1617701 - RNA, 19 nt, Homo sapiens
  misc_RNA (1)...(19): siRNA sense strand
ucuuaaacuucuggucaua

SEQ ID NO: 1617702 - RNA, 19 nt, Homo sapiens
  misc_RNA (1)...(19): siRNA sense strand
ggcuuaaaguauacaugaa

SEQ ID NO: 1617703 - RNA, 19 nt, Homo sapiens
  misc_RNA (1)...(19): siRNA sense strand
gggaucccauaguuaagga

SEQ ID NO: 1617704 - RNA, 19 nt, Homo sapiens
  misc_RNA (1)...(19): siRNA sense strand
guaacaaugcugcuuaugc

SEQ ID NO: 1617705 - RNA, 19 nt, Homo sapiens
  misc_RNA (1)...(19): siRNA sense strand
cgccugcuauugcauuuau

SEQ ID NO: 1617706 - RNA, 19 nt, Homo sapiens
  misc_RNA (1)...(19): siRNA sense strand
gauaagguucugggaauag

SEQ ID NO: 1617707 - RNA, 19 nt, Homo sapiens
  misc_RNA (1)...(19): siRNA sense strand
aaaaugaaccuacucagaa

SEQ ID NO: 1617708 - RNA, 19 nt, Homo sapiens
  misc_RNA (1)...(19): siRNA sense strand
gagaacaaagaaguuauuc

SEQ ID NO: 1617709 - RNA, 19 nt, Homo sapiens
  misc_RNA (1)...(19): siRNA sense strand
gguauaaugacuggucuga

SEQ ID NO: 1617710 - RNA, 19 nt, Homo sapiens
  misc_RNA (1)...(19): siRNA sense strand
ccaaacuugcugaacauau

SEQ ID NO: 1617711 - RNA, 19 nt, Homo sapiens
  misc_RNA (1)...(19): siRNA sense strand
caugcuugcuaauuccauu

SEQ ID NO: 1617712 - RNA, 19 nt, Homo sapiens
  misc_RNA (1)...(19): siRNA sense strand
gaucccauaguuaaggaaa

SEQ ID NO: 1617713 - RNA, 19 nt, Homo sapiens
  misc_RNA (1)...(19): siRNA sense strand
ggaagaaaaugaaccuacu

SEQ ID NO: 1617714 - RNA, 19 nt, Homo sapiens
  misc_RNA (1)...(19): siRNA sense strand
gaaacuccuuuugaauuug

SEQ ID NO: 1617715 - RNA, 19 nt, Homo sapiens
  misc_RNA (1)...(19): siRNA sense strand
ggaaaugaagaaaccaaac

SEQ ID NO: 1617716 - RNA, 19 nt, Homo sapiens
  misc_RNA (1)...(19): siRNA sense strand
uaaugaguaucagcacaug

SEQ ID NO: 1617717 - RNA, 19 nt, Homo sapiens
  misc_RNA (1)...(19): siRNA sense strand
agcgcaggcuuaaaguaua

SEQ ID NO: 1617718 - RNA, 19 nt, Homo sapiens
  misc_RNA (1)...(19): siRNA sense strand
gcauuuauagacugacuag

SEQ ID NO: 1617719 - RNA, 19 nt, Homo sapiens
  misc_RNA (1)...(19): siRNA sense strand
aaucagcgcaggcuuaaag

SEQ ID NO: 1617720 - RNA, 19 nt, Homo sapiens
  misc_RNA (1)...(19): siRNA sense strand
cuuaugcauuuaacagaga

SEQ ID NO: 1617721 - RNA, 19 nt, Homo sapiens
  misc_RNA (1)...(19): siRNA sense strand
auagaaagucaccaugauu

SEQ ID NO: 1617722 - RNA, 19 nt, Homo sapiens
  misc_RNA (1)...(19): siRNA sense strand
gggaauagaaagucaccau

SEQ ID NO: 1617723 - RNA, 19 nt, Homo sapiens
  misc_RNA (1)...(19): siRNA sense strand
agugugugcugauaagguu

SEQ ID NO: 1617724 - RNA, 19 nt, Homo sapiens
  misc_RNA (1)...(19): siRNA sense strand
cugagauugcuuacaaaua

SEQ ID NO: 1617725 - RNA, 19 nt, Homo sapiens
  misc_RNA (1)...(19): siRNA sense strand
gaauaacuugagugugaau

SEQ ID NO: 1617726 - RNA, 19 nt, Homo sapiens
  misc_RNA (1)...(19): siRNA sense strand
ggcuuuaauuguccugaau

SEQ ID NO: 1617727 - RNA, 19 nt, Homo sapiens
  misc_RNA (1)...(19): siRNA sense strand
gggcccaaguaccaucuuc

SEQ ID NO: 1617728 - RNA, 19 nt, Homo sapiens
  misc_RNA (1)...(19): siRNA sense strand
uggguaacaaugcugcuua

SEQ ID NO: 1617729 - RNA, 19 nt, Homo sapiens
  misc_RNA (1)...(19): siRNA sense strand
aggcuuaaaguauacauga

SEQ ID NO: 1617730 - RNA, 19 nt, Homo sapiens
  misc_RNA (1)...(19): siRNA sense strand
gaccgcaggccuggugauu

SEQ ID NO: 1617731 - RNA, 19 nt, Homo sapiens
  misc_RNA (1)...(19): siRNA sense strand
ugaugaugaugacagcaau

SEQ ID NO: 1617732 - RNA, 19 nt, Homo sapiens
  misc_RNA (1)...(19): siRNA sense strand
caaaugggaagaaaaugaa

SEQ ID NO: 1617733 - RNA, 19 nt, Homo sapiens
  misc_RNA (1)...(19): siRNA sense strand
uaacuugagugugaaugcu

SEQ ID NO: 1617734 - RNA, 19 nt, Homo sapiens
  misc_RNA (1)...(19): siRNA sense strand
cccaaagagccaggaauaa

SEQ ID NO: 1617735 - RNA, 19 nt, Homo sapiens
  misc_RNA (1)...(19): siRNA sense strand
ggcgccugcuauugcauuu

SEQ ID NO: 1617736 - RNA, 19 nt, Homo sapiens
  misc_RNA (1)...(19): siRNA sense strand
auaagguucugggaauaga

SEQ ID NO: 1617737 - RNA, 19 nt, Homo sapiens
  misc_RNA (1)...(19): siRNA sense strand
gcuggcgccugcuauugca

SEQ ID NO: 1617738 - RNA, 19 nt, Homo sapiens
  misc_RNA (1)...(19): siRNA sense strand
acaugaaucaaguguguga

SEQ ID NO: 1617739 - RNA, 19 nt, Homo sapiens
  misc_RNA (1)...(19): siRNA sense strand
aaccuacucagaaucaauu

SEQ ID NO: 1617740 - RNA, 19 nt, Homo sapiens
  misc_RNA (1)...(19): siRNA sense strand
gccaaacuugcugaacaua

SEQ ID NO: 1617741 - RNA, 19 nt, Homo sapiens
  misc_RNA (1)...(19): siRNA sense strand
gagcagaaguguuuaacua

SEQ ID NO: 1617742 - RNA, 19 nt, Homo sapiens
  misc_RNA (1)...(19): siRNA sense strand
gcagaaguguuuaacuaua

SEQ ID NO: 1617743 - RNA, 19 nt, Homo sapiens
  misc_RNA (1)...(19): siRNA sense strand
gagcaacaaugccaauuau

SEQ ID NO: 1617744 - RNA, 19 nt, Homo sapiens
  misc_RNA (1)...(19): siRNA sense strand
ugaauaaagugauggauga

SEQ ID NO: 1617745 - RNA, 19 nt, Homo sapiens
  misc_RNA (1)...(19): siRNA sense strand
gaacaucagcugccaagaa

SEQ ID NO: 1617746 - RNA, 19 nt, Homo sapiens
  misc_RNA (1)...(19): siRNA sense strand
gguacugugucuacaaaua

SEQ ID NO: 1617747 - RNA, 19 nt, Homo sapiens
  misc_RNA (1)...(19): siRNA sense strand
ggagagaccagaccaagaa

SEQ ID NO: 1617748 - RNA, 19 nt, Homo sapiens
  misc_RNA (1)...(19): siRNA sense strand
ggcagaagcucccagagaa

SEQ ID NO: 1617749 - RNA, 19 nt, Homo sapiens
  misc_RNA (1)...(19): siRNA sense strand
guacaugaauaaagugaug

SEQ ID NO: 1617750 - RNA, 19 nt, Homo sapiens
  misc_RNA (1)...(19): siRNA sense strand
aaacugauccacacauuaa

SEQ ID NO: 1617751 - RNA, 19 nt, Homo sapiens
  misc_RNA (1)...(19): siRNA sense strand
gcaacaaugccaauuauuc

SEQ ID NO: 1617752 - RNA, 19 nt, Homo sapiens
  misc_RNA (1)...(19): siRNA sense strand
ugaauaaccugagugagaa

SEQ ID NO: 1617753 - RNA, 19 nt, Homo sapiens
  misc_RNA (1)...(19): siRNA sense strand
gcuaagagccggauucaca

SEQ ID NO: 1617754 - RNA, 19 nt, Homo sapiens
  misc_RNA (1)...(19): siRNA sense strand
ucauuuaguucccucuaua

SEQ ID NO: 1617755 - RNA, 19 nt, Homo sapiens
  misc_RNA (1)...(19): siRNA sense strand
caacaaugccaauuauuca

SEQ ID NO: 1617756 - RNA, 19 nt, Homo sapiens
  misc_RNA (1)...(19): siRNA sense strand
ggacagggcccaggaugaa

SEQ ID NO: 1617757 - RNA, 19 nt, Homo sapiens
  misc_RNA (1)...(19): siRNA sense strand
ucucagagcagaaguguuu

SEQ ID NO: 1617758 - RNA, 19 nt, Homo sapiens
  misc_RNA (1)...(19): siRNA sense strand
uuaaugcccuuacucuauu

SEQ ID NO: 1617759 - RNA, 19 nt, Homo sapiens
  misc_RNA (1)...(19): siRNA sense strand
uuaguucccucuauaauuc

SEQ ID NO: 1617760 - RNA, 19 nt, Homo sapiens
  misc_RNA (1)...(19): siRNA sense strand
ggaaucagaaauccuuauu

SEQ ID NO: 1617761 - RNA, 19 nt, Homo sapiens
  misc_RNA (1)...(19): siRNA sense strand
gaaaagcaaaguugaagua

SEQ ID NO: 1617762 - RNA, 19 nt, Homo sapiens
  misc_RNA (1)...(19): siRNA sense strand
caagugccagcaucauuua

SEQ ID NO: 1617763 - RNA, 19 nt, Homo sapiens
  misc_RNA (1)...(19): siRNA sense strand
ccagauauguugaagaaac

SEQ ID NO: 1617764 - RNA, 19 nt, Homo sapiens
  misc_RNA (1)...(19): siRNA sense strand
cagaaguguuuaacuauag

SEQ ID NO: 1617765 - RNA, 19 nt, Homo sapiens
  misc_RNA (1)...(19): siRNA sense strand
aacaucagcugccaagaaa

SEQ ID NO: 1617766 - RNA, 19 nt, Homo sapiens
  misc_RNA (1)...(19): siRNA sense strand
aaaucaccaugaccucuua

SEQ ID NO: 1617767 - RNA, 19 nt, Homo sapiens
  misc_RNA (1)...(19): siRNA sense strand
guaaccaggucccggaaug

SEQ ID NO: 1617768 - RNA, 19 nt, Homo sapiens
  misc_RNA (1)...(19): siRNA sense strand
uggcagaggucccugauuc

SEQ ID NO: 1617769 - RNA, 19 nt, Homo sapiens
  misc_RNA (1)...(19): siRNA sense strand
cagaaauccuuauuaaugc

SEQ ID NO: 1617770 - RNA, 19 nt, Homo sapiens
  misc_RNA (1)...(19): siRNA sense strand
ccaagugccagcaucauuu

SEQ ID NO: 1617771 - RNA, 19 nt, Homo sapiens
  misc_RNA (1)...(19): siRNA sense strand
gcaauggcuucugcaauag

SEQ ID NO: 1617772 - RNA, 19 nt, Homo sapiens
  misc_RNA (1)...(19): siRNA sense strand
ggcuagagcugggcuaaga

SEQ ID NO: 1617773 - RNA, 19 nt, Homo sapiens
  misc_RNA (1)...(19): siRNA sense strand
ugagcaacaaugccaauua

SEQ ID NO: 1617774 - RNA, 19 nt, Homo sapiens
  misc_RNA (1)...(19): siRNA sense strand
gaagacccguugccaugca

SEQ ID NO: 1617775 - RNA, 19 nt, Homo sapiens
  misc_RNA (1)...(19): siRNA sense strand
uugcaaacaugaucaacaa

SEQ ID NO: 1617776 - RNA, 19 nt, Homo sapiens
  misc_RNA (1)...(19): siRNA sense strand
aaagcaaaguugaaguaga

SEQ ID NO: 1617777 - RNA, 19 nt, Homo sapiens
  misc_RNA (1)...(19): siRNA sense strand
caagagacaauccgcaaau

SEQ ID NO: 1617778 - RNA, 19 nt, Homo sapiens
  misc_RNA (1)...(19): siRNA sense strand
gagaauggccaagcccaaa

SEQ ID NO: 1617779 - RNA, 19 nt, Homo sapiens
  misc_RNA (1)...(19): siRNA sense strand
caccaugaccucuuaguga

SEQ ID NO: 1617780 - RNA, 19 nt, Homo sapiens
  misc_RNA (1)...(19): siRNA sense strand
uggaguguguguuaagaaa

SEQ ID NO: 1617781 - RNA, 19 nt, Homo sapiens
  misc_RNA (1)...(19): siRNA sense strand
cuauaauucuuacguggaa

SEQ ID NO: 1617782 - RNA, 19 nt, Homo sapiens
  misc_RNA (1)...(19): siRNA sense strand
uaaccugagugagaauuau

SEQ ID NO: 1617783 - RNA, 19 nt, Homo sapiens
  misc_RNA (1)...(19): siRNA sense strand
gaccagaccaagaagagaa

SEQ ID NO: 1617784 - RNA, 19 nt, Homo sapiens
  misc_RNA (1)...(19): siRNA sense strand
caucuggaguguguguuaa

SEQ ID NO: 1617785 - RNA, 19 nt, Homo sapiens
  misc_RNA (1)...(19): siRNA sense strand
guccuugccuugcuucaga

SEQ ID NO: 1617786 - RNA, 19 nt, Homo sapiens
  misc_RNA (1)...(19): siRNA sense strand
gugccagcaucauuuaguu

SEQ ID NO: 1617787 - RNA, 19 nt, Homo sapiens
  misc_RNA (1)...(19): siRNA sense strand
gauccacacauuaaggaaa

SEQ ID NO: 1617788 - RNA, 19 nt, Homo sapiens
  misc_RNA (1)...(19): siRNA sense strand
caaaacugauccacacauu

SEQ ID NO: 1617789 - RNA, 19 nt, Homo sapiens
  misc_RNA (1)...(19): siRNA sense strand
aagcaaaguugaaguagac

SEQ ID NO: 1617790 - RNA, 19 nt, Homo sapiens
  misc_RNA (1)...(19): siRNA sense strand
caaaguugaaguagacgaa

SEQ ID NO: 1617791 - RNA, 19 nt, Homo sapiens
  misc_RNA (1)...(19): siRNA sense strand
agaaaucugaugauccuuu

SEQ ID NO: 1617792 - RNA, 19 nt, Homo sapiens
  misc_RNA (1)...(19): siRNA sense strand
aauuagagccuuagcaaau

SEQ ID NO: 1617793 - RNA, 19 nt, Homo sapiens
  misc_RNA (1)...(19): siRNA sense strand
auccagauauguugaagaa

SEQ ID NO: 1617794 - RNA, 19 nt, Homo sapiens
  misc_RNA (1)...(19): siRNA sense strand
uaaugcccuuacucuauuu

SEQ ID NO: 1617795 - RNA, 19 nt, Homo sapiens
  misc_RNA (1)...(19): siRNA sense strand
aagagacaauccgcaaauu

SEQ ID NO: 1617796 - RNA, 19 nt, Homo sapiens
  misc_RNA (1)...(19): siRNA sense strand
gcaaacaugaucaacaaaa

SEQ ID NO: 1617797 - RNA, 19 nt, Homo sapiens
  misc_RNA (1)...(19): siRNA sense strand
acacagagucagauucaga

SEQ ID NO: 1617798 - RNA, 19 nt, Homo sapiens
  misc_RNA (1)...(19): siRNA sense strand
caaaucaccaugaccucuu

SEQ ID NO: 1617799 - RNA, 19 nt, Homo sapiens
  misc_RNA (1)...(19): siRNA sense strand
ugaaauugaugagauucug

SEQ ID NO: 1617800 - RNA, 19 nt, Homo sapiens
  misc_RNA (1)...(19): siRNA sense strand
gggcuuccguccuggagau

SEQ ID NO: 1617801 - RNA, 19 nt, Homo sapiens
  misc_RNA (1)...(19): siRNA sense strand
caagggcaagggcaagaaa

SEQ ID NO: 1617802 - RNA, 19 nt, Homo sapiens
  misc_RNA (1)...(19): siRNA sense strand
accaugaccucuuagugaa

SEQ ID NO: 1617803 - RNA, 19 nt, Homo sapiens
  misc_RNA (1)...(19): siRNA sense strand
ccucugcucuggacacagu

SEQ ID NO: 1617804 - RNA, 19 nt, Homo sapiens
  misc_RNA (1)...(19): siRNA sense strand
acagguagcuuugcucacu

SEQ ID NO: 1617805 - RNA, 19 nt, Homo sapiens
  misc_RNA (1)...(19): siRNA sense strand
ccuuaauggccaugaauaa

SEQ ID NO: 1617806 - RNA, 19 nt, Homo sapiens
  misc_RNA (1)...(19): siRNA sense strand
gacuggagcgguacccaaa

SEQ ID NO: 1617807 - RNA, 19 nt, Homo sapiens
  misc_RNA (1)...(19): siRNA sense strand
augaauaaccugagugaga

SEQ ID NO: 1617808 - RNA, 19 nt, Homo sapiens
  misc_RNA (1)...(19): siRNA sense strand
ccaugaauaaccugaguga

SEQ ID NO: 1617809 - RNA, 19 nt, Homo sapiens
  misc_RNA (1)...(19): siRNA sense strand
ggccaugaauaaccugagu

SEQ ID NO: 1617810 - RNA, 19 nt, Homo sapiens
  misc_RNA (1)...(19): siRNA sense strand
guacugugucuacaaauac

SEQ ID NO: 1617811 - RNA, 19 nt, Homo sapiens
  misc_RNA (1)...(19): siRNA sense strand
gcaagaaaagcaaaguuga

SEQ ID NO: 1617812 - RNA, 19 nt, Homo sapiens
  misc_RNA (1)...(19): siRNA sense strand
gcugcagagucuccuggaa

SEQ ID NO: 1617813 - RNA, 19 nt, Homo sapiens
  misc_RNA (1)...(19): siRNA sense strand
uuagagccuuagcaaauca

SEQ ID NO: 1617814 - RNA, 19 nt, Homo sapiens
  misc_RNA (1)...(19): siRNA sense strand
ucagagcagaaguguuuaa

SEQ ID NO: 1617815 - RNA, 19 nt, Homo sapiens
  misc_RNA (1)...(19): siRNA sense strand
gggagagaccagaccaaga

SEQ ID NO: 1617816 - RNA, 19 nt, Homo sapiens
  misc_RNA (1)...(19): siRNA sense strand
cagauauguugaagaaacu

SEQ ID NO: 1617817 - RNA, 19 nt, Homo sapiens
  misc_RNA (1)...(19): siRNA sense strand
gaaaauccagauauguuga

SEQ ID NO: 1617818 - RNA, 19 nt, Homo sapiens
  misc_RNA (1)...(19): siRNA sense strand
gcaagggcaagggcaagaa

SEQ ID NO: 1617819 - RNA, 19 nt, Homo sapiens
  misc_RNA (1)...(19): siRNA sense strand
gccaauuauucaugcaauc

SEQ ID NO: 1617820 - RNA, 19 nt, Homo sapiens
  misc_RNA (1)...(19): siRNA sense strand
uaaggccgaaucaguaguu

SEQ ID NO: 1617821 - RNA, 19 nt, Homo sapiens
  misc_RNA (1)...(19): siRNA sense strand
ucgggaugcuggcugugua

SEQ ID NO: 1617822 - RNA, 19 nt, Homo sapiens
  misc_RNA (1)...(19): siRNA sense strand
gcccuuacucuauuugaga

SEQ ID NO: 1617823 - RNA, 19 nt, Homo sapiens
  misc_RNA (1)...(19): siRNA sense strand
cauuuaguucccucuauaa

SEQ ID NO: 1617824 - RNA, 19 nt, Homo sapiens
  misc_RNA (1)...(19): siRNA sense strand
cugguacugugucuacaaa

SEQ ID NO: 1617825 - RNA, 19 nt, Homo sapiens
  misc_RNA (1)...(19): siRNA sense strand
ggucccugauucugaggaa

SEQ ID NO: 1617826 - RNA, 19 nt, Homo sapiens
  misc_RNA (1)...(19): siRNA sense strand
gagaccagaccaagaagag

SEQ ID NO: 1617827 - RNA, 19 nt, Homo sapiens
  misc_RNA (1)...(19): siRNA sense strand
gccuuaauggccaugaaua

SEQ ID NO: 1617828 - RNA, 19 nt, Homo sapiens
  misc_RNA (1)...(19): siRNA sense strand
ccaauuauucaugcaauca

SEQ ID NO: 1617829 - RNA, 19 nt, Homo sapiens
  misc_RNA (1)...(19): siRNA sense strand
gcagaagcucccagagaag

SEQ ID NO: 1617830 - RNA, 19 nt, Homo sapiens
  misc_RNA (1)...(19): siRNA sense strand
ucaagagacaauccgcaaa

SEQ ID NO: 1617831 - RNA, 19 nt, Homo sapiens
  misc_RNA (1)...(19): siRNA sense strand
caugaccucuuagugaaag

SEQ ID NO: 1617832 - RNA, 19 nt, Homo sapiens
  misc_RNA (1)...(19): siRNA sense strand
auuaaugcccuuacucuau

SEQ ID NO: 1617833 - RNA, 19 nt, Homo sapiens
  misc_RNA (1)...(19): siRNA sense strand
cucagcaguucaaguaguu

SEQ ID NO: 1617834 - RNA, 19 nt, Homo sapiens
  misc_RNA (1)...(19): siRNA sense strand
gaauaaagugauggaugau

SEQ ID NO: 1617835 - RNA, 19 nt, Homo sapiens
  misc_RNA (1)...(19): siRNA sense strand
gaauaaccugagugagaau

SEQ ID NO: 1617836 - RNA, 19 nt, Homo sapiens
  misc_RNA (1)...(19): siRNA sense strand
uggcagaagcucccagaga

SEQ ID NO: 1617837 - RNA, 19 nt, Homo sapiens
  misc_RNA (1)...(19): siRNA sense strand
acaucuggaguguguguua

SEQ ID NO: 1617838 - RNA, 19 nt, Homo sapiens
  misc_RNA (1)...(19): siRNA sense strand
ccucuuagugaaagugaaa

SEQ ID NO: 1617839 - RNA, 19 nt, Homo sapiens
  misc_RNA (1)...(19): siRNA sense strand
aaauuagagccuuagcaaa

SEQ ID NO: 1617840 - RNA, 19 nt, Homo sapiens
  misc_RNA (1)...(19): siRNA sense strand
gaguguguguuaagaaaau

SEQ ID NO: 1617841 - RNA, 19 nt, Homo sapiens
  misc_RNA (1)...(19): siRNA sense strand
gagcagaaguguuuaacua

SEQ ID NO: 1617842 - RNA, 19 nt, Homo sapiens
  misc_RNA (1)...(19): siRNA sense strand
gcagaaguguuuaacuaua

SEQ ID NO: 1617843 - RNA, 19 nt, Homo sapiens
  misc_RNA (1)...(19): siRNA sense strand
gagcaacaaugccaauuau

SEQ ID NO: 1617844 - RNA, 19 nt, Homo sapiens
  misc_RNA (1)...(19): siRNA sense strand
ugaauaaagugauggauga

SEQ ID NO: 1617845 - RNA, 19 nt, Homo sapiens
  misc_RNA (1)...(19): siRNA sense strand
gaacaucagcugccaagaa

SEQ ID NO: 1617846 - RNA, 19 nt, Homo sapiens
  misc_RNA (1)...(19): siRNA sense strand
gguacugugucuacaaaua

SEQ ID NO: 1617847 - RNA, 19 nt, Homo sapiens
  misc_RNA (1)...(19): siRNA sense strand
ggagagaccagaccaagaa

SEQ ID NO: 1617848 - RNA, 19 nt, Homo sapiens
  misc_RNA (1)...(19): siRNA sense strand
ggcagaagcucccagagaa

SEQ ID NO: 1617849 - RNA, 19 nt, Homo sapiens
  misc_RNA (1)...(19): siRNA sense strand
guacaugaauaaagugaug

SEQ ID NO: 1617850 - RNA, 19 nt, Homo sapiens
  misc_RNA (1)...(19): siRNA sense strand
aaacugauccacacauuaa

SEQ ID NO: 1617851 - RNA, 19 nt, Homo sapiens
  misc_RNA (1)...(19): siRNA sense strand
gcaacaaugccaauuauuc

SEQ ID NO: 1617852 - RNA, 19 nt, Homo sapiens
  misc_RNA (1)...(19): siRNA sense strand
ugaauaaccugagugagaa

SEQ ID NO: 1617853 - RNA, 19 nt, Homo sapiens
  misc_RNA (1)...(19): siRNA sense strand
gcuaagagccggauucaca

SEQ ID NO: 1617854 - RNA, 19 nt, Homo sapiens
  misc_RNA (1)...(19): siRNA sense strand
ucauuuaguucccucuaua

SEQ ID NO: 1617855 - RNA, 19 nt, Homo sapiens
  misc_RNA (1)...(19): siRNA sense strand
caacaaugccaauuauuca

SEQ ID NO: 1617856 - RNA, 19 nt, Homo sapiens
  misc_RNA (1)...(19): siRNA sense strand
ggacagggcccaggaugaa

SEQ ID NO: 1617857 - RNA, 19 nt, Homo sapiens
  misc_RNA (1)...(19): siRNA sense strand
ucucagagcagaaguguuu

SEQ ID NO: 1617858 - RNA, 19 nt, Homo sapiens
  misc_RNA (1)...(19): siRNA sense strand
uuaaugcccuuacucuauu

SEQ ID NO: 1617859 - RNA, 19 nt, Homo sapiens
  misc_RNA (1)...(19): siRNA sense strand
uuaguucccucuauaauuc

SEQ ID NO: 1617860 - RNA, 19 nt, Homo sapiens
  misc_RNA (1)...(19): siRNA sense strand
ggaaucagaaauccuuauu

SEQ ID NO: 1617861 - RNA, 19 nt, Homo sapiens
  misc_RNA (1)...(19): siRNA sense strand
gaaaagcaaaguugaagua

SEQ ID NO: 1617862 - RNA, 19 nt, Homo sapiens
  misc_RNA (1)...(19): siRNA sense strand
caagugccagcaucauuua

SEQ ID NO: 1617863 - RNA, 19 nt, Homo sapiens
  misc_RNA (1)...(19): siRNA sense strand
ccagauauguugaagaaac

SEQ ID NO: 1617864 - RNA, 19 nt, Homo sapiens
  misc_RNA (1)...(19): siRNA sense strand
cagaaguguuuaacuauag

SEQ ID NO: 1617865 - RNA, 19 nt, Homo sapiens
  misc_RNA (1)...(19): siRNA sense strand
aacaucagcugccaagaaa

SEQ ID NO: 1617866 - RNA, 19 nt, Homo sapiens
  misc_RNA (1)...(19): siRNA sense strand
aaaucaccaugaccucuua

SEQ ID NO: 1617867 - RNA, 19 nt, Homo sapiens
  misc_RNA (1)...(19): siRNA sense strand
guaaccaggucccggaaug

SEQ ID NO: 1617868 - RNA, 19 nt, Homo sapiens
  misc_RNA (1)...(19): siRNA sense strand
uggcagaggucccugauuc

SEQ ID NO: 1617869 - RNA, 19 nt, Homo sapiens
  misc_RNA (1)...(19): siRNA sense strand
cagaaauccuuauuaaugc

SEQ ID NO: 1617870 - RNA, 19 nt, Homo sapiens
  misc_RNA (1)...(19): siRNA sense strand
ccaagugccagcaucauuu

SEQ ID NO: 1617871 - RNA, 19 nt, Homo sapiens
  misc_RNA (1)...(19): siRNA sense strand
gcaauggcuucugcaauag

SEQ ID NO: 1617872 - RNA, 19 nt, Homo sapiens
  misc_RNA (1)...(19): siRNA sense strand
ggcuagagcugggcuaaga

SEQ ID NO: 1617873 - RNA, 19 nt, Homo sapiens
  misc_RNA (1)...(19): siRNA sense strand
ugagcaacaaugccaauua

SEQ ID NO: 1617874 - RNA, 19 nt, Homo sapiens
  misc_RNA (1)...(19): siRNA sense strand
gaagacccguugccaugca

SEQ ID NO: 1617875 - RNA, 19 nt, Homo sapiens
  misc_RNA (1)...(19): siRNA sense strand
uugcaaacaugaucaacaa

SEQ ID NO: 1617876 - RNA, 19 nt, Homo sapiens
  misc_RNA (1)...(19): siRNA sense strand
aaagcaaaguugaaguaga

SEQ ID NO: 1617877 - RNA, 19 nt, Homo sapiens
  misc_RNA (1)...(19): siRNA sense strand
caagagacaauccgcaaau

SEQ ID NO: 1617878 - RNA, 19 nt, Homo sapiens
  misc_RNA (1)...(19): siRNA sense strand
gagaauggccaagcccaaa

SEQ ID NO: 1617879 - RNA, 19 nt, Homo sapiens
  misc_RNA (1)...(19): siRNA sense strand
caccaugaccucuuaguga

SEQ ID NO: 1617880 - RNA, 19 nt, Homo sapiens
  misc_RNA (1)...(19): siRNA sense strand
uggaguguguguuaagaaa

SEQ ID NO: 1617881 - RNA, 19 nt, Homo sapiens
  misc_RNA (1)...(19): siRNA sense strand
cuauaauucuuacguggaa

SEQ ID NO: 1617882 - RNA, 19 nt, Homo sapiens
  misc_RNA (1)...(19): siRNA sense strand
uaaccugagugagaauuau

SEQ ID NO: 1617883 - RNA, 19 nt, Homo sapiens
  misc_RNA (1)...(19): siRNA sense strand
gaccagaccaagaagagaa

SEQ ID NO: 1617884 - RNA, 19 nt, Homo sapiens
  misc_RNA (1)...(19): siRNA sense strand
caucuggaguguguguuaa

SEQ ID NO: 1617885 - RNA, 19 nt, Homo sapiens
  misc_RNA (1)...(19): siRNA sense strand
guccuugccuugcuucaga

SEQ ID NO: 1617886 - RNA, 19 nt, Homo sapiens
  misc_RNA (1)...(19): siRNA sense strand
gugccagcaucauuuaguu

SEQ ID NO: 1617887 - RNA, 19 nt, Homo sapiens
  misc_RNA (1)...(19): siRNA sense strand
gauccacacauuaaggaaa

SEQ ID NO: 1617888 - RNA, 19 nt, Homo sapiens
  misc_RNA (1)...(19): siRNA sense strand
caaaacugauccacacauu

SEQ ID NO: 1617889 - RNA, 19 nt, Homo sapiens
  misc_RNA (1)...(19): siRNA sense strand
aagcaaaguugaaguagac

SEQ ID NO: 1617890 - RNA, 19 nt, Homo sapiens
  misc_RNA (1)...(19): siRNA sense strand
caaaguugaaguagacgaa

SEQ ID NO: 1617891 - RNA, 19 nt, Homo sapiens
  misc_RNA (1)...(19): siRNA sense strand
agaaaucugaugauccuuu

SEQ ID NO: 1617892 - RNA, 19 nt, Homo sapiens
  misc_RNA (1)...(19): siRNA sense strand
aauuagagccuuagcaaau

SEQ ID NO: 1617893 - RNA, 19 nt, Homo sapiens
  misc_RNA (1)...(19): siRNA sense strand
auccagauauguugaagaa

SEQ ID NO: 1617894 - RNA, 19 nt, Homo sapiens
  misc_RNA (1)...(19): siRNA sense strand
uaaugcccuuacucuauuu

SEQ ID NO: 1617895 - RNA, 19 nt, Homo sapiens
  misc_RNA (1)...(19): siRNA sense strand
aagagacaauccgcaaauu

SEQ ID NO: 1617896 - RNA, 19 nt, Homo sapiens
  misc_RNA (1)...(19): siRNA sense strand
gcaaacaugaucaacaaaa

SEQ ID NO: 1617897 - RNA, 19 nt, Homo sapiens
  misc_RNA (1)...(19): siRNA sense strand
acacagagucagauucaga

SEQ ID NO: 1617898 - RNA, 19 nt, Homo sapiens
  misc_RNA (1)...(19): siRNA sense strand
caaaucaccaugaccucuu

SEQ ID NO: 1617899 - RNA, 19 nt, Homo sapiens
  misc_RNA (1)...(19): siRNA sense strand
ugaaauugaugagauucug

SEQ ID NO: 1617900 - RNA, 19 nt, Homo sapiens
  misc_RNA (1)...(19): siRNA sense strand
gggcuuccguccuggagau

SEQ ID NO: 1617901 - RNA, 19 nt, Homo sapiens
  misc_RNA (1)...(19): siRNA sense strand
caagggcaagggcaagaaa

SEQ ID NO: 1617902 - RNA, 19 nt, Homo sapiens
  misc_RNA (1)...(19): siRNA sense strand
accaugaccucuuagugaa

SEQ ID NO: 1617903 - RNA, 19 nt, Homo sapiens
  misc_RNA (1)...(19): siRNA sense strand
ccucugcucuggacacagu

SEQ ID NO: 1617904 - RNA, 19 nt, Homo sapiens
  misc_RNA (1)...(19): siRNA sense strand
acagguagcuuugcucacu

SEQ ID NO: 1617905 - RNA, 19 nt, Homo sapiens
  misc_RNA (1)...(19): siRNA sense strand
ccuuaauggccaugaauaa

SEQ ID NO: 1617906 - RNA, 19 nt, Homo sapiens
  misc_RNA (1)...(19): siRNA sense strand
gacuggagcgguacccaaa

SEQ ID NO: 1617907 - RNA, 19 nt, Homo sapiens
  misc_RNA (1)...(19): siRNA sense strand
augaauaaccugagugaga

SEQ ID NO: 1617908 - RNA, 19 nt, Homo sapiens
  misc_RNA (1)...(19): siRNA sense strand
ccaugaauaaccugaguga

SEQ ID NO: 1617909 - RNA, 19 nt, Homo sapiens
  misc_RNA (1)...(19): siRNA sense strand
ggccaugaauaaccugagu

SEQ ID NO: 1617910 - RNA, 19 nt, Homo sapiens
  misc_RNA (1)...(19): siRNA sense strand
guacugugucuacaaauac

SEQ ID NO: 1617911 - RNA, 19 nt, Homo sapiens
  misc_RNA (1)...(19): siRNA sense strand
gcaagaaaagcaaaguuga

SEQ ID NO: 1617912 - RNA, 19 nt, Homo sapiens
  misc_RNA (1)...(19): siRNA sense strand
gcugcagagucuccuggaa

SEQ ID NO: 1617913 - RNA, 19 nt, Homo sapiens
  misc_RNA (1)...(19): siRNA sense strand
uuagagccuuagcaaauca

SEQ ID NO: 1617914 - RNA, 19 nt, Homo sapiens
  misc_RNA (1)...(19): siRNA sense strand
ucagagcagaaguguuuaa

SEQ ID NO: 1617915 - RNA, 19 nt, Homo sapiens
  misc_RNA (1)...(19): siRNA sense strand
gggagagaccagaccaaga

SEQ ID NO: 1617916 - RNA, 19 nt, Homo sapiens
  misc_RNA (1)...(19): siRNA sense strand
cagauauguugaagaaacu

SEQ ID NO: 1617917 - RNA, 19 nt, Homo sapiens
  misc_RNA (1)...(19): siRNA sense strand
gaaaauccagauauguuga

SEQ ID NO: 1617918 - RNA, 19 nt, Homo sapiens
  misc_RNA (1)...(19): siRNA sense strand
gcaagggcaagggcaagaa

SEQ ID NO: 1617919 - RNA, 19 nt, Homo sapiens
  misc_RNA (1)...(19): siRNA sense strand
gccaauuauucaugcaauc

SEQ ID NO: 1617920 - RNA, 19 nt, Homo sapiens
  misc_RNA (1)...(19): siRNA sense strand
uaaggccgaaucaguaguu

SEQ ID NO: 1617921 - RNA, 19 nt, Homo sapiens
  misc_RNA (1)...(19): siRNA sense strand
ucgggaugcuggcugugua

SEQ ID NO: 1617922 - RNA, 19 nt, Homo sapiens
  misc_RNA (1)...(19): siRNA sense strand
gcccuuacucuauuugaga

SEQ ID NO: 1617923 - RNA, 19 nt, Homo sapiens
  misc_RNA (1)...(19): siRNA sense strand
cauuuaguucccucuauaa

SEQ ID NO: 1617924 - RNA, 19 nt, Homo sapiens
  misc_RNA (1)...(19): siRNA sense strand
cugguacugugucuacaaa

SEQ ID NO: 1617925 - RNA, 19 nt, Homo sapiens
  misc_RNA (1)...(19): siRNA sense strand
ggucccugauucugaggaa

SEQ ID NO: 1617926 - RNA, 19 nt, Homo sapiens
  misc_RNA (1)...(19): siRNA sense strand
gagaccagaccaagaagag

SEQ ID NO: 1617927 - RNA, 19 nt, Homo sapiens
  misc_RNA (1)...(19): siRNA sense strand
gccuuaauggccaugaaua

SEQ ID NO: 1617928 - RNA, 19 nt, Homo sapiens
  misc_RNA (1)...(19): siRNA sense strand
ccaauuauucaugcaauca

SEQ ID NO: 1617929 - RNA, 19 nt, Homo sapiens
  misc_RNA (1)...(19): siRNA sense strand
gcagaagcucccagagaag

SEQ ID NO: 1617930 - RNA, 19 nt, Homo sapiens
  misc_RNA (1)...(19): siRNA sense strand
ucaagagacaauccgcaaa

SEQ ID NO: 1617931 - RNA, 19 nt, Homo sapiens
  misc_RNA (1)...(19): siRNA sense strand
caugaccucuuagugaaag

SEQ ID NO: 1617932 - RNA, 19 nt, Homo sapiens
  misc_RNA (1)...(19): siRNA sense strand
auuaaugcccuuacucuau

SEQ ID NO: 1617933 - RNA, 19 nt, Homo sapiens
  misc_RNA (1)...(19): siRNA sense strand
cucagcaguucaaguaguu

SEQ ID NO: 1617934 - RNA, 19 nt, Homo sapiens
  misc_RNA (1)...(19): siRNA sense strand
gaauaaagugauggaugau

SEQ ID NO: 1617935 - RNA, 19 nt, Homo sapiens
  misc_RNA (1)...(19): siRNA sense strand
gaauaaccugagugagaau

SEQ ID NO: 1617936 - RNA, 19 nt, Homo sapiens
  misc_RNA (1)...(19): siRNA sense strand
uggcagaagcucccagaga

SEQ ID NO: 1617937 - RNA, 19 nt, Homo sapiens
  misc_RNA (1)...(19): siRNA sense strand
acaucuggaguguguguua

SEQ ID NO: 1617938 - RNA, 19 nt, Homo sapiens
  misc_RNA (1)...(19): siRNA sense strand
ccucuuagugaaagugaaa

SEQ ID NO: 1617939 - RNA, 19 nt, Homo sapiens
  misc_RNA (1)...(19): siRNA sense strand
aaauuagagccuuagcaaa

SEQ ID NO: 1617940 - RNA, 19 nt, Homo sapiens
  misc_RNA (1)...(19): siRNA sense strand
gaguguguguuaagaaaau

SEQ ID NO: 1617941 - RNA, 19 nt, Homo sapiens
  misc_RNA (1)...(19): siRNA sense strand
gcaguuacgugcaaagcuu

SEQ ID NO: 1617942 - RNA, 19 nt, Homo sapiens
  misc_RNA (1)...(19): siRNA sense strand
cuggaaaccucaucaagga

SEQ ID NO: 1617943 - RNA, 19 nt, Homo sapiens
  misc_RNA (1)...(19): siRNA sense strand
ggacagcuuccuccuacug

SEQ ID NO: 1617944 - RNA, 19 nt, Homo sapiens
  misc_RNA (1)...(19): siRNA sense strand
gagggaggaggaagaggaa

SEQ ID NO: 1617945 - RNA, 19 nt, Homo sapiens
  misc_RNA (1)...(19): siRNA sense strand
cagcuagugcucucuggaa

SEQ ID NO: 1617946 - RNA, 19 nt, Homo sapiens
  misc_RNA (1)...(19): siRNA sense strand
gcaguuacgugcaaagcuu

SEQ ID NO: 1617947 - RNA, 19 nt, Homo sapiens
  misc_RNA (1)...(19): siRNA sense strand
cuggaaaccucaucaagga

SEQ ID NO: 1617948 - RNA, 19 nt, Homo sapiens
  misc_RNA (1)...(19): siRNA sense strand
ggacagcuuccuccuacug

SEQ ID NO: 1617949 - RNA, 19 nt, Homo sapiens
  misc_RNA (1)...(19): siRNA sense strand
gagggaggaggaagaggaa

SEQ ID NO: 1617950 - RNA, 19 nt, Homo sapiens
  misc_RNA (1)...(19): siRNA sense strand
cagcuagugcucucuggaa

SEQ ID NO: 1617951 - RNA, 19 nt, Homo sapiens
  misc_RNA (1)...(19): siRNA sense strand
cagcaaagauggucaaaua

SEQ ID NO: 1617952 - RNA, 19 nt, Homo sapiens
  misc_RNA (1)...(19): siRNA sense strand
gaucugggcuucacugaua

SEQ ID NO: 1617953 - RNA, 19 nt, Homo sapiens
  misc_RNA (1)...(19): siRNA sense strand
gcaaagauggucaaauauu

SEQ ID NO: 1617954 - RNA, 19 nt, Homo sapiens
  misc_RNA (1)...(19): siRNA sense strand
caaagauggucaaauauuc

SEQ ID NO: 1617955 - RNA, 19 nt, Homo sapiens
  misc_RNA (1)...(19): siRNA sense strand
gauauaagcucccaaaucc

SEQ ID NO: 1617956 - RNA, 19 nt, Homo sapiens
  misc_RNA (1)...(19): siRNA sense strand
gcaguggccuuugcugaua

SEQ ID NO: 1617957 - RNA, 19 nt, Homo sapiens
  misc_RNA (1)...(19): siRNA sense strand
gcaaagugguuguguacga

SEQ ID NO: 1617958 - RNA, 19 nt, Homo sapiens
  misc_RNA (1)...(19): siRNA sense strand
gcacagcuuuccucgaaug

SEQ ID NO: 1617959 - RNA, 19 nt, Homo sapiens
  misc_RNA (1)...(19): siRNA sense strand
ucaaugagaucaagacaca

SEQ ID NO: 1617960 - RNA, 19 nt, Homo sapiens
  misc_RNA (1)...(19): siRNA sense strand
gagcuggaauucaaugaga

SEQ ID NO: 1617961 - RNA, 19 nt, Homo sapiens
  misc_RNA (1)...(19): siRNA sense strand
agaacagucucgagugaua

SEQ ID NO: 1617962 - RNA, 19 nt, Homo sapiens
  misc_RNA (1)...(19): siRNA sense strand
ugaagaagcugaccaacca

SEQ ID NO: 1617963 - RNA, 19 nt, Homo sapiens
  misc_RNA (1)...(19): siRNA sense strand
uaucugaucuccaacucua

SEQ ID NO: 1617964 - RNA, 19 nt, Homo sapiens
  misc_RNA (1)...(19): siRNA sense strand
ggaagaagaggaugaagau

SEQ ID NO: 1617965 - RNA, 19 nt, Homo sapiens
  misc_RNA (1)...(19): siRNA sense strand
uagcuggucugauuacauu

SEQ ID NO: 1617966 - RNA, 19 nt, Homo sapiens
  misc_RNA (1)...(19): siRNA sense strand
gaucaagacacaaguggaa

SEQ ID NO: 1617967 - RNA, 19 nt, Homo sapiens
  misc_RNA (1)...(19): siRNA sense strand
ccaauccucuacacccuuu

SEQ ID NO: 1617968 - RNA, 19 nt, Homo sapiens
  misc_RNA (1)...(19): siRNA sense strand
ugacagagcuugggauggu

SEQ ID NO: 1617969 - RNA, 19 nt, Homo sapiens
  misc_RNA (1)...(19): siRNA sense strand
ggaauucaaugagaucaag

SEQ ID NO: 1617970 - RNA, 19 nt, Homo sapiens
  misc_RNA (1)...(19): siRNA sense strand
cagcuuuccucgaauguug

SEQ ID NO: 1617971 - RNA, 19 nt, Homo sapiens
  misc_RNA (1)...(19): siRNA sense strand
ggacucagaggaagagaau

SEQ ID NO: 1617972 - RNA, 19 nt, Homo sapiens
  misc_RNA (1)...(19): siRNA sense strand
agaagaggaugaagaugug

SEQ ID NO: 1617973 - RNA, 19 nt, Homo sapiens
  misc_RNA (1)...(19): siRNA sense strand
ggugaugcccgguaucuga

SEQ ID NO: 1617974 - RNA, 19 nt, Homo sapiens
  misc_RNA (1)...(19): siRNA sense strand
aaugauggcugccuguaug

SEQ ID NO: 1617975 - RNA, 19 nt, Homo sapiens
  misc_RNA (1)...(19): siRNA sense strand
gagaagauugucagcaguu

SEQ ID NO: 1617976 - RNA, 19 nt, Homo sapiens
  misc_RNA (1)...(19): siRNA sense strand
ggcaucaccuucauugaca

SEQ ID NO: 1617977 - RNA, 19 nt, Homo sapiens
  misc_RNA (1)...(19): siRNA sense strand
ccaugaggaugaugugaau

SEQ ID NO: 1617978 - RNA, 19 nt, Homo sapiens
  misc_RNA (1)...(19): siRNA sense strand
ggggacagcuccuugauga

SEQ ID NO: 1617979 - RNA, 19 nt, Homo sapiens
  misc_RNA (1)...(19): siRNA sense strand
caagggugaugcccgguau

SEQ ID NO: 1617980 - RNA, 19 nt, Homo sapiens
  misc_RNA (1)...(19): siRNA sense strand
gaauguugcaccagagaga

SEQ ID NO: 1617981 - RNA, 19 nt, Homo sapiens
  misc_RNA (1)...(19): siRNA sense strand
ggaagaggaagaagaggau

SEQ ID NO: 1617982 - RNA, 19 nt, Homo sapiens
  misc_RNA (1)...(19): siRNA sense strand
cuaaagaccagaccaucaa

SEQ ID NO: 1617983 - RNA, 19 nt, Homo sapiens
  misc_RNA (1)...(19): siRNA sense strand
ggagugaggaagaggaaga

SEQ ID NO: 1617984 - RNA, 19 nt, Homo sapiens
  misc_RNA (1)...(19): siRNA sense strand
gcaccaugcgggaggauga

SEQ ID NO: 1617985 - RNA, 19 nt, Homo sapiens
  misc_RNA (1)...(19): siRNA sense strand
ccaucaaacucugggauau

SEQ ID NO: 1617986 - RNA, 19 nt, Homo sapiens
  misc_RNA (1)...(19): siRNA sense strand
uacucuagcuggucugauu

SEQ ID NO: 1617987 - RNA, 19 nt, Homo sapiens
  misc_RNA (1)...(19): siRNA sense strand
gaccagaccaucaaacucu

SEQ ID NO: 1617988 - RNA, 19 nt, Homo sapiens
  misc_RNA (1)...(19): siRNA sense strand
gaacagucucgagugauau

SEQ ID NO: 1617989 - RNA, 19 nt, Homo sapiens
  misc_RNA (1)...(19): siRNA sense strand
gaagagaaugacagagcuu

SEQ ID NO: 1617990 - RNA, 19 nt, Homo sapiens
  misc_RNA (1)...(19): siRNA sense strand
gcugauauaagcucccaaa

SEQ ID NO: 1617991 - RNA, 19 nt, Homo sapiens
  misc_RNA (1)...(19): siRNA sense strand
ggucugauuacauucauau

SEQ ID NO: 1617992 - RNA, 19 nt, Homo sapiens
  misc_RNA (1)...(19): siRNA sense strand
cccgggagcuggaauucaa

SEQ ID NO: 1617993 - RNA, 19 nt, Homo sapiens
  misc_RNA (1)...(19): siRNA sense strand
ggcgcacccuucagauuga

SEQ ID NO: 1617994 - RNA, 19 nt, Homo sapiens
  misc_RNA (1)...(19): siRNA sense strand
guaugucuuugaccgagaa

SEQ ID NO: 1617995 - RNA, 19 nt, Homo sapiens
  misc_RNA (1)...(19): siRNA sense strand
caaauauucaugucugcuu

SEQ ID NO: 1617996 - RNA, 19 nt, Homo sapiens
  misc_RNA (1)...(19): siRNA sense strand
gcuggagcgucuuggaugu

SEQ ID NO: 1617997 - RNA, 19 nt, Homo sapiens
  misc_RNA (1)...(19): siRNA sense strand
cugaguacuuccaggauga

SEQ ID NO: 1617998 - RNA, 19 nt, Homo sapiens
  misc_RNA (1)...(19): siRNA sense strand
ccauugcugucuccucaga

SEQ ID NO: 1617999 - RNA, 19 nt, Homo sapiens
  misc_RNA (1)...(19): siRNA sense strand
aagaagaggaugaagaugu

SEQ ID NO: 1618000 - RNA, 19 nt, Homo sapiens
  misc_RNA (1)...(19): siRNA sense strand
ugauauaagcucccaaauc

SEQ ID NO: 1618001 - RNA, 19 nt, Homo sapiens
  misc_RNA (1)...(19): siRNA sense strand
ucacugauagcuacucuca

SEQ ID NO: 1618002 - RNA, 19 nt, Homo sapiens
  misc_RNA (1)...(19): siRNA sense strand
ggccuuugcugauauaagc

SEQ ID NO: 1618003 - RNA, 19 nt, Homo sapiens
  misc_RNA (1)...(19): siRNA sense strand
gcuacucucagaaggcuuu

SEQ ID NO: 1618004 - RNA, 19 nt, Homo sapiens
  misc_RNA (1)...(19): siRNA sense strand
guacuuccaggaugacaug

SEQ ID NO: 1618005 - RNA, 19 nt, Homo sapiens
  misc_RNA (1)...(19): siRNA sense strand
ggccagcaguucaucuaca

SEQ ID NO: 1618006 - RNA, 19 nt, Homo sapiens
  misc_RNA (1)...(19): siRNA sense strand
uaaagaccagaccaucaaa

SEQ ID NO: 1618007 - RNA, 19 nt, Homo sapiens
  misc_RNA (1)...(19): siRNA sense strand
cugauuacauucauaucug

SEQ ID NO: 1618008 - RNA, 19 nt, Homo sapiens
  misc_RNA (1)...(19): siRNA sense strand
cccgguaucugaucuccaa

SEQ ID NO: 1618009 - RNA, 19 nt, Homo sapiens
  misc_RNA (1)...(19): siRNA sense strand
gauggucaaauauucaugu

SEQ ID NO: 1618010 - RNA, 19 nt, Homo sapiens
  misc_RNA (1)...(19): siRNA sense strand
gaagaagaggaugaagaug

SEQ ID NO: 1618011 - RNA, 19 nt, Homo sapiens
  misc_RNA (1)...(19): siRNA sense strand
acucagaggaagagaauga

SEQ ID NO: 1618012 - RNA, 19 nt, Homo sapiens
  misc_RNA (1)...(19): siRNA sense strand
ugagggagauacacacacu

SEQ ID NO: 1618013 - RNA, 19 nt, Homo sapiens
  misc_RNA (1)...(19): siRNA sense strand
cagacaauccgacucuaug

SEQ ID NO: 1618014 - RNA, 19 nt, Homo sapiens
  misc_RNA (1)...(19): siRNA sense strand
ccagacaauccgacucuau

SEQ ID NO: 1618015 - RNA, 19 nt, Homo sapiens
  misc_RNA (1)...(19): siRNA sense strand
agacaauccgacucuauga

SEQ ID NO: 1618016 - RNA, 19 nt, Homo sapiens
  misc_RNA (1)...(19): siRNA sense strand
gaagcugaccaaccacaag

SEQ ID NO: 1618017 - RNA, 19 nt, Homo sapiens
  misc_RNA (1)...(19): siRNA sense strand
ccaaugaucugggcuucac

SEQ ID NO: 1618018 - RNA, 19 nt, Homo sapiens
  misc_RNA (1)...(19): siRNA sense strand
ugaaugcaguggccuuugc

SEQ ID NO: 1618019 - RNA, 19 nt, Homo sapiens
  misc_RNA (1)...(19): siRNA sense strand
gaaccacuuccucuacucu

SEQ ID NO: 1618020 - RNA, 19 nt, Homo sapiens
  misc_RNA (1)...(19): siRNA sense strand
ucucacuucuugcccaaug

SEQ ID NO: 1618021 - RNA, 19 nt, Homo sapiens
  misc_RNA (1)...(19): siRNA sense strand
aggaugacaugccagaauc

SEQ ID NO: 1618022 - RNA, 19 nt, Homo sapiens
  misc_RNA (1)...(19): siRNA sense strand
cggcgcacccuucagauug

SEQ ID NO: 1618023 - RNA, 19 nt, Homo sapiens
  misc_RNA (1)...(19): siRNA sense strand
caaugauggcugccuguau

SEQ ID NO: 1618024 - RNA, 19 nt, Homo sapiens
  misc_RNA (1)...(19): siRNA sense strand
gaccagacaauccgacucu

SEQ ID NO: 1618025 - RNA, 19 nt, Homo sapiens
  misc_RNA (1)...(19): siRNA sense strand
ccuucuaaguggccacauu

SEQ ID NO: 1618026 - RNA, 19 nt, Homo sapiens
  misc_RNA (1)...(19): siRNA sense strand
gguaucugaucuccaacuc

SEQ ID NO: 1618027 - RNA, 19 nt, Homo sapiens
  misc_RNA (1)...(19): siRNA sense strand
ccaaugauggcugccugua

SEQ ID NO: 1618028 - RNA, 19 nt, Homo sapiens
  misc_RNA (1)...(19): siRNA sense strand
gugaggaagaggaagaaga

SEQ ID NO: 1618029 - RNA, 19 nt, Homo sapiens
  misc_RNA (1)...(19): siRNA sense strand
gaauucaaugagaucaaga

SEQ ID NO: 1618030 - RNA, 19 nt, Homo sapiens
  misc_RNA (1)...(19): siRNA sense strand
caggaugacaugccagaau

SEQ ID NO: 1618031 - RNA, 19 nt, Homo sapiens
  misc_RNA (1)...(19): siRNA sense strand
ccgccaggcugaguacuuc

SEQ ID NO: 1618032 - RNA, 19 nt, Homo sapiens
  misc_RNA (1)...(19): siRNA sense strand
gauugagucccaugaggau

SEQ ID NO: 1618033 - RNA, 19 nt, Homo sapiens
  misc_RNA (1)...(19): siRNA sense strand
cuccucagauggacgagaa

SEQ ID NO: 1618034 - RNA, 19 nt, Homo sapiens
  misc_RNA (1)...(19): siRNA sense strand
ucaccuucauugacagcaa

SEQ ID NO: 1618035 - RNA, 19 nt, Homo sapiens
  misc_RNA (1)...(19): siRNA sense strand
uuugcugucuucuccauug

SEQ ID NO: 1618036 - RNA, 19 nt, Homo sapiens
  misc_RNA (1)...(19): siRNA sense strand
ugaggaagaggaagaagag

SEQ ID NO: 1618037 - RNA, 19 nt, Homo sapiens
  misc_RNA (1)...(19): siRNA sense strand
cuggcaaagugguugugua

SEQ ID NO: 1618038 - RNA, 19 nt, Homo sapiens
  misc_RNA (1)...(19): siRNA sense strand
gccagcaguucaucuacag

SEQ ID NO: 1618039 - RNA, 19 nt, Homo sapiens
  misc_RNA (1)...(19): siRNA sense strand
ucuaaagaccagaccauca

SEQ ID NO: 1618040 - RNA, 19 nt, Homo sapiens
  misc_RNA (1)...(19): siRNA sense strand
caguggccuuugcugauau

SEQ ID NO: 1618041 - RNA, 19 nt, Homo sapiens
  misc_RNA (1)...(19): siRNA sense strand
uaucugcaauaucuauggu

SEQ ID NO: 1618042 - RNA, 19 nt, Homo sapiens
  misc_RNA (1)...(19): siRNA sense strand
agaggaagagaaugacaga

SEQ ID NO: 1618043 - RNA, 19 nt, Homo sapiens
  misc_RNA (1)...(19): siRNA sense strand
agauggacgagaaguacua

SEQ ID NO: 1618044 - RNA, 19 nt, Homo sapiens
  misc_RNA (1)...(19): siRNA sense strand
agaagauugucagcaguuc

SEQ ID NO: 1618045 - RNA, 19 nt, Homo sapiens
  misc_RNA (1)...(19): siRNA sense strand
acagcuccuugaugaccua

SEQ ID NO: 1618046 - RNA, 19 nt, Homo sapiens
  misc_RNA (1)...(19): siRNA sense strand
cagcaaagauggucaaaua

SEQ ID NO: 1618047 - RNA, 19 nt, Homo sapiens
  misc_RNA (1)...(19): siRNA sense strand
gaucugggcuucacugaua

SEQ ID NO: 1618048 - RNA, 19 nt, Homo sapiens
  misc_RNA (1)...(19): siRNA sense strand
gcaaagauggucaaauauu

SEQ ID NO: 1618049 - RNA, 19 nt, Homo sapiens
  misc_RNA (1)...(19): siRNA sense strand
caaagauggucaaauauuc

SEQ ID NO: 1618050 - RNA, 19 nt, Homo sapiens
  misc_RNA (1)...(19): siRNA sense strand
gauauaagcucccaaaucc

SEQ ID NO: 1618051 - RNA, 19 nt, Homo sapiens
  misc_RNA (1)...(19): siRNA sense strand
gcaguggccuuugcugaua

SEQ ID NO: 1618052 - RNA, 19 nt, Homo sapiens
  misc_RNA (1)...(19): siRNA sense strand
gcaaagugguuguguacga

SEQ ID NO: 1618053 - RNA, 19 nt, Homo sapiens
  misc_RNA (1)...(19): siRNA sense strand
gcacagcuuuccucgaaug

SEQ ID NO: 1618054 - RNA, 19 nt, Homo sapiens
  misc_RNA (1)...(19): siRNA sense strand
ucaaugagaucaagacaca

SEQ ID NO: 1618055 - RNA, 19 nt, Homo sapiens
  misc_RNA (1)...(19): siRNA sense strand
gagcuggaauucaaugaga

SEQ ID NO: 1618056 - RNA, 19 nt, Homo sapiens
  misc_RNA (1)...(19): siRNA sense strand
agaacagucucgagugaua

SEQ ID NO: 1618057 - RNA, 19 nt, Homo sapiens
  misc_RNA (1)...(19): siRNA sense strand
ugaagaagcugaccaacca

SEQ ID NO: 1618058 - RNA, 19 nt, Homo sapiens
  misc_RNA (1)...(19): siRNA sense strand
uaucugaucuccaacucua

SEQ ID NO: 1618059 - RNA, 19 nt, Homo sapiens
  misc_RNA (1)...(19): siRNA sense strand
ggaagaagaggaugaagau

SEQ ID NO: 1618060 - RNA, 19 nt, Homo sapiens
  misc_RNA (1)...(19): siRNA sense strand
uagcuggucugauuacauu

SEQ ID NO: 1618061 - RNA, 19 nt, Homo sapiens
  misc_RNA (1)...(19): siRNA sense strand
gaucaagacacaaguggaa

SEQ ID NO: 1618062 - RNA, 19 nt, Homo sapiens
  misc_RNA (1)...(19): siRNA sense strand
ccaauccucuacacccuuu

SEQ ID NO: 1618063 - RNA, 19 nt, Homo sapiens
  misc_RNA (1)...(19): siRNA sense strand
ugacagagcuugggauggu

SEQ ID NO: 1618064 - RNA, 19 nt, Homo sapiens
  misc_RNA (1)...(19): siRNA sense strand
ggaauucaaugagaucaag

SEQ ID NO: 1618065 - RNA, 19 nt, Homo sapiens
  misc_RNA (1)...(19): siRNA sense strand
cagcuuuccucgaauguug

SEQ ID NO: 1618066 - RNA, 19 nt, Homo sapiens
  misc_RNA (1)...(19): siRNA sense strand
ggacucagaggaagagaau

SEQ ID NO: 1618067 - RNA, 19 nt, Homo sapiens
  misc_RNA (1)...(19): siRNA sense strand
agaagaggaugaagaugug

SEQ ID NO: 1618068 - RNA, 19 nt, Homo sapiens
  misc_RNA (1)...(19): siRNA sense strand
ggugaugcccgguaucuga

SEQ ID NO: 1618069 - RNA, 19 nt, Homo sapiens
  misc_RNA (1)...(19): siRNA sense strand
aaugauggcugccuguaug

SEQ ID NO: 1618070 - RNA, 19 nt, Homo sapiens
  misc_RNA (1)...(19): siRNA sense strand
gagaagauugucagcaguu

SEQ ID NO: 1618071 - RNA, 19 nt, Homo sapiens
  misc_RNA (1)...(19): siRNA sense strand
ggcaucaccuucauugaca

SEQ ID NO: 1618072 - RNA, 19 nt, Homo sapiens
  misc_RNA (1)...(19): siRNA sense strand
ccaugaggaugaugugaau

SEQ ID NO: 1618073 - RNA, 19 nt, Homo sapiens
  misc_RNA (1)...(19): siRNA sense strand
ggggacagcuccuugauga

SEQ ID NO: 1618074 - RNA, 19 nt, Homo sapiens
  misc_RNA (1)...(19): siRNA sense strand
caagggugaugcccgguau

SEQ ID NO: 1618075 - RNA, 19 nt, Homo sapiens
  misc_RNA (1)...(19): siRNA sense strand
gaauguugcaccagagaga

SEQ ID NO: 1618076 - RNA, 19 nt, Homo sapiens
  misc_RNA (1)...(19): siRNA sense strand
ggaagaggaagaagaggau

SEQ ID NO: 1618077 - RNA, 19 nt, Homo sapiens
  misc_RNA (1)...(19): siRNA sense strand
cuaaagaccagaccaucaa

SEQ ID NO: 1618078 - RNA, 19 nt, Homo sapiens
  misc_RNA (1)...(19): siRNA sense strand
ggagugaggaagaggaaga

SEQ ID NO: 1618079 - RNA, 19 nt, Homo sapiens
  misc_RNA (1)...(19): siRNA sense strand
gcaccaugcgggaggauga

SEQ ID NO: 1618080 - RNA, 19 nt, Homo sapiens
  misc_RNA (1)...(19): siRNA sense strand
ccaucaaacucugggauau

SEQ ID NO: 1618081 - RNA, 19 nt, Homo sapiens
  misc_RNA (1)...(19): siRNA sense strand
uacucuagcuggucugauu

SEQ ID NO: 1618082 - RNA, 19 nt, Homo sapiens
  misc_RNA (1)...(19): siRNA sense strand
gaccagaccaucaaacucu

SEQ ID NO: 1618083 - RNA, 19 nt, Homo sapiens
  misc_RNA (1)...(19): siRNA sense strand
gaacagucucgagugauau

SEQ ID NO: 1618084 - RNA, 19 nt, Homo sapiens
  misc_RNA (1)...(19): siRNA sense strand
gaagagaaugacagagcuu

SEQ ID NO: 1618085 - RNA, 19 nt, Homo sapiens
  misc_RNA (1)...(19): siRNA sense strand
gcugauauaagcucccaaa

SEQ ID NO: 1618086 - RNA, 19 nt, Homo sapiens
  misc_RNA (1)...(19): siRNA sense strand
ggucugauuacauucauau

SEQ ID NO: 1618087 - RNA, 19 nt, Homo sapiens
  misc_RNA (1)...(19): siRNA sense strand
cccgggagcuggaauucaa

SEQ ID NO: 1618088 - RNA, 19 nt, Homo sapiens
  misc_RNA (1)...(19): siRNA sense strand
ggcgcacccuucagauuga

SEQ ID NO: 1618089 - RNA, 19 nt, Homo sapiens
  misc_RNA (1)...(19): siRNA sense strand
guaugucuuugaccgagaa

SEQ ID NO: 1618090 - RNA, 19 nt, Homo sapiens
  misc_RNA (1)...(19): siRNA sense strand
caaauauucaugucugcuu

SEQ ID NO: 1618091 - RNA, 19 nt, Homo sapiens
  misc_RNA (1)...(19): siRNA sense strand
gcuggagcgucuuggaugu

SEQ ID NO: 1618092 - RNA, 19 nt, Homo sapiens
  misc_RNA (1)...(19): siRNA sense strand
cugaguacuuccaggauga

SEQ ID NO: 1618093 - RNA, 19 nt, Homo sapiens
  misc_RNA (1)...(19): siRNA sense strand
ccauugcugucuccucaga

SEQ ID NO: 1618094 - RNA, 19 nt, Homo sapiens
  misc_RNA (1)...(19): siRNA sense strand
aagaagaggaugaagaugu

SEQ ID NO: 1618095 - RNA, 19 nt, Homo sapiens
  misc_RNA (1)...(19): siRNA sense strand
ugauauaagcucccaaauc

SEQ ID NO: 1618096 - RNA, 19 nt, Homo sapiens
  misc_RNA (1)...(19): siRNA sense strand
ucacugauagcuacucuca

SEQ ID NO: 1618097 - RNA, 19 nt, Homo sapiens
  misc_RNA (1)...(19): siRNA sense strand
ggccuuugcugauauaagc

SEQ ID NO: 1618098 - RNA, 19 nt, Homo sapiens
  misc_RNA (1)...(19): siRNA sense strand
gcuacucucagaaggcuuu

SEQ ID NO: 1618099 - RNA, 19 nt, Homo sapiens
  misc_RNA (1)...(19): siRNA sense strand
guacuuccaggaugacaug

SEQ ID NO: 1618100 - RNA, 19 nt, Homo sapiens
  misc_RNA (1)...(19): siRNA sense strand
ggccagcaguucaucuaca

SEQ ID NO: 1618101 - RNA, 19 nt, Homo sapiens
  misc_RNA (1)...(19): siRNA sense strand
uaaagaccagaccaucaaa

SEQ ID NO: 1618102 - RNA, 19 nt, Homo sapiens
  misc_RNA (1)...(19): siRNA sense strand
cugauuacauucauaucug

SEQ ID NO: 1618103 - RNA, 19 nt, Homo sapiens
  misc_RNA (1)...(19): siRNA sense strand
cccgguaucugaucuccaa

SEQ ID NO: 1618104 - RNA, 19 nt, Homo sapiens
  misc_RNA (1)...(19): siRNA sense strand
gauggucaaauauucaugu

SEQ ID NO: 1618105 - RNA, 19 nt, Homo sapiens
  misc_RNA (1)...(19): siRNA sense strand
gaagaagaggaugaagaug

SEQ ID NO: 1618106 - RNA, 19 nt, Homo sapiens
  misc_RNA (1)...(19): siRNA sense strand
acucagaggaagagaauga

SEQ ID NO: 1618107 - RNA, 19 nt, Homo sapiens
  misc_RNA (1)...(19): siRNA sense strand
ugagggagauacacacacu

SEQ ID NO: 1618108 - RNA, 19 nt, Homo sapiens
  misc_RNA (1)...(19): siRNA sense strand
cagacaauccgacucuaug

SEQ ID NO: 1618109 - RNA, 19 nt, Homo sapiens
  misc_RNA (1)...(19): siRNA sense strand
ccagacaauccgacucuau

SEQ ID NO: 1618110 - RNA, 19 nt, Homo sapiens
  misc_RNA (1)...(19): siRNA sense strand
agacaauccgacucuauga

SEQ ID NO: 1618111 - RNA, 19 nt, Homo sapiens
  misc_RNA (1)...(19): siRNA sense strand
gaagcugaccaaccacaag

SEQ ID NO: 1618112 - RNA, 19 nt, Homo sapiens
  misc_RNA (1)...(19): siRNA sense strand
ccaaugaucugggcuucac

SEQ ID NO: 1618113 - RNA, 19 nt, Homo sapiens
  misc_RNA (1)...(19): siRNA sense strand
ugaaugcaguggccuuugc

SEQ ID NO: 1618114 - RNA, 19 nt, Homo sapiens
  misc_RNA (1)...(19): siRNA sense strand
gaaccacuuccucuacucu

SEQ ID NO: 1618115 - RNA, 19 nt, Homo sapiens
  misc_RNA (1)...(19): siRNA sense strand
ucucacuucuugcccaaug

SEQ ID NO: 1618116 - RNA, 19 nt, Homo sapiens
  misc_RNA (1)...(19): siRNA sense strand
aggaugacaugccagaauc

SEQ ID NO: 1618117 - RNA, 19 nt, Homo sapiens
  misc_RNA (1)...(19): siRNA sense strand
cggcgcacccuucagauug

SEQ ID NO: 1618118 - RNA, 19 nt, Homo sapiens
  misc_RNA (1)...(19): siRNA sense strand
caaugauggcugccuguau

SEQ ID NO: 1618119 - RNA, 19 nt, Homo sapiens
  misc_RNA (1)...(19): siRNA sense strand
gaccagacaauccgacucu

SEQ ID NO: 1618120 - RNA, 19 nt, Homo sapiens
  misc_RNA (1)...(19): siRNA sense strand
ccuucuaaguggccacauu

SEQ ID NO: 1618121 - RNA, 19 nt, Homo sapiens
  misc_RNA (1)...(19): siRNA sense strand
gguaucugaucuccaacuc

SEQ ID NO: 1618122 - RNA, 19 nt, Homo sapiens
  misc_RNA (1)...(19): siRNA sense strand
ccaaugauggcugccugua

SEQ ID NO: 1618123 - RNA, 19 nt, Homo sapiens
  misc_RNA (1)...(19): siRNA sense strand
gugaggaagaggaagaaga

SEQ ID NO: 1618124 - RNA, 19 nt, Homo sapiens
  misc_RNA (1)...(19): siRNA sense strand
gaauucaaugagaucaaga

SEQ ID NO: 1618125 - RNA, 19 nt, Homo sapiens
  misc_RNA (1)...(19): siRNA sense strand
caggaugacaugccagaau

SEQ ID NO: 1618126 - RNA, 19 nt, Homo sapiens
  misc_RNA (1)...(19): siRNA sense strand
ccgccaggcugaguacuuc

SEQ ID NO: 1618127 - RNA, 19 nt, Homo sapiens
  misc_RNA (1)...(19): siRNA sense strand
gauugagucccaugaggau

SEQ ID NO: 1618128 - RNA, 19 nt, Homo sapiens
  misc_RNA (1)...(19): siRNA sense strand
cuccucagauggacgagaa

SEQ ID NO: 1618129 - RNA, 19 nt, Homo sapiens
  misc_RNA (1)...(19): siRNA sense strand
ucaccuucauugacagcaa

SEQ ID NO: 1618130 - RNA, 19 nt, Homo sapiens
  misc_RNA (1)...(19): siRNA sense strand
uuugcugucuucuccauug

SEQ ID NO: 1618131 - RNA, 19 nt, Homo sapiens
  misc_RNA (1)...(19): siRNA sense strand
ugaggaagaggaagaagag

SEQ ID NO: 1618132 - RNA, 19 nt, Homo sapiens
  misc_RNA (1)...(19): siRNA sense strand
cuggcaaagugguugugua

SEQ ID NO: 1618133 - RNA, 19 nt, Homo sapiens
  misc_RNA (1)...(19): siRNA sense strand
gccagcaguucaucuacag

SEQ ID NO: 1618134 - RNA, 19 nt, Homo sapiens
  misc_RNA (1)...(19): siRNA sense strand
ucuaaagaccagaccauca

SEQ ID NO: 1618135 - RNA, 19 nt, Homo sapiens
  misc_RNA (1)...(19): siRNA sense strand
caguggccuuugcugauau

SEQ ID NO: 1618136 - RNA, 19 nt, Homo sapiens
  misc_RNA (1)...(19): siRNA sense strand
uaucugcaauaucuauggu

SEQ ID NO: 1618137 - RNA, 19 nt, Homo sapiens
  misc_RNA (1)...(19): siRNA sense strand
agaggaagagaaugacaga

SEQ ID NO: 1618138 - RNA, 19 nt, Homo sapiens
  misc_RNA (1)...(19): siRNA sense strand
agauggacgagaaguacua

SEQ ID NO: 1618139 - RNA, 19 nt, Homo sapiens
  misc_RNA (1)...(19): siRNA sense strand
agaagauugucagcaguuc

SEQ ID NO: 1618140 - RNA, 19 nt, Homo sapiens
  misc_RNA (1)...(19): siRNA sense strand
acagcuccuugaugaccua

SEQ ID NO: 1618141 - RNA, 19 nt, Homo sapiens
  misc_RNA (1)...(19): siRNA sense strand
cagcaaagauggucaaaua

SEQ ID NO: 1618142 - RNA, 19 nt, Homo sapiens
  misc_RNA (1)...(19): siRNA sense strand
gaucugggcuucacugaua

SEQ ID NO: 1618143 - RNA, 19 nt, Homo sapiens
  misc_RNA (1)...(19): siRNA sense strand
gcaaagauggucaaauauu

SEQ ID NO: 1618144 - RNA, 19 nt, Homo sapiens
  misc_RNA (1)...(19): siRNA sense strand
caaagauggucaaauauuc

SEQ ID NO: 1618145 - RNA, 19 nt, Homo sapiens
  misc_RNA (1)...(19): siRNA sense strand
gauauaagcucccaaaucc

SEQ ID NO: 1618146 - RNA, 19 nt, Homo sapiens
  misc_RNA (1)...(19): siRNA sense strand
gcaguggccuuugcugaua

SEQ ID NO: 1618147 - RNA, 19 nt, Homo sapiens
  misc_RNA (1)...(19): siRNA sense strand
gcaaagugguuguguacga

SEQ ID NO: 1618148 - RNA, 19 nt, Homo sapiens
  misc_RNA (1)...(19): siRNA sense strand
gcacagcuuuccucgaaug

SEQ ID NO: 1618149 - RNA, 19 nt, Homo sapiens
  misc_RNA (1)...(19): siRNA sense strand
ucaaugagaucaagacaca

SEQ ID NO: 1618150 - RNA, 19 nt, Homo sapiens
  misc_RNA (1)...(19): siRNA sense strand
gagcuggaauucaaugaga

SEQ ID NO: 1618151 - RNA, 19 nt, Homo sapiens
  misc_RNA (1)...(19): siRNA sense strand
agaacagucucgagugaua

SEQ ID NO: 1618152 - RNA, 19 nt, Homo sapiens
  misc_RNA (1)...(19): siRNA sense strand
ugaagaagcugaccaacca

SEQ ID NO: 1618153 - RNA, 19 nt, Homo sapiens
  misc_RNA (1)...(19): siRNA sense strand
uaucugaucuccaacucua

SEQ ID NO: 1618154 - RNA, 19 nt, Homo sapiens
  misc_RNA (1)...(19): siRNA sense strand
ggaagaagaggaugaagau

SEQ ID NO: 1618155 - RNA, 19 nt, Homo sapiens
  misc_RNA (1)...(19): siRNA sense strand
uagcuggucugauuacauu

SEQ ID NO: 1618156 - RNA, 19 nt, Homo sapiens
  misc_RNA (1)...(19): siRNA sense strand
gaucaagacacaaguggaa

SEQ ID NO: 1618157 - RNA, 19 nt, Homo sapiens
  misc_RNA (1)...(19): siRNA sense strand
ccaauccucuacacccuuu

SEQ ID NO: 1618158 - RNA, 19 nt, Homo sapiens
  misc_RNA (1)...(19): siRNA sense strand
ugacagagcuugggauggu

SEQ ID NO: 1618159 - RNA, 19 nt, Homo sapiens
  misc_RNA (1)...(19): siRNA sense strand
ggaauucaaugagaucaag

SEQ ID NO: 1618160 - RNA, 19 nt, Homo sapiens
  misc_RNA (1)...(19): siRNA sense strand
cagcuuuccucgaauguug

SEQ ID NO: 1618161 - RNA, 19 nt, Homo sapiens
  misc_RNA (1)...(19): siRNA sense strand
ggacucagaggaagagaau

SEQ ID NO: 1618162 - RNA, 19 nt, Homo sapiens
  misc_RNA (1)...(19): siRNA sense strand
agaagaggaugaagaugug

SEQ ID NO: 1618163 - RNA, 19 nt, Homo sapiens
  misc_RNA (1)...(19): siRNA sense strand
ggugaugcccgguaucuga

SEQ ID NO: 1618164 - RNA, 19 nt, Homo sapiens
  misc_RNA (1)...(19): siRNA sense strand
aaugauggcugccuguaug

SEQ ID NO: 1618165 - RNA, 19 nt, Homo sapiens
  misc_RNA (1)...(19): siRNA sense strand
gagaagauugucagcaguu

SEQ ID NO: 1618166 - RNA, 19 nt, Homo sapiens
  misc_RNA (1)...(19): siRNA sense strand
ggcaucaccuucauugaca

SEQ ID NO: 1618167 - RNA, 19 nt, Homo sapiens
  misc_RNA (1)...(19): siRNA sense strand
ccaugaggaugaugugaau

SEQ ID NO: 1618168 - RNA, 19 nt, Homo sapiens
  misc_RNA (1)...(19): siRNA sense strand
ggggacagcuccuugauga

SEQ ID NO: 1618169 - RNA, 19 nt, Homo sapiens
  misc_RNA (1)...(19): siRNA sense strand
caagggugaugcccgguau

SEQ ID NO: 1618170 - RNA, 19 nt, Homo sapiens
  misc_RNA (1)...(19): siRNA sense strand
gaauguugcaccagagaga

SEQ ID NO: 1618171 - RNA, 19 nt, Homo sapiens
  misc_RNA (1)...(19): siRNA sense strand
ggaagaggaagaagaggau

SEQ ID NO: 1618172 - RNA, 19 nt, Homo sapiens
  misc_RNA (1)...(19): siRNA sense strand
cuaaagaccagaccaucaa

SEQ ID NO: 1618173 - RNA, 19 nt, Homo sapiens
  misc_RNA (1)...(19): siRNA sense strand
ggagugaggaagaggaaga

SEQ ID NO: 1618174 - RNA, 19 nt, Homo sapiens
  misc_RNA (1)...(19): siRNA sense strand
gcaccaugcgggaggauga

SEQ ID NO: 1618175 - RNA, 19 nt, Homo sapiens
  misc_RNA (1)...(19): siRNA sense strand
ccaucaaacucugggauau

SEQ ID NO: 1618176 - RNA, 19 nt, Homo sapiens
  misc_RNA (1)...(19): siRNA sense strand
uacucuagcuggucugauu

SEQ ID NO: 1618177 - RNA, 19 nt, Homo sapiens
  misc_RNA (1)...(19): siRNA sense strand
gaccagaccaucaaacucu

SEQ ID NO: 1618178 - RNA, 19 nt, Homo sapiens
  misc_RNA (1)...(19): siRNA sense strand
gaacagucucgagugauau

SEQ ID NO: 1618179 - RNA, 19 nt, Homo sapiens
  misc_RNA (1)...(19): siRNA sense strand
gaagagaaugacagagcuu

SEQ ID NO: 1618180 - RNA, 19 nt, Homo sapiens
  misc_RNA (1)...(19): siRNA sense strand
gcugauauaagcucccaaa

SEQ ID NO: 1618181 - RNA, 19 nt, Homo sapiens
  misc_RNA (1)...(19): siRNA sense strand
ggucugauuacauucauau

SEQ ID NO: 1618182 - RNA, 19 nt, Homo sapiens
  misc_RNA (1)...(19): siRNA sense strand
cccgggagcuggaauucaa

SEQ ID NO: 1618183 - RNA, 19 nt, Homo sapiens
  misc_RNA (1)...(19): siRNA sense strand
ggcgcacccuucagauuga

SEQ ID NO: 1618184 - RNA, 19 nt, Homo sapiens
  misc_RNA (1)...(19): siRNA sense strand
guaugucuuugaccgagaa

SEQ ID NO: 1618185 - RNA, 19 nt, Homo sapiens
  misc_RNA (1)...(19): siRNA sense strand
caaauauucaugucugcuu

SEQ ID NO: 1618186 - RNA, 19 nt, Homo sapiens
  misc_RNA (1)...(19): siRNA sense strand
gcuggagcgucuuggaugu

SEQ ID NO: 1618187 - RNA, 19 nt, Homo sapiens
  misc_RNA (1)...(19): siRNA sense strand
cugaguacuuccaggauga

SEQ ID NO: 1618188 - RNA, 19 nt, Homo sapiens
  misc_RNA (1)...(19): siRNA sense strand
ccauugcugucuccucaga

SEQ ID NO: 1618189 - RNA, 19 nt, Homo sapiens
  misc_RNA (1)...(19): siRNA sense strand
aagaagaggaugaagaugu

SEQ ID NO: 1618190 - RNA, 19 nt, Homo sapiens
  misc_RNA (1)...(19): siRNA sense strand
ugauauaagcucccaaauc

SEQ ID NO: 1618191 - RNA, 19 nt, Homo sapiens
  misc_RNA (1)...(19): siRNA sense strand
ucacugauagcuacucuca

SEQ ID NO: 1618192 - RNA, 19 nt, Homo sapiens
  misc_RNA (1)...(19): siRNA sense strand
ggccuuugcugauauaagc

SEQ ID NO: 1618193 - RNA, 19 nt, Homo sapiens
  misc_RNA (1)...(19): siRNA sense strand
gcuacucucagaaggcuuu

SEQ ID NO: 1618194 - RNA, 19 nt, Homo sapiens
  misc_RNA (1)...(19): siRNA sense strand
guacuuccaggaugacaug

SEQ ID NO: 1618195 - RNA, 19 nt, Homo sapiens
  misc_RNA (1)...(19): siRNA sense strand
ggccagcaguucaucuaca

SEQ ID NO: 1618196 - RNA, 19 nt, Homo sapiens
  misc_RNA (1)...(19): siRNA sense strand
uaaagaccagaccaucaaa

SEQ ID NO: 1618197 - RNA, 19 nt, Homo sapiens
  misc_RNA (1)...(19): siRNA sense strand
cugauuacauucauaucug

SEQ ID NO: 1618198 - RNA, 19 nt, Homo sapiens
  misc_RNA (1)...(19): siRNA sense strand
cccgguaucugaucuccaa

SEQ ID NO: 1618199 - RNA, 19 nt, Homo sapiens
  misc_RNA (1)...(19): siRNA sense strand
gauggucaaauauucaugu

SEQ ID NO: 1618200 - RNA, 19 nt, Homo sapiens
  misc_RNA (1)...(19): siRNA sense strand
gaagaagaggaugaagaug

SEQ ID NO: 1618201 - RNA, 19 nt, Homo sapiens
  misc_RNA (1)...(19): siRNA sense strand
acucagaggaagagaauga

SEQ ID NO: 1618202 - RNA, 19 nt, Homo sapiens
  misc_RNA (1)...(19): siRNA sense strand
ugagggagauacacacacu

SEQ ID NO: 1618203 - RNA, 19 nt, Homo sapiens
  misc_RNA (1)...(19): siRNA sense strand
cagacaauccgacucuaug

SEQ ID NO: 1618204 - RNA, 19 nt, Homo sapiens
  misc_RNA (1)...(19): siRNA sense strand
ccagacaauccgacucuau

SEQ ID NO: 1618205 - RNA, 19 nt, Homo sapiens
  misc_RNA (1)...(19): siRNA sense strand
agacaauccgacucuauga

SEQ ID NO: 1618206 - RNA, 19 nt, Homo sapiens
  misc_RNA (1)...(19): siRNA sense strand
gaagcugaccaaccacaag

SEQ ID NO: 1618207 - RNA, 19 nt, Homo sapiens
  misc_RNA (1)...(19): siRNA sense strand
ccaaugaucugggcuucac

SEQ ID NO: 1618208 - RNA, 19 nt, Homo sapiens
  misc_RNA (1)...(19): siRNA sense strand
ugaaugcaguggccuuugc

SEQ ID NO: 1618209 - RNA, 19 nt, Homo sapiens
  misc_RNA (1)...(19): siRNA sense strand
gaaccacuuccucuacucu

SEQ ID NO: 1618210 - RNA, 19 nt, Homo sapiens
  misc_RNA (1)...(19): siRNA sense strand
ucucacuucuugcccaaug

SEQ ID NO: 1618211 - RNA, 19 nt, Homo sapiens
  misc_RNA (1)...(19): siRNA sense strand
aggaugacaugccagaauc

SEQ ID NO: 1618212 - RNA, 19 nt, Homo sapiens
  misc_RNA (1)...(19): siRNA sense strand
cggcgcacccuucagauug

SEQ ID NO: 1618213 - RNA, 19 nt, Homo sapiens
  misc_RNA (1)...(19): siRNA sense strand
caaugauggcugccuguau

SEQ ID NO: 1618214 - RNA, 19 nt, Homo sapiens
  misc_RNA (1)...(19): siRNA sense strand
gaccagacaauccgacucu

SEQ ID NO: 1618215 - RNA, 19 nt, Homo sapiens
  misc_RNA (1)...(19): siRNA sense strand
ccuucuaaguggccacauu

SEQ ID NO: 1618216 - RNA, 19 nt, Homo sapiens
  misc_RNA (1)...(19): siRNA sense strand
gguaucugaucuccaacuc

SEQ ID NO: 1618217 - RNA, 19 nt, Homo sapiens
  misc_RNA (1)...(19): siRNA sense strand
ccaaugauggcugccugua

SEQ ID NO: 1618218 - RNA, 19 nt, Homo sapiens
  misc_RNA (1)...(19): siRNA sense strand
gugaggaagaggaagaaga

SEQ ID NO: 1618219 - RNA, 19 nt, Homo sapiens
  misc_RNA (1)...(19): siRNA sense strand
gaauucaaugagaucaaga

SEQ ID NO: 1618220 - RNA, 19 nt, Homo sapiens
  misc_RNA (1)...(19): siRNA sense strand
caggaugacaugccagaau

SEQ ID NO: 1618221 - RNA, 19 nt, Homo sapiens
  misc_RNA (1)...(19): siRNA sense strand
ccgccaggcugaguacuuc

SEQ ID NO: 1618222 - RNA, 19 nt, Homo sapiens
  misc_RNA (1)...(19): siRNA sense strand
gauugagucccaugaggau

SEQ ID NO: 1618223 - RNA, 19 nt, Homo sapiens
  misc_RNA (1)...(19): siRNA sense strand
cuccucagauggacgagaa

SEQ ID NO: 1618224 - RNA, 19 nt, Homo sapiens
  misc_RNA (1)...(19): siRNA sense strand
ucaccuucauugacagcaa

SEQ ID NO: 1618225 - RNA, 19 nt, Homo sapiens
  misc_RNA (1)...(19): siRNA sense strand
uuugcugucuucuccauug

SEQ ID NO: 1618226 - RNA, 19 nt, Homo sapiens
  misc_RNA (1)...(19): siRNA sense strand
ugaggaagaggaagaagag

SEQ ID NO: 1618227 - RNA, 19 nt, Homo sapiens
  misc_RNA (1)...(19): siRNA sense strand
cuggcaaagugguugugua

SEQ ID NO: 1618228 - RNA, 19 nt, Homo sapiens
  misc_RNA (1)...(19): siRNA sense strand
gccagcaguucaucuacag

SEQ ID NO: 1618229 - RNA, 19 nt, Homo sapiens
  misc_RNA (1)...(19): siRNA sense strand
ucuaaagaccagaccauca

SEQ ID NO: 1618230 - RNA, 19 nt, Homo sapiens
  misc_RNA (1)...(19): siRNA sense strand
caguggccuuugcugauau

SEQ ID NO: 1618231 - RNA, 19 nt, Homo sapiens
  misc_RNA (1)...(19): siRNA sense strand
uaucugcaauaucuauggu

SEQ ID NO: 1618232 - RNA, 19 nt, Homo sapiens
  misc_RNA (1)...(19): siRNA sense strand
agaggaagagaaugacaga

SEQ ID NO: 1618233 - RNA, 19 nt, Homo sapiens
  misc_RNA (1)...(19): siRNA sense strand
agauggacgagaaguacua

SEQ ID NO: 1618234 - RNA, 19 nt, Homo sapiens
  misc_RNA (1)...(19): siRNA sense strand
agaagauugucagcaguuc

SEQ ID NO: 1618235 - RNA, 19 nt, Homo sapiens
  misc_RNA (1)...(19): siRNA sense strand
acagcuccuugaugaccua

SEQ ID NO: 1618236 - RNA, 19 nt, Homo sapiens
  misc_RNA (1)...(19): siRNA sense strand
cagcaaagauggucaaaua

SEQ ID NO: 1618237 - RNA, 19 nt, Homo sapiens
  misc_RNA (1)...(19): siRNA sense strand
gaucugggcuucacugaua

SEQ ID NO: 1618238 - RNA, 19 nt, Homo sapiens
  misc_RNA (1)...(19): siRNA sense strand
gcaaagauggucaaauauu

SEQ ID NO: 1618239 - RNA, 19 nt, Homo sapiens
  misc_RNA (1)...(19): siRNA sense strand
caaagauggucaaauauuc

SEQ ID NO: 1618240 - RNA, 19 nt, Homo sapiens
  misc_RNA (1)...(19): siRNA sense strand
gauauaagcucccaaaucc

SEQ ID NO: 1618241 - RNA, 19 nt, Homo sapiens
  misc_RNA (1)...(19): siRNA sense strand
gcaguggccuuugcugaua

SEQ ID NO: 1618242 - RNA, 19 nt, Homo sapiens
  misc_RNA (1)...(19): siRNA sense strand
gcaaagugguuguguacga

SEQ ID NO: 1618243 - RNA, 19 nt, Homo sapiens
  misc_RNA (1)...(19): siRNA sense strand
gcacagcuuuccucgaaug

SEQ ID NO: 1618244 - RNA, 19 nt, Homo sapiens
  misc_RNA (1)...(19): siRNA sense strand
ucaaugagaucaagacaca

SEQ ID NO: 1618245 - RNA, 19 nt, Homo sapiens
  misc_RNA (1)...(19): siRNA sense strand
gagcuggaauucaaugaga

SEQ ID NO: 1618246 - RNA, 19 nt, Homo sapiens
  misc_RNA (1)...(19): siRNA sense strand
agaacagucucgagugaua

SEQ ID NO: 1618247 - RNA, 19 nt, Homo sapiens
  misc_RNA (1)...(19): siRNA sense strand
ugaagaagcugaccaacca

SEQ ID NO: 1618248 - RNA, 19 nt, Homo sapiens
  misc_RNA (1)...(19): siRNA sense strand
uaucugaucuccaacucua

SEQ ID NO: 1618249 - RNA, 19 nt, Homo sapiens
  misc_RNA (1)...(19): siRNA sense strand
ggaagaagaggaugaagau

SEQ ID NO: 1618250 - RNA, 19 nt, Homo sapiens
  misc_RNA (1)...(19): siRNA sense strand
uagcuggucugauuacauu

SEQ ID NO: 1618251 - RNA, 19 nt, Homo sapiens
  misc_RNA (1)...(19): siRNA sense strand
gaucaagacacaaguggaa

SEQ ID NO: 1618252 - RNA, 19 nt, Homo sapiens
  misc_RNA (1)...(19): siRNA sense strand
ccaauccucuacacccuuu

SEQ ID NO: 1618253 - RNA, 19 nt, Homo sapiens
  misc_RNA (1)...(19): siRNA sense strand
ugacagagcuugggauggu

SEQ ID NO: 1618254 - RNA, 19 nt, Homo sapiens
  misc_RNA (1)...(19): siRNA sense strand
ggaauucaaugagaucaag

SEQ ID NO: 1618255 - RNA, 19 nt, Homo sapiens
  misc_RNA (1)...(19): siRNA sense strand
cagcuuuccucgaauguug

SEQ ID NO: 1618256 - RNA, 19 nt, Homo sapiens
  misc_RNA (1)...(19): siRNA sense strand
ggacucagaggaagagaau

SEQ ID NO: 1618257 - RNA, 19 nt, Homo sapiens
  misc_RNA (1)...(19): siRNA sense strand
agaagaggaugaagaugug

SEQ ID NO: 1618258 - RNA, 19 nt, Homo sapiens
  misc_RNA (1)...(19): siRNA sense strand
ggugaugcccgguaucuga

SEQ ID NO: 1618259 - RNA, 19 nt, Homo sapiens
  misc_RNA (1)...(19): siRNA sense strand
aaugauggcugccuguaug

SEQ ID NO: 1618260 - RNA, 19 nt, Homo sapiens
  misc_RNA (1)...(19): siRNA sense strand
gagaagauugucagcaguu

SEQ ID NO: 1618261 - RNA, 19 nt, Homo sapiens
  misc_RNA (1)...(19): siRNA sense strand
ggcaucaccuucauugaca

SEQ ID NO: 1618262 - RNA, 19 nt, Homo sapiens
  misc_RNA (1)...(19): siRNA sense strand
ccaugaggaugaugugaau

SEQ ID NO: 1618263 - RNA, 19 nt, Homo sapiens
  misc_RNA (1)...(19): siRNA sense strand
ggggacagcuccuugauga

SEQ ID NO: 1618264 - RNA, 19 nt, Homo sapiens
  misc_RNA (1)...(19): siRNA sense strand
caagggugaugcccgguau

SEQ ID NO: 1618265 - RNA, 19 nt, Homo sapiens
  misc_RNA (1)...(19): siRNA sense strand
gaauguugcaccagagaga

SEQ ID NO: 1618266 - RNA, 19 nt, Homo sapiens
  misc_RNA (1)...(19): siRNA sense strand
ggaagaggaagaagaggau

SEQ ID NO: 1618267 - RNA, 19 nt, Homo sapiens
  misc_RNA (1)...(19): siRNA sense strand
cuaaagaccagaccaucaa

SEQ ID NO: 1618268 - RNA, 19 nt, Homo sapiens
  misc_RNA (1)...(19): siRNA sense strand
ggagugaggaagaggaaga

SEQ ID NO: 1618269 - RNA, 19 nt, Homo sapiens
  misc_RNA (1)...(19): siRNA sense strand
gcaccaugcgggaggauga

SEQ ID NO: 1618270 - RNA, 19 nt, Homo sapiens
  misc_RNA (1)...(19): siRNA sense strand
ccaucaaacucugggauau

SEQ ID NO: 1618271 - RNA, 19 nt, Homo sapiens
  misc_RNA (1)...(19): siRNA sense strand
uacucuagcuggucugauu

SEQ ID NO: 1618272 - RNA, 19 nt, Homo sapiens
  misc_RNA (1)...(19): siRNA sense strand
gaccagaccaucaaacucu

SEQ ID NO: 1618273 - RNA, 19 nt, Homo sapiens
  misc_RNA (1)...(19): siRNA sense strand
gaacagucucgagugauau

SEQ ID NO: 1618274 - RNA, 19 nt, Homo sapiens
  misc_RNA (1)...(19): siRNA sense strand
gaagagaaugacagagcuu

SEQ ID NO: 1618275 - RNA, 19 nt, Homo sapiens
  misc_RNA (1)...(19): siRNA sense strand
gcugauauaagcucccaaa

SEQ ID NO: 1618276 - RNA, 19 nt, Homo sapiens
  misc_RNA (1)...(19): siRNA sense strand
ggucugauuacauucauau

SEQ ID NO: 1618277 - RNA, 19 nt, Homo sapiens
  misc_RNA (1)...(19): siRNA sense strand
cccgggagcuggaauucaa

SEQ ID NO: 1618278 - RNA, 19 nt, Homo sapiens
  misc_RNA (1)...(19): siRNA sense strand
ggcgcacccuucagauuga

SEQ ID NO: 1618279 - RNA, 19 nt, Homo sapiens
  misc_RNA (1)...(19): siRNA sense strand
guaugucuuugaccgagaa

SEQ ID NO: 1618280 - RNA, 19 nt, Homo sapiens
  misc_RNA (1)...(19): siRNA sense strand
caaauauucaugucugcuu

SEQ ID NO: 1618281 - RNA, 19 nt, Homo sapiens
  misc_RNA (1)...(19): siRNA sense strand
gcuggagcgucuuggaugu

SEQ ID NO: 1618282 - RNA, 19 nt, Homo sapiens
  misc_RNA (1)...(19): siRNA sense strand
cugaguacuuccaggauga

SEQ ID NO: 1618283 - RNA, 19 nt, Homo sapiens
  misc_RNA (1)...(19): siRNA sense strand
ccauugcugucuccucaga

SEQ ID NO: 1618284 - RNA, 19 nt, Homo sapiens
  misc_RNA (1)...(19): siRNA sense strand
aagaagaggaugaagaugu

SEQ ID NO: 1618285 - RNA, 19 nt, Homo sapiens
  misc_RNA (1)...(19): siRNA sense strand
ugauauaagcucccaaauc

SEQ ID NO: 1618286 - RNA, 19 nt, Homo sapiens
  misc_RNA (1)...(19): siRNA sense strand
ucacugauagcuacucuca

SEQ ID NO: 1618287 - RNA, 19 nt, Homo sapiens
  misc_RNA (1)...(19): siRNA sense strand
ggccuuugcugauauaagc

SEQ ID NO: 1618288 - RNA, 19 nt, Homo sapiens
  misc_RNA (1)...(19): siRNA sense strand
gcuacucucagaaggcuuu

SEQ ID NO: 1618289 - RNA, 19 nt, Homo sapiens
  misc_RNA (1)...(19): siRNA sense strand
guacuuccaggaugacaug

SEQ ID NO: 1618290 - RNA, 19 nt, Homo sapiens
  misc_RNA (1)...(19): siRNA sense strand
ggccagcaguucaucuaca

SEQ ID NO: 1618291 - RNA, 19 nt, Homo sapiens
  misc_RNA (1)...(19): siRNA sense strand
uaaagaccagaccaucaaa

SEQ ID NO: 1618292 - RNA, 19 nt, Homo sapiens
  misc_RNA (1)...(19): siRNA sense strand
cugauuacauucauaucug

SEQ ID NO: 1618293 - RNA, 19 nt, Homo sapiens
  misc_RNA (1)...(19): siRNA sense strand
cccgguaucugaucuccaa

SEQ ID NO: 1618294 - RNA, 19 nt, Homo sapiens
  misc_RNA (1)...(19): siRNA sense strand
gauggucaaauauucaugu

SEQ ID NO: 1618295 - RNA, 19 nt, Homo sapiens
  misc_RNA (1)...(19): siRNA sense strand
gaagaagaggaugaagaug

SEQ ID NO: 1618296 - RNA, 19 nt, Homo sapiens
  misc_RNA (1)...(19): siRNA sense strand
acucagaggaagagaauga

SEQ ID NO: 1618297 - RNA, 19 nt, Homo sapiens
  misc_RNA (1)...(19): siRNA sense strand
ugagggagauacacacacu

SEQ ID NO: 1618298 - RNA, 19 nt, Homo sapiens
  misc_RNA (1)...(19): siRNA sense strand
cagacaauccgacucuaug

SEQ ID NO: 1618299 - RNA, 19 nt, Homo sapiens
  misc_RNA (1)...(19): siRNA sense strand
ccagacaauccgacucuau

SEQ ID NO: 1618300 - RNA, 19 nt, Homo sapiens
  misc_RNA (1)...(19): siRNA sense strand
agacaauccgacucuauga

SEQ ID NO: 1618301 - RNA, 19 nt, Homo sapiens
  misc_RNA (1)...(19): siRNA sense strand
gaagcugaccaaccacaag

SEQ ID NO: 1618302 - RNA, 19 nt, Homo sapiens
  misc_RNA (1)...(19): siRNA sense strand
ccaaugaucugggcuucac

SEQ ID NO: 1618303 - RNA, 19 nt, Homo sapiens
  misc_RNA (1)...(19): siRNA sense strand
ugaaugcaguggccuuugc

SEQ ID NO: 1618304 - RNA, 19 nt, Homo sapiens
  misc_RNA (1)...(19): siRNA sense strand
gaaccacuuccucuacucu

SEQ ID NO: 1618305 - RNA, 19 nt, Homo sapiens
  misc_RNA (1)...(19): siRNA sense strand
ucucacuucuugcccaaug

SEQ ID NO: 1618306 - RNA, 19 nt, Homo sapiens
  misc_RNA (1)...(19): siRNA sense strand
aggaugacaugccagaauc

SEQ ID NO: 1618307 - RNA, 19 nt, Homo sapiens
  misc_RNA (1)...(19): siRNA sense strand
cggcgcacccuucagauug

SEQ ID NO: 1618308 - RNA, 19 nt, Homo sapiens
  misc_RNA (1)...(19): siRNA sense strand
caaugauggcugccuguau

SEQ ID NO: 1618309 - RNA, 19 nt, Homo sapiens
  misc_RNA (1)...(19): siRNA sense strand
gaccagacaauccgacucu

SEQ ID NO: 1618310 - RNA, 19 nt, Homo sapiens
  misc_RNA (1)...(19): siRNA sense strand
ccuucuaaguggccacauu

SEQ ID NO: 1618311 - RNA, 19 nt, Homo sapiens
  misc_RNA (1)...(19): siRNA sense strand
gguaucugaucuccaacuc

SEQ ID NO: 1618312 - RNA, 19 nt, Homo sapiens
  misc_RNA (1)...(19): siRNA sense strand
ccaaugauggcugccugua

SEQ ID NO: 1618313 - RNA, 19 nt, Homo sapiens
  misc_RNA (1)...(19): siRNA sense strand
gugaggaagaggaagaaga

SEQ ID NO: 1618314 - RNA, 19 nt, Homo sapiens
  misc_RNA (1)...(19): siRNA sense strand
gaauucaaugagaucaaga

SEQ ID NO: 1618315 - RNA, 19 nt, Homo sapiens
  misc_RNA (1)...(19): siRNA sense strand
caggaugacaugccagaau

SEQ ID NO: 1618316 - RNA, 19 nt, Homo sapiens
  misc_RNA (1)...(19): siRNA sense strand
ccgccaggcugaguacuuc

SEQ ID NO: 1618317 - RNA, 19 nt, Homo sapiens
  misc_RNA (1)...(19): siRNA sense strand
gauugagucccaugaggau

SEQ ID NO: 1618318 - RNA, 19 nt, Homo sapiens
  misc_RNA (1)...(19): siRNA sense strand
cuccucagauggacgagaa

SEQ ID NO: 1618319 - RNA, 19 nt, Homo sapiens
  misc_RNA (1)...(19): siRNA sense strand
ucaccuucauugacagcaa

SEQ ID NO: 1618320 - RNA, 19 nt, Homo sapiens
  misc_RNA (1)...(19): siRNA sense strand
uuugcugucuucuccauug

SEQ ID NO: 1618321 - RNA, 19 nt, Homo sapiens
  misc_RNA (1)...(19): siRNA sense strand
ugaggaagaggaagaagag

SEQ ID NO: 1618322 - RNA, 19 nt, Homo sapiens
  misc_RNA (1)...(19): siRNA sense strand
cuggcaaagugguugugua

SEQ ID NO: 1618323 - RNA, 19 nt, Homo sapiens
  misc_RNA (1)...(19): siRNA sense strand
gccagcaguucaucuacag

SEQ ID NO: 1618324 - RNA, 19 nt, Homo sapiens
  misc_RNA (1)...(19): siRNA sense strand
ucuaaagaccagaccauca

SEQ ID NO: 1618325 - RNA, 19 nt, Homo sapiens
  misc_RNA (1)...(19): siRNA sense strand
caguggccuuugcugauau

SEQ ID NO: 1618326 - RNA, 19 nt, Homo sapiens
  misc_RNA (1)...(19): siRNA sense strand
uaucugcaauaucuauggu

SEQ ID NO: 1618327 - RNA, 19 nt, Homo sapiens
  misc_RNA (1)...(19): siRNA sense strand
agaggaagagaaugacaga

SEQ ID NO: 1618328 - RNA, 19 nt, Homo sapiens
  misc_RNA (1)...(19): siRNA sense strand
agauggacgagaaguacua

SEQ ID NO: 1618329 - RNA, 19 nt, Homo sapiens
  misc_RNA (1)...(19): siRNA sense strand
agaagauugucagcaguuc

SEQ ID NO: 1618330 - RNA, 19 nt, Homo sapiens
  misc_RNA (1)...(19): siRNA sense strand
acagcuccuugaugaccua

SEQ ID NO: 1618331 - RNA, 19 nt, Homo sapiens
  misc_RNA (1)...(19): siRNA sense strand
gaacucaucuuucuacaga

SEQ ID NO: 1618332 - RNA, 19 nt, Homo sapiens
  misc_RNA (1)...(19): siRNA sense strand
gaaguucuccugccaguua

SEQ ID NO: 1618333 - RNA, 19 nt, Homo sapiens
  misc_RNA (1)...(19): siRNA sense strand
agacagcucuuucuacaua

SEQ ID NO: 1618334 - RNA, 19 nt, Homo sapiens
  misc_RNA (1)...(19): siRNA sense strand
caacauggauggucaagga

SEQ ID NO: 1618335 - RNA, 19 nt, Homo sapiens
  misc_RNA (1)...(19): siRNA sense strand
ggagacagcucuuucuaca

SEQ ID NO: 1618336 - RNA, 19 nt, Homo sapiens
  misc_RNA (1)...(19): siRNA sense strand
ccacgacucuggaaacuau

SEQ ID NO: 1618337 - RNA, 19 nt, Homo sapiens
  misc_RNA (1)...(19): siRNA sense strand
gacaaaggcugugcucuug

SEQ ID NO: 1618338 - RNA, 19 nt, Homo sapiens
  misc_RNA (1)...(19): siRNA sense strand
ggagacagcgugacucuga

SEQ ID NO: 1618339 - RNA, 19 nt, Homo sapiens
  misc_RNA (1)...(19): siRNA sense strand
ucaaggaccuccagcauca

SEQ ID NO: 1618340 - RNA, 19 nt, Homo sapiens
  misc_RNA (1)...(19): siRNA sense strand
ucaaagacauucacaacau

SEQ ID NO: 1618341 - RNA, 19 nt, Homo sapiens
  misc_RNA (1)...(19): siRNA sense strand
ggaagacaaugccacuguu

SEQ ID NO: 1618342 - RNA, 19 nt, Homo sapiens
  misc_RNA (1)...(19): siRNA sense strand
caaagacauucacaacaug

SEQ ID NO: 1618343 - RNA, 19 nt, Homo sapiens
  misc_RNA (1)...(19): siRNA sense strand
cagcaaaacucaaaccuuu

SEQ ID NO: 1618344 - RNA, 19 nt, Homo sapiens
  misc_RNA (1)...(19): siRNA sense strand
ucagcaauguuguuuguga

SEQ ID NO: 1618345 - RNA, 19 nt, Homo sapiens
  misc_RNA (1)...(19): siRNA sense strand
ccacggagcccuuaugaca

SEQ ID NO: 1618346 - RNA, 19 nt, Homo sapiens
  misc_RNA (1)...(19): siRNA sense strand
ucacugccguggccagaaa

SEQ ID NO: 1618347 - RNA, 19 nt, Homo sapiens
  misc_RNA (1)...(19): siRNA sense strand
ugcaggcacuuacuacuaa

SEQ ID NO: 1618348 - RNA, 19 nt, Homo sapiens
  misc_RNA (1)...(19): siRNA sense strand
gcacuuacuacuaauaaag

SEQ ID NO: 1618349 - RNA, 19 nt, Homo sapiens
  misc_RNA (1)...(19): siRNA sense strand
cgacaaaggcugugcucuu

SEQ ID NO: 1618350 - RNA, 19 nt, Homo sapiens
  misc_RNA (1)...(19): siRNA sense strand
gugaggaaguuucagaaca

SEQ ID NO: 1618351 - RNA, 19 nt, Homo sapiens
  misc_RNA (1)...(19): siRNA sense strand
ccucagcaauguuguuugu

SEQ ID NO: 1618352 - RNA, 19 nt, Homo sapiens
  misc_RNA (1)...(19): siRNA sense strand
gcugaacggucaaagacau

SEQ ID NO: 1618353 - RNA, 19 nt, Homo sapiens
  misc_RNA (1)...(19): siRNA sense strand
caaaggcugugcucuuggu

SEQ ID NO: 1618354 - RNA, 19 nt, Homo sapiens
  misc_RNA (1)...(19): siRNA sense strand
gaagacaaugccacuguuc

SEQ ID NO: 1618355 - RNA, 19 nt, Homo sapiens
  misc_RNA (1)...(19): siRNA sense strand
ggguagagccggaagacaa

SEQ ID NO: 1618356 - RNA, 19 nt, Homo sapiens
  misc_RNA (1)...(19): siRNA sense strand
ggagggagacagcucuuuc

SEQ ID NO: 1618357 - RNA, 19 nt, Homo sapiens
  misc_RNA (1)...(19): siRNA sense strand
gggcacgccuuggacagaa

SEQ ID NO: 1618358 - RNA, 19 nt, Homo sapiens
  misc_RNA (1)...(19): siRNA sense strand
caggagccgugccaguauu

SEQ ID NO: 1618359 - RNA, 19 nt, Homo sapiens
  misc_RNA (1)...(19): siRNA sense strand
gguuugagcucagauaucg

SEQ ID NO: 1618360 - RNA, 19 nt, Homo sapiens
  misc_RNA (1)...(19): siRNA sense strand
ugaggaaguuucagaacag

SEQ ID NO: 1618361 - RNA, 19 nt, Homo sapiens
  misc_RNA (1)...(19): siRNA sense strand
ggcacuuacuacuaauaaa

SEQ ID NO: 1618362 - RNA, 19 nt, Homo sapiens
  misc_RNA (1)...(19): siRNA sense strand
ggucaaagacauucacaac

SEQ ID NO: 1618363 - RNA, 19 nt, Homo sapiens
  misc_RNA (1)...(19): siRNA sense strand
ucaggguuguggaaucuug

SEQ ID NO: 1618364 - RNA, 19 nt, Homo sapiens
  misc_RNA (1)...(19): siRNA sense strand
gcaggcacuuacuacuaau

SEQ ID NO: 1618365 - RNA, 19 nt, Homo sapiens
  misc_RNA (1)...(19): siRNA sense strand
cuacuaauaaagacgauga

SEQ ID NO: 1618366 - RNA, 19 nt, Homo sapiens
  misc_RNA (1)...(19): siRNA sense strand
ccuuaugacaucagcaaua

SEQ ID NO: 1618367 - RNA, 19 nt, Homo sapiens
  misc_RNA (1)...(19): siRNA sense strand
gcugcgggcucugaaggaa

SEQ ID NO: 1618368 - RNA, 19 nt, Homo sapiens
  misc_RNA (1)...(19): siRNA sense strand
gaggaaguuucagaacagu

SEQ ID NO: 1618369 - RNA, 19 nt, Homo sapiens
  misc_RNA (1)...(19): siRNA sense strand
gguagagccggaagacaau

SEQ ID NO: 1618370 - RNA, 19 nt, Homo sapiens
  misc_RNA (1)...(19): siRNA sense strand
gaacggucaaagacauuca

SEQ ID NO: 1618371 - RNA, 19 nt, Homo sapiens
  misc_RNA (1)...(19): siRNA sense strand
gaggcgugcugaccagucu

SEQ ID NO: 1618372 - RNA, 19 nt, Homo sapiens
  misc_RNA (1)...(19): siRNA sense strand
gggagcaaguucagcaaaa

SEQ ID NO: 1618373 - RNA, 19 nt, Homo sapiens
  misc_RNA (1)...(19): siRNA sense strand
ggaagcugcgggcucugaa

SEQ ID NO: 1618374 - RNA, 19 nt, Homo sapiens
  misc_RNA (1)...(19): siRNA sense strand
ccaggagccgugccaguau

SEQ ID NO: 1618375 - RNA, 19 nt, Homo sapiens
  misc_RNA (1)...(19): siRNA sense strand
acggagcccuuaugacauc

SEQ ID NO: 1618376 - RNA, 19 nt, Homo sapiens
  misc_RNA (1)...(19): siRNA sense strand
gcaaaacucaaaccuuuca

SEQ ID NO: 1618377 - RNA, 19 nt, Homo sapiens
  misc_RNA (1)...(19): siRNA sense strand
ccaugugcgucgccaguag

SEQ ID NO: 1618378 - RNA, 19 nt, Homo sapiens
  misc_RNA (1)...(19): siRNA sense strand
ggaccuccagcaucacugu

SEQ ID NO: 1618379 - RNA, 19 nt, Homo sapiens
  misc_RNA (1)...(19): siRNA sense strand
cuuaugacaucagcaauac

SEQ ID NO: 1618380 - RNA, 19 nt, Homo sapiens
  misc_RNA (1)...(19): siRNA sense strand
cgaugauaauauucucuuc

SEQ ID NO: 1618381 - RNA, 19 nt, Homo sapiens
  misc_RNA (1)...(19): siRNA sense strand
gggcugaacggucaaagac

SEQ ID NO: 1618382 - RNA, 19 nt, Homo sapiens
  misc_RNA (1)...(19): siRNA sense strand
cagcugggacugugcacuu

SEQ ID NO: 1618383 - RNA, 19 nt, Homo sapiens
  misc_RNA (1)...(19): siRNA sense strand
ccaguagugucgggagcaa

SEQ ID NO: 1618384 - RNA, 19 nt, Homo sapiens
  misc_RNA (1)...(19): siRNA sense strand
ugcauccgccguacucuuu

SEQ ID NO: 1618385 - RNA, 19 nt, Homo sapiens
  misc_RNA (1)...(19): siRNA sense strand
gcaugcauccgccguacuc

SEQ ID NO: 1618386 - RNA, 19 nt, Homo sapiens
  misc_RNA (1)...(19): siRNA sense strand
ugaaggaaggcaagacaag

SEQ ID NO: 1618387 - RNA, 19 nt, Homo sapiens
  misc_RNA (1)...(19): siRNA sense strand
cggaagacaaugccacugu

SEQ ID NO: 1618388 - RNA, 19 nt, Homo sapiens
  misc_RNA (1)...(19): siRNA sense strand
gggagacagcucuuucuac

SEQ ID NO: 1618389 - RNA, 19 nt, Homo sapiens
  misc_RNA (1)...(19): siRNA sense strand
aggcacuuacuacuaauaa

SEQ ID NO: 1618390 - RNA, 19 nt, Homo sapiens
  misc_RNA (1)...(19): siRNA sense strand
gucaaagacauucacaaca

SEQ ID NO: 1618391 - RNA, 19 nt, Homo sapiens
  misc_RNA (1)...(19): siRNA sense strand
ccaggagucccagaaguuc

SEQ ID NO: 1618392 - RNA, 19 nt, Homo sapiens
  misc_RNA (1)...(19): siRNA sense strand
caggcacuuacuacuaaua

SEQ ID NO: 1618393 - RNA, 19 nt, Homo sapiens
  misc_RNA (1)...(19): siRNA sense strand
uccaggagccgugccagua

SEQ ID NO: 1618394 - RNA, 19 nt, Homo sapiens
  misc_RNA (1)...(19): siRNA sense strand
gacagcucuuucuacauag

SEQ ID NO: 1618395 - RNA, 19 nt, Homo sapiens
  misc_RNA (1)...(19): siRNA sense strand
gagggagacagcucuuucu

SEQ ID NO: 1618396 - RNA, 19 nt, Homo sapiens
  misc_RNA (1)...(19): siRNA sense strand
gaacucaucuuucuacaga

SEQ ID NO: 1618397 - RNA, 19 nt, Homo sapiens
  misc_RNA (1)...(19): siRNA sense strand
gaaguucuccugccaguua

SEQ ID NO: 1618398 - RNA, 19 nt, Homo sapiens
  misc_RNA (1)...(19): siRNA sense strand
agacagcucuuucuacaua

SEQ ID NO: 1618399 - RNA, 19 nt, Homo sapiens
  misc_RNA (1)...(19): siRNA sense strand
caacauggauggucaagga

SEQ ID NO: 1618400 - RNA, 19 nt, Homo sapiens
  misc_RNA (1)...(19): siRNA sense strand
ggagacagcucuuucuaca

SEQ ID NO: 1618401 - RNA, 19 nt, Homo sapiens
  misc_RNA (1)...(19): siRNA sense strand
ccacgacucuggaaacuau

SEQ ID NO: 1618402 - RNA, 19 nt, Homo sapiens
  misc_RNA (1)...(19): siRNA sense strand
gacaaaggcugugcucuug

SEQ ID NO: 1618403 - RNA, 19 nt, Homo sapiens
  misc_RNA (1)...(19): siRNA sense strand
ggagacagcgugacucuga

SEQ ID NO: 1618404 - RNA, 19 nt, Homo sapiens
  misc_RNA (1)...(19): siRNA sense strand
ucaaggaccuccagcauca

SEQ ID NO: 1618405 - RNA, 19 nt, Homo sapiens
  misc_RNA (1)...(19): siRNA sense strand
ucaaagacauucacaacau

SEQ ID NO: 1618406 - RNA, 19 nt, Homo sapiens
  misc_RNA (1)...(19): siRNA sense strand
ggaagacaaugccacuguu

SEQ ID NO: 1618407 - RNA, 19 nt, Homo sapiens
  misc_RNA (1)...(19): siRNA sense strand
caaagacauucacaacaug

SEQ ID NO: 1618408 - RNA, 19 nt, Homo sapiens
  misc_RNA (1)...(19): siRNA sense strand
cagcaaaacucaaaccuuu

SEQ ID NO: 1618409 - RNA, 19 nt, Homo sapiens
  misc_RNA (1)...(19): siRNA sense strand
ucagcaauguuguuuguga

SEQ ID NO: 1618410 - RNA, 19 nt, Homo sapiens
  misc_RNA (1)...(19): siRNA sense strand
ucacugccguggccagaaa

SEQ ID NO: 1618411 - RNA, 19 nt, Homo sapiens
  misc_RNA (1)...(19): siRNA sense strand
ugcaggcacuuacuacuaa

SEQ ID NO: 1618412 - RNA, 19 nt, Homo sapiens
  misc_RNA (1)...(19): siRNA sense strand
gcacuuacuacuaauaaag

SEQ ID NO: 1618413 - RNA, 19 nt, Homo sapiens
  misc_RNA (1)...(19): siRNA sense strand
cgacaaaggcugugcucuu

SEQ ID NO: 1618414 - RNA, 19 nt, Homo sapiens
  misc_RNA (1)...(19): siRNA sense strand
gugaggaaguuucagaaca

SEQ ID NO: 1618415 - RNA, 19 nt, Homo sapiens
  misc_RNA (1)...(19): siRNA sense strand
ccucagcaauguuguuugu

SEQ ID NO: 1618416 - RNA, 19 nt, Homo sapiens
  misc_RNA (1)...(19): siRNA sense strand
gcugaacggucaaagacau

SEQ ID NO: 1618417 - RNA, 19 nt, Homo sapiens
  misc_RNA (1)...(19): siRNA sense strand
caaaggcugugcucuuggu

SEQ ID NO: 1618418 - RNA, 19 nt, Homo sapiens
  misc_RNA (1)...(19): siRNA sense strand
gaagacaaugccacuguuc

SEQ ID NO: 1618419 - RNA, 19 nt, Homo sapiens
  misc_RNA (1)...(19): siRNA sense strand
ggguagagccggaagacaa

SEQ ID NO: 1618420 - RNA, 19 nt, Homo sapiens
  misc_RNA (1)...(19): siRNA sense strand
ggagggagacagcucuuuc

SEQ ID NO: 1618421 - RNA, 19 nt, Homo sapiens
  misc_RNA (1)...(19): siRNA sense strand
gggcacgccuuggacagaa

SEQ ID NO: 1618422 - RNA, 19 nt, Homo sapiens
  misc_RNA (1)...(19): siRNA sense strand
caggagccgugccaguauu

SEQ ID NO: 1618423 - RNA, 19 nt, Homo sapiens
  misc_RNA (1)...(19): siRNA sense strand
gguuugagcucagauaucg

SEQ ID NO: 1618424 - RNA, 19 nt, Homo sapiens
  misc_RNA (1)...(19): siRNA sense strand
ugaggaaguuucagaacag

SEQ ID NO: 1618425 - RNA, 19 nt, Homo sapiens
  misc_RNA (1)...(19): siRNA sense strand
ggcacuuacuacuaauaaa

SEQ ID NO: 1618426 - RNA, 19 nt, Homo sapiens
  misc_RNA (1)...(19): siRNA sense strand
ggucaaagacauucacaac

SEQ ID NO: 1618427 - RNA, 19 nt, Homo sapiens
  misc_RNA (1)...(19): siRNA sense strand
ucaggguuguggaaucuug

SEQ ID NO: 1618428 - RNA, 19 nt, Homo sapiens
  misc_RNA (1)...(19): siRNA sense strand
gcaggcacuuacuacuaau

SEQ ID NO: 1618429 - RNA, 19 nt, Homo sapiens
  misc_RNA (1)...(19): siRNA sense strand
cuacuaauaaagacgauga

SEQ ID NO: 1618430 - RNA, 19 nt, Homo sapiens
  misc_RNA (1)...(19): siRNA sense strand
gaggaaguuucagaacagu

SEQ ID NO: 1618431 - RNA, 19 nt, Homo sapiens
  misc_RNA (1)...(19): siRNA sense strand
gguagagccggaagacaau

SEQ ID NO: 1618432 - RNA, 19 nt, Homo sapiens
  misc_RNA (1)...(19): siRNA sense strand
gaacggucaaagacauuca

SEQ ID NO: 1618433 - RNA, 19 nt, Homo sapiens
  misc_RNA (1)...(19): siRNA sense strand
gaggcgugcugaccagucu

SEQ ID NO: 1618434 - RNA, 19 nt, Homo sapiens
  misc_RNA (1)...(19): siRNA sense strand
gggagcaaguucagcaaaa

SEQ ID NO: 1618435 - RNA, 19 nt, Homo sapiens
  misc_RNA (1)...(19): siRNA sense strand
ccaggagccgugccaguau

SEQ ID NO: 1618436 - RNA, 19 nt, Homo sapiens
  misc_RNA (1)...(19): siRNA sense strand
gcaaaacucaaaccuuuca

SEQ ID NO: 1618437 - RNA, 19 nt, Homo sapiens
  misc_RNA (1)...(19): siRNA sense strand
ccaugugcgucgccaguag

SEQ ID NO: 1618438 - RNA, 19 nt, Homo sapiens
  misc_RNA (1)...(19): siRNA sense strand
ggaccuccagcaucacugu

SEQ ID NO: 1618439 - RNA, 19 nt, Homo sapiens
  misc_RNA (1)...(19): siRNA sense strand
cgaugauaauauucucuuc

SEQ ID NO: 1618440 - RNA, 19 nt, Homo sapiens
  misc_RNA (1)...(19): siRNA sense strand
gggcugaacggucaaagac

SEQ ID NO: 1618441 - RNA, 19 nt, Homo sapiens
  misc_RNA (1)...(19): siRNA sense strand
cagcugggacugugcacuu

SEQ ID NO: 1618442 - RNA, 19 nt, Homo sapiens
  misc_RNA (1)...(19): siRNA sense strand
ccaguagugucgggagcaa

SEQ ID NO: 1618443 - RNA, 19 nt, Homo sapiens
  misc_RNA (1)...(19): siRNA sense strand
cggaagacaaugccacugu

SEQ ID NO: 1618444 - RNA, 19 nt, Homo sapiens
  misc_RNA (1)...(19): siRNA sense strand
gggagacagcucuuucuac

SEQ ID NO: 1618445 - RNA, 19 nt, Homo sapiens
  misc_RNA (1)...(19): siRNA sense strand
aggcacuuacuacuaauaa

SEQ ID NO: 1618446 - RNA, 19 nt, Homo sapiens
  misc_RNA (1)...(19): siRNA sense strand
gucaaagacauucacaaca

SEQ ID NO: 1618447 - RNA, 19 nt, Homo sapiens
  misc_RNA (1)...(19): siRNA sense strand
uccaggagccgugccagua

SEQ ID NO: 1618448 - RNA, 19 nt, Homo sapiens
  misc_RNA (1)...(19): siRNA sense strand
caggcacuuacuacuaaua

SEQ ID NO: 1618449 - RNA, 19 nt, Homo sapiens
  misc_RNA (1)...(19): siRNA sense strand
gacagcucuuucuacauag

SEQ ID NO: 1618450 - RNA, 19 nt, Homo sapiens
  misc_RNA (1)...(19): siRNA sense strand
gagggagacagcucuuucu

SEQ ID NO: 1618451 - RNA, 19 nt, Homo sapiens
  misc_RNA (1)...(19): siRNA sense strand
ccaggagucccagaaguuc

SEQ ID NO: 1618452 - RNA, 19 nt, Homo sapiens
  misc_RNA (1)...(19): siRNA sense strand
gaggaaaucuggaacuuug

SEQ ID NO: 1618453 - RNA, 19 nt, Homo sapiens
  misc_RNA (1)...(19): siRNA sense strand
gaaccuaugugaucaacaa

SEQ ID NO: 1618454 - RNA, 19 nt, Homo sapiens
  misc_RNA (1)...(19): siRNA sense strand
ggacuaugaugucuccuuu

SEQ ID NO: 1618455 - RNA, 19 nt, Homo sapiens
  misc_RNA (1)...(19): siRNA sense strand
aggaaacgcuggacucuuu

SEQ ID NO: 1618456 - RNA, 19 nt, Homo sapiens
  misc_RNA (1)...(19): siRNA sense strand
caaacuggguggagaucua

SEQ ID NO: 1618457 - RNA, 19 nt, Homo sapiens
  misc_RNA (1)...(19): siRNA sense strand
gaugagaccaccuaugaaa

SEQ ID NO: 1618458 - RNA, 19 nt, Homo sapiens
  misc_RNA (1)...(19): siRNA sense strand
cagagugucuauuugauga

SEQ ID NO: 1618459 - RNA, 19 nt, Homo sapiens
  misc_RNA (1)...(19): siRNA sense strand
ggaguggugucuuaacugu

SEQ ID NO: 1618460 - RNA, 19 nt, Homo sapiens
  misc_RNA (1)...(19): siRNA sense strand
aagcaaaucuggcuaucuu

SEQ ID NO: 1618461 - RNA, 19 nt, Homo sapiens
  misc_RNA (1)...(19): siRNA sense strand
uagaugagaccaccuauga

SEQ ID NO: 1618462 - RNA, 19 nt, Homo sapiens
  misc_RNA (1)...(19): siRNA sense strand
gaaccaacguggccucaac

SEQ ID NO: 1618463 - RNA, 19 nt, Homo sapiens
  misc_RNA (1)...(19): siRNA sense strand
gaccaccuaugaaagacua

SEQ ID NO: 1618464 - RNA, 19 nt, Homo sapiens
  misc_RNA (1)...(19): siRNA sense strand
ccgcagagcucacuaaagc

SEQ ID NO: 1618465 - RNA, 19 nt, Homo sapiens
  misc_RNA (1)...(19): siRNA sense strand
ugucuuaacugucaaacug

SEQ ID NO: 1618466 - RNA, 19 nt, Homo sapiens
  misc_RNA (1)...(19): siRNA sense strand
aaaccaaacuggacuuguc

SEQ ID NO: 1618467 - RNA, 19 nt, Homo sapiens
  misc_RNA (1)...(19): siRNA sense strand
ggaaacgcuggacucuuua

SEQ ID NO: 1618468 - RNA, 19 nt, Homo sapiens
  misc_RNA (1)...(19): siRNA sense strand
gacaagccauacacguuug

SEQ ID NO: 1618469 - RNA, 19 nt, Homo sapiens
  misc_RNA (1)...(19): siRNA sense strand
agagcucacuaaagccuua

SEQ ID NO: 1618470 - RNA, 19 nt, Homo sapiens
  misc_RNA (1)...(19): siRNA sense strand
uugaagaccuugcagacaa

SEQ ID NO: 1618471 - RNA, 19 nt, Homo sapiens
  misc_RNA (1)...(19): siRNA sense strand
aaagcagagugucuauuug

SEQ ID NO: 1618472 - RNA, 19 nt, Homo sapiens
  misc_RNA (1)...(19): siRNA sense strand
agacaagccauacacguuu

SEQ ID NO: 1618473 - RNA, 19 nt, Homo sapiens
  misc_RNA (1)...(19): siRNA sense strand
gcagagugucuauuugaug

SEQ ID NO: 1618474 - RNA, 19 nt, Homo sapiens
  misc_RNA (1)...(19): siRNA sense strand
cauacacguuugaggacua

SEQ ID NO: 1618475 - RNA, 19 nt, Homo sapiens
  misc_RNA (1)...(19): siRNA sense strand
ucaaccagauuuggaaugu

SEQ ID NO: 1618476 - RNA, 19 nt, Homo sapiens
  misc_RNA (1)...(19): siRNA sense strand
gaaagacuagcagaggaaa

SEQ ID NO: 1618477 - RNA, 19 nt, Homo sapiens
  misc_RNA (1)...(19): siRNA sense strand
ucaacaagcagacgccaaa

SEQ ID NO: 1618478 - RNA, 19 nt, Homo sapiens
  misc_RNA (1)...(19): siRNA sense strand
ugagaccaccuaugaaaga

SEQ ID NO: 1618479 - RNA, 19 nt, Homo sapiens
  misc_RNA (1)...(19): siRNA sense strand
cacccaggcucucuagaug

SEQ ID NO: 1618480 - RNA, 19 nt, Homo sapiens
  misc_RNA (1)...(19): siRNA sense strand
cagacaagccauacacguu

SEQ ID NO: 1618481 - RNA, 19 nt, Homo sapiens
  misc_RNA (1)...(19): siRNA sense strand
aaccagauuuggaauguca

SEQ ID NO: 1618482 - RNA, 19 nt, Homo sapiens
  misc_RNA (1)...(19): siRNA sense strand
aagcagagugucuauuuga

SEQ ID NO: 1618483 - RNA, 19 nt, Homo sapiens
  misc_RNA (1)...(19): siRNA sense strand
gcaaaucuggcuaucuucu

SEQ ID NO: 1618484 - RNA, 19 nt, Homo sapiens
  misc_RNA (1)...(19): siRNA sense strand
gagugucuauuugaugaau

SEQ ID NO: 1618485 - RNA, 19 nt, Homo sapiens
  misc_RNA (1)...(19): siRNA sense strand
ugaaagacuagcagaggaa

SEQ ID NO: 1618486 - RNA, 19 nt, Homo sapiens
  misc_RNA (1)...(19): siRNA sense strand
cuuugggaguggugucuua

SEQ ID NO: 1618487 - RNA, 19 nt, Homo sapiens
  misc_RNA (1)...(19): siRNA sense strand
ggaccuaagcguuaugacu

SEQ ID NO: 1618488 - RNA, 19 nt, Homo sapiens
  misc_RNA (1)...(19): siRNA sense strand
acaagcagacgccaaacaa

SEQ ID NO: 1618489 - RNA, 19 nt, Homo sapiens
  misc_RNA (1)...(19): siRNA sense strand
aaacuggacuugucuuccu

SEQ ID NO: 1618490 - RNA, 19 nt, Homo sapiens
  misc_RNA (1)...(19): siRNA sense strand
aaaagcagagugucuauuu

SEQ ID NO: 1618491 - RNA, 19 nt, Homo sapiens
  misc_RNA (1)...(19): siRNA sense strand
aguggugucuuaacuguca

SEQ ID NO: 1618492 - RNA, 19 nt, Homo sapiens
  misc_RNA (1)...(19): siRNA sense strand
ccuaugugaucaacaagca

SEQ ID NO: 1618493 - RNA, 19 nt, Homo sapiens
  misc_RNA (1)...(19): siRNA sense strand
gaaacgcuggacucuuuag

SEQ ID NO: 1618494 - RNA, 19 nt, Homo sapiens
  misc_RNA (1)...(19): siRNA sense strand
ugucuuccuuggccuauuc

SEQ ID NO: 1618495 - RNA, 19 nt, Homo sapiens
  misc_RNA (1)...(19): siRNA sense strand
acuaugaugucuccuuugg

SEQ ID NO: 1618496 - RNA, 19 nt, Homo sapiens
  misc_RNA (1)...(19): siRNA sense strand
ugaggaaaucuggaacuuu

SEQ ID NO: 1618497 - RNA, 19 nt, Homo sapiens
  misc_RNA (1)...(19): siRNA sense strand
ccacccaggcucucuagau

SEQ ID NO: 1618498 - RNA, 19 nt, Homo sapiens
  misc_RNA (1)...(19): siRNA sense strand
gcagacgccaaacaagcaa

SEQ ID NO: 1618499 - RNA, 19 nt, Homo sapiens
  misc_RNA (1)...(19): siRNA sense strand
ccaaacuggacuugucuuc

SEQ ID NO: 1618500 - RNA, 19 nt, Homo sapiens
  misc_RNA (1)...(19): siRNA sense strand
gaggaaacgcuggacucuu

SEQ ID NO: 1618501 - RNA, 19 nt, Homo sapiens
  misc_RNA (1)...(19): siRNA sense strand
uugaggaaaucuggaacuu

SEQ ID NO: 1618502 - RNA, 19 nt, Homo sapiens
  misc_RNA (1)...(19): siRNA sense strand
gagaccaccuaugaaagac

SEQ ID NO: 1618503 - RNA, 19 nt, Homo sapiens
  misc_RNA (1)...(19): siRNA sense strand
caaccagauuuggaauguc

SEQ ID NO: 1618504 - RNA, 19 nt, Homo sapiens
  misc_RNA (1)...(19): siRNA sense strand
acacguuugaggacuauga

SEQ ID NO: 1618505 - RNA, 19 nt, Homo sapiens
  misc_RNA (1)...(19): siRNA sense strand
gaggaaaucuggaacuuug

SEQ ID NO: 1618506 - RNA, 19 nt, Homo sapiens
  misc_RNA (1)...(19): siRNA sense strand
gaaccuaugugaucaacaa

SEQ ID NO: 1618507 - RNA, 19 nt, Homo sapiens
  misc_RNA (1)...(19): siRNA sense strand
ggacuaugaugucuccuuu

SEQ ID NO: 1618508 - RNA, 19 nt, Homo sapiens
  misc_RNA (1)...(19): siRNA sense strand
aggaaacgcuggacucuuu

SEQ ID NO: 1618509 - RNA, 19 nt, Homo sapiens
  misc_RNA (1)...(19): siRNA sense strand
caaacuggguggagaucua

SEQ ID NO: 1618510 - RNA, 19 nt, Homo sapiens
  misc_RNA (1)...(19): siRNA sense strand
gaugagaccaccuaugaaa

SEQ ID NO: 1618511 - RNA, 19 nt, Homo sapiens
  misc_RNA (1)...(19): siRNA sense strand
cagagugucuauuugauga

SEQ ID NO: 1618512 - RNA, 19 nt, Homo sapiens
  misc_RNA (1)...(19): siRNA sense strand
ggaguggugucuuaacugu

SEQ ID NO: 1618513 - RNA, 19 nt, Homo sapiens
  misc_RNA (1)...(19): siRNA sense strand
aagcaaaucuggcuaucuu

SEQ ID NO: 1618514 - RNA, 19 nt, Homo sapiens
  misc_RNA (1)...(19): siRNA sense strand
uagaugagaccaccuauga

SEQ ID NO: 1618515 - RNA, 19 nt, Homo sapiens
  misc_RNA (1)...(19): siRNA sense strand
gaaccaacguggccucaac

SEQ ID NO: 1618516 - RNA, 19 nt, Homo sapiens
  misc_RNA (1)...(19): siRNA sense strand
gaccaccuaugaaagacua

SEQ ID NO: 1618517 - RNA, 19 nt, Homo sapiens
  misc_RNA (1)...(19): siRNA sense strand
ccgcagagcucacuaaagc

SEQ ID NO: 1618518 - RNA, 19 nt, Homo sapiens
  misc_RNA (1)...(19): siRNA sense strand
ugucuuaacugucaaacug

SEQ ID NO: 1618519 - RNA, 19 nt, Homo sapiens
  misc_RNA (1)...(19): siRNA sense strand
ggaaacgcuggacucuuua

SEQ ID NO: 1618520 - RNA, 19 nt, Homo sapiens
  misc_RNA (1)...(19): siRNA sense strand
gacaagccauacacguuug

SEQ ID NO: 1618521 - RNA, 19 nt, Homo sapiens
  misc_RNA (1)...(19): siRNA sense strand
agagcucacuaaagccuua

SEQ ID NO: 1618522 - RNA, 19 nt, Homo sapiens
  misc_RNA (1)...(19): siRNA sense strand
uugaagaccuugcagacaa

SEQ ID NO: 1618523 - RNA, 19 nt, Homo sapiens
  misc_RNA (1)...(19): siRNA sense strand
aaagcagagugucuauuug

SEQ ID NO: 1618524 - RNA, 19 nt, Homo sapiens
  misc_RNA (1)...(19): siRNA sense strand
agacaagccauacacguuu

SEQ ID NO: 1618525 - RNA, 19 nt, Homo sapiens
  misc_RNA (1)...(19): siRNA sense strand
gcagagugucuauuugaug

SEQ ID NO: 1618526 - RNA, 19 nt, Homo sapiens
  misc_RNA (1)...(19): siRNA sense strand
cauacacguuugaggacua

SEQ ID NO: 1618527 - RNA, 19 nt, Homo sapiens
  misc_RNA (1)...(19): siRNA sense strand
ucaaccagauuuggaaugu

SEQ ID NO: 1618528 - RNA, 19 nt, Homo sapiens
  misc_RNA (1)...(19): siRNA sense strand
gaaagacuagcagaggaaa

SEQ ID NO: 1618529 - RNA, 19 nt, Homo sapiens
  misc_RNA (1)...(19): siRNA sense strand
ucaacaagcagacgccaaa

SEQ ID NO: 1618530 - RNA, 19 nt, Homo sapiens
  misc_RNA (1)...(19): siRNA sense strand
ugagaccaccuaugaaaga

SEQ ID NO: 1618531 - RNA, 19 nt, Homo sapiens
  misc_RNA (1)...(19): siRNA sense strand
cacccaggcucucuagaug

SEQ ID NO: 1618532 - RNA, 19 nt, Homo sapiens
  misc_RNA (1)...(19): siRNA sense strand
aaccagauuuggaauguca

SEQ ID NO: 1618533 - RNA, 19 nt, Homo sapiens
  misc_RNA (1)...(19): siRNA sense strand
aagcagagugucuauuuga

SEQ ID NO: 1618534 - RNA, 19 nt, Homo sapiens
  misc_RNA (1)...(19): siRNA sense strand
cagacaagccauacacguu

SEQ ID NO: 1618535 - RNA, 19 nt, Homo sapiens
  misc_RNA (1)...(19): siRNA sense strand
gcaaaucuggcuaucuucu

SEQ ID NO: 1618536 - RNA, 19 nt, Homo sapiens
  misc_RNA (1)...(19): siRNA sense strand
gagugucuauuugaugaau

SEQ ID NO: 1618537 - RNA, 19 nt, Homo sapiens
  misc_RNA (1)...(19): siRNA sense strand
ugaaagacuagcagaggaa

SEQ ID NO: 1618538 - RNA, 19 nt, Homo sapiens
  misc_RNA (1)...(19): siRNA sense strand
cuuugggaguggugucuua

SEQ ID NO: 1618539 - RNA, 19 nt, Homo sapiens
  misc_RNA (1)...(19): siRNA sense strand
ggaccuaagcguuaugacu

SEQ ID NO: 1618540 - RNA, 19 nt, Homo sapiens
  misc_RNA (1)...(19): siRNA sense strand
acaagcagacgccaaacaa

SEQ ID NO: 1618541 - RNA, 19 nt, Homo sapiens
  misc_RNA (1)...(19): siRNA sense strand
aaaagcagagugucuauuu

SEQ ID NO: 1618542 - RNA, 19 nt, Homo sapiens
  misc_RNA (1)...(19): siRNA sense strand
aguggugucuuaacuguca

SEQ ID NO: 1618543 - RNA, 19 nt, Homo sapiens
  misc_RNA (1)...(19): siRNA sense strand
ccuaugugaucaacaagca

SEQ ID NO: 1618544 - RNA, 19 nt, Homo sapiens
  misc_RNA (1)...(19): siRNA sense strand
gaaacgcuggacucuuuag

SEQ ID NO: 1618545 - RNA, 19 nt, Homo sapiens
  misc_RNA (1)...(19): siRNA sense strand
acuaugaugucuccuuugg

SEQ ID NO: 1618546 - RNA, 19 nt, Homo sapiens
  misc_RNA (1)...(19): siRNA sense strand
ugaggaaaucuggaacuuu

SEQ ID NO: 1618547 - RNA, 19 nt, Homo sapiens
  misc_RNA (1)...(19): siRNA sense strand
ccacccaggcucucuagau

SEQ ID NO: 1618548 - RNA, 19 nt, Homo sapiens
  misc_RNA (1)...(19): siRNA sense strand
gcagacgccaaacaagcaa

SEQ ID NO: 1618549 - RNA, 19 nt, Homo sapiens
  misc_RNA (1)...(19): siRNA sense strand
gagaccaccuaugaaagac

SEQ ID NO: 1618550 - RNA, 19 nt, Homo sapiens
  misc_RNA (1)...(19): siRNA sense strand
uugaggaaaucuggaacuu

SEQ ID NO: 1618551 - RNA, 19 nt, Homo sapiens
  misc_RNA (1)...(19): siRNA sense strand
gaggaaacgcuggacucuu

SEQ ID NO: 1618552 - RNA, 19 nt, Homo sapiens
  misc_RNA (1)...(19): siRNA sense strand
acacguuugaggacuauga

SEQ ID NO: 1618553 - RNA, 19 nt, Homo sapiens
  misc_RNA (1)...(19): siRNA sense strand
caaccagauuuggaauguc

SEQ ID NO: 1618554 - RNA, 19 nt, Homo sapiens
  misc_RNA (1)...(19): siRNA sense strand
aaucagaagugcuccuaua

SEQ ID NO: 1618555 - RNA, 19 nt, Homo sapiens
  misc_RNA (1)...(19): siRNA sense strand
caacacuucuccugcuauu

SEQ ID NO: 1618556 - RNA, 19 nt, Homo sapiens
  misc_RNA (1)...(19): siRNA sense strand
ccagaagaguguuauccua

SEQ ID NO: 1618557 - RNA, 19 nt, Homo sapiens
  misc_RNA (1)...(19): siRNA sense strand
cagaagugcuccuauauac

SEQ ID NO: 1618558 - RNA, 19 nt, Homo sapiens
  misc_RNA (1)...(19): siRNA sense strand
ggaaaccagaagaguguua

SEQ ID NO: 1618559 - RNA, 19 nt, Homo sapiens
  misc_RNA (1)...(19): siRNA sense strand
caaugcaccuugcugaaug

SEQ ID NO: 1618560 - RNA, 19 nt, Homo sapiens
  misc_RNA (1)...(19): siRNA sense strand
gggaaaagcuccuccucua

SEQ ID NO: 1618561 - RNA, 19 nt, Homo sapiens
  misc_RNA (1)...(19): siRNA sense strand
gcuccuauauaccuaaaug

SEQ ID NO: 1618562 - RNA, 19 nt, Homo sapiens
  misc_RNA (1)...(19): siRNA sense strand
ucacggaaacauuuaauug

SEQ ID NO: 1618563 - RNA, 19 nt, Homo sapiens
  misc_RNA (1)...(19): siRNA sense strand
ucagaagugcuccuauaua

SEQ ID NO: 1618564 - RNA, 19 nt, Homo sapiens
  misc_RNA (1)...(19): siRNA sense strand
ccacacagaagagacaaua

SEQ ID NO: 1618565 - RNA, 19 nt, Homo sapiens
  misc_RNA (1)...(19): siRNA sense strand
uccaacggaucaauagaua

SEQ ID NO: 1618566 - RNA, 19 nt, Homo sapiens
  misc_RNA (1)...(19): siRNA sense strand
uggugaaacuuacacagua

SEQ ID NO: 1618567 - RNA, 19 nt, Homo sapiens
  misc_RNA (1)...(19): siRNA sense strand
ccaacgugcuguuccauuc

SEQ ID NO: 1618568 - RNA, 19 nt, Homo sapiens
  misc_RNA (1)...(19): siRNA sense strand
cagaagaguguuauccuaa

SEQ ID NO: 1618569 - RNA, 19 nt, Homo sapiens
  misc_RNA (1)...(19): siRNA sense strand
ggccggaccucuucaucuu

SEQ ID NO: 1618570 - RNA, 19 nt, Homo sapiens
  misc_RNA (1)...(19): siRNA sense strand
ggagaggaccgagcuauuc

SEQ ID NO: 1618571 - RNA, 19 nt, Homo sapiens
  misc_RNA (1)...(19): siRNA sense strand
ccaugucccuggugaaugu

SEQ ID NO: 1618572 - RNA, 19 nt, Homo sapiens
  misc_RNA (1)...(19): siRNA sense strand
acacagaagagacaauaaa

SEQ ID NO: 1618573 - RNA, 19 nt, Homo sapiens
  misc_RNA (1)...(19): siRNA sense strand
ucacacuccugcgcucaua

SEQ ID NO: 1618574 - RNA, 19 nt, Homo sapiens
  misc_RNA (1)...(19): siRNA sense strand
ggugaauguugucauggaa

SEQ ID NO: 1618575 - RNA, 19 nt, Homo sapiens
  misc_RNA (1)...(19): siRNA sense strand
guaccucucccuacuaugu

SEQ ID NO: 1618576 - RNA, 19 nt, Homo sapiens
  misc_RNA (1)...(19): siRNA sense strand
gcuguuccauucacucuuc

SEQ ID NO: 1618577 - RNA, 19 nt, Homo sapiens
  misc_RNA (1)...(19): siRNA sense strand
ggaccgaagagucucaaug

SEQ ID NO: 1618578 - RNA, 19 nt, Homo sapiens
  misc_RNA (1)...(19): siRNA sense strand
gaagugcuccuauauaccu

SEQ ID NO: 1618579 - RNA, 19 nt, Homo sapiens
  misc_RNA (1)...(19): siRNA sense strand
guccaucacggaaacauuu

SEQ ID NO: 1618580 - RNA, 19 nt, Homo sapiens
  misc_RNA (1)...(19): siRNA sense strand
gaaaccagaagaguguuau

SEQ ID NO: 1618581 - RNA, 19 nt, Homo sapiens
  misc_RNA (1)...(19): siRNA sense strand
ggugaaacuuacacaguac

SEQ ID NO: 1618582 - RNA, 19 nt, Homo sapiens
  misc_RNA (1)...(19): siRNA sense strand
ccggaccucuucaucuuau

SEQ ID NO: 1618583 - RNA, 19 nt, Homo sapiens
  misc_RNA (1)...(19): siRNA sense strand
acguuaaccugacuucuuc

SEQ ID NO: 1618584 - RNA, 19 nt, Homo sapiens
  misc_RNA (1)...(19): siRNA sense strand
gaccgaagagucucaaugc

SEQ ID NO: 1618585 - RNA, 19 nt, Homo sapiens
  misc_RNA (1)...(19): siRNA sense strand
ccuggugaauguugucaug

SEQ ID NO: 1618586 - RNA, 19 nt, Homo sapiens
  misc_RNA (1)...(19): siRNA sense strand
gagaggaccgagcuauucu

SEQ ID NO: 1618587 - RNA, 19 nt, Homo sapiens
  misc_RNA (1)...(19): siRNA sense strand
ggaccucuucaucuuauag

SEQ ID NO: 1618588 - RNA, 19 nt, Homo sapiens
  misc_RNA (1)...(19): siRNA sense strand
gccuccagguguacguuaa

SEQ ID NO: 1618589 - RNA, 19 nt, Homo sapiens
  misc_RNA (1)...(19): siRNA sense strand
ccaacggaucaauagauaa

SEQ ID NO: 1618590 - RNA, 19 nt, Homo sapiens
  misc_RNA (1)...(19): siRNA sense strand
ccagaaggaaaccagaaga

SEQ ID NO: 1618591 - RNA, 19 nt, Homo sapiens
  misc_RNA (1)...(19): siRNA sense strand
gccggaccucuucaucuua

SEQ ID NO: 1618592 - RNA, 19 nt, Homo sapiens
  misc_RNA (1)...(19): siRNA sense strand
gugcuccuauauaccuaaa

SEQ ID NO: 1618593 - RNA, 19 nt, Homo sapiens
  misc_RNA (1)...(19): siRNA sense strand
acauuuaauugcuccuuca

SEQ ID NO: 1618594 - RNA, 19 nt, Homo sapiens
  misc_RNA (1)...(19): siRNA sense strand
accaugaccuccuggacaa

SEQ ID NO: 1618595 - RNA, 19 nt, Homo sapiens
  misc_RNA (1)...(19): siRNA sense strand
ucaaugcaccuugcugaau

SEQ ID NO: 1618596 - RNA, 19 nt, Homo sapiens
  misc_RNA (1)...(19): siRNA sense strand
caacgugcuguuccauuca

SEQ ID NO: 1618597 - RNA, 19 nt, Homo sapiens
  misc_RNA (1)...(19): siRNA sense strand
aaggaaaccagaagagugu

SEQ ID NO: 1618598 - RNA, 19 nt, Homo sapiens
  misc_RNA (1)...(19): siRNA sense strand
acacuucuccugcuauucu

SEQ ID NO: 1618599 - RNA, 19 nt, Homo sapiens
  misc_RNA (1)...(19): siRNA sense strand
guugccauggugaaacuua

SEQ ID NO: 1618600 - RNA, 19 nt, Homo sapiens
  misc_RNA (1)...(19): siRNA sense strand
ucaaucagaagugcuccua

SEQ ID NO: 1618601 - RNA, 19 nt, Homo sapiens
  misc_RNA (1)...(19): siRNA sense strand
ugaauguugucauggaaaa

SEQ ID NO: 1618602 - RNA, 19 nt, Homo sapiens
  misc_RNA (1)...(19): siRNA sense strand
uacguuaaccugacuucuu

SEQ ID NO: 1618603 - RNA, 19 nt, Homo sapiens
  misc_RNA (1)...(19): siRNA sense strand
gugaauguugucauggaaa

SEQ ID NO: 1618604 - RNA, 19 nt, Homo sapiens
  misc_RNA (1)...(19): siRNA sense strand
gcaggagaggaccgagcua

SEQ ID NO: 1618605 - RNA, 19 nt, Homo sapiens
  misc_RNA (1)...(19): siRNA sense strand
uggugaauguugucaugga

SEQ ID NO: 1618606 - RNA, 19 nt, Homo sapiens
  misc_RNA (1)...(19): siRNA sense strand
aaucagaagugcuccuaua

SEQ ID NO: 1618607 - RNA, 19 nt, Homo sapiens
  misc_RNA (1)...(19): siRNA sense strand
caacacuucuccugcuauu

SEQ ID NO: 1618608 - RNA, 19 nt, Homo sapiens
  misc_RNA (1)...(19): siRNA sense strand
ccagaagaguguuauccua

SEQ ID NO: 1618609 - RNA, 19 nt, Homo sapiens
  misc_RNA (1)...(19): siRNA sense strand
cagaagugcuccuauauac

SEQ ID NO: 1618610 - RNA, 19 nt, Homo sapiens
  misc_RNA (1)...(19): siRNA sense strand
ggaaaccagaagaguguua

SEQ ID NO: 1618611 - RNA, 19 nt, Homo sapiens
  misc_RNA (1)...(19): siRNA sense strand
caaugcaccuugcugaaug

SEQ ID NO: 1618612 - RNA, 19 nt, Homo sapiens
  misc_RNA (1)...(19): siRNA sense strand
gggaaaagcuccuccucua

SEQ ID NO: 1618613 - RNA, 19 nt, Homo sapiens
  misc_RNA (1)...(19): siRNA sense strand
gcuccuauauaccuaaaug

SEQ ID NO: 1618614 - RNA, 19 nt, Homo sapiens
  misc_RNA (1)...(19): siRNA sense strand
ucacggaaacauuuaauug

SEQ ID NO: 1618615 - RNA, 19 nt, Homo sapiens
  misc_RNA (1)...(19): siRNA sense strand
ucagaagugcuccuauaua

SEQ ID NO: 1618616 - RNA, 19 nt, Homo sapiens
  misc_RNA (1)...(19): siRNA sense strand
ccacacagaagagacaaua

SEQ ID NO: 1618617 - RNA, 19 nt, Homo sapiens
  misc_RNA (1)...(19): siRNA sense strand
uccaacggaucaauagaua

SEQ ID NO: 1618618 - RNA, 19 nt, Homo sapiens
  misc_RNA (1)...(19): siRNA sense strand
uggugaaacuuacacagua

SEQ ID NO: 1618619 - RNA, 19 nt, Homo sapiens
  misc_RNA (1)...(19): siRNA sense strand
ccaacgugcuguuccauuc

SEQ ID NO: 1618620 - RNA, 19 nt, Homo sapiens
  misc_RNA (1)...(19): siRNA sense strand
cagaagaguguuauccuaa

SEQ ID NO: 1618621 - RNA, 19 nt, Homo sapiens
  misc_RNA (1)...(19): siRNA sense strand
ggccggaccucuucaucuu

SEQ ID NO: 1618622 - RNA, 19 nt, Homo sapiens
  misc_RNA (1)...(19): siRNA sense strand
ggagaggaccgagcuauuc

SEQ ID NO: 1618623 - RNA, 19 nt, Homo sapiens
  misc_RNA (1)...(19): siRNA sense strand
ccaugucccuggugaaugu

SEQ ID NO: 1618624 - RNA, 19 nt, Homo sapiens
  misc_RNA (1)...(19): siRNA sense strand
acacagaagagacaauaaa

SEQ ID NO: 1618625 - RNA, 19 nt, Homo sapiens
  misc_RNA (1)...(19): siRNA sense strand
ucacacuccugcgcucaua

SEQ ID NO: 1618626 - RNA, 19 nt, Homo sapiens
  misc_RNA (1)...(19): siRNA sense strand
ggugaauguugucauggaa

SEQ ID NO: 1618627 - RNA, 19 nt, Homo sapiens
  misc_RNA (1)...(19): siRNA sense strand
guaccucucccuacuaugu

SEQ ID NO: 1618628 - RNA, 19 nt, Homo sapiens
  misc_RNA (1)...(19): siRNA sense strand
gcuguuccauucacucuuc

SEQ ID NO: 1618629 - RNA, 19 nt, Homo sapiens
  misc_RNA (1)...(19): siRNA sense strand
ggaccgaagagucucaaug

SEQ ID NO: 1618630 - RNA, 19 nt, Homo sapiens
  misc_RNA (1)...(19): siRNA sense strand
gaagugcuccuauauaccu

SEQ ID NO: 1618631 - RNA, 19 nt, Homo sapiens
  misc_RNA (1)...(19): siRNA sense strand
guccaucacggaaacauuu

SEQ ID NO: 1618632 - RNA, 19 nt, Homo sapiens
  misc_RNA (1)...(19): siRNA sense strand
gaaaccagaagaguguuau

SEQ ID NO: 1618633 - RNA, 19 nt, Homo sapiens
  misc_RNA (1)...(19): siRNA sense strand
ggugaaacuuacacaguac

SEQ ID NO: 1618634 - RNA, 19 nt, Homo sapiens
  misc_RNA (1)...(19): siRNA sense strand
ccggaccucuucaucuuau

SEQ ID NO: 1618635 - RNA, 19 nt, Homo sapiens
  misc_RNA (1)...(19): siRNA sense strand
acguuaaccugacuucuuc

SEQ ID NO: 1618636 - RNA, 19 nt, Homo sapiens
  misc_RNA (1)...(19): siRNA sense strand
gaccgaagagucucaaugc

SEQ ID NO: 1618637 - RNA, 19 nt, Homo sapiens
  misc_RNA (1)...(19): siRNA sense strand
ccuggugaauguugucaug

SEQ ID NO: 1618638 - RNA, 19 nt, Homo sapiens
  misc_RNA (1)...(19): siRNA sense strand
gagaggaccgagcuauucu

SEQ ID NO: 1618639 - RNA, 19 nt, Homo sapiens
  misc_RNA (1)...(19): siRNA sense strand
ggaccucuucaucuuauag

SEQ ID NO: 1618640 - RNA, 19 nt, Homo sapiens
  misc_RNA (1)...(19): siRNA sense strand
gccuccagguguacguuaa

SEQ ID NO: 1618641 - RNA, 19 nt, Homo sapiens
  misc_RNA (1)...(19): siRNA sense strand
ccaacggaucaauagauaa

SEQ ID NO: 1618642 - RNA, 19 nt, Homo sapiens
  misc_RNA (1)...(19): siRNA sense strand
ccagaaggaaaccagaaga

SEQ ID NO: 1618643 - RNA, 19 nt, Homo sapiens
  misc_RNA (1)...(19): siRNA sense strand
gccggaccucuucaucuua

SEQ ID NO: 1618644 - RNA, 19 nt, Homo sapiens
  misc_RNA (1)...(19): siRNA sense strand
gugcuccuauauaccuaaa

SEQ ID NO: 1618645 - RNA, 19 nt, Homo sapiens
  misc_RNA (1)...(19): siRNA sense strand
acauuuaauugcuccuuca

SEQ ID NO: 1618646 - RNA, 19 nt, Homo sapiens
  misc_RNA (1)...(19): siRNA sense strand
accaugaccuccuggacaa

SEQ ID NO: 1618647 - RNA, 19 nt, Homo sapiens
  misc_RNA (1)...(19): siRNA sense strand
ucaaugcaccuugcugaau

SEQ ID NO: 1618648 - RNA, 19 nt, Homo sapiens
  misc_RNA (1)...(19): siRNA sense strand
caacgugcuguuccauuca

SEQ ID NO: 1618649 - RNA, 19 nt, Homo sapiens
  misc_RNA (1)...(19): siRNA sense strand
aaggaaaccagaagagugu

SEQ ID NO: 1618650 - RNA, 19 nt, Homo sapiens
  misc_RNA (1)...(19): siRNA sense strand
acacuucuccugcuauucu

SEQ ID NO: 1618651 - RNA, 19 nt, Homo sapiens
  misc_RNA (1)...(19): siRNA sense strand
guugccauggugaaacuua

SEQ ID NO: 1618652 - RNA, 19 nt, Homo sapiens
  misc_RNA (1)...(19): siRNA sense strand
ucaaucagaagugcuccua

SEQ ID NO: 1618653 - RNA, 19 nt, Homo sapiens
  misc_RNA (1)...(19): siRNA sense strand
ugaauguugucauggaaaa

SEQ ID NO: 1618654 - RNA, 19 nt, Homo sapiens
  misc_RNA (1)...(19): siRNA sense strand
uacguuaaccugacuucuu

SEQ ID NO: 1618655 - RNA, 19 nt, Homo sapiens
  misc_RNA (1)...(19): siRNA sense strand
gugaauguugucauggaaa

SEQ ID NO: 1618656 - RNA, 19 nt, Homo sapiens
  misc_RNA (1)...(19): siRNA sense strand
gcaggagaggaccgagcua

SEQ ID NO: 1618657 - RNA, 19 nt, Homo sapiens
  misc_RNA (1)...(19): siRNA sense strand
uggugaauguugucaugga

SEQ ID NO: 1618658 - RNA, 19 nt, Homo sapiens
  misc_RNA (1)...(19): siRNA sense strand
aaucagaagugcuccuaua

SEQ ID NO: 1618659 - RNA, 19 nt, Homo sapiens
  misc_RNA (1)...(19): siRNA sense strand
caacacuucuccugcuauu

SEQ ID NO: 1618660 - RNA, 19 nt, Homo sapiens
  misc_RNA (1)...(19): siRNA sense strand
ccagaagaguguuauccua

SEQ ID NO: 1618661 - RNA, 19 nt, Homo sapiens
  misc_RNA (1)...(19): siRNA sense strand
cagaagugcuccuauauac

SEQ ID NO: 1618662 - RNA, 19 nt, Homo sapiens
  misc_RNA (1)...(19): siRNA sense strand
ggaaaccagaagaguguua

SEQ ID NO: 1618663 - RNA, 19 nt, Homo sapiens
  misc_RNA (1)...(19): siRNA sense strand
caaugcaccuugcugaaug

SEQ ID NO: 1618664 - RNA, 19 nt, Homo sapiens
  misc_RNA (1)...(19): siRNA sense strand
gggaaaagcuccuccucua

SEQ ID NO: 1618665 - RNA, 19 nt, Homo sapiens
  misc_RNA (1)...(19): siRNA sense strand
gcuccuauauaccuaaaug

SEQ ID NO: 1618666 - RNA, 19 nt, Homo sapiens
  misc_RNA (1)...(19): siRNA sense strand
ucacggaaacauuuaauug

SEQ ID NO: 1618667 - RNA, 19 nt, Homo sapiens
  misc_RNA (1)...(19): siRNA sense strand
ucagaagugcuccuauaua

SEQ ID NO: 1618668 - RNA, 19 nt, Homo sapiens
  misc_RNA (1)...(19): siRNA sense strand
ccacacagaagagacaaua

SEQ ID NO: 1618669 - RNA, 19 nt, Homo sapiens
  misc_RNA (1)...(19): siRNA sense strand
uccaacggaucaauagaua

SEQ ID NO: 1618670 - RNA, 19 nt, Homo sapiens
  misc_RNA (1)...(19): siRNA sense strand
uggugaaacuuacacagua

SEQ ID NO: 1618671 - RNA, 19 nt, Homo sapiens
  misc_RNA (1)...(19): siRNA sense strand
ccaacgugcuguuccauuc

SEQ ID NO: 1618672 - RNA, 19 nt, Homo sapiens
  misc_RNA (1)...(19): siRNA sense strand
cagaagaguguuauccuaa

SEQ ID NO: 1618673 - RNA, 19 nt, Homo sapiens
  misc_RNA (1)...(19): siRNA sense strand
ggccggaccucuucaucuu

SEQ ID NO: 1618674 - RNA, 19 nt, Homo sapiens
  misc_RNA (1)...(19): siRNA sense strand
ggagaggaccgagcuauuc

SEQ ID NO: 1618675 - RNA, 19 nt, Homo sapiens
  misc_RNA (1)...(19): siRNA sense strand
ccaugucccuggugaaugu

SEQ ID NO: 1618676 - RNA, 19 nt, Homo sapiens
  misc_RNA (1)...(19): siRNA sense strand
acacagaagagacaauaaa

SEQ ID NO: 1618677 - RNA, 19 nt, Homo sapiens
  misc_RNA (1)...(19): siRNA sense strand
ucacacuccugcgcucaua

SEQ ID NO: 1618678 - RNA, 19 nt, Homo sapiens
  misc_RNA (1)...(19): siRNA sense strand
ggugaauguugucauggaa

SEQ ID NO: 1618679 - RNA, 19 nt, Homo sapiens
  misc_RNA (1)...(19): siRNA sense strand
guaccucucccuacuaugu

SEQ ID NO: 1618680 - RNA, 19 nt, Homo sapiens
  misc_RNA (1)...(19): siRNA sense strand
gcuguuccauucacucuuc

SEQ ID NO: 1618681 - RNA, 19 nt, Homo sapiens
  misc_RNA (1)...(19): siRNA sense strand
ggaccgaagagucucaaug

SEQ ID NO: 1618682 - RNA, 19 nt, Homo sapiens
  misc_RNA (1)...(19): siRNA sense strand
gaagugcuccuauauaccu

SEQ ID NO: 1618683 - RNA, 19 nt, Homo sapiens
  misc_RNA (1)...(19): siRNA sense strand
guccaucacggaaacauuu

SEQ ID NO: 1618684 - RNA, 19 nt, Homo sapiens
  misc_RNA (1)...(19): siRNA sense strand
gaaaccagaagaguguuau

SEQ ID NO: 1618685 - RNA, 19 nt, Homo sapiens
  misc_RNA (1)...(19): siRNA sense strand
ggugaaacuuacacaguac

SEQ ID NO: 1618686 - RNA, 19 nt, Homo sapiens
  misc_RNA (1)...(19): siRNA sense strand
ccggaccucuucaucuuau

SEQ ID NO: 1618687 - RNA, 19 nt, Homo sapiens
  misc_RNA (1)...(19): siRNA sense strand
acguuaaccugacuucuuc

SEQ ID NO: 1618688 - RNA, 19 nt, Homo sapiens
  misc_RNA (1)...(19): siRNA sense strand
gaccgaagagucucaaugc

SEQ ID NO: 1618689 - RNA, 19 nt, Homo sapiens
  misc_RNA (1)...(19): siRNA sense strand
ccuggugaauguugucaug

SEQ ID NO: 1618690 - RNA, 19 nt, Homo sapiens
  misc_RNA (1)...(19): siRNA sense strand
gagaggaccgagcuauucu

SEQ ID NO: 1618691 - RNA, 19 nt, Homo sapiens
  misc_RNA (1)...(19): siRNA sense strand
ggaccucuucaucuuauag

SEQ ID NO: 1618692 - RNA, 19 nt, Homo sapiens
  misc_RNA (1)...(19): siRNA sense strand
gccuccagguguacguuaa

SEQ ID NO: 1618693 - RNA, 19 nt, Homo sapiens
  misc_RNA (1)...(19): siRNA sense strand
ccaacggaucaauagauaa

SEQ ID NO: 1618694 - RNA, 19 nt, Homo sapiens
  misc_RNA (1)...(19): siRNA sense strand
ccagaaggaaaccagaaga

SEQ ID NO: 1618695 - RNA, 19 nt, Homo sapiens
  misc_RNA (1)...(19): siRNA sense strand
gccggaccucuucaucuua

SEQ ID NO: 1618696 - RNA, 19 nt, Homo sapiens
  misc_RNA (1)...(19): siRNA sense strand
gugcuccuauauaccuaaa

SEQ ID NO: 1618697 - RNA, 19 nt, Homo sapiens
  misc_RNA (1)...(19): siRNA sense strand
acauuuaauugcuccuuca

SEQ ID NO: 1618698 - RNA, 19 nt, Homo sapiens
  misc_RNA (1)...(19): siRNA sense strand
accaugaccuccuggacaa

SEQ ID NO: 1618699 - RNA, 19 nt, Homo sapiens
  misc_RNA (1)...(19): siRNA sense strand
ucaaugcaccuugcugaau

SEQ ID NO: 1618700 - RNA, 19 nt, Homo sapiens
  misc_RNA (1)...(19): siRNA sense strand
caacgugcuguuccauuca

SEQ ID NO: 1618701 - RNA, 19 nt, Homo sapiens
  misc_RNA (1)...(19): siRNA sense strand
aaggaaaccagaagagugu

SEQ ID NO: 1618702 - RNA, 19 nt, Homo sapiens
  misc_RNA (1)...(19): siRNA sense strand
acacuucuccugcuauucu

SEQ ID NO: 1618703 - RNA, 19 nt, Homo sapiens
  misc_RNA (1)...(19): siRNA sense strand
guugccauggugaaacuua

SEQ ID NO: 1618704 - RNA, 19 nt, Homo sapiens
  misc_RNA (1)...(19): siRNA sense strand
ucaaucagaagugcuccua

SEQ ID NO: 1618705 - RNA, 19 nt, Homo sapiens
  misc_RNA (1)...(19): siRNA sense strand
ugaauguugucauggaaaa

SEQ ID NO: 1618706 - RNA, 19 nt, Homo sapiens
  misc_RNA (1)...(19): siRNA sense strand
uacguuaaccugacuucuu

SEQ ID NO: 1618707 - RNA, 19 nt, Homo sapiens
  misc_RNA (1)...(19): siRNA sense strand
gugaauguugucauggaaa

SEQ ID NO: 1618708 - RNA, 19 nt, Homo sapiens
  misc_RNA (1)...(19): siRNA sense strand
gcaggagaggaccgagcua

SEQ ID NO: 1618709 - RNA, 19 nt, Homo sapiens
  misc_RNA (1)...(19): siRNA sense strand
uggugaauguugucaugga

SEQ ID NO: 1618710 - RNA, 19 nt, Homo sapiens
  misc_RNA (1)...(19): siRNA sense strand
aaucagaagugcuccuaua

SEQ ID NO: 1618711 - RNA, 19 nt, Homo sapiens
  misc_RNA (1)...(19): siRNA sense strand
caacacuucuccugcuauu

SEQ ID NO: 1618712 - RNA, 19 nt, Homo sapiens
  misc_RNA (1)...(19): siRNA sense strand
ccagaagaguguuauccua

SEQ ID NO: 1618713 - RNA, 19 nt, Homo sapiens
  misc_RNA (1)...(19): siRNA sense strand
cagaagugcuccuauauac

SEQ ID NO: 1618714 - RNA, 19 nt, Homo sapiens
  misc_RNA (1)...(19): siRNA sense strand
ggaaaccagaagaguguua

SEQ ID NO: 1618715 - RNA, 19 nt, Homo sapiens
  misc_RNA (1)...(19): siRNA sense strand
caaugcaccuugcugaaug

SEQ ID NO: 1618716 - RNA, 19 nt, Homo sapiens
  misc_RNA (1)...(19): siRNA sense strand
gggaaaagcuccuccucua

SEQ ID NO: 1618717 - RNA, 19 nt, Homo sapiens
  misc_RNA (1)...(19): siRNA sense strand
gcuccuauauaccuaaaug

SEQ ID NO: 1618718 - RNA, 19 nt, Homo sapiens
  misc_RNA (1)...(19): siRNA sense strand
ucacggaaacauuuaauug

SEQ ID NO: 1618719 - RNA, 19 nt, Homo sapiens
  misc_RNA (1)...(19): siRNA sense strand
ucagaagugcuccuauaua

SEQ ID NO: 1618720 - RNA, 19 nt, Homo sapiens
  misc_RNA (1)...(19): siRNA sense strand
ccacacagaagagacaaua

SEQ ID NO: 1618721 - RNA, 19 nt, Homo sapiens
  misc_RNA (1)...(19): siRNA sense strand
uccaacggaucaauagaua

SEQ ID NO: 1618722 - RNA, 19 nt, Homo sapiens
  misc_RNA (1)...(19): siRNA sense strand
uggugaaacuuacacagua

SEQ ID NO: 1618723 - RNA, 19 nt, Homo sapiens
  misc_RNA (1)...(19): siRNA sense strand
ccaacgugcuguuccauuc

SEQ ID NO: 1618724 - RNA, 19 nt, Homo sapiens
  misc_RNA (1)...(19): siRNA sense strand
cagaagaguguuauccuaa

SEQ ID NO: 1618725 - RNA, 19 nt, Homo sapiens
  misc_RNA (1)...(19): siRNA sense strand
ggccggaccucuucaucuu

SEQ ID NO: 1618726 - RNA, 19 nt, Homo sapiens
  misc_RNA (1)...(19): siRNA sense strand
ggagaggaccgagcuauuc

SEQ ID NO: 1618727 - RNA, 19 nt, Homo sapiens
  misc_RNA (1)...(19): siRNA sense strand
ccaugucccuggugaaugu

SEQ ID NO: 1618728 - RNA, 19 nt, Homo sapiens
  misc_RNA (1)...(19): siRNA sense strand
acacagaagagacaauaaa

SEQ ID NO: 1618729 - RNA, 19 nt, Homo sapiens
  misc_RNA (1)...(19): siRNA sense strand
ucacacuccugcgcucaua

SEQ ID NO: 1618730 - RNA, 19 nt, Homo sapiens
  misc_RNA (1)...(19): siRNA sense strand
ggugaauguugucauggaa

SEQ ID NO: 1618731 - RNA, 19 nt, Homo sapiens
  misc_RNA (1)...(19): siRNA sense strand
guaccucucccuacuaugu

SEQ ID NO: 1618732 - RNA, 19 nt, Homo sapiens
  misc_RNA (1)...(19): siRNA sense strand
gcuguuccauucacucuuc

SEQ ID NO: 1618733 - RNA, 19 nt, Homo sapiens
  misc_RNA (1)...(19): siRNA sense strand
ggaccgaagagucucaaug

SEQ ID NO: 1618734 - RNA, 19 nt, Homo sapiens
  misc_RNA (1)...(19): siRNA sense strand
gaagugcuccuauauaccu

SEQ ID NO: 1618735 - RNA, 19 nt, Homo sapiens
  misc_RNA (1)...(19): siRNA sense strand
guccaucacggaaacauuu

SEQ ID NO: 1618736 - RNA, 19 nt, Homo sapiens
  misc_RNA (1)...(19): siRNA sense strand
gaaaccagaagaguguuau

SEQ ID NO: 1618737 - RNA, 19 nt, Homo sapiens
  misc_RNA (1)...(19): siRNA sense strand
ggugaaacuuacacaguac

SEQ ID NO: 1618738 - RNA, 19 nt, Homo sapiens
  misc_RNA (1)...(19): siRNA sense strand
ccggaccucuucaucuuau

SEQ ID NO: 1618739 - RNA, 19 nt, Homo sapiens
  misc_RNA (1)...(19): siRNA sense strand
acguuaaccugacuucuuc

SEQ ID NO: 1618740 - RNA, 19 nt, Homo sapiens
  misc_RNA (1)...(19): siRNA sense strand
gaccgaagagucucaaugc

SEQ ID NO: 1618741 - RNA, 19 nt, Homo sapiens
  misc_RNA (1)...(19): siRNA sense strand
ccuggugaauguugucaug

SEQ ID NO: 1618742 - RNA, 19 nt, Homo sapiens
  misc_RNA (1)...(19): siRNA sense strand
gagaggaccgagcuauucu

SEQ ID NO: 1618743 - RNA, 19 nt, Homo sapiens
  misc_RNA (1)...(19): siRNA sense strand
ggaccucuucaucuuauag

SEQ ID NO: 1618744 - RNA, 19 nt, Homo sapiens
  misc_RNA (1)...(19): siRNA sense strand
gccuccagguguacguuaa

SEQ ID NO: 1618745 - RNA, 19 nt, Homo sapiens
  misc_RNA (1)...(19): siRNA sense strand
ccaacggaucaauagauaa

SEQ ID NO: 1618746 - RNA, 19 nt, Homo sapiens
  misc_RNA (1)...(19): siRNA sense strand
ccagaaggaaaccagaaga

SEQ ID NO: 1618747 - RNA, 19 nt, Homo sapiens
  misc_RNA (1)...(19): siRNA sense strand
gccggaccucuucaucuua

SEQ ID NO: 1618748 - RNA, 19 nt, Homo sapiens
  misc_RNA (1)...(19): siRNA sense strand
gugcuccuauauaccuaaa

SEQ ID NO: 1618749 - RNA, 19 nt, Homo sapiens
  misc_RNA (1)...(19): siRNA sense strand
acauuuaauugcuccuuca

SEQ ID NO: 1618750 - RNA, 19 nt, Homo sapiens
  misc_RNA (1)...(19): siRNA sense strand
accaugaccuccuggacaa

SEQ ID NO: 1618751 - RNA, 19 nt, Homo sapiens
  misc_RNA (1)...(19): siRNA sense strand
ucaaugcaccuugcugaau

SEQ ID NO: 1618752 - RNA, 19 nt, Homo sapiens
  misc_RNA (1)...(19): siRNA sense strand
caacgugcuguuccauuca

SEQ ID NO: 1618753 - RNA, 19 nt, Homo sapiens
  misc_RNA (1)...(19): siRNA sense strand
aaggaaaccagaagagugu

SEQ ID NO: 1618754 - RNA, 19 nt, Homo sapiens
  misc_RNA (1)...(19): siRNA sense strand
acacuucuccugcuauucu

SEQ ID NO: 1618755 - RNA, 19 nt, Homo sapiens
  misc_RNA (1)...(19): siRNA sense strand
guugccauggugaaacuua

SEQ ID NO: 1618756 - RNA, 19 nt, Homo sapiens
  misc_RNA (1)...(19): siRNA sense strand
ucaaucagaagugcuccua

SEQ ID NO: 1618757 - RNA, 19 nt, Homo sapiens
  misc_RNA (1)...(19): siRNA sense strand
ugaauguugucauggaaaa

SEQ ID NO: 1618758 - RNA, 19 nt, Homo sapiens
  misc_RNA (1)...(19): siRNA sense strand
uacguuaaccugacuucuu

SEQ ID NO: 1618759 - RNA, 19 nt, Homo sapiens
  misc_RNA (1)...(19): siRNA sense strand
gugaauguugucauggaaa

SEQ ID NO: 1618760 - RNA, 19 nt, Homo sapiens
  misc_RNA (1)...(19): siRNA sense strand
gcaggagaggaccgagcua

SEQ ID NO: 1618761 - RNA, 19 nt, Homo sapiens
  misc_RNA (1)...(19): siRNA sense strand
uggugaauguugucaugga

SEQ ID NO: 1618762 - RNA, 19 nt, Homo sapiens
  misc_RNA (1)...(19): siRNA sense strand
gaggaaaucuggaacuuug

SEQ ID NO: 1618763 - RNA, 19 nt, Homo sapiens
  misc_RNA (1)...(19): siRNA sense strand
gaaccuaugugaucaacaa

SEQ ID NO: 1618764 - RNA, 19 nt, Homo sapiens
  misc_RNA (1)...(19): siRNA sense strand
ggacuaugaugucuccuuu

SEQ ID NO: 1618765 - RNA, 19 nt, Homo sapiens
  misc_RNA (1)...(19): siRNA sense strand
aggaaacgcuggacucuuu

SEQ ID NO: 1618766 - RNA, 19 nt, Homo sapiens
  misc_RNA (1)...(19): siRNA sense strand
caaacuggguggagaucua

SEQ ID NO: 1618767 - RNA, 19 nt, Homo sapiens
  misc_RNA (1)...(19): siRNA sense strand
gaugagaccaccuaugaaa

SEQ ID NO: 1618768 - RNA, 19 nt, Homo sapiens
  misc_RNA (1)...(19): siRNA sense strand
cagagugucuauuugauga

SEQ ID NO: 1618769 - RNA, 19 nt, Homo sapiens
  misc_RNA (1)...(19): siRNA sense strand
ggaguggugucuuaacugu

SEQ ID NO: 1618770 - RNA, 19 nt, Homo sapiens
  misc_RNA (1)...(19): siRNA sense strand
aagcaaaucuggcuaucuu

SEQ ID NO: 1618771 - RNA, 19 nt, Homo sapiens
  misc_RNA (1)...(19): siRNA sense strand
uagaugagaccaccuauga

SEQ ID NO: 1618772 - RNA, 19 nt, Homo sapiens
  misc_RNA (1)...(19): siRNA sense strand
gaaccaacguggccucaac

SEQ ID NO: 1618773 - RNA, 19 nt, Homo sapiens
  misc_RNA (1)...(19): siRNA sense strand
gaccaccuaugaaagacua

SEQ ID NO: 1618774 - RNA, 19 nt, Homo sapiens
  misc_RNA (1)...(19): siRNA sense strand
ccgcagagcucacuaaagc

SEQ ID NO: 1618775 - RNA, 19 nt, Homo sapiens
  misc_RNA (1)...(19): siRNA sense strand
ugucuuaacugucaaacug

SEQ ID NO: 1618776 - RNA, 19 nt, Homo sapiens
  misc_RNA (1)...(19): siRNA sense strand
aaaccaaacuggacuuguc

SEQ ID NO: 1618777 - RNA, 19 nt, Homo sapiens
  misc_RNA (1)...(19): siRNA sense strand
ggaaacgcuggacucuuua

SEQ ID NO: 1618778 - RNA, 19 nt, Homo sapiens
  misc_RNA (1)...(19): siRNA sense strand
gacaagccauacacguuug

SEQ ID NO: 1618779 - RNA, 19 nt, Homo sapiens
  misc_RNA (1)...(19): siRNA sense strand
agagcucacuaaagccuua

SEQ ID NO: 1618780 - RNA, 19 nt, Homo sapiens
  misc_RNA (1)...(19): siRNA sense strand
uugaagaccuugcagacaa

SEQ ID NO: 1618781 - RNA, 19 nt, Homo sapiens
  misc_RNA (1)...(19): siRNA sense strand
aaagcagagugucuauuug

SEQ ID NO: 1618782 - RNA, 19 nt, Homo sapiens
  misc_RNA (1)...(19): siRNA sense strand
agacaagccauacacguuu

SEQ ID NO: 1618783 - RNA, 19 nt, Homo sapiens
  misc_RNA (1)...(19): siRNA sense strand
gcagagugucuauuugaug

SEQ ID NO: 1618784 - RNA, 19 nt, Homo sapiens
  misc_RNA (1)...(19): siRNA sense strand
cauacacguuugaggacua

SEQ ID NO: 1618785 - RNA, 19 nt, Homo sapiens
  misc_RNA (1)...(19): siRNA sense strand
ucaaccagauuuggaaugu

SEQ ID NO: 1618786 - RNA, 19 nt, Homo sapiens
  misc_RNA (1)...(19): siRNA sense strand
gaaagacuagcagaggaaa

SEQ ID NO: 1618787 - RNA, 19 nt, Homo sapiens
  misc_RNA (1)...(19): siRNA sense strand
ucaacaagcagacgccaaa

SEQ ID NO: 1618788 - RNA, 19 nt, Homo sapiens
  misc_RNA (1)...(19): siRNA sense strand
ugagaccaccuaugaaaga

SEQ ID NO: 1618789 - RNA, 19 nt, Homo sapiens
  misc_RNA (1)...(19): siRNA sense strand
cacccaggcucucuagaug

SEQ ID NO: 1618790 - RNA, 19 nt, Homo sapiens
  misc_RNA (1)...(19): siRNA sense strand
cagacaagccauacacguu

SEQ ID NO: 1618791 - RNA, 19 nt, Homo sapiens
  misc_RNA (1)...(19): siRNA sense strand
aaccagauuuggaauguca

SEQ ID NO: 1618792 - RNA, 19 nt, Homo sapiens
  misc_RNA (1)...(19): siRNA sense strand
aagcagagugucuauuuga

SEQ ID NO: 1618793 - RNA, 19 nt, Homo sapiens
  misc_RNA (1)...(19): siRNA sense strand
gcaaaucuggcuaucuucu

SEQ ID NO: 1618794 - RNA, 19 nt, Homo sapiens
  misc_RNA (1)...(19): siRNA sense strand
gagugucuauuugaugaau

SEQ ID NO: 1618795 - RNA, 19 nt, Homo sapiens
  misc_RNA (1)...(19): siRNA sense strand
ugaaagacuagcagaggaa

SEQ ID NO: 1618796 - RNA, 19 nt, Homo sapiens
  misc_RNA (1)...(19): siRNA sense strand
cuuugggaguggugucuua

SEQ ID NO: 1618797 - RNA, 19 nt, Homo sapiens
  misc_RNA (1)...(19): siRNA sense strand
ggaccuaagcguuaugacu

SEQ ID NO: 1618798 - RNA, 19 nt, Homo sapiens
  misc_RNA (1)...(19): siRNA sense strand
acaagcagacgccaaacaa

SEQ ID NO: 1618799 - RNA, 19 nt, Homo sapiens
  misc_RNA (1)...(19): siRNA sense strand
aaacuggacuugucuuccu

SEQ ID NO: 1618800 - RNA, 19 nt, Homo sapiens
  misc_RNA (1)...(19): siRNA sense strand
aaaagcagagugucuauuu

SEQ ID NO: 1618801 - RNA, 19 nt, Homo sapiens
  misc_RNA (1)...(19): siRNA sense strand
aguggugucuuaacuguca

SEQ ID NO: 1618802 - RNA, 19 nt, Homo sapiens
  misc_RNA (1)...(19): siRNA sense strand
ccuaugugaucaacaagca

SEQ ID NO: 1618803 - RNA, 19 nt, Homo sapiens
  misc_RNA (1)...(19): siRNA sense strand
gaaacgcuggacucuuuag

SEQ ID NO: 1618804 - RNA, 19 nt, Homo sapiens
  misc_RNA (1)...(19): siRNA sense strand
ugucuuccuuggccuauuc

SEQ ID NO: 1618805 - RNA, 19 nt, Homo sapiens
  misc_RNA (1)...(19): siRNA sense strand
acuaugaugucuccuuugg

SEQ ID NO: 1618806 - RNA, 19 nt, Homo sapiens
  misc_RNA (1)...(19): siRNA sense strand
ugaggaaaucuggaacuuu

SEQ ID NO: 1618807 - RNA, 19 nt, Homo sapiens
  misc_RNA (1)...(19): siRNA sense strand
ccacccaggcucucuagau

SEQ ID NO: 1618808 - RNA, 19 nt, Homo sapiens
  misc_RNA (1)...(19): siRNA sense strand
gcagacgccaaacaagcaa

SEQ ID NO: 1618809 - RNA, 19 nt, Homo sapiens
  misc_RNA (1)...(19): siRNA sense strand
ccaaacuggacuugucuuc

SEQ ID NO: 1618810 - RNA, 19 nt, Homo sapiens
  misc_RNA (1)...(19): siRNA sense strand
gaggaaacgcuggacucuu

SEQ ID NO: 1618811 - RNA, 19 nt, Homo sapiens
  misc_RNA (1)...(19): siRNA sense strand
uugaggaaaucuggaacuu

SEQ ID NO: 1618812 - RNA, 19 nt, Homo sapiens
  misc_RNA (1)...(19): siRNA sense strand
gagaccaccuaugaaagac

SEQ ID NO: 1618813 - RNA, 19 nt, Homo sapiens
  misc_RNA (1)...(19): siRNA sense strand
caaccagauuuggaauguc

SEQ ID NO: 1618814 - RNA, 19 nt, Homo sapiens
  misc_RNA (1)...(19): siRNA sense strand
acacguuugaggacuauga

SEQ ID NO: 1618815 - RNA, 19 nt, Homo sapiens
  misc_RNA (1)...(19): siRNA sense strand
gaggaaaucuggaacuuug

SEQ ID NO: 1618816 - RNA, 19 nt, Homo sapiens
  misc_RNA (1)...(19): siRNA sense strand
gaaccuaugugaucaacaa

SEQ ID NO: 1618817 - RNA, 19 nt, Homo sapiens
  misc_RNA (1)...(19): siRNA sense strand
ggacuaugaugucuccuuu

SEQ ID NO: 1618818 - RNA, 19 nt, Homo sapiens
  misc_RNA (1)...(19): siRNA sense strand
aggaaacgcuggacucuuu

SEQ ID NO: 1618819 - RNA, 19 nt, Homo sapiens
  misc_RNA (1)...(19): siRNA sense strand
caaacuggguggagaucua

SEQ ID NO: 1618820 - RNA, 19 nt, Homo sapiens
  misc_RNA (1)...(19): siRNA sense strand
gaugagaccaccuaugaaa

SEQ ID NO: 1618821 - RNA, 19 nt, Homo sapiens
  misc_RNA (1)...(19): siRNA sense strand
cagagugucuauuugauga

SEQ ID NO: 1618822 - RNA, 19 nt, Homo sapiens
  misc_RNA (1)...(19): siRNA sense strand
ggaguggugucuuaacugu

SEQ ID NO: 1618823 - RNA, 19 nt, Homo sapiens
  misc_RNA (1)...(19): siRNA sense strand
aagcaaaucuggcuaucuu

SEQ ID NO: 1618824 - RNA, 19 nt, Homo sapiens
  misc_RNA (1)...(19): siRNA sense strand
uagaugagaccaccuauga

SEQ ID NO: 1618825 - RNA, 19 nt, Homo sapiens
  misc_RNA (1)...(19): siRNA sense strand
gaaccaacguggccucaac

SEQ ID NO: 1618826 - RNA, 19 nt, Homo sapiens
  misc_RNA (1)...(19): siRNA sense strand
gaccaccuaugaaagacua

SEQ ID NO: 1618827 - RNA, 19 nt, Homo sapiens
  misc_RNA (1)...(19): siRNA sense strand
ccgcagagcucacuaaagc

SEQ ID NO: 1618828 - RNA, 19 nt, Homo sapiens
  misc_RNA (1)...(19): siRNA sense strand
ugucuuaacugucaaacug

SEQ ID NO: 1618829 - RNA, 19 nt, Homo sapiens
  misc_RNA (1)...(19): siRNA sense strand
ggaaacgcuggacucuuua

SEQ ID NO: 1618830 - RNA, 19 nt, Homo sapiens
  misc_RNA (1)...(19): siRNA sense strand
gacaagccauacacguuug

SEQ ID NO: 1618831 - RNA, 19 nt, Homo sapiens
  misc_RNA (1)...(19): siRNA sense strand
agagcucacuaaagccuua

SEQ ID NO: 1618832 - RNA, 19 nt, Homo sapiens
  misc_RNA (1)...(19): siRNA sense strand
uugaagaccuugcagacaa

SEQ ID NO: 1618833 - RNA, 19 nt, Homo sapiens
  misc_RNA (1)...(19): siRNA sense strand
aaagcagagugucuauuug

SEQ ID NO: 1618834 - RNA, 19 nt, Homo sapiens
  misc_RNA (1)...(19): siRNA sense strand
agacaagccauacacguuu

SEQ ID NO: 1618835 - RNA, 19 nt, Homo sapiens
  misc_RNA (1)...(19): siRNA sense strand
gcagagugucuauuugaug

SEQ ID NO: 1618836 - RNA, 19 nt, Homo sapiens
  misc_RNA (1)...(19): siRNA sense strand
cauacacguuugaggacua

SEQ ID NO: 1618837 - RNA, 19 nt, Homo sapiens
  misc_RNA (1)...(19): siRNA sense strand
ucaaccagauuuggaaugu

SEQ ID NO: 1618838 - RNA, 19 nt, Homo sapiens
  misc_RNA (1)...(19): siRNA sense strand
gaaagacuagcagaggaaa

SEQ ID NO: 1618839 - RNA, 19 nt, Homo sapiens
  misc_RNA (1)...(19): siRNA sense strand
ucaacaagcagacgccaaa

SEQ ID NO: 1618840 - RNA, 19 nt, Homo sapiens
  misc_RNA (1)...(19): siRNA sense strand
ugagaccaccuaugaaaga

SEQ ID NO: 1618841 - RNA, 19 nt, Homo sapiens
  misc_RNA (1)...(19): siRNA sense strand
cacccaggcucucuagaug

SEQ ID NO: 1618842 - RNA, 19 nt, Homo sapiens
  misc_RNA (1)...(19): siRNA sense strand
aaccagauuuggaauguca

SEQ ID NO: 1618843 - RNA, 19 nt, Homo sapiens
  misc_RNA (1)...(19): siRNA sense strand
aagcagagugucuauuuga

SEQ ID NO: 1618844 - RNA, 19 nt, Homo sapiens
  misc_RNA (1)...(19): siRNA sense strand
cagacaagccauacacguu

SEQ ID NO: 1618845 - RNA, 19 nt, Homo sapiens
  misc_RNA (1)...(19): siRNA sense strand
gcaaaucuggcuaucuucu

SEQ ID NO: 1618846 - RNA, 19 nt, Homo sapiens
  misc_RNA (1)...(19): siRNA sense strand
gagugucuauuugaugaau

SEQ ID NO: 1618847 - RNA, 19 nt, Homo sapiens
  misc_RNA (1)...(19): siRNA sense strand
ugaaagacuagcagaggaa

SEQ ID NO: 1618848 - RNA, 19 nt, Homo sapiens
  misc_RNA (1)...(19): siRNA sense strand
cuuugggaguggugucuua

SEQ ID NO: 1618849 - RNA, 19 nt, Homo sapiens
  misc_RNA (1)...(19): siRNA sense strand
ggaccuaagcguuaugacu

SEQ ID NO: 1618850 - RNA, 19 nt, Homo sapiens
  misc_RNA (1)...(19): siRNA sense strand
acaagcagacgccaaacaa

SEQ ID NO: 1618851 - RNA, 19 nt, Homo sapiens
  misc_RNA (1)...(19): siRNA sense strand
aaaagcagagugucuauuu

SEQ ID NO: 1618852 - RNA, 19 nt, Homo sapiens
  misc_RNA (1)...(19): siRNA sense strand
aguggugucuuaacuguca

SEQ ID NO: 1618853 - RNA, 19 nt, Homo sapiens
  misc_RNA (1)...(19): siRNA sense strand
ccuaugugaucaacaagca

SEQ ID NO: 1618854 - RNA, 19 nt, Homo sapiens
  misc_RNA (1)...(19): siRNA sense strand
gaaacgcuggacucuuuag

SEQ ID NO: 1618855 - RNA, 19 nt, Homo sapiens
  misc_RNA (1)...(19): siRNA sense strand
acuaugaugucuccuuugg

SEQ ID NO: 1618856 - RNA, 19 nt, Homo sapiens
  misc_RNA (1)...(19): siRNA sense strand
ugaggaaaucuggaacuuu

SEQ ID NO: 1618857 - RNA, 19 nt, Homo sapiens
  misc_RNA (1)...(19): siRNA sense strand
ccacccaggcucucuagau

SEQ ID NO: 1618858 - RNA, 19 nt, Homo sapiens
  misc_RNA (1)...(19): siRNA sense strand
gcagacgccaaacaagcaa

SEQ ID NO: 1618859 - RNA, 19 nt, Homo sapiens
  misc_RNA (1)...(19): siRNA sense strand
gagaccaccuaugaaagac

SEQ ID NO: 1618860 - RNA, 19 nt, Homo sapiens
  misc_RNA (1)...(19): siRNA sense strand
uugaggaaaucuggaacuu

SEQ ID NO: 1618861 - RNA, 19 nt, Homo sapiens
  misc_RNA (1)...(19): siRNA sense strand
gaggaaacgcuggacucuu

SEQ ID NO: 1618862 - RNA, 19 nt, Homo sapiens
  misc_RNA (1)...(19): siRNA sense strand
acacguuugaggacuauga

SEQ ID NO: 1618863 - RNA, 19 nt, Homo sapiens
  misc_RNA (1)...(19): siRNA sense strand
caaccagauuuggaauguc

SEQ ID NO: 1618864 - RNA, 19 nt, Homo sapiens
  misc_RNA (1)...(19): siRNA sense strand
ggaaauggaugguggauga

SEQ ID NO: 1618865 - RNA, 19 nt, Homo sapiens
  misc_RNA (1)...(19): siRNA sense strand
gagaccaucugcucccaua

SEQ ID NO: 1618866 - RNA, 19 nt, Homo sapiens
  misc_RNA (1)...(19): siRNA sense strand
cgacagggaucacuucauc

SEQ ID NO: 1618867 - RNA, 19 nt, Homo sapiens
  misc_RNA (1)...(19): siRNA sense strand
gaagaggcaaugagcacua

SEQ ID NO: 1618868 - RNA, 19 nt, Homo sapiens
  misc_RNA (1)...(19): siRNA sense strand
gaagagugucggcucauca

SEQ ID NO: 1618869 - RNA, 19 nt, Homo sapiens
  misc_RNA (1)...(19): siRNA sense strand
gccagauccugccuacuga

SEQ ID NO: 1618870 - RNA, 19 nt, Homo sapiens
  misc_RNA (1)...(19): siRNA sense strand
ucaagccgcugcucuucga

SEQ ID NO: 1618871 - RNA, 19 nt, Homo sapiens
  misc_RNA (1)...(19): siRNA sense strand
gugcggaacagccaccaua

SEQ ID NO: 1618872 - RNA, 19 nt, Homo sapiens
  misc_RNA (1)...(19): siRNA sense strand
gauccugccuacugaagag

SEQ ID NO: 1618873 - RNA, 19 nt, Homo sapiens
  misc_RNA (1)...(19): siRNA sense strand
gaaccgugaugggcaccuu

SEQ ID NO: 1618874 - RNA, 19 nt, Homo sapiens
  misc_RNA (1)...(19): siRNA sense strand
gcugcagguuguucgauau

SEQ ID NO: 1618875 - RNA, 19 nt, Homo sapiens
  misc_RNA (1)...(19): siRNA sense strand
cagagagcauucaggagau

SEQ ID NO: 1618876 - RNA, 19 nt, Homo sapiens
  misc_RNA (1)...(19): siRNA sense strand
gcagguuguucgauauggu

SEQ ID NO: 1618877 - RNA, 19 nt, Homo sapiens
  misc_RNA (1)...(19): siRNA sense strand
cuacagcaacggcgacgaa

SEQ ID NO: 1618878 - RNA, 19 nt, Homo sapiens
  misc_RNA (1)...(19): siRNA sense strand
gcugguagccaacgagucu

SEQ ID NO: 1618879 - RNA, 19 nt, Homo sapiens
  misc_RNA (1)...(19): siRNA sense strand
cgcugcagguuguucgaua

SEQ ID NO: 1618880 - RNA, 19 nt, Homo sapiens
  misc_RNA (1)...(19): siRNA sense strand
ugaagagugucggcucauc

SEQ ID NO: 1618881 - RNA, 19 nt, Homo sapiens
  misc_RNA (1)...(19): siRNA sense strand
gggccuguguacccagaga

SEQ ID NO: 1618882 - RNA, 19 nt, Homo sapiens
  misc_RNA (1)...(19): siRNA sense strand
aagaggcaaugagcacuau

SEQ ID NO: 1618883 - RNA, 19 nt, Homo sapiens
  misc_RNA (1)...(19): siRNA sense strand
cagacucgccugggaaaug

SEQ ID NO: 1618884 - RNA, 19 nt, Homo sapiens
  misc_RNA (1)...(19): siRNA sense strand
ccugacugaugaagagugu

SEQ ID NO: 1618885 - RNA, 19 nt, Homo sapiens
  misc_RNA (1)...(19): siRNA sense strand
acauggaccuucgggacuu

SEQ ID NO: 1618886 - RNA, 19 nt, Homo sapiens
  misc_RNA (1)...(19): siRNA sense strand
ccggcuuccugacugauga

SEQ ID NO: 1618887 - RNA, 19 nt, Homo sapiens
  misc_RNA (1)...(19): siRNA sense strand
ccaagcugguagccaacga

SEQ ID NO: 1618888 - RNA, 19 nt, Homo sapiens
  misc_RNA (1)...(19): siRNA sense strand
agacucgccugggaaaugg

SEQ ID NO: 1618889 - RNA, 19 nt, Homo sapiens
  misc_RNA (1)...(19): siRNA sense strand
agagagcauucaggagaug

SEQ ID NO: 1618890 - RNA, 19 nt, Homo sapiens
  misc_RNA (1)...(19): siRNA sense strand
acaaggcagaguccaguga

SEQ ID NO: 1618891 - RNA, 19 nt, Homo sapiens
  misc_RNA (1)...(19): siRNA sense strand
ggaaauggaugguggauga

SEQ ID NO: 1618892 - RNA, 19 nt, Homo sapiens
  misc_RNA (1)...(19): siRNA sense strand
gcacagcagucuucuggua

SEQ ID NO: 1618893 - RNA, 19 nt, Homo sapiens
  misc_RNA (1)...(19): siRNA sense strand
uaacagaaccuacgaugaa

SEQ ID NO: 1618894 - RNA, 19 nt, Homo sapiens
  misc_RNA (1)...(19): siRNA sense strand
gccaacaacuggauuaaug

SEQ ID NO: 1618895 - RNA, 19 nt, Homo sapiens
  misc_RNA (1)...(19): siRNA sense strand
gagaccaucugcucccaua

SEQ ID NO: 1618896 - RNA, 19 nt, Homo sapiens
  misc_RNA (1)...(19): siRNA sense strand
ccaaguggauugccaacaa

SEQ ID NO: 1618897 - RNA, 19 nt, Homo sapiens
  misc_RNA (1)...(19): siRNA sense strand
cgacagggaucacuucauc

SEQ ID NO: 1618898 - RNA, 19 nt, Homo sapiens
  misc_RNA (1)...(19): siRNA sense strand
gaagaggcaaugagcacua

SEQ ID NO: 1618899 - RNA, 19 nt, Homo sapiens
  misc_RNA (1)...(19): siRNA sense strand
gaugaaaugagucugauuc

SEQ ID NO: 1618900 - RNA, 19 nt, Homo sapiens
  misc_RNA (1)...(19): siRNA sense strand
gaagagugucggcucauca

SEQ ID NO: 1618901 - RNA, 19 nt, Homo sapiens
  misc_RNA (1)...(19): siRNA sense strand
gccagauccugccuacuga

SEQ ID NO: 1618902 - RNA, 19 nt, Homo sapiens
  misc_RNA (1)...(19): siRNA sense strand
ucaagccgcugcucuucga

SEQ ID NO: 1618903 - RNA, 19 nt, Homo sapiens
  misc_RNA (1)...(19): siRNA sense strand
gugcggaacagccaccaua

SEQ ID NO: 1618904 - RNA, 19 nt, Homo sapiens
  misc_RNA (1)...(19): siRNA sense strand
gauccugccuacugaagag

SEQ ID NO: 1618905 - RNA, 19 nt, Homo sapiens
  misc_RNA (1)...(19): siRNA sense strand
gaaccgugaugggcaccuu

SEQ ID NO: 1618906 - RNA, 19 nt, Homo sapiens
  misc_RNA (1)...(19): siRNA sense strand
gcugcagguuguucgauau

SEQ ID NO: 1618907 - RNA, 19 nt, Homo sapiens
  misc_RNA (1)...(19): siRNA sense strand
gaaccuacgaugaaaugag

SEQ ID NO: 1618908 - RNA, 19 nt, Homo sapiens
  misc_RNA (1)...(19): siRNA sense strand
cagagagcauucaggagau

SEQ ID NO: 1618909 - RNA, 19 nt, Homo sapiens
  misc_RNA (1)...(19): siRNA sense strand
gcagguuguucgauauggu

SEQ ID NO: 1618910 - RNA, 19 nt, Homo sapiens
  misc_RNA (1)...(19): siRNA sense strand
caacaacuggauuaaugug

SEQ ID NO: 1618911 - RNA, 19 nt, Homo sapiens
  misc_RNA (1)...(19): siRNA sense strand
cagaaccuacgaugaaaug

SEQ ID NO: 1618912 - RNA, 19 nt, Homo sapiens
  misc_RNA (1)...(19): siRNA sense strand
aacagaaccuacgaugaaa

SEQ ID NO: 1618913 - RNA, 19 nt, Homo sapiens
  misc_RNA (1)...(19): siRNA sense strand
gcagucuucugguacaacu

SEQ ID NO: 1618914 - RNA, 19 nt, Homo sapiens
  misc_RNA (1)...(19): siRNA sense strand
caacagggcacagcagucu

SEQ ID NO: 1618915 - RNA, 19 nt, Homo sapiens
  misc_RNA (1)...(19): siRNA sense strand
caaguggauugccaacaac

SEQ ID NO: 1618916 - RNA, 19 nt, Homo sapiens
  misc_RNA (1)...(19): siRNA sense strand
cuacagcaacggcgacgaa

SEQ ID NO: 1618917 - RNA, 19 nt, Homo sapiens
  misc_RNA (1)...(19): siRNA sense strand
ccaacaacuggauuaaugu

SEQ ID NO: 1618918 - RNA, 19 nt, Homo sapiens
  misc_RNA (1)...(19): siRNA sense strand
gcugguagccaacgagucu

SEQ ID NO: 1618919 - RNA, 19 nt, Homo sapiens
  misc_RNA (1)...(19): siRNA sense strand
aaccuacgaugaaaugagu

SEQ ID NO: 1618920 - RNA, 19 nt, Homo sapiens
  misc_RNA (1)...(19): siRNA sense strand
cgcugcagguuguucgaua

SEQ ID NO: 1618921 - RNA, 19 nt, Homo sapiens
  misc_RNA (1)...(19): siRNA sense strand
ugaagagugucggcucauc

SEQ ID NO: 1618922 - RNA, 19 nt, Homo sapiens
  misc_RNA (1)...(19): siRNA sense strand
uagcagauaacagaaccua

SEQ ID NO: 1618923 - RNA, 19 nt, Homo sapiens
  misc_RNA (1)...(19): siRNA sense strand
gggccuguguacccagaga

SEQ ID NO: 1618924 - RNA, 19 nt, Homo sapiens
  misc_RNA (1)...(19): siRNA sense strand
aagaggcaaugagcacuau

SEQ ID NO: 1618925 - RNA, 19 nt, Homo sapiens
  misc_RNA (1)...(19): siRNA sense strand
ugggugacguagacgacua

SEQ ID NO: 1618926 - RNA, 19 nt, Homo sapiens
  misc_RNA (1)...(19): siRNA sense strand
cagacucgccugggaaaug

SEQ ID NO: 1618927 - RNA, 19 nt, Homo sapiens
  misc_RNA (1)...(19): siRNA sense strand
aagggaaaccugcguguca

SEQ ID NO: 1618928 - RNA, 19 nt, Homo sapiens
  misc_RNA (1)...(19): siRNA sense strand
ccugacugaugaagagugu

SEQ ID NO: 1618929 - RNA, 19 nt, Homo sapiens
  misc_RNA (1)...(19): siRNA sense strand
acauggaccuucgggacuu

SEQ ID NO: 1618930 - RNA, 19 nt, Homo sapiens
  misc_RNA (1)...(19): siRNA sense strand
agacucgccugggaaaugg

SEQ ID NO: 1618931 - RNA, 19 nt, Homo sapiens
  misc_RNA (1)...(19): siRNA sense strand
acagcagucuucugguaca

SEQ ID NO: 1618932 - RNA, 19 nt, Homo sapiens
  misc_RNA (1)...(19): siRNA sense strand
ccggcuuccugacugauga

SEQ ID NO: 1618933 - RNA, 19 nt, Homo sapiens
  misc_RNA (1)...(19): siRNA sense strand
ccaagcugguagccaacga

SEQ ID NO: 1618934 - RNA, 19 nt, Homo sapiens
  misc_RNA (1)...(19): siRNA sense strand
agagagcauucaggagaug

SEQ ID NO: 1618935 - RNA, 19 nt, Homo sapiens
  misc_RNA (1)...(19): siRNA sense strand
acaaggcagaguccaguga

SEQ ID NO: 1618936 - RNA, 19 nt, Homo sapiens
  misc_RNA (1)...(19): siRNA sense strand
ggaaauggaugguggauga

SEQ ID NO: 1618937 - RNA, 19 nt, Homo sapiens
  misc_RNA (1)...(19): siRNA sense strand
gcacagcagucuucuggua

SEQ ID NO: 1618938 - RNA, 19 nt, Homo sapiens
  misc_RNA (1)...(19): siRNA sense strand
uaacagaaccuacgaugaa

SEQ ID NO: 1618939 - RNA, 19 nt, Homo sapiens
  misc_RNA (1)...(19): siRNA sense strand
gccaacaacuggauuaaug

SEQ ID NO: 1618940 - RNA, 19 nt, Homo sapiens
  misc_RNA (1)...(19): siRNA sense strand
gagaccaucugcucccaua

SEQ ID NO: 1618941 - RNA, 19 nt, Homo sapiens
  misc_RNA (1)...(19): siRNA sense strand
ccaaguggauugccaacaa

SEQ ID NO: 1618942 - RNA, 19 nt, Homo sapiens
  misc_RNA (1)...(19): siRNA sense strand
cgacagggaucacuucauc

SEQ ID NO: 1618943 - RNA, 19 nt, Homo sapiens
  misc_RNA (1)...(19): siRNA sense strand
gaagaggcaaugagcacua

SEQ ID NO: 1618944 - RNA, 19 nt, Homo sapiens
  misc_RNA (1)...(19): siRNA sense strand
gaugaaaugagucugauuc

SEQ ID NO: 1618945 - RNA, 19 nt, Homo sapiens
  misc_RNA (1)...(19): siRNA sense strand
gaagagugucggcucauca

SEQ ID NO: 1618946 - RNA, 19 nt, Homo sapiens
  misc_RNA (1)...(19): siRNA sense strand
gccagauccugccuacuga

SEQ ID NO: 1618947 - RNA, 19 nt, Homo sapiens
  misc_RNA (1)...(19): siRNA sense strand
ucaagccgcugcucuucga

SEQ ID NO: 1618948 - RNA, 19 nt, Homo sapiens
  misc_RNA (1)...(19): siRNA sense strand
gugcggaacagccaccaua

SEQ ID NO: 1618949 - RNA, 19 nt, Homo sapiens
  misc_RNA (1)...(19): siRNA sense strand
gauccugccuacugaagag

SEQ ID NO: 1618950 - RNA, 19 nt, Homo sapiens
  misc_RNA (1)...(19): siRNA sense strand
gaaccgugaugggcaccuu

SEQ ID NO: 1618951 - RNA, 19 nt, Homo sapiens
  misc_RNA (1)...(19): siRNA sense strand
gcugcagguuguucgauau

SEQ ID NO: 1618952 - RNA, 19 nt, Homo sapiens
  misc_RNA (1)...(19): siRNA sense strand
gaaccuacgaugaaaugag

SEQ ID NO: 1618953 - RNA, 19 nt, Homo sapiens
  misc_RNA (1)...(19): siRNA sense strand
cagagagcauucaggagau

SEQ ID NO: 1618954 - RNA, 19 nt, Homo sapiens
  misc_RNA (1)...(19): siRNA sense strand
gcagguuguucgauauggu

SEQ ID NO: 1618955 - RNA, 19 nt, Homo sapiens
  misc_RNA (1)...(19): siRNA sense strand
caacaacuggauuaaugug

SEQ ID NO: 1618956 - RNA, 19 nt, Homo sapiens
  misc_RNA (1)...(19): siRNA sense strand
cagaaccuacgaugaaaug

SEQ ID NO: 1618957 - RNA, 19 nt, Homo sapiens
  misc_RNA (1)...(19): siRNA sense strand
aacagaaccuacgaugaaa

SEQ ID NO: 1618958 - RNA, 19 nt, Homo sapiens
  misc_RNA (1)...(19): siRNA sense strand
gcagucuucugguacaacu

SEQ ID NO: 1618959 - RNA, 19 nt, Homo sapiens
  misc_RNA (1)...(19): siRNA sense strand
caacagggcacagcagucu

SEQ ID NO: 1618960 - RNA, 19 nt, Homo sapiens
  misc_RNA (1)...(19): siRNA sense strand
caaguggauugccaacaac

SEQ ID NO: 1618961 - RNA, 19 nt, Homo sapiens
  misc_RNA (1)...(19): siRNA sense strand
cuacagcaacggcgacgaa

SEQ ID NO: 1618962 - RNA, 19 nt, Homo sapiens
  misc_RNA (1)...(19): siRNA sense strand
ccaacaacuggauuaaugu

SEQ ID NO: 1618963 - RNA, 19 nt, Homo sapiens
  misc_RNA (1)...(19): siRNA sense strand
gcugguagccaacgagucu

SEQ ID NO: 1618964 - RNA, 19 nt, Homo sapiens
  misc_RNA (1)...(19): siRNA sense strand
aaccuacgaugaaaugagu

SEQ ID NO: 1618965 - RNA, 19 nt, Homo sapiens
  misc_RNA (1)...(19): siRNA sense strand
cgcugcagguuguucgaua

SEQ ID NO: 1618966 - RNA, 19 nt, Homo sapiens
  misc_RNA (1)...(19): siRNA sense strand
ugaagagugucggcucauc

SEQ ID NO: 1618967 - RNA, 19 nt, Homo sapiens
  misc_RNA (1)...(19): siRNA sense strand
uagcagauaacagaaccua

SEQ ID NO: 1618968 - RNA, 19 nt, Homo sapiens
  misc_RNA (1)...(19): siRNA sense strand
gggccuguguacccagaga

SEQ ID NO: 1618969 - RNA, 19 nt, Homo sapiens
  misc_RNA (1)...(19): siRNA sense strand
aagaggcaaugagcacuau

SEQ ID NO: 1618970 - RNA, 19 nt, Homo sapiens
  misc_RNA (1)...(19): siRNA sense strand
ugggugacguagacgacua

SEQ ID NO: 1618971 - RNA, 19 nt, Homo sapiens
  misc_RNA (1)...(19): siRNA sense strand
cagacucgccugggaaaug

SEQ ID NO: 1618972 - RNA, 19 nt, Homo sapiens
  misc_RNA (1)...(19): siRNA sense strand
aagggaaaccugcguguca

SEQ ID NO: 1618973 - RNA, 19 nt, Homo sapiens
  misc_RNA (1)...(19): siRNA sense strand
ccugacugaugaagagugu

SEQ ID NO: 1618974 - RNA, 19 nt, Homo sapiens
  misc_RNA (1)...(19): siRNA sense strand
acauggaccuucgggacuu

SEQ ID NO: 1618975 - RNA, 19 nt, Homo sapiens
  misc_RNA (1)...(19): siRNA sense strand
ccggcuuccugacugauga

SEQ ID NO: 1618976 - RNA, 19 nt, Homo sapiens
  misc_RNA (1)...(19): siRNA sense strand
acagcagucuucugguaca

SEQ ID NO: 1618977 - RNA, 19 nt, Homo sapiens
  misc_RNA (1)...(19): siRNA sense strand
ccaagcugguagccaacga

SEQ ID NO: 1618978 - RNA, 19 nt, Homo sapiens
  misc_RNA (1)...(19): siRNA sense strand
agacucgccugggaaaugg

SEQ ID NO: 1618979 - RNA, 19 nt, Homo sapiens
  misc_RNA (1)...(19): siRNA sense strand
agagagcauucaggagaug

SEQ ID NO: 1618980 - RNA, 19 nt, Homo sapiens
  misc_RNA (1)...(19): siRNA sense strand
acaaggcagaguccaguga

SEQ ID NO: 1618981 - RNA, 19 nt, Homo sapiens
  misc_RNA (1)...(19): siRNA sense strand
ggacugagauugcuuacaa

SEQ ID NO: 1618982 - RNA, 19 nt, Homo sapiens
  misc_RNA (1)...(19): siRNA sense strand
ucacugggcucccucuuua

SEQ ID NO: 1618983 - RNA, 19 nt, Homo sapiens
  misc_RNA (1)...(19): siRNA sense strand
gcaagaguauaguauggua

SEQ ID NO: 1618984 - RNA, 19 nt, Homo sapiens
  misc_RNA (1)...(19): siRNA sense strand
ggucauauuugagaacaua

SEQ ID NO: 1618985 - RNA, 19 nt, Homo sapiens
  misc_RNA (1)...(19): siRNA sense strand
cugaauaacuugaguguga

SEQ ID NO: 1618986 - RNA, 19 nt, Homo sapiens
  misc_RNA (1)...(19): siRNA sense strand
gcaaugagagcaagaguau

SEQ ID NO: 1618987 - RNA, 19 nt, Homo sapiens
  misc_RNA (1)...(19): siRNA sense strand
gaacucaucugugcagcuu

SEQ ID NO: 1618988 - RNA, 19 nt, Homo sapiens
  misc_RNA (1)...(19): siRNA sense strand
caaacuugcugaacauaug

SEQ ID NO: 1618989 - RNA, 19 nt, Homo sapiens
  misc_RNA (1)...(19): siRNA sense strand
gaauagaaagucaccauga

SEQ ID NO: 1618990 - RNA, 19 nt, Homo sapiens
  misc_RNA (1)...(19): siRNA sense strand
uauaaugacuggucugaug

SEQ ID NO: 1618991 - RNA, 19 nt, Homo sapiens
  misc_RNA (1)...(19): siRNA sense strand
uaacaaugcugcuuaugca

SEQ ID NO: 1618992 - RNA, 19 nt, Homo sapiens
  misc_RNA (1)...(19): siRNA sense strand
ucgcaaagauucucaauac

SEQ ID NO: 1618993 - RNA, 19 nt, Homo sapiens
  misc_RNA (1)...(19): siRNA sense strand
gagcaagaguauaguaugg

SEQ ID NO: 1618994 - RNA, 19 nt, Homo sapiens
  misc_RNA (1)...(19): siRNA sense strand
gaaaaucagcgcaggcuua

SEQ ID NO: 1618995 - RNA, 19 nt, Homo sapiens
  misc_RNA (1)...(19): siRNA sense strand
gaaaacagaacaaggaaaa

SEQ ID NO: 1618996 - RNA, 19 nt, Homo sapiens
  misc_RNA (1)...(19): siRNA sense strand
gaaaagccuuauauucuug

SEQ ID NO: 1618997 - RNA, 19 nt, Homo sapiens
  misc_RNA (1)...(19): siRNA sense strand
gcaaagauucucaauacuc

SEQ ID NO: 1618998 - RNA, 19 nt, Homo sapiens
  misc_RNA (1)...(19): siRNA sense strand
ugacuggucugaugaugau

SEQ ID NO: 1618999 - RNA, 19 nt, Homo sapiens
  misc_RNA (1)...(19): siRNA sense strand
uagaaagucaccaugauuu

SEQ ID NO: 1619000 - RNA, 19 nt, Homo sapiens
  misc_RNA (1)...(19): siRNA sense strand
gagauugcuuacaaauaug

SEQ ID NO: 1619001 - RNA, 19 nt, Homo sapiens
  misc_RNA (1)...(19): siRNA sense strand
gaagaaaacagaacaagga

SEQ ID NO: 1619002 - RNA, 19 nt, Homo sapiens
  misc_RNA (1)...(19): siRNA sense strand
aaaugaaccuacucagaau

SEQ ID NO: 1619003 - RNA, 19 nt, Homo sapiens
  misc_RNA (1)...(19): siRNA sense strand
gaugaugacagcaaugaga

SEQ ID NO: 1619004 - RNA, 19 nt, Homo sapiens
  misc_RNA (1)...(19): siRNA sense strand
ugauaagguucugggaaua

SEQ ID NO: 1619005 - RNA, 19 nt, Homo sapiens
  misc_RNA (1)...(19): siRNA sense strand
cuaauuccauuucugacuu

SEQ ID NO: 1619006 - RNA, 19 nt, Homo sapiens
  misc_RNA (1)...(19): siRNA sense strand
ugggcucccucuuuaauaa

SEQ ID NO: 1619007 - RNA, 19 nt, Homo sapiens
  misc_RNA (1)...(19): siRNA sense strand
gaaaugaagaaaccaaacu

SEQ ID NO: 1619008 - RNA, 19 nt, Homo sapiens
  misc_RNA (1)...(19): siRNA sense strand
ggucugaugaugaugauga

SEQ ID NO: 1619009 - RNA, 19 nt, Homo sapiens
  misc_RNA (1)...(19): siRNA sense strand
auacaugaaucaagugugu

SEQ ID NO: 1619010 - RNA, 19 nt, Homo sapiens
  misc_RNA (1)...(19): siRNA sense strand
gaaaaugaaccuacucaga

SEQ ID NO: 1619011 - RNA, 19 nt, Homo sapiens
  misc_RNA (1)...(19): siRNA sense strand
gcacaugcuugcuaauucc

SEQ ID NO: 1619012 - RNA, 19 nt, Homo sapiens
  misc_RNA (1)...(19): siRNA sense strand
ccaauugucgcaaagauuc

SEQ ID NO: 1619013 - RNA, 19 nt, Homo sapiens
  misc_RNA (1)...(19): siRNA sense strand
gaaccuacucagaaucaau

SEQ ID NO: 1619014 - RNA, 19 nt, Homo sapiens
  misc_RNA (1)...(19): siRNA sense strand
gagagcaagaguauaguau

SEQ ID NO: 1619015 - RNA, 19 nt, Homo sapiens
  misc_RNA (1)...(19): siRNA sense strand
ggguaacaaugcugcuuau

SEQ ID NO: 1619016 - RNA, 19 nt, Homo sapiens
  misc_RNA (1)...(19): siRNA sense strand
uaauugcucuggguaacaa

SEQ ID NO: 1619017 - RNA, 19 nt, Homo sapiens
  misc_RNA (1)...(19): siRNA sense strand
gggcuacgccaggaaagua

SEQ ID NO: 1619018 - RNA, 19 nt, Homo sapiens
  misc_RNA (1)...(19): siRNA sense strand
ggccaaacuugcugaacau

SEQ ID NO: 1619019 - RNA, 19 nt, Homo sapiens
  misc_RNA (1)...(19): siRNA sense strand
aauagaaagucaccaugau

SEQ ID NO: 1619020 - RNA, 19 nt, Homo sapiens
  misc_RNA (1)...(19): siRNA sense strand
ucaagugugugcugauaag

SEQ ID NO: 1619021 - RNA, 19 nt, Homo sapiens
  misc_RNA (1)...(19): siRNA sense strand
guucuuugcuugguugaga

SEQ ID NO: 1619022 - RNA, 19 nt, Homo sapiens
  misc_RNA (1)...(19): siRNA sense strand
ugaauaacuugagugugaa

SEQ ID NO: 1619023 - RNA, 19 nt, Homo sapiens
  misc_RNA (1)...(19): siRNA sense strand
cugauaagguucugggaau

SEQ ID NO: 1619024 - RNA, 19 nt, Homo sapiens
  misc_RNA (1)...(19): siRNA sense strand
aaacuucuggucauauuug

SEQ ID NO: 1619025 - RNA, 19 nt, Homo sapiens
  misc_RNA (1)...(19): siRNA sense strand
cagcgcaggcuuaaaguau

SEQ ID NO: 1619026 - RNA, 19 nt, Homo sapiens
  misc_RNA (1)...(19): siRNA sense strand
gcgcaggcuuaaaguauac

SEQ ID NO: 1619027 - RNA, 19 nt, Homo sapiens
  misc_RNA (1)...(19): siRNA sense strand
ucccaaagagccaggaaua

SEQ ID NO: 1619028 - RNA, 19 nt, Homo sapiens
  misc_RNA (1)...(19): siRNA sense strand
gaaaauucauggccaaacu

SEQ ID NO: 1619029 - RNA, 19 nt, Homo sapiens
  misc_RNA (1)...(19): siRNA sense strand
gcucagggcccaaguacca

SEQ ID NO: 1619030 - RNA, 19 nt, Homo sapiens
  misc_RNA (1)...(19): siRNA sense strand
acaaucacuucucgcuuga

SEQ ID NO: 1619031 - RNA, 19 nt, Homo sapiens
  misc_RNA (1)...(19): siRNA sense strand
gggcucggauugggacuga

SEQ ID NO: 1619032 - RNA, 19 nt, Homo sapiens
  misc_RNA (1)...(19): siRNA sense strand
uuucaagugugugcugaua

SEQ ID NO: 1619033 - RNA, 19 nt, Homo sapiens
  misc_RNA (1)...(19): siRNA sense strand
gaaaauccagccaugacua

SEQ ID NO: 1619034 - RNA, 19 nt, Homo sapiens
  misc_RNA (1)...(19): siRNA sense strand
gggaaaugaagaaaccaaa

SEQ ID NO: 1619035 - RNA, 19 nt, Homo sapiens
  misc_RNA (1)...(19): siRNA sense strand
gacugagauugcuuacaaa

SEQ ID NO: 1619036 - RNA, 19 nt, Homo sapiens
  misc_RNA (1)...(19): siRNA sense strand
ugagagcaagaguauagua

SEQ ID NO: 1619037 - RNA, 19 nt, Homo sapiens
  misc_RNA (1)...(19): siRNA sense strand
gcuggacugagauugcuua

SEQ ID NO: 1619038 - RNA, 19 nt, Homo sapiens
  misc_RNA (1)...(19): siRNA sense strand
gcuuuaauuguccugaaua

SEQ ID NO: 1619039 - RNA, 19 nt, Homo sapiens
  misc_RNA (1)...(19): siRNA sense strand
aaugagagcaagaguauag

SEQ ID NO: 1619040 - RNA, 19 nt, Homo sapiens
  misc_RNA (1)...(19): siRNA sense strand
uggccaaacuugcugaaca

SEQ ID NO: 1619041 - RNA, 19 nt, Homo sapiens
  misc_RNA (1)...(19): siRNA sense strand
ucuuaaacuucuggucaua

SEQ ID NO: 1619042 - RNA, 19 nt, Homo sapiens
  misc_RNA (1)...(19): siRNA sense strand
ggcuuaaaguauacaugaa

SEQ ID NO: 1619043 - RNA, 19 nt, Homo sapiens
  misc_RNA (1)...(19): siRNA sense strand
gggaucccauaguuaagga

SEQ ID NO: 1619044 - RNA, 19 nt, Homo sapiens
  misc_RNA (1)...(19): siRNA sense strand
guaacaaugcugcuuaugc

SEQ ID NO: 1619045 - RNA, 19 nt, Homo sapiens
  misc_RNA (1)...(19): siRNA sense strand
cgccugcuauugcauuuau

SEQ ID NO: 1619046 - RNA, 19 nt, Homo sapiens
  misc_RNA (1)...(19): siRNA sense strand
gauaagguucugggaauag

SEQ ID NO: 1619047 - RNA, 19 nt, Homo sapiens
  misc_RNA (1)...(19): siRNA sense strand
aaaaugaaccuacucagaa

SEQ ID NO: 1619048 - RNA, 19 nt, Homo sapiens
  misc_RNA (1)...(19): siRNA sense strand
gagaacaaagaaguuauuc

SEQ ID NO: 1619049 - RNA, 19 nt, Homo sapiens
  misc_RNA (1)...(19): siRNA sense strand
gguauaaugacuggucuga

SEQ ID NO: 1619050 - RNA, 19 nt, Homo sapiens
  misc_RNA (1)...(19): siRNA sense strand
ccaaacuugcugaacauau

SEQ ID NO: 1619051 - RNA, 19 nt, Homo sapiens
  misc_RNA (1)...(19): siRNA sense strand
caugcuugcuaauuccauu

SEQ ID NO: 1619052 - RNA, 19 nt, Homo sapiens
  misc_RNA (1)...(19): siRNA sense strand
gaucccauaguuaaggaaa

SEQ ID NO: 1619053 - RNA, 19 nt, Homo sapiens
  misc_RNA (1)...(19): siRNA sense strand
ggaagaaaaugaaccuacu

SEQ ID NO: 1619054 - RNA, 19 nt, Homo sapiens
  misc_RNA (1)...(19): siRNA sense strand
gaaacuccuuuugaauuug

SEQ ID NO: 1619055 - RNA, 19 nt, Homo sapiens
  misc_RNA (1)...(19): siRNA sense strand
ggaaaugaagaaaccaaac

SEQ ID NO: 1619056 - RNA, 19 nt, Homo sapiens
  misc_RNA (1)...(19): siRNA sense strand
uaaugaguaucagcacaug

SEQ ID NO: 1619057 - RNA, 19 nt, Homo sapiens
  misc_RNA (1)...(19): siRNA sense strand
agcgcaggcuuaaaguaua

SEQ ID NO: 1619058 - RNA, 19 nt, Homo sapiens
  misc_RNA (1)...(19): siRNA sense strand
gcauuuauagacugacuag

SEQ ID NO: 1619059 - RNA, 19 nt, Homo sapiens
  misc_RNA (1)...(19): siRNA sense strand
aaucagcgcaggcuuaaag

SEQ ID NO: 1619060 - RNA, 19 nt, Homo sapiens
  misc_RNA (1)...(19): siRNA sense strand
cuuaugcauuuaacagaga

SEQ ID NO: 1619061 - RNA, 19 nt, Homo sapiens
  misc_RNA (1)...(19): siRNA sense strand
auagaaagucaccaugauu

SEQ ID NO: 1619062 - RNA, 19 nt, Homo sapiens
  misc_RNA (1)...(19): siRNA sense strand
gggaauagaaagucaccau

SEQ ID NO: 1619063 - RNA, 19 nt, Homo sapiens
  misc_RNA (1)...(19): siRNA sense strand
agugugugcugauaagguu

SEQ ID NO: 1619064 - RNA, 19 nt, Homo sapiens
  misc_RNA (1)...(19): siRNA sense strand
cugagauugcuuacaaaua

SEQ ID NO: 1619065 - RNA, 19 nt, Homo sapiens
  misc_RNA (1)...(19): siRNA sense strand
gaauaacuugagugugaau

SEQ ID NO: 1619066 - RNA, 19 nt, Homo sapiens
  misc_RNA (1)...(19): siRNA sense strand
ggcuuuaauuguccugaau

SEQ ID NO: 1619067 - RNA, 19 nt, Homo sapiens
  misc_RNA (1)...(19): siRNA sense strand
gggcccaaguaccaucuuc

SEQ ID NO: 1619068 - RNA, 19 nt, Homo sapiens
  misc_RNA (1)...(19): siRNA sense strand
uggguaacaaugcugcuua

SEQ ID NO: 1619069 - RNA, 19 nt, Homo sapiens
  misc_RNA (1)...(19): siRNA sense strand
aggcuuaaaguauacauga

SEQ ID NO: 1619070 - RNA, 19 nt, Homo sapiens
  misc_RNA (1)...(19): siRNA sense strand
gaccgcaggccuggugauu

SEQ ID NO: 1619071 - RNA, 19 nt, Homo sapiens
  misc_RNA (1)...(19): siRNA sense strand
ugaugaugaugacagcaau

SEQ ID NO: 1619072 - RNA, 19 nt, Homo sapiens
  misc_RNA (1)...(19): siRNA sense strand
caaaugggaagaaaaugaa

SEQ ID NO: 1619073 - RNA, 19 nt, Homo sapiens
  misc_RNA (1)...(19): siRNA sense strand
uaacuugagugugaaugcu

SEQ ID NO: 1619074 - RNA, 19 nt, Homo sapiens
  misc_RNA (1)...(19): siRNA sense strand
cccaaagagccaggaauaa

SEQ ID NO: 1619075 - RNA, 19 nt, Homo sapiens
  misc_RNA (1)...(19): siRNA sense strand
ggcgccugcuauugcauuu

SEQ ID NO: 1619076 - RNA, 19 nt, Homo sapiens
  misc_RNA (1)...(19): siRNA sense strand
auaagguucugggaauaga

SEQ ID NO: 1619077 - RNA, 19 nt, Homo sapiens
  misc_RNA (1)...(19): siRNA sense strand
gcuggcgccugcuauugca

SEQ ID NO: 1619078 - RNA, 19 nt, Homo sapiens
  misc_RNA (1)...(19): siRNA sense strand
acaugaaucaaguguguga

SEQ ID NO: 1619079 - RNA, 19 nt, Homo sapiens
  misc_RNA (1)...(19): siRNA sense strand
aaccuacucagaaucaauu

SEQ ID NO: 1619080 - RNA, 19 nt, Homo sapiens
  misc_RNA (1)...(19): siRNA sense strand
gccaaacuugcugaacaua

SEQ ID NO: 1619081 - RNA, 19 nt, Homo sapiens
  misc_RNA (1)...(19): siRNA sense strand
ggacugagauugcuuacaa

SEQ ID NO: 1619082 - RNA, 19 nt, Homo sapiens
  misc_RNA (1)...(19): siRNA sense strand
ucacugggcucccucuuua

SEQ ID NO: 1619083 - RNA, 19 nt, Homo sapiens
  misc_RNA (1)...(19): siRNA sense strand
gcaagaguauaguauggua

SEQ ID NO: 1619084 - RNA, 19 nt, Homo sapiens
  misc_RNA (1)...(19): siRNA sense strand
ggucauauuugagaacaua

SEQ ID NO: 1619085 - RNA, 19 nt, Homo sapiens
  misc_RNA (1)...(19): siRNA sense strand
cugaauaacuugaguguga

SEQ ID NO: 1619086 - RNA, 19 nt, Homo sapiens
  misc_RNA (1)...(19): siRNA sense strand
gcaaugagagcaagaguau

SEQ ID NO: 1619087 - RNA, 19 nt, Homo sapiens
  misc_RNA (1)...(19): siRNA sense strand
gaacucaucugugcagcuu

SEQ ID NO: 1619088 - RNA, 19 nt, Homo sapiens
  misc_RNA (1)...(19): siRNA sense strand
caaacuugcugaacauaug

SEQ ID NO: 1619089 - RNA, 19 nt, Homo sapiens
  misc_RNA (1)...(19): siRNA sense strand
gaauagaaagucaccauga

SEQ ID NO: 1619090 - RNA, 19 nt, Homo sapiens
  misc_RNA (1)...(19): siRNA sense strand
uauaaugacuggucugaug

SEQ ID NO: 1619091 - RNA, 19 nt, Homo sapiens
  misc_RNA (1)...(19): siRNA sense strand
uaacaaugcugcuuaugca

SEQ ID NO: 1619092 - RNA, 19 nt, Homo sapiens
  misc_RNA (1)...(19): siRNA sense strand
ucgcaaagauucucaauac

SEQ ID NO: 1619093 - RNA, 19 nt, Homo sapiens
  misc_RNA (1)...(19): siRNA sense strand
gagcaagaguauaguaugg

SEQ ID NO: 1619094 - RNA, 19 nt, Homo sapiens
  misc_RNA (1)...(19): siRNA sense strand
gaaaaucagcgcaggcuua

SEQ ID NO: 1619095 - RNA, 19 nt, Homo sapiens
  misc_RNA (1)...(19): siRNA sense strand
gaaaacagaacaaggaaaa

SEQ ID NO: 1619096 - RNA, 19 nt, Homo sapiens
  misc_RNA (1)...(19): siRNA sense strand
gaaaagccuuauauucuug

SEQ ID NO: 1619097 - RNA, 19 nt, Homo sapiens
  misc_RNA (1)...(19): siRNA sense strand
gcaaagauucucaauacuc

SEQ ID NO: 1619098 - RNA, 19 nt, Homo sapiens
  misc_RNA (1)...(19): siRNA sense strand
ugacuggucugaugaugau

SEQ ID NO: 1619099 - RNA, 19 nt, Homo sapiens
  misc_RNA (1)...(19): siRNA sense strand
uagaaagucaccaugauuu

SEQ ID NO: 1619100 - RNA, 19 nt, Homo sapiens
  misc_RNA (1)...(19): siRNA sense strand
gagauugcuuacaaauaug

SEQ ID NO: 1619101 - RNA, 19 nt, Homo sapiens
  misc_RNA (1)...(19): siRNA sense strand
gaagaaaacagaacaagga

SEQ ID NO: 1619102 - RNA, 19 nt, Homo sapiens
  misc_RNA (1)...(19): siRNA sense strand
aaaugaaccuacucagaau

SEQ ID NO: 1619103 - RNA, 19 nt, Homo sapiens
  misc_RNA (1)...(19): siRNA sense strand
gaugaugacagcaaugaga

SEQ ID NO: 1619104 - RNA, 19 nt, Homo sapiens
  misc_RNA (1)...(19): siRNA sense strand
ugauaagguucugggaaua

SEQ ID NO: 1619105 - RNA, 19 nt, Homo sapiens
  misc_RNA (1)...(19): siRNA sense strand
cuaauuccauuucugacuu

SEQ ID NO: 1619106 - RNA, 19 nt, Homo sapiens
  misc_RNA (1)...(19): siRNA sense strand
ugggcucccucuuuaauaa

SEQ ID NO: 1619107 - RNA, 19 nt, Homo sapiens
  misc_RNA (1)...(19): siRNA sense strand
gaaaugaagaaaccaaacu

SEQ ID NO: 1619108 - RNA, 19 nt, Homo sapiens
  misc_RNA (1)...(19): siRNA sense strand
ggucugaugaugaugauga

SEQ ID NO: 1619109 - RNA, 19 nt, Homo sapiens
  misc_RNA (1)...(19): siRNA sense strand
auacaugaaucaagugugu

SEQ ID NO: 1619110 - RNA, 19 nt, Homo sapiens
  misc_RNA (1)...(19): siRNA sense strand
gaaaaugaaccuacucaga

SEQ ID NO: 1619111 - RNA, 19 nt, Homo sapiens
  misc_RNA (1)...(19): siRNA sense strand
gcacaugcuugcuaauucc

SEQ ID NO: 1619112 - RNA, 19 nt, Homo sapiens
  misc_RNA (1)...(19): siRNA sense strand
ccaauugucgcaaagauuc

SEQ ID NO: 1619113 - RNA, 19 nt, Homo sapiens
  misc_RNA (1)...(19): siRNA sense strand
gaaccuacucagaaucaau

SEQ ID NO: 1619114 - RNA, 19 nt, Homo sapiens
  misc_RNA (1)...(19): siRNA sense strand
gagagcaagaguauaguau

SEQ ID NO: 1619115 - RNA, 19 nt, Homo sapiens
  misc_RNA (1)...(19): siRNA sense strand
ggguaacaaugcugcuuau

SEQ ID NO: 1619116 - RNA, 19 nt, Homo sapiens
  misc_RNA (1)...(19): siRNA sense strand
uaauugcucuggguaacaa

SEQ ID NO: 1619117 - RNA, 19 nt, Homo sapiens
  misc_RNA (1)...(19): siRNA sense strand
gggcuacgccaggaaagua

SEQ ID NO: 1619118 - RNA, 19 nt, Homo sapiens
  misc_RNA (1)...(19): siRNA sense strand
ggccaaacuugcugaacau

SEQ ID NO: 1619119 - RNA, 19 nt, Homo sapiens
  misc_RNA (1)...(19): siRNA sense strand
aauagaaagucaccaugau

SEQ ID NO: 1619120 - RNA, 19 nt, Homo sapiens
  misc_RNA (1)...(19): siRNA sense strand
ucaagugugugcugauaag

SEQ ID NO: 1619121 - RNA, 19 nt, Homo sapiens
  misc_RNA (1)...(19): siRNA sense strand
guucuuugcuugguugaga

SEQ ID NO: 1619122 - RNA, 19 nt, Homo sapiens
  misc_RNA (1)...(19): siRNA sense strand
ugaauaacuugagugugaa

SEQ ID NO: 1619123 - RNA, 19 nt, Homo sapiens
  misc_RNA (1)...(19): siRNA sense strand
cugauaagguucugggaau

SEQ ID NO: 1619124 - RNA, 19 nt, Homo sapiens
  misc_RNA (1)...(19): siRNA sense strand
aaacuucuggucauauuug

SEQ ID NO: 1619125 - RNA, 19 nt, Homo sapiens
  misc_RNA (1)...(19): siRNA sense strand
cagcgcaggcuuaaaguau

SEQ ID NO: 1619126 - RNA, 19 nt, Homo sapiens
  misc_RNA (1)...(19): siRNA sense strand
gcgcaggcuuaaaguauac

SEQ ID NO: 1619127 - RNA, 19 nt, Homo sapiens
  misc_RNA (1)...(19): siRNA sense strand
ucccaaagagccaggaaua

SEQ ID NO: 1619128 - RNA, 19 nt, Homo sapiens
  misc_RNA (1)...(19): siRNA sense strand
gaaaauucauggccaaacu

SEQ ID NO: 1619129 - RNA, 19 nt, Homo sapiens
  misc_RNA (1)...(19): siRNA sense strand
gcucagggcccaaguacca

SEQ ID NO: 1619130 - RNA, 19 nt, Homo sapiens
  misc_RNA (1)...(19): siRNA sense strand
acaaucacuucucgcuuga

SEQ ID NO: 1619131 - RNA, 19 nt, Homo sapiens
  misc_RNA (1)...(19): siRNA sense strand
gggcucggauugggacuga

SEQ ID NO: 1619132 - RNA, 19 nt, Homo sapiens
  misc_RNA (1)...(19): siRNA sense strand
uuucaagugugugcugaua

SEQ ID NO: 1619133 - RNA, 19 nt, Homo sapiens
  misc_RNA (1)...(19): siRNA sense strand
gaaaauccagccaugacua

SEQ ID NO: 1619134 - RNA, 19 nt, Homo sapiens
  misc_RNA (1)...(19): siRNA sense strand
gggaaaugaagaaaccaaa

SEQ ID NO: 1619135 - RNA, 19 nt, Homo sapiens
  misc_RNA (1)...(19): siRNA sense strand
gacugagauugcuuacaaa

SEQ ID NO: 1619136 - RNA, 19 nt, Homo sapiens
  misc_RNA (1)...(19): siRNA sense strand
ugagagcaagaguauagua

SEQ ID NO: 1619137 - RNA, 19 nt, Homo sapiens
  misc_RNA (1)...(19): siRNA sense strand
gcuggacugagauugcuua

SEQ ID NO: 1619138 - RNA, 19 nt, Homo sapiens
  misc_RNA (1)...(19): siRNA sense strand
gcuuuaauuguccugaaua

SEQ ID NO: 1619139 - RNA, 19 nt, Homo sapiens
  misc_RNA (1)...(19): siRNA sense strand
aaugagagcaagaguauag

SEQ ID NO: 1619140 - RNA, 19 nt, Homo sapiens
  misc_RNA (1)...(19): siRNA sense strand
uggccaaacuugcugaaca

SEQ ID NO: 1619141 - RNA, 19 nt, Homo sapiens
  misc_RNA (1)...(19): siRNA sense strand
ucuuaaacuucuggucaua

SEQ ID NO: 1619142 - RNA, 19 nt, Homo sapiens
  misc_RNA (1)...(19): siRNA sense strand
ggcuuaaaguauacaugaa

SEQ ID NO: 1619143 - RNA, 19 nt, Homo sapiens
  misc_RNA (1)...(19): siRNA sense strand
gggaucccauaguuaagga

SEQ ID NO: 1619144 - RNA, 19 nt, Homo sapiens
  misc_RNA (1)...(19): siRNA sense strand
guaacaaugcugcuuaugc

SEQ ID NO: 1619145 - RNA, 19 nt, Homo sapiens
  misc_RNA (1)...(19): siRNA sense strand
cgccugcuauugcauuuau

SEQ ID NO: 1619146 - RNA, 19 nt, Homo sapiens
  misc_RNA (1)...(19): siRNA sense strand
gauaagguucugggaauag

SEQ ID NO: 1619147 - RNA, 19 nt, Homo sapiens
  misc_RNA (1)...(19): siRNA sense strand
aaaaugaaccuacucagaa

SEQ ID NO: 1619148 - RNA, 19 nt, Homo sapiens
  misc_RNA (1)...(19): siRNA sense strand
gagaacaaagaaguuauuc

SEQ ID NO: 1619149 - RNA, 19 nt, Homo sapiens
  misc_RNA (1)...(19): siRNA sense strand
gguauaaugacuggucuga

SEQ ID NO: 1619150 - RNA, 19 nt, Homo sapiens
  misc_RNA (1)...(19): siRNA sense strand
ccaaacuugcugaacauau

SEQ ID NO: 1619151 - RNA, 19 nt, Homo sapiens
  misc_RNA (1)...(19): siRNA sense strand
caugcuugcuaauuccauu

SEQ ID NO: 1619152 - RNA, 19 nt, Homo sapiens
  misc_RNA (1)...(19): siRNA sense strand
gaucccauaguuaaggaaa

SEQ ID NO: 1619153 - RNA, 19 nt, Homo sapiens
  misc_RNA (1)...(19): siRNA sense strand
ggaagaaaaugaaccuacu

SEQ ID NO: 1619154 - RNA, 19 nt, Homo sapiens
  misc_RNA (1)...(19): siRNA sense strand
gaaacuccuuuugaauuug

SEQ ID NO: 1619155 - RNA, 19 nt, Homo sapiens
  misc_RNA (1)...(19): siRNA sense strand
ggaaaugaagaaaccaaac

SEQ ID NO: 1619156 - RNA, 19 nt, Homo sapiens
  misc_RNA (1)...(19): siRNA sense strand
uaaugaguaucagcacaug

SEQ ID NO: 1619157 - RNA, 19 nt, Homo sapiens
  misc_RNA (1)...(19): siRNA sense strand
agcgcaggcuuaaaguaua

SEQ ID NO: 1619158 - RNA, 19 nt, Homo sapiens
  misc_RNA (1)...(19): siRNA sense strand
gcauuuauagacugacuag

SEQ ID NO: 1619159 - RNA, 19 nt, Homo sapiens
  misc_RNA (1)...(19): siRNA sense strand
aaucagcgcaggcuuaaag

SEQ ID NO: 1619160 - RNA, 19 nt, Homo sapiens
  misc_RNA (1)...(19): siRNA sense strand
cuuaugcauuuaacagaga

SEQ ID NO: 1619161 - RNA, 19 nt, Homo sapiens
  misc_RNA (1)...(19): siRNA sense strand
auagaaagucaccaugauu

SEQ ID NO: 1619162 - RNA, 19 nt, Homo sapiens
  misc_RNA (1)...(19): siRNA sense strand
gggaauagaaagucaccau

SEQ ID NO: 1619163 - RNA, 19 nt, Homo sapiens
  misc_RNA (1)...(19): siRNA sense strand
agugugugcugauaagguu

SEQ ID NO: 1619164 - RNA, 19 nt, Homo sapiens
  misc_RNA (1)...(19): siRNA sense strand
cugagauugcuuacaaaua

SEQ ID NO: 1619165 - RNA, 19 nt, Homo sapiens
  misc_RNA (1)...(19): siRNA sense strand
gaauaacuugagugugaau

SEQ ID NO: 1619166 - RNA, 19 nt, Homo sapiens
  misc_RNA (1)...(19): siRNA sense strand
ggcuuuaauuguccugaau

SEQ ID NO: 1619167 - RNA, 19 nt, Homo sapiens
  misc_RNA (1)...(19): siRNA sense strand
gggcccaaguaccaucuuc

SEQ ID NO: 1619168 - RNA, 19 nt, Homo sapiens
  misc_RNA (1)...(19): siRNA sense strand
uggguaacaaugcugcuua

SEQ ID NO: 1619169 - RNA, 19 nt, Homo sapiens
  misc_RNA (1)...(19): siRNA sense strand
aggcuuaaaguauacauga

SEQ ID NO: 1619170 - RNA, 19 nt, Homo sapiens
  misc_RNA (1)...(19): siRNA sense strand
gaccgcaggccuggugauu

SEQ ID NO: 1619171 - RNA, 19 nt, Homo sapiens
  misc_RNA (1)...(19): siRNA sense strand
ugaugaugaugacagcaau

SEQ ID NO: 1619172 - RNA, 19 nt, Homo sapiens
  misc_RNA (1)...(19): siRNA sense strand
caaaugggaagaaaaugaa

SEQ ID NO: 1619173 - RNA, 19 nt, Homo sapiens
  misc_RNA (1)...(19): siRNA sense strand
uaacuugagugugaaugcu

SEQ ID NO: 1619174 - RNA, 19 nt, Homo sapiens
  misc_RNA (1)...(19): siRNA sense strand
cccaaagagccaggaauaa

SEQ ID NO: 1619175 - RNA, 19 nt, Homo sapiens
  misc_RNA (1)...(19): siRNA sense strand
ggcgccugcuauugcauuu

SEQ ID NO: 1619176 - RNA, 19 nt, Homo sapiens
  misc_RNA (1)...(19): siRNA sense strand
auaagguucugggaauaga

SEQ ID NO: 1619177 - RNA, 19 nt, Homo sapiens
  misc_RNA (1)...(19): siRNA sense strand
gcuggcgccugcuauugca

SEQ ID NO: 1619178 - RNA, 19 nt, Homo sapiens
  misc_RNA (1)...(19): siRNA sense strand
acaugaaucaaguguguga

SEQ ID NO: 1619179 - RNA, 19 nt, Homo sapiens
  misc_RNA (1)...(19): siRNA sense strand
aaccuacucagaaucaauu

SEQ ID NO: 1619180 - RNA, 19 nt, Homo sapiens
  misc_RNA (1)...(19): siRNA sense strand
gccaaacuugcugaacaua

SEQ ID NO: 1619181 - RNA, 19 nt, Homo sapiens
  misc_RNA (1)...(19): siRNA sense strand
ggacugagauugcuuacaa

SEQ ID NO: 1619182 - RNA, 19 nt, Homo sapiens
  misc_RNA (1)...(19): siRNA sense strand
ucacugggcucccucuuua

SEQ ID NO: 1619183 - RNA, 19 nt, Homo sapiens
  misc_RNA (1)...(19): siRNA sense strand
gcaagaguauaguauggua

SEQ ID NO: 1619184 - RNA, 19 nt, Homo sapiens
  misc_RNA (1)...(19): siRNA sense strand
ggucauauuugagaacaua

SEQ ID NO: 1619185 - RNA, 19 nt, Homo sapiens
  misc_RNA (1)...(19): siRNA sense strand
cugaauaacuugaguguga

SEQ ID NO: 1619186 - RNA, 19 nt, Homo sapiens
  misc_RNA (1)...(19): siRNA sense strand
gcaaugagagcaagaguau

SEQ ID NO: 1619187 - RNA, 19 nt, Homo sapiens
  misc_RNA (1)...(19): siRNA sense strand
gaacucaucugugcagcuu

SEQ ID NO: 1619188 - RNA, 19 nt, Homo sapiens
  misc_RNA (1)...(19): siRNA sense strand
caaacuugcugaacauaug

SEQ ID NO: 1619189 - RNA, 19 nt, Homo sapiens
  misc_RNA (1)...(19): siRNA sense strand
gaauagaaagucaccauga

SEQ ID NO: 1619190 - RNA, 19 nt, Homo sapiens
  misc_RNA (1)...(19): siRNA sense strand
uauaaugacuggucugaug

SEQ ID NO: 1619191 - RNA, 19 nt, Homo sapiens
  misc_RNA (1)...(19): siRNA sense strand
uaacaaugcugcuuaugca

SEQ ID NO: 1619192 - RNA, 19 nt, Homo sapiens
  misc_RNA (1)...(19): siRNA sense strand
ucgcaaagauucucaauac

SEQ ID NO: 1619193 - RNA, 19 nt, Homo sapiens
  misc_RNA (1)...(19): siRNA sense strand
gagcaagaguauaguaugg

SEQ ID NO: 1619194 - RNA, 19 nt, Homo sapiens
  misc_RNA (1)...(19): siRNA sense strand
gaaaaucagcgcaggcuua

SEQ ID NO: 1619195 - RNA, 19 nt, Homo sapiens
  misc_RNA (1)...(19): siRNA sense strand
gaaaacagaacaaggaaaa

SEQ ID NO: 1619196 - RNA, 19 nt, Homo sapiens
  misc_RNA (1)...(19): siRNA sense strand
gaaaagccuuauauucuug

SEQ ID NO: 1619197 - RNA, 19 nt, Homo sapiens
  misc_RNA (1)...(19): siRNA sense strand
gcaaagauucucaauacuc

SEQ ID NO: 1619198 - RNA, 19 nt, Homo sapiens
  misc_RNA (1)...(19): siRNA sense strand
ugacuggucugaugaugau

SEQ ID NO: 1619199 - RNA, 19 nt, Homo sapiens
  misc_RNA (1)...(19): siRNA sense strand
uagaaagucaccaugauuu

SEQ ID NO: 1619200 - RNA, 19 nt, Homo sapiens
  misc_RNA (1)...(19): siRNA sense strand
gagauugcuuacaaauaug

SEQ ID NO: 1619201 - RNA, 19 nt, Homo sapiens
  misc_RNA (1)...(19): siRNA sense strand
gaagaaaacagaacaagga

SEQ ID NO: 1619202 - RNA, 19 nt, Homo sapiens
  misc_RNA (1)...(19): siRNA sense strand
aaaugaaccuacucagaau

SEQ ID NO: 1619203 - RNA, 19 nt, Homo sapiens
  misc_RNA (1)...(19): siRNA sense strand
gaugaugacagcaaugaga

SEQ ID NO: 1619204 - RNA, 19 nt, Homo sapiens
  misc_RNA (1)...(19): siRNA sense strand
ugauaagguucugggaaua

SEQ ID NO: 1619205 - RNA, 19 nt, Homo sapiens
  misc_RNA (1)...(19): siRNA sense strand
cuaauuccauuucugacuu

SEQ ID NO: 1619206 - RNA, 19 nt, Homo sapiens
  misc_RNA (1)...(19): siRNA sense strand
ugggcucccucuuuaauaa

SEQ ID NO: 1619207 - RNA, 19 nt, Homo sapiens
  misc_RNA (1)...(19): siRNA sense strand
gaaaugaagaaaccaaacu

SEQ ID NO: 1619208 - RNA, 19 nt, Homo sapiens
  misc_RNA (1)...(19): siRNA sense strand
ggucugaugaugaugauga

SEQ ID NO: 1619209 - RNA, 19 nt, Homo sapiens
  misc_RNA (1)...(19): siRNA sense strand
auacaugaaucaagugugu

SEQ ID NO: 1619210 - RNA, 19 nt, Homo sapiens
  misc_RNA (1)...(19): siRNA sense strand
gaaaaugaaccuacucaga

SEQ ID NO: 1619211 - RNA, 19 nt, Homo sapiens
  misc_RNA (1)...(19): siRNA sense strand
gcacaugcuugcuaauucc

SEQ ID NO: 1619212 - RNA, 19 nt, Homo sapiens
  misc_RNA (1)...(19): siRNA sense strand
ccaauugucgcaaagauuc

SEQ ID NO: 1619213 - RNA, 19 nt, Homo sapiens
  misc_RNA (1)...(19): siRNA sense strand
gaaccuacucagaaucaau

SEQ ID NO: 1619214 - RNA, 19 nt, Homo sapiens
  misc_RNA (1)...(19): siRNA sense strand
gagagcaagaguauaguau

SEQ ID NO: 1619215 - RNA, 19 nt, Homo sapiens
  misc_RNA (1)...(19): siRNA sense strand
ggguaacaaugcugcuuau

SEQ ID NO: 1619216 - RNA, 19 nt, Homo sapiens
  misc_RNA (1)...(19): siRNA sense strand
uaauugcucuggguaacaa

SEQ ID NO: 1619217 - RNA, 19 nt, Homo sapiens
  misc_RNA (1)...(19): siRNA sense strand
gggcuacgccaggaaagua

SEQ ID NO: 1619218 - RNA, 19 nt, Homo sapiens
  misc_RNA (1)...(19): siRNA sense strand
ggccaaacuugcugaacau

SEQ ID NO: 1619219 - RNA, 19 nt, Homo sapiens
  misc_RNA (1)...(19): siRNA sense strand
aauagaaagucaccaugau

SEQ ID NO: 1619220 - RNA, 19 nt, Homo sapiens
  misc_RNA (1)...(19): siRNA sense strand
ucaagugugugcugauaag

SEQ ID NO: 1619221 - RNA, 19 nt, Homo sapiens
  misc_RNA (1)...(19): siRNA sense strand
guucuuugcuugguugaga

SEQ ID NO: 1619222 - RNA, 19 nt, Homo sapiens
  misc_RNA (1)...(19): siRNA sense strand
ugaauaacuugagugugaa

SEQ ID NO: 1619223 - RNA, 19 nt, Homo sapiens
  misc_RNA (1)...(19): siRNA sense strand
cugauaagguucugggaau

SEQ ID NO: 1619224 - RNA, 19 nt, Homo sapiens
  misc_RNA (1)...(19): siRNA sense strand
aaacuucuggucauauuug

SEQ ID NO: 1619225 - RNA, 19 nt, Homo sapiens
  misc_RNA (1)...(19): siRNA sense strand
cagcgcaggcuuaaaguau

SEQ ID NO: 1619226 - RNA, 19 nt, Homo sapiens
  misc_RNA (1)...(19): siRNA sense strand
gcgcaggcuuaaaguauac

SEQ ID NO: 1619227 - RNA, 19 nt, Homo sapiens
  misc_RNA (1)...(19): siRNA sense strand
ucccaaagagccaggaaua

SEQ ID NO: 1619228 - RNA, 19 nt, Homo sapiens
  misc_RNA (1)...(19): siRNA sense strand
gaaaauucauggccaaacu

SEQ ID NO: 1619229 - RNA, 19 nt, Homo sapiens
  misc_RNA (1)...(19): siRNA sense strand
gcucagggcccaaguacca

SEQ ID NO: 1619230 - RNA, 19 nt, Homo sapiens
  misc_RNA (1)...(19): siRNA sense strand
acaaucacuucucgcuuga

SEQ ID NO: 1619231 - RNA, 19 nt, Homo sapiens
  misc_RNA (1)...(19): siRNA sense strand
gggcucggauugggacuga

SEQ ID NO: 1619232 - RNA, 19 nt, Homo sapiens
  misc_RNA (1)...(19): siRNA sense strand
uuucaagugugugcugaua

SEQ ID NO: 1619233 - RNA, 19 nt, Homo sapiens
  misc_RNA (1)...(19): siRNA sense strand
gaaaauccagccaugacua

SEQ ID NO: 1619234 - RNA, 19 nt, Homo sapiens
  misc_RNA (1)...(19): siRNA sense strand
gggaaaugaagaaaccaaa

SEQ ID NO: 1619235 - RNA, 19 nt, Homo sapiens
  misc_RNA (1)...(19): siRNA sense strand
gacugagauugcuuacaaa

SEQ ID NO: 1619236 - RNA, 19 nt, Homo sapiens
  misc_RNA (1)...(19): siRNA sense strand
ugagagcaagaguauagua

SEQ ID NO: 1619237 - RNA, 19 nt, Homo sapiens
  misc_RNA (1)...(19): siRNA sense strand
gcuggacugagauugcuua

SEQ ID NO: 1619238 - RNA, 19 nt, Homo sapiens
  misc_RNA (1)...(19): siRNA sense strand
gcuuuaauuguccugaaua

SEQ ID NO: 1619239 - RNA, 19 nt, Homo sapiens
  misc_RNA (1)...(19): siRNA sense strand
aaugagagcaagaguauag

SEQ ID NO: 1619240 - RNA, 19 nt, Homo sapiens
  misc_RNA (1)...(19): siRNA sense strand
uggccaaacuugcugaaca

SEQ ID NO: 1619241 - RNA, 19 nt, Homo sapiens
  misc_RNA (1)...(19): siRNA sense strand
ucuuaaacuucuggucaua

SEQ ID NO: 1619242 - RNA, 19 nt, Homo sapiens
  misc_RNA (1)...(19): siRNA sense strand
ggcuuaaaguauacaugaa

SEQ ID NO: 1619243 - RNA, 19 nt, Homo sapiens
  misc_RNA (1)...(19): siRNA sense strand
gggaucccauaguuaagga

SEQ ID NO: 1619244 - RNA, 19 nt, Homo sapiens
  misc_RNA (1)...(19): siRNA sense strand
guaacaaugcugcuuaugc

SEQ ID NO: 1619245 - RNA, 19 nt, Homo sapiens
  misc_RNA (1)...(19): siRNA sense strand
cgccugcuauugcauuuau

SEQ ID NO: 1619246 - RNA, 19 nt, Homo sapiens
  misc_RNA (1)...(19): siRNA sense strand
gauaagguucugggaauag

SEQ ID NO: 1619247 - RNA, 19 nt, Homo sapiens
  misc_RNA (1)...(19): siRNA sense strand
aaaaugaaccuacucagaa

SEQ ID NO: 1619248 - RNA, 19 nt, Homo sapiens
  misc_RNA (1)...(19): siRNA sense strand
gagaacaaagaaguuauuc

SEQ ID NO: 1619249 - RNA, 19 nt, Homo sapiens
  misc_RNA (1)...(19): siRNA sense strand
gguauaaugacuggucuga

SEQ ID NO: 1619250 - RNA, 19 nt, Homo sapiens
  misc_RNA (1)...(19): siRNA sense strand
ccaaacuugcugaacauau

SEQ ID NO: 1619251 - RNA, 19 nt, Homo sapiens
  misc_RNA (1)...(19): siRNA sense strand
caugcuugcuaauuccauu

SEQ ID NO: 1619252 - RNA, 19 nt, Homo sapiens
  misc_RNA (1)...(19): siRNA sense strand
gaucccauaguuaaggaaa

SEQ ID NO: 1619253 - RNA, 19 nt, Homo sapiens
  misc_RNA (1)...(19): siRNA sense strand
ggaagaaaaugaaccuacu

SEQ ID NO: 1619254 - RNA, 19 nt, Homo sapiens
  misc_RNA (1)...(19): siRNA sense strand
gaaacuccuuuugaauuug

SEQ ID NO: 1619255 - RNA, 19 nt, Homo sapiens
  misc_RNA (1)...(19): siRNA sense strand
ggaaaugaagaaaccaaac

SEQ ID NO: 1619256 - RNA, 19 nt, Homo sapiens
  misc_RNA (1)...(19): siRNA sense strand
uaaugaguaucagcacaug

SEQ ID NO: 1619257 - RNA, 19 nt, Homo sapiens
  misc_RNA (1)...(19): siRNA sense strand
agcgcaggcuuaaaguaua

SEQ ID NO: 1619258 - RNA, 19 nt, Homo sapiens
  misc_RNA (1)...(19): siRNA sense strand
gcauuuauagacugacuag

SEQ ID NO: 1619259 - RNA, 19 nt, Homo sapiens
  misc_RNA (1)...(19): siRNA sense strand
aaucagcgcaggcuuaaag

SEQ ID NO: 1619260 - RNA, 19 nt, Homo sapiens
  misc_RNA (1)...(19): siRNA sense strand
cuuaugcauuuaacagaga

SEQ ID NO: 1619261 - RNA, 19 nt, Homo sapiens
  misc_RNA (1)...(19): siRNA sense strand
auagaaagucaccaugauu

SEQ ID NO: 1619262 - RNA, 19 nt, Homo sapiens
  misc_RNA (1)...(19): siRNA sense strand
gggaauagaaagucaccau

SEQ ID NO: 1619263 - RNA, 19 nt, Homo sapiens
  misc_RNA (1)...(19): siRNA sense strand
agugugugcugauaagguu

SEQ ID NO: 1619264 - RNA, 19 nt, Homo sapiens
  misc_RNA (1)...(19): siRNA sense strand
cugagauugcuuacaaaua

SEQ ID NO: 1619265 - RNA, 19 nt, Homo sapiens
  misc_RNA (1)...(19): siRNA sense strand
gaauaacuugagugugaau

SEQ ID NO: 1619266 - RNA, 19 nt, Homo sapiens
  misc_RNA (1)...(19): siRNA sense strand
ggcuuuaauuguccugaau

SEQ ID NO: 1619267 - RNA, 19 nt, Homo sapiens
  misc_RNA (1)...(19): siRNA sense strand
gggcccaaguaccaucuuc

SEQ ID NO: 1619268 - RNA, 19 nt, Homo sapiens
  misc_RNA (1)...(19): siRNA sense strand
uggguaacaaugcugcuua

SEQ ID NO: 1619269 - RNA, 19 nt, Homo sapiens
  misc_RNA (1)...(19): siRNA sense strand
aggcuuaaaguauacauga

SEQ ID NO: 1619270 - RNA, 19 nt, Homo sapiens
  misc_RNA (1)...(19): siRNA sense strand
gaccgcaggccuggugauu

SEQ ID NO: 1619271 - RNA, 19 nt, Homo sapiens
  misc_RNA (1)...(19): siRNA sense strand
ugaugaugaugacagcaau

SEQ ID NO: 1619272 - RNA, 19 nt, Homo sapiens
  misc_RNA (1)...(19): siRNA sense strand
caaaugggaagaaaaugaa

SEQ ID NO: 1619273 - RNA, 19 nt, Homo sapiens
  misc_RNA (1)...(19): siRNA sense strand
uaacuugagugugaaugcu

SEQ ID NO: 1619274 - RNA, 19 nt, Homo sapiens
  misc_RNA (1)...(19): siRNA sense strand
cccaaagagccaggaauaa

SEQ ID NO: 1619275 - RNA, 19 nt, Homo sapiens
  misc_RNA (1)...(19): siRNA sense strand
ggcgccugcuauugcauuu

SEQ ID NO: 1619276 - RNA, 19 nt, Homo sapiens
  misc_RNA (1)...(19): siRNA sense strand
auaagguucugggaauaga

SEQ ID NO: 1619277 - RNA, 19 nt, Homo sapiens
  misc_RNA (1)...(19): siRNA sense strand
gcuggcgccugcuauugca

SEQ ID NO: 1619278 - RNA, 19 nt, Homo sapiens
  misc_RNA (1)...(19): siRNA sense strand
acaugaaucaaguguguga

SEQ ID NO: 1619279 - RNA, 19 nt, Homo sapiens
  misc_RNA (1)...(19): siRNA sense strand
aaccuacucagaaucaauu

SEQ ID NO: 1619280 - RNA, 19 nt, Homo sapiens
  misc_RNA (1)...(19): siRNA sense strand
gccaaacuugcugaacaua

SEQ ID NO: 1619281 - RNA, 19 nt, Homo sapiens
  misc_RNA (1)...(19): siRNA sense strand
gcagagauauuacagauug

SEQ ID NO: 1619282 - RNA, 19 nt, Homo sapiens
  misc_RNA (1)...(19): siRNA sense strand
gguggaaucugcagaaaua

SEQ ID NO: 1619283 - RNA, 19 nt, Homo sapiens
  misc_RNA (1)...(19): siRNA sense strand
caacagacauugcugaaga

SEQ ID NO: 1619284 - RNA, 19 nt, Homo sapiens
  misc_RNA (1)...(19): siRNA sense strand
gagacaauguaucgaaaua

SEQ ID NO: 1619285 - RNA, 19 nt, Homo sapiens
  misc_RNA (1)...(19): siRNA sense strand
caaaggacauguuaaagau

SEQ ID NO: 1619286 - RNA, 19 nt, Homo sapiens
  misc_RNA (1)...(19): siRNA sense strand
gcaaauggagcucccuuua

SEQ ID NO: 1619287 - RNA, 19 nt, Homo sapiens
  misc_RNA (1)...(19): siRNA sense strand
caaauauggugcugaugua

SEQ ID NO: 1619288 - RNA, 19 nt, Homo sapiens
  misc_RNA (1)...(19): siRNA sense strand
gcaaaggacauguuaaaga

SEQ ID NO: 1619289 - RNA, 19 nt, Homo sapiens
  misc_RNA (1)...(19): siRNA sense strand
caagucaucacaauaguua

SEQ ID NO: 1619290 - RNA, 19 nt, Homo sapiens
  misc_RNA (1)...(19): siRNA sense strand
caacaaguauuaacaguac

SEQ ID NO: 1619291 - RNA, 19 nt, Homo sapiens
  misc_RNA (1)...(19): siRNA sense strand
gaugacagcucuccauugg

SEQ ID NO: 1619292 - RNA, 19 nt, Homo sapiens
  misc_RNA (1)...(19): siRNA sense strand
gacaauacaugcugcaaca

SEQ ID NO: 1619293 - RNA, 19 nt, Homo sapiens
  misc_RNA (1)...(19): siRNA sense strand
gaugaugaaguucguauuu

SEQ ID NO: 1619294 - RNA, 19 nt, Homo sapiens
  misc_RNA (1)...(19): siRNA sense strand
gaagaaacuguuauaagug

SEQ ID NO: 1619295 - RNA, 19 nt, Homo sapiens
  misc_RNA (1)...(19): siRNA sense strand
gaccgaacaccauuacaua

SEQ ID NO: 1619296 - RNA, 19 nt, Homo sapiens
  misc_RNA (1)...(19): siRNA sense strand
ccacagaacacaaucauca

SEQ ID NO: 1619297 - RNA, 19 nt, Homo sapiens
  misc_RNA (1)...(19): siRNA sense strand
gcauggugcugaugucaau

SEQ ID NO: 1619298 - RNA, 19 nt, Homo sapiens
  misc_RNA (1)...(19): siRNA sense strand
gcugggaacuucuccacuu

SEQ ID NO: 1619299 - RNA, 19 nt, Homo sapiens
  misc_RNA (1)...(19): siRNA sense strand
gauguacacacgcaaagua

SEQ ID NO: 1619300 - RNA, 19 nt, Homo sapiens
  misc_RNA (1)...(19): siRNA sense strand
gugcugaugucaaugcaaa

SEQ ID NO: 1619301 - RNA, 19 nt, Homo sapiens
  misc_RNA (1)...(19): siRNA sense strand
uagcagagauauuacagau

SEQ ID NO: 1619302 - RNA, 19 nt, Homo sapiens
  misc_RNA (1)...(19): siRNA sense strand
uggaaacucuucuacauca

SEQ ID NO: 1619303 - RNA, 19 nt, Homo sapiens
  misc_RNA (1)...(19): siRNA sense strand
ggaaucugcagaaauagaa

SEQ ID NO: 1619304 - RNA, 19 nt, Homo sapiens
  misc_RNA (1)...(19): siRNA sense strand
gaagaaccaccagcuaaga

SEQ ID NO: 1619305 - RNA, 19 nt, Homo sapiens
  misc_RNA (1)...(19): siRNA sense strand
gaacuucuccacuucaucu

SEQ ID NO: 1619306 - RNA, 19 nt, Homo sapiens
  misc_RNA (1)...(19): siRNA sense strand
agacauugcugaagaaacu

SEQ ID NO: 1619307 - RNA, 19 nt, Homo sapiens
  misc_RNA (1)...(19): siRNA sense strand
aaggacauguuaaagauga

SEQ ID NO: 1619308 - RNA, 19 nt, Homo sapiens
  misc_RNA (1)...(19): siRNA sense strand
gugaagaaccaccagcuaa

SEQ ID NO: 1619309 - RNA, 19 nt, Homo sapiens
  misc_RNA (1)...(19): siRNA sense strand
gagcaggucaagaugauga

SEQ ID NO: 1619310 - RNA, 19 nt, Homo sapiens
  misc_RNA (1)...(19): siRNA sense strand
ggaaauuugcacucuauuc

SEQ ID NO: 1619311 - RNA, 19 nt, Homo sapiens
  misc_RNA (1)...(19): siRNA sense strand
aaacucuucuacaucagua

SEQ ID NO: 1619312 - RNA, 19 nt, Homo sapiens
  misc_RNA (1)...(19): siRNA sense strand
caaugcaaaggacauguua

SEQ ID NO: 1619313 - RNA, 19 nt, Homo sapiens
  misc_RNA (1)...(19): siRNA sense strand
uaagagacaauguaucgaa

SEQ ID NO: 1619314 - RNA, 19 nt, Homo sapiens
  misc_RNA (1)...(19): siRNA sense strand
ggucagcccaucauuguga

SEQ ID NO: 1619315 - RNA, 19 nt, Homo sapiens
  misc_RNA (1)...(19): siRNA sense strand
agaaccaaaucaacacaaa

SEQ ID NO: 1619316 - RNA, 19 nt, Homo sapiens
  misc_RNA (1)...(19): siRNA sense strand
uguaucugcuguucaguuu

SEQ ID NO: 1619317 - RNA, 19 nt, Homo sapiens
  misc_RNA (1)...(19): siRNA sense strand
gacaacaaguauuaacagu

SEQ ID NO: 1619318 - RNA, 19 nt, Homo sapiens
  misc_RNA (1)...(19): siRNA sense strand
guacacacgcaaaguaaau

SEQ ID NO: 1619319 - RNA, 19 nt, Homo sapiens
  misc_RNA (1)...(19): siRNA sense strand
aaauggagcucccuuuacu

SEQ ID NO: 1619320 - RNA, 19 nt, Homo sapiens
  misc_RNA (1)...(19): siRNA sense strand
agauggacaacaaguauua

SEQ ID NO: 1619321 - RNA, 19 nt, Homo sapiens
  misc_RNA (1)...(19): siRNA sense strand
acaccacaguuuaucauug

SEQ ID NO: 1619322 - RNA, 19 nt, Homo sapiens
  misc_RNA (1)...(19): siRNA sense strand
caauagacaauggaaauga

SEQ ID NO: 1619323 - RNA, 19 nt, Homo sapiens
  misc_RNA (1)...(19): siRNA sense strand
gcaagucaucacaauaguu

SEQ ID NO: 1619324 - RNA, 19 nt, Homo sapiens
  misc_RNA (1)...(19): siRNA sense strand
ggagcucccuuuacuacag

SEQ ID NO: 1619325 - RNA, 19 nt, Homo sapiens
  misc_RNA (1)...(19): siRNA sense strand
cacaauaguuacagaugga

SEQ ID NO: 1619326 - RNA, 19 nt, Homo sapiens
  misc_RNA (1)...(19): siRNA sense strand
ggaccgaacaccauuacau

SEQ ID NO: 1619327 - RNA, 19 nt, Homo sapiens
  misc_RNA (1)...(19): siRNA sense strand
aagagacaauguaucgaaa

SEQ ID NO: 1619328 - RNA, 19 nt, Homo sapiens
  misc_RNA (1)...(19): siRNA sense strand
gagcucccuuuacuacaga

SEQ ID NO: 1619329 - RNA, 19 nt, Homo sapiens
  misc_RNA (1)...(19): siRNA sense strand
cagcaagucaucacaauag

SEQ ID NO: 1619330 - RNA, 19 nt, Homo sapiens
  misc_RNA (1)...(19): siRNA sense strand
gcugcaacaccacaguuua

SEQ ID NO: 1619331 - RNA, 19 nt, Homo sapiens
  misc_RNA (1)...(19): siRNA sense strand
caacacaaacccagagagu

SEQ ID NO: 1619332 - RNA, 19 nt, Homo sapiens
  misc_RNA (1)...(19): siRNA sense strand
ucaaauauggugcugaugu

SEQ ID NO: 1619333 - RNA, 19 nt, Homo sapiens
  misc_RNA (1)...(19): siRNA sense strand
gcacaguauggucauuauu

SEQ ID NO: 1619334 - RNA, 19 nt, Homo sapiens
  misc_RNA (1)...(19): siRNA sense strand
gcuaagagacaauguaucg

SEQ ID NO: 1619335 - RNA, 19 nt, Homo sapiens
  misc_RNA (1)...(19): siRNA sense strand
ccagauggacaacaaguau

SEQ ID NO: 1619336 - RNA, 19 nt, Homo sapiens
  misc_RNA (1)...(19): siRNA sense strand
gagcuggugugagcagaga

SEQ ID NO: 1619337 - RNA, 19 nt, Homo sapiens
  misc_RNA (1)...(19): siRNA sense strand
ggacaacaaguauuaacag

SEQ ID NO: 1619338 - RNA, 19 nt, Homo sapiens
  misc_RNA (1)...(19): siRNA sense strand
gcaacaccacaguuuauca

SEQ ID NO: 1619339 - RNA, 19 nt, Homo sapiens
  misc_RNA (1)...(19): siRNA sense strand
gcugaagaaacuguuauaa

SEQ ID NO: 1619340 - RNA, 19 nt, Homo sapiens
  misc_RNA (1)...(19): siRNA sense strand
gcagagaugccagaaccaa

SEQ ID NO: 1619341 - RNA, 19 nt, Homo sapiens
  misc_RNA (1)...(19): siRNA sense strand
uaacaguaccagcaacaga

SEQ ID NO: 1619342 - RNA, 19 nt, Homo sapiens
  misc_RNA (1)...(19): siRNA sense strand
cagcacaguauggucauua

SEQ ID NO: 1619343 - RNA, 19 nt, Homo sapiens
  misc_RNA (1)...(19): siRNA sense strand
gaaauuugcacucuauucc

SEQ ID NO: 1619344 - RNA, 19 nt, Homo sapiens
  misc_RNA (1)...(19): siRNA sense strand
ugccuuagcugaagcaucu

SEQ ID NO: 1619345 - RNA, 19 nt, Homo sapiens
  misc_RNA (1)...(19): siRNA sense strand
gcacgagcaggucaagaug

SEQ ID NO: 1619346 - RNA, 19 nt, Homo sapiens
  misc_RNA (1)...(19): siRNA sense strand
ggaauuggucagcccauca

SEQ ID NO: 1619347 - RNA, 19 nt, Homo sapiens
  misc_RNA (1)...(19): siRNA sense strand
ggccacagaagaaguaguu

SEQ ID NO: 1619348 - RNA, 19 nt, Homo sapiens
  misc_RNA (1)...(19): siRNA sense strand
caucaguauuagcuacauu

SEQ ID NO: 1619349 - RNA, 19 nt, Homo sapiens
  misc_RNA (1)...(19): siRNA sense strand
gaagauuuagcagagauau

SEQ ID NO: 1619350 - RNA, 19 nt, Homo sapiens
  misc_RNA (1)...(19): siRNA sense strand
caccacaguuuaucauugg

SEQ ID NO: 1619351 - RNA, 19 nt, Homo sapiens
  misc_RNA (1)...(19): siRNA sense strand
cagcuaagagacaauguau

SEQ ID NO: 1619352 - RNA, 19 nt, Homo sapiens
  misc_RNA (1)...(19): siRNA sense strand
caugccagauggacaacaa

SEQ ID NO: 1619353 - RNA, 19 nt, Homo sapiens
  misc_RNA (1)...(19): siRNA sense strand
gaaacucuucuacaucagu

SEQ ID NO: 1619354 - RNA, 19 nt, Homo sapiens
  misc_RNA (1)...(19): siRNA sense strand
caagaggugguggaacuuu

SEQ ID NO: 1619355 - RNA, 19 nt, Homo sapiens
  misc_RNA (1)...(19): siRNA sense strand
cagacuggcugggaacuuc

SEQ ID NO: 1619356 - RNA, 19 nt, Homo sapiens
  misc_RNA (1)...(19): siRNA sense strand
gauauuacagauugcuaug

SEQ ID NO: 1619357 - RNA, 19 nt, Homo sapiens
  misc_RNA (1)...(19): siRNA sense strand
gcagcacaguauggucauu

SEQ ID NO: 1619358 - RNA, 19 nt, Homo sapiens
  misc_RNA (1)...(19): siRNA sense strand
ucagcaagucaucacaaua

SEQ ID NO: 1619359 - RNA, 19 nt, Homo sapiens
  misc_RNA (1)...(19): siRNA sense strand
caaauggagcucccuuuac

SEQ ID NO: 1619360 - RNA, 19 nt, Homo sapiens
  misc_RNA (1)...(19): siRNA sense strand
uucagaaacuccaguagug

SEQ ID NO: 1619361 - RNA, 19 nt, Homo sapiens
  misc_RNA (1)...(19): siRNA sense strand
cagaacacaaucaucaaga

SEQ ID NO: 1619362 - RNA, 19 nt, Homo sapiens
  misc_RNA (1)...(19): siRNA sense strand
ccagcuaagagacaaugua

SEQ ID NO: 1619363 - RNA, 19 nt, Homo sapiens
  misc_RNA (1)...(19): siRNA sense strand
uuggaaauuugcacucuau

SEQ ID NO: 1619364 - RNA, 19 nt, Homo sapiens
  misc_RNA (1)...(19): siRNA sense strand
caacaccacaguuuaucau

SEQ ID NO: 1619365 - RNA, 19 nt, Homo sapiens
  misc_RNA (1)...(19): siRNA sense strand
gagauauuacagauugcua

SEQ ID NO: 1619366 - RNA, 19 nt, Homo sapiens
  misc_RNA (1)...(19): siRNA sense strand
gguggaacuuuuaaucaaa

SEQ ID NO: 1619367 - RNA, 19 nt, Homo sapiens
  misc_RNA (1)...(19): siRNA sense strand
gggaacuucuccacuucau

SEQ ID NO: 1619368 - RNA, 19 nt, Homo sapiens
  misc_RNA (1)...(19): siRNA sense strand
gauggacaacaaguauuaa

SEQ ID NO: 1619369 - RNA, 19 nt, Homo sapiens
  misc_RNA (1)...(19): siRNA sense strand
uaucugcuguucaguuugg

SEQ ID NO: 1619370 - RNA, 19 nt, Homo sapiens
  misc_RNA (1)...(19): siRNA sense strand
cagagaguccugacacugu

SEQ ID NO: 1619371 - RNA, 19 nt, Homo sapiens
  misc_RNA (1)...(19): siRNA sense strand
uauuacagauugcuaugca

SEQ ID NO: 1619372 - RNA, 19 nt, Homo sapiens
  misc_RNA (1)...(19): siRNA sense strand
acacacgcaaaguaaauuu

SEQ ID NO: 1619373 - RNA, 19 nt, Homo sapiens
  misc_RNA (1)...(19): siRNA sense strand
gaaacuguuauaagugaag

SEQ ID NO: 1619374 - RNA, 19 nt, Homo sapiens
  misc_RNA (1)...(19): siRNA sense strand
ccgaacaccauuacauaug

SEQ ID NO: 1619375 - RNA, 19 nt, Homo sapiens
  misc_RNA (1)...(19): siRNA sense strand
gucagcaagucaucacaau

SEQ ID NO: 1619376 - RNA, 19 nt, Homo sapiens
  misc_RNA (1)...(19): siRNA sense strand
cacaguauggucauuauuc

SEQ ID NO: 1619377 - RNA, 19 nt, Homo sapiens
  misc_RNA (1)...(19): siRNA sense strand
uuuggaaacucuucuacau

SEQ ID NO: 1619378 - RNA, 19 nt, Homo sapiens
  misc_RNA (1)...(19): siRNA sense strand
gacaauggaaaugaagauu

SEQ ID NO: 1619379 - RNA, 19 nt, Homo sapiens
  misc_RNA (1)...(19): siRNA sense strand
gaaccaaaucaacacaaac

SEQ ID NO: 1619380 - RNA, 19 nt, Homo sapiens
  misc_RNA (1)...(19): siRNA sense strand
ucaucuagcagcacaguau

SEQ ID NO: 1619381 - RNA, 19 nt, Homo sapiens
  misc_RNA (1)...(19): siRNA sense strand
gcagagauauuacagauug

SEQ ID NO: 1619382 - RNA, 19 nt, Homo sapiens
  misc_RNA (1)...(19): siRNA sense strand
gguggaaucugcagaaaua

SEQ ID NO: 1619383 - RNA, 19 nt, Homo sapiens
  misc_RNA (1)...(19): siRNA sense strand
caacagacauugcugaaga

SEQ ID NO: 1619384 - RNA, 19 nt, Homo sapiens
  misc_RNA (1)...(19): siRNA sense strand
gagacaauguaucgaaaua

SEQ ID NO: 1619385 - RNA, 19 nt, Homo sapiens
  misc_RNA (1)...(19): siRNA sense strand
caaaggacauguuaaagau

SEQ ID NO: 1619386 - RNA, 19 nt, Homo sapiens
  misc_RNA (1)...(19): siRNA sense strand
gcaaauggagcucccuuua

SEQ ID NO: 1619387 - RNA, 19 nt, Homo sapiens
  misc_RNA (1)...(19): siRNA sense strand
caaauauggugcugaugua

SEQ ID NO: 1619388 - RNA, 19 nt, Homo sapiens
  misc_RNA (1)...(19): siRNA sense strand
gcaaaggacauguuaaaga

SEQ ID NO: 1619389 - RNA, 19 nt, Homo sapiens
  misc_RNA (1)...(19): siRNA sense strand
caagucaucacaauaguua

SEQ ID NO: 1619390 - RNA, 19 nt, Homo sapiens
  misc_RNA (1)...(19): siRNA sense strand
caacaaguauuaacaguac

SEQ ID NO: 1619391 - RNA, 19 nt, Homo sapiens
  misc_RNA (1)...(19): siRNA sense strand
gaugacagcucuccauugg

SEQ ID NO: 1619392 - RNA, 19 nt, Homo sapiens
  misc_RNA (1)...(19): siRNA sense strand
gacaauacaugcugcaaca

SEQ ID NO: 1619393 - RNA, 19 nt, Homo sapiens
  misc_RNA (1)...(19): siRNA sense strand
gaugaugaaguucguauuu

SEQ ID NO: 1619394 - RNA, 19 nt, Homo sapiens
  misc_RNA (1)...(19): siRNA sense strand
gaagaaacuguuauaagug

SEQ ID NO: 1619395 - RNA, 19 nt, Homo sapiens
  misc_RNA (1)...(19): siRNA sense strand
gaccgaacaccauuacaua

SEQ ID NO: 1619396 - RNA, 19 nt, Homo sapiens
  misc_RNA (1)...(19): siRNA sense strand
ccacagaacacaaucauca

SEQ ID NO: 1619397 - RNA, 19 nt, Homo sapiens
  misc_RNA (1)...(19): siRNA sense strand
gcauggugcugaugucaau

SEQ ID NO: 1619398 - RNA, 19 nt, Homo sapiens
  misc_RNA (1)...(19): siRNA sense strand
gcugggaacuucuccacuu

SEQ ID NO: 1619399 - RNA, 19 nt, Homo sapiens
  misc_RNA (1)...(19): siRNA sense strand
gauguacacacgcaaagua

SEQ ID NO: 1619400 - RNA, 19 nt, Homo sapiens
  misc_RNA (1)...(19): siRNA sense strand
gugcugaugucaaugcaaa

SEQ ID NO: 1619401 - RNA, 19 nt, Homo sapiens
  misc_RNA (1)...(19): siRNA sense strand
uagcagagauauuacagau

SEQ ID NO: 1619402 - RNA, 19 nt, Homo sapiens
  misc_RNA (1)...(19): siRNA sense strand
uggaaacucuucuacauca

SEQ ID NO: 1619403 - RNA, 19 nt, Homo sapiens
  misc_RNA (1)...(19): siRNA sense strand
ggaaucugcagaaauagaa

SEQ ID NO: 1619404 - RNA, 19 nt, Homo sapiens
  misc_RNA (1)...(19): siRNA sense strand
gaagaaccaccagcuaaga

SEQ ID NO: 1619405 - RNA, 19 nt, Homo sapiens
  misc_RNA (1)...(19): siRNA sense strand
gaacuucuccacuucaucu

SEQ ID NO: 1619406 - RNA, 19 nt, Homo sapiens
  misc_RNA (1)...(19): siRNA sense strand
agacauugcugaagaaacu

SEQ ID NO: 1619407 - RNA, 19 nt, Homo sapiens
  misc_RNA (1)...(19): siRNA sense strand
aaggacauguuaaagauga

SEQ ID NO: 1619408 - RNA, 19 nt, Homo sapiens
  misc_RNA (1)...(19): siRNA sense strand
gugaagaaccaccagcuaa

SEQ ID NO: 1619409 - RNA, 19 nt, Homo sapiens
  misc_RNA (1)...(19): siRNA sense strand
gagcaggucaagaugauga

SEQ ID NO: 1619410 - RNA, 19 nt, Homo sapiens
  misc_RNA (1)...(19): siRNA sense strand
ggaaauuugcacucuauuc

SEQ ID NO: 1619411 - RNA, 19 nt, Homo sapiens
  misc_RNA (1)...(19): siRNA sense strand
aaacucuucuacaucagua

SEQ ID NO: 1619412 - RNA, 19 nt, Homo sapiens
  misc_RNA (1)...(19): siRNA sense strand
caaugcaaaggacauguua

SEQ ID NO: 1619413 - RNA, 19 nt, Homo sapiens
  misc_RNA (1)...(19): siRNA sense strand
uaagagacaauguaucgaa

SEQ ID NO: 1619414 - RNA, 19 nt, Homo sapiens
  misc_RNA (1)...(19): siRNA sense strand
ggucagcccaucauuguga

SEQ ID NO: 1619415 - RNA, 19 nt, Homo sapiens
  misc_RNA (1)...(19): siRNA sense strand
agaaccaaaucaacacaaa

SEQ ID NO: 1619416 - RNA, 19 nt, Homo sapiens
  misc_RNA (1)...(19): siRNA sense strand
uguaucugcuguucaguuu

SEQ ID NO: 1619417 - RNA, 19 nt, Homo sapiens
  misc_RNA (1)...(19): siRNA sense strand
gacaacaaguauuaacagu

SEQ ID NO: 1619418 - RNA, 19 nt, Homo sapiens
  misc_RNA (1)...(19): siRNA sense strand
guacacacgcaaaguaaau

SEQ ID NO: 1619419 - RNA, 19 nt, Homo sapiens
  misc_RNA (1)...(19): siRNA sense strand
aaauggagcucccuuuacu

SEQ ID NO: 1619420 - RNA, 19 nt, Homo sapiens
  misc_RNA (1)...(19): siRNA sense strand
agauggacaacaaguauua

SEQ ID NO: 1619421 - RNA, 19 nt, Homo sapiens
  misc_RNA (1)...(19): siRNA sense strand
acaccacaguuuaucauug

SEQ ID NO: 1619422 - RNA, 19 nt, Homo sapiens
  misc_RNA (1)...(19): siRNA sense strand
caauagacaauggaaauga

SEQ ID NO: 1619423 - RNA, 19 nt, Homo sapiens
  misc_RNA (1)...(19): siRNA sense strand
gcaagucaucacaauaguu

SEQ ID NO: 1619424 - RNA, 19 nt, Homo sapiens
  misc_RNA (1)...(19): siRNA sense strand
ggagcucccuuuacuacag

SEQ ID NO: 1619425 - RNA, 19 nt, Homo sapiens
  misc_RNA (1)...(19): siRNA sense strand
cacaauaguuacagaugga

SEQ ID NO: 1619426 - RNA, 19 nt, Homo sapiens
  misc_RNA (1)...(19): siRNA sense strand
ggaccgaacaccauuacau

SEQ ID NO: 1619427 - RNA, 19 nt, Homo sapiens
  misc_RNA (1)...(19): siRNA sense strand
aagagacaauguaucgaaa

SEQ ID NO: 1619428 - RNA, 19 nt, Homo sapiens
  misc_RNA (1)...(19): siRNA sense strand
gagcucccuuuacuacaga

SEQ ID NO: 1619429 - RNA, 19 nt, Homo sapiens
  misc_RNA (1)...(19): siRNA sense strand
cagcaagucaucacaauag

SEQ ID NO: 1619430 - RNA, 19 nt, Homo sapiens
  misc_RNA (1)...(19): siRNA sense strand
gcugcaacaccacaguuua

SEQ ID NO: 1619431 - RNA, 19 nt, Homo sapiens
  misc_RNA (1)...(19): siRNA sense strand
caacacaaacccagagagu

SEQ ID NO: 1619432 - RNA, 19 nt, Homo sapiens
  misc_RNA (1)...(19): siRNA sense strand
ucaaauauggugcugaugu

SEQ ID NO: 1619433 - RNA, 19 nt, Homo sapiens
  misc_RNA (1)...(19): siRNA sense strand
gcacaguauggucauuauu

SEQ ID NO: 1619434 - RNA, 19 nt, Homo sapiens
  misc_RNA (1)...(19): siRNA sense strand
gcuaagagacaauguaucg

SEQ ID NO: 1619435 - RNA, 19 nt, Homo sapiens
  misc_RNA (1)...(19): siRNA sense strand
ccagauggacaacaaguau

SEQ ID NO: 1619436 - RNA, 19 nt, Homo sapiens
  misc_RNA (1)...(19): siRNA sense strand
gagcuggugugagcagaga

SEQ ID NO: 1619437 - RNA, 19 nt, Homo sapiens
  misc_RNA (1)...(19): siRNA sense strand
ggacaacaaguauuaacag

SEQ ID NO: 1619438 - RNA, 19 nt, Homo sapiens
  misc_RNA (1)...(19): siRNA sense strand
gcaacaccacaguuuauca

SEQ ID NO: 1619439 - RNA, 19 nt, Homo sapiens
  misc_RNA (1)...(19): siRNA sense strand
gcugaagaaacuguuauaa

SEQ ID NO: 1619440 - RNA, 19 nt, Homo sapiens
  misc_RNA (1)...(19): siRNA sense strand
gcagagaugccagaaccaa

SEQ ID NO: 1619441 - RNA, 19 nt, Homo sapiens
  misc_RNA (1)...(19): siRNA sense strand
uaacaguaccagcaacaga

SEQ ID NO: 1619442 - RNA, 19 nt, Homo sapiens
  misc_RNA (1)...(19): siRNA sense strand
cagcacaguauggucauua

SEQ ID NO: 1619443 - RNA, 19 nt, Homo sapiens
  misc_RNA (1)...(19): siRNA sense strand
gaaauuugcacucuauucc

SEQ ID NO: 1619444 - RNA, 19 nt, Homo sapiens
  misc_RNA (1)...(19): siRNA sense strand
ugccuuagcugaagcaucu

SEQ ID NO: 1619445 - RNA, 19 nt, Homo sapiens
  misc_RNA (1)...(19): siRNA sense strand
gcacgagcaggucaagaug

SEQ ID NO: 1619446 - RNA, 19 nt, Homo sapiens
  misc_RNA (1)...(19): siRNA sense strand
ggaauuggucagcccauca

SEQ ID NO: 1619447 - RNA, 19 nt, Homo sapiens
  misc_RNA (1)...(19): siRNA sense strand
ggccacagaagaaguaguu

SEQ ID NO: 1619448 - RNA, 19 nt, Homo sapiens
  misc_RNA (1)...(19): siRNA sense strand
caucaguauuagcuacauu

SEQ ID NO: 1619449 - RNA, 19 nt, Homo sapiens
  misc_RNA (1)...(19): siRNA sense strand
gaagauuuagcagagauau

SEQ ID NO: 1619450 - RNA, 19 nt, Homo sapiens
  misc_RNA (1)...(19): siRNA sense strand
caccacaguuuaucauugg

SEQ ID NO: 1619451 - RNA, 19 nt, Homo sapiens
  misc_RNA (1)...(19): siRNA sense strand
cagcuaagagacaauguau

SEQ ID NO: 1619452 - RNA, 19 nt, Homo sapiens
  misc_RNA (1)...(19): siRNA sense strand
caugccagauggacaacaa

SEQ ID NO: 1619453 - RNA, 19 nt, Homo sapiens
  misc_RNA (1)...(19): siRNA sense strand
gaaacucuucuacaucagu

SEQ ID NO: 1619454 - RNA, 19 nt, Homo sapiens
  misc_RNA (1)...(19): siRNA sense strand
caagaggugguggaacuuu

SEQ ID NO: 1619455 - RNA, 19 nt, Homo sapiens
  misc_RNA (1)...(19): siRNA sense strand
cagacuggcugggaacuuc

SEQ ID NO: 1619456 - RNA, 19 nt, Homo sapiens
  misc_RNA (1)...(19): siRNA sense strand
gauauuacagauugcuaug

SEQ ID NO: 1619457 - RNA, 19 nt, Homo sapiens
  misc_RNA (1)...(19): siRNA sense strand
gcagcacaguauggucauu

SEQ ID NO: 1619458 - RNA, 19 nt, Homo sapiens
  misc_RNA (1)...(19): siRNA sense strand
ucagcaagucaucacaaua

SEQ ID NO: 1619459 - RNA, 19 nt, Homo sapiens
  misc_RNA (1)...(19): siRNA sense strand
caaauggagcucccuuuac

SEQ ID NO: 1619460 - RNA, 19 nt, Homo sapiens
  misc_RNA (1)...(19): siRNA sense strand
uucagaaacuccaguagug

SEQ ID NO: 1619461 - RNA, 19 nt, Homo sapiens
  misc_RNA (1)...(19): siRNA sense strand
cagaacacaaucaucaaga

SEQ ID NO: 1619462 - RNA, 19 nt, Homo sapiens
  misc_RNA (1)...(19): siRNA sense strand
ccagcuaagagacaaugua

SEQ ID NO: 1619463 - RNA, 19 nt, Homo sapiens
  misc_RNA (1)...(19): siRNA sense strand
uuggaaauuugcacucuau

SEQ ID NO: 1619464 - RNA, 19 nt, Homo sapiens
  misc_RNA (1)...(19): siRNA sense strand
caacaccacaguuuaucau

SEQ ID NO: 1619465 - RNA, 19 nt, Homo sapiens
  misc_RNA (1)...(19): siRNA sense strand
gagauauuacagauugcua

SEQ ID NO: 1619466 - RNA, 19 nt, Homo sapiens
  misc_RNA (1)...(19): siRNA sense strand
gguggaacuuuuaaucaaa

SEQ ID NO: 1619467 - RNA, 19 nt, Homo sapiens
  misc_RNA (1)...(19): siRNA sense strand
gggaacuucuccacuucau

SEQ ID NO: 1619468 - RNA, 19 nt, Homo sapiens
  misc_RNA (1)...(19): siRNA sense strand
gauggacaacaaguauuaa

SEQ ID NO: 1619469 - RNA, 19 nt, Homo sapiens
  misc_RNA (1)...(19): siRNA sense strand
uaucugcuguucaguuugg

SEQ ID NO: 1619470 - RNA, 19 nt, Homo sapiens
  misc_RNA (1)...(19): siRNA sense strand
cagagaguccugacacugu

SEQ ID NO: 1619471 - RNA, 19 nt, Homo sapiens
  misc_RNA (1)...(19): siRNA sense strand
uauuacagauugcuaugca

SEQ ID NO: 1619472 - RNA, 19 nt, Homo sapiens
  misc_RNA (1)...(19): siRNA sense strand
acacacgcaaaguaaauuu

SEQ ID NO: 1619473 - RNA, 19 nt, Homo sapiens
  misc_RNA (1)...(19): siRNA sense strand
gaaacuguuauaagugaag

SEQ ID NO: 1619474 - RNA, 19 nt, Homo sapiens
  misc_RNA (1)...(19): siRNA sense strand
ccgaacaccauuacauaug

SEQ ID NO: 1619475 - RNA, 19 nt, Homo sapiens
  misc_RNA (1)...(19): siRNA sense strand
gucagcaagucaucacaau

SEQ ID NO: 1619476 - RNA, 19 nt, Homo sapiens
  misc_RNA (1)...(19): siRNA sense strand
cacaguauggucauuauuc

SEQ ID NO: 1619477 - RNA, 19 nt, Homo sapiens
  misc_RNA (1)...(19): siRNA sense strand
uuuggaaacucuucuacau

SEQ ID NO: 1619478 - RNA, 19 nt, Homo sapiens
  misc_RNA (1)...(19): siRNA sense strand
gacaauggaaaugaagauu

SEQ ID NO: 1619479 - RNA, 19 nt, Homo sapiens
  misc_RNA (1)...(19): siRNA sense strand
gaaccaaaucaacacaaac

SEQ ID NO: 1619480 - RNA, 19 nt, Homo sapiens
  misc_RNA (1)...(19): siRNA sense strand
ucaucuagcagcacaguau

SEQ ID NO: 1619481 - RNA, 19 nt, Homo sapiens
  misc_RNA (1)...(19): siRNA sense strand
gcagagauauuacagauug

SEQ ID NO: 1619482 - RNA, 19 nt, Homo sapiens
  misc_RNA (1)...(19): siRNA sense strand
gguggaaucugcagaaaua

SEQ ID NO: 1619483 - RNA, 19 nt, Homo sapiens
  misc_RNA (1)...(19): siRNA sense strand
caacagacauugcugaaga

SEQ ID NO: 1619484 - RNA, 19 nt, Homo sapiens
  misc_RNA (1)...(19): siRNA sense strand
gagacaauguaucgaaaua

SEQ ID NO: 1619485 - RNA, 19 nt, Homo sapiens
  misc_RNA (1)...(19): siRNA sense strand
caaaggacauguuaaagau

SEQ ID NO: 1619486 - RNA, 19 nt, Homo sapiens
  misc_RNA (1)...(19): siRNA sense strand
gcaaauggagcucccuuua

SEQ ID NO: 1619487 - RNA, 19 nt, Homo sapiens
  misc_RNA (1)...(19): siRNA sense strand
caaauauggugcugaugua

SEQ ID NO: 1619488 - RNA, 19 nt, Homo sapiens
  misc_RNA (1)...(19): siRNA sense strand
gcaaaggacauguuaaaga

SEQ ID NO: 1619489 - RNA, 19 nt, Homo sapiens
  misc_RNA (1)...(19): siRNA sense strand
caagucaucacaauaguua

SEQ ID NO: 1619490 - RNA, 19 nt, Homo sapiens
  misc_RNA (1)...(19): siRNA sense strand
caacaaguauuaacaguac

SEQ ID NO: 1619491 - RNA, 19 nt, Homo sapiens
  misc_RNA (1)...(19): siRNA sense strand
gaugacagcucuccauugg

SEQ ID NO: 1619492 - RNA, 19 nt, Homo sapiens
  misc_RNA (1)...(19): siRNA sense strand
gacaauacaugcugcaaca

SEQ ID NO: 1619493 - RNA, 19 nt, Homo sapiens
  misc_RNA (1)...(19): siRNA sense strand
gaugaugaaguucguauuu

SEQ ID NO: 1619494 - RNA, 19 nt, Homo sapiens
  misc_RNA (1)...(19): siRNA sense strand
gaagaaacuguuauaagug

SEQ ID NO: 1619495 - RNA, 19 nt, Homo sapiens
  misc_RNA (1)...(19): siRNA sense strand
gaccgaacaccauuacaua

SEQ ID NO: 1619496 - RNA, 19 nt, Homo sapiens
  misc_RNA (1)...(19): siRNA sense strand
ccacagaacacaaucauca

SEQ ID NO: 1619497 - RNA, 19 nt, Homo sapiens
  misc_RNA (1)...(19): siRNA sense strand
gcauggugcugaugucaau

SEQ ID NO: 1619498 - RNA, 19 nt, Homo sapiens
  misc_RNA (1)...(19): siRNA sense strand
gcugggaacuucuccacuu

SEQ ID NO: 1619499 - RNA, 19 nt, Homo sapiens
  misc_RNA (1)...(19): siRNA sense strand
gauguacacacgcaaagua

SEQ ID NO: 1619500 - RNA, 19 nt, Homo sapiens
  misc_RNA (1)...(19): siRNA sense strand
gugcugaugucaaugcaaa

SEQ ID NO: 1619501 - RNA, 19 nt, Homo sapiens
  misc_RNA (1)...(19): siRNA sense strand
uagcagagauauuacagau

SEQ ID NO: 1619502 - RNA, 19 nt, Homo sapiens
  misc_RNA (1)...(19): siRNA sense strand
uggaaacucuucuacauca

SEQ ID NO: 1619503 - RNA, 19 nt, Homo sapiens
  misc_RNA (1)...(19): siRNA sense strand
ggaaucugcagaaauagaa

SEQ ID NO: 1619504 - RNA, 19 nt, Homo sapiens
  misc_RNA (1)...(19): siRNA sense strand
gaagaaccaccagcuaaga

SEQ ID NO: 1619505 - RNA, 19 nt, Homo sapiens
  misc_RNA (1)...(19): siRNA sense strand
gaacuucuccacuucaucu

SEQ ID NO: 1619506 - RNA, 19 nt, Homo sapiens
  misc_RNA (1)...(19): siRNA sense strand
agacauugcugaagaaacu

SEQ ID NO: 1619507 - RNA, 19 nt, Homo sapiens
  misc_RNA (1)...(19): siRNA sense strand
aaggacauguuaaagauga

SEQ ID NO: 1619508 - RNA, 19 nt, Homo sapiens
  misc_RNA (1)...(19): siRNA sense strand
gugaagaaccaccagcuaa

SEQ ID NO: 1619509 - RNA, 19 nt, Homo sapiens
  misc_RNA (1)...(19): siRNA sense strand
gagcaggucaagaugauga

SEQ ID NO: 1619510 - RNA, 19 nt, Homo sapiens
  misc_RNA (1)...(19): siRNA sense strand
ggaaauuugcacucuauuc

SEQ ID NO: 1619511 - RNA, 19 nt, Homo sapiens
  misc_RNA (1)...(19): siRNA sense strand
aaacucuucuacaucagua

SEQ ID NO: 1619512 - RNA, 19 nt, Homo sapiens
  misc_RNA (1)...(19): siRNA sense strand
caaugcaaaggacauguua

SEQ ID NO: 1619513 - RNA, 19 nt, Homo sapiens
  misc_RNA (1)...(19): siRNA sense strand
uaagagacaauguaucgaa

SEQ ID NO: 1619514 - RNA, 19 nt, Homo sapiens
  misc_RNA (1)...(19): siRNA sense strand
ggucagcccaucauuguga

SEQ ID NO: 1619515 - RNA, 19 nt, Homo sapiens
  misc_RNA (1)...(19): siRNA sense strand
agaaccaaaucaacacaaa

SEQ ID NO: 1619516 - RNA, 19 nt, Homo sapiens
  misc_RNA (1)...(19): siRNA sense strand
uguaucugcuguucaguuu

SEQ ID NO: 1619517 - RNA, 19 nt, Homo sapiens
  misc_RNA (1)...(19): siRNA sense strand
gacaacaaguauuaacagu

SEQ ID NO: 1619518 - RNA, 19 nt, Homo sapiens
  misc_RNA (1)...(19): siRNA sense strand
guacacacgcaaaguaaau

SEQ ID NO: 1619519 - RNA, 19 nt, Homo sapiens
  misc_RNA (1)...(19): siRNA sense strand
aaauggagcucccuuuacu

SEQ ID NO: 1619520 - RNA, 19 nt, Homo sapiens
  misc_RNA (1)...(19): siRNA sense strand
agauggacaacaaguauua

SEQ ID NO: 1619521 - RNA, 19 nt, Homo sapiens
  misc_RNA (1)...(19): siRNA sense strand
acaccacaguuuaucauug

SEQ ID NO: 1619522 - RNA, 19 nt, Homo sapiens
  misc_RNA (1)...(19): siRNA sense strand
caauagacaauggaaauga

SEQ ID NO: 1619523 - RNA, 19 nt, Homo sapiens
  misc_RNA (1)...(19): siRNA sense strand
gcaagucaucacaauaguu

SEQ ID NO: 1619524 - RNA, 19 nt, Homo sapiens
  misc_RNA (1)...(19): siRNA sense strand
ggagcucccuuuacuacag

SEQ ID NO: 1619525 - RNA, 19 nt, Homo sapiens
  misc_RNA (1)...(19): siRNA sense strand
cacaauaguuacagaugga

SEQ ID NO: 1619526 - RNA, 19 nt, Homo sapiens
  misc_RNA (1)...(19): siRNA sense strand
ggaccgaacaccauuacau

SEQ ID NO: 1619527 - RNA, 19 nt, Homo sapiens
  misc_RNA (1)...(19): siRNA sense strand
aagagacaauguaucgaaa

SEQ ID NO: 1619528 - RNA, 19 nt, Homo sapiens
  misc_RNA (1)...(19): siRNA sense strand
gagcucccuuuacuacaga

SEQ ID NO: 1619529 - RNA, 19 nt, Homo sapiens
  misc_RNA (1)...(19): siRNA sense strand
cagcaagucaucacaauag

SEQ ID NO: 1619530 - RNA, 19 nt, Homo sapiens
  misc_RNA (1)...(19): siRNA sense strand
gcugcaacaccacaguuua

SEQ ID NO: 1619531 - RNA, 19 nt, Homo sapiens
  misc_RNA (1)...(19): siRNA sense strand
caacacaaacccagagagu

SEQ ID NO: 1619532 - RNA, 19 nt, Homo sapiens
  misc_RNA (1)...(19): siRNA sense strand
ucaaauauggugcugaugu

SEQ ID NO: 1619533 - RNA, 19 nt, Homo sapiens
  misc_RNA (1)...(19): siRNA sense strand
gcacaguauggucauuauu

SEQ ID NO: 1619534 - RNA, 19 nt, Homo sapiens
  misc_RNA (1)...(19): siRNA sense strand
gcuaagagacaauguaucg

SEQ ID NO: 1619535 - RNA, 19 nt, Homo sapiens
  misc_RNA (1)...(19): siRNA sense strand
ccagauggacaacaaguau

SEQ ID NO: 1619536 - RNA, 19 nt, Homo sapiens
  misc_RNA (1)...(19): siRNA sense strand
gagcuggugugagcagaga

SEQ ID NO: 1619537 - RNA, 19 nt, Homo sapiens
  misc_RNA (1)...(19): siRNA sense strand
ggacaacaaguauuaacag

SEQ ID NO: 1619538 - RNA, 19 nt, Homo sapiens
  misc_RNA (1)...(19): siRNA sense strand
gcaacaccacaguuuauca

SEQ ID NO: 1619539 - RNA, 19 nt, Homo sapiens
  misc_RNA (1)...(19): siRNA sense strand
gcugaagaaacuguuauaa

SEQ ID NO: 1619540 - RNA, 19 nt, Homo sapiens
  misc_RNA (1)...(19): siRNA sense strand
gcagagaugccagaaccaa

SEQ ID NO: 1619541 - RNA, 19 nt, Homo sapiens
  misc_RNA (1)...(19): siRNA sense strand
uaacaguaccagcaacaga

SEQ ID NO: 1619542 - RNA, 19 nt, Homo sapiens
  misc_RNA (1)...(19): siRNA sense strand
cagcacaguauggucauua

SEQ ID NO: 1619543 - RNA, 19 nt, Homo sapiens
  misc_RNA (1)...(19): siRNA sense strand
gaaauuugcacucuauucc

SEQ ID NO: 1619544 - RNA, 19 nt, Homo sapiens
  misc_RNA (1)...(19): siRNA sense strand
ugccuuagcugaagcaucu

SEQ ID NO: 1619545 - RNA, 19 nt, Homo sapiens
  misc_RNA (1)...(19): siRNA sense strand
gcacgagcaggucaagaug

SEQ ID NO: 1619546 - RNA, 19 nt, Homo sapiens
  misc_RNA (1)...(19): siRNA sense strand
ggaauuggucagcccauca

SEQ ID NO: 1619547 - RNA, 19 nt, Homo sapiens
  misc_RNA (1)...(19): siRNA sense strand
ggccacagaagaaguaguu

SEQ ID NO: 1619548 - RNA, 19 nt, Homo sapiens
  misc_RNA (1)...(19): siRNA sense strand
caucaguauuagcuacauu

SEQ ID NO: 1619549 - RNA, 19 nt, Homo sapiens
  misc_RNA (1)...(19): siRNA sense strand
gaagauuuagcagagauau

SEQ ID NO: 1619550 - RNA, 19 nt, Homo sapiens
  misc_RNA (1)...(19): siRNA sense strand
caccacaguuuaucauugg

SEQ ID NO: 1619551 - RNA, 19 nt, Homo sapiens
  misc_RNA (1)...(19): siRNA sense strand
cagcuaagagacaauguau

SEQ ID NO: 1619552 - RNA, 19 nt, Homo sapiens
  misc_RNA (1)...(19): siRNA sense strand
caugccagauggacaacaa

SEQ ID NO: 1619553 - RNA, 19 nt, Homo sapiens
  misc_RNA (1)...(19): siRNA sense strand
gaaacucuucuacaucagu

SEQ ID NO: 1619554 - RNA, 19 nt, Homo sapiens
  misc_RNA (1)...(19): siRNA sense strand
caagaggugguggaacuuu

SEQ ID NO: 1619555 - RNA, 19 nt, Homo sapiens
  misc_RNA (1)...(19): siRNA sense strand
cagacuggcugggaacuuc

SEQ ID NO: 1619556 - RNA, 19 nt, Homo sapiens
  misc_RNA (1)...(19): siRNA sense strand
gauauuacagauugcuaug

SEQ ID NO: 1619557 - RNA, 19 nt, Homo sapiens
  misc_RNA (1)...(19): siRNA sense strand
gcagcacaguauggucauu

SEQ ID NO: 1619558 - RNA, 19 nt, Homo sapiens
  misc_RNA (1)...(19): siRNA sense strand
ucagcaagucaucacaaua

SEQ ID NO: 1619559 - RNA, 19 nt, Homo sapiens
  misc_RNA (1)...(19): siRNA sense strand
caaauggagcucccuuuac

SEQ ID NO: 1619560 - RNA, 19 nt, Homo sapiens
  misc_RNA (1)...(19): siRNA sense strand
uucagaaacuccaguagug

SEQ ID NO: 1619561 - RNA, 19 nt, Homo sapiens
  misc_RNA (1)...(19): siRNA sense strand
cagaacacaaucaucaaga

SEQ ID NO: 1619562 - RNA, 19 nt, Homo sapiens
  misc_RNA (1)...(19): siRNA sense strand
ccagcuaagagacaaugua

SEQ ID NO: 1619563 - RNA, 19 nt, Homo sapiens
  misc_RNA (1)...(19): siRNA sense strand
uuggaaauuugcacucuau

SEQ ID NO: 1619564 - RNA, 19 nt, Homo sapiens
  misc_RNA (1)...(19): siRNA sense strand
caacaccacaguuuaucau

SEQ ID NO: 1619565 - RNA, 19 nt, Homo sapiens
  misc_RNA (1)...(19): siRNA sense strand
gagauauuacagauugcua

SEQ ID NO: 1619566 - RNA, 19 nt, Homo sapiens
  misc_RNA (1)...(19): siRNA sense strand
gguggaacuuuuaaucaaa

SEQ ID NO: 1619567 - RNA, 19 nt, Homo sapiens
  misc_RNA (1)...(19): siRNA sense strand
gggaacuucuccacuucau

SEQ ID NO: 1619568 - RNA, 19 nt, Homo sapiens
  misc_RNA (1)...(19): siRNA sense strand
gauggacaacaaguauuaa

SEQ ID NO: 1619569 - RNA, 19 nt, Homo sapiens
  misc_RNA (1)...(19): siRNA sense strand
uaucugcuguucaguuugg

SEQ ID NO: 1619570 - RNA, 19 nt, Homo sapiens
  misc_RNA (1)...(19): siRNA sense strand
cagagaguccugacacugu

SEQ ID NO: 1619571 - RNA, 19 nt, Homo sapiens
  misc_RNA (1)...(19): siRNA sense strand
uauuacagauugcuaugca

SEQ ID NO: 1619572 - RNA, 19 nt, Homo sapiens
  misc_RNA (1)...(19): siRNA sense strand
acacacgcaaaguaaauuu

SEQ ID NO: 1619573 - RNA, 19 nt, Homo sapiens
  misc_RNA (1)...(19): siRNA sense strand
gaaacuguuauaagugaag

SEQ ID NO: 1619574 - RNA, 19 nt, Homo sapiens
  misc_RNA (1)...(19): siRNA sense strand
ccgaacaccauuacauaug

SEQ ID NO: 1619575 - RNA, 19 nt, Homo sapiens
  misc_RNA (1)...(19): siRNA sense strand
gucagcaagucaucacaau

SEQ ID NO: 1619576 - RNA, 19 nt, Homo sapiens
  misc_RNA (1)...(19): siRNA sense strand
cacaguauggucauuauuc

SEQ ID NO: 1619577 - RNA, 19 nt, Homo sapiens
  misc_RNA (1)...(19): siRNA sense strand
uuuggaaacucuucuacau

SEQ ID NO: 1619578 - RNA, 19 nt, Homo sapiens
  misc_RNA (1)...(19): siRNA sense strand
gacaauggaaaugaagauu

SEQ ID NO: 1619579 - RNA, 19 nt, Homo sapiens
  misc_RNA (1)...(19): siRNA sense strand
gaaccaaaucaacacaaac

SEQ ID NO: 1619580 - RNA, 19 nt, Homo sapiens
  misc_RNA (1)...(19): siRNA sense strand
ucaucuagcagcacaguau

SEQ ID NO: 1619581 - RNA, 19 nt, Homo sapiens
  misc_RNA (1)...(19): siRNA sense strand
gcagagauauuacagauug

SEQ ID NO: 1619582 - RNA, 19 nt, Homo sapiens
  misc_RNA (1)...(19): siRNA sense strand
gguggaaucugcagaaaua

SEQ ID NO: 1619583 - RNA, 19 nt, Homo sapiens
  misc_RNA (1)...(19): siRNA sense strand
caacagacauugcugaaga

SEQ ID NO: 1619584 - RNA, 19 nt, Homo sapiens
  misc_RNA (1)...(19): siRNA sense strand
gagacaauguaucgaaaua

SEQ ID NO: 1619585 - RNA, 19 nt, Homo sapiens
  misc_RNA (1)...(19): siRNA sense strand
caaaggacauguuaaagau

SEQ ID NO: 1619586 - RNA, 19 nt, Homo sapiens
  misc_RNA (1)...(19): siRNA sense strand
gcaaauggagcucccuuua

SEQ ID NO: 1619587 - RNA, 19 nt, Homo sapiens
  misc_RNA (1)...(19): siRNA sense strand
caaauauggugcugaugua

SEQ ID NO: 1619588 - RNA, 19 nt, Homo sapiens
  misc_RNA (1)...(19): siRNA sense strand
gcaaaggacauguuaaaga

SEQ ID NO: 1619589 - RNA, 19 nt, Homo sapiens
  misc_RNA (1)...(19): siRNA sense strand
caagucaucacaauaguua

SEQ ID NO: 1619590 - RNA, 19 nt, Homo sapiens
  misc_RNA (1)...(19): siRNA sense strand
caacaaguauuaacaguac

SEQ ID NO: 1619591 - RNA, 19 nt, Homo sapiens
  misc_RNA (1)...(19): siRNA sense strand
gaugacagcucuccauugg

SEQ ID NO: 1619592 - RNA, 19 nt, Homo sapiens
  misc_RNA (1)...(19): siRNA sense strand
gacaauacaugcugcaaca

SEQ ID NO: 1619593 - RNA, 19 nt, Homo sapiens
  misc_RNA (1)...(19): siRNA sense strand
gaugaugaaguucguauuu

SEQ ID NO: 1619594 - RNA, 19 nt, Homo sapiens
  misc_RNA (1)...(19): siRNA sense strand
gaagaaacuguuauaagug

SEQ ID NO: 1619595 - RNA, 19 nt, Homo sapiens
  misc_RNA (1)...(19): siRNA sense strand
gaccgaacaccauuacaua

SEQ ID NO: 1619596 - RNA, 19 nt, Homo sapiens
  misc_RNA (1)...(19): siRNA sense strand
ccacagaacacaaucauca

SEQ ID NO: 1619597 - RNA, 19 nt, Homo sapiens
  misc_RNA (1)...(19): siRNA sense strand
gcauggugcugaugucaau

SEQ ID NO: 1619598 - RNA, 19 nt, Homo sapiens
  misc_RNA (1)...(19): siRNA sense strand
gcugggaacuucuccacuu

SEQ ID NO: 1619599 - RNA, 19 nt, Homo sapiens
  misc_RNA (1)...(19): siRNA sense strand
gauguacacacgcaaagua

SEQ ID NO: 1619600 - RNA, 19 nt, Homo sapiens
  misc_RNA (1)...(19): siRNA sense strand
gugcugaugucaaugcaaa

SEQ ID NO: 1619601 - RNA, 19 nt, Homo sapiens
  misc_RNA (1)...(19): siRNA sense strand
uagcagagauauuacagau

SEQ ID NO: 1619602 - RNA, 19 nt, Homo sapiens
  misc_RNA (1)...(19): siRNA sense strand
uggaaacucuucuacauca

SEQ ID NO: 1619603 - RNA, 19 nt, Homo sapiens
  misc_RNA (1)...(19): siRNA sense strand
ggaaucugcagaaauagaa

SEQ ID NO: 1619604 - RNA, 19 nt, Homo sapiens
  misc_RNA (1)...(19): siRNA sense strand
gaagaaccaccagcuaaga

SEQ ID NO: 1619605 - RNA, 19 nt, Homo sapiens
  misc_RNA (1)...(19): siRNA sense strand
gaacuucuccacuucaucu

SEQ ID NO: 1619606 - RNA, 19 nt, Homo sapiens
  misc_RNA (1)...(19): siRNA sense strand
agacauugcugaagaaacu

SEQ ID NO: 1619607 - RNA, 19 nt, Homo sapiens
  misc_RNA (1)...(19): siRNA sense strand
aaggacauguuaaagauga

SEQ ID NO: 1619608 - RNA, 19 nt, Homo sapiens
  misc_RNA (1)...(19): siRNA sense strand
gugaagaaccaccagcuaa

SEQ ID NO: 1619609 - RNA, 19 nt, Homo sapiens
  misc_RNA (1)...(19): siRNA sense strand
gagcaggucaagaugauga

SEQ ID NO: 1619610 - RNA, 19 nt, Homo sapiens
  misc_RNA (1)...(19): siRNA sense strand
ggaaauuugcacucuauuc

SEQ ID NO: 1619611 - RNA, 19 nt, Homo sapiens
  misc_RNA (1)...(19): siRNA sense strand
aaacucuucuacaucagua

SEQ ID NO: 1619612 - RNA, 19 nt, Homo sapiens
  misc_RNA (1)...(19): siRNA sense strand
caaugcaaaggacauguua

SEQ ID NO: 1619613 - RNA, 19 nt, Homo sapiens
  misc_RNA (1)...(19): siRNA sense strand
uaagagacaauguaucgaa

SEQ ID NO: 1619614 - RNA, 19 nt, Homo sapiens
  misc_RNA (1)...(19): siRNA sense strand
ggucagcccaucauuguga

SEQ ID NO: 1619615 - RNA, 19 nt, Homo sapiens
  misc_RNA (1)...(19): siRNA sense strand
agaaccaaaucaacacaaa

SEQ ID NO: 1619616 - RNA, 19 nt, Homo sapiens
  misc_RNA (1)...(19): siRNA sense strand
uguaucugcuguucaguuu

SEQ ID NO: 1619617 - RNA, 19 nt, Homo sapiens
  misc_RNA (1)...(19): siRNA sense strand
gacaacaaguauuaacagu

SEQ ID NO: 1619618 - RNA, 19 nt, Homo sapiens
  misc_RNA (1)...(19): siRNA sense strand
guacacacgcaaaguaaau

SEQ ID NO: 1619619 - RNA, 19 nt, Homo sapiens
  misc_RNA (1)...(19): siRNA sense strand
aaauggagcucccuuuacu

SEQ ID NO: 1619620 - RNA, 19 nt, Homo sapiens
  misc_RNA (1)...(19): siRNA sense strand
agauggacaacaaguauua

SEQ ID NO: 1619621 - RNA, 19 nt, Homo sapiens
  misc_RNA (1)...(19): siRNA sense strand
acaccacaguuuaucauug

SEQ ID NO: 1619622 - RNA, 19 nt, Homo sapiens
  misc_RNA (1)...(19): siRNA sense strand
caauagacaauggaaauga

SEQ ID NO: 1619623 - RNA, 19 nt, Homo sapiens
  misc_RNA (1)...(19): siRNA sense strand
gcaagucaucacaauaguu

SEQ ID NO: 1619624 - RNA, 19 nt, Homo sapiens
  misc_RNA (1)...(19): siRNA sense strand
ggagcucccuuuacuacag

SEQ ID NO: 1619625 - RNA, 19 nt, Homo sapiens
  misc_RNA (1)...(19): siRNA sense strand
cacaauaguuacagaugga

SEQ ID NO: 1619626 - RNA, 19 nt, Homo sapiens
  misc_RNA (1)...(19): siRNA sense strand
ggaccgaacaccauuacau

SEQ ID NO: 1619627 - RNA, 19 nt, Homo sapiens
  misc_RNA (1)...(19): siRNA sense strand
aagagacaauguaucgaaa

SEQ ID NO: 1619628 - RNA, 19 nt, Homo sapiens
  misc_RNA (1)...(19): siRNA sense strand
gagcucccuuuacuacaga

SEQ ID NO: 1619629 - RNA, 19 nt, Homo sapiens
  misc_RNA (1)...(19): siRNA sense strand
cagcaagucaucacaauag

SEQ ID NO: 1619630 - RNA, 19 nt, Homo sapiens
  misc_RNA (1)...(19): siRNA sense strand
gcugcaacaccacaguuua

SEQ ID NO: 1619631 - RNA, 19 nt, Homo sapiens
  misc_RNA (1)...(19): siRNA sense strand
caacacaaacccagagagu

SEQ ID NO: 1619632 - RNA, 19 nt, Homo sapiens
  misc_RNA (1)...(19): siRNA sense strand
ucaaauauggugcugaugu

SEQ ID NO: 1619633 - RNA, 19 nt, Homo sapiens
  misc_RNA (1)...(19): siRNA sense strand
gcacaguauggucauuauu

SEQ ID NO: 1619634 - RNA, 19 nt, Homo sapiens
  misc_RNA (1)...(19): siRNA sense strand
gcuaagagacaauguaucg

SEQ ID NO: 1619635 - RNA, 19 nt, Homo sapiens
  misc_RNA (1)...(19): siRNA sense strand
ccagauggacaacaaguau

SEQ ID NO: 1619636 - RNA, 19 nt, Homo sapiens
  misc_RNA (1)...(19): siRNA sense strand
gagcuggugugagcagaga

SEQ ID NO: 1619637 - RNA, 19 nt, Homo sapiens
  misc_RNA (1)...(19): siRNA sense strand
ggacaacaaguauuaacag

SEQ ID NO: 1619638 - RNA, 19 nt, Homo sapiens
  misc_RNA (1)...(19): siRNA sense strand
gcaacaccacaguuuauca

SEQ ID NO: 1619639 - RNA, 19 nt, Homo sapiens
  misc_RNA (1)...(19): siRNA sense strand
gcugaagaaacuguuauaa

SEQ ID NO: 1619640 - RNA, 19 nt, Homo sapiens
  misc_RNA (1)...(19): siRNA sense strand
gcagagaugccagaaccaa

SEQ ID NO: 1619641 - RNA, 19 nt, Homo sapiens
  misc_RNA (1)...(19): siRNA sense strand
uaacaguaccagcaacaga

SEQ ID NO: 1619642 - RNA, 19 nt, Homo sapiens
  misc_RNA (1)...(19): siRNA sense strand
cagcacaguauggucauua

SEQ ID NO: 1619643 - RNA, 19 nt, Homo sapiens
  misc_RNA (1)...(19): siRNA sense strand
gaaauuugcacucuauucc

SEQ ID NO: 1619644 - RNA, 19 nt, Homo sapiens
  misc_RNA (1)...(19): siRNA sense strand
ugccuuagcugaagcaucu

SEQ ID NO: 1619645 - RNA, 19 nt, Homo sapiens
  misc_RNA (1)...(19): siRNA sense strand
gcacgagcaggucaagaug

SEQ ID NO: 1619646 - RNA, 19 nt, Homo sapiens
  misc_RNA (1)...(19): siRNA sense strand
ggaauuggucagcccauca

SEQ ID NO: 1619647 - RNA, 19 nt, Homo sapiens
  misc_RNA (1)...(19): siRNA sense strand
ggccacagaagaaguaguu

SEQ ID NO: 1619648 - RNA, 19 nt, Homo sapiens
  misc_RNA (1)...(19): siRNA sense strand
caucaguauuagcuacauu

SEQ ID NO: 1619649 - RNA, 19 nt, Homo sapiens
  misc_RNA (1)...(19): siRNA sense strand
gaagauuuagcagagauau

SEQ ID NO: 1619650 - RNA, 19 nt, Homo sapiens
  misc_RNA (1)...(19): siRNA sense strand
caccacaguuuaucauugg

SEQ ID NO: 1619651 - RNA, 19 nt, Homo sapiens
  misc_RNA (1)...(19): siRNA sense strand
cagcuaagagacaauguau

SEQ ID NO: 1619652 - RNA, 19 nt, Homo sapiens
  misc_RNA (1)...(19): siRNA sense strand
caugccagauggacaacaa

SEQ ID NO: 1619653 - RNA, 19 nt, Homo sapiens
  misc_RNA (1)...(19): siRNA sense strand
gaaacucuucuacaucagu

SEQ ID NO: 1619654 - RNA, 19 nt, Homo sapiens
  misc_RNA (1)...(19): siRNA sense strand
caagaggugguggaacuuu

SEQ ID NO: 1619655 - RNA, 19 nt, Homo sapiens
  misc_RNA (1)...(19): siRNA sense strand
cagacuggcugggaacuuc

SEQ ID NO: 1619656 - RNA, 19 nt, Homo sapiens
  misc_RNA (1)...(19): siRNA sense strand
gauauuacagauugcuaug

SEQ ID NO: 1619657 - RNA, 19 nt, Homo sapiens
  misc_RNA (1)...(19): siRNA sense strand
gcagcacaguauggucauu

SEQ ID NO: 1619658 - RNA, 19 nt, Homo sapiens
  misc_RNA (1)...(19): siRNA sense strand
ucagcaagucaucacaaua

SEQ ID NO: 1619659 - RNA, 19 nt, Homo sapiens
  misc_RNA (1)...(19): siRNA sense strand
caaauggagcucccuuuac

SEQ ID NO: 1619660 - RNA, 19 nt, Homo sapiens
  misc_RNA (1)...(19): siRNA sense strand
uucagaaacuccaguagug

SEQ ID NO: 1619661 - RNA, 19 nt, Homo sapiens
  misc_RNA (1)...(19): siRNA sense strand
cagaacacaaucaucaaga

SEQ ID NO: 1619662 - RNA, 19 nt, Homo sapiens
  misc_RNA (1)...(19): siRNA sense strand
ccagcuaagagacaaugua

SEQ ID NO: 1619663 - RNA, 19 nt, Homo sapiens
  misc_RNA (1)...(19): siRNA sense strand
uuggaaauuugcacucuau

SEQ ID NO: 1619664 - RNA, 19 nt, Homo sapiens
  misc_RNA (1)...(19): siRNA sense strand
caacaccacaguuuaucau

SEQ ID NO: 1619665 - RNA, 19 nt, Homo sapiens
  misc_RNA (1)...(19): siRNA sense strand
gagauauuacagauugcua

SEQ ID NO: 1619666 - RNA, 19 nt, Homo sapiens
  misc_RNA (1)...(19): siRNA sense strand
gguggaacuuuuaaucaaa

SEQ ID NO: 1619667 - RNA, 19 nt, Homo sapiens
  misc_RNA (1)...(19): siRNA sense strand
gggaacuucuccacuucau

SEQ ID NO: 1619668 - RNA, 19 nt, Homo sapiens
  misc_RNA (1)...(19): siRNA sense strand
gauggacaacaaguauuaa

SEQ ID NO: 1619669 - RNA, 19 nt, Homo sapiens
  misc_RNA (1)...(19): siRNA sense strand
uaucugcuguucaguuugg

SEQ ID NO: 1619670 - RNA, 19 nt, Homo sapiens
  misc_RNA (1)...(19): siRNA sense strand
cagagaguccugacacugu

SEQ ID NO: 1619671 - RNA, 19 nt, Homo sapiens
  misc_RNA (1)...(19): siRNA sense strand
uauuacagauugcuaugca

SEQ ID NO: 1619672 - RNA, 19 nt, Homo sapiens
  misc_RNA (1)...(19): siRNA sense strand
acacacgcaaaguaaauuu

SEQ ID NO: 1619673 - RNA, 19 nt, Homo sapiens
  misc_RNA (1)...(19): siRNA sense strand
gaaacuguuauaagugaag

SEQ ID NO: 1619674 - RNA, 19 nt, Homo sapiens
  misc_RNA (1)...(19): siRNA sense strand
ccgaacaccauuacauaug

SEQ ID NO: 1619675 - RNA, 19 nt, Homo sapiens
  misc_RNA (1)...(19): siRNA sense strand
gucagcaagucaucacaau

SEQ ID NO: 1619676 - RNA, 19 nt, Homo sapiens
  misc_RNA (1)...(19): siRNA sense strand
cacaguauggucauuauuc

SEQ ID NO: 1619677 - RNA, 19 nt, Homo sapiens
  misc_RNA (1)...(19): siRNA sense strand
uuuggaaacucuucuacau

SEQ ID NO: 1619678 - RNA, 19 nt, Homo sapiens
  misc_RNA (1)...(19): siRNA sense strand
gacaauggaaaugaagauu

SEQ ID NO: 1619679 - RNA, 19 nt, Homo sapiens
  misc_RNA (1)...(19): siRNA sense strand
gaaccaaaucaacacaaac

SEQ ID NO: 1619680 - RNA, 19 nt, Homo sapiens
  misc_RNA (1)...(19): siRNA sense strand
ucaucuagcagcacaguau

SEQ ID NO: 1619681 - RNA, 19 nt, Homo sapiens
  misc_RNA (1)...(19): siRNA sense strand
gcagagauauuacagauug

SEQ ID NO: 1619682 - RNA, 19 nt, Homo sapiens
  misc_RNA (1)...(19): siRNA sense strand
gguggaaucugcagaaaua

SEQ ID NO: 1619683 - RNA, 19 nt, Homo sapiens
  misc_RNA (1)...(19): siRNA sense strand
caacagacauugcugaaga

SEQ ID NO: 1619684 - RNA, 19 nt, Homo sapiens
  misc_RNA (1)...(19): siRNA sense strand
gagacaauguaucgaaaua

SEQ ID NO: 1619685 - RNA, 19 nt, Homo sapiens
  misc_RNA (1)...(19): siRNA sense strand
caaaggacauguuaaagau

SEQ ID NO: 1619686 - RNA, 19 nt, Homo sapiens
  misc_RNA (1)...(19): siRNA sense strand
gcaaauggagcucccuuua

SEQ ID NO: 1619687 - RNA, 19 nt, Homo sapiens
  misc_RNA (1)...(19): siRNA sense strand
caaauauggugcugaugua

SEQ ID NO: 1619688 - RNA, 19 nt, Homo sapiens
  misc_RNA (1)...(19): siRNA sense strand
gcaaaggacauguuaaaga

SEQ ID NO: 1619689 - RNA, 19 nt, Homo sapiens
  misc_RNA (1)...(19): siRNA sense strand
caagucaucacaauaguua

SEQ ID NO: 1619690 - RNA, 19 nt, Homo sapiens
  misc_RNA (1)...(19): siRNA sense strand
caacaaguauuaacaguac

SEQ ID NO: 1619691 - RNA, 19 nt, Homo sapiens
  misc_RNA (1)...(19): siRNA sense strand
gaugacagcucuccauugg

SEQ ID NO: 1619692 - RNA, 19 nt, Homo sapiens
  misc_RNA (1)...(19): siRNA sense strand
gacaauacaugcugcaaca

SEQ ID NO: 1619693 - RNA, 19 nt, Homo sapiens
  misc_RNA (1)...(19): siRNA sense strand
gaugaugaaguucguauuu

SEQ ID NO: 1619694 - RNA, 19 nt, Homo sapiens
  misc_RNA (1)...(19): siRNA sense strand
gaagaaacuguuauaagug

SEQ ID NO: 1619695 - RNA, 19 nt, Homo sapiens
  misc_RNA (1)...(19): siRNA sense strand
gaccgaacaccauuacaua

SEQ ID NO: 1619696 - RNA, 19 nt, Homo sapiens
  misc_RNA (1)...(19): siRNA sense strand
ccacagaacacaaucauca

SEQ ID NO: 1619697 - RNA, 19 nt, Homo sapiens
  misc_RNA (1)...(19): siRNA sense strand
gcauggugcugaugucaau

SEQ ID NO: 1619698 - RNA, 19 nt, Homo sapiens
  misc_RNA (1)...(19): siRNA sense strand
gcugggaacuucuccacuu

SEQ ID NO: 1619699 - RNA, 19 nt, Homo sapiens
  misc_RNA (1)...(19): siRNA sense strand
gauguacacacgcaaagua

SEQ ID NO: 1619700 - RNA, 19 nt, Homo sapiens
  misc_RNA (1)...(19): siRNA sense strand
gugcugaugucaaugcaaa

SEQ ID NO: 1619701 - RNA, 19 nt, Homo sapiens
  misc_RNA (1)...(19): siRNA sense strand
uagcagagauauuacagau

SEQ ID NO: 1619702 - RNA, 19 nt, Homo sapiens
  misc_RNA (1)...(19): siRNA sense strand
uggaaacucuucuacauca

SEQ ID NO: 1619703 - RNA, 19 nt, Homo sapiens
  misc_RNA (1)...(19): siRNA sense strand
ggaaucugcagaaauagaa

SEQ ID NO: 1619704 - RNA, 19 nt, Homo sapiens
  misc_RNA (1)...(19): siRNA sense strand
gaagaaccaccagcuaaga

SEQ ID NO: 1619705 - RNA, 19 nt, Homo sapiens
  misc_RNA (1)...(19): siRNA sense strand
gaacuucuccacuucaucu

SEQ ID NO: 1619706 - RNA, 19 nt, Homo sapiens
  misc_RNA (1)...(19): siRNA sense strand
agacauugcugaagaaacu

SEQ ID NO: 1619707 - RNA, 19 nt, Homo sapiens
  misc_RNA (1)...(19): siRNA sense strand
aaggacauguuaaagauga

SEQ ID NO: 1619708 - RNA, 19 nt, Homo sapiens
  misc_RNA (1)...(19): siRNA sense strand
gugaagaaccaccagcuaa

SEQ ID NO: 1619709 - RNA, 19 nt, Homo sapiens
  misc_RNA (1)...(19): siRNA sense strand
gagcaggucaagaugauga

SEQ ID NO: 1619710 - RNA, 19 nt, Homo sapiens
  misc_RNA (1)...(19): siRNA sense strand
ggaaauuugcacucuauuc

SEQ ID NO: 1619711 - RNA, 19 nt, Homo sapiens
  misc_RNA (1)...(19): siRNA sense strand
aaacucuucuacaucagua

SEQ ID NO: 1619712 - RNA, 19 nt, Homo sapiens
  misc_RNA (1)...(19): siRNA sense strand
caaugcaaaggacauguua

SEQ ID NO: 1619713 - RNA, 19 nt, Homo sapiens
  misc_RNA (1)...(19): siRNA sense strand
uaagagacaauguaucgaa

SEQ ID NO: 1619714 - RNA, 19 nt, Homo sapiens
  misc_RNA (1)...(19): siRNA sense strand
ggucagcccaucauuguga

SEQ ID NO: 1619715 - RNA, 19 nt, Homo sapiens
  misc_RNA (1)...(19): siRNA sense strand
agaaccaaaucaacacaaa

SEQ ID NO: 1619716 - RNA, 19 nt, Homo sapiens
  misc_RNA (1)...(19): siRNA sense strand
uguaucugcuguucaguuu

SEQ ID NO: 1619717 - RNA, 19 nt, Homo sapiens
  misc_RNA (1)...(19): siRNA sense strand
gacaacaaguauuaacagu

SEQ ID NO: 1619718 - RNA, 19 nt, Homo sapiens
  misc_RNA (1)...(19): siRNA sense strand
guacacacgcaaaguaaau

SEQ ID NO: 1619719 - RNA, 19 nt, Homo sapiens
  misc_RNA (1)...(19): siRNA sense strand
aaauggagcucccuuuacu

SEQ ID NO: 1619720 - RNA, 19 nt, Homo sapiens
  misc_RNA (1)...(19): siRNA sense strand
agauggacaacaaguauua

SEQ ID NO: 1619721 - RNA, 19 nt, Homo sapiens
  misc_RNA (1)...(19): siRNA sense strand
acaccacaguuuaucauug

SEQ ID NO: 1619722 - RNA, 19 nt, Homo sapiens
  misc_RNA (1)...(19): siRNA sense strand
caauagacaauggaaauga

SEQ ID NO: 1619723 - RNA, 19 nt, Homo sapiens
  misc_RNA (1)...(19): siRNA sense strand
gcaagucaucacaauaguu

SEQ ID NO: 1619724 - RNA, 19 nt, Homo sapiens
  misc_RNA (1)...(19): siRNA sense strand
ggagcucccuuuacuacag

SEQ ID NO: 1619725 - RNA, 19 nt, Homo sapiens
  misc_RNA (1)...(19): siRNA sense strand
cacaauaguuacagaugga

SEQ ID NO: 1619726 - RNA, 19 nt, Homo sapiens
  misc_RNA (1)...(19): siRNA sense strand
ggaccgaacaccauuacau

SEQ ID NO: 1619727 - RNA, 19 nt, Homo sapiens
  misc_RNA (1)...(19): siRNA sense strand
aagagacaauguaucgaaa

SEQ ID NO: 1619728 - RNA, 19 nt, Homo sapiens
  misc_RNA (1)...(19): siRNA sense strand
gagcucccuuuacuacaga

SEQ ID NO: 1619729 - RNA, 19 nt, Homo sapiens
  misc_RNA (1)...(19): siRNA sense strand
cagcaagucaucacaauag

SEQ ID NO: 1619730 - RNA, 19 nt, Homo sapiens
  misc_RNA (1)...(19): siRNA sense strand
gcugcaacaccacaguuua

SEQ ID NO: 1619731 - RNA, 19 nt, Homo sapiens
  misc_RNA (1)...(19): siRNA sense strand
caacacaaacccagagagu

SEQ ID NO: 1619732 - RNA, 19 nt, Homo sapiens
  misc_RNA (1)...(19): siRNA sense strand
ucaaauauggugcugaugu

SEQ ID NO: 1619733 - RNA, 19 nt, Homo sapiens
  misc_RNA (1)...(19): siRNA sense strand
gcacaguauggucauuauu

SEQ ID NO: 1619734 - RNA, 19 nt, Homo sapiens
  misc_RNA (1)...(19): siRNA sense strand
gcuaagagacaauguaucg

SEQ ID NO: 1619735 - RNA, 19 nt, Homo sapiens
  misc_RNA (1)...(19): siRNA sense strand
ccagauggacaacaaguau

SEQ ID NO: 1619736 - RNA, 19 nt, Homo sapiens
  misc_RNA (1)...(19): siRNA sense strand
gagcuggugugagcagaga

SEQ ID NO: 1619737 - RNA, 19 nt, Homo sapiens
  misc_RNA (1)...(19): siRNA sense strand
ggacaacaaguauuaacag

SEQ ID NO: 1619738 - RNA, 19 nt, Homo sapiens
  misc_RNA (1)...(19): siRNA sense strand
gcaacaccacaguuuauca

SEQ ID NO: 1619739 - RNA, 19 nt, Homo sapiens
  misc_RNA (1)...(19): siRNA sense strand
gcugaagaaacuguuauaa

SEQ ID NO: 1619740 - RNA, 19 nt, Homo sapiens
  misc_RNA (1)...(19): siRNA sense strand
gcagagaugccagaaccaa

SEQ ID NO: 1619741 - RNA, 19 nt, Homo sapiens
  misc_RNA (1)...(19): siRNA sense strand
uaacaguaccagcaacaga

SEQ ID NO: 1619742 - RNA, 19 nt, Homo sapiens
  misc_RNA (1)...(19): siRNA sense strand
cagcacaguauggucauua

SEQ ID NO: 1619743 - RNA, 19 nt, Homo sapiens
  misc_RNA (1)...(19): siRNA sense strand
gaaauuugcacucuauucc

SEQ ID NO: 1619744 - RNA, 19 nt, Homo sapiens
  misc_RNA (1)...(19): siRNA sense strand
ugccuuagcugaagcaucu

SEQ ID NO: 1619745 - RNA, 19 nt, Homo sapiens
  misc_RNA (1)...(19): siRNA sense strand
gcacgagcaggucaagaug

SEQ ID NO: 1619746 - RNA, 19 nt, Homo sapiens
  misc_RNA (1)...(19): siRNA sense strand
ggaauuggucagcccauca

SEQ ID NO: 1619747 - RNA, 19 nt, Homo sapiens
  misc_RNA (1)...(19): siRNA sense strand
ggccacagaagaaguaguu

SEQ ID NO: 1619748 - RNA, 19 nt, Homo sapiens
  misc_RNA (1)...(19): siRNA sense strand
caucaguauuagcuacauu

SEQ ID NO: 1619749 - RNA, 19 nt, Homo sapiens
  misc_RNA (1)...(19): siRNA sense strand
gaagauuuagcagagauau

SEQ ID NO: 1619750 - RNA, 19 nt, Homo sapiens
  misc_RNA (1)...(19): siRNA sense strand
caccacaguuuaucauugg

SEQ ID NO: 1619751 - RNA, 19 nt, Homo sapiens
  misc_RNA (1)...(19): siRNA sense strand
cagcuaagagacaauguau

SEQ ID NO: 1619752 - RNA, 19 nt, Homo sapiens
  misc_RNA (1)...(19): siRNA sense strand
caugccagauggacaacaa

SEQ ID NO: 1619753 - RNA, 19 nt, Homo sapiens
  misc_RNA (1)...(19): siRNA sense strand
gaaacucuucuacaucagu

SEQ ID NO: 1619754 - RNA, 19 nt, Homo sapiens
  misc_RNA (1)...(19): siRNA sense strand
caagaggugguggaacuuu

SEQ ID NO: 1619755 - RNA, 19 nt, Homo sapiens
  misc_RNA (1)...(19): siRNA sense strand
cagacuggcugggaacuuc

SEQ ID NO: 1619756 - RNA, 19 nt, Homo sapiens
  misc_RNA (1)...(19): siRNA sense strand
gauauuacagauugcuaug

SEQ ID NO: 1619757 - RNA, 19 nt, Homo sapiens
  misc_RNA (1)...(19): siRNA sense strand
gcagcacaguauggucauu

SEQ ID NO: 1619758 - RNA, 19 nt, Homo sapiens
  misc_RNA (1)...(19): siRNA sense strand
ucagcaagucaucacaaua

SEQ ID NO: 1619759 - RNA, 19 nt, Homo sapiens
  misc_RNA (1)...(19): siRNA sense strand
caaauggagcucccuuuac

SEQ ID NO: 1619760 - RNA, 19 nt, Homo sapiens
  misc_RNA (1)...(19): siRNA sense strand
uucagaaacuccaguagug

SEQ ID NO: 1619761 - RNA, 19 nt, Homo sapiens
  misc_RNA (1)...(19): siRNA sense strand
cagaacacaaucaucaaga

SEQ ID NO: 1619762 - RNA, 19 nt, Homo sapiens
  misc_RNA (1)...(19): siRNA sense strand
ccagcuaagagacaaugua

SEQ ID NO: 1619763 - RNA, 19 nt, Homo sapiens
  misc_RNA (1)...(19): siRNA sense strand
uuggaaauuugcacucuau

SEQ ID NO: 1619764 - RNA, 19 nt, Homo sapiens
  misc_RNA (1)...(19): siRNA sense strand
caacaccacaguuuaucau

SEQ ID NO: 1619765 - RNA, 19 nt, Homo sapiens
  misc_RNA (1)...(19): siRNA sense strand
gagauauuacagauugcua

SEQ ID NO: 1619766 - RNA, 19 nt, Homo sapiens
  misc_RNA (1)...(19): siRNA sense strand
gguggaacuuuuaaucaaa

SEQ ID NO: 1619767 - RNA, 19 nt, Homo sapiens
  misc_RNA (1)...(19): siRNA sense strand
gggaacuucuccacuucau

SEQ ID NO: 1619768 - RNA, 19 nt, Homo sapiens
  misc_RNA (1)...(19): siRNA sense strand
gauggacaacaaguauuaa

SEQ ID NO: 1619769 - RNA, 19 nt, Homo sapiens
  misc_RNA (1)...(19): siRNA sense strand
uaucugcuguucaguuugg

SEQ ID NO: 1619770 - RNA, 19 nt, Homo sapiens
  misc_RNA (1)...(19): siRNA sense strand
cagagaguccugacacugu

SEQ ID NO: 1619771 - RNA, 19 nt, Homo sapiens
  misc_RNA (1)...(19): siRNA sense strand
uauuacagauugcuaugca

SEQ ID NO: 1619772 - RNA, 19 nt, Homo sapiens
  misc_RNA (1)...(19): siRNA sense strand
acacacgcaaaguaaauuu

SEQ ID NO: 1619773 - RNA, 19 nt, Homo sapiens
  misc_RNA (1)...(19): siRNA sense strand
gaaacuguuauaagugaag

SEQ ID NO: 1619774 - RNA, 19 nt, Homo sapiens
  misc_RNA (1)...(19): siRNA sense strand
ccgaacaccauuacauaug

SEQ ID NO: 1619775 - RNA, 19 nt, Homo sapiens
  misc_RNA (1)...(19): siRNA sense strand
gucagcaagucaucacaau

SEQ ID NO: 1619776 - RNA, 19 nt, Homo sapiens
  misc_RNA (1)...(19): siRNA sense strand
cacaguauggucauuauuc

SEQ ID NO: 1619777 - RNA, 19 nt, Homo sapiens
  misc_RNA (1)...(19): siRNA sense strand
uuuggaaacucuucuacau

SEQ ID NO: 1619778 - RNA, 19 nt, Homo sapiens
  misc_RNA (1)...(19): siRNA sense strand
gacaauggaaaugaagauu

SEQ ID NO: 1619779 - RNA, 19 nt, Homo sapiens
  misc_RNA (1)...(19): siRNA sense strand
gaaccaaaucaacacaaac

SEQ ID NO: 1619780 - RNA, 19 nt, Homo sapiens
  misc_RNA (1)...(19): siRNA sense strand
ucaucuagcagcacaguau

SEQ ID NO: 1619781 - RNA, 19 nt, Homo sapiens
  misc_RNA (1)...(19): siRNA sense strand
gcacaaacaucaagauaac

SEQ ID NO: 1619782 - RNA, 19 nt, Homo sapiens
  misc_RNA (1)...(19): siRNA sense strand
caucugaccucaauuuaau

SEQ ID NO: 1619783 - RNA, 19 nt, Homo sapiens
  misc_RNA (1)...(19): siRNA sense strand
ucgaguaucugaugaagaa

SEQ ID NO: 1619784 - RNA, 19 nt, Homo sapiens
  misc_RNA (1)...(19): siRNA sense strand
acaaacagcucacccugaa

SEQ ID NO: 1619785 - RNA, 19 nt, Homo sapiens
  misc_RNA (1)...(19): siRNA sense strand
gagcacaaacaucaagaua

SEQ ID NO: 1619786 - RNA, 19 nt, Homo sapiens
  misc_RNA (1)...(19): siRNA sense strand
caaagccgccuuacuccua

SEQ ID NO: 1619787 - RNA, 19 nt, Homo sapiens
  misc_RNA (1)...(19): siRNA sense strand
uuuaauggcugacaacuca

SEQ ID NO: 1619788 - RNA, 19 nt, Homo sapiens
  misc_RNA (1)...(19): siRNA sense strand
uacgauggcucccgacaaa

SEQ ID NO: 1619789 - RNA, 19 nt, Homo sapiens
  misc_RNA (1)...(19): siRNA sense strand
gagcugaagcggaucaaga

SEQ ID NO: 1619790 - RNA, 19 nt, Homo sapiens
  misc_RNA (1)...(19): siRNA sense strand
ugaagcggaucaagacaga

SEQ ID NO: 1619791 - RNA, 19 nt, Homo sapiens
  misc_RNA (1)...(19): siRNA sense strand
ugaacgggauuuauacaca

SEQ ID NO: 1619792 - RNA, 19 nt, Homo sapiens
  misc_RNA (1)...(19): siRNA sense strand
gagacagcccgaaggauga

SEQ ID NO: 1619793 - RNA, 19 nt, Homo sapiens
  misc_RNA (1)...(19): siRNA sense strand
gcccgaaggaugauucaaa

SEQ ID NO: 1619794 - RNA, 19 nt, Homo sapiens
  misc_RNA (1)...(19): siRNA sense strand
ucaauuuaauggcugacaa

SEQ ID NO: 1619795 - RNA, 19 nt, Homo sapiens
  misc_RNA (1)...(19): siRNA sense strand
ccaucugaccucaauuuaa

SEQ ID NO: 1619796 - RNA, 19 nt, Homo sapiens
  misc_RNA (1)...(19): siRNA sense strand
gcgaguccuuugcacaugu

SEQ ID NO: 1619797 - RNA, 19 nt, Homo sapiens
  misc_RNA (1)...(19): siRNA sense strand
ggaaaaggguguccagaac

SEQ ID NO: 1619798 - RNA, 19 nt, Homo sapiens
  misc_RNA (1)...(19): siRNA sense strand
caaggugggccgagugaug

SEQ ID NO: 1619799 - RNA, 19 nt, Homo sapiens
  misc_RNA (1)...(19): siRNA sense strand
gccaucugaccucaauuua

SEQ ID NO: 1619800 - RNA, 19 nt, Homo sapiens
  misc_RNA (1)...(19): siRNA sense strand
gcaggaggcgucugagucu

SEQ ID NO: 1619801 - RNA, 19 nt, Homo sapiens
  misc_RNA (1)...(19): siRNA sense strand
gaguucgaguaucugauga

SEQ ID NO: 1619802 - RNA, 19 nt, Homo sapiens
  misc_RNA (1)...(19): siRNA sense strand
aaaaggguguccagaacua

SEQ ID NO: 1619803 - RNA, 19 nt, Homo sapiens
  misc_RNA (1)...(19): siRNA sense strand
cuacaggacugcggacaag

SEQ ID NO: 1619804 - RNA, 19 nt, Homo sapiens
  misc_RNA (1)...(19): siRNA sense strand
acgcgcagcugauaguuca

SEQ ID NO: 1619805 - RNA, 19 nt, Homo sapiens
  misc_RNA (1)...(19): siRNA sense strand
cgaguucgaguaucugaug

SEQ ID NO: 1619806 - RNA, 19 nt, Homo sapiens
  misc_RNA (1)...(19): siRNA sense strand
caccauggcccaccucauc

SEQ ID NO: 1619807 - RNA, 19 nt, Homo sapiens
  misc_RNA (1)...(19): siRNA sense strand
gaaccaucagcgcugcaaa

SEQ ID NO: 1619808 - RNA, 19 nt, Homo sapiens
  misc_RNA (1)...(19): siRNA sense strand
cgaguccuuugcacauguu

SEQ ID NO: 1619809 - RNA, 19 nt, Homo sapiens
  misc_RNA (1)...(19): siRNA sense strand
acccugaacgggauuuaua

SEQ ID NO: 1619810 - RNA, 19 nt, Homo sapiens
  misc_RNA (1)...(19): siRNA sense strand
gcgucugagucuccaguga

SEQ ID NO: 1619811 - RNA, 19 nt, Homo sapiens
  misc_RNA (1)...(19): siRNA sense strand
gcgagggcaucgucauugc

SEQ ID NO: 1619812 - RNA, 19 nt, Homo sapiens
  misc_RNA (1)...(19): siRNA sense strand
cccgaaggaugauucaaag

SEQ ID NO: 1619813 - RNA, 19 nt, Homo sapiens
  misc_RNA (1)...(19): siRNA sense strand
agaagcaggaggcgucuga

SEQ ID NO: 1619814 - RNA, 19 nt, Homo sapiens
  misc_RNA (1)...(19): siRNA sense strand
gcgagaagagagagaagca

SEQ ID NO: 1619815 - RNA, 19 nt, Homo sapiens
  misc_RNA (1)...(19): siRNA sense strand
gccgcgaguucgaguaucu

SEQ ID NO: 1619816 - RNA, 19 nt, Homo sapiens
  misc_RNA (1)...(19): siRNA sense strand
ugccaucugaccucaauuu

SEQ ID NO: 1619817 - RNA, 19 nt, Homo sapiens
  misc_RNA (1)...(19): siRNA sense strand
caaacaucaagauaacguu

SEQ ID NO: 1619818 - RNA, 19 nt, Homo sapiens
  misc_RNA (1)...(19): siRNA sense strand
cgauggcucccgacaaaca

SEQ ID NO: 1619819 - RNA, 19 nt, Homo sapiens
  misc_RNA (1)...(19): siRNA sense strand
ggcgaguccuuugcacaug

SEQ ID NO: 1619820 - RNA, 19 nt, Homo sapiens
  misc_RNA (1)...(19): siRNA sense strand
agcacaaacaucaagauaa

SEQ ID NO: 1619821 - RNA, 19 nt, Homo sapiens
  misc_RNA (1)...(19): siRNA sense strand
gggaaaaggguguccagaa

SEQ ID NO: 1619822 - RNA, 19 nt, Homo sapiens
  misc_RNA (1)...(19): siRNA sense strand
acucacagccugaaaauga

SEQ ID NO: 1619823 - RNA, 19 nt, Homo sapiens
  misc_RNA (1)...(19): siRNA sense strand
guucgaguaucugaugaag

SEQ ID NO: 1619824 - RNA, 19 nt, Homo sapiens
  misc_RNA (1)...(19): siRNA sense strand
cgucugagucuccagugaa

SEQ ID NO: 1619825 - RNA, 19 nt, Homo sapiens
  misc_RNA (1)...(19): siRNA sense strand
gcaugggccacucgagcuu

SEQ ID NO: 1619826 - RNA, 19 nt, Homo sapiens
  misc_RNA (1)...(19): siRNA sense strand
ugacaacucacagccugaa

SEQ ID NO: 1619827 - RNA, 19 nt, Homo sapiens
  misc_RNA (1)...(19): siRNA sense strand
gcacaaacaucaagauaac

SEQ ID NO: 1619828 - RNA, 19 nt, Homo sapiens
  misc_RNA (1)...(19): siRNA sense strand
caucugaccucaauuuaau

SEQ ID NO: 1619829 - RNA, 19 nt, Homo sapiens
  misc_RNA (1)...(19): siRNA sense strand
ucgaguaucugaugaagaa

SEQ ID NO: 1619830 - RNA, 19 nt, Homo sapiens
  misc_RNA (1)...(19): siRNA sense strand
acaaacagcucacccugaa

SEQ ID NO: 1619831 - RNA, 19 nt, Homo sapiens
  misc_RNA (1)...(19): siRNA sense strand
gagcacaaacaucaagaua

SEQ ID NO: 1619832 - RNA, 19 nt, Homo sapiens
  misc_RNA (1)...(19): siRNA sense strand
caaagccgccuuacuccua

SEQ ID NO: 1619833 - RNA, 19 nt, Homo sapiens
  misc_RNA (1)...(19): siRNA sense strand
uuuaauggcugacaacuca

SEQ ID NO: 1619834 - RNA, 19 nt, Homo sapiens
  misc_RNA (1)...(19): siRNA sense strand
uacgauggcucccgacaaa

SEQ ID NO: 1619835 - RNA, 19 nt, Homo sapiens
  misc_RNA (1)...(19): siRNA sense strand
ugaacgggauuuauacaca

SEQ ID NO: 1619836 - RNA, 19 nt, Homo sapiens
  misc_RNA (1)...(19): siRNA sense strand
gagacagcccgaaggauga

SEQ ID NO: 1619837 - RNA, 19 nt, Homo sapiens
  misc_RNA (1)...(19): siRNA sense strand
gcccgaaggaugauucaaa

SEQ ID NO: 1619838 - RNA, 19 nt, Homo sapiens
  misc_RNA (1)...(19): siRNA sense strand
ucaauuuaauggcugacaa

SEQ ID NO: 1619839 - RNA, 19 nt, Homo sapiens
  misc_RNA (1)...(19): siRNA sense strand
ccaucugaccucaauuuaa

SEQ ID NO: 1619840 - RNA, 19 nt, Homo sapiens
  misc_RNA (1)...(19): siRNA sense strand
caaggugggccgagugaug

SEQ ID NO: 1619841 - RNA, 19 nt, Homo sapiens
  misc_RNA (1)...(19): siRNA sense strand
gccaucugaccucaauuua

SEQ ID NO: 1619842 - RNA, 19 nt, Homo sapiens
  misc_RNA (1)...(19): siRNA sense strand
gcaggaggcgucugagucu

SEQ ID NO: 1619843 - RNA, 19 nt, Homo sapiens
  misc_RNA (1)...(19): siRNA sense strand
gaguucgaguaucugauga

SEQ ID NO: 1619844 - RNA, 19 nt, Homo sapiens
  misc_RNA (1)...(19): siRNA sense strand
cuacaggacugcggacaag

SEQ ID NO: 1619845 - RNA, 19 nt, Homo sapiens
  misc_RNA (1)...(19): siRNA sense strand
acgcgcagcugauaguuca

SEQ ID NO: 1619846 - RNA, 19 nt, Homo sapiens
  misc_RNA (1)...(19): siRNA sense strand
cgaguucgaguaucugaug

SEQ ID NO: 1619847 - RNA, 19 nt, Homo sapiens
  misc_RNA (1)...(19): siRNA sense strand
caccauggcccaccucauc

SEQ ID NO: 1619848 - RNA, 19 nt, Homo sapiens
  misc_RNA (1)...(19): siRNA sense strand
gaaccaucagcgcugcaaa

SEQ ID NO: 1619849 - RNA, 19 nt, Homo sapiens
  misc_RNA (1)...(19): siRNA sense strand
acccugaacgggauuuaua

SEQ ID NO: 1619850 - RNA, 19 nt, Homo sapiens
  misc_RNA (1)...(19): siRNA sense strand
gcgucugagucuccaguga

SEQ ID NO: 1619851 - RNA, 19 nt, Homo sapiens
  misc_RNA (1)...(19): siRNA sense strand
cccgaaggaugauucaaag

SEQ ID NO: 1619852 - RNA, 19 nt, Homo sapiens
  misc_RNA (1)...(19): siRNA sense strand
agaagcaggaggcgucuga

SEQ ID NO: 1619853 - RNA, 19 nt, Homo sapiens
  misc_RNA (1)...(19): siRNA sense strand
gcgagaagagagagaagca

SEQ ID NO: 1619854 - RNA, 19 nt, Homo sapiens
  misc_RNA (1)...(19): siRNA sense strand
gccgcgaguucgaguaucu

SEQ ID NO: 1619855 - RNA, 19 nt, Homo sapiens
  misc_RNA (1)...(19): siRNA sense strand
ugccaucugaccucaauuu

SEQ ID NO: 1619856 - RNA, 19 nt, Homo sapiens
  misc_RNA (1)...(19): siRNA sense strand
caaacaucaagauaacguu

SEQ ID NO: 1619857 - RNA, 19 nt, Homo sapiens
  misc_RNA (1)...(19): siRNA sense strand
cgauggcucccgacaaaca

SEQ ID NO: 1619858 - RNA, 19 nt, Homo sapiens
  misc_RNA (1)...(19): siRNA sense strand
agcacaaacaucaagauaa

SEQ ID NO: 1619859 - RNA, 19 nt, Homo sapiens
  misc_RNA (1)...(19): siRNA sense strand
acucacagccugaaaauga

SEQ ID NO: 1619860 - RNA, 19 nt, Homo sapiens
  misc_RNA (1)...(19): siRNA sense strand
guucgaguaucugaugaag

SEQ ID NO: 1619861 - RNA, 19 nt, Homo sapiens
  misc_RNA (1)...(19): siRNA sense strand
cgucugagucuccagugaa

SEQ ID NO: 1619862 - RNA, 19 nt, Homo sapiens
  misc_RNA (1)...(19): siRNA sense strand
ugacaacucacagccugaa

SEQ ID NO: 1619863 - RNA, 19 nt, Homo sapiens
  misc_RNA (1)...(19): siRNA sense strand
gcaugggccacucgagcuu

SEQ ID NO: 1619864 - RNA, 19 nt, Homo sapiens
  misc_RNA (1)...(19): siRNA sense strand
gcacaaacaucaagauaac

SEQ ID NO: 1619865 - RNA, 19 nt, Homo sapiens
  misc_RNA (1)...(19): siRNA sense strand
caucugaccucaauuuaau

SEQ ID NO: 1619866 - RNA, 19 nt, Homo sapiens
  misc_RNA (1)...(19): siRNA sense strand
ucgaguaucugaugaagaa

SEQ ID NO: 1619867 - RNA, 19 nt, Homo sapiens
  misc_RNA (1)...(19): siRNA sense strand
acaaacagcucacccugaa

SEQ ID NO: 1619868 - RNA, 19 nt, Homo sapiens
  misc_RNA (1)...(19): siRNA sense strand
gagcacaaacaucaagaua

SEQ ID NO: 1619869 - RNA, 19 nt, Homo sapiens
  misc_RNA (1)...(19): siRNA sense strand
caaagccgccuuacuccua

SEQ ID NO: 1619870 - RNA, 19 nt, Homo sapiens
  misc_RNA (1)...(19): siRNA sense strand
uuuaauggcugacaacuca

SEQ ID NO: 1619871 - RNA, 19 nt, Homo sapiens
  misc_RNA (1)...(19): siRNA sense strand
uacgauggcucccgacaaa

SEQ ID NO: 1619872 - RNA, 19 nt, Homo sapiens
  misc_RNA (1)...(19): siRNA sense strand
ugaacgggauuuauacaca

SEQ ID NO: 1619873 - RNA, 19 nt, Homo sapiens
  misc_RNA (1)...(19): siRNA sense strand
gagacagcccgaaggauga

SEQ ID NO: 1619874 - RNA, 19 nt, Homo sapiens
  misc_RNA (1)...(19): siRNA sense strand
gcccgaaggaugauucaaa

SEQ ID NO: 1619875 - RNA, 19 nt, Homo sapiens
  misc_RNA (1)...(19): siRNA sense strand
ucaauuuaauggcugacaa

SEQ ID NO: 1619876 - RNA, 19 nt, Homo sapiens
  misc_RNA (1)...(19): siRNA sense strand
ccaucugaccucaauuuaa

SEQ ID NO: 1619877 - RNA, 19 nt, Homo sapiens
  misc_RNA (1)...(19): siRNA sense strand
gcgaguccuuugcacaugu

SEQ ID NO: 1619878 - RNA, 19 nt, Homo sapiens
  misc_RNA (1)...(19): siRNA sense strand
caaggugggccgagugaug

SEQ ID NO: 1619879 - RNA, 19 nt, Homo sapiens
  misc_RNA (1)...(19): siRNA sense strand
gccaucugaccucaauuua

SEQ ID NO: 1619880 - RNA, 19 nt, Homo sapiens
  misc_RNA (1)...(19): siRNA sense strand
gcaggaggcgucugagucu

SEQ ID NO: 1619881 - RNA, 19 nt, Homo sapiens
  misc_RNA (1)...(19): siRNA sense strand
gaguucgaguaucugauga

SEQ ID NO: 1619882 - RNA, 19 nt, Homo sapiens
  misc_RNA (1)...(19): siRNA sense strand
cuacaggacugcggacaag

SEQ ID NO: 1619883 - RNA, 19 nt, Homo sapiens
  misc_RNA (1)...(19): siRNA sense strand
acgcgcagcugauaguuca

SEQ ID NO: 1619884 - RNA, 19 nt, Homo sapiens
  misc_RNA (1)...(19): siRNA sense strand
cgaguucgaguaucugaug

SEQ ID NO: 1619885 - RNA, 19 nt, Homo sapiens
  misc_RNA (1)...(19): siRNA sense strand
caccauggcccaccucauc

SEQ ID NO: 1619886 - RNA, 19 nt, Homo sapiens
  misc_RNA (1)...(19): siRNA sense strand
gaaccaucagcgcugcaaa

SEQ ID NO: 1619887 - RNA, 19 nt, Homo sapiens
  misc_RNA (1)...(19): siRNA sense strand
cgaguccuuugcacauguu

SEQ ID NO: 1619888 - RNA, 19 nt, Homo sapiens
  misc_RNA (1)...(19): siRNA sense strand
acccugaacgggauuuaua

SEQ ID NO: 1619889 - RNA, 19 nt, Homo sapiens
  misc_RNA (1)...(19): siRNA sense strand
gcgucugagucuccaguga

SEQ ID NO: 1619890 - RNA, 19 nt, Homo sapiens
  misc_RNA (1)...(19): siRNA sense strand
cccgaaggaugauucaaag

SEQ ID NO: 1619891 - RNA, 19 nt, Homo sapiens
  misc_RNA (1)...(19): siRNA sense strand
agaagcaggaggcgucuga

SEQ ID NO: 1619892 - RNA, 19 nt, Homo sapiens
  misc_RNA (1)...(19): siRNA sense strand
gcgagaagagagagaagca

SEQ ID NO: 1619893 - RNA, 19 nt, Homo sapiens
  misc_RNA (1)...(19): siRNA sense strand
gccgcgaguucgaguaucu

SEQ ID NO: 1619894 - RNA, 19 nt, Homo sapiens
  misc_RNA (1)...(19): siRNA sense strand
ugccaucugaccucaauuu

SEQ ID NO: 1619895 - RNA, 19 nt, Homo sapiens
  misc_RNA (1)...(19): siRNA sense strand
caaacaucaagauaacguu

SEQ ID NO: 1619896 - RNA, 19 nt, Homo sapiens
  misc_RNA (1)...(19): siRNA sense strand
cgauggcucccgacaaaca

SEQ ID NO: 1619897 - RNA, 19 nt, Homo sapiens
  misc_RNA (1)...(19): siRNA sense strand
ggcgaguccuuugcacaug

SEQ ID NO: 1619898 - RNA, 19 nt, Homo sapiens
  misc_RNA (1)...(19): siRNA sense strand
agcacaaacaucaagauaa

SEQ ID NO: 1619899 - RNA, 19 nt, Homo sapiens
  misc_RNA (1)...(19): siRNA sense strand
acucacagccugaaaauga

SEQ ID NO: 1619900 - RNA, 19 nt, Homo sapiens
  misc_RNA (1)...(19): siRNA sense strand
guucgaguaucugaugaag

SEQ ID NO: 1619901 - RNA, 19 nt, Homo sapiens
  misc_RNA (1)...(19): siRNA sense strand
cgucugagucuccagugaa

SEQ ID NO: 1619902 - RNA, 19 nt, Homo sapiens
  misc_RNA (1)...(19): siRNA sense strand
ugacaacucacagccugaa

SEQ ID NO: 1619903 - RNA, 19 nt, Homo sapiens
  misc_RNA (1)...(19): siRNA sense strand
gcaugggccacucgagcuu

SEQ ID NO: 1619904 - RNA, 19 nt, Homo sapiens
  misc_RNA (1)...(19): siRNA sense strand
gaaggaaacuugugucuca

SEQ ID NO: 1619905 - RNA, 19 nt, Homo sapiens
  misc_RNA (1)...(19): siRNA sense strand
ggacacugcagaaauaaua

SEQ ID NO: 1619906 - RNA, 19 nt, Homo sapiens
  misc_RNA (1)...(19): siRNA sense strand
ccacacacuccauuaauaa

SEQ ID NO: 1619907 - RNA, 19 nt, Homo sapiens
  misc_RNA (1)...(19): siRNA sense strand
uuaauaagguuuccugaca

SEQ ID NO: 1619908 - RNA, 19 nt, Homo sapiens
  misc_RNA (1)...(19): siRNA sense strand
caccagauuugcugaugua

SEQ ID NO: 1619909 - RNA, 19 nt, Homo sapiens
  misc_RNA (1)...(19): siRNA sense strand
ucacaacauucuaaaggaa

SEQ ID NO: 1619910 - RNA, 19 nt, Homo sapiens
  misc_RNA (1)...(19): siRNA sense strand
cagcagggcuaccaucuca

SEQ ID NO: 1619911 - RNA, 19 nt, Homo sapiens
  misc_RNA (1)...(19): siRNA sense strand
ccaucucacucuucuguaa

SEQ ID NO: 1619912 - RNA, 19 nt, Homo sapiens
  misc_RNA (1)...(19): siRNA sense strand
caaaccacacacuccauua

SEQ ID NO: 1619913 - RNA, 19 nt, Homo sapiens
  misc_RNA (1)...(19): siRNA sense strand
cagaagagacaauccuaaa

SEQ ID NO: 1619914 - RNA, 19 nt, Homo sapiens
  misc_RNA (1)...(19): siRNA sense strand
ccucagaaauacagaagga

SEQ ID NO: 1619915 - RNA, 19 nt, Homo sapiens
  misc_RNA (1)...(19): siRNA sense strand
uaaacccaauguaucagaa

SEQ ID NO: 1619916 - RNA, 19 nt, Homo sapiens
  misc_RNA (1)...(19): siRNA sense strand
acguggagguccugaauaa

SEQ ID NO: 1619917 - RNA, 19 nt, Homo sapiens
  misc_RNA (1)...(19): siRNA sense strand
accacacacuccauuaaua

SEQ ID NO: 1619918 - RNA, 19 nt, Homo sapiens
  misc_RNA (1)...(19): siRNA sense strand
ucacucuucuguaauuuca

SEQ ID NO: 1619919 - RNA, 19 nt, Homo sapiens
  misc_RNA (1)...(19): siRNA sense strand
caauguaucagaagcuuug

SEQ ID NO: 1619920 - RNA, 19 nt, Homo sapiens
  misc_RNA (1)...(19): siRNA sense strand
aaaccacacacuccauuaa

SEQ ID NO: 1619921 - RNA, 19 nt, Homo sapiens
  misc_RNA (1)...(19): siRNA sense strand
accggacacugcagaaaua

SEQ ID NO: 1619922 - RNA, 19 nt, Homo sapiens
  misc_RNA (1)...(19): siRNA sense strand
gacagaagagacaauccua

SEQ ID NO: 1619923 - RNA, 19 nt, Homo sapiens
  misc_RNA (1)...(19): siRNA sense strand
ucagaaauacagaaggaaa

SEQ ID NO: 1619924 - RNA, 19 nt, Homo sapiens
  misc_RNA (1)...(19): siRNA sense strand
aauaagguuuccugacaga

SEQ ID NO: 1619925 - RNA, 19 nt, Homo sapiens
  misc_RNA (1)...(19): siRNA sense strand
caacguggagguccugaau

SEQ ID NO: 1619926 - RNA, 19 nt, Homo sapiens
  misc_RNA (1)...(19): siRNA sense strand
gaagagacaauccuaaacc

SEQ ID NO: 1619927 - RNA, 19 nt, Homo sapiens
  misc_RNA (1)...(19): siRNA sense strand
aaauacagaaggaaacuug

SEQ ID NO: 1619928 - RNA, 19 nt, Homo sapiens
  misc_RNA (1)...(19): siRNA sense strand
uaucagaagcuuugagauc

SEQ ID NO: 1619929 - RNA, 19 nt, Homo sapiens
  misc_RNA (1)...(19): siRNA sense strand
caagauggcgucugcuagu

SEQ ID NO: 1619930 - RNA, 19 nt, Homo sapiens
  misc_RNA (1)...(19): siRNA sense strand
agacaauccuaaacccaau

SEQ ID NO: 1619931 - RNA, 19 nt, Homo sapiens
  misc_RNA (1)...(19): siRNA sense strand
aagauggcgucugcuagua

SEQ ID NO: 1619932 - RNA, 19 nt, Homo sapiens
  misc_RNA (1)...(19): siRNA sense strand
gggcuaccaucucacucuu

SEQ ID NO: 1619933 - RNA, 19 nt, Homo sapiens
  misc_RNA (1)...(19): siRNA sense strand
gcuaccaucucacucuucu

SEQ ID NO: 1619934 - RNA, 19 nt, Homo sapiens
  misc_RNA (1)...(19): siRNA sense strand
gaaauacagaaggaaacuu

SEQ ID NO: 1619935 - RNA, 19 nt, Homo sapiens
  misc_RNA (1)...(19): siRNA sense strand
aacauuaccucagaaauac

SEQ ID NO: 1619936 - RNA, 19 nt, Homo sapiens
  misc_RNA (1)...(19): siRNA sense strand
gacacugcagaaauaauaa

SEQ ID NO: 1619937 - RNA, 19 nt, Homo sapiens
  misc_RNA (1)...(19): siRNA sense strand
ucaaaccacacacuccauu

SEQ ID NO: 1619938 - RNA, 19 nt, Homo sapiens
  misc_RNA (1)...(19): siRNA sense strand
ucaccagauuugcugaugu

SEQ ID NO: 1619939 - RNA, 19 nt, Homo sapiens
  misc_RNA (1)...(19): siRNA sense strand
acagaagagacaauccuaa

SEQ ID NO: 1619940 - RNA, 19 nt, Homo sapiens
  misc_RNA (1)...(19): siRNA sense strand
aagguuuccugacagaaga

SEQ ID NO: 1619941 - RNA, 19 nt, Homo sapiens
  misc_RNA (1)...(19): siRNA sense strand
aauccuaaacccaauguau

SEQ ID NO: 1619942 - RNA, 19 nt, Homo sapiens
  misc_RNA (1)...(19): siRNA sense strand
aucagaagcuuugagauca

SEQ ID NO: 1619943 - RNA, 19 nt, Homo sapiens
  misc_RNA (1)...(19): siRNA sense strand
caacauucuaaaggaagua

SEQ ID NO: 1619944 - RNA, 19 nt, Homo sapiens
  misc_RNA (1)...(19): siRNA sense strand
acacuccauuaauaagguu

SEQ ID NO: 1619945 - RNA, 19 nt, Homo sapiens
  misc_RNA (1)...(19): siRNA sense strand
uaagguuuccugacagaag

SEQ ID NO: 1619946 - RNA, 19 nt, Homo sapiens
  misc_RNA (1)...(19): siRNA sense strand
cacacuccauuaauaaggu

SEQ ID NO: 1619947 - RNA, 19 nt, Homo sapiens
  misc_RNA (1)...(19): siRNA sense strand
ucucacucuucuguaauuu

SEQ ID NO: 1619948 - RNA, 19 nt, Homo sapiens
  misc_RNA (1)...(19): siRNA sense strand
cuaaacccaauguaucaga

SEQ ID NO: 1619949 - RNA, 19 nt, Homo sapiens
  misc_RNA (1)...(19): siRNA sense strand
ggucguucagguagucaaa

SEQ ID NO: 1619950 - RNA, 19 nt, Homo sapiens
  misc_RNA (1)...(19): siRNA sense strand
acaacauucuaaaggaagu

SEQ ID NO: 1619951 - RNA, 19 nt, Homo sapiens
  misc_RNA (1)...(19): siRNA sense strand
uaguagggucguucaggua

SEQ ID NO: 1619952 - RNA, 19 nt, Homo sapiens
  misc_RNA (1)...(19): siRNA sense strand
uaccaucucacucuucugu

SEQ ID NO: 1619953 - RNA, 19 nt, Homo sapiens
  misc_RNA (1)...(19): siRNA sense strand
caccggacacugcagaaau

SEQ ID NO: 1619954 - RNA, 19 nt, Homo sapiens
  misc_RNA (1)...(19): siRNA sense strand
uucacaacauucuaaagga

SEQ ID NO: 1619955 - RNA, 19 nt, Homo sapiens
  misc_RNA (1)...(19): siRNA sense strand
guagggucguucagguagu

SEQ ID NO: 1619956 - RNA, 19 nt, Homo sapiens
  misc_RNA (1)...(19): siRNA sense strand
uaaagacccugcagaggaa

SEQ ID NO: 1619957 - RNA, 19 nt, Homo sapiens
  misc_RNA (1)...(19): siRNA sense strand
ugaaggaggugaaggaaca

SEQ ID NO: 1619958 - RNA, 19 nt, Homo sapiens
  misc_RNA (1)...(19): siRNA sense strand
caacauggaugaaaaugaa

SEQ ID NO: 1619959 - RNA, 19 nt, Homo sapiens
  misc_RNA (1)...(19): siRNA sense strand
gaaaagagacaccauaaau

SEQ ID NO: 1619960 - RNA, 19 nt, Homo sapiens
  misc_RNA (1)...(19): siRNA sense strand
agagacaaguugagaaaga

SEQ ID NO: 1619961 - RNA, 19 nt, Homo sapiens
  misc_RNA (1)...(19): siRNA sense strand
ccguggagcugaagaagaa

SEQ ID NO: 1619962 - RNA, 19 nt, Homo sapiens
  misc_RNA (1)...(19): siRNA sense strand
gggagcaggugguggaaga

SEQ ID NO: 1619963 - RNA, 19 nt, Homo sapiens
  misc_RNA (1)...(19): siRNA sense strand
agaccaaccuggagaggaa

SEQ ID NO: 1619964 - RNA, 19 nt, Homo sapiens
  misc_RNA (1)...(19): siRNA sense strand
agaaagaggaaaccaauga

SEQ ID NO: 1619965 - RNA, 19 nt, Homo sapiens
  misc_RNA (1)...(19): siRNA sense strand
ggagaaaccagcagaaacu

SEQ ID NO: 1619966 - RNA, 19 nt, Homo sapiens
  misc_RNA (1)...(19): siRNA sense strand
ggaaugacagaaacauaga

SEQ ID NO: 1619967 - RNA, 19 nt, Homo sapiens
  misc_RNA (1)...(19): siRNA sense strand
aaagagacaaguugagaaa

SEQ ID NO: 1619968 - RNA, 19 nt, Homo sapiens
  misc_RNA (1)...(19): siRNA sense strand
gaauagaagaggucaccaa

SEQ ID NO: 1619969 - RNA, 19 nt, Homo sapiens
  misc_RNA (1)...(19): siRNA sense strand
gaaacgugcuugguaacag

SEQ ID NO: 1619970 - RNA, 19 nt, Homo sapiens
  misc_RNA (1)...(19): siRNA sense strand
gagaagaugacuacaacau

SEQ ID NO: 1619971 - RNA, 19 nt, Homo sapiens
  misc_RNA (1)...(19): siRNA sense strand
gaggagaagaugacuacaa

SEQ ID NO: 1619972 - RNA, 19 nt, Homo sapiens
  misc_RNA (1)...(19): siRNA sense strand
gggagcagcuugacaaaau

SEQ ID NO: 1619973 - RNA, 19 nt, Homo sapiens
  misc_RNA (1)...(19): siRNA sense strand
gaccugagccagugcauca

SEQ ID NO: 1619974 - RNA, 19 nt, Homo sapiens
  misc_RNA (1)...(19): siRNA sense strand
caaagagacaaguugagaa

SEQ ID NO: 1619975 - RNA, 19 nt, Homo sapiens
  misc_RNA (1)...(19): siRNA sense strand
gggaaugacagaaacauag

SEQ ID NO: 1619976 - RNA, 19 nt, Homo sapiens
  misc_RNA (1)...(19): siRNA sense strand
agggaaacgugcuugguaa

SEQ ID NO: 1619977 - RNA, 19 nt, Homo sapiens
  misc_RNA (1)...(19): siRNA sense strand
gagaggagaagaugacuac

SEQ ID NO: 1619978 - RNA, 19 nt, Homo sapiens
  misc_RNA (1)...(19): siRNA sense strand
agggagagcuggagaagca

SEQ ID NO: 1619979 - RNA, 19 nt, Homo sapiens
  misc_RNA (1)...(19): siRNA sense strand
ccagagaccugagugaaaa

SEQ ID NO: 1619980 - RNA, 19 nt, Homo sapiens
  misc_RNA (1)...(19): siRNA sense strand
ggaugaaaaugaagcagaa

SEQ ID NO: 1619981 - RNA, 19 nt, Homo sapiens
  misc_RNA (1)...(19): siRNA sense strand
gaaacugagaggagaagau

SEQ ID NO: 1619982 - RNA, 19 nt, Homo sapiens
  misc_RNA (1)...(19): siRNA sense strand
gagacaaguugagaaagag

SEQ ID NO: 1619983 - RNA, 19 nt, Homo sapiens
  misc_RNA (1)...(19): siRNA sense strand
gcggaaucauacacucuga

SEQ ID NO: 1619984 - RNA, 19 nt, Homo sapiens
  misc_RNA (1)...(19): siRNA sense strand
agauccagguggugaauga

SEQ ID NO: 1619985 - RNA, 19 nt, Homo sapiens
  misc_RNA (1)...(19): siRNA sense strand
ugagaaagaggaaaccaau

SEQ ID NO: 1619986 - RNA, 19 nt, Homo sapiens
  misc_RNA (1)...(19): siRNA sense strand
gugaggagcgaauagaaga

SEQ ID NO: 1619987 - RNA, 19 nt, Homo sapiens
  misc_RNA (1)...(19): siRNA sense strand
gcagaaacugagaggagaa

SEQ ID NO: 1619988 - RNA, 19 nt, Homo sapiens
  misc_RNA (1)...(19): siRNA sense strand
gagcgagaccagcuuguca

SEQ ID NO: 1619989 - RNA, 19 nt, Homo sapiens
  misc_RNA (1)...(19): siRNA sense strand
gaaagaggaaaccaaugag

SEQ ID NO: 1619990 - RNA, 19 nt, Homo sapiens
  misc_RNA (1)...(19): siRNA sense strand
gagaaagaggaaaccaaug

SEQ ID NO: 1619991 - RNA, 19 nt, Homo sapiens
  misc_RNA (1)...(19): siRNA sense strand
ggaaacgugcuugguaaca

SEQ ID NO: 1619992 - RNA, 19 nt, Homo sapiens
  misc_RNA (1)...(19): siRNA sense strand
gggcuucaacuacuggauu

SEQ ID NO: 1619993 - RNA, 19 nt, Homo sapiens
  misc_RNA (1)...(19): siRNA sense strand
gccagugcaucaaucagau

SEQ ID NO: 1619994 - RNA, 19 nt, Homo sapiens
  misc_RNA (1)...(19): siRNA sense strand
ggcuucaacuacuggauug

SEQ ID NO: 1619995 - RNA, 19 nt, Homo sapiens
  misc_RNA (1)...(19): siRNA sense strand
aauagaagaggucaccaaa

SEQ ID NO: 1619996 - RNA, 19 nt, Homo sapiens
  misc_RNA (1)...(19): siRNA sense strand
aaacugagaggagaagaug

SEQ ID NO: 1619997 - RNA, 19 nt, Homo sapiens
  misc_RNA (1)...(19): siRNA sense strand
gcaggugguggaagacaga

SEQ ID NO: 1619998 - RNA, 19 nt, Homo sapiens
  misc_RNA (1)...(19): siRNA sense strand
gaugaaggaggugaaggaa

SEQ ID NO: 1619999 - RNA, 19 nt, Homo sapiens
  misc_RNA (1)...(19): siRNA sense strand
gagacaccauaaauuuacu

SEQ ID NO: 1620000 - RNA, 19 nt, Homo sapiens
  misc_RNA (1)...(19): siRNA sense strand
aggagaagaugacuacaac

SEQ ID NO: 1620001 - RNA, 19 nt, Homo sapiens
  misc_RNA (1)...(19): siRNA sense strand
aaagaggaaaccaaugaga

SEQ ID NO: 1620002 - RNA, 19 nt, Homo sapiens
  misc_RNA (1)...(19): siRNA sense strand
uaacagcaagucccagaca

SEQ ID NO: 1620003 - RNA, 19 nt, Homo sapiens
  misc_RNA (1)...(19): siRNA sense strand
aagggaaacgugcuuggua

SEQ ID NO: 1620004 - RNA, 19 nt, Homo sapiens
  misc_RNA (1)...(19): siRNA sense strand
ggaggugaaggaacagugu

SEQ ID NO: 1620005 - RNA, 19 nt, Homo sapiens
  misc_RNA (1)...(19): siRNA sense strand
gaagggaaacgugcuuggu

SEQ ID NO: 1620006 - RNA, 19 nt, Homo sapiens
  misc_RNA (1)...(19): siRNA sense strand
gaaugacagaaacauagau

SEQ ID NO: 1620007 - RNA, 19 nt, Homo sapiens
  misc_RNA (1)...(19): siRNA sense strand
ccaggaaaauccagagaug

SEQ ID NO: 1620008 - RNA, 19 nt, Homo sapiens
  misc_RNA (1)...(19): siRNA sense strand
gauucaaagagacaaguug

SEQ ID NO: 1620009 - RNA, 19 nt, Homo sapiens
  misc_RNA (1)...(19): siRNA sense strand
ggauucaaagagacaaguu

SEQ ID NO: 1620010 - RNA, 19 nt, Homo sapiens
  misc_RNA (1)...(19): siRNA sense strand
cugcaagaccaguuaaaga

SEQ ID NO: 1620011 - RNA, 19 nt, Homo sapiens
  misc_RNA (1)...(19): siRNA sense strand
uggcagggaaugacagaaa

SEQ ID NO: 1620012 - RNA, 19 nt, Homo sapiens
  misc_RNA (1)...(19): siRNA sense strand
agaagaugacuacaacaug

SEQ ID NO: 1620013 - RNA, 19 nt, Homo sapiens
  misc_RNA (1)...(19): siRNA sense strand
gauguccuccaguuucaga

SEQ ID NO: 1620014 - RNA, 19 nt, Homo sapiens
  misc_RNA (1)...(19): siRNA sense strand
gggcgucgcagcaugaagu

SEQ ID NO: 1620015 - RNA, 19 nt, Homo sapiens
  misc_RNA (1)...(19): siRNA sense strand
cagaaaagagacaccauaa

SEQ ID NO: 1620016 - RNA, 19 nt, Homo sapiens
  misc_RNA (1)...(19): siRNA sense strand
gggagaaaccagcagaaac

SEQ ID NO: 1620017 - RNA, 19 nt, Homo sapiens
  misc_RNA (1)...(19): siRNA sense strand
gcagggaaugacagaaaca

SEQ ID NO: 1620018 - RNA, 19 nt, Homo sapiens
  misc_RNA (1)...(19): siRNA sense strand
agagacaccauaaauuuac

SEQ ID NO: 1620019 - RNA, 19 nt, Homo sapiens
  misc_RNA (1)...(19): siRNA sense strand
guccuccaguuucagaaga

SEQ ID NO: 1620020 - RNA, 19 nt, Homo sapiens
  misc_RNA (1)...(19): siRNA sense strand
ggcagggaaugacagaaac

SEQ ID NO: 1620021 - RNA, 19 nt, Homo sapiens
  misc_RNA (1)...(19): siRNA sense strand
gacuacaacauggaugaaa

SEQ ID NO: 1620022 - RNA, 19 nt, Homo sapiens
  misc_RNA (1)...(19): siRNA sense strand
agaaaccagcagaaacuga

SEQ ID NO: 1620023 - RNA, 19 nt, Homo sapiens
  misc_RNA (1)...(19): siRNA sense strand
agaggaaaccaaugagauc

SEQ ID NO: 1620024 - RNA, 19 nt, Homo sapiens
  misc_RNA (1)...(19): siRNA sense strand
gaaacgggcgucgcagcau

SEQ ID NO: 1620025 - RNA, 19 nt, Homo sapiens
  misc_RNA (1)...(19): siRNA sense strand
gagaaaccagcagaaacug

SEQ ID NO: 1620026 - RNA, 19 nt, Homo sapiens
  misc_RNA (1)...(19): siRNA sense strand
aaaggggaaugaagcugua

SEQ ID NO: 1620027 - RNA, 19 nt, Homo sapiens
  misc_RNA (1)...(19): siRNA sense strand
ggagaagaugacuacaaca

SEQ ID NO: 1620028 - RNA, 19 nt, Homo sapiens
  misc_RNA (1)...(19): siRNA sense strand
aagaggaaaccaaugagau

SEQ ID NO: 1620029 - RNA, 19 nt, Homo sapiens
  misc_RNA (1)...(19): siRNA sense strand
uccagagaccugagugaaa

SEQ ID NO: 1620030 - RNA, 19 nt, Homo sapiens
  misc_RNA (1)...(19): siRNA sense strand
uaaagacccugcagaggaa

SEQ ID NO: 1620031 - RNA, 19 nt, Homo sapiens
  misc_RNA (1)...(19): siRNA sense strand
ugaaggaggugaaggaaca

SEQ ID NO: 1620032 - RNA, 19 nt, Homo sapiens
  misc_RNA (1)...(19): siRNA sense strand
caacauggaugaaaaugaa

SEQ ID NO: 1620033 - RNA, 19 nt, Homo sapiens
  misc_RNA (1)...(19): siRNA sense strand
gaaaagagacaccauaaau

SEQ ID NO: 1620034 - RNA, 19 nt, Homo sapiens
  misc_RNA (1)...(19): siRNA sense strand
agagacaaguugagaaaga

SEQ ID NO: 1620035 - RNA, 19 nt, Homo sapiens
  misc_RNA (1)...(19): siRNA sense strand
ccguggagcugaagaagaa

SEQ ID NO: 1620036 - RNA, 19 nt, Homo sapiens
  misc_RNA (1)...(19): siRNA sense strand
gggagcaggugguggaaga

SEQ ID NO: 1620037 - RNA, 19 nt, Homo sapiens
  misc_RNA (1)...(19): siRNA sense strand
agaccaaccuggagaggaa

SEQ ID NO: 1620038 - RNA, 19 nt, Homo sapiens
  misc_RNA (1)...(19): siRNA sense strand
agaaagaggaaaccaauga

SEQ ID NO: 1620039 - RNA, 19 nt, Homo sapiens
  misc_RNA (1)...(19): siRNA sense strand
ggagaaaccagcagaaacu

SEQ ID NO: 1620040 - RNA, 19 nt, Homo sapiens
  misc_RNA (1)...(19): siRNA sense strand
ggaaugacagaaacauaga

SEQ ID NO: 1620041 - RNA, 19 nt, Homo sapiens
  misc_RNA (1)...(19): siRNA sense strand
aaagagacaaguugagaaa

SEQ ID NO: 1620042 - RNA, 19 nt, Homo sapiens
  misc_RNA (1)...(19): siRNA sense strand
gaauagaagaggucaccaa

SEQ ID NO: 1620043 - RNA, 19 nt, Homo sapiens
  misc_RNA (1)...(19): siRNA sense strand
gaaacgugcuugguaacag

SEQ ID NO: 1620044 - RNA, 19 nt, Homo sapiens
  misc_RNA (1)...(19): siRNA sense strand
gagaagaugacuacaacau

SEQ ID NO: 1620045 - RNA, 19 nt, Homo sapiens
  misc_RNA (1)...(19): siRNA sense strand
gaggagaagaugacuacaa

SEQ ID NO: 1620046 - RNA, 19 nt, Homo sapiens
  misc_RNA (1)...(19): siRNA sense strand
gggagcagcuugacaaaau

SEQ ID NO: 1620047 - RNA, 19 nt, Homo sapiens
  misc_RNA (1)...(19): siRNA sense strand
gaccugagccagugcauca

SEQ ID NO: 1620048 - RNA, 19 nt, Homo sapiens
  misc_RNA (1)...(19): siRNA sense strand
caaagagacaaguugagaa

SEQ ID NO: 1620049 - RNA, 19 nt, Homo sapiens
  misc_RNA (1)...(19): siRNA sense strand
gggaaugacagaaacauag

SEQ ID NO: 1620050 - RNA, 19 nt, Homo sapiens
  misc_RNA (1)...(19): siRNA sense strand
agggaaacgugcuugguaa

SEQ ID NO: 1620051 - RNA, 19 nt, Homo sapiens
  misc_RNA (1)...(19): siRNA sense strand
gagaggagaagaugacuac

SEQ ID NO: 1620052 - RNA, 19 nt, Homo sapiens
  misc_RNA (1)...(19): siRNA sense strand
agggagagcuggagaagca

SEQ ID NO: 1620053 - RNA, 19 nt, Homo sapiens
  misc_RNA (1)...(19): siRNA sense strand
ccagagaccugagugaaaa

SEQ ID NO: 1620054 - RNA, 19 nt, Homo sapiens
  misc_RNA (1)...(19): siRNA sense strand
ggaugaaaaugaagcagaa

SEQ ID NO: 1620055 - RNA, 19 nt, Homo sapiens
  misc_RNA (1)...(19): siRNA sense strand
gaaacugagaggagaagau

SEQ ID NO: 1620056 - RNA, 19 nt, Homo sapiens
  misc_RNA (1)...(19): siRNA sense strand
gagacaaguugagaaagag

SEQ ID NO: 1620057 - RNA, 19 nt, Homo sapiens
  misc_RNA (1)...(19): siRNA sense strand
gcggaaucauacacucuga

SEQ ID NO: 1620058 - RNA, 19 nt, Homo sapiens
  misc_RNA (1)...(19): siRNA sense strand
agauccagguggugaauga

SEQ ID NO: 1620059 - RNA, 19 nt, Homo sapiens
  misc_RNA (1)...(19): siRNA sense strand
ugagaaagaggaaaccaau

SEQ ID NO: 1620060 - RNA, 19 nt, Homo sapiens
  misc_RNA (1)...(19): siRNA sense strand
gugaggagcgaauagaaga

SEQ ID NO: 1620061 - RNA, 19 nt, Homo sapiens
  misc_RNA (1)...(19): siRNA sense strand
gcagaaacugagaggagaa

SEQ ID NO: 1620062 - RNA, 19 nt, Homo sapiens
  misc_RNA (1)...(19): siRNA sense strand
gagcgagaccagcuuguca

SEQ ID NO: 1620063 - RNA, 19 nt, Homo sapiens
  misc_RNA (1)...(19): siRNA sense strand
gaaagaggaaaccaaugag

SEQ ID NO: 1620064 - RNA, 19 nt, Homo sapiens
  misc_RNA (1)...(19): siRNA sense strand
gagaaagaggaaaccaaug

SEQ ID NO: 1620065 - RNA, 19 nt, Homo sapiens
  misc_RNA (1)...(19): siRNA sense strand
ggaaacgugcuugguaaca

SEQ ID NO: 1620066 - RNA, 19 nt, Homo sapiens
  misc_RNA (1)...(19): siRNA sense strand
gggcuucaacuacuggauu

SEQ ID NO: 1620067 - RNA, 19 nt, Homo sapiens
  misc_RNA (1)...(19): siRNA sense strand
gccagugcaucaaucagau

SEQ ID NO: 1620068 - RNA, 19 nt, Homo sapiens
  misc_RNA (1)...(19): siRNA sense strand
ggcuucaacuacuggauug

SEQ ID NO: 1620069 - RNA, 19 nt, Homo sapiens
  misc_RNA (1)...(19): siRNA sense strand
aauagaagaggucaccaaa

SEQ ID NO: 1620070 - RNA, 19 nt, Homo sapiens
  misc_RNA (1)...(19): siRNA sense strand
aaacugagaggagaagaug

SEQ ID NO: 1620071 - RNA, 19 nt, Homo sapiens
  misc_RNA (1)...(19): siRNA sense strand
gcaggugguggaagacaga

SEQ ID NO: 1620072 - RNA, 19 nt, Homo sapiens
  misc_RNA (1)...(19): siRNA sense strand
gaugaaggaggugaaggaa

SEQ ID NO: 1620073 - RNA, 19 nt, Homo sapiens
  misc_RNA (1)...(19): siRNA sense strand
gagacaccauaaauuuacu

SEQ ID NO: 1620074 - RNA, 19 nt, Homo sapiens
  misc_RNA (1)...(19): siRNA sense strand
aggagaagaugacuacaac

SEQ ID NO: 1620075 - RNA, 19 nt, Homo sapiens
  misc_RNA (1)...(19): siRNA sense strand
aaagaggaaaccaaugaga

SEQ ID NO: 1620076 - RNA, 19 nt, Homo sapiens
  misc_RNA (1)...(19): siRNA sense strand
uaacagcaagucccagaca

SEQ ID NO: 1620077 - RNA, 19 nt, Homo sapiens
  misc_RNA (1)...(19): siRNA sense strand
aagggaaacgugcuuggua

SEQ ID NO: 1620078 - RNA, 19 nt, Homo sapiens
  misc_RNA (1)...(19): siRNA sense strand
ggaggugaaggaacagugu

SEQ ID NO: 1620079 - RNA, 19 nt, Homo sapiens
  misc_RNA (1)...(19): siRNA sense strand
gaagggaaacgugcuuggu

SEQ ID NO: 1620080 - RNA, 19 nt, Homo sapiens
  misc_RNA (1)...(19): siRNA sense strand
gaaugacagaaacauagau

SEQ ID NO: 1620081 - RNA, 19 nt, Homo sapiens
  misc_RNA (1)...(19): siRNA sense strand
ccaggaaaauccagagaug

SEQ ID NO: 1620082 - RNA, 19 nt, Homo sapiens
  misc_RNA (1)...(19): siRNA sense strand
gauucaaagagacaaguug

SEQ ID NO: 1620083 - RNA, 19 nt, Homo sapiens
  misc_RNA (1)...(19): siRNA sense strand
ggauucaaagagacaaguu

SEQ ID NO: 1620084 - RNA, 19 nt, Homo sapiens
  misc_RNA (1)...(19): siRNA sense strand
cugcaagaccaguuaaaga

SEQ ID NO: 1620085 - RNA, 19 nt, Homo sapiens
  misc_RNA (1)...(19): siRNA sense strand
uggcagggaaugacagaaa

SEQ ID NO: 1620086 - RNA, 19 nt, Homo sapiens
  misc_RNA (1)...(19): siRNA sense strand
agaagaugacuacaacaug

SEQ ID NO: 1620087 - RNA, 19 nt, Homo sapiens
  misc_RNA (1)...(19): siRNA sense strand
gauguccuccaguuucaga

SEQ ID NO: 1620088 - RNA, 19 nt, Homo sapiens
  misc_RNA (1)...(19): siRNA sense strand
gggcgucgcagcaugaagu

SEQ ID NO: 1620089 - RNA, 19 nt, Homo sapiens
  misc_RNA (1)...(19): siRNA sense strand
cagaaaagagacaccauaa

SEQ ID NO: 1620090 - RNA, 19 nt, Homo sapiens
  misc_RNA (1)...(19): siRNA sense strand
gggagaaaccagcagaaac

SEQ ID NO: 1620091 - RNA, 19 nt, Homo sapiens
  misc_RNA (1)...(19): siRNA sense strand
gcagggaaugacagaaaca

SEQ ID NO: 1620092 - RNA, 19 nt, Homo sapiens
  misc_RNA (1)...(19): siRNA sense strand
agagacaccauaaauuuac

SEQ ID NO: 1620093 - RNA, 19 nt, Homo sapiens
  misc_RNA (1)...(19): siRNA sense strand
guccuccaguuucagaaga

SEQ ID NO: 1620094 - RNA, 19 nt, Homo sapiens
  misc_RNA (1)...(19): siRNA sense strand
ggcagggaaugacagaaac

SEQ ID NO: 1620095 - RNA, 19 nt, Homo sapiens
  misc_RNA (1)...(19): siRNA sense strand
gacuacaacauggaugaaa

SEQ ID NO: 1620096 - RNA, 19 nt, Homo sapiens
  misc_RNA (1)...(19): siRNA sense strand
agaaaccagcagaaacuga

SEQ ID NO: 1620097 - RNA, 19 nt, Homo sapiens
  misc_RNA (1)...(19): siRNA sense strand
agaggaaaccaaugagauc

SEQ ID NO: 1620098 - RNA, 19 nt, Homo sapiens
  misc_RNA (1)...(19): siRNA sense strand
gaaacgggcgucgcagcau

SEQ ID NO: 1620099 - RNA, 19 nt, Homo sapiens
  misc_RNA (1)...(19): siRNA sense strand
gagaaaccagcagaaacug

SEQ ID NO: 1620100 - RNA, 19 nt, Homo sapiens
  misc_RNA (1)...(19): siRNA sense strand
aaaggggaaugaagcugua

SEQ ID NO: 1620101 - RNA, 19 nt, Homo sapiens
  misc_RNA (1)...(19): siRNA sense strand
ggagaagaugacuacaaca

SEQ ID NO: 1620102 - RNA, 19 nt, Homo sapiens
  misc_RNA (1)...(19): siRNA sense strand
aagaggaaaccaaugagau

SEQ ID NO: 1620103 - RNA, 19 nt, Homo sapiens
  misc_RNA (1)...(19): siRNA sense strand
uccagagaccugagugaaa

SEQ ID NO: 1620104 - RNA, 19 nt, Homo sapiens
  misc_RNA (1)...(19): siRNA sense strand
ggaaggcgauggagucaua

SEQ ID NO: 1620105 - RNA, 19 nt, Homo sapiens
  misc_RNA (1)...(19): siRNA sense strand
gaacagcucaguuaccuua

SEQ ID NO: 1620106 - RNA, 19 nt, Homo sapiens
  misc_RNA (1)...(19): siRNA sense strand
gagcagggauugcaacuuu

SEQ ID NO: 1620107 - RNA, 19 nt, Homo sapiens
  misc_RNA (1)...(19): siRNA sense strand
gaagauaucugugcuuuua

SEQ ID NO: 1620108 - RNA, 19 nt, Homo sapiens
  misc_RNA (1)...(19): siRNA sense strand
gguggaaacuuguucauaa

SEQ ID NO: 1620109 - RNA, 19 nt, Homo sapiens
  misc_RNA (1)...(19): siRNA sense strand
ggauggauauugacaguga

SEQ ID NO: 1620110 - RNA, 19 nt, Homo sapiens
  misc_RNA (1)...(19): siRNA sense strand
gaaguggacgucaagguua

SEQ ID NO: 1620111 - RNA, 19 nt, Homo sapiens
  misc_RNA (1)...(19): siRNA sense strand
cagaggcccugaacagaua

SEQ ID NO: 1620112 - RNA, 19 nt, Homo sapiens
  misc_RNA (1)...(19): siRNA sense strand
gaaauacaaugaagcuuac

SEQ ID NO: 1620113 - RNA, 19 nt, Homo sapiens
  misc_RNA (1)...(19): siRNA sense strand
gaaggaggccgcuggcuuu

SEQ ID NO: 1620114 - RNA, 19 nt, Homo sapiens
  misc_RNA (1)...(19): siRNA sense strand
gaaaagggauaggggauua

SEQ ID NO: 1620115 - RNA, 19 nt, Homo sapiens
  misc_RNA (1)...(19): siRNA sense strand
ggaaggaaguggacgucaa

SEQ ID NO: 1620116 - RNA, 19 nt, Homo sapiens
  misc_RNA (1)...(19): siRNA sense strand
gcaaggagcaguaugaaag

SEQ ID NO: 1620117 - RNA, 19 nt, Homo sapiens
  misc_RNA (1)...(19): siRNA sense strand
aaacacgcauucuuucuga

SEQ ID NO: 1620118 - RNA, 19 nt, Homo sapiens
  misc_RNA (1)...(19): siRNA sense strand
aaacacaucuuugcaaaca

SEQ ID NO: 1620119 - RNA, 19 nt, Homo sapiens
  misc_RNA (1)...(19): siRNA sense strand
caacuugucucuggaagga

SEQ ID NO: 1620120 - RNA, 19 nt, Homo sapiens
  misc_RNA (1)...(19): siRNA sense strand
ucagaauccuugaccgaua

SEQ ID NO: 1620121 - RNA, 19 nt, Homo sapiens
  misc_RNA (1)...(19): siRNA sense strand
ggacaagccacguacagaa

SEQ ID NO: 1620122 - RNA, 19 nt, Homo sapiens
  misc_RNA (1)...(19): siRNA sense strand
ggaaucugccauggaauua

SEQ ID NO: 1620123 - RNA, 19 nt, Homo sapiens
  misc_RNA (1)...(19): siRNA sense strand
ggaaguggacgucaagguu

SEQ ID NO: 1620124 - RNA, 19 nt, Homo sapiens
  misc_RNA (1)...(19): siRNA sense strand
agacacagauucaaacaca

SEQ ID NO: 1620125 - RNA, 19 nt, Homo sapiens
  misc_RNA (1)...(19): siRNA sense strand
caaaucacaucccaacgau

SEQ ID NO: 1620126 - RNA, 19 nt, Homo sapiens
  misc_RNA (1)...(19): siRNA sense strand
gaaguugucugccucuacu

SEQ ID NO: 1620127 - RNA, 19 nt, Homo sapiens
  misc_RNA (1)...(19): siRNA sense strand
gauaggggauuaccacuuu

SEQ ID NO: 1620128 - RNA, 19 nt, Homo sapiens
  misc_RNA (1)...(19): siRNA sense strand
gacaggagcacaucuucua

SEQ ID NO: 1620129 - RNA, 19 nt, Homo sapiens
  misc_RNA (1)...(19): siRNA sense strand
ggaggccgcuggcuuucuu

SEQ ID NO: 1620130 - RNA, 19 nt, Homo sapiens
  misc_RNA (1)...(19): siRNA sense strand
ucaguguuguuguucuuua

SEQ ID NO: 1620131 - RNA, 19 nt, Homo sapiens
  misc_RNA (1)...(19): siRNA sense strand
cgaaagagcccagguauac

SEQ ID NO: 1620132 - RNA, 19 nt, Homo sapiens
  misc_RNA (1)...(19): siRNA sense strand
aagaagauaucugugcuuu

SEQ ID NO: 1620133 - RNA, 19 nt, Homo sapiens
  misc_RNA (1)...(19): siRNA sense strand
gauugcaacuuucaugauc

SEQ ID NO: 1620134 - RNA, 19 nt, Homo sapiens
  misc_RNA (1)...(19): siRNA sense strand
gaugugaaauacaaugaag

SEQ ID NO: 1620135 - RNA, 19 nt, Homo sapiens
  misc_RNA (1)...(19): siRNA sense strand
aaacaaagccacccaaacu

SEQ ID NO: 1620136 - RNA, 19 nt, Homo sapiens
  misc_RNA (1)...(19): siRNA sense strand
cgacgcaccucucgauuac

SEQ ID NO: 1620137 - RNA, 19 nt, Homo sapiens
  misc_RNA (1)...(19): siRNA sense strand
ccaggaugguggaaacuug

SEQ ID NO: 1620138 - RNA, 19 nt, Homo sapiens
  misc_RNA (1)...(19): siRNA sense strand
gcagcaagucgucauguug

SEQ ID NO: 1620139 - RNA, 19 nt, Homo sapiens
  misc_RNA (1)...(19): siRNA sense strand
agacuucaguguuguuguu

SEQ ID NO: 1620140 - RNA, 19 nt, Homo sapiens
  misc_RNA (1)...(19): siRNA sense strand
ucucggaucuugaaaccuu

SEQ ID NO: 1620141 - RNA, 19 nt, Homo sapiens
  misc_RNA (1)...(19): siRNA sense strand
gguaggaucagaagauaug

SEQ ID NO: 1620142 - RNA, 19 nt, Homo sapiens
  misc_RNA (1)...(19): siRNA sense strand
aaucugccauggaauuaaa

SEQ ID NO: 1620143 - RNA, 19 nt, Homo sapiens
  misc_RNA (1)...(19): siRNA sense strand
caugguuccugaugugaaa

SEQ ID NO: 1620144 - RNA, 19 nt, Homo sapiens
  misc_RNA (1)...(19): siRNA sense strand
gaagacacagauucaaaca

SEQ ID NO: 1620145 - RNA, 19 nt, Homo sapiens
  misc_RNA (1)...(19): siRNA sense strand
ggacgucaagguuauuuca

SEQ ID NO: 1620146 - RNA, 19 nt, Homo sapiens
  misc_RNA (1)...(19): siRNA sense strand
agacugaaacgcaaacuga

SEQ ID NO: 1620147 - RNA, 19 nt, Homo sapiens
  misc_RNA (1)...(19): siRNA sense strand
uguggaaucugccauggaa

SEQ ID NO: 1620148 - RNA, 19 nt, Homo sapiens
  misc_RNA (1)...(19): siRNA sense strand
gaucccaucauuacuguug

SEQ ID NO: 1620149 - RNA, 19 nt, Homo sapiens
  misc_RNA (1)...(19): siRNA sense strand
ccgacaggauggauauuga

SEQ ID NO: 1620150 - RNA, 19 nt, Homo sapiens
  misc_RNA (1)...(19): siRNA sense strand
gaaacaaagccacccaaac

SEQ ID NO: 1620151 - RNA, 19 nt, Homo sapiens
  misc_RNA (1)...(19): siRNA sense strand
caagacugaagaauaugua

SEQ ID NO: 1620152 - RNA, 19 nt, Homo sapiens
  misc_RNA (1)...(19): siRNA sense strand
gaaggaaguggacgucaag

SEQ ID NO: 1620153 - RNA, 19 nt, Homo sapiens
  misc_RNA (1)...(19): siRNA sense strand
ccaaaucacaucccaacga

SEQ ID NO: 1620154 - RNA, 19 nt, Homo sapiens
  misc_RNA (1)...(19): siRNA sense strand
gagaaguugucugccucua

SEQ ID NO: 1620155 - RNA, 19 nt, Homo sapiens
  misc_RNA (1)...(19): siRNA sense strand
ccagaaguuuggauucaag

SEQ ID NO: 1620156 - RNA, 19 nt, Homo sapiens
  misc_RNA (1)...(19): siRNA sense strand
gcuuacauuucauuucugu

SEQ ID NO: 1620157 - RNA, 19 nt, Homo sapiens
  misc_RNA (1)...(19): siRNA sense strand
gaagcuuacauuucauuuc

SEQ ID NO: 1620158 - RNA, 19 nt, Homo sapiens
  misc_RNA (1)...(19): siRNA sense strand
uaaugcugcucuuuuguua

SEQ ID NO: 1620159 - RNA, 19 nt, Homo sapiens
  misc_RNA (1)...(19): siRNA sense strand
aacuuuagaucccaucauu

SEQ ID NO: 1620160 - RNA, 19 nt, Homo sapiens
  misc_RNA (1)...(19): siRNA sense strand
gagaagagcagggauugca

SEQ ID NO: 1620161 - RNA, 19 nt, Homo sapiens
  misc_RNA (1)...(19): siRNA sense strand
gaaaagcugcugcucaaga

SEQ ID NO: 1620162 - RNA, 19 nt, Homo sapiens
  misc_RNA (1)...(19): siRNA sense strand
ggaagccucagcuggagaa

SEQ ID NO: 1620163 - RNA, 19 nt, Homo sapiens
  misc_RNA (1)...(19): siRNA sense strand
acaccuagcuugcuuucag

SEQ ID NO: 1620164 - RNA, 19 nt, Homo sapiens
  misc_RNA (1)...(19): siRNA sense strand
ggcagcaagucgucauguu

SEQ ID NO: 1620165 - RNA, 19 nt, Homo sapiens
  misc_RNA (1)...(19): siRNA sense strand
gaaucugccauggaauuaa

SEQ ID NO: 1620166 - RNA, 19 nt, Homo sapiens
  misc_RNA (1)...(19): siRNA sense strand
gggaacagcucaguuaccu

SEQ ID NO: 1620167 - RNA, 19 nt, Homo sapiens
  misc_RNA (1)...(19): siRNA sense strand
ccgacgcaccucucgauua

SEQ ID NO: 1620168 - RNA, 19 nt, Homo sapiens
  misc_RNA (1)...(19): siRNA sense strand
acacaucuuugcaaacaag

SEQ ID NO: 1620169 - RNA, 19 nt, Homo sapiens
  misc_RNA (1)...(19): siRNA sense strand
caggauggauauugacagu

SEQ ID NO: 1620170 - RNA, 19 nt, Homo sapiens
  misc_RNA (1)...(19): siRNA sense strand
guucaggugcucaggaauu

SEQ ID NO: 1620171 - RNA, 19 nt, Homo sapiens
  misc_RNA (1)...(19): siRNA sense strand
gauaaauauuacccauugg

SEQ ID NO: 1620172 - RNA, 19 nt, Homo sapiens
  misc_RNA (1)...(19): siRNA sense strand
uaccagaaguuuggauuca

SEQ ID NO: 1620173 - RNA, 19 nt, Homo sapiens
  misc_RNA (1)...(19): siRNA sense strand
uacccagacuucaguguug

SEQ ID NO: 1620174 - RNA, 19 nt, Homo sapiens
  misc_RNA (1)...(19): siRNA sense strand
ccuuauaccucucggaucu

SEQ ID NO: 1620175 - RNA, 19 nt, Homo sapiens
  misc_RNA (1)...(19): siRNA sense strand
gcuguggaccagaguauug

SEQ ID NO: 1620176 - RNA, 19 nt, Homo sapiens
  misc_RNA (1)...(19): siRNA sense strand
aaacgcaaacugauuguca

SEQ ID NO: 1620177 - RNA, 19 nt, Homo sapiens
  misc_RNA (1)...(19): siRNA sense strand
gguagagagugaggaggaa

SEQ ID NO: 1620178 - RNA, 19 nt, Homo sapiens
  misc_RNA (1)...(19): siRNA sense strand
gagccaggaugguggaaac

SEQ ID NO: 1620179 - RNA, 19 nt, Homo sapiens
  misc_RNA (1)...(19): siRNA sense strand
guacaccugccucucauuc

SEQ ID NO: 1620180 - RNA, 19 nt, Homo sapiens
  misc_RNA (1)...(19): siRNA sense strand
guggaaagaagauaucugu

SEQ ID NO: 1620181 - RNA, 19 nt, Homo sapiens
  misc_RNA (1)...(19): siRNA sense strand
gggauugcaacuuucauga

SEQ ID NO: 1620182 - RNA, 19 nt, Homo sapiens
  misc_RNA (1)...(19): siRNA sense strand
ggauuuauggagccaaaga

SEQ ID NO: 1620183 - RNA, 19 nt, Homo sapiens
  misc_RNA (1)...(19): siRNA sense strand
cagaauccuugaccgauac

SEQ ID NO: 1620184 - RNA, 19 nt, Homo sapiens
  misc_RNA (1)...(19): siRNA sense strand
gcagggauugcaacuuuca

SEQ ID NO: 1620185 - RNA, 19 nt, Homo sapiens
  misc_RNA (1)...(19): siRNA sense strand
aaucacaucccaacgauca

SEQ ID NO: 1620186 - RNA, 19 nt, Homo sapiens
  misc_RNA (1)...(19): siRNA sense strand
ccgaaagagcccagguaua

SEQ ID NO: 1620187 - RNA, 19 nt, Homo sapiens
  misc_RNA (1)...(19): siRNA sense strand
ugaaacaaagccacccaaa

SEQ ID NO: 1620188 - RNA, 19 nt, Homo sapiens
  misc_RNA (1)...(19): siRNA sense strand
gaucuugaaaccuuauauc

SEQ ID NO: 1620189 - RNA, 19 nt, Homo sapiens
  misc_RNA (1)...(19): siRNA sense strand
gacaccagaccaccaaguu

SEQ ID NO: 1620190 - RNA, 19 nt, Homo sapiens
  misc_RNA (1)...(19): siRNA sense strand
ggaucaaguuguuaaugcu

SEQ ID NO: 1620191 - RNA, 19 nt, Homo sapiens
  misc_RNA (1)...(19): siRNA sense strand
guacccagacuucaguguu

SEQ ID NO: 1620192 - RNA, 19 nt, Homo sapiens
  misc_RNA (1)...(19): siRNA sense strand
gcaguacccagacuucagu

SEQ ID NO: 1620193 - RNA, 19 nt, Homo sapiens
  misc_RNA (1)...(19): siRNA sense strand
uagaucccaucauuacugu

SEQ ID NO: 1620194 - RNA, 19 nt, Homo sapiens
  misc_RNA (1)...(19): siRNA sense strand
guaaacacgcauucuuucu

SEQ ID NO: 1620195 - RNA, 19 nt, Homo sapiens
  misc_RNA (1)...(19): siRNA sense strand
gccaaagaaggaggaauuu

SEQ ID NO: 1620196 - RNA, 19 nt, Homo sapiens
  misc_RNA (1)...(19): siRNA sense strand
gauggauauugacagugaa

SEQ ID NO: 1620197 - RNA, 19 nt, Homo sapiens
  misc_RNA (1)...(19): siRNA sense strand
agauaaagcaggagguaga

SEQ ID NO: 1620198 - RNA, 19 nt, Homo sapiens
  misc_RNA (1)...(19): siRNA sense strand
guggaaacuuguucauaac

SEQ ID NO: 1620199 - RNA, 19 nt, Homo sapiens
  misc_RNA (1)...(19): siRNA sense strand
uaaacacgcauucuuucug

SEQ ID NO: 1620200 - RNA, 19 nt, Homo sapiens
  misc_RNA (1)...(19): siRNA sense strand
uugcaacuuucaugaucua

SEQ ID NO: 1620201 - RNA, 19 nt, Homo sapiens
  misc_RNA (1)...(19): siRNA sense strand
ugucaggacuucagaaucc

SEQ ID NO: 1620202 - RNA, 19 nt, Homo sapiens
  misc_RNA (1)...(19): siRNA sense strand
gaaggacacaaagccgaaa

SEQ ID NO: 1620203 - RNA, 19 nt, Homo sapiens
  misc_RNA (1)...(19): siRNA sense strand
gccgcuggcuuucuugaca

SEQ ID NO: 1620204 - RNA, 19 nt, Homo sapiens
  misc_RNA (1)...(19): siRNA sense strand
ggaaggcgauggagucaua

SEQ ID NO: 1620205 - RNA, 19 nt, Homo sapiens
  misc_RNA (1)...(19): siRNA sense strand
gagcagggauugcaacuuu

SEQ ID NO: 1620206 - RNA, 19 nt, Homo sapiens
  misc_RNA (1)...(19): siRNA sense strand
gaagauaucugugcuuuua

SEQ ID NO: 1620207 - RNA, 19 nt, Homo sapiens
  misc_RNA (1)...(19): siRNA sense strand
gguggaaacuuguucauaa

SEQ ID NO: 1620208 - RNA, 19 nt, Homo sapiens
  misc_RNA (1)...(19): siRNA sense strand
ggauggauauugacaguga

SEQ ID NO: 1620209 - RNA, 19 nt, Homo sapiens
  misc_RNA (1)...(19): siRNA sense strand
gaaguggacgucaagguua

SEQ ID NO: 1620210 - RNA, 19 nt, Homo sapiens
  misc_RNA (1)...(19): siRNA sense strand
cagaggcccugaacagaua

SEQ ID NO: 1620211 - RNA, 19 nt, Homo sapiens
  misc_RNA (1)...(19): siRNA sense strand
gaaauacaaugaagcuuac

SEQ ID NO: 1620212 - RNA, 19 nt, Homo sapiens
  misc_RNA (1)...(19): siRNA sense strand
gaaggaggccgcuggcuuu

SEQ ID NO: 1620213 - RNA, 19 nt, Homo sapiens
  misc_RNA (1)...(19): siRNA sense strand
gaaaagggauaggggauua

SEQ ID NO: 1620214 - RNA, 19 nt, Homo sapiens
  misc_RNA (1)...(19): siRNA sense strand
ggaaggaaguggacgucaa

SEQ ID NO: 1620215 - RNA, 19 nt, Homo sapiens
  misc_RNA (1)...(19): siRNA sense strand
aaacacaucuuugcaaaca

SEQ ID NO: 1620216 - RNA, 19 nt, Homo sapiens
  misc_RNA (1)...(19): siRNA sense strand
aaacacgcauucuuucuga

SEQ ID NO: 1620217 - RNA, 19 nt, Homo sapiens
  misc_RNA (1)...(19): siRNA sense strand
caacuugucucuggaagga

SEQ ID NO: 1620218 - RNA, 19 nt, Homo sapiens
  misc_RNA (1)...(19): siRNA sense strand
ucagaauccuugaccgaua

SEQ ID NO: 1620219 - RNA, 19 nt, Homo sapiens
  misc_RNA (1)...(19): siRNA sense strand
ggacaagccacguacagaa

SEQ ID NO: 1620220 - RNA, 19 nt, Homo sapiens
  misc_RNA (1)...(19): siRNA sense strand
ggaaucugccauggaauua

SEQ ID NO: 1620221 - RNA, 19 nt, Homo sapiens
  misc_RNA (1)...(19): siRNA sense strand
ggaaguggacgucaagguu

SEQ ID NO: 1620222 - RNA, 19 nt, Homo sapiens
  misc_RNA (1)...(19): siRNA sense strand
agacacagauucaaacaca

SEQ ID NO: 1620223 - RNA, 19 nt, Homo sapiens
  misc_RNA (1)...(19): siRNA sense strand
caaaucacaucccaacgau

SEQ ID NO: 1620224 - RNA, 19 nt, Homo sapiens
  misc_RNA (1)...(19): siRNA sense strand
gaaguugucugccucuacu

SEQ ID NO: 1620225 - RNA, 19 nt, Homo sapiens
  misc_RNA (1)...(19): siRNA sense strand
gauaggggauuaccacuuu

SEQ ID NO: 1620226 - RNA, 19 nt, Homo sapiens
  misc_RNA (1)...(19): siRNA sense strand
gacaggagcacaucuucua

SEQ ID NO: 1620227 - RNA, 19 nt, Homo sapiens
  misc_RNA (1)...(19): siRNA sense strand
ggaggccgcuggcuuucuu

SEQ ID NO: 1620228 - RNA, 19 nt, Homo sapiens
  misc_RNA (1)...(19): siRNA sense strand
ucaguguuguuguucuuua

SEQ ID NO: 1620229 - RNA, 19 nt, Homo sapiens
  misc_RNA (1)...(19): siRNA sense strand
cgaaagagcccagguauac

SEQ ID NO: 1620230 - RNA, 19 nt, Homo sapiens
  misc_RNA (1)...(19): siRNA sense strand
aagaagauaucugugcuuu

SEQ ID NO: 1620231 - RNA, 19 nt, Homo sapiens
  misc_RNA (1)...(19): siRNA sense strand
gauugcaacuuucaugauc

SEQ ID NO: 1620232 - RNA, 19 nt, Homo sapiens
  misc_RNA (1)...(19): siRNA sense strand
gaugugaaauacaaugaag

SEQ ID NO: 1620233 - RNA, 19 nt, Homo sapiens
  misc_RNA (1)...(19): siRNA sense strand
aaacaaagccacccaaacu

SEQ ID NO: 1620234 - RNA, 19 nt, Homo sapiens
  misc_RNA (1)...(19): siRNA sense strand
cgacgcaccucucgauuac

SEQ ID NO: 1620235 - RNA, 19 nt, Homo sapiens
  misc_RNA (1)...(19): siRNA sense strand
ccaggaugguggaaacuug

SEQ ID NO: 1620236 - RNA, 19 nt, Homo sapiens
  misc_RNA (1)...(19): siRNA sense strand
aaucugccauggaauuaaa

SEQ ID NO: 1620237 - RNA, 19 nt, Homo sapiens
  misc_RNA (1)...(19): siRNA sense strand
agacuucaguguuguuguu

SEQ ID NO: 1620238 - RNA, 19 nt, Homo sapiens
  misc_RNA (1)...(19): siRNA sense strand
ucucggaucuugaaaccuu

SEQ ID NO: 1620239 - RNA, 19 nt, Homo sapiens
  misc_RNA (1)...(19): siRNA sense strand
gguaggaucagaagauaug

SEQ ID NO: 1620240 - RNA, 19 nt, Homo sapiens
  misc_RNA (1)...(19): siRNA sense strand
caugguuccugaugugaaa

SEQ ID NO: 1620241 - RNA, 19 nt, Homo sapiens
  misc_RNA (1)...(19): siRNA sense strand
gaagacacagauucaaaca

SEQ ID NO: 1620242 - RNA, 19 nt, Homo sapiens
  misc_RNA (1)...(19): siRNA sense strand
uguggaaucugccauggaa

SEQ ID NO: 1620243 - RNA, 19 nt, Homo sapiens
  misc_RNA (1)...(19): siRNA sense strand
ggacgucaagguuauuuca

SEQ ID NO: 1620244 - RNA, 19 nt, Homo sapiens
  misc_RNA (1)...(19): siRNA sense strand
agacugaaacgcaaacuga

SEQ ID NO: 1620245 - RNA, 19 nt, Homo sapiens
  misc_RNA (1)...(19): siRNA sense strand
gaucccaucauuacuguug

SEQ ID NO: 1620246 - RNA, 19 nt, Homo sapiens
  misc_RNA (1)...(19): siRNA sense strand
ccgacaggauggauauuga

SEQ ID NO: 1620247 - RNA, 19 nt, Homo sapiens
  misc_RNA (1)...(19): siRNA sense strand
gaaacaaagccacccaaac

SEQ ID NO: 1620248 - RNA, 19 nt, Homo sapiens
  misc_RNA (1)...(19): siRNA sense strand
caagacugaagaauaugua

SEQ ID NO: 1620249 - RNA, 19 nt, Homo sapiens
  misc_RNA (1)...(19): siRNA sense strand
gaaggaaguggacgucaag

SEQ ID NO: 1620250 - RNA, 19 nt, Homo sapiens
  misc_RNA (1)...(19): siRNA sense strand
ccaaaucacaucccaacga

SEQ ID NO: 1620251 - RNA, 19 nt, Homo sapiens
  misc_RNA (1)...(19): siRNA sense strand
gagaaguugucugccucua

SEQ ID NO: 1620252 - RNA, 19 nt, Homo sapiens
  misc_RNA (1)...(19): siRNA sense strand
ccagaaguuuggauucaag

SEQ ID NO: 1620253 - RNA, 19 nt, Homo sapiens
  misc_RNA (1)...(19): siRNA sense strand
gcuuacauuucauuucugu

SEQ ID NO: 1620254 - RNA, 19 nt, Homo sapiens
  misc_RNA (1)...(19): siRNA sense strand
gaagcuuacauuucauuuc

SEQ ID NO: 1620255 - RNA, 19 nt, Homo sapiens
  misc_RNA (1)...(19): siRNA sense strand
uaaugcugcucuuuuguua

SEQ ID NO: 1620256 - RNA, 19 nt, Homo sapiens
  misc_RNA (1)...(19): siRNA sense strand
aacuuuagaucccaucauu

SEQ ID NO: 1620257 - RNA, 19 nt, Homo sapiens
  misc_RNA (1)...(19): siRNA sense strand
gagaagagcagggauugca

SEQ ID NO: 1620258 - RNA, 19 nt, Homo sapiens
  misc_RNA (1)...(19): siRNA sense strand
gaaaagcugcugcucaaga

SEQ ID NO: 1620259 - RNA, 19 nt, Homo sapiens
  misc_RNA (1)...(19): siRNA sense strand
ggaagccucagcuggagaa

SEQ ID NO: 1620260 - RNA, 19 nt, Homo sapiens
  misc_RNA (1)...(19): siRNA sense strand
acaccuagcuugcuuucag

SEQ ID NO: 1620261 - RNA, 19 nt, Homo sapiens
  misc_RNA (1)...(19): siRNA sense strand
gaaucugccauggaauuaa

SEQ ID NO: 1620262 - RNA, 19 nt, Homo sapiens
  misc_RNA (1)...(19): siRNA sense strand
caggauggauauugacagu

SEQ ID NO: 1620263 - RNA, 19 nt, Homo sapiens
  misc_RNA (1)...(19): siRNA sense strand
ccgacgcaccucucgauua

SEQ ID NO: 1620264 - RNA, 19 nt, Homo sapiens
  misc_RNA (1)...(19): siRNA sense strand
acacaucuuugcaaacaag

SEQ ID NO: 1620265 - RNA, 19 nt, Homo sapiens
  misc_RNA (1)...(19): siRNA sense strand
guucaggugcucaggaauu

SEQ ID NO: 1620266 - RNA, 19 nt, Homo sapiens
  misc_RNA (1)...(19): siRNA sense strand
gauaaauauuacccauugg

SEQ ID NO: 1620267 - RNA, 19 nt, Homo sapiens
  misc_RNA (1)...(19): siRNA sense strand
uaccagaaguuuggauuca

SEQ ID NO: 1620268 - RNA, 19 nt, Homo sapiens
  misc_RNA (1)...(19): siRNA sense strand
uacccagacuucaguguug

SEQ ID NO: 1620269 - RNA, 19 nt, Homo sapiens
  misc_RNA (1)...(19): siRNA sense strand
ccuuauaccucucggaucu

SEQ ID NO: 1620270 - RNA, 19 nt, Homo sapiens
  misc_RNA (1)...(19): siRNA sense strand
gcuguggaccagaguauug

SEQ ID NO: 1620271 - RNA, 19 nt, Homo sapiens
  misc_RNA (1)...(19): siRNA sense strand
aaacgcaaacugauuguca

SEQ ID NO: 1620272 - RNA, 19 nt, Homo sapiens
  misc_RNA (1)...(19): siRNA sense strand
gguagagagugaggaggaa

SEQ ID NO: 1620273 - RNA, 19 nt, Homo sapiens
  misc_RNA (1)...(19): siRNA sense strand
gagccaggaugguggaaac

SEQ ID NO: 1620274 - RNA, 19 nt, Homo sapiens
  misc_RNA (1)...(19): siRNA sense strand
guggaaagaagauaucugu

SEQ ID NO: 1620275 - RNA, 19 nt, Homo sapiens
  misc_RNA (1)...(19): siRNA sense strand
gggauugcaacuuucauga

SEQ ID NO: 1620276 - RNA, 19 nt, Homo sapiens
  misc_RNA (1)...(19): siRNA sense strand
ggauuuauggagccaaaga

SEQ ID NO: 1620277 - RNA, 19 nt, Homo sapiens
  misc_RNA (1)...(19): siRNA sense strand
guacaccugccucucauuc

SEQ ID NO: 1620278 - RNA, 19 nt, Homo sapiens
  misc_RNA (1)...(19): siRNA sense strand
cagaauccuugaccgauac

SEQ ID NO: 1620279 - RNA, 19 nt, Homo sapiens
  misc_RNA (1)...(19): siRNA sense strand
gcagggauugcaacuuuca

SEQ ID NO: 1620280 - RNA, 19 nt, Homo sapiens
  misc_RNA (1)...(19): siRNA sense strand
aaucacaucccaacgauca

SEQ ID NO: 1620281 - RNA, 19 nt, Homo sapiens
  misc_RNA (1)...(19): siRNA sense strand
ccgaaagagcccagguaua

SEQ ID NO: 1620282 - RNA, 19 nt, Homo sapiens
  misc_RNA (1)...(19): siRNA sense strand
ugaaacaaagccacccaaa

SEQ ID NO: 1620283 - RNA, 19 nt, Homo sapiens
  misc_RNA (1)...(19): siRNA sense strand
gaucuugaaaccuuauauc

SEQ ID NO: 1620284 - RNA, 19 nt, Homo sapiens
  misc_RNA (1)...(19): siRNA sense strand
gacaccagaccaccaaguu

SEQ ID NO: 1620285 - RNA, 19 nt, Homo sapiens
  misc_RNA (1)...(19): siRNA sense strand
ggaucaaguuguuaaugcu

SEQ ID NO: 1620286 - RNA, 19 nt, Homo sapiens
  misc_RNA (1)...(19): siRNA sense strand
guacccagacuucaguguu

SEQ ID NO: 1620287 - RNA, 19 nt, Homo sapiens
  misc_RNA (1)...(19): siRNA sense strand
gcaguacccagacuucagu

SEQ ID NO: 1620288 - RNA, 19 nt, Homo sapiens
  misc_RNA (1)...(19): siRNA sense strand
uagaucccaucauuacugu

SEQ ID NO: 1620289 - RNA, 19 nt, Homo sapiens
  misc_RNA (1)...(19): siRNA sense strand
guaaacacgcauucuuucu

SEQ ID NO: 1620290 - RNA, 19 nt, Homo sapiens
  misc_RNA (1)...(19): siRNA sense strand
gccaaagaaggaggaauuu

SEQ ID NO: 1620291 - RNA, 19 nt, Homo sapiens
  misc_RNA (1)...(19): siRNA sense strand
gauggauauugacagugaa

SEQ ID NO: 1620292 - RNA, 19 nt, Homo sapiens
  misc_RNA (1)...(19): siRNA sense strand
agauaaagcaggagguaga

SEQ ID NO: 1620293 - RNA, 19 nt, Homo sapiens
  misc_RNA (1)...(19): siRNA sense strand
gccgcuggcuuucuugaca

SEQ ID NO: 1620294 - RNA, 19 nt, Homo sapiens
  misc_RNA (1)...(19): siRNA sense strand
uaaacacgcauucuuucug

SEQ ID NO: 1620295 - RNA, 19 nt, Homo sapiens
  misc_RNA (1)...(19): siRNA sense strand
uugcaacuuucaugaucua

SEQ ID NO: 1620296 - RNA, 19 nt, Homo sapiens
  misc_RNA (1)...(19): siRNA sense strand
ugucaggacuucagaaucc

SEQ ID NO: 1620297 - RNA, 19 nt, Homo sapiens
  misc_RNA (1)...(19): siRNA sense strand
guggaaacuuguucauaac

SEQ ID NO: 1620298 - RNA, 19 nt, Homo sapiens
  misc_RNA (1)...(19): siRNA sense strand
gaaggacacaaagccgaaa

SEQ ID NO: 1620299 - RNA, 19 nt, Homo sapiens
  misc_RNA (1)...(19): siRNA sense strand
agccucagcuggagaagga

SEQ ID NO: 1620300 - RNA, 19 nt, Homo sapiens
  misc_RNA (1)...(19): siRNA sense strand
aguauugucagcccuuaua

SEQ ID NO: 1620301 - RNA, 19 nt, Homo sapiens
  misc_RNA (1)...(19): siRNA sense strand
agaguauugucagcccuua

SEQ ID NO: 1620302 - RNA, 19 nt, Homo sapiens
  misc_RNA (1)...(19): siRNA sense strand
uugguaggaucagaagaua

SEQ ID NO: 1620303 - RNA, 19 nt, Homo sapiens
  misc_RNA (1)...(19): siRNA sense strand
gugagcaucuacgaggaaa

SEQ ID NO: 1620304 - RNA, 19 nt, Homo sapiens
  misc_RNA (1)...(19): siRNA sense strand
caaaguagcuuguauauuc

SEQ ID NO: 1620305 - RNA, 19 nt, Homo sapiens
  misc_RNA (1)...(19): siRNA sense strand
ugaaauaccuguugguuaa

SEQ ID NO: 1620306 - RNA, 19 nt, Homo sapiens
  misc_RNA (1)...(19): siRNA sense strand
gagaagauguuucgaguca

SEQ ID NO: 1620307 - RNA, 19 nt, Homo sapiens
  misc_RNA (1)...(19): siRNA sense strand
ggaauccucugcaggcaua

SEQ ID NO: 1620308 - RNA, 19 nt, Homo sapiens
  misc_RNA (1)...(19): siRNA sense strand
guacauccuuggaaucuuu

SEQ ID NO: 1620309 - RNA, 19 nt, Homo sapiens
  misc_RNA (1)...(19): siRNA sense strand
agaaagggcuaauaaguug

SEQ ID NO: 1620310 - RNA, 19 nt, Homo sapiens
  misc_RNA (1)...(19): siRNA sense strand
gaagauguuucgagucaau

SEQ ID NO: 1620311 - RNA, 19 nt, Homo sapiens
  misc_RNA (1)...(19): siRNA sense strand
gaugaaaguccucaaguuu

SEQ ID NO: 1620312 - RNA, 19 nt, Homo sapiens
  misc_RNA (1)...(19): siRNA sense strand
caaaguacauccuuggaau

SEQ ID NO: 1620313 - RNA, 19 nt, Homo sapiens
  misc_RNA (1)...(19): siRNA sense strand
ggagaaaugacuacggaua

SEQ ID NO: 1620314 - RNA, 19 nt, Homo sapiens
  misc_RNA (1)...(19): siRNA sense strand
gcagaccaccugaauauga

SEQ ID NO: 1620315 - RNA, 19 nt, Homo sapiens
  misc_RNA (1)...(19): siRNA sense strand
uuacagauaccgcuaauaa

SEQ ID NO: 1620316 - RNA, 19 nt, Homo sapiens
  misc_RNA (1)...(19): siRNA sense strand
agaaaugacuacggauaua

SEQ ID NO: 1620317 - RNA, 19 nt, Homo sapiens
  misc_RNA (1)...(19): siRNA sense strand
gcuaauaaauugcaguagu

SEQ ID NO: 1620318 - RNA, 19 nt, Homo sapiens
  misc_RNA (1)...(19): siRNA sense strand
gcuaauaaguuggugaaau

SEQ ID NO: 1620319 - RNA, 19 nt, Homo sapiens
  misc_RNA (1)...(19): siRNA sense strand
gagagaaguggcaguaauu

SEQ ID NO: 1620320 - RNA, 19 nt, Homo sapiens
  misc_RNA (1)...(19): siRNA sense strand
gagucaaucugaaagaaau

SEQ ID NO: 1620321 - RNA, 19 nt, Homo sapiens
  misc_RNA (1)...(19): siRNA sense strand
caagaaagggcuaauaagu

SEQ ID NO: 1620322 - RNA, 19 nt, Homo sapiens
  misc_RNA (1)...(19): siRNA sense strand
gcucaucacagacgaguuu

SEQ ID NO: 1620323 - RNA, 19 nt, Homo sapiens
  misc_RNA (1)...(19): siRNA sense strand
gagaaaugacuacggauau

SEQ ID NO: 1620324 - RNA, 19 nt, Homo sapiens
  misc_RNA (1)...(19): siRNA sense strand
cagcagaccaccugaauau

SEQ ID NO: 1620325 - RNA, 19 nt, Homo sapiens
  misc_RNA (1)...(19): siRNA sense strand
agauaccgcuaauaaauug

SEQ ID NO: 1620326 - RNA, 19 nt, Homo sapiens
  misc_RNA (1)...(19): siRNA sense strand
gugaaauaccuguugguua

SEQ ID NO: 1620327 - RNA, 19 nt, Homo sapiens
  misc_RNA (1)...(19): siRNA sense strand
ccacgagacuagcaagaug

SEQ ID NO: 1620328 - RNA, 19 nt, Homo sapiens
  misc_RNA (1)...(19): siRNA sense strand
ugagagaaguggcaguaau

SEQ ID NO: 1620329 - RNA, 19 nt, Homo sapiens
  misc_RNA (1)...(19): siRNA sense strand
ugaugaauauuucccagaa

SEQ ID NO: 1620330 - RNA, 19 nt, Homo sapiens
  misc_RNA (1)...(19): siRNA sense strand
gcuacacucuggagaagau

SEQ ID NO: 1620331 - RNA, 19 nt, Homo sapiens
  misc_RNA (1)...(19): siRNA sense strand
uacaagaaagggcuaauaa

SEQ ID NO: 1620332 - RNA, 19 nt, Homo sapiens
  misc_RNA (1)...(19): siRNA sense strand
caagcugggucuccucaug

SEQ ID NO: 1620333 - RNA, 19 nt, Homo sapiens
  misc_RNA (1)...(19): siRNA sense strand
gaugagagaaguggcagua

SEQ ID NO: 1620334 - RNA, 19 nt, Homo sapiens
  misc_RNA (1)...(19): siRNA sense strand
gcaaaguagcuuguauauu

SEQ ID NO: 1620335 - RNA, 19 nt, Homo sapiens
  misc_RNA (1)...(19): siRNA sense strand
cuaauaaauugcaguaguc

SEQ ID NO: 1620336 - RNA, 19 nt, Homo sapiens
  misc_RNA (1)...(19): siRNA sense strand
cagauaccgcuaauaaauu

SEQ ID NO: 1620337 - RNA, 19 nt, Homo sapiens
  misc_RNA (1)...(19): siRNA sense strand
acagauaccgcuaauaaau

SEQ ID NO: 1620338 - RNA, 19 nt, Homo sapiens
  misc_RNA (1)...(19): siRNA sense strand
agaugaaaguccucaaguu

SEQ ID NO: 1620339 - RNA, 19 nt, Homo sapiens
  misc_RNA (1)...(19): siRNA sense strand
gaaaugacuacggauauag

SEQ ID NO: 1620340 - RNA, 19 nt, Homo sapiens
  misc_RNA (1)...(19): siRNA sense strand
gcagggugcagaagaaaga

SEQ ID NO: 1620341 - RNA, 19 nt, Homo sapiens
  misc_RNA (1)...(19): siRNA sense strand
aagaaagggcuaauaaguu

SEQ ID NO: 1620342 - RNA, 19 nt, Homo sapiens
  misc_RNA (1)...(19): siRNA sense strand
caucaaacgcucagacaug

SEQ ID NO: 1620343 - RNA, 19 nt, Homo sapiens
  misc_RNA (1)...(19): siRNA sense strand
gggaggugcugcgcaaguu

SEQ ID NO: 1620344 - RNA, 19 nt, Homo sapiens
  misc_RNA (1)...(19): siRNA sense strand
guuaaggaccagacaaaga

SEQ ID NO: 1620345 - RNA, 19 nt, Homo sapiens
  misc_RNA (1)...(19): siRNA sense strand
ugaaaguccucaaguuugc

SEQ ID NO: 1620346 - RNA, 19 nt, Homo sapiens
  misc_RNA (1)...(19): siRNA sense strand
caagcuacacucuggagaa

SEQ ID NO: 1620347 - RNA, 19 nt, Homo sapiens
  misc_RNA (1)...(19): siRNA sense strand
gcgaggcaguggagaugga

SEQ ID NO: 1620348 - RNA, 19 nt, Homo sapiens
  misc_RNA (1)...(19): siRNA sense strand
cagacgaguuugugaagca

SEQ ID NO: 1620349 - RNA, 19 nt, Homo sapiens
  misc_RNA (1)...(19): siRNA sense strand
agagaaguggcaguaauua

SEQ ID NO: 1620350 - RNA, 19 nt, Homo sapiens
  misc_RNA (1)...(19): siRNA sense strand
agacaaagauccccaucaa

SEQ ID NO: 1620351 - RNA, 19 nt, Homo sapiens
  misc_RNA (1)...(19): siRNA sense strand
gagacuagcaagaugaaag

SEQ ID NO: 1620352 - RNA, 19 nt, Homo sapiens
  misc_RNA (1)...(19): siRNA sense strand
uuacaagaaagggcuaaua

SEQ ID NO: 1620353 - RNA, 19 nt, Homo sapiens
  misc_RNA (1)...(19): siRNA sense strand
ggugaaauaccuguugguu

SEQ ID NO: 1620354 - RNA, 19 nt, Homo sapiens
  misc_RNA (1)...(19): siRNA sense strand
cgagucaaucugaaagaaa

SEQ ID NO: 1620355 - RNA, 19 nt, Homo sapiens
  misc_RNA (1)...(19): siRNA sense strand
gaaaucauugaacgagcaa

SEQ ID NO: 1620356 - RNA, 19 nt, Homo sapiens
  misc_RNA (1)...(19): siRNA sense strand
uuaaggaccagacaaagau

SEQ ID NO: 1620357 - RNA, 19 nt, Homo sapiens
  misc_RNA (1)...(19): siRNA sense strand
agaaguggcaguaauuaca

SEQ ID NO: 1620358 - RNA, 19 nt, Homo sapiens
  misc_RNA (1)...(19): siRNA sense strand
gggcuaauaaguuggugaa

SEQ ID NO: 1620359 - RNA, 19 nt, Homo sapiens
  misc_RNA (1)...(19): siRNA sense strand
uagcuuguauauucucauc

SEQ ID NO: 1620360 - RNA, 19 nt, Homo sapiens
  misc_RNA (1)...(19): siRNA sense strand
uaacagcagaccaccugaa

SEQ ID NO: 1620361 - RNA, 19 nt, Homo sapiens
  misc_RNA (1)...(19): siRNA sense strand
ucgagucaaucugaaagaa

SEQ ID NO: 1620362 - RNA, 19 nt, Homo sapiens
  misc_RNA (1)...(19): siRNA sense strand
gaaguggcaguaauuacag

SEQ ID NO: 1620363 - RNA, 19 nt, Homo sapiens
  misc_RNA (1)...(19): siRNA sense strand
cagaccaccugaauaugag

SEQ ID NO: 1620364 - RNA, 19 nt, Homo sapiens
  misc_RNA (1)...(19): siRNA sense strand
caucagcacucaggaaucc

SEQ ID NO: 1620365 - RNA, 19 nt, Homo sapiens
  misc_RNA (1)...(19): siRNA sense strand
caagaugaaaguccucaag

SEQ ID NO: 1620366 - RNA, 19 nt, Homo sapiens
  misc_RNA (1)...(19): siRNA sense strand
gagaaguggcaguaauuac

SEQ ID NO: 1620367 - RNA, 19 nt, Homo sapiens
  misc_RNA (1)...(19): siRNA sense strand
ucauggugauucugagugu

SEQ ID NO: 1620368 - RNA, 19 nt, Homo sapiens
  misc_RNA (1)...(19): siRNA sense strand
ccauggagccaaaguacau

SEQ ID NO: 1620369 - RNA, 19 nt, Homo sapiens
  misc_RNA (1)...(19): siRNA sense strand
ccagugaggcugucaucug

SEQ ID NO: 1620370 - RNA, 19 nt, Homo sapiens
  misc_RNA (1)...(19): siRNA sense strand
gcuuguauauucucaucag

SEQ ID NO: 1620371 - RNA, 19 nt, Homo sapiens
  misc_RNA (1)...(19): siRNA sense strand
ccgcuaauaaauugcagua

SEQ ID NO: 1620372 - RNA, 19 nt, Homo sapiens
  misc_RNA (1)...(19): siRNA sense strand
gcuccuaccacgagacuag

SEQ ID NO: 1620373 - RNA, 19 nt, Homo sapiens
  misc_RNA (1)...(19): siRNA sense strand
guuuacagauaccgcuaau

SEQ ID NO: 1620374 - RNA, 19 nt, Homo sapiens
  misc_RNA (1)...(19): siRNA sense strand
aggcaguuauggccaauca

SEQ ID NO: 1620375 - RNA, 19 nt, Homo sapiens
  misc_RNA (1)...(19): siRNA sense strand
caguaguccuucccaugga

SEQ ID NO: 1620376 - RNA, 19 nt, Homo sapiens
  misc_RNA (1)...(19): siRNA sense strand
ggaggugcugcgcaaguug

SEQ ID NO: 1620377 - RNA, 19 nt, Homo sapiens
  misc_RNA (1)...(19): siRNA sense strand
cagcugagggugucaugug

SEQ ID NO: 1620378 - RNA, 19 nt, Homo sapiens
  misc_RNA (1)...(19): siRNA sense strand
acagcagaccaccugaaua

SEQ ID NO: 1620379 - RNA, 19 nt, Homo sapiens
  misc_RNA (1)...(19): siRNA sense strand
gaaauaccuguugguuaag

SEQ ID NO: 1620380 - RNA, 19 nt, Homo sapiens
  misc_RNA (1)...(19): siRNA sense strand
uacagauaccgcuaauaaa

SEQ ID NO: 1620381 - RNA, 19 nt, Homo sapiens
  misc_RNA (1)...(19): siRNA sense strand
ucauugaacgagcaagcua

SEQ ID NO: 1620382 - RNA, 19 nt, Homo sapiens
  misc_RNA (1)...(19): siRNA sense strand
caaggcaguuauggccaau

SEQ ID NO: 1620383 - RNA, 19 nt, Homo sapiens
  misc_RNA (1)...(19): siRNA sense strand
auaaauugcaguaguccuu

SEQ ID NO: 1620384 - RNA, 19 nt, Homo sapiens
  misc_RNA (1)...(19): siRNA sense strand
acaagaaagggcuaauaag

SEQ ID NO: 1620385 - RNA, 19 nt, Homo sapiens
  misc_RNA (1)...(19): siRNA sense strand
aagcuacacucuggagaag

SEQ ID NO: 1620386 - RNA, 19 nt, Homo sapiens
  misc_RNA (1)...(19): siRNA sense strand
augaaaguccucaaguuug

SEQ ID NO: 1620387 - RNA, 19 nt, Homo sapiens
  misc_RNA (1)...(19): siRNA sense strand
gcaagaugaaaguccucaa

SEQ ID NO: 1620388 - RNA, 19 nt, Homo sapiens
  misc_RNA (1)...(19): siRNA sense strand
caaaguagcuuguauauuc

SEQ ID NO: 1620389 - RNA, 19 nt, Homo sapiens
  misc_RNA (1)...(19): siRNA sense strand
ugaaauaccuguugguuaa

SEQ ID NO: 1620390 - RNA, 19 nt, Homo sapiens
  misc_RNA (1)...(19): siRNA sense strand
gagaagauguuucgaguca

SEQ ID NO: 1620391 - RNA, 19 nt, Homo sapiens
  misc_RNA (1)...(19): siRNA sense strand
ggaauccucugcaggcaua

SEQ ID NO: 1620392 - RNA, 19 nt, Homo sapiens
  misc_RNA (1)...(19): siRNA sense strand
agaaagggcuaauaaguug

SEQ ID NO: 1620393 - RNA, 19 nt, Homo sapiens
  misc_RNA (1)...(19): siRNA sense strand
gaagauguuucgagucaau

SEQ ID NO: 1620394 - RNA, 19 nt, Homo sapiens
  misc_RNA (1)...(19): siRNA sense strand
gaugaaaguccucaaguuu

SEQ ID NO: 1620395 - RNA, 19 nt, Homo sapiens
  misc_RNA (1)...(19): siRNA sense strand
ggagaaaugacuacggaua

SEQ ID NO: 1620396 - RNA, 19 nt, Homo sapiens
  misc_RNA (1)...(19): siRNA sense strand
gcagaccaccugaauauga

SEQ ID NO: 1620397 - RNA, 19 nt, Homo sapiens
  misc_RNA (1)...(19): siRNA sense strand
agaaaugacuacggauaua

SEQ ID NO: 1620398 - RNA, 19 nt, Homo sapiens
  misc_RNA (1)...(19): siRNA sense strand
gcuaauaaguuggugaaau

SEQ ID NO: 1620399 - RNA, 19 nt, Homo sapiens
  misc_RNA (1)...(19): siRNA sense strand
gagagaaguggcaguaauu

SEQ ID NO: 1620400 - RNA, 19 nt, Homo sapiens
  misc_RNA (1)...(19): siRNA sense strand
gagucaaucugaaagaaau

SEQ ID NO: 1620401 - RNA, 19 nt, Homo sapiens
  misc_RNA (1)...(19): siRNA sense strand
caagaaagggcuaauaagu

SEQ ID NO: 1620402 - RNA, 19 nt, Homo sapiens
  misc_RNA (1)...(19): siRNA sense strand
gcucaucacagacgaguuu

SEQ ID NO: 1620403 - RNA, 19 nt, Homo sapiens
  misc_RNA (1)...(19): siRNA sense strand
gagaaaugacuacggauau

SEQ ID NO: 1620404 - RNA, 19 nt, Homo sapiens
  misc_RNA (1)...(19): siRNA sense strand
cagcagaccaccugaauau

SEQ ID NO: 1620405 - RNA, 19 nt, Homo sapiens
  misc_RNA (1)...(19): siRNA sense strand
gugaaauaccuguugguua

SEQ ID NO: 1620406 - RNA, 19 nt, Homo sapiens
  misc_RNA (1)...(19): siRNA sense strand
ccacgagacuagcaagaug

SEQ ID NO: 1620407 - RNA, 19 nt, Homo sapiens
  misc_RNA (1)...(19): siRNA sense strand
ugaugaauauuucccagaa

SEQ ID NO: 1620408 - RNA, 19 nt, Homo sapiens
  misc_RNA (1)...(19): siRNA sense strand
ugagagaaguggcaguaau

SEQ ID NO: 1620409 - RNA, 19 nt, Homo sapiens
  misc_RNA (1)...(19): siRNA sense strand
gcuacacucuggagaagau

SEQ ID NO: 1620410 - RNA, 19 nt, Homo sapiens
  misc_RNA (1)...(19): siRNA sense strand
uacaagaaagggcuaauaa

SEQ ID NO: 1620411 - RNA, 19 nt, Homo sapiens
  misc_RNA (1)...(19): siRNA sense strand
gaugagagaaguggcagua

SEQ ID NO: 1620412 - RNA, 19 nt, Homo sapiens
  misc_RNA (1)...(19): siRNA sense strand
caagcugggucuccucaug

SEQ ID NO: 1620413 - RNA, 19 nt, Homo sapiens
  misc_RNA (1)...(19): siRNA sense strand
gcaaaguagcuuguauauu

SEQ ID NO: 1620414 - RNA, 19 nt, Homo sapiens
  misc_RNA (1)...(19): siRNA sense strand
gaaaugacuacggauauag

SEQ ID NO: 1620415 - RNA, 19 nt, Homo sapiens
  misc_RNA (1)...(19): siRNA sense strand
gcagggugcagaagaaaga

SEQ ID NO: 1620416 - RNA, 19 nt, Homo sapiens
  misc_RNA (1)...(19): siRNA sense strand
agaugaaaguccucaaguu

SEQ ID NO: 1620417 - RNA, 19 nt, Homo sapiens
  misc_RNA (1)...(19): siRNA sense strand
aagaaagggcuaauaaguu

SEQ ID NO: 1620418 - RNA, 19 nt, Homo sapiens
  misc_RNA (1)...(19): siRNA sense strand
caucaaacgcucagacaug

SEQ ID NO: 1620419 - RNA, 19 nt, Homo sapiens
  misc_RNA (1)...(19): siRNA sense strand
gggaggugcugcgcaaguu

SEQ ID NO: 1620420 - RNA, 19 nt, Homo sapiens
  misc_RNA (1)...(19): siRNA sense strand
guuaaggaccagacaaaga

SEQ ID NO: 1620421 - RNA, 19 nt, Homo sapiens
  misc_RNA (1)...(19): siRNA sense strand
ugaaaguccucaaguuugc

SEQ ID NO: 1620422 - RNA, 19 nt, Homo sapiens
  misc_RNA (1)...(19): siRNA sense strand
agagaaguggcaguaauua

SEQ ID NO: 1620423 - RNA, 19 nt, Homo sapiens
  misc_RNA (1)...(19): siRNA sense strand
gcgaggcaguggagaugga

SEQ ID NO: 1620424 - RNA, 19 nt, Homo sapiens
  misc_RNA (1)...(19): siRNA sense strand
cagacgaguuugugaagca

SEQ ID NO: 1620425 - RNA, 19 nt, Homo sapiens
  misc_RNA (1)...(19): siRNA sense strand
caagcuacacucuggagaa

SEQ ID NO: 1620426 - RNA, 19 nt, Homo sapiens
  misc_RNA (1)...(19): siRNA sense strand
uuacaagaaagggcuaaua

SEQ ID NO: 1620427 - RNA, 19 nt, Homo sapiens
  misc_RNA (1)...(19): siRNA sense strand
gagacuagcaagaugaaag

SEQ ID NO: 1620428 - RNA, 19 nt, Homo sapiens
  misc_RNA (1)...(19): siRNA sense strand
agacaaagauccccaucaa

SEQ ID NO: 1620429 - RNA, 19 nt, Homo sapiens
  misc_RNA (1)...(19): siRNA sense strand
ggugaaauaccuguugguu

SEQ ID NO: 1620430 - RNA, 19 nt, Homo sapiens
  misc_RNA (1)...(19): siRNA sense strand
cgagucaaucugaaagaaa

SEQ ID NO: 1620431 - RNA, 19 nt, Homo sapiens
  misc_RNA (1)...(19): siRNA sense strand
gaaaucauugaacgagcaa

SEQ ID NO: 1620432 - RNA, 19 nt, Homo sapiens
  misc_RNA (1)...(19): siRNA sense strand
uuaaggaccagacaaagau

SEQ ID NO: 1620433 - RNA, 19 nt, Homo sapiens
  misc_RNA (1)...(19): siRNA sense strand
gggcuaauaaguuggugaa

SEQ ID NO: 1620434 - RNA, 19 nt, Homo sapiens
  misc_RNA (1)...(19): siRNA sense strand
agaaguggcaguaauuaca

SEQ ID NO: 1620435 - RNA, 19 nt, Homo sapiens
  misc_RNA (1)...(19): siRNA sense strand
uagcuuguauauucucauc

SEQ ID NO: 1620436 - RNA, 19 nt, Homo sapiens
  misc_RNA (1)...(19): siRNA sense strand
uaacagcagaccaccugaa

SEQ ID NO: 1620437 - RNA, 19 nt, Homo sapiens
  misc_RNA (1)...(19): siRNA sense strand
gaaguggcaguaauuacag

SEQ ID NO: 1620438 - RNA, 19 nt, Homo sapiens
  misc_RNA (1)...(19): siRNA sense strand
cagaccaccugaauaugag

SEQ ID NO: 1620439 - RNA, 19 nt, Homo sapiens
  misc_RNA (1)...(19): siRNA sense strand
ucgagucaaucugaaagaa

SEQ ID NO: 1620440 - RNA, 19 nt, Homo sapiens
  misc_RNA (1)...(19): siRNA sense strand
gagaaguggcaguaauuac

SEQ ID NO: 1620441 - RNA, 19 nt, Homo sapiens
  misc_RNA (1)...(19): siRNA sense strand
caagaugaaaguccucaag

SEQ ID NO: 1620442 - RNA, 19 nt, Homo sapiens
  misc_RNA (1)...(19): siRNA sense strand
caucagcacucaggaaucc

SEQ ID NO: 1620443 - RNA, 19 nt, Homo sapiens
  misc_RNA (1)...(19): siRNA sense strand
ucauggugauucugagugu

SEQ ID NO: 1620444 - RNA, 19 nt, Homo sapiens
  misc_RNA (1)...(19): siRNA sense strand
ccagugaggcugucaucug

SEQ ID NO: 1620445 - RNA, 19 nt, Homo sapiens
  misc_RNA (1)...(19): siRNA sense strand
gcuuguauauucucaucag

SEQ ID NO: 1620446 - RNA, 19 nt, Homo sapiens
  misc_RNA (1)...(19): siRNA sense strand
gcuccuaccacgagacuag

SEQ ID NO: 1620447 - RNA, 19 nt, Homo sapiens
  misc_RNA (1)...(19): siRNA sense strand
ggaggugcugcgcaaguug

SEQ ID NO: 1620448 - RNA, 19 nt, Homo sapiens
  misc_RNA (1)...(19): siRNA sense strand
acagcagaccaccugaaua

SEQ ID NO: 1620449 - RNA, 19 nt, Homo sapiens
  misc_RNA (1)...(19): siRNA sense strand
gaaauaccuguugguuaag

SEQ ID NO: 1620450 - RNA, 19 nt, Homo sapiens
  misc_RNA (1)...(19): siRNA sense strand
ucauugaacgagcaagcua

SEQ ID NO: 1620451 - RNA, 19 nt, Homo sapiens
  misc_RNA (1)...(19): siRNA sense strand
acaagaaagggcuaauaag

SEQ ID NO: 1620452 - RNA, 19 nt, Homo sapiens
  misc_RNA (1)...(19): siRNA sense strand
aagcuacacucuggagaag

SEQ ID NO: 1620453 - RNA, 19 nt, Homo sapiens
  misc_RNA (1)...(19): siRNA sense strand
augaaaguccucaaguuug

SEQ ID NO: 1620454 - RNA, 19 nt, Homo sapiens
  misc_RNA (1)...(19): siRNA sense strand
gcaagaugaaaguccucaa

SEQ ID NO: 1620455 - RNA, 19 nt, Homo sapiens
  misc_RNA (1)...(19): siRNA sense strand
caaaguagcuuguauauuc

SEQ ID NO: 1620456 - RNA, 19 nt, Homo sapiens
  misc_RNA (1)...(19): siRNA sense strand
ugaaauaccuguugguuaa

SEQ ID NO: 1620457 - RNA, 19 nt, Homo sapiens
  misc_RNA (1)...(19): siRNA sense strand
gagaagauguuucgaguca

SEQ ID NO: 1620458 - RNA, 19 nt, Homo sapiens
  misc_RNA (1)...(19): siRNA sense strand
ggaauccucugcaggcaua

SEQ ID NO: 1620459 - RNA, 19 nt, Homo sapiens
  misc_RNA (1)...(19): siRNA sense strand
guacauccuuggaaucuuu

SEQ ID NO: 1620460 - RNA, 19 nt, Homo sapiens
  misc_RNA (1)...(19): siRNA sense strand
agaaagggcuaauaaguug

SEQ ID NO: 1620461 - RNA, 19 nt, Homo sapiens
  misc_RNA (1)...(19): siRNA sense strand
gaagauguuucgagucaau

SEQ ID NO: 1620462 - RNA, 19 nt, Homo sapiens
  misc_RNA (1)...(19): siRNA sense strand
gaugaaaguccucaaguuu

SEQ ID NO: 1620463 - RNA, 19 nt, Homo sapiens
  misc_RNA (1)...(19): siRNA sense strand
caaaguacauccuuggaau

SEQ ID NO: 1620464 - RNA, 19 nt, Homo sapiens
  misc_RNA (1)...(19): siRNA sense strand
ggagaaaugacuacggaua

SEQ ID NO: 1620465 - RNA, 19 nt, Homo sapiens
  misc_RNA (1)...(19): siRNA sense strand
gcagaccaccugaauauga

SEQ ID NO: 1620466 - RNA, 19 nt, Homo sapiens
  misc_RNA (1)...(19): siRNA sense strand
uuacagauaccgcuaauaa

SEQ ID NO: 1620467 - RNA, 19 nt, Homo sapiens
  misc_RNA (1)...(19): siRNA sense strand
agaaaugacuacggauaua

SEQ ID NO: 1620468 - RNA, 19 nt, Homo sapiens
  misc_RNA (1)...(19): siRNA sense strand
gcuaauaaauugcaguagu

SEQ ID NO: 1620469 - RNA, 19 nt, Homo sapiens
  misc_RNA (1)...(19): siRNA sense strand
gcuaauaaguuggugaaau

SEQ ID NO: 1620470 - RNA, 19 nt, Homo sapiens
  misc_RNA (1)...(19): siRNA sense strand
gagagaaguggcaguaauu

SEQ ID NO: 1620471 - RNA, 19 nt, Homo sapiens
  misc_RNA (1)...(19): siRNA sense strand
gagucaaucugaaagaaau

SEQ ID NO: 1620472 - RNA, 19 nt, Homo sapiens
  misc_RNA (1)...(19): siRNA sense strand
caagaaagggcuaauaagu

SEQ ID NO: 1620473 - RNA, 19 nt, Homo sapiens
  misc_RNA (1)...(19): siRNA sense strand
gcucaucacagacgaguuu

SEQ ID NO: 1620474 - RNA, 19 nt, Homo sapiens
  misc_RNA (1)...(19): siRNA sense strand
gagaaaugacuacggauau

SEQ ID NO: 1620475 - RNA, 19 nt, Homo sapiens
  misc_RNA (1)...(19): siRNA sense strand
cagcagaccaccugaauau

SEQ ID NO: 1620476 - RNA, 19 nt, Homo sapiens
  misc_RNA (1)...(19): siRNA sense strand
agauaccgcuaauaaauug

SEQ ID NO: 1620477 - RNA, 19 nt, Homo sapiens
  misc_RNA (1)...(19): siRNA sense strand
gugaaauaccuguugguua

SEQ ID NO: 1620478 - RNA, 19 nt, Homo sapiens
  misc_RNA (1)...(19): siRNA sense strand
ccacgagacuagcaagaug

SEQ ID NO: 1620479 - RNA, 19 nt, Homo sapiens
  misc_RNA (1)...(19): siRNA sense strand
ugagagaaguggcaguaau

SEQ ID NO: 1620480 - RNA, 19 nt, Homo sapiens
  misc_RNA (1)...(19): siRNA sense strand
ugaugaauauuucccagaa

SEQ ID NO: 1620481 - RNA, 19 nt, Homo sapiens
  misc_RNA (1)...(19): siRNA sense strand
gcuacacucuggagaagau

SEQ ID NO: 1620482 - RNA, 19 nt, Homo sapiens
  misc_RNA (1)...(19): siRNA sense strand
uacaagaaagggcuaauaa

SEQ ID NO: 1620483 - RNA, 19 nt, Homo sapiens
  misc_RNA (1)...(19): siRNA sense strand
caagcugggucuccucaug

SEQ ID NO: 1620484 - RNA, 19 nt, Homo sapiens
  misc_RNA (1)...(19): siRNA sense strand
gaugagagaaguggcagua

SEQ ID NO: 1620485 - RNA, 19 nt, Homo sapiens
  misc_RNA (1)...(19): siRNA sense strand
gcaaaguagcuuguauauu

SEQ ID NO: 1620486 - RNA, 19 nt, Homo sapiens
  misc_RNA (1)...(19): siRNA sense strand
cuaauaaauugcaguaguc

SEQ ID NO: 1620487 - RNA, 19 nt, Homo sapiens
  misc_RNA (1)...(19): siRNA sense strand
cagauaccgcuaauaaauu

SEQ ID NO: 1620488 - RNA, 19 nt, Homo sapiens
  misc_RNA (1)...(19): siRNA sense strand
acagauaccgcuaauaaau

SEQ ID NO: 1620489 - RNA, 19 nt, Homo sapiens
  misc_RNA (1)...(19): siRNA sense strand
agaugaaaguccucaaguu

SEQ ID NO: 1620490 - RNA, 19 nt, Homo sapiens
  misc_RNA (1)...(19): siRNA sense strand
gaaaugacuacggauauag

SEQ ID NO: 1620491 - RNA, 19 nt, Homo sapiens
  misc_RNA (1)...(19): siRNA sense strand
gcagggugcagaagaaaga

SEQ ID NO: 1620492 - RNA, 19 nt, Homo sapiens
  misc_RNA (1)...(19): siRNA sense strand
aagaaagggcuaauaaguu

SEQ ID NO: 1620493 - RNA, 19 nt, Homo sapiens
  misc_RNA (1)...(19): siRNA sense strand
caucaaacgcucagacaug

SEQ ID NO: 1620494 - RNA, 19 nt, Homo sapiens
  misc_RNA (1)...(19): siRNA sense strand
gggaggugcugcgcaaguu

SEQ ID NO: 1620495 - RNA, 19 nt, Homo sapiens
  misc_RNA (1)...(19): siRNA sense strand
guuaaggaccagacaaaga

SEQ ID NO: 1620496 - RNA, 19 nt, Homo sapiens
  misc_RNA (1)...(19): siRNA sense strand
ugaaaguccucaaguuugc

SEQ ID NO: 1620497 - RNA, 19 nt, Homo sapiens
  misc_RNA (1)...(19): siRNA sense strand
caagcuacacucuggagaa

SEQ ID NO: 1620498 - RNA, 19 nt, Homo sapiens
  misc_RNA (1)...(19): siRNA sense strand
gcgaggcaguggagaugga

SEQ ID NO: 1620499 - RNA, 19 nt, Homo sapiens
  misc_RNA (1)...(19): siRNA sense strand
cagacgaguuugugaagca

SEQ ID NO: 1620500 - RNA, 19 nt, Homo sapiens
  misc_RNA (1)...(19): siRNA sense strand
agagaaguggcaguaauua

SEQ ID NO: 1620501 - RNA, 19 nt, Homo sapiens
  misc_RNA (1)...(19): siRNA sense strand
agacaaagauccccaucaa

SEQ ID NO: 1620502 - RNA, 19 nt, Homo sapiens
  misc_RNA (1)...(19): siRNA sense strand
gagacuagcaagaugaaag

SEQ ID NO: 1620503 - RNA, 19 nt, Homo sapiens
  misc_RNA (1)...(19): siRNA sense strand
uuacaagaaagggcuaaua

SEQ ID NO: 1620504 - RNA, 19 nt, Homo sapiens
  misc_RNA (1)...(19): siRNA sense strand
ggugaaauaccuguugguu

SEQ ID NO: 1620505 - RNA, 19 nt, Homo sapiens
  misc_RNA (1)...(19): siRNA sense strand
cgagucaaucugaaagaaa

SEQ ID NO: 1620506 - RNA, 19 nt, Homo sapiens
  misc_RNA (1)...(19): siRNA sense strand
gaaaucauugaacgagcaa

SEQ ID NO: 1620507 - RNA, 19 nt, Homo sapiens
  misc_RNA (1)...(19): siRNA sense strand
uuaaggaccagacaaagau

SEQ ID NO: 1620508 - RNA, 19 nt, Homo sapiens
  misc_RNA (1)...(19): siRNA sense strand
agaaguggcaguaauuaca

SEQ ID NO: 1620509 - RNA, 19 nt, Homo sapiens
  misc_RNA (1)...(19): siRNA sense strand
gggcuaauaaguuggugaa

SEQ ID NO: 1620510 - RNA, 19 nt, Homo sapiens
  misc_RNA (1)...(19): siRNA sense strand
uagcuuguauauucucauc

SEQ ID NO: 1620511 - RNA, 19 nt, Homo sapiens
  misc_RNA (1)...(19): siRNA sense strand
uaacagcagaccaccugaa

SEQ ID NO: 1620512 - RNA, 19 nt, Homo sapiens
  misc_RNA (1)...(19): siRNA sense strand
ucgagucaaucugaaagaa

SEQ ID NO: 1620513 - RNA, 19 nt, Homo sapiens
  misc_RNA (1)...(19): siRNA sense strand
gaaguggcaguaauuacag

SEQ ID NO: 1620514 - RNA, 19 nt, Homo sapiens
  misc_RNA (1)...(19): siRNA sense strand
cagaccaccugaauaugag

SEQ ID NO: 1620515 - RNA, 19 nt, Homo sapiens
  misc_RNA (1)...(19): siRNA sense strand
caucagcacucaggaaucc

SEQ ID NO: 1620516 - RNA, 19 nt, Homo sapiens
  misc_RNA (1)...(19): siRNA sense strand
caagaugaaaguccucaag

SEQ ID NO: 1620517 - RNA, 19 nt, Homo sapiens
  misc_RNA (1)...(19): siRNA sense strand
gagaaguggcaguaauuac

SEQ ID NO: 1620518 - RNA, 19 nt, Homo sapiens
  misc_RNA (1)...(19): siRNA sense strand
ucauggugauucugagugu

SEQ ID NO: 1620519 - RNA, 19 nt, Homo sapiens
  misc_RNA (1)...(19): siRNA sense strand
ccauggagccaaaguacau

SEQ ID NO: 1620520 - RNA, 19 nt, Homo sapiens
  misc_RNA (1)...(19): siRNA sense strand
ccagugaggcugucaucug

SEQ ID NO: 1620521 - RNA, 19 nt, Homo sapiens
  misc_RNA (1)...(19): siRNA sense strand
gcuuguauauucucaucag

SEQ ID NO: 1620522 - RNA, 19 nt, Homo sapiens
  misc_RNA (1)...(19): siRNA sense strand
ccgcuaauaaauugcagua

SEQ ID NO: 1620523 - RNA, 19 nt, Homo sapiens
  misc_RNA (1)...(19): siRNA sense strand
gcuccuaccacgagacuag

SEQ ID NO: 1620524 - RNA, 19 nt, Homo sapiens
  misc_RNA (1)...(19): siRNA sense strand
guuuacagauaccgcuaau

SEQ ID NO: 1620525 - RNA, 19 nt, Homo sapiens
  misc_RNA (1)...(19): siRNA sense strand
aggcaguuauggccaauca

SEQ ID NO: 1620526 - RNA, 19 nt, Homo sapiens
  misc_RNA (1)...(19): siRNA sense strand
caguaguccuucccaugga

SEQ ID NO: 1620527 - RNA, 19 nt, Homo sapiens
  misc_RNA (1)...(19): siRNA sense strand
ggaggugcugcgcaaguug

SEQ ID NO: 1620528 - RNA, 19 nt, Homo sapiens
  misc_RNA (1)...(19): siRNA sense strand
cagcugagggugucaugug

SEQ ID NO: 1620529 - RNA, 19 nt, Homo sapiens
  misc_RNA (1)...(19): siRNA sense strand
acagcagaccaccugaaua

SEQ ID NO: 1620530 - RNA, 19 nt, Homo sapiens
  misc_RNA (1)...(19): siRNA sense strand
gaaauaccuguugguuaag

SEQ ID NO: 1620531 - RNA, 19 nt, Homo sapiens
  misc_RNA (1)...(19): siRNA sense strand
uacagauaccgcuaauaaa

SEQ ID NO: 1620532 - RNA, 19 nt, Homo sapiens
  misc_RNA (1)...(19): siRNA sense strand
ucauugaacgagcaagcua

SEQ ID NO: 1620533 - RNA, 19 nt, Homo sapiens
  misc_RNA (1)...(19): siRNA sense strand
caaggcaguuauggccaau

SEQ ID NO: 1620534 - RNA, 19 nt, Homo sapiens
  misc_RNA (1)...(19): siRNA sense strand
auaaauugcaguaguccuu

SEQ ID NO: 1620535 - RNA, 19 nt, Homo sapiens
  misc_RNA (1)...(19): siRNA sense strand
acaagaaagggcuaauaag

SEQ ID NO: 1620536 - RNA, 19 nt, Homo sapiens
  misc_RNA (1)...(19): siRNA sense strand
aagcuacacucuggagaag

SEQ ID NO: 1620537 - RNA, 19 nt, Homo sapiens
  misc_RNA (1)...(19): siRNA sense strand
augaaaguccucaaguuug

SEQ ID NO: 1620538 - RNA, 19 nt, Homo sapiens
  misc_RNA (1)...(19): siRNA sense strand
gcaagaugaaaguccucaa

SEQ ID NO: 1620539 - RNA, 19 nt, Homo sapiens
  misc_RNA (1)...(19): siRNA sense strand
caaaguagcuuguauauuc

SEQ ID NO: 1620540 - RNA, 19 nt, Homo sapiens
  misc_RNA (1)...(19): siRNA sense strand
ugaaauaccuguugguuaa

SEQ ID NO: 1620541 - RNA, 19 nt, Homo sapiens
  misc_RNA (1)...(19): siRNA sense strand
gagaagauguuucgaguca

SEQ ID NO: 1620542 - RNA, 19 nt, Homo sapiens
  misc_RNA (1)...(19): siRNA sense strand
ggaauccucugcaggcaua

SEQ ID NO: 1620543 - RNA, 19 nt, Homo sapiens
  misc_RNA (1)...(19): siRNA sense strand
guacauccuuggaaucuuu

SEQ ID NO: 1620544 - RNA, 19 nt, Homo sapiens
  misc_RNA (1)...(19): siRNA sense strand
agaaagggcuaauaaguug

SEQ ID NO: 1620545 - RNA, 19 nt, Homo sapiens
  misc_RNA (1)...(19): siRNA sense strand
gaagauguuucgagucaau

SEQ ID NO: 1620546 - RNA, 19 nt, Homo sapiens
  misc_RNA (1)...(19): siRNA sense strand
gaugaaaguccucaaguuu

SEQ ID NO: 1620547 - RNA, 19 nt, Homo sapiens
  misc_RNA (1)...(19): siRNA sense strand
caaaguacauccuuggaau

SEQ ID NO: 1620548 - RNA, 19 nt, Homo sapiens
  misc_RNA (1)...(19): siRNA sense strand
ggagaaaugacuacggaua

SEQ ID NO: 1620549 - RNA, 19 nt, Homo sapiens
  misc_RNA (1)...(19): siRNA sense strand
gcagaccaccugaauauga

SEQ ID NO: 1620550 - RNA, 19 nt, Homo sapiens
  misc_RNA (1)...(19): siRNA sense strand
uuacagauaccgcuaauaa

SEQ ID NO: 1620551 - RNA, 19 nt, Homo sapiens
  misc_RNA (1)...(19): siRNA sense strand
agaaaugacuacggauaua

SEQ ID NO: 1620552 - RNA, 19 nt, Homo sapiens
  misc_RNA (1)...(19): siRNA sense strand
gcuaauaaauugcaguagu

SEQ ID NO: 1620553 - RNA, 19 nt, Homo sapiens
  misc_RNA (1)...(19): siRNA sense strand
gcuaauaaguuggugaaau

SEQ ID NO: 1620554 - RNA, 19 nt, Homo sapiens
  misc_RNA (1)...(19): siRNA sense strand
gagagaaguggcaguaauu

SEQ ID NO: 1620555 - RNA, 19 nt, Homo sapiens
  misc_RNA (1)...(19): siRNA sense strand
gagucaaucugaaagaaau

SEQ ID NO: 1620556 - RNA, 19 nt, Homo sapiens
  misc_RNA (1)...(19): siRNA sense strand
caagaaagggcuaauaagu

SEQ ID NO: 1620557 - RNA, 19 nt, Homo sapiens
  misc_RNA (1)...(19): siRNA sense strand
gcucaucacagacgaguuu

SEQ ID NO: 1620558 - RNA, 19 nt, Homo sapiens
  misc_RNA (1)...(19): siRNA sense strand
gagaaaugacuacggauau

SEQ ID NO: 1620559 - RNA, 19 nt, Homo sapiens
  misc_RNA (1)...(19): siRNA sense strand
cagcagaccaccugaauau

SEQ ID NO: 1620560 - RNA, 19 nt, Homo sapiens
  misc_RNA (1)...(19): siRNA sense strand
agauaccgcuaauaaauug

SEQ ID NO: 1620561 - RNA, 19 nt, Homo sapiens
  misc_RNA (1)...(19): siRNA sense strand
gugaaauaccuguugguua

SEQ ID NO: 1620562 - RNA, 19 nt, Homo sapiens
  misc_RNA (1)...(19): siRNA sense strand
ccacgagacuagcaagaug

SEQ ID NO: 1620563 - RNA, 19 nt, Homo sapiens
  misc_RNA (1)...(19): siRNA sense strand
ugagagaaguggcaguaau

SEQ ID NO: 1620564 - RNA, 19 nt, Homo sapiens
  misc_RNA (1)...(19): siRNA sense strand
ugaugaauauuucccagaa

SEQ ID NO: 1620565 - RNA, 19 nt, Homo sapiens
  misc_RNA (1)...(19): siRNA sense strand
gcuacacucuggagaagau

SEQ ID NO: 1620566 - RNA, 19 nt, Homo sapiens
  misc_RNA (1)...(19): siRNA sense strand
uacaagaaagggcuaauaa

SEQ ID NO: 1620567 - RNA, 19 nt, Homo sapiens
  misc_RNA (1)...(19): siRNA sense strand
caagcugggucuccucaug

SEQ ID NO: 1620568 - RNA, 19 nt, Homo sapiens
  misc_RNA (1)...(19): siRNA sense strand
gaugagagaaguggcagua

SEQ ID NO: 1620569 - RNA, 19 nt, Homo sapiens
  misc_RNA (1)...(19): siRNA sense strand
gcaaaguagcuuguauauu

SEQ ID NO: 1620570 - RNA, 19 nt, Homo sapiens
  misc_RNA (1)...(19): siRNA sense strand
cuaauaaauugcaguaguc

SEQ ID NO: 1620571 - RNA, 19 nt, Homo sapiens
  misc_RNA (1)...(19): siRNA sense strand
cagauaccgcuaauaaauu

SEQ ID NO: 1620572 - RNA, 19 nt, Homo sapiens
  misc_RNA (1)...(19): siRNA sense strand
acagauaccgcuaauaaau

SEQ ID NO: 1620573 - RNA, 19 nt, Homo sapiens
  misc_RNA (1)...(19): siRNA sense strand
agaugaaaguccucaaguu

SEQ ID NO: 1620574 - RNA, 19 nt, Homo sapiens
  misc_RNA (1)...(19): siRNA sense strand
gaaaugacuacggauauag

SEQ ID NO: 1620575 - RNA, 19 nt, Homo sapiens
  misc_RNA (1)...(19): siRNA sense strand
gcagggugcagaagaaaga

SEQ ID NO: 1620576 - RNA, 19 nt, Homo sapiens
  misc_RNA (1)...(19): siRNA sense strand
aagaaagggcuaauaaguu

SEQ ID NO: 1620577 - RNA, 19 nt, Homo sapiens
  misc_RNA (1)...(19): siRNA sense strand
caucaaacgcucagacaug

SEQ ID NO: 1620578 - RNA, 19 nt, Homo sapiens
  misc_RNA (1)...(19): siRNA sense strand
gggaggugcugcgcaaguu

SEQ ID NO: 1620579 - RNA, 19 nt, Homo sapiens
  misc_RNA (1)...(19): siRNA sense strand
guuaaggaccagacaaaga

SEQ ID NO: 1620580 - RNA, 19 nt, Homo sapiens
  misc_RNA (1)...(19): siRNA sense strand
ugaaaguccucaaguuugc

SEQ ID NO: 1620581 - RNA, 19 nt, Homo sapiens
  misc_RNA (1)...(19): siRNA sense strand
caagcuacacucuggagaa

SEQ ID NO: 1620582 - RNA, 19 nt, Homo sapiens
  misc_RNA (1)...(19): siRNA sense strand
gcgaggcaguggagaugga

SEQ ID NO: 1620583 - RNA, 19 nt, Homo sapiens
  misc_RNA (1)...(19): siRNA sense strand
cagacgaguuugugaagca

SEQ ID NO: 1620584 - RNA, 19 nt, Homo sapiens
  misc_RNA (1)...(19): siRNA sense strand
agagaaguggcaguaauua

SEQ ID NO: 1620585 - RNA, 19 nt, Homo sapiens
  misc_RNA (1)...(19): siRNA sense strand
agacaaagauccccaucaa

SEQ ID NO: 1620586 - RNA, 19 nt, Homo sapiens
  misc_RNA (1)...(19): siRNA sense strand
gagacuagcaagaugaaag

SEQ ID NO: 1620587 - RNA, 19 nt, Homo sapiens
  misc_RNA (1)...(19): siRNA sense strand
uuacaagaaagggcuaaua

SEQ ID NO: 1620588 - RNA, 19 nt, Homo sapiens
  misc_RNA (1)...(19): siRNA sense strand
ggugaaauaccuguugguu

SEQ ID NO: 1620589 - RNA, 19 nt, Homo sapiens
  misc_RNA (1)...(19): siRNA sense strand
cgagucaaucugaaagaaa

SEQ ID NO: 1620590 - RNA, 19 nt, Homo sapiens
  misc_RNA (1)...(19): siRNA sense strand
gaaaucauugaacgagcaa

SEQ ID NO: 1620591 - RNA, 19 nt, Homo sapiens
  misc_RNA (1)...(19): siRNA sense strand
uuaaggaccagacaaagau

SEQ ID NO: 1620592 - RNA, 19 nt, Homo sapiens
  misc_RNA (1)...(19): siRNA sense strand
agaaguggcaguaauuaca

SEQ ID NO: 1620593 - RNA, 19 nt, Homo sapiens
  misc_RNA (1)...(19): siRNA sense strand
gggcuaauaaguuggugaa

SEQ ID NO: 1620594 - RNA, 19 nt, Homo sapiens
  misc_RNA (1)...(19): siRNA sense strand
uagcuuguauauucucauc

SEQ ID NO: 1620595 - RNA, 19 nt, Homo sapiens
  misc_RNA (1)...(19): siRNA sense strand
uaacagcagaccaccugaa

SEQ ID NO: 1620596 - RNA, 19 nt, Homo sapiens
  misc_RNA (1)...(19): siRNA sense strand
ucgagucaaucugaaagaa

SEQ ID NO: 1620597 - RNA, 19 nt, Homo sapiens
  misc_RNA (1)...(19): siRNA sense strand
gaaguggcaguaauuacag

SEQ ID NO: 1620598 - RNA, 19 nt, Homo sapiens
  misc_RNA (1)...(19): siRNA sense strand
cagaccaccugaauaugag

SEQ ID NO: 1620599 - RNA, 19 nt, Homo sapiens
  misc_RNA (1)...(19): siRNA sense strand
caucagcacucaggaaucc

SEQ ID NO: 1620600 - RNA, 19 nt, Homo sapiens
  misc_RNA (1)...(19): siRNA sense strand
caagaugaaaguccucaag

SEQ ID NO: 1620601 - RNA, 19 nt, Homo sapiens
  misc_RNA (1)...(19): siRNA sense strand
gagaaguggcaguaauuac

SEQ ID NO: 1620602 - RNA, 19 nt, Homo sapiens
  misc_RNA (1)...(19): siRNA sense strand
ucauggugauucugagugu

SEQ ID NO: 1620603 - RNA, 19 nt, Homo sapiens
  misc_RNA (1)...(19): siRNA sense strand
ccauggagccaaaguacau

SEQ ID NO: 1620604 - RNA, 19 nt, Homo sapiens
  misc_RNA (1)...(19): siRNA sense strand
ccagugaggcugucaucug

SEQ ID NO: 1620605 - RNA, 19 nt, Homo sapiens
  misc_RNA (1)...(19): siRNA sense strand
gcuuguauauucucaucag

SEQ ID NO: 1620606 - RNA, 19 nt, Homo sapiens
  misc_RNA (1)...(19): siRNA sense strand
ccgcuaauaaauugcagua

SEQ ID NO: 1620607 - RNA, 19 nt, Homo sapiens
  misc_RNA (1)...(19): siRNA sense strand
gcuccuaccacgagacuag

SEQ ID NO: 1620608 - RNA, 19 nt, Homo sapiens
  misc_RNA (1)...(19): siRNA sense strand
guuuacagauaccgcuaau

SEQ ID NO: 1620609 - RNA, 19 nt, Homo sapiens
  misc_RNA (1)...(19): siRNA sense strand
aggcaguuauggccaauca

SEQ ID NO: 1620610 - RNA, 19 nt, Homo sapiens
  misc_RNA (1)...(19): siRNA sense strand
caguaguccuucccaugga

SEQ ID NO: 1620611 - RNA, 19 nt, Homo sapiens
  misc_RNA (1)...(19): siRNA sense strand
ggaggugcugcgcaaguug

SEQ ID NO: 1620612 - RNA, 19 nt, Homo sapiens
  misc_RNA (1)...(19): siRNA sense strand
cagcugagggugucaugug

SEQ ID NO: 1620613 - RNA, 19 nt, Homo sapiens
  misc_RNA (1)...(19): siRNA sense strand
acagcagaccaccugaaua

SEQ ID NO: 1620614 - RNA, 19 nt, Homo sapiens
  misc_RNA (1)...(19): siRNA sense strand
gaaauaccuguugguuaag

SEQ ID NO: 1620615 - RNA, 19 nt, Homo sapiens
  misc_RNA (1)...(19): siRNA sense strand
uacagauaccgcuaauaaa

SEQ ID NO: 1620616 - RNA, 19 nt, Homo sapiens
  misc_RNA (1)...(19): siRNA sense strand
ucauugaacgagcaagcua

SEQ ID NO: 1620617 - RNA, 19 nt, Homo sapiens
  misc_RNA (1)...(19): siRNA sense strand
caaggcaguuauggccaau

SEQ ID NO: 1620618 - RNA, 19 nt, Homo sapiens
  misc_RNA (1)...(19): siRNA sense strand
auaaauugcaguaguccuu

SEQ ID NO: 1620619 - RNA, 19 nt, Homo sapiens
  misc_RNA (1)...(19): siRNA sense strand
acaagaaagggcuaauaag

SEQ ID NO: 1620620 - RNA, 19 nt, Homo sapiens
  misc_RNA (1)...(19): siRNA sense strand
aagcuacacucuggagaag

SEQ ID NO: 1620621 - RNA, 19 nt, Homo sapiens
  misc_RNA (1)...(19): siRNA sense strand
augaaaguccucaaguuug

SEQ ID NO: 1620622 - RNA, 19 nt, Homo sapiens
  misc_RNA (1)...(19): siRNA sense strand
gcaagaugaaaguccucaa

SEQ ID NO: 1620623 - RNA, 19 nt, Homo sapiens
  misc_RNA (1)...(19): siRNA sense strand
caaaguagcuuguauauuc

SEQ ID NO: 1620624 - RNA, 19 nt, Homo sapiens
  misc_RNA (1)...(19): siRNA sense strand
ugaaauaccuguugguuaa

SEQ ID NO: 1620625 - RNA, 19 nt, Homo sapiens
  misc_RNA (1)...(19): siRNA sense strand
gagaagauguuucgaguca

SEQ ID NO: 1620626 - RNA, 19 nt, Homo sapiens
  misc_RNA (1)...(19): siRNA sense strand
ggaauccucugcaggcaua

SEQ ID NO: 1620627 - RNA, 19 nt, Homo sapiens
  misc_RNA (1)...(19): siRNA sense strand
agaaagggcuaauaaguug

SEQ ID NO: 1620628 - RNA, 19 nt, Homo sapiens
  misc_RNA (1)...(19): siRNA sense strand
gaagauguuucgagucaau

SEQ ID NO: 1620629 - RNA, 19 nt, Homo sapiens
  misc_RNA (1)...(19): siRNA sense strand
gaugaaaguccucaaguuu

SEQ ID NO: 1620630 - RNA, 19 nt, Homo sapiens
  misc_RNA (1)...(19): siRNA sense strand
ggagaaaugacuacggaua

SEQ ID NO: 1620631 - RNA, 19 nt, Homo sapiens
  misc_RNA (1)...(19): siRNA sense strand
gcagaccaccugaauauga

SEQ ID NO: 1620632 - RNA, 19 nt, Homo sapiens
  misc_RNA (1)...(19): siRNA sense strand
agaaaugacuacggauaua

SEQ ID NO: 1620633 - RNA, 19 nt, Homo sapiens
  misc_RNA (1)...(19): siRNA sense strand
gcuaauaaguuggugaaau

SEQ ID NO: 1620634 - RNA, 19 nt, Homo sapiens
  misc_RNA (1)...(19): siRNA sense strand
gagagaaguggcaguaauu

SEQ ID NO: 1620635 - RNA, 19 nt, Homo sapiens
  misc_RNA (1)...(19): siRNA sense strand
gagucaaucugaaagaaau

SEQ ID NO: 1620636 - RNA, 19 nt, Homo sapiens
  misc_RNA (1)...(19): siRNA sense strand
caagaaagggcuaauaagu

SEQ ID NO: 1620637 - RNA, 19 nt, Homo sapiens
  misc_RNA (1)...(19): siRNA sense strand
gcucaucacagacgaguuu

SEQ ID NO: 1620638 - RNA, 19 nt, Homo sapiens
  misc_RNA (1)...(19): siRNA sense strand
gagaaaugacuacggauau

SEQ ID NO: 1620639 - RNA, 19 nt, Homo sapiens
  misc_RNA (1)...(19): siRNA sense strand
cagcagaccaccugaauau

SEQ ID NO: 1620640 - RNA, 19 nt, Homo sapiens
  misc_RNA (1)...(19): siRNA sense strand
gugaaauaccuguugguua

SEQ ID NO: 1620641 - RNA, 19 nt, Homo sapiens
  misc_RNA (1)...(19): siRNA sense strand
ccacgagacuagcaagaug

SEQ ID NO: 1620642 - RNA, 19 nt, Homo sapiens
  misc_RNA (1)...(19): siRNA sense strand
ugaugaauauuucccagaa

SEQ ID NO: 1620643 - RNA, 19 nt, Homo sapiens
  misc_RNA (1)...(19): siRNA sense strand
ugagagaaguggcaguaau

SEQ ID NO: 1620644 - RNA, 19 nt, Homo sapiens
  misc_RNA (1)...(19): siRNA sense strand
gcuacacucuggagaagau

SEQ ID NO: 1620645 - RNA, 19 nt, Homo sapiens
  misc_RNA (1)...(19): siRNA sense strand
uacaagaaagggcuaauaa

SEQ ID NO: 1620646 - RNA, 19 nt, Homo sapiens
  misc_RNA (1)...(19): siRNA sense strand
gaugagagaaguggcagua

SEQ ID NO: 1620647 - RNA, 19 nt, Homo sapiens
  misc_RNA (1)...(19): siRNA sense strand
caagcugggucuccucaug

SEQ ID NO: 1620648 - RNA, 19 nt, Homo sapiens
  misc_RNA (1)...(19): siRNA sense strand
gcaaaguagcuuguauauu

SEQ ID NO: 1620649 - RNA, 19 nt, Homo sapiens
  misc_RNA (1)...(19): siRNA sense strand
gaaaugacuacggauauag

SEQ ID NO: 1620650 - RNA, 19 nt, Homo sapiens
  misc_RNA (1)...(19): siRNA sense strand
gcagggugcagaagaaaga

SEQ ID NO: 1620651 - RNA, 19 nt, Homo sapiens
  misc_RNA (1)...(19): siRNA sense strand
agaugaaaguccucaaguu

SEQ ID NO: 1620652 - RNA, 19 nt, Homo sapiens
  misc_RNA (1)...(19): siRNA sense strand
aagaaagggcuaauaaguu

SEQ ID NO: 1620653 - RNA, 19 nt, Homo sapiens
  misc_RNA (1)...(19): siRNA sense strand
caucaaacgcucagacaug

SEQ ID NO: 1620654 - RNA, 19 nt, Homo sapiens
  misc_RNA (1)...(19): siRNA sense strand
gggaggugcugcgcaaguu

SEQ ID NO: 1620655 - RNA, 19 nt, Homo sapiens
  misc_RNA (1)...(19): siRNA sense strand
guuaaggaccagacaaaga

SEQ ID NO: 1620656 - RNA, 19 nt, Homo sapiens
  misc_RNA (1)...(19): siRNA sense strand
ugaaaguccucaaguuugc

SEQ ID NO: 1620657 - RNA, 19 nt, Homo sapiens
  misc_RNA (1)...(19): siRNA sense strand
agagaaguggcaguaauua

SEQ ID NO: 1620658 - RNA, 19 nt, Homo sapiens
  misc_RNA (1)...(19): siRNA sense strand
gcgaggcaguggagaugga

SEQ ID NO: 1620659 - RNA, 19 nt, Homo sapiens
  misc_RNA (1)...(19): siRNA sense strand
cagacgaguuugugaagca

SEQ ID NO: 1620660 - RNA, 19 nt, Homo sapiens
  misc_RNA (1)...(19): siRNA sense strand
caagcuacacucuggagaa

SEQ ID NO: 1620661 - RNA, 19 nt, Homo sapiens
  misc_RNA (1)...(19): siRNA sense strand
uuacaagaaagggcuaaua

SEQ ID NO: 1620662 - RNA, 19 nt, Homo sapiens
  misc_RNA (1)...(19): siRNA sense strand
gagacuagcaagaugaaag

SEQ ID NO: 1620663 - RNA, 19 nt, Homo sapiens
  misc_RNA (1)...(19): siRNA sense strand
agacaaagauccccaucaa

SEQ ID NO: 1620664 - RNA, 19 nt, Homo sapiens
  misc_RNA (1)...(19): siRNA sense strand
ggugaaauaccuguugguu

SEQ ID NO: 1620665 - RNA, 19 nt, Homo sapiens
  misc_RNA (1)...(19): siRNA sense strand
cgagucaaucugaaagaaa

SEQ ID NO: 1620666 - RNA, 19 nt, Homo sapiens
  misc_RNA (1)...(19): siRNA sense strand
gaaaucauugaacgagcaa

SEQ ID NO: 1620667 - RNA, 19 nt, Homo sapiens
  misc_RNA (1)...(19): siRNA sense strand
uuaaggaccagacaaagau

SEQ ID NO: 1620668 - RNA, 19 nt, Homo sapiens
  misc_RNA (1)...(19): siRNA sense strand
gggcuaauaaguuggugaa

SEQ ID NO: 1620669 - RNA, 19 nt, Homo sapiens
  misc_RNA (1)...(19): siRNA sense strand
agaaguggcaguaauuaca

SEQ ID NO: 1620670 - RNA, 19 nt, Homo sapiens
  misc_RNA (1)...(19): siRNA sense strand
uagcuuguauauucucauc

SEQ ID NO: 1620671 - RNA, 19 nt, Homo sapiens
  misc_RNA (1)...(19): siRNA sense strand
uaacagcagaccaccugaa

SEQ ID NO: 1620672 - RNA, 19 nt, Homo sapiens
  misc_RNA (1)...(19): siRNA sense strand
gaaguggcaguaauuacag

SEQ ID NO: 1620673 - RNA, 19 nt, Homo sapiens
  misc_RNA (1)...(19): siRNA sense strand
cagaccaccugaauaugag

SEQ ID NO: 1620674 - RNA, 19 nt, Homo sapiens
  misc_RNA (1)...(19): siRNA sense strand
ucgagucaaucugaaagaa

SEQ ID NO: 1620675 - RNA, 19 nt, Homo sapiens
  misc_RNA (1)...(19): siRNA sense strand
gagaaguggcaguaauuac

SEQ ID NO: 1620676 - RNA, 19 nt, Homo sapiens
  misc_RNA (1)...(19): siRNA sense strand
caagaugaaaguccucaag

SEQ ID NO: 1620677 - RNA, 19 nt, Homo sapiens
  misc_RNA (1)...(19): siRNA sense strand
caucagcacucaggaaucc

SEQ ID NO: 1620678 - RNA, 19 nt, Homo sapiens
  misc_RNA (1)...(19): siRNA sense strand
ucauggugauucugagugu

SEQ ID NO: 1620679 - RNA, 19 nt, Homo sapiens
  misc_RNA (1)...(19): siRNA sense strand
ccagugaggcugucaucug

SEQ ID NO: 1620680 - RNA, 19 nt, Homo sapiens
  misc_RNA (1)...(19): siRNA sense strand
gcuuguauauucucaucag

SEQ ID NO: 1620681 - RNA, 19 nt, Homo sapiens
  misc_RNA (1)...(19): siRNA sense strand
gcuccuaccacgagacuag

SEQ ID NO: 1620682 - RNA, 19 nt, Homo sapiens
  misc_RNA (1)...(19): siRNA sense strand
ggaggugcugcgcaaguug

SEQ ID NO: 1620683 - RNA, 19 nt, Homo sapiens
  misc_RNA (1)...(19): siRNA sense strand
acagcagaccaccugaaua

SEQ ID NO: 1620684 - RNA, 19 nt, Homo sapiens
  misc_RNA (1)...(19): siRNA sense strand
gaaauaccuguugguuaag

SEQ ID NO: 1620685 - RNA, 19 nt, Homo sapiens
  misc_RNA (1)...(19): siRNA sense strand
ucauugaacgagcaagcua

SEQ ID NO: 1620686 - RNA, 19 nt, Homo sapiens
  misc_RNA (1)...(19): siRNA sense strand
acaagaaagggcuaauaag

SEQ ID NO: 1620687 - RNA, 19 nt, Homo sapiens
  misc_RNA (1)...(19): siRNA sense strand
aagcuacacucuggagaag

SEQ ID NO: 1620688 - RNA, 19 nt, Homo sapiens
  misc_RNA (1)...(19): siRNA sense strand
augaaaguccucaaguuug

SEQ ID NO: 1620689 - RNA, 19 nt, Homo sapiens
  misc_RNA (1)...(19): siRNA sense strand
gcaagaugaaaguccucaa

SEQ ID NO: 1620690 - RNA, 19 nt, Homo sapiens
  misc_RNA (1)...(19): siRNA sense strand
caagaagaccaggauaauu

SEQ ID NO: 1620691 - RNA, 19 nt, Homo sapiens
  misc_RNA (1)...(19): siRNA sense strand
caacaagaagaccaggaua

SEQ ID NO: 1620692 - RNA, 19 nt, Homo sapiens
  misc_RNA (1)...(19): siRNA sense strand
gcaacgacgaggaguuaaa

SEQ ID NO: 1620693 - RNA, 19 nt, Homo sapiens
  misc_RNA (1)...(19): siRNA sense strand
aagaagaccaggauaauuc

SEQ ID NO: 1620694 - RNA, 19 nt, Homo sapiens
  misc_RNA (1)...(19): siRNA sense strand
ccgcaacgacgaggaguua

SEQ ID NO: 1620695 - RNA, 19 nt, Homo sapiens
  misc_RNA (1)...(19): siRNA sense strand
gcacagacugcugcgcaaa

SEQ ID NO: 1620696 - RNA, 19 nt, Homo sapiens
  misc_RNA (1)...(19): siRNA sense strand
aacaagaagaccaggauaa

SEQ ID NO: 1620697 - RNA, 19 nt, Homo sapiens
  misc_RNA (1)...(19): siRNA sense strand
acaagaagaccaggauaau

SEQ ID NO: 1620698 - RNA, 19 nt, Homo sapiens
  misc_RNA (1)...(19): siRNA sense strand
cgacgaggaguuaaacaag

SEQ ID NO: 1620699 - RNA, 19 nt, Homo sapiens
  misc_RNA (1)...(19): siRNA sense strand
gcggcaaagugcgagcaaa

SEQ ID NO: 1620700 - RNA, 19 nt, Homo sapiens
  misc_RNA (1)...(19): siRNA sense strand
gcgcgugacaacaagaaga

SEQ ID NO: 1620701 - RNA, 19 nt, Homo sapiens
  misc_RNA (1)...(19): siRNA sense strand
caacgacgaggaguuaaac

SEQ ID NO: 1620702 - RNA, 19 nt, Homo sapiens
  misc_RNA (1)...(19): siRNA sense strand
acaagcugcugggcaaagu

SEQ ID NO: 1620703 - RNA, 19 nt, Homo sapiens
  misc_RNA (1)...(19): siRNA sense strand
caagaagaccaggauaauu

SEQ ID NO: 1620704 - RNA, 19 nt, Homo sapiens
  misc_RNA (1)...(19): siRNA sense strand
caacaagaagaccaggaua

SEQ ID NO: 1620705 - RNA, 19 nt, Homo sapiens
  misc_RNA (1)...(19): siRNA sense strand
gcaacgacgaggaguuaaa

SEQ ID NO: 1620706 - RNA, 19 nt, Homo sapiens
  misc_RNA (1)...(19): siRNA sense strand
aagaagaccaggauaauuc

SEQ ID NO: 1620707 - RNA, 19 nt, Homo sapiens
  misc_RNA (1)...(19): siRNA sense strand
ccgcaacgacgaggaguua

SEQ ID NO: 1620708 - RNA, 19 nt, Homo sapiens
  misc_RNA (1)...(19): siRNA sense strand
gcacagacugcugcgcaaa

SEQ ID NO: 1620709 - RNA, 19 nt, Homo sapiens
  misc_RNA (1)...(19): siRNA sense strand
aacaagaagaccaggauaa

SEQ ID NO: 1620710 - RNA, 19 nt, Homo sapiens
  misc_RNA (1)...(19): siRNA sense strand
acaagaagaccaggauaau

SEQ ID NO: 1620711 - RNA, 19 nt, Homo sapiens
  misc_RNA (1)...(19): siRNA sense strand
cgacgaggaguuaaacaag

SEQ ID NO: 1620712 - RNA, 19 nt, Homo sapiens
  misc_RNA (1)...(19): siRNA sense strand
gcggcaaagugcgagcaaa

SEQ ID NO: 1620713 - RNA, 19 nt, Homo sapiens
  misc_RNA (1)...(19): siRNA sense strand
gcgcgugacaacaagaaga

SEQ ID NO: 1620714 - RNA, 19 nt, Homo sapiens
  misc_RNA (1)...(19): siRNA sense strand
caacgacgaggaguuaaac

SEQ ID NO: 1620715 - RNA, 19 nt, Homo sapiens
  misc_RNA (1)...(19): siRNA sense strand
acaagcugcugggcaaagu

SEQ ID NO: 1620716 - RNA, 19 nt, Homo sapiens
  misc_RNA (1)...(19): siRNA sense strand
gaacugaacuuaauucuca

SEQ ID NO: 1620717 - RNA, 19 nt, Homo sapiens
  misc_RNA (1)...(19): siRNA sense strand
gauaagggaugaagaugua

SEQ ID NO: 1620718 - RNA, 19 nt, Homo sapiens
  misc_RNA (1)...(19): siRNA sense strand
ggcccaagcugaagacuuu

SEQ ID NO: 1620719 - RNA, 19 nt, Homo sapiens
  misc_RNA (1)...(19): siRNA sense strand
ucaaggaacugugcuauau

SEQ ID NO: 1620720 - RNA, 19 nt, Homo sapiens
  misc_RNA (1)...(19): siRNA sense strand
gaagaaccauagagaagau

SEQ ID NO: 1620721 - RNA, 19 nt, Homo sapiens
  misc_RNA (1)...(19): siRNA sense strand
ccgaagaacugaacuuaau

SEQ ID NO: 1620722 - RNA, 19 nt, Homo sapiens
  misc_RNA (1)...(19): siRNA sense strand
gagaagaucugucaauucc

SEQ ID NO: 1620723 - RNA, 19 nt, Homo sapiens
  misc_RNA (1)...(19): siRNA sense strand
gauaaauuguuccaagaga

SEQ ID NO: 1620724 - RNA, 19 nt, Homo sapiens
  misc_RNA (1)...(19): siRNA sense strand
ggacaaagcacaacuucug

SEQ ID NO: 1620725 - RNA, 19 nt, Homo sapiens
  misc_RNA (1)...(19): siRNA sense strand
aagaacagcuccuuucaga

SEQ ID NO: 1620726 - RNA, 19 nt, Homo sapiens
  misc_RNA (1)...(19): siRNA sense strand
ccaaguggauccaaucugu

SEQ ID NO: 1620727 - RNA, 19 nt, Homo sapiens
  misc_RNA (1)...(19): siRNA sense strand
ggacacaggaagaaccaua

SEQ ID NO: 1620728 - RNA, 19 nt, Homo sapiens
  misc_RNA (1)...(19): siRNA sense strand
gcugaagacuuugauaaau

SEQ ID NO: 1620729 - RNA, 19 nt, Homo sapiens
  misc_RNA (1)...(19): siRNA sense strand
uagagaagaucugucaauu

SEQ ID NO: 1620730 - RNA, 19 nt, Homo sapiens
  misc_RNA (1)...(19): siRNA sense strand
ggaagaauauuuugaaugg

SEQ ID NO: 1620731 - RNA, 19 nt, Homo sapiens
  misc_RNA (1)...(19): siRNA sense strand
gacgauuucuuaugguuug

SEQ ID NO: 1620732 - RNA, 19 nt, Homo sapiens
  misc_RNA (1)...(19): siRNA sense strand
gaagaacugaacuuaauuc

SEQ ID NO: 1620733 - RNA, 19 nt, Homo sapiens
  misc_RNA (1)...(19): siRNA sense strand
gauccgaaaccuuaagaaa

SEQ ID NO: 1620734 - RNA, 19 nt, Homo sapiens
  misc_RNA (1)...(19): siRNA sense strand
ggaagaaccauagagaaga

SEQ ID NO: 1620735 - RNA, 19 nt, Homo sapiens
  misc_RNA (1)...(19): siRNA sense strand
caaggugauuuaucucaug

SEQ ID NO: 1620736 - RNA, 19 nt, Homo sapiens
  misc_RNA (1)...(19): siRNA sense strand
ccaaggccaaggugauuua

SEQ ID NO: 1620737 - RNA, 19 nt, Homo sapiens
  misc_RNA (1)...(19): siRNA sense strand
caaagucaugggaagaaua

SEQ ID NO: 1620738 - RNA, 19 nt, Homo sapiens
  misc_RNA (1)...(19): siRNA sense strand
ccaagucuuucuucaguuc

SEQ ID NO: 1620739 - RNA, 19 nt, Homo sapiens
  misc_RNA (1)...(19): siRNA sense strand
gaaacaggacacaggaaga

SEQ ID NO: 1620740 - RNA, 19 nt, Homo sapiens
  misc_RNA (1)...(19): siRNA sense strand
caugagaaaucccagagau

SEQ ID NO: 1620741 - RNA, 19 nt, Homo sapiens
  misc_RNA (1)...(19): siRNA sense strand
ggagaguccacguuuauuc

SEQ ID NO: 1620742 - RNA, 19 nt, Homo sapiens
  misc_RNA (1)...(19): siRNA sense strand
cuauaugggucaugguuug

SEQ ID NO: 1620743 - RNA, 19 nt, Homo sapiens
  misc_RNA (1)...(19): siRNA sense strand
gaguguugauuauguagug

SEQ ID NO: 1620744 - RNA, 19 nt, Homo sapiens
  misc_RNA (1)...(19): siRNA sense strand
gugaugaguucgugauaag

SEQ ID NO: 1620745 - RNA, 19 nt, Homo sapiens
  misc_RNA (1)...(19): siRNA sense strand
gaaaacaagauguccaauu

SEQ ID NO: 1620746 - RNA, 19 nt, Homo sapiens
  misc_RNA (1)...(19): siRNA sense strand
ggacgauuucuuaugguuu

SEQ ID NO: 1620747 - RNA, 19 nt, Homo sapiens
  misc_RNA (1)...(19): siRNA sense strand
ggcauagcuuucccuacua

SEQ ID NO: 1620748 - RNA, 19 nt, Homo sapiens
  misc_RNA (1)...(19): siRNA sense strand
caaacugguuggcugagau

SEQ ID NO: 1620749 - RNA, 19 nt, Homo sapiens
  misc_RNA (1)...(19): siRNA sense strand
ccugaguguugauuaugua

SEQ ID NO: 1620750 - RNA, 19 nt, Homo sapiens
  misc_RNA (1)...(19): siRNA sense strand
cgugaugaguucgugauaa

SEQ ID NO: 1620751 - RNA, 19 nt, Homo sapiens
  misc_RNA (1)...(19): siRNA sense strand
gacaaagcacaacuucuga

SEQ ID NO: 1620752 - RNA, 19 nt, Homo sapiens
  misc_RNA (1)...(19): siRNA sense strand
cgaagaacugaacuuaauu

SEQ ID NO: 1620753 - RNA, 19 nt, Homo sapiens
  misc_RNA (1)...(19): siRNA sense strand
gacguuagaacccgaagaa

SEQ ID NO: 1620754 - RNA, 19 nt, Homo sapiens
  misc_RNA (1)...(19): siRNA sense strand
gagaaaucccagagauguu

SEQ ID NO: 1620755 - RNA, 19 nt, Homo sapiens
  misc_RNA (1)...(19): siRNA sense strand
caaagcacaacuucugaga

SEQ ID NO: 1620756 - RNA, 19 nt, Homo sapiens
  misc_RNA (1)...(19): siRNA sense strand
gggaugaagauguaauaau

SEQ ID NO: 1620757 - RNA, 19 nt, Homo sapiens
  misc_RNA (1)...(19): siRNA sense strand
ccauagagaagaucuguca

SEQ ID NO: 1620758 - RNA, 19 nt, Homo sapiens
  misc_RNA (1)...(19): siRNA sense strand
uuaagaaaccaaagucaug

SEQ ID NO: 1620759 - RNA, 19 nt, Homo sapiens
  misc_RNA (1)...(19): siRNA sense strand
agaaaucccagagauguuu

SEQ ID NO: 1620760 - RNA, 19 nt, Homo sapiens
  misc_RNA (1)...(19): siRNA sense strand
agagugagauuggguauac

SEQ ID NO: 1620761 - RNA, 19 nt, Homo sapiens
  misc_RNA (1)...(19): siRNA sense strand
aaacaggacacaggaagaa

SEQ ID NO: 1620762 - RNA, 19 nt, Homo sapiens
  misc_RNA (1)...(19): siRNA sense strand
aagcugaagacuuugauaa

SEQ ID NO: 1620763 - RNA, 19 nt, Homo sapiens
  misc_RNA (1)...(19): siRNA sense strand
ugagaaaucccagagaugu

SEQ ID NO: 1620764 - RNA, 19 nt, Homo sapiens
  misc_RNA (1)...(19): siRNA sense strand
aaaaguacgugaugaguuc

SEQ ID NO: 1620765 - RNA, 19 nt, Homo sapiens
  misc_RNA (1)...(19): siRNA sense strand
guuagaacccgaagaacug

SEQ ID NO: 1620766 - RNA, 19 nt, Homo sapiens
  misc_RNA (1)...(19): siRNA sense strand
aggcauagcuuucccuacu

SEQ ID NO: 1620767 - RNA, 19 nt, Homo sapiens
  misc_RNA (1)...(19): siRNA sense strand
ccaaagucaugggaagaau

SEQ ID NO: 1620768 - RNA, 19 nt, Homo sapiens
  misc_RNA (1)...(19): siRNA sense strand
gaaaaguacgugaugaguu

SEQ ID NO: 1620769 - RNA, 19 nt, Homo sapiens
  misc_RNA (1)...(19): siRNA sense strand
ccaaggugauuuaucucau

SEQ ID NO: 1620770 - RNA, 19 nt, Homo sapiens
  misc_RNA (1)...(19): siRNA sense strand
aaagucaugggaagaauau

SEQ ID NO: 1620771 - RNA, 19 nt, Homo sapiens
  misc_RNA (1)...(19): siRNA sense strand
guuaugaggagcugaaaca

SEQ ID NO: 1620772 - RNA, 19 nt, Homo sapiens
  misc_RNA (1)...(19): siRNA sense strand
gucaaggaacugugcuaua

SEQ ID NO: 1620773 - RNA, 19 nt, Homo sapiens
  misc_RNA (1)...(19): siRNA sense strand
gaugccaaguggauccaau

SEQ ID NO: 1620774 - RNA, 19 nt, Homo sapiens
  misc_RNA (1)...(19): siRNA sense strand
ccuccugaguguugauuau

SEQ ID NO: 1620775 - RNA, 19 nt, Homo sapiens
  misc_RNA (1)...(19): siRNA sense strand
ucaagaacagcuccuuuca

SEQ ID NO: 1620776 - RNA, 19 nt, Homo sapiens
  misc_RNA (1)...(19): siRNA sense strand
gcuauaugggucaugguuu

SEQ ID NO: 1620777 - RNA, 19 nt, Homo sapiens
  misc_RNA (1)...(19): siRNA sense strand
aaggaacugugcuauaugg

SEQ ID NO: 1620778 - RNA, 19 nt, Homo sapiens
  misc_RNA (1)...(19): siRNA sense strand
aaggugauuuaucucauga

SEQ ID NO: 1620779 - RNA, 19 nt, Homo sapiens
  misc_RNA (1)...(19): siRNA sense strand
gagagugagauuggguaua

SEQ ID NO: 1620780 - RNA, 19 nt, Homo sapiens
  misc_RNA (1)...(19): siRNA sense strand
caagcugaagacuuugaua

SEQ ID NO: 1620781 - RNA, 19 nt, Homo sapiens
  misc_RNA (1)...(19): siRNA sense strand
cggacgauuucuuaugguu

SEQ ID NO: 1620782 - RNA, 19 nt, Homo sapiens
  misc_RNA (1)...(19): siRNA sense strand
caaggaacugugcuauaug

SEQ ID NO: 1620783 - RNA, 19 nt, Homo sapiens
  misc_RNA (1)...(19): siRNA sense strand
agucaugggaagaauauuu

SEQ ID NO: 1620784 - RNA, 19 nt, Homo sapiens
  misc_RNA (1)...(19): siRNA sense strand
gagaguccacguuuauucu

SEQ ID NO: 1620785 - RNA, 19 nt, Homo sapiens
  misc_RNA (1)...(19): siRNA sense strand
aggccaaggugauuuaucu

SEQ ID NO: 1620786 - RNA, 19 nt, Homo sapiens
  misc_RNA (1)...(19): siRNA sense strand
caggaagaaccauagagaa

SEQ ID NO: 1620787 - RNA, 19 nt, Homo sapiens
  misc_RNA (1)...(19): siRNA sense strand
acaggaagaaccauagaga

SEQ ID NO: 1620788 - RNA, 19 nt, Homo sapiens
  misc_RNA (1)...(19): siRNA sense strand
gucggacgauuucuuaugg

SEQ ID NO: 1620789 - RNA, 19 nt, Homo sapiens
  misc_RNA (1)...(19): siRNA sense strand
uaagaaaaguacgugauga

SEQ ID NO: 1620790 - RNA, 19 nt, Homo sapiens
  misc_RNA (1)...(19): siRNA sense strand
gcuggaugcccaugagaga

SEQ ID NO: 1620791 - RNA, 19 nt, Homo sapiens
  misc_RNA (1)...(19): siRNA sense strand
gguuugaaggcauagcuuu

SEQ ID NO: 1620792 - RNA, 19 nt, Homo sapiens
  misc_RNA (1)...(19): siRNA sense strand
uaaauuguuccaagagaag

SEQ ID NO: 1620793 - RNA, 19 nt, Homo sapiens
  misc_RNA (1)...(19): siRNA sense strand
agagaagaucugucaauuc

SEQ ID NO: 1620794 - RNA, 19 nt, Homo sapiens
  misc_RNA (1)...(19): siRNA sense strand
acaagauguccaauuauuc

SEQ ID NO: 1620795 - RNA, 19 nt, Homo sapiens
  misc_RNA (1)...(19): siRNA sense strand
aagggaugaagauguaaua

SEQ ID NO: 1620796 - RNA, 19 nt, Homo sapiens
  misc_RNA (1)...(19): siRNA sense strand
caagauguccaauuauucc

SEQ ID NO: 1620797 - RNA, 19 nt, Homo sapiens
  misc_RNA (1)...(19): siRNA sense strand
gccaaggugauuuaucuca

SEQ ID NO: 1620798 - RNA, 19 nt, Homo sapiens
  misc_RNA (1)...(19): siRNA sense strand
caagagaagauggcagauc

SEQ ID NO: 1620799 - RNA, 19 nt, Homo sapiens
  misc_RNA (1)...(19): siRNA sense strand
cacaguggcccaagcugaa

SEQ ID NO: 1620800 - RNA, 19 nt, Homo sapiens
  misc_RNA (1)...(19): siRNA sense strand
auuauucccuccugagugu

SEQ ID NO: 1620801 - RNA, 19 nt, Homo sapiens
  misc_RNA (1)...(19): siRNA sense strand
acaaacugguuggcugaga

SEQ ID NO: 1620802 - RNA, 19 nt, Homo sapiens
  misc_RNA (1)...(19): siRNA sense strand
aauauugacuuaccccaaa

SEQ ID NO: 1620803 - RNA, 19 nt, Homo sapiens
  misc_RNA (1)...(19): siRNA sense strand
aaacugguuggcugagauu

SEQ ID NO: 1620804 - RNA, 19 nt, Homo sapiens
  misc_RNA (1)...(19): siRNA sense strand
ccaaaucaggaacaaacug

SEQ ID NO: 1620805 - RNA, 19 nt, Homo sapiens
  misc_RNA (1)...(19): siRNA sense strand
uugauuauguaguggacaa

SEQ ID NO: 1620806 - RNA, 19 nt, Homo sapiens
  misc_RNA (1)...(19): siRNA sense strand
ugauaagggaugaagaugu

SEQ ID NO: 1620807 - RNA, 19 nt, Homo sapiens
  misc_RNA (1)...(19): siRNA sense strand
ggguagagagugagauugg

SEQ ID NO: 1620808 - RNA, 19 nt, Homo sapiens
  misc_RNA (1)...(19): siRNA sense strand
caagaacagcuccuuucag

SEQ ID NO: 1620809 - RNA, 19 nt, Homo sapiens
  misc_RNA (1)...(19): siRNA sense strand
cgugauaagggaugaagau

SEQ ID NO: 1620810 - RNA, 19 nt, Homo sapiens
  misc_RNA (1)...(19): siRNA sense strand
gauuucuuaugguuugaag

SEQ ID NO: 1620811 - RNA, 19 nt, Homo sapiens
  misc_RNA (1)...(19): siRNA sense strand
ucucaagaacagcuccuuu

SEQ ID NO: 1620812 - RNA, 19 nt, Homo sapiens
  misc_RNA (1)...(19): siRNA sense strand
ugaguuaugaggagcugaa

SEQ ID NO: 1620813 - RNA, 19 nt, Homo sapiens
  misc_RNA (1)...(19): siRNA sense strand
gcacaaacaucaagauaac

SEQ ID NO: 1620814 - RNA, 19 nt, Homo sapiens
  misc_RNA (1)...(19): siRNA sense strand
caucugaccucaauuuaau

SEQ ID NO: 1620815 - RNA, 19 nt, Homo sapiens
  misc_RNA (1)...(19): siRNA sense strand
ucgaguaucugaugaagaa

SEQ ID NO: 1620816 - RNA, 19 nt, Homo sapiens
  misc_RNA (1)...(19): siRNA sense strand
acaaacagcucacccugaa

SEQ ID NO: 1620817 - RNA, 19 nt, Homo sapiens
  misc_RNA (1)...(19): siRNA sense strand
gagcacaaacaucaagaua

SEQ ID NO: 1620818 - RNA, 19 nt, Homo sapiens
  misc_RNA (1)...(19): siRNA sense strand
caaagccgccuuacuccua

SEQ ID NO: 1620819 - RNA, 19 nt, Homo sapiens
  misc_RNA (1)...(19): siRNA sense strand
uuuaauggcugacaacuca

SEQ ID NO: 1620820 - RNA, 19 nt, Homo sapiens
  misc_RNA (1)...(19): siRNA sense strand
uacgauggcucccgacaaa

SEQ ID NO: 1620821 - RNA, 19 nt, Homo sapiens
  misc_RNA (1)...(19): siRNA sense strand
gagcugaagcggaucaaga

SEQ ID NO: 1620822 - RNA, 19 nt, Homo sapiens
  misc_RNA (1)...(19): siRNA sense strand
ugaagcggaucaagacaga

SEQ ID NO: 1620823 - RNA, 19 nt, Homo sapiens
  misc_RNA (1)...(19): siRNA sense strand
ugaacgggauuuauacaca

SEQ ID NO: 1620824 - RNA, 19 nt, Homo sapiens
  misc_RNA (1)...(19): siRNA sense strand
gagacagcccgaaggauga

SEQ ID NO: 1620825 - RNA, 19 nt, Homo sapiens
  misc_RNA (1)...(19): siRNA sense strand
gcccgaaggaugauucaaa

SEQ ID NO: 1620826 - RNA, 19 nt, Homo sapiens
  misc_RNA (1)...(19): siRNA sense strand
ucaauuuaauggcugacaa

SEQ ID NO: 1620827 - RNA, 19 nt, Homo sapiens
  misc_RNA (1)...(19): siRNA sense strand
ccaucugaccucaauuuaa

SEQ ID NO: 1620828 - RNA, 19 nt, Homo sapiens
  misc_RNA (1)...(19): siRNA sense strand
gcgaguccuuugcacaugu

SEQ ID NO: 1620829 - RNA, 19 nt, Homo sapiens
  misc_RNA (1)...(19): siRNA sense strand
ggaaaaggguguccagaac

SEQ ID NO: 1620830 - RNA, 19 nt, Homo sapiens
  misc_RNA (1)...(19): siRNA sense strand
caaggugggccgagugaug

SEQ ID NO: 1620831 - RNA, 19 nt, Homo sapiens
  misc_RNA (1)...(19): siRNA sense strand
gccaucugaccucaauuua

SEQ ID NO: 1620832 - RNA, 19 nt, Homo sapiens
  misc_RNA (1)...(19): siRNA sense strand
gcaggaggcgucugagucu

SEQ ID NO: 1620833 - RNA, 19 nt, Homo sapiens
  misc_RNA (1)...(19): siRNA sense strand
gaguucgaguaucugauga

SEQ ID NO: 1620834 - RNA, 19 nt, Homo sapiens
  misc_RNA (1)...(19): siRNA sense strand
aaaaggguguccagaacua

SEQ ID NO: 1620835 - RNA, 19 nt, Homo sapiens
  misc_RNA (1)...(19): siRNA sense strand
cuacaggacugcggacaag

SEQ ID NO: 1620836 - RNA, 19 nt, Homo sapiens
  misc_RNA (1)...(19): siRNA sense strand
acgcgcagcugauaguuca

SEQ ID NO: 1620837 - RNA, 19 nt, Homo sapiens
  misc_RNA (1)...(19): siRNA sense strand
cgaguucgaguaucugaug

SEQ ID NO: 1620838 - RNA, 19 nt, Homo sapiens
  misc_RNA (1)...(19): siRNA sense strand
caccauggcccaccucauc

SEQ ID NO: 1620839 - RNA, 19 nt, Homo sapiens
  misc_RNA (1)...(19): siRNA sense strand
gaaccaucagcgcugcaaa

SEQ ID NO: 1620840 - RNA, 19 nt, Homo sapiens
  misc_RNA (1)...(19): siRNA sense strand
cgaguccuuugcacauguu

SEQ ID NO: 1620841 - RNA, 19 nt, Homo sapiens
  misc_RNA (1)...(19): siRNA sense strand
acccugaacgggauuuaua

SEQ ID NO: 1620842 - RNA, 19 nt, Homo sapiens
  misc_RNA (1)...(19): siRNA sense strand
gcgucugagucuccaguga

SEQ ID NO: 1620843 - RNA, 19 nt, Homo sapiens
  misc_RNA (1)...(19): siRNA sense strand
gcgagggcaucgucauugc

SEQ ID NO: 1620844 - RNA, 19 nt, Homo sapiens
  misc_RNA (1)...(19): siRNA sense strand
cccgaaggaugauucaaag

SEQ ID NO: 1620845 - RNA, 19 nt, Homo sapiens
  misc_RNA (1)...(19): siRNA sense strand
agaagcaggaggcgucuga

SEQ ID NO: 1620846 - RNA, 19 nt, Homo sapiens
  misc_RNA (1)...(19): siRNA sense strand
gcgagaagagagagaagca

SEQ ID NO: 1620847 - RNA, 19 nt, Homo sapiens
  misc_RNA (1)...(19): siRNA sense strand
gccgcgaguucgaguaucu

SEQ ID NO: 1620848 - RNA, 19 nt, Homo sapiens
  misc_RNA (1)...(19): siRNA sense strand
ugccaucugaccucaauuu

SEQ ID NO: 1620849 - RNA, 19 nt, Homo sapiens
  misc_RNA (1)...(19): siRNA sense strand
caaacaucaagauaacguu

SEQ ID NO: 1620850 - RNA, 19 nt, Homo sapiens
  misc_RNA (1)...(19): siRNA sense strand
cgauggcucccgacaaaca

SEQ ID NO: 1620851 - RNA, 19 nt, Homo sapiens
  misc_RNA (1)...(19): siRNA sense strand
ggcgaguccuuugcacaug

SEQ ID NO: 1620852 - RNA, 19 nt, Homo sapiens
  misc_RNA (1)...(19): siRNA sense strand
agcacaaacaucaagauaa

SEQ ID NO: 1620853 - RNA, 19 nt, Homo sapiens
  misc_RNA (1)...(19): siRNA sense strand
gggaaaaggguguccagaa

SEQ ID NO: 1620854 - RNA, 19 nt, Homo sapiens
  misc_RNA (1)...(19): siRNA sense strand
acucacagccugaaaauga

SEQ ID NO: 1620855 - RNA, 19 nt, Homo sapiens
  misc_RNA (1)...(19): siRNA sense strand
guucgaguaucugaugaag

SEQ ID NO: 1620856 - RNA, 19 nt, Homo sapiens
  misc_RNA (1)...(19): siRNA sense strand
cgucugagucuccagugaa

SEQ ID NO: 1620857 - RNA, 19 nt, Homo sapiens
  misc_RNA (1)...(19): siRNA sense strand
gcaugggccacucgagcuu

SEQ ID NO: 1620858 - RNA, 19 nt, Homo sapiens
  misc_RNA (1)...(19): siRNA sense strand
ugacaacucacagccugaa

SEQ ID NO: 1620859 - RNA, 19 nt, Homo sapiens
  misc_RNA (1)...(19): siRNA sense strand
gcacaaacaucaagauaac

SEQ ID NO: 1620860 - RNA, 19 nt, Homo sapiens
  misc_RNA (1)...(19): siRNA sense strand
caucugaccucaauuuaau

SEQ ID NO: 1620861 - RNA, 19 nt, Homo sapiens
  misc_RNA (1)...(19): siRNA sense strand
ucgaguaucugaugaagaa

SEQ ID NO: 1620862 - RNA, 19 nt, Homo sapiens
  misc_RNA (1)...(19): siRNA sense strand
acaaacagcucacccugaa

SEQ ID NO: 1620863 - RNA, 19 nt, Homo sapiens
  misc_RNA (1)...(19): siRNA sense strand
gagcacaaacaucaagaua

SEQ ID NO: 1620864 - RNA, 19 nt, Homo sapiens
  misc_RNA (1)...(19): siRNA sense strand
caaagccgccuuacuccua

SEQ ID NO: 1620865 - RNA, 19 nt, Homo sapiens
  misc_RNA (1)...(19): siRNA sense strand
uuuaauggcugacaacuca

SEQ ID NO: 1620866 - RNA, 19 nt, Homo sapiens
  misc_RNA (1)...(19): siRNA sense strand
uacgauggcucccgacaaa

SEQ ID NO: 1620867 - RNA, 19 nt, Homo sapiens
  misc_RNA (1)...(19): siRNA sense strand
ugaacgggauuuauacaca

SEQ ID NO: 1620868 - RNA, 19 nt, Homo sapiens
  misc_RNA (1)...(19): siRNA sense strand
gagacagcccgaaggauga

SEQ ID NO: 1620869 - RNA, 19 nt, Homo sapiens
  misc_RNA (1)...(19): siRNA sense strand
gcccgaaggaugauucaaa

SEQ ID NO: 1620870 - RNA, 19 nt, Homo sapiens
  misc_RNA (1)...(19): siRNA sense strand
ucaauuuaauggcugacaa

SEQ ID NO: 1620871 - RNA, 19 nt, Homo sapiens
  misc_RNA (1)...(19): siRNA sense strand
ccaucugaccucaauuuaa

SEQ ID NO: 1620872 - RNA, 19 nt, Homo sapiens
  misc_RNA (1)...(19): siRNA sense strand
caaggugggccgagugaug

SEQ ID NO: 1620873 - RNA, 19 nt, Homo sapiens
  misc_RNA (1)...(19): siRNA sense strand
gccaucugaccucaauuua

SEQ ID NO: 1620874 - RNA, 19 nt, Homo sapiens
  misc_RNA (1)...(19): siRNA sense strand
gcaggaggcgucugagucu

SEQ ID NO: 1620875 - RNA, 19 nt, Homo sapiens
  misc_RNA (1)...(19): siRNA sense strand
gaguucgaguaucugauga

SEQ ID NO: 1620876 - RNA, 19 nt, Homo sapiens
  misc_RNA (1)...(19): siRNA sense strand
cuacaggacugcggacaag

SEQ ID NO: 1620877 - RNA, 19 nt, Homo sapiens
  misc_RNA (1)...(19): siRNA sense strand
acgcgcagcugauaguuca

SEQ ID NO: 1620878 - RNA, 19 nt, Homo sapiens
  misc_RNA (1)...(19): siRNA sense strand
cgaguucgaguaucugaug

SEQ ID NO: 1620879 - RNA, 19 nt, Homo sapiens
  misc_RNA (1)...(19): siRNA sense strand
caccauggcccaccucauc

SEQ ID NO: 1620880 - RNA, 19 nt, Homo sapiens
  misc_RNA (1)...(19): siRNA sense strand
gaaccaucagcgcugcaaa

SEQ ID NO: 1620881 - RNA, 19 nt, Homo sapiens
  misc_RNA (1)...(19): siRNA sense strand
acccugaacgggauuuaua

SEQ ID NO: 1620882 - RNA, 19 nt, Homo sapiens
  misc_RNA (1)...(19): siRNA sense strand
gcgucugagucuccaguga

SEQ ID NO: 1620883 - RNA, 19 nt, Homo sapiens
  misc_RNA (1)...(19): siRNA sense strand
cccgaaggaugauucaaag

SEQ ID NO: 1620884 - RNA, 19 nt, Homo sapiens
  misc_RNA (1)...(19): siRNA sense strand
agaagcaggaggcgucuga

SEQ ID NO: 1620885 - RNA, 19 nt, Homo sapiens
  misc_RNA (1)...(19): siRNA sense strand
gcgagaagagagagaagca

SEQ ID NO: 1620886 - RNA, 19 nt, Homo sapiens
  misc_RNA (1)...(19): siRNA sense strand
gccgcgaguucgaguaucu

SEQ ID NO: 1620887 - RNA, 19 nt, Homo sapiens
  misc_RNA (1)...(19): siRNA sense strand
ugccaucugaccucaauuu

SEQ ID NO: 1620888 - RNA, 19 nt, Homo sapiens
  misc_RNA (1)...(19): siRNA sense strand
caaacaucaagauaacguu

SEQ ID NO: 1620889 - RNA, 19 nt, Homo sapiens
  misc_RNA (1)...(19): siRNA sense strand
cgauggcucccgacaaaca

SEQ ID NO: 1620890 - RNA, 19 nt, Homo sapiens
  misc_RNA (1)...(19): siRNA sense strand
agcacaaacaucaagauaa

SEQ ID NO: 1620891 - RNA, 19 nt, Homo sapiens
  misc_RNA (1)...(19): siRNA sense strand
acucacagccugaaaauga

SEQ ID NO: 1620892 - RNA, 19 nt, Homo sapiens
  misc_RNA (1)...(19): siRNA sense strand
guucgaguaucugaugaag

SEQ ID NO: 1620893 - RNA, 19 nt, Homo sapiens
  misc_RNA (1)...(19): siRNA sense strand
cgucugagucuccagugaa

SEQ ID NO: 1620894 - RNA, 19 nt, Homo sapiens
  misc_RNA (1)...(19): siRNA sense strand
ugacaacucacagccugaa

SEQ ID NO: 1620895 - RNA, 19 nt, Homo sapiens
  misc_RNA (1)...(19): siRNA sense strand
gcaugggccacucgagcuu

SEQ ID NO: 1620896 - RNA, 19 nt, Homo sapiens
  misc_RNA (1)...(19): siRNA sense strand
gcacaaacaucaagauaac

SEQ ID NO: 1620897 - RNA, 19 nt, Homo sapiens
  misc_RNA (1)...(19): siRNA sense strand
caucugaccucaauuuaau

SEQ ID NO: 1620898 - RNA, 19 nt, Homo sapiens
  misc_RNA (1)...(19): siRNA sense strand
ucgaguaucugaugaagaa

SEQ ID NO: 1620899 - RNA, 19 nt, Homo sapiens
  misc_RNA (1)...(19): siRNA sense strand
acaaacagcucacccugaa

SEQ ID NO: 1620900 - RNA, 19 nt, Homo sapiens
  misc_RNA (1)...(19): siRNA sense strand
gagcacaaacaucaagaua

SEQ ID NO: 1620901 - RNA, 19 nt, Homo sapiens
  misc_RNA (1)...(19): siRNA sense strand
caaagccgccuuacuccua

SEQ ID NO: 1620902 - RNA, 19 nt, Homo sapiens
  misc_RNA (1)...(19): siRNA sense strand
uuuaauggcugacaacuca

SEQ ID NO: 1620903 - RNA, 19 nt, Homo sapiens
  misc_RNA (1)...(19): siRNA sense strand
uacgauggcucccgacaaa

SEQ ID NO: 1620904 - RNA, 19 nt, Homo sapiens
  misc_RNA (1)...(19): siRNA sense strand
ugaacgggauuuauacaca

SEQ ID NO: 1620905 - RNA, 19 nt, Homo sapiens
  misc_RNA (1)...(19): siRNA sense strand
gagacagcccgaaggauga

SEQ ID NO: 1620906 - RNA, 19 nt, Homo sapiens
  misc_RNA (1)...(19): siRNA sense strand
gcccgaaggaugauucaaa

SEQ ID NO: 1620907 - RNA, 19 nt, Homo sapiens
  misc_RNA (1)...(19): siRNA sense strand
ucaauuuaauggcugacaa

SEQ ID NO: 1620908 - RNA, 19 nt, Homo sapiens
  misc_RNA (1)...(19): siRNA sense strand
ccaucugaccucaauuuaa

SEQ ID NO: 1620909 - RNA, 19 nt, Homo sapiens
  misc_RNA (1)...(19): siRNA sense strand
gcgaguccuuugcacaugu

SEQ ID NO: 1620910 - RNA, 19 nt, Homo sapiens
  misc_RNA (1)...(19): siRNA sense strand
caaggugggccgagugaug

SEQ ID NO: 1620911 - RNA, 19 nt, Homo sapiens
  misc_RNA (1)...(19): siRNA sense strand
gccaucugaccucaauuua

SEQ ID NO: 1620912 - RNA, 19 nt, Homo sapiens
  misc_RNA (1)...(19): siRNA sense strand
gcaggaggcgucugagucu

SEQ ID NO: 1620913 - RNA, 19 nt, Homo sapiens
  misc_RNA (1)...(19): siRNA sense strand
gaguucgaguaucugauga

SEQ ID NO: 1620914 - RNA, 19 nt, Homo sapiens
  misc_RNA (1)...(19): siRNA sense strand
cuacaggacugcggacaag

SEQ ID NO: 1620915 - RNA, 19 nt, Homo sapiens
  misc_RNA (1)...(19): siRNA sense strand
acgcgcagcugauaguuca

SEQ ID NO: 1620916 - RNA, 19 nt, Homo sapiens
  misc_RNA (1)...(19): siRNA sense strand
cgaguucgaguaucugaug

SEQ ID NO: 1620917 - RNA, 19 nt, Homo sapiens
  misc_RNA (1)...(19): siRNA sense strand
caccauggcccaccucauc

SEQ ID NO: 1620918 - RNA, 19 nt, Homo sapiens
  misc_RNA (1)...(19): siRNA sense strand
gaaccaucagcgcugcaaa

SEQ ID NO: 1620919 - RNA, 19 nt, Homo sapiens
  misc_RNA (1)...(19): siRNA sense strand
cgaguccuuugcacauguu

SEQ ID NO: 1620920 - RNA, 19 nt, Homo sapiens
  misc_RNA (1)...(19): siRNA sense strand
acccugaacgggauuuaua

SEQ ID NO: 1620921 - RNA, 19 nt, Homo sapiens
  misc_RNA (1)...(19): siRNA sense strand
gcgucugagucuccaguga

SEQ ID NO: 1620922 - RNA, 19 nt, Homo sapiens
  misc_RNA (1)...(19): siRNA sense strand
cccgaaggaugauucaaag

SEQ ID NO: 1620923 - RNA, 19 nt, Homo sapiens
  misc_RNA (1)...(19): siRNA sense strand
agaagcaggaggcgucuga

SEQ ID NO: 1620924 - RNA, 19 nt, Homo sapiens
  misc_RNA (1)...(19): siRNA sense strand
gcgagaagagagagaagca

SEQ ID NO: 1620925 - RNA, 19 nt, Homo sapiens
  misc_RNA (1)...(19): siRNA sense strand
gccgcgaguucgaguaucu

SEQ ID NO: 1620926 - RNA, 19 nt, Homo sapiens
  misc_RNA (1)...(19): siRNA sense strand
ugccaucugaccucaauuu

SEQ ID NO: 1620927 - RNA, 19 nt, Homo sapiens
  misc_RNA (1)...(19): siRNA sense strand
caaacaucaagauaacguu

SEQ ID NO: 1620928 - RNA, 19 nt, Homo sapiens
  misc_RNA (1)...(19): siRNA sense strand
cgauggcucccgacaaaca

SEQ ID NO: 1620929 - RNA, 19 nt, Homo sapiens
  misc_RNA (1)...(19): siRNA sense strand
ggcgaguccuuugcacaug

SEQ ID NO: 1620930 - RNA, 19 nt, Homo sapiens
  misc_RNA (1)...(19): siRNA sense strand
agcacaaacaucaagauaa

SEQ ID NO: 1620931 - RNA, 19 nt, Homo sapiens
  misc_RNA (1)...(19): siRNA sense strand
acucacagccugaaaauga

SEQ ID NO: 1620932 - RNA, 19 nt, Homo sapiens
  misc_RNA (1)...(19): siRNA sense strand
guucgaguaucugaugaag

SEQ ID NO: 1620933 - RNA, 19 nt, Homo sapiens
  misc_RNA (1)...(19): siRNA sense strand
cgucugagucuccagugaa

SEQ ID NO: 1620934 - RNA, 19 nt, Homo sapiens
  misc_RNA (1)...(19): siRNA sense strand
ugacaacucacagccugaa

SEQ ID NO: 1620935 - RNA, 19 nt, Homo sapiens
  misc_RNA (1)...(19): siRNA sense strand
gcaugggccacucgagcuu

SEQ ID NO: 1620936 - RNA, 19 nt, Homo sapiens
  misc_RNA (1)...(19): siRNA sense strand
ggagcucagugaugacuug

SEQ ID NO: 1620937 - RNA, 19 nt, Homo sapiens
  misc_RNA (1)...(19): siRNA sense strand
ggaccaggaccaagaagug

SEQ ID NO: 1620938 - RNA, 19 nt, Homo sapiens
  misc_RNA (1)...(19): siRNA sense strand
gcucagugaugacuugcau

SEQ ID NO: 1620939 - RNA, 19 nt, Homo sapiens
  misc_RNA (1)...(19): siRNA sense strand
agcaggagcucagugauga

SEQ ID NO: 1620940 - RNA, 19 nt, Homo sapiens
  misc_RNA (1)...(19): siRNA sense strand
guggagcgcuaccgacagu

SEQ ID NO: 1620941 - RNA, 19 nt, Homo sapiens
  misc_RNA (1)...(19): siRNA sense strand
gaccaggaccaagaaguga

SEQ ID NO: 1620942 - RNA, 19 nt, Homo sapiens
  misc_RNA (1)...(19): siRNA sense strand
ggagcgcuaccgacaguuc

SEQ ID NO: 1620943 - RNA, 19 nt, Homo sapiens
  misc_RNA (1)...(19): siRNA sense strand
ucagugaugacuugcaugu

SEQ ID NO: 1620944 - RNA, 19 nt, Homo sapiens
  misc_RNA (1)...(19): siRNA sense strand
ggagcucagugaugacuug

SEQ ID NO: 1620945 - RNA, 19 nt, Homo sapiens
  misc_RNA (1)...(19): siRNA sense strand
ggaccaggaccaagaagug

SEQ ID NO: 1620946 - RNA, 19 nt, Homo sapiens
  misc_RNA (1)...(19): siRNA sense strand
gcucagugaugacuugcau

SEQ ID NO: 1620947 - RNA, 19 nt, Homo sapiens
  misc_RNA (1)...(19): siRNA sense strand
agcaggagcucagugauga

SEQ ID NO: 1620948 - RNA, 19 nt, Homo sapiens
  misc_RNA (1)...(19): siRNA sense strand
guggagcgcuaccgacagu

SEQ ID NO: 1620949 - RNA, 19 nt, Homo sapiens
  misc_RNA (1)...(19): siRNA sense strand
gaccaggaccaagaaguga

SEQ ID NO: 1620950 - RNA, 19 nt, Homo sapiens
  misc_RNA (1)...(19): siRNA sense strand
ggagcgcuaccgacaguuc

SEQ ID NO: 1620951 - RNA, 19 nt, Homo sapiens
  misc_RNA (1)...(19): siRNA sense strand
ucagugaugacuugcaugu

SEQ ID NO: 1620952 - RNA, 19 nt, Homo sapiens
  misc_RNA (1)...(19): siRNA sense strand
ggagcucagugaugacuug

SEQ ID NO: 1620953 - RNA, 19 nt, Homo sapiens
  misc_RNA (1)...(19): siRNA sense strand
ggaccaggaccaagaagug

SEQ ID NO: 1620954 - RNA, 19 nt, Homo sapiens
  misc_RNA (1)...(19): siRNA sense strand
gcucagugaugacuugcau

SEQ ID NO: 1620955 - RNA, 19 nt, Homo sapiens
  misc_RNA (1)...(19): siRNA sense strand
agcaggagcucagugauga

SEQ ID NO: 1620956 - RNA, 19 nt, Homo sapiens
  misc_RNA (1)...(19): siRNA sense strand
guggagcgcuaccgacagu

SEQ ID NO: 1620957 - RNA, 19 nt, Homo sapiens
  misc_RNA (1)...(19): siRNA sense strand
gaccaggaccaagaaguga

SEQ ID NO: 1620958 - RNA, 19 nt, Homo sapiens
  misc_RNA (1)...(19): siRNA sense strand
ggagcgcuaccgacaguuc

SEQ ID NO: 1620959 - RNA, 19 nt, Homo sapiens
  misc_RNA (1)...(19): siRNA sense strand
ucagugaugacuugcaugu

SEQ ID NO: 1620960 - RNA, 19 nt, Homo sapiens
  misc_RNA (1)...(19): siRNA sense strand
ggagcucagugaugacuug

SEQ ID NO: 1620961 - RNA, 19 nt, Homo sapiens
  misc_RNA (1)...(19): siRNA sense strand
ggaccaggaccaagaagug

SEQ ID NO: 1620962 - RNA, 19 nt, Homo sapiens
  misc_RNA (1)...(19): siRNA sense strand
gcucagugaugacuugcau

SEQ ID NO: 1620963 - RNA, 19 nt, Homo sapiens
  misc_RNA (1)...(19): siRNA sense strand
agcaggagcucagugauga

SEQ ID NO: 1620964 - RNA, 19 nt, Homo sapiens
  misc_RNA (1)...(19): siRNA sense strand
guggagcgcuaccgacagu

SEQ ID NO: 1620965 - RNA, 19 nt, Homo sapiens
  misc_RNA (1)...(19): siRNA sense strand
gaccaggaccaagaaguga

SEQ ID NO: 1620966 - RNA, 19 nt, Homo sapiens
  misc_RNA (1)...(19): siRNA sense strand
ggagcgcuaccgacaguuc

SEQ ID NO: 1620967 - RNA, 19 nt, Homo sapiens
  misc_RNA (1)...(19): siRNA sense strand
ucagugaugacuugcaugu

SEQ ID NO: 1620968 - RNA, 19 nt, Homo sapiens
  misc_RNA (1)...(19): siRNA sense strand
ggagcucagugaugacuug

SEQ ID NO: 1620969 - RNA, 19 nt, Homo sapiens
  misc_RNA (1)...(19): siRNA sense strand
ggaccaggaccaagaagug

SEQ ID NO: 1620970 - RNA, 19 nt, Homo sapiens
  misc_RNA (1)...(19): siRNA sense strand
gcucagugaugacuugcau

SEQ ID NO: 1620971 - RNA, 19 nt, Homo sapiens
  misc_RNA (1)...(19): siRNA sense strand
agcaggagcucagugauga

SEQ ID NO: 1620972 - RNA, 19 nt, Homo sapiens
  misc_RNA (1)...(19): siRNA sense strand
guggagcgcuaccgacagu

SEQ ID NO: 1620973 - RNA, 19 nt, Homo sapiens
  misc_RNA (1)...(19): siRNA sense strand
gaccaggaccaagaaguga

SEQ ID NO: 1620974 - RNA, 19 nt, Homo sapiens
  misc_RNA (1)...(19): siRNA sense strand
ggagcgcuaccgacaguuc

SEQ ID NO: 1620975 - RNA, 19 nt, Homo sapiens
  misc_RNA (1)...(19): siRNA sense strand
ucagugaugacuugcaugu

SEQ ID NO: 1620976 - RNA, 19 nt, Homo sapiens
  misc_RNA (1)...(19): siRNA sense strand
ggagcucagugaugacuug

SEQ ID NO: 1620977 - RNA, 19 nt, Homo sapiens
  misc_RNA (1)...(19): siRNA sense strand
ggaccaggaccaagaagug

SEQ ID NO: 1620978 - RNA, 19 nt, Homo sapiens
  misc_RNA (1)...(19): siRNA sense strand
gcucagugaugacuugcau

SEQ ID NO: 1620979 - RNA, 19 nt, Homo sapiens
  misc_RNA (1)...(19): siRNA sense strand
agcaggagcucagugauga

SEQ ID NO: 1620980 - RNA, 19 nt, Homo sapiens
  misc_RNA (1)...(19): siRNA sense strand
guggagcgcuaccgacagu

SEQ ID NO: 1620981 - RNA, 19 nt, Homo sapiens
  misc_RNA (1)...(19): siRNA sense strand
gaccaggaccaagaaguga

SEQ ID NO: 1620982 - RNA, 19 nt, Homo sapiens
  misc_RNA (1)...(19): siRNA sense strand
ggagcgcuaccgacaguuc

SEQ ID NO: 1620983 - RNA, 19 nt, Homo sapiens
  misc_RNA (1)...(19): siRNA sense strand
ucagugaugacuugcaugu

SEQ ID NO: 1620984 - RNA, 19 nt, Homo sapiens
  misc_RNA (1)...(19): siRNA sense strand
ggagcucagugaugacuug

SEQ ID NO: 1620985 - RNA, 19 nt, Homo sapiens
  misc_RNA (1)...(19): siRNA sense strand
ggaccaggaccaagaagug

SEQ ID NO: 1620986 - RNA, 19 nt, Homo sapiens
  misc_RNA (1)...(19): siRNA sense strand
gcucagugaugacuugcau

SEQ ID NO: 1620987 - RNA, 19 nt, Homo sapiens
  misc_RNA (1)...(19): siRNA sense strand
agcaggagcucagugauga

SEQ ID NO: 1620988 - RNA, 19 nt, Homo sapiens
  misc_RNA (1)...(19): siRNA sense strand
guggagcgcuaccgacagu

SEQ ID NO: 1620989 - RNA, 19 nt, Homo sapiens
  misc_RNA (1)...(19): siRNA sense strand
gaccaggaccaagaaguga

SEQ ID NO: 1620990 - RNA, 19 nt, Homo sapiens
  misc_RNA (1)...(19): siRNA sense strand
ggagcgcuaccgacaguuc

SEQ ID NO: 1620991 - RNA, 19 nt, Homo sapiens
  misc_RNA (1)...(19): siRNA sense strand
ucagugaugacuugcaugu

SEQ ID NO: 1620992 - RNA, 19 nt, Homo sapiens
  misc_RNA (1)...(19): siRNA sense strand
ggagcucagugaugacuug

SEQ ID NO: 1620993 - RNA, 19 nt, Homo sapiens
  misc_RNA (1)...(19): siRNA sense strand
ggaccaggaccaagaagug

SEQ ID NO: 1620994 - RNA, 19 nt, Homo sapiens
  misc_RNA (1)...(19): siRNA sense strand
gcucagugaugacuugcau

SEQ ID NO: 1620995 - RNA, 19 nt, Homo sapiens
  misc_RNA (1)...(19): siRNA sense strand
agcaggagcucagugauga

SEQ ID NO: 1620996 - RNA, 19 nt, Homo sapiens
  misc_RNA (1)...(19): siRNA sense strand
guggagcgcuaccgacagu

SEQ ID NO: 1620997 - RNA, 19 nt, Homo sapiens
  misc_RNA (1)...(19): siRNA sense strand
gaccaggaccaagaaguga

SEQ ID NO: 1620998 - RNA, 19 nt, Homo sapiens
  misc_RNA (1)...(19): siRNA sense strand
ggagcgcuaccgacaguuc

SEQ ID NO: 1620999 - RNA, 19 nt, Homo sapiens
  misc_RNA (1)...(19): siRNA sense strand
ucagugaugacuugcaugu

SEQ ID NO: 1621000 - RNA, 19 nt, Homo sapiens
  misc_RNA (1)...(19): siRNA sense strand
ggaaaaggauuguaagaua

SEQ ID NO: 1621001 - RNA, 19 nt, Homo sapiens
  misc_RNA (1)...(19): siRNA sense strand
ggauguggcuguuuccuuu

SEQ ID NO: 1621002 - RNA, 19 nt, Homo sapiens
  misc_RNA (1)...(19): siRNA sense strand
gaaggaaucuacacugaag

SEQ ID NO: 1621003 - RNA, 19 nt, Homo sapiens
  misc_RNA (1)...(19): siRNA sense strand
uaaagagggugauguggaa

SEQ ID NO: 1621004 - RNA, 19 nt, Homo sapiens
  misc_RNA (1)...(19): siRNA sense strand
caaaggauguggcuguuuc

SEQ ID NO: 1621005 - RNA, 19 nt, Homo sapiens
  misc_RNA (1)...(19): siRNA sense strand
ugaaagaggauaucagaaa

SEQ ID NO: 1621006 - RNA, 19 nt, Homo sapiens
  misc_RNA (1)...(19): siRNA sense strand
gaaagaggauaucagaaaa

SEQ ID NO: 1621007 - RNA, 19 nt, Homo sapiens
  misc_RNA (1)...(19): siRNA sense strand
gaaauugucgcccuucaug

SEQ ID NO: 1621008 - RNA, 19 nt, Homo sapiens
  misc_RNA (1)...(19): siRNA sense strand
gugcaaagaagauguaauu

SEQ ID NO: 1621009 - RNA, 19 nt, Homo sapiens
  misc_RNA (1)...(19): siRNA sense strand
gggaaagaguccacgugua

SEQ ID NO: 1621010 - RNA, 19 nt, Homo sapiens
  misc_RNA (1)...(19): siRNA sense strand
gaacaauccauccacaaau

SEQ ID NO: 1621011 - RNA, 19 nt, Homo sapiens
  misc_RNA (1)...(19): siRNA sense strand
ggaaagaguccacguguac

SEQ ID NO: 1621012 - RNA, 19 nt, Homo sapiens
  misc_RNA (1)...(19): siRNA sense strand
ccacguguacuauuucuuu

SEQ ID NO: 1621013 - RNA, 19 nt, Homo sapiens
  misc_RNA (1)...(19): siRNA sense strand
gaguccacguguacuauuu

SEQ ID NO: 1621014 - RNA, 19 nt, Homo sapiens
  misc_RNA (1)...(19): siRNA sense strand
uccaagagaugaagaacaa

SEQ ID NO: 1621015 - RNA, 19 nt, Homo sapiens
  misc_RNA (1)...(19): siRNA sense strand
gaauugugaagacucauuu

SEQ ID NO: 1621016 - RNA, 19 nt, Homo sapiens
  misc_RNA (1)...(19): siRNA sense strand
aacaauccauccacaaauu

SEQ ID NO: 1621017 - RNA, 19 nt, Homo sapiens
  misc_RNA (1)...(19): siRNA sense strand
cagaguuuguggagaaauu

SEQ ID NO: 1621018 - RNA, 19 nt, Homo sapiens
  misc_RNA (1)...(19): siRNA sense strand
ggacagguuccuuaugguu

SEQ ID NO: 1621019 - RNA, 19 nt, Homo sapiens
  misc_RNA (1)...(19): siRNA sense strand
gacaggauuauacaucaua

SEQ ID NO: 1621020 - RNA, 19 nt, Homo sapiens
  misc_RNA (1)...(19): siRNA sense strand
gaaaagaaaaccucaugaa

SEQ ID NO: 1621021 - RNA, 19 nt, Homo sapiens
  misc_RNA (1)...(19): siRNA sense strand
ggacaggauuauacaucau

SEQ ID NO: 1621022 - RNA, 19 nt, Homo sapiens
  misc_RNA (1)...(19): siRNA sense strand
gagcuuguggacaggauua

SEQ ID NO: 1621023 - RNA, 19 nt, Homo sapiens
  misc_RNA (1)...(19): siRNA sense strand
gaagaaguccaugggauuc

SEQ ID NO: 1621024 - RNA, 19 nt, Homo sapiens
  misc_RNA (1)...(19): siRNA sense strand
uccaugggauucuaaugua

SEQ ID NO: 1621025 - RNA, 19 nt, Homo sapiens
  misc_RNA (1)...(19): siRNA sense strand
acaauccauccacaaauua

SEQ ID NO: 1621026 - RNA, 19 nt, Homo sapiens
  misc_RNA (1)...(19): siRNA sense strand
ugaagaaguccaugggauu

SEQ ID NO: 1621027 - RNA, 19 nt, Homo sapiens
  misc_RNA (1)...(19): siRNA sense strand
gcaaaugaaggaaucuaca

SEQ ID NO: 1621028 - RNA, 19 nt, Homo sapiens
  misc_RNA (1)...(19): siRNA sense strand
gcaaaggauguggcuguuu

SEQ ID NO: 1621029 - RNA, 19 nt, Homo sapiens
  misc_RNA (1)...(19): siRNA sense strand
gaaguccaugggauucuaa

SEQ ID NO: 1621030 - RNA, 19 nt, Homo sapiens
  misc_RNA (1)...(19): siRNA sense strand
ccuuaugguuccugguaua

SEQ ID NO: 1621031 - RNA, 19 nt, Homo sapiens
  misc_RNA (1)...(19): siRNA sense strand
guuucgaacugagaucuaa

SEQ ID NO: 1621032 - RNA, 19 nt, Homo sapiens
  misc_RNA (1)...(19): siRNA sense strand
gaaucuacacugaaguuuc

SEQ ID NO: 1621033 - RNA, 19 nt, Homo sapiens
  misc_RNA (1)...(19): siRNA sense strand
caugggauucuaauguaua

SEQ ID NO: 1621034 - RNA, 19 nt, Homo sapiens
  misc_RNA (1)...(19): siRNA sense strand
cuagaauugugaagacuca

SEQ ID NO: 1621035 - RNA, 19 nt, Homo sapiens
  misc_RNA (1)...(19): siRNA sense strand
agaacaauccauccacaaa

SEQ ID NO: 1621036 - RNA, 19 nt, Homo sapiens
  misc_RNA (1)...(19): siRNA sense strand
ccaugggauucuaauguau

SEQ ID NO: 1621037 - RNA, 19 nt, Homo sapiens
  misc_RNA (1)...(19): siRNA sense strand
caacacugccagacgaaau

SEQ ID NO: 1621038 - RNA, 19 nt, Homo sapiens
  misc_RNA (1)...(19): siRNA sense strand
ggaaucuacacugaaguuu

SEQ ID NO: 1621039 - RNA, 19 nt, Homo sapiens
  misc_RNA (1)...(19): siRNA sense strand
acaguagcccugaaugaaa

SEQ ID NO: 1621040 - RNA, 19 nt, Homo sapiens
  misc_RNA (1)...(19): siRNA sense strand
cagacgaaauuaugaacca

SEQ ID NO: 1621041 - RNA, 19 nt, Homo sapiens
  misc_RNA (1)...(19): siRNA sense strand
augaaggaaucuacacuga

SEQ ID NO: 1621042 - RNA, 19 nt, Homo sapiens
  misc_RNA (1)...(19): siRNA sense strand
aagaaaaccucaugaaugg

SEQ ID NO: 1621043 - RNA, 19 nt, Homo sapiens
  misc_RNA (1)...(19): siRNA sense strand
caagagaugaagaacaauc

SEQ ID NO: 1621044 - RNA, 19 nt, Homo sapiens
  misc_RNA (1)...(19): siRNA sense strand
uggacaggauuauacauca

SEQ ID NO: 1621045 - RNA, 19 nt, Homo sapiens
  misc_RNA (1)...(19): siRNA sense strand
aaagaguccacguguacua

SEQ ID NO: 1621046 - RNA, 19 nt, Homo sapiens
  misc_RNA (1)...(19): siRNA sense strand
ccucaugaauggaguaaaa

SEQ ID NO: 1621047 - RNA, 19 nt, Homo sapiens
  misc_RNA (1)...(19): siRNA sense strand
aaagugcaaagaagaugua

SEQ ID NO: 1621048 - RNA, 19 nt, Homo sapiens
  misc_RNA (1)...(19): siRNA sense strand
gagcagcaaaugaaggaau

SEQ ID NO: 1621049 - RNA, 19 nt, Homo sapiens
  misc_RNA (1)...(19): siRNA sense strand
cagaaauugucgcccuuca

SEQ ID NO: 1621050 - RNA, 19 nt, Homo sapiens
  misc_RNA (1)...(19): siRNA sense strand
ggagaaauucaugcaagga

SEQ ID NO: 1621051 - RNA, 19 nt, Homo sapiens
  misc_RNA (1)...(19): siRNA sense strand
ggauuauacaucauacuuc

SEQ ID NO: 1621052 - RNA, 19 nt, Homo sapiens
  misc_RNA (1)...(19): siRNA sense strand
aaagaaaaccucaugaaug

SEQ ID NO: 1621053 - RNA, 19 nt, Homo sapiens
  misc_RNA (1)...(19): siRNA sense strand
uuacaguagcccugaauga

SEQ ID NO: 1621054 - RNA, 19 nt, Homo sapiens
  misc_RNA (1)...(19): siRNA sense strand
gaauucugaacuugacuau

SEQ ID NO: 1621055 - RNA, 19 nt, Homo sapiens
  misc_RNA (1)...(19): siRNA sense strand
gaagaccugaaagaggaua

SEQ ID NO: 1621056 - RNA, 19 nt, Homo sapiens
  misc_RNA (1)...(19): siRNA sense strand
aaucuacacugaaguuucg

SEQ ID NO: 1621057 - RNA, 19 nt, Homo sapiens
  misc_RNA (1)...(19): siRNA sense strand
ugaaggaaucuacacugaa

SEQ ID NO: 1621058 - RNA, 19 nt, Homo sapiens
  misc_RNA (1)...(19): siRNA sense strand
acgaaauuaugaaccagaa

SEQ ID NO: 1621059 - RNA, 19 nt, Homo sapiens
  misc_RNA (1)...(19): siRNA sense strand
gggauucuaauguauaaag

SEQ ID NO: 1621060 - RNA, 19 nt, Homo sapiens
  misc_RNA (1)...(19): siRNA sense strand
uacaguagcccugaaugaa

SEQ ID NO: 1621061 - RNA, 19 nt, Homo sapiens
  misc_RNA (1)...(19): siRNA sense strand
cauacuucguuccaagaga

SEQ ID NO: 1621062 - RNA, 19 nt, Homo sapiens
  misc_RNA (1)...(19): siRNA sense strand
gaauuacaggagacuggaa

SEQ ID NO: 1621063 - RNA, 19 nt, Homo sapiens
  misc_RNA (1)...(19): siRNA sense strand
auacuucguuccaagagau

SEQ ID NO: 1621064 - RNA, 19 nt, Homo sapiens
  misc_RNA (1)...(19): siRNA sense strand
caaauauugggauaaugug

SEQ ID NO: 1621065 - RNA, 19 nt, Homo sapiens
  misc_RNA (1)...(19): siRNA sense strand
caguagcccugaaugaaaa

SEQ ID NO: 1621066 - RNA, 19 nt, Homo sapiens
  misc_RNA (1)...(19): siRNA sense strand
guccaugggauucuaaugu

SEQ ID NO: 1621067 - RNA, 19 nt, Homo sapiens
  misc_RNA (1)...(19): siRNA sense strand
caugagaaagggaauuaca

SEQ ID NO: 1621068 - RNA, 19 nt, Homo sapiens
  misc_RNA (1)...(19): siRNA sense strand
gguggcuggucauccaaau

SEQ ID NO: 1621069 - RNA, 19 nt, Homo sapiens
  misc_RNA (1)...(19): siRNA sense strand
auuaugagcagcaaaugaa

SEQ ID NO: 1621070 - RNA, 19 nt, Homo sapiens
  misc_RNA (1)...(19): siRNA sense strand
acacugccagacgaaauua

SEQ ID NO: 1621071 - RNA, 19 nt, Homo sapiens
  misc_RNA (1)...(19): siRNA sense strand
uaugguuccugguauaaac

SEQ ID NO: 1621072 - RNA, 19 nt, Homo sapiens
  misc_RNA (1)...(19): siRNA sense strand
guaaaaucuuggugggaaa

SEQ ID NO: 1621073 - RNA, 19 nt, Homo sapiens
  misc_RNA (1)...(19): siRNA sense strand
uaaacauuaugagcagcaa

SEQ ID NO: 1621074 - RNA, 19 nt, Homo sapiens
  misc_RNA (1)...(19): siRNA sense strand
ccacaaauuacacaacacu

SEQ ID NO: 1621075 - RNA, 19 nt, Homo sapiens
  misc_RNA (1)...(19): siRNA sense strand
cagaaaagaggugauaaaa

SEQ ID NO: 1621076 - RNA, 19 nt, Homo sapiens
  misc_RNA (1)...(19): siRNA sense strand
ggaguaaaacaauuagaug

SEQ ID NO: 1621077 - RNA, 19 nt, Homo sapiens
  misc_RNA (1)...(19): siRNA sense strand
cuauaaagagggugaugug

SEQ ID NO: 1621078 - RNA, 19 nt, Homo sapiens
  misc_RNA (1)...(19): siRNA sense strand
auauugggauaauguggaa

SEQ ID NO: 1621079 - RNA, 19 nt, Homo sapiens
  misc_RNA (1)...(19): siRNA sense strand
gagaugaagaacaauccau

SEQ ID NO: 1621080 - RNA, 19 nt, Homo sapiens
  misc_RNA (1)...(19): siRNA sense strand
ggaaaagugcaaagaagau

SEQ ID NO: 1621081 - RNA, 19 nt, Homo sapiens
  misc_RNA (1)...(19): siRNA sense strand
cgaaauuaugaaccagaaa

SEQ ID NO: 1621082 - RNA, 19 nt, Homo sapiens
  misc_RNA (1)...(19): siRNA sense strand
gaaagaguccacguguacu

SEQ ID NO: 1621083 - RNA, 19 nt, Homo sapiens
  misc_RNA (1)...(19): siRNA sense strand
cagcaaaugaaggaaucua

SEQ ID NO: 1621084 - RNA, 19 nt, Homo sapiens
  misc_RNA (1)...(19): siRNA sense strand
uggaaaggaagccaucaga

SEQ ID NO: 1621085 - RNA, 19 nt, Homo sapiens
  misc_RNA (1)...(19): siRNA sense strand
cuacgaagaccugaaagag

SEQ ID NO: 1621086 - RNA, 19 nt, Homo sapiens
  misc_RNA (1)...(19): siRNA sense strand
agaauugugaagacucauu

SEQ ID NO: 1621087 - RNA, 19 nt, Homo sapiens
  misc_RNA (1)...(19): siRNA sense strand
ucauugccaccuacccuaa

SEQ ID NO: 1621088 - RNA, 19 nt, Homo sapiens
  misc_RNA (1)...(19): siRNA sense strand
gucaaauauugggauaaug

SEQ ID NO: 1621089 - RNA, 19 nt, Homo sapiens
  misc_RNA (1)...(19): siRNA sense strand
ugaaaaguuugaagaaguc

SEQ ID NO: 1621090 - RNA, 19 nt, Homo sapiens
  misc_RNA (1)...(19): siRNA sense strand
gcuuguggacaggauuaua

SEQ ID NO: 1621091 - RNA, 19 nt, Homo sapiens
  misc_RNA (1)...(19): siRNA sense strand
gauccuuuccagaguuugu

SEQ ID NO: 1621092 - RNA, 19 nt, Homo sapiens
  misc_RNA (1)...(19): siRNA sense strand
aaugguggcuggucaucca

SEQ ID NO: 1621093 - RNA, 19 nt, Homo sapiens
  misc_RNA (1)...(19): siRNA sense strand
gaagaacacccaauacuuu

SEQ ID NO: 1621094 - RNA, 19 nt, Homo sapiens
  misc_RNA (1)...(19): siRNA sense strand
cgacugaucuucuuccuaa

SEQ ID NO: 1621095 - RNA, 19 nt, Homo sapiens
  misc_RNA (1)...(19): siRNA sense strand
ggaagaauaucuggagaaa

SEQ ID NO: 1621096 - RNA, 19 nt, Homo sapiens
  misc_RNA (1)...(19): siRNA sense strand
agaagaaccugaaugauga

SEQ ID NO: 1621097 - RNA, 19 nt, Homo sapiens
  misc_RNA (1)...(19): siRNA sense strand
gagaagaaccugaaugaug

SEQ ID NO: 1621098 - RNA, 19 nt, Homo sapiens
  misc_RNA (1)...(19): siRNA sense strand
gaugagaucuuggauagga

SEQ ID NO: 1621099 - RNA, 19 nt, Homo sapiens
  misc_RNA (1)...(19): siRNA sense strand
ggacaauccuuugguaaau

SEQ ID NO: 1621100 - RNA, 19 nt, Homo sapiens
  misc_RNA (1)...(19): siRNA sense strand
aaacacaucuaccgacuga

SEQ ID NO: 1621101 - RNA, 19 nt, Homo sapiens
  misc_RNA (1)...(19): siRNA sense strand
gaaaagaucugaaguuggu

SEQ ID NO: 1621102 - RNA, 19 nt, Homo sapiens
  misc_RNA (1)...(19): siRNA sense strand
ugaaguugguccaugguua

SEQ ID NO: 1621103 - RNA, 19 nt, Homo sapiens
  misc_RNA (1)...(19): siRNA sense strand
ugauuuaucuggcucguaa

SEQ ID NO: 1621104 - RNA, 19 nt, Homo sapiens
  misc_RNA (1)...(19): siRNA sense strand
gaaaacaauugcaagauga

SEQ ID NO: 1621105 - RNA, 19 nt, Homo sapiens
  misc_RNA (1)...(19): siRNA sense strand
gaaccugaaugaugagauc

SEQ ID NO: 1621106 - RNA, 19 nt, Homo sapiens
  misc_RNA (1)...(19): siRNA sense strand
ggaagaacacccaauacuu

SEQ ID NO: 1621107 - RNA, 19 nt, Homo sapiens
  misc_RNA (1)...(19): siRNA sense strand
caaaagauauucugcgaaa

SEQ ID NO: 1621108 - RNA, 19 nt, Homo sapiens
  misc_RNA (1)...(19): siRNA sense strand
gcuggugacuggaagaauu

SEQ ID NO: 1621109 - RNA, 19 nt, Homo sapiens
  misc_RNA (1)...(19): siRNA sense strand
ggauuaagaacaucaggua

SEQ ID NO: 1621110 - RNA, 19 nt, Homo sapiens
  misc_RNA (1)...(19): siRNA sense strand
caucagguauagaacaauu

SEQ ID NO: 1621111 - RNA, 19 nt, Homo sapiens
  misc_RNA (1)...(19): siRNA sense strand
gaacaucagguauagaaca

SEQ ID NO: 1621112 - RNA, 19 nt, Homo sapiens
  misc_RNA (1)...(19): siRNA sense strand
caucacaccucauuugaag

SEQ ID NO: 1621113 - RNA, 19 nt, Homo sapiens
  misc_RNA (1)...(19): siRNA sense strand
caaaggaggaaaucaagaa

SEQ ID NO: 1621114 - RNA, 19 nt, Homo sapiens
  misc_RNA (1)...(19): siRNA sense strand
aaaggaagaacacccaaua

SEQ ID NO: 1621115 - RNA, 19 nt, Homo sapiens
  misc_RNA (1)...(19): siRNA sense strand
gacaauccuuugguaaauu

SEQ ID NO: 1621116 - RNA, 19 nt, Homo sapiens
  misc_RNA (1)...(19): siRNA sense strand
ggaaaacaauugcaagaug

SEQ ID NO: 1621117 - RNA, 19 nt, Homo sapiens
  misc_RNA (1)...(19): siRNA sense strand
ugaaagagaauccaaagga

SEQ ID NO: 1621118 - RNA, 19 nt, Homo sapiens
  misc_RNA (1)...(19): siRNA sense strand
uagaacaauuggagaagaa

SEQ ID NO: 1621119 - RNA, 19 nt, Homo sapiens
  misc_RNA (1)...(19): siRNA sense strand
gaaaugacucucccuggau

SEQ ID NO: 1621120 - RNA, 19 nt, Homo sapiens
  misc_RNA (1)...(19): siRNA sense strand
gaaguugguccaugguuau

SEQ ID NO: 1621121 - RNA, 19 nt, Homo sapiens
  misc_RNA (1)...(19): siRNA sense strand
gccuaugguuccugguuua

SEQ ID NO: 1621122 - RNA, 19 nt, Homo sapiens
  misc_RNA (1)...(19): siRNA sense strand
uagagaagaaccugaauga

SEQ ID NO: 1621123 - RNA, 19 nt, Homo sapiens
  misc_RNA (1)...(19): siRNA sense strand
uagcagaccagaugacauu

SEQ ID NO: 1621124 - RNA, 19 nt, Homo sapiens
  misc_RNA (1)...(19): siRNA sense strand
gaggaaaucaagaagauca

SEQ ID NO: 1621125 - RNA, 19 nt, Homo sapiens
  misc_RNA (1)...(19): siRNA sense strand
aaaugacucucccuggauu

SEQ ID NO: 1621126 - RNA, 19 nt, Homo sapiens
  misc_RNA (1)...(19): siRNA sense strand
uuaagaacaucagguauag

SEQ ID NO: 1621127 - RNA, 19 nt, Homo sapiens
  misc_RNA (1)...(19): siRNA sense strand
gcgaaaagaucugaaguug

SEQ ID NO: 1621128 - RNA, 19 nt, Homo sapiens
  misc_RNA (1)...(19): siRNA sense strand
caaggauguuucagucuca

SEQ ID NO: 1621129 - RNA, 19 nt, Homo sapiens
  misc_RNA (1)...(19): siRNA sense strand
cauuugaagugaugaagga

SEQ ID NO: 1621130 - RNA, 19 nt, Homo sapiens
  misc_RNA (1)...(19): siRNA sense strand
cauagcaaauccccuuuua

SEQ ID NO: 1621131 - RNA, 19 nt, Homo sapiens
  misc_RNA (1)...(19): siRNA sense strand
uauccuaaaucagguacua

SEQ ID NO: 1621132 - RNA, 19 nt, Homo sapiens
  misc_RNA (1)...(19): siRNA sense strand
ggccuaugguuccugguuu

SEQ ID NO: 1621133 - RNA, 19 nt, Homo sapiens
  misc_RNA (1)...(19): siRNA sense strand
guauagaacaauuggagaa

SEQ ID NO: 1621134 - RNA, 19 nt, Homo sapiens
  misc_RNA (1)...(19): siRNA sense strand
ggaaaucaagaagaucauu

SEQ ID NO: 1621135 - RNA, 19 nt, Homo sapiens
  misc_RNA (1)...(19): siRNA sense strand
acauugugauagccacuua

SEQ ID NO: 1621136 - RNA, 19 nt, Homo sapiens
  misc_RNA (1)...(19): siRNA sense strand
gauucuaaaugauggagau

SEQ ID NO: 1621137 - RNA, 19 nt, Homo sapiens
  misc_RNA (1)...(19): siRNA sense strand
gacaugauucuaaaugaug

SEQ ID NO: 1621138 - RNA, 19 nt, Homo sapiens
  misc_RNA (1)...(19): siRNA sense strand
cuacuuggguuagugaaau

SEQ ID NO: 1621139 - RNA, 19 nt, Homo sapiens
  misc_RNA (1)...(19): siRNA sense strand
gacucucccuggauuaaga

SEQ ID NO: 1621140 - RNA, 19 nt, Homo sapiens
  misc_RNA (1)...(19): siRNA sense strand
aagaacaucagguauagaa

SEQ ID NO: 1621141 - RNA, 19 nt, Homo sapiens
  misc_RNA (1)...(19): siRNA sense strand
cuaaaucagguacuacuug

SEQ ID NO: 1621142 - RNA, 19 nt, Homo sapiens
  misc_RNA (1)...(19): siRNA sense strand
gaagauaugaaagagaauc

SEQ ID NO: 1621143 - RNA, 19 nt, Homo sapiens
  misc_RNA (1)...(19): siRNA sense strand
cagaccagaugacauugug

SEQ ID NO: 1621144 - RNA, 19 nt, Homo sapiens
  misc_RNA (1)...(19): siRNA sense strand
gggaagaauaucuggagaa

SEQ ID NO: 1621145 - RNA, 19 nt, Homo sapiens
  misc_RNA (1)...(19): siRNA sense strand
gaacaauuggagaagaauc

SEQ ID NO: 1621146 - RNA, 19 nt, Homo sapiens
  misc_RNA (1)...(19): siRNA sense strand
auacacaucuaccaacuac

SEQ ID NO: 1621147 - RNA, 19 nt, Homo sapiens
  misc_RNA (1)...(19): siRNA sense strand
aggaggaaaucaagaagau

SEQ ID NO: 1621148 - RNA, 19 nt, Homo sapiens
  misc_RNA (1)...(19): siRNA sense strand
gauaugaaagagaauccaa

SEQ ID NO: 1621149 - RNA, 19 nt, Homo sapiens
  misc_RNA (1)...(19): siRNA sense strand
augaugagaucuuggauag

SEQ ID NO: 1621150 - RNA, 19 nt, Homo sapiens
  misc_RNA (1)...(19): siRNA sense strand
ggacggcuggugacuggaa

SEQ ID NO: 1621151 - RNA, 19 nt, Homo sapiens
  misc_RNA (1)...(19): siRNA sense strand
ucagguacuacuuggguua

SEQ ID NO: 1621152 - RNA, 19 nt, Homo sapiens
  misc_RNA (1)...(19): siRNA sense strand
cagaugacauugugauagc

SEQ ID NO: 1621153 - RNA, 19 nt, Homo sapiens
  misc_RNA (1)...(19): siRNA sense strand
gaucuucuuccuaaaucuu

SEQ ID NO: 1621154 - RNA, 19 nt, Homo sapiens
  misc_RNA (1)...(19): siRNA sense strand
ggauguuucagucucauau

SEQ ID NO: 1621155 - RNA, 19 nt, Homo sapiens
  misc_RNA (1)...(19): siRNA sense strand
ucacaccucauuugaagug

SEQ ID NO: 1621156 - RNA, 19 nt, Homo sapiens
  misc_RNA (1)...(19): siRNA sense strand
guuccugguuuacucaugu

SEQ ID NO: 1621157 - RNA, 19 nt, Homo sapiens
  misc_RNA (1)...(19): siRNA sense strand
aacaucagguauagaacaa

SEQ ID NO: 1621158 - RNA, 19 nt, Homo sapiens
  misc_RNA (1)...(19): siRNA sense strand
ugaaugaugagaucuugga

SEQ ID NO: 1621159 - RNA, 19 nt, Homo sapiens
  misc_RNA (1)...(19): siRNA sense strand
ccugaaugaugagaucuug

SEQ ID NO: 1621160 - RNA, 19 nt, Homo sapiens
  misc_RNA (1)...(19): siRNA sense strand
ccaaaggaggaaaucaaga

SEQ ID NO: 1621161 - RNA, 19 nt, Homo sapiens
  misc_RNA (1)...(19): siRNA sense strand
uguaagcgagguuuuauua

SEQ ID NO: 1621162 - RNA, 19 nt, Homo sapiens
  misc_RNA (1)...(19): siRNA sense strand
caauuccgcacagagauuu

SEQ ID NO: 1621163 - RNA, 19 nt, Homo sapiens
  misc_RNA (1)...(19): siRNA sense strand
caccucauuugaagugaug

SEQ ID NO: 1621164 - RNA, 19 nt, Homo sapiens
  misc_RNA (1)...(19): siRNA sense strand
gaagaauaucuggagaaau

SEQ ID NO: 1621165 - RNA, 19 nt, Homo sapiens
  misc_RNA (1)...(19): siRNA sense strand
ccugguaccugggaagaau

SEQ ID NO: 1621166 - RNA, 19 nt, Homo sapiens
  misc_RNA (1)...(19): siRNA sense strand
gcagaccagaugacauugu

SEQ ID NO: 1621167 - RNA, 19 nt, Homo sapiens
  misc_RNA (1)...(19): siRNA sense strand
ucaauuccgcacagagauu

SEQ ID NO: 1621168 - RNA, 19 nt, Homo sapiens
  misc_RNA (1)...(19): siRNA sense strand
caucuaccaacuacaguga

SEQ ID NO: 1621169 - RNA, 19 nt, Homo sapiens
  misc_RNA (1)...(19): siRNA sense strand
gauuaagaacaucagguau

SEQ ID NO: 1621170 - RNA, 19 nt, Homo sapiens
  misc_RNA (1)...(19): siRNA sense strand
gauguuucagucucauauu

SEQ ID NO: 1621171 - RNA, 19 nt, Homo sapiens
  misc_RNA (1)...(19): siRNA sense strand
guaaugccaaggauguuuc

SEQ ID NO: 1621172 - RNA, 19 nt, Homo sapiens
  misc_RNA (1)...(19): siRNA sense strand
auagaacaauuggagaaga

SEQ ID NO: 1621173 - RNA, 19 nt, Homo sapiens
  misc_RNA (1)...(19): siRNA sense strand
gaccagaugacauugugau

SEQ ID NO: 1621174 - RNA, 19 nt, Homo sapiens
  misc_RNA (1)...(19): siRNA sense strand
guccaaaacugcacuucaa

SEQ ID NO: 1621175 - RNA, 19 nt, Homo sapiens
  misc_RNA (1)...(19): siRNA sense strand
cuggugacuggaagaauua

SEQ ID NO: 1621176 - RNA, 19 nt, Homo sapiens
  misc_RNA (1)...(19): siRNA sense strand
acacaucuaccgacugauc

SEQ ID NO: 1621177 - RNA, 19 nt, Homo sapiens
  misc_RNA (1)...(19): siRNA sense strand
ccagaugacauugugauag

SEQ ID NO: 1621178 - RNA, 19 nt, Homo sapiens
  misc_RNA (1)...(19): siRNA sense strand
ucuaccaacuacagugaug

SEQ ID NO: 1621179 - RNA, 19 nt, Homo sapiens
  misc_RNA (1)...(19): siRNA sense strand
gaagugaugaaggacaauc

SEQ ID NO: 1621180 - RNA, 19 nt, Homo sapiens
  misc_RNA (1)...(19): siRNA sense strand
uugaagugaugaaggacaa

SEQ ID NO: 1621181 - RNA, 19 nt, Homo sapiens
  misc_RNA (1)...(19): siRNA sense strand
aaugaugagaucuuggaua

SEQ ID NO: 1621182 - RNA, 19 nt, Homo sapiens
  misc_RNA (1)...(19): siRNA sense strand
cuaaaugauggagauauug

SEQ ID NO: 1621183 - RNA, 19 nt, Homo sapiens
  misc_RNA (1)...(19): siRNA sense strand
uagcaaauccccuuuuaug

SEQ ID NO: 1621184 - RNA, 19 nt, Homo sapiens
  misc_RNA (1)...(19): siRNA sense strand
caaaacugcacuucaauuc

SEQ ID NO: 1621185 - RNA, 19 nt, Homo sapiens
  misc_RNA (1)...(19): siRNA sense strand
ccaucacaccucauuugaa

SEQ ID NO: 1621186 - RNA, 19 nt, Homo sapiens
  misc_RNA (1)...(19): siRNA sense strand
uacuuggguuagugaaauu

SEQ ID NO: 1621187 - RNA, 19 nt, Homo sapiens
  misc_RNA (1)...(19): siRNA sense strand
acagaaauguccaaaacug

SEQ ID NO: 1621188 - RNA, 19 nt, Homo sapiens
  misc_RNA (1)...(19): siRNA sense strand
ggaaaaguggccuaugguu

SEQ ID NO: 1621189 - RNA, 19 nt, Homo sapiens
  misc_RNA (1)...(19): siRNA sense strand
cguaaugccaaggauguuu

SEQ ID NO: 1621190 - RNA, 19 nt, Homo sapiens
  misc_RNA (1)...(19): siRNA sense strand
gagaauccaaaggaggaaa

SEQ ID NO: 1621191 - RNA, 19 nt, Homo sapiens
  misc_RNA (1)...(19): siRNA sense strand
cuaugaagauaugaaagag

SEQ ID NO: 1621192 - RNA, 19 nt, Homo sapiens
  misc_RNA (1)...(19): siRNA sense strand
uuacagccuuuuccuggua

SEQ ID NO: 1621193 - RNA, 19 nt, Homo sapiens
  misc_RNA (1)...(19): siRNA sense strand
gcaaaugccucuacuguaa

SEQ ID NO: 1621194 - RNA, 19 nt, Homo sapiens
  misc_RNA (1)...(19): siRNA sense strand
gaacaacuauggagucaaa

SEQ ID NO: 1621195 - RNA, 19 nt, Homo sapiens
  misc_RNA (1)...(19): siRNA sense strand
caacaugacugauggagua

SEQ ID NO: 1621196 - RNA, 19 nt, Homo sapiens
  misc_RNA (1)...(19): siRNA sense strand
gaagaagaauccaaugaaa

SEQ ID NO: 1621197 - RNA, 19 nt, Homo sapiens
  misc_RNA (1)...(19): siRNA sense strand
gcacaucacuuacgagaga

SEQ ID NO: 1621198 - RNA, 19 nt, Homo sapiens
  misc_RNA (1)...(19): siRNA sense strand
gacaauaccugcgaaauga

SEQ ID NO: 1621199 - RNA, 19 nt, Homo sapiens
  misc_RNA (1)...(19): siRNA sense strand
gcacacaaauguagugguu

SEQ ID NO: 1621200 - RNA, 19 nt, Homo sapiens
  misc_RNA (1)...(19): siRNA sense strand
gaacauguacugaagguaa

SEQ ID NO: 1621201 - RNA, 19 nt, Homo sapiens
  misc_RNA (1)...(19): siRNA sense strand
gaagcuagcagccaguuua

SEQ ID NO: 1621202 - RNA, 19 nt, Homo sapiens
  misc_RNA (1)...(19): siRNA sense strand
guacaagccuggcguguug

SEQ ID NO: 1621203 - RNA, 19 nt, Homo sapiens
  misc_RNA (1)...(19): siRNA sense strand
uaacauccaucuccuggua

SEQ ID NO: 1621204 - RNA, 19 nt, Homo sapiens
  misc_RNA (1)...(19): siRNA sense strand
caacaaucuuggcaguuua

SEQ ID NO: 1621205 - RNA, 19 nt, Homo sapiens
  misc_RNA (1)...(19): siRNA sense strand
cgaagaccaugaacguaua

SEQ ID NO: 1621206 - RNA, 19 nt, Homo sapiens
  misc_RNA (1)...(19): siRNA sense strand
ggaagaagaauccaaugaa

SEQ ID NO: 1621207 - RNA, 19 nt, Homo sapiens
  misc_RNA (1)...(19): siRNA sense strand
gagauccucuuuaugaaau

SEQ ID NO: 1621208 - RNA, 19 nt, Homo sapiens
  misc_RNA (1)...(19): siRNA sense strand
cgagagaggcaccaaguua

SEQ ID NO: 1621209 - RNA, 19 nt, Homo sapiens
  misc_RNA (1)...(19): siRNA sense strand
guaacuacauacaaucuga

SEQ ID NO: 1621210 - RNA, 19 nt, Homo sapiens
  misc_RNA (1)...(19): siRNA sense strand
gaagaugauuccuaugaag

SEQ ID NO: 1621211 - RNA, 19 nt, Homo sapiens
  misc_RNA (1)...(19): siRNA sense strand
cagauugaguggcagaaua

SEQ ID NO: 1621212 - RNA, 19 nt, Homo sapiens
  misc_RNA (1)...(19): siRNA sense strand
cugcagcgcuuguccauuu

SEQ ID NO: 1621213 - RNA, 19 nt, Homo sapiens
  misc_RNA (1)...(19): siRNA sense strand
gagagcaguugaaauggaa

SEQ ID NO: 1621214 - RNA, 19 nt, Homo sapiens
  misc_RNA (1)...(19): siRNA sense strand
ggacaauaccugcgaaaug

SEQ ID NO: 1621215 - RNA, 19 nt, Homo sapiens
  misc_RNA (1)...(19): siRNA sense strand
caaccaaacuaaugcacaa

SEQ ID NO: 1621216 - RNA, 19 nt, Homo sapiens
  misc_RNA (1)...(19): siRNA sense strand
ucaacaaucuuggcaguuu

SEQ ID NO: 1621217 - RNA, 19 nt, Homo sapiens
  misc_RNA (1)...(19): siRNA sense strand
ggagagaaauugagaagcu

SEQ ID NO: 1621218 - RNA, 19 nt, Homo sapiens
  misc_RNA (1)...(19): siRNA sense strand
cuacuguaaucgcuauuua

SEQ ID NO: 1621219 - RNA, 19 nt, Homo sapiens
  misc_RNA (1)...(19): siRNA sense strand
caguugaaauggaagaaua

SEQ ID NO: 1621220 - RNA, 19 nt, Homo sapiens
  misc_RNA (1)...(19): siRNA sense strand
uaagcaggcugacagugua

SEQ ID NO: 1621221 - RNA, 19 nt, Homo sapiens
  misc_RNA (1)...(19): siRNA sense strand
cagcuuagccggaguuaaa

SEQ ID NO: 1621222 - RNA, 19 nt, Homo sapiens
  misc_RNA (1)...(19): siRNA sense strand
gaagcgcacuuacgagcaa

SEQ ID NO: 1621223 - RNA, 19 nt, Homo sapiens
  misc_RNA (1)...(19): siRNA sense strand
uaccaaagccuaacuuaaa

SEQ ID NO: 1621224 - RNA, 19 nt, Homo sapiens
  misc_RNA (1)...(19): siRNA sense strand
ugacaucgcuucccauuuu

SEQ ID NO: 1621225 - RNA, 19 nt, Homo sapiens
  misc_RNA (1)...(19): siRNA sense strand
gaagaugcaaggagcagua

SEQ ID NO: 1621226 - RNA, 19 nt, Homo sapiens
  misc_RNA (1)...(19): siRNA sense strand
gaagaaguguguccgugau

SEQ ID NO: 1621227 - RNA, 19 nt, Homo sapiens
  misc_RNA (1)...(19): siRNA sense strand
gaagaaugcaucugagaau

SEQ ID NO: 1621228 - RNA, 19 nt, Homo sapiens
  misc_RNA (1)...(19): siRNA sense strand
ggaaauguccggucuuuac

SEQ ID NO: 1621229 - RNA, 19 nt, Homo sapiens
  misc_RNA (1)...(19): siRNA sense strand
ucacauugaugaagagaug

SEQ ID NO: 1621230 - RNA, 19 nt, Homo sapiens
  misc_RNA (1)...(19): siRNA sense strand
gcuaaugccucuucucucu

SEQ ID NO: 1621231 - RNA, 19 nt, Homo sapiens
  misc_RNA (1)...(19): siRNA sense strand
ggaauacuguaaagaacau

SEQ ID NO: 1621232 - RNA, 19 nt, Homo sapiens
  misc_RNA (1)...(19): siRNA sense strand
ugaagagccuguuguuuua

SEQ ID NO: 1621233 - RNA, 19 nt, Homo sapiens
  misc_RNA (1)...(19): siRNA sense strand
uagagcaagcuguuuauua

SEQ ID NO: 1621234 - RNA, 19 nt, Homo sapiens
  misc_RNA (1)...(19): siRNA sense strand
ucaggucacugccaugauu

SEQ ID NO: 1621235 - RNA, 19 nt, Homo sapiens
  misc_RNA (1)...(19): siRNA sense strand
gagagaaauugagaagcua

SEQ ID NO: 1621236 - RNA, 19 nt, Homo sapiens
  misc_RNA (1)...(19): siRNA sense strand
gcucaaccauauguuaauu

SEQ ID NO: 1621237 - RNA, 19 nt, Homo sapiens
  misc_RNA (1)...(19): siRNA sense strand
ccuaaaaucucuaacgaua

SEQ ID NO: 1621238 - RNA, 19 nt, Homo sapiens
  misc_RNA (1)...(19): siRNA sense strand
ucaacaaucucagucugua

SEQ ID NO: 1621239 - RNA, 19 nt, Homo sapiens
  misc_RNA (1)...(19): siRNA sense strand
ggaagaaugcaucugagaa

SEQ ID NO: 1621240 - RNA, 19 nt, Homo sapiens
  misc_RNA (1)...(19): siRNA sense strand
aaacgaaaguuagaugaug

SEQ ID NO: 1621241 - RNA, 19 nt, Homo sapiens
  misc_RNA (1)...(19): siRNA sense strand
uuaccgagauccucuuuau

SEQ ID NO: 1621242 - RNA, 19 nt, Homo sapiens
  misc_RNA (1)...(19): siRNA sense strand
ggaacaguuugacaacaug

SEQ ID NO: 1621243 - RNA, 19 nt, Homo sapiens
  misc_RNA (1)...(19): siRNA sense strand
gaugagcgcuuaucuaacc

SEQ ID NO: 1621244 - RNA, 19 nt, Homo sapiens
  misc_RNA (1)...(19): siRNA sense strand
ugaagaugauuccuaugaa

SEQ ID NO: 1621245 - RNA, 19 nt, Homo sapiens
  misc_RNA (1)...(19): siRNA sense strand
acagagagcaguugaaaug

SEQ ID NO: 1621246 - RNA, 19 nt, Homo sapiens
  misc_RNA (1)...(19): siRNA sense strand
cagaauagcacaauugaca

SEQ ID NO: 1621247 - RNA, 19 nt, Homo sapiens
  misc_RNA (1)...(19): siRNA sense strand
aagcugcagugcccuauaa

SEQ ID NO: 1621248 - RNA, 19 nt, Homo sapiens
  misc_RNA (1)...(19): siRNA sense strand
gggaacaguuugacaacau

SEQ ID NO: 1621249 - RNA, 19 nt, Homo sapiens
  misc_RNA (1)...(19): siRNA sense strand
ugagaaugaugagcgcuua

SEQ ID NO: 1621250 - RNA, 19 nt, Homo sapiens
  misc_RNA (1)...(19): siRNA sense strand
gaaugcaucugagaaugau

SEQ ID NO: 1621251 - RNA, 19 nt, Homo sapiens
  misc_RNA (1)...(19): siRNA sense strand
gaugacaguuccucagaca

SEQ ID NO: 1621252 - RNA, 19 nt, Homo sapiens
  misc_RNA (1)...(19): siRNA sense strand
ggaaggaagaugacaguuc

SEQ ID NO: 1621253 - RNA, 19 nt, Homo sapiens
  misc_RNA (1)...(19): siRNA sense strand
uaguaagacugcugacaaa

SEQ ID NO: 1621254 - RNA, 19 nt, Homo sapiens
  misc_RNA (1)...(19): siRNA sense strand
gcaagcuguuuauuacugu

SEQ ID NO: 1621255 - RNA, 19 nt, Homo sapiens
  misc_RNA (1)...(19): siRNA sense strand
ggaaccaaccaaacuaaug

SEQ ID NO: 1621256 - RNA, 19 nt, Homo sapiens
  misc_RNA (1)...(19): siRNA sense strand
gcagccaguuuaugguuau

SEQ ID NO: 1621257 - RNA, 19 nt, Homo sapiens
  misc_RNA (1)...(19): siRNA sense strand
gaacauaaagcugagaaag

SEQ ID NO: 1621258 - RNA, 19 nt, Homo sapiens
  misc_RNA (1)...(19): siRNA sense strand
gauggugaaucgacucuca

SEQ ID NO: 1621259 - RNA, 19 nt, Homo sapiens
  misc_RNA (1)...(19): siRNA sense strand
gagaagagaguaguauuca

SEQ ID NO: 1621260 - RNA, 19 nt, Homo sapiens
  misc_RNA (1)...(19): siRNA sense strand
gcacaaugcaucugauagu

SEQ ID NO: 1621261 - RNA, 19 nt, Homo sapiens
  misc_RNA (1)...(19): siRNA sense strand
ugagaaagucccagcagua

SEQ ID NO: 1621262 - RNA, 19 nt, Homo sapiens
  misc_RNA (1)...(19): siRNA sense strand
ucacaggcauccagagugu

SEQ ID NO: 1621263 - RNA, 19 nt, Homo sapiens
  misc_RNA (1)...(19): siRNA sense strand
uccaaacccuugaugcuaa

SEQ ID NO: 1621264 - RNA, 19 nt, Homo sapiens
  misc_RNA (1)...(19): siRNA sense strand
agagcaagcuguuuauuac

SEQ ID NO: 1621265 - RNA, 19 nt, Homo sapiens
  misc_RNA (1)...(19): siRNA sense strand
gaggaaccaaccaaacuaa

SEQ ID NO: 1621266 - RNA, 19 nt, Homo sapiens
  misc_RNA (1)...(19): siRNA sense strand
guagcagccucagcacuuu

SEQ ID NO: 1621267 - RNA, 19 nt, Homo sapiens
  misc_RNA (1)...(19): siRNA sense strand
gaugcugaguggcuauuug

SEQ ID NO: 1621268 - RNA, 19 nt, Homo sapiens
  misc_RNA (1)...(19): siRNA sense strand
gagagaggcaccaaguuau

SEQ ID NO: 1621269 - RNA, 19 nt, Homo sapiens
  misc_RNA (1)...(19): siRNA sense strand
aaaggcagauaucccugua

SEQ ID NO: 1621270 - RNA, 19 nt, Homo sapiens
  misc_RNA (1)...(19): siRNA sense strand
cagcugaaucuguugcuua

SEQ ID NO: 1621271 - RNA, 19 nt, Homo sapiens
  misc_RNA (1)...(19): siRNA sense strand
cagauucuacuuugaguuu

SEQ ID NO: 1621272 - RNA, 19 nt, Homo sapiens
  misc_RNA (1)...(19): siRNA sense strand
aaagauggccgcacacaug

SEQ ID NO: 1621273 - RNA, 19 nt, Homo sapiens
  misc_RNA (1)...(19): siRNA sense strand
cauauugccguucaacuuu

SEQ ID NO: 1621274 - RNA, 19 nt, Homo sapiens
  misc_RNA (1)...(19): siRNA sense strand
ggaaacggaaggucuuaug

SEQ ID NO: 1621275 - RNA, 19 nt, Homo sapiens
  misc_RNA (1)...(19): siRNA sense strand
gaagagaguaguauucacu

SEQ ID NO: 1621276 - RNA, 19 nt, Homo sapiens
  misc_RNA (1)...(19): siRNA sense strand
ccaagacgauguuguugag

SEQ ID NO: 1621277 - RNA, 19 nt, Homo sapiens
  misc_RNA (1)...(19): siRNA sense strand
gaagagaugggaccuaaaa

SEQ ID NO: 1621278 - RNA, 19 nt, Homo sapiens
  misc_RNA (1)...(19): siRNA sense strand
acauaaagcugagaaaguc

SEQ ID NO: 1621279 - RNA, 19 nt, Homo sapiens
  misc_RNA (1)...(19): siRNA sense strand
gaugcuaauugcucccaaa

SEQ ID NO: 1621280 - RNA, 19 nt, Homo sapiens
  misc_RNA (1)...(19): siRNA sense strand
caacgcaccaguuuccauu

SEQ ID NO: 1621281 - RNA, 19 nt, Homo sapiens
  misc_RNA (1)...(19): siRNA sense strand
ugaaauggaagaauaguuc

SEQ ID NO: 1621282 - RNA, 19 nt, Homo sapiens
  misc_RNA (1)...(19): siRNA sense strand
auagugagguugaccaaga

SEQ ID NO: 1621283 - RNA, 19 nt, Homo sapiens
  misc_RNA (1)...(19): siRNA sense strand
gcacuuacgagcaaaugga

SEQ ID NO: 1621284 - RNA, 19 nt, Homo sapiens
  misc_RNA (1)...(19): siRNA sense strand
guucaacuuucaaugaugu

SEQ ID NO: 1621285 - RNA, 19 nt, Homo sapiens
  misc_RNA (1)...(19): siRNA sense strand
gauacucugcucaaccaua

SEQ ID NO: 1621286 - RNA, 19 nt, Homo sapiens
  misc_RNA (1)...(19): siRNA sense strand
aaaagaggaugguucaaaa

SEQ ID NO: 1621287 - RNA, 19 nt, Homo sapiens
  misc_RNA (1)...(19): siRNA sense strand
ugaggaugcuucagaaucu

SEQ ID NO: 1621288 - RNA, 19 nt, Homo sapiens
  misc_RNA (1)...(19): siRNA sense strand
aggcagauaucccuguaaa

SEQ ID NO: 1621289 - RNA, 19 nt, Homo sapiens
  misc_RNA (1)...(19): siRNA sense strand
gaaaguuagaugaugauag

SEQ ID NO: 1621290 - RNA, 19 nt, Homo sapiens
  misc_RNA (1)...(19): siRNA sense strand
ggacccaucacuuacgaaa

SEQ ID NO: 1621291 - RNA, 19 nt, Homo sapiens
  misc_RNA (1)...(19): siRNA sense strand
ugacagagagcaguugaaa

SEQ ID NO: 1621292 - RNA, 19 nt, Homo sapiens
  misc_RNA (1)...(19): siRNA sense strand
gaaccaaccaaacuaaugc

SEQ ID NO: 1621293 - RNA, 19 nt, Homo sapiens
  misc_RNA (1)...(19): siRNA sense strand
gcaaaugccucuacuguaa

SEQ ID NO: 1621294 - RNA, 19 nt, Homo sapiens
  misc_RNA (1)...(19): siRNA sense strand
gaacaacuauggagucaaa

SEQ ID NO: 1621295 - RNA, 19 nt, Homo sapiens
  misc_RNA (1)...(19): siRNA sense strand
caacaugacugauggagua

SEQ ID NO: 1621296 - RNA, 19 nt, Homo sapiens
  misc_RNA (1)...(19): siRNA sense strand
gaagaagaauccaaugaaa

SEQ ID NO: 1621297 - RNA, 19 nt, Homo sapiens
  misc_RNA (1)...(19): siRNA sense strand
gcacaucacuuacgagaga

SEQ ID NO: 1621298 - RNA, 19 nt, Homo sapiens
  misc_RNA (1)...(19): siRNA sense strand
gacaauaccugcgaaauga

SEQ ID NO: 1621299 - RNA, 19 nt, Homo sapiens
  misc_RNA (1)...(19): siRNA sense strand
gcacacaaauguagugguu

SEQ ID NO: 1621300 - RNA, 19 nt, Homo sapiens
  misc_RNA (1)...(19): siRNA sense strand
gaacauguacugaagguaa

SEQ ID NO: 1621301 - RNA, 19 nt, Homo sapiens
  misc_RNA (1)...(19): siRNA sense strand
gaagcuagcagccaguuua

SEQ ID NO: 1621302 - RNA, 19 nt, Homo sapiens
  misc_RNA (1)...(19): siRNA sense strand
guacaagccuggcguguug

SEQ ID NO: 1621303 - RNA, 19 nt, Homo sapiens
  misc_RNA (1)...(19): siRNA sense strand
uaacauccaucuccuggua

SEQ ID NO: 1621304 - RNA, 19 nt, Homo sapiens
  misc_RNA (1)...(19): siRNA sense strand
caacaaucuuggcaguuua

SEQ ID NO: 1621305 - RNA, 19 nt, Homo sapiens
  misc_RNA (1)...(19): siRNA sense strand
cgaagaccaugaacguaua

SEQ ID NO: 1621306 - RNA, 19 nt, Homo sapiens
  misc_RNA (1)...(19): siRNA sense strand
ggaagaagaauccaaugaa

SEQ ID NO: 1621307 - RNA, 19 nt, Homo sapiens
  misc_RNA (1)...(19): siRNA sense strand
gagauccucuuuaugaaau

SEQ ID NO: 1621308 - RNA, 19 nt, Homo sapiens
  misc_RNA (1)...(19): siRNA sense strand
cgagagaggcaccaaguua

SEQ ID NO: 1621309 - RNA, 19 nt, Homo sapiens
  misc_RNA (1)...(19): siRNA sense strand
guaacuacauacaaucuga

SEQ ID NO: 1621310 - RNA, 19 nt, Homo sapiens
  misc_RNA (1)...(19): siRNA sense strand
gaagaugauuccuaugaag

SEQ ID NO: 1621311 - RNA, 19 nt, Homo sapiens
  misc_RNA (1)...(19): siRNA sense strand
cagauugaguggcagaaua

SEQ ID NO: 1621312 - RNA, 19 nt, Homo sapiens
  misc_RNA (1)...(19): siRNA sense strand
cugcagcgcuuguccauuu

SEQ ID NO: 1621313 - RNA, 19 nt, Homo sapiens
  misc_RNA (1)...(19): siRNA sense strand
gagagcaguugaaauggaa

SEQ ID NO: 1621314 - RNA, 19 nt, Homo sapiens
  misc_RNA (1)...(19): siRNA sense strand
ggacaauaccugcgaaaug

SEQ ID NO: 1621315 - RNA, 19 nt, Homo sapiens
  misc_RNA (1)...(19): siRNA sense strand
caaccaaacuaaugcacaa

SEQ ID NO: 1621316 - RNA, 19 nt, Homo sapiens
  misc_RNA (1)...(19): siRNA sense strand
ucaacaaucuuggcaguuu

SEQ ID NO: 1621317 - RNA, 19 nt, Homo sapiens
  misc_RNA (1)...(19): siRNA sense strand
ggagagaaauugagaagcu

SEQ ID NO: 1621318 - RNA, 19 nt, Homo sapiens
  misc_RNA (1)...(19): siRNA sense strand
cuacuguaaucgcuauuua

SEQ ID NO: 1621319 - RNA, 19 nt, Homo sapiens
  misc_RNA (1)...(19): siRNA sense strand
caguugaaauggaagaaua

SEQ ID NO: 1621320 - RNA, 19 nt, Homo sapiens
  misc_RNA (1)...(19): siRNA sense strand
uaagcaggcugacagugua

SEQ ID NO: 1621321 - RNA, 19 nt, Homo sapiens
  misc_RNA (1)...(19): siRNA sense strand
cagcuuagccggaguuaaa

SEQ ID NO: 1621322 - RNA, 19 nt, Homo sapiens
  misc_RNA (1)...(19): siRNA sense strand
gaagcgcacuuacgagcaa

SEQ ID NO: 1621323 - RNA, 19 nt, Homo sapiens
  misc_RNA (1)...(19): siRNA sense strand
uaccaaagccuaacuuaaa

SEQ ID NO: 1621324 - RNA, 19 nt, Homo sapiens
  misc_RNA (1)...(19): siRNA sense strand
ugacaucgcuucccauuuu

SEQ ID NO: 1621325 - RNA, 19 nt, Homo sapiens
  misc_RNA (1)...(19): siRNA sense strand
gaagaugcaaggagcagua

SEQ ID NO: 1621326 - RNA, 19 nt, Homo sapiens
  misc_RNA (1)...(19): siRNA sense strand
gaagaaguguguccgugau

SEQ ID NO: 1621327 - RNA, 19 nt, Homo sapiens
  misc_RNA (1)...(19): siRNA sense strand
gaagaaugcaucugagaau

SEQ ID NO: 1621328 - RNA, 19 nt, Homo sapiens
  misc_RNA (1)...(19): siRNA sense strand
ggaaauguccggucuuuac

SEQ ID NO: 1621329 - RNA, 19 nt, Homo sapiens
  misc_RNA (1)...(19): siRNA sense strand
ucacauugaugaagagaug

SEQ ID NO: 1621330 - RNA, 19 nt, Homo sapiens
  misc_RNA (1)...(19): siRNA sense strand
gcuaaugccucuucucucu

SEQ ID NO: 1621331 - RNA, 19 nt, Homo sapiens
  misc_RNA (1)...(19): siRNA sense strand
ggaauacuguaaagaacau

SEQ ID NO: 1621332 - RNA, 19 nt, Homo sapiens
  misc_RNA (1)...(19): siRNA sense strand
ugaagagccuguuguuuua

SEQ ID NO: 1621333 - RNA, 19 nt, Homo sapiens
  misc_RNA (1)...(19): siRNA sense strand
uagagcaagcuguuuauua

SEQ ID NO: 1621334 - RNA, 19 nt, Homo sapiens
  misc_RNA (1)...(19): siRNA sense strand
ucaggucacugccaugauu

SEQ ID NO: 1621335 - RNA, 19 nt, Homo sapiens
  misc_RNA (1)...(19): siRNA sense strand
gagagaaauugagaagcua

SEQ ID NO: 1621336 - RNA, 19 nt, Homo sapiens
  misc_RNA (1)...(19): siRNA sense strand
gcucaaccauauguuaauu

SEQ ID NO: 1621337 - RNA, 19 nt, Homo sapiens
  misc_RNA (1)...(19): siRNA sense strand
ccuaaaaucucuaacgaua

SEQ ID NO: 1621338 - RNA, 19 nt, Homo sapiens
  misc_RNA (1)...(19): siRNA sense strand
ucaacaaucucagucugua

SEQ ID NO: 1621339 - RNA, 19 nt, Homo sapiens
  misc_RNA (1)...(19): siRNA sense strand
ggaagaaugcaucugagaa

SEQ ID NO: 1621340 - RNA, 19 nt, Homo sapiens
  misc_RNA (1)...(19): siRNA sense strand
aaacgaaaguuagaugaug

SEQ ID NO: 1621341 - RNA, 19 nt, Homo sapiens
  misc_RNA (1)...(19): siRNA sense strand
uuaccgagauccucuuuau

SEQ ID NO: 1621342 - RNA, 19 nt, Homo sapiens
  misc_RNA (1)...(19): siRNA sense strand
ggaacaguuugacaacaug

SEQ ID NO: 1621343 - RNA, 19 nt, Homo sapiens
  misc_RNA (1)...(19): siRNA sense strand
gaugagcgcuuaucuaacc

SEQ ID NO: 1621344 - RNA, 19 nt, Homo sapiens
  misc_RNA (1)...(19): siRNA sense strand
ugaagaugauuccuaugaa

SEQ ID NO: 1621345 - RNA, 19 nt, Homo sapiens
  misc_RNA (1)...(19): siRNA sense strand
acagagagcaguugaaaug

SEQ ID NO: 1621346 - RNA, 19 nt, Homo sapiens
  misc_RNA (1)...(19): siRNA sense strand
cagaauagcacaauugaca

SEQ ID NO: 1621347 - RNA, 19 nt, Homo sapiens
  misc_RNA (1)...(19): siRNA sense strand
aagcugcagugcccuauaa

SEQ ID NO: 1621348 - RNA, 19 nt, Homo sapiens
  misc_RNA (1)...(19): siRNA sense strand
gggaacaguuugacaacau

SEQ ID NO: 1621349 - RNA, 19 nt, Homo sapiens
  misc_RNA (1)...(19): siRNA sense strand
ugagaaugaugagcgcuua

SEQ ID NO: 1621350 - RNA, 19 nt, Homo sapiens
  misc_RNA (1)...(19): siRNA sense strand
gaaugcaucugagaaugau

SEQ ID NO: 1621351 - RNA, 19 nt, Homo sapiens
  misc_RNA (1)...(19): siRNA sense strand
gaugacaguuccucagaca

SEQ ID NO: 1621352 - RNA, 19 nt, Homo sapiens
  misc_RNA (1)...(19): siRNA sense strand
ggaaggaagaugacaguuc

SEQ ID NO: 1621353 - RNA, 19 nt, Homo sapiens
  misc_RNA (1)...(19): siRNA sense strand
uaguaagacugcugacaaa

SEQ ID NO: 1621354 - RNA, 19 nt, Homo sapiens
  misc_RNA (1)...(19): siRNA sense strand
gcaagcuguuuauuacugu

SEQ ID NO: 1621355 - RNA, 19 nt, Homo sapiens
  misc_RNA (1)...(19): siRNA sense strand
ggaaccaaccaaacuaaug

SEQ ID NO: 1621356 - RNA, 19 nt, Homo sapiens
  misc_RNA (1)...(19): siRNA sense strand
gcagccaguuuaugguuau

SEQ ID NO: 1621357 - RNA, 19 nt, Homo sapiens
  misc_RNA (1)...(19): siRNA sense strand
gaacauaaagcugagaaag

SEQ ID NO: 1621358 - RNA, 19 nt, Homo sapiens
  misc_RNA (1)...(19): siRNA sense strand
gauggugaaucgacucuca

SEQ ID NO: 1621359 - RNA, 19 nt, Homo sapiens
  misc_RNA (1)...(19): siRNA sense strand
gagaagagaguaguauuca

SEQ ID NO: 1621360 - RNA, 19 nt, Homo sapiens
  misc_RNA (1)...(19): siRNA sense strand
gcacaaugcaucugauagu

SEQ ID NO: 1621361 - RNA, 19 nt, Homo sapiens
  misc_RNA (1)...(19): siRNA sense strand
ugagaaagucccagcagua

SEQ ID NO: 1621362 - RNA, 19 nt, Homo sapiens
  misc_RNA (1)...(19): siRNA sense strand
ucacaggcauccagagugu

SEQ ID NO: 1621363 - RNA, 19 nt, Homo sapiens
  misc_RNA (1)...(19): siRNA sense strand
uccaaacccuugaugcuaa

SEQ ID NO: 1621364 - RNA, 19 nt, Homo sapiens
  misc_RNA (1)...(19): siRNA sense strand
agagcaagcuguuuauuac

SEQ ID NO: 1621365 - RNA, 19 nt, Homo sapiens
  misc_RNA (1)...(19): siRNA sense strand
gaggaaccaaccaaacuaa

SEQ ID NO: 1621366 - RNA, 19 nt, Homo sapiens
  misc_RNA (1)...(19): siRNA sense strand
guagcagccucagcacuuu

SEQ ID NO: 1621367 - RNA, 19 nt, Homo sapiens
  misc_RNA (1)...(19): siRNA sense strand
gaugcugaguggcuauuug

SEQ ID NO: 1621368 - RNA, 19 nt, Homo sapiens
  misc_RNA (1)...(19): siRNA sense strand
gagagaggcaccaaguuau

SEQ ID NO: 1621369 - RNA, 19 nt, Homo sapiens
  misc_RNA (1)...(19): siRNA sense strand
aaaggcagauaucccugua

SEQ ID NO: 1621370 - RNA, 19 nt, Homo sapiens
  misc_RNA (1)...(19): siRNA sense strand
cagcugaaucuguugcuua

SEQ ID NO: 1621371 - RNA, 19 nt, Homo sapiens
  misc_RNA (1)...(19): siRNA sense strand
cagauucuacuuugaguuu

SEQ ID NO: 1621372 - RNA, 19 nt, Homo sapiens
  misc_RNA (1)...(19): siRNA sense strand
aaagauggccgcacacaug

SEQ ID NO: 1621373 - RNA, 19 nt, Homo sapiens
  misc_RNA (1)...(19): siRNA sense strand
cauauugccguucaacuuu

SEQ ID NO: 1621374 - RNA, 19 nt, Homo sapiens
  misc_RNA (1)...(19): siRNA sense strand
ggaaacggaaggucuuaug

SEQ ID NO: 1621375 - RNA, 19 nt, Homo sapiens
  misc_RNA (1)...(19): siRNA sense strand
gaagagaguaguauucacu

SEQ ID NO: 1621376 - RNA, 19 nt, Homo sapiens
  misc_RNA (1)...(19): siRNA sense strand
ccaagacgauguuguugag

SEQ ID NO: 1621377 - RNA, 19 nt, Homo sapiens
  misc_RNA (1)...(19): siRNA sense strand
gaagagaugggaccuaaaa

SEQ ID NO: 1621378 - RNA, 19 nt, Homo sapiens
  misc_RNA (1)...(19): siRNA sense strand
acauaaagcugagaaaguc

SEQ ID NO: 1621379 - RNA, 19 nt, Homo sapiens
  misc_RNA (1)...(19): siRNA sense strand
gaugcuaauugcucccaaa

SEQ ID NO: 1621380 - RNA, 19 nt, Homo sapiens
  misc_RNA (1)...(19): siRNA sense strand
caacgcaccaguuuccauu

SEQ ID NO: 1621381 - RNA, 19 nt, Homo sapiens
  misc_RNA (1)...(19): siRNA sense strand
ugaaauggaagaauaguuc

SEQ ID NO: 1621382 - RNA, 19 nt, Homo sapiens
  misc_RNA (1)...(19): siRNA sense strand
auagugagguugaccaaga

SEQ ID NO: 1621383 - RNA, 19 nt, Homo sapiens
  misc_RNA (1)...(19): siRNA sense strand
gcacuuacgagcaaaugga

SEQ ID NO: 1621384 - RNA, 19 nt, Homo sapiens
  misc_RNA (1)...(19): siRNA sense strand
guucaacuuucaaugaugu

SEQ ID NO: 1621385 - RNA, 19 nt, Homo sapiens
  misc_RNA (1)...(19): siRNA sense strand
gauacucugcucaaccaua

SEQ ID NO: 1621386 - RNA, 19 nt, Homo sapiens
  misc_RNA (1)...(19): siRNA sense strand
aaaagaggaugguucaaaa

SEQ ID NO: 1621387 - RNA, 19 nt, Homo sapiens
  misc_RNA (1)...(19): siRNA sense strand
ugaggaugcuucagaaucu

SEQ ID NO: 1621388 - RNA, 19 nt, Homo sapiens
  misc_RNA (1)...(19): siRNA sense strand
aggcagauaucccuguaaa

SEQ ID NO: 1621389 - RNA, 19 nt, Homo sapiens
  misc_RNA (1)...(19): siRNA sense strand
gaaaguuagaugaugauag

SEQ ID NO: 1621390 - RNA, 19 nt, Homo sapiens
  misc_RNA (1)...(19): siRNA sense strand
ggacccaucacuuacgaaa

SEQ ID NO: 1621391 - RNA, 19 nt, Homo sapiens
  misc_RNA (1)...(19): siRNA sense strand
ugacagagagcaguugaaa

SEQ ID NO: 1621392 - RNA, 19 nt, Homo sapiens
  misc_RNA (1)...(19): siRNA sense strand
gaaccaaccaaacuaaugc

SEQ ID NO: 1621393 - RNA, 19 nt, Homo sapiens
  misc_RNA (1)...(19): siRNA sense strand
ccaagaaccugcucaagaa

SEQ ID NO: 1621394 - RNA, 19 nt, Homo sapiens
  misc_RNA (1)...(19): siRNA sense strand
ugaaggagcacccugacua

SEQ ID NO: 1621395 - RNA, 19 nt, Homo sapiens
  misc_RNA (1)...(19): siRNA sense strand
agacuggcauagacccuua

SEQ ID NO: 1621396 - RNA, 19 nt, Homo sapiens
  misc_RNA (1)...(19): siRNA sense strand
gaccaagacuggcauagac

SEQ ID NO: 1621397 - RNA, 19 nt, Homo sapiens
  misc_RNA (1)...(19): siRNA sense strand
ggagcacccugacuacaag

SEQ ID NO: 1621398 - RNA, 19 nt, Homo sapiens
  misc_RNA (1)...(19): siRNA sense strand
gcuacguggugcccuguaa

SEQ ID NO: 1621399 - RNA, 19 nt, Homo sapiens
  misc_RNA (1)...(19): siRNA sense strand
gcagagaagcggccauaca

SEQ ID NO: 1621400 - RNA, 19 nt, Homo sapiens
  misc_RNA (1)...(19): siRNA sense strand
guggugcccuguaacugua

SEQ ID NO: 1621401 - RNA, 19 nt, Homo sapiens
  misc_RNA (1)...(19): siRNA sense strand
gaaggagcacccugacuac

SEQ ID NO: 1621402 - RNA, 19 nt, Homo sapiens
  misc_RNA (1)...(19): siRNA sense strand
cccaagaaccugcucaaga

SEQ ID NO: 1621403 - RNA, 19 nt, Homo sapiens
  misc_RNA (1)...(19): siRNA sense strand
cagagaagcggccauacau

SEQ ID NO: 1621404 - RNA, 19 nt, Homo sapiens
  misc_RNA (1)...(19): siRNA sense strand
agaaccugcucaagaagga

SEQ ID NO: 1621405 - RNA, 19 nt, Homo sapiens
  misc_RNA (1)...(19): siRNA sense strand
ucaagaaggacagguaugu

SEQ ID NO: 1621406 - RNA, 19 nt, Homo sapiens
  misc_RNA (1)...(19): siRNA sense strand
gaagcggccauacaucgau

SEQ ID NO: 1621407 - RNA, 19 nt, Homo sapiens
  misc_RNA (1)...(19): siRNA sense strand
gcucaagaaggacagguau

SEQ ID NO: 1621408 - RNA, 19 nt, Homo sapiens
  misc_RNA (1)...(19): siRNA sense strand
gaucagcaaacgccuaggu

SEQ ID NO: 1621409 - RNA, 19 nt, Homo sapiens
  misc_RNA (1)...(19): siRNA sense strand
cgagcgccauccagaagau

SEQ ID NO: 1621410 - RNA, 19 nt, Homo sapiens
  misc_RNA (1)...(19): siRNA sense strand
caacucggagaucagcaaa

SEQ ID NO: 1621411 - RNA, 19 nt, Homo sapiens
  misc_RNA (1)...(19): siRNA sense strand
gcgcccagcacaugaagga

SEQ ID NO: 1621412 - RNA, 19 nt, Homo sapiens
  misc_RNA (1)...(19): siRNA sense strand
gcucgagcgccauccagaa

SEQ ID NO: 1621413 - RNA, 19 nt, Homo sapiens
  misc_RNA (1)...(19): siRNA sense strand
ccacgcuacggccauguaa

SEQ ID NO: 1621414 - RNA, 19 nt, Homo sapiens
  misc_RNA (1)...(19): siRNA sense strand
ugaccaagacuggcauaga

SEQ ID NO: 1621415 - RNA, 19 nt, Homo sapiens
  misc_RNA (1)...(19): siRNA sense strand
gcaagauggcccaggaaaa

SEQ ID NO: 1621416 - RNA, 19 nt, Homo sapiens
  misc_RNA (1)...(19): siRNA sense strand
acgccuaggugccgaaugg

SEQ ID NO: 1621417 - RNA, 19 nt, Homo sapiens
  misc_RNA (1)...(19): siRNA sense strand
uggcauagacccuuauucg

SEQ ID NO: 1621418 - RNA, 19 nt, Homo sapiens
  misc_RNA (1)...(19): siRNA sense strand
caccauaaaucuugacuua

SEQ ID NO: 1621419 - RNA, 19 nt, Homo sapiens
  misc_RNA (1)...(19): siRNA sense strand
ucaacaagcugaccguaua

SEQ ID NO: 1621420 - RNA, 19 nt, Homo sapiens
  misc_RNA (1)...(19): siRNA sense strand
ggucauaacugagcaacua

SEQ ID NO: 1621421 - RNA, 19 nt, Homo sapiens
  misc_RNA (1)...(19): siRNA sense strand
uauaugaacucgaugcuaa

SEQ ID NO: 1621422 - RNA, 19 nt, Homo sapiens
  misc_RNA (1)...(19): siRNA sense strand
gguggaacauaaauaauga

SEQ ID NO: 1621423 - RNA, 19 nt, Homo sapiens
  misc_RNA (1)...(19): siRNA sense strand
ugaagaagccaagaauuua

SEQ ID NO: 1621424 - RNA, 19 nt, Homo sapiens
  misc_RNA (1)...(19): siRNA sense strand
gaaaauagcacaaguuaug

SEQ ID NO: 1621425 - RNA, 19 nt, Homo sapiens
  misc_RNA (1)...(19): siRNA sense strand
gaacguuucaguauaaaug

SEQ ID NO: 1621426 - RNA, 19 nt, Homo sapiens
  misc_RNA (1)...(19): siRNA sense strand
uagcacaaguuaugaagaa

SEQ ID NO: 1621427 - RNA, 19 nt, Homo sapiens
  misc_RNA (1)...(19): siRNA sense strand
ggacugcccugacccuugu

SEQ ID NO: 1621428 - RNA, 19 nt, Homo sapiens
  misc_RNA (1)...(19): siRNA sense strand
uaccaaaggucaauucgaa

SEQ ID NO: 1621429 - RNA, 19 nt, Homo sapiens
  misc_RNA (1)...(19): siRNA sense strand
gaagaagccaagaauuuau

SEQ ID NO: 1621430 - RNA, 19 nt, Homo sapiens
  misc_RNA (1)...(19): siRNA sense strand
guacagaggugcaguucca

SEQ ID NO: 1621431 - RNA, 19 nt, Homo sapiens
  misc_RNA (1)...(19): siRNA sense strand
gaggugcaguuccauggua

SEQ ID NO: 1621432 - RNA, 19 nt, Homo sapiens
  misc_RNA (1)...(19): siRNA sense strand
ggacagaggacugcagaaa

SEQ ID NO: 1621433 - RNA, 19 nt, Homo sapiens
  misc_RNA (1)...(19): siRNA sense strand
caacaaaacugucuucaag

SEQ ID NO: 1621434 - RNA, 19 nt, Homo sapiens
  misc_RNA (1)...(19): siRNA sense strand
ggauguauaugaacucgau

SEQ ID NO: 1621435 - RNA, 19 nt, Homo sapiens
  misc_RNA (1)...(19): siRNA sense strand
aaacauggauuuuggagua

SEQ ID NO: 1621436 - RNA, 19 nt, Homo sapiens
  misc_RNA (1)...(19): siRNA sense strand
gaaagaugccauguggaua

SEQ ID NO: 1621437 - RNA, 19 nt, Homo sapiens
  misc_RNA (1)...(19): siRNA sense strand
gaaagaaagaugccaugug

SEQ ID NO: 1621438 - RNA, 19 nt, Homo sapiens
  misc_RNA (1)...(19): siRNA sense strand
gcuaaagguuauagugaau

SEQ ID NO: 1621439 - RNA, 19 nt, Homo sapiens
  misc_RNA (1)...(19): siRNA sense strand
cuugauagauguuaccaaa

SEQ ID NO: 1621440 - RNA, 19 nt, Homo sapiens
  misc_RNA (1)...(19): siRNA sense strand
ggauaggguuccucacuag

SEQ ID NO: 1621441 - RNA, 19 nt, Homo sapiens
  misc_RNA (1)...(19): siRNA sense strand
gaaaggaaucauuggaugu

SEQ ID NO: 1621442 - RNA, 19 nt, Homo sapiens
  misc_RNA (1)...(19): siRNA sense strand
ggaaucauuggauguauau

SEQ ID NO: 1621443 - RNA, 19 nt, Homo sapiens
  misc_RNA (1)...(19): siRNA sense strand
gguaugugguacaaacaaa

SEQ ID NO: 1621444 - RNA, 19 nt, Homo sapiens
  misc_RNA (1)...(19): siRNA sense strand
ugacuuaccacccuacaaa

SEQ ID NO: 1621445 - RNA, 19 nt, Homo sapiens
  misc_RNA (1)...(19): siRNA sense strand
cagaacgccugcaaagaug

SEQ ID NO: 1621446 - RNA, 19 nt, Homo sapiens
  misc_RNA (1)...(19): siRNA sense strand
ggagagauuauuucauuca

SEQ ID NO: 1621447 - RNA, 19 nt, Homo sapiens
  misc_RNA (1)...(19): siRNA sense strand
aauaguagcagaagacaaa

SEQ ID NO: 1621448 - RNA, 19 nt, Homo sapiens
  misc_RNA (1)...(19): siRNA sense strand
ccaagaauuuauugaccaa

SEQ ID NO: 1621449 - RNA, 19 nt, Homo sapiens
  misc_RNA (1)...(19): siRNA sense strand
ugaccaagaccaagauauu

SEQ ID NO: 1621450 - RNA, 19 nt, Homo sapiens
  misc_RNA (1)...(19): siRNA sense strand
uuucuuggguggaacauaa

SEQ ID NO: 1621451 - RNA, 19 nt, Homo sapiens
  misc_RNA (1)...(19): siRNA sense strand
aaggucaauucgaaacuua

SEQ ID NO: 1621452 - RNA, 19 nt, Homo sapiens
  misc_RNA (1)...(19): siRNA sense strand
gaugguaugugguacaaac

SEQ ID NO: 1621453 - RNA, 19 nt, Homo sapiens
  misc_RNA (1)...(19): siRNA sense strand
cauguuaacaggauucaaa

SEQ ID NO: 1621454 - RNA, 19 nt, Homo sapiens
  misc_RNA (1)...(19): siRNA sense strand
agacagaaaggaaucauug

SEQ ID NO: 1621455 - RNA, 19 nt, Homo sapiens
  misc_RNA (1)...(19): siRNA sense strand
aagaggaaaugaaggguau

SEQ ID NO: 1621456 - RNA, 19 nt, Homo sapiens
  misc_RNA (1)...(19): siRNA sense strand
uacacaaccuugauagaug

SEQ ID NO: 1621457 - RNA, 19 nt, Homo sapiens
  misc_RNA (1)...(19): siRNA sense strand
gauauaccuuuaggagaga

SEQ ID NO: 1621458 - RNA, 19 nt, Homo sapiens
  misc_RNA (1)...(19): siRNA sense strand
ugauagauguuaccaaagg

SEQ ID NO: 1621459 - RNA, 19 nt, Homo sapiens
  misc_RNA (1)...(19): siRNA sense strand
acacaaccuugauagaugu

SEQ ID NO: 1621460 - RNA, 19 nt, Homo sapiens
  misc_RNA (1)...(19): siRNA sense strand
gaaacaucccuucuuccuu

SEQ ID NO: 1621461 - RNA, 19 nt, Homo sapiens
  misc_RNA (1)...(19): siRNA sense strand
caaaagauggcaugaauug

SEQ ID NO: 1621462 - RNA, 19 nt, Homo sapiens
  misc_RNA (1)...(19): siRNA sense strand
uggauaggguuccucacua

SEQ ID NO: 1621463 - RNA, 19 nt, Homo sapiens
  misc_RNA (1)...(19): siRNA sense strand
ggagaaacauggauuuugg

SEQ ID NO: 1621464 - RNA, 19 nt, Homo sapiens
  misc_RNA (1)...(19): siRNA sense strand
gaccaagaccaagauauug

SEQ ID NO: 1621465 - RNA, 19 nt, Homo sapiens
  misc_RNA (1)...(19): siRNA sense strand
gcaccagccaagagaauau

SEQ ID NO: 1621466 - RNA, 19 nt, Homo sapiens
  misc_RNA (1)...(19): siRNA sense strand
aggaaucauuggauguaua

SEQ ID NO: 1621467 - RNA, 19 nt, Homo sapiens
  misc_RNA (1)...(19): siRNA sense strand
auaccugggucauaacuga

SEQ ID NO: 1621468 - RNA, 19 nt, Homo sapiens
  misc_RNA (1)...(19): siRNA sense strand
cauuugaaaccauguauga

SEQ ID NO: 1621469 - RNA, 19 nt, Homo sapiens
  misc_RNA (1)...(19): siRNA sense strand
aaagauggcaugaauugau

SEQ ID NO: 1621470 - RNA, 19 nt, Homo sapiens
  misc_RNA (1)...(19): siRNA sense strand
aaaggaaucauuggaugua

SEQ ID NO: 1621471 - RNA, 19 nt, Homo sapiens
  misc_RNA (1)...(19): siRNA sense strand
augaagaagccaagaauuu

SEQ ID NO: 1621472 - RNA, 19 nt, Homo sapiens
  misc_RNA (1)...(19): siRNA sense strand
gaaggguauugccgcuguu

SEQ ID NO: 1621473 - RNA, 19 nt, Homo sapiens
  misc_RNA (1)...(19): siRNA sense strand
ggguggaacauaaauaaug

SEQ ID NO: 1621474 - RNA, 19 nt, Homo sapiens
  misc_RNA (1)...(19): siRNA sense strand
ccauaaaucuugacuuacc

SEQ ID NO: 1621475 - RNA, 19 nt, Homo sapiens
  misc_RNA (1)...(19): siRNA sense strand
gaguauuucuuggguggaa

SEQ ID NO: 1621476 - RNA, 19 nt, Homo sapiens
  misc_RNA (1)...(19): siRNA sense strand
gguacaccauaaaucuuga

SEQ ID NO: 1621477 - RNA, 19 nt, Homo sapiens
  misc_RNA (1)...(19): siRNA sense strand
caacuuuccuggcccuuuu

SEQ ID NO: 1621478 - RNA, 19 nt, Homo sapiens
  misc_RNA (1)...(19): siRNA sense strand
caaauuaugaccguuggaa

SEQ ID NO: 1621479 - RNA, 19 nt, Homo sapiens
  misc_RNA (1)...(19): siRNA sense strand
aagauggcaugaauugaug

SEQ ID NO: 1621480 - RNA, 19 nt, Homo sapiens
  misc_RNA (1)...(19): siRNA sense strand
ggaagguugugugauuaca

SEQ ID NO: 1621481 - RNA, 19 nt, Homo sapiens
  misc_RNA (1)...(19): siRNA sense strand
gaagccaagaauuuauuga

SEQ ID NO: 1621482 - RNA, 19 nt, Homo sapiens
  misc_RNA (1)...(19): siRNA sense strand
ggaaagaaagaugccaugu

SEQ ID NO: 1621483 - RNA, 19 nt, Homo sapiens
  misc_RNA (1)...(19): siRNA sense strand
uauagugaauucucugaag

SEQ ID NO: 1621484 - RNA, 19 nt, Homo sapiens
  misc_RNA (1)...(19): siRNA sense strand
uaagcaggguagaugguau

SEQ ID NO: 1621485 - RNA, 19 nt, Homo sapiens
  misc_RNA (1)...(19): siRNA sense strand
uuaugcaggugguggauga

SEQ ID NO: 1621486 - RNA, 19 nt, Homo sapiens
  misc_RNA (1)...(19): siRNA sense strand
aaaggucaauucgaaacuu

SEQ ID NO: 1621487 - RNA, 19 nt, Homo sapiens
  misc_RNA (1)...(19): siRNA sense strand
uaugauguccugucaacaa

SEQ ID NO: 1621488 - RNA, 19 nt, Homo sapiens
  misc_RNA (1)...(19): siRNA sense strand
cauguaugauguccuguca

SEQ ID NO: 1621489 - RNA, 19 nt, Homo sapiens
  misc_RNA (1)...(19): siRNA sense strand
cugcaaagaugugucugaa

SEQ ID NO: 1621490 - RNA, 19 nt, Homo sapiens
  misc_RNA (1)...(19): siRNA sense strand
ggguagaugguauguggua

SEQ ID NO: 1621491 - RNA, 19 nt, Homo sapiens
  misc_RNA (1)...(19): siRNA sense strand
uggccuacuuggcaacuuu

SEQ ID NO: 1621492 - RNA, 19 nt, Homo sapiens
  misc_RNA (1)...(19): siRNA sense strand
gauagauguuaccaaaggu

SEQ ID NO: 1621493 - RNA, 19 nt, Homo sapiens
  misc_RNA (1)...(19): siRNA sense strand
caaaaccuguccucaacaa

SEQ ID NO: 1621494 - RNA, 19 nt, Homo sapiens
  misc_RNA (1)...(19): siRNA sense strand
gaauaucucauuugaaacc

SEQ ID NO: 1621495 - RNA, 19 nt, Homo sapiens
  misc_RNA (1)...(19): siRNA sense strand
auagugaauucucugaaga

SEQ ID NO: 1621496 - RNA, 19 nt, Homo sapiens
  misc_RNA (1)...(19): siRNA sense strand
gagacagaaaggaaucauu

SEQ ID NO: 1621497 - RNA, 19 nt, Homo sapiens
  misc_RNA (1)...(19): siRNA sense strand
agaaagaugccauguggau

SEQ ID NO: 1621498 - RNA, 19 nt, Homo sapiens
  misc_RNA (1)...(19): siRNA sense strand
gaggaaaugaaggguauug

SEQ ID NO: 1621499 - RNA, 19 nt, Homo sapiens
  misc_RNA (1)...(19): siRNA sense strand
aaaauugccuggccuacuu

SEQ ID NO: 1621500 - RNA, 19 nt, Homo sapiens
  misc_RNA (1)...(19): siRNA sense strand
cguauacacaaccuugaua

SEQ ID NO: 1621501 - RNA, 19 nt, Homo sapiens
  misc_RNA (1)...(19): siRNA sense strand
caacaaaaccuguccucaa

SEQ ID NO: 1621502 - RNA, 19 nt, Homo sapiens
  misc_RNA (1)...(19): siRNA sense strand
uugaaaccauguaugaugu

SEQ ID NO: 1621503 - RNA, 19 nt, Homo sapiens
  misc_RNA (1)...(19): siRNA sense strand
aaagaugccauguggauag

SEQ ID NO: 1621504 - RNA, 19 nt, Homo sapiens
  misc_RNA (1)...(19): siRNA sense strand
aagcuuugcuggcuaugug

SEQ ID NO: 1621505 - RNA, 19 nt, Homo sapiens
  misc_RNA (1)...(19): siRNA sense strand
ugcuaaagguuauagugaa

SEQ ID NO: 1621506 - RNA, 19 nt, Homo sapiens
  misc_RNA (1)...(19): siRNA sense strand
aaaucaaccuauccuccuu

SEQ ID NO: 1621507 - RNA, 19 nt, Homo sapiens
  misc_RNA (1)...(19): siRNA sense strand
uuggaaacaucccuucuuc

SEQ ID NO: 1621508 - RNA, 19 nt, Homo sapiens
  misc_RNA (1)...(19): siRNA sense strand
ggggaagguugugugauua

SEQ ID NO: 1621509 - RNA, 19 nt, Homo sapiens
  misc_RNA (1)...(19): siRNA sense strand
gaaccgcaccagccaagag

SEQ ID NO: 1621510 - RNA, 19 nt, Homo sapiens
  misc_RNA (1)...(19): siRNA sense strand
guauugccgcuguuacuga

SEQ ID NO: 1621511 - RNA, 19 nt, Homo sapiens
  misc_RNA (1)...(19): siRNA sense strand
gcaacuuuccuggcccuuu

SEQ ID NO: 1621512 - RNA, 19 nt, Homo sapiens
  misc_RNA (1)...(19): siRNA sense strand
uacaaaagauggcaugaau

SEQ ID NO: 1621513 - RNA, 19 nt, Homo sapiens
  misc_RNA (1)...(19): siRNA sense strand
uagaugguaugugguacaa

SEQ ID NO: 1621514 - RNA, 19 nt, Homo sapiens
  misc_RNA (1)...(19): siRNA sense strand
cagaaaggaaucauuggau

SEQ ID NO: 1621515 - RNA, 19 nt, Homo sapiens
  misc_RNA (1)...(19): siRNA sense strand
gugguuaucuggguauucu

SEQ ID NO: 1621516 - RNA, 19 nt, Homo sapiens
  misc_RNA (1)...(19): siRNA sense strand
caagcugaccguauacaca

SEQ ID NO: 1621517 - RNA, 19 nt, Homo sapiens
  misc_RNA (1)...(19): siRNA sense strand
caaccuugauagauguuac

SEQ ID NO: 1621518 - RNA, 19 nt, Homo sapiens
  misc_RNA (1)...(19): siRNA sense strand
caccauaaaucuugacuua

SEQ ID NO: 1621519 - RNA, 19 nt, Homo sapiens
  misc_RNA (1)...(19): siRNA sense strand
ucaacaagcugaccguaua

SEQ ID NO: 1621520 - RNA, 19 nt, Homo sapiens
  misc_RNA (1)...(19): siRNA sense strand
ggucauaacugagcaacua

SEQ ID NO: 1621521 - RNA, 19 nt, Homo sapiens
  misc_RNA (1)...(19): siRNA sense strand
uauaugaacucgaugcuaa

SEQ ID NO: 1621522 - RNA, 19 nt, Homo sapiens
  misc_RNA (1)...(19): siRNA sense strand
gguggaacauaaauaauga

SEQ ID NO: 1621523 - RNA, 19 nt, Homo sapiens
  misc_RNA (1)...(19): siRNA sense strand
ugaagaagccaagaauuua

SEQ ID NO: 1621524 - RNA, 19 nt, Homo sapiens
  misc_RNA (1)...(19): siRNA sense strand
gaaaauagcacaaguuaug

SEQ ID NO: 1621525 - RNA, 19 nt, Homo sapiens
  misc_RNA (1)...(19): siRNA sense strand
gaacguuucaguauaaaug

SEQ ID NO: 1621526 - RNA, 19 nt, Homo sapiens
  misc_RNA (1)...(19): siRNA sense strand
uagcacaaguuaugaagaa

SEQ ID NO: 1621527 - RNA, 19 nt, Homo sapiens
  misc_RNA (1)...(19): siRNA sense strand
ggacugcccugacccuugu

SEQ ID NO: 1621528 - RNA, 19 nt, Homo sapiens
  misc_RNA (1)...(19): siRNA sense strand
uaccaaaggucaauucgaa

SEQ ID NO: 1621529 - RNA, 19 nt, Homo sapiens
  misc_RNA (1)...(19): siRNA sense strand
gaagaagccaagaauuuau

SEQ ID NO: 1621530 - RNA, 19 nt, Homo sapiens
  misc_RNA (1)...(19): siRNA sense strand
guacagaggugcaguucca

SEQ ID NO: 1621531 - RNA, 19 nt, Homo sapiens
  misc_RNA (1)...(19): siRNA sense strand
gaggugcaguuccauggua

SEQ ID NO: 1621532 - RNA, 19 nt, Homo sapiens
  misc_RNA (1)...(19): siRNA sense strand
ggacagaggacugcagaaa

SEQ ID NO: 1621533 - RNA, 19 nt, Homo sapiens
  misc_RNA (1)...(19): siRNA sense strand
caacaaaacugucuucaag

SEQ ID NO: 1621534 - RNA, 19 nt, Homo sapiens
  misc_RNA (1)...(19): siRNA sense strand
ggauguauaugaacucgau

SEQ ID NO: 1621535 - RNA, 19 nt, Homo sapiens
  misc_RNA (1)...(19): siRNA sense strand
aaacauggauuuuggagua

SEQ ID NO: 1621536 - RNA, 19 nt, Homo sapiens
  misc_RNA (1)...(19): siRNA sense strand
gaaagaugccauguggaua

SEQ ID NO: 1621537 - RNA, 19 nt, Homo sapiens
  misc_RNA (1)...(19): siRNA sense strand
gaaagaaagaugccaugug

SEQ ID NO: 1621538 - RNA, 19 nt, Homo sapiens
  misc_RNA (1)...(19): siRNA sense strand
gcuaaagguuauagugaau

SEQ ID NO: 1621539 - RNA, 19 nt, Homo sapiens
  misc_RNA (1)...(19): siRNA sense strand
cuugauagauguuaccaaa

SEQ ID NO: 1621540 - RNA, 19 nt, Homo sapiens
  misc_RNA (1)...(19): siRNA sense strand
ggauaggguuccucacuag

SEQ ID NO: 1621541 - RNA, 19 nt, Homo sapiens
  misc_RNA (1)...(19): siRNA sense strand
gaaaggaaucauuggaugu

SEQ ID NO: 1621542 - RNA, 19 nt, Homo sapiens
  misc_RNA (1)...(19): siRNA sense strand
ggaaucauuggauguauau

SEQ ID NO: 1621543 - RNA, 19 nt, Homo sapiens
  misc_RNA (1)...(19): siRNA sense strand
gguaugugguacaaacaaa

SEQ ID NO: 1621544 - RNA, 19 nt, Homo sapiens
  misc_RNA (1)...(19): siRNA sense strand
ugacuuaccacccuacaaa

SEQ ID NO: 1621545 - RNA, 19 nt, Homo sapiens
  misc_RNA (1)...(19): siRNA sense strand
cagaacgccugcaaagaug

SEQ ID NO: 1621546 - RNA, 19 nt, Homo sapiens
  misc_RNA (1)...(19): siRNA sense strand
ggagagauuauuucauuca

SEQ ID NO: 1621547 - RNA, 19 nt, Homo sapiens
  misc_RNA (1)...(19): siRNA sense strand
aauaguagcagaagacaaa

SEQ ID NO: 1621548 - RNA, 19 nt, Homo sapiens
  misc_RNA (1)...(19): siRNA sense strand
ccaagaauuuauugaccaa

SEQ ID NO: 1621549 - RNA, 19 nt, Homo sapiens
  misc_RNA (1)...(19): siRNA sense strand
ugaccaagaccaagauauu

SEQ ID NO: 1621550 - RNA, 19 nt, Homo sapiens
  misc_RNA (1)...(19): siRNA sense strand
uuucuuggguggaacauaa

SEQ ID NO: 1621551 - RNA, 19 nt, Homo sapiens
  misc_RNA (1)...(19): siRNA sense strand
aaggucaauucgaaacuua

SEQ ID NO: 1621552 - RNA, 19 nt, Homo sapiens
  misc_RNA (1)...(19): siRNA sense strand
gaugguaugugguacaaac

SEQ ID NO: 1621553 - RNA, 19 nt, Homo sapiens
  misc_RNA (1)...(19): siRNA sense strand
cauguuaacaggauucaaa

SEQ ID NO: 1621554 - RNA, 19 nt, Homo sapiens
  misc_RNA (1)...(19): siRNA sense strand
agacagaaaggaaucauug

SEQ ID NO: 1621555 - RNA, 19 nt, Homo sapiens
  misc_RNA (1)...(19): siRNA sense strand
aagaggaaaugaaggguau

SEQ ID NO: 1621556 - RNA, 19 nt, Homo sapiens
  misc_RNA (1)...(19): siRNA sense strand
uacacaaccuugauagaug

SEQ ID NO: 1621557 - RNA, 19 nt, Homo sapiens
  misc_RNA (1)...(19): siRNA sense strand
gauauaccuuuaggagaga

SEQ ID NO: 1621558 - RNA, 19 nt, Homo sapiens
  misc_RNA (1)...(19): siRNA sense strand
ugauagauguuaccaaagg

SEQ ID NO: 1621559 - RNA, 19 nt, Homo sapiens
  misc_RNA (1)...(19): siRNA sense strand
acacaaccuugauagaugu

SEQ ID NO: 1621560 - RNA, 19 nt, Homo sapiens
  misc_RNA (1)...(19): siRNA sense strand
gaaacaucccuucuuccuu

SEQ ID NO: 1621561 - RNA, 19 nt, Homo sapiens
  misc_RNA (1)...(19): siRNA sense strand
caaaagauggcaugaauug

SEQ ID NO: 1621562 - RNA, 19 nt, Homo sapiens
  misc_RNA (1)...(19): siRNA sense strand
uggauaggguuccucacua

SEQ ID NO: 1621563 - RNA, 19 nt, Homo sapiens
  misc_RNA (1)...(19): siRNA sense strand
ggagaaacauggauuuugg

SEQ ID NO: 1621564 - RNA, 19 nt, Homo sapiens
  misc_RNA (1)...(19): siRNA sense strand
gaccaagaccaagauauug

SEQ ID NO: 1621565 - RNA, 19 nt, Homo sapiens
  misc_RNA (1)...(19): siRNA sense strand
gcaccagccaagagaauau

SEQ ID NO: 1621566 - RNA, 19 nt, Homo sapiens
  misc_RNA (1)...(19): siRNA sense strand
aggaaucauuggauguaua

SEQ ID NO: 1621567 - RNA, 19 nt, Homo sapiens
  misc_RNA (1)...(19): siRNA sense strand
auaccugggucauaacuga

SEQ ID NO: 1621568 - RNA, 19 nt, Homo sapiens
  misc_RNA (1)...(19): siRNA sense strand
cauuugaaaccauguauga

SEQ ID NO: 1621569 - RNA, 19 nt, Homo sapiens
  misc_RNA (1)...(19): siRNA sense strand
aaagauggcaugaauugau

SEQ ID NO: 1621570 - RNA, 19 nt, Homo sapiens
  misc_RNA (1)...(19): siRNA sense strand
aaaggaaucauuggaugua

SEQ ID NO: 1621571 - RNA, 19 nt, Homo sapiens
  misc_RNA (1)...(19): siRNA sense strand
augaagaagccaagaauuu

SEQ ID NO: 1621572 - RNA, 19 nt, Homo sapiens
  misc_RNA (1)...(19): siRNA sense strand
gaaggguauugccgcuguu

SEQ ID NO: 1621573 - RNA, 19 nt, Homo sapiens
  misc_RNA (1)...(19): siRNA sense strand
ggguggaacauaaauaaug

SEQ ID NO: 1621574 - RNA, 19 nt, Homo sapiens
  misc_RNA (1)...(19): siRNA sense strand
ccauaaaucuugacuuacc

SEQ ID NO: 1621575 - RNA, 19 nt, Homo sapiens
  misc_RNA (1)...(19): siRNA sense strand
gaguauuucuuggguggaa

SEQ ID NO: 1621576 - RNA, 19 nt, Homo sapiens
  misc_RNA (1)...(19): siRNA sense strand
gguacaccauaaaucuuga

SEQ ID NO: 1621577 - RNA, 19 nt, Homo sapiens
  misc_RNA (1)...(19): siRNA sense strand
caacuuuccuggcccuuuu

SEQ ID NO: 1621578 - RNA, 19 nt, Homo sapiens
  misc_RNA (1)...(19): siRNA sense strand
caaauuaugaccguuggaa

SEQ ID NO: 1621579 - RNA, 19 nt, Homo sapiens
  misc_RNA (1)...(19): siRNA sense strand
aagauggcaugaauugaug

SEQ ID NO: 1621580 - RNA, 19 nt, Homo sapiens
  misc_RNA (1)...(19): siRNA sense strand
ggaagguugugugauuaca

SEQ ID NO: 1621581 - RNA, 19 nt, Homo sapiens
  misc_RNA (1)...(19): siRNA sense strand
gaagccaagaauuuauuga

SEQ ID NO: 1621582 - RNA, 19 nt, Homo sapiens
  misc_RNA (1)...(19): siRNA sense strand
ggaaagaaagaugccaugu

SEQ ID NO: 1621583 - RNA, 19 nt, Homo sapiens
  misc_RNA (1)...(19): siRNA sense strand
uauagugaauucucugaag

SEQ ID NO: 1621584 - RNA, 19 nt, Homo sapiens
  misc_RNA (1)...(19): siRNA sense strand
uaagcaggguagaugguau

SEQ ID NO: 1621585 - RNA, 19 nt, Homo sapiens
  misc_RNA (1)...(19): siRNA sense strand
uuaugcaggugguggauga

SEQ ID NO: 1621586 - RNA, 19 nt, Homo sapiens
  misc_RNA (1)...(19): siRNA sense strand
aaaggucaauucgaaacuu

SEQ ID NO: 1621587 - RNA, 19 nt, Homo sapiens
  misc_RNA (1)...(19): siRNA sense strand
uaugauguccugucaacaa

SEQ ID NO: 1621588 - RNA, 19 nt, Homo sapiens
  misc_RNA (1)...(19): siRNA sense strand
cauguaugauguccuguca

SEQ ID NO: 1621589 - RNA, 19 nt, Homo sapiens
  misc_RNA (1)...(19): siRNA sense strand
cugcaaagaugugucugaa

SEQ ID NO: 1621590 - RNA, 19 nt, Homo sapiens
  misc_RNA (1)...(19): siRNA sense strand
ggguagaugguauguggua

SEQ ID NO: 1621591 - RNA, 19 nt, Homo sapiens
  misc_RNA (1)...(19): siRNA sense strand
uggccuacuuggcaacuuu

SEQ ID NO: 1621592 - RNA, 19 nt, Homo sapiens
  misc_RNA (1)...(19): siRNA sense strand
gauagauguuaccaaaggu

SEQ ID NO: 1621593 - RNA, 19 nt, Homo sapiens
  misc_RNA (1)...(19): siRNA sense strand
caaaaccuguccucaacaa

SEQ ID NO: 1621594 - RNA, 19 nt, Homo sapiens
  misc_RNA (1)...(19): siRNA sense strand
gaauaucucauuugaaacc

SEQ ID NO: 1621595 - RNA, 19 nt, Homo sapiens
  misc_RNA (1)...(19): siRNA sense strand
auagugaauucucugaaga

SEQ ID NO: 1621596 - RNA, 19 nt, Homo sapiens
  misc_RNA (1)...(19): siRNA sense strand
gagacagaaaggaaucauu

SEQ ID NO: 1621597 - RNA, 19 nt, Homo sapiens
  misc_RNA (1)...(19): siRNA sense strand
agaaagaugccauguggau

SEQ ID NO: 1621598 - RNA, 19 nt, Homo sapiens
  misc_RNA (1)...(19): siRNA sense strand
gaggaaaugaaggguauug

SEQ ID NO: 1621599 - RNA, 19 nt, Homo sapiens
  misc_RNA (1)...(19): siRNA sense strand
aaaauugccuggccuacuu

SEQ ID NO: 1621600 - RNA, 19 nt, Homo sapiens
  misc_RNA (1)...(19): siRNA sense strand
cguauacacaaccuugaua

SEQ ID NO: 1621601 - RNA, 19 nt, Homo sapiens
  misc_RNA (1)...(19): siRNA sense strand
caacaaaaccuguccucaa

SEQ ID NO: 1621602 - RNA, 19 nt, Homo sapiens
  misc_RNA (1)...(19): siRNA sense strand
uugaaaccauguaugaugu

SEQ ID NO: 1621603 - RNA, 19 nt, Homo sapiens
  misc_RNA (1)...(19): siRNA sense strand
aaagaugccauguggauag

SEQ ID NO: 1621604 - RNA, 19 nt, Homo sapiens
  misc_RNA (1)...(19): siRNA sense strand
aagcuuugcuggcuaugug

SEQ ID NO: 1621605 - RNA, 19 nt, Homo sapiens
  misc_RNA (1)...(19): siRNA sense strand
ugcuaaagguuauagugaa

SEQ ID NO: 1621606 - RNA, 19 nt, Homo sapiens
  misc_RNA (1)...(19): siRNA sense strand
aaaucaaccuauccuccuu

SEQ ID NO: 1621607 - RNA, 19 nt, Homo sapiens
  misc_RNA (1)...(19): siRNA sense strand
uuggaaacaucccuucuuc

SEQ ID NO: 1621608 - RNA, 19 nt, Homo sapiens
  misc_RNA (1)...(19): siRNA sense strand
ggggaagguugugugauua

SEQ ID NO: 1621609 - RNA, 19 nt, Homo sapiens
  misc_RNA (1)...(19): siRNA sense strand
gaaccgcaccagccaagag

SEQ ID NO: 1621610 - RNA, 19 nt, Homo sapiens
  misc_RNA (1)...(19): siRNA sense strand
guauugccgcuguuacuga

SEQ ID NO: 1621611 - RNA, 19 nt, Homo sapiens
  misc_RNA (1)...(19): siRNA sense strand
gcaacuuuccuggcccuuu

SEQ ID NO: 1621612 - RNA, 19 nt, Homo sapiens
  misc_RNA (1)...(19): siRNA sense strand
uacaaaagauggcaugaau

SEQ ID NO: 1621613 - RNA, 19 nt, Homo sapiens
  misc_RNA (1)...(19): siRNA sense strand
uagaugguaugugguacaa

SEQ ID NO: 1621614 - RNA, 19 nt, Homo sapiens
  misc_RNA (1)...(19): siRNA sense strand
cagaaaggaaucauuggau

SEQ ID NO: 1621615 - RNA, 19 nt, Homo sapiens
  misc_RNA (1)...(19): siRNA sense strand
gugguuaucuggguauucu

SEQ ID NO: 1621616 - RNA, 19 nt, Homo sapiens
  misc_RNA (1)...(19): siRNA sense strand
caagcugaccguauacaca

SEQ ID NO: 1621617 - RNA, 19 nt, Homo sapiens
  misc_RNA (1)...(19): siRNA sense strand
caaccuugauagauguuac

SEQ ID NO: 1621618 - RNA, 19 nt, Homo sapiens
  misc_RNA (1)...(19): siRNA sense strand
gcggaucucuggccucauu

SEQ ID NO: 1621619 - RNA, 19 nt, Homo sapiens
  misc_RNA (1)...(19): siRNA sense strand
ggaaaaggcuuaggcaaag

SEQ ID NO: 1621620 - RNA, 19 nt, Homo sapiens
  misc_RNA (1)...(19): siRNA sense strand
gcggugugcugaagguguu

SEQ ID NO: 1621621 - RNA, 19 nt, Homo sapiens
  misc_RNA (1)...(19): siRNA sense strand
ggaucucuggccucauuua

SEQ ID NO: 1621622 - RNA, 19 nt, Homo sapiens
  misc_RNA (1)...(19): siRNA sense strand
ugaagguguuccuggagaa

SEQ ID NO: 1621623 - RNA, 19 nt, Homo sapiens
  misc_RNA (1)...(19): siRNA sense strand
ucucuggccucauuuacga

SEQ ID NO: 1621624 - RNA, 19 nt, Homo sapiens
  misc_RNA (1)...(19): siRNA sense strand
ucaccaagccugccauucg

SEQ ID NO: 1621625 - RNA, 19 nt, Homo sapiens
  misc_RNA (1)...(19): siRNA sense strand
gaagguguuccuggagaau

SEQ ID NO: 1621626 - RNA, 19 nt, Homo sapiens
  misc_RNA (1)...(19): siRNA sense strand
gcagaggaaagggcggaaa

SEQ ID NO: 1621627 - RNA, 19 nt, Homo sapiens
  misc_RNA (1)...(19): siRNA sense strand
gagcacgccaagcgcaaga

SEQ ID NO: 1621628 - RNA, 19 nt, Homo sapiens
  misc_RNA (1)...(19): siRNA sense strand
gaagauggcugcugauaua

SEQ ID NO: 1621629 - RNA, 19 nt, Homo sapiens
  misc_RNA (1)...(19): siRNA sense strand
gcagaucccugaacuuaua

SEQ ID NO: 1621630 - RNA, 19 nt, Homo sapiens
  misc_RNA (1)...(19): siRNA sense strand
caacugggcugaaguagaa

SEQ ID NO: 1621631 - RNA, 19 nt, Homo sapiens
  misc_RNA (1)...(19): siRNA sense strand
gaaaugcgaugauguucaa

SEQ ID NO: 1621632 - RNA, 19 nt, Homo sapiens
  misc_RNA (1)...(19): siRNA sense strand
gcaaugaacucagcuacuu

SEQ ID NO: 1621633 - RNA, 19 nt, Homo sapiens
  misc_RNA (1)...(19): siRNA sense strand
gcgaugauguucaauaaug

SEQ ID NO: 1621634 - RNA, 19 nt, Homo sapiens
  misc_RNA (1)...(19): siRNA sense strand
ucagauggguccagcaaua

SEQ ID NO: 1621635 - RNA, 19 nt, Homo sapiens
  misc_RNA (1)...(19): siRNA sense strand
caauggcccucgaugauuu

SEQ ID NO: 1621636 - RNA, 19 nt, Homo sapiens
  misc_RNA (1)...(19): siRNA sense strand
gggcagaucccugaacuua

SEQ ID NO: 1621637 - RNA, 19 nt, Homo sapiens
  misc_RNA (1)...(19): siRNA sense strand
gaucuggcguugagcauug

SEQ ID NO: 1621638 - RNA, 19 nt, Homo sapiens
  misc_RNA (1)...(19): siRNA sense strand
guaaagaacagguccaaga

SEQ ID NO: 1621639 - RNA, 19 nt, Homo sapiens
  misc_RNA (1)...(19): siRNA sense strand
gugccaagauugaacuuaa

SEQ ID NO: 1621640 - RNA, 19 nt, Homo sapiens
  misc_RNA (1)...(19): siRNA sense strand
gcaccagcguccagcagua

SEQ ID NO: 1621641 - RNA, 19 nt, Homo sapiens
  misc_RNA (1)...(19): siRNA sense strand
gauacuggauggcaaugaa

SEQ ID NO: 1621642 - RNA, 19 nt, Homo sapiens
  misc_RNA (1)...(19): siRNA sense strand
gagcuucaguuugugagua

SEQ ID NO: 1621643 - RNA, 19 nt, Homo sapiens
  misc_RNA (1)...(19): siRNA sense strand
gauggcugcugauauauuc

SEQ ID NO: 1621644 - RNA, 19 nt, Homo sapiens
  misc_RNA (1)...(19): siRNA sense strand
gacaagaucuggcguugag

SEQ ID NO: 1621645 - RNA, 19 nt, Homo sapiens
  misc_RNA (1)...(19): siRNA sense strand
ccaaagaaauugugguuuu

SEQ ID NO: 1621646 - RNA, 19 nt, Homo sapiens
  misc_RNA (1)...(19): siRNA sense strand
ugacuuggcugcugacaca

SEQ ID NO: 1621647 - RNA, 19 nt, Homo sapiens
  misc_RNA (1)...(19): siRNA sense strand
ucgcuaugcugaaauauau

SEQ ID NO: 1621648 - RNA, 19 nt, Homo sapiens
  misc_RNA (1)...(19): siRNA sense strand
uuucagugcuccucagaua

SEQ ID NO: 1621649 - RNA, 19 nt, Homo sapiens
  misc_RNA (1)...(19): siRNA sense strand
agaauacagugccaagauu

SEQ ID NO: 1621650 - RNA, 19 nt, Homo sapiens
  misc_RNA (1)...(19): siRNA sense strand
ucccugaacuuauauucua

SEQ ID NO: 1621651 - RNA, 19 nt, Homo sapiens
  misc_RNA (1)...(19): siRNA sense strand
uaaagaacagguccaagaa

SEQ ID NO: 1621652 - RNA, 19 nt, Homo sapiens
  misc_RNA (1)...(19): siRNA sense strand
gccagagccuguguuaauu

SEQ ID NO: 1621653 - RNA, 19 nt, Homo sapiens
  misc_RNA (1)...(19): siRNA sense strand
gaauacagugccaagauug

SEQ ID NO: 1621654 - RNA, 19 nt, Homo sapiens
  misc_RNA (1)...(19): siRNA sense strand
ucugagggauucugcgaua

SEQ ID NO: 1621655 - RNA, 19 nt, Homo sapiens
  misc_RNA (1)...(19): siRNA sense strand
gagggauucugcgauauug

SEQ ID NO: 1621656 - RNA, 19 nt, Homo sapiens
  misc_RNA (1)...(19): siRNA sense strand
ccaccaguuuguuaugaaa

SEQ ID NO: 1621657 - RNA, 19 nt, Homo sapiens
  misc_RNA (1)...(19): siRNA sense strand
gauggcagauguacauuuu

SEQ ID NO: 1621658 - RNA, 19 nt, Homo sapiens
  misc_RNA (1)...(19): siRNA sense strand
caaacuggcagggucuuua

SEQ ID NO: 1621659 - RNA, 19 nt, Homo sapiens
  misc_RNA (1)...(19): siRNA sense strand
cgaugauguucaauaauga

SEQ ID NO: 1621660 - RNA, 19 nt, Homo sapiens
  misc_RNA (1)...(19): siRNA sense strand
gauaaaagaguguucauug

SEQ ID NO: 1621661 - RNA, 19 nt, Homo sapiens
  misc_RNA (1)...(19): siRNA sense strand
gaaguucaguguggcaaag

SEQ ID NO: 1621662 - RNA, 19 nt, Homo sapiens
  misc_RNA (1)...(19): siRNA sense strand
cagcuacuuuggacaagaa

SEQ ID NO: 1621663 - RNA, 19 nt, Homo sapiens
  misc_RNA (1)...(19): siRNA sense strand
caagaaggcaugacagaag

SEQ ID NO: 1621664 - RNA, 19 nt, Homo sapiens
  misc_RNA (1)...(19): siRNA sense strand
gaaauccguauaccagaug

SEQ ID NO: 1621665 - RNA, 19 nt, Homo sapiens
  misc_RNA (1)...(19): siRNA sense strand
gcucaaagaaagcaaauac

SEQ ID NO: 1621666 - RNA, 19 nt, Homo sapiens
  misc_RNA (1)...(19): siRNA sense strand
gcauccaguuugcaguuga

SEQ ID NO: 1621667 - RNA, 19 nt, Homo sapiens
  misc_RNA (1)...(19): siRNA sense strand
ccacaauggcccucgauga

SEQ ID NO: 1621668 - RNA, 19 nt, Homo sapiens
  misc_RNA (1)...(19): siRNA sense strand
ugaaauccguauaccagau

SEQ ID NO: 1621669 - RNA, 19 nt, Homo sapiens
  misc_RNA (1)...(19): siRNA sense strand
gacaagaaggcaugacaga

SEQ ID NO: 1621670 - RNA, 19 nt, Homo sapiens
  misc_RNA (1)...(19): siRNA sense strand
gagcaaguacuucucagau

SEQ ID NO: 1621671 - RNA, 19 nt, Homo sapiens
  misc_RNA (1)...(19): siRNA sense strand
agagagaaaugcgaugaug

SEQ ID NO: 1621672 - RNA, 19 nt, Homo sapiens
  misc_RNA (1)...(19): siRNA sense strand
ccagagccuguguuaauuu

SEQ ID NO: 1621673 - RNA, 19 nt, Homo sapiens
  misc_RNA (1)...(19): siRNA sense strand
caaagaugaaauccguaua

SEQ ID NO: 1621674 - RNA, 19 nt, Homo sapiens
  misc_RNA (1)...(19): siRNA sense strand
caagaaaagcucaaagaaa

SEQ ID NO: 1621675 - RNA, 19 nt, Homo sapiens
  misc_RNA (1)...(19): siRNA sense strand
ggucuuuaucccaccauua

SEQ ID NO: 1621676 - RNA, 19 nt, Homo sapiens
  misc_RNA (1)...(19): siRNA sense strand
ccaguuugcaguugauaaa

SEQ ID NO: 1621677 - RNA, 19 nt, Homo sapiens
  misc_RNA (1)...(19): siRNA sense strand
aagaaaagcucaaagaaag

SEQ ID NO: 1621678 - RNA, 19 nt, Homo sapiens
  misc_RNA (1)...(19): siRNA sense strand
gcagaggacaaagaugaaa

SEQ ID NO: 1621679 - RNA, 19 nt, Homo sapiens
  misc_RNA (1)...(19): siRNA sense strand
ccaggacacaaauauguuu

SEQ ID NO: 1621680 - RNA, 19 nt, Homo sapiens
  misc_RNA (1)...(19): siRNA sense strand
augcgaugauguucaauaa

SEQ ID NO: 1621681 - RNA, 19 nt, Homo sapiens
  misc_RNA (1)...(19): siRNA sense strand
agagaaaugcgaugauguu

SEQ ID NO: 1621682 - RNA, 19 nt, Homo sapiens
  misc_RNA (1)...(19): siRNA sense strand
cagagccuguguuaauuuc

SEQ ID NO: 1621683 - RNA, 19 nt, Homo sapiens
  misc_RNA (1)...(19): siRNA sense strand
cagcagaaucucaguaaca

SEQ ID NO: 1621684 - RNA, 19 nt, Homo sapiens
  misc_RNA (1)...(19): siRNA sense strand
caaugaacucagcuacuuu

SEQ ID NO: 1621685 - RNA, 19 nt, Homo sapiens
  misc_RNA (1)...(19): siRNA sense strand
ugaaguagaaugccaacga

SEQ ID NO: 1621686 - RNA, 19 nt, Homo sapiens
  misc_RNA (1)...(19): siRNA sense strand
aguuagcucucaagucuga

SEQ ID NO: 1621687 - RNA, 19 nt, Homo sapiens
  misc_RNA (1)...(19): siRNA sense strand
aaagaacagguccaagaaa

SEQ ID NO: 1621688 - RNA, 19 nt, Homo sapiens
  misc_RNA (1)...(19): siRNA sense strand
gccaccaguuuguuaugaa

SEQ ID NO: 1621689 - RNA, 19 nt, Homo sapiens
  misc_RNA (1)...(19): siRNA sense strand
cagaauacagugccaagau

SEQ ID NO: 1621690 - RNA, 19 nt, Homo sapiens
  misc_RNA (1)...(19): siRNA sense strand
cagaaucucaguaacaaca

SEQ ID NO: 1621691 - RNA, 19 nt, Homo sapiens
  misc_RNA (1)...(19): siRNA sense strand
caaguugccaccaguuugu

SEQ ID NO: 1621692 - RNA, 19 nt, Homo sapiens
  misc_RNA (1)...(19): siRNA sense strand
ucaaugagaccaacgacau

SEQ ID NO: 1621693 - RNA, 19 nt, Homo sapiens
  misc_RNA (1)...(19): siRNA sense strand
ugccagagccuguguuaau

SEQ ID NO: 1621694 - RNA, 19 nt, Homo sapiens
  misc_RNA (1)...(19): siRNA sense strand
gagagaaaugcgaugaugu

SEQ ID NO: 1621695 - RNA, 19 nt, Homo sapiens
  misc_RNA (1)...(19): siRNA sense strand
gcucucaacugggcugaag

SEQ ID NO: 1621696 - RNA, 19 nt, Homo sapiens
  misc_RNA (1)...(19): siRNA sense strand
aagaaggcaugacagaagu

SEQ ID NO: 1621697 - RNA, 19 nt, Homo sapiens
  misc_RNA (1)...(19): siRNA sense strand
gacaucuuccucugguaua

SEQ ID NO: 1621698 - RNA, 19 nt, Homo sapiens
  misc_RNA (1)...(19): siRNA sense strand
ucaaagaaagcaaauacca

SEQ ID NO: 1621699 - RNA, 19 nt, Homo sapiens
  misc_RNA (1)...(19): siRNA sense strand
guagggaaacucugaaugc

SEQ ID NO: 1621700 - RNA, 19 nt, Homo sapiens
  misc_RNA (1)...(19): siRNA sense strand
aagaacagguccaagaaaa

SEQ ID NO: 1621701 - RNA, 19 nt, Homo sapiens
  misc_RNA (1)...(19): siRNA sense strand
cgacaucuuccucugguau

SEQ ID NO: 1621702 - RNA, 19 nt, Homo sapiens
  misc_RNA (1)...(19): siRNA sense strand
ggguauuaacucucaauga

SEQ ID NO: 1621703 - RNA, 19 nt, Homo sapiens
  misc_RNA (1)...(19): siRNA sense strand
ugagggauucugcgauauu

SEQ ID NO: 1621704 - RNA, 19 nt, Homo sapiens
  misc_RNA (1)...(19): siRNA sense strand
cacaauggcccucgaugau

SEQ ID NO: 1621705 - RNA, 19 nt, Homo sapiens
  misc_RNA (1)...(19): siRNA sense strand
ucugaaugccaaagaaauu

SEQ ID NO: 1621706 - RNA, 19 nt, Homo sapiens
  misc_RNA (1)...(19): siRNA sense strand
uccagacacuagaaaguau

SEQ ID NO: 1621707 - RNA, 19 nt, Homo sapiens
  misc_RNA (1)...(19): siRNA sense strand
ggacacaaauauguuuuag

SEQ ID NO: 1621708 - RNA, 19 nt, Homo sapiens
  misc_RNA (1)...(19): siRNA sense strand
gaaucucaguaacaacaac

SEQ ID NO: 1621709 - RNA, 19 nt, Homo sapiens
  misc_RNA (1)...(19): siRNA sense strand
aagaagauggcugcugaua

SEQ ID NO: 1621710 - RNA, 19 nt, Homo sapiens
  misc_RNA (1)...(19): siRNA sense strand
guacauugucccucaccuu

SEQ ID NO: 1621711 - RNA, 19 nt, Homo sapiens
  misc_RNA (1)...(19): siRNA sense strand
uugcagaggacaaagauga

SEQ ID NO: 1621712 - RNA, 19 nt, Homo sapiens
  misc_RNA (1)...(19): siRNA sense strand
gagaaaugcgaugauguuc

SEQ ID NO: 1621713 - RNA, 19 nt, Homo sapiens
  misc_RNA (1)...(19): siRNA sense strand
gaaggcaugacagaaguuc

SEQ ID NO: 1621714 - RNA, 19 nt, Homo sapiens
  misc_RNA (1)...(19): siRNA sense strand
gcagaauacagugccaaga

SEQ ID NO: 1621715 - RNA, 19 nt, Homo sapiens
  misc_RNA (1)...(19): siRNA sense strand
guagaaugccaacgacaag

SEQ ID NO: 1621716 - RNA, 19 nt, Homo sapiens
  misc_RNA (1)...(19): siRNA sense strand
ucucaacugggcugaagua

SEQ ID NO: 1621717 - RNA, 19 nt, Homo sapiens
  misc_RNA (1)...(19): siRNA sense strand
aaacuggcagggucuuuau

SEQ ID NO: 1621718 - RNA, 19 nt, Homo sapiens
  misc_RNA (1)...(19): siRNA sense strand
cagccugagugccaagaau

SEQ ID NO: 1621719 - RNA, 19 nt, Homo sapiens
  misc_RNA (1)...(19): siRNA sense strand
acaaagaugaaauccguau

SEQ ID NO: 1621720 - RNA, 19 nt, Homo sapiens
  misc_RNA (1)...(19): siRNA sense strand
aaagaugaaauccguauac

SEQ ID NO: 1621721 - RNA, 19 nt, Homo sapiens
  misc_RNA (1)...(19): siRNA sense strand
ucaguaacaacaaccuuau

SEQ ID NO: 1621722 - RNA, 19 nt, Homo sapiens
  misc_RNA (1)...(19): siRNA sense strand
aacgcaagguucuaggaaa

SEQ ID NO: 1621723 - RNA, 19 nt, Homo sapiens
  misc_RNA (1)...(19): siRNA sense strand
aaacgcaagguucuaggaa

SEQ ID NO: 1621724 - RNA, 19 nt, Homo sapiens
  misc_RNA (1)...(19): siRNA sense strand
agcagaaucucaguaacaa

SEQ ID NO: 1621725 - RNA, 19 nt, Homo sapiens
  misc_RNA (1)...(19): siRNA sense strand
ugucgaaccugcugcuuuu

SEQ ID NO: 1621726 - RNA, 19 nt, Homo sapiens
  misc_RNA (1)...(19): siRNA sense strand
cagcauccaguuugcaguu

SEQ ID NO: 1621727 - RNA, 19 nt, Homo sapiens
  misc_RNA (1)...(19): siRNA sense strand
caugacagaaguucagugu

SEQ ID NO: 1621728 - RNA, 19 nt, Homo sapiens
  misc_RNA (1)...(19): siRNA sense strand
gcagaucccugaacuuaua

SEQ ID NO: 1621729 - RNA, 19 nt, Homo sapiens
  misc_RNA (1)...(19): siRNA sense strand
caacugggcugaaguagaa

SEQ ID NO: 1621730 - RNA, 19 nt, Homo sapiens
  misc_RNA (1)...(19): siRNA sense strand
gaaaugcgaugauguucaa

SEQ ID NO: 1621731 - RNA, 19 nt, Homo sapiens
  misc_RNA (1)...(19): siRNA sense strand
gcaaugaacucagcuacuu

SEQ ID NO: 1621732 - RNA, 19 nt, Homo sapiens
  misc_RNA (1)...(19): siRNA sense strand
gcgaugauguucaauaaug

SEQ ID NO: 1621733 - RNA, 19 nt, Homo sapiens
  misc_RNA (1)...(19): siRNA sense strand
ucagauggguccagcaaua

SEQ ID NO: 1621734 - RNA, 19 nt, Homo sapiens
  misc_RNA (1)...(19): siRNA sense strand
caauggcccucgaugauuu

SEQ ID NO: 1621735 - RNA, 19 nt, Homo sapiens
  misc_RNA (1)...(19): siRNA sense strand
gggcagaucccugaacuua

SEQ ID NO: 1621736 - RNA, 19 nt, Homo sapiens
  misc_RNA (1)...(19): siRNA sense strand
gaucuggcguugagcauug

SEQ ID NO: 1621737 - RNA, 19 nt, Homo sapiens
  misc_RNA (1)...(19): siRNA sense strand
gugccaagauugaacuuaa

SEQ ID NO: 1621738 - RNA, 19 nt, Homo sapiens
  misc_RNA (1)...(19): siRNA sense strand
gauacuggauggcaaugaa

SEQ ID NO: 1621739 - RNA, 19 nt, Homo sapiens
  misc_RNA (1)...(19): siRNA sense strand
gcaccagcguccagcagua

SEQ ID NO: 1621740 - RNA, 19 nt, Homo sapiens
  misc_RNA (1)...(19): siRNA sense strand
gagcuucaguuugugagua

SEQ ID NO: 1621741 - RNA, 19 nt, Homo sapiens
  misc_RNA (1)...(19): siRNA sense strand
gacaagaucuggcguugag

SEQ ID NO: 1621742 - RNA, 19 nt, Homo sapiens
  misc_RNA (1)...(19): siRNA sense strand
ccaaagaaauugugguuuu

SEQ ID NO: 1621743 - RNA, 19 nt, Homo sapiens
  misc_RNA (1)...(19): siRNA sense strand
ugacuuggcugcugacaca

SEQ ID NO: 1621744 - RNA, 19 nt, Homo sapiens
  misc_RNA (1)...(19): siRNA sense strand
ucgcuaugcugaaauauau

SEQ ID NO: 1621745 - RNA, 19 nt, Homo sapiens
  misc_RNA (1)...(19): siRNA sense strand
uuucagugcuccucagaua

SEQ ID NO: 1621746 - RNA, 19 nt, Homo sapiens
  misc_RNA (1)...(19): siRNA sense strand
agaauacagugccaagauu

SEQ ID NO: 1621747 - RNA, 19 nt, Homo sapiens
  misc_RNA (1)...(19): siRNA sense strand
ucccugaacuuauauucua

SEQ ID NO: 1621748 - RNA, 19 nt, Homo sapiens
  misc_RNA (1)...(19): siRNA sense strand
gccagagccuguguuaauu

SEQ ID NO: 1621749 - RNA, 19 nt, Homo sapiens
  misc_RNA (1)...(19): siRNA sense strand
gaauacagugccaagauug

SEQ ID NO: 1621750 - RNA, 19 nt, Homo sapiens
  misc_RNA (1)...(19): siRNA sense strand
ucugagggauucugcgaua

SEQ ID NO: 1621751 - RNA, 19 nt, Homo sapiens
  misc_RNA (1)...(19): siRNA sense strand
gagggauucugcgauauug

SEQ ID NO: 1621752 - RNA, 19 nt, Homo sapiens
  misc_RNA (1)...(19): siRNA sense strand
gauggcagauguacauuuu

SEQ ID NO: 1621753 - RNA, 19 nt, Homo sapiens
  misc_RNA (1)...(19): siRNA sense strand
caaacuggcagggucuuua

SEQ ID NO: 1621754 - RNA, 19 nt, Homo sapiens
  misc_RNA (1)...(19): siRNA sense strand
cgaugauguucaauaauga

SEQ ID NO: 1621755 - RNA, 19 nt, Homo sapiens
  misc_RNA (1)...(19): siRNA sense strand
gauaaaagaguguucauug

SEQ ID NO: 1621756 - RNA, 19 nt, Homo sapiens
  misc_RNA (1)...(19): siRNA sense strand
gaaguucaguguggcaaag

SEQ ID NO: 1621757 - RNA, 19 nt, Homo sapiens
  misc_RNA (1)...(19): siRNA sense strand
cagcuacuuuggacaagaa

SEQ ID NO: 1621758 - RNA, 19 nt, Homo sapiens
  misc_RNA (1)...(19): siRNA sense strand
caagaaggcaugacagaag

SEQ ID NO: 1621759 - RNA, 19 nt, Homo sapiens
  misc_RNA (1)...(19): siRNA sense strand
gaaauccguauaccagaug

SEQ ID NO: 1621760 - RNA, 19 nt, Homo sapiens
  misc_RNA (1)...(19): siRNA sense strand
gcauccaguuugcaguuga

SEQ ID NO: 1621761 - RNA, 19 nt, Homo sapiens
  misc_RNA (1)...(19): siRNA sense strand
ccacaauggcccucgauga

SEQ ID NO: 1621762 - RNA, 19 nt, Homo sapiens
  misc_RNA (1)...(19): siRNA sense strand
ugaaauccguauaccagau

SEQ ID NO: 1621763 - RNA, 19 nt, Homo sapiens
  misc_RNA (1)...(19): siRNA sense strand
gacaagaaggcaugacaga

SEQ ID NO: 1621764 - RNA, 19 nt, Homo sapiens
  misc_RNA (1)...(19): siRNA sense strand
gagcaaguacuucucagau

SEQ ID NO: 1621765 - RNA, 19 nt, Homo sapiens
  misc_RNA (1)...(19): siRNA sense strand
agagagaaaugcgaugaug

SEQ ID NO: 1621766 - RNA, 19 nt, Homo sapiens
  misc_RNA (1)...(19): siRNA sense strand
ccagagccuguguuaauuu

SEQ ID NO: 1621767 - RNA, 19 nt, Homo sapiens
  misc_RNA (1)...(19): siRNA sense strand
caaagaugaaauccguaua

SEQ ID NO: 1621768 - RNA, 19 nt, Homo sapiens
  misc_RNA (1)...(19): siRNA sense strand
augcgaugauguucaauaa

SEQ ID NO: 1621769 - RNA, 19 nt, Homo sapiens
  misc_RNA (1)...(19): siRNA sense strand
ccaguuugcaguugauaaa

SEQ ID NO: 1621770 - RNA, 19 nt, Homo sapiens
  misc_RNA (1)...(19): siRNA sense strand
ggucuuuaucccaccauua

SEQ ID NO: 1621771 - RNA, 19 nt, Homo sapiens
  misc_RNA (1)...(19): siRNA sense strand
gcagaggacaaagaugaaa

SEQ ID NO: 1621772 - RNA, 19 nt, Homo sapiens
  misc_RNA (1)...(19): siRNA sense strand
ccaggacacaaauauguuu

SEQ ID NO: 1621773 - RNA, 19 nt, Homo sapiens
  misc_RNA (1)...(19): siRNA sense strand
agagaaaugcgaugauguu

SEQ ID NO: 1621774 - RNA, 19 nt, Homo sapiens
  misc_RNA (1)...(19): siRNA sense strand
cagagccuguguuaauuuc

SEQ ID NO: 1621775 - RNA, 19 nt, Homo sapiens
  misc_RNA (1)...(19): siRNA sense strand
aguuagcucucaagucuga

SEQ ID NO: 1621776 - RNA, 19 nt, Homo sapiens
  misc_RNA (1)...(19): siRNA sense strand
caaugaacucagcuacuuu

SEQ ID NO: 1621777 - RNA, 19 nt, Homo sapiens
  misc_RNA (1)...(19): siRNA sense strand
cagcagaaucucaguaaca

SEQ ID NO: 1621778 - RNA, 19 nt, Homo sapiens
  misc_RNA (1)...(19): siRNA sense strand
ugaaguagaaugccaacga

SEQ ID NO: 1621779 - RNA, 19 nt, Homo sapiens
  misc_RNA (1)...(19): siRNA sense strand
cagaauacagugccaagau

SEQ ID NO: 1621780 - RNA, 19 nt, Homo sapiens
  misc_RNA (1)...(19): siRNA sense strand
cagaaucucaguaacaaca

SEQ ID NO: 1621781 - RNA, 19 nt, Homo sapiens
  misc_RNA (1)...(19): siRNA sense strand
ucaaugagaccaacgacau

SEQ ID NO: 1621782 - RNA, 19 nt, Homo sapiens
  misc_RNA (1)...(19): siRNA sense strand
gagagaaaugcgaugaugu

SEQ ID NO: 1621783 - RNA, 19 nt, Homo sapiens
  misc_RNA (1)...(19): siRNA sense strand
ugccagagccuguguuaau

SEQ ID NO: 1621784 - RNA, 19 nt, Homo sapiens
  misc_RNA (1)...(19): siRNA sense strand
gcucucaacugggcugaag

SEQ ID NO: 1621785 - RNA, 19 nt, Homo sapiens
  misc_RNA (1)...(19): siRNA sense strand
aagaaggcaugacagaagu

SEQ ID NO: 1621786 - RNA, 19 nt, Homo sapiens
  misc_RNA (1)...(19): siRNA sense strand
gacaucuuccucugguaua

SEQ ID NO: 1621787 - RNA, 19 nt, Homo sapiens
  misc_RNA (1)...(19): siRNA sense strand
guagggaaacucugaaugc

SEQ ID NO: 1621788 - RNA, 19 nt, Homo sapiens
  misc_RNA (1)...(19): siRNA sense strand
cgacaucuuccucugguau

SEQ ID NO: 1621789 - RNA, 19 nt, Homo sapiens
  misc_RNA (1)...(19): siRNA sense strand
ggguauuaacucucaauga

SEQ ID NO: 1621790 - RNA, 19 nt, Homo sapiens
  misc_RNA (1)...(19): siRNA sense strand
ugagggauucugcgauauu

SEQ ID NO: 1621791 - RNA, 19 nt, Homo sapiens
  misc_RNA (1)...(19): siRNA sense strand
cacaauggcccucgaugau

SEQ ID NO: 1621792 - RNA, 19 nt, Homo sapiens
  misc_RNA (1)...(19): siRNA sense strand
ucugaaugccaaagaaauu

SEQ ID NO: 1621793 - RNA, 19 nt, Homo sapiens
  misc_RNA (1)...(19): siRNA sense strand
uccagacacuagaaaguau

SEQ ID NO: 1621794 - RNA, 19 nt, Homo sapiens
  misc_RNA (1)...(19): siRNA sense strand
ggacacaaauauguuuuag

SEQ ID NO: 1621795 - RNA, 19 nt, Homo sapiens
  misc_RNA (1)...(19): siRNA sense strand
gaaucucaguaacaacaac

SEQ ID NO: 1621796 - RNA, 19 nt, Homo sapiens
  misc_RNA (1)...(19): siRNA sense strand
guacauugucccucaccuu

SEQ ID NO: 1621797 - RNA, 19 nt, Homo sapiens
  misc_RNA (1)...(19): siRNA sense strand
uugcagaggacaaagauga

SEQ ID NO: 1621798 - RNA, 19 nt, Homo sapiens
  misc_RNA (1)...(19): siRNA sense strand
acaaagaugaaauccguau

SEQ ID NO: 1621799 - RNA, 19 nt, Homo sapiens
  misc_RNA (1)...(19): siRNA sense strand
gaaggcaugacagaaguuc

SEQ ID NO: 1621800 - RNA, 19 nt, Homo sapiens
  misc_RNA (1)...(19): siRNA sense strand
aaacuggcagggucuuuau

SEQ ID NO: 1621801 - RNA, 19 nt, Homo sapiens
  misc_RNA (1)...(19): siRNA sense strand
gcagaauacagugccaaga

SEQ ID NO: 1621802 - RNA, 19 nt, Homo sapiens
  misc_RNA (1)...(19): siRNA sense strand
gagaaaugcgaugauguuc

SEQ ID NO: 1621803 - RNA, 19 nt, Homo sapiens
  misc_RNA (1)...(19): siRNA sense strand
guagaaugccaacgacaag

SEQ ID NO: 1621804 - RNA, 19 nt, Homo sapiens
  misc_RNA (1)...(19): siRNA sense strand
ucucaacugggcugaagua

SEQ ID NO: 1621805 - RNA, 19 nt, Homo sapiens
  misc_RNA (1)...(19): siRNA sense strand
cagccugagugccaagaau

SEQ ID NO: 1621806 - RNA, 19 nt, Homo sapiens
  misc_RNA (1)...(19): siRNA sense strand
aaagaugaaauccguauac

SEQ ID NO: 1621807 - RNA, 19 nt, Homo sapiens
  misc_RNA (1)...(19): siRNA sense strand
aacgcaagguucuaggaaa

SEQ ID NO: 1621808 - RNA, 19 nt, Homo sapiens
  misc_RNA (1)...(19): siRNA sense strand
aaacgcaagguucuaggaa

SEQ ID NO: 1621809 - RNA, 19 nt, Homo sapiens
  misc_RNA (1)...(19): siRNA sense strand
agcagaaucucaguaacaa

SEQ ID NO: 1621810 - RNA, 19 nt, Homo sapiens
  misc_RNA (1)...(19): siRNA sense strand
ucaguaacaacaaccuuau

SEQ ID NO: 1621811 - RNA, 19 nt, Homo sapiens
  misc_RNA (1)...(19): siRNA sense strand
ugucgaaccugcugcuuuu

SEQ ID NO: 1621812 - RNA, 19 nt, Homo sapiens
  misc_RNA (1)...(19): siRNA sense strand
acaauggcccucgaugauu

SEQ ID NO: 1621813 - RNA, 19 nt, Homo sapiens
  misc_RNA (1)...(19): siRNA sense strand
caugacagaaguucagugu

SEQ ID NO: 1621814 - RNA, 19 nt, Homo sapiens
  misc_RNA (1)...(19): siRNA sense strand
cagcauccaguuugcaguu

SEQ ID NO: 1621815 - RNA, 19 nt, Homo sapiens
  misc_RNA (1)...(19): siRNA sense strand
gccaggacacaaauauguu

SEQ ID NO: 1621816 - RNA, 19 nt, Homo sapiens
  misc_RNA (1)...(19): siRNA sense strand
uguguuccaugcgauguuu

SEQ ID NO: 1621817 - RNA, 19 nt, Homo sapiens
  misc_RNA (1)...(19): siRNA sense strand
agcaaguacuucucagaug

SEQ ID NO: 1621818 - RNA, 19 nt, Homo sapiens
  misc_RNA (1)...(19): siRNA sense strand
gaaugccaacgacaagauc

SEQ ID NO: 1621819 - RNA, 19 nt, Homo sapiens
  misc_RNA (1)...(19): siRNA sense strand
gagagagaaaugcgaugau

SEQ ID NO: 1621820 - RNA, 19 nt, Homo sapiens
  misc_RNA (1)...(19): siRNA sense strand
cucaguaacaacaaccuua

SEQ ID NO: 1621821 - RNA, 19 nt, Homo sapiens
  misc_RNA (1)...(19): siRNA sense strand
gccagacaccuucuacaca

SEQ ID NO: 1621822 - RNA, 19 nt, Homo sapiens
  misc_RNA (1)...(19): siRNA sense strand
uaaacgcaagguucuagga

SEQ ID NO: 1621823 - RNA, 19 nt, Homo sapiens
  misc_RNA (1)...(19): siRNA sense strand
ccagacacuagaaaguauu

SEQ ID NO: 1621824 - RNA, 19 nt, Homo sapiens
  misc_RNA (1)...(19): siRNA sense strand
ugugacagcauccaguuug

SEQ ID NO: 1621825 - RNA, 19 nt, Homo sapiens
  misc_RNA (1)...(19): siRNA sense strand
ccucagauagcaccaaugg

SEQ ID NO: 1621826 - RNA, 19 nt, Homo sapiens
  misc_RNA (1)...(19): siRNA sense strand
acaagaaggcaugacagaa

SEQ ID NO: 1621827 - RNA, 19 nt, Homo sapiens
  misc_RNA (1)...(19): siRNA sense strand
gcaguaccaccagcagaau

SEQ ID NO: 1621828 - RNA, 19 nt, Homo sapiens
  misc_RNA (1)...(19): siRNA sense strand
gcaagaaguugauuauaug

SEQ ID NO: 1621829 - RNA, 19 nt, Homo sapiens
  misc_RNA (1)...(19): siRNA sense strand
ggcaagaaguugauuauau

SEQ ID NO: 1621830 - RNA, 19 nt, Homo sapiens
  misc_RNA (1)...(19): siRNA sense strand
acacugaguuugacuauga

SEQ ID NO: 1621831 - RNA, 19 nt, Homo sapiens
  misc_RNA (1)...(19): siRNA sense strand
ccagugagcugucagucua

SEQ ID NO: 1621832 - RNA, 19 nt, Homo sapiens
  misc_RNA (1)...(19): siRNA sense strand
uagaagaauugccuaauga

SEQ ID NO: 1621833 - RNA, 19 nt, Homo sapiens
  misc_RNA (1)...(19): siRNA sense strand
gagccaauaucacaacuau

SEQ ID NO: 1621834 - RNA, 19 nt, Homo sapiens
  misc_RNA (1)...(19): siRNA sense strand
ucgcagagauuucuucauu

SEQ ID NO: 1621835 - RNA, 19 nt, Homo sapiens
  misc_RNA (1)...(19): siRNA sense strand
gcugaucucugcauuggaa

SEQ ID NO: 1621836 - RNA, 19 nt, Homo sapiens
  misc_RNA (1)...(19): siRNA sense strand
gcagagauuucuucauucu

SEQ ID NO: 1621837 - RNA, 19 nt, Homo sapiens
  misc_RNA (1)...(19): siRNA sense strand
ccacacaauugaaagaaau

SEQ ID NO: 1621838 - RNA, 19 nt, Homo sapiens
  misc_RNA (1)...(19): siRNA sense strand
uaacuaccagccaauauaa

SEQ ID NO: 1621839 - RNA, 19 nt, Homo sapiens
  misc_RNA (1)...(19): siRNA sense strand
gacuaugacuuaugcaaug

SEQ ID NO: 1621840 - RNA, 19 nt, Homo sapiens
  misc_RNA (1)...(19): siRNA sense strand
ucuccaaccuucccaaauu

SEQ ID NO: 1621841 - RNA, 19 nt, Homo sapiens
  misc_RNA (1)...(19): siRNA sense strand
gagcugaaucuaagcgaua

SEQ ID NO: 1621842 - RNA, 19 nt, Homo sapiens
  misc_RNA (1)...(19): siRNA sense strand
ccaacaaccugcucuacau

SEQ ID NO: 1621843 - RNA, 19 nt, Homo sapiens
  misc_RNA (1)...(19): siRNA sense strand
ggucaucuguggcugcuau

SEQ ID NO: 1621844 - RNA, 19 nt, Homo sapiens
  misc_RNA (1)...(19): siRNA sense strand
gcacccauuucuuucuuug

SEQ ID NO: 1621845 - RNA, 19 nt, Homo sapiens
  misc_RNA (1)...(19): siRNA sense strand
gaagaauugccuaaugaug

SEQ ID NO: 1621846 - RNA, 19 nt, Homo sapiens
  misc_RNA (1)...(19): siRNA sense strand
ucucugagcuucauccaau

SEQ ID NO: 1621847 - RNA, 19 nt, Homo sapiens
  misc_RNA (1)...(19): siRNA sense strand
gauagaggcagauguguuc

SEQ ID NO: 1621848 - RNA, 19 nt, Homo sapiens
  misc_RNA (1)...(19): siRNA sense strand
caagauucauucucuccaa

SEQ ID NO: 1621849 - RNA, 19 nt, Homo sapiens
  misc_RNA (1)...(19): siRNA sense strand
caacacccauccaaggaau

SEQ ID NO: 1621850 - RNA, 19 nt, Homo sapiens
  misc_RNA (1)...(19): siRNA sense strand
ugaguuugacuaugacuua

SEQ ID NO: 1621851 - RNA, 19 nt, Homo sapiens
  misc_RNA (1)...(19): siRNA sense strand
agaauugccuaaugauguu

SEQ ID NO: 1621852 - RNA, 19 nt, Homo sapiens
  misc_RNA (1)...(19): siRNA sense strand
ugacagcuaucaccuugga

SEQ ID NO: 1621853 - RNA, 19 nt, Homo sapiens
  misc_RNA (1)...(19): siRNA sense strand
gcugcuauauccacaucua

SEQ ID NO: 1621854 - RNA, 19 nt, Homo sapiens
  misc_RNA (1)...(19): siRNA sense strand
ccaacuagaugagcugaau

SEQ ID NO: 1621855 - RNA, 19 nt, Homo sapiens
  misc_RNA (1)...(19): siRNA sense strand
uuacauacuugucccucua

SEQ ID NO: 1621856 - RNA, 19 nt, Homo sapiens
  misc_RNA (1)...(19): siRNA sense strand
cuaacuaccagccaauaua

SEQ ID NO: 1621857 - RNA, 19 nt, Homo sapiens
  misc_RNA (1)...(19): siRNA sense strand
cuccaaccuucccaaauua

SEQ ID NO: 1621858 - RNA, 19 nt, Homo sapiens
  misc_RNA (1)...(19): siRNA sense strand
gcuaucaccuuggaaagau

SEQ ID NO: 1621859 - RNA, 19 nt, Homo sapiens
  misc_RNA (1)...(19): siRNA sense strand
caacccaugugaagauauc

SEQ ID NO: 1621860 - RNA, 19 nt, Homo sapiens
  misc_RNA (1)...(19): siRNA sense strand
uuaagcaccuuccagaugu

SEQ ID NO: 1621861 - RNA, 19 nt, Homo sapiens
  misc_RNA (1)...(19): siRNA sense strand
acauaaacauccacacaau

SEQ ID NO: 1621862 - RNA, 19 nt, Homo sapiens
  misc_RNA (1)...(19): siRNA sense strand
gaaucuaccugcugcucau

SEQ ID NO: 1621863 - RNA, 19 nt, Homo sapiens
  misc_RNA (1)...(19): siRNA sense strand
caaccuucaauaucuguua

SEQ ID NO: 1621864 - RNA, 19 nt, Homo sapiens
  misc_RNA (1)...(19): siRNA sense strand
ugaaaugcaagcccaaauu

SEQ ID NO: 1621865 - RNA, 19 nt, Homo sapiens
  misc_RNA (1)...(19): siRNA sense strand
caaagauucugcugguucu

SEQ ID NO: 1621866 - RNA, 19 nt, Homo sapiens
  misc_RNA (1)...(19): siRNA sense strand
uaucacaacuaugccauug

SEQ ID NO: 1621867 - RNA, 19 nt, Homo sapiens
  misc_RNA (1)...(19): siRNA sense strand
caauggaacccaacuagau

SEQ ID NO: 1621868 - RNA, 19 nt, Homo sapiens
  misc_RNA (1)...(19): siRNA sense strand
uaacauaaacauccacaca

SEQ ID NO: 1621869 - RNA, 19 nt, Homo sapiens
  misc_RNA (1)...(19): siRNA sense strand
cagcagaggauuugacaug

SEQ ID NO: 1621870 - RNA, 19 nt, Homo sapiens
  misc_RNA (1)...(19): siRNA sense strand
aaguguggcugcuaugaaa

SEQ ID NO: 1621871 - RNA, 19 nt, Homo sapiens
  misc_RNA (1)...(19): siRNA sense strand
auaaacauccacacaauug

SEQ ID NO: 1621872 - RNA, 19 nt, Homo sapiens
  misc_RNA (1)...(19): siRNA sense strand
ccauugaacugagguuugu

SEQ ID NO: 1621873 - RNA, 19 nt, Homo sapiens
  misc_RNA (1)...(19): siRNA sense strand
ccucaucacuguguccaaa

SEQ ID NO: 1621874 - RNA, 19 nt, Homo sapiens
  misc_RNA (1)...(19): siRNA sense strand
ucaauguccuggccuuugu

SEQ ID NO: 1621875 - RNA, 19 nt, Homo sapiens
  misc_RNA (1)...(19): siRNA sense strand
gacaaugaguccagcuaca

SEQ ID NO: 1621876 - RNA, 19 nt, Homo sapiens
  misc_RNA (1)...(19): siRNA sense strand
uaaggcaagaaguugauua

SEQ ID NO: 1621877 - RNA, 19 nt, Homo sapiens
  misc_RNA (1)...(19): siRNA sense strand
gguacaacauccucagagu

SEQ ID NO: 1621878 - RNA, 19 nt, Homo sapiens
  misc_RNA (1)...(19): siRNA sense strand
gauguucacaagauucauu

SEQ ID NO: 1621879 - RNA, 19 nt, Homo sapiens
  misc_RNA (1)...(19): siRNA sense strand
gcaaguguggcugcuauga

SEQ ID NO: 1621880 - RNA, 19 nt, Homo sapiens
  misc_RNA (1)...(19): siRNA sense strand
guugauauccauaccaaga

SEQ ID NO: 1621881 - RNA, 19 nt, Homo sapiens
  misc_RNA (1)...(19): siRNA sense strand
ccagguuccuuaugugcaa

SEQ ID NO: 1621882 - RNA, 19 nt, Homo sapiens
  misc_RNA (1)...(19): siRNA sense strand
cauaaacauccacacaauu

SEQ ID NO: 1621883 - RNA, 19 nt, Homo sapiens
  misc_RNA (1)...(19): siRNA sense strand
ggcaucagcagcuacauga

SEQ ID NO: 1621884 - RNA, 19 nt, Homo sapiens
  misc_RNA (1)...(19): siRNA sense strand
aaacauccacacaauugaa

SEQ ID NO: 1621885 - RNA, 19 nt, Homo sapiens
  misc_RNA (1)...(19): siRNA sense strand
gcaucugccugcccaugga

SEQ ID NO: 1621886 - RNA, 19 nt, Homo sapiens
  misc_RNA (1)...(19): siRNA sense strand
gaacaucauagugcuagug

SEQ ID NO: 1621887 - RNA, 19 nt, Homo sapiens
  misc_RNA (1)...(19): siRNA sense strand
gcagaggauuugacaugac

SEQ ID NO: 1621888 - RNA, 19 nt, Homo sapiens
  misc_RNA (1)...(19): siRNA sense strand
ccaaauuuauaggacagaa

SEQ ID NO: 1621889 - RNA, 19 nt, Homo sapiens
  misc_RNA (1)...(19): siRNA sense strand
ugucacagcuguaugucau

SEQ ID NO: 1621890 - RNA, 19 nt, Homo sapiens
  misc_RNA (1)...(19): siRNA sense strand
caguugauauccauaccaa

SEQ ID NO: 1621891 - RNA, 19 nt, Homo sapiens
  misc_RNA (1)...(19): siRNA sense strand
gagcaaggugacagagauu

SEQ ID NO: 1621892 - RNA, 19 nt, Homo sapiens
  misc_RNA (1)...(19): siRNA sense strand
aggcagauguguucuccaa

SEQ ID NO: 1621893 - RNA, 19 nt, Homo sapiens
  misc_RNA (1)...(19): siRNA sense strand
aaugcaagcccaaauuuau

SEQ ID NO: 1621894 - RNA, 19 nt, Homo sapiens
  misc_RNA (1)...(19): siRNA sense strand
gccaauaucacaacuaugc

SEQ ID NO: 1621895 - RNA, 19 nt, Homo sapiens
  misc_RNA (1)...(19): siRNA sense strand
ccagaaccuucccaaccuu

SEQ ID NO: 1621896 - RNA, 19 nt, Homo sapiens
  misc_RNA (1)...(19): siRNA sense strand
aagaauugccuaaugaugu

SEQ ID NO: 1621897 - RNA, 19 nt, Homo sapiens
  misc_RNA (1)...(19): siRNA sense strand
ucacaacuaugccauugac

SEQ ID NO: 1621898 - RNA, 19 nt, Homo sapiens
  misc_RNA (1)...(19): siRNA sense strand
ggugauagaggcagaugug

SEQ ID NO: 1621899 - RNA, 19 nt, Homo sapiens
  misc_RNA (1)...(19): siRNA sense strand
caaccuggccuuugcugau

SEQ ID NO: 1621900 - RNA, 19 nt, Homo sapiens
  misc_RNA (1)...(19): siRNA sense strand
ggccaucacugggaacauc

SEQ ID NO: 1621901 - RNA, 19 nt, Homo sapiens
  misc_RNA (1)...(19): siRNA sense strand
gaguuugacuaugacuuau

SEQ ID NO: 1621902 - RNA, 19 nt, Homo sapiens
  misc_RNA (1)...(19): siRNA sense strand
aagauucauucucuccaaa

SEQ ID NO: 1621903 - RNA, 19 nt, Homo sapiens
  misc_RNA (1)...(19): siRNA sense strand
agagcaaggugacagagau

SEQ ID NO: 1621904 - RNA, 19 nt, Homo sapiens
  misc_RNA (1)...(19): siRNA sense strand
ggaauggccacugcucuuc

SEQ ID NO: 1621905 - RNA, 19 nt, Homo sapiens
  misc_RNA (1)...(19): siRNA sense strand
caaguguggcugcuaugaa

SEQ ID NO: 1621906 - RNA, 19 nt, Homo sapiens
  misc_RNA (1)...(19): siRNA sense strand
cagccaauauaaacucaca

SEQ ID NO: 1621907 - RNA, 19 nt, Homo sapiens
  misc_RNA (1)...(19): siRNA sense strand
uaagccagaugcauucaac

SEQ ID NO: 1621908 - RNA, 19 nt, Homo sapiens
  misc_RNA (1)...(19): siRNA sense strand
uaaacauccacacaauuga

SEQ ID NO: 1621909 - RNA, 19 nt, Homo sapiens
  misc_RNA (1)...(19): siRNA sense strand
cuucccaaauuacaugaaa

SEQ ID NO: 1621910 - RNA, 19 nt, Homo sapiens
  misc_RNA (1)...(19): siRNA sense strand
cuuccucuaugccaucuuu

SEQ ID NO: 1621911 - RNA, 19 nt, Homo sapiens
  misc_RNA (1)...(19): siRNA sense strand
ucacugacuuccucugcau

SEQ ID NO: 1621912 - RNA, 19 nt, Homo sapiens
  misc_RNA (1)...(19): siRNA sense strand
ucacagcuguaugucaugu

SEQ ID NO: 1621913 - RNA, 19 nt, Homo sapiens
  misc_RNA (1)...(19): siRNA sense strand
cuuaugcaaugaagugguu

SEQ ID NO: 1621914 - RNA, 19 nt, Homo sapiens
  misc_RNA (1)...(19): siRNA sense strand
gaaccuucccaaccuucaa

SEQ ID NO: 1621915 - RNA, 19 nt, Homo sapiens
  misc_RNA (1)...(19): siRNA sense strand
gagagcaaggugacagaga

SEQ ID NO: 1621916 - RNA, 19 nt, Homo sapiens
  misc_RNA (1)...(19): siRNA sense strand
ucuacacucugacagcuau

SEQ ID NO: 1621917 - RNA, 19 nt, Homo sapiens
  misc_RNA (1)...(19): siRNA sense strand
uaagcaccuuccagauguu

SEQ ID NO: 1621918 - RNA, 19 nt, Homo sapiens
  misc_RNA (1)...(19): siRNA sense strand
ucuaugccaucuuuaccaa

SEQ ID NO: 1621919 - RNA, 19 nt, Homo sapiens
  misc_RNA (1)...(19): siRNA sense strand
gaauggccacugcucuuca

SEQ ID NO: 1621920 - RNA, 19 nt, Homo sapiens
  misc_RNA (1)...(19): siRNA sense strand
ucaccaagcuucgagucau

SEQ ID NO: 1621921 - RNA, 19 nt, Homo sapiens
  misc_RNA (1)...(19): siRNA sense strand
uuccagauguucacaagau

SEQ ID NO: 1621922 - RNA, 19 nt, Homo sapiens
  misc_RNA (1)...(19): siRNA sense strand
ggcacccauuucuuucuuu

SEQ ID NO: 1621923 - RNA, 19 nt, Homo sapiens
  misc_RNA (1)...(19): siRNA sense strand
cagcuacagcagaggauuu

SEQ ID NO: 1621924 - RNA, 19 nt, Homo sapiens
  misc_RNA (1)...(19): siRNA sense strand
uugaaagugugauucuaug

SEQ ID NO: 1621925 - RNA, 19 nt, Homo sapiens
  misc_RNA (1)...(19): siRNA sense strand
caacaaccugcucuacauc

SEQ ID NO: 1621926 - RNA, 19 nt, Homo sapiens
  misc_RNA (1)...(19): siRNA sense strand
augcaagcccaaauuuaua

SEQ ID NO: 1621927 - RNA, 19 nt, Homo sapiens
  misc_RNA (1)...(19): siRNA sense strand
uggcugcuaugaaaugcaa

SEQ ID NO: 1621928 - RNA, 19 nt, Homo sapiens
  misc_RNA (1)...(19): siRNA sense strand
gcaagaaguugauuauaug

SEQ ID NO: 1621929 - RNA, 19 nt, Homo sapiens
  misc_RNA (1)...(19): siRNA sense strand
ggcaagaaguugauuauau

SEQ ID NO: 1621930 - RNA, 19 nt, Homo sapiens
  misc_RNA (1)...(19): siRNA sense strand
acacugaguuugacuauga

SEQ ID NO: 1621931 - RNA, 19 nt, Homo sapiens
  misc_RNA (1)...(19): siRNA sense strand
ccagugagcugucagucua

SEQ ID NO: 1621932 - RNA, 19 nt, Homo sapiens
  misc_RNA (1)...(19): siRNA sense strand
uagaagaauugccuaauga

SEQ ID NO: 1621933 - RNA, 19 nt, Homo sapiens
  misc_RNA (1)...(19): siRNA sense strand
gagccaauaucacaacuau

SEQ ID NO: 1621934 - RNA, 19 nt, Homo sapiens
  misc_RNA (1)...(19): siRNA sense strand
ucgcagagauuucuucauu

SEQ ID NO: 1621935 - RNA, 19 nt, Homo sapiens
  misc_RNA (1)...(19): siRNA sense strand
gcugaucucugcauuggaa

SEQ ID NO: 1621936 - RNA, 19 nt, Homo sapiens
  misc_RNA (1)...(19): siRNA sense strand
gcagagauuucuucauucu

SEQ ID NO: 1621937 - RNA, 19 nt, Homo sapiens
  misc_RNA (1)...(19): siRNA sense strand
ccacacaauugaaagaaau

SEQ ID NO: 1621938 - RNA, 19 nt, Homo sapiens
  misc_RNA (1)...(19): siRNA sense strand
uaacuaccagccaauauaa

SEQ ID NO: 1621939 - RNA, 19 nt, Homo sapiens
  misc_RNA (1)...(19): siRNA sense strand
gacuaugacuuaugcaaug

SEQ ID NO: 1621940 - RNA, 19 nt, Homo sapiens
  misc_RNA (1)...(19): siRNA sense strand
ucuccaaccuucccaaauu

SEQ ID NO: 1621941 - RNA, 19 nt, Homo sapiens
  misc_RNA (1)...(19): siRNA sense strand
gagcugaaucuaagcgaua

SEQ ID NO: 1621942 - RNA, 19 nt, Homo sapiens
  misc_RNA (1)...(19): siRNA sense strand
ccaacaaccugcucuacau

SEQ ID NO: 1621943 - RNA, 19 nt, Homo sapiens
  misc_RNA (1)...(19): siRNA sense strand
ggucaucuguggcugcuau

SEQ ID NO: 1621944 - RNA, 19 nt, Homo sapiens
  misc_RNA (1)...(19): siRNA sense strand
gcacccauuucuuucuuug

SEQ ID NO: 1621945 - RNA, 19 nt, Homo sapiens
  misc_RNA (1)...(19): siRNA sense strand
gaagaauugccuaaugaug

SEQ ID NO: 1621946 - RNA, 19 nt, Homo sapiens
  misc_RNA (1)...(19): siRNA sense strand
ucucugagcuucauccaau

SEQ ID NO: 1621947 - RNA, 19 nt, Homo sapiens
  misc_RNA (1)...(19): siRNA sense strand
gauagaggcagauguguuc

SEQ ID NO: 1621948 - RNA, 19 nt, Homo sapiens
  misc_RNA (1)...(19): siRNA sense strand
caagauucauucucuccaa

SEQ ID NO: 1621949 - RNA, 19 nt, Homo sapiens
  misc_RNA (1)...(19): siRNA sense strand
caacacccauccaaggaau

SEQ ID NO: 1621950 - RNA, 19 nt, Homo sapiens
  misc_RNA (1)...(19): siRNA sense strand
ugaguuugacuaugacuua

SEQ ID NO: 1621951 - RNA, 19 nt, Homo sapiens
  misc_RNA (1)...(19): siRNA sense strand
agaauugccuaaugauguu

SEQ ID NO: 1621952 - RNA, 19 nt, Homo sapiens
  misc_RNA (1)...(19): siRNA sense strand
ugacagcuaucaccuugga

SEQ ID NO: 1621953 - RNA, 19 nt, Homo sapiens
  misc_RNA (1)...(19): siRNA sense strand
gcugcuauauccacaucua

SEQ ID NO: 1621954 - RNA, 19 nt, Homo sapiens
  misc_RNA (1)...(19): siRNA sense strand
ccaacuagaugagcugaau

SEQ ID NO: 1621955 - RNA, 19 nt, Homo sapiens
  misc_RNA (1)...(19): siRNA sense strand
uuacauacuugucccucua

SEQ ID NO: 1621956 - RNA, 19 nt, Homo sapiens
  misc_RNA (1)...(19): siRNA sense strand
cuaacuaccagccaauaua

SEQ ID NO: 1621957 - RNA, 19 nt, Homo sapiens
  misc_RNA (1)...(19): siRNA sense strand
cuccaaccuucccaaauua

SEQ ID NO: 1621958 - RNA, 19 nt, Homo sapiens
  misc_RNA (1)...(19): siRNA sense strand
gcuaucaccuuggaaagau

SEQ ID NO: 1621959 - RNA, 19 nt, Homo sapiens
  misc_RNA (1)...(19): siRNA sense strand
caacccaugugaagauauc

SEQ ID NO: 1621960 - RNA, 19 nt, Homo sapiens
  misc_RNA (1)...(19): siRNA sense strand
uuaagcaccuuccagaugu

SEQ ID NO: 1621961 - RNA, 19 nt, Homo sapiens
  misc_RNA (1)...(19): siRNA sense strand
acauaaacauccacacaau

SEQ ID NO: 1621962 - RNA, 19 nt, Homo sapiens
  misc_RNA (1)...(19): siRNA sense strand
gaaucuaccugcugcucau

SEQ ID NO: 1621963 - RNA, 19 nt, Homo sapiens
  misc_RNA (1)...(19): siRNA sense strand
caaccuucaauaucuguua

SEQ ID NO: 1621964 - RNA, 19 nt, Homo sapiens
  misc_RNA (1)...(19): siRNA sense strand
ugaaaugcaagcccaaauu

SEQ ID NO: 1621965 - RNA, 19 nt, Homo sapiens
  misc_RNA (1)...(19): siRNA sense strand
caaagauucugcugguucu

SEQ ID NO: 1621966 - RNA, 19 nt, Homo sapiens
  misc_RNA (1)...(19): siRNA sense strand
uaucacaacuaugccauug

SEQ ID NO: 1621967 - RNA, 19 nt, Homo sapiens
  misc_RNA (1)...(19): siRNA sense strand
caauggaacccaacuagau

SEQ ID NO: 1621968 - RNA, 19 nt, Homo sapiens
  misc_RNA (1)...(19): siRNA sense strand
uaacauaaacauccacaca

SEQ ID NO: 1621969 - RNA, 19 nt, Homo sapiens
  misc_RNA (1)...(19): siRNA sense strand
cagcagaggauuugacaug

SEQ ID NO: 1621970 - RNA, 19 nt, Homo sapiens
  misc_RNA (1)...(19): siRNA sense strand
aaguguggcugcuaugaaa

SEQ ID NO: 1621971 - RNA, 19 nt, Homo sapiens
  misc_RNA (1)...(19): siRNA sense strand
auaaacauccacacaauug

SEQ ID NO: 1621972 - RNA, 19 nt, Homo sapiens
  misc_RNA (1)...(19): siRNA sense strand
ccauugaacugagguuugu

SEQ ID NO: 1621973 - RNA, 19 nt, Homo sapiens
  misc_RNA (1)...(19): siRNA sense strand
ccucaucacuguguccaaa

SEQ ID NO: 1621974 - RNA, 19 nt, Homo sapiens
  misc_RNA (1)...(19): siRNA sense strand
ucaauguccuggccuuugu

SEQ ID NO: 1621975 - RNA, 19 nt, Homo sapiens
  misc_RNA (1)...(19): siRNA sense strand
gacaaugaguccagcuaca

SEQ ID NO: 1621976 - RNA, 19 nt, Homo sapiens
  misc_RNA (1)...(19): siRNA sense strand
uaaggcaagaaguugauua

SEQ ID NO: 1621977 - RNA, 19 nt, Homo sapiens
  misc_RNA (1)...(19): siRNA sense strand
gguacaacauccucagagu

SEQ ID NO: 1621978 - RNA, 19 nt, Homo sapiens
  misc_RNA (1)...(19): siRNA sense strand
gauguucacaagauucauu

SEQ ID NO: 1621979 - RNA, 19 nt, Homo sapiens
  misc_RNA (1)...(19): siRNA sense strand
gcaaguguggcugcuauga

SEQ ID NO: 1621980 - RNA, 19 nt, Homo sapiens
  misc_RNA (1)...(19): siRNA sense strand
guugauauccauaccaaga

SEQ ID NO: 1621981 - RNA, 19 nt, Homo sapiens
  misc_RNA (1)...(19): siRNA sense strand
ccagguuccuuaugugcaa

SEQ ID NO: 1621982 - RNA, 19 nt, Homo sapiens
  misc_RNA (1)...(19): siRNA sense strand
cauaaacauccacacaauu

SEQ ID NO: 1621983 - RNA, 19 nt, Homo sapiens
  misc_RNA (1)...(19): siRNA sense strand
ggcaucagcagcuacauga

SEQ ID NO: 1621984 - RNA, 19 nt, Homo sapiens
  misc_RNA (1)...(19): siRNA sense strand
aaacauccacacaauugaa

SEQ ID NO: 1621985 - RNA, 19 nt, Homo sapiens
  misc_RNA (1)...(19): siRNA sense strand
gcaucugccugcccaugga

SEQ ID NO: 1621986 - RNA, 19 nt, Homo sapiens
  misc_RNA (1)...(19): siRNA sense strand
gaacaucauagugcuagug

SEQ ID NO: 1621987 - RNA, 19 nt, Homo sapiens
  misc_RNA (1)...(19): siRNA sense strand
gcagaggauuugacaugac

SEQ ID NO: 1621988 - RNA, 19 nt, Homo sapiens
  misc_RNA (1)...(19): siRNA sense strand
ccaaauuuauaggacagaa

SEQ ID NO: 1621989 - RNA, 19 nt, Homo sapiens
  misc_RNA (1)...(19): siRNA sense strand
ugucacagcuguaugucau

SEQ ID NO: 1621990 - RNA, 19 nt, Homo sapiens
  misc_RNA (1)...(19): siRNA sense strand
caguugauauccauaccaa

SEQ ID NO: 1621991 - RNA, 19 nt, Homo sapiens
  misc_RNA (1)...(19): siRNA sense strand
gagcaaggugacagagauu

SEQ ID NO: 1621992 - RNA, 19 nt, Homo sapiens
  misc_RNA (1)...(19): siRNA sense strand
aggcagauguguucuccaa

SEQ ID NO: 1621993 - RNA, 19 nt, Homo sapiens
  misc_RNA (1)...(19): siRNA sense strand
aaugcaagcccaaauuuau

SEQ ID NO: 1621994 - RNA, 19 nt, Homo sapiens
  misc_RNA (1)...(19): siRNA sense strand
gccaauaucacaacuaugc

SEQ ID NO: 1621995 - RNA, 19 nt, Homo sapiens
  misc_RNA (1)...(19): siRNA sense strand
ccagaaccuucccaaccuu

SEQ ID NO: 1621996 - RNA, 19 nt, Homo sapiens
  misc_RNA (1)...(19): siRNA sense strand
aagaauugccuaaugaugu

SEQ ID NO: 1621997 - RNA, 19 nt, Homo sapiens
  misc_RNA (1)...(19): siRNA sense strand
ucacaacuaugccauugac

SEQ ID NO: 1621998 - RNA, 19 nt, Homo sapiens
  misc_RNA (1)...(19): siRNA sense strand
ggugauagaggcagaugug

SEQ ID NO: 1621999 - RNA, 19 nt, Homo sapiens
  misc_RNA (1)...(19): siRNA sense strand
caaccuggccuuugcugau

SEQ ID NO: 1622000 - RNA, 19 nt, Homo sapiens
  misc_RNA (1)...(19): siRNA sense strand
ggccaucacugggaacauc

SEQ ID NO: 1622001 - RNA, 19 nt, Homo sapiens
  misc_RNA (1)...(19): siRNA sense strand
gaguuugacuaugacuuau

SEQ ID NO: 1622002 - RNA, 19 nt, Homo sapiens
  misc_RNA (1)...(19): siRNA sense strand
aagauucauucucuccaaa

SEQ ID NO: 1622003 - RNA, 19 nt, Homo sapiens
  misc_RNA (1)...(19): siRNA sense strand
agagcaaggugacagagau

SEQ ID NO: 1622004 - RNA, 19 nt, Homo sapiens
  misc_RNA (1)...(19): siRNA sense strand
ggaauggccacugcucuuc

SEQ ID NO: 1622005 - RNA, 19 nt, Homo sapiens
  misc_RNA (1)...(19): siRNA sense strand
caaguguggcugcuaugaa

SEQ ID NO: 1622006 - RNA, 19 nt, Homo sapiens
  misc_RNA (1)...(19): siRNA sense strand
cagccaauauaaacucaca

SEQ ID NO: 1622007 - RNA, 19 nt, Homo sapiens
  misc_RNA (1)...(19): siRNA sense strand
uaagccagaugcauucaac

SEQ ID NO: 1622008 - RNA, 19 nt, Homo sapiens
  misc_RNA (1)...(19): siRNA sense strand
uaaacauccacacaauuga

SEQ ID NO: 1622009 - RNA, 19 nt, Homo sapiens
  misc_RNA (1)...(19): siRNA sense strand
cuucccaaauuacaugaaa

SEQ ID NO: 1622010 - RNA, 19 nt, Homo sapiens
  misc_RNA (1)...(19): siRNA sense strand
cuuccucuaugccaucuuu

SEQ ID NO: 1622011 - RNA, 19 nt, Homo sapiens
  misc_RNA (1)...(19): siRNA sense strand
ucacugacuuccucugcau

SEQ ID NO: 1622012 - RNA, 19 nt, Homo sapiens
  misc_RNA (1)...(19): siRNA sense strand
ucacagcuguaugucaugu

SEQ ID NO: 1622013 - RNA, 19 nt, Homo sapiens
  misc_RNA (1)...(19): siRNA sense strand
cuuaugcaaugaagugguu

SEQ ID NO: 1622014 - RNA, 19 nt, Homo sapiens
  misc_RNA (1)...(19): siRNA sense strand
gaaccuucccaaccuucaa

SEQ ID NO: 1622015 - RNA, 19 nt, Homo sapiens
  misc_RNA (1)...(19): siRNA sense strand
gagagcaaggugacagaga

SEQ ID NO: 1622016 - RNA, 19 nt, Homo sapiens
  misc_RNA (1)...(19): siRNA sense strand
ucuacacucugacagcuau

SEQ ID NO: 1622017 - RNA, 19 nt, Homo sapiens
  misc_RNA (1)...(19): siRNA sense strand
uaagcaccuuccagauguu

SEQ ID NO: 1622018 - RNA, 19 nt, Homo sapiens
  misc_RNA (1)...(19): siRNA sense strand
ucuaugccaucuuuaccaa

SEQ ID NO: 1622019 - RNA, 19 nt, Homo sapiens
  misc_RNA (1)...(19): siRNA sense strand
gaauggccacugcucuuca

SEQ ID NO: 1622020 - RNA, 19 nt, Homo sapiens
  misc_RNA (1)...(19): siRNA sense strand
ucaccaagcuucgagucau

SEQ ID NO: 1622021 - RNA, 19 nt, Homo sapiens
  misc_RNA (1)...(19): siRNA sense strand
uuccagauguucacaagau

SEQ ID NO: 1622022 - RNA, 19 nt, Homo sapiens
  misc_RNA (1)...(19): siRNA sense strand
ggcacccauuucuuucuuu

SEQ ID NO: 1622023 - RNA, 19 nt, Homo sapiens
  misc_RNA (1)...(19): siRNA sense strand
cagcuacagcagaggauuu

SEQ ID NO: 1622024 - RNA, 19 nt, Homo sapiens
  misc_RNA (1)...(19): siRNA sense strand
uugaaagugugauucuaug

SEQ ID NO: 1622025 - RNA, 19 nt, Homo sapiens
  misc_RNA (1)...(19): siRNA sense strand
caacaaccugcucuacauc

SEQ ID NO: 1622026 - RNA, 19 nt, Homo sapiens
  misc_RNA (1)...(19): siRNA sense strand
augcaagcccaaauuuaua

SEQ ID NO: 1622027 - RNA, 19 nt, Homo sapiens
  misc_RNA (1)...(19): siRNA sense strand
uggcugcuaugaaaugcaa

SEQ ID NO: 1622028 - RNA, 19 nt, Homo sapiens
  misc_RNA (1)...(19): siRNA sense strand
ggacagaagauuuauauga

SEQ ID NO: 1622029 - RNA, 19 nt, Homo sapiens
  misc_RNA (1)...(19): siRNA sense strand
gauccacguuucaaugaua

SEQ ID NO: 1622030 - RNA, 19 nt, Homo sapiens
  misc_RNA (1)...(19): siRNA sense strand
ugaaggcccuggauuauug

SEQ ID NO: 1622031 - RNA, 19 nt, Homo sapiens
  misc_RNA (1)...(19): siRNA sense strand
gauguacgauuauaguuug

SEQ ID NO: 1622032 - RNA, 19 nt, Homo sapiens
  misc_RNA (1)...(19): siRNA sense strand
ccaucaacaucacaaauaa

SEQ ID NO: 1622033 - RNA, 19 nt, Homo sapiens
  misc_RNA (1)...(19): siRNA sense strand
ugaauuagauccacguuuc

SEQ ID NO: 1622034 - RNA, 19 nt, Homo sapiens
  misc_RNA (1)...(19): siRNA sense strand
acuaucagauguacgauua

SEQ ID NO: 1622035 - RNA, 19 nt, Homo sapiens
  misc_RNA (1)...(19): siRNA sense strand
acacagacuucaagcaauu

SEQ ID NO: 1622036 - RNA, 19 nt, Homo sapiens
  misc_RNA (1)...(19): siRNA sense strand
ugacaauuaugaucaguug

SEQ ID NO: 1622037 - RNA, 19 nt, Homo sapiens
  misc_RNA (1)...(19): siRNA sense strand
gaccaccagucacggcuua

SEQ ID NO: 1622038 - RNA, 19 nt, Homo sapiens
  misc_RNA (1)...(19): siRNA sense strand
caacacagacuucaagcaa

SEQ ID NO: 1622039 - RNA, 19 nt, Homo sapiens
  misc_RNA (1)...(19): siRNA sense strand
cuucaaagguccugagcua

SEQ ID NO: 1622040 - RNA, 19 nt, Homo sapiens
  misc_RNA (1)...(19): siRNA sense strand
gaauauaauguccgaguug

SEQ ID NO: 1622041 - RNA, 19 nt, Homo sapiens
  misc_RNA (1)...(19): siRNA sense strand
gccaucaacaucacaaaua

SEQ ID NO: 1622042 - RNA, 19 nt, Homo sapiens
  misc_RNA (1)...(19): siRNA sense strand
gacagaagauuuauaugac

SEQ ID NO: 1622043 - RNA, 19 nt, Homo sapiens
  misc_RNA (1)...(19): siRNA sense strand
ggaauuaugcacagagaug

SEQ ID NO: 1622044 - RNA, 19 nt, Homo sapiens
  misc_RNA (1)...(19): siRNA sense strand
uggacaaacugcugcgaua

SEQ ID NO: 1622045 - RNA, 19 nt, Homo sapiens
  misc_RNA (1)...(19): siRNA sense strand
acaaacugcugcgauauga

SEQ ID NO: 1622046 - RNA, 19 nt, Homo sapiens
  misc_RNA (1)...(19): siRNA sense strand
cccauaaugucaugauuga

SEQ ID NO: 1622047 - RNA, 19 nt, Homo sapiens
  misc_RNA (1)...(19): siRNA sense strand
ugucacagcaugggaauua

SEQ ID NO: 1622048 - RNA, 19 nt, Homo sapiens
  misc_RNA (1)...(19): siRNA sense strand
gcccugaggccuuggauuu

SEQ ID NO: 1622049 - RNA, 19 nt, Homo sapiens
  misc_RNA (1)...(19): siRNA sense strand
caaagguccugagcuacuu

SEQ ID NO: 1622050 - RNA, 19 nt, Homo sapiens
  misc_RNA (1)...(19): siRNA sense strand
cgaauggguucaucuagca

SEQ ID NO: 1622051 - RNA, 19 nt, Homo sapiens
  misc_RNA (1)...(19): siRNA sense strand
guuguaugcuggcaaguau

SEQ ID NO: 1622052 - RNA, 19 nt, Homo sapiens
  misc_RNA (1)...(19): siRNA sense strand
gaaaucaagaugacuacca

SEQ ID NO: 1622053 - RNA, 19 nt, Homo sapiens
  misc_RNA (1)...(19): siRNA sense strand
ggacaaacugcugcgauau

SEQ ID NO: 1622054 - RNA, 19 nt, Homo sapiens
  misc_RNA (1)...(19): siRNA sense strand
ccagcugguucgaaaauua

SEQ ID NO: 1622055 - RNA, 19 nt, Homo sapiens
  misc_RNA (1)...(19): siRNA sense strand
ugucagggauuucuucagu

SEQ ID NO: 1622056 - RNA, 19 nt, Homo sapiens
  misc_RNA (1)...(19): siRNA sense strand
cgagguaaauacagugaag

SEQ ID NO: 1622057 - RNA, 19 nt, Homo sapiens
  misc_RNA (1)...(19): siRNA sense strand
agaauauaauguccgaguu

SEQ ID NO: 1622058 - RNA, 19 nt, Homo sapiens
  misc_RNA (1)...(19): siRNA sense strand
cauaaugucaugauugauc

SEQ ID NO: 1622059 - RNA, 19 nt, Homo sapiens
  misc_RNA (1)...(19): siRNA sense strand
gcucgaauggguucaucua

SEQ ID NO: 1622060 - RNA, 19 nt, Homo sapiens
  misc_RNA (1)...(19): siRNA sense strand
gacaaacugcugcgauaug

SEQ ID NO: 1622061 - RNA, 19 nt, Homo sapiens
  misc_RNA (1)...(19): siRNA sense strand
aaacaacacagacuucaag

SEQ ID NO: 1622062 - RNA, 19 nt, Homo sapiens
  misc_RNA (1)...(19): siRNA sense strand
gaaggaccaggcucgaaug

SEQ ID NO: 1622063 - RNA, 19 nt, Homo sapiens
  misc_RNA (1)...(19): siRNA sense strand
guacgauuauaguuuggau

SEQ ID NO: 1622064 - RNA, 19 nt, Homo sapiens
  misc_RNA (1)...(19): siRNA sense strand
gaauuagauccacguuuca

SEQ ID NO: 1622065 - RNA, 19 nt, Homo sapiens
  misc_RNA (1)...(19): siRNA sense strand
gcuggcaaguaugaucuuu

SEQ ID NO: 1622066 - RNA, 19 nt, Homo sapiens
  misc_RNA (1)...(19): siRNA sense strand
gggcagacacucucgaaag

SEQ ID NO: 1622067 - RNA, 19 nt, Homo sapiens
  misc_RNA (1)...(19): siRNA sense strand
guaaacaacacagacuuca

SEQ ID NO: 1622068 - RNA, 19 nt, Homo sapiens
  misc_RNA (1)...(19): siRNA sense strand
uagauccacguuucaauga

SEQ ID NO: 1622069 - RNA, 19 nt, Homo sapiens
  misc_RNA (1)...(19): siRNA sense strand
uggcagacauuguaaaaga

SEQ ID NO: 1622070 - RNA, 19 nt, Homo sapiens
  misc_RNA (1)...(19): siRNA sense strand
cauccuggccaagaauaua

SEQ ID NO: 1622071 - RNA, 19 nt, Homo sapiens
  misc_RNA (1)...(19): siRNA sense strand
gaggauagccaagguucug

SEQ ID NO: 1622072 - RNA, 19 nt, Homo sapiens
  misc_RNA (1)...(19): siRNA sense strand
gaagccaucaacaucacaa

SEQ ID NO: 1622073 - RNA, 19 nt, Homo sapiens
  misc_RNA (1)...(19): siRNA sense strand
ggcagacacucucgaaagc

SEQ ID NO: 1622074 - RNA, 19 nt, Homo sapiens
  misc_RNA (1)...(19): siRNA sense strand
uaaacaacacagacuucaa

SEQ ID NO: 1622075 - RNA, 19 nt, Homo sapiens
  misc_RNA (1)...(19): siRNA sense strand
gaaaaucagcaccuuguca

SEQ ID NO: 1622076 - RNA, 19 nt, Homo sapiens
  misc_RNA (1)...(19): siRNA sense strand
ccgaguugcuucccgauac

SEQ ID NO: 1622077 - RNA, 19 nt, Homo sapiens
  misc_RNA (1)...(19): siRNA sense strand
gaauuaugcacagagaugu

SEQ ID NO: 1622078 - RNA, 19 nt, Homo sapiens
  misc_RNA (1)...(19): siRNA sense strand
gguuguaugcuggcaagua

SEQ ID NO: 1622079 - RNA, 19 nt, Homo sapiens
  misc_RNA (1)...(19): siRNA sense strand
gaagaaaauuaagcgugaa

SEQ ID NO: 1622080 - RNA, 19 nt, Homo sapiens
  misc_RNA (1)...(19): siRNA sense strand
ugaaggaccaggcucgaau

SEQ ID NO: 1622081 - RNA, 19 nt, Homo sapiens
  misc_RNA (1)...(19): siRNA sense strand
aaauuaggccgagguaaau

SEQ ID NO: 1622082 - RNA, 19 nt, Homo sapiens
  misc_RNA (1)...(19): siRNA sense strand
caacauugaauuagaucca

SEQ ID NO: 1622083 - RNA, 19 nt, Homo sapiens
  misc_RNA (1)...(19): siRNA sense strand
cacacuggcagacauugua

SEQ ID NO: 1622084 - RNA, 19 nt, Homo sapiens
  misc_RNA (1)...(19): siRNA sense strand
ucagauguacgauuauagu

SEQ ID NO: 1622085 - RNA, 19 nt, Homo sapiens
  misc_RNA (1)...(19): siRNA sense strand
uuacauguaugagauucug

SEQ ID NO: 1622086 - RNA, 19 nt, Homo sapiens
  misc_RNA (1)...(19): siRNA sense strand
uuucuacacuguugugaag

SEQ ID NO: 1622087 - RNA, 19 nt, Homo sapiens
  misc_RNA (1)...(19): siRNA sense strand
aaaauuaggccgagguaaa

SEQ ID NO: 1622088 - RNA, 19 nt, Homo sapiens
  misc_RNA (1)...(19): siRNA sense strand
gaucaguuggugaggauag

SEQ ID NO: 1622089 - RNA, 19 nt, Homo sapiens
  misc_RNA (1)...(19): siRNA sense strand
uuagauccacguuucaaug

SEQ ID NO: 1622090 - RNA, 19 nt, Homo sapiens
  misc_RNA (1)...(19): siRNA sense strand
ucuacacuguugugaagga

SEQ ID NO: 1622091 - RNA, 19 nt, Homo sapiens
  misc_RNA (1)...(19): siRNA sense strand
uauaauguccgaguugcuu

SEQ ID NO: 1622092 - RNA, 19 nt, Homo sapiens
  misc_RNA (1)...(19): siRNA sense strand
caucacacuggcagacauu

SEQ ID NO: 1622093 - RNA, 19 nt, Homo sapiens
  misc_RNA (1)...(19): siRNA sense strand
ucacagcaugggaauuaug

SEQ ID NO: 1622094 - RNA, 19 nt, Homo sapiens
  misc_RNA (1)...(19): siRNA sense strand
acacuggcagacauuguaa

SEQ ID NO: 1622095 - RNA, 19 nt, Homo sapiens
  misc_RNA (1)...(19): siRNA sense strand
acguuucaaugauaucuug

SEQ ID NO: 1622096 - RNA, 19 nt, Homo sapiens
  misc_RNA (1)...(19): siRNA sense strand
uggcaaguaugaucuuucg

SEQ ID NO: 1622097 - RNA, 19 nt, Homo sapiens
  misc_RNA (1)...(19): siRNA sense strand
cagauguacgauuauaguu

SEQ ID NO: 1622098 - RNA, 19 nt, Homo sapiens
  misc_RNA (1)...(19): siRNA sense strand
cuuguagacuaucagaugu

SEQ ID NO: 1622099 - RNA, 19 nt, Homo sapiens
  misc_RNA (1)...(19): siRNA sense strand
ucaaagguccugagcuacu

SEQ ID NO: 1622100 - RNA, 19 nt, Homo sapiens
  misc_RNA (1)...(19): siRNA sense strand
gaucaugagcacagaaagc

SEQ ID NO: 1622101 - RNA, 19 nt, Homo sapiens
  misc_RNA (1)...(19): siRNA sense strand
ugggaauuaugcacagaga

SEQ ID NO: 1622102 - RNA, 19 nt, Homo sapiens
  misc_RNA (1)...(19): siRNA sense strand
uagacuaucagauguacga

SEQ ID NO: 1622103 - RNA, 19 nt, Homo sapiens
  misc_RNA (1)...(19): siRNA sense strand
agguaaauacagugaagua

SEQ ID NO: 1622104 - RNA, 19 nt, Homo sapiens
  misc_RNA (1)...(19): siRNA sense strand
gaaggcccuggauuauugu

SEQ ID NO: 1622105 - RNA, 19 nt, Homo sapiens
  misc_RNA (1)...(19): siRNA sense strand
uguaugcuggcaaguauga

SEQ ID NO: 1622106 - RNA, 19 nt, Homo sapiens
  misc_RNA (1)...(19): siRNA sense strand
gauugaucaugagcacaga

SEQ ID NO: 1622107 - RNA, 19 nt, Homo sapiens
  misc_RNA (1)...(19): siRNA sense strand
ucugaaggcccuggauuau

SEQ ID NO: 1622108 - RNA, 19 nt, Homo sapiens
  misc_RNA (1)...(19): siRNA sense strand
gaugucagggauuucuuca

SEQ ID NO: 1622109 - RNA, 19 nt, Homo sapiens
  misc_RNA (1)...(19): siRNA sense strand
uggauuuccuggacaaacu

SEQ ID NO: 1622110 - RNA, 19 nt, Homo sapiens
  misc_RNA (1)...(19): siRNA sense strand
cgauuauaguuuggauaug

SEQ ID NO: 1622111 - RNA, 19 nt, Homo sapiens
  misc_RNA (1)...(19): siRNA sense strand
cguaaacaacacagacuuc

SEQ ID NO: 1622112 - RNA, 19 nt, Homo sapiens
  misc_RNA (1)...(19): siRNA sense strand
aacacagacuucaagcaau

SEQ ID NO: 1622113 - RNA, 19 nt, Homo sapiens
  misc_RNA (1)...(19): siRNA sense strand
ggacagaagauuuauauga

SEQ ID NO: 1622114 - RNA, 19 nt, Homo sapiens
  misc_RNA (1)...(19): siRNA sense strand
gauccacguuucaaugaua

SEQ ID NO: 1622115 - RNA, 19 nt, Homo sapiens
  misc_RNA (1)...(19): siRNA sense strand
ugaaggcccuggauuauug

SEQ ID NO: 1622116 - RNA, 19 nt, Homo sapiens
  misc_RNA (1)...(19): siRNA sense strand
gauguacgauuauaguuug

SEQ ID NO: 1622117 - RNA, 19 nt, Homo sapiens
  misc_RNA (1)...(19): siRNA sense strand
ccaucaacaucacaaauaa

SEQ ID NO: 1622118 - RNA, 19 nt, Homo sapiens
  misc_RNA (1)...(19): siRNA sense strand
ugaauuagauccacguuuc

SEQ ID NO: 1622119 - RNA, 19 nt, Homo sapiens
  misc_RNA (1)...(19): siRNA sense strand
acuaucagauguacgauua

SEQ ID NO: 1622120 - RNA, 19 nt, Homo sapiens
  misc_RNA (1)...(19): siRNA sense strand
acacagacuucaagcaauu

SEQ ID NO: 1622121 - RNA, 19 nt, Homo sapiens
  misc_RNA (1)...(19): siRNA sense strand
ugacaauuaugaucaguug

SEQ ID NO: 1622122 - RNA, 19 nt, Homo sapiens
  misc_RNA (1)...(19): siRNA sense strand
gaccaccagucacggcuua

SEQ ID NO: 1622123 - RNA, 19 nt, Homo sapiens
  misc_RNA (1)...(19): siRNA sense strand
caacacagacuucaagcaa

SEQ ID NO: 1622124 - RNA, 19 nt, Homo sapiens
  misc_RNA (1)...(19): siRNA sense strand
cuucaaagguccugagcua

SEQ ID NO: 1622125 - RNA, 19 nt, Homo sapiens
  misc_RNA (1)...(19): siRNA sense strand
gaauauaauguccgaguug

SEQ ID NO: 1622126 - RNA, 19 nt, Homo sapiens
  misc_RNA (1)...(19): siRNA sense strand
gccaucaacaucacaaaua

SEQ ID NO: 1622127 - RNA, 19 nt, Homo sapiens
  misc_RNA (1)...(19): siRNA sense strand
gacagaagauuuauaugac

SEQ ID NO: 1622128 - RNA, 19 nt, Homo sapiens
  misc_RNA (1)...(19): siRNA sense strand
ggaauuaugcacagagaug

SEQ ID NO: 1622129 - RNA, 19 nt, Homo sapiens
  misc_RNA (1)...(19): siRNA sense strand
uggacaaacugcugcgaua

SEQ ID NO: 1622130 - RNA, 19 nt, Homo sapiens
  misc_RNA (1)...(19): siRNA sense strand
acaaacugcugcgauauga

SEQ ID NO: 1622131 - RNA, 19 nt, Homo sapiens
  misc_RNA (1)...(19): siRNA sense strand
cccauaaugucaugauuga

SEQ ID NO: 1622132 - RNA, 19 nt, Homo sapiens
  misc_RNA (1)...(19): siRNA sense strand
ugucacagcaugggaauua

SEQ ID NO: 1622133 - RNA, 19 nt, Homo sapiens
  misc_RNA (1)...(19): siRNA sense strand
gcccugaggccuuggauuu

SEQ ID NO: 1622134 - RNA, 19 nt, Homo sapiens
  misc_RNA (1)...(19): siRNA sense strand
caaagguccugagcuacuu

SEQ ID NO: 1622135 - RNA, 19 nt, Homo sapiens
  misc_RNA (1)...(19): siRNA sense strand
cgaauggguucaucuagca

SEQ ID NO: 1622136 - RNA, 19 nt, Homo sapiens
  misc_RNA (1)...(19): siRNA sense strand
guuguaugcuggcaaguau

SEQ ID NO: 1622137 - RNA, 19 nt, Homo sapiens
  misc_RNA (1)...(19): siRNA sense strand
gaaaucaagaugacuacca

SEQ ID NO: 1622138 - RNA, 19 nt, Homo sapiens
  misc_RNA (1)...(19): siRNA sense strand
ggacaaacugcugcgauau

SEQ ID NO: 1622139 - RNA, 19 nt, Homo sapiens
  misc_RNA (1)...(19): siRNA sense strand
ccagcugguucgaaaauua

SEQ ID NO: 1622140 - RNA, 19 nt, Homo sapiens
  misc_RNA (1)...(19): siRNA sense strand
ugucagggauuucuucagu

SEQ ID NO: 1622141 - RNA, 19 nt, Homo sapiens
  misc_RNA (1)...(19): siRNA sense strand
cgagguaaauacagugaag

SEQ ID NO: 1622142 - RNA, 19 nt, Homo sapiens
  misc_RNA (1)...(19): siRNA sense strand
agaauauaauguccgaguu

SEQ ID NO: 1622143 - RNA, 19 nt, Homo sapiens
  misc_RNA (1)...(19): siRNA sense strand
cauaaugucaugauugauc

SEQ ID NO: 1622144 - RNA, 19 nt, Homo sapiens
  misc_RNA (1)...(19): siRNA sense strand
gcucgaauggguucaucua

SEQ ID NO: 1622145 - RNA, 19 nt, Homo sapiens
  misc_RNA (1)...(19): siRNA sense strand
gacaaacugcugcgauaug

SEQ ID NO: 1622146 - RNA, 19 nt, Homo sapiens
  misc_RNA (1)...(19): siRNA sense strand
aaacaacacagacuucaag

SEQ ID NO: 1622147 - RNA, 19 nt, Homo sapiens
  misc_RNA (1)...(19): siRNA sense strand
gaaggaccaggcucgaaug

SEQ ID NO: 1622148 - RNA, 19 nt, Homo sapiens
  misc_RNA (1)...(19): siRNA sense strand
guacgauuauaguuuggau

SEQ ID NO: 1622149 - RNA, 19 nt, Homo sapiens
  misc_RNA (1)...(19): siRNA sense strand
gaauuagauccacguuuca

SEQ ID NO: 1622150 - RNA, 19 nt, Homo sapiens
  misc_RNA (1)...(19): siRNA sense strand
gcuggcaaguaugaucuuu

SEQ ID NO: 1622151 - RNA, 19 nt, Homo sapiens
  misc_RNA (1)...(19): siRNA sense strand
gggcagacacucucgaaag

SEQ ID NO: 1622152 - RNA, 19 nt, Homo sapiens
  misc_RNA (1)...(19): siRNA sense strand
guaaacaacacagacuuca

SEQ ID NO: 1622153 - RNA, 19 nt, Homo sapiens
  misc_RNA (1)...(19): siRNA sense strand
uagauccacguuucaauga

SEQ ID NO: 1622154 - RNA, 19 nt, Homo sapiens
  misc_RNA (1)...(19): siRNA sense strand
uggcagacauuguaaaaga

SEQ ID NO: 1622155 - RNA, 19 nt, Homo sapiens
  misc_RNA (1)...(19): siRNA sense strand
cauccuggccaagaauaua

SEQ ID NO: 1622156 - RNA, 19 nt, Homo sapiens
  misc_RNA (1)...(19): siRNA sense strand
gaggauagccaagguucug

SEQ ID NO: 1622157 - RNA, 19 nt, Homo sapiens
  misc_RNA (1)...(19): siRNA sense strand
gaagccaucaacaucacaa

SEQ ID NO: 1622158 - RNA, 19 nt, Homo sapiens
  misc_RNA (1)...(19): siRNA sense strand
ggcagacacucucgaaagc

SEQ ID NO: 1622159 - RNA, 19 nt, Homo sapiens
  misc_RNA (1)...(19): siRNA sense strand
uaaacaacacagacuucaa

SEQ ID NO: 1622160 - RNA, 19 nt, Homo sapiens
  misc_RNA (1)...(19): siRNA sense strand
gaaaaucagcaccuuguca

SEQ ID NO: 1622161 - RNA, 19 nt, Homo sapiens
  misc_RNA (1)...(19): siRNA sense strand
ccgaguugcuucccgauac

SEQ ID NO: 1622162 - RNA, 19 nt, Homo sapiens
  misc_RNA (1)...(19): siRNA sense strand
gaauuaugcacagagaugu

SEQ ID NO: 1622163 - RNA, 19 nt, Homo sapiens
  misc_RNA (1)...(19): siRNA sense strand
gguuguaugcuggcaagua

SEQ ID NO: 1622164 - RNA, 19 nt, Homo sapiens
  misc_RNA (1)...(19): siRNA sense strand
gaagaaaauuaagcgugaa

SEQ ID NO: 1622165 - RNA, 19 nt, Homo sapiens
  misc_RNA (1)...(19): siRNA sense strand
ugaaggaccaggcucgaau

SEQ ID NO: 1622166 - RNA, 19 nt, Homo sapiens
  misc_RNA (1)...(19): siRNA sense strand
aaauuaggccgagguaaau

SEQ ID NO: 1622167 - RNA, 19 nt, Homo sapiens
  misc_RNA (1)...(19): siRNA sense strand
caacauugaauuagaucca

SEQ ID NO: 1622168 - RNA, 19 nt, Homo sapiens
  misc_RNA (1)...(19): siRNA sense strand
cacacuggcagacauugua

SEQ ID NO: 1622169 - RNA, 19 nt, Homo sapiens
  misc_RNA (1)...(19): siRNA sense strand
ucagauguacgauuauagu

SEQ ID NO: 1622170 - RNA, 19 nt, Homo sapiens
  misc_RNA (1)...(19): siRNA sense strand
uuacauguaugagauucug

SEQ ID NO: 1622171 - RNA, 19 nt, Homo sapiens
  misc_RNA (1)...(19): siRNA sense strand
uuucuacacuguugugaag

SEQ ID NO: 1622172 - RNA, 19 nt, Homo sapiens
  misc_RNA (1)...(19): siRNA sense strand
aaaauuaggccgagguaaa

SEQ ID NO: 1622173 - RNA, 19 nt, Homo sapiens
  misc_RNA (1)...(19): siRNA sense strand
gaucaguuggugaggauag

SEQ ID NO: 1622174 - RNA, 19 nt, Homo sapiens
  misc_RNA (1)...(19): siRNA sense strand
uuagauccacguuucaaug

SEQ ID NO: 1622175 - RNA, 19 nt, Homo sapiens
  misc_RNA (1)...(19): siRNA sense strand
ucuacacuguugugaagga

SEQ ID NO: 1622176 - RNA, 19 nt, Homo sapiens
  misc_RNA (1)...(19): siRNA sense strand
uauaauguccgaguugcuu

SEQ ID NO: 1622177 - RNA, 19 nt, Homo sapiens
  misc_RNA (1)...(19): siRNA sense strand
caucacacuggcagacauu

SEQ ID NO: 1622178 - RNA, 19 nt, Homo sapiens
  misc_RNA (1)...(19): siRNA sense strand
ucacagcaugggaauuaug

SEQ ID NO: 1622179 - RNA, 19 nt, Homo sapiens
  misc_RNA (1)...(19): siRNA sense strand
acacuggcagacauuguaa

SEQ ID NO: 1622180 - RNA, 19 nt, Homo sapiens
  misc_RNA (1)...(19): siRNA sense strand
acguuucaaugauaucuug

SEQ ID NO: 1622181 - RNA, 19 nt, Homo sapiens
  misc_RNA (1)...(19): siRNA sense strand
uggcaaguaugaucuuucg

SEQ ID NO: 1622182 - RNA, 19 nt, Homo sapiens
  misc_RNA (1)...(19): siRNA sense strand
cagauguacgauuauaguu

SEQ ID NO: 1622183 - RNA, 19 nt, Homo sapiens
  misc_RNA (1)...(19): siRNA sense strand
cuuguagacuaucagaugu

SEQ ID NO: 1622184 - RNA, 19 nt, Homo sapiens
  misc_RNA (1)...(19): siRNA sense strand
ucaaagguccugagcuacu

SEQ ID NO: 1622185 - RNA, 19 nt, Homo sapiens
  misc_RNA (1)...(19): siRNA sense strand
gaucaugagcacagaaagc

SEQ ID NO: 1622186 - RNA, 19 nt, Homo sapiens
  misc_RNA (1)...(19): siRNA sense strand
ugggaauuaugcacagaga

SEQ ID NO: 1622187 - RNA, 19 nt, Homo sapiens
  misc_RNA (1)...(19): siRNA sense strand
uagacuaucagauguacga

SEQ ID NO: 1622188 - RNA, 19 nt, Homo sapiens
  misc_RNA (1)...(19): siRNA sense strand
agguaaauacagugaagua

SEQ ID NO: 1622189 - RNA, 19 nt, Homo sapiens
  misc_RNA (1)...(19): siRNA sense strand
gaaggcccuggauuauugu

SEQ ID NO: 1622190 - RNA, 19 nt, Homo sapiens
  misc_RNA (1)...(19): siRNA sense strand
uguaugcuggcaaguauga

SEQ ID NO: 1622191 - RNA, 19 nt, Homo sapiens
  misc_RNA (1)...(19): siRNA sense strand
gauugaucaugagcacaga

SEQ ID NO: 1622192 - RNA, 19 nt, Homo sapiens
  misc_RNA (1)...(19): siRNA sense strand
ucugaaggcccuggauuau

SEQ ID NO: 1622193 - RNA, 19 nt, Homo sapiens
  misc_RNA (1)...(19): siRNA sense strand
gaugucagggauuucuuca

SEQ ID NO: 1622194 - RNA, 19 nt, Homo sapiens
  misc_RNA (1)...(19): siRNA sense strand
uggauuuccuggacaaacu

SEQ ID NO: 1622195 - RNA, 19 nt, Homo sapiens
  misc_RNA (1)...(19): siRNA sense strand
cgauuauaguuuggauaug

SEQ ID NO: 1622196 - RNA, 19 nt, Homo sapiens
  misc_RNA (1)...(19): siRNA sense strand
cguaaacaacacagacuuc

SEQ ID NO: 1622197 - RNA, 19 nt, Homo sapiens
  misc_RNA (1)...(19): siRNA sense strand
aacacagacuucaagcaau

SEQ ID NO: 1622198 - RNA, 19 nt, Homo sapiens
  misc_RNA (1)...(19): siRNA sense strand
ggacagaagauuuauauga

SEQ ID NO: 1622199 - RNA, 19 nt, Homo sapiens
  misc_RNA (1)...(19): siRNA sense strand
gauccacguuucaaugaua

SEQ ID NO: 1622200 - RNA, 19 nt, Homo sapiens
  misc_RNA (1)...(19): siRNA sense strand
ugaaggcccuggauuauug

SEQ ID NO: 1622201 - RNA, 19 nt, Homo sapiens
  misc_RNA (1)...(19): siRNA sense strand
gauguacgauuauaguuug

SEQ ID NO: 1622202 - RNA, 19 nt, Homo sapiens
  misc_RNA (1)...(19): siRNA sense strand
acuaucagauguacgauua

SEQ ID NO: 1622203 - RNA, 19 nt, Homo sapiens
  misc_RNA (1)...(19): siRNA sense strand
ugaauuagauccacguuuc

SEQ ID NO: 1622204 - RNA, 19 nt, Homo sapiens
  misc_RNA (1)...(19): siRNA sense strand
ugacaauuaugaucaguug

SEQ ID NO: 1622205 - RNA, 19 nt, Homo sapiens
  misc_RNA (1)...(19): siRNA sense strand
gaccaccagucacggcuua

SEQ ID NO: 1622206 - RNA, 19 nt, Homo sapiens
  misc_RNA (1)...(19): siRNA sense strand
cuucaaagguccugagcua

SEQ ID NO: 1622207 - RNA, 19 nt, Homo sapiens
  misc_RNA (1)...(19): siRNA sense strand
gaauauaauguccgaguug

SEQ ID NO: 1622208 - RNA, 19 nt, Homo sapiens
  misc_RNA (1)...(19): siRNA sense strand
ggaauuaugcacagagaug

SEQ ID NO: 1622209 - RNA, 19 nt, Homo sapiens
  misc_RNA (1)...(19): siRNA sense strand
gacagaagauuuauaugac

SEQ ID NO: 1622210 - RNA, 19 nt, Homo sapiens
  misc_RNA (1)...(19): siRNA sense strand
uggacaaacugcugcgaua

SEQ ID NO: 1622211 - RNA, 19 nt, Homo sapiens
  misc_RNA (1)...(19): siRNA sense strand
acaaacugcugcgauauga

SEQ ID NO: 1622212 - RNA, 19 nt, Homo sapiens
  misc_RNA (1)...(19): siRNA sense strand
cccauaaugucaugauuga

SEQ ID NO: 1622213 - RNA, 19 nt, Homo sapiens
  misc_RNA (1)...(19): siRNA sense strand
gcccugaggccuuggauuu

SEQ ID NO: 1622214 - RNA, 19 nt, Homo sapiens
  misc_RNA (1)...(19): siRNA sense strand
ugucacagcaugggaauua

SEQ ID NO: 1622215 - RNA, 19 nt, Homo sapiens
  misc_RNA (1)...(19): siRNA sense strand
caaagguccugagcuacuu

SEQ ID NO: 1622216 - RNA, 19 nt, Homo sapiens
  misc_RNA (1)...(19): siRNA sense strand
cgaauggguucaucuagca

SEQ ID NO: 1622217 - RNA, 19 nt, Homo sapiens
  misc_RNA (1)...(19): siRNA sense strand
guuguaugcuggcaaguau

SEQ ID NO: 1622218 - RNA, 19 nt, Homo sapiens
  misc_RNA (1)...(19): siRNA sense strand
ggacaaacugcugcgauau

SEQ ID NO: 1622219 - RNA, 19 nt, Homo sapiens
  misc_RNA (1)...(19): siRNA sense strand
ugucagggauuucuucagu

SEQ ID NO: 1622220 - RNA, 19 nt, Homo sapiens
  misc_RNA (1)...(19): siRNA sense strand
agaauauaauguccgaguu

SEQ ID NO: 1622221 - RNA, 19 nt, Homo sapiens
  misc_RNA (1)...(19): siRNA sense strand
cauaaugucaugauugauc

SEQ ID NO: 1622222 - RNA, 19 nt, Homo sapiens
  misc_RNA (1)...(19): siRNA sense strand
gcucgaauggguucaucua

SEQ ID NO: 1622223 - RNA, 19 nt, Homo sapiens
  misc_RNA (1)...(19): siRNA sense strand
gacaaacugcugcgauaug

SEQ ID NO: 1622224 - RNA, 19 nt, Homo sapiens
  misc_RNA (1)...(19): siRNA sense strand
gaaggaccaggcucgaaug

SEQ ID NO: 1622225 - RNA, 19 nt, Homo sapiens
  misc_RNA (1)...(19): siRNA sense strand
guacgauuauaguuuggau

SEQ ID NO: 1622226 - RNA, 19 nt, Homo sapiens
  misc_RNA (1)...(19): siRNA sense strand
gaauuagauccacguuuca

SEQ ID NO: 1622227 - RNA, 19 nt, Homo sapiens
  misc_RNA (1)...(19): siRNA sense strand
gcuggcaaguaugaucuuu

SEQ ID NO: 1622228 - RNA, 19 nt, Homo sapiens
  misc_RNA (1)...(19): siRNA sense strand
gggcagacacucucgaaag

SEQ ID NO: 1622229 - RNA, 19 nt, Homo sapiens
  misc_RNA (1)...(19): siRNA sense strand
uagauccacguuucaauga

SEQ ID NO: 1622230 - RNA, 19 nt, Homo sapiens
  misc_RNA (1)...(19): siRNA sense strand
cauccuggccaagaauaua

SEQ ID NO: 1622231 - RNA, 19 nt, Homo sapiens
  misc_RNA (1)...(19): siRNA sense strand
gaggauagccaagguucug

SEQ ID NO: 1622232 - RNA, 19 nt, Homo sapiens
  misc_RNA (1)...(19): siRNA sense strand
ggcagacacucucgaaagc

SEQ ID NO: 1622233 - RNA, 19 nt, Homo sapiens
  misc_RNA (1)...(19): siRNA sense strand
ccgaguugcuucccgauac

SEQ ID NO: 1622234 - RNA, 19 nt, Homo sapiens
  misc_RNA (1)...(19): siRNA sense strand
gaauuaugcacagagaugu

SEQ ID NO: 1622235 - RNA, 19 nt, Homo sapiens
  misc_RNA (1)...(19): siRNA sense strand
gaaaaucagcaccuuguca

SEQ ID NO: 1622236 - RNA, 19 nt, Homo sapiens
  misc_RNA (1)...(19): siRNA sense strand
gguuguaugcuggcaagua

SEQ ID NO: 1622237 - RNA, 19 nt, Homo sapiens
  misc_RNA (1)...(19): siRNA sense strand
ugaaggaccaggcucgaau

SEQ ID NO: 1622238 - RNA, 19 nt, Homo sapiens
  misc_RNA (1)...(19): siRNA sense strand
ucagauguacgauuauagu

SEQ ID NO: 1622239 - RNA, 19 nt, Homo sapiens
  misc_RNA (1)...(19): siRNA sense strand
caacauugaauuagaucca

SEQ ID NO: 1622240 - RNA, 19 nt, Homo sapiens
  misc_RNA (1)...(19): siRNA sense strand
gaucaguuggugaggauag

SEQ ID NO: 1622241 - RNA, 19 nt, Homo sapiens
  misc_RNA (1)...(19): siRNA sense strand
uuucuacacuguugugaag

SEQ ID NO: 1622242 - RNA, 19 nt, Homo sapiens
  misc_RNA (1)...(19): siRNA sense strand
uuagauccacguuucaaug

SEQ ID NO: 1622243 - RNA, 19 nt, Homo sapiens
  misc_RNA (1)...(19): siRNA sense strand
ucuacacuguugugaagga

SEQ ID NO: 1622244 - RNA, 19 nt, Homo sapiens
  misc_RNA (1)...(19): siRNA sense strand
uauaauguccgaguugcuu

SEQ ID NO: 1622245 - RNA, 19 nt, Homo sapiens
  misc_RNA (1)...(19): siRNA sense strand
ucaaagguccugagcuacu

SEQ ID NO: 1622246 - RNA, 19 nt, Homo sapiens
  misc_RNA (1)...(19): siRNA sense strand
ugggaauuaugcacagaga

SEQ ID NO: 1622247 - RNA, 19 nt, Homo sapiens
  misc_RNA (1)...(19): siRNA sense strand
ucacagcaugggaauuaug

SEQ ID NO: 1622248 - RNA, 19 nt, Homo sapiens
  misc_RNA (1)...(19): siRNA sense strand
acguuucaaugauaucuug

SEQ ID NO: 1622249 - RNA, 19 nt, Homo sapiens
  misc_RNA (1)...(19): siRNA sense strand
gaucaugagcacagaaagc

SEQ ID NO: 1622250 - RNA, 19 nt, Homo sapiens
  misc_RNA (1)...(19): siRNA sense strand
uggcaaguaugaucuuucg

SEQ ID NO: 1622251 - RNA, 19 nt, Homo sapiens
  misc_RNA (1)...(19): siRNA sense strand
cagauguacgauuauaguu

SEQ ID NO: 1622252 - RNA, 19 nt, Homo sapiens
  misc_RNA (1)...(19): siRNA sense strand
cuuguagacuaucagaugu

SEQ ID NO: 1622253 - RNA, 19 nt, Homo sapiens
  misc_RNA (1)...(19): siRNA sense strand
uagacuaucagauguacga

SEQ ID NO: 1622254 - RNA, 19 nt, Homo sapiens
  misc_RNA (1)...(19): siRNA sense strand
gauugaucaugagcacaga

SEQ ID NO: 1622255 - RNA, 19 nt, Homo sapiens
  misc_RNA (1)...(19): siRNA sense strand
gaaggcccuggauuauugu

SEQ ID NO: 1622256 - RNA, 19 nt, Homo sapiens
  misc_RNA (1)...(19): siRNA sense strand
uguaugcuggcaaguauga

SEQ ID NO: 1622257 - RNA, 19 nt, Homo sapiens
  misc_RNA (1)...(19): siRNA sense strand
ucugaaggcccuggauuau

SEQ ID NO: 1622258 - RNA, 19 nt, Homo sapiens
  misc_RNA (1)...(19): siRNA sense strand
gaugucagggauuucuuca

SEQ ID NO: 1622259 - RNA, 19 nt, Homo sapiens
  misc_RNA (1)...(19): siRNA sense strand
uggauuuccuggacaaacu

SEQ ID NO: 1622260 - RNA, 19 nt, Homo sapiens
  misc_RNA (1)...(19): siRNA sense strand
cgauuauaguuuggauaug

SEQ ID NO: 1622261 - RNA, 19 nt, Homo sapiens
  misc_RNA (1)...(19): siRNA sense strand
ggacagaagauuuauauga

SEQ ID NO: 1622262 - RNA, 19 nt, Homo sapiens
  misc_RNA (1)...(19): siRNA sense strand
gauccacguuucaaugaua

SEQ ID NO: 1622263 - RNA, 19 nt, Homo sapiens
  misc_RNA (1)...(19): siRNA sense strand
ugaaggcccuggauuauug

SEQ ID NO: 1622264 - RNA, 19 nt, Homo sapiens
  misc_RNA (1)...(19): siRNA sense strand
gauguacgauuauaguuug

SEQ ID NO: 1622265 - RNA, 19 nt, Homo sapiens
  misc_RNA (1)...(19): siRNA sense strand
ccaucaacaucacaaauaa

SEQ ID NO: 1622266 - RNA, 19 nt, Homo sapiens
  misc_RNA (1)...(19): siRNA sense strand
ugaauuagauccacguuuc

SEQ ID NO: 1622267 - RNA, 19 nt, Homo sapiens
  misc_RNA (1)...(19): siRNA sense strand
acuaucagauguacgauua

SEQ ID NO: 1622268 - RNA, 19 nt, Homo sapiens
  misc_RNA (1)...(19): siRNA sense strand
acacagacuucaagcaauu

SEQ ID NO: 1622269 - RNA, 19 nt, Homo sapiens
  misc_RNA (1)...(19): siRNA sense strand
ugacaauuaugaucaguug

SEQ ID NO: 1622270 - RNA, 19 nt, Homo sapiens
  misc_RNA (1)...(19): siRNA sense strand
gaccaccagucacggcuua

SEQ ID NO: 1622271 - RNA, 19 nt, Homo sapiens
  misc_RNA (1)...(19): siRNA sense strand
caacacagacuucaagcaa

SEQ ID NO: 1622272 - RNA, 19 nt, Homo sapiens
  misc_RNA (1)...(19): siRNA sense strand
cuucaaagguccugagcua

SEQ ID NO: 1622273 - RNA, 19 nt, Homo sapiens
  misc_RNA (1)...(19): siRNA sense strand
gaauauaauguccgaguug

SEQ ID NO: 1622274 - RNA, 19 nt, Homo sapiens
  misc_RNA (1)...(19): siRNA sense strand
gccaucaacaucacaaaua

SEQ ID NO: 1622275 - RNA, 19 nt, Homo sapiens
  misc_RNA (1)...(19): siRNA sense strand
gacagaagauuuauaugac

SEQ ID NO: 1622276 - RNA, 19 nt, Homo sapiens
  misc_RNA (1)...(19): siRNA sense strand
ggaauuaugcacagagaug

SEQ ID NO: 1622277 - RNA, 19 nt, Homo sapiens
  misc_RNA (1)...(19): siRNA sense strand
uggacaaacugcugcgaua

SEQ ID NO: 1622278 - RNA, 19 nt, Homo sapiens
  misc_RNA (1)...(19): siRNA sense strand
acaaacugcugcgauauga

SEQ ID NO: 1622279 - RNA, 19 nt, Homo sapiens
  misc_RNA (1)...(19): siRNA sense strand
cccauaaugucaugauuga

SEQ ID NO: 1622280 - RNA, 19 nt, Homo sapiens
  misc_RNA (1)...(19): siRNA sense strand
ugucacagcaugggaauua

SEQ ID NO: 1622281 - RNA, 19 nt, Homo sapiens
  misc_RNA (1)...(19): siRNA sense strand
gcccugaggccuuggauuu

SEQ ID NO: 1622282 - RNA, 19 nt, Homo sapiens
  misc_RNA (1)...(19): siRNA sense strand
caaagguccugagcuacuu

SEQ ID NO: 1622283 - RNA, 19 nt, Homo sapiens
  misc_RNA (1)...(19): siRNA sense strand
cgaauggguucaucuagca

SEQ ID NO: 1622284 - RNA, 19 nt, Homo sapiens
  misc_RNA (1)...(19): siRNA sense strand
guuguaugcuggcaaguau

SEQ ID NO: 1622285 - RNA, 19 nt, Homo sapiens
  misc_RNA (1)...(19): siRNA sense strand
gaaaucaagaugacuacca

SEQ ID NO: 1622286 - RNA, 19 nt, Homo sapiens
  misc_RNA (1)...(19): siRNA sense strand
ggacaaacugcugcgauau

SEQ ID NO: 1622287 - RNA, 19 nt, Homo sapiens
  misc_RNA (1)...(19): siRNA sense strand
ccagcugguucgaaaauua

SEQ ID NO: 1622288 - RNA, 19 nt, Homo sapiens
  misc_RNA (1)...(19): siRNA sense strand
ugucagggauuucuucagu

SEQ ID NO: 1622289 - RNA, 19 nt, Homo sapiens
  misc_RNA (1)...(19): siRNA sense strand
cgagguaaauacagugaag

SEQ ID NO: 1622290 - RNA, 19 nt, Homo sapiens
  misc_RNA (1)...(19): siRNA sense strand
agaauauaauguccgaguu

SEQ ID NO: 1622291 - RNA, 19 nt, Homo sapiens
  misc_RNA (1)...(19): siRNA sense strand
cauaaugucaugauugauc

SEQ ID NO: 1622292 - RNA, 19 nt, Homo sapiens
  misc_RNA (1)...(19): siRNA sense strand
gcucgaauggguucaucua

SEQ ID NO: 1622293 - RNA, 19 nt, Homo sapiens
  misc_RNA (1)...(19): siRNA sense strand
gacaaacugcugcgauaug

SEQ ID NO: 1622294 - RNA, 19 nt, Homo sapiens
  misc_RNA (1)...(19): siRNA sense strand
aaacaacacagacuucaag

SEQ ID NO: 1622295 - RNA, 19 nt, Homo sapiens
  misc_RNA (1)...(19): siRNA sense strand
gaaggaccaggcucgaaug

SEQ ID NO: 1622296 - RNA, 19 nt, Homo sapiens
  misc_RNA (1)...(19): siRNA sense strand
guacgauuauaguuuggau

SEQ ID NO: 1622297 - RNA, 19 nt, Homo sapiens
  misc_RNA (1)...(19): siRNA sense strand
gaauuagauccacguuuca

SEQ ID NO: 1622298 - RNA, 19 nt, Homo sapiens
  misc_RNA (1)...(19): siRNA sense strand
gcuggcaaguaugaucuuu

SEQ ID NO: 1622299 - RNA, 19 nt, Homo sapiens
  misc_RNA (1)...(19): siRNA sense strand
gggcagacacucucgaaag

SEQ ID NO: 1622300 - RNA, 19 nt, Homo sapiens
  misc_RNA (1)...(19): siRNA sense strand
guaaacaacacagacuuca

SEQ ID NO: 1622301 - RNA, 19 nt, Homo sapiens
  misc_RNA (1)...(19): siRNA sense strand
uagauccacguuucaauga

SEQ ID NO: 1622302 - RNA, 19 nt, Homo sapiens
  misc_RNA (1)...(19): siRNA sense strand
uggcagacauuguaaaaga

SEQ ID NO: 1622303 - RNA, 19 nt, Homo sapiens
  misc_RNA (1)...(19): siRNA sense strand
cauccuggccaagaauaua

SEQ ID NO: 1622304 - RNA, 19 nt, Homo sapiens
  misc_RNA (1)...(19): siRNA sense strand
gaggauagccaagguucug

SEQ ID NO: 1622305 - RNA, 19 nt, Homo sapiens
  misc_RNA (1)...(19): siRNA sense strand
gaagccaucaacaucacaa

SEQ ID NO: 1622306 - RNA, 19 nt, Homo sapiens
  misc_RNA (1)...(19): siRNA sense strand
ggcagacacucucgaaagc

SEQ ID NO: 1622307 - RNA, 19 nt, Homo sapiens
  misc_RNA (1)...(19): siRNA sense strand
uaaacaacacagacuucaa

SEQ ID NO: 1622308 - RNA, 19 nt, Homo sapiens
  misc_RNA (1)...(19): siRNA sense strand
gaaaaucagcaccuuguca

SEQ ID NO: 1622309 - RNA, 19 nt, Homo sapiens
  misc_RNA (1)...(19): siRNA sense strand
ccgaguugcuucccgauac

SEQ ID NO: 1622310 - RNA, 19 nt, Homo sapiens
  misc_RNA (1)...(19): siRNA sense strand
gaauuaugcacagagaugu

SEQ ID NO: 1622311 - RNA, 19 nt, Homo sapiens
  misc_RNA (1)...(19): siRNA sense strand
gguuguaugcuggcaagua

SEQ ID NO: 1622312 - RNA, 19 nt, Homo sapiens
  misc_RNA (1)...(19): siRNA sense strand
gaagaaaauuaagcgugaa

SEQ ID NO: 1622313 - RNA, 19 nt, Homo sapiens
  misc_RNA (1)...(19): siRNA sense strand
ugaaggaccaggcucgaau

SEQ ID NO: 1622314 - RNA, 19 nt, Homo sapiens
  misc_RNA (1)...(19): siRNA sense strand
aaauuaggccgagguaaau

SEQ ID NO: 1622315 - RNA, 19 nt, Homo sapiens
  misc_RNA (1)...(19): siRNA sense strand
caacauugaauuagaucca

SEQ ID NO: 1622316 - RNA, 19 nt, Homo sapiens
  misc_RNA (1)...(19): siRNA sense strand
cacacuggcagacauugua

SEQ ID NO: 1622317 - RNA, 19 nt, Homo sapiens
  misc_RNA (1)...(19): siRNA sense strand
ucagauguacgauuauagu

SEQ ID NO: 1622318 - RNA, 19 nt, Homo sapiens
  misc_RNA (1)...(19): siRNA sense strand
uuacauguaugagauucug

SEQ ID NO: 1622319 - RNA, 19 nt, Homo sapiens
  misc_RNA (1)...(19): siRNA sense strand
uuucuacacuguugugaag

SEQ ID NO: 1622320 - RNA, 19 nt, Homo sapiens
  misc_RNA (1)...(19): siRNA sense strand
aaaauuaggccgagguaaa

SEQ ID NO: 1622321 - RNA, 19 nt, Homo sapiens
  misc_RNA (1)...(19): siRNA sense strand
gaucaguuggugaggauag

SEQ ID NO: 1622322 - RNA, 19 nt, Homo sapiens
  misc_RNA (1)...(19): siRNA sense strand
uuagauccacguuucaaug

SEQ ID NO: 1622323 - RNA, 19 nt, Homo sapiens
  misc_RNA (1)...(19): siRNA sense strand
ucuacacuguugugaagga

SEQ ID NO: 1622324 - RNA, 19 nt, Homo sapiens
  misc_RNA (1)...(19): siRNA sense strand
uauaauguccgaguugcuu

SEQ ID NO: 1622325 - RNA, 19 nt, Homo sapiens
  misc_RNA (1)...(19): siRNA sense strand
caucacacuggcagacauu

SEQ ID NO: 1622326 - RNA, 19 nt, Homo sapiens
  misc_RNA (1)...(19): siRNA sense strand
ucacagcaugggaauuaug

SEQ ID NO: 1622327 - RNA, 19 nt, Homo sapiens
  misc_RNA (1)...(19): siRNA sense strand
acacuggcagacauuguaa

SEQ ID NO: 1622328 - RNA, 19 nt, Homo sapiens
  misc_RNA (1)...(19): siRNA sense strand
acguuucaaugauaucuug

SEQ ID NO: 1622329 - RNA, 19 nt, Homo sapiens
  misc_RNA (1)...(19): siRNA sense strand
uggcaaguaugaucuuucg

SEQ ID NO: 1622330 - RNA, 19 nt, Homo sapiens
  misc_RNA (1)...(19): siRNA sense strand
cagauguacgauuauaguu

SEQ ID NO: 1622331 - RNA, 19 nt, Homo sapiens
  misc_RNA (1)...(19): siRNA sense strand
cuuguagacuaucagaugu

SEQ ID NO: 1622332 - RNA, 19 nt, Homo sapiens
  misc_RNA (1)...(19): siRNA sense strand
ucaaagguccugagcuacu

SEQ ID NO: 1622333 - RNA, 19 nt, Homo sapiens
  misc_RNA (1)...(19): siRNA sense strand
gaucaugagcacagaaagc

SEQ ID NO: 1622334 - RNA, 19 nt, Homo sapiens
  misc_RNA (1)...(19): siRNA sense strand
ugggaauuaugcacagaga

SEQ ID NO: 1622335 - RNA, 19 nt, Homo sapiens
  misc_RNA (1)...(19): siRNA sense strand
uagacuaucagauguacga

SEQ ID NO: 1622336 - RNA, 19 nt, Homo sapiens
  misc_RNA (1)...(19): siRNA sense strand
agguaaauacagugaagua

SEQ ID NO: 1622337 - RNA, 19 nt, Homo sapiens
  misc_RNA (1)...(19): siRNA sense strand
gaaggcccuggauuauugu

SEQ ID NO: 1622338 - RNA, 19 nt, Homo sapiens
  misc_RNA (1)...(19): siRNA sense strand
uguaugcuggcaaguauga

SEQ ID NO: 1622339 - RNA, 19 nt, Homo sapiens
  misc_RNA (1)...(19): siRNA sense strand
gauugaucaugagcacaga

SEQ ID NO: 1622340 - RNA, 19 nt, Homo sapiens
  misc_RNA (1)...(19): siRNA sense strand
ucugaaggcccuggauuau

SEQ ID NO: 1622341 - RNA, 19 nt, Homo sapiens
  misc_RNA (1)...(19): siRNA sense strand
gaugucagggauuucuuca

SEQ ID NO: 1622342 - RNA, 19 nt, Homo sapiens
  misc_RNA (1)...(19): siRNA sense strand
uggauuuccuggacaaacu

SEQ ID NO: 1622343 - RNA, 19 nt, Homo sapiens
  misc_RNA (1)...(19): siRNA sense strand
cgauuauaguuuggauaug

SEQ ID NO: 1622344 - RNA, 19 nt, Homo sapiens
  misc_RNA (1)...(19): siRNA sense strand
cguaaacaacacagacuuc

SEQ ID NO: 1622345 - RNA, 19 nt, Homo sapiens
  misc_RNA (1)...(19): siRNA sense strand
aacacagacuucaagcaau

SEQ ID NO: 1622346 - RNA, 19 nt, Homo sapiens
  misc_RNA (1)...(19): siRNA sense strand
ggacagaagauuuauauga

SEQ ID NO: 1622347 - RNA, 19 nt, Homo sapiens
  misc_RNA (1)...(19): siRNA sense strand
gauccacguuucaaugaua

SEQ ID NO: 1622348 - RNA, 19 nt, Homo sapiens
  misc_RNA (1)...(19): siRNA sense strand
ugaaggcccuggauuauug

SEQ ID NO: 1622349 - RNA, 19 nt, Homo sapiens
  misc_RNA (1)...(19): siRNA sense strand
gauguacgauuauaguuug

SEQ ID NO: 1622350 - RNA, 19 nt, Homo sapiens
  misc_RNA (1)...(19): siRNA sense strand
ccaucaacaucacaaauaa

SEQ ID NO: 1622351 - RNA, 19 nt, Homo sapiens
  misc_RNA (1)...(19): siRNA sense strand
ugaauuagauccacguuuc

SEQ ID NO: 1622352 - RNA, 19 nt, Homo sapiens
  misc_RNA (1)...(19): siRNA sense strand
acuaucagauguacgauua

SEQ ID NO: 1622353 - RNA, 19 nt, Homo sapiens
  misc_RNA (1)...(19): siRNA sense strand
acacagacuucaagcaauu

SEQ ID NO: 1622354 - RNA, 19 nt, Homo sapiens
  misc_RNA (1)...(19): siRNA sense strand
ugacaauuaugaucaguug

SEQ ID NO: 1622355 - RNA, 19 nt, Homo sapiens
  misc_RNA (1)...(19): siRNA sense strand
gaccaccagucacggcuua

SEQ ID NO: 1622356 - RNA, 19 nt, Homo sapiens
  misc_RNA (1)...(19): siRNA sense strand
caacacagacuucaagcaa

SEQ ID NO: 1622357 - RNA, 19 nt, Homo sapiens
  misc_RNA (1)...(19): siRNA sense strand
cuucaaagguccugagcua

SEQ ID NO: 1622358 - RNA, 19 nt, Homo sapiens
  misc_RNA (1)...(19): siRNA sense strand
gaauauaauguccgaguug

SEQ ID NO: 1622359 - RNA, 19 nt, Homo sapiens
  misc_RNA (1)...(19): siRNA sense strand
gccaucaacaucacaaaua

SEQ ID NO: 1622360 - RNA, 19 nt, Homo sapiens
  misc_RNA (1)...(19): siRNA sense strand
gacagaagauuuauaugac

SEQ ID NO: 1622361 - RNA, 19 nt, Homo sapiens
  misc_RNA (1)...(19): siRNA sense strand
ggaauuaugcacagagaug

SEQ ID NO: 1622362 - RNA, 19 nt, Homo sapiens
  misc_RNA (1)...(19): siRNA sense strand
uggacaaacugcugcgaua

SEQ ID NO: 1622363 - RNA, 19 nt, Homo sapiens
  misc_RNA (1)...(19): siRNA sense strand
acaaacugcugcgauauga

SEQ ID NO: 1622364 - RNA, 19 nt, Homo sapiens
  misc_RNA (1)...(19): siRNA sense strand
cccauaaugucaugauuga

SEQ ID NO: 1622365 - RNA, 19 nt, Homo sapiens
  misc_RNA (1)...(19): siRNA sense strand
ugucacagcaugggaauua

SEQ ID NO: 1622366 - RNA, 19 nt, Homo sapiens
  misc_RNA (1)...(19): siRNA sense strand
gcccugaggccuuggauuu

SEQ ID NO: 1622367 - RNA, 19 nt, Homo sapiens
  misc_RNA (1)...(19): siRNA sense strand
caaagguccugagcuacuu

SEQ ID NO: 1622368 - RNA, 19 nt, Homo sapiens
  misc_RNA (1)...(19): siRNA sense strand
cgaauggguucaucuagca

SEQ ID NO: 1622369 - RNA, 19 nt, Homo sapiens
  misc_RNA (1)...(19): siRNA sense strand
guuguaugcuggcaaguau

SEQ ID NO: 1622370 - RNA, 19 nt, Homo sapiens
  misc_RNA (1)...(19): siRNA sense strand
gaaaucaagaugacuacca

SEQ ID NO: 1622371 - RNA, 19 nt, Homo sapiens
  misc_RNA (1)...(19): siRNA sense strand
ggacaaacugcugcgauau

SEQ ID NO: 1622372 - RNA, 19 nt, Homo sapiens
  misc_RNA (1)...(19): siRNA sense strand
ccagcugguucgaaaauua

SEQ ID NO: 1622373 - RNA, 19 nt, Homo sapiens
  misc_RNA (1)...(19): siRNA sense strand
ugucagggauuucuucagu

SEQ ID NO: 1622374 - RNA, 19 nt, Homo sapiens
  misc_RNA (1)...(19): siRNA sense strand
cgagguaaauacagugaag

SEQ ID NO: 1622375 - RNA, 19 nt, Homo sapiens
  misc_RNA (1)...(19): siRNA sense strand
agaauauaauguccgaguu

SEQ ID NO: 1622376 - RNA, 19 nt, Homo sapiens
  misc_RNA (1)...(19): siRNA sense strand
cauaaugucaugauugauc

SEQ ID NO: 1622377 - RNA, 19 nt, Homo sapiens
  misc_RNA (1)...(19): siRNA sense strand
gcucgaauggguucaucua

SEQ ID NO: 1622378 - RNA, 19 nt, Homo sapiens
  misc_RNA (1)...(19): siRNA sense strand
gacaaacugcugcgauaug

SEQ ID NO: 1622379 - RNA, 19 nt, Homo sapiens
  misc_RNA (1)...(19): siRNA sense strand
aaacaacacagacuucaag

SEQ ID NO: 1622380 - RNA, 19 nt, Homo sapiens
  misc_RNA (1)...(19): siRNA sense strand
gaaggaccaggcucgaaug

SEQ ID NO: 1622381 - RNA, 19 nt, Homo sapiens
  misc_RNA (1)...(19): siRNA sense strand
guacgauuauaguuuggau

SEQ ID NO: 1622382 - RNA, 19 nt, Homo sapiens
  misc_RNA (1)...(19): siRNA sense strand
gaauuagauccacguuuca

SEQ ID NO: 1622383 - RNA, 19 nt, Homo sapiens
  misc_RNA (1)...(19): siRNA sense strand
gcuggcaaguaugaucuuu

SEQ ID NO: 1622384 - RNA, 19 nt, Homo sapiens
  misc_RNA (1)...(19): siRNA sense strand
gggcagacacucucgaaag

SEQ ID NO: 1622385 - RNA, 19 nt, Homo sapiens
  misc_RNA (1)...(19): siRNA sense strand
guaaacaacacagacuuca

SEQ ID NO: 1622386 - RNA, 19 nt, Homo sapiens
  misc_RNA (1)...(19): siRNA sense strand
uagauccacguuucaauga

SEQ ID NO: 1622387 - RNA, 19 nt, Homo sapiens
  misc_RNA (1)...(19): siRNA sense strand
uggcagacauuguaaaaga

SEQ ID NO: 1622388 - RNA, 19 nt, Homo sapiens
  misc_RNA (1)...(19): siRNA sense strand
cauccuggccaagaauaua

SEQ ID NO: 1622389 - RNA, 19 nt, Homo sapiens
  misc_RNA (1)...(19): siRNA sense strand
gaggauagccaagguucug

SEQ ID NO: 1622390 - RNA, 19 nt, Homo sapiens
  misc_RNA (1)...(19): siRNA sense strand
gaagccaucaacaucacaa

SEQ ID NO: 1622391 - RNA, 19 nt, Homo sapiens
  misc_RNA (1)...(19): siRNA sense strand
ggcagacacucucgaaagc

SEQ ID NO: 1622392 - RNA, 19 nt, Homo sapiens
  misc_RNA (1)...(19): siRNA sense strand
uaaacaacacagacuucaa

SEQ ID NO: 1622393 - RNA, 19 nt, Homo sapiens
  misc_RNA (1)...(19): siRNA sense strand
gaaaaucagcaccuuguca

SEQ ID NO: 1622394 - RNA, 19 nt, Homo sapiens
  misc_RNA (1)...(19): siRNA sense strand
ccgaguugcuucccgauac

SEQ ID NO: 1622395 - RNA, 19 nt, Homo sapiens
  misc_RNA (1)...(19): siRNA sense strand
gaauuaugcacagagaugu

SEQ ID NO: 1622396 - RNA, 19 nt, Homo sapiens
  misc_RNA (1)...(19): siRNA sense strand
gguuguaugcuggcaagua

SEQ ID NO: 1622397 - RNA, 19 nt, Homo sapiens
  misc_RNA (1)...(19): siRNA sense strand
gaagaaaauuaagcgugaa

SEQ ID NO: 1622398 - RNA, 19 nt, Homo sapiens
  misc_RNA (1)...(19): siRNA sense strand
ugaaggaccaggcucgaau

SEQ ID NO: 1622399 - RNA, 19 nt, Homo sapiens
  misc_RNA (1)...(19): siRNA sense strand
aaauuaggccgagguaaau

SEQ ID NO: 1622400 - RNA, 19 nt, Homo sapiens
  misc_RNA (1)...(19): siRNA sense strand
caacauugaauuagaucca

SEQ ID NO: 1622401 - RNA, 19 nt, Homo sapiens
  misc_RNA (1)...(19): siRNA sense strand
cacacuggcagacauugua

SEQ ID NO: 1622402 - RNA, 19 nt, Homo sapiens
  misc_RNA (1)...(19): siRNA sense strand
ucagauguacgauuauagu

SEQ ID NO: 1622403 - RNA, 19 nt, Homo sapiens
  misc_RNA (1)...(19): siRNA sense strand
uuacauguaugagauucug

SEQ ID NO: 1622404 - RNA, 19 nt, Homo sapiens
  misc_RNA (1)...(19): siRNA sense strand
uuucuacacuguugugaag

SEQ ID NO: 1622405 - RNA, 19 nt, Homo sapiens
  misc_RNA (1)...(19): siRNA sense strand
aaaauuaggccgagguaaa

SEQ ID NO: 1622406 - RNA, 19 nt, Homo sapiens
  misc_RNA (1)...(19): siRNA sense strand
gaucaguuggugaggauag

SEQ ID NO: 1622407 - RNA, 19 nt, Homo sapiens
  misc_RNA (1)...(19): siRNA sense strand
uuagauccacguuucaaug

SEQ ID NO: 1622408 - RNA, 19 nt, Homo sapiens
  misc_RNA (1)...(19): siRNA sense strand
ucuacacuguugugaagga

SEQ ID NO: 1622409 - RNA, 19 nt, Homo sapiens
  misc_RNA (1)...(19): siRNA sense strand
uauaauguccgaguugcuu

SEQ ID NO: 1622410 - RNA, 19 nt, Homo sapiens
  misc_RNA (1)...(19): siRNA sense strand
caucacacuggcagacauu

SEQ ID NO: 1622411 - RNA, 19 nt, Homo sapiens
  misc_RNA (1)...(19): siRNA sense strand
ucacagcaugggaauuaug

SEQ ID NO: 1622412 - RNA, 19 nt, Homo sapiens
  misc_RNA (1)...(19): siRNA sense strand
acacuggcagacauuguaa

SEQ ID NO: 1622413 - RNA, 19 nt, Homo sapiens
  misc_RNA (1)...(19): siRNA sense strand
acguuucaaugauaucuug

SEQ ID NO: 1622414 - RNA, 19 nt, Homo sapiens
  misc_RNA (1)...(19): siRNA sense strand
uggcaaguaugaucuuucg

SEQ ID NO: 1622415 - RNA, 19 nt, Homo sapiens
  misc_RNA (1)...(19): siRNA sense strand
cagauguacgauuauaguu

SEQ ID NO: 1622416 - RNA, 19 nt, Homo sapiens
  misc_RNA (1)...(19): siRNA sense strand
cuuguagacuaucagaugu

SEQ ID NO: 1622417 - RNA, 19 nt, Homo sapiens
  misc_RNA (1)...(19): siRNA sense strand
ucaaagguccugagcuacu

SEQ ID NO: 1622418 - RNA, 19 nt, Homo sapiens
  misc_RNA (1)...(19): siRNA sense strand
gaucaugagcacagaaagc

SEQ ID NO: 1622419 - RNA, 19 nt, Homo sapiens
  misc_RNA (1)...(19): siRNA sense strand
ugggaauuaugcacagaga

SEQ ID NO: 1622420 - RNA, 19 nt, Homo sapiens
  misc_RNA (1)...(19): siRNA sense strand
uagacuaucagauguacga

SEQ ID NO: 1622421 - RNA, 19 nt, Homo sapiens
  misc_RNA (1)...(19): siRNA sense strand
agguaaauacagugaagua

SEQ ID NO: 1622422 - RNA, 19 nt, Homo sapiens
  misc_RNA (1)...(19): siRNA sense strand
gaaggcccuggauuauugu

SEQ ID NO: 1622423 - RNA, 19 nt, Homo sapiens
  misc_RNA (1)...(19): siRNA sense strand
uguaugcuggcaaguauga

SEQ ID NO: 1622424 - RNA, 19 nt, Homo sapiens
  misc_RNA (1)...(19): siRNA sense strand
gauugaucaugagcacaga

SEQ ID NO: 1622425 - RNA, 19 nt, Homo sapiens
  misc_RNA (1)...(19): siRNA sense strand
ucugaaggcccuggauuau

SEQ ID NO: 1622426 - RNA, 19 nt, Homo sapiens
  misc_RNA (1)...(19): siRNA sense strand
gaugucagggauuucuuca

SEQ ID NO: 1622427 - RNA, 19 nt, Homo sapiens
  misc_RNA (1)...(19): siRNA sense strand
uggauuuccuggacaaacu

SEQ ID NO: 1622428 - RNA, 19 nt, Homo sapiens
  misc_RNA (1)...(19): siRNA sense strand
cgauuauaguuuggauaug

SEQ ID NO: 1622429 - RNA, 19 nt, Homo sapiens
  misc_RNA (1)...(19): siRNA sense strand
cguaaacaacacagacuuc

SEQ ID NO: 1622430 - RNA, 19 nt, Homo sapiens
  misc_RNA (1)...(19): siRNA sense strand
aacacagacuucaagcaau

SEQ ID NO: 1622431 - RNA, 19 nt, Homo sapiens
  misc_RNA (1)...(19): siRNA sense strand
ggacagaagauuuauauga

SEQ ID NO: 1622432 - RNA, 19 nt, Homo sapiens
  misc_RNA (1)...(19): siRNA sense strand
gauccacguuucaaugaua

SEQ ID NO: 1622433 - RNA, 19 nt, Homo sapiens
  misc_RNA (1)...(19): siRNA sense strand
ugaaggcccuggauuauug

SEQ ID NO: 1622434 - RNA, 19 nt, Homo sapiens
  misc_RNA (1)...(19): siRNA sense strand
gauguacgauuauaguuug

SEQ ID NO: 1622435 - RNA, 19 nt, Homo sapiens
  misc_RNA (1)...(19): siRNA sense strand
acuaucagauguacgauua

SEQ ID NO: 1622436 - RNA, 19 nt, Homo sapiens
  misc_RNA (1)...(19): siRNA sense strand
ugaauuagauccacguuuc

SEQ ID NO: 1622437 - RNA, 19 nt, Homo sapiens
  misc_RNA (1)...(19): siRNA sense strand
ugacaauuaugaucaguug

SEQ ID NO: 1622438 - RNA, 19 nt, Homo sapiens
  misc_RNA (1)...(19): siRNA sense strand
gaccaccagucacggcuua

SEQ ID NO: 1622439 - RNA, 19 nt, Homo sapiens
  misc_RNA (1)...(19): siRNA sense strand
cuucaaagguccugagcua

SEQ ID NO: 1622440 - RNA, 19 nt, Homo sapiens
  misc_RNA (1)...(19): siRNA sense strand
gaauauaauguccgaguug

SEQ ID NO: 1622441 - RNA, 19 nt, Homo sapiens
  misc_RNA (1)...(19): siRNA sense strand
ggaauuaugcacagagaug

SEQ ID NO: 1622442 - RNA, 19 nt, Homo sapiens
  misc_RNA (1)...(19): siRNA sense strand
gacagaagauuuauaugac

SEQ ID NO: 1622443 - RNA, 19 nt, Homo sapiens
  misc_RNA (1)...(19): siRNA sense strand
uggacaaacugcugcgaua

SEQ ID NO: 1622444 - RNA, 19 nt, Homo sapiens
  misc_RNA (1)...(19): siRNA sense strand
acaaacugcugcgauauga

SEQ ID NO: 1622445 - RNA, 19 nt, Homo sapiens
  misc_RNA (1)...(19): siRNA sense strand
cccauaaugucaugauuga

SEQ ID NO: 1622446 - RNA, 19 nt, Homo sapiens
  misc_RNA (1)...(19): siRNA sense strand
gcccugaggccuuggauuu

SEQ ID NO: 1622447 - RNA, 19 nt, Homo sapiens
  misc_RNA (1)...(19): siRNA sense strand
ugucacagcaugggaauua

SEQ ID NO: 1622448 - RNA, 19 nt, Homo sapiens
  misc_RNA (1)...(19): siRNA sense strand
caaagguccugagcuacuu

SEQ ID NO: 1622449 - RNA, 19 nt, Homo sapiens
  misc_RNA (1)...(19): siRNA sense strand
cgaauggguucaucuagca

SEQ ID NO: 1622450 - RNA, 19 nt, Homo sapiens
  misc_RNA (1)...(19): siRNA sense strand
guuguaugcuggcaaguau

SEQ ID NO: 1622451 - RNA, 19 nt, Homo sapiens
  misc_RNA (1)...(19): siRNA sense strand
ggacaaacugcugcgauau

SEQ ID NO: 1622452 - RNA, 19 nt, Homo sapiens
  misc_RNA (1)...(19): siRNA sense strand
ugucagggauuucuucagu

SEQ ID NO: 1622453 - RNA, 19 nt, Homo sapiens
  misc_RNA (1)...(19): siRNA sense strand
agaauauaauguccgaguu

SEQ ID NO: 1622454 - RNA, 19 nt, Homo sapiens
  misc_RNA (1)...(19): siRNA sense strand
cauaaugucaugauugauc

SEQ ID NO: 1622455 - RNA, 19 nt, Homo sapiens
  misc_RNA (1)...(19): siRNA sense strand
gcucgaauggguucaucua

SEQ ID NO: 1622456 - RNA, 19 nt, Homo sapiens
  misc_RNA (1)...(19): siRNA sense strand
gacaaacugcugcgauaug

SEQ ID NO: 1622457 - RNA, 19 nt, Homo sapiens
  misc_RNA (1)...(19): siRNA sense strand
gaaggaccaggcucgaaug

SEQ ID NO: 1622458 - RNA, 19 nt, Homo sapiens
  misc_RNA (1)...(19): siRNA sense strand
guacgauuauaguuuggau

SEQ ID NO: 1622459 - RNA, 19 nt, Homo sapiens
  misc_RNA (1)...(19): siRNA sense strand
gaauuagauccacguuuca

SEQ ID NO: 1622460 - RNA, 19 nt, Homo sapiens
  misc_RNA (1)...(19): siRNA sense strand
gcuggcaaguaugaucuuu

SEQ ID NO: 1622461 - RNA, 19 nt, Homo sapiens
  misc_RNA (1)...(19): siRNA sense strand
gggcagacacucucgaaag

SEQ ID NO: 1622462 - RNA, 19 nt, Homo sapiens
  misc_RNA (1)...(19): siRNA sense strand
uagauccacguuucaauga

SEQ ID NO: 1622463 - RNA, 19 nt, Homo sapiens
  misc_RNA (1)...(19): siRNA sense strand
cauccuggccaagaauaua

SEQ ID NO: 1622464 - RNA, 19 nt, Homo sapiens
  misc_RNA (1)...(19): siRNA sense strand
gaggauagccaagguucug

SEQ ID NO: 1622465 - RNA, 19 nt, Homo sapiens
  misc_RNA (1)...(19): siRNA sense strand
ggcagacacucucgaaagc

SEQ ID NO: 1622466 - RNA, 19 nt, Homo sapiens
  misc_RNA (1)...(19): siRNA sense strand
ccgaguugcuucccgauac

SEQ ID NO: 1622467 - RNA, 19 nt, Homo sapiens
  misc_RNA (1)...(19): siRNA sense strand
gaauuaugcacagagaugu

SEQ ID NO: 1622468 - RNA, 19 nt, Homo sapiens
  misc_RNA (1)...(19): siRNA sense strand
gaaaaucagcaccuuguca

SEQ ID NO: 1622469 - RNA, 19 nt, Homo sapiens
  misc_RNA (1)...(19): siRNA sense strand
gguuguaugcuggcaagua

SEQ ID NO: 1622470 - RNA, 19 nt, Homo sapiens
  misc_RNA (1)...(19): siRNA sense strand
ugaaggaccaggcucgaau

SEQ ID NO: 1622471 - RNA, 19 nt, Homo sapiens
  misc_RNA (1)...(19): siRNA sense strand
ucagauguacgauuauagu

SEQ ID NO: 1622472 - RNA, 19 nt, Homo sapiens
  misc_RNA (1)...(19): siRNA sense strand
caacauugaauuagaucca

SEQ ID NO: 1622473 - RNA, 19 nt, Homo sapiens
  misc_RNA (1)...(19): siRNA sense strand
gaucaguuggugaggauag

SEQ ID NO: 1622474 - RNA, 19 nt, Homo sapiens
  misc_RNA (1)...(19): siRNA sense strand
uuucuacacuguugugaag

SEQ ID NO: 1622475 - RNA, 19 nt, Homo sapiens
  misc_RNA (1)...(19): siRNA sense strand
uuagauccacguuucaaug

SEQ ID NO: 1622476 - RNA, 19 nt, Homo sapiens
  misc_RNA (1)...(19): siRNA sense strand
ucuacacuguugugaagga

SEQ ID NO: 1622477 - RNA, 19 nt, Homo sapiens
  misc_RNA (1)...(19): siRNA sense strand
uauaauguccgaguugcuu

SEQ ID NO: 1622478 - RNA, 19 nt, Homo sapiens
  misc_RNA (1)...(19): siRNA sense strand
ucaaagguccugagcuacu

SEQ ID NO: 1622479 - RNA, 19 nt, Homo sapiens
  misc_RNA (1)...(19): siRNA sense strand
ugggaauuaugcacagaga

SEQ ID NO: 1622480 - RNA, 19 nt, Homo sapiens
  misc_RNA (1)...(19): siRNA sense strand
ucacagcaugggaauuaug

SEQ ID NO: 1622481 - RNA, 19 nt, Homo sapiens
  misc_RNA (1)...(19): siRNA sense strand
acguuucaaugauaucuug

SEQ ID NO: 1622482 - RNA, 19 nt, Homo sapiens
  misc_RNA (1)...(19): siRNA sense strand
gaucaugagcacagaaagc

SEQ ID NO: 1622483 - RNA, 19 nt, Homo sapiens
  misc_RNA (1)...(19): siRNA sense strand
uggcaaguaugaucuuucg

SEQ ID NO: 1622484 - RNA, 19 nt, Homo sapiens
  misc_RNA (1)...(19): siRNA sense strand
cagauguacgauuauaguu

SEQ ID NO: 1622485 - RNA, 19 nt, Homo sapiens
  misc_RNA (1)...(19): siRNA sense strand
cuuguagacuaucagaugu

SEQ ID NO: 1622486 - RNA, 19 nt, Homo sapiens
  misc_RNA (1)...(19): siRNA sense strand
uagacuaucagauguacga

SEQ ID NO: 1622487 - RNA, 19 nt, Homo sapiens
  misc_RNA (1)...(19): siRNA sense strand
gauugaucaugagcacaga

SEQ ID NO: 1622488 - RNA, 19 nt, Homo sapiens
  misc_RNA (1)...(19): siRNA sense strand
gaaggcccuggauuauugu

SEQ ID NO: 1622489 - RNA, 19 nt, Homo sapiens
  misc_RNA (1)...(19): siRNA sense strand
uguaugcuggcaaguauga

SEQ ID NO: 1622490 - RNA, 19 nt, Homo sapiens
  misc_RNA (1)...(19): siRNA sense strand
ucugaaggcccuggauuau

SEQ ID NO: 1622491 - RNA, 19 nt, Homo sapiens
  misc_RNA (1)...(19): siRNA sense strand
gaugucagggauuucuuca

SEQ ID NO: 1622492 - RNA, 19 nt, Homo sapiens
  misc_RNA (1)...(19): siRNA sense strand
uggauuuccuggacaaacu

SEQ ID NO: 1622493 - RNA, 19 nt, Homo sapiens
  misc_RNA (1)...(19): siRNA sense strand
cgauuauaguuuggauaug

SEQ ID NO: 1622494 - RNA, 19 nt, Homo sapiens
  misc_RNA (1)...(19): siRNA sense strand
caaaguagcuuguauauuc

SEQ ID NO: 1622495 - RNA, 19 nt, Homo sapiens
  misc_RNA (1)...(19): siRNA sense strand
ugaaauaccuguugguuaa

SEQ ID NO: 1622496 - RNA, 19 nt, Homo sapiens
  misc_RNA (1)...(19): siRNA sense strand
gagaagauguuucgaguca

SEQ ID NO: 1622497 - RNA, 19 nt, Homo sapiens
  misc_RNA (1)...(19): siRNA sense strand
ggaauccucugcaggcaua

SEQ ID NO: 1622498 - RNA, 19 nt, Homo sapiens
  misc_RNA (1)...(19): siRNA sense strand
guacauccuuggaaucuuu

SEQ ID NO: 1622499 - RNA, 19 nt, Homo sapiens
  misc_RNA (1)...(19): siRNA sense strand
agaaagggcuaauaaguug

SEQ ID NO: 1622500 - RNA, 19 nt, Homo sapiens
  misc_RNA (1)...(19): siRNA sense strand
gaagauguuucgagucaau

SEQ ID NO: 1622501 - RNA, 19 nt, Homo sapiens
  misc_RNA (1)...(19): siRNA sense strand
gaugaaaguccucaaguuu

SEQ ID NO: 1622502 - RNA, 19 nt, Homo sapiens
  misc_RNA (1)...(19): siRNA sense strand
caaaguacauccuuggaau

SEQ ID NO: 1622503 - RNA, 19 nt, Homo sapiens
  misc_RNA (1)...(19): siRNA sense strand
ggagaaaugacuacggaua

SEQ ID NO: 1622504 - RNA, 19 nt, Homo sapiens
  misc_RNA (1)...(19): siRNA sense strand
gcagaccaccugaauauga

SEQ ID NO: 1622505 - RNA, 19 nt, Homo sapiens
  misc_RNA (1)...(19): siRNA sense strand
uuacagauaccgcuaauaa

SEQ ID NO: 1622506 - RNA, 19 nt, Homo sapiens
  misc_RNA (1)...(19): siRNA sense strand
agaaaugacuacggauaua

SEQ ID NO: 1622507 - RNA, 19 nt, Homo sapiens
  misc_RNA (1)...(19): siRNA sense strand
gcuaauaaauugcaguagu

SEQ ID NO: 1622508 - RNA, 19 nt, Homo sapiens
  misc_RNA (1)...(19): siRNA sense strand
gcuaauaaguuggugaaau

SEQ ID NO: 1622509 - RNA, 19 nt, Homo sapiens
  misc_RNA (1)...(19): siRNA sense strand
gagagaaguggcaguaauu

SEQ ID NO: 1622510 - RNA, 19 nt, Homo sapiens
  misc_RNA (1)...(19): siRNA sense strand
gagucaaucugaaagaaau

SEQ ID NO: 1622511 - RNA, 19 nt, Homo sapiens
  misc_RNA (1)...(19): siRNA sense strand
caagaaagggcuaauaagu

SEQ ID NO: 1622512 - RNA, 19 nt, Homo sapiens
  misc_RNA (1)...(19): siRNA sense strand
gcucaucacagacgaguuu

SEQ ID NO: 1622513 - RNA, 19 nt, Homo sapiens
  misc_RNA (1)...(19): siRNA sense strand
gagaaaugacuacggauau

SEQ ID NO: 1622514 - RNA, 19 nt, Homo sapiens
  misc_RNA (1)...(19): siRNA sense strand
cagcagaccaccugaauau

SEQ ID NO: 1622515 - RNA, 19 nt, Homo sapiens
  misc_RNA (1)...(19): siRNA sense strand
agauaccgcuaauaaauug

SEQ ID NO: 1622516 - RNA, 19 nt, Homo sapiens
  misc_RNA (1)...(19): siRNA sense strand
gugaaauaccuguugguua

SEQ ID NO: 1622517 - RNA, 19 nt, Homo sapiens
  misc_RNA (1)...(19): siRNA sense strand
ccacgagacuagcaagaug

SEQ ID NO: 1622518 - RNA, 19 nt, Homo sapiens
  misc_RNA (1)...(19): siRNA sense strand
ugagagaaguggcaguaau

SEQ ID NO: 1622519 - RNA, 19 nt, Homo sapiens
  misc_RNA (1)...(19): siRNA sense strand
ugaugaauauuucccagaa

SEQ ID NO: 1622520 - RNA, 19 nt, Homo sapiens
  misc_RNA (1)...(19): siRNA sense strand
gcuacacucuggagaagau

SEQ ID NO: 1622521 - RNA, 19 nt, Homo sapiens
  misc_RNA (1)...(19): siRNA sense strand
uacaagaaagggcuaauaa

SEQ ID NO: 1622522 - RNA, 19 nt, Homo sapiens
  misc_RNA (1)...(19): siRNA sense strand
caagcugggucuccucaug

SEQ ID NO: 1622523 - RNA, 19 nt, Homo sapiens
  misc_RNA (1)...(19): siRNA sense strand
gaugagagaaguggcagua

SEQ ID NO: 1622524 - RNA, 19 nt, Homo sapiens
  misc_RNA (1)...(19): siRNA sense strand
gcaaaguagcuuguauauu

SEQ ID NO: 1622525 - RNA, 19 nt, Homo sapiens
  misc_RNA (1)...(19): siRNA sense strand
cuaauaaauugcaguaguc

SEQ ID NO: 1622526 - RNA, 19 nt, Homo sapiens
  misc_RNA (1)...(19): siRNA sense strand
cagauaccgcuaauaaauu

SEQ ID NO: 1622527 - RNA, 19 nt, Homo sapiens
  misc_RNA (1)...(19): siRNA sense strand
acagauaccgcuaauaaau

SEQ ID NO: 1622528 - RNA, 19 nt, Homo sapiens
  misc_RNA (1)...(19): siRNA sense strand
agaugaaaguccucaaguu

SEQ ID NO: 1622529 - RNA, 19 nt, Homo sapiens
  misc_RNA (1)...(19): siRNA sense strand
gaaaugacuacggauauag

SEQ ID NO: 1622530 - RNA, 19 nt, Homo sapiens
  misc_RNA (1)...(19): siRNA sense strand
gcagggugcagaagaaaga

SEQ ID NO: 1622531 - RNA, 19 nt, Homo sapiens
  misc_RNA (1)...(19): siRNA sense strand
aagaaagggcuaauaaguu

SEQ ID NO: 1622532 - RNA, 19 nt, Homo sapiens
  misc_RNA (1)...(19): siRNA sense strand
caucaaacgcucagacaug

SEQ ID NO: 1622533 - RNA, 19 nt, Homo sapiens
  misc_RNA (1)...(19): siRNA sense strand
gggaggugcugcgcaaguu

SEQ ID NO: 1622534 - RNA, 19 nt, Homo sapiens
  misc_RNA (1)...(19): siRNA sense strand
guuaaggaccagacaaaga

SEQ ID NO: 1622535 - RNA, 19 nt, Homo sapiens
  misc_RNA (1)...(19): siRNA sense strand
ugaaaguccucaaguuugc

SEQ ID NO: 1622536 - RNA, 19 nt, Homo sapiens
  misc_RNA (1)...(19): siRNA sense strand
caagcuacacucuggagaa

SEQ ID NO: 1622537 - RNA, 19 nt, Homo sapiens
  misc_RNA (1)...(19): siRNA sense strand
gcgaggcaguggagaugga

SEQ ID NO: 1622538 - RNA, 19 nt, Homo sapiens
  misc_RNA (1)...(19): siRNA sense strand
cagacgaguuugugaagca

SEQ ID NO: 1622539 - RNA, 19 nt, Homo sapiens
  misc_RNA (1)...(19): siRNA sense strand
agagaaguggcaguaauua

SEQ ID NO: 1622540 - RNA, 19 nt, Homo sapiens
  misc_RNA (1)...(19): siRNA sense strand
agacaaagauccccaucaa

SEQ ID NO: 1622541 - RNA, 19 nt, Homo sapiens
  misc_RNA (1)...(19): siRNA sense strand
gagacuagcaagaugaaag

SEQ ID NO: 1622542 - RNA, 19 nt, Homo sapiens
  misc_RNA (1)...(19): siRNA sense strand
uuacaagaaagggcuaaua

SEQ ID NO: 1622543 - RNA, 19 nt, Homo sapiens
  misc_RNA (1)...(19): siRNA sense strand
ggugaaauaccuguugguu

SEQ ID NO: 1622544 - RNA, 19 nt, Homo sapiens
  misc_RNA (1)...(19): siRNA sense strand
cgagucaaucugaaagaaa

SEQ ID NO: 1622545 - RNA, 19 nt, Homo sapiens
  misc_RNA (1)...(19): siRNA sense strand
gaaaucauugaacgagcaa

SEQ ID NO: 1622546 - RNA, 19 nt, Homo sapiens
  misc_RNA (1)...(19): siRNA sense strand
uuaaggaccagacaaagau

SEQ ID NO: 1622547 - RNA, 19 nt, Homo sapiens
  misc_RNA (1)...(19): siRNA sense strand
agaaguggcaguaauuaca

SEQ ID NO: 1622548 - RNA, 19 nt, Homo sapiens
  misc_RNA (1)...(19): siRNA sense strand
gggcuaauaaguuggugaa

SEQ ID NO: 1622549 - RNA, 19 nt, Homo sapiens
  misc_RNA (1)...(19): siRNA sense strand
uagcuuguauauucucauc

SEQ ID NO: 1622550 - RNA, 19 nt, Homo sapiens
  misc_RNA (1)...(19): siRNA sense strand
uaacagcagaccaccugaa

SEQ ID NO: 1622551 - RNA, 19 nt, Homo sapiens
  misc_RNA (1)...(19): siRNA sense strand
ucgagucaaucugaaagaa

SEQ ID NO: 1622552 - RNA, 19 nt, Homo sapiens
  misc_RNA (1)...(19): siRNA sense strand
gaaguggcaguaauuacag

SEQ ID NO: 1622553 - RNA, 19 nt, Homo sapiens
  misc_RNA (1)...(19): siRNA sense strand
cagaccaccugaauaugag

SEQ ID NO: 1622554 - RNA, 19 nt, Homo sapiens
  misc_RNA (1)...(19): siRNA sense strand
caucagcacucaggaaucc

SEQ ID NO: 1622555 - RNA, 19 nt, Homo sapiens
  misc_RNA (1)...(19): siRNA sense strand
caagaugaaaguccucaag

SEQ ID NO: 1622556 - RNA, 19 nt, Homo sapiens
  misc_RNA (1)...(19): siRNA sense strand
gagaaguggcaguaauuac

SEQ ID NO: 1622557 - RNA, 19 nt, Homo sapiens
  misc_RNA (1)...(19): siRNA sense strand
ucauggugauucugagugu

SEQ ID NO: 1622558 - RNA, 19 nt, Homo sapiens
  misc_RNA (1)...(19): siRNA sense strand
ccauggagccaaaguacau

SEQ ID NO: 1622559 - RNA, 19 nt, Homo sapiens
  misc_RNA (1)...(19): siRNA sense strand
ccagugaggcugucaucug

SEQ ID NO: 1622560 - RNA, 19 nt, Homo sapiens
  misc_RNA (1)...(19): siRNA sense strand
gcuuguauauucucaucag

SEQ ID NO: 1622561 - RNA, 19 nt, Homo sapiens
  misc_RNA (1)...(19): siRNA sense strand
ccgcuaauaaauugcagua

SEQ ID NO: 1622562 - RNA, 19 nt, Homo sapiens
  misc_RNA (1)...(19): siRNA sense strand
gcuccuaccacgagacuag

SEQ ID NO: 1622563 - RNA, 19 nt, Homo sapiens
  misc_RNA (1)...(19): siRNA sense strand
guuuacagauaccgcuaau

SEQ ID NO: 1622564 - RNA, 19 nt, Homo sapiens
  misc_RNA (1)...(19): siRNA sense strand
aggcaguuauggccaauca

SEQ ID NO: 1622565 - RNA, 19 nt, Homo sapiens
  misc_RNA (1)...(19): siRNA sense strand
caguaguccuucccaugga

SEQ ID NO: 1622566 - RNA, 19 nt, Homo sapiens
  misc_RNA (1)...(19): siRNA sense strand
ggaggugcugcgcaaguug

SEQ ID NO: 1622567 - RNA, 19 nt, Homo sapiens
  misc_RNA (1)...(19): siRNA sense strand
cagcugagggugucaugug

SEQ ID NO: 1622568 - RNA, 19 nt, Homo sapiens
  misc_RNA (1)...(19): siRNA sense strand
acagcagaccaccugaaua

SEQ ID NO: 1622569 - RNA, 19 nt, Homo sapiens
  misc_RNA (1)...(19): siRNA sense strand
gaaauaccuguugguuaag

SEQ ID NO: 1622570 - RNA, 19 nt, Homo sapiens
  misc_RNA (1)...(19): siRNA sense strand
uacagauaccgcuaauaaa

SEQ ID NO: 1622571 - RNA, 19 nt, Homo sapiens
  misc_RNA (1)...(19): siRNA sense strand
ucauugaacgagcaagcua

SEQ ID NO: 1622572 - RNA, 19 nt, Homo sapiens
  misc_RNA (1)...(19): siRNA sense strand
caaggcaguuauggccaau

SEQ ID NO: 1622573 - RNA, 19 nt, Homo sapiens
  misc_RNA (1)...(19): siRNA sense strand
auaaauugcaguaguccuu

SEQ ID NO: 1622574 - RNA, 19 nt, Homo sapiens
  misc_RNA (1)...(19): siRNA sense strand
acaagaaagggcuaauaag

SEQ ID NO: 1622575 - RNA, 19 nt, Homo sapiens
  misc_RNA (1)...(19): siRNA sense strand
aagcuacacucuggagaag

SEQ ID NO: 1622576 - RNA, 19 nt, Homo sapiens
  misc_RNA (1)...(19): siRNA sense strand
augaaaguccucaaguuug

SEQ ID NO: 1622577 - RNA, 19 nt, Homo sapiens
  misc_RNA (1)...(19): siRNA sense strand
gcaagaugaaaguccucaa

SEQ ID NO: 1622578 - RNA, 19 nt, Homo sapiens
  misc_RNA (1)...(19): siRNA sense strand
caaaguagcuuguauauuc

SEQ ID NO: 1622579 - RNA, 19 nt, Homo sapiens
  misc_RNA (1)...(19): siRNA sense strand
ugaaauaccuguugguuaa

SEQ ID NO: 1622580 - RNA, 19 nt, Homo sapiens
  misc_RNA (1)...(19): siRNA sense strand
gagaagauguuucgaguca

SEQ ID NO: 1622581 - RNA, 19 nt, Homo sapiens
  misc_RNA (1)...(19): siRNA sense strand
ggaauccucugcaggcaua

SEQ ID NO: 1622582 - RNA, 19 nt, Homo sapiens
  misc_RNA (1)...(19): siRNA sense strand
agaaagggcuaauaaguug

SEQ ID NO: 1622583 - RNA, 19 nt, Homo sapiens
  misc_RNA (1)...(19): siRNA sense strand
gaagauguuucgagucaau

SEQ ID NO: 1622584 - RNA, 19 nt, Homo sapiens
  misc_RNA (1)...(19): siRNA sense strand
gaugaaaguccucaaguuu

SEQ ID NO: 1622585 - RNA, 19 nt, Homo sapiens
  misc_RNA (1)...(19): siRNA sense strand
ggagaaaugacuacggaua

SEQ ID NO: 1622586 - RNA, 19 nt, Homo sapiens
  misc_RNA (1)...(19): siRNA sense strand
gcagaccaccugaauauga

SEQ ID NO: 1622587 - RNA, 19 nt, Homo sapiens
  misc_RNA (1)...(19): siRNA sense strand
agaaaugacuacggauaua

SEQ ID NO: 1622588 - RNA, 19 nt, Homo sapiens
  misc_RNA (1)...(19): siRNA sense strand
gcuaauaaguuggugaaau

SEQ ID NO: 1622589 - RNA, 19 nt, Homo sapiens
  misc_RNA (1)...(19): siRNA sense strand
gagagaaguggcaguaauu

SEQ ID NO: 1622590 - RNA, 19 nt, Homo sapiens
  misc_RNA (1)...(19): siRNA sense strand
gagucaaucugaaagaaau

SEQ ID NO: 1622591 - RNA, 19 nt, Homo sapiens
  misc_RNA (1)...(19): siRNA sense strand
caagaaagggcuaauaagu

SEQ ID NO: 1622592 - RNA, 19 nt, Homo sapiens
  misc_RNA (1)...(19): siRNA sense strand
gcucaucacagacgaguuu

SEQ ID NO: 1622593 - RNA, 19 nt, Homo sapiens
  misc_RNA (1)...(19): siRNA sense strand
gagaaaugacuacggauau

SEQ ID NO: 1622594 - RNA, 19 nt, Homo sapiens
  misc_RNA (1)...(19): siRNA sense strand
cagcagaccaccugaauau

SEQ ID NO: 1622595 - RNA, 19 nt, Homo sapiens
  misc_RNA (1)...(19): siRNA sense strand
gugaaauaccuguugguua

SEQ ID NO: 1622596 - RNA, 19 nt, Homo sapiens
  misc_RNA (1)...(19): siRNA sense strand
ccacgagacuagcaagaug

SEQ ID NO: 1622597 - RNA, 19 nt, Homo sapiens
  misc_RNA (1)...(19): siRNA sense strand
ugaugaauauuucccagaa

SEQ ID NO: 1622598 - RNA, 19 nt, Homo sapiens
  misc_RNA (1)...(19): siRNA sense strand
ugagagaaguggcaguaau

SEQ ID NO: 1622599 - RNA, 19 nt, Homo sapiens
  misc_RNA (1)...(19): siRNA sense strand
gcuacacucuggagaagau

SEQ ID NO: 1622600 - RNA, 19 nt, Homo sapiens
  misc_RNA (1)...(19): siRNA sense strand
uacaagaaagggcuaauaa

SEQ ID NO: 1622601 - RNA, 19 nt, Homo sapiens
  misc_RNA (1)...(19): siRNA sense strand
gaugagagaaguggcagua

SEQ ID NO: 1622602 - RNA, 19 nt, Homo sapiens
  misc_RNA (1)...(19): siRNA sense strand
caagcugggucuccucaug

SEQ ID NO: 1622603 - RNA, 19 nt, Homo sapiens
  misc_RNA (1)...(19): siRNA sense strand
gcaaaguagcuuguauauu

SEQ ID NO: 1622604 - RNA, 19 nt, Homo sapiens
  misc_RNA (1)...(19): siRNA sense strand
gaaaugacuacggauauag

SEQ ID NO: 1622605 - RNA, 19 nt, Homo sapiens
  misc_RNA (1)...(19): siRNA sense strand
gcagggugcagaagaaaga

SEQ ID NO: 1622606 - RNA, 19 nt, Homo sapiens
  misc_RNA (1)...(19): siRNA sense strand
agaugaaaguccucaaguu

SEQ ID NO: 1622607 - RNA, 19 nt, Homo sapiens
  misc_RNA (1)...(19): siRNA sense strand
aagaaagggcuaauaaguu

SEQ ID NO: 1622608 - RNA, 19 nt, Homo sapiens
  misc_RNA (1)...(19): siRNA sense strand
caucaaacgcucagacaug

SEQ ID NO: 1622609 - RNA, 19 nt, Homo sapiens
  misc_RNA (1)...(19): siRNA sense strand
gggaggugcugcgcaaguu

SEQ ID NO: 1622610 - RNA, 19 nt, Homo sapiens
  misc_RNA (1)...(19): siRNA sense strand
guuaaggaccagacaaaga

SEQ ID NO: 1622611 - RNA, 19 nt, Homo sapiens
  misc_RNA (1)...(19): siRNA sense strand
ugaaaguccucaaguuugc

SEQ ID NO: 1622612 - RNA, 19 nt, Homo sapiens
  misc_RNA (1)...(19): siRNA sense strand
agagaaguggcaguaauua

SEQ ID NO: 1622613 - RNA, 19 nt, Homo sapiens
  misc_RNA (1)...(19): siRNA sense strand
gcgaggcaguggagaugga

SEQ ID NO: 1622614 - RNA, 19 nt, Homo sapiens
  misc_RNA (1)...(19): siRNA sense strand
cagacgaguuugugaagca

SEQ ID NO: 1622615 - RNA, 19 nt, Homo sapiens
  misc_RNA (1)...(19): siRNA sense strand
caagcuacacucuggagaa

SEQ ID NO: 1622616 - RNA, 19 nt, Homo sapiens
  misc_RNA (1)...(19): siRNA sense strand
uuacaagaaagggcuaaua

SEQ ID NO: 1622617 - RNA, 19 nt, Homo sapiens
  misc_RNA (1)...(19): siRNA sense strand
gagacuagcaagaugaaag

SEQ ID NO: 1622618 - RNA, 19 nt, Homo sapiens
  misc_RNA (1)...(19): siRNA sense strand
agacaaagauccccaucaa

SEQ ID NO: 1622619 - RNA, 19 nt, Homo sapiens
  misc_RNA (1)...(19): siRNA sense strand
ggugaaauaccuguugguu

SEQ ID NO: 1622620 - RNA, 19 nt, Homo sapiens
  misc_RNA (1)...(19): siRNA sense strand
cgagucaaucugaaagaaa

SEQ ID NO: 1622621 - RNA, 19 nt, Homo sapiens
  misc_RNA (1)...(19): siRNA sense strand
gaaaucauugaacgagcaa

SEQ ID NO: 1622622 - RNA, 19 nt, Homo sapiens
  misc_RNA (1)...(19): siRNA sense strand
uuaaggaccagacaaagau

SEQ ID NO: 1622623 - RNA, 19 nt, Homo sapiens
  misc_RNA (1)...(19): siRNA sense strand
gggcuaauaaguuggugaa

SEQ ID NO: 1622624 - RNA, 19 nt, Homo sapiens
  misc_RNA (1)...(19): siRNA sense strand
agaaguggcaguaauuaca

SEQ ID NO: 1622625 - RNA, 19 nt, Homo sapiens
  misc_RNA (1)...(19): siRNA sense strand
uagcuuguauauucucauc

SEQ ID NO: 1622626 - RNA, 19 nt, Homo sapiens
  misc_RNA (1)...(19): siRNA sense strand
uaacagcagaccaccugaa

SEQ ID NO: 1622627 - RNA, 19 nt, Homo sapiens
  misc_RNA (1)...(19): siRNA sense strand
gaaguggcaguaauuacag

SEQ ID NO: 1622628 - RNA, 19 nt, Homo sapiens
  misc_RNA (1)...(19): siRNA sense strand
cagaccaccugaauaugag

SEQ ID NO: 1622629 - RNA, 19 nt, Homo sapiens
  misc_RNA (1)...(19): siRNA sense strand
ucgagucaaucugaaagaa

SEQ ID NO: 1622630 - RNA, 19 nt, Homo sapiens
  misc_RNA (1)...(19): siRNA sense strand
gagaaguggcaguaauuac

SEQ ID NO: 1622631 - RNA, 19 nt, Homo sapiens
  misc_RNA (1)...(19): siRNA sense strand
caagaugaaaguccucaag

SEQ ID NO: 1622632 - RNA, 19 nt, Homo sapiens
  misc_RNA (1)...(19): siRNA sense strand
caucagcacucaggaaucc

SEQ ID NO: 1622633 - RNA, 19 nt, Homo sapiens
  misc_RNA (1)...(19): siRNA sense strand
ucauggugauucugagugu

SEQ ID NO: 1622634 - RNA, 19 nt, Homo sapiens
  misc_RNA (1)...(19): siRNA sense strand
ccagugaggcugucaucug

SEQ ID NO: 1622635 - RNA, 19 nt, Homo sapiens
  misc_RNA (1)...(19): siRNA sense strand
gcuuguauauucucaucag

SEQ ID NO: 1622636 - RNA, 19 nt, Homo sapiens
  misc_RNA (1)...(19): siRNA sense strand
gcuccuaccacgagacuag

SEQ ID NO: 1622637 - RNA, 19 nt, Homo sapiens
  misc_RNA (1)...(19): siRNA sense strand
ggaggugcugcgcaaguug

SEQ ID NO: 1622638 - RNA, 19 nt, Homo sapiens
  misc_RNA (1)...(19): siRNA sense strand
acagcagaccaccugaaua

SEQ ID NO: 1622639 - RNA, 19 nt, Homo sapiens
  misc_RNA (1)...(19): siRNA sense strand
gaaauaccuguugguuaag

SEQ ID NO: 1622640 - RNA, 19 nt, Homo sapiens
  misc_RNA (1)...(19): siRNA sense strand
ucauugaacgagcaagcua

SEQ ID NO: 1622641 - RNA, 19 nt, Homo sapiens
  misc_RNA (1)...(19): siRNA sense strand
acaagaaagggcuaauaag

SEQ ID NO: 1622642 - RNA, 19 nt, Homo sapiens
  misc_RNA (1)...(19): siRNA sense strand
aagcuacacucuggagaag

SEQ ID NO: 1622643 - RNA, 19 nt, Homo sapiens
  misc_RNA (1)...(19): siRNA sense strand
augaaaguccucaaguuug

SEQ ID NO: 1622644 - RNA, 19 nt, Homo sapiens
  misc_RNA (1)...(19): siRNA sense strand
gcaagaugaaaguccucaa

SEQ ID NO: 1622645 - RNA, 19 nt, Homo sapiens
  misc_RNA (1)...(19): siRNA sense strand
caaaguagcuuguauauuc

SEQ ID NO: 1622646 - RNA, 19 nt, Homo sapiens
  misc_RNA (1)...(19): siRNA sense strand
ugaaauaccuguugguuaa

SEQ ID NO: 1622647 - RNA, 19 nt, Homo sapiens
  misc_RNA (1)...(19): siRNA sense strand
gagaagauguuucgaguca

SEQ ID NO: 1622648 - RNA, 19 nt, Homo sapiens
  misc_RNA (1)...(19): siRNA sense strand
ggaauccucugcaggcaua

SEQ ID NO: 1622649 - RNA, 19 nt, Homo sapiens
  misc_RNA (1)...(19): siRNA sense strand
guacauccuuggaaucuuu

SEQ ID NO: 1622650 - RNA, 19 nt, Homo sapiens
  misc_RNA (1)...(19): siRNA sense strand
agaaagggcuaauaaguug

SEQ ID NO: 1622651 - RNA, 19 nt, Homo sapiens
  misc_RNA (1)...(19): siRNA sense strand
gaagauguuucgagucaau

SEQ ID NO: 1622652 - RNA, 19 nt, Homo sapiens
  misc_RNA (1)...(19): siRNA sense strand
gaugaaaguccucaaguuu

SEQ ID NO: 1622653 - RNA, 19 nt, Homo sapiens
  misc_RNA (1)...(19): siRNA sense strand
caaaguacauccuuggaau

SEQ ID NO: 1622654 - RNA, 19 nt, Homo sapiens
  misc_RNA (1)...(19): siRNA sense strand
ggagaaaugacuacggaua

SEQ ID NO: 1622655 - RNA, 19 nt, Homo sapiens
  misc_RNA (1)...(19): siRNA sense strand
gcagaccaccugaauauga

SEQ ID NO: 1622656 - RNA, 19 nt, Homo sapiens
  misc_RNA (1)...(19): siRNA sense strand
uuacagauaccgcuaauaa

SEQ ID NO: 1622657 - RNA, 19 nt, Homo sapiens
  misc_RNA (1)...(19): siRNA sense strand
agaaaugacuacggauaua

SEQ ID NO: 1622658 - RNA, 19 nt, Homo sapiens
  misc_RNA (1)...(19): siRNA sense strand
gcuaauaaauugcaguagu

SEQ ID NO: 1622659 - RNA, 19 nt, Homo sapiens
  misc_RNA (1)...(19): siRNA sense strand
gcuaauaaguuggugaaau

SEQ ID NO: 1622660 - RNA, 19 nt, Homo sapiens
  misc_RNA (1)...(19): siRNA sense strand
gagagaaguggcaguaauu

SEQ ID NO: 1622661 - RNA, 19 nt, Homo sapiens
  misc_RNA (1)...(19): siRNA sense strand
gagucaaucugaaagaaau

SEQ ID NO: 1622662 - RNA, 19 nt, Homo sapiens
  misc_RNA (1)...(19): siRNA sense strand
caagaaagggcuaauaagu

SEQ ID NO: 1622663 - RNA, 19 nt, Homo sapiens
  misc_RNA (1)...(19): siRNA sense strand
gcucaucacagacgaguuu

SEQ ID NO: 1622664 - RNA, 19 nt, Homo sapiens
  misc_RNA (1)...(19): siRNA sense strand
gagaaaugacuacggauau

SEQ ID NO: 1622665 - RNA, 19 nt, Homo sapiens
  misc_RNA (1)...(19): siRNA sense strand
cagcagaccaccugaauau

SEQ ID NO: 1622666 - RNA, 19 nt, Homo sapiens
  misc_RNA (1)...(19): siRNA sense strand
agauaccgcuaauaaauug

SEQ ID NO: 1622667 - RNA, 19 nt, Homo sapiens
  misc_RNA (1)...(19): siRNA sense strand
gugaaauaccuguugguua

SEQ ID NO: 1622668 - RNA, 19 nt, Homo sapiens
  misc_RNA (1)...(19): siRNA sense strand
ccacgagacuagcaagaug

SEQ ID NO: 1622669 - RNA, 19 nt, Homo sapiens
  misc_RNA (1)...(19): siRNA sense strand
ugagagaaguggcaguaau

SEQ ID NO: 1622670 - RNA, 19 nt, Homo sapiens
  misc_RNA (1)...(19): siRNA sense strand
ugaugaauauuucccagaa

SEQ ID NO: 1622671 - RNA, 19 nt, Homo sapiens
  misc_RNA (1)...(19): siRNA sense strand
gcuacacucuggagaagau

SEQ ID NO: 1622672 - RNA, 19 nt, Homo sapiens
  misc_RNA (1)...(19): siRNA sense strand
uacaagaaagggcuaauaa

SEQ ID NO: 1622673 - RNA, 19 nt, Homo sapiens
  misc_RNA (1)...(19): siRNA sense strand
caagcugggucuccucaug

SEQ ID NO: 1622674 - RNA, 19 nt, Homo sapiens
  misc_RNA (1)...(19): siRNA sense strand
gaugagagaaguggcagua

SEQ ID NO: 1622675 - RNA, 19 nt, Homo sapiens
  misc_RNA (1)...(19): siRNA sense strand
gcaaaguagcuuguauauu

SEQ ID NO: 1622676 - RNA, 19 nt, Homo sapiens
  misc_RNA (1)...(19): siRNA sense strand
cuaauaaauugcaguaguc

SEQ ID NO: 1622677 - RNA, 19 nt, Homo sapiens
  misc_RNA (1)...(19): siRNA sense strand
cagauaccgcuaauaaauu

SEQ ID NO: 1622678 - RNA, 19 nt, Homo sapiens
  misc_RNA (1)...(19): siRNA sense strand
acagauaccgcuaauaaau

SEQ ID NO: 1622679 - RNA, 19 nt, Homo sapiens
  misc_RNA (1)...(19): siRNA sense strand
agaugaaaguccucaaguu

SEQ ID NO: 1622680 - RNA, 19 nt, Homo sapiens
  misc_RNA (1)...(19): siRNA sense strand
gaaaugacuacggauauag

SEQ ID NO: 1622681 - RNA, 19 nt, Homo sapiens
  misc_RNA (1)...(19): siRNA sense strand
gcagggugcagaagaaaga

SEQ ID NO: 1622682 - RNA, 19 nt, Homo sapiens
  misc_RNA (1)...(19): siRNA sense strand
aagaaagggcuaauaaguu

SEQ ID NO: 1622683 - RNA, 19 nt, Homo sapiens
  misc_RNA (1)...(19): siRNA sense strand
caucaaacgcucagacaug

SEQ ID NO: 1622684 - RNA, 19 nt, Homo sapiens
  misc_RNA (1)...(19): siRNA sense strand
gggaggugcugcgcaaguu

SEQ ID NO: 1622685 - RNA, 19 nt, Homo sapiens
  misc_RNA (1)...(19): siRNA sense strand
guuaaggaccagacaaaga

SEQ ID NO: 1622686 - RNA, 19 nt, Homo sapiens
  misc_RNA (1)...(19): siRNA sense strand
ugaaaguccucaaguuugc

SEQ ID NO: 1622687 - RNA, 19 nt, Homo sapiens
  misc_RNA (1)...(19): siRNA sense strand
caagcuacacucuggagaa

SEQ ID NO: 1622688 - RNA, 19 nt, Homo sapiens
  misc_RNA (1)...(19): siRNA sense strand
gcgaggcaguggagaugga

SEQ ID NO: 1622689 - RNA, 19 nt, Homo sapiens
  misc_RNA (1)...(19): siRNA sense strand
cagacgaguuugugaagca

SEQ ID NO: 1622690 - RNA, 19 nt, Homo sapiens
  misc_RNA (1)...(19): siRNA sense strand
agagaaguggcaguaauua

SEQ ID NO: 1622691 - RNA, 19 nt, Homo sapiens
  misc_RNA (1)...(19): siRNA sense strand
agacaaagauccccaucaa

SEQ ID NO: 1622692 - RNA, 19 nt, Homo sapiens
  misc_RNA (1)...(19): siRNA sense strand
gagacuagcaagaugaaag

SEQ ID NO: 1622693 - RNA, 19 nt, Homo sapiens
  misc_RNA (1)...(19): siRNA sense strand
uuacaagaaagggcuaaua

SEQ ID NO: 1622694 - RNA, 19 nt, Homo sapiens
  misc_RNA (1)...(19): siRNA sense strand
ggugaaauaccuguugguu

SEQ ID NO: 1622695 - RNA, 19 nt, Homo sapiens
  misc_RNA (1)...(19): siRNA sense strand
cgagucaaucugaaagaaa

SEQ ID NO: 1622696 - RNA, 19 nt, Homo sapiens
  misc_RNA (1)...(19): siRNA sense strand
gaaaucauugaacgagcaa

SEQ ID NO: 1622697 - RNA, 19 nt, Homo sapiens
  misc_RNA (1)...(19): siRNA sense strand
uuaaggaccagacaaagau

SEQ ID NO: 1622698 - RNA, 19 nt, Homo sapiens
  misc_RNA (1)...(19): siRNA sense strand
agaaguggcaguaauuaca

SEQ ID NO: 1622699 - RNA, 19 nt, Homo sapiens
  misc_RNA (1)...(19): siRNA sense strand
gggcuaauaaguuggugaa

SEQ ID NO: 1622700 - RNA, 19 nt, Homo sapiens
  misc_RNA (1)...(19): siRNA sense strand
uagcuuguauauucucauc

SEQ ID NO: 1622701 - RNA, 19 nt, Homo sapiens
  misc_RNA (1)...(19): siRNA sense strand
uaacagcagaccaccugaa

SEQ ID NO: 1622702 - RNA, 19 nt, Homo sapiens
  misc_RNA (1)...(19): siRNA sense strand
ucgagucaaucugaaagaa

SEQ ID NO: 1622703 - RNA, 19 nt, Homo sapiens
  misc_RNA (1)...(19): siRNA sense strand
gaaguggcaguaauuacag

SEQ ID NO: 1622704 - RNA, 19 nt, Homo sapiens
  misc_RNA (1)...(19): siRNA sense strand
cagaccaccugaauaugag

SEQ ID NO: 1622705 - RNA, 19 nt, Homo sapiens
  misc_RNA (1)...(19): siRNA sense strand
caucagcacucaggaaucc

SEQ ID NO: 1622706 - RNA, 19 nt, Homo sapiens
  misc_RNA (1)...(19): siRNA sense strand
caagaugaaaguccucaag

SEQ ID NO: 1622707 - RNA, 19 nt, Homo sapiens
  misc_RNA (1)...(19): siRNA sense strand
gagaaguggcaguaauuac

SEQ ID NO: 1622708 - RNA, 19 nt, Homo sapiens
  misc_RNA (1)...(19): siRNA sense strand
ucauggugauucugagugu

SEQ ID NO: 1622709 - RNA, 19 nt, Homo sapiens
  misc_RNA (1)...(19): siRNA sense strand
ccauggagccaaaguacau

SEQ ID NO: 1622710 - RNA, 19 nt, Homo sapiens
  misc_RNA (1)...(19): siRNA sense strand
ccagugaggcugucaucug

SEQ ID NO: 1622711 - RNA, 19 nt, Homo sapiens
  misc_RNA (1)...(19): siRNA sense strand
gcuuguauauucucaucag

SEQ ID NO: 1622712 - RNA, 19 nt, Homo sapiens
  misc_RNA (1)...(19): siRNA sense strand
ccgcuaauaaauugcagua

SEQ ID NO: 1622713 - RNA, 19 nt, Homo sapiens
  misc_RNA (1)...(19): siRNA sense strand
gcuccuaccacgagacuag

SEQ ID NO: 1622714 - RNA, 19 nt, Homo sapiens
  misc_RNA (1)...(19): siRNA sense strand
guuuacagauaccgcuaau

SEQ ID NO: 1622715 - RNA, 19 nt, Homo sapiens
  misc_RNA (1)...(19): siRNA sense strand
aggcaguuauggccaauca

SEQ ID NO: 1622716 - RNA, 19 nt, Homo sapiens
  misc_RNA (1)...(19): siRNA sense strand
caguaguccuucccaugga

SEQ ID NO: 1622717 - RNA, 19 nt, Homo sapiens
  misc_RNA (1)...(19): siRNA sense strand
ggaggugcugcgcaaguug

SEQ ID NO: 1622718 - RNA, 19 nt, Homo sapiens
  misc_RNA (1)...(19): siRNA sense strand
cagcugagggugucaugug

SEQ ID NO: 1622719 - RNA, 19 nt, Homo sapiens
  misc_RNA (1)...(19): siRNA sense strand
acagcagaccaccugaaua

SEQ ID NO: 1622720 - RNA, 19 nt, Homo sapiens
  misc_RNA (1)...(19): siRNA sense strand
gaaauaccuguugguuaag

SEQ ID NO: 1622721 - RNA, 19 nt, Homo sapiens
  misc_RNA (1)...(19): siRNA sense strand
uacagauaccgcuaauaaa

SEQ ID NO: 1622722 - RNA, 19 nt, Homo sapiens
  misc_RNA (1)...(19): siRNA sense strand
ucauugaacgagcaagcua

SEQ ID NO: 1622723 - RNA, 19 nt, Homo sapiens
  misc_RNA (1)...(19): siRNA sense strand
caaggcaguuauggccaau

SEQ ID NO: 1622724 - RNA, 19 nt, Homo sapiens
  misc_RNA (1)...(19): siRNA sense strand
auaaauugcaguaguccuu

SEQ ID NO: 1622725 - RNA, 19 nt, Homo sapiens
  misc_RNA (1)...(19): siRNA sense strand
acaagaaagggcuaauaag

SEQ ID NO: 1622726 - RNA, 19 nt, Homo sapiens
  misc_RNA (1)...(19): siRNA sense strand
aagcuacacucuggagaag

SEQ ID NO: 1622727 - RNA, 19 nt, Homo sapiens
  misc_RNA (1)...(19): siRNA sense strand
augaaaguccucaaguuug

SEQ ID NO: 1622728 - RNA, 19 nt, Homo sapiens
  misc_RNA (1)...(19): siRNA sense strand
gcaagaugaaaguccucaa

SEQ ID NO: 1622729 - RNA, 19 nt, Homo sapiens
  misc_RNA (1)...(19): siRNA sense strand
caaaguagcuuguauauuc

SEQ ID NO: 1622730 - RNA, 19 nt, Homo sapiens
  misc_RNA (1)...(19): siRNA sense strand
ugaaauaccuguugguuaa

SEQ ID NO: 1622731 - RNA, 19 nt, Homo sapiens
  misc_RNA (1)...(19): siRNA sense strand
gagaagauguuucgaguca

SEQ ID NO: 1622732 - RNA, 19 nt, Homo sapiens
  misc_RNA (1)...(19): siRNA sense strand
ggaauccucugcaggcaua

SEQ ID NO: 1622733 - RNA, 19 nt, Homo sapiens
  misc_RNA (1)...(19): siRNA sense strand
guacauccuuggaaucuuu

SEQ ID NO: 1622734 - RNA, 19 nt, Homo sapiens
  misc_RNA (1)...(19): siRNA sense strand
agaaagggcuaauaaguug

SEQ ID NO: 1622735 - RNA, 19 nt, Homo sapiens
  misc_RNA (1)...(19): siRNA sense strand
gaagauguuucgagucaau

SEQ ID NO: 1622736 - RNA, 19 nt, Homo sapiens
  misc_RNA (1)...(19): siRNA sense strand
gaugaaaguccucaaguuu

SEQ ID NO: 1622737 - RNA, 19 nt, Homo sapiens
  misc_RNA (1)...(19): siRNA sense strand
caaaguacauccuuggaau

SEQ ID NO: 1622738 - RNA, 19 nt, Homo sapiens
  misc_RNA (1)...(19): siRNA sense strand
ggagaaaugacuacggaua

SEQ ID NO: 1622739 - RNA, 19 nt, Homo sapiens
  misc_RNA (1)...(19): siRNA sense strand
gcagaccaccugaauauga

SEQ ID NO: 1622740 - RNA, 19 nt, Homo sapiens
  misc_RNA (1)...(19): siRNA sense strand
uuacagauaccgcuaauaa

SEQ ID NO: 1622741 - RNA, 19 nt, Homo sapiens
  misc_RNA (1)...(19): siRNA sense strand
agaaaugacuacggauaua

SEQ ID NO: 1622742 - RNA, 19 nt, Homo sapiens
  misc_RNA (1)...(19): siRNA sense strand
gcuaauaaauugcaguagu

SEQ ID NO: 1622743 - RNA, 19 nt, Homo sapiens
  misc_RNA (1)...(19): siRNA sense strand
gcuaauaaguuggugaaau

SEQ ID NO: 1622744 - RNA, 19 nt, Homo sapiens
  misc_RNA (1)...(19): siRNA sense strand
gagagaaguggcaguaauu

SEQ ID NO: 1622745 - RNA, 19 nt, Homo sapiens
  misc_RNA (1)...(19): siRNA sense strand
gagucaaucugaaagaaau

SEQ ID NO: 1622746 - RNA, 19 nt, Homo sapiens
  misc_RNA (1)...(19): siRNA sense strand
caagaaagggcuaauaagu

SEQ ID NO: 1622747 - RNA, 19 nt, Homo sapiens
  misc_RNA (1)...(19): siRNA sense strand
gcucaucacagacgaguuu

SEQ ID NO: 1622748 - RNA, 19 nt, Homo sapiens
  misc_RNA (1)...(19): siRNA sense strand
gagaaaugacuacggauau

SEQ ID NO: 1622749 - RNA, 19 nt, Homo sapiens
  misc_RNA (1)...(19): siRNA sense strand
cagcagaccaccugaauau

SEQ ID NO: 1622750 - RNA, 19 nt, Homo sapiens
  misc_RNA (1)...(19): siRNA sense strand
agauaccgcuaauaaauug

SEQ ID NO: 1622751 - RNA, 19 nt, Homo sapiens
  misc_RNA (1)...(19): siRNA sense strand
gugaaauaccuguugguua

SEQ ID NO: 1622752 - RNA, 19 nt, Homo sapiens
  misc_RNA (1)...(19): siRNA sense strand
ccacgagacuagcaagaug

SEQ ID NO: 1622753 - RNA, 19 nt, Homo sapiens
  misc_RNA (1)...(19): siRNA sense strand
ugagagaaguggcaguaau

SEQ ID NO: 1622754 - RNA, 19 nt, Homo sapiens
  misc_RNA (1)...(19): siRNA sense strand
ugaugaauauuucccagaa

SEQ ID NO: 1622755 - RNA, 19 nt, Homo sapiens
  misc_RNA (1)...(19): siRNA sense strand
gcuacacucuggagaagau

SEQ ID NO: 1622756 - RNA, 19 nt, Homo sapiens
  misc_RNA (1)...(19): siRNA sense strand
uacaagaaagggcuaauaa

SEQ ID NO: 1622757 - RNA, 19 nt, Homo sapiens
  misc_RNA (1)...(19): siRNA sense strand
caagcugggucuccucaug

SEQ ID NO: 1622758 - RNA, 19 nt, Homo sapiens
  misc_RNA (1)...(19): siRNA sense strand
gaugagagaaguggcagua

SEQ ID NO: 1622759 - RNA, 19 nt, Homo sapiens
  misc_RNA (1)...(19): siRNA sense strand
gcaaaguagcuuguauauu

SEQ ID NO: 1622760 - RNA, 19 nt, Homo sapiens
  misc_RNA (1)...(19): siRNA sense strand
cuaauaaauugcaguaguc

SEQ ID NO: 1622761 - RNA, 19 nt, Homo sapiens
  misc_RNA (1)...(19): siRNA sense strand
cagauaccgcuaauaaauu

SEQ ID NO: 1622762 - RNA, 19 nt, Homo sapiens
  misc_RNA (1)...(19): siRNA sense strand
acagauaccgcuaauaaau

SEQ ID NO: 1622763 - RNA, 19 nt, Homo sapiens
  misc_RNA (1)...(19): siRNA sense strand
agaugaaaguccucaaguu

SEQ ID NO: 1622764 - RNA, 19 nt, Homo sapiens
  misc_RNA (1)...(19): siRNA sense strand
gaaaugacuacggauauag

SEQ ID NO: 1622765 - RNA, 19 nt, Homo sapiens
  misc_RNA (1)...(19): siRNA sense strand
gcagggugcagaagaaaga

SEQ ID NO: 1622766 - RNA, 19 nt, Homo sapiens
  misc_RNA (1)...(19): siRNA sense strand
aagaaagggcuaauaaguu

SEQ ID NO: 1622767 - RNA, 19 nt, Homo sapiens
  misc_RNA (1)...(19): siRNA sense strand
caucaaacgcucagacaug

SEQ ID NO: 1622768 - RNA, 19 nt, Homo sapiens
  misc_RNA (1)...(19): siRNA sense strand
gggaggugcugcgcaaguu

SEQ ID NO: 1622769 - RNA, 19 nt, Homo sapiens
  misc_RNA (1)...(19): siRNA sense strand
guuaaggaccagacaaaga

SEQ ID NO: 1622770 - RNA, 19 nt, Homo sapiens
  misc_RNA (1)...(19): siRNA sense strand
ugaaaguccucaaguuugc

SEQ ID NO: 1622771 - RNA, 19 nt, Homo sapiens
  misc_RNA (1)...(19): siRNA sense strand
caagcuacacucuggagaa

SEQ ID NO: 1622772 - RNA, 19 nt, Homo sapiens
  misc_RNA (1)...(19): siRNA sense strand
gcgaggcaguggagaugga

SEQ ID NO: 1622773 - RNA, 19 nt, Homo sapiens
  misc_RNA (1)...(19): siRNA sense strand
cagacgaguuugugaagca

SEQ ID NO: 1622774 - RNA, 19 nt, Homo sapiens
  misc_RNA (1)...(19): siRNA sense strand
agagaaguggcaguaauua

SEQ ID NO: 1622775 - RNA, 19 nt, Homo sapiens
  misc_RNA (1)...(19): siRNA sense strand
agacaaagauccccaucaa

SEQ ID NO: 1622776 - RNA, 19 nt, Homo sapiens
  misc_RNA (1)...(19): siRNA sense strand
gagacuagcaagaugaaag

SEQ ID NO: 1622777 - RNA, 19 nt, Homo sapiens
  misc_RNA (1)...(19): siRNA sense strand
uuacaagaaagggcuaaua

SEQ ID NO: 1622778 - RNA, 19 nt, Homo sapiens
  misc_RNA (1)...(19): siRNA sense strand
ggugaaauaccuguugguu

SEQ ID NO: 1622779 - RNA, 19 nt, Homo sapiens
  misc_RNA (1)...(19): siRNA sense strand
cgagucaaucugaaagaaa

SEQ ID NO: 1622780 - RNA, 19 nt, Homo sapiens
  misc_RNA (1)...(19): siRNA sense strand
gaaaucauugaacgagcaa

SEQ ID NO: 1622781 - RNA, 19 nt, Homo sapiens
  misc_RNA (1)...(19): siRNA sense strand
uuaaggaccagacaaagau

SEQ ID NO: 1622782 - RNA, 19 nt, Homo sapiens
  misc_RNA (1)...(19): siRNA sense strand
agaaguggcaguaauuaca

SEQ ID NO: 1622783 - RNA, 19 nt, Homo sapiens
  misc_RNA (1)...(19): siRNA sense strand
gggcuaauaaguuggugaa

SEQ ID NO: 1622784 - RNA, 19 nt, Homo sapiens
  misc_RNA (1)...(19): siRNA sense strand
uagcuuguauauucucauc

SEQ ID NO: 1622785 - RNA, 19 nt, Homo sapiens
  misc_RNA (1)...(19): siRNA sense strand
uaacagcagaccaccugaa

SEQ ID NO: 1622786 - RNA, 19 nt, Homo sapiens
  misc_RNA (1)...(19): siRNA sense strand
ucgagucaaucugaaagaa

SEQ ID NO: 1622787 - RNA, 19 nt, Homo sapiens
  misc_RNA (1)...(19): siRNA sense strand
gaaguggcaguaauuacag

SEQ ID NO: 1622788 - RNA, 19 nt, Homo sapiens
  misc_RNA (1)...(19): siRNA sense strand
cagaccaccugaauaugag

SEQ ID NO: 1622789 - RNA, 19 nt, Homo sapiens
  misc_RNA (1)...(19): siRNA sense strand
caucagcacucaggaaucc

SEQ ID NO: 1622790 - RNA, 19 nt, Homo sapiens
  misc_RNA (1)...(19): siRNA sense strand
caagaugaaaguccucaag

SEQ ID NO: 1622791 - RNA, 19 nt, Homo sapiens
  misc_RNA (1)...(19): siRNA sense strand
gagaaguggcaguaauuac

SEQ ID NO: 1622792 - RNA, 19 nt, Homo sapiens
  misc_RNA (1)...(19): siRNA sense strand
ucauggugauucugagugu

SEQ ID NO: 1622793 - RNA, 19 nt, Homo sapiens
  misc_RNA (1)...(19): siRNA sense strand
ccauggagccaaaguacau

SEQ ID NO: 1622794 - RNA, 19 nt, Homo sapiens
  misc_RNA (1)...(19): siRNA sense strand
ccagugaggcugucaucug

SEQ ID NO: 1622795 - RNA, 19 nt, Homo sapiens
  misc_RNA (1)...(19): siRNA sense strand
gcuuguauauucucaucag

SEQ ID NO: 1622796 - RNA, 19 nt, Homo sapiens
  misc_RNA (1)...(19): siRNA sense strand
ccgcuaauaaauugcagua

SEQ ID NO: 1622797 - RNA, 19 nt, Homo sapiens
  misc_RNA (1)...(19): siRNA sense strand
gcuccuaccacgagacuag

SEQ ID NO: 1622798 - RNA, 19 nt, Homo sapiens
  misc_RNA (1)...(19): siRNA sense strand
guuuacagauaccgcuaau

SEQ ID NO: 1622799 - RNA, 19 nt, Homo sapiens
  misc_RNA (1)...(19): siRNA sense strand
aggcaguuauggccaauca

SEQ ID NO: 1622800 - RNA, 19 nt, Homo sapiens
  misc_RNA (1)...(19): siRNA sense strand
caguaguccuucccaugga

SEQ ID NO: 1622801 - RNA, 19 nt, Homo sapiens
  misc_RNA (1)...(19): siRNA sense strand
ggaggugcugcgcaaguug

SEQ ID NO: 1622802 - RNA, 19 nt, Homo sapiens
  misc_RNA (1)...(19): siRNA sense strand
cagcugagggugucaugug

SEQ ID NO: 1622803 - RNA, 19 nt, Homo sapiens
  misc_RNA (1)...(19): siRNA sense strand
acagcagaccaccugaaua

SEQ ID NO: 1622804 - RNA, 19 nt, Homo sapiens
  misc_RNA (1)...(19): siRNA sense strand
gaaauaccuguugguuaag

SEQ ID NO: 1622805 - RNA, 19 nt, Homo sapiens
  misc_RNA (1)...(19): siRNA sense strand
uacagauaccgcuaauaaa

SEQ ID NO: 1622806 - RNA, 19 nt, Homo sapiens
  misc_RNA (1)...(19): siRNA sense strand
ucauugaacgagcaagcua

SEQ ID NO: 1622807 - RNA, 19 nt, Homo sapiens
  misc_RNA (1)...(19): siRNA sense strand
caaggcaguuauggccaau

SEQ ID NO: 1622808 - RNA, 19 nt, Homo sapiens
  misc_RNA (1)...(19): siRNA sense strand
auaaauugcaguaguccuu

SEQ ID NO: 1622809 - RNA, 19 nt, Homo sapiens
  misc_RNA (1)...(19): siRNA sense strand
acaagaaagggcuaauaag

SEQ ID NO: 1622810 - RNA, 19 nt, Homo sapiens
  misc_RNA (1)...(19): siRNA sense strand
aagcuacacucuggagaag

SEQ ID NO: 1622811 - RNA, 19 nt, Homo sapiens
  misc_RNA (1)...(19): siRNA sense strand
augaaaguccucaaguuug

SEQ ID NO: 1622812 - RNA, 19 nt, Homo sapiens
  misc_RNA (1)...(19): siRNA sense strand
gcaagaugaaaguccucaa

SEQ ID NO: 1622813 - RNA, 19 nt, Homo sapiens
  misc_RNA (1)...(19): siRNA sense strand
caaaguagcuuguauauuc

SEQ ID NO: 1622814 - RNA, 19 nt, Homo sapiens
  misc_RNA (1)...(19): siRNA sense strand
ugaaauaccuguugguuaa

SEQ ID NO: 1622815 - RNA, 19 nt, Homo sapiens
  misc_RNA (1)...(19): siRNA sense strand
gagaagauguuucgaguca

SEQ ID NO: 1622816 - RNA, 19 nt, Homo sapiens
  misc_RNA (1)...(19): siRNA sense strand
ggaauccucugcaggcaua

SEQ ID NO: 1622817 - RNA, 19 nt, Homo sapiens
  misc_RNA (1)...(19): siRNA sense strand
agaaagggcuaauaaguug

SEQ ID NO: 1622818 - RNA, 19 nt, Homo sapiens
  misc_RNA (1)...(19): siRNA sense strand
gaagauguuucgagucaau

SEQ ID NO: 1622819 - RNA, 19 nt, Homo sapiens
  misc_RNA (1)...(19): siRNA sense strand
gaugaaaguccucaaguuu

SEQ ID NO: 1622820 - RNA, 19 nt, Homo sapiens
  misc_RNA (1)...(19): siRNA sense strand
ggagaaaugacuacggaua

SEQ ID NO: 1622821 - RNA, 19 nt, Homo sapiens
  misc_RNA (1)...(19): siRNA sense strand
gcagaccaccugaauauga

SEQ ID NO: 1622822 - RNA, 19 nt, Homo sapiens
  misc_RNA (1)...(19): siRNA sense strand
agaaaugacuacggauaua

SEQ ID NO: 1622823 - RNA, 19 nt, Homo sapiens
  misc_RNA (1)...(19): siRNA sense strand
gcuaauaaguuggugaaau

SEQ ID NO: 1622824 - RNA, 19 nt, Homo sapiens
  misc_RNA (1)...(19): siRNA sense strand
gagagaaguggcaguaauu

SEQ ID NO: 1622825 - RNA, 19 nt, Homo sapiens
  misc_RNA (1)...(19): siRNA sense strand
gagucaaucugaaagaaau

SEQ ID NO: 1622826 - RNA, 19 nt, Homo sapiens
  misc_RNA (1)...(19): siRNA sense strand
caagaaagggcuaauaagu

SEQ ID NO: 1622827 - RNA, 19 nt, Homo sapiens
  misc_RNA (1)...(19): siRNA sense strand
gcucaucacagacgaguuu

SEQ ID NO: 1622828 - RNA, 19 nt, Homo sapiens
  misc_RNA (1)...(19): siRNA sense strand
gagaaaugacuacggauau

SEQ ID NO: 1622829 - RNA, 19 nt, Homo sapiens
  misc_RNA (1)...(19): siRNA sense strand
cagcagaccaccugaauau

SEQ ID NO: 1622830 - RNA, 19 nt, Homo sapiens
  misc_RNA (1)...(19): siRNA sense strand
gugaaauaccuguugguua

SEQ ID NO: 1622831 - RNA, 19 nt, Homo sapiens
  misc_RNA (1)...(19): siRNA sense strand
ccacgagacuagcaagaug

SEQ ID NO: 1622832 - RNA, 19 nt, Homo sapiens
  misc_RNA (1)...(19): siRNA sense strand
ugaugaauauuucccagaa

SEQ ID NO: 1622833 - RNA, 19 nt, Homo sapiens
  misc_RNA (1)...(19): siRNA sense strand
ugagagaaguggcaguaau

SEQ ID NO: 1622834 - RNA, 19 nt, Homo sapiens
  misc_RNA (1)...(19): siRNA sense strand
gcuacacucuggagaagau

SEQ ID NO: 1622835 - RNA, 19 nt, Homo sapiens
  misc_RNA (1)...(19): siRNA sense strand
uacaagaaagggcuaauaa

SEQ ID NO: 1622836 - RNA, 19 nt, Homo sapiens
  misc_RNA (1)...(19): siRNA sense strand
gaugagagaaguggcagua

SEQ ID NO: 1622837 - RNA, 19 nt, Homo sapiens
  misc_RNA (1)...(19): siRNA sense strand
caagcugggucuccucaug

SEQ ID NO: 1622838 - RNA, 19 nt, Homo sapiens
  misc_RNA (1)...(19): siRNA sense strand
gcaaaguagcuuguauauu

SEQ ID NO: 1622839 - RNA, 19 nt, Homo sapiens
  misc_RNA (1)...(19): siRNA sense strand
gaaaugacuacggauauag

SEQ ID NO: 1622840 - RNA, 19 nt, Homo sapiens
  misc_RNA (1)...(19): siRNA sense strand
gcagggugcagaagaaaga

SEQ ID NO: 1622841 - RNA, 19 nt, Homo sapiens
  misc_RNA (1)...(19): siRNA sense strand
agaugaaaguccucaaguu

SEQ ID NO: 1622842 - RNA, 19 nt, Homo sapiens
  misc_RNA (1)...(19): siRNA sense strand
aagaaagggcuaauaaguu

SEQ ID NO: 1622843 - RNA, 19 nt, Homo sapiens
  misc_RNA (1)...(19): siRNA sense strand
caucaaacgcucagacaug

SEQ ID NO: 1622844 - RNA, 19 nt, Homo sapiens
  misc_RNA (1)...(19): siRNA sense strand
gggaggugcugcgcaaguu

SEQ ID NO: 1622845 - RNA, 19 nt, Homo sapiens
  misc_RNA (1)...(19): siRNA sense strand
guuaaggaccagacaaaga

SEQ ID NO: 1622846 - RNA, 19 nt, Homo sapiens
  misc_RNA (1)...(19): siRNA sense strand
ugaaaguccucaaguuugc

SEQ ID NO: 1622847 - RNA, 19 nt, Homo sapiens
  misc_RNA (1)...(19): siRNA sense strand
agagaaguggcaguaauua

SEQ ID NO: 1622848 - RNA, 19 nt, Homo sapiens
  misc_RNA (1)...(19): siRNA sense strand
gcgaggcaguggagaugga

SEQ ID NO: 1622849 - RNA, 19 nt, Homo sapiens
  misc_RNA (1)...(19): siRNA sense strand
cagacgaguuugugaagca

SEQ ID NO: 1622850 - RNA, 19 nt, Homo sapiens
  misc_RNA (1)...(19): siRNA sense strand
caagcuacacucuggagaa

SEQ ID NO: 1622851 - RNA, 19 nt, Homo sapiens
  misc_RNA (1)...(19): siRNA sense strand
uuacaagaaagggcuaaua

SEQ ID NO: 1622852 - RNA, 19 nt, Homo sapiens
  misc_RNA (1)...(19): siRNA sense strand
gagacuagcaagaugaaag

SEQ ID NO: 1622853 - RNA, 19 nt, Homo sapiens
  misc_RNA (1)...(19): siRNA sense strand
agacaaagauccccaucaa

SEQ ID NO: 1622854 - RNA, 19 nt, Homo sapiens
  misc_RNA (1)...(19): siRNA sense strand
ggugaaauaccuguugguu

SEQ ID NO: 1622855 - RNA, 19 nt, Homo sapiens
  misc_RNA (1)...(19): siRNA sense strand
cgagucaaucugaaagaaa

SEQ ID NO: 1622856 - RNA, 19 nt, Homo sapiens
  misc_RNA (1)...(19): siRNA sense strand
gaaaucauugaacgagcaa

SEQ ID NO: 1622857 - RNA, 19 nt, Homo sapiens
  misc_RNA (1)...(19): siRNA sense strand
uuaaggaccagacaaagau

SEQ ID NO: 1622858 - RNA, 19 nt, Homo sapiens
  misc_RNA (1)...(19): siRNA sense strand
gggcuaauaaguuggugaa

SEQ ID NO: 1622859 - RNA, 19 nt, Homo sapiens
  misc_RNA (1)...(19): siRNA sense strand
agaaguggcaguaauuaca

SEQ ID NO: 1622860 - RNA, 19 nt, Homo sapiens
  misc_RNA (1)...(19): siRNA sense strand
uagcuuguauauucucauc

SEQ ID NO: 1622861 - RNA, 19 nt, Homo sapiens
  misc_RNA (1)...(19): siRNA sense strand
uaacagcagaccaccugaa

SEQ ID NO: 1622862 - RNA, 19 nt, Homo sapiens
  misc_RNA (1)...(19): siRNA sense strand
gaaguggcaguaauuacag

SEQ ID NO: 1622863 - RNA, 19 nt, Homo sapiens
  misc_RNA (1)...(19): siRNA sense strand
cagaccaccugaauaugag

SEQ ID NO: 1622864 - RNA, 19 nt, Homo sapiens
  misc_RNA (1)...(19): siRNA sense strand
ucgagucaaucugaaagaa

SEQ ID NO: 1622865 - RNA, 19 nt, Homo sapiens
  misc_RNA (1)...(19): siRNA sense strand
gagaaguggcaguaauuac

SEQ ID NO: 1622866 - RNA, 19 nt, Homo sapiens
  misc_RNA (1)...(19): siRNA sense strand
caagaugaaaguccucaag

SEQ ID NO: 1622867 - RNA, 19 nt, Homo sapiens
  misc_RNA (1)...(19): siRNA sense strand
caucagcacucaggaaucc

SEQ ID NO: 1622868 - RNA, 19 nt, Homo sapiens
  misc_RNA (1)...(19): siRNA sense strand
ucauggugauucugagugu

SEQ ID NO: 1622869 - RNA, 19 nt, Homo sapiens
  misc_RNA (1)...(19): siRNA sense strand
ccagugaggcugucaucug

SEQ ID NO: 1622870 - RNA, 19 nt, Homo sapiens
  misc_RNA (1)...(19): siRNA sense strand
gcuuguauauucucaucag

SEQ ID NO: 1622871 - RNA, 19 nt, Homo sapiens
  misc_RNA (1)...(19): siRNA sense strand
gcuccuaccacgagacuag

SEQ ID NO: 1622872 - RNA, 19 nt, Homo sapiens
  misc_RNA (1)...(19): siRNA sense strand
ggaggugcugcgcaaguug

SEQ ID NO: 1622873 - RNA, 19 nt, Homo sapiens
  misc_RNA (1)...(19): siRNA sense strand
acagcagaccaccugaaua

SEQ ID NO: 1622874 - RNA, 19 nt, Homo sapiens
  misc_RNA (1)...(19): siRNA sense strand
gaaauaccuguugguuaag

SEQ ID NO: 1622875 - RNA, 19 nt, Homo sapiens
  misc_RNA (1)...(19): siRNA sense strand
ucauugaacgagcaagcua

SEQ ID NO: 1622876 - RNA, 19 nt, Homo sapiens
  misc_RNA (1)...(19): siRNA sense strand
acaagaaagggcuaauaag

SEQ ID NO: 1622877 - RNA, 19 nt, Homo sapiens
  misc_RNA (1)...(19): siRNA sense strand
aagcuacacucuggagaag

SEQ ID NO: 1622878 - RNA, 19 nt, Homo sapiens
  misc_RNA (1)...(19): siRNA sense strand
augaaaguccucaaguuug

SEQ ID NO: 1622879 - RNA, 19 nt, Homo sapiens
  misc_RNA (1)...(19): siRNA sense strand
gcaagaugaaaguccucaa

SEQ ID NO: 1622880 - RNA, 19 nt, Homo sapiens
  misc_RNA (1)...(19): siRNA sense strand
caaaguagcuuguauauuc

SEQ ID NO: 1622881 - RNA, 19 nt, Homo sapiens
  misc_RNA (1)...(19): siRNA sense strand
ugaaauaccuguugguuaa

SEQ ID NO: 1622882 - RNA, 19 nt, Homo sapiens
  misc_RNA (1)...(19): siRNA sense strand
gagaagauguuucgaguca

SEQ ID NO: 1622883 - RNA, 19 nt, Homo sapiens
  misc_RNA (1)...(19): siRNA sense strand
ggaauccucugcaggcaua

SEQ ID NO: 1622884 - RNA, 19 nt, Homo sapiens
  misc_RNA (1)...(19): siRNA sense strand
guacauccuuggaaucuuu

SEQ ID NO: 1622885 - RNA, 19 nt, Homo sapiens
  misc_RNA (1)...(19): siRNA sense strand
agaaagggcuaauaaguug

SEQ ID NO: 1622886 - RNA, 19 nt, Homo sapiens
  misc_RNA (1)...(19): siRNA sense strand
gaagauguuucgagucaau

SEQ ID NO: 1622887 - RNA, 19 nt, Homo sapiens
  misc_RNA (1)...(19): siRNA sense strand
gaugaaaguccucaaguuu

SEQ ID NO: 1622888 - RNA, 19 nt, Homo sapiens
  misc_RNA (1)...(19): siRNA sense strand
caaaguacauccuuggaau

SEQ ID NO: 1622889 - RNA, 19 nt, Homo sapiens
  misc_RNA (1)...(19): siRNA sense strand
ggagaaaugacuacggaua

SEQ ID NO: 1622890 - RNA, 19 nt, Homo sapiens
  misc_RNA (1)...(19): siRNA sense strand
gcagaccaccugaauauga

SEQ ID NO: 1622891 - RNA, 19 nt, Homo sapiens
  misc_RNA (1)...(19): siRNA sense strand
uuacagauaccgcuaauaa

SEQ ID NO: 1622892 - RNA, 19 nt, Homo sapiens
  misc_RNA (1)...(19): siRNA sense strand
agaaaugacuacggauaua

SEQ ID NO: 1622893 - RNA, 19 nt, Homo sapiens
  misc_RNA (1)...(19): siRNA sense strand
gcuaauaaauugcaguagu

SEQ ID NO: 1622894 - RNA, 19 nt, Homo sapiens
  misc_RNA (1)...(19): siRNA sense strand
gcuaauaaguuggugaaau

SEQ ID NO: 1622895 - RNA, 19 nt, Homo sapiens
  misc_RNA (1)...(19): siRNA sense strand
gagagaaguggcaguaauu

SEQ ID NO: 1622896 - RNA, 19 nt, Homo sapiens
  misc_RNA (1)...(19): siRNA sense strand
gagucaaucugaaagaaau

SEQ ID NO: 1622897 - RNA, 19 nt, Homo sapiens
  misc_RNA (1)...(19): siRNA sense strand
caagaaagggcuaauaagu

SEQ ID NO: 1622898 - RNA, 19 nt, Homo sapiens
  misc_RNA (1)...(19): siRNA sense strand
gcucaucacagacgaguuu

SEQ ID NO: 1622899 - RNA, 19 nt, Homo sapiens
  misc_RNA (1)...(19): siRNA sense strand
gagaaaugacuacggauau

SEQ ID NO: 1622900 - RNA, 19 nt, Homo sapiens
  misc_RNA (1)...(19): siRNA sense strand
cagcagaccaccugaauau

SEQ ID NO: 1622901 - RNA, 19 nt, Homo sapiens
  misc_RNA (1)...(19): siRNA sense strand
agauaccgcuaauaaauug

SEQ ID NO: 1622902 - RNA, 19 nt, Homo sapiens
  misc_RNA (1)...(19): siRNA sense strand
gugaaauaccuguugguua

SEQ ID NO: 1622903 - RNA, 19 nt, Homo sapiens
  misc_RNA (1)...(19): siRNA sense strand
ccacgagacuagcaagaug

SEQ ID NO: 1622904 - RNA, 19 nt, Homo sapiens
  misc_RNA (1)...(19): siRNA sense strand
ugagagaaguggcaguaau

SEQ ID NO: 1622905 - RNA, 19 nt, Homo sapiens
  misc_RNA (1)...(19): siRNA sense strand
ugaugaauauuucccagaa

SEQ ID NO: 1622906 - RNA, 19 nt, Homo sapiens
  misc_RNA (1)...(19): siRNA sense strand
gcuacacucuggagaagau

SEQ ID NO: 1622907 - RNA, 19 nt, Homo sapiens
  misc_RNA (1)...(19): siRNA sense strand
uacaagaaagggcuaauaa

SEQ ID NO: 1622908 - RNA, 19 nt, Homo sapiens
  misc_RNA (1)...(19): siRNA sense strand
caagcugggucuccucaug

SEQ ID NO: 1622909 - RNA, 19 nt, Homo sapiens
  misc_RNA (1)...(19): siRNA sense strand
gaugagagaaguggcagua

SEQ ID NO: 1622910 - RNA, 19 nt, Homo sapiens
  misc_RNA (1)...(19): siRNA sense strand
gcaaaguagcuuguauauu

SEQ ID NO: 1622911 - RNA, 19 nt, Homo sapiens
  misc_RNA (1)...(19): siRNA sense strand
cuaauaaauugcaguaguc

SEQ ID NO: 1622912 - RNA, 19 nt, Homo sapiens
  misc_RNA (1)...(19): siRNA sense strand
cagauaccgcuaauaaauu

SEQ ID NO: 1622913 - RNA, 19 nt, Homo sapiens
  misc_RNA (1)...(19): siRNA sense strand
acagauaccgcuaauaaau

SEQ ID NO: 1622914 - RNA, 19 nt, Homo sapiens
  misc_RNA (1)...(19): siRNA sense strand
agaugaaaguccucaaguu

SEQ ID NO: 1622915 - RNA, 19 nt, Homo sapiens
  misc_RNA (1)...(19): siRNA sense strand
gaaaugacuacggauauag

SEQ ID NO: 1622916 - RNA, 19 nt, Homo sapiens
  misc_RNA (1)...(19): siRNA sense strand
gcagggugcagaagaaaga

SEQ ID NO: 1622917 - RNA, 19 nt, Homo sapiens
  misc_RNA (1)...(19): siRNA sense strand
aagaaagggcuaauaaguu

SEQ ID NO: 1622918 - RNA, 19 nt, Homo sapiens
  misc_RNA (1)...(19): siRNA sense strand
caucaaacgcucagacaug

SEQ ID NO: 1622919 - RNA, 19 nt, Homo sapiens
  misc_RNA (1)...(19): siRNA sense strand
gggaggugcugcgcaaguu

SEQ ID NO: 1622920 - RNA, 19 nt, Homo sapiens
  misc_RNA (1)...(19): siRNA sense strand
guuaaggaccagacaaaga

SEQ ID NO: 1622921 - RNA, 19 nt, Homo sapiens
  misc_RNA (1)...(19): siRNA sense strand
ugaaaguccucaaguuugc

SEQ ID NO: 1622922 - RNA, 19 nt, Homo sapiens
  misc_RNA (1)...(19): siRNA sense strand
caagcuacacucuggagaa

SEQ ID NO: 1622923 - RNA, 19 nt, Homo sapiens
  misc_RNA (1)...(19): siRNA sense strand
gcgaggcaguggagaugga

SEQ ID NO: 1622924 - RNA, 19 nt, Homo sapiens
  misc_RNA (1)...(19): siRNA sense strand
cagacgaguuugugaagca

SEQ ID NO: 1622925 - RNA, 19 nt, Homo sapiens
  misc_RNA (1)...(19): siRNA sense strand
agagaaguggcaguaauua

SEQ ID NO: 1622926 - RNA, 19 nt, Homo sapiens
  misc_RNA (1)...(19): siRNA sense strand
agacaaagauccccaucaa

SEQ ID NO: 1622927 - RNA, 19 nt, Homo sapiens
  misc_RNA (1)...(19): siRNA sense strand
gagacuagcaagaugaaag

SEQ ID NO: 1622928 - RNA, 19 nt, Homo sapiens
  misc_RNA (1)...(19): siRNA sense strand
uuacaagaaagggcuaaua

SEQ ID NO: 1622929 - RNA, 19 nt, Homo sapiens
  misc_RNA (1)...(19): siRNA sense strand
ggugaaauaccuguugguu

SEQ ID NO: 1622930 - RNA, 19 nt, Homo sapiens
  misc_RNA (1)...(19): siRNA sense strand
cgagucaaucugaaagaaa

SEQ ID NO: 1622931 - RNA, 19 nt, Homo sapiens
  misc_RNA (1)...(19): siRNA sense strand
gaaaucauugaacgagcaa

SEQ ID NO: 1622932 - RNA, 19 nt, Homo sapiens
  misc_RNA (1)...(19): siRNA sense strand
uuaaggaccagacaaagau

SEQ ID NO: 1622933 - RNA, 19 nt, Homo sapiens
  misc_RNA (1)...(19): siRNA sense strand
agaaguggcaguaauuaca

SEQ ID NO: 1622934 - RNA, 19 nt, Homo sapiens
  misc_RNA (1)...(19): siRNA sense strand
gggcuaauaaguuggugaa

SEQ ID NO: 1622935 - RNA, 19 nt, Homo sapiens
  misc_RNA (1)...(19): siRNA sense strand
uagcuuguauauucucauc

SEQ ID NO: 1622936 - RNA, 19 nt, Homo sapiens
  misc_RNA (1)...(19): siRNA sense strand
uaacagcagaccaccugaa

SEQ ID NO: 1622937 - RNA, 19 nt, Homo sapiens
  misc_RNA (1)...(19): siRNA sense strand
ucgagucaaucugaaagaa

SEQ ID NO: 1622938 - RNA, 19 nt, Homo sapiens
  misc_RNA (1)...(19): siRNA sense strand
gaaguggcaguaauuacag

SEQ ID NO: 1622939 - RNA, 19 nt, Homo sapiens
  misc_RNA (1)...(19): siRNA sense strand
cagaccaccugaauaugag

SEQ ID NO: 1622940 - RNA, 19 nt, Homo sapiens
  misc_RNA (1)...(19): siRNA sense strand
caucagcacucaggaaucc

SEQ ID NO: 1622941 - RNA, 19 nt, Homo sapiens
  misc_RNA (1)...(19): siRNA sense strand
caagaugaaaguccucaag

SEQ ID NO: 1622942 - RNA, 19 nt, Homo sapiens
  misc_RNA (1)...(19): siRNA sense strand
gagaaguggcaguaauuac

SEQ ID NO: 1622943 - RNA, 19 nt, Homo sapiens
  misc_RNA (1)...(19): siRNA sense strand
ucauggugauucugagugu

SEQ ID NO: 1622944 - RNA, 19 nt, Homo sapiens
  misc_RNA (1)...(19): siRNA sense strand
ccauggagccaaaguacau

SEQ ID NO: 1622945 - RNA, 19 nt, Homo sapiens
  misc_RNA (1)...(19): siRNA sense strand
ccagugaggcugucaucug

SEQ ID NO: 1622946 - RNA, 19 nt, Homo sapiens
  misc_RNA (1)...(19): siRNA sense strand
gcuuguauauucucaucag

SEQ ID NO: 1622947 - RNA, 19 nt, Homo sapiens
  misc_RNA (1)...(19): siRNA sense strand
ccgcuaauaaauugcagua

SEQ ID NO: 1622948 - RNA, 19 nt, Homo sapiens
  misc_RNA (1)...(19): siRNA sense strand
gcuccuaccacgagacuag

SEQ ID NO: 1622949 - RNA, 19 nt, Homo sapiens
  misc_RNA (1)...(19): siRNA sense strand
guuuacagauaccgcuaau

SEQ ID NO: 1622950 - RNA, 19 nt, Homo sapiens
  misc_RNA (1)...(19): siRNA sense strand
aggcaguuauggccaauca

SEQ ID NO: 1622951 - RNA, 19 nt, Homo sapiens
  misc_RNA (1)...(19): siRNA sense strand
caguaguccuucccaugga

SEQ ID NO: 1622952 - RNA, 19 nt, Homo sapiens
  misc_RNA (1)...(19): siRNA sense strand
ggaggugcugcgcaaguug

SEQ ID NO: 1622953 - RNA, 19 nt, Homo sapiens
  misc_RNA (1)...(19): siRNA sense strand
cagcugagggugucaugug

SEQ ID NO: 1622954 - RNA, 19 nt, Homo sapiens
  misc_RNA (1)...(19): siRNA sense strand
acagcagaccaccugaaua

SEQ ID NO: 1622955 - RNA, 19 nt, Homo sapiens
  misc_RNA (1)...(19): siRNA sense strand
gaaauaccuguugguuaag

SEQ ID NO: 1622956 - RNA, 19 nt, Homo sapiens
  misc_RNA (1)...(19): siRNA sense strand
uacagauaccgcuaauaaa

SEQ ID NO: 1622957 - RNA, 19 nt, Homo sapiens
  misc_RNA (1)...(19): siRNA sense strand
ucauugaacgagcaagcua

SEQ ID NO: 1622958 - RNA, 19 nt, Homo sapiens
  misc_RNA (1)...(19): siRNA sense strand
caaggcaguuauggccaau

SEQ ID NO: 1622959 - RNA, 19 nt, Homo sapiens
  misc_RNA (1)...(19): siRNA sense strand
auaaauugcaguaguccuu

SEQ ID NO: 1622960 - RNA, 19 nt, Homo sapiens
  misc_RNA (1)...(19): siRNA sense strand
acaagaaagggcuaauaag

SEQ ID NO: 1622961 - RNA, 19 nt, Homo sapiens
  misc_RNA (1)...(19): siRNA sense strand
aagcuacacucuggagaag

SEQ ID NO: 1622962 - RNA, 19 nt, Homo sapiens
  misc_RNA (1)...(19): siRNA sense strand
augaaaguccucaaguuug

SEQ ID NO: 1622963 - RNA, 19 nt, Homo sapiens
  misc_RNA (1)...(19): siRNA sense strand
gcaagaugaaaguccucaa

SEQ ID NO: 1622964 - RNA, 19 nt, Homo sapiens
  misc_RNA (1)...(19): siRNA sense strand
caaaguagcuuguauauuc

SEQ ID NO: 1622965 - RNA, 19 nt, Homo sapiens
  misc_RNA (1)...(19): siRNA sense strand
ugaaauaccuguugguuaa

SEQ ID NO: 1622966 - RNA, 19 nt, Homo sapiens
  misc_RNA (1)...(19): siRNA sense strand
gagaagauguuucgaguca

SEQ ID NO: 1622967 - RNA, 19 nt, Homo sapiens
  misc_RNA (1)...(19): siRNA sense strand
ggaauccucugcaggcaua

SEQ ID NO: 1622968 - RNA, 19 nt, Homo sapiens
  misc_RNA (1)...(19): siRNA sense strand
agaaagggcuaauaaguug

SEQ ID NO: 1622969 - RNA, 19 nt, Homo sapiens
  misc_RNA (1)...(19): siRNA sense strand
gaagauguuucgagucaau

SEQ ID NO: 1622970 - RNA, 19 nt, Homo sapiens
  misc_RNA (1)...(19): siRNA sense strand
gaugaaaguccucaaguuu

SEQ ID NO: 1622971 - RNA, 19 nt, Homo sapiens
  misc_RNA (1)...(19): siRNA sense strand
ggagaaaugacuacggaua

SEQ ID NO: 1622972 - RNA, 19 nt, Homo sapiens
  misc_RNA (1)...(19): siRNA sense strand
gcagaccaccugaauauga

SEQ ID NO: 1622973 - RNA, 19 nt, Homo sapiens
  misc_RNA (1)...(19): siRNA sense strand
agaaaugacuacggauaua

SEQ ID NO: 1622974 - RNA, 19 nt, Homo sapiens
  misc_RNA (1)...(19): siRNA sense strand
gcuaauaaguuggugaaau

SEQ ID NO: 1622975 - RNA, 19 nt, Homo sapiens
  misc_RNA (1)...(19): siRNA sense strand
gagagaaguggcaguaauu

SEQ ID NO: 1622976 - RNA, 19 nt, Homo sapiens
  misc_RNA (1)...(19): siRNA sense strand
gagucaaucugaaagaaau

SEQ ID NO: 1622977 - RNA, 19 nt, Homo sapiens
  misc_RNA (1)...(19): siRNA sense strand
caagaaagggcuaauaagu

SEQ ID NO: 1622978 - RNA, 19 nt, Homo sapiens
  misc_RNA (1)...(19): siRNA sense strand
gcucaucacagacgaguuu

SEQ ID NO: 1622979 - RNA, 19 nt, Homo sapiens
  misc_RNA (1)...(19): siRNA sense strand
gagaaaugacuacggauau

SEQ ID NO: 1622980 - RNA, 19 nt, Homo sapiens
  misc_RNA (1)...(19): siRNA sense strand
cagcagaccaccugaauau

SEQ ID NO: 1622981 - RNA, 19 nt, Homo sapiens
  misc_RNA (1)...(19): siRNA sense strand
gugaaauaccuguugguua

SEQ ID NO: 1622982 - RNA, 19 nt, Homo sapiens
  misc_RNA (1)...(19): siRNA sense strand
ccacgagacuagcaagaug

SEQ ID NO: 1622983 - RNA, 19 nt, Homo sapiens
  misc_RNA (1)...(19): siRNA sense strand
ugaugaauauuucccagaa

SEQ ID NO: 1622984 - RNA, 19 nt, Homo sapiens
  misc_RNA (1)...(19): siRNA sense strand
ugagagaaguggcaguaau

SEQ ID NO: 1622985 - RNA, 19 nt, Homo sapiens
  misc_RNA (1)...(19): siRNA sense strand
gcuacacucuggagaagau

SEQ ID NO: 1622986 - RNA, 19 nt, Homo sapiens
  misc_RNA (1)...(19): siRNA sense strand
uacaagaaagggcuaauaa

SEQ ID NO: 1622987 - RNA, 19 nt, Homo sapiens
  misc_RNA (1)...(19): siRNA sense strand
gaugagagaaguggcagua

SEQ ID NO: 1622988 - RNA, 19 nt, Homo sapiens
  misc_RNA (1)...(19): siRNA sense strand
caagcugggucuccucaug

SEQ ID NO: 1622989 - RNA, 19 nt, Homo sapiens
  misc_RNA (1)...(19): siRNA sense strand
gcaaaguagcuuguauauu

SEQ ID NO: 1622990 - RNA, 19 nt, Homo sapiens
  misc_RNA (1)...(19): siRNA sense strand
gaaaugacuacggauauag

SEQ ID NO: 1622991 - RNA, 19 nt, Homo sapiens
  misc_RNA (1)...(19): siRNA sense strand
gcagggugcagaagaaaga

SEQ ID NO: 1622992 - RNA, 19 nt, Homo sapiens
  misc_RNA (1)...(19): siRNA sense strand
agaugaaaguccucaaguu

SEQ ID NO: 1622993 - RNA, 19 nt, Homo sapiens
  misc_RNA (1)...(19): siRNA sense strand
aagaaagggcuaauaaguu

SEQ ID NO: 1622994 - RNA, 19 nt, Homo sapiens
  misc_RNA (1)...(19): siRNA sense strand
caucaaacgcucagacaug

SEQ ID NO: 1622995 - RNA, 19 nt, Homo sapiens
  misc_RNA (1)...(19): siRNA sense strand
gggaggugcugcgcaaguu

SEQ ID NO: 1622996 - RNA, 19 nt, Homo sapiens
  misc_RNA (1)...(19): siRNA sense strand
guuaaggaccagacaaaga

SEQ ID NO: 1622997 - RNA, 19 nt, Homo sapiens
  misc_RNA (1)...(19): siRNA sense strand
ugaaaguccucaaguuugc

SEQ ID NO: 1622998 - RNA, 19 nt, Homo sapiens
  misc_RNA (1)...(19): siRNA sense strand
agagaaguggcaguaauua

SEQ ID NO: 1622999 - RNA, 19 nt, Homo sapiens
  misc_RNA (1)...(19): siRNA sense strand
gcgaggcaguggagaugga

SEQ ID NO: 1623000 - RNA, 19 nt, Homo sapiens
  misc_RNA (1)...(19): siRNA sense strand
cagacgaguuugugaagca

SEQ ID NO: 1623001 - RNA, 19 nt, Homo sapiens
  misc_RNA (1)...(19): siRNA sense strand
caagcuacacucuggagaa

SEQ ID NO: 1623002 - RNA, 19 nt, Homo sapiens
  misc_RNA (1)...(19): siRNA sense strand
uuacaagaaagggcuaaua

SEQ ID NO: 1623003 - RNA, 19 nt, Homo sapiens
  misc_RNA (1)...(19): siRNA sense strand
gagacuagcaagaugaaag

SEQ ID NO: 1623004 - RNA, 19 nt, Homo sapiens
  misc_RNA (1)...(19): siRNA sense strand
agacaaagauccccaucaa

SEQ ID NO: 1623005 - RNA, 19 nt, Homo sapiens
  misc_RNA (1)...(19): siRNA sense strand
ggugaaauaccuguugguu

SEQ ID NO: 1623006 - RNA, 19 nt, Homo sapiens
  misc_RNA (1)...(19): siRNA sense strand
cgagucaaucugaaagaaa

SEQ ID NO: 1623007 - RNA, 19 nt, Homo sapiens
  misc_RNA (1)...(19): siRNA sense strand
gaaaucauugaacgagcaa

SEQ ID NO: 1623008 - RNA, 19 nt, Homo sapiens
  misc_RNA (1)...(19): siRNA sense strand
uuaaggaccagacaaagau

SEQ ID NO: 1623009 - RNA, 19 nt, Homo sapiens
  misc_RNA (1)...(19): siRNA sense strand
gggcuaauaaguuggugaa

SEQ ID NO: 1623010 - RNA, 19 nt, Homo sapiens
  misc_RNA (1)...(19): siRNA sense strand
agaaguggcaguaauuaca

SEQ ID NO: 1623011 - RNA, 19 nt, Homo sapiens
  misc_RNA (1)...(19): siRNA sense strand
uagcuuguauauucucauc

SEQ ID NO: 1623012 - RNA, 19 nt, Homo sapiens
  misc_RNA (1)...(19): siRNA sense strand
uaacagcagaccaccugaa

SEQ ID NO: 1623013 - RNA, 19 nt, Homo sapiens
  misc_RNA (1)...(19): siRNA sense strand
gaaguggcaguaauuacag

SEQ ID NO: 1623014 - RNA, 19 nt, Homo sapiens
  misc_RNA (1)...(19): siRNA sense strand
cagaccaccugaauaugag

SEQ ID NO: 1623015 - RNA, 19 nt, Homo sapiens
  misc_RNA (1)...(19): siRNA sense strand
ucgagucaaucugaaagaa

SEQ ID NO: 1623016 - RNA, 19 nt, Homo sapiens
  misc_RNA (1)...(19): siRNA sense strand
gagaaguggcaguaauuac

SEQ ID NO: 1623017 - RNA, 19 nt, Homo sapiens
  misc_RNA (1)...(19): siRNA sense strand
caagaugaaaguccucaag

SEQ ID NO: 1623018 - RNA, 19 nt, Homo sapiens
  misc_RNA (1)...(19): siRNA sense strand
caucagcacucaggaaucc

SEQ ID NO: 1623019 - RNA, 19 nt, Homo sapiens
  misc_RNA (1)...(19): siRNA sense strand
ucauggugauucugagugu

SEQ ID NO: 1623020 - RNA, 19 nt, Homo sapiens
  misc_RNA (1)...(19): siRNA sense strand
ccagugaggcugucaucug

SEQ ID NO: 1623021 - RNA, 19 nt, Homo sapiens
  misc_RNA (1)...(19): siRNA sense strand
gcuuguauauucucaucag

SEQ ID NO: 1623022 - RNA, 19 nt, Homo sapiens
  misc_RNA (1)...(19): siRNA sense strand
gcuccuaccacgagacuag

SEQ ID NO: 1623023 - RNA, 19 nt, Homo sapiens
  misc_RNA (1)...(19): siRNA sense strand
ggaggugcugcgcaaguug

SEQ ID NO: 1623024 - RNA, 19 nt, Homo sapiens
  misc_RNA (1)...(19): siRNA sense strand
acagcagaccaccugaaua

SEQ ID NO: 1623025 - RNA, 19 nt, Homo sapiens
  misc_RNA (1)...(19): siRNA sense strand
gaaauaccuguugguuaag

SEQ ID NO: 1623026 - RNA, 19 nt, Homo sapiens
  misc_RNA (1)...(19): siRNA sense strand
ucauugaacgagcaagcua

SEQ ID NO: 1623027 - RNA, 19 nt, Homo sapiens
  misc_RNA (1)...(19): siRNA sense strand
acaagaaagggcuaauaag

SEQ ID NO: 1623028 - RNA, 19 nt, Homo sapiens
  misc_RNA (1)...(19): siRNA sense strand
aagcuacacucuggagaag

SEQ ID NO: 1623029 - RNA, 19 nt, Homo sapiens
  misc_RNA (1)...(19): siRNA sense strand
augaaaguccucaaguuug

SEQ ID NO: 1623030 - RNA, 19 nt, Homo sapiens
  misc_RNA (1)...(19): siRNA sense strand
gcaagaugaaaguccucaa

SEQ ID NO: 1623031 - RNA, 19 nt, Homo sapiens
  misc_RNA (1)...(19): siRNA sense strand
caaaguagcuuguauauuc

SEQ ID NO: 1623032 - RNA, 19 nt, Homo sapiens
  misc_RNA (1)...(19): siRNA sense strand
ugaaauaccuguugguuaa

SEQ ID NO: 1623033 - RNA, 19 nt, Homo sapiens
  misc_RNA (1)...(19): siRNA sense strand
gagaagauguuucgaguca

SEQ ID NO: 1623034 - RNA, 19 nt, Homo sapiens
  misc_RNA (1)...(19): siRNA sense strand
ggaauccucugcaggcaua

SEQ ID NO: 1623035 - RNA, 19 nt, Homo sapiens
  misc_RNA (1)...(19): siRNA sense strand
guacauccuuggaaucuuu

SEQ ID NO: 1623036 - RNA, 19 nt, Homo sapiens
  misc_RNA (1)...(19): siRNA sense strand
agaaagggcuaauaaguug

SEQ ID NO: 1623037 - RNA, 19 nt, Homo sapiens
  misc_RNA (1)...(19): siRNA sense strand
gaagauguuucgagucaau

SEQ ID NO: 1623038 - RNA, 19 nt, Homo sapiens
  misc_RNA (1)...(19): siRNA sense strand
gaugaaaguccucaaguuu

SEQ ID NO: 1623039 - RNA, 19 nt, Homo sapiens
  misc_RNA (1)...(19): siRNA sense strand
caaaguacauccuuggaau

SEQ ID NO: 1623040 - RNA, 19 nt, Homo sapiens
  misc_RNA (1)...(19): siRNA sense strand
ggagaaaugacuacggaua

SEQ ID NO: 1623041 - RNA, 19 nt, Homo sapiens
  misc_RNA (1)...(19): siRNA sense strand
gcagaccaccugaauauga

SEQ ID NO: 1623042 - RNA, 19 nt, Homo sapiens
  misc_RNA (1)...(19): siRNA sense strand
uuacagauaccgcuaauaa

SEQ ID NO: 1623043 - RNA, 19 nt, Homo sapiens
  misc_RNA (1)...(19): siRNA sense strand
agaaaugacuacggauaua

SEQ ID NO: 1623044 - RNA, 19 nt, Homo sapiens
  misc_RNA (1)...(19): siRNA sense strand
gcuaauaaauugcaguagu

SEQ ID NO: 1623045 - RNA, 19 nt, Homo sapiens
  misc_RNA (1)...(19): siRNA sense strand
gcuaauaaguuggugaaau

SEQ ID NO: 1623046 - RNA, 19 nt, Homo sapiens
  misc_RNA (1)...(19): siRNA sense strand
gagagaaguggcaguaauu

SEQ ID NO: 1623047 - RNA, 19 nt, Homo sapiens
  misc_RNA (1)...(19): siRNA sense strand
gagucaaucugaaagaaau

SEQ ID NO: 1623048 - RNA, 19 nt, Homo sapiens
  misc_RNA (1)...(19): siRNA sense strand
caagaaagggcuaauaagu

SEQ ID NO: 1623049 - RNA, 19 nt, Homo sapiens
  misc_RNA (1)...(19): siRNA sense strand
gcucaucacagacgaguuu

SEQ ID NO: 1623050 - RNA, 19 nt, Homo sapiens
  misc_RNA (1)...(19): siRNA sense strand
gagaaaugacuacggauau

SEQ ID NO: 1623051 - RNA, 19 nt, Homo sapiens
  misc_RNA (1)...(19): siRNA sense strand
cagcagaccaccugaauau

SEQ ID NO: 1623052 - RNA, 19 nt, Homo sapiens
  misc_RNA (1)...(19): siRNA sense strand
agauaccgcuaauaaauug

SEQ ID NO: 1623053 - RNA, 19 nt, Homo sapiens
  misc_RNA (1)...(19): siRNA sense strand
gugaaauaccuguugguua

SEQ ID NO: 1623054 - RNA, 19 nt, Homo sapiens
  misc_RNA (1)...(19): siRNA sense strand
ccacgagacuagcaagaug

SEQ ID NO: 1623055 - RNA, 19 nt, Homo sapiens
  misc_RNA (1)...(19): siRNA sense strand
ugagagaaguggcaguaau

SEQ ID NO: 1623056 - RNA, 19 nt, Homo sapiens
  misc_RNA (1)...(19): siRNA sense strand
ugaugaauauuucccagaa

SEQ ID NO: 1623057 - RNA, 19 nt, Homo sapiens
  misc_RNA (1)...(19): siRNA sense strand
gcuacacucuggagaagau

SEQ ID NO: 1623058 - RNA, 19 nt, Homo sapiens
  misc_RNA (1)...(19): siRNA sense strand
uacaagaaagggcuaauaa

SEQ ID NO: 1623059 - RNA, 19 nt, Homo sapiens
  misc_RNA (1)...(19): siRNA sense strand
caagcugggucuccucaug

SEQ ID NO: 1623060 - RNA, 19 nt, Homo sapiens
  misc_RNA (1)...(19): siRNA sense strand
gaugagagaaguggcagua

SEQ ID NO: 1623061 - RNA, 19 nt, Homo sapiens
  misc_RNA (1)...(19): siRNA sense strand
gcaaaguagcuuguauauu

SEQ ID NO: 1623062 - RNA, 19 nt, Homo sapiens
  misc_RNA (1)...(19): siRNA sense strand
cuaauaaauugcaguaguc

SEQ ID NO: 1623063 - RNA, 19 nt, Homo sapiens
  misc_RNA (1)...(19): siRNA sense strand
cagauaccgcuaauaaauu

SEQ ID NO: 1623064 - RNA, 19 nt, Homo sapiens
  misc_RNA (1)...(19): siRNA sense strand
acagauaccgcuaauaaau

SEQ ID NO: 1623065 - RNA, 19 nt, Homo sapiens
  misc_RNA (1)...(19): siRNA sense strand
agaugaaaguccucaaguu

SEQ ID NO: 1623066 - RNA, 19 nt, Homo sapiens
  misc_RNA (1)...(19): siRNA sense strand
gaaaugacuacggauauag

SEQ ID NO: 1623067 - RNA, 19 nt, Homo sapiens
  misc_RNA (1)...(19): siRNA sense strand
gcagggugcagaagaaaga

SEQ ID NO: 1623068 - RNA, 19 nt, Homo sapiens
  misc_RNA (1)...(19): siRNA sense strand
aagaaagggcuaauaaguu

SEQ ID NO: 1623069 - RNA, 19 nt, Homo sapiens
  misc_RNA (1)...(19): siRNA sense strand
caucaaacgcucagacaug

SEQ ID NO: 1623070 - RNA, 19 nt, Homo sapiens
  misc_RNA (1)...(19): siRNA sense strand
gggaggugcugcgcaaguu

SEQ ID NO: 1623071 - RNA, 19 nt, Homo sapiens
  misc_RNA (1)...(19): siRNA sense strand
guuaaggaccagacaaaga

SEQ ID NO: 1623072 - RNA, 19 nt, Homo sapiens
  misc_RNA (1)...(19): siRNA sense strand
ugaaaguccucaaguuugc

SEQ ID NO: 1623073 - RNA, 19 nt, Homo sapiens
  misc_RNA (1)...(19): siRNA sense strand
caagcuacacucuggagaa

SEQ ID NO: 1623074 - RNA, 19 nt, Homo sapiens
  misc_RNA (1)...(19): siRNA sense strand
gcgaggcaguggagaugga

SEQ ID NO: 1623075 - RNA, 19 nt, Homo sapiens
  misc_RNA (1)...(19): siRNA sense strand
cagacgaguuugugaagca

SEQ ID NO: 1623076 - RNA, 19 nt, Homo sapiens
  misc_RNA (1)...(19): siRNA sense strand
agagaaguggcaguaauua

SEQ ID NO: 1623077 - RNA, 19 nt, Homo sapiens
  misc_RNA (1)...(19): siRNA sense strand
agacaaagauccccaucaa

SEQ ID NO: 1623078 - RNA, 19 nt, Homo sapiens
  misc_RNA (1)...(19): siRNA sense strand
gagacuagcaagaugaaag

SEQ ID NO: 1623079 - RNA, 19 nt, Homo sapiens
  misc_RNA (1)...(19): siRNA sense strand
uuacaagaaagggcuaaua

SEQ ID NO: 1623080 - RNA, 19 nt, Homo sapiens
  misc_RNA (1)...(19): siRNA sense strand
ggugaaauaccuguugguu

SEQ ID NO: 1623081 - RNA, 19 nt, Homo sapiens
  misc_RNA (1)...(19): siRNA sense strand
cgagucaaucugaaagaaa

SEQ ID NO: 1623082 - RNA, 19 nt, Homo sapiens
  misc_RNA (1)...(19): siRNA sense strand
gaaaucauugaacgagcaa

SEQ ID NO: 1623083 - RNA, 19 nt, Homo sapiens
  misc_RNA (1)...(19): siRNA sense strand
uuaaggaccagacaaagau

SEQ ID NO: 1623084 - RNA, 19 nt, Homo sapiens
  misc_RNA (1)...(19): siRNA sense strand
agaaguggcaguaauuaca

SEQ ID NO: 1623085 - RNA, 19 nt, Homo sapiens
  misc_RNA (1)...(19): siRNA sense strand
gggcuaauaaguuggugaa

SEQ ID NO: 1623086 - RNA, 19 nt, Homo sapiens
  misc_RNA (1)...(19): siRNA sense strand
uagcuuguauauucucauc

SEQ ID NO: 1623087 - RNA, 19 nt, Homo sapiens
  misc_RNA (1)...(19): siRNA sense strand
uaacagcagaccaccugaa

SEQ ID NO: 1623088 - RNA, 19 nt, Homo sapiens
  misc_RNA (1)...(19): siRNA sense strand
ucgagucaaucugaaagaa

SEQ ID NO: 1623089 - RNA, 19 nt, Homo sapiens
  misc_RNA (1)...(19): siRNA sense strand
gaaguggcaguaauuacag

SEQ ID NO: 1623090 - RNA, 19 nt, Homo sapiens
  misc_RNA (1)...(19): siRNA sense strand
cagaccaccugaauaugag

SEQ ID NO: 1623091 - RNA, 19 nt, Homo sapiens
  misc_RNA (1)...(19): siRNA sense strand
caucagcacucaggaaucc

SEQ ID NO: 1623092 - RNA, 19 nt, Homo sapiens
  misc_RNA (1)...(19): siRNA sense strand
caagaugaaaguccucaag

SEQ ID NO: 1623093 - RNA, 19 nt, Homo sapiens
  misc_RNA (1)...(19): siRNA sense strand
gagaaguggcaguaauuac

SEQ ID NO: 1623094 - RNA, 19 nt, Homo sapiens
  misc_RNA (1)...(19): siRNA sense strand
ucauggugauucugagugu

SEQ ID NO: 1623095 - RNA, 19 nt, Homo sapiens
  misc_RNA (1)...(19): siRNA sense strand
ccauggagccaaaguacau

SEQ ID NO: 1623096 - RNA, 19 nt, Homo sapiens
  misc_RNA (1)...(19): siRNA sense strand
ccagugaggcugucaucug

SEQ ID NO: 1623097 - RNA, 19 nt, Homo sapiens
  misc_RNA (1)...(19): siRNA sense strand
gcuuguauauucucaucag

SEQ ID NO: 1623098 - RNA, 19 nt, Homo sapiens
  misc_RNA (1)...(19): siRNA sense strand
ccgcuaauaaauugcagua

SEQ ID NO: 1623099 - RNA, 19 nt, Homo sapiens
  misc_RNA (1)...(19): siRNA sense strand
gcuccuaccacgagacuag

SEQ ID NO: 1623100 - RNA, 19 nt, Homo sapiens
  misc_RNA (1)...(19): siRNA sense strand
guuuacagauaccgcuaau

SEQ ID NO: 1623101 - RNA, 19 nt, Homo sapiens
  misc_RNA (1)...(19): siRNA sense strand
aggcaguuauggccaauca

SEQ ID NO: 1623102 - RNA, 19 nt, Homo sapiens
  misc_RNA (1)...(19): siRNA sense strand
caguaguccuucccaugga

SEQ ID NO: 1623103 - RNA, 19 nt, Homo sapiens
  misc_RNA (1)...(19): siRNA sense strand
ggaggugcugcgcaaguug

SEQ ID NO: 1623104 - RNA, 19 nt, Homo sapiens
  misc_RNA (1)...(19): siRNA sense strand
cagcugagggugucaugug

SEQ ID NO: 1623105 - RNA, 19 nt, Homo sapiens
  misc_RNA (1)...(19): siRNA sense strand
acagcagaccaccugaaua

SEQ ID NO: 1623106 - RNA, 19 nt, Homo sapiens
  misc_RNA (1)...(19): siRNA sense strand
gaaauaccuguugguuaag

SEQ ID NO: 1623107 - RNA, 19 nt, Homo sapiens
  misc_RNA (1)...(19): siRNA sense strand
uacagauaccgcuaauaaa

SEQ ID NO: 1623108 - RNA, 19 nt, Homo sapiens
  misc_RNA (1)...(19): siRNA sense strand
ucauugaacgagcaagcua

SEQ ID NO: 1623109 - RNA, 19 nt, Homo sapiens
  misc_RNA (1)...(19): siRNA sense strand
caaggcaguuauggccaau

SEQ ID NO: 1623110 - RNA, 19 nt, Homo sapiens
  misc_RNA (1)...(19): siRNA sense strand
auaaauugcaguaguccuu

SEQ ID NO: 1623111 - RNA, 19 nt, Homo sapiens
  misc_RNA (1)...(19): siRNA sense strand
acaagaaagggcuaauaag

SEQ ID NO: 1623112 - RNA, 19 nt, Homo sapiens
  misc_RNA (1)...(19): siRNA sense strand
aagcuacacucuggagaag

SEQ ID NO: 1623113 - RNA, 19 nt, Homo sapiens
  misc_RNA (1)...(19): siRNA sense strand
augaaaguccucaaguuug

SEQ ID NO: 1623114 - RNA, 19 nt, Homo sapiens
  misc_RNA (1)...(19): siRNA sense strand
gcaagaugaaaguccucaa

SEQ ID NO: 1623115 - RNA, 19 nt, Homo sapiens
  misc_RNA (1)...(19): siRNA sense strand
caaaguagcuuguauauuc

SEQ ID NO: 1623116 - RNA, 19 nt, Homo sapiens
  misc_RNA (1)...(19): siRNA sense strand
ugaaauaccuguugguuaa

SEQ ID NO: 1623117 - RNA, 19 nt, Homo sapiens
  misc_RNA (1)...(19): siRNA sense strand
gagaagauguuucgaguca

SEQ ID NO: 1623118 - RNA, 19 nt, Homo sapiens
  misc_RNA (1)...(19): siRNA sense strand
ggaauccucugcaggcaua

SEQ ID NO: 1623119 - RNA, 19 nt, Homo sapiens
  misc_RNA (1)...(19): siRNA sense strand
guacauccuuggaaucuuu

SEQ ID NO: 1623120 - RNA, 19 nt, Homo sapiens
  misc_RNA (1)...(19): siRNA sense strand
agaaagggcuaauaaguug

SEQ ID NO: 1623121 - RNA, 19 nt, Homo sapiens
  misc_RNA (1)...(19): siRNA sense strand
gaagauguuucgagucaau

SEQ ID NO: 1623122 - RNA, 19 nt, Homo sapiens
  misc_RNA (1)...(19): siRNA sense strand
gaugaaaguccucaaguuu

SEQ ID NO: 1623123 - RNA, 19 nt, Homo sapiens
  misc_RNA (1)...(19): siRNA sense strand
caaaguacauccuuggaau

SEQ ID NO: 1623124 - RNA, 19 nt, Homo sapiens
  misc_RNA (1)...(19): siRNA sense strand
ggagaaaugacuacggaua

SEQ ID NO: 1623125 - RNA, 19 nt, Homo sapiens
  misc_RNA (1)...(19): siRNA sense strand
gcagaccaccugaauauga

SEQ ID NO: 1623126 - RNA, 19 nt, Homo sapiens
  misc_RNA (1)...(19): siRNA sense strand
uuacagauaccgcuaauaa

SEQ ID NO: 1623127 - RNA, 19 nt, Homo sapiens
  misc_RNA (1)...(19): siRNA sense strand
agaaaugacuacggauaua

SEQ ID NO: 1623128 - RNA, 19 nt, Homo sapiens
  misc_RNA (1)...(19): siRNA sense strand
gcuaauaaauugcaguagu

SEQ ID NO: 1623129 - RNA, 19 nt, Homo sapiens
  misc_RNA (1)...(19): siRNA sense strand
gcuaauaaguuggugaaau

SEQ ID NO: 1623130 - RNA, 19 nt, Homo sapiens
  misc_RNA (1)...(19): siRNA sense strand
gagagaaguggcaguaauu

SEQ ID NO: 1623131 - RNA, 19 nt, Homo sapiens
  misc_RNA (1)...(19): siRNA sense strand
gagucaaucugaaagaaau

SEQ ID NO: 1623132 - RNA, 19 nt, Homo sapiens
  misc_RNA (1)...(19): siRNA sense strand
caagaaagggcuaauaagu

SEQ ID NO: 1623133 - RNA, 19 nt, Homo sapiens
  misc_RNA (1)...(19): siRNA sense strand
gcucaucacagacgaguuu

SEQ ID NO: 1623134 - RNA, 19 nt, Homo sapiens
  misc_RNA (1)...(19): siRNA sense strand
gagaaaugacuacggauau

SEQ ID NO: 1623135 - RNA, 19 nt, Homo sapiens
  misc_RNA (1)...(19): siRNA sense strand
cagcagaccaccugaauau

SEQ ID NO: 1623136 - RNA, 19 nt, Homo sapiens
  misc_RNA (1)...(19): siRNA sense strand
agauaccgcuaauaaauug

SEQ ID NO: 1623137 - RNA, 19 nt, Homo sapiens
  misc_RNA (1)...(19): siRNA sense strand
gugaaauaccuguugguua

SEQ ID NO: 1623138 - RNA, 19 nt, Homo sapiens
  misc_RNA (1)...(19): siRNA sense strand
ccacgagacuagcaagaug

SEQ ID NO: 1623139 - RNA, 19 nt, Homo sapiens
  misc_RNA (1)...(19): siRNA sense strand
ugagagaaguggcaguaau

SEQ ID NO: 1623140 - RNA, 19 nt, Homo sapiens
  misc_RNA (1)...(19): siRNA sense strand
ugaugaauauuucccagaa

SEQ ID NO: 1623141 - RNA, 19 nt, Homo sapiens
  misc_RNA (1)...(19): siRNA sense strand
gcuacacucuggagaagau

SEQ ID NO: 1623142 - RNA, 19 nt, Homo sapiens
  misc_RNA (1)...(19): siRNA sense strand
uacaagaaagggcuaauaa

SEQ ID NO: 1623143 - RNA, 19 nt, Homo sapiens
  misc_RNA (1)...(19): siRNA sense strand
caagcugggucuccucaug

SEQ ID NO: 1623144 - RNA, 19 nt, Homo sapiens
  misc_RNA (1)...(19): siRNA sense strand
gaugagagaaguggcagua

SEQ ID NO: 1623145 - RNA, 19 nt, Homo sapiens
  misc_RNA (1)...(19): siRNA sense strand
gcaaaguagcuuguauauu

SEQ ID NO: 1623146 - RNA, 19 nt, Homo sapiens
  misc_RNA (1)...(19): siRNA sense strand
cuaauaaauugcaguaguc

SEQ ID NO: 1623147 - RNA, 19 nt, Homo sapiens
  misc_RNA (1)...(19): siRNA sense strand
cagauaccgcuaauaaauu

SEQ ID NO: 1623148 - RNA, 19 nt, Homo sapiens
  misc_RNA (1)...(19): siRNA sense strand
acagauaccgcuaauaaau

SEQ ID NO: 1623149 - RNA, 19 nt, Homo sapiens
  misc_RNA (1)...(19): siRNA sense strand
agaugaaaguccucaaguu

SEQ ID NO: 1623150 - RNA, 19 nt, Homo sapiens
  misc_RNA (1)...(19): siRNA sense strand
gaaaugacuacggauauag

SEQ ID NO: 1623151 - RNA, 19 nt, Homo sapiens
  misc_RNA (1)...(19): siRNA sense strand
gcagggugcagaagaaaga

SEQ ID NO: 1623152 - RNA, 19 nt, Homo sapiens
  misc_RNA (1)...(19): siRNA sense strand
aagaaagggcuaauaaguu

SEQ ID NO: 1623153 - RNA, 19 nt, Homo sapiens
  misc_RNA (1)...(19): siRNA sense strand
caucaaacgcucagacaug

SEQ ID NO: 1623154 - RNA, 19 nt, Homo sapiens
  misc_RNA (1)...(19): siRNA sense strand
gggaggugcugcgcaaguu

SEQ ID NO: 1623155 - RNA, 19 nt, Homo sapiens
  misc_RNA (1)...(19): siRNA sense strand
guuaaggaccagacaaaga

SEQ ID NO: 1623156 - RNA, 19 nt, Homo sapiens
  misc_RNA (1)...(19): siRNA sense strand
ugaaaguccucaaguuugc

SEQ ID NO: 1623157 - RNA, 19 nt, Homo sapiens
  misc_RNA (1)...(19): siRNA sense strand
caagcuacacucuggagaa

SEQ ID NO: 1623158 - RNA, 19 nt, Homo sapiens
  misc_RNA (1)...(19): siRNA sense strand
gcgaggcaguggagaugga

SEQ ID NO: 1623159 - RNA, 19 nt, Homo sapiens
  misc_RNA (1)...(19): siRNA sense strand
cagacgaguuugugaagca

SEQ ID NO: 1623160 - RNA, 19 nt, Homo sapiens
  misc_RNA (1)...(19): siRNA sense strand
agagaaguggcaguaauua

SEQ ID NO: 1623161 - RNA, 19 nt, Homo sapiens
  misc_RNA (1)...(19): siRNA sense strand
agacaaagauccccaucaa

SEQ ID NO: 1623162 - RNA, 19 nt, Homo sapiens
  misc_RNA (1)...(19): siRNA sense strand
gagacuagcaagaugaaag

SEQ ID NO: 1623163 - RNA, 19 nt, Homo sapiens
  misc_RNA (1)...(19): siRNA sense strand
uuacaagaaagggcuaaua

SEQ ID NO: 1623164 - RNA, 19 nt, Homo sapiens
  misc_RNA (1)...(19): siRNA sense strand
ggugaaauaccuguugguu

SEQ ID NO: 1623165 - RNA, 19 nt, Homo sapiens
  misc_RNA (1)...(19): siRNA sense strand
cgagucaaucugaaagaaa

SEQ ID NO: 1623166 - RNA, 19 nt, Homo sapiens
  misc_RNA (1)...(19): siRNA sense strand
gaaaucauugaacgagcaa

SEQ ID NO: 1623167 - RNA, 19 nt, Homo sapiens
  misc_RNA (1)...(19): siRNA sense strand
uuaaggaccagacaaagau

SEQ ID NO: 1623168 - RNA, 19 nt, Homo sapiens
  misc_RNA (1)...(19): siRNA sense strand
agaaguggcaguaauuaca

SEQ ID NO: 1623169 - RNA, 19 nt, Homo sapiens
  misc_RNA (1)...(19): siRNA sense strand
gggcuaauaaguuggugaa

SEQ ID NO: 1623170 - RNA, 19 nt, Homo sapiens
  misc_RNA (1)...(19): siRNA sense strand
uagcuuguauauucucauc

SEQ ID NO: 1623171 - RNA, 19 nt, Homo sapiens
  misc_RNA (1)...(19): siRNA sense strand
uaacagcagaccaccugaa

SEQ ID NO: 1623172 - RNA, 19 nt, Homo sapiens
  misc_RNA (1)...(19): siRNA sense strand
ucgagucaaucugaaagaa

SEQ ID NO: 1623173 - RNA, 19 nt, Homo sapiens
  misc_RNA (1)...(19): siRNA sense strand
gaaguggcaguaauuacag

SEQ ID NO: 1623174 - RNA, 19 nt, Homo sapiens
  misc_RNA (1)...(19): siRNA sense strand
cagaccaccugaauaugag

SEQ ID NO: 1623175 - RNA, 19 nt, Homo sapiens
  misc_RNA (1)...(19): siRNA sense strand
caucagcacucaggaaucc

SEQ ID NO: 1623176 - RNA, 19 nt, Homo sapiens
  misc_RNA (1)...(19): siRNA sense strand
caagaugaaaguccucaag

SEQ ID NO: 1623177 - RNA, 19 nt, Homo sapiens
  misc_RNA (1)...(19): siRNA sense strand
gagaaguggcaguaauuac

SEQ ID NO: 1623178 - RNA, 19 nt, Homo sapiens
  misc_RNA (1)...(19): siRNA sense strand
ucauggugauucugagugu

SEQ ID NO: 1623179 - RNA, 19 nt, Homo sapiens
  misc_RNA (1)...(19): siRNA sense strand
ccauggagccaaaguacau

SEQ ID NO: 1623180 - RNA, 19 nt, Homo sapiens
  misc_RNA (1)...(19): siRNA sense strand
ccagugaggcugucaucug

SEQ ID NO: 1623181 - RNA, 19 nt, Homo sapiens
  misc_RNA (1)...(19): siRNA sense strand
gcuuguauauucucaucag

SEQ ID NO: 1623182 - RNA, 19 nt, Homo sapiens
  misc_RNA (1)...(19): siRNA sense strand
ccgcuaauaaauugcagua

SEQ ID NO: 1623183 - RNA, 19 nt, Homo sapiens
  misc_RNA (1)...(19): siRNA sense strand
gcuccuaccacgagacuag

SEQ ID NO: 1623184 - RNA, 19 nt, Homo sapiens
  misc_RNA (1)...(19): siRNA sense strand
guuuacagauaccgcuaau

SEQ ID NO: 1623185 - RNA, 19 nt, Homo sapiens
  misc_RNA (1)...(19): siRNA sense strand
aggcaguuauggccaauca

SEQ ID NO: 1623186 - RNA, 19 nt, Homo sapiens
  misc_RNA (1)...(19): siRNA sense strand
caguaguccuucccaugga

SEQ ID NO: 1623187 - RNA, 19 nt, Homo sapiens
  misc_RNA (1)...(19): siRNA sense strand
ggaggugcugcgcaaguug

SEQ ID NO: 1623188 - RNA, 19 nt, Homo sapiens
  misc_RNA (1)...(19): siRNA sense strand
cagcugagggugucaugug

SEQ ID NO: 1623189 - RNA, 19 nt, Homo sapiens
  misc_RNA (1)...(19): siRNA sense strand
acagcagaccaccugaaua

SEQ ID NO: 1623190 - RNA, 19 nt, Homo sapiens
  misc_RNA (1)...(19): siRNA sense strand
gaaauaccuguugguuaag

SEQ ID NO: 1623191 - RNA, 19 nt, Homo sapiens
  misc_RNA (1)...(19): siRNA sense strand
uacagauaccgcuaauaaa

SEQ ID NO: 1623192 - RNA, 19 nt, Homo sapiens
  misc_RNA (1)...(19): siRNA sense strand
ucauugaacgagcaagcua

SEQ ID NO: 1623193 - RNA, 19 nt, Homo sapiens
  misc_RNA (1)...(19): siRNA sense strand
caaggcaguuauggccaau

SEQ ID NO: 1623194 - RNA, 19 nt, Homo sapiens
  misc_RNA (1)...(19): siRNA sense strand
auaaauugcaguaguccuu

SEQ ID NO: 1623195 - RNA, 19 nt, Homo sapiens
  misc_RNA (1)...(19): siRNA sense strand
acaagaaagggcuaauaag

SEQ ID NO: 1623196 - RNA, 19 nt, Homo sapiens
  misc_RNA (1)...(19): siRNA sense strand
aagcuacacucuggagaag

SEQ ID NO: 1623197 - RNA, 19 nt, Homo sapiens
  misc_RNA (1)...(19): siRNA sense strand
augaaaguccucaaguuug

SEQ ID NO: 1623198 - RNA, 19 nt, Homo sapiens
  misc_RNA (1)...(19): siRNA sense strand
gcaagaugaaaguccucaa

SEQ ID NO: 1623199 - RNA, 19 nt, Homo sapiens
  misc_RNA (1)...(19): siRNA sense strand
caaaguagcuuguauauuc

SEQ ID NO: 1623200 - RNA, 19 nt, Homo sapiens
  misc_RNA (1)...(19): siRNA sense strand
ugaaauaccuguugguuaa

SEQ ID NO: 1623201 - RNA, 19 nt, Homo sapiens
  misc_RNA (1)...(19): siRNA sense strand
gagaagauguuucgaguca

SEQ ID NO: 1623202 - RNA, 19 nt, Homo sapiens
  misc_RNA (1)...(19): siRNA sense strand
ggaauccucugcaggcaua

SEQ ID NO: 1623203 - RNA, 19 nt, Homo sapiens
  misc_RNA (1)...(19): siRNA sense strand
agaaagggcuaauaaguug

SEQ ID NO: 1623204 - RNA, 19 nt, Homo sapiens
  misc_RNA (1)...(19): siRNA sense strand
gaagauguuucgagucaau

SEQ ID NO: 1623205 - RNA, 19 nt, Homo sapiens
  misc_RNA (1)...(19): siRNA sense strand
gaugaaaguccucaaguuu

SEQ ID NO: 1623206 - RNA, 19 nt, Homo sapiens
  misc_RNA (1)...(19): siRNA sense strand
ggagaaaugacuacggaua

SEQ ID NO: 1623207 - RNA, 19 nt, Homo sapiens
  misc_RNA (1)...(19): siRNA sense strand
gcagaccaccugaauauga

SEQ ID NO: 1623208 - RNA, 19 nt, Homo sapiens
  misc_RNA (1)...(19): siRNA sense strand
agaaaugacuacggauaua

SEQ ID NO: 1623209 - RNA, 19 nt, Homo sapiens
  misc_RNA (1)...(19): siRNA sense strand
gcuaauaaguuggugaaau

SEQ ID NO: 1623210 - RNA, 19 nt, Homo sapiens
  misc_RNA (1)...(19): siRNA sense strand
gagagaaguggcaguaauu

SEQ ID NO: 1623211 - RNA, 19 nt, Homo sapiens
  misc_RNA (1)...(19): siRNA sense strand
gagucaaucugaaagaaau

SEQ ID NO: 1623212 - RNA, 19 nt, Homo sapiens
  misc_RNA (1)...(19): siRNA sense strand
caagaaagggcuaauaagu

SEQ ID NO: 1623213 - RNA, 19 nt, Homo sapiens
  misc_RNA (1)...(19): siRNA sense strand
gcucaucacagacgaguuu

SEQ ID NO: 1623214 - RNA, 19 nt, Homo sapiens
  misc_RNA (1)...(19): siRNA sense strand
gagaaaugacuacggauau

SEQ ID NO: 1623215 - RNA, 19 nt, Homo sapiens
  misc_RNA (1)...(19): siRNA sense strand
cagcagaccaccugaauau

SEQ ID NO: 1623216 - RNA, 19 nt, Homo sapiens
  misc_RNA (1)...(19): siRNA sense strand
gugaaauaccuguugguua

SEQ ID NO: 1623217 - RNA, 19 nt, Homo sapiens
  misc_RNA (1)...(19): siRNA sense strand
ccacgagacuagcaagaug

SEQ ID NO: 1623218 - RNA, 19 nt, Homo sapiens
  misc_RNA (1)...(19): siRNA sense strand
ugaugaauauuucccagaa

SEQ ID NO: 1623219 - RNA, 19 nt, Homo sapiens
  misc_RNA (1)...(19): siRNA sense strand
ugagagaaguggcaguaau

SEQ ID NO: 1623220 - RNA, 19 nt, Homo sapiens
  misc_RNA (1)...(19): siRNA sense strand
gcuacacucuggagaagau

SEQ ID NO: 1623221 - RNA, 19 nt, Homo sapiens
  misc_RNA (1)...(19): siRNA sense strand
uacaagaaagggcuaauaa

SEQ ID NO: 1623222 - RNA, 19 nt, Homo sapiens
  misc_RNA (1)...(19): siRNA sense strand
gaugagagaaguggcagua

SEQ ID NO: 1623223 - RNA, 19 nt, Homo sapiens
  misc_RNA (1)...(19): siRNA sense strand
caagcugggucuccucaug

SEQ ID NO: 1623224 - RNA, 19 nt, Homo sapiens
  misc_RNA (1)...(19): siRNA sense strand
gcaaaguagcuuguauauu

SEQ ID NO: 1623225 - RNA, 19 nt, Homo sapiens
  misc_RNA (1)...(19): siRNA sense strand
gaaaugacuacggauauag

SEQ ID NO: 1623226 - RNA, 19 nt, Homo sapiens
  misc_RNA (1)...(19): siRNA sense strand
gcagggugcagaagaaaga

SEQ ID NO: 1623227 - RNA, 19 nt, Homo sapiens
  misc_RNA (1)...(19): siRNA sense strand
agaugaaaguccucaaguu

SEQ ID NO: 1623228 - RNA, 19 nt, Homo sapiens
  misc_RNA (1)...(19): siRNA sense strand
aagaaagggcuaauaaguu

SEQ ID NO: 1623229 - RNA, 19 nt, Homo sapiens
  misc_RNA (1)...(19): siRNA sense strand
caucaaacgcucagacaug

SEQ ID NO: 1623230 - RNA, 19 nt, Homo sapiens
  misc_RNA (1)...(19): siRNA sense strand
gggaggugcugcgcaaguu

SEQ ID NO: 1623231 - RNA, 19 nt, Homo sapiens
  misc_RNA (1)...(19): siRNA sense strand
guuaaggaccagacaaaga

SEQ ID NO: 1623232 - RNA, 19 nt, Homo sapiens
  misc_RNA (1)...(19): siRNA sense strand
ugaaaguccucaaguuugc

SEQ ID NO: 1623233 - RNA, 19 nt, Homo sapiens
  misc_RNA (1)...(19): siRNA sense strand
agagaaguggcaguaauua

SEQ ID NO: 1623234 - RNA, 19 nt, Homo sapiens
  misc_RNA (1)...(19): siRNA sense strand
gcgaggcaguggagaugga

SEQ ID NO: 1623235 - RNA, 19 nt, Homo sapiens
  misc_RNA (1)...(19): siRNA sense strand
cagacgaguuugugaagca

SEQ ID NO: 1623236 - RNA, 19 nt, Homo sapiens
  misc_RNA (1)...(19): siRNA sense strand
caagcuacacucuggagaa

SEQ ID NO: 1623237 - RNA, 19 nt, Homo sapiens
  misc_RNA (1)...(19): siRNA sense strand
uuacaagaaagggcuaaua

SEQ ID NO: 1623238 - RNA, 19 nt, Homo sapiens
  misc_RNA (1)...(19): siRNA sense strand
gagacuagcaagaugaaag

SEQ ID NO: 1623239 - RNA, 19 nt, Homo sapiens
  misc_RNA (1)...(19): siRNA sense strand
agacaaagauccccaucaa

SEQ ID NO: 1623240 - RNA, 19 nt, Homo sapiens
  misc_RNA (1)...(19): siRNA sense strand
ggugaaauaccuguugguu

SEQ ID NO: 1623241 - RNA, 19 nt, Homo sapiens
  misc_RNA (1)...(19): siRNA sense strand
cgagucaaucugaaagaaa

SEQ ID NO: 1623242 - RNA, 19 nt, Homo sapiens
  misc_RNA (1)...(19): siRNA sense strand
gaaaucauugaacgagcaa

SEQ ID NO: 1623243 - RNA, 19 nt, Homo sapiens
  misc_RNA (1)...(19): siRNA sense strand
uuaaggaccagacaaagau

SEQ ID NO: 1623244 - RNA, 19 nt, Homo sapiens
  misc_RNA (1)...(19): siRNA sense strand
gggcuaauaaguuggugaa

SEQ ID NO: 1623245 - RNA, 19 nt, Homo sapiens
  misc_RNA (1)...(19): siRNA sense strand
agaaguggcaguaauuaca

SEQ ID NO: 1623246 - RNA, 19 nt, Homo sapiens
  misc_RNA (1)...(19): siRNA sense strand
uagcuuguauauucucauc

SEQ ID NO: 1623247 - RNA, 19 nt, Homo sapiens
  misc_RNA (1)...(19): siRNA sense strand
uaacagcagaccaccugaa

SEQ ID NO: 1623248 - RNA, 19 nt, Homo sapiens
  misc_RNA (1)...(19): siRNA sense strand
gaaguggcaguaauuacag

SEQ ID NO: 1623249 - RNA, 19 nt, Homo sapiens
  misc_RNA (1)...(19): siRNA sense strand
cagaccaccugaauaugag

SEQ ID NO: 1623250 - RNA, 19 nt, Homo sapiens
  misc_RNA (1)...(19): siRNA sense strand
ucgagucaaucugaaagaa

SEQ ID NO: 1623251 - RNA, 19 nt, Homo sapiens
  misc_RNA (1)...(19): siRNA sense strand
gagaaguggcaguaauuac

SEQ ID NO: 1623252 - RNA, 19 nt, Homo sapiens
  misc_RNA (1)...(19): siRNA sense strand
caagaugaaaguccucaag

SEQ ID NO: 1623253 - RNA, 19 nt, Homo sapiens
  misc_RNA (1)...(19): siRNA sense strand
caucagcacucaggaaucc

SEQ ID NO: 1623254 - RNA, 19 nt, Homo sapiens
  misc_RNA (1)...(19): siRNA sense strand
ucauggugauucugagugu

SEQ ID NO: 1623255 - RNA, 19 nt, Homo sapiens
  misc_RNA (1)...(19): siRNA sense strand
ccagugaggcugucaucug

SEQ ID NO: 1623256 - RNA, 19 nt, Homo sapiens
  misc_RNA (1)...(19): siRNA sense strand
gcuuguauauucucaucag

SEQ ID NO: 1623257 - RNA, 19 nt, Homo sapiens
  misc_RNA (1)...(19): siRNA sense strand
gcuccuaccacgagacuag

SEQ ID NO: 1623258 - RNA, 19 nt, Homo sapiens
  misc_RNA (1)...(19): siRNA sense strand
ggaggugcugcgcaaguug

SEQ ID NO: 1623259 - RNA, 19 nt, Homo sapiens
  misc_RNA (1)...(19): siRNA sense strand
acagcagaccaccugaaua

SEQ ID NO: 1623260 - RNA, 19 nt, Homo sapiens
  misc_RNA (1)...(19): siRNA sense strand
gaaauaccuguugguuaag

SEQ ID NO: 1623261 - RNA, 19 nt, Homo sapiens
  misc_RNA (1)...(19): siRNA sense strand
ucauugaacgagcaagcua

SEQ ID NO: 1623262 - RNA, 19 nt, Homo sapiens
  misc_RNA (1)...(19): siRNA sense strand
acaagaaagggcuaauaag

SEQ ID NO: 1623263 - RNA, 19 nt, Homo sapiens
  misc_RNA (1)...(19): siRNA sense strand
aagcuacacucuggagaag

SEQ ID NO: 1623264 - RNA, 19 nt, Homo sapiens
  misc_RNA (1)...(19): siRNA sense strand
augaaaguccucaaguuug

SEQ ID NO: 1623265 - RNA, 19 nt, Homo sapiens
  misc_RNA (1)...(19): siRNA sense strand
gcaagaugaaaguccucaa

SEQ ID NO: 1623266 - RNA, 19 nt, Homo sapiens
  misc_RNA (1)...(19): siRNA sense strand
gcagauuucuugaccaaua

SEQ ID NO: 1623267 - RNA, 19 nt, Homo sapiens
  misc_RNA (1)...(19): siRNA sense strand
gaagcaauguugacaauau

SEQ ID NO: 1623268 - RNA, 19 nt, Homo sapiens
  misc_RNA (1)...(19): siRNA sense strand
gaagaugacucugcuaaau

SEQ ID NO: 1623269 - RNA, 19 nt, Homo sapiens
  misc_RNA (1)...(19): siRNA sense strand
gaaacuuccuacugcuuua

SEQ ID NO: 1623270 - RNA, 19 nt, Homo sapiens
  misc_RNA (1)...(19): siRNA sense strand
gaagaagucauaaagagaa

SEQ ID NO: 1623271 - RNA, 19 nt, Homo sapiens
  misc_RNA (1)...(19): siRNA sense strand
gaaaggaagaagucauaaa

SEQ ID NO: 1623272 - RNA, 19 nt, Homo sapiens
  misc_RNA (1)...(19): siRNA sense strand
caggagaaguucaugaaga

SEQ ID NO: 1623273 - RNA, 19 nt, Homo sapiens
  misc_RNA (1)...(19): siRNA sense strand
ggaagaagucauaaagaga

SEQ ID NO: 1623274 - RNA, 19 nt, Homo sapiens
  misc_RNA (1)...(19): siRNA sense strand
cuaaauguuugcagucuug

SEQ ID NO: 1623275 - RNA, 19 nt, Homo sapiens
  misc_RNA (1)...(19): siRNA sense strand
ugaaacggcagcuguauga

SEQ ID NO: 1623276 - RNA, 19 nt, Homo sapiens
  misc_RNA (1)...(19): siRNA sense strand
ccaauaugcauacaucaaa

SEQ ID NO: 1623277 - RNA, 19 nt, Homo sapiens
  misc_RNA (1)...(19): siRNA sense strand
ggaagaugacucugcuaaa

SEQ ID NO: 1623278 - RNA, 19 nt, Homo sapiens
  misc_RNA (1)...(19): siRNA sense strand
caucaaagauuaguaaagc

SEQ ID NO: 1623279 - RNA, 19 nt, Homo sapiens
  misc_RNA (1)...(19): siRNA sense strand
gcagcuguaugagaauaaa

SEQ ID NO: 1623280 - RNA, 19 nt, Homo sapiens
  misc_RNA (1)...(19): siRNA sense strand
ugaccaauaugcauacauc

SEQ ID NO: 1623281 - RNA, 19 nt, Homo sapiens
  misc_RNA (1)...(19): siRNA sense strand
ggaaaggaagaagucauaa

SEQ ID NO: 1623282 - RNA, 19 nt, Homo sapiens
  misc_RNA (1)...(19): siRNA sense strand
aagcacauguucccucuug

SEQ ID NO: 1623283 - RNA, 19 nt, Homo sapiens
  misc_RNA (1)...(19): siRNA sense strand
gcaugcuacuccuggcuuu

SEQ ID NO: 1623284 - RNA, 19 nt, Homo sapiens
  misc_RNA (1)...(19): siRNA sense strand
agaagacccuacauacuca

SEQ ID NO: 1623285 - RNA, 19 nt, Homo sapiens
  misc_RNA (1)...(19): siRNA sense strand
gagaauaaacccagaagac

SEQ ID NO: 1623286 - RNA, 19 nt, Homo sapiens
  misc_RNA (1)...(19): siRNA sense strand
agaugacucugcuaaaugu

SEQ ID NO: 1623287 - RNA, 19 nt, Homo sapiens
  misc_RNA (1)...(19): siRNA sense strand
ggaaacaggagaaguucau

SEQ ID NO: 1623288 - RNA, 19 nt, Homo sapiens
  misc_RNA (1)...(19): siRNA sense strand
ggaagcaauguugacaaua

SEQ ID NO: 1623289 - RNA, 19 nt, Homo sapiens
  misc_RNA (1)...(19): siRNA sense strand
gaguuaauccaggaagaua

SEQ ID NO: 1623290 - RNA, 19 nt, Homo sapiens
  misc_RNA (1)...(19): siRNA sense strand
caauauaccagcuccacaa

SEQ ID NO: 1623291 - RNA, 19 nt, Homo sapiens
  misc_RNA (1)...(19): siRNA sense strand
cagauuucuugaccaauau

SEQ ID NO: 1623292 - RNA, 19 nt, Homo sapiens
  misc_RNA (1)...(19): siRNA sense strand
uggaaaggaagaagucaua

SEQ ID NO: 1623293 - RNA, 19 nt, Homo sapiens
  misc_RNA (1)...(19): siRNA sense strand
ugaggaaacaggagaaguu

SEQ ID NO: 1623294 - RNA, 19 nt, Homo sapiens
  misc_RNA (1)...(19): siRNA sense strand
ugacucugcuaaauguuug

SEQ ID NO: 1623295 - RNA, 19 nt, Homo sapiens
  misc_RNA (1)...(19): siRNA sense strand
caauaugcauacaucaaag

SEQ ID NO: 1623296 - RNA, 19 nt, Homo sapiens
  misc_RNA (1)...(19): siRNA sense strand
aagcagauuucuugaccaa

SEQ ID NO: 1623297 - RNA, 19 nt, Homo sapiens
  misc_RNA (1)...(19): siRNA sense strand
cagaagacccuacauacuc

SEQ ID NO: 1623298 - RNA, 19 nt, Homo sapiens
  misc_RNA (1)...(19): siRNA sense strand
gggaguuaauccaggaaga

SEQ ID NO: 1623299 - RNA, 19 nt, Homo sapiens
  misc_RNA (1)...(19): siRNA sense strand
gcacauguucccucuugga

SEQ ID NO: 1623300 - RNA, 19 nt, Homo sapiens
  misc_RNA (1)...(19): siRNA sense strand
gugcucagauucagaagag

SEQ ID NO: 1623301 - RNA, 19 nt, Homo sapiens
  misc_RNA (1)...(19): siRNA sense strand
uggaagcaauguugacaau

SEQ ID NO: 1623302 - RNA, 19 nt, Homo sapiens
  misc_RNA (1)...(19): siRNA sense strand
gcuaaauguuugcagucuu

SEQ ID NO: 1623303 - RNA, 19 nt, Homo sapiens
  misc_RNA (1)...(19): siRNA sense strand
gaagaggagcuuguugcaa

SEQ ID NO: 1623304 - RNA, 19 nt, Homo sapiens
  misc_RNA (1)...(19): siRNA sense strand
gaagaggaaaugaaagcau

SEQ ID NO: 1623305 - RNA, 19 nt, Homo sapiens
  misc_RNA (1)...(19): siRNA sense strand
aaaggaagaagucauaaag

SEQ ID NO: 1623306 - RNA, 19 nt, Homo sapiens
  misc_RNA (1)...(19): siRNA sense strand
cggcagcuguaugagaaua

SEQ ID NO: 1623307 - RNA, 19 nt, Homo sapiens
  misc_RNA (1)...(19): siRNA sense strand
aggaagaagucauaaagag

SEQ ID NO: 1623308 - RNA, 19 nt, Homo sapiens
  misc_RNA (1)...(19): siRNA sense strand
uuucaacacugggaguuaa

SEQ ID NO: 1623309 - RNA, 19 nt, Homo sapiens
  misc_RNA (1)...(19): siRNA sense strand
gaaagcauuagaagcagau

SEQ ID NO: 1623310 - RNA, 19 nt, Homo sapiens
  misc_RNA (1)...(19): siRNA sense strand
guuaauccaggaagauauu

SEQ ID NO: 1623311 - RNA, 19 nt, Homo sapiens
  misc_RNA (1)...(19): siRNA sense strand
gaaugaaaauccagcuugu

SEQ ID NO: 1623312 - RNA, 19 nt, Homo sapiens
  misc_RNA (1)...(19): siRNA sense strand
aacggcagcuguaugagaa

SEQ ID NO: 1623313 - RNA, 19 nt, Homo sapiens
  misc_RNA (1)...(19): siRNA sense strand
aaacaggagaaguucauga

SEQ ID NO: 1623314 - RNA, 19 nt, Homo sapiens
  misc_RNA (1)...(19): siRNA sense strand
aaacggcagcuguaugaga

SEQ ID NO: 1623315 - RNA, 19 nt, Homo sapiens
  misc_RNA (1)...(19): siRNA sense strand
uggaagaugacucugcuaa

SEQ ID NO: 1623316 - RNA, 19 nt, Homo sapiens
  misc_RNA (1)...(19): siRNA sense strand
aaauccagcuuguaugcau

SEQ ID NO: 1623317 - RNA, 19 nt, Homo sapiens
  misc_RNA (1)...(19): siRNA sense strand
gaggaaacaggagaaguuc

SEQ ID NO: 1623318 - RNA, 19 nt, Homo sapiens
  misc_RNA (1)...(19): siRNA sense strand
ggaguuaauccaggaagau

SEQ ID NO: 1623319 - RNA, 19 nt, Homo sapiens
  misc_RNA (1)...(19): siRNA sense strand
gaaacaggagaaguucaug

SEQ ID NO: 1623320 - RNA, 19 nt, Homo sapiens
  misc_RNA (1)...(19): siRNA sense strand
aauguuugcagucuuguaa

SEQ ID NO: 1623321 - RNA, 19 nt, Homo sapiens
  misc_RNA (1)...(19): siRNA sense strand
ccagaagacccuacauacu

SEQ ID NO: 1623322 - RNA, 19 nt, Homo sapiens
  misc_RNA (1)...(19): siRNA sense strand
aggagaaguucaugaagag

SEQ ID NO: 1623323 - RNA, 19 nt, Homo sapiens
  misc_RNA (1)...(19): siRNA sense strand
aagaugacucugcuaaaug

SEQ ID NO: 1623324 - RNA, 19 nt, Homo sapiens
  misc_RNA (1)...(19): siRNA sense strand
uauaccagcuccacaaaau

SEQ ID NO: 1623325 - RNA, 19 nt, Homo sapiens
  misc_RNA (1)...(19): siRNA sense strand
gagauucuuacuauuacug

SEQ ID NO: 1623326 - RNA, 19 nt, Homo sapiens
  misc_RNA (1)...(19): siRNA sense strand
gauauucuugauacuggaa

SEQ ID NO: 1623327 - RNA, 19 nt, Homo sapiens
  misc_RNA (1)...(19): siRNA sense strand
uguuugcagucuuguaaau

SEQ ID NO: 1623328 - RNA, 19 nt, Homo sapiens
  misc_RNA (1)...(19): siRNA sense strand
gaaaauccagcuuguaugc

SEQ ID NO: 1623329 - RNA, 19 nt, Homo sapiens
  misc_RNA (1)...(19): siRNA sense strand
guuugcagucuuguaaaua

SEQ ID NO: 1623330 - RNA, 19 nt, Homo sapiens
  misc_RNA (1)...(19): siRNA sense strand
aaggaagaagucauaaaga

SEQ ID NO: 1623331 - RNA, 19 nt, Homo sapiens
  misc_RNA (1)...(19): siRNA sense strand
gaagacccuacauacucaa

SEQ ID NO: 1623332 - RNA, 19 nt, Homo sapiens
  misc_RNA (1)...(19): siRNA sense strand
acccagaagacccuacaua

SEQ ID NO: 1623333 - RNA, 19 nt, Homo sapiens
  misc_RNA (1)...(19): siRNA sense strand
cagaagaggaaaugaaagc

SEQ ID NO: 1623334 - RNA, 19 nt, Homo sapiens
  misc_RNA (1)...(19): siRNA sense strand
aacaggagaaguucaugaa

SEQ ID NO: 1623335 - RNA, 19 nt, Homo sapiens
  misc_RNA (1)...(19): siRNA sense strand
ccaaaucaguggcuucuau

SEQ ID NO: 1623336 - RNA, 19 nt, Homo sapiens
  misc_RNA (1)...(19): siRNA sense strand
cagaauauccugagaaaga

SEQ ID NO: 1623337 - RNA, 19 nt, Homo sapiens
  misc_RNA (1)...(19): siRNA sense strand
ggauagaccugaagaacca

SEQ ID NO: 1623338 - RNA, 19 nt, Homo sapiens
  misc_RNA (1)...(19): siRNA sense strand
ggagauggcagcagagauu

SEQ ID NO: 1623339 - RNA, 19 nt, Homo sapiens
  misc_RNA (1)...(19): siRNA sense strand
gcaccggcaucaagaucaa

SEQ ID NO: 1623340 - RNA, 19 nt, Homo sapiens
  misc_RNA (1)...(19): siRNA sense strand
cagcagagauuaaaacaga

SEQ ID NO: 1623341 - RNA, 19 nt, Homo sapiens
  misc_RNA (1)...(19): siRNA sense strand
aacagaauauccugagaaa

SEQ ID NO: 1623342 - RNA, 19 nt, Homo sapiens
  misc_RNA (1)...(19): siRNA sense strand
gaggcagucuccaccuuga

SEQ ID NO: 1623343 - RNA, 19 nt, Homo sapiens
  misc_RNA (1)...(19): siRNA sense strand
ggagacaggguucgccaaa

SEQ ID NO: 1623344 - RNA, 19 nt, Homo sapiens
  misc_RNA (1)...(19): siRNA sense strand
gcccuucucucaucuuauc

SEQ ID NO: 1623345 - RNA, 19 nt, Homo sapiens
  misc_RNA (1)...(19): siRNA sense strand
gggcaaguuuaaugagguu

SEQ ID NO: 1623346 - RNA, 19 nt, Homo sapiens
  misc_RNA (1)...(19): siRNA sense strand
gagauggcagcagagauua

SEQ ID NO: 1623347 - RNA, 19 nt, Homo sapiens
  misc_RNA (1)...(19): siRNA sense strand
guccagcgcucacgguuca

SEQ ID NO: 1623348 - RNA, 19 nt, Homo sapiens
  misc_RNA (1)...(19): siRNA sense strand
aaacagaauauccugagaa

SEQ ID NO: 1623349 - RNA, 19 nt, Homo sapiens
  misc_RNA (1)...(19): siRNA sense strand
gauggcagcagagauuaaa

SEQ ID NO: 1623350 - RNA, 19 nt, Homo sapiens
  misc_RNA (1)...(19): siRNA sense strand
ggcaggaagugaaggagau

SEQ ID NO: 1623351 - RNA, 19 nt, Homo sapiens
  misc_RNA (1)...(19): siRNA sense strand
caaugaguaucgagaguac

SEQ ID NO: 1623352 - RNA, 19 nt, Homo sapiens
  misc_RNA (1)...(19): siRNA sense strand
gcccugcccuucucucauc

SEQ ID NO: 1623353 - RNA, 19 nt, Homo sapiens
  misc_RNA (1)...(19): siRNA sense strand
guaucgagaguacaucaaa

SEQ ID NO: 1623354 - RNA, 19 nt, Homo sapiens
  misc_RNA (1)...(19): siRNA sense strand
ucaaugaguaucgagagua

SEQ ID NO: 1623355 - RNA, 19 nt, Homo sapiens
  misc_RNA (1)...(19): siRNA sense strand
agacauucauuucuuacuc

SEQ ID NO: 1623356 - RNA, 19 nt, Homo sapiens
  misc_RNA (1)...(19): siRNA sense strand
caaaucaguggcuucuaug

SEQ ID NO: 1623357 - RNA, 19 nt, Homo sapiens
  misc_RNA (1)...(19): siRNA sense strand
ugagugagcgggugagcaa

SEQ ID NO: 1623358 - RNA, 19 nt, Homo sapiens
  misc_RNA (1)...(19): siRNA sense strand
cagcaacgucuacgccauu

SEQ ID NO: 1623359 - RNA, 19 nt, Homo sapiens
  misc_RNA (1)...(19): siRNA sense strand
ucaaagugcagacggacaa

SEQ ID NO: 1623360 - RNA, 19 nt, Homo sapiens
  misc_RNA (1)...(19): siRNA sense strand
ccaacaucgucaacucugu

SEQ ID NO: 1623361 - RNA, 19 nt, Homo sapiens
  misc_RNA (1)...(19): siRNA sense strand
cugcccuucucucaucuua

SEQ ID NO: 1623362 - RNA, 19 nt, Homo sapiens
  misc_RNA (1)...(19): siRNA sense strand
gcaaguuuaaugagguuuc

SEQ ID NO: 1623363 - RNA, 19 nt, Homo sapiens
  misc_RNA (1)...(19): siRNA sense strand
cagcuccgccuaccgcaaa

SEQ ID NO: 1623364 - RNA, 19 nt, Homo sapiens
  misc_RNA (1)...(19): siRNA sense strand
ugacguuccuccuguccau

SEQ ID NO: 1623365 - RNA, 19 nt, Homo sapiens
  misc_RNA (1)...(19): siRNA sense strand
caagagccgggaccuguuc

SEQ ID NO: 1623366 - RNA, 19 nt, Homo sapiens
  misc_RNA (1)...(19): siRNA sense strand
ggacuccuuccaccacaau

SEQ ID NO: 1623367 - RNA, 19 nt, Homo sapiens
  misc_RNA (1)...(19): siRNA sense strand
gaguaucgagaguacauca

SEQ ID NO: 1623368 - RNA, 19 nt, Homo sapiens
  misc_RNA (1)...(19): siRNA sense strand
caacgucuacgccauuggu

SEQ ID NO: 1623369 - RNA, 19 nt, Homo sapiens
  misc_RNA (1)...(19): siRNA sense strand
uaucgagaguacaucaaag

SEQ ID NO: 1623370 - RNA, 19 nt, Homo sapiens
  misc_RNA (1)...(19): siRNA sense strand
agaauauccugagaaagag

SEQ ID NO: 1623371 - RNA, 19 nt, Homo sapiens
  misc_RNA (1)...(19): siRNA sense strand
gcucugcacguggugauug

SEQ ID NO: 1623372 - RNA, 19 nt, Homo sapiens
  misc_RNA (1)...(19): siRNA sense strand
ccaagagccgggaccuguu

SEQ ID NO: 1623373 - RNA, 19 nt, Homo sapiens
  misc_RNA (1)...(19): siRNA sense strand
cuuacucggugacuuucaa

SEQ ID NO: 1623374 - RNA, 19 nt, Homo sapiens
  misc_RNA (1)...(19): siRNA sense strand
uuucuuacucggugacuuu

SEQ ID NO: 1623375 - RNA, 19 nt, Homo sapiens
  misc_RNA (1)...(19): siRNA sense strand
gagacaggguucgccaaaa

SEQ ID NO: 1623376 - RNA, 19 nt, Homo sapiens
  misc_RNA (1)...(19): siRNA sense strand
cuacgccauuggugacugu

SEQ ID NO: 1623377 - RNA, 19 nt, Homo sapiens
  misc_RNA (1)...(19): siRNA sense strand
caaagugcagacggacaaa

SEQ ID NO: 1623378 - RNA, 19 nt, Homo sapiens
  misc_RNA (1)...(19): siRNA sense strand
ggaaauagcugauuaugaa

SEQ ID NO: 1623379 - RNA, 19 nt, Homo sapiens
  misc_RNA (1)...(19): siRNA sense strand
gaacaacucugaagauaau

SEQ ID NO: 1623380 - RNA, 19 nt, Homo sapiens
  misc_RNA (1)...(19): siRNA sense strand
ucaaagagauaccauguua

SEQ ID NO: 1623381 - RNA, 19 nt, Homo sapiens
  misc_RNA (1)...(19): siRNA sense strand
gaaaugggaucagaaguuu

SEQ ID NO: 1623382 - RNA, 19 nt, Homo sapiens
  misc_RNA (1)...(19): siRNA sense strand
gcagaaagcuauaagaauc

SEQ ID NO: 1623383 - RNA, 19 nt, Homo sapiens
  misc_RNA (1)...(19): siRNA sense strand
gaaagacaguggagacauu

SEQ ID NO: 1623384 - RNA, 19 nt, Homo sapiens
  misc_RNA (1)...(19): siRNA sense strand
gaacaugccacuacuguaa

SEQ ID NO: 1623385 - RNA, 19 nt, Homo sapiens
  misc_RNA (1)...(19): siRNA sense strand
cgaaauagcuuccgagauc

SEQ ID NO: 1623386 - RNA, 19 nt, Homo sapiens
  misc_RNA (1)...(19): siRNA sense strand
gaagugaagucucuuuaug

SEQ ID NO: 1623387 - RNA, 19 nt, Homo sapiens
  misc_RNA (1)...(19): siRNA sense strand
gaucagaaguuucagaaga

SEQ ID NO: 1623388 - RNA, 19 nt, Homo sapiens
  misc_RNA (1)...(19): siRNA sense strand
ggaaagaguuagaagaaau

SEQ ID NO: 1623389 - RNA, 19 nt, Homo sapiens
  misc_RNA (1)...(19): siRNA sense strand
gagcagaguugauacuauu

SEQ ID NO: 1623390 - RNA, 19 nt, Homo sapiens
  misc_RNA (1)...(19): siRNA sense strand
gaugaaaucugaacauaca

SEQ ID NO: 1623391 - RNA, 19 nt, Homo sapiens
  misc_RNA (1)...(19): siRNA sense strand
guacaacagugaacuagaa

SEQ ID NO: 1623392 - RNA, 19 nt, Homo sapiens
  misc_RNA (1)...(19): siRNA sense strand
caaauacagugaagacaaa

SEQ ID NO: 1623393 - RNA, 19 nt, Homo sapiens
  misc_RNA (1)...(19): siRNA sense strand
caaaccacauugaugaaua

SEQ ID NO: 1623394 - RNA, 19 nt, Homo sapiens
  misc_RNA (1)...(19): siRNA sense strand
agacaaagcuaacuuacaa

SEQ ID NO: 1623395 - RNA, 19 nt, Homo sapiens
  misc_RNA (1)...(19): siRNA sense strand
caacaaaccacauugauga

SEQ ID NO: 1623396 - RNA, 19 nt, Homo sapiens
  misc_RNA (1)...(19): siRNA sense strand
gaaaccagguagugaaaga

SEQ ID NO: 1623397 - RNA, 19 nt, Homo sapiens
  misc_RNA (1)...(19): siRNA sense strand
gaagaaguaucucaaacau

SEQ ID NO: 1623398 - RNA, 19 nt, Homo sapiens
  misc_RNA (1)...(19): siRNA sense strand
gaagaaauacagucagaaa

SEQ ID NO: 1623399 - RNA, 19 nt, Homo sapiens
  misc_RNA (1)...(19): siRNA sense strand
gcacauacacacagucuuu

SEQ ID NO: 1623400 - RNA, 19 nt, Homo sapiens
  misc_RNA (1)...(19): siRNA sense strand
gaacuugaaucucuucgau

SEQ ID NO: 1623401 - RNA, 19 nt, Homo sapiens
  misc_RNA (1)...(19): siRNA sense strand
gaacuagauuccagcagaa

SEQ ID NO: 1623402 - RNA, 19 nt, Homo sapiens
  misc_RNA (1)...(19): siRNA sense strand
gcaauuagaacuuucagaa

SEQ ID NO: 1623403 - RNA, 19 nt, Homo sapiens
  misc_RNA (1)...(19): siRNA sense strand
gggaagacuuagaguuuaa

SEQ ID NO: 1623404 - RNA, 19 nt, Homo sapiens
  misc_RNA (1)...(19): siRNA sense strand
gcaggaaacuguguccaaa

SEQ ID NO: 1623405 - RNA, 19 nt, Homo sapiens
  misc_RNA (1)...(19): siRNA sense strand
gaagagaaagauguuguua

SEQ ID NO: 1623406 - RNA, 19 nt, Homo sapiens
  misc_RNA (1)...(19): siRNA sense strand
gaaaguagagcaaacaauc

SEQ ID NO: 1623407 - RNA, 19 nt, Homo sapiens
  misc_RNA (1)...(19): siRNA sense strand
agaaguaucucaaacaugu

SEQ ID NO: 1623408 - RNA, 19 nt, Homo sapiens
  misc_RNA (1)...(19): siRNA sense strand
guuacuaucucaacaagaa

SEQ ID NO: 1623409 - RNA, 19 nt, Homo sapiens
  misc_RNA (1)...(19): siRNA sense strand
cagcuaaccuggaauacuu

SEQ ID NO: 1623410 - RNA, 19 nt, Homo sapiens
  misc_RNA (1)...(19): siRNA sense strand
gauccucugucuucaguaa

SEQ ID NO: 1623411 - RNA, 19 nt, Homo sapiens
  misc_RNA (1)...(19): siRNA sense strand
gcaaagaaagaacuagauu

SEQ ID NO: 1623412 - RNA, 19 nt, Homo sapiens
  misc_RNA (1)...(19): siRNA sense strand
aagaagaggugaaagaguu

SEQ ID NO: 1623413 - RNA, 19 nt, Homo sapiens
  misc_RNA (1)...(19): siRNA sense strand
agcagaaacugaucacuua

SEQ ID NO: 1623414 - RNA, 19 nt, Homo sapiens
  misc_RNA (1)...(19): siRNA sense strand
gauagaagauuuggagcaa

SEQ ID NO: 1623415 - RNA, 19 nt, Homo sapiens
  misc_RNA (1)...(19): siRNA sense strand
gggagaaaaugaaaaguua

SEQ ID NO: 1623416 - RNA, 19 nt, Homo sapiens
  misc_RNA (1)...(19): siRNA sense strand
gaaauggaugcucaacaua

SEQ ID NO: 1623417 - RNA, 19 nt, Homo sapiens
  misc_RNA (1)...(19): siRNA sense strand
gauauguucuauucucuug

SEQ ID NO: 1623418 - RNA, 19 nt, Homo sapiens
  misc_RNA (1)...(19): siRNA sense strand
gaacaugaagcagagauaa

SEQ ID NO: 1623419 - RNA, 19 nt, Homo sapiens
  misc_RNA (1)...(19): siRNA sense strand
gagcagaaagcuauaagaa

SEQ ID NO: 1623420 - RNA, 19 nt, Homo sapiens
  misc_RNA (1)...(19): siRNA sense strand
gaagaucuccuggcucgua

SEQ ID NO: 1623421 - RNA, 19 nt, Homo sapiens
  misc_RNA (1)...(19): siRNA sense strand
gagauuaagugccuucaag

SEQ ID NO: 1623422 - RNA, 19 nt, Homo sapiens
  misc_RNA (1)...(19): siRNA sense strand
gaacuuucagaacaacuua

SEQ ID NO: 1623423 - RNA, 19 nt, Homo sapiens
  misc_RNA (1)...(19): siRNA sense strand
gagaucaagugcgacauuu

SEQ ID NO: 1623424 - RNA, 19 nt, Homo sapiens
  misc_RNA (1)...(19): siRNA sense strand
ugaaaguucucucugaaga

SEQ ID NO: 1623425 - RNA, 19 nt, Homo sapiens
  misc_RNA (1)...(19): siRNA sense strand
gagcuagcagguuuaaaua

SEQ ID NO: 1623426 - RNA, 19 nt, Homo sapiens
  misc_RNA (1)...(19): siRNA sense strand
aaucugagcuagcagguuu

SEQ ID NO: 1623427 - RNA, 19 nt, Homo sapiens
  misc_RNA (1)...(19): siRNA sense strand
gucaaacacuuagaagaua

SEQ ID NO: 1623428 - RNA, 19 nt, Homo sapiens
  misc_RNA (1)...(19): siRNA sense strand
gaaaagaaggaaacaguua

SEQ ID NO: 1623429 - RNA, 19 nt, Homo sapiens
  misc_RNA (1)...(19): siRNA sense strand
guugaaagcuauacaccaa

SEQ ID NO: 1623430 - RNA, 19 nt, Homo sapiens
  misc_RNA (1)...(19): siRNA sense strand
cagagaacaugaugaugaa

SEQ ID NO: 1623431 - RNA, 19 nt, Homo sapiens
  misc_RNA (1)...(19): siRNA sense strand
gaaggaagaacuugaaucu

SEQ ID NO: 1623432 - RNA, 19 nt, Homo sapiens
  misc_RNA (1)...(19): siRNA sense strand
gaaagauguuguuaauguc

SEQ ID NO: 1623433 - RNA, 19 nt, Homo sapiens
  misc_RNA (1)...(19): siRNA sense strand
gaagauaccuuaaaagaac

SEQ ID NO: 1623434 - RNA, 19 nt, Homo sapiens
  misc_RNA (1)...(19): siRNA sense strand
acacuuagaagauaccuua

SEQ ID NO: 1623435 - RNA, 19 nt, Homo sapiens
  misc_RNA (1)...(19): siRNA sense strand
ccacauugaugaauaugga

SEQ ID NO: 1623436 - RNA, 19 nt, Homo sapiens
  misc_RNA (1)...(19): siRNA sense strand
ccaaagcaaugguagacaa

SEQ ID NO: 1623437 - RNA, 19 nt, Homo sapiens
  misc_RNA (1)...(19): siRNA sense strand
gaugggagaugcacauaag

SEQ ID NO: 1623438 - RNA, 19 nt, Homo sapiens
  misc_RNA (1)...(19): siRNA sense strand
ugaaauggaugcucaacau

SEQ ID NO: 1623439 - RNA, 19 nt, Homo sapiens
  misc_RNA (1)...(19): siRNA sense strand
gaguugaugugccagauug

SEQ ID NO: 1623440 - RNA, 19 nt, Homo sapiens
  misc_RNA (1)...(19): siRNA sense strand
gagagacuucuuccuguua

SEQ ID NO: 1623441 - RNA, 19 nt, Homo sapiens
  misc_RNA (1)...(19): siRNA sense strand
gagagaagucugcagcuaa

SEQ ID NO: 1623442 - RNA, 19 nt, Homo sapiens
  misc_RNA (1)...(19): siRNA sense strand
gcagucugaucuucuagaa

SEQ ID NO: 1623443 - RNA, 19 nt, Homo sapiens
  misc_RNA (1)...(19): siRNA sense strand
aaaugaaaguucucucuga

SEQ ID NO: 1623444 - RNA, 19 nt, Homo sapiens
  misc_RNA (1)...(19): siRNA sense strand
caagaaacccuacaagaag

SEQ ID NO: 1623445 - RNA, 19 nt, Homo sapiens
  misc_RNA (1)...(19): siRNA sense strand
ugacagcacuacaggaaga

SEQ ID NO: 1623446 - RNA, 19 nt, Homo sapiens
  misc_RNA (1)...(19): siRNA sense strand
aauggaugcucaacauaua

SEQ ID NO: 1623447 - RNA, 19 nt, Homo sapiens
  misc_RNA (1)...(19): siRNA sense strand
uaagaagauuggaaaggaa

SEQ ID NO: 1623448 - RNA, 19 nt, Homo sapiens
  misc_RNA (1)...(19): siRNA sense strand
gaaauagcuuccgagauca

SEQ ID NO: 1623449 - RNA, 19 nt, Homo sapiens
  misc_RNA (1)...(19): siRNA sense strand
ugagggcgcuaaacaagaa

SEQ ID NO: 1623450 - RNA, 19 nt, Homo sapiens
  misc_RNA (1)...(19): siRNA sense strand
acaagaaacccuacaagaa

SEQ ID NO: 1623451 - RNA, 19 nt, Homo sapiens
  misc_RNA (1)...(19): siRNA sense strand
gaaggaaacaguuacucaa

SEQ ID NO: 1623452 - RNA, 19 nt, Homo sapiens
  misc_RNA (1)...(19): siRNA sense strand
gcaguacguuccaaauaca

SEQ ID NO: 1623453 - RNA, 19 nt, Homo sapiens
  misc_RNA (1)...(19): siRNA sense strand
uagaagaaauacagucaga

SEQ ID NO: 1623454 - RNA, 19 nt, Homo sapiens
  misc_RNA (1)...(19): siRNA sense strand
ugagcaaguucagaaguua

SEQ ID NO: 1623455 - RNA, 19 nt, Homo sapiens
  misc_RNA (1)...(19): siRNA sense strand
ggaagaaaguagagcaaac

SEQ ID NO: 1623456 - RNA, 19 nt, Homo sapiens
  misc_RNA (1)...(19): siRNA sense strand
aaaccaagacaaucagaua

SEQ ID NO: 1623457 - RNA, 19 nt, Homo sapiens
  misc_RNA (1)...(19): siRNA sense strand
gaaaagaacauccagaaga

SEQ ID NO: 1623458 - RNA, 19 nt, Homo sapiens
  misc_RNA (1)...(19): siRNA sense strand
gaugagguaacuuauauga

SEQ ID NO: 1623459 - RNA, 19 nt, Homo sapiens
  misc_RNA (1)...(19): siRNA sense strand
gcaaauuaagcuucucaaa

SEQ ID NO: 1623460 - RNA, 19 nt, Homo sapiens
  misc_RNA (1)...(19): siRNA sense strand
ccaaugcaauucuuaugga

SEQ ID NO: 1623461 - RNA, 19 nt, Homo sapiens
  misc_RNA (1)...(19): siRNA sense strand
gaacgagguccuucgaaau

SEQ ID NO: 1623462 - RNA, 19 nt, Homo sapiens
  misc_RNA (1)...(19): siRNA sense strand
ucagagaacaugaugauga

SEQ ID NO: 1623463 - RNA, 19 nt, Homo sapiens
  misc_RNA (1)...(19): siRNA sense strand
gaaacaagaaacccuacaa

SEQ ID NO: 1623464 - RNA, 19 nt, Homo sapiens
  misc_RNA (1)...(19): siRNA sense strand
agaagacagugaagagaaa

SEQ ID NO: 1623465 - RNA, 19 nt, Homo sapiens
  misc_RNA (1)...(19): siRNA sense strand
uaugagaguuuacgagaga

SEQ ID NO: 1623466 - RNA, 19 nt, Homo sapiens
  misc_RNA (1)...(19): siRNA sense strand
cgggaagacuuagaguuua

SEQ ID NO: 1623467 - RNA, 19 nt, Homo sapiens
  misc_RNA (1)...(19): siRNA sense strand
gcaaccaaugcaauucuua

SEQ ID NO: 1623468 - RNA, 19 nt, Homo sapiens
  misc_RNA (1)...(19): siRNA sense strand
uagaagauuuggagcaaga

SEQ ID NO: 1623469 - RNA, 19 nt, Homo sapiens
  misc_RNA (1)...(19): siRNA sense strand
gaacuucagguacaacuuc

SEQ ID NO: 1623470 - RNA, 19 nt, Homo sapiens
  misc_RNA (1)...(19): siRNA sense strand
gaccuuacaagacaauuaa

SEQ ID NO: 1623471 - RNA, 19 nt, Homo sapiens
  misc_RNA (1)...(19): siRNA sense strand
gaaagggaagaaagauuga

SEQ ID NO: 1623472 - RNA, 19 nt, Homo sapiens
  misc_RNA (1)...(19): siRNA sense strand
ugaaagcuauacaccaaga

SEQ ID NO: 1623473 - RNA, 19 nt, Homo sapiens
  misc_RNA (1)...(19): siRNA sense strand
gaaagggaacaucuggaaa

SEQ ID NO: 1623474 - RNA, 19 nt, Homo sapiens
  misc_RNA (1)...(19): siRNA sense strand
ugaagacaaagcuaacuua

SEQ ID NO: 1623475 - RNA, 19 nt, Homo sapiens
  misc_RNA (1)...(19): siRNA sense strand
ccagagagccaaagcaaug

SEQ ID NO: 1623476 - RNA, 19 nt, Homo sapiens
  misc_RNA (1)...(19): siRNA sense strand
gaaaagagacccagacugu

SEQ ID NO: 1623477 - RNA, 19 nt, Homo sapiens
  misc_RNA (1)...(19): siRNA sense strand
gaacauccagaagaaauau

SEQ ID NO: 1623478 - RNA, 19 nt, Homo sapiens
  misc_RNA (1)...(19): siRNA sense strand
ggaaauagcugauuaugaa

SEQ ID NO: 1623479 - RNA, 19 nt, Homo sapiens
  misc_RNA (1)...(19): siRNA sense strand
gaacaacucugaagauaau

SEQ ID NO: 1623480 - RNA, 19 nt, Homo sapiens
  misc_RNA (1)...(19): siRNA sense strand
ucaaagagauaccauguua

SEQ ID NO: 1623481 - RNA, 19 nt, Homo sapiens
  misc_RNA (1)...(19): siRNA sense strand
gaaaugggaucagaaguuu

SEQ ID NO: 1623482 - RNA, 19 nt, Homo sapiens
  misc_RNA (1)...(19): siRNA sense strand
gcagaaagcuauaagaauc

SEQ ID NO: 1623483 - RNA, 19 nt, Homo sapiens
  misc_RNA (1)...(19): siRNA sense strand
gaaagacaguggagacauu

SEQ ID NO: 1623484 - RNA, 19 nt, Homo sapiens
  misc_RNA (1)...(19): siRNA sense strand
gaacaugccacuacuguaa

SEQ ID NO: 1623485 - RNA, 19 nt, Homo sapiens
  misc_RNA (1)...(19): siRNA sense strand
cgaaauagcuuccgagauc

SEQ ID NO: 1623486 - RNA, 19 nt, Homo sapiens
  misc_RNA (1)...(19): siRNA sense strand
gaagugaagucucuuuaug

SEQ ID NO: 1623487 - RNA, 19 nt, Homo sapiens
  misc_RNA (1)...(19): siRNA sense strand
gaucagaaguuucagaaga

SEQ ID NO: 1623488 - RNA, 19 nt, Homo sapiens
  misc_RNA (1)...(19): siRNA sense strand
ggaaagaguuagaagaaau

SEQ ID NO: 1623489 - RNA, 19 nt, Homo sapiens
  misc_RNA (1)...(19): siRNA sense strand
gagcagaguugauacuauu

SEQ ID NO: 1623490 - RNA, 19 nt, Homo sapiens
  misc_RNA (1)...(19): siRNA sense strand
gaugaaaucugaacauaca

SEQ ID NO: 1623491 - RNA, 19 nt, Homo sapiens
  misc_RNA (1)...(19): siRNA sense strand
ugaaggaacuggugauauu

SEQ ID NO: 1623492 - RNA, 19 nt, Homo sapiens
  misc_RNA (1)...(19): siRNA sense strand
guacaacagugaacuagaa

SEQ ID NO: 1623493 - RNA, 19 nt, Homo sapiens
  misc_RNA (1)...(19): siRNA sense strand
caaauacagugaagacaaa

SEQ ID NO: 1623494 - RNA, 19 nt, Homo sapiens
  misc_RNA (1)...(19): siRNA sense strand
caaaccacauugaugaaua

SEQ ID NO: 1623495 - RNA, 19 nt, Homo sapiens
  misc_RNA (1)...(19): siRNA sense strand
agacaaagcuaacuuacaa

SEQ ID NO: 1623496 - RNA, 19 nt, Homo sapiens
  misc_RNA (1)...(19): siRNA sense strand
caacaaaccacauugauga

SEQ ID NO: 1623497 - RNA, 19 nt, Homo sapiens
  misc_RNA (1)...(19): siRNA sense strand
gaaaccagguagugaaaga

SEQ ID NO: 1623498 - RNA, 19 nt, Homo sapiens
  misc_RNA (1)...(19): siRNA sense strand
gaagaaguaucucaaacau

SEQ ID NO: 1623499 - RNA, 19 nt, Homo sapiens
  misc_RNA (1)...(19): siRNA sense strand
gaagaaauacagucagaaa

SEQ ID NO: 1623500 - RNA, 19 nt, Homo sapiens
  misc_RNA (1)...(19): siRNA sense strand
gcacauacacacagucuuu

SEQ ID NO: 1623501 - RNA, 19 nt, Homo sapiens
  misc_RNA (1)...(19): siRNA sense strand
gaacuugaaucucuucgau

SEQ ID NO: 1623502 - RNA, 19 nt, Homo sapiens
  misc_RNA (1)...(19): siRNA sense strand
gaaagaaauugaagaacuc

SEQ ID NO: 1623503 - RNA, 19 nt, Homo sapiens
  misc_RNA (1)...(19): siRNA sense strand
gaacuagauuccagcagaa

SEQ ID NO: 1623504 - RNA, 19 nt, Homo sapiens
  misc_RNA (1)...(19): siRNA sense strand
gcaauuagaacuuucagaa

SEQ ID NO: 1623505 - RNA, 19 nt, Homo sapiens
  misc_RNA (1)...(19): siRNA sense strand
gggaagacuuagaguuuaa

SEQ ID NO: 1623506 - RNA, 19 nt, Homo sapiens
  misc_RNA (1)...(19): siRNA sense strand
gcaggaaacuguguccaaa

SEQ ID NO: 1623507 - RNA, 19 nt, Homo sapiens
  misc_RNA (1)...(19): siRNA sense strand
gaagagaaagauguuguua

SEQ ID NO: 1623508 - RNA, 19 nt, Homo sapiens
  misc_RNA (1)...(19): siRNA sense strand
gaaaguagagcaaacaauc

SEQ ID NO: 1623509 - RNA, 19 nt, Homo sapiens
  misc_RNA (1)...(19): siRNA sense strand
agaaguaucucaaacaugu

SEQ ID NO: 1623510 - RNA, 19 nt, Homo sapiens
  misc_RNA (1)...(19): siRNA sense strand
guuacuaucucaacaagaa

SEQ ID NO: 1623511 - RNA, 19 nt, Homo sapiens
  misc_RNA (1)...(19): siRNA sense strand
cagcuaaccuggaauacuu

SEQ ID NO: 1623512 - RNA, 19 nt, Homo sapiens
  misc_RNA (1)...(19): siRNA sense strand
ggagaaagaaauugaagaa

SEQ ID NO: 1623513 - RNA, 19 nt, Homo sapiens
  misc_RNA (1)...(19): siRNA sense strand
gauccucugucuucaguaa

SEQ ID NO: 1623514 - RNA, 19 nt, Homo sapiens
  misc_RNA (1)...(19): siRNA sense strand
gaaggaacuggugauauua

SEQ ID NO: 1623515 - RNA, 19 nt, Homo sapiens
  misc_RNA (1)...(19): siRNA sense strand
gcaaagaaagaacuagauu

SEQ ID NO: 1623516 - RNA, 19 nt, Homo sapiens
  misc_RNA (1)...(19): siRNA sense strand
aagaagaggugaaagaguu

SEQ ID NO: 1623517 - RNA, 19 nt, Homo sapiens
  misc_RNA (1)...(19): siRNA sense strand
agcagaaacugaucacuua

SEQ ID NO: 1623518 - RNA, 19 nt, Homo sapiens
  misc_RNA (1)...(19): siRNA sense strand
gauagaagauuuggagcaa

SEQ ID NO: 1623519 - RNA, 19 nt, Homo sapiens
  misc_RNA (1)...(19): siRNA sense strand
gggagaaaaugaaaaguua

SEQ ID NO: 1623520 - RNA, 19 nt, Homo sapiens
  misc_RNA (1)...(19): siRNA sense strand
gaaauggaugcucaacaua

SEQ ID NO: 1623521 - RNA, 19 nt, Homo sapiens
  misc_RNA (1)...(19): siRNA sense strand
gauauguucuauucucuug

SEQ ID NO: 1623522 - RNA, 19 nt, Homo sapiens
  misc_RNA (1)...(19): siRNA sense strand
gaacaugaagcagagauaa

SEQ ID NO: 1623523 - RNA, 19 nt, Homo sapiens
  misc_RNA (1)...(19): siRNA sense strand
gagcagaaagcuauaagaa

SEQ ID NO: 1623524 - RNA, 19 nt, Homo sapiens
  misc_RNA (1)...(19): siRNA sense strand
gaagaucuccuggcucgua

SEQ ID NO: 1623525 - RNA, 19 nt, Homo sapiens
  misc_RNA (1)...(19): siRNA sense strand
gagauuaagugccuucaag

SEQ ID NO: 1623526 - RNA, 19 nt, Homo sapiens
  misc_RNA (1)...(19): siRNA sense strand
gaacuuucagaacaacuua

SEQ ID NO: 1623527 - RNA, 19 nt, Homo sapiens
  misc_RNA (1)...(19): siRNA sense strand
gagaucaagugcgacauuu

SEQ ID NO: 1623528 - RNA, 19 nt, Homo sapiens
  misc_RNA (1)...(19): siRNA sense strand
ugaaaguucucucugaaga

SEQ ID NO: 1623529 - RNA, 19 nt, Homo sapiens
  misc_RNA (1)...(19): siRNA sense strand
ggaacuggugauauuauua

SEQ ID NO: 1623530 - RNA, 19 nt, Homo sapiens
  misc_RNA (1)...(19): siRNA sense strand
gagcuagcagguuuaaaua

SEQ ID NO: 1623531 - RNA, 19 nt, Homo sapiens
  misc_RNA (1)...(19): siRNA sense strand
aaucugagcuagcagguuu

SEQ ID NO: 1623532 - RNA, 19 nt, Homo sapiens
  misc_RNA (1)...(19): siRNA sense strand
gucaaacacuuagaagaua

SEQ ID NO: 1623533 - RNA, 19 nt, Homo sapiens
  misc_RNA (1)...(19): siRNA sense strand
gaaaagaaggaaacaguua

SEQ ID NO: 1623534 - RNA, 19 nt, Homo sapiens
  misc_RNA (1)...(19): siRNA sense strand
guugaaagcuauacaccaa

SEQ ID NO: 1623535 - RNA, 19 nt, Homo sapiens
  misc_RNA (1)...(19): siRNA sense strand
cagagaacaugaugaugaa

SEQ ID NO: 1623536 - RNA, 19 nt, Homo sapiens
  misc_RNA (1)...(19): siRNA sense strand
gaaggaagaacuugaaucu

SEQ ID NO: 1623537 - RNA, 19 nt, Homo sapiens
  misc_RNA (1)...(19): siRNA sense strand
gaaagauguuguuaauguc

SEQ ID NO: 1623538 - RNA, 19 nt, Homo sapiens
  misc_RNA (1)...(19): siRNA sense strand
gaagauaccuuaaaagaac

SEQ ID NO: 1623539 - RNA, 19 nt, Homo sapiens
  misc_RNA (1)...(19): siRNA sense strand
gaugggagaugcacauaag

SEQ ID NO: 1623540 - RNA, 19 nt, Homo sapiens
  misc_RNA (1)...(19): siRNA sense strand
ccacauugaugaauaugga

SEQ ID NO: 1623541 - RNA, 19 nt, Homo sapiens
  misc_RNA (1)...(19): siRNA sense strand
ccaaagcaaugguagacaa

SEQ ID NO: 1623542 - RNA, 19 nt, Homo sapiens
  misc_RNA (1)...(19): siRNA sense strand
ugaaauggaugcucaacau

SEQ ID NO: 1623543 - RNA, 19 nt, Homo sapiens
  misc_RNA (1)...(19): siRNA sense strand
acacuuagaagauaccuua

SEQ ID NO: 1623544 - RNA, 19 nt, Homo sapiens
  misc_RNA (1)...(19): siRNA sense strand
gaguugaugugccagauug

SEQ ID NO: 1623545 - RNA, 19 nt, Homo sapiens
  misc_RNA (1)...(19): siRNA sense strand
gagagacuucuuccuguua

SEQ ID NO: 1623546 - RNA, 19 nt, Homo sapiens
  misc_RNA (1)...(19): siRNA sense strand
gagagaagucugcagcuaa

SEQ ID NO: 1623547 - RNA, 19 nt, Homo sapiens
  misc_RNA (1)...(19): siRNA sense strand
gcagucugaucuucuagaa

SEQ ID NO: 1623548 - RNA, 19 nt, Homo sapiens
  misc_RNA (1)...(19): siRNA sense strand
aaaugaaaguucucucuga

SEQ ID NO: 1623549 - RNA, 19 nt, Homo sapiens
  misc_RNA (1)...(19): siRNA sense strand
caagaaacccuacaagaag

SEQ ID NO: 1623550 - RNA, 19 nt, Homo sapiens
  misc_RNA (1)...(19): siRNA sense strand
ugacagcacuacaggaaga

SEQ ID NO: 1623551 - RNA, 19 nt, Homo sapiens
  misc_RNA (1)...(19): siRNA sense strand
aauggaugcucaacauaua

SEQ ID NO: 1623552 - RNA, 19 nt, Homo sapiens
  misc_RNA (1)...(19): siRNA sense strand
uaagaagauuggaaaggaa

SEQ ID NO: 1623553 - RNA, 19 nt, Homo sapiens
  misc_RNA (1)...(19): siRNA sense strand
gaaauagcuuccgagauca

SEQ ID NO: 1623554 - RNA, 19 nt, Homo sapiens
  misc_RNA (1)...(19): siRNA sense strand
ugagggcgcuaaacaagaa

SEQ ID NO: 1623555 - RNA, 19 nt, Homo sapiens
  misc_RNA (1)...(19): siRNA sense strand
acaagaaacccuacaagaa

SEQ ID NO: 1623556 - RNA, 19 nt, Homo sapiens
  misc_RNA (1)...(19): siRNA sense strand
gcaguacguuccaaauaca

SEQ ID NO: 1623557 - RNA, 19 nt, Homo sapiens
  misc_RNA (1)...(19): siRNA sense strand
uagaagaaauacagucaga

SEQ ID NO: 1623558 - RNA, 19 nt, Homo sapiens
  misc_RNA (1)...(19): siRNA sense strand
ugagcaaguucagaaguua

SEQ ID NO: 1623559 - RNA, 19 nt, Homo sapiens
  misc_RNA (1)...(19): siRNA sense strand
ggaagaaaguagagcaaac

SEQ ID NO: 1623560 - RNA, 19 nt, Homo sapiens
  misc_RNA (1)...(19): siRNA sense strand
aaaccaagacaaucagaua

SEQ ID NO: 1623561 - RNA, 19 nt, Homo sapiens
  misc_RNA (1)...(19): siRNA sense strand
gaaaagaacauccagaaga

SEQ ID NO: 1623562 - RNA, 19 nt, Homo sapiens
  misc_RNA (1)...(19): siRNA sense strand
gaaggaaacaguuacucaa

SEQ ID NO: 1623563 - RNA, 19 nt, Homo sapiens
  misc_RNA (1)...(19): siRNA sense strand
gaugagguaacuuauauga

SEQ ID NO: 1623564 - RNA, 19 nt, Homo sapiens
  misc_RNA (1)...(19): siRNA sense strand
gcaaauuaagcuucucaaa

SEQ ID NO: 1623565 - RNA, 19 nt, Homo sapiens
  misc_RNA (1)...(19): siRNA sense strand
ccaaugcaauucuuaugga

SEQ ID NO: 1623566 - RNA, 19 nt, Homo sapiens
  misc_RNA (1)...(19): siRNA sense strand
gaacgagguccuucgaaau

SEQ ID NO: 1623567 - RNA, 19 nt, Homo sapiens
  misc_RNA (1)...(19): siRNA sense strand
ucagagaacaugaugauga

SEQ ID NO: 1623568 - RNA, 19 nt, Homo sapiens
  misc_RNA (1)...(19): siRNA sense strand
gaaacaagaaacccuacaa

SEQ ID NO: 1623569 - RNA, 19 nt, Homo sapiens
  misc_RNA (1)...(19): siRNA sense strand
agaagacagugaagagaaa

SEQ ID NO: 1623570 - RNA, 19 nt, Homo sapiens
  misc_RNA (1)...(19): siRNA sense strand
uaugagaguuuacgagaga

SEQ ID NO: 1623571 - RNA, 19 nt, Homo sapiens
  misc_RNA (1)...(19): siRNA sense strand
gaucaaaaccuguuacuga

SEQ ID NO: 1623572 - RNA, 19 nt, Homo sapiens
  misc_RNA (1)...(19): siRNA sense strand
gcaaccaaugcaauucuua

SEQ ID NO: 1623573 - RNA, 19 nt, Homo sapiens
  misc_RNA (1)...(19): siRNA sense strand
uagaagauuuggagcaaga

SEQ ID NO: 1623574 - RNA, 19 nt, Homo sapiens
  misc_RNA (1)...(19): siRNA sense strand
gaacuucagguacaacuuc

SEQ ID NO: 1623575 - RNA, 19 nt, Homo sapiens
  misc_RNA (1)...(19): siRNA sense strand
gaccuuacaagacaauuaa

SEQ ID NO: 1623576 - RNA, 19 nt, Homo sapiens
  misc_RNA (1)...(19): siRNA sense strand
gaaagggaagaaagauuga

SEQ ID NO: 1623577 - RNA, 19 nt, Homo sapiens
  misc_RNA (1)...(19): siRNA sense strand
cgggaagacuuagaguuua

SEQ ID NO: 1623578 - RNA, 19 nt, Homo sapiens
  misc_RNA (1)...(19): siRNA sense strand
ggagcucagugaugacuug

SEQ ID NO: 1623579 - RNA, 19 nt, Homo sapiens
  misc_RNA (1)...(19): siRNA sense strand
ggaccaggaccaagaagug

SEQ ID NO: 1623580 - RNA, 19 nt, Homo sapiens
  misc_RNA (1)...(19): siRNA sense strand
gcucagugaugacuugcau

SEQ ID NO: 1623581 - RNA, 19 nt, Homo sapiens
  misc_RNA (1)...(19): siRNA sense strand
agcaggagcucagugauga

SEQ ID NO: 1623582 - RNA, 19 nt, Homo sapiens
  misc_RNA (1)...(19): siRNA sense strand
guggagcgcuaccgacagu

SEQ ID NO: 1623583 - RNA, 19 nt, Homo sapiens
  misc_RNA (1)...(19): siRNA sense strand
gaccaggaccaagaaguga

SEQ ID NO: 1623584 - RNA, 19 nt, Homo sapiens
  misc_RNA (1)...(19): siRNA sense strand
ggagcgcuaccgacaguuc

SEQ ID NO: 1623585 - RNA, 19 nt, Homo sapiens
  misc_RNA (1)...(19): siRNA sense strand
ucagugaugacuugcaugu

SEQ ID NO: 1623586 - RNA, 19 nt, Homo sapiens
  misc_RNA (1)...(19): siRNA sense strand
ggagcucagugaugacuug

SEQ ID NO: 1623587 - RNA, 19 nt, Homo sapiens
  misc_RNA (1)...(19): siRNA sense strand
ggaccaggaccaagaagug

SEQ ID NO: 1623588 - RNA, 19 nt, Homo sapiens
  misc_RNA (1)...(19): siRNA sense strand
gcucagugaugacuugcau

SEQ ID NO: 1623589 - RNA, 19 nt, Homo sapiens
  misc_RNA (1)...(19): siRNA sense strand
agcaggagcucagugauga

SEQ ID NO: 1623590 - RNA, 19 nt, Homo sapiens
  misc_RNA (1)...(19): siRNA sense strand
guggagcgcuaccgacagu

SEQ ID NO: 1623591 - RNA, 19 nt, Homo sapiens
  misc_RNA (1)...(19): siRNA sense strand
gaccaggaccaagaaguga

SEQ ID NO: 1623592 - RNA, 19 nt, Homo sapiens
  misc_RNA (1)...(19): siRNA sense strand
ggagcgcuaccgacaguuc

SEQ ID NO: 1623593 - RNA, 19 nt, Homo sapiens
  misc_RNA (1)...(19): siRNA sense strand
ucagugaugacuugcaugu

SEQ ID NO: 1623594 - RNA, 19 nt, Homo sapiens
  misc_RNA (1)...(19): siRNA sense strand
ggagcucagugaugacuug

SEQ ID NO: 1623595 - RNA, 19 nt, Homo sapiens
  misc_RNA (1)...(19): siRNA sense strand
ggaccaggaccaagaagug

SEQ ID NO: 1623596 - RNA, 19 nt, Homo sapiens
  misc_RNA (1)...(19): siRNA sense strand
gcucagugaugacuugcau

SEQ ID NO: 1623597 - RNA, 19 nt, Homo sapiens
  misc_RNA (1)...(19): siRNA sense strand
agcaggagcucagugauga

SEQ ID NO: 1623598 - RNA, 19 nt, Homo sapiens
  misc_RNA (1)...(19): siRNA sense strand
guggagcgcuaccgacagu

SEQ ID NO: 1623599 - RNA, 19 nt, Homo sapiens
  misc_RNA (1)...(19): siRNA sense strand
gaccaggaccaagaaguga

SEQ ID NO: 1623600 - RNA, 19 nt, Homo sapiens
  misc_RNA (1)...(19): siRNA sense strand
ggagcgcuaccgacaguuc

SEQ ID NO: 1623601 - RNA, 19 nt, Homo sapiens
  misc_RNA (1)...(19): siRNA sense strand
ucagugaugacuugcaugu

SEQ ID NO: 1623602 - RNA, 19 nt, Homo sapiens
  misc_RNA (1)...(19): siRNA sense strand
ggagcucagugaugacuug

SEQ ID NO: 1623603 - RNA, 19 nt, Homo sapiens
  misc_RNA (1)...(19): siRNA sense strand
ggaccaggaccaagaagug

SEQ ID NO: 1623604 - RNA, 19 nt, Homo sapiens
  misc_RNA (1)...(19): siRNA sense strand
gcucagugaugacuugcau

SEQ ID NO: 1623605 - RNA, 19 nt, Homo sapiens
  misc_RNA (1)...(19): siRNA sense strand
agcaggagcucagugauga

SEQ ID NO: 1623606 - RNA, 19 nt, Homo sapiens
  misc_RNA (1)...(19): siRNA sense strand
guggagcgcuaccgacagu

SEQ ID NO: 1623607 - RNA, 19 nt, Homo sapiens
  misc_RNA (1)...(19): siRNA sense strand
gaccaggaccaagaaguga

SEQ ID NO: 1623608 - RNA, 19 nt, Homo sapiens
  misc_RNA (1)...(19): siRNA sense strand
ggagcgcuaccgacaguuc

SEQ ID NO: 1623609 - RNA, 19 nt, Homo sapiens
  misc_RNA (1)...(19): siRNA sense strand
ucagugaugacuugcaugu

SEQ ID NO: 1623610 - RNA, 19 nt, Homo sapiens
  misc_RNA (1)...(19): siRNA sense strand
ggagcucagugaugacuug

SEQ ID NO: 1623611 - RNA, 19 nt, Homo sapiens
  misc_RNA (1)...(19): siRNA sense strand
ggaccaggaccaagaagug

SEQ ID NO: 1623612 - RNA, 19 nt, Homo sapiens
  misc_RNA (1)...(19): siRNA sense strand
gcucagugaugacuugcau

SEQ ID NO: 1623613 - RNA, 19 nt, Homo sapiens
  misc_RNA (1)...(19): siRNA sense strand
agcaggagcucagugauga

SEQ ID NO: 1623614 - RNA, 19 nt, Homo sapiens
  misc_RNA (1)...(19): siRNA sense strand
guggagcgcuaccgacagu

SEQ ID NO: 1623615 - RNA, 19 nt, Homo sapiens
  misc_RNA (1)...(19): siRNA sense strand
gaccaggaccaagaaguga

SEQ ID NO: 1623616 - RNA, 19 nt, Homo sapiens
  misc_RNA (1)...(19): siRNA sense strand
ggagcgcuaccgacaguuc

SEQ ID NO: 1623617 - RNA, 19 nt, Homo sapiens
  misc_RNA (1)...(19): siRNA sense strand
ucagugaugacuugcaugu

SEQ ID NO: 1623618 - RNA, 19 nt, Homo sapiens
  misc_RNA (1)...(19): siRNA sense strand
ggagcucagugaugacuug

SEQ ID NO: 1623619 - RNA, 19 nt, Homo sapiens
  misc_RNA (1)...(19): siRNA sense strand
ggaccaggaccaagaagug

SEQ ID NO: 1623620 - RNA, 19 nt, Homo sapiens
  misc_RNA (1)...(19): siRNA sense strand
gcucagugaugacuugcau

SEQ ID NO: 1623621 - RNA, 19 nt, Homo sapiens
  misc_RNA (1)...(19): siRNA sense strand
agcaggagcucagugauga

SEQ ID NO: 1623622 - RNA, 19 nt, Homo sapiens
  misc_RNA (1)...(19): siRNA sense strand
guggagcgcuaccgacagu

SEQ ID NO: 1623623 - RNA, 19 nt, Homo sapiens
  misc_RNA (1)...(19): siRNA sense strand
gaccaggaccaagaaguga

SEQ ID NO: 1623624 - RNA, 19 nt, Homo sapiens
  misc_RNA (1)...(19): siRNA sense strand
ggagcgcuaccgacaguuc

SEQ ID NO: 1623625 - RNA, 19 nt, Homo sapiens
  misc_RNA (1)...(19): siRNA sense strand
ucagugaugacuugcaugu

SEQ ID NO: 1623626 - RNA, 19 nt, Homo sapiens
  misc_RNA (1)...(19): siRNA sense strand
ggagcucagugaugacuug

SEQ ID NO: 1623627 - RNA, 19 nt, Homo sapiens
  misc_RNA (1)...(19): siRNA sense strand
ggaccaggaccaagaagug

SEQ ID NO: 1623628 - RNA, 19 nt, Homo sapiens
  misc_RNA (1)...(19): siRNA sense strand
gcucagugaugacuugcau

SEQ ID NO: 1623629 - RNA, 19 nt, Homo sapiens
  misc_RNA (1)...(19): siRNA sense strand
agcaggagcucagugauga

SEQ ID NO: 1623630 - RNA, 19 nt, Homo sapiens
  misc_RNA (1)...(19): siRNA sense strand
guggagcgcuaccgacagu

SEQ ID NO: 1623631 - RNA, 19 nt, Homo sapiens
  misc_RNA (1)...(19): siRNA sense strand
gaccaggaccaagaaguga

SEQ ID NO: 1623632 - RNA, 19 nt, Homo sapiens
  misc_RNA (1)...(19): siRNA sense strand
ggagcgcuaccgacaguuc

SEQ ID NO: 1623633 - RNA, 19 nt, Homo sapiens
  misc_RNA (1)...(19): siRNA sense strand
ucagugaugacuugcaugu

SEQ ID NO: 1623634 - RNA, 19 nt, Homo sapiens
  misc_RNA (1)...(19): siRNA sense strand
ggagcucagugaugacuug

SEQ ID NO: 1623635 - RNA, 19 nt, Homo sapiens
  misc_RNA (1)...(19): siRNA sense strand
ggaccaggaccaagaagug

SEQ ID NO: 1623636 - RNA, 19 nt, Homo sapiens
  misc_RNA (1)...(19): siRNA sense strand
gcucagugaugacuugcau

SEQ ID NO: 1623637 - RNA, 19 nt, Homo sapiens
  misc_RNA (1)...(19): siRNA sense strand
agcaggagcucagugauga

SEQ ID NO: 1623638 - RNA, 19 nt, Homo sapiens
  misc_RNA (1)...(19): siRNA sense strand
guggagcgcuaccgacagu

SEQ ID NO: 1623639 - RNA, 19 nt, Homo sapiens
  misc_RNA (1)...(19): siRNA sense strand
gaccaggaccaagaaguga

SEQ ID NO: 1623640 - RNA, 19 nt, Homo sapiens
  misc_RNA (1)...(19): siRNA sense strand
ggagcgcuaccgacaguuc

SEQ ID NO: 1623641 - RNA, 19 nt, Homo sapiens
  misc_RNA (1)...(19): siRNA sense strand
ucagugaugacuugcaugu

SEQ ID NO: 1623642 - RNA, 19 nt, Homo sapiens
  misc_RNA (1)...(19): siRNA sense strand
caaaguagcuuguauauuc

SEQ ID NO: 1623643 - RNA, 19 nt, Homo sapiens
  misc_RNA (1)...(19): siRNA sense strand
ugaaauaccuguugguuaa

SEQ ID NO: 1623644 - RNA, 19 nt, Homo sapiens
  misc_RNA (1)...(19): siRNA sense strand
gagaagauguuucgaguca

SEQ ID NO: 1623645 - RNA, 19 nt, Homo sapiens
  misc_RNA (1)...(19): siRNA sense strand
ggaauccucugcaggcaua

SEQ ID NO: 1623646 - RNA, 19 nt, Homo sapiens
  misc_RNA (1)...(19): siRNA sense strand
guacauccuuggaaucuuu

SEQ ID NO: 1623647 - RNA, 19 nt, Homo sapiens
  misc_RNA (1)...(19): siRNA sense strand
agaaagggcuaauaaguug

SEQ ID NO: 1623648 - RNA, 19 nt, Homo sapiens
  misc_RNA (1)...(19): siRNA sense strand
gaagauguuucgagucaau

SEQ ID NO: 1623649 - RNA, 19 nt, Homo sapiens
  misc_RNA (1)...(19): siRNA sense strand
gaugaaaguccucaaguuu

SEQ ID NO: 1623650 - RNA, 19 nt, Homo sapiens
  misc_RNA (1)...(19): siRNA sense strand
caaaguacauccuuggaau

SEQ ID NO: 1623651 - RNA, 19 nt, Homo sapiens
  misc_RNA (1)...(19): siRNA sense strand
ggagaaaugacuacggaua

SEQ ID NO: 1623652 - RNA, 19 nt, Homo sapiens
  misc_RNA (1)...(19): siRNA sense strand
gcagaccaccugaauauga

SEQ ID NO: 1623653 - RNA, 19 nt, Homo sapiens
  misc_RNA (1)...(19): siRNA sense strand
uuacagauaccgcuaauaa

SEQ ID NO: 1623654 - RNA, 19 nt, Homo sapiens
  misc_RNA (1)...(19): siRNA sense strand
agaaaugacuacggauaua

SEQ ID NO: 1623655 - RNA, 19 nt, Homo sapiens
  misc_RNA (1)...(19): siRNA sense strand
gcuaauaaauugcaguagu

SEQ ID NO: 1623656 - RNA, 19 nt, Homo sapiens
  misc_RNA (1)...(19): siRNA sense strand
gcuaauaaguuggugaaau

SEQ ID NO: 1623657 - RNA, 19 nt, Homo sapiens
  misc_RNA (1)...(19): siRNA sense strand
gagagaaguggcaguaauu

SEQ ID NO: 1623658 - RNA, 19 nt, Homo sapiens
  misc_RNA (1)...(19): siRNA sense strand
gagucaaucugaaagaaau

SEQ ID NO: 1623659 - RNA, 19 nt, Homo sapiens
  misc_RNA (1)...(19): siRNA sense strand
caagaaagggcuaauaagu

SEQ ID NO: 1623660 - RNA, 19 nt, Homo sapiens
  misc_RNA (1)...(19): siRNA sense strand
gcucaucacagacgaguuu

SEQ ID NO: 1623661 - RNA, 19 nt, Homo sapiens
  misc_RNA (1)...(19): siRNA sense strand
gagaaaugacuacggauau

SEQ ID NO: 1623662 - RNA, 19 nt, Homo sapiens
  misc_RNA (1)...(19): siRNA sense strand
cagcagaccaccugaauau

SEQ ID NO: 1623663 - RNA, 19 nt, Homo sapiens
  misc_RNA (1)...(19): siRNA sense strand
agauaccgcuaauaaauug

SEQ ID NO: 1623664 - RNA, 19 nt, Homo sapiens
  misc_RNA (1)...(19): siRNA sense strand
gugaaauaccuguugguua

SEQ ID NO: 1623665 - RNA, 19 nt, Homo sapiens
  misc_RNA (1)...(19): siRNA sense strand
ccacgagacuagcaagaug

SEQ ID NO: 1623666 - RNA, 19 nt, Homo sapiens
  misc_RNA (1)...(19): siRNA sense strand
ugagagaaguggcaguaau

SEQ ID NO: 1623667 - RNA, 19 nt, Homo sapiens
  misc_RNA (1)...(19): siRNA sense strand
ugaugaauauuucccagaa

SEQ ID NO: 1623668 - RNA, 19 nt, Homo sapiens
  misc_RNA (1)...(19): siRNA sense strand
gcuacacucuggagaagau

SEQ ID NO: 1623669 - RNA, 19 nt, Homo sapiens
  misc_RNA (1)...(19): siRNA sense strand
uacaagaaagggcuaauaa

SEQ ID NO: 1623670 - RNA, 19 nt, Homo sapiens
  misc_RNA (1)...(19): siRNA sense strand
caagcugggucuccucaug

SEQ ID NO: 1623671 - RNA, 19 nt, Homo sapiens
  misc_RNA (1)...(19): siRNA sense strand
gaugagagaaguggcagua

SEQ ID NO: 1623672 - RNA, 19 nt, Homo sapiens
  misc_RNA (1)...(19): siRNA sense strand
gcaaaguagcuuguauauu

SEQ ID NO: 1623673 - RNA, 19 nt, Homo sapiens
  misc_RNA (1)...(19): siRNA sense strand
cuaauaaauugcaguaguc

SEQ ID NO: 1623674 - RNA, 19 nt, Homo sapiens
  misc_RNA (1)...(19): siRNA sense strand
cagauaccgcuaauaaauu

SEQ ID NO: 1623675 - RNA, 19 nt, Homo sapiens
  misc_RNA (1)...(19): siRNA sense strand
acagauaccgcuaauaaau

SEQ ID NO: 1623676 - RNA, 19 nt, Homo sapiens
  misc_RNA (1)...(19): siRNA sense strand
agaugaaaguccucaaguu

SEQ ID NO: 1623677 - RNA, 19 nt, Homo sapiens
  misc_RNA (1)...(19): siRNA sense strand
gaaaugacuacggauauag

SEQ ID NO: 1623678 - RNA, 19 nt, Homo sapiens
  misc_RNA (1)...(19): siRNA sense strand
gcagggugcagaagaaaga

SEQ ID NO: 1623679 - RNA, 19 nt, Homo sapiens
  misc_RNA (1)...(19): siRNA sense strand
aagaaagggcuaauaaguu

SEQ ID NO: 1623680 - RNA, 19 nt, Homo sapiens
  misc_RNA (1)...(19): siRNA sense strand
caucaaacgcucagacaug

SEQ ID NO: 1623681 - RNA, 19 nt, Homo sapiens
  misc_RNA (1)...(19): siRNA sense strand
gggaggugcugcgcaaguu

SEQ ID NO: 1623682 - RNA, 19 nt, Homo sapiens
  misc_RNA (1)...(19): siRNA sense strand
guuaaggaccagacaaaga

SEQ ID NO: 1623683 - RNA, 19 nt, Homo sapiens
  misc_RNA (1)...(19): siRNA sense strand
ugaaaguccucaaguuugc

SEQ ID NO: 1623684 - RNA, 19 nt, Homo sapiens
  misc_RNA (1)...(19): siRNA sense strand
caagcuacacucuggagaa

SEQ ID NO: 1623685 - RNA, 19 nt, Homo sapiens
  misc_RNA (1)...(19): siRNA sense strand
gcgaggcaguggagaugga

SEQ ID NO: 1623686 - RNA, 19 nt, Homo sapiens
  misc_RNA (1)...(19): siRNA sense strand
cagacgaguuugugaagca

SEQ ID NO: 1623687 - RNA, 19 nt, Homo sapiens
  misc_RNA (1)...(19): siRNA sense strand
agagaaguggcaguaauua

SEQ ID NO: 1623688 - RNA, 19 nt, Homo sapiens
  misc_RNA (1)...(19): siRNA sense strand
agacaaagauccccaucaa

SEQ ID NO: 1623689 - RNA, 19 nt, Homo sapiens
  misc_RNA (1)...(19): siRNA sense strand
gagacuagcaagaugaaag

SEQ ID NO: 1623690 - RNA, 19 nt, Homo sapiens
  misc_RNA (1)...(19): siRNA sense strand
uuacaagaaagggcuaaua

SEQ ID NO: 1623691 - RNA, 19 nt, Homo sapiens
  misc_RNA (1)...(19): siRNA sense strand
ggugaaauaccuguugguu

SEQ ID NO: 1623692 - RNA, 19 nt, Homo sapiens
  misc_RNA (1)...(19): siRNA sense strand
cgagucaaucugaaagaaa

SEQ ID NO: 1623693 - RNA, 19 nt, Homo sapiens
  misc_RNA (1)...(19): siRNA sense strand
gaaaucauugaacgagcaa

SEQ ID NO: 1623694 - RNA, 19 nt, Homo sapiens
  misc_RNA (1)...(19): siRNA sense strand
uuaaggaccagacaaagau

SEQ ID NO: 1623695 - RNA, 19 nt, Homo sapiens
  misc_RNA (1)...(19): siRNA sense strand
agaaguggcaguaauuaca

SEQ ID NO: 1623696 - RNA, 19 nt, Homo sapiens
  misc_RNA (1)...(19): siRNA sense strand
gggcuaauaaguuggugaa

SEQ ID NO: 1623697 - RNA, 19 nt, Homo sapiens
  misc_RNA (1)...(19): siRNA sense strand
uagcuuguauauucucauc

SEQ ID NO: 1623698 - RNA, 19 nt, Homo sapiens
  misc_RNA (1)...(19): siRNA sense strand
uaacagcagaccaccugaa

SEQ ID NO: 1623699 - RNA, 19 nt, Homo sapiens
  misc_RNA (1)...(19): siRNA sense strand
ucgagucaaucugaaagaa

SEQ ID NO: 1623700 - RNA, 19 nt, Homo sapiens
  misc_RNA (1)...(19): siRNA sense strand
gaaguggcaguaauuacag

SEQ ID NO: 1623701 - RNA, 19 nt, Homo sapiens
  misc_RNA (1)...(19): siRNA sense strand
cagaccaccugaauaugag

SEQ ID NO: 1623702 - RNA, 19 nt, Homo sapiens
  misc_RNA (1)...(19): siRNA sense strand
caucagcacucaggaaucc

SEQ ID NO: 1623703 - RNA, 19 nt, Homo sapiens
  misc_RNA (1)...(19): siRNA sense strand
caagaugaaaguccucaag

SEQ ID NO: 1623704 - RNA, 19 nt, Homo sapiens
  misc_RNA (1)...(19): siRNA sense strand
gagaaguggcaguaauuac

SEQ ID NO: 1623705 - RNA, 19 nt, Homo sapiens
  misc_RNA (1)...(19): siRNA sense strand
ucauggugauucugagugu

SEQ ID NO: 1623706 - RNA, 19 nt, Homo sapiens
  misc_RNA (1)...(19): siRNA sense strand
ccauggagccaaaguacau

SEQ ID NO: 1623707 - RNA, 19 nt, Homo sapiens
  misc_RNA (1)...(19): siRNA sense strand
ccagugaggcugucaucug

SEQ ID NO: 1623708 - RNA, 19 nt, Homo sapiens
  misc_RNA (1)...(19): siRNA sense strand
gcuuguauauucucaucag

SEQ ID NO: 1623709 - RNA, 19 nt, Homo sapiens
  misc_RNA (1)...(19): siRNA sense strand
ccgcuaauaaauugcagua

SEQ ID NO: 1623710 - RNA, 19 nt, Homo sapiens
  misc_RNA (1)...(19): siRNA sense strand
gcuccuaccacgagacuag

SEQ ID NO: 1623711 - RNA, 19 nt, Homo sapiens
  misc_RNA (1)...(19): siRNA sense strand
guuuacagauaccgcuaau

SEQ ID NO: 1623712 - RNA, 19 nt, Homo sapiens
  misc_RNA (1)...(19): siRNA sense strand
aggcaguuauggccaauca

SEQ ID NO: 1623713 - RNA, 19 nt, Homo sapiens
  misc_RNA (1)...(19): siRNA sense strand
caguaguccuucccaugga

SEQ ID NO: 1623714 - RNA, 19 nt, Homo sapiens
  misc_RNA (1)...(19): siRNA sense strand
ggaggugcugcgcaaguug

SEQ ID NO: 1623715 - RNA, 19 nt, Homo sapiens
  misc_RNA (1)...(19): siRNA sense strand
cagcugagggugucaugug

SEQ ID NO: 1623716 - RNA, 19 nt, Homo sapiens
  misc_RNA (1)...(19): siRNA sense strand
acagcagaccaccugaaua

SEQ ID NO: 1623717 - RNA, 19 nt, Homo sapiens
  misc_RNA (1)...(19): siRNA sense strand
gaaauaccuguugguuaag

SEQ ID NO: 1623718 - RNA, 19 nt, Homo sapiens
  misc_RNA (1)...(19): siRNA sense strand
uacagauaccgcuaauaaa

SEQ ID NO: 1623719 - RNA, 19 nt, Homo sapiens
  misc_RNA (1)...(19): siRNA sense strand
ucauugaacgagcaagcua

SEQ ID NO: 1623720 - RNA, 19 nt, Homo sapiens
  misc_RNA (1)...(19): siRNA sense strand
caaggcaguuauggccaau

SEQ ID NO: 1623721 - RNA, 19 nt, Homo sapiens
  misc_RNA (1)...(19): siRNA sense strand
auaaauugcaguaguccuu

SEQ ID NO: 1623722 - RNA, 19 nt, Homo sapiens
  misc_RNA (1)...(19): siRNA sense strand
acaagaaagggcuaauaag

SEQ ID NO: 1623723 - RNA, 19 nt, Homo sapiens
  misc_RNA (1)...(19): siRNA sense strand
aagcuacacucuggagaag

SEQ ID NO: 1623724 - RNA, 19 nt, Homo sapiens
  misc_RNA (1)...(19): siRNA sense strand
augaaaguccucaaguuug

SEQ ID NO: 1623725 - RNA, 19 nt, Homo sapiens
  misc_RNA (1)...(19): siRNA sense strand
gcaagaugaaaguccucaa

SEQ ID NO: 1623726 - RNA, 19 nt, Homo sapiens
  misc_RNA (1)...(19): siRNA sense strand
caaaguagcuuguauauuc

SEQ ID NO: 1623727 - RNA, 19 nt, Homo sapiens
  misc_RNA (1)...(19): siRNA sense strand
ugaaauaccuguugguuaa

SEQ ID NO: 1623728 - RNA, 19 nt, Homo sapiens
  misc_RNA (1)...(19): siRNA sense strand
gagaagauguuucgaguca

SEQ ID NO: 1623729 - RNA, 19 nt, Homo sapiens
  misc_RNA (1)...(19): siRNA sense strand
ggaauccucugcaggcaua

SEQ ID NO: 1623730 - RNA, 19 nt, Homo sapiens
  misc_RNA (1)...(19): siRNA sense strand
agaaagggcuaauaaguug

SEQ ID NO: 1623731 - RNA, 19 nt, Homo sapiens
  misc_RNA (1)...(19): siRNA sense strand
gaagauguuucgagucaau

SEQ ID NO: 1623732 - RNA, 19 nt, Homo sapiens
  misc_RNA (1)...(19): siRNA sense strand
gaugaaaguccucaaguuu

SEQ ID NO: 1623733 - RNA, 19 nt, Homo sapiens
  misc_RNA (1)...(19): siRNA sense strand
ggagaaaugacuacggaua

SEQ ID NO: 1623734 - RNA, 19 nt, Homo sapiens
  misc_RNA (1)...(19): siRNA sense strand
gcagaccaccugaauauga

SEQ ID NO: 1623735 - RNA, 19 nt, Homo sapiens
  misc_RNA (1)...(19): siRNA sense strand
agaaaugacuacggauaua

SEQ ID NO: 1623736 - RNA, 19 nt, Homo sapiens
  misc_RNA (1)...(19): siRNA sense strand
gcuaauaaguuggugaaau

SEQ ID NO: 1623737 - RNA, 19 nt, Homo sapiens
  misc_RNA (1)...(19): siRNA sense strand
gagagaaguggcaguaauu

SEQ ID NO: 1623738 - RNA, 19 nt, Homo sapiens
  misc_RNA (1)...(19): siRNA sense strand
gagucaaucugaaagaaau

SEQ ID NO: 1623739 - RNA, 19 nt, Homo sapiens
  misc_RNA (1)...(19): siRNA sense strand
caagaaagggcuaauaagu

SEQ ID NO: 1623740 - RNA, 19 nt, Homo sapiens
  misc_RNA (1)...(19): siRNA sense strand
gcucaucacagacgaguuu

SEQ ID NO: 1623741 - RNA, 19 nt, Homo sapiens
  misc_RNA (1)...(19): siRNA sense strand
gagaaaugacuacggauau

SEQ ID NO: 1623742 - RNA, 19 nt, Homo sapiens
  misc_RNA (1)...(19): siRNA sense strand
cagcagaccaccugaauau

SEQ ID NO: 1623743 - RNA, 19 nt, Homo sapiens
  misc_RNA (1)...(19): siRNA sense strand
gugaaauaccuguugguua

SEQ ID NO: 1623744 - RNA, 19 nt, Homo sapiens
  misc_RNA (1)...(19): siRNA sense strand
ccacgagacuagcaagaug

SEQ ID NO: 1623745 - RNA, 19 nt, Homo sapiens
  misc_RNA (1)...(19): siRNA sense strand
ugaugaauauuucccagaa

SEQ ID NO: 1623746 - RNA, 19 nt, Homo sapiens
  misc_RNA (1)...(19): siRNA sense strand
ugagagaaguggcaguaau

SEQ ID NO: 1623747 - RNA, 19 nt, Homo sapiens
  misc_RNA (1)...(19): siRNA sense strand
gcuacacucuggagaagau

SEQ ID NO: 1623748 - RNA, 19 nt, Homo sapiens
  misc_RNA (1)...(19): siRNA sense strand
uacaagaaagggcuaauaa

SEQ ID NO: 1623749 - RNA, 19 nt, Homo sapiens
  misc_RNA (1)...(19): siRNA sense strand
gaugagagaaguggcagua

SEQ ID NO: 1623750 - RNA, 19 nt, Homo sapiens
  misc_RNA (1)...(19): siRNA sense strand
caagcugggucuccucaug

SEQ ID NO: 1623751 - RNA, 19 nt, Homo sapiens
  misc_RNA (1)...(19): siRNA sense strand
gcaaaguagcuuguauauu

SEQ ID NO: 1623752 - RNA, 19 nt, Homo sapiens
  misc_RNA (1)...(19): siRNA sense strand
gaaaugacuacggauauag

SEQ ID NO: 1623753 - RNA, 19 nt, Homo sapiens
  misc_RNA (1)...(19): siRNA sense strand
gcagggugcagaagaaaga

SEQ ID NO: 1623754 - RNA, 19 nt, Homo sapiens
  misc_RNA (1)...(19): siRNA sense strand
agaugaaaguccucaaguu

SEQ ID NO: 1623755 - RNA, 19 nt, Homo sapiens
  misc_RNA (1)...(19): siRNA sense strand
aagaaagggcuaauaaguu

SEQ ID NO: 1623756 - RNA, 19 nt, Homo sapiens
  misc_RNA (1)...(19): siRNA sense strand
caucaaacgcucagacaug

SEQ ID NO: 1623757 - RNA, 19 nt, Homo sapiens
  misc_RNA (1)...(19): siRNA sense strand
gggaggugcugcgcaaguu

SEQ ID NO: 1623758 - RNA, 19 nt, Homo sapiens
  misc_RNA (1)...(19): siRNA sense strand
guuaaggaccagacaaaga

SEQ ID NO: 1623759 - RNA, 19 nt, Homo sapiens
  misc_RNA (1)...(19): siRNA sense strand
ugaaaguccucaaguuugc

SEQ ID NO: 1623760 - RNA, 19 nt, Homo sapiens
  misc_RNA (1)...(19): siRNA sense strand
agagaaguggcaguaauua

SEQ ID NO: 1623761 - RNA, 19 nt, Homo sapiens
  misc_RNA (1)...(19): siRNA sense strand
gcgaggcaguggagaugga

SEQ ID NO: 1623762 - RNA, 19 nt, Homo sapiens
  misc_RNA (1)...(19): siRNA sense strand
cagacgaguuugugaagca

SEQ ID NO: 1623763 - RNA, 19 nt, Homo sapiens
  misc_RNA (1)...(19): siRNA sense strand
caagcuacacucuggagaa

SEQ ID NO: 1623764 - RNA, 19 nt, Homo sapiens
  misc_RNA (1)...(19): siRNA sense strand
uuacaagaaagggcuaaua

SEQ ID NO: 1623765 - RNA, 19 nt, Homo sapiens
  misc_RNA (1)...(19): siRNA sense strand
gagacuagcaagaugaaag

SEQ ID NO: 1623766 - RNA, 19 nt, Homo sapiens
  misc_RNA (1)...(19): siRNA sense strand
agacaaagauccccaucaa

SEQ ID NO: 1623767 - RNA, 19 nt, Homo sapiens
  misc_RNA (1)...(19): siRNA sense strand
ggugaaauaccuguugguu

SEQ ID NO: 1623768 - RNA, 19 nt, Homo sapiens
  misc_RNA (1)...(19): siRNA sense strand
cgagucaaucugaaagaaa

SEQ ID NO: 1623769 - RNA, 19 nt, Homo sapiens
  misc_RNA (1)...(19): siRNA sense strand
gaaaucauugaacgagcaa

SEQ ID NO: 1623770 - RNA, 19 nt, Homo sapiens
  misc_RNA (1)...(19): siRNA sense strand
uuaaggaccagacaaagau

SEQ ID NO: 1623771 - RNA, 19 nt, Homo sapiens
  misc_RNA (1)...(19): siRNA sense strand
gggcuaauaaguuggugaa

SEQ ID NO: 1623772 - RNA, 19 nt, Homo sapiens
  misc_RNA (1)...(19): siRNA sense strand
agaaguggcaguaauuaca

SEQ ID NO: 1623773 - RNA, 19 nt, Homo sapiens
  misc_RNA (1)...(19): siRNA sense strand
uagcuuguauauucucauc

SEQ ID NO: 1623774 - RNA, 19 nt, Homo sapiens
  misc_RNA (1)...(19): siRNA sense strand
uaacagcagaccaccugaa

SEQ ID NO: 1623775 - RNA, 19 nt, Homo sapiens
  misc_RNA (1)...(19): siRNA sense strand
gaaguggcaguaauuacag

SEQ ID NO: 1623776 - RNA, 19 nt, Homo sapiens
  misc_RNA (1)...(19): siRNA sense strand
cagaccaccugaauaugag

SEQ ID NO: 1623777 - RNA, 19 nt, Homo sapiens
  misc_RNA (1)...(19): siRNA sense strand
ucgagucaaucugaaagaa

SEQ ID NO: 1623778 - RNA, 19 nt, Homo sapiens
  misc_RNA (1)...(19): siRNA sense strand
gagaaguggcaguaauuac

SEQ ID NO: 1623779 - RNA, 19 nt, Homo sapiens
  misc_RNA (1)...(19): siRNA sense strand
caagaugaaaguccucaag

SEQ ID NO: 1623780 - RNA, 19 nt, Homo sapiens
  misc_RNA (1)...(19): siRNA sense strand
caucagcacucaggaaucc

SEQ ID NO: 1623781 - RNA, 19 nt, Homo sapiens
  misc_RNA (1)...(19): siRNA sense strand
ucauggugauucugagugu

SEQ ID NO: 1623782 - RNA, 19 nt, Homo sapiens
  misc_RNA (1)...(19): siRNA sense strand
ccagugaggcugucaucug

SEQ ID NO: 1623783 - RNA, 19 nt, Homo sapiens
  misc_RNA (1)...(19): siRNA sense strand
gcuuguauauucucaucag

SEQ ID NO: 1623784 - RNA, 19 nt, Homo sapiens
  misc_RNA (1)...(19): siRNA sense strand
gcuccuaccacgagacuag

SEQ ID NO: 1623785 - RNA, 19 nt, Homo sapiens
  misc_RNA (1)...(19): siRNA sense strand
ggaggugcugcgcaaguug

SEQ ID NO: 1623786 - RNA, 19 nt, Homo sapiens
  misc_RNA (1)...(19): siRNA sense strand
acagcagaccaccugaaua

SEQ ID NO: 1623787 - RNA, 19 nt, Homo sapiens
  misc_RNA (1)...(19): siRNA sense strand
gaaauaccuguugguuaag

SEQ ID NO: 1623788 - RNA, 19 nt, Homo sapiens
  misc_RNA (1)...(19): siRNA sense strand
ucauugaacgagcaagcua

SEQ ID NO: 1623789 - RNA, 19 nt, Homo sapiens
  misc_RNA (1)...(19): siRNA sense strand
acaagaaagggcuaauaag

SEQ ID NO: 1623790 - RNA, 19 nt, Homo sapiens
  misc_RNA (1)...(19): siRNA sense strand
aagcuacacucuggagaag

SEQ ID NO: 1623791 - RNA, 19 nt, Homo sapiens
  misc_RNA (1)...(19): siRNA sense strand
augaaaguccucaaguuug

SEQ ID NO: 1623792 - RNA, 19 nt, Homo sapiens
  misc_RNA (1)...(19): siRNA sense strand
gcaagaugaaaguccucaa

SEQ ID NO: 1623793 - RNA, 19 nt, Homo sapiens
  misc_RNA (1)...(19): siRNA sense strand
caaaguagcuuguauauuc

SEQ ID NO: 1623794 - RNA, 19 nt, Homo sapiens
  misc_RNA (1)...(19): siRNA sense strand
ugaaauaccuguugguuaa

SEQ ID NO: 1623795 - RNA, 19 nt, Homo sapiens
  misc_RNA (1)...(19): siRNA sense strand
gagaagauguuucgaguca

SEQ ID NO: 1623796 - RNA, 19 nt, Homo sapiens
  misc_RNA (1)...(19): siRNA sense strand
ggaauccucugcaggcaua

SEQ ID NO: 1623797 - RNA, 19 nt, Homo sapiens
  misc_RNA (1)...(19): siRNA sense strand
guacauccuuggaaucuuu

SEQ ID NO: 1623798 - RNA, 19 nt, Homo sapiens
  misc_RNA (1)...(19): siRNA sense strand
agaaagggcuaauaaguug

SEQ ID NO: 1623799 - RNA, 19 nt, Homo sapiens
  misc_RNA (1)...(19): siRNA sense strand
gaagauguuucgagucaau

SEQ ID NO: 1623800 - RNA, 19 nt, Homo sapiens
  misc_RNA (1)...(19): siRNA sense strand
gaugaaaguccucaaguuu

SEQ ID NO: 1623801 - RNA, 19 nt, Homo sapiens
  misc_RNA (1)...(19): siRNA sense strand
caaaguacauccuuggaau

SEQ ID NO: 1623802 - RNA, 19 nt, Homo sapiens
  misc_RNA (1)...(19): siRNA sense strand
ggagaaaugacuacggaua

SEQ ID NO: 1623803 - RNA, 19 nt, Homo sapiens
  misc_RNA (1)...(19): siRNA sense strand
gcagaccaccugaauauga

SEQ ID NO: 1623804 - RNA, 19 nt, Homo sapiens
  misc_RNA (1)...(19): siRNA sense strand
uuacagauaccgcuaauaa

SEQ ID NO: 1623805 - RNA, 19 nt, Homo sapiens
  misc_RNA (1)...(19): siRNA sense strand
agaaaugacuacggauaua

SEQ ID NO: 1623806 - RNA, 19 nt, Homo sapiens
  misc_RNA (1)...(19): siRNA sense strand
gcuaauaaauugcaguagu

SEQ ID NO: 1623807 - RNA, 19 nt, Homo sapiens
  misc_RNA (1)...(19): siRNA sense strand
gcuaauaaguuggugaaau

SEQ ID NO: 1623808 - RNA, 19 nt, Homo sapiens
  misc_RNA (1)...(19): siRNA sense strand
gagagaaguggcaguaauu

SEQ ID NO: 1623809 - RNA, 19 nt, Homo sapiens
  misc_RNA (1)...(19): siRNA sense strand
gagucaaucugaaagaaau

SEQ ID NO: 1623810 - RNA, 19 nt, Homo sapiens
  misc_RNA (1)...(19): siRNA sense strand
caagaaagggcuaauaagu

SEQ ID NO: 1623811 - RNA, 19 nt, Homo sapiens
  misc_RNA (1)...(19): siRNA sense strand
gcucaucacagacgaguuu

SEQ ID NO: 1623812 - RNA, 19 nt, Homo sapiens
  misc_RNA (1)...(19): siRNA sense strand
gagaaaugacuacggauau

SEQ ID NO: 1623813 - RNA, 19 nt, Homo sapiens
  misc_RNA (1)...(19): siRNA sense strand
cagcagaccaccugaauau

SEQ ID NO: 1623814 - RNA, 19 nt, Homo sapiens
  misc_RNA (1)...(19): siRNA sense strand
agauaccgcuaauaaauug

SEQ ID NO: 1623815 - RNA, 19 nt, Homo sapiens
  misc_RNA (1)...(19): siRNA sense strand
gugaaauaccuguugguua

SEQ ID NO: 1623816 - RNA, 19 nt, Homo sapiens
  misc_RNA (1)...(19): siRNA sense strand
ccacgagacuagcaagaug

SEQ ID NO: 1623817 - RNA, 19 nt, Homo sapiens
  misc_RNA (1)...(19): siRNA sense strand
ugagagaaguggcaguaau

SEQ ID NO: 1623818 - RNA, 19 nt, Homo sapiens
  misc_RNA (1)...(19): siRNA sense strand
ugaugaauauuucccagaa

SEQ ID NO: 1623819 - RNA, 19 nt, Homo sapiens
  misc_RNA (1)...(19): siRNA sense strand
gcuacacucuggagaagau

SEQ ID NO: 1623820 - RNA, 19 nt, Homo sapiens
  misc_RNA (1)...(19): siRNA sense strand
uacaagaaagggcuaauaa

SEQ ID NO: 1623821 - RNA, 19 nt, Homo sapiens
  misc_RNA (1)...(19): siRNA sense strand
caagcugggucuccucaug

SEQ ID NO: 1623822 - RNA, 19 nt, Homo sapiens
  misc_RNA (1)...(19): siRNA sense strand
gaugagagaaguggcagua

SEQ ID NO: 1623823 - RNA, 19 nt, Homo sapiens
  misc_RNA (1)...(19): siRNA sense strand
gcaaaguagcuuguauauu

SEQ ID NO: 1623824 - RNA, 19 nt, Homo sapiens
  misc_RNA (1)...(19): siRNA sense strand
cuaauaaauugcaguaguc

SEQ ID NO: 1623825 - RNA, 19 nt, Homo sapiens
  misc_RNA (1)...(19): siRNA sense strand
cagauaccgcuaauaaauu

SEQ ID NO: 1623826 - RNA, 19 nt, Homo sapiens
  misc_RNA (1)...(19): siRNA sense strand
acagauaccgcuaauaaau

SEQ ID NO: 1623827 - RNA, 19 nt, Homo sapiens
  misc_RNA (1)...(19): siRNA sense strand
agaugaaaguccucaaguu

SEQ ID NO: 1623828 - RNA, 19 nt, Homo sapiens
  misc_RNA (1)...(19): siRNA sense strand
gaaaugacuacggauauag

SEQ ID NO: 1623829 - RNA, 19 nt, Homo sapiens
  misc_RNA (1)...(19): siRNA sense strand
gcagggugcagaagaaaga

SEQ ID NO: 1623830 - RNA, 19 nt, Homo sapiens
  misc_RNA (1)...(19): siRNA sense strand
aagaaagggcuaauaaguu

SEQ ID NO: 1623831 - RNA, 19 nt, Homo sapiens
  misc_RNA (1)...(19): siRNA sense strand
caucaaacgcucagacaug

SEQ ID NO: 1623832 - RNA, 19 nt, Homo sapiens
  misc_RNA (1)...(19): siRNA sense strand
gggaggugcugcgcaaguu

SEQ ID NO: 1623833 - RNA, 19 nt, Homo sapiens
  misc_RNA (1)...(19): siRNA sense strand
guuaaggaccagacaaaga

SEQ ID NO: 1623834 - RNA, 19 nt, Homo sapiens
  misc_RNA (1)...(19): siRNA sense strand
ugaaaguccucaaguuugc

SEQ ID NO: 1623835 - RNA, 19 nt, Homo sapiens
  misc_RNA (1)...(19): siRNA sense strand
caagcuacacucuggagaa

SEQ ID NO: 1623836 - RNA, 19 nt, Homo sapiens
  misc_RNA (1)...(19): siRNA sense strand
gcgaggcaguggagaugga

SEQ ID NO: 1623837 - RNA, 19 nt, Homo sapiens
  misc_RNA (1)...(19): siRNA sense strand
cagacgaguuugugaagca

SEQ ID NO: 1623838 - RNA, 19 nt, Homo sapiens
  misc_RNA (1)...(19): siRNA sense strand
agagaaguggcaguaauua

SEQ ID NO: 1623839 - RNA, 19 nt, Homo sapiens
  misc_RNA (1)...(19): siRNA sense strand
agacaaagauccccaucaa

SEQ ID NO: 1623840 - RNA, 19 nt, Homo sapiens
  misc_RNA (1)...(19): siRNA sense strand
gagacuagcaagaugaaag

SEQ ID NO: 1623841 - RNA, 19 nt, Homo sapiens
  misc_RNA (1)...(19): siRNA sense strand
uuacaagaaagggcuaaua

SEQ ID NO: 1623842 - RNA, 19 nt, Homo sapiens
  misc_RNA (1)...(19): siRNA sense strand
ggugaaauaccuguugguu

SEQ ID NO: 1623843 - RNA, 19 nt, Homo sapiens
  misc_RNA (1)...(19): siRNA sense strand
cgagucaaucugaaagaaa

SEQ ID NO: 1623844 - RNA, 19 nt, Homo sapiens
  misc_RNA (1)...(19): siRNA sense strand
gaaaucauugaacgagcaa

SEQ ID NO: 1623845 - RNA, 19 nt, Homo sapiens
  misc_RNA (1)...(19): siRNA sense strand
uuaaggaccagacaaagau

SEQ ID NO: 1623846 - RNA, 19 nt, Homo sapiens
  misc_RNA (1)...(19): siRNA sense strand
agaaguggcaguaauuaca

SEQ ID NO: 1623847 - RNA, 19 nt, Homo sapiens
  misc_RNA (1)...(19): siRNA sense strand
gggcuaauaaguuggugaa

SEQ ID NO: 1623848 - RNA, 19 nt, Homo sapiens
  misc_RNA (1)...(19): siRNA sense strand
uagcuuguauauucucauc

SEQ ID NO: 1623849 - RNA, 19 nt, Homo sapiens
  misc_RNA (1)...(19): siRNA sense strand
uaacagcagaccaccugaa

SEQ ID NO: 1623850 - RNA, 19 nt, Homo sapiens
  misc_RNA (1)...(19): siRNA sense strand
ucgagucaaucugaaagaa

SEQ ID NO: 1623851 - RNA, 19 nt, Homo sapiens
  misc_RNA (1)...(19): siRNA sense strand
gaaguggcaguaauuacag

SEQ ID NO: 1623852 - RNA, 19 nt, Homo sapiens
  misc_RNA (1)...(19): siRNA sense strand
cagaccaccugaauaugag

SEQ ID NO: 1623853 - RNA, 19 nt, Homo sapiens
  misc_RNA (1)...(19): siRNA sense strand
caucagcacucaggaaucc

SEQ ID NO: 1623854 - RNA, 19 nt, Homo sapiens
  misc_RNA (1)...(19): siRNA sense strand
caagaugaaaguccucaag

SEQ ID NO: 1623855 - RNA, 19 nt, Homo sapiens
  misc_RNA (1)...(19): siRNA sense strand
gagaaguggcaguaauuac

SEQ ID NO: 1623856 - RNA, 19 nt, Homo sapiens
  misc_RNA (1)...(19): siRNA sense strand
ucauggugauucugagugu

SEQ ID NO: 1623857 - RNA, 19 nt, Homo sapiens
  misc_RNA (1)...(19): siRNA sense strand
ccauggagccaaaguacau

SEQ ID NO: 1623858 - RNA, 19 nt, Homo sapiens
  misc_RNA (1)...(19): siRNA sense strand
ccagugaggcugucaucug

SEQ ID NO: 1623859 - RNA, 19 nt, Homo sapiens
  misc_RNA (1)...(19): siRNA sense strand
gcuuguauauucucaucag

SEQ ID NO: 1623860 - RNA, 19 nt, Homo sapiens
  misc_RNA (1)...(19): siRNA sense strand
ccgcuaauaaauugcagua

SEQ ID NO: 1623861 - RNA, 19 nt, Homo sapiens
  misc_RNA (1)...(19): siRNA sense strand
gcuccuaccacgagacuag

SEQ ID NO: 1623862 - RNA, 19 nt, Homo sapiens
  misc_RNA (1)...(19): siRNA sense strand
guuuacagauaccgcuaau

SEQ ID NO: 1623863 - RNA, 19 nt, Homo sapiens
  misc_RNA (1)...(19): siRNA sense strand
aggcaguuauggccaauca

SEQ ID NO: 1623864 - RNA, 19 nt, Homo sapiens
  misc_RNA (1)...(19): siRNA sense strand
caguaguccuucccaugga

SEQ ID NO: 1623865 - RNA, 19 nt, Homo sapiens
  misc_RNA (1)...(19): siRNA sense strand
ggaggugcugcgcaaguug

SEQ ID NO: 1623866 - RNA, 19 nt, Homo sapiens
  misc_RNA (1)...(19): siRNA sense strand
cagcugagggugucaugug

SEQ ID NO: 1623867 - RNA, 19 nt, Homo sapiens
  misc_RNA (1)...(19): siRNA sense strand
acagcagaccaccugaaua

SEQ ID NO: 1623868 - RNA, 19 nt, Homo sapiens
  misc_RNA (1)...(19): siRNA sense strand
gaaauaccuguugguuaag

SEQ ID NO: 1623869 - RNA, 19 nt, Homo sapiens
  misc_RNA (1)...(19): siRNA sense strand
uacagauaccgcuaauaaa

SEQ ID NO: 1623870 - RNA, 19 nt, Homo sapiens
  misc_RNA (1)...(19): siRNA sense strand
ucauugaacgagcaagcua

SEQ ID NO: 1623871 - RNA, 19 nt, Homo sapiens
  misc_RNA (1)...(19): siRNA sense strand
caaggcaguuauggccaau

SEQ ID NO: 1623872 - RNA, 19 nt, Homo sapiens
  misc_RNA (1)...(19): siRNA sense strand
auaaauugcaguaguccuu

SEQ ID NO: 1623873 - RNA, 19 nt, Homo sapiens
  misc_RNA (1)...(19): siRNA sense strand
acaagaaagggcuaauaag

SEQ ID NO: 1623874 - RNA, 19 nt, Homo sapiens
  misc_RNA (1)...(19): siRNA sense strand
aagcuacacucuggagaag

SEQ ID NO: 1623875 - RNA, 19 nt, Homo sapiens
  misc_RNA (1)...(19): siRNA sense strand
augaaaguccucaaguuug

SEQ ID NO: 1623876 - RNA, 19 nt, Homo sapiens
  misc_RNA (1)...(19): siRNA sense strand
gcaagaugaaaguccucaa

SEQ ID NO: 1623877 - RNA, 19 nt, Homo sapiens
  misc_RNA (1)...(19): siRNA sense strand
caaaguagcuuguauauuc

SEQ ID NO: 1623878 - RNA, 19 nt, Homo sapiens
  misc_RNA (1)...(19): siRNA sense strand
ugaaauaccuguugguuaa

SEQ ID NO: 1623879 - RNA, 19 nt, Homo sapiens
  misc_RNA (1)...(19): siRNA sense strand
gagaagauguuucgaguca

SEQ ID NO: 1623880 - RNA, 19 nt, Homo sapiens
  misc_RNA (1)...(19): siRNA sense strand
ggaauccucugcaggcaua

SEQ ID NO: 1623881 - RNA, 19 nt, Homo sapiens
  misc_RNA (1)...(19): siRNA sense strand
guacauccuuggaaucuuu

SEQ ID NO: 1623882 - RNA, 19 nt, Homo sapiens
  misc_RNA (1)...(19): siRNA sense strand
agaaagggcuaauaaguug

SEQ ID NO: 1623883 - RNA, 19 nt, Homo sapiens
  misc_RNA (1)...(19): siRNA sense strand
gaagauguuucgagucaau

SEQ ID NO: 1623884 - RNA, 19 nt, Homo sapiens
  misc_RNA (1)...(19): siRNA sense strand
gaugaaaguccucaaguuu

SEQ ID NO: 1623885 - RNA, 19 nt, Homo sapiens
  misc_RNA (1)...(19): siRNA sense strand
caaaguacauccuuggaau

SEQ ID NO: 1623886 - RNA, 19 nt, Homo sapiens
  misc_RNA (1)...(19): siRNA sense strand
ggagaaaugacuacggaua

SEQ ID NO: 1623887 - RNA, 19 nt, Homo sapiens
  misc_RNA (1)...(19): siRNA sense strand
gcagaccaccugaauauga

SEQ ID NO: 1623888 - RNA, 19 nt, Homo sapiens
  misc_RNA (1)...(19): siRNA sense strand
uuacagauaccgcuaauaa

SEQ ID NO: 1623889 - RNA, 19 nt, Homo sapiens
  misc_RNA (1)...(19): siRNA sense strand
agaaaugacuacggauaua

SEQ ID NO: 1623890 - RNA, 19 nt, Homo sapiens
  misc_RNA (1)...(19): siRNA sense strand
gcuaauaaauugcaguagu

SEQ ID NO: 1623891 - RNA, 19 nt, Homo sapiens
  misc_RNA (1)...(19): siRNA sense strand
gcuaauaaguuggugaaau

SEQ ID NO: 1623892 - RNA, 19 nt, Homo sapiens
  misc_RNA (1)...(19): siRNA sense strand
gagagaaguggcaguaauu

SEQ ID NO: 1623893 - RNA, 19 nt, Homo sapiens
  misc_RNA (1)...(19): siRNA sense strand
gagucaaucugaaagaaau

SEQ ID NO: 1623894 - RNA, 19 nt, Homo sapiens
  misc_RNA (1)...(19): siRNA sense strand
caagaaagggcuaauaagu

SEQ ID NO: 1623895 - RNA, 19 nt, Homo sapiens
  misc_RNA (1)...(19): siRNA sense strand
gcucaucacagacgaguuu

SEQ ID NO: 1623896 - RNA, 19 nt, Homo sapiens
  misc_RNA (1)...(19): siRNA sense strand
gagaaaugacuacggauau

SEQ ID NO: 1623897 - RNA, 19 nt, Homo sapiens
  misc_RNA (1)...(19): siRNA sense strand
cagcagaccaccugaauau

SEQ ID NO: 1623898 - RNA, 19 nt, Homo sapiens
  misc_RNA (1)...(19): siRNA sense strand
agauaccgcuaauaaauug

SEQ ID NO: 1623899 - RNA, 19 nt, Homo sapiens
  misc_RNA (1)...(19): siRNA sense strand
gugaaauaccuguugguua

SEQ ID NO: 1623900 - RNA, 19 nt, Homo sapiens
  misc_RNA (1)...(19): siRNA sense strand
ccacgagacuagcaagaug

SEQ ID NO: 1623901 - RNA, 19 nt, Homo sapiens
  misc_RNA (1)...(19): siRNA sense strand
ugagagaaguggcaguaau

SEQ ID NO: 1623902 - RNA, 19 nt, Homo sapiens
  misc_RNA (1)...(19): siRNA sense strand
ugaugaauauuucccagaa

SEQ ID NO: 1623903 - RNA, 19 nt, Homo sapiens
  misc_RNA (1)...(19): siRNA sense strand
gcuacacucuggagaagau

SEQ ID NO: 1623904 - RNA, 19 nt, Homo sapiens
  misc_RNA (1)...(19): siRNA sense strand
uacaagaaagggcuaauaa

SEQ ID NO: 1623905 - RNA, 19 nt, Homo sapiens
  misc_RNA (1)...(19): siRNA sense strand
caagcugggucuccucaug

SEQ ID NO: 1623906 - RNA, 19 nt, Homo sapiens
  misc_RNA (1)...(19): siRNA sense strand
gaugagagaaguggcagua

SEQ ID NO: 1623907 - RNA, 19 nt, Homo sapiens
  misc_RNA (1)...(19): siRNA sense strand
gcaaaguagcuuguauauu

SEQ ID NO: 1623908 - RNA, 19 nt, Homo sapiens
  misc_RNA (1)...(19): siRNA sense strand
cuaauaaauugcaguaguc

SEQ ID NO: 1623909 - RNA, 19 nt, Homo sapiens
  misc_RNA (1)...(19): siRNA sense strand
cagauaccgcuaauaaauu

SEQ ID NO: 1623910 - RNA, 19 nt, Homo sapiens
  misc_RNA (1)...(19): siRNA sense strand
acagauaccgcuaauaaau

SEQ ID NO: 1623911 - RNA, 19 nt, Homo sapiens
  misc_RNA (1)...(19): siRNA sense strand
agaugaaaguccucaaguu

SEQ ID NO: 1623912 - RNA, 19 nt, Homo sapiens
  misc_RNA (1)...(19): siRNA sense strand
gaaaugacuacggauauag

SEQ ID NO: 1623913 - RNA, 19 nt, Homo sapiens
  misc_RNA (1)...(19): siRNA sense strand
gcagggugcagaagaaaga

SEQ ID NO: 1623914 - RNA, 19 nt, Homo sapiens
  misc_RNA (1)...(19): siRNA sense strand
aagaaagggcuaauaaguu

SEQ ID NO: 1623915 - RNA, 19 nt, Homo sapiens
  misc_RNA (1)...(19): siRNA sense strand
caucaaacgcucagacaug

SEQ ID NO: 1623916 - RNA, 19 nt, Homo sapiens
  misc_RNA (1)...(19): siRNA sense strand
gggaggugcugcgcaaguu

SEQ ID NO: 1623917 - RNA, 19 nt, Homo sapiens
  misc_RNA (1)...(19): siRNA sense strand
guuaaggaccagacaaaga

SEQ ID NO: 1623918 - RNA, 19 nt, Homo sapiens
  misc_RNA (1)...(19): siRNA sense strand
ugaaaguccucaaguuugc

SEQ ID NO: 1623919 - RNA, 19 nt, Homo sapiens
  misc_RNA (1)...(19): siRNA sense strand
caagcuacacucuggagaa

SEQ ID NO: 1623920 - RNA, 19 nt, Homo sapiens
  misc_RNA (1)...(19): siRNA sense strand
gcgaggcaguggagaugga

SEQ ID NO: 1623921 - RNA, 19 nt, Homo sapiens
  misc_RNA (1)...(19): siRNA sense strand
cagacgaguuugugaagca

SEQ ID NO: 1623922 - RNA, 19 nt, Homo sapiens
  misc_RNA (1)...(19): siRNA sense strand
agagaaguggcaguaauua

SEQ ID NO: 1623923 - RNA, 19 nt, Homo sapiens
  misc_RNA (1)...(19): siRNA sense strand
agacaaagauccccaucaa

SEQ ID NO: 1623924 - RNA, 19 nt, Homo sapiens
  misc_RNA (1)...(19): siRNA sense strand
gagacuagcaagaugaaag

SEQ ID NO: 1623925 - RNA, 19 nt, Homo sapiens
  misc_RNA (1)...(19): siRNA sense strand
uuacaagaaagggcuaaua

SEQ ID NO: 1623926 - RNA, 19 nt, Homo sapiens
  misc_RNA (1)...(19): siRNA sense strand
ggugaaauaccuguugguu

SEQ ID NO: 1623927 - RNA, 19 nt, Homo sapiens
  misc_RNA (1)...(19): siRNA sense strand
cgagucaaucugaaagaaa

SEQ ID NO: 1623928 - RNA, 19 nt, Homo sapiens
  misc_RNA (1)...(19): siRNA sense strand
gaaaucauugaacgagcaa

SEQ ID NO: 1623929 - RNA, 19 nt, Homo sapiens
  misc_RNA (1)...(19): siRNA sense strand
uuaaggaccagacaaagau

SEQ ID NO: 1623930 - RNA, 19 nt, Homo sapiens
  misc_RNA (1)...(19): siRNA sense strand
agaaguggcaguaauuaca

SEQ ID NO: 1623931 - RNA, 19 nt, Homo sapiens
  misc_RNA (1)...(19): siRNA sense strand
gggcuaauaaguuggugaa

SEQ ID NO: 1623932 - RNA, 19 nt, Homo sapiens
  misc_RNA (1)...(19): siRNA sense strand
uagcuuguauauucucauc

SEQ ID NO: 1623933 - RNA, 19 nt, Homo sapiens
  misc_RNA (1)...(19): siRNA sense strand
uaacagcagaccaccugaa

SEQ ID NO: 1623934 - RNA, 19 nt, Homo sapiens
  misc_RNA (1)...(19): siRNA sense strand
ucgagucaaucugaaagaa

SEQ ID NO: 1623935 - RNA, 19 nt, Homo sapiens
  misc_RNA (1)...(19): siRNA sense strand
gaaguggcaguaauuacag

SEQ ID NO: 1623936 - RNA, 19 nt, Homo sapiens
  misc_RNA (1)...(19): siRNA sense strand
cagaccaccugaauaugag

SEQ ID NO: 1623937 - RNA, 19 nt, Homo sapiens
  misc_RNA (1)...(19): siRNA sense strand
caucagcacucaggaaucc

SEQ ID NO: 1623938 - RNA, 19 nt, Homo sapiens
  misc_RNA (1)...(19): siRNA sense strand
caagaugaaaguccucaag

SEQ ID NO: 1623939 - RNA, 19 nt, Homo sapiens
  misc_RNA (1)...(19): siRNA sense strand
gagaaguggcaguaauuac

SEQ ID NO: 1623940 - RNA, 19 nt, Homo sapiens
  misc_RNA (1)...(19): siRNA sense strand
ucauggugauucugagugu

SEQ ID NO: 1623941 - RNA, 19 nt, Homo sapiens
  misc_RNA (1)...(19): siRNA sense strand
ccauggagccaaaguacau

SEQ ID NO: 1623942 - RNA, 19 nt, Homo sapiens
  misc_RNA (1)...(19): siRNA sense strand
ccagugaggcugucaucug

SEQ ID NO: 1623943 - RNA, 19 nt, Homo sapiens
  misc_RNA (1)...(19): siRNA sense strand
gcuuguauauucucaucag

SEQ ID NO: 1623944 - RNA, 19 nt, Homo sapiens
  misc_RNA (1)...(19): siRNA sense strand
ccgcuaauaaauugcagua

SEQ ID NO: 1623945 - RNA, 19 nt, Homo sapiens
  misc_RNA (1)...(19): siRNA sense strand
gcuccuaccacgagacuag

SEQ ID NO: 1623946 - RNA, 19 nt, Homo sapiens
  misc_RNA (1)...(19): siRNA sense strand
guuuacagauaccgcuaau

SEQ ID NO: 1623947 - RNA, 19 nt, Homo sapiens
  misc_RNA (1)...(19): siRNA sense strand
aggcaguuauggccaauca

SEQ ID NO: 1623948 - RNA, 19 nt, Homo sapiens
  misc_RNA (1)...(19): siRNA sense strand
caguaguccuucccaugga

SEQ ID NO: 1623949 - RNA, 19 nt, Homo sapiens
  misc_RNA (1)...(19): siRNA sense strand
ggaggugcugcgcaaguug

SEQ ID NO: 1623950 - RNA, 19 nt, Homo sapiens
  misc_RNA (1)...(19): siRNA sense strand
cagcugagggugucaugug

SEQ ID NO: 1623951 - RNA, 19 nt, Homo sapiens
  misc_RNA (1)...(19): siRNA sense strand
acagcagaccaccugaaua

SEQ ID NO: 1623952 - RNA, 19 nt, Homo sapiens
  misc_RNA (1)...(19): siRNA sense strand
gaaauaccuguugguuaag

SEQ ID NO: 1623953 - RNA, 19 nt, Homo sapiens
  misc_RNA (1)...(19): siRNA sense strand
uacagauaccgcuaauaaa

SEQ ID NO: 1623954 - RNA, 19 nt, Homo sapiens
  misc_RNA (1)...(19): siRNA sense strand
ucauugaacgagcaagcua

SEQ ID NO: 1623955 - RNA, 19 nt, Homo sapiens
  misc_RNA (1)...(19): siRNA sense strand
caaggcaguuauggccaau

SEQ ID NO: 1623956 - RNA, 19 nt, Homo sapiens
  misc_RNA (1)...(19): siRNA sense strand
auaaauugcaguaguccuu

SEQ ID NO: 1623957 - RNA, 19 nt, Homo sapiens
  misc_RNA (1)...(19): siRNA sense strand
acaagaaagggcuaauaag

SEQ ID NO: 1623958 - RNA, 19 nt, Homo sapiens
  misc_RNA (1)...(19): siRNA sense strand
aagcuacacucuggagaag

SEQ ID NO: 1623959 - RNA, 19 nt, Homo sapiens
  misc_RNA (1)...(19): siRNA sense strand
augaaaguccucaaguuug

SEQ ID NO: 1623960 - RNA, 19 nt, Homo sapiens
  misc_RNA (1)...(19): siRNA sense strand
gcaagaugaaaguccucaa

SEQ ID NO: 1623961 - RNA, 19 nt, Homo sapiens
  misc_RNA (1)...(19): siRNA sense strand
caaaguagcuuguauauuc

SEQ ID NO: 1623962 - RNA, 19 nt, Homo sapiens
  misc_RNA (1)...(19): siRNA sense strand
ugaaauaccuguugguuaa

SEQ ID NO: 1623963 - RNA, 19 nt, Homo sapiens
  misc_RNA (1)...(19): siRNA sense strand
gagaagauguuucgaguca

SEQ ID NO: 1623964 - RNA, 19 nt, Homo sapiens
  misc_RNA (1)...(19): siRNA sense strand
ggaauccucugcaggcaua

SEQ ID NO: 1623965 - RNA, 19 nt, Homo sapiens
  misc_RNA (1)...(19): siRNA sense strand
agaaagggcuaauaaguug

SEQ ID NO: 1623966 - RNA, 19 nt, Homo sapiens
  misc_RNA (1)...(19): siRNA sense strand
gaagauguuucgagucaau

SEQ ID NO: 1623967 - RNA, 19 nt, Homo sapiens
  misc_RNA (1)...(19): siRNA sense strand
gaugaaaguccucaaguuu

SEQ ID NO: 1623968 - RNA, 19 nt, Homo sapiens
  misc_RNA (1)...(19): siRNA sense strand
ggagaaaugacuacggaua

SEQ ID NO: 1623969 - RNA, 19 nt, Homo sapiens
  misc_RNA (1)...(19): siRNA sense strand
gcagaccaccugaauauga

SEQ ID NO: 1623970 - RNA, 19 nt, Homo sapiens
  misc_RNA (1)...(19): siRNA sense strand
agaaaugacuacggauaua

SEQ ID NO: 1623971 - RNA, 19 nt, Homo sapiens
  misc_RNA (1)...(19): siRNA sense strand
gcuaauaaguuggugaaau

SEQ ID NO: 1623972 - RNA, 19 nt, Homo sapiens
  misc_RNA (1)...(19): siRNA sense strand
gagagaaguggcaguaauu

SEQ ID NO: 1623973 - RNA, 19 nt, Homo sapiens
  misc_RNA (1)...(19): siRNA sense strand
gagucaaucugaaagaaau

SEQ ID NO: 1623974 - RNA, 19 nt, Homo sapiens
  misc_RNA (1)...(19): siRNA sense strand
caagaaagggcuaauaagu

SEQ ID NO: 1623975 - RNA, 19 nt, Homo sapiens
  misc_RNA (1)...(19): siRNA sense strand
gcucaucacagacgaguuu

SEQ ID NO: 1623976 - RNA, 19 nt, Homo sapiens
  misc_RNA (1)...(19): siRNA sense strand
gagaaaugacuacggauau

SEQ ID NO: 1623977 - RNA, 19 nt, Homo sapiens
  misc_RNA (1)...(19): siRNA sense strand
cagcagaccaccugaauau

SEQ ID NO: 1623978 - RNA, 19 nt, Homo sapiens
  misc_RNA (1)...(19): siRNA sense strand
gugaaauaccuguugguua

SEQ ID NO: 1623979 - RNA, 19 nt, Homo sapiens
  misc_RNA (1)...(19): siRNA sense strand
ccacgagacuagcaagaug

SEQ ID NO: 1623980 - RNA, 19 nt, Homo sapiens
  misc_RNA (1)...(19): siRNA sense strand
ugaugaauauuucccagaa

SEQ ID NO: 1623981 - RNA, 19 nt, Homo sapiens
  misc_RNA (1)...(19): siRNA sense strand
ugagagaaguggcaguaau

SEQ ID NO: 1623982 - RNA, 19 nt, Homo sapiens
  misc_RNA (1)...(19): siRNA sense strand
gcuacacucuggagaagau

SEQ ID NO: 1623983 - RNA, 19 nt, Homo sapiens
  misc_RNA (1)...(19): siRNA sense strand
uacaagaaagggcuaauaa

SEQ ID NO: 1623984 - RNA, 19 nt, Homo sapiens
  misc_RNA (1)...(19): siRNA sense strand
gaugagagaaguggcagua

SEQ ID NO: 1623985 - RNA, 19 nt, Homo sapiens
  misc_RNA (1)...(19): siRNA sense strand
caagcugggucuccucaug

SEQ ID NO: 1623986 - RNA, 19 nt, Homo sapiens
  misc_RNA (1)...(19): siRNA sense strand
gcaaaguagcuuguauauu

SEQ ID NO: 1623987 - RNA, 19 nt, Homo sapiens
  misc_RNA (1)...(19): siRNA sense strand
gaaaugacuacggauauag

SEQ ID NO: 1623988 - RNA, 19 nt, Homo sapiens
  misc_RNA (1)...(19): siRNA sense strand
gcagggugcagaagaaaga

SEQ ID NO: 1623989 - RNA, 19 nt, Homo sapiens
  misc_RNA (1)...(19): siRNA sense strand
agaugaaaguccucaaguu

SEQ ID NO: 1623990 - RNA, 19 nt, Homo sapiens
  misc_RNA (1)...(19): siRNA sense strand
aagaaagggcuaauaaguu

SEQ ID NO: 1623991 - RNA, 19 nt, Homo sapiens
  misc_RNA (1)...(19): siRNA sense strand
caucaaacgcucagacaug

SEQ ID NO: 1623992 - RNA, 19 nt, Homo sapiens
  misc_RNA (1)...(19): siRNA sense strand
gggaggugcugcgcaaguu

SEQ ID NO: 1623993 - RNA, 19 nt, Homo sapiens
  misc_RNA (1)...(19): siRNA sense strand
guuaaggaccagacaaaga

SEQ ID NO: 1623994 - RNA, 19 nt, Homo sapiens
  misc_RNA (1)...(19): siRNA sense strand
ugaaaguccucaaguuugc

SEQ ID NO: 1623995 - RNA, 19 nt, Homo sapiens
  misc_RNA (1)...(19): siRNA sense strand
agagaaguggcaguaauua

SEQ ID NO: 1623996 - RNA, 19 nt, Homo sapiens
  misc_RNA (1)...(19): siRNA sense strand
gcgaggcaguggagaugga

SEQ ID NO: 1623997 - RNA, 19 nt, Homo sapiens
  misc_RNA (1)...(19): siRNA sense strand
cagacgaguuugugaagca

SEQ ID NO: 1623998 - RNA, 19 nt, Homo sapiens
  misc_RNA (1)...(19): siRNA sense strand
caagcuacacucuggagaa

SEQ ID NO: 1623999 - RNA, 19 nt, Homo sapiens
  misc_RNA (1)...(19): siRNA sense strand
uuacaagaaagggcuaaua

SEQ ID NO: 1624000 - RNA, 19 nt, Homo sapiens
  misc_RNA (1)...(19): siRNA sense strand
gagacuagcaagaugaaag

SEQ ID NO: 1624001 - RNA, 19 nt, Homo sapiens
  misc_RNA (1)...(19): siRNA sense strand
agacaaagauccccaucaa

SEQ ID NO: 1624002 - RNA, 19 nt, Homo sapiens
  misc_RNA (1)...(19): siRNA sense strand
ggugaaauaccuguugguu

SEQ ID NO: 1624003 - RNA, 19 nt, Homo sapiens
  misc_RNA (1)...(19): siRNA sense strand
cgagucaaucugaaagaaa

SEQ ID NO: 1624004 - RNA, 19 nt, Homo sapiens
  misc_RNA (1)...(19): siRNA sense strand
gaaaucauugaacgagcaa

SEQ ID NO: 1624005 - RNA, 19 nt, Homo sapiens
  misc_RNA (1)...(19): siRNA sense strand
uuaaggaccagacaaagau

SEQ ID NO: 1624006 - RNA, 19 nt, Homo sapiens
  misc_RNA (1)...(19): siRNA sense strand
gggcuaauaaguuggugaa

SEQ ID NO: 1624007 - RNA, 19 nt, Homo sapiens
  misc_RNA (1)...(19): siRNA sense strand
agaaguggcaguaauuaca

SEQ ID NO: 1624008 - RNA, 19 nt, Homo sapiens
  misc_RNA (1)...(19): siRNA sense strand
uagcuuguauauucucauc

SEQ ID NO: 1624009 - RNA, 19 nt, Homo sapiens
  misc_RNA (1)...(19): siRNA sense strand
uaacagcagaccaccugaa

SEQ ID NO: 1624010 - RNA, 19 nt, Homo sapiens
  misc_RNA (1)...(19): siRNA sense strand
gaaguggcaguaauuacag

SEQ ID NO: 1624011 - RNA, 19 nt, Homo sapiens
  misc_RNA (1)...(19): siRNA sense strand
cagaccaccugaauaugag

SEQ ID NO: 1624012 - RNA, 19 nt, Homo sapiens
  misc_RNA (1)...(19): siRNA sense strand
ucgagucaaucugaaagaa

SEQ ID NO: 1624013 - RNA, 19 nt, Homo sapiens
  misc_RNA (1)...(19): siRNA sense strand
gagaaguggcaguaauuac

SEQ ID NO: 1624014 - RNA, 19 nt, Homo sapiens
  misc_RNA (1)...(19): siRNA sense strand
caagaugaaaguccucaag

SEQ ID NO: 1624015 - RNA, 19 nt, Homo sapiens
  misc_RNA (1)...(19): siRNA sense strand
caucagcacucaggaaucc

SEQ ID NO: 1624016 - RNA, 19 nt, Homo sapiens
  misc_RNA (1)...(19): siRNA sense strand
ucauggugauucugagugu

SEQ ID NO: 1624017 - RNA, 19 nt, Homo sapiens
  misc_RNA (1)...(19): siRNA sense strand
ccagugaggcugucaucug

SEQ ID NO: 1624018 - RNA, 19 nt, Homo sapiens
  misc_RNA (1)...(19): siRNA sense strand
gcuuguauauucucaucag

SEQ ID NO: 1624019 - RNA, 19 nt, Homo sapiens
  misc_RNA (1)...(19): siRNA sense strand
gcuccuaccacgagacuag

SEQ ID NO: 1624020 - RNA, 19 nt, Homo sapiens
  misc_RNA (1)...(19): siRNA sense strand
ggaggugcugcgcaaguug

SEQ ID NO: 1624021 - RNA, 19 nt, Homo sapiens
  misc_RNA (1)...(19): siRNA sense strand
acagcagaccaccugaaua

SEQ ID NO: 1624022 - RNA, 19 nt, Homo sapiens
  misc_RNA (1)...(19): siRNA sense strand
gaaauaccuguugguuaag

SEQ ID NO: 1624023 - RNA, 19 nt, Homo sapiens
  misc_RNA (1)...(19): siRNA sense strand
ucauugaacgagcaagcua

SEQ ID NO: 1624024 - RNA, 19 nt, Homo sapiens
  misc_RNA (1)...(19): siRNA sense strand
acaagaaagggcuaauaag

SEQ ID NO: 1624025 - RNA, 19 nt, Homo sapiens
  misc_RNA (1)...(19): siRNA sense strand
aagcuacacucuggagaag

SEQ ID NO: 1624026 - RNA, 19 nt, Homo sapiens
  misc_RNA (1)...(19): siRNA sense strand
augaaaguccucaaguuug

SEQ ID NO: 1624027 - RNA, 19 nt, Homo sapiens
  misc_RNA (1)...(19): siRNA sense strand
gcaagaugaaaguccucaa

SEQ ID NO: 1624028 - RNA, 19 nt, Homo sapiens
  misc_RNA (1)...(19): siRNA sense strand
caaaguagcuuguauauuc

SEQ ID NO: 1624029 - RNA, 19 nt, Homo sapiens
  misc_RNA (1)...(19): siRNA sense strand
ugaaauaccuguugguuaa

SEQ ID NO: 1624030 - RNA, 19 nt, Homo sapiens
  misc_RNA (1)...(19): siRNA sense strand
gagaagauguuucgaguca

SEQ ID NO: 1624031 - RNA, 19 nt, Homo sapiens
  misc_RNA (1)...(19): siRNA sense strand
ggaauccucugcaggcaua

SEQ ID NO: 1624032 - RNA, 19 nt, Homo sapiens
  misc_RNA (1)...(19): siRNA sense strand
guacauccuuggaaucuuu

SEQ ID NO: 1624033 - RNA, 19 nt, Homo sapiens
  misc_RNA (1)...(19): siRNA sense strand
agaaagggcuaauaaguug

SEQ ID NO: 1624034 - RNA, 19 nt, Homo sapiens
  misc_RNA (1)...(19): siRNA sense strand
gaagauguuucgagucaau

SEQ ID NO: 1624035 - RNA, 19 nt, Homo sapiens
  misc_RNA (1)...(19): siRNA sense strand
gaugaaaguccucaaguuu

SEQ ID NO: 1624036 - RNA, 19 nt, Homo sapiens
  misc_RNA (1)...(19): siRNA sense strand
caaaguacauccuuggaau

SEQ ID NO: 1624037 - RNA, 19 nt, Homo sapiens
  misc_RNA (1)...(19): siRNA sense strand
ggagaaaugacuacggaua

SEQ ID NO: 1624038 - RNA, 19 nt, Homo sapiens
  misc_RNA (1)...(19): siRNA sense strand
gcagaccaccugaauauga

SEQ ID NO: 1624039 - RNA, 19 nt, Homo sapiens
  misc_RNA (1)...(19): siRNA sense strand
uuacagauaccgcuaauaa

SEQ ID NO: 1624040 - RNA, 19 nt, Homo sapiens
  misc_RNA (1)...(19): siRNA sense strand
agaaaugacuacggauaua

SEQ ID NO: 1624041 - RNA, 19 nt, Homo sapiens
  misc_RNA (1)...(19): siRNA sense strand
gcuaauaaauugcaguagu

SEQ ID NO: 1624042 - RNA, 19 nt, Homo sapiens
  misc_RNA (1)...(19): siRNA sense strand
gcuaauaaguuggugaaau

SEQ ID NO: 1624043 - RNA, 19 nt, Homo sapiens
  misc_RNA (1)...(19): siRNA sense strand
gagagaaguggcaguaauu

SEQ ID NO: 1624044 - RNA, 19 nt, Homo sapiens
  misc_RNA (1)...(19): siRNA sense strand
gagucaaucugaaagaaau

SEQ ID NO: 1624045 - RNA, 19 nt, Homo sapiens
  misc_RNA (1)...(19): siRNA sense strand
caagaaagggcuaauaagu

SEQ ID NO: 1624046 - RNA, 19 nt, Homo sapiens
  misc_RNA (1)...(19): siRNA sense strand
gcucaucacagacgaguuu

SEQ ID NO: 1624047 - RNA, 19 nt, Homo sapiens
  misc_RNA (1)...(19): siRNA sense strand
gagaaaugacuacggauau

SEQ ID NO: 1624048 - RNA, 19 nt, Homo sapiens
  misc_RNA (1)...(19): siRNA sense strand
cagcagaccaccugaauau

SEQ ID NO: 1624049 - RNA, 19 nt, Homo sapiens
  misc_RNA (1)...(19): siRNA sense strand
agauaccgcuaauaaauug

SEQ ID NO: 1624050 - RNA, 19 nt, Homo sapiens
  misc_RNA (1)...(19): siRNA sense strand
gugaaauaccuguugguua

SEQ ID NO: 1624051 - RNA, 19 nt, Homo sapiens
  misc_RNA (1)...(19): siRNA sense strand
ccacgagacuagcaagaug

SEQ ID NO: 1624052 - RNA, 19 nt, Homo sapiens
  misc_RNA (1)...(19): siRNA sense strand
ugagagaaguggcaguaau

SEQ ID NO: 1624053 - RNA, 19 nt, Homo sapiens
  misc_RNA (1)...(19): siRNA sense strand
ugaugaauauuucccagaa

SEQ ID NO: 1624054 - RNA, 19 nt, Homo sapiens
  misc_RNA (1)...(19): siRNA sense strand
gcuacacucuggagaagau

SEQ ID NO: 1624055 - RNA, 19 nt, Homo sapiens
  misc_RNA (1)...(19): siRNA sense strand
uacaagaaagggcuaauaa

SEQ ID NO: 1624056 - RNA, 19 nt, Homo sapiens
  misc_RNA (1)...(19): siRNA sense strand
caagcugggucuccucaug

SEQ ID NO: 1624057 - RNA, 19 nt, Homo sapiens
  misc_RNA (1)...(19): siRNA sense strand
gaugagagaaguggcagua

SEQ ID NO: 1624058 - RNA, 19 nt, Homo sapiens
  misc_RNA (1)...(19): siRNA sense strand
gcaaaguagcuuguauauu

SEQ ID NO: 1624059 - RNA, 19 nt, Homo sapiens
  misc_RNA (1)...(19): siRNA sense strand
cuaauaaauugcaguaguc

SEQ ID NO: 1624060 - RNA, 19 nt, Homo sapiens
  misc_RNA (1)...(19): siRNA sense strand
cagauaccgcuaauaaauu

SEQ ID NO: 1624061 - RNA, 19 nt, Homo sapiens
  misc_RNA (1)...(19): siRNA sense strand
acagauaccgcuaauaaau

SEQ ID NO: 1624062 - RNA, 19 nt, Homo sapiens
  misc_RNA (1)...(19): siRNA sense strand
agaugaaaguccucaaguu

SEQ ID NO: 1624063 - RNA, 19 nt, Homo sapiens
  misc_RNA (1)...(19): siRNA sense strand
gaaaugacuacggauauag

SEQ ID NO: 1624064 - RNA, 19 nt, Homo sapiens
  misc_RNA (1)...(19): siRNA sense strand
gcagggugcagaagaaaga

SEQ ID NO: 1624065 - RNA, 19 nt, Homo sapiens
  misc_RNA (1)...(19): siRNA sense strand
aagaaagggcuaauaaguu

SEQ ID NO: 1624066 - RNA, 19 nt, Homo sapiens
  misc_RNA (1)...(19): siRNA sense strand
caucaaacgcucagacaug

SEQ ID NO: 1624067 - RNA, 19 nt, Homo sapiens
  misc_RNA (1)...(19): siRNA sense strand
gggaggugcugcgcaaguu

SEQ ID NO: 1624068 - RNA, 19 nt, Homo sapiens
  misc_RNA (1)...(19): siRNA sense strand
guuaaggaccagacaaaga

SEQ ID NO: 1624069 - RNA, 19 nt, Homo sapiens
  misc_RNA (1)...(19): siRNA sense strand
ugaaaguccucaaguuugc

SEQ ID NO: 1624070 - RNA, 19 nt, Homo sapiens
  misc_RNA (1)...(19): siRNA sense strand
caagcuacacucuggagaa

SEQ ID NO: 1624071 - RNA, 19 nt, Homo sapiens
  misc_RNA (1)...(19): siRNA sense strand
gcgaggcaguggagaugga

SEQ ID NO: 1624072 - RNA, 19 nt, Homo sapiens
  misc_RNA (1)...(19): siRNA sense strand
cagacgaguuugugaagca

SEQ ID NO: 1624073 - RNA, 19 nt, Homo sapiens
  misc_RNA (1)...(19): siRNA sense strand
agagaaguggcaguaauua

SEQ ID NO: 1624074 - RNA, 19 nt, Homo sapiens
  misc_RNA (1)...(19): siRNA sense strand
agacaaagauccccaucaa

SEQ ID NO: 1624075 - RNA, 19 nt, Homo sapiens
  misc_RNA (1)...(19): siRNA sense strand
gagacuagcaagaugaaag

SEQ ID NO: 1624076 - RNA, 19 nt, Homo sapiens
  misc_RNA (1)...(19): siRNA sense strand
uuacaagaaagggcuaaua

SEQ ID NO: 1624077 - RNA, 19 nt, Homo sapiens
  misc_RNA (1)...(19): siRNA sense strand
ggugaaauaccuguugguu

SEQ ID NO: 1624078 - RNA, 19 nt, Homo sapiens
  misc_RNA (1)...(19): siRNA sense strand
cgagucaaucugaaagaaa

SEQ ID NO: 1624079 - RNA, 19 nt, Homo sapiens
  misc_RNA (1)...(19): siRNA sense strand
gaaaucauugaacgagcaa

SEQ ID NO: 1624080 - RNA, 19 nt, Homo sapiens
  misc_RNA (1)...(19): siRNA sense strand
uuaaggaccagacaaagau

SEQ ID NO: 1624081 - RNA, 19 nt, Homo sapiens
  misc_RNA (1)...(19): siRNA sense strand
agaaguggcaguaauuaca

SEQ ID NO: 1624082 - RNA, 19 nt, Homo sapiens
  misc_RNA (1)...(19): siRNA sense strand
gggcuaauaaguuggugaa

SEQ ID NO: 1624083 - RNA, 19 nt, Homo sapiens
  misc_RNA (1)...(19): siRNA sense strand
uagcuuguauauucucauc

SEQ ID NO: 1624084 - RNA, 19 nt, Homo sapiens
  misc_RNA (1)...(19): siRNA sense strand
uaacagcagaccaccugaa

SEQ ID NO: 1624085 - RNA, 19 nt, Homo sapiens
  misc_RNA (1)...(19): siRNA sense strand
ucgagucaaucugaaagaa

SEQ ID NO: 1624086 - RNA, 19 nt, Homo sapiens
  misc_RNA (1)...(19): siRNA sense strand
gaaguggcaguaauuacag

SEQ ID NO: 1624087 - RNA, 19 nt, Homo sapiens
  misc_RNA (1)...(19): siRNA sense strand
cagaccaccugaauaugag

SEQ ID NO: 1624088 - RNA, 19 nt, Homo sapiens
  misc_RNA (1)...(19): siRNA sense strand
caucagcacucaggaaucc

SEQ ID NO: 1624089 - RNA, 19 nt, Homo sapiens
  misc_RNA (1)...(19): siRNA sense strand
caagaugaaaguccucaag

SEQ ID NO: 1624090 - RNA, 19 nt, Homo sapiens
  misc_RNA (1)...(19): siRNA sense strand
gagaaguggcaguaauuac

SEQ ID NO: 1624091 - RNA, 19 nt, Homo sapiens
  misc_RNA (1)...(19): siRNA sense strand
ucauggugauucugagugu

SEQ ID NO: 1624092 - RNA, 19 nt, Homo sapiens
  misc_RNA (1)...(19): siRNA sense strand
ccauggagccaaaguacau

SEQ ID NO: 1624093 - RNA, 19 nt, Homo sapiens
  misc_RNA (1)...(19): siRNA sense strand
ccagugaggcugucaucug

SEQ ID NO: 1624094 - RNA, 19 nt, Homo sapiens
  misc_RNA (1)...(19): siRNA sense strand
gcuuguauauucucaucag

SEQ ID NO: 1624095 - RNA, 19 nt, Homo sapiens
  misc_RNA (1)...(19): siRNA sense strand
ccgcuaauaaauugcagua

SEQ ID NO: 1624096 - RNA, 19 nt, Homo sapiens
  misc_RNA (1)...(19): siRNA sense strand
gcuccuaccacgagacuag

SEQ ID NO: 1624097 - RNA, 19 nt, Homo sapiens
  misc_RNA (1)...(19): siRNA sense strand
guuuacagauaccgcuaau

SEQ ID NO: 1624098 - RNA, 19 nt, Homo sapiens
  misc_RNA (1)...(19): siRNA sense strand
aggcaguuauggccaauca

SEQ ID NO: 1624099 - RNA, 19 nt, Homo sapiens
  misc_RNA (1)...(19): siRNA sense strand
caguaguccuucccaugga

SEQ ID NO: 1624100 - RNA, 19 nt, Homo sapiens
  misc_RNA (1)...(19): siRNA sense strand
ggaggugcugcgcaaguug

SEQ ID NO: 1624101 - RNA, 19 nt, Homo sapiens
  misc_RNA (1)...(19): siRNA sense strand
cagcugagggugucaugug

SEQ ID NO: 1624102 - RNA, 19 nt, Homo sapiens
  misc_RNA (1)...(19): siRNA sense strand
acagcagaccaccugaaua

SEQ ID NO: 1624103 - RNA, 19 nt, Homo sapiens
  misc_RNA (1)...(19): siRNA sense strand
gaaauaccuguugguuaag

SEQ ID NO: 1624104 - RNA, 19 nt, Homo sapiens
  misc_RNA (1)...(19): siRNA sense strand
uacagauaccgcuaauaaa

SEQ ID NO: 1624105 - RNA, 19 nt, Homo sapiens
  misc_RNA (1)...(19): siRNA sense strand
ucauugaacgagcaagcua

SEQ ID NO: 1624106 - RNA, 19 nt, Homo sapiens
  misc_RNA (1)...(19): siRNA sense strand
caaggcaguuauggccaau

SEQ ID NO: 1624107 - RNA, 19 nt, Homo sapiens
  misc_RNA (1)...(19): siRNA sense strand
auaaauugcaguaguccuu

SEQ ID NO: 1624108 - RNA, 19 nt, Homo sapiens
  misc_RNA (1)...(19): siRNA sense strand
acaagaaagggcuaauaag

SEQ ID NO: 1624109 - RNA, 19 nt, Homo sapiens
  misc_RNA (1)...(19): siRNA sense strand
aagcuacacucuggagaag

SEQ ID NO: 1624110 - RNA, 19 nt, Homo sapiens
  misc_RNA (1)...(19): siRNA sense strand
augaaaguccucaaguuug

SEQ ID NO: 1624111 - RNA, 19 nt, Homo sapiens
  misc_RNA (1)...(19): siRNA sense strand
gcaagaugaaaguccucaa

SEQ ID NO: 1624112 - RNA, 19 nt, Homo sapiens
  misc_RNA (1)...(19): siRNA sense strand
caaaguagcuuguauauuc

SEQ ID NO: 1624113 - RNA, 19 nt, Homo sapiens
  misc_RNA (1)...(19): siRNA sense strand
ugaaauaccuguugguuaa

SEQ ID NO: 1624114 - RNA, 19 nt, Homo sapiens
  misc_RNA (1)...(19): siRNA sense strand
gagaagauguuucgaguca

SEQ ID NO: 1624115 - RNA, 19 nt, Homo sapiens
  misc_RNA (1)...(19): siRNA sense strand
ggaauccucugcaggcaua

SEQ ID NO: 1624116 - RNA, 19 nt, Homo sapiens
  misc_RNA (1)...(19): siRNA sense strand
agaaagggcuaauaaguug

SEQ ID NO: 1624117 - RNA, 19 nt, Homo sapiens
  misc_RNA (1)...(19): siRNA sense strand
gaagauguuucgagucaau

SEQ ID NO: 1624118 - RNA, 19 nt, Homo sapiens
  misc_RNA (1)...(19): siRNA sense strand
gaugaaaguccucaaguuu

SEQ ID NO: 1624119 - RNA, 19 nt, Homo sapiens
  misc_RNA (1)...(19): siRNA sense strand
ggagaaaugacuacggaua

SEQ ID NO: 1624120 - RNA, 19 nt, Homo sapiens
  misc_RNA (1)...(19): siRNA sense strand
gcagaccaccugaauauga

SEQ ID NO: 1624121 - RNA, 19 nt, Homo sapiens
  misc_RNA (1)...(19): siRNA sense strand
agaaaugacuacggauaua

SEQ ID NO: 1624122 - RNA, 19 nt, Homo sapiens
  misc_RNA (1)...(19): siRNA sense strand
gcuaauaaguuggugaaau

SEQ ID NO: 1624123 - RNA, 19 nt, Homo sapiens
  misc_RNA (1)...(19): siRNA sense strand
gagagaaguggcaguaauu

SEQ ID NO: 1624124 - RNA, 19 nt, Homo sapiens
  misc_RNA (1)...(19): siRNA sense strand
gagucaaucugaaagaaau

SEQ ID NO: 1624125 - RNA, 19 nt, Homo sapiens
  misc_RNA (1)...(19): siRNA sense strand
caagaaagggcuaauaagu

SEQ ID NO: 1624126 - RNA, 19 nt, Homo sapiens
  misc_RNA (1)...(19): siRNA sense strand
gcucaucacagacgaguuu

SEQ ID NO: 1624127 - RNA, 19 nt, Homo sapiens
  misc_RNA (1)...(19): siRNA sense strand
gagaaaugacuacggauau

SEQ ID NO: 1624128 - RNA, 19 nt, Homo sapiens
  misc_RNA (1)...(19): siRNA sense strand
cagcagaccaccugaauau

SEQ ID NO: 1624129 - RNA, 19 nt, Homo sapiens
  misc_RNA (1)...(19): siRNA sense strand
gugaaauaccuguugguua

SEQ ID NO: 1624130 - RNA, 19 nt, Homo sapiens
  misc_RNA (1)...(19): siRNA sense strand
ccacgagacuagcaagaug

SEQ ID NO: 1624131 - RNA, 19 nt, Homo sapiens
  misc_RNA (1)...(19): siRNA sense strand
ugaugaauauuucccagaa

SEQ ID NO: 1624132 - RNA, 19 nt, Homo sapiens
  misc_RNA (1)...(19): siRNA sense strand
ugagagaaguggcaguaau

SEQ ID NO: 1624133 - RNA, 19 nt, Homo sapiens
  misc_RNA (1)...(19): siRNA sense strand
gcuacacucuggagaagau

SEQ ID NO: 1624134 - RNA, 19 nt, Homo sapiens
  misc_RNA (1)...(19): siRNA sense strand
uacaagaaagggcuaauaa

SEQ ID NO: 1624135 - RNA, 19 nt, Homo sapiens
  misc_RNA (1)...(19): siRNA sense strand
gaugagagaaguggcagua

SEQ ID NO: 1624136 - RNA, 19 nt, Homo sapiens
  misc_RNA (1)...(19): siRNA sense strand
caagcugggucuccucaug

SEQ ID NO: 1624137 - RNA, 19 nt, Homo sapiens
  misc_RNA (1)...(19): siRNA sense strand
gcaaaguagcuuguauauu

SEQ ID NO: 1624138 - RNA, 19 nt, Homo sapiens
  misc_RNA (1)...(19): siRNA sense strand
gaaaugacuacggauauag

SEQ ID NO: 1624139 - RNA, 19 nt, Homo sapiens
  misc_RNA (1)...(19): siRNA sense strand
gcagggugcagaagaaaga

SEQ ID NO: 1624140 - RNA, 19 nt, Homo sapiens
  misc_RNA (1)...(19): siRNA sense strand
agaugaaaguccucaaguu

SEQ ID NO: 1624141 - RNA, 19 nt, Homo sapiens
  misc_RNA (1)...(19): siRNA sense strand
aagaaagggcuaauaaguu

SEQ ID NO: 1624142 - RNA, 19 nt, Homo sapiens
  misc_RNA (1)...(19): siRNA sense strand
caucaaacgcucagacaug

SEQ ID NO: 1624143 - RNA, 19 nt, Homo sapiens
  misc_RNA (1)...(19): siRNA sense strand
gggaggugcugcgcaaguu

SEQ ID NO: 1624144 - RNA, 19 nt, Homo sapiens
  misc_RNA (1)...(19): siRNA sense strand
guuaaggaccagacaaaga

SEQ ID NO: 1624145 - RNA, 19 nt, Homo sapiens
  misc_RNA (1)...(19): siRNA sense strand
ugaaaguccucaaguuugc

SEQ ID NO: 1624146 - RNA, 19 nt, Homo sapiens
  misc_RNA (1)...(19): siRNA sense strand
agagaaguggcaguaauua

SEQ ID NO: 1624147 - RNA, 19 nt, Homo sapiens
  misc_RNA (1)...(19): siRNA sense strand
gcgaggcaguggagaugga

SEQ ID NO: 1624148 - RNA, 19 nt, Homo sapiens
  misc_RNA (1)...(19): siRNA sense strand
cagacgaguuugugaagca

SEQ ID NO: 1624149 - RNA, 19 nt, Homo sapiens
  misc_RNA (1)...(19): siRNA sense strand
caagcuacacucuggagaa

SEQ ID NO: 1624150 - RNA, 19 nt, Homo sapiens
  misc_RNA (1)...(19): siRNA sense strand
uuacaagaaagggcuaaua

SEQ ID NO: 1624151 - RNA, 19 nt, Homo sapiens
  misc_RNA (1)...(19): siRNA sense strand
gagacuagcaagaugaaag

SEQ ID NO: 1624152 - RNA, 19 nt, Homo sapiens
  misc_RNA (1)...(19): siRNA sense strand
agacaaagauccccaucaa

SEQ ID NO: 1624153 - RNA, 19 nt, Homo sapiens
  misc_RNA (1)...(19): siRNA sense strand
ggugaaauaccuguugguu

SEQ ID NO: 1624154 - RNA, 19 nt, Homo sapiens
  misc_RNA (1)...(19): siRNA sense strand
cgagucaaucugaaagaaa

SEQ ID NO: 1624155 - RNA, 19 nt, Homo sapiens
  misc_RNA (1)...(19): siRNA sense strand
gaaaucauugaacgagcaa

SEQ ID NO: 1624156 - RNA, 19 nt, Homo sapiens
  misc_RNA (1)...(19): siRNA sense strand
uuaaggaccagacaaagau

SEQ ID NO: 1624157 - RNA, 19 nt, Homo sapiens
  misc_RNA (1)...(19): siRNA sense strand
gggcuaauaaguuggugaa

SEQ ID NO: 1624158 - RNA, 19 nt, Homo sapiens
  misc_RNA (1)...(19): siRNA sense strand
agaaguggcaguaauuaca

SEQ ID NO: 1624159 - RNA, 19 nt, Homo sapiens
  misc_RNA (1)...(19): siRNA sense strand
uagcuuguauauucucauc

SEQ ID NO: 1624160 - RNA, 19 nt, Homo sapiens
  misc_RNA (1)...(19): siRNA sense strand
uaacagcagaccaccugaa

SEQ ID NO: 1624161 - RNA, 19 nt, Homo sapiens
  misc_RNA (1)...(19): siRNA sense strand
gaaguggcaguaauuacag

SEQ ID NO: 1624162 - RNA, 19 nt, Homo sapiens
  misc_RNA (1)...(19): siRNA sense strand
cagaccaccugaauaugag

SEQ ID NO: 1624163 - RNA, 19 nt, Homo sapiens
  misc_RNA (1)...(19): siRNA sense strand
ucgagucaaucugaaagaa

SEQ ID NO: 1624164 - RNA, 19 nt, Homo sapiens
  misc_RNA (1)...(19): siRNA sense strand
gagaaguggcaguaauuac

SEQ ID NO: 1624165 - RNA, 19 nt, Homo sapiens
  misc_RNA (1)...(19): siRNA sense strand
caagaugaaaguccucaag

SEQ ID NO: 1624166 - RNA, 19 nt, Homo sapiens
  misc_RNA (1)...(19): siRNA sense strand
caucagcacucaggaaucc

SEQ ID NO: 1624167 - RNA, 19 nt, Homo sapiens
  misc_RNA (1)...(19): siRNA sense strand
ucauggugauucugagugu

SEQ ID NO: 1624168 - RNA, 19 nt, Homo sapiens
  misc_RNA (1)...(19): siRNA sense strand
ccagugaggcugucaucug

SEQ ID NO: 1624169 - RNA, 19 nt, Homo sapiens
  misc_RNA (1)...(19): siRNA sense strand
gcuuguauauucucaucag

SEQ ID NO: 1624170 - RNA, 19 nt, Homo sapiens
  misc_RNA (1)...(19): siRNA sense strand
gcuccuaccacgagacuag

SEQ ID NO: 1624171 - RNA, 19 nt, Homo sapiens
  misc_RNA (1)...(19): siRNA sense strand
ggaggugcugcgcaaguug

SEQ ID NO: 1624172 - RNA, 19 nt, Homo sapiens
  misc_RNA (1)...(19): siRNA sense strand
acagcagaccaccugaaua

SEQ ID NO: 1624173 - RNA, 19 nt, Homo sapiens
  misc_RNA (1)...(19): siRNA sense strand
gaaauaccuguugguuaag

SEQ ID NO: 1624174 - RNA, 19 nt, Homo sapiens
  misc_RNA (1)...(19): siRNA sense strand
ucauugaacgagcaagcua

SEQ ID NO: 1624175 - RNA, 19 nt, Homo sapiens
  misc_RNA (1)...(19): siRNA sense strand
acaagaaagggcuaauaag

SEQ ID NO: 1624176 - RNA, 19 nt, Homo sapiens
  misc_RNA (1)...(19): siRNA sense strand
aagcuacacucuggagaag

SEQ ID NO: 1624177 - RNA, 19 nt, Homo sapiens
  misc_RNA (1)...(19): siRNA sense strand
augaaaguccucaaguuug

SEQ ID NO: 1624178 - RNA, 19 nt, Homo sapiens
  misc_RNA (1)...(19): siRNA sense strand
gcaagaugaaaguccucaa

SEQ ID NO: 1624179 - RNA, 19 nt, Homo sapiens
  misc_RNA (1)...(19): siRNA sense strand
caaaguagcuuguauauuc

SEQ ID NO: 1624180 - RNA, 19 nt, Homo sapiens
  misc_RNA (1)...(19): siRNA sense strand
ugaaauaccuguugguuaa

SEQ ID NO: 1624181 - RNA, 19 nt, Homo sapiens
  misc_RNA (1)...(19): siRNA sense strand
gagaagauguuucgaguca

SEQ ID NO: 1624182 - RNA, 19 nt, Homo sapiens
  misc_RNA (1)...(19): siRNA sense strand
ggaauccucugcaggcaua

SEQ ID NO: 1624183 - RNA, 19 nt, Homo sapiens
  misc_RNA (1)...(19): siRNA sense strand
guacauccuuggaaucuuu

SEQ ID NO: 1624184 - RNA, 19 nt, Homo sapiens
  misc_RNA (1)...(19): siRNA sense strand
agaaagggcuaauaaguug

SEQ ID NO: 1624185 - RNA, 19 nt, Homo sapiens
  misc_RNA (1)...(19): siRNA sense strand
gaagauguuucgagucaau

SEQ ID NO: 1624186 - RNA, 19 nt, Homo sapiens
  misc_RNA (1)...(19): siRNA sense strand
gaugaaaguccucaaguuu

SEQ ID NO: 1624187 - RNA, 19 nt, Homo sapiens
  misc_RNA (1)...(19): siRNA sense strand
caaaguacauccuuggaau

SEQ ID NO: 1624188 - RNA, 19 nt, Homo sapiens
  misc_RNA (1)...(19): siRNA sense strand
ggagaaaugacuacggaua

SEQ ID NO: 1624189 - RNA, 19 nt, Homo sapiens
  misc_RNA (1)...(19): siRNA sense strand
gcagaccaccugaauauga

SEQ ID NO: 1624190 - RNA, 19 nt, Homo sapiens
  misc_RNA (1)...(19): siRNA sense strand
uuacagauaccgcuaauaa

SEQ ID NO: 1624191 - RNA, 19 nt, Homo sapiens
  misc_RNA (1)...(19): siRNA sense strand
agaaaugacuacggauaua

SEQ ID NO: 1624192 - RNA, 19 nt, Homo sapiens
  misc_RNA (1)...(19): siRNA sense strand
gcuaauaaauugcaguagu

SEQ ID NO: 1624193 - RNA, 19 nt, Homo sapiens
  misc_RNA (1)...(19): siRNA sense strand
gcuaauaaguuggugaaau

SEQ ID NO: 1624194 - RNA, 19 nt, Homo sapiens
  misc_RNA (1)...(19): siRNA sense strand
gagagaaguggcaguaauu

SEQ ID NO: 1624195 - RNA, 19 nt, Homo sapiens
  misc_RNA (1)...(19): siRNA sense strand
gagucaaucugaaagaaau

SEQ ID NO: 1624196 - RNA, 19 nt, Homo sapiens
  misc_RNA (1)...(19): siRNA sense strand
caagaaagggcuaauaagu

SEQ ID NO: 1624197 - RNA, 19 nt, Homo sapiens
  misc_RNA (1)...(19): siRNA sense strand
gcucaucacagacgaguuu

SEQ ID NO: 1624198 - RNA, 19 nt, Homo sapiens
  misc_RNA (1)...(19): siRNA sense strand
gagaaaugacuacggauau

SEQ ID NO: 1624199 - RNA, 19 nt, Homo sapiens
  misc_RNA (1)...(19): siRNA sense strand
cagcagaccaccugaauau

SEQ ID NO: 1624200 - RNA, 19 nt, Homo sapiens
  misc_RNA (1)...(19): siRNA sense strand
agauaccgcuaauaaauug

SEQ ID NO: 1624201 - RNA, 19 nt, Homo sapiens
  misc_RNA (1)...(19): siRNA sense strand
gugaaauaccuguugguua

SEQ ID NO: 1624202 - RNA, 19 nt, Homo sapiens
  misc_RNA (1)...(19): siRNA sense strand
ccacgagacuagcaagaug

SEQ ID NO: 1624203 - RNA, 19 nt, Homo sapiens
  misc_RNA (1)...(19): siRNA sense strand
ugagagaaguggcaguaau

SEQ ID NO: 1624204 - RNA, 19 nt, Homo sapiens
  misc_RNA (1)...(19): siRNA sense strand
ugaugaauauuucccagaa

SEQ ID NO: 1624205 - RNA, 19 nt, Homo sapiens
  misc_RNA (1)...(19): siRNA sense strand
gcuacacucuggagaagau

SEQ ID NO: 1624206 - RNA, 19 nt, Homo sapiens
  misc_RNA (1)...(19): siRNA sense strand
uacaagaaagggcuaauaa

SEQ ID NO: 1624207 - RNA, 19 nt, Homo sapiens
  misc_RNA (1)...(19): siRNA sense strand
caagcugggucuccucaug

SEQ ID NO: 1624208 - RNA, 19 nt, Homo sapiens
  misc_RNA (1)...(19): siRNA sense strand
gaugagagaaguggcagua

SEQ ID NO: 1624209 - RNA, 19 nt, Homo sapiens
  misc_RNA (1)...(19): siRNA sense strand
gcaaaguagcuuguauauu

SEQ ID NO: 1624210 - RNA, 19 nt, Homo sapiens
  misc_RNA (1)...(19): siRNA sense strand
cuaauaaauugcaguaguc

SEQ ID NO: 1624211 - RNA, 19 nt, Homo sapiens
  misc_RNA (1)...(19): siRNA sense strand
cagauaccgcuaauaaauu

SEQ ID NO: 1624212 - RNA, 19 nt, Homo sapiens
  misc_RNA (1)...(19): siRNA sense strand
acagauaccgcuaauaaau

SEQ ID NO: 1624213 - RNA, 19 nt, Homo sapiens
  misc_RNA (1)...(19): siRNA sense strand
agaugaaaguccucaaguu

SEQ ID NO: 1624214 - RNA, 19 nt, Homo sapiens
  misc_RNA (1)...(19): siRNA sense strand
gaaaugacuacggauauag

SEQ ID NO: 1624215 - RNA, 19 nt, Homo sapiens
  misc_RNA (1)...(19): siRNA sense strand
gcagggugcagaagaaaga

SEQ ID NO: 1624216 - RNA, 19 nt, Homo sapiens
  misc_RNA (1)...(19): siRNA sense strand
aagaaagggcuaauaaguu

SEQ ID NO: 1624217 - RNA, 19 nt, Homo sapiens
  misc_RNA (1)...(19): siRNA sense strand
caucaaacgcucagacaug

SEQ ID NO: 1624218 - RNA, 19 nt, Homo sapiens
  misc_RNA (1)...(19): siRNA sense strand
gggaggugcugcgcaaguu

SEQ ID NO: 1624219 - RNA, 19 nt, Homo sapiens
  misc_RNA (1)...(19): siRNA sense strand
guuaaggaccagacaaaga

SEQ ID NO: 1624220 - RNA, 19 nt, Homo sapiens
  misc_RNA (1)...(19): siRNA sense strand
ugaaaguccucaaguuugc

SEQ ID NO: 1624221 - RNA, 19 nt, Homo sapiens
  misc_RNA (1)...(19): siRNA sense strand
caagcuacacucuggagaa

SEQ ID NO: 1624222 - RNA, 19 nt, Homo sapiens
  misc_RNA (1)...(19): siRNA sense strand
gcgaggcaguggagaugga

SEQ ID NO: 1624223 - RNA, 19 nt, Homo sapiens
  misc_RNA (1)...(19): siRNA sense strand
cagacgaguuugugaagca

SEQ ID NO: 1624224 - RNA, 19 nt, Homo sapiens
  misc_RNA (1)...(19): siRNA sense strand
agagaaguggcaguaauua

SEQ ID NO: 1624225 - RNA, 19 nt, Homo sapiens
  misc_RNA (1)...(19): siRNA sense strand
agacaaagauccccaucaa

SEQ ID NO: 1624226 - RNA, 19 nt, Homo sapiens
  misc_RNA (1)...(19): siRNA sense strand
gagacuagcaagaugaaag

SEQ ID NO: 1624227 - RNA, 19 nt, Homo sapiens
  misc_RNA (1)...(19): siRNA sense strand
uuacaagaaagggcuaaua

SEQ ID NO: 1624228 - RNA, 19 nt, Homo sapiens
  misc_RNA (1)...(19): siRNA sense strand
ggugaaauaccuguugguu

SEQ ID NO: 1624229 - RNA, 19 nt, Homo sapiens
  misc_RNA (1)...(19): siRNA sense strand
cgagucaaucugaaagaaa

SEQ ID NO: 1624230 - RNA, 19 nt, Homo sapiens
  misc_RNA (1)...(19): siRNA sense strand
gaaaucauugaacgagcaa

SEQ ID NO: 1624231 - RNA, 19 nt, Homo sapiens
  misc_RNA (1)...(19): siRNA sense strand
uuaaggaccagacaaagau

SEQ ID NO: 1624232 - RNA, 19 nt, Homo sapiens
  misc_RNA (1)...(19): siRNA sense strand
agaaguggcaguaauuaca

SEQ ID NO: 1624233 - RNA, 19 nt, Homo sapiens
  misc_RNA (1)...(19): siRNA sense strand
gggcuaauaaguuggugaa

SEQ ID NO: 1624234 - RNA, 19 nt, Homo sapiens
  misc_RNA (1)...(19): siRNA sense strand
uagcuuguauauucucauc

SEQ ID NO: 1624235 - RNA, 19 nt, Homo sapiens
  misc_RNA (1)...(19): siRNA sense strand
uaacagcagaccaccugaa

SEQ ID NO: 1624236 - RNA, 19 nt, Homo sapiens
  misc_RNA (1)...(19): siRNA sense strand
ucgagucaaucugaaagaa

SEQ ID NO: 1624237 - RNA, 19 nt, Homo sapiens
  misc_RNA (1)...(19): siRNA sense strand
gaaguggcaguaauuacag

SEQ ID NO: 1624238 - RNA, 19 nt, Homo sapiens
  misc_RNA (1)...(19): siRNA sense strand
cagaccaccugaauaugag

SEQ ID NO: 1624239 - RNA, 19 nt, Homo sapiens
  misc_RNA (1)...(19): siRNA sense strand
caucagcacucaggaaucc

SEQ ID NO: 1624240 - RNA, 19 nt, Homo sapiens
  misc_RNA (1)...(19): siRNA sense strand
caagaugaaaguccucaag

SEQ ID NO: 1624241 - RNA, 19 nt, Homo sapiens
  misc_RNA (1)...(19): siRNA sense strand
gagaaguggcaguaauuac

SEQ ID NO: 1624242 - RNA, 19 nt, Homo sapiens
  misc_RNA (1)...(19): siRNA sense strand
ucauggugauucugagugu

SEQ ID NO: 1624243 - RNA, 19 nt, Homo sapiens
  misc_RNA (1)...(19): siRNA sense strand
ccauggagccaaaguacau

SEQ ID NO: 1624244 - RNA, 19 nt, Homo sapiens
  misc_RNA (1)...(19): siRNA sense strand
ccagugaggcugucaucug

SEQ ID NO: 1624245 - RNA, 19 nt, Homo sapiens
  misc_RNA (1)...(19): siRNA sense strand
gcuuguauauucucaucag

SEQ ID NO: 1624246 - RNA, 19 nt, Homo sapiens
  misc_RNA (1)...(19): siRNA sense strand
ccgcuaauaaauugcagua

SEQ ID NO: 1624247 - RNA, 19 nt, Homo sapiens
  misc_RNA (1)...(19): siRNA sense strand
gcuccuaccacgagacuag

SEQ ID NO: 1624248 - RNA, 19 nt, Homo sapiens
  misc_RNA (1)...(19): siRNA sense strand
guuuacagauaccgcuaau

SEQ ID NO: 1624249 - RNA, 19 nt, Homo sapiens
  misc_RNA (1)...(19): siRNA sense strand
aggcaguuauggccaauca

SEQ ID NO: 1624250 - RNA, 19 nt, Homo sapiens
  misc_RNA (1)...(19): siRNA sense strand
caguaguccuucccaugga

SEQ ID NO: 1624251 - RNA, 19 nt, Homo sapiens
  misc_RNA (1)...(19): siRNA sense strand
ggaggugcugcgcaaguug

SEQ ID NO: 1624252 - RNA, 19 nt, Homo sapiens
  misc_RNA (1)...(19): siRNA sense strand
cagcugagggugucaugug

SEQ ID NO: 1624253 - RNA, 19 nt, Homo sapiens
  misc_RNA (1)...(19): siRNA sense strand
acagcagaccaccugaaua

SEQ ID NO: 1624254 - RNA, 19 nt, Homo sapiens
  misc_RNA (1)...(19): siRNA sense strand
gaaauaccuguugguuaag

SEQ ID NO: 1624255 - RNA, 19 nt, Homo sapiens
  misc_RNA (1)...(19): siRNA sense strand
uacagauaccgcuaauaaa

SEQ ID NO: 1624256 - RNA, 19 nt, Homo sapiens
  misc_RNA (1)...(19): siRNA sense strand
ucauugaacgagcaagcua

SEQ ID NO: 1624257 - RNA, 19 nt, Homo sapiens
  misc_RNA (1)...(19): siRNA sense strand
caaggcaguuauggccaau

SEQ ID NO: 1624258 - RNA, 19 nt, Homo sapiens
  misc_RNA (1)...(19): siRNA sense strand
auaaauugcaguaguccuu

SEQ ID NO: 1624259 - RNA, 19 nt, Homo sapiens
  misc_RNA (1)...(19): siRNA sense strand
acaagaaagggcuaauaag

SEQ ID NO: 1624260 - RNA, 19 nt, Homo sapiens
  misc_RNA (1)...(19): siRNA sense strand
aagcuacacucuggagaag

SEQ ID NO: 1624261 - RNA, 19 nt, Homo sapiens
  misc_RNA (1)...(19): siRNA sense strand
augaaaguccucaaguuug

SEQ ID NO: 1624262 - RNA, 19 nt, Homo sapiens
  misc_RNA (1)...(19): siRNA sense strand
gcaagaugaaaguccucaa

SEQ ID NO: 1624263 - RNA, 19 nt, Homo sapiens
  misc_RNA (1)...(19): siRNA sense strand
caaaguagcuuguauauuc

SEQ ID NO: 1624264 - RNA, 19 nt, Homo sapiens
  misc_RNA (1)...(19): siRNA sense strand
ugaaauaccuguugguuaa

SEQ ID NO: 1624265 - RNA, 19 nt, Homo sapiens
  misc_RNA (1)...(19): siRNA sense strand
gagaagauguuucgaguca

SEQ ID NO: 1624266 - RNA, 19 nt, Homo sapiens
  misc_RNA (1)...(19): siRNA sense strand
ggaauccucugcaggcaua

SEQ ID NO: 1624267 - RNA, 19 nt, Homo sapiens
  misc_RNA (1)...(19): siRNA sense strand
guacauccuuggaaucuuu

SEQ ID NO: 1624268 - RNA, 19 nt, Homo sapiens
  misc_RNA (1)...(19): siRNA sense strand
agaaagggcuaauaaguug

SEQ ID NO: 1624269 - RNA, 19 nt, Homo sapiens
  misc_RNA (1)...(19): siRNA sense strand
gaagauguuucgagucaau

SEQ ID NO: 1624270 - RNA, 19 nt, Homo sapiens
  misc_RNA (1)...(19): siRNA sense strand
gaugaaaguccucaaguuu

SEQ ID NO: 1624271 - RNA, 19 nt, Homo sapiens
  misc_RNA (1)...(19): siRNA sense strand
caaaguacauccuuggaau

SEQ ID NO: 1624272 - RNA, 19 nt, Homo sapiens
  misc_RNA (1)...(19): siRNA sense strand
ggagaaaugacuacggaua

SEQ ID NO: 1624273 - RNA, 19 nt, Homo sapiens
  misc_RNA (1)...(19): siRNA sense strand
gcagaccaccugaauauga

SEQ ID NO: 1624274 - RNA, 19 nt, Homo sapiens
  misc_RNA (1)...(19): siRNA sense strand
uuacagauaccgcuaauaa

SEQ ID NO: 1624275 - RNA, 19 nt, Homo sapiens
  misc_RNA (1)...(19): siRNA sense strand
agaaaugacuacggauaua

SEQ ID NO: 1624276 - RNA, 19 nt, Homo sapiens
  misc_RNA (1)...(19): siRNA sense strand
gcuaauaaauugcaguagu

SEQ ID NO: 1624277 - RNA, 19 nt, Homo sapiens
  misc_RNA (1)...(19): siRNA sense strand
gcuaauaaguuggugaaau

SEQ ID NO: 1624278 - RNA, 19 nt, Homo sapiens
  misc_RNA (1)...(19): siRNA sense strand
gagagaaguggcaguaauu

SEQ ID NO: 1624279 - RNA, 19 nt, Homo sapiens
  misc_RNA (1)...(19): siRNA sense strand
gagucaaucugaaagaaau

SEQ ID NO: 1624280 - RNA, 19 nt, Homo sapiens
  misc_RNA (1)...(19): siRNA sense strand
caagaaagggcuaauaagu

SEQ ID NO: 1624281 - RNA, 19 nt, Homo sapiens
  misc_RNA (1)...(19): siRNA sense strand
gcucaucacagacgaguuu

SEQ ID NO: 1624282 - RNA, 19 nt, Homo sapiens
  misc_RNA (1)...(19): siRNA sense strand
gagaaaugacuacggauau

SEQ ID NO: 1624283 - RNA, 19 nt, Homo sapiens
  misc_RNA (1)...(19): siRNA sense strand
cagcagaccaccugaauau

SEQ ID NO: 1624284 - RNA, 19 nt, Homo sapiens
  misc_RNA (1)...(19): siRNA sense strand
agauaccgcuaauaaauug

SEQ ID NO: 1624285 - RNA, 19 nt, Homo sapiens
  misc_RNA (1)...(19): siRNA sense strand
gugaaauaccuguugguua

SEQ ID NO: 1624286 - RNA, 19 nt, Homo sapiens
  misc_RNA (1)...(19): siRNA sense strand
ccacgagacuagcaagaug

SEQ ID NO: 1624287 - RNA, 19 nt, Homo sapiens
  misc_RNA (1)...(19): siRNA sense strand
ugagagaaguggcaguaau

SEQ ID NO: 1624288 - RNA, 19 nt, Homo sapiens
  misc_RNA (1)...(19): siRNA sense strand
ugaugaauauuucccagaa

SEQ ID NO: 1624289 - RNA, 19 nt, Homo sapiens
  misc_RNA (1)...(19): siRNA sense strand
gcuacacucuggagaagau

SEQ ID NO: 1624290 - RNA, 19 nt, Homo sapiens
  misc_RNA (1)...(19): siRNA sense strand
uacaagaaagggcuaauaa

SEQ ID NO: 1624291 - RNA, 19 nt, Homo sapiens
  misc_RNA (1)...(19): siRNA sense strand
caagcugggucuccucaug

SEQ ID NO: 1624292 - RNA, 19 nt, Homo sapiens
  misc_RNA (1)...(19): siRNA sense strand
gaugagagaaguggcagua

SEQ ID NO: 1624293 - RNA, 19 nt, Homo sapiens
  misc_RNA (1)...(19): siRNA sense strand
gcaaaguagcuuguauauu

SEQ ID NO: 1624294 - RNA, 19 nt, Homo sapiens
  misc_RNA (1)...(19): siRNA sense strand
cuaauaaauugcaguaguc

SEQ ID NO: 1624295 - RNA, 19 nt, Homo sapiens
  misc_RNA (1)...(19): siRNA sense strand
cagauaccgcuaauaaauu

SEQ ID NO: 1624296 - RNA, 19 nt, Homo sapiens
  misc_RNA (1)...(19): siRNA sense strand
acagauaccgcuaauaaau

SEQ ID NO: 1624297 - RNA, 19 nt, Homo sapiens
  misc_RNA (1)...(19): siRNA sense strand
agaugaaaguccucaaguu

SEQ ID NO: 1624298 - RNA, 19 nt, Homo sapiens
  misc_RNA (1)...(19): siRNA sense strand
gaaaugacuacggauauag

SEQ ID NO: 1624299 - RNA, 19 nt, Homo sapiens
  misc_RNA (1)...(19): siRNA sense strand
gcagggugcagaagaaaga

SEQ ID NO: 1624300 - RNA, 19 nt, Homo sapiens
  misc_RNA (1)...(19): siRNA sense strand
aagaaagggcuaauaaguu

SEQ ID NO: 1624301 - RNA, 19 nt, Homo sapiens
  misc_RNA (1)...(19): siRNA sense strand
caucaaacgcucagacaug

SEQ ID NO: 1624302 - RNA, 19 nt, Homo sapiens
  misc_RNA (1)...(19): siRNA sense strand
gggaggugcugcgcaaguu

SEQ ID NO: 1624303 - RNA, 19 nt, Homo sapiens
  misc_RNA (1)...(19): siRNA sense strand
guuaaggaccagacaaaga

SEQ ID NO: 1624304 - RNA, 19 nt, Homo sapiens
  misc_RNA (1)...(19): siRNA sense strand
ugaaaguccucaaguuugc

SEQ ID NO: 1624305 - RNA, 19 nt, Homo sapiens
  misc_RNA (1)...(19): siRNA sense strand
caagcuacacucuggagaa

SEQ ID NO: 1624306 - RNA, 19 nt, Homo sapiens
  misc_RNA (1)...(19): siRNA sense strand
gcgaggcaguggagaugga

SEQ ID NO: 1624307 - RNA, 19 nt, Homo sapiens
  misc_RNA (1)...(19): siRNA sense strand
cagacgaguuugugaagca

SEQ ID NO: 1624308 - RNA, 19 nt, Homo sapiens
  misc_RNA (1)...(19): siRNA sense strand
agagaaguggcaguaauua

SEQ ID NO: 1624309 - RNA, 19 nt, Homo sapiens
  misc_RNA (1)...(19): siRNA sense strand
agacaaagauccccaucaa

SEQ ID NO: 1624310 - RNA, 19 nt, Homo sapiens
  misc_RNA (1)...(19): siRNA sense strand
gagacuagcaagaugaaag

SEQ ID NO: 1624311 - RNA, 19 nt, Homo sapiens
  misc_RNA (1)...(19): siRNA sense strand
uuacaagaaagggcuaaua

SEQ ID NO: 1624312 - RNA, 19 nt, Homo sapiens
  misc_RNA (1)...(19): siRNA sense strand
ggugaaauaccuguugguu

SEQ ID NO: 1624313 - RNA, 19 nt, Homo sapiens
  misc_RNA (1)...(19): siRNA sense strand
cgagucaaucugaaagaaa

SEQ ID NO: 1624314 - RNA, 19 nt, Homo sapiens
  misc_RNA (1)...(19): siRNA sense strand
gaaaucauugaacgagcaa

SEQ ID NO: 1624315 - RNA, 19 nt, Homo sapiens
  misc_RNA (1)...(19): siRNA sense strand
uuaaggaccagacaaagau

SEQ ID NO: 1624316 - RNA, 19 nt, Homo sapiens
  misc_RNA (1)...(19): siRNA sense strand
agaaguggcaguaauuaca

SEQ ID NO: 1624317 - RNA, 19 nt, Homo sapiens
  misc_RNA (1)...(19): siRNA sense strand
gggcuaauaaguuggugaa

SEQ ID NO: 1624318 - RNA, 19 nt, Homo sapiens
  misc_RNA (1)...(19): siRNA sense strand
uagcuuguauauucucauc

SEQ ID NO: 1624319 - RNA, 19 nt, Homo sapiens
  misc_RNA (1)...(19): siRNA sense strand
uaacagcagaccaccugaa

SEQ ID NO: 1624320 - RNA, 19 nt, Homo sapiens
  misc_RNA (1)...(19): siRNA sense strand
ucgagucaaucugaaagaa

SEQ ID NO: 1624321 - RNA, 19 nt, Homo sapiens
  misc_RNA (1)...(19): siRNA sense strand
gaaguggcaguaauuacag

SEQ ID NO: 1624322 - RNA, 19 nt, Homo sapiens
  misc_RNA (1)...(19): siRNA sense strand
cagaccaccugaauaugag

SEQ ID NO: 1624323 - RNA, 19 nt, Homo sapiens
  misc_RNA (1)...(19): siRNA sense strand
caucagcacucaggaaucc

SEQ ID NO: 1624324 - RNA, 19 nt, Homo sapiens
  misc_RNA (1)...(19): siRNA sense strand
caagaugaaaguccucaag

SEQ ID NO: 1624325 - RNA, 19 nt, Homo sapiens
  misc_RNA (1)...(19): siRNA sense strand
gagaaguggcaguaauuac

SEQ ID NO: 1624326 - RNA, 19 nt, Homo sapiens
  misc_RNA (1)...(19): siRNA sense strand
ucauggugauucugagugu

SEQ ID NO: 1624327 - RNA, 19 nt, Homo sapiens
  misc_RNA (1)...(19): siRNA sense strand
ccauggagccaaaguacau

SEQ ID NO: 1624328 - RNA, 19 nt, Homo sapiens
  misc_RNA (1)...(19): siRNA sense strand
ccagugaggcugucaucug

SEQ ID NO: 1624329 - RNA, 19 nt, Homo sapiens
  misc_RNA (1)...(19): siRNA sense strand
gcuuguauauucucaucag

SEQ ID NO: 1624330 - RNA, 19 nt, Homo sapiens
  misc_RNA (1)...(19): siRNA sense strand
ccgcuaauaaauugcagua

SEQ ID NO: 1624331 - RNA, 19 nt, Homo sapiens
  misc_RNA (1)...(19): siRNA sense strand
gcuccuaccacgagacuag

SEQ ID NO: 1624332 - RNA, 19 nt, Homo sapiens
  misc_RNA (1)...(19): siRNA sense strand
guuuacagauaccgcuaau

SEQ ID NO: 1624333 - RNA, 19 nt, Homo sapiens
  misc_RNA (1)...(19): siRNA sense strand
aggcaguuauggccaauca

SEQ ID NO: 1624334 - RNA, 19 nt, Homo sapiens
  misc_RNA (1)...(19): siRNA sense strand
caguaguccuucccaugga

SEQ ID NO: 1624335 - RNA, 19 nt, Homo sapiens
  misc_RNA (1)...(19): siRNA sense strand
ggaggugcugcgcaaguug

SEQ ID NO: 1624336 - RNA, 19 nt, Homo sapiens
  misc_RNA (1)...(19): siRNA sense strand
cagcugagggugucaugug

SEQ ID NO: 1624337 - RNA, 19 nt, Homo sapiens
  misc_RNA (1)...(19): siRNA sense strand
acagcagaccaccugaaua

SEQ ID NO: 1624338 - RNA, 19 nt, Homo sapiens
  misc_RNA (1)...(19): siRNA sense strand
gaaauaccuguugguuaag

SEQ ID NO: 1624339 - RNA, 19 nt, Homo sapiens
  misc_RNA (1)...(19): siRNA sense strand
uacagauaccgcuaauaaa

SEQ ID NO: 1624340 - RNA, 19 nt, Homo sapiens
  misc_RNA (1)...(19): siRNA sense strand
ucauugaacgagcaagcua

SEQ ID NO: 1624341 - RNA, 19 nt, Homo sapiens
  misc_RNA (1)...(19): siRNA sense strand
caaggcaguuauggccaau

SEQ ID NO: 1624342 - RNA, 19 nt, Homo sapiens
  misc_RNA (1)...(19): siRNA sense strand
auaaauugcaguaguccuu

SEQ ID NO: 1624343 - RNA, 19 nt, Homo sapiens
  misc_RNA (1)...(19): siRNA sense strand
acaagaaagggcuaauaag

SEQ ID NO: 1624344 - RNA, 19 nt, Homo sapiens
  misc_RNA (1)...(19): siRNA sense strand
aagcuacacucuggagaag

SEQ ID NO: 1624345 - RNA, 19 nt, Homo sapiens
  misc_RNA (1)...(19): siRNA sense strand
augaaaguccucaaguuug

SEQ ID NO: 1624346 - RNA, 19 nt, Homo sapiens
  misc_RNA (1)...(19): siRNA sense strand
gcaagaugaaaguccucaa

SEQ ID NO: 1624347 - RNA, 19 nt, Homo sapiens
  misc_RNA (1)...(19): siRNA sense strand
caaaguagcuuguauauuc

SEQ ID NO: 1624348 - RNA, 19 nt, Homo sapiens
  misc_RNA (1)...(19): siRNA sense strand
ugaaauaccuguugguuaa

SEQ ID NO: 1624349 - RNA, 19 nt, Homo sapiens
  misc_RNA (1)...(19): siRNA sense strand
gagaagauguuucgaguca

SEQ ID NO: 1624350 - RNA, 19 nt, Homo sapiens
  misc_RNA (1)...(19): siRNA sense strand
ggaauccucugcaggcaua

SEQ ID NO: 1624351 - RNA, 19 nt, Homo sapiens
  misc_RNA (1)...(19): siRNA sense strand
agaaagggcuaauaaguug

SEQ ID NO: 1624352 - RNA, 19 nt, Homo sapiens
  misc_RNA (1)...(19): siRNA sense strand
gaagauguuucgagucaau

SEQ ID NO: 1624353 - RNA, 19 nt, Homo sapiens
  misc_RNA (1)...(19): siRNA sense strand
gaugaaaguccucaaguuu

SEQ ID NO: 1624354 - RNA, 19 nt, Homo sapiens
  misc_RNA (1)...(19): siRNA sense strand
ggagaaaugacuacggaua

SEQ ID NO: 1624355 - RNA, 19 nt, Homo sapiens
  misc_RNA (1)...(19): siRNA sense strand
gcagaccaccugaauauga

SEQ ID NO: 1624356 - RNA, 19 nt, Homo sapiens
  misc_RNA (1)...(19): siRNA sense strand
agaaaugacuacggauaua

SEQ ID NO: 1624357 - RNA, 19 nt, Homo sapiens
  misc_RNA (1)...(19): siRNA sense strand
gcuaauaaguuggugaaau

SEQ ID NO: 1624358 - RNA, 19 nt, Homo sapiens
  misc_RNA (1)...(19): siRNA sense strand
gagagaaguggcaguaauu

SEQ ID NO: 1624359 - RNA, 19 nt, Homo sapiens
  misc_RNA (1)...(19): siRNA sense strand
gagucaaucugaaagaaau

SEQ ID NO: 1624360 - RNA, 19 nt, Homo sapiens
  misc_RNA (1)...(19): siRNA sense strand
caagaaagggcuaauaagu

SEQ ID NO: 1624361 - RNA, 19 nt, Homo sapiens
  misc_RNA (1)...(19): siRNA sense strand
gcucaucacagacgaguuu

SEQ ID NO: 1624362 - RNA, 19 nt, Homo sapiens
  misc_RNA (1)...(19): siRNA sense strand
gagaaaugacuacggauau

SEQ ID NO: 1624363 - RNA, 19 nt, Homo sapiens
  misc_RNA (1)...(19): siRNA sense strand
cagcagaccaccugaauau

SEQ ID NO: 1624364 - RNA, 19 nt, Homo sapiens
  misc_RNA (1)...(19): siRNA sense strand
gugaaauaccuguugguua

SEQ ID NO: 1624365 - RNA, 19 nt, Homo sapiens
  misc_RNA (1)...(19): siRNA sense strand
ccacgagacuagcaagaug

SEQ ID NO: 1624366 - RNA, 19 nt, Homo sapiens
  misc_RNA (1)...(19): siRNA sense strand
ugaugaauauuucccagaa

SEQ ID NO: 1624367 - RNA, 19 nt, Homo sapiens
  misc_RNA (1)...(19): siRNA sense strand
ugagagaaguggcaguaau

SEQ ID NO: 1624368 - RNA, 19 nt, Homo sapiens
  misc_RNA (1)...(19): siRNA sense strand
gcuacacucuggagaagau

SEQ ID NO: 1624369 - RNA, 19 nt, Homo sapiens
  misc_RNA (1)...(19): siRNA sense strand
uacaagaaagggcuaauaa

SEQ ID NO: 1624370 - RNA, 19 nt, Homo sapiens
  misc_RNA (1)...(19): siRNA sense strand
gaugagagaaguggcagua

SEQ ID NO: 1624371 - RNA, 19 nt, Homo sapiens
  misc_RNA (1)...(19): siRNA sense strand
caagcugggucuccucaug

SEQ ID NO: 1624372 - RNA, 19 nt, Homo sapiens
  misc_RNA (1)...(19): siRNA sense strand
gcaaaguagcuuguauauu

SEQ ID NO: 1624373 - RNA, 19 nt, Homo sapiens
  misc_RNA (1)...(19): siRNA sense strand
gaaaugacuacggauauag

SEQ ID NO: 1624374 - RNA, 19 nt, Homo sapiens
  misc_RNA (1)...(19): siRNA sense strand
gcagggugcagaagaaaga

SEQ ID NO: 1624375 - RNA, 19 nt, Homo sapiens
  misc_RNA (1)...(19): siRNA sense strand
agaugaaaguccucaaguu

SEQ ID NO: 1624376 - RNA, 19 nt, Homo sapiens
  misc_RNA (1)...(19): siRNA sense strand
aagaaagggcuaauaaguu

SEQ ID NO: 1624377 - RNA, 19 nt, Homo sapiens
  misc_RNA (1)...(19): siRNA sense strand
caucaaacgcucagacaug

SEQ ID NO: 1624378 - RNA, 19 nt, Homo sapiens
  misc_RNA (1)...(19): siRNA sense strand
gggaggugcugcgcaaguu

SEQ ID NO: 1624379 - RNA, 19 nt, Homo sapiens
  misc_RNA (1)...(19): siRNA sense strand
guuaaggaccagacaaaga

SEQ ID NO: 1624380 - RNA, 19 nt, Homo sapiens
  misc_RNA (1)...(19): siRNA sense strand
ugaaaguccucaaguuugc

SEQ ID NO: 1624381 - RNA, 19 nt, Homo sapiens
  misc_RNA (1)...(19): siRNA sense strand
agagaaguggcaguaauua

SEQ ID NO: 1624382 - RNA, 19 nt, Homo sapiens
  misc_RNA (1)...(19): siRNA sense strand
gcgaggcaguggagaugga

SEQ ID NO: 1624383 - RNA, 19 nt, Homo sapiens
  misc_RNA (1)...(19): siRNA sense strand
cagacgaguuugugaagca

SEQ ID NO: 1624384 - RNA, 19 nt, Homo sapiens
  misc_RNA (1)...(19): siRNA sense strand
caagcuacacucuggagaa

SEQ ID NO: 1624385 - RNA, 19 nt, Homo sapiens
  misc_RNA (1)...(19): siRNA sense strand
uuacaagaaagggcuaaua

SEQ ID NO: 1624386 - RNA, 19 nt, Homo sapiens
  misc_RNA (1)...(19): siRNA sense strand
gagacuagcaagaugaaag

SEQ ID NO: 1624387 - RNA, 19 nt, Homo sapiens
  misc_RNA (1)...(19): siRNA sense strand
agacaaagauccccaucaa

SEQ ID NO: 1624388 - RNA, 19 nt, Homo sapiens
  misc_RNA (1)...(19): siRNA sense strand
ggugaaauaccuguugguu

SEQ ID NO: 1624389 - RNA, 19 nt, Homo sapiens
  misc_RNA (1)...(19): siRNA sense strand
cgagucaaucugaaagaaa

SEQ ID NO: 1624390 - RNA, 19 nt, Homo sapiens
  misc_RNA (1)...(19): siRNA sense strand
gaaaucauugaacgagcaa

SEQ ID NO: 1624391 - RNA, 19 nt, Homo sapiens
  misc_RNA (1)...(19): siRNA sense strand
uuaaggaccagacaaagau

SEQ ID NO: 1624392 - RNA, 19 nt, Homo sapiens
  misc_RNA (1)...(19): siRNA sense strand
gggcuaauaaguuggugaa

SEQ ID NO: 1624393 - RNA, 19 nt, Homo sapiens
  misc_RNA (1)...(19): siRNA sense strand
agaaguggcaguaauuaca

SEQ ID NO: 1624394 - RNA, 19 nt, Homo sapiens
  misc_RNA (1)...(19): siRNA sense strand
uagcuuguauauucucauc

SEQ ID NO: 1624395 - RNA, 19 nt, Homo sapiens
  misc_RNA (1)...(19): siRNA sense strand
uaacagcagaccaccugaa

SEQ ID NO: 1624396 - RNA, 19 nt, Homo sapiens
  misc_RNA (1)...(19): siRNA sense strand
gaaguggcaguaauuacag

SEQ ID NO: 1624397 - RNA, 19 nt, Homo sapiens
  misc_RNA (1)...(19): siRNA sense strand
cagaccaccugaauaugag

SEQ ID NO: 1624398 - RNA, 19 nt, Homo sapiens
  misc_RNA (1)...(19): siRNA sense strand
ucgagucaaucugaaagaa

SEQ ID NO: 1624399 - RNA, 19 nt, Homo sapiens
  misc_RNA (1)...(19): siRNA sense strand
gagaaguggcaguaauuac

SEQ ID NO: 1624400 - RNA, 19 nt, Homo sapiens
  misc_RNA (1)...(19): siRNA sense strand
caagaugaaaguccucaag

SEQ ID NO: 1624401 - RNA, 19 nt, Homo sapiens
  misc_RNA (1)...(19): siRNA sense strand
caucagcacucaggaaucc

SEQ ID NO: 1624402 - RNA, 19 nt, Homo sapiens
  misc_RNA (1)...(19): siRNA sense strand
ucauggugauucugagugu

SEQ ID NO: 1624403 - RNA, 19 nt, Homo sapiens
  misc_RNA (1)...(19): siRNA sense strand
ccagugaggcugucaucug

SEQ ID NO: 1624404 - RNA, 19 nt, Homo sapiens
  misc_RNA (1)...(19): siRNA sense strand
gcuuguauauucucaucag

SEQ ID NO: 1624405 - RNA, 19 nt, Homo sapiens
  misc_RNA (1)...(19): siRNA sense strand
gcuccuaccacgagacuag

SEQ ID NO: 1624406 - RNA, 19 nt, Homo sapiens
  misc_RNA (1)...(19): siRNA sense strand
ggaggugcugcgcaaguug

SEQ ID NO: 1624407 - RNA, 19 nt, Homo sapiens
  misc_RNA (1)...(19): siRNA sense strand
acagcagaccaccugaaua

SEQ ID NO: 1624408 - RNA, 19 nt, Homo sapiens
  misc_RNA (1)...(19): siRNA sense strand
gaaauaccuguugguuaag

SEQ ID NO: 1624409 - RNA, 19 nt, Homo sapiens
  misc_RNA (1)...(19): siRNA sense strand
ucauugaacgagcaagcua

SEQ ID NO: 1624410 - RNA, 19 nt, Homo sapiens
  misc_RNA (1)...(19): siRNA sense strand
acaagaaagggcuaauaag

SEQ ID NO: 1624411 - RNA, 19 nt, Homo sapiens
  misc_RNA (1)...(19): siRNA sense strand
aagcuacacucuggagaag

SEQ ID NO: 1624412 - RNA, 19 nt, Homo sapiens
  misc_RNA (1)...(19): siRNA sense strand
augaaaguccucaaguuug

SEQ ID NO: 1624413 - RNA, 19 nt, Homo sapiens
  misc_RNA (1)...(19): siRNA sense strand
gcaagaugaaaguccucaa

SEQ ID NO: 1624414 - RNA, 19 nt, Homo sapiens
  misc_RNA (1)...(19): siRNA sense strand
ggagcucagugaugacuug

SEQ ID NO: 1624415 - RNA, 19 nt, Homo sapiens
  misc_RNA (1)...(19): siRNA sense strand
ggaccaggaccaagaagug

SEQ ID NO: 1624416 - RNA, 19 nt, Homo sapiens
  misc_RNA (1)...(19): siRNA sense strand
gcucagugaugacuugcau

SEQ ID NO: 1624417 - RNA, 19 nt, Homo sapiens
  misc_RNA (1)...(19): siRNA sense strand
agcaggagcucagugauga

SEQ ID NO: 1624418 - RNA, 19 nt, Homo sapiens
  misc_RNA (1)...(19): siRNA sense strand
guggagcgcuaccgacagu

SEQ ID NO: 1624419 - RNA, 19 nt, Homo sapiens
  misc_RNA (1)...(19): siRNA sense strand
gaccaggaccaagaaguga

SEQ ID NO: 1624420 - RNA, 19 nt, Homo sapiens
  misc_RNA (1)...(19): siRNA sense strand
ggagcgcuaccgacaguuc

SEQ ID NO: 1624421 - RNA, 19 nt, Homo sapiens
  misc_RNA (1)...(19): siRNA sense strand
ucagugaugacuugcaugu

SEQ ID NO: 1624422 - RNA, 19 nt, Homo sapiens
  misc_RNA (1)...(19): siRNA sense strand
ggagcucagugaugacuug

SEQ ID NO: 1624423 - RNA, 19 nt, Homo sapiens
  misc_RNA (1)...(19): siRNA sense strand
ggaccaggaccaagaagug

SEQ ID NO: 1624424 - RNA, 19 nt, Homo sapiens
  misc_RNA (1)...(19): siRNA sense strand
gcucagugaugacuugcau

SEQ ID NO: 1624425 - RNA, 19 nt, Homo sapiens
  misc_RNA (1)...(19): siRNA sense strand
agcaggagcucagugauga

SEQ ID NO: 1624426 - RNA, 19 nt, Homo sapiens
  misc_RNA (1)...(19): siRNA sense strand
guggagcgcuaccgacagu

SEQ ID NO: 1624427 - RNA, 19 nt, Homo sapiens
  misc_RNA (1)...(19): siRNA sense strand
gaccaggaccaagaaguga

SEQ ID NO: 1624428 - RNA, 19 nt, Homo sapiens
  misc_RNA (1)...(19): siRNA sense strand
ggagcgcuaccgacaguuc

SEQ ID NO: 1624429 - RNA, 19 nt, Homo sapiens
  misc_RNA (1)...(19): siRNA sense strand
ucagugaugacuugcaugu

SEQ ID NO: 1624430 - RNA, 19 nt, Homo sapiens
  misc_RNA (1)...(19): siRNA sense strand
ggagcucagugaugacuug

SEQ ID NO: 1624431 - RNA, 19 nt, Homo sapiens
  misc_RNA (1)...(19): siRNA sense strand
ggaccaggaccaagaagug

SEQ ID NO: 1624432 - RNA, 19 nt, Homo sapiens
  misc_RNA (1)...(19): siRNA sense strand
gcucagugaugacuugcau

SEQ ID NO: 1624433 - RNA, 19 nt, Homo sapiens
  misc_RNA (1)...(19): siRNA sense strand
agcaggagcucagugauga

SEQ ID NO: 1624434 - RNA, 19 nt, Homo sapiens
  misc_RNA (1)...(19): siRNA sense strand
guggagcgcuaccgacagu

SEQ ID NO: 1624435 - RNA, 19 nt, Homo sapiens
  misc_RNA (1)...(19): siRNA sense strand
gaccaggaccaagaaguga

SEQ ID NO: 1624436 - RNA, 19 nt, Homo sapiens
  misc_RNA (1)...(19): siRNA sense strand
ggagcgcuaccgacaguuc

SEQ ID NO: 1624437 - RNA, 19 nt, Homo sapiens
  misc_RNA (1)...(19): siRNA sense strand
ucagugaugacuugcaugu

SEQ ID NO: 1624438 - RNA, 19 nt, Homo sapiens
  misc_RNA (1)...(19): siRNA sense strand
ggagcucagugaugacuug

SEQ ID NO: 1624439 - RNA, 19 nt, Homo sapiens
  misc_RNA (1)...(19): siRNA sense strand
ggaccaggaccaagaagug

SEQ ID NO: 1624440 - RNA, 19 nt, Homo sapiens
  misc_RNA (1)...(19): siRNA sense strand
gcucagugaugacuugcau

SEQ ID NO: 1624441 - RNA, 19 nt, Homo sapiens
  misc_RNA (1)...(19): siRNA sense strand
agcaggagcucagugauga

SEQ ID NO: 1624442 - RNA, 19 nt, Homo sapiens
  misc_RNA (1)...(19): siRNA sense strand
guggagcgcuaccgacagu

SEQ ID NO: 1624443 - RNA, 19 nt, Homo sapiens
  misc_RNA (1)...(19): siRNA sense strand
gaccaggaccaagaaguga

SEQ ID NO: 1624444 - RNA, 19 nt, Homo sapiens
  misc_RNA (1)...(19): siRNA sense strand
ggagcgcuaccgacaguuc

SEQ ID NO: 1624445 - RNA, 19 nt, Homo sapiens
  misc_RNA (1)...(19): siRNA sense strand
ucagugaugacuugcaugu

SEQ ID NO: 1624446 - RNA, 19 nt, Homo sapiens
  misc_RNA (1)...(19): siRNA sense strand
ggagcucagugaugacuug

SEQ ID NO: 1624447 - RNA, 19 nt, Homo sapiens
  misc_RNA (1)...(19): siRNA sense strand
ggaccaggaccaagaagug

SEQ ID NO: 1624448 - RNA, 19 nt, Homo sapiens
  misc_RNA (1)...(19): siRNA sense strand
gcucagugaugacuugcau

SEQ ID NO: 1624449 - RNA, 19 nt, Homo sapiens
  misc_RNA (1)...(19): siRNA sense strand
agcaggagcucagugauga

SEQ ID NO: 1624450 - RNA, 19 nt, Homo sapiens
  misc_RNA (1)...(19): siRNA sense strand
guggagcgcuaccgacagu

SEQ ID NO: 1624451 - RNA, 19 nt, Homo sapiens
  misc_RNA (1)...(19): siRNA sense strand
gaccaggaccaagaaguga

SEQ ID NO: 1624452 - RNA, 19 nt, Homo sapiens
  misc_RNA (1)...(19): siRNA sense strand
ggagcgcuaccgacaguuc

SEQ ID NO: 1624453 - RNA, 19 nt, Homo sapiens
  misc_RNA (1)...(19): siRNA sense strand
ucagugaugacuugcaugu

SEQ ID NO: 1624454 - RNA, 19 nt, Homo sapiens
  misc_RNA (1)...(19): siRNA sense strand
ggagcucagugaugacuug

SEQ ID NO: 1624455 - RNA, 19 nt, Homo sapiens
  misc_RNA (1)...(19): siRNA sense strand
ggaccaggaccaagaagug

SEQ ID NO: 1624456 - RNA, 19 nt, Homo sapiens
  misc_RNA (1)...(19): siRNA sense strand
gcucagugaugacuugcau

SEQ ID NO: 1624457 - RNA, 19 nt, Homo sapiens
  misc_RNA (1)...(19): siRNA sense strand
agcaggagcucagugauga

SEQ ID NO: 1624458 - RNA, 19 nt, Homo sapiens
  misc_RNA (1)...(19): siRNA sense strand
guggagcgcuaccgacagu

SEQ ID NO: 1624459 - RNA, 19 nt, Homo sapiens
  misc_RNA (1)...(19): siRNA sense strand
gaccaggaccaagaaguga

SEQ ID NO: 1624460 - RNA, 19 nt, Homo sapiens
  misc_RNA (1)...(19): siRNA sense strand
ggagcgcuaccgacaguuc

SEQ ID NO: 1624461 - RNA, 19 nt, Homo sapiens
  misc_RNA (1)...(19): siRNA sense strand
ucagugaugacuugcaugu

SEQ ID NO: 1624462 - RNA, 19 nt, Homo sapiens
  misc_RNA (1)...(19): siRNA sense strand
ggagcucagugaugacuug

SEQ ID NO: 1624463 - RNA, 19 nt, Homo sapiens
  misc_RNA (1)...(19): siRNA sense strand
ggaccaggaccaagaagug

SEQ ID NO: 1624464 - RNA, 19 nt, Homo sapiens
  misc_RNA (1)...(19): siRNA sense strand
gcucagugaugacuugcau

SEQ ID NO: 1624465 - RNA, 19 nt, Homo sapiens
  misc_RNA (1)...(19): siRNA sense strand
agcaggagcucagugauga

SEQ ID NO: 1624466 - RNA, 19 nt, Homo sapiens
  misc_RNA (1)...(19): siRNA sense strand
guggagcgcuaccgacagu

SEQ ID NO: 1624467 - RNA, 19 nt, Homo sapiens
  misc_RNA (1)...(19): siRNA sense strand
gaccaggaccaagaaguga

SEQ ID NO: 1624468 - RNA, 19 nt, Homo sapiens
  misc_RNA (1)...(19): siRNA sense strand
ggagcgcuaccgacaguuc

SEQ ID NO: 1624469 - RNA, 19 nt, Homo sapiens
  misc_RNA (1)...(19): siRNA sense strand
ucagugaugacuugcaugu

SEQ ID NO: 1624470 - RNA, 19 nt, Homo sapiens
  misc_RNA (1)...(19): siRNA sense strand
ggagcucagugaugacuug

SEQ ID NO: 1624471 - RNA, 19 nt, Homo sapiens
  misc_RNA (1)...(19): siRNA sense strand
ggaccaggaccaagaagug

SEQ ID NO: 1624472 - RNA, 19 nt, Homo sapiens
  misc_RNA (1)...(19): siRNA sense strand
gcucagugaugacuugcau

SEQ ID NO: 1624473 - RNA, 19 nt, Homo sapiens
  misc_RNA (1)...(19): siRNA sense strand
agcaggagcucagugauga

SEQ ID NO: 1624474 - RNA, 19 nt, Homo sapiens
  misc_RNA (1)...(19): siRNA sense strand
guggagcgcuaccgacagu

SEQ ID NO: 1624475 - RNA, 19 nt, Homo sapiens
  misc_RNA (1)...(19): siRNA sense strand
gaccaggaccaagaaguga

SEQ ID NO: 1624476 - RNA, 19 nt, Homo sapiens
  misc_RNA (1)...(19): siRNA sense strand
ggagcgcuaccgacaguuc

SEQ ID NO: 1624477 - RNA, 19 nt, Homo sapiens
  misc_RNA (1)...(19): siRNA sense strand
ucagugaugacuugcaugu

SEQ ID NO: 1624478 - RNA, 19 nt, Homo sapiens
  misc_RNA (1)...(19): siRNA sense strand
ggagcucagugaugacuug

SEQ ID NO: 1624479 - RNA, 19 nt, Homo sapiens
  misc_RNA (1)...(19): siRNA sense strand
ggaccaggaccaagaagug

SEQ ID NO: 1624480 - RNA, 19 nt, Homo sapiens
  misc_RNA (1)...(19): siRNA sense strand
gcucagugaugacuugcau

SEQ ID NO: 1624481 - RNA, 19 nt, Homo sapiens
  misc_RNA (1)...(19): siRNA sense strand
agcaggagcucagugauga

SEQ ID NO: 1624482 - RNA, 19 nt, Homo sapiens
  misc_RNA (1)...(19): siRNA sense strand
guggagcgcuaccgacagu

SEQ ID NO: 1624483 - RNA, 19 nt, Homo sapiens
  misc_RNA (1)...(19): siRNA sense strand
gaccaggaccaagaaguga

SEQ ID NO: 1624484 - RNA, 19 nt, Homo sapiens
  misc_RNA (1)...(19): siRNA sense strand
ggagcgcuaccgacaguuc

SEQ ID NO: 1624485 - RNA, 19 nt, Homo sapiens
  misc_RNA (1)...(19): siRNA sense strand
ucagugaugacuugcaugu

SEQ ID NO: 1624486 - RNA, 19 nt, Homo sapiens
  misc_RNA (1)...(19): siRNA sense strand
ggagcucagugaugacuug

SEQ ID NO: 1624487 - RNA, 19 nt, Homo sapiens
  misc_RNA (1)...(19): siRNA sense strand
ggaccaggaccaagaagug

SEQ ID NO: 1624488 - RNA, 19 nt, Homo sapiens
  misc_RNA (1)...(19): siRNA sense strand
gcucagugaugacuugcau

SEQ ID NO: 1624489 - RNA, 19 nt, Homo sapiens
  misc_RNA (1)...(19): siRNA sense strand
agcaggagcucagugauga

SEQ ID NO: 1624490 - RNA, 19 nt, Homo sapiens
  misc_RNA (1)...(19): siRNA sense strand
guggagcgcuaccgacagu

SEQ ID NO: 1624491 - RNA, 19 nt, Homo sapiens
  misc_RNA (1)...(19): siRNA sense strand
gaccaggaccaagaaguga

SEQ ID NO: 1624492 - RNA, 19 nt, Homo sapiens
  misc_RNA (1)...(19): siRNA sense strand
ggagcgcuaccgacaguuc

SEQ ID NO: 1624493 - RNA, 19 nt, Homo sapiens
  misc_RNA (1)...(19): siRNA sense strand
ucagugaugacuugcaugu

SEQ ID NO: 1624494 - RNA, 19 nt, Homo sapiens
  misc_RNA (1)...(19): siRNA sense strand
ggagcucagugaugacuug

SEQ ID NO: 1624495 - RNA, 19 nt, Homo sapiens
  misc_RNA (1)...(19): siRNA sense strand
ggaccaggaccaagaagug

SEQ ID NO: 1624496 - RNA, 19 nt, Homo sapiens
  misc_RNA (1)...(19): siRNA sense strand
gcucagugaugacuugcau

SEQ ID NO: 1624497 - RNA, 19 nt, Homo sapiens
  misc_RNA (1)...(19): siRNA sense strand
agcaggagcucagugauga

SEQ ID NO: 1624498 - RNA, 19 nt, Homo sapiens
  misc_RNA (1)...(19): siRNA sense strand
guggagcgcuaccgacagu

SEQ ID NO: 1624499 - RNA, 19 nt, Homo sapiens
  misc_RNA (1)...(19): siRNA sense strand
gaccaggaccaagaaguga

SEQ ID NO: 1624500 - RNA, 19 nt, Homo sapiens
  misc_RNA (1)...(19): siRNA sense strand
ggagcgcuaccgacaguuc

SEQ ID NO: 1624501 - RNA, 19 nt, Homo sapiens
  misc_RNA (1)...(19): siRNA sense strand
ucagugaugacuugcaugu

SEQ ID NO: 1624502 - RNA, 19 nt, Homo sapiens
  misc_RNA (1)...(19): siRNA sense strand
ggagcucagugaugacuug

SEQ ID NO: 1624503 - RNA, 19 nt, Homo sapiens
  misc_RNA (1)...(19): siRNA sense strand
ggaccaggaccaagaagug

SEQ ID NO: 1624504 - RNA, 19 nt, Homo sapiens
  misc_RNA (1)...(19): siRNA sense strand
gcucagugaugacuugcau

SEQ ID NO: 1624505 - RNA, 19 nt, Homo sapiens
  misc_RNA (1)...(19): siRNA sense strand
agcaggagcucagugauga

SEQ ID NO: 1624506 - RNA, 19 nt, Homo sapiens
  misc_RNA (1)...(19): siRNA sense strand
guggagcgcuaccgacagu

SEQ ID NO: 1624507 - RNA, 19 nt, Homo sapiens
  misc_RNA (1)...(19): siRNA sense strand
gaccaggaccaagaaguga

SEQ ID NO: 1624508 - RNA, 19 nt, Homo sapiens
  misc_RNA (1)...(19): siRNA sense strand
ggagcgcuaccgacaguuc

SEQ ID NO: 1624509 - RNA, 19 nt, Homo sapiens
  misc_RNA (1)...(19): siRNA sense strand
ucagugaugacuugcaugu

SEQ ID NO: 1624510 - RNA, 19 nt, Homo sapiens
  misc_RNA (1)...(19): siRNA sense strand
ggagcucagugaugacuug

SEQ ID NO: 1624511 - RNA, 19 nt, Homo sapiens
  misc_RNA (1)...(19): siRNA sense strand
ggaccaggaccaagaagug

SEQ ID NO: 1624512 - RNA, 19 nt, Homo sapiens
  misc_RNA (1)...(19): siRNA sense strand
gcucagugaugacuugcau

SEQ ID NO: 1624513 - RNA, 19 nt, Homo sapiens
  misc_RNA (1)...(19): siRNA sense strand
agcaggagcucagugauga

SEQ ID NO: 1624514 - RNA, 19 nt, Homo sapiens
  misc_RNA (1)...(19): siRNA sense strand
guggagcgcuaccgacagu

SEQ ID NO: 1624515 - RNA, 19 nt, Homo sapiens
  misc_RNA (1)...(19): siRNA sense strand
gaccaggaccaagaaguga

SEQ ID NO: 1624516 - RNA, 19 nt, Homo sapiens
  misc_RNA (1)...(19): siRNA sense strand
ggagcgcuaccgacaguuc

SEQ ID NO: 1624517 - RNA, 19 nt, Homo sapiens
  misc_RNA (1)...(19): siRNA sense strand
ucagugaugacuugcaugu

SEQ ID NO: 1624518 - RNA, 19 nt, Homo sapiens
  misc_RNA (1)...(19): siRNA sense strand
ggagcucagugaugacuug

SEQ ID NO: 1624519 - RNA, 19 nt, Homo sapiens
  misc_RNA (1)...(19): siRNA sense strand
ggaccaggaccaagaagug

SEQ ID NO: 1624520 - RNA, 19 nt, Homo sapiens
  misc_RNA (1)...(19): siRNA sense strand
gcucagugaugacuugcau

SEQ ID NO: 1624521 - RNA, 19 nt, Homo sapiens
  misc_RNA (1)...(19): siRNA sense strand
agcaggagcucagugauga

SEQ ID NO: 1624522 - RNA, 19 nt, Homo sapiens
  misc_RNA (1)...(19): siRNA sense strand
guggagcgcuaccgacagu

SEQ ID NO: 1624523 - RNA, 19 nt, Homo sapiens
  misc_RNA (1)...(19): siRNA sense strand
gaccaggaccaagaaguga

SEQ ID NO: 1624524 - RNA, 19 nt, Homo sapiens
  misc_RNA (1)...(19): siRNA sense strand
ggagcgcuaccgacaguuc

SEQ ID NO: 1624525 - RNA, 19 nt, Homo sapiens
  misc_RNA (1)...(19): siRNA sense strand
ucagugaugacuugcaugu

SEQ ID NO: 1624526 - RNA, 19 nt, Homo sapiens
  misc_RNA (1)...(19): siRNA sense strand
ggagcucagugaugacuug

SEQ ID NO: 1624527 - RNA, 19 nt, Homo sapiens
  misc_RNA (1)...(19): siRNA sense strand
ggaccaggaccaagaagug

SEQ ID NO: 1624528 - RNA, 19 nt, Homo sapiens
  misc_RNA (1)...(19): siRNA sense strand
gcucagugaugacuugcau

SEQ ID NO: 1624529 - RNA, 19 nt, Homo sapiens
  misc_RNA (1)...(19): siRNA sense strand
agcaggagcucagugauga

SEQ ID NO: 1624530 - RNA, 19 nt, Homo sapiens
  misc_RNA (1)...(19): siRNA sense strand
guggagcgcuaccgacagu

SEQ ID NO: 1624531 - RNA, 19 nt, Homo sapiens
  misc_RNA (1)...(19): siRNA sense strand
gaccaggaccaagaaguga

SEQ ID NO: 1624532 - RNA, 19 nt, Homo sapiens
  misc_RNA (1)...(19): siRNA sense strand
ggagcgcuaccgacaguuc

SEQ ID NO: 1624533 - RNA, 19 nt, Homo sapiens
  misc_RNA (1)...(19): siRNA sense strand
ucagugaugacuugcaugu

SEQ ID NO: 1624534 - RNA, 19 nt, Homo sapiens
  misc_RNA (1)...(19): siRNA sense strand
ggagcucagugaugacuug

SEQ ID NO: 1624535 - RNA, 19 nt, Homo sapiens
  misc_RNA (1)...(19): siRNA sense strand
ggaccaggaccaagaagug

SEQ ID NO: 1624536 - RNA, 19 nt, Homo sapiens
  misc_RNA (1)...(19): siRNA sense strand
gcucagugaugacuugcau

SEQ ID NO: 1624537 - RNA, 19 nt, Homo sapiens
  misc_RNA (1)...(19): siRNA sense strand
agcaggagcucagugauga

SEQ ID NO: 1624538 - RNA, 19 nt, Homo sapiens
  misc_RNA (1)...(19): siRNA sense strand
guggagcgcuaccgacagu

SEQ ID NO: 1624539 - RNA, 19 nt, Homo sapiens
  misc_RNA (1)...(19): siRNA sense strand
gaccaggaccaagaaguga

SEQ ID NO: 1624540 - RNA, 19 nt, Homo sapiens
  misc_RNA (1)...(19): siRNA sense strand
ggagcgcuaccgacaguuc

SEQ ID NO: 1624541 - RNA, 19 nt, Homo sapiens
  misc_RNA (1)...(19): siRNA sense strand
ucagugaugacuugcaugu

SEQ ID NO: 1624542 - RNA, 19 nt, Homo sapiens
  misc_RNA (1)...(19): siRNA sense strand
ggaaugacucugacuuuga

SEQ ID NO: 1624543 - RNA, 19 nt, Homo sapiens
  misc_RNA (1)...(19): siRNA sense strand
gggaaugacucugacuuug

SEQ ID NO: 1624544 - RNA, 19 nt, Homo sapiens
  misc_RNA (1)...(19): siRNA sense strand
gaaugacucugacuuugag

SEQ ID NO: 1624545 - RNA, 19 nt, Homo sapiens
  misc_RNA (1)...(19): siRNA sense strand
guuaaaaccugcaaagcua

SEQ ID NO: 1624546 - RNA, 19 nt, Homo sapiens
  misc_RNA (1)...(19): siRNA sense strand
ccaaguccgugcuguuugu

SEQ ID NO: 1624547 - RNA, 19 nt, Homo sapiens
  misc_RNA (1)...(19): siRNA sense strand
ggaaacuuguaaccgauca

SEQ ID NO: 1624548 - RNA, 19 nt, Homo sapiens
  misc_RNA (1)...(19): siRNA sense strand
ucugagagauuugaauaga

SEQ ID NO: 1624549 - RNA, 19 nt, Homo sapiens
  misc_RNA (1)...(19): siRNA sense strand
ggaugaaagcaaucugaga

SEQ ID NO: 1624550 - RNA, 19 nt, Homo sapiens
  misc_RNA (1)...(19): siRNA sense strand
ggguaacauuugucgauca

SEQ ID NO: 1624551 - RNA, 19 nt, Homo sapiens
  misc_RNA (1)...(19): siRNA sense strand
gaacuacuugggagcuaug

SEQ ID NO: 1624552 - RNA, 19 nt, Homo sapiens
  misc_RNA (1)...(19): siRNA sense strand
cugagagauuugaauagaa

SEQ ID NO: 1624553 - RNA, 19 nt, Homo sapiens
  misc_RNA (1)...(19): siRNA sense strand
cugcaaagcuaaaauugaa

SEQ ID NO: 1624554 - RNA, 19 nt, Homo sapiens
  misc_RNA (1)...(19): siRNA sense strand
uugaagaucccuauuaugg

SEQ ID NO: 1624555 - RNA, 19 nt, Homo sapiens
  misc_RNA (1)...(19): siRNA sense strand
cagauuaccaaagaagauu

SEQ ID NO: 1624556 - RNA, 19 nt, Homo sapiens
  misc_RNA (1)...(19): siRNA sense strand
cagaagcaguuuucaggaa

SEQ ID NO: 1624557 - RNA, 19 nt, Homo sapiens
  misc_RNA (1)...(19): siRNA sense strand
uaccaaguccgugcuguuu

SEQ ID NO: 1624558 - RNA, 19 nt, Homo sapiens
  misc_RNA (1)...(19): siRNA sense strand
aagaagauuuugccacauu

SEQ ID NO: 1624559 - RNA, 19 nt, Homo sapiens
  misc_RNA (1)...(19): siRNA sense strand
ugaacuacuugggagcuau

SEQ ID NO: 1624560 - RNA, 19 nt, Homo sapiens
  misc_RNA (1)...(19): siRNA sense strand
aaacuuguaaccgaucaaa

SEQ ID NO: 1624561 - RNA, 19 nt, Homo sapiens
  misc_RNA (1)...(19): siRNA sense strand
ugggaaugacucugacuuu

SEQ ID NO: 1624562 - RNA, 19 nt, Homo sapiens
  misc_RNA (1)...(19): siRNA sense strand
ugggagcuaugauccacaa

SEQ ID NO: 1624563 - RNA, 19 nt, Homo sapiens
  misc_RNA (1)...(19): siRNA sense strand
gguaacauuugucgaucac

SEQ ID NO: 1624564 - RNA, 19 nt, Homo sapiens
  misc_RNA (1)...(19): siRNA sense strand
cggaacaggcuaccaaguc

SEQ ID NO: 1624565 - RNA, 19 nt, Homo sapiens
  misc_RNA (1)...(19): siRNA sense strand
ggaaugacucugacuuuga

SEQ ID NO: 1624566 - RNA, 19 nt, Homo sapiens
  misc_RNA (1)...(19): siRNA sense strand
gggaaugacucugacuuug

SEQ ID NO: 1624567 - RNA, 19 nt, Homo sapiens
  misc_RNA (1)...(19): siRNA sense strand
gaaugacucugacuuugag

SEQ ID NO: 1624568 - RNA, 19 nt, Homo sapiens
  misc_RNA (1)...(19): siRNA sense strand
guuaaaaccugcaaagcua

SEQ ID NO: 1624569 - RNA, 19 nt, Homo sapiens
  misc_RNA (1)...(19): siRNA sense strand
ccaaguccgugcuguuugu

SEQ ID NO: 1624570 - RNA, 19 nt, Homo sapiens
  misc_RNA (1)...(19): siRNA sense strand
ggaaacuuguaaccgauca

SEQ ID NO: 1624571 - RNA, 19 nt, Homo sapiens
  misc_RNA (1)...(19): siRNA sense strand
ucugagagauuugaauaga

SEQ ID NO: 1624572 - RNA, 19 nt, Homo sapiens
  misc_RNA (1)...(19): siRNA sense strand
ggaugaaagcaaucugaga

SEQ ID NO: 1624573 - RNA, 19 nt, Homo sapiens
  misc_RNA (1)...(19): siRNA sense strand
ggguaacauuugucgauca

SEQ ID NO: 1624574 - RNA, 19 nt, Homo sapiens
  misc_RNA (1)...(19): siRNA sense strand
gaacuacuugggagcuaug

SEQ ID NO: 1624575 - RNA, 19 nt, Homo sapiens
  misc_RNA (1)...(19): siRNA sense strand
cugagagauuugaauagaa

SEQ ID NO: 1624576 - RNA, 19 nt, Homo sapiens
  misc_RNA (1)...(19): siRNA sense strand
cugcaaagcuaaaauugaa

SEQ ID NO: 1624577 - RNA, 19 nt, Homo sapiens
  misc_RNA (1)...(19): siRNA sense strand
uugaagaucccuauuaugg

SEQ ID NO: 1624578 - RNA, 19 nt, Homo sapiens
  misc_RNA (1)...(19): siRNA sense strand
cagauuaccaaagaagauu

SEQ ID NO: 1624579 - RNA, 19 nt, Homo sapiens
  misc_RNA (1)...(19): siRNA sense strand
cagaagcaguuuucaggaa

SEQ ID NO: 1624580 - RNA, 19 nt, Homo sapiens
  misc_RNA (1)...(19): siRNA sense strand
uaccaaguccgugcuguuu

SEQ ID NO: 1624581 - RNA, 19 nt, Homo sapiens
  misc_RNA (1)...(19): siRNA sense strand
aagaagauuuugccacauu

SEQ ID NO: 1624582 - RNA, 19 nt, Homo sapiens
  misc_RNA (1)...(19): siRNA sense strand
ugaacuacuugggagcuau

SEQ ID NO: 1624583 - RNA, 19 nt, Homo sapiens
  misc_RNA (1)...(19): siRNA sense strand
aaacuuguaaccgaucaaa

SEQ ID NO: 1624584 - RNA, 19 nt, Homo sapiens
  misc_RNA (1)...(19): siRNA sense strand
ugggaaugacucugacuuu

SEQ ID NO: 1624585 - RNA, 19 nt, Homo sapiens
  misc_RNA (1)...(19): siRNA sense strand
ugggagcuaugauccacaa

SEQ ID NO: 1624586 - RNA, 19 nt, Homo sapiens
  misc_RNA (1)...(19): siRNA sense strand
gguaacauuugucgaucac

SEQ ID NO: 1624587 - RNA, 19 nt, Homo sapiens
  misc_RNA (1)...(19): siRNA sense strand
cggaacaggcuaccaaguc

SEQ ID NO: 1624588 - RNA, 19 nt, Homo sapiens
  misc_RNA (1)...(19): siRNA sense strand
ccaaguccgugcuguuugu

SEQ ID NO: 1624589 - RNA, 19 nt, Homo sapiens
  misc_RNA (1)...(19): siRNA sense strand
ggaaacuuguaaccgauca

SEQ ID NO: 1624590 - RNA, 19 nt, Homo sapiens
  misc_RNA (1)...(19): siRNA sense strand
ggguaacauuugucgauca

SEQ ID NO: 1624591 - RNA, 19 nt, Homo sapiens
  misc_RNA (1)...(19): siRNA sense strand
uaccaaguccgugcuguuu

SEQ ID NO: 1624592 - RNA, 19 nt, Homo sapiens
  misc_RNA (1)...(19): siRNA sense strand
cagaagcaguuuucaggaa

SEQ ID NO: 1624593 - RNA, 19 nt, Homo sapiens
  misc_RNA (1)...(19): siRNA sense strand
aaacuuguaaccgaucaaa

SEQ ID NO: 1624594 - RNA, 19 nt, Homo sapiens
  misc_RNA (1)...(19): siRNA sense strand
gguaacauuugucgaucac

SEQ ID NO: 1624595 - RNA, 19 nt, Homo sapiens
  misc_RNA (1)...(19): siRNA sense strand
cggaacaggcuaccaaguc

SEQ ID NO: 1624596 - RNA, 19 nt, Homo sapiens
  misc_RNA (1)...(19): siRNA sense strand
ggaguuaaguaugacauug

SEQ ID NO: 1624597 - RNA, 19 nt, Homo sapiens
  misc_RNA (1)...(19): siRNA sense strand
acaagaaggucugcauuga

SEQ ID NO: 1624598 - RNA, 19 nt, Homo sapiens
  misc_RNA (1)...(19): siRNA sense strand
aagaaggucugcauugaau

SEQ ID NO: 1624599 - RNA, 19 nt, Homo sapiens
  misc_RNA (1)...(19): siRNA sense strand
ucucucggguccucaauaa

SEQ ID NO: 1624600 - RNA, 19 nt, Homo sapiens
  misc_RNA (1)...(19): siRNA sense strand
caauaagcuuggaggaguu

SEQ ID NO: 1624601 - RNA, 19 nt, Homo sapiens
  misc_RNA (1)...(19): siRNA sense strand
caagaaggucugcauugaa

SEQ ID NO: 1624602 - RNA, 19 nt, Homo sapiens
  misc_RNA (1)...(19): siRNA sense strand
caacaagaaggucugcauu

SEQ ID NO: 1624603 - RNA, 19 nt, Homo sapiens
  misc_RNA (1)...(19): siRNA sense strand
acauugaccugcccaacaa

SEQ ID NO: 1624604 - RNA, 19 nt, Homo sapiens
  misc_RNA (1)...(19): siRNA sense strand
cgaguucucuguggacaug

SEQ ID NO: 1624605 - RNA, 19 nt, Homo sapiens
  misc_RNA (1)...(19): siRNA sense strand
gaguuaaguaugacauuga

SEQ ID NO: 1624606 - RNA, 19 nt, Homo sapiens
  misc_RNA (1)...(19): siRNA sense strand
uuggaggaguuaaguauga

SEQ ID NO: 1624607 - RNA, 19 nt, Homo sapiens
  misc_RNA (1)...(19): siRNA sense strand
gaaggucugcauugaaucu

SEQ ID NO: 1624608 - RNA, 19 nt, Homo sapiens
  misc_RNA (1)...(19): siRNA sense strand
gcuuggaggaguuaaguau

SEQ ID NO: 1624609 - RNA, 19 nt, Homo sapiens
  misc_RNA (1)...(19): siRNA sense strand
gacauugaccugcccaaca

SEQ ID NO: 1624610 - RNA, 19 nt, Homo sapiens
  misc_RNA (1)...(19): siRNA sense strand
gaagaaaacaggaaagacu

SEQ ID NO: 1624611 - RNA, 19 nt, Homo sapiens
  misc_RNA (1)...(19): siRNA sense strand
aaagacuguuuccuaccuu

SEQ ID NO: 1624612 - RNA, 19 nt, Homo sapiens
  misc_RNA (1)...(19): siRNA sense strand
aacaagaaggucugcauug

SEQ ID NO: 1624613 - RNA, 19 nt, Homo sapiens
  misc_RNA (1)...(19): siRNA sense strand
cgaagcacgaguucucugu

SEQ ID NO: 1624614 - RNA, 19 nt, Homo sapiens
  misc_RNA (1)...(19): siRNA sense strand
aauaagcuuggaggaguua

SEQ ID NO: 1624615 - RNA, 19 nt, Homo sapiens
  misc_RNA (1)...(19): siRNA sense strand
ccaacaagaaggucugcau

SEQ ID NO: 1624616 - RNA, 19 nt, Homo sapiens
  misc_RNA (1)...(19): siRNA sense strand
gcuugcaacccugaagaaa

SEQ ID NO: 1624617 - RNA, 19 nt, Homo sapiens
  misc_RNA (1)...(19): siRNA sense strand
ggaaauccgagacaaauua

SEQ ID NO: 1624618 - RNA, 19 nt, Homo sapiens
  misc_RNA (1)...(19): siRNA sense strand
gaaacaccgugccgucagu

SEQ ID NO: 1624619 - RNA, 19 nt, Homo sapiens
  misc_RNA (1)...(19): siRNA sense strand
gaaguaaauucgggaaagg

SEQ ID NO: 1624620 - RNA, 19 nt, Homo sapiens
  misc_RNA (1)...(19): siRNA sense strand
gagacaaauuacucaagga

SEQ ID NO: 1624621 - RNA, 19 nt, Homo sapiens
  misc_RNA (1)...(19): siRNA sense strand
ggaaggaggcagaggaaag

SEQ ID NO: 1624622 - RNA, 19 nt, Homo sapiens
  misc_RNA (1)...(19): siRNA sense strand
gagaagaaggccaaacaca

SEQ ID NO: 1624623 - RNA, 19 nt, Homo sapiens
  misc_RNA (1)...(19): siRNA sense strand
ucaaggacgcggucuguga

SEQ ID NO: 1624624 - RNA, 19 nt, Homo sapiens
  misc_RNA (1)...(19): siRNA sense strand
gaagaaaauugaggaauac

SEQ ID NO: 1624625 - RNA, 19 nt, Homo sapiens
  misc_RNA (1)...(19): siRNA sense strand
cgccugacguggagaagaa

SEQ ID NO: 1624626 - RNA, 19 nt, Homo sapiens
  misc_RNA (1)...(19): siRNA sense strand
gcgagaagaaggccaaaca

SEQ ID NO: 1624627 - RNA, 19 nt, Homo sapiens
  misc_RNA (1)...(19): siRNA sense strand
gggaaauccgagacaaauu

SEQ ID NO: 1624628 - RNA, 19 nt, Homo sapiens
  misc_RNA (1)...(19): siRNA sense strand
gaggaaggaggcagaggaa

SEQ ID NO: 1624629 - RNA, 19 nt, Homo sapiens
  misc_RNA (1)...(19): siRNA sense strand
gaaauccgagacaaauuac

SEQ ID NO: 1624630 - RNA, 19 nt, Homo sapiens
  misc_RNA (1)...(19): siRNA sense strand
cagaggaaagcgagaagaa

SEQ ID NO: 1624631 - RNA, 19 nt, Homo sapiens
  misc_RNA (1)...(19): siRNA sense strand
gagaaguaaauucgggaaa

SEQ ID NO: 1624632 - RNA, 19 nt, Homo sapiens
  misc_RNA (1)...(19): siRNA sense strand
agaaguaaauucgggaaag

SEQ ID NO: 1624633 - RNA, 19 nt, Homo sapiens
  misc_RNA (1)...(19): siRNA sense strand
gcugggaaauccgagacaa

SEQ ID NO: 1624634 - RNA, 19 nt, Homo sapiens
  misc_RNA (1)...(19): siRNA sense strand
ccacauccgccacaagauc

SEQ ID NO: 1624635 - RNA, 19 nt, Homo sapiens
  misc_RNA (1)...(19): siRNA sense strand
uaaauucgggaaaggugaa

SEQ ID NO: 1624636 - RNA, 19 nt, Homo sapiens
  misc_RNA (1)...(19): siRNA sense strand
gcagaggaaagcgagaaga

SEQ ID NO: 1624637 - RNA, 19 nt, Homo sapiens
  misc_RNA (1)...(19): siRNA sense strand
caaggacgcggucugugau

SEQ ID NO: 1624638 - RNA, 19 nt, Homo sapiens
  misc_RNA (1)...(19): siRNA sense strand
gaaggaggcagaggaaagc

SEQ ID NO: 1624639 - RNA, 19 nt, Homo sapiens
  misc_RNA (1)...(19): siRNA sense strand
gacgcggucugugaucgaa

SEQ ID NO: 1624640 - RNA, 19 nt, Homo sapiens
  misc_RNA (1)...(19): siRNA sense strand
caacgccugacguggagaa

SEQ ID NO: 1624641 - RNA, 19 nt, Homo sapiens
  misc_RNA (1)...(19): siRNA sense strand
aaccacauccgccacaaga

SEQ ID NO: 1624642 - RNA, 19 nt, Homo sapiens
  misc_RNA (1)...(19): siRNA sense strand
gccgcauccugagaaguaa

SEQ ID NO: 1624643 - RNA, 19 nt, Homo sapiens
  misc_RNA (1)...(19): siRNA sense strand
agccgcauccugagaagua

SEQ ID NO: 1624644 - RNA, 19 nt, Homo sapiens
  misc_RNA (1)...(19): siRNA sense strand
ggacgcggucugugaucga

SEQ ID NO: 1624645 - RNA, 19 nt, Homo sapiens
  misc_RNA (1)...(19): siRNA sense strand
ccaaccacauccgccacaa

SEQ ID NO: 1624646 - RNA, 19 nt, Homo sapiens
  misc_RNA (1)...(19): siRNA sense strand
ggaaauccgagacaaauua

SEQ ID NO: 1624647 - RNA, 19 nt, Homo sapiens
  misc_RNA (1)...(19): siRNA sense strand
gaaacaccgugccgucagu

SEQ ID NO: 1624648 - RNA, 19 nt, Homo sapiens
  misc_RNA (1)...(19): siRNA sense strand
gaaguaaauucgggaaagg

SEQ ID NO: 1624649 - RNA, 19 nt, Homo sapiens
  misc_RNA (1)...(19): siRNA sense strand
gagacaaauuacucaagga

SEQ ID NO: 1624650 - RNA, 19 nt, Homo sapiens
  misc_RNA (1)...(19): siRNA sense strand
ggaaggaggcagaggaaag

SEQ ID NO: 1624651 - RNA, 19 nt, Homo sapiens
  misc_RNA (1)...(19): siRNA sense strand
gagaagaaggccaaacaca

SEQ ID NO: 1624652 - RNA, 19 nt, Homo sapiens
  misc_RNA (1)...(19): siRNA sense strand
ucaaggacgcggucuguga

SEQ ID NO: 1624653 - RNA, 19 nt, Homo sapiens
  misc_RNA (1)...(19): siRNA sense strand
gaagaaaauugaggaauac

SEQ ID NO: 1624654 - RNA, 19 nt, Homo sapiens
  misc_RNA (1)...(19): siRNA sense strand
cgccugacguggagaagaa

SEQ ID NO: 1624655 - RNA, 19 nt, Homo sapiens
  misc_RNA (1)...(19): siRNA sense strand
gcgagaagaaggccaaaca

SEQ ID NO: 1624656 - RNA, 19 nt, Homo sapiens
  misc_RNA (1)...(19): siRNA sense strand
gggaaauccgagacaaauu

SEQ ID NO: 1624657 - RNA, 19 nt, Homo sapiens
  misc_RNA (1)...(19): siRNA sense strand
gaggaaggaggcagaggaa

SEQ ID NO: 1624658 - RNA, 19 nt, Homo sapiens
  misc_RNA (1)...(19): siRNA sense strand
gaaauccgagacaaauuac

SEQ ID NO: 1624659 - RNA, 19 nt, Homo sapiens
  misc_RNA (1)...(19): siRNA sense strand
cagaggaaagcgagaagaa

SEQ ID NO: 1624660 - RNA, 19 nt, Homo sapiens
  misc_RNA (1)...(19): siRNA sense strand
gagaaguaaauucgggaaa

SEQ ID NO: 1624661 - RNA, 19 nt, Homo sapiens
  misc_RNA (1)...(19): siRNA sense strand
agaaguaaauucgggaaag

SEQ ID NO: 1624662 - RNA, 19 nt, Homo sapiens
  misc_RNA (1)...(19): siRNA sense strand
gcugggaaauccgagacaa

SEQ ID NO: 1624663 - RNA, 19 nt, Homo sapiens
  misc_RNA (1)...(19): siRNA sense strand
ccacauccgccacaagauc

SEQ ID NO: 1624664 - RNA, 19 nt, Homo sapiens
  misc_RNA (1)...(19): siRNA sense strand
uaaauucgggaaaggugaa

SEQ ID NO: 1624665 - RNA, 19 nt, Homo sapiens
  misc_RNA (1)...(19): siRNA sense strand
gcagaggaaagcgagaaga

SEQ ID NO: 1624666 - RNA, 19 nt, Homo sapiens
  misc_RNA (1)...(19): siRNA sense strand
caaggacgcggucugugau

SEQ ID NO: 1624667 - RNA, 19 nt, Homo sapiens
  misc_RNA (1)...(19): siRNA sense strand
gaaggaggcagaggaaagc

SEQ ID NO: 1624668 - RNA, 19 nt, Homo sapiens
  misc_RNA (1)...(19): siRNA sense strand
gacgcggucugugaucgaa

SEQ ID NO: 1624669 - RNA, 19 nt, Homo sapiens
  misc_RNA (1)...(19): siRNA sense strand
caacgccugacguggagaa

SEQ ID NO: 1624670 - RNA, 19 nt, Homo sapiens
  misc_RNA (1)...(19): siRNA sense strand
aaccacauccgccacaaga

SEQ ID NO: 1624671 - RNA, 19 nt, Homo sapiens
  misc_RNA (1)...(19): siRNA sense strand
gccgcauccugagaaguaa

SEQ ID NO: 1624672 - RNA, 19 nt, Homo sapiens
  misc_RNA (1)...(19): siRNA sense strand
agccgcauccugagaagua

SEQ ID NO: 1624673 - RNA, 19 nt, Homo sapiens
  misc_RNA (1)...(19): siRNA sense strand
ggacgcggucugugaucga

SEQ ID NO: 1624674 - RNA, 19 nt, Homo sapiens
  misc_RNA (1)...(19): siRNA sense strand
ccaaccacauccgccacaa

SEQ ID NO: 1624675 - RNA, 19 nt, Homo sapiens
  misc_RNA (1)...(19): siRNA sense strand
ggaaauccgagacaaauua

SEQ ID NO: 1624676 - RNA, 19 nt, Homo sapiens
  misc_RNA (1)...(19): siRNA sense strand
gaaacaccgugccgucagu

SEQ ID NO: 1624677 - RNA, 19 nt, Homo sapiens
  misc_RNA (1)...(19): siRNA sense strand
gaaguaaauucgggaaagg

SEQ ID NO: 1624678 - RNA, 19 nt, Homo sapiens
  misc_RNA (1)...(19): siRNA sense strand
gagacaaauuacucaagga

SEQ ID NO: 1624679 - RNA, 19 nt, Homo sapiens
  misc_RNA (1)...(19): siRNA sense strand
ggaaggaggcagaggaaag

SEQ ID NO: 1624680 - RNA, 19 nt, Homo sapiens
  misc_RNA (1)...(19): siRNA sense strand
gagaagaaggccaaacaca

SEQ ID NO: 1624681 - RNA, 19 nt, Homo sapiens
  misc_RNA (1)...(19): siRNA sense strand
ucaaggacgcggucuguga

SEQ ID NO: 1624682 - RNA, 19 nt, Homo sapiens
  misc_RNA (1)...(19): siRNA sense strand
gaagaaaauugaggaauac

SEQ ID NO: 1624683 - RNA, 19 nt, Homo sapiens
  misc_RNA (1)...(19): siRNA sense strand
cgccugacguggagaagaa

SEQ ID NO: 1624684 - RNA, 19 nt, Homo sapiens
  misc_RNA (1)...(19): siRNA sense strand
gcgagaagaaggccaaaca

SEQ ID NO: 1624685 - RNA, 19 nt, Homo sapiens
  misc_RNA (1)...(19): siRNA sense strand
gggaaauccgagacaaauu

SEQ ID NO: 1624686 - RNA, 19 nt, Homo sapiens
  misc_RNA (1)...(19): siRNA sense strand
gaggaaggaggcagaggaa

SEQ ID NO: 1624687 - RNA, 19 nt, Homo sapiens
  misc_RNA (1)...(19): siRNA sense strand
gaaauccgagacaaauuac

SEQ ID NO: 1624688 - RNA, 19 nt, Homo sapiens
  misc_RNA (1)...(19): siRNA sense strand
cagaggaaagcgagaagaa

SEQ ID NO: 1624689 - RNA, 19 nt, Homo sapiens
  misc_RNA (1)...(19): siRNA sense strand
gagaaguaaauucgggaaa

SEQ ID NO: 1624690 - RNA, 19 nt, Homo sapiens
  misc_RNA (1)...(19): siRNA sense strand
agaaguaaauucgggaaag

SEQ ID NO: 1624691 - RNA, 19 nt, Homo sapiens
  misc_RNA (1)...(19): siRNA sense strand
gcugggaaauccgagacaa

SEQ ID NO: 1624692 - RNA, 19 nt, Homo sapiens
  misc_RNA (1)...(19): siRNA sense strand
ccacauccgccacaagauc

SEQ ID NO: 1624693 - RNA, 19 nt, Homo sapiens
  misc_RNA (1)...(19): siRNA sense strand
uaaauucgggaaaggugaa

SEQ ID NO: 1624694 - RNA, 19 nt, Homo sapiens
  misc_RNA (1)...(19): siRNA sense strand
gcagaggaaagcgagaaga

SEQ ID NO: 1624695 - RNA, 19 nt, Homo sapiens
  misc_RNA (1)...(19): siRNA sense strand
caaggacgcggucugugau

SEQ ID NO: 1624696 - RNA, 19 nt, Homo sapiens
  misc_RNA (1)...(19): siRNA sense strand
gaaggaggcagaggaaagc

SEQ ID NO: 1624697 - RNA, 19 nt, Homo sapiens
  misc_RNA (1)...(19): siRNA sense strand
gacgcggucugugaucgaa

SEQ ID NO: 1624698 - RNA, 19 nt, Homo sapiens
  misc_RNA (1)...(19): siRNA sense strand
caacgccugacguggagaa

SEQ ID NO: 1624699 - RNA, 19 nt, Homo sapiens
  misc_RNA (1)...(19): siRNA sense strand
aaccacauccgccacaaga

SEQ ID NO: 1624700 - RNA, 19 nt, Homo sapiens
  misc_RNA (1)...(19): siRNA sense strand
gccgcauccugagaaguaa

SEQ ID NO: 1624701 - RNA, 19 nt, Homo sapiens
  misc_RNA (1)...(19): siRNA sense strand
agccgcauccugagaagua

SEQ ID NO: 1624702 - RNA, 19 nt, Homo sapiens
  misc_RNA (1)...(19): siRNA sense strand
ggacgcggucugugaucga

SEQ ID NO: 1624703 - RNA, 19 nt, Homo sapiens
  misc_RNA (1)...(19): siRNA sense strand
ccaaccacauccgccacaa

SEQ ID NO: 1624704 - RNA, 19 nt, Homo sapiens
  misc_RNA (1)...(19): siRNA sense strand
ggaaauccgagacaaauua

SEQ ID NO: 1624705 - RNA, 19 nt, Homo sapiens
  misc_RNA (1)...(19): siRNA sense strand
gaaacaccgugccgucagu

SEQ ID NO: 1624706 - RNA, 19 nt, Homo sapiens
  misc_RNA (1)...(19): siRNA sense strand
gaaguaaauucgggaaagg

SEQ ID NO: 1624707 - RNA, 19 nt, Homo sapiens
  misc_RNA (1)...(19): siRNA sense strand
gagacaaauuacucaagga

SEQ ID NO: 1624708 - RNA, 19 nt, Homo sapiens
  misc_RNA (1)...(19): siRNA sense strand
ggaaggaggcagaggaaag

SEQ ID NO: 1624709 - RNA, 19 nt, Homo sapiens
  misc_RNA (1)...(19): siRNA sense strand
gagaagaaggccaaacaca

SEQ ID NO: 1624710 - RNA, 19 nt, Homo sapiens
  misc_RNA (1)...(19): siRNA sense strand
ucaaggacgcggucuguga

SEQ ID NO: 1624711 - RNA, 19 nt, Homo sapiens
  misc_RNA (1)...(19): siRNA sense strand
gaagaaaauugaggaauac

SEQ ID NO: 1624712 - RNA, 19 nt, Homo sapiens
  misc_RNA (1)...(19): siRNA sense strand
cgccugacguggagaagaa

SEQ ID NO: 1624713 - RNA, 19 nt, Homo sapiens
  misc_RNA (1)...(19): siRNA sense strand
gcgagaagaaggccaaaca

SEQ ID NO: 1624714 - RNA, 19 nt, Homo sapiens
  misc_RNA (1)...(19): siRNA sense strand
gggaaauccgagacaaauu

SEQ ID NO: 1624715 - RNA, 19 nt, Homo sapiens
  misc_RNA (1)...(19): siRNA sense strand
gaggaaggaggcagaggaa

SEQ ID NO: 1624716 - RNA, 19 nt, Homo sapiens
  misc_RNA (1)...(19): siRNA sense strand
gaaauccgagacaaauuac

SEQ ID NO: 1624717 - RNA, 19 nt, Homo sapiens
  misc_RNA (1)...(19): siRNA sense strand
cagaggaaagcgagaagaa

SEQ ID NO: 1624718 - RNA, 19 nt, Homo sapiens
  misc_RNA (1)...(19): siRNA sense strand
gagaaguaaauucgggaaa

SEQ ID NO: 1624719 - RNA, 19 nt, Homo sapiens
  misc_RNA (1)...(19): siRNA sense strand
agaaguaaauucgggaaag

SEQ ID NO: 1624720 - RNA, 19 nt, Homo sapiens
  misc_RNA (1)...(19): siRNA sense strand
gcugggaaauccgagacaa

SEQ ID NO: 1624721 - RNA, 19 nt, Homo sapiens
  misc_RNA (1)...(19): siRNA sense strand
ccacauccgccacaagauc

SEQ ID NO: 1624722 - RNA, 19 nt, Homo sapiens
  misc_RNA (1)...(19): siRNA sense strand
uaaauucgggaaaggugaa

SEQ ID NO: 1624723 - RNA, 19 nt, Homo sapiens
  misc_RNA (1)...(19): siRNA sense strand
gcagaggaaagcgagaaga

SEQ ID NO: 1624724 - RNA, 19 nt, Homo sapiens
  misc_RNA (1)...(19): siRNA sense strand
caaggacgcggucugugau

SEQ ID NO: 1624725 - RNA, 19 nt, Homo sapiens
  misc_RNA (1)...(19): siRNA sense strand
gaaggaggcagaggaaagc

SEQ ID NO: 1624726 - RNA, 19 nt, Homo sapiens
  misc_RNA (1)...(19): siRNA sense strand
gacgcggucugugaucgaa

SEQ ID NO: 1624727 - RNA, 19 nt, Homo sapiens
  misc_RNA (1)...(19): siRNA sense strand
caacgccugacguggagaa

SEQ ID NO: 1624728 - RNA, 19 nt, Homo sapiens
  misc_RNA (1)...(19): siRNA sense strand
aaccacauccgccacaaga

SEQ ID NO: 1624729 - RNA, 19 nt, Homo sapiens
  misc_RNA (1)...(19): siRNA sense strand
gccgcauccugagaaguaa

SEQ ID NO: 1624730 - RNA, 19 nt, Homo sapiens
  misc_RNA (1)...(19): siRNA sense strand
agccgcauccugagaagua

SEQ ID NO: 1624731 - RNA, 19 nt, Homo sapiens
  misc_RNA (1)...(19): siRNA sense strand
ggacgcggucugugaucga

SEQ ID NO: 1624732 - RNA, 19 nt, Homo sapiens
  misc_RNA (1)...(19): siRNA sense strand
ccaaccacauccgccacaa

SEQ ID NO: 1624733 - RNA, 19 nt, Homo sapiens
  misc_RNA (1)...(19): siRNA sense strand
ggaaauccgagacaaauua

SEQ ID NO: 1624734 - RNA, 19 nt, Homo sapiens
  misc_RNA (1)...(19): siRNA sense strand
gaaacaccgugccgucagu

SEQ ID NO: 1624735 - RNA, 19 nt, Homo sapiens
  misc_RNA (1)...(19): siRNA sense strand
gaaguaaauucgggaaagg

SEQ ID NO: 1624736 - RNA, 19 nt, Homo sapiens
  misc_RNA (1)...(19): siRNA sense strand
gagacaaauuacucaagga

SEQ ID NO: 1624737 - RNA, 19 nt, Homo sapiens
  misc_RNA (1)...(19): siRNA sense strand
ggaaggaggcagaggaaag

SEQ ID NO: 1624738 - RNA, 19 nt, Homo sapiens
  misc_RNA (1)...(19): siRNA sense strand
gagaagaaggccaaacaca

SEQ ID NO: 1624739 - RNA, 19 nt, Homo sapiens
  misc_RNA (1)...(19): siRNA sense strand
ucaaggacgcggucuguga

SEQ ID NO: 1624740 - RNA, 19 nt, Homo sapiens
  misc_RNA (1)...(19): siRNA sense strand
gaagaaaauugaggaauac

SEQ ID NO: 1624741 - RNA, 19 nt, Homo sapiens
  misc_RNA (1)...(19): siRNA sense strand
cgccugacguggagaagaa

SEQ ID NO: 1624742 - RNA, 19 nt, Homo sapiens
  misc_RNA (1)...(19): siRNA sense strand
gcgagaagaaggccaaaca

SEQ ID NO: 1624743 - RNA, 19 nt, Homo sapiens
  misc_RNA (1)...(19): siRNA sense strand
gggaaauccgagacaaauu

SEQ ID NO: 1624744 - RNA, 19 nt, Homo sapiens
  misc_RNA (1)...(19): siRNA sense strand
gaggaaggaggcagaggaa

SEQ ID NO: 1624745 - RNA, 19 nt, Homo sapiens
  misc_RNA (1)...(19): siRNA sense strand
gaaauccgagacaaauuac

SEQ ID NO: 1624746 - RNA, 19 nt, Homo sapiens
  misc_RNA (1)...(19): siRNA sense strand
cagaggaaagcgagaagaa

SEQ ID NO: 1624747 - RNA, 19 nt, Homo sapiens
  misc_RNA (1)...(19): siRNA sense strand
gagaaguaaauucgggaaa

SEQ ID NO: 1624748 - RNA, 19 nt, Homo sapiens
  misc_RNA (1)...(19): siRNA sense strand
agaaguaaauucgggaaag

SEQ ID NO: 1624749 - RNA, 19 nt, Homo sapiens
  misc_RNA (1)...(19): siRNA sense strand
gcugggaaauccgagacaa

SEQ ID NO: 1624750 - RNA, 19 nt, Homo sapiens
  misc_RNA (1)...(19): siRNA sense strand
ccacauccgccacaagauc

SEQ ID NO: 1624751 - RNA, 19 nt, Homo sapiens
  misc_RNA (1)...(19): siRNA sense strand
uaaauucgggaaaggugaa

SEQ ID NO: 1624752 - RNA, 19 nt, Homo sapiens
  misc_RNA (1)...(19): siRNA sense strand
gcagaggaaagcgagaaga

SEQ ID NO: 1624753 - RNA, 19 nt, Homo sapiens
  misc_RNA (1)...(19): siRNA sense strand
caaggacgcggucugugau

SEQ ID NO: 1624754 - RNA, 19 nt, Homo sapiens
  misc_RNA (1)...(19): siRNA sense strand
gaaggaggcagaggaaagc

SEQ ID NO: 1624755 - RNA, 19 nt, Homo sapiens
  misc_RNA (1)...(19): siRNA sense strand
gacgcggucugugaucgaa

SEQ ID NO: 1624756 - RNA, 19 nt, Homo sapiens
  misc_RNA (1)...(19): siRNA sense strand
caacgccugacguggagaa

SEQ ID NO: 1624757 - RNA, 19 nt, Homo sapiens
  misc_RNA (1)...(19): siRNA sense strand
aaccacauccgccacaaga

SEQ ID NO: 1624758 - RNA, 19 nt, Homo sapiens
  misc_RNA (1)...(19): siRNA sense strand
gccgcauccugagaaguaa

SEQ ID NO: 1624759 - RNA, 19 nt, Homo sapiens
  misc_RNA (1)...(19): siRNA sense strand
agccgcauccugagaagua

SEQ ID NO: 1624760 - RNA, 19 nt, Homo sapiens
  misc_RNA (1)...(19): siRNA sense strand
ggacgcggucugugaucga

SEQ ID NO: 1624761 - RNA, 19 nt, Homo sapiens
  misc_RNA (1)...(19): siRNA sense strand
ccaaccacauccgccacaa

SEQ ID NO: 1624762 - RNA, 19 nt, Homo sapiens
  misc_RNA (1)...(19): siRNA sense strand
ggaaauccgagacaaauua

SEQ ID NO: 1624763 - RNA, 19 nt, Homo sapiens
  misc_RNA (1)...(19): siRNA sense strand
gaaacaccgugccgucagu

SEQ ID NO: 1624764 - RNA, 19 nt, Homo sapiens
  misc_RNA (1)...(19): siRNA sense strand
gaaguaaauucgggaaagg

SEQ ID NO: 1624765 - RNA, 19 nt, Homo sapiens
  misc_RNA (1)...(19): siRNA sense strand
gagacaaauuacucaagga

SEQ ID NO: 1624766 - RNA, 19 nt, Homo sapiens
  misc_RNA (1)...(19): siRNA sense strand
ggaaggaggcagaggaaag

SEQ ID NO: 1624767 - RNA, 19 nt, Homo sapiens
  misc_RNA (1)...(19): siRNA sense strand
gagaagaaggccaaacaca

SEQ ID NO: 1624768 - RNA, 19 nt, Homo sapiens
  misc_RNA (1)...(19): siRNA sense strand
ucaaggacgcggucuguga

SEQ ID NO: 1624769 - RNA, 19 nt, Homo sapiens
  misc_RNA (1)...(19): siRNA sense strand
gaagaaaauugaggaauac

SEQ ID NO: 1624770 - RNA, 19 nt, Homo sapiens
  misc_RNA (1)...(19): siRNA sense strand
cgccugacguggagaagaa

SEQ ID NO: 1624771 - RNA, 19 nt, Homo sapiens
  misc_RNA (1)...(19): siRNA sense strand
gcgagaagaaggccaaaca

SEQ ID NO: 1624772 - RNA, 19 nt, Homo sapiens
  misc_RNA (1)...(19): siRNA sense strand
gggaaauccgagacaaauu

SEQ ID NO: 1624773 - RNA, 19 nt, Homo sapiens
  misc_RNA (1)...(19): siRNA sense strand
gaggaaggaggcagaggaa

SEQ ID NO: 1624774 - RNA, 19 nt, Homo sapiens
  misc_RNA (1)...(19): siRNA sense strand
gaaauccgagacaaauuac

SEQ ID NO: 1624775 - RNA, 19 nt, Homo sapiens
  misc_RNA (1)...(19): siRNA sense strand
cagaggaaagcgagaagaa

SEQ ID NO: 1624776 - RNA, 19 nt, Homo sapiens
  misc_RNA (1)...(19): siRNA sense strand
gagaaguaaauucgggaaa

SEQ ID NO: 1624777 - RNA, 19 nt, Homo sapiens
  misc_RNA (1)...(19): siRNA sense strand
agaaguaaauucgggaaag

SEQ ID NO: 1624778 - RNA, 19 nt, Homo sapiens
  misc_RNA (1)...(19): siRNA sense strand
gcugggaaauccgagacaa

SEQ ID NO: 1624779 - RNA, 19 nt, Homo sapiens
  misc_RNA (1)...(19): siRNA sense strand
ccacauccgccacaagauc

SEQ ID NO: 1624780 - RNA, 19 nt, Homo sapiens
  misc_RNA (1)...(19): siRNA sense strand
uaaauucgggaaaggugaa

SEQ ID NO: 1624781 - RNA, 19 nt, Homo sapiens
  misc_RNA (1)...(19): siRNA sense strand
gcagaggaaagcgagaaga

SEQ ID NO: 1624782 - RNA, 19 nt, Homo sapiens
  misc_RNA (1)...(19): siRNA sense strand
caaggacgcggucugugau

SEQ ID NO: 1624783 - RNA, 19 nt, Homo sapiens
  misc_RNA (1)...(19): siRNA sense strand
gaaggaggcagaggaaagc

SEQ ID NO: 1624784 - RNA, 19 nt, Homo sapiens
  misc_RNA (1)...(19): siRNA sense strand
gacgcggucugugaucgaa

SEQ ID NO: 1624785 - RNA, 19 nt, Homo sapiens
  misc_RNA (1)...(19): siRNA sense strand
caacgccugacguggagaa

SEQ ID NO: 1624786 - RNA, 19 nt, Homo sapiens
  misc_RNA (1)...(19): siRNA sense strand
aaccacauccgccacaaga

SEQ ID NO: 1624787 - RNA, 19 nt, Homo sapiens
  misc_RNA (1)...(19): siRNA sense strand
gccgcauccugagaaguaa

SEQ ID NO: 1624788 - RNA, 19 nt, Homo sapiens
  misc_RNA (1)...(19): siRNA sense strand
agccgcauccugagaagua

SEQ ID NO: 1624789 - RNA, 19 nt, Homo sapiens
  misc_RNA (1)...(19): siRNA sense strand
ggacgcggucugugaucga

SEQ ID NO: 1624790 - RNA, 19 nt, Homo sapiens
  misc_RNA (1)...(19): siRNA sense strand
ccaaccacauccgccacaa

SEQ ID NO: 1624791 - RNA, 19 nt, Homo sapiens
  misc_RNA (1)...(19): siRNA sense strand
ggaaauccgagacaaauua

SEQ ID NO: 1624792 - RNA, 19 nt, Homo sapiens
  misc_RNA (1)...(19): siRNA sense strand
gaaacaccgugccgucagu

SEQ ID NO: 1624793 - RNA, 19 nt, Homo sapiens
  misc_RNA (1)...(19): siRNA sense strand
gaaguaaauucgggaaagg

SEQ ID NO: 1624794 - RNA, 19 nt, Homo sapiens
  misc_RNA (1)...(19): siRNA sense strand
gagacaaauuacucaagga

SEQ ID NO: 1624795 - RNA, 19 nt, Homo sapiens
  misc_RNA (1)...(19): siRNA sense strand
ggaaggaggcagaggaaag

SEQ ID NO: 1624796 - RNA, 19 nt, Homo sapiens
  misc_RNA (1)...(19): siRNA sense strand
gagaagaaggccaaacaca

SEQ ID NO: 1624797 - RNA, 19 nt, Homo sapiens
  misc_RNA (1)...(19): siRNA sense strand
ucaaggacgcggucuguga

SEQ ID NO: 1624798 - RNA, 19 nt, Homo sapiens
  misc_RNA (1)...(19): siRNA sense strand
gaagaaaauugaggaauac

SEQ ID NO: 1624799 - RNA, 19 nt, Homo sapiens
  misc_RNA (1)...(19): siRNA sense strand
cgccugacguggagaagaa

SEQ ID NO: 1624800 - RNA, 19 nt, Homo sapiens
  misc_RNA (1)...(19): siRNA sense strand
gcgagaagaaggccaaaca

SEQ ID NO: 1624801 - RNA, 19 nt, Homo sapiens
  misc_RNA (1)...(19): siRNA sense strand
gggaaauccgagacaaauu

SEQ ID NO: 1624802 - RNA, 19 nt, Homo sapiens
  misc_RNA (1)...(19): siRNA sense strand
gaggaaggaggcagaggaa

SEQ ID NO: 1624803 - RNA, 19 nt, Homo sapiens
  misc_RNA (1)...(19): siRNA sense strand
gaaauccgagacaaauuac

SEQ ID NO: 1624804 - RNA, 19 nt, Homo sapiens
  misc_RNA (1)...(19): siRNA sense strand
cagaggaaagcgagaagaa

SEQ ID NO: 1624805 - RNA, 19 nt, Homo sapiens
  misc_RNA (1)...(19): siRNA sense strand
gagaaguaaauucgggaaa

SEQ ID NO: 1624806 - RNA, 19 nt, Homo sapiens
  misc_RNA (1)...(19): siRNA sense strand
agaaguaaauucgggaaag

SEQ ID NO: 1624807 - RNA, 19 nt, Homo sapiens
  misc_RNA (1)...(19): siRNA sense strand
gcugggaaauccgagacaa

SEQ ID NO: 1624808 - RNA, 19 nt, Homo sapiens
  misc_RNA (1)...(19): siRNA sense strand
ccacauccgccacaagauc

SEQ ID NO: 1624809 - RNA, 19 nt, Homo sapiens
  misc_RNA (1)...(19): siRNA sense strand
uaaauucgggaaaggugaa

SEQ ID NO: 1624810 - RNA, 19 nt, Homo sapiens
  misc_RNA (1)...(19): siRNA sense strand
gcagaggaaagcgagaaga

SEQ ID NO: 1624811 - RNA, 19 nt, Homo sapiens
  misc_RNA (1)...(19): siRNA sense strand
caaggacgcggucugugau

SEQ ID NO: 1624812 - RNA, 19 nt, Homo sapiens
  misc_RNA (1)...(19): siRNA sense strand
gaaggaggcagaggaaagc

SEQ ID NO: 1624813 - RNA, 19 nt, Homo sapiens
  misc_RNA (1)...(19): siRNA sense strand
gacgcggucugugaucgaa

SEQ ID NO: 1624814 - RNA, 19 nt, Homo sapiens
  misc_RNA (1)...(19): siRNA sense strand
caacgccugacguggagaa

SEQ ID NO: 1624815 - RNA, 19 nt, Homo sapiens
  misc_RNA (1)...(19): siRNA sense strand
aaccacauccgccacaaga

SEQ ID NO: 1624816 - RNA, 19 nt, Homo sapiens
  misc_RNA (1)...(19): siRNA sense strand
gccgcauccugagaaguaa

SEQ ID NO: 1624817 - RNA, 19 nt, Homo sapiens
  misc_RNA (1)...(19): siRNA sense strand
agccgcauccugagaagua

SEQ ID NO: 1624818 - RNA, 19 nt, Homo sapiens
  misc_RNA (1)...(19): siRNA sense strand
ggacgcggucugugaucga

SEQ ID NO: 1624819 - RNA, 19 nt, Homo sapiens
  misc_RNA (1)...(19): siRNA sense strand
ccaaccacauccgccacaa

SEQ ID NO: 1624820 - RNA, 19 nt, Homo sapiens
  misc_RNA (1)...(19): siRNA sense strand
ggaaauccgagacaaauua

SEQ ID NO: 1624821 - RNA, 19 nt, Homo sapiens
  misc_RNA (1)...(19): siRNA sense strand
gaaacaccgugccgucagu

SEQ ID NO: 1624822 - RNA, 19 nt, Homo sapiens
  misc_RNA (1)...(19): siRNA sense strand
gaaguaaauucgggaaagg

SEQ ID NO: 1624823 - RNA, 19 nt, Homo sapiens
  misc_RNA (1)...(19): siRNA sense strand
gagacaaauuacucaagga

SEQ ID NO: 1624824 - RNA, 19 nt, Homo sapiens
  misc_RNA (1)...(19): siRNA sense strand
ggaaggaggcagaggaaag

SEQ ID NO: 1624825 - RNA, 19 nt, Homo sapiens
  misc_RNA (1)...(19): siRNA sense strand
gagaagaaggccaaacaca

SEQ ID NO: 1624826 - RNA, 19 nt, Homo sapiens
  misc_RNA (1)...(19): siRNA sense strand
ucaaggacgcggucuguga

SEQ ID NO: 1624827 - RNA, 19 nt, Homo sapiens
  misc_RNA (1)...(19): siRNA sense strand
gaagaaaauugaggaauac

SEQ ID NO: 1624828 - RNA, 19 nt, Homo sapiens
  misc_RNA (1)...(19): siRNA sense strand
cgccugacguggagaagaa

SEQ ID NO: 1624829 - RNA, 19 nt, Homo sapiens
  misc_RNA (1)...(19): siRNA sense strand
gcgagaagaaggccaaaca

SEQ ID NO: 1624830 - RNA, 19 nt, Homo sapiens
  misc_RNA (1)...(19): siRNA sense strand
gggaaauccgagacaaauu

SEQ ID NO: 1624831 - RNA, 19 nt, Homo sapiens
  misc_RNA (1)...(19): siRNA sense strand
gaggaaggaggcagaggaa

SEQ ID NO: 1624832 - RNA, 19 nt, Homo sapiens
  misc_RNA (1)...(19): siRNA sense strand
gaaauccgagacaaauuac

SEQ ID NO: 1624833 - RNA, 19 nt, Homo sapiens
  misc_RNA (1)...(19): siRNA sense strand
cagaggaaagcgagaagaa

SEQ ID NO: 1624834 - RNA, 19 nt, Homo sapiens
  misc_RNA (1)...(19): siRNA sense strand
gagaaguaaauucgggaaa

SEQ ID NO: 1624835 - RNA, 19 nt, Homo sapiens
  misc_RNA (1)...(19): siRNA sense strand
agaaguaaauucgggaaag

SEQ ID NO: 1624836 - RNA, 19 nt, Homo sapiens
  misc_RNA (1)...(19): siRNA sense strand
gcugggaaauccgagacaa

SEQ ID NO: 1624837 - RNA, 19 nt, Homo sapiens
  misc_RNA (1)...(19): siRNA sense strand
ccacauccgccacaagauc

SEQ ID NO: 1624838 - RNA, 19 nt, Homo sapiens
  misc_RNA (1)...(19): siRNA sense strand
uaaauucgggaaaggugaa

SEQ ID NO: 1624839 - RNA, 19 nt, Homo sapiens
  misc_RNA (1)...(19): siRNA sense strand
gcagaggaaagcgagaaga

SEQ ID NO: 1624840 - RNA, 19 nt, Homo sapiens
  misc_RNA (1)...(19): siRNA sense strand
caaggacgcggucugugau

SEQ ID NO: 1624841 - RNA, 19 nt, Homo sapiens
  misc_RNA (1)...(19): siRNA sense strand
gaaggaggcagaggaaagc

SEQ ID NO: 1624842 - RNA, 19 nt, Homo sapiens
  misc_RNA (1)...(19): siRNA sense strand
gacgcggucugugaucgaa

SEQ ID NO: 1624843 - RNA, 19 nt, Homo sapiens
  misc_RNA (1)...(19): siRNA sense strand
caacgccugacguggagaa

SEQ ID NO: 1624844 - RNA, 19 nt, Homo sapiens
  misc_RNA (1)...(19): siRNA sense strand
aaccacauccgccacaaga

SEQ ID NO: 1624845 - RNA, 19 nt, Homo sapiens
  misc_RNA (1)...(19): siRNA sense strand
gccgcauccugagaaguaa

SEQ ID NO: 1624846 - RNA, 19 nt, Homo sapiens
  misc_RNA (1)...(19): siRNA sense strand
agccgcauccugagaagua

SEQ ID NO: 1624847 - RNA, 19 nt, Homo sapiens
  misc_RNA (1)...(19): siRNA sense strand
ggacgcggucugugaucga

SEQ ID NO: 1624848 - RNA, 19 nt, Homo sapiens
  misc_RNA (1)...(19): siRNA sense strand
ccaaccacauccgccacaa

SEQ ID NO: 1624849 - RNA, 19 nt, Homo sapiens
  misc_RNA (1)...(19): siRNA sense strand
ggaaauccgagacaaauua

SEQ ID NO: 1624850 - RNA, 19 nt, Homo sapiens
  misc_RNA (1)...(19): siRNA sense strand
gaaacaccgugccgucagu

SEQ ID NO: 1624851 - RNA, 19 nt, Homo sapiens
  misc_RNA (1)...(19): siRNA sense strand
gaaguaaauucgggaaagg

SEQ ID NO: 1624852 - RNA, 19 nt, Homo sapiens
  misc_RNA (1)...(19): siRNA sense strand
gagacaaauuacucaagga

SEQ ID NO: 1624853 - RNA, 19 nt, Homo sapiens
  misc_RNA (1)...(19): siRNA sense strand
ggaaggaggcagaggaaag

SEQ ID NO: 1624854 - RNA, 19 nt, Homo sapiens
  misc_RNA (1)...(19): siRNA sense strand
gagaagaaggccaaacaca

SEQ ID NO: 1624855 - RNA, 19 nt, Homo sapiens
  misc_RNA (1)...(19): siRNA sense strand
ucaaggacgcggucuguga

SEQ ID NO: 1624856 - RNA, 19 nt, Homo sapiens
  misc_RNA (1)...(19): siRNA sense strand
gaagaaaauugaggaauac

SEQ ID NO: 1624857 - RNA, 19 nt, Homo sapiens
  misc_RNA (1)...(19): siRNA sense strand
cgccugacguggagaagaa

SEQ ID NO: 1624858 - RNA, 19 nt, Homo sapiens
  misc_RNA (1)...(19): siRNA sense strand
gcgagaagaaggccaaaca

SEQ ID NO: 1624859 - RNA, 19 nt, Homo sapiens
  misc_RNA (1)...(19): siRNA sense strand
gggaaauccgagacaaauu

SEQ ID NO: 1624860 - RNA, 19 nt, Homo sapiens
  misc_RNA (1)...(19): siRNA sense strand
gaggaaggaggcagaggaa

SEQ ID NO: 1624861 - RNA, 19 nt, Homo sapiens
  misc_RNA (1)...(19): siRNA sense strand
gaaauccgagacaaauuac

SEQ ID NO: 1624862 - RNA, 19 nt, Homo sapiens
  misc_RNA (1)...(19): siRNA sense strand
cagaggaaagcgagaagaa

SEQ ID NO: 1624863 - RNA, 19 nt, Homo sapiens
  misc_RNA (1)...(19): siRNA sense strand
gagaaguaaauucgggaaa

SEQ ID NO: 1624864 - RNA, 19 nt, Homo sapiens
  misc_RNA (1)...(19): siRNA sense strand
agaaguaaauucgggaaag

SEQ ID NO: 1624865 - RNA, 19 nt, Homo sapiens
  misc_RNA (1)...(19): siRNA sense strand
gcugggaaauccgagacaa

SEQ ID NO: 1624866 - RNA, 19 nt, Homo sapiens
  misc_RNA (1)...(19): siRNA sense strand
ccacauccgccacaagauc

SEQ ID NO: 1624867 - RNA, 19 nt, Homo sapiens
  misc_RNA (1)...(19): siRNA sense strand
uaaauucgggaaaggugaa

SEQ ID NO: 1624868 - RNA, 19 nt, Homo sapiens
  misc_RNA (1)...(19): siRNA sense strand
gcagaggaaagcgagaaga

SEQ ID NO: 1624869 - RNA, 19 nt, Homo sapiens
  misc_RNA (1)...(19): siRNA sense strand
caaggacgcggucugugau

SEQ ID NO: 1624870 - RNA, 19 nt, Homo sapiens
  misc_RNA (1)...(19): siRNA sense strand
gaaggaggcagaggaaagc

SEQ ID NO: 1624871 - RNA, 19 nt, Homo sapiens
  misc_RNA (1)...(19): siRNA sense strand
gacgcggucugugaucgaa

SEQ ID NO: 1624872 - RNA, 19 nt, Homo sapiens
  misc_RNA (1)...(19): siRNA sense strand
caacgccugacguggagaa

SEQ ID NO: 1624873 - RNA, 19 nt, Homo sapiens
  misc_RNA (1)...(19): siRNA sense strand
aaccacauccgccacaaga

SEQ ID NO: 1624874 - RNA, 19 nt, Homo sapiens
  misc_RNA (1)...(19): siRNA sense strand
gccgcauccugagaaguaa

SEQ ID NO: 1624875 - RNA, 19 nt, Homo sapiens
  misc_RNA (1)...(19): siRNA sense strand
agccgcauccugagaagua

SEQ ID NO: 1624876 - RNA, 19 nt, Homo sapiens
  misc_RNA (1)...(19): siRNA sense strand
ggacgcggucugugaucga

SEQ ID NO: 1624877 - RNA, 19 nt, Homo sapiens
  misc_RNA (1)...(19): siRNA sense strand
ccaaccacauccgccacaa

SEQ ID NO: 1624878 - RNA, 19 nt, Homo sapiens
  misc_RNA (1)...(19): siRNA sense strand
ggaaauccgagacaaauua

SEQ ID NO: 1624879 - RNA, 19 nt, Homo sapiens
  misc_RNA (1)...(19): siRNA sense strand
gaaacaccgugccgucagu

SEQ ID NO: 1624880 - RNA, 19 nt, Homo sapiens
  misc_RNA (1)...(19): siRNA sense strand
gaaguaaauucgggaaagg

SEQ ID NO: 1624881 - RNA, 19 nt, Homo sapiens
  misc_RNA (1)...(19): siRNA sense strand
gagacaaauuacucaagga

SEQ ID NO: 1624882 - RNA, 19 nt, Homo sapiens
  misc_RNA (1)...(19): siRNA sense strand
ggaaggaggcagaggaaag

SEQ ID NO: 1624883 - RNA, 19 nt, Homo sapiens
  misc_RNA (1)...(19): siRNA sense strand
gagaagaaggccaaacaca

SEQ ID NO: 1624884 - RNA, 19 nt, Homo sapiens
  misc_RNA (1)...(19): siRNA sense strand
ucaaggacgcggucuguga

SEQ ID NO: 1624885 - RNA, 19 nt, Homo sapiens
  misc_RNA (1)...(19): siRNA sense strand
gaagaaaauugaggaauac

SEQ ID NO: 1624886 - RNA, 19 nt, Homo sapiens
  misc_RNA (1)...(19): siRNA sense strand
cgccugacguggagaagaa

SEQ ID NO: 1624887 - RNA, 19 nt, Homo sapiens
  misc_RNA (1)...(19): siRNA sense strand
gcgagaagaaggccaaaca

SEQ ID NO: 1624888 - RNA, 19 nt, Homo sapiens
  misc_RNA (1)...(19): siRNA sense strand
gggaaauccgagacaaauu

SEQ ID NO: 1624889 - RNA, 19 nt, Homo sapiens
  misc_RNA (1)...(19): siRNA sense strand
gaggaaggaggcagaggaa

SEQ ID NO: 1624890 - RNA, 19 nt, Homo sapiens
  misc_RNA (1)...(19): siRNA sense strand
gaaauccgagacaaauuac

SEQ ID NO: 1624891 - RNA, 19 nt, Homo sapiens
  misc_RNA (1)...(19): siRNA sense strand
cagaggaaagcgagaagaa

SEQ ID NO: 1624892 - RNA, 19 nt, Homo sapiens
  misc_RNA (1)...(19): siRNA sense strand
gagaaguaaauucgggaaa

SEQ ID NO: 1624893 - RNA, 19 nt, Homo sapiens
  misc_RNA (1)...(19): siRNA sense strand
agaaguaaauucgggaaag

SEQ ID NO: 1624894 - RNA, 19 nt, Homo sapiens
  misc_RNA (1)...(19): siRNA sense strand
gcugggaaauccgagacaa

SEQ ID NO: 1624895 - RNA, 19 nt, Homo sapiens
  misc_RNA (1)...(19): siRNA sense strand
ccacauccgccacaagauc

SEQ ID NO: 1624896 - RNA, 19 nt, Homo sapiens
  misc_RNA (1)...(19): siRNA sense strand
uaaauucgggaaaggugaa

SEQ ID NO: 1624897 - RNA, 19 nt, Homo sapiens
  misc_RNA (1)...(19): siRNA sense strand
gcagaggaaagcgagaaga

SEQ ID NO: 1624898 - RNA, 19 nt, Homo sapiens
  misc_RNA (1)...(19): siRNA sense strand
caaggacgcggucugugau

SEQ ID NO: 1624899 - RNA, 19 nt, Homo sapiens
  misc_RNA (1)...(19): siRNA sense strand
gaaggaggcagaggaaagc

SEQ ID NO: 1624900 - RNA, 19 nt, Homo sapiens
  misc_RNA (1)...(19): siRNA sense strand
gacgcggucugugaucgaa

SEQ ID NO: 1624901 - RNA, 19 nt, Homo sapiens
  misc_RNA (1)...(19): siRNA sense strand
caacgccugacguggagaa

SEQ ID NO: 1624902 - RNA, 19 nt, Homo sapiens
  misc_RNA (1)...(19): siRNA sense strand
aaccacauccgccacaaga

SEQ ID NO: 1624903 - RNA, 19 nt, Homo sapiens
  misc_RNA (1)...(19): siRNA sense strand
gccgcauccugagaaguaa

SEQ ID NO: 1624904 - RNA, 19 nt, Homo sapiens
  misc_RNA (1)...(19): siRNA sense strand
agccgcauccugagaagua

SEQ ID NO: 1624905 - RNA, 19 nt, Homo sapiens
  misc_RNA (1)...(19): siRNA sense strand
ggacgcggucugugaucga

SEQ ID NO: 1624906 - RNA, 19 nt, Homo sapiens
  misc_RNA (1)...(19): siRNA sense strand
ccaaccacauccgccacaa

SEQ ID NO: 1624907 - RNA, 19 nt, Homo sapiens
  misc_RNA (1)...(19): siRNA sense strand
ggaaauccgagacaaauua

SEQ ID NO: 1624908 - RNA, 19 nt, Homo sapiens
  misc_RNA (1)...(19): siRNA sense strand
gaaacaccgugccgucagu

SEQ ID NO: 1624909 - RNA, 19 nt, Homo sapiens
  misc_RNA (1)...(19): siRNA sense strand
gaaguaaauucgggaaagg

SEQ ID NO: 1624910 - RNA, 19 nt, Homo sapiens
  misc_RNA (1)...(19): siRNA sense strand
gagacaaauuacucaagga

SEQ ID NO: 1624911 - RNA, 19 nt, Homo sapiens
  misc_RNA (1)...(19): siRNA sense strand
ggaaggaggcagaggaaag

SEQ ID NO: 1624912 - RNA, 19 nt, Homo sapiens
  misc_RNA (1)...(19): siRNA sense strand
gagaagaaggccaaacaca

SEQ ID NO: 1624913 - RNA, 19 nt, Homo sapiens
  misc_RNA (1)...(19): siRNA sense strand
ucaaggacgcggucuguga

SEQ ID NO: 1624914 - RNA, 19 nt, Homo sapiens
  misc_RNA (1)...(19): siRNA sense strand
gaagaaaauugaggaauac

SEQ ID NO: 1624915 - RNA, 19 nt, Homo sapiens
  misc_RNA (1)...(19): siRNA sense strand
cgccugacguggagaagaa

SEQ ID NO: 1624916 - RNA, 19 nt, Homo sapiens
  misc_RNA (1)...(19): siRNA sense strand
gcgagaagaaggccaaaca

SEQ ID NO: 1624917 - RNA, 19 nt, Homo sapiens
  misc_RNA (1)...(19): siRNA sense strand
gggaaauccgagacaaauu

SEQ ID NO: 1624918 - RNA, 19 nt, Homo sapiens
  misc_RNA (1)...(19): siRNA sense strand
gaggaaggaggcagaggaa

SEQ ID NO: 1624919 - RNA, 19 nt, Homo sapiens
  misc_RNA (1)...(19): siRNA sense strand
gaaauccgagacaaauuac

SEQ ID NO: 1624920 - RNA, 19 nt, Homo sapiens
  misc_RNA (1)...(19): siRNA sense strand
cagaggaaagcgagaagaa

SEQ ID NO: 1624921 - RNA, 19 nt, Homo sapiens
  misc_RNA (1)...(19): siRNA sense strand
gagaaguaaauucgggaaa

SEQ ID NO: 1624922 - RNA, 19 nt, Homo sapiens
  misc_RNA (1)...(19): siRNA sense strand
agaaguaaauucgggaaag

SEQ ID NO: 1624923 - RNA, 19 nt, Homo sapiens
  misc_RNA (1)...(19): siRNA sense strand
gcugggaaauccgagacaa

SEQ ID NO: 1624924 - RNA, 19 nt, Homo sapiens
  misc_RNA (1)...(19): siRNA sense strand
ccacauccgccacaagauc

SEQ ID NO: 1624925 - RNA, 19 nt, Homo sapiens
  misc_RNA (1)...(19): siRNA sense strand
uaaauucgggaaaggugaa

SEQ ID NO: 1624926 - RNA, 19 nt, Homo sapiens
  misc_RNA (1)...(19): siRNA sense strand
gcagaggaaagcgagaaga

SEQ ID NO: 1624927 - RNA, 19 nt, Homo sapiens
  misc_RNA (1)...(19): siRNA sense strand
caaggacgcggucugugau

SEQ ID NO: 1624928 - RNA, 19 nt, Homo sapiens
  misc_RNA (1)...(19): siRNA sense strand
gaaggaggcagaggaaagc

SEQ ID NO: 1624929 - RNA, 19 nt, Homo sapiens
  misc_RNA (1)...(19): siRNA sense strand
gacgcggucugugaucgaa

SEQ ID NO: 1624930 - RNA, 19 nt, Homo sapiens
  misc_RNA (1)...(19): siRNA sense strand
caacgccugacguggagaa

SEQ ID NO: 1624931 - RNA, 19 nt, Homo sapiens
  misc_RNA (1)...(19): siRNA sense strand
aaccacauccgccacaaga

SEQ ID NO: 1624932 - RNA, 19 nt, Homo sapiens
  misc_RNA (1)...(19): siRNA sense strand
gccgcauccugagaaguaa

SEQ ID NO: 1624933 - RNA, 19 nt, Homo sapiens
  misc_RNA (1)...(19): siRNA sense strand
agccgcauccugagaagua

SEQ ID NO: 1624934 - RNA, 19 nt, Homo sapiens
  misc_RNA (1)...(19): siRNA sense strand
ggacgcggucugugaucga

SEQ ID NO: 1624935 - RNA, 19 nt, Homo sapiens
  misc_RNA (1)...(19): siRNA sense strand
ccaaccacauccgccacaa

SEQ ID NO: 1624936 - RNA, 19 nt, Homo sapiens
  misc_RNA (1)...(19): siRNA sense strand
ggaaauccgagacaaauua

SEQ ID NO: 1624937 - RNA, 19 nt, Homo sapiens
  misc_RNA (1)...(19): siRNA sense strand
gaaacaccgugccgucagu

SEQ ID NO: 1624938 - RNA, 19 nt, Homo sapiens
  misc_RNA (1)...(19): siRNA sense strand
gaaguaaauucgggaaagg

SEQ ID NO: 1624939 - RNA, 19 nt, Homo sapiens
  misc_RNA (1)...(19): siRNA sense strand
gagacaaauuacucaagga

SEQ ID NO: 1624940 - RNA, 19 nt, Homo sapiens
  misc_RNA (1)...(19): siRNA sense strand
ggaaggaggcagaggaaag

SEQ ID NO: 1624941 - RNA, 19 nt, Homo sapiens
  misc_RNA (1)...(19): siRNA sense strand
gagaagaaggccaaacaca

SEQ ID NO: 1624942 - RNA, 19 nt, Homo sapiens
  misc_RNA (1)...(19): siRNA sense strand
ucaaggacgcggucuguga

SEQ ID NO: 1624943 - RNA, 19 nt, Homo sapiens
  misc_RNA (1)...(19): siRNA sense strand
gaagaaaauugaggaauac

SEQ ID NO: 1624944 - RNA, 19 nt, Homo sapiens
  misc_RNA (1)...(19): siRNA sense strand
cgccugacguggagaagaa

SEQ ID NO: 1624945 - RNA, 19 nt, Homo sapiens
  misc_RNA (1)...(19): siRNA sense strand
gcgagaagaaggccaaaca

SEQ ID NO: 1624946 - RNA, 19 nt, Homo sapiens
  misc_RNA (1)...(19): siRNA sense strand
gggaaauccgagacaaauu

SEQ ID NO: 1624947 - RNA, 19 nt, Homo sapiens
  misc_RNA (1)...(19): siRNA sense strand
gaggaaggaggcagaggaa

SEQ ID NO: 1624948 - RNA, 19 nt, Homo sapiens
  misc_RNA (1)...(19): siRNA sense strand
gaaauccgagacaaauuac

SEQ ID NO: 1624949 - RNA, 19 nt, Homo sapiens
  misc_RNA (1)...(19): siRNA sense strand
cagaggaaagcgagaagaa

SEQ ID NO: 1624950 - RNA, 19 nt, Homo sapiens
  misc_RNA (1)...(19): siRNA sense strand
gagaaguaaauucgggaaa

SEQ ID NO: 1624951 - RNA, 19 nt, Homo sapiens
  misc_RNA (1)...(19): siRNA sense strand
agaaguaaauucgggaaag

SEQ ID NO: 1624952 - RNA, 19 nt, Homo sapiens
  misc_RNA (1)...(19): siRNA sense strand
gcugggaaauccgagacaa

SEQ ID NO: 1624953 - RNA, 19 nt, Homo sapiens
  misc_RNA (1)...(19): siRNA sense strand
ccacauccgccacaagauc

SEQ ID NO: 1624954 - RNA, 19 nt, Homo sapiens
  misc_RNA (1)...(19): siRNA sense strand
uaaauucgggaaaggugaa

SEQ ID NO: 1624955 - RNA, 19 nt, Homo sapiens
  misc_RNA (1)...(19): siRNA sense strand
gcagaggaaagcgagaaga

SEQ ID NO: 1624956 - RNA, 19 nt, Homo sapiens
  misc_RNA (1)...(19): siRNA sense strand
caaggacgcggucugugau

SEQ ID NO: 1624957 - RNA, 19 nt, Homo sapiens
  misc_RNA (1)...(19): siRNA sense strand
gaaggaggcagaggaaagc

SEQ ID NO: 1624958 - RNA, 19 nt, Homo sapiens
  misc_RNA (1)...(19): siRNA sense strand
gacgcggucugugaucgaa

SEQ ID NO: 1624959 - RNA, 19 nt, Homo sapiens
  misc_RNA (1)...(19): siRNA sense strand
caacgccugacguggagaa

SEQ ID NO: 1624960 - RNA, 19 nt, Homo sapiens
  misc_RNA (1)...(19): siRNA sense strand
aaccacauccgccacaaga

SEQ ID NO: 1624961 - RNA, 19 nt, Homo sapiens
  misc_RNA (1)...(19): siRNA sense strand
gccgcauccugagaaguaa

SEQ ID NO: 1624962 - RNA, 19 nt, Homo sapiens
  misc_RNA (1)...(19): siRNA sense strand
agccgcauccugagaagua

SEQ ID NO: 1624963 - RNA, 19 nt, Homo sapiens
  misc_RNA (1)...(19): siRNA sense strand
ggacgcggucugugaucga

SEQ ID NO: 1624964 - RNA, 19 nt, Homo sapiens
  misc_RNA (1)...(19): siRNA sense strand
ccaaccacauccgccacaa

SEQ ID NO: 1624965 - RNA, 19 nt, Homo sapiens
  misc_RNA (1)...(19): siRNA sense strand
ggaaauccgagacaaauua

SEQ ID NO: 1624966 - RNA, 19 nt, Homo sapiens
  misc_RNA (1)...(19): siRNA sense strand
gaaacaccgugccgucagu

SEQ ID NO: 1624967 - RNA, 19 nt, Homo sapiens
  misc_RNA (1)...(19): siRNA sense strand
gaaguaaauucgggaaagg

SEQ ID NO: 1624968 - RNA, 19 nt, Homo sapiens
  misc_RNA (1)...(19): siRNA sense strand
gagacaaauuacucaagga

SEQ ID NO: 1624969 - RNA, 19 nt, Homo sapiens
  misc_RNA (1)...(19): siRNA sense strand
ggaaggaggcagaggaaag

SEQ ID NO: 1624970 - RNA, 19 nt, Homo sapiens
  misc_RNA (1)...(19): siRNA sense strand
gagaagaaggccaaacaca

SEQ ID NO: 1624971 - RNA, 19 nt, Homo sapiens
  misc_RNA (1)...(19): siRNA sense strand
ucaaggacgcggucuguga

SEQ ID NO: 1624972 - RNA, 19 nt, Homo sapiens
  misc_RNA (1)...(19): siRNA sense strand
gaagaaaauugaggaauac

SEQ ID NO: 1624973 - RNA, 19 nt, Homo sapiens
  misc_RNA (1)...(19): siRNA sense strand
cgccugacguggagaagaa

SEQ ID NO: 1624974 - RNA, 19 nt, Homo sapiens
  misc_RNA (1)...(19): siRNA sense strand
gcgagaagaaggccaaaca

SEQ ID NO: 1624975 - RNA, 19 nt, Homo sapiens
  misc_RNA (1)...(19): siRNA sense strand
gggaaauccgagacaaauu

SEQ ID NO: 1624976 - RNA, 19 nt, Homo sapiens
  misc_RNA (1)...(19): siRNA sense strand
gaggaaggaggcagaggaa

SEQ ID NO: 1624977 - RNA, 19 nt, Homo sapiens
  misc_RNA (1)...(19): siRNA sense strand
gaaauccgagacaaauuac

SEQ ID NO: 1624978 - RNA, 19 nt, Homo sapiens
  misc_RNA (1)...(19): siRNA sense strand
cagaggaaagcgagaagaa

SEQ ID NO: 1624979 - RNA, 19 nt, Homo sapiens
  misc_RNA (1)...(19): siRNA sense strand
gagaaguaaauucgggaaa

SEQ ID NO: 1624980 - RNA, 19 nt, Homo sapiens
  misc_RNA (1)...(19): siRNA sense strand
agaaguaaauucgggaaag

SEQ ID NO: 1624981 - RNA, 19 nt, Homo sapiens
  misc_RNA (1)...(19): siRNA sense strand
gcugggaaauccgagacaa

SEQ ID NO: 1624982 - RNA, 19 nt, Homo sapiens
  misc_RNA (1)...(19): siRNA sense strand
ccacauccgccacaagauc

SEQ ID NO: 1624983 - RNA, 19 nt, Homo sapiens
  misc_RNA (1)...(19): siRNA sense strand
uaaauucgggaaaggugaa

SEQ ID NO: 1624984 - RNA, 19 nt, Homo sapiens
  misc_RNA (1)...(19): siRNA sense strand
gcagaggaaagcgagaaga

SEQ ID NO: 1624985 - RNA, 19 nt, Homo sapiens
  misc_RNA (1)...(19): siRNA sense strand
caaggacgcggucugugau

SEQ ID NO: 1624986 - RNA, 19 nt, Homo sapiens
  misc_RNA (1)...(19): siRNA sense strand
gaaggaggcagaggaaagc

SEQ ID NO: 1624987 - RNA, 19 nt, Homo sapiens
  misc_RNA (1)...(19): siRNA sense strand
gacgcggucugugaucgaa

SEQ ID NO: 1624988 - RNA, 19 nt, Homo sapiens
  misc_RNA (1)...(19): siRNA sense strand
caacgccugacguggagaa

SEQ ID NO: 1624989 - RNA, 19 nt, Homo sapiens
  misc_RNA (1)...(19): siRNA sense strand
aaccacauccgccacaaga

SEQ ID NO: 1624990 - RNA, 19 nt, Homo sapiens
  misc_RNA (1)...(19): siRNA sense strand
gccgcauccugagaaguaa

SEQ ID NO: 1624991 - RNA, 19 nt, Homo sapiens
  misc_RNA (1)...(19): siRNA sense strand
agccgcauccugagaagua

SEQ ID NO: 1624992 - RNA, 19 nt, Homo sapiens
  misc_RNA (1)...(19): siRNA sense strand
ggacgcggucugugaucga

SEQ ID NO: 1624993 - RNA, 19 nt, Homo sapiens
  misc_RNA (1)...(19): siRNA sense strand
ccaaccacauccgccacaa

SEQ ID NO: 1624994 - RNA, 19 nt, Homo sapiens
  misc_RNA (1)...(19): siRNA sense strand
ggaaauccgagacaaauua

SEQ ID NO: 1624995 - RNA, 19 nt, Homo sapiens
  misc_RNA (1)...(19): siRNA sense strand
gaaacaccgugccgucagu

SEQ ID NO: 1624996 - RNA, 19 nt, Homo sapiens
  misc_RNA (1)...(19): siRNA sense strand
gaaguaaauucgggaaagg

SEQ ID NO: 1624997 - RNA, 19 nt, Homo sapiens
  misc_RNA (1)...(19): siRNA sense strand
gagacaaauuacucaagga

SEQ ID NO: 1624998 - RNA, 19 nt, Homo sapiens
  misc_RNA (1)...(19): siRNA sense strand
ggaaggaggcagaggaaag

SEQ ID NO: 1624999 - RNA, 19 nt, Homo sapiens
  misc_RNA (1)...(19): siRNA sense strand
gagaagaaggccaaacaca

SEQ ID NO: 1625000 - RNA, 19 nt, Homo sapiens
  misc_RNA (1)...(19): siRNA sense strand
ucaaggacgcggucuguga

SEQ ID NO: 1625001 - RNA, 19 nt, Homo sapiens
  misc_RNA (1)...(19): siRNA sense strand
gaagaaaauugaggaauac

SEQ ID NO: 1625002 - RNA, 19 nt, Homo sapiens
  misc_RNA (1)...(19): siRNA sense strand
cgccugacguggagaagaa

SEQ ID NO: 1625003 - RNA, 19 nt, Homo sapiens
  misc_RNA (1)...(19): siRNA sense strand
gcgagaagaaggccaaaca

SEQ ID NO: 1625004 - RNA, 19 nt, Homo sapiens
  misc_RNA (1)...(19): siRNA sense strand
gggaaauccgagacaaauu

SEQ ID NO: 1625005 - RNA, 19 nt, Homo sapiens
  misc_RNA (1)...(19): siRNA sense strand
gaggaaggaggcagaggaa

SEQ ID NO: 1625006 - RNA, 19 nt, Homo sapiens
  misc_RNA (1)...(19): siRNA sense strand
gaaauccgagacaaauuac

SEQ ID NO: 1625007 - RNA, 19 nt, Homo sapiens
  misc_RNA (1)...(19): siRNA sense strand
cagaggaaagcgagaagaa

SEQ ID NO: 1625008 - RNA, 19 nt, Homo sapiens
  misc_RNA (1)...(19): siRNA sense strand
gagaaguaaauucgggaaa

SEQ ID NO: 1625009 - RNA, 19 nt, Homo sapiens
  misc_RNA (1)...(19): siRNA sense strand
agaaguaaauucgggaaag

SEQ ID NO: 1625010 - RNA, 19 nt, Homo sapiens
  misc_RNA (1)...(19): siRNA sense strand
gcugggaaauccgagacaa

SEQ ID NO: 1625011 - RNA, 19 nt, Homo sapiens
  misc_RNA (1)...(19): siRNA sense strand
ccacauccgccacaagauc

SEQ ID NO: 1625012 - RNA, 19 nt, Homo sapiens
  misc_RNA (1)...(19): siRNA sense strand
uaaauucgggaaaggugaa

SEQ ID NO: 1625013 - RNA, 19 nt, Homo sapiens
  misc_RNA (1)...(19): siRNA sense strand
gcagaggaaagcgagaaga

SEQ ID NO: 1625014 - RNA, 19 nt, Homo sapiens
  misc_RNA (1)...(19): siRNA sense strand
caaggacgcggucugugau

SEQ ID NO: 1625015 - RNA, 19 nt, Homo sapiens
  misc_RNA (1)...(19): siRNA sense strand
gaaggaggcagaggaaagc

SEQ ID NO: 1625016 - RNA, 19 nt, Homo sapiens
  misc_RNA (1)...(19): siRNA sense strand
gacgcggucugugaucgaa

SEQ ID NO: 1625017 - RNA, 19 nt, Homo sapiens
  misc_RNA (1)...(19): siRNA sense strand
caacgccugacguggagaa

SEQ ID NO: 1625018 - RNA, 19 nt, Homo sapiens
  misc_RNA (1)...(19): siRNA sense strand
aaccacauccgccacaaga

SEQ ID NO: 1625019 - RNA, 19 nt, Homo sapiens
  misc_RNA (1)...(19): siRNA sense strand
gccgcauccugagaaguaa

SEQ ID NO: 1625020 - RNA, 19 nt, Homo sapiens
  misc_RNA (1)...(19): siRNA sense strand
agccgcauccugagaagua

SEQ ID NO: 1625021 - RNA, 19 nt, Homo sapiens
  misc_RNA (1)...(19): siRNA sense strand
ggacgcggucugugaucga

SEQ ID NO: 1625022 - RNA, 19 nt, Homo sapiens
  misc_RNA (1)...(19): siRNA sense strand
ccaaccacauccgccacaa

SEQ ID NO: 1625023 - RNA, 19 nt, Homo sapiens
  misc_RNA (1)...(19): siRNA sense strand
ggaaauccgagacaaauua

SEQ ID NO: 1625024 - RNA, 19 nt, Homo sapiens
  misc_RNA (1)...(19): siRNA sense strand
gaaacaccgugccgucagu

SEQ ID NO: 1625025 - RNA, 19 nt, Homo sapiens
  misc_RNA (1)...(19): siRNA sense strand
gaaguaaauucgggaaagg

SEQ ID NO: 1625026 - RNA, 19 nt, Homo sapiens
  misc_RNA (1)...(19): siRNA sense strand
gagacaaauuacucaagga

SEQ ID NO: 1625027 - RNA, 19 nt, Homo sapiens
  misc_RNA (1)...(19): siRNA sense strand
ggaaggaggcagaggaaag

SEQ ID NO: 1625028 - RNA, 19 nt, Homo sapiens
  misc_RNA (1)...(19): siRNA sense strand
gagaagaaggccaaacaca

SEQ ID NO: 1625029 - RNA, 19 nt, Homo sapiens
  misc_RNA (1)...(19): siRNA sense strand
ucaaggacgcggucuguga

SEQ ID NO: 1625030 - RNA, 19 nt, Homo sapiens
  misc_RNA (1)...(19): siRNA sense strand
gaagaaaauugaggaauac

SEQ ID NO: 1625031 - RNA, 19 nt, Homo sapiens
  misc_RNA (1)...(19): siRNA sense strand
cgccugacguggagaagaa

SEQ ID NO: 1625032 - RNA, 19 nt, Homo sapiens
  misc_RNA (1)...(19): siRNA sense strand
gcgagaagaaggccaaaca

SEQ ID NO: 1625033 - RNA, 19 nt, Homo sapiens
  misc_RNA (1)...(19): siRNA sense strand
gggaaauccgagacaaauu

SEQ ID NO: 1625034 - RNA, 19 nt, Homo sapiens
  misc_RNA (1)...(19): siRNA sense strand
gaggaaggaggcagaggaa

SEQ ID NO: 1625035 - RNA, 19 nt, Homo sapiens
  misc_RNA (1)...(19): siRNA sense strand
gaaauccgagacaaauuac

SEQ ID NO: 1625036 - RNA, 19 nt, Homo sapiens
  misc_RNA (1)...(19): siRNA sense strand
cagaggaaagcgagaagaa

SEQ ID NO: 1625037 - RNA, 19 nt, Homo sapiens
  misc_RNA (1)...(19): siRNA sense strand
gagaaguaaauucgggaaa

SEQ ID NO: 1625038 - RNA, 19 nt, Homo sapiens
  misc_RNA (1)...(19): siRNA sense strand
agaaguaaauucgggaaag

SEQ ID NO: 1625039 - RNA, 19 nt, Homo sapiens
  misc_RNA (1)...(19): siRNA sense strand
gcugggaaauccgagacaa

SEQ ID NO: 1625040 - RNA, 19 nt, Homo sapiens
  misc_RNA (1)...(19): siRNA sense strand
ccacauccgccacaagauc

SEQ ID NO: 1625041 - RNA, 19 nt, Homo sapiens
  misc_RNA (1)...(19): siRNA sense strand
uaaauucgggaaaggugaa

SEQ ID NO: 1625042 - RNA, 19 nt, Homo sapiens
  misc_RNA (1)...(19): siRNA sense strand
gcagaggaaagcgagaaga

SEQ ID NO: 1625043 - RNA, 19 nt, Homo sapiens
  misc_RNA (1)...(19): siRNA sense strand
caaggacgcggucugugau

SEQ ID NO: 1625044 - RNA, 19 nt, Homo sapiens
  misc_RNA (1)...(19): siRNA sense strand
gaaggaggcagaggaaagc

SEQ ID NO: 1625045 - RNA, 19 nt, Homo sapiens
  misc_RNA (1)...(19): siRNA sense strand
gacgcggucugugaucgaa

SEQ ID NO: 1625046 - RNA, 19 nt, Homo sapiens
  misc_RNA (1)...(19): siRNA sense strand
caacgccugacguggagaa

SEQ ID NO: 1625047 - RNA, 19 nt, Homo sapiens
  misc_RNA (1)...(19): siRNA sense strand
aaccacauccgccacaaga

SEQ ID NO: 1625048 - RNA, 19 nt, Homo sapiens
  misc_RNA (1)...(19): siRNA sense strand
gccgcauccugagaaguaa

SEQ ID NO: 1625049 - RNA, 19 nt, Homo sapiens
  misc_RNA (1)...(19): siRNA sense strand
agccgcauccugagaagua

SEQ ID NO: 1625050 - RNA, 19 nt, Homo sapiens
  misc_RNA (1)...(19): siRNA sense strand
ggacgcggucugugaucga

SEQ ID NO: 1625051 - RNA, 19 nt, Homo sapiens
  misc_RNA (1)...(19): siRNA sense strand
ccaaccacauccgccacaa

SEQ ID NO: 1625052 - RNA, 19 nt, Homo sapiens
  misc_RNA (1)...(19): siRNA sense strand
ggaaauccgagacaaauua

SEQ ID NO: 1625053 - RNA, 19 nt, Homo sapiens
  misc_RNA (1)...(19): siRNA sense strand
gaaacaccgugccgucagu

SEQ ID NO: 1625054 - RNA, 19 nt, Homo sapiens
  misc_RNA (1)...(19): siRNA sense strand
gaaguaaauucgggaaagg

SEQ ID NO: 1625055 - RNA, 19 nt, Homo sapiens
  misc_RNA (1)...(19): siRNA sense strand
gagacaaauuacucaagga

SEQ ID NO: 1625056 - RNA, 19 nt, Homo sapiens
  misc_RNA (1)...(19): siRNA sense strand
ggaaggaggcagaggaaag

SEQ ID NO: 1625057 - RNA, 19 nt, Homo sapiens
  misc_RNA (1)...(19): siRNA sense strand
gagaagaaggccaaacaca

SEQ ID NO: 1625058 - RNA, 19 nt, Homo sapiens
  misc_RNA (1)...(19): siRNA sense strand
ucaaggacgcggucuguga

SEQ ID NO: 1625059 - RNA, 19 nt, Homo sapiens
  misc_RNA (1)...(19): siRNA sense strand
gaagaaaauugaggaauac

SEQ ID NO: 1625060 - RNA, 19 nt, Homo sapiens
  misc_RNA (1)...(19): siRNA sense strand
cgccugacguggagaagaa

SEQ ID NO: 1625061 - RNA, 19 nt, Homo sapiens
  misc_RNA (1)...(19): siRNA sense strand
gcgagaagaaggccaaaca

SEQ ID NO: 1625062 - RNA, 19 nt, Homo sapiens
  misc_RNA (1)...(19): siRNA sense strand
gggaaauccgagacaaauu

SEQ ID NO: 1625063 - RNA, 19 nt, Homo sapiens
  misc_RNA (1)...(19): siRNA sense strand
gaggaaggaggcagaggaa

SEQ ID NO: 1625064 - RNA, 19 nt, Homo sapiens
  misc_RNA (1)...(19): siRNA sense strand
gaaauccgagacaaauuac

SEQ ID NO: 1625065 - RNA, 19 nt, Homo sapiens
  misc_RNA (1)...(19): siRNA sense strand
cagaggaaagcgagaagaa

SEQ ID NO: 1625066 - RNA, 19 nt, Homo sapiens
  misc_RNA (1)...(19): siRNA sense strand
gagaaguaaauucgggaaa

SEQ ID NO: 1625067 - RNA, 19 nt, Homo sapiens
  misc_RNA (1)...(19): siRNA sense strand
agaaguaaauucgggaaag

SEQ ID NO: 1625068 - RNA, 19 nt, Homo sapiens
  misc_RNA (1)...(19): siRNA sense strand
gcugggaaauccgagacaa

SEQ ID NO: 1625069 - RNA, 19 nt, Homo sapiens
  misc_RNA (1)...(19): siRNA sense strand
ccacauccgccacaagauc

SEQ ID NO: 1625070 - RNA, 19 nt, Homo sapiens
  misc_RNA (1)...(19): siRNA sense strand
uaaauucgggaaaggugaa

SEQ ID NO: 1625071 - RNA, 19 nt, Homo sapiens
  misc_RNA (1)...(19): siRNA sense strand
gcagaggaaagcgagaaga

SEQ ID NO: 1625072 - RNA, 19 nt, Homo sapiens
  misc_RNA (1)...(19): siRNA sense strand
caaggacgcggucugugau

SEQ ID NO: 1625073 - RNA, 19 nt, Homo sapiens
  misc_RNA (1)...(19): siRNA sense strand
gaaggaggcagaggaaagc

SEQ ID NO: 1625074 - RNA, 19 nt, Homo sapiens
  misc_RNA (1)...(19): siRNA sense strand
gacgcggucugugaucgaa

SEQ ID NO: 1625075 - RNA, 19 nt, Homo sapiens
  misc_RNA (1)...(19): siRNA sense strand
caacgccugacguggagaa

SEQ ID NO: 1625076 - RNA, 19 nt, Homo sapiens
  misc_RNA (1)...(19): siRNA sense strand
aaccacauccgccacaaga

SEQ ID NO: 1625077 - RNA, 19 nt, Homo sapiens
  misc_RNA (1)...(19): siRNA sense strand
gccgcauccugagaaguaa

SEQ ID NO: 1625078 - RNA, 19 nt, Homo sapiens
  misc_RNA (1)...(19): siRNA sense strand
agccgcauccugagaagua

SEQ ID NO: 1625079 - RNA, 19 nt, Homo sapiens
  misc_RNA (1)...(19): siRNA sense strand
ggacgcggucugugaucga

SEQ ID NO: 1625080 - RNA, 19 nt, Homo sapiens
  misc_RNA (1)...(19): siRNA sense strand
ccaaccacauccgccacaa

SEQ ID NO: 1625081 - RNA, 19 nt, Homo sapiens
  misc_RNA (1)...(19): siRNA sense strand
ggaaauccgagacaaauua

SEQ ID NO: 1625082 - RNA, 19 nt, Homo sapiens
  misc_RNA (1)...(19): siRNA sense strand
gaaacaccgugccgucagu

SEQ ID NO: 1625083 - RNA, 19 nt, Homo sapiens
  misc_RNA (1)...(19): siRNA sense strand
gaaguaaauucgggaaagg

SEQ ID NO: 1625084 - RNA, 19 nt, Homo sapiens
  misc_RNA (1)...(19): siRNA sense strand
gagacaaauuacucaagga

SEQ ID NO: 1625085 - RNA, 19 nt, Homo sapiens
  misc_RNA (1)...(19): siRNA sense strand
ggaaggaggcagaggaaag

SEQ ID NO: 1625086 - RNA, 19 nt, Homo sapiens
  misc_RNA (1)...(19): siRNA sense strand
gagaagaaggccaaacaca

SEQ ID NO: 1625087 - RNA, 19 nt, Homo sapiens
  misc_RNA (1)...(19): siRNA sense strand
ucaaggacgcggucuguga

SEQ ID NO: 1625088 - RNA, 19 nt, Homo sapiens
  misc_RNA (1)...(19): siRNA sense strand
gaagaaaauugaggaauac

SEQ ID NO: 1625089 - RNA, 19 nt, Homo sapiens
  misc_RNA (1)...(19): siRNA sense strand
cgccugacguggagaagaa

SEQ ID NO: 1625090 - RNA, 19 nt, Homo sapiens
  misc_RNA (1)...(19): siRNA sense strand
gcgagaagaaggccaaaca

SEQ ID NO: 1625091 - RNA, 19 nt, Homo sapiens
  misc_RNA (1)...(19): siRNA sense strand
gggaaauccgagacaaauu

SEQ ID NO: 1625092 - RNA, 19 nt, Homo sapiens
  misc_RNA (1)...(19): siRNA sense strand
gaggaaggaggcagaggaa

SEQ ID NO: 1625093 - RNA, 19 nt, Homo sapiens
  misc_RNA (1)...(19): siRNA sense strand
gaaauccgagacaaauuac

SEQ ID NO: 1625094 - RNA, 19 nt, Homo sapiens
  misc_RNA (1)...(19): siRNA sense strand
cagaggaaagcgagaagaa

SEQ ID NO: 1625095 - RNA, 19 nt, Homo sapiens
  misc_RNA (1)...(19): siRNA sense strand
gagaaguaaauucgggaaa

SEQ ID NO: 1625096 - RNA, 19 nt, Homo sapiens
  misc_RNA (1)...(19): siRNA sense strand
agaaguaaauucgggaaag

SEQ ID NO: 1625097 - RNA, 19 nt, Homo sapiens
  misc_RNA (1)...(19): siRNA sense strand
gcugggaaauccgagacaa

SEQ ID NO: 1625098 - RNA, 19 nt, Homo sapiens
  misc_RNA (1)...(19): siRNA sense strand
ccacauccgccacaagauc

SEQ ID NO: 1625099 - RNA, 19 nt, Homo sapiens
  misc_RNA (1)...(19): siRNA sense strand
uaaauucgggaaaggugaa

SEQ ID NO: 1625100 - RNA, 19 nt, Homo sapiens
  misc_RNA (1)...(19): siRNA sense strand
gcagaggaaagcgagaaga

SEQ ID NO: 1625101 - RNA, 19 nt, Homo sapiens
  misc_RNA (1)...(19): siRNA sense strand
caaggacgcggucugugau

SEQ ID NO: 1625102 - RNA, 19 nt, Homo sapiens
  misc_RNA (1)...(19): siRNA sense strand
gaaggaggcagaggaaagc

SEQ ID NO: 1625103 - RNA, 19 nt, Homo sapiens
  misc_RNA (1)...(19): siRNA sense strand
gacgcggucugugaucgaa

SEQ ID NO: 1625104 - RNA, 19 nt, Homo sapiens
  misc_RNA (1)...(19): siRNA sense strand
caacgccugacguggagaa

SEQ ID NO: 1625105 - RNA, 19 nt, Homo sapiens
  misc_RNA (1)...(19): siRNA sense strand
aaccacauccgccacaaga

SEQ ID NO: 1625106 - RNA, 19 nt, Homo sapiens
  misc_RNA (1)...(19): siRNA sense strand
gccgcauccugagaaguaa

SEQ ID NO: 1625107 - RNA, 19 nt, Homo sapiens
  misc_RNA (1)...(19): siRNA sense strand
agccgcauccugagaagua

SEQ ID NO: 1625108 - RNA, 19 nt, Homo sapiens
  misc_RNA (1)...(19): siRNA sense strand
ggacgcggucugugaucga

SEQ ID NO: 1625109 - RNA, 19 nt, Homo sapiens
  misc_RNA (1)...(19): siRNA sense strand
ccaaccacauccgccacaa

SEQ ID NO: 1625110 - RNA, 19 nt, Homo sapiens
  misc_RNA (1)...(19): siRNA sense strand
ggaaauccgagacaaauua

SEQ ID NO: 1625111 - RNA, 19 nt, Homo sapiens
  misc_RNA (1)...(19): siRNA sense strand
gaaacaccgugccgucagu

SEQ ID NO: 1625112 - RNA, 19 nt, Homo sapiens
  misc_RNA (1)...(19): siRNA sense strand
gaaguaaauucgggaaagg

SEQ ID NO: 1625113 - RNA, 19 nt, Homo sapiens
  misc_RNA (1)...(19): siRNA sense strand
gagacaaauuacucaagga

SEQ ID NO: 1625114 - RNA, 19 nt, Homo sapiens
  misc_RNA (1)...(19): siRNA sense strand
ggaaggaggcagaggaaag

SEQ ID NO: 1625115 - RNA, 19 nt, Homo sapiens
  misc_RNA (1)...(19): siRNA sense strand
gagaagaaggccaaacaca

SEQ ID NO: 1625116 - RNA, 19 nt, Homo sapiens
  misc_RNA (1)...(19): siRNA sense strand
ucaaggacgcggucuguga

SEQ ID NO: 1625117 - RNA, 19 nt, Homo sapiens
  misc_RNA (1)...(19): siRNA sense strand
gaagaaaauugaggaauac

SEQ ID NO: 1625118 - RNA, 19 nt, Homo sapiens
  misc_RNA (1)...(19): siRNA sense strand
cgccugacguggagaagaa

SEQ ID NO: 1625119 - RNA, 19 nt, Homo sapiens
  misc_RNA (1)...(19): siRNA sense strand
gcgagaagaaggccaaaca

SEQ ID NO: 1625120 - RNA, 19 nt, Homo sapiens
  misc_RNA (1)...(19): siRNA sense strand
gggaaauccgagacaaauu

SEQ ID NO: 1625121 - RNA, 19 nt, Homo sapiens
  misc_RNA (1)...(19): siRNA sense strand
gaggaaggaggcagaggaa

SEQ ID NO: 1625122 - RNA, 19 nt, Homo sapiens
  misc_RNA (1)...(19): siRNA sense strand
gaaauccgagacaaauuac

SEQ ID NO: 1625123 - RNA, 19 nt, Homo sapiens
  misc_RNA (1)...(19): siRNA sense strand
cagaggaaagcgagaagaa

SEQ ID NO: 1625124 - RNA, 19 nt, Homo sapiens
  misc_RNA (1)...(19): siRNA sense strand
gagaaguaaauucgggaaa

SEQ ID NO: 1625125 - RNA, 19 nt, Homo sapiens
  misc_RNA (1)...(19): siRNA sense strand
agaaguaaauucgggaaag

SEQ ID NO: 1625126 - RNA, 19 nt, Homo sapiens
  misc_RNA (1)...(19): siRNA sense strand
gcugggaaauccgagacaa

SEQ ID NO: 1625127 - RNA, 19 nt, Homo sapiens
  misc_RNA (1)...(19): siRNA sense strand
ccacauccgccacaagauc

SEQ ID NO: 1625128 - RNA, 19 nt, Homo sapiens
  misc_RNA (1)...(19): siRNA sense strand
uaaauucgggaaaggugaa

SEQ ID NO: 1625129 - RNA, 19 nt, Homo sapiens
  misc_RNA (1)...(19): siRNA sense strand
gcagaggaaagcgagaaga

SEQ ID NO: 1625130 - RNA, 19 nt, Homo sapiens
  misc_RNA (1)...(19): siRNA sense strand
caaggacgcggucugugau

SEQ ID NO: 1625131 - RNA, 19 nt, Homo sapiens
  misc_RNA (1)...(19): siRNA sense strand
gaaggaggcagaggaaagc

SEQ ID NO: 1625132 - RNA, 19 nt, Homo sapiens
  misc_RNA (1)...(19): siRNA sense strand
gacgcggucugugaucgaa

SEQ ID NO: 1625133 - RNA, 19 nt, Homo sapiens
  misc_RNA (1)...(19): siRNA sense strand
caacgccugacguggagaa

SEQ ID NO: 1625134 - RNA, 19 nt, Homo sapiens
  misc_RNA (1)...(19): siRNA sense strand
aaccacauccgccacaaga

SEQ ID NO: 1625135 - RNA, 19 nt, Homo sapiens
  misc_RNA (1)...(19): siRNA sense strand
gccgcauccugagaaguaa

SEQ ID NO: 1625136 - RNA, 19 nt, Homo sapiens
  misc_RNA (1)...(19): siRNA sense strand
agccgcauccugagaagua

SEQ ID NO: 1625137 - RNA, 19 nt, Homo sapiens
  misc_RNA (1)...(19): siRNA sense strand
ggacgcggucugugaucga

SEQ ID NO: 1625138 - RNA, 19 nt, Homo sapiens
  misc_RNA (1)...(19): siRNA sense strand
ccaaccacauccgccacaa

SEQ ID NO: 1625139 - RNA, 19 nt, Homo sapiens
  misc_RNA (1)...(19): siRNA sense strand
ggaaauccgagacaaauua

SEQ ID NO: 1625140 - RNA, 19 nt, Homo sapiens
  misc_RNA (1)...(19): siRNA sense strand
gaaacaccgugccgucagu

SEQ ID NO: 1625141 - RNA, 19 nt, Homo sapiens
  misc_RNA (1)...(19): siRNA sense strand
gaaguaaauucgggaaagg

SEQ ID NO: 1625142 - RNA, 19 nt, Homo sapiens
  misc_RNA (1)...(19): siRNA sense strand
gagacaaauuacucaagga

SEQ ID NO: 1625143 - RNA, 19 nt, Homo sapiens
  misc_RNA (1)...(19): siRNA sense strand
ggaaggaggcagaggaaag

SEQ ID NO: 1625144 - RNA, 19 nt, Homo sapiens
  misc_RNA (1)...(19): siRNA sense strand
gagaagaaggccaaacaca

SEQ ID NO: 1625145 - RNA, 19 nt, Homo sapiens
  misc_RNA (1)...(19): siRNA sense strand
ucaaggacgcggucuguga

SEQ ID NO: 1625146 - RNA, 19 nt, Homo sapiens
  misc_RNA (1)...(19): siRNA sense strand
gaagaaaauugaggaauac

SEQ ID NO: 1625147 - RNA, 19 nt, Homo sapiens
  misc_RNA (1)...(19): siRNA sense strand
cgccugacguggagaagaa

SEQ ID NO: 1625148 - RNA, 19 nt, Homo sapiens
  misc_RNA (1)...(19): siRNA sense strand
gcgagaagaaggccaaaca

SEQ ID NO: 1625149 - RNA, 19 nt, Homo sapiens
  misc_RNA (1)...(19): siRNA sense strand
gggaaauccgagacaaauu

SEQ ID NO: 1625150 - RNA, 19 nt, Homo sapiens
  misc_RNA (1)...(19): siRNA sense strand
gaggaaggaggcagaggaa

SEQ ID NO: 1625151 - RNA, 19 nt, Homo sapiens
  misc_RNA (1)...(19): siRNA sense strand
gaaauccgagacaaauuac

SEQ ID NO: 1625152 - RNA, 19 nt, Homo sapiens
  misc_RNA (1)...(19): siRNA sense strand
cagaggaaagcgagaagaa

SEQ ID NO: 1625153 - RNA, 19 nt, Homo sapiens
  misc_RNA (1)...(19): siRNA sense strand
gagaaguaaauucgggaaa

SEQ ID NO: 1625154 - RNA, 19 nt, Homo sapiens
  misc_RNA (1)...(19): siRNA sense strand
agaaguaaauucgggaaag

SEQ ID NO: 1625155 - RNA, 19 nt, Homo sapiens
  misc_RNA (1)...(19): siRNA sense strand
gcugggaaauccgagacaa

SEQ ID NO: 1625156 - RNA, 19 nt, Homo sapiens
  misc_RNA (1)...(19): siRNA sense strand
ccacauccgccacaagauc

SEQ ID NO: 1625157 - RNA, 19 nt, Homo sapiens
  misc_RNA (1)...(19): siRNA sense strand
uaaauucgggaaaggugaa

SEQ ID NO: 1625158 - RNA, 19 nt, Homo sapiens
  misc_RNA (1)...(19): siRNA sense strand
gcagaggaaagcgagaaga

SEQ ID NO: 1625159 - RNA, 19 nt, Homo sapiens
  misc_RNA (1)...(19): siRNA sense strand
caaggacgcggucugugau

SEQ ID NO: 1625160 - RNA, 19 nt, Homo sapiens
  misc_RNA (1)...(19): siRNA sense strand
gaaggaggcagaggaaagc

SEQ ID NO: 1625161 - RNA, 19 nt, Homo sapiens
  misc_RNA (1)...(19): siRNA sense strand
gacgcggucugugaucgaa

SEQ ID NO: 1625162 - RNA, 19 nt, Homo sapiens
  misc_RNA (1)...(19): siRNA sense strand
caacgccugacguggagaa

SEQ ID NO: 1625163 - RNA, 19 nt, Homo sapiens
  misc_RNA (1)...(19): siRNA sense strand
aaccacauccgccacaaga

SEQ ID NO: 1625164 - RNA, 19 nt, Homo sapiens
  misc_RNA (1)...(19): siRNA sense strand
gccgcauccugagaaguaa

SEQ ID NO: 1625165 - RNA, 19 nt, Homo sapiens
  misc_RNA (1)...(19): siRNA sense strand
agccgcauccugagaagua

SEQ ID NO: 1625166 - RNA, 19 nt, Homo sapiens
  misc_RNA (1)...(19): siRNA sense strand
ggacgcggucugugaucga

SEQ ID NO: 1625167 - RNA, 19 nt, Homo sapiens
  misc_RNA (1)...(19): siRNA sense strand
ccaaccacauccgccacaa

SEQ ID NO: 1625168 - RNA, 19 nt, Homo sapiens
  misc_RNA (1)...(19): siRNA sense strand
ggaaauccgagacaaauua

SEQ ID NO: 1625169 - RNA, 19 nt, Homo sapiens
  misc_RNA (1)...(19): siRNA sense strand
gaaacaccgugccgucagu

SEQ ID NO: 1625170 - RNA, 19 nt, Homo sapiens
  misc_RNA (1)...(19): siRNA sense strand
gaaguaaauucgggaaagg

SEQ ID NO: 1625171 - RNA, 19 nt, Homo sapiens
  misc_RNA (1)...(19): siRNA sense strand
gagacaaauuacucaagga

SEQ ID NO: 1625172 - RNA, 19 nt, Homo sapiens
  misc_RNA (1)...(19): siRNA sense strand
ggaaggaggcagaggaaag

SEQ ID NO: 1625173 - RNA, 19 nt, Homo sapiens
  misc_RNA (1)...(19): siRNA sense strand
gagaagaaggccaaacaca

SEQ ID NO: 1625174 - RNA, 19 nt, Homo sapiens
  misc_RNA (1)...(19): siRNA sense strand
ucaaggacgcggucuguga

SEQ ID NO: 1625175 - RNA, 19 nt, Homo sapiens
  misc_RNA (1)...(19): siRNA sense strand
gaagaaaauugaggaauac

SEQ ID NO: 1625176 - RNA, 19 nt, Homo sapiens
  misc_RNA (1)...(19): siRNA sense strand
cgccugacguggagaagaa

SEQ ID NO: 1625177 - RNA, 19 nt, Homo sapiens
  misc_RNA (1)...(19): siRNA sense strand
gcgagaagaaggccaaaca

SEQ ID NO: 1625178 - RNA, 19 nt, Homo sapiens
  misc_RNA (1)...(19): siRNA sense strand
gggaaauccgagacaaauu

SEQ ID NO: 1625179 - RNA, 19 nt, Homo sapiens
  misc_RNA (1)...(19): siRNA sense strand
gaggaaggaggcagaggaa

SEQ ID NO: 1625180 - RNA, 19 nt, Homo sapiens
  misc_RNA (1)...(19): siRNA sense strand
gaaauccgagacaaauuac

SEQ ID NO: 1625181 - RNA, 19 nt, Homo sapiens
  misc_RNA (1)...(19): siRNA sense strand
cagaggaaagcgagaagaa

SEQ ID NO: 1625182 - RNA, 19 nt, Homo sapiens
  misc_RNA (1)...(19): siRNA sense strand
gagaaguaaauucgggaaa

SEQ ID NO: 1625183 - RNA, 19 nt, Homo sapiens
  misc_RNA (1)...(19): siRNA sense strand
agaaguaaauucgggaaag

SEQ ID NO: 1625184 - RNA, 19 nt, Homo sapiens
  misc_RNA (1)...(19): siRNA sense strand
gcugggaaauccgagacaa

SEQ ID NO: 1625185 - RNA, 19 nt, Homo sapiens
  misc_RNA (1)...(19): siRNA sense strand
ccacauccgccacaagauc

SEQ ID NO: 1625186 - RNA, 19 nt, Homo sapiens
  misc_RNA (1)...(19): siRNA sense strand
uaaauucgggaaaggugaa

SEQ ID NO: 1625187 - RNA, 19 nt, Homo sapiens
  misc_RNA (1)...(19): siRNA sense strand
gcagaggaaagcgagaaga

SEQ ID NO: 1625188 - RNA, 19 nt, Homo sapiens
  misc_RNA (1)...(19): siRNA sense strand
caaggacgcggucugugau

SEQ ID NO: 1625189 - RNA, 19 nt, Homo sapiens
  misc_RNA (1)...(19): siRNA sense strand
gaaggaggcagaggaaagc

SEQ ID NO: 1625190 - RNA, 19 nt, Homo sapiens
  misc_RNA (1)...(19): siRNA sense strand
gacgcggucugugaucgaa

SEQ ID NO: 1625191 - RNA, 19 nt, Homo sapiens
  misc_RNA (1)...(19): siRNA sense strand
caacgccugacguggagaa

SEQ ID NO: 1625192 - RNA, 19 nt, Homo sapiens
  misc_RNA (1)...(19): siRNA sense strand
aaccacauccgccacaaga

SEQ ID NO: 1625193 - RNA, 19 nt, Homo sapiens
  misc_RNA (1)...(19): siRNA sense strand
gccgcauccugagaaguaa

SEQ ID NO: 1625194 - RNA, 19 nt, Homo sapiens
  misc_RNA (1)...(19): siRNA sense strand
agccgcauccugagaagua

SEQ ID NO: 1625195 - RNA, 19 nt, Homo sapiens
  misc_RNA (1)...(19): siRNA sense strand
ggacgcggucugugaucga

SEQ ID NO: 1625196 - RNA, 19 nt, Homo sapiens
  misc_RNA (1)...(19): siRNA sense strand
ccaaccacauccgccacaa

SEQ ID NO: 1625197 - RNA, 19 nt, Homo sapiens
  misc_RNA (1)...(19): siRNA sense strand
ggaaauccgagacaaauua

SEQ ID NO: 1625198 - RNA, 19 nt, Homo sapiens
  misc_RNA (1)...(19): siRNA sense strand
gaaacaccgugccgucagu

SEQ ID NO: 1625199 - RNA, 19 nt, Homo sapiens
  misc_RNA (1)...(19): siRNA sense strand
gaaguaaauucgggaaagg

SEQ ID NO: 1625200 - RNA, 19 nt, Homo sapiens
  misc_RNA (1)...(19): siRNA sense strand
gagacaaauuacucaagga

SEQ ID NO: 1625201 - RNA, 19 nt, Homo sapiens
  misc_RNA (1)...(19): siRNA sense strand
ggaaggaggcagaggaaag

SEQ ID NO: 1625202 - RNA, 19 nt, Homo sapiens
  misc_RNA (1)...(19): siRNA sense strand
gagaagaaggccaaacaca

SEQ ID NO: 1625203 - RNA, 19 nt, Homo sapiens
  misc_RNA (1)...(19): siRNA sense strand
ucaaggacgcggucuguga

SEQ ID NO: 1625204 - RNA, 19 nt, Homo sapiens
  misc_RNA (1)...(19): siRNA sense strand
gaagaaaauugaggaauac

SEQ ID NO: 1625205 - RNA, 19 nt, Homo sapiens
  misc_RNA (1)...(19): siRNA sense strand
cgccugacguggagaagaa

SEQ ID NO: 1625206 - RNA, 19 nt, Homo sapiens
  misc_RNA (1)...(19): siRNA sense strand
gcgagaagaaggccaaaca

SEQ ID NO: 1625207 - RNA, 19 nt, Homo sapiens
  misc_RNA (1)...(19): siRNA sense strand
gggaaauccgagacaaauu

SEQ ID NO: 1625208 - RNA, 19 nt, Homo sapiens
  misc_RNA (1)...(19): siRNA sense strand
gaggaaggaggcagaggaa

SEQ ID NO: 1625209 - RNA, 19 nt, Homo sapiens
  misc_RNA (1)...(19): siRNA sense strand
gaaauccgagacaaauuac

SEQ ID NO: 1625210 - RNA, 19 nt, Homo sapiens
  misc_RNA (1)...(19): siRNA sense strand
cagaggaaagcgagaagaa

SEQ ID NO: 1625211 - RNA, 19 nt, Homo sapiens
  misc_RNA (1)...(19): siRNA sense strand
gagaaguaaauucgggaaa

SEQ ID NO: 1625212 - RNA, 19 nt, Homo sapiens
  misc_RNA (1)...(19): siRNA sense strand
agaaguaaauucgggaaag

SEQ ID NO: 1625213 - RNA, 19 nt, Homo sapiens
  misc_RNA (1)...(19): siRNA sense strand
gcugggaaauccgagacaa

SEQ ID NO: 1625214 - RNA, 19 nt, Homo sapiens
  misc_RNA (1)...(19): siRNA sense strand
ccacauccgccacaagauc

SEQ ID NO: 1625215 - RNA, 19 nt, Homo sapiens
  misc_RNA (1)...(19): siRNA sense strand
uaaauucgggaaaggugaa

SEQ ID NO: 1625216 - RNA, 19 nt, Homo sapiens
  misc_RNA (1)...(19): siRNA sense strand
gcagaggaaagcgagaaga

SEQ ID NO: 1625217 - RNA, 19 nt, Homo sapiens
  misc_RNA (1)...(19): siRNA sense strand
caaggacgcggucugugau

SEQ ID NO: 1625218 - RNA, 19 nt, Homo sapiens
  misc_RNA (1)...(19): siRNA sense strand
gaaggaggcagaggaaagc

SEQ ID NO: 1625219 - RNA, 19 nt, Homo sapiens
  misc_RNA (1)...(19): siRNA sense strand
gacgcggucugugaucgaa

SEQ ID NO: 1625220 - RNA, 19 nt, Homo sapiens
  misc_RNA (1)...(19): siRNA sense strand
caacgccugacguggagaa

SEQ ID NO: 1625221 - RNA, 19 nt, Homo sapiens
  misc_RNA (1)...(19): siRNA sense strand
aaccacauccgccacaaga

SEQ ID NO: 1625222 - RNA, 19 nt, Homo sapiens
  misc_RNA (1)...(19): siRNA sense strand
gccgcauccugagaaguaa

SEQ ID NO: 1625223 - RNA, 19 nt, Homo sapiens
  misc_RNA (1)...(19): siRNA sense strand
agccgcauccugagaagua

SEQ ID NO: 1625224 - RNA, 19 nt, Homo sapiens
  misc_RNA (1)...(19): siRNA sense strand
ggacgcggucugugaucga

SEQ ID NO: 1625225 - RNA, 19 nt, Homo sapiens
  misc_RNA (1)...(19): siRNA sense strand
ccaaccacauccgccacaa

SEQ ID NO: 1625226 - RNA, 19 nt, Homo sapiens
  misc_RNA (1)...(19): siRNA sense strand
ggaaauccgagacaaauua

SEQ ID NO: 1625227 - RNA, 19 nt, Homo sapiens
  misc_RNA (1)...(19): siRNA sense strand
gaaacaccgugccgucagu

SEQ ID NO: 1625228 - RNA, 19 nt, Homo sapiens
  misc_RNA (1)...(19): siRNA sense strand
gaaguaaauucgggaaagg

SEQ ID NO: 1625229 - RNA, 19 nt, Homo sapiens
  misc_RNA (1)...(19): siRNA sense strand
gagacaaauuacucaagga

SEQ ID NO: 1625230 - RNA, 19 nt, Homo sapiens
  misc_RNA (1)...(19): siRNA sense strand
ggaaggaggcagaggaaag

SEQ ID NO: 1625231 - RNA, 19 nt, Homo sapiens
  misc_RNA (1)...(19): siRNA sense strand
gagaagaaggccaaacaca

SEQ ID NO: 1625232 - RNA, 19 nt, Homo sapiens
  misc_RNA (1)...(19): siRNA sense strand
ucaaggacgcggucuguga

SEQ ID NO: 1625233 - RNA, 19 nt, Homo sapiens
  misc_RNA (1)...(19): siRNA sense strand
gaagaaaauugaggaauac

SEQ ID NO: 1625234 - RNA, 19 nt, Homo sapiens
  misc_RNA (1)...(19): siRNA sense strand
cgccugacguggagaagaa

SEQ ID NO: 1625235 - RNA, 19 nt, Homo sapiens
  misc_RNA (1)...(19): siRNA sense strand
gcgagaagaaggccaaaca

SEQ ID NO: 1625236 - RNA, 19 nt, Homo sapiens
  misc_RNA (1)...(19): siRNA sense strand
gggaaauccgagacaaauu

SEQ ID NO: 1625237 - RNA, 19 nt, Homo sapiens
  misc_RNA (1)...(19): siRNA sense strand
gaggaaggaggcagaggaa

SEQ ID NO: 1625238 - RNA, 19 nt, Homo sapiens
  misc_RNA (1)...(19): siRNA sense strand
gaaauccgagacaaauuac

SEQ ID NO: 1625239 - RNA, 19 nt, Homo sapiens
  misc_RNA (1)...(19): siRNA sense strand
cagaggaaagcgagaagaa

SEQ ID NO: 1625240 - RNA, 19 nt, Homo sapiens
  misc_RNA (1)...(19): siRNA sense strand
gagaaguaaauucgggaaa

SEQ ID NO: 1625241 - RNA, 19 nt, Homo sapiens
  misc_RNA (1)...(19): siRNA sense strand
agaaguaaauucgggaaag

SEQ ID NO: 1625242 - RNA, 19 nt, Homo sapiens
  misc_RNA (1)...(19): siRNA sense strand
gcugggaaauccgagacaa

SEQ ID NO: 1625243 - RNA, 19 nt, Homo sapiens
  misc_RNA (1)...(19): siRNA sense strand
ccacauccgccacaagauc

SEQ ID NO: 1625244 - RNA, 19 nt, Homo sapiens
  misc_RNA (1)...(19): siRNA sense strand
uaaauucgggaaaggugaa

SEQ ID NO: 1625245 - RNA, 19 nt, Homo sapiens
  misc_RNA (1)...(19): siRNA sense strand
gcagaggaaagcgagaaga

SEQ ID NO: 1625246 - RNA, 19 nt, Homo sapiens
  misc_RNA (1)...(19): siRNA sense strand
caaggacgcggucugugau

SEQ ID NO: 1625247 - RNA, 19 nt, Homo sapiens
  misc_RNA (1)...(19): siRNA sense strand
gaaggaggcagaggaaagc

SEQ ID NO: 1625248 - RNA, 19 nt, Homo sapiens
  misc_RNA (1)...(19): siRNA sense strand
gacgcggucugugaucgaa

SEQ ID NO: 1625249 - RNA, 19 nt, Homo sapiens
  misc_RNA (1)...(19): siRNA sense strand
caacgccugacguggagaa

SEQ ID NO: 1625250 - RNA, 19 nt, Homo sapiens
  misc_RNA (1)...(19): siRNA sense strand
aaccacauccgccacaaga

SEQ ID NO: 1625251 - RNA, 19 nt, Homo sapiens
  misc_RNA (1)...(19): siRNA sense strand
gccgcauccugagaaguaa

SEQ ID NO: 1625252 - RNA, 19 nt, Homo sapiens
  misc_RNA (1)...(19): siRNA sense strand
agccgcauccugagaagua

SEQ ID NO: 1625253 - RNA, 19 nt, Homo sapiens
  misc_RNA (1)...(19): siRNA sense strand
ggacgcggucugugaucga

SEQ ID NO: 1625254 - RNA, 19 nt, Homo sapiens
  misc_RNA (1)...(19): siRNA sense strand
ccaaccacauccgccacaa

SEQ ID NO: 1625255 - RNA, 19 nt, Homo sapiens
  misc_RNA (1)...(19): siRNA sense strand
ggaaauccgagacaaauua

SEQ ID NO: 1625256 - RNA, 19 nt, Homo sapiens
  misc_RNA (1)...(19): siRNA sense strand
gaaacaccgugccgucagu

SEQ ID NO: 1625257 - RNA, 19 nt, Homo sapiens
  misc_RNA (1)...(19): siRNA sense strand
gaaguaaauucgggaaagg

SEQ ID NO: 1625258 - RNA, 19 nt, Homo sapiens
  misc_RNA (1)...(19): siRNA sense strand
gagacaaauuacucaagga

SEQ ID NO: 1625259 - RNA, 19 nt, Homo sapiens
  misc_RNA (1)...(19): siRNA sense strand
ggaaggaggcagaggaaag

SEQ ID NO: 1625260 - RNA, 19 nt, Homo sapiens
  misc_RNA (1)...(19): siRNA sense strand
gagaagaaggccaaacaca

SEQ ID NO: 1625261 - RNA, 19 nt, Homo sapiens
  misc_RNA (1)...(19): siRNA sense strand
ucaaggacgcggucuguga

SEQ ID NO: 1625262 - RNA, 19 nt, Homo sapiens
  misc_RNA (1)...(19): siRNA sense strand
gaagaaaauugaggaauac

SEQ ID NO: 1625263 - RNA, 19 nt, Homo sapiens
  misc_RNA (1)...(19): siRNA sense strand
cgccugacguggagaagaa

SEQ ID NO: 1625264 - RNA, 19 nt, Homo sapiens
  misc_RNA (1)...(19): siRNA sense strand
gcgagaagaaggccaaaca

SEQ ID NO: 1625265 - RNA, 19 nt, Homo sapiens
  misc_RNA (1)...(19): siRNA sense strand
gggaaauccgagacaaauu

SEQ ID NO: 1625266 - RNA, 19 nt, Homo sapiens
  misc_RNA (1)...(19): siRNA sense strand
gaggaaggaggcagaggaa

SEQ ID NO: 1625267 - RNA, 19 nt, Homo sapiens
  misc_RNA (1)...(19): siRNA sense strand
gaaauccgagacaaauuac

SEQ ID NO: 1625268 - RNA, 19 nt, Homo sapiens
  misc_RNA (1)...(19): siRNA sense strand
cagaggaaagcgagaagaa

SEQ ID NO: 1625269 - RNA, 19 nt, Homo sapiens
  misc_RNA (1)...(19): siRNA sense strand
gagaaguaaauucgggaaa

SEQ ID NO: 1625270 - RNA, 19 nt, Homo sapiens
  misc_RNA (1)...(19): siRNA sense strand
agaaguaaauucgggaaag

SEQ ID NO: 1625271 - RNA, 19 nt, Homo sapiens
  misc_RNA (1)...(19): siRNA sense strand
gcugggaaauccgagacaa

SEQ ID NO: 1625272 - RNA, 19 nt, Homo sapiens
  misc_RNA (1)...(19): siRNA sense strand
ccacauccgccacaagauc

SEQ ID NO: 1625273 - RNA, 19 nt, Homo sapiens
  misc_RNA (1)...(19): siRNA sense strand
uaaauucgggaaaggugaa

SEQ ID NO: 1625274 - RNA, 19 nt, Homo sapiens
  misc_RNA (1)...(19): siRNA sense strand
gcagaggaaagcgagaaga

SEQ ID NO: 1625275 - RNA, 19 nt, Homo sapiens
  misc_RNA (1)...(19): siRNA sense strand
caaggacgcggucugugau

SEQ ID NO: 1625276 - RNA, 19 nt, Homo sapiens
  misc_RNA (1)...(19): siRNA sense strand
gaaggaggcagaggaaagc

SEQ ID NO: 1625277 - RNA, 19 nt, Homo sapiens
  misc_RNA (1)...(19): siRNA sense strand
gacgcggucugugaucgaa

SEQ ID NO: 1625278 - RNA, 19 nt, Homo sapiens
  misc_RNA (1)...(19): siRNA sense strand
caacgccugacguggagaa

SEQ ID NO: 1625279 - RNA, 19 nt, Homo sapiens
  misc_RNA (1)...(19): siRNA sense strand
aaccacauccgccacaaga

SEQ ID NO: 1625280 - RNA, 19 nt, Homo sapiens
  misc_RNA (1)...(19): siRNA sense strand
gccgcauccugagaaguaa

SEQ ID NO: 1625281 - RNA, 19 nt, Homo sapiens
  misc_RNA (1)...(19): siRNA sense strand
agccgcauccugagaagua

SEQ ID NO: 1625282 - RNA, 19 nt, Homo sapiens
  misc_RNA (1)...(19): siRNA sense strand
ggacgcggucugugaucga

SEQ ID NO: 1625283 - RNA, 19 nt, Homo sapiens
  misc_RNA (1)...(19): siRNA sense strand
ccaaccacauccgccacaa

SEQ ID NO: 1625284 - RNA, 19 nt, Homo sapiens
  misc_RNA (1)...(19): siRNA sense strand
ggaaauccgagacaaauua

SEQ ID NO: 1625285 - RNA, 19 nt, Homo sapiens
  misc_RNA (1)...(19): siRNA sense strand
gaaacaccgugccgucagu

SEQ ID NO: 1625286 - RNA, 19 nt, Homo sapiens
  misc_RNA (1)...(19): siRNA sense strand
gaaguaaauucgggaaagg

SEQ ID NO: 1625287 - RNA, 19 nt, Homo sapiens
  misc_RNA (1)...(19): siRNA sense strand
gagacaaauuacucaagga

SEQ ID NO: 1625288 - RNA, 19 nt, Homo sapiens
  misc_RNA (1)...(19): siRNA sense strand
ggaaggaggcagaggaaag

SEQ ID NO: 1625289 - RNA, 19 nt, Homo sapiens
  misc_RNA (1)...(19): siRNA sense strand
gagaagaaggccaaacaca

SEQ ID NO: 1625290 - RNA, 19 nt, Homo sapiens
  misc_RNA (1)...(19): siRNA sense strand
ucaaggacgcggucuguga

SEQ ID NO: 1625291 - RNA, 19 nt, Homo sapiens
  misc_RNA (1)...(19): siRNA sense strand
gaagaaaauugaggaauac

SEQ ID NO: 1625292 - RNA, 19 nt, Homo sapiens
  misc_RNA (1)...(19): siRNA sense strand
cgccugacguggagaagaa

SEQ ID NO: 1625293 - RNA, 19 nt, Homo sapiens
  misc_RNA (1)...(19): siRNA sense strand
gcgagaagaaggccaaaca

SEQ ID NO: 1625294 - RNA, 19 nt, Homo sapiens
  misc_RNA (1)...(19): siRNA sense strand
gggaaauccgagacaaauu

SEQ ID NO: 1625295 - RNA, 19 nt, Homo sapiens
  misc_RNA (1)...(19): siRNA sense strand
gaggaaggaggcagaggaa

SEQ ID NO: 1625296 - RNA, 19 nt, Homo sapiens
  misc_RNA (1)...(19): siRNA sense strand
gaaauccgagacaaauuac

SEQ ID NO: 1625297 - RNA, 19 nt, Homo sapiens
  misc_RNA (1)...(19): siRNA sense strand
cagaggaaagcgagaagaa

SEQ ID NO: 1625298 - RNA, 19 nt, Homo sapiens
  misc_RNA (1)...(19): siRNA sense strand
gagaaguaaauucgggaaa

SEQ ID NO: 1625299 - RNA, 19 nt, Homo sapiens
  misc_RNA (1)...(19): siRNA sense strand
agaaguaaauucgggaaag

SEQ ID NO: 1625300 - RNA, 19 nt, Homo sapiens
  misc_RNA (1)...(19): siRNA sense strand
gcugggaaauccgagacaa

SEQ ID NO: 1625301 - RNA, 19 nt, Homo sapiens
  misc_RNA (1)...(19): siRNA sense strand
ccacauccgccacaagauc

SEQ ID NO: 1625302 - RNA, 19 nt, Homo sapiens
  misc_RNA (1)...(19): siRNA sense strand
uaaauucgggaaaggugaa

SEQ ID NO: 1625303 - RNA, 19 nt, Homo sapiens
  misc_RNA (1)...(19): siRNA sense strand
gcagaggaaagcgagaaga

SEQ ID NO: 1625304 - RNA, 19 nt, Homo sapiens
  misc_RNA (1)...(19): siRNA sense strand
caaggacgcggucugugau

SEQ ID NO: 1625305 - RNA, 19 nt, Homo sapiens
  misc_RNA (1)...(19): siRNA sense strand
gaaggaggcagaggaaagc

SEQ ID NO: 1625306 - RNA, 19 nt, Homo sapiens
  misc_RNA (1)...(19): siRNA sense strand
gacgcggucugugaucgaa

SEQ ID NO: 1625307 - RNA, 19 nt, Homo sapiens
  misc_RNA (1)...(19): siRNA sense strand
caacgccugacguggagaa

SEQ ID NO: 1625308 - RNA, 19 nt, Homo sapiens
  misc_RNA (1)...(19): siRNA sense strand
aaccacauccgccacaaga

SEQ ID NO: 1625309 - RNA, 19 nt, Homo sapiens
  misc_RNA (1)...(19): siRNA sense strand
gccgcauccugagaaguaa

SEQ ID NO: 1625310 - RNA, 19 nt, Homo sapiens
  misc_RNA (1)...(19): siRNA sense strand
agccgcauccugagaagua

SEQ ID NO: 1625311 - RNA, 19 nt, Homo sapiens
  misc_RNA (1)...(19): siRNA sense strand
ggacgcggucugugaucga

SEQ ID NO: 1625312 - RNA, 19 nt, Homo sapiens
  misc_RNA (1)...(19): siRNA sense strand
ccaaccacauccgccacaa

SEQ ID NO: 1625313 - RNA, 19 nt, Homo sapiens
  misc_RNA (1)...(19): siRNA sense strand
ggaaauccgagacaaauua

SEQ ID NO: 1625314 - RNA, 19 nt, Homo sapiens
  misc_RNA (1)...(19): siRNA sense strand
gaaacaccgugccgucagu

SEQ ID NO: 1625315 - RNA, 19 nt, Homo sapiens
  misc_RNA (1)...(19): siRNA sense strand
gaaguaaauucgggaaagg

SEQ ID NO: 1625316 - RNA, 19 nt, Homo sapiens
  misc_RNA (1)...(19): siRNA sense strand
gagacaaauuacucaagga

SEQ ID NO: 1625317 - RNA, 19 nt, Homo sapiens
  misc_RNA (1)...(19): siRNA sense strand
ggaaggaggcagaggaaag

SEQ ID NO: 1625318 - RNA, 19 nt, Homo sapiens
  misc_RNA (1)...(19): siRNA sense strand
gagaagaaggccaaacaca

SEQ ID NO: 1625319 - RNA, 19 nt, Homo sapiens
  misc_RNA (1)...(19): siRNA sense strand
ucaaggacgcggucuguga

SEQ ID NO: 1625320 - RNA, 19 nt, Homo sapiens
  misc_RNA (1)...(19): siRNA sense strand
gaagaaaauugaggaauac

SEQ ID NO: 1625321 - RNA, 19 nt, Homo sapiens
  misc_RNA (1)...(19): siRNA sense strand
cgccugacguggagaagaa

SEQ ID NO: 1625322 - RNA, 19 nt, Homo sapiens
  misc_RNA (1)...(19): siRNA sense strand
gcgagaagaaggccaaaca

SEQ ID NO: 1625323 - RNA, 19 nt, Homo sapiens
  misc_RNA (1)...(19): siRNA sense strand
gggaaauccgagacaaauu

SEQ ID NO: 1625324 - RNA, 19 nt, Homo sapiens
  misc_RNA (1)...(19): siRNA sense strand
gaggaaggaggcagaggaa

SEQ ID NO: 1625325 - RNA, 19 nt, Homo sapiens
  misc_RNA (1)...(19): siRNA sense strand
gaaauccgagacaaauuac

SEQ ID NO: 1625326 - RNA, 19 nt, Homo sapiens
  misc_RNA (1)...(19): siRNA sense strand
cagaggaaagcgagaagaa

SEQ ID NO: 1625327 - RNA, 19 nt, Homo sapiens
  misc_RNA (1)...(19): siRNA sense strand
gagaaguaaauucgggaaa

SEQ ID NO: 1625328 - RNA, 19 nt, Homo sapiens
  misc_RNA (1)...(19): siRNA sense strand
agaaguaaauucgggaaag

SEQ ID NO: 1625329 - RNA, 19 nt, Homo sapiens
  misc_RNA (1)...(19): siRNA sense strand
gcugggaaauccgagacaa

SEQ ID NO: 1625330 - RNA, 19 nt, Homo sapiens
  misc_RNA (1)...(19): siRNA sense strand
ccacauccgccacaagauc

SEQ ID NO: 1625331 - RNA, 19 nt, Homo sapiens
  misc_RNA (1)...(19): siRNA sense strand
uaaauucgggaaaggugaa

SEQ ID NO: 1625332 - RNA, 19 nt, Homo sapiens
  misc_RNA (1)...(19): siRNA sense strand
gcagaggaaagcgagaaga

SEQ ID NO: 1625333 - RNA, 19 nt, Homo sapiens
  misc_RNA (1)...(19): siRNA sense strand
caaggacgcggucugugau

SEQ ID NO: 1625334 - RNA, 19 nt, Homo sapiens
  misc_RNA (1)...(19): siRNA sense strand
gaaggaggcagaggaaagc

SEQ ID NO: 1625335 - RNA, 19 nt, Homo sapiens
  misc_RNA (1)...(19): siRNA sense strand
gacgcggucugugaucgaa

SEQ ID NO: 1625336 - RNA, 19 nt, Homo sapiens
  misc_RNA (1)...(19): siRNA sense strand
caacgccugacguggagaa

SEQ ID NO: 1625337 - RNA, 19 nt, Homo sapiens
  misc_RNA (1)...(19): siRNA sense strand
aaccacauccgccacaaga

SEQ ID NO: 1625338 - RNA, 19 nt, Homo sapiens
  misc_RNA (1)...(19): siRNA sense strand
gccgcauccugagaaguaa

SEQ ID NO: 1625339 - RNA, 19 nt, Homo sapiens
  misc_RNA (1)...(19): siRNA sense strand
agccgcauccugagaagua

SEQ ID NO: 1625340 - RNA, 19 nt, Homo sapiens
  misc_RNA (1)...(19): siRNA sense strand
ggacgcggucugugaucga

SEQ ID NO: 1625341 - RNA, 19 nt, Homo sapiens
  misc_RNA (1)...(19): siRNA sense strand
ccaaccacauccgccacaa

SEQ ID NO: 1625342 - RNA, 19 nt, Homo sapiens
  misc_RNA (1)...(19): siRNA sense strand
ggaaauccgagacaaauua

SEQ ID NO: 1625343 - RNA, 19 nt, Homo sapiens
  misc_RNA (1)...(19): siRNA sense strand
gaaacaccgugccgucagu

SEQ ID NO: 1625344 - RNA, 19 nt, Homo sapiens
  misc_RNA (1)...(19): siRNA sense strand
gaaguaaauucgggaaagg

SEQ ID NO: 1625345 - RNA, 19 nt, Homo sapiens
  misc_RNA (1)...(19): siRNA sense strand
gagacaaauuacucaagga

SEQ ID NO: 1625346 - RNA, 19 nt, Homo sapiens
  misc_RNA (1)...(19): siRNA sense strand
ggaaggaggcagaggaaag

SEQ ID NO: 1625347 - RNA, 19 nt, Homo sapiens
  misc_RNA (1)...(19): siRNA sense strand
gagaagaaggccaaacaca

SEQ ID NO: 1625348 - RNA, 19 nt, Homo sapiens
  misc_RNA (1)...(19): siRNA sense strand
ucaaggacgcggucuguga

SEQ ID NO: 1625349 - RNA, 19 nt, Homo sapiens
  misc_RNA (1)...(19): siRNA sense strand
gaagaaaauugaggaauac

SEQ ID NO: 1625350 - RNA, 19 nt, Homo sapiens
  misc_RNA (1)...(19): siRNA sense strand
cgccugacguggagaagaa

SEQ ID NO: 1625351 - RNA, 19 nt, Homo sapiens
  misc_RNA (1)...(19): siRNA sense strand
gcgagaagaaggccaaaca

SEQ ID NO: 1625352 - RNA, 19 nt, Homo sapiens
  misc_RNA (1)...(19): siRNA sense strand
gggaaauccgagacaaauu

SEQ ID NO: 1625353 - RNA, 19 nt, Homo sapiens
  misc_RNA (1)...(19): siRNA sense strand
gaggaaggaggcagaggaa

SEQ ID NO: 1625354 - RNA, 19 nt, Homo sapiens
  misc_RNA (1)...(19): siRNA sense strand
gaaauccgagacaaauuac

SEQ ID NO: 1625355 - RNA, 19 nt, Homo sapiens
  misc_RNA (1)...(19): siRNA sense strand
cagaggaaagcgagaagaa

SEQ ID NO: 1625356 - RNA, 19 nt, Homo sapiens
  misc_RNA (1)...(19): siRNA sense strand
gagaaguaaauucgggaaa

SEQ ID NO: 1625357 - RNA, 19 nt, Homo sapiens
  misc_RNA (1)...(19): siRNA sense strand
agaaguaaauucgggaaag

SEQ ID NO: 1625358 - RNA, 19 nt, Homo sapiens
  misc_RNA (1)...(19): siRNA sense strand
gcugggaaauccgagacaa

SEQ ID NO: 1625359 - RNA, 19 nt, Homo sapiens
  misc_RNA (1)...(19): siRNA sense strand
ccacauccgccacaagauc

SEQ ID NO: 1625360 - RNA, 19 nt, Homo sapiens
  misc_RNA (1)...(19): siRNA sense strand
uaaauucgggaaaggugaa

SEQ ID NO: 1625361 - RNA, 19 nt, Homo sapiens
  misc_RNA (1)...(19): siRNA sense strand
gcagaggaaagcgagaaga

SEQ ID NO: 1625362 - RNA, 19 nt, Homo sapiens
  misc_RNA (1)...(19): siRNA sense strand
caaggacgcggucugugau

SEQ ID NO: 1625363 - RNA, 19 nt, Homo sapiens
  misc_RNA (1)...(19): siRNA sense strand
gaaggaggcagaggaaagc

SEQ ID NO: 1625364 - RNA, 19 nt, Homo sapiens
  misc_RNA (1)...(19): siRNA sense strand
gacgcggucugugaucgaa

SEQ ID NO: 1625365 - RNA, 19 nt, Homo sapiens
  misc_RNA (1)...(19): siRNA sense strand
caacgccugacguggagaa

SEQ ID NO: 1625366 - RNA, 19 nt, Homo sapiens
  misc_RNA (1)...(19): siRNA sense strand
aaccacauccgccacaaga

SEQ ID NO: 1625367 - RNA, 19 nt, Homo sapiens
  misc_RNA (1)...(19): siRNA sense strand
gccgcauccugagaaguaa

SEQ ID NO: 1625368 - RNA, 19 nt, Homo sapiens
  misc_RNA (1)...(19): siRNA sense strand
agccgcauccugagaagua

SEQ ID NO: 1625369 - RNA, 19 nt, Homo sapiens
  misc_RNA (1)...(19): siRNA sense strand
ggacgcggucugugaucga

SEQ ID NO: 1625370 - RNA, 19 nt, Homo sapiens
  misc_RNA (1)...(19): siRNA sense strand
ccaaccacauccgccacaa

SEQ ID NO: 1625371 - RNA, 19 nt, Homo sapiens
  misc_RNA (1)...(19): siRNA sense strand
ggaaauccgagacaaauua

SEQ ID NO: 1625372 - RNA, 19 nt, Homo sapiens
  misc_RNA (1)...(19): siRNA sense strand
gaaacaccgugccgucagu

SEQ ID NO: 1625373 - RNA, 19 nt, Homo sapiens
  misc_RNA (1)...(19): siRNA sense strand
gaaguaaauucgggaaagg

SEQ ID NO: 1625374 - RNA, 19 nt, Homo sapiens
  misc_RNA (1)...(19): siRNA sense strand
gagacaaauuacucaagga

SEQ ID NO: 1625375 - RNA, 19 nt, Homo sapiens
  misc_RNA (1)...(19): siRNA sense strand
ggaaggaggcagaggaaag

SEQ ID NO: 1625376 - RNA, 19 nt, Homo sapiens
  misc_RNA (1)...(19): siRNA sense strand
gagaagaaggccaaacaca

SEQ ID NO: 1625377 - RNA, 19 nt, Homo sapiens
  misc_RNA (1)...(19): siRNA sense strand
ucaaggacgcggucuguga

SEQ ID NO: 1625378 - RNA, 19 nt, Homo sapiens
  misc_RNA (1)...(19): siRNA sense strand
gaagaaaauugaggaauac

SEQ ID NO: 1625379 - RNA, 19 nt, Homo sapiens
  misc_RNA (1)...(19): siRNA sense strand
cgccugacguggagaagaa

SEQ ID NO: 1625380 - RNA, 19 nt, Homo sapiens
  misc_RNA (1)...(19): siRNA sense strand
gcgagaagaaggccaaaca

SEQ ID NO: 1625381 - RNA, 19 nt, Homo sapiens
  misc_RNA (1)...(19): siRNA sense strand
gggaaauccgagacaaauu

SEQ ID NO: 1625382 - RNA, 19 nt, Homo sapiens
  misc_RNA (1)...(19): siRNA sense strand
gaggaaggaggcagaggaa

SEQ ID NO: 1625383 - RNA, 19 nt, Homo sapiens
  misc_RNA (1)...(19): siRNA sense strand
gaaauccgagacaaauuac

SEQ ID NO: 1625384 - RNA, 19 nt, Homo sapiens
  misc_RNA (1)...(19): siRNA sense strand
cagaggaaagcgagaagaa

SEQ ID NO: 1625385 - RNA, 19 nt, Homo sapiens
  misc_RNA (1)...(19): siRNA sense strand
gagaaguaaauucgggaaa

SEQ ID NO: 1625386 - RNA, 19 nt, Homo sapiens
  misc_RNA (1)...(19): siRNA sense strand
agaaguaaauucgggaaag

SEQ ID NO: 1625387 - RNA, 19 nt, Homo sapiens
  misc_RNA (1)...(19): siRNA sense strand
gcugggaaauccgagacaa

SEQ ID NO: 1625388 - RNA, 19 nt, Homo sapiens
  misc_RNA (1)...(19): siRNA sense strand
ccacauccgccacaagauc

SEQ ID NO: 1625389 - RNA, 19 nt, Homo sapiens
  misc_RNA (1)...(19): siRNA sense strand
uaaauucgggaaaggugaa

SEQ ID NO: 1625390 - RNA, 19 nt, Homo sapiens
  misc_RNA (1)...(19): siRNA sense strand
gcagaggaaagcgagaaga

SEQ ID NO: 1625391 - RNA, 19 nt, Homo sapiens
  misc_RNA (1)...(19): siRNA sense strand
caaggacgcggucugugau

SEQ ID NO: 1625392 - RNA, 19 nt, Homo sapiens
  misc_RNA (1)...(19): siRNA sense strand
gaaggaggcagaggaaagc

SEQ ID NO: 1625393 - RNA, 19 nt, Homo sapiens
  misc_RNA (1)...(19): siRNA sense strand
gacgcggucugugaucgaa

SEQ ID NO: 1625394 - RNA, 19 nt, Homo sapiens
  misc_RNA (1)...(19): siRNA sense strand
caacgccugacguggagaa

SEQ ID NO: 1625395 - RNA, 19 nt, Homo sapiens
  misc_RNA (1)...(19): siRNA sense strand
aaccacauccgccacaaga

SEQ ID NO: 1625396 - RNA, 19 nt, Homo sapiens
  misc_RNA (1)...(19): siRNA sense strand
gccgcauccugagaaguaa

SEQ ID NO: 1625397 - RNA, 19 nt, Homo sapiens
  misc_RNA (1)...(19): siRNA sense strand
agccgcauccugagaagua

SEQ ID NO: 1625398 - RNA, 19 nt, Homo sapiens
  misc_RNA (1)...(19): siRNA sense strand
ggacgcggucugugaucga

SEQ ID NO: 1625399 - RNA, 19 nt, Homo sapiens
  misc_RNA (1)...(19): siRNA sense strand
ccaaccacauccgccacaa

SEQ ID NO: 1625400 - RNA, 19 nt, Homo sapiens
  misc_RNA (1)...(19): siRNA sense strand
ggaaauccgagacaaauua

SEQ ID NO: 1625401 - RNA, 19 nt, Homo sapiens
  misc_RNA (1)...(19): siRNA sense strand
gaaacaccgugccgucagu

SEQ ID NO: 1625402 - RNA, 19 nt, Homo sapiens
  misc_RNA (1)...(19): siRNA sense strand
gaaguaaauucgggaaagg

SEQ ID NO: 1625403 - RNA, 19 nt, Homo sapiens
  misc_RNA (1)...(19): siRNA sense strand
gagacaaauuacucaagga

SEQ ID NO: 1625404 - RNA, 19 nt, Homo sapiens
  misc_RNA (1)...(19): siRNA sense strand
ggaaggaggcagaggaaag

SEQ ID NO: 1625405 - RNA, 19 nt, Homo sapiens
  misc_RNA (1)...(19): siRNA sense strand
gagaagaaggccaaacaca

SEQ ID NO: 1625406 - RNA, 19 nt, Homo sapiens
  misc_RNA (1)...(19): siRNA sense strand
ucaaggacgcggucuguga

SEQ ID NO: 1625407 - RNA, 19 nt, Homo sapiens
  misc_RNA (1)...(19): siRNA sense strand
gaagaaaauugaggaauac

SEQ ID NO: 1625408 - RNA, 19 nt, Homo sapiens
  misc_RNA (1)...(19): siRNA sense strand
cgccugacguggagaagaa

SEQ ID NO: 1625409 - RNA, 19 nt, Homo sapiens
  misc_RNA (1)...(19): siRNA sense strand
gcgagaagaaggccaaaca

SEQ ID NO: 1625410 - RNA, 19 nt, Homo sapiens
  misc_RNA (1)...(19): siRNA sense strand
gggaaauccgagacaaauu

SEQ ID NO: 1625411 - RNA, 19 nt, Homo sapiens
  misc_RNA (1)...(19): siRNA sense strand
gaggaaggaggcagaggaa

SEQ ID NO: 1625412 - RNA, 19 nt, Homo sapiens
  misc_RNA (1)...(19): siRNA sense strand
gaaauccgagacaaauuac

SEQ ID NO: 1625413 - RNA, 19 nt, Homo sapiens
  misc_RNA (1)...(19): siRNA sense strand
cagaggaaagcgagaagaa

SEQ ID NO: 1625414 - RNA, 19 nt, Homo sapiens
  misc_RNA (1)...(19): siRNA sense strand
gagaaguaaauucgggaaa

SEQ ID NO: 1625415 - RNA, 19 nt, Homo sapiens
  misc_RNA (1)...(19): siRNA sense strand
agaaguaaauucgggaaag

SEQ ID NO: 1625416 - RNA, 19 nt, Homo sapiens
  misc_RNA (1)...(19): siRNA sense strand
gcugggaaauccgagacaa

SEQ ID NO: 1625417 - RNA, 19 nt, Homo sapiens
  misc_RNA (1)...(19): siRNA sense strand
ccacauccgccacaagauc

SEQ ID NO: 1625418 - RNA, 19 nt, Homo sapiens
  misc_RNA (1)...(19): siRNA sense strand
uaaauucgggaaaggugaa

SEQ ID NO: 1625419 - RNA, 19 nt, Homo sapiens
  misc_RNA (1)...(19): siRNA sense strand
gcagaggaaagcgagaaga

SEQ ID NO: 1625420 - RNA, 19 nt, Homo sapiens
  misc_RNA (1)...(19): siRNA sense strand
caaggacgcggucugugau

SEQ ID NO: 1625421 - RNA, 19 nt, Homo sapiens
  misc_RNA (1)...(19): siRNA sense strand
gaaggaggcagaggaaagc

SEQ ID NO: 1625422 - RNA, 19 nt, Homo sapiens
  misc_RNA (1)...(19): siRNA sense strand
gacgcggucugugaucgaa

SEQ ID NO: 1625423 - RNA, 19 nt, Homo sapiens
  misc_RNA (1)...(19): siRNA sense strand
caacgccugacguggagaa

SEQ ID NO: 1625424 - RNA, 19 nt, Homo sapiens
  misc_RNA (1)...(19): siRNA sense strand
aaccacauccgccacaaga

SEQ ID NO: 1625425 - RNA, 19 nt, Homo sapiens
  misc_RNA (1)...(19): siRNA sense strand
gccgcauccugagaaguaa

SEQ ID NO: 1625426 - RNA, 19 nt, Homo sapiens
  misc_RNA (1)...(19): siRNA sense strand
agccgcauccugagaagua

SEQ ID NO: 1625427 - RNA, 19 nt, Homo sapiens
  misc_RNA (1)...(19): siRNA sense strand
ggacgcggucugugaucga

SEQ ID NO: 1625428 - RNA, 19 nt, Homo sapiens
  misc_RNA (1)...(19): siRNA sense strand
ccaaccacauccgccacaa

SEQ ID NO: 1625429 - RNA, 19 nt, Homo sapiens
  misc_RNA (1)...(19): siRNA sense strand
ggaaauccgagacaaauua

SEQ ID NO: 1625430 - RNA, 19 nt, Homo sapiens
  misc_RNA (1)...(19): siRNA sense strand
gaaacaccgugccgucagu

SEQ ID NO: 1625431 - RNA, 19 nt, Homo sapiens
  misc_RNA (1)...(19): siRNA sense strand
gaaguaaauucgggaaagg

SEQ ID NO: 1625432 - RNA, 19 nt, Homo sapiens
  misc_RNA (1)...(19): siRNA sense strand
gagacaaauuacucaagga

SEQ ID NO: 1625433 - RNA, 19 nt, Homo sapiens
  misc_RNA (1)...(19): siRNA sense strand
ggaaggaggcagaggaaag

SEQ ID NO: 1625434 - RNA, 19 nt, Homo sapiens
  misc_RNA (1)...(19): siRNA sense strand
gagaagaaggccaaacaca

SEQ ID NO: 1625435 - RNA, 19 nt, Homo sapiens
  misc_RNA (1)...(19): siRNA sense strand
ucaaggacgcggucuguga

SEQ ID NO: 1625436 - RNA, 19 nt, Homo sapiens
  misc_RNA (1)...(19): siRNA sense strand
gaagaaaauugaggaauac

SEQ ID NO: 1625437 - RNA, 19 nt, Homo sapiens
  misc_RNA (1)...(19): siRNA sense strand
cgccugacguggagaagaa

SEQ ID NO: 1625438 - RNA, 19 nt, Homo sapiens
  misc_RNA (1)...(19): siRNA sense strand
gcgagaagaaggccaaaca

SEQ ID NO: 1625439 - RNA, 19 nt, Homo sapiens
  misc_RNA (1)...(19): siRNA sense strand
gggaaauccgagacaaauu

SEQ ID NO: 1625440 - RNA, 19 nt, Homo sapiens
  misc_RNA (1)...(19): siRNA sense strand
gaggaaggaggcagaggaa

SEQ ID NO: 1625441 - RNA, 19 nt, Homo sapiens
  misc_RNA (1)...(19): siRNA sense strand
gaaauccgagacaaauuac

SEQ ID NO: 1625442 - RNA, 19 nt, Homo sapiens
  misc_RNA (1)...(19): siRNA sense strand
cagaggaaagcgagaagaa

SEQ ID NO: 1625443 - RNA, 19 nt, Homo sapiens
  misc_RNA (1)...(19): siRNA sense strand
gagaaguaaauucgggaaa

SEQ ID NO: 1625444 - RNA, 19 nt, Homo sapiens
  misc_RNA (1)...(19): siRNA sense strand
agaaguaaauucgggaaag

SEQ ID NO: 1625445 - RNA, 19 nt, Homo sapiens
  misc_RNA (1)...(19): siRNA sense strand
gcugggaaauccgagacaa

SEQ ID NO: 1625446 - RNA, 19 nt, Homo sapiens
  misc_RNA (1)...(19): siRNA sense strand
ccacauccgccacaagauc

SEQ ID NO: 1625447 - RNA, 19 nt, Homo sapiens
  misc_RNA (1)...(19): siRNA sense strand
uaaauucgggaaaggugaa

SEQ ID NO: 1625448 - RNA, 19 nt, Homo sapiens
  misc_RNA (1)...(19): siRNA sense strand
gcagaggaaagcgagaaga

SEQ ID NO: 1625449 - RNA, 19 nt, Homo sapiens
  misc_RNA (1)...(19): siRNA sense strand
caaggacgcggucugugau

SEQ ID NO: 1625450 - RNA, 19 nt, Homo sapiens
  misc_RNA (1)...(19): siRNA sense strand
gaaggaggcagaggaaagc

SEQ ID NO: 1625451 - RNA, 19 nt, Homo sapiens
  misc_RNA (1)...(19): siRNA sense strand
gacgcggucugugaucgaa

SEQ ID NO: 1625452 - RNA, 19 nt, Homo sapiens
  misc_RNA (1)...(19): siRNA sense strand
caacgccugacguggagaa

SEQ ID NO: 1625453 - RNA, 19 nt, Homo sapiens
  misc_RNA (1)...(19): siRNA sense strand
aaccacauccgccacaaga

SEQ ID NO: 1625454 - RNA, 19 nt, Homo sapiens
  misc_RNA (1)...(19): siRNA sense strand
gccgcauccugagaaguaa

SEQ ID NO: 1625455 - RNA, 19 nt, Homo sapiens
  misc_RNA (1)...(19): siRNA sense strand
agccgcauccugagaagua

SEQ ID NO: 1625456 - RNA, 19 nt, Homo sapiens
  misc_RNA (1)...(19): siRNA sense strand
ggacgcggucugugaucga

SEQ ID NO: 1625457 - RNA, 19 nt, Homo sapiens
  misc_RNA (1)...(19): siRNA sense strand
ccaaccacauccgccacaa

SEQ ID NO: 1625458 - RNA, 19 nt, Homo sapiens
  misc_RNA (1)...(19): siRNA sense strand
ggaaauccgagacaaauua

SEQ ID NO: 1625459 - RNA, 19 nt, Homo sapiens
  misc_RNA (1)...(19): siRNA sense strand
gaaacaccgugccgucagu

SEQ ID NO: 1625460 - RNA, 19 nt, Homo sapiens
  misc_RNA (1)...(19): siRNA sense strand
gaaguaaauucgggaaagg

SEQ ID NO: 1625461 - RNA, 19 nt, Homo sapiens
  misc_RNA (1)...(19): siRNA sense strand
gagacaaauuacucaagga

SEQ ID NO: 1625462 - RNA, 19 nt, Homo sapiens
  misc_RNA (1)...(19): siRNA sense strand
ggaaggaggcagaggaaag

SEQ ID NO: 1625463 - RNA, 19 nt, Homo sapiens
  misc_RNA (1)...(19): siRNA sense strand
gagaagaaggccaaacaca

SEQ ID NO: 1625464 - RNA, 19 nt, Homo sapiens
  misc_RNA (1)...(19): siRNA sense strand
ucaaggacgcggucuguga

SEQ ID NO: 1625465 - RNA, 19 nt, Homo sapiens
  misc_RNA (1)...(19): siRNA sense strand
gaagaaaauugaggaauac

SEQ ID NO: 1625466 - RNA, 19 nt, Homo sapiens
  misc_RNA (1)...(19): siRNA sense strand
cgccugacguggagaagaa

SEQ ID NO: 1625467 - RNA, 19 nt, Homo sapiens
  misc_RNA (1)...(19): siRNA sense strand
gcgagaagaaggccaaaca

SEQ ID NO: 1625468 - RNA, 19 nt, Homo sapiens
  misc_RNA (1)...(19): siRNA sense strand
gggaaauccgagacaaauu

SEQ ID NO: 1625469 - RNA, 19 nt, Homo sapiens
  misc_RNA (1)...(19): siRNA sense strand
gaggaaggaggcagaggaa

SEQ ID NO: 1625470 - RNA, 19 nt, Homo sapiens
  misc_RNA (1)...(19): siRNA sense strand
gaaauccgagacaaauuac

SEQ ID NO: 1625471 - RNA, 19 nt, Homo sapiens
  misc_RNA (1)...(19): siRNA sense strand
cagaggaaagcgagaagaa

SEQ ID NO: 1625472 - RNA, 19 nt, Homo sapiens
  misc_RNA (1)...(19): siRNA sense strand
gagaaguaaauucgggaaa

SEQ ID NO: 1625473 - RNA, 19 nt, Homo sapiens
  misc_RNA (1)...(19): siRNA sense strand
agaaguaaauucgggaaag

SEQ ID NO: 1625474 - RNA, 19 nt, Homo sapiens
  misc_RNA (1)...(19): siRNA sense strand
gcugggaaauccgagacaa

SEQ ID NO: 1625475 - RNA, 19 nt, Homo sapiens
  misc_RNA (1)...(19): siRNA sense strand
ccacauccgccacaagauc

SEQ ID NO: 1625476 - RNA, 19 nt, Homo sapiens
  misc_RNA (1)...(19): siRNA sense strand
uaaauucgggaaaggugaa

SEQ ID NO: 1625477 - RNA, 19 nt, Homo sapiens
  misc_RNA (1)...(19): siRNA sense strand
gcagaggaaagcgagaaga

SEQ ID NO: 1625478 - RNA, 19 nt, Homo sapiens
  misc_RNA (1)...(19): siRNA sense strand
caaggacgcggucugugau

SEQ ID NO: 1625479 - RNA, 19 nt, Homo sapiens
  misc_RNA (1)...(19): siRNA sense strand
gaaggaggcagaggaaagc

SEQ ID NO: 1625480 - RNA, 19 nt, Homo sapiens
  misc_RNA (1)...(19): siRNA sense strand
gacgcggucugugaucgaa

SEQ ID NO: 1625481 - RNA, 19 nt, Homo sapiens
  misc_RNA (1)...(19): siRNA sense strand
caacgccugacguggagaa

SEQ ID NO: 1625482 - RNA, 19 nt, Homo sapiens
  misc_RNA (1)...(19): siRNA sense strand
aaccacauccgccacaaga

SEQ ID NO: 1625483 - RNA, 19 nt, Homo sapiens
  misc_RNA (1)...(19): siRNA sense strand
gccgcauccugagaaguaa

SEQ ID NO: 1625484 - RNA, 19 nt, Homo sapiens
  misc_RNA (1)...(19): siRNA sense strand
agccgcauccugagaagua

SEQ ID NO: 1625485 - RNA, 19 nt, Homo sapiens
  misc_RNA (1)...(19): siRNA sense strand
ggacgcggucugugaucga

SEQ ID NO: 1625486 - RNA, 19 nt, Homo sapiens
  misc_RNA (1)...(19): siRNA sense strand
ccaaccacauccgccacaa

SEQ ID NO: 1625487 - RNA, 19 nt, Homo sapiens
  misc_RNA (1)...(19): siRNA sense strand
ggaaauccgagacaaauua

SEQ ID NO: 1625488 - RNA, 19 nt, Homo sapiens
  misc_RNA (1)...(19): siRNA sense strand
gaaacaccgugccgucagu

SEQ ID NO: 1625489 - RNA, 19 nt, Homo sapiens
  misc_RNA (1)...(19): siRNA sense strand
gaaguaaauucgggaaagg

SEQ ID NO: 1625490 - RNA, 19 nt, Homo sapiens
  misc_RNA (1)...(19): siRNA sense strand
gagacaaauuacucaagga

SEQ ID NO: 1625491 - RNA, 19 nt, Homo sapiens
  misc_RNA (1)...(19): siRNA sense strand
ggaaggaggcagaggaaag

SEQ ID NO: 1625492 - RNA, 19 nt, Homo sapiens
  misc_RNA (1)...(19): siRNA sense strand
gagaagaaggccaaacaca

SEQ ID NO: 1625493 - RNA, 19 nt, Homo sapiens
  misc_RNA (1)...(19): siRNA sense strand
ucaaggacgcggucuguga

SEQ ID NO: 1625494 - RNA, 19 nt, Homo sapiens
  misc_RNA (1)...(19): siRNA sense strand
gaagaaaauugaggaauac

SEQ ID NO: 1625495 - RNA, 19 nt, Homo sapiens
  misc_RNA (1)...(19): siRNA sense strand
cgccugacguggagaagaa

SEQ ID NO: 1625496 - RNA, 19 nt, Homo sapiens
  misc_RNA (1)...(19): siRNA sense strand
gcgagaagaaggccaaaca

SEQ ID NO: 1625497 - RNA, 19 nt, Homo sapiens
  misc_RNA (1)...(19): siRNA sense strand
gggaaauccgagacaaauu

SEQ ID NO: 1625498 - RNA, 19 nt, Homo sapiens
  misc_RNA (1)...(19): siRNA sense strand
gaggaaggaggcagaggaa

SEQ ID NO: 1625499 - RNA, 19 nt, Homo sapiens
  misc_RNA (1)...(19): siRNA sense strand
gaaauccgagacaaauuac

SEQ ID NO: 1625500 - RNA, 19 nt, Homo sapiens
  misc_RNA (1)...(19): siRNA sense strand
cagaggaaagcgagaagaa

SEQ ID NO: 1625501 - RNA, 19 nt, Homo sapiens
  misc_RNA (1)...(19): siRNA sense strand
gagaaguaaauucgggaaa

SEQ ID NO: 1625502 - RNA, 19 nt, Homo sapiens
  misc_RNA (1)...(19): siRNA sense strand
agaaguaaauucgggaaag

SEQ ID NO: 1625503 - RNA, 19 nt, Homo sapiens
  misc_RNA (1)...(19): siRNA sense strand
gcugggaaauccgagacaa

SEQ ID NO: 1625504 - RNA, 19 nt, Homo sapiens
  misc_RNA (1)...(19): siRNA sense strand
ccacauccgccacaagauc

SEQ ID NO: 1625505 - RNA, 19 nt, Homo sapiens
  misc_RNA (1)...(19): siRNA sense strand
uaaauucgggaaaggugaa

SEQ ID NO: 1625506 - RNA, 19 nt, Homo sapiens
  misc_RNA (1)...(19): siRNA sense strand
gcagaggaaagcgagaaga

SEQ ID NO: 1625507 - RNA, 19 nt, Homo sapiens
  misc_RNA (1)...(19): siRNA sense strand
caaggacgcggucugugau

SEQ ID NO: 1625508 - RNA, 19 nt, Homo sapiens
  misc_RNA (1)...(19): siRNA sense strand
gaaggaggcagaggaaagc

SEQ ID NO: 1625509 - RNA, 19 nt, Homo sapiens
  misc_RNA (1)...(19): siRNA sense strand
gacgcggucugugaucgaa

SEQ ID NO: 1625510 - RNA, 19 nt, Homo sapiens
  misc_RNA (1)...(19): siRNA sense strand
caacgccugacguggagaa

SEQ ID NO: 1625511 - RNA, 19 nt, Homo sapiens
  misc_RNA (1)...(19): siRNA sense strand
aaccacauccgccacaaga

SEQ ID NO: 1625512 - RNA, 19 nt, Homo sapiens
  misc_RNA (1)...(19): siRNA sense strand
gccgcauccugagaaguaa

SEQ ID NO: 1625513 - RNA, 19 nt, Homo sapiens
  misc_RNA (1)...(19): siRNA sense strand
agccgcauccugagaagua

SEQ ID NO: 1625514 - RNA, 19 nt, Homo sapiens
  misc_RNA (1)...(19): siRNA sense strand
ggacgcggucugugaucga

SEQ ID NO: 1625515 - RNA, 19 nt, Homo sapiens
  misc_RNA (1)...(19): siRNA sense strand
ccaaccacauccgccacaa

SEQ ID NO: 1625516 - RNA, 19 nt, Homo sapiens
  misc_RNA (1)...(19): siRNA sense strand
ggaaauccgagacaaauua

SEQ ID NO: 1625517 - RNA, 19 nt, Homo sapiens
  misc_RNA (1)...(19): siRNA sense strand
gaaacaccgugccgucagu

SEQ ID NO: 1625518 - RNA, 19 nt, Homo sapiens
  misc_RNA (1)...(19): siRNA sense strand
gaaguaaauucgggaaagg

SEQ ID NO: 1625519 - RNA, 19 nt, Homo sapiens
  misc_RNA (1)...(19): siRNA sense strand
gagacaaauuacucaagga

SEQ ID NO: 1625520 - RNA, 19 nt, Homo sapiens
  misc_RNA (1)...(19): siRNA sense strand
ggaaggaggcagaggaaag

SEQ ID NO: 1625521 - RNA, 19 nt, Homo sapiens
  misc_RNA (1)...(19): siRNA sense strand
gagaagaaggccaaacaca

SEQ ID NO: 1625522 - RNA, 19 nt, Homo sapiens
  misc_RNA (1)...(19): siRNA sense strand
ucaaggacgcggucuguga

SEQ ID NO: 1625523 - RNA, 19 nt, Homo sapiens
  misc_RNA (1)...(19): siRNA sense strand
gaagaaaauugaggaauac

SEQ ID NO: 1625524 - RNA, 19 nt, Homo sapiens
  misc_RNA (1)...(19): siRNA sense strand
cgccugacguggagaagaa

SEQ ID NO: 1625525 - RNA, 19 nt, Homo sapiens
  misc_RNA (1)...(19): siRNA sense strand
gcgagaagaaggccaaaca

SEQ ID NO: 1625526 - RNA, 19 nt, Homo sapiens
  misc_RNA (1)...(19): siRNA sense strand
gggaaauccgagacaaauu

SEQ ID NO: 1625527 - RNA, 19 nt, Homo sapiens
  misc_RNA (1)...(19): siRNA sense strand
gaggaaggaggcagaggaa

SEQ ID NO: 1625528 - RNA, 19 nt, Homo sapiens
  misc_RNA (1)...(19): siRNA sense strand
gaaauccgagacaaauuac

SEQ ID NO: 1625529 - RNA, 19 nt, Homo sapiens
  misc_RNA (1)...(19): siRNA sense strand
cagaggaaagcgagaagaa

SEQ ID NO: 1625530 - RNA, 19 nt, Homo sapiens
  misc_RNA (1)...(19): siRNA sense strand
gagaaguaaauucgggaaa

SEQ ID NO: 1625531 - RNA, 19 nt, Homo sapiens
  misc_RNA (1)...(19): siRNA sense strand
agaaguaaauucgggaaag

SEQ ID NO: 1625532 - RNA, 19 nt, Homo sapiens
  misc_RNA (1)...(19): siRNA sense strand
gcugggaaauccgagacaa

SEQ ID NO: 1625533 - RNA, 19 nt, Homo sapiens
  misc_RNA (1)...(19): siRNA sense strand
ccacauccgccacaagauc

SEQ ID NO: 1625534 - RNA, 19 nt, Homo sapiens
  misc_RNA (1)...(19): siRNA sense strand
uaaauucgggaaaggugaa

SEQ ID NO: 1625535 - RNA, 19 nt, Homo sapiens
  misc_RNA (1)...(19): siRNA sense strand
gcagaggaaagcgagaaga

SEQ ID NO: 1625536 - RNA, 19 nt, Homo sapiens
  misc_RNA (1)...(19): siRNA sense strand
caaggacgcggucugugau

SEQ ID NO: 1625537 - RNA, 19 nt, Homo sapiens
  misc_RNA (1)...(19): siRNA sense strand
gaaggaggcagaggaaagc

SEQ ID NO: 1625538 - RNA, 19 nt, Homo sapiens
  misc_RNA (1)...(19): siRNA sense strand
gacgcggucugugaucgaa

SEQ ID NO: 1625539 - RNA, 19 nt, Homo sapiens
  misc_RNA (1)...(19): siRNA sense strand
caacgccugacguggagaa

SEQ ID NO: 1625540 - RNA, 19 nt, Homo sapiens
  misc_RNA (1)...(19): siRNA sense strand
aaccacauccgccacaaga

SEQ ID NO: 1625541 - RNA, 19 nt, Homo sapiens
  misc_RNA (1)...(19): siRNA sense strand
gccgcauccugagaaguaa

SEQ ID NO: 1625542 - RNA, 19 nt, Homo sapiens
  misc_RNA (1)...(19): siRNA sense strand
agccgcauccugagaagua

SEQ ID NO: 1625543 - RNA, 19 nt, Homo sapiens
  misc_RNA (1)...(19): siRNA sense strand
ggacgcggucugugaucga

SEQ ID NO: 1625544 - RNA, 19 nt, Homo sapiens
  misc_RNA (1)...(19): siRNA sense strand
ccaaccacauccgccacaa

SEQ ID NO: 1625545 - RNA, 19 nt, Homo sapiens
  misc_RNA (1)...(19): siRNA sense strand
ggaaauccgagacaaauua

SEQ ID NO: 1625546 - RNA, 19 nt, Homo sapiens
  misc_RNA (1)...(19): siRNA sense strand
gaaacaccgugccgucagu

SEQ ID NO: 1625547 - RNA, 19 nt, Homo sapiens
  misc_RNA (1)...(19): siRNA sense strand
gaaguaaauucgggaaagg

SEQ ID NO: 1625548 - RNA, 19 nt, Homo sapiens
  misc_RNA (1)...(19): siRNA sense strand
gagacaaauuacucaagga

SEQ ID NO: 1625549 - RNA, 19 nt, Homo sapiens
  misc_RNA (1)...(19): siRNA sense strand
ggaaggaggcagaggaaag

SEQ ID NO: 1625550 - RNA, 19 nt, Homo sapiens
  misc_RNA (1)...(19): siRNA sense strand
gagaagaaggccaaacaca

SEQ ID NO: 1625551 - RNA, 19 nt, Homo sapiens
  misc_RNA (1)...(19): siRNA sense strand
ucaaggacgcggucuguga

SEQ ID NO: 1625552 - RNA, 19 nt, Homo sapiens
  misc_RNA (1)...(19): siRNA sense strand
gaagaaaauugaggaauac

SEQ ID NO: 1625553 - RNA, 19 nt, Homo sapiens
  misc_RNA (1)...(19): siRNA sense strand
cgccugacguggagaagaa

SEQ ID NO: 1625554 - RNA, 19 nt, Homo sapiens
  misc_RNA (1)...(19): siRNA sense strand
gcgagaagaaggccaaaca

SEQ ID NO: 1625555 - RNA, 19 nt, Homo sapiens
  misc_RNA (1)...(19): siRNA sense strand
gggaaauccgagacaaauu

SEQ ID NO: 1625556 - RNA, 19 nt, Homo sapiens
  misc_RNA (1)...(19): siRNA sense strand
gaggaaggaggcagaggaa

SEQ ID NO: 1625557 - RNA, 19 nt, Homo sapiens
  misc_RNA (1)...(19): siRNA sense strand
gaaauccgagacaaauuac

SEQ ID NO: 1625558 - RNA, 19 nt, Homo sapiens
  misc_RNA (1)...(19): siRNA sense strand
cagaggaaagcgagaagaa

SEQ ID NO: 1625559 - RNA, 19 nt, Homo sapiens
  misc_RNA (1)...(19): siRNA sense strand
gagaaguaaauucgggaaa

SEQ ID NO: 1625560 - RNA, 19 nt, Homo sapiens
  misc_RNA (1)...(19): siRNA sense strand
agaaguaaauucgggaaag

SEQ ID NO: 1625561 - RNA, 19 nt, Homo sapiens
  misc_RNA (1)...(19): siRNA sense strand
gcugggaaauccgagacaa

SEQ ID NO: 1625562 - RNA, 19 nt, Homo sapiens
  misc_RNA (1)...(19): siRNA sense strand
ccacauccgccacaagauc

SEQ ID NO: 1625563 - RNA, 19 nt, Homo sapiens
  misc_RNA (1)...(19): siRNA sense strand
uaaauucgggaaaggugaa

SEQ ID NO: 1625564 - RNA, 19 nt, Homo sapiens
  misc_RNA (1)...(19): siRNA sense strand
gcagaggaaagcgagaaga

SEQ ID NO: 1625565 - RNA, 19 nt, Homo sapiens
  misc_RNA (1)...(19): siRNA sense strand
caaggacgcggucugugau

SEQ ID NO: 1625566 - RNA, 19 nt, Homo sapiens
  misc_RNA (1)...(19): siRNA sense strand
gaaggaggcagaggaaagc

SEQ ID NO: 1625567 - RNA, 19 nt, Homo sapiens
  misc_RNA (1)...(19): siRNA sense strand
gacgcggucugugaucgaa

SEQ ID NO: 1625568 - RNA, 19 nt, Homo sapiens
  misc_RNA (1)...(19): siRNA sense strand
caacgccugacguggagaa

SEQ ID NO: 1625569 - RNA, 19 nt, Homo sapiens
  misc_RNA (1)...(19): siRNA sense strand
aaccacauccgccacaaga

SEQ ID NO: 1625570 - RNA, 19 nt, Homo sapiens
  misc_RNA (1)...(19): siRNA sense strand
gccgcauccugagaaguaa

SEQ ID NO: 1625571 - RNA, 19 nt, Homo sapiens
  misc_RNA (1)...(19): siRNA sense strand
agccgcauccugagaagua

SEQ ID NO: 1625572 - RNA, 19 nt, Homo sapiens
  misc_RNA (1)...(19): siRNA sense strand
ggacgcggucugugaucga

SEQ ID NO: 1625573 - RNA, 19 nt, Homo sapiens
  misc_RNA (1)...(19): siRNA sense strand
ccaaccacauccgccacaa

SEQ ID NO: 1625574 - RNA, 19 nt, Homo sapiens
  misc_RNA (1)...(19): siRNA sense strand
ggaaauccgagacaaauua

SEQ ID NO: 1625575 - RNA, 19 nt, Homo sapiens
  misc_RNA (1)...(19): siRNA sense strand
gaaacaccgugccgucagu

SEQ ID NO: 1625576 - RNA, 19 nt, Homo sapiens
  misc_RNA (1)...(19): siRNA sense strand
gaaguaaauucgggaaagg

SEQ ID NO: 1625577 - RNA, 19 nt, Homo sapiens
  misc_RNA (1)...(19): siRNA sense strand
gagacaaauuacucaagga

SEQ ID NO: 1625578 - RNA, 19 nt, Homo sapiens
  misc_RNA (1)...(19): siRNA sense strand
ggaaggaggcagaggaaag

SEQ ID NO: 1625579 - RNA, 19 nt, Homo sapiens
  misc_RNA (1)...(19): siRNA sense strand
gagaagaaggccaaacaca

SEQ ID NO: 1625580 - RNA, 19 nt, Homo sapiens
  misc_RNA (1)...(19): siRNA sense strand
ucaaggacgcggucuguga

SEQ ID NO: 1625581 - RNA, 19 nt, Homo sapiens
  misc_RNA (1)...(19): siRNA sense strand
gaagaaaauugaggaauac

SEQ ID NO: 1625582 - RNA, 19 nt, Homo sapiens
  misc_RNA (1)...(19): siRNA sense strand
cgccugacguggagaagaa

SEQ ID NO: 1625583 - RNA, 19 nt, Homo sapiens
  misc_RNA (1)...(19): siRNA sense strand
gcgagaagaaggccaaaca

SEQ ID NO: 1625584 - RNA, 19 nt, Homo sapiens
  misc_RNA (1)...(19): siRNA sense strand
gggaaauccgagacaaauu

SEQ ID NO: 1625585 - RNA, 19 nt, Homo sapiens
  misc_RNA (1)...(19): siRNA sense strand
gaggaaggaggcagaggaa

SEQ ID NO: 1625586 - RNA, 19 nt, Homo sapiens
  misc_RNA (1)...(19): siRNA sense strand
gaaauccgagacaaauuac

SEQ ID NO: 1625587 - RNA, 19 nt, Homo sapiens
  misc_RNA (1)...(19): siRNA sense strand
cagaggaaagcgagaagaa

SEQ ID NO: 1625588 - RNA, 19 nt, Homo sapiens
  misc_RNA (1)...(19): siRNA sense strand
gagaaguaaauucgggaaa

SEQ ID NO: 1625589 - RNA, 19 nt, Homo sapiens
  misc_RNA (1)...(19): siRNA sense strand
agaaguaaauucgggaaag

SEQ ID NO: 1625590 - RNA, 19 nt, Homo sapiens
  misc_RNA (1)...(19): siRNA sense strand
gcugggaaauccgagacaa

SEQ ID NO: 1625591 - RNA, 19 nt, Homo sapiens
  misc_RNA (1)...(19): siRNA sense strand
ccacauccgccacaagauc

SEQ ID NO: 1625592 - RNA, 19 nt, Homo sapiens
  misc_RNA (1)...(19): siRNA sense strand
uaaauucgggaaaggugaa

SEQ ID NO: 1625593 - RNA, 19 nt, Homo sapiens
  misc_RNA (1)...(19): siRNA sense strand
gcagaggaaagcgagaaga

SEQ ID NO: 1625594 - RNA, 19 nt, Homo sapiens
  misc_RNA (1)...(19): siRNA sense strand
caaggacgcggucugugau

SEQ ID NO: 1625595 - RNA, 19 nt, Homo sapiens
  misc_RNA (1)...(19): siRNA sense strand
gaaggaggcagaggaaagc

SEQ ID NO: 1625596 - RNA, 19 nt, Homo sapiens
  misc_RNA (1)...(19): siRNA sense strand
gacgcggucugugaucgaa

SEQ ID NO: 1625597 - RNA, 19 nt, Homo sapiens
  misc_RNA (1)...(19): siRNA sense strand
caacgccugacguggagaa

SEQ ID NO: 1625598 - RNA, 19 nt, Homo sapiens
  misc_RNA (1)...(19): siRNA sense strand
aaccacauccgccacaaga

SEQ ID NO: 1625599 - RNA, 19 nt, Homo sapiens
  misc_RNA (1)...(19): siRNA sense strand
gccgcauccugagaaguaa

SEQ ID NO: 1625600 - RNA, 19 nt, Homo sapiens
  misc_RNA (1)...(19): siRNA sense strand
agccgcauccugagaagua

SEQ ID NO: 1625601 - RNA, 19 nt, Homo sapiens
  misc_RNA (1)...(19): siRNA sense strand
ggacgcggucugugaucga

SEQ ID NO: 1625602 - RNA, 19 nt, Homo sapiens
  misc_RNA (1)...(19): siRNA sense strand
ccaaccacauccgccacaa

SEQ ID NO: 1625603 - RNA, 19 nt, Homo sapiens
  misc_RNA (1)...(19): siRNA sense strand
ggaaauccgagacaaauua

SEQ ID NO: 1625604 - RNA, 19 nt, Homo sapiens
  misc_RNA (1)...(19): siRNA sense strand
gaaacaccgugccgucagu

SEQ ID NO: 1625605 - RNA, 19 nt, Homo sapiens
  misc_RNA (1)...(19): siRNA sense strand
gaaguaaauucgggaaagg

SEQ ID NO: 1625606 - RNA, 19 nt, Homo sapiens
  misc_RNA (1)...(19): siRNA sense strand
gagacaaauuacucaagga

SEQ ID NO: 1625607 - RNA, 19 nt, Homo sapiens
  misc_RNA (1)...(19): siRNA sense strand
ggaaggaggcagaggaaag

SEQ ID NO: 1625608 - RNA, 19 nt, Homo sapiens
  misc_RNA (1)...(19): siRNA sense strand
gagaagaaggccaaacaca

SEQ ID NO: 1625609 - RNA, 19 nt, Homo sapiens
  misc_RNA (1)...(19): siRNA sense strand
ucaaggacgcggucuguga

SEQ ID NO: 1625610 - RNA, 19 nt, Homo sapiens
  misc_RNA (1)...(19): siRNA sense strand
gaagaaaauugaggaauac

SEQ ID NO: 1625611 - RNA, 19 nt, Homo sapiens
  misc_RNA (1)...(19): siRNA sense strand
cgccugacguggagaagaa

SEQ ID NO: 1625612 - RNA, 19 nt, Homo sapiens
  misc_RNA (1)...(19): siRNA sense strand
gcgagaagaaggccaaaca

SEQ ID NO: 1625613 - RNA, 19 nt, Homo sapiens
  misc_RNA (1)...(19): siRNA sense strand
gggaaauccgagacaaauu

SEQ ID NO: 1625614 - RNA, 19 nt, Homo sapiens
  misc_RNA (1)...(19): siRNA sense strand
gaggaaggaggcagaggaa

SEQ ID NO: 1625615 - RNA, 19 nt, Homo sapiens
  misc_RNA (1)...(19): siRNA sense strand
gaaauccgagacaaauuac

SEQ ID NO: 1625616 - RNA, 19 nt, Homo sapiens
  misc_RNA (1)...(19): siRNA sense strand
cagaggaaagcgagaagaa

SEQ ID NO: 1625617 - RNA, 19 nt, Homo sapiens
  misc_RNA (1)...(19): siRNA sense strand
gagaaguaaauucgggaaa

SEQ ID NO: 1625618 - RNA, 19 nt, Homo sapiens
  misc_RNA (1)...(19): siRNA sense strand
agaaguaaauucgggaaag

SEQ ID NO: 1625619 - RNA, 19 nt, Homo sapiens
  misc_RNA (1)...(19): siRNA sense strand
gcugggaaauccgagacaa

SEQ ID NO: 1625620 - RNA, 19 nt, Homo sapiens
  misc_RNA (1)...(19): siRNA sense strand
ccacauccgccacaagauc

SEQ ID NO: 1625621 - RNA, 19 nt, Homo sapiens
  misc_RNA (1)...(19): siRNA sense strand
uaaauucgggaaaggugaa

SEQ ID NO: 1625622 - RNA, 19 nt, Homo sapiens
  misc_RNA (1)...(19): siRNA sense strand
gcagaggaaagcgagaaga

SEQ ID NO: 1625623 - RNA, 19 nt, Homo sapiens
  misc_RNA (1)...(19): siRNA sense strand
caaggacgcggucugugau

SEQ ID NO: 1625624 - RNA, 19 nt, Homo sapiens
  misc_RNA (1)...(19): siRNA sense strand
gaaggaggcagaggaaagc

SEQ ID NO: 1625625 - RNA, 19 nt, Homo sapiens
  misc_RNA (1)...(19): siRNA sense strand
gacgcggucugugaucgaa

SEQ ID NO: 1625626 - RNA, 19 nt, Homo sapiens
  misc_RNA (1)...(19): siRNA sense strand
caacgccugacguggagaa

SEQ ID NO: 1625627 - RNA, 19 nt, Homo sapiens
  misc_RNA (1)...(19): siRNA sense strand
aaccacauccgccacaaga

SEQ ID NO: 1625628 - RNA, 19 nt, Homo sapiens
  misc_RNA (1)...(19): siRNA sense strand
gccgcauccugagaaguaa

SEQ ID NO: 1625629 - RNA, 19 nt, Homo sapiens
  misc_RNA (1)...(19): siRNA sense strand
agccgcauccugagaagua

SEQ ID NO: 1625630 - RNA, 19 nt, Homo sapiens
  misc_RNA (1)...(19): siRNA sense strand
ggacgcggucugugaucga

SEQ ID NO: 1625631 - RNA, 19 nt, Homo sapiens
  misc_RNA (1)...(19): siRNA sense strand
ccaaccacauccgccacaa

SEQ ID NO: 1625632 - RNA, 19 nt, Homo sapiens
  misc_RNA (1)...(19): siRNA sense strand
ggagcucagugaugacuug

SEQ ID NO: 1625633 - RNA, 19 nt, Homo sapiens
  misc_RNA (1)...(19): siRNA sense strand
ggaccaggaccaagaagug

SEQ ID NO: 1625634 - RNA, 19 nt, Homo sapiens
  misc_RNA (1)...(19): siRNA sense strand
gcucagugaugacuugcau

SEQ ID NO: 1625635 - RNA, 19 nt, Homo sapiens
  misc_RNA (1)...(19): siRNA sense strand
agcaggagcucagugauga

SEQ ID NO: 1625636 - RNA, 19 nt, Homo sapiens
  misc_RNA (1)...(19): siRNA sense strand
guggagcgcuaccgacagu

SEQ ID NO: 1625637 - RNA, 19 nt, Homo sapiens
  misc_RNA (1)...(19): siRNA sense strand
gaccaggaccaagaaguga

SEQ ID NO: 1625638 - RNA, 19 nt, Homo sapiens
  misc_RNA (1)...(19): siRNA sense strand
ggagcgcuaccgacaguuc

SEQ ID NO: 1625639 - RNA, 19 nt, Homo sapiens
  misc_RNA (1)...(19): siRNA sense strand
ucagugaugacuugcaugu

SEQ ID NO: 1625640 - RNA, 19 nt, Homo sapiens
  misc_RNA (1)...(19): siRNA sense strand
ggagcucagugaugacuug

SEQ ID NO: 1625641 - RNA, 19 nt, Homo sapiens
  misc_RNA (1)...(19): siRNA sense strand
ggaccaggaccaagaagug

SEQ ID NO: 1625642 - RNA, 19 nt, Homo sapiens
  misc_RNA (1)...(19): siRNA sense strand
gcucagugaugacuugcau

SEQ ID NO: 1625643 - RNA, 19 nt, Homo sapiens
  misc_RNA (1)...(19): siRNA sense strand
agcaggagcucagugauga

SEQ ID NO: 1625644 - RNA, 19 nt, Homo sapiens
  misc_RNA (1)...(19): siRNA sense strand
guggagcgcuaccgacagu

SEQ ID NO: 1625645 - RNA, 19 nt, Homo sapiens
  misc_RNA (1)...(19): siRNA sense strand
gaccaggaccaagaaguga

SEQ ID NO: 1625646 - RNA, 19 nt, Homo sapiens
  misc_RNA (1)...(19): siRNA sense strand
ggagcgcuaccgacaguuc

SEQ ID NO: 1625647 - RNA, 19 nt, Homo sapiens
  misc_RNA (1)...(19): siRNA sense strand
ucagugaugacuugcaugu

SEQ ID NO: 1625648 - RNA, 19 nt, Homo sapiens
  misc_RNA (1)...(19): siRNA sense strand
ggagcucagugaugacuug

SEQ ID NO: 1625649 - RNA, 19 nt, Homo sapiens
  misc_RNA (1)...(19): siRNA sense strand
ggaccaggaccaagaagug

SEQ ID NO: 1625650 - RNA, 19 nt, Homo sapiens
  misc_RNA (1)...(19): siRNA sense strand
gcucagugaugacuugcau

SEQ ID NO: 1625651 - RNA, 19 nt, Homo sapiens
  misc_RNA (1)...(19): siRNA sense strand
agcaggagcucagugauga

SEQ ID NO: 1625652 - RNA, 19 nt, Homo sapiens
  misc_RNA (1)...(19): siRNA sense strand
guggagcgcuaccgacagu

SEQ ID NO: 1625653 - RNA, 19 nt, Homo sapiens
  misc_RNA (1)...(19): siRNA sense strand
gaccaggaccaagaaguga

SEQ ID NO: 1625654 - RNA, 19 nt, Homo sapiens
  misc_RNA (1)...(19): siRNA sense strand
ggagcgcuaccgacaguuc

SEQ ID NO: 1625655 - RNA, 19 nt, Homo sapiens
  misc_RNA (1)...(19): siRNA sense strand
ucagugaugacuugcaugu

SEQ ID NO: 1625656 - RNA, 19 nt, Homo sapiens
  misc_RNA (1)...(19): siRNA sense strand
ggagcucagugaugacuug

SEQ ID NO: 1625657 - RNA, 19 nt, Homo sapiens
  misc_RNA (1)...(19): siRNA sense strand
ggaccaggaccaagaagug

SEQ ID NO: 1625658 - RNA, 19 nt, Homo sapiens
  misc_RNA (1)...(19): siRNA sense strand
gcucagugaugacuugcau

SEQ ID NO: 1625659 - RNA, 19 nt, Homo sapiens
  misc_RNA (1)...(19): siRNA sense strand
agcaggagcucagugauga

SEQ ID NO: 1625660 - RNA, 19 nt, Homo sapiens
  misc_RNA (1)...(19): siRNA sense strand
guggagcgcuaccgacagu

SEQ ID NO: 1625661 - RNA, 19 nt, Homo sapiens
  misc_RNA (1)...(19): siRNA sense strand
gaccaggaccaagaaguga

SEQ ID NO: 1625662 - RNA, 19 nt, Homo sapiens
  misc_RNA (1)...(19): siRNA sense strand
ggagcgcuaccgacaguuc

SEQ ID NO: 1625663 - RNA, 19 nt, Homo sapiens
  misc_RNA (1)...(19): siRNA sense strand
ucagugaugacuugcaugu

SEQ ID NO: 1625664 - RNA, 19 nt, Homo sapiens
  misc_RNA (1)...(19): siRNA sense strand
ggagcucagugaugacuug

SEQ ID NO: 1625665 - RNA, 19 nt, Homo sapiens
  misc_RNA (1)...(19): siRNA sense strand
ggaccaggaccaagaagug

SEQ ID NO: 1625666 - RNA, 19 nt, Homo sapiens
  misc_RNA (1)...(19): siRNA sense strand
gcucagugaugacuugcau

SEQ ID NO: 1625667 - RNA, 19 nt, Homo sapiens
  misc_RNA (1)...(19): siRNA sense strand
agcaggagcucagugauga

SEQ ID NO: 1625668 - RNA, 19 nt, Homo sapiens
  misc_RNA (1)...(19): siRNA sense strand
guggagcgcuaccgacagu

SEQ ID NO: 1625669 - RNA, 19 nt, Homo sapiens
  misc_RNA (1)...(19): siRNA sense strand
gaccaggaccaagaaguga

SEQ ID NO: 1625670 - RNA, 19 nt, Homo sapiens
  misc_RNA (1)...(19): siRNA sense strand
ggagcgcuaccgacaguuc

SEQ ID NO: 1625671 - RNA, 19 nt, Homo sapiens
  misc_RNA (1)...(19): siRNA sense strand
ucagugaugacuugcaugu

SEQ ID NO: 1625672 - RNA, 19 nt, Homo sapiens
  misc_RNA (1)...(19): siRNA sense strand
ggagcucagugaugacuug

SEQ ID NO: 1625673 - RNA, 19 nt, Homo sapiens
  misc_RNA (1)...(19): siRNA sense strand
ggaccaggaccaagaagug

SEQ ID NO: 1625674 - RNA, 19 nt, Homo sapiens
  misc_RNA (1)...(19): siRNA sense strand
gcucagugaugacuugcau

SEQ ID NO: 1625675 - RNA, 19 nt, Homo sapiens
  misc_RNA (1)...(19): siRNA sense strand
agcaggagcucagugauga

SEQ ID NO: 1625676 - RNA, 19 nt, Homo sapiens
  misc_RNA (1)...(19): siRNA sense strand
guggagcgcuaccgacagu

SEQ ID NO: 1625677 - RNA, 19 nt, Homo sapiens
  misc_RNA (1)...(19): siRNA sense strand
gaccaggaccaagaaguga

SEQ ID NO: 1625678 - RNA, 19 nt, Homo sapiens
  misc_RNA (1)...(19): siRNA sense strand
ggagcgcuaccgacaguuc

SEQ ID NO: 1625679 - RNA, 19 nt, Homo sapiens
  misc_RNA (1)...(19): siRNA sense strand
ucagugaugacuugcaugu

SEQ ID NO: 1625680 - RNA, 19 nt, Homo sapiens
  misc_RNA (1)...(19): siRNA sense strand
ggagcucagugaugacuug

SEQ ID NO: 1625681 - RNA, 19 nt, Homo sapiens
  misc_RNA (1)...(19): siRNA sense strand
ggaccaggaccaagaagug

SEQ ID NO: 1625682 - RNA, 19 nt, Homo sapiens
  misc_RNA (1)...(19): siRNA sense strand
gcucagugaugacuugcau

SEQ ID NO: 1625683 - RNA, 19 nt, Homo sapiens
  misc_RNA (1)...(19): siRNA sense strand
agcaggagcucagugauga

SEQ ID NO: 1625684 - RNA, 19 nt, Homo sapiens
  misc_RNA (1)...(19): siRNA sense strand
guggagcgcuaccgacagu

SEQ ID NO: 1625685 - RNA, 19 nt, Homo sapiens
  misc_RNA (1)...(19): siRNA sense strand
gaccaggaccaagaaguga

SEQ ID NO: 1625686 - RNA, 19 nt, Homo sapiens
  misc_RNA (1)...(19): siRNA sense strand
ggagcgcuaccgacaguuc

SEQ ID NO: 1625687 - RNA, 19 nt, Homo sapiens
  misc_RNA (1)...(19): siRNA sense strand
ucagugaugacuugcaugu

SEQ ID NO: 1625688 - RNA, 19 nt, Homo sapiens
  misc_RNA (1)...(19): siRNA sense strand
ggagcucagugaugacuug

SEQ ID NO: 1625689 - RNA, 19 nt, Homo sapiens
  misc_RNA (1)...(19): siRNA sense strand
ggaccaggaccaagaagug

SEQ ID NO: 1625690 - RNA, 19 nt, Homo sapiens
  misc_RNA (1)...(19): siRNA sense strand
gcucagugaugacuugcau

SEQ ID NO: 1625691 - RNA, 19 nt, Homo sapiens
  misc_RNA (1)...(19): siRNA sense strand
agcaggagcucagugauga

SEQ ID NO: 1625692 - RNA, 19 nt, Homo sapiens
  misc_RNA (1)...(19): siRNA sense strand
guggagcgcuaccgacagu

SEQ ID NO: 1625693 - RNA, 19 nt, Homo sapiens
  misc_RNA (1)...(19): siRNA sense strand
gaccaggaccaagaaguga

SEQ ID NO: 1625694 - RNA, 19 nt, Homo sapiens
  misc_RNA (1)...(19): siRNA sense strand
ggagcgcuaccgacaguuc

SEQ ID NO: 1625695 - RNA, 19 nt, Homo sapiens
  misc_RNA (1)...(19): siRNA sense strand
ucagugaugacuugcaugu

SEQ ID NO: 1625696 - RNA, 19 nt, Homo sapiens
  misc_RNA (1)...(19): siRNA sense strand
ggagcucagugaugacuug

SEQ ID NO: 1625697 - RNA, 19 nt, Homo sapiens
  misc_RNA (1)...(19): siRNA sense strand
ggaccaggaccaagaagug

SEQ ID NO: 1625698 - RNA, 19 nt, Homo sapiens
  misc_RNA (1)...(19): siRNA sense strand
gcucagugaugacuugcau

SEQ ID NO: 1625699 - RNA, 19 nt, Homo sapiens
  misc_RNA (1)...(19): siRNA sense strand
agcaggagcucagugauga

SEQ ID NO: 1625700 - RNA, 19 nt, Homo sapiens
  misc_RNA (1)...(19): siRNA sense strand
guggagcgcuaccgacagu

SEQ ID NO: 1625701 - RNA, 19 nt, Homo sapiens
  misc_RNA (1)...(19): siRNA sense strand
gaccaggaccaagaaguga

SEQ ID NO: 1625702 - RNA, 19 nt, Homo sapiens
  misc_RNA (1)...(19): siRNA sense strand
ggagcgcuaccgacaguuc

SEQ ID NO: 1625703 - RNA, 19 nt, Homo sapiens
  misc_RNA (1)...(19): siRNA sense strand
ucagugaugacuugcaugu

SEQ ID NO: 1625704 - RNA, 19 nt, Homo sapiens
  misc_RNA (1)...(19): siRNA sense strand
ggagcucagugaugacuug

SEQ ID NO: 1625705 - RNA, 19 nt, Homo sapiens
  misc_RNA (1)...(19): siRNA sense strand
ggaccaggaccaagaagug

SEQ ID NO: 1625706 - RNA, 19 nt, Homo sapiens
  misc_RNA (1)...(19): siRNA sense strand
gcucagugaugacuugcau

SEQ ID NO: 1625707 - RNA, 19 nt, Homo sapiens
  misc_RNA (1)...(19): siRNA sense strand
agcaggagcucagugauga

SEQ ID NO: 1625708 - RNA, 19 nt, Homo sapiens
  misc_RNA (1)...(19): siRNA sense strand
guggagcgcuaccgacagu

SEQ ID NO: 1625709 - RNA, 19 nt, Homo sapiens
  misc_RNA (1)...(19): siRNA sense strand
gaccaggaccaagaaguga

SEQ ID NO: 1625710 - RNA, 19 nt, Homo sapiens
  misc_RNA (1)...(19): siRNA sense strand
ggagcgcuaccgacaguuc

SEQ ID NO: 1625711 - RNA, 19 nt, Homo sapiens
  misc_RNA (1)...(19): siRNA sense strand
ucagugaugacuugcaugu

SEQ ID NO: 1625712 - RNA, 19 nt, Homo sapiens
  misc_RNA (1)...(19): siRNA sense strand
ggagcucagugaugacuug

SEQ ID NO: 1625713 - RNA, 19 nt, Homo sapiens
  misc_RNA (1)...(19): siRNA sense strand
ggaccaggaccaagaagug

SEQ ID NO: 1625714 - RNA, 19 nt, Homo sapiens
  misc_RNA (1)...(19): siRNA sense strand
gcucagugaugacuugcau

SEQ ID NO: 1625715 - RNA, 19 nt, Homo sapiens
  misc_RNA (1)...(19): siRNA sense strand
agcaggagcucagugauga

SEQ ID NO: 1625716 - RNA, 19 nt, Homo sapiens
  misc_RNA (1)...(19): siRNA sense strand
guggagcgcuaccgacagu

SEQ ID NO: 1625717 - RNA, 19 nt, Homo sapiens
  misc_RNA (1)...(19): siRNA sense strand
gaccaggaccaagaaguga

SEQ ID NO: 1625718 - RNA, 19 nt, Homo sapiens
  misc_RNA (1)...(19): siRNA sense strand
ggagcgcuaccgacaguuc

SEQ ID NO: 1625719 - RNA, 19 nt, Homo sapiens
  misc_RNA (1)...(19): siRNA sense strand
ucagugaugacuugcaugu

SEQ ID NO: 1625720 - RNA, 19 nt, Homo sapiens
  misc_RNA (1)...(19): siRNA sense strand
ggagcucagugaugacuug

SEQ ID NO: 1625721 - RNA, 19 nt, Homo sapiens
  misc_RNA (1)...(19): siRNA sense strand
ggaccaggaccaagaagug

SEQ ID NO: 1625722 - RNA, 19 nt, Homo sapiens
  misc_RNA (1)...(19): siRNA sense strand
gcucagugaugacuugcau

SEQ ID NO: 1625723 - RNA, 19 nt, Homo sapiens
  misc_RNA (1)...(19): siRNA sense strand
agcaggagcucagugauga

SEQ ID NO: 1625724 - RNA, 19 nt, Homo sapiens
  misc_RNA (1)...(19): siRNA sense strand
guggagcgcuaccgacagu

SEQ ID NO: 1625725 - RNA, 19 nt, Homo sapiens
  misc_RNA (1)...(19): siRNA sense strand
gaccaggaccaagaaguga

SEQ ID NO: 1625726 - RNA, 19 nt, Homo sapiens
  misc_RNA (1)...(19): siRNA sense strand
ggagcgcuaccgacaguuc

SEQ ID NO: 1625727 - RNA, 19 nt, Homo sapiens
  misc_RNA (1)...(19): siRNA sense strand
ucagugaugacuugcaugu

SEQ ID NO: 1625728 - RNA, 19 nt, Homo sapiens
  misc_RNA (1)...(19): siRNA sense strand
ggagcucagugaugacuug

SEQ ID NO: 1625729 - RNA, 19 nt, Homo sapiens
  misc_RNA (1)...(19): siRNA sense strand
ggaccaggaccaagaagug

SEQ ID NO: 1625730 - RNA, 19 nt, Homo sapiens
  misc_RNA (1)...(19): siRNA sense strand
gcucagugaugacuugcau

SEQ ID NO: 1625731 - RNA, 19 nt, Homo sapiens
  misc_RNA (1)...(19): siRNA sense strand
agcaggagcucagugauga

SEQ ID NO: 1625732 - RNA, 19 nt, Homo sapiens
  misc_RNA (1)...(19): siRNA sense strand
guggagcgcuaccgacagu

SEQ ID NO: 1625733 - RNA, 19 nt, Homo sapiens
  misc_RNA (1)...(19): siRNA sense strand
gaccaggaccaagaaguga

SEQ ID NO: 1625734 - RNA, 19 nt, Homo sapiens
  misc_RNA (1)...(19): siRNA sense strand
ggagcgcuaccgacaguuc

SEQ ID NO: 1625735 - RNA, 19 nt, Homo sapiens
  misc_RNA (1)...(19): siRNA sense strand
ucagugaugacuugcaugu

SEQ ID NO: 1625736 - RNA, 19 nt, Homo sapiens
  misc_RNA (1)...(19): siRNA sense strand
ggagcucagugaugacuug

SEQ ID NO: 1625737 - RNA, 19 nt, Homo sapiens
  misc_RNA (1)...(19): siRNA sense strand
ggaccaggaccaagaagug

SEQ ID NO: 1625738 - RNA, 19 nt, Homo sapiens
  misc_RNA (1)...(19): siRNA sense strand
gcucagugaugacuugcau

SEQ ID NO: 1625739 - RNA, 19 nt, Homo sapiens
  misc_RNA (1)...(19): siRNA sense strand
agcaggagcucagugauga

SEQ ID NO: 1625740 - RNA, 19 nt, Homo sapiens
  misc_RNA (1)...(19): siRNA sense strand
guggagcgcuaccgacagu

SEQ ID NO: 1625741 - RNA, 19 nt, Homo sapiens
  misc_RNA (1)...(19): siRNA sense strand
gaccaggaccaagaaguga

SEQ ID NO: 1625742 - RNA, 19 nt, Homo sapiens
  misc_RNA (1)...(19): siRNA sense strand
ggagcgcuaccgacaguuc

SEQ ID NO: 1625743 - RNA, 19 nt, Homo sapiens
  misc_RNA (1)...(19): siRNA sense strand
ucagugaugacuugcaugu

SEQ ID NO: 1625744 - RNA, 19 nt, Homo sapiens
  misc_RNA (1)...(19): siRNA sense strand
ggagcucagugaugacuug

SEQ ID NO: 1625745 - RNA, 19 nt, Homo sapiens
  misc_RNA (1)...(19): siRNA sense strand
ggaccaggaccaagaagug

SEQ ID NO: 1625746 - RNA, 19 nt, Homo sapiens
  misc_RNA (1)...(19): siRNA sense strand
gcucagugaugacuugcau

SEQ ID NO: 1625747 - RNA, 19 nt, Homo sapiens
  misc_RNA (1)...(19): siRNA sense strand
agcaggagcucagugauga

SEQ ID NO: 1625748 - RNA, 19 nt, Homo sapiens
  misc_RNA (1)...(19): siRNA sense strand
guggagcgcuaccgacagu

SEQ ID NO: 1625749 - RNA, 19 nt, Homo sapiens
  misc_RNA (1)...(19): siRNA sense strand
gaccaggaccaagaaguga

SEQ ID NO: 1625750 - RNA, 19 nt, Homo sapiens
  misc_RNA (1)...(19): siRNA sense strand
ggagcgcuaccgacaguuc

SEQ ID NO: 1625751 - RNA, 19 nt, Homo sapiens
  misc_RNA (1)...(19): siRNA sense strand
ucagugaugacuugcaugu

SEQ ID NO: 1625752 - RNA, 19 nt, Homo sapiens
  misc_RNA (1)...(19): siRNA sense strand
ggagcucagugaugacuug

SEQ ID NO: 1625753 - RNA, 19 nt, Homo sapiens
  misc_RNA (1)...(19): siRNA sense strand
ggaccaggaccaagaagug

SEQ ID NO: 1625754 - RNA, 19 nt, Homo sapiens
  misc_RNA (1)...(19): siRNA sense strand
gcucagugaugacuugcau

SEQ ID NO: 1625755 - RNA, 19 nt, Homo sapiens
  misc_RNA (1)...(19): siRNA sense strand
agcaggagcucagugauga

SEQ ID NO: 1625756 - RNA, 19 nt, Homo sapiens
  misc_RNA (1)...(19): siRNA sense strand
guggagcgcuaccgacagu

SEQ ID NO: 1625757 - RNA, 19 nt, Homo sapiens
  misc_RNA (1)...(19): siRNA sense strand
gaccaggaccaagaaguga

SEQ ID NO: 1625758 - RNA, 19 nt, Homo sapiens
  misc_RNA (1)...(19): siRNA sense strand
ggagcgcuaccgacaguuc

SEQ ID NO: 1625759 - RNA, 19 nt, Homo sapiens
  misc_RNA (1)...(19): siRNA sense strand
ucagugaugacuugcaugu

SEQ ID NO: 1625760 - RNA, 19 nt, Homo sapiens
  misc_RNA (1)...(19): siRNA sense strand
ggagcucagugaugacuug

SEQ ID NO: 1625761 - RNA, 19 nt, Homo sapiens
  misc_RNA (1)...(19): siRNA sense strand
ggaccaggaccaagaagug

SEQ ID NO: 1625762 - RNA, 19 nt, Homo sapiens
  misc_RNA (1)...(19): siRNA sense strand
gcucagugaugacuugcau

SEQ ID NO: 1625763 - RNA, 19 nt, Homo sapiens
  misc_RNA (1)...(19): siRNA sense strand
agcaggagcucagugauga

SEQ ID NO: 1625764 - RNA, 19 nt, Homo sapiens
  misc_RNA (1)...(19): siRNA sense strand
guggagcgcuaccgacagu

SEQ ID NO: 1625765 - RNA, 19 nt, Homo sapiens
  misc_RNA (1)...(19): siRNA sense strand
gaccaggaccaagaaguga

SEQ ID NO: 1625766 - RNA, 19 nt, Homo sapiens
  misc_RNA (1)...(19): siRNA sense strand
ggagcgcuaccgacaguuc

SEQ ID NO: 1625767 - RNA, 19 nt, Homo sapiens
  misc_RNA (1)...(19): siRNA sense strand
ucagugaugacuugcaugu

SEQ ID NO: 1625768 - RNA, 19 nt, Homo sapiens
  misc_RNA (1)...(19): siRNA sense strand
ggagcucagugaugacuug

SEQ ID NO: 1625769 - RNA, 19 nt, Homo sapiens
  misc_RNA (1)...(19): siRNA sense strand
ggaccaggaccaagaagug

SEQ ID NO: 1625770 - RNA, 19 nt, Homo sapiens
  misc_RNA (1)...(19): siRNA sense strand
gcucagugaugacuugcau

SEQ ID NO: 1625771 - RNA, 19 nt, Homo sapiens
  misc_RNA (1)...(19): siRNA sense strand
agcaggagcucagugauga

SEQ ID NO: 1625772 - RNA, 19 nt, Homo sapiens
  misc_RNA (1)...(19): siRNA sense strand
guggagcgcuaccgacagu

SEQ ID NO: 1625773 - RNA, 19 nt, Homo sapiens
  misc_RNA (1)...(19): siRNA sense strand
gaccaggaccaagaaguga

SEQ ID NO: 1625774 - RNA, 19 nt, Homo sapiens
  misc_RNA (1)...(19): siRNA sense strand
ggagcgcuaccgacaguuc

SEQ ID NO: 1625775 - RNA, 19 nt, Homo sapiens
  misc_RNA (1)...(19): siRNA sense strand
ucagugaugacuugcaugu

SEQ ID NO: 1625776 - RNA, 19 nt, Homo sapiens
  misc_RNA (1)...(19): siRNA sense strand
ggagcucagugaugacuug

SEQ ID NO: 1625777 - RNA, 19 nt, Homo sapiens
  misc_RNA (1)...(19): siRNA sense strand
ggaccaggaccaagaagug

SEQ ID NO: 1625778 - RNA, 19 nt, Homo sapiens
  misc_RNA (1)...(19): siRNA sense strand
gcucagugaugacuugcau

SEQ ID NO: 1625779 - RNA, 19 nt, Homo sapiens
  misc_RNA (1)...(19): siRNA sense strand
agcaggagcucagugauga

SEQ ID NO: 1625780 - RNA, 19 nt, Homo sapiens
  misc_RNA (1)...(19): siRNA sense strand
guggagcgcuaccgacagu

SEQ ID NO: 1625781 - RNA, 19 nt, Homo sapiens
  misc_RNA (1)...(19): siRNA sense strand
gaccaggaccaagaaguga

SEQ ID NO: 1625782 - RNA, 19 nt, Homo sapiens
  misc_RNA (1)...(19): siRNA sense strand
ggagcgcuaccgacaguuc

SEQ ID NO: 1625783 - RNA, 19 nt, Homo sapiens
  misc_RNA (1)...(19): siRNA sense strand
ucagugaugacuugcaugu

SEQ ID NO: 1625784 - RNA, 19 nt, Homo sapiens
  misc_RNA (1)...(19): siRNA sense strand
ggagcucagugaugacuug

SEQ ID NO: 1625785 - RNA, 19 nt, Homo sapiens
  misc_RNA (1)...(19): siRNA sense strand
ggaccaggaccaagaagug

SEQ ID NO: 1625786 - RNA, 19 nt, Homo sapiens
  misc_RNA (1)...(19): siRNA sense strand
gcucagugaugacuugcau

SEQ ID NO: 1625787 - RNA, 19 nt, Homo sapiens
  misc_RNA (1)...(19): siRNA sense strand
agcaggagcucagugauga

SEQ ID NO: 1625788 - RNA, 19 nt, Homo sapiens
  misc_RNA (1)...(19): siRNA sense strand
guggagcgcuaccgacagu

SEQ ID NO: 1625789 - RNA, 19 nt, Homo sapiens
  misc_RNA (1)...(19): siRNA sense strand
gaccaggaccaagaaguga

SEQ ID NO: 1625790 - RNA, 19 nt, Homo sapiens
  misc_RNA (1)...(19): siRNA sense strand
ggagcgcuaccgacaguuc

SEQ ID NO: 1625791 - RNA, 19 nt, Homo sapiens
  misc_RNA (1)...(19): siRNA sense strand
ucagugaugacuugcaugu

SEQ ID NO: 1625792 - RNA, 19 nt, Homo sapiens
  misc_RNA (1)...(19): siRNA sense strand
ggagcucagugaugacuug

SEQ ID NO: 1625793 - RNA, 19 nt, Homo sapiens
  misc_RNA (1)...(19): siRNA sense strand
ggaccaggaccaagaagug

SEQ ID NO: 1625794 - RNA, 19 nt, Homo sapiens
  misc_RNA (1)...(19): siRNA sense strand
gcucagugaugacuugcau

SEQ ID NO: 1625795 - RNA, 19 nt, Homo sapiens
  misc_RNA (1)...(19): siRNA sense strand
agcaggagcucagugauga

SEQ ID NO: 1625796 - RNA, 19 nt, Homo sapiens
  misc_RNA (1)...(19): siRNA sense strand
guggagcgcuaccgacagu

SEQ ID NO: 1625797 - RNA, 19 nt, Homo sapiens
  misc_RNA (1)...(19): siRNA sense strand
gaccaggaccaagaaguga

SEQ ID NO: 1625798 - RNA, 19 nt, Homo sapiens
  misc_RNA (1)...(19): siRNA sense strand
ggagcgcuaccgacaguuc

SEQ ID NO: 1625799 - RNA, 19 nt, Homo sapiens
  misc_RNA (1)...(19): siRNA sense strand
ucagugaugacuugcaugu

SEQ ID NO: 1625800 - RNA, 19 nt, Homo sapiens
  misc_RNA (1)...(19): siRNA sense strand
ggagcucagugaugacuug

SEQ ID NO: 1625801 - RNA, 19 nt, Homo sapiens
  misc_RNA (1)...(19): siRNA sense strand
ggaccaggaccaagaagug

SEQ ID NO: 1625802 - RNA, 19 nt, Homo sapiens
  misc_RNA (1)...(19): siRNA sense strand
gcucagugaugacuugcau

SEQ ID NO: 1625803 - RNA, 19 nt, Homo sapiens
  misc_RNA (1)...(19): siRNA sense strand
agcaggagcucagugauga

SEQ ID NO: 1625804 - RNA, 19 nt, Homo sapiens
  misc_RNA (1)...(19): siRNA sense strand
guggagcgcuaccgacagu

SEQ ID NO: 1625805 - RNA, 19 nt, Homo sapiens
  misc_RNA (1)...(19): siRNA sense strand
gaccaggaccaagaaguga

SEQ ID NO: 1625806 - RNA, 19 nt, Homo sapiens
  misc_RNA (1)...(19): siRNA sense strand
ggagcgcuaccgacaguuc

SEQ ID NO: 1625807 - RNA, 19 nt, Homo sapiens
  misc_RNA (1)...(19): siRNA sense strand
ucagugaugacuugcaugu

SEQ ID NO: 1625808 - RNA, 19 nt, Homo sapiens
  misc_RNA (1)...(19): siRNA sense strand
ggagcucagugaugacuug

SEQ ID NO: 1625809 - RNA, 19 nt, Homo sapiens
  misc_RNA (1)...(19): siRNA sense strand
ggaccaggaccaagaagug

SEQ ID NO: 1625810 - RNA, 19 nt, Homo sapiens
  misc_RNA (1)...(19): siRNA sense strand
gcucagugaugacuugcau

SEQ ID NO: 1625811 - RNA, 19 nt, Homo sapiens
  misc_RNA (1)...(19): siRNA sense strand
agcaggagcucagugauga

SEQ ID NO: 1625812 - RNA, 19 nt, Homo sapiens
  misc_RNA (1)...(19): siRNA sense strand
guggagcgcuaccgacagu

SEQ ID NO: 1625813 - RNA, 19 nt, Homo sapiens
  misc_RNA (1)...(19): siRNA sense strand
gaccaggaccaagaaguga

SEQ ID NO: 1625814 - RNA, 19 nt, Homo sapiens
  misc_RNA (1)...(19): siRNA sense strand
ggagcgcuaccgacaguuc

SEQ ID NO: 1625815 - RNA, 19 nt, Homo sapiens
  misc_RNA (1)...(19): siRNA sense strand
ucagugaugacuugcaugu

SEQ ID NO: 1625816 - RNA, 19 nt, Homo sapiens
  misc_RNA (1)...(19): siRNA sense strand
ggagcucagugaugacuug

SEQ ID NO: 1625817 - RNA, 19 nt, Homo sapiens
  misc_RNA (1)...(19): siRNA sense strand
ggaccaggaccaagaagug

SEQ ID NO: 1625818 - RNA, 19 nt, Homo sapiens
  misc_RNA (1)...(19): siRNA sense strand
gcucagugaugacuugcau

SEQ ID NO: 1625819 - RNA, 19 nt, Homo sapiens
  misc_RNA (1)...(19): siRNA sense strand
agcaggagcucagugauga

SEQ ID NO: 1625820 - RNA, 19 nt, Homo sapiens
  misc_RNA (1)...(19): siRNA sense strand
guggagcgcuaccgacagu

SEQ ID NO: 1625821 - RNA, 19 nt, Homo sapiens
  misc_RNA (1)...(19): siRNA sense strand
gaccaggaccaagaaguga

SEQ ID NO: 1625822 - RNA, 19 nt, Homo sapiens
  misc_RNA (1)...(19): siRNA sense strand
ggagcgcuaccgacaguuc

SEQ ID NO: 1625823 - RNA, 19 nt, Homo sapiens
  misc_RNA (1)...(19): siRNA sense strand
ucagugaugacuugcaugu

SEQ ID NO: 1625824 - RNA, 19 nt, Homo sapiens
  misc_RNA (1)...(19): siRNA sense strand
ggaaugacucugacuuuga

SEQ ID NO: 1625825 - RNA, 19 nt, Homo sapiens
  misc_RNA (1)...(19): siRNA sense strand
gggaaugacucugacuuug

SEQ ID NO: 1625826 - RNA, 19 nt, Homo sapiens
  misc_RNA (1)...(19): siRNA sense strand
gaaugacucugacuuugag

SEQ ID NO: 1625827 - RNA, 19 nt, Homo sapiens
  misc_RNA (1)...(19): siRNA sense strand
guuaaaaccugcaaagcua

SEQ ID NO: 1625828 - RNA, 19 nt, Homo sapiens
  misc_RNA (1)...(19): siRNA sense strand
ccaaguccgugcuguuugu

SEQ ID NO: 1625829 - RNA, 19 nt, Homo sapiens
  misc_RNA (1)...(19): siRNA sense strand
ggaaacuuguaaccgauca

SEQ ID NO: 1625830 - RNA, 19 nt, Homo sapiens
  misc_RNA (1)...(19): siRNA sense strand
ucugagagauuugaauaga

SEQ ID NO: 1625831 - RNA, 19 nt, Homo sapiens
  misc_RNA (1)...(19): siRNA sense strand
ggaugaaagcaaucugaga

SEQ ID NO: 1625832 - RNA, 19 nt, Homo sapiens
  misc_RNA (1)...(19): siRNA sense strand
ggguaacauuugucgauca

SEQ ID NO: 1625833 - RNA, 19 nt, Homo sapiens
  misc_RNA (1)...(19): siRNA sense strand
gaacuacuugggagcuaug

SEQ ID NO: 1625834 - RNA, 19 nt, Homo sapiens
  misc_RNA (1)...(19): siRNA sense strand
cugagagauuugaauagaa

SEQ ID NO: 1625835 - RNA, 19 nt, Homo sapiens
  misc_RNA (1)...(19): siRNA sense strand
cugcaaagcuaaaauugaa

SEQ ID NO: 1625836 - RNA, 19 nt, Homo sapiens
  misc_RNA (1)...(19): siRNA sense strand
uugaagaucccuauuaugg

SEQ ID NO: 1625837 - RNA, 19 nt, Homo sapiens
  misc_RNA (1)...(19): siRNA sense strand
cagauuaccaaagaagauu

SEQ ID NO: 1625838 - RNA, 19 nt, Homo sapiens
  misc_RNA (1)...(19): siRNA sense strand
cagaagcaguuuucaggaa

SEQ ID NO: 1625839 - RNA, 19 nt, Homo sapiens
  misc_RNA (1)...(19): siRNA sense strand
uaccaaguccgugcuguuu

SEQ ID NO: 1625840 - RNA, 19 nt, Homo sapiens
  misc_RNA (1)...(19): siRNA sense strand
aagaagauuuugccacauu

SEQ ID NO: 1625841 - RNA, 19 nt, Homo sapiens
  misc_RNA (1)...(19): siRNA sense strand
ugaacuacuugggagcuau

SEQ ID NO: 1625842 - RNA, 19 nt, Homo sapiens
  misc_RNA (1)...(19): siRNA sense strand
aaacuuguaaccgaucaaa

SEQ ID NO: 1625843 - RNA, 19 nt, Homo sapiens
  misc_RNA (1)...(19): siRNA sense strand
ugggaaugacucugacuuu

SEQ ID NO: 1625844 - RNA, 19 nt, Homo sapiens
  misc_RNA (1)...(19): siRNA sense strand
ugggagcuaugauccacaa

SEQ ID NO: 1625845 - RNA, 19 nt, Homo sapiens
  misc_RNA (1)...(19): siRNA sense strand
gguaacauuugucgaucac

SEQ ID NO: 1625846 - RNA, 19 nt, Homo sapiens
  misc_RNA (1)...(19): siRNA sense strand
cggaacaggcuaccaaguc

SEQ ID NO: 1625847 - RNA, 19 nt, Homo sapiens
  misc_RNA (1)...(19): siRNA sense strand
ggaaugacucugacuuuga

SEQ ID NO: 1625848 - RNA, 19 nt, Homo sapiens
  misc_RNA (1)...(19): siRNA sense strand
gggaaugacucugacuuug

SEQ ID NO: 1625849 - RNA, 19 nt, Homo sapiens
  misc_RNA (1)...(19): siRNA sense strand
gaaugacucugacuuugag

SEQ ID NO: 1625850 - RNA, 19 nt, Homo sapiens
  misc_RNA (1)...(19): siRNA sense strand
guuaaaaccugcaaagcua

SEQ ID NO: 1625851 - RNA, 19 nt, Homo sapiens
  misc_RNA (1)...(19): siRNA sense strand
ccaaguccgugcuguuugu

SEQ ID NO: 1625852 - RNA, 19 nt, Homo sapiens
  misc_RNA (1)...(19): siRNA sense strand
ggaaacuuguaaccgauca

SEQ ID NO: 1625853 - RNA, 19 nt, Homo sapiens
  misc_RNA (1)...(19): siRNA sense strand
ucugagagauuugaauaga

SEQ ID NO: 1625854 - RNA, 19 nt, Homo sapiens
  misc_RNA (1)...(19): siRNA sense strand
ggaugaaagcaaucugaga

SEQ ID NO: 1625855 - RNA, 19 nt, Homo sapiens
  misc_RNA (1)...(19): siRNA sense strand
ggguaacauuugucgauca

SEQ ID NO: 1625856 - RNA, 19 nt, Homo sapiens
  misc_RNA (1)...(19): siRNA sense strand
gaacuacuugggagcuaug

SEQ ID NO: 1625857 - RNA, 19 nt, Homo sapiens
  misc_RNA (1)...(19): siRNA sense strand
cugagagauuugaauagaa

SEQ ID NO: 1625858 - RNA, 19 nt, Homo sapiens
  misc_RNA (1)...(19): siRNA sense strand
cugcaaagcuaaaauugaa

SEQ ID NO: 1625859 - RNA, 19 nt, Homo sapiens
  misc_RNA (1)...(19): siRNA sense strand
uugaagaucccuauuaugg

SEQ ID NO: 1625860 - RNA, 19 nt, Homo sapiens
  misc_RNA (1)...(19): siRNA sense strand
cagauuaccaaagaagauu

SEQ ID NO: 1625861 - RNA, 19 nt, Homo sapiens
  misc_RNA (1)...(19): siRNA sense strand
cagaagcaguuuucaggaa

SEQ ID NO: 1625862 - RNA, 19 nt, Homo sapiens
  misc_RNA (1)...(19): siRNA sense strand
uaccaaguccgugcuguuu

SEQ ID NO: 1625863 - RNA, 19 nt, Homo sapiens
  misc_RNA (1)...(19): siRNA sense strand
aagaagauuuugccacauu

SEQ ID NO: 1625864 - RNA, 19 nt, Homo sapiens
  misc_RNA (1)...(19): siRNA sense strand
ugaacuacuugggagcuau

SEQ ID NO: 1625865 - RNA, 19 nt, Homo sapiens
  misc_RNA (1)...(19): siRNA sense strand
aaacuuguaaccgaucaaa

SEQ ID NO: 1625866 - RNA, 19 nt, Homo sapiens
  misc_RNA (1)...(19): siRNA sense strand
ugggaaugacucugacuuu

SEQ ID NO: 1625867 - RNA, 19 nt, Homo sapiens
  misc_RNA (1)...(19): siRNA sense strand
ugggagcuaugauccacaa

SEQ ID NO: 1625868 - RNA, 19 nt, Homo sapiens
  misc_RNA (1)...(19): siRNA sense strand
gguaacauuugucgaucac

SEQ ID NO: 1625869 - RNA, 19 nt, Homo sapiens
  misc_RNA (1)...(19): siRNA sense strand
cggaacaggcuaccaaguc

SEQ ID NO: 1625870 - RNA, 19 nt, Homo sapiens
  misc_RNA (1)...(19): siRNA sense strand
ccaaguccgugcuguuugu

SEQ ID NO: 1625871 - RNA, 19 nt, Homo sapiens
  misc_RNA (1)...(19): siRNA sense strand
ggaaacuuguaaccgauca

SEQ ID NO: 1625872 - RNA, 19 nt, Homo sapiens
  misc_RNA (1)...(19): siRNA sense strand
ggguaacauuugucgauca

SEQ ID NO: 1625873 - RNA, 19 nt, Homo sapiens
  misc_RNA (1)...(19): siRNA sense strand
uaccaaguccgugcuguuu

SEQ ID NO: 1625874 - RNA, 19 nt, Homo sapiens
  misc_RNA (1)...(19): siRNA sense strand
cagaagcaguuuucaggaa

SEQ ID NO: 1625875 - RNA, 19 nt, Homo sapiens
  misc_RNA (1)...(19): siRNA sense strand
aaacuuguaaccgaucaaa

SEQ ID NO: 1625876 - RNA, 19 nt, Homo sapiens
  misc_RNA (1)...(19): siRNA sense strand
gguaacauuugucgaucac

SEQ ID NO: 1625877 - RNA, 19 nt, Homo sapiens
  misc_RNA (1)...(19): siRNA sense strand
cggaacaggcuaccaaguc

SEQ ID NO: 1625878 - RNA, 19 nt, Homo sapiens
  misc_RNA (1)...(19): siRNA sense strand
ggaaugacucugacuuuga

SEQ ID NO: 1625879 - RNA, 19 nt, Homo sapiens
  misc_RNA (1)...(19): siRNA sense strand
gggaaugacucugacuuug

SEQ ID NO: 1625880 - RNA, 19 nt, Homo sapiens
  misc_RNA (1)...(19): siRNA sense strand
gaaugacucugacuuugag

SEQ ID NO: 1625881 - RNA, 19 nt, Homo sapiens
  misc_RNA (1)...(19): siRNA sense strand
guuaaaaccugcaaagcua

SEQ ID NO: 1625882 - RNA, 19 nt, Homo sapiens
  misc_RNA (1)...(19): siRNA sense strand
ccaaguccgugcuguuugu

SEQ ID NO: 1625883 - RNA, 19 nt, Homo sapiens
  misc_RNA (1)...(19): siRNA sense strand
ggaaacuuguaaccgauca

SEQ ID NO: 1625884 - RNA, 19 nt, Homo sapiens
  misc_RNA (1)...(19): siRNA sense strand
ucugagagauuugaauaga

SEQ ID NO: 1625885 - RNA, 19 nt, Homo sapiens
  misc_RNA (1)...(19): siRNA sense strand
ggaugaaagcaaucugaga

SEQ ID NO: 1625886 - RNA, 19 nt, Homo sapiens
  misc_RNA (1)...(19): siRNA sense strand
ggguaacauuugucgauca

SEQ ID NO: 1625887 - RNA, 19 nt, Homo sapiens
  misc_RNA (1)...(19): siRNA sense strand
gaacuacuugggagcuaug

SEQ ID NO: 1625888 - RNA, 19 nt, Homo sapiens
  misc_RNA (1)...(19): siRNA sense strand
cugagagauuugaauagaa

SEQ ID NO: 1625889 - RNA, 19 nt, Homo sapiens
  misc_RNA (1)...(19): siRNA sense strand
cugcaaagcuaaaauugaa

SEQ ID NO: 1625890 - RNA, 19 nt, Homo sapiens
  misc_RNA (1)...(19): siRNA sense strand
uugaagaucccuauuaugg

SEQ ID NO: 1625891 - RNA, 19 nt, Homo sapiens
  misc_RNA (1)...(19): siRNA sense strand
cagauuaccaaagaagauu

SEQ ID NO: 1625892 - RNA, 19 nt, Homo sapiens
  misc_RNA (1)...(19): siRNA sense strand
cagaagcaguuuucaggaa

SEQ ID NO: 1625893 - RNA, 19 nt, Homo sapiens
  misc_RNA (1)...(19): siRNA sense strand
uaccaaguccgugcuguuu

SEQ ID NO: 1625894 - RNA, 19 nt, Homo sapiens
  misc_RNA (1)...(19): siRNA sense strand
aagaagauuuugccacauu

SEQ ID NO: 1625895 - RNA, 19 nt, Homo sapiens
  misc_RNA (1)...(19): siRNA sense strand
ugaacuacuugggagcuau

SEQ ID NO: 1625896 - RNA, 19 nt, Homo sapiens
  misc_RNA (1)...(19): siRNA sense strand
aaacuuguaaccgaucaaa

SEQ ID NO: 1625897 - RNA, 19 nt, Homo sapiens
  misc_RNA (1)...(19): siRNA sense strand
ugggaaugacucugacuuu

SEQ ID NO: 1625898 - RNA, 19 nt, Homo sapiens
  misc_RNA (1)...(19): siRNA sense strand
ugggagcuaugauccacaa

SEQ ID NO: 1625899 - RNA, 19 nt, Homo sapiens
  misc_RNA (1)...(19): siRNA sense strand
gguaacauuugucgaucac

SEQ ID NO: 1625900 - RNA, 19 nt, Homo sapiens
  misc_RNA (1)...(19): siRNA sense strand
cggaacaggcuaccaaguc

SEQ ID NO: 1625901 - RNA, 19 nt, Homo sapiens
  misc_RNA (1)...(19): siRNA sense strand
ggaaugacucugacuuuga

SEQ ID NO: 1625902 - RNA, 19 nt, Homo sapiens
  misc_RNA (1)...(19): siRNA sense strand
gggaaugacucugacuuug

SEQ ID NO: 1625903 - RNA, 19 nt, Homo sapiens
  misc_RNA (1)...(19): siRNA sense strand
gaaugacucugacuuugag

SEQ ID NO: 1625904 - RNA, 19 nt, Homo sapiens
  misc_RNA (1)...(19): siRNA sense strand
guuaaaaccugcaaagcua

SEQ ID NO: 1625905 - RNA, 19 nt, Homo sapiens
  misc_RNA (1)...(19): siRNA sense strand
ccaaguccgugcuguuugu

SEQ ID NO: 1625906 - RNA, 19 nt, Homo sapiens
  misc_RNA (1)...(19): siRNA sense strand
ggaaacuuguaaccgauca

SEQ ID NO: 1625907 - RNA, 19 nt, Homo sapiens
  misc_RNA (1)...(19): siRNA sense strand
ucugagagauuugaauaga

SEQ ID NO: 1625908 - RNA, 19 nt, Homo sapiens
  misc_RNA (1)...(19): siRNA sense strand
ggaugaaagcaaucugaga

SEQ ID NO: 1625909 - RNA, 19 nt, Homo sapiens
  misc_RNA (1)...(19): siRNA sense strand
ggguaacauuugucgauca

SEQ ID NO: 1625910 - RNA, 19 nt, Homo sapiens
  misc_RNA (1)...(19): siRNA sense strand
gaacuacuugggagcuaug

SEQ ID NO: 1625911 - RNA, 19 nt, Homo sapiens
  misc_RNA (1)...(19): siRNA sense strand
cugagagauuugaauagaa

SEQ ID NO: 1625912 - RNA, 19 nt, Homo sapiens
  misc_RNA (1)...(19): siRNA sense strand
cugcaaagcuaaaauugaa

SEQ ID NO: 1625913 - RNA, 19 nt, Homo sapiens
  misc_RNA (1)...(19): siRNA sense strand
uugaagaucccuauuaugg

SEQ ID NO: 1625914 - RNA, 19 nt, Homo sapiens
  misc_RNA (1)...(19): siRNA sense strand
cagauuaccaaagaagauu

SEQ ID NO: 1625915 - RNA, 19 nt, Homo sapiens
  misc_RNA (1)...(19): siRNA sense strand
cagaagcaguuuucaggaa

SEQ ID NO: 1625916 - RNA, 19 nt, Homo sapiens
  misc_RNA (1)...(19): siRNA sense strand
uaccaaguccgugcuguuu

SEQ ID NO: 1625917 - RNA, 19 nt, Homo sapiens
  misc_RNA (1)...(19): siRNA sense strand
aagaagauuuugccacauu

SEQ ID NO: 1625918 - RNA, 19 nt, Homo sapiens
  misc_RNA (1)...(19): siRNA sense strand
ugaacuacuugggagcuau

SEQ ID NO: 1625919 - RNA, 19 nt, Homo sapiens
  misc_RNA (1)...(19): siRNA sense strand
aaacuuguaaccgaucaaa

SEQ ID NO: 1625920 - RNA, 19 nt, Homo sapiens
  misc_RNA (1)...(19): siRNA sense strand
ugggaaugacucugacuuu

SEQ ID NO: 1625921 - RNA, 19 nt, Homo sapiens
  misc_RNA (1)...(19): siRNA sense strand
ugggagcuaugauccacaa

SEQ ID NO: 1625922 - RNA, 19 nt, Homo sapiens
  misc_RNA (1)...(19): siRNA sense strand
gguaacauuugucgaucac

SEQ ID NO: 1625923 - RNA, 19 nt, Homo sapiens
  misc_RNA (1)...(19): siRNA sense strand
cggaacaggcuaccaaguc

SEQ ID NO: 1625924 - RNA, 19 nt, Homo sapiens
  misc_RNA (1)...(19): siRNA sense strand
ccaaguccgugcuguuugu

SEQ ID NO: 1625925 - RNA, 19 nt, Homo sapiens
  misc_RNA (1)...(19): siRNA sense strand
ggaaacuuguaaccgauca

SEQ ID NO: 1625926 - RNA, 19 nt, Homo sapiens
  misc_RNA (1)...(19): siRNA sense strand
ggguaacauuugucgauca

SEQ ID NO: 1625927 - RNA, 19 nt, Homo sapiens
  misc_RNA (1)...(19): siRNA sense strand
uaccaaguccgugcuguuu

SEQ ID NO: 1625928 - RNA, 19 nt, Homo sapiens
  misc_RNA (1)...(19): siRNA sense strand
cagaagcaguuuucaggaa

SEQ ID NO: 1625929 - RNA, 19 nt, Homo sapiens
  misc_RNA (1)...(19): siRNA sense strand
aaacuuguaaccgaucaaa

SEQ ID NO: 1625930 - RNA, 19 nt, Homo sapiens
  misc_RNA (1)...(19): siRNA sense strand
gguaacauuugucgaucac

SEQ ID NO: 1625931 - RNA, 19 nt, Homo sapiens
  misc_RNA (1)...(19): siRNA sense strand
cggaacaggcuaccaaguc

SEQ ID NO: 1625932 - RNA, 19 nt, Homo sapiens
  misc_RNA (1)...(19): siRNA sense strand
ggagcucagugaugacuug

SEQ ID NO: 1625933 - RNA, 19 nt, Homo sapiens
  misc_RNA (1)...(19): siRNA sense strand
ggaccaggaccaagaagug

SEQ ID NO: 1625934 - RNA, 19 nt, Homo sapiens
  misc_RNA (1)...(19): siRNA sense strand
gcucagugaugacuugcau

SEQ ID NO: 1625935 - RNA, 19 nt, Homo sapiens
  misc_RNA (1)...(19): siRNA sense strand
agcaggagcucagugauga

SEQ ID NO: 1625936 - RNA, 19 nt, Homo sapiens
  misc_RNA (1)...(19): siRNA sense strand
guggagcgcuaccgacagu

SEQ ID NO: 1625937 - RNA, 19 nt, Homo sapiens
  misc_RNA (1)...(19): siRNA sense strand
gaccaggaccaagaaguga

SEQ ID NO: 1625938 - RNA, 19 nt, Homo sapiens
  misc_RNA (1)...(19): siRNA sense strand
ggagcgcuaccgacaguuc

SEQ ID NO: 1625939 - RNA, 19 nt, Homo sapiens
  misc_RNA (1)...(19): siRNA sense strand
ucagugaugacuugcaugu

SEQ ID NO: 1625940 - RNA, 19 nt, Homo sapiens
  misc_RNA (1)...(19): siRNA sense strand
ggagcucagugaugacuug

SEQ ID NO: 1625941 - RNA, 19 nt, Homo sapiens
  misc_RNA (1)...(19): siRNA sense strand
ggaccaggaccaagaagug

SEQ ID NO: 1625942 - RNA, 19 nt, Homo sapiens
  misc_RNA (1)...(19): siRNA sense strand
gcucagugaugacuugcau

SEQ ID NO: 1625943 - RNA, 19 nt, Homo sapiens
  misc_RNA (1)...(19): siRNA sense strand
agcaggagcucagugauga

SEQ ID NO: 1625944 - RNA, 19 nt, Homo sapiens
  misc_RNA (1)...(19): siRNA sense strand
guggagcgcuaccgacagu

SEQ ID NO: 1625945 - RNA, 19 nt, Homo sapiens
  misc_RNA (1)...(19): siRNA sense strand
gaccaggaccaagaaguga

SEQ ID NO: 1625946 - RNA, 19 nt, Homo sapiens
  misc_RNA (1)...(19): siRNA sense strand
ggagcgcuaccgacaguuc

SEQ ID NO: 1625947 - RNA, 19 nt, Homo sapiens
  misc_RNA (1)...(19): siRNA sense strand
ucagugaugacuugcaugu

SEQ ID NO: 1625948 - RNA, 19 nt, Homo sapiens
  misc_RNA (1)...(19): siRNA sense strand
ggagcucagugaugacuug

SEQ ID NO: 1625949 - RNA, 19 nt, Homo sapiens
  misc_RNA (1)...(19): siRNA sense strand
ggaccaggaccaagaagug

SEQ ID NO: 1625950 - RNA, 19 nt, Homo sapiens
  misc_RNA (1)...(19): siRNA sense strand
gcucagugaugacuugcau

SEQ ID NO: 1625951 - RNA, 19 nt, Homo sapiens
  misc_RNA (1)...(19): siRNA sense strand
agcaggagcucagugauga

SEQ ID NO: 1625952 - RNA, 19 nt, Homo sapiens
  misc_RNA (1)...(19): siRNA sense strand
guggagcgcuaccgacagu

SEQ ID NO: 1625953 - RNA, 19 nt, Homo sapiens
  misc_RNA (1)...(19): siRNA sense strand
gaccaggaccaagaaguga

SEQ ID NO: 1625954 - RNA, 19 nt, Homo sapiens
  misc_RNA (1)...(19): siRNA sense strand
ggagcgcuaccgacaguuc

SEQ ID NO: 1625955 - RNA, 19 nt, Homo sapiens
  misc_RNA (1)...(19): siRNA sense strand
ucagugaugacuugcaugu

SEQ ID NO: 1625956 - RNA, 19 nt, Homo sapiens
  misc_RNA (1)...(19): siRNA sense strand
ggagcucagugaugacuug

SEQ ID NO: 1625957 - RNA, 19 nt, Homo sapiens
  misc_RNA (1)...(19): siRNA sense strand
ggaccaggaccaagaagug

SEQ ID NO: 1625958 - RNA, 19 nt, Homo sapiens
  misc_RNA (1)...(19): siRNA sense strand
gcucagugaugacuugcau

SEQ ID NO: 1625959 - RNA, 19 nt, Homo sapiens
  misc_RNA (1)...(19): siRNA sense strand
agcaggagcucagugauga

SEQ ID NO: 1625960 - RNA, 19 nt, Homo sapiens
  misc_RNA (1)...(19): siRNA sense strand
guggagcgcuaccgacagu

SEQ ID NO: 1625961 - RNA, 19 nt, Homo sapiens
  misc_RNA (1)...(19): siRNA sense strand
gaccaggaccaagaaguga

SEQ ID NO: 1625962 - RNA, 19 nt, Homo sapiens
  misc_RNA (1)...(19): siRNA sense strand
ggagcgcuaccgacaguuc

SEQ ID NO: 1625963 - RNA, 19 nt, Homo sapiens
  misc_RNA (1)...(19): siRNA sense strand
ucagugaugacuugcaugu

SEQ ID NO: 1625964 - RNA, 19 nt, Homo sapiens
  misc_RNA (1)...(19): siRNA sense strand
ggagcucagugaugacuug

SEQ ID NO: 1625965 - RNA, 19 nt, Homo sapiens
  misc_RNA (1)...(19): siRNA sense strand
ggaccaggaccaagaagug

SEQ ID NO: 1625966 - RNA, 19 nt, Homo sapiens
  misc_RNA (1)...(19): siRNA sense strand
gcucagugaugacuugcau

SEQ ID NO: 1625967 - RNA, 19 nt, Homo sapiens
  misc_RNA (1)...(19): siRNA sense strand
agcaggagcucagugauga

SEQ ID NO: 1625968 - RNA, 19 nt, Homo sapiens
  misc_RNA (1)...(19): siRNA sense strand
guggagcgcuaccgacagu

SEQ ID NO: 1625969 - RNA, 19 nt, Homo sapiens
  misc_RNA (1)...(19): siRNA sense strand
gaccaggaccaagaaguga

SEQ ID NO: 1625970 - RNA, 19 nt, Homo sapiens
  misc_RNA (1)...(19): siRNA sense strand
ggagcgcuaccgacaguuc

SEQ ID NO: 1625971 - RNA, 19 nt, Homo sapiens
  misc_RNA (1)...(19): siRNA sense strand
ucagugaugacuugcaugu

SEQ ID NO: 1625972 - RNA, 19 nt, Homo sapiens
  misc_RNA (1)...(19): siRNA sense strand
ggagcucagugaugacuug

SEQ ID NO: 1625973 - RNA, 19 nt, Homo sapiens
  misc_RNA (1)...(19): siRNA sense strand
ggaccaggaccaagaagug

SEQ ID NO: 1625974 - RNA, 19 nt, Homo sapiens
  misc_RNA (1)...(19): siRNA sense strand
gcucagugaugacuugcau

SEQ ID NO: 1625975 - RNA, 19 nt, Homo sapiens
  misc_RNA (1)...(19): siRNA sense strand
agcaggagcucagugauga

SEQ ID NO: 1625976 - RNA, 19 nt, Homo sapiens
  misc_RNA (1)...(19): siRNA sense strand
guggagcgcuaccgacagu

SEQ ID NO: 1625977 - RNA, 19 nt, Homo sapiens
  misc_RNA (1)...(19): siRNA sense strand
gaccaggaccaagaaguga

SEQ ID NO: 1625978 - RNA, 19 nt, Homo sapiens
  misc_RNA (1)...(19): siRNA sense strand
ggagcgcuaccgacaguuc

SEQ ID NO: 1625979 - RNA, 19 nt, Homo sapiens
  misc_RNA (1)...(19): siRNA sense strand
ucagugaugacuugcaugu

SEQ ID NO: 1625980 - RNA, 19 nt, Homo sapiens
  misc_RNA (1)...(19): siRNA sense strand
ggagcucagugaugacuug

SEQ ID NO: 1625981 - RNA, 19 nt, Homo sapiens
  misc_RNA (1)...(19): siRNA sense strand
ggaccaggaccaagaagug

SEQ ID NO: 1625982 - RNA, 19 nt, Homo sapiens
  misc_RNA (1)...(19): siRNA sense strand
gcucagugaugacuugcau

SEQ ID NO: 1625983 - RNA, 19 nt, Homo sapiens
  misc_RNA (1)...(19): siRNA sense strand
agcaggagcucagugauga

SEQ ID NO: 1625984 - RNA, 19 nt, Homo sapiens
  misc_RNA (1)...(19): siRNA sense strand
guggagcgcuaccgacagu

SEQ ID NO: 1625985 - RNA, 19 nt, Homo sapiens
  misc_RNA (1)...(19): siRNA sense strand
gaccaggaccaagaaguga

SEQ ID NO: 1625986 - RNA, 19 nt, Homo sapiens
  misc_RNA (1)...(19): siRNA sense strand
ggagcgcuaccgacaguuc

SEQ ID NO: 1625987 - RNA, 19 nt, Homo sapiens
  misc_RNA (1)...(19): siRNA sense strand
ucagugaugacuugcaugu

SEQ ID NO: 1625988 - RNA, 19 nt, Homo sapiens
  misc_RNA (1)...(19): siRNA sense strand
ggagcucagugaugacuug

SEQ ID NO: 1625989 - RNA, 19 nt, Homo sapiens
  misc_RNA (1)...(19): siRNA sense strand
ggaccaggaccaagaagug

SEQ ID NO: 1625990 - RNA, 19 nt, Homo sapiens
  misc_RNA (1)...(19): siRNA sense strand
gcucagugaugacuugcau

SEQ ID NO: 1625991 - RNA, 19 nt, Homo sapiens
  misc_RNA (1)...(19): siRNA sense strand
agcaggagcucagugauga

SEQ ID NO: 1625992 - RNA, 19 nt, Homo sapiens
  misc_RNA (1)...(19): siRNA sense strand
guggagcgcuaccgacagu

SEQ ID NO: 1625993 - RNA, 19 nt, Homo sapiens
  misc_RNA (1)...(19): siRNA sense strand
gaccaggaccaagaaguga

SEQ ID NO: 1625994 - RNA, 19 nt, Homo sapiens
  misc_RNA (1)...(19): siRNA sense strand
ggagcgcuaccgacaguuc

SEQ ID NO: 1625995 - RNA, 19 nt, Homo sapiens
  misc_RNA (1)...(19): siRNA sense strand
ucagugaugacuugcaugu

SEQ ID NO: 1625996 - RNA, 19 nt, Homo sapiens
  misc_RNA (1)...(19): siRNA sense strand
ugacuggugugccuucugu

SEQ ID NO: 1625997 - RNA, 19 nt, Homo sapiens
  misc_RNA (1)...(19): siRNA sense strand
caauugaagaccaggauga

SEQ ID NO: 1625998 - RNA, 19 nt, Homo sapiens
  misc_RNA (1)...(19): siRNA sense strand
gaucggaggcucagagaac

SEQ ID NO: 1625999 - RNA, 19 nt, Homo sapiens
  misc_RNA (1)...(19): siRNA sense strand
gcuacugugucuucagcaa

SEQ ID NO: 1626000 - RNA, 19 nt, Homo sapiens
  misc_RNA (1)...(19): siRNA sense strand
uggcagaugugcucaaggu

SEQ ID NO: 1626001 - RNA, 19 nt, Homo sapiens
  misc_RNA (1)...(19): siRNA sense strand
gguggagagugucuucaag

SEQ ID NO: 1626002 - RNA, 19 nt, Homo sapiens
  misc_RNA (1)...(19): siRNA sense strand
cgagaacaacugugagauc

SEQ ID NO: 1626003 - RNA, 19 nt, Homo sapiens
  misc_RNA (1)...(19): siRNA sense strand
ugucagugguggagagugu

SEQ ID NO: 1626004 - RNA, 19 nt, Homo sapiens
  misc_RNA (1)...(19): siRNA sense strand
cugggaugguggugaauga

SEQ ID NO: 1626005 - RNA, 19 nt, Homo sapiens
  misc_RNA (1)...(19): siRNA sense strand
gagggcgagcucuccgaua

SEQ ID NO: 1626006 - RNA, 19 nt, Homo sapiens
  misc_RNA (1)...(19): siRNA sense strand
gaccaggugcuaguaggaa

SEQ ID NO: 1626007 - RNA, 19 nt, Homo sapiens
  misc_RNA (1)...(19): siRNA sense strand
cugcugggaugguggugaa

SEQ ID NO: 1626008 - RNA, 19 nt, Homo sapiens
  misc_RNA (1)...(19): siRNA sense strand
ccgaggcagugaggugauu

SEQ ID NO: 1626009 - RNA, 19 nt, Homo sapiens
  misc_RNA (1)...(19): siRNA sense strand
caucccaagacuucaauug

SEQ ID NO: 1626010 - RNA, 19 nt, Homo sapiens
  misc_RNA (1)...(19): siRNA sense strand
ccaccagcaugcgggauuc

SEQ ID NO: 1626011 - RNA, 19 nt, Homo sapiens
  misc_RNA (1)...(19): siRNA sense strand
ugugagaucggcugcuuug

SEQ ID NO: 1626012 - RNA, 19 nt, Homo sapiens
  misc_RNA (1)...(19): siRNA sense strand
gcuggugcaucccaagacu

SEQ ID NO: 1626013 - RNA, 19 nt, Homo sapiens
  misc_RNA (1)...(19): siRNA sense strand
ugacuggugugccuucugu

SEQ ID NO: 1626014 - RNA, 19 nt, Homo sapiens
  misc_RNA (1)...(19): siRNA sense strand
caauugaagaccaggauga

SEQ ID NO: 1626015 - RNA, 19 nt, Homo sapiens
  misc_RNA (1)...(19): siRNA sense strand
gaucggaggcucagagaac

SEQ ID NO: 1626016 - RNA, 19 nt, Homo sapiens
  misc_RNA (1)...(19): siRNA sense strand
gcuacugugucuucagcaa

SEQ ID NO: 1626017 - RNA, 19 nt, Homo sapiens
  misc_RNA (1)...(19): siRNA sense strand
uggcagaugugcucaaggu

SEQ ID NO: 1626018 - RNA, 19 nt, Homo sapiens
  misc_RNA (1)...(19): siRNA sense strand
gguggagagugucuucaag

SEQ ID NO: 1626019 - RNA, 19 nt, Homo sapiens
  misc_RNA (1)...(19): siRNA sense strand
cgagaacaacugugagauc

SEQ ID NO: 1626020 - RNA, 19 nt, Homo sapiens
  misc_RNA (1)...(19): siRNA sense strand
ugucagugguggagagugu

SEQ ID NO: 1626021 - RNA, 19 nt, Homo sapiens
  misc_RNA (1)...(19): siRNA sense strand
cugggaugguggugaauga

SEQ ID NO: 1626022 - RNA, 19 nt, Homo sapiens
  misc_RNA (1)...(19): siRNA sense strand
gagggcgagcucuccgaua

SEQ ID NO: 1626023 - RNA, 19 nt, Homo sapiens
  misc_RNA (1)...(19): siRNA sense strand
gaccaggugcuaguaggaa

SEQ ID NO: 1626024 - RNA, 19 nt, Homo sapiens
  misc_RNA (1)...(19): siRNA sense strand
cugcugggaugguggugaa

SEQ ID NO: 1626025 - RNA, 19 nt, Homo sapiens
  misc_RNA (1)...(19): siRNA sense strand
ccgaggcagugaggugauu

SEQ ID NO: 1626026 - RNA, 19 nt, Homo sapiens
  misc_RNA (1)...(19): siRNA sense strand
caucccaagacuucaauug

SEQ ID NO: 1626027 - RNA, 19 nt, Homo sapiens
  misc_RNA (1)...(19): siRNA sense strand
ccaccagcaugcgggauuc

SEQ ID NO: 1626028 - RNA, 19 nt, Homo sapiens
  misc_RNA (1)...(19): siRNA sense strand
ugugagaucggcugcuuug

SEQ ID NO: 1626029 - RNA, 19 nt, Homo sapiens
  misc_RNA (1)...(19): siRNA sense strand
gcuggugcaucccaagacu

SEQ ID NO: 1626030 - RNA, 19 nt, Homo sapiens
  misc_RNA (1)...(19): siRNA sense strand
gaucggaggcucagagaac

SEQ ID NO: 1626031 - RNA, 19 nt, Homo sapiens
  misc_RNA (1)...(19): siRNA sense strand
gcuacugugucuucagcaa

SEQ ID NO: 1626032 - RNA, 19 nt, Homo sapiens
  misc_RNA (1)...(19): siRNA sense strand
uggcagaugugcucaaggu

SEQ ID NO: 1626033 - RNA, 19 nt, Homo sapiens
  misc_RNA (1)...(19): siRNA sense strand
cgagaacaacugugagauc

SEQ ID NO: 1626034 - RNA, 19 nt, Homo sapiens
  misc_RNA (1)...(19): siRNA sense strand
gagggcgagcucuccgaua

SEQ ID NO: 1626035 - RNA, 19 nt, Homo sapiens
  misc_RNA (1)...(19): siRNA sense strand
gaccaggugcuaguaggaa

SEQ ID NO: 1626036 - RNA, 19 nt, Homo sapiens
  misc_RNA (1)...(19): siRNA sense strand
caucccaagacuucaauug

SEQ ID NO: 1626037 - RNA, 19 nt, Homo sapiens
  misc_RNA (1)...(19): siRNA sense strand
ugugagaucggcugcuuug

SEQ ID NO: 1626038 - RNA, 19 nt, Homo sapiens
  misc_RNA (1)...(19): siRNA sense strand
gcuggugcaucccaagacu

SEQ ID NO: 1626039 - RNA, 19 nt, Homo sapiens
  misc_RNA (1)...(19): siRNA sense strand
ugacuggugugccuucugu

SEQ ID NO: 1626040 - RNA, 19 nt, Homo sapiens
  misc_RNA (1)...(19): siRNA sense strand
caauugaagaccaggauga

SEQ ID NO: 1626041 - RNA, 19 nt, Homo sapiens
  misc_RNA (1)...(19): siRNA sense strand
gaucggaggcucagagaac

SEQ ID NO: 1626042 - RNA, 19 nt, Homo sapiens
  misc_RNA (1)...(19): siRNA sense strand
gcuacugugucuucagcaa

SEQ ID NO: 1626043 - RNA, 19 nt, Homo sapiens
  misc_RNA (1)...(19): siRNA sense strand
uggcagaugugcucaaggu

SEQ ID NO: 1626044 - RNA, 19 nt, Homo sapiens
  misc_RNA (1)...(19): siRNA sense strand
gguggagagugucuucaag

SEQ ID NO: 1626045 - RNA, 19 nt, Homo sapiens
  misc_RNA (1)...(19): siRNA sense strand
cgagaacaacugugagauc

SEQ ID NO: 1626046 - RNA, 19 nt, Homo sapiens
  misc_RNA (1)...(19): siRNA sense strand
ugucagugguggagagugu

SEQ ID NO: 1626047 - RNA, 19 nt, Homo sapiens
  misc_RNA (1)...(19): siRNA sense strand
cugggaugguggugaauga

SEQ ID NO: 1626048 - RNA, 19 nt, Homo sapiens
  misc_RNA (1)...(19): siRNA sense strand
gagggcgagcucuccgaua

SEQ ID NO: 1626049 - RNA, 19 nt, Homo sapiens
  misc_RNA (1)...(19): siRNA sense strand
gaccaggugcuaguaggaa

SEQ ID NO: 1626050 - RNA, 19 nt, Homo sapiens
  misc_RNA (1)...(19): siRNA sense strand
cugcugggaugguggugaa

SEQ ID NO: 1626051 - RNA, 19 nt, Homo sapiens
  misc_RNA (1)...(19): siRNA sense strand
ccgaggcagugaggugauu

SEQ ID NO: 1626052 - RNA, 19 nt, Homo sapiens
  misc_RNA (1)...(19): siRNA sense strand
caucccaagacuucaauug

SEQ ID NO: 1626053 - RNA, 19 nt, Homo sapiens
  misc_RNA (1)...(19): siRNA sense strand
ccaccagcaugcgggauuc

SEQ ID NO: 1626054 - RNA, 19 nt, Homo sapiens
  misc_RNA (1)...(19): siRNA sense strand
ugugagaucggcugcuuug

SEQ ID NO: 1626055 - RNA, 19 nt, Homo sapiens
  misc_RNA (1)...(19): siRNA sense strand
gcuggugcaucccaagacu

SEQ ID NO: 1626056 - RNA, 19 nt, Homo sapiens
  misc_RNA (1)...(19): siRNA sense strand
gaucggaggcucagagaac

SEQ ID NO: 1626057 - RNA, 19 nt, Homo sapiens
  misc_RNA (1)...(19): siRNA sense strand
gcuacugugucuucagcaa

SEQ ID NO: 1626058 - RNA, 19 nt, Homo sapiens
  misc_RNA (1)...(19): siRNA sense strand
uggcagaugugcucaaggu

SEQ ID NO: 1626059 - RNA, 19 nt, Homo sapiens
  misc_RNA (1)...(19): siRNA sense strand
cgagaacaacugugagauc

SEQ ID NO: 1626060 - RNA, 19 nt, Homo sapiens
  misc_RNA (1)...(19): siRNA sense strand
gagggcgagcucuccgaua

SEQ ID NO: 1626061 - RNA, 19 nt, Homo sapiens
  misc_RNA (1)...(19): siRNA sense strand
gaccaggugcuaguaggaa

SEQ ID NO: 1626062 - RNA, 19 nt, Homo sapiens
  misc_RNA (1)...(19): siRNA sense strand
caucccaagacuucaauug

SEQ ID NO: 1626063 - RNA, 19 nt, Homo sapiens
  misc_RNA (1)...(19): siRNA sense strand
ugugagaucggcugcuuug

SEQ ID NO: 1626064 - RNA, 19 nt, Homo sapiens
  misc_RNA (1)...(19): siRNA sense strand
gcuggugcaucccaagacu

SEQ ID NO: 1626065 - RNA, 19 nt, Homo sapiens
  misc_RNA (1)...(19): siRNA sense strand
ucaaggagaugaagaagaa

SEQ ID NO: 1626066 - RNA, 19 nt, Homo sapiens
  misc_RNA (1)...(19): siRNA sense strand
guucauggcuggagaagug

SEQ ID NO: 1626067 - RNA, 19 nt, Homo sapiens
  misc_RNA (1)...(19): siRNA sense strand
uaaccgggcucccaucuac

SEQ ID NO: 1626068 - RNA, 19 nt, Homo sapiens
  misc_RNA (1)...(19): siRNA sense strand
gggucccgcucaucaagua

SEQ ID NO: 1626069 - RNA, 19 nt, Homo sapiens
  misc_RNA (1)...(19): siRNA sense strand
ccucagggcuggagacucu

SEQ ID NO: 1626070 - RNA, 19 nt, Homo sapiens
  misc_RNA (1)...(19): siRNA sense strand
gcgcuucgaugcggacuau

SEQ ID NO: 1626071 - RNA, 19 nt, Homo sapiens
  misc_RNA (1)...(19): siRNA sense strand
gcacccacccuguucucua

SEQ ID NO: 1626072 - RNA, 19 nt, Homo sapiens
  misc_RNA (1)...(19): siRNA sense strand
agaagaacccuaugaccaa

SEQ ID NO: 1626073 - RNA, 19 nt, Homo sapiens
  misc_RNA (1)...(19): siRNA sense strand
augaagacaugaaggagaa

SEQ ID NO: 1626074 - RNA, 19 nt, Homo sapiens
  misc_RNA (1)...(19): siRNA sense strand
gcggcgaccuagagaagug

SEQ ID NO: 1626075 - RNA, 19 nt, Homo sapiens
  misc_RNA (1)...(19): siRNA sense strand
agaacccuaugaccaacua

SEQ ID NO: 1626076 - RNA, 19 nt, Homo sapiens
  misc_RNA (1)...(19): siRNA sense strand
gaaggucaagguggucuau

SEQ ID NO: 1626077 - RNA, 19 nt, Homo sapiens
  misc_RNA (1)...(19): siRNA sense strand
acacgucguucaaggagau

SEQ ID NO: 1626078 - RNA, 19 nt, Homo sapiens
  misc_RNA (1)...(19): siRNA sense strand
ggucaagguggucuauguu

SEQ ID NO: 1626079 - RNA, 19 nt, Homo sapiens
  misc_RNA (1)...(19): siRNA sense strand
ggcuggagacucugaaaga

SEQ ID NO: 1626080 - RNA, 19 nt, Homo sapiens
  misc_RNA (1)...(19): siRNA sense strand
gcagaaugagcgcuucgau

SEQ ID NO: 1626081 - RNA, 19 nt, Homo sapiens
  misc_RNA (1)...(19): siRNA sense strand
guaaccgggcucccaucua

SEQ ID NO: 1626082 - RNA, 19 nt, Homo sapiens
  misc_RNA (1)...(19): siRNA sense strand
ucaccguggcgcagaauga

SEQ ID NO: 1626083 - RNA, 19 nt, Homo sapiens
  misc_RNA (1)...(19): siRNA sense strand
ggucuccuacuaccauuuc

SEQ ID NO: 1626084 - RNA, 19 nt, Homo sapiens
  misc_RNA (1)...(19): siRNA sense strand
uucucuaccucuucuauga

SEQ ID NO: 1626085 - RNA, 19 nt, Homo sapiens
  misc_RNA (1)...(19): siRNA sense strand
gcuggagacucugaaagac

SEQ ID NO: 1626086 - RNA, 19 nt, Homo sapiens
  misc_RNA (1)...(19): siRNA sense strand
gcucaucaaguacuuugca

SEQ ID NO: 1626087 - RNA, 19 nt, Homo sapiens
  misc_RNA (1)...(19): siRNA sense strand
aaaagauccuggaguuugu

SEQ ID NO: 1626088 - RNA, 19 nt, Homo sapiens
  misc_RNA (1)...(19): siRNA sense strand
ggucuauguugcccgaaac

SEQ ID NO: 1626089 - RNA, 19 nt, Homo sapiens
  misc_RNA (1)...(19): siRNA sense strand
cacccacccuguucucuac

SEQ ID NO: 1626090 - RNA, 19 nt, Homo sapiens
  misc_RNA (1)...(19): siRNA sense strand
gcggucuccuacuaccauu

SEQ ID NO: 1626091 - RNA, 19 nt, Homo sapiens
  misc_RNA (1)...(19): siRNA sense strand
gucaagguggucuauguug

SEQ ID NO: 1626092 - RNA, 19 nt, Homo sapiens
  misc_RNA (1)...(19): siRNA sense strand
gaugaagaagaacccuaug

SEQ ID NO: 1626093 - RNA, 19 nt, Homo sapiens
  misc_RNA (1)...(19): siRNA sense strand
ucuaugaagacaugaagga

SEQ ID NO: 1626094 - RNA, 19 nt, Homo sapiens
  misc_RNA (1)...(19): siRNA sense strand
acguggcggucuccuacua

SEQ ID NO: 1626095 - RNA, 19 nt, Homo sapiens
  misc_RNA (1)...(19): siRNA sense strand
ucaaggagaugaagaagaa

SEQ ID NO: 1626096 - RNA, 19 nt, Homo sapiens
  misc_RNA (1)...(19): siRNA sense strand
guucauggcuggagaagug

SEQ ID NO: 1626097 - RNA, 19 nt, Homo sapiens
  misc_RNA (1)...(19): siRNA sense strand
uaaccgggcucccaucuac

SEQ ID NO: 1626098 - RNA, 19 nt, Homo sapiens
  misc_RNA (1)...(19): siRNA sense strand
gggucccgcucaucaagua

SEQ ID NO: 1626099 - RNA, 19 nt, Homo sapiens
  misc_RNA (1)...(19): siRNA sense strand
ccucagggcuggagacucu

SEQ ID NO: 1626100 - RNA, 19 nt, Homo sapiens
  misc_RNA (1)...(19): siRNA sense strand
gcgcuucgaugcggacuau

SEQ ID NO: 1626101 - RNA, 19 nt, Homo sapiens
  misc_RNA (1)...(19): siRNA sense strand
gcacccacccuguucucua

SEQ ID NO: 1626102 - RNA, 19 nt, Homo sapiens
  misc_RNA (1)...(19): siRNA sense strand
agaagaacccuaugaccaa

SEQ ID NO: 1626103 - RNA, 19 nt, Homo sapiens
  misc_RNA (1)...(19): siRNA sense strand
augaagacaugaaggagaa

SEQ ID NO: 1626104 - RNA, 19 nt, Homo sapiens
  misc_RNA (1)...(19): siRNA sense strand
gcggcgaccuagagaagug

SEQ ID NO: 1626105 - RNA, 19 nt, Homo sapiens
  misc_RNA (1)...(19): siRNA sense strand
agaacccuaugaccaacua

SEQ ID NO: 1626106 - RNA, 19 nt, Homo sapiens
  misc_RNA (1)...(19): siRNA sense strand
gaaggucaagguggucuau

SEQ ID NO: 1626107 - RNA, 19 nt, Homo sapiens
  misc_RNA (1)...(19): siRNA sense strand
acacgucguucaaggagau

SEQ ID NO: 1626108 - RNA, 19 nt, Homo sapiens
  misc_RNA (1)...(19): siRNA sense strand
ggucaagguggucuauguu

SEQ ID NO: 1626109 - RNA, 19 nt, Homo sapiens
  misc_RNA (1)...(19): siRNA sense strand
ggcuggagacucugaaaga

SEQ ID NO: 1626110 - RNA, 19 nt, Homo sapiens
  misc_RNA (1)...(19): siRNA sense strand
gcagaaugagcgcuucgau

SEQ ID NO: 1626111 - RNA, 19 nt, Homo sapiens
  misc_RNA (1)...(19): siRNA sense strand
guaaccgggcucccaucua

SEQ ID NO: 1626112 - RNA, 19 nt, Homo sapiens
  misc_RNA (1)...(19): siRNA sense strand
ucaccguggcgcagaauga

SEQ ID NO: 1626113 - RNA, 19 nt, Homo sapiens
  misc_RNA (1)...(19): siRNA sense strand
ggucuccuacuaccauuuc

SEQ ID NO: 1626114 - RNA, 19 nt, Homo sapiens
  misc_RNA (1)...(19): siRNA sense strand
uucucuaccucuucuauga

SEQ ID NO: 1626115 - RNA, 19 nt, Homo sapiens
  misc_RNA (1)...(19): siRNA sense strand
gcuggagacucugaaagac

SEQ ID NO: 1626116 - RNA, 19 nt, Homo sapiens
  misc_RNA (1)...(19): siRNA sense strand
gcucaucaaguacuuugca

SEQ ID NO: 1626117 - RNA, 19 nt, Homo sapiens
  misc_RNA (1)...(19): siRNA sense strand
aaaagauccuggaguuugu

SEQ ID NO: 1626118 - RNA, 19 nt, Homo sapiens
  misc_RNA (1)...(19): siRNA sense strand
ggucuauguugcccgaaac

SEQ ID NO: 1626119 - RNA, 19 nt, Homo sapiens
  misc_RNA (1)...(19): siRNA sense strand
cacccacccuguucucuac

SEQ ID NO: 1626120 - RNA, 19 nt, Homo sapiens
  misc_RNA (1)...(19): siRNA sense strand
gcggucuccuacuaccauu

SEQ ID NO: 1626121 - RNA, 19 nt, Homo sapiens
  misc_RNA (1)...(19): siRNA sense strand
gucaagguggucuauguug

SEQ ID NO: 1626122 - RNA, 19 nt, Homo sapiens
  misc_RNA (1)...(19): siRNA sense strand
gaugaagaagaacccuaug

SEQ ID NO: 1626123 - RNA, 19 nt, Homo sapiens
  misc_RNA (1)...(19): siRNA sense strand
ucuaugaagacaugaagga

SEQ ID NO: 1626124 - RNA, 19 nt, Homo sapiens
  misc_RNA (1)...(19): siRNA sense strand
acguggcggucuccuacua

SEQ ID NO: 1626125 - RNA, 19 nt, Homo sapiens
  misc_RNA (1)...(19): siRNA sense strand
gaugaaacgugucuauuug

SEQ ID NO: 1626126 - RNA, 19 nt, Homo sapiens
  misc_RNA (1)...(19): siRNA sense strand
caaagaaucuaccguugaa

SEQ ID NO: 1626127 - RNA, 19 nt, Homo sapiens
  misc_RNA (1)...(19): siRNA sense strand
gaucuggccuugugguuaa

SEQ ID NO: 1626128 - RNA, 19 nt, Homo sapiens
  misc_RNA (1)...(19): siRNA sense strand
ggaccuggccucucugaua

SEQ ID NO: 1626129 - RNA, 19 nt, Homo sapiens
  misc_RNA (1)...(19): siRNA sense strand
ggaugaaacgugucuauuu

SEQ ID NO: 1626130 - RNA, 19 nt, Homo sapiens
  misc_RNA (1)...(19): siRNA sense strand
gaacaagaagaaacacuuu

SEQ ID NO: 1626131 - RNA, 19 nt, Homo sapiens
  misc_RNA (1)...(19): siRNA sense strand
gcaaaugcccaaacaaguu

SEQ ID NO: 1626132 - RNA, 19 nt, Homo sapiens
  misc_RNA (1)...(19): siRNA sense strand
gcaaaucuccaacucuaaa

SEQ ID NO: 1626133 - RNA, 19 nt, Homo sapiens
  misc_RNA (1)...(19): siRNA sense strand
ugaagaagaucccaugcaa

SEQ ID NO: 1626134 - RNA, 19 nt, Homo sapiens
  misc_RNA (1)...(19): siRNA sense strand
aagcaaaucuccaacucua

SEQ ID NO: 1626135 - RNA, 19 nt, Homo sapiens
  misc_RNA (1)...(19): siRNA sense strand
ggacaugaauccagauaac

SEQ ID NO: 1626136 - RNA, 19 nt, Homo sapiens
  misc_RNA (1)...(19): siRNA sense strand
gaauccagauaacuacuug

SEQ ID NO: 1626137 - RNA, 19 nt, Homo sapiens
  misc_RNA (1)...(19): siRNA sense strand
gaagcuaauuugcuaccaa

SEQ ID NO: 1626138 - RNA, 19 nt, Homo sapiens
  misc_RNA (1)...(19): siRNA sense strand
ggaggaggcugggaaacuu

SEQ ID NO: 1626139 - RNA, 19 nt, Homo sapiens
  misc_RNA (1)...(19): siRNA sense strand
gaccuggccucucugauau

SEQ ID NO: 1626140 - RNA, 19 nt, Homo sapiens
  misc_RNA (1)...(19): siRNA sense strand
gagacaauacagcaaauuu

SEQ ID NO: 1626141 - RNA, 19 nt, Homo sapiens
  misc_RNA (1)...(19): siRNA sense strand
gcagacaugaagcuaauuu

SEQ ID NO: 1626142 - RNA, 19 nt, Homo sapiens
  misc_RNA (1)...(19): siRNA sense strand
cagaaacuaugcaggagaa

SEQ ID NO: 1626143 - RNA, 19 nt, Homo sapiens
  misc_RNA (1)...(19): siRNA sense strand
acaugaagcuaauuugcua

SEQ ID NO: 1626144 - RNA, 19 nt, Homo sapiens
  misc_RNA (1)...(19): siRNA sense strand
gaaggagauuacagcagaa

SEQ ID NO: 1626145 - RNA, 19 nt, Homo sapiens
  misc_RNA (1)...(19): siRNA sense strand
ugaaacgugucuauuugaa

SEQ ID NO: 1626146 - RNA, 19 nt, Homo sapiens
  misc_RNA (1)...(19): siRNA sense strand
cuaacaagcccacaaagaa

SEQ ID NO: 1626147 - RNA, 19 nt, Homo sapiens
  misc_RNA (1)...(19): siRNA sense strand
cagcagacaugaagcuaau

SEQ ID NO: 1626148 - RNA, 19 nt, Homo sapiens
  misc_RNA (1)...(19): siRNA sense strand
aagaagaucuggccuugug

SEQ ID NO: 1626149 - RNA, 19 nt, Homo sapiens
  misc_RNA (1)...(19): siRNA sense strand
aaagaguacaggaaacuua

SEQ ID NO: 1626150 - RNA, 19 nt, Homo sapiens
  misc_RNA (1)...(19): siRNA sense strand
gaagaagaucccaugcaaa

SEQ ID NO: 1626151 - RNA, 19 nt, Homo sapiens
  misc_RNA (1)...(19): siRNA sense strand
aaacgugucuauuugaauc

SEQ ID NO: 1626152 - RNA, 19 nt, Homo sapiens
  misc_RNA (1)...(19): siRNA sense strand
caaagcaaaucuccaacuc

SEQ ID NO: 1626153 - RNA, 19 nt, Homo sapiens
  misc_RNA (1)...(19): siRNA sense strand
cuaauuugcuaccaaugaa

SEQ ID NO: 1626154 - RNA, 19 nt, Homo sapiens
  misc_RNA (1)...(19): siRNA sense strand
ugaagauccuccuugcaaa

SEQ ID NO: 1626155 - RNA, 19 nt, Homo sapiens
  misc_RNA (1)...(19): siRNA sense strand
caucaaagucuucuggaaa

SEQ ID NO: 1626156 - RNA, 19 nt, Homo sapiens
  misc_RNA (1)...(19): siRNA sense strand
aaacuaugcaggagaaauu

SEQ ID NO: 1626157 - RNA, 19 nt, Homo sapiens
  misc_RNA (1)...(19): siRNA sense strand
gcuaauuugcuaccaauga

SEQ ID NO: 1626158 - RNA, 19 nt, Homo sapiens
  misc_RNA (1)...(19): siRNA sense strand
gaagauccuccuugcaaau

SEQ ID NO: 1626159 - RNA, 19 nt, Homo sapiens
  misc_RNA (1)...(19): siRNA sense strand
gcuaacaagcccacaaaga

SEQ ID NO: 1626160 - RNA, 19 nt, Homo sapiens
  misc_RNA (1)...(19): siRNA sense strand
guuauaaggcuaagaagga

SEQ ID NO: 1626161 - RNA, 19 nt, Homo sapiens
  misc_RNA (1)...(19): siRNA sense strand
gguggucucugccaguuau

SEQ ID NO: 1626162 - RNA, 19 nt, Homo sapiens
  misc_RNA (1)...(19): siRNA sense strand
uaacaagcccacaaagaau

SEQ ID NO: 1626163 - RNA, 19 nt, Homo sapiens
  misc_RNA (1)...(19): siRNA sense strand
caggaaacuuacuggauga

SEQ ID NO: 1626164 - RNA, 19 nt, Homo sapiens
  misc_RNA (1)...(19): siRNA sense strand
gcagaucucccguguggau

SEQ ID NO: 1626165 - RNA, 19 nt, Homo sapiens
  misc_RNA (1)...(19): siRNA sense strand
gaaacgugucuauuugaau

SEQ ID NO: 1626166 - RNA, 19 nt, Homo sapiens
  misc_RNA (1)...(19): siRNA sense strand
ccaguuauaaggcuaagaa

SEQ ID NO: 1626167 - RNA, 19 nt, Homo sapiens
  misc_RNA (1)...(19): siRNA sense strand
ccagagacaauacagcaaa

SEQ ID NO: 1626168 - RNA, 19 nt, Homo sapiens
  misc_RNA (1)...(19): siRNA sense strand
uuaggaugcugcacaacaa

SEQ ID NO: 1626169 - RNA, 19 nt, Homo sapiens
  misc_RNA (1)...(19): siRNA sense strand
gccuugcucugucaacuug

SEQ ID NO: 1626170 - RNA, 19 nt, Homo sapiens
  misc_RNA (1)...(19): siRNA sense strand
caaaugcccaaacaaguuc

SEQ ID NO: 1626171 - RNA, 19 nt, Homo sapiens
  misc_RNA (1)...(19): siRNA sense strand
aaacgaauuucugaagauc

SEQ ID NO: 1626172 - RNA, 19 nt, Homo sapiens
  misc_RNA (1)...(19): siRNA sense strand
aaucuaccguugaagaaga

SEQ ID NO: 1626173 - RNA, 19 nt, Homo sapiens
  misc_RNA (1)...(19): siRNA sense strand
acaaagaaucuaccguuga

SEQ ID NO: 1626174 - RNA, 19 nt, Homo sapiens
  misc_RNA (1)...(19): siRNA sense strand
gcuaagaaggaaauuaagu

SEQ ID NO: 1626175 - RNA, 19 nt, Homo sapiens
  misc_RNA (1)...(19): siRNA sense strand
uggagaaguuggacaaugg

SEQ ID NO: 1626176 - RNA, 19 nt, Homo sapiens
  misc_RNA (1)...(19): siRNA sense strand
aggcuaagaaggaaauuaa

SEQ ID NO: 1626177 - RNA, 19 nt, Homo sapiens
  misc_RNA (1)...(19): siRNA sense strand
gaugaugcagugaaacgaa

SEQ ID NO: 1626178 - RNA, 19 nt, Homo sapiens
  misc_RNA (1)...(19): siRNA sense strand
ucaucaaagucuucuggaa

SEQ ID NO: 1626179 - RNA, 19 nt, Homo sapiens
  misc_RNA (1)...(19): siRNA sense strand
caccuucuccuucaucaaa

SEQ ID NO: 1626180 - RNA, 19 nt, Homo sapiens
  misc_RNA (1)...(19): siRNA sense strand
gcuagagcuuggccggauu

SEQ ID NO: 1626181 - RNA, 19 nt, Homo sapiens
  misc_RNA (1)...(19): siRNA sense strand
gacaauacagcaaauuucu

SEQ ID NO: 1626182 - RNA, 19 nt, Homo sapiens
  misc_RNA (1)...(19): siRNA sense strand
cagagacaauacagcaaau

SEQ ID NO: 1626183 - RNA, 19 nt, Homo sapiens
  misc_RNA (1)...(19): siRNA sense strand
gaaacuaugcaggagaaau

SEQ ID NO: 1626184 - RNA, 19 nt, Homo sapiens
  misc_RNA (1)...(19): siRNA sense strand
ucauuaggaugcugcacaa

SEQ ID NO: 1626185 - RNA, 19 nt, Homo sapiens
  misc_RNA (1)...(19): siRNA sense strand
acaugaauccagauaacua

SEQ ID NO: 1626186 - RNA, 19 nt, Homo sapiens
  misc_RNA (1)...(19): siRNA sense strand
gagauuacagcagaaacuu

SEQ ID NO: 1626187 - RNA, 19 nt, Homo sapiens
  misc_RNA (1)...(19): siRNA sense strand
cuaagaaggaaauuaagug

SEQ ID NO: 1626188 - RNA, 19 nt, Homo sapiens
  misc_RNA (1)...(19): siRNA sense strand
gaggaggcugggaaacuuu

SEQ ID NO: 1626189 - RNA, 19 nt, Homo sapiens
  misc_RNA (1)...(19): siRNA sense strand
caagcaacccagagaagug

SEQ ID NO: 1626190 - RNA, 19 nt, Homo sapiens
  misc_RNA (1)...(19): siRNA sense strand
ccacaagcaacccagagaa

SEQ ID NO: 1626191 - RNA, 19 nt, Homo sapiens
  misc_RNA (1)...(19): siRNA sense strand
uuauaaggcuaagaaggaa

SEQ ID NO: 1626192 - RNA, 19 nt, Homo sapiens
  misc_RNA (1)...(19): siRNA sense strand
gagauugaacaagaagaaa

SEQ ID NO: 1626193 - RNA, 19 nt, Homo sapiens
  misc_RNA (1)...(19): siRNA sense strand
aagcuaauuugcuaccaau

SEQ ID NO: 1626194 - RNA, 19 nt, Homo sapiens
  misc_RNA (1)...(19): siRNA sense strand
ggagauuacagcagaaacu

SEQ ID NO: 1626195 - RNA, 19 nt, Homo sapiens
  misc_RNA (1)...(19): siRNA sense strand
ugaacaagaagaaacacuu

SEQ ID NO: 1626196 - RNA, 19 nt, Homo sapiens
  misc_RNA (1)...(19): siRNA sense strand
gauugaacaagaagaaaca

SEQ ID NO: 1626197 - RNA, 19 nt, Homo sapiens
  misc_RNA (1)...(19): siRNA sense strand
cugaagauccuccuugcaa

SEQ ID NO: 1626198 - RNA, 19 nt, Homo sapiens
  misc_RNA (1)...(19): siRNA sense strand
caaaacauccccuauccaa

SEQ ID NO: 1626199 - RNA, 19 nt, Homo sapiens
  misc_RNA (1)...(19): siRNA sense strand
agacaauacagcaaauuuc

SEQ ID NO: 1626200 - RNA, 19 nt, Homo sapiens
  misc_RNA (1)...(19): siRNA sense strand
gcaucaguauagccaaugg

SEQ ID NO: 1626201 - RNA, 19 nt, Homo sapiens
  misc_RNA (1)...(19): siRNA sense strand
gcccaaacaaguucugugu

SEQ ID NO: 1626202 - RNA, 19 nt, Homo sapiens
  misc_RNA (1)...(19): siRNA sense strand
gaugcagugaaacgaauuu

SEQ ID NO: 1626203 - RNA, 19 nt, Homo sapiens
  misc_RNA (1)...(19): siRNA sense strand
aagaaucuaccguugaaga

SEQ ID NO: 1626204 - RNA, 19 nt, Homo sapiens
  misc_RNA (1)...(19): siRNA sense strand
gagccuccugguuugauaa

SEQ ID NO: 1626205 - RNA, 19 nt, Homo sapiens
  misc_RNA (1)...(19): siRNA sense strand
ccagcagacaugaagcuaa

SEQ ID NO: 1626206 - RNA, 19 nt, Homo sapiens
  misc_RNA (1)...(19): siRNA sense strand
caguggaccuggccucucu

SEQ ID NO: 1626207 - RNA, 19 nt, Homo sapiens
  misc_RNA (1)...(19): siRNA sense strand
gauuacagcagaaacuuuu

SEQ ID NO: 1626208 - RNA, 19 nt, Homo sapiens
  misc_RNA (1)...(19): siRNA sense strand
gcaggguauuuguugaaac

SEQ ID NO: 1626209 - RNA, 19 nt, Homo sapiens
  misc_RNA (1)...(19): siRNA sense strand
agagauugaacaagaagaa

SEQ ID NO: 1626210 - RNA, 19 nt, Homo sapiens
  misc_RNA (1)...(19): siRNA sense strand
ggaaacuuacuggaugaug

SEQ ID NO: 1626211 - RNA, 19 nt, Homo sapiens
  misc_RNA (1)...(19): siRNA sense strand
agaaucuaccguugaagaa

SEQ ID NO: 1626212 - RNA, 19 nt, Homo sapiens
  misc_RNA (1)...(19): siRNA sense strand
aagaagaucccaugcaaaa

SEQ ID NO: 1626213 - RNA, 19 nt, Homo sapiens
  misc_RNA (1)...(19): siRNA sense strand
cagaaacuuuuauggagaa

SEQ ID NO: 1626214 - RNA, 19 nt, Homo sapiens
  misc_RNA (1)...(19): siRNA sense strand
gaaucuaccguugaagaag

SEQ ID NO: 1626215 - RNA, 19 nt, Homo sapiens
  misc_RNA (1)...(19): siRNA sense strand
gccgaaugcugcagaucuc

SEQ ID NO: 1626216 - RNA, 19 nt, Homo sapiens
  misc_RNA (1)...(19): siRNA sense strand
gacaugaagcuaauuugcu

SEQ ID NO: 1626217 - RNA, 19 nt, Homo sapiens
  misc_RNA (1)...(19): siRNA sense strand
ggaugcugcacaacaaaca

SEQ ID NO: 1626218 - RNA, 19 nt, Homo sapiens
  misc_RNA (1)...(19): siRNA sense strand
gaugcuaacaagcccacaa

SEQ ID NO: 1626219 - RNA, 19 nt, Homo sapiens
  misc_RNA (1)...(19): siRNA sense strand
caacucuaaaggacaugaa

SEQ ID NO: 1626220 - RNA, 19 nt, Homo sapiens
  misc_RNA (1)...(19): siRNA sense strand
ccaaagcaaaucuccaacu

SEQ ID NO: 1626221 - RNA, 19 nt, Homo sapiens
  misc_RNA (1)...(19): siRNA sense strand
ugcaggguauuuguugaaa

SEQ ID NO: 1626222 - RNA, 19 nt, Homo sapiens
  misc_RNA (1)...(19): siRNA sense strand
agaucuggccuugugguua

SEQ ID NO: 1626223 - RNA, 19 nt, Homo sapiens
  misc_RNA (1)...(19): siRNA sense strand
caacuugcagaaacuaugc

SEQ ID NO: 1626224 - RNA, 19 nt, Homo sapiens
  misc_RNA (1)...(19): siRNA sense strand
guggaugaaacgugucuau

SEQ ID NO: 1626225 - RNA, 19 nt, Homo sapiens
  misc_RNA (1)...(19): siRNA sense strand
gaugaaacgugucuauuug

SEQ ID NO: 1626226 - RNA, 19 nt, Homo sapiens
  misc_RNA (1)...(19): siRNA sense strand
caaagaaucuaccguugaa

SEQ ID NO: 1626227 - RNA, 19 nt, Homo sapiens
  misc_RNA (1)...(19): siRNA sense strand
gaucuggccuugugguuaa

SEQ ID NO: 1626228 - RNA, 19 nt, Homo sapiens
  misc_RNA (1)...(19): siRNA sense strand
ggaccuggccucucugaua

SEQ ID NO: 1626229 - RNA, 19 nt, Homo sapiens
  misc_RNA (1)...(19): siRNA sense strand
ggaugaaacgugucuauuu

SEQ ID NO: 1626230 - RNA, 19 nt, Homo sapiens
  misc_RNA (1)...(19): siRNA sense strand
gaacaagaagaaacacuuu

SEQ ID NO: 1626231 - RNA, 19 nt, Homo sapiens
  misc_RNA (1)...(19): siRNA sense strand
gcaaaugcccaaacaaguu

SEQ ID NO: 1626232 - RNA, 19 nt, Homo sapiens
  misc_RNA (1)...(19): siRNA sense strand
gcaaaucuccaacucuaaa

SEQ ID NO: 1626233 - RNA, 19 nt, Homo sapiens
  misc_RNA (1)...(19): siRNA sense strand
ugaagaagaucccaugcaa

SEQ ID NO: 1626234 - RNA, 19 nt, Homo sapiens
  misc_RNA (1)...(19): siRNA sense strand
aagcaaaucuccaacucua

SEQ ID NO: 1626235 - RNA, 19 nt, Homo sapiens
  misc_RNA (1)...(19): siRNA sense strand
ggacaugaauccagauaac

SEQ ID NO: 1626236 - RNA, 19 nt, Homo sapiens
  misc_RNA (1)...(19): siRNA sense strand
gaauccagauaacuacuug

SEQ ID NO: 1626237 - RNA, 19 nt, Homo sapiens
  misc_RNA (1)...(19): siRNA sense strand
gaagcuaauuugcuaccaa

SEQ ID NO: 1626238 - RNA, 19 nt, Homo sapiens
  misc_RNA (1)...(19): siRNA sense strand
ggaggaggcugggaaacuu

SEQ ID NO: 1626239 - RNA, 19 nt, Homo sapiens
  misc_RNA (1)...(19): siRNA sense strand
gaccuggccucucugauau

SEQ ID NO: 1626240 - RNA, 19 nt, Homo sapiens
  misc_RNA (1)...(19): siRNA sense strand
gagacaauacagcaaauuu

SEQ ID NO: 1626241 - RNA, 19 nt, Homo sapiens
  misc_RNA (1)...(19): siRNA sense strand
gcagacaugaagcuaauuu

SEQ ID NO: 1626242 - RNA, 19 nt, Homo sapiens
  misc_RNA (1)...(19): siRNA sense strand
cagaaacuaugcaggagaa

SEQ ID NO: 1626243 - RNA, 19 nt, Homo sapiens
  misc_RNA (1)...(19): siRNA sense strand
acaugaagcuaauuugcua

SEQ ID NO: 1626244 - RNA, 19 nt, Homo sapiens
  misc_RNA (1)...(19): siRNA sense strand
gaaggagauuacagcagaa

SEQ ID NO: 1626245 - RNA, 19 nt, Homo sapiens
  misc_RNA (1)...(19): siRNA sense strand
ugaaacgugucuauuugaa

SEQ ID NO: 1626246 - RNA, 19 nt, Homo sapiens
  misc_RNA (1)...(19): siRNA sense strand
cuaacaagcccacaaagaa

SEQ ID NO: 1626247 - RNA, 19 nt, Homo sapiens
  misc_RNA (1)...(19): siRNA sense strand
cagcagacaugaagcuaau

SEQ ID NO: 1626248 - RNA, 19 nt, Homo sapiens
  misc_RNA (1)...(19): siRNA sense strand
aagaagaucuggccuugug

SEQ ID NO: 1626249 - RNA, 19 nt, Homo sapiens
  misc_RNA (1)...(19): siRNA sense strand
aaagaguacaggaaacuua

SEQ ID NO: 1626250 - RNA, 19 nt, Homo sapiens
  misc_RNA (1)...(19): siRNA sense strand
gaagaagaucccaugcaaa

SEQ ID NO: 1626251 - RNA, 19 nt, Homo sapiens
  misc_RNA (1)...(19): siRNA sense strand
aaacgugucuauuugaauc

SEQ ID NO: 1626252 - RNA, 19 nt, Homo sapiens
  misc_RNA (1)...(19): siRNA sense strand
caaagcaaaucuccaacuc

SEQ ID NO: 1626253 - RNA, 19 nt, Homo sapiens
  misc_RNA (1)...(19): siRNA sense strand
cuaauuugcuaccaaugaa

SEQ ID NO: 1626254 - RNA, 19 nt, Homo sapiens
  misc_RNA (1)...(19): siRNA sense strand
ugaagauccuccuugcaaa

SEQ ID NO: 1626255 - RNA, 19 nt, Homo sapiens
  misc_RNA (1)...(19): siRNA sense strand
caucaaagucuucuggaaa

SEQ ID NO: 1626256 - RNA, 19 nt, Homo sapiens
  misc_RNA (1)...(19): siRNA sense strand
aaacuaugcaggagaaauu

SEQ ID NO: 1626257 - RNA, 19 nt, Homo sapiens
  misc_RNA (1)...(19): siRNA sense strand
gcuaauuugcuaccaauga

SEQ ID NO: 1626258 - RNA, 19 nt, Homo sapiens
  misc_RNA (1)...(19): siRNA sense strand
gaagauccuccuugcaaau

SEQ ID NO: 1626259 - RNA, 19 nt, Homo sapiens
  misc_RNA (1)...(19): siRNA sense strand
gcuaacaagcccacaaaga

SEQ ID NO: 1626260 - RNA, 19 nt, Homo sapiens
  misc_RNA (1)...(19): siRNA sense strand
guuauaaggcuaagaagga

SEQ ID NO: 1626261 - RNA, 19 nt, Homo sapiens
  misc_RNA (1)...(19): siRNA sense strand
gguggucucugccaguuau

SEQ ID NO: 1626262 - RNA, 19 nt, Homo sapiens
  misc_RNA (1)...(19): siRNA sense strand
uaacaagcccacaaagaau

SEQ ID NO: 1626263 - RNA, 19 nt, Homo sapiens
  misc_RNA (1)...(19): siRNA sense strand
caggaaacuuacuggauga

SEQ ID NO: 1626264 - RNA, 19 nt, Homo sapiens
  misc_RNA (1)...(19): siRNA sense strand
gcagaucucccguguggau

SEQ ID NO: 1626265 - RNA, 19 nt, Homo sapiens
  misc_RNA (1)...(19): siRNA sense strand
gaaacgugucuauuugaau

SEQ ID NO: 1626266 - RNA, 19 nt, Homo sapiens
  misc_RNA (1)...(19): siRNA sense strand
ccaguuauaaggcuaagaa

SEQ ID NO: 1626267 - RNA, 19 nt, Homo sapiens
  misc_RNA (1)...(19): siRNA sense strand
ccagagacaauacagcaaa

SEQ ID NO: 1626268 - RNA, 19 nt, Homo sapiens
  misc_RNA (1)...(19): siRNA sense strand
uuaggaugcugcacaacaa

SEQ ID NO: 1626269 - RNA, 19 nt, Homo sapiens
  misc_RNA (1)...(19): siRNA sense strand
gccuugcucugucaacuug

SEQ ID NO: 1626270 - RNA, 19 nt, Homo sapiens
  misc_RNA (1)...(19): siRNA sense strand
caaaugcccaaacaaguuc

SEQ ID NO: 1626271 - RNA, 19 nt, Homo sapiens
  misc_RNA (1)...(19): siRNA sense strand
aaacgaauuucugaagauc

SEQ ID NO: 1626272 - RNA, 19 nt, Homo sapiens
  misc_RNA (1)...(19): siRNA sense strand
aaucuaccguugaagaaga

SEQ ID NO: 1626273 - RNA, 19 nt, Homo sapiens
  misc_RNA (1)...(19): siRNA sense strand
acaaagaaucuaccguuga

SEQ ID NO: 1626274 - RNA, 19 nt, Homo sapiens
  misc_RNA (1)...(19): siRNA sense strand
gcuaagaaggaaauuaagu

SEQ ID NO: 1626275 - RNA, 19 nt, Homo sapiens
  misc_RNA (1)...(19): siRNA sense strand
uggagaaguuggacaaugg

SEQ ID NO: 1626276 - RNA, 19 nt, Homo sapiens
  misc_RNA (1)...(19): siRNA sense strand
aggcuaagaaggaaauuaa

SEQ ID NO: 1626277 - RNA, 19 nt, Homo sapiens
  misc_RNA (1)...(19): siRNA sense strand
gaugaugcagugaaacgaa

SEQ ID NO: 1626278 - RNA, 19 nt, Homo sapiens
  misc_RNA (1)...(19): siRNA sense strand
ucaucaaagucuucuggaa

SEQ ID NO: 1626279 - RNA, 19 nt, Homo sapiens
  misc_RNA (1)...(19): siRNA sense strand
caccuucuccuucaucaaa

SEQ ID NO: 1626280 - RNA, 19 nt, Homo sapiens
  misc_RNA (1)...(19): siRNA sense strand
gcuagagcuuggccggauu

SEQ ID NO: 1626281 - RNA, 19 nt, Homo sapiens
  misc_RNA (1)...(19): siRNA sense strand
gacaauacagcaaauuucu

SEQ ID NO: 1626282 - RNA, 19 nt, Homo sapiens
  misc_RNA (1)...(19): siRNA sense strand
cagagacaauacagcaaau

SEQ ID NO: 1626283 - RNA, 19 nt, Homo sapiens
  misc_RNA (1)...(19): siRNA sense strand
gaaacuaugcaggagaaau

SEQ ID NO: 1626284 - RNA, 19 nt, Homo sapiens
  misc_RNA (1)...(19): siRNA sense strand
ucauuaggaugcugcacaa

SEQ ID NO: 1626285 - RNA, 19 nt, Homo sapiens
  misc_RNA (1)...(19): siRNA sense strand
acaugaauccagauaacua

SEQ ID NO: 1626286 - RNA, 19 nt, Homo sapiens
  misc_RNA (1)...(19): siRNA sense strand
gagauuacagcagaaacuu

SEQ ID NO: 1626287 - RNA, 19 nt, Homo sapiens
  misc_RNA (1)...(19): siRNA sense strand
cuaagaaggaaauuaagug

SEQ ID NO: 1626288 - RNA, 19 nt, Homo sapiens
  misc_RNA (1)...(19): siRNA sense strand
gaggaggcugggaaacuuu

SEQ ID NO: 1626289 - RNA, 19 nt, Homo sapiens
  misc_RNA (1)...(19): siRNA sense strand
caagcaacccagagaagug

SEQ ID NO: 1626290 - RNA, 19 nt, Homo sapiens
  misc_RNA (1)...(19): siRNA sense strand
ccacaagcaacccagagaa

SEQ ID NO: 1626291 - RNA, 19 nt, Homo sapiens
  misc_RNA (1)...(19): siRNA sense strand
uuauaaggcuaagaaggaa

SEQ ID NO: 1626292 - RNA, 19 nt, Homo sapiens
  misc_RNA (1)...(19): siRNA sense strand
gagauugaacaagaagaaa

SEQ ID NO: 1626293 - RNA, 19 nt, Homo sapiens
  misc_RNA (1)...(19): siRNA sense strand
aagcuaauuugcuaccaau

SEQ ID NO: 1626294 - RNA, 19 nt, Homo sapiens
  misc_RNA (1)...(19): siRNA sense strand
ggagauuacagcagaaacu

SEQ ID NO: 1626295 - RNA, 19 nt, Homo sapiens
  misc_RNA (1)...(19): siRNA sense strand
ugaacaagaagaaacacuu

SEQ ID NO: 1626296 - RNA, 19 nt, Homo sapiens
  misc_RNA (1)...(19): siRNA sense strand
gauugaacaagaagaaaca

SEQ ID NO: 1626297 - RNA, 19 nt, Homo sapiens
  misc_RNA (1)...(19): siRNA sense strand
cugaagauccuccuugcaa

SEQ ID NO: 1626298 - RNA, 19 nt, Homo sapiens
  misc_RNA (1)...(19): siRNA sense strand
caaaacauccccuauccaa

SEQ ID NO: 1626299 - RNA, 19 nt, Homo sapiens
  misc_RNA (1)...(19): siRNA sense strand
agacaauacagcaaauuuc

SEQ ID NO: 1626300 - RNA, 19 nt, Homo sapiens
  misc_RNA (1)...(19): siRNA sense strand
gcaucaguauagccaaugg

SEQ ID NO: 1626301 - RNA, 19 nt, Homo sapiens
  misc_RNA (1)...(19): siRNA sense strand
gcccaaacaaguucugugu

SEQ ID NO: 1626302 - RNA, 19 nt, Homo sapiens
  misc_RNA (1)...(19): siRNA sense strand
gaugcagugaaacgaauuu

SEQ ID NO: 1626303 - RNA, 19 nt, Homo sapiens
  misc_RNA (1)...(19): siRNA sense strand
aagaaucuaccguugaaga

SEQ ID NO: 1626304 - RNA, 19 nt, Homo sapiens
  misc_RNA (1)...(19): siRNA sense strand
gagccuccugguuugauaa

SEQ ID NO: 1626305 - RNA, 19 nt, Homo sapiens
  misc_RNA (1)...(19): siRNA sense strand
ccagcagacaugaagcuaa

SEQ ID NO: 1626306 - RNA, 19 nt, Homo sapiens
  misc_RNA (1)...(19): siRNA sense strand
caguggaccuggccucucu

SEQ ID NO: 1626307 - RNA, 19 nt, Homo sapiens
  misc_RNA (1)...(19): siRNA sense strand
gauuacagcagaaacuuuu

SEQ ID NO: 1626308 - RNA, 19 nt, Homo sapiens
  misc_RNA (1)...(19): siRNA sense strand
gcaggguauuuguugaaac

SEQ ID NO: 1626309 - RNA, 19 nt, Homo sapiens
  misc_RNA (1)...(19): siRNA sense strand
agagauugaacaagaagaa

SEQ ID NO: 1626310 - RNA, 19 nt, Homo sapiens
  misc_RNA (1)...(19): siRNA sense strand
ggaaacuuacuggaugaug

SEQ ID NO: 1626311 - RNA, 19 nt, Homo sapiens
  misc_RNA (1)...(19): siRNA sense strand
agaaucuaccguugaagaa

SEQ ID NO: 1626312 - RNA, 19 nt, Homo sapiens
  misc_RNA (1)...(19): siRNA sense strand
aagaagaucccaugcaaaa

SEQ ID NO: 1626313 - RNA, 19 nt, Homo sapiens
  misc_RNA (1)...(19): siRNA sense strand
cagaaacuuuuauggagaa

SEQ ID NO: 1626314 - RNA, 19 nt, Homo sapiens
  misc_RNA (1)...(19): siRNA sense strand
gaaucuaccguugaagaag

SEQ ID NO: 1626315 - RNA, 19 nt, Homo sapiens
  misc_RNA (1)...(19): siRNA sense strand
gccgaaugcugcagaucuc

SEQ ID NO: 1626316 - RNA, 19 nt, Homo sapiens
  misc_RNA (1)...(19): siRNA sense strand
gacaugaagcuaauuugcu

SEQ ID NO: 1626317 - RNA, 19 nt, Homo sapiens
  misc_RNA (1)...(19): siRNA sense strand
ggaugcugcacaacaaaca

SEQ ID NO: 1626318 - RNA, 19 nt, Homo sapiens
  misc_RNA (1)...(19): siRNA sense strand
gaugcuaacaagcccacaa

SEQ ID NO: 1626319 - RNA, 19 nt, Homo sapiens
  misc_RNA (1)...(19): siRNA sense strand
caacucuaaaggacaugaa

SEQ ID NO: 1626320 - RNA, 19 nt, Homo sapiens
  misc_RNA (1)...(19): siRNA sense strand
ccaaagcaaaucuccaacu

SEQ ID NO: 1626321 - RNA, 19 nt, Homo sapiens
  misc_RNA (1)...(19): siRNA sense strand
ugcaggguauuuguugaaa

SEQ ID NO: 1626322 - RNA, 19 nt, Homo sapiens
  misc_RNA (1)...(19): siRNA sense strand
agaucuggccuugugguua

SEQ ID NO: 1626323 - RNA, 19 nt, Homo sapiens
  misc_RNA (1)...(19): siRNA sense strand
caacuugcagaaacuaugc

SEQ ID NO: 1626324 - RNA, 19 nt, Homo sapiens
  misc_RNA (1)...(19): siRNA sense strand
guggaugaaacgugucuau

SEQ ID NO: 1626325 - RNA, 19 nt, Homo sapiens
  misc_RNA (1)...(19): siRNA sense strand
ugacagaccuggccaagua

SEQ ID NO: 1626326 - RNA, 19 nt, Homo sapiens
  misc_RNA (1)...(19): siRNA sense strand
gcacgacucuguuggaagu

SEQ ID NO: 1626327 - RNA, 19 nt, Homo sapiens
  misc_RNA (1)...(19): siRNA sense strand
gcucggacuucaacaacua

SEQ ID NO: 1626328 - RNA, 19 nt, Homo sapiens
  misc_RNA (1)...(19): siRNA sense strand
cuacguggcugcuguauac

SEQ ID NO: 1626329 - RNA, 19 nt, Homo sapiens
  misc_RNA (1)...(19): siRNA sense strand
ccgcgugucugauuacaaa

SEQ ID NO: 1626330 - RNA, 19 nt, Homo sapiens
  misc_RNA (1)...(19): siRNA sense strand
gggaaacccugcugauguc

SEQ ID NO: 1626331 - RNA, 19 nt, Homo sapiens
  misc_RNA (1)...(19): siRNA sense strand
caucucagacuucuucaaa

SEQ ID NO: 1626332 - RNA, 19 nt, Homo sapiens
  misc_RNA (1)...(19): siRNA sense strand
acacagaccggcucuauuc

SEQ ID NO: 1626333 - RNA, 19 nt, Homo sapiens
  misc_RNA (1)...(19): siRNA sense strand
guacacagaccggcucuau

SEQ ID NO: 1626334 - RNA, 19 nt, Homo sapiens
  misc_RNA (1)...(19): siRNA sense strand
cuacaucucagacuucuuc

SEQ ID NO: 1626335 - RNA, 19 nt, Homo sapiens
  misc_RNA (1)...(19): siRNA sense strand
caacuacguggcugcugua

SEQ ID NO: 1626336 - RNA, 19 nt, Homo sapiens
  misc_RNA (1)...(19): siRNA sense strand
caacugcucggucuaugug

SEQ ID NO: 1626337 - RNA, 19 nt, Homo sapiens
  misc_RNA (1)...(19): siRNA sense strand
gaggccagguugucuuucu

SEQ ID NO: 1626338 - RNA, 19 nt, Homo sapiens
  misc_RNA (1)...(19): siRNA sense strand
gccgugagccagucucuga

SEQ ID NO: 1626339 - RNA, 19 nt, Homo sapiens
  misc_RNA (1)...(19): siRNA sense strand
ccacaaccacuauggauac

SEQ ID NO: 1626340 - RNA, 19 nt, Homo sapiens
  misc_RNA (1)...(19): siRNA sense strand
gaaggaggaggagcuggaa

SEQ ID NO: 1626341 - RNA, 19 nt, Homo sapiens
  misc_RNA (1)...(19): siRNA sense strand
cuggagcgauguccuuguu

SEQ ID NO: 1626342 - RNA, 19 nt, Homo sapiens
  misc_RNA (1)...(19): siRNA sense strand
ucgggacacucuuccuuug

SEQ ID NO: 1626343 - RNA, 19 nt, Homo sapiens
  misc_RNA (1)...(19): siRNA sense strand
gaccacaaccacuauggau

SEQ ID NO: 1626344 - RNA, 19 nt, Homo sapiens
  misc_RNA (1)...(19): siRNA sense strand
gacccacaguccaguucuu

SEQ ID NO: 1626345 - RNA, 19 nt, Homo sapiens
  misc_RNA (1)...(19): siRNA sense strand
gaccuggccaaguacauga

SEQ ID NO: 1626346 - RNA, 19 nt, Homo sapiens
  misc_RNA (1)...(19): siRNA sense strand
ggucaacugcucggucuau

SEQ ID NO: 1626347 - RNA, 19 nt, Homo sapiens
  misc_RNA (1)...(19): siRNA sense strand
ucucagacuucuucaaagc

SEQ ID NO: 1626348 - RNA, 19 nt, Homo sapiens
  misc_RNA (1)...(19): siRNA sense strand
aagcccagccugucacuga

SEQ ID NO: 1626349 - RNA, 19 nt, Homo sapiens
  misc_RNA (1)...(19): siRNA sense strand
ccacuggagcgauguccuu

SEQ ID NO: 1626350 - RNA, 19 nt, Homo sapiens
  misc_RNA (1)...(19): siRNA sense strand
gggaagccuaccuggugua

SEQ ID NO: 1626351 - RNA, 19 nt, Homo sapiens
  misc_RNA (1)...(19): siRNA sense strand
ggauguacugcaugguguu

SEQ ID NO: 1626352 - RNA, 19 nt, Homo sapiens
  misc_RNA (1)...(19): siRNA sense strand
ugacagaccuggccaagua

SEQ ID NO: 1626353 - RNA, 19 nt, Homo sapiens
  misc_RNA (1)...(19): siRNA sense strand
gcacgacucuguuggaagu

SEQ ID NO: 1626354 - RNA, 19 nt, Homo sapiens
  misc_RNA (1)...(19): siRNA sense strand
gcucggacuucaacaacua

SEQ ID NO: 1626355 - RNA, 19 nt, Homo sapiens
  misc_RNA (1)...(19): siRNA sense strand
cuacguggcugcuguauac

SEQ ID NO: 1626356 - RNA, 19 nt, Homo sapiens
  misc_RNA (1)...(19): siRNA sense strand
ccgcgugucugauuacaaa

SEQ ID NO: 1626357 - RNA, 19 nt, Homo sapiens
  misc_RNA (1)...(19): siRNA sense strand
gggaaacccugcugauguc

SEQ ID NO: 1626358 - RNA, 19 nt, Homo sapiens
  misc_RNA (1)...(19): siRNA sense strand
caucucagacuucuucaaa

SEQ ID NO: 1626359 - RNA, 19 nt, Homo sapiens
  misc_RNA (1)...(19): siRNA sense strand
acacagaccggcucuauuc

SEQ ID NO: 1626360 - RNA, 19 nt, Homo sapiens
  misc_RNA (1)...(19): siRNA sense strand
guacacagaccggcucuau

SEQ ID NO: 1626361 - RNA, 19 nt, Homo sapiens
  misc_RNA (1)...(19): siRNA sense strand
cuacaucucagacuucuuc

SEQ ID NO: 1626362 - RNA, 19 nt, Homo sapiens
  misc_RNA (1)...(19): siRNA sense strand
caacuacguggcugcugua

SEQ ID NO: 1626363 - RNA, 19 nt, Homo sapiens
  misc_RNA (1)...(19): siRNA sense strand
caacugcucggucuaugug

SEQ ID NO: 1626364 - RNA, 19 nt, Homo sapiens
  misc_RNA (1)...(19): siRNA sense strand
gaggccagguugucuuucu

SEQ ID NO: 1626365 - RNA, 19 nt, Homo sapiens
  misc_RNA (1)...(19): siRNA sense strand
gccgugagccagucucuga

SEQ ID NO: 1626366 - RNA, 19 nt, Homo sapiens
  misc_RNA (1)...(19): siRNA sense strand
ccacaaccacuauggauac

SEQ ID NO: 1626367 - RNA, 19 nt, Homo sapiens
  misc_RNA (1)...(19): siRNA sense strand
gaaggaggaggagcuggaa

SEQ ID NO: 1626368 - RNA, 19 nt, Homo sapiens
  misc_RNA (1)...(19): siRNA sense strand
cuggagcgauguccuuguu

SEQ ID NO: 1626369 - RNA, 19 nt, Homo sapiens
  misc_RNA (1)...(19): siRNA sense strand
ucgggacacucuuccuuug

SEQ ID NO: 1626370 - RNA, 19 nt, Homo sapiens
  misc_RNA (1)...(19): siRNA sense strand
gaccacaaccacuauggau

SEQ ID NO: 1626371 - RNA, 19 nt, Homo sapiens
  misc_RNA (1)...(19): siRNA sense strand
gacccacaguccaguucuu

SEQ ID NO: 1626372 - RNA, 19 nt, Homo sapiens
  misc_RNA (1)...(19): siRNA sense strand
gaccuggccaaguacauga

SEQ ID NO: 1626373 - RNA, 19 nt, Homo sapiens
  misc_RNA (1)...(19): siRNA sense strand
ggucaacugcucggucuau

SEQ ID NO: 1626374 - RNA, 19 nt, Homo sapiens
  misc_RNA (1)...(19): siRNA sense strand
ucucagacuucuucaaagc

SEQ ID NO: 1626375 - RNA, 19 nt, Homo sapiens
  misc_RNA (1)...(19): siRNA sense strand
aagcccagccugucacuga

SEQ ID NO: 1626376 - RNA, 19 nt, Homo sapiens
  misc_RNA (1)...(19): siRNA sense strand
ccacuggagcgauguccuu

SEQ ID NO: 1626377 - RNA, 19 nt, Homo sapiens
  misc_RNA (1)...(19): siRNA sense strand
gggaagccuaccuggugua

SEQ ID NO: 1626378 - RNA, 19 nt, Homo sapiens
  misc_RNA (1)...(19): siRNA sense strand
ggauguacugcaugguguu

SEQ ID NO: 1626379 - RNA, 19 nt, Homo sapiens
  misc_RNA (1)...(19): siRNA sense strand
ugacagaccuggccaagua

SEQ ID NO: 1626380 - RNA, 19 nt, Homo sapiens
  misc_RNA (1)...(19): siRNA sense strand
gcacgacucuguuggaagu

SEQ ID NO: 1626381 - RNA, 19 nt, Homo sapiens
  misc_RNA (1)...(19): siRNA sense strand
gcucggacuucaacaacua

SEQ ID NO: 1626382 - RNA, 19 nt, Homo sapiens
  misc_RNA (1)...(19): siRNA sense strand
cuacguggcugcuguauac

SEQ ID NO: 1626383 - RNA, 19 nt, Homo sapiens
  misc_RNA (1)...(19): siRNA sense strand
ccgcgugucugauuacaaa

SEQ ID NO: 1626384 - RNA, 19 nt, Homo sapiens
  misc_RNA (1)...(19): siRNA sense strand
gggaaacccugcugauguc

SEQ ID NO: 1626385 - RNA, 19 nt, Homo sapiens
  misc_RNA (1)...(19): siRNA sense strand
caucucagacuucuucaaa

SEQ ID NO: 1626386 - RNA, 19 nt, Homo sapiens
  misc_RNA (1)...(19): siRNA sense strand
acacagaccggcucuauuc

SEQ ID NO: 1626387 - RNA, 19 nt, Homo sapiens
  misc_RNA (1)...(19): siRNA sense strand
guacacagaccggcucuau

SEQ ID NO: 1626388 - RNA, 19 nt, Homo sapiens
  misc_RNA (1)...(19): siRNA sense strand
cuacaucucagacuucuuc

SEQ ID NO: 1626389 - RNA, 19 nt, Homo sapiens
  misc_RNA (1)...(19): siRNA sense strand
caacuacguggcugcugua

SEQ ID NO: 1626390 - RNA, 19 nt, Homo sapiens
  misc_RNA (1)...(19): siRNA sense strand
caacugcucggucuaugug

SEQ ID NO: 1626391 - RNA, 19 nt, Homo sapiens
  misc_RNA (1)...(19): siRNA sense strand
gaggccagguugucuuucu

SEQ ID NO: 1626392 - RNA, 19 nt, Homo sapiens
  misc_RNA (1)...(19): siRNA sense strand
gccgugagccagucucuga

SEQ ID NO: 1626393 - RNA, 19 nt, Homo sapiens
  misc_RNA (1)...(19): siRNA sense strand
ccacaaccacuauggauac

SEQ ID NO: 1626394 - RNA, 19 nt, Homo sapiens
  misc_RNA (1)...(19): siRNA sense strand
gaaggaggaggagcuggaa

SEQ ID NO: 1626395 - RNA, 19 nt, Homo sapiens
  misc_RNA (1)...(19): siRNA sense strand
cuggagcgauguccuuguu

SEQ ID NO: 1626396 - RNA, 19 nt, Homo sapiens
  misc_RNA (1)...(19): siRNA sense strand
ucgggacacucuuccuuug

SEQ ID NO: 1626397 - RNA, 19 nt, Homo sapiens
  misc_RNA (1)...(19): siRNA sense strand
gaccacaaccacuauggau

SEQ ID NO: 1626398 - RNA, 19 nt, Homo sapiens
  misc_RNA (1)...(19): siRNA sense strand
gacccacaguccaguucuu

SEQ ID NO: 1626399 - RNA, 19 nt, Homo sapiens
  misc_RNA (1)...(19): siRNA sense strand
gaccuggccaaguacauga

SEQ ID NO: 1626400 - RNA, 19 nt, Homo sapiens
  misc_RNA (1)...(19): siRNA sense strand
ggucaacugcucggucuau

SEQ ID NO: 1626401 - RNA, 19 nt, Homo sapiens
  misc_RNA (1)...(19): siRNA sense strand
ucucagacuucuucaaagc

SEQ ID NO: 1626402 - RNA, 19 nt, Homo sapiens
  misc_RNA (1)...(19): siRNA sense strand
aagcccagccugucacuga

SEQ ID NO: 1626403 - RNA, 19 nt, Homo sapiens
  misc_RNA (1)...(19): siRNA sense strand
ccacuggagcgauguccuu

SEQ ID NO: 1626404 - RNA, 19 nt, Homo sapiens
  misc_RNA (1)...(19): siRNA sense strand
gggaagccuaccuggugua

SEQ ID NO: 1626405 - RNA, 19 nt, Homo sapiens
  misc_RNA (1)...(19): siRNA sense strand
ggauguacugcaugguguu

SEQ ID NO: 1626406 - RNA, 19 nt, Homo sapiens
  misc_RNA (1)...(19): siRNA sense strand
ucaaggagaugaagaagaa

SEQ ID NO: 1626407 - RNA, 19 nt, Homo sapiens
  misc_RNA (1)...(19): siRNA sense strand
guucauggcuggagaagug

SEQ ID NO: 1626408 - RNA, 19 nt, Homo sapiens
  misc_RNA (1)...(19): siRNA sense strand
uaaccgggcucccaucuac

SEQ ID NO: 1626409 - RNA, 19 nt, Homo sapiens
  misc_RNA (1)...(19): siRNA sense strand
gggucccgcucaucaagua

SEQ ID NO: 1626410 - RNA, 19 nt, Homo sapiens
  misc_RNA (1)...(19): siRNA sense strand
ccucagggcuggagacucu

SEQ ID NO: 1626411 - RNA, 19 nt, Homo sapiens
  misc_RNA (1)...(19): siRNA sense strand
gcgcuucgaugcggacuau

SEQ ID NO: 1626412 - RNA, 19 nt, Homo sapiens
  misc_RNA (1)...(19): siRNA sense strand
gcacccacccuguucucua

SEQ ID NO: 1626413 - RNA, 19 nt, Homo sapiens
  misc_RNA (1)...(19): siRNA sense strand
agaagaacccuaugaccaa

SEQ ID NO: 1626414 - RNA, 19 nt, Homo sapiens
  misc_RNA (1)...(19): siRNA sense strand
augaagacaugaaggagaa

SEQ ID NO: 1626415 - RNA, 19 nt, Homo sapiens
  misc_RNA (1)...(19): siRNA sense strand
gcggcgaccuagagaagug

SEQ ID NO: 1626416 - RNA, 19 nt, Homo sapiens
  misc_RNA (1)...(19): siRNA sense strand
agaacccuaugaccaacua

SEQ ID NO: 1626417 - RNA, 19 nt, Homo sapiens
  misc_RNA (1)...(19): siRNA sense strand
gaaggucaagguggucuau

SEQ ID NO: 1626418 - RNA, 19 nt, Homo sapiens
  misc_RNA (1)...(19): siRNA sense strand
acacgucguucaaggagau

SEQ ID NO: 1626419 - RNA, 19 nt, Homo sapiens
  misc_RNA (1)...(19): siRNA sense strand
ggucaagguggucuauguu

SEQ ID NO: 1626420 - RNA, 19 nt, Homo sapiens
  misc_RNA (1)...(19): siRNA sense strand
ggcuggagacucugaaaga

SEQ ID NO: 1626421 - RNA, 19 nt, Homo sapiens
  misc_RNA (1)...(19): siRNA sense strand
gcagaaugagcgcuucgau

SEQ ID NO: 1626422 - RNA, 19 nt, Homo sapiens
  misc_RNA (1)...(19): siRNA sense strand
guaaccgggcucccaucua

SEQ ID NO: 1626423 - RNA, 19 nt, Homo sapiens
  misc_RNA (1)...(19): siRNA sense strand
ucaccguggcgcagaauga

SEQ ID NO: 1626424 - RNA, 19 nt, Homo sapiens
  misc_RNA (1)...(19): siRNA sense strand
ggucuccuacuaccauuuc

SEQ ID NO: 1626425 - RNA, 19 nt, Homo sapiens
  misc_RNA (1)...(19): siRNA sense strand
uucucuaccucuucuauga

SEQ ID NO: 1626426 - RNA, 19 nt, Homo sapiens
  misc_RNA (1)...(19): siRNA sense strand
gcuggagacucugaaagac

SEQ ID NO: 1626427 - RNA, 19 nt, Homo sapiens
  misc_RNA (1)...(19): siRNA sense strand
gcucaucaaguacuuugca

SEQ ID NO: 1626428 - RNA, 19 nt, Homo sapiens
  misc_RNA (1)...(19): siRNA sense strand
aaaagauccuggaguuugu

SEQ ID NO: 1626429 - RNA, 19 nt, Homo sapiens
  misc_RNA (1)...(19): siRNA sense strand
ggucuauguugcccgaaac

SEQ ID NO: 1626430 - RNA, 19 nt, Homo sapiens
  misc_RNA (1)...(19): siRNA sense strand
cacccacccuguucucuac

SEQ ID NO: 1626431 - RNA, 19 nt, Homo sapiens
  misc_RNA (1)...(19): siRNA sense strand
gcggucuccuacuaccauu

SEQ ID NO: 1626432 - RNA, 19 nt, Homo sapiens
  misc_RNA (1)...(19): siRNA sense strand
gucaagguggucuauguug

SEQ ID NO: 1626433 - RNA, 19 nt, Homo sapiens
  misc_RNA (1)...(19): siRNA sense strand
gaugaagaagaacccuaug

SEQ ID NO: 1626434 - RNA, 19 nt, Homo sapiens
  misc_RNA (1)...(19): siRNA sense strand
ucuaugaagacaugaagga

SEQ ID NO: 1626435 - RNA, 19 nt, Homo sapiens
  misc_RNA (1)...(19): siRNA sense strand
acguggcggucuccuacua

SEQ ID NO: 1626436 - RNA, 19 nt, Homo sapiens
  misc_RNA (1)...(19): siRNA sense strand
ucaaggagaugaagaagaa

SEQ ID NO: 1626437 - RNA, 19 nt, Homo sapiens
  misc_RNA (1)...(19): siRNA sense strand
guucauggcuggagaagug

SEQ ID NO: 1626438 - RNA, 19 nt, Homo sapiens
  misc_RNA (1)...(19): siRNA sense strand
uaaccgggcucccaucuac

SEQ ID NO: 1626439 - RNA, 19 nt, Homo sapiens
  misc_RNA (1)...(19): siRNA sense strand
gggucccgcucaucaagua

SEQ ID NO: 1626440 - RNA, 19 nt, Homo sapiens
  misc_RNA (1)...(19): siRNA sense strand
ccucagggcuggagacucu

SEQ ID NO: 1626441 - RNA, 19 nt, Homo sapiens
  misc_RNA (1)...(19): siRNA sense strand
gcgcuucgaugcggacuau

SEQ ID NO: 1626442 - RNA, 19 nt, Homo sapiens
  misc_RNA (1)...(19): siRNA sense strand
gcacccacccuguucucua

SEQ ID NO: 1626443 - RNA, 19 nt, Homo sapiens
  misc_RNA (1)...(19): siRNA sense strand
agaagaacccuaugaccaa

SEQ ID NO: 1626444 - RNA, 19 nt, Homo sapiens
  misc_RNA (1)...(19): siRNA sense strand
augaagacaugaaggagaa

SEQ ID NO: 1626445 - RNA, 19 nt, Homo sapiens
  misc_RNA (1)...(19): siRNA sense strand
gcggcgaccuagagaagug

SEQ ID NO: 1626446 - RNA, 19 nt, Homo sapiens
  misc_RNA (1)...(19): siRNA sense strand
agaacccuaugaccaacua

SEQ ID NO: 1626447 - RNA, 19 nt, Homo sapiens
  misc_RNA (1)...(19): siRNA sense strand
gaaggucaagguggucuau

SEQ ID NO: 1626448 - RNA, 19 nt, Homo sapiens
  misc_RNA (1)...(19): siRNA sense strand
acacgucguucaaggagau

SEQ ID NO: 1626449 - RNA, 19 nt, Homo sapiens
  misc_RNA (1)...(19): siRNA sense strand
ggucaagguggucuauguu

SEQ ID NO: 1626450 - RNA, 19 nt, Homo sapiens
  misc_RNA (1)...(19): siRNA sense strand
ggcuggagacucugaaaga

SEQ ID NO: 1626451 - RNA, 19 nt, Homo sapiens
  misc_RNA (1)...(19): siRNA sense strand
gcagaaugagcgcuucgau

SEQ ID NO: 1626452 - RNA, 19 nt, Homo sapiens
  misc_RNA (1)...(19): siRNA sense strand
guaaccgggcucccaucua

SEQ ID NO: 1626453 - RNA, 19 nt, Homo sapiens
  misc_RNA (1)...(19): siRNA sense strand
ucaccguggcgcagaauga

SEQ ID NO: 1626454 - RNA, 19 nt, Homo sapiens
  misc_RNA (1)...(19): siRNA sense strand
ggucuccuacuaccauuuc

SEQ ID NO: 1626455 - RNA, 19 nt, Homo sapiens
  misc_RNA (1)...(19): siRNA sense strand
uucucuaccucuucuauga

SEQ ID NO: 1626456 - RNA, 19 nt, Homo sapiens
  misc_RNA (1)...(19): siRNA sense strand
gcuggagacucugaaagac

SEQ ID NO: 1626457 - RNA, 19 nt, Homo sapiens
  misc_RNA (1)...(19): siRNA sense strand
gcucaucaaguacuuugca

SEQ ID NO: 1626458 - RNA, 19 nt, Homo sapiens
  misc_RNA (1)...(19): siRNA sense strand
aaaagauccuggaguuugu

SEQ ID NO: 1626459 - RNA, 19 nt, Homo sapiens
  misc_RNA (1)...(19): siRNA sense strand
ggucuauguugcccgaaac

SEQ ID NO: 1626460 - RNA, 19 nt, Homo sapiens
  misc_RNA (1)...(19): siRNA sense strand
cacccacccuguucucuac

SEQ ID NO: 1626461 - RNA, 19 nt, Homo sapiens
  misc_RNA (1)...(19): siRNA sense strand
gcggucuccuacuaccauu

SEQ ID NO: 1626462 - RNA, 19 nt, Homo sapiens
  misc_RNA (1)...(19): siRNA sense strand
gucaagguggucuauguug

SEQ ID NO: 1626463 - RNA, 19 nt, Homo sapiens
  misc_RNA (1)...(19): siRNA sense strand
gaugaagaagaacccuaug

SEQ ID NO: 1626464 - RNA, 19 nt, Homo sapiens
  misc_RNA (1)...(19): siRNA sense strand
ucuaugaagacaugaagga

SEQ ID NO: 1626465 - RNA, 19 nt, Homo sapiens
  misc_RNA (1)...(19): siRNA sense strand
acguggcggucuccuacua

SEQ ID NO: 1626466 - RNA, 19 nt, Homo sapiens
  misc_RNA (1)...(19): siRNA sense strand
ugacuggugugccuucugu

SEQ ID NO: 1626467 - RNA, 19 nt, Homo sapiens
  misc_RNA (1)...(19): siRNA sense strand
caauugaagaccaggauga

SEQ ID NO: 1626468 - RNA, 19 nt, Homo sapiens
  misc_RNA (1)...(19): siRNA sense strand
gaucggaggcucagagaac

SEQ ID NO: 1626469 - RNA, 19 nt, Homo sapiens
  misc_RNA (1)...(19): siRNA sense strand
gcuacugugucuucagcaa

SEQ ID NO: 1626470 - RNA, 19 nt, Homo sapiens
  misc_RNA (1)...(19): siRNA sense strand
uggcagaugugcucaaggu

SEQ ID NO: 1626471 - RNA, 19 nt, Homo sapiens
  misc_RNA (1)...(19): siRNA sense strand
gguggagagugucuucaag

SEQ ID NO: 1626472 - RNA, 19 nt, Homo sapiens
  misc_RNA (1)...(19): siRNA sense strand
cgagaacaacugugagauc

SEQ ID NO: 1626473 - RNA, 19 nt, Homo sapiens
  misc_RNA (1)...(19): siRNA sense strand
ugucagugguggagagugu

SEQ ID NO: 1626474 - RNA, 19 nt, Homo sapiens
  misc_RNA (1)...(19): siRNA sense strand
cugggaugguggugaauga

SEQ ID NO: 1626475 - RNA, 19 nt, Homo sapiens
  misc_RNA (1)...(19): siRNA sense strand
gagggcgagcucuccgaua

SEQ ID NO: 1626476 - RNA, 19 nt, Homo sapiens
  misc_RNA (1)...(19): siRNA sense strand
gaccaggugcuaguaggaa

SEQ ID NO: 1626477 - RNA, 19 nt, Homo sapiens
  misc_RNA (1)...(19): siRNA sense strand
cugcugggaugguggugaa

SEQ ID NO: 1626478 - RNA, 19 nt, Homo sapiens
  misc_RNA (1)...(19): siRNA sense strand
ccgaggcagugaggugauu

SEQ ID NO: 1626479 - RNA, 19 nt, Homo sapiens
  misc_RNA (1)...(19): siRNA sense strand
caucccaagacuucaauug

SEQ ID NO: 1626480 - RNA, 19 nt, Homo sapiens
  misc_RNA (1)...(19): siRNA sense strand
ccaccagcaugcgggauuc

SEQ ID NO: 1626481 - RNA, 19 nt, Homo sapiens
  misc_RNA (1)...(19): siRNA sense strand
ugugagaucggcugcuuug

SEQ ID NO: 1626482 - RNA, 19 nt, Homo sapiens
  misc_RNA (1)...(19): siRNA sense strand
gcuggugcaucccaagacu

SEQ ID NO: 1626483 - RNA, 19 nt, Homo sapiens
  misc_RNA (1)...(19): siRNA sense strand
ugacuggugugccuucugu

SEQ ID NO: 1626484 - RNA, 19 nt, Homo sapiens
  misc_RNA (1)...(19): siRNA sense strand
caauugaagaccaggauga

SEQ ID NO: 1626485 - RNA, 19 nt, Homo sapiens
  misc_RNA (1)...(19): siRNA sense strand
gaucggaggcucagagaac

SEQ ID NO: 1626486 - RNA, 19 nt, Homo sapiens
  misc_RNA (1)...(19): siRNA sense strand
gcuacugugucuucagcaa

SEQ ID NO: 1626487 - RNA, 19 nt, Homo sapiens
  misc_RNA (1)...(19): siRNA sense strand
uggcagaugugcucaaggu

SEQ ID NO: 1626488 - RNA, 19 nt, Homo sapiens
  misc_RNA (1)...(19): siRNA sense strand
gguggagagugucuucaag

SEQ ID NO: 1626489 - RNA, 19 nt, Homo sapiens
  misc_RNA (1)...(19): siRNA sense strand
cgagaacaacugugagauc

SEQ ID NO: 1626490 - RNA, 19 nt, Homo sapiens
  misc_RNA (1)...(19): siRNA sense strand
ugucagugguggagagugu

SEQ ID NO: 1626491 - RNA, 19 nt, Homo sapiens
  misc_RNA (1)...(19): siRNA sense strand
cugggaugguggugaauga

SEQ ID NO: 1626492 - RNA, 19 nt, Homo sapiens
  misc_RNA (1)...(19): siRNA sense strand
gagggcgagcucuccgaua

SEQ ID NO: 1626493 - RNA, 19 nt, Homo sapiens
  misc_RNA (1)...(19): siRNA sense strand
gaccaggugcuaguaggaa

SEQ ID NO: 1626494 - RNA, 19 nt, Homo sapiens
  misc_RNA (1)...(19): siRNA sense strand
cugcugggaugguggugaa

SEQ ID NO: 1626495 - RNA, 19 nt, Homo sapiens
  misc_RNA (1)...(19): siRNA sense strand
ccgaggcagugaggugauu

SEQ ID NO: 1626496 - RNA, 19 nt, Homo sapiens
  misc_RNA (1)...(19): siRNA sense strand
caucccaagacuucaauug

SEQ ID NO: 1626497 - RNA, 19 nt, Homo sapiens
  misc_RNA (1)...(19): siRNA sense strand
ccaccagcaugcgggauuc

SEQ ID NO: 1626498 - RNA, 19 nt, Homo sapiens
  misc_RNA (1)...(19): siRNA sense strand
ugugagaucggcugcuuug

SEQ ID NO: 1626499 - RNA, 19 nt, Homo sapiens
  misc_RNA (1)...(19): siRNA sense strand
gcuggugcaucccaagacu

SEQ ID NO: 1626500 - RNA, 19 nt, Homo sapiens
  misc_RNA (1)...(19): siRNA sense strand
gaucggaggcucagagaac

SEQ ID NO: 1626501 - RNA, 19 nt, Homo sapiens
  misc_RNA (1)...(19): siRNA sense strand
gcuacugugucuucagcaa

SEQ ID NO: 1626502 - RNA, 19 nt, Homo sapiens
  misc_RNA (1)...(19): siRNA sense strand
uggcagaugugcucaaggu

SEQ ID NO: 1626503 - RNA, 19 nt, Homo sapiens
  misc_RNA (1)...(19): siRNA sense strand
cgagaacaacugugagauc

SEQ ID NO: 1626504 - RNA, 19 nt, Homo sapiens
  misc_RNA (1)...(19): siRNA sense strand
gagggcgagcucuccgaua

SEQ ID NO: 1626505 - RNA, 19 nt, Homo sapiens
  misc_RNA (1)...(19): siRNA sense strand
gaccaggugcuaguaggaa

SEQ ID NO: 1626506 - RNA, 19 nt, Homo sapiens
  misc_RNA (1)...(19): siRNA sense strand
caucccaagacuucaauug

SEQ ID NO: 1626507 - RNA, 19 nt, Homo sapiens
  misc_RNA (1)...(19): siRNA sense strand
ugugagaucggcugcuuug

SEQ ID NO: 1626508 - RNA, 19 nt, Homo sapiens
  misc_RNA (1)...(19): siRNA sense strand
gcuggugcaucccaagacu

SEQ ID NO: 1626509 - RNA, 19 nt, Homo sapiens
  misc_RNA (1)...(19): siRNA sense strand
ugacuggugugccuucugu

SEQ ID NO: 1626510 - RNA, 19 nt, Homo sapiens
  misc_RNA (1)...(19): siRNA sense strand
caauugaagaccaggauga

SEQ ID NO: 1626511 - RNA, 19 nt, Homo sapiens
  misc_RNA (1)...(19): siRNA sense strand
gaucggaggcucagagaac

SEQ ID NO: 1626512 - RNA, 19 nt, Homo sapiens
  misc_RNA (1)...(19): siRNA sense strand
gcuacugugucuucagcaa

SEQ ID NO: 1626513 - RNA, 19 nt, Homo sapiens
  misc_RNA (1)...(19): siRNA sense strand
uggcagaugugcucaaggu

SEQ ID NO: 1626514 - RNA, 19 nt, Homo sapiens
  misc_RNA (1)...(19): siRNA sense strand
gguggagagugucuucaag

SEQ ID NO: 1626515 - RNA, 19 nt, Homo sapiens
  misc_RNA (1)...(19): siRNA sense strand
cgagaacaacugugagauc

SEQ ID NO: 1626516 - RNA, 19 nt, Homo sapiens
  misc_RNA (1)...(19): siRNA sense strand
ugucagugguggagagugu

SEQ ID NO: 1626517 - RNA, 19 nt, Homo sapiens
  misc_RNA (1)...(19): siRNA sense strand
cugggaugguggugaauga

SEQ ID NO: 1626518 - RNA, 19 nt, Homo sapiens
  misc_RNA (1)...(19): siRNA sense strand
gagggcgagcucuccgaua

SEQ ID NO: 1626519 - RNA, 19 nt, Homo sapiens
  misc_RNA (1)...(19): siRNA sense strand
gaccaggugcuaguaggaa

SEQ ID NO: 1626520 - RNA, 19 nt, Homo sapiens
  misc_RNA (1)...(19): siRNA sense strand
cugcugggaugguggugaa

SEQ ID NO: 1626521 - RNA, 19 nt, Homo sapiens
  misc_RNA (1)...(19): siRNA sense strand
ccgaggcagugaggugauu

SEQ ID NO: 1626522 - RNA, 19 nt, Homo sapiens
  misc_RNA (1)...(19): siRNA sense strand
caucccaagacuucaauug

SEQ ID NO: 1626523 - RNA, 19 nt, Homo sapiens
  misc_RNA (1)...(19): siRNA sense strand
ccaccagcaugcgggauuc

SEQ ID NO: 1626524 - RNA, 19 nt, Homo sapiens
  misc_RNA (1)...(19): siRNA sense strand
ugugagaucggcugcuuug

SEQ ID NO: 1626525 - RNA, 19 nt, Homo sapiens
  misc_RNA (1)...(19): siRNA sense strand
gcuggugcaucccaagacu

SEQ ID NO: 1626526 - RNA, 19 nt, Homo sapiens
  misc_RNA (1)...(19): siRNA sense strand
gaucggaggcucagagaac

SEQ ID NO: 1626527 - RNA, 19 nt, Homo sapiens
  misc_RNA (1)...(19): siRNA sense strand
gcuacugugucuucagcaa

SEQ ID NO: 1626528 - RNA, 19 nt, Homo sapiens
  misc_RNA (1)...(19): siRNA sense strand
uggcagaugugcucaaggu

SEQ ID NO: 1626529 - RNA, 19 nt, Homo sapiens
  misc_RNA (1)...(19): siRNA sense strand
cgagaacaacugugagauc

SEQ ID NO: 1626530 - RNA, 19 nt, Homo sapiens
  misc_RNA (1)...(19): siRNA sense strand
gagggcgagcucuccgaua

SEQ ID NO: 1626531 - RNA, 19 nt, Homo sapiens
  misc_RNA (1)...(19): siRNA sense strand
gaccaggugcuaguaggaa

SEQ ID NO: 1626532 - RNA, 19 nt, Homo sapiens
  misc_RNA (1)...(19): siRNA sense strand
caucccaagacuucaauug

SEQ ID NO: 1626533 - RNA, 19 nt, Homo sapiens
  misc_RNA (1)...(19): siRNA sense strand
ugugagaucggcugcuuug

SEQ ID NO: 1626534 - RNA, 19 nt, Homo sapiens
  misc_RNA (1)...(19): siRNA sense strand
gcuggugcaucccaagacu

SEQ ID NO: 1626535 - RNA, 19 nt, Homo sapiens
  misc_RNA (1)...(19): siRNA sense strand
ugacuggugugccuucugu

SEQ ID NO: 1626536 - RNA, 19 nt, Homo sapiens
  misc_RNA (1)...(19): siRNA sense strand
caauugaagaccaggauga

SEQ ID NO: 1626537 - RNA, 19 nt, Homo sapiens
  misc_RNA (1)...(19): siRNA sense strand
gaucggaggcucagagaac

SEQ ID NO: 1626538 - RNA, 19 nt, Homo sapiens
  misc_RNA (1)...(19): siRNA sense strand
gcuacugugucuucagcaa

SEQ ID NO: 1626539 - RNA, 19 nt, Homo sapiens
  misc_RNA (1)...(19): siRNA sense strand
uggcagaugugcucaaggu

SEQ ID NO: 1626540 - RNA, 19 nt, Homo sapiens
  misc_RNA (1)...(19): siRNA sense strand
gguggagagugucuucaag

SEQ ID NO: 1626541 - RNA, 19 nt, Homo sapiens
  misc_RNA (1)...(19): siRNA sense strand
cgagaacaacugugagauc

SEQ ID NO: 1626542 - RNA, 19 nt, Homo sapiens
  misc_RNA (1)...(19): siRNA sense strand
ugucagugguggagagugu

SEQ ID NO: 1626543 - RNA, 19 nt, Homo sapiens
  misc_RNA (1)...(19): siRNA sense strand
cugggaugguggugaauga

SEQ ID NO: 1626544 - RNA, 19 nt, Homo sapiens
  misc_RNA (1)...(19): siRNA sense strand
gagggcgagcucuccgaua

SEQ ID NO: 1626545 - RNA, 19 nt, Homo sapiens
  misc_RNA (1)...(19): siRNA sense strand
gaccaggugcuaguaggaa

SEQ ID NO: 1626546 - RNA, 19 nt, Homo sapiens
  misc_RNA (1)...(19): siRNA sense strand
cugcugggaugguggugaa

SEQ ID NO: 1626547 - RNA, 19 nt, Homo sapiens
  misc_RNA (1)...(19): siRNA sense strand
ccgaggcagugaggugauu

SEQ ID NO: 1626548 - RNA, 19 nt, Homo sapiens
  misc_RNA (1)...(19): siRNA sense strand
caucccaagacuucaauug

SEQ ID NO: 1626549 - RNA, 19 nt, Homo sapiens
  misc_RNA (1)...(19): siRNA sense strand
ccaccagcaugcgggauuc

SEQ ID NO: 1626550 - RNA, 19 nt, Homo sapiens
  misc_RNA (1)...(19): siRNA sense strand
ugugagaucggcugcuuug

SEQ ID NO: 1626551 - RNA, 19 nt, Homo sapiens
  misc_RNA (1)...(19): siRNA sense strand
gcuggugcaucccaagacu

SEQ ID NO: 1626552 - RNA, 19 nt, Homo sapiens
  misc_RNA (1)...(19): siRNA sense strand
ugacuggugugccuucugu

SEQ ID NO: 1626553 - RNA, 19 nt, Homo sapiens
  misc_RNA (1)...(19): siRNA sense strand
caauugaagaccaggauga

SEQ ID NO: 1626554 - RNA, 19 nt, Homo sapiens
  misc_RNA (1)...(19): siRNA sense strand
gaucggaggcucagagaac

SEQ ID NO: 1626555 - RNA, 19 nt, Homo sapiens
  misc_RNA (1)...(19): siRNA sense strand
gcuacugugucuucagcaa

SEQ ID NO: 1626556 - RNA, 19 nt, Homo sapiens
  misc_RNA (1)...(19): siRNA sense strand
uggcagaugugcucaaggu

SEQ ID NO: 1626557 - RNA, 19 nt, Homo sapiens
  misc_RNA (1)...(19): siRNA sense strand
gguggagagugucuucaag

SEQ ID NO: 1626558 - RNA, 19 nt, Homo sapiens
  misc_RNA (1)...(19): siRNA sense strand
cgagaacaacugugagauc

SEQ ID NO: 1626559 - RNA, 19 nt, Homo sapiens
  misc_RNA (1)...(19): siRNA sense strand
ugucagugguggagagugu

SEQ ID NO: 1626560 - RNA, 19 nt, Homo sapiens
  misc_RNA (1)...(19): siRNA sense strand
cugggaugguggugaauga

SEQ ID NO: 1626561 - RNA, 19 nt, Homo sapiens
  misc_RNA (1)...(19): siRNA sense strand
gagggcgagcucuccgaua

SEQ ID NO: 1626562 - RNA, 19 nt, Homo sapiens
  misc_RNA (1)...(19): siRNA sense strand
gaccaggugcuaguaggaa

SEQ ID NO: 1626563 - RNA, 19 nt, Homo sapiens
  misc_RNA (1)...(19): siRNA sense strand
cugcugggaugguggugaa

SEQ ID NO: 1626564 - RNA, 19 nt, Homo sapiens
  misc_RNA (1)...(19): siRNA sense strand
ccgaggcagugaggugauu

SEQ ID NO: 1626565 - RNA, 19 nt, Homo sapiens
  misc_RNA (1)...(19): siRNA sense strand
caucccaagacuucaauug

SEQ ID NO: 1626566 - RNA, 19 nt, Homo sapiens
  misc_RNA (1)...(19): siRNA sense strand
ccaccagcaugcgggauuc

SEQ ID NO: 1626567 - RNA, 19 nt, Homo sapiens
  misc_RNA (1)...(19): siRNA sense strand
ugugagaucggcugcuuug

SEQ ID NO: 1626568 - RNA, 19 nt, Homo sapiens
  misc_RNA (1)...(19): siRNA sense strand
gcuggugcaucccaagacu

SEQ ID NO: 1626569 - RNA, 19 nt, Homo sapiens
  misc_RNA (1)...(19): siRNA sense strand
gaucggaggcucagagaac

SEQ ID NO: 1626570 - RNA, 19 nt, Homo sapiens
  misc_RNA (1)...(19): siRNA sense strand
gcuacugugucuucagcaa

SEQ ID NO: 1626571 - RNA, 19 nt, Homo sapiens
  misc_RNA (1)...(19): siRNA sense strand
uggcagaugugcucaaggu

SEQ ID NO: 1626572 - RNA, 19 nt, Homo sapiens
  misc_RNA (1)...(19): siRNA sense strand
cgagaacaacugugagauc

SEQ ID NO: 1626573 - RNA, 19 nt, Homo sapiens
  misc_RNA (1)...(19): siRNA sense strand
gagggcgagcucuccgaua

SEQ ID NO: 1626574 - RNA, 19 nt, Homo sapiens
  misc_RNA (1)...(19): siRNA sense strand
gaccaggugcuaguaggaa

SEQ ID NO: 1626575 - RNA, 19 nt, Homo sapiens
  misc_RNA (1)...(19): siRNA sense strand
caucccaagacuucaauug

SEQ ID NO: 1626576 - RNA, 19 nt, Homo sapiens
  misc_RNA (1)...(19): siRNA sense strand
ugugagaucggcugcuuug

SEQ ID NO: 1626577 - RNA, 19 nt, Homo sapiens
  misc_RNA (1)...(19): siRNA sense strand
gcuggugcaucccaagacu

SEQ ID NO: 1626578 - RNA, 19 nt, Homo sapiens
  misc_RNA (1)...(19): siRNA sense strand
ugacuggugugccuucugu

SEQ ID NO: 1626579 - RNA, 19 nt, Homo sapiens
  misc_RNA (1)...(19): siRNA sense strand
caauugaagaccaggauga

SEQ ID NO: 1626580 - RNA, 19 nt, Homo sapiens
  misc_RNA (1)...(19): siRNA sense strand
gaucggaggcucagagaac

SEQ ID NO: 1626581 - RNA, 19 nt, Homo sapiens
  misc_RNA (1)...(19): siRNA sense strand
gcuacugugucuucagcaa

SEQ ID NO: 1626582 - RNA, 19 nt, Homo sapiens
  misc_RNA (1)...(19): siRNA sense strand
uggcagaugugcucaaggu

SEQ ID NO: 1626583 - RNA, 19 nt, Homo sapiens
  misc_RNA (1)...(19): siRNA sense strand
gguggagagugucuucaag

SEQ ID NO: 1626584 - RNA, 19 nt, Homo sapiens
  misc_RNA (1)...(19): siRNA sense strand
cgagaacaacugugagauc

SEQ ID NO: 1626585 - RNA, 19 nt, Homo sapiens
  misc_RNA (1)...(19): siRNA sense strand
ugucagugguggagagugu

SEQ ID NO: 1626586 - RNA, 19 nt, Homo sapiens
  misc_RNA (1)...(19): siRNA sense strand
cugggaugguggugaauga

SEQ ID NO: 1626587 - RNA, 19 nt, Homo sapiens
  misc_RNA (1)...(19): siRNA sense strand
gagggcgagcucuccgaua

SEQ ID NO: 1626588 - RNA, 19 nt, Homo sapiens
  misc_RNA (1)...(19): siRNA sense strand
gaccaggugcuaguaggaa

SEQ ID NO: 1626589 - RNA, 19 nt, Homo sapiens
  misc_RNA (1)...(19): siRNA sense strand
cugcugggaugguggugaa

SEQ ID NO: 1626590 - RNA, 19 nt, Homo sapiens
  misc_RNA (1)...(19): siRNA sense strand
ccgaggcagugaggugauu

SEQ ID NO: 1626591 - RNA, 19 nt, Homo sapiens
  misc_RNA (1)...(19): siRNA sense strand
caucccaagacuucaauug

SEQ ID NO: 1626592 - RNA, 19 nt, Homo sapiens
  misc_RNA (1)...(19): siRNA sense strand
ccaccagcaugcgggauuc

SEQ ID NO: 1626593 - RNA, 19 nt, Homo sapiens
  misc_RNA (1)...(19): siRNA sense strand
ugugagaucggcugcuuug

SEQ ID NO: 1626594 - RNA, 19 nt, Homo sapiens
  misc_RNA (1)...(19): siRNA sense strand
gcuggugcaucccaagacu

SEQ ID NO: 1626595 - RNA, 19 nt, Homo sapiens
  misc_RNA (1)...(19): siRNA sense strand
gaucggaggcucagagaac

SEQ ID NO: 1626596 - RNA, 19 nt, Homo sapiens
  misc_RNA (1)...(19): siRNA sense strand
gcuacugugucuucagcaa

SEQ ID NO: 1626597 - RNA, 19 nt, Homo sapiens
  misc_RNA (1)...(19): siRNA sense strand
uggcagaugugcucaaggu

SEQ ID NO: 1626598 - RNA, 19 nt, Homo sapiens
  misc_RNA (1)...(19): siRNA sense strand
cgagaacaacugugagauc

SEQ ID NO: 1626599 - RNA, 19 nt, Homo sapiens
  misc_RNA (1)...(19): siRNA sense strand
gagggcgagcucuccgaua

SEQ ID NO: 1626600 - RNA, 19 nt, Homo sapiens
  misc_RNA (1)...(19): siRNA sense strand
gaccaggugcuaguaggaa

SEQ ID NO: 1626601 - RNA, 19 nt, Homo sapiens
  misc_RNA (1)...(19): siRNA sense strand
caucccaagacuucaauug

SEQ ID NO: 1626602 - RNA, 19 nt, Homo sapiens
  misc_RNA (1)...(19): siRNA sense strand
ugugagaucggcugcuuug

SEQ ID NO: 1626603 - RNA, 19 nt, Homo sapiens
  misc_RNA (1)...(19): siRNA sense strand
gcuggugcaucccaagacu

SEQ ID NO: 1626604 - RNA, 19 nt, Homo sapiens
  misc_RNA (1)...(19): siRNA sense strand
gguaaggacuugccagaga

SEQ ID NO: 1626605 - RNA, 19 nt, Homo sapiens
  misc_RNA (1)...(19): siRNA sense strand
guaaggacuugccagagaa

SEQ ID NO: 1626606 - RNA, 19 nt, Homo sapiens
  misc_RNA (1)...(19): siRNA sense strand
gguaccagcuguaugaugu

SEQ ID NO: 1626607 - RNA, 19 nt, Homo sapiens
  misc_RNA (1)...(19): siRNA sense strand
ccacauagagcuccaagga

SEQ ID NO: 1626608 - RNA, 19 nt, Homo sapiens
  misc_RNA (1)...(19): siRNA sense strand
gaacuacaacgaggccaaa

SEQ ID NO: 1626609 - RNA, 19 nt, Homo sapiens
  misc_RNA (1)...(19): siRNA sense strand
ggucuuguagcuucaauga

SEQ ID NO: 1626610 - RNA, 19 nt, Homo sapiens
  misc_RNA (1)...(19): siRNA sense strand
gaggugacccugugugaca

SEQ ID NO: 1626611 - RNA, 19 nt, Homo sapiens
  misc_RNA (1)...(19): siRNA sense strand
uguaugauguguguucuga

SEQ ID NO: 1626612 - RNA, 19 nt, Homo sapiens
  misc_RNA (1)...(19): siRNA sense strand
gccugcagcuucucauuuc

SEQ ID NO: 1626613 - RNA, 19 nt, Homo sapiens
  misc_RNA (1)...(19): siRNA sense strand
ccaaaugugucaccuucag

SEQ ID NO: 1626614 - RNA, 19 nt, Homo sapiens
  misc_RNA (1)...(19): siRNA sense strand
cuacaacgaggccaaaugu

SEQ ID NO: 1626615 - RNA, 19 nt, Homo sapiens
  misc_RNA (1)...(19): siRNA sense strand
gcacuuccaggccuccauu

SEQ ID NO: 1626616 - RNA, 19 nt, Homo sapiens
  misc_RNA (1)...(19): siRNA sense strand
caacagcacagagcacuuc

SEQ ID NO: 1626617 - RNA, 19 nt, Homo sapiens
  misc_RNA (1)...(19): siRNA sense strand
ccagcuguaugaugugugu

SEQ ID NO: 1626618 - RNA, 19 nt, Homo sapiens
  misc_RNA (1)...(19): siRNA sense strand
ggccugcagcuucucauuu

SEQ ID NO: 1626619 - RNA, 19 nt, Homo sapiens
  misc_RNA (1)...(19): siRNA sense strand
cuacggugcuggcagugau

SEQ ID NO: 1626620 - RNA, 19 nt, Homo sapiens
  misc_RNA (1)...(19): siRNA sense strand
acaacgaggccaaaugugu

SEQ ID NO: 1626621 - RNA, 19 nt, Homo sapiens
  misc_RNA (1)...(19): siRNA sense strand
ggguugaggagauaaacaa

SEQ ID NO: 1626622 - RNA, 19 nt, Homo sapiens
  misc_RNA (1)...(19): siRNA sense strand
gcauggcuaccaccucuuc

SEQ ID NO: 1626623 - RNA, 19 nt, Homo sapiens
  misc_RNA (1)...(19): siRNA sense strand
ucagccugcucuucaacuu

SEQ ID NO: 1626624 - RNA, 19 nt, Homo sapiens
  misc_RNA (1)...(19): siRNA sense strand
guucugacucugccaaugu

SEQ ID NO: 1626625 - RNA, 19 nt, Homo sapiens
  misc_RNA (1)...(19): siRNA sense strand
ggacuugccagagaacuac

SEQ ID NO: 1626626 - RNA, 19 nt, Homo sapiens
  misc_RNA (1)...(19): siRNA sense strand
uaugauguguguucugacu

SEQ ID NO: 1626627 - RNA, 19 nt, Homo sapiens
  misc_RNA (1)...(19): siRNA sense strand
gccagggcaacaccacaua

SEQ ID NO: 1626628 - RNA, 19 nt, Homo sapiens
  misc_RNA (1)...(19): siRNA sense strand
ccuguucccucuccauucu

SEQ ID NO: 1626629 - RNA, 19 nt, Homo sapiens
  misc_RNA (1)...(19): siRNA sense strand
gguauuuucugccuaagug

SEQ ID NO: 1626630 - RNA, 19 nt, Homo sapiens
  misc_RNA (1)...(19): siRNA sense strand
ugacucugccaauguguau

SEQ ID NO: 1626631 - RNA, 19 nt, Homo sapiens
  misc_RNA (1)...(19): siRNA sense strand
gcagugauugggccugaca

SEQ ID NO: 1626632 - RNA, 19 nt, Homo sapiens
  misc_RNA (1)...(19): siRNA sense strand
gacaggucuuguagcuuca

SEQ ID NO: 1626633 - RNA, 19 nt, Homo sapiens
  misc_RNA (1)...(19): siRNA sense strand
ugauguguguucugacucu

SEQ ID NO: 1626634 - RNA, 19 nt, Homo sapiens
  misc_RNA (1)...(19): siRNA sense strand
gccuuugccugccauagca

SEQ ID NO: 1626635 - RNA, 19 nt, Homo sapiens
  misc_RNA (1)...(19): siRNA sense strand
ucaaugagcauggcuacca

SEQ ID NO: 1626636 - RNA, 19 nt, Homo sapiens
  misc_RNA (1)...(19): siRNA sense strand
uugaggagauaaacaacuc

SEQ ID NO: 1626637 - RNA, 19 nt, Homo sapiens
  misc_RNA (1)...(19): siRNA sense strand
ugugacaggucuuguagcu

SEQ ID NO: 1626638 - RNA, 19 nt, Homo sapiens
  misc_RNA (1)...(19): siRNA sense strand
gguaccagcuguaugaugu

SEQ ID NO: 1626639 - RNA, 19 nt, Homo sapiens
  misc_RNA (1)...(19): siRNA sense strand
ccacauagagcuccaagga

SEQ ID NO: 1626640 - RNA, 19 nt, Homo sapiens
  misc_RNA (1)...(19): siRNA sense strand
ggucuuguagcuucaauga

SEQ ID NO: 1626641 - RNA, 19 nt, Homo sapiens
  misc_RNA (1)...(19): siRNA sense strand
gccugcagcuucucauuuc

SEQ ID NO: 1626642 - RNA, 19 nt, Homo sapiens
  misc_RNA (1)...(19): siRNA sense strand
uguaugauguguguucuga

SEQ ID NO: 1626643 - RNA, 19 nt, Homo sapiens
  misc_RNA (1)...(19): siRNA sense strand
gaggugacccugugugaca

SEQ ID NO: 1626644 - RNA, 19 nt, Homo sapiens
  misc_RNA (1)...(19): siRNA sense strand
ccagcuguaugaugugugu

SEQ ID NO: 1626645 - RNA, 19 nt, Homo sapiens
  misc_RNA (1)...(19): siRNA sense strand
ggccugcagcuucucauuu

SEQ ID NO: 1626646 - RNA, 19 nt, Homo sapiens
  misc_RNA (1)...(19): siRNA sense strand
cuacggugcuggcagugau

SEQ ID NO: 1626647 - RNA, 19 nt, Homo sapiens
  misc_RNA (1)...(19): siRNA sense strand
ggguugaggagauaaacaa

SEQ ID NO: 1626648 - RNA, 19 nt, Homo sapiens
  misc_RNA (1)...(19): siRNA sense strand
gcauggcuaccaccucuuc

SEQ ID NO: 1626649 - RNA, 19 nt, Homo sapiens
  misc_RNA (1)...(19): siRNA sense strand
guucugacucugccaaugu

SEQ ID NO: 1626650 - RNA, 19 nt, Homo sapiens
  misc_RNA (1)...(19): siRNA sense strand
uaugauguguguucugacu

SEQ ID NO: 1626651 - RNA, 19 nt, Homo sapiens
  misc_RNA (1)...(19): siRNA sense strand
gccagggcaacaccacaua

SEQ ID NO: 1626652 - RNA, 19 nt, Homo sapiens
  misc_RNA (1)...(19): siRNA sense strand
ccuguucccucuccauucu

SEQ ID NO: 1626653 - RNA, 19 nt, Homo sapiens
  misc_RNA (1)...(19): siRNA sense strand
ugacucugccaauguguau

SEQ ID NO: 1626654 - RNA, 19 nt, Homo sapiens
  misc_RNA (1)...(19): siRNA sense strand
gcagugauugggccugaca

SEQ ID NO: 1626655 - RNA, 19 nt, Homo sapiens
  misc_RNA (1)...(19): siRNA sense strand
gacaggucuuguagcuuca

SEQ ID NO: 1626656 - RNA, 19 nt, Homo sapiens
  misc_RNA (1)...(19): siRNA sense strand
ugauguguguucugacucu

SEQ ID NO: 1626657 - RNA, 19 nt, Homo sapiens
  misc_RNA (1)...(19): siRNA sense strand
gccuuugccugccauagca

SEQ ID NO: 1626658 - RNA, 19 nt, Homo sapiens
  misc_RNA (1)...(19): siRNA sense strand
ucaaugagcauggcuacca

SEQ ID NO: 1626659 - RNA, 19 nt, Homo sapiens
  misc_RNA (1)...(19): siRNA sense strand
ugugacaggucuuguagcu

SEQ ID NO: 1626660 - RNA, 19 nt, Homo sapiens
  misc_RNA (1)...(19): siRNA sense strand
uugaggagauaaacaacuc

SEQ ID NO: 1626661 - RNA, 19 nt, Homo sapiens
  misc_RNA (1)...(19): siRNA sense strand
gguaaggacuugccagaga

SEQ ID NO: 1626662 - RNA, 19 nt, Homo sapiens
  misc_RNA (1)...(19): siRNA sense strand
guaaggacuugccagagaa

SEQ ID NO: 1626663 - RNA, 19 nt, Homo sapiens
  misc_RNA (1)...(19): siRNA sense strand
gguaccagcuguaugaugu

SEQ ID NO: 1626664 - RNA, 19 nt, Homo sapiens
  misc_RNA (1)...(19): siRNA sense strand
ccacauagagcuccaagga

SEQ ID NO: 1626665 - RNA, 19 nt, Homo sapiens
  misc_RNA (1)...(19): siRNA sense strand
gaacuacaacgaggccaaa

SEQ ID NO: 1626666 - RNA, 19 nt, Homo sapiens
  misc_RNA (1)...(19): siRNA sense strand
ggucuuguagcuucaauga

SEQ ID NO: 1626667 - RNA, 19 nt, Homo sapiens
  misc_RNA (1)...(19): siRNA sense strand
gaggugacccugugugaca

SEQ ID NO: 1626668 - RNA, 19 nt, Homo sapiens
  misc_RNA (1)...(19): siRNA sense strand
uguaugauguguguucuga

SEQ ID NO: 1626669 - RNA, 19 nt, Homo sapiens
  misc_RNA (1)...(19): siRNA sense strand
gccugcagcuucucauuuc

SEQ ID NO: 1626670 - RNA, 19 nt, Homo sapiens
  misc_RNA (1)...(19): siRNA sense strand
ccaaaugugucaccuucag

SEQ ID NO: 1626671 - RNA, 19 nt, Homo sapiens
  misc_RNA (1)...(19): siRNA sense strand
cuacaacgaggccaaaugu

SEQ ID NO: 1626672 - RNA, 19 nt, Homo sapiens
  misc_RNA (1)...(19): siRNA sense strand
gcacuuccaggccuccauu

SEQ ID NO: 1626673 - RNA, 19 nt, Homo sapiens
  misc_RNA (1)...(19): siRNA sense strand
caacagcacagagcacuuc

SEQ ID NO: 1626674 - RNA, 19 nt, Homo sapiens
  misc_RNA (1)...(19): siRNA sense strand
ccagcuguaugaugugugu

SEQ ID NO: 1626675 - RNA, 19 nt, Homo sapiens
  misc_RNA (1)...(19): siRNA sense strand
ggccugcagcuucucauuu

SEQ ID NO: 1626676 - RNA, 19 nt, Homo sapiens
  misc_RNA (1)...(19): siRNA sense strand
cuacggugcuggcagugau

SEQ ID NO: 1626677 - RNA, 19 nt, Homo sapiens
  misc_RNA (1)...(19): siRNA sense strand
acaacgaggccaaaugugu

SEQ ID NO: 1626678 - RNA, 19 nt, Homo sapiens
  misc_RNA (1)...(19): siRNA sense strand
ggguugaggagauaaacaa

SEQ ID NO: 1626679 - RNA, 19 nt, Homo sapiens
  misc_RNA (1)...(19): siRNA sense strand
gcauggcuaccaccucuuc

SEQ ID NO: 1626680 - RNA, 19 nt, Homo sapiens
  misc_RNA (1)...(19): siRNA sense strand
ucagccugcucuucaacuu

SEQ ID NO: 1626681 - RNA, 19 nt, Homo sapiens
  misc_RNA (1)...(19): siRNA sense strand
guucugacucugccaaugu

SEQ ID NO: 1626682 - RNA, 19 nt, Homo sapiens
  misc_RNA (1)...(19): siRNA sense strand
ggacuugccagagaacuac

SEQ ID NO: 1626683 - RNA, 19 nt, Homo sapiens
  misc_RNA (1)...(19): siRNA sense strand
uaugauguguguucugacu

SEQ ID NO: 1626684 - RNA, 19 nt, Homo sapiens
  misc_RNA (1)...(19): siRNA sense strand
gccagggcaacaccacaua

SEQ ID NO: 1626685 - RNA, 19 nt, Homo sapiens
  misc_RNA (1)...(19): siRNA sense strand
ccuguucccucuccauucu

SEQ ID NO: 1626686 - RNA, 19 nt, Homo sapiens
  misc_RNA (1)...(19): siRNA sense strand
gguauuuucugccuaagug

SEQ ID NO: 1626687 - RNA, 19 nt, Homo sapiens
  misc_RNA (1)...(19): siRNA sense strand
ugacucugccaauguguau

SEQ ID NO: 1626688 - RNA, 19 nt, Homo sapiens
  misc_RNA (1)...(19): siRNA sense strand
gcagugauugggccugaca

SEQ ID NO: 1626689 - RNA, 19 nt, Homo sapiens
  misc_RNA (1)...(19): siRNA sense strand
gacaggucuuguagcuuca

SEQ ID NO: 1626690 - RNA, 19 nt, Homo sapiens
  misc_RNA (1)...(19): siRNA sense strand
ugauguguguucugacucu

SEQ ID NO: 1626691 - RNA, 19 nt, Homo sapiens
  misc_RNA (1)...(19): siRNA sense strand
gccuuugccugccauagca

SEQ ID NO: 1626692 - RNA, 19 nt, Homo sapiens
  misc_RNA (1)...(19): siRNA sense strand
ucaaugagcauggcuacca

SEQ ID NO: 1626693 - RNA, 19 nt, Homo sapiens
  misc_RNA (1)...(19): siRNA sense strand
uugaggagauaaacaacuc

SEQ ID NO: 1626694 - RNA, 19 nt, Homo sapiens
  misc_RNA (1)...(19): siRNA sense strand
ugugacaggucuuguagcu

SEQ ID NO: 1626695 - RNA, 19 nt, Homo sapiens
  misc_RNA (1)...(19): siRNA sense strand
gguaaggacuugccagaga

SEQ ID NO: 1626696 - RNA, 19 nt, Homo sapiens
  misc_RNA (1)...(19): siRNA sense strand
guaaggacuugccagagaa

SEQ ID NO: 1626697 - RNA, 19 nt, Homo sapiens
  misc_RNA (1)...(19): siRNA sense strand
gguaccagcuguaugaugu

SEQ ID NO: 1626698 - RNA, 19 nt, Homo sapiens
  misc_RNA (1)...(19): siRNA sense strand
ccacauagagcuccaagga

SEQ ID NO: 1626699 - RNA, 19 nt, Homo sapiens
  misc_RNA (1)...(19): siRNA sense strand
gaacuacaacgaggccaaa

SEQ ID NO: 1626700 - RNA, 19 nt, Homo sapiens
  misc_RNA (1)...(19): siRNA sense strand
ggucuuguagcuucaauga

SEQ ID NO: 1626701 - RNA, 19 nt, Homo sapiens
  misc_RNA (1)...(19): siRNA sense strand
gaggugacccugugugaca

SEQ ID NO: 1626702 - RNA, 19 nt, Homo sapiens
  misc_RNA (1)...(19): siRNA sense strand
uguaugauguguguucuga

SEQ ID NO: 1626703 - RNA, 19 nt, Homo sapiens
  misc_RNA (1)...(19): siRNA sense strand
gccugcagcuucucauuuc

SEQ ID NO: 1626704 - RNA, 19 nt, Homo sapiens
  misc_RNA (1)...(19): siRNA sense strand
ccaaaugugucaccuucag

SEQ ID NO: 1626705 - RNA, 19 nt, Homo sapiens
  misc_RNA (1)...(19): siRNA sense strand
cuacaacgaggccaaaugu

SEQ ID NO: 1626706 - RNA, 19 nt, Homo sapiens
  misc_RNA (1)...(19): siRNA sense strand
ccagcuguaugaugugugu

SEQ ID NO: 1626707 - RNA, 19 nt, Homo sapiens
  misc_RNA (1)...(19): siRNA sense strand
ggccugcagcuucucauuu

SEQ ID NO: 1626708 - RNA, 19 nt, Homo sapiens
  misc_RNA (1)...(19): siRNA sense strand
cuacggugcuggcagugau

SEQ ID NO: 1626709 - RNA, 19 nt, Homo sapiens
  misc_RNA (1)...(19): siRNA sense strand
acaacgaggccaaaugugu

SEQ ID NO: 1626710 - RNA, 19 nt, Homo sapiens
  misc_RNA (1)...(19): siRNA sense strand
ggguugaggagauaaacaa

SEQ ID NO: 1626711 - RNA, 19 nt, Homo sapiens
  misc_RNA (1)...(19): siRNA sense strand
gcauggcuaccaccucuuc

SEQ ID NO: 1626712 - RNA, 19 nt, Homo sapiens
  misc_RNA (1)...(19): siRNA sense strand
ucagccugcucuucaacuu

SEQ ID NO: 1626713 - RNA, 19 nt, Homo sapiens
  misc_RNA (1)...(19): siRNA sense strand
guucugacucugccaaugu

SEQ ID NO: 1626714 - RNA, 19 nt, Homo sapiens
  misc_RNA (1)...(19): siRNA sense strand
ggacuugccagagaacuac

SEQ ID NO: 1626715 - RNA, 19 nt, Homo sapiens
  misc_RNA (1)...(19): siRNA sense strand
uaugauguguguucugacu

SEQ ID NO: 1626716 - RNA, 19 nt, Homo sapiens
  misc_RNA (1)...(19): siRNA sense strand
gccagggcaacaccacaua

SEQ ID NO: 1626717 - RNA, 19 nt, Homo sapiens
  misc_RNA (1)...(19): siRNA sense strand
ccuguucccucuccauucu

SEQ ID NO: 1626718 - RNA, 19 nt, Homo sapiens
  misc_RNA (1)...(19): siRNA sense strand
ugacucugccaauguguau

SEQ ID NO: 1626719 - RNA, 19 nt, Homo sapiens
  misc_RNA (1)...(19): siRNA sense strand
gcagugauugggccugaca

SEQ ID NO: 1626720 - RNA, 19 nt, Homo sapiens
  misc_RNA (1)...(19): siRNA sense strand
gacaggucuuguagcuuca

SEQ ID NO: 1626721 - RNA, 19 nt, Homo sapiens
  misc_RNA (1)...(19): siRNA sense strand
gccuuugccugccauagca

SEQ ID NO: 1626722 - RNA, 19 nt, Homo sapiens
  misc_RNA (1)...(19): siRNA sense strand
ugauguguguucugacucu

SEQ ID NO: 1626723 - RNA, 19 nt, Homo sapiens
  misc_RNA (1)...(19): siRNA sense strand
ucaaugagcauggcuacca

SEQ ID NO: 1626724 - RNA, 19 nt, Homo sapiens
  misc_RNA (1)...(19): siRNA sense strand
ugugacaggucuuguagcu

SEQ ID NO: 1626725 - RNA, 19 nt, Homo sapiens
  misc_RNA (1)...(19): siRNA sense strand
uugaggagauaaacaacuc

SEQ ID NO: 1626726 - RNA, 19 nt, Homo sapiens
  misc_RNA (1)...(19): siRNA sense strand
caacaaagaccgcuacauc

SEQ ID NO: 1626727 - RNA, 19 nt, Homo sapiens
  misc_RNA (1)...(19): siRNA sense strand
ugaaggagauguggacuga

SEQ ID NO: 1626728 - RNA, 19 nt, Homo sapiens
  misc_RNA (1)...(19): siRNA sense strand
ucaacaagcccaagaguga

SEQ ID NO: 1626729 - RNA, 19 nt, Homo sapiens
  misc_RNA (1)...(19): siRNA sense strand
caagaacaauacccaagug

SEQ ID NO: 1626730 - RNA, 19 nt, Homo sapiens
  misc_RNA (1)...(19): siRNA sense strand
ccaagccagucaacaaaga

SEQ ID NO: 1626731 - RNA, 19 nt, Homo sapiens
  misc_RNA (1)...(19): siRNA sense strand
uaacaccgguccacucucu

SEQ ID NO: 1626732 - RNA, 19 nt, Homo sapiens
  misc_RNA (1)...(19): siRNA sense strand
ggagauguggacugaggua

SEQ ID NO: 1626733 - RNA, 19 nt, Homo sapiens
  misc_RNA (1)...(19): siRNA sense strand
cacagucagucaagaacaa

SEQ ID NO: 1626734 - RNA, 19 nt, Homo sapiens
  misc_RNA (1)...(19): siRNA sense strand
ucacacagucagucaagaa

SEQ ID NO: 1626735 - RNA, 19 nt, Homo sapiens
  misc_RNA (1)...(19): siRNA sense strand
cccaagugcucaucaacug

SEQ ID NO: 1626736 - RNA, 19 nt, Homo sapiens
  misc_RNA (1)...(19): siRNA sense strand
gcaagggcaagaagaaguc

SEQ ID NO: 1626737 - RNA, 19 nt, Homo sapiens
  misc_RNA (1)...(19): siRNA sense strand
uggagaacgugaaggagau

SEQ ID NO: 1626738 - RNA, 19 nt, Homo sapiens
  misc_RNA (1)...(19): siRNA sense strand
guccaagccagucaacaaa

SEQ ID NO: 1626739 - RNA, 19 nt, Homo sapiens
  misc_RNA (1)...(19): siRNA sense strand
ucaagaacaauacccaagu

SEQ ID NO: 1626740 - RNA, 19 nt, Homo sapiens
  misc_RNA (1)...(19): siRNA sense strand
acaaagaccgcuacaucuc

SEQ ID NO: 1626741 - RNA, 19 nt, Homo sapiens
  misc_RNA (1)...(19): siRNA sense strand
gcucacacagucagucaag

SEQ ID NO: 1626742 - RNA, 19 nt, Homo sapiens
  misc_RNA (1)...(19): siRNA sense strand
guggcaagggcaagaagaa

SEQ ID NO: 1626743 - RNA, 19 nt, Homo sapiens
  misc_RNA (1)...(19): siRNA sense strand
ggcaagggcaagaagaagu

SEQ ID NO: 1626744 - RNA, 19 nt, Homo sapiens
  misc_RNA (1)...(19): siRNA sense strand
caacaaagaccgcuacauc

SEQ ID NO: 1626745 - RNA, 19 nt, Homo sapiens
  misc_RNA (1)...(19): siRNA sense strand
ugaaggagauguggacuga

SEQ ID NO: 1626746 - RNA, 19 nt, Homo sapiens
  misc_RNA (1)...(19): siRNA sense strand
ucaacaagcccaagaguga

SEQ ID NO: 1626747 - RNA, 19 nt, Homo sapiens
  misc_RNA (1)...(19): siRNA sense strand
caagaacaauacccaagug

SEQ ID NO: 1626748 - RNA, 19 nt, Homo sapiens
  misc_RNA (1)...(19): siRNA sense strand
ccaagccagucaacaaaga

SEQ ID NO: 1626749 - RNA, 19 nt, Homo sapiens
  misc_RNA (1)...(19): siRNA sense strand
uaacaccgguccacucucu

SEQ ID NO: 1626750 - RNA, 19 nt, Homo sapiens
  misc_RNA (1)...(19): siRNA sense strand
ggagauguggacugaggua

SEQ ID NO: 1626751 - RNA, 19 nt, Homo sapiens
  misc_RNA (1)...(19): siRNA sense strand
cacagucagucaagaacaa

SEQ ID NO: 1626752 - RNA, 19 nt, Homo sapiens
  misc_RNA (1)...(19): siRNA sense strand
ucacacagucagucaagaa

SEQ ID NO: 1626753 - RNA, 19 nt, Homo sapiens
  misc_RNA (1)...(19): siRNA sense strand
cccaagugcucaucaacug

SEQ ID NO: 1626754 - RNA, 19 nt, Homo sapiens
  misc_RNA (1)...(19): siRNA sense strand
gcaagggcaagaagaaguc

SEQ ID NO: 1626755 - RNA, 19 nt, Homo sapiens
  misc_RNA (1)...(19): siRNA sense strand
uggagaacgugaaggagau

SEQ ID NO: 1626756 - RNA, 19 nt, Homo sapiens
  misc_RNA (1)...(19): siRNA sense strand
guccaagccagucaacaaa

SEQ ID NO: 1626757 - RNA, 19 nt, Homo sapiens
  misc_RNA (1)...(19): siRNA sense strand
ucaagaacaauacccaagu

SEQ ID NO: 1626758 - RNA, 19 nt, Homo sapiens
  misc_RNA (1)...(19): siRNA sense strand
acaaagaccgcuacaucuc

SEQ ID NO: 1626759 - RNA, 19 nt, Homo sapiens
  misc_RNA (1)...(19): siRNA sense strand
gcucacacagucagucaag

SEQ ID NO: 1626760 - RNA, 19 nt, Homo sapiens
  misc_RNA (1)...(19): siRNA sense strand
guggcaagggcaagaagaa

SEQ ID NO: 1626761 - RNA, 19 nt, Homo sapiens
  misc_RNA (1)...(19): siRNA sense strand
ggcaagggcaagaagaagu

SEQ ID NO: 1626762 - RNA, 19 nt, Homo sapiens
  misc_RNA (1)...(19): siRNA sense strand
ugacuggugugccuucugu

SEQ ID NO: 1626763 - RNA, 19 nt, Homo sapiens
  misc_RNA (1)...(19): siRNA sense strand
caauugaagaccaggauga

SEQ ID NO: 1626764 - RNA, 19 nt, Homo sapiens
  misc_RNA (1)...(19): siRNA sense strand
gaucggaggcucagagaac

SEQ ID NO: 1626765 - RNA, 19 nt, Homo sapiens
  misc_RNA (1)...(19): siRNA sense strand
gcuacugugucuucagcaa

SEQ ID NO: 1626766 - RNA, 19 nt, Homo sapiens
  misc_RNA (1)...(19): siRNA sense strand
uggcagaugugcucaaggu

SEQ ID NO: 1626767 - RNA, 19 nt, Homo sapiens
  misc_RNA (1)...(19): siRNA sense strand
gguggagagugucuucaag

SEQ ID NO: 1626768 - RNA, 19 nt, Homo sapiens
  misc_RNA (1)...(19): siRNA sense strand
cgagaacaacugugagauc

SEQ ID NO: 1626769 - RNA, 19 nt, Homo sapiens
  misc_RNA (1)...(19): siRNA sense strand
ugucagugguggagagugu

SEQ ID NO: 1626770 - RNA, 19 nt, Homo sapiens
  misc_RNA (1)...(19): siRNA sense strand
cugggaugguggugaauga

SEQ ID NO: 1626771 - RNA, 19 nt, Homo sapiens
  misc_RNA (1)...(19): siRNA sense strand
gagggcgagcucuccgaua

SEQ ID NO: 1626772 - RNA, 19 nt, Homo sapiens
  misc_RNA (1)...(19): siRNA sense strand
gaccaggugcuaguaggaa

SEQ ID NO: 1626773 - RNA, 19 nt, Homo sapiens
  misc_RNA (1)...(19): siRNA sense strand
cugcugggaugguggugaa

SEQ ID NO: 1626774 - RNA, 19 nt, Homo sapiens
  misc_RNA (1)...(19): siRNA sense strand
ccgaggcagugaggugauu

SEQ ID NO: 1626775 - RNA, 19 nt, Homo sapiens
  misc_RNA (1)...(19): siRNA sense strand
caucccaagacuucaauug

SEQ ID NO: 1626776 - RNA, 19 nt, Homo sapiens
  misc_RNA (1)...(19): siRNA sense strand
ccaccagcaugcgggauuc

SEQ ID NO: 1626777 - RNA, 19 nt, Homo sapiens
  misc_RNA (1)...(19): siRNA sense strand
ugugagaucggcugcuuug

SEQ ID NO: 1626778 - RNA, 19 nt, Homo sapiens
  misc_RNA (1)...(19): siRNA sense strand
gcuggugcaucccaagacu

SEQ ID NO: 1626779 - RNA, 19 nt, Homo sapiens
  misc_RNA (1)...(19): siRNA sense strand
ugacuggugugccuucugu

SEQ ID NO: 1626780 - RNA, 19 nt, Homo sapiens
  misc_RNA (1)...(19): siRNA sense strand
caauugaagaccaggauga

SEQ ID NO: 1626781 - RNA, 19 nt, Homo sapiens
  misc_RNA (1)...(19): siRNA sense strand
gaucggaggcucagagaac

SEQ ID NO: 1626782 - RNA, 19 nt, Homo sapiens
  misc_RNA (1)...(19): siRNA sense strand
gcuacugugucuucagcaa

SEQ ID NO: 1626783 - RNA, 19 nt, Homo sapiens
  misc_RNA (1)...(19): siRNA sense strand
uggcagaugugcucaaggu

SEQ ID NO: 1626784 - RNA, 19 nt, Homo sapiens
  misc_RNA (1)...(19): siRNA sense strand
gguggagagugucuucaag

SEQ ID NO: 1626785 - RNA, 19 nt, Homo sapiens
  misc_RNA (1)...(19): siRNA sense strand
cgagaacaacugugagauc

SEQ ID NO: 1626786 - RNA, 19 nt, Homo sapiens
  misc_RNA (1)...(19): siRNA sense strand
ugucagugguggagagugu

SEQ ID NO: 1626787 - RNA, 19 nt, Homo sapiens
  misc_RNA (1)...(19): siRNA sense strand
cugggaugguggugaauga

SEQ ID NO: 1626788 - RNA, 19 nt, Homo sapiens
  misc_RNA (1)...(19): siRNA sense strand
gagggcgagcucuccgaua

SEQ ID NO: 1626789 - RNA, 19 nt, Homo sapiens
  misc_RNA (1)...(19): siRNA sense strand
gaccaggugcuaguaggaa

SEQ ID NO: 1626790 - RNA, 19 nt, Homo sapiens
  misc_RNA (1)...(19): siRNA sense strand
cugcugggaugguggugaa

SEQ ID NO: 1626791 - RNA, 19 nt, Homo sapiens
  misc_RNA (1)...(19): siRNA sense strand
ccgaggcagugaggugauu

SEQ ID NO: 1626792 - RNA, 19 nt, Homo sapiens
  misc_RNA (1)...(19): siRNA sense strand
caucccaagacuucaauug

SEQ ID NO: 1626793 - RNA, 19 nt, Homo sapiens
  misc_RNA (1)...(19): siRNA sense strand
ccaccagcaugcgggauuc

SEQ ID NO: 1626794 - RNA, 19 nt, Homo sapiens
  misc_RNA (1)...(19): siRNA sense strand
ugugagaucggcugcuuug

SEQ ID NO: 1626795 - RNA, 19 nt, Homo sapiens
  misc_RNA (1)...(19): siRNA sense strand
gcuggugcaucccaagacu

SEQ ID NO: 1626796 - RNA, 19 nt, Homo sapiens
  misc_RNA (1)...(19): siRNA sense strand
gaucggaggcucagagaac

SEQ ID NO: 1626797 - RNA, 19 nt, Homo sapiens
  misc_RNA (1)...(19): siRNA sense strand
gcuacugugucuucagcaa

SEQ ID NO: 1626798 - RNA, 19 nt, Homo sapiens
  misc_RNA (1)...(19): siRNA sense strand
uggcagaugugcucaaggu

SEQ ID NO: 1626799 - RNA, 19 nt, Homo sapiens
  misc_RNA (1)...(19): siRNA sense strand
cgagaacaacugugagauc

SEQ ID NO: 1626800 - RNA, 19 nt, Homo sapiens
  misc_RNA (1)...(19): siRNA sense strand
gagggcgagcucuccgaua

SEQ ID NO: 1626801 - RNA, 19 nt, Homo sapiens
  misc_RNA (1)...(19): siRNA sense strand
gaccaggugcuaguaggaa

SEQ ID NO: 1626802 - RNA, 19 nt, Homo sapiens
  misc_RNA (1)...(19): siRNA sense strand
caucccaagacuucaauug

SEQ ID NO: 1626803 - RNA, 19 nt, Homo sapiens
  misc_RNA (1)...(19): siRNA sense strand
ugugagaucggcugcuuug

SEQ ID NO: 1626804 - RNA, 19 nt, Homo sapiens
  misc_RNA (1)...(19): siRNA sense strand
gcuggugcaucccaagacu

SEQ ID NO: 1626805 - RNA, 19 nt, Homo sapiens
  misc_RNA (1)...(19): siRNA sense strand
ugacuggugugccuucugu

SEQ ID NO: 1626806 - RNA, 19 nt, Homo sapiens
  misc_RNA (1)...(19): siRNA sense strand
caauugaagaccaggauga

SEQ ID NO: 1626807 - RNA, 19 nt, Homo sapiens
  misc_RNA (1)...(19): siRNA sense strand
gaucggaggcucagagaac

SEQ ID NO: 1626808 - RNA, 19 nt, Homo sapiens
  misc_RNA (1)...(19): siRNA sense strand
gcuacugugucuucagcaa

SEQ ID NO: 1626809 - RNA, 19 nt, Homo sapiens
  misc_RNA (1)...(19): siRNA sense strand
uggcagaugugcucaaggu

SEQ ID NO: 1626810 - RNA, 19 nt, Homo sapiens
  misc_RNA (1)...(19): siRNA sense strand
gguggagagugucuucaag

SEQ ID NO: 1626811 - RNA, 19 nt, Homo sapiens
  misc_RNA (1)...(19): siRNA sense strand
cgagaacaacugugagauc

SEQ ID NO: 1626812 - RNA, 19 nt, Homo sapiens
  misc_RNA (1)...(19): siRNA sense strand
ugucagugguggagagugu

SEQ ID NO: 1626813 - RNA, 19 nt, Homo sapiens
  misc_RNA (1)...(19): siRNA sense strand
cugggaugguggugaauga

SEQ ID NO: 1626814 - RNA, 19 nt, Homo sapiens
  misc_RNA (1)...(19): siRNA sense strand
gagggcgagcucuccgaua

SEQ ID NO: 1626815 - RNA, 19 nt, Homo sapiens
  misc_RNA (1)...(19): siRNA sense strand
gaccaggugcuaguaggaa

SEQ ID NO: 1626816 - RNA, 19 nt, Homo sapiens
  misc_RNA (1)...(19): siRNA sense strand
cugcugggaugguggugaa

SEQ ID NO: 1626817 - RNA, 19 nt, Homo sapiens
  misc_RNA (1)...(19): siRNA sense strand
ccgaggcagugaggugauu

SEQ ID NO: 1626818 - RNA, 19 nt, Homo sapiens
  misc_RNA (1)...(19): siRNA sense strand
caucccaagacuucaauug

SEQ ID NO: 1626819 - RNA, 19 nt, Homo sapiens
  misc_RNA (1)...(19): siRNA sense strand
ccaccagcaugcgggauuc

SEQ ID NO: 1626820 - RNA, 19 nt, Homo sapiens
  misc_RNA (1)...(19): siRNA sense strand
ugugagaucggcugcuuug

SEQ ID NO: 1626821 - RNA, 19 nt, Homo sapiens
  misc_RNA (1)...(19): siRNA sense strand
gcuggugcaucccaagacu

SEQ ID NO: 1626822 - RNA, 19 nt, Homo sapiens
  misc_RNA (1)...(19): siRNA sense strand
gaucggaggcucagagaac

SEQ ID NO: 1626823 - RNA, 19 nt, Homo sapiens
  misc_RNA (1)...(19): siRNA sense strand
gcuacugugucuucagcaa

SEQ ID NO: 1626824 - RNA, 19 nt, Homo sapiens
  misc_RNA (1)...(19): siRNA sense strand
uggcagaugugcucaaggu

SEQ ID NO: 1626825 - RNA, 19 nt, Homo sapiens
  misc_RNA (1)...(19): siRNA sense strand
cgagaacaacugugagauc

SEQ ID NO: 1626826 - RNA, 19 nt, Homo sapiens
  misc_RNA (1)...(19): siRNA sense strand
gagggcgagcucuccgaua

SEQ ID NO: 1626827 - RNA, 19 nt, Homo sapiens
  misc_RNA (1)...(19): siRNA sense strand
gaccaggugcuaguaggaa

SEQ ID NO: 1626828 - RNA, 19 nt, Homo sapiens
  misc_RNA (1)...(19): siRNA sense strand
caucccaagacuucaauug

SEQ ID NO: 1626829 - RNA, 19 nt, Homo sapiens
  misc_RNA (1)...(19): siRNA sense strand
ugugagaucggcugcuuug

SEQ ID NO: 1626830 - RNA, 19 nt, Homo sapiens
  misc_RNA (1)...(19): siRNA sense strand
gcuggugcaucccaagacu

SEQ ID NO: 1626831 - RNA, 19 nt, Homo sapiens
  misc_RNA (1)...(19): siRNA sense strand
ccuaauagcugcaaugaua

SEQ ID NO: 1626832 - RNA, 19 nt, Homo sapiens
  misc_RNA (1)...(19): siRNA sense strand
ccaugaaucuccacuacuu

SEQ ID NO: 1626833 - RNA, 19 nt, Homo sapiens
  misc_RNA (1)...(19): siRNA sense strand
gcuuugccauucauagaua

SEQ ID NO: 1626834 - RNA, 19 nt, Homo sapiens
  misc_RNA (1)...(19): siRNA sense strand
gaguuugggcugccuaaua

SEQ ID NO: 1626835 - RNA, 19 nt, Homo sapiens
  misc_RNA (1)...(19): siRNA sense strand
ucaaagaaaccacuucaga

SEQ ID NO: 1626836 - RNA, 19 nt, Homo sapiens
  misc_RNA (1)...(19): siRNA sense strand
guaaggagccaucggacaa

SEQ ID NO: 1626837 - RNA, 19 nt, Homo sapiens
  misc_RNA (1)...(19): siRNA sense strand
gaucaagauucggaguuug

SEQ ID NO: 1626838 - RNA, 19 nt, Homo sapiens
  misc_RNA (1)...(19): siRNA sense strand
agacagcaauaaagaguuc

SEQ ID NO: 1626839 - RNA, 19 nt, Homo sapiens
  misc_RNA (1)...(19): siRNA sense strand
gcccauuucugaccucuuc

SEQ ID NO: 1626840 - RNA, 19 nt, Homo sapiens
  misc_RNA (1)...(19): siRNA sense strand
cagcaaagggaaagaaaug

SEQ ID NO: 1626841 - RNA, 19 nt, Homo sapiens
  misc_RNA (1)...(19): siRNA sense strand
guacagcuuugccauucau

SEQ ID NO: 1626842 - RNA, 19 nt, Homo sapiens
  misc_RNA (1)...(19): siRNA sense strand
ccauggagauauccuucuu

SEQ ID NO: 1626843 - RNA, 19 nt, Homo sapiens
  misc_RNA (1)...(19): siRNA sense strand
cuacuuacuugcugugauc

SEQ ID NO: 1626844 - RNA, 19 nt, Homo sapiens
  misc_RNA (1)...(19): siRNA sense strand
gaagucggcgauccaugaa

SEQ ID NO: 1626845 - RNA, 19 nt, Homo sapiens
  misc_RNA (1)...(19): siRNA sense strand
agaucaagauucggaguuu

SEQ ID NO: 1626846 - RNA, 19 nt, Homo sapiens
  misc_RNA (1)...(19): siRNA sense strand
uagcugcaaugauacuguu

SEQ ID NO: 1626847 - RNA, 19 nt, Homo sapiens
  misc_RNA (1)...(19): siRNA sense strand
agaagucggcgauccauga

SEQ ID NO: 1626848 - RNA, 19 nt, Homo sapiens
  misc_RNA (1)...(19): siRNA sense strand
uuucugaccucuucaacga

SEQ ID NO: 1626849 - RNA, 19 nt, Homo sapiens
  misc_RNA (1)...(19): siRNA sense strand
cuucagcuucuucaucuua

SEQ ID NO: 1626850 - RNA, 19 nt, Homo sapiens
  misc_RNA (1)...(19): siRNA sense strand
aaucuccacuacuuacuug

SEQ ID NO: 1626851 - RNA, 19 nt, Homo sapiens
  misc_RNA (1)...(19): siRNA sense strand
gaaucuccacuacuuacuu

SEQ ID NO: 1626852 - RNA, 19 nt, Homo sapiens
  misc_RNA (1)...(19): siRNA sense strand
ggucuuugcugugagaagu

SEQ ID NO: 1626853 - RNA, 19 nt, Homo sapiens
  misc_RNA (1)...(19): siRNA sense strand
gggccaaacccgaggaaga

SEQ ID NO: 1626854 - RNA, 19 nt, Homo sapiens
  misc_RNA (1)...(19): siRNA sense strand
gagaucaagauucggaguu

SEQ ID NO: 1626855 - RNA, 19 nt, Homo sapiens
  misc_RNA (1)...(19): siRNA sense strand
caugaaucuccacuacuua

SEQ ID NO: 1626856 - RNA, 19 nt, Homo sapiens
  misc_RNA (1)...(19): siRNA sense strand
gccguggucuuugcuguga

SEQ ID NO: 1626857 - RNA, 19 nt, Homo sapiens
  misc_RNA (1)...(19): siRNA sense strand
caucuuacuguacagcuuu

SEQ ID NO: 1626858 - RNA, 19 nt, Homo sapiens
  misc_RNA (1)...(19): siRNA sense strand
ugccauucauagauacaua

SEQ ID NO: 1626859 - RNA, 19 nt, Homo sapiens
  misc_RNA (1)...(19): siRNA sense strand
aaagacagcaauaaagagu

SEQ ID NO: 1626860 - RNA, 19 nt, Homo sapiens
  misc_RNA (1)...(19): siRNA sense strand
aguuugggcugccuaauag

SEQ ID NO: 1626861 - RNA, 19 nt, Homo sapiens
  misc_RNA (1)...(19): siRNA sense strand
cagcuuugccauucauaga

SEQ ID NO: 1626862 - RNA, 19 nt, Homo sapiens
  misc_RNA (1)...(19): siRNA sense strand
gcagggcaagggaccagaa

SEQ ID NO: 1626863 - RNA, 19 nt, Homo sapiens
  misc_RNA (1)...(19): siRNA sense strand
gcacgcugagaucaagauu

SEQ ID NO: 1626864 - RNA, 19 nt, Homo sapiens
  misc_RNA (1)...(19): siRNA sense strand
gauccaugaaucuccacua

SEQ ID NO: 1626865 - RNA, 19 nt, Homo sapiens
  misc_RNA (1)...(19): siRNA sense strand
ugugggagccguggucuuu

SEQ ID NO: 1626866 - RNA, 19 nt, Homo sapiens
  misc_RNA (1)...(19): siRNA sense strand
auaaggagccaucggacaa

SEQ ID NO: 1626867 - RNA, 19 nt, Homo sapiens
  misc_RNA (1)...(19): siRNA sense strand
uuacuugcugugauccuua

SEQ ID NO: 1626868 - RNA, 19 nt, Homo sapiens
  misc_RNA (1)...(19): siRNA sense strand
acgcugagaucaagauucg

SEQ ID NO: 1626869 - RNA, 19 nt, Homo sapiens
  misc_RNA (1)...(19): siRNA sense strand
aagacaagaaggacgguaa

SEQ ID NO: 1626870 - RNA, 19 nt, Homo sapiens
  misc_RNA (1)...(19): siRNA sense strand
uaaggagccaucggacaaa

SEQ ID NO: 1626871 - RNA, 19 nt, Homo sapiens
  misc_RNA (1)...(19): siRNA sense strand
ccucuucaacgaccugauu

SEQ ID NO: 1626872 - RNA, 19 nt, Homo sapiens
  misc_RNA (1)...(19): siRNA sense strand
uaaggagccaucggacaaa

SEQ ID NO: 1626873 - RNA, 19 nt, Homo sapiens
  misc_RNA (1)...(19): siRNA sense strand
agucggcgauccaugaauc

SEQ ID NO: 1626874 - RNA, 19 nt, Homo sapiens
  misc_RNA (1)...(19): siRNA sense strand
agauauccuucuucagcuu

SEQ ID NO: 1626875 - RNA, 19 nt, Homo sapiens
  misc_RNA (1)...(19): siRNA sense strand
gccagcaaagggaaagaaa

SEQ ID NO: 1626876 - RNA, 19 nt, Homo sapiens
  misc_RNA (1)...(19): siRNA sense strand
auagauacauacccuucau

SEQ ID NO: 1626877 - RNA, 19 nt, Homo sapiens
  misc_RNA (1)...(19): siRNA sense strand
cuguacagcuuugccauuc

SEQ ID NO: 1626878 - RNA, 19 nt, Homo sapiens
  misc_RNA (1)...(19): siRNA sense strand
gcuucuucaucuuacugua

SEQ ID NO: 1626879 - RNA, 19 nt, Homo sapiens
  misc_RNA (1)...(19): siRNA sense strand
ggaauuaaaagacagcaau

SEQ ID NO: 1626880 - RNA, 19 nt, Homo sapiens
  misc_RNA (1)...(19): siRNA sense strand
auggagauauccuucuuca

SEQ ID NO: 1626881 - RNA, 19 nt, Homo sapiens
  misc_RNA (1)...(19): siRNA sense strand
caccccaucuugaggcuua

SEQ ID NO: 1626882 - RNA, 19 nt, Homo sapiens
  misc_RNA (1)...(19): siRNA sense strand
auacuguuguccucacuca

SEQ ID NO: 1626883 - RNA, 19 nt, Homo sapiens
  misc_RNA (1)...(19): siRNA sense strand
acaagaaggacgguaagga

SEQ ID NO: 1626884 - RNA, 19 nt, Homo sapiens
  misc_RNA (1)...(19): siRNA sense strand
ccgcuaccggugggaauua

SEQ ID NO: 1626885 - RNA, 19 nt, Homo sapiens
  misc_RNA (1)...(19): siRNA sense strand
ccagcaaagggaaagaaau

SEQ ID NO: 1626886 - RNA, 19 nt, Homo sapiens
  misc_RNA (1)...(19): siRNA sense strand
gguaaggacuugccagaga

SEQ ID NO: 1626887 - RNA, 19 nt, Homo sapiens
  misc_RNA (1)...(19): siRNA sense strand
guaaggacuugccagagaa

SEQ ID NO: 1626888 - RNA, 19 nt, Homo sapiens
  misc_RNA (1)...(19): siRNA sense strand
gguaccagcuguaugaugu

SEQ ID NO: 1626889 - RNA, 19 nt, Homo sapiens
  misc_RNA (1)...(19): siRNA sense strand
ccacauagagcuccaagga

SEQ ID NO: 1626890 - RNA, 19 nt, Homo sapiens
  misc_RNA (1)...(19): siRNA sense strand
gaacuacaacgaggccaaa

SEQ ID NO: 1626891 - RNA, 19 nt, Homo sapiens
  misc_RNA (1)...(19): siRNA sense strand
ggucuuguagcuucaauga

SEQ ID NO: 1626892 - RNA, 19 nt, Homo sapiens
  misc_RNA (1)...(19): siRNA sense strand
gaggugacccugugugaca

SEQ ID NO: 1626893 - RNA, 19 nt, Homo sapiens
  misc_RNA (1)...(19): siRNA sense strand
uguaugauguguguucuga

SEQ ID NO: 1626894 - RNA, 19 nt, Homo sapiens
  misc_RNA (1)...(19): siRNA sense strand
gccugcagcuucucauuuc

SEQ ID NO: 1626895 - RNA, 19 nt, Homo sapiens
  misc_RNA (1)...(19): siRNA sense strand
ccaaaugugucaccuucag

SEQ ID NO: 1626896 - RNA, 19 nt, Homo sapiens
  misc_RNA (1)...(19): siRNA sense strand
cuacaacgaggccaaaugu

SEQ ID NO: 1626897 - RNA, 19 nt, Homo sapiens
  misc_RNA (1)...(19): siRNA sense strand
gcacuuccaggccuccauu

SEQ ID NO: 1626898 - RNA, 19 nt, Homo sapiens
  misc_RNA (1)...(19): siRNA sense strand
caacagcacagagcacuuc

SEQ ID NO: 1626899 - RNA, 19 nt, Homo sapiens
  misc_RNA (1)...(19): siRNA sense strand
ccagcuguaugaugugugu

SEQ ID NO: 1626900 - RNA, 19 nt, Homo sapiens
  misc_RNA (1)...(19): siRNA sense strand
ggccugcagcuucucauuu

SEQ ID NO: 1626901 - RNA, 19 nt, Homo sapiens
  misc_RNA (1)...(19): siRNA sense strand
cuacggugcuggcagugau

SEQ ID NO: 1626902 - RNA, 19 nt, Homo sapiens
  misc_RNA (1)...(19): siRNA sense strand
acaacgaggccaaaugugu

SEQ ID NO: 1626903 - RNA, 19 nt, Homo sapiens
  misc_RNA (1)...(19): siRNA sense strand
ggguugaggagauaaacaa

SEQ ID NO: 1626904 - RNA, 19 nt, Homo sapiens
  misc_RNA (1)...(19): siRNA sense strand
gcauggcuaccaccucuuc

SEQ ID NO: 1626905 - RNA, 19 nt, Homo sapiens
  misc_RNA (1)...(19): siRNA sense strand
ucagccugcucuucaacuu

SEQ ID NO: 1626906 - RNA, 19 nt, Homo sapiens
  misc_RNA (1)...(19): siRNA sense strand
guucugacucugccaaugu

SEQ ID NO: 1626907 - RNA, 19 nt, Homo sapiens
  misc_RNA (1)...(19): siRNA sense strand
ggacuugccagagaacuac

SEQ ID NO: 1626908 - RNA, 19 nt, Homo sapiens
  misc_RNA (1)...(19): siRNA sense strand
uaugauguguguucugacu

SEQ ID NO: 1626909 - RNA, 19 nt, Homo sapiens
  misc_RNA (1)...(19): siRNA sense strand
gccagggcaacaccacaua

SEQ ID NO: 1626910 - RNA, 19 nt, Homo sapiens
  misc_RNA (1)...(19): siRNA sense strand
ccuguucccucuccauucu

SEQ ID NO: 1626911 - RNA, 19 nt, Homo sapiens
  misc_RNA (1)...(19): siRNA sense strand
gguauuuucugccuaagug

SEQ ID NO: 1626912 - RNA, 19 nt, Homo sapiens
  misc_RNA (1)...(19): siRNA sense strand
ugacucugccaauguguau

SEQ ID NO: 1626913 - RNA, 19 nt, Homo sapiens
  misc_RNA (1)...(19): siRNA sense strand
gcagugauugggccugaca

SEQ ID NO: 1626914 - RNA, 19 nt, Homo sapiens
  misc_RNA (1)...(19): siRNA sense strand
gacaggucuuguagcuuca

SEQ ID NO: 1626915 - RNA, 19 nt, Homo sapiens
  misc_RNA (1)...(19): siRNA sense strand
ugauguguguucugacucu

SEQ ID NO: 1626916 - RNA, 19 nt, Homo sapiens
  misc_RNA (1)...(19): siRNA sense strand
gccuuugccugccauagca

SEQ ID NO: 1626917 - RNA, 19 nt, Homo sapiens
  misc_RNA (1)...(19): siRNA sense strand
ucaaugagcauggcuacca

SEQ ID NO: 1626918 - RNA, 19 nt, Homo sapiens
  misc_RNA (1)...(19): siRNA sense strand
uugaggagauaaacaacuc

SEQ ID NO: 1626919 - RNA, 19 nt, Homo sapiens
  misc_RNA (1)...(19): siRNA sense strand
ugugacaggucuuguagcu

SEQ ID NO: 1626920 - RNA, 19 nt, Homo sapiens
  misc_RNA (1)...(19): siRNA sense strand
gguaccagcuguaugaugu

SEQ ID NO: 1626921 - RNA, 19 nt, Homo sapiens
  misc_RNA (1)...(19): siRNA sense strand
ccacauagagcuccaagga

SEQ ID NO: 1626922 - RNA, 19 nt, Homo sapiens
  misc_RNA (1)...(19): siRNA sense strand
ggucuuguagcuucaauga

SEQ ID NO: 1626923 - RNA, 19 nt, Homo sapiens
  misc_RNA (1)...(19): siRNA sense strand
gccugcagcuucucauuuc

SEQ ID NO: 1626924 - RNA, 19 nt, Homo sapiens
  misc_RNA (1)...(19): siRNA sense strand
uguaugauguguguucuga

SEQ ID NO: 1626925 - RNA, 19 nt, Homo sapiens
  misc_RNA (1)...(19): siRNA sense strand
gaggugacccugugugaca

SEQ ID NO: 1626926 - RNA, 19 nt, Homo sapiens
  misc_RNA (1)...(19): siRNA sense strand
ccagcuguaugaugugugu

SEQ ID NO: 1626927 - RNA, 19 nt, Homo sapiens
  misc_RNA (1)...(19): siRNA sense strand
ggccugcagcuucucauuu

SEQ ID NO: 1626928 - RNA, 19 nt, Homo sapiens
  misc_RNA (1)...(19): siRNA sense strand
cuacggugcuggcagugau

SEQ ID NO: 1626929 - RNA, 19 nt, Homo sapiens
  misc_RNA (1)...(19): siRNA sense strand
ggguugaggagauaaacaa

SEQ ID NO: 1626930 - RNA, 19 nt, Homo sapiens
  misc_RNA (1)...(19): siRNA sense strand
gcauggcuaccaccucuuc

SEQ ID NO: 1626931 - RNA, 19 nt, Homo sapiens
  misc_RNA (1)...(19): siRNA sense strand
guucugacucugccaaugu

SEQ ID NO: 1626932 - RNA, 19 nt, Homo sapiens
  misc_RNA (1)...(19): siRNA sense strand
uaugauguguguucugacu

SEQ ID NO: 1626933 - RNA, 19 nt, Homo sapiens
  misc_RNA (1)...(19): siRNA sense strand
gccagggcaacaccacaua

SEQ ID NO: 1626934 - RNA, 19 nt, Homo sapiens
  misc_RNA (1)...(19): siRNA sense strand
ccuguucccucuccauucu

SEQ ID NO: 1626935 - RNA, 19 nt, Homo sapiens
  misc_RNA (1)...(19): siRNA sense strand
ugacucugccaauguguau

SEQ ID NO: 1626936 - RNA, 19 nt, Homo sapiens
  misc_RNA (1)...(19): siRNA sense strand
gcagugauugggccugaca

SEQ ID NO: 1626937 - RNA, 19 nt, Homo sapiens
  misc_RNA (1)...(19): siRNA sense strand
gacaggucuuguagcuuca

SEQ ID NO: 1626938 - RNA, 19 nt, Homo sapiens
  misc_RNA (1)...(19): siRNA sense strand
ugauguguguucugacucu

SEQ ID NO: 1626939 - RNA, 19 nt, Homo sapiens
  misc_RNA (1)...(19): siRNA sense strand
gccuuugccugccauagca

SEQ ID NO: 1626940 - RNA, 19 nt, Homo sapiens
  misc_RNA (1)...(19): siRNA sense strand
ucaaugagcauggcuacca

SEQ ID NO: 1626941 - RNA, 19 nt, Homo sapiens
  misc_RNA (1)...(19): siRNA sense strand
ugugacaggucuuguagcu

SEQ ID NO: 1626942 - RNA, 19 nt, Homo sapiens
  misc_RNA (1)...(19): siRNA sense strand
uugaggagauaaacaacuc

SEQ ID NO: 1626943 - RNA, 19 nt, Homo sapiens
  misc_RNA (1)...(19): siRNA sense strand
gguaaggacuugccagaga

SEQ ID NO: 1626944 - RNA, 19 nt, Homo sapiens
  misc_RNA (1)...(19): siRNA sense strand
guaaggacuugccagagaa

SEQ ID NO: 1626945 - RNA, 19 nt, Homo sapiens
  misc_RNA (1)...(19): siRNA sense strand
gguaccagcuguaugaugu

SEQ ID NO: 1626946 - RNA, 19 nt, Homo sapiens
  misc_RNA (1)...(19): siRNA sense strand
ccacauagagcuccaagga

SEQ ID NO: 1626947 - RNA, 19 nt, Homo sapiens
  misc_RNA (1)...(19): siRNA sense strand
gaacuacaacgaggccaaa

SEQ ID NO: 1626948 - RNA, 19 nt, Homo sapiens
  misc_RNA (1)...(19): siRNA sense strand
ggucuuguagcuucaauga

SEQ ID NO: 1626949 - RNA, 19 nt, Homo sapiens
  misc_RNA (1)...(19): siRNA sense strand
gaggugacccugugugaca

SEQ ID NO: 1626950 - RNA, 19 nt, Homo sapiens
  misc_RNA (1)...(19): siRNA sense strand
uguaugauguguguucuga

SEQ ID NO: 1626951 - RNA, 19 nt, Homo sapiens
  misc_RNA (1)...(19): siRNA sense strand
gccugcagcuucucauuuc

SEQ ID NO: 1626952 - RNA, 19 nt, Homo sapiens
  misc_RNA (1)...(19): siRNA sense strand
ccaaaugugucaccuucag

SEQ ID NO: 1626953 - RNA, 19 nt, Homo sapiens
  misc_RNA (1)...(19): siRNA sense strand
cuacaacgaggccaaaugu

SEQ ID NO: 1626954 - RNA, 19 nt, Homo sapiens
  misc_RNA (1)...(19): siRNA sense strand
gcacuuccaggccuccauu

SEQ ID NO: 1626955 - RNA, 19 nt, Homo sapiens
  misc_RNA (1)...(19): siRNA sense strand
caacagcacagagcacuuc

SEQ ID NO: 1626956 - RNA, 19 nt, Homo sapiens
  misc_RNA (1)...(19): siRNA sense strand
ccagcuguaugaugugugu

SEQ ID NO: 1626957 - RNA, 19 nt, Homo sapiens
  misc_RNA (1)...(19): siRNA sense strand
ggccugcagcuucucauuu

SEQ ID NO: 1626958 - RNA, 19 nt, Homo sapiens
  misc_RNA (1)...(19): siRNA sense strand
cuacggugcuggcagugau

SEQ ID NO: 1626959 - RNA, 19 nt, Homo sapiens
  misc_RNA (1)...(19): siRNA sense strand
acaacgaggccaaaugugu

SEQ ID NO: 1626960 - RNA, 19 nt, Homo sapiens
  misc_RNA (1)...(19): siRNA sense strand
ggguugaggagauaaacaa

SEQ ID NO: 1626961 - RNA, 19 nt, Homo sapiens
  misc_RNA (1)...(19): siRNA sense strand
gcauggcuaccaccucuuc

SEQ ID NO: 1626962 - RNA, 19 nt, Homo sapiens
  misc_RNA (1)...(19): siRNA sense strand
ucagccugcucuucaacuu

SEQ ID NO: 1626963 - RNA, 19 nt, Homo sapiens
  misc_RNA (1)...(19): siRNA sense strand
guucugacucugccaaugu

SEQ ID NO: 1626964 - RNA, 19 nt, Homo sapiens
  misc_RNA (1)...(19): siRNA sense strand
ggacuugccagagaacuac

SEQ ID NO: 1626965 - RNA, 19 nt, Homo sapiens
  misc_RNA (1)...(19): siRNA sense strand
uaugauguguguucugacu

SEQ ID NO: 1626966 - RNA, 19 nt, Homo sapiens
  misc_RNA (1)...(19): siRNA sense strand
gccagggcaacaccacaua

SEQ ID NO: 1626967 - RNA, 19 nt, Homo sapiens
  misc_RNA (1)...(19): siRNA sense strand
ccuguucccucuccauucu

SEQ ID NO: 1626968 - RNA, 19 nt, Homo sapiens
  misc_RNA (1)...(19): siRNA sense strand
gguauuuucugccuaagug

SEQ ID NO: 1626969 - RNA, 19 nt, Homo sapiens
  misc_RNA (1)...(19): siRNA sense strand
ugacucugccaauguguau

SEQ ID NO: 1626970 - RNA, 19 nt, Homo sapiens
  misc_RNA (1)...(19): siRNA sense strand
gcagugauugggccugaca

SEQ ID NO: 1626971 - RNA, 19 nt, Homo sapiens
  misc_RNA (1)...(19): siRNA sense strand
gacaggucuuguagcuuca

SEQ ID NO: 1626972 - RNA, 19 nt, Homo sapiens
  misc_RNA (1)...(19): siRNA sense strand
ugauguguguucugacucu

SEQ ID NO: 1626973 - RNA, 19 nt, Homo sapiens
  misc_RNA (1)...(19): siRNA sense strand
gccuuugccugccauagca

SEQ ID NO: 1626974 - RNA, 19 nt, Homo sapiens
  misc_RNA (1)...(19): siRNA sense strand
ucaaugagcauggcuacca

SEQ ID NO: 1626975 - RNA, 19 nt, Homo sapiens
  misc_RNA (1)...(19): siRNA sense strand
uugaggagauaaacaacuc

SEQ ID NO: 1626976 - RNA, 19 nt, Homo sapiens
  misc_RNA (1)...(19): siRNA sense strand
ugugacaggucuuguagcu

SEQ ID NO: 1626977 - RNA, 19 nt, Homo sapiens
  misc_RNA (1)...(19): siRNA sense strand
gguaaggacuugccagaga

SEQ ID NO: 1626978 - RNA, 19 nt, Homo sapiens
  misc_RNA (1)...(19): siRNA sense strand
guaaggacuugccagagaa

SEQ ID NO: 1626979 - RNA, 19 nt, Homo sapiens
  misc_RNA (1)...(19): siRNA sense strand
gguaccagcuguaugaugu

SEQ ID NO: 1626980 - RNA, 19 nt, Homo sapiens
  misc_RNA (1)...(19): siRNA sense strand
ccacauagagcuccaagga

SEQ ID NO: 1626981 - RNA, 19 nt, Homo sapiens
  misc_RNA (1)...(19): siRNA sense strand
gaacuacaacgaggccaaa

SEQ ID NO: 1626982 - RNA, 19 nt, Homo sapiens
  misc_RNA (1)...(19): siRNA sense strand
ggucuuguagcuucaauga

SEQ ID NO: 1626983 - RNA, 19 nt, Homo sapiens
  misc_RNA (1)...(19): siRNA sense strand
gaggugacccugugugaca

SEQ ID NO: 1626984 - RNA, 19 nt, Homo sapiens
  misc_RNA (1)...(19): siRNA sense strand
uguaugauguguguucuga

SEQ ID NO: 1626985 - RNA, 19 nt, Homo sapiens
  misc_RNA (1)...(19): siRNA sense strand
gccugcagcuucucauuuc

SEQ ID NO: 1626986 - RNA, 19 nt, Homo sapiens
  misc_RNA (1)...(19): siRNA sense strand
ccaaaugugucaccuucag

SEQ ID NO: 1626987 - RNA, 19 nt, Homo sapiens
  misc_RNA (1)...(19): siRNA sense strand
cuacaacgaggccaaaugu

SEQ ID NO: 1626988 - RNA, 19 nt, Homo sapiens
  misc_RNA (1)...(19): siRNA sense strand
ccagcuguaugaugugugu

SEQ ID NO: 1626989 - RNA, 19 nt, Homo sapiens
  misc_RNA (1)...(19): siRNA sense strand
ggccugcagcuucucauuu

SEQ ID NO: 1626990 - RNA, 19 nt, Homo sapiens
  misc_RNA (1)...(19): siRNA sense strand
cuacggugcuggcagugau

SEQ ID NO: 1626991 - RNA, 19 nt, Homo sapiens
  misc_RNA (1)...(19): siRNA sense strand
acaacgaggccaaaugugu

SEQ ID NO: 1626992 - RNA, 19 nt, Homo sapiens
  misc_RNA (1)...(19): siRNA sense strand
ggguugaggagauaaacaa

SEQ ID NO: 1626993 - RNA, 19 nt, Homo sapiens
  misc_RNA (1)...(19): siRNA sense strand
gcauggcuaccaccucuuc

SEQ ID NO: 1626994 - RNA, 19 nt, Homo sapiens
  misc_RNA (1)...(19): siRNA sense strand
ucagccugcucuucaacuu

SEQ ID NO: 1626995 - RNA, 19 nt, Homo sapiens
  misc_RNA (1)...(19): siRNA sense strand
guucugacucugccaaugu

SEQ ID NO: 1626996 - RNA, 19 nt, Homo sapiens
  misc_RNA (1)...(19): siRNA sense strand
ggacuugccagagaacuac

SEQ ID NO: 1626997 - RNA, 19 nt, Homo sapiens
  misc_RNA (1)...(19): siRNA sense strand
uaugauguguguucugacu

SEQ ID NO: 1626998 - RNA, 19 nt, Homo sapiens
  misc_RNA (1)...(19): siRNA sense strand
gccagggcaacaccacaua

SEQ ID NO: 1626999 - RNA, 19 nt, Homo sapiens
  misc_RNA (1)...(19): siRNA sense strand
ccuguucccucuccauucu

SEQ ID NO: 1627000 - RNA, 19 nt, Homo sapiens
  misc_RNA (1)...(19): siRNA sense strand
ugacucugccaauguguau

SEQ ID NO: 1627001 - RNA, 19 nt, Homo sapiens
  misc_RNA (1)...(19): siRNA sense strand
gcagugauugggccugaca

SEQ ID NO: 1627002 - RNA, 19 nt, Homo sapiens
  misc_RNA (1)...(19): siRNA sense strand
gacaggucuuguagcuuca

SEQ ID NO: 1627003 - RNA, 19 nt, Homo sapiens
  misc_RNA (1)...(19): siRNA sense strand
gccuuugccugccauagca

SEQ ID NO: 1627004 - RNA, 19 nt, Homo sapiens
  misc_RNA (1)...(19): siRNA sense strand
ugauguguguucugacucu

SEQ ID NO: 1627005 - RNA, 19 nt, Homo sapiens
  misc_RNA (1)...(19): siRNA sense strand
ucaaugagcauggcuacca

SEQ ID NO: 1627006 - RNA, 19 nt, Homo sapiens
  misc_RNA (1)...(19): siRNA sense strand
ugugacaggucuuguagcu

SEQ ID NO: 1627007 - RNA, 19 nt, Homo sapiens
  misc_RNA (1)...(19): siRNA sense strand
uugaggagauaaacaacuc

SEQ ID NO: 1627008 - RNA, 19 nt, Homo sapiens
  misc_RNA (1)...(19): siRNA sense strand
gguaaggacuugccagaga

SEQ ID NO: 1627009 - RNA, 19 nt, Homo sapiens
  misc_RNA (1)...(19): siRNA sense strand
guaaggacuugccagagaa

SEQ ID NO: 1627010 - RNA, 19 nt, Homo sapiens
  misc_RNA (1)...(19): siRNA sense strand
gguaccagcuguaugaugu

SEQ ID NO: 1627011 - RNA, 19 nt, Homo sapiens
  misc_RNA (1)...(19): siRNA sense strand
ccacauagagcuccaagga

SEQ ID NO: 1627012 - RNA, 19 nt, Homo sapiens
  misc_RNA (1)...(19): siRNA sense strand
gaacuacaacgaggccaaa

SEQ ID NO: 1627013 - RNA, 19 nt, Homo sapiens
  misc_RNA (1)...(19): siRNA sense strand
ggucuuguagcuucaauga

SEQ ID NO: 1627014 - RNA, 19 nt, Homo sapiens
  misc_RNA (1)...(19): siRNA sense strand
gaggugacccugugugaca

SEQ ID NO: 1627015 - RNA, 19 nt, Homo sapiens
  misc_RNA (1)...(19): siRNA sense strand
uguaugauguguguucuga

SEQ ID NO: 1627016 - RNA, 19 nt, Homo sapiens
  misc_RNA (1)...(19): siRNA sense strand
gccugcagcuucucauuuc

SEQ ID NO: 1627017 - RNA, 19 nt, Homo sapiens
  misc_RNA (1)...(19): siRNA sense strand
ccaaaugugucaccuucag

SEQ ID NO: 1627018 - RNA, 19 nt, Homo sapiens
  misc_RNA (1)...(19): siRNA sense strand
cuacaacgaggccaaaugu

SEQ ID NO: 1627019 - RNA, 19 nt, Homo sapiens
  misc_RNA (1)...(19): siRNA sense strand
gcacuuccaggccuccauu

SEQ ID NO: 1627020 - RNA, 19 nt, Homo sapiens
  misc_RNA (1)...(19): siRNA sense strand
caacagcacagagcacuuc

SEQ ID NO: 1627021 - RNA, 19 nt, Homo sapiens
  misc_RNA (1)...(19): siRNA sense strand
ccagcuguaugaugugugu

SEQ ID NO: 1627022 - RNA, 19 nt, Homo sapiens
  misc_RNA (1)...(19): siRNA sense strand
ggccugcagcuucucauuu

SEQ ID NO: 1627023 - RNA, 19 nt, Homo sapiens
  misc_RNA (1)...(19): siRNA sense strand
cuacggugcuggcagugau

SEQ ID NO: 1627024 - RNA, 19 nt, Homo sapiens
  misc_RNA (1)...(19): siRNA sense strand
acaacgaggccaaaugugu

SEQ ID NO: 1627025 - RNA, 19 nt, Homo sapiens
  misc_RNA (1)...(19): siRNA sense strand
ggguugaggagauaaacaa

SEQ ID NO: 1627026 - RNA, 19 nt, Homo sapiens
  misc_RNA (1)...(19): siRNA sense strand
gcauggcuaccaccucuuc

SEQ ID NO: 1627027 - RNA, 19 nt, Homo sapiens
  misc_RNA (1)...(19): siRNA sense strand
ucagccugcucuucaacuu

SEQ ID NO: 1627028 - RNA, 19 nt, Homo sapiens
  misc_RNA (1)...(19): siRNA sense strand
guucugacucugccaaugu

SEQ ID NO: 1627029 - RNA, 19 nt, Homo sapiens
  misc_RNA (1)...(19): siRNA sense strand
ggacuugccagagaacuac

SEQ ID NO: 1627030 - RNA, 19 nt, Homo sapiens
  misc_RNA (1)...(19): siRNA sense strand
uaugauguguguucugacu

SEQ ID NO: 1627031 - RNA, 19 nt, Homo sapiens
  misc_RNA (1)...(19): siRNA sense strand
gccagggcaacaccacaua

SEQ ID NO: 1627032 - RNA, 19 nt, Homo sapiens
  misc_RNA (1)...(19): siRNA sense strand
ccuguucccucuccauucu

SEQ ID NO: 1627033 - RNA, 19 nt, Homo sapiens
  misc_RNA (1)...(19): siRNA sense strand
gguauuuucugccuaagug

SEQ ID NO: 1627034 - RNA, 19 nt, Homo sapiens
  misc_RNA (1)...(19): siRNA sense strand
ugacucugccaauguguau

SEQ ID NO: 1627035 - RNA, 19 nt, Homo sapiens
  misc_RNA (1)...(19): siRNA sense strand
gcagugauugggccugaca

SEQ ID NO: 1627036 - RNA, 19 nt, Homo sapiens
  misc_RNA (1)...(19): siRNA sense strand
gacaggucuuguagcuuca

SEQ ID NO: 1627037 - RNA, 19 nt, Homo sapiens
  misc_RNA (1)...(19): siRNA sense strand
ugauguguguucugacucu

SEQ ID NO: 1627038 - RNA, 19 nt, Homo sapiens
  misc_RNA (1)...(19): siRNA sense strand
gccuuugccugccauagca

SEQ ID NO: 1627039 - RNA, 19 nt, Homo sapiens
  misc_RNA (1)...(19): siRNA sense strand
ucaaugagcauggcuacca

SEQ ID NO: 1627040 - RNA, 19 nt, Homo sapiens
  misc_RNA (1)...(19): siRNA sense strand
uugaggagauaaacaacuc

SEQ ID NO: 1627041 - RNA, 19 nt, Homo sapiens
  misc_RNA (1)...(19): siRNA sense strand
ugugacaggucuuguagcu

SEQ ID NO: 1627042 - RNA, 19 nt, Homo sapiens
  misc_RNA (1)...(19): siRNA sense strand
gguaccagcuguaugaugu

SEQ ID NO: 1627043 - RNA, 19 nt, Homo sapiens
  misc_RNA (1)...(19): siRNA sense strand
ccacauagagcuccaagga

SEQ ID NO: 1627044 - RNA, 19 nt, Homo sapiens
  misc_RNA (1)...(19): siRNA sense strand
ggucuuguagcuucaauga

SEQ ID NO: 1627045 - RNA, 19 nt, Homo sapiens
  misc_RNA (1)...(19): siRNA sense strand
gccugcagcuucucauuuc

SEQ ID NO: 1627046 - RNA, 19 nt, Homo sapiens
  misc_RNA (1)...(19): siRNA sense strand
uguaugauguguguucuga

SEQ ID NO: 1627047 - RNA, 19 nt, Homo sapiens
  misc_RNA (1)...(19): siRNA sense strand
gaggugacccugugugaca

SEQ ID NO: 1627048 - RNA, 19 nt, Homo sapiens
  misc_RNA (1)...(19): siRNA sense strand
ccagcuguaugaugugugu

SEQ ID NO: 1627049 - RNA, 19 nt, Homo sapiens
  misc_RNA (1)...(19): siRNA sense strand
ggccugcagcuucucauuu

SEQ ID NO: 1627050 - RNA, 19 nt, Homo sapiens
  misc_RNA (1)...(19): siRNA sense strand
cuacggugcuggcagugau

SEQ ID NO: 1627051 - RNA, 19 nt, Homo sapiens
  misc_RNA (1)...(19): siRNA sense strand
ggguugaggagauaaacaa

SEQ ID NO: 1627052 - RNA, 19 nt, Homo sapiens
  misc_RNA (1)...(19): siRNA sense strand
gcauggcuaccaccucuuc

SEQ ID NO: 1627053 - RNA, 19 nt, Homo sapiens
  misc_RNA (1)...(19): siRNA sense strand
guucugacucugccaaugu

SEQ ID NO: 1627054 - RNA, 19 nt, Homo sapiens
  misc_RNA (1)...(19): siRNA sense strand
uaugauguguguucugacu

SEQ ID NO: 1627055 - RNA, 19 nt, Homo sapiens
  misc_RNA (1)...(19): siRNA sense strand
gccagggcaacaccacaua

SEQ ID NO: 1627056 - RNA, 19 nt, Homo sapiens
  misc_RNA (1)...(19): siRNA sense strand
ccuguucccucuccauucu

SEQ ID NO: 1627057 - RNA, 19 nt, Homo sapiens
  misc_RNA (1)...(19): siRNA sense strand
ugacucugccaauguguau

SEQ ID NO: 1627058 - RNA, 19 nt, Homo sapiens
  misc_RNA (1)...(19): siRNA sense strand
gcagugauugggccugaca

SEQ ID NO: 1627059 - RNA, 19 nt, Homo sapiens
  misc_RNA (1)...(19): siRNA sense strand
gacaggucuuguagcuuca

SEQ ID NO: 1627060 - RNA, 19 nt, Homo sapiens
  misc_RNA (1)...(19): siRNA sense strand
ugauguguguucugacucu

SEQ ID NO: 1627061 - RNA, 19 nt, Homo sapiens
  misc_RNA (1)...(19): siRNA sense strand
gccuuugccugccauagca

SEQ ID NO: 1627062 - RNA, 19 nt, Homo sapiens
  misc_RNA (1)...(19): siRNA sense strand
ucaaugagcauggcuacca

SEQ ID NO: 1627063 - RNA, 19 nt, Homo sapiens
  misc_RNA (1)...(19): siRNA sense strand
ugugacaggucuuguagcu

SEQ ID NO: 1627064 - RNA, 19 nt, Homo sapiens
  misc_RNA (1)...(19): siRNA sense strand
uugaggagauaaacaacuc

SEQ ID NO: 1627065 - RNA, 19 nt, Homo sapiens
  misc_RNA (1)...(19): siRNA sense strand
gguaaggacuugccagaga

SEQ ID NO: 1627066 - RNA, 19 nt, Homo sapiens
  misc_RNA (1)...(19): siRNA sense strand
guaaggacuugccagagaa

SEQ ID NO: 1627067 - RNA, 19 nt, Homo sapiens
  misc_RNA (1)...(19): siRNA sense strand
gguaccagcuguaugaugu

SEQ ID NO: 1627068 - RNA, 19 nt, Homo sapiens
  misc_RNA (1)...(19): siRNA sense strand
ccacauagagcuccaagga

SEQ ID NO: 1627069 - RNA, 19 nt, Homo sapiens
  misc_RNA (1)...(19): siRNA sense strand
gaacuacaacgaggccaaa

SEQ ID NO: 1627070 - RNA, 19 nt, Homo sapiens
  misc_RNA (1)...(19): siRNA sense strand
ggucuuguagcuucaauga

SEQ ID NO: 1627071 - RNA, 19 nt, Homo sapiens
  misc_RNA (1)...(19): siRNA sense strand
gaggugacccugugugaca

SEQ ID NO: 1627072 - RNA, 19 nt, Homo sapiens
  misc_RNA (1)...(19): siRNA sense strand
uguaugauguguguucuga

SEQ ID NO: 1627073 - RNA, 19 nt, Homo sapiens
  misc_RNA (1)...(19): siRNA sense strand
gccugcagcuucucauuuc

SEQ ID NO: 1627074 - RNA, 19 nt, Homo sapiens
  misc_RNA (1)...(19): siRNA sense strand
ccaaaugugucaccuucag

SEQ ID NO: 1627075 - RNA, 19 nt, Homo sapiens
  misc_RNA (1)...(19): siRNA sense strand
cuacaacgaggccaaaugu

SEQ ID NO: 1627076 - RNA, 19 nt, Homo sapiens
  misc_RNA (1)...(19): siRNA sense strand
gcacuuccaggccuccauu

SEQ ID NO: 1627077 - RNA, 19 nt, Homo sapiens
  misc_RNA (1)...(19): siRNA sense strand
caacagcacagagcacuuc

SEQ ID NO: 1627078 - RNA, 19 nt, Homo sapiens
  misc_RNA (1)...(19): siRNA sense strand
ccagcuguaugaugugugu

SEQ ID NO: 1627079 - RNA, 19 nt, Homo sapiens
  misc_RNA (1)...(19): siRNA sense strand
ggccugcagcuucucauuu

SEQ ID NO: 1627080 - RNA, 19 nt, Homo sapiens
  misc_RNA (1)...(19): siRNA sense strand
cuacggugcuggcagugau

SEQ ID NO: 1627081 - RNA, 19 nt, Homo sapiens
  misc_RNA (1)...(19): siRNA sense strand
acaacgaggccaaaugugu

SEQ ID NO: 1627082 - RNA, 19 nt, Homo sapiens
  misc_RNA (1)...(19): siRNA sense strand
ggguugaggagauaaacaa

SEQ ID NO: 1627083 - RNA, 19 nt, Homo sapiens
  misc_RNA (1)...(19): siRNA sense strand
gcauggcuaccaccucuuc

SEQ ID NO: 1627084 - RNA, 19 nt, Homo sapiens
  misc_RNA (1)...(19): siRNA sense strand
ucagccugcucuucaacuu

SEQ ID NO: 1627085 - RNA, 19 nt, Homo sapiens
  misc_RNA (1)...(19): siRNA sense strand
guucugacucugccaaugu

SEQ ID NO: 1627086 - RNA, 19 nt, Homo sapiens
  misc_RNA (1)...(19): siRNA sense strand
ggacuugccagagaacuac

SEQ ID NO: 1627087 - RNA, 19 nt, Homo sapiens
  misc_RNA (1)...(19): siRNA sense strand
uaugauguguguucugacu

SEQ ID NO: 1627088 - RNA, 19 nt, Homo sapiens
  misc_RNA (1)...(19): siRNA sense strand
gccagggcaacaccacaua

SEQ ID NO: 1627089 - RNA, 19 nt, Homo sapiens
  misc_RNA (1)...(19): siRNA sense strand
ccuguucccucuccauucu

SEQ ID NO: 1627090 - RNA, 19 nt, Homo sapiens
  misc_RNA (1)...(19): siRNA sense strand
gguauuuucugccuaagug

SEQ ID NO: 1627091 - RNA, 19 nt, Homo sapiens
  misc_RNA (1)...(19): siRNA sense strand
ugacucugccaauguguau

SEQ ID NO: 1627092 - RNA, 19 nt, Homo sapiens
  misc_RNA (1)...(19): siRNA sense strand
gcagugauugggccugaca

SEQ ID NO: 1627093 - RNA, 19 nt, Homo sapiens
  misc_RNA (1)...(19): siRNA sense strand
gacaggucuuguagcuuca

SEQ ID NO: 1627094 - RNA, 19 nt, Homo sapiens
  misc_RNA (1)...(19): siRNA sense strand
ugauguguguucugacucu

SEQ ID NO: 1627095 - RNA, 19 nt, Homo sapiens
  misc_RNA (1)...(19): siRNA sense strand
gccuuugccugccauagca

SEQ ID NO: 1627096 - RNA, 19 nt, Homo sapiens
  misc_RNA (1)...(19): siRNA sense strand
ucaaugagcauggcuacca

SEQ ID NO: 1627097 - RNA, 19 nt, Homo sapiens
  misc_RNA (1)...(19): siRNA sense strand
uugaggagauaaacaacuc

SEQ ID NO: 1627098 - RNA, 19 nt, Homo sapiens
  misc_RNA (1)...(19): siRNA sense strand
ugugacaggucuuguagcu

SEQ ID NO: 1627099 - RNA, 19 nt, Homo sapiens
  misc_RNA (1)...(19): siRNA sense strand
gguaaggacuugccagaga

SEQ ID NO: 1627100 - RNA, 19 nt, Homo sapiens
  misc_RNA (1)...(19): siRNA sense strand
guaaggacuugccagagaa

SEQ ID NO: 1627101 - RNA, 19 nt, Homo sapiens
  misc_RNA (1)...(19): siRNA sense strand
gguaccagcuguaugaugu

SEQ ID NO: 1627102 - RNA, 19 nt, Homo sapiens
  misc_RNA (1)...(19): siRNA sense strand
ccacauagagcuccaagga

SEQ ID NO: 1627103 - RNA, 19 nt, Homo sapiens
  misc_RNA (1)...(19): siRNA sense strand
gaacuacaacgaggccaaa

SEQ ID NO: 1627104 - RNA, 19 nt, Homo sapiens
  misc_RNA (1)...(19): siRNA sense strand
ggucuuguagcuucaauga

SEQ ID NO: 1627105 - RNA, 19 nt, Homo sapiens
  misc_RNA (1)...(19): siRNA sense strand
gaggugacccugugugaca

SEQ ID NO: 1627106 - RNA, 19 nt, Homo sapiens
  misc_RNA (1)...(19): siRNA sense strand
uguaugauguguguucuga

SEQ ID NO: 1627107 - RNA, 19 nt, Homo sapiens
  misc_RNA (1)...(19): siRNA sense strand
gccugcagcuucucauuuc

SEQ ID NO: 1627108 - RNA, 19 nt, Homo sapiens
  misc_RNA (1)...(19): siRNA sense strand
ccaaaugugucaccuucag

SEQ ID NO: 1627109 - RNA, 19 nt, Homo sapiens
  misc_RNA (1)...(19): siRNA sense strand
cuacaacgaggccaaaugu

SEQ ID NO: 1627110 - RNA, 19 nt, Homo sapiens
  misc_RNA (1)...(19): siRNA sense strand
ccagcuguaugaugugugu

SEQ ID NO: 1627111 - RNA, 19 nt, Homo sapiens
  misc_RNA (1)...(19): siRNA sense strand
ggccugcagcuucucauuu

SEQ ID NO: 1627112 - RNA, 19 nt, Homo sapiens
  misc_RNA (1)...(19): siRNA sense strand
cuacggugcuggcagugau

SEQ ID NO: 1627113 - RNA, 19 nt, Homo sapiens
  misc_RNA (1)...(19): siRNA sense strand
acaacgaggccaaaugugu

SEQ ID NO: 1627114 - RNA, 19 nt, Homo sapiens
  misc_RNA (1)...(19): siRNA sense strand
ggguugaggagauaaacaa

SEQ ID NO: 1627115 - RNA, 19 nt, Homo sapiens
  misc_RNA (1)...(19): siRNA sense strand
gcauggcuaccaccucuuc

SEQ ID NO: 1627116 - RNA, 19 nt, Homo sapiens
  misc_RNA (1)...(19): siRNA sense strand
ucagccugcucuucaacuu

SEQ ID NO: 1627117 - RNA, 19 nt, Homo sapiens
  misc_RNA (1)...(19): siRNA sense strand
guucugacucugccaaugu

SEQ ID NO: 1627118 - RNA, 19 nt, Homo sapiens
  misc_RNA (1)...(19): siRNA sense strand
ggacuugccagagaacuac

SEQ ID NO: 1627119 - RNA, 19 nt, Homo sapiens
  misc_RNA (1)...(19): siRNA sense strand
uaugauguguguucugacu

SEQ ID NO: 1627120 - RNA, 19 nt, Homo sapiens
  misc_RNA (1)...(19): siRNA sense strand
gccagggcaacaccacaua

SEQ ID NO: 1627121 - RNA, 19 nt, Homo sapiens
  misc_RNA (1)...(19): siRNA sense strand
ccuguucccucuccauucu

SEQ ID NO: 1627122 - RNA, 19 nt, Homo sapiens
  misc_RNA (1)...(19): siRNA sense strand
ugacucugccaauguguau

SEQ ID NO: 1627123 - RNA, 19 nt, Homo sapiens
  misc_RNA (1)...(19): siRNA sense strand
gcagugauugggccugaca

SEQ ID NO: 1627124 - RNA, 19 nt, Homo sapiens
  misc_RNA (1)...(19): siRNA sense strand
gacaggucuuguagcuuca

SEQ ID NO: 1627125 - RNA, 19 nt, Homo sapiens
  misc_RNA (1)...(19): siRNA sense strand
gccuuugccugccauagca

SEQ ID NO: 1627126 - RNA, 19 nt, Homo sapiens
  misc_RNA (1)...(19): siRNA sense strand
ugauguguguucugacucu

SEQ ID NO: 1627127 - RNA, 19 nt, Homo sapiens
  misc_RNA (1)...(19): siRNA sense strand
ucaaugagcauggcuacca

SEQ ID NO: 1627128 - RNA, 19 nt, Homo sapiens
  misc_RNA (1)...(19): siRNA sense strand
ugugacaggucuuguagcu

SEQ ID NO: 1627129 - RNA, 19 nt, Homo sapiens
  misc_RNA (1)...(19): siRNA sense strand
uugaggagauaaacaacuc

SEQ ID NO: 1627130 - RNA, 19 nt, Homo sapiens
  misc_RNA (1)...(19): siRNA sense strand
ggagaaccauggaaaucua

SEQ ID NO: 1627131 - RNA, 19 nt, Homo sapiens
  misc_RNA (1)...(19): siRNA sense strand
ggauuuggcuucauuaaca

SEQ ID NO: 1627132 - RNA, 19 nt, Homo sapiens
  misc_RNA (1)...(19): siRNA sense strand
gaaauuggauacacucaca

SEQ ID NO: 1627133 - RNA, 19 nt, Homo sapiens
  misc_RNA (1)...(19): siRNA sense strand
caguaaagcugaaugaaau

SEQ ID NO: 1627134 - RNA, 19 nt, Homo sapiens
  misc_RNA (1)...(19): siRNA sense strand
ugacgaagccuacaagauu

SEQ ID NO: 1627135 - RNA, 19 nt, Homo sapiens
  misc_RNA (1)...(19): siRNA sense strand
gcaaggcugugucagaaga

SEQ ID NO: 1627136 - RNA, 19 nt, Homo sapiens
  misc_RNA (1)...(19): siRNA sense strand
gaacugccguggguugaaa

SEQ ID NO: 1627137 - RNA, 19 nt, Homo sapiens
  misc_RNA (1)...(19): siRNA sense strand
ccauggaaaucuacucuaa

SEQ ID NO: 1627138 - RNA, 19 nt, Homo sapiens
  misc_RNA (1)...(19): siRNA sense strand
ggaacucaaugcuucaaau

SEQ ID NO: 1627139 - RNA, 19 nt, Homo sapiens
  misc_RNA (1)...(19): siRNA sense strand
caacaucuuucgagugugu

SEQ ID NO: 1627140 - RNA, 19 nt, Homo sapiens
  misc_RNA (1)...(19): siRNA sense strand
acucaaagaugccauguug

SEQ ID NO: 1627141 - RNA, 19 nt, Homo sapiens
  misc_RNA (1)...(19): siRNA sense strand
ucaccaggcugaugaaugu

SEQ ID NO: 1627142 - RNA, 19 nt, Homo sapiens
  misc_RNA (1)...(19): siRNA sense strand
ggcaacaucuuucgagugu

SEQ ID NO: 1627143 - RNA, 19 nt, Homo sapiens
  misc_RNA (1)...(19): siRNA sense strand
gaaugaaauugucgggaau

SEQ ID NO: 1627144 - RNA, 19 nt, Homo sapiens
  misc_RNA (1)...(19): siRNA sense strand
gaaauugucgggaaugaag

SEQ ID NO: 1627145 - RNA, 19 nt, Homo sapiens
  misc_RNA (1)...(19): siRNA sense strand
gaagauaucauuggcaaca

SEQ ID NO: 1627146 - RNA, 19 nt, Homo sapiens
  misc_RNA (1)...(19): siRNA sense strand
gaacucaaugcuucaaaug

SEQ ID NO: 1627147 - RNA, 19 nt, Homo sapiens
  misc_RNA (1)...(19): siRNA sense strand
uggauacacucacaugaaa

SEQ ID NO: 1627148 - RNA, 19 nt, Homo sapiens
  misc_RNA (1)...(19): siRNA sense strand
gacgaagccuacaagauuc

SEQ ID NO: 1627149 - RNA, 19 nt, Homo sapiens
  misc_RNA (1)...(19): siRNA sense strand
ccaguaaagcugaaugaaa

SEQ ID NO: 1627150 - RNA, 19 nt, Homo sapiens
  misc_RNA (1)...(19): siRNA sense strand
ugaugaauguuaucgagaa

SEQ ID NO: 1627151 - RNA, 19 nt, Homo sapiens
  misc_RNA (1)...(19): siRNA sense strand
gcuucgcccuugcuuguaa

SEQ ID NO: 1627152 - RNA, 19 nt, Homo sapiens
  misc_RNA (1)...(19): siRNA sense strand
ucaaagaugccauguugga

SEQ ID NO: 1627153 - RNA, 19 nt, Homo sapiens
  misc_RNA (1)...(19): siRNA sense strand
ugaauguuaucgagaagga

SEQ ID NO: 1627154 - RNA, 19 nt, Homo sapiens
  misc_RNA (1)...(19): siRNA sense strand
caaggaaauuggauacacu

SEQ ID NO: 1627155 - RNA, 19 nt, Homo sapiens
  misc_RNA (1)...(19): siRNA sense strand
uggcaaggcugugucagaa

SEQ ID NO: 1627156 - RNA, 19 nt, Homo sapiens
  misc_RNA (1)...(19): siRNA sense strand
ggcaagaccacaagcauuc

SEQ ID NO: 1627157 - RNA, 19 nt, Homo sapiens
  misc_RNA (1)...(19): siRNA sense strand
gaggagaaccauggaaauc

SEQ ID NO: 1627158 - RNA, 19 nt, Homo sapiens
  misc_RNA (1)...(19): siRNA sense strand
guaaagcugaaugaaauug

SEQ ID NO: 1627159 - RNA, 19 nt, Homo sapiens
  misc_RNA (1)...(19): siRNA sense strand
guguaaaacuuuccaaaug

SEQ ID NO: 1627160 - RNA, 19 nt, Homo sapiens
  misc_RNA (1)...(19): siRNA sense strand
gaaggaaaugugcccaaca

SEQ ID NO: 1627161 - RNA, 19 nt, Homo sapiens
  misc_RNA (1)...(19): siRNA sense strand
uaucauuggcaacaucuuu

SEQ ID NO: 1627162 - RNA, 19 nt, Homo sapiens
  misc_RNA (1)...(19): siRNA sense strand
gaugaauguuaucgagaag

SEQ ID NO: 1627163 - RNA, 19 nt, Homo sapiens
  misc_RNA (1)...(19): siRNA sense strand
guaaugcuucggauaagau

SEQ ID NO: 1627164 - RNA, 19 nt, Homo sapiens
  misc_RNA (1)...(19): siRNA sense strand
gaguuuaucaaggaaauug

SEQ ID NO: 1627165 - RNA, 19 nt, Homo sapiens
  misc_RNA (1)...(19): siRNA sense strand
ccaggcugaugaauguuau

SEQ ID NO: 1627166 - RNA, 19 nt, Homo sapiens
  misc_RNA (1)...(19): siRNA sense strand
caaagaugccauguuggaa

SEQ ID NO: 1627167 - RNA, 19 nt, Homo sapiens
  misc_RNA (1)...(19): siRNA sense strand
gcaguccuccgguacacaa

SEQ ID NO: 1627168 - RNA, 19 nt, Homo sapiens
  misc_RNA (1)...(19): siRNA sense strand
gaaaucuacucuaaaacca

SEQ ID NO: 1627169 - RNA, 19 nt, Homo sapiens
  misc_RNA (1)...(19): siRNA sense strand
gcuacucaccagaagauau

SEQ ID NO: 1627170 - RNA, 19 nt, Homo sapiens
  misc_RNA (1)...(19): siRNA sense strand
cuuguaaugcuucggauaa

SEQ ID NO: 1627171 - RNA, 19 nt, Homo sapiens
  misc_RNA (1)...(19): siRNA sense strand
cauggaaaucuacucuaaa

SEQ ID NO: 1627172 - RNA, 19 nt, Homo sapiens
  misc_RNA (1)...(19): siRNA sense strand
gggcuacucaccagaagau

SEQ ID NO: 1627173 - RNA, 19 nt, Homo sapiens
  misc_RNA (1)...(19): siRNA sense strand
uguaaugcuucggauaaga

SEQ ID NO: 1627174 - RNA, 19 nt, Homo sapiens
  misc_RNA (1)...(19): siRNA sense strand
gaugccauguuggaacuca

SEQ ID NO: 1627175 - RNA, 19 nt, Homo sapiens
  misc_RNA (1)...(19): siRNA sense strand
gagcaggcuagaggucuuu

SEQ ID NO: 1627176 - RNA, 19 nt, Homo sapiens
  misc_RNA (1)...(19): siRNA sense strand
gauccagcacugugugaau

SEQ ID NO: 1627177 - RNA, 19 nt, Homo sapiens
  misc_RNA (1)...(19): siRNA sense strand
ggcaggcgcugaacaaccu

SEQ ID NO: 1627178 - RNA, 19 nt, Homo sapiens
  misc_RNA (1)...(19): siRNA sense strand
aaagcugaaugaaauuguc

SEQ ID NO: 1627179 - RNA, 19 nt, Homo sapiens
  misc_RNA (1)...(19): siRNA sense strand
gcccuugcuuguaaugcuu

SEQ ID NO: 1627180 - RNA, 19 nt, Homo sapiens
  misc_RNA (1)...(19): siRNA sense strand
ucaaggaaauuggauacac

SEQ ID NO: 1627181 - RNA, 19 nt, Homo sapiens
  misc_RNA (1)...(19): siRNA sense strand
cucaggauuuggcuucauu

SEQ ID NO: 1627182 - RNA, 19 nt, Homo sapiens
  misc_RNA (1)...(19): siRNA sense strand
caggauuuggcuucauuaa

SEQ ID NO: 1627183 - RNA, 19 nt, Homo sapiens
  misc_RNA (1)...(19): siRNA sense strand
gggcccagcacucaaagau

SEQ ID NO: 1627184 - RNA, 19 nt, Homo sapiens
  misc_RNA (1)...(19): siRNA sense strand
ggccaguaaagcugaauga

SEQ ID NO: 1627185 - RNA, 19 nt, Homo sapiens
  misc_RNA (1)...(19): siRNA sense strand
cggcaagaccacaagcauu

SEQ ID NO: 1627186 - RNA, 19 nt, Homo sapiens
  misc_RNA (1)...(19): siRNA sense strand
ugaggcaggcgcugaacaa

SEQ ID NO: 1627187 - RNA, 19 nt, Homo sapiens
  misc_RNA (1)...(19): siRNA sense strand
gaaccggcaagaccacaag

SEQ ID NO: 1627188 - RNA, 19 nt, Homo sapiens
  misc_RNA (1)...(19): siRNA sense strand
gaucaucgagcccauucag

SEQ ID NO: 1627189 - RNA, 19 nt, Homo sapiens
  misc_RNA (1)...(19): siRNA sense strand
ugagcaggcuagaggucuu

SEQ ID NO: 1627190 - RNA, 19 nt, Homo sapiens
  misc_RNA (1)...(19): siRNA sense strand
uggaguuuaucaaggaaau

SEQ ID NO: 1627191 - RNA, 19 nt, Homo sapiens
  misc_RNA (1)...(19): siRNA sense strand
acucaaugcuucaaaugac

SEQ ID NO: 1627192 - RNA, 19 nt, Homo sapiens
  misc_RNA (1)...(19): siRNA sense strand
agauaucauuggcaacauc

SEQ ID NO: 1627193 - RNA, 19 nt, Homo sapiens
  misc_RNA (1)...(19): siRNA sense strand
cuacucaccagaagauauc

SEQ ID NO: 1627194 - RNA, 19 nt, Homo sapiens
  misc_RNA (1)...(19): siRNA sense strand
ggagaugauccagcacugu

SEQ ID NO: 1627195 - RNA, 19 nt, Homo sapiens
  misc_RNA (1)...(19): siRNA sense strand
gauuuggcuucauuaacag

SEQ ID NO: 1627196 - RNA, 19 nt, Homo sapiens
  misc_RNA (1)...(19): siRNA sense strand
ucaggauuuggcuucauua

SEQ ID NO: 1627197 - RNA, 19 nt, Homo sapiens
  misc_RNA (1)...(19): siRNA sense strand
gcuuguaaugcuucggaua

SEQ ID NO: 1627198 - RNA, 19 nt, Homo sapiens
  misc_RNA (1)...(19): siRNA sense strand
gugcccaacaucaucauug

SEQ ID NO: 1627199 - RNA, 19 nt, Homo sapiens
  misc_RNA (1)...(19): siRNA sense strand
cuuuccaaauggcagaaua

SEQ ID NO: 1627200 - RNA, 19 nt, Homo sapiens
  misc_RNA (1)...(19): siRNA sense strand
ugaggagaaccauggaaau

SEQ ID NO: 1627201 - RNA, 19 nt, Homo sapiens
  misc_RNA (1)...(19): siRNA sense strand
ggaaccggcaagaccacaa

SEQ ID NO: 1627202 - RNA, 19 nt, Homo sapiens
  misc_RNA (1)...(19): siRNA sense strand
ggaguuuaucaaggaaauu

SEQ ID NO: 1627203 - RNA, 19 nt, Homo sapiens
  misc_RNA (1)...(19): siRNA sense strand
ggagaaccauggaaaucua

SEQ ID NO: 1627204 - RNA, 19 nt, Homo sapiens
  misc_RNA (1)...(19): siRNA sense strand
ggauuuggcuucauuaaca

SEQ ID NO: 1627205 - RNA, 19 nt, Homo sapiens
  misc_RNA (1)...(19): siRNA sense strand
gaaauuggauacacucaca

SEQ ID NO: 1627206 - RNA, 19 nt, Homo sapiens
  misc_RNA (1)...(19): siRNA sense strand
caguaaagcugaaugaaau

SEQ ID NO: 1627207 - RNA, 19 nt, Homo sapiens
  misc_RNA (1)...(19): siRNA sense strand
ugacgaagccuacaagauu

SEQ ID NO: 1627208 - RNA, 19 nt, Homo sapiens
  misc_RNA (1)...(19): siRNA sense strand
gcaaggcugugucagaaga

SEQ ID NO: 1627209 - RNA, 19 nt, Homo sapiens
  misc_RNA (1)...(19): siRNA sense strand
gaacugccguggguugaaa

SEQ ID NO: 1627210 - RNA, 19 nt, Homo sapiens
  misc_RNA (1)...(19): siRNA sense strand
ccauggaaaucuacucuaa

SEQ ID NO: 1627211 - RNA, 19 nt, Homo sapiens
  misc_RNA (1)...(19): siRNA sense strand
caacaucuuucgagugugu

SEQ ID NO: 1627212 - RNA, 19 nt, Homo sapiens
  misc_RNA (1)...(19): siRNA sense strand
acucaaagaugccauguug

SEQ ID NO: 1627213 - RNA, 19 nt, Homo sapiens
  misc_RNA (1)...(19): siRNA sense strand
ucaccaggcugaugaaugu

SEQ ID NO: 1627214 - RNA, 19 nt, Homo sapiens
  misc_RNA (1)...(19): siRNA sense strand
ggcaacaucuuucgagugu

SEQ ID NO: 1627215 - RNA, 19 nt, Homo sapiens
  misc_RNA (1)...(19): siRNA sense strand
gaaugaaauugucgggaau

SEQ ID NO: 1627216 - RNA, 19 nt, Homo sapiens
  misc_RNA (1)...(19): siRNA sense strand
gaaauugucgggaaugaag

SEQ ID NO: 1627217 - RNA, 19 nt, Homo sapiens
  misc_RNA (1)...(19): siRNA sense strand
gaagauaucauuggcaaca

SEQ ID NO: 1627218 - RNA, 19 nt, Homo sapiens
  misc_RNA (1)...(19): siRNA sense strand
uggauacacucacaugaaa

SEQ ID NO: 1627219 - RNA, 19 nt, Homo sapiens
  misc_RNA (1)...(19): siRNA sense strand
ccaguaaagcugaaugaaa

SEQ ID NO: 1627220 - RNA, 19 nt, Homo sapiens
  misc_RNA (1)...(19): siRNA sense strand
gacgaagccuacaagauuc

SEQ ID NO: 1627221 - RNA, 19 nt, Homo sapiens
  misc_RNA (1)...(19): siRNA sense strand
ugaugaauguuaucgagaa

SEQ ID NO: 1627222 - RNA, 19 nt, Homo sapiens
  misc_RNA (1)...(19): siRNA sense strand
gcuucgcccuugcuuguaa

SEQ ID NO: 1627223 - RNA, 19 nt, Homo sapiens
  misc_RNA (1)...(19): siRNA sense strand
ucaaagaugccauguugga

SEQ ID NO: 1627224 - RNA, 19 nt, Homo sapiens
  misc_RNA (1)...(19): siRNA sense strand
ugaauguuaucgagaagga

SEQ ID NO: 1627225 - RNA, 19 nt, Homo sapiens
  misc_RNA (1)...(19): siRNA sense strand
caaggaaauuggauacacu

SEQ ID NO: 1627226 - RNA, 19 nt, Homo sapiens
  misc_RNA (1)...(19): siRNA sense strand
uggcaaggcugugucagaa

SEQ ID NO: 1627227 - RNA, 19 nt, Homo sapiens
  misc_RNA (1)...(19): siRNA sense strand
ggcaagaccacaagcauuc

SEQ ID NO: 1627228 - RNA, 19 nt, Homo sapiens
  misc_RNA (1)...(19): siRNA sense strand
gaggagaaccauggaaauc

SEQ ID NO: 1627229 - RNA, 19 nt, Homo sapiens
  misc_RNA (1)...(19): siRNA sense strand
guguaaaacuuuccaaaug

SEQ ID NO: 1627230 - RNA, 19 nt, Homo sapiens
  misc_RNA (1)...(19): siRNA sense strand
guaaagcugaaugaaauug

SEQ ID NO: 1627231 - RNA, 19 nt, Homo sapiens
  misc_RNA (1)...(19): siRNA sense strand
gaaggaaaugugcccaaca

SEQ ID NO: 1627232 - RNA, 19 nt, Homo sapiens
  misc_RNA (1)...(19): siRNA sense strand
uaucauuggcaacaucuuu

SEQ ID NO: 1627233 - RNA, 19 nt, Homo sapiens
  misc_RNA (1)...(19): siRNA sense strand
gaugaauguuaucgagaag

SEQ ID NO: 1627234 - RNA, 19 nt, Homo sapiens
  misc_RNA (1)...(19): siRNA sense strand
guaaugcuucggauaagau

SEQ ID NO: 1627235 - RNA, 19 nt, Homo sapiens
  misc_RNA (1)...(19): siRNA sense strand
gaguuuaucaaggaaauug

SEQ ID NO: 1627236 - RNA, 19 nt, Homo sapiens
  misc_RNA (1)...(19): siRNA sense strand
ccaggcugaugaauguuau

SEQ ID NO: 1627237 - RNA, 19 nt, Homo sapiens
  misc_RNA (1)...(19): siRNA sense strand
gcaguccuccgguacacaa

SEQ ID NO: 1627238 - RNA, 19 nt, Homo sapiens
  misc_RNA (1)...(19): siRNA sense strand
gaaaucuacucuaaaacca

SEQ ID NO: 1627239 - RNA, 19 nt, Homo sapiens
  misc_RNA (1)...(19): siRNA sense strand
gcuacucaccagaagauau

SEQ ID NO: 1627240 - RNA, 19 nt, Homo sapiens
  misc_RNA (1)...(19): siRNA sense strand
cuuguaaugcuucggauaa

SEQ ID NO: 1627241 - RNA, 19 nt, Homo sapiens
  misc_RNA (1)...(19): siRNA sense strand
cauggaaaucuacucuaaa

SEQ ID NO: 1627242 - RNA, 19 nt, Homo sapiens
  misc_RNA (1)...(19): siRNA sense strand
gggcuacucaccagaagau

SEQ ID NO: 1627243 - RNA, 19 nt, Homo sapiens
  misc_RNA (1)...(19): siRNA sense strand
uguaaugcuucggauaaga

SEQ ID NO: 1627244 - RNA, 19 nt, Homo sapiens
  misc_RNA (1)...(19): siRNA sense strand
aaagcugaaugaaauuguc

SEQ ID NO: 1627245 - RNA, 19 nt, Homo sapiens
  misc_RNA (1)...(19): siRNA sense strand
gagcaggcuagaggucuuu

SEQ ID NO: 1627246 - RNA, 19 nt, Homo sapiens
  misc_RNA (1)...(19): siRNA sense strand
gauccagcacugugugaau

SEQ ID NO: 1627247 - RNA, 19 nt, Homo sapiens
  misc_RNA (1)...(19): siRNA sense strand
ggcaggcgcugaacaaccu

SEQ ID NO: 1627248 - RNA, 19 nt, Homo sapiens
  misc_RNA (1)...(19): siRNA sense strand
gcccuugcuuguaaugcuu

SEQ ID NO: 1627249 - RNA, 19 nt, Homo sapiens
  misc_RNA (1)...(19): siRNA sense strand
ucaaggaaauuggauacac

SEQ ID NO: 1627250 - RNA, 19 nt, Homo sapiens
  misc_RNA (1)...(19): siRNA sense strand
cucaggauuuggcuucauu

SEQ ID NO: 1627251 - RNA, 19 nt, Homo sapiens
  misc_RNA (1)...(19): siRNA sense strand
caggauuuggcuucauuaa

SEQ ID NO: 1627252 - RNA, 19 nt, Homo sapiens
  misc_RNA (1)...(19): siRNA sense strand
gggcccagcacucaaagau

SEQ ID NO: 1627253 - RNA, 19 nt, Homo sapiens
  misc_RNA (1)...(19): siRNA sense strand
ugaggcaggcgcugaacaa

SEQ ID NO: 1627254 - RNA, 19 nt, Homo sapiens
  misc_RNA (1)...(19): siRNA sense strand
ggccaguaaagcugaauga

SEQ ID NO: 1627255 - RNA, 19 nt, Homo sapiens
  misc_RNA (1)...(19): siRNA sense strand
cggcaagaccacaagcauu

SEQ ID NO: 1627256 - RNA, 19 nt, Homo sapiens
  misc_RNA (1)...(19): siRNA sense strand
gaaccggcaagaccacaag

SEQ ID NO: 1627257 - RNA, 19 nt, Homo sapiens
  misc_RNA (1)...(19): siRNA sense strand
ugagcaggcuagaggucuu

SEQ ID NO: 1627258 - RNA, 19 nt, Homo sapiens
  misc_RNA (1)...(19): siRNA sense strand
uggaguuuaucaaggaaau

SEQ ID NO: 1627259 - RNA, 19 nt, Homo sapiens
  misc_RNA (1)...(19): siRNA sense strand
gaucaucgagcccauucag

SEQ ID NO: 1627260 - RNA, 19 nt, Homo sapiens
  misc_RNA (1)...(19): siRNA sense strand
gcuuguaaugcuucggaua

SEQ ID NO: 1627261 - RNA, 19 nt, Homo sapiens
  misc_RNA (1)...(19): siRNA sense strand
agauaucauuggcaacauc

SEQ ID NO: 1627262 - RNA, 19 nt, Homo sapiens
  misc_RNA (1)...(19): siRNA sense strand
cuacucaccagaagauauc

SEQ ID NO: 1627263 - RNA, 19 nt, Homo sapiens
  misc_RNA (1)...(19): siRNA sense strand
ggagaugauccagcacugu

SEQ ID NO: 1627264 - RNA, 19 nt, Homo sapiens
  misc_RNA (1)...(19): siRNA sense strand
gauuuggcuucauuaacag

SEQ ID NO: 1627265 - RNA, 19 nt, Homo sapiens
  misc_RNA (1)...(19): siRNA sense strand
ucaggauuuggcuucauua

SEQ ID NO: 1627266 - RNA, 19 nt, Homo sapiens
  misc_RNA (1)...(19): siRNA sense strand
gugcccaacaucaucauug

SEQ ID NO: 1627267 - RNA, 19 nt, Homo sapiens
  misc_RNA (1)...(19): siRNA sense strand
cuuuccaaauggcagaaua

SEQ ID NO: 1627268 - RNA, 19 nt, Homo sapiens
  misc_RNA (1)...(19): siRNA sense strand
ugaggagaaccauggaaau

SEQ ID NO: 1627269 - RNA, 19 nt, Homo sapiens
  misc_RNA (1)...(19): siRNA sense strand
ggaaccggcaagaccacaa

SEQ ID NO: 1627270 - RNA, 19 nt, Homo sapiens
  misc_RNA (1)...(19): siRNA sense strand
ggaguuuaucaaggaaauu

SEQ ID NO: 1627271 - RNA, 19 nt, Homo sapiens
  misc_RNA (1)...(19): siRNA sense strand
gcauauggcuguccuauaa

SEQ ID NO: 1627272 - RNA, 19 nt, Homo sapiens
  misc_RNA (1)...(19): siRNA sense strand
uauaagaucucguguguaa

SEQ ID NO: 1627273 - RNA, 19 nt, Homo sapiens
  misc_RNA (1)...(19): siRNA sense strand
ccuauaagaucucgugugu

SEQ ID NO: 1627274 - RNA, 19 nt, Homo sapiens
  misc_RNA (1)...(19): siRNA sense strand
gauaaugauccucgccuuu

SEQ ID NO: 1627275 - RNA, 19 nt, Homo sapiens
  misc_RNA (1)...(19): siRNA sense strand
ggucaccauuugcgacuug

SEQ ID NO: 1627276 - RNA, 19 nt, Homo sapiens
  misc_RNA (1)...(19): siRNA sense strand
gcugauugccuucaucugu

SEQ ID NO: 1627277 - RNA, 19 nt, Homo sapiens
  misc_RNA (1)...(19): siRNA sense strand
uaaugauccucgccuuuua

SEQ ID NO: 1627278 - RNA, 19 nt, Homo sapiens
  misc_RNA (1)...(19): siRNA sense strand
guaacccaguccacagaug

SEQ ID NO: 1627279 - RNA, 19 nt, Homo sapiens
  misc_RNA (1)...(19): siRNA sense strand
ggagcucccuguggaccaa

SEQ ID NO: 1627280 - RNA, 19 nt, Homo sapiens
  misc_RNA (1)...(19): siRNA sense strand
gccuacagcuacuuugaag

SEQ ID NO: 1627281 - RNA, 19 nt, Homo sapiens
  misc_RNA (1)...(19): siRNA sense strand
caccauuugcgacuugaua

SEQ ID NO: 1627282 - RNA, 19 nt, Homo sapiens
  misc_RNA (1)...(19): siRNA sense strand
gcgccuacagcuacuuuga

SEQ ID NO: 1627283 - RNA, 19 nt, Homo sapiens
  misc_RNA (1)...(19): siRNA sense strand
auauggcuguccuauaaga

SEQ ID NO: 1627284 - RNA, 19 nt, Homo sapiens
  misc_RNA (1)...(19): siRNA sense strand
gcugaaaguggcgcaaaug

SEQ ID NO: 1627285 - RNA, 19 nt, Homo sapiens
  misc_RNA (1)...(19): siRNA sense strand
ugauugccuucaucugugu

SEQ ID NO: 1627286 - RNA, 19 nt, Homo sapiens
  misc_RNA (1)...(19): siRNA sense strand
auuugcgacuugauaauga

SEQ ID NO: 1627287 - RNA, 19 nt, Homo sapiens
  misc_RNA (1)...(19): siRNA sense strand
gcauauggcuguccuauaa

SEQ ID NO: 1627288 - RNA, 19 nt, Homo sapiens
  misc_RNA (1)...(19): siRNA sense strand
uauaagaucucguguguaa

SEQ ID NO: 1627289 - RNA, 19 nt, Homo sapiens
  misc_RNA (1)...(19): siRNA sense strand
ccuauaagaucucgugugu

SEQ ID NO: 1627290 - RNA, 19 nt, Homo sapiens
  misc_RNA (1)...(19): siRNA sense strand
gauaaugauccucgccuuu

SEQ ID NO: 1627291 - RNA, 19 nt, Homo sapiens
  misc_RNA (1)...(19): siRNA sense strand
ggucaccauuugcgacuug

SEQ ID NO: 1627292 - RNA, 19 nt, Homo sapiens
  misc_RNA (1)...(19): siRNA sense strand
gcugauugccuucaucugu

SEQ ID NO: 1627293 - RNA, 19 nt, Homo sapiens
  misc_RNA (1)...(19): siRNA sense strand
uaaugauccucgccuuuua

SEQ ID NO: 1627294 - RNA, 19 nt, Homo sapiens
  misc_RNA (1)...(19): siRNA sense strand
guaacccaguccacagaug

SEQ ID NO: 1627295 - RNA, 19 nt, Homo sapiens
  misc_RNA (1)...(19): siRNA sense strand
ggagcucccuguggaccaa

SEQ ID NO: 1627296 - RNA, 19 nt, Homo sapiens
  misc_RNA (1)...(19): siRNA sense strand
gccuacagcuacuuugaag

SEQ ID NO: 1627297 - RNA, 19 nt, Homo sapiens
  misc_RNA (1)...(19): siRNA sense strand
caccauuugcgacuugaua

SEQ ID NO: 1627298 - RNA, 19 nt, Homo sapiens
  misc_RNA (1)...(19): siRNA sense strand
gcgccuacagcuacuuuga

SEQ ID NO: 1627299 - RNA, 19 nt, Homo sapiens
  misc_RNA (1)...(19): siRNA sense strand
auauggcuguccuauaaga

SEQ ID NO: 1627300 - RNA, 19 nt, Homo sapiens
  misc_RNA (1)...(19): siRNA sense strand
gcugaaaguggcgcaaaug

SEQ ID NO: 1627301 - RNA, 19 nt, Homo sapiens
  misc_RNA (1)...(19): siRNA sense strand
ugauugccuucaucugugu

SEQ ID NO: 1627302 - RNA, 19 nt, Homo sapiens
  misc_RNA (1)...(19): siRNA sense strand
auuugcgacuugauaauga

SEQ ID NO: 1627303 - RNA, 19 nt, Homo sapiens
  misc_RNA (1)...(19): siRNA sense strand
gcauauggcuguccuauaa

SEQ ID NO: 1627304 - RNA, 19 nt, Homo sapiens
  misc_RNA (1)...(19): siRNA sense strand
uauaagaucucguguguaa

SEQ ID NO: 1627305 - RNA, 19 nt, Homo sapiens
  misc_RNA (1)...(19): siRNA sense strand
ccuauaagaucucgugugu

SEQ ID NO: 1627306 - RNA, 19 nt, Homo sapiens
  misc_RNA (1)...(19): siRNA sense strand
gauaaugauccucgccuuu

SEQ ID NO: 1627307 - RNA, 19 nt, Homo sapiens
  misc_RNA (1)...(19): siRNA sense strand
ggucaccauuugcgacuug

SEQ ID NO: 1627308 - RNA, 19 nt, Homo sapiens
  misc_RNA (1)...(19): siRNA sense strand
gcugauugccuucaucugu

SEQ ID NO: 1627309 - RNA, 19 nt, Homo sapiens
  misc_RNA (1)...(19): siRNA sense strand
uaaugauccucgccuuuua

SEQ ID NO: 1627310 - RNA, 19 nt, Homo sapiens
  misc_RNA (1)...(19): siRNA sense strand
guaacccaguccacagaug

SEQ ID NO: 1627311 - RNA, 19 nt, Homo sapiens
  misc_RNA (1)...(19): siRNA sense strand
ggagcucccuguggaccaa

SEQ ID NO: 1627312 - RNA, 19 nt, Homo sapiens
  misc_RNA (1)...(19): siRNA sense strand
gccuacagcuacuuugaag

SEQ ID NO: 1627313 - RNA, 19 nt, Homo sapiens
  misc_RNA (1)...(19): siRNA sense strand
caccauuugcgacuugaua

SEQ ID NO: 1627314 - RNA, 19 nt, Homo sapiens
  misc_RNA (1)...(19): siRNA sense strand
gcgccuacagcuacuuuga

SEQ ID NO: 1627315 - RNA, 19 nt, Homo sapiens
  misc_RNA (1)...(19): siRNA sense strand
auauggcuguccuauaaga

SEQ ID NO: 1627316 - RNA, 19 nt, Homo sapiens
  misc_RNA (1)...(19): siRNA sense strand
gcugaaaguggcgcaaaug

SEQ ID NO: 1627317 - RNA, 19 nt, Homo sapiens
  misc_RNA (1)...(19): siRNA sense strand
ugauugccuucaucugugu

SEQ ID NO: 1627318 - RNA, 19 nt, Homo sapiens
  misc_RNA (1)...(19): siRNA sense strand
auuugcgacuugauaauga

SEQ ID NO: 1627319 - RNA, 19 nt, Homo sapiens
  misc_RNA (1)...(19): siRNA sense strand
gcauauggcuguccuauaa

SEQ ID NO: 1627320 - RNA, 19 nt, Homo sapiens
  misc_RNA (1)...(19): siRNA sense strand
uauaagaucucguguguaa

SEQ ID NO: 1627321 - RNA, 19 nt, Homo sapiens
  misc_RNA (1)...(19): siRNA sense strand
ccuauaagaucucgugugu

SEQ ID NO: 1627322 - RNA, 19 nt, Homo sapiens
  misc_RNA (1)...(19): siRNA sense strand
gauaaugauccucgccuuu

SEQ ID NO: 1627323 - RNA, 19 nt, Homo sapiens
  misc_RNA (1)...(19): siRNA sense strand
ggucaccauuugcgacuug

SEQ ID NO: 1627324 - RNA, 19 nt, Homo sapiens
  misc_RNA (1)...(19): siRNA sense strand
gcugauugccuucaucugu

SEQ ID NO: 1627325 - RNA, 19 nt, Homo sapiens
  misc_RNA (1)...(19): siRNA sense strand
uaaugauccucgccuuuua

SEQ ID NO: 1627326 - RNA, 19 nt, Homo sapiens
  misc_RNA (1)...(19): siRNA sense strand
guaacccaguccacagaug

SEQ ID NO: 1627327 - RNA, 19 nt, Homo sapiens
  misc_RNA (1)...(19): siRNA sense strand
ggagcucccuguggaccaa

SEQ ID NO: 1627328 - RNA, 19 nt, Homo sapiens
  misc_RNA (1)...(19): siRNA sense strand
gccuacagcuacuuugaag

SEQ ID NO: 1627329 - RNA, 19 nt, Homo sapiens
  misc_RNA (1)...(19): siRNA sense strand
caccauuugcgacuugaua

SEQ ID NO: 1627330 - RNA, 19 nt, Homo sapiens
  misc_RNA (1)...(19): siRNA sense strand
gcgccuacagcuacuuuga

SEQ ID NO: 1627331 - RNA, 19 nt, Homo sapiens
  misc_RNA (1)...(19): siRNA sense strand
auauggcuguccuauaaga

SEQ ID NO: 1627332 - RNA, 19 nt, Homo sapiens
  misc_RNA (1)...(19): siRNA sense strand
gcugaaaguggcgcaaaug

SEQ ID NO: 1627333 - RNA, 19 nt, Homo sapiens
  misc_RNA (1)...(19): siRNA sense strand
ugauugccuucaucugugu

SEQ ID NO: 1627334 - RNA, 19 nt, Homo sapiens
  misc_RNA (1)...(19): siRNA sense strand
auuugcgacuugauaauga

SEQ ID NO: 1627335 - RNA, 19 nt, Homo sapiens
  misc_RNA (1)...(19): siRNA sense strand
gaagaagacugaagaauuu

SEQ ID NO: 1627336 - RNA, 19 nt, Homo sapiens
  misc_RNA (1)...(19): siRNA sense strand
gacaugagcuaucaaauuu

SEQ ID NO: 1627337 - RNA, 19 nt, Homo sapiens
  misc_RNA (1)...(19): siRNA sense strand
gaaauugccuuacaggaaa

SEQ ID NO: 1627338 - RNA, 19 nt, Homo sapiens
  misc_RNA (1)...(19): siRNA sense strand
gaagaaagagcaacaguaa

SEQ ID NO: 1627339 - RNA, 19 nt, Homo sapiens
  misc_RNA (1)...(19): siRNA sense strand
gaacacagaucaagaaugc

SEQ ID NO: 1627340 - RNA, 19 nt, Homo sapiens
  misc_RNA (1)...(19): siRNA sense strand
gaaaugaaaccauauguug

SEQ ID NO: 1627341 - RNA, 19 nt, Homo sapiens
  misc_RNA (1)...(19): siRNA sense strand
gaaagugauucaugagaaa

SEQ ID NO: 1627342 - RNA, 19 nt, Homo sapiens
  misc_RNA (1)...(19): siRNA sense strand
gcaauuccauauagaguaa

SEQ ID NO: 1627343 - RNA, 19 nt, Homo sapiens
  misc_RNA (1)...(19): siRNA sense strand
gagagaguaucaccuagua

SEQ ID NO: 1627344 - RNA, 19 nt, Homo sapiens
  misc_RNA (1)...(19): siRNA sense strand
caacauacauucuccuuca

SEQ ID NO: 1627345 - RNA, 19 nt, Homo sapiens
  misc_RNA (1)...(19): siRNA sense strand
ccacaacuauucauuagaa

SEQ ID NO: 1627346 - RNA, 19 nt, Homo sapiens
  misc_RNA (1)...(19): siRNA sense strand
ccaaaucucugaccauaga

SEQ ID NO: 1627347 - RNA, 19 nt, Homo sapiens
  misc_RNA (1)...(19): siRNA sense strand
gaaagaagccaaucaccuu

SEQ ID NO: 1627348 - RNA, 19 nt, Homo sapiens
  misc_RNA (1)...(19): siRNA sense strand
gaaaccauauguugcuuug

SEQ ID NO: 1627349 - RNA, 19 nt, Homo sapiens
  misc_RNA (1)...(19): siRNA sense strand
ggaugaagcucuagaacau

SEQ ID NO: 1627350 - RNA, 19 nt, Homo sapiens
  misc_RNA (1)...(19): siRNA sense strand
gaauucugguucuacuuua

SEQ ID NO: 1627351 - RNA, 19 nt, Homo sapiens
  misc_RNA (1)...(19): siRNA sense strand
ccacuaaacuaaaggagaa

SEQ ID NO: 1627352 - RNA, 19 nt, Homo sapiens
  misc_RNA (1)...(19): siRNA sense strand
ccaaguaggugcagcagaa

SEQ ID NO: 1627353 - RNA, 19 nt, Homo sapiens
  misc_RNA (1)...(19): siRNA sense strand
gaaugaagaugagaaggaa

SEQ ID NO: 1627354 - RNA, 19 nt, Homo sapiens
  misc_RNA (1)...(19): siRNA sense strand
ggaccacaacuauucauua

SEQ ID NO: 1627355 - RNA, 19 nt, Homo sapiens
  misc_RNA (1)...(19): siRNA sense strand
ccauagagaucuuugagaa

SEQ ID NO: 1627356 - RNA, 19 nt, Homo sapiens
  misc_RNA (1)...(19): siRNA sense strand
agaccuggauuccuuaaua

SEQ ID NO: 1627357 - RNA, 19 nt, Homo sapiens
  misc_RNA (1)...(19): siRNA sense strand
ugaaagucaugcuaaagua

SEQ ID NO: 1627358 - RNA, 19 nt, Homo sapiens
  misc_RNA (1)...(19): siRNA sense strand
gggagacccuuauguuuga

SEQ ID NO: 1627359 - RNA, 19 nt, Homo sapiens
  misc_RNA (1)...(19): siRNA sense strand
caacgaggaucuccacaug

SEQ ID NO: 1627360 - RNA, 19 nt, Homo sapiens
  misc_RNA (1)...(19): siRNA sense strand
ccagaagucuaaagagaaa

SEQ ID NO: 1627361 - RNA, 19 nt, Homo sapiens
  misc_RNA (1)...(19): siRNA sense strand
ggacauacugggcuugaua

SEQ ID NO: 1627362 - RNA, 19 nt, Homo sapiens
  misc_RNA (1)...(19): siRNA sense strand
gaacuggcuuuucaacuua

SEQ ID NO: 1627363 - RNA, 19 nt, Homo sapiens
  misc_RNA (1)...(19): siRNA sense strand
gaaaugcugcucagugaaa

SEQ ID NO: 1627364 - RNA, 19 nt, Homo sapiens
  misc_RNA (1)...(19): siRNA sense strand
gaaauauccuuaucuacag

SEQ ID NO: 1627365 - RNA, 19 nt, Homo sapiens
  misc_RNA (1)...(19): siRNA sense strand
ggccaaaucucugaccaua

SEQ ID NO: 1627366 - RNA, 19 nt, Homo sapiens
  misc_RNA (1)...(19): siRNA sense strand
gaacauuugaugagaguuu

SEQ ID NO: 1627367 - RNA, 19 nt, Homo sapiens
  misc_RNA (1)...(19): siRNA sense strand
caucugaaaugcuaccuuu

SEQ ID NO: 1627368 - RNA, 19 nt, Homo sapiens
  misc_RNA (1)...(19): siRNA sense strand
gaaugugauuucaaaguug

SEQ ID NO: 1627369 - RNA, 19 nt, Homo sapiens
  misc_RNA (1)...(19): siRNA sense strand
cgaaagugauucaugagaa

SEQ ID NO: 1627370 - RNA, 19 nt, Homo sapiens
  misc_RNA (1)...(19): siRNA sense strand
ggaagaaagagcaacagua

SEQ ID NO: 1627371 - RNA, 19 nt, Homo sapiens
  misc_RNA (1)...(19): siRNA sense strand
uaagauauuuccagccauu

SEQ ID NO: 1627372 - RNA, 19 nt, Homo sapiens
  misc_RNA (1)...(19): siRNA sense strand
gagaaauaaugucagaaga

SEQ ID NO: 1627373 - RNA, 19 nt, Homo sapiens
  misc_RNA (1)...(19): siRNA sense strand
caaaccagcugucauuaag

SEQ ID NO: 1627374 - RNA, 19 nt, Homo sapiens
  misc_RNA (1)...(19): siRNA sense strand
gaaagucaugcuaaaguaa

SEQ ID NO: 1627375 - RNA, 19 nt, Homo sapiens
  misc_RNA (1)...(19): siRNA sense strand
aacaagugcuuaucaagua

SEQ ID NO: 1627376 - RNA, 19 nt, Homo sapiens
  misc_RNA (1)...(19): siRNA sense strand
gaucacaaauugggccuuu

SEQ ID NO: 1627377 - RNA, 19 nt, Homo sapiens
  misc_RNA (1)...(19): siRNA sense strand
ccaaguggagucauucuua

SEQ ID NO: 1627378 - RNA, 19 nt, Homo sapiens
  misc_RNA (1)...(19): siRNA sense strand
gaacaagugcuuaucaagu

SEQ ID NO: 1627379 - RNA, 19 nt, Homo sapiens
  misc_RNA (1)...(19): siRNA sense strand
cagguucucugaaauuaaa

SEQ ID NO: 1627380 - RNA, 19 nt, Homo sapiens
  misc_RNA (1)...(19): siRNA sense strand
gaaauggaaagaaucugua

SEQ ID NO: 1627381 - RNA, 19 nt, Homo sapiens
  misc_RNA (1)...(19): siRNA sense strand
ggaaaugaaggaaauucua

SEQ ID NO: 1627382 - RNA, 19 nt, Homo sapiens
  misc_RNA (1)...(19): siRNA sense strand
ggauuuaagccgaaaguuu

SEQ ID NO: 1627383 - RNA, 19 nt, Homo sapiens
  misc_RNA (1)...(19): siRNA sense strand
gguggaaguuuaaaccaaa

SEQ ID NO: 1627384 - RNA, 19 nt, Homo sapiens
  misc_RNA (1)...(19): siRNA sense strand
ggccagaagucuaaagaga

SEQ ID NO: 1627385 - RNA, 19 nt, Homo sapiens
  misc_RNA (1)...(19): siRNA sense strand
gaacacacagugcaauuuc

SEQ ID NO: 1627386 - RNA, 19 nt, Homo sapiens
  misc_RNA (1)...(19): siRNA sense strand
gaccacaacuauucauuag

SEQ ID NO: 1627387 - RNA, 19 nt, Homo sapiens
  misc_RNA (1)...(19): siRNA sense strand
ucagugaaaugaccuguga

SEQ ID NO: 1627388 - RNA, 19 nt, Homo sapiens
  misc_RNA (1)...(19): siRNA sense strand
gaagaagauaucuccuaua

SEQ ID NO: 1627389 - RNA, 19 nt, Homo sapiens
  misc_RNA (1)...(19): siRNA sense strand
cagaagaaauugccuuaca

SEQ ID NO: 1627390 - RNA, 19 nt, Homo sapiens
  misc_RNA (1)...(19): siRNA sense strand
ggaaagaaucuguaaugga

SEQ ID NO: 1627391 - RNA, 19 nt, Homo sapiens
  misc_RNA (1)...(19): siRNA sense strand
caugagaaauggaaagaau

SEQ ID NO: 1627392 - RNA, 19 nt, Homo sapiens
  misc_RNA (1)...(19): siRNA sense strand
caagaagcaauuccauaua

SEQ ID NO: 1627393 - RNA, 19 nt, Homo sapiens
  misc_RNA (1)...(19): siRNA sense strand
gaaauuggaacaaaugaca

SEQ ID NO: 1627394 - RNA, 19 nt, Homo sapiens
  misc_RNA (1)...(19): siRNA sense strand
gccaaagacugguuuaagu

SEQ ID NO: 1627395 - RNA, 19 nt, Homo sapiens
  misc_RNA (1)...(19): siRNA sense strand
ggaaggaugugaguuacug

SEQ ID NO: 1627396 - RNA, 19 nt, Homo sapiens
  misc_RNA (1)...(19): siRNA sense strand
uaugagaggugcaauaaag

SEQ ID NO: 1627397 - RNA, 19 nt, Homo sapiens
  misc_RNA (1)...(19): siRNA sense strand
ugcuauggauugucuauua

SEQ ID NO: 1627398 - RNA, 19 nt, Homo sapiens
  misc_RNA (1)...(19): siRNA sense strand
gcauguggaugaagcucua

SEQ ID NO: 1627399 - RNA, 19 nt, Homo sapiens
  misc_RNA (1)...(19): siRNA sense strand
ucagagaaauaaugucaga

SEQ ID NO: 1627400 - RNA, 19 nt, Homo sapiens
  misc_RNA (1)...(19): siRNA sense strand
aagaggaacuuuagagaau

SEQ ID NO: 1627401 - RNA, 19 nt, Homo sapiens
  misc_RNA (1)...(19): siRNA sense strand
ccacaaacguuagcugaau

SEQ ID NO: 1627402 - RNA, 19 nt, Homo sapiens
  misc_RNA (1)...(19): siRNA sense strand
gccuucaucugauucuuua

SEQ ID NO: 1627403 - RNA, 19 nt, Homo sapiens
  misc_RNA (1)...(19): siRNA sense strand
ggaaaugaaaccauauguu

SEQ ID NO: 1627404 - RNA, 19 nt, Homo sapiens
  misc_RNA (1)...(19): siRNA sense strand
agaaucaucuucacaaagu

SEQ ID NO: 1627405 - RNA, 19 nt, Homo sapiens
  misc_RNA (1)...(19): siRNA sense strand
gaaccucaggcuuguuuaa

SEQ ID NO: 1627406 - RNA, 19 nt, Homo sapiens
  misc_RNA (1)...(19): siRNA sense strand
agaagaagacugaagaauu

SEQ ID NO: 1627407 - RNA, 19 nt, Homo sapiens
  misc_RNA (1)...(19): siRNA sense strand
gagcagaggcuuuccuuca

SEQ ID NO: 1627408 - RNA, 19 nt, Homo sapiens
  misc_RNA (1)...(19): siRNA sense strand
caagugaacugucuuucca

SEQ ID NO: 1627409 - RNA, 19 nt, Homo sapiens
  misc_RNA (1)...(19): siRNA sense strand
agaaggaaaugaaggaaau

SEQ ID NO: 1627410 - RNA, 19 nt, Homo sapiens
  misc_RNA (1)...(19): siRNA sense strand
gaaucuugauguaaccaaa

SEQ ID NO: 1627411 - RNA, 19 nt, Homo sapiens
  misc_RNA (1)...(19): siRNA sense strand
gacacaugguggaaguuua

SEQ ID NO: 1627412 - RNA, 19 nt, Homo sapiens
  misc_RNA (1)...(19): siRNA sense strand
agaagaagauaucuccuau

SEQ ID NO: 1627413 - RNA, 19 nt, Homo sapiens
  misc_RNA (1)...(19): siRNA sense strand
ggacuuugcaagaggauaa

SEQ ID NO: 1627414 - RNA, 19 nt, Homo sapiens
  misc_RNA (1)...(19): siRNA sense strand
acacaaacauccugaacug

SEQ ID NO: 1627415 - RNA, 19 nt, Homo sapiens
  misc_RNA (1)...(19): siRNA sense strand
caagugaguuuauaaaucc

SEQ ID NO: 1627416 - RNA, 19 nt, Homo sapiens
  misc_RNA (1)...(19): siRNA sense strand
caucaaaccagcugucauu

SEQ ID NO: 1627417 - RNA, 19 nt, Homo sapiens
  misc_RNA (1)...(19): siRNA sense strand
agaagaggauggagugcua

SEQ ID NO: 1627418 - RNA, 19 nt, Homo sapiens
  misc_RNA (1)...(19): siRNA sense strand
gaagaaacaccaagugaac

SEQ ID NO: 1627419 - RNA, 19 nt, Homo sapiens
  misc_RNA (1)...(19): siRNA sense strand
gaaaugcuaccuuuauugg

SEQ ID NO: 1627420 - RNA, 19 nt, Homo sapiens
  misc_RNA (1)...(19): siRNA sense strand
cugaaagacuuauaugaga

SEQ ID NO: 1627421 - RNA, 19 nt, Homo sapiens
  misc_RNA (1)...(19): siRNA sense strand
ugaaauaguggaagaaaga

SEQ ID NO: 1627422 - RNA, 19 nt, Homo sapiens
  misc_RNA (1)...(19): siRNA sense strand
gagaagcacaugaauggaa

SEQ ID NO: 1627423 - RNA, 19 nt, Homo sapiens
  misc_RNA (1)...(19): siRNA sense strand
guauugaguugugugcaua

SEQ ID NO: 1627424 - RNA, 19 nt, Homo sapiens
  misc_RNA (1)...(19): siRNA sense strand
gucauuaaguaccucauaa

SEQ ID NO: 1627425 - RNA, 19 nt, Homo sapiens
  misc_RNA (1)...(19): siRNA sense strand
gaucaagaaugccaaagac

SEQ ID NO: 1627426 - RNA, 19 nt, Homo sapiens
  misc_RNA (1)...(19): siRNA sense strand
ccaaggaaaccauggcuuu

SEQ ID NO: 1627427 - RNA, 19 nt, Homo sapiens
  misc_RNA (1)...(19): siRNA sense strand
aaccagcugucauuaagua

SEQ ID NO: 1627428 - RNA, 19 nt, Homo sapiens
  misc_RNA (1)...(19): siRNA sense strand
uccaaaggauuaugugaaa

SEQ ID NO: 1627429 - RNA, 19 nt, Homo sapiens
  misc_RNA (1)...(19): siRNA sense strand
gaggaacuuuagagaauuc

SEQ ID NO: 1627430 - RNA, 19 nt, Homo sapiens
  misc_RNA (1)...(19): siRNA sense strand
gagaggugcaauaaagaua

SEQ ID NO: 1627431 - RNA, 19 nt, Homo sapiens
  misc_RNA (1)...(19): siRNA sense strand
uagaagcccugaaagacuu

SEQ ID NO: 1627432 - RNA, 19 nt, Homo sapiens
  misc_RNA (1)...(19): siRNA sense strand
gauaaaagcacguuuguug

SEQ ID NO: 1627433 - RNA, 19 nt, Homo sapiens
  misc_RNA (1)...(19): siRNA sense strand
uaagugagcccaaccuaga

SEQ ID NO: 1627434 - RNA, 19 nt, Homo sapiens
  misc_RNA (1)...(19): siRNA sense strand
aagaagcaauuccauauag

SEQ ID NO: 1627435 - RNA, 19 nt, Homo sapiens
  misc_RNA (1)...(19): siRNA sense strand
gaagaacaccuguauauuc

SEQ ID NO: 1627436 - RNA, 19 nt, Homo sapiens
  misc_RNA (1)...(19): siRNA sense strand
gcaaauaaguuggugaaau

SEQ ID NO: 1627437 - RNA, 19 nt, Homo sapiens
  misc_RNA (1)...(19): siRNA sense strand
gaacaccuguauauucuug

SEQ ID NO: 1627438 - RNA, 19 nt, Homo sapiens
  misc_RNA (1)...(19): siRNA sense strand
caacgacuaugaagaauuc

SEQ ID NO: 1627439 - RNA, 19 nt, Homo sapiens
  misc_RNA (1)...(19): siRNA sense strand
agaaugaugucuucgauuu

SEQ ID NO: 1627440 - RNA, 19 nt, Homo sapiens
  misc_RNA (1)...(19): siRNA sense strand
gcaccuggaugaugaguau

SEQ ID NO: 1627441 - RNA, 19 nt, Homo sapiens
  misc_RNA (1)...(19): siRNA sense strand
ccaagcaccuggaugauga

SEQ ID NO: 1627442 - RNA, 19 nt, Homo sapiens
  misc_RNA (1)...(19): siRNA sense strand
cggaaacacuugccaauga

SEQ ID NO: 1627443 - RNA, 19 nt, Homo sapiens
  misc_RNA (1)...(19): siRNA sense strand
agaaguaccuggaauacaa

SEQ ID NO: 1627444 - RNA, 19 nt, Homo sapiens
  misc_RNA (1)...(19): siRNA sense strand
gagcugggaugacauacaa

SEQ ID NO: 1627445 - RNA, 19 nt, Homo sapiens
  misc_RNA (1)...(19): siRNA sense strand
ugaaggagaucgacaagga

SEQ ID NO: 1627446 - RNA, 19 nt, Homo sapiens
  misc_RNA (1)...(19): siRNA sense strand
gcgcagacaugcugaagga

SEQ ID NO: 1627447 - RNA, 19 nt, Homo sapiens
  misc_RNA (1)...(19): siRNA sense strand
gugaaauaccugaugauua

SEQ ID NO: 1627448 - RNA, 19 nt, Homo sapiens
  misc_RNA (1)...(19): siRNA sense strand
gcagaccucccagauguua

SEQ ID NO: 1627449 - RNA, 19 nt, Homo sapiens
  misc_RNA (1)...(19): siRNA sense strand
ggagagggcaaauaaguug

SEQ ID NO: 1627450 - RNA, 19 nt, Homo sapiens
  misc_RNA (1)...(19): siRNA sense strand
ggaagaacaccuguauauu

SEQ ID NO: 1627451 - RNA, 19 nt, Homo sapiens
  misc_RNA (1)...(19): siRNA sense strand
ucggaaagcuacaguguug

SEQ ID NO: 1627452 - RNA, 19 nt, Homo sapiens
  misc_RNA (1)...(19): siRNA sense strand
gaugaacauuucccugaga

SEQ ID NO: 1627453 - RNA, 19 nt, Homo sapiens
  misc_RNA (1)...(19): siRNA sense strand
gacaauggauguggauaug

SEQ ID NO: 1627454 - RNA, 19 nt, Homo sapiens
  misc_RNA (1)...(19): siRNA sense strand
ggaugaugcuuucaagaca

SEQ ID NO: 1627455 - RNA, 19 nt, Homo sapiens
  misc_RNA (1)...(19): siRNA sense strand
ccgcagaccucccagaugu

SEQ ID NO: 1627456 - RNA, 19 nt, Homo sapiens
  misc_RNA (1)...(19): siRNA sense strand
gaacauuucccugagauca

SEQ ID NO: 1627457 - RNA, 19 nt, Homo sapiens
  misc_RNA (1)...(19): siRNA sense strand
gagcaucacagcccucauu

SEQ ID NO: 1627458 - RNA, 19 nt, Homo sapiens
  misc_RNA (1)...(19): siRNA sense strand
cagagaauaugaugaacau

SEQ ID NO: 1627459 - RNA, 19 nt, Homo sapiens
  misc_RNA (1)...(19): siRNA sense strand
gcaacccaccugaguauga

SEQ ID NO: 1627460 - RNA, 19 nt, Homo sapiens
  misc_RNA (1)...(19): siRNA sense strand
ggaaacacuugccaaugag

SEQ ID NO: 1627461 - RNA, 19 nt, Homo sapiens
  misc_RNA (1)...(19): siRNA sense strand
caaggaagaacaccuguau

SEQ ID NO: 1627462 - RNA, 19 nt, Homo sapiens
  misc_RNA (1)...(19): siRNA sense strand
ggaaagcuacaguguugaa

SEQ ID NO: 1627463 - RNA, 19 nt, Homo sapiens
  misc_RNA (1)...(19): siRNA sense strand
gaugaugcuuucaagacaa

SEQ ID NO: 1627464 - RNA, 19 nt, Homo sapiens
  misc_RNA (1)...(19): siRNA sense strand
ugacauccauauccucaga

SEQ ID NO: 1627465 - RNA, 19 nt, Homo sapiens
  misc_RNA (1)...(19): siRNA sense strand
caacccaccugaguaugaa

SEQ ID NO: 1627466 - RNA, 19 nt, Homo sapiens
  misc_RNA (1)...(19): siRNA sense strand
gcaagaggaccaagaaguc

SEQ ID NO: 1627467 - RNA, 19 nt, Homo sapiens
  misc_RNA (1)...(19): siRNA sense strand
ggaaggcucauuucuugga

SEQ ID NO: 1627468 - RNA, 19 nt, Homo sapiens
  misc_RNA (1)...(19): siRNA sense strand
ggaugaggguagcgacgaa

SEQ ID NO: 1627469 - RNA, 19 nt, Homo sapiens
  misc_RNA (1)...(19): siRNA sense strand
caugagaccagcaagauga

SEQ ID NO: 1627470 - RNA, 19 nt, Homo sapiens
  misc_RNA (1)...(19): siRNA sense strand
gcaacgacuaugaagaauu

SEQ ID NO: 1627471 - RNA, 19 nt, Homo sapiens
  misc_RNA (1)...(19): siRNA sense strand
ccagaaugaugucuucgau

SEQ ID NO: 1627472 - RNA, 19 nt, Homo sapiens
  misc_RNA (1)...(19): siRNA sense strand
cuacaguguugaagacaug

SEQ ID NO: 1627473 - RNA, 19 nt, Homo sapiens
  misc_RNA (1)...(19): siRNA sense strand
cagauaccaucaguacauu

SEQ ID NO: 1627474 - RNA, 19 nt, Homo sapiens
  misc_RNA (1)...(19): siRNA sense strand
auggaaggcucauuucuug

SEQ ID NO: 1627475 - RNA, 19 nt, Homo sapiens
  misc_RNA (1)...(19): siRNA sense strand
ggagaucgacaaggaagaa

SEQ ID NO: 1627476 - RNA, 19 nt, Homo sapiens
  misc_RNA (1)...(19): siRNA sense strand
gaaggagaucgacaaggaa

SEQ ID NO: 1627477 - RNA, 19 nt, Homo sapiens
  misc_RNA (1)...(19): siRNA sense strand
ggguggagccucagaaugu

SEQ ID NO: 1627478 - RNA, 19 nt, Homo sapiens
  misc_RNA (1)...(19): siRNA sense strand
ggugaaauaccugaugauu

SEQ ID NO: 1627479 - RNA, 19 nt, Homo sapiens
  misc_RNA (1)...(19): siRNA sense strand
cagaugacuuugugaagca

SEQ ID NO: 1627480 - RNA, 19 nt, Homo sapiens
  misc_RNA (1)...(19): siRNA sense strand
cagcucgccuccuuggaaa

SEQ ID NO: 1627481 - RNA, 19 nt, Homo sapiens
  misc_RNA (1)...(19): siRNA sense strand
ugaagaauucggugcguuu

SEQ ID NO: 1627482 - RNA, 19 nt, Homo sapiens
  misc_RNA (1)...(19): siRNA sense strand
ccagauaccaucaguacau

SEQ ID NO: 1627483 - RNA, 19 nt, Homo sapiens
  misc_RNA (1)...(19): siRNA sense strand
gaugagggcccagaugaau

SEQ ID NO: 1627484 - RNA, 19 nt, Homo sapiens
  misc_RNA (1)...(19): siRNA sense strand
aggaagaacaccuguauau

SEQ ID NO: 1627485 - RNA, 19 nt, Homo sapiens
  misc_RNA (1)...(19): siRNA sense strand
ggauccaccugaaggagau

SEQ ID NO: 1627486 - RNA, 19 nt, Homo sapiens
  misc_RNA (1)...(19): siRNA sense strand
gcagcuggauccggaaaca

SEQ ID NO: 1627487 - RNA, 19 nt, Homo sapiens
  misc_RNA (1)...(19): siRNA sense strand
gggaugaggacggagauuu

SEQ ID NO: 1627488 - RNA, 19 nt, Homo sapiens
  misc_RNA (1)...(19): siRNA sense strand
cagaugagggcccagauga

SEQ ID NO: 1627489 - RNA, 19 nt, Homo sapiens
  misc_RNA (1)...(19): siRNA sense strand
agaugaggguccugagauu

SEQ ID NO: 1627490 - RNA, 19 nt, Homo sapiens
  misc_RNA (1)...(19): siRNA sense strand
gggcaaauaaguuggugaa

SEQ ID NO: 1627491 - RNA, 19 nt, Homo sapiens
  misc_RNA (1)...(19): siRNA sense strand
gggccagaaugaugucuuc

SEQ ID NO: 1627492 - RNA, 19 nt, Homo sapiens
  misc_RNA (1)...(19): siRNA sense strand
gaggcaagaggaccaagaa

SEQ ID NO: 1627493 - RNA, 19 nt, Homo sapiens
  misc_RNA (1)...(19): siRNA sense strand
gguggagccucagaauguu

SEQ ID NO: 1627494 - RNA, 19 nt, Homo sapiens
  misc_RNA (1)...(19): siRNA sense strand
ugagauucaucgcccagaa

SEQ ID NO: 1627495 - RNA, 19 nt, Homo sapiens
  misc_RNA (1)...(19): siRNA sense strand
ugauuaaggacuacaagaa

SEQ ID NO: 1627496 - RNA, 19 nt, Homo sapiens
  misc_RNA (1)...(19): siRNA sense strand
gaaacacuugccaaugaga

SEQ ID NO: 1627497 - RNA, 19 nt, Homo sapiens
  misc_RNA (1)...(19): siRNA sense strand
cagcaacccaccugaguau

SEQ ID NO: 1627498 - RNA, 19 nt, Homo sapiens
  misc_RNA (1)...(19): siRNA sense strand
gaagaauucggugcguuug

SEQ ID NO: 1627499 - RNA, 19 nt, Homo sapiens
  misc_RNA (1)...(19): siRNA sense strand
gauuaaggacuacaagaag

SEQ ID NO: 1627500 - RNA, 19 nt, Homo sapiens
  misc_RNA (1)...(19): siRNA sense strand
aaugaugucuucgauuuca

SEQ ID NO: 1627501 - RNA, 19 nt, Homo sapiens
  misc_RNA (1)...(19): siRNA sense strand
gcagcgaggaggagagaga

SEQ ID NO: 1627502 - RNA, 19 nt, Homo sapiens
  misc_RNA (1)...(19): siRNA sense strand
gaaugaugucuucgauuuc

SEQ ID NO: 1627503 - RNA, 19 nt, Homo sapiens
  misc_RNA (1)...(19): siRNA sense strand
caagaugaggguccugaga

SEQ ID NO: 1627504 - RNA, 19 nt, Homo sapiens
  misc_RNA (1)...(19): siRNA sense strand
gaagcagaaguaccuggaa

SEQ ID NO: 1627505 - RNA, 19 nt, Homo sapiens
  misc_RNA (1)...(19): siRNA sense strand
gaaggcaacgacuaugaag

SEQ ID NO: 1627506 - RNA, 19 nt, Homo sapiens
  misc_RNA (1)...(19): siRNA sense strand
caggagagggcaaauaagu

SEQ ID NO: 1627507 - RNA, 19 nt, Homo sapiens
  misc_RNA (1)...(19): siRNA sense strand
ggauauggccgaggaacau

SEQ ID NO: 1627508 - RNA, 19 nt, Homo sapiens
  misc_RNA (1)...(19): siRNA sense strand
gcagaaguaccuggaauac

SEQ ID NO: 1627509 - RNA, 19 nt, Homo sapiens
  misc_RNA (1)...(19): siRNA sense strand
aagcagaaguaccuggaau

SEQ ID NO: 1627510 - RNA, 19 nt, Homo sapiens
  misc_RNA (1)...(19): siRNA sense strand
acauuucccugagaucauu

SEQ ID NO: 1627511 - RNA, 19 nt, Homo sapiens
  misc_RNA (1)...(19): siRNA sense strand
ugaaggcaacgacuaugaa

SEQ ID NO: 1627512 - RNA, 19 nt, Homo sapiens
  misc_RNA (1)...(19): siRNA sense strand
gggaggaagagaugguuga

SEQ ID NO: 1627513 - RNA, 19 nt, Homo sapiens
  misc_RNA (1)...(19): siRNA sense strand
ggaugaagcgcugauugga

SEQ ID NO: 1627514 - RNA, 19 nt, Homo sapiens
  misc_RNA (1)...(19): siRNA sense strand
ugagggcccagaugaauau

SEQ ID NO: 1627515 - RNA, 19 nt, Homo sapiens
  misc_RNA (1)...(19): siRNA sense strand
aggcaacgacuaugaagaa

SEQ ID NO: 1627516 - RNA, 19 nt, Homo sapiens
  misc_RNA (1)...(19): siRNA sense strand
uccaggccuucgcaucuua

SEQ ID NO: 1627517 - RNA, 19 nt, Homo sapiens
  misc_RNA (1)...(19): siRNA sense strand
auuaaggacuacaagaaga

SEQ ID NO: 1627518 - RNA, 19 nt, Homo sapiens
  misc_RNA (1)...(19): siRNA sense strand
ugcaggagagggcaaauaa

SEQ ID NO: 1627519 - RNA, 19 nt, Homo sapiens
  misc_RNA (1)...(19): siRNA sense strand
agauguuagucaccaguaa

SEQ ID NO: 1627520 - RNA, 19 nt, Homo sapiens
  misc_RNA (1)...(19): siRNA sense strand
caacguacacccuggaaaa

SEQ ID NO: 1627521 - RNA, 19 nt, Homo sapiens
  misc_RNA (1)...(19): siRNA sense strand
ccacccaccuggagagcau

SEQ ID NO: 1627522 - RNA, 19 nt, Homo sapiens
  misc_RNA (1)...(19): siRNA sense strand
ggaggaagagaugguugaa

SEQ ID NO: 1627523 - RNA, 19 nt, Homo sapiens
  misc_RNA (1)...(19): siRNA sense strand
ggaggcaagaggaccaaga

SEQ ID NO: 1627524 - RNA, 19 nt, Homo sapiens
  misc_RNA (1)...(19): siRNA sense strand
cgucagcaguggcaccaau

SEQ ID NO: 1627525 - RNA, 19 nt, Homo sapiens
  misc_RNA (1)...(19): siRNA sense strand
gggaggcacuacgcaagau

SEQ ID NO: 1627526 - RNA, 19 nt, Homo sapiens
  misc_RNA (1)...(19): siRNA sense strand
gcaacguacacccuggaaa

SEQ ID NO: 1627527 - RNA, 19 nt, Homo sapiens
  misc_RNA (1)...(19): siRNA sense strand
gagcagcgaggaggagaga

SEQ ID NO: 1627528 - RNA, 19 nt, Homo sapiens
  misc_RNA (1)...(19): siRNA sense strand
ggccagauaccaucaguac

SEQ ID NO: 1627529 - RNA, 19 nt, Homo sapiens
  misc_RNA (1)...(19): siRNA sense strand
guggagcugggaugacaua

SEQ ID NO: 1627530 - RNA, 19 nt, Homo sapiens
  misc_RNA (1)...(19): siRNA sense strand
agacaauggauguggauau

SEQ ID NO: 1627531 - RNA, 19 nt, Homo sapiens
  misc_RNA (1)...(19): siRNA sense strand
caggcugagucuccucuug

SEQ ID NO: 1627532 - RNA, 19 nt, Homo sapiens
  misc_RNA (1)...(19): siRNA sense strand
ucauugaacgagcaacgua

SEQ ID NO: 1627533 - RNA, 19 nt, Homo sapiens
  misc_RNA (1)...(19): siRNA sense strand
caucaagcgcgcagacaug

SEQ ID NO: 1627534 - RNA, 19 nt, Homo sapiens
  misc_RNA (1)...(19): siRNA sense strand
gcuacaguguugaagacau

SEQ ID NO: 1627535 - RNA, 19 nt, Homo sapiens
  misc_RNA (1)...(19): siRNA sense strand
gaagaacaccuguauauuc

SEQ ID NO: 1627536 - RNA, 19 nt, Homo sapiens
  misc_RNA (1)...(19): siRNA sense strand
gcaaauaaguuggugaaau

SEQ ID NO: 1627537 - RNA, 19 nt, Homo sapiens
  misc_RNA (1)...(19): siRNA sense strand
gaacaccuguauauucuug

SEQ ID NO: 1627538 - RNA, 19 nt, Homo sapiens
  misc_RNA (1)...(19): siRNA sense strand
caacgacuaugaagaauuc

SEQ ID NO: 1627539 - RNA, 19 nt, Homo sapiens
  misc_RNA (1)...(19): siRNA sense strand
agaaugaugucuucgauuu

SEQ ID NO: 1627540 - RNA, 19 nt, Homo sapiens
  misc_RNA (1)...(19): siRNA sense strand
gcaccuggaugaugaguau

SEQ ID NO: 1627541 - RNA, 19 nt, Homo sapiens
  misc_RNA (1)...(19): siRNA sense strand
ccaagcaccuggaugauga

SEQ ID NO: 1627542 - RNA, 19 nt, Homo sapiens
  misc_RNA (1)...(19): siRNA sense strand
cggaaacacuugccaauga

SEQ ID NO: 1627543 - RNA, 19 nt, Homo sapiens
  misc_RNA (1)...(19): siRNA sense strand
agaaguaccuggaauacaa

SEQ ID NO: 1627544 - RNA, 19 nt, Homo sapiens
  misc_RNA (1)...(19): siRNA sense strand
gagcugggaugacauacaa

SEQ ID NO: 1627545 - RNA, 19 nt, Homo sapiens
  misc_RNA (1)...(19): siRNA sense strand
ugaaggagaucgacaagga

SEQ ID NO: 1627546 - RNA, 19 nt, Homo sapiens
  misc_RNA (1)...(19): siRNA sense strand
gcgcagacaugcugaagga

SEQ ID NO: 1627547 - RNA, 19 nt, Homo sapiens
  misc_RNA (1)...(19): siRNA sense strand
gugaaauaccugaugauua

SEQ ID NO: 1627548 - RNA, 19 nt, Homo sapiens
  misc_RNA (1)...(19): siRNA sense strand
gcagaccucccagauguua

SEQ ID NO: 1627549 - RNA, 19 nt, Homo sapiens
  misc_RNA (1)...(19): siRNA sense strand
ggagagggcaaauaaguug

SEQ ID NO: 1627550 - RNA, 19 nt, Homo sapiens
  misc_RNA (1)...(19): siRNA sense strand
ggaagaacaccuguauauu

SEQ ID NO: 1627551 - RNA, 19 nt, Homo sapiens
  misc_RNA (1)...(19): siRNA sense strand
ucggaaagcuacaguguug

SEQ ID NO: 1627552 - RNA, 19 nt, Homo sapiens
  misc_RNA (1)...(19): siRNA sense strand
gaugaacauuucccugaga

SEQ ID NO: 1627553 - RNA, 19 nt, Homo sapiens
  misc_RNA (1)...(19): siRNA sense strand
gacaauggauguggauaug

SEQ ID NO: 1627554 - RNA, 19 nt, Homo sapiens
  misc_RNA (1)...(19): siRNA sense strand
ggaugaugcuuucaagaca

SEQ ID NO: 1627555 - RNA, 19 nt, Homo sapiens
  misc_RNA (1)...(19): siRNA sense strand
ccgcagaccucccagaugu

SEQ ID NO: 1627556 - RNA, 19 nt, Homo sapiens
  misc_RNA (1)...(19): siRNA sense strand
gaacauuucccugagauca

SEQ ID NO: 1627557 - RNA, 19 nt, Homo sapiens
  misc_RNA (1)...(19): siRNA sense strand
gagcaucacagcccucauu

SEQ ID NO: 1627558 - RNA, 19 nt, Homo sapiens
  misc_RNA (1)...(19): siRNA sense strand
cagagaauaugaugaacau

SEQ ID NO: 1627559 - RNA, 19 nt, Homo sapiens
  misc_RNA (1)...(19): siRNA sense strand
gcaacccaccugaguauga

SEQ ID NO: 1627560 - RNA, 19 nt, Homo sapiens
  misc_RNA (1)...(19): siRNA sense strand
ggaaacacuugccaaugag

SEQ ID NO: 1627561 - RNA, 19 nt, Homo sapiens
  misc_RNA (1)...(19): siRNA sense strand
caaggaagaacaccuguau

SEQ ID NO: 1627562 - RNA, 19 nt, Homo sapiens
  misc_RNA (1)...(19): siRNA sense strand
ggaaagcuacaguguugaa

SEQ ID NO: 1627563 - RNA, 19 nt, Homo sapiens
  misc_RNA (1)...(19): siRNA sense strand
gaugaugcuuucaagacaa

SEQ ID NO: 1627564 - RNA, 19 nt, Homo sapiens
  misc_RNA (1)...(19): siRNA sense strand
ugacauccauauccucaga

SEQ ID NO: 1627565 - RNA, 19 nt, Homo sapiens
  misc_RNA (1)...(19): siRNA sense strand
caacccaccugaguaugaa

SEQ ID NO: 1627566 - RNA, 19 nt, Homo sapiens
  misc_RNA (1)...(19): siRNA sense strand
gcaagaggaccaagaaguc

SEQ ID NO: 1627567 - RNA, 19 nt, Homo sapiens
  misc_RNA (1)...(19): siRNA sense strand
ggaaggcucauuucuugga

SEQ ID NO: 1627568 - RNA, 19 nt, Homo sapiens
  misc_RNA (1)...(19): siRNA sense strand
ggaugaggguagcgacgaa

SEQ ID NO: 1627569 - RNA, 19 nt, Homo sapiens
  misc_RNA (1)...(19): siRNA sense strand
caugagaccagcaagauga

SEQ ID NO: 1627570 - RNA, 19 nt, Homo sapiens
  misc_RNA (1)...(19): siRNA sense strand
gcaacgacuaugaagaauu

SEQ ID NO: 1627571 - RNA, 19 nt, Homo sapiens
  misc_RNA (1)...(19): siRNA sense strand
ccagaaugaugucuucgau

SEQ ID NO: 1627572 - RNA, 19 nt, Homo sapiens
  misc_RNA (1)...(19): siRNA sense strand
cuacaguguugaagacaug

SEQ ID NO: 1627573 - RNA, 19 nt, Homo sapiens
  misc_RNA (1)...(19): siRNA sense strand
cagauaccaucaguacauu

SEQ ID NO: 1627574 - RNA, 19 nt, Homo sapiens
  misc_RNA (1)...(19): siRNA sense strand
auggaaggcucauuucuug

SEQ ID NO: 1627575 - RNA, 19 nt, Homo sapiens
  misc_RNA (1)...(19): siRNA sense strand
ggagaucgacaaggaagaa

SEQ ID NO: 1627576 - RNA, 19 nt, Homo sapiens
  misc_RNA (1)...(19): siRNA sense strand
gaaggagaucgacaaggaa

SEQ ID NO: 1627577 - RNA, 19 nt, Homo sapiens
  misc_RNA (1)...(19): siRNA sense strand
ggguggagccucagaaugu

SEQ ID NO: 1627578 - RNA, 19 nt, Homo sapiens
  misc_RNA (1)...(19): siRNA sense strand
ggugaaauaccugaugauu

SEQ ID NO: 1627579 - RNA, 19 nt, Homo sapiens
  misc_RNA (1)...(19): siRNA sense strand
cagaugacuuugugaagca

SEQ ID NO: 1627580 - RNA, 19 nt, Homo sapiens
  misc_RNA (1)...(19): siRNA sense strand
cagcucgccuccuuggaaa

SEQ ID NO: 1627581 - RNA, 19 nt, Homo sapiens
  misc_RNA (1)...(19): siRNA sense strand
ugaagaauucggugcguuu

SEQ ID NO: 1627582 - RNA, 19 nt, Homo sapiens
  misc_RNA (1)...(19): siRNA sense strand
ccagauaccaucaguacau

SEQ ID NO: 1627583 - RNA, 19 nt, Homo sapiens
  misc_RNA (1)...(19): siRNA sense strand
gaugagggcccagaugaau

SEQ ID NO: 1627584 - RNA, 19 nt, Homo sapiens
  misc_RNA (1)...(19): siRNA sense strand
aggaagaacaccuguauau

SEQ ID NO: 1627585 - RNA, 19 nt, Homo sapiens
  misc_RNA (1)...(19): siRNA sense strand
ggauccaccugaaggagau

SEQ ID NO: 1627586 - RNA, 19 nt, Homo sapiens
  misc_RNA (1)...(19): siRNA sense strand
gcagcuggauccggaaaca

SEQ ID NO: 1627587 - RNA, 19 nt, Homo sapiens
  misc_RNA (1)...(19): siRNA sense strand
gggaugaggacggagauuu

SEQ ID NO: 1627588 - RNA, 19 nt, Homo sapiens
  misc_RNA (1)...(19): siRNA sense strand
cagaugagggcccagauga

SEQ ID NO: 1627589 - RNA, 19 nt, Homo sapiens
  misc_RNA (1)...(19): siRNA sense strand
agaugaggguccugagauu

SEQ ID NO: 1627590 - RNA, 19 nt, Homo sapiens
  misc_RNA (1)...(19): siRNA sense strand
gggcaaauaaguuggugaa

SEQ ID NO: 1627591 - RNA, 19 nt, Homo sapiens
  misc_RNA (1)...(19): siRNA sense strand
gggccagaaugaugucuuc

SEQ ID NO: 1627592 - RNA, 19 nt, Homo sapiens
  misc_RNA (1)...(19): siRNA sense strand
gaggcaagaggaccaagaa

SEQ ID NO: 1627593 - RNA, 19 nt, Homo sapiens
  misc_RNA (1)...(19): siRNA sense strand
gguggagccucagaauguu

SEQ ID NO: 1627594 - RNA, 19 nt, Homo sapiens
  misc_RNA (1)...(19): siRNA sense strand
ugagauucaucgcccagaa

SEQ ID NO: 1627595 - RNA, 19 nt, Homo sapiens
  misc_RNA (1)...(19): siRNA sense strand
ugauuaaggacuacaagaa

SEQ ID NO: 1627596 - RNA, 19 nt, Homo sapiens
  misc_RNA (1)...(19): siRNA sense strand
gaaacacuugccaaugaga

SEQ ID NO: 1627597 - RNA, 19 nt, Homo sapiens
  misc_RNA (1)...(19): siRNA sense strand
cagcaacccaccugaguau

SEQ ID NO: 1627598 - RNA, 19 nt, Homo sapiens
  misc_RNA (1)...(19): siRNA sense strand
gaagaauucggugcguuug

SEQ ID NO: 1627599 - RNA, 19 nt, Homo sapiens
  misc_RNA (1)...(19): siRNA sense strand
gauuaaggacuacaagaag

SEQ ID NO: 1627600 - RNA, 19 nt, Homo sapiens
  misc_RNA (1)...(19): siRNA sense strand
aaugaugucuucgauuuca

SEQ ID NO: 1627601 - RNA, 19 nt, Homo sapiens
  misc_RNA (1)...(19): siRNA sense strand
gcagcgaggaggagagaga

SEQ ID NO: 1627602 - RNA, 19 nt, Homo sapiens
  misc_RNA (1)...(19): siRNA sense strand
gaaugaugucuucgauuuc

SEQ ID NO: 1627603 - RNA, 19 nt, Homo sapiens
  misc_RNA (1)...(19): siRNA sense strand
caagaugaggguccugaga

SEQ ID NO: 1627604 - RNA, 19 nt, Homo sapiens
  misc_RNA (1)...(19): siRNA sense strand
gaagcagaaguaccuggaa

SEQ ID NO: 1627605 - RNA, 19 nt, Homo sapiens
  misc_RNA (1)...(19): siRNA sense strand
gaaggcaacgacuaugaag

SEQ ID NO: 1627606 - RNA, 19 nt, Homo sapiens
  misc_RNA (1)...(19): siRNA sense strand
caggagagggcaaauaagu

SEQ ID NO: 1627607 - RNA, 19 nt, Homo sapiens
  misc_RNA (1)...(19): siRNA sense strand
ggauauggccgaggaacau

SEQ ID NO: 1627608 - RNA, 19 nt, Homo sapiens
  misc_RNA (1)...(19): siRNA sense strand
gcagaaguaccuggaauac

SEQ ID NO: 1627609 - RNA, 19 nt, Homo sapiens
  misc_RNA (1)...(19): siRNA sense strand
aagcagaaguaccuggaau

SEQ ID NO: 1627610 - RNA, 19 nt, Homo sapiens
  misc_RNA (1)...(19): siRNA sense strand
acauuucccugagaucauu

SEQ ID NO: 1627611 - RNA, 19 nt, Homo sapiens
  misc_RNA (1)...(19): siRNA sense strand
ugaaggcaacgacuaugaa

SEQ ID NO: 1627612 - RNA, 19 nt, Homo sapiens
  misc_RNA (1)...(19): siRNA sense strand
gggaggaagagaugguuga

SEQ ID NO: 1627613 - RNA, 19 nt, Homo sapiens
  misc_RNA (1)...(19): siRNA sense strand
ggaugaagcgcugauugga

SEQ ID NO: 1627614 - RNA, 19 nt, Homo sapiens
  misc_RNA (1)...(19): siRNA sense strand
ugagggcccagaugaauau

SEQ ID NO: 1627615 - RNA, 19 nt, Homo sapiens
  misc_RNA (1)...(19): siRNA sense strand
aggcaacgacuaugaagaa

SEQ ID NO: 1627616 - RNA, 19 nt, Homo sapiens
  misc_RNA (1)...(19): siRNA sense strand
uccaggccuucgcaucuua

SEQ ID NO: 1627617 - RNA, 19 nt, Homo sapiens
  misc_RNA (1)...(19): siRNA sense strand
auuaaggacuacaagaaga

SEQ ID NO: 1627618 - RNA, 19 nt, Homo sapiens
  misc_RNA (1)...(19): siRNA sense strand
ugcaggagagggcaaauaa

SEQ ID NO: 1627619 - RNA, 19 nt, Homo sapiens
  misc_RNA (1)...(19): siRNA sense strand
agauguuagucaccaguaa

SEQ ID NO: 1627620 - RNA, 19 nt, Homo sapiens
  misc_RNA (1)...(19): siRNA sense strand
caacguacacccuggaaaa

SEQ ID NO: 1627621 - RNA, 19 nt, Homo sapiens
  misc_RNA (1)...(19): siRNA sense strand
ccacccaccuggagagcau

SEQ ID NO: 1627622 - RNA, 19 nt, Homo sapiens
  misc_RNA (1)...(19): siRNA sense strand
ggaggaagagaugguugaa

SEQ ID NO: 1627623 - RNA, 19 nt, Homo sapiens
  misc_RNA (1)...(19): siRNA sense strand
ggaggcaagaggaccaaga

SEQ ID NO: 1627624 - RNA, 19 nt, Homo sapiens
  misc_RNA (1)...(19): siRNA sense strand
cgucagcaguggcaccaau

SEQ ID NO: 1627625 - RNA, 19 nt, Homo sapiens
  misc_RNA (1)...(19): siRNA sense strand
gggaggcacuacgcaagau

SEQ ID NO: 1627626 - RNA, 19 nt, Homo sapiens
  misc_RNA (1)...(19): siRNA sense strand
gcaacguacacccuggaaa

SEQ ID NO: 1627627 - RNA, 19 nt, Homo sapiens
  misc_RNA (1)...(19): siRNA sense strand
gagcagcgaggaggagaga

SEQ ID NO: 1627628 - RNA, 19 nt, Homo sapiens
  misc_RNA (1)...(19): siRNA sense strand
ggccagauaccaucaguac

SEQ ID NO: 1627629 - RNA, 19 nt, Homo sapiens
  misc_RNA (1)...(19): siRNA sense strand
guggagcugggaugacaua

SEQ ID NO: 1627630 - RNA, 19 nt, Homo sapiens
  misc_RNA (1)...(19): siRNA sense strand
agacaauggauguggauau

SEQ ID NO: 1627631 - RNA, 19 nt, Homo sapiens
  misc_RNA (1)...(19): siRNA sense strand
caggcugagucuccucuug

SEQ ID NO: 1627632 - RNA, 19 nt, Homo sapiens
  misc_RNA (1)...(19): siRNA sense strand
ucauugaacgagcaacgua

SEQ ID NO: 1627633 - RNA, 19 nt, Homo sapiens
  misc_RNA (1)...(19): siRNA sense strand
caucaagcgcgcagacaug

SEQ ID NO: 1627634 - RNA, 19 nt, Homo sapiens
  misc_RNA (1)...(19): siRNA sense strand
gcuacaguguugaagacau

SEQ ID NO: 1627635 - RNA, 19 nt, Homo sapiens
  misc_RNA (1)...(19): siRNA sense strand
gaagaacaccuguauauuc

SEQ ID NO: 1627636 - RNA, 19 nt, Homo sapiens
  misc_RNA (1)...(19): siRNA sense strand
gcaaauaaguuggugaaau

SEQ ID NO: 1627637 - RNA, 19 nt, Homo sapiens
  misc_RNA (1)...(19): siRNA sense strand
gaacaccuguauauucuug

SEQ ID NO: 1627638 - RNA, 19 nt, Homo sapiens
  misc_RNA (1)...(19): siRNA sense strand
caacgacuaugaagaauuc

SEQ ID NO: 1627639 - RNA, 19 nt, Homo sapiens
  misc_RNA (1)...(19): siRNA sense strand
agaaugaugucuucgauuu

SEQ ID NO: 1627640 - RNA, 19 nt, Homo sapiens
  misc_RNA (1)...(19): siRNA sense strand
gcaccuggaugaugaguau

SEQ ID NO: 1627641 - RNA, 19 nt, Homo sapiens
  misc_RNA (1)...(19): siRNA sense strand
ccaagcaccuggaugauga

SEQ ID NO: 1627642 - RNA, 19 nt, Homo sapiens
  misc_RNA (1)...(19): siRNA sense strand
cggaaacacuugccaauga

SEQ ID NO: 1627643 - RNA, 19 nt, Homo sapiens
  misc_RNA (1)...(19): siRNA sense strand
agaaguaccuggaauacaa

SEQ ID NO: 1627644 - RNA, 19 nt, Homo sapiens
  misc_RNA (1)...(19): siRNA sense strand
gagcugggaugacauacaa

SEQ ID NO: 1627645 - RNA, 19 nt, Homo sapiens
  misc_RNA (1)...(19): siRNA sense strand
ugaaggagaucgacaagga

SEQ ID NO: 1627646 - RNA, 19 nt, Homo sapiens
  misc_RNA (1)...(19): siRNA sense strand
gcgcagacaugcugaagga

SEQ ID NO: 1627647 - RNA, 19 nt, Homo sapiens
  misc_RNA (1)...(19): siRNA sense strand
gugaaauaccugaugauua

SEQ ID NO: 1627648 - RNA, 19 nt, Homo sapiens
  misc_RNA (1)...(19): siRNA sense strand
gcagaccucccagauguua

SEQ ID NO: 1627649 - RNA, 19 nt, Homo sapiens
  misc_RNA (1)...(19): siRNA sense strand
ggagagggcaaauaaguug

SEQ ID NO: 1627650 - RNA, 19 nt, Homo sapiens
  misc_RNA (1)...(19): siRNA sense strand
ggaagaacaccuguauauu

SEQ ID NO: 1627651 - RNA, 19 nt, Homo sapiens
  misc_RNA (1)...(19): siRNA sense strand
ucggaaagcuacaguguug

SEQ ID NO: 1627652 - RNA, 19 nt, Homo sapiens
  misc_RNA (1)...(19): siRNA sense strand
gaugaacauuucccugaga

SEQ ID NO: 1627653 - RNA, 19 nt, Homo sapiens
  misc_RNA (1)...(19): siRNA sense strand
gacaauggauguggauaug

SEQ ID NO: 1627654 - RNA, 19 nt, Homo sapiens
  misc_RNA (1)...(19): siRNA sense strand
ggaugaugcuuucaagaca

SEQ ID NO: 1627655 - RNA, 19 nt, Homo sapiens
  misc_RNA (1)...(19): siRNA sense strand
ccgcagaccucccagaugu

SEQ ID NO: 1627656 - RNA, 19 nt, Homo sapiens
  misc_RNA (1)...(19): siRNA sense strand
gaacauuucccugagauca

SEQ ID NO: 1627657 - RNA, 19 nt, Homo sapiens
  misc_RNA (1)...(19): siRNA sense strand
gagcaucacagcccucauu

SEQ ID NO: 1627658 - RNA, 19 nt, Homo sapiens
  misc_RNA (1)...(19): siRNA sense strand
cagagaauaugaugaacau

SEQ ID NO: 1627659 - RNA, 19 nt, Homo sapiens
  misc_RNA (1)...(19): siRNA sense strand
gcaacccaccugaguauga

SEQ ID NO: 1627660 - RNA, 19 nt, Homo sapiens
  misc_RNA (1)...(19): siRNA sense strand
ggaaacacuugccaaugag

SEQ ID NO: 1627661 - RNA, 19 nt, Homo sapiens
  misc_RNA (1)...(19): siRNA sense strand
caaggaagaacaccuguau

SEQ ID NO: 1627662 - RNA, 19 nt, Homo sapiens
  misc_RNA (1)...(19): siRNA sense strand
ggaaagcuacaguguugaa

SEQ ID NO: 1627663 - RNA, 19 nt, Homo sapiens
  misc_RNA (1)...(19): siRNA sense strand
gaugaugcuuucaagacaa

SEQ ID NO: 1627664 - RNA, 19 nt, Homo sapiens
  misc_RNA (1)...(19): siRNA sense strand
ugacauccauauccucaga

SEQ ID NO: 1627665 - RNA, 19 nt, Homo sapiens
  misc_RNA (1)...(19): siRNA sense strand
caacccaccugaguaugaa

SEQ ID NO: 1627666 - RNA, 19 nt, Homo sapiens
  misc_RNA (1)...(19): siRNA sense strand
gcaagaggaccaagaaguc

SEQ ID NO: 1627667 - RNA, 19 nt, Homo sapiens
  misc_RNA (1)...(19): siRNA sense strand
ggaaggcucauuucuugga

SEQ ID NO: 1627668 - RNA, 19 nt, Homo sapiens
  misc_RNA (1)...(19): siRNA sense strand
ggaugaggguagcgacgaa

SEQ ID NO: 1627669 - RNA, 19 nt, Homo sapiens
  misc_RNA (1)...(19): siRNA sense strand
caugagaccagcaagauga

SEQ ID NO: 1627670 - RNA, 19 nt, Homo sapiens
  misc_RNA (1)...(19): siRNA sense strand
gcaacgacuaugaagaauu

SEQ ID NO: 1627671 - RNA, 19 nt, Homo sapiens
  misc_RNA (1)...(19): siRNA sense strand
ccagaaugaugucuucgau

SEQ ID NO: 1627672 - RNA, 19 nt, Homo sapiens
  misc_RNA (1)...(19): siRNA sense strand
cuacaguguugaagacaug

SEQ ID NO: 1627673 - RNA, 19 nt, Homo sapiens
  misc_RNA (1)...(19): siRNA sense strand
cagauaccaucaguacauu

SEQ ID NO: 1627674 - RNA, 19 nt, Homo sapiens
  misc_RNA (1)...(19): siRNA sense strand
auggaaggcucauuucuug

SEQ ID NO: 1627675 - RNA, 19 nt, Homo sapiens
  misc_RNA (1)...(19): siRNA sense strand
ggagaucgacaaggaagaa

SEQ ID NO: 1627676 - RNA, 19 nt, Homo sapiens
  misc_RNA (1)...(19): siRNA sense strand
gaaggagaucgacaaggaa

SEQ ID NO: 1627677 - RNA, 19 nt, Homo sapiens
  misc_RNA (1)...(19): siRNA sense strand
ggguggagccucagaaugu

SEQ ID NO: 1627678 - RNA, 19 nt, Homo sapiens
  misc_RNA (1)...(19): siRNA sense strand
ggugaaauaccugaugauu

SEQ ID NO: 1627679 - RNA, 19 nt, Homo sapiens
  misc_RNA (1)...(19): siRNA sense strand
cagaugacuuugugaagca

SEQ ID NO: 1627680 - RNA, 19 nt, Homo sapiens
  misc_RNA (1)...(19): siRNA sense strand
cagcucgccuccuuggaaa

SEQ ID NO: 1627681 - RNA, 19 nt, Homo sapiens
  misc_RNA (1)...(19): siRNA sense strand
ugaagaauucggugcguuu

SEQ ID NO: 1627682 - RNA, 19 nt, Homo sapiens
  misc_RNA (1)...(19): siRNA sense strand
ccagauaccaucaguacau

SEQ ID NO: 1627683 - RNA, 19 nt, Homo sapiens
  misc_RNA (1)...(19): siRNA sense strand
gaugagggcccagaugaau

SEQ ID NO: 1627684 - RNA, 19 nt, Homo sapiens
  misc_RNA (1)...(19): siRNA sense strand
aggaagaacaccuguauau

SEQ ID NO: 1627685 - RNA, 19 nt, Homo sapiens
  misc_RNA (1)...(19): siRNA sense strand
ggauccaccugaaggagau

SEQ ID NO: 1627686 - RNA, 19 nt, Homo sapiens
  misc_RNA (1)...(19): siRNA sense strand
gcagcuggauccggaaaca

SEQ ID NO: 1627687 - RNA, 19 nt, Homo sapiens
  misc_RNA (1)...(19): siRNA sense strand
gggaugaggacggagauuu

SEQ ID NO: 1627688 - RNA, 19 nt, Homo sapiens
  misc_RNA (1)...(19): siRNA sense strand
cagaugagggcccagauga

SEQ ID NO: 1627689 - RNA, 19 nt, Homo sapiens
  misc_RNA (1)...(19): siRNA sense strand
agaugaggguccugagauu

SEQ ID NO: 1627690 - RNA, 19 nt, Homo sapiens
  misc_RNA (1)...(19): siRNA sense strand
gggcaaauaaguuggugaa

SEQ ID NO: 1627691 - RNA, 19 nt, Homo sapiens
  misc_RNA (1)...(19): siRNA sense strand
gggccagaaugaugucuuc

SEQ ID NO: 1627692 - RNA, 19 nt, Homo sapiens
  misc_RNA (1)...(19): siRNA sense strand
gaggcaagaggaccaagaa

SEQ ID NO: 1627693 - RNA, 19 nt, Homo sapiens
  misc_RNA (1)...(19): siRNA sense strand
gguggagccucagaauguu

SEQ ID NO: 1627694 - RNA, 19 nt, Homo sapiens
  misc_RNA (1)...(19): siRNA sense strand
ugagauucaucgcccagaa

SEQ ID NO: 1627695 - RNA, 19 nt, Homo sapiens
  misc_RNA (1)...(19): siRNA sense strand
ugauuaaggacuacaagaa

SEQ ID NO: 1627696 - RNA, 19 nt, Homo sapiens
  misc_RNA (1)...(19): siRNA sense strand
gaaacacuugccaaugaga

SEQ ID NO: 1627697 - RNA, 19 nt, Homo sapiens
  misc_RNA (1)...(19): siRNA sense strand
cagcaacccaccugaguau

SEQ ID NO: 1627698 - RNA, 19 nt, Homo sapiens
  misc_RNA (1)...(19): siRNA sense strand
gaagaauucggugcguuug

SEQ ID NO: 1627699 - RNA, 19 nt, Homo sapiens
  misc_RNA (1)...(19): siRNA sense strand
gauuaaggacuacaagaag

SEQ ID NO: 1627700 - RNA, 19 nt, Homo sapiens
  misc_RNA (1)...(19): siRNA sense strand
aaugaugucuucgauuuca

SEQ ID NO: 1627701 - RNA, 19 nt, Homo sapiens
  misc_RNA (1)...(19): siRNA sense strand
gcagcgaggaggagagaga

SEQ ID NO: 1627702 - RNA, 19 nt, Homo sapiens
  misc_RNA (1)...(19): siRNA sense strand
gaaugaugucuucgauuuc

SEQ ID NO: 1627703 - RNA, 19 nt, Homo sapiens
  misc_RNA (1)...(19): siRNA sense strand
caagaugaggguccugaga

SEQ ID NO: 1627704 - RNA, 19 nt, Homo sapiens
  misc_RNA (1)...(19): siRNA sense strand
gaagcagaaguaccuggaa

SEQ ID NO: 1627705 - RNA, 19 nt, Homo sapiens
  misc_RNA (1)...(19): siRNA sense strand
gaaggcaacgacuaugaag

SEQ ID NO: 1627706 - RNA, 19 nt, Homo sapiens
  misc_RNA (1)...(19): siRNA sense strand
caggagagggcaaauaagu

SEQ ID NO: 1627707 - RNA, 19 nt, Homo sapiens
  misc_RNA (1)...(19): siRNA sense strand
ggauauggccgaggaacau

SEQ ID NO: 1627708 - RNA, 19 nt, Homo sapiens
  misc_RNA (1)...(19): siRNA sense strand
gcagaaguaccuggaauac

SEQ ID NO: 1627709 - RNA, 19 nt, Homo sapiens
  misc_RNA (1)...(19): siRNA sense strand
aagcagaaguaccuggaau

SEQ ID NO: 1627710 - RNA, 19 nt, Homo sapiens
  misc_RNA (1)...(19): siRNA sense strand
acauuucccugagaucauu

SEQ ID NO: 1627711 - RNA, 19 nt, Homo sapiens
  misc_RNA (1)...(19): siRNA sense strand
ugaaggcaacgacuaugaa

SEQ ID NO: 1627712 - RNA, 19 nt, Homo sapiens
  misc_RNA (1)...(19): siRNA sense strand
gggaggaagagaugguuga

SEQ ID NO: 1627713 - RNA, 19 nt, Homo sapiens
  misc_RNA (1)...(19): siRNA sense strand
ggaugaagcgcugauugga

SEQ ID NO: 1627714 - RNA, 19 nt, Homo sapiens
  misc_RNA (1)...(19): siRNA sense strand
ugagggcccagaugaauau

SEQ ID NO: 1627715 - RNA, 19 nt, Homo sapiens
  misc_RNA (1)...(19): siRNA sense strand
aggcaacgacuaugaagaa

SEQ ID NO: 1627716 - RNA, 19 nt, Homo sapiens
  misc_RNA (1)...(19): siRNA sense strand
uccaggccuucgcaucuua

SEQ ID NO: 1627717 - RNA, 19 nt, Homo sapiens
  misc_RNA (1)...(19): siRNA sense strand
auuaaggacuacaagaaga

SEQ ID NO: 1627718 - RNA, 19 nt, Homo sapiens
  misc_RNA (1)...(19): siRNA sense strand
ugcaggagagggcaaauaa

SEQ ID NO: 1627719 - RNA, 19 nt, Homo sapiens
  misc_RNA (1)...(19): siRNA sense strand
agauguuagucaccaguaa

SEQ ID NO: 1627720 - RNA, 19 nt, Homo sapiens
  misc_RNA (1)...(19): siRNA sense strand
caacguacacccuggaaaa

SEQ ID NO: 1627721 - RNA, 19 nt, Homo sapiens
  misc_RNA (1)...(19): siRNA sense strand
ccacccaccuggagagcau

SEQ ID NO: 1627722 - RNA, 19 nt, Homo sapiens
  misc_RNA (1)...(19): siRNA sense strand
ggaggaagagaugguugaa

SEQ ID NO: 1627723 - RNA, 19 nt, Homo sapiens
  misc_RNA (1)...(19): siRNA sense strand
ggaggcaagaggaccaaga

SEQ ID NO: 1627724 - RNA, 19 nt, Homo sapiens
  misc_RNA (1)...(19): siRNA sense strand
cgucagcaguggcaccaau

SEQ ID NO: 1627725 - RNA, 19 nt, Homo sapiens
  misc_RNA (1)...(19): siRNA sense strand
gggaggcacuacgcaagau

SEQ ID NO: 1627726 - RNA, 19 nt, Homo sapiens
  misc_RNA (1)...(19): siRNA sense strand
gcaacguacacccuggaaa

SEQ ID NO: 1627727 - RNA, 19 nt, Homo sapiens
  misc_RNA (1)...(19): siRNA sense strand
gagcagcgaggaggagaga

SEQ ID NO: 1627728 - RNA, 19 nt, Homo sapiens
  misc_RNA (1)...(19): siRNA sense strand
ggccagauaccaucaguac

SEQ ID NO: 1627729 - RNA, 19 nt, Homo sapiens
  misc_RNA (1)...(19): siRNA sense strand
guggagcugggaugacaua

SEQ ID NO: 1627730 - RNA, 19 nt, Homo sapiens
  misc_RNA (1)...(19): siRNA sense strand
agacaauggauguggauau

SEQ ID NO: 1627731 - RNA, 19 nt, Homo sapiens
  misc_RNA (1)...(19): siRNA sense strand
caggcugagucuccucuug

SEQ ID NO: 1627732 - RNA, 19 nt, Homo sapiens
  misc_RNA (1)...(19): siRNA sense strand
ucauugaacgagcaacgua

SEQ ID NO: 1627733 - RNA, 19 nt, Homo sapiens
  misc_RNA (1)...(19): siRNA sense strand
caucaagcgcgcagacaug

SEQ ID NO: 1627734 - RNA, 19 nt, Homo sapiens
  misc_RNA (1)...(19): siRNA sense strand
gcuacaguguugaagacau

SEQ ID NO: 1627735 - RNA, 19 nt, Homo sapiens
  misc_RNA (1)...(19): siRNA sense strand
cagacaagcugcaggaauu

SEQ ID NO: 1627736 - RNA, 19 nt, Homo sapiens
  misc_RNA (1)...(19): siRNA sense strand
aaaccaugcugaagucauu

SEQ ID NO: 1627737 - RNA, 19 nt, Homo sapiens
  misc_RNA (1)...(19): siRNA sense strand
cagcauaucaaucccaaua

SEQ ID NO: 1627738 - RNA, 19 nt, Homo sapiens
  misc_RNA (1)...(19): siRNA sense strand
guaguacauuugaagauga

SEQ ID NO: 1627739 - RNA, 19 nt, Homo sapiens
  misc_RNA (1)...(19): siRNA sense strand
gcauaucaaucccaauaag

SEQ ID NO: 1627740 - RNA, 19 nt, Homo sapiens
  misc_RNA (1)...(19): siRNA sense strand
gcaggaauuccagggauua

SEQ ID NO: 1627741 - RNA, 19 nt, Homo sapiens
  misc_RNA (1)...(19): siRNA sense strand
gguaguacauuugaagaug

SEQ ID NO: 1627742 - RNA, 19 nt, Homo sapiens
  misc_RNA (1)...(19): siRNA sense strand
uaacuuugcccuccuccua

SEQ ID NO: 1627743 - RNA, 19 nt, Homo sapiens
  misc_RNA (1)...(19): siRNA sense strand
ccuaaagcuuucagaagaa

SEQ ID NO: 1627744 - RNA, 19 nt, Homo sapiens
  misc_RNA (1)...(19): siRNA sense strand
uugcaugaguuccugguua

SEQ ID NO: 1627745 - RNA, 19 nt, Homo sapiens
  misc_RNA (1)...(19): siRNA sense strand
guacugaagcagcauauca

SEQ ID NO: 1627746 - RNA, 19 nt, Homo sapiens
  misc_RNA (1)...(19): siRNA sense strand
uccuaaagcuuucagaaga

SEQ ID NO: 1627747 - RNA, 19 nt, Homo sapiens
  misc_RNA (1)...(19): siRNA sense strand
gaaaaccacaugaggaaaa

SEQ ID NO: 1627748 - RNA, 19 nt, Homo sapiens
  misc_RNA (1)...(19): siRNA sense strand
gaaaauggugugacugauu

SEQ ID NO: 1627749 - RNA, 19 nt, Homo sapiens
  misc_RNA (1)...(19): siRNA sense strand
ugcaugaguuccugguuaa

SEQ ID NO: 1627750 - RNA, 19 nt, Homo sapiens
  misc_RNA (1)...(19): siRNA sense strand
augaguuccugguuaauuu

SEQ ID NO: 1627751 - RNA, 19 nt, Homo sapiens
  misc_RNA (1)...(19): siRNA sense strand
caugcugaagucauuauua

SEQ ID NO: 1627752 - RNA, 19 nt, Homo sapiens
  misc_RNA (1)...(19): siRNA sense strand
ggauuacuccaacugaaga

SEQ ID NO: 1627753 - RNA, 19 nt, Homo sapiens
  misc_RNA (1)...(19): siRNA sense strand
caacuggagucuguuuuaa

SEQ ID NO: 1627754 - RNA, 19 nt, Homo sapiens
  misc_RNA (1)...(19): siRNA sense strand
gcaacuggagucuguuuua

SEQ ID NO: 1627755 - RNA, 19 nt, Homo sapiens
  misc_RNA (1)...(19): siRNA sense strand
ucaugcaacuggagucugu

SEQ ID NO: 1627756 - RNA, 19 nt, Homo sapiens
  misc_RNA (1)...(19): siRNA sense strand
guggaaguuugcaugaguu

SEQ ID NO: 1627757 - RNA, 19 nt, Homo sapiens
  misc_RNA (1)...(19): siRNA sense strand
uuugggcacuguugaugua

SEQ ID NO: 1627758 - RNA, 19 nt, Homo sapiens
  misc_RNA (1)...(19): siRNA sense strand
cuaaagcuuucagaagaau

SEQ ID NO: 1627759 - RNA, 19 nt, Homo sapiens
  misc_RNA (1)...(19): siRNA sense strand
cauaucaaucccaauaaga

SEQ ID NO: 1627760 - RNA, 19 nt, Homo sapiens
  misc_RNA (1)...(19): siRNA sense strand
gcugaagucauuauuaagg

SEQ ID NO: 1627761 - RNA, 19 nt, Homo sapiens
  misc_RNA (1)...(19): siRNA sense strand
caugaguuccugguuaauu

SEQ ID NO: 1627762 - RNA, 19 nt, Homo sapiens
  misc_RNA (1)...(19): siRNA sense strand
ggaauuccagggauuacuc

SEQ ID NO: 1627763 - RNA, 19 nt, Homo sapiens
  misc_RNA (1)...(19): siRNA sense strand
gggcacuguugauguacug

SEQ ID NO: 1627764 - RNA, 19 nt, Homo sapiens
  misc_RNA (1)...(19): siRNA sense strand
gaagaugaucaggaaguca

SEQ ID NO: 1627765 - RNA, 19 nt, Homo sapiens
  misc_RNA (1)...(19): siRNA sense strand
gcccuccuccuaaagcuuu

SEQ ID NO: 1627766 - RNA, 19 nt, Homo sapiens
  misc_RNA (1)...(19): siRNA sense strand
gaaaccaugcugaagucau

SEQ ID NO: 1627767 - RNA, 19 nt, Homo sapiens
  misc_RNA (1)...(19): siRNA sense strand
gauguacugaagcagcaua

SEQ ID NO: 1627768 - RNA, 19 nt, Homo sapiens
  misc_RNA (1)...(19): siRNA sense strand
gcacuguugauguacugaa

SEQ ID NO: 1627769 - RNA, 19 nt, Homo sapiens
  misc_RNA (1)...(19): siRNA sense strand
ugaagaugaucaggaaguc

SEQ ID NO: 1627770 - RNA, 19 nt, Homo sapiens
  misc_RNA (1)...(19): siRNA sense strand
gcuaugaagucuguuacac

SEQ ID NO: 1627771 - RNA, 19 nt, Homo sapiens
  misc_RNA (1)...(19): siRNA sense strand
cugguuaauuugcaugaga

SEQ ID NO: 1627772 - RNA, 19 nt, Homo sapiens
  misc_RNA (1)...(19): siRNA sense strand
gugacugauucucugaaga

SEQ ID NO: 1627773 - RNA, 19 nt, Homo sapiens
  misc_RNA (1)...(19): siRNA sense strand
aaaauggugugacugauuc

SEQ ID NO: 1627774 - RNA, 19 nt, Homo sapiens
  misc_RNA (1)...(19): siRNA sense strand
guacauuugaagaugauca

SEQ ID NO: 1627775 - RNA, 19 nt, Homo sapiens
  misc_RNA (1)...(19): siRNA sense strand
ugugaauaguggaaguuug

SEQ ID NO: 1627776 - RNA, 19 nt, Homo sapiens
  misc_RNA (1)...(19): siRNA sense strand
auuugaagaugaucaggaa

SEQ ID NO: 1627777 - RNA, 19 nt, Homo sapiens
  misc_RNA (1)...(19): siRNA sense strand
gggauuacuccaacugaag

SEQ ID NO: 1627778 - RNA, 19 nt, Homo sapiens
  misc_RNA (1)...(19): siRNA sense strand
ugaagcagcauaucaaucc

SEQ ID NO: 1627779 - RNA, 19 nt, Homo sapiens
  misc_RNA (1)...(19): siRNA sense strand
ccagacaagcugcaggaau

SEQ ID NO: 1627780 - RNA, 19 nt, Homo sapiens
  misc_RNA (1)...(19): siRNA sense strand
cagaugguaauggguagua

SEQ ID NO: 1627781 - RNA, 19 nt, Homo sapiens
  misc_RNA (1)...(19): siRNA sense strand
uugaaaccaugcugaaguc

SEQ ID NO: 1627782 - RNA, 19 nt, Homo sapiens
  misc_RNA (1)...(19): siRNA sense strand
uagauaaauggcucuccua

SEQ ID NO: 1627783 - RNA, 19 nt, Homo sapiens
  misc_RNA (1)...(19): siRNA sense strand
uguggucuccuucugguuu

SEQ ID NO: 1627784 - RNA, 19 nt, Homo sapiens
  misc_RNA (1)...(19): siRNA sense strand
gguggcagugugagugaaa

SEQ ID NO: 1627785 - RNA, 19 nt, Homo sapiens
  misc_RNA (1)...(19): siRNA sense strand
cugaagucauuauuaaggu

SEQ ID NO: 1627786 - RNA, 19 nt, Homo sapiens
  misc_RNA (1)...(19): siRNA sense strand
ugcaggaauuccagggauu

SEQ ID NO: 1627787 - RNA, 19 nt, Homo sapiens
  misc_RNA (1)...(19): siRNA sense strand
agggauuacuccaacugaa

SEQ ID NO: 1627788 - RNA, 19 nt, Homo sapiens
  misc_RNA (1)...(19): siRNA sense strand
gaaguuugcaugaguuccu

SEQ ID NO: 1627789 - RNA, 19 nt, Homo sapiens
  misc_RNA (1)...(19): siRNA sense strand
guggucuccuucugguuug

SEQ ID NO: 1627790 - RNA, 19 nt, Homo sapiens
  misc_RNA (1)...(19): siRNA sense strand
aguggaaguuugcaugagu

SEQ ID NO: 1627791 - RNA, 19 nt, Homo sapiens
  misc_RNA (1)...(19): siRNA sense strand
uaagacaucggacccuuuu

SEQ ID NO: 1627792 - RNA, 19 nt, Homo sapiens
  misc_RNA (1)...(19): siRNA sense strand
gaacuucagucaacauauu

SEQ ID NO: 1627793 - RNA, 19 nt, Homo sapiens
  misc_RNA (1)...(19): siRNA sense strand
gagagacccucguccuuua

SEQ ID NO: 1627794 - RNA, 19 nt, Homo sapiens
  misc_RNA (1)...(19): siRNA sense strand
cagacaagcugcaggaauu

SEQ ID NO: 1627795 - RNA, 19 nt, Homo sapiens
  misc_RNA (1)...(19): siRNA sense strand
gaguugagguuugcauaua

SEQ ID NO: 1627796 - RNA, 19 nt, Homo sapiens
  misc_RNA (1)...(19): siRNA sense strand
ggaagaagcuuggaucacu

SEQ ID NO: 1627797 - RNA, 19 nt, Homo sapiens
  misc_RNA (1)...(19): siRNA sense strand
ccacaguacuucuuagugu

SEQ ID NO: 1627798 - RNA, 19 nt, Homo sapiens
  misc_RNA (1)...(19): siRNA sense strand
aaaccaugcugaagucauu

SEQ ID NO: 1627799 - RNA, 19 nt, Homo sapiens
  misc_RNA (1)...(19): siRNA sense strand
cagcauaucaaucccaaua

SEQ ID NO: 1627800 - RNA, 19 nt, Homo sapiens
  misc_RNA (1)...(19): siRNA sense strand
guaguacauuugaagauga

SEQ ID NO: 1627801 - RNA, 19 nt, Homo sapiens
  misc_RNA (1)...(19): siRNA sense strand
ucgguuugaugaugaauua

SEQ ID NO: 1627802 - RNA, 19 nt, Homo sapiens
  misc_RNA (1)...(19): siRNA sense strand
gcucagauauugucagcau

SEQ ID NO: 1627803 - RNA, 19 nt, Homo sapiens
  misc_RNA (1)...(19): siRNA sense strand
gcauaucaaucccaauaag

SEQ ID NO: 1627804 - RNA, 19 nt, Homo sapiens
  misc_RNA (1)...(19): siRNA sense strand
gcaggaauuccagggauua

SEQ ID NO: 1627805 - RNA, 19 nt, Homo sapiens
  misc_RNA (1)...(19): siRNA sense strand
gacagguuauugaaacaaa

SEQ ID NO: 1627806 - RNA, 19 nt, Homo sapiens
  misc_RNA (1)...(19): siRNA sense strand
caacagauccuagaagaca

SEQ ID NO: 1627807 - RNA, 19 nt, Homo sapiens
  misc_RNA (1)...(19): siRNA sense strand
gguaguacauuugaagaug

SEQ ID NO: 1627808 - RNA, 19 nt, Homo sapiens
  misc_RNA (1)...(19): siRNA sense strand
guacuucaggauccuaaua

SEQ ID NO: 1627809 - RNA, 19 nt, Homo sapiens
  misc_RNA (1)...(19): siRNA sense strand
gaagagacugcaccuacuu

SEQ ID NO: 1627810 - RNA, 19 nt, Homo sapiens
  misc_RNA (1)...(19): siRNA sense strand
ccuagaagacaguaugaua

SEQ ID NO: 1627811 - RNA, 19 nt, Homo sapiens
  misc_RNA (1)...(19): siRNA sense strand
aacaaaguaugaacuggua

SEQ ID NO: 1627812 - RNA, 19 nt, Homo sapiens
  misc_RNA (1)...(19): siRNA sense strand
ccagaucgguuugaugaug

SEQ ID NO: 1627813 - RNA, 19 nt, Homo sapiens
  misc_RNA (1)...(19): siRNA sense strand
uaacuuugcccuccuccua

SEQ ID NO: 1627814 - RNA, 19 nt, Homo sapiens
  misc_RNA (1)...(19): siRNA sense strand
gaacugguaacaucaucaa

SEQ ID NO: 1627815 - RNA, 19 nt, Homo sapiens
  misc_RNA (1)...(19): siRNA sense strand
ccuaaagcuuucagaagaa

SEQ ID NO: 1627816 - RNA, 19 nt, Homo sapiens
  misc_RNA (1)...(19): siRNA sense strand
uugcaugaguuccugguua

SEQ ID NO: 1627817 - RNA, 19 nt, Homo sapiens
  misc_RNA (1)...(19): siRNA sense strand
guacugaagcagcauauca

SEQ ID NO: 1627818 - RNA, 19 nt, Homo sapiens
  misc_RNA (1)...(19): siRNA sense strand
uccuaaagcuuucagaaga

SEQ ID NO: 1627819 - RNA, 19 nt, Homo sapiens
  misc_RNA (1)...(19): siRNA sense strand
cagaucgguuugaugauga

SEQ ID NO: 1627820 - RNA, 19 nt, Homo sapiens
  misc_RNA (1)...(19): siRNA sense strand
cacaguacuucuuagugua

SEQ ID NO: 1627821 - RNA, 19 nt, Homo sapiens
  misc_RNA (1)...(19): siRNA sense strand
ggagggacagguuauugaa

SEQ ID NO: 1627822 - RNA, 19 nt, Homo sapiens
  misc_RNA (1)...(19): siRNA sense strand
aguaugaacugguaacauc

SEQ ID NO: 1627823 - RNA, 19 nt, Homo sapiens
  misc_RNA (1)...(19): siRNA sense strand
gaaaaccacaugaggaaaa

SEQ ID NO: 1627824 - RNA, 19 nt, Homo sapiens
  misc_RNA (1)...(19): siRNA sense strand
guaccugggcaaucuguuu

SEQ ID NO: 1627825 - RNA, 19 nt, Homo sapiens
  misc_RNA (1)...(19): siRNA sense strand
gaaccuuaaugaccaacag

SEQ ID NO: 1627826 - RNA, 19 nt, Homo sapiens
  misc_RNA (1)...(19): siRNA sense strand
gaaaauggugugacugauu

SEQ ID NO: 1627827 - RNA, 19 nt, Homo sapiens
  misc_RNA (1)...(19): siRNA sense strand
ugcaugaguuccugguuaa

SEQ ID NO: 1627828 - RNA, 19 nt, Homo sapiens
  misc_RNA (1)...(19): siRNA sense strand
aaccaccucugaagaaguu

SEQ ID NO: 1627829 - RNA, 19 nt, Homo sapiens
  misc_RNA (1)...(19): siRNA sense strand
augaguuccugguuaauuu

SEQ ID NO: 1627830 - RNA, 19 nt, Homo sapiens
  misc_RNA (1)...(19): siRNA sense strand
caugcugaagucauuauua

SEQ ID NO: 1627831 - RNA, 19 nt, Homo sapiens
  misc_RNA (1)...(19): siRNA sense strand
cuagaagacaguaugauau

SEQ ID NO: 1627832 - RNA, 19 nt, Homo sapiens
  misc_RNA (1)...(19): siRNA sense strand
ucaugcaacuggagucugu

SEQ ID NO: 1627833 - RNA, 19 nt, Homo sapiens
  misc_RNA (1)...(19): siRNA sense strand
acaggaguguccagaguug

SEQ ID NO: 1627834 - RNA, 19 nt, Homo sapiens
  misc_RNA (1)...(19): siRNA sense strand
ggauuacuccaacugaaga

SEQ ID NO: 1627835 - RNA, 19 nt, Homo sapiens
  misc_RNA (1)...(19): siRNA sense strand
ucuggccaguugcauaaua

SEQ ID NO: 1627836 - RNA, 19 nt, Homo sapiens
  misc_RNA (1)...(19): siRNA sense strand
caacuggagucuguuuuaa

SEQ ID NO: 1627837 - RNA, 19 nt, Homo sapiens
  misc_RNA (1)...(19): siRNA sense strand
gcaacuggagucuguuuua

SEQ ID NO: 1627838 - RNA, 19 nt, Homo sapiens
  misc_RNA (1)...(19): siRNA sense strand
gauccuagaagacaguaug

SEQ ID NO: 1627839 - RNA, 19 nt, Homo sapiens
  misc_RNA (1)...(19): siRNA sense strand
guugagguuugcauauaug

SEQ ID NO: 1627840 - RNA, 19 nt, Homo sapiens
  misc_RNA (1)...(19): siRNA sense strand
acacaaguuugauccagau

SEQ ID NO: 1627841 - RNA, 19 nt, Homo sapiens
  misc_RNA (1)...(19): siRNA sense strand
uuugggcacuguugaugua

SEQ ID NO: 1627842 - RNA, 19 nt, Homo sapiens
  misc_RNA (1)...(19): siRNA sense strand
gagggacagguuauugaaa

SEQ ID NO: 1627843 - RNA, 19 nt, Homo sapiens
  misc_RNA (1)...(19): siRNA sense strand
ggccaucuccacacaaguu

SEQ ID NO: 1627844 - RNA, 19 nt, Homo sapiens
  misc_RNA (1)...(19): siRNA sense strand
accaacagauccuagaaga

SEQ ID NO: 1627845 - RNA, 19 nt, Homo sapiens
  misc_RNA (1)...(19): siRNA sense strand
guggaaguuugcaugaguu

SEQ ID NO: 1627846 - RNA, 19 nt, Homo sapiens
  misc_RNA (1)...(19): siRNA sense strand
cuaaagcuuucagaagaau

SEQ ID NO: 1627847 - RNA, 19 nt, Homo sapiens
  misc_RNA (1)...(19): siRNA sense strand
agagagacccucguccuuu

SEQ ID NO: 1627848 - RNA, 19 nt, Homo sapiens
  misc_RNA (1)...(19): siRNA sense strand
cauaucaaucccaauaaga

SEQ ID NO: 1627849 - RNA, 19 nt, Homo sapiens
  misc_RNA (1)...(19): siRNA sense strand
ggacagguuauugaaacaa

SEQ ID NO: 1627850 - RNA, 19 nt, Homo sapiens
  misc_RNA (1)...(19): siRNA sense strand
gggacagguuauugaaaca

SEQ ID NO: 1627851 - RNA, 19 nt, Homo sapiens
  misc_RNA (1)...(19): siRNA sense strand
ugaagagacugcaccuacu

SEQ ID NO: 1627852 - RNA, 19 nt, Homo sapiens
  misc_RNA (1)...(19): siRNA sense strand
gcaugugcuuugugaaacu

SEQ ID NO: 1627853 - RNA, 19 nt, Homo sapiens
  misc_RNA (1)...(19): siRNA sense strand
ggaucacugucucaaagag

SEQ ID NO: 1627854 - RNA, 19 nt, Homo sapiens
  misc_RNA (1)...(19): siRNA sense strand
gcugaagucauuauuaagg

SEQ ID NO: 1627855 - RNA, 19 nt, Homo sapiens
  misc_RNA (1)...(19): siRNA sense strand
ugaaacaaaguaugaacug

SEQ ID NO: 1627856 - RNA, 19 nt, Homo sapiens
  misc_RNA (1)...(19): siRNA sense strand
gugaccacaguacuucuua

SEQ ID NO: 1627857 - RNA, 19 nt, Homo sapiens
  misc_RNA (1)...(19): siRNA sense strand
ggaaaugguccuguuacuc

SEQ ID NO: 1627858 - RNA, 19 nt, Homo sapiens
  misc_RNA (1)...(19): siRNA sense strand
cuggccaguugcauaauaa

SEQ ID NO: 1627859 - RNA, 19 nt, Homo sapiens
  misc_RNA (1)...(19): siRNA sense strand
uuucauugacuccuuagua

SEQ ID NO: 1627860 - RNA, 19 nt, Homo sapiens
  misc_RNA (1)...(19): siRNA sense strand
ggaacuucagucaacauau

SEQ ID NO: 1627861 - RNA, 19 nt, Homo sapiens
  misc_RNA (1)...(19): siRNA sense strand
gacugcaccuacuuucugu

SEQ ID NO: 1627862 - RNA, 19 nt, Homo sapiens
  misc_RNA (1)...(19): siRNA sense strand
ggaauuccagggauuacuc

SEQ ID NO: 1627863 - RNA, 19 nt, Homo sapiens
  misc_RNA (1)...(19): siRNA sense strand
cagaguugagguuugcaua

SEQ ID NO: 1627864 - RNA, 19 nt, Homo sapiens
  misc_RNA (1)...(19): siRNA sense strand
augaagagauaaaccaagu

SEQ ID NO: 1627865 - RNA, 19 nt, Homo sapiens
  misc_RNA (1)...(19): siRNA sense strand
caugaguuccugguuaauu

SEQ ID NO: 1627866 - RNA, 19 nt, Homo sapiens
  misc_RNA (1)...(19): siRNA sense strand
gggcacuguugauguacug

SEQ ID NO: 1627867 - RNA, 19 nt, Homo sapiens
  misc_RNA (1)...(19): siRNA sense strand
caucuccacacaaguuuga

SEQ ID NO: 1627868 - RNA, 19 nt, Homo sapiens
  misc_RNA (1)...(19): siRNA sense strand
gaagaugaucaggaaguca

SEQ ID NO: 1627869 - RNA, 19 nt, Homo sapiens
  misc_RNA (1)...(19): siRNA sense strand
gcccuccuccuaaagcuuu

SEQ ID NO: 1627870 - RNA, 19 nt, Homo sapiens
  misc_RNA (1)...(19): siRNA sense strand
gaaaccaugcugaagucau

SEQ ID NO: 1627871 - RNA, 19 nt, Homo sapiens
  misc_RNA (1)...(19): siRNA sense strand
gauguacugaagcagcaua

SEQ ID NO: 1627872 - RNA, 19 nt, Homo sapiens
  misc_RNA (1)...(19): siRNA sense strand
gcacuguugauguacugaa

SEQ ID NO: 1627873 - RNA, 19 nt, Homo sapiens
  misc_RNA (1)...(19): siRNA sense strand
ucucuggccaguugcauaa

SEQ ID NO: 1627874 - RNA, 19 nt, Homo sapiens
  misc_RNA (1)...(19): siRNA sense strand
ugaagaugaucaggaaguc

SEQ ID NO: 1627875 - RNA, 19 nt, Homo sapiens
  misc_RNA (1)...(19): siRNA sense strand
gcuaugaagucuguuacac

SEQ ID NO: 1627876 - RNA, 19 nt, Homo sapiens
  misc_RNA (1)...(19): siRNA sense strand
cugguuaauuugcaugaga

SEQ ID NO: 1627877 - RNA, 19 nt, Homo sapiens
  misc_RNA (1)...(19): siRNA sense strand
gugacugauucucugaaga

SEQ ID NO: 1627878 - RNA, 19 nt, Homo sapiens
  misc_RNA (1)...(19): siRNA sense strand
aaaauggugugacugauuc

SEQ ID NO: 1627879 - RNA, 19 nt, Homo sapiens
  misc_RNA (1)...(19): siRNA sense strand
guacauuugaagaugauca

SEQ ID NO: 1627880 - RNA, 19 nt, Homo sapiens
  misc_RNA (1)...(19): siRNA sense strand
ccuaauacuuggccaucuc

SEQ ID NO: 1627881 - RNA, 19 nt, Homo sapiens
  misc_RNA (1)...(19): siRNA sense strand
ucagauauugucagcaugu

SEQ ID NO: 1627882 - RNA, 19 nt, Homo sapiens
  misc_RNA (1)...(19): siRNA sense strand
cauugacuccuuaguacaa

SEQ ID NO: 1627883 - RNA, 19 nt, Homo sapiens
  misc_RNA (1)...(19): siRNA sense strand
ugaagcagcauaucaaucc

SEQ ID NO: 1627884 - RNA, 19 nt, Homo sapiens
  misc_RNA (1)...(19): siRNA sense strand
gggauuacuccaacugaag

SEQ ID NO: 1627885 - RNA, 19 nt, Homo sapiens
  misc_RNA (1)...(19): siRNA sense strand
aguugagguuugcauauau

SEQ ID NO: 1627886 - RNA, 19 nt, Homo sapiens
  misc_RNA (1)...(19): siRNA sense strand
uucaggauccuaauacuug

SEQ ID NO: 1627887 - RNA, 19 nt, Homo sapiens
  misc_RNA (1)...(19): siRNA sense strand
ugugaauaguggaaguuug

SEQ ID NO: 1627888 - RNA, 19 nt, Homo sapiens
  misc_RNA (1)...(19): siRNA sense strand
cauaaaagaacgaaaagga

SEQ ID NO: 1627889 - RNA, 19 nt, Homo sapiens
  misc_RNA (1)...(19): siRNA sense strand
auuugaagaugaucaggaa

SEQ ID NO: 1627890 - RNA, 19 nt, Homo sapiens
  misc_RNA (1)...(19): siRNA sense strand
ccagacaagcugcaggaau

SEQ ID NO: 1627891 - RNA, 19 nt, Homo sapiens
  misc_RNA (1)...(19): siRNA sense strand
uuggaucacugucucaaag

SEQ ID NO: 1627892 - RNA, 19 nt, Homo sapiens
  misc_RNA (1)...(19): siRNA sense strand
gaagaugacugaguucuag

SEQ ID NO: 1627893 - RNA, 19 nt, Homo sapiens
  misc_RNA (1)...(19): siRNA sense strand
caagaugggcuaugaguuu

SEQ ID NO: 1627894 - RNA, 19 nt, Homo sapiens
  misc_RNA (1)...(19): siRNA sense strand
acaagaagaugacugaguu

SEQ ID NO: 1627895 - RNA, 19 nt, Homo sapiens
  misc_RNA (1)...(19): siRNA sense strand
ggacaacggcuacuacaca

SEQ ID NO: 1627896 - RNA, 19 nt, Homo sapiens
  misc_RNA (1)...(19): siRNA sense strand
ucaccaagaugggcuauga

SEQ ID NO: 1627897 - RNA, 19 nt, Homo sapiens
  misc_RNA (1)...(19): siRNA sense strand
ccaggaagaugcugaguac

SEQ ID NO: 1627898 - RNA, 19 nt, Homo sapiens
  misc_RNA (1)...(19): siRNA sense strand
gcagacacccacaagaaga

SEQ ID NO: 1627899 - RNA, 19 nt, Homo sapiens
  misc_RNA (1)...(19): siRNA sense strand
cuacuacacagucaaguuu

SEQ ID NO: 1627900 - RNA, 19 nt, Homo sapiens
  misc_RNA (1)...(19): siRNA sense strand
gcuccagacuccucaccaa

SEQ ID NO: 1627901 - RNA, 19 nt, Homo sapiens
  misc_RNA (1)...(19): siRNA sense strand
ggaggagcaaggacaugua

SEQ ID NO: 1627902 - RNA, 19 nt, Homo sapiens
  misc_RNA (1)...(19): siRNA sense strand
gaggugcacacgcgaggua

SEQ ID NO: 1627903 - RNA, 19 nt, Homo sapiens
  misc_RNA (1)...(19): siRNA sense strand
gcaaggcuggcaccaacaa

SEQ ID NO: 1627904 - RNA, 19 nt, Homo sapiens
  misc_RNA (1)...(19): siRNA sense strand
ccagacuccucaccaagau

SEQ ID NO: 1627905 - RNA, 19 nt, Homo sapiens
  misc_RNA (1)...(19): siRNA sense strand
gaaggcagacacccacaag

SEQ ID NO: 1627906 - RNA, 19 nt, Homo sapiens
  misc_RNA (1)...(19): siRNA sense strand
cauccaugcugugguguug

SEQ ID NO: 1627907 - RNA, 19 nt, Homo sapiens
  misc_RNA (1)...(19): siRNA sense strand
gcuacuacacagucaaguu

SEQ ID NO: 1627908 - RNA, 19 nt, Homo sapiens
  misc_RNA (1)...(19): siRNA sense strand
gccaggaagaugcugagua

SEQ ID NO: 1627909 - RNA, 19 nt, Homo sapiens
  misc_RNA (1)...(19): siRNA sense strand
aagaugggcuaugaguuug

SEQ ID NO: 1627910 - RNA, 19 nt, Homo sapiens
  misc_RNA (1)...(19): siRNA sense strand
ggaaggcagacacccacaa

SEQ ID NO: 1627911 - RNA, 19 nt, Homo sapiens
  misc_RNA (1)...(19): siRNA sense strand
guacgggugacuccagcua

SEQ ID NO: 1627912 - RNA, 19 nt, Homo sapiens
  misc_RNA (1)...(19): siRNA sense strand
gaacccagcgggacaucag

SEQ ID NO: 1627913 - RNA, 19 nt, Homo sapiens
  misc_RNA (1)...(19): siRNA sense strand
gaagagcugagugggacaa

SEQ ID NO: 1627914 - RNA, 19 nt, Homo sapiens
  misc_RNA (1)...(19): siRNA sense strand
aggcagacacccacaagaa

SEQ ID NO: 1627915 - RNA, 19 nt, Homo sapiens
  misc_RNA (1)...(19): siRNA sense strand
uggagacccugcagaagca

SEQ ID NO: 1627916 - RNA, 19 nt, Homo sapiens
  misc_RNA (1)...(19): siRNA sense strand
gcagguggucucucuggau

SEQ ID NO: 1627917 - RNA, 19 nt, Homo sapiens
  misc_RNA (1)...(19): siRNA sense strand
gagcugagugggacaaagg

SEQ ID NO: 1627918 - RNA, 19 nt, Homo sapiens
  misc_RNA (1)...(19): siRNA sense strand
ccaagaugggcuaugaguu

SEQ ID NO: 1627919 - RNA, 19 nt, Homo sapiens
  misc_RNA (1)...(19): siRNA sense strand
ggagcaaggacauguacca

SEQ ID NO: 1627920 - RNA, 19 nt, Homo sapiens
  misc_RNA (1)...(19): siRNA sense strand
uccgugugcuuuaccugua

SEQ ID NO: 1627921 - RNA, 19 nt, Homo sapiens
  misc_RNA (1)...(19): siRNA sense strand
ggugcacacgcgagguaua

SEQ ID NO: 1627922 - RNA, 19 nt, Homo sapiens
  misc_RNA (1)...(19): siRNA sense strand
gcccagcuccucggaaugu

SEQ ID NO: 1627923 - RNA, 19 nt, Homo sapiens
  misc_RNA (1)...(19): siRNA sense strand
ccacucacaagucucugaa

SEQ ID NO: 1627924 - RNA, 19 nt, Homo sapiens
  misc_RNA (1)...(19): siRNA sense strand
gagcagaggaaggcagaca

SEQ ID NO: 1627925 - RNA, 19 nt, Homo sapiens
  misc_RNA (1)...(19): siRNA sense strand
ggacgaggaagagcugagu

SEQ ID NO: 1627926 - RNA, 19 nt, Homo sapiens
  misc_RNA (1)...(19): siRNA sense strand
ggaggaggagcaaggacau

SEQ ID NO: 1627927 - RNA, 19 nt, Homo sapiens
  misc_RNA (1)...(19): siRNA sense strand
agagggagaggacgaggaa

SEQ ID NO: 1627928 - RNA, 19 nt, Homo sapiens
  misc_RNA (1)...(19): siRNA sense strand
cugcgugucuggccaagca

SEQ ID NO: 1627929 - RNA, 19 nt, Homo sapiens
  misc_RNA (1)...(19): siRNA sense strand
caagaagaugacugaguuc

SEQ ID NO: 1627930 - RNA, 19 nt, Homo sapiens
  misc_RNA (1)...(19): siRNA sense strand
gcggguguccgugugcuuu

SEQ ID NO: 1627931 - RNA, 19 nt, Homo sapiens
  misc_RNA (1)...(19): siRNA sense strand
agacugaggagaagaucga

SEQ ID NO: 1627932 - RNA, 19 nt, Homo sapiens
  misc_RNA (1)...(19): siRNA sense strand
gaggagcaaggacauguac

SEQ ID NO: 1627933 - RNA, 19 nt, Homo sapiens
  misc_RNA (1)...(19): siRNA sense strand
ggacaacggcuacuacaca

SEQ ID NO: 1627934 - RNA, 19 nt, Homo sapiens
  misc_RNA (1)...(19): siRNA sense strand
ccaggaagaugcugaguac

SEQ ID NO: 1627935 - RNA, 19 nt, Homo sapiens
  misc_RNA (1)...(19): siRNA sense strand
cuacuacacagucaaguuu

SEQ ID NO: 1627936 - RNA, 19 nt, Homo sapiens
  misc_RNA (1)...(19): siRNA sense strand
gccaggaagaugcugagua

SEQ ID NO: 1627937 - RNA, 19 nt, Homo sapiens
  misc_RNA (1)...(19): siRNA sense strand
gcuacuacacagucaaguu

SEQ ID NO: 1627938 - RNA, 19 nt, Homo sapiens
  misc_RNA (1)...(19): siRNA sense strand
guacgggugacuccagcua

SEQ ID NO: 1627939 - RNA, 19 nt, Homo sapiens
  misc_RNA (1)...(19): siRNA sense strand
gaagagcugagugggacaa

SEQ ID NO: 1627940 - RNA, 19 nt, Homo sapiens
  misc_RNA (1)...(19): siRNA sense strand
gcagguggucucucuggau

SEQ ID NO: 1627941 - RNA, 19 nt, Homo sapiens
  misc_RNA (1)...(19): siRNA sense strand
gagcugagugggacaaagg

SEQ ID NO: 1627942 - RNA, 19 nt, Homo sapiens
  misc_RNA (1)...(19): siRNA sense strand
uccgugugcuuuaccugua

SEQ ID NO: 1627943 - RNA, 19 nt, Homo sapiens
  misc_RNA (1)...(19): siRNA sense strand
agagggagaggacgaggaa

SEQ ID NO: 1627944 - RNA, 19 nt, Homo sapiens
  misc_RNA (1)...(19): siRNA sense strand
ccacucacaagucucugaa

SEQ ID NO: 1627945 - RNA, 19 nt, Homo sapiens
  misc_RNA (1)...(19): siRNA sense strand
ggacgaggaagagcugagu

SEQ ID NO: 1627946 - RNA, 19 nt, Homo sapiens
  misc_RNA (1)...(19): siRNA sense strand
gcggguguccgugugcuuu

SEQ ID NO: 1627947 - RNA, 19 nt, Homo sapiens
  misc_RNA (1)...(19): siRNA sense strand
cugcgugucuggccaagca

SEQ ID NO: 1627948 - RNA, 19 nt, Homo sapiens
  misc_RNA (1)...(19): siRNA sense strand
gaagaugacugaguucuag

SEQ ID NO: 1627949 - RNA, 19 nt, Homo sapiens
  misc_RNA (1)...(19): siRNA sense strand
caagaugggcuaugaguuu

SEQ ID NO: 1627950 - RNA, 19 nt, Homo sapiens
  misc_RNA (1)...(19): siRNA sense strand
acaagaagaugacugaguu

SEQ ID NO: 1627951 - RNA, 19 nt, Homo sapiens
  misc_RNA (1)...(19): siRNA sense strand
ggacaacggcuacuacaca

SEQ ID NO: 1627952 - RNA, 19 nt, Homo sapiens
  misc_RNA (1)...(19): siRNA sense strand
ucaccaagaugggcuauga

SEQ ID NO: 1627953 - RNA, 19 nt, Homo sapiens
  misc_RNA (1)...(19): siRNA sense strand
ccaggaagaugcugaguac

SEQ ID NO: 1627954 - RNA, 19 nt, Homo sapiens
  misc_RNA (1)...(19): siRNA sense strand
gcagacacccacaagaaga

SEQ ID NO: 1627955 - RNA, 19 nt, Homo sapiens
  misc_RNA (1)...(19): siRNA sense strand
cuacuacacagucaaguuu

SEQ ID NO: 1627956 - RNA, 19 nt, Homo sapiens
  misc_RNA (1)...(19): siRNA sense strand
gcuccagacuccucaccaa

SEQ ID NO: 1627957 - RNA, 19 nt, Homo sapiens
  misc_RNA (1)...(19): siRNA sense strand
ggaggagcaaggacaugua

SEQ ID NO: 1627958 - RNA, 19 nt, Homo sapiens
  misc_RNA (1)...(19): siRNA sense strand
gaggugcacacgcgaggua

SEQ ID NO: 1627959 - RNA, 19 nt, Homo sapiens
  misc_RNA (1)...(19): siRNA sense strand
gcaaggcuggcaccaacaa

SEQ ID NO: 1627960 - RNA, 19 nt, Homo sapiens
  misc_RNA (1)...(19): siRNA sense strand
ccagacuccucaccaagau

SEQ ID NO: 1627961 - RNA, 19 nt, Homo sapiens
  misc_RNA (1)...(19): siRNA sense strand
gaaggcagacacccacaag

SEQ ID NO: 1627962 - RNA, 19 nt, Homo sapiens
  misc_RNA (1)...(19): siRNA sense strand
cauccaugcugugguguug

SEQ ID NO: 1627963 - RNA, 19 nt, Homo sapiens
  misc_RNA (1)...(19): siRNA sense strand
gcuacuacacagucaaguu

SEQ ID NO: 1627964 - RNA, 19 nt, Homo sapiens
  misc_RNA (1)...(19): siRNA sense strand
gccaggaagaugcugagua

SEQ ID NO: 1627965 - RNA, 19 nt, Homo sapiens
  misc_RNA (1)...(19): siRNA sense strand
aagaugggcuaugaguuug

SEQ ID NO: 1627966 - RNA, 19 nt, Homo sapiens
  misc_RNA (1)...(19): siRNA sense strand
ggaaggcagacacccacaa

SEQ ID NO: 1627967 - RNA, 19 nt, Homo sapiens
  misc_RNA (1)...(19): siRNA sense strand
guacgggugacuccagcua

SEQ ID NO: 1627968 - RNA, 19 nt, Homo sapiens
  misc_RNA (1)...(19): siRNA sense strand
gaacccagcgggacaucag

SEQ ID NO: 1627969 - RNA, 19 nt, Homo sapiens
  misc_RNA (1)...(19): siRNA sense strand
gaagagcugagugggacaa

SEQ ID NO: 1627970 - RNA, 19 nt, Homo sapiens
  misc_RNA (1)...(19): siRNA sense strand
aggcagacacccacaagaa

SEQ ID NO: 1627971 - RNA, 19 nt, Homo sapiens
  misc_RNA (1)...(19): siRNA sense strand
uggagacccugcagaagca

SEQ ID NO: 1627972 - RNA, 19 nt, Homo sapiens
  misc_RNA (1)...(19): siRNA sense strand
gcagguggucucucuggau

SEQ ID NO: 1627973 - RNA, 19 nt, Homo sapiens
  misc_RNA (1)...(19): siRNA sense strand
gagcugagugggacaaagg

SEQ ID NO: 1627974 - RNA, 19 nt, Homo sapiens
  misc_RNA (1)...(19): siRNA sense strand
ccaagaugggcuaugaguu

SEQ ID NO: 1627975 - RNA, 19 nt, Homo sapiens
  misc_RNA (1)...(19): siRNA sense strand
ggagcaaggacauguacca

SEQ ID NO: 1627976 - RNA, 19 nt, Homo sapiens
  misc_RNA (1)...(19): siRNA sense strand
uccgugugcuuuaccugua

SEQ ID NO: 1627977 - RNA, 19 nt, Homo sapiens
  misc_RNA (1)...(19): siRNA sense strand
ggugcacacgcgagguaua

SEQ ID NO: 1627978 - RNA, 19 nt, Homo sapiens
  misc_RNA (1)...(19): siRNA sense strand
gcccagcuccucggaaugu

SEQ ID NO: 1627979 - RNA, 19 nt, Homo sapiens
  misc_RNA (1)...(19): siRNA sense strand
ccacucacaagucucugaa

SEQ ID NO: 1627980 - RNA, 19 nt, Homo sapiens
  misc_RNA (1)...(19): siRNA sense strand
gagcagaggaaggcagaca

SEQ ID NO: 1627981 - RNA, 19 nt, Homo sapiens
  misc_RNA (1)...(19): siRNA sense strand
ggacgaggaagagcugagu

SEQ ID NO: 1627982 - RNA, 19 nt, Homo sapiens
  misc_RNA (1)...(19): siRNA sense strand
ggaggaggagcaaggacau

SEQ ID NO: 1627983 - RNA, 19 nt, Homo sapiens
  misc_RNA (1)...(19): siRNA sense strand
agagggagaggacgaggaa

SEQ ID NO: 1627984 - RNA, 19 nt, Homo sapiens
  misc_RNA (1)...(19): siRNA sense strand
cugcgugucuggccaagca

SEQ ID NO: 1627985 - RNA, 19 nt, Homo sapiens
  misc_RNA (1)...(19): siRNA sense strand
caagaagaugacugaguuc

SEQ ID NO: 1627986 - RNA, 19 nt, Homo sapiens
  misc_RNA (1)...(19): siRNA sense strand
gcggguguccgugugcuuu

SEQ ID NO: 1627987 - RNA, 19 nt, Homo sapiens
  misc_RNA (1)...(19): siRNA sense strand
agacugaggagaagaucga

SEQ ID NO: 1627988 - RNA, 19 nt, Homo sapiens
  misc_RNA (1)...(19): siRNA sense strand
gaggagcaaggacauguac

SEQ ID NO: 1627989 - RNA, 19 nt, Homo sapiens
  misc_RNA (1)...(19): siRNA sense strand
gaagaugacugaguucuag

SEQ ID NO: 1627990 - RNA, 19 nt, Homo sapiens
  misc_RNA (1)...(19): siRNA sense strand
caagaugggcuaugaguuu

SEQ ID NO: 1627991 - RNA, 19 nt, Homo sapiens
  misc_RNA (1)...(19): siRNA sense strand
acaagaagaugacugaguu

SEQ ID NO: 1627992 - RNA, 19 nt, Homo sapiens
  misc_RNA (1)...(19): siRNA sense strand
ggacaacggcuacuacaca

SEQ ID NO: 1627993 - RNA, 19 nt, Homo sapiens
  misc_RNA (1)...(19): siRNA sense strand
ucaccaagaugggcuauga

SEQ ID NO: 1627994 - RNA, 19 nt, Homo sapiens
  misc_RNA (1)...(19): siRNA sense strand
ccaggaagaugcugaguac

SEQ ID NO: 1627995 - RNA, 19 nt, Homo sapiens
  misc_RNA (1)...(19): siRNA sense strand
gcagacacccacaagaaga

SEQ ID NO: 1627996 - RNA, 19 nt, Homo sapiens
  misc_RNA (1)...(19): siRNA sense strand
cuacuacacagucaaguuu

SEQ ID NO: 1627997 - RNA, 19 nt, Homo sapiens
  misc_RNA (1)...(19): siRNA sense strand
gcuccagacuccucaccaa

SEQ ID NO: 1627998 - RNA, 19 nt, Homo sapiens
  misc_RNA (1)...(19): siRNA sense strand
ggaggagcaaggacaugua

SEQ ID NO: 1627999 - RNA, 19 nt, Homo sapiens
  misc_RNA (1)...(19): siRNA sense strand
gaggugcacacgcgaggua

SEQ ID NO: 1628000 - RNA, 19 nt, Homo sapiens
  misc_RNA (1)...(19): siRNA sense strand
gcaaggcuggcaccaacaa

SEQ ID NO: 1628001 - RNA, 19 nt, Homo sapiens
  misc_RNA (1)...(19): siRNA sense strand
ccagacuccucaccaagau

SEQ ID NO: 1628002 - RNA, 19 nt, Homo sapiens
  misc_RNA (1)...(19): siRNA sense strand
gaaggcagacacccacaag

SEQ ID NO: 1628003 - RNA, 19 nt, Homo sapiens
  misc_RNA (1)...(19): siRNA sense strand
cauccaugcugugguguug

SEQ ID NO: 1628004 - RNA, 19 nt, Homo sapiens
  misc_RNA (1)...(19): siRNA sense strand
gcuacuacacagucaaguu

SEQ ID NO: 1628005 - RNA, 19 nt, Homo sapiens
  misc_RNA (1)...(19): siRNA sense strand
gccaggaagaugcugagua

SEQ ID NO: 1628006 - RNA, 19 nt, Homo sapiens
  misc_RNA (1)...(19): siRNA sense strand
aagaugggcuaugaguuug

SEQ ID NO: 1628007 - RNA, 19 nt, Homo sapiens
  misc_RNA (1)...(19): siRNA sense strand
ggaaggcagacacccacaa

SEQ ID NO: 1628008 - RNA, 19 nt, Homo sapiens
  misc_RNA (1)...(19): siRNA sense strand
guacgggugacuccagcua

SEQ ID NO: 1628009 - RNA, 19 nt, Homo sapiens
  misc_RNA (1)...(19): siRNA sense strand
gaacccagcgggacaucag

SEQ ID NO: 1628010 - RNA, 19 nt, Homo sapiens
  misc_RNA (1)...(19): siRNA sense strand
gaagagcugagugggacaa

SEQ ID NO: 1628011 - RNA, 19 nt, Homo sapiens
  misc_RNA (1)...(19): siRNA sense strand
aggcagacacccacaagaa

SEQ ID NO: 1628012 - RNA, 19 nt, Homo sapiens
  misc_RNA (1)...(19): siRNA sense strand
uggagacccugcagaagca

SEQ ID NO: 1628013 - RNA, 19 nt, Homo sapiens
  misc_RNA (1)...(19): siRNA sense strand
gcagguggucucucuggau

SEQ ID NO: 1628014 - RNA, 19 nt, Homo sapiens
  misc_RNA (1)...(19): siRNA sense strand
gagcugagugggacaaagg

SEQ ID NO: 1628015 - RNA, 19 nt, Homo sapiens
  misc_RNA (1)...(19): siRNA sense strand
ccaagaugggcuaugaguu

SEQ ID NO: 1628016 - RNA, 19 nt, Homo sapiens
  misc_RNA (1)...(19): siRNA sense strand
ggagcaaggacauguacca

SEQ ID NO: 1628017 - RNA, 19 nt, Homo sapiens
  misc_RNA (1)...(19): siRNA sense strand
uccgugugcuuuaccugua

SEQ ID NO: 1628018 - RNA, 19 nt, Homo sapiens
  misc_RNA (1)...(19): siRNA sense strand
ggugcacacgcgagguaua

SEQ ID NO: 1628019 - RNA, 19 nt, Homo sapiens
  misc_RNA (1)...(19): siRNA sense strand
gcccagcuccucggaaugu

SEQ ID NO: 1628020 - RNA, 19 nt, Homo sapiens
  misc_RNA (1)...(19): siRNA sense strand
ccacucacaagucucugaa

SEQ ID NO: 1628021 - RNA, 19 nt, Homo sapiens
  misc_RNA (1)...(19): siRNA sense strand
gagcagaggaaggcagaca

SEQ ID NO: 1628022 - RNA, 19 nt, Homo sapiens
  misc_RNA (1)...(19): siRNA sense strand
ggacgaggaagagcugagu

SEQ ID NO: 1628023 - RNA, 19 nt, Homo sapiens
  misc_RNA (1)...(19): siRNA sense strand
ggaggaggagcaaggacau

SEQ ID NO: 1628024 - RNA, 19 nt, Homo sapiens
  misc_RNA (1)...(19): siRNA sense strand
agagggagaggacgaggaa

SEQ ID NO: 1628025 - RNA, 19 nt, Homo sapiens
  misc_RNA (1)...(19): siRNA sense strand
cugcgugucuggccaagca

SEQ ID NO: 1628026 - RNA, 19 nt, Homo sapiens
  misc_RNA (1)...(19): siRNA sense strand
caagaagaugacugaguuc

SEQ ID NO: 1628027 - RNA, 19 nt, Homo sapiens
  misc_RNA (1)...(19): siRNA sense strand
gcggguguccgugugcuuu

SEQ ID NO: 1628028 - RNA, 19 nt, Homo sapiens
  misc_RNA (1)...(19): siRNA sense strand
agacugaggagaagaucga

SEQ ID NO: 1628029 - RNA, 19 nt, Homo sapiens
  misc_RNA (1)...(19): siRNA sense strand
gaggagcaaggacauguac

SEQ ID NO: 1628030 - RNA, 19 nt, Homo sapiens
  misc_RNA (1)...(19): siRNA sense strand
ggacaacggcuacuacaca

SEQ ID NO: 1628031 - RNA, 19 nt, Homo sapiens
  misc_RNA (1)...(19): siRNA sense strand
ccaggaagaugcugaguac

SEQ ID NO: 1628032 - RNA, 19 nt, Homo sapiens
  misc_RNA (1)...(19): siRNA sense strand
cuacuacacagucaaguuu

SEQ ID NO: 1628033 - RNA, 19 nt, Homo sapiens
  misc_RNA (1)...(19): siRNA sense strand
gccaggaagaugcugagua

SEQ ID NO: 1628034 - RNA, 19 nt, Homo sapiens
  misc_RNA (1)...(19): siRNA sense strand
gcuacuacacagucaaguu

SEQ ID NO: 1628035 - RNA, 19 nt, Homo sapiens
  misc_RNA (1)...(19): siRNA sense strand
guacgggugacuccagcua

SEQ ID NO: 1628036 - RNA, 19 nt, Homo sapiens
  misc_RNA (1)...(19): siRNA sense strand
gaagagcugagugggacaa

SEQ ID NO: 1628037 - RNA, 19 nt, Homo sapiens
  misc_RNA (1)...(19): siRNA sense strand
gcagguggucucucuggau

SEQ ID NO: 1628038 - RNA, 19 nt, Homo sapiens
  misc_RNA (1)...(19): siRNA sense strand
gagcugagugggacaaagg

SEQ ID NO: 1628039 - RNA, 19 nt, Homo sapiens
  misc_RNA (1)...(19): siRNA sense strand
uccgugugcuuuaccugua

SEQ ID NO: 1628040 - RNA, 19 nt, Homo sapiens
  misc_RNA (1)...(19): siRNA sense strand
agagggagaggacgaggaa

SEQ ID NO: 1628041 - RNA, 19 nt, Homo sapiens
  misc_RNA (1)...(19): siRNA sense strand
ccacucacaagucucugaa

SEQ ID NO: 1628042 - RNA, 19 nt, Homo sapiens
  misc_RNA (1)...(19): siRNA sense strand
ggacgaggaagagcugagu

SEQ ID NO: 1628043 - RNA, 19 nt, Homo sapiens
  misc_RNA (1)...(19): siRNA sense strand
gcggguguccgugugcuuu

SEQ ID NO: 1628044 - RNA, 19 nt, Homo sapiens
  misc_RNA (1)...(19): siRNA sense strand
cugcgugucuggccaagca

SEQ ID NO: 1628045 - RNA, 19 nt, Homo sapiens
  misc_RNA (1)...(19): siRNA sense strand
gaagaugacugaguucuag

SEQ ID NO: 1628046 - RNA, 19 nt, Homo sapiens
  misc_RNA (1)...(19): siRNA sense strand
caagaugggcuaugaguuu

SEQ ID NO: 1628047 - RNA, 19 nt, Homo sapiens
  misc_RNA (1)...(19): siRNA sense strand
acaagaagaugacugaguu

SEQ ID NO: 1628048 - RNA, 19 nt, Homo sapiens
  misc_RNA (1)...(19): siRNA sense strand
ggacaacggcuacuacaca

SEQ ID NO: 1628049 - RNA, 19 nt, Homo sapiens
  misc_RNA (1)...(19): siRNA sense strand
ucaccaagaugggcuauga

SEQ ID NO: 1628050 - RNA, 19 nt, Homo sapiens
  misc_RNA (1)...(19): siRNA sense strand
ccaggaagaugcugaguac

SEQ ID NO: 1628051 - RNA, 19 nt, Homo sapiens
  misc_RNA (1)...(19): siRNA sense strand
gcagacacccacaagaaga

SEQ ID NO: 1628052 - RNA, 19 nt, Homo sapiens
  misc_RNA (1)...(19): siRNA sense strand
cuacuacacagucaaguuu

SEQ ID NO: 1628053 - RNA, 19 nt, Homo sapiens
  misc_RNA (1)...(19): siRNA sense strand
gcuccagacuccucaccaa

SEQ ID NO: 1628054 - RNA, 19 nt, Homo sapiens
  misc_RNA (1)...(19): siRNA sense strand
ggaggagcaaggacaugua

SEQ ID NO: 1628055 - RNA, 19 nt, Homo sapiens
  misc_RNA (1)...(19): siRNA sense strand
gaggugcacacgcgaggua

SEQ ID NO: 1628056 - RNA, 19 nt, Homo sapiens
  misc_RNA (1)...(19): siRNA sense strand
gcaaggcuggcaccaacaa

SEQ ID NO: 1628057 - RNA, 19 nt, Homo sapiens
  misc_RNA (1)...(19): siRNA sense strand
ccagacuccucaccaagau

SEQ ID NO: 1628058 - RNA, 19 nt, Homo sapiens
  misc_RNA (1)...(19): siRNA sense strand
gaaggcagacacccacaag

SEQ ID NO: 1628059 - RNA, 19 nt, Homo sapiens
  misc_RNA (1)...(19): siRNA sense strand
cauccaugcugugguguug

SEQ ID NO: 1628060 - RNA, 19 nt, Homo sapiens
  misc_RNA (1)...(19): siRNA sense strand
gcuacuacacagucaaguu

SEQ ID NO: 1628061 - RNA, 19 nt, Homo sapiens
  misc_RNA (1)...(19): siRNA sense strand
gccaggaagaugcugagua

SEQ ID NO: 1628062 - RNA, 19 nt, Homo sapiens
  misc_RNA (1)...(19): siRNA sense strand
aagaugggcuaugaguuug

SEQ ID NO: 1628063 - RNA, 19 nt, Homo sapiens
  misc_RNA (1)...(19): siRNA sense strand
ggaaggcagacacccacaa

SEQ ID NO: 1628064 - RNA, 19 nt, Homo sapiens
  misc_RNA (1)...(19): siRNA sense strand
guacgggugacuccagcua

SEQ ID NO: 1628065 - RNA, 19 nt, Homo sapiens
  misc_RNA (1)...(19): siRNA sense strand
gaacccagcgggacaucag

SEQ ID NO: 1628066 - RNA, 19 nt, Homo sapiens
  misc_RNA (1)...(19): siRNA sense strand
gaagagcugagugggacaa

SEQ ID NO: 1628067 - RNA, 19 nt, Homo sapiens
  misc_RNA (1)...(19): siRNA sense strand
aggcagacacccacaagaa

SEQ ID NO: 1628068 - RNA, 19 nt, Homo sapiens
  misc_RNA (1)...(19): siRNA sense strand
uggagacccugcagaagca

SEQ ID NO: 1628069 - RNA, 19 nt, Homo sapiens
  misc_RNA (1)...(19): siRNA sense strand
gcagguggucucucuggau

SEQ ID NO: 1628070 - RNA, 19 nt, Homo sapiens
  misc_RNA (1)...(19): siRNA sense strand
gagcugagugggacaaagg

SEQ ID NO: 1628071 - RNA, 19 nt, Homo sapiens
  misc_RNA (1)...(19): siRNA sense strand
ccaagaugggcuaugaguu

SEQ ID NO: 1628072 - RNA, 19 nt, Homo sapiens
  misc_RNA (1)...(19): siRNA sense strand
ggagcaaggacauguacca

SEQ ID NO: 1628073 - RNA, 19 nt, Homo sapiens
  misc_RNA (1)...(19): siRNA sense strand
uccgugugcuuuaccugua

SEQ ID NO: 1628074 - RNA, 19 nt, Homo sapiens
  misc_RNA (1)...(19): siRNA sense strand
ggugcacacgcgagguaua

SEQ ID NO: 1628075 - RNA, 19 nt, Homo sapiens
  misc_RNA (1)...(19): siRNA sense strand
gcccagcuccucggaaugu

SEQ ID NO: 1628076 - RNA, 19 nt, Homo sapiens
  misc_RNA (1)...(19): siRNA sense strand
ccacucacaagucucugaa

SEQ ID NO: 1628077 - RNA, 19 nt, Homo sapiens
  misc_RNA (1)...(19): siRNA sense strand
gagcagaggaaggcagaca

SEQ ID NO: 1628078 - RNA, 19 nt, Homo sapiens
  misc_RNA (1)...(19): siRNA sense strand
ggacgaggaagagcugagu

SEQ ID NO: 1628079 - RNA, 19 nt, Homo sapiens
  misc_RNA (1)...(19): siRNA sense strand
ggaggaggagcaaggacau

SEQ ID NO: 1628080 - RNA, 19 nt, Homo sapiens
  misc_RNA (1)...(19): siRNA sense strand
agagggagaggacgaggaa

SEQ ID NO: 1628081 - RNA, 19 nt, Homo sapiens
  misc_RNA (1)...(19): siRNA sense strand
cugcgugucuggccaagca

SEQ ID NO: 1628082 - RNA, 19 nt, Homo sapiens
  misc_RNA (1)...(19): siRNA sense strand
caagaagaugacugaguuc

SEQ ID NO: 1628083 - RNA, 19 nt, Homo sapiens
  misc_RNA (1)...(19): siRNA sense strand
gcggguguccgugugcuuu

SEQ ID NO: 1628084 - RNA, 19 nt, Homo sapiens
  misc_RNA (1)...(19): siRNA sense strand
agacugaggagaagaucga

SEQ ID NO: 1628085 - RNA, 19 nt, Homo sapiens
  misc_RNA (1)...(19): siRNA sense strand
gaggagcaaggacauguac

SEQ ID NO: 1628086 - RNA, 19 nt, Homo sapiens
  misc_RNA (1)...(19): siRNA sense strand
gaagaacaccuguauauuc

SEQ ID NO: 1628087 - RNA, 19 nt, Homo sapiens
  misc_RNA (1)...(19): siRNA sense strand
gcaaauaaguuggugaaau

SEQ ID NO: 1628088 - RNA, 19 nt, Homo sapiens
  misc_RNA (1)...(19): siRNA sense strand
gaacaccuguauauucuug

SEQ ID NO: 1628089 - RNA, 19 nt, Homo sapiens
  misc_RNA (1)...(19): siRNA sense strand
caacgacuaugaagaauuc

SEQ ID NO: 1628090 - RNA, 19 nt, Homo sapiens
  misc_RNA (1)...(19): siRNA sense strand
agaaugaugucuucgauuu

SEQ ID NO: 1628091 - RNA, 19 nt, Homo sapiens
  misc_RNA (1)...(19): siRNA sense strand
gcaccuggaugaugaguau

SEQ ID NO: 1628092 - RNA, 19 nt, Homo sapiens
  misc_RNA (1)...(19): siRNA sense strand
ccaagcaccuggaugauga

SEQ ID NO: 1628093 - RNA, 19 nt, Homo sapiens
  misc_RNA (1)...(19): siRNA sense strand
cggaaacacuugccaauga

SEQ ID NO: 1628094 - RNA, 19 nt, Homo sapiens
  misc_RNA (1)...(19): siRNA sense strand
agaaguaccuggaauacaa

SEQ ID NO: 1628095 - RNA, 19 nt, Homo sapiens
  misc_RNA (1)...(19): siRNA sense strand
gagcugggaugacauacaa

SEQ ID NO: 1628096 - RNA, 19 nt, Homo sapiens
  misc_RNA (1)...(19): siRNA sense strand
ugaaggagaucgacaagga

SEQ ID NO: 1628097 - RNA, 19 nt, Homo sapiens
  misc_RNA (1)...(19): siRNA sense strand
gcgcagacaugcugaagga

SEQ ID NO: 1628098 - RNA, 19 nt, Homo sapiens
  misc_RNA (1)...(19): siRNA sense strand
gugaaauaccugaugauua

SEQ ID NO: 1628099 - RNA, 19 nt, Homo sapiens
  misc_RNA (1)...(19): siRNA sense strand
gcagaccucccagauguua

SEQ ID NO: 1628100 - RNA, 19 nt, Homo sapiens
  misc_RNA (1)...(19): siRNA sense strand
ggagagggcaaauaaguug

SEQ ID NO: 1628101 - RNA, 19 nt, Homo sapiens
  misc_RNA (1)...(19): siRNA sense strand
ggaagaacaccuguauauu

SEQ ID NO: 1628102 - RNA, 19 nt, Homo sapiens
  misc_RNA (1)...(19): siRNA sense strand
ucggaaagcuacaguguug

SEQ ID NO: 1628103 - RNA, 19 nt, Homo sapiens
  misc_RNA (1)...(19): siRNA sense strand
gaugaacauuucccugaga

SEQ ID NO: 1628104 - RNA, 19 nt, Homo sapiens
  misc_RNA (1)...(19): siRNA sense strand
gacaauggauguggauaug

SEQ ID NO: 1628105 - RNA, 19 nt, Homo sapiens
  misc_RNA (1)...(19): siRNA sense strand
ggaugaugcuuucaagaca

SEQ ID NO: 1628106 - RNA, 19 nt, Homo sapiens
  misc_RNA (1)...(19): siRNA sense strand
ccgcagaccucccagaugu

SEQ ID NO: 1628107 - RNA, 19 nt, Homo sapiens
  misc_RNA (1)...(19): siRNA sense strand
gaacauuucccugagauca

SEQ ID NO: 1628108 - RNA, 19 nt, Homo sapiens
  misc_RNA (1)...(19): siRNA sense strand
gagcaucacagcccucauu

SEQ ID NO: 1628109 - RNA, 19 nt, Homo sapiens
  misc_RNA (1)...(19): siRNA sense strand
cagagaauaugaugaacau

SEQ ID NO: 1628110 - RNA, 19 nt, Homo sapiens
  misc_RNA (1)...(19): siRNA sense strand
gcaacccaccugaguauga

SEQ ID NO: 1628111 - RNA, 19 nt, Homo sapiens
  misc_RNA (1)...(19): siRNA sense strand
ggaaacacuugccaaugag

SEQ ID NO: 1628112 - RNA, 19 nt, Homo sapiens
  misc_RNA (1)...(19): siRNA sense strand
caaggaagaacaccuguau

SEQ ID NO: 1628113 - RNA, 19 nt, Homo sapiens
  misc_RNA (1)...(19): siRNA sense strand
ggaaagcuacaguguugaa

SEQ ID NO: 1628114 - RNA, 19 nt, Homo sapiens
  misc_RNA (1)...(19): siRNA sense strand
gaugaugcuuucaagacaa

SEQ ID NO: 1628115 - RNA, 19 nt, Homo sapiens
  misc_RNA (1)...(19): siRNA sense strand
ugacauccauauccucaga

SEQ ID NO: 1628116 - RNA, 19 nt, Homo sapiens
  misc_RNA (1)...(19): siRNA sense strand
caacccaccugaguaugaa

SEQ ID NO: 1628117 - RNA, 19 nt, Homo sapiens
  misc_RNA (1)...(19): siRNA sense strand
gcaagaggaccaagaaguc

SEQ ID NO: 1628118 - RNA, 19 nt, Homo sapiens
  misc_RNA (1)...(19): siRNA sense strand
ggaaggcucauuucuugga

SEQ ID NO: 1628119 - RNA, 19 nt, Homo sapiens
  misc_RNA (1)...(19): siRNA sense strand
ggaugaggguagcgacgaa

SEQ ID NO: 1628120 - RNA, 19 nt, Homo sapiens
  misc_RNA (1)...(19): siRNA sense strand
caugagaccagcaagauga

SEQ ID NO: 1628121 - RNA, 19 nt, Homo sapiens
  misc_RNA (1)...(19): siRNA sense strand
gcaacgacuaugaagaauu

SEQ ID NO: 1628122 - RNA, 19 nt, Homo sapiens
  misc_RNA (1)...(19): siRNA sense strand
ccagaaugaugucuucgau

SEQ ID NO: 1628123 - RNA, 19 nt, Homo sapiens
  misc_RNA (1)...(19): siRNA sense strand
cuacaguguugaagacaug

SEQ ID NO: 1628124 - RNA, 19 nt, Homo sapiens
  misc_RNA (1)...(19): siRNA sense strand
cagauaccaucaguacauu

SEQ ID NO: 1628125 - RNA, 19 nt, Homo sapiens
  misc_RNA (1)...(19): siRNA sense strand
auggaaggcucauuucuug

SEQ ID NO: 1628126 - RNA, 19 nt, Homo sapiens
  misc_RNA (1)...(19): siRNA sense strand
ggagaucgacaaggaagaa

SEQ ID NO: 1628127 - RNA, 19 nt, Homo sapiens
  misc_RNA (1)...(19): siRNA sense strand
gaaggagaucgacaaggaa

SEQ ID NO: 1628128 - RNA, 19 nt, Homo sapiens
  misc_RNA (1)...(19): siRNA sense strand
ggguggagccucagaaugu

SEQ ID NO: 1628129 - RNA, 19 nt, Homo sapiens
  misc_RNA (1)...(19): siRNA sense strand
ggugaaauaccugaugauu

SEQ ID NO: 1628130 - RNA, 19 nt, Homo sapiens
  misc_RNA (1)...(19): siRNA sense strand
cagaugacuuugugaagca

SEQ ID NO: 1628131 - RNA, 19 nt, Homo sapiens
  misc_RNA (1)...(19): siRNA sense strand
cagcucgccuccuuggaaa

SEQ ID NO: 1628132 - RNA, 19 nt, Homo sapiens
  misc_RNA (1)...(19): siRNA sense strand
ugaagaauucggugcguuu

SEQ ID NO: 1628133 - RNA, 19 nt, Homo sapiens
  misc_RNA (1)...(19): siRNA sense strand
ccagauaccaucaguacau

SEQ ID NO: 1628134 - RNA, 19 nt, Homo sapiens
  misc_RNA (1)...(19): siRNA sense strand
gaugagggcccagaugaau

SEQ ID NO: 1628135 - RNA, 19 nt, Homo sapiens
  misc_RNA (1)...(19): siRNA sense strand
aggaagaacaccuguauau

SEQ ID NO: 1628136 - RNA, 19 nt, Homo sapiens
  misc_RNA (1)...(19): siRNA sense strand
ggauccaccugaaggagau

SEQ ID NO: 1628137 - RNA, 19 nt, Homo sapiens
  misc_RNA (1)...(19): siRNA sense strand
gcagcuggauccggaaaca

SEQ ID NO: 1628138 - RNA, 19 nt, Homo sapiens
  misc_RNA (1)...(19): siRNA sense strand
gggaugaggacggagauuu

SEQ ID NO: 1628139 - RNA, 19 nt, Homo sapiens
  misc_RNA (1)...(19): siRNA sense strand
cagaugagggcccagauga

SEQ ID NO: 1628140 - RNA, 19 nt, Homo sapiens
  misc_RNA (1)...(19): siRNA sense strand
agaugaggguccugagauu

SEQ ID NO: 1628141 - RNA, 19 nt, Homo sapiens
  misc_RNA (1)...(19): siRNA sense strand
gggcaaauaaguuggugaa

SEQ ID NO: 1628142 - RNA, 19 nt, Homo sapiens
  misc_RNA (1)...(19): siRNA sense strand
gggccagaaugaugucuuc

SEQ ID NO: 1628143 - RNA, 19 nt, Homo sapiens
  misc_RNA (1)...(19): siRNA sense strand
gaggcaagaggaccaagaa

SEQ ID NO: 1628144 - RNA, 19 nt, Homo sapiens
  misc_RNA (1)...(19): siRNA sense strand
gguggagccucagaauguu

SEQ ID NO: 1628145 - RNA, 19 nt, Homo sapiens
  misc_RNA (1)...(19): siRNA sense strand
ugagauucaucgcccagaa

SEQ ID NO: 1628146 - RNA, 19 nt, Homo sapiens
  misc_RNA (1)...(19): siRNA sense strand
ugauuaaggacuacaagaa

SEQ ID NO: 1628147 - RNA, 19 nt, Homo sapiens
  misc_RNA (1)...(19): siRNA sense strand
gaaacacuugccaaugaga

SEQ ID NO: 1628148 - RNA, 19 nt, Homo sapiens
  misc_RNA (1)...(19): siRNA sense strand
cagcaacccaccugaguau

SEQ ID NO: 1628149 - RNA, 19 nt, Homo sapiens
  misc_RNA (1)...(19): siRNA sense strand
gaagaauucggugcguuug

SEQ ID NO: 1628150 - RNA, 19 nt, Homo sapiens
  misc_RNA (1)...(19): siRNA sense strand
gauuaaggacuacaagaag

SEQ ID NO: 1628151 - RNA, 19 nt, Homo sapiens
  misc_RNA (1)...(19): siRNA sense strand
aaugaugucuucgauuuca

SEQ ID NO: 1628152 - RNA, 19 nt, Homo sapiens
  misc_RNA (1)...(19): siRNA sense strand
gcagcgaggaggagagaga

SEQ ID NO: 1628153 - RNA, 19 nt, Homo sapiens
  misc_RNA (1)...(19): siRNA sense strand
gaaugaugucuucgauuuc

SEQ ID NO: 1628154 - RNA, 19 nt, Homo sapiens
  misc_RNA (1)...(19): siRNA sense strand
caagaugaggguccugaga

SEQ ID NO: 1628155 - RNA, 19 nt, Homo sapiens
  misc_RNA (1)...(19): siRNA sense strand
gaagcagaaguaccuggaa

SEQ ID NO: 1628156 - RNA, 19 nt, Homo sapiens
  misc_RNA (1)...(19): siRNA sense strand
gaaggcaacgacuaugaag

SEQ ID NO: 1628157 - RNA, 19 nt, Homo sapiens
  misc_RNA (1)...(19): siRNA sense strand
caggagagggcaaauaagu

SEQ ID NO: 1628158 - RNA, 19 nt, Homo sapiens
  misc_RNA (1)...(19): siRNA sense strand
ggauauggccgaggaacau

SEQ ID NO: 1628159 - RNA, 19 nt, Homo sapiens
  misc_RNA (1)...(19): siRNA sense strand
gcagaaguaccuggaauac

SEQ ID NO: 1628160 - RNA, 19 nt, Homo sapiens
  misc_RNA (1)...(19): siRNA sense strand
aagcagaaguaccuggaau

SEQ ID NO: 1628161 - RNA, 19 nt, Homo sapiens
  misc_RNA (1)...(19): siRNA sense strand
acauuucccugagaucauu

SEQ ID NO: 1628162 - RNA, 19 nt, Homo sapiens
  misc_RNA (1)...(19): siRNA sense strand
ugaaggcaacgacuaugaa

SEQ ID NO: 1628163 - RNA, 19 nt, Homo sapiens
  misc_RNA (1)...(19): siRNA sense strand
gggaggaagagaugguuga

SEQ ID NO: 1628164 - RNA, 19 nt, Homo sapiens
  misc_RNA (1)...(19): siRNA sense strand
ggaugaagcgcugauugga

SEQ ID NO: 1628165 - RNA, 19 nt, Homo sapiens
  misc_RNA (1)...(19): siRNA sense strand
ugagggcccagaugaauau

SEQ ID NO: 1628166 - RNA, 19 nt, Homo sapiens
  misc_RNA (1)...(19): siRNA sense strand
aggcaacgacuaugaagaa

SEQ ID NO: 1628167 - RNA, 19 nt, Homo sapiens
  misc_RNA (1)...(19): siRNA sense strand
uccaggccuucgcaucuua

SEQ ID NO: 1628168 - RNA, 19 nt, Homo sapiens
  misc_RNA (1)...(19): siRNA sense strand
auuaaggacuacaagaaga

SEQ ID NO: 1628169 - RNA, 19 nt, Homo sapiens
  misc_RNA (1)...(19): siRNA sense strand
ugcaggagagggcaaauaa

SEQ ID NO: 1628170 - RNA, 19 nt, Homo sapiens
  misc_RNA (1)...(19): siRNA sense strand
agauguuagucaccaguaa

SEQ ID NO: 1628171 - RNA, 19 nt, Homo sapiens
  misc_RNA (1)...(19): siRNA sense strand
caacguacacccuggaaaa

SEQ ID NO: 1628172 - RNA, 19 nt, Homo sapiens
  misc_RNA (1)...(19): siRNA sense strand
ccacccaccuggagagcau

SEQ ID NO: 1628173 - RNA, 19 nt, Homo sapiens
  misc_RNA (1)...(19): siRNA sense strand
ggaggaagagaugguugaa

SEQ ID NO: 1628174 - RNA, 19 nt, Homo sapiens
  misc_RNA (1)...(19): siRNA sense strand
ggaggcaagaggaccaaga

SEQ ID NO: 1628175 - RNA, 19 nt, Homo sapiens
  misc_RNA (1)...(19): siRNA sense strand
cgucagcaguggcaccaau

SEQ ID NO: 1628176 - RNA, 19 nt, Homo sapiens
  misc_RNA (1)...(19): siRNA sense strand
gggaggcacuacgcaagau

SEQ ID NO: 1628177 - RNA, 19 nt, Homo sapiens
  misc_RNA (1)...(19): siRNA sense strand
gcaacguacacccuggaaa

SEQ ID NO: 1628178 - RNA, 19 nt, Homo sapiens
  misc_RNA (1)...(19): siRNA sense strand
gagcagcgaggaggagaga

SEQ ID NO: 1628179 - RNA, 19 nt, Homo sapiens
  misc_RNA (1)...(19): siRNA sense strand
ggccagauaccaucaguac

SEQ ID NO: 1628180 - RNA, 19 nt, Homo sapiens
  misc_RNA (1)...(19): siRNA sense strand
guggagcugggaugacaua

SEQ ID NO: 1628181 - RNA, 19 nt, Homo sapiens
  misc_RNA (1)...(19): siRNA sense strand
agacaauggauguggauau

SEQ ID NO: 1628182 - RNA, 19 nt, Homo sapiens
  misc_RNA (1)...(19): siRNA sense strand
caggcugagucuccucuug

SEQ ID NO: 1628183 - RNA, 19 nt, Homo sapiens
  misc_RNA (1)...(19): siRNA sense strand
ucauugaacgagcaacgua

SEQ ID NO: 1628184 - RNA, 19 nt, Homo sapiens
  misc_RNA (1)...(19): siRNA sense strand
caucaagcgcgcagacaug

SEQ ID NO: 1628185 - RNA, 19 nt, Homo sapiens
  misc_RNA (1)...(19): siRNA sense strand
gcuacaguguugaagacau

SEQ ID NO: 1628186 - RNA, 19 nt, Homo sapiens
  misc_RNA (1)...(19): siRNA sense strand
gaagaacaccuguauauuc

SEQ ID NO: 1628187 - RNA, 19 nt, Homo sapiens
  misc_RNA (1)...(19): siRNA sense strand
gcaaauaaguuggugaaau

SEQ ID NO: 1628188 - RNA, 19 nt, Homo sapiens
  misc_RNA (1)...(19): siRNA sense strand
gaacaccuguauauucuug

SEQ ID NO: 1628189 - RNA, 19 nt, Homo sapiens
  misc_RNA (1)...(19): siRNA sense strand
caacgacuaugaagaauuc

SEQ ID NO: 1628190 - RNA, 19 nt, Homo sapiens
  misc_RNA (1)...(19): siRNA sense strand
agaaugaugucuucgauuu

SEQ ID NO: 1628191 - RNA, 19 nt, Homo sapiens
  misc_RNA (1)...(19): siRNA sense strand
gcaccuggaugaugaguau

SEQ ID NO: 1628192 - RNA, 19 nt, Homo sapiens
  misc_RNA (1)...(19): siRNA sense strand
ccaagcaccuggaugauga

SEQ ID NO: 1628193 - RNA, 19 nt, Homo sapiens
  misc_RNA (1)...(19): siRNA sense strand
cggaaacacuugccaauga

SEQ ID NO: 1628194 - RNA, 19 nt, Homo sapiens
  misc_RNA (1)...(19): siRNA sense strand
agaaguaccuggaauacaa

SEQ ID NO: 1628195 - RNA, 19 nt, Homo sapiens
  misc_RNA (1)...(19): siRNA sense strand
gagcugggaugacauacaa

SEQ ID NO: 1628196 - RNA, 19 nt, Homo sapiens
  misc_RNA (1)...(19): siRNA sense strand
ugaaggagaucgacaagga

SEQ ID NO: 1628197 - RNA, 19 nt, Homo sapiens
  misc_RNA (1)...(19): siRNA sense strand
gcgcagacaugcugaagga

SEQ ID NO: 1628198 - RNA, 19 nt, Homo sapiens
  misc_RNA (1)...(19): siRNA sense strand
gugaaauaccugaugauua

SEQ ID NO: 1628199 - RNA, 19 nt, Homo sapiens
  misc_RNA (1)...(19): siRNA sense strand
gcagaccucccagauguua

SEQ ID NO: 1628200 - RNA, 19 nt, Homo sapiens
  misc_RNA (1)...(19): siRNA sense strand
ggagagggcaaauaaguug

SEQ ID NO: 1628201 - RNA, 19 nt, Homo sapiens
  misc_RNA (1)...(19): siRNA sense strand
ggaagaacaccuguauauu

SEQ ID NO: 1628202 - RNA, 19 nt, Homo sapiens
  misc_RNA (1)...(19): siRNA sense strand
ucggaaagcuacaguguug

SEQ ID NO: 1628203 - RNA, 19 nt, Homo sapiens
  misc_RNA (1)...(19): siRNA sense strand
gaugaacauuucccugaga

SEQ ID NO: 1628204 - RNA, 19 nt, Homo sapiens
  misc_RNA (1)...(19): siRNA sense strand
gacaauggauguggauaug

SEQ ID NO: 1628205 - RNA, 19 nt, Homo sapiens
  misc_RNA (1)...(19): siRNA sense strand
ggaugaugcuuucaagaca

SEQ ID NO: 1628206 - RNA, 19 nt, Homo sapiens
  misc_RNA (1)...(19): siRNA sense strand
ccgcagaccucccagaugu

SEQ ID NO: 1628207 - RNA, 19 nt, Homo sapiens
  misc_RNA (1)...(19): siRNA sense strand
gaacauuucccugagauca

SEQ ID NO: 1628208 - RNA, 19 nt, Homo sapiens
  misc_RNA (1)...(19): siRNA sense strand
gagcaucacagcccucauu

SEQ ID NO: 1628209 - RNA, 19 nt, Homo sapiens
  misc_RNA (1)...(19): siRNA sense strand
cagagaauaugaugaacau

SEQ ID NO: 1628210 - RNA, 19 nt, Homo sapiens
  misc_RNA (1)...(19): siRNA sense strand
gcaacccaccugaguauga

SEQ ID NO: 1628211 - RNA, 19 nt, Homo sapiens
  misc_RNA (1)...(19): siRNA sense strand
ggaaacacuugccaaugag

SEQ ID NO: 1628212 - RNA, 19 nt, Homo sapiens
  misc_RNA (1)...(19): siRNA sense strand
caaggaagaacaccuguau

SEQ ID NO: 1628213 - RNA, 19 nt, Homo sapiens
  misc_RNA (1)...(19): siRNA sense strand
ggaaagcuacaguguugaa

SEQ ID NO: 1628214 - RNA, 19 nt, Homo sapiens
  misc_RNA (1)...(19): siRNA sense strand
gaugaugcuuucaagacaa

SEQ ID NO: 1628215 - RNA, 19 nt, Homo sapiens
  misc_RNA (1)...(19): siRNA sense strand
ugacauccauauccucaga

SEQ ID NO: 1628216 - RNA, 19 nt, Homo sapiens
  misc_RNA (1)...(19): siRNA sense strand
caacccaccugaguaugaa

SEQ ID NO: 1628217 - RNA, 19 nt, Homo sapiens
  misc_RNA (1)...(19): siRNA sense strand
gcaagaggaccaagaaguc

SEQ ID NO: 1628218 - RNA, 19 nt, Homo sapiens
  misc_RNA (1)...(19): siRNA sense strand
ggaaggcucauuucuugga

SEQ ID NO: 1628219 - RNA, 19 nt, Homo sapiens
  misc_RNA (1)...(19): siRNA sense strand
ggaugaggguagcgacgaa

SEQ ID NO: 1628220 - RNA, 19 nt, Homo sapiens
  misc_RNA (1)...(19): siRNA sense strand
caugagaccagcaagauga

SEQ ID NO: 1628221 - RNA, 19 nt, Homo sapiens
  misc_RNA (1)...(19): siRNA sense strand
gcaacgacuaugaagaauu

SEQ ID NO: 1628222 - RNA, 19 nt, Homo sapiens
  misc_RNA (1)...(19): siRNA sense strand
ccagaaugaugucuucgau

SEQ ID NO: 1628223 - RNA, 19 nt, Homo sapiens
  misc_RNA (1)...(19): siRNA sense strand
cuacaguguugaagacaug

SEQ ID NO: 1628224 - RNA, 19 nt, Homo sapiens
  misc_RNA (1)...(19): siRNA sense strand
cagauaccaucaguacauu

SEQ ID NO: 1628225 - RNA, 19 nt, Homo sapiens
  misc_RNA (1)...(19): siRNA sense strand
auggaaggcucauuucuug

SEQ ID NO: 1628226 - RNA, 19 nt, Homo sapiens
  misc_RNA (1)...(19): siRNA sense strand
ggagaucgacaaggaagaa

SEQ ID NO: 1628227 - RNA, 19 nt, Homo sapiens
  misc_RNA (1)...(19): siRNA sense strand
gaaggagaucgacaaggaa

SEQ ID NO: 1628228 - RNA, 19 nt, Homo sapiens
  misc_RNA (1)...(19): siRNA sense strand
ggguggagccucagaaugu

SEQ ID NO: 1628229 - RNA, 19 nt, Homo sapiens
  misc_RNA (1)...(19): siRNA sense strand
ggugaaauaccugaugauu

SEQ ID NO: 1628230 - RNA, 19 nt, Homo sapiens
  misc_RNA (1)...(19): siRNA sense strand
cagaugacuuugugaagca

SEQ ID NO: 1628231 - RNA, 19 nt, Homo sapiens
  misc_RNA (1)...(19): siRNA sense strand
cagcucgccuccuuggaaa

SEQ ID NO: 1628232 - RNA, 19 nt, Homo sapiens
  misc_RNA (1)...(19): siRNA sense strand
ugaagaauucggugcguuu

SEQ ID NO: 1628233 - RNA, 19 nt, Homo sapiens
  misc_RNA (1)...(19): siRNA sense strand
ccagauaccaucaguacau

SEQ ID NO: 1628234 - RNA, 19 nt, Homo sapiens
  misc_RNA (1)...(19): siRNA sense strand
gaugagggcccagaugaau

SEQ ID NO: 1628235 - RNA, 19 nt, Homo sapiens
  misc_RNA (1)...(19): siRNA sense strand
aggaagaacaccuguauau

SEQ ID NO: 1628236 - RNA, 19 nt, Homo sapiens
  misc_RNA (1)...(19): siRNA sense strand
ggauccaccugaaggagau

SEQ ID NO: 1628237 - RNA, 19 nt, Homo sapiens
  misc_RNA (1)...(19): siRNA sense strand
gcagcuggauccggaaaca

SEQ ID NO: 1628238 - RNA, 19 nt, Homo sapiens
  misc_RNA (1)...(19): siRNA sense strand
gggaugaggacggagauuu

SEQ ID NO: 1628239 - RNA, 19 nt, Homo sapiens
  misc_RNA (1)...(19): siRNA sense strand
cagaugagggcccagauga

SEQ ID NO: 1628240 - RNA, 19 nt, Homo sapiens
  misc_RNA (1)...(19): siRNA sense strand
agaugaggguccugagauu

SEQ ID NO: 1628241 - RNA, 19 nt, Homo sapiens
  misc_RNA (1)...(19): siRNA sense strand
gggcaaauaaguuggugaa

SEQ ID NO: 1628242 - RNA, 19 nt, Homo sapiens
  misc_RNA (1)...(19): siRNA sense strand
gggccagaaugaugucuuc

SEQ ID NO: 1628243 - RNA, 19 nt, Homo sapiens
  misc_RNA (1)...(19): siRNA sense strand
gaggcaagaggaccaagaa

SEQ ID NO: 1628244 - RNA, 19 nt, Homo sapiens
  misc_RNA (1)...(19): siRNA sense strand
gguggagccucagaauguu

SEQ ID NO: 1628245 - RNA, 19 nt, Homo sapiens
  misc_RNA (1)...(19): siRNA sense strand
ugagauucaucgcccagaa

SEQ ID NO: 1628246 - RNA, 19 nt, Homo sapiens
  misc_RNA (1)...(19): siRNA sense strand
ugauuaaggacuacaagaa

SEQ ID NO: 1628247 - RNA, 19 nt, Homo sapiens
  misc_RNA (1)...(19): siRNA sense strand
gaaacacuugccaaugaga

SEQ ID NO: 1628248 - RNA, 19 nt, Homo sapiens
  misc_RNA (1)...(19): siRNA sense strand
cagcaacccaccugaguau

SEQ ID NO: 1628249 - RNA, 19 nt, Homo sapiens
  misc_RNA (1)...(19): siRNA sense strand
gaagaauucggugcguuug

SEQ ID NO: 1628250 - RNA, 19 nt, Homo sapiens
  misc_RNA (1)...(19): siRNA sense strand
gauuaaggacuacaagaag

SEQ ID NO: 1628251 - RNA, 19 nt, Homo sapiens
  misc_RNA (1)...(19): siRNA sense strand
aaugaugucuucgauuuca

SEQ ID NO: 1628252 - RNA, 19 nt, Homo sapiens
  misc_RNA (1)...(19): siRNA sense strand
gcagcgaggaggagagaga

SEQ ID NO: 1628253 - RNA, 19 nt, Homo sapiens
  misc_RNA (1)...(19): siRNA sense strand
gaaugaugucuucgauuuc

SEQ ID NO: 1628254 - RNA, 19 nt, Homo sapiens
  misc_RNA (1)...(19): siRNA sense strand
caagaugaggguccugaga

SEQ ID NO: 1628255 - RNA, 19 nt, Homo sapiens
  misc_RNA (1)...(19): siRNA sense strand
gaagcagaaguaccuggaa

SEQ ID NO: 1628256 - RNA, 19 nt, Homo sapiens
  misc_RNA (1)...(19): siRNA sense strand
gaaggcaacgacuaugaag

SEQ ID NO: 1628257 - RNA, 19 nt, Homo sapiens
  misc_RNA (1)...(19): siRNA sense strand
caggagagggcaaauaagu

SEQ ID NO: 1628258 - RNA, 19 nt, Homo sapiens
  misc_RNA (1)...(19): siRNA sense strand
ggauauggccgaggaacau

SEQ ID NO: 1628259 - RNA, 19 nt, Homo sapiens
  misc_RNA (1)...(19): siRNA sense strand
gcagaaguaccuggaauac

SEQ ID NO: 1628260 - RNA, 19 nt, Homo sapiens
  misc_RNA (1)...(19): siRNA sense strand
aagcagaaguaccuggaau

SEQ ID NO: 1628261 - RNA, 19 nt, Homo sapiens
  misc_RNA (1)...(19): siRNA sense strand
acauuucccugagaucauu

SEQ ID NO: 1628262 - RNA, 19 nt, Homo sapiens
  misc_RNA (1)...(19): siRNA sense strand
ugaaggcaacgacuaugaa

SEQ ID NO: 1628263 - RNA, 19 nt, Homo sapiens
  misc_RNA (1)...(19): siRNA sense strand
gggaggaagagaugguuga

SEQ ID NO: 1628264 - RNA, 19 nt, Homo sapiens
  misc_RNA (1)...(19): siRNA sense strand
ggaugaagcgcugauugga

SEQ ID NO: 1628265 - RNA, 19 nt, Homo sapiens
  misc_RNA (1)...(19): siRNA sense strand
ugagggcccagaugaauau

SEQ ID NO: 1628266 - RNA, 19 nt, Homo sapiens
  misc_RNA (1)...(19): siRNA sense strand
aggcaacgacuaugaagaa

SEQ ID NO: 1628267 - RNA, 19 nt, Homo sapiens
  misc_RNA (1)...(19): siRNA sense strand
uccaggccuucgcaucuua

SEQ ID NO: 1628268 - RNA, 19 nt, Homo sapiens
  misc_RNA (1)...(19): siRNA sense strand
auuaaggacuacaagaaga

SEQ ID NO: 1628269 - RNA, 19 nt, Homo sapiens
  misc_RNA (1)...(19): siRNA sense strand
ugcaggagagggcaaauaa

SEQ ID NO: 1628270 - RNA, 19 nt, Homo sapiens
  misc_RNA (1)...(19): siRNA sense strand
agauguuagucaccaguaa

SEQ ID NO: 1628271 - RNA, 19 nt, Homo sapiens
  misc_RNA (1)...(19): siRNA sense strand
caacguacacccuggaaaa

SEQ ID NO: 1628272 - RNA, 19 nt, Homo sapiens
  misc_RNA (1)...(19): siRNA sense strand
ccacccaccuggagagcau

SEQ ID NO: 1628273 - RNA, 19 nt, Homo sapiens
  misc_RNA (1)...(19): siRNA sense strand
ggaggaagagaugguugaa

SEQ ID NO: 1628274 - RNA, 19 nt, Homo sapiens
  misc_RNA (1)...(19): siRNA sense strand
ggaggcaagaggaccaaga

SEQ ID NO: 1628275 - RNA, 19 nt, Homo sapiens
  misc_RNA (1)...(19): siRNA sense strand
cgucagcaguggcaccaau

SEQ ID NO: 1628276 - RNA, 19 nt, Homo sapiens
  misc_RNA (1)...(19): siRNA sense strand
gggaggcacuacgcaagau

SEQ ID NO: 1628277 - RNA, 19 nt, Homo sapiens
  misc_RNA (1)...(19): siRNA sense strand
gcaacguacacccuggaaa

SEQ ID NO: 1628278 - RNA, 19 nt, Homo sapiens
  misc_RNA (1)...(19): siRNA sense strand
gagcagcgaggaggagaga

SEQ ID NO: 1628279 - RNA, 19 nt, Homo sapiens
  misc_RNA (1)...(19): siRNA sense strand
ggccagauaccaucaguac

SEQ ID NO: 1628280 - RNA, 19 nt, Homo sapiens
  misc_RNA (1)...(19): siRNA sense strand
guggagcugggaugacaua

SEQ ID NO: 1628281 - RNA, 19 nt, Homo sapiens
  misc_RNA (1)...(19): siRNA sense strand
agacaauggauguggauau

SEQ ID NO: 1628282 - RNA, 19 nt, Homo sapiens
  misc_RNA (1)...(19): siRNA sense strand
caggcugagucuccucuug

SEQ ID NO: 1628283 - RNA, 19 nt, Homo sapiens
  misc_RNA (1)...(19): siRNA sense strand
ucauugaacgagcaacgua

SEQ ID NO: 1628284 - RNA, 19 nt, Homo sapiens
  misc_RNA (1)...(19): siRNA sense strand
caucaagcgcgcagacaug

SEQ ID NO: 1628285 - RNA, 19 nt, Homo sapiens
  misc_RNA (1)...(19): siRNA sense strand
gcuacaguguugaagacau

SEQ ID NO: 1628286 - RNA, 19 nt, Homo sapiens
  misc_RNA (1)...(19): siRNA sense strand
gaagaacaccuguauauuc

SEQ ID NO: 1628287 - RNA, 19 nt, Homo sapiens
  misc_RNA (1)...(19): siRNA sense strand
gcaaauaaguuggugaaau

SEQ ID NO: 1628288 - RNA, 19 nt, Homo sapiens
  misc_RNA (1)...(19): siRNA sense strand
gaacaccuguauauucuug

SEQ ID NO: 1628289 - RNA, 19 nt, Homo sapiens
  misc_RNA (1)...(19): siRNA sense strand
caacgacuaugaagaauuc

SEQ ID NO: 1628290 - RNA, 19 nt, Homo sapiens
  misc_RNA (1)...(19): siRNA sense strand
agaaugaugucuucgauuu

SEQ ID NO: 1628291 - RNA, 19 nt, Homo sapiens
  misc_RNA (1)...(19): siRNA sense strand
gcaccuggaugaugaguau

SEQ ID NO: 1628292 - RNA, 19 nt, Homo sapiens
  misc_RNA (1)...(19): siRNA sense strand
ccaagcaccuggaugauga

SEQ ID NO: 1628293 - RNA, 19 nt, Homo sapiens
  misc_RNA (1)...(19): siRNA sense strand
cggaaacacuugccaauga

SEQ ID NO: 1628294 - RNA, 19 nt, Homo sapiens
  misc_RNA (1)...(19): siRNA sense strand
agaaguaccuggaauacaa

SEQ ID NO: 1628295 - RNA, 19 nt, Homo sapiens
  misc_RNA (1)...(19): siRNA sense strand
gagcugggaugacauacaa

SEQ ID NO: 1628296 - RNA, 19 nt, Homo sapiens
  misc_RNA (1)...(19): siRNA sense strand
ugaaggagaucgacaagga

SEQ ID NO: 1628297 - RNA, 19 nt, Homo sapiens
  misc_RNA (1)...(19): siRNA sense strand
gcgcagacaugcugaagga

SEQ ID NO: 1628298 - RNA, 19 nt, Homo sapiens
  misc_RNA (1)...(19): siRNA sense strand
gugaaauaccugaugauua

SEQ ID NO: 1628299 - RNA, 19 nt, Homo sapiens
  misc_RNA (1)...(19): siRNA sense strand
gcagaccucccagauguua

SEQ ID NO: 1628300 - RNA, 19 nt, Homo sapiens
  misc_RNA (1)...(19): siRNA sense strand
ggagagggcaaauaaguug

SEQ ID NO: 1628301 - RNA, 19 nt, Homo sapiens
  misc_RNA (1)...(19): siRNA sense strand
ggaagaacaccuguauauu

SEQ ID NO: 1628302 - RNA, 19 nt, Homo sapiens
  misc_RNA (1)...(19): siRNA sense strand
ucggaaagcuacaguguug

SEQ ID NO: 1628303 - RNA, 19 nt, Homo sapiens
  misc_RNA (1)...(19): siRNA sense strand
gaugaacauuucccugaga

SEQ ID NO: 1628304 - RNA, 19 nt, Homo sapiens
  misc_RNA (1)...(19): siRNA sense strand
gacaauggauguggauaug

SEQ ID NO: 1628305 - RNA, 19 nt, Homo sapiens
  misc_RNA (1)...(19): siRNA sense strand
ggaugaugcuuucaagaca

SEQ ID NO: 1628306 - RNA, 19 nt, Homo sapiens
  misc_RNA (1)...(19): siRNA sense strand
ccgcagaccucccagaugu

SEQ ID NO: 1628307 - RNA, 19 nt, Homo sapiens
  misc_RNA (1)...(19): siRNA sense strand
gaacauuucccugagauca

SEQ ID NO: 1628308 - RNA, 19 nt, Homo sapiens
  misc_RNA (1)...(19): siRNA sense strand
gagcaucacagcccucauu

SEQ ID NO: 1628309 - RNA, 19 nt, Homo sapiens
  misc_RNA (1)...(19): siRNA sense strand
cagagaauaugaugaacau

SEQ ID NO: 1628310 - RNA, 19 nt, Homo sapiens
  misc_RNA (1)...(19): siRNA sense strand
gcaacccaccugaguauga

SEQ ID NO: 1628311 - RNA, 19 nt, Homo sapiens
  misc_RNA (1)...(19): siRNA sense strand
ggaaacacuugccaaugag

SEQ ID NO: 1628312 - RNA, 19 nt, Homo sapiens
  misc_RNA (1)...(19): siRNA sense strand
caaggaagaacaccuguau

SEQ ID NO: 1628313 - RNA, 19 nt, Homo sapiens
  misc_RNA (1)...(19): siRNA sense strand
ggaaagcuacaguguugaa

SEQ ID NO: 1628314 - RNA, 19 nt, Homo sapiens
  misc_RNA (1)...(19): siRNA sense strand
gaugaugcuuucaagacaa

SEQ ID NO: 1628315 - RNA, 19 nt, Homo sapiens
  misc_RNA (1)...(19): siRNA sense strand
ugacauccauauccucaga

SEQ ID NO: 1628316 - RNA, 19 nt, Homo sapiens
  misc_RNA (1)...(19): siRNA sense strand
caacccaccugaguaugaa

SEQ ID NO: 1628317 - RNA, 19 nt, Homo sapiens
  misc_RNA (1)...(19): siRNA sense strand
gcaagaggaccaagaaguc

SEQ ID NO: 1628318 - RNA, 19 nt, Homo sapiens
  misc_RNA (1)...(19): siRNA sense strand
ggaaggcucauuucuugga

SEQ ID NO: 1628319 - RNA, 19 nt, Homo sapiens
  misc_RNA (1)...(19): siRNA sense strand
ggaugaggguagcgacgaa

SEQ ID NO: 1628320 - RNA, 19 nt, Homo sapiens
  misc_RNA (1)...(19): siRNA sense strand
caugagaccagcaagauga

SEQ ID NO: 1628321 - RNA, 19 nt, Homo sapiens
  misc_RNA (1)...(19): siRNA sense strand
gcaacgacuaugaagaauu

SEQ ID NO: 1628322 - RNA, 19 nt, Homo sapiens
  misc_RNA (1)...(19): siRNA sense strand
ccagaaugaugucuucgau

SEQ ID NO: 1628323 - RNA, 19 nt, Homo sapiens
  misc_RNA (1)...(19): siRNA sense strand
cuacaguguugaagacaug

SEQ ID NO: 1628324 - RNA, 19 nt, Homo sapiens
  misc_RNA (1)...(19): siRNA sense strand
cagauaccaucaguacauu

SEQ ID NO: 1628325 - RNA, 19 nt, Homo sapiens
  misc_RNA (1)...(19): siRNA sense strand
auggaaggcucauuucuug

SEQ ID NO: 1628326 - RNA, 19 nt, Homo sapiens
  misc_RNA (1)...(19): siRNA sense strand
ggagaucgacaaggaagaa

SEQ ID NO: 1628327 - RNA, 19 nt, Homo sapiens
  misc_RNA (1)...(19): siRNA sense strand
gaaggagaucgacaaggaa

SEQ ID NO: 1628328 - RNA, 19 nt, Homo sapiens
  misc_RNA (1)...(19): siRNA sense strand
ggguggagccucagaaugu

SEQ ID NO: 1628329 - RNA, 19 nt, Homo sapiens
  misc_RNA (1)...(19): siRNA sense strand
ggugaaauaccugaugauu

SEQ ID NO: 1628330 - RNA, 19 nt, Homo sapiens
  misc_RNA (1)...(19): siRNA sense strand
cagaugacuuugugaagca

SEQ ID NO: 1628331 - RNA, 19 nt, Homo sapiens
  misc_RNA (1)...(19): siRNA sense strand
cagcucgccuccuuggaaa

SEQ ID NO: 1628332 - RNA, 19 nt, Homo sapiens
  misc_RNA (1)...(19): siRNA sense strand
ugaagaauucggugcguuu

SEQ ID NO: 1628333 - RNA, 19 nt, Homo sapiens
  misc_RNA (1)...(19): siRNA sense strand
ccagauaccaucaguacau

SEQ ID NO: 1628334 - RNA, 19 nt, Homo sapiens
  misc_RNA (1)...(19): siRNA sense strand
gaugagggcccagaugaau

SEQ ID NO: 1628335 - RNA, 19 nt, Homo sapiens
  misc_RNA (1)...(19): siRNA sense strand
aggaagaacaccuguauau

SEQ ID NO: 1628336 - RNA, 19 nt, Homo sapiens
  misc_RNA (1)...(19): siRNA sense strand
ggauccaccugaaggagau

SEQ ID NO: 1628337 - RNA, 19 nt, Homo sapiens
  misc_RNA (1)...(19): siRNA sense strand
gcagcuggauccggaaaca

SEQ ID NO: 1628338 - RNA, 19 nt, Homo sapiens
  misc_RNA (1)...(19): siRNA sense strand
gggaugaggacggagauuu

SEQ ID NO: 1628339 - RNA, 19 nt, Homo sapiens
  misc_RNA (1)...(19): siRNA sense strand
cagaugagggcccagauga

SEQ ID NO: 1628340 - RNA, 19 nt, Homo sapiens
  misc_RNA (1)...(19): siRNA sense strand
agaugaggguccugagauu

SEQ ID NO: 1628341 - RNA, 19 nt, Homo sapiens
  misc_RNA (1)...(19): siRNA sense strand
gggcaaauaaguuggugaa

SEQ ID NO: 1628342 - RNA, 19 nt, Homo sapiens
  misc_RNA (1)...(19): siRNA sense strand
gggccagaaugaugucuuc

SEQ ID NO: 1628343 - RNA, 19 nt, Homo sapiens
  misc_RNA (1)...(19): siRNA sense strand
gaggcaagaggaccaagaa

SEQ ID NO: 1628344 - RNA, 19 nt, Homo sapiens
  misc_RNA (1)...(19): siRNA sense strand
gguggagccucagaauguu

SEQ ID NO: 1628345 - RNA, 19 nt, Homo sapiens
  misc_RNA (1)...(19): siRNA sense strand
ugagauucaucgcccagaa

SEQ ID NO: 1628346 - RNA, 19 nt, Homo sapiens
  misc_RNA (1)...(19): siRNA sense strand
ugauuaaggacuacaagaa

SEQ ID NO: 1628347 - RNA, 19 nt, Homo sapiens
  misc_RNA (1)...(19): siRNA sense strand
gaaacacuugccaaugaga

SEQ ID NO: 1628348 - RNA, 19 nt, Homo sapiens
  misc_RNA (1)...(19): siRNA sense strand
cagcaacccaccugaguau

SEQ ID NO: 1628349 - RNA, 19 nt, Homo sapiens
  misc_RNA (1)...(19): siRNA sense strand
gaagaauucggugcguuug

SEQ ID NO: 1628350 - RNA, 19 nt, Homo sapiens
  misc_RNA (1)...(19): siRNA sense strand
gauuaaggacuacaagaag

SEQ ID NO: 1628351 - RNA, 19 nt, Homo sapiens
  misc_RNA (1)...(19): siRNA sense strand
aaugaugucuucgauuuca

SEQ ID NO: 1628352 - RNA, 19 nt, Homo sapiens
  misc_RNA (1)...(19): siRNA sense strand
gcagcgaggaggagagaga

SEQ ID NO: 1628353 - RNA, 19 nt, Homo sapiens
  misc_RNA (1)...(19): siRNA sense strand
gaaugaugucuucgauuuc

SEQ ID NO: 1628354 - RNA, 19 nt, Homo sapiens
  misc_RNA (1)...(19): siRNA sense strand
caagaugaggguccugaga

SEQ ID NO: 1628355 - RNA, 19 nt, Homo sapiens
  misc_RNA (1)...(19): siRNA sense strand
gaagcagaaguaccuggaa

SEQ ID NO: 1628356 - RNA, 19 nt, Homo sapiens
  misc_RNA (1)...(19): siRNA sense strand
gaaggcaacgacuaugaag

SEQ ID NO: 1628357 - RNA, 19 nt, Homo sapiens
  misc_RNA (1)...(19): siRNA sense strand
caggagagggcaaauaagu

SEQ ID NO: 1628358 - RNA, 19 nt, Homo sapiens
  misc_RNA (1)...(19): siRNA sense strand
ggauauggccgaggaacau

SEQ ID NO: 1628359 - RNA, 19 nt, Homo sapiens
  misc_RNA (1)...(19): siRNA sense strand
gcagaaguaccuggaauac

SEQ ID NO: 1628360 - RNA, 19 nt, Homo sapiens
  misc_RNA (1)...(19): siRNA sense strand
aagcagaaguaccuggaau

SEQ ID NO: 1628361 - RNA, 19 nt, Homo sapiens
  misc_RNA (1)...(19): siRNA sense strand
acauuucccugagaucauu

SEQ ID NO: 1628362 - RNA, 19 nt, Homo sapiens
  misc_RNA (1)...(19): siRNA sense strand
ugaaggcaacgacuaugaa

SEQ ID NO: 1628363 - RNA, 19 nt, Homo sapiens
  misc_RNA (1)...(19): siRNA sense strand
gggaggaagagaugguuga

SEQ ID NO: 1628364 - RNA, 19 nt, Homo sapiens
  misc_RNA (1)...(19): siRNA sense strand
ggaugaagcgcugauugga

SEQ ID NO: 1628365 - RNA, 19 nt, Homo sapiens
  misc_RNA (1)...(19): siRNA sense strand
ugagggcccagaugaauau

SEQ ID NO: 1628366 - RNA, 19 nt, Homo sapiens
  misc_RNA (1)...(19): siRNA sense strand
aggcaacgacuaugaagaa

SEQ ID NO: 1628367 - RNA, 19 nt, Homo sapiens
  misc_RNA (1)...(19): siRNA sense strand
uccaggccuucgcaucuua

SEQ ID NO: 1628368 - RNA, 19 nt, Homo sapiens
  misc_RNA (1)...(19): siRNA sense strand
auuaaggacuacaagaaga

SEQ ID NO: 1628369 - RNA, 19 nt, Homo sapiens
  misc_RNA (1)...(19): siRNA sense strand
ugcaggagagggcaaauaa

SEQ ID NO: 1628370 - RNA, 19 nt, Homo sapiens
  misc_RNA (1)...(19): siRNA sense strand
agauguuagucaccaguaa

SEQ ID NO: 1628371 - RNA, 19 nt, Homo sapiens
  misc_RNA (1)...(19): siRNA sense strand
caacguacacccuggaaaa

SEQ ID NO: 1628372 - RNA, 19 nt, Homo sapiens
  misc_RNA (1)...(19): siRNA sense strand
ccacccaccuggagagcau

SEQ ID NO: 1628373 - RNA, 19 nt, Homo sapiens
  misc_RNA (1)...(19): siRNA sense strand
ggaggaagagaugguugaa

SEQ ID NO: 1628374 - RNA, 19 nt, Homo sapiens
  misc_RNA (1)...(19): siRNA sense strand
ggaggcaagaggaccaaga

SEQ ID NO: 1628375 - RNA, 19 nt, Homo sapiens
  misc_RNA (1)...(19): siRNA sense strand
cgucagcaguggcaccaau

SEQ ID NO: 1628376 - RNA, 19 nt, Homo sapiens
  misc_RNA (1)...(19): siRNA sense strand
gggaggcacuacgcaagau

SEQ ID NO: 1628377 - RNA, 19 nt, Homo sapiens
  misc_RNA (1)...(19): siRNA sense strand
gcaacguacacccuggaaa

SEQ ID NO: 1628378 - RNA, 19 nt, Homo sapiens
  misc_RNA (1)...(19): siRNA sense strand
gagcagcgaggaggagaga

SEQ ID NO: 1628379 - RNA, 19 nt, Homo sapiens
  misc_RNA (1)...(19): siRNA sense strand
ggccagauaccaucaguac

SEQ ID NO: 1628380 - RNA, 19 nt, Homo sapiens
  misc_RNA (1)...(19): siRNA sense strand
guggagcugggaugacaua

SEQ ID NO: 1628381 - RNA, 19 nt, Homo sapiens
  misc_RNA (1)...(19): siRNA sense strand
agacaauggauguggauau

SEQ ID NO: 1628382 - RNA, 19 nt, Homo sapiens
  misc_RNA (1)...(19): siRNA sense strand
caggcugagucuccucuug

SEQ ID NO: 1628383 - RNA, 19 nt, Homo sapiens
  misc_RNA (1)...(19): siRNA sense strand
ucauugaacgagcaacgua

SEQ ID NO: 1628384 - RNA, 19 nt, Homo sapiens
  misc_RNA (1)...(19): siRNA sense strand
caucaagcgcgcagacaug

SEQ ID NO: 1628385 - RNA, 19 nt, Homo sapiens
  misc_RNA (1)...(19): siRNA sense strand
gcuacaguguugaagacau

SEQ ID NO: 1628386 - RNA, 19 nt, Homo sapiens
  misc_RNA (1)...(19): siRNA sense strand
ucaaggagaugaagaagaa

SEQ ID NO: 1628387 - RNA, 19 nt, Homo sapiens
  misc_RNA (1)...(19): siRNA sense strand
gcgcuucgaugcggacuau

SEQ ID NO: 1628388 - RNA, 19 nt, Homo sapiens
  misc_RNA (1)...(19): siRNA sense strand
gcacccacccuguucucua

SEQ ID NO: 1628389 - RNA, 19 nt, Homo sapiens
  misc_RNA (1)...(19): siRNA sense strand
agaagaacccuaugaccaa

SEQ ID NO: 1628390 - RNA, 19 nt, Homo sapiens
  misc_RNA (1)...(19): siRNA sense strand
augaagacaugaaggagaa

SEQ ID NO: 1628391 - RNA, 19 nt, Homo sapiens
  misc_RNA (1)...(19): siRNA sense strand
gaaguucauggucggagaa

SEQ ID NO: 1628392 - RNA, 19 nt, Homo sapiens
  misc_RNA (1)...(19): siRNA sense strand
agaacccuaugaccaacua

SEQ ID NO: 1628393 - RNA, 19 nt, Homo sapiens
  misc_RNA (1)...(19): siRNA sense strand
acacgucguucaaggagau

SEQ ID NO: 1628394 - RNA, 19 nt, Homo sapiens
  misc_RNA (1)...(19): siRNA sense strand
gggacagcuuccuggagaa

SEQ ID NO: 1628395 - RNA, 19 nt, Homo sapiens
  misc_RNA (1)...(19): siRNA sense strand
guucauggucggagaagug

SEQ ID NO: 1628396 - RNA, 19 nt, Homo sapiens
  misc_RNA (1)...(19): siRNA sense strand
gcagaaugagcgcuucgau

SEQ ID NO: 1628397 - RNA, 19 nt, Homo sapiens
  misc_RNA (1)...(19): siRNA sense strand
ucaccguggcgcagaauga

SEQ ID NO: 1628398 - RNA, 19 nt, Homo sapiens
  misc_RNA (1)...(19): siRNA sense strand
uucucuaccucuucuauga

SEQ ID NO: 1628399 - RNA, 19 nt, Homo sapiens
  misc_RNA (1)...(19): siRNA sense strand
aaaagauccuggaguuugu

SEQ ID NO: 1628400 - RNA, 19 nt, Homo sapiens
  misc_RNA (1)...(19): siRNA sense strand
cacccacccuguucucuac

SEQ ID NO: 1628401 - RNA, 19 nt, Homo sapiens
  misc_RNA (1)...(19): siRNA sense strand
ucuaugaagacaugaagga

SEQ ID NO: 1628402 - RNA, 19 nt, Homo sapiens
  misc_RNA (1)...(19): siRNA sense strand
gaugaagaagaacccuaug

SEQ ID NO: 1628403 - RNA, 19 nt, Homo sapiens
  misc_RNA (1)...(19): siRNA sense strand
ucaaggagaugaagaagaa

SEQ ID NO: 1628404 - RNA, 19 nt, Homo sapiens
  misc_RNA (1)...(19): siRNA sense strand
gcgcuucgaugcggacuau

SEQ ID NO: 1628405 - RNA, 19 nt, Homo sapiens
  misc_RNA (1)...(19): siRNA sense strand
gcacccacccuguucucua

SEQ ID NO: 1628406 - RNA, 19 nt, Homo sapiens
  misc_RNA (1)...(19): siRNA sense strand
agaagaacccuaugaccaa

SEQ ID NO: 1628407 - RNA, 19 nt, Homo sapiens
  misc_RNA (1)...(19): siRNA sense strand
augaagacaugaaggagaa

SEQ ID NO: 1628408 - RNA, 19 nt, Homo sapiens
  misc_RNA (1)...(19): siRNA sense strand
gaaguucauggucggagaa

SEQ ID NO: 1628409 - RNA, 19 nt, Homo sapiens
  misc_RNA (1)...(19): siRNA sense strand
agaacccuaugaccaacua

SEQ ID NO: 1628410 - RNA, 19 nt, Homo sapiens
  misc_RNA (1)...(19): siRNA sense strand
acacgucguucaaggagau

SEQ ID NO: 1628411 - RNA, 19 nt, Homo sapiens
  misc_RNA (1)...(19): siRNA sense strand
gggacagcuuccuggagaa

SEQ ID NO: 1628412 - RNA, 19 nt, Homo sapiens
  misc_RNA (1)...(19): siRNA sense strand
guucauggucggagaagug

SEQ ID NO: 1628413 - RNA, 19 nt, Homo sapiens
  misc_RNA (1)...(19): siRNA sense strand
gcagaaugagcgcuucgau

SEQ ID NO: 1628414 - RNA, 19 nt, Homo sapiens
  misc_RNA (1)...(19): siRNA sense strand
ucaccguggcgcagaauga

SEQ ID NO: 1628415 - RNA, 19 nt, Homo sapiens
  misc_RNA (1)...(19): siRNA sense strand
uucucuaccucuucuauga

SEQ ID NO: 1628416 - RNA, 19 nt, Homo sapiens
  misc_RNA (1)...(19): siRNA sense strand
aaaagauccuggaguuugu

SEQ ID NO: 1628417 - RNA, 19 nt, Homo sapiens
  misc_RNA (1)...(19): siRNA sense strand
cacccacccuguucucuac

SEQ ID NO: 1628418 - RNA, 19 nt, Homo sapiens
  misc_RNA (1)...(19): siRNA sense strand
ucuaugaagacaugaagga

SEQ ID NO: 1628419 - RNA, 19 nt, Homo sapiens
  misc_RNA (1)...(19): siRNA sense strand
gaugaagaagaacccuaug

SEQ ID NO: 1628420 - RNA, 19 nt, Homo sapiens
  misc_RNA (1)...(19): siRNA sense strand
ucaaggagaugaagaagaa

SEQ ID NO: 1628421 - RNA, 19 nt, Homo sapiens
  misc_RNA (1)...(19): siRNA sense strand
gcgcuucgaugcggacuau

SEQ ID NO: 1628422 - RNA, 19 nt, Homo sapiens
  misc_RNA (1)...(19): siRNA sense strand
gcacccacccuguucucua

SEQ ID NO: 1628423 - RNA, 19 nt, Homo sapiens
  misc_RNA (1)...(19): siRNA sense strand
agaagaacccuaugaccaa

SEQ ID NO: 1628424 - RNA, 19 nt, Homo sapiens
  misc_RNA (1)...(19): siRNA sense strand
augaagacaugaaggagaa

SEQ ID NO: 1628425 - RNA, 19 nt, Homo sapiens
  misc_RNA (1)...(19): siRNA sense strand
gaaguucauggucggagaa

SEQ ID NO: 1628426 - RNA, 19 nt, Homo sapiens
  misc_RNA (1)...(19): siRNA sense strand
agaacccuaugaccaacua

SEQ ID NO: 1628427 - RNA, 19 nt, Homo sapiens
  misc_RNA (1)...(19): siRNA sense strand
acacgucguucaaggagau

SEQ ID NO: 1628428 - RNA, 19 nt, Homo sapiens
  misc_RNA (1)...(19): siRNA sense strand
gggacagcuuccuggagaa

SEQ ID NO: 1628429 - RNA, 19 nt, Homo sapiens
  misc_RNA (1)...(19): siRNA sense strand
guucauggucggagaagug

SEQ ID NO: 1628430 - RNA, 19 nt, Homo sapiens
  misc_RNA (1)...(19): siRNA sense strand
gcagaaugagcgcuucgau

SEQ ID NO: 1628431 - RNA, 19 nt, Homo sapiens
  misc_RNA (1)...(19): siRNA sense strand
ucaccguggcgcagaauga

SEQ ID NO: 1628432 - RNA, 19 nt, Homo sapiens
  misc_RNA (1)...(19): siRNA sense strand
uucucuaccucuucuauga

SEQ ID NO: 1628433 - RNA, 19 nt, Homo sapiens
  misc_RNA (1)...(19): siRNA sense strand
aaaagauccuggaguuugu

SEQ ID NO: 1628434 - RNA, 19 nt, Homo sapiens
  misc_RNA (1)...(19): siRNA sense strand
cacccacccuguucucuac

SEQ ID NO: 1628435 - RNA, 19 nt, Homo sapiens
  misc_RNA (1)...(19): siRNA sense strand
ucuaugaagacaugaagga

SEQ ID NO: 1628436 - RNA, 19 nt, Homo sapiens
  misc_RNA (1)...(19): siRNA sense strand
gaugaagaagaacccuaug

SEQ ID NO: 1628437 - RNA, 19 nt, Homo sapiens
  misc_RNA (1)...(19): siRNA sense strand
ucaaggagaugaagaagaa

SEQ ID NO: 1628438 - RNA, 19 nt, Homo sapiens
  misc_RNA (1)...(19): siRNA sense strand
gcgcuucgaugcggacuau

SEQ ID NO: 1628439 - RNA, 19 nt, Homo sapiens
  misc_RNA (1)...(19): siRNA sense strand
gcacccacccuguucucua

SEQ ID NO: 1628440 - RNA, 19 nt, Homo sapiens
  misc_RNA (1)...(19): siRNA sense strand
agaagaacccuaugaccaa

SEQ ID NO: 1628441 - RNA, 19 nt, Homo sapiens
  misc_RNA (1)...(19): siRNA sense strand
augaagacaugaaggagaa

SEQ ID NO: 1628442 - RNA, 19 nt, Homo sapiens
  misc_RNA (1)...(19): siRNA sense strand
gaaguucauggucggagaa

SEQ ID NO: 1628443 - RNA, 19 nt, Homo sapiens
  misc_RNA (1)...(19): siRNA sense strand
agaacccuaugaccaacua

SEQ ID NO: 1628444 - RNA, 19 nt, Homo sapiens
  misc_RNA (1)...(19): siRNA sense strand
acacgucguucaaggagau

SEQ ID NO: 1628445 - RNA, 19 nt, Homo sapiens
  misc_RNA (1)...(19): siRNA sense strand
gggacagcuuccuggagaa

SEQ ID NO: 1628446 - RNA, 19 nt, Homo sapiens
  misc_RNA (1)...(19): siRNA sense strand
guucauggucggagaagug

SEQ ID NO: 1628447 - RNA, 19 nt, Homo sapiens
  misc_RNA (1)...(19): siRNA sense strand
gcagaaugagcgcuucgau

SEQ ID NO: 1628448 - RNA, 19 nt, Homo sapiens
  misc_RNA (1)...(19): siRNA sense strand
ucaccguggcgcagaauga

SEQ ID NO: 1628449 - RNA, 19 nt, Homo sapiens
  misc_RNA (1)...(19): siRNA sense strand
uucucuaccucuucuauga

SEQ ID NO: 1628450 - RNA, 19 nt, Homo sapiens
  misc_RNA (1)...(19): siRNA sense strand
aaaagauccuggaguuugu

SEQ ID NO: 1628451 - RNA, 19 nt, Homo sapiens
  misc_RNA (1)...(19): siRNA sense strand
cacccacccuguucucuac

SEQ ID NO: 1628452 - RNA, 19 nt, Homo sapiens
  misc_RNA (1)...(19): siRNA sense strand
ucuaugaagacaugaagga

SEQ ID NO: 1628453 - RNA, 19 nt, Homo sapiens
  misc_RNA (1)...(19): siRNA sense strand
gaugaagaagaacccuaug

SEQ ID NO: 1628454 - RNA, 19 nt, Homo sapiens
  misc_RNA (1)...(19): siRNA sense strand
ucaaggagaugaagaagaa

SEQ ID NO: 1628455 - RNA, 19 nt, Homo sapiens
  misc_RNA (1)...(19): siRNA sense strand
gcgcuucgaugcggacuau

SEQ ID NO: 1628456 - RNA, 19 nt, Homo sapiens
  misc_RNA (1)...(19): siRNA sense strand
gcacccacccuguucucua

SEQ ID NO: 1628457 - RNA, 19 nt, Homo sapiens
  misc_RNA (1)...(19): siRNA sense strand
agaagaacccuaugaccaa

SEQ ID NO: 1628458 - RNA, 19 nt, Homo sapiens
  misc_RNA (1)...(19): siRNA sense strand
augaagacaugaaggagaa

SEQ ID NO: 1628459 - RNA, 19 nt, Homo sapiens
  misc_RNA (1)...(19): siRNA sense strand
gaaguucauggucggagaa

SEQ ID NO: 1628460 - RNA, 19 nt, Homo sapiens
  misc_RNA (1)...(19): siRNA sense strand
agaacccuaugaccaacua

SEQ ID NO: 1628461 - RNA, 19 nt, Homo sapiens
  misc_RNA (1)...(19): siRNA sense strand
acacgucguucaaggagau

SEQ ID NO: 1628462 - RNA, 19 nt, Homo sapiens
  misc_RNA (1)...(19): siRNA sense strand
gggacagcuuccuggagaa

SEQ ID NO: 1628463 - RNA, 19 nt, Homo sapiens
  misc_RNA (1)...(19): siRNA sense strand
guucauggucggagaagug

SEQ ID NO: 1628464 - RNA, 19 nt, Homo sapiens
  misc_RNA (1)...(19): siRNA sense strand
gcagaaugagcgcuucgau

SEQ ID NO: 1628465 - RNA, 19 nt, Homo sapiens
  misc_RNA (1)...(19): siRNA sense strand
ucaccguggcgcagaauga

SEQ ID NO: 1628466 - RNA, 19 nt, Homo sapiens
  misc_RNA (1)...(19): siRNA sense strand
uucucuaccucuucuauga

SEQ ID NO: 1628467 - RNA, 19 nt, Homo sapiens
  misc_RNA (1)...(19): siRNA sense strand
aaaagauccuggaguuugu

SEQ ID NO: 1628468 - RNA, 19 nt, Homo sapiens
  misc_RNA (1)...(19): siRNA sense strand
cacccacccuguucucuac

SEQ ID NO: 1628469 - RNA, 19 nt, Homo sapiens
  misc_RNA (1)...(19): siRNA sense strand
ucuaugaagacaugaagga

SEQ ID NO: 1628470 - RNA, 19 nt, Homo sapiens
  misc_RNA (1)...(19): siRNA sense strand
gaugaagaagaacccuaug

SEQ ID NO: 1628471 - RNA, 19 nt, Homo sapiens
  misc_RNA (1)...(19): siRNA sense strand
gaagaugacugaguucuag

SEQ ID NO: 1628472 - RNA, 19 nt, Homo sapiens
  misc_RNA (1)...(19): siRNA sense strand
caagaugggcuaugaguuu

SEQ ID NO: 1628473 - RNA, 19 nt, Homo sapiens
  misc_RNA (1)...(19): siRNA sense strand
acaagaagaugacugaguu

SEQ ID NO: 1628474 - RNA, 19 nt, Homo sapiens
  misc_RNA (1)...(19): siRNA sense strand
ggacaacggcuacuacaca

SEQ ID NO: 1628475 - RNA, 19 nt, Homo sapiens
  misc_RNA (1)...(19): siRNA sense strand
ucaccaagaugggcuauga

SEQ ID NO: 1628476 - RNA, 19 nt, Homo sapiens
  misc_RNA (1)...(19): siRNA sense strand
ccaggaagaugcugaguac

SEQ ID NO: 1628477 - RNA, 19 nt, Homo sapiens
  misc_RNA (1)...(19): siRNA sense strand
gcagacacccacaagaaga

SEQ ID NO: 1628478 - RNA, 19 nt, Homo sapiens
  misc_RNA (1)...(19): siRNA sense strand
cuacuacacagucaaguuu

SEQ ID NO: 1628479 - RNA, 19 nt, Homo sapiens
  misc_RNA (1)...(19): siRNA sense strand
gcuccagacuccucaccaa

SEQ ID NO: 1628480 - RNA, 19 nt, Homo sapiens
  misc_RNA (1)...(19): siRNA sense strand
ggaggagcaaggacaugua

SEQ ID NO: 1628481 - RNA, 19 nt, Homo sapiens
  misc_RNA (1)...(19): siRNA sense strand
gaggugcacacgcgaggua

SEQ ID NO: 1628482 - RNA, 19 nt, Homo sapiens
  misc_RNA (1)...(19): siRNA sense strand
gcaaggcuggcaccaacaa

SEQ ID NO: 1628483 - RNA, 19 nt, Homo sapiens
  misc_RNA (1)...(19): siRNA sense strand
ccagacuccucaccaagau

SEQ ID NO: 1628484 - RNA, 19 nt, Homo sapiens
  misc_RNA (1)...(19): siRNA sense strand
gaaggcagacacccacaag

SEQ ID NO: 1628485 - RNA, 19 nt, Homo sapiens
  misc_RNA (1)...(19): siRNA sense strand
cauccaugcugugguguug

SEQ ID NO: 1628486 - RNA, 19 nt, Homo sapiens
  misc_RNA (1)...(19): siRNA sense strand
gcuacuacacagucaaguu

SEQ ID NO: 1628487 - RNA, 19 nt, Homo sapiens
  misc_RNA (1)...(19): siRNA sense strand
gccaggaagaugcugagua

SEQ ID NO: 1628488 - RNA, 19 nt, Homo sapiens
  misc_RNA (1)...(19): siRNA sense strand
aagaugggcuaugaguuug

SEQ ID NO: 1628489 - RNA, 19 nt, Homo sapiens
  misc_RNA (1)...(19): siRNA sense strand
ggaaggcagacacccacaa

SEQ ID NO: 1628490 - RNA, 19 nt, Homo sapiens
  misc_RNA (1)...(19): siRNA sense strand
guacgggugacuccagcua

SEQ ID NO: 1628491 - RNA, 19 nt, Homo sapiens
  misc_RNA (1)...(19): siRNA sense strand
gaacccagcgggacaucag

SEQ ID NO: 1628492 - RNA, 19 nt, Homo sapiens
  misc_RNA (1)...(19): siRNA sense strand
gaagagcugagugggacaa

SEQ ID NO: 1628493 - RNA, 19 nt, Homo sapiens
  misc_RNA (1)...(19): siRNA sense strand
aggcagacacccacaagaa

SEQ ID NO: 1628494 - RNA, 19 nt, Homo sapiens
  misc_RNA (1)...(19): siRNA sense strand
uggagacccugcagaagca

SEQ ID NO: 1628495 - RNA, 19 nt, Homo sapiens
  misc_RNA (1)...(19): siRNA sense strand
gcagguggucucucuggau

SEQ ID NO: 1628496 - RNA, 19 nt, Homo sapiens
  misc_RNA (1)...(19): siRNA sense strand
gagcugagugggacaaagg

SEQ ID NO: 1628497 - RNA, 19 nt, Homo sapiens
  misc_RNA (1)...(19): siRNA sense strand
ccaagaugggcuaugaguu

SEQ ID NO: 1628498 - RNA, 19 nt, Homo sapiens
  misc_RNA (1)...(19): siRNA sense strand
ggagcaaggacauguacca

SEQ ID NO: 1628499 - RNA, 19 nt, Homo sapiens
  misc_RNA (1)...(19): siRNA sense strand
uccgugugcuuuaccugua

SEQ ID NO: 1628500 - RNA, 19 nt, Homo sapiens
  misc_RNA (1)...(19): siRNA sense strand
ggugcacacgcgagguaua

SEQ ID NO: 1628501 - RNA, 19 nt, Homo sapiens
  misc_RNA (1)...(19): siRNA sense strand
gcccagcuccucggaaugu

SEQ ID NO: 1628502 - RNA, 19 nt, Homo sapiens
  misc_RNA (1)...(19): siRNA sense strand
ccacucacaagucucugaa

SEQ ID NO: 1628503 - RNA, 19 nt, Homo sapiens
  misc_RNA (1)...(19): siRNA sense strand
gagcagaggaaggcagaca

SEQ ID NO: 1628504 - RNA, 19 nt, Homo sapiens
  misc_RNA (1)...(19): siRNA sense strand
ggacgaggaagagcugagu

SEQ ID NO: 1628505 - RNA, 19 nt, Homo sapiens
  misc_RNA (1)...(19): siRNA sense strand
ggaggaggagcaaggacau

SEQ ID NO: 1628506 - RNA, 19 nt, Homo sapiens
  misc_RNA (1)...(19): siRNA sense strand
agagggagaggacgaggaa

SEQ ID NO: 1628507 - RNA, 19 nt, Homo sapiens
  misc_RNA (1)...(19): siRNA sense strand
cugcgugucuggccaagca

SEQ ID NO: 1628508 - RNA, 19 nt, Homo sapiens
  misc_RNA (1)...(19): siRNA sense strand
caagaagaugacugaguuc

SEQ ID NO: 1628509 - RNA, 19 nt, Homo sapiens
  misc_RNA (1)...(19): siRNA sense strand
gcggguguccgugugcuuu

SEQ ID NO: 1628510 - RNA, 19 nt, Homo sapiens
  misc_RNA (1)...(19): siRNA sense strand
agacugaggagaagaucga

SEQ ID NO: 1628511 - RNA, 19 nt, Homo sapiens
  misc_RNA (1)...(19): siRNA sense strand
gaggagcaaggacauguac

SEQ ID NO: 1628512 - RNA, 19 nt, Homo sapiens
  misc_RNA (1)...(19): siRNA sense strand
ggacaacggcuacuacaca

SEQ ID NO: 1628513 - RNA, 19 nt, Homo sapiens
  misc_RNA (1)...(19): siRNA sense strand
ccaggaagaugcugaguac

SEQ ID NO: 1628514 - RNA, 19 nt, Homo sapiens
  misc_RNA (1)...(19): siRNA sense strand
cuacuacacagucaaguuu

SEQ ID NO: 1628515 - RNA, 19 nt, Homo sapiens
  misc_RNA (1)...(19): siRNA sense strand
gccaggaagaugcugagua

SEQ ID NO: 1628516 - RNA, 19 nt, Homo sapiens
  misc_RNA (1)...(19): siRNA sense strand
gcuacuacacagucaaguu

SEQ ID NO: 1628517 - RNA, 19 nt, Homo sapiens
  misc_RNA (1)...(19): siRNA sense strand
guacgggugacuccagcua

SEQ ID NO: 1628518 - RNA, 19 nt, Homo sapiens
  misc_RNA (1)...(19): siRNA sense strand
gaagagcugagugggacaa

SEQ ID NO: 1628519 - RNA, 19 nt, Homo sapiens
  misc_RNA (1)...(19): siRNA sense strand
gcagguggucucucuggau

SEQ ID NO: 1628520 - RNA, 19 nt, Homo sapiens
  misc_RNA (1)...(19): siRNA sense strand
gagcugagugggacaaagg

SEQ ID NO: 1628521 - RNA, 19 nt, Homo sapiens
  misc_RNA (1)...(19): siRNA sense strand
uccgugugcuuuaccugua

SEQ ID NO: 1628522 - RNA, 19 nt, Homo sapiens
  misc_RNA (1)...(19): siRNA sense strand
agagggagaggacgaggaa

SEQ ID NO: 1628523 - RNA, 19 nt, Homo sapiens
  misc_RNA (1)...(19): siRNA sense strand
ccacucacaagucucugaa

SEQ ID NO: 1628524 - RNA, 19 nt, Homo sapiens
  misc_RNA (1)...(19): siRNA sense strand
ggacgaggaagagcugagu

SEQ ID NO: 1628525 - RNA, 19 nt, Homo sapiens
  misc_RNA (1)...(19): siRNA sense strand
gcggguguccgugugcuuu

SEQ ID NO: 1628526 - RNA, 19 nt, Homo sapiens
  misc_RNA (1)...(19): siRNA sense strand
cugcgugucuggccaagca

SEQ ID NO: 1628527 - RNA, 19 nt, Homo sapiens
  misc_RNA (1)...(19): siRNA sense strand
gaagaugacugaguucuag

SEQ ID NO: 1628528 - RNA, 19 nt, Homo sapiens
  misc_RNA (1)...(19): siRNA sense strand
caagaugggcuaugaguuu

SEQ ID NO: 1628529 - RNA, 19 nt, Homo sapiens
  misc_RNA (1)...(19): siRNA sense strand
acaagaagaugacugaguu

SEQ ID NO: 1628530 - RNA, 19 nt, Homo sapiens
  misc_RNA (1)...(19): siRNA sense strand
ggacaacggcuacuacaca

SEQ ID NO: 1628531 - RNA, 19 nt, Homo sapiens
  misc_RNA (1)...(19): siRNA sense strand
ucaccaagaugggcuauga

SEQ ID NO: 1628532 - RNA, 19 nt, Homo sapiens
  misc_RNA (1)...(19): siRNA sense strand
ccaggaagaugcugaguac

SEQ ID NO: 1628533 - RNA, 19 nt, Homo sapiens
  misc_RNA (1)...(19): siRNA sense strand
gcagacacccacaagaaga

SEQ ID NO: 1628534 - RNA, 19 nt, Homo sapiens
  misc_RNA (1)...(19): siRNA sense strand
cuacuacacagucaaguuu

SEQ ID NO: 1628535 - RNA, 19 nt, Homo sapiens
  misc_RNA (1)...(19): siRNA sense strand
gcuccagacuccucaccaa

SEQ ID NO: 1628536 - RNA, 19 nt, Homo sapiens
  misc_RNA (1)...(19): siRNA sense strand
ggaggagcaaggacaugua

SEQ ID NO: 1628537 - RNA, 19 nt, Homo sapiens
  misc_RNA (1)...(19): siRNA sense strand
gaggugcacacgcgaggua

SEQ ID NO: 1628538 - RNA, 19 nt, Homo sapiens
  misc_RNA (1)...(19): siRNA sense strand
gcaaggcuggcaccaacaa

SEQ ID NO: 1628539 - RNA, 19 nt, Homo sapiens
  misc_RNA (1)...(19): siRNA sense strand
ccagacuccucaccaagau

SEQ ID NO: 1628540 - RNA, 19 nt, Homo sapiens
  misc_RNA (1)...(19): siRNA sense strand
gaaggcagacacccacaag

SEQ ID NO: 1628541 - RNA, 19 nt, Homo sapiens
  misc_RNA (1)...(19): siRNA sense strand
cauccaugcugugguguug

SEQ ID NO: 1628542 - RNA, 19 nt, Homo sapiens
  misc_RNA (1)...(19): siRNA sense strand
gcuacuacacagucaaguu

SEQ ID NO: 1628543 - RNA, 19 nt, Homo sapiens
  misc_RNA (1)...(19): siRNA sense strand
gccaggaagaugcugagua

SEQ ID NO: 1628544 - RNA, 19 nt, Homo sapiens
  misc_RNA (1)...(19): siRNA sense strand
aagaugggcuaugaguuug

SEQ ID NO: 1628545 - RNA, 19 nt, Homo sapiens
  misc_RNA (1)...(19): siRNA sense strand
ggaaggcagacacccacaa

SEQ ID NO: 1628546 - RNA, 19 nt, Homo sapiens
  misc_RNA (1)...(19): siRNA sense strand
guacgggugacuccagcua

SEQ ID NO: 1628547 - RNA, 19 nt, Homo sapiens
  misc_RNA (1)...(19): siRNA sense strand
gaacccagcgggacaucag

SEQ ID NO: 1628548 - RNA, 19 nt, Homo sapiens
  misc_RNA (1)...(19): siRNA sense strand
gaagagcugagugggacaa

SEQ ID NO: 1628549 - RNA, 19 nt, Homo sapiens
  misc_RNA (1)...(19): siRNA sense strand
aggcagacacccacaagaa

SEQ ID NO: 1628550 - RNA, 19 nt, Homo sapiens
  misc_RNA (1)...(19): siRNA sense strand
uggagacccugcagaagca

SEQ ID NO: 1628551 - RNA, 19 nt, Homo sapiens
  misc_RNA (1)...(19): siRNA sense strand
gcagguggucucucuggau

SEQ ID NO: 1628552 - RNA, 19 nt, Homo sapiens
  misc_RNA (1)...(19): siRNA sense strand
gagcugagugggacaaagg

SEQ ID NO: 1628553 - RNA, 19 nt, Homo sapiens
  misc_RNA (1)...(19): siRNA sense strand
ccaagaugggcuaugaguu

SEQ ID NO: 1628554 - RNA, 19 nt, Homo sapiens
  misc_RNA (1)...(19): siRNA sense strand
ggagcaaggacauguacca

SEQ ID NO: 1628555 - RNA, 19 nt, Homo sapiens
  misc_RNA (1)...(19): siRNA sense strand
uccgugugcuuuaccugua

SEQ ID NO: 1628556 - RNA, 19 nt, Homo sapiens
  misc_RNA (1)...(19): siRNA sense strand
ggugcacacgcgagguaua

SEQ ID NO: 1628557 - RNA, 19 nt, Homo sapiens
  misc_RNA (1)...(19): siRNA sense strand
gcccagcuccucggaaugu

SEQ ID NO: 1628558 - RNA, 19 nt, Homo sapiens
  misc_RNA (1)...(19): siRNA sense strand
ccacucacaagucucugaa

SEQ ID NO: 1628559 - RNA, 19 nt, Homo sapiens
  misc_RNA (1)...(19): siRNA sense strand
gagcagaggaaggcagaca

SEQ ID NO: 1628560 - RNA, 19 nt, Homo sapiens
  misc_RNA (1)...(19): siRNA sense strand
ggacgaggaagagcugagu

SEQ ID NO: 1628561 - RNA, 19 nt, Homo sapiens
  misc_RNA (1)...(19): siRNA sense strand
ggaggaggagcaaggacau

SEQ ID NO: 1628562 - RNA, 19 nt, Homo sapiens
  misc_RNA (1)...(19): siRNA sense strand
agagggagaggacgaggaa

SEQ ID NO: 1628563 - RNA, 19 nt, Homo sapiens
  misc_RNA (1)...(19): siRNA sense strand
cugcgugucuggccaagca

SEQ ID NO: 1628564 - RNA, 19 nt, Homo sapiens
  misc_RNA (1)...(19): siRNA sense strand
caagaagaugacugaguuc

SEQ ID NO: 1628565 - RNA, 19 nt, Homo sapiens
  misc_RNA (1)...(19): siRNA sense strand
gcggguguccgugugcuuu

SEQ ID NO: 1628566 - RNA, 19 nt, Homo sapiens
  misc_RNA (1)...(19): siRNA sense strand
agacugaggagaagaucga

SEQ ID NO: 1628567 - RNA, 19 nt, Homo sapiens
  misc_RNA (1)...(19): siRNA sense strand
gaggagcaaggacauguac

SEQ ID NO: 1628568 - RNA, 19 nt, Homo sapiens
  misc_RNA (1)...(19): siRNA sense strand
gauaauaaauggucuguga

SEQ ID NO: 1628569 - RNA, 19 nt, Homo sapiens
  misc_RNA (1)...(19): siRNA sense strand
gauacaaauucgcagauaa

SEQ ID NO: 1628570 - RNA, 19 nt, Homo sapiens
  misc_RNA (1)...(19): siRNA sense strand
gaaagagaacuguggcuaa

SEQ ID NO: 1628571 - RNA, 19 nt, Homo sapiens
  misc_RNA (1)...(19): siRNA sense strand
caaauaccagccuagauua

SEQ ID NO: 1628572 - RNA, 19 nt, Homo sapiens
  misc_RNA (1)...(19): siRNA sense strand
gcacggaaaugaucauaac

SEQ ID NO: 1628573 - RNA, 19 nt, Homo sapiens
  misc_RNA (1)...(19): siRNA sense strand
guucugcacucacgucuuu

SEQ ID NO: 1628574 - RNA, 19 nt, Homo sapiens
  misc_RNA (1)...(19): siRNA sense strand
aaagagaacuguggcuaaa

SEQ ID NO: 1628575 - RNA, 19 nt, Homo sapiens
  misc_RNA (1)...(19): siRNA sense strand
ugucaagaaugcaaaguaa

SEQ ID NO: 1628576 - RNA, 19 nt, Homo sapiens
  misc_RNA (1)...(19): siRNA sense strand
caaaguguuucuccaugaa

SEQ ID NO: 1628577 - RNA, 19 nt, Homo sapiens
  misc_RNA (1)...(19): siRNA sense strand
gaagugggcacggaaauga

SEQ ID NO: 1628578 - RNA, 19 nt, Homo sapiens
  misc_RNA (1)...(19): siRNA sense strand
ucaaaguguuucuccauga

SEQ ID NO: 1628579 - RNA, 19 nt, Homo sapiens
  misc_RNA (1)...(19): siRNA sense strand
acaaauaccagccuagauu

SEQ ID NO: 1628580 - RNA, 19 nt, Homo sapiens
  misc_RNA (1)...(19): siRNA sense strand
gcacagaaugucaagaaug

SEQ ID NO: 1628581 - RNA, 19 nt, Homo sapiens
  misc_RNA (1)...(19): siRNA sense strand
cacaagaucacgcaauuaa

SEQ ID NO: 1628582 - RNA, 19 nt, Homo sapiens
  misc_RNA (1)...(19): siRNA sense strand
gaucacagauacaaauucg

SEQ ID NO: 1628583 - RNA, 19 nt, Homo sapiens
  misc_RNA (1)...(19): siRNA sense strand
gaaagcggaugaaaauaau

SEQ ID NO: 1628584 - RNA, 19 nt, Homo sapiens
  misc_RNA (1)...(19): siRNA sense strand
acauggagcugcacagaau

SEQ ID NO: 1628585 - RNA, 19 nt, Homo sapiens
  misc_RNA (1)...(19): siRNA sense strand
ggagggaaucaaaguguuu

SEQ ID NO: 1628586 - RNA, 19 nt, Homo sapiens
  misc_RNA (1)...(19): siRNA sense strand
gcacaaauaccagccuaga

SEQ ID NO: 1628587 - RNA, 19 nt, Homo sapiens
  misc_RNA (1)...(19): siRNA sense strand
ccaggagcauagccaaauu

SEQ ID NO: 1628588 - RNA, 19 nt, Homo sapiens
  misc_RNA (1)...(19): siRNA sense strand
caagaucacgcaauuaaag

SEQ ID NO: 1628589 - RNA, 19 nt, Homo sapiens
  misc_RNA (1)...(19): siRNA sense strand
gcucgucuccuuccagaaa

SEQ ID NO: 1628590 - RNA, 19 nt, Homo sapiens
  misc_RNA (1)...(19): siRNA sense strand
ugaggcagcucgucuccuu

SEQ ID NO: 1628591 - RNA, 19 nt, Homo sapiens
  misc_RNA (1)...(19): siRNA sense strand
gggcauggagggaaucaaa

SEQ ID NO: 1628592 - RNA, 19 nt, Homo sapiens
  misc_RNA (1)...(19): siRNA sense strand
gaucacgcaauuaaagauu

SEQ ID NO: 1628593 - RNA, 19 nt, Homo sapiens
  misc_RNA (1)...(19): siRNA sense strand
agauacaaauucgcagaua

SEQ ID NO: 1628594 - RNA, 19 nt, Homo sapiens
  misc_RNA (1)...(19): siRNA sense strand
ccacaagaucacgcaauua

SEQ ID NO: 1628595 - RNA, 19 nt, Homo sapiens
  misc_RNA (1)...(19): siRNA sense strand
ggcggauguuucccaguua

SEQ ID NO: 1628596 - RNA, 19 nt, Homo sapiens
  misc_RNA (1)...(19): siRNA sense strand
cggaaaugaucauaaccaa

SEQ ID NO: 1628597 - RNA, 19 nt, Homo sapiens
  misc_RNA (1)...(19): siRNA sense strand
acaaccaccuggacccauu

SEQ ID NO: 1628598 - RNA, 19 nt, Homo sapiens
  misc_RNA (1)...(19): siRNA sense strand
gagcauagccaaauuuacc

SEQ ID NO: 1628599 - RNA, 19 nt, Homo sapiens
  misc_RNA (1)...(19): siRNA sense strand
cacagaaugucaagaaugc

SEQ ID NO: 1628600 - RNA, 19 nt, Homo sapiens
  misc_RNA (1)...(19): siRNA sense strand
uuauagcagugacuuccua

SEQ ID NO: 1628601 - RNA, 19 nt, Homo sapiens
  misc_RNA (1)...(19): siRNA sense strand
gauuacacaucgugaaagc

SEQ ID NO: 1628602 - RNA, 19 nt, Homo sapiens
  misc_RNA (1)...(19): siRNA sense strand
ugaaagcggaugaaaauaa

SEQ ID NO: 1628603 - RNA, 19 nt, Homo sapiens
  misc_RNA (1)...(19): siRNA sense strand
gauguuucccaguuacaaa

SEQ ID NO: 1628604 - RNA, 19 nt, Homo sapiens
  misc_RNA (1)...(19): siRNA sense strand
caagaaugcaaaguaaaga

SEQ ID NO: 1628605 - RNA, 19 nt, Homo sapiens
  misc_RNA (1)...(19): siRNA sense strand
uagauuacacaucgugaaa

SEQ ID NO: 1628606 - RNA, 19 nt, Homo sapiens
  misc_RNA (1)...(19): siRNA sense strand
gacgaucacagauacaaau

SEQ ID NO: 1628607 - RNA, 19 nt, Homo sapiens
  misc_RNA (1)...(19): siRNA sense strand
cauuguaccugccgacgau

SEQ ID NO: 1628608 - RNA, 19 nt, Homo sapiens
  misc_RNA (1)...(19): siRNA sense strand
ucaagaaugcaaaguaaag

SEQ ID NO: 1628609 - RNA, 19 nt, Homo sapiens
  misc_RNA (1)...(19): siRNA sense strand
uagccaaauuuaccauugu

SEQ ID NO: 1628610 - RNA, 19 nt, Homo sapiens
  misc_RNA (1)...(19): siRNA sense strand
accacaagaucacgcaauu

SEQ ID NO: 1628611 - RNA, 19 nt, Homo sapiens
  misc_RNA (1)...(19): siRNA sense strand
agccaaauuuaccauugua

SEQ ID NO: 1628612 - RNA, 19 nt, Homo sapiens
  misc_RNA (1)...(19): siRNA sense strand
caauaccagugugagaaug

SEQ ID NO: 1628613 - RNA, 19 nt, Homo sapiens
  misc_RNA (1)...(19): siRNA sense strand
aauaauggauuuggcucaa

SEQ ID NO: 1628614 - RNA, 19 nt, Homo sapiens
  misc_RNA (1)...(19): siRNA sense strand
gcuggaaggcggauguuuc

SEQ ID NO: 1628615 - RNA, 19 nt, Homo sapiens
  misc_RNA (1)...(19): siRNA sense strand
aggcggauguuucccaguu

SEQ ID NO: 1628616 - RNA, 19 nt, Homo sapiens
  misc_RNA (1)...(19): siRNA sense strand
gcauggagggaaucaaagu

SEQ ID NO: 1628617 - RNA, 19 nt, Homo sapiens
  misc_RNA (1)...(19): siRNA sense strand
caggagcauagccaaauuu

SEQ ID NO: 1628618 - RNA, 19 nt, Homo sapiens
  misc_RNA (1)...(19): siRNA sense strand
gagcugcacagaaugucaa

SEQ ID NO: 1628619 - RNA, 19 nt, Homo sapiens
  misc_RNA (1)...(19): siRNA sense strand
uaccagaaccacaagauca

SEQ ID NO: 1628620 - RNA, 19 nt, Homo sapiens
  misc_RNA (1)...(19): siRNA sense strand
ccauuugggcauauuauuc

SEQ ID NO: 1628621 - RNA, 19 nt, Homo sapiens
  misc_RNA (1)...(19): siRNA sense strand
auagccaaauuuaccauug

SEQ ID NO: 1628622 - RNA, 19 nt, Homo sapiens
  misc_RNA (1)...(19): siRNA sense strand
gacauggagcugcacagaa

SEQ ID NO: 1628623 - RNA, 19 nt, Homo sapiens
  misc_RNA (1)...(19): siRNA sense strand
cuaaauuccaugcacaaau

SEQ ID NO: 1628624 - RNA, 19 nt, Homo sapiens
  misc_RNA (1)...(19): siRNA sense strand
aacucaagcucaccaacaa

SEQ ID NO: 1628625 - RNA, 19 nt, Homo sapiens
  misc_RNA (1)...(19): siRNA sense strand
caaauuuaccauuguacca

SEQ ID NO: 1628626 - RNA, 19 nt, Homo sapiens
  misc_RNA (1)...(19): siRNA sense strand
ccaauaccagugugagaau

SEQ ID NO: 1628627 - RNA, 19 nt, Homo sapiens
  misc_RNA (1)...(19): siRNA sense strand
caaccaccuggacccauuu

SEQ ID NO: 1628628 - RNA, 19 nt, Homo sapiens
  misc_RNA (1)...(19): siRNA sense strand
aaacucaagcucaccaaca

SEQ ID NO: 1628629 - RNA, 19 nt, Homo sapiens
  misc_RNA (1)...(19): siRNA sense strand
aggagcauagccaaauuua

SEQ ID NO: 1628630 - RNA, 19 nt, Homo sapiens
  misc_RNA (1)...(19): siRNA sense strand
uggagggaaucaaaguguu

SEQ ID NO: 1628631 - RNA, 19 nt, Homo sapiens
  misc_RNA (1)...(19): siRNA sense strand
cagaaugucaagaaugcaa

SEQ ID NO: 1628632 - RNA, 19 nt, Homo sapiens
  misc_RNA (1)...(19): siRNA sense strand
acaagaucacgcaauuaaa

SEQ ID NO: 1628633 - RNA, 19 nt, Homo sapiens
  misc_RNA (1)...(19): siRNA sense strand
cugcacagaaugucaagaa

SEQ ID NO: 1628634 - RNA, 19 nt, Homo sapiens
  misc_RNA (1)...(19): siRNA sense strand
cgacgaucacagauacaaa

SEQ ID NO: 1628635 - RNA, 19 nt, Homo sapiens
  misc_RNA (1)...(19): siRNA sense strand
auacagcguucugcacuca

SEQ ID NO: 1628636 - RNA, 19 nt, Homo sapiens
  misc_RNA (1)...(19): siRNA sense strand
gggcacggaaaugaucaua

SEQ ID NO: 1628637 - RNA, 19 nt, Homo sapiens
  misc_RNA (1)...(19): siRNA sense strand
gcggauguuucccaguuac

SEQ ID NO: 1628638 - RNA, 19 nt, Homo sapiens
  misc_RNA (1)...(19): siRNA sense strand
ugacauggagcugcacaga

SEQ ID NO: 1628639 - RNA, 19 nt, Homo sapiens
  misc_RNA (1)...(19): siRNA sense strand
gucaagaaugcaaaguaaa

SEQ ID NO: 1628640 - RNA, 19 nt, Homo sapiens
  misc_RNA (1)...(19): siRNA sense strand
gacgggccuuaaucccaaa

SEQ ID NO: 1628641 - RNA, 19 nt, Homo sapiens
  misc_RNA (1)...(19): siRNA sense strand
ggauguuucccaguuacaa

SEQ ID NO: 1628642 - RNA, 19 nt, Homo sapiens
  misc_RNA (1)...(19): siRNA sense strand
cgaagugggcacggaaaug

SEQ ID NO: 1628643 - RNA, 19 nt, Homo sapiens
  misc_RNA (1)...(19): siRNA sense strand
ggcacggaaaugaucauaa

SEQ ID NO: 1628644 - RNA, 19 nt, Homo sapiens
  misc_RNA (1)...(19): siRNA sense strand
agagaacuguggcuaaaau

SEQ ID NO: 1628645 - RNA, 19 nt, Homo sapiens
  misc_RNA (1)...(19): siRNA sense strand
aagaucacgcaauuaaaga

SEQ ID NO: 1628646 - RNA, 19 nt, Homo sapiens
  misc_RNA (1)...(19): siRNA sense strand
gaaugucaagaaugcaaag

SEQ ID NO: 1628647 - RNA, 19 nt, Homo sapiens
  misc_RNA (1)...(19): siRNA sense strand
ggagcugcacagaauguca

SEQ ID NO: 1628648 - RNA, 19 nt, Homo sapiens
  misc_RNA (1)...(19): siRNA sense strand
gauaauaaauggucuguga

SEQ ID NO: 1628649 - RNA, 19 nt, Homo sapiens
  misc_RNA (1)...(19): siRNA sense strand
gauacaaauucgcagauaa

SEQ ID NO: 1628650 - RNA, 19 nt, Homo sapiens
  misc_RNA (1)...(19): siRNA sense strand
gaaagagaacuguggcuaa

SEQ ID NO: 1628651 - RNA, 19 nt, Homo sapiens
  misc_RNA (1)...(19): siRNA sense strand
caaauaccagccuagauua

SEQ ID NO: 1628652 - RNA, 19 nt, Homo sapiens
  misc_RNA (1)...(19): siRNA sense strand
gcacggaaaugaucauaac

SEQ ID NO: 1628653 - RNA, 19 nt, Homo sapiens
  misc_RNA (1)...(19): siRNA sense strand
guucugcacucacgucuuu

SEQ ID NO: 1628654 - RNA, 19 nt, Homo sapiens
  misc_RNA (1)...(19): siRNA sense strand
aaagagaacuguggcuaaa

SEQ ID NO: 1628655 - RNA, 19 nt, Homo sapiens
  misc_RNA (1)...(19): siRNA sense strand
ugucaagaaugcaaaguaa

SEQ ID NO: 1628656 - RNA, 19 nt, Homo sapiens
  misc_RNA (1)...(19): siRNA sense strand
caaaguguuucuccaugaa

SEQ ID NO: 1628657 - RNA, 19 nt, Homo sapiens
  misc_RNA (1)...(19): siRNA sense strand
gaagugggcacggaaauga

SEQ ID NO: 1628658 - RNA, 19 nt, Homo sapiens
  misc_RNA (1)...(19): siRNA sense strand
ucaaaguguuucuccauga

SEQ ID NO: 1628659 - RNA, 19 nt, Homo sapiens
  misc_RNA (1)...(19): siRNA sense strand
acaaauaccagccuagauu

SEQ ID NO: 1628660 - RNA, 19 nt, Homo sapiens
  misc_RNA (1)...(19): siRNA sense strand
gcacagaaugucaagaaug

SEQ ID NO: 1628661 - RNA, 19 nt, Homo sapiens
  misc_RNA (1)...(19): siRNA sense strand
cacaagaucacgcaauuaa

SEQ ID NO: 1628662 - RNA, 19 nt, Homo sapiens
  misc_RNA (1)...(19): siRNA sense strand
gaucacagauacaaauucg

SEQ ID NO: 1628663 - RNA, 19 nt, Homo sapiens
  misc_RNA (1)...(19): siRNA sense strand
gaaagcggaugaaaauaau

SEQ ID NO: 1628664 - RNA, 19 nt, Homo sapiens
  misc_RNA (1)...(19): siRNA sense strand
ggagggaaucaaaguguuu

SEQ ID NO: 1628665 - RNA, 19 nt, Homo sapiens
  misc_RNA (1)...(19): siRNA sense strand
acauggagcugcacagaau

SEQ ID NO: 1628666 - RNA, 19 nt, Homo sapiens
  misc_RNA (1)...(19): siRNA sense strand
gcacaaauaccagccuaga

SEQ ID NO: 1628667 - RNA, 19 nt, Homo sapiens
  misc_RNA (1)...(19): siRNA sense strand
ccaggagcauagccaaauu

SEQ ID NO: 1628668 - RNA, 19 nt, Homo sapiens
  misc_RNA (1)...(19): siRNA sense strand
caagaucacgcaauuaaag

SEQ ID NO: 1628669 - RNA, 19 nt, Homo sapiens
  misc_RNA (1)...(19): siRNA sense strand
gcucgucuccuuccagaaa

SEQ ID NO: 1628670 - RNA, 19 nt, Homo sapiens
  misc_RNA (1)...(19): siRNA sense strand
ugaggcagcucgucuccuu

SEQ ID NO: 1628671 - RNA, 19 nt, Homo sapiens
  misc_RNA (1)...(19): siRNA sense strand
gaucacgcaauuaaagauu

SEQ ID NO: 1628672 - RNA, 19 nt, Homo sapiens
  misc_RNA (1)...(19): siRNA sense strand
agauacaaauucgcagaua

SEQ ID NO: 1628673 - RNA, 19 nt, Homo sapiens
  misc_RNA (1)...(19): siRNA sense strand
ccacaagaucacgcaauua

SEQ ID NO: 1628674 - RNA, 19 nt, Homo sapiens
  misc_RNA (1)...(19): siRNA sense strand
ggcggauguuucccaguua

SEQ ID NO: 1628675 - RNA, 19 nt, Homo sapiens
  misc_RNA (1)...(19): siRNA sense strand
cggaaaugaucauaaccaa

SEQ ID NO: 1628676 - RNA, 19 nt, Homo sapiens
  misc_RNA (1)...(19): siRNA sense strand
acaaccaccuggacccauu

SEQ ID NO: 1628677 - RNA, 19 nt, Homo sapiens
  misc_RNA (1)...(19): siRNA sense strand
gagcauagccaaauuuacc

SEQ ID NO: 1628678 - RNA, 19 nt, Homo sapiens
  misc_RNA (1)...(19): siRNA sense strand
cacagaaugucaagaaugc

SEQ ID NO: 1628679 - RNA, 19 nt, Homo sapiens
  misc_RNA (1)...(19): siRNA sense strand
uuauagcagugacuuccua

SEQ ID NO: 1628680 - RNA, 19 nt, Homo sapiens
  misc_RNA (1)...(19): siRNA sense strand
gauuacacaucgugaaagc

SEQ ID NO: 1628681 - RNA, 19 nt, Homo sapiens
  misc_RNA (1)...(19): siRNA sense strand
ugaaagcggaugaaaauaa

SEQ ID NO: 1628682 - RNA, 19 nt, Homo sapiens
  misc_RNA (1)...(19): siRNA sense strand
gauguuucccaguuacaaa

SEQ ID NO: 1628683 - RNA, 19 nt, Homo sapiens
  misc_RNA (1)...(19): siRNA sense strand
caagaaugcaaaguaaaga

SEQ ID NO: 1628684 - RNA, 19 nt, Homo sapiens
  misc_RNA (1)...(19): siRNA sense strand
uagauuacacaucgugaaa

SEQ ID NO: 1628685 - RNA, 19 nt, Homo sapiens
  misc_RNA (1)...(19): siRNA sense strand
gacgaucacagauacaaau

SEQ ID NO: 1628686 - RNA, 19 nt, Homo sapiens
  misc_RNA (1)...(19): siRNA sense strand
cauuguaccugccgacgau

SEQ ID NO: 1628687 - RNA, 19 nt, Homo sapiens
  misc_RNA (1)...(19): siRNA sense strand
ucaagaaugcaaaguaaag

SEQ ID NO: 1628688 - RNA, 19 nt, Homo sapiens
  misc_RNA (1)...(19): siRNA sense strand
uagccaaauuuaccauugu

SEQ ID NO: 1628689 - RNA, 19 nt, Homo sapiens
  misc_RNA (1)...(19): siRNA sense strand
accacaagaucacgcaauu

SEQ ID NO: 1628690 - RNA, 19 nt, Homo sapiens
  misc_RNA (1)...(19): siRNA sense strand
agccaaauuuaccauugua

SEQ ID NO: 1628691 - RNA, 19 nt, Homo sapiens
  misc_RNA (1)...(19): siRNA sense strand
caauaccagugugagaaug

SEQ ID NO: 1628692 - RNA, 19 nt, Homo sapiens
  misc_RNA (1)...(19): siRNA sense strand
aggcggauguuucccaguu

SEQ ID NO: 1628693 - RNA, 19 nt, Homo sapiens
  misc_RNA (1)...(19): siRNA sense strand
aauaauggauuuggcucaa

SEQ ID NO: 1628694 - RNA, 19 nt, Homo sapiens
  misc_RNA (1)...(19): siRNA sense strand
gcuggaaggcggauguuuc

SEQ ID NO: 1628695 - RNA, 19 nt, Homo sapiens
  misc_RNA (1)...(19): siRNA sense strand
uaccagaaccacaagauca

SEQ ID NO: 1628696 - RNA, 19 nt, Homo sapiens
  misc_RNA (1)...(19): siRNA sense strand
caggagcauagccaaauuu

SEQ ID NO: 1628697 - RNA, 19 nt, Homo sapiens
  misc_RNA (1)...(19): siRNA sense strand
gagcugcacagaaugucaa

SEQ ID NO: 1628698 - RNA, 19 nt, Homo sapiens
  misc_RNA (1)...(19): siRNA sense strand
ccauuugggcauauuauuc

SEQ ID NO: 1628699 - RNA, 19 nt, Homo sapiens
  misc_RNA (1)...(19): siRNA sense strand
auagccaaauuuaccauug

SEQ ID NO: 1628700 - RNA, 19 nt, Homo sapiens
  misc_RNA (1)...(19): siRNA sense strand
gacauggagcugcacagaa

SEQ ID NO: 1628701 - RNA, 19 nt, Homo sapiens
  misc_RNA (1)...(19): siRNA sense strand
cuaaauuccaugcacaaau

SEQ ID NO: 1628702 - RNA, 19 nt, Homo sapiens
  misc_RNA (1)...(19): siRNA sense strand
aacucaagcucaccaacaa

SEQ ID NO: 1628703 - RNA, 19 nt, Homo sapiens
  misc_RNA (1)...(19): siRNA sense strand
caaauuuaccauuguacca

SEQ ID NO: 1628704 - RNA, 19 nt, Homo sapiens
  misc_RNA (1)...(19): siRNA sense strand
ccaauaccagugugagaau

SEQ ID NO: 1628705 - RNA, 19 nt, Homo sapiens
  misc_RNA (1)...(19): siRNA sense strand
caaccaccuggacccauuu

SEQ ID NO: 1628706 - RNA, 19 nt, Homo sapiens
  misc_RNA (1)...(19): siRNA sense strand
aaacucaagcucaccaaca

SEQ ID NO: 1628707 - RNA, 19 nt, Homo sapiens
  misc_RNA (1)...(19): siRNA sense strand
aggagcauagccaaauuua

SEQ ID NO: 1628708 - RNA, 19 nt, Homo sapiens
  misc_RNA (1)...(19): siRNA sense strand
cagaaugucaagaaugcaa

SEQ ID NO: 1628709 - RNA, 19 nt, Homo sapiens
  misc_RNA (1)...(19): siRNA sense strand
acaagaucacgcaauuaaa

SEQ ID NO: 1628710 - RNA, 19 nt, Homo sapiens
  misc_RNA (1)...(19): siRNA sense strand
cugcacagaaugucaagaa

SEQ ID NO: 1628711 - RNA, 19 nt, Homo sapiens
  misc_RNA (1)...(19): siRNA sense strand
cgacgaucacagauacaaa

SEQ ID NO: 1628712 - RNA, 19 nt, Homo sapiens
  misc_RNA (1)...(19): siRNA sense strand
gggcacggaaaugaucaua

SEQ ID NO: 1628713 - RNA, 19 nt, Homo sapiens
  misc_RNA (1)...(19): siRNA sense strand
auacagcguucugcacuca

SEQ ID NO: 1628714 - RNA, 19 nt, Homo sapiens
  misc_RNA (1)...(19): siRNA sense strand
gcggauguuucccaguuac

SEQ ID NO: 1628715 - RNA, 19 nt, Homo sapiens
  misc_RNA (1)...(19): siRNA sense strand
ugacauggagcugcacaga

SEQ ID NO: 1628716 - RNA, 19 nt, Homo sapiens
  misc_RNA (1)...(19): siRNA sense strand
gucaagaaugcaaaguaaa

SEQ ID NO: 1628717 - RNA, 19 nt, Homo sapiens
  misc_RNA (1)...(19): siRNA sense strand
cgaagugggcacggaaaug

SEQ ID NO: 1628718 - RNA, 19 nt, Homo sapiens
  misc_RNA (1)...(19): siRNA sense strand
ggauguuucccaguuacaa

SEQ ID NO: 1628719 - RNA, 19 nt, Homo sapiens
  misc_RNA (1)...(19): siRNA sense strand
gacgggccuuaaucccaaa

SEQ ID NO: 1628720 - RNA, 19 nt, Homo sapiens
  misc_RNA (1)...(19): siRNA sense strand
ggcacggaaaugaucauaa

SEQ ID NO: 1628721 - RNA, 19 nt, Homo sapiens
  misc_RNA (1)...(19): siRNA sense strand
agagaacuguggcuaaaau

SEQ ID NO: 1628722 - RNA, 19 nt, Homo sapiens
  misc_RNA (1)...(19): siRNA sense strand
aagaucacgcaauuaaaga

SEQ ID NO: 1628723 - RNA, 19 nt, Homo sapiens
  misc_RNA (1)...(19): siRNA sense strand
gaaugucaagaaugcaaag

SEQ ID NO: 1628724 - RNA, 19 nt, Homo sapiens
  misc_RNA (1)...(19): siRNA sense strand
ggagcugcacagaauguca

SEQ ID NO: 1628725 - RNA, 19 nt, Homo sapiens
  misc_RNA (1)...(19): siRNA sense strand
gauaauaaauggucuguga

SEQ ID NO: 1628726 - RNA, 19 nt, Homo sapiens
  misc_RNA (1)...(19): siRNA sense strand
gauacaaauucgcagauaa

SEQ ID NO: 1628727 - RNA, 19 nt, Homo sapiens
  misc_RNA (1)...(19): siRNA sense strand
gaaagagaacuguggcuaa

SEQ ID NO: 1628728 - RNA, 19 nt, Homo sapiens
  misc_RNA (1)...(19): siRNA sense strand
caaauaccagccuagauua

SEQ ID NO: 1628729 - RNA, 19 nt, Homo sapiens
  misc_RNA (1)...(19): siRNA sense strand
gcacggaaaugaucauaac

SEQ ID NO: 1628730 - RNA, 19 nt, Homo sapiens
  misc_RNA (1)...(19): siRNA sense strand
guucugcacucacgucuuu

SEQ ID NO: 1628731 - RNA, 19 nt, Homo sapiens
  misc_RNA (1)...(19): siRNA sense strand
aaagagaacuguggcuaaa

SEQ ID NO: 1628732 - RNA, 19 nt, Homo sapiens
  misc_RNA (1)...(19): siRNA sense strand
ugucaagaaugcaaaguaa

SEQ ID NO: 1628733 - RNA, 19 nt, Homo sapiens
  misc_RNA (1)...(19): siRNA sense strand
caaaguguuucuccaugaa

SEQ ID NO: 1628734 - RNA, 19 nt, Homo sapiens
  misc_RNA (1)...(19): siRNA sense strand
gaagugggcacggaaauga

SEQ ID NO: 1628735 - RNA, 19 nt, Homo sapiens
  misc_RNA (1)...(19): siRNA sense strand
ucaaaguguuucuccauga

SEQ ID NO: 1628736 - RNA, 19 nt, Homo sapiens
  misc_RNA (1)...(19): siRNA sense strand
acaaauaccagccuagauu

SEQ ID NO: 1628737 - RNA, 19 nt, Homo sapiens
  misc_RNA (1)...(19): siRNA sense strand
gcacagaaugucaagaaug

SEQ ID NO: 1628738 - RNA, 19 nt, Homo sapiens
  misc_RNA (1)...(19): siRNA sense strand
cacaagaucacgcaauuaa

SEQ ID NO: 1628739 - RNA, 19 nt, Homo sapiens
  misc_RNA (1)...(19): siRNA sense strand
gaucacagauacaaauucg

SEQ ID NO: 1628740 - RNA, 19 nt, Homo sapiens
  misc_RNA (1)...(19): siRNA sense strand
gaaagcggaugaaaauaau

SEQ ID NO: 1628741 - RNA, 19 nt, Homo sapiens
  misc_RNA (1)...(19): siRNA sense strand
acauggagcugcacagaau

SEQ ID NO: 1628742 - RNA, 19 nt, Homo sapiens
  misc_RNA (1)...(19): siRNA sense strand
ggagggaaucaaaguguuu

SEQ ID NO: 1628743 - RNA, 19 nt, Homo sapiens
  misc_RNA (1)...(19): siRNA sense strand
gcacaaauaccagccuaga

SEQ ID NO: 1628744 - RNA, 19 nt, Homo sapiens
  misc_RNA (1)...(19): siRNA sense strand
ccaggagcauagccaaauu

SEQ ID NO: 1628745 - RNA, 19 nt, Homo sapiens
  misc_RNA (1)...(19): siRNA sense strand
caagaucacgcaauuaaag

SEQ ID NO: 1628746 - RNA, 19 nt, Homo sapiens
  misc_RNA (1)...(19): siRNA sense strand
gcucgucuccuuccagaaa

SEQ ID NO: 1628747 - RNA, 19 nt, Homo sapiens
  misc_RNA (1)...(19): siRNA sense strand
ugaggcagcucgucuccuu

SEQ ID NO: 1628748 - RNA, 19 nt, Homo sapiens
  misc_RNA (1)...(19): siRNA sense strand
gggcauggagggaaucaaa

SEQ ID NO: 1628749 - RNA, 19 nt, Homo sapiens
  misc_RNA (1)...(19): siRNA sense strand
gaucacgcaauuaaagauu

SEQ ID NO: 1628750 - RNA, 19 nt, Homo sapiens
  misc_RNA (1)...(19): siRNA sense strand
agauacaaauucgcagaua

SEQ ID NO: 1628751 - RNA, 19 nt, Homo sapiens
  misc_RNA (1)...(19): siRNA sense strand
ccacaagaucacgcaauua

SEQ ID NO: 1628752 - RNA, 19 nt, Homo sapiens
  misc_RNA (1)...(19): siRNA sense strand
ggcggauguuucccaguua

SEQ ID NO: 1628753 - RNA, 19 nt, Homo sapiens
  misc_RNA (1)...(19): siRNA sense strand
cggaaaugaucauaaccaa

SEQ ID NO: 1628754 - RNA, 19 nt, Homo sapiens
  misc_RNA (1)...(19): siRNA sense strand
acaaccaccuggacccauu

SEQ ID NO: 1628755 - RNA, 19 nt, Homo sapiens
  misc_RNA (1)...(19): siRNA sense strand
gagcauagccaaauuuacc

SEQ ID NO: 1628756 - RNA, 19 nt, Homo sapiens
  misc_RNA (1)...(19): siRNA sense strand
cacagaaugucaagaaugc

SEQ ID NO: 1628757 - RNA, 19 nt, Homo sapiens
  misc_RNA (1)...(19): siRNA sense strand
uuauagcagugacuuccua

SEQ ID NO: 1628758 - RNA, 19 nt, Homo sapiens
  misc_RNA (1)...(19): siRNA sense strand
gauuacacaucgugaaagc

SEQ ID NO: 1628759 - RNA, 19 nt, Homo sapiens
  misc_RNA (1)...(19): siRNA sense strand
ugaaagcggaugaaaauaa

SEQ ID NO: 1628760 - RNA, 19 nt, Homo sapiens
  misc_RNA (1)...(19): siRNA sense strand
gauguuucccaguuacaaa

SEQ ID NO: 1628761 - RNA, 19 nt, Homo sapiens
  misc_RNA (1)...(19): siRNA sense strand
caagaaugcaaaguaaaga

SEQ ID NO: 1628762 - RNA, 19 nt, Homo sapiens
  misc_RNA (1)...(19): siRNA sense strand
uagauuacacaucgugaaa

SEQ ID NO: 1628763 - RNA, 19 nt, Homo sapiens
  misc_RNA (1)...(19): siRNA sense strand
gacgaucacagauacaaau

SEQ ID NO: 1628764 - RNA, 19 nt, Homo sapiens
  misc_RNA (1)...(19): siRNA sense strand
cauuguaccugccgacgau

SEQ ID NO: 1628765 - RNA, 19 nt, Homo sapiens
  misc_RNA (1)...(19): siRNA sense strand
ucaagaaugcaaaguaaag

SEQ ID NO: 1628766 - RNA, 19 nt, Homo sapiens
  misc_RNA (1)...(19): siRNA sense strand
uagccaaauuuaccauugu

SEQ ID NO: 1628767 - RNA, 19 nt, Homo sapiens
  misc_RNA (1)...(19): siRNA sense strand
accacaagaucacgcaauu

SEQ ID NO: 1628768 - RNA, 19 nt, Homo sapiens
  misc_RNA (1)...(19): siRNA sense strand
agccaaauuuaccauugua

SEQ ID NO: 1628769 - RNA, 19 nt, Homo sapiens
  misc_RNA (1)...(19): siRNA sense strand
caauaccagugugagaaug

SEQ ID NO: 1628770 - RNA, 19 nt, Homo sapiens
  misc_RNA (1)...(19): siRNA sense strand
aauaauggauuuggcucaa

SEQ ID NO: 1628771 - RNA, 19 nt, Homo sapiens
  misc_RNA (1)...(19): siRNA sense strand
gcuggaaggcggauguuuc

SEQ ID NO: 1628772 - RNA, 19 nt, Homo sapiens
  misc_RNA (1)...(19): siRNA sense strand
aggcggauguuucccaguu

SEQ ID NO: 1628773 - RNA, 19 nt, Homo sapiens
  misc_RNA (1)...(19): siRNA sense strand
gcauggagggaaucaaagu

SEQ ID NO: 1628774 - RNA, 19 nt, Homo sapiens
  misc_RNA (1)...(19): siRNA sense strand
caggagcauagccaaauuu

SEQ ID NO: 1628775 - RNA, 19 nt, Homo sapiens
  misc_RNA (1)...(19): siRNA sense strand
gagcugcacagaaugucaa

SEQ ID NO: 1628776 - RNA, 19 nt, Homo sapiens
  misc_RNA (1)...(19): siRNA sense strand
uaccagaaccacaagauca

SEQ ID NO: 1628777 - RNA, 19 nt, Homo sapiens
  misc_RNA (1)...(19): siRNA sense strand
ccauuugggcauauuauuc

SEQ ID NO: 1628778 - RNA, 19 nt, Homo sapiens
  misc_RNA (1)...(19): siRNA sense strand
auagccaaauuuaccauug

SEQ ID NO: 1628779 - RNA, 19 nt, Homo sapiens
  misc_RNA (1)...(19): siRNA sense strand
gacauggagcugcacagaa

SEQ ID NO: 1628780 - RNA, 19 nt, Homo sapiens
  misc_RNA (1)...(19): siRNA sense strand
cuaaauuccaugcacaaau

SEQ ID NO: 1628781 - RNA, 19 nt, Homo sapiens
  misc_RNA (1)...(19): siRNA sense strand
aacucaagcucaccaacaa

SEQ ID NO: 1628782 - RNA, 19 nt, Homo sapiens
  misc_RNA (1)...(19): siRNA sense strand
caaauuuaccauuguacca

SEQ ID NO: 1628783 - RNA, 19 nt, Homo sapiens
  misc_RNA (1)...(19): siRNA sense strand
ccaauaccagugugagaau

SEQ ID NO: 1628784 - RNA, 19 nt, Homo sapiens
  misc_RNA (1)...(19): siRNA sense strand
caaccaccuggacccauuu

SEQ ID NO: 1628785 - RNA, 19 nt, Homo sapiens
  misc_RNA (1)...(19): siRNA sense strand
aaacucaagcucaccaaca

SEQ ID NO: 1628786 - RNA, 19 nt, Homo sapiens
  misc_RNA (1)...(19): siRNA sense strand
aggagcauagccaaauuua

SEQ ID NO: 1628787 - RNA, 19 nt, Homo sapiens
  misc_RNA (1)...(19): siRNA sense strand
uggagggaaucaaaguguu

SEQ ID NO: 1628788 - RNA, 19 nt, Homo sapiens
  misc_RNA (1)...(19): siRNA sense strand
cagaaugucaagaaugcaa

SEQ ID NO: 1628789 - RNA, 19 nt, Homo sapiens
  misc_RNA (1)...(19): siRNA sense strand
acaagaucacgcaauuaaa

SEQ ID NO: 1628790 - RNA, 19 nt, Homo sapiens
  misc_RNA (1)...(19): siRNA sense strand
cugcacagaaugucaagaa

SEQ ID NO: 1628791 - RNA, 19 nt, Homo sapiens
  misc_RNA (1)...(19): siRNA sense strand
cgacgaucacagauacaaa

SEQ ID NO: 1628792 - RNA, 19 nt, Homo sapiens
  misc_RNA (1)...(19): siRNA sense strand
auacagcguucugcacuca

SEQ ID NO: 1628793 - RNA, 19 nt, Homo sapiens
  misc_RNA (1)...(19): siRNA sense strand
gggcacggaaaugaucaua

SEQ ID NO: 1628794 - RNA, 19 nt, Homo sapiens
  misc_RNA (1)...(19): siRNA sense strand
gcggauguuucccaguuac

SEQ ID NO: 1628795 - RNA, 19 nt, Homo sapiens
  misc_RNA (1)...(19): siRNA sense strand
ugacauggagcugcacaga

SEQ ID NO: 1628796 - RNA, 19 nt, Homo sapiens
  misc_RNA (1)...(19): siRNA sense strand
gucaagaaugcaaaguaaa

SEQ ID NO: 1628797 - RNA, 19 nt, Homo sapiens
  misc_RNA (1)...(19): siRNA sense strand
gacgggccuuaaucccaaa

SEQ ID NO: 1628798 - RNA, 19 nt, Homo sapiens
  misc_RNA (1)...(19): siRNA sense strand
ggauguuucccaguuacaa

SEQ ID NO: 1628799 - RNA, 19 nt, Homo sapiens
  misc_RNA (1)...(19): siRNA sense strand
cgaagugggcacggaaaug

SEQ ID NO: 1628800 - RNA, 19 nt, Homo sapiens
  misc_RNA (1)...(19): siRNA sense strand
ggcacggaaaugaucauaa

SEQ ID NO: 1628801 - RNA, 19 nt, Homo sapiens
  misc_RNA (1)...(19): siRNA sense strand
agagaacuguggcuaaaau

SEQ ID NO: 1628802 - RNA, 19 nt, Homo sapiens
  misc_RNA (1)...(19): siRNA sense strand
aagaucacgcaauuaaaga

SEQ ID NO: 1628803 - RNA, 19 nt, Homo sapiens
  misc_RNA (1)...(19): siRNA sense strand
gaaugucaagaaugcaaag

SEQ ID NO: 1628804 - RNA, 19 nt, Homo sapiens
  misc_RNA (1)...(19): siRNA sense strand
ggagcugcacagaauguca

SEQ ID NO: 1628805 - RNA, 19 nt, Homo sapiens
  misc_RNA (1)...(19): siRNA sense strand
gauaauaaauggucuguga

SEQ ID NO: 1628806 - RNA, 19 nt, Homo sapiens
  misc_RNA (1)...(19): siRNA sense strand
gauacaaauucgcagauaa

SEQ ID NO: 1628807 - RNA, 19 nt, Homo sapiens
  misc_RNA (1)...(19): siRNA sense strand
gaaagagaacuguggcuaa

SEQ ID NO: 1628808 - RNA, 19 nt, Homo sapiens
  misc_RNA (1)...(19): siRNA sense strand
caaauaccagccuagauua

SEQ ID NO: 1628809 - RNA, 19 nt, Homo sapiens
  misc_RNA (1)...(19): siRNA sense strand
gcacggaaaugaucauaac

SEQ ID NO: 1628810 - RNA, 19 nt, Homo sapiens
  misc_RNA (1)...(19): siRNA sense strand
guucugcacucacgucuuu

SEQ ID NO: 1628811 - RNA, 19 nt, Homo sapiens
  misc_RNA (1)...(19): siRNA sense strand
aaagagaacuguggcuaaa

SEQ ID NO: 1628812 - RNA, 19 nt, Homo sapiens
  misc_RNA (1)...(19): siRNA sense strand
ugucaagaaugcaaaguaa

SEQ ID NO: 1628813 - RNA, 19 nt, Homo sapiens
  misc_RNA (1)...(19): siRNA sense strand
caaaguguuucuccaugaa

SEQ ID NO: 1628814 - RNA, 19 nt, Homo sapiens
  misc_RNA (1)...(19): siRNA sense strand
gaagugggcacggaaauga

SEQ ID NO: 1628815 - RNA, 19 nt, Homo sapiens
  misc_RNA (1)...(19): siRNA sense strand
ucaaaguguuucuccauga

SEQ ID NO: 1628816 - RNA, 19 nt, Homo sapiens
  misc_RNA (1)...(19): siRNA sense strand
acaaauaccagccuagauu

SEQ ID NO: 1628817 - RNA, 19 nt, Homo sapiens
  misc_RNA (1)...(19): siRNA sense strand
gcacagaaugucaagaaug

SEQ ID NO: 1628818 - RNA, 19 nt, Homo sapiens
  misc_RNA (1)...(19): siRNA sense strand
cacaagaucacgcaauuaa

SEQ ID NO: 1628819 - RNA, 19 nt, Homo sapiens
  misc_RNA (1)...(19): siRNA sense strand
gaucacagauacaaauucg

SEQ ID NO: 1628820 - RNA, 19 nt, Homo sapiens
  misc_RNA (1)...(19): siRNA sense strand
gaaagcggaugaaaauaau

SEQ ID NO: 1628821 - RNA, 19 nt, Homo sapiens
  misc_RNA (1)...(19): siRNA sense strand
acauggagcugcacagaau

SEQ ID NO: 1628822 - RNA, 19 nt, Homo sapiens
  misc_RNA (1)...(19): siRNA sense strand
ggagggaaucaaaguguuu

SEQ ID NO: 1628823 - RNA, 19 nt, Homo sapiens
  misc_RNA (1)...(19): siRNA sense strand
gcacaaauaccagccuaga

SEQ ID NO: 1628824 - RNA, 19 nt, Homo sapiens
  misc_RNA (1)...(19): siRNA sense strand
ccaggagcauagccaaauu

SEQ ID NO: 1628825 - RNA, 19 nt, Homo sapiens
  misc_RNA (1)...(19): siRNA sense strand
caagaucacgcaauuaaag

SEQ ID NO: 1628826 - RNA, 19 nt, Homo sapiens
  misc_RNA (1)...(19): siRNA sense strand
gcucgucuccuuccagaaa

SEQ ID NO: 1628827 - RNA, 19 nt, Homo sapiens
  misc_RNA (1)...(19): siRNA sense strand
ugaggcagcucgucuccuu

SEQ ID NO: 1628828 - RNA, 19 nt, Homo sapiens
  misc_RNA (1)...(19): siRNA sense strand
gggcauggagggaaucaaa

SEQ ID NO: 1628829 - RNA, 19 nt, Homo sapiens
  misc_RNA (1)...(19): siRNA sense strand
gaucacgcaauuaaagauu

SEQ ID NO: 1628830 - RNA, 19 nt, Homo sapiens
  misc_RNA (1)...(19): siRNA sense strand
agauacaaauucgcagaua

SEQ ID NO: 1628831 - RNA, 19 nt, Homo sapiens
  misc_RNA (1)...(19): siRNA sense strand
ccacaagaucacgcaauua

SEQ ID NO: 1628832 - RNA, 19 nt, Homo sapiens
  misc_RNA (1)...(19): siRNA sense strand
ggcggauguuucccaguua

SEQ ID NO: 1628833 - RNA, 19 nt, Homo sapiens
  misc_RNA (1)...(19): siRNA sense strand
cggaaaugaucauaaccaa

SEQ ID NO: 1628834 - RNA, 19 nt, Homo sapiens
  misc_RNA (1)...(19): siRNA sense strand
acaaccaccuggacccauu

SEQ ID NO: 1628835 - RNA, 19 nt, Homo sapiens
  misc_RNA (1)...(19): siRNA sense strand
gagcauagccaaauuuacc

SEQ ID NO: 1628836 - RNA, 19 nt, Homo sapiens
  misc_RNA (1)...(19): siRNA sense strand
cacagaaugucaagaaugc

SEQ ID NO: 1628837 - RNA, 19 nt, Homo sapiens
  misc_RNA (1)...(19): siRNA sense strand
uuauagcagugacuuccua

SEQ ID NO: 1628838 - RNA, 19 nt, Homo sapiens
  misc_RNA (1)...(19): siRNA sense strand
gauuacacaucgugaaagc

SEQ ID NO: 1628839 - RNA, 19 nt, Homo sapiens
  misc_RNA (1)...(19): siRNA sense strand
ugaaagcggaugaaaauaa

SEQ ID NO: 1628840 - RNA, 19 nt, Homo sapiens
  misc_RNA (1)...(19): siRNA sense strand
gauguuucccaguuacaaa

SEQ ID NO: 1628841 - RNA, 19 nt, Homo sapiens
  misc_RNA (1)...(19): siRNA sense strand
caagaaugcaaaguaaaga

SEQ ID NO: 1628842 - RNA, 19 nt, Homo sapiens
  misc_RNA (1)...(19): siRNA sense strand
uagauuacacaucgugaaa

SEQ ID NO: 1628843 - RNA, 19 nt, Homo sapiens
  misc_RNA (1)...(19): siRNA sense strand
gacgaucacagauacaaau

SEQ ID NO: 1628844 - RNA, 19 nt, Homo sapiens
  misc_RNA (1)...(19): siRNA sense strand
cauuguaccugccgacgau

SEQ ID NO: 1628845 - RNA, 19 nt, Homo sapiens
  misc_RNA (1)...(19): siRNA sense strand
ucaagaaugcaaaguaaag

SEQ ID NO: 1628846 - RNA, 19 nt, Homo sapiens
  misc_RNA (1)...(19): siRNA sense strand
uagccaaauuuaccauugu

SEQ ID NO: 1628847 - RNA, 19 nt, Homo sapiens
  misc_RNA (1)...(19): siRNA sense strand
accacaagaucacgcaauu

SEQ ID NO: 1628848 - RNA, 19 nt, Homo sapiens
  misc_RNA (1)...(19): siRNA sense strand
agccaaauuuaccauugua

SEQ ID NO: 1628849 - RNA, 19 nt, Homo sapiens
  misc_RNA (1)...(19): siRNA sense strand
caauaccagugugagaaug

SEQ ID NO: 1628850 - RNA, 19 nt, Homo sapiens
  misc_RNA (1)...(19): siRNA sense strand
aauaauggauuuggcucaa

SEQ ID NO: 1628851 - RNA, 19 nt, Homo sapiens
  misc_RNA (1)...(19): siRNA sense strand
gcuggaaggcggauguuuc

SEQ ID NO: 1628852 - RNA, 19 nt, Homo sapiens
  misc_RNA (1)...(19): siRNA sense strand
aggcggauguuucccaguu

SEQ ID NO: 1628853 - RNA, 19 nt, Homo sapiens
  misc_RNA (1)...(19): siRNA sense strand
gcauggagggaaucaaagu

SEQ ID NO: 1628854 - RNA, 19 nt, Homo sapiens
  misc_RNA (1)...(19): siRNA sense strand
caggagcauagccaaauuu

SEQ ID NO: 1628855 - RNA, 19 nt, Homo sapiens
  misc_RNA (1)...(19): siRNA sense strand
gagcugcacagaaugucaa

SEQ ID NO: 1628856 - RNA, 19 nt, Homo sapiens
  misc_RNA (1)...(19): siRNA sense strand
uaccagaaccacaagauca

SEQ ID NO: 1628857 - RNA, 19 nt, Homo sapiens
  misc_RNA (1)...(19): siRNA sense strand
ccauuugggcauauuauuc

SEQ ID NO: 1628858 - RNA, 19 nt, Homo sapiens
  misc_RNA (1)...(19): siRNA sense strand
auagccaaauuuaccauug

SEQ ID NO: 1628859 - RNA, 19 nt, Homo sapiens
  misc_RNA (1)...(19): siRNA sense strand
gacauggagcugcacagaa

SEQ ID NO: 1628860 - RNA, 19 nt, Homo sapiens
  misc_RNA (1)...(19): siRNA sense strand
cuaaauuccaugcacaaau

SEQ ID NO: 1628861 - RNA, 19 nt, Homo sapiens
  misc_RNA (1)...(19): siRNA sense strand
aacucaagcucaccaacaa

SEQ ID NO: 1628862 - RNA, 19 nt, Homo sapiens
  misc_RNA (1)...(19): siRNA sense strand
caaauuuaccauuguacca

SEQ ID NO: 1628863 - RNA, 19 nt, Homo sapiens
  misc_RNA (1)...(19): siRNA sense strand
ccaauaccagugugagaau

SEQ ID NO: 1628864 - RNA, 19 nt, Homo sapiens
  misc_RNA (1)...(19): siRNA sense strand
caaccaccuggacccauuu

SEQ ID NO: 1628865 - RNA, 19 nt, Homo sapiens
  misc_RNA (1)...(19): siRNA sense strand
aaacucaagcucaccaaca

SEQ ID NO: 1628866 - RNA, 19 nt, Homo sapiens
  misc_RNA (1)...(19): siRNA sense strand
aggagcauagccaaauuua

SEQ ID NO: 1628867 - RNA, 19 nt, Homo sapiens
  misc_RNA (1)...(19): siRNA sense strand
uggagggaaucaaaguguu

SEQ ID NO: 1628868 - RNA, 19 nt, Homo sapiens
  misc_RNA (1)...(19): siRNA sense strand
cagaaugucaagaaugcaa

SEQ ID NO: 1628869 - RNA, 19 nt, Homo sapiens
  misc_RNA (1)...(19): siRNA sense strand
acaagaucacgcaauuaaa

SEQ ID NO: 1628870 - RNA, 19 nt, Homo sapiens
  misc_RNA (1)...(19): siRNA sense strand
cugcacagaaugucaagaa

SEQ ID NO: 1628871 - RNA, 19 nt, Homo sapiens
  misc_RNA (1)...(19): siRNA sense strand
cgacgaucacagauacaaa

SEQ ID NO: 1628872 - RNA, 19 nt, Homo sapiens
  misc_RNA (1)...(19): siRNA sense strand
auacagcguucugcacuca

SEQ ID NO: 1628873 - RNA, 19 nt, Homo sapiens
  misc_RNA (1)...(19): siRNA sense strand
gggcacggaaaugaucaua

SEQ ID NO: 1628874 - RNA, 19 nt, Homo sapiens
  misc_RNA (1)...(19): siRNA sense strand
gcggauguuucccaguuac

SEQ ID NO: 1628875 - RNA, 19 nt, Homo sapiens
  misc_RNA (1)...(19): siRNA sense strand
ugacauggagcugcacaga

SEQ ID NO: 1628876 - RNA, 19 nt, Homo sapiens
  misc_RNA (1)...(19): siRNA sense strand
gucaagaaugcaaaguaaa

SEQ ID NO: 1628877 - RNA, 19 nt, Homo sapiens
  misc_RNA (1)...(19): siRNA sense strand
gacgggccuuaaucccaaa

SEQ ID NO: 1628878 - RNA, 19 nt, Homo sapiens
  misc_RNA (1)...(19): siRNA sense strand
ggauguuucccaguuacaa

SEQ ID NO: 1628879 - RNA, 19 nt, Homo sapiens
  misc_RNA (1)...(19): siRNA sense strand
cgaagugggcacggaaaug

SEQ ID NO: 1628880 - RNA, 19 nt, Homo sapiens
  misc_RNA (1)...(19): siRNA sense strand
ggcacggaaaugaucauaa

SEQ ID NO: 1628881 - RNA, 19 nt, Homo sapiens
  misc_RNA (1)...(19): siRNA sense strand
agagaacuguggcuaaaau

SEQ ID NO: 1628882 - RNA, 19 nt, Homo sapiens
  misc_RNA (1)...(19): siRNA sense strand
aagaucacgcaauuaaaga

SEQ ID NO: 1628883 - RNA, 19 nt, Homo sapiens
  misc_RNA (1)...(19): siRNA sense strand
gaaugucaagaaugcaaag

SEQ ID NO: 1628884 - RNA, 19 nt, Homo sapiens
  misc_RNA (1)...(19): siRNA sense strand
ggagcugcacagaauguca

SEQ ID NO: 1628885 - RNA, 19 nt, Homo sapiens
  misc_RNA (1)...(19): siRNA sense strand
gaagaggagugcaaauuca

SEQ ID NO: 1628886 - RNA, 19 nt, Homo sapiens
  misc_RNA (1)...(19): siRNA sense strand
gggaaugggccaccaguua

SEQ ID NO: 1628887 - RNA, 19 nt, Homo sapiens
  misc_RNA (1)...(19): siRNA sense strand
ggagagaagucugccacua

SEQ ID NO: 1628888 - RNA, 19 nt, Homo sapiens
  misc_RNA (1)...(19): siRNA sense strand
ggaaugggccaccaguuaa

SEQ ID NO: 1628889 - RNA, 19 nt, Homo sapiens
  misc_RNA (1)...(19): siRNA sense strand
gagaagaggagugcaaauu

SEQ ID NO: 1628890 - RNA, 19 nt, Homo sapiens
  misc_RNA (1)...(19): siRNA sense strand
ggaaacccuuggaagauca

SEQ ID NO: 1628891 - RNA, 19 nt, Homo sapiens
  misc_RNA (1)...(19): siRNA sense strand
ucauggagauccucaaugu

SEQ ID NO: 1628892 - RNA, 19 nt, Homo sapiens
  misc_RNA (1)...(19): siRNA sense strand
gagagaagucugccacuau

SEQ ID NO: 1628893 - RNA, 19 nt, Homo sapiens
  misc_RNA (1)...(19): siRNA sense strand
uggaugaacuugacaugga

SEQ ID NO: 1628894 - RNA, 19 nt, Homo sapiens
  misc_RNA (1)...(19): siRNA sense strand
ggaagaguuugaggacaug

SEQ ID NO: 1628895 - RNA, 19 nt, Homo sapiens
  misc_RNA (1)...(19): siRNA sense strand
gggaaacccuuggaagauc

SEQ ID NO: 1628896 - RNA, 19 nt, Homo sapiens
  misc_RNA (1)...(19): siRNA sense strand
agagaagucugccacuaug

SEQ ID NO: 1628897 - RNA, 19 nt, Homo sapiens
  misc_RNA (1)...(19): siRNA sense strand
caaugugacccucuacuau

SEQ ID NO: 1628898 - RNA, 19 nt, Homo sapiens
  misc_RNA (1)...(19): siRNA sense strand
caagacaggcaaucuauac

SEQ ID NO: 1628899 - RNA, 19 nt, Homo sapiens
  misc_RNA (1)...(19): siRNA sense strand
cuacaagacaggcaaucua

SEQ ID NO: 1628900 - RNA, 19 nt, Homo sapiens
  misc_RNA (1)...(19): siRNA sense strand
ggccaccaguuaacuacaa

SEQ ID NO: 1628901 - RNA, 19 nt, Homo sapiens
  misc_RNA (1)...(19): siRNA sense strand
gcaagcguuagacuucuuu

SEQ ID NO: 1628902 - RNA, 19 nt, Homo sapiens
  misc_RNA (1)...(19): siRNA sense strand
ucaaugugacccucuacua

SEQ ID NO: 1628903 - RNA, 19 nt, Homo sapiens
  misc_RNA (1)...(19): siRNA sense strand
gcaggugggaguucaagug

SEQ ID NO: 1628904 - RNA, 19 nt, Homo sapiens
  misc_RNA (1)...(19): siRNA sense strand
augcaccgcuugucaaugu

SEQ ID NO: 1628905 - RNA, 19 nt, Homo sapiens
  misc_RNA (1)...(19): siRNA sense strand
uggaagaguuugaggacau

SEQ ID NO: 1628906 - RNA, 19 nt, Homo sapiens
  misc_RNA (1)...(19): siRNA sense strand
cuacggaaacgcacaggaa

SEQ ID NO: 1628907 - RNA, 19 nt, Homo sapiens
  misc_RNA (1)...(19): siRNA sense strand
agaagaggagugcaaauuc

SEQ ID NO: 1628908 - RNA, 19 nt, Homo sapiens
  misc_RNA (1)...(19): siRNA sense strand
ggaaacgcacaggaacaaa

SEQ ID NO: 1628909 - RNA, 19 nt, Homo sapiens
  misc_RNA (1)...(19): siRNA sense strand
acaagacaggcaaucuaua

SEQ ID NO: 1628910 - RNA, 19 nt, Homo sapiens
  misc_RNA (1)...(19): siRNA sense strand
uaucauggagugugcaaug

SEQ ID NO: 1628911 - RNA, 19 nt, Homo sapiens
  misc_RNA (1)...(19): siRNA sense strand
gaaacgcacaggaacaaaa

SEQ ID NO: 1628912 - RNA, 19 nt, Homo sapiens
  misc_RNA (1)...(19): siRNA sense strand
ccaaugcaccgcuugucaa

SEQ ID NO: 1628913 - RNA, 19 nt, Homo sapiens
  misc_RNA (1)...(19): siRNA sense strand
cacuaugccugcagcucua

SEQ ID NO: 1628914 - RNA, 19 nt, Homo sapiens
  misc_RNA (1)...(19): siRNA sense strand
gcaccgcuugucaauguga

SEQ ID NO: 1628915 - RNA, 19 nt, Homo sapiens
  misc_RNA (1)...(19): siRNA sense strand
ggagaagaggagugcaaau

SEQ ID NO: 1628916 - RNA, 19 nt, Homo sapiens
  misc_RNA (1)...(19): siRNA sense strand
uacaagacaggcaaucuau

SEQ ID NO: 1628917 - RNA, 19 nt, Homo sapiens
  misc_RNA (1)...(19): siRNA sense strand
ggucauggagauccucaau

SEQ ID NO: 1628918 - RNA, 19 nt, Homo sapiens
  misc_RNA (1)...(19): siRNA sense strand
ggagugcaaauucaacaag

SEQ ID NO: 1628919 - RNA, 19 nt, Homo sapiens
  misc_RNA (1)...(19): siRNA sense strand
caagugccagcauggagaa

SEQ ID NO: 1628920 - RNA, 19 nt, Homo sapiens
  misc_RNA (1)...(19): siRNA sense strand
caaugcaccgcuugucaau

SEQ ID NO: 1628921 - RNA, 19 nt, Homo sapiens
  misc_RNA (1)...(19): siRNA sense strand
gaggagugcaaauucaaca

SEQ ID NO: 1628922 - RNA, 19 nt, Homo sapiens
  misc_RNA (1)...(19): siRNA sense strand
augugacccucuacuauga

SEQ ID NO: 1628923 - RNA, 19 nt, Homo sapiens
  misc_RNA (1)...(19): siRNA sense strand
caggaguguuugcuucaag

SEQ ID NO: 1628924 - RNA, 19 nt, Homo sapiens
  misc_RNA (1)...(19): siRNA sense strand
aaugugacccucuacuaug

SEQ ID NO: 1628925 - RNA, 19 nt, Homo sapiens
  misc_RNA (1)...(19): siRNA sense strand
gaguguuugcuucaaguga

SEQ ID NO: 1628926 - RNA, 19 nt, Homo sapiens
  misc_RNA (1)...(19): siRNA sense strand
ucaggaguguuugcuucaa

SEQ ID NO: 1628927 - RNA, 19 nt, Homo sapiens
  misc_RNA (1)...(19): siRNA sense strand
gaaugggccaccaguuaac

SEQ ID NO: 1628928 - RNA, 19 nt, Homo sapiens
  misc_RNA (1)...(19): siRNA sense strand
ugucgccacuucugcuguu

SEQ ID NO: 1628929 - RNA, 19 nt, Homo sapiens
  misc_RNA (1)...(19): siRNA sense strand
gcacaggaacaaaauguca

SEQ ID NO: 1628930 - RNA, 19 nt, Homo sapiens
  misc_RNA (1)...(19): siRNA sense strand
cggaaacgcacaggaacaa

SEQ ID NO: 1628931 - RNA, 19 nt, Homo sapiens
  misc_RNA (1)...(19): siRNA sense strand
uugaggacauggagagaag

SEQ ID NO: 1628932 - RNA, 19 nt, Homo sapiens
  misc_RNA (1)...(19): siRNA sense strand
ggucaccgucaaugggaaa

SEQ ID NO: 1628933 - RNA, 19 nt, Homo sapiens
  misc_RNA (1)...(19): siRNA sense strand
ucaaggagaugaagaagaa

SEQ ID NO: 1628934 - RNA, 19 nt, Homo sapiens
  misc_RNA (1)...(19): siRNA sense strand
gcgcuucgaugcggacuau

SEQ ID NO: 1628935 - RNA, 19 nt, Homo sapiens
  misc_RNA (1)...(19): siRNA sense strand
gcacccacccuguucucua

SEQ ID NO: 1628936 - RNA, 19 nt, Homo sapiens
  misc_RNA (1)...(19): siRNA sense strand
agaagaacccuaugaccaa

SEQ ID NO: 1628937 - RNA, 19 nt, Homo sapiens
  misc_RNA (1)...(19): siRNA sense strand
augaagacaugaaggagaa

SEQ ID NO: 1628938 - RNA, 19 nt, Homo sapiens
  misc_RNA (1)...(19): siRNA sense strand
gaaguucauggucggagaa

SEQ ID NO: 1628939 - RNA, 19 nt, Homo sapiens
  misc_RNA (1)...(19): siRNA sense strand
agaacccuaugaccaacua

SEQ ID NO: 1628940 - RNA, 19 nt, Homo sapiens
  misc_RNA (1)...(19): siRNA sense strand
acacgucguucaaggagau

SEQ ID NO: 1628941 - RNA, 19 nt, Homo sapiens
  misc_RNA (1)...(19): siRNA sense strand
gggacagcuuccuggagaa

SEQ ID NO: 1628942 - RNA, 19 nt, Homo sapiens
  misc_RNA (1)...(19): siRNA sense strand
guucauggucggagaagug

SEQ ID NO: 1628943 - RNA, 19 nt, Homo sapiens
  misc_RNA (1)...(19): siRNA sense strand
gcagaaugagcgcuucgau

SEQ ID NO: 1628944 - RNA, 19 nt, Homo sapiens
  misc_RNA (1)...(19): siRNA sense strand
ucaccguggcgcagaauga

SEQ ID NO: 1628945 - RNA, 19 nt, Homo sapiens
  misc_RNA (1)...(19): siRNA sense strand
uucucuaccucuucuauga

SEQ ID NO: 1628946 - RNA, 19 nt, Homo sapiens
  misc_RNA (1)...(19): siRNA sense strand
aaaagauccuggaguuugu

SEQ ID NO: 1628947 - RNA, 19 nt, Homo sapiens
  misc_RNA (1)...(19): siRNA sense strand
cacccacccuguucucuac

SEQ ID NO: 1628948 - RNA, 19 nt, Homo sapiens
  misc_RNA (1)...(19): siRNA sense strand
ucuaugaagacaugaagga

SEQ ID NO: 1628949 - RNA, 19 nt, Homo sapiens
  misc_RNA (1)...(19): siRNA sense strand
gaugaagaagaacccuaug

SEQ ID NO: 1628950 - RNA, 19 nt, Homo sapiens
  misc_RNA (1)...(19): siRNA sense strand
ucaaggagaugaagaagaa

SEQ ID NO: 1628951 - RNA, 19 nt, Homo sapiens
  misc_RNA (1)...(19): siRNA sense strand
gcgcuucgaugcggacuau

SEQ ID NO: 1628952 - RNA, 19 nt, Homo sapiens
  misc_RNA (1)...(19): siRNA sense strand
gcacccacccuguucucua

SEQ ID NO: 1628953 - RNA, 19 nt, Homo sapiens
  misc_RNA (1)...(19): siRNA sense strand
agaagaacccuaugaccaa

SEQ ID NO: 1628954 - RNA, 19 nt, Homo sapiens
  misc_RNA (1)...(19): siRNA sense strand
augaagacaugaaggagaa

SEQ ID NO: 1628955 - RNA, 19 nt, Homo sapiens
  misc_RNA (1)...(19): siRNA sense strand
gaaguucauggucggagaa

SEQ ID NO: 1628956 - RNA, 19 nt, Homo sapiens
  misc_RNA (1)...(19): siRNA sense strand
agaacccuaugaccaacua

SEQ ID NO: 1628957 - RNA, 19 nt, Homo sapiens
  misc_RNA (1)...(19): siRNA sense strand
acacgucguucaaggagau

SEQ ID NO: 1628958 - RNA, 19 nt, Homo sapiens
  misc_RNA (1)...(19): siRNA sense strand
gggacagcuuccuggagaa

SEQ ID NO: 1628959 - RNA, 19 nt, Homo sapiens
  misc_RNA (1)...(19): siRNA sense strand
guucauggucggagaagug

SEQ ID NO: 1628960 - RNA, 19 nt, Homo sapiens
  misc_RNA (1)...(19): siRNA sense strand
gcagaaugagcgcuucgau

SEQ ID NO: 1628961 - RNA, 19 nt, Homo sapiens
  misc_RNA (1)...(19): siRNA sense strand
ucaccguggcgcagaauga

SEQ ID NO: 1628962 - RNA, 19 nt, Homo sapiens
  misc_RNA (1)...(19): siRNA sense strand
uucucuaccucuucuauga

SEQ ID NO: 1628963 - RNA, 19 nt, Homo sapiens
  misc_RNA (1)...(19): siRNA sense strand
aaaagauccuggaguuugu

SEQ ID NO: 1628964 - RNA, 19 nt, Homo sapiens
  misc_RNA (1)...(19): siRNA sense strand
cacccacccuguucucuac

SEQ ID NO: 1628965 - RNA, 19 nt, Homo sapiens
  misc_RNA (1)...(19): siRNA sense strand
ucuaugaagacaugaagga

SEQ ID NO: 1628966 - RNA, 19 nt, Homo sapiens
  misc_RNA (1)...(19): siRNA sense strand
gaugaagaagaacccuaug

SEQ ID NO: 1628967 - RNA, 19 nt, Homo sapiens
  misc_RNA (1)...(19): siRNA sense strand
ucaaggagaugaagaagaa

SEQ ID NO: 1628968 - RNA, 19 nt, Homo sapiens
  misc_RNA (1)...(19): siRNA sense strand
gcgcuucgaugcggacuau

SEQ ID NO: 1628969 - RNA, 19 nt, Homo sapiens
  misc_RNA (1)...(19): siRNA sense strand
gcacccacccuguucucua

SEQ ID NO: 1628970 - RNA, 19 nt, Homo sapiens
  misc_RNA (1)...(19): siRNA sense strand
agaagaacccuaugaccaa

SEQ ID NO: 1628971 - RNA, 19 nt, Homo sapiens
  misc_RNA (1)...(19): siRNA sense strand
augaagacaugaaggagaa

SEQ ID NO: 1628972 - RNA, 19 nt, Homo sapiens
  misc_RNA (1)...(19): siRNA sense strand
gaaguucauggucggagaa

SEQ ID NO: 1628973 - RNA, 19 nt, Homo sapiens
  misc_RNA (1)...(19): siRNA sense strand
agaacccuaugaccaacua

SEQ ID NO: 1628974 - RNA, 19 nt, Homo sapiens
  misc_RNA (1)...(19): siRNA sense strand
acacgucguucaaggagau

SEQ ID NO: 1628975 - RNA, 19 nt, Homo sapiens
  misc_RNA (1)...(19): siRNA sense strand
gggacagcuuccuggagaa

SEQ ID NO: 1628976 - RNA, 19 nt, Homo sapiens
  misc_RNA (1)...(19): siRNA sense strand
guucauggucggagaagug

SEQ ID NO: 1628977 - RNA, 19 nt, Homo sapiens
  misc_RNA (1)...(19): siRNA sense strand
gcagaaugagcgcuucgau

SEQ ID NO: 1628978 - RNA, 19 nt, Homo sapiens
  misc_RNA (1)...(19): siRNA sense strand
ucaccguggcgcagaauga

SEQ ID NO: 1628979 - RNA, 19 nt, Homo sapiens
  misc_RNA (1)...(19): siRNA sense strand
uucucuaccucuucuauga

SEQ ID NO: 1628980 - RNA, 19 nt, Homo sapiens
  misc_RNA (1)...(19): siRNA sense strand
aaaagauccuggaguuugu

SEQ ID NO: 1628981 - RNA, 19 nt, Homo sapiens
  misc_RNA (1)...(19): siRNA sense strand
cacccacccuguucucuac

SEQ ID NO: 1628982 - RNA, 19 nt, Homo sapiens
  misc_RNA (1)...(19): siRNA sense strand
ucuaugaagacaugaagga

SEQ ID NO: 1628983 - RNA, 19 nt, Homo sapiens
  misc_RNA (1)...(19): siRNA sense strand
gaugaagaagaacccuaug

SEQ ID NO: 1628984 - RNA, 19 nt, Homo sapiens
  misc_RNA (1)...(19): siRNA sense strand
ucaaggagaugaagaagaa

SEQ ID NO: 1628985 - RNA, 19 nt, Homo sapiens
  misc_RNA (1)...(19): siRNA sense strand
gcgcuucgaugcggacuau

SEQ ID NO: 1628986 - RNA, 19 nt, Homo sapiens
  misc_RNA (1)...(19): siRNA sense strand
gcacccacccuguucucua

SEQ ID NO: 1628987 - RNA, 19 nt, Homo sapiens
  misc_RNA (1)...(19): siRNA sense strand
agaagaacccuaugaccaa

SEQ ID NO: 1628988 - RNA, 19 nt, Homo sapiens
  misc_RNA (1)...(19): siRNA sense strand
augaagacaugaaggagaa

SEQ ID NO: 1628989 - RNA, 19 nt, Homo sapiens
  misc_RNA (1)...(19): siRNA sense strand
gaaguucauggucggagaa

SEQ ID NO: 1628990 - RNA, 19 nt, Homo sapiens
  misc_RNA (1)...(19): siRNA sense strand
agaacccuaugaccaacua

SEQ ID NO: 1628991 - RNA, 19 nt, Homo sapiens
  misc_RNA (1)...(19): siRNA sense strand
acacgucguucaaggagau

SEQ ID NO: 1628992 - RNA, 19 nt, Homo sapiens
  misc_RNA (1)...(19): siRNA sense strand
gggacagcuuccuggagaa

SEQ ID NO: 1628993 - RNA, 19 nt, Homo sapiens
  misc_RNA (1)...(19): siRNA sense strand
guucauggucggagaagug

SEQ ID NO: 1628994 - RNA, 19 nt, Homo sapiens
  misc_RNA (1)...(19): siRNA sense strand
gcagaaugagcgcuucgau

SEQ ID NO: 1628995 - RNA, 19 nt, Homo sapiens
  misc_RNA (1)...(19): siRNA sense strand
ucaccguggcgcagaauga

SEQ ID NO: 1628996 - RNA, 19 nt, Homo sapiens
  misc_RNA (1)...(19): siRNA sense strand
uucucuaccucuucuauga

SEQ ID NO: 1628997 - RNA, 19 nt, Homo sapiens
  misc_RNA (1)...(19): siRNA sense strand
aaaagauccuggaguuugu

SEQ ID NO: 1628998 - RNA, 19 nt, Homo sapiens
  misc_RNA (1)...(19): siRNA sense strand
cacccacccuguucucuac

SEQ ID NO: 1628999 - RNA, 19 nt, Homo sapiens
  misc_RNA (1)...(19): siRNA sense strand
ucuaugaagacaugaagga

SEQ ID NO: 1629000 - RNA, 19 nt, Homo sapiens
  misc_RNA (1)...(19): siRNA sense strand
gaugaagaagaacccuaug

SEQ ID NO: 1629001 - RNA, 19 nt, Homo sapiens
  misc_RNA (1)...(19): siRNA sense strand
ucaaggagaugaagaagaa

SEQ ID NO: 1629002 - RNA, 19 nt, Homo sapiens
  misc_RNA (1)...(19): siRNA sense strand
gcgcuucgaugcggacuau

SEQ ID NO: 1629003 - RNA, 19 nt, Homo sapiens
  misc_RNA (1)...(19): siRNA sense strand
gcacccacccuguucucua

SEQ ID NO: 1629004 - RNA, 19 nt, Homo sapiens
  misc_RNA (1)...(19): siRNA sense strand
agaagaacccuaugaccaa

SEQ ID NO: 1629005 - RNA, 19 nt, Homo sapiens
  misc_RNA (1)...(19): siRNA sense strand
augaagacaugaaggagaa

SEQ ID NO: 1629006 - RNA, 19 nt, Homo sapiens
  misc_RNA (1)...(19): siRNA sense strand
gaaguucauggucggagaa

SEQ ID NO: 1629007 - RNA, 19 nt, Homo sapiens
  misc_RNA (1)...(19): siRNA sense strand
agaacccuaugaccaacua

SEQ ID NO: 1629008 - RNA, 19 nt, Homo sapiens
  misc_RNA (1)...(19): siRNA sense strand
acacgucguucaaggagau

SEQ ID NO: 1629009 - RNA, 19 nt, Homo sapiens
  misc_RNA (1)...(19): siRNA sense strand
gggacagcuuccuggagaa

SEQ ID NO: 1629010 - RNA, 19 nt, Homo sapiens
  misc_RNA (1)...(19): siRNA sense strand
guucauggucggagaagug

SEQ ID NO: 1629011 - RNA, 19 nt, Homo sapiens
  misc_RNA (1)...(19): siRNA sense strand
gcagaaugagcgcuucgau

SEQ ID NO: 1629012 - RNA, 19 nt, Homo sapiens
  misc_RNA (1)...(19): siRNA sense strand
ucaccguggcgcagaauga

SEQ ID NO: 1629013 - RNA, 19 nt, Homo sapiens
  misc_RNA (1)...(19): siRNA sense strand
uucucuaccucuucuauga

SEQ ID NO: 1629014 - RNA, 19 nt, Homo sapiens
  misc_RNA (1)...(19): siRNA sense strand
aaaagauccuggaguuugu

SEQ ID NO: 1629015 - RNA, 19 nt, Homo sapiens
  misc_RNA (1)...(19): siRNA sense strand
cacccacccuguucucuac

SEQ ID NO: 1629016 - RNA, 19 nt, Homo sapiens
  misc_RNA (1)...(19): siRNA sense strand
ucuaugaagacaugaagga

SEQ ID NO: 1629017 - RNA, 19 nt, Homo sapiens
  misc_RNA (1)...(19): siRNA sense strand
gaugaagaagaacccuaug

SEQ ID NO: 1629018 - RNA, 19 nt, Homo sapiens
  misc_RNA (1)...(19): siRNA sense strand
caaaggccguguuccauuc

SEQ ID NO: 1629019 - RNA, 19 nt, Homo sapiens
  misc_RNA (1)...(19): siRNA sense strand
gauacugacugcccaggaa

SEQ ID NO: 1629020 - RNA, 19 nt, Homo sapiens
  misc_RNA (1)...(19): siRNA sense strand
ggacaaguuucaguuaaag

SEQ ID NO: 1629021 - RNA, 19 nt, Homo sapiens
  misc_RNA (1)...(19): siRNA sense strand
ucacgggaguuccuguuaa

SEQ ID NO: 1629022 - RNA, 19 nt, Homo sapiens
  misc_RNA (1)...(19): siRNA sense strand
gacaagaucccguuaaagg

SEQ ID NO: 1629023 - RNA, 19 nt, Homo sapiens
  misc_RNA (1)...(19): siRNA sense strand
ucaguuaaaggucaagaua

SEQ ID NO: 1629024 - RNA, 19 nt, Homo sapiens
  misc_RNA (1)...(19): siRNA sense strand
uggacaagaucccguuaaa

SEQ ID NO: 1629025 - RNA, 19 nt, Homo sapiens
  misc_RNA (1)...(19): siRNA sense strand
aaggacaaguuucaguuaa

SEQ ID NO: 1629026 - RNA, 19 nt, Homo sapiens
  misc_RNA (1)...(19): siRNA sense strand
aaaggacaaguuucaguua

SEQ ID NO: 1629027 - RNA, 19 nt, Homo sapiens
  misc_RNA (1)...(19): siRNA sense strand
uaaaggacaaguuucaguu

SEQ ID NO: 1629028 - RNA, 19 nt, Homo sapiens
  misc_RNA (1)...(19): siRNA sense strand
gcccaggaaucaagaagug

SEQ ID NO: 1629029 - RNA, 19 nt, Homo sapiens
  misc_RNA (1)...(19): siRNA sense strand
cacgggaguuccuguuaaa

SEQ ID NO: 1629030 - RNA, 19 nt, Homo sapiens
  misc_RNA (1)...(19): siRNA sense strand
ccuaaccgcugcuugaaag

SEQ ID NO: 1629031 - RNA, 19 nt, Homo sapiens
  misc_RNA (1)...(19): siRNA sense strand
gggaguuccuguuaaaggu

SEQ ID NO: 1629032 - RNA, 19 nt, Homo sapiens
  misc_RNA (1)...(19): siRNA sense strand
ucaaaggccguguuccauu

SEQ ID NO: 1629033 - RNA, 19 nt, Homo sapiens
  misc_RNA (1)...(19): siRNA sense strand
aaccgcugcuugaaagaua

SEQ ID NO: 1629034 - RNA, 19 nt, Homo sapiens
  misc_RNA (1)...(19): siRNA sense strand
gcaagagccagucaaaggu

SEQ ID NO: 1629035 - RNA, 19 nt, Homo sapiens
  misc_RNA (1)...(19): siRNA sense strand
aggacaaguuucaguuaaa

SEQ ID NO: 1629036 - RNA, 19 nt, Homo sapiens
  misc_RNA (1)...(19): siRNA sense strand
gaaucaagaagugcuguga

SEQ ID NO: 1629037 - RNA, 19 nt, Homo sapiens
  misc_RNA (1)...(19): siRNA sense strand
caguuaaaggucaagauaa

SEQ ID NO: 1629038 - RNA, 19 nt, Homo sapiens
  misc_RNA (1)...(19): siRNA sense strand
ggacaagaucccguuaaag

SEQ ID NO: 1629039 - RNA, 19 nt, Homo sapiens
  misc_RNA (1)...(19): siRNA sense strand
cgggauggccuguuucguu

SEQ ID NO: 1629040 - RNA, 19 nt, Homo sapiens
  misc_RNA (1)...(19): siRNA sense strand
gguccagucuccacuaagc

SEQ ID NO: 1629041 - RNA, 19 nt, Homo sapiens
  misc_RNA (1)...(19): siRNA sense strand
gauccggugcgccauguug

SEQ ID NO: 1629042 - RNA, 19 nt, Homo sapiens
  misc_RNA (1)...(19): siRNA sense strand
aagguccagucuccacuaa

SEQ ID NO: 1629043 - RNA, 19 nt, Homo sapiens
  misc_RNA (1)...(19): siRNA sense strand
uguuaaaggucaagacacu

SEQ ID NO: 1629044 - RNA, 19 nt, Homo sapiens
  misc_RNA (1)...(19): siRNA sense strand
cugggacgcugguucuaga

SEQ ID NO: 1629045 - RNA, 19 nt, Homo sapiens
  misc_RNA (1)...(19): siRNA sense strand
acaagaucccguuaaagga

SEQ ID NO: 1629046 - RNA, 19 nt, Homo sapiens
  misc_RNA (1)...(19): siRNA sense strand
gucacgggaguuccuguua

SEQ ID NO: 1629047 - RNA, 19 nt, Homo sapiens
  misc_RNA (1)...(19): siRNA sense strand
cuugcgggauggccuguuu

SEQ ID NO: 1629048 - RNA, 19 nt, Homo sapiens
  misc_RNA (1)...(19): siRNA sense strand
cguuaaaggacaaguuuca

SEQ ID NO: 1629049 - RNA, 19 nt, Homo sapiens
  misc_RNA (1)...(19): siRNA sense strand
uuaaaggucaagacacugu

SEQ ID NO: 1629050 - RNA, 19 nt, Homo sapiens
  misc_RNA (1)...(19): siRNA sense strand
aggucaagauaaagucaaa

SEQ ID NO: 1629051 - RNA, 19 nt, Homo sapiens
  misc_RNA (1)...(19): siRNA sense strand
cgcaagagccagucaaagg

SEQ ID NO: 1629052 - RNA, 19 nt, Homo sapiens
  misc_RNA (1)...(19): siRNA sense strand
aaagguccagucuccacua

SEQ ID NO: 1629053 - RNA, 19 nt, Homo sapiens
  misc_RNA (1)...(19): siRNA sense strand
caucaagaccgccaagauu

SEQ ID NO: 1629054 - RNA, 19 nt, Homo sapiens
  misc_RNA (1)...(19): siRNA sense strand
agggugaacaggacaauua

SEQ ID NO: 1629055 - RNA, 19 nt, Homo sapiens
  misc_RNA (1)...(19): siRNA sense strand
ucaccgagaucaucaagac

SEQ ID NO: 1629056 - RNA, 19 nt, Homo sapiens
  misc_RNA (1)...(19): siRNA sense strand
gcgagucccugaugaagcu

SEQ ID NO: 1629057 - RNA, 19 nt, Homo sapiens
  misc_RNA (1)...(19): siRNA sense strand
uguccgaccucaagcaguu

SEQ ID NO: 1629058 - RNA, 19 nt, Homo sapiens
  misc_RNA (1)...(19): siRNA sense strand
acaggacaauuacgagaug

SEQ ID NO: 1629059 - RNA, 19 nt, Homo sapiens
  misc_RNA (1)...(19): siRNA sense strand
caacuucaccgagaucauc

SEQ ID NO: 1629060 - RNA, 19 nt, Homo sapiens
  misc_RNA (1)...(19): siRNA sense strand
acaacaagcggcugaagga

SEQ ID NO: 1629061 - RNA, 19 nt, Homo sapiens
  misc_RNA (1)...(19): siRNA sense strand
gcugaaggacgacauuaag

SEQ ID NO: 1629062 - RNA, 19 nt, Homo sapiens
  misc_RNA (1)...(19): siRNA sense strand
gaucuccauugaccucuac

SEQ ID NO: 1629063 - RNA, 19 nt, Homo sapiens
  misc_RNA (1)...(19): siRNA sense strand
ggacaacuucaccgagauc

SEQ ID NO: 1629064 - RNA, 19 nt, Homo sapiens
  misc_RNA (1)...(19): siRNA sense strand
ggacgagacgcagguguca

SEQ ID NO: 1629065 - RNA, 19 nt, Homo sapiens
  misc_RNA (1)...(19): siRNA sense strand
ggcugaaggacgacauuaa

SEQ ID NO: 1629066 - RNA, 19 nt, Homo sapiens
  misc_RNA (1)...(19): siRNA sense strand
cgacauuaaguccaucaug

SEQ ID NO: 1629067 - RNA, 19 nt, Homo sapiens
  misc_RNA (1)...(19): siRNA sense strand
acaauuacgagaugcaugu

SEQ ID NO: 1629068 - RNA, 19 nt, Homo sapiens
  misc_RNA (1)...(19): siRNA sense strand
gugaacaggacaauuacga

SEQ ID NO: 1629069 - RNA, 19 nt, Homo sapiens
  misc_RNA (1)...(19): siRNA sense strand
ugaaggacgacauuaaguc

SEQ ID NO: 1629070 - RNA, 19 nt, Homo sapiens
  misc_RNA (1)...(19): siRNA sense strand
ggacaauuacgagaugcau

SEQ ID NO: 1629071 - RNA, 19 nt, Homo sapiens
  misc_RNA (1)...(19): siRNA sense strand
caucaagaccgccaagauu

SEQ ID NO: 1629072 - RNA, 19 nt, Homo sapiens
  misc_RNA (1)...(19): siRNA sense strand
agggugaacaggacaauua

SEQ ID NO: 1629073 - RNA, 19 nt, Homo sapiens
  misc_RNA (1)...(19): siRNA sense strand
ucaccgagaucaucaagac

SEQ ID NO: 1629074 - RNA, 19 nt, Homo sapiens
  misc_RNA (1)...(19): siRNA sense strand
gcgagucccugaugaagcu

SEQ ID NO: 1629075 - RNA, 19 nt, Homo sapiens
  misc_RNA (1)...(19): siRNA sense strand
uguccgaccucaagcaguu

SEQ ID NO: 1629076 - RNA, 19 nt, Homo sapiens
  misc_RNA (1)...(19): siRNA sense strand
acaggacaauuacgagaug

SEQ ID NO: 1629077 - RNA, 19 nt, Homo sapiens
  misc_RNA (1)...(19): siRNA sense strand
caacuucaccgagaucauc

SEQ ID NO: 1629078 - RNA, 19 nt, Homo sapiens
  misc_RNA (1)...(19): siRNA sense strand
acaacaagcggcugaagga

SEQ ID NO: 1629079 - RNA, 19 nt, Homo sapiens
  misc_RNA (1)...(19): siRNA sense strand
gcugaaggacgacauuaag

SEQ ID NO: 1629080 - RNA, 19 nt, Homo sapiens
  misc_RNA (1)...(19): siRNA sense strand
gaucuccauugaccucuac

SEQ ID NO: 1629081 - RNA, 19 nt, Homo sapiens
  misc_RNA (1)...(19): siRNA sense strand
ggacaacuucaccgagauc

SEQ ID NO: 1629082 - RNA, 19 nt, Homo sapiens
  misc_RNA (1)...(19): siRNA sense strand
ggacgagacgcagguguca

SEQ ID NO: 1629083 - RNA, 19 nt, Homo sapiens
  misc_RNA (1)...(19): siRNA sense strand
ggcugaaggacgacauuaa

SEQ ID NO: 1629084 - RNA, 19 nt, Homo sapiens
  misc_RNA (1)...(19): siRNA sense strand
cgacauuaaguccaucaug

SEQ ID NO: 1629085 - RNA, 19 nt, Homo sapiens
  misc_RNA (1)...(19): siRNA sense strand
acaauuacgagaugcaugu

SEQ ID NO: 1629086 - RNA, 19 nt, Homo sapiens
  misc_RNA (1)...(19): siRNA sense strand
gugaacaggacaauuacga

SEQ ID NO: 1629087 - RNA, 19 nt, Homo sapiens
  misc_RNA (1)...(19): siRNA sense strand
ugaaggacgacauuaaguc

SEQ ID NO: 1629088 - RNA, 19 nt, Homo sapiens
  misc_RNA (1)...(19): siRNA sense strand
ggacaauuacgagaugcau

SEQ ID NO: 1629089 - RNA, 19 nt, Homo sapiens
  misc_RNA (1)...(19): siRNA sense strand
caucaagaccgccaagauu

SEQ ID NO: 1629090 - RNA, 19 nt, Homo sapiens
  misc_RNA (1)...(19): siRNA sense strand
agggugaacaggacaauua

SEQ ID NO: 1629091 - RNA, 19 nt, Homo sapiens
  misc_RNA (1)...(19): siRNA sense strand
ucaccgagaucaucaagac

SEQ ID NO: 1629092 - RNA, 19 nt, Homo sapiens
  misc_RNA (1)...(19): siRNA sense strand
gcgagucccugaugaagcu

SEQ ID NO: 1629093 - RNA, 19 nt, Homo sapiens
  misc_RNA (1)...(19): siRNA sense strand
uguccgaccucaagcaguu

SEQ ID NO: 1629094 - RNA, 19 nt, Homo sapiens
  misc_RNA (1)...(19): siRNA sense strand
acaggacaauuacgagaug

SEQ ID NO: 1629095 - RNA, 19 nt, Homo sapiens
  misc_RNA (1)...(19): siRNA sense strand
caacuucaccgagaucauc

SEQ ID NO: 1629096 - RNA, 19 nt, Homo sapiens
  misc_RNA (1)...(19): siRNA sense strand
acaacaagcggcugaagga

SEQ ID NO: 1629097 - RNA, 19 nt, Homo sapiens
  misc_RNA (1)...(19): siRNA sense strand
gcugaaggacgacauuaag

SEQ ID NO: 1629098 - RNA, 19 nt, Homo sapiens
  misc_RNA (1)...(19): siRNA sense strand
gaucuccauugaccucuac

SEQ ID NO: 1629099 - RNA, 19 nt, Homo sapiens
  misc_RNA (1)...(19): siRNA sense strand
ggacaacuucaccgagauc

SEQ ID NO: 1629100 - RNA, 19 nt, Homo sapiens
  misc_RNA (1)...(19): siRNA sense strand
ggacgagacgcagguguca

SEQ ID NO: 1629101 - RNA, 19 nt, Homo sapiens
  misc_RNA (1)...(19): siRNA sense strand
ggcugaaggacgacauuaa

SEQ ID NO: 1629102 - RNA, 19 nt, Homo sapiens
  misc_RNA (1)...(19): siRNA sense strand
cgacauuaaguccaucaug

SEQ ID NO: 1629103 - RNA, 19 nt, Homo sapiens
  misc_RNA (1)...(19): siRNA sense strand
acaauuacgagaugcaugu

SEQ ID NO: 1629104 - RNA, 19 nt, Homo sapiens
  misc_RNA (1)...(19): siRNA sense strand
gugaacaggacaauuacga

SEQ ID NO: 1629105 - RNA, 19 nt, Homo sapiens
  misc_RNA (1)...(19): siRNA sense strand
ugaaggacgacauuaaguc

SEQ ID NO: 1629106 - RNA, 19 nt, Homo sapiens
  misc_RNA (1)...(19): siRNA sense strand
ggacaauuacgagaugcau

SEQ ID NO: 1629107 - RNA, 19 nt, Homo sapiens
  misc_RNA (1)...(19): siRNA sense strand
ucaaggagaugaagaagaa

SEQ ID NO: 1629108 - RNA, 19 nt, Homo sapiens
  misc_RNA (1)...(19): siRNA sense strand
gcgcuucgaugcggacuau

SEQ ID NO: 1629109 - RNA, 19 nt, Homo sapiens
  misc_RNA (1)...(19): siRNA sense strand
gcacccacccuguucucua

SEQ ID NO: 1629110 - RNA, 19 nt, Homo sapiens
  misc_RNA (1)...(19): siRNA sense strand
agaagaacccuaugaccaa

SEQ ID NO: 1629111 - RNA, 19 nt, Homo sapiens
  misc_RNA (1)...(19): siRNA sense strand
augaagacaugaaggagaa

SEQ ID NO: 1629112 - RNA, 19 nt, Homo sapiens
  misc_RNA (1)...(19): siRNA sense strand
gaaguucauggucggagaa

SEQ ID NO: 1629113 - RNA, 19 nt, Homo sapiens
  misc_RNA (1)...(19): siRNA sense strand
agaacccuaugaccaacua

SEQ ID NO: 1629114 - RNA, 19 nt, Homo sapiens
  misc_RNA (1)...(19): siRNA sense strand
acacgucguucaaggagau

SEQ ID NO: 1629115 - RNA, 19 nt, Homo sapiens
  misc_RNA (1)...(19): siRNA sense strand
gggacagcuuccuggagaa

SEQ ID NO: 1629116 - RNA, 19 nt, Homo sapiens
  misc_RNA (1)...(19): siRNA sense strand
guucauggucggagaagug

SEQ ID NO: 1629117 - RNA, 19 nt, Homo sapiens
  misc_RNA (1)...(19): siRNA sense strand
gcagaaugagcgcuucgau

SEQ ID NO: 1629118 - RNA, 19 nt, Homo sapiens
  misc_RNA (1)...(19): siRNA sense strand
ucaccguggcgcagaauga

SEQ ID NO: 1629119 - RNA, 19 nt, Homo sapiens
  misc_RNA (1)...(19): siRNA sense strand
uucucuaccucuucuauga

SEQ ID NO: 1629120 - RNA, 19 nt, Homo sapiens
  misc_RNA (1)...(19): siRNA sense strand
aaaagauccuggaguuugu

SEQ ID NO: 1629121 - RNA, 19 nt, Homo sapiens
  misc_RNA (1)...(19): siRNA sense strand
cacccacccuguucucuac

SEQ ID NO: 1629122 - RNA, 19 nt, Homo sapiens
  misc_RNA (1)...(19): siRNA sense strand
ucuaugaagacaugaagga

SEQ ID NO: 1629123 - RNA, 19 nt, Homo sapiens
  misc_RNA (1)...(19): siRNA sense strand
gaugaagaagaacccuaug

SEQ ID NO: 1629124 - RNA, 19 nt, Homo sapiens
  misc_RNA (1)...(19): siRNA sense strand
ucaaggagaugaagaagaa

SEQ ID NO: 1629125 - RNA, 19 nt, Homo sapiens
  misc_RNA (1)...(19): siRNA sense strand
gcgcuucgaugcggacuau

SEQ ID NO: 1629126 - RNA, 19 nt, Homo sapiens
  misc_RNA (1)...(19): siRNA sense strand
gcacccacccuguucucua

SEQ ID NO: 1629127 - RNA, 19 nt, Homo sapiens
  misc_RNA (1)...(19): siRNA sense strand
agaagaacccuaugaccaa

SEQ ID NO: 1629128 - RNA, 19 nt, Homo sapiens
  misc_RNA (1)...(19): siRNA sense strand
augaagacaugaaggagaa

SEQ ID NO: 1629129 - RNA, 19 nt, Homo sapiens
  misc_RNA (1)...(19): siRNA sense strand
gaaguucauggucggagaa

SEQ ID NO: 1629130 - RNA, 19 nt, Homo sapiens
  misc_RNA (1)...(19): siRNA sense strand
agaacccuaugaccaacua

SEQ ID NO: 1629131 - RNA, 19 nt, Homo sapiens
  misc_RNA (1)...(19): siRNA sense strand
acacgucguucaaggagau

SEQ ID NO: 1629132 - RNA, 19 nt, Homo sapiens
  misc_RNA (1)...(19): siRNA sense strand
gggacagcuuccuggagaa

SEQ ID NO: 1629133 - RNA, 19 nt, Homo sapiens
  misc_RNA (1)...(19): siRNA sense strand
guucauggucggagaagug

SEQ ID NO: 1629134 - RNA, 19 nt, Homo sapiens
  misc_RNA (1)...(19): siRNA sense strand
gcagaaugagcgcuucgau

SEQ ID NO: 1629135 - RNA, 19 nt, Homo sapiens
  misc_RNA (1)...(19): siRNA sense strand
ucaccguggcgcagaauga

SEQ ID NO: 1629136 - RNA, 19 nt, Homo sapiens
  misc_RNA (1)...(19): siRNA sense strand
uucucuaccucuucuauga

SEQ ID NO: 1629137 - RNA, 19 nt, Homo sapiens
  misc_RNA (1)...(19): siRNA sense strand
aaaagauccuggaguuugu

SEQ ID NO: 1629138 - RNA, 19 nt, Homo sapiens
  misc_RNA (1)...(19): siRNA sense strand
cacccacccuguucucuac

SEQ ID NO: 1629139 - RNA, 19 nt, Homo sapiens
  misc_RNA (1)...(19): siRNA sense strand
ucuaugaagacaugaagga

SEQ ID NO: 1629140 - RNA, 19 nt, Homo sapiens
  misc_RNA (1)...(19): siRNA sense strand
gaugaagaagaacccuaug

SEQ ID NO: 1629141 - RNA, 19 nt, Homo sapiens
  misc_RNA (1)...(19): siRNA sense strand
ucaaggagaugaagaagaa

SEQ ID NO: 1629142 - RNA, 19 nt, Homo sapiens
  misc_RNA (1)...(19): siRNA sense strand
gcgcuucgaugcggacuau

SEQ ID NO: 1629143 - RNA, 19 nt, Homo sapiens
  misc_RNA (1)...(19): siRNA sense strand
gcacccacccuguucucua

SEQ ID NO: 1629144 - RNA, 19 nt, Homo sapiens
  misc_RNA (1)...(19): siRNA sense strand
agaagaacccuaugaccaa

SEQ ID NO: 1629145 - RNA, 19 nt, Homo sapiens
  misc_RNA (1)...(19): siRNA sense strand
augaagacaugaaggagaa

SEQ ID NO: 1629146 - RNA, 19 nt, Homo sapiens
  misc_RNA (1)...(19): siRNA sense strand
gaaguucauggucggagaa

SEQ ID NO: 1629147 - RNA, 19 nt, Homo sapiens
  misc_RNA (1)...(19): siRNA sense strand
agaacccuaugaccaacua

SEQ ID NO: 1629148 - RNA, 19 nt, Homo sapiens
  misc_RNA (1)...(19): siRNA sense strand
acacgucguucaaggagau

SEQ ID NO: 1629149 - RNA, 19 nt, Homo sapiens
  misc_RNA (1)...(19): siRNA sense strand
gggacagcuuccuggagaa

SEQ ID NO: 1629150 - RNA, 19 nt, Homo sapiens
  misc_RNA (1)...(19): siRNA sense strand
guucauggucggagaagug

SEQ ID NO: 1629151 - RNA, 19 nt, Homo sapiens
  misc_RNA (1)...(19): siRNA sense strand
gcagaaugagcgcuucgau

SEQ ID NO: 1629152 - RNA, 19 nt, Homo sapiens
  misc_RNA (1)...(19): siRNA sense strand
ucaccguggcgcagaauga

SEQ ID NO: 1629153 - RNA, 19 nt, Homo sapiens
  misc_RNA (1)...(19): siRNA sense strand
uucucuaccucuucuauga

SEQ ID NO: 1629154 - RNA, 19 nt, Homo sapiens
  misc_RNA (1)...(19): siRNA sense strand
aaaagauccuggaguuugu

SEQ ID NO: 1629155 - RNA, 19 nt, Homo sapiens
  misc_RNA (1)...(19): siRNA sense strand
cacccacccuguucucuac

SEQ ID NO: 1629156 - RNA, 19 nt, Homo sapiens
  misc_RNA (1)...(19): siRNA sense strand
ucuaugaagacaugaagga

SEQ ID NO: 1629157 - RNA, 19 nt, Homo sapiens
  misc_RNA (1)...(19): siRNA sense strand
gaugaagaagaacccuaug

SEQ ID NO: 1629158 - RNA, 19 nt, Homo sapiens
  misc_RNA (1)...(19): siRNA sense strand
ucaaggagaugaagaagaa

SEQ ID NO: 1629159 - RNA, 19 nt, Homo sapiens
  misc_RNA (1)...(19): siRNA sense strand
gcgcuucgaugcggacuau

SEQ ID NO: 1629160 - RNA, 19 nt, Homo sapiens
  misc_RNA (1)...(19): siRNA sense strand
gcacccacccuguucucua

SEQ ID NO: 1629161 - RNA, 19 nt, Homo sapiens
  misc_RNA (1)...(19): siRNA sense strand
agaagaacccuaugaccaa

SEQ ID NO: 1629162 - RNA, 19 nt, Homo sapiens
  misc_RNA (1)...(19): siRNA sense strand
augaagacaugaaggagaa

SEQ ID NO: 1629163 - RNA, 19 nt, Homo sapiens
  misc_RNA (1)...(19): siRNA sense strand
gaaguucauggucggagaa

SEQ ID NO: 1629164 - RNA, 19 nt, Homo sapiens
  misc_RNA (1)...(19): siRNA sense strand
agaacccuaugaccaacua

SEQ ID NO: 1629165 - RNA, 19 nt, Homo sapiens
  misc_RNA (1)...(19): siRNA sense strand
acacgucguucaaggagau

SEQ ID NO: 1629166 - RNA, 19 nt, Homo sapiens
  misc_RNA (1)...(19): siRNA sense strand
gggacagcuuccuggagaa

SEQ ID NO: 1629167 - RNA, 19 nt, Homo sapiens
  misc_RNA (1)...(19): siRNA sense strand
guucauggucggagaagug

SEQ ID NO: 1629168 - RNA, 19 nt, Homo sapiens
  misc_RNA (1)...(19): siRNA sense strand
gcagaaugagcgcuucgau

SEQ ID NO: 1629169 - RNA, 19 nt, Homo sapiens
  misc_RNA (1)...(19): siRNA sense strand
ucaccguggcgcagaauga

SEQ ID NO: 1629170 - RNA, 19 nt, Homo sapiens
  misc_RNA (1)...(19): siRNA sense strand
uucucuaccucuucuauga

SEQ ID NO: 1629171 - RNA, 19 nt, Homo sapiens
  misc_RNA (1)...(19): siRNA sense strand
aaaagauccuggaguuugu

SEQ ID NO: 1629172 - RNA, 19 nt, Homo sapiens
  misc_RNA (1)...(19): siRNA sense strand
cacccacccuguucucuac

SEQ ID NO: 1629173 - RNA, 19 nt, Homo sapiens
  misc_RNA (1)...(19): siRNA sense strand
ucuaugaagacaugaagga

SEQ ID NO: 1629174 - RNA, 19 nt, Homo sapiens
  misc_RNA (1)...(19): siRNA sense strand
gaugaagaagaacccuaug

SEQ ID NO: 1629175 - RNA, 19 nt, Homo sapiens
  misc_RNA (1)...(19): siRNA sense strand
ucaaggagaugaagaagaa

SEQ ID NO: 1629176 - RNA, 19 nt, Homo sapiens
  misc_RNA (1)...(19): siRNA sense strand
gcgcuucgaugcggacuau

SEQ ID NO: 1629177 - RNA, 19 nt, Homo sapiens
  misc_RNA (1)...(19): siRNA sense strand
gcacccacccuguucucua

SEQ ID NO: 1629178 - RNA, 19 nt, Homo sapiens
  misc_RNA (1)...(19): siRNA sense strand
agaagaacccuaugaccaa

SEQ ID NO: 1629179 - RNA, 19 nt, Homo sapiens
  misc_RNA (1)...(19): siRNA sense strand
augaagacaugaaggagaa

SEQ ID NO: 1629180 - RNA, 19 nt, Homo sapiens
  misc_RNA (1)...(19): siRNA sense strand
gaaguucauggucggagaa

SEQ ID NO: 1629181 - RNA, 19 nt, Homo sapiens
  misc_RNA (1)...(19): siRNA sense strand
agaacccuaugaccaacua

SEQ ID NO: 1629182 - RNA, 19 nt, Homo sapiens
  misc_RNA (1)...(19): siRNA sense strand
acacgucguucaaggagau

SEQ ID NO: 1629183 - RNA, 19 nt, Homo sapiens
  misc_RNA (1)...(19): siRNA sense strand
gggacagcuuccuggagaa

SEQ ID NO: 1629184 - RNA, 19 nt, Homo sapiens
  misc_RNA (1)...(19): siRNA sense strand
guucauggucggagaagug

SEQ ID NO: 1629185 - RNA, 19 nt, Homo sapiens
  misc_RNA (1)...(19): siRNA sense strand
gcagaaugagcgcuucgau

SEQ ID NO: 1629186 - RNA, 19 nt, Homo sapiens
  misc_RNA (1)...(19): siRNA sense strand
ucaccguggcgcagaauga

SEQ ID NO: 1629187 - RNA, 19 nt, Homo sapiens
  misc_RNA (1)...(19): siRNA sense strand
uucucuaccucuucuauga

SEQ ID NO: 1629188 - RNA, 19 nt, Homo sapiens
  misc_RNA (1)...(19): siRNA sense strand
aaaagauccuggaguuugu

SEQ ID NO: 1629189 - RNA, 19 nt, Homo sapiens
  misc_RNA (1)...(19): siRNA sense strand
cacccacccuguucucuac

SEQ ID NO: 1629190 - RNA, 19 nt, Homo sapiens
  misc_RNA (1)...(19): siRNA sense strand
ucuaugaagacaugaagga

SEQ ID NO: 1629191 - RNA, 19 nt, Homo sapiens
  misc_RNA (1)...(19): siRNA sense strand
gaugaagaagaacccuaug

SEQ ID NO: 1629192 - RNA, 19 nt, Homo sapiens
  misc_RNA (1)...(19): siRNA sense strand
ucaaggagaugaagaagaa

SEQ ID NO: 1629193 - RNA, 19 nt, Homo sapiens
  misc_RNA (1)...(19): siRNA sense strand
gcgcuucgaugcggacuau

SEQ ID NO: 1629194 - RNA, 19 nt, Homo sapiens
  misc_RNA (1)...(19): siRNA sense strand
gcacccacccuguucucua

SEQ ID NO: 1629195 - RNA, 19 nt, Homo sapiens
  misc_RNA (1)...(19): siRNA sense strand
agaagaacccuaugaccaa

SEQ ID NO: 1629196 - RNA, 19 nt, Homo sapiens
  misc_RNA (1)...(19): siRNA sense strand
augaagacaugaaggagaa

SEQ ID NO: 1629197 - RNA, 19 nt, Homo sapiens
  misc_RNA (1)...(19): siRNA sense strand
gaaguucauggucggagaa

SEQ ID NO: 1629198 - RNA, 19 nt, Homo sapiens
  misc_RNA (1)...(19): siRNA sense strand
agaacccuaugaccaacua

SEQ ID NO: 1629199 - RNA, 19 nt, Homo sapiens
  misc_RNA (1)...(19): siRNA sense strand
acacgucguucaaggagau

SEQ ID NO: 1629200 - RNA, 19 nt, Homo sapiens
  misc_RNA (1)...(19): siRNA sense strand
gggacagcuuccuggagaa

SEQ ID NO: 1629201 - RNA, 19 nt, Homo sapiens
  misc_RNA (1)...(19): siRNA sense strand
guucauggucggagaagug

SEQ ID NO: 1629202 - RNA, 19 nt, Homo sapiens
  misc_RNA (1)...(19): siRNA sense strand
gcagaaugagcgcuucgau

SEQ ID NO: 1629203 - RNA, 19 nt, Homo sapiens
  misc_RNA (1)...(19): siRNA sense strand
ucaccguggcgcagaauga

SEQ ID NO: 1629204 - RNA, 19 nt, Homo sapiens
  misc_RNA (1)...(19): siRNA sense strand
uucucuaccucuucuauga

SEQ ID NO: 1629205 - RNA, 19 nt, Homo sapiens
  misc_RNA (1)...(19): siRNA sense strand
aaaagauccuggaguuugu

SEQ ID NO: 1629206 - RNA, 19 nt, Homo sapiens
  misc_RNA (1)...(19): siRNA sense strand
cacccacccuguucucuac

SEQ ID NO: 1629207 - RNA, 19 nt, Homo sapiens
  misc_RNA (1)...(19): siRNA sense strand
ucuaugaagacaugaagga

SEQ ID NO: 1629208 - RNA, 19 nt, Homo sapiens
  misc_RNA (1)...(19): siRNA sense strand
gaugaagaagaacccuaug

SEQ ID NO: 1629209 - RNA, 19 nt, Homo sapiens
  misc_RNA (1)...(19): siRNA sense strand
ucaaggagaugaagaagaa

SEQ ID NO: 1629210 - RNA, 19 nt, Homo sapiens
  misc_RNA (1)...(19): siRNA sense strand
gcgcuucgaugcggacuau

SEQ ID NO: 1629211 - RNA, 19 nt, Homo sapiens
  misc_RNA (1)...(19): siRNA sense strand
gcacccacccuguucucua

SEQ ID NO: 1629212 - RNA, 19 nt, Homo sapiens
  misc_RNA (1)...(19): siRNA sense strand
agaagaacccuaugaccaa

SEQ ID NO: 1629213 - RNA, 19 nt, Homo sapiens
  misc_RNA (1)...(19): siRNA sense strand
augaagacaugaaggagaa

SEQ ID NO: 1629214 - RNA, 19 nt, Homo sapiens
  misc_RNA (1)...(19): siRNA sense strand
gaaguucauggucggagaa

SEQ ID NO: 1629215 - RNA, 19 nt, Homo sapiens
  misc_RNA (1)...(19): siRNA sense strand
agaacccuaugaccaacua

SEQ ID NO: 1629216 - RNA, 19 nt, Homo sapiens
  misc_RNA (1)...(19): siRNA sense strand
acacgucguucaaggagau

SEQ ID NO: 1629217 - RNA, 19 nt, Homo sapiens
  misc_RNA (1)...(19): siRNA sense strand
gggacagcuuccuggagaa

SEQ ID NO: 1629218 - RNA, 19 nt, Homo sapiens
  misc_RNA (1)...(19): siRNA sense strand
guucauggucggagaagug

SEQ ID NO: 1629219 - RNA, 19 nt, Homo sapiens
  misc_RNA (1)...(19): siRNA sense strand
gcagaaugagcgcuucgau

SEQ ID NO: 1629220 - RNA, 19 nt, Homo sapiens
  misc_RNA (1)...(19): siRNA sense strand
ucaccguggcgcagaauga

SEQ ID NO: 1629221 - RNA, 19 nt, Homo sapiens
  misc_RNA (1)...(19): siRNA sense strand
uucucuaccucuucuauga

SEQ ID NO: 1629222 - RNA, 19 nt, Homo sapiens
  misc_RNA (1)...(19): siRNA sense strand
aaaagauccuggaguuugu

SEQ ID NO: 1629223 - RNA, 19 nt, Homo sapiens
  misc_RNA (1)...(19): siRNA sense strand
cacccacccuguucucuac

SEQ ID NO: 1629224 - RNA, 19 nt, Homo sapiens
  misc_RNA (1)...(19): siRNA sense strand
ucuaugaagacaugaagga

SEQ ID NO: 1629225 - RNA, 19 nt, Homo sapiens
  misc_RNA (1)...(19): siRNA sense strand
gaugaagaagaacccuaug

SEQ ID NO: 1629226 - RNA, 19 nt, Homo sapiens
  misc_RNA (1)...(19): siRNA sense strand
ucaaggagaugaagaagaa

SEQ ID NO: 1629227 - RNA, 19 nt, Homo sapiens
  misc_RNA (1)...(19): siRNA sense strand
gcgcuucgaugcggacuau

SEQ ID NO: 1629228 - RNA, 19 nt, Homo sapiens
  misc_RNA (1)...(19): siRNA sense strand
gcacccacccuguucucua

SEQ ID NO: 1629229 - RNA, 19 nt, Homo sapiens
  misc_RNA (1)...(19): siRNA sense strand
agaagaacccuaugaccaa

SEQ ID NO: 1629230 - RNA, 19 nt, Homo sapiens
  misc_RNA (1)...(19): siRNA sense strand
augaagacaugaaggagaa

SEQ ID NO: 1629231 - RNA, 19 nt, Homo sapiens
  misc_RNA (1)...(19): siRNA sense strand
gaaguucauggucggagaa

SEQ ID NO: 1629232 - RNA, 19 nt, Homo sapiens
  misc_RNA (1)...(19): siRNA sense strand
agaacccuaugaccaacua

SEQ ID NO: 1629233 - RNA, 19 nt, Homo sapiens
  misc_RNA (1)...(19): siRNA sense strand
acacgucguucaaggagau

SEQ ID NO: 1629234 - RNA, 19 nt, Homo sapiens
  misc_RNA (1)...(19): siRNA sense strand
gggacagcuuccuggagaa

SEQ ID NO: 1629235 - RNA, 19 nt, Homo sapiens
  misc_RNA (1)...(19): siRNA sense strand
guucauggucggagaagug

SEQ ID NO: 1629236 - RNA, 19 nt, Homo sapiens
  misc_RNA (1)...(19): siRNA sense strand
gcagaaugagcgcuucgau

SEQ ID NO: 1629237 - RNA, 19 nt, Homo sapiens
  misc_RNA (1)...(19): siRNA sense strand
ucaccguggcgcagaauga

SEQ ID NO: 1629238 - RNA, 19 nt, Homo sapiens
  misc_RNA (1)...(19): siRNA sense strand
uucucuaccucuucuauga

SEQ ID NO: 1629239 - RNA, 19 nt, Homo sapiens
  misc_RNA (1)...(19): siRNA sense strand
aaaagauccuggaguuugu

SEQ ID NO: 1629240 - RNA, 19 nt, Homo sapiens
  misc_RNA (1)...(19): siRNA sense strand
cacccacccuguucucuac

SEQ ID NO: 1629241 - RNA, 19 nt, Homo sapiens
  misc_RNA (1)...(19): siRNA sense strand
ucuaugaagacaugaagga

SEQ ID NO: 1629242 - RNA, 19 nt, Homo sapiens
  misc_RNA (1)...(19): siRNA sense strand
gaugaagaagaacccuaug

SEQ ID NO: 1629243 - RNA, 19 nt, Homo sapiens
  misc_RNA (1)...(19): siRNA sense strand
ucaaggagaugaagaagaa

SEQ ID NO: 1629244 - RNA, 19 nt, Homo sapiens
  misc_RNA (1)...(19): siRNA sense strand
gcgcuucgaugcggacuau

SEQ ID NO: 1629245 - RNA, 19 nt, Homo sapiens
  misc_RNA (1)...(19): siRNA sense strand
gcacccacccuguucucua

SEQ ID NO: 1629246 - RNA, 19 nt, Homo sapiens
  misc_RNA (1)...(19): siRNA sense strand
agaagaacccuaugaccaa

SEQ ID NO: 1629247 - RNA, 19 nt, Homo sapiens
  misc_RNA (1)...(19): siRNA sense strand
augaagacaugaaggagaa

SEQ ID NO: 1629248 - RNA, 19 nt, Homo sapiens
  misc_RNA (1)...(19): siRNA sense strand
gaaguucauggucggagaa

SEQ ID NO: 1629249 - RNA, 19 nt, Homo sapiens
  misc_RNA (1)...(19): siRNA sense strand
agaacccuaugaccaacua

SEQ ID NO: 1629250 - RNA, 19 nt, Homo sapiens
  misc_RNA (1)...(19): siRNA sense strand
acacgucguucaaggagau

SEQ ID NO: 1629251 - RNA, 19 nt, Homo sapiens
  misc_RNA (1)...(19): siRNA sense strand
gggacagcuuccuggagaa

SEQ ID NO: 1629252 - RNA, 19 nt, Homo sapiens
  misc_RNA (1)...(19): siRNA sense strand
guucauggucggagaagug

SEQ ID NO: 1629253 - RNA, 19 nt, Homo sapiens
  misc_RNA (1)...(19): siRNA sense strand
gcagaaugagcgcuucgau

SEQ ID NO: 1629254 - RNA, 19 nt, Homo sapiens
  misc_RNA (1)...(19): siRNA sense strand
ucaccguggcgcagaauga

SEQ ID NO: 1629255 - RNA, 19 nt, Homo sapiens
  misc_RNA (1)...(19): siRNA sense strand
uucucuaccucuucuauga

SEQ ID NO: 1629256 - RNA, 19 nt, Homo sapiens
  misc_RNA (1)...(19): siRNA sense strand
aaaagauccuggaguuugu

SEQ ID NO: 1629257 - RNA, 19 nt, Homo sapiens
  misc_RNA (1)...(19): siRNA sense strand
cacccacccuguucucuac

SEQ ID NO: 1629258 - RNA, 19 nt, Homo sapiens
  misc_RNA (1)...(19): siRNA sense strand
ucuaugaagacaugaagga

SEQ ID NO: 1629259 - RNA, 19 nt, Homo sapiens
  misc_RNA (1)...(19): siRNA sense strand
gaugaagaagaacccuaug

SEQ ID NO: 1629260 - RNA, 19 nt, Homo sapiens
  misc_RNA (1)...(19): siRNA sense strand
ucaaggagaugaagaagaa

SEQ ID NO: 1629261 - RNA, 19 nt, Homo sapiens
  misc_RNA (1)...(19): siRNA sense strand
gcgcuucgaugcggacuau

SEQ ID NO: 1629262 - RNA, 19 nt, Homo sapiens
  misc_RNA (1)...(19): siRNA sense strand
gcacccacccuguucucua

SEQ ID NO: 1629263 - RNA, 19 nt, Homo sapiens
  misc_RNA (1)...(19): siRNA sense strand
agaagaacccuaugaccaa

SEQ ID NO: 1629264 - RNA, 19 nt, Homo sapiens
  misc_RNA (1)...(19): siRNA sense strand
augaagacaugaaggagaa

SEQ ID NO: 1629265 - RNA, 19 nt, Homo sapiens
  misc_RNA (1)...(19): siRNA sense strand
gaaguucauggucggagaa

SEQ ID NO: 1629266 - RNA, 19 nt, Homo sapiens
  misc_RNA (1)...(19): siRNA sense strand
agaacccuaugaccaacua

SEQ ID NO: 1629267 - RNA, 19 nt, Homo sapiens
  misc_RNA (1)...(19): siRNA sense strand
acacgucguucaaggagau

SEQ ID NO: 1629268 - RNA, 19 nt, Homo sapiens
  misc_RNA (1)...(19): siRNA sense strand
gggacagcuuccuggagaa

SEQ ID NO: 1629269 - RNA, 19 nt, Homo sapiens
  misc_RNA (1)...(19): siRNA sense strand
guucauggucggagaagug

SEQ ID NO: 1629270 - RNA, 19 nt, Homo sapiens
  misc_RNA (1)...(19): siRNA sense strand
gcagaaugagcgcuucgau

SEQ ID NO: 1629271 - RNA, 19 nt, Homo sapiens
  misc_RNA (1)...(19): siRNA sense strand
ucaccguggcgcagaauga

SEQ ID NO: 1629272 - RNA, 19 nt, Homo sapiens
  misc_RNA (1)...(19): siRNA sense strand
uucucuaccucuucuauga

SEQ ID NO: 1629273 - RNA, 19 nt, Homo sapiens
  misc_RNA (1)...(19): siRNA sense strand
aaaagauccuggaguuugu

SEQ ID NO: 1629274 - RNA, 19 nt, Homo sapiens
  misc_RNA (1)...(19): siRNA sense strand
cacccacccuguucucuac

SEQ ID NO: 1629275 - RNA, 19 nt, Homo sapiens
  misc_RNA (1)...(19): siRNA sense strand
ucuaugaagacaugaagga

SEQ ID NO: 1629276 - RNA, 19 nt, Homo sapiens
  misc_RNA (1)...(19): siRNA sense strand
gaugaagaagaacccuaug

SEQ ID NO: 1629277 - RNA, 19 nt, Homo sapiens
  misc_RNA (1)...(19): siRNA sense strand
gaagaucgauugagaaguu

SEQ ID NO: 1629278 - RNA, 19 nt, Homo sapiens
  misc_RNA (1)...(19): siRNA sense strand
cgaauaacaugauggaaua

SEQ ID NO: 1629279 - RNA, 19 nt, Homo sapiens
  misc_RNA (1)...(19): siRNA sense strand
gaaccuuccuguuaaugua

SEQ ID NO: 1629280 - RNA, 19 nt, Homo sapiens
  misc_RNA (1)...(19): siRNA sense strand
gcaacaaauuugaaucuga

SEQ ID NO: 1629281 - RNA, 19 nt, Homo sapiens
  misc_RNA (1)...(19): siRNA sense strand
ggacugagcaacaaauuug

SEQ ID NO: 1629282 - RNA, 19 nt, Homo sapiens
  misc_RNA (1)...(19): siRNA sense strand
ggaaaugugaaacgaauaa

SEQ ID NO: 1629283 - RNA, 19 nt, Homo sapiens
  misc_RNA (1)...(19): siRNA sense strand
acacgaagaucgauugaga

SEQ ID NO: 1629284 - RNA, 19 nt, Homo sapiens
  misc_RNA (1)...(19): siRNA sense strand
gaauucccuucuucauuaa

SEQ ID NO: 1629285 - RNA, 19 nt, Homo sapiens
  misc_RNA (1)...(19): siRNA sense strand
aaaaguagcuccugaagaa

SEQ ID NO: 1629286 - RNA, 19 nt, Homo sapiens
  misc_RNA (1)...(19): siRNA sense strand
ccaguuauuugccucagua

SEQ ID NO: 1629287 - RNA, 19 nt, Homo sapiens
  misc_RNA (1)...(19): siRNA sense strand
agaguuaacaguugucuua

SEQ ID NO: 1629288 - RNA, 19 nt, Homo sapiens
  misc_RNA (1)...(19): siRNA sense strand
ugcaguauguggccaguua

SEQ ID NO: 1629289 - RNA, 19 nt, Homo sapiens
  misc_RNA (1)...(19): siRNA sense strand
uaacaguugucuuaagaag

SEQ ID NO: 1629290 - RNA, 19 nt, Homo sapiens
  misc_RNA (1)...(19): siRNA sense strand
cacauuagguugcaguaug

SEQ ID NO: 1629291 - RNA, 19 nt, Homo sapiens
  misc_RNA (1)...(19): siRNA sense strand
gaacacgaagaucgauuga

SEQ ID NO: 1629292 - RNA, 19 nt, Homo sapiens
  misc_RNA (1)...(19): siRNA sense strand
gaauuuaaagccagcauca

SEQ ID NO: 1629293 - RNA, 19 nt, Homo sapiens
  misc_RNA (1)...(19): siRNA sense strand
ugaaacgaauaacaugaug

SEQ ID NO: 1629294 - RNA, 19 nt, Homo sapiens
  misc_RNA (1)...(19): siRNA sense strand
gagcaacaaauuugaaucu

SEQ ID NO: 1629295 - RNA, 19 nt, Homo sapiens
  misc_RNA (1)...(19): siRNA sense strand
aauguacguuggcuacuuu

SEQ ID NO: 1629296 - RNA, 19 nt, Homo sapiens
  misc_RNA (1)...(19): siRNA sense strand
cgaaaucuaugaggaagag

SEQ ID NO: 1629297 - RNA, 19 nt, Homo sapiens
  misc_RNA (1)...(19): siRNA sense strand
guauguggccaguuauuug

SEQ ID NO: 1629298 - RNA, 19 nt, Homo sapiens
  misc_RNA (1)...(19): siRNA sense strand
aaggaaaugugaaacgaau

SEQ ID NO: 1629299 - RNA, 19 nt, Homo sapiens
  misc_RNA (1)...(19): siRNA sense strand
cgacgaaaucuaugaggaa

SEQ ID NO: 1629300 - RNA, 19 nt, Homo sapiens
  misc_RNA (1)...(19): siRNA sense strand
gccagcaucaacagaguua

SEQ ID NO: 1629301 - RNA, 19 nt, Homo sapiens
  misc_RNA (1)...(19): siRNA sense strand
aaucugaauucccuucuuc

SEQ ID NO: 1629302 - RNA, 19 nt, Homo sapiens
  misc_RNA (1)...(19): siRNA sense strand
uaauguacguuggcuacuu

SEQ ID NO: 1629303 - RNA, 19 nt, Homo sapiens
  misc_RNA (1)...(19): siRNA sense strand
aguagcuccugaagaauuu

SEQ ID NO: 1629304 - RNA, 19 nt, Homo sapiens
  misc_RNA (1)...(19): siRNA sense strand
cgauugagaaguuauuaga

SEQ ID NO: 1629305 - RNA, 19 nt, Homo sapiens
  misc_RNA (1)...(19): siRNA sense strand
acaauagguuauaccacaa

SEQ ID NO: 1629306 - RNA, 19 nt, Homo sapiens
  misc_RNA (1)...(19): siRNA sense strand
aaacgaauaacaugaugga

SEQ ID NO: 1629307 - RNA, 19 nt, Homo sapiens
  misc_RNA (1)...(19): siRNA sense strand
gaucgauugagaaguuauu

SEQ ID NO: 1629308 - RNA, 19 nt, Homo sapiens
  misc_RNA (1)...(19): siRNA sense strand
ucacgucaccguauuugga

SEQ ID NO: 1629309 - RNA, 19 nt, Homo sapiens
  misc_RNA (1)...(19): siRNA sense strand
aagaucgauugagaaguua

SEQ ID NO: 1629310 - RNA, 19 nt, Homo sapiens
  misc_RNA (1)...(19): siRNA sense strand
gcacauuagguugcaguau

SEQ ID NO: 1629311 - RNA, 19 nt, Homo sapiens
  misc_RNA (1)...(19): siRNA sense strand
guacguuggcuacuuugug

SEQ ID NO: 1629312 - RNA, 19 nt, Homo sapiens
  misc_RNA (1)...(19): siRNA sense strand
uggaauaugucauccucau

SEQ ID NO: 1629313 - RNA, 19 nt, Homo sapiens
  misc_RNA (1)...(19): siRNA sense strand
gaaaaguagcuccugaaga

SEQ ID NO: 1629314 - RNA, 19 nt, Homo sapiens
  misc_RNA (1)...(19): siRNA sense strand
ggaaaacaauagguuauac

SEQ ID NO: 1629315 - RNA, 19 nt, Homo sapiens
  misc_RNA (1)...(19): siRNA sense strand
gugaaacgaauaacaugau

SEQ ID NO: 1629316 - RNA, 19 nt, Homo sapiens
  misc_RNA (1)...(19): siRNA sense strand
uuaccaaagacaccgauuu

SEQ ID NO: 1629317 - RNA, 19 nt, Homo sapiens
  misc_RNA (1)...(19): siRNA sense strand
ugucauccucauagaauuu

SEQ ID NO: 1629318 - RNA, 19 nt, Homo sapiens
  misc_RNA (1)...(19): siRNA sense strand
cuuuguggcugccuuuguu

SEQ ID NO: 1629319 - RNA, 19 nt, Homo sapiens
  misc_RNA (1)...(19): siRNA sense strand
guauuuggacugagcaaca

SEQ ID NO: 1629320 - RNA, 19 nt, Homo sapiens
  misc_RNA (1)...(19): siRNA sense strand
aaaggaaaugugaaacgaa

SEQ ID NO: 1629321 - RNA, 19 nt, Homo sapiens
  misc_RNA (1)...(19): siRNA sense strand
aaguagcuccugaagaauu

SEQ ID NO: 1629322 - RNA, 19 nt, Homo sapiens
  misc_RNA (1)...(19): siRNA sense strand
acgaauaacaugauggaau

SEQ ID NO: 1629323 - RNA, 19 nt, Homo sapiens
  misc_RNA (1)...(19): siRNA sense strand
uauuuggacugagcaacaa

SEQ ID NO: 1629324 - RNA, 19 nt, Homo sapiens
  misc_RNA (1)...(19): siRNA sense strand
gggaaaacaauagguuaua

SEQ ID NO: 1629325 - RNA, 19 nt, Homo sapiens
  misc_RNA (1)...(19): siRNA sense strand
agaacacgaagaucgauug

SEQ ID NO: 1629326 - RNA, 19 nt, Homo sapiens
  misc_RNA (1)...(19): siRNA sense strand
ggucacgucaccguauuug

SEQ ID NO: 1629327 - RNA, 19 nt, Homo sapiens
  misc_RNA (1)...(19): siRNA sense strand
guuauuugccucaguaaaa

SEQ ID NO: 1629328 - RNA, 19 nt, Homo sapiens
  misc_RNA (1)...(19): siRNA sense strand
caucaacagaguuaacagu

SEQ ID NO: 1629329 - RNA, 19 nt, Homo sapiens
  misc_RNA (1)...(19): siRNA sense strand
uaaagccagcaucaacaga

SEQ ID NO: 1629330 - RNA, 19 nt, Homo sapiens
  misc_RNA (1)...(19): siRNA sense strand
gcaguauguggccaguuau

SEQ ID NO: 1629331 - RNA, 19 nt, Homo sapiens
  misc_RNA (1)...(19): siRNA sense strand
ugugaaacgaauaacauga

SEQ ID NO: 1629332 - RNA, 19 nt, Homo sapiens
  misc_RNA (1)...(19): siRNA sense strand
aaaaggaaaugugaaacga

SEQ ID NO: 1629333 - RNA, 19 nt, Homo sapiens
  misc_RNA (1)...(19): siRNA sense strand
ucaaggagaugaagaagaa

SEQ ID NO: 1629334 - RNA, 19 nt, Homo sapiens
  misc_RNA (1)...(19): siRNA sense strand
guucauggcuggagaagug

SEQ ID NO: 1629335 - RNA, 19 nt, Homo sapiens
  misc_RNA (1)...(19): siRNA sense strand
ucaccgagcucccaucuuc

SEQ ID NO: 1629336 - RNA, 19 nt, Homo sapiens
  misc_RNA (1)...(19): siRNA sense strand
gggucccgcucaucaagua

SEQ ID NO: 1629337 - RNA, 19 nt, Homo sapiens
  misc_RNA (1)...(19): siRNA sense strand
gcgcuucgaugcggacuau

SEQ ID NO: 1629338 - RNA, 19 nt, Homo sapiens
  misc_RNA (1)...(19): siRNA sense strand
gcacccacccuguucucua

SEQ ID NO: 1629339 - RNA, 19 nt, Homo sapiens
  misc_RNA (1)...(19): siRNA sense strand
ccacauggccaaaguguac

SEQ ID NO: 1629340 - RNA, 19 nt, Homo sapiens
  misc_RNA (1)...(19): siRNA sense strand
agaagaacccuaugaccaa

SEQ ID NO: 1629341 - RNA, 19 nt, Homo sapiens
  misc_RNA (1)...(19): siRNA sense strand
augaagacaugaaggagaa

SEQ ID NO: 1629342 - RNA, 19 nt, Homo sapiens
  misc_RNA (1)...(19): siRNA sense strand
ccucagggauggagacucu

SEQ ID NO: 1629343 - RNA, 19 nt, Homo sapiens
  misc_RNA (1)...(19): siRNA sense strand
gaaguucauggcuggagaa

SEQ ID NO: 1629344 - RNA, 19 nt, Homo sapiens
  misc_RNA (1)...(19): siRNA sense strand
agaacccuaugaccaacua

SEQ ID NO: 1629345 - RNA, 19 nt, Homo sapiens
  misc_RNA (1)...(19): siRNA sense strand
gaaggucaagguggucuau

SEQ ID NO: 1629346 - RNA, 19 nt, Homo sapiens
  misc_RNA (1)...(19): siRNA sense strand
acacgucguucaaggagau

SEQ ID NO: 1629347 - RNA, 19 nt, Homo sapiens
  misc_RNA (1)...(19): siRNA sense strand
ggucaagguggucuauguu

SEQ ID NO: 1629348 - RNA, 19 nt, Homo sapiens
  misc_RNA (1)...(19): siRNA sense strand
cuggagaaguguccuaugg

SEQ ID NO: 1629349 - RNA, 19 nt, Homo sapiens
  misc_RNA (1)...(19): siRNA sense strand
gcggugaccuggaaaagug

SEQ ID NO: 1629350 - RNA, 19 nt, Homo sapiens
  misc_RNA (1)...(19): siRNA sense strand
gcagaaugagcgcuucgau

SEQ ID NO: 1629351 - RNA, 19 nt, Homo sapiens
  misc_RNA (1)...(19): siRNA sense strand
ucaccguggcgcagaauga

SEQ ID NO: 1629352 - RNA, 19 nt, Homo sapiens
  misc_RNA (1)...(19): siRNA sense strand
gagcugauccaggacaucu

SEQ ID NO: 1629353 - RNA, 19 nt, Homo sapiens
  misc_RNA (1)...(19): siRNA sense strand
uucucuaccucuucuauga

SEQ ID NO: 1629354 - RNA, 19 nt, Homo sapiens
  misc_RNA (1)...(19): siRNA sense strand
cgggugcccuuccuugagu

SEQ ID NO: 1629355 - RNA, 19 nt, Homo sapiens
  misc_RNA (1)...(19): siRNA sense strand
aaaagauccuggaguuugu

SEQ ID NO: 1629356 - RNA, 19 nt, Homo sapiens
  misc_RNA (1)...(19): siRNA sense strand
gcucaucaaguacuuugca

SEQ ID NO: 1629357 - RNA, 19 nt, Homo sapiens
  misc_RNA (1)...(19): siRNA sense strand
cacccacccuguucucuac

SEQ ID NO: 1629358 - RNA, 19 nt, Homo sapiens
  misc_RNA (1)...(19): siRNA sense strand
gucaagguggucuauguug

SEQ ID NO: 1629359 - RNA, 19 nt, Homo sapiens
  misc_RNA (1)...(19): siRNA sense strand
gaugaagaagaacccuaug

SEQ ID NO: 1629360 - RNA, 19 nt, Homo sapiens
  misc_RNA (1)...(19): siRNA sense strand
ucuaugaagacaugaagga

SEQ ID NO: 1629361 - RNA, 19 nt, Homo sapiens
  misc_RNA (1)...(19): siRNA sense strand
ucaaggagaugaagaagaa

SEQ ID NO: 1629362 - RNA, 19 nt, Homo sapiens
  misc_RNA (1)...(19): siRNA sense strand
guucauggcuggagaagug

SEQ ID NO: 1629363 - RNA, 19 nt, Homo sapiens
  misc_RNA (1)...(19): siRNA sense strand
ucaccgagcucccaucuuc

SEQ ID NO: 1629364 - RNA, 19 nt, Homo sapiens
  misc_RNA (1)...(19): siRNA sense strand
gggucccgcucaucaagua

SEQ ID NO: 1629365 - RNA, 19 nt, Homo sapiens
  misc_RNA (1)...(19): siRNA sense strand
gcgcuucgaugcggacuau

SEQ ID NO: 1629366 - RNA, 19 nt, Homo sapiens
  misc_RNA (1)...(19): siRNA sense strand
gcacccacccuguucucua

SEQ ID NO: 1629367 - RNA, 19 nt, Homo sapiens
  misc_RNA (1)...(19): siRNA sense strand
ccacauggccaaaguguac

SEQ ID NO: 1629368 - RNA, 19 nt, Homo sapiens
  misc_RNA (1)...(19): siRNA sense strand
agaagaacccuaugaccaa

SEQ ID NO: 1629369 - RNA, 19 nt, Homo sapiens
  misc_RNA (1)...(19): siRNA sense strand
augaagacaugaaggagaa

SEQ ID NO: 1629370 - RNA, 19 nt, Homo sapiens
  misc_RNA (1)...(19): siRNA sense strand
ccucagggauggagacucu

SEQ ID NO: 1629371 - RNA, 19 nt, Homo sapiens
  misc_RNA (1)...(19): siRNA sense strand
gaaguucauggcuggagaa

SEQ ID NO: 1629372 - RNA, 19 nt, Homo sapiens
  misc_RNA (1)...(19): siRNA sense strand
agaacccuaugaccaacua

SEQ ID NO: 1629373 - RNA, 19 nt, Homo sapiens
  misc_RNA (1)...(19): siRNA sense strand
gaaggucaagguggucuau

SEQ ID NO: 1629374 - RNA, 19 nt, Homo sapiens
  misc_RNA (1)...(19): siRNA sense strand
acacgucguucaaggagau

SEQ ID NO: 1629375 - RNA, 19 nt, Homo sapiens
  misc_RNA (1)...(19): siRNA sense strand
ggucaagguggucuauguu

SEQ ID NO: 1629376 - RNA, 19 nt, Homo sapiens
  misc_RNA (1)...(19): siRNA sense strand
cuggagaaguguccuaugg

SEQ ID NO: 1629377 - RNA, 19 nt, Homo sapiens
  misc_RNA (1)...(19): siRNA sense strand
gcggugaccuggaaaagug

SEQ ID NO: 1629378 - RNA, 19 nt, Homo sapiens
  misc_RNA (1)...(19): siRNA sense strand
gcagaaugagcgcuucgau

SEQ ID NO: 1629379 - RNA, 19 nt, Homo sapiens
  misc_RNA (1)...(19): siRNA sense strand
ucaccguggcgcagaauga

SEQ ID NO: 1629380 - RNA, 19 nt, Homo sapiens
  misc_RNA (1)...(19): siRNA sense strand
gagcugauccaggacaucu

SEQ ID NO: 1629381 - RNA, 19 nt, Homo sapiens
  misc_RNA (1)...(19): siRNA sense strand
uucucuaccucuucuauga

SEQ ID NO: 1629382 - RNA, 19 nt, Homo sapiens
  misc_RNA (1)...(19): siRNA sense strand
cgggugcccuuccuugagu

SEQ ID NO: 1629383 - RNA, 19 nt, Homo sapiens
  misc_RNA (1)...(19): siRNA sense strand
aaaagauccuggaguuugu

SEQ ID NO: 1629384 - RNA, 19 nt, Homo sapiens
  misc_RNA (1)...(19): siRNA sense strand
gcucaucaaguacuuugca

SEQ ID NO: 1629385 - RNA, 19 nt, Homo sapiens
  misc_RNA (1)...(19): siRNA sense strand
cacccacccuguucucuac

SEQ ID NO: 1629386 - RNA, 19 nt, Homo sapiens
  misc_RNA (1)...(19): siRNA sense strand
gucaagguggucuauguug

SEQ ID NO: 1629387 - RNA, 19 nt, Homo sapiens
  misc_RNA (1)...(19): siRNA sense strand
gaugaagaagaacccuaug

SEQ ID NO: 1629388 - RNA, 19 nt, Homo sapiens
  misc_RNA (1)...(19): siRNA sense strand
ucuaugaagacaugaagga

SEQ ID NO: 1629389 - RNA, 19 nt, Homo sapiens
  misc_RNA (1)...(19): siRNA sense strand
gaacaugggugaccucuuu

SEQ ID NO: 1629390 - RNA, 19 nt, Homo sapiens
  misc_RNA (1)...(19): siRNA sense strand
gauaacaacuccaaccaua

SEQ ID NO: 1629391 - RNA, 19 nt, Homo sapiens
  misc_RNA (1)...(19): siRNA sense strand
gaaagaggcuggagauuuu

SEQ ID NO: 1629392 - RNA, 19 nt, Homo sapiens
  misc_RNA (1)...(19): siRNA sense strand
gaacagaccaaauuaguga

SEQ ID NO: 1629393 - RNA, 19 nt, Homo sapiens
  misc_RNA (1)...(19): siRNA sense strand
ugacaaagaugguaugaug

SEQ ID NO: 1629394 - RNA, 19 nt, Homo sapiens
  misc_RNA (1)...(19): siRNA sense strand
gaaaugcagagcaaaguua

SEQ ID NO: 1629395 - RNA, 19 nt, Homo sapiens
  misc_RNA (1)...(19): siRNA sense strand
ggaaauagccagagagaug

SEQ ID NO: 1629396 - RNA, 19 nt, Homo sapiens
  misc_RNA (1)...(19): siRNA sense strand
ggaaagaggcuggagauuu

SEQ ID NO: 1629397 - RNA, 19 nt, Homo sapiens
  misc_RNA (1)...(19): siRNA sense strand
ccagagagaugaaauguuc

SEQ ID NO: 1629398 - RNA, 19 nt, Homo sapiens
  misc_RNA (1)...(19): siRNA sense strand
cagcacagcuccugaaaug

SEQ ID NO: 1629399 - RNA, 19 nt, Homo sapiens
  misc_RNA (1)...(19): siRNA sense strand
gaacagcaccuuuaaucuu

SEQ ID NO: 1629400 - RNA, 19 nt, Homo sapiens
  misc_RNA (1)...(19): siRNA sense strand
ucagugaucugugauauuu

SEQ ID NO: 1629401 - RNA, 19 nt, Homo sapiens
  misc_RNA (1)...(19): siRNA sense strand
gaacugagccuagcaaauc

SEQ ID NO: 1629402 - RNA, 19 nt, Homo sapiens
  misc_RNA (1)...(19): siRNA sense strand
gaaauuggaagcuauaguu

SEQ ID NO: 1629403 - RNA, 19 nt, Homo sapiens
  misc_RNA (1)...(19): siRNA sense strand
ccagaaaguuugaaauaga

SEQ ID NO: 1629404 - RNA, 19 nt, Homo sapiens
  misc_RNA (1)...(19): siRNA sense strand
ccaagaaccugagaucaaa

SEQ ID NO: 1629405 - RNA, 19 nt, Homo sapiens
  misc_RNA (1)...(19): siRNA sense strand
gcaucaagcaugagucuua

SEQ ID NO: 1629406 - RNA, 19 nt, Homo sapiens
  misc_RNA (1)...(19): siRNA sense strand
gcaggaagcgcuggaaaua

SEQ ID NO: 1629407 - RNA, 19 nt, Homo sapiens
  misc_RNA (1)...(19): siRNA sense strand
gaacgaaaggguagaaaug

SEQ ID NO: 1629408 - RNA, 19 nt, Homo sapiens
  misc_RNA (1)...(19): siRNA sense strand
gcacagcuccugaaaugaa

SEQ ID NO: 1629409 - RNA, 19 nt, Homo sapiens
  misc_RNA (1)...(19): siRNA sense strand
gaagucugcgcuauaguua

SEQ ID NO: 1629410 - RNA, 19 nt, Homo sapiens
  misc_RNA (1)...(19): siRNA sense strand
gcaaacuucuccagccaaa

SEQ ID NO: 1629411 - RNA, 19 nt, Homo sapiens
  misc_RNA (1)...(19): siRNA sense strand
ggaaaccagucaugcauca

SEQ ID NO: 1629412 - RNA, 19 nt, Homo sapiens
  misc_RNA (1)...(19): siRNA sense strand
ccacagaaaugcagagcaa

SEQ ID NO: 1629413 - RNA, 19 nt, Homo sapiens
  misc_RNA (1)...(19): siRNA sense strand
gaugauauacugucuuuga

SEQ ID NO: 1629414 - RNA, 19 nt, Homo sapiens
  misc_RNA (1)...(19): siRNA sense strand
gcccagauguuccagaauu

SEQ ID NO: 1629415 - RNA, 19 nt, Homo sapiens
  misc_RNA (1)...(19): siRNA sense strand
gaagagugguccuccugaa

SEQ ID NO: 1629416 - RNA, 19 nt, Homo sapiens
  misc_RNA (1)...(19): siRNA sense strand
uaacaagggcauggaauua

SEQ ID NO: 1629417 - RNA, 19 nt, Homo sapiens
  misc_RNA (1)...(19): siRNA sense strand
gauccuggguugaguaguu

SEQ ID NO: 1629418 - RNA, 19 nt, Homo sapiens
  misc_RNA (1)...(19): siRNA sense strand
gaagagaaggagaacgaua

SEQ ID NO: 1629419 - RNA, 19 nt, Homo sapiens
  misc_RNA (1)...(19): siRNA sense strand
gaaacaagaauggcgauaa

SEQ ID NO: 1629420 - RNA, 19 nt, Homo sapiens
  misc_RNA (1)...(19): siRNA sense strand
ccaggaauguccagucaaa

SEQ ID NO: 1629421 - RNA, 19 nt, Homo sapiens
  misc_RNA (1)...(19): siRNA sense strand
gaggaucauucuucucaaa

SEQ ID NO: 1629422 - RNA, 19 nt, Homo sapiens
  misc_RNA (1)...(19): siRNA sense strand
gacaggagauauucuagga

SEQ ID NO: 1629423 - RNA, 19 nt, Homo sapiens
  misc_RNA (1)...(19): siRNA sense strand
auucucagcugcauuauaa

SEQ ID NO: 1629424 - RNA, 19 nt, Homo sapiens
  misc_RNA (1)...(19): siRNA sense strand
ugaauucucagcugcauua

SEQ ID NO: 1629425 - RNA, 19 nt, Homo sapiens
  misc_RNA (1)...(19): siRNA sense strand
gcagauuguuugcuacaug

SEQ ID NO: 1629426 - RNA, 19 nt, Homo sapiens
  misc_RNA (1)...(19): siRNA sense strand
uagcaaaucuccuggaagu

SEQ ID NO: 1629427 - RNA, 19 nt, Homo sapiens
  misc_RNA (1)...(19): siRNA sense strand
gcuaucagccucaaucuau

SEQ ID NO: 1629428 - RNA, 19 nt, Homo sapiens
  misc_RNA (1)...(19): siRNA sense strand
uaucaugacuuugcagaaa

SEQ ID NO: 1629429 - RNA, 19 nt, Homo sapiens
  misc_RNA (1)...(19): siRNA sense strand
cacauuaucagcaggauua

SEQ ID NO: 1629430 - RNA, 19 nt, Homo sapiens
  misc_RNA (1)...(19): siRNA sense strand
gaaauagccagagagauga

SEQ ID NO: 1629431 - RNA, 19 nt, Homo sapiens
  misc_RNA (1)...(19): siRNA sense strand
caaacaagcaguucccauu

SEQ ID NO: 1629432 - RNA, 19 nt, Homo sapiens
  misc_RNA (1)...(19): siRNA sense strand
ggauugaaauuggaagcua

SEQ ID NO: 1629433 - RNA, 19 nt, Homo sapiens
  misc_RNA (1)...(19): siRNA sense strand
gcugggcgcugccuaaugu

SEQ ID NO: 1629434 - RNA, 19 nt, Homo sapiens
  misc_RNA (1)...(19): siRNA sense strand
ggaacacaauccaauuaca

SEQ ID NO: 1629435 - RNA, 19 nt, Homo sapiens
  misc_RNA (1)...(19): siRNA sense strand
gcccugagcuggaguuaca

SEQ ID NO: 1629436 - RNA, 19 nt, Homo sapiens
  misc_RNA (1)...(19): siRNA sense strand
caucaaugcugaggaagaa

SEQ ID NO: 1629437 - RNA, 19 nt, Homo sapiens
  misc_RNA (1)...(19): siRNA sense strand
gagacacgguuacgcuuga

SEQ ID NO: 1629438 - RNA, 19 nt, Homo sapiens
  misc_RNA (1)...(19): siRNA sense strand
gggagacccucaucacaug

SEQ ID NO: 1629439 - RNA, 19 nt, Homo sapiens
  misc_RNA (1)...(19): siRNA sense strand
ggaagucugcgcuauaguu

SEQ ID NO: 1629440 - RNA, 19 nt, Homo sapiens
  misc_RNA (1)...(19): siRNA sense strand
ucuccaagcuguaguucua

SEQ ID NO: 1629441 - RNA, 19 nt, Homo sapiens
  misc_RNA (1)...(19): siRNA sense strand
gcagagcaaaguuaaggua

SEQ ID NO: 1629442 - RNA, 19 nt, Homo sapiens
  misc_RNA (1)...(19): siRNA sense strand
gaacuuggagccguuugua

SEQ ID NO: 1629443 - RNA, 19 nt, Homo sapiens
  misc_RNA (1)...(19): siRNA sense strand
caaaaccccuuaaucauga

SEQ ID NO: 1629444 - RNA, 19 nt, Homo sapiens
  misc_RNA (1)...(19): siRNA sense strand
gcaguuucuugacagagua

SEQ ID NO: 1629445 - RNA, 19 nt, Homo sapiens
  misc_RNA (1)...(19): siRNA sense strand
cgaagaauccaccuccuaa

SEQ ID NO: 1629446 - RNA, 19 nt, Homo sapiens
  misc_RNA (1)...(19): siRNA sense strand
aacagcaccuuuaaucuuu

SEQ ID NO: 1629447 - RNA, 19 nt, Homo sapiens
  misc_RNA (1)...(19): siRNA sense strand
ugugauauuucuccacuaa

SEQ ID NO: 1629448 - RNA, 19 nt, Homo sapiens
  misc_RNA (1)...(19): siRNA sense strand
agaagaacagaccaaauua

SEQ ID NO: 1629449 - RNA, 19 nt, Homo sapiens
  misc_RNA (1)...(19): siRNA sense strand
aagaagaacagaccaaauu

SEQ ID NO: 1629450 - RNA, 19 nt, Homo sapiens
  misc_RNA (1)...(19): siRNA sense strand
agaaggcgcugauaaagca

SEQ ID NO: 1629451 - RNA, 19 nt, Homo sapiens
  misc_RNA (1)...(19): siRNA sense strand
acaagggcauggaauuaaa

SEQ ID NO: 1629452 - RNA, 19 nt, Homo sapiens
  misc_RNA (1)...(19): siRNA sense strand
gauggcaguuacaauguga

SEQ ID NO: 1629453 - RNA, 19 nt, Homo sapiens
  misc_RNA (1)...(19): siRNA sense strand
uaagagggccacagaaaug

SEQ ID NO: 1629454 - RNA, 19 nt, Homo sapiens
  misc_RNA (1)...(19): siRNA sense strand
caagcuaguuucaacaaca

SEQ ID NO: 1629455 - RNA, 19 nt, Homo sapiens
  misc_RNA (1)...(19): siRNA sense strand
ugauauuucuccacuaaga

SEQ ID NO: 1629456 - RNA, 19 nt, Homo sapiens
  misc_RNA (1)...(19): siRNA sense strand
guacucaaguggccaaucu

SEQ ID NO: 1629457 - RNA, 19 nt, Homo sapiens
  misc_RNA (1)...(19): siRNA sense strand
guuaaugccucaacucagu

SEQ ID NO: 1629458 - RNA, 19 nt, Homo sapiens
  misc_RNA (1)...(19): siRNA sense strand
gagagagugcggcaacuaa

SEQ ID NO: 1629459 - RNA, 19 nt, Homo sapiens
  misc_RNA (1)...(19): siRNA sense strand
gaagaacagaccaaauuag

SEQ ID NO: 1629460 - RNA, 19 nt, Homo sapiens
  misc_RNA (1)...(19): siRNA sense strand
gugauggucugccuaacaa

SEQ ID NO: 1629461 - RNA, 19 nt, Homo sapiens
  misc_RNA (1)...(19): siRNA sense strand
acaaagaugguaugaugua

SEQ ID NO: 1629462 - RNA, 19 nt, Homo sapiens
  misc_RNA (1)...(19): siRNA sense strand
gagcaaaggaaacaagaau

SEQ ID NO: 1629463 - RNA, 19 nt, Homo sapiens
  misc_RNA (1)...(19): siRNA sense strand
ccaccuagcagcacugaaa

SEQ ID NO: 1629464 - RNA, 19 nt, Homo sapiens
  misc_RNA (1)...(19): siRNA sense strand
gaagaagaacagaccaaau

SEQ ID NO: 1629465 - RNA, 19 nt, Homo sapiens
  misc_RNA (1)...(19): siRNA sense strand
ggaagaagaacagaccaaa

SEQ ID NO: 1629466 - RNA, 19 nt, Homo sapiens
  misc_RNA (1)...(19): siRNA sense strand
cagcguggaugacaaagug

SEQ ID NO: 1629467 - RNA, 19 nt, Homo sapiens
  misc_RNA (1)...(19): siRNA sense strand
gcauggcucccagaaguua

SEQ ID NO: 1629468 - RNA, 19 nt, Homo sapiens
  misc_RNA (1)...(19): siRNA sense strand
cuacauggcaggcaacaaa

SEQ ID NO: 1629469 - RNA, 19 nt, Homo sapiens
  misc_RNA (1)...(19): siRNA sense strand
gcaaaggaaaccagucaug

SEQ ID NO: 1629470 - RNA, 19 nt, Homo sapiens
  misc_RNA (1)...(19): siRNA sense strand
cagauuguuugcuacauga

SEQ ID NO: 1629471 - RNA, 19 nt, Homo sapiens
  misc_RNA (1)...(19): siRNA sense strand
ucacagaagccugguagua

SEQ ID NO: 1629472 - RNA, 19 nt, Homo sapiens
  misc_RNA (1)...(19): siRNA sense strand
ggaguugcacguagagaaa

SEQ ID NO: 1629473 - RNA, 19 nt, Homo sapiens
  misc_RNA (1)...(19): siRNA sense strand
gaagcuauaguucagaaga

SEQ ID NO: 1629474 - RNA, 19 nt, Homo sapiens
  misc_RNA (1)...(19): siRNA sense strand
gucaggauaucaagucuau

SEQ ID NO: 1629475 - RNA, 19 nt, Homo sapiens
  misc_RNA (1)...(19): siRNA sense strand
gcugauaaagcauucaauu

SEQ ID NO: 1629476 - RNA, 19 nt, Homo sapiens
  misc_RNA (1)...(19): siRNA sense strand
gaggaagacuuugaacagu

SEQ ID NO: 1629477 - RNA, 19 nt, Homo sapiens
  misc_RNA (1)...(19): siRNA sense strand
ugaaauagagccucaguca

SEQ ID NO: 1629478 - RNA, 19 nt, Homo sapiens
  misc_RNA (1)...(19): siRNA sense strand
uaacaacuccaaccauaau

SEQ ID NO: 1629479 - RNA, 19 nt, Homo sapiens
  misc_RNA (1)...(19): siRNA sense strand
gcaaaggaaacaagaaugg

SEQ ID NO: 1629480 - RNA, 19 nt, Homo sapiens
  misc_RNA (1)...(19): siRNA sense strand
gauugaaauuggaagcuau

SEQ ID NO: 1629481 - RNA, 19 nt, Homo sapiens
  misc_RNA (1)...(19): siRNA sense strand
ugaugcagauuguuugcua

SEQ ID NO: 1629482 - RNA, 19 nt, Homo sapiens
  misc_RNA (1)...(19): siRNA sense strand
gugacagagucuucgguua

SEQ ID NO: 1629483 - RNA, 19 nt, Homo sapiens
  misc_RNA (1)...(19): siRNA sense strand
guuaagagugggucaguuu

SEQ ID NO: 1629484 - RNA, 19 nt, Homo sapiens
  misc_RNA (1)...(19): siRNA sense strand
aauggaaucuaccugguuu

SEQ ID NO: 1629485 - RNA, 19 nt, Homo sapiens
  misc_RNA (1)...(19): siRNA sense strand
ggaggcguguucguucuuu

SEQ ID NO: 1629486 - RNA, 19 nt, Homo sapiens
  misc_RNA (1)...(19): siRNA sense strand
caaagaugguaugauguau

SEQ ID NO: 1629487 - RNA, 19 nt, Homo sapiens
  misc_RNA (1)...(19): siRNA sense strand
cgaaaggguagaaaugaaa

SEQ ID NO: 1629488 - RNA, 19 nt, Homo sapiens
  misc_RNA (1)...(19): siRNA sense strand
acccaaagguuaaugagaa

SEQ ID NO: 1629489 - RNA, 19 nt, Homo sapiens
  misc_RNA (1)...(19): siRNA sense strand
gaacaugggugaccucuuu

SEQ ID NO: 1629490 - RNA, 19 nt, Homo sapiens
  misc_RNA (1)...(19): siRNA sense strand
gauaacaacuccaaccaua

SEQ ID NO: 1629491 - RNA, 19 nt, Homo sapiens
  misc_RNA (1)...(19): siRNA sense strand
gaaagaggcuggagauuuu

SEQ ID NO: 1629492 - RNA, 19 nt, Homo sapiens
  misc_RNA (1)...(19): siRNA sense strand
gaacagaccaaauuaguga

SEQ ID NO: 1629493 - RNA, 19 nt, Homo sapiens
  misc_RNA (1)...(19): siRNA sense strand
ugacaaagaugguaugaug

SEQ ID NO: 1629494 - RNA, 19 nt, Homo sapiens
  misc_RNA (1)...(19): siRNA sense strand
gaaaugcagagcaaaguua

SEQ ID NO: 1629495 - RNA, 19 nt, Homo sapiens
  misc_RNA (1)...(19): siRNA sense strand
ggaaauagccagagagaug

SEQ ID NO: 1629496 - RNA, 19 nt, Homo sapiens
  misc_RNA (1)...(19): siRNA sense strand
ggaaagaggcuggagauuu

SEQ ID NO: 1629497 - RNA, 19 nt, Homo sapiens
  misc_RNA (1)...(19): siRNA sense strand
ccagagagaugaaauguuc

SEQ ID NO: 1629498 - RNA, 19 nt, Homo sapiens
  misc_RNA (1)...(19): siRNA sense strand
cagcacagcuccugaaaug

SEQ ID NO: 1629499 - RNA, 19 nt, Homo sapiens
  misc_RNA (1)...(19): siRNA sense strand
gaacagcaccuuuaaucuu

SEQ ID NO: 1629500 - RNA, 19 nt, Homo sapiens
  misc_RNA (1)...(19): siRNA sense strand
ucagugaucugugauauuu

SEQ ID NO: 1629501 - RNA, 19 nt, Homo sapiens
  misc_RNA (1)...(19): siRNA sense strand
gaacugagccuagcaaauc

SEQ ID NO: 1629502 - RNA, 19 nt, Homo sapiens
  misc_RNA (1)...(19): siRNA sense strand
gaaauuggaagcuauaguu

SEQ ID NO: 1629503 - RNA, 19 nt, Homo sapiens
  misc_RNA (1)...(19): siRNA sense strand
ccagaaaguuugaaauaga

SEQ ID NO: 1629504 - RNA, 19 nt, Homo sapiens
  misc_RNA (1)...(19): siRNA sense strand
ccaagaaccugagaucaaa

SEQ ID NO: 1629505 - RNA, 19 nt, Homo sapiens
  misc_RNA (1)...(19): siRNA sense strand
gcaucaagcaugagucuua

SEQ ID NO: 1629506 - RNA, 19 nt, Homo sapiens
  misc_RNA (1)...(19): siRNA sense strand
gcaggaagcgcuggaaaua

SEQ ID NO: 1629507 - RNA, 19 nt, Homo sapiens
  misc_RNA (1)...(19): siRNA sense strand
gaacgaaaggguagaaaug

SEQ ID NO: 1629508 - RNA, 19 nt, Homo sapiens
  misc_RNA (1)...(19): siRNA sense strand
gcacagcuccugaaaugaa

SEQ ID NO: 1629509 - RNA, 19 nt, Homo sapiens
  misc_RNA (1)...(19): siRNA sense strand
gaagucugcgcuauaguua

SEQ ID NO: 1629510 - RNA, 19 nt, Homo sapiens
  misc_RNA (1)...(19): siRNA sense strand
gcaaacuucuccagccaaa

SEQ ID NO: 1629511 - RNA, 19 nt, Homo sapiens
  misc_RNA (1)...(19): siRNA sense strand
ggaaaccagucaugcauca

SEQ ID NO: 1629512 - RNA, 19 nt, Homo sapiens
  misc_RNA (1)...(19): siRNA sense strand
ccacagaaaugcagagcaa

SEQ ID NO: 1629513 - RNA, 19 nt, Homo sapiens
  misc_RNA (1)...(19): siRNA sense strand
gaugauauacugucuuuga

SEQ ID NO: 1629514 - RNA, 19 nt, Homo sapiens
  misc_RNA (1)...(19): siRNA sense strand
gcccagauguuccagaauu

SEQ ID NO: 1629515 - RNA, 19 nt, Homo sapiens
  misc_RNA (1)...(19): siRNA sense strand
gaagagugguccuccugaa

SEQ ID NO: 1629516 - RNA, 19 nt, Homo sapiens
  misc_RNA (1)...(19): siRNA sense strand
uaacaagggcauggaauua

SEQ ID NO: 1629517 - RNA, 19 nt, Homo sapiens
  misc_RNA (1)...(19): siRNA sense strand
gauccuggguugaguaguu

SEQ ID NO: 1629518 - RNA, 19 nt, Homo sapiens
  misc_RNA (1)...(19): siRNA sense strand
gaagagaaggagaacgaua

SEQ ID NO: 1629519 - RNA, 19 nt, Homo sapiens
  misc_RNA (1)...(19): siRNA sense strand
gaaacaagaauggcgauaa

SEQ ID NO: 1629520 - RNA, 19 nt, Homo sapiens
  misc_RNA (1)...(19): siRNA sense strand
ccaggaauguccagucaaa

SEQ ID NO: 1629521 - RNA, 19 nt, Homo sapiens
  misc_RNA (1)...(19): siRNA sense strand
gaggaucauucuucucaaa

SEQ ID NO: 1629522 - RNA, 19 nt, Homo sapiens
  misc_RNA (1)...(19): siRNA sense strand
gacaggagauauucuagga

SEQ ID NO: 1629523 - RNA, 19 nt, Homo sapiens
  misc_RNA (1)...(19): siRNA sense strand
auucucagcugcauuauaa

SEQ ID NO: 1629524 - RNA, 19 nt, Homo sapiens
  misc_RNA (1)...(19): siRNA sense strand
ugaauucucagcugcauua

SEQ ID NO: 1629525 - RNA, 19 nt, Homo sapiens
  misc_RNA (1)...(19): siRNA sense strand
gcagauuguuugcuacaug

SEQ ID NO: 1629526 - RNA, 19 nt, Homo sapiens
  misc_RNA (1)...(19): siRNA sense strand
uagcaaaucuccuggaagu

SEQ ID NO: 1629527 - RNA, 19 nt, Homo sapiens
  misc_RNA (1)...(19): siRNA sense strand
gcuaucagccucaaucuau

SEQ ID NO: 1629528 - RNA, 19 nt, Homo sapiens
  misc_RNA (1)...(19): siRNA sense strand
uaucaugacuuugcagaaa

SEQ ID NO: 1629529 - RNA, 19 nt, Homo sapiens
  misc_RNA (1)...(19): siRNA sense strand
cacauuaucagcaggauua

SEQ ID NO: 1629530 - RNA, 19 nt, Homo sapiens
  misc_RNA (1)...(19): siRNA sense strand
gaaauagccagagagauga

SEQ ID NO: 1629531 - RNA, 19 nt, Homo sapiens
  misc_RNA (1)...(19): siRNA sense strand
caaacaagcaguucccauu

SEQ ID NO: 1629532 - RNA, 19 nt, Homo sapiens
  misc_RNA (1)...(19): siRNA sense strand
ggauugaaauuggaagcua

SEQ ID NO: 1629533 - RNA, 19 nt, Homo sapiens
  misc_RNA (1)...(19): siRNA sense strand
gcugggcgcugccuaaugu

SEQ ID NO: 1629534 - RNA, 19 nt, Homo sapiens
  misc_RNA (1)...(19): siRNA sense strand
ggaacacaauccaauuaca

SEQ ID NO: 1629535 - RNA, 19 nt, Homo sapiens
  misc_RNA (1)...(19): siRNA sense strand
gcccugagcuggaguuaca

SEQ ID NO: 1629536 - RNA, 19 nt, Homo sapiens
  misc_RNA (1)...(19): siRNA sense strand
caucaaugcugaggaagaa

SEQ ID NO: 1629537 - RNA, 19 nt, Homo sapiens
  misc_RNA (1)...(19): siRNA sense strand
gagacacgguuacgcuuga

SEQ ID NO: 1629538 - RNA, 19 nt, Homo sapiens
  misc_RNA (1)...(19): siRNA sense strand
gggagacccucaucacaug

SEQ ID NO: 1629539 - RNA, 19 nt, Homo sapiens
  misc_RNA (1)...(19): siRNA sense strand
ggaagucugcgcuauaguu

SEQ ID NO: 1629540 - RNA, 19 nt, Homo sapiens
  misc_RNA (1)...(19): siRNA sense strand
ucuccaagcuguaguucua

SEQ ID NO: 1629541 - RNA, 19 nt, Homo sapiens
  misc_RNA (1)...(19): siRNA sense strand
gcagagcaaaguuaaggua

SEQ ID NO: 1629542 - RNA, 19 nt, Homo sapiens
  misc_RNA (1)...(19): siRNA sense strand
gaacuuggagccguuugua

SEQ ID NO: 1629543 - RNA, 19 nt, Homo sapiens
  misc_RNA (1)...(19): siRNA sense strand
caaaaccccuuaaucauga

SEQ ID NO: 1629544 - RNA, 19 nt, Homo sapiens
  misc_RNA (1)...(19): siRNA sense strand
gcaguuucuugacagagua

SEQ ID NO: 1629545 - RNA, 19 nt, Homo sapiens
  misc_RNA (1)...(19): siRNA sense strand
cgaagaauccaccuccuaa

SEQ ID NO: 1629546 - RNA, 19 nt, Homo sapiens
  misc_RNA (1)...(19): siRNA sense strand
aacagcaccuuuaaucuuu

SEQ ID NO: 1629547 - RNA, 19 nt, Homo sapiens
  misc_RNA (1)...(19): siRNA sense strand
ugugauauuucuccacuaa

SEQ ID NO: 1629548 - RNA, 19 nt, Homo sapiens
  misc_RNA (1)...(19): siRNA sense strand
agaagaacagaccaaauua

SEQ ID NO: 1629549 - RNA, 19 nt, Homo sapiens
  misc_RNA (1)...(19): siRNA sense strand
aagaagaacagaccaaauu

SEQ ID NO: 1629550 - RNA, 19 nt, Homo sapiens
  misc_RNA (1)...(19): siRNA sense strand
agaaggcgcugauaaagca

SEQ ID NO: 1629551 - RNA, 19 nt, Homo sapiens
  misc_RNA (1)...(19): siRNA sense strand
acaagggcauggaauuaaa

SEQ ID NO: 1629552 - RNA, 19 nt, Homo sapiens
  misc_RNA (1)...(19): siRNA sense strand
gauggcaguuacaauguga

SEQ ID NO: 1629553 - RNA, 19 nt, Homo sapiens
  misc_RNA (1)...(19): siRNA sense strand
uaagagggccacagaaaug

SEQ ID NO: 1629554 - RNA, 19 nt, Homo sapiens
  misc_RNA (1)...(19): siRNA sense strand
caagcuaguuucaacaaca

SEQ ID NO: 1629555 - RNA, 19 nt, Homo sapiens
  misc_RNA (1)...(19): siRNA sense strand
ugauauuucuccacuaaga

SEQ ID NO: 1629556 - RNA, 19 nt, Homo sapiens
  misc_RNA (1)...(19): siRNA sense strand
guacucaaguggccaaucu

SEQ ID NO: 1629557 - RNA, 19 nt, Homo sapiens
  misc_RNA (1)...(19): siRNA sense strand
guuaaugccucaacucagu

SEQ ID NO: 1629558 - RNA, 19 nt, Homo sapiens
  misc_RNA (1)...(19): siRNA sense strand
gagagagugcggcaacuaa

SEQ ID NO: 1629559 - RNA, 19 nt, Homo sapiens
  misc_RNA (1)...(19): siRNA sense strand
gaagaacagaccaaauuag

SEQ ID NO: 1629560 - RNA, 19 nt, Homo sapiens
  misc_RNA (1)...(19): siRNA sense strand
gugauggucugccuaacaa

SEQ ID NO: 1629561 - RNA, 19 nt, Homo sapiens
  misc_RNA (1)...(19): siRNA sense strand
acaaagaugguaugaugua

SEQ ID NO: 1629562 - RNA, 19 nt, Homo sapiens
  misc_RNA (1)...(19): siRNA sense strand
gagcaaaggaaacaagaau

SEQ ID NO: 1629563 - RNA, 19 nt, Homo sapiens
  misc_RNA (1)...(19): siRNA sense strand
ccaccuagcagcacugaaa

SEQ ID NO: 1629564 - RNA, 19 nt, Homo sapiens
  misc_RNA (1)...(19): siRNA sense strand
gaagaagaacagaccaaau

SEQ ID NO: 1629565 - RNA, 19 nt, Homo sapiens
  misc_RNA (1)...(19): siRNA sense strand
ggaagaagaacagaccaaa

SEQ ID NO: 1629566 - RNA, 19 nt, Homo sapiens
  misc_RNA (1)...(19): siRNA sense strand
cagcguggaugacaaagug

SEQ ID NO: 1629567 - RNA, 19 nt, Homo sapiens
  misc_RNA (1)...(19): siRNA sense strand
gcauggcucccagaaguua

SEQ ID NO: 1629568 - RNA, 19 nt, Homo sapiens
  misc_RNA (1)...(19): siRNA sense strand
cuacauggcaggcaacaaa

SEQ ID NO: 1629569 - RNA, 19 nt, Homo sapiens
  misc_RNA (1)...(19): siRNA sense strand
gcaaaggaaaccagucaug

SEQ ID NO: 1629570 - RNA, 19 nt, Homo sapiens
  misc_RNA (1)...(19): siRNA sense strand
cagauuguuugcuacauga

SEQ ID NO: 1629571 - RNA, 19 nt, Homo sapiens
  misc_RNA (1)...(19): siRNA sense strand
ucacagaagccugguagua

SEQ ID NO: 1629572 - RNA, 19 nt, Homo sapiens
  misc_RNA (1)...(19): siRNA sense strand
ggaguugcacguagagaaa

SEQ ID NO: 1629573 - RNA, 19 nt, Homo sapiens
  misc_RNA (1)...(19): siRNA sense strand
gaagcuauaguucagaaga

SEQ ID NO: 1629574 - RNA, 19 nt, Homo sapiens
  misc_RNA (1)...(19): siRNA sense strand
gucaggauaucaagucuau

SEQ ID NO: 1629575 - RNA, 19 nt, Homo sapiens
  misc_RNA (1)...(19): siRNA sense strand
gcugauaaagcauucaauu

SEQ ID NO: 1629576 - RNA, 19 nt, Homo sapiens
  misc_RNA (1)...(19): siRNA sense strand
gaggaagacuuugaacagu

SEQ ID NO: 1629577 - RNA, 19 nt, Homo sapiens
  misc_RNA (1)...(19): siRNA sense strand
ugaaauagagccucaguca

SEQ ID NO: 1629578 - RNA, 19 nt, Homo sapiens
  misc_RNA (1)...(19): siRNA sense strand
uaacaacuccaaccauaau

SEQ ID NO: 1629579 - RNA, 19 nt, Homo sapiens
  misc_RNA (1)...(19): siRNA sense strand
gcaaaggaaacaagaaugg

SEQ ID NO: 1629580 - RNA, 19 nt, Homo sapiens
  misc_RNA (1)...(19): siRNA sense strand
gauugaaauuggaagcuau

SEQ ID NO: 1629581 - RNA, 19 nt, Homo sapiens
  misc_RNA (1)...(19): siRNA sense strand
ugaugcagauuguuugcua

SEQ ID NO: 1629582 - RNA, 19 nt, Homo sapiens
  misc_RNA (1)...(19): siRNA sense strand
gugacagagucuucgguua

SEQ ID NO: 1629583 - RNA, 19 nt, Homo sapiens
  misc_RNA (1)...(19): siRNA sense strand
guuaagagugggucaguuu

SEQ ID NO: 1629584 - RNA, 19 nt, Homo sapiens
  misc_RNA (1)...(19): siRNA sense strand
aauggaaucuaccugguuu

SEQ ID NO: 1629585 - RNA, 19 nt, Homo sapiens
  misc_RNA (1)...(19): siRNA sense strand
ggaggcguguucguucuuu

SEQ ID NO: 1629586 - RNA, 19 nt, Homo sapiens
  misc_RNA (1)...(19): siRNA sense strand
caaagaugguaugauguau

SEQ ID NO: 1629587 - RNA, 19 nt, Homo sapiens
  misc_RNA (1)...(19): siRNA sense strand
cgaaaggguagaaaugaaa

SEQ ID NO: 1629588 - RNA, 19 nt, Homo sapiens
  misc_RNA (1)...(19): siRNA sense strand
acccaaagguuaaugagaa

SEQ ID NO: 1629589 - RNA, 19 nt, Homo sapiens
  misc_RNA (1)...(19): siRNA sense strand
gaugagauuuccauacaga

SEQ ID NO: 1629590 - RNA, 19 nt, Homo sapiens
  misc_RNA (1)...(19): siRNA sense strand
gcacuuugguggcacagaa

SEQ ID NO: 1629591 - RNA, 19 nt, Homo sapiens
  misc_RNA (1)...(19): siRNA sense strand
aaauugaccugccggagua

SEQ ID NO: 1629592 - RNA, 19 nt, Homo sapiens
  misc_RNA (1)...(19): siRNA sense strand
ggaggcaguucgccaggua

SEQ ID NO: 1629593 - RNA, 19 nt, Homo sapiens
  misc_RNA (1)...(19): siRNA sense strand
cggaugagauuuccauaca

SEQ ID NO: 1629594 - RNA, 19 nt, Homo sapiens
  misc_RNA (1)...(19): siRNA sense strand
gagcagacguacgcagaga

SEQ ID NO: 1629595 - RNA, 19 nt, Homo sapiens
  misc_RNA (1)...(19): siRNA sense strand
gauucuaggagauaaguuu

SEQ ID NO: 1629596 - RNA, 19 nt, Homo sapiens
  misc_RNA (1)...(19): siRNA sense strand
guucagauucuaggagaua

SEQ ID NO: 1629597 - RNA, 19 nt, Homo sapiens
  misc_RNA (1)...(19): siRNA sense strand
ccuaugcgcucugcacguu

SEQ ID NO: 1629598 - RNA, 19 nt, Homo sapiens
  misc_RNA (1)...(19): siRNA sense strand
gaggacaagucagccuaug

SEQ ID NO: 1629599 - RNA, 19 nt, Homo sapiens
  misc_RNA (1)...(19): siRNA sense strand
acacuugucugugcuucaa

SEQ ID NO: 1629600 - RNA, 19 nt, Homo sapiens
  misc_RNA (1)...(19): siRNA sense strand
gcagacguacgcagagaug

SEQ ID NO: 1629601 - RNA, 19 nt, Homo sapiens
  misc_RNA (1)...(19): siRNA sense strand
gugcuucaaugcccuugga

SEQ ID NO: 1629602 - RNA, 19 nt, Homo sapiens
  misc_RNA (1)...(19): siRNA sense strand
ggaugagauuuccauacag

SEQ ID NO: 1629603 - RNA, 19 nt, Homo sapiens
  misc_RNA (1)...(19): siRNA sense strand
uaugcgcucugcacguuug

SEQ ID NO: 1629604 - RNA, 19 nt, Homo sapiens
  misc_RNA (1)...(19): siRNA sense strand
gaaaugucaggaggcaguu

SEQ ID NO: 1629605 - RNA, 19 nt, Homo sapiens
  misc_RNA (1)...(19): siRNA sense strand
cagaggcugccaggacuuu

SEQ ID NO: 1629606 - RNA, 19 nt, Homo sapiens
  misc_RNA (1)...(19): siRNA sense strand
gaugagauuuccauacaga

SEQ ID NO: 1629607 - RNA, 19 nt, Homo sapiens
  misc_RNA (1)...(19): siRNA sense strand
gcacuuugguggcacagaa

SEQ ID NO: 1629608 - RNA, 19 nt, Homo sapiens
  misc_RNA (1)...(19): siRNA sense strand
aaauugaccugccggagua

SEQ ID NO: 1629609 - RNA, 19 nt, Homo sapiens
  misc_RNA (1)...(19): siRNA sense strand
ggaggcaguucgccaggua

SEQ ID NO: 1629610 - RNA, 19 nt, Homo sapiens
  misc_RNA (1)...(19): siRNA sense strand
cggaugagauuuccauaca

SEQ ID NO: 1629611 - RNA, 19 nt, Homo sapiens
  misc_RNA (1)...(19): siRNA sense strand
gagcagacguacgcagaga

SEQ ID NO: 1629612 - RNA, 19 nt, Homo sapiens
  misc_RNA (1)...(19): siRNA sense strand
gauucuaggagauaaguuu

SEQ ID NO: 1629613 - RNA, 19 nt, Homo sapiens
  misc_RNA (1)...(19): siRNA sense strand
guucagauucuaggagaua

SEQ ID NO: 1629614 - RNA, 19 nt, Homo sapiens
  misc_RNA (1)...(19): siRNA sense strand
ccuaugcgcucugcacguu

SEQ ID NO: 1629615 - RNA, 19 nt, Homo sapiens
  misc_RNA (1)...(19): siRNA sense strand
gaggacaagucagccuaug

SEQ ID NO: 1629616 - RNA, 19 nt, Homo sapiens
  misc_RNA (1)...(19): siRNA sense strand
acacuugucugugcuucaa

SEQ ID NO: 1629617 - RNA, 19 nt, Homo sapiens
  misc_RNA (1)...(19): siRNA sense strand
gcagacguacgcagagaug

SEQ ID NO: 1629618 - RNA, 19 nt, Homo sapiens
  misc_RNA (1)...(19): siRNA sense strand
gugcuucaaugcccuugga

SEQ ID NO: 1629619 - RNA, 19 nt, Homo sapiens
  misc_RNA (1)...(19): siRNA sense strand
ggaugagauuuccauacag

SEQ ID NO: 1629620 - RNA, 19 nt, Homo sapiens
  misc_RNA (1)...(19): siRNA sense strand
uaugcgcucugcacguuug

SEQ ID NO: 1629621 - RNA, 19 nt, Homo sapiens
  misc_RNA (1)...(19): siRNA sense strand
gaaaugucaggaggcaguu

SEQ ID NO: 1629622 - RNA, 19 nt, Homo sapiens
  misc_RNA (1)...(19): siRNA sense strand
cagaggcugccaggacuuu

SEQ ID NO: 1629623 - RNA, 19 nt, Homo sapiens
  misc_RNA (1)...(19): siRNA sense strand
ggagguaucuuuccugaga

SEQ ID NO: 1629624 - RNA, 19 nt, Homo sapiens
  misc_RNA (1)...(19): siRNA sense strand
ccacaucacuauuccauau

SEQ ID NO: 1629625 - RNA, 19 nt, Homo sapiens
  misc_RNA (1)...(19): siRNA sense strand
gaacuucuuuguauucucu

SEQ ID NO: 1629626 - RNA, 19 nt, Homo sapiens
  misc_RNA (1)...(19): siRNA sense strand
caacaaugacgggaacuua

SEQ ID NO: 1629627 - RNA, 19 nt, Homo sapiens
  misc_RNA (1)...(19): siRNA sense strand
guaaaucccuauccagagu

SEQ ID NO: 1629628 - RNA, 19 nt, Homo sapiens
  misc_RNA (1)...(19): siRNA sense strand
ucacacgacugaugaacuu

SEQ ID NO: 1629629 - RNA, 19 nt, Homo sapiens
  misc_RNA (1)...(19): siRNA sense strand
gcucuugccucuguaacua

SEQ ID NO: 1629630 - RNA, 19 nt, Homo sapiens
  misc_RNA (1)...(19): siRNA sense strand
cugaugaacuucuuuguau

SEQ ID NO: 1629631 - RNA, 19 nt, Homo sapiens
  misc_RNA (1)...(19): siRNA sense strand
gcagggauccgcaacaaug

SEQ ID NO: 1629632 - RNA, 19 nt, Homo sapiens
  misc_RNA (1)...(19): siRNA sense strand
gacgggaacuuagucauug

SEQ ID NO: 1629633 - RNA, 19 nt, Homo sapiens
  misc_RNA (1)...(19): siRNA sense strand
gccauuggauccuguaaau

SEQ ID NO: 1629634 - RNA, 19 nt, Homo sapiens
  misc_RNA (1)...(19): siRNA sense strand
gauugcccuugauuucuua

SEQ ID NO: 1629635 - RNA, 19 nt, Homo sapiens
  misc_RNA (1)...(19): siRNA sense strand
gauucuggaugaccacauu

SEQ ID NO: 1629636 - RNA, 19 nt, Homo sapiens
  misc_RNA (1)...(19): siRNA sense strand
gacagucucuuacaguaca

SEQ ID NO: 1629637 - RNA, 19 nt, Homo sapiens
  misc_RNA (1)...(19): siRNA sense strand
gaugaacuucuuuguauuc

SEQ ID NO: 1629638 - RNA, 19 nt, Homo sapiens
  misc_RNA (1)...(19): siRNA sense strand
gagcuucucuacagguaca

SEQ ID NO: 1629639 - RNA, 19 nt, Homo sapiens
  misc_RNA (1)...(19): siRNA sense strand
gggcagggauccgcaacaa

SEQ ID NO: 1629640 - RNA, 19 nt, Homo sapiens
  misc_RNA (1)...(19): siRNA sense strand
gcauauaugggcuucauca

SEQ ID NO: 1629641 - RNA, 19 nt, Homo sapiens
  misc_RNA (1)...(19): siRNA sense strand
uauaugggcuucaucaacu

SEQ ID NO: 1629642 - RNA, 19 nt, Homo sapiens
  misc_RNA (1)...(19): siRNA sense strand
ucaugacuauggagauauu

SEQ ID NO: 1629643 - RNA, 19 nt, Homo sapiens
  misc_RNA (1)...(19): siRNA sense strand
cccaugggcuucuugaaug

SEQ ID NO: 1629644 - RNA, 19 nt, Homo sapiens
  misc_RNA (1)...(19): siRNA sense strand
cagugucgauucuggauga

SEQ ID NO: 1629645 - RNA, 19 nt, Homo sapiens
  misc_RNA (1)...(19): siRNA sense strand
ucaaucagaggaagaaguu

SEQ ID NO: 1629646 - RNA, 19 nt, Homo sapiens
  misc_RNA (1)...(19): siRNA sense strand
ucaaccuucuuucucauga

SEQ ID NO: 1629647 - RNA, 19 nt, Homo sapiens
  misc_RNA (1)...(19): siRNA sense strand
ggaaguccagagauaguug

SEQ ID NO: 1629648 - RNA, 19 nt, Homo sapiens
  misc_RNA (1)...(19): siRNA sense strand
ggugauugcccuugauuuc

SEQ ID NO: 1629649 - RNA, 19 nt, Homo sapiens
  misc_RNA (1)...(19): siRNA sense strand
agagauaguugugcuuuua

SEQ ID NO: 1629650 - RNA, 19 nt, Homo sapiens
  misc_RNA (1)...(19): siRNA sense strand
ugauugcccuugauuucuu

SEQ ID NO: 1629651 - RNA, 19 nt, Homo sapiens
  misc_RNA (1)...(19): siRNA sense strand
guacaagauuugggaaggu

SEQ ID NO: 1629652 - RNA, 19 nt, Homo sapiens
  misc_RNA (1)...(19): siRNA sense strand
uugacagucucuuacagua

SEQ ID NO: 1629653 - RNA, 19 nt, Homo sapiens
  misc_RNA (1)...(19): siRNA sense strand
ucaaauggagguaucuuuc

SEQ ID NO: 1629654 - RNA, 19 nt, Homo sapiens
  misc_RNA (1)...(19): siRNA sense strand
caucacuauuccauauuug

SEQ ID NO: 1629655 - RNA, 19 nt, Homo sapiens
  misc_RNA (1)...(19): siRNA sense strand
cgagaccacaucacuauuc

SEQ ID NO: 1629656 - RNA, 19 nt, Homo sapiens
  misc_RNA (1)...(19): siRNA sense strand
cuucuugaaugcauauaug

SEQ ID NO: 1629657 - RNA, 19 nt, Homo sapiens
  misc_RNA (1)...(19): siRNA sense strand
ccagagauaguugugcuuu

SEQ ID NO: 1629658 - RNA, 19 nt, Homo sapiens
  misc_RNA (1)...(19): siRNA sense strand
ggcuuuggcuucagugaca

SEQ ID NO: 1629659 - RNA, 19 nt, Homo sapiens
  misc_RNA (1)...(19): siRNA sense strand
guaacuauccccauucauu

SEQ ID NO: 1629660 - RNA, 19 nt, Homo sapiens
  misc_RNA (1)...(19): siRNA sense strand
gagguuucaucgggugauu

SEQ ID NO: 1629661 - RNA, 19 nt, Homo sapiens
  misc_RNA (1)...(19): siRNA sense strand
ugggagcucuugccucugu

SEQ ID NO: 1629662 - RNA, 19 nt, Homo sapiens
  misc_RNA (1)...(19): siRNA sense strand
uccaaaagcuacucaaaga

SEQ ID NO: 1629663 - RNA, 19 nt, Homo sapiens
  misc_RNA (1)...(19): siRNA sense strand
aaaucccuauccagaguuu

SEQ ID NO: 1629664 - RNA, 19 nt, Homo sapiens
  misc_RNA (1)...(19): siRNA sense strand
acaagggacugcguaucuu

SEQ ID NO: 1629665 - RNA, 19 nt, Homo sapiens
  misc_RNA (1)...(19): siRNA sense strand
cgacugaugaacuucuuug

SEQ ID NO: 1629666 - RNA, 19 nt, Homo sapiens
  misc_RNA (1)...(19): siRNA sense strand
agagugagcugugggacau

SEQ ID NO: 1629667 - RNA, 19 nt, Homo sapiens
  misc_RNA (1)...(19): siRNA sense strand
caaaagcuacucaaagaug

SEQ ID NO: 1629668 - RNA, 19 nt, Homo sapiens
  misc_RNA (1)...(19): siRNA sense strand
uaacuauccccauucauuu

SEQ ID NO: 1629669 - RNA, 19 nt, Homo sapiens
  misc_RNA (1)...(19): siRNA sense strand
gaccacaucacuauuccau

SEQ ID NO: 1629670 - RNA, 19 nt, Homo sapiens
  misc_RNA (1)...(19): siRNA sense strand
ggagcucuugccucuguaa

SEQ ID NO: 1629671 - RNA, 19 nt, Homo sapiens
  misc_RNA (1)...(19): siRNA sense strand
gcaacaaugacgggaacuu

SEQ ID NO: 1629672 - RNA, 19 nt, Homo sapiens
  misc_RNA (1)...(19): siRNA sense strand
gucaaauggagguaucuuu

SEQ ID NO: 1629673 - RNA, 19 nt, Homo sapiens
  misc_RNA (1)...(19): siRNA sense strand
cucaggagcuucucuacag

SEQ ID NO: 1629674 - RNA, 19 nt, Homo sapiens
  misc_RNA (1)...(19): siRNA sense strand
cuucaucaacuccuucuga

SEQ ID NO: 1629675 - RNA, 19 nt, Homo sapiens
  misc_RNA (1)...(19): siRNA sense strand
gguccacagugucgauucu

SEQ ID NO: 1629676 - RNA, 19 nt, Homo sapiens
  misc_RNA (1)...(19): siRNA sense strand
cuacgacugguacaagauu

SEQ ID NO: 1629677 - RNA, 19 nt, Homo sapiens
  misc_RNA (1)...(19): siRNA sense strand
uuacaguacaucaaucaga

SEQ ID NO: 1629678 - RNA, 19 nt, Homo sapiens
  misc_RNA (1)...(19): siRNA sense strand
caagggacugcguaucuuc

SEQ ID NO: 1629679 - RNA, 19 nt, Homo sapiens
  misc_RNA (1)...(19): siRNA sense strand
gaaguccagagauaguugu

SEQ ID NO: 1629680 - RNA, 19 nt, Homo sapiens
  misc_RNA (1)...(19): siRNA sense strand
ugaccacauuagccacuau

SEQ ID NO: 1629681 - RNA, 19 nt, Homo sapiens
  misc_RNA (1)...(19): siRNA sense strand
agauggaggugugcuguca

SEQ ID NO: 1629682 - RNA, 19 nt, Homo sapiens
  misc_RNA (1)...(19): siRNA sense strand
gacuauggagauauuguug

SEQ ID NO: 1629683 - RNA, 19 nt, Homo sapiens
  misc_RNA (1)...(19): siRNA sense strand
ugacuauggagauauuguu

SEQ ID NO: 1629684 - RNA, 19 nt, Homo sapiens
  misc_RNA (1)...(19): siRNA sense strand
gagaccacaucacuauucc

SEQ ID NO: 1629685 - RNA, 19 nt, Homo sapiens
  misc_RNA (1)...(19): siRNA sense strand
uacgacugguacaagauuu

SEQ ID NO: 1629686 - RNA, 19 nt, Homo sapiens
  misc_RNA (1)...(19): siRNA sense strand
acugaugaacuucuuugua

SEQ ID NO: 1629687 - RNA, 19 nt, Homo sapiens
  misc_RNA (1)...(19): siRNA sense strand
aggagcuucucuacaggua

SEQ ID NO: 1629688 - RNA, 19 nt, Homo sapiens
  misc_RNA (1)...(19): siRNA sense strand
ugacaaaccgagaccacau

SEQ ID NO: 1629689 - RNA, 19 nt, Homo sapiens
  misc_RNA (1)...(19): siRNA sense strand
cguauacucggcccucuga

SEQ ID NO: 1629690 - RNA, 19 nt, Homo sapiens
  misc_RNA (1)...(19): siRNA sense strand
aaaccgagaccacaucacu

SEQ ID NO: 1629691 - RNA, 19 nt, Homo sapiens
  misc_RNA (1)...(19): siRNA sense strand
gaucccaugggcuucuuga

SEQ ID NO: 1629692 - RNA, 19 nt, Homo sapiens
  misc_RNA (1)...(19): siRNA sense strand
cagaggaagaaguucagaa

SEQ ID NO: 1629693 - RNA, 19 nt, Homo sapiens
  misc_RNA (1)...(19): siRNA sense strand
guacaagcagaaucgaucu

SEQ ID NO: 1629694 - RNA, 19 nt, Homo sapiens
  misc_RNA (1)...(19): siRNA sense strand
gacaaaccgagaccacauc

SEQ ID NO: 1629695 - RNA, 19 nt, Homo sapiens
  misc_RNA (1)...(19): siRNA sense strand
uacaagggacugcguaucu

SEQ ID NO: 1629696 - RNA, 19 nt, Homo sapiens
  misc_RNA (1)...(19): siRNA sense strand
cagggauccgcaacaauga

SEQ ID NO: 1629697 - RNA, 19 nt, Homo sapiens
  misc_RNA (1)...(19): siRNA sense strand
aaucagaggaagaaguuca

SEQ ID NO: 1629698 - RNA, 19 nt, Homo sapiens
  misc_RNA (1)...(19): siRNA sense strand
gggacugcguaucuucuac

SEQ ID NO: 1629699 - RNA, 19 nt, Homo sapiens
  misc_RNA (1)...(19): siRNA sense strand
ggccauuggauccuguaaa

SEQ ID NO: 1629700 - RNA, 19 nt, Homo sapiens
  misc_RNA (1)...(19): siRNA sense strand
gggagcucuugccucugua

SEQ ID NO: 1629701 - RNA, 19 nt, Homo sapiens
  misc_RNA (1)...(19): siRNA sense strand
ggagguaucuuuccugaga

SEQ ID NO: 1629702 - RNA, 19 nt, Homo sapiens
  misc_RNA (1)...(19): siRNA sense strand
ccacaucacuauuccauau

SEQ ID NO: 1629703 - RNA, 19 nt, Homo sapiens
  misc_RNA (1)...(19): siRNA sense strand
gaacuucuuuguauucucu

SEQ ID NO: 1629704 - RNA, 19 nt, Homo sapiens
  misc_RNA (1)...(19): siRNA sense strand
caacaaugacgggaacuua

SEQ ID NO: 1629705 - RNA, 19 nt, Homo sapiens
  misc_RNA (1)...(19): siRNA sense strand
guaaaucccuauccagagu

SEQ ID NO: 1629706 - RNA, 19 nt, Homo sapiens
  misc_RNA (1)...(19): siRNA sense strand
ucacacgacugaugaacuu

SEQ ID NO: 1629707 - RNA, 19 nt, Homo sapiens
  misc_RNA (1)...(19): siRNA sense strand
gcucuugccucuguaacua

SEQ ID NO: 1629708 - RNA, 19 nt, Homo sapiens
  misc_RNA (1)...(19): siRNA sense strand
cugaugaacuucuuuguau

SEQ ID NO: 1629709 - RNA, 19 nt, Homo sapiens
  misc_RNA (1)...(19): siRNA sense strand
gcagggauccgcaacaaug

SEQ ID NO: 1629710 - RNA, 19 nt, Homo sapiens
  misc_RNA (1)...(19): siRNA sense strand
gacgggaacuuagucauug

SEQ ID NO: 1629711 - RNA, 19 nt, Homo sapiens
  misc_RNA (1)...(19): siRNA sense strand
gccauuggauccuguaaau

SEQ ID NO: 1629712 - RNA, 19 nt, Homo sapiens
  misc_RNA (1)...(19): siRNA sense strand
gauugcccuugauuucuua

SEQ ID NO: 1629713 - RNA, 19 nt, Homo sapiens
  misc_RNA (1)...(19): siRNA sense strand
gauucuggaugaccacauu

SEQ ID NO: 1629714 - RNA, 19 nt, Homo sapiens
  misc_RNA (1)...(19): siRNA sense strand
gacagucucuuacaguaca

SEQ ID NO: 1629715 - RNA, 19 nt, Homo sapiens
  misc_RNA (1)...(19): siRNA sense strand
gaugaacuucuuuguauuc

SEQ ID NO: 1629716 - RNA, 19 nt, Homo sapiens
  misc_RNA (1)...(19): siRNA sense strand
gagcuucucuacagguaca

SEQ ID NO: 1629717 - RNA, 19 nt, Homo sapiens
  misc_RNA (1)...(19): siRNA sense strand
gggcagggauccgcaacaa

SEQ ID NO: 1629718 - RNA, 19 nt, Homo sapiens
  misc_RNA (1)...(19): siRNA sense strand
gcauauaugggcuucauca

SEQ ID NO: 1629719 - RNA, 19 nt, Homo sapiens
  misc_RNA (1)...(19): siRNA sense strand
uauaugggcuucaucaacu

SEQ ID NO: 1629720 - RNA, 19 nt, Homo sapiens
  misc_RNA (1)...(19): siRNA sense strand
ucaugacuauggagauauu

SEQ ID NO: 1629721 - RNA, 19 nt, Homo sapiens
  misc_RNA (1)...(19): siRNA sense strand
cccaugggcuucuugaaug

SEQ ID NO: 1629722 - RNA, 19 nt, Homo sapiens
  misc_RNA (1)...(19): siRNA sense strand
cagugucgauucuggauga

SEQ ID NO: 1629723 - RNA, 19 nt, Homo sapiens
  misc_RNA (1)...(19): siRNA sense strand
ucaaucagaggaagaaguu

SEQ ID NO: 1629724 - RNA, 19 nt, Homo sapiens
  misc_RNA (1)...(19): siRNA sense strand
ucaaccuucuuucucauga

SEQ ID NO: 1629725 - RNA, 19 nt, Homo sapiens
  misc_RNA (1)...(19): siRNA sense strand
ggaaguccagagauaguug

SEQ ID NO: 1629726 - RNA, 19 nt, Homo sapiens
  misc_RNA (1)...(19): siRNA sense strand
ggugauugcccuugauuuc

SEQ ID NO: 1629727 - RNA, 19 nt, Homo sapiens
  misc_RNA (1)...(19): siRNA sense strand
agagauaguugugcuuuua

SEQ ID NO: 1629728 - RNA, 19 nt, Homo sapiens
  misc_RNA (1)...(19): siRNA sense strand
ugauugcccuugauuucuu

SEQ ID NO: 1629729 - RNA, 19 nt, Homo sapiens
  misc_RNA (1)...(19): siRNA sense strand
guacaagauuugggaaggu

SEQ ID NO: 1629730 - RNA, 19 nt, Homo sapiens
  misc_RNA (1)...(19): siRNA sense strand
uugacagucucuuacagua

SEQ ID NO: 1629731 - RNA, 19 nt, Homo sapiens
  misc_RNA (1)...(19): siRNA sense strand
ucaaauggagguaucuuuc

SEQ ID NO: 1629732 - RNA, 19 nt, Homo sapiens
  misc_RNA (1)...(19): siRNA sense strand
caucacuauuccauauuug

SEQ ID NO: 1629733 - RNA, 19 nt, Homo sapiens
  misc_RNA (1)...(19): siRNA sense strand
cgagaccacaucacuauuc

SEQ ID NO: 1629734 - RNA, 19 nt, Homo sapiens
  misc_RNA (1)...(19): siRNA sense strand
cuucuugaaugcauauaug

SEQ ID NO: 1629735 - RNA, 19 nt, Homo sapiens
  misc_RNA (1)...(19): siRNA sense strand
ccagagauaguugugcuuu

SEQ ID NO: 1629736 - RNA, 19 nt, Homo sapiens
  misc_RNA (1)...(19): siRNA sense strand
ggcuuuggcuucagugaca

SEQ ID NO: 1629737 - RNA, 19 nt, Homo sapiens
  misc_RNA (1)...(19): siRNA sense strand
guaacuauccccauucauu

SEQ ID NO: 1629738 - RNA, 19 nt, Homo sapiens
  misc_RNA (1)...(19): siRNA sense strand
gagguuucaucgggugauu

SEQ ID NO: 1629739 - RNA, 19 nt, Homo sapiens
  misc_RNA (1)...(19): siRNA sense strand
ugggagcucuugccucugu

SEQ ID NO: 1629740 - RNA, 19 nt, Homo sapiens
  misc_RNA (1)...(19): siRNA sense strand
uccaaaagcuacucaaaga

SEQ ID NO: 1629741 - RNA, 19 nt, Homo sapiens
  misc_RNA (1)...(19): siRNA sense strand
aaaucccuauccagaguuu

SEQ ID NO: 1629742 - RNA, 19 nt, Homo sapiens
  misc_RNA (1)...(19): siRNA sense strand
acaagggacugcguaucuu

SEQ ID NO: 1629743 - RNA, 19 nt, Homo sapiens
  misc_RNA (1)...(19): siRNA sense strand
cgacugaugaacuucuuug

SEQ ID NO: 1629744 - RNA, 19 nt, Homo sapiens
  misc_RNA (1)...(19): siRNA sense strand
agagugagcugugggacau

SEQ ID NO: 1629745 - RNA, 19 nt, Homo sapiens
  misc_RNA (1)...(19): siRNA sense strand
caaaagcuacucaaagaug

SEQ ID NO: 1629746 - RNA, 19 nt, Homo sapiens
  misc_RNA (1)...(19): siRNA sense strand
uaacuauccccauucauuu

SEQ ID NO: 1629747 - RNA, 19 nt, Homo sapiens
  misc_RNA (1)...(19): siRNA sense strand
gaccacaucacuauuccau

SEQ ID NO: 1629748 - RNA, 19 nt, Homo sapiens
  misc_RNA (1)...(19): siRNA sense strand
ggagcucuugccucuguaa

SEQ ID NO: 1629749 - RNA, 19 nt, Homo sapiens
  misc_RNA (1)...(19): siRNA sense strand
gcaacaaugacgggaacuu

SEQ ID NO: 1629750 - RNA, 19 nt, Homo sapiens
  misc_RNA (1)...(19): siRNA sense strand
gucaaauggagguaucuuu

SEQ ID NO: 1629751 - RNA, 19 nt, Homo sapiens
  misc_RNA (1)...(19): siRNA sense strand
cucaggagcuucucuacag

SEQ ID NO: 1629752 - RNA, 19 nt, Homo sapiens
  misc_RNA (1)...(19): siRNA sense strand
cuucaucaacuccuucuga

SEQ ID NO: 1629753 - RNA, 19 nt, Homo sapiens
  misc_RNA (1)...(19): siRNA sense strand
gguccacagugucgauucu

SEQ ID NO: 1629754 - RNA, 19 nt, Homo sapiens
  misc_RNA (1)...(19): siRNA sense strand
cuacgacugguacaagauu

SEQ ID NO: 1629755 - RNA, 19 nt, Homo sapiens
  misc_RNA (1)...(19): siRNA sense strand
uuacaguacaucaaucaga

SEQ ID NO: 1629756 - RNA, 19 nt, Homo sapiens
  misc_RNA (1)...(19): siRNA sense strand
caagggacugcguaucuuc

SEQ ID NO: 1629757 - RNA, 19 nt, Homo sapiens
  misc_RNA (1)...(19): siRNA sense strand
gaaguccagagauaguugu

SEQ ID NO: 1629758 - RNA, 19 nt, Homo sapiens
  misc_RNA (1)...(19): siRNA sense strand
ugaccacauuagccacuau

SEQ ID NO: 1629759 - RNA, 19 nt, Homo sapiens
  misc_RNA (1)...(19): siRNA sense strand
agauggaggugugcuguca

SEQ ID NO: 1629760 - RNA, 19 nt, Homo sapiens
  misc_RNA (1)...(19): siRNA sense strand
gacuauggagauauuguug

SEQ ID NO: 1629761 - RNA, 19 nt, Homo sapiens
  misc_RNA (1)...(19): siRNA sense strand
ugacuauggagauauuguu

SEQ ID NO: 1629762 - RNA, 19 nt, Homo sapiens
  misc_RNA (1)...(19): siRNA sense strand
gagaccacaucacuauucc

SEQ ID NO: 1629763 - RNA, 19 nt, Homo sapiens
  misc_RNA (1)...(19): siRNA sense strand
uacgacugguacaagauuu

SEQ ID NO: 1629764 - RNA, 19 nt, Homo sapiens
  misc_RNA (1)...(19): siRNA sense strand
acugaugaacuucuuugua

SEQ ID NO: 1629765 - RNA, 19 nt, Homo sapiens
  misc_RNA (1)...(19): siRNA sense strand
aggagcuucucuacaggua

SEQ ID NO: 1629766 - RNA, 19 nt, Homo sapiens
  misc_RNA (1)...(19): siRNA sense strand
ugacaaaccgagaccacau

SEQ ID NO: 1629767 - RNA, 19 nt, Homo sapiens
  misc_RNA (1)...(19): siRNA sense strand
cguauacucggcccucuga

SEQ ID NO: 1629768 - RNA, 19 nt, Homo sapiens
  misc_RNA (1)...(19): siRNA sense strand
aaaccgagaccacaucacu

SEQ ID NO: 1629769 - RNA, 19 nt, Homo sapiens
  misc_RNA (1)...(19): siRNA sense strand
gaucccaugggcuucuuga

SEQ ID NO: 1629770 - RNA, 19 nt, Homo sapiens
  misc_RNA (1)...(19): siRNA sense strand
cagaggaagaaguucagaa

SEQ ID NO: 1629771 - RNA, 19 nt, Homo sapiens
  misc_RNA (1)...(19): siRNA sense strand
guacaagcagaaucgaucu

SEQ ID NO: 1629772 - RNA, 19 nt, Homo sapiens
  misc_RNA (1)...(19): siRNA sense strand
gacaaaccgagaccacauc

SEQ ID NO: 1629773 - RNA, 19 nt, Homo sapiens
  misc_RNA (1)...(19): siRNA sense strand
uacaagggacugcguaucu

SEQ ID NO: 1629774 - RNA, 19 nt, Homo sapiens
  misc_RNA (1)...(19): siRNA sense strand
cagggauccgcaacaauga

SEQ ID NO: 1629775 - RNA, 19 nt, Homo sapiens
  misc_RNA (1)...(19): siRNA sense strand
aaucagaggaagaaguuca

SEQ ID NO: 1629776 - RNA, 19 nt, Homo sapiens
  misc_RNA (1)...(19): siRNA sense strand
gggacugcguaucuucuac

SEQ ID NO: 1629777 - RNA, 19 nt, Homo sapiens
  misc_RNA (1)...(19): siRNA sense strand
ggccauuggauccuguaaa

SEQ ID NO: 1629778 - RNA, 19 nt, Homo sapiens
  misc_RNA (1)...(19): siRNA sense strand
gggagcucuugccucugua

SEQ ID NO: 1629779 - RNA, 19 nt, Homo sapiens
  misc_RNA (1)...(19): siRNA sense strand
ggagguaucuuuccugaga

SEQ ID NO: 1629780 - RNA, 19 nt, Homo sapiens
  misc_RNA (1)...(19): siRNA sense strand
ccacaucacuauuccauau

SEQ ID NO: 1629781 - RNA, 19 nt, Homo sapiens
  misc_RNA (1)...(19): siRNA sense strand
gaacuucuuuguauucucu

SEQ ID NO: 1629782 - RNA, 19 nt, Homo sapiens
  misc_RNA (1)...(19): siRNA sense strand
caacaaugacgggaacuua

SEQ ID NO: 1629783 - RNA, 19 nt, Homo sapiens
  misc_RNA (1)...(19): siRNA sense strand
guaaaucccuauccagagu

SEQ ID NO: 1629784 - RNA, 19 nt, Homo sapiens
  misc_RNA (1)...(19): siRNA sense strand
ucacacgacugaugaacuu

SEQ ID NO: 1629785 - RNA, 19 nt, Homo sapiens
  misc_RNA (1)...(19): siRNA sense strand
gcucuugccucuguaacua

SEQ ID NO: 1629786 - RNA, 19 nt, Homo sapiens
  misc_RNA (1)...(19): siRNA sense strand
cugaugaacuucuuuguau

SEQ ID NO: 1629787 - RNA, 19 nt, Homo sapiens
  misc_RNA (1)...(19): siRNA sense strand
gcagggauccgcaacaaug

SEQ ID NO: 1629788 - RNA, 19 nt, Homo sapiens
  misc_RNA (1)...(19): siRNA sense strand
gacgggaacuuagucauug

SEQ ID NO: 1629789 - RNA, 19 nt, Homo sapiens
  misc_RNA (1)...(19): siRNA sense strand
gccauuggauccuguaaau

SEQ ID NO: 1629790 - RNA, 19 nt, Homo sapiens
  misc_RNA (1)...(19): siRNA sense strand
gauugcccuugauuucuua

SEQ ID NO: 1629791 - RNA, 19 nt, Homo sapiens
  misc_RNA (1)...(19): siRNA sense strand
gauucuggaugaccacauu

SEQ ID NO: 1629792 - RNA, 19 nt, Homo sapiens
  misc_RNA (1)...(19): siRNA sense strand
gacagucucuuacaguaca

SEQ ID NO: 1629793 - RNA, 19 nt, Homo sapiens
  misc_RNA (1)...(19): siRNA sense strand
gaugaacuucuuuguauuc

SEQ ID NO: 1629794 - RNA, 19 nt, Homo sapiens
  misc_RNA (1)...(19): siRNA sense strand
gagcuucucuacagguaca

SEQ ID NO: 1629795 - RNA, 19 nt, Homo sapiens
  misc_RNA (1)...(19): siRNA sense strand
gggcagggauccgcaacaa

SEQ ID NO: 1629796 - RNA, 19 nt, Homo sapiens
  misc_RNA (1)...(19): siRNA sense strand
gcauauaugggcuucauca

SEQ ID NO: 1629797 - RNA, 19 nt, Homo sapiens
  misc_RNA (1)...(19): siRNA sense strand
uauaugggcuucaucaacu

SEQ ID NO: 1629798 - RNA, 19 nt, Homo sapiens
  misc_RNA (1)...(19): siRNA sense strand
ucaugacuauggagauauu

SEQ ID NO: 1629799 - RNA, 19 nt, Homo sapiens
  misc_RNA (1)...(19): siRNA sense strand
cccaugggcuucuugaaug

SEQ ID NO: 1629800 - RNA, 19 nt, Homo sapiens
  misc_RNA (1)...(19): siRNA sense strand
cagugucgauucuggauga

SEQ ID NO: 1629801 - RNA, 19 nt, Homo sapiens
  misc_RNA (1)...(19): siRNA sense strand
ucaaucagaggaagaaguu

SEQ ID NO: 1629802 - RNA, 19 nt, Homo sapiens
  misc_RNA (1)...(19): siRNA sense strand
ucaaccuucuuucucauga

SEQ ID NO: 1629803 - RNA, 19 nt, Homo sapiens
  misc_RNA (1)...(19): siRNA sense strand
ggaaguccagagauaguug

SEQ ID NO: 1629804 - RNA, 19 nt, Homo sapiens
  misc_RNA (1)...(19): siRNA sense strand
ggugauugcccuugauuuc

SEQ ID NO: 1629805 - RNA, 19 nt, Homo sapiens
  misc_RNA (1)...(19): siRNA sense strand
agagauaguugugcuuuua

SEQ ID NO: 1629806 - RNA, 19 nt, Homo sapiens
  misc_RNA (1)...(19): siRNA sense strand
ugauugcccuugauuucuu

SEQ ID NO: 1629807 - RNA, 19 nt, Homo sapiens
  misc_RNA (1)...(19): siRNA sense strand
guacaagauuugggaaggu

SEQ ID NO: 1629808 - RNA, 19 nt, Homo sapiens
  misc_RNA (1)...(19): siRNA sense strand
uugacagucucuuacagua

SEQ ID NO: 1629809 - RNA, 19 nt, Homo sapiens
  misc_RNA (1)...(19): siRNA sense strand
ucaaauggagguaucuuuc

SEQ ID NO: 1629810 - RNA, 19 nt, Homo sapiens
  misc_RNA (1)...(19): siRNA sense strand
caucacuauuccauauuug

SEQ ID NO: 1629811 - RNA, 19 nt, Homo sapiens
  misc_RNA (1)...(19): siRNA sense strand
cgagaccacaucacuauuc

SEQ ID NO: 1629812 - RNA, 19 nt, Homo sapiens
  misc_RNA (1)...(19): siRNA sense strand
cuucuugaaugcauauaug

SEQ ID NO: 1629813 - RNA, 19 nt, Homo sapiens
  misc_RNA (1)...(19): siRNA sense strand
ccagagauaguugugcuuu

SEQ ID NO: 1629814 - RNA, 19 nt, Homo sapiens
  misc_RNA (1)...(19): siRNA sense strand
ggcuuuggcuucagugaca

SEQ ID NO: 1629815 - RNA, 19 nt, Homo sapiens
  misc_RNA (1)...(19): siRNA sense strand
guaacuauccccauucauu

SEQ ID NO: 1629816 - RNA, 19 nt, Homo sapiens
  misc_RNA (1)...(19): siRNA sense strand
gagguuucaucgggugauu

SEQ ID NO: 1629817 - RNA, 19 nt, Homo sapiens
  misc_RNA (1)...(19): siRNA sense strand
ugggagcucuugccucugu

SEQ ID NO: 1629818 - RNA, 19 nt, Homo sapiens
  misc_RNA (1)...(19): siRNA sense strand
uccaaaagcuacucaaaga

SEQ ID NO: 1629819 - RNA, 19 nt, Homo sapiens
  misc_RNA (1)...(19): siRNA sense strand
aaaucccuauccagaguuu

SEQ ID NO: 1629820 - RNA, 19 nt, Homo sapiens
  misc_RNA (1)...(19): siRNA sense strand
acaagggacugcguaucuu

SEQ ID NO: 1629821 - RNA, 19 nt, Homo sapiens
  misc_RNA (1)...(19): siRNA sense strand
cgacugaugaacuucuuug

SEQ ID NO: 1629822 - RNA, 19 nt, Homo sapiens
  misc_RNA (1)...(19): siRNA sense strand
agagugagcugugggacau

SEQ ID NO: 1629823 - RNA, 19 nt, Homo sapiens
  misc_RNA (1)...(19): siRNA sense strand
caaaagcuacucaaagaug

SEQ ID NO: 1629824 - RNA, 19 nt, Homo sapiens
  misc_RNA (1)...(19): siRNA sense strand
uaacuauccccauucauuu

SEQ ID NO: 1629825 - RNA, 19 nt, Homo sapiens
  misc_RNA (1)...(19): siRNA sense strand
gaccacaucacuauuccau

SEQ ID NO: 1629826 - RNA, 19 nt, Homo sapiens
  misc_RNA (1)...(19): siRNA sense strand
ggagcucuugccucuguaa

SEQ ID NO: 1629827 - RNA, 19 nt, Homo sapiens
  misc_RNA (1)...(19): siRNA sense strand
gcaacaaugacgggaacuu

SEQ ID NO: 1629828 - RNA, 19 nt, Homo sapiens
  misc_RNA (1)...(19): siRNA sense strand
gucaaauggagguaucuuu

SEQ ID NO: 1629829 - RNA, 19 nt, Homo sapiens
  misc_RNA (1)...(19): siRNA sense strand
cucaggagcuucucuacag

SEQ ID NO: 1629830 - RNA, 19 nt, Homo sapiens
  misc_RNA (1)...(19): siRNA sense strand
cuucaucaacuccuucuga

SEQ ID NO: 1629831 - RNA, 19 nt, Homo sapiens
  misc_RNA (1)...(19): siRNA sense strand
gguccacagugucgauucu

SEQ ID NO: 1629832 - RNA, 19 nt, Homo sapiens
  misc_RNA (1)...(19): siRNA sense strand
cuacgacugguacaagauu

SEQ ID NO: 1629833 - RNA, 19 nt, Homo sapiens
  misc_RNA (1)...(19): siRNA sense strand
uuacaguacaucaaucaga

SEQ ID NO: 1629834 - RNA, 19 nt, Homo sapiens
  misc_RNA (1)...(19): siRNA sense strand
caagggacugcguaucuuc

SEQ ID NO: 1629835 - RNA, 19 nt, Homo sapiens
  misc_RNA (1)...(19): siRNA sense strand
gaaguccagagauaguugu

SEQ ID NO: 1629836 - RNA, 19 nt, Homo sapiens
  misc_RNA (1)...(19): siRNA sense strand
ugaccacauuagccacuau

SEQ ID NO: 1629837 - RNA, 19 nt, Homo sapiens
  misc_RNA (1)...(19): siRNA sense strand
agauggaggugugcuguca

SEQ ID NO: 1629838 - RNA, 19 nt, Homo sapiens
  misc_RNA (1)...(19): siRNA sense strand
gacuauggagauauuguug

SEQ ID NO: 1629839 - RNA, 19 nt, Homo sapiens
  misc_RNA (1)...(19): siRNA sense strand
ugacuauggagauauuguu

SEQ ID NO: 1629840 - RNA, 19 nt, Homo sapiens
  misc_RNA (1)...(19): siRNA sense strand
gagaccacaucacuauucc

SEQ ID NO: 1629841 - RNA, 19 nt, Homo sapiens
  misc_RNA (1)...(19): siRNA sense strand
uacgacugguacaagauuu

SEQ ID NO: 1629842 - RNA, 19 nt, Homo sapiens
  misc_RNA (1)...(19): siRNA sense strand
acugaugaacuucuuugua

SEQ ID NO: 1629843 - RNA, 19 nt, Homo sapiens
  misc_RNA (1)...(19): siRNA sense strand
aggagcuucucuacaggua

SEQ ID NO: 1629844 - RNA, 19 nt, Homo sapiens
  misc_RNA (1)...(19): siRNA sense strand
ugacaaaccgagaccacau

SEQ ID NO: 1629845 - RNA, 19 nt, Homo sapiens
  misc_RNA (1)...(19): siRNA sense strand
cguauacucggcccucuga

SEQ ID NO: 1629846 - RNA, 19 nt, Homo sapiens
  misc_RNA (1)...(19): siRNA sense strand
aaaccgagaccacaucacu

SEQ ID NO: 1629847 - RNA, 19 nt, Homo sapiens
  misc_RNA (1)...(19): siRNA sense strand
gaucccaugggcuucuuga

SEQ ID NO: 1629848 - RNA, 19 nt, Homo sapiens
  misc_RNA (1)...(19): siRNA sense strand
cagaggaagaaguucagaa

SEQ ID NO: 1629849 - RNA, 19 nt, Homo sapiens
  misc_RNA (1)...(19): siRNA sense strand
guacaagcagaaucgaucu

SEQ ID NO: 1629850 - RNA, 19 nt, Homo sapiens
  misc_RNA (1)...(19): siRNA sense strand
gacaaaccgagaccacauc

SEQ ID NO: 1629851 - RNA, 19 nt, Homo sapiens
  misc_RNA (1)...(19): siRNA sense strand
uacaagggacugcguaucu

SEQ ID NO: 1629852 - RNA, 19 nt, Homo sapiens
  misc_RNA (1)...(19): siRNA sense strand
cagggauccgcaacaauga

SEQ ID NO: 1629853 - RNA, 19 nt, Homo sapiens
  misc_RNA (1)...(19): siRNA sense strand
aaucagaggaagaaguuca

SEQ ID NO: 1629854 - RNA, 19 nt, Homo sapiens
  misc_RNA (1)...(19): siRNA sense strand
gggacugcguaucuucuac

SEQ ID NO: 1629855 - RNA, 19 nt, Homo sapiens
  misc_RNA (1)...(19): siRNA sense strand
ggccauuggauccuguaaa

SEQ ID NO: 1629856 - RNA, 19 nt, Homo sapiens
  misc_RNA (1)...(19): siRNA sense strand
gggagcucuugccucugua

SEQ ID NO: 1629857 - RNA, 19 nt, Homo sapiens
  misc_RNA (1)...(19): siRNA sense strand
ugacagaccuggccaagua

SEQ ID NO: 1629858 - RNA, 19 nt, Homo sapiens
  misc_RNA (1)...(19): siRNA sense strand
gcacgacucuguuggaagu

SEQ ID NO: 1629859 - RNA, 19 nt, Homo sapiens
  misc_RNA (1)...(19): siRNA sense strand
gcucggacuucaacaacua

SEQ ID NO: 1629860 - RNA, 19 nt, Homo sapiens
  misc_RNA (1)...(19): siRNA sense strand
cuacguggcugcuguauac

SEQ ID NO: 1629861 - RNA, 19 nt, Homo sapiens
  misc_RNA (1)...(19): siRNA sense strand
ccgcgugucugauuacaaa

SEQ ID NO: 1629862 - RNA, 19 nt, Homo sapiens
  misc_RNA (1)...(19): siRNA sense strand
gggaaacccugcugauguc

SEQ ID NO: 1629863 - RNA, 19 nt, Homo sapiens
  misc_RNA (1)...(19): siRNA sense strand
caucucagacuucuucaaa

SEQ ID NO: 1629864 - RNA, 19 nt, Homo sapiens
  misc_RNA (1)...(19): siRNA sense strand
acacagaccggcucuauuc

SEQ ID NO: 1629865 - RNA, 19 nt, Homo sapiens
  misc_RNA (1)...(19): siRNA sense strand
guacacagaccggcucuau

SEQ ID NO: 1629866 - RNA, 19 nt, Homo sapiens
  misc_RNA (1)...(19): siRNA sense strand
cuacaucucagacuucuuc

SEQ ID NO: 1629867 - RNA, 19 nt, Homo sapiens
  misc_RNA (1)...(19): siRNA sense strand
caacuacguggcugcugua

SEQ ID NO: 1629868 - RNA, 19 nt, Homo sapiens
  misc_RNA (1)...(19): siRNA sense strand
caacugcucggucuaugug

SEQ ID NO: 1629869 - RNA, 19 nt, Homo sapiens
  misc_RNA (1)...(19): siRNA sense strand
gaggccagguugucuuucu

SEQ ID NO: 1629870 - RNA, 19 nt, Homo sapiens
  misc_RNA (1)...(19): siRNA sense strand
gccgugagccagucucuga

SEQ ID NO: 1629871 - RNA, 19 nt, Homo sapiens
  misc_RNA (1)...(19): siRNA sense strand
ccacaaccacuauggauac

SEQ ID NO: 1629872 - RNA, 19 nt, Homo sapiens
  misc_RNA (1)...(19): siRNA sense strand
gaaggaggaggagcuggaa

SEQ ID NO: 1629873 - RNA, 19 nt, Homo sapiens
  misc_RNA (1)...(19): siRNA sense strand
cuggagcgauguccuuguu

SEQ ID NO: 1629874 - RNA, 19 nt, Homo sapiens
  misc_RNA (1)...(19): siRNA sense strand
ucgggacacucuuccuuug

SEQ ID NO: 1629875 - RNA, 19 nt, Homo sapiens
  misc_RNA (1)...(19): siRNA sense strand
gaccacaaccacuauggau

SEQ ID NO: 1629876 - RNA, 19 nt, Homo sapiens
  misc_RNA (1)...(19): siRNA sense strand
gacccacaguccaguucuu

SEQ ID NO: 1629877 - RNA, 19 nt, Homo sapiens
  misc_RNA (1)...(19): siRNA sense strand
gaccuggccaaguacauga

SEQ ID NO: 1629878 - RNA, 19 nt, Homo sapiens
  misc_RNA (1)...(19): siRNA sense strand
ggucaacugcucggucuau

SEQ ID NO: 1629879 - RNA, 19 nt, Homo sapiens
  misc_RNA (1)...(19): siRNA sense strand
ucucagacuucuucaaagc

SEQ ID NO: 1629880 - RNA, 19 nt, Homo sapiens
  misc_RNA (1)...(19): siRNA sense strand
aagcccagccugucacuga

SEQ ID NO: 1629881 - RNA, 19 nt, Homo sapiens
  misc_RNA (1)...(19): siRNA sense strand
ccacuggagcgauguccuu

SEQ ID NO: 1629882 - RNA, 19 nt, Homo sapiens
  misc_RNA (1)...(19): siRNA sense strand
gggaagccuaccuggugua

SEQ ID NO: 1629883 - RNA, 19 nt, Homo sapiens
  misc_RNA (1)...(19): siRNA sense strand
ggauguacugcaugguguu

SEQ ID NO: 1629884 - RNA, 19 nt, Homo sapiens
  misc_RNA (1)...(19): siRNA sense strand
ugacagaccuggccaagua

SEQ ID NO: 1629885 - RNA, 19 nt, Homo sapiens
  misc_RNA (1)...(19): siRNA sense strand
gcacgacucuguuggaagu

SEQ ID NO: 1629886 - RNA, 19 nt, Homo sapiens
  misc_RNA (1)...(19): siRNA sense strand
gcucggacuucaacaacua

SEQ ID NO: 1629887 - RNA, 19 nt, Homo sapiens
  misc_RNA (1)...(19): siRNA sense strand
cuacguggcugcuguauac

SEQ ID NO: 1629888 - RNA, 19 nt, Homo sapiens
  misc_RNA (1)...(19): siRNA sense strand
ccgcgugucugauuacaaa

SEQ ID NO: 1629889 - RNA, 19 nt, Homo sapiens
  misc_RNA (1)...(19): siRNA sense strand
gggaaacccugcugauguc

SEQ ID NO: 1629890 - RNA, 19 nt, Homo sapiens
  misc_RNA (1)...(19): siRNA sense strand
caucucagacuucuucaaa

SEQ ID NO: 1629891 - RNA, 19 nt, Homo sapiens
  misc_RNA (1)...(19): siRNA sense strand
acacagaccggcucuauuc

SEQ ID NO: 1629892 - RNA, 19 nt, Homo sapiens
  misc_RNA (1)...(19): siRNA sense strand
guacacagaccggcucuau

SEQ ID NO: 1629893 - RNA, 19 nt, Homo sapiens
  misc_RNA (1)...(19): siRNA sense strand
cuacaucucagacuucuuc

SEQ ID NO: 1629894 - RNA, 19 nt, Homo sapiens
  misc_RNA (1)...(19): siRNA sense strand
caacuacguggcugcugua

SEQ ID NO: 1629895 - RNA, 19 nt, Homo sapiens
  misc_RNA (1)...(19): siRNA sense strand
caacugcucggucuaugug

SEQ ID NO: 1629896 - RNA, 19 nt, Homo sapiens
  misc_RNA (1)...(19): siRNA sense strand
gaggccagguugucuuucu

SEQ ID NO: 1629897 - RNA, 19 nt, Homo sapiens
  misc_RNA (1)...(19): siRNA sense strand
gccgugagccagucucuga

SEQ ID NO: 1629898 - RNA, 19 nt, Homo sapiens
  misc_RNA (1)...(19): siRNA sense strand
ccacaaccacuauggauac

SEQ ID NO: 1629899 - RNA, 19 nt, Homo sapiens
  misc_RNA (1)...(19): siRNA sense strand
gaaggaggaggagcuggaa

SEQ ID NO: 1629900 - RNA, 19 nt, Homo sapiens
  misc_RNA (1)...(19): siRNA sense strand
cuggagcgauguccuuguu

SEQ ID NO: 1629901 - RNA, 19 nt, Homo sapiens
  misc_RNA (1)...(19): siRNA sense strand
ucgggacacucuuccuuug

SEQ ID NO: 1629902 - RNA, 19 nt, Homo sapiens
  misc_RNA (1)...(19): siRNA sense strand
gaccacaaccacuauggau

SEQ ID NO: 1629903 - RNA, 19 nt, Homo sapiens
  misc_RNA (1)...(19): siRNA sense strand
gacccacaguccaguucuu

SEQ ID NO: 1629904 - RNA, 19 nt, Homo sapiens
  misc_RNA (1)...(19): siRNA sense strand
gaccuggccaaguacauga

SEQ ID NO: 1629905 - RNA, 19 nt, Homo sapiens
  misc_RNA (1)...(19): siRNA sense strand
ggucaacugcucggucuau

SEQ ID NO: 1629906 - RNA, 19 nt, Homo sapiens
  misc_RNA (1)...(19): siRNA sense strand
ucucagacuucuucaaagc

SEQ ID NO: 1629907 - RNA, 19 nt, Homo sapiens
  misc_RNA (1)...(19): siRNA sense strand
aagcccagccugucacuga

SEQ ID NO: 1629908 - RNA, 19 nt, Homo sapiens
  misc_RNA (1)...(19): siRNA sense strand
ccacuggagcgauguccuu

SEQ ID NO: 1629909 - RNA, 19 nt, Homo sapiens
  misc_RNA (1)...(19): siRNA sense strand
gggaagccuaccuggugua

SEQ ID NO: 1629910 - RNA, 19 nt, Homo sapiens
  misc_RNA (1)...(19): siRNA sense strand
ggauguacugcaugguguu

SEQ ID NO: 1629911 - RNA, 19 nt, Homo sapiens
  misc_RNA (1)...(19): siRNA sense strand
ugacagaccuggccaagua

SEQ ID NO: 1629912 - RNA, 19 nt, Homo sapiens
  misc_RNA (1)...(19): siRNA sense strand
gcacgacucuguuggaagu

SEQ ID NO: 1629913 - RNA, 19 nt, Homo sapiens
  misc_RNA (1)...(19): siRNA sense strand
gcucggacuucaacaacua

SEQ ID NO: 1629914 - RNA, 19 nt, Homo sapiens
  misc_RNA (1)...(19): siRNA sense strand
cuacguggcugcuguauac

SEQ ID NO: 1629915 - RNA, 19 nt, Homo sapiens
  misc_RNA (1)...(19): siRNA sense strand
ccgcgugucugauuacaaa

SEQ ID NO: 1629916 - RNA, 19 nt, Homo sapiens
  misc_RNA (1)...(19): siRNA sense strand
gggaaacccugcugauguc

SEQ ID NO: 1629917 - RNA, 19 nt, Homo sapiens
  misc_RNA (1)...(19): siRNA sense strand
caucucagacuucuucaaa

SEQ ID NO: 1629918 - RNA, 19 nt, Homo sapiens
  misc_RNA (1)...(19): siRNA sense strand
acacagaccggcucuauuc

SEQ ID NO: 1629919 - RNA, 19 nt, Homo sapiens
  misc_RNA (1)...(19): siRNA sense strand
guacacagaccggcucuau

SEQ ID NO: 1629920 - RNA, 19 nt, Homo sapiens
  misc_RNA (1)...(19): siRNA sense strand
cuacaucucagacuucuuc

SEQ ID NO: 1629921 - RNA, 19 nt, Homo sapiens
  misc_RNA (1)...(19): siRNA sense strand
caacuacguggcugcugua

SEQ ID NO: 1629922 - RNA, 19 nt, Homo sapiens
  misc_RNA (1)...(19): siRNA sense strand
caacugcucggucuaugug

SEQ ID NO: 1629923 - RNA, 19 nt, Homo sapiens
  misc_RNA (1)...(19): siRNA sense strand
gaggccagguugucuuucu

SEQ ID NO: 1629924 - RNA, 19 nt, Homo sapiens
  misc_RNA (1)...(19): siRNA sense strand
gccgugagccagucucuga

SEQ ID NO: 1629925 - RNA, 19 nt, Homo sapiens
  misc_RNA (1)...(19): siRNA sense strand
ccacaaccacuauggauac

SEQ ID NO: 1629926 - RNA, 19 nt, Homo sapiens
  misc_RNA (1)...(19): siRNA sense strand
gaaggaggaggagcuggaa

SEQ ID NO: 1629927 - RNA, 19 nt, Homo sapiens
  misc_RNA (1)...(19): siRNA sense strand
cuggagcgauguccuuguu

SEQ ID NO: 1629928 - RNA, 19 nt, Homo sapiens
  misc_RNA (1)...(19): siRNA sense strand
ucgggacacucuuccuuug

SEQ ID NO: 1629929 - RNA, 19 nt, Homo sapiens
  misc_RNA (1)...(19): siRNA sense strand
gaccacaaccacuauggau

SEQ ID NO: 1629930 - RNA, 19 nt, Homo sapiens
  misc_RNA (1)...(19): siRNA sense strand
gacccacaguccaguucuu

SEQ ID NO: 1629931 - RNA, 19 nt, Homo sapiens
  misc_RNA (1)...(19): siRNA sense strand
gaccuggccaaguacauga

SEQ ID NO: 1629932 - RNA, 19 nt, Homo sapiens
  misc_RNA (1)...(19): siRNA sense strand
ggucaacugcucggucuau

SEQ ID NO: 1629933 - RNA, 19 nt, Homo sapiens
  misc_RNA (1)...(19): siRNA sense strand
ucucagacuucuucaaagc

SEQ ID NO: 1629934 - RNA, 19 nt, Homo sapiens
  misc_RNA (1)...(19): siRNA sense strand
aagcccagccugucacuga

SEQ ID NO: 1629935 - RNA, 19 nt, Homo sapiens
  misc_RNA (1)...(19): siRNA sense strand
ccacuggagcgauguccuu

SEQ ID NO: 1629936 - RNA, 19 nt, Homo sapiens
  misc_RNA (1)...(19): siRNA sense strand
gggaagccuaccuggugua

SEQ ID NO: 1629937 - RNA, 19 nt, Homo sapiens
  misc_RNA (1)...(19): siRNA sense strand
ggauguacugcaugguguu

SEQ ID NO: 1629938 - RNA, 19 nt, Homo sapiens
  misc_RNA (1)...(19): siRNA sense strand
ggaauggacucagaaguau

SEQ ID NO: 1629939 - RNA, 19 nt, Homo sapiens
  misc_RNA (1)...(19): siRNA sense strand
gggaauggacucagaagua

SEQ ID NO: 1629940 - RNA, 19 nt, Homo sapiens
  misc_RNA (1)...(19): siRNA sense strand
ucagaaguaugccauguga

SEQ ID NO: 1629941 - RNA, 19 nt, Homo sapiens
  misc_RNA (1)...(19): siRNA sense strand
aaacagacagagauaagua

SEQ ID NO: 1629942 - RNA, 19 nt, Homo sapiens
  misc_RNA (1)...(19): siRNA sense strand
cagaauaucucgggaaugg

SEQ ID NO: 1629943 - RNA, 19 nt, Homo sapiens
  misc_RNA (1)...(19): siRNA sense strand
gcauuugucucgauauucu

SEQ ID NO: 1629944 - RNA, 19 nt, Homo sapiens
  misc_RNA (1)...(19): siRNA sense strand
cagcauuugucucgauauu

SEQ ID NO: 1629945 - RNA, 19 nt, Homo sapiens
  misc_RNA (1)...(19): siRNA sense strand
ccacaauuaugggaccuaa

SEQ ID NO: 1629946 - RNA, 19 nt, Homo sapiens
  misc_RNA (1)...(19): siRNA sense strand
ggcagcauuugucucgaua

SEQ ID NO: 1629947 - RNA, 19 nt, Homo sapiens
  misc_RNA (1)...(19): siRNA sense strand
ucacaguggucgccugcuu

SEQ ID NO: 1629948 - RNA, 19 nt, Homo sapiens
  misc_RNA (1)...(19): siRNA sense strand
ucgccugcuuuaacaauuu

SEQ ID NO: 1629949 - RNA, 19 nt, Homo sapiens
  misc_RNA (1)...(19): siRNA sense strand
cuaaugacagcccauauca

SEQ ID NO: 1629950 - RNA, 19 nt, Homo sapiens
  misc_RNA (1)...(19): siRNA sense strand
acaguggucgccugcuuua

SEQ ID NO: 1629951 - RNA, 19 nt, Homo sapiens
  misc_RNA (1)...(19): siRNA sense strand
gauauucuaagaucacagu

SEQ ID NO: 1629952 - RNA, 19 nt, Homo sapiens
  misc_RNA (1)...(19): siRNA sense strand
gaccuaaugacagcccaua

SEQ ID NO: 1629953 - RNA, 19 nt, Homo sapiens
  misc_RNA (1)...(19): siRNA sense strand
guggucgccugcuuuaaca

SEQ ID NO: 1629954 - RNA, 19 nt, Homo sapiens
  misc_RNA (1)...(19): siRNA sense strand
aacagaauaucucgggaau

SEQ ID NO: 1629955 - RNA, 19 nt, Homo sapiens
  misc_RNA (1)...(19): siRNA sense strand
gaauggacucagaaguaug

SEQ ID NO: 1629956 - RNA, 19 nt, Homo sapiens
  misc_RNA (1)...(19): siRNA sense strand
ucucgggaauggacucaga

SEQ ID NO: 1629957 - RNA, 19 nt, Homo sapiens
  misc_RNA (1)...(19): siRNA sense strand
aaugacagcccauaucaag

SEQ ID NO: 1629958 - RNA, 19 nt, Homo sapiens
  misc_RNA (1)...(19): siRNA sense strand
ccuaaugacagcccauauc

SEQ ID NO: 1629959 - RNA, 19 nt, Homo sapiens
  misc_RNA (1)...(19): siRNA sense strand
gucgccugcuuuaacaauu

SEQ ID NO: 1629960 - RNA, 19 nt, Homo sapiens
  misc_RNA (1)...(19): siRNA sense strand
uggcagcauuugucucgau

SEQ ID NO: 1629961 - RNA, 19 nt, Homo sapiens
  misc_RNA (1)...(19): siRNA sense strand
ggucgccugcuuuaacaau

SEQ ID NO: 1629962 - RNA, 19 nt, Homo sapiens
  misc_RNA (1)...(19): siRNA sense strand
ggaauggacucagaaguau

SEQ ID NO: 1629963 - RNA, 19 nt, Homo sapiens
  misc_RNA (1)...(19): siRNA sense strand
gggaauggacucagaagua

SEQ ID NO: 1629964 - RNA, 19 nt, Homo sapiens
  misc_RNA (1)...(19): siRNA sense strand
ucagaaguaugccauguga

SEQ ID NO: 1629965 - RNA, 19 nt, Homo sapiens
  misc_RNA (1)...(19): siRNA sense strand
aaacagacagagauaagua

SEQ ID NO: 1629966 - RNA, 19 nt, Homo sapiens
  misc_RNA (1)...(19): siRNA sense strand
cagaauaucucgggaaugg

SEQ ID NO: 1629967 - RNA, 19 nt, Homo sapiens
  misc_RNA (1)...(19): siRNA sense strand
gcauuugucucgauauucu

SEQ ID NO: 1629968 - RNA, 19 nt, Homo sapiens
  misc_RNA (1)...(19): siRNA sense strand
cagcauuugucucgauauu

SEQ ID NO: 1629969 - RNA, 19 nt, Homo sapiens
  misc_RNA (1)...(19): siRNA sense strand
ccacaauuaugggaccuaa

SEQ ID NO: 1629970 - RNA, 19 nt, Homo sapiens
  misc_RNA (1)...(19): siRNA sense strand
ggcagcauuugucucgaua

SEQ ID NO: 1629971 - RNA, 19 nt, Homo sapiens
  misc_RNA (1)...(19): siRNA sense strand
ucacaguggucgccugcuu

SEQ ID NO: 1629972 - RNA, 19 nt, Homo sapiens
  misc_RNA (1)...(19): siRNA sense strand
ucgccugcuuuaacaauuu

SEQ ID NO: 1629973 - RNA, 19 nt, Homo sapiens
  misc_RNA (1)...(19): siRNA sense strand
cuaaugacagcccauauca

SEQ ID NO: 1629974 - RNA, 19 nt, Homo sapiens
  misc_RNA (1)...(19): siRNA sense strand
acaguggucgccugcuuua

SEQ ID NO: 1629975 - RNA, 19 nt, Homo sapiens
  misc_RNA (1)...(19): siRNA sense strand
gauauucuaagaucacagu

SEQ ID NO: 1629976 - RNA, 19 nt, Homo sapiens
  misc_RNA (1)...(19): siRNA sense strand
gaccuaaugacagcccaua

SEQ ID NO: 1629977 - RNA, 19 nt, Homo sapiens
  misc_RNA (1)...(19): siRNA sense strand
guggucgccugcuuuaaca

SEQ ID NO: 1629978 - RNA, 19 nt, Homo sapiens
  misc_RNA (1)...(19): siRNA sense strand
aacagaauaucucgggaau

SEQ ID NO: 1629979 - RNA, 19 nt, Homo sapiens
  misc_RNA (1)...(19): siRNA sense strand
gaauggacucagaaguaug

SEQ ID NO: 1629980 - RNA, 19 nt, Homo sapiens
  misc_RNA (1)...(19): siRNA sense strand
ucucgggaauggacucaga

SEQ ID NO: 1629981 - RNA, 19 nt, Homo sapiens
  misc_RNA (1)...(19): siRNA sense strand
aaugacagcccauaucaag

SEQ ID NO: 1629982 - RNA, 19 nt, Homo sapiens
  misc_RNA (1)...(19): siRNA sense strand
ccuaaugacagcccauauc

SEQ ID NO: 1629983 - RNA, 19 nt, Homo sapiens
  misc_RNA (1)...(19): siRNA sense strand
gucgccugcuuuaacaauu

SEQ ID NO: 1629984 - RNA, 19 nt, Homo sapiens
  misc_RNA (1)...(19): siRNA sense strand
uggcagcauuugucucgau

SEQ ID NO: 1629985 - RNA, 19 nt, Homo sapiens
  misc_RNA (1)...(19): siRNA sense strand
ggucgccugcuuuaacaau

SEQ ID NO: 1629986 - RNA, 19 nt, Homo sapiens
  misc_RNA (1)...(19): siRNA sense strand
ggaauggacucagaaguau

SEQ ID NO: 1629987 - RNA, 19 nt, Homo sapiens
  misc_RNA (1)...(19): siRNA sense strand
gggaauggacucagaagua

SEQ ID NO: 1629988 - RNA, 19 nt, Homo sapiens
  misc_RNA (1)...(19): siRNA sense strand
ucagaaguaugccauguga

SEQ ID NO: 1629989 - RNA, 19 nt, Homo sapiens
  misc_RNA (1)...(19): siRNA sense strand
aaacagacagagauaagua

SEQ ID NO: 1629990 - RNA, 19 nt, Homo sapiens
  misc_RNA (1)...(19): siRNA sense strand
cagaauaucucgggaaugg

SEQ ID NO: 1629991 - RNA, 19 nt, Homo sapiens
  misc_RNA (1)...(19): siRNA sense strand
gcauuugucucgauauucu

SEQ ID NO: 1629992 - RNA, 19 nt, Homo sapiens
  misc_RNA (1)...(19): siRNA sense strand
cagcauuugucucgauauu

SEQ ID NO: 1629993 - RNA, 19 nt, Homo sapiens
  misc_RNA (1)...(19): siRNA sense strand
ccacaauuaugggaccuaa

SEQ ID NO: 1629994 - RNA, 19 nt, Homo sapiens
  misc_RNA (1)...(19): siRNA sense strand
ggcagcauuugucucgaua

SEQ ID NO: 1629995 - RNA, 19 nt, Homo sapiens
  misc_RNA (1)...(19): siRNA sense strand
ucacaguggucgccugcuu

SEQ ID NO: 1629996 - RNA, 19 nt, Homo sapiens
  misc_RNA (1)...(19): siRNA sense strand
ucgccugcuuuaacaauuu

SEQ ID NO: 1629997 - RNA, 19 nt, Homo sapiens
  misc_RNA (1)...(19): siRNA sense strand
cuaaugacagcccauauca

SEQ ID NO: 1629998 - RNA, 19 nt, Homo sapiens
  misc_RNA (1)...(19): siRNA sense strand
acaguggucgccugcuuua

SEQ ID NO: 1629999 - RNA, 19 nt, Homo sapiens
  misc_RNA (1)...(19): siRNA sense strand
gauauucuaagaucacagu

SEQ ID NO: 1630000 - RNA, 19 nt, Homo sapiens
  misc_RNA (1)...(19): siRNA sense strand
gaccuaaugacagcccaua

SEQ ID NO: 1630001 - RNA, 19 nt, Homo sapiens
  misc_RNA (1)...(19): siRNA sense strand
guggucgccugcuuuaaca

SEQ ID NO: 1630002 - RNA, 19 nt, Homo sapiens
  misc_RNA (1)...(19): siRNA sense strand
aacagaauaucucgggaau

SEQ ID NO: 1630003 - RNA, 19 nt, Homo sapiens
  misc_RNA (1)...(19): siRNA sense strand
gaauggacucagaaguaug

SEQ ID NO: 1630004 - RNA, 19 nt, Homo sapiens
  misc_RNA (1)...(19): siRNA sense strand
ucucgggaauggacucaga

SEQ ID NO: 1630005 - RNA, 19 nt, Homo sapiens
  misc_RNA (1)...(19): siRNA sense strand
aaugacagcccauaucaag

SEQ ID NO: 1630006 - RNA, 19 nt, Homo sapiens
  misc_RNA (1)...(19): siRNA sense strand
ccuaaugacagcccauauc

SEQ ID NO: 1630007 - RNA, 19 nt, Homo sapiens
  misc_RNA (1)...(19): siRNA sense strand
gucgccugcuuuaacaauu

SEQ ID NO: 1630008 - RNA, 19 nt, Homo sapiens
  misc_RNA (1)...(19): siRNA sense strand
uggcagcauuugucucgau

SEQ ID NO: 1630009 - RNA, 19 nt, Homo sapiens
  misc_RNA (1)...(19): siRNA sense strand
ggucgccugcuuuaacaau

SEQ ID NO: 1630010 - RNA, 19 nt, Homo sapiens
  misc_RNA (1)...(19): siRNA sense strand
ggaauggacucagaaguau

SEQ ID NO: 1630011 - RNA, 19 nt, Homo sapiens
  misc_RNA (1)...(19): siRNA sense strand
gggaauggacucagaagua

SEQ ID NO: 1630012 - RNA, 19 nt, Homo sapiens
  misc_RNA (1)...(19): siRNA sense strand
ucagaaguaugccauguga

SEQ ID NO: 1630013 - RNA, 19 nt, Homo sapiens
  misc_RNA (1)...(19): siRNA sense strand
aaacagacagagauaagua

SEQ ID NO: 1630014 - RNA, 19 nt, Homo sapiens
  misc_RNA (1)...(19): siRNA sense strand
cagaauaucucgggaaugg

SEQ ID NO: 1630015 - RNA, 19 nt, Homo sapiens
  misc_RNA (1)...(19): siRNA sense strand
gcauuugucucgauauucu

SEQ ID NO: 1630016 - RNA, 19 nt, Homo sapiens
  misc_RNA (1)...(19): siRNA sense strand
cagcauuugucucgauauu

SEQ ID NO: 1630017 - RNA, 19 nt, Homo sapiens
  misc_RNA (1)...(19): siRNA sense strand
ccacaauuaugggaccuaa

SEQ ID NO: 1630018 - RNA, 19 nt, Homo sapiens
  misc_RNA (1)...(19): siRNA sense strand
ggcagcauuugucucgaua

SEQ ID NO: 1630019 - RNA, 19 nt, Homo sapiens
  misc_RNA (1)...(19): siRNA sense strand
ucacaguggucgccugcuu

SEQ ID NO: 1630020 - RNA, 19 nt, Homo sapiens
  misc_RNA (1)...(19): siRNA sense strand
ucgccugcuuuaacaauuu

SEQ ID NO: 1630021 - RNA, 19 nt, Homo sapiens
  misc_RNA (1)...(19): siRNA sense strand
cuaaugacagcccauauca

SEQ ID NO: 1630022 - RNA, 19 nt, Homo sapiens
  misc_RNA (1)...(19): siRNA sense strand
acaguggucgccugcuuua

SEQ ID NO: 1630023 - RNA, 19 nt, Homo sapiens
  misc_RNA (1)...(19): siRNA sense strand
gauauucuaagaucacagu

SEQ ID NO: 1630024 - RNA, 19 nt, Homo sapiens
  misc_RNA (1)...(19): siRNA sense strand
gaccuaaugacagcccaua

SEQ ID NO: 1630025 - RNA, 19 nt, Homo sapiens
  misc_RNA (1)...(19): siRNA sense strand
guggucgccugcuuuaaca

SEQ ID NO: 1630026 - RNA, 19 nt, Homo sapiens
  misc_RNA (1)...(19): siRNA sense strand
aacagaauaucucgggaau

SEQ ID NO: 1630027 - RNA, 19 nt, Homo sapiens
  misc_RNA (1)...(19): siRNA sense strand
gaauggacucagaaguaug

SEQ ID NO: 1630028 - RNA, 19 nt, Homo sapiens
  misc_RNA (1)...(19): siRNA sense strand
ucucgggaauggacucaga

SEQ ID NO: 1630029 - RNA, 19 nt, Homo sapiens
  misc_RNA (1)...(19): siRNA sense strand
aaugacagcccauaucaag

SEQ ID NO: 1630030 - RNA, 19 nt, Homo sapiens
  misc_RNA (1)...(19): siRNA sense strand
ccuaaugacagcccauauc

SEQ ID NO: 1630031 - RNA, 19 nt, Homo sapiens
  misc_RNA (1)...(19): siRNA sense strand
gucgccugcuuuaacaauu

SEQ ID NO: 1630032 - RNA, 19 nt, Homo sapiens
  misc_RNA (1)...(19): siRNA sense strand
uggcagcauuugucucgau

SEQ ID NO: 1630033 - RNA, 19 nt, Homo sapiens
  misc_RNA (1)...(19): siRNA sense strand
ggucgccugcuuuaacaau

SEQ ID NO: 1630034 - RNA, 19 nt, Homo sapiens
  misc_RNA (1)...(19): siRNA sense strand
ggaauggacucagaaguau

SEQ ID NO: 1630035 - RNA, 19 nt, Homo sapiens
  misc_RNA (1)...(19): siRNA sense strand
gggaauggacucagaagua

SEQ ID NO: 1630036 - RNA, 19 nt, Homo sapiens
  misc_RNA (1)...(19): siRNA sense strand
ucagaaguaugccauguga

SEQ ID NO: 1630037 - RNA, 19 nt, Homo sapiens
  misc_RNA (1)...(19): siRNA sense strand
aaacagacagagauaagua

SEQ ID NO: 1630038 - RNA, 19 nt, Homo sapiens
  misc_RNA (1)...(19): siRNA sense strand
cagaauaucucgggaaugg

SEQ ID NO: 1630039 - RNA, 19 nt, Homo sapiens
  misc_RNA (1)...(19): siRNA sense strand
gcauuugucucgauauucu

SEQ ID NO: 1630040 - RNA, 19 nt, Homo sapiens
  misc_RNA (1)...(19): siRNA sense strand
cagcauuugucucgauauu

SEQ ID NO: 1630041 - RNA, 19 nt, Homo sapiens
  misc_RNA (1)...(19): siRNA sense strand
ccacaauuaugggaccuaa

SEQ ID NO: 1630042 - RNA, 19 nt, Homo sapiens
  misc_RNA (1)...(19): siRNA sense strand
ggcagcauuugucucgaua

SEQ ID NO: 1630043 - RNA, 19 nt, Homo sapiens
  misc_RNA (1)...(19): siRNA sense strand
ucacaguggucgccugcuu

SEQ ID NO: 1630044 - RNA, 19 nt, Homo sapiens
  misc_RNA (1)...(19): siRNA sense strand
ucgccugcuuuaacaauuu

SEQ ID NO: 1630045 - RNA, 19 nt, Homo sapiens
  misc_RNA (1)...(19): siRNA sense strand
cuaaugacagcccauauca

SEQ ID NO: 1630046 - RNA, 19 nt, Homo sapiens
  misc_RNA (1)...(19): siRNA sense strand
acaguggucgccugcuuua

SEQ ID NO: 1630047 - RNA, 19 nt, Homo sapiens
  misc_RNA (1)...(19): siRNA sense strand
gauauucuaagaucacagu

SEQ ID NO: 1630048 - RNA, 19 nt, Homo sapiens
  misc_RNA (1)...(19): siRNA sense strand
gaccuaaugacagcccaua

SEQ ID NO: 1630049 - RNA, 19 nt, Homo sapiens
  misc_RNA (1)...(19): siRNA sense strand
guggucgccugcuuuaaca

SEQ ID NO: 1630050 - RNA, 19 nt, Homo sapiens
  misc_RNA (1)...(19): siRNA sense strand
aacagaauaucucgggaau

SEQ ID NO: 1630051 - RNA, 19 nt, Homo sapiens
  misc_RNA (1)...(19): siRNA sense strand
gaauggacucagaaguaug

SEQ ID NO: 1630052 - RNA, 19 nt, Homo sapiens
  misc_RNA (1)...(19): siRNA sense strand
ucucgggaauggacucaga

SEQ ID NO: 1630053 - RNA, 19 nt, Homo sapiens
  misc_RNA (1)...(19): siRNA sense strand
aaugacagcccauaucaag

SEQ ID NO: 1630054 - RNA, 19 nt, Homo sapiens
  misc_RNA (1)...(19): siRNA sense strand
ccuaaugacagcccauauc

SEQ ID NO: 1630055 - RNA, 19 nt, Homo sapiens
  misc_RNA (1)...(19): siRNA sense strand
gucgccugcuuuaacaauu

SEQ ID NO: 1630056 - RNA, 19 nt, Homo sapiens
  misc_RNA (1)...(19): siRNA sense strand
uggcagcauuugucucgau

SEQ ID NO: 1630057 - RNA, 19 nt, Homo sapiens
  misc_RNA (1)...(19): siRNA sense strand
ggucgccugcuuuaacaau

SEQ ID NO: 1630058 - RNA, 19 nt, Homo sapiens
  misc_RNA (1)...(19): siRNA sense strand
ggaauggacucagaaguau

SEQ ID NO: 1630059 - RNA, 19 nt, Homo sapiens
  misc_RNA (1)...(19): siRNA sense strand
gggaauggacucagaagua

SEQ ID NO: 1630060 - RNA, 19 nt, Homo sapiens
  misc_RNA (1)...(19): siRNA sense strand
ucagaaguaugccauguga

SEQ ID NO: 1630061 - RNA, 19 nt, Homo sapiens
  misc_RNA (1)...(19): siRNA sense strand
aaacagacagagauaagua

SEQ ID NO: 1630062 - RNA, 19 nt, Homo sapiens
  misc_RNA (1)...(19): siRNA sense strand
cagaauaucucgggaaugg

SEQ ID NO: 1630063 - RNA, 19 nt, Homo sapiens
  misc_RNA (1)...(19): siRNA sense strand
gcauuugucucgauauucu

SEQ ID NO: 1630064 - RNA, 19 nt, Homo sapiens
  misc_RNA (1)...(19): siRNA sense strand
cagcauuugucucgauauu

SEQ ID NO: 1630065 - RNA, 19 nt, Homo sapiens
  misc_RNA (1)...(19): siRNA sense strand
ccacaauuaugggaccuaa

SEQ ID NO: 1630066 - RNA, 19 nt, Homo sapiens
  misc_RNA (1)...(19): siRNA sense strand
ggcagcauuugucucgaua

SEQ ID NO: 1630067 - RNA, 19 nt, Homo sapiens
  misc_RNA (1)...(19): siRNA sense strand
ucacaguggucgccugcuu

SEQ ID NO: 1630068 - RNA, 19 nt, Homo sapiens
  misc_RNA (1)...(19): siRNA sense strand
ucgccugcuuuaacaauuu

SEQ ID NO: 1630069 - RNA, 19 nt, Homo sapiens
  misc_RNA (1)...(19): siRNA sense strand
cuaaugacagcccauauca

SEQ ID NO: 1630070 - RNA, 19 nt, Homo sapiens
  misc_RNA (1)...(19): siRNA sense strand
acaguggucgccugcuuua

SEQ ID NO: 1630071 - RNA, 19 nt, Homo sapiens
  misc_RNA (1)...(19): siRNA sense strand
gauauucuaagaucacagu

SEQ ID NO: 1630072 - RNA, 19 nt, Homo sapiens
  misc_RNA (1)...(19): siRNA sense strand
gaccuaaugacagcccaua

SEQ ID NO: 1630073 - RNA, 19 nt, Homo sapiens
  misc_RNA (1)...(19): siRNA sense strand
guggucgccugcuuuaaca

SEQ ID NO: 1630074 - RNA, 19 nt, Homo sapiens
  misc_RNA (1)...(19): siRNA sense strand
aacagaauaucucgggaau

SEQ ID NO: 1630075 - RNA, 19 nt, Homo sapiens
  misc_RNA (1)...(19): siRNA sense strand
gaauggacucagaaguaug

SEQ ID NO: 1630076 - RNA, 19 nt, Homo sapiens
  misc_RNA (1)...(19): siRNA sense strand
ucucgggaauggacucaga

SEQ ID NO: 1630077 - RNA, 19 nt, Homo sapiens
  misc_RNA (1)...(19): siRNA sense strand
aaugacagcccauaucaag

SEQ ID NO: 1630078 - RNA, 19 nt, Homo sapiens
  misc_RNA (1)...(19): siRNA sense strand
ccuaaugacagcccauauc

SEQ ID NO: 1630079 - RNA, 19 nt, Homo sapiens
  misc_RNA (1)...(19): siRNA sense strand
gucgccugcuuuaacaauu

SEQ ID NO: 1630080 - RNA, 19 nt, Homo sapiens
  misc_RNA (1)...(19): siRNA sense strand
uggcagcauuugucucgau

SEQ ID NO: 1630081 - RNA, 19 nt, Homo sapiens
  misc_RNA (1)...(19): siRNA sense strand
ggucgccugcuuuaacaau

SEQ ID NO: 1630082 - RNA, 19 nt, Homo sapiens
  misc_RNA (1)...(19): siRNA sense strand
ggaauggacucagaaguau

SEQ ID NO: 1630083 - RNA, 19 nt, Homo sapiens
  misc_RNA (1)...(19): siRNA sense strand
gggaauggacucagaagua

SEQ ID NO: 1630084 - RNA, 19 nt, Homo sapiens
  misc_RNA (1)...(19): siRNA sense strand
ucagaaguaugccauguga

SEQ ID NO: 1630085 - RNA, 19 nt, Homo sapiens
  misc_RNA (1)...(19): siRNA sense strand
aaacagacagagauaagua

SEQ ID NO: 1630086 - RNA, 19 nt, Homo sapiens
  misc_RNA (1)...(19): siRNA sense strand
cagaauaucucgggaaugg

SEQ ID NO: 1630087 - RNA, 19 nt, Homo sapiens
  misc_RNA (1)...(19): siRNA sense strand
gcauuugucucgauauucu

SEQ ID NO: 1630088 - RNA, 19 nt, Homo sapiens
  misc_RNA (1)...(19): siRNA sense strand
cagcauuugucucgauauu

SEQ ID NO: 1630089 - RNA, 19 nt, Homo sapiens
  misc_RNA (1)...(19): siRNA sense strand
ccacaauuaugggaccuaa

SEQ ID NO: 1630090 - RNA, 19 nt, Homo sapiens
  misc_RNA (1)...(19): siRNA sense strand
ggcagcauuugucucgaua

SEQ ID NO: 1630091 - RNA, 19 nt, Homo sapiens
  misc_RNA (1)...(19): siRNA sense strand
ucacaguggucgccugcuu

SEQ ID NO: 1630092 - RNA, 19 nt, Homo sapiens
  misc_RNA (1)...(19): siRNA sense strand
ucgccugcuuuaacaauuu

SEQ ID NO: 1630093 - RNA, 19 nt, Homo sapiens
  misc_RNA (1)...(19): siRNA sense strand
cuaaugacagcccauauca

SEQ ID NO: 1630094 - RNA, 19 nt, Homo sapiens
  misc_RNA (1)...(19): siRNA sense strand
acaguggucgccugcuuua

SEQ ID NO: 1630095 - RNA, 19 nt, Homo sapiens
  misc_RNA (1)...(19): siRNA sense strand
gauauucuaagaucacagu

SEQ ID NO: 1630096 - RNA, 19 nt, Homo sapiens
  misc_RNA (1)...(19): siRNA sense strand
gaccuaaugacagcccaua

SEQ ID NO: 1630097 - RNA, 19 nt, Homo sapiens
  misc_RNA (1)...(19): siRNA sense strand
guggucgccugcuuuaaca

SEQ ID NO: 1630098 - RNA, 19 nt, Homo sapiens
  misc_RNA (1)...(19): siRNA sense strand
aacagaauaucucgggaau

SEQ ID NO: 1630099 - RNA, 19 nt, Homo sapiens
  misc_RNA (1)...(19): siRNA sense strand
gaauggacucagaaguaug

SEQ ID NO: 1630100 - RNA, 19 nt, Homo sapiens
  misc_RNA (1)...(19): siRNA sense strand
ucucgggaauggacucaga

SEQ ID NO: 1630101 - RNA, 19 nt, Homo sapiens
  misc_RNA (1)...(19): siRNA sense strand
aaugacagcccauaucaag

SEQ ID NO: 1630102 - RNA, 19 nt, Homo sapiens
  misc_RNA (1)...(19): siRNA sense strand
ccuaaugacagcccauauc

SEQ ID NO: 1630103 - RNA, 19 nt, Homo sapiens
  misc_RNA (1)...(19): siRNA sense strand
gucgccugcuuuaacaauu

SEQ ID NO: 1630104 - RNA, 19 nt, Homo sapiens
  misc_RNA (1)...(19): siRNA sense strand
uggcagcauuugucucgau

SEQ ID NO: 1630105 - RNA, 19 nt, Homo sapiens
  misc_RNA (1)...(19): siRNA sense strand
ggucgccugcuuuaacaau

SEQ ID NO: 1630106 - RNA, 19 nt, Homo sapiens
  misc_RNA (1)...(19): siRNA sense strand
aaacagacagagauaagua

SEQ ID NO: 1630107 - RNA, 19 nt, Homo sapiens
  misc_RNA (1)...(19): siRNA sense strand
gcauuugucucgauauucu

SEQ ID NO: 1630108 - RNA, 19 nt, Homo sapiens
  misc_RNA (1)...(19): siRNA sense strand
cagcauuugucucgauauu

SEQ ID NO: 1630109 - RNA, 19 nt, Homo sapiens
  misc_RNA (1)...(19): siRNA sense strand
ccacaauuaugggaccuaa

SEQ ID NO: 1630110 - RNA, 19 nt, Homo sapiens
  misc_RNA (1)...(19): siRNA sense strand
ggcagcauuugucucgaua

SEQ ID NO: 1630111 - RNA, 19 nt, Homo sapiens
  misc_RNA (1)...(19): siRNA sense strand
ucacaguggucgccugcuu

SEQ ID NO: 1630112 - RNA, 19 nt, Homo sapiens
  misc_RNA (1)...(19): siRNA sense strand
gcacggaucuauaaaacag

SEQ ID NO: 1630113 - RNA, 19 nt, Homo sapiens
  misc_RNA (1)...(19): siRNA sense strand
ucgccugcuuuaacaauuu

SEQ ID NO: 1630114 - RNA, 19 nt, Homo sapiens
  misc_RNA (1)...(19): siRNA sense strand
cuaaugacagcccauauca

SEQ ID NO: 1630115 - RNA, 19 nt, Homo sapiens
  misc_RNA (1)...(19): siRNA sense strand
acaguggucgccugcuuua

SEQ ID NO: 1630116 - RNA, 19 nt, Homo sapiens
  misc_RNA (1)...(19): siRNA sense strand
gauauucuaagaucacagu

SEQ ID NO: 1630117 - RNA, 19 nt, Homo sapiens
  misc_RNA (1)...(19): siRNA sense strand
gaccuaaugacagcccaua

SEQ ID NO: 1630118 - RNA, 19 nt, Homo sapiens
  misc_RNA (1)...(19): siRNA sense strand
guggucgccugcuuuaaca

SEQ ID NO: 1630119 - RNA, 19 nt, Homo sapiens
  misc_RNA (1)...(19): siRNA sense strand
aaugacagcccauaucaag

SEQ ID NO: 1630120 - RNA, 19 nt, Homo sapiens
  misc_RNA (1)...(19): siRNA sense strand
ccuaaugacagcccauauc

SEQ ID NO: 1630121 - RNA, 19 nt, Homo sapiens
  misc_RNA (1)...(19): siRNA sense strand
gucgccugcuuuaacaauu

SEQ ID NO: 1630122 - RNA, 19 nt, Homo sapiens
  misc_RNA (1)...(19): siRNA sense strand
uggcagcauuugucucgau

SEQ ID NO: 1630123 - RNA, 19 nt, Homo sapiens
  misc_RNA (1)...(19): siRNA sense strand
ggucgccugcuuuaacaau

SEQ ID NO: 1630124 - RNA, 19 nt, Homo sapiens
  misc_RNA (1)...(19): siRNA sense strand
ggaauggacucagaaguau

SEQ ID NO: 1630125 - RNA, 19 nt, Homo sapiens
  misc_RNA (1)...(19): siRNA sense strand
gggaauggacucagaagua

SEQ ID NO: 1630126 - RNA, 19 nt, Homo sapiens
  misc_RNA (1)...(19): siRNA sense strand
ucagaaguaugccauguga

SEQ ID NO: 1630127 - RNA, 19 nt, Homo sapiens
  misc_RNA (1)...(19): siRNA sense strand
aaacagacagagauaagua

SEQ ID NO: 1630128 - RNA, 19 nt, Homo sapiens
  misc_RNA (1)...(19): siRNA sense strand
cagaauaucucgggaaugg

SEQ ID NO: 1630129 - RNA, 19 nt, Homo sapiens
  misc_RNA (1)...(19): siRNA sense strand
gcauuugucucgauauucu

SEQ ID NO: 1630130 - RNA, 19 nt, Homo sapiens
  misc_RNA (1)...(19): siRNA sense strand
cagcauuugucucgauauu

SEQ ID NO: 1630131 - RNA, 19 nt, Homo sapiens
  misc_RNA (1)...(19): siRNA sense strand
ccacaauuaugggaccuaa

SEQ ID NO: 1630132 - RNA, 19 nt, Homo sapiens
  misc_RNA (1)...(19): siRNA sense strand
ggcagcauuugucucgaua

SEQ ID NO: 1630133 - RNA, 19 nt, Homo sapiens
  misc_RNA (1)...(19): siRNA sense strand
ucacaguggucgccugcuu

SEQ ID NO: 1630134 - RNA, 19 nt, Homo sapiens
  misc_RNA (1)...(19): siRNA sense strand
ucgccugcuuuaacaauuu

SEQ ID NO: 1630135 - RNA, 19 nt, Homo sapiens
  misc_RNA (1)...(19): siRNA sense strand
cuaaugacagcccauauca

SEQ ID NO: 1630136 - RNA, 19 nt, Homo sapiens
  misc_RNA (1)...(19): siRNA sense strand
acaguggucgccugcuuua

SEQ ID NO: 1630137 - RNA, 19 nt, Homo sapiens
  misc_RNA (1)...(19): siRNA sense strand
gauauucuaagaucacagu

SEQ ID NO: 1630138 - RNA, 19 nt, Homo sapiens
  misc_RNA (1)...(19): siRNA sense strand
gaccuaaugacagcccaua

SEQ ID NO: 1630139 - RNA, 19 nt, Homo sapiens
  misc_RNA (1)...(19): siRNA sense strand
guggucgccugcuuuaaca

SEQ ID NO: 1630140 - RNA, 19 nt, Homo sapiens
  misc_RNA (1)...(19): siRNA sense strand
aacagaauaucucgggaau

SEQ ID NO: 1630141 - RNA, 19 nt, Homo sapiens
  misc_RNA (1)...(19): siRNA sense strand
gaauggacucagaaguaug

SEQ ID NO: 1630142 - RNA, 19 nt, Homo sapiens
  misc_RNA (1)...(19): siRNA sense strand
ucucgggaauggacucaga

SEQ ID NO: 1630143 - RNA, 19 nt, Homo sapiens
  misc_RNA (1)...(19): siRNA sense strand
aaugacagcccauaucaag

SEQ ID NO: 1630144 - RNA, 19 nt, Homo sapiens
  misc_RNA (1)...(19): siRNA sense strand
ccuaaugacagcccauauc

SEQ ID NO: 1630145 - RNA, 19 nt, Homo sapiens
  misc_RNA (1)...(19): siRNA sense strand
gucgccugcuuuaacaauu

SEQ ID NO: 1630146 - RNA, 19 nt, Homo sapiens
  misc_RNA (1)...(19): siRNA sense strand
uggcagcauuugucucgau

SEQ ID NO: 1630147 - RNA, 19 nt, Homo sapiens
  misc_RNA (1)...(19): siRNA sense strand
ggucgccugcuuuaacaau

SEQ ID NO: 1630148 - RNA, 19 nt, Homo sapiens
  misc_RNA (1)...(19): siRNA sense strand
ggaagaacaucgagaagga

SEQ ID NO: 1630149 - RNA, 19 nt, Homo sapiens
  misc_RNA (1)...(19): siRNA sense strand
ggaccaacauccaagagaa

SEQ ID NO: 1630150 - RNA, 19 nt, Homo sapiens
  misc_RNA (1)...(19): siRNA sense strand
gcccauaucugcuuaguca

SEQ ID NO: 1630151 - RNA, 19 nt, Homo sapiens
  misc_RNA (1)...(19): siRNA sense strand
gcagugggauaguguggua

SEQ ID NO: 1630152 - RNA, 19 nt, Homo sapiens
  misc_RNA (1)...(19): siRNA sense strand
gaacagcucagccaguuga

SEQ ID NO: 1630153 - RNA, 19 nt, Homo sapiens
  misc_RNA (1)...(19): siRNA sense strand
gaaugaguaugucaagaug

SEQ ID NO: 1630154 - RNA, 19 nt, Homo sapiens
  misc_RNA (1)...(19): siRNA sense strand
ggaucgagcuuucuaugga

SEQ ID NO: 1630155 - RNA, 19 nt, Homo sapiens
  misc_RNA (1)...(19): siRNA sense strand
gggaacagcucagccaguu

SEQ ID NO: 1630156 - RNA, 19 nt, Homo sapiens
  misc_RNA (1)...(19): siRNA sense strand
guccaaauuucuucaggua

SEQ ID NO: 1630157 - RNA, 19 nt, Homo sapiens
  misc_RNA (1)...(19): siRNA sense strand
gagaaugcaggcaccguua

SEQ ID NO: 1630158 - RNA, 19 nt, Homo sapiens
  misc_RNA (1)...(19): siRNA sense strand
acacggagccgguauguga

SEQ ID NO: 1630159 - RNA, 19 nt, Homo sapiens
  misc_RNA (1)...(19): siRNA sense strand
ccaaauuucuucagguaca

SEQ ID NO: 1630160 - RNA, 19 nt, Homo sapiens
  misc_RNA (1)...(19): siRNA sense strand
gagaaugaguaugucaaga

SEQ ID NO: 1630161 - RNA, 19 nt, Homo sapiens
  misc_RNA (1)...(19): siRNA sense strand
guuaggauauucucuaguc

SEQ ID NO: 1630162 - RNA, 19 nt, Homo sapiens
  misc_RNA (1)...(19): siRNA sense strand
gggccaagguggaggugaa

SEQ ID NO: 1630163 - RNA, 19 nt, Homo sapiens
  misc_RNA (1)...(19): siRNA sense strand
gcaggcaccguuaggauau

SEQ ID NO: 1630164 - RNA, 19 nt, Homo sapiens
  misc_RNA (1)...(19): siRNA sense strand
ccauggcaauugacacauu

SEQ ID NO: 1630165 - RNA, 19 nt, Homo sapiens
  misc_RNA (1)...(19): siRNA sense strand
caacaaacugcuccuggaa

SEQ ID NO: 1630166 - RNA, 19 nt, Homo sapiens
  misc_RNA (1)...(19): siRNA sense strand
guucugcgacuaccuguuu

SEQ ID NO: 1630167 - RNA, 19 nt, Homo sapiens
  misc_RNA (1)...(19): siRNA sense strand
gcaucgagcaggccuguga

SEQ ID NO: 1630168 - RNA, 19 nt, Homo sapiens
  misc_RNA (1)...(19): siRNA sense strand
gaacaucgagaaggacaau

SEQ ID NO: 1630169 - RNA, 19 nt, Homo sapiens
  misc_RNA (1)...(19): siRNA sense strand
ucaaagccuuggaugacuu

SEQ ID NO: 1630170 - RNA, 19 nt, Homo sapiens
  misc_RNA (1)...(19): siRNA sense strand
ggaaaaccgguccaaauuu

SEQ ID NO: 1630171 - RNA, 19 nt, Homo sapiens
  misc_RNA (1)...(19): siRNA sense strand
gaggugaacaucccuagga

SEQ ID NO: 1630172 - RNA, 19 nt, Homo sapiens
  misc_RNA (1)...(19): siRNA sense strand
gaagaccgacaacaaacug

SEQ ID NO: 1630173 - RNA, 19 nt, Homo sapiens
  misc_RNA (1)...(19): siRNA sense strand
caaugaagccauggcaauu

SEQ ID NO: 1630174 - RNA, 19 nt, Homo sapiens
  misc_RNA (1)...(19): siRNA sense strand
acacaaguacucccugaaa

SEQ ID NO: 1630175 - RNA, 19 nt, Homo sapiens
  misc_RNA (1)...(19): siRNA sense strand
aggaaggccucgcccauau

SEQ ID NO: 1630176 - RNA, 19 nt, Homo sapiens
  misc_RNA (1)...(19): siRNA sense strand
gccaagaagcagugggaua

SEQ ID NO: 1630177 - RNA, 19 nt, Homo sapiens
  misc_RNA (1)...(19): siRNA sense strand
ccaagaagcagugggauag

SEQ ID NO: 1630178 - RNA, 19 nt, Homo sapiens
  misc_RNA (1)...(19): siRNA sense strand
ucucuagucuucacguuuc

SEQ ID NO: 1630179 - RNA, 19 nt, Homo sapiens
  misc_RNA (1)...(19): siRNA sense strand
ccaaugaagccauggcaau

SEQ ID NO: 1630180 - RNA, 19 nt, Homo sapiens
  misc_RNA (1)...(19): siRNA sense strand
ccaguucugaagaggauua

SEQ ID NO: 1630181 - RNA, 19 nt, Homo sapiens
  misc_RNA (1)...(19): siRNA sense strand
gauauucucuagucuucac

SEQ ID NO: 1630182 - RNA, 19 nt, Homo sapiens
  misc_RNA (1)...(19): siRNA sense strand
ggaaaggcaauugcucuca

SEQ ID NO: 1630183 - RNA, 19 nt, Homo sapiens
  misc_RNA (1)...(19): siRNA sense strand
cgaggagccugaggacaug

SEQ ID NO: 1630184 - RNA, 19 nt, Homo sapiens
  misc_RNA (1)...(19): siRNA sense strand
ugaggaagaacaucgagaa

SEQ ID NO: 1630185 - RNA, 19 nt, Homo sapiens
  misc_RNA (1)...(19): siRNA sense strand
caggaaggccucgcccaua

SEQ ID NO: 1630186 - RNA, 19 nt, Homo sapiens
  misc_RNA (1)...(19): siRNA sense strand
cgaacuuucugaccaagag

SEQ ID NO: 1630187 - RNA, 19 nt, Homo sapiens
  misc_RNA (1)...(19): siRNA sense strand
acaaguacucccugaaaga

SEQ ID NO: 1630188 - RNA, 19 nt, Homo sapiens
  misc_RNA (1)...(19): siRNA sense strand
gaacaucccuaggaaaagg

SEQ ID NO: 1630189 - RNA, 19 nt, Homo sapiens
  misc_RNA (1)...(19): siRNA sense strand
ccuuggagcgguucuauga

SEQ ID NO: 1630190 - RNA, 19 nt, Homo sapiens
  misc_RNA (1)...(19): siRNA sense strand
caagagaaugaguauguca

SEQ ID NO: 1630191 - RNA, 19 nt, Homo sapiens
  misc_RNA (1)...(19): siRNA sense strand
ggaagucaaagccuuggau

SEQ ID NO: 1630192 - RNA, 19 nt, Homo sapiens
  misc_RNA (1)...(19): siRNA sense strand
cacaaguacucccugaaag

SEQ ID NO: 1630193 - RNA, 19 nt, Homo sapiens
  misc_RNA (1)...(19): siRNA sense strand
ccucgcccauaucugcuua

SEQ ID NO: 1630194 - RNA, 19 nt, Homo sapiens
  misc_RNA (1)...(19): siRNA sense strand
gaaggccucgcccauaucu

SEQ ID NO: 1630195 - RNA, 19 nt, Homo sapiens
  misc_RNA (1)...(19): siRNA sense strand
augaagccauggcaauuga

SEQ ID NO: 1630196 - RNA, 19 nt, Homo sapiens
  misc_RNA (1)...(19): siRNA sense strand
ccaagagaaugaguauguc

SEQ ID NO: 1630197 - RNA, 19 nt, Homo sapiens
  misc_RNA (1)...(19): siRNA sense strand
agaaugaguaugucaagau

SEQ ID NO: 1630198 - RNA, 19 nt, Homo sapiens
  misc_RNA (1)...(19): siRNA sense strand
aggauauucucuagucuuc

SEQ ID NO: 1630199 - RNA, 19 nt, Homo sapiens
  misc_RNA (1)...(19): siRNA sense strand
agccuuggaugacuucuau

SEQ ID NO: 1630200 - RNA, 19 nt, Homo sapiens
  misc_RNA (1)...(19): siRNA sense strand
gcuagccgccuuucagaca

SEQ ID NO: 1630201 - RNA, 19 nt, Homo sapiens
  misc_RNA (1)...(19): siRNA sense strand
gaccaacauccaagagaau

SEQ ID NO: 1630202 - RNA, 19 nt, Homo sapiens
  misc_RNA (1)...(19): siRNA sense strand
uccaagagaaugaguaugu

SEQ ID NO: 1630203 - RNA, 19 nt, Homo sapiens
  misc_RNA (1)...(19): siRNA sense strand
ggacagugugaaagagaau

SEQ ID NO: 1630204 - RNA, 19 nt, Homo sapiens
  misc_RNA (1)...(19): siRNA sense strand
gcugguggacagugugaaa

SEQ ID NO: 1630205 - RNA, 19 nt, Homo sapiens
  misc_RNA (1)...(19): siRNA sense strand
acaaacugcuccuggaaaa

SEQ ID NO: 1630206 - RNA, 19 nt, Homo sapiens
  misc_RNA (1)...(19): siRNA sense strand
cagugaagaccgacaacaa

SEQ ID NO: 1630207 - RNA, 19 nt, Homo sapiens
  misc_RNA (1)...(19): siRNA sense strand
ugaaccggaucgagcuuuc

SEQ ID NO: 1630208 - RNA, 19 nt, Homo sapiens
  misc_RNA (1)...(19): siRNA sense strand
ccuuggaugacuucuauaa

SEQ ID NO: 1630209 - RNA, 19 nt, Homo sapiens
  misc_RNA (1)...(19): siRNA sense strand
aagaagcagugggauagug

SEQ ID NO: 1630210 - RNA, 19 nt, Homo sapiens
  misc_RNA (1)...(19): siRNA sense strand
gagggugauuccaguucug

SEQ ID NO: 1630211 - RNA, 19 nt, Homo sapiens
  misc_RNA (1)...(19): siRNA sense strand
caagagggugauuccaguu

SEQ ID NO: 1630212 - RNA, 19 nt, Homo sapiens
  misc_RNA (1)...(19): siRNA sense strand
cauccaagagaaugaguau

SEQ ID NO: 1630213 - RNA, 19 nt, Homo sapiens
  misc_RNA (1)...(19): siRNA sense strand
caaauuucuucagguacau

SEQ ID NO: 1630214 - RNA, 19 nt, Homo sapiens
  misc_RNA (1)...(19): siRNA sense strand
agugaagaccgacaacaaa

SEQ ID NO: 1630215 - RNA, 19 nt, Homo sapiens
  misc_RNA (1)...(19): siRNA sense strand
gggcuuaccacaccaucga

SEQ ID NO: 1630216 - RNA, 19 nt, Homo sapiens
  misc_RNA (1)...(19): siRNA sense strand
ggaaggccucgcccauauc

SEQ ID NO: 1630217 - RNA, 19 nt, Homo sapiens
  misc_RNA (1)...(19): siRNA sense strand
gagcccaaccgccaguuca

SEQ ID NO: 1630218 - RNA, 19 nt, Homo sapiens
  misc_RNA (1)...(19): siRNA sense strand
gaagccauggcaauugaca

SEQ ID NO: 1630219 - RNA, 19 nt, Homo sapiens
  misc_RNA (1)...(19): siRNA sense strand
ggugaacaucccuaggaaa

SEQ ID NO: 1630220 - RNA, 19 nt, Homo sapiens
  misc_RNA (1)...(19): siRNA sense strand
uggacagugugaaagagaa

SEQ ID NO: 1630221 - RNA, 19 nt, Homo sapiens
  misc_RNA (1)...(19): siRNA sense strand
caaguacucccugaaagag

SEQ ID NO: 1630222 - RNA, 19 nt, Homo sapiens
  misc_RNA (1)...(19): siRNA sense strand
ccugccagcugcggguuaa

SEQ ID NO: 1630223 - RNA, 19 nt, Homo sapiens
  misc_RNA (1)...(19): siRNA sense strand
ggaacagcucagccaguug

SEQ ID NO: 1630224 - RNA, 19 nt, Homo sapiens
  misc_RNA (1)...(19): siRNA sense strand
ccaacauccaagagaauga

SEQ ID NO: 1630225 - RNA, 19 nt, Homo sapiens
  misc_RNA (1)...(19): siRNA sense strand
gggaccaacauccaagaga

SEQ ID NO: 1630226 - RNA, 19 nt, Homo sapiens
  misc_RNA (1)...(19): siRNA sense strand
ccgaggagccugaggacau

SEQ ID NO: 1630227 - RNA, 19 nt, Homo sapiens
  misc_RNA (1)...(19): siRNA sense strand
gacucaagcagguggagaa

SEQ ID NO: 1630228 - RNA, 19 nt, Homo sapiens
  misc_RNA (1)...(19): siRNA sense strand
gugaacaucccuaggaaaa

SEQ ID NO: 1630229 - RNA, 19 nt, Homo sapiens
  misc_RNA (1)...(19): siRNA sense strand
gaggaagaacaucgagaag

SEQ ID NO: 1630230 - RNA, 19 nt, Homo sapiens
  misc_RNA (1)...(19): siRNA sense strand
ggaaaaggaaaggcaauug

SEQ ID NO: 1630231 - RNA, 19 nt, Homo sapiens
  misc_RNA (1)...(19): siRNA sense strand
aaaccgguccaaauuucuu

SEQ ID NO: 1630232 - RNA, 19 nt, Homo sapiens
  misc_RNA (1)...(19): siRNA sense strand
auucuccgcuucccuguuc

SEQ ID NO: 1630233 - RNA, 19 nt, Homo sapiens
  misc_RNA (1)...(19): siRNA sense strand
ugcaggcaccguuaggaua

SEQ ID NO: 1630234 - RNA, 19 nt, Homo sapiens
  misc_RNA (1)...(19): siRNA sense strand
gguggccagcccaggauuu

SEQ ID NO: 1630235 - RNA, 19 nt, Homo sapiens
  misc_RNA (1)...(19): siRNA sense strand
gcagugaagaccgacaaca

SEQ ID NO: 1630236 - RNA, 19 nt, Homo sapiens
  misc_RNA (1)...(19): siRNA sense strand
ggagguaucuuuccugaga

SEQ ID NO: 1630237 - RNA, 19 nt, Homo sapiens
  misc_RNA (1)...(19): siRNA sense strand
ccacaucacuauuccauau

SEQ ID NO: 1630238 - RNA, 19 nt, Homo sapiens
  misc_RNA (1)...(19): siRNA sense strand
gaacuucuuuguauucucu

SEQ ID NO: 1630239 - RNA, 19 nt, Homo sapiens
  misc_RNA (1)...(19): siRNA sense strand
caacaaugacgggaacuua

SEQ ID NO: 1630240 - RNA, 19 nt, Homo sapiens
  misc_RNA (1)...(19): siRNA sense strand
guaaaucccuauccagagu

SEQ ID NO: 1630241 - RNA, 19 nt, Homo sapiens
  misc_RNA (1)...(19): siRNA sense strand
ucacacgacugaugaacuu

SEQ ID NO: 1630242 - RNA, 19 nt, Homo sapiens
  misc_RNA (1)...(19): siRNA sense strand
gcucuugccucuguaacua

SEQ ID NO: 1630243 - RNA, 19 nt, Homo sapiens
  misc_RNA (1)...(19): siRNA sense strand
cugaugaacuucuuuguau

SEQ ID NO: 1630244 - RNA, 19 nt, Homo sapiens
  misc_RNA (1)...(19): siRNA sense strand
gcagggauccgcaacaaug

SEQ ID NO: 1630245 - RNA, 19 nt, Homo sapiens
  misc_RNA (1)...(19): siRNA sense strand
gacgggaacuuagucauug

SEQ ID NO: 1630246 - RNA, 19 nt, Homo sapiens
  misc_RNA (1)...(19): siRNA sense strand
gccauuggauccuguaaau

SEQ ID NO: 1630247 - RNA, 19 nt, Homo sapiens
  misc_RNA (1)...(19): siRNA sense strand
gauugcccuugauuucuua

SEQ ID NO: 1630248 - RNA, 19 nt, Homo sapiens
  misc_RNA (1)...(19): siRNA sense strand
gauucuggaugaccacauu

SEQ ID NO: 1630249 - RNA, 19 nt, Homo sapiens
  misc_RNA (1)...(19): siRNA sense strand
gacagucucuuacaguaca

SEQ ID NO: 1630250 - RNA, 19 nt, Homo sapiens
  misc_RNA (1)...(19): siRNA sense strand
gaugaacuucuuuguauuc

SEQ ID NO: 1630251 - RNA, 19 nt, Homo sapiens
  misc_RNA (1)...(19): siRNA sense strand
gagcuucucuacagguaca

SEQ ID NO: 1630252 - RNA, 19 nt, Homo sapiens
  misc_RNA (1)...(19): siRNA sense strand
gggcagggauccgcaacaa

SEQ ID NO: 1630253 - RNA, 19 nt, Homo sapiens
  misc_RNA (1)...(19): siRNA sense strand
gcauauaugggcuucauca

SEQ ID NO: 1630254 - RNA, 19 nt, Homo sapiens
  misc_RNA (1)...(19): siRNA sense strand
uauaugggcuucaucaacu

SEQ ID NO: 1630255 - RNA, 19 nt, Homo sapiens
  misc_RNA (1)...(19): siRNA sense strand
ucaugacuauggagauauu

SEQ ID NO: 1630256 - RNA, 19 nt, Homo sapiens
  misc_RNA (1)...(19): siRNA sense strand
cccaugggcuucuugaaug

SEQ ID NO: 1630257 - RNA, 19 nt, Homo sapiens
  misc_RNA (1)...(19): siRNA sense strand
cagugucgauucuggauga

SEQ ID NO: 1630258 - RNA, 19 nt, Homo sapiens
  misc_RNA (1)...(19): siRNA sense strand
ucaaucagaggaagaaguu

SEQ ID NO: 1630259 - RNA, 19 nt, Homo sapiens
  misc_RNA (1)...(19): siRNA sense strand
ucaaccuucuuucucauga

SEQ ID NO: 1630260 - RNA, 19 nt, Homo sapiens
  misc_RNA (1)...(19): siRNA sense strand
ggaaguccagagauaguug

SEQ ID NO: 1630261 - RNA, 19 nt, Homo sapiens
  misc_RNA (1)...(19): siRNA sense strand
ggugauugcccuugauuuc

SEQ ID NO: 1630262 - RNA, 19 nt, Homo sapiens
  misc_RNA (1)...(19): siRNA sense strand
agagauaguugugcuuuua

SEQ ID NO: 1630263 - RNA, 19 nt, Homo sapiens
  misc_RNA (1)...(19): siRNA sense strand
ugauugcccuugauuucuu

SEQ ID NO: 1630264 - RNA, 19 nt, Homo sapiens
  misc_RNA (1)...(19): siRNA sense strand
guacaagauuugggaaggu

SEQ ID NO: 1630265 - RNA, 19 nt, Homo sapiens
  misc_RNA (1)...(19): siRNA sense strand
uugacagucucuuacagua

SEQ ID NO: 1630266 - RNA, 19 nt, Homo sapiens
  misc_RNA (1)...(19): siRNA sense strand
ucaaauggagguaucuuuc

SEQ ID NO: 1630267 - RNA, 19 nt, Homo sapiens
  misc_RNA (1)...(19): siRNA sense strand
caucacuauuccauauuug

SEQ ID NO: 1630268 - RNA, 19 nt, Homo sapiens
  misc_RNA (1)...(19): siRNA sense strand
cgagaccacaucacuauuc

SEQ ID NO: 1630269 - RNA, 19 nt, Homo sapiens
  misc_RNA (1)...(19): siRNA sense strand
cuucuugaaugcauauaug

SEQ ID NO: 1630270 - RNA, 19 nt, Homo sapiens
  misc_RNA (1)...(19): siRNA sense strand
ccagagauaguugugcuuu

SEQ ID NO: 1630271 - RNA, 19 nt, Homo sapiens
  misc_RNA (1)...(19): siRNA sense strand
ggcuuuggcuucagugaca

SEQ ID NO: 1630272 - RNA, 19 nt, Homo sapiens
  misc_RNA (1)...(19): siRNA sense strand
guaacuauccccauucauu

SEQ ID NO: 1630273 - RNA, 19 nt, Homo sapiens
  misc_RNA (1)...(19): siRNA sense strand
gagguuucaucgggugauu

SEQ ID NO: 1630274 - RNA, 19 nt, Homo sapiens
  misc_RNA (1)...(19): siRNA sense strand
ugggagcucuugccucugu

SEQ ID NO: 1630275 - RNA, 19 nt, Homo sapiens
  misc_RNA (1)...(19): siRNA sense strand
uccaaaagcuacucaaaga

SEQ ID NO: 1630276 - RNA, 19 nt, Homo sapiens
  misc_RNA (1)...(19): siRNA sense strand
aaaucccuauccagaguuu

SEQ ID NO: 1630277 - RNA, 19 nt, Homo sapiens
  misc_RNA (1)...(19): siRNA sense strand
acaagggacugcguaucuu

SEQ ID NO: 1630278 - RNA, 19 nt, Homo sapiens
  misc_RNA (1)...(19): siRNA sense strand
cgacugaugaacuucuuug

SEQ ID NO: 1630279 - RNA, 19 nt, Homo sapiens
  misc_RNA (1)...(19): siRNA sense strand
agagugagcugugggacau

SEQ ID NO: 1630280 - RNA, 19 nt, Homo sapiens
  misc_RNA (1)...(19): siRNA sense strand
caaaagcuacucaaagaug

SEQ ID NO: 1630281 - RNA, 19 nt, Homo sapiens
  misc_RNA (1)...(19): siRNA sense strand
uaacuauccccauucauuu

SEQ ID NO: 1630282 - RNA, 19 nt, Homo sapiens
  misc_RNA (1)...(19): siRNA sense strand
gaccacaucacuauuccau

SEQ ID NO: 1630283 - RNA, 19 nt, Homo sapiens
  misc_RNA (1)...(19): siRNA sense strand
ggagcucuugccucuguaa

SEQ ID NO: 1630284 - RNA, 19 nt, Homo sapiens
  misc_RNA (1)...(19): siRNA sense strand
gcaacaaugacgggaacuu

SEQ ID NO: 1630285 - RNA, 19 nt, Homo sapiens
  misc_RNA (1)...(19): siRNA sense strand
gucaaauggagguaucuuu

SEQ ID NO: 1630286 - RNA, 19 nt, Homo sapiens
  misc_RNA (1)...(19): siRNA sense strand
cucaggagcuucucuacag

SEQ ID NO: 1630287 - RNA, 19 nt, Homo sapiens
  misc_RNA (1)...(19): siRNA sense strand
cuucaucaacuccuucuga

SEQ ID NO: 1630288 - RNA, 19 nt, Homo sapiens
  misc_RNA (1)...(19): siRNA sense strand
gguccacagugucgauucu

SEQ ID NO: 1630289 - RNA, 19 nt, Homo sapiens
  misc_RNA (1)...(19): siRNA sense strand
cuacgacugguacaagauu

SEQ ID NO: 1630290 - RNA, 19 nt, Homo sapiens
  misc_RNA (1)...(19): siRNA sense strand
uuacaguacaucaaucaga

SEQ ID NO: 1630291 - RNA, 19 nt, Homo sapiens
  misc_RNA (1)...(19): siRNA sense strand
caagggacugcguaucuuc

SEQ ID NO: 1630292 - RNA, 19 nt, Homo sapiens
  misc_RNA (1)...(19): siRNA sense strand
gaaguccagagauaguugu

SEQ ID NO: 1630293 - RNA, 19 nt, Homo sapiens
  misc_RNA (1)...(19): siRNA sense strand
ugaccacauuagccacuau

SEQ ID NO: 1630294 - RNA, 19 nt, Homo sapiens
  misc_RNA (1)...(19): siRNA sense strand
agauggaggugugcuguca

SEQ ID NO: 1630295 - RNA, 19 nt, Homo sapiens
  misc_RNA (1)...(19): siRNA sense strand
gacuauggagauauuguug

SEQ ID NO: 1630296 - RNA, 19 nt, Homo sapiens
  misc_RNA (1)...(19): siRNA sense strand
ugacuauggagauauuguu

SEQ ID NO: 1630297 - RNA, 19 nt, Homo sapiens
  misc_RNA (1)...(19): siRNA sense strand
gagaccacaucacuauucc

SEQ ID NO: 1630298 - RNA, 19 nt, Homo sapiens
  misc_RNA (1)...(19): siRNA sense strand
uacgacugguacaagauuu

SEQ ID NO: 1630299 - RNA, 19 nt, Homo sapiens
  misc_RNA (1)...(19): siRNA sense strand
acugaugaacuucuuugua

SEQ ID NO: 1630300 - RNA, 19 nt, Homo sapiens
  misc_RNA (1)...(19): siRNA sense strand
aggagcuucucuacaggua

SEQ ID NO: 1630301 - RNA, 19 nt, Homo sapiens
  misc_RNA (1)...(19): siRNA sense strand
ugacaaaccgagaccacau

SEQ ID NO: 1630302 - RNA, 19 nt, Homo sapiens
  misc_RNA (1)...(19): siRNA sense strand
cguauacucggcccucuga

SEQ ID NO: 1630303 - RNA, 19 nt, Homo sapiens
  misc_RNA (1)...(19): siRNA sense strand
aaaccgagaccacaucacu

SEQ ID NO: 1630304 - RNA, 19 nt, Homo sapiens
  misc_RNA (1)...(19): siRNA sense strand
gaucccaugggcuucuuga

SEQ ID NO: 1630305 - RNA, 19 nt, Homo sapiens
  misc_RNA (1)...(19): siRNA sense strand
cagaggaagaaguucagaa

SEQ ID NO: 1630306 - RNA, 19 nt, Homo sapiens
  misc_RNA (1)...(19): siRNA sense strand
guacaagcagaaucgaucu

SEQ ID NO: 1630307 - RNA, 19 nt, Homo sapiens
  misc_RNA (1)...(19): siRNA sense strand
gacaaaccgagaccacauc

SEQ ID NO: 1630308 - RNA, 19 nt, Homo sapiens
  misc_RNA (1)...(19): siRNA sense strand
uacaagggacugcguaucu

SEQ ID NO: 1630309 - RNA, 19 nt, Homo sapiens
  misc_RNA (1)...(19): siRNA sense strand
cagggauccgcaacaauga

SEQ ID NO: 1630310 - RNA, 19 nt, Homo sapiens
  misc_RNA (1)...(19): siRNA sense strand
aaucagaggaagaaguuca

SEQ ID NO: 1630311 - RNA, 19 nt, Homo sapiens
  misc_RNA (1)...(19): siRNA sense strand
gggacugcguaucuucuac

SEQ ID NO: 1630312 - RNA, 19 nt, Homo sapiens
  misc_RNA (1)...(19): siRNA sense strand
ggccauuggauccuguaaa

SEQ ID NO: 1630313 - RNA, 19 nt, Homo sapiens
  misc_RNA (1)...(19): siRNA sense strand
gggagcucuugccucugua

SEQ ID NO: 1630314 - RNA, 19 nt, Homo sapiens
  misc_RNA (1)...(19): siRNA sense strand
ggagguaucuuuccugaga

SEQ ID NO: 1630315 - RNA, 19 nt, Homo sapiens
  misc_RNA (1)...(19): siRNA sense strand
ccacaucacuauuccauau

SEQ ID NO: 1630316 - RNA, 19 nt, Homo sapiens
  misc_RNA (1)...(19): siRNA sense strand
gaacuucuuuguauucucu

SEQ ID NO: 1630317 - RNA, 19 nt, Homo sapiens
  misc_RNA (1)...(19): siRNA sense strand
caacaaugacgggaacuua

SEQ ID NO: 1630318 - RNA, 19 nt, Homo sapiens
  misc_RNA (1)...(19): siRNA sense strand
guaaaucccuauccagagu

SEQ ID NO: 1630319 - RNA, 19 nt, Homo sapiens
  misc_RNA (1)...(19): siRNA sense strand
ucacacgacugaugaacuu

SEQ ID NO: 1630320 - RNA, 19 nt, Homo sapiens
  misc_RNA (1)...(19): siRNA sense strand
gcucuugccucuguaacua

SEQ ID NO: 1630321 - RNA, 19 nt, Homo sapiens
  misc_RNA (1)...(19): siRNA sense strand
cugaugaacuucuuuguau

SEQ ID NO: 1630322 - RNA, 19 nt, Homo sapiens
  misc_RNA (1)...(19): siRNA sense strand
gcagggauccgcaacaaug

SEQ ID NO: 1630323 - RNA, 19 nt, Homo sapiens
  misc_RNA (1)...(19): siRNA sense strand
gacgggaacuuagucauug

SEQ ID NO: 1630324 - RNA, 19 nt, Homo sapiens
  misc_RNA (1)...(19): siRNA sense strand
gccauuggauccuguaaau

SEQ ID NO: 1630325 - RNA, 19 nt, Homo sapiens
  misc_RNA (1)...(19): siRNA sense strand
gauugcccuugauuucuua

SEQ ID NO: 1630326 - RNA, 19 nt, Homo sapiens
  misc_RNA (1)...(19): siRNA sense strand
gauucuggaugaccacauu

SEQ ID NO: 1630327 - RNA, 19 nt, Homo sapiens
  misc_RNA (1)...(19): siRNA sense strand
gacagucucuuacaguaca

SEQ ID NO: 1630328 - RNA, 19 nt, Homo sapiens
  misc_RNA (1)...(19): siRNA sense strand
gaugaacuucuuuguauuc

SEQ ID NO: 1630329 - RNA, 19 nt, Homo sapiens
  misc_RNA (1)...(19): siRNA sense strand
gagcuucucuacagguaca

SEQ ID NO: 1630330 - RNA, 19 nt, Homo sapiens
  misc_RNA (1)...(19): siRNA sense strand
gggcagggauccgcaacaa

SEQ ID NO: 1630331 - RNA, 19 nt, Homo sapiens
  misc_RNA (1)...(19): siRNA sense strand
gcauauaugggcuucauca

SEQ ID NO: 1630332 - RNA, 19 nt, Homo sapiens
  misc_RNA (1)...(19): siRNA sense strand
uauaugggcuucaucaacu

SEQ ID NO: 1630333 - RNA, 19 nt, Homo sapiens
  misc_RNA (1)...(19): siRNA sense strand
ucaugacuauggagauauu

SEQ ID NO: 1630334 - RNA, 19 nt, Homo sapiens
  misc_RNA (1)...(19): siRNA sense strand
cccaugggcuucuugaaug

SEQ ID NO: 1630335 - RNA, 19 nt, Homo sapiens
  misc_RNA (1)...(19): siRNA sense strand
cagugucgauucuggauga

SEQ ID NO: 1630336 - RNA, 19 nt, Homo sapiens
  misc_RNA (1)...(19): siRNA sense strand
ucaaucagaggaagaaguu

SEQ ID NO: 1630337 - RNA, 19 nt, Homo sapiens
  misc_RNA (1)...(19): siRNA sense strand
ucaaccuucuuucucauga

SEQ ID NO: 1630338 - RNA, 19 nt, Homo sapiens
  misc_RNA (1)...(19): siRNA sense strand
ggaaguccagagauaguug

SEQ ID NO: 1630339 - RNA, 19 nt, Homo sapiens
  misc_RNA (1)...(19): siRNA sense strand
ggugauugcccuugauuuc

SEQ ID NO: 1630340 - RNA, 19 nt, Homo sapiens
  misc_RNA (1)...(19): siRNA sense strand
agagauaguugugcuuuua

SEQ ID NO: 1630341 - RNA, 19 nt, Homo sapiens
  misc_RNA (1)...(19): siRNA sense strand
ugauugcccuugauuucuu

SEQ ID NO: 1630342 - RNA, 19 nt, Homo sapiens
  misc_RNA (1)...(19): siRNA sense strand
guacaagauuugggaaggu

SEQ ID NO: 1630343 - RNA, 19 nt, Homo sapiens
  misc_RNA (1)...(19): siRNA sense strand
uugacagucucuuacagua

SEQ ID NO: 1630344 - RNA, 19 nt, Homo sapiens
  misc_RNA (1)...(19): siRNA sense strand
ucaaauggagguaucuuuc

SEQ ID NO: 1630345 - RNA, 19 nt, Homo sapiens
  misc_RNA (1)...(19): siRNA sense strand
caucacuauuccauauuug

SEQ ID NO: 1630346 - RNA, 19 nt, Homo sapiens
  misc_RNA (1)...(19): siRNA sense strand
cgagaccacaucacuauuc

SEQ ID NO: 1630347 - RNA, 19 nt, Homo sapiens
  misc_RNA (1)...(19): siRNA sense strand
cuucuugaaugcauauaug

SEQ ID NO: 1630348 - RNA, 19 nt, Homo sapiens
  misc_RNA (1)...(19): siRNA sense strand
ccagagauaguugugcuuu

SEQ ID NO: 1630349 - RNA, 19 nt, Homo sapiens
  misc_RNA (1)...(19): siRNA sense strand
ggcuuuggcuucagugaca

SEQ ID NO: 1630350 - RNA, 19 nt, Homo sapiens
  misc_RNA (1)...(19): siRNA sense strand
guaacuauccccauucauu

SEQ ID NO: 1630351 - RNA, 19 nt, Homo sapiens
  misc_RNA (1)...(19): siRNA sense strand
gagguuucaucgggugauu

SEQ ID NO: 1630352 - RNA, 19 nt, Homo sapiens
  misc_RNA (1)...(19): siRNA sense strand
ugggagcucuugccucugu

SEQ ID NO: 1630353 - RNA, 19 nt, Homo sapiens
  misc_RNA (1)...(19): siRNA sense strand
uccaaaagcuacucaaaga

SEQ ID NO: 1630354 - RNA, 19 nt, Homo sapiens
  misc_RNA (1)...(19): siRNA sense strand
aaaucccuauccagaguuu

SEQ ID NO: 1630355 - RNA, 19 nt, Homo sapiens
  misc_RNA (1)...(19): siRNA sense strand
acaagggacugcguaucuu

SEQ ID NO: 1630356 - RNA, 19 nt, Homo sapiens
  misc_RNA (1)...(19): siRNA sense strand
cgacugaugaacuucuuug

SEQ ID NO: 1630357 - RNA, 19 nt, Homo sapiens
  misc_RNA (1)...(19): siRNA sense strand
agagugagcugugggacau

SEQ ID NO: 1630358 - RNA, 19 nt, Homo sapiens
  misc_RNA (1)...(19): siRNA sense strand
caaaagcuacucaaagaug

SEQ ID NO: 1630359 - RNA, 19 nt, Homo sapiens
  misc_RNA (1)...(19): siRNA sense strand
uaacuauccccauucauuu

SEQ ID NO: 1630360 - RNA, 19 nt, Homo sapiens
  misc_RNA (1)...(19): siRNA sense strand
gaccacaucacuauuccau

SEQ ID NO: 1630361 - RNA, 19 nt, Homo sapiens
  misc_RNA (1)...(19): siRNA sense strand
ggagcucuugccucuguaa

SEQ ID NO: 1630362 - RNA, 19 nt, Homo sapiens
  misc_RNA (1)...(19): siRNA sense strand
gcaacaaugacgggaacuu

SEQ ID NO: 1630363 - RNA, 19 nt, Homo sapiens
  misc_RNA (1)...(19): siRNA sense strand
gucaaauggagguaucuuu

SEQ ID NO: 1630364 - RNA, 19 nt, Homo sapiens
  misc_RNA (1)...(19): siRNA sense strand
cucaggagcuucucuacag

SEQ ID NO: 1630365 - RNA, 19 nt, Homo sapiens
  misc_RNA (1)...(19): siRNA sense strand
cuucaucaacuccuucuga

SEQ ID NO: 1630366 - RNA, 19 nt, Homo sapiens
  misc_RNA (1)...(19): siRNA sense strand
gguccacagugucgauucu

SEQ ID NO: 1630367 - RNA, 19 nt, Homo sapiens
  misc_RNA (1)...(19): siRNA sense strand
cuacgacugguacaagauu

SEQ ID NO: 1630368 - RNA, 19 nt, Homo sapiens
  misc_RNA (1)...(19): siRNA sense strand
uuacaguacaucaaucaga

SEQ ID NO: 1630369 - RNA, 19 nt, Homo sapiens
  misc_RNA (1)...(19): siRNA sense strand
caagggacugcguaucuuc

SEQ ID NO: 1630370 - RNA, 19 nt, Homo sapiens
  misc_RNA (1)...(19): siRNA sense strand
gaaguccagagauaguugu

SEQ ID NO: 1630371 - RNA, 19 nt, Homo sapiens
  misc_RNA (1)...(19): siRNA sense strand
ugaccacauuagccacuau

SEQ ID NO: 1630372 - RNA, 19 nt, Homo sapiens
  misc_RNA (1)...(19): siRNA sense strand
agauggaggugugcuguca

SEQ ID NO: 1630373 - RNA, 19 nt, Homo sapiens
  misc_RNA (1)...(19): siRNA sense strand
gacuauggagauauuguug

SEQ ID NO: 1630374 - RNA, 19 nt, Homo sapiens
  misc_RNA (1)...(19): siRNA sense strand
ugacuauggagauauuguu

SEQ ID NO: 1630375 - RNA, 19 nt, Homo sapiens
  misc_RNA (1)...(19): siRNA sense strand
gagaccacaucacuauucc

SEQ ID NO: 1630376 - RNA, 19 nt, Homo sapiens
  misc_RNA (1)...(19): siRNA sense strand
uacgacugguacaagauuu

SEQ ID NO: 1630377 - RNA, 19 nt, Homo sapiens
  misc_RNA (1)...(19): siRNA sense strand
acugaugaacuucuuugua

SEQ ID NO: 1630378 - RNA, 19 nt, Homo sapiens
  misc_RNA (1)...(19): siRNA sense strand
aggagcuucucuacaggua

SEQ ID NO: 1630379 - RNA, 19 nt, Homo sapiens
  misc_RNA (1)...(19): siRNA sense strand
ugacaaaccgagaccacau

SEQ ID NO: 1630380 - RNA, 19 nt, Homo sapiens
  misc_RNA (1)...(19): siRNA sense strand
cguauacucggcccucuga

SEQ ID NO: 1630381 - RNA, 19 nt, Homo sapiens
  misc_RNA (1)...(19): siRNA sense strand
aaaccgagaccacaucacu

SEQ ID NO: 1630382 - RNA, 19 nt, Homo sapiens
  misc_RNA (1)...(19): siRNA sense strand
gaucccaugggcuucuuga

SEQ ID NO: 1630383 - RNA, 19 nt, Homo sapiens
  misc_RNA (1)...(19): siRNA sense strand
cagaggaagaaguucagaa

SEQ ID NO: 1630384 - RNA, 19 nt, Homo sapiens
  misc_RNA (1)...(19): siRNA sense strand
guacaagcagaaucgaucu

SEQ ID NO: 1630385 - RNA, 19 nt, Homo sapiens
  misc_RNA (1)...(19): siRNA sense strand
gacaaaccgagaccacauc

SEQ ID NO: 1630386 - RNA, 19 nt, Homo sapiens
  misc_RNA (1)...(19): siRNA sense strand
uacaagggacugcguaucu

SEQ ID NO: 1630387 - RNA, 19 nt, Homo sapiens
  misc_RNA (1)...(19): siRNA sense strand
cagggauccgcaacaauga

SEQ ID NO: 1630388 - RNA, 19 nt, Homo sapiens
  misc_RNA (1)...(19): siRNA sense strand
aaucagaggaagaaguuca

SEQ ID NO: 1630389 - RNA, 19 nt, Homo sapiens
  misc_RNA (1)...(19): siRNA sense strand
gggacugcguaucuucuac

SEQ ID NO: 1630390 - RNA, 19 nt, Homo sapiens
  misc_RNA (1)...(19): siRNA sense strand
ggccauuggauccuguaaa

SEQ ID NO: 1630391 - RNA, 19 nt, Homo sapiens
  misc_RNA (1)...(19): siRNA sense strand
gggagcucuugccucugua

SEQ ID NO: 1630392 - RNA, 19 nt, Homo sapiens
  misc_RNA (1)...(19): siRNA sense strand
ggagguaucuuuccugaga

SEQ ID NO: 1630393 - RNA, 19 nt, Homo sapiens
  misc_RNA (1)...(19): siRNA sense strand
ccacaucacuauuccauau

SEQ ID NO: 1630394 - RNA, 19 nt, Homo sapiens
  misc_RNA (1)...(19): siRNA sense strand
gaacuucuuuguauucucu

SEQ ID NO: 1630395 - RNA, 19 nt, Homo sapiens
  misc_RNA (1)...(19): siRNA sense strand
caacaaugacgggaacuua

SEQ ID NO: 1630396 - RNA, 19 nt, Homo sapiens
  misc_RNA (1)...(19): siRNA sense strand
guaaaucccuauccagagu

SEQ ID NO: 1630397 - RNA, 19 nt, Homo sapiens
  misc_RNA (1)...(19): siRNA sense strand
ucacacgacugaugaacuu

SEQ ID NO: 1630398 - RNA, 19 nt, Homo sapiens
  misc_RNA (1)...(19): siRNA sense strand
gcucuugccucuguaacua

SEQ ID NO: 1630399 - RNA, 19 nt, Homo sapiens
  misc_RNA (1)...(19): siRNA sense strand
cugaugaacuucuuuguau

SEQ ID NO: 1630400 - RNA, 19 nt, Homo sapiens
  misc_RNA (1)...(19): siRNA sense strand
gcagggauccgcaacaaug

SEQ ID NO: 1630401 - RNA, 19 nt, Homo sapiens
  misc_RNA (1)...(19): siRNA sense strand
gacgggaacuuagucauug

SEQ ID NO: 1630402 - RNA, 19 nt, Homo sapiens
  misc_RNA (1)...(19): siRNA sense strand
gccauuggauccuguaaau

SEQ ID NO: 1630403 - RNA, 19 nt, Homo sapiens
  misc_RNA (1)...(19): siRNA sense strand
gauugcccuugauuucuua

SEQ ID NO: 1630404 - RNA, 19 nt, Homo sapiens
  misc_RNA (1)...(19): siRNA sense strand
gauucuggaugaccacauu

SEQ ID NO: 1630405 - RNA, 19 nt, Homo sapiens
  misc_RNA (1)...(19): siRNA sense strand
gacagucucuuacaguaca

SEQ ID NO: 1630406 - RNA, 19 nt, Homo sapiens
  misc_RNA (1)...(19): siRNA sense strand
gaugaacuucuuuguauuc

SEQ ID NO: 1630407 - RNA, 19 nt, Homo sapiens
  misc_RNA (1)...(19): siRNA sense strand
gagcuucucuacagguaca

SEQ ID NO: 1630408 - RNA, 19 nt, Homo sapiens
  misc_RNA (1)...(19): siRNA sense strand
gggcagggauccgcaacaa

SEQ ID NO: 1630409 - RNA, 19 nt, Homo sapiens
  misc_RNA (1)...(19): siRNA sense strand
gcauauaugggcuucauca

SEQ ID NO: 1630410 - RNA, 19 nt, Homo sapiens
  misc_RNA (1)...(19): siRNA sense strand
uauaugggcuucaucaacu

SEQ ID NO: 1630411 - RNA, 19 nt, Homo sapiens
  misc_RNA (1)...(19): siRNA sense strand
ucaugacuauggagauauu

SEQ ID NO: 1630412 - RNA, 19 nt, Homo sapiens
  misc_RNA (1)...(19): siRNA sense strand
cccaugggcuucuugaaug

SEQ ID NO: 1630413 - RNA, 19 nt, Homo sapiens
  misc_RNA (1)...(19): siRNA sense strand
cagugucgauucuggauga

SEQ ID NO: 1630414 - RNA, 19 nt, Homo sapiens
  misc_RNA (1)...(19): siRNA sense strand
ucaaucagaggaagaaguu

SEQ ID NO: 1630415 - RNA, 19 nt, Homo sapiens
  misc_RNA (1)...(19): siRNA sense strand
ucaaccuucuuucucauga

SEQ ID NO: 1630416 - RNA, 19 nt, Homo sapiens
  misc_RNA (1)...(19): siRNA sense strand
ggaaguccagagauaguug

SEQ ID NO: 1630417 - RNA, 19 nt, Homo sapiens
  misc_RNA (1)...(19): siRNA sense strand
ggugauugcccuugauuuc

SEQ ID NO: 1630418 - RNA, 19 nt, Homo sapiens
  misc_RNA (1)...(19): siRNA sense strand
agagauaguugugcuuuua

SEQ ID NO: 1630419 - RNA, 19 nt, Homo sapiens
  misc_RNA (1)...(19): siRNA sense strand
ugauugcccuugauuucuu

SEQ ID NO: 1630420 - RNA, 19 nt, Homo sapiens
  misc_RNA (1)...(19): siRNA sense strand
guacaagauuugggaaggu

SEQ ID NO: 1630421 - RNA, 19 nt, Homo sapiens
  misc_RNA (1)...(19): siRNA sense strand
uugacagucucuuacagua

SEQ ID NO: 1630422 - RNA, 19 nt, Homo sapiens
  misc_RNA (1)...(19): siRNA sense strand
ucaaauggagguaucuuuc

SEQ ID NO: 1630423 - RNA, 19 nt, Homo sapiens
  misc_RNA (1)...(19): siRNA sense strand
caucacuauuccauauuug

SEQ ID NO: 1630424 - RNA, 19 nt, Homo sapiens
  misc_RNA (1)...(19): siRNA sense strand
cgagaccacaucacuauuc

SEQ ID NO: 1630425 - RNA, 19 nt, Homo sapiens
  misc_RNA (1)...(19): siRNA sense strand
cuucuugaaugcauauaug

SEQ ID NO: 1630426 - RNA, 19 nt, Homo sapiens
  misc_RNA (1)...(19): siRNA sense strand
ccagagauaguugugcuuu

SEQ ID NO: 1630427 - RNA, 19 nt, Homo sapiens
  misc_RNA (1)...(19): siRNA sense strand
ggcuuuggcuucagugaca

SEQ ID NO: 1630428 - RNA, 19 nt, Homo sapiens
  misc_RNA (1)...(19): siRNA sense strand
guaacuauccccauucauu

SEQ ID NO: 1630429 - RNA, 19 nt, Homo sapiens
  misc_RNA (1)...(19): siRNA sense strand
gagguuucaucgggugauu

SEQ ID NO: 1630430 - RNA, 19 nt, Homo sapiens
  misc_RNA (1)...(19): siRNA sense strand
ugggagcucuugccucugu

SEQ ID NO: 1630431 - RNA, 19 nt, Homo sapiens
  misc_RNA (1)...(19): siRNA sense strand
uccaaaagcuacucaaaga

SEQ ID NO: 1630432 - RNA, 19 nt, Homo sapiens
  misc_RNA (1)...(19): siRNA sense strand
aaaucccuauccagaguuu

SEQ ID NO: 1630433 - RNA, 19 nt, Homo sapiens
  misc_RNA (1)...(19): siRNA sense strand
acaagggacugcguaucuu

SEQ ID NO: 1630434 - RNA, 19 nt, Homo sapiens
  misc_RNA (1)...(19): siRNA sense strand
cgacugaugaacuucuuug

SEQ ID NO: 1630435 - RNA, 19 nt, Homo sapiens
  misc_RNA (1)...(19): siRNA sense strand
agagugagcugugggacau

SEQ ID NO: 1630436 - RNA, 19 nt, Homo sapiens
  misc_RNA (1)...(19): siRNA sense strand
caaaagcuacucaaagaug

SEQ ID NO: 1630437 - RNA, 19 nt, Homo sapiens
  misc_RNA (1)...(19): siRNA sense strand
uaacuauccccauucauuu

SEQ ID NO: 1630438 - RNA, 19 nt, Homo sapiens
  misc_RNA (1)...(19): siRNA sense strand
gaccacaucacuauuccau

SEQ ID NO: 1630439 - RNA, 19 nt, Homo sapiens
  misc_RNA (1)...(19): siRNA sense strand
ggagcucuugccucuguaa

SEQ ID NO: 1630440 - RNA, 19 nt, Homo sapiens
  misc_RNA (1)...(19): siRNA sense strand
gcaacaaugacgggaacuu

SEQ ID NO: 1630441 - RNA, 19 nt, Homo sapiens
  misc_RNA (1)...(19): siRNA sense strand
gucaaauggagguaucuuu

SEQ ID NO: 1630442 - RNA, 19 nt, Homo sapiens
  misc_RNA (1)...(19): siRNA sense strand
cucaggagcuucucuacag

SEQ ID NO: 1630443 - RNA, 19 nt, Homo sapiens
  misc_RNA (1)...(19): siRNA sense strand
cuucaucaacuccuucuga

SEQ ID NO: 1630444 - RNA, 19 nt, Homo sapiens
  misc_RNA (1)...(19): siRNA sense strand
gguccacagugucgauucu

SEQ ID NO: 1630445 - RNA, 19 nt, Homo sapiens
  misc_RNA (1)...(19): siRNA sense strand
cuacgacugguacaagauu

SEQ ID NO: 1630446 - RNA, 19 nt, Homo sapiens
  misc_RNA (1)...(19): siRNA sense strand
uuacaguacaucaaucaga

SEQ ID NO: 1630447 - RNA, 19 nt, Homo sapiens
  misc_RNA (1)...(19): siRNA sense strand
caagggacugcguaucuuc

SEQ ID NO: 1630448 - RNA, 19 nt, Homo sapiens
  misc_RNA (1)...(19): siRNA sense strand
gaaguccagagauaguugu

SEQ ID NO: 1630449 - RNA, 19 nt, Homo sapiens
  misc_RNA (1)...(19): siRNA sense strand
ugaccacauuagccacuau

SEQ ID NO: 1630450 - RNA, 19 nt, Homo sapiens
  misc_RNA (1)...(19): siRNA sense strand
agauggaggugugcuguca

SEQ ID NO: 1630451 - RNA, 19 nt, Homo sapiens
  misc_RNA (1)...(19): siRNA sense strand
gacuauggagauauuguug

SEQ ID NO: 1630452 - RNA, 19 nt, Homo sapiens
  misc_RNA (1)...(19): siRNA sense strand
ugacuauggagauauuguu

SEQ ID NO: 1630453 - RNA, 19 nt, Homo sapiens
  misc_RNA (1)...(19): siRNA sense strand
gagaccacaucacuauucc

SEQ ID NO: 1630454 - RNA, 19 nt, Homo sapiens
  misc_RNA (1)...(19): siRNA sense strand
uacgacugguacaagauuu

SEQ ID NO: 1630455 - RNA, 19 nt, Homo sapiens
  misc_RNA (1)...(19): siRNA sense strand
acugaugaacuucuuugua

SEQ ID NO: 1630456 - RNA, 19 nt, Homo sapiens
  misc_RNA (1)...(19): siRNA sense strand
aggagcuucucuacaggua

SEQ ID NO: 1630457 - RNA, 19 nt, Homo sapiens
  misc_RNA (1)...(19): siRNA sense strand
ugacaaaccgagaccacau

SEQ ID NO: 1630458 - RNA, 19 nt, Homo sapiens
  misc_RNA (1)...(19): siRNA sense strand
cguauacucggcccucuga

SEQ ID NO: 1630459 - RNA, 19 nt, Homo sapiens
  misc_RNA (1)...(19): siRNA sense strand
aaaccgagaccacaucacu

SEQ ID NO: 1630460 - RNA, 19 nt, Homo sapiens
  misc_RNA (1)...(19): siRNA sense strand
gaucccaugggcuucuuga

SEQ ID NO: 1630461 - RNA, 19 nt, Homo sapiens
  misc_RNA (1)...(19): siRNA sense strand
cagaggaagaaguucagaa

SEQ ID NO: 1630462 - RNA, 19 nt, Homo sapiens
  misc_RNA (1)...(19): siRNA sense strand
guacaagcagaaucgaucu

SEQ ID NO: 1630463 - RNA, 19 nt, Homo sapiens
  misc_RNA (1)...(19): siRNA sense strand
gacaaaccgagaccacauc

SEQ ID NO: 1630464 - RNA, 19 nt, Homo sapiens
  misc_RNA (1)...(19): siRNA sense strand
uacaagggacugcguaucu

SEQ ID NO: 1630465 - RNA, 19 nt, Homo sapiens
  misc_RNA (1)...(19): siRNA sense strand
cagggauccgcaacaauga

SEQ ID NO: 1630466 - RNA, 19 nt, Homo sapiens
  misc_RNA (1)...(19): siRNA sense strand
aaucagaggaagaaguuca

SEQ ID NO: 1630467 - RNA, 19 nt, Homo sapiens
  misc_RNA (1)...(19): siRNA sense strand
gggacugcguaucuucuac

SEQ ID NO: 1630468 - RNA, 19 nt, Homo sapiens
  misc_RNA (1)...(19): siRNA sense strand
ggccauuggauccuguaaa

SEQ ID NO: 1630469 - RNA, 19 nt, Homo sapiens
  misc_RNA (1)...(19): siRNA sense strand
gggagcucuugccucugua

SEQ ID NO: 1630470 - RNA, 19 nt, Homo sapiens
  misc_RNA (1)...(19): siRNA sense strand
ggagguaucuuuccugaga

SEQ ID NO: 1630471 - RNA, 19 nt, Homo sapiens
  misc_RNA (1)...(19): siRNA sense strand
ccacaucacuauuccauau

SEQ ID NO: 1630472 - RNA, 19 nt, Homo sapiens
  misc_RNA (1)...(19): siRNA sense strand
gaacuucuuuguauucucu

SEQ ID NO: 1630473 - RNA, 19 nt, Homo sapiens
  misc_RNA (1)...(19): siRNA sense strand
caacaaugacgggaacuua

SEQ ID NO: 1630474 - RNA, 19 nt, Homo sapiens
  misc_RNA (1)...(19): siRNA sense strand
guaaaucccuauccagagu

SEQ ID NO: 1630475 - RNA, 19 nt, Homo sapiens
  misc_RNA (1)...(19): siRNA sense strand
ucacacgacugaugaacuu

SEQ ID NO: 1630476 - RNA, 19 nt, Homo sapiens
  misc_RNA (1)...(19): siRNA sense strand
gcucuugccucuguaacua

SEQ ID NO: 1630477 - RNA, 19 nt, Homo sapiens
  misc_RNA (1)...(19): siRNA sense strand
cugaugaacuucuuuguau

SEQ ID NO: 1630478 - RNA, 19 nt, Homo sapiens
  misc_RNA (1)...(19): siRNA sense strand
gcagggauccgcaacaaug

SEQ ID NO: 1630479 - RNA, 19 nt, Homo sapiens
  misc_RNA (1)...(19): siRNA sense strand
gacgggaacuuagucauug

SEQ ID NO: 1630480 - RNA, 19 nt, Homo sapiens
  misc_RNA (1)...(19): siRNA sense strand
gccauuggauccuguaaau

SEQ ID NO: 1630481 - RNA, 19 nt, Homo sapiens
  misc_RNA (1)...(19): siRNA sense strand
gauugcccuugauuucuua

SEQ ID NO: 1630482 - RNA, 19 nt, Homo sapiens
  misc_RNA (1)...(19): siRNA sense strand
gauucuggaugaccacauu

SEQ ID NO: 1630483 - RNA, 19 nt, Homo sapiens
  misc_RNA (1)...(19): siRNA sense strand
gacagucucuuacaguaca

SEQ ID NO: 1630484 - RNA, 19 nt, Homo sapiens
  misc_RNA (1)...(19): siRNA sense strand
gaugaacuucuuuguauuc

SEQ ID NO: 1630485 - RNA, 19 nt, Homo sapiens
  misc_RNA (1)...(19): siRNA sense strand
gagcuucucuacagguaca

SEQ ID NO: 1630486 - RNA, 19 nt, Homo sapiens
  misc_RNA (1)...(19): siRNA sense strand
gggcagggauccgcaacaa

SEQ ID NO: 1630487 - RNA, 19 nt, Homo sapiens
  misc_RNA (1)...(19): siRNA sense strand
gcauauaugggcuucauca

SEQ ID NO: 1630488 - RNA, 19 nt, Homo sapiens
  misc_RNA (1)...(19): siRNA sense strand
uauaugggcuucaucaacu

SEQ ID NO: 1630489 - RNA, 19 nt, Homo sapiens
  misc_RNA (1)...(19): siRNA sense strand
ucaugacuauggagauauu

SEQ ID NO: 1630490 - RNA, 19 nt, Homo sapiens
  misc_RNA (1)...(19): siRNA sense strand
cccaugggcuucuugaaug

SEQ ID NO: 1630491 - RNA, 19 nt, Homo sapiens
  misc_RNA (1)...(19): siRNA sense strand
cagugucgauucuggauga

SEQ ID NO: 1630492 - RNA, 19 nt, Homo sapiens
  misc_RNA (1)...(19): siRNA sense strand
ucaaucagaggaagaaguu

SEQ ID NO: 1630493 - RNA, 19 nt, Homo sapiens
  misc_RNA (1)...(19): siRNA sense strand
ucaaccuucuuucucauga

SEQ ID NO: 1630494 - RNA, 19 nt, Homo sapiens
  misc_RNA (1)...(19): siRNA sense strand
ggaaguccagagauaguug

SEQ ID NO: 1630495 - RNA, 19 nt, Homo sapiens
  misc_RNA (1)...(19): siRNA sense strand
ggugauugcccuugauuuc

SEQ ID NO: 1630496 - RNA, 19 nt, Homo sapiens
  misc_RNA (1)...(19): siRNA sense strand
agagauaguugugcuuuua

SEQ ID NO: 1630497 - RNA, 19 nt, Homo sapiens
  misc_RNA (1)...(19): siRNA sense strand
ugauugcccuugauuucuu

SEQ ID NO: 1630498 - RNA, 19 nt, Homo sapiens
  misc_RNA (1)...(19): siRNA sense strand
guacaagauuugggaaggu

SEQ ID NO: 1630499 - RNA, 19 nt, Homo sapiens
  misc_RNA (1)...(19): siRNA sense strand
uugacagucucuuacagua

SEQ ID NO: 1630500 - RNA, 19 nt, Homo sapiens
  misc_RNA (1)...(19): siRNA sense strand
ucaaauggagguaucuuuc

SEQ ID NO: 1630501 - RNA, 19 nt, Homo sapiens
  misc_RNA (1)...(19): siRNA sense strand
caucacuauuccauauuug

SEQ ID NO: 1630502 - RNA, 19 nt, Homo sapiens
  misc_RNA (1)...(19): siRNA sense strand
cgagaccacaucacuauuc

SEQ ID NO: 1630503 - RNA, 19 nt, Homo sapiens
  misc_RNA (1)...(19): siRNA sense strand
cuucuugaaugcauauaug

SEQ ID NO: 1630504 - RNA, 19 nt, Homo sapiens
  misc_RNA (1)...(19): siRNA sense strand
ccagagauaguugugcuuu

SEQ ID NO: 1630505 - RNA, 19 nt, Homo sapiens
  misc_RNA (1)...(19): siRNA sense strand
ggcuuuggcuucagugaca

SEQ ID NO: 1630506 - RNA, 19 nt, Homo sapiens
  misc_RNA (1)...(19): siRNA sense strand
guaacuauccccauucauu

SEQ ID NO: 1630507 - RNA, 19 nt, Homo sapiens
  misc_RNA (1)...(19): siRNA sense strand
gagguuucaucgggugauu

SEQ ID NO: 1630508 - RNA, 19 nt, Homo sapiens
  misc_RNA (1)...(19): siRNA sense strand
ugggagcucuugccucugu

SEQ ID NO: 1630509 - RNA, 19 nt, Homo sapiens
  misc_RNA (1)...(19): siRNA sense strand
uccaaaagcuacucaaaga

SEQ ID NO: 1630510 - RNA, 19 nt, Homo sapiens
  misc_RNA (1)...(19): siRNA sense strand
aaaucccuauccagaguuu

SEQ ID NO: 1630511 - RNA, 19 nt, Homo sapiens
  misc_RNA (1)...(19): siRNA sense strand
acaagggacugcguaucuu

SEQ ID NO: 1630512 - RNA, 19 nt, Homo sapiens
  misc_RNA (1)...(19): siRNA sense strand
cgacugaugaacuucuuug

SEQ ID NO: 1630513 - RNA, 19 nt, Homo sapiens
  misc_RNA (1)...(19): siRNA sense strand
agagugagcugugggacau

SEQ ID NO: 1630514 - RNA, 19 nt, Homo sapiens
  misc_RNA (1)...(19): siRNA sense strand
caaaagcuacucaaagaug

SEQ ID NO: 1630515 - RNA, 19 nt, Homo sapiens
  misc_RNA (1)...(19): siRNA sense strand
uaacuauccccauucauuu

SEQ ID NO: 1630516 - RNA, 19 nt, Homo sapiens
  misc_RNA (1)...(19): siRNA sense strand
gaccacaucacuauuccau

SEQ ID NO: 1630517 - RNA, 19 nt, Homo sapiens
  misc_RNA (1)...(19): siRNA sense strand
ggagcucuugccucuguaa

SEQ ID NO: 1630518 - RNA, 19 nt, Homo sapiens
  misc_RNA (1)...(19): siRNA sense strand
gcaacaaugacgggaacuu

SEQ ID NO: 1630519 - RNA, 19 nt, Homo sapiens
  misc_RNA (1)...(19): siRNA sense strand
gucaaauggagguaucuuu

SEQ ID NO: 1630520 - RNA, 19 nt, Homo sapiens
  misc_RNA (1)...(19): siRNA sense strand
cucaggagcuucucuacag

SEQ ID NO: 1630521 - RNA, 19 nt, Homo sapiens
  misc_RNA (1)...(19): siRNA sense strand
cuucaucaacuccuucuga

SEQ ID NO: 1630522 - RNA, 19 nt, Homo sapiens
  misc_RNA (1)...(19): siRNA sense strand
gguccacagugucgauucu

SEQ ID NO: 1630523 - RNA, 19 nt, Homo sapiens
  misc_RNA (1)...(19): siRNA sense strand
cuacgacugguacaagauu

SEQ ID NO: 1630524 - RNA, 19 nt, Homo sapiens
  misc_RNA (1)...(19): siRNA sense strand
uuacaguacaucaaucaga

SEQ ID NO: 1630525 - RNA, 19 nt, Homo sapiens
  misc_RNA (1)...(19): siRNA sense strand
caagggacugcguaucuuc

SEQ ID NO: 1630526 - RNA, 19 nt, Homo sapiens
  misc_RNA (1)...(19): siRNA sense strand
gaaguccagagauaguugu

SEQ ID NO: 1630527 - RNA, 19 nt, Homo sapiens
  misc_RNA (1)...(19): siRNA sense strand
ugaccacauuagccacuau

SEQ ID NO: 1630528 - RNA, 19 nt, Homo sapiens
  misc_RNA (1)...(19): siRNA sense strand
agauggaggugugcuguca

SEQ ID NO: 1630529 - RNA, 19 nt, Homo sapiens
  misc_RNA (1)...(19): siRNA sense strand
gacuauggagauauuguug

SEQ ID NO: 1630530 - RNA, 19 nt, Homo sapiens
  misc_RNA (1)...(19): siRNA sense strand
ugacuauggagauauuguu

SEQ ID NO: 1630531 - RNA, 19 nt, Homo sapiens
  misc_RNA (1)...(19): siRNA sense strand
gagaccacaucacuauucc

SEQ ID NO: 1630532 - RNA, 19 nt, Homo sapiens
  misc_RNA (1)...(19): siRNA sense strand
uacgacugguacaagauuu

SEQ ID NO: 1630533 - RNA, 19 nt, Homo sapiens
  misc_RNA (1)...(19): siRNA sense strand
acugaugaacuucuuugua

SEQ ID NO: 1630534 - RNA, 19 nt, Homo sapiens
  misc_RNA (1)...(19): siRNA sense strand
aggagcuucucuacaggua

SEQ ID NO: 1630535 - RNA, 19 nt, Homo sapiens
  misc_RNA (1)...(19): siRNA sense strand
ugacaaaccgagaccacau

SEQ ID NO: 1630536 - RNA, 19 nt, Homo sapiens
  misc_RNA (1)...(19): siRNA sense strand
cguauacucggcccucuga

SEQ ID NO: 1630537 - RNA, 19 nt, Homo sapiens
  misc_RNA (1)...(19): siRNA sense strand
aaaccgagaccacaucacu

SEQ ID NO: 1630538 - RNA, 19 nt, Homo sapiens
  misc_RNA (1)...(19): siRNA sense strand
gaucccaugggcuucuuga

SEQ ID NO: 1630539 - RNA, 19 nt, Homo sapiens
  misc_RNA (1)...(19): siRNA sense strand
cagaggaagaaguucagaa

SEQ ID NO: 1630540 - RNA, 19 nt, Homo sapiens
  misc_RNA (1)...(19): siRNA sense strand
guacaagcagaaucgaucu

SEQ ID NO: 1630541 - RNA, 19 nt, Homo sapiens
  misc_RNA (1)...(19): siRNA sense strand
gacaaaccgagaccacauc

SEQ ID NO: 1630542 - RNA, 19 nt, Homo sapiens
  misc_RNA (1)...(19): siRNA sense strand
uacaagggacugcguaucu

SEQ ID NO: 1630543 - RNA, 19 nt, Homo sapiens
  misc_RNA (1)...(19): siRNA sense strand
cagggauccgcaacaauga

SEQ ID NO: 1630544 - RNA, 19 nt, Homo sapiens
  misc_RNA (1)...(19): siRNA sense strand
aaucagaggaagaaguuca

SEQ ID NO: 1630545 - RNA, 19 nt, Homo sapiens
  misc_RNA (1)...(19): siRNA sense strand
gggacugcguaucuucuac

SEQ ID NO: 1630546 - RNA, 19 nt, Homo sapiens
  misc_RNA (1)...(19): siRNA sense strand
ggccauuggauccuguaaa

SEQ ID NO: 1630547 - RNA, 19 nt, Homo sapiens
  misc_RNA (1)...(19): siRNA sense strand
gggagcucuugccucugua

SEQ ID NO: 1630548 - RNA, 19 nt, Homo sapiens
  misc_RNA (1)...(19): siRNA sense strand
ggagguaucuuuccugaga

SEQ ID NO: 1630549 - RNA, 19 nt, Homo sapiens
  misc_RNA (1)...(19): siRNA sense strand
ccacaucacuauuccauau

SEQ ID NO: 1630550 - RNA, 19 nt, Homo sapiens
  misc_RNA (1)...(19): siRNA sense strand
gaacuucuuuguauucucu

SEQ ID NO: 1630551 - RNA, 19 nt, Homo sapiens
  misc_RNA (1)...(19): siRNA sense strand
caacaaugacgggaacuua

SEQ ID NO: 1630552 - RNA, 19 nt, Homo sapiens
  misc_RNA (1)...(19): siRNA sense strand
guaaaucccuauccagagu

SEQ ID NO: 1630553 - RNA, 19 nt, Homo sapiens
  misc_RNA (1)...(19): siRNA sense strand
ucacacgacugaugaacuu

SEQ ID NO: 1630554 - RNA, 19 nt, Homo sapiens
  misc_RNA (1)...(19): siRNA sense strand
gcucuugccucuguaacua

SEQ ID NO: 1630555 - RNA, 19 nt, Homo sapiens
  misc_RNA (1)...(19): siRNA sense strand
cugaugaacuucuuuguau

SEQ ID NO: 1630556 - RNA, 19 nt, Homo sapiens
  misc_RNA (1)...(19): siRNA sense strand
gcagggauccgcaacaaug

SEQ ID NO: 1630557 - RNA, 19 nt, Homo sapiens
  misc_RNA (1)...(19): siRNA sense strand
gacgggaacuuagucauug

SEQ ID NO: 1630558 - RNA, 19 nt, Homo sapiens
  misc_RNA (1)...(19): siRNA sense strand
gccauuggauccuguaaau

SEQ ID NO: 1630559 - RNA, 19 nt, Homo sapiens
  misc_RNA (1)...(19): siRNA sense strand
gauugcccuugauuucuua

SEQ ID NO: 1630560 - RNA, 19 nt, Homo sapiens
  misc_RNA (1)...(19): siRNA sense strand
gauucuggaugaccacauu

SEQ ID NO: 1630561 - RNA, 19 nt, Homo sapiens
  misc_RNA (1)...(19): siRNA sense strand
gacagucucuuacaguaca

SEQ ID NO: 1630562 - RNA, 19 nt, Homo sapiens
  misc_RNA (1)...(19): siRNA sense strand
gaugaacuucuuuguauuc

SEQ ID NO: 1630563 - RNA, 19 nt, Homo sapiens
  misc_RNA (1)...(19): siRNA sense strand
gagcuucucuacagguaca

SEQ ID NO: 1630564 - RNA, 19 nt, Homo sapiens
  misc_RNA (1)...(19): siRNA sense strand
gggcagggauccgcaacaa

SEQ ID NO: 1630565 - RNA, 19 nt, Homo sapiens
  misc_RNA (1)...(19): siRNA sense strand
gcauauaugggcuucauca

SEQ ID NO: 1630566 - RNA, 19 nt, Homo sapiens
  misc_RNA (1)...(19): siRNA sense strand
uauaugggcuucaucaacu

SEQ ID NO: 1630567 - RNA, 19 nt, Homo sapiens
  misc_RNA (1)...(19): siRNA sense strand
ucaugacuauggagauauu

SEQ ID NO: 1630568 - RNA, 19 nt, Homo sapiens
  misc_RNA (1)...(19): siRNA sense strand
cccaugggcuucuugaaug

SEQ ID NO: 1630569 - RNA, 19 nt, Homo sapiens
  misc_RNA (1)...(19): siRNA sense strand
cagugucgauucuggauga

SEQ ID NO: 1630570 - RNA, 19 nt, Homo sapiens
  misc_RNA (1)...(19): siRNA sense strand
ucaaucagaggaagaaguu

SEQ ID NO: 1630571 - RNA, 19 nt, Homo sapiens
  misc_RNA (1)...(19): siRNA sense strand
ucaaccuucuuucucauga

SEQ ID NO: 1630572 - RNA, 19 nt, Homo sapiens
  misc_RNA (1)...(19): siRNA sense strand
ggaaguccagagauaguug

SEQ ID NO: 1630573 - RNA, 19 nt, Homo sapiens
  misc_RNA (1)...(19): siRNA sense strand
ggugauugcccuugauuuc

SEQ ID NO: 1630574 - RNA, 19 nt, Homo sapiens
  misc_RNA (1)...(19): siRNA sense strand
agagauaguugugcuuuua

SEQ ID NO: 1630575 - RNA, 19 nt, Homo sapiens
  misc_RNA (1)...(19): siRNA sense strand
ugauugcccuugauuucuu

SEQ ID NO: 1630576 - RNA, 19 nt, Homo sapiens
  misc_RNA (1)...(19): siRNA sense strand
guacaagauuugggaaggu

SEQ ID NO: 1630577 - RNA, 19 nt, Homo sapiens
  misc_RNA (1)...(19): siRNA sense strand
uugacagucucuuacagua

SEQ ID NO: 1630578 - RNA, 19 nt, Homo sapiens
  misc_RNA (1)...(19): siRNA sense strand
ucaaauggagguaucuuuc

SEQ ID NO: 1630579 - RNA, 19 nt, Homo sapiens
  misc_RNA (1)...(19): siRNA sense strand
caucacuauuccauauuug

SEQ ID NO: 1630580 - RNA, 19 nt, Homo sapiens
  misc_RNA (1)...(19): siRNA sense strand
cgagaccacaucacuauuc

SEQ ID NO: 1630581 - RNA, 19 nt, Homo sapiens
  misc_RNA (1)...(19): siRNA sense strand
cuucuugaaugcauauaug

SEQ ID NO: 1630582 - RNA, 19 nt, Homo sapiens
  misc_RNA (1)...(19): siRNA sense strand
ccagagauaguugugcuuu

SEQ ID NO: 1630583 - RNA, 19 nt, Homo sapiens
  misc_RNA (1)...(19): siRNA sense strand
ggcuuuggcuucagugaca

SEQ ID NO: 1630584 - RNA, 19 nt, Homo sapiens
  misc_RNA (1)...(19): siRNA sense strand
guaacuauccccauucauu

SEQ ID NO: 1630585 - RNA, 19 nt, Homo sapiens
  misc_RNA (1)...(19): siRNA sense strand
gagguuucaucgggugauu

SEQ ID NO: 1630586 - RNA, 19 nt, Homo sapiens
  misc_RNA (1)...(19): siRNA sense strand
ugggagcucuugccucugu

SEQ ID NO: 1630587 - RNA, 19 nt, Homo sapiens
  misc_RNA (1)...(19): siRNA sense strand
uccaaaagcuacucaaaga

SEQ ID NO: 1630588 - RNA, 19 nt, Homo sapiens
  misc_RNA (1)...(19): siRNA sense strand
aaaucccuauccagaguuu

SEQ ID NO: 1630589 - RNA, 19 nt, Homo sapiens
  misc_RNA (1)...(19): siRNA sense strand
acaagggacugcguaucuu

SEQ ID NO: 1630590 - RNA, 19 nt, Homo sapiens
  misc_RNA (1)...(19): siRNA sense strand
cgacugaugaacuucuuug

SEQ ID NO: 1630591 - RNA, 19 nt, Homo sapiens
  misc_RNA (1)...(19): siRNA sense strand
agagugagcugugggacau

SEQ ID NO: 1630592 - RNA, 19 nt, Homo sapiens
  misc_RNA (1)...(19): siRNA sense strand
caaaagcuacucaaagaug

SEQ ID NO: 1630593 - RNA, 19 nt, Homo sapiens
  misc_RNA (1)...(19): siRNA sense strand
uaacuauccccauucauuu

SEQ ID NO: 1630594 - RNA, 19 nt, Homo sapiens
  misc_RNA (1)...(19): siRNA sense strand
gaccacaucacuauuccau

SEQ ID NO: 1630595 - RNA, 19 nt, Homo sapiens
  misc_RNA (1)...(19): siRNA sense strand
ggagcucuugccucuguaa

SEQ ID NO: 1630596 - RNA, 19 nt, Homo sapiens
  misc_RNA (1)...(19): siRNA sense strand
gcaacaaugacgggaacuu

SEQ ID NO: 1630597 - RNA, 19 nt, Homo sapiens
  misc_RNA (1)...(19): siRNA sense strand
gucaaauggagguaucuuu

SEQ ID NO: 1630598 - RNA, 19 nt, Homo sapiens
  misc_RNA (1)...(19): siRNA sense strand
cucaggagcuucucuacag

SEQ ID NO: 1630599 - RNA, 19 nt, Homo sapiens
  misc_RNA (1)...(19): siRNA sense strand
cuucaucaacuccuucuga

SEQ ID NO: 1630600 - RNA, 19 nt, Homo sapiens
  misc_RNA (1)...(19): siRNA sense strand
gguccacagugucgauucu

SEQ ID NO: 1630601 - RNA, 19 nt, Homo sapiens
  misc_RNA (1)...(19): siRNA sense strand
cuacgacugguacaagauu

SEQ ID NO: 1630602 - RNA, 19 nt, Homo sapiens
  misc_RNA (1)...(19): siRNA sense strand
uuacaguacaucaaucaga

SEQ ID NO: 1630603 - RNA, 19 nt, Homo sapiens
  misc_RNA (1)...(19): siRNA sense strand
caagggacugcguaucuuc

SEQ ID NO: 1630604 - RNA, 19 nt, Homo sapiens
  misc_RNA (1)...(19): siRNA sense strand
gaaguccagagauaguugu

SEQ ID NO: 1630605 - RNA, 19 nt, Homo sapiens
  misc_RNA (1)...(19): siRNA sense strand
ugaccacauuagccacuau

SEQ ID NO: 1630606 - RNA, 19 nt, Homo sapiens
  misc_RNA (1)...(19): siRNA sense strand
agauggaggugugcuguca

SEQ ID NO: 1630607 - RNA, 19 nt, Homo sapiens
  misc_RNA (1)...(19): siRNA sense strand
gacuauggagauauuguug

SEQ ID NO: 1630608 - RNA, 19 nt, Homo sapiens
  misc_RNA (1)...(19): siRNA sense strand
ugacuauggagauauuguu

SEQ ID NO: 1630609 - RNA, 19 nt, Homo sapiens
  misc_RNA (1)...(19): siRNA sense strand
gagaccacaucacuauucc

SEQ ID NO: 1630610 - RNA, 19 nt, Homo sapiens
  misc_RNA (1)...(19): siRNA sense strand
uacgacugguacaagauuu

SEQ ID NO: 1630611 - RNA, 19 nt, Homo sapiens
  misc_RNA (1)...(19): siRNA sense strand
acugaugaacuucuuugua

SEQ ID NO: 1630612 - RNA, 19 nt, Homo sapiens
  misc_RNA (1)...(19): siRNA sense strand
aggagcuucucuacaggua

SEQ ID NO: 1630613 - RNA, 19 nt, Homo sapiens
  misc_RNA (1)...(19): siRNA sense strand
ugacaaaccgagaccacau

SEQ ID NO: 1630614 - RNA, 19 nt, Homo sapiens
  misc_RNA (1)...(19): siRNA sense strand
cguauacucggcccucuga

SEQ ID NO: 1630615 - RNA, 19 nt, Homo sapiens
  misc_RNA (1)...(19): siRNA sense strand
aaaccgagaccacaucacu

SEQ ID NO: 1630616 - RNA, 19 nt, Homo sapiens
  misc_RNA (1)...(19): siRNA sense strand
gaucccaugggcuucuuga

SEQ ID NO: 1630617 - RNA, 19 nt, Homo sapiens
  misc_RNA (1)...(19): siRNA sense strand
cagaggaagaaguucagaa

SEQ ID NO: 1630618 - RNA, 19 nt, Homo sapiens
  misc_RNA (1)...(19): siRNA sense strand
guacaagcagaaucgaucu

SEQ ID NO: 1630619 - RNA, 19 nt, Homo sapiens
  misc_RNA (1)...(19): siRNA sense strand
gacaaaccgagaccacauc

SEQ ID NO: 1630620 - RNA, 19 nt, Homo sapiens
  misc_RNA (1)...(19): siRNA sense strand
uacaagggacugcguaucu

SEQ ID NO: 1630621 - RNA, 19 nt, Homo sapiens
  misc_RNA (1)...(19): siRNA sense strand
cagggauccgcaacaauga

SEQ ID NO: 1630622 - RNA, 19 nt, Homo sapiens
  misc_RNA (1)...(19): siRNA sense strand
aaucagaggaagaaguuca

SEQ ID NO: 1630623 - RNA, 19 nt, Homo sapiens
  misc_RNA (1)...(19): siRNA sense strand
gggacugcguaucuucuac

SEQ ID NO: 1630624 - RNA, 19 nt, Homo sapiens
  misc_RNA (1)...(19): siRNA sense strand
ggccauuggauccuguaaa

SEQ ID NO: 1630625 - RNA, 19 nt, Homo sapiens
  misc_RNA (1)...(19): siRNA sense strand
gggagcucuugccucugua

SEQ ID NO: 1630626 - RNA, 19 nt, Homo sapiens
  misc_RNA (1)...(19): siRNA sense strand
ggagguaucuuuccugaga

SEQ ID NO: 1630627 - RNA, 19 nt, Homo sapiens
  misc_RNA (1)...(19): siRNA sense strand
ccacaucacuauuccauau

SEQ ID NO: 1630628 - RNA, 19 nt, Homo sapiens
  misc_RNA (1)...(19): siRNA sense strand
gaacuucuuuguauucucu

SEQ ID NO: 1630629 - RNA, 19 nt, Homo sapiens
  misc_RNA (1)...(19): siRNA sense strand
caacaaugacgggaacuua

SEQ ID NO: 1630630 - RNA, 19 nt, Homo sapiens
  misc_RNA (1)...(19): siRNA sense strand
guaaaucccuauccagagu

SEQ ID NO: 1630631 - RNA, 19 nt, Homo sapiens
  misc_RNA (1)...(19): siRNA sense strand
ucacacgacugaugaacuu

SEQ ID NO: 1630632 - RNA, 19 nt, Homo sapiens
  misc_RNA (1)...(19): siRNA sense strand
gcucuugccucuguaacua

SEQ ID NO: 1630633 - RNA, 19 nt, Homo sapiens
  misc_RNA (1)...(19): siRNA sense strand
cugaugaacuucuuuguau

SEQ ID NO: 1630634 - RNA, 19 nt, Homo sapiens
  misc_RNA (1)...(19): siRNA sense strand
gcagggauccgcaacaaug

SEQ ID NO: 1630635 - RNA, 19 nt, Homo sapiens
  misc_RNA (1)...(19): siRNA sense strand
gacgggaacuuagucauug

SEQ ID NO: 1630636 - RNA, 19 nt, Homo sapiens
  misc_RNA (1)...(19): siRNA sense strand
gccauuggauccuguaaau

SEQ ID NO: 1630637 - RNA, 19 nt, Homo sapiens
  misc_RNA (1)...(19): siRNA sense strand
gauugcccuugauuucuua

SEQ ID NO: 1630638 - RNA, 19 nt, Homo sapiens
  misc_RNA (1)...(19): siRNA sense strand
gauucuggaugaccacauu

SEQ ID NO: 1630639 - RNA, 19 nt, Homo sapiens
  misc_RNA (1)...(19): siRNA sense strand
gacagucucuuacaguaca

SEQ ID NO: 1630640 - RNA, 19 nt, Homo sapiens
  misc_RNA (1)...(19): siRNA sense strand
gaugaacuucuuuguauuc

SEQ ID NO: 1630641 - RNA, 19 nt, Homo sapiens
  misc_RNA (1)...(19): siRNA sense strand
gagcuucucuacagguaca

SEQ ID NO: 1630642 - RNA, 19 nt, Homo sapiens
  misc_RNA (1)...(19): siRNA sense strand
gggcagggauccgcaacaa

SEQ ID NO: 1630643 - RNA, 19 nt, Homo sapiens
  misc_RNA (1)...(19): siRNA sense strand
gcauauaugggcuucauca

SEQ ID NO: 1630644 - RNA, 19 nt, Homo sapiens
  misc_RNA (1)...(19): siRNA sense strand
uauaugggcuucaucaacu

SEQ ID NO: 1630645 - RNA, 19 nt, Homo sapiens
  misc_RNA (1)...(19): siRNA sense strand
ucaugacuauggagauauu

SEQ ID NO: 1630646 - RNA, 19 nt, Homo sapiens
  misc_RNA (1)...(19): siRNA sense strand
cccaugggcuucuugaaug

SEQ ID NO: 1630647 - RNA, 19 nt, Homo sapiens
  misc_RNA (1)...(19): siRNA sense strand
cagugucgauucuggauga

SEQ ID NO: 1630648 - RNA, 19 nt, Homo sapiens
  misc_RNA (1)...(19): siRNA sense strand
ucaaucagaggaagaaguu

SEQ ID NO: 1630649 - RNA, 19 nt, Homo sapiens
  misc_RNA (1)...(19): siRNA sense strand
ucaaccuucuuucucauga

SEQ ID NO: 1630650 - RNA, 19 nt, Homo sapiens
  misc_RNA (1)...(19): siRNA sense strand
ggaaguccagagauaguug

SEQ ID NO: 1630651 - RNA, 19 nt, Homo sapiens
  misc_RNA (1)...(19): siRNA sense strand
ggugauugcccuugauuuc

SEQ ID NO: 1630652 - RNA, 19 nt, Homo sapiens
  misc_RNA (1)...(19): siRNA sense strand
agagauaguugugcuuuua

SEQ ID NO: 1630653 - RNA, 19 nt, Homo sapiens
  misc_RNA (1)...(19): siRNA sense strand
ugauugcccuugauuucuu

SEQ ID NO: 1630654 - RNA, 19 nt, Homo sapiens
  misc_RNA (1)...(19): siRNA sense strand
guacaagauuugggaaggu

SEQ ID NO: 1630655 - RNA, 19 nt, Homo sapiens
  misc_RNA (1)...(19): siRNA sense strand
uugacagucucuuacagua

SEQ ID NO: 1630656 - RNA, 19 nt, Homo sapiens
  misc_RNA (1)...(19): siRNA sense strand
ucaaauggagguaucuuuc

SEQ ID NO: 1630657 - RNA, 19 nt, Homo sapiens
  misc_RNA (1)...(19): siRNA sense strand
caucacuauuccauauuug

SEQ ID NO: 1630658 - RNA, 19 nt, Homo sapiens
  misc_RNA (1)...(19): siRNA sense strand
cgagaccacaucacuauuc

SEQ ID NO: 1630659 - RNA, 19 nt, Homo sapiens
  misc_RNA (1)...(19): siRNA sense strand
cuucuugaaugcauauaug

SEQ ID NO: 1630660 - RNA, 19 nt, Homo sapiens
  misc_RNA (1)...(19): siRNA sense strand
ccagagauaguugugcuuu

SEQ ID NO: 1630661 - RNA, 19 nt, Homo sapiens
  misc_RNA (1)...(19): siRNA sense strand
ggcuuuggcuucagugaca

SEQ ID NO: 1630662 - RNA, 19 nt, Homo sapiens
  misc_RNA (1)...(19): siRNA sense strand
guaacuauccccauucauu

SEQ ID NO: 1630663 - RNA, 19 nt, Homo sapiens
  misc_RNA (1)...(19): siRNA sense strand
gagguuucaucgggugauu

SEQ ID NO: 1630664 - RNA, 19 nt, Homo sapiens
  misc_RNA (1)...(19): siRNA sense strand
ugggagcucuugccucugu

SEQ ID NO: 1630665 - RNA, 19 nt, Homo sapiens
  misc_RNA (1)...(19): siRNA sense strand
uccaaaagcuacucaaaga

SEQ ID NO: 1630666 - RNA, 19 nt, Homo sapiens
  misc_RNA (1)...(19): siRNA sense strand
aaaucccuauccagaguuu

SEQ ID NO: 1630667 - RNA, 19 nt, Homo sapiens
  misc_RNA (1)...(19): siRNA sense strand
acaagggacugcguaucuu

SEQ ID NO: 1630668 - RNA, 19 nt, Homo sapiens
  misc_RNA (1)...(19): siRNA sense strand
cgacugaugaacuucuuug

SEQ ID NO: 1630669 - RNA, 19 nt, Homo sapiens
  misc_RNA (1)...(19): siRNA sense strand
agagugagcugugggacau

SEQ ID NO: 1630670 - RNA, 19 nt, Homo sapiens
  misc_RNA (1)...(19): siRNA sense strand
caaaagcuacucaaagaug

SEQ ID NO: 1630671 - RNA, 19 nt, Homo sapiens
  misc_RNA (1)...(19): siRNA sense strand
uaacuauccccauucauuu

SEQ ID NO: 1630672 - RNA, 19 nt, Homo sapiens
  misc_RNA (1)...(19): siRNA sense strand
gaccacaucacuauuccau

SEQ ID NO: 1630673 - RNA, 19 nt, Homo sapiens
  misc_RNA (1)...(19): siRNA sense strand
ggagcucuugccucuguaa

SEQ ID NO: 1630674 - RNA, 19 nt, Homo sapiens
  misc_RNA (1)...(19): siRNA sense strand
gcaacaaugacgggaacuu

SEQ ID NO: 1630675 - RNA, 19 nt, Homo sapiens
  misc_RNA (1)...(19): siRNA sense strand
gucaaauggagguaucuuu

SEQ ID NO: 1630676 - RNA, 19 nt, Homo sapiens
  misc_RNA (1)...(19): siRNA sense strand
cucaggagcuucucuacag

SEQ ID NO: 1630677 - RNA, 19 nt, Homo sapiens
  misc_RNA (1)...(19): siRNA sense strand
cuucaucaacuccuucuga

SEQ ID NO: 1630678 - RNA, 19 nt, Homo sapiens
  misc_RNA (1)...(19): siRNA sense strand
gguccacagugucgauucu

SEQ ID NO: 1630679 - RNA, 19 nt, Homo sapiens
  misc_RNA (1)...(19): siRNA sense strand
cuacgacugguacaagauu

SEQ ID NO: 1630680 - RNA, 19 nt, Homo sapiens
  misc_RNA (1)...(19): siRNA sense strand
uuacaguacaucaaucaga

SEQ ID NO: 1630681 - RNA, 19 nt, Homo sapiens
  misc_RNA (1)...(19): siRNA sense strand
caagggacugcguaucuuc

SEQ ID NO: 1630682 - RNA, 19 nt, Homo sapiens
  misc_RNA (1)...(19): siRNA sense strand
gaaguccagagauaguugu

SEQ ID NO: 1630683 - RNA, 19 nt, Homo sapiens
  misc_RNA (1)...(19): siRNA sense strand
ugaccacauuagccacuau

SEQ ID NO: 1630684 - RNA, 19 nt, Homo sapiens
  misc_RNA (1)...(19): siRNA sense strand
agauggaggugugcuguca

SEQ ID NO: 1630685 - RNA, 19 nt, Homo sapiens
  misc_RNA (1)...(19): siRNA sense strand
gacuauggagauauuguug

SEQ ID NO: 1630686 - RNA, 19 nt, Homo sapiens
  misc_RNA (1)...(19): siRNA sense strand
ugacuauggagauauuguu

SEQ ID NO: 1630687 - RNA, 19 nt, Homo sapiens
  misc_RNA (1)...(19): siRNA sense strand
gagaccacaucacuauucc

SEQ ID NO: 1630688 - RNA, 19 nt, Homo sapiens
  misc_RNA (1)...(19): siRNA sense strand
uacgacugguacaagauuu

SEQ ID NO: 1630689 - RNA, 19 nt, Homo sapiens
  misc_RNA (1)...(19): siRNA sense strand
acugaugaacuucuuugua

SEQ ID NO: 1630690 - RNA, 19 nt, Homo sapiens
  misc_RNA (1)...(19): siRNA sense strand
aggagcuucucuacaggua

SEQ ID NO: 1630691 - RNA, 19 nt, Homo sapiens
  misc_RNA (1)...(19): siRNA sense strand
ugacaaaccgagaccacau

SEQ ID NO: 1630692 - RNA, 19 nt, Homo sapiens
  misc_RNA (1)...(19): siRNA sense strand
cguauacucggcccucuga

SEQ ID NO: 1630693 - RNA, 19 nt, Homo sapiens
  misc_RNA (1)...(19): siRNA sense strand
aaaccgagaccacaucacu

SEQ ID NO: 1630694 - RNA, 19 nt, Homo sapiens
  misc_RNA (1)...(19): siRNA sense strand
gaucccaugggcuucuuga

SEQ ID NO: 1630695 - RNA, 19 nt, Homo sapiens
  misc_RNA (1)...(19): siRNA sense strand
cagaggaagaaguucagaa

SEQ ID NO: 1630696 - RNA, 19 nt, Homo sapiens
  misc_RNA (1)...(19): siRNA sense strand
guacaagcagaaucgaucu

SEQ ID NO: 1630697 - RNA, 19 nt, Homo sapiens
  misc_RNA (1)...(19): siRNA sense strand
gacaaaccgagaccacauc

SEQ ID NO: 1630698 - RNA, 19 nt, Homo sapiens
  misc_RNA (1)...(19): siRNA sense strand
uacaagggacugcguaucu

SEQ ID NO: 1630699 - RNA, 19 nt, Homo sapiens
  misc_RNA (1)...(19): siRNA sense strand
cagggauccgcaacaauga

SEQ ID NO: 1630700 - RNA, 19 nt, Homo sapiens
  misc_RNA (1)...(19): siRNA sense strand
aaucagaggaagaaguuca

SEQ ID NO: 1630701 - RNA, 19 nt, Homo sapiens
  misc_RNA (1)...(19): siRNA sense strand
gggacugcguaucuucuac

SEQ ID NO: 1630702 - RNA, 19 nt, Homo sapiens
  misc_RNA (1)...(19): siRNA sense strand
ggccauuggauccuguaaa

SEQ ID NO: 1630703 - RNA, 19 nt, Homo sapiens
  misc_RNA (1)...(19): siRNA sense strand
gggagcucuugccucugua

SEQ ID NO: 1630704 - RNA, 19 nt, Homo sapiens
  misc_RNA (1)...(19): siRNA sense strand
cgaaagagcuggcugcaua

SEQ ID NO: 1630705 - RNA, 19 nt, Homo sapiens
  misc_RNA (1)...(19): siRNA sense strand
gaaugacucuuccauauga

SEQ ID NO: 1630706 - RNA, 19 nt, Homo sapiens
  misc_RNA (1)...(19): siRNA sense strand
ccaaaggauuguuucauua

SEQ ID NO: 1630707 - RNA, 19 nt, Homo sapiens
  misc_RNA (1)...(19): siRNA sense strand
gaaguaauauugugguuag

SEQ ID NO: 1630708 - RNA, 19 nt, Homo sapiens
  misc_RNA (1)...(19): siRNA sense strand
gcaaagauguggcagcaau

SEQ ID NO: 1630709 - RNA, 19 nt, Homo sapiens
  misc_RNA (1)...(19): siRNA sense strand
ggaccucacuuacacauau

SEQ ID NO: 1630710 - RNA, 19 nt, Homo sapiens
  misc_RNA (1)...(19): siRNA sense strand
cuacauaugucaacacuga

SEQ ID NO: 1630711 - RNA, 19 nt, Homo sapiens
  misc_RNA (1)...(19): siRNA sense strand
caugaaagguugucuguug

SEQ ID NO: 1630712 - RNA, 19 nt, Homo sapiens
  misc_RNA (1)...(19): siRNA sense strand
gccaaaggauuguuucauu

SEQ ID NO: 1630713 - RNA, 19 nt, Homo sapiens
  misc_RNA (1)...(19): siRNA sense strand
ucccauagcugauguuauu

SEQ ID NO: 1630714 - RNA, 19 nt, Homo sapiens
  misc_RNA (1)...(19): siRNA sense strand
gaacauugggccauuggua

SEQ ID NO: 1630715 - RNA, 19 nt, Homo sapiens
  misc_RNA (1)...(19): siRNA sense strand
guaaugaaggguuggaaua

SEQ ID NO: 1630716 - RNA, 19 nt, Homo sapiens
  misc_RNA (1)...(19): siRNA sense strand
cacaagaacuggagaagug

SEQ ID NO: 1630717 - RNA, 19 nt, Homo sapiens
  misc_RNA (1)...(19): siRNA sense strand
gcacauacauugaaaagau

SEQ ID NO: 1630718 - RNA, 19 nt, Homo sapiens
  misc_RNA (1)...(19): siRNA sense strand
ggaugugccuuguugaaau

SEQ ID NO: 1630719 - RNA, 19 nt, Homo sapiens
  misc_RNA (1)...(19): siRNA sense strand
agagaagacuggaaaauua

SEQ ID NO: 1630720 - RNA, 19 nt, Homo sapiens
  misc_RNA (1)...(19): siRNA sense strand
agagaagucugcuacauau

SEQ ID NO: 1630721 - RNA, 19 nt, Homo sapiens
  misc_RNA (1)...(19): siRNA sense strand
cagauuugcguuccaauua

SEQ ID NO: 1630722 - RNA, 19 nt, Homo sapiens
  misc_RNA (1)...(19): siRNA sense strand
gaugugccuuguugaaauu

SEQ ID NO: 1630723 - RNA, 19 nt, Homo sapiens
  misc_RNA (1)...(19): siRNA sense strand
ggaagaggcagauguuguu

SEQ ID NO: 1630724 - RNA, 19 nt, Homo sapiens
  misc_RNA (1)...(19): siRNA sense strand
gacaagauguauacagugu

SEQ ID NO: 1630725 - RNA, 19 nt, Homo sapiens
  misc_RNA (1)...(19): siRNA sense strand
guaaagaccaucaugacaa

SEQ ID NO: 1630726 - RNA, 19 nt, Homo sapiens
  misc_RNA (1)...(19): siRNA sense strand
gcuggaaacugcaggaugu

SEQ ID NO: 1630727 - RNA, 19 nt, Homo sapiens
  misc_RNA (1)...(19): siRNA sense strand
gcacagauuugcguuccaa

SEQ ID NO: 1630728 - RNA, 19 nt, Homo sapiens
  misc_RNA (1)...(19): siRNA sense strand
guuggaauauccuaacaaa

SEQ ID NO: 1630729 - RNA, 19 nt, Homo sapiens
  misc_RNA (1)...(19): siRNA sense strand
gcaugcagaucccucgauu

SEQ ID NO: 1630730 - RNA, 19 nt, Homo sapiens
  misc_RNA (1)...(19): siRNA sense strand
agagcuggcugcauaauga

SEQ ID NO: 1630731 - RNA, 19 nt, Homo sapiens
  misc_RNA (1)...(19): siRNA sense strand
ggagaagugaugaggauuu

SEQ ID NO: 1630732 - RNA, 19 nt, Homo sapiens
  misc_RNA (1)...(19): siRNA sense strand
gacagaauccauugaugua

SEQ ID NO: 1630733 - RNA, 19 nt, Homo sapiens
  misc_RNA (1)...(19): siRNA sense strand
gggaaggugugauggaguu

SEQ ID NO: 1630734 - RNA, 19 nt, Homo sapiens
  misc_RNA (1)...(19): siRNA sense strand
gcagauggagguuguauca

SEQ ID NO: 1630735 - RNA, 19 nt, Homo sapiens
  misc_RNA (1)...(19): siRNA sense strand
caaguuggcacauacauug

SEQ ID NO: 1630736 - RNA, 19 nt, Homo sapiens
  misc_RNA (1)...(19): siRNA sense strand
ggaaguaauauugugguua

SEQ ID NO: 1630737 - RNA, 19 nt, Homo sapiens
  misc_RNA (1)...(19): siRNA sense strand
guagagcucagcagacuaa

SEQ ID NO: 1630738 - RNA, 19 nt, Homo sapiens
  misc_RNA (1)...(19): siRNA sense strand
ggaagaacccucccaaggu

SEQ ID NO: 1630739 - RNA, 19 nt, Homo sapiens
  misc_RNA (1)...(19): siRNA sense strand
gaaagagcuggcugcauaa

SEQ ID NO: 1630740 - RNA, 19 nt, Homo sapiens
  misc_RNA (1)...(19): siRNA sense strand
cagaggaaaugauaugcaa

SEQ ID NO: 1630741 - RNA, 19 nt, Homo sapiens
  misc_RNA (1)...(19): siRNA sense strand
caagucaaguagcugcuuu

SEQ ID NO: 1630742 - RNA, 19 nt, Homo sapiens
  misc_RNA (1)...(19): siRNA sense strand
ccugguagcucucaaagau

SEQ ID NO: 1630743 - RNA, 19 nt, Homo sapiens
  misc_RNA (1)...(19): siRNA sense strand
ggaaaugauaugcaaguug

SEQ ID NO: 1630744 - RNA, 19 nt, Homo sapiens
  misc_RNA (1)...(19): siRNA sense strand
cuccuaaucuuguucgaua

SEQ ID NO: 1630745 - RNA, 19 nt, Homo sapiens
  misc_RNA (1)...(19): siRNA sense strand
gcuggaauguugcagaguu

SEQ ID NO: 1630746 - RNA, 19 nt, Homo sapiens
  misc_RNA (1)...(19): siRNA sense strand
gaaacaagaaagacagaau

SEQ ID NO: 1630747 - RNA, 19 nt, Homo sapiens
  misc_RNA (1)...(19): siRNA sense strand
gaaagacagaauccauuga

SEQ ID NO: 1630748 - RNA, 19 nt, Homo sapiens
  misc_RNA (1)...(19): siRNA sense strand
uaaagaccaucaugacaag

SEQ ID NO: 1630749 - RNA, 19 nt, Homo sapiens
  misc_RNA (1)...(19): siRNA sense strand
ggaauauccuaacaaacuc

SEQ ID NO: 1630750 - RNA, 19 nt, Homo sapiens
  misc_RNA (1)...(19): siRNA sense strand
ccaauggucagaaaugaaa

SEQ ID NO: 1630751 - RNA, 19 nt, Homo sapiens
  misc_RNA (1)...(19): siRNA sense strand
aaaccagauuugccuauga

SEQ ID NO: 1630752 - RNA, 19 nt, Homo sapiens
  misc_RNA (1)...(19): siRNA sense strand
cagaauccauugauguaau

SEQ ID NO: 1630753 - RNA, 19 nt, Homo sapiens
  misc_RNA (1)...(19): siRNA sense strand
ugugauggaguucuuauua

SEQ ID NO: 1630754 - RNA, 19 nt, Homo sapiens
  misc_RNA (1)...(19): siRNA sense strand
gaaaugauaggagccgauu

SEQ ID NO: 1630755 - RNA, 19 nt, Homo sapiens
  misc_RNA (1)...(19): siRNA sense strand
gcagcuguuucuagcauug

SEQ ID NO: 1630756 - RNA, 19 nt, Homo sapiens
  misc_RNA (1)...(19): siRNA sense strand
ugguagcucucaaagauuu

SEQ ID NO: 1630757 - RNA, 19 nt, Homo sapiens
  misc_RNA (1)...(19): siRNA sense strand
gcaucagguuugcaaguga

SEQ ID NO: 1630758 - RNA, 19 nt, Homo sapiens
  misc_RNA (1)...(19): siRNA sense strand
uacaauugcugguguggaa

SEQ ID NO: 1630759 - RNA, 19 nt, Homo sapiens
  misc_RNA (1)...(19): siRNA sense strand
caagaacauugggccauug

SEQ ID NO: 1630760 - RNA, 19 nt, Homo sapiens
  misc_RNA (1)...(19): siRNA sense strand
gaagucugcuacauauguc

SEQ ID NO: 1630761 - RNA, 19 nt, Homo sapiens
  misc_RNA (1)...(19): siRNA sense strand
gcaaguuggcacauacauu

SEQ ID NO: 1630762 - RNA, 19 nt, Homo sapiens
  misc_RNA (1)...(19): siRNA sense strand
ccagggaggugaaugugau

SEQ ID NO: 1630763 - RNA, 19 nt, Homo sapiens
  misc_RNA (1)...(19): siRNA sense strand
guagaggaaccauccauau

SEQ ID NO: 1630764 - RNA, 19 nt, Homo sapiens
  misc_RNA (1)...(19): siRNA sense strand
uagcagagccucacagaca

SEQ ID NO: 1630765 - RNA, 19 nt, Homo sapiens
  misc_RNA (1)...(19): siRNA sense strand
ucucaaagcuagugaacca

SEQ ID NO: 1630766 - RNA, 19 nt, Homo sapiens
  misc_RNA (1)...(19): siRNA sense strand
gaacaacaggcagaggaaa

SEQ ID NO: 1630767 - RNA, 19 nt, Homo sapiens
  misc_RNA (1)...(19): siRNA sense strand
ucuaagcccuaugccuuua

SEQ ID NO: 1630768 - RNA, 19 nt, Homo sapiens
  misc_RNA (1)...(19): siRNA sense strand
gggagcagauggagguugu

SEQ ID NO: 1630769 - RNA, 19 nt, Homo sapiens
  misc_RNA (1)...(19): siRNA sense strand
aguggacucugacaccuua

SEQ ID NO: 1630770 - RNA, 19 nt, Homo sapiens
  misc_RNA (1)...(19): siRNA sense strand
gaaaugauggagcagcaau

SEQ ID NO: 1630771 - RNA, 19 nt, Homo sapiens
  misc_RNA (1)...(19): siRNA sense strand
ccuccaagcuugugagaag

SEQ ID NO: 1630772 - RNA, 19 nt, Homo sapiens
  misc_RNA (1)...(19): siRNA sense strand
ccuaaaggauguguucgaa

SEQ ID NO: 1630773 - RNA, 19 nt, Homo sapiens
  misc_RNA (1)...(19): siRNA sense strand
gugauggaguucuuauuag

SEQ ID NO: 1630774 - RNA, 19 nt, Homo sapiens
  misc_RNA (1)...(19): siRNA sense strand
cccaggagcugcuuacaca

SEQ ID NO: 1630775 - RNA, 19 nt, Homo sapiens
  misc_RNA (1)...(19): siRNA sense strand
guagaugauuugggaacaa

SEQ ID NO: 1630776 - RNA, 19 nt, Homo sapiens
  misc_RNA (1)...(19): siRNA sense strand
ggcaagagaagacuggaaa

SEQ ID NO: 1630777 - RNA, 19 nt, Homo sapiens
  misc_RNA (1)...(19): siRNA sense strand
ggaaaguuaugaauauccu

SEQ ID NO: 1630778 - RNA, 19 nt, Homo sapiens
  misc_RNA (1)...(19): siRNA sense strand
caagaaagacagaauccau

SEQ ID NO: 1630779 - RNA, 19 nt, Homo sapiens
  misc_RNA (1)...(19): siRNA sense strand
ugaaguauuuguugauggu

SEQ ID NO: 1630780 - RNA, 19 nt, Homo sapiens
  misc_RNA (1)...(19): siRNA sense strand
ggccaaaugugucaaagcu

SEQ ID NO: 1630781 - RNA, 19 nt, Homo sapiens
  misc_RNA (1)...(19): siRNA sense strand
cacagacaauggccaaaug

SEQ ID NO: 1630782 - RNA, 19 nt, Homo sapiens
  misc_RNA (1)...(19): siRNA sense strand
gcacaaaagauucggauga

SEQ ID NO: 1630783 - RNA, 19 nt, Homo sapiens
  misc_RNA (1)...(19): siRNA sense strand
gcgguuggaaguaauauug

SEQ ID NO: 1630784 - RNA, 19 nt, Homo sapiens
  misc_RNA (1)...(19): siRNA sense strand
ggaacaacaggcagaggaa

SEQ ID NO: 1630785 - RNA, 19 nt, Homo sapiens
  misc_RNA (1)...(19): siRNA sense strand
acaagaacauugggccauu

SEQ ID NO: 1630786 - RNA, 19 nt, Homo sapiens
  misc_RNA (1)...(19): siRNA sense strand
gauuugcguuccaauuauc

SEQ ID NO: 1630787 - RNA, 19 nt, Homo sapiens
  misc_RNA (1)...(19): siRNA sense strand
ugagauugcuggaaugacu

SEQ ID NO: 1630788 - RNA, 19 nt, Homo sapiens
  misc_RNA (1)...(19): siRNA sense strand
ucgauucuguuaucaugaa

SEQ ID NO: 1630789 - RNA, 19 nt, Homo sapiens
  misc_RNA (1)...(19): siRNA sense strand
ccucgauucuguuaucaug

SEQ ID NO: 1630790 - RNA, 19 nt, Homo sapiens
  misc_RNA (1)...(19): siRNA sense strand
gagcucagcagacuaaggu

SEQ ID NO: 1630791 - RNA, 19 nt, Homo sapiens
  misc_RNA (1)...(19): siRNA sense strand
gagccaauggucagaaaug

SEQ ID NO: 1630792 - RNA, 19 nt, Homo sapiens
  misc_RNA (1)...(19): siRNA sense strand
gcuaaaacgucaaagacuu

SEQ ID NO: 1630793 - RNA, 19 nt, Homo sapiens
  misc_RNA (1)...(19): siRNA sense strand
gagaagugaugaggauuuu

SEQ ID NO: 1630794 - RNA, 19 nt, Homo sapiens
  misc_RNA (1)...(19): siRNA sense strand
uggaugcgguuggaaguaa

SEQ ID NO: 1630795 - RNA, 19 nt, Homo sapiens
  misc_RNA (1)...(19): siRNA sense strand
gaggaaaugauaugcaagu

SEQ ID NO: 1630796 - RNA, 19 nt, Homo sapiens
  misc_RNA (1)...(19): siRNA sense strand
agauggagguuguaucaca

SEQ ID NO: 1630797 - RNA, 19 nt, Homo sapiens
  misc_RNA (1)...(19): siRNA sense strand
cuuuggaccuuggcuauaa

SEQ ID NO: 1630798 - RNA, 19 nt, Homo sapiens
  misc_RNA (1)...(19): siRNA sense strand
agaggcagauguuguucuu

SEQ ID NO: 1630799 - RNA, 19 nt, Homo sapiens
  misc_RNA (1)...(19): siRNA sense strand
gaguggaucucugauaaaa

SEQ ID NO: 1630800 - RNA, 19 nt, Homo sapiens
  misc_RNA (1)...(19): siRNA sense strand
gaacugucugggaauauca

SEQ ID NO: 1630801 - RNA, 19 nt, Homo sapiens
  misc_RNA (1)...(19): siRNA sense strand
gguaaagaccaucaugaca

SEQ ID NO: 1630802 - RNA, 19 nt, Homo sapiens
  misc_RNA (1)...(19): siRNA sense strand
acuggugauuggaaaguua

SEQ ID NO: 1630803 - RNA, 19 nt, Homo sapiens
  misc_RNA (1)...(19): siRNA sense strand
gaucaaguaaggaacagau

SEQ ID NO: 1630804 - RNA, 19 nt, Homo sapiens
  misc_RNA (1)...(19): siRNA sense strand
gaagacaccugcuuugagu

SEQ ID NO: 1630805 - RNA, 19 nt, Homo sapiens
  misc_RNA (1)...(19): siRNA sense strand
gagcaguucuauaagauug

SEQ ID NO: 1630806 - RNA, 19 nt, Homo sapiens
  misc_RNA (1)...(19): siRNA sense strand
ccaagcagaucguccagaa

SEQ ID NO: 1630807 - RNA, 19 nt, Homo sapiens
  misc_RNA (1)...(19): siRNA sense strand
gaugggagagucugcauuu

SEQ ID NO: 1630808 - RNA, 19 nt, Homo sapiens
  misc_RNA (1)...(19): siRNA sense strand
gggagcaguucuauaagau

SEQ ID NO: 1630809 - RNA, 19 nt, Homo sapiens
  misc_RNA (1)...(19): siRNA sense strand
ucuauaagauugccaagca

SEQ ID NO: 1630810 - RNA, 19 nt, Homo sapiens
  misc_RNA (1)...(19): siRNA sense strand
ccacuugauuacccguuaa

SEQ ID NO: 1630811 - RNA, 19 nt, Homo sapiens
  misc_RNA (1)...(19): siRNA sense strand
cgggagcaguucuauaaga

SEQ ID NO: 1630812 - RNA, 19 nt, Homo sapiens
  misc_RNA (1)...(19): siRNA sense strand
gcugauggccgaguacaaa

SEQ ID NO: 1630813 - RNA, 19 nt, Homo sapiens
  misc_RNA (1)...(19): siRNA sense strand
ggaguccugugcagagugu

SEQ ID NO: 1630814 - RNA, 19 nt, Homo sapiens
  misc_RNA (1)...(19): siRNA sense strand
gagauuuaccugugagaug

SEQ ID NO: 1630815 - RNA, 19 nt, Homo sapiens
  misc_RNA (1)...(19): siRNA sense strand
ugaguuucccacuugauua

SEQ ID NO: 1630816 - RNA, 19 nt, Homo sapiens
  misc_RNA (1)...(19): siRNA sense strand
gggagagucugcauuucca

SEQ ID NO: 1630817 - RNA, 19 nt, Homo sapiens
  misc_RNA (1)...(19): siRNA sense strand
cagaagacaccugcuuuga

SEQ ID NO: 1630818 - RNA, 19 nt, Homo sapiens
  misc_RNA (1)...(19): siRNA sense strand
gcgaugaccgggagcaguu

SEQ ID NO: 1630819 - RNA, 19 nt, Homo sapiens
  misc_RNA (1)...(19): siRNA sense strand
agacaccugcuuugaguuu

SEQ ID NO: 1630820 - RNA, 19 nt, Homo sapiens
  misc_RNA (1)...(19): siRNA sense strand
ggagcaguucuauaagauu

SEQ ID NO: 1630821 - RNA, 19 nt, Homo sapiens
  misc_RNA (1)...(19): siRNA sense strand
gaucaugggcccagaagac

SEQ ID NO: 1630822 - RNA, 19 nt, Homo sapiens
  misc_RNA (1)...(19): siRNA sense strand
ccagaagacaccugcuuug

SEQ ID NO: 1630823 - RNA, 19 nt, Homo sapiens
  misc_RNA (1)...(19): siRNA sense strand
agauuuaccugugagaugu

SEQ ID NO: 1630824 - RNA, 19 nt, Homo sapiens
  misc_RNA (1)...(19): siRNA sense strand
ugacgaaaguggagcuaac

SEQ ID NO: 1630825 - RNA, 19 nt, Homo sapiens
  misc_RNA (1)...(19): siRNA sense strand
cccacuugauuacccguua

SEQ ID NO: 1630826 - RNA, 19 nt, Homo sapiens
  misc_RNA (1)...(19): siRNA sense strand
agaugagauuuaccuguga

SEQ ID NO: 1630827 - RNA, 19 nt, Homo sapiens
  misc_RNA (1)...(19): siRNA sense strand
cauccugaguuucccacuu

SEQ ID NO: 1630828 - RNA, 19 nt, Homo sapiens
  misc_RNA (1)...(19): siRNA sense strand
accgggagcaguucuauaa

SEQ ID NO: 1630829 - RNA, 19 nt, Homo sapiens
  misc_RNA (1)...(19): siRNA sense strand
gaccgggagcaguucuaua

SEQ ID NO: 1630830 - RNA, 19 nt, Homo sapiens
  misc_RNA (1)...(19): siRNA sense strand
gcagagcccaaugacgaaa

SEQ ID NO: 1630831 - RNA, 19 nt, Homo sapiens
  misc_RNA (1)...(19): siRNA sense strand
agaggcugauggccgagua

SEQ ID NO: 1630832 - RNA, 19 nt, Homo sapiens
  misc_RNA (1)...(19): siRNA sense strand
ccaaagaugagauuuaccu

SEQ ID NO: 1630833 - RNA, 19 nt, Homo sapiens
  misc_RNA (1)...(19): siRNA sense strand
gacaccugcuuugaguuug

SEQ ID NO: 1630834 - RNA, 19 nt, Homo sapiens
  misc_RNA (1)...(19): siRNA sense strand
aagcagaucguccagaagu

SEQ ID NO: 1630835 - RNA, 19 nt, Homo sapiens
  misc_RNA (1)...(19): siRNA sense strand
aaguggagcuaacguggau

SEQ ID NO: 1630836 - RNA, 19 nt, Homo sapiens
  misc_RNA (1)...(19): siRNA sense strand
uuccugccauccugaguuu

SEQ ID NO: 1630837 - RNA, 19 nt, Homo sapiens
  misc_RNA (1)...(19): siRNA sense strand
gcagaucguccagaagucu

SEQ ID NO: 1630838 - RNA, 19 nt, Homo sapiens
  misc_RNA (1)...(19): siRNA sense strand
caugaaugaagagaacuuu

SEQ ID NO: 1630839 - RNA, 19 nt, Homo sapiens
  misc_RNA (1)...(19): siRNA sense strand
cccagaagacaccugcuuu

SEQ ID NO: 1630840 - RNA, 19 nt, Homo sapiens
  misc_RNA (1)...(19): siRNA sense strand
auccugaguuucccacuug

SEQ ID NO: 1630841 - RNA, 19 nt, Homo sapiens
  misc_RNA (1)...(19): siRNA sense strand
uagcaggccccaugaauga

SEQ ID NO: 1630842 - RNA, 19 nt, Homo sapiens
  misc_RNA (1)...(19): siRNA sense strand
ggcagagcccaaugacgaa

SEQ ID NO: 1630843 - RNA, 19 nt, Homo sapiens
  misc_RNA (1)...(19): siRNA sense strand
gcccagaagacaccugcuu

SEQ ID NO: 1630844 - RNA, 19 nt, Homo sapiens
  misc_RNA (1)...(19): siRNA sense strand
gaagacaccugcuuugagu

SEQ ID NO: 1630845 - RNA, 19 nt, Homo sapiens
  misc_RNA (1)...(19): siRNA sense strand
gagcaguucuauaagauug

SEQ ID NO: 1630846 - RNA, 19 nt, Homo sapiens
  misc_RNA (1)...(19): siRNA sense strand
ccaagcagaucguccagaa

SEQ ID NO: 1630847 - RNA, 19 nt, Homo sapiens
  misc_RNA (1)...(19): siRNA sense strand
gaugggagagucugcauuu

SEQ ID NO: 1630848 - RNA, 19 nt, Homo sapiens
  misc_RNA (1)...(19): siRNA sense strand
gggagcaguucuauaagau

SEQ ID NO: 1630849 - RNA, 19 nt, Homo sapiens
  misc_RNA (1)...(19): siRNA sense strand
ucuauaagauugccaagca

SEQ ID NO: 1630850 - RNA, 19 nt, Homo sapiens
  misc_RNA (1)...(19): siRNA sense strand
ccacuugauuacccguuaa

SEQ ID NO: 1630851 - RNA, 19 nt, Homo sapiens
  misc_RNA (1)...(19): siRNA sense strand
cgggagcaguucuauaaga

SEQ ID NO: 1630852 - RNA, 19 nt, Homo sapiens
  misc_RNA (1)...(19): siRNA sense strand
gagauuuaccugugagaug

SEQ ID NO: 1630853 - RNA, 19 nt, Homo sapiens
  misc_RNA (1)...(19): siRNA sense strand
ggaguccugugcagagugu

SEQ ID NO: 1630854 - RNA, 19 nt, Homo sapiens
  misc_RNA (1)...(19): siRNA sense strand
ugaguuucccacuugauua

SEQ ID NO: 1630855 - RNA, 19 nt, Homo sapiens
  misc_RNA (1)...(19): siRNA sense strand
gggagagucugcauuucca

SEQ ID NO: 1630856 - RNA, 19 nt, Homo sapiens
  misc_RNA (1)...(19): siRNA sense strand
agacaccugcuuugaguuu

SEQ ID NO: 1630857 - RNA, 19 nt, Homo sapiens
  misc_RNA (1)...(19): siRNA sense strand
gcgaugaccgggagcaguu

SEQ ID NO: 1630858 - RNA, 19 nt, Homo sapiens
  misc_RNA (1)...(19): siRNA sense strand
cagaagacaccugcuuuga

SEQ ID NO: 1630859 - RNA, 19 nt, Homo sapiens
  misc_RNA (1)...(19): siRNA sense strand
ggagcaguucuauaagauu

SEQ ID NO: 1630860 - RNA, 19 nt, Homo sapiens
  misc_RNA (1)...(19): siRNA sense strand
ccagaagacaccugcuuug

SEQ ID NO: 1630861 - RNA, 19 nt, Homo sapiens
  misc_RNA (1)...(19): siRNA sense strand
gaucaugggcccagaagac

SEQ ID NO: 1630862 - RNA, 19 nt, Homo sapiens
  misc_RNA (1)...(19): siRNA sense strand
agauuuaccugugagaugu

SEQ ID NO: 1630863 - RNA, 19 nt, Homo sapiens
  misc_RNA (1)...(19): siRNA sense strand
ugacgaaaguggagcuaac

SEQ ID NO: 1630864 - RNA, 19 nt, Homo sapiens
  misc_RNA (1)...(19): siRNA sense strand
cccacuugauuacccguua

SEQ ID NO: 1630865 - RNA, 19 nt, Homo sapiens
  misc_RNA (1)...(19): siRNA sense strand
agaugagauuuaccuguga

SEQ ID NO: 1630866 - RNA, 19 nt, Homo sapiens
  misc_RNA (1)...(19): siRNA sense strand
cauccugaguuucccacuu

SEQ ID NO: 1630867 - RNA, 19 nt, Homo sapiens
  misc_RNA (1)...(19): siRNA sense strand
accgggagcaguucuauaa

SEQ ID NO: 1630868 - RNA, 19 nt, Homo sapiens
  misc_RNA (1)...(19): siRNA sense strand
gaccgggagcaguucuaua

SEQ ID NO: 1630869 - RNA, 19 nt, Homo sapiens
  misc_RNA (1)...(19): siRNA sense strand
gcagagcccaaugacgaaa

SEQ ID NO: 1630870 - RNA, 19 nt, Homo sapiens
  misc_RNA (1)...(19): siRNA sense strand
ccaaagaugagauuuaccu

SEQ ID NO: 1630871 - RNA, 19 nt, Homo sapiens
  misc_RNA (1)...(19): siRNA sense strand
gacaccugcuuugaguuug

SEQ ID NO: 1630872 - RNA, 19 nt, Homo sapiens
  misc_RNA (1)...(19): siRNA sense strand
aagcagaucguccagaagu

SEQ ID NO: 1630873 - RNA, 19 nt, Homo sapiens
  misc_RNA (1)...(19): siRNA sense strand
aaguggagcuaacguggau

SEQ ID NO: 1630874 - RNA, 19 nt, Homo sapiens
  misc_RNA (1)...(19): siRNA sense strand
uuccugccauccugaguuu

SEQ ID NO: 1630875 - RNA, 19 nt, Homo sapiens
  misc_RNA (1)...(19): siRNA sense strand
gcagaucguccagaagucu

SEQ ID NO: 1630876 - RNA, 19 nt, Homo sapiens
  misc_RNA (1)...(19): siRNA sense strand
cccagaagacaccugcuuu

SEQ ID NO: 1630877 - RNA, 19 nt, Homo sapiens
  misc_RNA (1)...(19): siRNA sense strand
auccugaguuucccacuug

SEQ ID NO: 1630878 - RNA, 19 nt, Homo sapiens
  misc_RNA (1)...(19): siRNA sense strand
gcccagaagacaccugcuu

SEQ ID NO: 1630879 - RNA, 19 nt, Homo sapiens
  misc_RNA (1)...(19): siRNA sense strand
ggcagagcccaaugacgaa

SEQ ID NO: 1630880 - RNA, 19 nt, Homo sapiens
  misc_RNA (1)...(19): siRNA sense strand
cagagaaacugguagcuuu

SEQ ID NO: 1630881 - RNA, 19 nt, Homo sapiens
  misc_RNA (1)...(19): siRNA sense strand
acugguagcuuucuuguuu

SEQ ID NO: 1630882 - RNA, 19 nt, Homo sapiens
  misc_RNA (1)...(19): siRNA sense strand
gaugucagcuggcauaguc

SEQ ID NO: 1630883 - RNA, 19 nt, Homo sapiens
  misc_RNA (1)...(19): siRNA sense strand
ggacacagagaaacuggua

SEQ ID NO: 1630884 - RNA, 19 nt, Homo sapiens
  misc_RNA (1)...(19): siRNA sense strand
gcagaugucagcuggcaua

SEQ ID NO: 1630885 - RNA, 19 nt, Homo sapiens
  misc_RNA (1)...(19): siRNA sense strand
ggagaaggacacagagaaa

SEQ ID NO: 1630886 - RNA, 19 nt, Homo sapiens
  misc_RNA (1)...(19): siRNA sense strand
guagcuuucuuguuuggaa

SEQ ID NO: 1630887 - RNA, 19 nt, Homo sapiens
  misc_RNA (1)...(19): siRNA sense strand
caugggagcuauugauuuu

SEQ ID NO: 1630888 - RNA, 19 nt, Homo sapiens
  misc_RNA (1)...(19): siRNA sense strand
uggaauuacuucucacaug

SEQ ID NO: 1630889 - RNA, 19 nt, Homo sapiens
  misc_RNA (1)...(19): siRNA sense strand
gggagaaggacacagagaa

SEQ ID NO: 1630890 - RNA, 19 nt, Homo sapiens
  misc_RNA (1)...(19): siRNA sense strand
ucacuggacuccguuucuu

SEQ ID NO: 1630891 - RNA, 19 nt, Homo sapiens
  misc_RNA (1)...(19): siRNA sense strand
gcuuucuuguuuggaauua

SEQ ID NO: 1630892 - RNA, 19 nt, Homo sapiens
  misc_RNA (1)...(19): siRNA sense strand
ggcauagucugggccuuga

SEQ ID NO: 1630893 - RNA, 19 nt, Homo sapiens
  misc_RNA (1)...(19): siRNA sense strand
ccaugggagcuauugauuu

SEQ ID NO: 1630894 - RNA, 19 nt, Homo sapiens
  misc_RNA (1)...(19): siRNA sense strand
gaaggacacagagaaacug

SEQ ID NO: 1630895 - RNA, 19 nt, Homo sapiens
  misc_RNA (1)...(19): siRNA sense strand
gaccaugggagcuauugau

SEQ ID NO: 1630896 - RNA, 19 nt, Homo sapiens
  misc_RNA (1)...(19): siRNA sense strand
agagagcuguuacuagaac

SEQ ID NO: 1630897 - RNA, 19 nt, Homo sapiens
  misc_RNA (1)...(19): siRNA sense strand
ucauucggcuggugauuuu

SEQ ID NO: 1630898 - RNA, 19 nt, Homo sapiens
  misc_RNA (1)...(19): siRNA sense strand
ggaccaugggagcuauuga

SEQ ID NO: 1630899 - RNA, 19 nt, Homo sapiens
  misc_RNA (1)...(19): siRNA sense strand
cacuggacuccguuucuua

SEQ ID NO: 1630900 - RNA, 19 nt, Homo sapiens
  misc_RNA (1)...(19): siRNA sense strand
gagaaggacacagagaaac

SEQ ID NO: 1630901 - RNA, 19 nt, Homo sapiens
  misc_RNA (1)...(19): siRNA sense strand
uguuuggaauuacuucuca

SEQ ID NO: 1630902 - RNA, 19 nt, Homo sapiens
  misc_RNA (1)...(19): siRNA sense strand
aaacugguagcuuucuugu

SEQ ID NO: 1630903 - RNA, 19 nt, Homo sapiens
  misc_RNA (1)...(19): siRNA sense strand
cagagagcuguuacuagaa

SEQ ID NO: 1630904 - RNA, 19 nt, Homo sapiens
  misc_RNA (1)...(19): siRNA sense strand
cagagaaacugguagcuuu

SEQ ID NO: 1630905 - RNA, 19 nt, Homo sapiens
  misc_RNA (1)...(19): siRNA sense strand
acugguagcuuucuuguuu

SEQ ID NO: 1630906 - RNA, 19 nt, Homo sapiens
  misc_RNA (1)...(19): siRNA sense strand
gaugucagcuggcauaguc

SEQ ID NO: 1630907 - RNA, 19 nt, Homo sapiens
  misc_RNA (1)...(19): siRNA sense strand
ggacacagagaaacuggua

SEQ ID NO: 1630908 - RNA, 19 nt, Homo sapiens
  misc_RNA (1)...(19): siRNA sense strand
gcagaugucagcuggcaua

SEQ ID NO: 1630909 - RNA, 19 nt, Homo sapiens
  misc_RNA (1)...(19): siRNA sense strand
ggagaaggacacagagaaa

SEQ ID NO: 1630910 - RNA, 19 nt, Homo sapiens
  misc_RNA (1)...(19): siRNA sense strand
guagcuuucuuguuuggaa

SEQ ID NO: 1630911 - RNA, 19 nt, Homo sapiens
  misc_RNA (1)...(19): siRNA sense strand
caugggagcuauugauuuu

SEQ ID NO: 1630912 - RNA, 19 nt, Homo sapiens
  misc_RNA (1)...(19): siRNA sense strand
uggaauuacuucucacaug

SEQ ID NO: 1630913 - RNA, 19 nt, Homo sapiens
  misc_RNA (1)...(19): siRNA sense strand
gggagaaggacacagagaa

SEQ ID NO: 1630914 - RNA, 19 nt, Homo sapiens
  misc_RNA (1)...(19): siRNA sense strand
ucacuggacuccguuucuu

SEQ ID NO: 1630915 - RNA, 19 nt, Homo sapiens
  misc_RNA (1)...(19): siRNA sense strand
gcuuucuuguuuggaauua

SEQ ID NO: 1630916 - RNA, 19 nt, Homo sapiens
  misc_RNA (1)...(19): siRNA sense strand
ggcauagucugggccuuga

SEQ ID NO: 1630917 - RNA, 19 nt, Homo sapiens
  misc_RNA (1)...(19): siRNA sense strand
ccaugggagcuauugauuu

SEQ ID NO: 1630918 - RNA, 19 nt, Homo sapiens
  misc_RNA (1)...(19): siRNA sense strand
gaaggacacagagaaacug

SEQ ID NO: 1630919 - RNA, 19 nt, Homo sapiens
  misc_RNA (1)...(19): siRNA sense strand
gaccaugggagcuauugau

SEQ ID NO: 1630920 - RNA, 19 nt, Homo sapiens
  misc_RNA (1)...(19): siRNA sense strand
agagagcuguuacuagaac

SEQ ID NO: 1630921 - RNA, 19 nt, Homo sapiens
  misc_RNA (1)...(19): siRNA sense strand
ucauucggcuggugauuuu

SEQ ID NO: 1630922 - RNA, 19 nt, Homo sapiens
  misc_RNA (1)...(19): siRNA sense strand
ggaccaugggagcuauuga

SEQ ID NO: 1630923 - RNA, 19 nt, Homo sapiens
  misc_RNA (1)...(19): siRNA sense strand
cacuggacuccguuucuua

SEQ ID NO: 1630924 - RNA, 19 nt, Homo sapiens
  misc_RNA (1)...(19): siRNA sense strand
gagaaggacacagagaaac

SEQ ID NO: 1630925 - RNA, 19 nt, Homo sapiens
  misc_RNA (1)...(19): siRNA sense strand
uguuuggaauuacuucuca

SEQ ID NO: 1630926 - RNA, 19 nt, Homo sapiens
  misc_RNA (1)...(19): siRNA sense strand
aaacugguagcuuucuugu

SEQ ID NO: 1630927 - RNA, 19 nt, Homo sapiens
  misc_RNA (1)...(19): siRNA sense strand
cagagagcuguuacuagaa

SEQ ID NO: 1630928 - RNA, 19 nt, Homo sapiens
  misc_RNA (1)...(19): siRNA sense strand
gaagacaaguucuccuuug

SEQ ID NO: 1630929 - RNA, 19 nt, Homo sapiens
  misc_RNA (1)...(19): siRNA sense strand
gcacaggauuccagaaaug

SEQ ID NO: 1630930 - RNA, 19 nt, Homo sapiens
  misc_RNA (1)...(19): siRNA sense strand
gcacugaugacuucaaugu

SEQ ID NO: 1630931 - RNA, 19 nt, Homo sapiens
  misc_RNA (1)...(19): siRNA sense strand
ugacuucaaugucuggauu

SEQ ID NO: 1630932 - RNA, 19 nt, Homo sapiens
  misc_RNA (1)...(19): siRNA sense strand
gcuacuacuuuaaugaaga

SEQ ID NO: 1630933 - RNA, 19 nt, Homo sapiens
  misc_RNA (1)...(19): siRNA sense strand
uuuguggccucacugauua

SEQ ID NO: 1630934 - RNA, 19 nt, Homo sapiens
  misc_RNA (1)...(19): siRNA sense strand
gcucauacuucaugcugau

SEQ ID NO: 1630935 - RNA, 19 nt, Homo sapiens
  misc_RNA (1)...(19): siRNA sense strand
cagaccagcucauacuuca

SEQ ID NO: 1630936 - RNA, 19 nt, Homo sapiens
  misc_RNA (1)...(19): siRNA sense strand
ggaugugccuugugaagac

SEQ ID NO: 1630937 - RNA, 19 nt, Homo sapiens
  misc_RNA (1)...(19): siRNA sense strand
gccaagaggcccagacaga

SEQ ID NO: 1630938 - RNA, 19 nt, Homo sapiens
  misc_RNA (1)...(19): siRNA sense strand
gaccagcucauacuucaug

SEQ ID NO: 1630939 - RNA, 19 nt, Homo sapiens
  misc_RNA (1)...(19): siRNA sense strand
aauccuggcuacuguguga

SEQ ID NO: 1630940 - RNA, 19 nt, Homo sapiens
  misc_RNA (1)...(19): siRNA sense strand
gugggucccuggucuccua

SEQ ID NO: 1630941 - RNA, 19 nt, Homo sapiens
  misc_RNA (1)...(19): siRNA sense strand
cggaucagcugcccagaag

SEQ ID NO: 1630942 - RNA, 19 nt, Homo sapiens
  misc_RNA (1)...(19): siRNA sense strand
cgugagaccuggguugaug

SEQ ID NO: 1630943 - RNA, 19 nt, Homo sapiens
  misc_RNA (1)...(19): siRNA sense strand
gcugaucuccugccugaug

SEQ ID NO: 1630944 - RNA, 19 nt, Homo sapiens
  misc_RNA (1)...(19): siRNA sense strand
gaccuggguugaugcagau

SEQ ID NO: 1630945 - RNA, 19 nt, Homo sapiens
  misc_RNA (1)...(19): siRNA sense strand
ugaagacaaguucuccuuu

SEQ ID NO: 1630946 - RNA, 19 nt, Homo sapiens
  misc_RNA (1)...(19): siRNA sense strand
uggccucacugauuaagga

SEQ ID NO: 1630947 - RNA, 19 nt, Homo sapiens
  misc_RNA (1)...(19): siRNA sense strand
aagcacaggauuccagaaa

SEQ ID NO: 1630948 - RNA, 19 nt, Homo sapiens
  misc_RNA (1)...(19): siRNA sense strand
gaucuccugccugauguuu

SEQ ID NO: 1630949 - RNA, 19 nt, Homo sapiens
  misc_RNA (1)...(19): siRNA sense strand
gcucagaccagcucauacu

SEQ ID NO: 1630950 - RNA, 19 nt, Homo sapiens
  misc_RNA (1)...(19): siRNA sense strand
caagaggcccagacagagu

SEQ ID NO: 1630951 - RNA, 19 nt, Homo sapiens
  misc_RNA (1)...(19): siRNA sense strand
acugaugacuucaaugucu

SEQ ID NO: 1630952 - RNA, 19 nt, Homo sapiens
  misc_RNA (1)...(19): siRNA sense strand
cuacugcuacuacuuuaau

SEQ ID NO: 1630953 - RNA, 19 nt, Homo sapiens
  misc_RNA (1)...(19): siRNA sense strand
cgggcaaccuggugucugu

SEQ ID NO: 1630954 - RNA, 19 nt, Homo sapiens
  misc_RNA (1)...(19): siRNA sense strand
gugaagacaaguucuccuu

SEQ ID NO: 1630955 - RNA, 19 nt, Homo sapiens
  misc_RNA (1)...(19): siRNA sense strand
ugaugcagaucucuauugc

SEQ ID NO: 1630956 - RNA, 19 nt, Homo sapiens
  misc_RNA (1)...(19): siRNA sense strand
gaucucuauugccagaaca

SEQ ID NO: 1630957 - RNA, 19 nt, Homo sapiens
  misc_RNA (1)...(19): siRNA sense strand
uggcacugaugacuucaau

SEQ ID NO: 1630958 - RNA, 19 nt, Homo sapiens
  misc_RNA (1)...(19): siRNA sense strand
ggucccuggucuccuacaa

SEQ ID NO: 1630959 - RNA, 19 nt, Homo sapiens
  misc_RNA (1)...(19): siRNA sense strand
uccuacugcuacuacuuua

SEQ ID NO: 1630960 - RNA, 19 nt, Homo sapiens
  misc_RNA (1)...(19): siRNA sense strand
gaugugccuugugaagaca

SEQ ID NO: 1630961 - RNA, 19 nt, Homo sapiens
  misc_RNA (1)...(19): siRNA sense strand
gguugaugcagaucucuau

SEQ ID NO: 1630962 - RNA, 19 nt, Homo sapiens
  misc_RNA (1)...(19): siRNA sense strand
ucuauugccagaacaugaa

SEQ ID NO: 1630963 - RNA, 19 nt, Homo sapiens
  misc_RNA (1)...(19): siRNA sense strand
uguuaauccuggcuacugu

SEQ ID NO: 1630964 - RNA, 19 nt, Homo sapiens
  misc_RNA (1)...(19): siRNA sense strand
ucagaccagcucauacuuc

SEQ ID NO: 1630965 - RNA, 19 nt, Homo sapiens
  misc_RNA (1)...(19): siRNA sense strand
gaacagaaguuacagaaug

SEQ ID NO: 1630966 - RNA, 19 nt, Homo sapiens
  misc_RNA (1)...(19): siRNA sense strand
gggaaacucuggaagaaua

SEQ ID NO: 1630967 - RNA, 19 nt, Homo sapiens
  misc_RNA (1)...(19): siRNA sense strand
ggaauuugcugaagugaaa

SEQ ID NO: 1630968 - RNA, 19 nt, Homo sapiens
  misc_RNA (1)...(19): siRNA sense strand
gaaccaagccgaaaccaua

SEQ ID NO: 1630969 - RNA, 19 nt, Homo sapiens
  misc_RNA (1)...(19): siRNA sense strand
gaagaacacuccagaggau

SEQ ID NO: 1630970 - RNA, 19 nt, Homo sapiens
  misc_RNA (1)...(19): siRNA sense strand
caaauacgaugaagaaacu

SEQ ID NO: 1630971 - RNA, 19 nt, Homo sapiens
  misc_RNA (1)...(19): siRNA sense strand
gaagaaagagcugaacauu

SEQ ID NO: 1630972 - RNA, 19 nt, Homo sapiens
  misc_RNA (1)...(19): siRNA sense strand
acagagaaccagaaacuua

SEQ ID NO: 1630973 - RNA, 19 nt, Homo sapiens
  misc_RNA (1)...(19): siRNA sense strand
ggaggaagcugagcauaag

SEQ ID NO: 1630974 - RNA, 19 nt, Homo sapiens
  misc_RNA (1)...(19): siRNA sense strand
cagaaugacuuugcagaaa

SEQ ID NO: 1630975 - RNA, 19 nt, Homo sapiens
  misc_RNA (1)...(19): siRNA sense strand
caaggaauuugcugaagug

SEQ ID NO: 1630976 - RNA, 19 nt, Homo sapiens
  misc_RNA (1)...(19): siRNA sense strand
ggaagaauacaacaaggaa

SEQ ID NO: 1630977 - RNA, 19 nt, Homo sapiens
  misc_RNA (1)...(19): siRNA sense strand
ccauagcucuugagaagga

SEQ ID NO: 1630978 - RNA, 19 nt, Homo sapiens
  misc_RNA (1)...(19): siRNA sense strand
ugaagaaacuacugcaaag

SEQ ID NO: 1630979 - RNA, 19 nt, Homo sapiens
  misc_RNA (1)...(19): siRNA sense strand
aaagugagcaguccagaaa

SEQ ID NO: 1630980 - RNA, 19 nt, Homo sapiens
  misc_RNA (1)...(19): siRNA sense strand
gcugaagaguuuccaagga

SEQ ID NO: 1630981 - RNA, 19 nt, Homo sapiens
  misc_RNA (1)...(19): siRNA sense strand
augaagaggugaagaaaga

SEQ ID NO: 1630982 - RNA, 19 nt, Homo sapiens
  misc_RNA (1)...(19): siRNA sense strand
ucaaacaacuggaagaaaa

SEQ ID NO: 1630983 - RNA, 19 nt, Homo sapiens
  misc_RNA (1)...(19): siRNA sense strand
aaccauagcucuugagaag

SEQ ID NO: 1630984 - RNA, 19 nt, Homo sapiens
  misc_RNA (1)...(19): siRNA sense strand
gaauaugaacagacacuga

SEQ ID NO: 1630985 - RNA, 19 nt, Homo sapiens
  misc_RNA (1)...(19): siRNA sense strand
caacaaggaauuugcugaa

SEQ ID NO: 1630986 - RNA, 19 nt, Homo sapiens
  misc_RNA (1)...(19): siRNA sense strand
gaucaugacggaccuugaa

SEQ ID NO: 1630987 - RNA, 19 nt, Homo sapiens
  misc_RNA (1)...(19): siRNA sense strand
gagagaggcggagaccuua

SEQ ID NO: 1630988 - RNA, 19 nt, Homo sapiens
  misc_RNA (1)...(19): siRNA sense strand
gaaagugagcaguccagaa

SEQ ID NO: 1630989 - RNA, 19 nt, Homo sapiens
  misc_RNA (1)...(19): siRNA sense strand
gagauugaaaugaucauga

SEQ ID NO: 1630990 - RNA, 19 nt, Homo sapiens
  misc_RNA (1)...(19): siRNA sense strand
ucaccaagcugcgggagaa

SEQ ID NO: 1630991 - RNA, 19 nt, Homo sapiens
  misc_RNA (1)...(19): siRNA sense strand
gccgggaguucaagaagaa

SEQ ID NO: 1630992 - RNA, 19 nt, Homo sapiens
  misc_RNA (1)...(19): siRNA sense strand
uagggaaacucuggaagaa

SEQ ID NO: 1630993 - RNA, 19 nt, Homo sapiens
  misc_RNA (1)...(19): siRNA sense strand
aaacagcacacucaaacaa

SEQ ID NO: 1630994 - RNA, 19 nt, Homo sapiens
  misc_RNA (1)...(19): siRNA sense strand
gagcugaacauucugaagu

SEQ ID NO: 1630995 - RNA, 19 nt, Homo sapiens
  misc_RNA (1)...(19): siRNA sense strand
gacagcaacuccagcucaa

SEQ ID NO: 1630996 - RNA, 19 nt, Homo sapiens
  misc_RNA (1)...(19): siRNA sense strand
aacagaaguuacagaauga

SEQ ID NO: 1630997 - RNA, 19 nt, Homo sapiens
  misc_RNA (1)...(19): siRNA sense strand
ugagaaggaacagaaguua

SEQ ID NO: 1630998 - RNA, 19 nt, Homo sapiens
  misc_RNA (1)...(19): siRNA sense strand
gaaaccauagcucuugaga

SEQ ID NO: 1630999 - RNA, 19 nt, Homo sapiens
  misc_RNA (1)...(19): siRNA sense strand
aucaagagguuacgauaaa

SEQ ID NO: 1631000 - RNA, 19 nt, Homo sapiens
  misc_RNA (1)...(19): siRNA sense strand
guucagagccuacaaacag

SEQ ID NO: 1631001 - RNA, 19 nt, Homo sapiens
  misc_RNA (1)...(19): siRNA sense strand
gcagcuuucuugaaugucu

SEQ ID NO: 1631002 - RNA, 19 nt, Homo sapiens
  misc_RNA (1)...(19): siRNA sense strand
cgacgagauugaaaugauc

SEQ ID NO: 1631003 - RNA, 19 nt, Homo sapiens
  misc_RNA (1)...(19): siRNA sense strand
ccgagaauaugaacagaca

SEQ ID NO: 1631004 - RNA, 19 nt, Homo sapiens
  misc_RNA (1)...(19): siRNA sense strand
gaauacaacaaggaauuug

SEQ ID NO: 1631005 - RNA, 19 nt, Homo sapiens
  misc_RNA (1)...(19): siRNA sense strand
aaacagagaaccagaaacu

SEQ ID NO: 1631006 - RNA, 19 nt, Homo sapiens
  misc_RNA (1)...(19): siRNA sense strand
ugaaacagagaaccagaaa

SEQ ID NO: 1631007 - RNA, 19 nt, Homo sapiens
  misc_RNA (1)...(19): siRNA sense strand
gcuccagccuagaaguuga

SEQ ID NO: 1631008 - RNA, 19 nt, Homo sapiens
  misc_RNA (1)...(19): siRNA sense strand
ucaaaggccaggcugacua

SEQ ID NO: 1631009 - RNA, 19 nt, Homo sapiens
  misc_RNA (1)...(19): siRNA sense strand
gaacacuccagaggauuug

SEQ ID NO: 1631010 - RNA, 19 nt, Homo sapiens
  misc_RNA (1)...(19): siRNA sense strand
caaaggccgacgagauuga

SEQ ID NO: 1631011 - RNA, 19 nt, Homo sapiens
  misc_RNA (1)...(19): siRNA sense strand
gcaaaggccgacgagauug

SEQ ID NO: 1631012 - RNA, 19 nt, Homo sapiens
  misc_RNA (1)...(19): siRNA sense strand
gauaaaagcacuuaaagag

SEQ ID NO: 1631013 - RNA, 19 nt, Homo sapiens
  misc_RNA (1)...(19): siRNA sense strand
acaaggaauuugcugaagu

SEQ ID NO: 1631014 - RNA, 19 nt, Homo sapiens
  misc_RNA (1)...(19): siRNA sense strand
gaagaauacaacaaggaau

SEQ ID NO: 1631015 - RNA, 19 nt, Homo sapiens
  misc_RNA (1)...(19): siRNA sense strand
gagauugaugcacugagua

SEQ ID NO: 1631016 - RNA, 19 nt, Homo sapiens
  misc_RNA (1)...(19): siRNA sense strand
ccgacgagauugaaaugau

SEQ ID NO: 1631017 - RNA, 19 nt, Homo sapiens
  misc_RNA (1)...(19): siRNA sense strand
gaaaauccgagaauaugaa

SEQ ID NO: 1631018 - RNA, 19 nt, Homo sapiens
  misc_RNA (1)...(19): siRNA sense strand
aaccaaauacgaugaagaa

SEQ ID NO: 1631019 - RNA, 19 nt, Homo sapiens
  misc_RNA (1)...(19): siRNA sense strand
gaaagcugcaggagacaca

SEQ ID NO: 1631020 - RNA, 19 nt, Homo sapiens
  misc_RNA (1)...(19): siRNA sense strand
aaucaagagguuacgauaa

SEQ ID NO: 1631021 - RNA, 19 nt, Homo sapiens
  misc_RNA (1)...(19): siRNA sense strand
caaaggccaggcugacuau

SEQ ID NO: 1631022 - RNA, 19 nt, Homo sapiens
  misc_RNA (1)...(19): siRNA sense strand
cuacaaacagcccuggaaa

SEQ ID NO: 1631023 - RNA, 19 nt, Homo sapiens
  misc_RNA (1)...(19): siRNA sense strand
ccgaaaccauagcucuuga

SEQ ID NO: 1631024 - RNA, 19 nt, Homo sapiens
  misc_RNA (1)...(19): siRNA sense strand
ggaacagaaguuacagaau

SEQ ID NO: 1631025 - RNA, 19 nt, Homo sapiens
  misc_RNA (1)...(19): siRNA sense strand
cagaauuauuugaccugaa

SEQ ID NO: 1631026 - RNA, 19 nt, Homo sapiens
  misc_RNA (1)...(19): siRNA sense strand
uggaggaagcugagcauaa

SEQ ID NO: 1631027 - RNA, 19 nt, Homo sapiens
  misc_RNA (1)...(19): siRNA sense strand
aaaucaagagguuacgaua

SEQ ID NO: 1631028 - RNA, 19 nt, Homo sapiens
  misc_RNA (1)...(19): siRNA sense strand
gaaccggcaggaugaaagu

SEQ ID NO: 1631029 - RNA, 19 nt, Homo sapiens
  misc_RNA (1)...(19): siRNA sense strand
uaagggaacagcucucauc

SEQ ID NO: 1631030 - RNA, 19 nt, Homo sapiens
  misc_RNA (1)...(19): siRNA sense strand
ccaaauacgaugaagaaac

SEQ ID NO: 1631031 - RNA, 19 nt, Homo sapiens
  misc_RNA (1)...(19): siRNA sense strand
cagccuagaaguugaguug

SEQ ID NO: 1631032 - RNA, 19 nt, Homo sapiens
  misc_RNA (1)...(19): siRNA sense strand
agagauugaugcacugagu

SEQ ID NO: 1631033 - RNA, 19 nt, Homo sapiens
  misc_RNA (1)...(19): siRNA sense strand
cgccgcugcugaagaguuu

SEQ ID NO: 1631034 - RNA, 19 nt, Homo sapiens
  misc_RNA (1)...(19): siRNA sense strand
ugcaaaggccgacgagauu

SEQ ID NO: 1631035 - RNA, 19 nt, Homo sapiens
  misc_RNA (1)...(19): siRNA sense strand
gaugaagaaacuacugcaa

SEQ ID NO: 1631036 - RNA, 19 nt, Homo sapiens
  misc_RNA (1)...(19): siRNA sense strand
agaaggaacagaaguuaca

SEQ ID NO: 1631037 - RNA, 19 nt, Homo sapiens
  misc_RNA (1)...(19): siRNA sense strand
cagagaaccagaaacuuag

SEQ ID NO: 1631038 - RNA, 19 nt, Homo sapiens
  misc_RNA (1)...(19): siRNA sense strand
ugaaguccauggaguuugc

SEQ ID NO: 1631039 - RNA, 19 nt, Homo sapiens
  misc_RNA (1)...(19): siRNA sense strand
aggccaggcugacuaugaa

SEQ ID NO: 1631040 - RNA, 19 nt, Homo sapiens
  misc_RNA (1)...(19): siRNA sense strand
gagaaaauccgagaauaug

SEQ ID NO: 1631041 - RNA, 19 nt, Homo sapiens
  misc_RNA (1)...(19): siRNA sense strand
gcaacuccagcucaaagug

SEQ ID NO: 1631042 - RNA, 19 nt, Homo sapiens
  misc_RNA (1)...(19): siRNA sense strand
agaacacuccagaggauuu

SEQ ID NO: 1631043 - RNA, 19 nt, Homo sapiens
  misc_RNA (1)...(19): siRNA sense strand
gaagaaacuacugcaaagg

SEQ ID NO: 1631044 - RNA, 19 nt, Homo sapiens
  misc_RNA (1)...(19): siRNA sense strand
ggaagcugagcauaagguu

SEQ ID NO: 1631045 - RNA, 19 nt, Homo sapiens
  misc_RNA (1)...(19): siRNA sense strand
cagaucccguaccagcuuu

SEQ ID NO: 1631046 - RNA, 19 nt, Homo sapiens
  misc_RNA (1)...(19): siRNA sense strand
agagagaggcggagaccuu

SEQ ID NO: 1631047 - RNA, 19 nt, Homo sapiens
  misc_RNA (1)...(19): siRNA sense strand
aagcugagcauaagguuca

SEQ ID NO: 1631048 - RNA, 19 nt, Homo sapiens
  misc_RNA (1)...(19): siRNA sense strand
agaaugacuuugcagaaaa

SEQ ID NO: 1631049 - RNA, 19 nt, Homo sapiens
  misc_RNA (1)...(19): siRNA sense strand
aaccagaaacuuagggaaa

SEQ ID NO: 1631050 - RNA, 19 nt, Homo sapiens
  misc_RNA (1)...(19): siRNA sense strand
gaauucggccagccagauc

SEQ ID NO: 1631051 - RNA, 19 nt, Homo sapiens
  misc_RNA (1)...(19): siRNA sense strand
ggagagauugaugcacuga

SEQ ID NO: 1631052 - RNA, 19 nt, Homo sapiens
  misc_RNA (1)...(19): siRNA sense strand
aauaugaacagacacugaa

SEQ ID NO: 1631053 - RNA, 19 nt, Homo sapiens
  misc_RNA (1)...(19): siRNA sense strand
ugcacgauauugaaacaga

SEQ ID NO: 1631054 - RNA, 19 nt, Homo sapiens
  misc_RNA (1)...(19): siRNA sense strand
aagaaagagcugaacauuc

SEQ ID NO: 1631055 - RNA, 19 nt, Homo sapiens
  misc_RNA (1)...(19): siRNA sense strand
gaaaaccaaauacgaugaa

SEQ ID NO: 1631056 - RNA, 19 nt, Homo sapiens
  misc_RNA (1)...(19): siRNA sense strand
acagaaugacuuugcagaa

SEQ ID NO: 1631057 - RNA, 19 nt, Homo sapiens
  misc_RNA (1)...(19): siRNA sense strand
cagcuuucuugaaugucua

SEQ ID NO: 1631058 - RNA, 19 nt, Homo sapiens
  misc_RNA (1)...(19): siRNA sense strand
gagaauaugaacagacacu

SEQ ID NO: 1631059 - RNA, 19 nt, Homo sapiens
  misc_RNA (1)...(19): siRNA sense strand
ccaagcugcgggagaauuc

SEQ ID NO: 1631060 - RNA, 19 nt, Homo sapiens
  misc_RNA (1)...(19): siRNA sense strand
ugaacauucugaaguccau

SEQ ID NO: 1631061 - RNA, 19 nt, Homo sapiens
  misc_RNA (1)...(19): siRNA sense strand
aaagagcugaacauucuga

SEQ ID NO: 1631062 - RNA, 19 nt, Homo sapiens
  misc_RNA (1)...(19): siRNA sense strand
ccagaucccguaccagcuu

SEQ ID NO: 1631063 - RNA, 19 nt, Homo sapiens
  misc_RNA (1)...(19): siRNA sense strand
agauugaugcacugaguaa

SEQ ID NO: 1631064 - RNA, 19 nt, Homo sapiens
  misc_RNA (1)...(19): siRNA sense strand
ugaagaaagagcugaacau

SEQ ID NO: 1631065 - RNA, 19 nt, Homo sapiens
  misc_RNA (1)...(19): siRNA sense strand
gaacagaaguuacagaaug

SEQ ID NO: 1631066 - RNA, 19 nt, Homo sapiens
  misc_RNA (1)...(19): siRNA sense strand
gggaaacucuggaagaaua

SEQ ID NO: 1631067 - RNA, 19 nt, Homo sapiens
  misc_RNA (1)...(19): siRNA sense strand
ggaauuugcugaagugaaa

SEQ ID NO: 1631068 - RNA, 19 nt, Homo sapiens
  misc_RNA (1)...(19): siRNA sense strand
gaaccaagccgaaaccaua

SEQ ID NO: 1631069 - RNA, 19 nt, Homo sapiens
  misc_RNA (1)...(19): siRNA sense strand
gaagaacacuccagaggau

SEQ ID NO: 1631070 - RNA, 19 nt, Homo sapiens
  misc_RNA (1)...(19): siRNA sense strand
caaauacgaugaagaaacu

SEQ ID NO: 1631071 - RNA, 19 nt, Homo sapiens
  misc_RNA (1)...(19): siRNA sense strand
gaagaaagagcugaacauu

SEQ ID NO: 1631072 - RNA, 19 nt, Homo sapiens
  misc_RNA (1)...(19): siRNA sense strand
acagagaaccagaaacuua

SEQ ID NO: 1631073 - RNA, 19 nt, Homo sapiens
  misc_RNA (1)...(19): siRNA sense strand
ggaggaagcugagcauaag

SEQ ID NO: 1631074 - RNA, 19 nt, Homo sapiens
  misc_RNA (1)...(19): siRNA sense strand
cagaaugacuuugcagaaa

SEQ ID NO: 1631075 - RNA, 19 nt, Homo sapiens
  misc_RNA (1)...(19): siRNA sense strand
caaggaauuugcugaagug

SEQ ID NO: 1631076 - RNA, 19 nt, Homo sapiens
  misc_RNA (1)...(19): siRNA sense strand
ggaagaauacaacaaggaa

SEQ ID NO: 1631077 - RNA, 19 nt, Homo sapiens
  misc_RNA (1)...(19): siRNA sense strand
ccauagcucuugagaagga

SEQ ID NO: 1631078 - RNA, 19 nt, Homo sapiens
  misc_RNA (1)...(19): siRNA sense strand
ugaagaaacuacugcaaag

SEQ ID NO: 1631079 - RNA, 19 nt, Homo sapiens
  misc_RNA (1)...(19): siRNA sense strand
aaagugagcaguccagaaa

SEQ ID NO: 1631080 - RNA, 19 nt, Homo sapiens
  misc_RNA (1)...(19): siRNA sense strand
gcugaagaguuuccaagga

SEQ ID NO: 1631081 - RNA, 19 nt, Homo sapiens
  misc_RNA (1)...(19): siRNA sense strand
augaagaggugaagaaaga

SEQ ID NO: 1631082 - RNA, 19 nt, Homo sapiens
  misc_RNA (1)...(19): siRNA sense strand
ucaaacaacuggaagaaaa

SEQ ID NO: 1631083 - RNA, 19 nt, Homo sapiens
  misc_RNA (1)...(19): siRNA sense strand
aaccauagcucuugagaag

SEQ ID NO: 1631084 - RNA, 19 nt, Homo sapiens
  misc_RNA (1)...(19): siRNA sense strand
gaauaugaacagacacuga

SEQ ID NO: 1631085 - RNA, 19 nt, Homo sapiens
  misc_RNA (1)...(19): siRNA sense strand
caacaaggaauuugcugaa

SEQ ID NO: 1631086 - RNA, 19 nt, Homo sapiens
  misc_RNA (1)...(19): siRNA sense strand
gaucaugacggaccuugaa

SEQ ID NO: 1631087 - RNA, 19 nt, Homo sapiens
  misc_RNA (1)...(19): siRNA sense strand
gagagaggcggagaccuua

SEQ ID NO: 1631088 - RNA, 19 nt, Homo sapiens
  misc_RNA (1)...(19): siRNA sense strand
gaaagugagcaguccagaa

SEQ ID NO: 1631089 - RNA, 19 nt, Homo sapiens
  misc_RNA (1)...(19): siRNA sense strand
gagauugaaaugaucauga

SEQ ID NO: 1631090 - RNA, 19 nt, Homo sapiens
  misc_RNA (1)...(19): siRNA sense strand
ucaccaagcugcgggagaa

SEQ ID NO: 1631091 - RNA, 19 nt, Homo sapiens
  misc_RNA (1)...(19): siRNA sense strand
gccgggaguucaagaagaa

SEQ ID NO: 1631092 - RNA, 19 nt, Homo sapiens
  misc_RNA (1)...(19): siRNA sense strand
uagggaaacucuggaagaa

SEQ ID NO: 1631093 - RNA, 19 nt, Homo sapiens
  misc_RNA (1)...(19): siRNA sense strand
aaacagcacacucaaacaa

SEQ ID NO: 1631094 - RNA, 19 nt, Homo sapiens
  misc_RNA (1)...(19): siRNA sense strand
gagcugaacauucugaagu

SEQ ID NO: 1631095 - RNA, 19 nt, Homo sapiens
  misc_RNA (1)...(19): siRNA sense strand
gacagcaacuccagcucaa

SEQ ID NO: 1631096 - RNA, 19 nt, Homo sapiens
  misc_RNA (1)...(19): siRNA sense strand
aacagaaguuacagaauga

SEQ ID NO: 1631097 - RNA, 19 nt, Homo sapiens
  misc_RNA (1)...(19): siRNA sense strand
ugagaaggaacagaaguua

SEQ ID NO: 1631098 - RNA, 19 nt, Homo sapiens
  misc_RNA (1)...(19): siRNA sense strand
gaaaccauagcucuugaga

SEQ ID NO: 1631099 - RNA, 19 nt, Homo sapiens
  misc_RNA (1)...(19): siRNA sense strand
aucaagagguuacgauaaa

SEQ ID NO: 1631100 - RNA, 19 nt, Homo sapiens
  misc_RNA (1)...(19): siRNA sense strand
guucagagccuacaaacag

SEQ ID NO: 1631101 - RNA, 19 nt, Homo sapiens
  misc_RNA (1)...(19): siRNA sense strand
gcagcuuucuugaaugucu

SEQ ID NO: 1631102 - RNA, 19 nt, Homo sapiens
  misc_RNA (1)...(19): siRNA sense strand
cgacgagauugaaaugauc

SEQ ID NO: 1631103 - RNA, 19 nt, Homo sapiens
  misc_RNA (1)...(19): siRNA sense strand
ccgagaauaugaacagaca

SEQ ID NO: 1631104 - RNA, 19 nt, Homo sapiens
  misc_RNA (1)...(19): siRNA sense strand
gaauacaacaaggaauuug

SEQ ID NO: 1631105 - RNA, 19 nt, Homo sapiens
  misc_RNA (1)...(19): siRNA sense strand
aaacagagaaccagaaacu

SEQ ID NO: 1631106 - RNA, 19 nt, Homo sapiens
  misc_RNA (1)...(19): siRNA sense strand
ugaaacagagaaccagaaa

SEQ ID NO: 1631107 - RNA, 19 nt, Homo sapiens
  misc_RNA (1)...(19): siRNA sense strand
gcuccagccuagaaguuga

SEQ ID NO: 1631108 - RNA, 19 nt, Homo sapiens
  misc_RNA (1)...(19): siRNA sense strand
ucaaaggccaggcugacua

SEQ ID NO: 1631109 - RNA, 19 nt, Homo sapiens
  misc_RNA (1)...(19): siRNA sense strand
gaacacuccagaggauuug

SEQ ID NO: 1631110 - RNA, 19 nt, Homo sapiens
  misc_RNA (1)...(19): siRNA sense strand
caaaggccgacgagauuga

SEQ ID NO: 1631111 - RNA, 19 nt, Homo sapiens
  misc_RNA (1)...(19): siRNA sense strand
gcaaaggccgacgagauug

SEQ ID NO: 1631112 - RNA, 19 nt, Homo sapiens
  misc_RNA (1)...(19): siRNA sense strand
gauaaaagcacuuaaagag

SEQ ID NO: 1631113 - RNA, 19 nt, Homo sapiens
  misc_RNA (1)...(19): siRNA sense strand
acaaggaauuugcugaagu

SEQ ID NO: 1631114 - RNA, 19 nt, Homo sapiens
  misc_RNA (1)...(19): siRNA sense strand
gaagaauacaacaaggaau

SEQ ID NO: 1631115 - RNA, 19 nt, Homo sapiens
  misc_RNA (1)...(19): siRNA sense strand
gagauugaugcacugagua

SEQ ID NO: 1631116 - RNA, 19 nt, Homo sapiens
  misc_RNA (1)...(19): siRNA sense strand
ccgacgagauugaaaugau

SEQ ID NO: 1631117 - RNA, 19 nt, Homo sapiens
  misc_RNA (1)...(19): siRNA sense strand
gaaaauccgagaauaugaa

SEQ ID NO: 1631118 - RNA, 19 nt, Homo sapiens
  misc_RNA (1)...(19): siRNA sense strand
aaccaaauacgaugaagaa

SEQ ID NO: 1631119 - RNA, 19 nt, Homo sapiens
  misc_RNA (1)...(19): siRNA sense strand
gaaagcugcaggagacaca

SEQ ID NO: 1631120 - RNA, 19 nt, Homo sapiens
  misc_RNA (1)...(19): siRNA sense strand
aaucaagagguuacgauaa

SEQ ID NO: 1631121 - RNA, 19 nt, Homo sapiens
  misc_RNA (1)...(19): siRNA sense strand
caaaggccaggcugacuau

SEQ ID NO: 1631122 - RNA, 19 nt, Homo sapiens
  misc_RNA (1)...(19): siRNA sense strand
cuacaaacagcccuggaaa

SEQ ID NO: 1631123 - RNA, 19 nt, Homo sapiens
  misc_RNA (1)...(19): siRNA sense strand
ccgaaaccauagcucuuga

SEQ ID NO: 1631124 - RNA, 19 nt, Homo sapiens
  misc_RNA (1)...(19): siRNA sense strand
ggaacagaaguuacagaau

SEQ ID NO: 1631125 - RNA, 19 nt, Homo sapiens
  misc_RNA (1)...(19): siRNA sense strand
cagaauuauuugaccugaa

SEQ ID NO: 1631126 - RNA, 19 nt, Homo sapiens
  misc_RNA (1)...(19): siRNA sense strand
uggaggaagcugagcauaa

SEQ ID NO: 1631127 - RNA, 19 nt, Homo sapiens
  misc_RNA (1)...(19): siRNA sense strand
aaaucaagagguuacgaua

SEQ ID NO: 1631128 - RNA, 19 nt, Homo sapiens
  misc_RNA (1)...(19): siRNA sense strand
gaaccggcaggaugaaagu

SEQ ID NO: 1631129 - RNA, 19 nt, Homo sapiens
  misc_RNA (1)...(19): siRNA sense strand
uaagggaacagcucucauc

SEQ ID NO: 1631130 - RNA, 19 nt, Homo sapiens
  misc_RNA (1)...(19): siRNA sense strand
ccaaauacgaugaagaaac

SEQ ID NO: 1631131 - RNA, 19 nt, Homo sapiens
  misc_RNA (1)...(19): siRNA sense strand
cagccuagaaguugaguug

SEQ ID NO: 1631132 - RNA, 19 nt, Homo sapiens
  misc_RNA (1)...(19): siRNA sense strand
agagauugaugcacugagu

SEQ ID NO: 1631133 - RNA, 19 nt, Homo sapiens
  misc_RNA (1)...(19): siRNA sense strand
cgccgcugcugaagaguuu

SEQ ID NO: 1631134 - RNA, 19 nt, Homo sapiens
  misc_RNA (1)...(19): siRNA sense strand
ugcaaaggccgacgagauu

SEQ ID NO: 1631135 - RNA, 19 nt, Homo sapiens
  misc_RNA (1)...(19): siRNA sense strand
gaugaagaaacuacugcaa

SEQ ID NO: 1631136 - RNA, 19 nt, Homo sapiens
  misc_RNA (1)...(19): siRNA sense strand
agaaggaacagaaguuaca

SEQ ID NO: 1631137 - RNA, 19 nt, Homo sapiens
  misc_RNA (1)...(19): siRNA sense strand
cagagaaccagaaacuuag

SEQ ID NO: 1631138 - RNA, 19 nt, Homo sapiens
  misc_RNA (1)...(19): siRNA sense strand
ugaaguccauggaguuugc

SEQ ID NO: 1631139 - RNA, 19 nt, Homo sapiens
  misc_RNA (1)...(19): siRNA sense strand
aggccaggcugacuaugaa

SEQ ID NO: 1631140 - RNA, 19 nt, Homo sapiens
  misc_RNA (1)...(19): siRNA sense strand
gagaaaauccgagaauaug

SEQ ID NO: 1631141 - RNA, 19 nt, Homo sapiens
  misc_RNA (1)...(19): siRNA sense strand
gcaacuccagcucaaagug

SEQ ID NO: 1631142 - RNA, 19 nt, Homo sapiens
  misc_RNA (1)...(19): siRNA sense strand
agaacacuccagaggauuu

SEQ ID NO: 1631143 - RNA, 19 nt, Homo sapiens
  misc_RNA (1)...(19): siRNA sense strand
gaagaaacuacugcaaagg

SEQ ID NO: 1631144 - RNA, 19 nt, Homo sapiens
  misc_RNA (1)...(19): siRNA sense strand
ggaagcugagcauaagguu

SEQ ID NO: 1631145 - RNA, 19 nt, Homo sapiens
  misc_RNA (1)...(19): siRNA sense strand
cagaucccguaccagcuuu

SEQ ID NO: 1631146 - RNA, 19 nt, Homo sapiens
  misc_RNA (1)...(19): siRNA sense strand
agagagaggcggagaccuu

SEQ ID NO: 1631147 - RNA, 19 nt, Homo sapiens
  misc_RNA (1)...(19): siRNA sense strand
aagcugagcauaagguuca

SEQ ID NO: 1631148 - RNA, 19 nt, Homo sapiens
  misc_RNA (1)...(19): siRNA sense strand
agaaugacuuugcagaaaa

SEQ ID NO: 1631149 - RNA, 19 nt, Homo sapiens
  misc_RNA (1)...(19): siRNA sense strand
aaccagaaacuuagggaaa

SEQ ID NO: 1631150 - RNA, 19 nt, Homo sapiens
  misc_RNA (1)...(19): siRNA sense strand
gaauucggccagccagauc

SEQ ID NO: 1631151 - RNA, 19 nt, Homo sapiens
  misc_RNA (1)...(19): siRNA sense strand
ggagagauugaugcacuga

SEQ ID NO: 1631152 - RNA, 19 nt, Homo sapiens
  misc_RNA (1)...(19): siRNA sense strand
aauaugaacagacacugaa

SEQ ID NO: 1631153 - RNA, 19 nt, Homo sapiens
  misc_RNA (1)...(19): siRNA sense strand
ugcacgauauugaaacaga

SEQ ID NO: 1631154 - RNA, 19 nt, Homo sapiens
  misc_RNA (1)...(19): siRNA sense strand
aagaaagagcugaacauuc

SEQ ID NO: 1631155 - RNA, 19 nt, Homo sapiens
  misc_RNA (1)...(19): siRNA sense strand
gaaaaccaaauacgaugaa

SEQ ID NO: 1631156 - RNA, 19 nt, Homo sapiens
  misc_RNA (1)...(19): siRNA sense strand
acagaaugacuuugcagaa

SEQ ID NO: 1631157 - RNA, 19 nt, Homo sapiens
  misc_RNA (1)...(19): siRNA sense strand
cagcuuucuugaaugucua

SEQ ID NO: 1631158 - RNA, 19 nt, Homo sapiens
  misc_RNA (1)...(19): siRNA sense strand
gagaauaugaacagacacu

SEQ ID NO: 1631159 - RNA, 19 nt, Homo sapiens
  misc_RNA (1)...(19): siRNA sense strand
ccaagcugcgggagaauuc

SEQ ID NO: 1631160 - RNA, 19 nt, Homo sapiens
  misc_RNA (1)...(19): siRNA sense strand
ugaacauucugaaguccau

SEQ ID NO: 1631161 - RNA, 19 nt, Homo sapiens
  misc_RNA (1)...(19): siRNA sense strand
aaagagcugaacauucuga

SEQ ID NO: 1631162 - RNA, 19 nt, Homo sapiens
  misc_RNA (1)...(19): siRNA sense strand
ccagaucccguaccagcuu

SEQ ID NO: 1631163 - RNA, 19 nt, Homo sapiens
  misc_RNA (1)...(19): siRNA sense strand
agauugaugcacugaguaa

SEQ ID NO: 1631164 - RNA, 19 nt, Homo sapiens
  misc_RNA (1)...(19): siRNA sense strand
ugaagaaagagcugaacau

SEQ ID NO: 1631165 - RNA, 19 nt, Homo sapiens
  misc_RNA (1)...(19): siRNA sense strand
gaacagaaguuacagaaug

SEQ ID NO: 1631166 - RNA, 19 nt, Homo sapiens
  misc_RNA (1)...(19): siRNA sense strand
gggaaacucuggaagaaua

SEQ ID NO: 1631167 - RNA, 19 nt, Homo sapiens
  misc_RNA (1)...(19): siRNA sense strand
ggaauuugcugaagugaaa

SEQ ID NO: 1631168 - RNA, 19 nt, Homo sapiens
  misc_RNA (1)...(19): siRNA sense strand
gaaccaagccgaaaccaua

SEQ ID NO: 1631169 - RNA, 19 nt, Homo sapiens
  misc_RNA (1)...(19): siRNA sense strand
gaagaacacuccagaggau

SEQ ID NO: 1631170 - RNA, 19 nt, Homo sapiens
  misc_RNA (1)...(19): siRNA sense strand
caaauacgaugaagaaacu

SEQ ID NO: 1631171 - RNA, 19 nt, Homo sapiens
  misc_RNA (1)...(19): siRNA sense strand
gaagaaagagcugaacauu

SEQ ID NO: 1631172 - RNA, 19 nt, Homo sapiens
  misc_RNA (1)...(19): siRNA sense strand
acagagaaccagaaacuua

SEQ ID NO: 1631173 - RNA, 19 nt, Homo sapiens
  misc_RNA (1)...(19): siRNA sense strand
ggaggaagcugagcauaag

SEQ ID NO: 1631174 - RNA, 19 nt, Homo sapiens
  misc_RNA (1)...(19): siRNA sense strand
cagaaugacuuugcagaaa

SEQ ID NO: 1631175 - RNA, 19 nt, Homo sapiens
  misc_RNA (1)...(19): siRNA sense strand
caaggaauuugcugaagug

SEQ ID NO: 1631176 - RNA, 19 nt, Homo sapiens
  misc_RNA (1)...(19): siRNA sense strand
ggaagaauacaacaaggaa

SEQ ID NO: 1631177 - RNA, 19 nt, Homo sapiens
  misc_RNA (1)...(19): siRNA sense strand
ccauagcucuugagaagga

SEQ ID NO: 1631178 - RNA, 19 nt, Homo sapiens
  misc_RNA (1)...(19): siRNA sense strand
ugaagaaacuacugcaaag

SEQ ID NO: 1631179 - RNA, 19 nt, Homo sapiens
  misc_RNA (1)...(19): siRNA sense strand
aaagugagcaguccagaaa

SEQ ID NO: 1631180 - RNA, 19 nt, Homo sapiens
  misc_RNA (1)...(19): siRNA sense strand
gcugaagaguuuccaagga

SEQ ID NO: 1631181 - RNA, 19 nt, Homo sapiens
  misc_RNA (1)...(19): siRNA sense strand
augaagaggugaagaaaga

SEQ ID NO: 1631182 - RNA, 19 nt, Homo sapiens
  misc_RNA (1)...(19): siRNA sense strand
ucaaacaacuggaagaaaa

SEQ ID NO: 1631183 - RNA, 19 nt, Homo sapiens
  misc_RNA (1)...(19): siRNA sense strand
aaccauagcucuugagaag

SEQ ID NO: 1631184 - RNA, 19 nt, Homo sapiens
  misc_RNA (1)...(19): siRNA sense strand
gaauaugaacagacacuga

SEQ ID NO: 1631185 - RNA, 19 nt, Homo sapiens
  misc_RNA (1)...(19): siRNA sense strand
caacaaggaauuugcugaa

SEQ ID NO: 1631186 - RNA, 19 nt, Homo sapiens
  misc_RNA (1)...(19): siRNA sense strand
gaucaugacggaccuugaa

SEQ ID NO: 1631187 - RNA, 19 nt, Homo sapiens
  misc_RNA (1)...(19): siRNA sense strand
gagagaggcggagaccuua

SEQ ID NO: 1631188 - RNA, 19 nt, Homo sapiens
  misc_RNA (1)...(19): siRNA sense strand
gaaagugagcaguccagaa

SEQ ID NO: 1631189 - RNA, 19 nt, Homo sapiens
  misc_RNA (1)...(19): siRNA sense strand
gagauugaaaugaucauga

SEQ ID NO: 1631190 - RNA, 19 nt, Homo sapiens
  misc_RNA (1)...(19): siRNA sense strand
ucaccaagcugcgggagaa

SEQ ID NO: 1631191 - RNA, 19 nt, Homo sapiens
  misc_RNA (1)...(19): siRNA sense strand
gccgggaguucaagaagaa

SEQ ID NO: 1631192 - RNA, 19 nt, Homo sapiens
  misc_RNA (1)...(19): siRNA sense strand
uagggaaacucuggaagaa

SEQ ID NO: 1631193 - RNA, 19 nt, Homo sapiens
  misc_RNA (1)...(19): siRNA sense strand
aaacagcacacucaaacaa

SEQ ID NO: 1631194 - RNA, 19 nt, Homo sapiens
  misc_RNA (1)...(19): siRNA sense strand
gagcugaacauucugaagu

SEQ ID NO: 1631195 - RNA, 19 nt, Homo sapiens
  misc_RNA (1)...(19): siRNA sense strand
gacagcaacuccagcucaa

SEQ ID NO: 1631196 - RNA, 19 nt, Homo sapiens
  misc_RNA (1)...(19): siRNA sense strand
aacagaaguuacagaauga

SEQ ID NO: 1631197 - RNA, 19 nt, Homo sapiens
  misc_RNA (1)...(19): siRNA sense strand
ugagaaggaacagaaguua

SEQ ID NO: 1631198 - RNA, 19 nt, Homo sapiens
  misc_RNA (1)...(19): siRNA sense strand
gaaaccauagcucuugaga

SEQ ID NO: 1631199 - RNA, 19 nt, Homo sapiens
  misc_RNA (1)...(19): siRNA sense strand
aucaagagguuacgauaaa

SEQ ID NO: 1631200 - RNA, 19 nt, Homo sapiens
  misc_RNA (1)...(19): siRNA sense strand
guucagagccuacaaacag

SEQ ID NO: 1631201 - RNA, 19 nt, Homo sapiens
  misc_RNA (1)...(19): siRNA sense strand
gcagcuuucuugaaugucu

SEQ ID NO: 1631202 - RNA, 19 nt, Homo sapiens
  misc_RNA (1)...(19): siRNA sense strand
cgacgagauugaaaugauc

SEQ ID NO: 1631203 - RNA, 19 nt, Homo sapiens
  misc_RNA (1)...(19): siRNA sense strand
ccgagaauaugaacagaca

SEQ ID NO: 1631204 - RNA, 19 nt, Homo sapiens
  misc_RNA (1)...(19): siRNA sense strand
gaauacaacaaggaauuug

SEQ ID NO: 1631205 - RNA, 19 nt, Homo sapiens
  misc_RNA (1)...(19): siRNA sense strand
aaacagagaaccagaaacu

SEQ ID NO: 1631206 - RNA, 19 nt, Homo sapiens
  misc_RNA (1)...(19): siRNA sense strand
ugaaacagagaaccagaaa

SEQ ID NO: 1631207 - RNA, 19 nt, Homo sapiens
  misc_RNA (1)...(19): siRNA sense strand
gcuccagccuagaaguuga

SEQ ID NO: 1631208 - RNA, 19 nt, Homo sapiens
  misc_RNA (1)...(19): siRNA sense strand
ucaaaggccaggcugacua

SEQ ID NO: 1631209 - RNA, 19 nt, Homo sapiens
  misc_RNA (1)...(19): siRNA sense strand
gaacacuccagaggauuug

SEQ ID NO: 1631210 - RNA, 19 nt, Homo sapiens
  misc_RNA (1)...(19): siRNA sense strand
caaaggccgacgagauuga

SEQ ID NO: 1631211 - RNA, 19 nt, Homo sapiens
  misc_RNA (1)...(19): siRNA sense strand
gcaaaggccgacgagauug

SEQ ID NO: 1631212 - RNA, 19 nt, Homo sapiens
  misc_RNA (1)...(19): siRNA sense strand
gauaaaagcacuuaaagag

SEQ ID NO: 1631213 - RNA, 19 nt, Homo sapiens
  misc_RNA (1)...(19): siRNA sense strand
acaaggaauuugcugaagu

SEQ ID NO: 1631214 - RNA, 19 nt, Homo sapiens
  misc_RNA (1)...(19): siRNA sense strand
gaagaauacaacaaggaau

SEQ ID NO: 1631215 - RNA, 19 nt, Homo sapiens
  misc_RNA (1)...(19): siRNA sense strand
gagauugaugcacugagua

SEQ ID NO: 1631216 - RNA, 19 nt, Homo sapiens
  misc_RNA (1)...(19): siRNA sense strand
ccgacgagauugaaaugau

SEQ ID NO: 1631217 - RNA, 19 nt, Homo sapiens
  misc_RNA (1)...(19): siRNA sense strand
gaaaauccgagaauaugaa

SEQ ID NO: 1631218 - RNA, 19 nt, Homo sapiens
  misc_RNA (1)...(19): siRNA sense strand
aaccaaauacgaugaagaa

SEQ ID NO: 1631219 - RNA, 19 nt, Homo sapiens
  misc_RNA (1)...(19): siRNA sense strand
gaaagcugcaggagacaca

SEQ ID NO: 1631220 - RNA, 19 nt, Homo sapiens
  misc_RNA (1)...(19): siRNA sense strand
aaucaagagguuacgauaa

SEQ ID NO: 1631221 - RNA, 19 nt, Homo sapiens
  misc_RNA (1)...(19): siRNA sense strand
caaaggccaggcugacuau

SEQ ID NO: 1631222 - RNA, 19 nt, Homo sapiens
  misc_RNA (1)...(19): siRNA sense strand
cuacaaacagcccuggaaa

SEQ ID NO: 1631223 - RNA, 19 nt, Homo sapiens
  misc_RNA (1)...(19): siRNA sense strand
ccgaaaccauagcucuuga

SEQ ID NO: 1631224 - RNA, 19 nt, Homo sapiens
  misc_RNA (1)...(19): siRNA sense strand
ggaacagaaguuacagaau

SEQ ID NO: 1631225 - RNA, 19 nt, Homo sapiens
  misc_RNA (1)...(19): siRNA sense strand
cagaauuauuugaccugaa

SEQ ID NO: 1631226 - RNA, 19 nt, Homo sapiens
  misc_RNA (1)...(19): siRNA sense strand
uggaggaagcugagcauaa

SEQ ID NO: 1631227 - RNA, 19 nt, Homo sapiens
  misc_RNA (1)...(19): siRNA sense strand
aaaucaagagguuacgaua

SEQ ID NO: 1631228 - RNA, 19 nt, Homo sapiens
  misc_RNA (1)...(19): siRNA sense strand
gaaccggcaggaugaaagu

SEQ ID NO: 1631229 - RNA, 19 nt, Homo sapiens
  misc_RNA (1)...(19): siRNA sense strand
uaagggaacagcucucauc

SEQ ID NO: 1631230 - RNA, 19 nt, Homo sapiens
  misc_RNA (1)...(19): siRNA sense strand
ccaaauacgaugaagaaac

SEQ ID NO: 1631231 - RNA, 19 nt, Homo sapiens
  misc_RNA (1)...(19): siRNA sense strand
cagccuagaaguugaguug

SEQ ID NO: 1631232 - RNA, 19 nt, Homo sapiens
  misc_RNA (1)...(19): siRNA sense strand
agagauugaugcacugagu

SEQ ID NO: 1631233 - RNA, 19 nt, Homo sapiens
  misc_RNA (1)...(19): siRNA sense strand
cgccgcugcugaagaguuu

SEQ ID NO: 1631234 - RNA, 19 nt, Homo sapiens
  misc_RNA (1)...(19): siRNA sense strand
ugcaaaggccgacgagauu

SEQ ID NO: 1631235 - RNA, 19 nt, Homo sapiens
  misc_RNA (1)...(19): siRNA sense strand
gaugaagaaacuacugcaa

SEQ ID NO: 1631236 - RNA, 19 nt, Homo sapiens
  misc_RNA (1)...(19): siRNA sense strand
agaaggaacagaaguuaca

SEQ ID NO: 1631237 - RNA, 19 nt, Homo sapiens
  misc_RNA (1)...(19): siRNA sense strand
cagagaaccagaaacuuag

SEQ ID NO: 1631238 - RNA, 19 nt, Homo sapiens
  misc_RNA (1)...(19): siRNA sense strand
ugaaguccauggaguuugc

SEQ ID NO: 1631239 - RNA, 19 nt, Homo sapiens
  misc_RNA (1)...(19): siRNA sense strand
aggccaggcugacuaugaa

SEQ ID NO: 1631240 - RNA, 19 nt, Homo sapiens
  misc_RNA (1)...(19): siRNA sense strand
gagaaaauccgagaauaug

SEQ ID NO: 1631241 - RNA, 19 nt, Homo sapiens
  misc_RNA (1)...(19): siRNA sense strand
gcaacuccagcucaaagug

SEQ ID NO: 1631242 - RNA, 19 nt, Homo sapiens
  misc_RNA (1)...(19): siRNA sense strand
agaacacuccagaggauuu

SEQ ID NO: 1631243 - RNA, 19 nt, Homo sapiens
  misc_RNA (1)...(19): siRNA sense strand
gaagaaacuacugcaaagg

SEQ ID NO: 1631244 - RNA, 19 nt, Homo sapiens
  misc_RNA (1)...(19): siRNA sense strand
ggaagcugagcauaagguu

SEQ ID NO: 1631245 - RNA, 19 nt, Homo sapiens
  misc_RNA (1)...(19): siRNA sense strand
cagaucccguaccagcuuu

SEQ ID NO: 1631246 - RNA, 19 nt, Homo sapiens
  misc_RNA (1)...(19): siRNA sense strand
agagagaggcggagaccuu

SEQ ID NO: 1631247 - RNA, 19 nt, Homo sapiens
  misc_RNA (1)...(19): siRNA sense strand
aagcugagcauaagguuca

SEQ ID NO: 1631248 - RNA, 19 nt, Homo sapiens
  misc_RNA (1)...(19): siRNA sense strand
agaaugacuuugcagaaaa

SEQ ID NO: 1631249 - RNA, 19 nt, Homo sapiens
  misc_RNA (1)...(19): siRNA sense strand
aaccagaaacuuagggaaa

SEQ ID NO: 1631250 - RNA, 19 nt, Homo sapiens
  misc_RNA (1)...(19): siRNA sense strand
gaauucggccagccagauc

SEQ ID NO: 1631251 - RNA, 19 nt, Homo sapiens
  misc_RNA (1)...(19): siRNA sense strand
ggagagauugaugcacuga

SEQ ID NO: 1631252 - RNA, 19 nt, Homo sapiens
  misc_RNA (1)...(19): siRNA sense strand
aauaugaacagacacugaa

SEQ ID NO: 1631253 - RNA, 19 nt, Homo sapiens
  misc_RNA (1)...(19): siRNA sense strand
ugcacgauauugaaacaga

SEQ ID NO: 1631254 - RNA, 19 nt, Homo sapiens
  misc_RNA (1)...(19): siRNA sense strand
aagaaagagcugaacauuc

SEQ ID NO: 1631255 - RNA, 19 nt, Homo sapiens
  misc_RNA (1)...(19): siRNA sense strand
gaaaaccaaauacgaugaa

SEQ ID NO: 1631256 - RNA, 19 nt, Homo sapiens
  misc_RNA (1)...(19): siRNA sense strand
acagaaugacuuugcagaa

SEQ ID NO: 1631257 - RNA, 19 nt, Homo sapiens
  misc_RNA (1)...(19): siRNA sense strand
cagcuuucuugaaugucua

SEQ ID NO: 1631258 - RNA, 19 nt, Homo sapiens
  misc_RNA (1)...(19): siRNA sense strand
gagaauaugaacagacacu

SEQ ID NO: 1631259 - RNA, 19 nt, Homo sapiens
  misc_RNA (1)...(19): siRNA sense strand
ccaagcugcgggagaauuc

SEQ ID NO: 1631260 - RNA, 19 nt, Homo sapiens
  misc_RNA (1)...(19): siRNA sense strand
ugaacauucugaaguccau

SEQ ID NO: 1631261 - RNA, 19 nt, Homo sapiens
  misc_RNA (1)...(19): siRNA sense strand
aaagagcugaacauucuga

SEQ ID NO: 1631262 - RNA, 19 nt, Homo sapiens
  misc_RNA (1)...(19): siRNA sense strand
ccagaucccguaccagcuu

SEQ ID NO: 1631263 - RNA, 19 nt, Homo sapiens
  misc_RNA (1)...(19): siRNA sense strand
agauugaugcacugaguaa

SEQ ID NO: 1631264 - RNA, 19 nt, Homo sapiens
  misc_RNA (1)...(19): siRNA sense strand
ugaagaaagagcugaacau

SEQ ID NO: 1631265 - RNA, 19 nt, Homo sapiens
  misc_RNA (1)...(19): siRNA sense strand
gauaauacuugcuccaugu

SEQ ID NO: 1631266 - RNA, 19 nt, Homo sapiens
  misc_RNA (1)...(19): siRNA sense strand
cugaacaccugcaagaaua

SEQ ID NO: 1631267 - RNA, 19 nt, Homo sapiens
  misc_RNA (1)...(19): siRNA sense strand
gguaugacaagaaagauaa

SEQ ID NO: 1631268 - RNA, 19 nt, Homo sapiens
  misc_RNA (1)...(19): siRNA sense strand
gggaaacaauaacaacuuc

SEQ ID NO: 1631269 - RNA, 19 nt, Homo sapiens
  misc_RNA (1)...(19): siRNA sense strand
aaagggauguguguacaaa

SEQ ID NO: 1631270 - RNA, 19 nt, Homo sapiens
  misc_RNA (1)...(19): siRNA sense strand
guacaaaggacagacaaug

SEQ ID NO: 1631271 - RNA, 19 nt, Homo sapiens
  misc_RNA (1)...(19): siRNA sense strand
uaacaacuuccaauccaaa

SEQ ID NO: 1631272 - RNA, 19 nt, Homo sapiens
  misc_RNA (1)...(19): siRNA sense strand
gaaagggauguguguacaa

SEQ ID NO: 1631273 - RNA, 19 nt, Homo sapiens
  misc_RNA (1)...(19): siRNA sense strand
gaacaccugcaagaauaaa

SEQ ID NO: 1631274 - RNA, 19 nt, Homo sapiens
  misc_RNA (1)...(19): siRNA sense strand
caagauguaugcgaaaugc

SEQ ID NO: 1631275 - RNA, 19 nt, Homo sapiens
  misc_RNA (1)...(19): siRNA sense strand
gacaaugccaggacaacaa

SEQ ID NO: 1631276 - RNA, 19 nt, Homo sapiens
  misc_RNA (1)...(19): siRNA sense strand
caagaaagggaugugugua

SEQ ID NO: 1631277 - RNA, 19 nt, Homo sapiens
  misc_RNA (1)...(19): siRNA sense strand
aauaacaacuuccaaucca

SEQ ID NO: 1631278 - RNA, 19 nt, Homo sapiens
  misc_RNA (1)...(19): siRNA sense strand
gaaacaauaacaacuucca

SEQ ID NO: 1631279 - RNA, 19 nt, Homo sapiens
  misc_RNA (1)...(19): siRNA sense strand
cugcaagaauaaacgcuuu

SEQ ID NO: 1631280 - RNA, 19 nt, Homo sapiens
  misc_RNA (1)...(19): siRNA sense strand
ggugguaugacaagaaaga

SEQ ID NO: 1631281 - RNA, 19 nt, Homo sapiens
  misc_RNA (1)...(19): siRNA sense strand
aauacuugcuccauguuug

SEQ ID NO: 1631282 - RNA, 19 nt, Homo sapiens
  misc_RNA (1)...(19): siRNA sense strand
ccaagaaagggaugugugu

SEQ ID NO: 1631283 - RNA, 19 nt, Homo sapiens
  misc_RNA (1)...(19): siRNA sense strand
aaagccaacugccugaaca

SEQ ID NO: 1631284 - RNA, 19 nt, Homo sapiens
  misc_RNA (1)...(19): siRNA sense strand
aaucagagaagaaugugaa

SEQ ID NO: 1631285 - RNA, 19 nt, Homo sapiens
  misc_RNA (1)...(19): siRNA sense strand
agaaagggauguguguaca

SEQ ID NO: 1631286 - RNA, 19 nt, Homo sapiens
  misc_RNA (1)...(19): siRNA sense strand
aaacaagauguaugcgaaa

SEQ ID NO: 1631287 - RNA, 19 nt, Homo sapiens
  misc_RNA (1)...(19): siRNA sense strand
ugaacaccugcaagaauaa

SEQ ID NO: 1631288 - RNA, 19 nt, Homo sapiens
  misc_RNA (1)...(19): siRNA sense strand
uaauacuugcuccauguuu

SEQ ID NO: 1631289 - RNA, 19 nt, Homo sapiens
  misc_RNA (1)...(19): siRNA sense strand
gccccugccuggcuuauuu

SEQ ID NO: 1631290 - RNA, 19 nt, Homo sapiens
  misc_RNA (1)...(19): siRNA sense strand
acaauaacaacuuccaauc

SEQ ID NO: 1631291 - RNA, 19 nt, Homo sapiens
  misc_RNA (1)...(19): siRNA sense strand
gcugccagggaaacaauaa

SEQ ID NO: 1631292 - RNA, 19 nt, Homo sapiens
  misc_RNA (1)...(19): siRNA sense strand
caaaaucagagaagaaugu

SEQ ID NO: 1631293 - RNA, 19 nt, Homo sapiens
  misc_RNA (1)...(19): siRNA sense strand
ccugaacaccugcaagaau

SEQ ID NO: 1631294 - RNA, 19 nt, Homo sapiens
  misc_RNA (1)...(19): siRNA sense strand
auaacaacuuccaauccaa

SEQ ID NO: 1631295 - RNA, 19 nt, Homo sapiens
  misc_RNA (1)...(19): siRNA sense strand
uuggugguaugacaagaaa

SEQ ID NO: 1631296 - RNA, 19 nt, Homo sapiens
  misc_RNA (1)...(19): siRNA sense strand
aaugugaauuccaagaaag

SEQ ID NO: 1631297 - RNA, 19 nt, Homo sapiens
  misc_RNA (1)...(19): siRNA sense strand
gccaggacaacaagaagug

SEQ ID NO: 1631298 - RNA, 19 nt, Homo sapiens
  misc_RNA (1)...(19): siRNA sense strand
caauaacaacuuccaaucc

SEQ ID NO: 1631299 - RNA, 19 nt, Homo sapiens
  misc_RNA (1)...(19): siRNA sense strand
ucagagaagaaugugaauu

SEQ ID NO: 1631300 - RNA, 19 nt, Homo sapiens
  misc_RNA (1)...(19): siRNA sense strand
aacaagauguaugcgaaau

SEQ ID NO: 1631301 - RNA, 19 nt, Homo sapiens
  misc_RNA (1)...(19): siRNA sense strand
ugguaugacaagaaagaua

SEQ ID NO: 1631302 - RNA, 19 nt, Homo sapiens
  misc_RNA (1)...(19): siRNA sense strand
gauaauacuugcuccaugu

SEQ ID NO: 1631303 - RNA, 19 nt, Homo sapiens
  misc_RNA (1)...(19): siRNA sense strand
cugaacaccugcaagaaua

SEQ ID NO: 1631304 - RNA, 19 nt, Homo sapiens
  misc_RNA (1)...(19): siRNA sense strand
gguaugacaagaaagauaa

SEQ ID NO: 1631305 - RNA, 19 nt, Homo sapiens
  misc_RNA (1)...(19): siRNA sense strand
gggaaacaauaacaacuuc

SEQ ID NO: 1631306 - RNA, 19 nt, Homo sapiens
  misc_RNA (1)...(19): siRNA sense strand
aaagggauguguguacaaa

SEQ ID NO: 1631307 - RNA, 19 nt, Homo sapiens
  misc_RNA (1)...(19): siRNA sense strand
guacaaaggacagacaaug

SEQ ID NO: 1631308 - RNA, 19 nt, Homo sapiens
  misc_RNA (1)...(19): siRNA sense strand
uaacaacuuccaauccaaa

SEQ ID NO: 1631309 - RNA, 19 nt, Homo sapiens
  misc_RNA (1)...(19): siRNA sense strand
gaaagggauguguguacaa

SEQ ID NO: 1631310 - RNA, 19 nt, Homo sapiens
  misc_RNA (1)...(19): siRNA sense strand
gaacaccugcaagaauaaa

SEQ ID NO: 1631311 - RNA, 19 nt, Homo sapiens
  misc_RNA (1)...(19): siRNA sense strand
caagauguaugcgaaaugc

SEQ ID NO: 1631312 - RNA, 19 nt, Homo sapiens
  misc_RNA (1)...(19): siRNA sense strand
gacaaugccaggacaacaa

SEQ ID NO: 1631313 - RNA, 19 nt, Homo sapiens
  misc_RNA (1)...(19): siRNA sense strand
caagaaagggaugugugua

SEQ ID NO: 1631314 - RNA, 19 nt, Homo sapiens
  misc_RNA (1)...(19): siRNA sense strand
aauaacaacuuccaaucca

SEQ ID NO: 1631315 - RNA, 19 nt, Homo sapiens
  misc_RNA (1)...(19): siRNA sense strand
gaaacaauaacaacuucca

SEQ ID NO: 1631316 - RNA, 19 nt, Homo sapiens
  misc_RNA (1)...(19): siRNA sense strand
cugcaagaauaaacgcuuu

SEQ ID NO: 1631317 - RNA, 19 nt, Homo sapiens
  misc_RNA (1)...(19): siRNA sense strand
ggugguaugacaagaaaga

SEQ ID NO: 1631318 - RNA, 19 nt, Homo sapiens
  misc_RNA (1)...(19): siRNA sense strand
aauacuugcuccauguuug

SEQ ID NO: 1631319 - RNA, 19 nt, Homo sapiens
  misc_RNA (1)...(19): siRNA sense strand
ccaagaaagggaugugugu

SEQ ID NO: 1631320 - RNA, 19 nt, Homo sapiens
  misc_RNA (1)...(19): siRNA sense strand
aaagccaacugccugaaca

SEQ ID NO: 1631321 - RNA, 19 nt, Homo sapiens
  misc_RNA (1)...(19): siRNA sense strand
aaucagagaagaaugugaa

SEQ ID NO: 1631322 - RNA, 19 nt, Homo sapiens
  misc_RNA (1)...(19): siRNA sense strand
agaaagggauguguguaca

SEQ ID NO: 1631323 - RNA, 19 nt, Homo sapiens
  misc_RNA (1)...(19): siRNA sense strand
aaacaagauguaugcgaaa

SEQ ID NO: 1631324 - RNA, 19 nt, Homo sapiens
  misc_RNA (1)...(19): siRNA sense strand
ugaacaccugcaagaauaa

SEQ ID NO: 1631325 - RNA, 19 nt, Homo sapiens
  misc_RNA (1)...(19): siRNA sense strand
uaauacuugcuccauguuu

SEQ ID NO: 1631326 - RNA, 19 nt, Homo sapiens
  misc_RNA (1)...(19): siRNA sense strand
gccccugccuggcuuauuu

SEQ ID NO: 1631327 - RNA, 19 nt, Homo sapiens
  misc_RNA (1)...(19): siRNA sense strand
acaauaacaacuuccaauc

SEQ ID NO: 1631328 - RNA, 19 nt, Homo sapiens
  misc_RNA (1)...(19): siRNA sense strand
gcugccagggaaacaauaa

SEQ ID NO: 1631329 - RNA, 19 nt, Homo sapiens
  misc_RNA (1)...(19): siRNA sense strand
caaaaucagagaagaaugu

SEQ ID NO: 1631330 - RNA, 19 nt, Homo sapiens
  misc_RNA (1)...(19): siRNA sense strand
ccugaacaccugcaagaau

SEQ ID NO: 1631331 - RNA, 19 nt, Homo sapiens
  misc_RNA (1)...(19): siRNA sense strand
auaacaacuuccaauccaa

SEQ ID NO: 1631332 - RNA, 19 nt, Homo sapiens
  misc_RNA (1)...(19): siRNA sense strand
uuggugguaugacaagaaa

SEQ ID NO: 1631333 - RNA, 19 nt, Homo sapiens
  misc_RNA (1)...(19): siRNA sense strand
aaugugaauuccaagaaag

SEQ ID NO: 1631334 - RNA, 19 nt, Homo sapiens
  misc_RNA (1)...(19): siRNA sense strand
gccaggacaacaagaagug

SEQ ID NO: 1631335 - RNA, 19 nt, Homo sapiens
  misc_RNA (1)...(19): siRNA sense strand
caauaacaacuuccaaucc

SEQ ID NO: 1631336 - RNA, 19 nt, Homo sapiens
  misc_RNA (1)...(19): siRNA sense strand
ucagagaagaaugugaauu

SEQ ID NO: 1631337 - RNA, 19 nt, Homo sapiens
  misc_RNA (1)...(19): siRNA sense strand
aacaagauguaugcgaaau

SEQ ID NO: 1631338 - RNA, 19 nt, Homo sapiens
  misc_RNA (1)...(19): siRNA sense strand
ugguaugacaagaaagaua

SEQ ID NO: 1631339 - RNA, 19 nt, Homo sapiens
  misc_RNA (1)...(19): siRNA sense strand
gaccucagcuccacgaaua

SEQ ID NO: 1631340 - RNA, 19 nt, Homo sapiens
  misc_RNA (1)...(19): siRNA sense strand
ucaaauagcagucaagauu

SEQ ID NO: 1631341 - RNA, 19 nt, Homo sapiens
  misc_RNA (1)...(19): siRNA sense strand
uacagcagcuacugauuua

SEQ ID NO: 1631342 - RNA, 19 nt, Homo sapiens
  misc_RNA (1)...(19): siRNA sense strand
gcauggaguugucuaagga

SEQ ID NO: 1631343 - RNA, 19 nt, Homo sapiens
  misc_RNA (1)...(19): siRNA sense strand
ccacgaauaugcccacaga

SEQ ID NO: 1631344 - RNA, 19 nt, Homo sapiens
  misc_RNA (1)...(19): siRNA sense strand
gaaacuguguucccugcaa

SEQ ID NO: 1631345 - RNA, 19 nt, Homo sapiens
  misc_RNA (1)...(19): siRNA sense strand
gacgaaacuugucggcuuu

SEQ ID NO: 1631346 - RNA, 19 nt, Homo sapiens
  misc_RNA (1)...(19): siRNA sense strand
gaauguggcuucggcuaug

SEQ ID NO: 1631347 - RNA, 19 nt, Homo sapiens
  misc_RNA (1)...(19): siRNA sense strand
gggagauggugccgacuuu

SEQ ID NO: 1631348 - RNA, 19 nt, Homo sapiens
  misc_RNA (1)...(19): siRNA sense strand
ggaguugucuaaggaaugu

SEQ ID NO: 1631349 - RNA, 19 nt, Homo sapiens
  misc_RNA (1)...(19): siRNA sense strand
ggagaguggugcugucauc

SEQ ID NO: 1631350 - RNA, 19 nt, Homo sapiens
  misc_RNA (1)...(19): siRNA sense strand
ggucacaggacauucagua

SEQ ID NO: 1631351 - RNA, 19 nt, Homo sapiens
  misc_RNA (1)...(19): siRNA sense strand
gacaguuuauggagaagaa

SEQ ID NO: 1631352 - RNA, 19 nt, Homo sapiens
  misc_RNA (1)...(19): siRNA sense strand
agagacaguuuauggagaa

SEQ ID NO: 1631353 - RNA, 19 nt, Homo sapiens
  misc_RNA (1)...(19): siRNA sense strand
guccaucuguggcgaguuu

SEQ ID NO: 1631354 - RNA, 19 nt, Homo sapiens
  misc_RNA (1)...(19): siRNA sense strand
ugucaucuauuguaagaga

SEQ ID NO: 1631355 - RNA, 19 nt, Homo sapiens
  misc_RNA (1)...(19): siRNA sense strand
cacaggacauucaguacaa

SEQ ID NO: 1631356 - RNA, 19 nt, Homo sapiens
  misc_RNA (1)...(19): siRNA sense strand
ggaucggucuggaaacugu

SEQ ID NO: 1631357 - RNA, 19 nt, Homo sapiens
  misc_RNA (1)...(19): siRNA sense strand
gcuacuagaacaagagaaa

SEQ ID NO: 1631358 - RNA, 19 nt, Homo sapiens
  misc_RNA (1)...(19): siRNA sense strand
uaacaacacacugguagaa

SEQ ID NO: 1631359 - RNA, 19 nt, Homo sapiens
  misc_RNA (1)...(19): siRNA sense strand
gaagacauucauucucuca

SEQ ID NO: 1631360 - RNA, 19 nt, Homo sapiens
  misc_RNA (1)...(19): siRNA sense strand
uuacagcagcuacugauuu

SEQ ID NO: 1631361 - RNA, 19 nt, Homo sapiens
  misc_RNA (1)...(19): siRNA sense strand
ggacugcuugccaggauuu

SEQ ID NO: 1631362 - RNA, 19 nt, Homo sapiens
  misc_RNA (1)...(19): siRNA sense strand
gagacccuccuccuccuua

SEQ ID NO: 1631363 - RNA, 19 nt, Homo sapiens
  misc_RNA (1)...(19): siRNA sense strand
uaggcuauuugucauguaa

SEQ ID NO: 1631364 - RNA, 19 nt, Homo sapiens
  misc_RNA (1)...(19): siRNA sense strand
agacauucauucucucaau

SEQ ID NO: 1631365 - RNA, 19 nt, Homo sapiens
  misc_RNA (1)...(19): siRNA sense strand
caggaugcacuaacuauga

SEQ ID NO: 1631366 - RNA, 19 nt, Homo sapiens
  misc_RNA (1)...(19): siRNA sense strand
caacacacugguagaauca

SEQ ID NO: 1631367 - RNA, 19 nt, Homo sapiens
  misc_RNA (1)...(19): siRNA sense strand
ggaauguggcuucggcuau

SEQ ID NO: 1631368 - RNA, 19 nt, Homo sapiens
  misc_RNA (1)...(19): siRNA sense strand
guaagagacaguuuaugga

SEQ ID NO: 1631369 - RNA, 19 nt, Homo sapiens
  misc_RNA (1)...(19): siRNA sense strand
cauccucugugucaucuau

SEQ ID NO: 1631370 - RNA, 19 nt, Homo sapiens
  misc_RNA (1)...(19): siRNA sense strand
gcucaacgucuuuggauuc

SEQ ID NO: 1631371 - RNA, 19 nt, Homo sapiens
  misc_RNA (1)...(19): siRNA sense strand
gacauucauucucucaauc

SEQ ID NO: 1631372 - RNA, 19 nt, Homo sapiens
  misc_RNA (1)...(19): siRNA sense strand
ugugucaucuauuguaaga

SEQ ID NO: 1631373 - RNA, 19 nt, Homo sapiens
  misc_RNA (1)...(19): siRNA sense strand
acaacacacugguagaauc

SEQ ID NO: 1631374 - RNA, 19 nt, Homo sapiens
  misc_RNA (1)...(19): siRNA sense strand
gcuacugauuuaucuagau

SEQ ID NO: 1631375 - RNA, 19 nt, Homo sapiens
  misc_RNA (1)...(19): siRNA sense strand
ggauucaaauagcagucaa

SEQ ID NO: 1631376 - RNA, 19 nt, Homo sapiens
  misc_RNA (1)...(19): siRNA sense strand
uauaggaagacgaaacuug

SEQ ID NO: 1631377 - RNA, 19 nt, Homo sapiens
  misc_RNA (1)...(19): siRNA sense strand
uaaaagugcuacuagaaca

SEQ ID NO: 1631378 - RNA, 19 nt, Homo sapiens
  misc_RNA (1)...(19): siRNA sense strand
ucugugucaucuauuguaa

SEQ ID NO: 1631379 - RNA, 19 nt, Homo sapiens
  misc_RNA (1)...(19): siRNA sense strand
ugaacucacuggagaagac

SEQ ID NO: 1631380 - RNA, 19 nt, Homo sapiens
  misc_RNA (1)...(19): siRNA sense strand
uuacuaggcuauuugucau

SEQ ID NO: 1631381 - RNA, 19 nt, Homo sapiens
  misc_RNA (1)...(19): siRNA sense strand
ucagggaucggucuggaaa

SEQ ID NO: 1631382 - RNA, 19 nt, Homo sapiens
  misc_RNA (1)...(19): siRNA sense strand
gcuuucagaaggcaaauug

SEQ ID NO: 1631383 - RNA, 19 nt, Homo sapiens
  misc_RNA (1)...(19): siRNA sense strand
guggugacaacaucucuuu

SEQ ID NO: 1631384 - RNA, 19 nt, Homo sapiens
  misc_RNA (1)...(19): siRNA sense strand
uguaagagacaguuuaugg

SEQ ID NO: 1631385 - RNA, 19 nt, Homo sapiens
  misc_RNA (1)...(19): siRNA sense strand
ugagaagccagcuagauca

SEQ ID NO: 1631386 - RNA, 19 nt, Homo sapiens
  misc_RNA (1)...(19): siRNA sense strand
ggcauggaguugucuaagg

SEQ ID NO: 1631387 - RNA, 19 nt, Homo sapiens
  misc_RNA (1)...(19): siRNA sense strand
ccagcuagaucaggagagu

SEQ ID NO: 1631388 - RNA, 19 nt, Homo sapiens
  misc_RNA (1)...(19): siRNA sense strand
gguagaaucagcaucaacu

SEQ ID NO: 1631389 - RNA, 19 nt, Homo sapiens
  misc_RNA (1)...(19): siRNA sense strand
cagcagcuacugauuuauc

SEQ ID NO: 1631390 - RNA, 19 nt, Homo sapiens
  misc_RNA (1)...(19): siRNA sense strand
ucagaaggcaaauuguuca

SEQ ID NO: 1631391 - RNA, 19 nt, Homo sapiens
  misc_RNA (1)...(19): siRNA sense strand
gggacugcuugccaggauu

SEQ ID NO: 1631392 - RNA, 19 nt, Homo sapiens
  misc_RNA (1)...(19): siRNA sense strand
ucacaggacauucaguaca

SEQ ID NO: 1631393 - RNA, 19 nt, Homo sapiens
  misc_RNA (1)...(19): siRNA sense strand
ggccaggcauggaguuguc

SEQ ID NO: 1631394 - RNA, 19 nt, Homo sapiens
  misc_RNA (1)...(19): siRNA sense strand
uucaagacauggagugugu

SEQ ID NO: 1631395 - RNA, 19 nt, Homo sapiens
  misc_RNA (1)...(19): siRNA sense strand
ugaaucaggagacuguaga

SEQ ID NO: 1631396 - RNA, 19 nt, Homo sapiens
  misc_RNA (1)...(19): siRNA sense strand
gagauggugccgacuuucu

SEQ ID NO: 1631397 - RNA, 19 nt, Homo sapiens
  misc_RNA (1)...(19): siRNA sense strand
gcagcuacugauuuaucua

SEQ ID NO: 1631398 - RNA, 19 nt, Homo sapiens
  misc_RNA (1)...(19): siRNA sense strand
gcuggucucugcggucaca

SEQ ID NO: 1631399 - RNA, 19 nt, Homo sapiens
  misc_RNA (1)...(19): siRNA sense strand
cauggguggugacaacauc

SEQ ID NO: 1631400 - RNA, 19 nt, Homo sapiens
  misc_RNA (1)...(19): siRNA sense strand
gauggugccgacuuucuuc

SEQ ID NO: 1631401 - RNA, 19 nt, Homo sapiens
  misc_RNA (1)...(19): siRNA sense strand
ggcuauuugucauguaaag

SEQ ID NO: 1631402 - RNA, 19 nt, Homo sapiens
  misc_RNA (1)...(19): siRNA sense strand
uagaaucagcaucaacuca

SEQ ID NO: 1631403 - RNA, 19 nt, Homo sapiens
  misc_RNA (1)...(19): siRNA sense strand
aguccagucucauucugaa

SEQ ID NO: 1631404 - RNA, 19 nt, Homo sapiens
  misc_RNA (1)...(19): siRNA sense strand
gcucauccucugugucauc

SEQ ID NO: 1631405 - RNA, 19 nt, Homo sapiens
  misc_RNA (1)...(19): siRNA sense strand
cuaggcuauuugucaugua

SEQ ID NO: 1631406 - RNA, 19 nt, Homo sapiens
  misc_RNA (1)...(19): siRNA sense strand
gaugcacuaacuaugagaa

SEQ ID NO: 1631407 - RNA, 19 nt, Homo sapiens
  misc_RNA (1)...(19): siRNA sense strand
gaacucacuggagaagaca

SEQ ID NO: 1631408 - RNA, 19 nt, Homo sapiens
  misc_RNA (1)...(19): siRNA sense strand
caacucaggaugcacuaac

SEQ ID NO: 1631409 - RNA, 19 nt, Homo sapiens
  misc_RNA (1)...(19): siRNA sense strand
guagacagcaagaauucag

SEQ ID NO: 1631410 - RNA, 19 nt, Homo sapiens
  misc_RNA (1)...(19): siRNA sense strand
cagcuacugauuuaucuag

SEQ ID NO: 1631411 - RNA, 19 nt, Homo sapiens
  misc_RNA (1)...(19): siRNA sense strand
ccaguccagucucauucug

SEQ ID NO: 1631412 - RNA, 19 nt, Homo sapiens
  misc_RNA (1)...(19): siRNA sense strand
auaggaagacgaaacuugu

SEQ ID NO: 1631413 - RNA, 19 nt, Homo sapiens
  misc_RNA (1)...(19): siRNA sense strand
guuccaguccagucucauu

SEQ ID NO: 1631414 - RNA, 19 nt, Homo sapiens
  misc_RNA (1)...(19): siRNA sense strand
ucccauccaugugcuguga

SEQ ID NO: 1631415 - RNA, 19 nt, Homo sapiens
  misc_RNA (1)...(19): siRNA sense strand
guauuacuaggcuauuugu

SEQ ID NO: 1631416 - RNA, 19 nt, Homo sapiens
  misc_RNA (1)...(19): siRNA sense strand
gaccucagcuccacgaaua

SEQ ID NO: 1631417 - RNA, 19 nt, Homo sapiens
  misc_RNA (1)...(19): siRNA sense strand
ucaaauagcagucaagauu

SEQ ID NO: 1631418 - RNA, 19 nt, Homo sapiens
  misc_RNA (1)...(19): siRNA sense strand
uacagcagcuacugauuua

SEQ ID NO: 1631419 - RNA, 19 nt, Homo sapiens
  misc_RNA (1)...(19): siRNA sense strand
gcauggaguugucuaagga

SEQ ID NO: 1631420 - RNA, 19 nt, Homo sapiens
  misc_RNA (1)...(19): siRNA sense strand
ccacgaauaugcccacaga

SEQ ID NO: 1631421 - RNA, 19 nt, Homo sapiens
  misc_RNA (1)...(19): siRNA sense strand
gaaacuguguucccugcaa

SEQ ID NO: 1631422 - RNA, 19 nt, Homo sapiens
  misc_RNA (1)...(19): siRNA sense strand
gacgaaacuugucggcuuu

SEQ ID NO: 1631423 - RNA, 19 nt, Homo sapiens
  misc_RNA (1)...(19): siRNA sense strand
gaauguggcuucggcuaug

SEQ ID NO: 1631424 - RNA, 19 nt, Homo sapiens
  misc_RNA (1)...(19): siRNA sense strand
gggagauggugccgacuuu

SEQ ID NO: 1631425 - RNA, 19 nt, Homo sapiens
  misc_RNA (1)...(19): siRNA sense strand
ggaguugucuaaggaaugu

SEQ ID NO: 1631426 - RNA, 19 nt, Homo sapiens
  misc_RNA (1)...(19): siRNA sense strand
ggagaguggugcugucauc

SEQ ID NO: 1631427 - RNA, 19 nt, Homo sapiens
  misc_RNA (1)...(19): siRNA sense strand
ggucacaggacauucagua

SEQ ID NO: 1631428 - RNA, 19 nt, Homo sapiens
  misc_RNA (1)...(19): siRNA sense strand
gacaguuuauggagaagaa

SEQ ID NO: 1631429 - RNA, 19 nt, Homo sapiens
  misc_RNA (1)...(19): siRNA sense strand
agagacaguuuauggagaa

SEQ ID NO: 1631430 - RNA, 19 nt, Homo sapiens
  misc_RNA (1)...(19): siRNA sense strand
guccaucuguggcgaguuu

SEQ ID NO: 1631431 - RNA, 19 nt, Homo sapiens
  misc_RNA (1)...(19): siRNA sense strand
ugucaucuauuguaagaga

SEQ ID NO: 1631432 - RNA, 19 nt, Homo sapiens
  misc_RNA (1)...(19): siRNA sense strand
cacaggacauucaguacaa

SEQ ID NO: 1631433 - RNA, 19 nt, Homo sapiens
  misc_RNA (1)...(19): siRNA sense strand
ggaucggucuggaaacugu

SEQ ID NO: 1631434 - RNA, 19 nt, Homo sapiens
  misc_RNA (1)...(19): siRNA sense strand
gcuacuagaacaagagaaa

SEQ ID NO: 1631435 - RNA, 19 nt, Homo sapiens
  misc_RNA (1)...(19): siRNA sense strand
uaacaacacacugguagaa

SEQ ID NO: 1631436 - RNA, 19 nt, Homo sapiens
  misc_RNA (1)...(19): siRNA sense strand
gaagacauucauucucuca

SEQ ID NO: 1631437 - RNA, 19 nt, Homo sapiens
  misc_RNA (1)...(19): siRNA sense strand
uuacagcagcuacugauuu

SEQ ID NO: 1631438 - RNA, 19 nt, Homo sapiens
  misc_RNA (1)...(19): siRNA sense strand
ggacugcuugccaggauuu

SEQ ID NO: 1631439 - RNA, 19 nt, Homo sapiens
  misc_RNA (1)...(19): siRNA sense strand
gagacccuccuccuccuua

SEQ ID NO: 1631440 - RNA, 19 nt, Homo sapiens
  misc_RNA (1)...(19): siRNA sense strand
uaggcuauuugucauguaa

SEQ ID NO: 1631441 - RNA, 19 nt, Homo sapiens
  misc_RNA (1)...(19): siRNA sense strand
agacauucauucucucaau

SEQ ID NO: 1631442 - RNA, 19 nt, Homo sapiens
  misc_RNA (1)...(19): siRNA sense strand
caggaugcacuaacuauga

SEQ ID NO: 1631443 - RNA, 19 nt, Homo sapiens
  misc_RNA (1)...(19): siRNA sense strand
caacacacugguagaauca

SEQ ID NO: 1631444 - RNA, 19 nt, Homo sapiens
  misc_RNA (1)...(19): siRNA sense strand
ggaauguggcuucggcuau

SEQ ID NO: 1631445 - RNA, 19 nt, Homo sapiens
  misc_RNA (1)...(19): siRNA sense strand
guaagagacaguuuaugga

SEQ ID NO: 1631446 - RNA, 19 nt, Homo sapiens
  misc_RNA (1)...(19): siRNA sense strand
cauccucugugucaucuau

SEQ ID NO: 1631447 - RNA, 19 nt, Homo sapiens
  misc_RNA (1)...(19): siRNA sense strand
gcucaacgucuuuggauuc

SEQ ID NO: 1631448 - RNA, 19 nt, Homo sapiens
  misc_RNA (1)...(19): siRNA sense strand
gacauucauucucucaauc

SEQ ID NO: 1631449 - RNA, 19 nt, Homo sapiens
  misc_RNA (1)...(19): siRNA sense strand
ugugucaucuauuguaaga

SEQ ID NO: 1631450 - RNA, 19 nt, Homo sapiens
  misc_RNA (1)...(19): siRNA sense strand
acaacacacugguagaauc

SEQ ID NO: 1631451 - RNA, 19 nt, Homo sapiens
  misc_RNA (1)...(19): siRNA sense strand
gcuacugauuuaucuagau

SEQ ID NO: 1631452 - RNA, 19 nt, Homo sapiens
  misc_RNA (1)...(19): siRNA sense strand
ggauucaaauagcagucaa

SEQ ID NO: 1631453 - RNA, 19 nt, Homo sapiens
  misc_RNA (1)...(19): siRNA sense strand
uauaggaagacgaaacuug

SEQ ID NO: 1631454 - RNA, 19 nt, Homo sapiens
  misc_RNA (1)...(19): siRNA sense strand
uaaaagugcuacuagaaca

SEQ ID NO: 1631455 - RNA, 19 nt, Homo sapiens
  misc_RNA (1)...(19): siRNA sense strand
ucugugucaucuauuguaa

SEQ ID NO: 1631456 - RNA, 19 nt, Homo sapiens
  misc_RNA (1)...(19): siRNA sense strand
ugaacucacuggagaagac

SEQ ID NO: 1631457 - RNA, 19 nt, Homo sapiens
  misc_RNA (1)...(19): siRNA sense strand
uuacuaggcuauuugucau

SEQ ID NO: 1631458 - RNA, 19 nt, Homo sapiens
  misc_RNA (1)...(19): siRNA sense strand
ucagggaucggucuggaaa

SEQ ID NO: 1631459 - RNA, 19 nt, Homo sapiens
  misc_RNA (1)...(19): siRNA sense strand
gcuuucagaaggcaaauug

SEQ ID NO: 1631460 - RNA, 19 nt, Homo sapiens
  misc_RNA (1)...(19): siRNA sense strand
guggugacaacaucucuuu

SEQ ID NO: 1631461 - RNA, 19 nt, Homo sapiens
  misc_RNA (1)...(19): siRNA sense strand
uguaagagacaguuuaugg

SEQ ID NO: 1631462 - RNA, 19 nt, Homo sapiens
  misc_RNA (1)...(19): siRNA sense strand
ugagaagccagcuagauca

SEQ ID NO: 1631463 - RNA, 19 nt, Homo sapiens
  misc_RNA (1)...(19): siRNA sense strand
ggcauggaguugucuaagg

SEQ ID NO: 1631464 - RNA, 19 nt, Homo sapiens
  misc_RNA (1)...(19): siRNA sense strand
ccagcuagaucaggagagu

SEQ ID NO: 1631465 - RNA, 19 nt, Homo sapiens
  misc_RNA (1)...(19): siRNA sense strand
gguagaaucagcaucaacu

SEQ ID NO: 1631466 - RNA, 19 nt, Homo sapiens
  misc_RNA (1)...(19): siRNA sense strand
cagcagcuacugauuuauc

SEQ ID NO: 1631467 - RNA, 19 nt, Homo sapiens
  misc_RNA (1)...(19): siRNA sense strand
ucagaaggcaaauuguuca

SEQ ID NO: 1631468 - RNA, 19 nt, Homo sapiens
  misc_RNA (1)...(19): siRNA sense strand
gggacugcuugccaggauu

SEQ ID NO: 1631469 - RNA, 19 nt, Homo sapiens
  misc_RNA (1)...(19): siRNA sense strand
ucacaggacauucaguaca

SEQ ID NO: 1631470 - RNA, 19 nt, Homo sapiens
  misc_RNA (1)...(19): siRNA sense strand
ggccaggcauggaguuguc

SEQ ID NO: 1631471 - RNA, 19 nt, Homo sapiens
  misc_RNA (1)...(19): siRNA sense strand
uucaagacauggagugugu

SEQ ID NO: 1631472 - RNA, 19 nt, Homo sapiens
  misc_RNA (1)...(19): siRNA sense strand
ugaaucaggagacuguaga

SEQ ID NO: 1631473 - RNA, 19 nt, Homo sapiens
  misc_RNA (1)...(19): siRNA sense strand
gagauggugccgacuuucu

SEQ ID NO: 1631474 - RNA, 19 nt, Homo sapiens
  misc_RNA (1)...(19): siRNA sense strand
gcagcuacugauuuaucua

SEQ ID NO: 1631475 - RNA, 19 nt, Homo sapiens
  misc_RNA (1)...(19): siRNA sense strand
gcuggucucugcggucaca

SEQ ID NO: 1631476 - RNA, 19 nt, Homo sapiens
  misc_RNA (1)...(19): siRNA sense strand
cauggguggugacaacauc

SEQ ID NO: 1631477 - RNA, 19 nt, Homo sapiens
  misc_RNA (1)...(19): siRNA sense strand
gauggugccgacuuucuuc

SEQ ID NO: 1631478 - RNA, 19 nt, Homo sapiens
  misc_RNA (1)...(19): siRNA sense strand
ggcuauuugucauguaaag

SEQ ID NO: 1631479 - RNA, 19 nt, Homo sapiens
  misc_RNA (1)...(19): siRNA sense strand
uagaaucagcaucaacuca

SEQ ID NO: 1631480 - RNA, 19 nt, Homo sapiens
  misc_RNA (1)...(19): siRNA sense strand
aguccagucucauucugaa

SEQ ID NO: 1631481 - RNA, 19 nt, Homo sapiens
  misc_RNA (1)...(19): siRNA sense strand
gcucauccucugugucauc

SEQ ID NO: 1631482 - RNA, 19 nt, Homo sapiens
  misc_RNA (1)...(19): siRNA sense strand
cuaggcuauuugucaugua

SEQ ID NO: 1631483 - RNA, 19 nt, Homo sapiens
  misc_RNA (1)...(19): siRNA sense strand
gaugcacuaacuaugagaa

SEQ ID NO: 1631484 - RNA, 19 nt, Homo sapiens
  misc_RNA (1)...(19): siRNA sense strand
gaacucacuggagaagaca

SEQ ID NO: 1631485 - RNA, 19 nt, Homo sapiens
  misc_RNA (1)...(19): siRNA sense strand
caacucaggaugcacuaac

SEQ ID NO: 1631486 - RNA, 19 nt, Homo sapiens
  misc_RNA (1)...(19): siRNA sense strand
guagacagcaagaauucag

SEQ ID NO: 1631487 - RNA, 19 nt, Homo sapiens
  misc_RNA (1)...(19): siRNA sense strand
cagcuacugauuuaucuag

SEQ ID NO: 1631488 - RNA, 19 nt, Homo sapiens
  misc_RNA (1)...(19): siRNA sense strand
ccaguccagucucauucug

SEQ ID NO: 1631489 - RNA, 19 nt, Homo sapiens
  misc_RNA (1)...(19): siRNA sense strand
auaggaagacgaaacuugu

SEQ ID NO: 1631490 - RNA, 19 nt, Homo sapiens
  misc_RNA (1)...(19): siRNA sense strand
guuccaguccagucucauu

SEQ ID NO: 1631491 - RNA, 19 nt, Homo sapiens
  misc_RNA (1)...(19): siRNA sense strand
ucccauccaugugcuguga

SEQ ID NO: 1631492 - RNA, 19 nt, Homo sapiens
  misc_RNA (1)...(19): siRNA sense strand
guauuacuaggcuauuugu

SEQ ID NO: 1631493 - RNA, 19 nt, Homo sapiens
  misc_RNA (1)...(19): siRNA sense strand
gcaacuaccagcagaugaa

SEQ ID NO: 1631494 - RNA, 19 nt, Homo sapiens
  misc_RNA (1)...(19): siRNA sense strand
gaagacacaccucgaggau

SEQ ID NO: 1631495 - RNA, 19 nt, Homo sapiens
  misc_RNA (1)...(19): siRNA sense strand
gagaagacgcagcucauuc

SEQ ID NO: 1631496 - RNA, 19 nt, Homo sapiens
  misc_RNA (1)...(19): siRNA sense strand
agacacaccucgaggaucu

SEQ ID NO: 1631497 - RNA, 19 nt, Homo sapiens
  misc_RNA (1)...(19): siRNA sense strand
cgcaacagcugcccacuag

SEQ ID NO: 1631498 - RNA, 19 nt, Homo sapiens
  misc_RNA (1)...(19): siRNA sense strand
ucgaggaucuguacuggau

SEQ ID NO: 1631499 - RNA, 19 nt, Homo sapiens
  misc_RNA (1)...(19): siRNA sense strand
cgagagagacgccuacaag

SEQ ID NO: 1631500 - RNA, 19 nt, Homo sapiens
  misc_RNA (1)...(19): siRNA sense strand
uggaguaugucaacgacuu

SEQ ID NO: 1631501 - RNA, 19 nt, Homo sapiens
  misc_RNA (1)...(19): siRNA sense strand
gcccagucuugcagguaua

SEQ ID NO: 1631502 - RNA, 19 nt, Homo sapiens
  misc_RNA (1)...(19): siRNA sense strand
gcgcaacagcugcccacua

SEQ ID NO: 1631503 - RNA, 19 nt, Homo sapiens
  misc_RNA (1)...(19): siRNA sense strand
caaggucaagugcgagaaa

SEQ ID NO: 1631504 - RNA, 19 nt, Homo sapiens
  misc_RNA (1)...(19): siRNA sense strand
gaccagcucguguccaugu

SEQ ID NO: 1631505 - RNA, 19 nt, Homo sapiens
  misc_RNA (1)...(19): siRNA sense strand
gagcaacuaccagcagaug

SEQ ID NO: 1631506 - RNA, 19 nt, Homo sapiens
  misc_RNA (1)...(19): siRNA sense strand
agaagacgcagcucauuca

SEQ ID NO: 1631507 - RNA, 19 nt, Homo sapiens
  misc_RNA (1)...(19): siRNA sense strand
auaaacgcguccagcagaa

SEQ ID NO: 1631508 - RNA, 19 nt, Homo sapiens
  misc_RNA (1)...(19): siRNA sense strand
cagcagguggagcagcuua

SEQ ID NO: 1631509 - RNA, 19 nt, Homo sapiens
  misc_RNA (1)...(19): siRNA sense strand
cgaccgaacagaagacaca

SEQ ID NO: 1631510 - RNA, 19 nt, Homo sapiens
  misc_RNA (1)...(19): siRNA sense strand
agcaccaccuggagaauga

SEQ ID NO: 1631511 - RNA, 19 nt, Homo sapiens
  misc_RNA (1)...(19): siRNA sense strand
ccgcucagcacuccgugua

SEQ ID NO: 1631512 - RNA, 19 nt, Homo sapiens
  misc_RNA (1)...(19): siRNA sense strand
agaagcaccaccuggagaa

SEQ ID NO: 1631513 - RNA, 19 nt, Homo sapiens
  misc_RNA (1)...(19): siRNA sense strand
ccaucaccaucaucaccaa

SEQ ID NO: 1631514 - RNA, 19 nt, Homo sapiens
  misc_RNA (1)...(19): siRNA sense strand
ggaguaugucaacgacuuc

SEQ ID NO: 1631515 - RNA, 19 nt, Homo sapiens
  misc_RNA (1)...(19): siRNA sense strand
caaguucgacgugaagaag

SEQ ID NO: 1631516 - RNA, 19 nt, Homo sapiens
  misc_RNA (1)...(19): siRNA sense strand
uguacuggauggcgagcaa

SEQ ID NO: 1631517 - RNA, 19 nt, Homo sapiens
  misc_RNA (1)...(19): siRNA sense strand
agagagacgccuacaaggu

SEQ ID NO: 1631518 - RNA, 19 nt, Homo sapiens
  misc_RNA (1)...(19): siRNA sense strand
gaagcaccaccuggagaau

SEQ ID NO: 1631519 - RNA, 19 nt, Homo sapiens
  misc_RNA (1)...(19): siRNA sense strand
ugauccgccugaagcagaa

SEQ ID NO: 1631520 - RNA, 19 nt, Homo sapiens
  misc_RNA (1)...(19): siRNA sense strand
gcucaaguucgacgugaag

SEQ ID NO: 1631521 - RNA, 19 nt, Homo sapiens
  misc_RNA (1)...(19): siRNA sense strand
cgcccagucuugcagguau

SEQ ID NO: 1631522 - RNA, 19 nt, Homo sapiens
  misc_RNA (1)...(19): siRNA sense strand
gagaacagccuccugauua

SEQ ID NO: 1631523 - RNA, 19 nt, Homo sapiens
  misc_RNA (1)...(19): siRNA sense strand
guacaaggaugcuuugaaa

SEQ ID NO: 1631524 - RNA, 19 nt, Homo sapiens
  misc_RNA (1)...(19): siRNA sense strand
gaagaaaguacuagaguuu

SEQ ID NO: 1631525 - RNA, 19 nt, Homo sapiens
  misc_RNA (1)...(19): siRNA sense strand
cuagggagcuccucacuaa

SEQ ID NO: 1631526 - RNA, 19 nt, Homo sapiens
  misc_RNA (1)...(19): siRNA sense strand
caagagagcccgugaguuc

SEQ ID NO: 1631527 - RNA, 19 nt, Homo sapiens
  misc_RNA (1)...(19): siRNA sense strand
cagaaagcaucaagaagaa

SEQ ID NO: 1631528 - RNA, 19 nt, Homo sapiens
  misc_RNA (1)...(19): siRNA sense strand
ggugugauaccaaaucuua

SEQ ID NO: 1631529 - RNA, 19 nt, Homo sapiens
  misc_RNA (1)...(19): siRNA sense strand
ccacaguucuccuccauau

SEQ ID NO: 1631530 - RNA, 19 nt, Homo sapiens
  misc_RNA (1)...(19): siRNA sense strand
acaguucuccuccauauua

SEQ ID NO: 1631531 - RNA, 19 nt, Homo sapiens
  misc_RNA (1)...(19): siRNA sense strand
gacauuaccuggaguaucg

SEQ ID NO: 1631532 - RNA, 19 nt, Homo sapiens
  misc_RNA (1)...(19): siRNA sense strand
ucagaaagcaucaagaaga

SEQ ID NO: 1631533 - RNA, 19 nt, Homo sapiens
  misc_RNA (1)...(19): siRNA sense strand
ggagggagcacuucgucua

SEQ ID NO: 1631534 - RNA, 19 nt, Homo sapiens
  misc_RNA (1)...(19): siRNA sense strand
ucacauauacacuagauga

SEQ ID NO: 1631535 - RNA, 19 nt, Homo sapiens
  misc_RNA (1)...(19): siRNA sense strand
gaacagccuccugauuauu

SEQ ID NO: 1631536 - RNA, 19 nt, Homo sapiens
  misc_RNA (1)...(19): siRNA sense strand
ugagugugaucuucauaaa

SEQ ID NO: 1631537 - RNA, 19 nt, Homo sapiens
  misc_RNA (1)...(19): siRNA sense strand
agaagaaaguacuagaguu

SEQ ID NO: 1631538 - RNA, 19 nt, Homo sapiens
  misc_RNA (1)...(19): siRNA sense strand
ugaguccucuuucacauau

SEQ ID NO: 1631539 - RNA, 19 nt, Homo sapiens
  misc_RNA (1)...(19): siRNA sense strand
gagcuccucacuaaaguuu

SEQ ID NO: 1631540 - RNA, 19 nt, Homo sapiens
  misc_RNA (1)...(19): siRNA sense strand
gacagugaguccucuuuca

SEQ ID NO: 1631541 - RNA, 19 nt, Homo sapiens
  misc_RNA (1)...(19): siRNA sense strand
agaacagccuccugauuau

SEQ ID NO: 1631542 - RNA, 19 nt, Homo sapiens
  misc_RNA (1)...(19): siRNA sense strand
caguaggccucaccgauga

SEQ ID NO: 1631543 - RNA, 19 nt, Homo sapiens
  misc_RNA (1)...(19): siRNA sense strand
gaaagcaucaagaagaaag

SEQ ID NO: 1631544 - RNA, 19 nt, Homo sapiens
  misc_RNA (1)...(19): siRNA sense strand
caauugauaccgcagauga

SEQ ID NO: 1631545 - RNA, 19 nt, Homo sapiens
  misc_RNA (1)...(19): siRNA sense strand
ggugcccucuggugugaua

SEQ ID NO: 1631546 - RNA, 19 nt, Homo sapiens
  misc_RNA (1)...(19): siRNA sense strand
cacauccucuucucugauu

SEQ ID NO: 1631547 - RNA, 19 nt, Homo sapiens
  misc_RNA (1)...(19): siRNA sense strand
ccaagagcccauucagaaa

SEQ ID NO: 1631548 - RNA, 19 nt, Homo sapiens
  misc_RNA (1)...(19): siRNA sense strand
gaaagauguggaagagaga

SEQ ID NO: 1631549 - RNA, 19 nt, Homo sapiens
  misc_RNA (1)...(19): siRNA sense strand
agauuacuuuccugugaua

SEQ ID NO: 1631550 - RNA, 19 nt, Homo sapiens
  misc_RNA (1)...(19): siRNA sense strand
aacagccuccugauuauua

SEQ ID NO: 1631551 - RNA, 19 nt, Homo sapiens
  misc_RNA (1)...(19): siRNA sense strand
uccaagagcccauucagaa

SEQ ID NO: 1631552 - RNA, 19 nt, Homo sapiens
  misc_RNA (1)...(19): siRNA sense strand
cgagaacagccuccugauu

SEQ ID NO: 1631553 - RNA, 19 nt, Homo sapiens
  misc_RNA (1)...(19): siRNA sense strand
guccaggccacaauugaua

SEQ ID NO: 1631554 - RNA, 19 nt, Homo sapiens
  misc_RNA (1)...(19): siRNA sense strand
uuagaagacuggguagaug

SEQ ID NO: 1631555 - RNA, 19 nt, Homo sapiens
  misc_RNA (1)...(19): siRNA sense strand
gucaucaaguacaaagauu

SEQ ID NO: 1631556 - RNA, 19 nt, Homo sapiens
  misc_RNA (1)...(19): siRNA sense strand
gagaguccaggccacaauu

SEQ ID NO: 1631557 - RNA, 19 nt, Homo sapiens
  misc_RNA (1)...(19): siRNA sense strand
gguacaaggaugcuuugaa

SEQ ID NO: 1631558 - RNA, 19 nt, Homo sapiens
  misc_RNA (1)...(19): siRNA sense strand
caagagcccauucagaaag

SEQ ID NO: 1631559 - RNA, 19 nt, Homo sapiens
  misc_RNA (1)...(19): siRNA sense strand
ggaagugcugaaugcagua

SEQ ID NO: 1631560 - RNA, 19 nt, Homo sapiens
  misc_RNA (1)...(19): siRNA sense strand
caucaagaagaaaguacua

SEQ ID NO: 1631561 - RNA, 19 nt, Homo sapiens
  misc_RNA (1)...(19): siRNA sense strand
gaagcagaggagccuguaa

SEQ ID NO: 1631562 - RNA, 19 nt, Homo sapiens
  misc_RNA (1)...(19): siRNA sense strand
gaaagccucagugucaugu

SEQ ID NO: 1631563 - RNA, 19 nt, Homo sapiens
  misc_RNA (1)...(19): siRNA sense strand
agugaaagccucaguguca

SEQ ID NO: 1631564 - RNA, 19 nt, Homo sapiens
  misc_RNA (1)...(19): siRNA sense strand
uagccaagcugaacaacac

SEQ ID NO: 1631565 - RNA, 19 nt, Homo sapiens
  misc_RNA (1)...(19): siRNA sense strand
gggagcuccucacuaaagu

SEQ ID NO: 1631566 - RNA, 19 nt, Homo sapiens
  misc_RNA (1)...(19): siRNA sense strand
gggagcacuucgucuaugg

SEQ ID NO: 1631567 - RNA, 19 nt, Homo sapiens
  misc_RNA (1)...(19): siRNA sense strand
gaccacuucuguguguuug

SEQ ID NO: 1631568 - RNA, 19 nt, Homo sapiens
  misc_RNA (1)...(19): siRNA sense strand
gcuccucacuaaaguuugg

SEQ ID NO: 1631569 - RNA, 19 nt, Homo sapiens
  misc_RNA (1)...(19): siRNA sense strand
gagggagcacuucgucuau

SEQ ID NO: 1631570 - RNA, 19 nt, Homo sapiens
  misc_RNA (1)...(19): siRNA sense strand
agugugaucuucauaaagg

SEQ ID NO: 1631571 - RNA, 19 nt, Homo sapiens
  misc_RNA (1)...(19): siRNA sense strand
ccugaccacuucugugugu

SEQ ID NO: 1631572 - RNA, 19 nt, Homo sapiens
  misc_RNA (1)...(19): siRNA sense strand
ucaagaagaaaguacuaga

SEQ ID NO: 1631573 - RNA, 19 nt, Homo sapiens
  misc_RNA (1)...(19): siRNA sense strand
caagaagaaaguacuagag

SEQ ID NO: 1631574 - RNA, 19 nt, Homo sapiens
  misc_RNA (1)...(19): siRNA sense strand
gagagcccgugaguucaug

SEQ ID NO: 1631575 - RNA, 19 nt, Homo sapiens
  misc_RNA (1)...(19): siRNA sense strand
gcagaugaugccacuguca

SEQ ID NO: 1631576 - RNA, 19 nt, Homo sapiens
  misc_RNA (1)...(19): siRNA sense strand
ggacauuaccuggaguauc

SEQ ID NO: 1631577 - RNA, 19 nt, Homo sapiens
  misc_RNA (1)...(19): siRNA sense strand
ccgagagcauucccaguag

SEQ ID NO: 1631578 - RNA, 19 nt, Homo sapiens
  misc_RNA (1)...(19): siRNA sense strand
guuccuaguuccuuuccau

SEQ ID NO: 1631579 - RNA, 19 nt, Homo sapiens
  misc_RNA (1)...(19): siRNA sense strand
cgagagcauucccaguagu

SEQ ID NO: 1631580 - RNA, 19 nt, Homo sapiens
  misc_RNA (1)...(19): siRNA sense strand
gaguccaggccacaauuga

SEQ ID NO: 1631581 - RNA, 19 nt, Homo sapiens
  misc_RNA (1)...(19): siRNA sense strand
guuagaagacuggguagau

SEQ ID NO: 1631582 - RNA, 19 nt, Homo sapiens
  misc_RNA (1)...(19): siRNA sense strand
ccacuucuguguguuugca

SEQ ID NO: 1631583 - RNA, 19 nt, Homo sapiens
  misc_RNA (1)...(19): siRNA sense strand
ugaccacuucuguguguuu

SEQ ID NO: 1631584 - RNA, 19 nt, Homo sapiens
  misc_RNA (1)...(19): siRNA sense strand
gcccugaccacuucugugu

SEQ ID NO: 1631585 - RNA, 19 nt, Homo sapiens
  misc_RNA (1)...(19): siRNA sense strand
aaagguggccgaguuagug

SEQ ID NO: 1631586 - RNA, 19 nt, Homo sapiens
  misc_RNA (1)...(19): siRNA sense strand
aagauuacuuuccugugau

SEQ ID NO: 1631587 - RNA, 19 nt, Homo sapiens
  misc_RNA (1)...(19): siRNA sense strand
cgaugaggguagugaugau

SEQ ID NO: 1631588 - RNA, 19 nt, Homo sapiens
  misc_RNA (1)...(19): siRNA sense strand
ggaguccagcagccagaaa

SEQ ID NO: 1631589 - RNA, 19 nt, Homo sapiens
  misc_RNA (1)...(19): siRNA sense strand
guccagcaacgucuccuuu

SEQ ID NO: 1631590 - RNA, 19 nt, Homo sapiens
  misc_RNA (1)...(19): siRNA sense strand
ccagugaaagccucagugu

SEQ ID NO: 1631591 - RNA, 19 nt, Homo sapiens
  misc_RNA (1)...(19): siRNA sense strand
caguucuccuccauauuau

SEQ ID NO: 1631592 - RNA, 19 nt, Homo sapiens
  misc_RNA (1)...(19): siRNA sense strand
accgagagcauucccagua

SEQ ID NO: 1631593 - RNA, 19 nt, Homo sapiens
  misc_RNA (1)...(19): siRNA sense strand
gaguccucuuucacauaua

SEQ ID NO: 1631594 - RNA, 19 nt, Homo sapiens
  misc_RNA (1)...(19): siRNA sense strand
cacaauugauaccgcagau

SEQ ID NO: 1631595 - RNA, 19 nt, Homo sapiens
  misc_RNA (1)...(19): siRNA sense strand
ugaaaagguggccgaguua

SEQ ID NO: 1631596 - RNA, 19 nt, Homo sapiens
  misc_RNA (1)...(19): siRNA sense strand
caucaaguacaaagauuac

SEQ ID NO: 1631597 - RNA, 19 nt, Homo sapiens
  misc_RNA (1)...(19): siRNA sense strand
ucagugucauguccagcaa

SEQ ID NO: 1631598 - RNA, 19 nt, Homo sapiens
  misc_RNA (1)...(19): siRNA sense strand
gugaaagccucagugucau

SEQ ID NO: 1631599 - RNA, 19 nt, Homo sapiens
  misc_RNA (1)...(19): siRNA sense strand
aagaagaaaguacuagagu

SEQ ID NO: 1631600 - RNA, 19 nt, Homo sapiens
  misc_RNA (1)...(19): siRNA sense strand
gccuugcccugauagaagu

SEQ ID NO: 1631601 - RNA, 19 nt, Homo sapiens
  misc_RNA (1)...(19): siRNA sense strand
gagagcauucccaguaguc

SEQ ID NO: 1631602 - RNA, 19 nt, Homo sapiens
  misc_RNA (1)...(19): siRNA sense strand
cgaagcagaggagccugua

SEQ ID NO: 1631603 - RNA, 19 nt, Homo sapiens
  misc_RNA (1)...(19): siRNA sense strand
acagccuccugauuauuau

SEQ ID NO: 1631604 - RNA, 19 nt, Homo sapiens
  misc_RNA (1)...(19): siRNA sense strand
gaguucauggagcuucuuu

SEQ ID NO: 1631605 - RNA, 19 nt, Homo sapiens
  misc_RNA (1)...(19): siRNA sense strand
ccucuucuuucuccacauc

SEQ ID NO: 1631606 - RNA, 19 nt, Homo sapiens
  misc_RNA (1)...(19): siRNA sense strand
aguuccugcuccucaaaua

SEQ ID NO: 1631607 - RNA, 19 nt, Homo sapiens
  misc_RNA (1)...(19): siRNA sense strand
uuugaaagauguggaagag

SEQ ID NO: 1631608 - RNA, 19 nt, Homo sapiens
  misc_RNA (1)...(19): siRNA sense strand
auucagaaagcaucaagaa

SEQ ID NO: 1631609 - RNA, 19 nt, Homo sapiens
  misc_RNA (1)...(19): siRNA sense strand
ggagcuccucacuaaaguu

SEQ ID NO: 1631610 - RNA, 19 nt, Homo sapiens
  misc_RNA (1)...(19): siRNA sense strand
ccucuuccacuuuguacuu

SEQ ID NO: 1631611 - RNA, 19 nt, Homo sapiens
  misc_RNA (1)...(19): siRNA sense strand
cagacagugaguccucuuu

SEQ ID NO: 1631612 - RNA, 19 nt, Homo sapiens
  misc_RNA (1)...(19): siRNA sense strand
ccgaugaggguagugauga

SEQ ID NO: 1631613 - RNA, 19 nt, Homo sapiens
  misc_RNA (1)...(19): siRNA sense strand
aaucuuaccgagagcauuc

SEQ ID NO: 1631614 - RNA, 19 nt, Homo sapiens
  misc_RNA (1)...(19): siRNA sense strand
ucugggaagugcugaaugc

SEQ ID NO: 1631615 - RNA, 19 nt, Homo sapiens
  misc_RNA (1)...(19): siRNA sense strand
gaagauaucagucaucaua

SEQ ID NO: 1631616 - RNA, 19 nt, Homo sapiens
  misc_RNA (1)...(19): siRNA sense strand
gaagauaucccauuugaaa

SEQ ID NO: 1631617 - RNA, 19 nt, Homo sapiens
  misc_RNA (1)...(19): siRNA sense strand
ugacaucgcuucccaaauu

SEQ ID NO: 1631618 - RNA, 19 nt, Homo sapiens
  misc_RNA (1)...(19): siRNA sense strand
gguuauagcuguagugaaa

SEQ ID NO: 1631619 - RNA, 19 nt, Homo sapiens
  misc_RNA (1)...(19): siRNA sense strand
ggagagaaguacacucaaa

SEQ ID NO: 1631620 - RNA, 19 nt, Homo sapiens
  misc_RNA (1)...(19): siRNA sense strand
gcaaagcagucaugguuau

SEQ ID NO: 1631621 - RNA, 19 nt, Homo sapiens
  misc_RNA (1)...(19): siRNA sense strand
gcagggauccuccuaauug

SEQ ID NO: 1631622 - RNA, 19 nt, Homo sapiens
  misc_RNA (1)...(19): siRNA sense strand
gagacaagguuauuacaau

SEQ ID NO: 1631623 - RNA, 19 nt, Homo sapiens
  misc_RNA (1)...(19): siRNA sense strand
ggaauccauuugaucauuu

SEQ ID NO: 1631624 - RNA, 19 nt, Homo sapiens
  misc_RNA (1)...(19): siRNA sense strand
gaacauaaucugacagugu

SEQ ID NO: 1631625 - RNA, 19 nt, Homo sapiens
  misc_RNA (1)...(19): siRNA sense strand
gguggaagauaucccauuu

SEQ ID NO: 1631626 - RNA, 19 nt, Homo sapiens
  misc_RNA (1)...(19): siRNA sense strand
cauaucaucuggacacaaa

SEQ ID NO: 1631627 - RNA, 19 nt, Homo sapiens
  misc_RNA (1)...(19): siRNA sense strand
gggaacaguuugaagauau

SEQ ID NO: 1631628 - RNA, 19 nt, Homo sapiens
  misc_RNA (1)...(19): siRNA sense strand
uggaagauaucccauuuga

SEQ ID NO: 1631629 - RNA, 19 nt, Homo sapiens
  misc_RNA (1)...(19): siRNA sense strand
caaagagacaagguuauua

SEQ ID NO: 1631630 - RNA, 19 nt, Homo sapiens
  misc_RNA (1)...(19): siRNA sense strand
gccaaaggcuguaucuugu

SEQ ID NO: 1631631 - RNA, 19 nt, Homo sapiens
  misc_RNA (1)...(19): siRNA sense strand
caauagguguuauccuuug

SEQ ID NO: 1631632 - RNA, 19 nt, Homo sapiens
  misc_RNA (1)...(19): siRNA sense strand
gaaccagaccgaacauaau

SEQ ID NO: 1631633 - RNA, 19 nt, Homo sapiens
  misc_RNA (1)...(19): siRNA sense strand
ggacaauagucagaaugaa

SEQ ID NO: 1631634 - RNA, 19 nt, Homo sapiens
  misc_RNA (1)...(19): siRNA sense strand
gggaauccauuugaucauu

SEQ ID NO: 1631635 - RNA, 19 nt, Homo sapiens
  misc_RNA (1)...(19): siRNA sense strand
gaaaugguguuacuaaacc

SEQ ID NO: 1631636 - RNA, 19 nt, Homo sapiens
  misc_RNA (1)...(19): siRNA sense strand
uacaauagguguuauccuu

SEQ ID NO: 1631637 - RNA, 19 nt, Homo sapiens
  misc_RNA (1)...(19): siRNA sense strand
cagcaaagcagucaugguu

SEQ ID NO: 1631638 - RNA, 19 nt, Homo sapiens
  misc_RNA (1)...(19): siRNA sense strand
gaaaagaagcuaaacucua

SEQ ID NO: 1631639 - RNA, 19 nt, Homo sapiens
  misc_RNA (1)...(19): siRNA sense strand
aagcuaaacucuaccuguu

SEQ ID NO: 1631640 - RNA, 19 nt, Homo sapiens
  misc_RNA (1)...(19): siRNA sense strand
ggaguucuacaucacauuu

SEQ ID NO: 1631641 - RNA, 19 nt, Homo sapiens
  misc_RNA (1)...(19): siRNA sense strand
gaaucuggguuacaugagu

SEQ ID NO: 1631642 - RNA, 19 nt, Homo sapiens
  misc_RNA (1)...(19): siRNA sense strand
gagaaucuggguuacauga

SEQ ID NO: 1631643 - RNA, 19 nt, Homo sapiens
  misc_RNA (1)...(19): siRNA sense strand
cagauuccgucuccacaaa

SEQ ID NO: 1631644 - RNA, 19 nt, Homo sapiens
  misc_RNA (1)...(19): siRNA sense strand
aaagcucaguugacaauga

SEQ ID NO: 1631645 - RNA, 19 nt, Homo sapiens
  misc_RNA (1)...(19): siRNA sense strand
gaauuugccuagcauuguc

SEQ ID NO: 1631646 - RNA, 19 nt, Homo sapiens
  misc_RNA (1)...(19): siRNA sense strand
ccaaagagacaagguuauu

SEQ ID NO: 1631647 - RNA, 19 nt, Homo sapiens
  misc_RNA (1)...(19): siRNA sense strand
ugugauugcuugcauuuau

SEQ ID NO: 1631648 - RNA, 19 nt, Homo sapiens
  misc_RNA (1)...(19): siRNA sense strand
ggaacaguuugaagauauc

SEQ ID NO: 1631649 - RNA, 19 nt, Homo sapiens
  misc_RNA (1)...(19): siRNA sense strand
gaagggaauccauuugauc

SEQ ID NO: 1631650 - RNA, 19 nt, Homo sapiens
  misc_RNA (1)...(19): siRNA sense strand
gcaugcauuucugucauuu

SEQ ID NO: 1631651 - RNA, 19 nt, Homo sapiens
  misc_RNA (1)...(19): siRNA sense strand
ggaauagggguaccauuua

SEQ ID NO: 1631652 - RNA, 19 nt, Homo sapiens
  misc_RNA (1)...(19): siRNA sense strand
acauucauuucuccaguua

SEQ ID NO: 1631653 - RNA, 19 nt, Homo sapiens
  misc_RNA (1)...(19): siRNA sense strand
caacugcauugcuguuaca

SEQ ID NO: 1631654 - RNA, 19 nt, Homo sapiens
  misc_RNA (1)...(19): siRNA sense strand
gcacaugauuuuaaagguu

SEQ ID NO: 1631655 - RNA, 19 nt, Homo sapiens
  misc_RNA (1)...(19): siRNA sense strand
cgaagggaauccauuugau

SEQ ID NO: 1631656 - RNA, 19 nt, Homo sapiens
  misc_RNA (1)...(19): siRNA sense strand
gaaugaagaagucucaaag

SEQ ID NO: 1631657 - RNA, 19 nt, Homo sapiens
  misc_RNA (1)...(19): siRNA sense strand
ccaaagcucaguugacaau

SEQ ID NO: 1631658 - RNA, 19 nt, Homo sapiens
  misc_RNA (1)...(19): siRNA sense strand
gcuguggacucuaucagau

SEQ ID NO: 1631659 - RNA, 19 nt, Homo sapiens
  misc_RNA (1)...(19): siRNA sense strand
ccauucacaccacaacuua

SEQ ID NO: 1631660 - RNA, 19 nt, Homo sapiens
  misc_RNA (1)...(19): siRNA sense strand
caucauagcuaccauucac

SEQ ID NO: 1631661 - RNA, 19 nt, Homo sapiens
  misc_RNA (1)...(19): siRNA sense strand
gaauagggguaccauuuau

SEQ ID NO: 1631662 - RNA, 19 nt, Homo sapiens
  misc_RNA (1)...(19): siRNA sense strand
gaccgaacauaaucugaca

SEQ ID NO: 1631663 - RNA, 19 nt, Homo sapiens
  misc_RNA (1)...(19): siRNA sense strand
ugaaccagaccgaacauaa

SEQ ID NO: 1631664 - RNA, 19 nt, Homo sapiens
  misc_RNA (1)...(19): siRNA sense strand
gcauugcaguauucauugu

SEQ ID NO: 1631665 - RNA, 19 nt, Homo sapiens
  misc_RNA (1)...(19): siRNA sense strand
uagcagggauccuccuaau

SEQ ID NO: 1631666 - RNA, 19 nt, Homo sapiens
  misc_RNA (1)...(19): siRNA sense strand
ugaccaugcucuucugugu

SEQ ID NO: 1631667 - RNA, 19 nt, Homo sapiens
  misc_RNA (1)...(19): siRNA sense strand
guggcaggcuauuaagaaa

SEQ ID NO: 1631668 - RNA, 19 nt, Homo sapiens
  misc_RNA (1)...(19): siRNA sense strand
caaagcagucaugguuaua

SEQ ID NO: 1631669 - RNA, 19 nt, Homo sapiens
  misc_RNA (1)...(19): siRNA sense strand
uaccaaagagacaagguua

SEQ ID NO: 1631670 - RNA, 19 nt, Homo sapiens
  misc_RNA (1)...(19): siRNA sense strand
ggcuaaagcuacagcaaag

SEQ ID NO: 1631671 - RNA, 19 nt, Homo sapiens
  misc_RNA (1)...(19): siRNA sense strand
gacaacugcauugcuguua

SEQ ID NO: 1631672 - RNA, 19 nt, Homo sapiens
  misc_RNA (1)...(19): siRNA sense strand
ccuccuaauuguucuaaga

SEQ ID NO: 1631673 - RNA, 19 nt, Homo sapiens
  misc_RNA (1)...(19): siRNA sense strand
aaaagaagcuaaacucuac

SEQ ID NO: 1631674 - RNA, 19 nt, Homo sapiens
  misc_RNA (1)...(19): siRNA sense strand
ugggaacaguuugaagaua

SEQ ID NO: 1631675 - RNA, 19 nt, Homo sapiens
  misc_RNA (1)...(19): siRNA sense strand
aaguauacaugccaagaug

SEQ ID NO: 1631676 - RNA, 19 nt, Homo sapiens
  misc_RNA (1)...(19): siRNA sense strand
gaucaucacaguggagaga

SEQ ID NO: 1631677 - RNA, 19 nt, Homo sapiens
  misc_RNA (1)...(19): siRNA sense strand
uggguuacaugaguucuuu

SEQ ID NO: 1631678 - RNA, 19 nt, Homo sapiens
  misc_RNA (1)...(19): siRNA sense strand
ucuaagaauuugccuagca

SEQ ID NO: 1631679 - RNA, 19 nt, Homo sapiens
  misc_RNA (1)...(19): siRNA sense strand
gacaucgcuucccaaauuc

SEQ ID NO: 1631680 - RNA, 19 nt, Homo sapiens
  misc_RNA (1)...(19): siRNA sense strand
gugauugcuugcauuuaug

SEQ ID NO: 1631681 - RNA, 19 nt, Homo sapiens
  misc_RNA (1)...(19): siRNA sense strand
ggaagauaucccauuugaa

SEQ ID NO: 1631682 - RNA, 19 nt, Homo sapiens
  misc_RNA (1)...(19): siRNA sense strand
guuauucucuacagacucu

SEQ ID NO: 1631683 - RNA, 19 nt, Homo sapiens
  misc_RNA (1)...(19): siRNA sense strand
ugucagaaucaacaacaua

SEQ ID NO: 1631684 - RNA, 19 nt, Homo sapiens
  misc_RNA (1)...(19): siRNA sense strand
augcauggguuggacaaua

SEQ ID NO: 1631685 - RNA, 19 nt, Homo sapiens
  misc_RNA (1)...(19): siRNA sense strand
cauuguggcaggcuauuaa

SEQ ID NO: 1631686 - RNA, 19 nt, Homo sapiens
  misc_RNA (1)...(19): siRNA sense strand
ugccaaaggcuguaucuug

SEQ ID NO: 1631687 - RNA, 19 nt, Homo sapiens
  misc_RNA (1)...(19): siRNA sense strand
ucuaucagaucaucacagu

SEQ ID NO: 1631688 - RNA, 19 nt, Homo sapiens
  misc_RNA (1)...(19): siRNA sense strand
acaauagucagaaugaaga

SEQ ID NO: 1631689 - RNA, 19 nt, Homo sapiens
  misc_RNA (1)...(19): siRNA sense strand
gacaauagucagaaugaag

SEQ ID NO: 1631690 - RNA, 19 nt, Homo sapiens
  misc_RNA (1)...(19): siRNA sense strand
ccaggaauggcuaaagcua

SEQ ID NO: 1631691 - RNA, 19 nt, Homo sapiens
  misc_RNA (1)...(19): siRNA sense strand
ccacugaccauaucaucug

SEQ ID NO: 1631692 - RNA, 19 nt, Homo sapiens
  misc_RNA (1)...(19): siRNA sense strand
cuaagaauuugccuagcau

SEQ ID NO: 1631693 - RNA, 19 nt, Homo sapiens
  misc_RNA (1)...(19): siRNA sense strand
gggauccuccuaauuguuc

SEQ ID NO: 1631694 - RNA, 19 nt, Homo sapiens
  misc_RNA (1)...(19): siRNA sense strand
gggaaguuuggcagaauuu

SEQ ID NO: 1631695 - RNA, 19 nt, Homo sapiens
  misc_RNA (1)...(19): siRNA sense strand
cuaguguacuuugugauug

SEQ ID NO: 1631696 - RNA, 19 nt, Homo sapiens
  misc_RNA (1)...(19): siRNA sense strand
caagaugacaaggagaauu

SEQ ID NO: 1631697 - RNA, 19 nt, Homo sapiens
  misc_RNA (1)...(19): siRNA sense strand
gccaagaugacaaggagaa

SEQ ID NO: 1631698 - RNA, 19 nt, Homo sapiens
  misc_RNA (1)...(19): siRNA sense strand
ccgaagggaauccauuuga

SEQ ID NO: 1631699 - RNA, 19 nt, Homo sapiens
  misc_RNA (1)...(19): siRNA sense strand
guccuaguguacuuuguga

SEQ ID NO: 1631700 - RNA, 19 nt, Homo sapiens
  misc_RNA (1)...(19): siRNA sense strand
cagggauccuccuaauugu

SEQ ID NO: 1631701 - RNA, 19 nt, Homo sapiens
  misc_RNA (1)...(19): siRNA sense strand
agucaugguuauagcugua

SEQ ID NO: 1631702 - RNA, 19 nt, Homo sapiens
  misc_RNA (1)...(19): siRNA sense strand
ggcaggcuauuaagaaagg

SEQ ID NO: 1631703 - RNA, 19 nt, Homo sapiens
  misc_RNA (1)...(19): siRNA sense strand
auucucagguggaagauau

SEQ ID NO: 1631704 - RNA, 19 nt, Homo sapiens
  misc_RNA (1)...(19): siRNA sense strand
acaauagguguuauccuuu

SEQ ID NO: 1631705 - RNA, 19 nt, Homo sapiens
  misc_RNA (1)...(19): siRNA sense strand
aaucaacaacauagcagua

SEQ ID NO: 1631706 - RNA, 19 nt, Homo sapiens
  misc_RNA (1)...(19): siRNA sense strand
guggagagaaguacacuca

SEQ ID NO: 1631707 - RNA, 19 nt, Homo sapiens
  misc_RNA (1)...(19): siRNA sense strand
uugaagauaucagucauca

SEQ ID NO: 1631708 - RNA, 19 nt, Homo sapiens
  misc_RNA (1)...(19): siRNA sense strand
cccaaauucagauguuaua

SEQ ID NO: 1631709 - RNA, 19 nt, Homo sapiens
  misc_RNA (1)...(19): siRNA sense strand
ugggaaguuuggcagaauu

SEQ ID NO: 1631710 - RNA, 19 nt, Homo sapiens
  misc_RNA (1)...(19): siRNA sense strand
aaagagacaagguuauuac

SEQ ID NO: 1631711 - RNA, 19 nt, Homo sapiens
  misc_RNA (1)...(19): siRNA sense strand
guucuugcaugcauuucug

SEQ ID NO: 1631712 - RNA, 19 nt, Homo sapiens
  misc_RNA (1)...(19): siRNA sense strand
aggaauggcuaaagcuaca

SEQ ID NO: 1631713 - RNA, 19 nt, Homo sapiens
  misc_RNA (1)...(19): siRNA sense strand
uggcauugcaguauucauu

SEQ ID NO: 1631714 - RNA, 19 nt, Homo sapiens
  misc_RNA (1)...(19): siRNA sense strand
agaaugaagaagucucaaa

SEQ ID NO: 1631715 - RNA, 19 nt, Homo sapiens
  misc_RNA (1)...(19): siRNA sense strand
ggaaagagauggagaauau

SEQ ID NO: 1631716 - RNA, 19 nt, Homo sapiens
  misc_RNA (1)...(19): siRNA sense strand
gaaccaggaugugcuauua

SEQ ID NO: 1631717 - RNA, 19 nt, Homo sapiens
  misc_RNA (1)...(19): siRNA sense strand
ggaaugaauuguucuguuu

SEQ ID NO: 1631718 - RNA, 19 nt, Homo sapiens
  misc_RNA (1)...(19): siRNA sense strand
gaucagaaccucaguauga

SEQ ID NO: 1631719 - RNA, 19 nt, Homo sapiens
  misc_RNA (1)...(19): siRNA sense strand
ggaacgaccuggcugaauu

SEQ ID NO: 1631720 - RNA, 19 nt, Homo sapiens
  misc_RNA (1)...(19): siRNA sense strand
gaagguuucugcuaucaaa

SEQ ID NO: 1631721 - RNA, 19 nt, Homo sapiens
  misc_RNA (1)...(19): siRNA sense strand
ggagugaagucaaagauau

SEQ ID NO: 1631722 - RNA, 19 nt, Homo sapiens
  misc_RNA (1)...(19): siRNA sense strand
gaacuuggcugcucguaca

SEQ ID NO: 1631723 - RNA, 19 nt, Homo sapiens
  misc_RNA (1)...(19): siRNA sense strand
caacaguacucuccugaaa

SEQ ID NO: 1631724 - RNA, 19 nt, Homo sapiens
  misc_RNA (1)...(19): siRNA sense strand
ggaguggcuuucacauuua

SEQ ID NO: 1631725 - RNA, 19 nt, Homo sapiens
  misc_RNA (1)...(19): siRNA sense strand
gaauguggcacuucuguua

SEQ ID NO: 1631726 - RNA, 19 nt, Homo sapiens
  misc_RNA (1)...(19): siRNA sense strand
ggauacagcuauucuuaga

SEQ ID NO: 1631727 - RNA, 19 nt, Homo sapiens
  misc_RNA (1)...(19): siRNA sense strand
cccaaacucuuacaucuua

SEQ ID NO: 1631728 - RNA, 19 nt, Homo sapiens
  misc_RNA (1)...(19): siRNA sense strand
gcucguacaugcugucuuu

SEQ ID NO: 1631729 - RNA, 19 nt, Homo sapiens
  misc_RNA (1)...(19): siRNA sense strand
ucacaucucucccugauau

SEQ ID NO: 1631730 - RNA, 19 nt, Homo sapiens
  misc_RNA (1)...(19): siRNA sense strand
ucaagaaacuccucucguu

SEQ ID NO: 1631731 - RNA, 19 nt, Homo sapiens
  misc_RNA (1)...(19): siRNA sense strand
ugaaagaaauggcaaguuc

SEQ ID NO: 1631732 - RNA, 19 nt, Homo sapiens
  misc_RNA (1)...(19): siRNA sense strand
gcagauaaauuggagcauu

SEQ ID NO: 1631733 - RNA, 19 nt, Homo sapiens
  misc_RNA (1)...(19): siRNA sense strand
ucaaagauauucaggaugu

SEQ ID NO: 1631734 - RNA, 19 nt, Homo sapiens
  misc_RNA (1)...(19): siRNA sense strand
agagaggccuucaccaaua

SEQ ID NO: 1631735 - RNA, 19 nt, Homo sapiens
  misc_RNA (1)...(19): siRNA sense strand
gcucuucgauccuuaauca

SEQ ID NO: 1631736 - RNA, 19 nt, Homo sapiens
  misc_RNA (1)...(19): siRNA sense strand
gaugaccuguuucaaauau

SEQ ID NO: 1631737 - RNA, 19 nt, Homo sapiens
  misc_RNA (1)...(19): siRNA sense strand
gauggaaggcuacuuauau

SEQ ID NO: 1631738 - RNA, 19 nt, Homo sapiens
  misc_RNA (1)...(19): siRNA sense strand
ggaguugaauguauugaau

SEQ ID NO: 1631739 - RNA, 19 nt, Homo sapiens
  misc_RNA (1)...(19): siRNA sense strand
ggacagaaagaggaauuua

SEQ ID NO: 1631740 - RNA, 19 nt, Homo sapiens
  misc_RNA (1)...(19): siRNA sense strand
auauggagcuuguuucuuu

SEQ ID NO: 1631741 - RNA, 19 nt, Homo sapiens
  misc_RNA (1)...(19): siRNA sense strand
ucagagaaguuuaccagaa

SEQ ID NO: 1631742 - RNA, 19 nt, Homo sapiens
  misc_RNA (1)...(19): siRNA sense strand
ggaagacacugaggaggaa

SEQ ID NO: 1631743 - RNA, 19 nt, Homo sapiens
  misc_RNA (1)...(19): siRNA sense strand
gaagaggccuauggaacuu

SEQ ID NO: 1631744 - RNA, 19 nt, Homo sapiens
  misc_RNA (1)...(19): siRNA sense strand
cagcugauccuucaucuaa

SEQ ID NO: 1631745 - RNA, 19 nt, Homo sapiens
  misc_RNA (1)...(19): siRNA sense strand
guacacaucaguucaagaa

SEQ ID NO: 1631746 - RNA, 19 nt, Homo sapiens
  misc_RNA (1)...(19): siRNA sense strand
cagagggccuugauacaaa

SEQ ID NO: 1631747 - RNA, 19 nt, Homo sapiens
  misc_RNA (1)...(19): siRNA sense strand
acaguacucuccugaaauu

SEQ ID NO: 1631748 - RNA, 19 nt, Homo sapiens
  misc_RNA (1)...(19): siRNA sense strand
gcaaucaugugaagaggau

SEQ ID NO: 1631749 - RNA, 19 nt, Homo sapiens
  misc_RNA (1)...(19): siRNA sense strand
ggaaaugaagacaauguuu

SEQ ID NO: 1631750 - RNA, 19 nt, Homo sapiens
  misc_RNA (1)...(19): siRNA sense strand
aguaauagcccuucuguuu

SEQ ID NO: 1631751 - RNA, 19 nt, Homo sapiens
  misc_RNA (1)...(19): siRNA sense strand
gcugauccuucaucuaauu

SEQ ID NO: 1631752 - RNA, 19 nt, Homo sapiens
  misc_RNA (1)...(19): siRNA sense strand
gagaauauggagcuuguuu

SEQ ID NO: 1631753 - RNA, 19 nt, Homo sapiens
  misc_RNA (1)...(19): siRNA sense strand
gagaggccuucaccaauau

SEQ ID NO: 1631754 - RNA, 19 nt, Homo sapiens
  misc_RNA (1)...(19): siRNA sense strand
aggaguggcuuucacauuu

SEQ ID NO: 1631755 - RNA, 19 nt, Homo sapiens
  misc_RNA (1)...(19): siRNA sense strand
agaagaagcuccauuucau

SEQ ID NO: 1631756 - RNA, 19 nt, Homo sapiens
  misc_RNA (1)...(19): siRNA sense strand
gggaaagucucacaucucu

SEQ ID NO: 1631757 - RNA, 19 nt, Homo sapiens
  misc_RNA (1)...(19): siRNA sense strand
gguuaaaguuacuagauga

SEQ ID NO: 1631758 - RNA, 19 nt, Homo sapiens
  misc_RNA (1)...(19): siRNA sense strand
gccaaacccucucagaaga

SEQ ID NO: 1631759 - RNA, 19 nt, Homo sapiens
  misc_RNA (1)...(19): siRNA sense strand
gccaguuccugaagaagua

SEQ ID NO: 1631760 - RNA, 19 nt, Homo sapiens
  misc_RNA (1)...(19): siRNA sense strand
gaagaggaccugccagauc

SEQ ID NO: 1631761 - RNA, 19 nt, Homo sapiens
  misc_RNA (1)...(19): siRNA sense strand
ccagcaaccucugauauau

SEQ ID NO: 1631762 - RNA, 19 nt, Homo sapiens
  misc_RNA (1)...(19): siRNA sense strand
gaaggagaguaucaagcuu

SEQ ID NO: 1631763 - RNA, 19 nt, Homo sapiens
  misc_RNA (1)...(19): siRNA sense strand
caggaugugcuauuaguua

SEQ ID NO: 1631764 - RNA, 19 nt, Homo sapiens
  misc_RNA (1)...(19): siRNA sense strand
ucagauaccugcccaaagg

SEQ ID NO: 1631765 - RNA, 19 nt, Homo sapiens
  misc_RNA (1)...(19): siRNA sense strand
caccuacaaugaucuaauu

SEQ ID NO: 1631766 - RNA, 19 nt, Homo sapiens
  misc_RNA (1)...(19): siRNA sense strand
gaagcuccauuucaucaca

SEQ ID NO: 1631767 - RNA, 19 nt, Homo sapiens
  misc_RNA (1)...(19): siRNA sense strand
gagaguaucaagcuuaguu

SEQ ID NO: 1631768 - RNA, 19 nt, Homo sapiens
  misc_RNA (1)...(19): siRNA sense strand
uaaaguagcaacagcagaa

SEQ ID NO: 1631769 - RNA, 19 nt, Homo sapiens
  misc_RNA (1)...(19): siRNA sense strand
gaagaugagagauuuaaag

SEQ ID NO: 1631770 - RNA, 19 nt, Homo sapiens
  misc_RNA (1)...(19): siRNA sense strand
ggauggaaggcuacuuaua

SEQ ID NO: 1631771 - RNA, 19 nt, Homo sapiens
  misc_RNA (1)...(19): siRNA sense strand
gcagagggccuugauacaa

SEQ ID NO: 1631772 - RNA, 19 nt, Homo sapiens
  misc_RNA (1)...(19): siRNA sense strand
guaauagcccuucuguuug

SEQ ID NO: 1631773 - RNA, 19 nt, Homo sapiens
  misc_RNA (1)...(19): siRNA sense strand
cgaccuggcugaauugaca

SEQ ID NO: 1631774 - RNA, 19 nt, Homo sapiens
  misc_RNA (1)...(19): siRNA sense strand
caagggagucuuuggauga

SEQ ID NO: 1631775 - RNA, 19 nt, Homo sapiens
  misc_RNA (1)...(19): siRNA sense strand
acacggaaaugaagacaau

SEQ ID NO: 1631776 - RNA, 19 nt, Homo sapiens
  misc_RNA (1)...(19): siRNA sense strand
gaaguuauaaguacacauc

SEQ ID NO: 1631777 - RNA, 19 nt, Homo sapiens
  misc_RNA (1)...(19): siRNA sense strand
uggaugaccuguuucaaau

SEQ ID NO: 1631778 - RNA, 19 nt, Homo sapiens
  misc_RNA (1)...(19): siRNA sense strand
guuacuagaugacgagguu

SEQ ID NO: 1631779 - RNA, 19 nt, Homo sapiens
  misc_RNA (1)...(19): siRNA sense strand
ccaacaagguuaaaguuac

SEQ ID NO: 1631780 - RNA, 19 nt, Homo sapiens
  misc_RNA (1)...(19): siRNA sense strand
gaggaugugaguucagaua

SEQ ID NO: 1631781 - RNA, 19 nt, Homo sapiens
  misc_RNA (1)...(19): siRNA sense strand
caaguucuuuccauccauu

SEQ ID NO: 1631782 - RNA, 19 nt, Homo sapiens
  misc_RNA (1)...(19): siRNA sense strand
gaacgaccuggcugaauug

SEQ ID NO: 1631783 - RNA, 19 nt, Homo sapiens
  misc_RNA (1)...(19): siRNA sense strand
caaaggaggaagacacuga

SEQ ID NO: 1631784 - RNA, 19 nt, Homo sapiens
  misc_RNA (1)...(19): siRNA sense strand
gauggagaaguuauaagua

SEQ ID NO: 1631785 - RNA, 19 nt, Homo sapiens
  misc_RNA (1)...(19): siRNA sense strand
ucaccaauauuguguaucu

SEQ ID NO: 1631786 - RNA, 19 nt, Homo sapiens
  misc_RNA (1)...(19): siRNA sense strand
caauggaugaugaagguua

SEQ ID NO: 1631787 - RNA, 19 nt, Homo sapiens
  misc_RNA (1)...(19): siRNA sense strand
aaacuuugacugcagauaa

SEQ ID NO: 1631788 - RNA, 19 nt, Homo sapiens
  misc_RNA (1)...(19): siRNA sense strand
gccagcaaccucugauaua

SEQ ID NO: 1631789 - RNA, 19 nt, Homo sapiens
  misc_RNA (1)...(19): siRNA sense strand
gaaaucaaggccugaagau

SEQ ID NO: 1631790 - RNA, 19 nt, Homo sapiens
  misc_RNA (1)...(19): siRNA sense strand
caacaagguuaaaguuacu

SEQ ID NO: 1631791 - RNA, 19 nt, Homo sapiens
  misc_RNA (1)...(19): siRNA sense strand
uaauagcccuucuguuugg

SEQ ID NO: 1631792 - RNA, 19 nt, Homo sapiens
  misc_RNA (1)...(19): siRNA sense strand
cacgagcccugaucugaaa

SEQ ID NO: 1631793 - RNA, 19 nt, Homo sapiens
  misc_RNA (1)...(19): siRNA sense strand
ggaaggcuacuuauaucuu

SEQ ID NO: 1631794 - RNA, 19 nt, Homo sapiens
  misc_RNA (1)...(19): siRNA sense strand
gcaaugaagaaucuguuga

SEQ ID NO: 1631795 - RNA, 19 nt, Homo sapiens
  misc_RNA (1)...(19): siRNA sense strand
aagaggaccugccagauca

SEQ ID NO: 1631796 - RNA, 19 nt, Homo sapiens
  misc_RNA (1)...(19): siRNA sense strand
gaagaggcagucagucaga

SEQ ID NO: 1631797 - RNA, 19 nt, Homo sapiens
  misc_RNA (1)...(19): siRNA sense strand
gcaccuaaaugggaaaguc

SEQ ID NO: 1631798 - RNA, 19 nt, Homo sapiens
  misc_RNA (1)...(19): siRNA sense strand
gugcugacuuggacagaaa

SEQ ID NO: 1631799 - RNA, 19 nt, Homo sapiens
  misc_RNA (1)...(19): siRNA sense strand
gaagacaauguuucucaug

SEQ ID NO: 1631800 - RNA, 19 nt, Homo sapiens
  misc_RNA (1)...(19): siRNA sense strand
gcuacccgguuguaugaaa

SEQ ID NO: 1631801 - RNA, 19 nt, Homo sapiens
  misc_RNA (1)...(19): siRNA sense strand
guuccaauccuguguauau

SEQ ID NO: 1631802 - RNA, 19 nt, Homo sapiens
  misc_RNA (1)...(19): siRNA sense strand
cuacaggacccucugguuu

SEQ ID NO: 1631803 - RNA, 19 nt, Homo sapiens
  misc_RNA (1)...(19): siRNA sense strand
gaccauggcaccuacaaug

SEQ ID NO: 1631804 - RNA, 19 nt, Homo sapiens
  misc_RNA (1)...(19): siRNA sense strand
uuaaagaauucaccucaca

SEQ ID NO: 1631805 - RNA, 19 nt, Homo sapiens
  misc_RNA (1)...(19): siRNA sense strand
ucuaauuucucaacuggaa

SEQ ID NO: 1631806 - RNA, 19 nt, Homo sapiens
  misc_RNA (1)...(19): siRNA sense strand
gauguuuccuguucagaca

SEQ ID NO: 1631807 - RNA, 19 nt, Homo sapiens
  misc_RNA (1)...(19): siRNA sense strand
gcacuucuguuagcuaagg

SEQ ID NO: 1631808 - RNA, 19 nt, Homo sapiens
  misc_RNA (1)...(19): siRNA sense strand
uaaaugggagccucaguga

SEQ ID NO: 1631809 - RNA, 19 nt, Homo sapiens
  misc_RNA (1)...(19): siRNA sense strand
ccaauauuguguaucugaa

SEQ ID NO: 1631810 - RNA, 19 nt, Homo sapiens
  misc_RNA (1)...(19): siRNA sense strand
cuaucaaacucaauacuuc

SEQ ID NO: 1631811 - RNA, 19 nt, Homo sapiens
  misc_RNA (1)...(19): siRNA sense strand
acagucagcugauccuuca

SEQ ID NO: 1631812 - RNA, 19 nt, Homo sapiens
  misc_RNA (1)...(19): siRNA sense strand
caaccagagucuuuaaggu

SEQ ID NO: 1631813 - RNA, 19 nt, Homo sapiens
  misc_RNA (1)...(19): siRNA sense strand
gaucagcggucaucuuuuc

SEQ ID NO: 1631814 - RNA, 19 nt, Homo sapiens
  misc_RNA (1)...(19): siRNA sense strand
gaaauggcaaguuccaauc

SEQ ID NO: 1631815 - RNA, 19 nt, Homo sapiens
  misc_RNA (1)...(19): siRNA sense strand
ggaaagagauggagaauau

SEQ ID NO: 1631816 - RNA, 19 nt, Homo sapiens
  misc_RNA (1)...(19): siRNA sense strand
gaaccaggaugugcuauua

SEQ ID NO: 1631817 - RNA, 19 nt, Homo sapiens
  misc_RNA (1)...(19): siRNA sense strand
ggaaugaauuguucuguuu

SEQ ID NO: 1631818 - RNA, 19 nt, Homo sapiens
  misc_RNA (1)...(19): siRNA sense strand
gaucagaaccucaguauga

SEQ ID NO: 1631819 - RNA, 19 nt, Homo sapiens
  misc_RNA (1)...(19): siRNA sense strand
ggaacgaccuggcugaauu

SEQ ID NO: 1631820 - RNA, 19 nt, Homo sapiens
  misc_RNA (1)...(19): siRNA sense strand
gaagguuucugcuaucaaa

SEQ ID NO: 1631821 - RNA, 19 nt, Homo sapiens
  misc_RNA (1)...(19): siRNA sense strand
ggagugaagucaaagauau

SEQ ID NO: 1631822 - RNA, 19 nt, Homo sapiens
  misc_RNA (1)...(19): siRNA sense strand
gaacuuggcugcucguaca

SEQ ID NO: 1631823 - RNA, 19 nt, Homo sapiens
  misc_RNA (1)...(19): siRNA sense strand
caacaguacucuccugaaa

SEQ ID NO: 1631824 - RNA, 19 nt, Homo sapiens
  misc_RNA (1)...(19): siRNA sense strand
ggaguggcuuucacauuua

SEQ ID NO: 1631825 - RNA, 19 nt, Homo sapiens
  misc_RNA (1)...(19): siRNA sense strand
gaauguggcacuucuguua

SEQ ID NO: 1631826 - RNA, 19 nt, Homo sapiens
  misc_RNA (1)...(19): siRNA sense strand
ggauacagcuauucuuaga

SEQ ID NO: 1631827 - RNA, 19 nt, Homo sapiens
  misc_RNA (1)...(19): siRNA sense strand
cccaaacucuuacaucuua

SEQ ID NO: 1631828 - RNA, 19 nt, Homo sapiens
  misc_RNA (1)...(19): siRNA sense strand
gcucguacaugcugucuuu

SEQ ID NO: 1631829 - RNA, 19 nt, Homo sapiens
  misc_RNA (1)...(19): siRNA sense strand
ucacaucucucccugauau

SEQ ID NO: 1631830 - RNA, 19 nt, Homo sapiens
  misc_RNA (1)...(19): siRNA sense strand
ucaagaaacuccucucguu

SEQ ID NO: 1631831 - RNA, 19 nt, Homo sapiens
  misc_RNA (1)...(19): siRNA sense strand
ugaaagaaauggcaaguuc

SEQ ID NO: 1631832 - RNA, 19 nt, Homo sapiens
  misc_RNA (1)...(19): siRNA sense strand
gcagauaaauuggagcauu

SEQ ID NO: 1631833 - RNA, 19 nt, Homo sapiens
  misc_RNA (1)...(19): siRNA sense strand
ucaaagauauucaggaugu

SEQ ID NO: 1631834 - RNA, 19 nt, Homo sapiens
  misc_RNA (1)...(19): siRNA sense strand
agagaggccuucaccaaua

SEQ ID NO: 1631835 - RNA, 19 nt, Homo sapiens
  misc_RNA (1)...(19): siRNA sense strand
ucaagucgccuguuguuua

SEQ ID NO: 1631836 - RNA, 19 nt, Homo sapiens
  misc_RNA (1)...(19): siRNA sense strand
gcucuucgauccuuaauca

SEQ ID NO: 1631837 - RNA, 19 nt, Homo sapiens
  misc_RNA (1)...(19): siRNA sense strand
gaugaccuguuucaaauau

SEQ ID NO: 1631838 - RNA, 19 nt, Homo sapiens
  misc_RNA (1)...(19): siRNA sense strand
gaacaaauguaugugucuu

SEQ ID NO: 1631839 - RNA, 19 nt, Homo sapiens
  misc_RNA (1)...(19): siRNA sense strand
ggaguugaauguauugaau

SEQ ID NO: 1631840 - RNA, 19 nt, Homo sapiens
  misc_RNA (1)...(19): siRNA sense strand
gauggaaggcuacuuauau

SEQ ID NO: 1631841 - RNA, 19 nt, Homo sapiens
  misc_RNA (1)...(19): siRNA sense strand
ggacagaaagaggaauuua

SEQ ID NO: 1631842 - RNA, 19 nt, Homo sapiens
  misc_RNA (1)...(19): siRNA sense strand
auauggagcuuguuucuuu

SEQ ID NO: 1631843 - RNA, 19 nt, Homo sapiens
  misc_RNA (1)...(19): siRNA sense strand
ucagagaaguuuaccagaa

SEQ ID NO: 1631844 - RNA, 19 nt, Homo sapiens
  misc_RNA (1)...(19): siRNA sense strand
ggaagacacugaggaggaa

SEQ ID NO: 1631845 - RNA, 19 nt, Homo sapiens
  misc_RNA (1)...(19): siRNA sense strand
gaagaggccuauggaacuu

SEQ ID NO: 1631846 - RNA, 19 nt, Homo sapiens
  misc_RNA (1)...(19): siRNA sense strand
cagcugauccuucaucuaa

SEQ ID NO: 1631847 - RNA, 19 nt, Homo sapiens
  misc_RNA (1)...(19): siRNA sense strand
guacacaucaguucaagaa

SEQ ID NO: 1631848 - RNA, 19 nt, Homo sapiens
  misc_RNA (1)...(19): siRNA sense strand
cagagggccuugauacaaa

SEQ ID NO: 1631849 - RNA, 19 nt, Homo sapiens
  misc_RNA (1)...(19): siRNA sense strand
acaguacucuccugaaauu

SEQ ID NO: 1631850 - RNA, 19 nt, Homo sapiens
  misc_RNA (1)...(19): siRNA sense strand
gcaaucaugugaagaggau

SEQ ID NO: 1631851 - RNA, 19 nt, Homo sapiens
  misc_RNA (1)...(19): siRNA sense strand
ggaaaugaagacaauguuu

SEQ ID NO: 1631852 - RNA, 19 nt, Homo sapiens
  misc_RNA (1)...(19): siRNA sense strand
aguaauagcccuucuguuu

SEQ ID NO: 1631853 - RNA, 19 nt, Homo sapiens
  misc_RNA (1)...(19): siRNA sense strand
gcugauccuucaucuaauu

SEQ ID NO: 1631854 - RNA, 19 nt, Homo sapiens
  misc_RNA (1)...(19): siRNA sense strand
gagaauauggagcuuguuu

SEQ ID NO: 1631855 - RNA, 19 nt, Homo sapiens
  misc_RNA (1)...(19): siRNA sense strand
gagaggccuucaccaauau

SEQ ID NO: 1631856 - RNA, 19 nt, Homo sapiens
  misc_RNA (1)...(19): siRNA sense strand
aggaguggcuuucacauuu

SEQ ID NO: 1631857 - RNA, 19 nt, Homo sapiens
  misc_RNA (1)...(19): siRNA sense strand
agaagaagcuccauuucau

SEQ ID NO: 1631858 - RNA, 19 nt, Homo sapiens
  misc_RNA (1)...(19): siRNA sense strand
gggaaagucucacaucucu

SEQ ID NO: 1631859 - RNA, 19 nt, Homo sapiens
  misc_RNA (1)...(19): siRNA sense strand
gguuaaaguuacuagauga

SEQ ID NO: 1631860 - RNA, 19 nt, Homo sapiens
  misc_RNA (1)...(19): siRNA sense strand
gccaaacccucucagaaga

SEQ ID NO: 1631861 - RNA, 19 nt, Homo sapiens
  misc_RNA (1)...(19): siRNA sense strand
gccaguuccugaagaagua

SEQ ID NO: 1631862 - RNA, 19 nt, Homo sapiens
  misc_RNA (1)...(19): siRNA sense strand
gaagaggaccugccagauc

SEQ ID NO: 1631863 - RNA, 19 nt, Homo sapiens
  misc_RNA (1)...(19): siRNA sense strand
ccagcaaccucugauauau

SEQ ID NO: 1631864 - RNA, 19 nt, Homo sapiens
  misc_RNA (1)...(19): siRNA sense strand
gaaggagaguaucaagcuu

SEQ ID NO: 1631865 - RNA, 19 nt, Homo sapiens
  misc_RNA (1)...(19): siRNA sense strand
caggaugugcuauuaguua

SEQ ID NO: 1631866 - RNA, 19 nt, Homo sapiens
  misc_RNA (1)...(19): siRNA sense strand
ucagauaccugcccaaagg

SEQ ID NO: 1631867 - RNA, 19 nt, Homo sapiens
  misc_RNA (1)...(19): siRNA sense strand
caccuacaaugaucuaauu

SEQ ID NO: 1631868 - RNA, 19 nt, Homo sapiens
  misc_RNA (1)...(19): siRNA sense strand
gaagcuccauuucaucaca

SEQ ID NO: 1631869 - RNA, 19 nt, Homo sapiens
  misc_RNA (1)...(19): siRNA sense strand
gagaguaucaagcuuaguu

SEQ ID NO: 1631870 - RNA, 19 nt, Homo sapiens
  misc_RNA (1)...(19): siRNA sense strand
uaaaguagcaacagcagaa

SEQ ID NO: 1631871 - RNA, 19 nt, Homo sapiens
  misc_RNA (1)...(19): siRNA sense strand
gaagaugagagauuuaaag

SEQ ID NO: 1631872 - RNA, 19 nt, Homo sapiens
  misc_RNA (1)...(19): siRNA sense strand
ggauggaaggcuacuuaua

SEQ ID NO: 1631873 - RNA, 19 nt, Homo sapiens
  misc_RNA (1)...(19): siRNA sense strand
gcagagggccuugauacaa

SEQ ID NO: 1631874 - RNA, 19 nt, Homo sapiens
  misc_RNA (1)...(19): siRNA sense strand
guaauagcccuucuguuug

SEQ ID NO: 1631875 - RNA, 19 nt, Homo sapiens
  misc_RNA (1)...(19): siRNA sense strand
cgaccuggcugaauugaca

SEQ ID NO: 1631876 - RNA, 19 nt, Homo sapiens
  misc_RNA (1)...(19): siRNA sense strand
caagggagucuuuggauga

SEQ ID NO: 1631877 - RNA, 19 nt, Homo sapiens
  misc_RNA (1)...(19): siRNA sense strand
acacggaaaugaagacaau

SEQ ID NO: 1631878 - RNA, 19 nt, Homo sapiens
  misc_RNA (1)...(19): siRNA sense strand
gaaguuauaaguacacauc

SEQ ID NO: 1631879 - RNA, 19 nt, Homo sapiens
  misc_RNA (1)...(19): siRNA sense strand
uggaugaccuguuucaaau

SEQ ID NO: 1631880 - RNA, 19 nt, Homo sapiens
  misc_RNA (1)...(19): siRNA sense strand
guuacuagaugacgagguu

SEQ ID NO: 1631881 - RNA, 19 nt, Homo sapiens
  misc_RNA (1)...(19): siRNA sense strand
ccaacaagguuaaaguuac

SEQ ID NO: 1631882 - RNA, 19 nt, Homo sapiens
  misc_RNA (1)...(19): siRNA sense strand
ggaaaccggaacaaaugua

SEQ ID NO: 1631883 - RNA, 19 nt, Homo sapiens
  misc_RNA (1)...(19): siRNA sense strand
caaguucuuuccauccauu

SEQ ID NO: 1631884 - RNA, 19 nt, Homo sapiens
  misc_RNA (1)...(19): siRNA sense strand
gaacgaccuggcugaauug

SEQ ID NO: 1631885 - RNA, 19 nt, Homo sapiens
  misc_RNA (1)...(19): siRNA sense strand
caaaggaggaagacacuga

SEQ ID NO: 1631886 - RNA, 19 nt, Homo sapiens
  misc_RNA (1)...(19): siRNA sense strand
gaggaugugaguucagaua

SEQ ID NO: 1631887 - RNA, 19 nt, Homo sapiens
  misc_RNA (1)...(19): siRNA sense strand
aaauguaugugucuucaga

SEQ ID NO: 1631888 - RNA, 19 nt, Homo sapiens
  misc_RNA (1)...(19): siRNA sense strand
gauggagaaguuauaagua

SEQ ID NO: 1631889 - RNA, 19 nt, Homo sapiens
  misc_RNA (1)...(19): siRNA sense strand
ucaccaauauuguguaucu

SEQ ID NO: 1631890 - RNA, 19 nt, Homo sapiens
  misc_RNA (1)...(19): siRNA sense strand
caauggaugaugaagguua

SEQ ID NO: 1631891 - RNA, 19 nt, Homo sapiens
  misc_RNA (1)...(19): siRNA sense strand
aaacuuugacugcagauaa

SEQ ID NO: 1631892 - RNA, 19 nt, Homo sapiens
  misc_RNA (1)...(19): siRNA sense strand
gccagcaaccucugauaua

SEQ ID NO: 1631893 - RNA, 19 nt, Homo sapiens
  misc_RNA (1)...(19): siRNA sense strand
gaaaucaaggccugaagau

SEQ ID NO: 1631894 - RNA, 19 nt, Homo sapiens
  misc_RNA (1)...(19): siRNA sense strand
caacaagguuaaaguuacu

SEQ ID NO: 1631895 - RNA, 19 nt, Homo sapiens
  misc_RNA (1)...(19): siRNA sense strand
uaauagcccuucuguuugg

SEQ ID NO: 1631896 - RNA, 19 nt, Homo sapiens
  misc_RNA (1)...(19): siRNA sense strand
cacgagcccugaucugaaa

SEQ ID NO: 1631897 - RNA, 19 nt, Homo sapiens
  misc_RNA (1)...(19): siRNA sense strand
ggaaggcuacuuauaucuu

SEQ ID NO: 1631898 - RNA, 19 nt, Homo sapiens
  misc_RNA (1)...(19): siRNA sense strand
gcaaugaagaaucuguuga

SEQ ID NO: 1631899 - RNA, 19 nt, Homo sapiens
  misc_RNA (1)...(19): siRNA sense strand
aagaggaccugccagauca

SEQ ID NO: 1631900 - RNA, 19 nt, Homo sapiens
  misc_RNA (1)...(19): siRNA sense strand
gaagaggcagucagucaga

SEQ ID NO: 1631901 - RNA, 19 nt, Homo sapiens
  misc_RNA (1)...(19): siRNA sense strand
gcaccuaaaugggaaaguc

SEQ ID NO: 1631902 - RNA, 19 nt, Homo sapiens
  misc_RNA (1)...(19): siRNA sense strand
gugcugacuuggacagaaa

SEQ ID NO: 1631903 - RNA, 19 nt, Homo sapiens
  misc_RNA (1)...(19): siRNA sense strand
gaagacaauguuucucaug

SEQ ID NO: 1631904 - RNA, 19 nt, Homo sapiens
  misc_RNA (1)...(19): siRNA sense strand
gcuacccgguuguaugaaa

SEQ ID NO: 1631905 - RNA, 19 nt, Homo sapiens
  misc_RNA (1)...(19): siRNA sense strand
guuccaauccuguguauau

SEQ ID NO: 1631906 - RNA, 19 nt, Homo sapiens
  misc_RNA (1)...(19): siRNA sense strand
gaaaccggaacaaauguau

SEQ ID NO: 1631907 - RNA, 19 nt, Homo sapiens
  misc_RNA (1)...(19): siRNA sense strand
cuacaggacccucugguuu

SEQ ID NO: 1631908 - RNA, 19 nt, Homo sapiens
  misc_RNA (1)...(19): siRNA sense strand
gaccauggcaccuacaaug

SEQ ID NO: 1631909 - RNA, 19 nt, Homo sapiens
  misc_RNA (1)...(19): siRNA sense strand
uuaaagaauucaccucaca

SEQ ID NO: 1631910 - RNA, 19 nt, Homo sapiens
  misc_RNA (1)...(19): siRNA sense strand
ucuaauuucucaacuggaa

SEQ ID NO: 1631911 - RNA, 19 nt, Homo sapiens
  misc_RNA (1)...(19): siRNA sense strand
acagucagcugauccuuca

SEQ ID NO: 1631912 - RNA, 19 nt, Homo sapiens
  misc_RNA (1)...(19): siRNA sense strand
gcacuucuguuagcuaagg

SEQ ID NO: 1631913 - RNA, 19 nt, Homo sapiens
  misc_RNA (1)...(19): siRNA sense strand
uaaaugggagccucaguga

SEQ ID NO: 1631914 - RNA, 19 nt, Homo sapiens
  misc_RNA (1)...(19): siRNA sense strand
ccaauauuguguaucugaa

SEQ ID NO: 1631915 - RNA, 19 nt, Homo sapiens
  misc_RNA (1)...(19): siRNA sense strand
ggaaagagauggagaauau

SEQ ID NO: 1631916 - RNA, 19 nt, Homo sapiens
  misc_RNA (1)...(19): siRNA sense strand
gaaccaggaugugcuauua

SEQ ID NO: 1631917 - RNA, 19 nt, Homo sapiens
  misc_RNA (1)...(19): siRNA sense strand
ggaaugaauuguucuguuu

SEQ ID NO: 1631918 - RNA, 19 nt, Homo sapiens
  misc_RNA (1)...(19): siRNA sense strand
gaucagaaccucaguauga

SEQ ID NO: 1631919 - RNA, 19 nt, Homo sapiens
  misc_RNA (1)...(19): siRNA sense strand
ggaacgaccuggcugaauu

SEQ ID NO: 1631920 - RNA, 19 nt, Homo sapiens
  misc_RNA (1)...(19): siRNA sense strand
gaagguuucugcuaucaaa

SEQ ID NO: 1631921 - RNA, 19 nt, Homo sapiens
  misc_RNA (1)...(19): siRNA sense strand
ggagugaagucaaagauau

SEQ ID NO: 1631922 - RNA, 19 nt, Homo sapiens
  misc_RNA (1)...(19): siRNA sense strand
gaacuuggcugcucguaca

SEQ ID NO: 1631923 - RNA, 19 nt, Homo sapiens
  misc_RNA (1)...(19): siRNA sense strand
caacaguacucuccugaaa

SEQ ID NO: 1631924 - RNA, 19 nt, Homo sapiens
  misc_RNA (1)...(19): siRNA sense strand
ggaguggcuuucacauuua

SEQ ID NO: 1631925 - RNA, 19 nt, Homo sapiens
  misc_RNA (1)...(19): siRNA sense strand
gaauguggcacuucuguua

SEQ ID NO: 1631926 - RNA, 19 nt, Homo sapiens
  misc_RNA (1)...(19): siRNA sense strand
ggauacagcuauucuuaga

SEQ ID NO: 1631927 - RNA, 19 nt, Homo sapiens
  misc_RNA (1)...(19): siRNA sense strand
cccaaacucuuacaucuua

SEQ ID NO: 1631928 - RNA, 19 nt, Homo sapiens
  misc_RNA (1)...(19): siRNA sense strand
gcucguacaugcugucuuu

SEQ ID NO: 1631929 - RNA, 19 nt, Homo sapiens
  misc_RNA (1)...(19): siRNA sense strand
ucacaucucucccugauau

SEQ ID NO: 1631930 - RNA, 19 nt, Homo sapiens
  misc_RNA (1)...(19): siRNA sense strand
ucaagaaacuccucucguu

SEQ ID NO: 1631931 - RNA, 19 nt, Homo sapiens
  misc_RNA (1)...(19): siRNA sense strand
ugaaagaaauggcaaguuc

SEQ ID NO: 1631932 - RNA, 19 nt, Homo sapiens
  misc_RNA (1)...(19): siRNA sense strand
gcagauaaauuggagcauu

SEQ ID NO: 1631933 - RNA, 19 nt, Homo sapiens
  misc_RNA (1)...(19): siRNA sense strand
ucaaagauauucaggaugu

SEQ ID NO: 1631934 - RNA, 19 nt, Homo sapiens
  misc_RNA (1)...(19): siRNA sense strand
agagaggccuucaccaaua

SEQ ID NO: 1631935 - RNA, 19 nt, Homo sapiens
  misc_RNA (1)...(19): siRNA sense strand
gcucuucgauccuuaauca

SEQ ID NO: 1631936 - RNA, 19 nt, Homo sapiens
  misc_RNA (1)...(19): siRNA sense strand
gaugaccuguuucaaauau

SEQ ID NO: 1631937 - RNA, 19 nt, Homo sapiens
  misc_RNA (1)...(19): siRNA sense strand
gauggaaggcuacuuauau

SEQ ID NO: 1631938 - RNA, 19 nt, Homo sapiens
  misc_RNA (1)...(19): siRNA sense strand
ggaguugaauguauugaau

SEQ ID NO: 1631939 - RNA, 19 nt, Homo sapiens
  misc_RNA (1)...(19): siRNA sense strand
ggacagaaagaggaauuua

SEQ ID NO: 1631940 - RNA, 19 nt, Homo sapiens
  misc_RNA (1)...(19): siRNA sense strand
auauggagcuuguuucuuu

SEQ ID NO: 1631941 - RNA, 19 nt, Homo sapiens
  misc_RNA (1)...(19): siRNA sense strand
ucagagaaguuuaccagaa

SEQ ID NO: 1631942 - RNA, 19 nt, Homo sapiens
  misc_RNA (1)...(19): siRNA sense strand
ggaagacacugaggaggaa

SEQ ID NO: 1631943 - RNA, 19 nt, Homo sapiens
  misc_RNA (1)...(19): siRNA sense strand
gaagaggccuauggaacuu

SEQ ID NO: 1631944 - RNA, 19 nt, Homo sapiens
  misc_RNA (1)...(19): siRNA sense strand
cagcugauccuucaucuaa

SEQ ID NO: 1631945 - RNA, 19 nt, Homo sapiens
  misc_RNA (1)...(19): siRNA sense strand
guacacaucaguucaagaa

SEQ ID NO: 1631946 - RNA, 19 nt, Homo sapiens
  misc_RNA (1)...(19): siRNA sense strand
cagagggccuugauacaaa

SEQ ID NO: 1631947 - RNA, 19 nt, Homo sapiens
  misc_RNA (1)...(19): siRNA sense strand
acaguacucuccugaaauu

SEQ ID NO: 1631948 - RNA, 19 nt, Homo sapiens
  misc_RNA (1)...(19): siRNA sense strand
gcaaucaugugaagaggau

SEQ ID NO: 1631949 - RNA, 19 nt, Homo sapiens
  misc_RNA (1)...(19): siRNA sense strand
ggaaaugaagacaauguuu

SEQ ID NO: 1631950 - RNA, 19 nt, Homo sapiens
  misc_RNA (1)...(19): siRNA sense strand
aguaauagcccuucuguuu

SEQ ID NO: 1631951 - RNA, 19 nt, Homo sapiens
  misc_RNA (1)...(19): siRNA sense strand
gcugauccuucaucuaauu

SEQ ID NO: 1631952 - RNA, 19 nt, Homo sapiens
  misc_RNA (1)...(19): siRNA sense strand
gagaauauggagcuuguuu

SEQ ID NO: 1631953 - RNA, 19 nt, Homo sapiens
  misc_RNA (1)...(19): siRNA sense strand
gagaggccuucaccaauau

SEQ ID NO: 1631954 - RNA, 19 nt, Homo sapiens
  misc_RNA (1)...(19): siRNA sense strand
aggaguggcuuucacauuu

SEQ ID NO: 1631955 - RNA, 19 nt, Homo sapiens
  misc_RNA (1)...(19): siRNA sense strand
agaagaagcuccauuucau

SEQ ID NO: 1631956 - RNA, 19 nt, Homo sapiens
  misc_RNA (1)...(19): siRNA sense strand
gggaaagucucacaucucu

SEQ ID NO: 1631957 - RNA, 19 nt, Homo sapiens
  misc_RNA (1)...(19): siRNA sense strand
gguuaaaguuacuagauga

SEQ ID NO: 1631958 - RNA, 19 nt, Homo sapiens
  misc_RNA (1)...(19): siRNA sense strand
gccaaacccucucagaaga

SEQ ID NO: 1631959 - RNA, 19 nt, Homo sapiens
  misc_RNA (1)...(19): siRNA sense strand
gccaguuccugaagaagua

SEQ ID NO: 1631960 - RNA, 19 nt, Homo sapiens
  misc_RNA (1)...(19): siRNA sense strand
gaagaggaccugccagauc

SEQ ID NO: 1631961 - RNA, 19 nt, Homo sapiens
  misc_RNA (1)...(19): siRNA sense strand
ccagcaaccucugauauau

SEQ ID NO: 1631962 - RNA, 19 nt, Homo sapiens
  misc_RNA (1)...(19): siRNA sense strand
gaaggagaguaucaagcuu

SEQ ID NO: 1631963 - RNA, 19 nt, Homo sapiens
  misc_RNA (1)...(19): siRNA sense strand
caggaugugcuauuaguua

SEQ ID NO: 1631964 - RNA, 19 nt, Homo sapiens
  misc_RNA (1)...(19): siRNA sense strand
ucagauaccugcccaaagg

SEQ ID NO: 1631965 - RNA, 19 nt, Homo sapiens
  misc_RNA (1)...(19): siRNA sense strand
caccuacaaugaucuaauu

SEQ ID NO: 1631966 - RNA, 19 nt, Homo sapiens
  misc_RNA (1)...(19): siRNA sense strand
gaagcuccauuucaucaca

SEQ ID NO: 1631967 - RNA, 19 nt, Homo sapiens
  misc_RNA (1)...(19): siRNA sense strand
gagaguaucaagcuuaguu

SEQ ID NO: 1631968 - RNA, 19 nt, Homo sapiens
  misc_RNA (1)...(19): siRNA sense strand
uaaaguagcaacagcagaa

SEQ ID NO: 1631969 - RNA, 19 nt, Homo sapiens
  misc_RNA (1)...(19): siRNA sense strand
gaagaugagagauuuaaag

SEQ ID NO: 1631970 - RNA, 19 nt, Homo sapiens
  misc_RNA (1)...(19): siRNA sense strand
ggauggaaggcuacuuaua

SEQ ID NO: 1631971 - RNA, 19 nt, Homo sapiens
  misc_RNA (1)...(19): siRNA sense strand
gcagagggccuugauacaa

SEQ ID NO: 1631972 - RNA, 19 nt, Homo sapiens
  misc_RNA (1)...(19): siRNA sense strand
guaauagcccuucuguuug

SEQ ID NO: 1631973 - RNA, 19 nt, Homo sapiens
  misc_RNA (1)...(19): siRNA sense strand
cgaccuggcugaauugaca

SEQ ID NO: 1631974 - RNA, 19 nt, Homo sapiens
  misc_RNA (1)...(19): siRNA sense strand
caagggagucuuuggauga

SEQ ID NO: 1631975 - RNA, 19 nt, Homo sapiens
  misc_RNA (1)...(19): siRNA sense strand
acacggaaaugaagacaau

SEQ ID NO: 1631976 - RNA, 19 nt, Homo sapiens
  misc_RNA (1)...(19): siRNA sense strand
gaaguuauaaguacacauc

SEQ ID NO: 1631977 - RNA, 19 nt, Homo sapiens
  misc_RNA (1)...(19): siRNA sense strand
uggaugaccuguuucaaau

SEQ ID NO: 1631978 - RNA, 19 nt, Homo sapiens
  misc_RNA (1)...(19): siRNA sense strand
guuacuagaugacgagguu

SEQ ID NO: 1631979 - RNA, 19 nt, Homo sapiens
  misc_RNA (1)...(19): siRNA sense strand
ccaacaagguuaaaguuac

SEQ ID NO: 1631980 - RNA, 19 nt, Homo sapiens
  misc_RNA (1)...(19): siRNA sense strand
gaggaugugaguucagaua

SEQ ID NO: 1631981 - RNA, 19 nt, Homo sapiens
  misc_RNA (1)...(19): siRNA sense strand
caaguucuuuccauccauu

SEQ ID NO: 1631982 - RNA, 19 nt, Homo sapiens
  misc_RNA (1)...(19): siRNA sense strand
gaacgaccuggcugaauug

SEQ ID NO: 1631983 - RNA, 19 nt, Homo sapiens
  misc_RNA (1)...(19): siRNA sense strand
caaaggaggaagacacuga

SEQ ID NO: 1631984 - RNA, 19 nt, Homo sapiens
  misc_RNA (1)...(19): siRNA sense strand
gauggagaaguuauaagua

SEQ ID NO: 1631985 - RNA, 19 nt, Homo sapiens
  misc_RNA (1)...(19): siRNA sense strand
ucaccaauauuguguaucu

SEQ ID NO: 1631986 - RNA, 19 nt, Homo sapiens
  misc_RNA (1)...(19): siRNA sense strand
caauggaugaugaagguua

SEQ ID NO: 1631987 - RNA, 19 nt, Homo sapiens
  misc_RNA (1)...(19): siRNA sense strand
aaacuuugacugcagauaa

SEQ ID NO: 1631988 - RNA, 19 nt, Homo sapiens
  misc_RNA (1)...(19): siRNA sense strand
gccagcaaccucugauaua

SEQ ID NO: 1631989 - RNA, 19 nt, Homo sapiens
  misc_RNA (1)...(19): siRNA sense strand
gaaaucaaggccugaagau

SEQ ID NO: 1631990 - RNA, 19 nt, Homo sapiens
  misc_RNA (1)...(19): siRNA sense strand
caacaagguuaaaguuacu

SEQ ID NO: 1631991 - RNA, 19 nt, Homo sapiens
  misc_RNA (1)...(19): siRNA sense strand
uaauagcccuucuguuugg

SEQ ID NO: 1631992 - RNA, 19 nt, Homo sapiens
  misc_RNA (1)...(19): siRNA sense strand
cacgagcccugaucugaaa

SEQ ID NO: 1631993 - RNA, 19 nt, Homo sapiens
  misc_RNA (1)...(19): siRNA sense strand
ggaaggcuacuuauaucuu

SEQ ID NO: 1631994 - RNA, 19 nt, Homo sapiens
  misc_RNA (1)...(19): siRNA sense strand
gcaaugaagaaucuguuga

SEQ ID NO: 1631995 - RNA, 19 nt, Homo sapiens
  misc_RNA (1)...(19): siRNA sense strand
aagaggaccugccagauca

SEQ ID NO: 1631996 - RNA, 19 nt, Homo sapiens
  misc_RNA (1)...(19): siRNA sense strand
gaagaggcagucagucaga

SEQ ID NO: 1631997 - RNA, 19 nt, Homo sapiens
  misc_RNA (1)...(19): siRNA sense strand
gcaccuaaaugggaaaguc

SEQ ID NO: 1631998 - RNA, 19 nt, Homo sapiens
  misc_RNA (1)...(19): siRNA sense strand
gugcugacuuggacagaaa

SEQ ID NO: 1631999 - RNA, 19 nt, Homo sapiens
  misc_RNA (1)...(19): siRNA sense strand
gaagacaauguuucucaug

SEQ ID NO: 1632000 - RNA, 19 nt, Homo sapiens
  misc_RNA (1)...(19): siRNA sense strand
gcuacccgguuguaugaaa

SEQ ID NO: 1632001 - RNA, 19 nt, Homo sapiens
  misc_RNA (1)...(19): siRNA sense strand
guuccaauccuguguauau

SEQ ID NO: 1632002 - RNA, 19 nt, Homo sapiens
  misc_RNA (1)...(19): siRNA sense strand
cuacaggacccucugguuu

SEQ ID NO: 1632003 - RNA, 19 nt, Homo sapiens
  misc_RNA (1)...(19): siRNA sense strand
gaccauggcaccuacaaug

SEQ ID NO: 1632004 - RNA, 19 nt, Homo sapiens
  misc_RNA (1)...(19): siRNA sense strand
uuaaagaauucaccucaca

SEQ ID NO: 1632005 - RNA, 19 nt, Homo sapiens
  misc_RNA (1)...(19): siRNA sense strand
ucuaauuucucaacuggaa

SEQ ID NO: 1632006 - RNA, 19 nt, Homo sapiens
  misc_RNA (1)...(19): siRNA sense strand
gauguuuccuguucagaca

SEQ ID NO: 1632007 - RNA, 19 nt, Homo sapiens
  misc_RNA (1)...(19): siRNA sense strand
gcacuucuguuagcuaagg

SEQ ID NO: 1632008 - RNA, 19 nt, Homo sapiens
  misc_RNA (1)...(19): siRNA sense strand
uaaaugggagccucaguga

SEQ ID NO: 1632009 - RNA, 19 nt, Homo sapiens
  misc_RNA (1)...(19): siRNA sense strand
ccaauauuguguaucugaa

SEQ ID NO: 1632010 - RNA, 19 nt, Homo sapiens
  misc_RNA (1)...(19): siRNA sense strand
cuaucaaacucaauacuuc

SEQ ID NO: 1632011 - RNA, 19 nt, Homo sapiens
  misc_RNA (1)...(19): siRNA sense strand
acagucagcugauccuuca

SEQ ID NO: 1632012 - RNA, 19 nt, Homo sapiens
  misc_RNA (1)...(19): siRNA sense strand
caaccagagucuuuaaggu

SEQ ID NO: 1632013 - RNA, 19 nt, Homo sapiens
  misc_RNA (1)...(19): siRNA sense strand
gaucagcggucaucuuuuc

SEQ ID NO: 1632014 - RNA, 19 nt, Homo sapiens
  misc_RNA (1)...(19): siRNA sense strand
gaaauggcaaguuccaauc

SEQ ID NO: 1632015 - RNA, 19 nt, Homo sapiens
  misc_RNA (1)...(19): siRNA sense strand
ggaaagagauggagaauau

SEQ ID NO: 1632016 - RNA, 19 nt, Homo sapiens
  misc_RNA (1)...(19): siRNA sense strand
gaaccaggaugugcuauua

SEQ ID NO: 1632017 - RNA, 19 nt, Homo sapiens
  misc_RNA (1)...(19): siRNA sense strand
ggaaugaauuguucuguuu

SEQ ID NO: 1632018 - RNA, 19 nt, Homo sapiens
  misc_RNA (1)...(19): siRNA sense strand
gaucagaaccucaguauga

SEQ ID NO: 1632019 - RNA, 19 nt, Homo sapiens
  misc_RNA (1)...(19): siRNA sense strand
ggaacgaccuggcugaauu

SEQ ID NO: 1632020 - RNA, 19 nt, Homo sapiens
  misc_RNA (1)...(19): siRNA sense strand
gaagguuucugcuaucaaa

SEQ ID NO: 1632021 - RNA, 19 nt, Homo sapiens
  misc_RNA (1)...(19): siRNA sense strand
ggagugaagucaaagauau

SEQ ID NO: 1632022 - RNA, 19 nt, Homo sapiens
  misc_RNA (1)...(19): siRNA sense strand
gaacuuggcugcucguaca

SEQ ID NO: 1632023 - RNA, 19 nt, Homo sapiens
  misc_RNA (1)...(19): siRNA sense strand
caacaguacucuccugaaa

SEQ ID NO: 1632024 - RNA, 19 nt, Homo sapiens
  misc_RNA (1)...(19): siRNA sense strand
ggaguggcuuucacauuua

SEQ ID NO: 1632025 - RNA, 19 nt, Homo sapiens
  misc_RNA (1)...(19): siRNA sense strand
gaauguggcacuucuguua

SEQ ID NO: 1632026 - RNA, 19 nt, Homo sapiens
  misc_RNA (1)...(19): siRNA sense strand
ggauacagcuauucuuaga

SEQ ID NO: 1632027 - RNA, 19 nt, Homo sapiens
  misc_RNA (1)...(19): siRNA sense strand
cccaaacucuuacaucuua

SEQ ID NO: 1632028 - RNA, 19 nt, Homo sapiens
  misc_RNA (1)...(19): siRNA sense strand
gcucguacaugcugucuuu

SEQ ID NO: 1632029 - RNA, 19 nt, Homo sapiens
  misc_RNA (1)...(19): siRNA sense strand
ucacaucucucccugauau

SEQ ID NO: 1632030 - RNA, 19 nt, Homo sapiens
  misc_RNA (1)...(19): siRNA sense strand
ucaagaaacuccucucguu

SEQ ID NO: 1632031 - RNA, 19 nt, Homo sapiens
  misc_RNA (1)...(19): siRNA sense strand
ugaaagaaauggcaaguuc

SEQ ID NO: 1632032 - RNA, 19 nt, Homo sapiens
  misc_RNA (1)...(19): siRNA sense strand
gcagauaaauuggagcauu

SEQ ID NO: 1632033 - RNA, 19 nt, Homo sapiens
  misc_RNA (1)...(19): siRNA sense strand
ucaaagauauucaggaugu

SEQ ID NO: 1632034 - RNA, 19 nt, Homo sapiens
  misc_RNA (1)...(19): siRNA sense strand
agagaggccuucaccaaua

SEQ ID NO: 1632035 - RNA, 19 nt, Homo sapiens
  misc_RNA (1)...(19): siRNA sense strand
gcucuucgauccuuaauca

SEQ ID NO: 1632036 - RNA, 19 nt, Homo sapiens
  misc_RNA (1)...(19): siRNA sense strand
gaugaccuguuucaaauau

SEQ ID NO: 1632037 - RNA, 19 nt, Homo sapiens
  misc_RNA (1)...(19): siRNA sense strand
gauggaaggcuacuuauau

SEQ ID NO: 1632038 - RNA, 19 nt, Homo sapiens
  misc_RNA (1)...(19): siRNA sense strand
ggaguugaauguauugaau

SEQ ID NO: 1632039 - RNA, 19 nt, Homo sapiens
  misc_RNA (1)...(19): siRNA sense strand
ggacagaaagaggaauuua

SEQ ID NO: 1632040 - RNA, 19 nt, Homo sapiens
  misc_RNA (1)...(19): siRNA sense strand
auauggagcuuguuucuuu

SEQ ID NO: 1632041 - RNA, 19 nt, Homo sapiens
  misc_RNA (1)...(19): siRNA sense strand
ucagagaaguuuaccagaa

SEQ ID NO: 1632042 - RNA, 19 nt, Homo sapiens
  misc_RNA (1)...(19): siRNA sense strand
ggaagacacugaggaggaa

SEQ ID NO: 1632043 - RNA, 19 nt, Homo sapiens
  misc_RNA (1)...(19): siRNA sense strand
gaagaggccuauggaacuu

SEQ ID NO: 1632044 - RNA, 19 nt, Homo sapiens
  misc_RNA (1)...(19): siRNA sense strand
cagcugauccuucaucuaa

SEQ ID NO: 1632045 - RNA, 19 nt, Homo sapiens
  misc_RNA (1)...(19): siRNA sense strand
guacacaucaguucaagaa

SEQ ID NO: 1632046 - RNA, 19 nt, Homo sapiens
  misc_RNA (1)...(19): siRNA sense strand
cagagggccuugauacaaa

SEQ ID NO: 1632047 - RNA, 19 nt, Homo sapiens
  misc_RNA (1)...(19): siRNA sense strand
acaguacucuccugaaauu

SEQ ID NO: 1632048 - RNA, 19 nt, Homo sapiens
  misc_RNA (1)...(19): siRNA sense strand
gcaaucaugugaagaggau

SEQ ID NO: 1632049 - RNA, 19 nt, Homo sapiens
  misc_RNA (1)...(19): siRNA sense strand
ggaaaugaagacaauguuu

SEQ ID NO: 1632050 - RNA, 19 nt, Homo sapiens
  misc_RNA (1)...(19): siRNA sense strand
aguaauagcccuucuguuu

SEQ ID NO: 1632051 - RNA, 19 nt, Homo sapiens
  misc_RNA (1)...(19): siRNA sense strand
gcugauccuucaucuaauu

SEQ ID NO: 1632052 - RNA, 19 nt, Homo sapiens
  misc_RNA (1)...(19): siRNA sense strand
gagaauauggagcuuguuu

SEQ ID NO: 1632053 - RNA, 19 nt, Homo sapiens
  misc_RNA (1)...(19): siRNA sense strand
gagaggccuucaccaauau

SEQ ID NO: 1632054 - RNA, 19 nt, Homo sapiens
  misc_RNA (1)...(19): siRNA sense strand
aggaguggcuuucacauuu

SEQ ID NO: 1632055 - RNA, 19 nt, Homo sapiens
  misc_RNA (1)...(19): siRNA sense strand
agaagaagcuccauuucau

SEQ ID NO: 1632056 - RNA, 19 nt, Homo sapiens
  misc_RNA (1)...(19): siRNA sense strand
gggaaagucucacaucucu

SEQ ID NO: 1632057 - RNA, 19 nt, Homo sapiens
  misc_RNA (1)...(19): siRNA sense strand
gguuaaaguuacuagauga

SEQ ID NO: 1632058 - RNA, 19 nt, Homo sapiens
  misc_RNA (1)...(19): siRNA sense strand
gccaaacccucucagaaga

SEQ ID NO: 1632059 - RNA, 19 nt, Homo sapiens
  misc_RNA (1)...(19): siRNA sense strand
gccaguuccugaagaagua

SEQ ID NO: 1632060 - RNA, 19 nt, Homo sapiens
  misc_RNA (1)...(19): siRNA sense strand
gaagaggaccugccagauc

SEQ ID NO: 1632061 - RNA, 19 nt, Homo sapiens
  misc_RNA (1)...(19): siRNA sense strand
ccagcaaccucugauauau

SEQ ID NO: 1632062 - RNA, 19 nt, Homo sapiens
  misc_RNA (1)...(19): siRNA sense strand
gaaggagaguaucaagcuu

SEQ ID NO: 1632063 - RNA, 19 nt, Homo sapiens
  misc_RNA (1)...(19): siRNA sense strand
caggaugugcuauuaguua

SEQ ID NO: 1632064 - RNA, 19 nt, Homo sapiens
  misc_RNA (1)...(19): siRNA sense strand
ucagauaccugcccaaagg

SEQ ID NO: 1632065 - RNA, 19 nt, Homo sapiens
  misc_RNA (1)...(19): siRNA sense strand
caccuacaaugaucuaauu

SEQ ID NO: 1632066 - RNA, 19 nt, Homo sapiens
  misc_RNA (1)...(19): siRNA sense strand
gaagcuccauuucaucaca

SEQ ID NO: 1632067 - RNA, 19 nt, Homo sapiens
  misc_RNA (1)...(19): siRNA sense strand
gagaguaucaagcuuaguu

SEQ ID NO: 1632068 - RNA, 19 nt, Homo sapiens
  misc_RNA (1)...(19): siRNA sense strand
uaaaguagcaacagcagaa

SEQ ID NO: 1632069 - RNA, 19 nt, Homo sapiens
  misc_RNA (1)...(19): siRNA sense strand
gaagaugagagauuuaaag

SEQ ID NO: 1632070 - RNA, 19 nt, Homo sapiens
  misc_RNA (1)...(19): siRNA sense strand
ggauggaaggcuacuuaua

SEQ ID NO: 1632071 - RNA, 19 nt, Homo sapiens
  misc_RNA (1)...(19): siRNA sense strand
gcagagggccuugauacaa

SEQ ID NO: 1632072 - RNA, 19 nt, Homo sapiens
  misc_RNA (1)...(19): siRNA sense strand
guaauagcccuucuguuug

SEQ ID NO: 1632073 - RNA, 19 nt, Homo sapiens
  misc_RNA (1)...(19): siRNA sense strand
cgaccuggcugaauugaca

SEQ ID NO: 1632074 - RNA, 19 nt, Homo sapiens
  misc_RNA (1)...(19): siRNA sense strand
caagggagucuuuggauga

SEQ ID NO: 1632075 - RNA, 19 nt, Homo sapiens
  misc_RNA (1)...(19): siRNA sense strand
acacggaaaugaagacaau

SEQ ID NO: 1632076 - RNA, 19 nt, Homo sapiens
  misc_RNA (1)...(19): siRNA sense strand
gaaguuauaaguacacauc

SEQ ID NO: 1632077 - RNA, 19 nt, Homo sapiens
  misc_RNA (1)...(19): siRNA sense strand
uggaugaccuguuucaaau

SEQ ID NO: 1632078 - RNA, 19 nt, Homo sapiens
  misc_RNA (1)...(19): siRNA sense strand
guuacuagaugacgagguu

SEQ ID NO: 1632079 - RNA, 19 nt, Homo sapiens
  misc_RNA (1)...(19): siRNA sense strand
ccaacaagguuaaaguuac

SEQ ID NO: 1632080 - RNA, 19 nt, Homo sapiens
  misc_RNA (1)...(19): siRNA sense strand
gaggaugugaguucagaua

SEQ ID NO: 1632081 - RNA, 19 nt, Homo sapiens
  misc_RNA (1)...(19): siRNA sense strand
caaguucuuuccauccauu

SEQ ID NO: 1632082 - RNA, 19 nt, Homo sapiens
  misc_RNA (1)...(19): siRNA sense strand
gaacgaccuggcugaauug

SEQ ID NO: 1632083 - RNA, 19 nt, Homo sapiens
  misc_RNA (1)...(19): siRNA sense strand
caaaggaggaagacacuga

SEQ ID NO: 1632084 - RNA, 19 nt, Homo sapiens
  misc_RNA (1)...(19): siRNA sense strand
gauggagaaguuauaagua

SEQ ID NO: 1632085 - RNA, 19 nt, Homo sapiens
  misc_RNA (1)...(19): siRNA sense strand
ucaccaauauuguguaucu

SEQ ID NO: 1632086 - RNA, 19 nt, Homo sapiens
  misc_RNA (1)...(19): siRNA sense strand
caauggaugaugaagguua

SEQ ID NO: 1632087 - RNA, 19 nt, Homo sapiens
  misc_RNA (1)...(19): siRNA sense strand
aaacuuugacugcagauaa

SEQ ID NO: 1632088 - RNA, 19 nt, Homo sapiens
  misc_RNA (1)...(19): siRNA sense strand
gccagcaaccucugauaua

SEQ ID NO: 1632089 - RNA, 19 nt, Homo sapiens
  misc_RNA (1)...(19): siRNA sense strand
gaaaucaaggccugaagau

SEQ ID NO: 1632090 - RNA, 19 nt, Homo sapiens
  misc_RNA (1)...(19): siRNA sense strand
caacaagguuaaaguuacu

SEQ ID NO: 1632091 - RNA, 19 nt, Homo sapiens
  misc_RNA (1)...(19): siRNA sense strand
uaauagcccuucuguuugg

SEQ ID NO: 1632092 - RNA, 19 nt, Homo sapiens
  misc_RNA (1)...(19): siRNA sense strand
cacgagcccugaucugaaa

SEQ ID NO: 1632093 - RNA, 19 nt, Homo sapiens
  misc_RNA (1)...(19): siRNA sense strand
ggaaggcuacuuauaucuu

SEQ ID NO: 1632094 - RNA, 19 nt, Homo sapiens
  misc_RNA (1)...(19): siRNA sense strand
gcaaugaagaaucuguuga

SEQ ID NO: 1632095 - RNA, 19 nt, Homo sapiens
  misc_RNA (1)...(19): siRNA sense strand
aagaggaccugccagauca

SEQ ID NO: 1632096 - RNA, 19 nt, Homo sapiens
  misc_RNA (1)...(19): siRNA sense strand
gaagaggcagucagucaga

SEQ ID NO: 1632097 - RNA, 19 nt, Homo sapiens
  misc_RNA (1)...(19): siRNA sense strand
gcaccuaaaugggaaaguc

SEQ ID NO: 1632098 - RNA, 19 nt, Homo sapiens
  misc_RNA (1)...(19): siRNA sense strand
gugcugacuuggacagaaa

SEQ ID NO: 1632099 - RNA, 19 nt, Homo sapiens
  misc_RNA (1)...(19): siRNA sense strand
gaagacaauguuucucaug

SEQ ID NO: 1632100 - RNA, 19 nt, Homo sapiens
  misc_RNA (1)...(19): siRNA sense strand
gcuacccgguuguaugaaa

SEQ ID NO: 1632101 - RNA, 19 nt, Homo sapiens
  misc_RNA (1)...(19): siRNA sense strand
guuccaauccuguguauau

SEQ ID NO: 1632102 - RNA, 19 nt, Homo sapiens
  misc_RNA (1)...(19): siRNA sense strand
cuacaggacccucugguuu

SEQ ID NO: 1632103 - RNA, 19 nt, Homo sapiens
  misc_RNA (1)...(19): siRNA sense strand
gaccauggcaccuacaaug

SEQ ID NO: 1632104 - RNA, 19 nt, Homo sapiens
  misc_RNA (1)...(19): siRNA sense strand
uuaaagaauucaccucaca

SEQ ID NO: 1632105 - RNA, 19 nt, Homo sapiens
  misc_RNA (1)...(19): siRNA sense strand
ucuaauuucucaacuggaa

SEQ ID NO: 1632106 - RNA, 19 nt, Homo sapiens
  misc_RNA (1)...(19): siRNA sense strand
gauguuuccuguucagaca

SEQ ID NO: 1632107 - RNA, 19 nt, Homo sapiens
  misc_RNA (1)...(19): siRNA sense strand
gcacuucuguuagcuaagg

SEQ ID NO: 1632108 - RNA, 19 nt, Homo sapiens
  misc_RNA (1)...(19): siRNA sense strand
uaaaugggagccucaguga

SEQ ID NO: 1632109 - RNA, 19 nt, Homo sapiens
  misc_RNA (1)...(19): siRNA sense strand
ccaauauuguguaucugaa

SEQ ID NO: 1632110 - RNA, 19 nt, Homo sapiens
  misc_RNA (1)...(19): siRNA sense strand
cuaucaaacucaauacuuc

SEQ ID NO: 1632111 - RNA, 19 nt, Homo sapiens
  misc_RNA (1)...(19): siRNA sense strand
acagucagcugauccuuca

SEQ ID NO: 1632112 - RNA, 19 nt, Homo sapiens
  misc_RNA (1)...(19): siRNA sense strand
caaccagagucuuuaaggu

SEQ ID NO: 1632113 - RNA, 19 nt, Homo sapiens
  misc_RNA (1)...(19): siRNA sense strand
gaucagcggucaucuuuuc

SEQ ID NO: 1632114 - RNA, 19 nt, Homo sapiens
  misc_RNA (1)...(19): siRNA sense strand
gaaauggcaaguuccaauc

SEQ ID NO: 1632115 - RNA, 19 nt, Homo sapiens
  misc_RNA (1)...(19): siRNA sense strand
ggaaagagauggagaauau

SEQ ID NO: 1632116 - RNA, 19 nt, Homo sapiens
  misc_RNA (1)...(19): siRNA sense strand
gaaccaggaugugcuauua

SEQ ID NO: 1632117 - RNA, 19 nt, Homo sapiens
  misc_RNA (1)...(19): siRNA sense strand
ggaaugaauuguucuguuu

SEQ ID NO: 1632118 - RNA, 19 nt, Homo sapiens
  misc_RNA (1)...(19): siRNA sense strand
gaucagaaccucaguauga

SEQ ID NO: 1632119 - RNA, 19 nt, Homo sapiens
  misc_RNA (1)...(19): siRNA sense strand
ggaacgaccuggcugaauu

SEQ ID NO: 1632120 - RNA, 19 nt, Homo sapiens
  misc_RNA (1)...(19): siRNA sense strand
gaagguuucugcuaucaaa

SEQ ID NO: 1632121 - RNA, 19 nt, Homo sapiens
  misc_RNA (1)...(19): siRNA sense strand
ggagugaagucaaagauau

SEQ ID NO: 1632122 - RNA, 19 nt, Homo sapiens
  misc_RNA (1)...(19): siRNA sense strand
gaacuuggcugcucguaca

SEQ ID NO: 1632123 - RNA, 19 nt, Homo sapiens
  misc_RNA (1)...(19): siRNA sense strand
caacaguacucuccugaaa

SEQ ID NO: 1632124 - RNA, 19 nt, Homo sapiens
  misc_RNA (1)...(19): siRNA sense strand
ggaguggcuuucacauuua

SEQ ID NO: 1632125 - RNA, 19 nt, Homo sapiens
  misc_RNA (1)...(19): siRNA sense strand
gaauguggcacuucuguua

SEQ ID NO: 1632126 - RNA, 19 nt, Homo sapiens
  misc_RNA (1)...(19): siRNA sense strand
ggauacagcuauucuuaga

SEQ ID NO: 1632127 - RNA, 19 nt, Homo sapiens
  misc_RNA (1)...(19): siRNA sense strand
cccaaacucuuacaucuua

SEQ ID NO: 1632128 - RNA, 19 nt, Homo sapiens
  misc_RNA (1)...(19): siRNA sense strand
gcucguacaugcugucuuu

SEQ ID NO: 1632129 - RNA, 19 nt, Homo sapiens
  misc_RNA (1)...(19): siRNA sense strand
ucacaucucucccugauau

SEQ ID NO: 1632130 - RNA, 19 nt, Homo sapiens
  misc_RNA (1)...(19): siRNA sense strand
ucaagaaacuccucucguu

SEQ ID NO: 1632131 - RNA, 19 nt, Homo sapiens
  misc_RNA (1)...(19): siRNA sense strand
ugaaagaaauggcaaguuc

SEQ ID NO: 1632132 - RNA, 19 nt, Homo sapiens
  misc_RNA (1)...(19): siRNA sense strand
gcagauaaauuggagcauu

SEQ ID NO: 1632133 - RNA, 19 nt, Homo sapiens
  misc_RNA (1)...(19): siRNA sense strand
ucaaagauauucaggaugu

SEQ ID NO: 1632134 - RNA, 19 nt, Homo sapiens
  misc_RNA (1)...(19): siRNA sense strand
agagaggccuucaccaaua

SEQ ID NO: 1632135 - RNA, 19 nt, Homo sapiens
  misc_RNA (1)...(19): siRNA sense strand
ucaagucgccuguuguuua

SEQ ID NO: 1632136 - RNA, 19 nt, Homo sapiens
  misc_RNA (1)...(19): siRNA sense strand
gcucuucgauccuuaauca

SEQ ID NO: 1632137 - RNA, 19 nt, Homo sapiens
  misc_RNA (1)...(19): siRNA sense strand
gaugaccuguuucaaauau

SEQ ID NO: 1632138 - RNA, 19 nt, Homo sapiens
  misc_RNA (1)...(19): siRNA sense strand
gaacaaauguaugugucuu

SEQ ID NO: 1632139 - RNA, 19 nt, Homo sapiens
  misc_RNA (1)...(19): siRNA sense strand
ggaguugaauguauugaau

SEQ ID NO: 1632140 - RNA, 19 nt, Homo sapiens
  misc_RNA (1)...(19): siRNA sense strand
gauggaaggcuacuuauau

SEQ ID NO: 1632141 - RNA, 19 nt, Homo sapiens
  misc_RNA (1)...(19): siRNA sense strand
ggacagaaagaggaauuua

SEQ ID NO: 1632142 - RNA, 19 nt, Homo sapiens
  misc_RNA (1)...(19): siRNA sense strand
auauggagcuuguuucuuu

SEQ ID NO: 1632143 - RNA, 19 nt, Homo sapiens
  misc_RNA (1)...(19): siRNA sense strand
ucagagaaguuuaccagaa

SEQ ID NO: 1632144 - RNA, 19 nt, Homo sapiens
  misc_RNA (1)...(19): siRNA sense strand
ggaagacacugaggaggaa

SEQ ID NO: 1632145 - RNA, 19 nt, Homo sapiens
  misc_RNA (1)...(19): siRNA sense strand
gaagaggccuauggaacuu

SEQ ID NO: 1632146 - RNA, 19 nt, Homo sapiens
  misc_RNA (1)...(19): siRNA sense strand
cagcugauccuucaucuaa

SEQ ID NO: 1632147 - RNA, 19 nt, Homo sapiens
  misc_RNA (1)...(19): siRNA sense strand
guacacaucaguucaagaa

SEQ ID NO: 1632148 - RNA, 19 nt, Homo sapiens
  misc_RNA (1)...(19): siRNA sense strand
cagagggccuugauacaaa

SEQ ID NO: 1632149 - RNA, 19 nt, Homo sapiens
  misc_RNA (1)...(19): siRNA sense strand
acaguacucuccugaaauu

SEQ ID NO: 1632150 - RNA, 19 nt, Homo sapiens
  misc_RNA (1)...(19): siRNA sense strand
gcaaucaugugaagaggau

SEQ ID NO: 1632151 - RNA, 19 nt, Homo sapiens
  misc_RNA (1)...(19): siRNA sense strand
ggaaaugaagacaauguuu

SEQ ID NO: 1632152 - RNA, 19 nt, Homo sapiens
  misc_RNA (1)...(19): siRNA sense strand
aguaauagcccuucuguuu

SEQ ID NO: 1632153 - RNA, 19 nt, Homo sapiens
  misc_RNA (1)...(19): siRNA sense strand
gcugauccuucaucuaauu

SEQ ID NO: 1632154 - RNA, 19 nt, Homo sapiens
  misc_RNA (1)...(19): siRNA sense strand
gagaauauggagcuuguuu

SEQ ID NO: 1632155 - RNA, 19 nt, Homo sapiens
  misc_RNA (1)...(19): siRNA sense strand
gagaggccuucaccaauau

SEQ ID NO: 1632156 - RNA, 19 nt, Homo sapiens
  misc_RNA (1)...(19): siRNA sense strand
aggaguggcuuucacauuu

SEQ ID NO: 1632157 - RNA, 19 nt, Homo sapiens
  misc_RNA (1)...(19): siRNA sense strand
agaagaagcuccauuucau

SEQ ID NO: 1632158 - RNA, 19 nt, Homo sapiens
  misc_RNA (1)...(19): siRNA sense strand
gggaaagucucacaucucu

SEQ ID NO: 1632159 - RNA, 19 nt, Homo sapiens
  misc_RNA (1)...(19): siRNA sense strand
gguuaaaguuacuagauga

SEQ ID NO: 1632160 - RNA, 19 nt, Homo sapiens
  misc_RNA (1)...(19): siRNA sense strand
gccaaacccucucagaaga

SEQ ID NO: 1632161 - RNA, 19 nt, Homo sapiens
  misc_RNA (1)...(19): siRNA sense strand
gccaguuccugaagaagua

SEQ ID NO: 1632162 - RNA, 19 nt, Homo sapiens
  misc_RNA (1)...(19): siRNA sense strand
gaagaggaccugccagauc

SEQ ID NO: 1632163 - RNA, 19 nt, Homo sapiens
  misc_RNA (1)...(19): siRNA sense strand
ccagcaaccucugauauau

SEQ ID NO: 1632164 - RNA, 19 nt, Homo sapiens
  misc_RNA (1)...(19): siRNA sense strand
gaaggagaguaucaagcuu

SEQ ID NO: 1632165 - RNA, 19 nt, Homo sapiens
  misc_RNA (1)...(19): siRNA sense strand
caggaugugcuauuaguua

SEQ ID NO: 1632166 - RNA, 19 nt, Homo sapiens
  misc_RNA (1)...(19): siRNA sense strand
ucagauaccugcccaaagg

SEQ ID NO: 1632167 - RNA, 19 nt, Homo sapiens
  misc_RNA (1)...(19): siRNA sense strand
caccuacaaugaucuaauu

SEQ ID NO: 1632168 - RNA, 19 nt, Homo sapiens
  misc_RNA (1)...(19): siRNA sense strand
gaagcuccauuucaucaca

SEQ ID NO: 1632169 - RNA, 19 nt, Homo sapiens
  misc_RNA (1)...(19): siRNA sense strand
gagaguaucaagcuuaguu

SEQ ID NO: 1632170 - RNA, 19 nt, Homo sapiens
  misc_RNA (1)...(19): siRNA sense strand
uaaaguagcaacagcagaa

SEQ ID NO: 1632171 - RNA, 19 nt, Homo sapiens
  misc_RNA (1)...(19): siRNA sense strand
gaagaugagagauuuaaag

SEQ ID NO: 1632172 - RNA, 19 nt, Homo sapiens
  misc_RNA (1)...(19): siRNA sense strand
ggauggaaggcuacuuaua

SEQ ID NO: 1632173 - RNA, 19 nt, Homo sapiens
  misc_RNA (1)...(19): siRNA sense strand
gcagagggccuugauacaa

SEQ ID NO: 1632174 - RNA, 19 nt, Homo sapiens
  misc_RNA (1)...(19): siRNA sense strand
guaauagcccuucuguuug

SEQ ID NO: 1632175 - RNA, 19 nt, Homo sapiens
  misc_RNA (1)...(19): siRNA sense strand
cgaccuggcugaauugaca

SEQ ID NO: 1632176 - RNA, 19 nt, Homo sapiens
  misc_RNA (1)...(19): siRNA sense strand
caagggagucuuuggauga

SEQ ID NO: 1632177 - RNA, 19 nt, Homo sapiens
  misc_RNA (1)...(19): siRNA sense strand
acacggaaaugaagacaau

SEQ ID NO: 1632178 - RNA, 19 nt, Homo sapiens
  misc_RNA (1)...(19): siRNA sense strand
gaaguuauaaguacacauc

SEQ ID NO: 1632179 - RNA, 19 nt, Homo sapiens
  misc_RNA (1)...(19): siRNA sense strand
uggaugaccuguuucaaau

SEQ ID NO: 1632180 - RNA, 19 nt, Homo sapiens
  misc_RNA (1)...(19): siRNA sense strand
guuacuagaugacgagguu

SEQ ID NO: 1632181 - RNA, 19 nt, Homo sapiens
  misc_RNA (1)...(19): siRNA sense strand
ccaacaagguuaaaguuac

SEQ ID NO: 1632182 - RNA, 19 nt, Homo sapiens
  misc_RNA (1)...(19): siRNA sense strand
ggaaaccggaacaaaugua

SEQ ID NO: 1632183 - RNA, 19 nt, Homo sapiens
  misc_RNA (1)...(19): siRNA sense strand
caaguucuuuccauccauu

SEQ ID NO: 1632184 - RNA, 19 nt, Homo sapiens
  misc_RNA (1)...(19): siRNA sense strand
gaacgaccuggcugaauug

SEQ ID NO: 1632185 - RNA, 19 nt, Homo sapiens
  misc_RNA (1)...(19): siRNA sense strand
caaaggaggaagacacuga

SEQ ID NO: 1632186 - RNA, 19 nt, Homo sapiens
  misc_RNA (1)...(19): siRNA sense strand
gaggaugugaguucagaua

SEQ ID NO: 1632187 - RNA, 19 nt, Homo sapiens
  misc_RNA (1)...(19): siRNA sense strand
aaauguaugugucuucaga

SEQ ID NO: 1632188 - RNA, 19 nt, Homo sapiens
  misc_RNA (1)...(19): siRNA sense strand
gauggagaaguuauaagua

SEQ ID NO: 1632189 - RNA, 19 nt, Homo sapiens
  misc_RNA (1)...(19): siRNA sense strand
ucaccaauauuguguaucu

SEQ ID NO: 1632190 - RNA, 19 nt, Homo sapiens
  misc_RNA (1)...(19): siRNA sense strand
caauggaugaugaagguua

SEQ ID NO: 1632191 - RNA, 19 nt, Homo sapiens
  misc_RNA (1)...(19): siRNA sense strand
aaacuuugacugcagauaa

SEQ ID NO: 1632192 - RNA, 19 nt, Homo sapiens
  misc_RNA (1)...(19): siRNA sense strand
gccagcaaccucugauaua

SEQ ID NO: 1632193 - RNA, 19 nt, Homo sapiens
  misc_RNA (1)...(19): siRNA sense strand
gaaaucaaggccugaagau

SEQ ID NO: 1632194 - RNA, 19 nt, Homo sapiens
  misc_RNA (1)...(19): siRNA sense strand
caacaagguuaaaguuacu

SEQ ID NO: 1632195 - RNA, 19 nt, Homo sapiens
  misc_RNA (1)...(19): siRNA sense strand
uaauagcccuucuguuugg

SEQ ID NO: 1632196 - RNA, 19 nt, Homo sapiens
  misc_RNA (1)...(19): siRNA sense strand
cacgagcccugaucugaaa

SEQ ID NO: 1632197 - RNA, 19 nt, Homo sapiens
  misc_RNA (1)...(19): siRNA sense strand
ggaaggcuacuuauaucuu

SEQ ID NO: 1632198 - RNA, 19 nt, Homo sapiens
  misc_RNA (1)...(19): siRNA sense strand
gcaaugaagaaucuguuga

SEQ ID NO: 1632199 - RNA, 19 nt, Homo sapiens
  misc_RNA (1)...(19): siRNA sense strand
aagaggaccugccagauca

SEQ ID NO: 1632200 - RNA, 19 nt, Homo sapiens
  misc_RNA (1)...(19): siRNA sense strand
gaagaggcagucagucaga

SEQ ID NO: 1632201 - RNA, 19 nt, Homo sapiens
  misc_RNA (1)...(19): siRNA sense strand
gcaccuaaaugggaaaguc

SEQ ID NO: 1632202 - RNA, 19 nt, Homo sapiens
  misc_RNA (1)...(19): siRNA sense strand
gugcugacuuggacagaaa

SEQ ID NO: 1632203 - RNA, 19 nt, Homo sapiens
  misc_RNA (1)...(19): siRNA sense strand
gaagacaauguuucucaug

SEQ ID NO: 1632204 - RNA, 19 nt, Homo sapiens
  misc_RNA (1)...(19): siRNA sense strand
gcuacccgguuguaugaaa

SEQ ID NO: 1632205 - RNA, 19 nt, Homo sapiens
  misc_RNA (1)...(19): siRNA sense strand
guuccaauccuguguauau

SEQ ID NO: 1632206 - RNA, 19 nt, Homo sapiens
  misc_RNA (1)...(19): siRNA sense strand
gaaaccggaacaaauguau

SEQ ID NO: 1632207 - RNA, 19 nt, Homo sapiens
  misc_RNA (1)...(19): siRNA sense strand
cuacaggacccucugguuu

SEQ ID NO: 1632208 - RNA, 19 nt, Homo sapiens
  misc_RNA (1)...(19): siRNA sense strand
gaccauggcaccuacaaug

SEQ ID NO: 1632209 - RNA, 19 nt, Homo sapiens
  misc_RNA (1)...(19): siRNA sense strand
uuaaagaauucaccucaca

SEQ ID NO: 1632210 - RNA, 19 nt, Homo sapiens
  misc_RNA (1)...(19): siRNA sense strand
ucuaauuucucaacuggaa

SEQ ID NO: 1632211 - RNA, 19 nt, Homo sapiens
  misc_RNA (1)...(19): siRNA sense strand
acagucagcugauccuuca

SEQ ID NO: 1632212 - RNA, 19 nt, Homo sapiens
  misc_RNA (1)...(19): siRNA sense strand
gcacuucuguuagcuaagg

SEQ ID NO: 1632213 - RNA, 19 nt, Homo sapiens
  misc_RNA (1)...(19): siRNA sense strand
uaaaugggagccucaguga

SEQ ID NO: 1632214 - RNA, 19 nt, Homo sapiens
  misc_RNA (1)...(19): siRNA sense strand
ccaauauuguguaucugaa

SEQ ID NO: 1632215 - RNA, 19 nt, Homo sapiens
  misc_RNA (1)...(19): siRNA sense strand
ggaaagagauggagaauau

SEQ ID NO: 1632216 - RNA, 19 nt, Homo sapiens
  misc_RNA (1)...(19): siRNA sense strand
gaaccaggaugugcuauua

SEQ ID NO: 1632217 - RNA, 19 nt, Homo sapiens
  misc_RNA (1)...(19): siRNA sense strand
ggaaugaauuguucuguuu

SEQ ID NO: 1632218 - RNA, 19 nt, Homo sapiens
  misc_RNA (1)...(19): siRNA sense strand
gaucagaaccucaguauga

SEQ ID NO: 1632219 - RNA, 19 nt, Homo sapiens
  misc_RNA (1)...(19): siRNA sense strand
ggaacgaccuggcugaauu

SEQ ID NO: 1632220 - RNA, 19 nt, Homo sapiens
  misc_RNA (1)...(19): siRNA sense strand
gaagguuucugcuaucaaa

SEQ ID NO: 1632221 - RNA, 19 nt, Homo sapiens
  misc_RNA (1)...(19): siRNA sense strand
ggagugaagucaaagauau

SEQ ID NO: 1632222 - RNA, 19 nt, Homo sapiens
  misc_RNA (1)...(19): siRNA sense strand
gaacuuggcugcucguaca

SEQ ID NO: 1632223 - RNA, 19 nt, Homo sapiens
  misc_RNA (1)...(19): siRNA sense strand
caacaguacucuccugaaa

SEQ ID NO: 1632224 - RNA, 19 nt, Homo sapiens
  misc_RNA (1)...(19): siRNA sense strand
ggaguggcuuucacauuua

SEQ ID NO: 1632225 - RNA, 19 nt, Homo sapiens
  misc_RNA (1)...(19): siRNA sense strand
gaauguggcacuucuguua

SEQ ID NO: 1632226 - RNA, 19 nt, Homo sapiens
  misc_RNA (1)...(19): siRNA sense strand
ggauacagcuauucuuaga

SEQ ID NO: 1632227 - RNA, 19 nt, Homo sapiens
  misc_RNA (1)...(19): siRNA sense strand
cccaaacucuuacaucuua

SEQ ID NO: 1632228 - RNA, 19 nt, Homo sapiens
  misc_RNA (1)...(19): siRNA sense strand
gcucguacaugcugucuuu

SEQ ID NO: 1632229 - RNA, 19 nt, Homo sapiens
  misc_RNA (1)...(19): siRNA sense strand
ucacaucucucccugauau

SEQ ID NO: 1632230 - RNA, 19 nt, Homo sapiens
  misc_RNA (1)...(19): siRNA sense strand
ucaagaaacuccucucguu

SEQ ID NO: 1632231 - RNA, 19 nt, Homo sapiens
  misc_RNA (1)...(19): siRNA sense strand
ugaaagaaauggcaaguuc

SEQ ID NO: 1632232 - RNA, 19 nt, Homo sapiens
  misc_RNA (1)...(19): siRNA sense strand
gcagauaaauuggagcauu

SEQ ID NO: 1632233 - RNA, 19 nt, Homo sapiens
  misc_RNA (1)...(19): siRNA sense strand
ucaaagauauucaggaugu

SEQ ID NO: 1632234 - RNA, 19 nt, Homo sapiens
  misc_RNA (1)...(19): siRNA sense strand
agagaggccuucaccaaua

SEQ ID NO: 1632235 - RNA, 19 nt, Homo sapiens
  misc_RNA (1)...(19): siRNA sense strand
gcucuucgauccuuaauca

SEQ ID NO: 1632236 - RNA, 19 nt, Homo sapiens
  misc_RNA (1)...(19): siRNA sense strand
gaugaccuguuucaaauau

SEQ ID NO: 1632237 - RNA, 19 nt, Homo sapiens
  misc_RNA (1)...(19): siRNA sense strand
gauggaaggcuacuuauau

SEQ ID NO: 1632238 - RNA, 19 nt, Homo sapiens
  misc_RNA (1)...(19): siRNA sense strand
ggaguugaauguauugaau

SEQ ID NO: 1632239 - RNA, 19 nt, Homo sapiens
  misc_RNA (1)...(19): siRNA sense strand
ggacagaaagaggaauuua

SEQ ID NO: 1632240 - RNA, 19 nt, Homo sapiens
  misc_RNA (1)...(19): siRNA sense strand
auauggagcuuguuucuuu

SEQ ID NO: 1632241 - RNA, 19 nt, Homo sapiens
  misc_RNA (1)...(19): siRNA sense strand
ucagagaaguuuaccagaa

SEQ ID NO: 1632242 - RNA, 19 nt, Homo sapiens
  misc_RNA (1)...(19): siRNA sense strand
ggaagacacugaggaggaa

SEQ ID NO: 1632243 - RNA, 19 nt, Homo sapiens
  misc_RNA (1)...(19): siRNA sense strand
gaagaggccuauggaacuu

SEQ ID NO: 1632244 - RNA, 19 nt, Homo sapiens
  misc_RNA (1)...(19): siRNA sense strand
cagcugauccuucaucuaa

SEQ ID NO: 1632245 - RNA, 19 nt, Homo sapiens
  misc_RNA (1)...(19): siRNA sense strand
guacacaucaguucaagaa

SEQ ID NO: 1632246 - RNA, 19 nt, Homo sapiens
  misc_RNA (1)...(19): siRNA sense strand
cagagggccuugauacaaa

SEQ ID NO: 1632247 - RNA, 19 nt, Homo sapiens
  misc_RNA (1)...(19): siRNA sense strand
acaguacucuccugaaauu

SEQ ID NO: 1632248 - RNA, 19 nt, Homo sapiens
  misc_RNA (1)...(19): siRNA sense strand
gcaaucaugugaagaggau

SEQ ID NO: 1632249 - RNA, 19 nt, Homo sapiens
  misc_RNA (1)...(19): siRNA sense strand
ggaaaugaagacaauguuu

SEQ ID NO: 1632250 - RNA, 19 nt, Homo sapiens
  misc_RNA (1)...(19): siRNA sense strand
aguaauagcccuucuguuu

SEQ ID NO: 1632251 - RNA, 19 nt, Homo sapiens
  misc_RNA (1)...(19): siRNA sense strand
gcugauccuucaucuaauu

SEQ ID NO: 1632252 - RNA, 19 nt, Homo sapiens
  misc_RNA (1)...(19): siRNA sense strand
gagaauauggagcuuguuu

SEQ ID NO: 1632253 - RNA, 19 nt, Homo sapiens
  misc_RNA (1)...(19): siRNA sense strand
gagaggccuucaccaauau

SEQ ID NO: 1632254 - RNA, 19 nt, Homo sapiens
  misc_RNA (1)...(19): siRNA sense strand
aggaguggcuuucacauuu

SEQ ID NO: 1632255 - RNA, 19 nt, Homo sapiens
  misc_RNA (1)...(19): siRNA sense strand
agaagaagcuccauuucau

SEQ ID NO: 1632256 - RNA, 19 nt, Homo sapiens
  misc_RNA (1)...(19): siRNA sense strand
gggaaagucucacaucucu

SEQ ID NO: 1632257 - RNA, 19 nt, Homo sapiens
  misc_RNA (1)...(19): siRNA sense strand
gguuaaaguuacuagauga

SEQ ID NO: 1632258 - RNA, 19 nt, Homo sapiens
  misc_RNA (1)...(19): siRNA sense strand
gccaaacccucucagaaga

SEQ ID NO: 1632259 - RNA, 19 nt, Homo sapiens
  misc_RNA (1)...(19): siRNA sense strand
gccaguuccugaagaagua

SEQ ID NO: 1632260 - RNA, 19 nt, Homo sapiens
  misc_RNA (1)...(19): siRNA sense strand
gaagaggaccugccagauc

SEQ ID NO: 1632261 - RNA, 19 nt, Homo sapiens
  misc_RNA (1)...(19): siRNA sense strand
ccagcaaccucugauauau

SEQ ID NO: 1632262 - RNA, 19 nt, Homo sapiens
  misc_RNA (1)...(19): siRNA sense strand
gaaggagaguaucaagcuu

SEQ ID NO: 1632263 - RNA, 19 nt, Homo sapiens
  misc_RNA (1)...(19): siRNA sense strand
caggaugugcuauuaguua

SEQ ID NO: 1632264 - RNA, 19 nt, Homo sapiens
  misc_RNA (1)...(19): siRNA sense strand
ucagauaccugcccaaagg

SEQ ID NO: 1632265 - RNA, 19 nt, Homo sapiens
  misc_RNA (1)...(19): siRNA sense strand
caccuacaaugaucuaauu

SEQ ID NO: 1632266 - RNA, 19 nt, Homo sapiens
  misc_RNA (1)...(19): siRNA sense strand
gaagcuccauuucaucaca

SEQ ID NO: 1632267 - RNA, 19 nt, Homo sapiens
  misc_RNA (1)...(19): siRNA sense strand
gagaguaucaagcuuaguu

SEQ ID NO: 1632268 - RNA, 19 nt, Homo sapiens
  misc_RNA (1)...(19): siRNA sense strand
uaaaguagcaacagcagaa

SEQ ID NO: 1632269 - RNA, 19 nt, Homo sapiens
  misc_RNA (1)...(19): siRNA sense strand
gaagaugagagauuuaaag

SEQ ID NO: 1632270 - RNA, 19 nt, Homo sapiens
  misc_RNA (1)...(19): siRNA sense strand
ggauggaaggcuacuuaua

SEQ ID NO: 1632271 - RNA, 19 nt, Homo sapiens
  misc_RNA (1)...(19): siRNA sense strand
gcagagggccuugauacaa

SEQ ID NO: 1632272 - RNA, 19 nt, Homo sapiens
  misc_RNA (1)...(19): siRNA sense strand
guaauagcccuucuguuug

SEQ ID NO: 1632273 - RNA, 19 nt, Homo sapiens
  misc_RNA (1)...(19): siRNA sense strand
cgaccuggcugaauugaca

SEQ ID NO: 1632274 - RNA, 19 nt, Homo sapiens
  misc_RNA (1)...(19): siRNA sense strand
caagggagucuuuggauga

SEQ ID NO: 1632275 - RNA, 19 nt, Homo sapiens
  misc_RNA (1)...(19): siRNA sense strand
acacggaaaugaagacaau

SEQ ID NO: 1632276 - RNA, 19 nt, Homo sapiens
  misc_RNA (1)...(19): siRNA sense strand
gaaguuauaaguacacauc

SEQ ID NO: 1632277 - RNA, 19 nt, Homo sapiens
  misc_RNA (1)...(19): siRNA sense strand
uggaugaccuguuucaaau

SEQ ID NO: 1632278 - RNA, 19 nt, Homo sapiens
  misc_RNA (1)...(19): siRNA sense strand
guuacuagaugacgagguu

SEQ ID NO: 1632279 - RNA, 19 nt, Homo sapiens
  misc_RNA (1)...(19): siRNA sense strand
ccaacaagguuaaaguuac

SEQ ID NO: 1632280 - RNA, 19 nt, Homo sapiens
  misc_RNA (1)...(19): siRNA sense strand
gaggaugugaguucagaua

SEQ ID NO: 1632281 - RNA, 19 nt, Homo sapiens
  misc_RNA (1)...(19): siRNA sense strand
caaguucuuuccauccauu

SEQ ID NO: 1632282 - RNA, 19 nt, Homo sapiens
  misc_RNA (1)...(19): siRNA sense strand
gaacgaccuggcugaauug

SEQ ID NO: 1632283 - RNA, 19 nt, Homo sapiens
  misc_RNA (1)...(19): siRNA sense strand
caaaggaggaagacacuga

SEQ ID NO: 1632284 - RNA, 19 nt, Homo sapiens
  misc_RNA (1)...(19): siRNA sense strand
gauggagaaguuauaagua

SEQ ID NO: 1632285 - RNA, 19 nt, Homo sapiens
  misc_RNA (1)...(19): siRNA sense strand
ucaccaauauuguguaucu

SEQ ID NO: 1632286 - RNA, 19 nt, Homo sapiens
  misc_RNA (1)...(19): siRNA sense strand
caauggaugaugaagguua

SEQ ID NO: 1632287 - RNA, 19 nt, Homo sapiens
  misc_RNA (1)...(19): siRNA sense strand
aaacuuugacugcagauaa

SEQ ID NO: 1632288 - RNA, 19 nt, Homo sapiens
  misc_RNA (1)...(19): siRNA sense strand
gccagcaaccucugauaua

SEQ ID NO: 1632289 - RNA, 19 nt, Homo sapiens
  misc_RNA (1)...(19): siRNA sense strand
gaaaucaaggccugaagau

SEQ ID NO: 1632290 - RNA, 19 nt, Homo sapiens
  misc_RNA (1)...(19): siRNA sense strand
caacaagguuaaaguuacu

SEQ ID NO: 1632291 - RNA, 19 nt, Homo sapiens
  misc_RNA (1)...(19): siRNA sense strand
uaauagcccuucuguuugg

SEQ ID NO: 1632292 - RNA, 19 nt, Homo sapiens
  misc_RNA (1)...(19): siRNA sense strand
cacgagcccugaucugaaa

SEQ ID NO: 1632293 - RNA, 19 nt, Homo sapiens
  misc_RNA (1)...(19): siRNA sense strand
ggaaggcuacuuauaucuu

SEQ ID NO: 1632294 - RNA, 19 nt, Homo sapiens
  misc_RNA (1)...(19): siRNA sense strand
gcaaugaagaaucuguuga

SEQ ID NO: 1632295 - RNA, 19 nt, Homo sapiens
  misc_RNA (1)...(19): siRNA sense strand
aagaggaccugccagauca

SEQ ID NO: 1632296 - RNA, 19 nt, Homo sapiens
  misc_RNA (1)...(19): siRNA sense strand
gaagaggcagucagucaga

SEQ ID NO: 1632297 - RNA, 19 nt, Homo sapiens
  misc_RNA (1)...(19): siRNA sense strand
gcaccuaaaugggaaaguc

SEQ ID NO: 1632298 - RNA, 19 nt, Homo sapiens
  misc_RNA (1)...(19): siRNA sense strand
gugcugacuuggacagaaa

SEQ ID NO: 1632299 - RNA, 19 nt, Homo sapiens
  misc_RNA (1)...(19): siRNA sense strand
gaagacaauguuucucaug

SEQ ID NO: 1632300 - RNA, 19 nt, Homo sapiens
  misc_RNA (1)...(19): siRNA sense strand
gcuacccgguuguaugaaa

SEQ ID NO: 1632301 - RNA, 19 nt, Homo sapiens
  misc_RNA (1)...(19): siRNA sense strand
guuccaauccuguguauau

SEQ ID NO: 1632302 - RNA, 19 nt, Homo sapiens
  misc_RNA (1)...(19): siRNA sense strand
cuacaggacccucugguuu

SEQ ID NO: 1632303 - RNA, 19 nt, Homo sapiens
  misc_RNA (1)...(19): siRNA sense strand
gaccauggcaccuacaaug

SEQ ID NO: 1632304 - RNA, 19 nt, Homo sapiens
  misc_RNA (1)...(19): siRNA sense strand
uuaaagaauucaccucaca

SEQ ID NO: 1632305 - RNA, 19 nt, Homo sapiens
  misc_RNA (1)...(19): siRNA sense strand
ucuaauuucucaacuggaa

SEQ ID NO: 1632306 - RNA, 19 nt, Homo sapiens
  misc_RNA (1)...(19): siRNA sense strand
gauguuuccuguucagaca

SEQ ID NO: 1632307 - RNA, 19 nt, Homo sapiens
  misc_RNA (1)...(19): siRNA sense strand
gcacuucuguuagcuaagg

SEQ ID NO: 1632308 - RNA, 19 nt, Homo sapiens
  misc_RNA (1)...(19): siRNA sense strand
uaaaugggagccucaguga

SEQ ID NO: 1632309 - RNA, 19 nt, Homo sapiens
  misc_RNA (1)...(19): siRNA sense strand
ccaauauuguguaucugaa

SEQ ID NO: 1632310 - RNA, 19 nt, Homo sapiens
  misc_RNA (1)...(19): siRNA sense strand
cuaucaaacucaauacuuc

SEQ ID NO: 1632311 - RNA, 19 nt, Homo sapiens
  misc_RNA (1)...(19): siRNA sense strand
acagucagcugauccuuca

SEQ ID NO: 1632312 - RNA, 19 nt, Homo sapiens
  misc_RNA (1)...(19): siRNA sense strand
caaccagagucuuuaaggu

SEQ ID NO: 1632313 - RNA, 19 nt, Homo sapiens
  misc_RNA (1)...(19): siRNA sense strand
gaucagcggucaucuuuuc

SEQ ID NO: 1632314 - RNA, 19 nt, Homo sapiens
  misc_RNA (1)...(19): siRNA sense strand
gaaauggcaaguuccaauc

SEQ ID NO: 1632315 - RNA, 19 nt, Homo sapiens
  misc_RNA (1)...(19): siRNA sense strand
guaaggagguacagcagau

SEQ ID NO: 1632316 - RNA, 19 nt, Homo sapiens
  misc_RNA (1)...(19): siRNA sense strand
ggucuacgccucccaggaa

SEQ ID NO: 1632317 - RNA, 19 nt, Homo sapiens
  misc_RNA (1)...(19): siRNA sense strand
ggaaaccuucggcuucuga

SEQ ID NO: 1632318 - RNA, 19 nt, Homo sapiens
  misc_RNA (1)...(19): siRNA sense strand
ggacggcuuccucuauaug

SEQ ID NO: 1632319 - RNA, 19 nt, Homo sapiens
  misc_RNA (1)...(19): siRNA sense strand
gaucaucgagcgcuacaag

SEQ ID NO: 1632320 - RNA, 19 nt, Homo sapiens
  misc_RNA (1)...(19): siRNA sense strand
ugagcgaguuggucaagau

SEQ ID NO: 1632321 - RNA, 19 nt, Homo sapiens
  misc_RNA (1)...(19): siRNA sense strand
gcgaguuggucaagaucau

SEQ ID NO: 1632322 - RNA, 19 nt, Homo sapiens
  misc_RNA (1)...(19): siRNA sense strand
caggaaaccuucggcuucu

SEQ ID NO: 1632323 - RNA, 19 nt, Homo sapiens
  misc_RNA (1)...(19): siRNA sense strand
ucuacgagcaggagaaaga

SEQ ID NO: 1632324 - RNA, 19 nt, Homo sapiens
  misc_RNA (1)...(19): siRNA sense strand
cgaccgcuguaaggaggua

SEQ ID NO: 1632325 - RNA, 19 nt, Homo sapiens
  misc_RNA (1)...(19): siRNA sense strand
gcccaucgcggacaucuac

SEQ ID NO: 1632326 - RNA, 19 nt, Homo sapiens
  misc_RNA (1)...(19): siRNA sense strand
gcuacaagggugagaagca

SEQ ID NO: 1632327 - RNA, 19 nt, Homo sapiens
  misc_RNA (1)...(19): siRNA sense strand
gaccagcaccccagcaaaa

SEQ ID NO: 1632328 - RNA, 19 nt, Homo sapiens
  misc_RNA (1)...(19): siRNA sense strand
caucuacgagcaggagaaa

SEQ ID NO: 1632329 - RNA, 19 nt, Homo sapiens
  misc_RNA (1)...(19): siRNA sense strand
guaaggagguacagcagau

SEQ ID NO: 1632330 - RNA, 19 nt, Homo sapiens
  misc_RNA (1)...(19): siRNA sense strand
ggucuacgccucccaggaa

SEQ ID NO: 1632331 - RNA, 19 nt, Homo sapiens
  misc_RNA (1)...(19): siRNA sense strand
ggaaaccuucggcuucuga

SEQ ID NO: 1632332 - RNA, 19 nt, Homo sapiens
  misc_RNA (1)...(19): siRNA sense strand
ggacggcuuccucuauaug

SEQ ID NO: 1632333 - RNA, 19 nt, Homo sapiens
  misc_RNA (1)...(19): siRNA sense strand
gaucaucgagcgcuacaag

SEQ ID NO: 1632334 - RNA, 19 nt, Homo sapiens
  misc_RNA (1)...(19): siRNA sense strand
ugagcgaguuggucaagau

SEQ ID NO: 1632335 - RNA, 19 nt, Homo sapiens
  misc_RNA (1)...(19): siRNA sense strand
gcgaguuggucaagaucau

SEQ ID NO: 1632336 - RNA, 19 nt, Homo sapiens
  misc_RNA (1)...(19): siRNA sense strand
caggaaaccuucggcuucu

SEQ ID NO: 1632337 - RNA, 19 nt, Homo sapiens
  misc_RNA (1)...(19): siRNA sense strand
ucuacgagcaggagaaaga

SEQ ID NO: 1632338 - RNA, 19 nt, Homo sapiens
  misc_RNA (1)...(19): siRNA sense strand
cgaccgcuguaaggaggua

SEQ ID NO: 1632339 - RNA, 19 nt, Homo sapiens
  misc_RNA (1)...(19): siRNA sense strand
gcccaucgcggacaucuac

SEQ ID NO: 1632340 - RNA, 19 nt, Homo sapiens
  misc_RNA (1)...(19): siRNA sense strand
gcuacaagggugagaagca

SEQ ID NO: 1632341 - RNA, 19 nt, Homo sapiens
  misc_RNA (1)...(19): siRNA sense strand
gaccagcaccccagcaaaa

SEQ ID NO: 1632342 - RNA, 19 nt, Homo sapiens
  misc_RNA (1)...(19): siRNA sense strand
caucuacgagcaggagaaa

SEQ ID NO: 1632343 - RNA, 19 nt, Homo sapiens
  misc_RNA (1)...(19): siRNA sense strand
ccaagaagaucaaacacaa

SEQ ID NO: 1632344 - RNA, 19 nt, Homo sapiens
  misc_RNA (1)...(19): siRNA sense strand
gaaaagugcugcucacauu

SEQ ID NO: 1632345 - RNA, 19 nt, Homo sapiens
  misc_RNA (1)...(19): siRNA sense strand
ggaguggacuucugcaaug

SEQ ID NO: 1632346 - RNA, 19 nt, Homo sapiens
  misc_RNA (1)...(19): siRNA sense strand
gcacagcgcuggcauuuug

SEQ ID NO: 1632347 - RNA, 19 nt, Homo sapiens
  misc_RNA (1)...(19): siRNA sense strand
ccaagugccugcaggauga

SEQ ID NO: 1632348 - RNA, 19 nt, Homo sapiens
  misc_RNA (1)...(19): siRNA sense strand
cagaacggccugcauguua

SEQ ID NO: 1632349 - RNA, 19 nt, Homo sapiens
  misc_RNA (1)...(19): siRNA sense strand
gcauggaucccuuucaaga

SEQ ID NO: 1632350 - RNA, 19 nt, Homo sapiens
  misc_RNA (1)...(19): siRNA sense strand
aaagagaggcucaccugua

SEQ ID NO: 1632351 - RNA, 19 nt, Homo sapiens
  misc_RNA (1)...(19): siRNA sense strand
gccugcauguuaauuguua

SEQ ID NO: 1632352 - RNA, 19 nt, Homo sapiens
  misc_RNA (1)...(19): siRNA sense strand
ucaagaacccugcaugcua

SEQ ID NO: 1632353 - RNA, 19 nt, Homo sapiens
  misc_RNA (1)...(19): siRNA sense strand
ggacucauguaacacagau

SEQ ID NO: 1632354 - RNA, 19 nt, Homo sapiens
  misc_RNA (1)...(19): siRNA sense strand
gaacuuccggacucaugua

SEQ ID NO: 1632355 - RNA, 19 nt, Homo sapiens
  misc_RNA (1)...(19): siRNA sense strand
gaaugccaacaacuucuua

SEQ ID NO: 1632356 - RNA, 19 nt, Homo sapiens
  misc_RNA (1)...(19): siRNA sense strand
gugcauggaucccuuucaa

SEQ ID NO: 1632357 - RNA, 19 nt, Homo sapiens
  misc_RNA (1)...(19): siRNA sense strand
agaacggccugcauguuaa

SEQ ID NO: 1632358 - RNA, 19 nt, Homo sapiens
  misc_RNA (1)...(19): siRNA sense strand
cugcaaugcugaccaagaa

SEQ ID NO: 1632359 - RNA, 19 nt, Homo sapiens
  misc_RNA (1)...(19): siRNA sense strand
gcugcacacccuucaaaua

SEQ ID NO: 1632360 - RNA, 19 nt, Homo sapiens
  misc_RNA (1)...(19): siRNA sense strand
guaccaagauugauaaacc

SEQ ID NO: 1632361 - RNA, 19 nt, Homo sapiens
  misc_RNA (1)...(19): siRNA sense strand
gaugaggagugcccauugg

SEQ ID NO: 1632362 - RNA, 19 nt, Homo sapiens
  misc_RNA (1)...(19): siRNA sense strand
gcaaugcugaccaagaaga

SEQ ID NO: 1632363 - RNA, 19 nt, Homo sapiens
  misc_RNA (1)...(19): siRNA sense strand
gcaaggaauaccagaagug

SEQ ID NO: 1632364 - RNA, 19 nt, Homo sapiens
  misc_RNA (1)...(19): siRNA sense strand
gcacuuuccucuccauagc

SEQ ID NO: 1632365 - RNA, 19 nt, Homo sapiens
  misc_RNA (1)...(19): siRNA sense strand
gaauccagguguggcuuug

SEQ ID NO: 1632366 - RNA, 19 nt, Homo sapiens
  misc_RNA (1)...(19): siRNA sense strand
gcacacccuucaaauacag

SEQ ID NO: 1632367 - RNA, 19 nt, Homo sapiens
  misc_RNA (1)...(19): siRNA sense strand
caagaagaucaaacacaaa

SEQ ID NO: 1632368 - RNA, 19 nt, Homo sapiens
  misc_RNA (1)...(19): siRNA sense strand
gaagugcauggaucccuuu

SEQ ID NO: 1632369 - RNA, 19 nt, Homo sapiens
  misc_RNA (1)...(19): siRNA sense strand
gaagaucaaacacaaacca

SEQ ID NO: 1632370 - RNA, 19 nt, Homo sapiens
  misc_RNA (1)...(19): siRNA sense strand
aagagaggcucaccuguac

SEQ ID NO: 1632371 - RNA, 19 nt, Homo sapiens
  misc_RNA (1)...(19): siRNA sense strand
gcgaagggaaugccaacaa

SEQ ID NO: 1632372 - RNA, 19 nt, Homo sapiens
  misc_RNA (1)...(19): siRNA sense strand
ggaaugccaacaacuucuu

SEQ ID NO: 1632373 - RNA, 19 nt, Homo sapiens
  misc_RNA (1)...(19): siRNA sense strand
gauggacaaugcccacucu

SEQ ID NO: 1632374 - RNA, 19 nt, Homo sapiens
  misc_RNA (1)...(19): siRNA sense strand
gaacggccugcauguuaau

SEQ ID NO: 1632375 - RNA, 19 nt, Homo sapiens
  misc_RNA (1)...(19): siRNA sense strand
gcgcuggcauuuugacuuu

SEQ ID NO: 1632376 - RNA, 19 nt, Homo sapiens
  misc_RNA (1)...(19): siRNA sense strand
ggaugaggagugcccauug

SEQ ID NO: 1632377 - RNA, 19 nt, Homo sapiens
  misc_RNA (1)...(19): siRNA sense strand
cuauguaccaagauugaua

SEQ ID NO: 1632378 - RNA, 19 nt, Homo sapiens
  misc_RNA (1)...(19): siRNA sense strand
cgaagggaaugccaacaac

SEQ ID NO: 1632379 - RNA, 19 nt, Homo sapiens
  misc_RNA (1)...(19): siRNA sense strand
ugaccaagaagaucaaaca

SEQ ID NO: 1632380 - RNA, 19 nt, Homo sapiens
  misc_RNA (1)...(19): siRNA sense strand
gcucaccuguaccacugaa

SEQ ID NO: 1632381 - RNA, 19 nt, Homo sapiens
  misc_RNA (1)...(19): siRNA sense strand
gcauggaaacuguaaucau

SEQ ID NO: 1632382 - RNA, 19 nt, Homo sapiens
  misc_RNA (1)...(19): siRNA sense strand
auuguggacugaaauguau

SEQ ID NO: 1632383 - RNA, 19 nt, Homo sapiens
  misc_RNA (1)...(19): siRNA sense strand
cugcuucucucccuugcuu

SEQ ID NO: 1632384 - RNA, 19 nt, Homo sapiens
  misc_RNA (1)...(19): siRNA sense strand
gaacugaaggagggcacuu

SEQ ID NO: 1632385 - RNA, 19 nt, Homo sapiens
  misc_RNA (1)...(19): siRNA sense strand
ggaguguccaccuucaugu

SEQ ID NO: 1632386 - RNA, 19 nt, Homo sapiens
  misc_RNA (1)...(19): siRNA sense strand
ugugaggcauggaaacugu

SEQ ID NO: 1632387 - RNA, 19 nt, Homo sapiens
  misc_RNA (1)...(19): siRNA sense strand
cauggaucccuuucaagaa

SEQ ID NO: 1632388 - RNA, 19 nt, Homo sapiens
  misc_RNA (1)...(19): siRNA sense strand
acucauguaacacagauuu

SEQ ID NO: 1632389 - RNA, 19 nt, Homo sapiens
  misc_RNA (1)...(19): siRNA sense strand
ggagugcccauugguggaa

SEQ ID NO: 1632390 - RNA, 19 nt, Homo sapiens
  misc_RNA (1)...(19): siRNA sense strand
cuuccggacucauguaaca

SEQ ID NO: 1632391 - RNA, 19 nt, Homo sapiens
  misc_RNA (1)...(19): siRNA sense strand
gaagggaaugccaacaacu

SEQ ID NO: 1632392 - RNA, 19 nt, Homo sapiens
  misc_RNA (1)...(19): siRNA sense strand
uaccagaagugcugcuuuu

SEQ ID NO: 1632393 - RNA, 19 nt, Homo sapiens
  misc_RNA (1)...(19): siRNA sense strand
gcuggcauuuugacuuuaa

SEQ ID NO: 1632394 - RNA, 19 nt, Homo sapiens
  misc_RNA (1)...(19): siRNA sense strand
cggccugcauguuaauugu

SEQ ID NO: 1632395 - RNA, 19 nt, Homo sapiens
  misc_RNA (1)...(19): siRNA sense strand
gagaggcucaccuguacca

SEQ ID NO: 1632396 - RNA, 19 nt, Homo sapiens
  misc_RNA (1)...(19): siRNA sense strand
aaagugcugcucacauugu

SEQ ID NO: 1632397 - RNA, 19 nt, Homo sapiens
  misc_RNA (1)...(19): siRNA sense strand
aaugcccacucuucccuuu

SEQ ID NO: 1632398 - RNA, 19 nt, Homo sapiens
  misc_RNA (1)...(19): siRNA sense strand
ccaggguuaugucccaaag

SEQ ID NO: 1632399 - RNA, 19 nt, Homo sapiens
  misc_RNA (1)...(19): siRNA sense strand
uguuaaggauggacaaugc

SEQ ID NO: 1632400 - RNA, 19 nt, Homo sapiens
  misc_RNA (1)...(19): siRNA sense strand
cugcacacccuucaaauac

SEQ ID NO: 1632401 - RNA, 19 nt, Homo sapiens
  misc_RNA (1)...(19): siRNA sense strand
acacagauuuugacugcaa

SEQ ID NO: 1632402 - RNA, 19 nt, Homo sapiens
  misc_RNA (1)...(19): siRNA sense strand
ccgcugcacacccuucaaa

SEQ ID NO: 1632403 - RNA, 19 nt, Homo sapiens
  misc_RNA (1)...(19): siRNA sense strand
ugaggcauggaaacuguaa

SEQ ID NO: 1632404 - RNA, 19 nt, Homo sapiens
  misc_RNA (1)...(19): siRNA sense strand
cuucugcaaugcugaccaa

SEQ ID NO: 1632405 - RNA, 19 nt, Homo sapiens
  misc_RNA (1)...(19): siRNA sense strand
cuggaggaauguagcuuuc

SEQ ID NO: 1632406 - RNA, 19 nt, Homo sapiens
  misc_RNA (1)...(19): siRNA sense strand
gauuuugacugcaaggaau

SEQ ID NO: 1632407 - RNA, 19 nt, Homo sapiens
  misc_RNA (1)...(19): siRNA sense strand
ccaagaagaucaaacacaa

SEQ ID NO: 1632408 - RNA, 19 nt, Homo sapiens
  misc_RNA (1)...(19): siRNA sense strand
gaaaagugcugcucacauu

SEQ ID NO: 1632409 - RNA, 19 nt, Homo sapiens
  misc_RNA (1)...(19): siRNA sense strand
ggaguggacuucugcaaug

SEQ ID NO: 1632410 - RNA, 19 nt, Homo sapiens
  misc_RNA (1)...(19): siRNA sense strand
gcacagcgcuggcauuuug

SEQ ID NO: 1632411 - RNA, 19 nt, Homo sapiens
  misc_RNA (1)...(19): siRNA sense strand
ccaagugccugcaggauga

SEQ ID NO: 1632412 - RNA, 19 nt, Homo sapiens
  misc_RNA (1)...(19): siRNA sense strand
cagaacggccugcauguua

SEQ ID NO: 1632413 - RNA, 19 nt, Homo sapiens
  misc_RNA (1)...(19): siRNA sense strand
gcauggaucccuuucaaga

SEQ ID NO: 1632414 - RNA, 19 nt, Homo sapiens
  misc_RNA (1)...(19): siRNA sense strand
aaagagaggcucaccugua

SEQ ID NO: 1632415 - RNA, 19 nt, Homo sapiens
  misc_RNA (1)...(19): siRNA sense strand
gccugcauguuaauuguua

SEQ ID NO: 1632416 - RNA, 19 nt, Homo sapiens
  misc_RNA (1)...(19): siRNA sense strand
ucaagaacccugcaugcua

SEQ ID NO: 1632417 - RNA, 19 nt, Homo sapiens
  misc_RNA (1)...(19): siRNA sense strand
ggacucauguaacacagau

SEQ ID NO: 1632418 - RNA, 19 nt, Homo sapiens
  misc_RNA (1)...(19): siRNA sense strand
gaacuuccggacucaugua

SEQ ID NO: 1632419 - RNA, 19 nt, Homo sapiens
  misc_RNA (1)...(19): siRNA sense strand
gaaugccaacaacuucuua

SEQ ID NO: 1632420 - RNA, 19 nt, Homo sapiens
  misc_RNA (1)...(19): siRNA sense strand
gugcauggaucccuuucaa

SEQ ID NO: 1632421 - RNA, 19 nt, Homo sapiens
  misc_RNA (1)...(19): siRNA sense strand
agaacggccugcauguuaa

SEQ ID NO: 1632422 - RNA, 19 nt, Homo sapiens
  misc_RNA (1)...(19): siRNA sense strand
cugcaaugcugaccaagaa

SEQ ID NO: 1632423 - RNA, 19 nt, Homo sapiens
  misc_RNA (1)...(19): siRNA sense strand
gcugcacacccuucaaaua

SEQ ID NO: 1632424 - RNA, 19 nt, Homo sapiens
  misc_RNA (1)...(19): siRNA sense strand
guaccaagauugauaaacc

SEQ ID NO: 1632425 - RNA, 19 nt, Homo sapiens
  misc_RNA (1)...(19): siRNA sense strand
gaugaggagugcccauugg

SEQ ID NO: 1632426 - RNA, 19 nt, Homo sapiens
  misc_RNA (1)...(19): siRNA sense strand
gcaaugcugaccaagaaga

SEQ ID NO: 1632427 - RNA, 19 nt, Homo sapiens
  misc_RNA (1)...(19): siRNA sense strand
gcaaggaauaccagaagug

SEQ ID NO: 1632428 - RNA, 19 nt, Homo sapiens
  misc_RNA (1)...(19): siRNA sense strand
gcacuuuccucuccauagc

SEQ ID NO: 1632429 - RNA, 19 nt, Homo sapiens
  misc_RNA (1)...(19): siRNA sense strand
gaauccagguguggcuuug

SEQ ID NO: 1632430 - RNA, 19 nt, Homo sapiens
  misc_RNA (1)...(19): siRNA sense strand
gcacacccuucaaauacag

SEQ ID NO: 1632431 - RNA, 19 nt, Homo sapiens
  misc_RNA (1)...(19): siRNA sense strand
caagaagaucaaacacaaa

SEQ ID NO: 1632432 - RNA, 19 nt, Homo sapiens
  misc_RNA (1)...(19): siRNA sense strand
gaagugcauggaucccuuu

SEQ ID NO: 1632433 - RNA, 19 nt, Homo sapiens
  misc_RNA (1)...(19): siRNA sense strand
gaagaucaaacacaaacca

SEQ ID NO: 1632434 - RNA, 19 nt, Homo sapiens
  misc_RNA (1)...(19): siRNA sense strand
aagagaggcucaccuguac

SEQ ID NO: 1632435 - RNA, 19 nt, Homo sapiens
  misc_RNA (1)...(19): siRNA sense strand
gcgaagggaaugccaacaa

SEQ ID NO: 1632436 - RNA, 19 nt, Homo sapiens
  misc_RNA (1)...(19): siRNA sense strand
ggaaugccaacaacuucuu

SEQ ID NO: 1632437 - RNA, 19 nt, Homo sapiens
  misc_RNA (1)...(19): siRNA sense strand
gauggacaaugcccacucu

SEQ ID NO: 1632438 - RNA, 19 nt, Homo sapiens
  misc_RNA (1)...(19): siRNA sense strand
gaacggccugcauguuaau

SEQ ID NO: 1632439 - RNA, 19 nt, Homo sapiens
  misc_RNA (1)...(19): siRNA sense strand
gcgcuggcauuuugacuuu

SEQ ID NO: 1632440 - RNA, 19 nt, Homo sapiens
  misc_RNA (1)...(19): siRNA sense strand
ggaugaggagugcccauug

SEQ ID NO: 1632441 - RNA, 19 nt, Homo sapiens
  misc_RNA (1)...(19): siRNA sense strand
cuauguaccaagauugaua

SEQ ID NO: 1632442 - RNA, 19 nt, Homo sapiens
  misc_RNA (1)...(19): siRNA sense strand
cgaagggaaugccaacaac

SEQ ID NO: 1632443 - RNA, 19 nt, Homo sapiens
  misc_RNA (1)...(19): siRNA sense strand
ugaccaagaagaucaaaca

SEQ ID NO: 1632444 - RNA, 19 nt, Homo sapiens
  misc_RNA (1)...(19): siRNA sense strand
gcucaccuguaccacugaa

SEQ ID NO: 1632445 - RNA, 19 nt, Homo sapiens
  misc_RNA (1)...(19): siRNA sense strand
gcauggaaacuguaaucau

SEQ ID NO: 1632446 - RNA, 19 nt, Homo sapiens
  misc_RNA (1)...(19): siRNA sense strand
auuguggacugaaauguau

SEQ ID NO: 1632447 - RNA, 19 nt, Homo sapiens
  misc_RNA (1)...(19): siRNA sense strand
cugcuucucucccuugcuu

SEQ ID NO: 1632448 - RNA, 19 nt, Homo sapiens
  misc_RNA (1)...(19): siRNA sense strand
gaacugaaggagggcacuu

SEQ ID NO: 1632449 - RNA, 19 nt, Homo sapiens
  misc_RNA (1)...(19): siRNA sense strand
ggaguguccaccuucaugu

SEQ ID NO: 1632450 - RNA, 19 nt, Homo sapiens
  misc_RNA (1)...(19): siRNA sense strand
ugugaggcauggaaacugu

SEQ ID NO: 1632451 - RNA, 19 nt, Homo sapiens
  misc_RNA (1)...(19): siRNA sense strand
cauggaucccuuucaagaa

SEQ ID NO: 1632452 - RNA, 19 nt, Homo sapiens
  misc_RNA (1)...(19): siRNA sense strand
acucauguaacacagauuu

SEQ ID NO: 1632453 - RNA, 19 nt, Homo sapiens
  misc_RNA (1)...(19): siRNA sense strand
ggagugcccauugguggaa

SEQ ID NO: 1632454 - RNA, 19 nt, Homo sapiens
  misc_RNA (1)...(19): siRNA sense strand
cuuccggacucauguaaca

SEQ ID NO: 1632455 - RNA, 19 nt, Homo sapiens
  misc_RNA (1)...(19): siRNA sense strand
gaagggaaugccaacaacu

SEQ ID NO: 1632456 - RNA, 19 nt, Homo sapiens
  misc_RNA (1)...(19): siRNA sense strand
uaccagaagugcugcuuuu

SEQ ID NO: 1632457 - RNA, 19 nt, Homo sapiens
  misc_RNA (1)...(19): siRNA sense strand
gcuggcauuuugacuuuaa

SEQ ID NO: 1632458 - RNA, 19 nt, Homo sapiens
  misc_RNA (1)...(19): siRNA sense strand
cggccugcauguuaauugu

SEQ ID NO: 1632459 - RNA, 19 nt, Homo sapiens
  misc_RNA (1)...(19): siRNA sense strand
gagaggcucaccuguacca

SEQ ID NO: 1632460 - RNA, 19 nt, Homo sapiens
  misc_RNA (1)...(19): siRNA sense strand
aaagugcugcucacauugu

SEQ ID NO: 1632461 - RNA, 19 nt, Homo sapiens
  misc_RNA (1)...(19): siRNA sense strand
aaugcccacucuucccuuu

SEQ ID NO: 1632462 - RNA, 19 nt, Homo sapiens
  misc_RNA (1)...(19): siRNA sense strand
ccaggguuaugucccaaag

SEQ ID NO: 1632463 - RNA, 19 nt, Homo sapiens
  misc_RNA (1)...(19): siRNA sense strand
uguuaaggauggacaaugc

SEQ ID NO: 1632464 - RNA, 19 nt, Homo sapiens
  misc_RNA (1)...(19): siRNA sense strand
cugcacacccuucaaauac

SEQ ID NO: 1632465 - RNA, 19 nt, Homo sapiens
  misc_RNA (1)...(19): siRNA sense strand
acacagauuuugacugcaa

SEQ ID NO: 1632466 - RNA, 19 nt, Homo sapiens
  misc_RNA (1)...(19): siRNA sense strand
ccgcugcacacccuucaaa

SEQ ID NO: 1632467 - RNA, 19 nt, Homo sapiens
  misc_RNA (1)...(19): siRNA sense strand
ugaggcauggaaacuguaa

SEQ ID NO: 1632468 - RNA, 19 nt, Homo sapiens
  misc_RNA (1)...(19): siRNA sense strand
cuucugcaaugcugaccaa

SEQ ID NO: 1632469 - RNA, 19 nt, Homo sapiens
  misc_RNA (1)...(19): siRNA sense strand
cuggaggaauguagcuuuc

SEQ ID NO: 1632470 - RNA, 19 nt, Homo sapiens
  misc_RNA (1)...(19): siRNA sense strand
gauuuugacugcaaggaau

SEQ ID NO: 1632471 - RNA, 19 nt, Homo sapiens
  misc_RNA (1)...(19): siRNA sense strand
gaccugaucuuaauuggaa

SEQ ID NO: 1632472 - RNA, 19 nt, Homo sapiens
  misc_RNA (1)...(19): siRNA sense strand
ugaagaaggugaaugagau

SEQ ID NO: 1632473 - RNA, 19 nt, Homo sapiens
  misc_RNA (1)...(19): siRNA sense strand
acagagcacuucauaucua

SEQ ID NO: 1632474 - RNA, 19 nt, Homo sapiens
  misc_RNA (1)...(19): siRNA sense strand
ucacagagcacuucauauc

SEQ ID NO: 1632475 - RNA, 19 nt, Homo sapiens
  misc_RNA (1)...(19): siRNA sense strand
gaaggugaaugagaugauc

SEQ ID NO: 1632476 - RNA, 19 nt, Homo sapiens
  misc_RNA (1)...(19): siRNA sense strand
gaauucgacuggagaaggu

SEQ ID NO: 1632477 - RNA, 19 nt, Homo sapiens
  misc_RNA (1)...(19): siRNA sense strand
augcagaggucgugaagaa

SEQ ID NO: 1632478 - RNA, 19 nt, Homo sapiens
  misc_RNA (1)...(19): siRNA sense strand
gaagaaggugaaugagaug

SEQ ID NO: 1632479 - RNA, 19 nt, Homo sapiens
  misc_RNA (1)...(19): siRNA sense strand
gugaagaaggugaaugaga

SEQ ID NO: 1632480 - RNA, 19 nt, Homo sapiens
  misc_RNA (1)...(19): siRNA sense strand
gaccuugcguguggagaga

SEQ ID NO: 1632481 - RNA, 19 nt, Homo sapiens
  misc_RNA (1)...(19): siRNA sense strand
ggagaagguccugcugguu

SEQ ID NO: 1632482 - RNA, 19 nt, Homo sapiens
  misc_RNA (1)...(19): siRNA sense strand
cagagcacuucauaucuac

SEQ ID NO: 1632483 - RNA, 19 nt, Homo sapiens
  misc_RNA (1)...(19): siRNA sense strand
auucacagagcacuucaua

SEQ ID NO: 1632484 - RNA, 19 nt, Homo sapiens
  misc_RNA (1)...(19): siRNA sense strand
gcaguauggcaggcucuuu

SEQ ID NO: 1632485 - RNA, 19 nt, Homo sapiens
  misc_RNA (1)...(19): siRNA sense strand
caguauggcaggcucuuug

SEQ ID NO: 1632486 - RNA, 19 nt, Homo sapiens
  misc_RNA (1)...(19): siRNA sense strand
ucucgaagguucaauucac

SEQ ID NO: 1632487 - RNA, 19 nt, Homo sapiens
  misc_RNA (1)...(19): siRNA sense strand
cagaggucgugaagaaggu

SEQ ID NO: 1632488 - RNA, 19 nt, Homo sapiens
  misc_RNA (1)...(19): siRNA sense strand
cgaagguucaauucacaga

SEQ ID NO: 1632489 - RNA, 19 nt, Homo sapiens
  misc_RNA (1)...(19): siRNA sense strand
ucaauucacagagcacuuc

SEQ ID NO: 1632490 - RNA, 19 nt, Homo sapiens
  misc_RNA (1)...(19): siRNA sense strand
ucgugaagaaggugaauga

SEQ ID NO: 1632491 - RNA, 19 nt, Homo sapiens
  misc_RNA (1)...(19): siRNA sense strand
gaccugaucuuaauuggaa

SEQ ID NO: 1632492 - RNA, 19 nt, Homo sapiens
  misc_RNA (1)...(19): siRNA sense strand
ugaagaaggugaaugagau

SEQ ID NO: 1632493 - RNA, 19 nt, Homo sapiens
  misc_RNA (1)...(19): siRNA sense strand
acagagcacuucauaucua

SEQ ID NO: 1632494 - RNA, 19 nt, Homo sapiens
  misc_RNA (1)...(19): siRNA sense strand
gauaaacagcauugagauu

SEQ ID NO: 1632495 - RNA, 19 nt, Homo sapiens
  misc_RNA (1)...(19): siRNA sense strand
ucacagagcacuucauauc

SEQ ID NO: 1632496 - RNA, 19 nt, Homo sapiens
  misc_RNA (1)...(19): siRNA sense strand
gaaggugaaugagaugauc

SEQ ID NO: 1632497 - RNA, 19 nt, Homo sapiens
  misc_RNA (1)...(19): siRNA sense strand
gaauucgacuggagaaggu

SEQ ID NO: 1632498 - RNA, 19 nt, Homo sapiens
  misc_RNA (1)...(19): siRNA sense strand
augcagaggucgugaagaa

SEQ ID NO: 1632499 - RNA, 19 nt, Homo sapiens
  misc_RNA (1)...(19): siRNA sense strand
gaagaaggugaaugagaug

SEQ ID NO: 1632500 - RNA, 19 nt, Homo sapiens
  misc_RNA (1)...(19): siRNA sense strand
gaagccacagucauugaaa

SEQ ID NO: 1632501 - RNA, 19 nt, Homo sapiens
  misc_RNA (1)...(19): siRNA sense strand
ugagauugcuccguguuug

SEQ ID NO: 1632502 - RNA, 19 nt, Homo sapiens
  misc_RNA (1)...(19): siRNA sense strand
ggaucuuguucgaguagaa

SEQ ID NO: 1632503 - RNA, 19 nt, Homo sapiens
  misc_RNA (1)...(19): siRNA sense strand
acagaaucauggccaagaa

SEQ ID NO: 1632504 - RNA, 19 nt, Homo sapiens
  misc_RNA (1)...(19): siRNA sense strand
ggauaaacagcauugagau

SEQ ID NO: 1632505 - RNA, 19 nt, Homo sapiens
  misc_RNA (1)...(19): siRNA sense strand
aaaggaucuuguucgagua

SEQ ID NO: 1632506 - RNA, 19 nt, Homo sapiens
  misc_RNA (1)...(19): siRNA sense strand
cagacuguccuccggauaa

SEQ ID NO: 1632507 - RNA, 19 nt, Homo sapiens
  misc_RNA (1)...(19): siRNA sense strand
gugaagaaggugaaugaga

SEQ ID NO: 1632508 - RNA, 19 nt, Homo sapiens
  misc_RNA (1)...(19): siRNA sense strand
gaaucauggccaagaauca

SEQ ID NO: 1632509 - RNA, 19 nt, Homo sapiens
  misc_RNA (1)...(19): siRNA sense strand
guagaagccacagucauug

SEQ ID NO: 1632510 - RNA, 19 nt, Homo sapiens
  misc_RNA (1)...(19): siRNA sense strand
uaaacagcauugagauugc

SEQ ID NO: 1632511 - RNA, 19 nt, Homo sapiens
  misc_RNA (1)...(19): siRNA sense strand
aguagaagccacagucauu

SEQ ID NO: 1632512 - RNA, 19 nt, Homo sapiens
  misc_RNA (1)...(19): siRNA sense strand
cggauaaacagcauugaga

SEQ ID NO: 1632513 - RNA, 19 nt, Homo sapiens
  misc_RNA (1)...(19): siRNA sense strand
gcagacuguccuccggaua

SEQ ID NO: 1632514 - RNA, 19 nt, Homo sapiens
  misc_RNA (1)...(19): siRNA sense strand
agacuguccuccggauaaa

SEQ ID NO: 1632515 - RNA, 19 nt, Homo sapiens
  misc_RNA (1)...(19): siRNA sense strand
auaaacagcauugagauug

SEQ ID NO: 1632516 - RNA, 19 nt, Homo sapiens
  misc_RNA (1)...(19): siRNA sense strand
ucauggccaagaaucauua

SEQ ID NO: 1632517 - RNA, 19 nt, Homo sapiens
  misc_RNA (1)...(19): siRNA sense strand
gaccuugcguguggagaga

SEQ ID NO: 1632518 - RNA, 19 nt, Homo sapiens
  misc_RNA (1)...(19): siRNA sense strand
ggagaagguccugcugguu

SEQ ID NO: 1632519 - RNA, 19 nt, Homo sapiens
  misc_RNA (1)...(19): siRNA sense strand
gacagaaucauggccaaga

SEQ ID NO: 1632520 - RNA, 19 nt, Homo sapiens
  misc_RNA (1)...(19): siRNA sense strand
cagagcacuucauaucuac

SEQ ID NO: 1632521 - RNA, 19 nt, Homo sapiens
  misc_RNA (1)...(19): siRNA sense strand
gagauugcuccguguuugu

SEQ ID NO: 1632522 - RNA, 19 nt, Homo sapiens
  misc_RNA (1)...(19): siRNA sense strand
uagaagccacagucauuga

SEQ ID NO: 1632523 - RNA, 19 nt, Homo sapiens
  misc_RNA (1)...(19): siRNA sense strand
gcaguauggcaggcucuuu

SEQ ID NO: 1632524 - RNA, 19 nt, Homo sapiens
  misc_RNA (1)...(19): siRNA sense strand
auucacagagcacuucaua

SEQ ID NO: 1632525 - RNA, 19 nt, Homo sapiens
  misc_RNA (1)...(19): siRNA sense strand
caguauggcaggcucuuug

SEQ ID NO: 1632526 - RNA, 19 nt, Homo sapiens
  misc_RNA (1)...(19): siRNA sense strand
ucucgaagguucaauucac

SEQ ID NO: 1632527 - RNA, 19 nt, Homo sapiens
  misc_RNA (1)...(19): siRNA sense strand
ucgugaagaaggugaauga

SEQ ID NO: 1632528 - RNA, 19 nt, Homo sapiens
  misc_RNA (1)...(19): siRNA sense strand
cgaagguucaauucacaga

SEQ ID NO: 1632529 - RNA, 19 nt, Homo sapiens
  misc_RNA (1)...(19): siRNA sense strand
cagaggucgugaagaaggu

SEQ ID NO: 1632530 - RNA, 19 nt, Homo sapiens
  misc_RNA (1)...(19): siRNA sense strand
ucaauucacagagcacuuc

SEQ ID NO: 1632531 - RNA, 19 nt, Homo sapiens
  misc_RNA (1)...(19): siRNA sense strand
gaccugaucuuaauuggaa

SEQ ID NO: 1632532 - RNA, 19 nt, Homo sapiens
  misc_RNA (1)...(19): siRNA sense strand
ugaagaaggugaaugagau

SEQ ID NO: 1632533 - RNA, 19 nt, Homo sapiens
  misc_RNA (1)...(19): siRNA sense strand
acagagcacuucauaucua

SEQ ID NO: 1632534 - RNA, 19 nt, Homo sapiens
  misc_RNA (1)...(19): siRNA sense strand
gauaaacagcauugagauu

SEQ ID NO: 1632535 - RNA, 19 nt, Homo sapiens
  misc_RNA (1)...(19): siRNA sense strand
ucacagagcacuucauauc

SEQ ID NO: 1632536 - RNA, 19 nt, Homo sapiens
  misc_RNA (1)...(19): siRNA sense strand
gaaggugaaugagaugauc

SEQ ID NO: 1632537 - RNA, 19 nt, Homo sapiens
  misc_RNA (1)...(19): siRNA sense strand
gaauucgacuggagaaggu

SEQ ID NO: 1632538 - RNA, 19 nt, Homo sapiens
  misc_RNA (1)...(19): siRNA sense strand
augcagaggucgugaagaa

SEQ ID NO: 1632539 - RNA, 19 nt, Homo sapiens
  misc_RNA (1)...(19): siRNA sense strand
gaagaaggugaaugagaug

SEQ ID NO: 1632540 - RNA, 19 nt, Homo sapiens
  misc_RNA (1)...(19): siRNA sense strand
gaagccacagucauugaaa

SEQ ID NO: 1632541 - RNA, 19 nt, Homo sapiens
  misc_RNA (1)...(19): siRNA sense strand
ugagauugcuccguguuug

SEQ ID NO: 1632542 - RNA, 19 nt, Homo sapiens
  misc_RNA (1)...(19): siRNA sense strand
ggaucuuguucgaguagaa

SEQ ID NO: 1632543 - RNA, 19 nt, Homo sapiens
  misc_RNA (1)...(19): siRNA sense strand
acagaaucauggccaagaa

SEQ ID NO: 1632544 - RNA, 19 nt, Homo sapiens
  misc_RNA (1)...(19): siRNA sense strand
ggauaaacagcauugagau

SEQ ID NO: 1632545 - RNA, 19 nt, Homo sapiens
  misc_RNA (1)...(19): siRNA sense strand
aaaggaucuuguucgagua

SEQ ID NO: 1632546 - RNA, 19 nt, Homo sapiens
  misc_RNA (1)...(19): siRNA sense strand
cagacuguccuccggauaa

SEQ ID NO: 1632547 - RNA, 19 nt, Homo sapiens
  misc_RNA (1)...(19): siRNA sense strand
gugaagaaggugaaugaga

SEQ ID NO: 1632548 - RNA, 19 nt, Homo sapiens
  misc_RNA (1)...(19): siRNA sense strand
gaaucauggccaagaauca

SEQ ID NO: 1632549 - RNA, 19 nt, Homo sapiens
  misc_RNA (1)...(19): siRNA sense strand
guagaagccacagucauug

SEQ ID NO: 1632550 - RNA, 19 nt, Homo sapiens
  misc_RNA (1)...(19): siRNA sense strand
uaaacagcauugagauugc

SEQ ID NO: 1632551 - RNA, 19 nt, Homo sapiens
  misc_RNA (1)...(19): siRNA sense strand
aguagaagccacagucauu

SEQ ID NO: 1632552 - RNA, 19 nt, Homo sapiens
  misc_RNA (1)...(19): siRNA sense strand
cggauaaacagcauugaga

SEQ ID NO: 1632553 - RNA, 19 nt, Homo sapiens
  misc_RNA (1)...(19): siRNA sense strand
gcagacuguccuccggaua

SEQ ID NO: 1632554 - RNA, 19 nt, Homo sapiens
  misc_RNA (1)...(19): siRNA sense strand
agacuguccuccggauaaa

SEQ ID NO: 1632555 - RNA, 19 nt, Homo sapiens
  misc_RNA (1)...(19): siRNA sense strand
auaaacagcauugagauug

SEQ ID NO: 1632556 - RNA, 19 nt, Homo sapiens
  misc_RNA (1)...(19): siRNA sense strand
ucauggccaagaaucauua

SEQ ID NO: 1632557 - RNA, 19 nt, Homo sapiens
  misc_RNA (1)...(19): siRNA sense strand
gaccuugcguguggagaga

SEQ ID NO: 1632558 - RNA, 19 nt, Homo sapiens
  misc_RNA (1)...(19): siRNA sense strand
ggagaagguccugcugguu

SEQ ID NO: 1632559 - RNA, 19 nt, Homo sapiens
  misc_RNA (1)...(19): siRNA sense strand
gacagaaucauggccaaga

SEQ ID NO: 1632560 - RNA, 19 nt, Homo sapiens
  misc_RNA (1)...(19): siRNA sense strand
cagagcacuucauaucuac

SEQ ID NO: 1632561 - RNA, 19 nt, Homo sapiens
  misc_RNA (1)...(19): siRNA sense strand
gagauugcuccguguuugu

SEQ ID NO: 1632562 - RNA, 19 nt, Homo sapiens
  misc_RNA (1)...(19): siRNA sense strand
uagaagccacagucauuga

SEQ ID NO: 1632563 - RNA, 19 nt, Homo sapiens
  misc_RNA (1)...(19): siRNA sense strand
gcaguauggcaggcucuuu

SEQ ID NO: 1632564 - RNA, 19 nt, Homo sapiens
  misc_RNA (1)...(19): siRNA sense strand
auucacagagcacuucaua

SEQ ID NO: 1632565 - RNA, 19 nt, Homo sapiens
  misc_RNA (1)...(19): siRNA sense strand
caguauggcaggcucuuug

SEQ ID NO: 1632566 - RNA, 19 nt, Homo sapiens
  misc_RNA (1)...(19): siRNA sense strand
ucucgaagguucaauucac

SEQ ID NO: 1632567 - RNA, 19 nt, Homo sapiens
  misc_RNA (1)...(19): siRNA sense strand
ucgugaagaaggugaauga

SEQ ID NO: 1632568 - RNA, 19 nt, Homo sapiens
  misc_RNA (1)...(19): siRNA sense strand
cgaagguucaauucacaga

SEQ ID NO: 1632569 - RNA, 19 nt, Homo sapiens
  misc_RNA (1)...(19): siRNA sense strand
cagaggucgugaagaaggu

SEQ ID NO: 1632570 - RNA, 19 nt, Homo sapiens
  misc_RNA (1)...(19): siRNA sense strand
ucaauucacagagcacuuc

SEQ ID NO: 1632571 - RNA, 19 nt, Homo sapiens
  misc_RNA (1)...(19): siRNA sense strand
gaccugaucuuaauuggaa

SEQ ID NO: 1632572 - RNA, 19 nt, Homo sapiens
  misc_RNA (1)...(19): siRNA sense strand
gauaaacagcauugagauu

SEQ ID NO: 1632573 - RNA, 19 nt, Homo sapiens
  misc_RNA (1)...(19): siRNA sense strand
gaauucgacuggagaaggu

SEQ ID NO: 1632574 - RNA, 19 nt, Homo sapiens
  misc_RNA (1)...(19): siRNA sense strand
gaagccacagucauugaaa

SEQ ID NO: 1632575 - RNA, 19 nt, Homo sapiens
  misc_RNA (1)...(19): siRNA sense strand
ugagauugcuccguguuug

SEQ ID NO: 1632576 - RNA, 19 nt, Homo sapiens
  misc_RNA (1)...(19): siRNA sense strand
ggaucuuguucgaguagaa

SEQ ID NO: 1632577 - RNA, 19 nt, Homo sapiens
  misc_RNA (1)...(19): siRNA sense strand
acagaaucauggccaagaa

SEQ ID NO: 1632578 - RNA, 19 nt, Homo sapiens
  misc_RNA (1)...(19): siRNA sense strand
ggauaaacagcauugagau

SEQ ID NO: 1632579 - RNA, 19 nt, Homo sapiens
  misc_RNA (1)...(19): siRNA sense strand
aaaggaucuuguucgagua

SEQ ID NO: 1632580 - RNA, 19 nt, Homo sapiens
  misc_RNA (1)...(19): siRNA sense strand
cagacuguccuccggauaa

SEQ ID NO: 1632581 - RNA, 19 nt, Homo sapiens
  misc_RNA (1)...(19): siRNA sense strand
gaaucauggccaagaauca

SEQ ID NO: 1632582 - RNA, 19 nt, Homo sapiens
  misc_RNA (1)...(19): siRNA sense strand
guagaagccacagucauug

SEQ ID NO: 1632583 - RNA, 19 nt, Homo sapiens
  misc_RNA (1)...(19): siRNA sense strand
uaaacagcauugagauugc

SEQ ID NO: 1632584 - RNA, 19 nt, Homo sapiens
  misc_RNA (1)...(19): siRNA sense strand
aguagaagccacagucauu

SEQ ID NO: 1632585 - RNA, 19 nt, Homo sapiens
  misc_RNA (1)...(19): siRNA sense strand
cggauaaacagcauugaga

SEQ ID NO: 1632586 - RNA, 19 nt, Homo sapiens
  misc_RNA (1)...(19): siRNA sense strand
gcagacuguccuccggaua

SEQ ID NO: 1632587 - RNA, 19 nt, Homo sapiens
  misc_RNA (1)...(19): siRNA sense strand
agacuguccuccggauaaa

SEQ ID NO: 1632588 - RNA, 19 nt, Homo sapiens
  misc_RNA (1)...(19): siRNA sense strand
auaaacagcauugagauug

SEQ ID NO: 1632589 - RNA, 19 nt, Homo sapiens
  misc_RNA (1)...(19): siRNA sense strand
ucauggccaagaaucauua

SEQ ID NO: 1632590 - RNA, 19 nt, Homo sapiens
  misc_RNA (1)...(19): siRNA sense strand
gaccuugcguguggagaga

SEQ ID NO: 1632591 - RNA, 19 nt, Homo sapiens
  misc_RNA (1)...(19): siRNA sense strand
ggagaagguccugcugguu

SEQ ID NO: 1632592 - RNA, 19 nt, Homo sapiens
  misc_RNA (1)...(19): siRNA sense strand
gacagaaucauggccaaga

SEQ ID NO: 1632593 - RNA, 19 nt, Homo sapiens
  misc_RNA (1)...(19): siRNA sense strand
gagauugcuccguguuugu

SEQ ID NO: 1632594 - RNA, 19 nt, Homo sapiens
  misc_RNA (1)...(19): siRNA sense strand
uagaagccacagucauuga

SEQ ID NO: 1632595 - RNA, 19 nt, Homo sapiens
  misc_RNA (1)...(19): siRNA sense strand
gcaguauggcaggcucuuu

SEQ ID NO: 1632596 - RNA, 19 nt, Homo sapiens
  misc_RNA (1)...(19): siRNA sense strand
caguauggcaggcucuuug

SEQ ID NO: 1632597 - RNA, 19 nt, Homo sapiens
  misc_RNA (1)...(19): siRNA sense strand
gaccugaucuuaauuggaa

SEQ ID NO: 1632598 - RNA, 19 nt, Homo sapiens
  misc_RNA (1)...(19): siRNA sense strand
ugaagaaggugaaugagau

SEQ ID NO: 1632599 - RNA, 19 nt, Homo sapiens
  misc_RNA (1)...(19): siRNA sense strand
acagagcacuucauaucua

SEQ ID NO: 1632600 - RNA, 19 nt, Homo sapiens
  misc_RNA (1)...(19): siRNA sense strand
ucacagagcacuucauauc

SEQ ID NO: 1632601 - RNA, 19 nt, Homo sapiens
  misc_RNA (1)...(19): siRNA sense strand
gaaggugaaugagaugauc

SEQ ID NO: 1632602 - RNA, 19 nt, Homo sapiens
  misc_RNA (1)...(19): siRNA sense strand
gaauucgacuggagaaggu

SEQ ID NO: 1632603 - RNA, 19 nt, Homo sapiens
  misc_RNA (1)...(19): siRNA sense strand
augcagaggucgugaagaa

SEQ ID NO: 1632604 - RNA, 19 nt, Homo sapiens
  misc_RNA (1)...(19): siRNA sense strand
gaagaaggugaaugagaug

SEQ ID NO: 1632605 - RNA, 19 nt, Homo sapiens
  misc_RNA (1)...(19): siRNA sense strand
gugaagaaggugaaugaga

SEQ ID NO: 1632606 - RNA, 19 nt, Homo sapiens
  misc_RNA (1)...(19): siRNA sense strand
gaccuugcguguggagaga

SEQ ID NO: 1632607 - RNA, 19 nt, Homo sapiens
  misc_RNA (1)...(19): siRNA sense strand
ggagaagguccugcugguu

SEQ ID NO: 1632608 - RNA, 19 nt, Homo sapiens
  misc_RNA (1)...(19): siRNA sense strand
cagagcacuucauaucuac

SEQ ID NO: 1632609 - RNA, 19 nt, Homo sapiens
  misc_RNA (1)...(19): siRNA sense strand
auucacagagcacuucaua

SEQ ID NO: 1632610 - RNA, 19 nt, Homo sapiens
  misc_RNA (1)...(19): siRNA sense strand
gcaguauggcaggcucuuu

SEQ ID NO: 1632611 - RNA, 19 nt, Homo sapiens
  misc_RNA (1)...(19): siRNA sense strand
caguauggcaggcucuuug

SEQ ID NO: 1632612 - RNA, 19 nt, Homo sapiens
  misc_RNA (1)...(19): siRNA sense strand
ucucgaagguucaauucac

SEQ ID NO: 1632613 - RNA, 19 nt, Homo sapiens
  misc_RNA (1)...(19): siRNA sense strand
cagaggucgugaagaaggu

SEQ ID NO: 1632614 - RNA, 19 nt, Homo sapiens
  misc_RNA (1)...(19): siRNA sense strand
cgaagguucaauucacaga

SEQ ID NO: 1632615 - RNA, 19 nt, Homo sapiens
  misc_RNA (1)...(19): siRNA sense strand
ucaauucacagagcacuuc

SEQ ID NO: 1632616 - RNA, 19 nt, Homo sapiens
  misc_RNA (1)...(19): siRNA sense strand
ucgugaagaaggugaauga

SEQ ID NO: 1632617 - RNA, 19 nt, Homo sapiens
  misc_RNA (1)...(19): siRNA sense strand
gaccugaucuuaauuggaa

SEQ ID NO: 1632618 - RNA, 19 nt, Homo sapiens
  misc_RNA (1)...(19): siRNA sense strand
ugaagaaggugaaugagau

SEQ ID NO: 1632619 - RNA, 19 nt, Homo sapiens
  misc_RNA (1)...(19): siRNA sense strand
acagagcacuucauaucua

SEQ ID NO: 1632620 - RNA, 19 nt, Homo sapiens
  misc_RNA (1)...(19): siRNA sense strand
gauaaacagcauugagauu

SEQ ID NO: 1632621 - RNA, 19 nt, Homo sapiens
  misc_RNA (1)...(19): siRNA sense strand
ucacagagcacuucauauc

SEQ ID NO: 1632622 - RNA, 19 nt, Homo sapiens
  misc_RNA (1)...(19): siRNA sense strand
gaaggugaaugagaugauc

SEQ ID NO: 1632623 - RNA, 19 nt, Homo sapiens
  misc_RNA (1)...(19): siRNA sense strand
gaauucgacuggagaaggu

SEQ ID NO: 1632624 - RNA, 19 nt, Homo sapiens
  misc_RNA (1)...(19): siRNA sense strand
augcagaggucgugaagaa

SEQ ID NO: 1632625 - RNA, 19 nt, Homo sapiens
  misc_RNA (1)...(19): siRNA sense strand
gaagaaggugaaugagaug

SEQ ID NO: 1632626 - RNA, 19 nt, Homo sapiens
  misc_RNA (1)...(19): siRNA sense strand
gaagccacagucauugaaa

SEQ ID NO: 1632627 - RNA, 19 nt, Homo sapiens
  misc_RNA (1)...(19): siRNA sense strand
ugagauugcuccguguuug

SEQ ID NO: 1632628 - RNA, 19 nt, Homo sapiens
  misc_RNA (1)...(19): siRNA sense strand
ggaucuuguucgaguagaa

SEQ ID NO: 1632629 - RNA, 19 nt, Homo sapiens
  misc_RNA (1)...(19): siRNA sense strand
acagaaucauggccaagaa

SEQ ID NO: 1632630 - RNA, 19 nt, Homo sapiens
  misc_RNA (1)...(19): siRNA sense strand
ggauaaacagcauugagau

SEQ ID NO: 1632631 - RNA, 19 nt, Homo sapiens
  misc_RNA (1)...(19): siRNA sense strand
aaaggaucuuguucgagua

SEQ ID NO: 1632632 - RNA, 19 nt, Homo sapiens
  misc_RNA (1)...(19): siRNA sense strand
cagacuguccuccggauaa

SEQ ID NO: 1632633 - RNA, 19 nt, Homo sapiens
  misc_RNA (1)...(19): siRNA sense strand
gugaagaaggugaaugaga

SEQ ID NO: 1632634 - RNA, 19 nt, Homo sapiens
  misc_RNA (1)...(19): siRNA sense strand
gaaucauggccaagaauca

SEQ ID NO: 1632635 - RNA, 19 nt, Homo sapiens
  misc_RNA (1)...(19): siRNA sense strand
guagaagccacagucauug

SEQ ID NO: 1632636 - RNA, 19 nt, Homo sapiens
  misc_RNA (1)...(19): siRNA sense strand
uaaacagcauugagauugc

SEQ ID NO: 1632637 - RNA, 19 nt, Homo sapiens
  misc_RNA (1)...(19): siRNA sense strand
aguagaagccacagucauu

SEQ ID NO: 1632638 - RNA, 19 nt, Homo sapiens
  misc_RNA (1)...(19): siRNA sense strand
cggauaaacagcauugaga

SEQ ID NO: 1632639 - RNA, 19 nt, Homo sapiens
  misc_RNA (1)...(19): siRNA sense strand
gcagacuguccuccggaua

SEQ ID NO: 1632640 - RNA, 19 nt, Homo sapiens
  misc_RNA (1)...(19): siRNA sense strand
agacuguccuccggauaaa

SEQ ID NO: 1632641 - RNA, 19 nt, Homo sapiens
  misc_RNA (1)...(19): siRNA sense strand
auaaacagcauugagauug

SEQ ID NO: 1632642 - RNA, 19 nt, Homo sapiens
  misc_RNA (1)...(19): siRNA sense strand
ucauggccaagaaucauua

SEQ ID NO: 1632643 - RNA, 19 nt, Homo sapiens
  misc_RNA (1)...(19): siRNA sense strand
gaccuugcguguggagaga

SEQ ID NO: 1632644 - RNA, 19 nt, Homo sapiens
  misc_RNA (1)...(19): siRNA sense strand
ggagaagguccugcugguu

SEQ ID NO: 1632645 - RNA, 19 nt, Homo sapiens
  misc_RNA (1)...(19): siRNA sense strand
gacagaaucauggccaaga

SEQ ID NO: 1632646 - RNA, 19 nt, Homo sapiens
  misc_RNA (1)...(19): siRNA sense strand
cagagcacuucauaucuac

SEQ ID NO: 1632647 - RNA, 19 nt, Homo sapiens
  misc_RNA (1)...(19): siRNA sense strand
gagauugcuccguguuugu

SEQ ID NO: 1632648 - RNA, 19 nt, Homo sapiens
  misc_RNA (1)...(19): siRNA sense strand
uagaagccacagucauuga

SEQ ID NO: 1632649 - RNA, 19 nt, Homo sapiens
  misc_RNA (1)...(19): siRNA sense strand
gcaguauggcaggcucuuu

SEQ ID NO: 1632650 - RNA, 19 nt, Homo sapiens
  misc_RNA (1)...(19): siRNA sense strand
auucacagagcacuucaua

SEQ ID NO: 1632651 - RNA, 19 nt, Homo sapiens
  misc_RNA (1)...(19): siRNA sense strand
caguauggcaggcucuuug

SEQ ID NO: 1632652 - RNA, 19 nt, Homo sapiens
  misc_RNA (1)...(19): siRNA sense strand
ucucgaagguucaauucac

SEQ ID NO: 1632653 - RNA, 19 nt, Homo sapiens
  misc_RNA (1)...(19): siRNA sense strand
ucgugaagaaggugaauga

SEQ ID NO: 1632654 - RNA, 19 nt, Homo sapiens
  misc_RNA (1)...(19): siRNA sense strand
cgaagguucaauucacaga

SEQ ID NO: 1632655 - RNA, 19 nt, Homo sapiens
  misc_RNA (1)...(19): siRNA sense strand
cagaggucgugaagaaggu

SEQ ID NO: 1632656 - RNA, 19 nt, Homo sapiens
  misc_RNA (1)...(19): siRNA sense strand
ucaauucacagagcacuuc

SEQ ID NO: 1632657 - RNA, 19 nt, Homo sapiens
  misc_RNA (1)...(19): siRNA sense strand
gaccugaucuuaauuggaa

SEQ ID NO: 1632658 - RNA, 19 nt, Homo sapiens
  misc_RNA (1)...(19): siRNA sense strand
ugaagaaggugaaugagau

SEQ ID NO: 1632659 - RNA, 19 nt, Homo sapiens
  misc_RNA (1)...(19): siRNA sense strand
acagagcacuucauaucua

SEQ ID NO: 1632660 - RNA, 19 nt, Homo sapiens
  misc_RNA (1)...(19): siRNA sense strand
gauaaacagcauugagauu

SEQ ID NO: 1632661 - RNA, 19 nt, Homo sapiens
  misc_RNA (1)...(19): siRNA sense strand
ucacagagcacuucauauc

SEQ ID NO: 1632662 - RNA, 19 nt, Homo sapiens
  misc_RNA (1)...(19): siRNA sense strand
gaaggugaaugagaugauc

SEQ ID NO: 1632663 - RNA, 19 nt, Homo sapiens
  misc_RNA (1)...(19): siRNA sense strand
gaauucgacuggagaaggu

SEQ ID NO: 1632664 - RNA, 19 nt, Homo sapiens
  misc_RNA (1)...(19): siRNA sense strand
augcagaggucgugaagaa

SEQ ID NO: 1632665 - RNA, 19 nt, Homo sapiens
  misc_RNA (1)...(19): siRNA sense strand
gaagaaggugaaugagaug

SEQ ID NO: 1632666 - RNA, 19 nt, Homo sapiens
  misc_RNA (1)...(19): siRNA sense strand
gaagccacagucauugaaa

SEQ ID NO: 1632667 - RNA, 19 nt, Homo sapiens
  misc_RNA (1)...(19): siRNA sense strand
ugagauugcuccguguuug

SEQ ID NO: 1632668 - RNA, 19 nt, Homo sapiens
  misc_RNA (1)...(19): siRNA sense strand
ggaucuuguucgaguagaa

SEQ ID NO: 1632669 - RNA, 19 nt, Homo sapiens
  misc_RNA (1)...(19): siRNA sense strand
acagaaucauggccaagaa

SEQ ID NO: 1632670 - RNA, 19 nt, Homo sapiens
  misc_RNA (1)...(19): siRNA sense strand
ggauaaacagcauugagau

SEQ ID NO: 1632671 - RNA, 19 nt, Homo sapiens
  misc_RNA (1)...(19): siRNA sense strand
aaaggaucuuguucgagua

SEQ ID NO: 1632672 - RNA, 19 nt, Homo sapiens
  misc_RNA (1)...(19): siRNA sense strand
cagacuguccuccggauaa

SEQ ID NO: 1632673 - RNA, 19 nt, Homo sapiens
  misc_RNA (1)...(19): siRNA sense strand
gugaagaaggugaaugaga

SEQ ID NO: 1632674 - RNA, 19 nt, Homo sapiens
  misc_RNA (1)...(19): siRNA sense strand
gaaucauggccaagaauca

SEQ ID NO: 1632675 - RNA, 19 nt, Homo sapiens
  misc_RNA (1)...(19): siRNA sense strand
guagaagccacagucauug

SEQ ID NO: 1632676 - RNA, 19 nt, Homo sapiens
  misc_RNA (1)...(19): siRNA sense strand
uaaacagcauugagauugc

SEQ ID NO: 1632677 - RNA, 19 nt, Homo sapiens
  misc_RNA (1)...(19): siRNA sense strand
aguagaagccacagucauu

SEQ ID NO: 1632678 - RNA, 19 nt, Homo sapiens
  misc_RNA (1)...(19): siRNA sense strand
cggauaaacagcauugaga

SEQ ID NO: 1632679 - RNA, 19 nt, Homo sapiens
  misc_RNA (1)...(19): siRNA sense strand
gcagacuguccuccggaua

SEQ ID NO: 1632680 - RNA, 19 nt, Homo sapiens
  misc_RNA (1)...(19): siRNA sense strand
agacuguccuccggauaaa

SEQ ID NO: 1632681 - RNA, 19 nt, Homo sapiens
  misc_RNA (1)...(19): siRNA sense strand
auaaacagcauugagauug

SEQ ID NO: 1632682 - RNA, 19 nt, Homo sapiens
  misc_RNA (1)...(19): siRNA sense strand
ucauggccaagaaucauua

SEQ ID NO: 1632683 - RNA, 19 nt, Homo sapiens
  misc_RNA (1)...(19): siRNA sense strand
gaccuugcguguggagaga

SEQ ID NO: 1632684 - RNA, 19 nt, Homo sapiens
  misc_RNA (1)...(19): siRNA sense strand
ggagaagguccugcugguu

SEQ ID NO: 1632685 - RNA, 19 nt, Homo sapiens
  misc_RNA (1)...(19): siRNA sense strand
gacagaaucauggccaaga

SEQ ID NO: 1632686 - RNA, 19 nt, Homo sapiens
  misc_RNA (1)...(19): siRNA sense strand
cagagcacuucauaucuac

SEQ ID NO: 1632687 - RNA, 19 nt, Homo sapiens
  misc_RNA (1)...(19): siRNA sense strand
gagauugcuccguguuugu

SEQ ID NO: 1632688 - RNA, 19 nt, Homo sapiens
  misc_RNA (1)...(19): siRNA sense strand
uagaagccacagucauuga

SEQ ID NO: 1632689 - RNA, 19 nt, Homo sapiens
  misc_RNA (1)...(19): siRNA sense strand
gcaguauggcaggcucuuu

SEQ ID NO: 1632690 - RNA, 19 nt, Homo sapiens
  misc_RNA (1)...(19): siRNA sense strand
auucacagagcacuucaua

SEQ ID NO: 1632691 - RNA, 19 nt, Homo sapiens
  misc_RNA (1)...(19): siRNA sense strand
caguauggcaggcucuuug

SEQ ID NO: 1632692 - RNA, 19 nt, Homo sapiens
  misc_RNA (1)...(19): siRNA sense strand
ucucgaagguucaauucac

SEQ ID NO: 1632693 - RNA, 19 nt, Homo sapiens
  misc_RNA (1)...(19): siRNA sense strand
ucgugaagaaggugaauga

SEQ ID NO: 1632694 - RNA, 19 nt, Homo sapiens
  misc_RNA (1)...(19): siRNA sense strand
cgaagguucaauucacaga

SEQ ID NO: 1632695 - RNA, 19 nt, Homo sapiens
  misc_RNA (1)...(19): siRNA sense strand
cagaggucgugaagaaggu

SEQ ID NO: 1632696 - RNA, 19 nt, Homo sapiens
  misc_RNA (1)...(19): siRNA sense strand
ucaauucacagagcacuuc

SEQ ID NO: 1632697 - RNA, 19 nt, Homo sapiens
  misc_RNA (1)...(19): siRNA sense strand
gaccugaucuuaauuggaa

SEQ ID NO: 1632698 - RNA, 19 nt, Homo sapiens
  misc_RNA (1)...(19): siRNA sense strand
gauaaacagcauugagauu

SEQ ID NO: 1632699 - RNA, 19 nt, Homo sapiens
  misc_RNA (1)...(19): siRNA sense strand
gaauucgacuggagaaggu

SEQ ID NO: 1632700 - RNA, 19 nt, Homo sapiens
  misc_RNA (1)...(19): siRNA sense strand
gaagccacagucauugaaa

SEQ ID NO: 1632701 - RNA, 19 nt, Homo sapiens
  misc_RNA (1)...(19): siRNA sense strand
ugagauugcuccguguuug

SEQ ID NO: 1632702 - RNA, 19 nt, Homo sapiens
  misc_RNA (1)...(19): siRNA sense strand
ggaucuuguucgaguagaa

SEQ ID NO: 1632703 - RNA, 19 nt, Homo sapiens
  misc_RNA (1)...(19): siRNA sense strand
acagaaucauggccaagaa

SEQ ID NO: 1632704 - RNA, 19 nt, Homo sapiens
  misc_RNA (1)...(19): siRNA sense strand
ggauaaacagcauugagau

SEQ ID NO: 1632705 - RNA, 19 nt, Homo sapiens
  misc_RNA (1)...(19): siRNA sense strand
aaaggaucuuguucgagua

SEQ ID NO: 1632706 - RNA, 19 nt, Homo sapiens
  misc_RNA (1)...(19): siRNA sense strand
cagacuguccuccggauaa

SEQ ID NO: 1632707 - RNA, 19 nt, Homo sapiens
  misc_RNA (1)...(19): siRNA sense strand
gaaucauggccaagaauca

SEQ ID NO: 1632708 - RNA, 19 nt, Homo sapiens
  misc_RNA (1)...(19): siRNA sense strand
guagaagccacagucauug

SEQ ID NO: 1632709 - RNA, 19 nt, Homo sapiens
  misc_RNA (1)...(19): siRNA sense strand
uaaacagcauugagauugc

SEQ ID NO: 1632710 - RNA, 19 nt, Homo sapiens
  misc_RNA (1)...(19): siRNA sense strand
aguagaagccacagucauu

SEQ ID NO: 1632711 - RNA, 19 nt, Homo sapiens
  misc_RNA (1)...(19): siRNA sense strand
cggauaaacagcauugaga

SEQ ID NO: 1632712 - RNA, 19 nt, Homo sapiens
  misc_RNA (1)...(19): siRNA sense strand
gcagacuguccuccggaua

SEQ ID NO: 1632713 - RNA, 19 nt, Homo sapiens
  misc_RNA (1)...(19): siRNA sense strand
agacuguccuccggauaaa

SEQ ID NO: 1632714 - RNA, 19 nt, Homo sapiens
  misc_RNA (1)...(19): siRNA sense strand
auaaacagcauugagauug

SEQ ID NO: 1632715 - RNA, 19 nt, Homo sapiens
  misc_RNA (1)...(19): siRNA sense strand
ucauggccaagaaucauua

SEQ ID NO: 1632716 - RNA, 19 nt, Homo sapiens
  misc_RNA (1)...(19): siRNA sense strand
gaccuugcguguggagaga

SEQ ID NO: 1632717 - RNA, 19 nt, Homo sapiens
  misc_RNA (1)...(19): siRNA sense strand
ggagaagguccugcugguu

SEQ ID NO: 1632718 - RNA, 19 nt, Homo sapiens
  misc_RNA (1)...(19): siRNA sense strand
gacagaaucauggccaaga

SEQ ID NO: 1632719 - RNA, 19 nt, Homo sapiens
  misc_RNA (1)...(19): siRNA sense strand
gagauugcuccguguuugu

SEQ ID NO: 1632720 - RNA, 19 nt, Homo sapiens
  misc_RNA (1)...(19): siRNA sense strand
uagaagccacagucauuga

SEQ ID NO: 1632721 - RNA, 19 nt, Homo sapiens
  misc_RNA (1)...(19): siRNA sense strand
gcaguauggcaggcucuuu

SEQ ID NO: 1632722 - RNA, 19 nt, Homo sapiens
  misc_RNA (1)...(19): siRNA sense strand
caguauggcaggcucuuug

SEQ ID NO: 1632723 - RNA, 19 nt, Homo sapiens
  misc_RNA (1)...(19): siRNA sense strand
gaccugaucuuaauuggaa

SEQ ID NO: 1632724 - RNA, 19 nt, Homo sapiens
  misc_RNA (1)...(19): siRNA sense strand
ugaagaaggugaaugagau

SEQ ID NO: 1632725 - RNA, 19 nt, Homo sapiens
  misc_RNA (1)...(19): siRNA sense strand
acagagcacuucauaucua

SEQ ID NO: 1632726 - RNA, 19 nt, Homo sapiens
  misc_RNA (1)...(19): siRNA sense strand
ucacagagcacuucauauc

SEQ ID NO: 1632727 - RNA, 19 nt, Homo sapiens
  misc_RNA (1)...(19): siRNA sense strand
gaaggugaaugagaugauc

SEQ ID NO: 1632728 - RNA, 19 nt, Homo sapiens
  misc_RNA (1)...(19): siRNA sense strand
gaauucgacuggagaaggu

SEQ ID NO: 1632729 - RNA, 19 nt, Homo sapiens
  misc_RNA (1)...(19): siRNA sense strand
augcagaggucgugaagaa

SEQ ID NO: 1632730 - RNA, 19 nt, Homo sapiens
  misc_RNA (1)...(19): siRNA sense strand
gaagaaggugaaugagaug

SEQ ID NO: 1632731 - RNA, 19 nt, Homo sapiens
  misc_RNA (1)...(19): siRNA sense strand
gugaagaaggugaaugaga

SEQ ID NO: 1632732 - RNA, 19 nt, Homo sapiens
  misc_RNA (1)...(19): siRNA sense strand
gaccuugcguguggagaga

SEQ ID NO: 1632733 - RNA, 19 nt, Homo sapiens
  misc_RNA (1)...(19): siRNA sense strand
ggagaagguccugcugguu

SEQ ID NO: 1632734 - RNA, 19 nt, Homo sapiens
  misc_RNA (1)...(19): siRNA sense strand
cagagcacuucauaucuac

SEQ ID NO: 1632735 - RNA, 19 nt, Homo sapiens
  misc_RNA (1)...(19): siRNA sense strand
auucacagagcacuucaua

SEQ ID NO: 1632736 - RNA, 19 nt, Homo sapiens
  misc_RNA (1)...(19): siRNA sense strand
gcaguauggcaggcucuuu

SEQ ID NO: 1632737 - RNA, 19 nt, Homo sapiens
  misc_RNA (1)...(19): siRNA sense strand
caguauggcaggcucuuug

SEQ ID NO: 1632738 - RNA, 19 nt, Homo sapiens
  misc_RNA (1)...(19): siRNA sense strand
ucucgaagguucaauucac

SEQ ID NO: 1632739 - RNA, 19 nt, Homo sapiens
  misc_RNA (1)...(19): siRNA sense strand
cagaggucgugaagaaggu

SEQ ID NO: 1632740 - RNA, 19 nt, Homo sapiens
  misc_RNA (1)...(19): siRNA sense strand
cgaagguucaauucacaga

SEQ ID NO: 1632741 - RNA, 19 nt, Homo sapiens
  misc_RNA (1)...(19): siRNA sense strand
ucaauucacagagcacuuc

SEQ ID NO: 1632742 - RNA, 19 nt, Homo sapiens
  misc_RNA (1)...(19): siRNA sense strand
ucgugaagaaggugaauga

SEQ ID NO: 1632743 - RNA, 19 nt, Homo sapiens
  misc_RNA (1)...(19): siRNA sense strand
gaccugaucuuaauuggaa

SEQ ID NO: 1632744 - RNA, 19 nt, Homo sapiens
  misc_RNA (1)...(19): siRNA sense strand
ugaagaaggugaaugagau

SEQ ID NO: 1632745 - RNA, 19 nt, Homo sapiens
  misc_RNA (1)...(19): siRNA sense strand
acagagcacuucauaucua

SEQ ID NO: 1632746 - RNA, 19 nt, Homo sapiens
  misc_RNA (1)...(19): siRNA sense strand
gauaaacagcauugagauu

SEQ ID NO: 1632747 - RNA, 19 nt, Homo sapiens
  misc_RNA (1)...(19): siRNA sense strand
ucacagagcacuucauauc

SEQ ID NO: 1632748 - RNA, 19 nt, Homo sapiens
  misc_RNA (1)...(19): siRNA sense strand
gaaggugaaugagaugauc

SEQ ID NO: 1632749 - RNA, 19 nt, Homo sapiens
  misc_RNA (1)...(19): siRNA sense strand
gaauucgacuggagaaggu

SEQ ID NO: 1632750 - RNA, 19 nt, Homo sapiens
  misc_RNA (1)...(19): siRNA sense strand
augcagaggucgugaagaa

SEQ ID NO: 1632751 - RNA, 19 nt, Homo sapiens
  misc_RNA (1)...(19): siRNA sense strand
gaagaaggugaaugagaug

SEQ ID NO: 1632752 - RNA, 19 nt, Homo sapiens
  misc_RNA (1)...(19): siRNA sense strand
gaagccacagucauugaaa

SEQ ID NO: 1632753 - RNA, 19 nt, Homo sapiens
  misc_RNA (1)...(19): siRNA sense strand
ugagauugcuccguguuug

SEQ ID NO: 1632754 - RNA, 19 nt, Homo sapiens
  misc_RNA (1)...(19): siRNA sense strand
ggaucuuguucgaguagaa

SEQ ID NO: 1632755 - RNA, 19 nt, Homo sapiens
  misc_RNA (1)...(19): siRNA sense strand
acagaaucauggccaagaa

SEQ ID NO: 1632756 - RNA, 19 nt, Homo sapiens
  misc_RNA (1)...(19): siRNA sense strand
ggauaaacagcauugagau

SEQ ID NO: 1632757 - RNA, 19 nt, Homo sapiens
  misc_RNA (1)...(19): siRNA sense strand
aaaggaucuuguucgagua

SEQ ID NO: 1632758 - RNA, 19 nt, Homo sapiens
  misc_RNA (1)...(19): siRNA sense strand
cagacuguccuccggauaa

SEQ ID NO: 1632759 - RNA, 19 nt, Homo sapiens
  misc_RNA (1)...(19): siRNA sense strand
gugaagaaggugaaugaga

SEQ ID NO: 1632760 - RNA, 19 nt, Homo sapiens
  misc_RNA (1)...(19): siRNA sense strand
gaaucauggccaagaauca

SEQ ID NO: 1632761 - RNA, 19 nt, Homo sapiens
  misc_RNA (1)...(19): siRNA sense strand
guagaagccacagucauug

SEQ ID NO: 1632762 - RNA, 19 nt, Homo sapiens
  misc_RNA (1)...(19): siRNA sense strand
uaaacagcauugagauugc

SEQ ID NO: 1632763 - RNA, 19 nt, Homo sapiens
  misc_RNA (1)...(19): siRNA sense strand
aguagaagccacagucauu

SEQ ID NO: 1632764 - RNA, 19 nt, Homo sapiens
  misc_RNA (1)...(19): siRNA sense strand
cggauaaacagcauugaga

SEQ ID NO: 1632765 - RNA, 19 nt, Homo sapiens
  misc_RNA (1)...(19): siRNA sense strand
gcagacuguccuccggaua

SEQ ID NO: 1632766 - RNA, 19 nt, Homo sapiens
  misc_RNA (1)...(19): siRNA sense strand
agacuguccuccggauaaa

SEQ ID NO: 1632767 - RNA, 19 nt, Homo sapiens
  misc_RNA (1)...(19): siRNA sense strand
auaaacagcauugagauug

SEQ ID NO: 1632768 - RNA, 19 nt, Homo sapiens
  misc_RNA (1)...(19): siRNA sense strand
ucauggccaagaaucauua

SEQ ID NO: 1632769 - RNA, 19 nt, Homo sapiens
  misc_RNA (1)...(19): siRNA sense strand
gaccuugcguguggagaga

SEQ ID NO: 1632770 - RNA, 19 nt, Homo sapiens
  misc_RNA (1)...(19): siRNA sense strand
ggagaagguccugcugguu

SEQ ID NO: 1632771 - RNA, 19 nt, Homo sapiens
  misc_RNA (1)...(19): siRNA sense strand
gacagaaucauggccaaga

SEQ ID NO: 1632772 - RNA, 19 nt, Homo sapiens
  misc_RNA (1)...(19): siRNA sense strand
cagagcacuucauaucuac

SEQ ID NO: 1632773 - RNA, 19 nt, Homo sapiens
  misc_RNA (1)...(19): siRNA sense strand
gagauugcuccguguuugu

SEQ ID NO: 1632774 - RNA, 19 nt, Homo sapiens
  misc_RNA (1)...(19): siRNA sense strand
uagaagccacagucauuga

SEQ ID NO: 1632775 - RNA, 19 nt, Homo sapiens
  misc_RNA (1)...(19): siRNA sense strand
gcaguauggcaggcucuuu

SEQ ID NO: 1632776 - RNA, 19 nt, Homo sapiens
  misc_RNA (1)...(19): siRNA sense strand
auucacagagcacuucaua

SEQ ID NO: 1632777 - RNA, 19 nt, Homo sapiens
  misc_RNA (1)...(19): siRNA sense strand
caguauggcaggcucuuug

SEQ ID NO: 1632778 - RNA, 19 nt, Homo sapiens
  misc_RNA (1)...(19): siRNA sense strand
ucucgaagguucaauucac

SEQ ID NO: 1632779 - RNA, 19 nt, Homo sapiens
  misc_RNA (1)...(19): siRNA sense strand
ucgugaagaaggugaauga

SEQ ID NO: 1632780 - RNA, 19 nt, Homo sapiens
  misc_RNA (1)...(19): siRNA sense strand
cgaagguucaauucacaga

SEQ ID NO: 1632781 - RNA, 19 nt, Homo sapiens
  misc_RNA (1)...(19): siRNA sense strand
cagaggucgugaagaaggu

SEQ ID NO: 1632782 - RNA, 19 nt, Homo sapiens
  misc_RNA (1)...(19): siRNA sense strand
ucaauucacagagcacuuc

SEQ ID NO: 1632783 - RNA, 19 nt, Homo sapiens
  misc_RNA (1)...(19): siRNA sense strand
gaccugaucuuaauuggaa

SEQ ID NO: 1632784 - RNA, 19 nt, Homo sapiens
  misc_RNA (1)...(19): siRNA sense strand
ugaagaaggugaaugagau

SEQ ID NO: 1632785 - RNA, 19 nt, Homo sapiens
  misc_RNA (1)...(19): siRNA sense strand
acagagcacuucauaucua

SEQ ID NO: 1632786 - RNA, 19 nt, Homo sapiens
  misc_RNA (1)...(19): siRNA sense strand
gauaaacagcauugagauu

SEQ ID NO: 1632787 - RNA, 19 nt, Homo sapiens
  misc_RNA (1)...(19): siRNA sense strand
ucacagagcacuucauauc

SEQ ID NO: 1632788 - RNA, 19 nt, Homo sapiens
  misc_RNA (1)...(19): siRNA sense strand
gaaggugaaugagaugauc

SEQ ID NO: 1632789 - RNA, 19 nt, Homo sapiens
  misc_RNA (1)...(19): siRNA sense strand
gaauucgacuggagaaggu

SEQ ID NO: 1632790 - RNA, 19 nt, Homo sapiens
  misc_RNA (1)...(19): siRNA sense strand
augcagaggucgugaagaa

SEQ ID NO: 1632791 - RNA, 19 nt, Homo sapiens
  misc_RNA (1)...(19): siRNA sense strand
gaagaaggugaaugagaug

SEQ ID NO: 1632792 - RNA, 19 nt, Homo sapiens
  misc_RNA (1)...(19): siRNA sense strand
gaagccacagucauugaaa

SEQ ID NO: 1632793 - RNA, 19 nt, Homo sapiens
  misc_RNA (1)...(19): siRNA sense strand
ugagauugcuccguguuug

SEQ ID NO: 1632794 - RNA, 19 nt, Homo sapiens
  misc_RNA (1)...(19): siRNA sense strand
ggaucuuguucgaguagaa

SEQ ID NO: 1632795 - RNA, 19 nt, Homo sapiens
  misc_RNA (1)...(19): siRNA sense strand
acagaaucauggccaagaa

SEQ ID NO: 1632796 - RNA, 19 nt, Homo sapiens
  misc_RNA (1)...(19): siRNA sense strand
ggauaaacagcauugagau

SEQ ID NO: 1632797 - RNA, 19 nt, Homo sapiens
  misc_RNA (1)...(19): siRNA sense strand
aaaggaucuuguucgagua

SEQ ID NO: 1632798 - RNA, 19 nt, Homo sapiens
  misc_RNA (1)...(19): siRNA sense strand
cagacuguccuccggauaa

SEQ ID NO: 1632799 - RNA, 19 nt, Homo sapiens
  misc_RNA (1)...(19): siRNA sense strand
gugaagaaggugaaugaga

SEQ ID NO: 1632800 - RNA, 19 nt, Homo sapiens
  misc_RNA (1)...(19): siRNA sense strand
gaaucauggccaagaauca

SEQ ID NO: 1632801 - RNA, 19 nt, Homo sapiens
  misc_RNA (1)...(19): siRNA sense strand
guagaagccacagucauug

SEQ ID NO: 1632802 - RNA, 19 nt, Homo sapiens
  misc_RNA (1)...(19): siRNA sense strand
uaaacagcauugagauugc

SEQ ID NO: 1632803 - RNA, 19 nt, Homo sapiens
  misc_RNA (1)...(19): siRNA sense strand
aguagaagccacagucauu

SEQ ID NO: 1632804 - RNA, 19 nt, Homo sapiens
  misc_RNA (1)...(19): siRNA sense strand
cggauaaacagcauugaga

SEQ ID NO: 1632805 - RNA, 19 nt, Homo sapiens
  misc_RNA (1)...(19): siRNA sense strand
gcagacuguccuccggaua

SEQ ID NO: 1632806 - RNA, 19 nt, Homo sapiens
  misc_RNA (1)...(19): siRNA sense strand
agacuguccuccggauaaa

SEQ ID NO: 1632807 - RNA, 19 nt, Homo sapiens
  misc_RNA (1)...(19): siRNA sense strand
auaaacagcauugagauug

SEQ ID NO: 1632808 - RNA, 19 nt, Homo sapiens
  misc_RNA (1)...(19): siRNA sense strand
ucauggccaagaaucauua

SEQ ID NO: 1632809 - RNA, 19 nt, Homo sapiens
  misc_RNA (1)...(19): siRNA sense strand
gaccuugcguguggagaga

SEQ ID NO: 1632810 - RNA, 19 nt, Homo sapiens
  misc_RNA (1)...(19): siRNA sense strand
ggagaagguccugcugguu

SEQ ID NO: 1632811 - RNA, 19 nt, Homo sapiens
  misc_RNA (1)...(19): siRNA sense strand
gacagaaucauggccaaga

SEQ ID NO: 1632812 - RNA, 19 nt, Homo sapiens
  misc_RNA (1)...(19): siRNA sense strand
cagagcacuucauaucuac

SEQ ID NO: 1632813 - RNA, 19 nt, Homo sapiens
  misc_RNA (1)...(19): siRNA sense strand
gagauugcuccguguuugu

SEQ ID NO: 1632814 - RNA, 19 nt, Homo sapiens
  misc_RNA (1)...(19): siRNA sense strand
uagaagccacagucauuga

SEQ ID NO: 1632815 - RNA, 19 nt, Homo sapiens
  misc_RNA (1)...(19): siRNA sense strand
gcaguauggcaggcucuuu

SEQ ID NO: 1632816 - RNA, 19 nt, Homo sapiens
  misc_RNA (1)...(19): siRNA sense strand
auucacagagcacuucaua

SEQ ID NO: 1632817 - RNA, 19 nt, Homo sapiens
  misc_RNA (1)...(19): siRNA sense strand
caguauggcaggcucuuug

SEQ ID NO: 1632818 - RNA, 19 nt, Homo sapiens
  misc_RNA (1)...(19): siRNA sense strand
ucucgaagguucaauucac

SEQ ID NO: 1632819 - RNA, 19 nt, Homo sapiens
  misc_RNA (1)...(19): siRNA sense strand
ucgugaagaaggugaauga

SEQ ID NO: 1632820 - RNA, 19 nt, Homo sapiens
  misc_RNA (1)...(19): siRNA sense strand
cgaagguucaauucacaga

SEQ ID NO: 1632821 - RNA, 19 nt, Homo sapiens
  misc_RNA (1)...(19): siRNA sense strand
cagaggucgugaagaaggu

SEQ ID NO: 1632822 - RNA, 19 nt, Homo sapiens
  misc_RNA (1)...(19): siRNA sense strand
ucaauucacagagcacuuc

SEQ ID NO: 1632823 - RNA, 19 nt, Homo sapiens
  misc_RNA (1)...(19): siRNA sense strand
gaccugaucuuaauuggaa

SEQ ID NO: 1632824 - RNA, 19 nt, Homo sapiens
  misc_RNA (1)...(19): siRNA sense strand
gauaaacagcauugagauu

SEQ ID NO: 1632825 - RNA, 19 nt, Homo sapiens
  misc_RNA (1)...(19): siRNA sense strand
gaauucgacuggagaaggu

SEQ ID NO: 1632826 - RNA, 19 nt, Homo sapiens
  misc_RNA (1)...(19): siRNA sense strand
gaagccacagucauugaaa

SEQ ID NO: 1632827 - RNA, 19 nt, Homo sapiens
  misc_RNA (1)...(19): siRNA sense strand
ugagauugcuccguguuug

SEQ ID NO: 1632828 - RNA, 19 nt, Homo sapiens
  misc_RNA (1)...(19): siRNA sense strand
ggaucuuguucgaguagaa

SEQ ID NO: 1632829 - RNA, 19 nt, Homo sapiens
  misc_RNA (1)...(19): siRNA sense strand
acagaaucauggccaagaa

SEQ ID NO: 1632830 - RNA, 19 nt, Homo sapiens
  misc_RNA (1)...(19): siRNA sense strand
ggauaaacagcauugagau

SEQ ID NO: 1632831 - RNA, 19 nt, Homo sapiens
  misc_RNA (1)...(19): siRNA sense strand
aaaggaucuuguucgagua

SEQ ID NO: 1632832 - RNA, 19 nt, Homo sapiens
  misc_RNA (1)...(19): siRNA sense strand
cagacuguccuccggauaa

SEQ ID NO: 1632833 - RNA, 19 nt, Homo sapiens
  misc_RNA (1)...(19): siRNA sense strand
gaaucauggccaagaauca

SEQ ID NO: 1632834 - RNA, 19 nt, Homo sapiens
  misc_RNA (1)...(19): siRNA sense strand
guagaagccacagucauug

SEQ ID NO: 1632835 - RNA, 19 nt, Homo sapiens
  misc_RNA (1)...(19): siRNA sense strand
uaaacagcauugagauugc

SEQ ID NO: 1632836 - RNA, 19 nt, Homo sapiens
  misc_RNA (1)...(19): siRNA sense strand
aguagaagccacagucauu

SEQ ID NO: 1632837 - RNA, 19 nt, Homo sapiens
  misc_RNA (1)...(19): siRNA sense strand
cggauaaacagcauugaga

SEQ ID NO: 1632838 - RNA, 19 nt, Homo sapiens
  misc_RNA (1)...(19): siRNA sense strand
gcagacuguccuccggaua

SEQ ID NO: 1632839 - RNA, 19 nt, Homo sapiens
  misc_RNA (1)...(19): siRNA sense strand
agacuguccuccggauaaa

SEQ ID NO: 1632840 - RNA, 19 nt, Homo sapiens
  misc_RNA (1)...(19): siRNA sense strand
auaaacagcauugagauug

SEQ ID NO: 1632841 - RNA, 19 nt, Homo sapiens
  misc_RNA (1)...(19): siRNA sense strand
ucauggccaagaaucauua

SEQ ID NO: 1632842 - RNA, 19 nt, Homo sapiens
  misc_RNA (1)...(19): siRNA sense strand
gaccuugcguguggagaga

SEQ ID NO: 1632843 - RNA, 19 nt, Homo sapiens
  misc_RNA (1)...(19): siRNA sense strand
ggagaagguccugcugguu

SEQ ID NO: 1632844 - RNA, 19 nt, Homo sapiens
  misc_RNA (1)...(19): siRNA sense strand
gacagaaucauggccaaga

SEQ ID NO: 1632845 - RNA, 19 nt, Homo sapiens
  misc_RNA (1)...(19): siRNA sense strand
gagauugcuccguguuugu

SEQ ID NO: 1632846 - RNA, 19 nt, Homo sapiens
  misc_RNA (1)...(19): siRNA sense strand
uagaagccacagucauuga

SEQ ID NO: 1632847 - RNA, 19 nt, Homo sapiens
  misc_RNA (1)...(19): siRNA sense strand
gcaguauggcaggcucuuu

SEQ ID NO: 1632848 - RNA, 19 nt, Homo sapiens
  misc_RNA (1)...(19): siRNA sense strand
caguauggcaggcucuuug

SEQ ID NO: 1632849 - RNA, 19 nt, Homo sapiens
  misc_RNA (1)...(19): siRNA sense strand
guacauggaugcuuugaaa

SEQ ID NO: 1632850 - RNA, 19 nt, Homo sapiens
  misc_RNA (1)...(19): siRNA sense strand
cauuagaccucaccuauga

SEQ ID NO: 1632851 - RNA, 19 nt, Homo sapiens
  misc_RNA (1)...(19): siRNA sense strand
caagaacugucuccugauu

SEQ ID NO: 1632852 - RNA, 19 nt, Homo sapiens
  misc_RNA (1)...(19): siRNA sense strand
caacuucuguccugaguga

SEQ ID NO: 1632853 - RNA, 19 nt, Homo sapiens
  misc_RNA (1)...(19): siRNA sense strand
gcauugcccugacugauau

SEQ ID NO: 1632854 - RNA, 19 nt, Homo sapiens
  misc_RNA (1)...(19): siRNA sense strand
caaccacuccuauuucuuu

SEQ ID NO: 1632855 - RNA, 19 nt, Homo sapiens
  misc_RNA (1)...(19): siRNA sense strand
cgacugucaucaagaagua

SEQ ID NO: 1632856 - RNA, 19 nt, Homo sapiens
  misc_RNA (1)...(19): siRNA sense strand
caaaagagccugucacaaa

SEQ ID NO: 1632857 - RNA, 19 nt, Homo sapiens
  misc_RNA (1)...(19): siRNA sense strand
gagggaagccugauugaug

SEQ ID NO: 1632858 - RNA, 19 nt, Homo sapiens
  misc_RNA (1)...(19): siRNA sense strand
ccagaguccuccugagauu

SEQ ID NO: 1632859 - RNA, 19 nt, Homo sapiens
  misc_RNA (1)...(19): siRNA sense strand
uaucaucccuagugccuuu

SEQ ID NO: 1632860 - RNA, 19 nt, Homo sapiens
  misc_RNA (1)...(19): siRNA sense strand
uauccaagcuauccaguau

SEQ ID NO: 1632861 - RNA, 19 nt, Homo sapiens
  misc_RNA (1)...(19): siRNA sense strand
agacagagcccaggccaua

SEQ ID NO: 1632862 - RNA, 19 nt, Homo sapiens
  misc_RNA (1)...(19): siRNA sense strand
gcaguuucuucuccucaaa

SEQ ID NO: 1632863 - RNA, 19 nt, Homo sapiens
  misc_RNA (1)...(19): siRNA sense strand
gcaguuucuucuccucaaa

SEQ ID NO: 1632864 - RNA, 19 nt, Homo sapiens
  misc_RNA (1)...(19): siRNA sense strand
ccacuccuauuucuuugaa

SEQ ID NO: 1632865 - RNA, 19 nt, Homo sapiens
  misc_RNA (1)...(19): siRNA sense strand
caagaaguauaaggacuau

SEQ ID NO: 1632866 - RNA, 19 nt, Homo sapiens
  misc_RNA (1)...(19): siRNA sense strand
gacaaccacuccuauuucu

SEQ ID NO: 1632867 - RNA, 19 nt, Homo sapiens
  misc_RNA (1)...(19): siRNA sense strand
gugaauccuugcccaggua

SEQ ID NO: 1632868 - RNA, 19 nt, Homo sapiens
  misc_RNA (1)...(19): siRNA sense strand
cagagaugcugacgacugu

SEQ ID NO: 1632869 - RNA, 19 nt, Homo sapiens
  misc_RNA (1)...(19): siRNA sense strand
ccugguacauggaugcuuu

SEQ ID NO: 1632870 - RNA, 19 nt, Homo sapiens
  misc_RNA (1)...(19): siRNA sense strand
gaagaggaggauacagcua

SEQ ID NO: 1632871 - RNA, 19 nt, Homo sapiens
  misc_RNA (1)...(19): siRNA sense strand
ggaaguguugagugcaaua

SEQ ID NO: 1632872 - RNA, 19 nt, Homo sapiens
  misc_RNA (1)...(19): siRNA sense strand
gagcccaggccauaauuga

SEQ ID NO: 1632873 - RNA, 19 nt, Homo sapiens
  misc_RNA (1)...(19): siRNA sense strand
ucaagaaguauaaggacua

SEQ ID NO: 1632874 - RNA, 19 nt, Homo sapiens
  misc_RNA (1)...(19): siRNA sense strand
uaauugacaccacagauga

SEQ ID NO: 1632875 - RNA, 19 nt, Homo sapiens
  misc_RNA (1)...(19): siRNA sense strand
gaggucaucugggaagugu

SEQ ID NO: 1632876 - RNA, 19 nt, Homo sapiens
  misc_RNA (1)...(19): siRNA sense strand
agggaagccugauugauga

SEQ ID NO: 1632877 - RNA, 19 nt, Homo sapiens
  misc_RNA (1)...(19): siRNA sense strand
cgacaaccacuccuauuuc

SEQ ID NO: 1632878 - RNA, 19 nt, Homo sapiens
  misc_RNA (1)...(19): siRNA sense strand
cgggaaagcccaugaguuc

SEQ ID NO: 1632879 - RNA, 19 nt, Homo sapiens
  misc_RNA (1)...(19): siRNA sense strand
gguaugcccuggaugaaaa

SEQ ID NO: 1632880 - RNA, 19 nt, Homo sapiens
  misc_RNA (1)...(19): siRNA sense strand
ccgacaaccacuccuauuu

SEQ ID NO: 1632881 - RNA, 19 nt, Homo sapiens
  misc_RNA (1)...(19): siRNA sense strand
uggcugaguuggugcaguu

SEQ ID NO: 1632882 - RNA, 19 nt, Homo sapiens
  misc_RNA (1)...(19): siRNA sense strand
gaaagauauggaagacaga

SEQ ID NO: 1632883 - RNA, 19 nt, Homo sapiens
  misc_RNA (1)...(19): siRNA sense strand
ggucaucugggaaguguug

SEQ ID NO: 1632884 - RNA, 19 nt, Homo sapiens
  misc_RNA (1)...(19): siRNA sense strand
uccaagcuauccaguauca

SEQ ID NO: 1632885 - RNA, 19 nt, Homo sapiens
  misc_RNA (1)...(19): siRNA sense strand
cacauuagaccucaccuau

SEQ ID NO: 1632886 - RNA, 19 nt, Homo sapiens
  misc_RNA (1)...(19): siRNA sense strand
gaguucauagagcuaauuu

SEQ ID NO: 1632887 - RNA, 19 nt, Homo sapiens
  misc_RNA (1)...(19): siRNA sense strand
caagcuauccaguaucauc

SEQ ID NO: 1632888 - RNA, 19 nt, Homo sapiens
  misc_RNA (1)...(19): siRNA sense strand
gcagugaagaggaggauac

SEQ ID NO: 1632889 - RNA, 19 nt, Homo sapiens
  misc_RNA (1)...(19): siRNA sense strand
ccaggguccucccaagauc

SEQ ID NO: 1632890 - RNA, 19 nt, Homo sapiens
  misc_RNA (1)...(19): siRNA sense strand
ucagaggccagcaagagaa

SEQ ID NO: 1632891 - RNA, 19 nt, Homo sapiens
  misc_RNA (1)...(19): siRNA sense strand
aguuucuucuccucaaaua

SEQ ID NO: 1632892 - RNA, 19 nt, Homo sapiens
  misc_RNA (1)...(19): siRNA sense strand
aguuucuucuccucaaaua

SEQ ID NO: 1632893 - RNA, 19 nt, Homo sapiens
  misc_RNA (1)...(19): siRNA sense strand
uaugagggaagccugauug

SEQ ID NO: 1632894 - RNA, 19 nt, Homo sapiens
  misc_RNA (1)...(19): siRNA sense strand
ccagugucauguccaccaa

SEQ ID NO: 1632895 - RNA, 19 nt, Homo sapiens
  misc_RNA (1)...(19): siRNA sense strand
caccacagaugaugcuacu

SEQ ID NO: 1632896 - RNA, 19 nt, Homo sapiens
  misc_RNA (1)...(19): siRNA sense strand
gcugggaugccaccucuuc

SEQ ID NO: 1632897 - RNA, 19 nt, Homo sapiens
  misc_RNA (1)...(19): siRNA sense strand
gacagagcccaggccauaa

SEQ ID NO: 1632898 - RNA, 19 nt, Homo sapiens
  misc_RNA (1)...(19): siRNA sense strand
aacugucuccugauucuua

SEQ ID NO: 1632899 - RNA, 19 nt, Homo sapiens
  misc_RNA (1)...(19): siRNA sense strand
aaaagagccugucacaaag

SEQ ID NO: 1632900 - RNA, 19 nt, Homo sapiens
  misc_RNA (1)...(19): siRNA sense strand
agagaagucuuagaguuuu

SEQ ID NO: 1632901 - RNA, 19 nt, Homo sapiens
  misc_RNA (1)...(19): siRNA sense strand
gggaaguguugagugcaau

SEQ ID NO: 1632902 - RNA, 19 nt, Homo sapiens
  misc_RNA (1)...(19): siRNA sense strand
ugggaaguguugagugcaa

SEQ ID NO: 1632903 - RNA, 19 nt, Homo sapiens
  misc_RNA (1)...(19): siRNA sense strand
gaaguguugagugcaauag

SEQ ID NO: 1632904 - RNA, 19 nt, Homo sapiens
  misc_RNA (1)...(19): siRNA sense strand
gcccaggccauaauugaca

SEQ ID NO: 1632905 - RNA, 19 nt, Homo sapiens
  misc_RNA (1)...(19): siRNA sense strand
ucaucaagaaguauaagga

SEQ ID NO: 1632906 - RNA, 19 nt, Homo sapiens
  misc_RNA (1)...(19): siRNA sense strand
ccucuagacuccugcucau

SEQ ID NO: 1632907 - RNA, 19 nt, Homo sapiens
  misc_RNA (1)...(19): siRNA sense strand
cccaugaucuucgggaaag

SEQ ID NO: 1632908 - RNA, 19 nt, Homo sapiens
  misc_RNA (1)...(19): siRNA sense strand
gcagagggaagcgucuuag

SEQ ID NO: 1632909 - RNA, 19 nt, Homo sapiens
  misc_RNA (1)...(19): siRNA sense strand
gcagaguccuccccagagu

SEQ ID NO: 1632910 - RNA, 19 nt, Homo sapiens
  misc_RNA (1)...(19): siRNA sense strand
ugucauguccaccaacuuc

SEQ ID NO: 1632911 - RNA, 19 nt, Homo sapiens
  misc_RNA (1)...(19): siRNA sense strand
auaauugacaccacagaug

SEQ ID NO: 1632912 - RNA, 19 nt, Homo sapiens
  misc_RNA (1)...(19): siRNA sense strand
ucacaaaggcagagaugcu

SEQ ID NO: 1632913 - RNA, 19 nt, Homo sapiens
  misc_RNA (1)...(19): siRNA sense strand
ucuuagaccuggccaaucc

SEQ ID NO: 1632914 - RNA, 19 nt, Homo sapiens
  misc_RNA (1)...(19): siRNA sense strand
gaacugucuccugauucuu

SEQ ID NO: 1632915 - RNA, 19 nt, Homo sapiens
  misc_RNA (1)...(19): siRNA sense strand
cauuagaccucaccuauga

SEQ ID NO: 1632916 - RNA, 19 nt, Homo sapiens
  misc_RNA (1)...(19): siRNA sense strand
caagaacugucuccugauu

SEQ ID NO: 1632917 - RNA, 19 nt, Homo sapiens
  misc_RNA (1)...(19): siRNA sense strand
gcauugcccugacugauau

SEQ ID NO: 1632918 - RNA, 19 nt, Homo sapiens
  misc_RNA (1)...(19): siRNA sense strand
caaccacuccuauuucuuu

SEQ ID NO: 1632919 - RNA, 19 nt, Homo sapiens
  misc_RNA (1)...(19): siRNA sense strand
cgacugucaucaagaagua

SEQ ID NO: 1632920 - RNA, 19 nt, Homo sapiens
  misc_RNA (1)...(19): siRNA sense strand
caaaagagccugucacaaa

SEQ ID NO: 1632921 - RNA, 19 nt, Homo sapiens
  misc_RNA (1)...(19): siRNA sense strand
gagggaagccugauugaug

SEQ ID NO: 1632922 - RNA, 19 nt, Homo sapiens
  misc_RNA (1)...(19): siRNA sense strand
ccagaguccuccugagauu

SEQ ID NO: 1632923 - RNA, 19 nt, Homo sapiens
  misc_RNA (1)...(19): siRNA sense strand
uauccaagcuauccaguau

SEQ ID NO: 1632924 - RNA, 19 nt, Homo sapiens
  misc_RNA (1)...(19): siRNA sense strand
gcaguuucuucuccucaaa

SEQ ID NO: 1632925 - RNA, 19 nt, Homo sapiens
  misc_RNA (1)...(19): siRNA sense strand
ccacuccuauuucuuugaa

SEQ ID NO: 1632926 - RNA, 19 nt, Homo sapiens
  misc_RNA (1)...(19): siRNA sense strand
caagaaguauaaggacuau

SEQ ID NO: 1632927 - RNA, 19 nt, Homo sapiens
  misc_RNA (1)...(19): siRNA sense strand
gacaaccacuccuauuucu

SEQ ID NO: 1632928 - RNA, 19 nt, Homo sapiens
  misc_RNA (1)...(19): siRNA sense strand
gugaauccuugcccaggua

SEQ ID NO: 1632929 - RNA, 19 nt, Homo sapiens
  misc_RNA (1)...(19): siRNA sense strand
cagagaugcugacgacugu

SEQ ID NO: 1632930 - RNA, 19 nt, Homo sapiens
  misc_RNA (1)...(19): siRNA sense strand
gaagaggaggauacagcua

SEQ ID NO: 1632931 - RNA, 19 nt, Homo sapiens
  misc_RNA (1)...(19): siRNA sense strand
ggaaguguugagugcaaua

SEQ ID NO: 1632932 - RNA, 19 nt, Homo sapiens
  misc_RNA (1)...(19): siRNA sense strand
ucaagaaguauaaggacua

SEQ ID NO: 1632933 - RNA, 19 nt, Homo sapiens
  misc_RNA (1)...(19): siRNA sense strand
gaggucaucugggaagugu

SEQ ID NO: 1632934 - RNA, 19 nt, Homo sapiens
  misc_RNA (1)...(19): siRNA sense strand
agggaagccugauugauga

SEQ ID NO: 1632935 - RNA, 19 nt, Homo sapiens
  misc_RNA (1)...(19): siRNA sense strand
cgacaaccacuccuauuuc

SEQ ID NO: 1632936 - RNA, 19 nt, Homo sapiens
  misc_RNA (1)...(19): siRNA sense strand
cgggaaagcccaugaguuc

SEQ ID NO: 1632937 - RNA, 19 nt, Homo sapiens
  misc_RNA (1)...(19): siRNA sense strand
gguaugcccuggaugaaaa

SEQ ID NO: 1632938 - RNA, 19 nt, Homo sapiens
  misc_RNA (1)...(19): siRNA sense strand
ccgacaaccacuccuauuu

SEQ ID NO: 1632939 - RNA, 19 nt, Homo sapiens
  misc_RNA (1)...(19): siRNA sense strand
uggcugaguuggugcaguu

SEQ ID NO: 1632940 - RNA, 19 nt, Homo sapiens
  misc_RNA (1)...(19): siRNA sense strand
ggucaucugggaaguguug

SEQ ID NO: 1632941 - RNA, 19 nt, Homo sapiens
  misc_RNA (1)...(19): siRNA sense strand
uccaagcuauccaguauca

SEQ ID NO: 1632942 - RNA, 19 nt, Homo sapiens
  misc_RNA (1)...(19): siRNA sense strand
cacauuagaccucaccuau

SEQ ID NO: 1632943 - RNA, 19 nt, Homo sapiens
  misc_RNA (1)...(19): siRNA sense strand
gaguucauagagcuaauuu

SEQ ID NO: 1632944 - RNA, 19 nt, Homo sapiens
  misc_RNA (1)...(19): siRNA sense strand
caagcuauccaguaucauc

SEQ ID NO: 1632945 - RNA, 19 nt, Homo sapiens
  misc_RNA (1)...(19): siRNA sense strand
gcagugaagaggaggauac

SEQ ID NO: 1632946 - RNA, 19 nt, Homo sapiens
  misc_RNA (1)...(19): siRNA sense strand
ccaggguccucccaagauc

SEQ ID NO: 1632947 - RNA, 19 nt, Homo sapiens
  misc_RNA (1)...(19): siRNA sense strand
ucagaggccagcaagagaa

SEQ ID NO: 1632948 - RNA, 19 nt, Homo sapiens
  misc_RNA (1)...(19): siRNA sense strand
aguuucuucuccucaaaua

SEQ ID NO: 1632949 - RNA, 19 nt, Homo sapiens
  misc_RNA (1)...(19): siRNA sense strand
uaugagggaagccugauug

SEQ ID NO: 1632950 - RNA, 19 nt, Homo sapiens
  misc_RNA (1)...(19): siRNA sense strand
aacugucuccugauucuua

SEQ ID NO: 1632951 - RNA, 19 nt, Homo sapiens
  misc_RNA (1)...(19): siRNA sense strand
gcugggaugccaccucuuc

SEQ ID NO: 1632952 - RNA, 19 nt, Homo sapiens
  misc_RNA (1)...(19): siRNA sense strand
aaaagagccugucacaaag

SEQ ID NO: 1632953 - RNA, 19 nt, Homo sapiens
  misc_RNA (1)...(19): siRNA sense strand
agagaagucuuagaguuuu

SEQ ID NO: 1632954 - RNA, 19 nt, Homo sapiens
  misc_RNA (1)...(19): siRNA sense strand
gggaaguguugagugcaau

SEQ ID NO: 1632955 - RNA, 19 nt, Homo sapiens
  misc_RNA (1)...(19): siRNA sense strand
ugggaaguguugagugcaa

SEQ ID NO: 1632956 - RNA, 19 nt, Homo sapiens
  misc_RNA (1)...(19): siRNA sense strand
gaaguguugagugcaauag

SEQ ID NO: 1632957 - RNA, 19 nt, Homo sapiens
  misc_RNA (1)...(19): siRNA sense strand
ccucuagacuccugcucau

SEQ ID NO: 1632958 - RNA, 19 nt, Homo sapiens
  misc_RNA (1)...(19): siRNA sense strand
cccaugaucuucgggaaag

SEQ ID NO: 1632959 - RNA, 19 nt, Homo sapiens
  misc_RNA (1)...(19): siRNA sense strand
ucaucaagaaguauaagga

SEQ ID NO: 1632960 - RNA, 19 nt, Homo sapiens
  misc_RNA (1)...(19): siRNA sense strand
gcagaguccuccccagagu

SEQ ID NO: 1632961 - RNA, 19 nt, Homo sapiens
  misc_RNA (1)...(19): siRNA sense strand
ucacaaaggcagagaugcu

SEQ ID NO: 1632962 - RNA, 19 nt, Homo sapiens
  misc_RNA (1)...(19): siRNA sense strand
gaacugucuccugauucuu

SEQ ID NO: 1632963 - RNA, 19 nt, Homo sapiens
  misc_RNA (1)...(19): siRNA sense strand
gaccugaucuuaauuggaa

SEQ ID NO: 1632964 - RNA, 19 nt, Homo sapiens
  misc_RNA (1)...(19): siRNA sense strand
ugaagaaggugaaugagau

SEQ ID NO: 1632965 - RNA, 19 nt, Homo sapiens
  misc_RNA (1)...(19): siRNA sense strand
acagagcacuucauaucua

SEQ ID NO: 1632966 - RNA, 19 nt, Homo sapiens
  misc_RNA (1)...(19): siRNA sense strand
ucacagagcacuucauauc

SEQ ID NO: 1632967 - RNA, 19 nt, Homo sapiens
  misc_RNA (1)...(19): siRNA sense strand
gaaggugaaugagaugauc

SEQ ID NO: 1632968 - RNA, 19 nt, Homo sapiens
  misc_RNA (1)...(19): siRNA sense strand
gaauucgacuggagaaggu

SEQ ID NO: 1632969 - RNA, 19 nt, Homo sapiens
  misc_RNA (1)...(19): siRNA sense strand
augcagaggucgugaagaa

SEQ ID NO: 1632970 - RNA, 19 nt, Homo sapiens
  misc_RNA (1)...(19): siRNA sense strand
gaagaaggugaaugagaug

SEQ ID NO: 1632971 - RNA, 19 nt, Homo sapiens
  misc_RNA (1)...(19): siRNA sense strand
gugaagaaggugaaugaga

SEQ ID NO: 1632972 - RNA, 19 nt, Homo sapiens
  misc_RNA (1)...(19): siRNA sense strand
gaccuugcguguggagaga

SEQ ID NO: 1632973 - RNA, 19 nt, Homo sapiens
  misc_RNA (1)...(19): siRNA sense strand
ggagaagguccugcugguu

SEQ ID NO: 1632974 - RNA, 19 nt, Homo sapiens
  misc_RNA (1)...(19): siRNA sense strand
cagagcacuucauaucuac

SEQ ID NO: 1632975 - RNA, 19 nt, Homo sapiens
  misc_RNA (1)...(19): siRNA sense strand
auucacagagcacuucaua

SEQ ID NO: 1632976 - RNA, 19 nt, Homo sapiens
  misc_RNA (1)...(19): siRNA sense strand
gcaguauggcaggcucuuu

SEQ ID NO: 1632977 - RNA, 19 nt, Homo sapiens
  misc_RNA (1)...(19): siRNA sense strand
caguauggcaggcucuuug

SEQ ID NO: 1632978 - RNA, 19 nt, Homo sapiens
  misc_RNA (1)...(19): siRNA sense strand
ucucgaagguucaauucac

SEQ ID NO: 1632979 - RNA, 19 nt, Homo sapiens
  misc_RNA (1)...(19): siRNA sense strand
cagaggucgugaagaaggu

SEQ ID NO: 1632980 - RNA, 19 nt, Homo sapiens
  misc_RNA (1)...(19): siRNA sense strand
cgaagguucaauucacaga

SEQ ID NO: 1632981 - RNA, 19 nt, Homo sapiens
  misc_RNA (1)...(19): siRNA sense strand
ucaauucacagagcacuuc

SEQ ID NO: 1632982 - RNA, 19 nt, Homo sapiens
  misc_RNA (1)...(19): siRNA sense strand
ucgugaagaaggugaauga

SEQ ID NO: 1632983 - RNA, 19 nt, Homo sapiens
  misc_RNA (1)...(19): siRNA sense strand
gaccugaucuuaauuggaa

SEQ ID NO: 1632984 - RNA, 19 nt, Homo sapiens
  misc_RNA (1)...(19): siRNA sense strand
ugaagaaggugaaugagau

SEQ ID NO: 1632985 - RNA, 19 nt, Homo sapiens
  misc_RNA (1)...(19): siRNA sense strand
acagagcacuucauaucua

SEQ ID NO: 1632986 - RNA, 19 nt, Homo sapiens
  misc_RNA (1)...(19): siRNA sense strand
gauaaacagcauugagauu

SEQ ID NO: 1632987 - RNA, 19 nt, Homo sapiens
  misc_RNA (1)...(19): siRNA sense strand
ucacagagcacuucauauc

SEQ ID NO: 1632988 - RNA, 19 nt, Homo sapiens
  misc_RNA (1)...(19): siRNA sense strand
gaaggugaaugagaugauc

SEQ ID NO: 1632989 - RNA, 19 nt, Homo sapiens
  misc_RNA (1)...(19): siRNA sense strand
gaauucgacuggagaaggu

SEQ ID NO: 1632990 - RNA, 19 nt, Homo sapiens
  misc_RNA (1)...(19): siRNA sense strand
augcagaggucgugaagaa

SEQ ID NO: 1632991 - RNA, 19 nt, Homo sapiens
  misc_RNA (1)...(19): siRNA sense strand
gaagaaggugaaugagaug

SEQ ID NO: 1632992 - RNA, 19 nt, Homo sapiens
  misc_RNA (1)...(19): siRNA sense strand
gaagccacagucauugaaa

SEQ ID NO: 1632993 - RNA, 19 nt, Homo sapiens
  misc_RNA (1)...(19): siRNA sense strand
ugagauugcuccguguuug

SEQ ID NO: 1632994 - RNA, 19 nt, Homo sapiens
  misc_RNA (1)...(19): siRNA sense strand
ggaucuuguucgaguagaa

SEQ ID NO: 1632995 - RNA, 19 nt, Homo sapiens
  misc_RNA (1)...(19): siRNA sense strand
acagaaucauggccaagaa

SEQ ID NO: 1632996 - RNA, 19 nt, Homo sapiens
  misc_RNA (1)...(19): siRNA sense strand
ggauaaacagcauugagau

SEQ ID NO: 1632997 - RNA, 19 nt, Homo sapiens
  misc_RNA (1)...(19): siRNA sense strand
aaaggaucuuguucgagua

SEQ ID NO: 1632998 - RNA, 19 nt, Homo sapiens
  misc_RNA (1)...(19): siRNA sense strand
cagacuguccuccggauaa

SEQ ID NO: 1632999 - RNA, 19 nt, Homo sapiens
  misc_RNA (1)...(19): siRNA sense strand
gugaagaaggugaaugaga

SEQ ID NO: 1633000 - RNA, 19 nt, Homo sapiens
  misc_RNA (1)...(19): siRNA sense strand
gaaucauggccaagaauca

SEQ ID NO: 1633001 - RNA, 19 nt, Homo sapiens
  misc_RNA (1)...(19): siRNA sense strand
guagaagccacagucauug

SEQ ID NO: 1633002 - RNA, 19 nt, Homo sapiens
  misc_RNA (1)...(19): siRNA sense strand
uaaacagcauugagauugc

SEQ ID NO: 1633003 - RNA, 19 nt, Homo sapiens
  misc_RNA (1)...(19): siRNA sense strand
aguagaagccacagucauu

SEQ ID NO: 1633004 - RNA, 19 nt, Homo sapiens
  misc_RNA (1)...(19): siRNA sense strand
cggauaaacagcauugaga

SEQ ID NO: 1633005 - RNA, 19 nt, Homo sapiens
  misc_RNA (1)...(19): siRNA sense strand
gcagacuguccuccggaua

SEQ ID NO: 1633006 - RNA, 19 nt, Homo sapiens
  misc_RNA (1)...(19): siRNA sense strand
agacuguccuccggauaaa

SEQ ID NO: 1633007 - RNA, 19 nt, Homo sapiens
  misc_RNA (1)...(19): siRNA sense strand
auaaacagcauugagauug

SEQ ID NO: 1633008 - RNA, 19 nt, Homo sapiens
  misc_RNA (1)...(19): siRNA sense strand
ucauggccaagaaucauua

SEQ ID NO: 1633009 - RNA, 19 nt, Homo sapiens
  misc_RNA (1)...(19): siRNA sense strand
gaccuugcguguggagaga

SEQ ID NO: 1633010 - RNA, 19 nt, Homo sapiens
  misc_RNA (1)...(19): siRNA sense strand
ggagaagguccugcugguu

SEQ ID NO: 1633011 - RNA, 19 nt, Homo sapiens
  misc_RNA (1)...(19): siRNA sense strand
gacagaaucauggccaaga

SEQ ID NO: 1633012 - RNA, 19 nt, Homo sapiens
  misc_RNA (1)...(19): siRNA sense strand
cagagcacuucauaucuac

SEQ ID NO: 1633013 - RNA, 19 nt, Homo sapiens
  misc_RNA (1)...(19): siRNA sense strand
gagauugcuccguguuugu

SEQ ID NO: 1633014 - RNA, 19 nt, Homo sapiens
  misc_RNA (1)...(19): siRNA sense strand
uagaagccacagucauuga

SEQ ID NO: 1633015 - RNA, 19 nt, Homo sapiens
  misc_RNA (1)...(19): siRNA sense strand
gcaguauggcaggcucuuu

SEQ ID NO: 1633016 - RNA, 19 nt, Homo sapiens
  misc_RNA (1)...(19): siRNA sense strand
auucacagagcacuucaua

SEQ ID NO: 1633017 - RNA, 19 nt, Homo sapiens
  misc_RNA (1)...(19): siRNA sense strand
caguauggcaggcucuuug

SEQ ID NO: 1633018 - RNA, 19 nt, Homo sapiens
  misc_RNA (1)...(19): siRNA sense strand
ucucgaagguucaauucac

SEQ ID NO: 1633019 - RNA, 19 nt, Homo sapiens
  misc_RNA (1)...(19): siRNA sense strand
ucgugaagaaggugaauga

SEQ ID NO: 1633020 - RNA, 19 nt, Homo sapiens
  misc_RNA (1)...(19): siRNA sense strand
cgaagguucaauucacaga

SEQ ID NO: 1633021 - RNA, 19 nt, Homo sapiens
  misc_RNA (1)...(19): siRNA sense strand
cagaggucgugaagaaggu

SEQ ID NO: 1633022 - RNA, 19 nt, Homo sapiens
  misc_RNA (1)...(19): siRNA sense strand
ucaauucacagagcacuuc

SEQ ID NO: 1633023 - RNA, 19 nt, Homo sapiens
  misc_RNA (1)...(19): siRNA sense strand
gaccugaucuuaauuggaa

SEQ ID NO: 1633024 - RNA, 19 nt, Homo sapiens
  misc_RNA (1)...(19): siRNA sense strand
ugaagaaggugaaugagau

SEQ ID NO: 1633025 - RNA, 19 nt, Homo sapiens
  misc_RNA (1)...(19): siRNA sense strand
acagagcacuucauaucua

SEQ ID NO: 1633026 - RNA, 19 nt, Homo sapiens
  misc_RNA (1)...(19): siRNA sense strand
gauaaacagcauugagauu

SEQ ID NO: 1633027 - RNA, 19 nt, Homo sapiens
  misc_RNA (1)...(19): siRNA sense strand
ucacagagcacuucauauc

SEQ ID NO: 1633028 - RNA, 19 nt, Homo sapiens
  misc_RNA (1)...(19): siRNA sense strand
gaaggugaaugagaugauc

SEQ ID NO: 1633029 - RNA, 19 nt, Homo sapiens
  misc_RNA (1)...(19): siRNA sense strand
gaauucgacuggagaaggu

SEQ ID NO: 1633030 - RNA, 19 nt, Homo sapiens
  misc_RNA (1)...(19): siRNA sense strand
augcagaggucgugaagaa

SEQ ID NO: 1633031 - RNA, 19 nt, Homo sapiens
  misc_RNA (1)...(19): siRNA sense strand
gaagaaggugaaugagaug

SEQ ID NO: 1633032 - RNA, 19 nt, Homo sapiens
  misc_RNA (1)...(19): siRNA sense strand
gaagccacagucauugaaa

SEQ ID NO: 1633033 - RNA, 19 nt, Homo sapiens
  misc_RNA (1)...(19): siRNA sense strand
ugagauugcuccguguuug

SEQ ID NO: 1633034 - RNA, 19 nt, Homo sapiens
  misc_RNA (1)...(19): siRNA sense strand
ggaucuuguucgaguagaa

SEQ ID NO: 1633035 - RNA, 19 nt, Homo sapiens
  misc_RNA (1)...(19): siRNA sense strand
acagaaucauggccaagaa

SEQ ID NO: 1633036 - RNA, 19 nt, Homo sapiens
  misc_RNA (1)...(19): siRNA sense strand
ggauaaacagcauugagau

SEQ ID NO: 1633037 - RNA, 19 nt, Homo sapiens
  misc_RNA (1)...(19): siRNA sense strand
aaaggaucuuguucgagua

SEQ ID NO: 1633038 - RNA, 19 nt, Homo sapiens
  misc_RNA (1)...(19): siRNA sense strand
cagacuguccuccggauaa

SEQ ID NO: 1633039 - RNA, 19 nt, Homo sapiens
  misc_RNA (1)...(19): siRNA sense strand
gugaagaaggugaaugaga

SEQ ID NO: 1633040 - RNA, 19 nt, Homo sapiens
  misc_RNA (1)...(19): siRNA sense strand
gaaucauggccaagaauca

SEQ ID NO: 1633041 - RNA, 19 nt, Homo sapiens
  misc_RNA (1)...(19): siRNA sense strand
guagaagccacagucauug

SEQ ID NO: 1633042 - RNA, 19 nt, Homo sapiens
  misc_RNA (1)...(19): siRNA sense strand
uaaacagcauugagauugc

SEQ ID NO: 1633043 - RNA, 19 nt, Homo sapiens
  misc_RNA (1)...(19): siRNA sense strand
aguagaagccacagucauu

SEQ ID NO: 1633044 - RNA, 19 nt, Homo sapiens
  misc_RNA (1)...(19): siRNA sense strand
cggauaaacagcauugaga

SEQ ID NO: 1633045 - RNA, 19 nt, Homo sapiens
  misc_RNA (1)...(19): siRNA sense strand
gcagacuguccuccggaua

SEQ ID NO: 1633046 - RNA, 19 nt, Homo sapiens
  misc_RNA (1)...(19): siRNA sense strand
agacuguccuccggauaaa

SEQ ID NO: 1633047 - RNA, 19 nt, Homo sapiens
  misc_RNA (1)...(19): siRNA sense strand
auaaacagcauugagauug

SEQ ID NO: 1633048 - RNA, 19 nt, Homo sapiens
  misc_RNA (1)...(19): siRNA sense strand
ucauggccaagaaucauua

SEQ ID NO: 1633049 - RNA, 19 nt, Homo sapiens
  misc_RNA (1)...(19): siRNA sense strand
gaccuugcguguggagaga

SEQ ID NO: 1633050 - RNA, 19 nt, Homo sapiens
  misc_RNA (1)...(19): siRNA sense strand
ggagaagguccugcugguu

SEQ ID NO: 1633051 - RNA, 19 nt, Homo sapiens
  misc_RNA (1)...(19): siRNA sense strand
gacagaaucauggccaaga

SEQ ID NO: 1633052 - RNA, 19 nt, Homo sapiens
  misc_RNA (1)...(19): siRNA sense strand
cagagcacuucauaucuac

SEQ ID NO: 1633053 - RNA, 19 nt, Homo sapiens
  misc_RNA (1)...(19): siRNA sense strand
gagauugcuccguguuugu

SEQ ID NO: 1633054 - RNA, 19 nt, Homo sapiens
  misc_RNA (1)...(19): siRNA sense strand
uagaagccacagucauuga

SEQ ID NO: 1633055 - RNA, 19 nt, Homo sapiens
  misc_RNA (1)...(19): siRNA sense strand
gcaguauggcaggcucuuu

SEQ ID NO: 1633056 - RNA, 19 nt, Homo sapiens
  misc_RNA (1)...(19): siRNA sense strand
auucacagagcacuucaua

SEQ ID NO: 1633057 - RNA, 19 nt, Homo sapiens
  misc_RNA (1)...(19): siRNA sense strand
caguauggcaggcucuuug

SEQ ID NO: 1633058 - RNA, 19 nt, Homo sapiens
  misc_RNA (1)...(19): siRNA sense strand
ucucgaagguucaauucac

SEQ ID NO: 1633059 - RNA, 19 nt, Homo sapiens
  misc_RNA (1)...(19): siRNA sense strand
ucgugaagaaggugaauga

SEQ ID NO: 1633060 - RNA, 19 nt, Homo sapiens
  misc_RNA (1)...(19): siRNA sense strand
cgaagguucaauucacaga

SEQ ID NO: 1633061 - RNA, 19 nt, Homo sapiens
  misc_RNA (1)...(19): siRNA sense strand
cagaggucgugaagaaggu

SEQ ID NO: 1633062 - RNA, 19 nt, Homo sapiens
  misc_RNA (1)...(19): siRNA sense strand
ucaauucacagagcacuuc

SEQ ID NO: 1633063 - RNA, 19 nt, Homo sapiens
  misc_RNA (1)...(19): siRNA sense strand
gaccugaucuuaauuggaa

SEQ ID NO: 1633064 - RNA, 19 nt, Homo sapiens
  misc_RNA (1)...(19): siRNA sense strand
gauaaacagcauugagauu

SEQ ID NO: 1633065 - RNA, 19 nt, Homo sapiens
  misc_RNA (1)...(19): siRNA sense strand
gaauucgacuggagaaggu

SEQ ID NO: 1633066 - RNA, 19 nt, Homo sapiens
  misc_RNA (1)...(19): siRNA sense strand
gaagccacagucauugaaa

SEQ ID NO: 1633067 - RNA, 19 nt, Homo sapiens
  misc_RNA (1)...(19): siRNA sense strand
ugagauugcuccguguuug

SEQ ID NO: 1633068 - RNA, 19 nt, Homo sapiens
  misc_RNA (1)...(19): siRNA sense strand
ggaucuuguucgaguagaa

SEQ ID NO: 1633069 - RNA, 19 nt, Homo sapiens
  misc_RNA (1)...(19): siRNA sense strand
acagaaucauggccaagaa

SEQ ID NO: 1633070 - RNA, 19 nt, Homo sapiens
  misc_RNA (1)...(19): siRNA sense strand
ggauaaacagcauugagau

SEQ ID NO: 1633071 - RNA, 19 nt, Homo sapiens
  misc_RNA (1)...(19): siRNA sense strand
aaaggaucuuguucgagua

SEQ ID NO: 1633072 - RNA, 19 nt, Homo sapiens
  misc_RNA (1)...(19): siRNA sense strand
cagacuguccuccggauaa

SEQ ID NO: 1633073 - RNA, 19 nt, Homo sapiens
  misc_RNA (1)...(19): siRNA sense strand
gaaucauggccaagaauca

SEQ ID NO: 1633074 - RNA, 19 nt, Homo sapiens
  misc_RNA (1)...(19): siRNA sense strand
guagaagccacagucauug

SEQ ID NO: 1633075 - RNA, 19 nt, Homo sapiens
  misc_RNA (1)...(19): siRNA sense strand
uaaacagcauugagauugc

SEQ ID NO: 1633076 - RNA, 19 nt, Homo sapiens
  misc_RNA (1)...(19): siRNA sense strand
aguagaagccacagucauu

SEQ ID NO: 1633077 - RNA, 19 nt, Homo sapiens
  misc_RNA (1)...(19): siRNA sense strand
cggauaaacagcauugaga

SEQ ID NO: 1633078 - RNA, 19 nt, Homo sapiens
  misc_RNA (1)...(19): siRNA sense strand
gcagacuguccuccggaua

SEQ ID NO: 1633079 - RNA, 19 nt, Homo sapiens
  misc_RNA (1)...(19): siRNA sense strand
agacuguccuccggauaaa

SEQ ID NO: 1633080 - RNA, 19 nt, Homo sapiens
  misc_RNA (1)...(19): siRNA sense strand
auaaacagcauugagauug

SEQ ID NO: 1633081 - RNA, 19 nt, Homo sapiens
  misc_RNA (1)...(19): siRNA sense strand
ucauggccaagaaucauua

SEQ ID NO: 1633082 - RNA, 19 nt, Homo sapiens
  misc_RNA (1)...(19): siRNA sense strand
gaccuugcguguggagaga

SEQ ID NO: 1633083 - RNA, 19 nt, Homo sapiens
  misc_RNA (1)...(19): siRNA sense strand
ggagaagguccugcugguu

SEQ ID NO: 1633084 - RNA, 19 nt, Homo sapiens
  misc_RNA (1)...(19): siRNA sense strand
gacagaaucauggccaaga

SEQ ID NO: 1633085 - RNA, 19 nt, Homo sapiens
  misc_RNA (1)...(19): siRNA sense strand
gagauugcuccguguuugu

SEQ ID NO: 1633086 - RNA, 19 nt, Homo sapiens
  misc_RNA (1)...(19): siRNA sense strand
uagaagccacagucauuga

SEQ ID NO: 1633087 - RNA, 19 nt, Homo sapiens
  misc_RNA (1)...(19): siRNA sense strand
gcaguauggcaggcucuuu

SEQ ID NO: 1633088 - RNA, 19 nt, Homo sapiens
  misc_RNA (1)...(19): siRNA sense strand
caguauggcaggcucuuug

SEQ ID NO: 1633089 - RNA, 19 nt, Homo sapiens
  misc_RNA (1)...(19): siRNA sense strand
acccagagcuguacaaguu

SEQ ID NO: 1633090 - RNA, 19 nt, Homo sapiens
  misc_RNA (1)...(19): siRNA sense strand
gacgagcacuucaucuuuc

SEQ ID NO: 1633091 - RNA, 19 nt, Homo sapiens
  misc_RNA (1)...(19): siRNA sense strand
gugccacccucaccuauga

SEQ ID NO: 1633092 - RNA, 19 nt, Homo sapiens
  misc_RNA (1)...(19): siRNA sense strand
gaugaaccacaacaaguuu

SEQ ID NO: 1633093 - RNA, 19 nt, Homo sapiens
  misc_RNA (1)...(19): siRNA sense strand
gucaaagugucucugauga

SEQ ID NO: 1633094 - RNA, 19 nt, Homo sapiens
  misc_RNA (1)...(19): siRNA sense strand
caucaacccuguguacaau

SEQ ID NO: 1633095 - RNA, 19 nt, Homo sapiens
  misc_RNA (1)...(19): siRNA sense strand
aaugagaccuucagcuuca

SEQ ID NO: 1633096 - RNA, 19 nt, Homo sapiens
  misc_RNA (1)...(19): siRNA sense strand
gguucucgguggaauauga

SEQ ID NO: 1633097 - RNA, 19 nt, Homo sapiens
  misc_RNA (1)...(19): siRNA sense strand
caaagugucucugaugaac

SEQ ID NO: 1633098 - RNA, 19 nt, Homo sapiens
  misc_RNA (1)...(19): siRNA sense strand
ugacgagcacuucaucuuu

SEQ ID NO: 1633099 - RNA, 19 nt, Homo sapiens
  misc_RNA (1)...(19): siRNA sense strand
ucaacccuguguacaauga

SEQ ID NO: 1633100 - RNA, 19 nt, Homo sapiens
  misc_RNA (1)...(19): siRNA sense strand
acagaggcauugucagugu

SEQ ID NO: 1633101 - RNA, 19 nt, Homo sapiens
  misc_RNA (1)...(19): siRNA sense strand
gaagaaugagacccuagug

SEQ ID NO: 1633102 - RNA, 19 nt, Homo sapiens
  misc_RNA (1)...(19): siRNA sense strand
acaaugagaccuucagcuu

SEQ ID NO: 1633103 - RNA, 19 nt, Homo sapiens
  misc_RNA (1)...(19): siRNA sense strand
gcagcuggcccuggugauu

SEQ ID NO: 1633104 - RNA, 19 nt, Homo sapiens
  misc_RNA (1)...(19): siRNA sense strand
cccagagggugcugaaguu

SEQ ID NO: 1633105 - RNA, 19 nt, Homo sapiens
  misc_RNA (1)...(19): siRNA sense strand
ugaugaaccacaacaaguu

SEQ ID NO: 1633106 - RNA, 19 nt, Homo sapiens
  misc_RNA (1)...(19): siRNA sense strand
ugacuguggugcagaacau

SEQ ID NO: 1633107 - RNA, 19 nt, Homo sapiens
  misc_RNA (1)...(19): siRNA sense strand
ccuuggagaugcauguaug

SEQ ID NO: 1633108 - RNA, 19 nt, Homo sapiens
  misc_RNA (1)...(19): siRNA sense strand
ucaaagugucucugaugaa

SEQ ID NO: 1633109 - RNA, 19 nt, Homo sapiens
  misc_RNA (1)...(19): siRNA sense strand
ccuccaacccgcaguuuga

SEQ ID NO: 1633110 - RNA, 19 nt, Homo sapiens
  misc_RNA (1)...(19): siRNA sense strand
gccaccagcugugccauuc

SEQ ID NO: 1633111 - RNA, 19 nt, Homo sapiens
  misc_RNA (1)...(19): siRNA sense strand
ccaucaacccuguguacaa

SEQ ID NO: 1633112 - RNA, 19 nt, Homo sapiens
  misc_RNA (1)...(19): siRNA sense strand
caaguucccggaggacaaa

SEQ ID NO: 1633113 - RNA, 19 nt, Homo sapiens
  misc_RNA (1)...(19): siRNA sense strand
uuucagguguccagcaaga

SEQ ID NO: 1633114 - RNA, 19 nt, Homo sapiens
  misc_RNA (1)...(19): siRNA sense strand
ugucaaagugucucugaug

SEQ ID NO: 1633115 - RNA, 19 nt, Homo sapiens
  misc_RNA (1)...(19): siRNA sense strand
gcaguuugacgagcacuuc

SEQ ID NO: 1633116 - RNA, 19 nt, Homo sapiens
  misc_RNA (1)...(19): siRNA sense strand
caugcuaggacccaacuga

SEQ ID NO: 1633117 - RNA, 19 nt, Homo sapiens
  misc_RNA (1)...(19): siRNA sense strand
ggggcaagcugcugucugu

SEQ ID NO: 1633118 - RNA, 19 nt, Homo sapiens
  misc_RNA (1)...(19): siRNA sense strand
ccaggaggacagaggcauu

SEQ ID NO: 1633119 - RNA, 19 nt, Homo sapiens
  misc_RNA (1)...(19): siRNA sense strand
gaugccaccgagcuggaua

SEQ ID NO: 1633120 - RNA, 19 nt, Homo sapiens
  misc_RNA (1)...(19): siRNA sense strand
cagcuggcccuggugauug

SEQ ID NO: 1633121 - RNA, 19 nt, Homo sapiens
  misc_RNA (1)...(19): siRNA sense strand
ccaucaacccagagcugua

SEQ ID NO: 1633122 - RNA, 19 nt, Homo sapiens
  misc_RNA (1)...(19): siRNA sense strand
ucuaccugcugcccgauga

SEQ ID NO: 1633123 - RNA, 19 nt, Homo sapiens
  misc_RNA (1)...(19): siRNA sense strand
gccugacuguggugcagaa

SEQ ID NO: 1633124 - RNA, 19 nt, Homo sapiens
  misc_RNA (1)...(19): siRNA sense strand
acccagagcuguacaaguu

SEQ ID NO: 1633125 - RNA, 19 nt, Homo sapiens
  misc_RNA (1)...(19): siRNA sense strand
gacgagcacuucaucuuuc

SEQ ID NO: 1633126 - RNA, 19 nt, Homo sapiens
  misc_RNA (1)...(19): siRNA sense strand
gugccacccucaccuauga

SEQ ID NO: 1633127 - RNA, 19 nt, Homo sapiens
  misc_RNA (1)...(19): siRNA sense strand
gaugaaccacaacaaguuu

SEQ ID NO: 1633128 - RNA, 19 nt, Homo sapiens
  misc_RNA (1)...(19): siRNA sense strand
gucaaagugucucugauga

SEQ ID NO: 1633129 - RNA, 19 nt, Homo sapiens
  misc_RNA (1)...(19): siRNA sense strand
caucaacccuguguacaau

SEQ ID NO: 1633130 - RNA, 19 nt, Homo sapiens
  misc_RNA (1)...(19): siRNA sense strand
aaugagaccuucagcuuca

SEQ ID NO: 1633131 - RNA, 19 nt, Homo sapiens
  misc_RNA (1)...(19): siRNA sense strand
gguucucgguggaauauga

SEQ ID NO: 1633132 - RNA, 19 nt, Homo sapiens
  misc_RNA (1)...(19): siRNA sense strand
caaagugucucugaugaac

SEQ ID NO: 1633133 - RNA, 19 nt, Homo sapiens
  misc_RNA (1)...(19): siRNA sense strand
ugacgagcacuucaucuuu

SEQ ID NO: 1633134 - RNA, 19 nt, Homo sapiens
  misc_RNA (1)...(19): siRNA sense strand
ucaacccuguguacaauga

SEQ ID NO: 1633135 - RNA, 19 nt, Homo sapiens
  misc_RNA (1)...(19): siRNA sense strand
acagaggcauugucagugu

SEQ ID NO: 1633136 - RNA, 19 nt, Homo sapiens
  misc_RNA (1)...(19): siRNA sense strand
gaagaaugagacccuagug

SEQ ID NO: 1633137 - RNA, 19 nt, Homo sapiens
  misc_RNA (1)...(19): siRNA sense strand
acaaugagaccuucagcuu

SEQ ID NO: 1633138 - RNA, 19 nt, Homo sapiens
  misc_RNA (1)...(19): siRNA sense strand
gcagcuggcccuggugauu

SEQ ID NO: 1633139 - RNA, 19 nt, Homo sapiens
  misc_RNA (1)...(19): siRNA sense strand
cccagagggugcugaaguu

SEQ ID NO: 1633140 - RNA, 19 nt, Homo sapiens
  misc_RNA (1)...(19): siRNA sense strand
ugaugaaccacaacaaguu

SEQ ID NO: 1633141 - RNA, 19 nt, Homo sapiens
  misc_RNA (1)...(19): siRNA sense strand
ugacuguggugcagaacau

SEQ ID NO: 1633142 - RNA, 19 nt, Homo sapiens
  misc_RNA (1)...(19): siRNA sense strand
ccuuggagaugcauguaug

SEQ ID NO: 1633143 - RNA, 19 nt, Homo sapiens
  misc_RNA (1)...(19): siRNA sense strand
ucaaagugucucugaugaa

SEQ ID NO: 1633144 - RNA, 19 nt, Homo sapiens
  misc_RNA (1)...(19): siRNA sense strand
ccuccaacccgcaguuuga

SEQ ID NO: 1633145 - RNA, 19 nt, Homo sapiens
  misc_RNA (1)...(19): siRNA sense strand
gccaccagcugugccauuc

SEQ ID NO: 1633146 - RNA, 19 nt, Homo sapiens
  misc_RNA (1)...(19): siRNA sense strand
ccaucaacccuguguacaa

SEQ ID NO: 1633147 - RNA, 19 nt, Homo sapiens
  misc_RNA (1)...(19): siRNA sense strand
caaguucccggaggacaaa

SEQ ID NO: 1633148 - RNA, 19 nt, Homo sapiens
  misc_RNA (1)...(19): siRNA sense strand
uuucagguguccagcaaga

SEQ ID NO: 1633149 - RNA, 19 nt, Homo sapiens
  misc_RNA (1)...(19): siRNA sense strand
ugucaaagugucucugaug

SEQ ID NO: 1633150 - RNA, 19 nt, Homo sapiens
  misc_RNA (1)...(19): siRNA sense strand
gcaguuugacgagcacuuc

SEQ ID NO: 1633151 - RNA, 19 nt, Homo sapiens
  misc_RNA (1)...(19): siRNA sense strand
caugcuaggacccaacuga

SEQ ID NO: 1633152 - RNA, 19 nt, Homo sapiens
  misc_RNA (1)...(19): siRNA sense strand
ggggcaagcugcugucugu

SEQ ID NO: 1633153 - RNA, 19 nt, Homo sapiens
  misc_RNA (1)...(19): siRNA sense strand
ccaggaggacagaggcauu

SEQ ID NO: 1633154 - RNA, 19 nt, Homo sapiens
  misc_RNA (1)...(19): siRNA sense strand
gaugccaccgagcuggaua

SEQ ID NO: 1633155 - RNA, 19 nt, Homo sapiens
  misc_RNA (1)...(19): siRNA sense strand
cagcuggcccuggugauug

SEQ ID NO: 1633156 - RNA, 19 nt, Homo sapiens
  misc_RNA (1)...(19): siRNA sense strand
ccaucaacccagagcugua

SEQ ID NO: 1633157 - RNA, 19 nt, Homo sapiens
  misc_RNA (1)...(19): siRNA sense strand
ucuaccugcugcccgauga

SEQ ID NO: 1633158 - RNA, 19 nt, Homo sapiens
  misc_RNA (1)...(19): siRNA sense strand
gccugacuguggugcagaa

SEQ ID NO: 1633159 - RNA, 19 nt, Homo sapiens
  misc_RNA (1)...(19): siRNA sense strand
gaucccagcucuccuguug

SEQ ID NO: 1633160 - RNA, 19 nt, Homo sapiens
  misc_RNA (1)...(19): siRNA sense strand
cugcgaagguggagaguua

SEQ ID NO: 1633161 - RNA, 19 nt, Homo sapiens
  misc_RNA (1)...(19): siRNA sense strand
gaaagagucaucagaagug

SEQ ID NO: 1633162 - RNA, 19 nt, Homo sapiens
  misc_RNA (1)...(19): siRNA sense strand
gggagucgcugcaagaauc

SEQ ID NO: 1633163 - RNA, 19 nt, Homo sapiens
  misc_RNA (1)...(19): siRNA sense strand
ccgagaaccucacagagaa

SEQ ID NO: 1633164 - RNA, 19 nt, Homo sapiens
  misc_RNA (1)...(19): siRNA sense strand
ggaaggaagggcacuguga

SEQ ID NO: 1633165 - RNA, 19 nt, Homo sapiens
  misc_RNA (1)...(19): siRNA sense strand
gaacgagaggcaccagauu

SEQ ID NO: 1633166 - RNA, 19 nt, Homo sapiens
  misc_RNA (1)...(19): siRNA sense strand
gguagaucuucuucacaua

SEQ ID NO: 1633167 - RNA, 19 nt, Homo sapiens
  misc_RNA (1)...(19): siRNA sense strand
caggagagcagaugugauu

SEQ ID NO: 1633168 - RNA, 19 nt, Homo sapiens
  misc_RNA (1)...(19): siRNA sense strand
gaaggaagggcacugugaa

SEQ ID NO: 1633169 - RNA, 19 nt, Homo sapiens
  misc_RNA (1)...(19): siRNA sense strand
ggaaagagucaucagaagu

SEQ ID NO: 1633170 - RNA, 19 nt, Homo sapiens
  misc_RNA (1)...(19): siRNA sense strand
gcugguguguguuuccuuu

SEQ ID NO: 1633171 - RNA, 19 nt, Homo sapiens
  misc_RNA (1)...(19): siRNA sense strand
ggguagaucuucuucacau

SEQ ID NO: 1633172 - RNA, 19 nt, Homo sapiens
  misc_RNA (1)...(19): siRNA sense strand
gaauguaaggaucaucaaa

SEQ ID NO: 1633173 - RNA, 19 nt, Homo sapiens
  misc_RNA (1)...(19): siRNA sense strand
gcaggaaagagucaucaga

SEQ ID NO: 1633174 - RNA, 19 nt, Homo sapiens
  misc_RNA (1)...(19): siRNA sense strand
guagaucuucuucacauau

SEQ ID NO: 1633175 - RNA, 19 nt, Homo sapiens
  misc_RNA (1)...(19): siRNA sense strand
ugacagaggaauuccagaa

SEQ ID NO: 1633176 - RNA, 19 nt, Homo sapiens
  misc_RNA (1)...(19): siRNA sense strand
caggaaagagucaucagaa

SEQ ID NO: 1633177 - RNA, 19 nt, Homo sapiens
  misc_RNA (1)...(19): siRNA sense strand
gaagccagcaggaaagagu

SEQ ID NO: 1633178 - RNA, 19 nt, Homo sapiens
  misc_RNA (1)...(19): siRNA sense strand
gagaguuaccggugucgaa

SEQ ID NO: 1633179 - RNA, 19 nt, Homo sapiens
  misc_RNA (1)...(19): siRNA sense strand
ggaagggcacugugaagca

SEQ ID NO: 1633180 - RNA, 19 nt, Homo sapiens
  misc_RNA (1)...(19): siRNA sense strand
uccgggaccucgaucauga

SEQ ID NO: 1633181 - RNA, 19 nt, Homo sapiens
  misc_RNA (1)...(19): siRNA sense strand
ggagacugacagaggaauu

SEQ ID NO: 1633182 - RNA, 19 nt, Homo sapiens
  misc_RNA (1)...(19): siRNA sense strand
acuugaagcuggugugugu

SEQ ID NO: 1633183 - RNA, 19 nt, Homo sapiens
  misc_RNA (1)...(19): siRNA sense strand
gucaaggguuccacacugu

SEQ ID NO: 1633184 - RNA, 19 nt, Homo sapiens
  misc_RNA (1)...(19): siRNA sense strand
caaagccgucgguuacaga

SEQ ID NO: 1633185 - RNA, 19 nt, Homo sapiens
  misc_RNA (1)...(19): siRNA sense strand
cagaauguaaggaucauca

SEQ ID NO: 1633186 - RNA, 19 nt, Homo sapiens
  misc_RNA (1)...(19): siRNA sense strand
ggagagcagaugugauucu

SEQ ID NO: 1633187 - RNA, 19 nt, Homo sapiens
  misc_RNA (1)...(19): siRNA sense strand
caaggguuccacacuguug

SEQ ID NO: 1633188 - RNA, 19 nt, Homo sapiens
  misc_RNA (1)...(19): siRNA sense strand
ggacauuccuuuguaaaac

SEQ ID NO: 1633189 - RNA, 19 nt, Homo sapiens
  misc_RNA (1)...(19): siRNA sense strand
aaagagucaucagaagugu

SEQ ID NO: 1633190 - RNA, 19 nt, Homo sapiens
  misc_RNA (1)...(19): siRNA sense strand
ucagggacccauuugugaa

SEQ ID NO: 1633191 - RNA, 19 nt, Homo sapiens
  misc_RNA (1)...(19): siRNA sense strand
aaccugggcuggaagucaa

SEQ ID NO: 1633192 - RNA, 19 nt, Homo sapiens
  misc_RNA (1)...(19): siRNA sense strand
gacccgagaaccucacaga

SEQ ID NO: 1633193 - RNA, 19 nt, Homo sapiens
  misc_RNA (1)...(19): siRNA sense strand
caacgccgcaggcacagau

SEQ ID NO: 1633194 - RNA, 19 nt, Homo sapiens
  misc_RNA (1)...(19): siRNA sense strand
uggcugacccgacaucuca

SEQ ID NO: 1633195 - RNA, 19 nt, Homo sapiens
  misc_RNA (1)...(19): siRNA sense strand
aggaaagagucaucagaag

SEQ ID NO: 1633196 - RNA, 19 nt, Homo sapiens
  misc_RNA (1)...(19): siRNA sense strand
gagacugacagaggaauuc

SEQ ID NO: 1633197 - RNA, 19 nt, Homo sapiens
  misc_RNA (1)...(19): siRNA sense strand
cccgagaaccucacagaga

SEQ ID NO: 1633198 - RNA, 19 nt, Homo sapiens
  misc_RNA (1)...(19): siRNA sense strand
agucaaagccgucgguuac

SEQ ID NO: 1633199 - RNA, 19 nt, Homo sapiens
  misc_RNA (1)...(19): siRNA sense strand
ggcaggagagcagauguga

SEQ ID NO: 1633200 - RNA, 19 nt, Homo sapiens
  misc_RNA (1)...(19): siRNA sense strand
gaggagacugacagaggaa

SEQ ID NO: 1633201 - RNA, 19 nt, Homo sapiens
  misc_RNA (1)...(19): siRNA sense strand
ucaaagccgucgguuacag

SEQ ID NO: 1633202 - RNA, 19 nt, Homo sapiens
  misc_RNA (1)...(19): siRNA sense strand
caucucagggacccauuug

SEQ ID NO: 1633203 - RNA, 19 nt, Homo sapiens
  misc_RNA (1)...(19): siRNA sense strand
gagaaccucacagagaauc

SEQ ID NO: 1633204 - RNA, 19 nt, Homo sapiens
  misc_RNA (1)...(19): siRNA sense strand
guugggagucgcugcaaga

SEQ ID NO: 1633205 - RNA, 19 nt, Homo sapiens
  misc_RNA (1)...(19): siRNA sense strand
cugcgaagguggagaguua

SEQ ID NO: 1633206 - RNA, 19 nt, Homo sapiens
  misc_RNA (1)...(19): siRNA sense strand
gggagucgcugcaagaauc

SEQ ID NO: 1633207 - RNA, 19 nt, Homo sapiens
  misc_RNA (1)...(19): siRNA sense strand
gaacgagaggcaccagauu

SEQ ID NO: 1633208 - RNA, 19 nt, Homo sapiens
  misc_RNA (1)...(19): siRNA sense strand
gcugguguguguuuccuuu

SEQ ID NO: 1633209 - RNA, 19 nt, Homo sapiens
  misc_RNA (1)...(19): siRNA sense strand
gagaguuaccggugucgaa

SEQ ID NO: 1633210 - RNA, 19 nt, Homo sapiens
  misc_RNA (1)...(19): siRNA sense strand
gucaaggguuccacacugu

SEQ ID NO: 1633211 - RNA, 19 nt, Homo sapiens
  misc_RNA (1)...(19): siRNA sense strand
acuugaagcuggugugugu

SEQ ID NO: 1633212 - RNA, 19 nt, Homo sapiens
  misc_RNA (1)...(19): siRNA sense strand
caaggguuccacacuguug

SEQ ID NO: 1633213 - RNA, 19 nt, Homo sapiens
  misc_RNA (1)...(19): siRNA sense strand
ucagggacccauuugugaa

SEQ ID NO: 1633214 - RNA, 19 nt, Homo sapiens
  misc_RNA (1)...(19): siRNA sense strand
caacgccgcaggcacagau

SEQ ID NO: 1633215 - RNA, 19 nt, Homo sapiens
  misc_RNA (1)...(19): siRNA sense strand
uggcugacccgacaucuca

SEQ ID NO: 1633216 - RNA, 19 nt, Homo sapiens
  misc_RNA (1)...(19): siRNA sense strand
caucucagggacccauuug

SEQ ID NO: 1633217 - RNA, 19 nt, Homo sapiens
  misc_RNA (1)...(19): siRNA sense strand
guugggagucgcugcaaga

SEQ ID NO: 1633218 - RNA, 19 nt, Homo sapiens
  misc_RNA (1)...(19): siRNA sense strand
gcagauggaugguaucaua

SEQ ID NO: 1633219 - RNA, 19 nt, Homo sapiens
  misc_RNA (1)...(19): siRNA sense strand
ggaaacagaugagaaagaa

SEQ ID NO: 1633220 - RNA, 19 nt, Homo sapiens
  misc_RNA (1)...(19): siRNA sense strand
gagagaagauucgagauuu

SEQ ID NO: 1633221 - RNA, 19 nt, Homo sapiens
  misc_RNA (1)...(19): siRNA sense strand
gaacggagauguguaucaa

SEQ ID NO: 1633222 - RNA, 19 nt, Homo sapiens
  misc_RNA (1)...(19): siRNA sense strand
cagaaacgcuuguugaaug

SEQ ID NO: 1633223 - RNA, 19 nt, Homo sapiens
  misc_RNA (1)...(19): siRNA sense strand
ggagauguguaucaagaaa

SEQ ID NO: 1633224 - RNA, 19 nt, Homo sapiens
  misc_RNA (1)...(19): siRNA sense strand
gaaggugaaugccacagaa

SEQ ID NO: 1633225 - RNA, 19 nt, Homo sapiens
  misc_RNA (1)...(19): siRNA sense strand
aagaaaggcuggcacguuu

SEQ ID NO: 1633226 - RNA, 19 nt, Homo sapiens
  misc_RNA (1)...(19): siRNA sense strand
cuaaggcucuggaauauuc

SEQ ID NO: 1633227 - RNA, 19 nt, Homo sapiens
  misc_RNA (1)...(19): siRNA sense strand
guucuaaggcucuggaaua

SEQ ID NO: 1633228 - RNA, 19 nt, Homo sapiens
  misc_RNA (1)...(19): siRNA sense strand
ggagagaagauucgagauu

SEQ ID NO: 1633229 - RNA, 19 nt, Homo sapiens
  misc_RNA (1)...(19): siRNA sense strand
gauggaaacagaugagaaa

SEQ ID NO: 1633230 - RNA, 19 nt, Homo sapiens
  misc_RNA (1)...(19): siRNA sense strand
agaccugcguggauuguua

SEQ ID NO: 1633231 - RNA, 19 nt, Homo sapiens
  misc_RNA (1)...(19): siRNA sense strand
gauucgagauuuggaguuu

SEQ ID NO: 1633232 - RNA, 19 nt, Homo sapiens
  misc_RNA (1)...(19): siRNA sense strand
gaugccagaucccagauuc

SEQ ID NO: 1633233 - RNA, 19 nt, Homo sapiens
  misc_RNA (1)...(19): siRNA sense strand
gcagaaacgcuuguugaau

SEQ ID NO: 1633234 - RNA, 19 nt, Homo sapiens
  misc_RNA (1)...(19): siRNA sense strand
caagaaaggcuggcacguu

SEQ ID NO: 1633235 - RNA, 19 nt, Homo sapiens
  misc_RNA (1)...(19): siRNA sense strand
cagcagaaacgcuuguuga

SEQ ID NO: 1633236 - RNA, 19 nt, Homo sapiens
  misc_RNA (1)...(19): siRNA sense strand
agagaagauucgagauuug

SEQ ID NO: 1633237 - RNA, 19 nt, Homo sapiens
  misc_RNA (1)...(19): siRNA sense strand
gaaaggcuggcacguuuag

SEQ ID NO: 1633238 - RNA, 19 nt, Homo sapiens
  misc_RNA (1)...(19): siRNA sense strand
ugagaaagaaggcuugaga

SEQ ID NO: 1633239 - RNA, 19 nt, Homo sapiens
  misc_RNA (1)...(19): siRNA sense strand
uggaagaccugcguggauu

SEQ ID NO: 1633240 - RNA, 19 nt, Homo sapiens
  misc_RNA (1)...(19): siRNA sense strand
gaaugccacagaagaaaug

SEQ ID NO: 1633241 - RNA, 19 nt, Homo sapiens
  misc_RNA (1)...(19): siRNA sense strand
gcacagagagaaggugaau

SEQ ID NO: 1633242 - RNA, 19 nt, Homo sapiens
  misc_RNA (1)...(19): siRNA sense strand
aaugacaaauggacaccua

SEQ ID NO: 1633243 - RNA, 19 nt, Homo sapiens
  misc_RNA (1)...(19): siRNA sense strand
uagagaugauggaaacaga

SEQ ID NO: 1633244 - RNA, 19 nt, Homo sapiens
  misc_RNA (1)...(19): siRNA sense strand
ugaugcaagugacauguug

SEQ ID NO: 1633245 - RNA, 19 nt, Homo sapiens
  misc_RNA (1)...(19): siRNA sense strand
ucagguaaguguguuaaca

SEQ ID NO: 1633246 - RNA, 19 nt, Homo sapiens
  misc_RNA (1)...(19): siRNA sense strand
acggagauguguaucaaga

SEQ ID NO: 1633247 - RNA, 19 nt, Homo sapiens
  misc_RNA (1)...(19): siRNA sense strand
ggugaaugccacagaagaa

SEQ ID NO: 1633248 - RNA, 19 nt, Homo sapiens
  misc_RNA (1)...(19): siRNA sense strand
gaauauuccaaugggauuu

SEQ ID NO: 1633249 - RNA, 19 nt, Homo sapiens
  misc_RNA (1)...(19): siRNA sense strand
ggaacggagauguguauca

SEQ ID NO: 1633250 - RNA, 19 nt, Homo sapiens
  misc_RNA (1)...(19): siRNA sense strand
uaucauagcagguucuaag

SEQ ID NO: 1633251 - RNA, 19 nt, Homo sapiens
  misc_RNA (1)...(19): siRNA sense strand
cugcguggauuguuagaga

SEQ ID NO: 1633252 - RNA, 19 nt, Homo sapiens
  misc_RNA (1)...(19): siRNA sense strand
uggagcagauggaugguau

SEQ ID NO: 1633253 - RNA, 19 nt, Homo sapiens
  misc_RNA (1)...(19): siRNA sense strand
agaaagaaggcuugagaug

SEQ ID NO: 1633254 - RNA, 19 nt, Homo sapiens
  misc_RNA (1)...(19): siRNA sense strand
gagaugauggaaacagaug

SEQ ID NO: 1633255 - RNA, 19 nt, Homo sapiens
  misc_RNA (1)...(19): siRNA sense strand
ggaagaccugcguggauug

SEQ ID NO: 1633256 - RNA, 19 nt, Homo sapiens
  misc_RNA (1)...(19): siRNA sense strand
ugauaaagaaucccucguu

SEQ ID NO: 1633257 - RNA, 19 nt, Homo sapiens
  misc_RNA (1)...(19): siRNA sense strand
gaugguaucauagcagguu

SEQ ID NO: 1633258 - RNA, 19 nt, Homo sapiens
  misc_RNA (1)...(19): siRNA sense strand
gauggaugguaucauagca

SEQ ID NO: 1633259 - RNA, 19 nt, Homo sapiens
  misc_RNA (1)...(19): siRNA sense strand
gagaaagaaggcuugagau

SEQ ID NO: 1633260 - RNA, 19 nt, Homo sapiens
  misc_RNA (1)...(19): siRNA sense strand
gagcagauggaugguauca

SEQ ID NO: 1633261 - RNA, 19 nt, Homo sapiens
  misc_RNA (1)...(19): siRNA sense strand
gaauggcuucagagucaaa

SEQ ID NO: 1633262 - RNA, 19 nt, Homo sapiens
  misc_RNA (1)...(19): siRNA sense strand
agaaacgcuuguugaaugg

SEQ ID NO: 1633263 - RNA, 19 nt, Homo sapiens
  misc_RNA (1)...(19): siRNA sense strand
agaaaggcuggcacguuua

SEQ ID NO: 1633264 - RNA, 19 nt, Homo sapiens
  misc_RNA (1)...(19): siRNA sense strand
ccagaucccagauucaaca

SEQ ID NO: 1633265 - RNA, 19 nt, Homo sapiens
  misc_RNA (1)...(19): siRNA sense strand
gcucagggagagaagauuc

SEQ ID NO: 1633266 - RNA, 19 nt, Homo sapiens
  misc_RNA (1)...(19): siRNA sense strand
gagaagauucgagauuugg

SEQ ID NO: 1633267 - RNA, 19 nt, Homo sapiens
  misc_RNA (1)...(19): siRNA sense strand
uguuagagaugauggaaac

SEQ ID NO: 1633268 - RNA, 19 nt, Homo sapiens
  misc_RNA (1)...(19): siRNA sense strand
gugaaugccacagaagaaa

SEQ ID NO: 1633269 - RNA, 19 nt, Homo sapiens
  misc_RNA (1)...(19): siRNA sense strand
gaagaccugcguggauugu

SEQ ID NO: 1633270 - RNA, 19 nt, Homo sapiens
  misc_RNA (1)...(19): siRNA sense strand
ucucccaccucuccauuca

SEQ ID NO: 1633271 - RNA, 19 nt, Homo sapiens
  misc_RNA (1)...(19): siRNA sense strand
ucccaccucuccauucaug

SEQ ID NO: 1633272 - RNA, 19 nt, Homo sapiens
  misc_RNA (1)...(19): siRNA sense strand
gauuuggaguuuugucuug

SEQ ID NO: 1633273 - RNA, 19 nt, Homo sapiens
  misc_RNA (1)...(19): siRNA sense strand
uggaaacagaugagaaaga

SEQ ID NO: 1633274 - RNA, 19 nt, Homo sapiens
  misc_RNA (1)...(19): siRNA sense strand
acagagagaaggugaaugc

SEQ ID NO: 1633275 - RNA, 19 nt, Homo sapiens
  misc_RNA (1)...(19): siRNA sense strand
caacagcagaaacgcuugu

SEQ ID NO: 1633276 - RNA, 19 nt, Homo sapiens
  misc_RNA (1)...(19): siRNA sense strand
gaugagaaagaaggcuuga

SEQ ID NO: 1633277 - RNA, 19 nt, Homo sapiens
  misc_RNA (1)...(19): siRNA sense strand
agguaaguguguuaacaga

SEQ ID NO: 1633278 - RNA, 19 nt, Homo sapiens
  misc_RNA (1)...(19): siRNA sense strand
ugaaugccacagaagaaau

SEQ ID NO: 1633279 - RNA, 19 nt, Homo sapiens
  misc_RNA (1)...(19): siRNA sense strand
uucuaaggcucuggaauau

SEQ ID NO: 1633280 - RNA, 19 nt, Homo sapiens
  misc_RNA (1)...(19): siRNA sense strand
agauguguaucaagaaagg

SEQ ID NO: 1633281 - RNA, 19 nt, Homo sapiens
  misc_RNA (1)...(19): siRNA sense strand
uggcuucagagucaaauga

SEQ ID NO: 1633282 - RNA, 19 nt, Homo sapiens
  misc_RNA (1)...(19): siRNA sense strand
uugaagagcacagagagaa

SEQ ID NO: 1633283 - RNA, 19 nt, Homo sapiens
  misc_RNA (1)...(19): siRNA sense strand
gcuggcacguuuagaaaau

SEQ ID NO: 1633284 - RNA, 19 nt, Homo sapiens
  misc_RNA (1)...(19): siRNA sense strand
gcagauggaugguaucaua

SEQ ID NO: 1633285 - RNA, 19 nt, Homo sapiens
  misc_RNA (1)...(19): siRNA sense strand
ggaaacagaugagaaagaa

SEQ ID NO: 1633286 - RNA, 19 nt, Homo sapiens
  misc_RNA (1)...(19): siRNA sense strand
gagagaagauucgagauuu

SEQ ID NO: 1633287 - RNA, 19 nt, Homo sapiens
  misc_RNA (1)...(19): siRNA sense strand
gaacggagauguguaucaa

SEQ ID NO: 1633288 - RNA, 19 nt, Homo sapiens
  misc_RNA (1)...(19): siRNA sense strand
cagaaacgcuuguugaaug

SEQ ID NO: 1633289 - RNA, 19 nt, Homo sapiens
  misc_RNA (1)...(19): siRNA sense strand
ggagauguguaucaagaaa

SEQ ID NO: 1633290 - RNA, 19 nt, Homo sapiens
  misc_RNA (1)...(19): siRNA sense strand
gaaggugaaugccacagaa

SEQ ID NO: 1633291 - RNA, 19 nt, Homo sapiens
  misc_RNA (1)...(19): siRNA sense strand
aagaaaggcuggcacguuu

SEQ ID NO: 1633292 - RNA, 19 nt, Homo sapiens
  misc_RNA (1)...(19): siRNA sense strand
cuaaggcucuggaauauuc

SEQ ID NO: 1633293 - RNA, 19 nt, Homo sapiens
  misc_RNA (1)...(19): siRNA sense strand
guucuaaggcucuggaaua

SEQ ID NO: 1633294 - RNA, 19 nt, Homo sapiens
  misc_RNA (1)...(19): siRNA sense strand
ggagagaagauucgagauu

SEQ ID NO: 1633295 - RNA, 19 nt, Homo sapiens
  misc_RNA (1)...(19): siRNA sense strand
gauggaaacagaugagaaa

SEQ ID NO: 1633296 - RNA, 19 nt, Homo sapiens
  misc_RNA (1)...(19): siRNA sense strand
agaccugcguggauuguua

SEQ ID NO: 1633297 - RNA, 19 nt, Homo sapiens
  misc_RNA (1)...(19): siRNA sense strand
gauucgagauuuggaguuu

SEQ ID NO: 1633298 - RNA, 19 nt, Homo sapiens
  misc_RNA (1)...(19): siRNA sense strand
gaugccagaucccagauuc

SEQ ID NO: 1633299 - RNA, 19 nt, Homo sapiens
  misc_RNA (1)...(19): siRNA sense strand
gcagaaacgcuuguugaau

SEQ ID NO: 1633300 - RNA, 19 nt, Homo sapiens
  misc_RNA (1)...(19): siRNA sense strand
caagaaaggcuggcacguu

SEQ ID NO: 1633301 - RNA, 19 nt, Homo sapiens
  misc_RNA (1)...(19): siRNA sense strand
cagcagaaacgcuuguuga

SEQ ID NO: 1633302 - RNA, 19 nt, Homo sapiens
  misc_RNA (1)...(19): siRNA sense strand
agagaagauucgagauuug

SEQ ID NO: 1633303 - RNA, 19 nt, Homo sapiens
  misc_RNA (1)...(19): siRNA sense strand
gaaaggcuggcacguuuag

SEQ ID NO: 1633304 - RNA, 19 nt, Homo sapiens
  misc_RNA (1)...(19): siRNA sense strand
ugagaaagaaggcuugaga

SEQ ID NO: 1633305 - RNA, 19 nt, Homo sapiens
  misc_RNA (1)...(19): siRNA sense strand
uggaagaccugcguggauu

SEQ ID NO: 1633306 - RNA, 19 nt, Homo sapiens
  misc_RNA (1)...(19): siRNA sense strand
gaaugccacagaagaaaug

SEQ ID NO: 1633307 - RNA, 19 nt, Homo sapiens
  misc_RNA (1)...(19): siRNA sense strand
gcacagagagaaggugaau

SEQ ID NO: 1633308 - RNA, 19 nt, Homo sapiens
  misc_RNA (1)...(19): siRNA sense strand
aaugacaaauggacaccua

SEQ ID NO: 1633309 - RNA, 19 nt, Homo sapiens
  misc_RNA (1)...(19): siRNA sense strand
uagagaugauggaaacaga

SEQ ID NO: 1633310 - RNA, 19 nt, Homo sapiens
  misc_RNA (1)...(19): siRNA sense strand
ugaugcaagugacauguug

SEQ ID NO: 1633311 - RNA, 19 nt, Homo sapiens
  misc_RNA (1)...(19): siRNA sense strand
ucagguaaguguguuaaca

SEQ ID NO: 1633312 - RNA, 19 nt, Homo sapiens
  misc_RNA (1)...(19): siRNA sense strand
acggagauguguaucaaga

SEQ ID NO: 1633313 - RNA, 19 nt, Homo sapiens
  misc_RNA (1)...(19): siRNA sense strand
ggugaaugccacagaagaa

SEQ ID NO: 1633314 - RNA, 19 nt, Homo sapiens
  misc_RNA (1)...(19): siRNA sense strand
gaauauuccaaugggauuu

SEQ ID NO: 1633315 - RNA, 19 nt, Homo sapiens
  misc_RNA (1)...(19): siRNA sense strand
ggaacggagauguguauca

SEQ ID NO: 1633316 - RNA, 19 nt, Homo sapiens
  misc_RNA (1)...(19): siRNA sense strand
uaucauagcagguucuaag

SEQ ID NO: 1633317 - RNA, 19 nt, Homo sapiens
  misc_RNA (1)...(19): siRNA sense strand
cugcguggauuguuagaga

SEQ ID NO: 1633318 - RNA, 19 nt, Homo sapiens
  misc_RNA (1)...(19): siRNA sense strand
uggagcagauggaugguau

SEQ ID NO: 1633319 - RNA, 19 nt, Homo sapiens
  misc_RNA (1)...(19): siRNA sense strand
agaaagaaggcuugagaug

SEQ ID NO: 1633320 - RNA, 19 nt, Homo sapiens
  misc_RNA (1)...(19): siRNA sense strand
gagaugauggaaacagaug

SEQ ID NO: 1633321 - RNA, 19 nt, Homo sapiens
  misc_RNA (1)...(19): siRNA sense strand
ggaagaccugcguggauug

SEQ ID NO: 1633322 - RNA, 19 nt, Homo sapiens
  misc_RNA (1)...(19): siRNA sense strand
ugauaaagaaucccucguu

SEQ ID NO: 1633323 - RNA, 19 nt, Homo sapiens
  misc_RNA (1)...(19): siRNA sense strand
gaugguaucauagcagguu

SEQ ID NO: 1633324 - RNA, 19 nt, Homo sapiens
  misc_RNA (1)...(19): siRNA sense strand
gauggaugguaucauagca

SEQ ID NO: 1633325 - RNA, 19 nt, Homo sapiens
  misc_RNA (1)...(19): siRNA sense strand
gagaaagaaggcuugagau

SEQ ID NO: 1633326 - RNA, 19 nt, Homo sapiens
  misc_RNA (1)...(19): siRNA sense strand
gagcagauggaugguauca

SEQ ID NO: 1633327 - RNA, 19 nt, Homo sapiens
  misc_RNA (1)...(19): siRNA sense strand
gaauggcuucagagucaaa

SEQ ID NO: 1633328 - RNA, 19 nt, Homo sapiens
  misc_RNA (1)...(19): siRNA sense strand
agaaacgcuuguugaaugg

SEQ ID NO: 1633329 - RNA, 19 nt, Homo sapiens
  misc_RNA (1)...(19): siRNA sense strand
agaaaggcuggcacguuua

SEQ ID NO: 1633330 - RNA, 19 nt, Homo sapiens
  misc_RNA (1)...(19): siRNA sense strand
ccagaucccagauucaaca

SEQ ID NO: 1633331 - RNA, 19 nt, Homo sapiens
  misc_RNA (1)...(19): siRNA sense strand
gcucagggagagaagauuc

SEQ ID NO: 1633332 - RNA, 19 nt, Homo sapiens
  misc_RNA (1)...(19): siRNA sense strand
gagaagauucgagauuugg

SEQ ID NO: 1633333 - RNA, 19 nt, Homo sapiens
  misc_RNA (1)...(19): siRNA sense strand
uguuagagaugauggaaac

SEQ ID NO: 1633334 - RNA, 19 nt, Homo sapiens
  misc_RNA (1)...(19): siRNA sense strand
gugaaugccacagaagaaa

SEQ ID NO: 1633335 - RNA, 19 nt, Homo sapiens
  misc_RNA (1)...(19): siRNA sense strand
gaagaccugcguggauugu

SEQ ID NO: 1633336 - RNA, 19 nt, Homo sapiens
  misc_RNA (1)...(19): siRNA sense strand
ucucccaccucuccauuca

SEQ ID NO: 1633337 - RNA, 19 nt, Homo sapiens
  misc_RNA (1)...(19): siRNA sense strand
ucccaccucuccauucaug

SEQ ID NO: 1633338 - RNA, 19 nt, Homo sapiens
  misc_RNA (1)...(19): siRNA sense strand
gauuuggaguuuugucuug

SEQ ID NO: 1633339 - RNA, 19 nt, Homo sapiens
  misc_RNA (1)...(19): siRNA sense strand
uggaaacagaugagaaaga

SEQ ID NO: 1633340 - RNA, 19 nt, Homo sapiens
  misc_RNA (1)...(19): siRNA sense strand
acagagagaaggugaaugc

SEQ ID NO: 1633341 - RNA, 19 nt, Homo sapiens
  misc_RNA (1)...(19): siRNA sense strand
caacagcagaaacgcuugu

SEQ ID NO: 1633342 - RNA, 19 nt, Homo sapiens
  misc_RNA (1)...(19): siRNA sense strand
gaugagaaagaaggcuuga

SEQ ID NO: 1633343 - RNA, 19 nt, Homo sapiens
  misc_RNA (1)...(19): siRNA sense strand
agguaaguguguuaacaga

SEQ ID NO: 1633344 - RNA, 19 nt, Homo sapiens
  misc_RNA (1)...(19): siRNA sense strand
ugaaugccacagaagaaau

SEQ ID NO: 1633345 - RNA, 19 nt, Homo sapiens
  misc_RNA (1)...(19): siRNA sense strand
uucuaaggcucuggaauau

SEQ ID NO: 1633346 - RNA, 19 nt, Homo sapiens
  misc_RNA (1)...(19): siRNA sense strand
agauguguaucaagaaagg

SEQ ID NO: 1633347 - RNA, 19 nt, Homo sapiens
  misc_RNA (1)...(19): siRNA sense strand
uggcuucagagucaaauga

SEQ ID NO: 1633348 - RNA, 19 nt, Homo sapiens
  misc_RNA (1)...(19): siRNA sense strand
uugaagagcacagagagaa

SEQ ID NO: 1633349 - RNA, 19 nt, Homo sapiens
  misc_RNA (1)...(19): siRNA sense strand
gcuggcacguuuagaaaau

SEQ ID NO: 1633350 - RNA, 19 nt, Homo sapiens
  misc_RNA (1)...(19): siRNA sense strand
gaacaaacaggacacauug

SEQ ID NO: 1633351 - RNA, 19 nt, Homo sapiens
  misc_RNA (1)...(19): siRNA sense strand
ggaagucucuggcucuuga

SEQ ID NO: 1633352 - RNA, 19 nt, Homo sapiens
  misc_RNA (1)...(19): siRNA sense strand
gaaacgagccugccuuaca

SEQ ID NO: 1633353 - RNA, 19 nt, Homo sapiens
  misc_RNA (1)...(19): siRNA sense strand
gagaauagcaccagucugu

SEQ ID NO: 1633354 - RNA, 19 nt, Homo sapiens
  misc_RNA (1)...(19): siRNA sense strand
ggugugaccugaguaaauu

SEQ ID NO: 1633355 - RNA, 19 nt, Homo sapiens
  misc_RNA (1)...(19): siRNA sense strand
ggaacaaacaggacacauu

SEQ ID NO: 1633356 - RNA, 19 nt, Homo sapiens
  misc_RNA (1)...(19): siRNA sense strand
aaacgagccugccuuacaa

SEQ ID NO: 1633357 - RNA, 19 nt, Homo sapiens
  misc_RNA (1)...(19): siRNA sense strand
ucaucgagcugguuaagaa

SEQ ID NO: 1633358 - RNA, 19 nt, Homo sapiens
  misc_RNA (1)...(19): siRNA sense strand
ggacacaggaggcuucuug

SEQ ID NO: 1633359 - RNA, 19 nt, Homo sapiens
  misc_RNA (1)...(19): siRNA sense strand
cccaagagcacaccuguua

SEQ ID NO: 1633360 - RNA, 19 nt, Homo sapiens
  misc_RNA (1)...(19): siRNA sense strand
agaacgcccuggagaagua

SEQ ID NO: 1633361 - RNA, 19 nt, Homo sapiens
  misc_RNA (1)...(19): siRNA sense strand
ggacacugauugccaagca

SEQ ID NO: 1633362 - RNA, 19 nt, Homo sapiens
  misc_RNA (1)...(19): siRNA sense strand
aagaaucacuggaacucua

SEQ ID NO: 1633363 - RNA, 19 nt, Homo sapiens
  misc_RNA (1)...(19): siRNA sense strand
acaaugcugugaagaauca

SEQ ID NO: 1633364 - RNA, 19 nt, Homo sapiens
  misc_RNA (1)...(19): siRNA sense strand
uaagaaguauggcacaaag

SEQ ID NO: 1633365 - RNA, 19 nt, Homo sapiens
  misc_RNA (1)...(19): siRNA sense strand
cagaaacgagccugccuua

SEQ ID NO: 1633366 - RNA, 19 nt, Homo sapiens
  misc_RNA (1)...(19): siRNA sense strand
gcaagugcaaggucaaaug

SEQ ID NO: 1633367 - RNA, 19 nt, Homo sapiens
  misc_RNA (1)...(19): siRNA sense strand
gggccgagaucgccaagau

SEQ ID NO: 1633368 - RNA, 19 nt, Homo sapiens
  misc_RNA (1)...(19): siRNA sense strand
uaaccgcacugaccagcaa

SEQ ID NO: 1633369 - RNA, 19 nt, Homo sapiens
  misc_RNA (1)...(19): siRNA sense strand
agacaaugcugugaagaau

SEQ ID NO: 1633370 - RNA, 19 nt, Homo sapiens
  misc_RNA (1)...(19): siRNA sense strand
gcagaggacaguaucaaca

SEQ ID NO: 1633371 - RNA, 19 nt, Homo sapiens
  misc_RNA (1)...(19): siRNA sense strand
ugucagguaucaaagaaga

SEQ ID NO: 1633372 - RNA, 19 nt, Homo sapiens
  misc_RNA (1)...(19): siRNA sense strand
gaccaaagaggaagaccaa

SEQ ID NO: 1633373 - RNA, 19 nt, Homo sapiens
  misc_RNA (1)...(19): siRNA sense strand
uggaugagcugcacuacca

SEQ ID NO: 1633374 - RNA, 19 nt, Homo sapiens
  misc_RNA (1)...(19): siRNA sense strand
gaccagcaaugccaguaca

SEQ ID NO: 1633375 - RNA, 19 nt, Homo sapiens
  misc_RNA (1)...(19): siRNA sense strand
uuucugaacuucuggaaca

SEQ ID NO: 1633376 - RNA, 19 nt, Homo sapiens
  misc_RNA (1)...(19): siRNA sense strand
aaagucaucgagcugguua

SEQ ID NO: 1633377 - RNA, 19 nt, Homo sapiens
  misc_RNA (1)...(19): siRNA sense strand
ucaaagaagacaacagcuu

SEQ ID NO: 1633378 - RNA, 19 nt, Homo sapiens
  misc_RNA (1)...(19): siRNA sense strand
ucaagaaaguccggaaguc

SEQ ID NO: 1633379 - RNA, 19 nt, Homo sapiens
  misc_RNA (1)...(19): siRNA sense strand
ccgagaagcagaagaggaa

SEQ ID NO: 1633380 - RNA, 19 nt, Homo sapiens
  misc_RNA (1)...(19): siRNA sense strand
ucaagaacgcccuggagaa

SEQ ID NO: 1633381 - RNA, 19 nt, Homo sapiens
  misc_RNA (1)...(19): siRNA sense strand
gagcagagggauagcaagu

SEQ ID NO: 1633382 - RNA, 19 nt, Homo sapiens
  misc_RNA (1)...(19): siRNA sense strand
cuggaacucuaccaucaaa

SEQ ID NO: 1633383 - RNA, 19 nt, Homo sapiens
  misc_RNA (1)...(19): siRNA sense strand
cacuggaacucuaccauca

SEQ ID NO: 1633384 - RNA, 19 nt, Homo sapiens
  misc_RNA (1)...(19): siRNA sense strand
ucgagcugguuaagaagua

SEQ ID NO: 1633385 - RNA, 19 nt, Homo sapiens
  misc_RNA (1)...(19): siRNA sense strand
ggaggaggaccgcaucauc

SEQ ID NO: 1633386 - RNA, 19 nt, Homo sapiens
  misc_RNA (1)...(19): siRNA sense strand
ccagagcccuuggaggaau

SEQ ID NO: 1633387 - RNA, 19 nt, Homo sapiens
  misc_RNA (1)...(19): siRNA sense strand
gaacaccagagcccuugga

SEQ ID NO: 1633388 - RNA, 19 nt, Homo sapiens
  misc_RNA (1)...(19): siRNA sense strand
cagacaaugcugugaagaa

SEQ ID NO: 1633389 - RNA, 19 nt, Homo sapiens
  misc_RNA (1)...(19): siRNA sense strand
cgagaucgccaagauguug

SEQ ID NO: 1633390 - RNA, 19 nt, Homo sapiens
  misc_RNA (1)...(19): siRNA sense strand
guuaagaaguauggcacaa

SEQ ID NO: 1633391 - RNA, 19 nt, Homo sapiens
  misc_RNA (1)...(19): siRNA sense strand
caagagcacaccuguuaag

SEQ ID NO: 1633392 - RNA, 19 nt, Homo sapiens
  misc_RNA (1)...(19): siRNA sense strand
ggaaaacagugaggaggaa

SEQ ID NO: 1633393 - RNA, 19 nt, Homo sapiens
  misc_RNA (1)...(19): siRNA sense strand
gggaagcagugccgugaac

SEQ ID NO: 1633394 - RNA, 19 nt, Homo sapiens
  misc_RNA (1)...(19): siRNA sense strand
gcucaaccagggcuucuug

SEQ ID NO: 1633395 - RNA, 19 nt, Homo sapiens
  misc_RNA (1)...(19): siRNA sense strand
caagaacgcccuggagaag

SEQ ID NO: 1633396 - RNA, 19 nt, Homo sapiens
  misc_RNA (1)...(19): siRNA sense strand
gaggaggaccgcaucaucu

SEQ ID NO: 1633397 - RNA, 19 nt, Homo sapiens
  misc_RNA (1)...(19): siRNA sense strand
ccaagagcacaccuguuaa

SEQ ID NO: 1633398 - RNA, 19 nt, Homo sapiens
  misc_RNA (1)...(19): siRNA sense strand
cuccgucccuccuaccaua

SEQ ID NO: 1633399 - RNA, 19 nt, Homo sapiens
  misc_RNA (1)...(19): siRNA sense strand
gcaccagucuguccuuccu

SEQ ID NO: 1633400 - RNA, 19 nt, Homo sapiens
  misc_RNA (1)...(19): siRNA sense strand
cugaagcccuggacuugau

SEQ ID NO: 1633401 - RNA, 19 nt, Homo sapiens
  misc_RNA (1)...(19): siRNA sense strand
cagaggacaguaucaacaa

SEQ ID NO: 1633402 - RNA, 19 nt, Homo sapiens
  misc_RNA (1)...(19): siRNA sense strand
gcacuaccaggacacagau

SEQ ID NO: 1633403 - RNA, 19 nt, Homo sapiens
  misc_RNA (1)...(19): siRNA sense strand
cagcagccaccacaucgaa

SEQ ID NO: 1633404 - RNA, 19 nt, Homo sapiens
  misc_RNA (1)...(19): siRNA sense strand
gucucuggcucuugacauu

SEQ ID NO: 1633405 - RNA, 19 nt, Homo sapiens
  misc_RNA (1)...(19): siRNA sense strand
guuaagacccugcccuucu

SEQ ID NO: 1633406 - RNA, 19 nt, Homo sapiens
  misc_RNA (1)...(19): siRNA sense strand
cagagcccuuggaggaauu

SEQ ID NO: 1633407 - RNA, 19 nt, Homo sapiens
  misc_RNA (1)...(19): siRNA sense strand
gcccaucgguacagaucug

SEQ ID NO: 1633408 - RNA, 19 nt, Homo sapiens
  misc_RNA (1)...(19): siRNA sense strand
acaaacaggacacauugga

SEQ ID NO: 1633409 - RNA, 19 nt, Homo sapiens
  misc_RNA (1)...(19): siRNA sense strand
caagaaaguccggaagucu

SEQ ID NO: 1633410 - RNA, 19 nt, Homo sapiens
  misc_RNA (1)...(19): siRNA sense strand
gccgagaucgccaagaugu

SEQ ID NO: 1633411 - RNA, 19 nt, Homo sapiens
  misc_RNA (1)...(19): siRNA sense strand
gcugcgaggaucuggauga

SEQ ID NO: 1633412 - RNA, 19 nt, Homo sapiens
  misc_RNA (1)...(19): siRNA sense strand
gaacuucuggaacaaacag

SEQ ID NO: 1633413 - RNA, 19 nt, Homo sapiens
  misc_RNA (1)...(19): siRNA sense strand
gaggacaguaucaacaaca

SEQ ID NO: 1633414 - RNA, 19 nt, Homo sapiens
  misc_RNA (1)...(19): siRNA sense strand
caaggacggccuccagagu

SEQ ID NO: 1633415 - RNA, 19 nt, Homo sapiens
  misc_RNA (1)...(19): siRNA sense strand
gcaccuggaggaggacuug

SEQ ID NO: 1633416 - RNA, 19 nt, Homo sapiens
  misc_RNA (1)...(19): siRNA sense strand
ggacagcaggacuggaagu

SEQ ID NO: 1633417 - RNA, 19 nt, Homo sapiens
  misc_RNA (1)...(19): siRNA sense strand
caucaucgaggacgacauc

SEQ ID NO: 1633418 - RNA, 19 nt, Homo sapiens
  misc_RNA (1)...(19): siRNA sense strand
caagugcaaggucaaaugg

SEQ ID NO: 1633419 - RNA, 19 nt, Homo sapiens
  misc_RNA (1)...(19): siRNA sense strand
ccacugcaccgggacaaga

SEQ ID NO: 1633420 - RNA, 19 nt, Homo sapiens
  misc_RNA (1)...(19): siRNA sense strand
gaagcgugaggaccaggaa

SEQ ID NO: 1633421 - RNA, 19 nt, Homo sapiens
  misc_RNA (1)...(19): siRNA sense strand
ccaaagaggaagaccaaaa

SEQ ID NO: 1633422 - RNA, 19 nt, Homo sapiens
  misc_RNA (1)...(19): siRNA sense strand
aggcagcaguggcccagaa

SEQ ID NO: 1633423 - RNA, 19 nt, Homo sapiens
  misc_RNA (1)...(19): siRNA sense strand
ccacacugcccaagucucu

SEQ ID NO: 1633424 - RNA, 19 nt, Homo sapiens
  misc_RNA (1)...(19): siRNA sense strand
uuaagacccugcccuucuc

SEQ ID NO: 1633425 - RNA, 19 nt, Homo sapiens
  misc_RNA (1)...(19): siRNA sense strand
ggaaggcuccccaccagaa

SEQ ID NO: 1633426 - RNA, 19 nt, Homo sapiens
  misc_RNA (1)...(19): siRNA sense strand
gaagaaucacuggaacucu

SEQ ID NO: 1633427 - RNA, 19 nt, Homo sapiens
  misc_RNA (1)...(19): siRNA sense strand
guacagguggcugagaguu

SEQ ID NO: 1633428 - RNA, 19 nt, Homo sapiens
  misc_RNA (1)...(19): siRNA sense strand
ucucuauccuugccgacaa

SEQ ID NO: 1633429 - RNA, 19 nt, Homo sapiens
  misc_RNA (1)...(19): siRNA sense strand
agucuguccuuccuggauu

SEQ ID NO: 1633430 - RNA, 19 nt, Homo sapiens
  misc_RNA (1)...(19): siRNA sense strand
ggaaggccagggaagucuu

SEQ ID NO: 1633431 - RNA, 19 nt, Homo sapiens
  misc_RNA (1)...(19): siRNA sense strand
acccugaggugaagaaguc

SEQ ID NO: 1633432 - RNA, 19 nt, Homo sapiens
  misc_RNA (1)...(19): siRNA sense strand
gguucuagccucucugaag

SEQ ID NO: 1633433 - RNA, 19 nt, Homo sapiens
  misc_RNA (1)...(19): siRNA sense strand
gccauggaccaaagaggaa

SEQ ID NO: 1633434 - RNA, 19 nt, Homo sapiens
  misc_RNA (1)...(19): siRNA sense strand
uuaagaaguauggcacaaa

SEQ ID NO: 1633435 - RNA, 19 nt, Homo sapiens
  misc_RNA (1)...(19): siRNA sense strand
gaaguacuccauggacaac

SEQ ID NO: 1633436 - RNA, 19 nt, Homo sapiens
  misc_RNA (1)...(19): siRNA sense strand
agaaguacuccauggacaa

SEQ ID NO: 1633437 - RNA, 19 nt, Homo sapiens
  misc_RNA (1)...(19): siRNA sense strand
gaucgagucggacccugau

SEQ ID NO: 1633438 - RNA, 19 nt, Homo sapiens
  misc_RNA (1)...(19): siRNA sense strand
gagcccaucgguacagauc

SEQ ID NO: 1633439 - RNA, 19 nt, Homo sapiens
  misc_RNA (1)...(19): siRNA sense strand
gacagcaggacuggaaguu

SEQ ID NO: 1633440 - RNA, 19 nt, Homo sapiens
  misc_RNA (1)...(19): siRNA sense strand
aggaggugcugcguucuga

SEQ ID NO: 1633441 - RNA, 19 nt, Homo sapiens
  misc_RNA (1)...(19): siRNA sense strand
uaucaacaacagccuagug

SEQ ID NO: 1633442 - RNA, 19 nt, Homo sapiens
  misc_RNA (1)...(19): siRNA sense strand
caucugcagaggacaguau

SEQ ID NO: 1633443 - RNA, 19 nt, Homo sapiens
  misc_RNA (1)...(19): siRNA sense strand
ugcuggagcucgaggacaa

SEQ ID NO: 1633444 - RNA, 19 nt, Homo sapiens
  misc_RNA (1)...(19): siRNA sense strand
ccaggacacagauucagau

SEQ ID NO: 1633445 - RNA, 19 nt, Homo sapiens
  misc_RNA (1)...(19): siRNA sense strand
gacacaggaggcuucuuga

SEQ ID NO: 1633446 - RNA, 19 nt, Homo sapiens
  misc_RNA (1)...(19): siRNA sense strand
agaaguauggcacaaagca

SEQ ID NO: 1633447 - RNA, 19 nt, Homo sapiens
  misc_RNA (1)...(19): siRNA sense strand
uacagguggcugagaguuu

SEQ ID NO: 1633448 - RNA, 19 nt, Homo sapiens
  misc_RNA (1)...(19): siRNA sense strand
ucucggacccucaucuugu

SEQ ID NO: 1633449 - RNA, 19 nt, Homo sapiens
  misc_RNA (1)...(19): siRNA sense strand
cucuugacauuguggauga

SEQ ID NO: 1633450 - RNA, 19 nt, Homo sapiens
  misc_RNA (1)...(19): siRNA sense strand
agaaauugcugccgugaua

SEQ ID NO: 1633451 - RNA, 19 nt, Homo sapiens
  misc_RNA (1)...(19): siRNA sense strand
gcauucaucugcauagaga

SEQ ID NO: 1633452 - RNA, 19 nt, Homo sapiens
  misc_RNA (1)...(19): siRNA sense strand
ggacucagcgcuuuccuuu

SEQ ID NO: 1633453 - RNA, 19 nt, Homo sapiens
  misc_RNA (1)...(19): siRNA sense strand
gugcagaaauggagaguca

SEQ ID NO: 1633454 - RNA, 19 nt, Homo sapiens
  misc_RNA (1)...(19): siRNA sense strand
cauaugcagugaacacauu

SEQ ID NO: 1633455 - RNA, 19 nt, Homo sapiens
  misc_RNA (1)...(19): siRNA sense strand
ccauagagccggagcagaa

SEQ ID NO: 1633456 - RNA, 19 nt, Homo sapiens
  misc_RNA (1)...(19): siRNA sense strand
gagcaccaaugacuacauc

SEQ ID NO: 1633457 - RNA, 19 nt, Homo sapiens
  misc_RNA (1)...(19): siRNA sense strand
cgugauauuuggcuucuug

SEQ ID NO: 1633458 - RNA, 19 nt, Homo sapiens
  misc_RNA (1)...(19): siRNA sense strand
caaggucgcccaagugauc

SEQ ID NO: 1633459 - RNA, 19 nt, Homo sapiens
  misc_RNA (1)...(19): siRNA sense strand
acacuggacucagcgcuuu

SEQ ID NO: 1633460 - RNA, 19 nt, Homo sapiens
  misc_RNA (1)...(19): siRNA sense strand
acuggcgucuugcugauua

SEQ ID NO: 1633461 - RNA, 19 nt, Homo sapiens
  misc_RNA (1)...(19): siRNA sense strand
caaucguacuggcugcuuu

SEQ ID NO: 1633462 - RNA, 19 nt, Homo sapiens
  misc_RNA (1)...(19): siRNA sense strand
gcagagcaccaaugacuac

SEQ ID NO: 1633463 - RNA, 19 nt, Homo sapiens
  misc_RNA (1)...(19): siRNA sense strand
gugugaaggccucuacuuu

SEQ ID NO: 1633464 - RNA, 19 nt, Homo sapiens
  misc_RNA (1)...(19): siRNA sense strand
cguacuggcugcuuuaaac

SEQ ID NO: 1633465 - RNA, 19 nt, Homo sapiens
  misc_RNA (1)...(19): siRNA sense strand
gcacggaguccagggaugu

SEQ ID NO: 1633466 - RNA, 19 nt, Homo sapiens
  misc_RNA (1)...(19): siRNA sense strand
uguggugacuggcgucuug

SEQ ID NO: 1633467 - RNA, 19 nt, Homo sapiens
  misc_RNA (1)...(19): siRNA sense strand
gaaauugcugccgugauau

SEQ ID NO: 1633468 - RNA, 19 nt, Homo sapiens
  misc_RNA (1)...(19): siRNA sense strand
gcgucuugcugauuauguu

SEQ ID NO: 1633469 - RNA, 19 nt, Homo sapiens
  misc_RNA (1)...(19): siRNA sense strand
gagcugcagugcguuugug

SEQ ID NO: 1633470 - RNA, 19 nt, Homo sapiens
  misc_RNA (1)...(19): siRNA sense strand
cagcagagcaccaaugacu

SEQ ID NO: 1633471 - RNA, 19 nt, Homo sapiens
  misc_RNA (1)...(19): siRNA sense strand
gccagcagagcaccaauga

SEQ ID NO: 1633472 - RNA, 19 nt, Homo sapiens
  misc_RNA (1)...(19): siRNA sense strand
ggacagucgcccugagauc

SEQ ID NO: 1633473 - RNA, 19 nt, Homo sapiens
  misc_RNA (1)...(19): siRNA sense strand
gaucuuggcccugauugca

SEQ ID NO: 1633474 - RNA, 19 nt, Homo sapiens
  misc_RNA (1)...(19): siRNA sense strand
gcgcuuuccuuuucuuuau

SEQ ID NO: 1633475 - RNA, 19 nt, Homo sapiens
  misc_RNA (1)...(19): siRNA sense strand
ugacuggcgucuugcugau

SEQ ID NO: 1633476 - RNA, 19 nt, Homo sapiens
  misc_RNA (1)...(19): siRNA sense strand
gaucaacuggaaucugaca

SEQ ID NO: 1633477 - RNA, 19 nt, Homo sapiens
  misc_RNA (1)...(19): siRNA sense strand
ucgagcaccuccaugaucu

SEQ ID NO: 1633478 - RNA, 19 nt, Homo sapiens
  misc_RNA (1)...(19): siRNA sense strand
aaucguacuggcugcuuua

SEQ ID NO: 1633479 - RNA, 19 nt, Homo sapiens
  misc_RNA (1)...(19): siRNA sense strand
agucucaaccugcacauga

SEQ ID NO: 1633480 - RNA, 19 nt, Homo sapiens
  misc_RNA (1)...(19): siRNA sense strand
aaauugcugccgugauauu

SEQ ID NO: 1633481 - RNA, 19 nt, Homo sapiens
  misc_RNA (1)...(19): siRNA sense strand
ucuuggcccugauugcauu

SEQ ID NO: 1633482 - RNA, 19 nt, Homo sapiens
  misc_RNA (1)...(19): siRNA sense strand
acucagcgcuuuccuuuuc

SEQ ID NO: 1633483 - RNA, 19 nt, Homo sapiens
  misc_RNA (1)...(19): siRNA sense strand
uagagccggagcagaaauu

SEQ ID NO: 1633484 - RNA, 19 nt, Homo sapiens
  misc_RNA (1)...(19): siRNA sense strand
cauagagccggagcagaaa

SEQ ID NO: 1633485 - RNA, 19 nt, Homo sapiens
  misc_RNA (1)...(19): siRNA sense strand
gcauaugcagugaacacau

SEQ ID NO: 1633486 - RNA, 19 nt, Homo sapiens
  misc_RNA (1)...(19): siRNA sense strand
agaaauugcugccgugaua

SEQ ID NO: 1633487 - RNA, 19 nt, Homo sapiens
  misc_RNA (1)...(19): siRNA sense strand
gcauucaucugcauagaga

SEQ ID NO: 1633488 - RNA, 19 nt, Homo sapiens
  misc_RNA (1)...(19): siRNA sense strand
ggacucagcgcuuuccuuu

SEQ ID NO: 1633489 - RNA, 19 nt, Homo sapiens
  misc_RNA (1)...(19): siRNA sense strand
gugcagaaauggagaguca

SEQ ID NO: 1633490 - RNA, 19 nt, Homo sapiens
  misc_RNA (1)...(19): siRNA sense strand
cauaugcagugaacacauu

SEQ ID NO: 1633491 - RNA, 19 nt, Homo sapiens
  misc_RNA (1)...(19): siRNA sense strand
ccauagagccggagcagaa

SEQ ID NO: 1633492 - RNA, 19 nt, Homo sapiens
  misc_RNA (1)...(19): siRNA sense strand
gagcaccaaugacuacauc

SEQ ID NO: 1633493 - RNA, 19 nt, Homo sapiens
  misc_RNA (1)...(19): siRNA sense strand
cgugauauuuggcuucuug

SEQ ID NO: 1633494 - RNA, 19 nt, Homo sapiens
  misc_RNA (1)...(19): siRNA sense strand
caaggucgcccaagugauc

SEQ ID NO: 1633495 - RNA, 19 nt, Homo sapiens
  misc_RNA (1)...(19): siRNA sense strand
acacuggacucagcgcuuu

SEQ ID NO: 1633496 - RNA, 19 nt, Homo sapiens
  misc_RNA (1)...(19): siRNA sense strand
acuggcgucuugcugauua

SEQ ID NO: 1633497 - RNA, 19 nt, Homo sapiens
  misc_RNA (1)...(19): siRNA sense strand
caaucguacuggcugcuuu

SEQ ID NO: 1633498 - RNA, 19 nt, Homo sapiens
  misc_RNA (1)...(19): siRNA sense strand
gcagagcaccaaugacuac

SEQ ID NO: 1633499 - RNA, 19 nt, Homo sapiens
  misc_RNA (1)...(19): siRNA sense strand
gugugaaggccucuacuuu

SEQ ID NO: 1633500 - RNA, 19 nt, Homo sapiens
  misc_RNA (1)...(19): siRNA sense strand
cguacuggcugcuuuaaac

SEQ ID NO: 1633501 - RNA, 19 nt, Homo sapiens
  misc_RNA (1)...(19): siRNA sense strand
gcacggaguccagggaugu

SEQ ID NO: 1633502 - RNA, 19 nt, Homo sapiens
  misc_RNA (1)...(19): siRNA sense strand
uguggugacuggcgucuug

SEQ ID NO: 1633503 - RNA, 19 nt, Homo sapiens
  misc_RNA (1)...(19): siRNA sense strand
gaaauugcugccgugauau

SEQ ID NO: 1633504 - RNA, 19 nt, Homo sapiens
  misc_RNA (1)...(19): siRNA sense strand
gcgucuugcugauuauguu

SEQ ID NO: 1633505 - RNA, 19 nt, Homo sapiens
  misc_RNA (1)...(19): siRNA sense strand
gagcugcagugcguuugug

SEQ ID NO: 1633506 - RNA, 19 nt, Homo sapiens
  misc_RNA (1)...(19): siRNA sense strand
cagcagagcaccaaugacu

SEQ ID NO: 1633507 - RNA, 19 nt, Homo sapiens
  misc_RNA (1)...(19): siRNA sense strand
gccagcagagcaccaauga

SEQ ID NO: 1633508 - RNA, 19 nt, Homo sapiens
  misc_RNA (1)...(19): siRNA sense strand
ggacagucgcccugagauc

SEQ ID NO: 1633509 - RNA, 19 nt, Homo sapiens
  misc_RNA (1)...(19): siRNA sense strand
gaucuuggcccugauugca

SEQ ID NO: 1633510 - RNA, 19 nt, Homo sapiens
  misc_RNA (1)...(19): siRNA sense strand
gcgcuuuccuuuucuuuau

SEQ ID NO: 1633511 - RNA, 19 nt, Homo sapiens
  misc_RNA (1)...(19): siRNA sense strand
ugacuggcgucuugcugau

SEQ ID NO: 1633512 - RNA, 19 nt, Homo sapiens
  misc_RNA (1)...(19): siRNA sense strand
gaucaacuggaaucugaca

SEQ ID NO: 1633513 - RNA, 19 nt, Homo sapiens
  misc_RNA (1)...(19): siRNA sense strand
ucgagcaccuccaugaucu

SEQ ID NO: 1633514 - RNA, 19 nt, Homo sapiens
  misc_RNA (1)...(19): siRNA sense strand
aaucguacuggcugcuuua

SEQ ID NO: 1633515 - RNA, 19 nt, Homo sapiens
  misc_RNA (1)...(19): siRNA sense strand
agucucaaccugcacauga

SEQ ID NO: 1633516 - RNA, 19 nt, Homo sapiens
  misc_RNA (1)...(19): siRNA sense strand
aaauugcugccgugauauu

SEQ ID NO: 1633517 - RNA, 19 nt, Homo sapiens
  misc_RNA (1)...(19): siRNA sense strand
ucuuggcccugauugcauu

SEQ ID NO: 1633518 - RNA, 19 nt, Homo sapiens
  misc_RNA (1)...(19): siRNA sense strand
acucagcgcuuuccuuuuc

SEQ ID NO: 1633519 - RNA, 19 nt, Homo sapiens
  misc_RNA (1)...(19): siRNA sense strand
uagagccggagcagaaauu

SEQ ID NO: 1633520 - RNA, 19 nt, Homo sapiens
  misc_RNA (1)...(19): siRNA sense strand
cauagagccggagcagaaa

SEQ ID NO: 1633521 - RNA, 19 nt, Homo sapiens
  misc_RNA (1)...(19): siRNA sense strand
gcauaugcagugaacacau

SEQ ID NO: 1633522 - RNA, 19 nt, Homo sapiens
  misc_RNA (1)...(19): siRNA sense strand
gaaaugaguuguucaccuu

SEQ ID NO: 1633523 - RNA, 19 nt, Homo sapiens
  misc_RNA (1)...(19): siRNA sense strand
gaccugagcuccuaugauu

SEQ ID NO: 1633524 - RNA, 19 nt, Homo sapiens
  misc_RNA (1)...(19): siRNA sense strand
ggaagacaaugaaaugagu

SEQ ID NO: 1633525 - RNA, 19 nt, Homo sapiens
  misc_RNA (1)...(19): siRNA sense strand
gauaaggaauuccaacucu

SEQ ID NO: 1633526 - RNA, 19 nt, Homo sapiens
  misc_RNA (1)...(19): siRNA sense strand
gagaucauccagcacuuua

SEQ ID NO: 1633527 - RNA, 19 nt, Homo sapiens
  misc_RNA (1)...(19): siRNA sense strand
uaaccggucuccaugaugu

SEQ ID NO: 1633528 - RNA, 19 nt, Homo sapiens
  misc_RNA (1)...(19): siRNA sense strand
gauggaagacaaugaaaug

SEQ ID NO: 1633529 - RNA, 19 nt, Homo sapiens
  misc_RNA (1)...(19): siRNA sense strand
uccaugauguugaugagua

SEQ ID NO: 1633530 - RNA, 19 nt, Homo sapiens
  misc_RNA (1)...(19): siRNA sense strand
ugacggggcuccugaugua

SEQ ID NO: 1633531 - RNA, 19 nt, Homo sapiens
  misc_RNA (1)...(19): siRNA sense strand
ggagaucauccagcacuuu

SEQ ID NO: 1633532 - RNA, 19 nt, Homo sapiens
  misc_RNA (1)...(19): siRNA sense strand
gaagacaaugaaaugaguu

SEQ ID NO: 1633533 - RNA, 19 nt, Homo sapiens
  misc_RNA (1)...(19): siRNA sense strand
caagcgggaugucuacuac

SEQ ID NO: 1633534 - RNA, 19 nt, Homo sapiens
  misc_RNA (1)...(19): siRNA sense strand
cagcagaguggacacguuu

SEQ ID NO: 1633535 - RNA, 19 nt, Homo sapiens
  misc_RNA (1)...(19): siRNA sense strand
aaacugcuacaacuggaua

SEQ ID NO: 1633536 - RNA, 19 nt, Homo sapiens
  misc_RNA (1)...(19): siRNA sense strand
uaaggaauuccaacucuuc

SEQ ID NO: 1633537 - RNA, 19 nt, Homo sapiens
  misc_RNA (1)...(19): siRNA sense strand
aaugaguuguucaccuuaa

SEQ ID NO: 1633538 - RNA, 19 nt, Homo sapiens
  misc_RNA (1)...(19): siRNA sense strand
gagauggaagacaaugaaa

SEQ ID NO: 1633539 - RNA, 19 nt, Homo sapiens
  misc_RNA (1)...(19): siRNA sense strand
ugagauggaagacaaugaa

SEQ ID NO: 1633540 - RNA, 19 nt, Homo sapiens
  misc_RNA (1)...(19): siRNA sense strand
ccaugauguugaugaguau

SEQ ID NO: 1633541 - RNA, 19 nt, Homo sapiens
  misc_RNA (1)...(19): siRNA sense strand
ccuccuagcugcucugaac

SEQ ID NO: 1633542 - RNA, 19 nt, Homo sapiens
  misc_RNA (1)...(19): siRNA sense strand
gaucauccagcacuuuaag

SEQ ID NO: 1633543 - RNA, 19 nt, Homo sapiens
  misc_RNA (1)...(19): siRNA sense strand
uagcugcucugaacauugc

SEQ ID NO: 1633544 - RNA, 19 nt, Homo sapiens
  misc_RNA (1)...(19): siRNA sense strand
ggucccacccgcaucauug

SEQ ID NO: 1633545 - RNA, 19 nt, Homo sapiens
  misc_RNA (1)...(19): siRNA sense strand
ggcuauggcuccacuacca

SEQ ID NO: 1633546 - RNA, 19 nt, Homo sapiens
  misc_RNA (1)...(19): siRNA sense strand
ggauaaggaauuccaacuc

SEQ ID NO: 1633547 - RNA, 19 nt, Homo sapiens
  misc_RNA (1)...(19): siRNA sense strand
acaacuggauaaggaauuc

SEQ ID NO: 1633548 - RNA, 19 nt, Homo sapiens
  misc_RNA (1)...(19): siRNA sense strand
gccaggugcugagccagaa

SEQ ID NO: 1633549 - RNA, 19 nt, Homo sapiens
  misc_RNA (1)...(19): siRNA sense strand
auaaggaauuccaacucuu

SEQ ID NO: 1633550 - RNA, 19 nt, Homo sapiens
  misc_RNA (1)...(19): siRNA sense strand
ucagcagaguggacacguu

SEQ ID NO: 1633551 - RNA, 19 nt, Homo sapiens
  misc_RNA (1)...(19): siRNA sense strand
ggaccugagcuccuaugau

SEQ ID NO: 1633552 - RNA, 19 nt, Homo sapiens
  misc_RNA (1)...(19): siRNA sense strand
ccuagcugcucugaacauu

SEQ ID NO: 1633553 - RNA, 19 nt, Homo sapiens
  misc_RNA (1)...(19): siRNA sense strand
uguaaccggucuccaugau

SEQ ID NO: 1633554 - RNA, 19 nt, Homo sapiens
  misc_RNA (1)...(19): siRNA sense strand
ucgcagcgccuucaaacug

SEQ ID NO: 1633555 - RNA, 19 nt, Homo sapiens
  misc_RNA (1)...(19): siRNA sense strand
ugcuacaacuggauaagga

SEQ ID NO: 1633556 - RNA, 19 nt, Homo sapiens
  misc_RNA (1)...(19): siRNA sense strand
caaaggacaagcgggaugu

SEQ ID NO: 1633557 - RNA, 19 nt, Homo sapiens
  misc_RNA (1)...(19): siRNA sense strand
gaugugacgcuccucuaca

SEQ ID NO: 1633558 - RNA, 19 nt, Homo sapiens
  misc_RNA (1)...(19): siRNA sense strand
ggagcagccggaacucuag

SEQ ID NO: 1633559 - RNA, 19 nt, Homo sapiens
  misc_RNA (1)...(19): siRNA sense strand
guuacccacuggaccuaga

SEQ ID NO: 1633560 - RNA, 19 nt, Homo sapiens
  misc_RNA (1)...(19): siRNA sense strand
aaaugaguuguucaccuua

SEQ ID NO: 1633561 - RNA, 19 nt, Homo sapiens
  misc_RNA (1)...(19): siRNA sense strand
acaagcgggaugucuacua

SEQ ID NO: 1633562 - RNA, 19 nt, Homo sapiens
  misc_RNA (1)...(19): siRNA sense strand
ugauguugaugaguauaug

SEQ ID NO: 1633563 - RNA, 19 nt, Homo sapiens
  misc_RNA (1)...(19): siRNA sense strand
gggaugugacgcuccucua

SEQ ID NO: 1633564 - RNA, 19 nt, Homo sapiens
  misc_RNA (1)...(19): siRNA sense strand
gcuuuguggccaagauauu

SEQ ID NO: 1633565 - RNA, 19 nt, Homo sapiens
  misc_RNA (1)...(19): siRNA sense strand
gcuacaacuggauaaggaa

SEQ ID NO: 1633566 - RNA, 19 nt, Homo sapiens
  misc_RNA (1)...(19): siRNA sense strand
cuguggaccugcaggcuau

SEQ ID NO: 1633567 - RNA, 19 nt, Homo sapiens
  misc_RNA (1)...(19): siRNA sense strand
gcggcucagaguacaagua

SEQ ID NO: 1633568 - RNA, 19 nt, Homo sapiens
  misc_RNA (1)...(19): siRNA sense strand
ggaugugacgcuccucuac

SEQ ID NO: 1633569 - RNA, 19 nt, Homo sapiens
  misc_RNA (1)...(19): siRNA sense strand
gcucgcagcgccuucaaac

SEQ ID NO: 1633570 - RNA, 19 nt, Homo sapiens
  misc_RNA (1)...(19): siRNA sense strand
gaaaugaguuguucaccuu

SEQ ID NO: 1633571 - RNA, 19 nt, Homo sapiens
  misc_RNA (1)...(19): siRNA sense strand
gaccugagcuccuaugauu

SEQ ID NO: 1633572 - RNA, 19 nt, Homo sapiens
  misc_RNA (1)...(19): siRNA sense strand
ggaagacaaugaaaugagu

SEQ ID NO: 1633573 - RNA, 19 nt, Homo sapiens
  misc_RNA (1)...(19): siRNA sense strand
gauaaggaauuccaacucu

SEQ ID NO: 1633574 - RNA, 19 nt, Homo sapiens
  misc_RNA (1)...(19): siRNA sense strand
gagaucauccagcacuuua

SEQ ID NO: 1633575 - RNA, 19 nt, Homo sapiens
  misc_RNA (1)...(19): siRNA sense strand
uaaccggucuccaugaugu

SEQ ID NO: 1633576 - RNA, 19 nt, Homo sapiens
  misc_RNA (1)...(19): siRNA sense strand
gauggaagacaaugaaaug

SEQ ID NO: 1633577 - RNA, 19 nt, Homo sapiens
  misc_RNA (1)...(19): siRNA sense strand
uccaugauguugaugagua

SEQ ID NO: 1633578 - RNA, 19 nt, Homo sapiens
  misc_RNA (1)...(19): siRNA sense strand
ugacggggcuccugaugua

SEQ ID NO: 1633579 - RNA, 19 nt, Homo sapiens
  misc_RNA (1)...(19): siRNA sense strand
ggagaucauccagcacuuu

SEQ ID NO: 1633580 - RNA, 19 nt, Homo sapiens
  misc_RNA (1)...(19): siRNA sense strand
gaagacaaugaaaugaguu

SEQ ID NO: 1633581 - RNA, 19 nt, Homo sapiens
  misc_RNA (1)...(19): siRNA sense strand
caagcgggaugucuacuac

SEQ ID NO: 1633582 - RNA, 19 nt, Homo sapiens
  misc_RNA (1)...(19): siRNA sense strand
cagcagaguggacacguuu

SEQ ID NO: 1633583 - RNA, 19 nt, Homo sapiens
  misc_RNA (1)...(19): siRNA sense strand
aaacugcuacaacuggaua

SEQ ID NO: 1633584 - RNA, 19 nt, Homo sapiens
  misc_RNA (1)...(19): siRNA sense strand
uaaggaauuccaacucuuc

SEQ ID NO: 1633585 - RNA, 19 nt, Homo sapiens
  misc_RNA (1)...(19): siRNA sense strand
aaugaguuguucaccuuaa

SEQ ID NO: 1633586 - RNA, 19 nt, Homo sapiens
  misc_RNA (1)...(19): siRNA sense strand
gagauggaagacaaugaaa

SEQ ID NO: 1633587 - RNA, 19 nt, Homo sapiens
  misc_RNA (1)...(19): siRNA sense strand
ugagauggaagacaaugaa

SEQ ID NO: 1633588 - RNA, 19 nt, Homo sapiens
  misc_RNA (1)...(19): siRNA sense strand
ccaugauguugaugaguau

SEQ ID NO: 1633589 - RNA, 19 nt, Homo sapiens
  misc_RNA (1)...(19): siRNA sense strand
ccuccuagcugcucugaac

SEQ ID NO: 1633590 - RNA, 19 nt, Homo sapiens
  misc_RNA (1)...(19): siRNA sense strand
gaucauccagcacuuuaag

SEQ ID NO: 1633591 - RNA, 19 nt, Homo sapiens
  misc_RNA (1)...(19): siRNA sense strand
uagcugcucugaacauugc

SEQ ID NO: 1633592 - RNA, 19 nt, Homo sapiens
  misc_RNA (1)...(19): siRNA sense strand
ggucccacccgcaucauug

SEQ ID NO: 1633593 - RNA, 19 nt, Homo sapiens
  misc_RNA (1)...(19): siRNA sense strand
ggcuauggcuccacuacca

SEQ ID NO: 1633594 - RNA, 19 nt, Homo sapiens
  misc_RNA (1)...(19): siRNA sense strand
ggauaaggaauuccaacuc

SEQ ID NO: 1633595 - RNA, 19 nt, Homo sapiens
  misc_RNA (1)...(19): siRNA sense strand
acaacuggauaaggaauuc

SEQ ID NO: 1633596 - RNA, 19 nt, Homo sapiens
  misc_RNA (1)...(19): siRNA sense strand
gccaggugcugagccagaa

SEQ ID NO: 1633597 - RNA, 19 nt, Homo sapiens
  misc_RNA (1)...(19): siRNA sense strand
auaaggaauuccaacucuu

SEQ ID NO: 1633598 - RNA, 19 nt, Homo sapiens
  misc_RNA (1)...(19): siRNA sense strand
ucagcagaguggacacguu

SEQ ID NO: 1633599 - RNA, 19 nt, Homo sapiens
  misc_RNA (1)...(19): siRNA sense strand
ggaccugagcuccuaugau

SEQ ID NO: 1633600 - RNA, 19 nt, Homo sapiens
  misc_RNA (1)...(19): siRNA sense strand
ccuagcugcucugaacauu

SEQ ID NO: 1633601 - RNA, 19 nt, Homo sapiens
  misc_RNA (1)...(19): siRNA sense strand
uguaaccggucuccaugau

SEQ ID NO: 1633602 - RNA, 19 nt, Homo sapiens
  misc_RNA (1)...(19): siRNA sense strand
ucgcagcgccuucaaacug

SEQ ID NO: 1633603 - RNA, 19 nt, Homo sapiens
  misc_RNA (1)...(19): siRNA sense strand
ugcuacaacuggauaagga

SEQ ID NO: 1633604 - RNA, 19 nt, Homo sapiens
  misc_RNA (1)...(19): siRNA sense strand
caaaggacaagcgggaugu

SEQ ID NO: 1633605 - RNA, 19 nt, Homo sapiens
  misc_RNA (1)...(19): siRNA sense strand
gaugugacgcuccucuaca

SEQ ID NO: 1633606 - RNA, 19 nt, Homo sapiens
  misc_RNA (1)...(19): siRNA sense strand
ggagcagccggaacucuag

SEQ ID NO: 1633607 - RNA, 19 nt, Homo sapiens
  misc_RNA (1)...(19): siRNA sense strand
guuacccacuggaccuaga

SEQ ID NO: 1633608 - RNA, 19 nt, Homo sapiens
  misc_RNA (1)...(19): siRNA sense strand
aaaugaguuguucaccuua

SEQ ID NO: 1633609 - RNA, 19 nt, Homo sapiens
  misc_RNA (1)...(19): siRNA sense strand
acaagcgggaugucuacua

SEQ ID NO: 1633610 - RNA, 19 nt, Homo sapiens
  misc_RNA (1)...(19): siRNA sense strand
ugauguugaugaguauaug

SEQ ID NO: 1633611 - RNA, 19 nt, Homo sapiens
  misc_RNA (1)...(19): siRNA sense strand
gggaugugacgcuccucua

SEQ ID NO: 1633612 - RNA, 19 nt, Homo sapiens
  misc_RNA (1)...(19): siRNA sense strand
gcuuuguggccaagauauu

SEQ ID NO: 1633613 - RNA, 19 nt, Homo sapiens
  misc_RNA (1)...(19): siRNA sense strand
gcuacaacuggauaaggaa

SEQ ID NO: 1633614 - RNA, 19 nt, Homo sapiens
  misc_RNA (1)...(19): siRNA sense strand
cuguggaccugcaggcuau

SEQ ID NO: 1633615 - RNA, 19 nt, Homo sapiens
  misc_RNA (1)...(19): siRNA sense strand
gcggcucagaguacaagua

SEQ ID NO: 1633616 - RNA, 19 nt, Homo sapiens
  misc_RNA (1)...(19): siRNA sense strand
ggaugugacgcuccucuac

SEQ ID NO: 1633617 - RNA, 19 nt, Homo sapiens
  misc_RNA (1)...(19): siRNA sense strand
gcucgcagcgccuucaaac

SEQ ID NO: 1633618 - RNA, 19 nt, Homo sapiens
  misc_RNA (1)...(19): siRNA sense strand
gaaaugaguuguucaccuu

SEQ ID NO: 1633619 - RNA, 19 nt, Homo sapiens
  misc_RNA (1)...(19): siRNA sense strand
gaccugagcuccuaugauu

SEQ ID NO: 1633620 - RNA, 19 nt, Homo sapiens
  misc_RNA (1)...(19): siRNA sense strand
ggaagacaaugaaaugagu

SEQ ID NO: 1633621 - RNA, 19 nt, Homo sapiens
  misc_RNA (1)...(19): siRNA sense strand
gauaaggaauuccaacucu

SEQ ID NO: 1633622 - RNA, 19 nt, Homo sapiens
  misc_RNA (1)...(19): siRNA sense strand
gagaucauccagcacuuua

SEQ ID NO: 1633623 - RNA, 19 nt, Homo sapiens
  misc_RNA (1)...(19): siRNA sense strand
uaaccggucuccaugaugu

SEQ ID NO: 1633624 - RNA, 19 nt, Homo sapiens
  misc_RNA (1)...(19): siRNA sense strand
gauggaagacaaugaaaug

SEQ ID NO: 1633625 - RNA, 19 nt, Homo sapiens
  misc_RNA (1)...(19): siRNA sense strand
uccaugauguugaugagua

SEQ ID NO: 1633626 - RNA, 19 nt, Homo sapiens
  misc_RNA (1)...(19): siRNA sense strand
ugacggggcuccugaugua

SEQ ID NO: 1633627 - RNA, 19 nt, Homo sapiens
  misc_RNA (1)...(19): siRNA sense strand
ggagaucauccagcacuuu

SEQ ID NO: 1633628 - RNA, 19 nt, Homo sapiens
  misc_RNA (1)...(19): siRNA sense strand
gaagacaaugaaaugaguu

SEQ ID NO: 1633629 - RNA, 19 nt, Homo sapiens
  misc_RNA (1)...(19): siRNA sense strand
caagcgggaugucuacuac

SEQ ID NO: 1633630 - RNA, 19 nt, Homo sapiens
  misc_RNA (1)...(19): siRNA sense strand
cagcagaguggacacguuu

SEQ ID NO: 1633631 - RNA, 19 nt, Homo sapiens
  misc_RNA (1)...(19): siRNA sense strand
aaacugcuacaacuggaua

SEQ ID NO: 1633632 - RNA, 19 nt, Homo sapiens
  misc_RNA (1)...(19): siRNA sense strand
uaaggaauuccaacucuuc

SEQ ID NO: 1633633 - RNA, 19 nt, Homo sapiens
  misc_RNA (1)...(19): siRNA sense strand
aaugaguuguucaccuuaa

SEQ ID NO: 1633634 - RNA, 19 nt, Homo sapiens
  misc_RNA (1)...(19): siRNA sense strand
gagauggaagacaaugaaa

SEQ ID NO: 1633635 - RNA, 19 nt, Homo sapiens
  misc_RNA (1)...(19): siRNA sense strand
ugagauggaagacaaugaa

SEQ ID NO: 1633636 - RNA, 19 nt, Homo sapiens
  misc_RNA (1)...(19): siRNA sense strand
ccaugauguugaugaguau

SEQ ID NO: 1633637 - RNA, 19 nt, Homo sapiens
  misc_RNA (1)...(19): siRNA sense strand
ccuccuagcugcucugaac

SEQ ID NO: 1633638 - RNA, 19 nt, Homo sapiens
  misc_RNA (1)...(19): siRNA sense strand
gaucauccagcacuuuaag

SEQ ID NO: 1633639 - RNA, 19 nt, Homo sapiens
  misc_RNA (1)...(19): siRNA sense strand
uagcugcucugaacauugc

SEQ ID NO: 1633640 - RNA, 19 nt, Homo sapiens
  misc_RNA (1)...(19): siRNA sense strand
ggucccacccgcaucauug

SEQ ID NO: 1633641 - RNA, 19 nt, Homo sapiens
  misc_RNA (1)...(19): siRNA sense strand
ggcuauggcuccacuacca

SEQ ID NO: 1633642 - RNA, 19 nt, Homo sapiens
  misc_RNA (1)...(19): siRNA sense strand
ggauaaggaauuccaacuc

SEQ ID NO: 1633643 - RNA, 19 nt, Homo sapiens
  misc_RNA (1)...(19): siRNA sense strand
acaacuggauaaggaauuc

SEQ ID NO: 1633644 - RNA, 19 nt, Homo sapiens
  misc_RNA (1)...(19): siRNA sense strand
gccaggugcugagccagaa

SEQ ID NO: 1633645 - RNA, 19 nt, Homo sapiens
  misc_RNA (1)...(19): siRNA sense strand
auaaggaauuccaacucuu

SEQ ID NO: 1633646 - RNA, 19 nt, Homo sapiens
  misc_RNA (1)...(19): siRNA sense strand
ucagcagaguggacacguu

SEQ ID NO: 1633647 - RNA, 19 nt, Homo sapiens
  misc_RNA (1)...(19): siRNA sense strand
ggaccugagcuccuaugau

SEQ ID NO: 1633648 - RNA, 19 nt, Homo sapiens
  misc_RNA (1)...(19): siRNA sense strand
ccuagcugcucugaacauu

SEQ ID NO: 1633649 - RNA, 19 nt, Homo sapiens
  misc_RNA (1)...(19): siRNA sense strand
uguaaccggucuccaugau

SEQ ID NO: 1633650 - RNA, 19 nt, Homo sapiens
  misc_RNA (1)...(19): siRNA sense strand
ucgcagcgccuucaaacug

SEQ ID NO: 1633651 - RNA, 19 nt, Homo sapiens
  misc_RNA (1)...(19): siRNA sense strand
ugcuacaacuggauaagga

SEQ ID NO: 1633652 - RNA, 19 nt, Homo sapiens
  misc_RNA (1)...(19): siRNA sense strand
caaaggacaagcgggaugu

SEQ ID NO: 1633653 - RNA, 19 nt, Homo sapiens
  misc_RNA (1)...(19): siRNA sense strand
gaugugacgcuccucuaca

SEQ ID NO: 1633654 - RNA, 19 nt, Homo sapiens
  misc_RNA (1)...(19): siRNA sense strand
ggagcagccggaacucuag

SEQ ID NO: 1633655 - RNA, 19 nt, Homo sapiens
  misc_RNA (1)...(19): siRNA sense strand
guuacccacuggaccuaga

SEQ ID NO: 1633656 - RNA, 19 nt, Homo sapiens
  misc_RNA (1)...(19): siRNA sense strand
aaaugaguuguucaccuua

SEQ ID NO: 1633657 - RNA, 19 nt, Homo sapiens
  misc_RNA (1)...(19): siRNA sense strand
acaagcgggaugucuacua

SEQ ID NO: 1633658 - RNA, 19 nt, Homo sapiens
  misc_RNA (1)...(19): siRNA sense strand
ugauguugaugaguauaug

SEQ ID NO: 1633659 - RNA, 19 nt, Homo sapiens
  misc_RNA (1)...(19): siRNA sense strand
gggaugugacgcuccucua

SEQ ID NO: 1633660 - RNA, 19 nt, Homo sapiens
  misc_RNA (1)...(19): siRNA sense strand
gcuuuguggccaagauauu

SEQ ID NO: 1633661 - RNA, 19 nt, Homo sapiens
  misc_RNA (1)...(19): siRNA sense strand
gcuacaacuggauaaggaa

SEQ ID NO: 1633662 - RNA, 19 nt, Homo sapiens
  misc_RNA (1)...(19): siRNA sense strand
cuguggaccugcaggcuau

SEQ ID NO: 1633663 - RNA, 19 nt, Homo sapiens
  misc_RNA (1)...(19): siRNA sense strand
gcggcucagaguacaagua

SEQ ID NO: 1633664 - RNA, 19 nt, Homo sapiens
  misc_RNA (1)...(19): siRNA sense strand
ggaugugacgcuccucuac

SEQ ID NO: 1633665 - RNA, 19 nt, Homo sapiens
  misc_RNA (1)...(19): siRNA sense strand
gcucgcagcgccuucaaac

SEQ ID NO: 1633666 - RNA, 19 nt, Homo sapiens
  misc_RNA (1)...(19): siRNA sense strand
ggacaccgcuggaagacua

SEQ ID NO: 1633667 - RNA, 19 nt, Homo sapiens
  misc_RNA (1)...(19): siRNA sense strand
ccacuaagauguacaugaa

SEQ ID NO: 1633668 - RNA, 19 nt, Homo sapiens
  misc_RNA (1)...(19): siRNA sense strand
gaggaaaugcggaaguuua

SEQ ID NO: 1633669 - RNA, 19 nt, Homo sapiens
  misc_RNA (1)...(19): siRNA sense strand
ccacacaggugccucaguu

SEQ ID NO: 1633670 - RNA, 19 nt, Homo sapiens
  misc_RNA (1)...(19): siRNA sense strand
uuaaagaaauccagaagga

SEQ ID NO: 1633671 - RNA, 19 nt, Homo sapiens
  misc_RNA (1)...(19): siRNA sense strand
gaaaugcggaaguuuaaga

SEQ ID NO: 1633672 - RNA, 19 nt, Homo sapiens
  misc_RNA (1)...(19): siRNA sense strand
gaagcaagcacaggucuuu

SEQ ID NO: 1633673 - RNA, 19 nt, Homo sapiens
  misc_RNA (1)...(19): siRNA sense strand
ugaagcaacugcaggagaa

SEQ ID NO: 1633674 - RNA, 19 nt, Homo sapiens
  misc_RNA (1)...(19): siRNA sense strand
gcaguuuccuccuccagaa

SEQ ID NO: 1633675 - RNA, 19 nt, Homo sapiens
  misc_RNA (1)...(19): siRNA sense strand
gaagaaagugcugcagaaa

SEQ ID NO: 1633676 - RNA, 19 nt, Homo sapiens
  misc_RNA (1)...(19): siRNA sense strand
gacuuaauccuucaaauga

SEQ ID NO: 1633677 - RNA, 19 nt, Homo sapiens
  misc_RNA (1)...(19): siRNA sense strand
agaagaaagugcugcagaa

SEQ ID NO: 1633678 - RNA, 19 nt, Homo sapiens
  misc_RNA (1)...(19): siRNA sense strand
gagaugagacucuuuuaua

SEQ ID NO: 1633679 - RNA, 19 nt, Homo sapiens
  misc_RNA (1)...(19): siRNA sense strand
gcauguaucacaccaaaga

SEQ ID NO: 1633680 - RNA, 19 nt, Homo sapiens
  misc_RNA (1)...(19): siRNA sense strand
cgacgacccugucuucauc

SEQ ID NO: 1633681 - RNA, 19 nt, Homo sapiens
  misc_RNA (1)...(19): siRNA sense strand
ucaaagagcuccccgaguu

SEQ ID NO: 1633682 - RNA, 19 nt, Homo sapiens
  misc_RNA (1)...(19): siRNA sense strand
gggacucgguuguguguug

SEQ ID NO: 1633683 - RNA, 19 nt, Homo sapiens
  misc_RNA (1)...(19): siRNA sense strand
ggacagggaggcagaagug

SEQ ID NO: 1633684 - RNA, 19 nt, Homo sapiens
  misc_RNA (1)...(19): siRNA sense strand
agaagccucugaccaagaa

SEQ ID NO: 1633685 - RNA, 19 nt, Homo sapiens
  misc_RNA (1)...(19): siRNA sense strand
ucaccaggcugaagagcaa

SEQ ID NO: 1633686 - RNA, 19 nt, Homo sapiens
  misc_RNA (1)...(19): siRNA sense strand
agaagaagccucugaccaa

SEQ ID NO: 1633687 - RNA, 19 nt, Homo sapiens
  misc_RNA (1)...(19): siRNA sense strand
ccgcauguaucacaccaaa

SEQ ID NO: 1633688 - RNA, 19 nt, Homo sapiens
  misc_RNA (1)...(19): siRNA sense strand
gaaagacucgguggaggaa

SEQ ID NO: 1633689 - RNA, 19 nt, Homo sapiens
  misc_RNA (1)...(19): siRNA sense strand
ccaagaaggagaagaaagu

SEQ ID NO: 1633690 - RNA, 19 nt, Homo sapiens
  misc_RNA (1)...(19): siRNA sense strand
ggacgacgaucagaaagac

SEQ ID NO: 1633691 - RNA, 19 nt, Homo sapiens
  misc_RNA (1)...(19): siRNA sense strand
gaggccuguugaagacuua

SEQ ID NO: 1633692 - RNA, 19 nt, Homo sapiens
  misc_RNA (1)...(19): siRNA sense strand
cgaagaacaaguaaucaug

SEQ ID NO: 1633693 - RNA, 19 nt, Homo sapiens
  misc_RNA (1)...(19): siRNA sense strand
uccgcaagcuggccucaua

SEQ ID NO: 1633694 - RNA, 19 nt, Homo sapiens
  misc_RNA (1)...(19): siRNA sense strand
cagaaagggugaagcaacu

SEQ ID NO: 1633695 - RNA, 19 nt, Homo sapiens
  misc_RNA (1)...(19): siRNA sense strand
gguacaagguggugaucau

SEQ ID NO: 1633696 - RNA, 19 nt, Homo sapiens
  misc_RNA (1)...(19): siRNA sense strand
gaggagaccagaaucaagu

SEQ ID NO: 1633697 - RNA, 19 nt, Homo sapiens
  misc_RNA (1)...(19): siRNA sense strand
ugacagaggagaccagaau

SEQ ID NO: 1633698 - RNA, 19 nt, Homo sapiens
  misc_RNA (1)...(19): siRNA sense strand
aaaggacgacgaucagaaa

SEQ ID NO: 1633699 - RNA, 19 nt, Homo sapiens
  misc_RNA (1)...(19): siRNA sense strand
ccaacgggcugcgguacaa

SEQ ID NO: 1633700 - RNA, 19 nt, Homo sapiens
  misc_RNA (1)...(19): siRNA sense strand
gcuaagaugcuggcacuga

SEQ ID NO: 1633701 - RNA, 19 nt, Homo sapiens
  misc_RNA (1)...(19): siRNA sense strand
ggaggccuguugaagacuu

SEQ ID NO: 1633702 - RNA, 19 nt, Homo sapiens
  misc_RNA (1)...(19): siRNA sense strand
gcacugggaaccgcaugua

SEQ ID NO: 1633703 - RNA, 19 nt, Homo sapiens
  misc_RNA (1)...(19): siRNA sense strand
gaagcucggcgaccucaug

SEQ ID NO: 1633704 - RNA, 19 nt, Homo sapiens
  misc_RNA (1)...(19): siRNA sense strand
cggauggugugcugcuuaa

SEQ ID NO: 1633705 - RNA, 19 nt, Homo sapiens
  misc_RNA (1)...(19): siRNA sense strand
cagaaaaucuuagaacaga

SEQ ID NO: 1633706 - RNA, 19 nt, Homo sapiens
  misc_RNA (1)...(19): siRNA sense strand
ugaccaagaaggagaagaa

SEQ ID NO: 1633707 - RNA, 19 nt, Homo sapiens
  misc_RNA (1)...(19): siRNA sense strand
agacuuaauccuucaaaug

SEQ ID NO: 1633708 - RNA, 19 nt, Homo sapiens
  misc_RNA (1)...(19): siRNA sense strand
ucaagaaacgcuacuacga

SEQ ID NO: 1633709 - RNA, 19 nt, Homo sapiens
  misc_RNA (1)...(19): siRNA sense strand
gaucauuacucgguguuac

SEQ ID NO: 1633710 - RNA, 19 nt, Homo sapiens
  misc_RNA (1)...(19): siRNA sense strand
agaggaaccugccacucaa

SEQ ID NO: 1633711 - RNA, 19 nt, Homo sapiens
  misc_RNA (1)...(19): siRNA sense strand
uuauaccacuuccaagcua

SEQ ID NO: 1633712 - RNA, 19 nt, Homo sapiens
  misc_RNA (1)...(19): siRNA sense strand
gagcucaccaggcugaaga

SEQ ID NO: 1633713 - RNA, 19 nt, Homo sapiens
  misc_RNA (1)...(19): siRNA sense strand
ggcugaagcucccaauucu

SEQ ID NO: 1633714 - RNA, 19 nt, Homo sapiens
  misc_RNA (1)...(19): siRNA sense strand
uacagaagcugagugaagu

SEQ ID NO: 1633715 - RNA, 19 nt, Homo sapiens
  misc_RNA (1)...(19): siRNA sense strand
ggagaccacuaagauguac

SEQ ID NO: 1633716 - RNA, 19 nt, Homo sapiens
  misc_RNA (1)...(19): siRNA sense strand
cgugggagccugugaguau

SEQ ID NO: 1633717 - RNA, 19 nt, Homo sapiens
  misc_RNA (1)...(19): siRNA sense strand
ugccucaguuucucuauga

SEQ ID NO: 1633718 - RNA, 19 nt, Homo sapiens
  misc_RNA (1)...(19): siRNA sense strand
agaaagugcugcagaaaau

SEQ ID NO: 1633719 - RNA, 19 nt, Homo sapiens
  misc_RNA (1)...(19): siRNA sense strand
ggugugcugcuuaaagaaa

SEQ ID NO: 1633720 - RNA, 19 nt, Homo sapiens
  misc_RNA (1)...(19): siRNA sense strand
gaaggcugacugccaugaa

SEQ ID NO: 1633721 - RNA, 19 nt, Homo sapiens
  misc_RNA (1)...(19): siRNA sense strand
ggauugaccgcuacaagca

SEQ ID NO: 1633722 - RNA, 19 nt, Homo sapiens
  misc_RNA (1)...(19): siRNA sense strand
ggaggaaaugcggaaguuu

SEQ ID NO: 1633723 - RNA, 19 nt, Homo sapiens
  misc_RNA (1)...(19): siRNA sense strand
ugacugugcauuucaacaa

SEQ ID NO: 1633724 - RNA, 19 nt, Homo sapiens
  misc_RNA (1)...(19): siRNA sense strand
uaccaucccuggcaucaag

SEQ ID NO: 1633725 - RNA, 19 nt, Homo sapiens
  misc_RNA (1)...(19): siRNA sense strand
cuacagaagcugagugaag

SEQ ID NO: 1633726 - RNA, 19 nt, Homo sapiens
  misc_RNA (1)...(19): siRNA sense strand
ggacucgguuguguguugu

SEQ ID NO: 1633727 - RNA, 19 nt, Homo sapiens
  misc_RNA (1)...(19): siRNA sense strand
gauccgguaugaaggaaac

SEQ ID NO: 1633728 - RNA, 19 nt, Homo sapiens
  misc_RNA (1)...(19): siRNA sense strand
aagaacaaguaaucaugga

SEQ ID NO: 1633729 - RNA, 19 nt, Homo sapiens
  misc_RNA (1)...(19): siRNA sense strand
ccacucaagcugcucauca

SEQ ID NO: 1633730 - RNA, 19 nt, Homo sapiens
  misc_RNA (1)...(19): siRNA sense strand
gcuggcugcuuggaagaaa

SEQ ID NO: 1633731 - RNA, 19 nt, Homo sapiens
  misc_RNA (1)...(19): siRNA sense strand
gagcccugguugcagagaa

SEQ ID NO: 1633732 - RNA, 19 nt, Homo sapiens
  misc_RNA (1)...(19): siRNA sense strand
ugaccuaccugcgacagau

SEQ ID NO: 1633733 - RNA, 19 nt, Homo sapiens
  misc_RNA (1)...(19): siRNA sense strand
cuucguggaucccaagaug

SEQ ID NO: 1633734 - RNA, 19 nt, Homo sapiens
  misc_RNA (1)...(19): siRNA sense strand
gcaagcacaggucuuuaag

SEQ ID NO: 1633735 - RNA, 19 nt, Homo sapiens
  misc_RNA (1)...(19): siRNA sense strand
aggaaaugcggaaguuuaa

SEQ ID NO: 1633736 - RNA, 19 nt, Homo sapiens
  misc_RNA (1)...(19): siRNA sense strand
uggaggaaaugcggaaguu

SEQ ID NO: 1633737 - RNA, 19 nt, Homo sapiens
  misc_RNA (1)...(19): siRNA sense strand
ucaagcugcucaucauguc

SEQ ID NO: 1633738 - RNA, 19 nt, Homo sapiens
  misc_RNA (1)...(19): siRNA sense strand
gggaaccgcauguaucaca

SEQ ID NO: 1633739 - RNA, 19 nt, Homo sapiens
  misc_RNA (1)...(19): siRNA sense strand
aauaccugcuggcugagua

SEQ ID NO: 1633740 - RNA, 19 nt, Homo sapiens
  misc_RNA (1)...(19): siRNA sense strand
ugucgaagaaggagaagaa

SEQ ID NO: 1633741 - RNA, 19 nt, Homo sapiens
  misc_RNA (1)...(19): siRNA sense strand
acuaagauguacaugaaag

SEQ ID NO: 1633742 - RNA, 19 nt, Homo sapiens
  misc_RNA (1)...(19): siRNA sense strand
ggacaaggacacguugaag

SEQ ID NO: 1633743 - RNA, 19 nt, Homo sapiens
  misc_RNA (1)...(19): siRNA sense strand
ggucgucuccuaccagauc

SEQ ID NO: 1633744 - RNA, 19 nt, Homo sapiens
  misc_RNA (1)...(19): siRNA sense strand
aagaggaaccugccacuca

SEQ ID NO: 1633745 - RNA, 19 nt, Homo sapiens
  misc_RNA (1)...(19): siRNA sense strand
ggaggaacgccuacaagac

SEQ ID NO: 1633746 - RNA, 19 nt, Homo sapiens
  misc_RNA (1)...(19): siRNA sense strand
gugggaaggucaagaaacg

SEQ ID NO: 1633747 - RNA, 19 nt, Homo sapiens
  misc_RNA (1)...(19): siRNA sense strand
gaaggcugacgagguggua

SEQ ID NO: 1633748 - RNA, 19 nt, Homo sapiens
  misc_RNA (1)...(19): siRNA sense strand
uggaggacuucacccagaa

SEQ ID NO: 1633749 - RNA, 19 nt, Homo sapiens
  misc_RNA (1)...(19): siRNA sense strand
gauggugugcugcuuaaag

SEQ ID NO: 1633750 - RNA, 19 nt, Homo sapiens
  misc_RNA (1)...(19): siRNA sense strand
cggcugaagcucccaauuc

SEQ ID NO: 1633751 - RNA, 19 nt, Homo sapiens
  misc_RNA (1)...(19): siRNA sense strand
ucacuggcguauccuccuu

SEQ ID NO: 1633752 - RNA, 19 nt, Homo sapiens
  misc_RNA (1)...(19): siRNA sense strand
gccgagacgucgcuuacca

SEQ ID NO: 1633753 - RNA, 19 nt, Homo sapiens
  misc_RNA (1)...(19): siRNA sense strand
ucccaauucucuccgaaga

SEQ ID NO: 1633754 - RNA, 19 nt, Homo sapiens
  misc_RNA (1)...(19): siRNA sense strand
gccaggagaagaucaguag

SEQ ID NO: 1633755 - RNA, 19 nt, Homo sapiens
  misc_RNA (1)...(19): siRNA sense strand
guacaugaaaggcgucucu

SEQ ID NO: 1633756 - RNA, 19 nt, Homo sapiens
  misc_RNA (1)...(19): siRNA sense strand
ggacuccgaccucgaucug

SEQ ID NO: 1633757 - RNA, 19 nt, Homo sapiens
  misc_RNA (1)...(19): siRNA sense strand
agaaguggaugaggaagag

SEQ ID NO: 1633758 - RNA, 19 nt, Homo sapiens
  misc_RNA (1)...(19): siRNA sense strand
aagacucgguggaggaaau

SEQ ID NO: 1633759 - RNA, 19 nt, Homo sapiens
  misc_RNA (1)...(19): siRNA sense strand
gaccaagaaggagaagaaa

SEQ ID NO: 1633760 - RNA, 19 nt, Homo sapiens
  misc_RNA (1)...(19): siRNA sense strand
guacacggacauccucauc

SEQ ID NO: 1633761 - RNA, 19 nt, Homo sapiens
  misc_RNA (1)...(19): siRNA sense strand
gagaccagaaucaaguuca

SEQ ID NO: 1633762 - RNA, 19 nt, Homo sapiens
  misc_RNA (1)...(19): siRNA sense strand
uuccgaagcugagaugaga

SEQ ID NO: 1633763 - RNA, 19 nt, Homo sapiens
  misc_RNA (1)...(19): siRNA sense strand
aagcugagaugagacucuu

SEQ ID NO: 1633764 - RNA, 19 nt, Homo sapiens
  misc_RNA (1)...(19): siRNA sense strand
ggaaguuuaagaagucaag

SEQ ID NO: 1633765 - RNA, 19 nt, Homo sapiens
  misc_RNA (1)...(19): siRNA sense strand
acaagguggugaucaucga

SEQ ID NO: 1633766 - RNA, 19 nt, Homo sapiens
  misc_RNA (1)...(19): siRNA sense strand
gcugugugauggaugagaa

SEQ ID NO: 1633767 - RNA, 19 nt, Homo sapiens
  misc_RNA (1)...(19): siRNA sense strand
ggacugugaggucugauuc

SEQ ID NO: 1633768 - RNA, 19 nt, Homo sapiens
  misc_RNA (1)...(19): siRNA sense strand
ggaugagaauugucaagcu

SEQ ID NO: 1633769 - RNA, 19 nt, Homo sapiens
  misc_RNA (1)...(19): siRNA sense strand
ugugauggaugagaauugu

SEQ ID NO: 1633770 - RNA, 19 nt, Homo sapiens
  misc_RNA (1)...(19): siRNA sense strand
ccccaaaacugaccaugaa

SEQ ID NO: 1633771 - RNA, 19 nt, Homo sapiens
  misc_RNA (1)...(19): siRNA sense strand
gugggccugugcauuguug

SEQ ID NO: 1633772 - RNA, 19 nt, Homo sapiens
  misc_RNA (1)...(19): siRNA sense strand
gaauugucaagcuggagaa

SEQ ID NO: 1633773 - RNA, 19 nt, Homo sapiens
  misc_RNA (1)...(19): siRNA sense strand
gggcggugauuguccaaaa

SEQ ID NO: 1633774 - RNA, 19 nt, Homo sapiens
  misc_RNA (1)...(19): siRNA sense strand
ggacugugaggucugauuc

SEQ ID NO: 1633775 - RNA, 19 nt, Homo sapiens
  misc_RNA (1)...(19): siRNA sense strand
ggaugagaauugucaagcu

SEQ ID NO: 1633776 - RNA, 19 nt, Homo sapiens
  misc_RNA (1)...(19): siRNA sense strand
ccccaaaacugaccaugaa

SEQ ID NO: 1633777 - RNA, 19 nt, Homo sapiens
  misc_RNA (1)...(19): siRNA sense strand
gaauugucaagcuggagaa

SEQ ID NO: 1633778 - RNA, 19 nt, Homo sapiens
  misc_RNA (1)...(19): siRNA sense strand
ggacugugaggucugauuc

SEQ ID NO: 1633779 - RNA, 19 nt, Homo sapiens
  misc_RNA (1)...(19): siRNA sense strand
ggaugagaauugucaagcu

SEQ ID NO: 1633780 - RNA, 19 nt, Homo sapiens
  misc_RNA (1)...(19): siRNA sense strand
ccccaaaacugaccaugaa

SEQ ID NO: 1633781 - RNA, 19 nt, Homo sapiens
  misc_RNA (1)...(19): siRNA sense strand
gaauugucaagcuggagaa

SEQ ID NO: 1633782 - RNA, 19 nt, Homo sapiens
  misc_RNA (1)...(19): siRNA sense strand
ggacugugaggucugauuc

SEQ ID NO: 1633783 - RNA, 19 nt, Homo sapiens
  misc_RNA (1)...(19): siRNA sense strand
ggaugagaauugucaagcu

SEQ ID NO: 1633784 - RNA, 19 nt, Homo sapiens
  misc_RNA (1)...(19): siRNA sense strand
ccccaaaacugaccaugaa

SEQ ID NO: 1633785 - RNA, 19 nt, Homo sapiens
  misc_RNA (1)...(19): siRNA sense strand
gaauugucaagcuggagaa

SEQ ID NO: 1633786 - RNA, 19 nt, Homo sapiens
  misc_RNA (1)...(19): siRNA sense strand
ggacagcuauugaagcauu

SEQ ID NO: 1633787 - RNA, 19 nt, Homo sapiens
  misc_RNA (1)...(19): siRNA sense strand
ggaagaugaugaagauuug

SEQ ID NO: 1633788 - RNA, 19 nt, Homo sapiens
  misc_RNA (1)...(19): siRNA sense strand
gaagaagauuggaagaaga

SEQ ID NO: 1633789 - RNA, 19 nt, Homo sapiens
  misc_RNA (1)...(19): siRNA sense strand
gaaauugacaaacguauga

SEQ ID NO: 1633790 - RNA, 19 nt, Homo sapiens
  misc_RNA (1)...(19): siRNA sense strand
guacagcucucugaaagaa

SEQ ID NO: 1633791 - RNA, 19 nt, Homo sapiens
  misc_RNA (1)...(19): siRNA sense strand
ggaaauauggcuucucuga

SEQ ID NO: 1633792 - RNA, 19 nt, Homo sapiens
  misc_RNA (1)...(19): siRNA sense strand
gaaagacgagagaccaaua

SEQ ID NO: 1633793 - RNA, 19 nt, Homo sapiens
  misc_RNA (1)...(19): siRNA sense strand
guaaagcauugugucauaa

SEQ ID NO: 1633794 - RNA, 19 nt, Homo sapiens
  misc_RNA (1)...(19): siRNA sense strand
uggcuucucugacccauua

SEQ ID NO: 1633795 - RNA, 19 nt, Homo sapiens
  misc_RNA (1)...(19): siRNA sense strand
ugaaagaacuggugcuaca

SEQ ID NO: 1633796 - RNA, 19 nt, Homo sapiens
  misc_RNA (1)...(19): siRNA sense strand
guacagcaaagaauacaua

SEQ ID NO: 1633797 - RNA, 19 nt, Homo sapiens
  misc_RNA (1)...(19): siRNA sense strand
ggaucaaguugucaaagaa

SEQ ID NO: 1633798 - RNA, 19 nt, Homo sapiens
  misc_RNA (1)...(19): siRNA sense strand
gaauauaacacucaguuuc

SEQ ID NO: 1633799 - RNA, 19 nt, Homo sapiens
  misc_RNA (1)...(19): siRNA sense strand
gguggaagaugaugaagau

SEQ ID NO: 1633800 - RNA, 19 nt, Homo sapiens
  misc_RNA (1)...(19): siRNA sense strand
gcacaacgacucccucaau

SEQ ID NO: 1633801 - RNA, 19 nt, Homo sapiens
  misc_RNA (1)...(19): siRNA sense strand
cagcaaagaauacauagaa

SEQ ID NO: 1633802 - RNA, 19 nt, Homo sapiens
  misc_RNA (1)...(19): siRNA sense strand
aguaaagcauugugucaua

SEQ ID NO: 1633803 - RNA, 19 nt, Homo sapiens
  misc_RNA (1)...(19): siRNA sense strand
uauugaagcuguagggaaa

SEQ ID NO: 1633804 - RNA, 19 nt, Homo sapiens
  misc_RNA (1)...(19): siRNA sense strand
aagaacuggugcuacauua

SEQ ID NO: 1633805 - RNA, 19 nt, Homo sapiens
  misc_RNA (1)...(19): siRNA sense strand
gacgagagaccaauacuug

SEQ ID NO: 1633806 - RNA, 19 nt, Homo sapiens
  misc_RNA (1)...(19): siRNA sense strand
gaaguaaagcauuguguca

SEQ ID NO: 1633807 - RNA, 19 nt, Homo sapiens
  misc_RNA (1)...(19): siRNA sense strand
aaacguaugaacagcauua

SEQ ID NO: 1633808 - RNA, 19 nt, Homo sapiens
  misc_RNA (1)...(19): siRNA sense strand
gaagcgagauggcacuuuu

SEQ ID NO: 1633809 - RNA, 19 nt, Homo sapiens
  misc_RNA (1)...(19): siRNA sense strand
gccaacaacgguaugaaua

SEQ ID NO: 1633810 - RNA, 19 nt, Homo sapiens
  misc_RNA (1)...(19): siRNA sense strand
ccaacaacgguaugaauaa

SEQ ID NO: 1633811 - RNA, 19 nt, Homo sapiens
  misc_RNA (1)...(19): siRNA sense strand
gggaagaagugaaugaaaa

SEQ ID NO: 1633812 - RNA, 19 nt, Homo sapiens
  misc_RNA (1)...(19): siRNA sense strand
gcaacuggcuauggcuuug

SEQ ID NO: 1633813 - RNA, 19 nt, Homo sapiens
  misc_RNA (1)...(19): siRNA sense strand
ucaguucugugguugaauu

SEQ ID NO: 1633814 - RNA, 19 nt, Homo sapiens
  misc_RNA (1)...(19): siRNA sense strand
gaagcaggcagcugaguau

SEQ ID NO: 1633815 - RNA, 19 nt, Homo sapiens
  misc_RNA (1)...(19): siRNA sense strand
cauggugauuauacucuua

SEQ ID NO: 1633816 - RNA, 19 nt, Homo sapiens
  misc_RNA (1)...(19): siRNA sense strand
gcaaugagaaagaaauaca

SEQ ID NO: 1633817 - RNA, 19 nt, Homo sapiens
  misc_RNA (1)...(19): siRNA sense strand
caauauguccuuacaagau

SEQ ID NO: 1633818 - RNA, 19 nt, Homo sapiens
  misc_RNA (1)...(19): siRNA sense strand
aauauucacugguggaaga

SEQ ID NO: 1633819 - RNA, 19 nt, Homo sapiens
  misc_RNA (1)...(19): siRNA sense strand
gagaaagaaauacaaagga

SEQ ID NO: 1633820 - RNA, 19 nt, Homo sapiens
  misc_RNA (1)...(19): siRNA sense strand
ucaguauaaucccaaauug

SEQ ID NO: 1633821 - RNA, 19 nt, Homo sapiens
  misc_RNA (1)...(19): siRNA sense strand
caagagcgguacagcaaag

SEQ ID NO: 1633822 - RNA, 19 nt, Homo sapiens
  misc_RNA (1)...(19): siRNA sense strand
gcagcugaguaucgagaaa

SEQ ID NO: 1633823 - RNA, 19 nt, Homo sapiens
  misc_RNA (1)...(19): siRNA sense strand
gcaggcagcugaguaucga

SEQ ID NO: 1633824 - RNA, 19 nt, Homo sapiens
  misc_RNA (1)...(19): siRNA sense strand
ggaagaagacuugaagaag

SEQ ID NO: 1633825 - RNA, 19 nt, Homo sapiens
  misc_RNA (1)...(19): siRNA sense strand
gaaauacaaaggauuaugc

SEQ ID NO: 1633826 - RNA, 19 nt, Homo sapiens
  misc_RNA (1)...(19): siRNA sense strand
ccaaauaccaacaggauca

SEQ ID NO: 1633827 - RNA, 19 nt, Homo sapiens
  misc_RNA (1)...(19): siRNA sense strand
ucucgaaucagugaaauua

SEQ ID NO: 1633828 - RNA, 19 nt, Homo sapiens
  misc_RNA (1)...(19): siRNA sense strand
ccauuaaccuucaguucug

SEQ ID NO: 1633829 - RNA, 19 nt, Homo sapiens
  misc_RNA (1)...(19): siRNA sense strand
ggaagcagcaaccgaaaca

SEQ ID NO: 1633830 - RNA, 19 nt, Homo sapiens
  misc_RNA (1)...(19): siRNA sense strand
ugaaggcaaugagaaagaa

SEQ ID NO: 1633831 - RNA, 19 nt, Homo sapiens
  misc_RNA (1)...(19): siRNA sense strand
gcauuaaaccagaccuuau

SEQ ID NO: 1633832 - RNA, 19 nt, Homo sapiens
  misc_RNA (1)...(19): siRNA sense strand
acacuagccuacccaguau

SEQ ID NO: 1633833 - RNA, 19 nt, Homo sapiens
  misc_RNA (1)...(19): siRNA sense strand
gaaaaggacagcuauugaa

SEQ ID NO: 1633834 - RNA, 19 nt, Homo sapiens
  misc_RNA (1)...(19): siRNA sense strand
gaugagaagacauggaaug

SEQ ID NO: 1633835 - RNA, 19 nt, Homo sapiens
  misc_RNA (1)...(19): siRNA sense strand
guugaagucucgaaucagu

SEQ ID NO: 1633836 - RNA, 19 nt, Homo sapiens
  misc_RNA (1)...(19): siRNA sense strand
uacaagaugcugaauggua

SEQ ID NO: 1633837 - RNA, 19 nt, Homo sapiens
  misc_RNA (1)...(19): siRNA sense strand
cacacuagccuacccagua

SEQ ID NO: 1633838 - RNA, 19 nt, Homo sapiens
  misc_RNA (1)...(19): siRNA sense strand
caacaacgguaugaauaac

SEQ ID NO: 1633839 - RNA, 19 nt, Homo sapiens
  misc_RNA (1)...(19): siRNA sense strand
gugaaauuauugacaguag

SEQ ID NO: 1633840 - RNA, 19 nt, Homo sapiens
  misc_RNA (1)...(19): siRNA sense strand
gaccuuauccagcugagaa

SEQ ID NO: 1633841 - RNA, 19 nt, Homo sapiens
  misc_RNA (1)...(19): siRNA sense strand
agaagaagauuggaagaag

SEQ ID NO: 1633842 - RNA, 19 nt, Homo sapiens
  misc_RNA (1)...(19): siRNA sense strand
guucugugguugaauuaau

SEQ ID NO: 1633843 - RNA, 19 nt, Homo sapiens
  misc_RNA (1)...(19): siRNA sense strand
uggaagaugaugaagauuu

SEQ ID NO: 1633844 - RNA, 19 nt, Homo sapiens
  misc_RNA (1)...(19): siRNA sense strand
ccaggaaauccaaaugaaa

SEQ ID NO: 1633845 - RNA, 19 nt, Homo sapiens
  misc_RNA (1)...(19): siRNA sense strand
cgagaugcgucuacuaaaa

SEQ ID NO: 1633846 - RNA, 19 nt, Homo sapiens
  misc_RNA (1)...(19): siRNA sense strand
cacaacgacucccucaaug

SEQ ID NO: 1633847 - RNA, 19 nt, Homo sapiens
  misc_RNA (1)...(19): siRNA sense strand
acaacgguaugaauaacaa

SEQ ID NO: 1633848 - RNA, 19 nt, Homo sapiens
  misc_RNA (1)...(19): siRNA sense strand
gcauggugauuauacucuu

SEQ ID NO: 1633849 - RNA, 19 nt, Homo sapiens
  misc_RNA (1)...(19): siRNA sense strand
caaguugucaaagaagaua

SEQ ID NO: 1633850 - RNA, 19 nt, Homo sapiens
  misc_RNA (1)...(19): siRNA sense strand
cgaaucagugaaauuauug

SEQ ID NO: 1633851 - RNA, 19 nt, Homo sapiens
  misc_RNA (1)...(19): siRNA sense strand
aauauguccuuacaagaug

SEQ ID NO: 1633852 - RNA, 19 nt, Homo sapiens
  misc_RNA (1)...(19): siRNA sense strand
cccaggaaauccaaaugaa

SEQ ID NO: 1633853 - RNA, 19 nt, Homo sapiens
  misc_RNA (1)...(19): siRNA sense strand
augaaucucuagcucagua

SEQ ID NO: 1633854 - RNA, 19 nt, Homo sapiens
  misc_RNA (1)...(19): siRNA sense strand
aagaagacuugaagaagca

SEQ ID NO: 1633855 - RNA, 19 nt, Homo sapiens
  misc_RNA (1)...(19): siRNA sense strand
aacaauauguccuuacaag

SEQ ID NO: 1633856 - RNA, 19 nt, Homo sapiens
  misc_RNA (1)...(19): siRNA sense strand
gaaucucuagcucaguaua

SEQ ID NO: 1633857 - RNA, 19 nt, Homo sapiens
  misc_RNA (1)...(19): siRNA sense strand
gacagcuauugaagcauuu

SEQ ID NO: 1633858 - RNA, 19 nt, Homo sapiens
  misc_RNA (1)...(19): siRNA sense strand
caacgacucccucaauguc

SEQ ID NO: 1633859 - RNA, 19 nt, Homo sapiens
  misc_RNA (1)...(19): siRNA sense strand
aggaucaaguugucaaaga

SEQ ID NO: 1633860 - RNA, 19 nt, Homo sapiens
  misc_RNA (1)...(19): siRNA sense strand
ugaaaacacugaagaccaa

SEQ ID NO: 1633861 - RNA, 19 nt, Homo sapiens
  misc_RNA (1)...(19): siRNA sense strand
gaaggcaaugagaaagaaa

SEQ ID NO: 1633862 - RNA, 19 nt, Homo sapiens
  misc_RNA (1)...(19): siRNA sense strand
guuuaaacgugaaggcaau

SEQ ID NO: 1633863 - RNA, 19 nt, Homo sapiens
  misc_RNA (1)...(19): siRNA sense strand
aaggacagcuauugaagca

SEQ ID NO: 1633864 - RNA, 19 nt, Homo sapiens
  misc_RNA (1)...(19): siRNA sense strand
gcacaucccaggaaaucca

SEQ ID NO: 1633865 - RNA, 19 nt, Homo sapiens
  misc_RNA (1)...(19): siRNA sense strand
acacugaagaccaauauuc

SEQ ID NO: 1633866 - RNA, 19 nt, Homo sapiens
  misc_RNA (1)...(19): siRNA sense strand
gagaaagacgagagaccaa

SEQ ID NO: 1633867 - RNA, 19 nt, Homo sapiens
  misc_RNA (1)...(19): siRNA sense strand
cgagaaauugacaaacgua

SEQ ID NO: 1633868 - RNA, 19 nt, Homo sapiens
  misc_RNA (1)...(19): siRNA sense strand
gaagauuggaagaagacuu

SEQ ID NO: 1633869 - RNA, 19 nt, Homo sapiens
  misc_RNA (1)...(19): siRNA sense strand
uacgagaugcgucuacuaa

SEQ ID NO: 1633870 - RNA, 19 nt, Homo sapiens
  misc_RNA (1)...(19): siRNA sense strand
cuuacaagaugcugaaugg

SEQ ID NO: 1633871 - RNA, 19 nt, Homo sapiens
  misc_RNA (1)...(19): siRNA sense strand
aaagaacuggugcuacauu

SEQ ID NO: 1633872 - RNA, 19 nt, Homo sapiens
  misc_RNA (1)...(19): siRNA sense strand
aaacacugaagaccaauau

SEQ ID NO: 1633873 - RNA, 19 nt, Homo sapiens
  misc_RNA (1)...(19): siRNA sense strand
gagagaccaauacuugaug

SEQ ID NO: 1633874 - RNA, 19 nt, Homo sapiens
  misc_RNA (1)...(19): siRNA sense strand
aaguugaagucucgaauca

SEQ ID NO: 1633875 - RNA, 19 nt, Homo sapiens
  misc_RNA (1)...(19): siRNA sense strand
cuaccggaaugaaucucua

SEQ ID NO: 1633876 - RNA, 19 nt, Homo sapiens
  misc_RNA (1)...(19): siRNA sense strand
gagaaauugacaaacguau

SEQ ID NO: 1633877 - RNA, 19 nt, Homo sapiens
  misc_RNA (1)...(19): siRNA sense strand
gacaguagaagaagauugg

SEQ ID NO: 1633878 - RNA, 19 nt, Homo sapiens
  misc_RNA (1)...(19): siRNA sense strand
auaaaccacuaccggaaug

SEQ ID NO: 1633879 - RNA, 19 nt, Homo sapiens
  misc_RNA (1)...(19): siRNA sense strand
cgagggaagaagugaauga

SEQ ID NO: 1633880 - RNA, 19 nt, Homo sapiens
  misc_RNA (1)...(19): siRNA sense strand
uggaagaagacuugaagaa

SEQ ID NO: 1633881 - RNA, 19 nt, Homo sapiens
  misc_RNA (1)...(19): siRNA sense strand
ugaagucucgaaucaguga

SEQ ID NO: 1633882 - RNA, 19 nt, Homo sapiens
  misc_RNA (1)...(19): siRNA sense strand
guacgagaugcgucuacua

SEQ ID NO: 1633883 - RNA, 19 nt, Homo sapiens
  misc_RNA (1)...(19): siRNA sense strand
gaaugguacuggggagaua

SEQ ID NO: 1633884 - RNA, 19 nt, Homo sapiens
  misc_RNA (1)...(19): siRNA sense strand
gagggaagaagugaaugaa

SEQ ID NO: 1633885 - RNA, 19 nt, Homo sapiens
  misc_RNA (1)...(19): siRNA sense strand
ggacggcgaaguaaagcau

SEQ ID NO: 1633886 - RNA, 19 nt, Homo sapiens
  misc_RNA (1)...(19): siRNA sense strand
ggacagcuauugaagcauu

SEQ ID NO: 1633887 - RNA, 19 nt, Homo sapiens
  misc_RNA (1)...(19): siRNA sense strand
ggaagaugaugaagauuug

SEQ ID NO: 1633888 - RNA, 19 nt, Homo sapiens
  misc_RNA (1)...(19): siRNA sense strand
gaagaagauuggaagaaga

SEQ ID NO: 1633889 - RNA, 19 nt, Homo sapiens
  misc_RNA (1)...(19): siRNA sense strand
gaaauugacaaacguauga

SEQ ID NO: 1633890 - RNA, 19 nt, Homo sapiens
  misc_RNA (1)...(19): siRNA sense strand
guacagcucucugaaagaa

SEQ ID NO: 1633891 - RNA, 19 nt, Homo sapiens
  misc_RNA (1)...(19): siRNA sense strand
ggaaauauggcuucucuga

SEQ ID NO: 1633892 - RNA, 19 nt, Homo sapiens
  misc_RNA (1)...(19): siRNA sense strand
gaaagacgagagaccaaua

SEQ ID NO: 1633893 - RNA, 19 nt, Homo sapiens
  misc_RNA (1)...(19): siRNA sense strand
guaaagcauugugucauaa

SEQ ID NO: 1633894 - RNA, 19 nt, Homo sapiens
  misc_RNA (1)...(19): siRNA sense strand
uggcuucucugacccauua

SEQ ID NO: 1633895 - RNA, 19 nt, Homo sapiens
  misc_RNA (1)...(19): siRNA sense strand
ugaaagaacuggugcuaca

SEQ ID NO: 1633896 - RNA, 19 nt, Homo sapiens
  misc_RNA (1)...(19): siRNA sense strand
guacagcaaagaauacaua

SEQ ID NO: 1633897 - RNA, 19 nt, Homo sapiens
  misc_RNA (1)...(19): siRNA sense strand
ggaucaaguugucaaagaa

SEQ ID NO: 1633898 - RNA, 19 nt, Homo sapiens
  misc_RNA (1)...(19): siRNA sense strand
gaauauaacacucaguuuc

SEQ ID NO: 1633899 - RNA, 19 nt, Homo sapiens
  misc_RNA (1)...(19): siRNA sense strand
gguggaagaugaugaagau

SEQ ID NO: 1633900 - RNA, 19 nt, Homo sapiens
  misc_RNA (1)...(19): siRNA sense strand
gcacaacgacucccucaau

SEQ ID NO: 1633901 - RNA, 19 nt, Homo sapiens
  misc_RNA (1)...(19): siRNA sense strand
cagcaaagaauacauagaa

SEQ ID NO: 1633902 - RNA, 19 nt, Homo sapiens
  misc_RNA (1)...(19): siRNA sense strand
aguaaagcauugugucaua

SEQ ID NO: 1633903 - RNA, 19 nt, Homo sapiens
  misc_RNA (1)...(19): siRNA sense strand
uauugaagcuguagggaaa

SEQ ID NO: 1633904 - RNA, 19 nt, Homo sapiens
  misc_RNA (1)...(19): siRNA sense strand
aagaacuggugcuacauua

SEQ ID NO: 1633905 - RNA, 19 nt, Homo sapiens
  misc_RNA (1)...(19): siRNA sense strand
gacgagagaccaauacuug

SEQ ID NO: 1633906 - RNA, 19 nt, Homo sapiens
  misc_RNA (1)...(19): siRNA sense strand
gaaguaaagcauuguguca

SEQ ID NO: 1633907 - RNA, 19 nt, Homo sapiens
  misc_RNA (1)...(19): siRNA sense strand
aaacguaugaacagcauua

SEQ ID NO: 1633908 - RNA, 19 nt, Homo sapiens
  misc_RNA (1)...(19): siRNA sense strand
gaagcgagauggcacuuuu

SEQ ID NO: 1633909 - RNA, 19 nt, Homo sapiens
  misc_RNA (1)...(19): siRNA sense strand
gccaacaacgguaugaaua

SEQ ID NO: 1633910 - RNA, 19 nt, Homo sapiens
  misc_RNA (1)...(19): siRNA sense strand
ccaacaacgguaugaauaa

SEQ ID NO: 1633911 - RNA, 19 nt, Homo sapiens
  misc_RNA (1)...(19): siRNA sense strand
gggaagaagugaaugaaaa

SEQ ID NO: 1633912 - RNA, 19 nt, Homo sapiens
  misc_RNA (1)...(19): siRNA sense strand
gcaacuggcuauggcuuug

SEQ ID NO: 1633913 - RNA, 19 nt, Homo sapiens
  misc_RNA (1)...(19): siRNA sense strand
ucaguucugugguugaauu

SEQ ID NO: 1633914 - RNA, 19 nt, Homo sapiens
  misc_RNA (1)...(19): siRNA sense strand
gaagcaggcagcugaguau

SEQ ID NO: 1633915 - RNA, 19 nt, Homo sapiens
  misc_RNA (1)...(19): siRNA sense strand
cauggugauuauacucuua

SEQ ID NO: 1633916 - RNA, 19 nt, Homo sapiens
  misc_RNA (1)...(19): siRNA sense strand
gcaaugagaaagaaauaca

SEQ ID NO: 1633917 - RNA, 19 nt, Homo sapiens
  misc_RNA (1)...(19): siRNA sense strand
caauauguccuuacaagau

SEQ ID NO: 1633918 - RNA, 19 nt, Homo sapiens
  misc_RNA (1)...(19): siRNA sense strand
aauauucacugguggaaga

SEQ ID NO: 1633919 - RNA, 19 nt, Homo sapiens
  misc_RNA (1)...(19): siRNA sense strand
gagaaagaaauacaaagga

SEQ ID NO: 1633920 - RNA, 19 nt, Homo sapiens
  misc_RNA (1)...(19): siRNA sense strand
ucaguauaaucccaaauug

SEQ ID NO: 1633921 - RNA, 19 nt, Homo sapiens
  misc_RNA (1)...(19): siRNA sense strand
caagagcgguacagcaaag

SEQ ID NO: 1633922 - RNA, 19 nt, Homo sapiens
  misc_RNA (1)...(19): siRNA sense strand
gcagcugaguaucgagaaa

SEQ ID NO: 1633923 - RNA, 19 nt, Homo sapiens
  misc_RNA (1)...(19): siRNA sense strand
gcaggcagcugaguaucga

SEQ ID NO: 1633924 - RNA, 19 nt, Homo sapiens
  misc_RNA (1)...(19): siRNA sense strand
ggaagaagacuugaagaag

SEQ ID NO: 1633925 - RNA, 19 nt, Homo sapiens
  misc_RNA (1)...(19): siRNA sense strand
gaaauacaaaggauuaugc

SEQ ID NO: 1633926 - RNA, 19 nt, Homo sapiens
  misc_RNA (1)...(19): siRNA sense strand
ccaaauaccaacaggauca

SEQ ID NO: 1633927 - RNA, 19 nt, Homo sapiens
  misc_RNA (1)...(19): siRNA sense strand
ucucgaaucagugaaauua

SEQ ID NO: 1633928 - RNA, 19 nt, Homo sapiens
  misc_RNA (1)...(19): siRNA sense strand
ccauuaaccuucaguucug

SEQ ID NO: 1633929 - RNA, 19 nt, Homo sapiens
  misc_RNA (1)...(19): siRNA sense strand
ggaagcagcaaccgaaaca

SEQ ID NO: 1633930 - RNA, 19 nt, Homo sapiens
  misc_RNA (1)...(19): siRNA sense strand
ugaaggcaaugagaaagaa

SEQ ID NO: 1633931 - RNA, 19 nt, Homo sapiens
  misc_RNA (1)...(19): siRNA sense strand
gcauuaaaccagaccuuau

SEQ ID NO: 1633932 - RNA, 19 nt, Homo sapiens
  misc_RNA (1)...(19): siRNA sense strand
acacuagccuacccaguau

SEQ ID NO: 1633933 - RNA, 19 nt, Homo sapiens
  misc_RNA (1)...(19): siRNA sense strand
gaaaaggacagcuauugaa

SEQ ID NO: 1633934 - RNA, 19 nt, Homo sapiens
  misc_RNA (1)...(19): siRNA sense strand
gaugagaagacauggaaug

SEQ ID NO: 1633935 - RNA, 19 nt, Homo sapiens
  misc_RNA (1)...(19): siRNA sense strand
guugaagucucgaaucagu

SEQ ID NO: 1633936 - RNA, 19 nt, Homo sapiens
  misc_RNA (1)...(19): siRNA sense strand
uacaagaugcugaauggua

SEQ ID NO: 1633937 - RNA, 19 nt, Homo sapiens
  misc_RNA (1)...(19): siRNA sense strand
cacacuagccuacccagua

SEQ ID NO: 1633938 - RNA, 19 nt, Homo sapiens
  misc_RNA (1)...(19): siRNA sense strand
caacaacgguaugaauaac

SEQ ID NO: 1633939 - RNA, 19 nt, Homo sapiens
  misc_RNA (1)...(19): siRNA sense strand
gugaaauuauugacaguag

SEQ ID NO: 1633940 - RNA, 19 nt, Homo sapiens
  misc_RNA (1)...(19): siRNA sense strand
gaccuuauccagcugagaa

SEQ ID NO: 1633941 - RNA, 19 nt, Homo sapiens
  misc_RNA (1)...(19): siRNA sense strand
agaagaagauuggaagaag

SEQ ID NO: 1633942 - RNA, 19 nt, Homo sapiens
  misc_RNA (1)...(19): siRNA sense strand
guucugugguugaauuaau

SEQ ID NO: 1633943 - RNA, 19 nt, Homo sapiens
  misc_RNA (1)...(19): siRNA sense strand
uggaagaugaugaagauuu

SEQ ID NO: 1633944 - RNA, 19 nt, Homo sapiens
  misc_RNA (1)...(19): siRNA sense strand
ccaggaaauccaaaugaaa

SEQ ID NO: 1633945 - RNA, 19 nt, Homo sapiens
  misc_RNA (1)...(19): siRNA sense strand
cgagaugcgucuacuaaaa

SEQ ID NO: 1633946 - RNA, 19 nt, Homo sapiens
  misc_RNA (1)...(19): siRNA sense strand
cacaacgacucccucaaug

SEQ ID NO: 1633947 - RNA, 19 nt, Homo sapiens
  misc_RNA (1)...(19): siRNA sense strand
acaacgguaugaauaacaa

SEQ ID NO: 1633948 - RNA, 19 nt, Homo sapiens
  misc_RNA (1)...(19): siRNA sense strand
gcauggugauuauacucuu

SEQ ID NO: 1633949 - RNA, 19 nt, Homo sapiens
  misc_RNA (1)...(19): siRNA sense strand
caaguugucaaagaagaua

SEQ ID NO: 1633950 - RNA, 19 nt, Homo sapiens
  misc_RNA (1)...(19): siRNA sense strand
cgaaucagugaaauuauug

SEQ ID NO: 1633951 - RNA, 19 nt, Homo sapiens
  misc_RNA (1)...(19): siRNA sense strand
aauauguccuuacaagaug

SEQ ID NO: 1633952 - RNA, 19 nt, Homo sapiens
  misc_RNA (1)...(19): siRNA sense strand
cccaggaaauccaaaugaa

SEQ ID NO: 1633953 - RNA, 19 nt, Homo sapiens
  misc_RNA (1)...(19): siRNA sense strand
augaaucucuagcucagua

SEQ ID NO: 1633954 - RNA, 19 nt, Homo sapiens
  misc_RNA (1)...(19): siRNA sense strand
aagaagacuugaagaagca

SEQ ID NO: 1633955 - RNA, 19 nt, Homo sapiens
  misc_RNA (1)...(19): siRNA sense strand
aacaauauguccuuacaag

SEQ ID NO: 1633956 - RNA, 19 nt, Homo sapiens
  misc_RNA (1)...(19): siRNA sense strand
gaaucucuagcucaguaua

SEQ ID NO: 1633957 - RNA, 19 nt, Homo sapiens
  misc_RNA (1)...(19): siRNA sense strand
gacagcuauugaagcauuu

SEQ ID NO: 1633958 - RNA, 19 nt, Homo sapiens
  misc_RNA (1)...(19): siRNA sense strand
caacgacucccucaauguc

SEQ ID NO: 1633959 - RNA, 19 nt, Homo sapiens
  misc_RNA (1)...(19): siRNA sense strand
aggaucaaguugucaaaga

SEQ ID NO: 1633960 - RNA, 19 nt, Homo sapiens
  misc_RNA (1)...(19): siRNA sense strand
ugaaaacacugaagaccaa

SEQ ID NO: 1633961 - RNA, 19 nt, Homo sapiens
  misc_RNA (1)...(19): siRNA sense strand
gaaggcaaugagaaagaaa

SEQ ID NO: 1633962 - RNA, 19 nt, Homo sapiens
  misc_RNA (1)...(19): siRNA sense strand
guuuaaacgugaaggcaau

SEQ ID NO: 1633963 - RNA, 19 nt, Homo sapiens
  misc_RNA (1)...(19): siRNA sense strand
aaggacagcuauugaagca

SEQ ID NO: 1633964 - RNA, 19 nt, Homo sapiens
  misc_RNA (1)...(19): siRNA sense strand
gcacaucccaggaaaucca

SEQ ID NO: 1633965 - RNA, 19 nt, Homo sapiens
  misc_RNA (1)...(19): siRNA sense strand
acacugaagaccaauauuc

SEQ ID NO: 1633966 - RNA, 19 nt, Homo sapiens
  misc_RNA (1)...(19): siRNA sense strand
gagaaagacgagagaccaa

SEQ ID NO: 1633967 - RNA, 19 nt, Homo sapiens
  misc_RNA (1)...(19): siRNA sense strand
cgagaaauugacaaacgua

SEQ ID NO: 1633968 - RNA, 19 nt, Homo sapiens
  misc_RNA (1)...(19): siRNA sense strand
gaagauuggaagaagacuu

SEQ ID NO: 1633969 - RNA, 19 nt, Homo sapiens
  misc_RNA (1)...(19): siRNA sense strand
uacgagaugcgucuacuaa

SEQ ID NO: 1633970 - RNA, 19 nt, Homo sapiens
  misc_RNA (1)...(19): siRNA sense strand
cuuacaagaugcugaaugg

SEQ ID NO: 1633971 - RNA, 19 nt, Homo sapiens
  misc_RNA (1)...(19): siRNA sense strand
aaagaacuggugcuacauu

SEQ ID NO: 1633972 - RNA, 19 nt, Homo sapiens
  misc_RNA (1)...(19): siRNA sense strand
aaacacugaagaccaauau

SEQ ID NO: 1633973 - RNA, 19 nt, Homo sapiens
  misc_RNA (1)...(19): siRNA sense strand
gagagaccaauacuugaug

SEQ ID NO: 1633974 - RNA, 19 nt, Homo sapiens
  misc_RNA (1)...(19): siRNA sense strand
aaguugaagucucgaauca

SEQ ID NO: 1633975 - RNA, 19 nt, Homo sapiens
  misc_RNA (1)...(19): siRNA sense strand
cuaccggaaugaaucucua

SEQ ID NO: 1633976 - RNA, 19 nt, Homo sapiens
  misc_RNA (1)...(19): siRNA sense strand
gagaaauugacaaacguau

SEQ ID NO: 1633977 - RNA, 19 nt, Homo sapiens
  misc_RNA (1)...(19): siRNA sense strand
gacaguagaagaagauugg

SEQ ID NO: 1633978 - RNA, 19 nt, Homo sapiens
  misc_RNA (1)...(19): siRNA sense strand
auaaaccacuaccggaaug

SEQ ID NO: 1633979 - RNA, 19 nt, Homo sapiens
  misc_RNA (1)...(19): siRNA sense strand
cgagggaagaagugaauga

SEQ ID NO: 1633980 - RNA, 19 nt, Homo sapiens
  misc_RNA (1)...(19): siRNA sense strand
uggaagaagacuugaagaa

SEQ ID NO: 1633981 - RNA, 19 nt, Homo sapiens
  misc_RNA (1)...(19): siRNA sense strand
ugaagucucgaaucaguga

SEQ ID NO: 1633982 - RNA, 19 nt, Homo sapiens
  misc_RNA (1)...(19): siRNA sense strand
guacgagaugcgucuacua

SEQ ID NO: 1633983 - RNA, 19 nt, Homo sapiens
  misc_RNA (1)...(19): siRNA sense strand
gaaugguacuggggagaua

SEQ ID NO: 1633984 - RNA, 19 nt, Homo sapiens
  misc_RNA (1)...(19): siRNA sense strand
gagggaagaagugaaugaa

SEQ ID NO: 1633985 - RNA, 19 nt, Homo sapiens
  misc_RNA (1)...(19): siRNA sense strand
ggacggcgaaguaaagcau

SEQ ID NO: 1633986 - RNA, 19 nt, Homo sapiens
  misc_RNA (1)...(19): siRNA sense strand
ggacagcuauugaagcauu

SEQ ID NO: 1633987 - RNA, 19 nt, Homo sapiens
  misc_RNA (1)...(19): siRNA sense strand
ggaagaugaugaagauuug

SEQ ID NO: 1633988 - RNA, 19 nt, Homo sapiens
  misc_RNA (1)...(19): siRNA sense strand
gaagaagauuggaagaaga

SEQ ID NO: 1633989 - RNA, 19 nt, Homo sapiens
  misc_RNA (1)...(19): siRNA sense strand
gaaauugacaaacguauga

SEQ ID NO: 1633990 - RNA, 19 nt, Homo sapiens
  misc_RNA (1)...(19): siRNA sense strand
guacagcucucugaaagaa

SEQ ID NO: 1633991 - RNA, 19 nt, Homo sapiens
  misc_RNA (1)...(19): siRNA sense strand
ggaaauauggcuucucuga

SEQ ID NO: 1633992 - RNA, 19 nt, Homo sapiens
  misc_RNA (1)...(19): siRNA sense strand
gaaagacgagagaccaaua

SEQ ID NO: 1633993 - RNA, 19 nt, Homo sapiens
  misc_RNA (1)...(19): siRNA sense strand
guaaagcauugugucauaa

SEQ ID NO: 1633994 - RNA, 19 nt, Homo sapiens
  misc_RNA (1)...(19): siRNA sense strand
uggcuucucugacccauua

SEQ ID NO: 1633995 - RNA, 19 nt, Homo sapiens
  misc_RNA (1)...(19): siRNA sense strand
ugaaagaacuggugcuaca

SEQ ID NO: 1633996 - RNA, 19 nt, Homo sapiens
  misc_RNA (1)...(19): siRNA sense strand
guacagcaaagaauacaua

SEQ ID NO: 1633997 - RNA, 19 nt, Homo sapiens
  misc_RNA (1)...(19): siRNA sense strand
ggaucaaguugucaaagaa

SEQ ID NO: 1633998 - RNA, 19 nt, Homo sapiens
  misc_RNA (1)...(19): siRNA sense strand
gaauauaacacucaguuuc

SEQ ID NO: 1633999 - RNA, 19 nt, Homo sapiens
  misc_RNA (1)...(19): siRNA sense strand
gguggaagaugaugaagau

SEQ ID NO: 1634000 - RNA, 19 nt, Homo sapiens
  misc_RNA (1)...(19): siRNA sense strand
gcacaacgacucccucaau

SEQ ID NO: 1634001 - RNA, 19 nt, Homo sapiens
  misc_RNA (1)...(19): siRNA sense strand
cagcaaagaauacauagaa

SEQ ID NO: 1634002 - RNA, 19 nt, Homo sapiens
  misc_RNA (1)...(19): siRNA sense strand
aguaaagcauugugucaua

SEQ ID NO: 1634003 - RNA, 19 nt, Homo sapiens
  misc_RNA (1)...(19): siRNA sense strand
uauugaagcuguagggaaa

SEQ ID NO: 1634004 - RNA, 19 nt, Homo sapiens
  misc_RNA (1)...(19): siRNA sense strand
aagaacuggugcuacauua

SEQ ID NO: 1634005 - RNA, 19 nt, Homo sapiens
  misc_RNA (1)...(19): siRNA sense strand
gacgagagaccaauacuug

SEQ ID NO: 1634006 - RNA, 19 nt, Homo sapiens
  misc_RNA (1)...(19): siRNA sense strand
gaaguaaagcauuguguca

SEQ ID NO: 1634007 - RNA, 19 nt, Homo sapiens
  misc_RNA (1)...(19): siRNA sense strand
aaacguaugaacagcauua

SEQ ID NO: 1634008 - RNA, 19 nt, Homo sapiens
  misc_RNA (1)...(19): siRNA sense strand
gaagcgagauggcacuuuu

SEQ ID NO: 1634009 - RNA, 19 nt, Homo sapiens
  misc_RNA (1)...(19): siRNA sense strand
gccaacaacgguaugaaua

SEQ ID NO: 1634010 - RNA, 19 nt, Homo sapiens
  misc_RNA (1)...(19): siRNA sense strand
ccaacaacgguaugaauaa

SEQ ID NO: 1634011 - RNA, 19 nt, Homo sapiens
  misc_RNA (1)...(19): siRNA sense strand
gggaagaagugaaugaaaa

SEQ ID NO: 1634012 - RNA, 19 nt, Homo sapiens
  misc_RNA (1)...(19): siRNA sense strand
gcaacuggcuauggcuuug

SEQ ID NO: 1634013 - RNA, 19 nt, Homo sapiens
  misc_RNA (1)...(19): siRNA sense strand
ucaguucugugguugaauu

SEQ ID NO: 1634014 - RNA, 19 nt, Homo sapiens
  misc_RNA (1)...(19): siRNA sense strand
gaagcaggcagcugaguau

SEQ ID NO: 1634015 - RNA, 19 nt, Homo sapiens
  misc_RNA (1)...(19): siRNA sense strand
cauggugauuauacucuua

SEQ ID NO: 1634016 - RNA, 19 nt, Homo sapiens
  misc_RNA (1)...(19): siRNA sense strand
gcaaugagaaagaaauaca

SEQ ID NO: 1634017 - RNA, 19 nt, Homo sapiens
  misc_RNA (1)...(19): siRNA sense strand
caauauguccuuacaagau

SEQ ID NO: 1634018 - RNA, 19 nt, Homo sapiens
  misc_RNA (1)...(19): siRNA sense strand
aauauucacugguggaaga

SEQ ID NO: 1634019 - RNA, 19 nt, Homo sapiens
  misc_RNA (1)...(19): siRNA sense strand
gagaaagaaauacaaagga

SEQ ID NO: 1634020 - RNA, 19 nt, Homo sapiens
  misc_RNA (1)...(19): siRNA sense strand
ucaguauaaucccaaauug

SEQ ID NO: 1634021 - RNA, 19 nt, Homo sapiens
  misc_RNA (1)...(19): siRNA sense strand
caagagcgguacagcaaag

SEQ ID NO: 1634022 - RNA, 19 nt, Homo sapiens
  misc_RNA (1)...(19): siRNA sense strand
gcagcugaguaucgagaaa

SEQ ID NO: 1634023 - RNA, 19 nt, Homo sapiens
  misc_RNA (1)...(19): siRNA sense strand
gcaggcagcugaguaucga

SEQ ID NO: 1634024 - RNA, 19 nt, Homo sapiens
  misc_RNA (1)...(19): siRNA sense strand
ggaagaagacuugaagaag

SEQ ID NO: 1634025 - RNA, 19 nt, Homo sapiens
  misc_RNA (1)...(19): siRNA sense strand
gaaauacaaaggauuaugc

SEQ ID NO: 1634026 - RNA, 19 nt, Homo sapiens
  misc_RNA (1)...(19): siRNA sense strand
ccaaauaccaacaggauca

SEQ ID NO: 1634027 - RNA, 19 nt, Homo sapiens
  misc_RNA (1)...(19): siRNA sense strand
ucucgaaucagugaaauua

SEQ ID NO: 1634028 - RNA, 19 nt, Homo sapiens
  misc_RNA (1)...(19): siRNA sense strand
ccauuaaccuucaguucug

SEQ ID NO: 1634029 - RNA, 19 nt, Homo sapiens
  misc_RNA (1)...(19): siRNA sense strand
ggaagcagcaaccgaaaca

SEQ ID NO: 1634030 - RNA, 19 nt, Homo sapiens
  misc_RNA (1)...(19): siRNA sense strand
ugaaggcaaugagaaagaa

SEQ ID NO: 1634031 - RNA, 19 nt, Homo sapiens
  misc_RNA (1)...(19): siRNA sense strand
gcauuaaaccagaccuuau

SEQ ID NO: 1634032 - RNA, 19 nt, Homo sapiens
  misc_RNA (1)...(19): siRNA sense strand
acacuagccuacccaguau

SEQ ID NO: 1634033 - RNA, 19 nt, Homo sapiens
  misc_RNA (1)...(19): siRNA sense strand
gaaaaggacagcuauugaa

SEQ ID NO: 1634034 - RNA, 19 nt, Homo sapiens
  misc_RNA (1)...(19): siRNA sense strand
gaugagaagacauggaaug

SEQ ID NO: 1634035 - RNA, 19 nt, Homo sapiens
  misc_RNA (1)...(19): siRNA sense strand
guugaagucucgaaucagu

SEQ ID NO: 1634036 - RNA, 19 nt, Homo sapiens
  misc_RNA (1)...(19): siRNA sense strand
uacaagaugcugaauggua

SEQ ID NO: 1634037 - RNA, 19 nt, Homo sapiens
  misc_RNA (1)...(19): siRNA sense strand
cacacuagccuacccagua

SEQ ID NO: 1634038 - RNA, 19 nt, Homo sapiens
  misc_RNA (1)...(19): siRNA sense strand
caacaacgguaugaauaac

SEQ ID NO: 1634039 - RNA, 19 nt, Homo sapiens
  misc_RNA (1)...(19): siRNA sense strand
gugaaauuauugacaguag

SEQ ID NO: 1634040 - RNA, 19 nt, Homo sapiens
  misc_RNA (1)...(19): siRNA sense strand
gaccuuauccagcugagaa

SEQ ID NO: 1634041 - RNA, 19 nt, Homo sapiens
  misc_RNA (1)...(19): siRNA sense strand
agaagaagauuggaagaag

SEQ ID NO: 1634042 - RNA, 19 nt, Homo sapiens
  misc_RNA (1)...(19): siRNA sense strand
guucugugguugaauuaau

SEQ ID NO: 1634043 - RNA, 19 nt, Homo sapiens
  misc_RNA (1)...(19): siRNA sense strand
uggaagaugaugaagauuu

SEQ ID NO: 1634044 - RNA, 19 nt, Homo sapiens
  misc_RNA (1)...(19): siRNA sense strand
ccaggaaauccaaaugaaa

SEQ ID NO: 1634045 - RNA, 19 nt, Homo sapiens
  misc_RNA (1)...(19): siRNA sense strand
cgagaugcgucuacuaaaa

SEQ ID NO: 1634046 - RNA, 19 nt, Homo sapiens
  misc_RNA (1)...(19): siRNA sense strand
cacaacgacucccucaaug

SEQ ID NO: 1634047 - RNA, 19 nt, Homo sapiens
  misc_RNA (1)...(19): siRNA sense strand
acaacgguaugaauaacaa

SEQ ID NO: 1634048 - RNA, 19 nt, Homo sapiens
  misc_RNA (1)...(19): siRNA sense strand
gcauggugauuauacucuu

SEQ ID NO: 1634049 - RNA, 19 nt, Homo sapiens
  misc_RNA (1)...(19): siRNA sense strand
caaguugucaaagaagaua

SEQ ID NO: 1634050 - RNA, 19 nt, Homo sapiens
  misc_RNA (1)...(19): siRNA sense strand
cgaaucagugaaauuauug

SEQ ID NO: 1634051 - RNA, 19 nt, Homo sapiens
  misc_RNA (1)...(19): siRNA sense strand
aauauguccuuacaagaug

SEQ ID NO: 1634052 - RNA, 19 nt, Homo sapiens
  misc_RNA (1)...(19): siRNA sense strand
cccaggaaauccaaaugaa

SEQ ID NO: 1634053 - RNA, 19 nt, Homo sapiens
  misc_RNA (1)...(19): siRNA sense strand
augaaucucuagcucagua

SEQ ID NO: 1634054 - RNA, 19 nt, Homo sapiens
  misc_RNA (1)...(19): siRNA sense strand
aagaagacuugaagaagca

SEQ ID NO: 1634055 - RNA, 19 nt, Homo sapiens
  misc_RNA (1)...(19): siRNA sense strand
aacaauauguccuuacaag

SEQ ID NO: 1634056 - RNA, 19 nt, Homo sapiens
  misc_RNA (1)...(19): siRNA sense strand
gaaucucuagcucaguaua

SEQ ID NO: 1634057 - RNA, 19 nt, Homo sapiens
  misc_RNA (1)...(19): siRNA sense strand
gacagcuauugaagcauuu

SEQ ID NO: 1634058 - RNA, 19 nt, Homo sapiens
  misc_RNA (1)...(19): siRNA sense strand
caacgacucccucaauguc

SEQ ID NO: 1634059 - RNA, 19 nt, Homo sapiens
  misc_RNA (1)...(19): siRNA sense strand
aggaucaaguugucaaaga

SEQ ID NO: 1634060 - RNA, 19 nt, Homo sapiens
  misc_RNA (1)...(19): siRNA sense strand
ugaaaacacugaagaccaa

SEQ ID NO: 1634061 - RNA, 19 nt, Homo sapiens
  misc_RNA (1)...(19): siRNA sense strand
gaaggcaaugagaaagaaa

SEQ ID NO: 1634062 - RNA, 19 nt, Homo sapiens
  misc_RNA (1)...(19): siRNA sense strand
guuuaaacgugaaggcaau

SEQ ID NO: 1634063 - RNA, 19 nt, Homo sapiens
  misc_RNA (1)...(19): siRNA sense strand
aaggacagcuauugaagca

SEQ ID NO: 1634064 - RNA, 19 nt, Homo sapiens
  misc_RNA (1)...(19): siRNA sense strand
gcacaucccaggaaaucca

SEQ ID NO: 1634065 - RNA, 19 nt, Homo sapiens
  misc_RNA (1)...(19): siRNA sense strand
acacugaagaccaauauuc

SEQ ID NO: 1634066 - RNA, 19 nt, Homo sapiens
  misc_RNA (1)...(19): siRNA sense strand
gagaaagacgagagaccaa

SEQ ID NO: 1634067 - RNA, 19 nt, Homo sapiens
  misc_RNA (1)...(19): siRNA sense strand
cgagaaauugacaaacgua

SEQ ID NO: 1634068 - RNA, 19 nt, Homo sapiens
  misc_RNA (1)...(19): siRNA sense strand
gaagauuggaagaagacuu

SEQ ID NO: 1634069 - RNA, 19 nt, Homo sapiens
  misc_RNA (1)...(19): siRNA sense strand
uacgagaugcgucuacuaa

SEQ ID NO: 1634070 - RNA, 19 nt, Homo sapiens
  misc_RNA (1)...(19): siRNA sense strand
cuuacaagaugcugaaugg

SEQ ID NO: 1634071 - RNA, 19 nt, Homo sapiens
  misc_RNA (1)...(19): siRNA sense strand
aaagaacuggugcuacauu

SEQ ID NO: 1634072 - RNA, 19 nt, Homo sapiens
  misc_RNA (1)...(19): siRNA sense strand
aaacacugaagaccaauau

SEQ ID NO: 1634073 - RNA, 19 nt, Homo sapiens
  misc_RNA (1)...(19): siRNA sense strand
gagagaccaauacuugaug

SEQ ID NO: 1634074 - RNA, 19 nt, Homo sapiens
  misc_RNA (1)...(19): siRNA sense strand
aaguugaagucucgaauca

SEQ ID NO: 1634075 - RNA, 19 nt, Homo sapiens
  misc_RNA (1)...(19): siRNA sense strand
cuaccggaaugaaucucua

SEQ ID NO: 1634076 - RNA, 19 nt, Homo sapiens
  misc_RNA (1)...(19): siRNA sense strand
gagaaauugacaaacguau

SEQ ID NO: 1634077 - RNA, 19 nt, Homo sapiens
  misc_RNA (1)...(19): siRNA sense strand
gacaguagaagaagauugg

SEQ ID NO: 1634078 - RNA, 19 nt, Homo sapiens
  misc_RNA (1)...(19): siRNA sense strand
auaaaccacuaccggaaug

SEQ ID NO: 1634079 - RNA, 19 nt, Homo sapiens
  misc_RNA (1)...(19): siRNA sense strand
cgagggaagaagugaauga

SEQ ID NO: 1634080 - RNA, 19 nt, Homo sapiens
  misc_RNA (1)...(19): siRNA sense strand
uggaagaagacuugaagaa

SEQ ID NO: 1634081 - RNA, 19 nt, Homo sapiens
  misc_RNA (1)...(19): siRNA sense strand
ugaagucucgaaucaguga

SEQ ID NO: 1634082 - RNA, 19 nt, Homo sapiens
  misc_RNA (1)...(19): siRNA sense strand
guacgagaugcgucuacua

SEQ ID NO: 1634083 - RNA, 19 nt, Homo sapiens
  misc_RNA (1)...(19): siRNA sense strand
gaaugguacuggggagaua

SEQ ID NO: 1634084 - RNA, 19 nt, Homo sapiens
  misc_RNA (1)...(19): siRNA sense strand
gagggaagaagugaaugaa

SEQ ID NO: 1634085 - RNA, 19 nt, Homo sapiens
  misc_RNA (1)...(19): siRNA sense strand
ggacggcgaaguaaagcau

SEQ ID NO: 1634086 - RNA, 19 nt, Homo sapiens
  misc_RNA (1)...(19): siRNA sense strand
ggacagcuauugaagcauu

SEQ ID NO: 1634087 - RNA, 19 nt, Homo sapiens
  misc_RNA (1)...(19): siRNA sense strand
ggaagaugaugaagauuug

SEQ ID NO: 1634088 - RNA, 19 nt, Homo sapiens
  misc_RNA (1)...(19): siRNA sense strand
gaagaagauuggaagaaga

SEQ ID NO: 1634089 - RNA, 19 nt, Homo sapiens
  misc_RNA (1)...(19): siRNA sense strand
gaaauugacaaacguauga

SEQ ID NO: 1634090 - RNA, 19 nt, Homo sapiens
  misc_RNA (1)...(19): siRNA sense strand
guacagcucucugaaagaa

SEQ ID NO: 1634091 - RNA, 19 nt, Homo sapiens
  misc_RNA (1)...(19): siRNA sense strand
ggaaauauggcuucucuga

SEQ ID NO: 1634092 - RNA, 19 nt, Homo sapiens
  misc_RNA (1)...(19): siRNA sense strand
gaaagacgagagaccaaua

SEQ ID NO: 1634093 - RNA, 19 nt, Homo sapiens
  misc_RNA (1)...(19): siRNA sense strand
guaaagcauugugucauaa

SEQ ID NO: 1634094 - RNA, 19 nt, Homo sapiens
  misc_RNA (1)...(19): siRNA sense strand
uggcuucucugacccauua

SEQ ID NO: 1634095 - RNA, 19 nt, Homo sapiens
  misc_RNA (1)...(19): siRNA sense strand
ugaaagaacuggugcuaca

SEQ ID NO: 1634096 - RNA, 19 nt, Homo sapiens
  misc_RNA (1)...(19): siRNA sense strand
guacagcaaagaauacaua

SEQ ID NO: 1634097 - RNA, 19 nt, Homo sapiens
  misc_RNA (1)...(19): siRNA sense strand
ggaucaaguugucaaagaa

SEQ ID NO: 1634098 - RNA, 19 nt, Homo sapiens
  misc_RNA (1)...(19): siRNA sense strand
gaauauaacacucaguuuc

SEQ ID NO: 1634099 - RNA, 19 nt, Homo sapiens
  misc_RNA (1)...(19): siRNA sense strand
gguggaagaugaugaagau

SEQ ID NO: 1634100 - RNA, 19 nt, Homo sapiens
  misc_RNA (1)...(19): siRNA sense strand
gcacaacgacucccucaau

SEQ ID NO: 1634101 - RNA, 19 nt, Homo sapiens
  misc_RNA (1)...(19): siRNA sense strand
cagcaaagaauacauagaa

SEQ ID NO: 1634102 - RNA, 19 nt, Homo sapiens
  misc_RNA (1)...(19): siRNA sense strand
aguaaagcauugugucaua

SEQ ID NO: 1634103 - RNA, 19 nt, Homo sapiens
  misc_RNA (1)...(19): siRNA sense strand
uauugaagcuguagggaaa

SEQ ID NO: 1634104 - RNA, 19 nt, Homo sapiens
  misc_RNA (1)...(19): siRNA sense strand
aagaacuggugcuacauua

SEQ ID NO: 1634105 - RNA, 19 nt, Homo sapiens
  misc_RNA (1)...(19): siRNA sense strand
gacgagagaccaauacuug

SEQ ID NO: 1634106 - RNA, 19 nt, Homo sapiens
  misc_RNA (1)...(19): siRNA sense strand
gaaguaaagcauuguguca

SEQ ID NO: 1634107 - RNA, 19 nt, Homo sapiens
  misc_RNA (1)...(19): siRNA sense strand
aaacguaugaacagcauua

SEQ ID NO: 1634108 - RNA, 19 nt, Homo sapiens
  misc_RNA (1)...(19): siRNA sense strand
gaagcgagauggcacuuuu

SEQ ID NO: 1634109 - RNA, 19 nt, Homo sapiens
  misc_RNA (1)...(19): siRNA sense strand
gccaacaacgguaugaaua

SEQ ID NO: 1634110 - RNA, 19 nt, Homo sapiens
  misc_RNA (1)...(19): siRNA sense strand
ccaacaacgguaugaauaa

SEQ ID NO: 1634111 - RNA, 19 nt, Homo sapiens
  misc_RNA (1)...(19): siRNA sense strand
gggaagaagugaaugaaaa

SEQ ID NO: 1634112 - RNA, 19 nt, Homo sapiens
  misc_RNA (1)...(19): siRNA sense strand
gcaacuggcuauggcuuug

SEQ ID NO: 1634113 - RNA, 19 nt, Homo sapiens
  misc_RNA (1)...(19): siRNA sense strand
ucaguucugugguugaauu

SEQ ID NO: 1634114 - RNA, 19 nt, Homo sapiens
  misc_RNA (1)...(19): siRNA sense strand
gaagcaggcagcugaguau

SEQ ID NO: 1634115 - RNA, 19 nt, Homo sapiens
  misc_RNA (1)...(19): siRNA sense strand
cauggugauuauacucuua

SEQ ID NO: 1634116 - RNA, 19 nt, Homo sapiens
  misc_RNA (1)...(19): siRNA sense strand
gcaaugagaaagaaauaca

SEQ ID NO: 1634117 - RNA, 19 nt, Homo sapiens
  misc_RNA (1)...(19): siRNA sense strand
caauauguccuuacaagau

SEQ ID NO: 1634118 - RNA, 19 nt, Homo sapiens
  misc_RNA (1)...(19): siRNA sense strand
aauauucacugguggaaga

SEQ ID NO: 1634119 - RNA, 19 nt, Homo sapiens
  misc_RNA (1)...(19): siRNA sense strand
gagaaagaaauacaaagga

SEQ ID NO: 1634120 - RNA, 19 nt, Homo sapiens
  misc_RNA (1)...(19): siRNA sense strand
ucaguauaaucccaaauug

SEQ ID NO: 1634121 - RNA, 19 nt, Homo sapiens
  misc_RNA (1)...(19): siRNA sense strand
caagagcgguacagcaaag

SEQ ID NO: 1634122 - RNA, 19 nt, Homo sapiens
  misc_RNA (1)...(19): siRNA sense strand
gcagcugaguaucgagaaa

SEQ ID NO: 1634123 - RNA, 19 nt, Homo sapiens
  misc_RNA (1)...(19): siRNA sense strand
gcaggcagcugaguaucga

SEQ ID NO: 1634124 - RNA, 19 nt, Homo sapiens
  misc_RNA (1)...(19): siRNA sense strand
ggaagaagacuugaagaag

SEQ ID NO: 1634125 - RNA, 19 nt, Homo sapiens
  misc_RNA (1)...(19): siRNA sense strand
gaaauacaaaggauuaugc

SEQ ID NO: 1634126 - RNA, 19 nt, Homo sapiens
  misc_RNA (1)...(19): siRNA sense strand
ccaaauaccaacaggauca

SEQ ID NO: 1634127 - RNA, 19 nt, Homo sapiens
  misc_RNA (1)...(19): siRNA sense strand
ucucgaaucagugaaauua

SEQ ID NO: 1634128 - RNA, 19 nt, Homo sapiens
  misc_RNA (1)...(19): siRNA sense strand
ccauuaaccuucaguucug

SEQ ID NO: 1634129 - RNA, 19 nt, Homo sapiens
  misc_RNA (1)...(19): siRNA sense strand
ggaagcagcaaccgaaaca

SEQ ID NO: 1634130 - RNA, 19 nt, Homo sapiens
  misc_RNA (1)...(19): siRNA sense strand
ugaaggcaaugagaaagaa

SEQ ID NO: 1634131 - RNA, 19 nt, Homo sapiens
  misc_RNA (1)...(19): siRNA sense strand
gcauuaaaccagaccuuau

SEQ ID NO: 1634132 - RNA, 19 nt, Homo sapiens
  misc_RNA (1)...(19): siRNA sense strand
acacuagccuacccaguau

SEQ ID NO: 1634133 - RNA, 19 nt, Homo sapiens
  misc_RNA (1)...(19): siRNA sense strand
gaaaaggacagcuauugaa

SEQ ID NO: 1634134 - RNA, 19 nt, Homo sapiens
  misc_RNA (1)...(19): siRNA sense strand
gaugagaagacauggaaug

SEQ ID NO: 1634135 - RNA, 19 nt, Homo sapiens
  misc_RNA (1)...(19): siRNA sense strand
guugaagucucgaaucagu

SEQ ID NO: 1634136 - RNA, 19 nt, Homo sapiens
  misc_RNA (1)...(19): siRNA sense strand
uacaagaugcugaauggua

SEQ ID NO: 1634137 - RNA, 19 nt, Homo sapiens
  misc_RNA (1)...(19): siRNA sense strand
cacacuagccuacccagua

SEQ ID NO: 1634138 - RNA, 19 nt, Homo sapiens
  misc_RNA (1)...(19): siRNA sense strand
caacaacgguaugaauaac

SEQ ID NO: 1634139 - RNA, 19 nt, Homo sapiens
  misc_RNA (1)...(19): siRNA sense strand
gugaaauuauugacaguag

SEQ ID NO: 1634140 - RNA, 19 nt, Homo sapiens
  misc_RNA (1)...(19): siRNA sense strand
gaccuuauccagcugagaa

SEQ ID NO: 1634141 - RNA, 19 nt, Homo sapiens
  misc_RNA (1)...(19): siRNA sense strand
agaagaagauuggaagaag

SEQ ID NO: 1634142 - RNA, 19 nt, Homo sapiens
  misc_RNA (1)...(19): siRNA sense strand
guucugugguugaauuaau

SEQ ID NO: 1634143 - RNA, 19 nt, Homo sapiens
  misc_RNA (1)...(19): siRNA sense strand
uggaagaugaugaagauuu

SEQ ID NO: 1634144 - RNA, 19 nt, Homo sapiens
  misc_RNA (1)...(19): siRNA sense strand
ccaggaaauccaaaugaaa

SEQ ID NO: 1634145 - RNA, 19 nt, Homo sapiens
  misc_RNA (1)...(19): siRNA sense strand
cgagaugcgucuacuaaaa

SEQ ID NO: 1634146 - RNA, 19 nt, Homo sapiens
  misc_RNA (1)...(19): siRNA sense strand
cacaacgacucccucaaug

SEQ ID NO: 1634147 - RNA, 19 nt, Homo sapiens
  misc_RNA (1)...(19): siRNA sense strand
acaacgguaugaauaacaa

SEQ ID NO: 1634148 - RNA, 19 nt, Homo sapiens
  misc_RNA (1)...(19): siRNA sense strand
gcauggugauuauacucuu

SEQ ID NO: 1634149 - RNA, 19 nt, Homo sapiens
  misc_RNA (1)...(19): siRNA sense strand
caaguugucaaagaagaua

SEQ ID NO: 1634150 - RNA, 19 nt, Homo sapiens
  misc_RNA (1)...(19): siRNA sense strand
cgaaucagugaaauuauug

SEQ ID NO: 1634151 - RNA, 19 nt, Homo sapiens
  misc_RNA (1)...(19): siRNA sense strand
aauauguccuuacaagaug

SEQ ID NO: 1634152 - RNA, 19 nt, Homo sapiens
  misc_RNA (1)...(19): siRNA sense strand
cccaggaaauccaaaugaa

SEQ ID NO: 1634153 - RNA, 19 nt, Homo sapiens
  misc_RNA (1)...(19): siRNA sense strand
augaaucucuagcucagua

SEQ ID NO: 1634154 - RNA, 19 nt, Homo sapiens
  misc_RNA (1)...(19): siRNA sense strand
aagaagacuugaagaagca

SEQ ID NO: 1634155 - RNA, 19 nt, Homo sapiens
  misc_RNA (1)...(19): siRNA sense strand
aacaauauguccuuacaag

SEQ ID NO: 1634156 - RNA, 19 nt, Homo sapiens
  misc_RNA (1)...(19): siRNA sense strand
gaaucucuagcucaguaua

SEQ ID NO: 1634157 - RNA, 19 nt, Homo sapiens
  misc_RNA (1)...(19): siRNA sense strand
gacagcuauugaagcauuu

SEQ ID NO: 1634158 - RNA, 19 nt, Homo sapiens
  misc_RNA (1)...(19): siRNA sense strand
caacgacucccucaauguc

SEQ ID NO: 1634159 - RNA, 19 nt, Homo sapiens
  misc_RNA (1)...(19): siRNA sense strand
aggaucaaguugucaaaga

SEQ ID NO: 1634160 - RNA, 19 nt, Homo sapiens
  misc_RNA (1)...(19): siRNA sense strand
ugaaaacacugaagaccaa

SEQ ID NO: 1634161 - RNA, 19 nt, Homo sapiens
  misc_RNA (1)...(19): siRNA sense strand
gaaggcaaugagaaagaaa

SEQ ID NO: 1634162 - RNA, 19 nt, Homo sapiens
  misc_RNA (1)...(19): siRNA sense strand
guuuaaacgugaaggcaau

SEQ ID NO: 1634163 - RNA, 19 nt, Homo sapiens
  misc_RNA (1)...(19): siRNA sense strand
aaggacagcuauugaagca

SEQ ID NO: 1634164 - RNA, 19 nt, Homo sapiens
  misc_RNA (1)...(19): siRNA sense strand
gcacaucccaggaaaucca

SEQ ID NO: 1634165 - RNA, 19 nt, Homo sapiens
  misc_RNA (1)...(19): siRNA sense strand
acacugaagaccaauauuc

SEQ ID NO: 1634166 - RNA, 19 nt, Homo sapiens
  misc_RNA (1)...(19): siRNA sense strand
gagaaagacgagagaccaa

SEQ ID NO: 1634167 - RNA, 19 nt, Homo sapiens
  misc_RNA (1)...(19): siRNA sense strand
cgagaaauugacaaacgua

SEQ ID NO: 1634168 - RNA, 19 nt, Homo sapiens
  misc_RNA (1)...(19): siRNA sense strand
gaagauuggaagaagacuu

SEQ ID NO: 1634169 - RNA, 19 nt, Homo sapiens
  misc_RNA (1)...(19): siRNA sense strand
uacgagaugcgucuacuaa

SEQ ID NO: 1634170 - RNA, 19 nt, Homo sapiens
  misc_RNA (1)...(19): siRNA sense strand
cuuacaagaugcugaaugg

SEQ ID NO: 1634171 - RNA, 19 nt, Homo sapiens
  misc_RNA (1)...(19): siRNA sense strand
aaagaacuggugcuacauu

SEQ ID NO: 1634172 - RNA, 19 nt, Homo sapiens
  misc_RNA (1)...(19): siRNA sense strand
aaacacugaagaccaauau

SEQ ID NO: 1634173 - RNA, 19 nt, Homo sapiens
  misc_RNA (1)...(19): siRNA sense strand
gagagaccaauacuugaug

SEQ ID NO: 1634174 - RNA, 19 nt, Homo sapiens
  misc_RNA (1)...(19): siRNA sense strand
aaguugaagucucgaauca

SEQ ID NO: 1634175 - RNA, 19 nt, Homo sapiens
  misc_RNA (1)...(19): siRNA sense strand
cuaccggaaugaaucucua

SEQ ID NO: 1634176 - RNA, 19 nt, Homo sapiens
  misc_RNA (1)...(19): siRNA sense strand
gagaaauugacaaacguau

SEQ ID NO: 1634177 - RNA, 19 nt, Homo sapiens
  misc_RNA (1)...(19): siRNA sense strand
gacaguagaagaagauugg

SEQ ID NO: 1634178 - RNA, 19 nt, Homo sapiens
  misc_RNA (1)...(19): siRNA sense strand
auaaaccacuaccggaaug

SEQ ID NO: 1634179 - RNA, 19 nt, Homo sapiens
  misc_RNA (1)...(19): siRNA sense strand
cgagggaagaagugaauga

SEQ ID NO: 1634180 - RNA, 19 nt, Homo sapiens
  misc_RNA (1)...(19): siRNA sense strand
uggaagaagacuugaagaa

SEQ ID NO: 1634181 - RNA, 19 nt, Homo sapiens
  misc_RNA (1)...(19): siRNA sense strand
ugaagucucgaaucaguga

SEQ ID NO: 1634182 - RNA, 19 nt, Homo sapiens
  misc_RNA (1)...(19): siRNA sense strand
guacgagaugcgucuacua

SEQ ID NO: 1634183 - RNA, 19 nt, Homo sapiens
  misc_RNA (1)...(19): siRNA sense strand
gaaugguacuggggagaua

SEQ ID NO: 1634184 - RNA, 19 nt, Homo sapiens
  misc_RNA (1)...(19): siRNA sense strand
gagggaagaagugaaugaa

SEQ ID NO: 1634185 - RNA, 19 nt, Homo sapiens
  misc_RNA (1)...(19): siRNA sense strand
ggacggcgaaguaaagcau

SEQ ID NO: 1634186 - RNA, 19 nt, Homo sapiens
  misc_RNA (1)...(19): siRNA sense strand
ggacagcuauugaagcauu

SEQ ID NO: 1634187 - RNA, 19 nt, Homo sapiens
  misc_RNA (1)...(19): siRNA sense strand
ggaagaugaugaagauuug

SEQ ID NO: 1634188 - RNA, 19 nt, Homo sapiens
  misc_RNA (1)...(19): siRNA sense strand
gaagaagauuggaagaaga

SEQ ID NO: 1634189 - RNA, 19 nt, Homo sapiens
  misc_RNA (1)...(19): siRNA sense strand
gaaauugacaaacguauga

SEQ ID NO: 1634190 - RNA, 19 nt, Homo sapiens
  misc_RNA (1)...(19): siRNA sense strand
guacagcucucugaaagaa

SEQ ID NO: 1634191 - RNA, 19 nt, Homo sapiens
  misc_RNA (1)...(19): siRNA sense strand
ggaaauauggcuucucuga

SEQ ID NO: 1634192 - RNA, 19 nt, Homo sapiens
  misc_RNA (1)...(19): siRNA sense strand
gaaagacgagagaccaaua

SEQ ID NO: 1634193 - RNA, 19 nt, Homo sapiens
  misc_RNA (1)...(19): siRNA sense strand
guaaagcauugugucauaa

SEQ ID NO: 1634194 - RNA, 19 nt, Homo sapiens
  misc_RNA (1)...(19): siRNA sense strand
uggcuucucugacccauua

SEQ ID NO: 1634195 - RNA, 19 nt, Homo sapiens
  misc_RNA (1)...(19): siRNA sense strand
ugaaagaacuggugcuaca

SEQ ID NO: 1634196 - RNA, 19 nt, Homo sapiens
  misc_RNA (1)...(19): siRNA sense strand
guacagcaaagaauacaua

SEQ ID NO: 1634197 - RNA, 19 nt, Homo sapiens
  misc_RNA (1)...(19): siRNA sense strand
ggaucaaguugucaaagaa

SEQ ID NO: 1634198 - RNA, 19 nt, Homo sapiens
  misc_RNA (1)...(19): siRNA sense strand
gaauauaacacucaguuuc

SEQ ID NO: 1634199 - RNA, 19 nt, Homo sapiens
  misc_RNA (1)...(19): siRNA sense strand
gguggaagaugaugaagau

SEQ ID NO: 1634200 - RNA, 19 nt, Homo sapiens
  misc_RNA (1)...(19): siRNA sense strand
gcacaacgacucccucaau

SEQ ID NO: 1634201 - RNA, 19 nt, Homo sapiens
  misc_RNA (1)...(19): siRNA sense strand
cagcaaagaauacauagaa

SEQ ID NO: 1634202 - RNA, 19 nt, Homo sapiens
  misc_RNA (1)...(19): siRNA sense strand
aguaaagcauugugucaua

SEQ ID NO: 1634203 - RNA, 19 nt, Homo sapiens
  misc_RNA (1)...(19): siRNA sense strand
uauugaagcuguagggaaa

SEQ ID NO: 1634204 - RNA, 19 nt, Homo sapiens
  misc_RNA (1)...(19): siRNA sense strand
aagaacuggugcuacauua

SEQ ID NO: 1634205 - RNA, 19 nt, Homo sapiens
  misc_RNA (1)...(19): siRNA sense strand
gacgagagaccaauacuug

SEQ ID NO: 1634206 - RNA, 19 nt, Homo sapiens
  misc_RNA (1)...(19): siRNA sense strand
gaaguaaagcauuguguca

SEQ ID NO: 1634207 - RNA, 19 nt, Homo sapiens
  misc_RNA (1)...(19): siRNA sense strand
aaacguaugaacagcauua

SEQ ID NO: 1634208 - RNA, 19 nt, Homo sapiens
  misc_RNA (1)...(19): siRNA sense strand
gaagcgagauggcacuuuu

SEQ ID NO: 1634209 - RNA, 19 nt, Homo sapiens
  misc_RNA (1)...(19): siRNA sense strand
gccaacaacgguaugaaua

SEQ ID NO: 1634210 - RNA, 19 nt, Homo sapiens
  misc_RNA (1)...(19): siRNA sense strand
ccaacaacgguaugaauaa

SEQ ID NO: 1634211 - RNA, 19 nt, Homo sapiens
  misc_RNA (1)...(19): siRNA sense strand
gggaagaagugaaugaaaa

SEQ ID NO: 1634212 - RNA, 19 nt, Homo sapiens
  misc_RNA (1)...(19): siRNA sense strand
gcaacuggcuauggcuuug

SEQ ID NO: 1634213 - RNA, 19 nt, Homo sapiens
  misc_RNA (1)...(19): siRNA sense strand
ucaguucugugguugaauu

SEQ ID NO: 1634214 - RNA, 19 nt, Homo sapiens
  misc_RNA (1)...(19): siRNA sense strand
gaagcaggcagcugaguau

SEQ ID NO: 1634215 - RNA, 19 nt, Homo sapiens
  misc_RNA (1)...(19): siRNA sense strand
cauggugauuauacucuua

SEQ ID NO: 1634216 - RNA, 19 nt, Homo sapiens
  misc_RNA (1)...(19): siRNA sense strand
gcaaugagaaagaaauaca

SEQ ID NO: 1634217 - RNA, 19 nt, Homo sapiens
  misc_RNA (1)...(19): siRNA sense strand
caauauguccuuacaagau

SEQ ID NO: 1634218 - RNA, 19 nt, Homo sapiens
  misc_RNA (1)...(19): siRNA sense strand
aauauucacugguggaaga

SEQ ID NO: 1634219 - RNA, 19 nt, Homo sapiens
  misc_RNA (1)...(19): siRNA sense strand
gagaaagaaauacaaagga

SEQ ID NO: 1634220 - RNA, 19 nt, Homo sapiens
  misc_RNA (1)...(19): siRNA sense strand
ucaguauaaucccaaauug

SEQ ID NO: 1634221 - RNA, 19 nt, Homo sapiens
  misc_RNA (1)...(19): siRNA sense strand
caagagcgguacagcaaag

SEQ ID NO: 1634222 - RNA, 19 nt, Homo sapiens
  misc_RNA (1)...(19): siRNA sense strand
gcagcugaguaucgagaaa

SEQ ID NO: 1634223 - RNA, 19 nt, Homo sapiens
  misc_RNA (1)...(19): siRNA sense strand
gcaggcagcugaguaucga

SEQ ID NO: 1634224 - RNA, 19 nt, Homo sapiens
  misc_RNA (1)...(19): siRNA sense strand
ggaagaagacuugaagaag

SEQ ID NO: 1634225 - RNA, 19 nt, Homo sapiens
  misc_RNA (1)...(19): siRNA sense strand
gaaauacaaaggauuaugc

SEQ ID NO: 1634226 - RNA, 19 nt, Homo sapiens
  misc_RNA (1)...(19): siRNA sense strand
ccaaauaccaacaggauca

SEQ ID NO: 1634227 - RNA, 19 nt, Homo sapiens
  misc_RNA (1)...(19): siRNA sense strand
ucucgaaucagugaaauua

SEQ ID NO: 1634228 - RNA, 19 nt, Homo sapiens
  misc_RNA (1)...(19): siRNA sense strand
ccauuaaccuucaguucug

SEQ ID NO: 1634229 - RNA, 19 nt, Homo sapiens
  misc_RNA (1)...(19): siRNA sense strand
ggaagcagcaaccgaaaca

SEQ ID NO: 1634230 - RNA, 19 nt, Homo sapiens
  misc_RNA (1)...(19): siRNA sense strand
ugaaggcaaugagaaagaa

SEQ ID NO: 1634231 - RNA, 19 nt, Homo sapiens
  misc_RNA (1)...(19): siRNA sense strand
gcauuaaaccagaccuuau

SEQ ID NO: 1634232 - RNA, 19 nt, Homo sapiens
  misc_RNA (1)...(19): siRNA sense strand
acacuagccuacccaguau

SEQ ID NO: 1634233 - RNA, 19 nt, Homo sapiens
  misc_RNA (1)...(19): siRNA sense strand
gaaaaggacagcuauugaa

SEQ ID NO: 1634234 - RNA, 19 nt, Homo sapiens
  misc_RNA (1)...(19): siRNA sense strand
gaugagaagacauggaaug

SEQ ID NO: 1634235 - RNA, 19 nt, Homo sapiens
  misc_RNA (1)...(19): siRNA sense strand
guugaagucucgaaucagu

SEQ ID NO: 1634236 - RNA, 19 nt, Homo sapiens
  misc_RNA (1)...(19): siRNA sense strand
uacaagaugcugaauggua

SEQ ID NO: 1634237 - RNA, 19 nt, Homo sapiens
  misc_RNA (1)...(19): siRNA sense strand
cacacuagccuacccagua

SEQ ID NO: 1634238 - RNA, 19 nt, Homo sapiens
  misc_RNA (1)...(19): siRNA sense strand
caacaacgguaugaauaac

SEQ ID NO: 1634239 - RNA, 19 nt, Homo sapiens
  misc_RNA (1)...(19): siRNA sense strand
gugaaauuauugacaguag

SEQ ID NO: 1634240 - RNA, 19 nt, Homo sapiens
  misc_RNA (1)...(19): siRNA sense strand
gaccuuauccagcugagaa

SEQ ID NO: 1634241 - RNA, 19 nt, Homo sapiens
  misc_RNA (1)...(19): siRNA sense strand
agaagaagauuggaagaag

SEQ ID NO: 1634242 - RNA, 19 nt, Homo sapiens
  misc_RNA (1)...(19): siRNA sense strand
guucugugguugaauuaau

SEQ ID NO: 1634243 - RNA, 19 nt, Homo sapiens
  misc_RNA (1)...(19): siRNA sense strand
uggaagaugaugaagauuu

SEQ ID NO: 1634244 - RNA, 19 nt, Homo sapiens
  misc_RNA (1)...(19): siRNA sense strand
ccaggaaauccaaaugaaa

SEQ ID NO: 1634245 - RNA, 19 nt, Homo sapiens
  misc_RNA (1)...(19): siRNA sense strand
cgagaugcgucuacuaaaa

SEQ ID NO: 1634246 - RNA, 19 nt, Homo sapiens
  misc_RNA (1)...(19): siRNA sense strand
cacaacgacucccucaaug

SEQ ID NO: 1634247 - RNA, 19 nt, Homo sapiens
  misc_RNA (1)...(19): siRNA sense strand
acaacgguaugaauaacaa

SEQ ID NO: 1634248 - RNA, 19 nt, Homo sapiens
  misc_RNA (1)...(19): siRNA sense strand
gcauggugauuauacucuu

SEQ ID NO: 1634249 - RNA, 19 nt, Homo sapiens
  misc_RNA (1)...(19): siRNA sense strand
caaguugucaaagaagaua

SEQ ID NO: 1634250 - RNA, 19 nt, Homo sapiens
  misc_RNA (1)...(19): siRNA sense strand
cgaaucagugaaauuauug

SEQ ID NO: 1634251 - RNA, 19 nt, Homo sapiens
  misc_RNA (1)...(19): siRNA sense strand
aauauguccuuacaagaug

SEQ ID NO: 1634252 - RNA, 19 nt, Homo sapiens
  misc_RNA (1)...(19): siRNA sense strand
cccaggaaauccaaaugaa

SEQ ID NO: 1634253 - RNA, 19 nt, Homo sapiens
  misc_RNA (1)...(19): siRNA sense strand
augaaucucuagcucagua

SEQ ID NO: 1634254 - RNA, 19 nt, Homo sapiens
  misc_RNA (1)...(19): siRNA sense strand
aagaagacuugaagaagca

SEQ ID NO: 1634255 - RNA, 19 nt, Homo sapiens
  misc_RNA (1)...(19): siRNA sense strand
aacaauauguccuuacaag

SEQ ID NO: 1634256 - RNA, 19 nt, Homo sapiens
  misc_RNA (1)...(19): siRNA sense strand
gaaucucuagcucaguaua

SEQ ID NO: 1634257 - RNA, 19 nt, Homo sapiens
  misc_RNA (1)...(19): siRNA sense strand
gacagcuauugaagcauuu

SEQ ID NO: 1634258 - RNA, 19 nt, Homo sapiens
  misc_RNA (1)...(19): siRNA sense strand
caacgacucccucaauguc

SEQ ID NO: 1634259 - RNA, 19 nt, Homo sapiens
  misc_RNA (1)...(19): siRNA sense strand
aggaucaaguugucaaaga

SEQ ID NO: 1634260 - RNA, 19 nt, Homo sapiens
  misc_RNA (1)...(19): siRNA sense strand
ugaaaacacugaagaccaa

SEQ ID NO: 1634261 - RNA, 19 nt, Homo sapiens
  misc_RNA (1)...(19): siRNA sense strand
gaaggcaaugagaaagaaa

SEQ ID NO: 1634262 - RNA, 19 nt, Homo sapiens
  misc_RNA (1)...(19): siRNA sense strand
guuuaaacgugaaggcaau

SEQ ID NO: 1634263 - RNA, 19 nt, Homo sapiens
  misc_RNA (1)...(19): siRNA sense strand
aaggacagcuauugaagca

SEQ ID NO: 1634264 - RNA, 19 nt, Homo sapiens
  misc_RNA (1)...(19): siRNA sense strand
gcacaucccaggaaaucca

SEQ ID NO: 1634265 - RNA, 19 nt, Homo sapiens
  misc_RNA (1)...(19): siRNA sense strand
acacugaagaccaauauuc

SEQ ID NO: 1634266 - RNA, 19 nt, Homo sapiens
  misc_RNA (1)...(19): siRNA sense strand
gagaaagacgagagaccaa

SEQ ID NO: 1634267 - RNA, 19 nt, Homo sapiens
  misc_RNA (1)...(19): siRNA sense strand
cgagaaauugacaaacgua

SEQ ID NO: 1634268 - RNA, 19 nt, Homo sapiens
  misc_RNA (1)...(19): siRNA sense strand
gaagauuggaagaagacuu

SEQ ID NO: 1634269 - RNA, 19 nt, Homo sapiens
  misc_RNA (1)...(19): siRNA sense strand
uacgagaugcgucuacuaa

SEQ ID NO: 1634270 - RNA, 19 nt, Homo sapiens
  misc_RNA (1)...(19): siRNA sense strand
cuuacaagaugcugaaugg

SEQ ID NO: 1634271 - RNA, 19 nt, Homo sapiens
  misc_RNA (1)...(19): siRNA sense strand
aaagaacuggugcuacauu

SEQ ID NO: 1634272 - RNA, 19 nt, Homo sapiens
  misc_RNA (1)...(19): siRNA sense strand
aaacacugaagaccaauau

SEQ ID NO: 1634273 - RNA, 19 nt, Homo sapiens
  misc_RNA (1)...(19): siRNA sense strand
gagagaccaauacuugaug

SEQ ID NO: 1634274 - RNA, 19 nt, Homo sapiens
  misc_RNA (1)...(19): siRNA sense strand
aaguugaagucucgaauca

SEQ ID NO: 1634275 - RNA, 19 nt, Homo sapiens
  misc_RNA (1)...(19): siRNA sense strand
cuaccggaaugaaucucua

SEQ ID NO: 1634276 - RNA, 19 nt, Homo sapiens
  misc_RNA (1)...(19): siRNA sense strand
gagaaauugacaaacguau

SEQ ID NO: 1634277 - RNA, 19 nt, Homo sapiens
  misc_RNA (1)...(19): siRNA sense strand
gacaguagaagaagauugg

SEQ ID NO: 1634278 - RNA, 19 nt, Homo sapiens
  misc_RNA (1)...(19): siRNA sense strand
auaaaccacuaccggaaug

SEQ ID NO: 1634279 - RNA, 19 nt, Homo sapiens
  misc_RNA (1)...(19): siRNA sense strand
cgagggaagaagugaauga

SEQ ID NO: 1634280 - RNA, 19 nt, Homo sapiens
  misc_RNA (1)...(19): siRNA sense strand
uggaagaagacuugaagaa

SEQ ID NO: 1634281 - RNA, 19 nt, Homo sapiens
  misc_RNA (1)...(19): siRNA sense strand
ugaagucucgaaucaguga

SEQ ID NO: 1634282 - RNA, 19 nt, Homo sapiens
  misc_RNA (1)...(19): siRNA sense strand
guacgagaugcgucuacua

SEQ ID NO: 1634283 - RNA, 19 nt, Homo sapiens
  misc_RNA (1)...(19): siRNA sense strand
gaaugguacuggggagaua

SEQ ID NO: 1634284 - RNA, 19 nt, Homo sapiens
  misc_RNA (1)...(19): siRNA sense strand
gagggaagaagugaaugaa

SEQ ID NO: 1634285 - RNA, 19 nt, Homo sapiens
  misc_RNA (1)...(19): siRNA sense strand
ggacggcgaaguaaagcau

SEQ ID NO: 1634286 - RNA, 19 nt, Homo sapiens
  misc_RNA (1)...(19): siRNA sense strand
ggacagcuauugaagcauu

SEQ ID NO: 1634287 - RNA, 19 nt, Homo sapiens
  misc_RNA (1)...(19): siRNA sense strand
ggaagaugaugaagauuug

SEQ ID NO: 1634288 - RNA, 19 nt, Homo sapiens
  misc_RNA (1)...(19): siRNA sense strand
gaagaagauuggaagaaga

SEQ ID NO: 1634289 - RNA, 19 nt, Homo sapiens
  misc_RNA (1)...(19): siRNA sense strand
gaaauugacaaacguauga

SEQ ID NO: 1634290 - RNA, 19 nt, Homo sapiens
  misc_RNA (1)...(19): siRNA sense strand
guacagcucucugaaagaa

SEQ ID NO: 1634291 - RNA, 19 nt, Homo sapiens
  misc_RNA (1)...(19): siRNA sense strand
ggaaauauggcuucucuga

SEQ ID NO: 1634292 - RNA, 19 nt, Homo sapiens
  misc_RNA (1)...(19): siRNA sense strand
gaaagacgagagaccaaua

SEQ ID NO: 1634293 - RNA, 19 nt, Homo sapiens
  misc_RNA (1)...(19): siRNA sense strand
guaaagcauugugucauaa

SEQ ID NO: 1634294 - RNA, 19 nt, Homo sapiens
  misc_RNA (1)...(19): siRNA sense strand
uggcuucucugacccauua

SEQ ID NO: 1634295 - RNA, 19 nt, Homo sapiens
  misc_RNA (1)...(19): siRNA sense strand
ugaaagaacuggugcuaca

SEQ ID NO: 1634296 - RNA, 19 nt, Homo sapiens
  misc_RNA (1)...(19): siRNA sense strand
guacagcaaagaauacaua

SEQ ID NO: 1634297 - RNA, 19 nt, Homo sapiens
  misc_RNA (1)...(19): siRNA sense strand
ggaucaaguugucaaagaa

SEQ ID NO: 1634298 - RNA, 19 nt, Homo sapiens
  misc_RNA (1)...(19): siRNA sense strand
gaauauaacacucaguuuc

SEQ ID NO: 1634299 - RNA, 19 nt, Homo sapiens
  misc_RNA (1)...(19): siRNA sense strand
gguggaagaugaugaagau

SEQ ID NO: 1634300 - RNA, 19 nt, Homo sapiens
  misc_RNA (1)...(19): siRNA sense strand
gcacaacgacucccucaau

SEQ ID NO: 1634301 - RNA, 19 nt, Homo sapiens
  misc_RNA (1)...(19): siRNA sense strand
cagcaaagaauacauagaa

SEQ ID NO: 1634302 - RNA, 19 nt, Homo sapiens
  misc_RNA (1)...(19): siRNA sense strand
aguaaagcauugugucaua

SEQ ID NO: 1634303 - RNA, 19 nt, Homo sapiens
  misc_RNA (1)...(19): siRNA sense strand
uauugaagcuguagggaaa

SEQ ID NO: 1634304 - RNA, 19 nt, Homo sapiens
  misc_RNA (1)...(19): siRNA sense strand
aagaacuggugcuacauua

SEQ ID NO: 1634305 - RNA, 19 nt, Homo sapiens
  misc_RNA (1)...(19): siRNA sense strand
gacgagagaccaauacuug

SEQ ID NO: 1634306 - RNA, 19 nt, Homo sapiens
  misc_RNA (1)...(19): siRNA sense strand
gaaguaaagcauuguguca

SEQ ID NO: 1634307 - RNA, 19 nt, Homo sapiens
  misc_RNA (1)...(19): siRNA sense strand
aaacguaugaacagcauua

SEQ ID NO: 1634308 - RNA, 19 nt, Homo sapiens
  misc_RNA (1)...(19): siRNA sense strand
gaagcgagauggcacuuuu

SEQ ID NO: 1634309 - RNA, 19 nt, Homo sapiens
  misc_RNA (1)...(19): siRNA sense strand
gccaacaacgguaugaaua

SEQ ID NO: 1634310 - RNA, 19 nt, Homo sapiens
  misc_RNA (1)...(19): siRNA sense strand
ccaacaacgguaugaauaa

SEQ ID NO: 1634311 - RNA, 19 nt, Homo sapiens
  misc_RNA (1)...(19): siRNA sense strand
gggaagaagugaaugaaaa

SEQ ID NO: 1634312 - RNA, 19 nt, Homo sapiens
  misc_RNA (1)...(19): siRNA sense strand
gcaacuggcuauggcuuug

SEQ ID NO: 1634313 - RNA, 19 nt, Homo sapiens
  misc_RNA (1)...(19): siRNA sense strand
ucaguucugugguugaauu

SEQ ID NO: 1634314 - RNA, 19 nt, Homo sapiens
  misc_RNA (1)...(19): siRNA sense strand
gaagcaggcagcugaguau

SEQ ID NO: 1634315 - RNA, 19 nt, Homo sapiens
  misc_RNA (1)...(19): siRNA sense strand
cauggugauuauacucuua

SEQ ID NO: 1634316 - RNA, 19 nt, Homo sapiens
  misc_RNA (1)...(19): siRNA sense strand
gcaaugagaaagaaauaca

SEQ ID NO: 1634317 - RNA, 19 nt, Homo sapiens
  misc_RNA (1)...(19): siRNA sense strand
caauauguccuuacaagau

SEQ ID NO: 1634318 - RNA, 19 nt, Homo sapiens
  misc_RNA (1)...(19): siRNA sense strand
aauauucacugguggaaga

SEQ ID NO: 1634319 - RNA, 19 nt, Homo sapiens
  misc_RNA (1)...(19): siRNA sense strand
gagaaagaaauacaaagga

SEQ ID NO: 1634320 - RNA, 19 nt, Homo sapiens
  misc_RNA (1)...(19): siRNA sense strand
ucaguauaaucccaaauug

SEQ ID NO: 1634321 - RNA, 19 nt, Homo sapiens
  misc_RNA (1)...(19): siRNA sense strand
caagagcgguacagcaaag

SEQ ID NO: 1634322 - RNA, 19 nt, Homo sapiens
  misc_RNA (1)...(19): siRNA sense strand
gcagcugaguaucgagaaa

SEQ ID NO: 1634323 - RNA, 19 nt, Homo sapiens
  misc_RNA (1)...(19): siRNA sense strand
gcaggcagcugaguaucga

SEQ ID NO: 1634324 - RNA, 19 nt, Homo sapiens
  misc_RNA (1)...(19): siRNA sense strand
ggaagaagacuugaagaag

SEQ ID NO: 1634325 - RNA, 19 nt, Homo sapiens
  misc_RNA (1)...(19): siRNA sense strand
gaaauacaaaggauuaugc

SEQ ID NO: 1634326 - RNA, 19 nt, Homo sapiens
  misc_RNA (1)...(19): siRNA sense strand
ccaaauaccaacaggauca

SEQ ID NO: 1634327 - RNA, 19 nt, Homo sapiens
  misc_RNA (1)...(19): siRNA sense strand
ucucgaaucagugaaauua

SEQ ID NO: 1634328 - RNA, 19 nt, Homo sapiens
  misc_RNA (1)...(19): siRNA sense strand
ccauuaaccuucaguucug

SEQ ID NO: 1634329 - RNA, 19 nt, Homo sapiens
  misc_RNA (1)...(19): siRNA sense strand
ggaagcagcaaccgaaaca

SEQ ID NO: 1634330 - RNA, 19 nt, Homo sapiens
  misc_RNA (1)...(19): siRNA sense strand
ugaaggcaaugagaaagaa

SEQ ID NO: 1634331 - RNA, 19 nt, Homo sapiens
  misc_RNA (1)...(19): siRNA sense strand
gcauuaaaccagaccuuau

SEQ ID NO: 1634332 - RNA, 19 nt, Homo sapiens
  misc_RNA (1)...(19): siRNA sense strand
acacuagccuacccaguau

SEQ ID NO: 1634333 - RNA, 19 nt, Homo sapiens
  misc_RNA (1)...(19): siRNA sense strand
gaaaaggacagcuauugaa

SEQ ID NO: 1634334 - RNA, 19 nt, Homo sapiens
  misc_RNA (1)...(19): siRNA sense strand
gaugagaagacauggaaug

SEQ ID NO: 1634335 - RNA, 19 nt, Homo sapiens
  misc_RNA (1)...(19): siRNA sense strand
guugaagucucgaaucagu

SEQ ID NO: 1634336 - RNA, 19 nt, Homo sapiens
  misc_RNA (1)...(19): siRNA sense strand
uacaagaugcugaauggua

SEQ ID NO: 1634337 - RNA, 19 nt, Homo sapiens
  misc_RNA (1)...(19): siRNA sense strand
cacacuagccuacccagua

SEQ ID NO: 1634338 - RNA, 19 nt, Homo sapiens
  misc_RNA (1)...(19): siRNA sense strand
caacaacgguaugaauaac

SEQ ID NO: 1634339 - RNA, 19 nt, Homo sapiens
  misc_RNA (1)...(19): siRNA sense strand
gugaaauuauugacaguag

SEQ ID NO: 1634340 - RNA, 19 nt, Homo sapiens
  misc_RNA (1)...(19): siRNA sense strand
gaccuuauccagcugagaa

SEQ ID NO: 1634341 - RNA, 19 nt, Homo sapiens
  misc_RNA (1)...(19): siRNA sense strand
agaagaagauuggaagaag

SEQ ID NO: 1634342 - RNA, 19 nt, Homo sapiens
  misc_RNA (1)...(19): siRNA sense strand
guucugugguugaauuaau

SEQ ID NO: 1634343 - RNA, 19 nt, Homo sapiens
  misc_RNA (1)...(19): siRNA sense strand
uggaagaugaugaagauuu

SEQ ID NO: 1634344 - RNA, 19 nt, Homo sapiens
  misc_RNA (1)...(19): siRNA sense strand
ccaggaaauccaaaugaaa

SEQ ID NO: 1634345 - RNA, 19 nt, Homo sapiens
  misc_RNA (1)...(19): siRNA sense strand
cgagaugcgucuacuaaaa

SEQ ID NO: 1634346 - RNA, 19 nt, Homo sapiens
  misc_RNA (1)...(19): siRNA sense strand
cacaacgacucccucaaug

SEQ ID NO: 1634347 - RNA, 19 nt, Homo sapiens
  misc_RNA (1)...(19): siRNA sense strand
acaacgguaugaauaacaa

SEQ ID NO: 1634348 - RNA, 19 nt, Homo sapiens
  misc_RNA (1)...(19): siRNA sense strand
gcauggugauuauacucuu

SEQ ID NO: 1634349 - RNA, 19 nt, Homo sapiens
  misc_RNA (1)...(19): siRNA sense strand
caaguugucaaagaagaua

SEQ ID NO: 1634350 - RNA, 19 nt, Homo sapiens
  misc_RNA (1)...(19): siRNA sense strand
cgaaucagugaaauuauug

SEQ ID NO: 1634351 - RNA, 19 nt, Homo sapiens
  misc_RNA (1)...(19): siRNA sense strand
aauauguccuuacaagaug

SEQ ID NO: 1634352 - RNA, 19 nt, Homo sapiens
  misc_RNA (1)...(19): siRNA sense strand
cccaggaaauccaaaugaa

SEQ ID NO: 1634353 - RNA, 19 nt, Homo sapiens
  misc_RNA (1)...(19): siRNA sense strand
augaaucucuagcucagua

SEQ ID NO: 1634354 - RNA, 19 nt, Homo sapiens
  misc_RNA (1)...(19): siRNA sense strand
aagaagacuugaagaagca

SEQ ID NO: 1634355 - RNA, 19 nt, Homo sapiens
  misc_RNA (1)...(19): siRNA sense strand
aacaauauguccuuacaag

SEQ ID NO: 1634356 - RNA, 19 nt, Homo sapiens
  misc_RNA (1)...(19): siRNA sense strand
gaaucucuagcucaguaua

SEQ ID NO: 1634357 - RNA, 19 nt, Homo sapiens
  misc_RNA (1)...(19): siRNA sense strand
gacagcuauugaagcauuu

SEQ ID NO: 1634358 - RNA, 19 nt, Homo sapiens
  misc_RNA (1)...(19): siRNA sense strand
caacgacucccucaauguc

SEQ ID NO: 1634359 - RNA, 19 nt, Homo sapiens
  misc_RNA (1)...(19): siRNA sense strand
aggaucaaguugucaaaga

SEQ ID NO: 1634360 - RNA, 19 nt, Homo sapiens
  misc_RNA (1)...(19): siRNA sense strand
ugaaaacacugaagaccaa

SEQ ID NO: 1634361 - RNA, 19 nt, Homo sapiens
  misc_RNA (1)...(19): siRNA sense strand
gaaggcaaugagaaagaaa

SEQ ID NO: 1634362 - RNA, 19 nt, Homo sapiens
  misc_RNA (1)...(19): siRNA sense strand
guuuaaacgugaaggcaau

SEQ ID NO: 1634363 - RNA, 19 nt, Homo sapiens
  misc_RNA (1)...(19): siRNA sense strand
aaggacagcuauugaagca

SEQ ID NO: 1634364 - RNA, 19 nt, Homo sapiens
  misc_RNA (1)...(19): siRNA sense strand
gcacaucccaggaaaucca

SEQ ID NO: 1634365 - RNA, 19 nt, Homo sapiens
  misc_RNA (1)...(19): siRNA sense strand
acacugaagaccaauauuc

SEQ ID NO: 1634366 - RNA, 19 nt, Homo sapiens
  misc_RNA (1)...(19): siRNA sense strand
gagaaagacgagagaccaa

SEQ ID NO: 1634367 - RNA, 19 nt, Homo sapiens
  misc_RNA (1)...(19): siRNA sense strand
cgagaaauugacaaacgua

SEQ ID NO: 1634368 - RNA, 19 nt, Homo sapiens
  misc_RNA (1)...(19): siRNA sense strand
gaagauuggaagaagacuu

SEQ ID NO: 1634369 - RNA, 19 nt, Homo sapiens
  misc_RNA (1)...(19): siRNA sense strand
uacgagaugcgucuacuaa

SEQ ID NO: 1634370 - RNA, 19 nt, Homo sapiens
  misc_RNA (1)...(19): siRNA sense strand
cuuacaagaugcugaaugg

SEQ ID NO: 1634371 - RNA, 19 nt, Homo sapiens
  misc_RNA (1)...(19): siRNA sense strand
aaagaacuggugcuacauu

SEQ ID NO: 1634372 - RNA, 19 nt, Homo sapiens
  misc_RNA (1)...(19): siRNA sense strand
aaacacugaagaccaauau

SEQ ID NO: 1634373 - RNA, 19 nt, Homo sapiens
  misc_RNA (1)...(19): siRNA sense strand
gagagaccaauacuugaug

SEQ ID NO: 1634374 - RNA, 19 nt, Homo sapiens
  misc_RNA (1)...(19): siRNA sense strand
aaguugaagucucgaauca

SEQ ID NO: 1634375 - RNA, 19 nt, Homo sapiens
  misc_RNA (1)...(19): siRNA sense strand
cuaccggaaugaaucucua

SEQ ID NO: 1634376 - RNA, 19 nt, Homo sapiens
  misc_RNA (1)...(19): siRNA sense strand
gagaaauugacaaacguau

SEQ ID NO: 1634377 - RNA, 19 nt, Homo sapiens
  misc_RNA (1)...(19): siRNA sense strand
gacaguagaagaagauugg

SEQ ID NO: 1634378 - RNA, 19 nt, Homo sapiens
  misc_RNA (1)...(19): siRNA sense strand
auaaaccacuaccggaaug

SEQ ID NO: 1634379 - RNA, 19 nt, Homo sapiens
  misc_RNA (1)...(19): siRNA sense strand
cgagggaagaagugaauga

SEQ ID NO: 1634380 - RNA, 19 nt, Homo sapiens
  misc_RNA (1)...(19): siRNA sense strand
uggaagaagacuugaagaa

SEQ ID NO: 1634381 - RNA, 19 nt, Homo sapiens
  misc_RNA (1)...(19): siRNA sense strand
ugaagucucgaaucaguga

SEQ ID NO: 1634382 - RNA, 19 nt, Homo sapiens
  misc_RNA (1)...(19): siRNA sense strand
guacgagaugcgucuacua

SEQ ID NO: 1634383 - RNA, 19 nt, Homo sapiens
  misc_RNA (1)...(19): siRNA sense strand
gaaugguacuggggagaua

SEQ ID NO: 1634384 - RNA, 19 nt, Homo sapiens
  misc_RNA (1)...(19): siRNA sense strand
gagggaagaagugaaugaa

SEQ ID NO: 1634385 - RNA, 19 nt, Homo sapiens
  misc_RNA (1)...(19): siRNA sense strand
ggacggcgaaguaaagcau

SEQ ID NO: 1634386 - RNA, 19 nt, Homo sapiens
  misc_RNA (1)...(19): siRNA sense strand
gcugugugauggaugagaa

SEQ ID NO: 1634387 - RNA, 19 nt, Homo sapiens
  misc_RNA (1)...(19): siRNA sense strand
ggacugugaggucugauuc

SEQ ID NO: 1634388 - RNA, 19 nt, Homo sapiens
  misc_RNA (1)...(19): siRNA sense strand
ggaugagaauugucaagcu

SEQ ID NO: 1634389 - RNA, 19 nt, Homo sapiens
  misc_RNA (1)...(19): siRNA sense strand
ugugauggaugagaauugu

SEQ ID NO: 1634390 - RNA, 19 nt, Homo sapiens
  misc_RNA (1)...(19): siRNA sense strand
ccccaaaacugaccaugaa

SEQ ID NO: 1634391 - RNA, 19 nt, Homo sapiens
  misc_RNA (1)...(19): siRNA sense strand
gugggccugugcauuguug

SEQ ID NO: 1634392 - RNA, 19 nt, Homo sapiens
  misc_RNA (1)...(19): siRNA sense strand
gaauugucaagcuggagaa

SEQ ID NO: 1634393 - RNA, 19 nt, Homo sapiens
  misc_RNA (1)...(19): siRNA sense strand
gggcggugauuguccaaaa

SEQ ID NO: 1634394 - RNA, 19 nt, Homo sapiens
  misc_RNA (1)...(19): siRNA sense strand
ggacugugaggucugauuc

SEQ ID NO: 1634395 - RNA, 19 nt, Homo sapiens
  misc_RNA (1)...(19): siRNA sense strand
ggaugagaauugucaagcu

SEQ ID NO: 1634396 - RNA, 19 nt, Homo sapiens
  misc_RNA (1)...(19): siRNA sense strand
ccccaaaacugaccaugaa

SEQ ID NO: 1634397 - RNA, 19 nt, Homo sapiens
  misc_RNA (1)...(19): siRNA sense strand
gaauugucaagcuggagaa

SEQ ID NO: 1634398 - RNA, 19 nt, Homo sapiens
  misc_RNA (1)...(19): siRNA sense strand
ggacugugaggucugauuc

SEQ ID NO: 1634399 - RNA, 19 nt, Homo sapiens
  misc_RNA (1)...(19): siRNA sense strand
ggaugagaauugucaagcu

SEQ ID NO: 1634400 - RNA, 19 nt, Homo sapiens
  misc_RNA (1)...(19): siRNA sense strand
ccccaaaacugaccaugaa

SEQ ID NO: 1634401 - RNA, 19 nt, Homo sapiens
  misc_RNA (1)...(19): siRNA sense strand
gaauugucaagcuggagaa

SEQ ID NO: 1634402 - RNA, 19 nt, Homo sapiens
  misc_RNA (1)...(19): siRNA sense strand
ggacugugaggucugauuc

SEQ ID NO: 1634403 - RNA, 19 nt, Homo sapiens
  misc_RNA (1)...(19): siRNA sense strand
ggaugagaauugucaagcu

SEQ ID NO: 1634404 - RNA, 19 nt, Homo sapiens
  misc_RNA (1)...(19): siRNA sense strand
ccccaaaacugaccaugaa

SEQ ID NO: 1634405 - RNA, 19 nt, Homo sapiens
  misc_RNA (1)...(19): siRNA sense strand
gaauugucaagcuggagaa

SEQ ID NO: 1634406 - RNA, 19 nt, Homo sapiens
  misc_RNA (1)...(19): siRNA sense strand
caaaguaugugcuucagua

SEQ ID NO: 1634407 - RNA, 19 nt, Homo sapiens
  misc_RNA (1)...(19): siRNA sense strand
gcaguuaagugaugcaauu

SEQ ID NO: 1634408 - RNA, 19 nt, Homo sapiens
  misc_RNA (1)...(19): siRNA sense strand
ggacugaaauuaagcuugu

SEQ ID NO: 1634409 - RNA, 19 nt, Homo sapiens
  misc_RNA (1)...(19): siRNA sense strand
ggagaauuguugaagauga

SEQ ID NO: 1634410 - RNA, 19 nt, Homo sapiens
  misc_RNA (1)...(19): siRNA sense strand
gcaaaucugcaaacacuaa

SEQ ID NO: 1634411 - RNA, 19 nt, Homo sapiens
  misc_RNA (1)...(19): siRNA sense strand
gagaauuguugaagaugaa

SEQ ID NO: 1634412 - RNA, 19 nt, Homo sapiens
  misc_RNA (1)...(19): siRNA sense strand
ggagauuuccauguuauua

SEQ ID NO: 1634413 - RNA, 19 nt, Homo sapiens
  misc_RNA (1)...(19): siRNA sense strand
guacagcacauucauuauu

SEQ ID NO: 1634414 - RNA, 19 nt, Homo sapiens
  misc_RNA (1)...(19): siRNA sense strand
cagaagcgcuccaguaucu

SEQ ID NO: 1634415 - RNA, 19 nt, Homo sapiens
  misc_RNA (1)...(19): siRNA sense strand
aaaaggaacuggagaauug

SEQ ID NO: 1634416 - RNA, 19 nt, Homo sapiens
  misc_RNA (1)...(19): siRNA sense strand
aagauaccgucaugaauuu

SEQ ID NO: 1634417 - RNA, 19 nt, Homo sapiens
  misc_RNA (1)...(19): siRNA sense strand
aaagauaccgucaugaauu

SEQ ID NO: 1634418 - RNA, 19 nt, Homo sapiens
  misc_RNA (1)...(19): siRNA sense strand
auagugcacuugaugcuua

SEQ ID NO: 1634419 - RNA, 19 nt, Homo sapiens
  misc_RNA (1)...(19): siRNA sense strand
caacauagugcacuugaug

SEQ ID NO: 1634420 - RNA, 19 nt, Homo sapiens
  misc_RNA (1)...(19): siRNA sense strand
ugacagaaauggugaaucg

SEQ ID NO: 1634421 - RNA, 19 nt, Homo sapiens
  misc_RNA (1)...(19): siRNA sense strand
cagaagcaguuaagugaug

SEQ ID NO: 1634422 - RNA, 19 nt, Homo sapiens
  misc_RNA (1)...(19): siRNA sense strand
ugcaaacacuaacagaaua

SEQ ID NO: 1634423 - RNA, 19 nt, Homo sapiens
  misc_RNA (1)...(19): siRNA sense strand
ugacauuacuggagaaguc

SEQ ID NO: 1634424 - RNA, 19 nt, Homo sapiens
  misc_RNA (1)...(19): siRNA sense strand
ccacagaaauggccugacu

SEQ ID NO: 1634425 - RNA, 19 nt, Homo sapiens
  misc_RNA (1)...(19): siRNA sense strand
caaacgaguuauggacuga

SEQ ID NO: 1634426 - RNA, 19 nt, Homo sapiens
  misc_RNA (1)...(19): siRNA sense strand
guuauggacugaaauuaag

SEQ ID NO: 1634427 - RNA, 19 nt, Homo sapiens
  misc_RNA (1)...(19): siRNA sense strand
ucagaauuauccacuguug

SEQ ID NO: 1634428 - RNA, 19 nt, Homo sapiens
  misc_RNA (1)...(19): siRNA sense strand
gcaaacacuaacagaauau

SEQ ID NO: 1634429 - RNA, 19 nt, Homo sapiens
  misc_RNA (1)...(19): siRNA sense strand
gaacuggagaauuguugaa

SEQ ID NO: 1634430 - RNA, 19 nt, Homo sapiens
  misc_RNA (1)...(19): siRNA sense strand
ccguacagcacauucauua

SEQ ID NO: 1634431 - RNA, 19 nt, Homo sapiens
  misc_RNA (1)...(19): siRNA sense strand
gagaagauuuuccacagaa

SEQ ID NO: 1634432 - RNA, 19 nt, Homo sapiens
  misc_RNA (1)...(19): siRNA sense strand
gaacucagcgaugcaaauc

SEQ ID NO: 1634433 - RNA, 19 nt, Homo sapiens
  misc_RNA (1)...(19): siRNA sense strand
gaagaugaaccaaacaaaa

SEQ ID NO: 1634434 - RNA, 19 nt, Homo sapiens
  misc_RNA (1)...(19): siRNA sense strand
gauaccgucaugaauuuaa

SEQ ID NO: 1634435 - RNA, 19 nt, Homo sapiens
  misc_RNA (1)...(19): siRNA sense strand
gcaaauucagaagcaguua

SEQ ID NO: 1634436 - RNA, 19 nt, Homo sapiens
  misc_RNA (1)...(19): siRNA sense strand
gaaggaaaucagaauuauc

SEQ ID NO: 1634437 - RNA, 19 nt, Homo sapiens
  misc_RNA (1)...(19): siRNA sense strand
gcccagagcaaauucagaa

SEQ ID NO: 1634438 - RNA, 19 nt, Homo sapiens
  misc_RNA (1)...(19): siRNA sense strand
ggagaagucccaggauaau

SEQ ID NO: 1634439 - RNA, 19 nt, Homo sapiens
  misc_RNA (1)...(19): siRNA sense strand
cauuaaagccaacauagug

SEQ ID NO: 1634440 - RNA, 19 nt, Homo sapiens
  misc_RNA (1)...(19): siRNA sense strand
caaauucagaagcaguuaa

SEQ ID NO: 1634441 - RNA, 19 nt, Homo sapiens
  misc_RNA (1)...(19): siRNA sense strand
cgucaugaauuuaagucaa

SEQ ID NO: 1634442 - RNA, 19 nt, Homo sapiens
  misc_RNA (1)...(19): siRNA sense strand
ucuugaaucuguugaagga

SEQ ID NO: 1634443 - RNA, 19 nt, Homo sapiens
  misc_RNA (1)...(19): siRNA sense strand
cagagcaaauucagaagca

SEQ ID NO: 1634444 - RNA, 19 nt, Homo sapiens
  misc_RNA (1)...(19): siRNA sense strand
ggccugacuugcugacaga

SEQ ID NO: 1634445 - RNA, 19 nt, Homo sapiens
  misc_RNA (1)...(19): siRNA sense strand
cgaguuauggacugaaauu

SEQ ID NO: 1634446 - RNA, 19 nt, Homo sapiens
  misc_RNA (1)...(19): siRNA sense strand
ggaacucagcgaugcaaau

SEQ ID NO: 1634447 - RNA, 19 nt, Homo sapiens
  misc_RNA (1)...(19): siRNA sense strand
aaucagaauuauccacugu

SEQ ID NO: 1634448 - RNA, 19 nt, Homo sapiens
  misc_RNA (1)...(19): siRNA sense strand
uugaaucuguugaaggaaa

SEQ ID NO: 1634449 - RNA, 19 nt, Homo sapiens
  misc_RNA (1)...(19): siRNA sense strand
ccgaucgaguggccauuaa

SEQ ID NO: 1634450 - RNA, 19 nt, Homo sapiens
  misc_RNA (1)...(19): siRNA sense strand
aguaugugcuucaguaaca

SEQ ID NO: 1634451 - RNA, 19 nt, Homo sapiens
  misc_RNA (1)...(19): siRNA sense strand
gaguuauggacugaaauua

SEQ ID NO: 1634452 - RNA, 19 nt, Homo sapiens
  misc_RNA (1)...(19): siRNA sense strand
gaaaacacuugauccugau

SEQ ID NO: 1634453 - RNA, 19 nt, Homo sapiens
  misc_RNA (1)...(19): siRNA sense strand
ggaacuggagaauuguuga

SEQ ID NO: 1634454 - RNA, 19 nt, Homo sapiens
  misc_RNA (1)...(19): siRNA sense strand
uggagaagucccaggauaa

SEQ ID NO: 1634455 - RNA, 19 nt, Homo sapiens
  misc_RNA (1)...(19): siRNA sense strand
gaagucccaggauaauguu

SEQ ID NO: 1634456 - RNA, 19 nt, Homo sapiens
  misc_RNA (1)...(19): siRNA sense strand
uaaaagauaccgucaugaa

SEQ ID NO: 1634457 - RNA, 19 nt, Homo sapiens
  misc_RNA (1)...(19): siRNA sense strand
ugaagaugaaccaaacaaa

SEQ ID NO: 1634458 - RNA, 19 nt, Homo sapiens
  misc_RNA (1)...(19): siRNA sense strand
uagcauuauuggcagagaa

SEQ ID NO: 1634459 - RNA, 19 nt, Homo sapiens
  misc_RNA (1)...(19): siRNA sense strand
acagaaauggccugacuug

SEQ ID NO: 1634460 - RNA, 19 nt, Homo sapiens
  misc_RNA (1)...(19): siRNA sense strand
agaagucccaggauaaugu

SEQ ID NO: 1634461 - RNA, 19 nt, Homo sapiens
  misc_RNA (1)...(19): siRNA sense strand
gcagaagcgcuccaguauc

SEQ ID NO: 1634462 - RNA, 19 nt, Homo sapiens
  misc_RNA (1)...(19): siRNA sense strand
ugaaucuguugaaggaaau

SEQ ID NO: 1634463 - RNA, 19 nt, Homo sapiens
  misc_RNA (1)...(19): siRNA sense strand
gugcuucaguaacauucaa

SEQ ID NO: 1634464 - RNA, 19 nt, Homo sapiens
  misc_RNA (1)...(19): siRNA sense strand
ggccauuaaagccaacaua

SEQ ID NO: 1634465 - RNA, 19 nt, Homo sapiens
  misc_RNA (1)...(19): siRNA sense strand
gagaagucccaggauaaug

SEQ ID NO: 1634466 - RNA, 19 nt, Homo sapiens
  misc_RNA (1)...(19): siRNA sense strand
uaucaaaguaugugcuuca

SEQ ID NO: 1634467 - RNA, 19 nt, Homo sapiens
  misc_RNA (1)...(19): siRNA sense strand
gaucgaguggccauuaaag

SEQ ID NO: 1634468 - RNA, 19 nt, Homo sapiens
  misc_RNA (1)...(19): siRNA sense strand
cuggagaauuguugaagau

SEQ ID NO: 1634469 - RNA, 19 nt, Homo sapiens
  misc_RNA (1)...(19): siRNA sense strand
gccgaucgaguggccauua

SEQ ID NO: 1634470 - RNA, 19 nt, Homo sapiens
  misc_RNA (1)...(19): siRNA sense strand
uugcuuugccuuugacuaa

SEQ ID NO: 1634471 - RNA, 19 nt, Homo sapiens
  misc_RNA (1)...(19): siRNA sense strand
guuaagugaugcaauuagc

SEQ ID NO: 1634472 - RNA, 19 nt, Homo sapiens
  misc_RNA (1)...(19): siRNA sense strand
acucagcgaugcaaaucug

SEQ ID NO: 1634473 - RNA, 19 nt, Homo sapiens
  misc_RNA (1)...(19): siRNA sense strand
gcuuugccuuugacuaauc

SEQ ID NO: 1634474 - RNA, 19 nt, Homo sapiens
  misc_RNA (1)...(19): siRNA sense strand
cugcaaacacuaacagaau

SEQ ID NO: 1634475 - RNA, 19 nt, Homo sapiens
  misc_RNA (1)...(19): siRNA sense strand
guugaaggaaaucagaauu

SEQ ID NO: 1634476 - RNA, 19 nt, Homo sapiens
  misc_RNA (1)...(19): siRNA sense strand
uagcagcccagagcaaauu

SEQ ID NO: 1634477 - RNA, 19 nt, Homo sapiens
  misc_RNA (1)...(19): siRNA sense strand
agaaauggugaaucgcuuu

SEQ ID NO: 1634478 - RNA, 19 nt, Homo sapiens
  misc_RNA (1)...(19): siRNA sense strand
aaaguaugugcuucaguaa

SEQ ID NO: 1634479 - RNA, 19 nt, Homo sapiens
  misc_RNA (1)...(19): siRNA sense strand
gccauuaaagccaacauag

SEQ ID NO: 1634480 - RNA, 19 nt, Homo sapiens
  misc_RNA (1)...(19): siRNA sense strand
agaaauggccugacuugcu

SEQ ID NO: 1634481 - RNA, 19 nt, Homo sapiens
  misc_RNA (1)...(19): siRNA sense strand
gacguccagcugagaaauu

SEQ ID NO: 1634482 - RNA, 19 nt, Homo sapiens
  misc_RNA (1)...(19): siRNA sense strand
caguuaagugaugcaauua

SEQ ID NO: 1634483 - RNA, 19 nt, Homo sapiens
  misc_RNA (1)...(19): siRNA sense strand
uucagaagcaguuaaguga

SEQ ID NO: 1634484 - RNA, 19 nt, Homo sapiens
  misc_RNA (1)...(19): siRNA sense strand
ccaacauagugcacuugau

SEQ ID NO: 1634485 - RNA, 19 nt, Homo sapiens
  misc_RNA (1)...(19): siRNA sense strand
gccaacauagugcacuuga

SEQ ID NO: 1634486 - RNA, 19 nt, Homo sapiens
  misc_RNA (1)...(19): siRNA sense strand
acguccagcugagaaauuu

SEQ ID NO: 1634487 - RNA, 19 nt, Homo sapiens
  misc_RNA (1)...(19): siRNA sense strand
ccauuaaagccaacauagu

SEQ ID NO: 1634488 - RNA, 19 nt, Homo sapiens
  misc_RNA (1)...(19): siRNA sense strand
ugcagaagcgcuccaguau

SEQ ID NO: 1634489 - RNA, 19 nt, Homo sapiens
  misc_RNA (1)...(19): siRNA sense strand
aacgaguuauggacugaaa

SEQ ID NO: 1634490 - RNA, 19 nt, Homo sapiens
  misc_RNA (1)...(19): siRNA sense strand
cugacuugcugacagaaau

SEQ ID NO: 1634491 - RNA, 19 nt, Homo sapiens
  misc_RNA (1)...(19): siRNA sense strand
acuggagaauuguugaaga

SEQ ID NO: 1634492 - RNA, 19 nt, Homo sapiens
  misc_RNA (1)...(19): siRNA sense strand
gccuuugcuuugccuuuga

SEQ ID NO: 1634493 - RNA, 19 nt, Homo sapiens
  misc_RNA (1)...(19): siRNA sense strand
uguugaagaugaaccaaac

SEQ ID NO: 1634494 - RNA, 19 nt, Homo sapiens
  misc_RNA (1)...(19): siRNA sense strand
augcagaagcgcuccagua

SEQ ID NO: 1634495 - RNA, 19 nt, Homo sapiens
  misc_RNA (1)...(19): siRNA sense strand
aauuauccacuguugcuuu

SEQ ID NO: 1634496 - RNA, 19 nt, Homo sapiens
  misc_RNA (1)...(19): siRNA sense strand
caaaguaugugcuucagua

SEQ ID NO: 1634497 - RNA, 19 nt, Homo sapiens
  misc_RNA (1)...(19): siRNA sense strand
gcaguuaagugaugcaauu

SEQ ID NO: 1634498 - RNA, 19 nt, Homo sapiens
  misc_RNA (1)...(19): siRNA sense strand
ggacugaaauuaagcuugu

SEQ ID NO: 1634499 - RNA, 19 nt, Homo sapiens
  misc_RNA (1)...(19): siRNA sense strand
ggagaauuguugaagauga

SEQ ID NO: 1634500 - RNA, 19 nt, Homo sapiens
  misc_RNA (1)...(19): siRNA sense strand
gcaaaucugcaaacacuaa

SEQ ID NO: 1634501 - RNA, 19 nt, Homo sapiens
  misc_RNA (1)...(19): siRNA sense strand
gagaauuguugaagaugaa

SEQ ID NO: 1634502 - RNA, 19 nt, Homo sapiens
  misc_RNA (1)...(19): siRNA sense strand
ggagauuuccauguuauua

SEQ ID NO: 1634503 - RNA, 19 nt, Homo sapiens
  misc_RNA (1)...(19): siRNA sense strand
guacagcacauucauuauu

SEQ ID NO: 1634504 - RNA, 19 nt, Homo sapiens
  misc_RNA (1)...(19): siRNA sense strand
aaaaggaacuggagaauug

SEQ ID NO: 1634505 - RNA, 19 nt, Homo sapiens
  misc_RNA (1)...(19): siRNA sense strand
aagauaccgucaugaauuu

SEQ ID NO: 1634506 - RNA, 19 nt, Homo sapiens
  misc_RNA (1)...(19): siRNA sense strand
aaagauaccgucaugaauu

SEQ ID NO: 1634507 - RNA, 19 nt, Homo sapiens
  misc_RNA (1)...(19): siRNA sense strand
auagugcacuugaugcuua

SEQ ID NO: 1634508 - RNA, 19 nt, Homo sapiens
  misc_RNA (1)...(19): siRNA sense strand
caacauagugcacuugaug

SEQ ID NO: 1634509 - RNA, 19 nt, Homo sapiens
  misc_RNA (1)...(19): siRNA sense strand
ugacagaaauggugaaucg

SEQ ID NO: 1634510 - RNA, 19 nt, Homo sapiens
  misc_RNA (1)...(19): siRNA sense strand
cagaagcaguuaagugaug

SEQ ID NO: 1634511 - RNA, 19 nt, Homo sapiens
  misc_RNA (1)...(19): siRNA sense strand
ugcaaacacuaacagaaua

SEQ ID NO: 1634512 - RNA, 19 nt, Homo sapiens
  misc_RNA (1)...(19): siRNA sense strand
ugacauuacuggagaaguc

SEQ ID NO: 1634513 - RNA, 19 nt, Homo sapiens
  misc_RNA (1)...(19): siRNA sense strand
ccacagaaauggccugacu

SEQ ID NO: 1634514 - RNA, 19 nt, Homo sapiens
  misc_RNA (1)...(19): siRNA sense strand
caaacgaguuauggacuga

SEQ ID NO: 1634515 - RNA, 19 nt, Homo sapiens
  misc_RNA (1)...(19): siRNA sense strand
guuauggacugaaauuaag

SEQ ID NO: 1634516 - RNA, 19 nt, Homo sapiens
  misc_RNA (1)...(19): siRNA sense strand
ucagaauuauccacuguug

SEQ ID NO: 1634517 - RNA, 19 nt, Homo sapiens
  misc_RNA (1)...(19): siRNA sense strand
gcaaacacuaacagaauau

SEQ ID NO: 1634518 - RNA, 19 nt, Homo sapiens
  misc_RNA (1)...(19): siRNA sense strand
gaacuggagaauuguugaa

SEQ ID NO: 1634519 - RNA, 19 nt, Homo sapiens
  misc_RNA (1)...(19): siRNA sense strand
ccguacagcacauucauua

SEQ ID NO: 1634520 - RNA, 19 nt, Homo sapiens
  misc_RNA (1)...(19): siRNA sense strand
gagaagauuuuccacagaa

SEQ ID NO: 1634521 - RNA, 19 nt, Homo sapiens
  misc_RNA (1)...(19): siRNA sense strand
gaacucagcgaugcaaauc

SEQ ID NO: 1634522 - RNA, 19 nt, Homo sapiens
  misc_RNA (1)...(19): siRNA sense strand
gaagaugaaccaaacaaaa

SEQ ID NO: 1634523 - RNA, 19 nt, Homo sapiens
  misc_RNA (1)...(19): siRNA sense strand
gauaccgucaugaauuuaa

SEQ ID NO: 1634524 - RNA, 19 nt, Homo sapiens
  misc_RNA (1)...(19): siRNA sense strand
gcaaauucagaagcaguua

SEQ ID NO: 1634525 - RNA, 19 nt, Homo sapiens
  misc_RNA (1)...(19): siRNA sense strand
gaaggaaaucagaauuauc

SEQ ID NO: 1634526 - RNA, 19 nt, Homo sapiens
  misc_RNA (1)...(19): siRNA sense strand
gcccagagcaaauucagaa

SEQ ID NO: 1634527 - RNA, 19 nt, Homo sapiens
  misc_RNA (1)...(19): siRNA sense strand
ggagaagucccaggauaau

SEQ ID NO: 1634528 - RNA, 19 nt, Homo sapiens
  misc_RNA (1)...(19): siRNA sense strand
cauuaaagccaacauagug

SEQ ID NO: 1634529 - RNA, 19 nt, Homo sapiens
  misc_RNA (1)...(19): siRNA sense strand
caaauucagaagcaguuaa

SEQ ID NO: 1634530 - RNA, 19 nt, Homo sapiens
  misc_RNA (1)...(19): siRNA sense strand
cgucaugaauuuaagucaa

SEQ ID NO: 1634531 - RNA, 19 nt, Homo sapiens
  misc_RNA (1)...(19): siRNA sense strand
ucuugaaucuguugaagga

SEQ ID NO: 1634532 - RNA, 19 nt, Homo sapiens
  misc_RNA (1)...(19): siRNA sense strand
cagagcaaauucagaagca

SEQ ID NO: 1634533 - RNA, 19 nt, Homo sapiens
  misc_RNA (1)...(19): siRNA sense strand
ggccugacuugcugacaga

SEQ ID NO: 1634534 - RNA, 19 nt, Homo sapiens
  misc_RNA (1)...(19): siRNA sense strand
cgaguuauggacugaaauu

SEQ ID NO: 1634535 - RNA, 19 nt, Homo sapiens
  misc_RNA (1)...(19): siRNA sense strand
ggaacucagcgaugcaaau

SEQ ID NO: 1634536 - RNA, 19 nt, Homo sapiens
  misc_RNA (1)...(19): siRNA sense strand
uugaaucuguugaaggaaa

SEQ ID NO: 1634537 - RNA, 19 nt, Homo sapiens
  misc_RNA (1)...(19): siRNA sense strand
aaucagaauuauccacugu

SEQ ID NO: 1634538 - RNA, 19 nt, Homo sapiens
  misc_RNA (1)...(19): siRNA sense strand
ccgaucgaguggccauuaa

SEQ ID NO: 1634539 - RNA, 19 nt, Homo sapiens
  misc_RNA (1)...(19): siRNA sense strand
aguaugugcuucaguaaca

SEQ ID NO: 1634540 - RNA, 19 nt, Homo sapiens
  misc_RNA (1)...(19): siRNA sense strand
gaguuauggacugaaauua

SEQ ID NO: 1634541 - RNA, 19 nt, Homo sapiens
  misc_RNA (1)...(19): siRNA sense strand
gaaaacacuugauccugau

SEQ ID NO: 1634542 - RNA, 19 nt, Homo sapiens
  misc_RNA (1)...(19): siRNA sense strand
ggaacuggagaauuguuga

SEQ ID NO: 1634543 - RNA, 19 nt, Homo sapiens
  misc_RNA (1)...(19): siRNA sense strand
uggagaagucccaggauaa

SEQ ID NO: 1634544 - RNA, 19 nt, Homo sapiens
  misc_RNA (1)...(19): siRNA sense strand
gaagucccaggauaauguu

SEQ ID NO: 1634545 - RNA, 19 nt, Homo sapiens
  misc_RNA (1)...(19): siRNA sense strand
uaaaagauaccgucaugaa

SEQ ID NO: 1634546 - RNA, 19 nt, Homo sapiens
  misc_RNA (1)...(19): siRNA sense strand
ugaagaugaaccaaacaaa

SEQ ID NO: 1634547 - RNA, 19 nt, Homo sapiens
  misc_RNA (1)...(19): siRNA sense strand
uagcauuauuggcagagaa

SEQ ID NO: 1634548 - RNA, 19 nt, Homo sapiens
  misc_RNA (1)...(19): siRNA sense strand
acagaaauggccugacuug

SEQ ID NO: 1634549 - RNA, 19 nt, Homo sapiens
  misc_RNA (1)...(19): siRNA sense strand
agaagucccaggauaaugu

SEQ ID NO: 1634550 - RNA, 19 nt, Homo sapiens
  misc_RNA (1)...(19): siRNA sense strand
ugaaucuguugaaggaaau

SEQ ID NO: 1634551 - RNA, 19 nt, Homo sapiens
  misc_RNA (1)...(19): siRNA sense strand
gagaagucccaggauaaug

SEQ ID NO: 1634552 - RNA, 19 nt, Homo sapiens
  misc_RNA (1)...(19): siRNA sense strand
ggccauuaaagccaacaua

SEQ ID NO: 1634553 - RNA, 19 nt, Homo sapiens
  misc_RNA (1)...(19): siRNA sense strand
gugcuucaguaacauucaa

SEQ ID NO: 1634554 - RNA, 19 nt, Homo sapiens
  misc_RNA (1)...(19): siRNA sense strand
uaucaaaguaugugcuuca

SEQ ID NO: 1634555 - RNA, 19 nt, Homo sapiens
  misc_RNA (1)...(19): siRNA sense strand
gaucgaguggccauuaaag

SEQ ID NO: 1634556 - RNA, 19 nt, Homo sapiens
  misc_RNA (1)...(19): siRNA sense strand
cuggagaauuguugaagau

SEQ ID NO: 1634557 - RNA, 19 nt, Homo sapiens
  misc_RNA (1)...(19): siRNA sense strand
gccgaucgaguggccauua

SEQ ID NO: 1634558 - RNA, 19 nt, Homo sapiens
  misc_RNA (1)...(19): siRNA sense strand
uugcuuugccuuugacuaa

SEQ ID NO: 1634559 - RNA, 19 nt, Homo sapiens
  misc_RNA (1)...(19): siRNA sense strand
guuaagugaugcaauuagc

SEQ ID NO: 1634560 - RNA, 19 nt, Homo sapiens
  misc_RNA (1)...(19): siRNA sense strand
guugaaggaaaucagaauu

SEQ ID NO: 1634561 - RNA, 19 nt, Homo sapiens
  misc_RNA (1)...(19): siRNA sense strand
gcuuugccuuugacuaauc

SEQ ID NO: 1634562 - RNA, 19 nt, Homo sapiens
  misc_RNA (1)...(19): siRNA sense strand
cugcaaacacuaacagaau

SEQ ID NO: 1634563 - RNA, 19 nt, Homo sapiens
  misc_RNA (1)...(19): siRNA sense strand
uagcagcccagagcaaauu

SEQ ID NO: 1634564 - RNA, 19 nt, Homo sapiens
  misc_RNA (1)...(19): siRNA sense strand
acucagcgaugcaaaucug

SEQ ID NO: 1634565 - RNA, 19 nt, Homo sapiens
  misc_RNA (1)...(19): siRNA sense strand
aaaguaugugcuucaguaa

SEQ ID NO: 1634566 - RNA, 19 nt, Homo sapiens
  misc_RNA (1)...(19): siRNA sense strand
agaaauggugaaucgcuuu

SEQ ID NO: 1634567 - RNA, 19 nt, Homo sapiens
  misc_RNA (1)...(19): siRNA sense strand
gacguccagcugagaaauu

SEQ ID NO: 1634568 - RNA, 19 nt, Homo sapiens
  misc_RNA (1)...(19): siRNA sense strand
agaaauggccugacuugcu

SEQ ID NO: 1634569 - RNA, 19 nt, Homo sapiens
  misc_RNA (1)...(19): siRNA sense strand
caguuaagugaugcaauua

SEQ ID NO: 1634570 - RNA, 19 nt, Homo sapiens
  misc_RNA (1)...(19): siRNA sense strand
uucagaagcaguuaaguga

SEQ ID NO: 1634571 - RNA, 19 nt, Homo sapiens
  misc_RNA (1)...(19): siRNA sense strand
ccaacauagugcacuugau

SEQ ID NO: 1634572 - RNA, 19 nt, Homo sapiens
  misc_RNA (1)...(19): siRNA sense strand
gccauuaaagccaacauag

SEQ ID NO: 1634573 - RNA, 19 nt, Homo sapiens
  misc_RNA (1)...(19): siRNA sense strand
gccaacauagugcacuuga

SEQ ID NO: 1634574 - RNA, 19 nt, Homo sapiens
  misc_RNA (1)...(19): siRNA sense strand
acguccagcugagaaauuu

SEQ ID NO: 1634575 - RNA, 19 nt, Homo sapiens
  misc_RNA (1)...(19): siRNA sense strand
acuggagaauuguugaaga

SEQ ID NO: 1634576 - RNA, 19 nt, Homo sapiens
  misc_RNA (1)...(19): siRNA sense strand
aacgaguuauggacugaaa

SEQ ID NO: 1634577 - RNA, 19 nt, Homo sapiens
  misc_RNA (1)...(19): siRNA sense strand
cugacuugcugacagaaau

SEQ ID NO: 1634578 - RNA, 19 nt, Homo sapiens
  misc_RNA (1)...(19): siRNA sense strand
ccauuaaagccaacauagu

SEQ ID NO: 1634579 - RNA, 19 nt, Homo sapiens
  misc_RNA (1)...(19): siRNA sense strand
gccuuugcuuugccuuuga

SEQ ID NO: 1634580 - RNA, 19 nt, Homo sapiens
  misc_RNA (1)...(19): siRNA sense strand
uguugaagaugaaccaaac

SEQ ID NO: 1634581 - RNA, 19 nt, Homo sapiens
  misc_RNA (1)...(19): siRNA sense strand
aauuauccacuguugcuuu

SEQ ID NO: 1634582 - RNA, 19 nt, Homo sapiens
  misc_RNA (1)...(19): siRNA sense strand
ggaaagagacuguuaaaua

SEQ ID NO: 1634583 - RNA, 19 nt, Homo sapiens
  misc_RNA (1)...(19): siRNA sense strand
gggaaagucugcagaauaa

SEQ ID NO: 1634584 - RNA, 19 nt, Homo sapiens
  misc_RNA (1)...(19): siRNA sense strand
gcacccaucucuaauuaua

SEQ ID NO: 1634585 - RNA, 19 nt, Homo sapiens
  misc_RNA (1)...(19): siRNA sense strand
uaaaguagcuggaaugaug

SEQ ID NO: 1634586 - RNA, 19 nt, Homo sapiens
  misc_RNA (1)...(19): siRNA sense strand
gaagaagucugguuucaug

SEQ ID NO: 1634587 - RNA, 19 nt, Homo sapiens
  misc_RNA (1)...(19): siRNA sense strand
cuaaagagcuguccuauca

SEQ ID NO: 1634588 - RNA, 19 nt, Homo sapiens
  misc_RNA (1)...(19): siRNA sense strand
ggaagaggcugacuaugaa

SEQ ID NO: 1634589 - RNA, 19 nt, Homo sapiens
  misc_RNA (1)...(19): siRNA sense strand
gagcagagcccuucuauug

SEQ ID NO: 1634590 - RNA, 19 nt, Homo sapiens
  misc_RNA (1)...(19): siRNA sense strand
uagcaaagcuguugaagaa

SEQ ID NO: 1634591 - RNA, 19 nt, Homo sapiens
  misc_RNA (1)...(19): siRNA sense strand
gaaaagaucuugagaaaca

SEQ ID NO: 1634592 - RNA, 19 nt, Homo sapiens
  misc_RNA (1)...(19): siRNA sense strand
gaauaucgauccuauguuc

SEQ ID NO: 1634593 - RNA, 19 nt, Homo sapiens
  misc_RNA (1)...(19): siRNA sense strand
gcacuagaauuuaaaccua

SEQ ID NO: 1634594 - RNA, 19 nt, Homo sapiens
  misc_RNA (1)...(19): siRNA sense strand
gauccuauguucaaucuaa

SEQ ID NO: 1634595 - RNA, 19 nt, Homo sapiens
  misc_RNA (1)...(19): siRNA sense strand
gcaaagcuguugaagaaga

SEQ ID NO: 1634596 - RNA, 19 nt, Homo sapiens
  misc_RNA (1)...(19): siRNA sense strand
gggcacccaucucuaauua

SEQ ID NO: 1634597 - RNA, 19 nt, Homo sapiens
  misc_RNA (1)...(19): siRNA sense strand
gaagacauuuauugcagua

SEQ ID NO: 1634598 - RNA, 19 nt, Homo sapiens
  misc_RNA (1)...(19): siRNA sense strand
gaaagaagaggauauugaa

SEQ ID NO: 1634599 - RNA, 19 nt, Homo sapiens
  misc_RNA (1)...(19): siRNA sense strand
cagcaaaucuuucaucuca

SEQ ID NO: 1634600 - RNA, 19 nt, Homo sapiens
  misc_RNA (1)...(19): siRNA sense strand
ccaauuaacucaccucuuc

SEQ ID NO: 1634601 - RNA, 19 nt, Homo sapiens
  misc_RNA (1)...(19): siRNA sense strand
gaaaugugauccagaggaa

SEQ ID NO: 1634602 - RNA, 19 nt, Homo sapiens
  misc_RNA (1)...(19): siRNA sense strand
gaauaugguuguuugaaga

SEQ ID NO: 1634603 - RNA, 19 nt, Homo sapiens
  misc_RNA (1)...(19): siRNA sense strand
caauggcaguuaugauuua

SEQ ID NO: 1634604 - RNA, 19 nt, Homo sapiens
  misc_RNA (1)...(19): siRNA sense strand
gagaauugcuugaaaugga

SEQ ID NO: 1634605 - RNA, 19 nt, Homo sapiens
  misc_RNA (1)...(19): siRNA sense strand
aaaggaagcuggcaaacaa

SEQ ID NO: 1634606 - RNA, 19 nt, Homo sapiens
  misc_RNA (1)...(19): siRNA sense strand
gcaaaucuuucaucucaau

SEQ ID NO: 1634607 - RNA, 19 nt, Homo sapiens
  misc_RNA (1)...(19): siRNA sense strand
agaagaggguguugauaua

SEQ ID NO: 1634608 - RNA, 19 nt, Homo sapiens
  misc_RNA (1)...(19): siRNA sense strand
uuacaagacuucaccagua

SEQ ID NO: 1634609 - RNA, 19 nt, Homo sapiens
  misc_RNA (1)...(19): siRNA sense strand
uagauacugugcuagauua

SEQ ID NO: 1634610 - RNA, 19 nt, Homo sapiens
  misc_RNA (1)...(19): siRNA sense strand
caagauguauguuugauca

SEQ ID NO: 1634611 - RNA, 19 nt, Homo sapiens
  misc_RNA (1)...(19): siRNA sense strand
ccaagcaccuuuaugaaga

SEQ ID NO: 1634612 - RNA, 19 nt, Homo sapiens
  misc_RNA (1)...(19): siRNA sense strand
gcaguugucuuaaacagau

SEQ ID NO: 1634613 - RNA, 19 nt, Homo sapiens
  misc_RNA (1)...(19): siRNA sense strand
aagcagcucuggaucauaa

SEQ ID NO: 1634614 - RNA, 19 nt, Homo sapiens
  misc_RNA (1)...(19): siRNA sense strand
uaaccaagcaccuuuauga

SEQ ID NO: 1634615 - RNA, 19 nt, Homo sapiens
  misc_RNA (1)...(19): siRNA sense strand
gaaucagccucgcaacaaa

SEQ ID NO: 1634616 - RNA, 19 nt, Homo sapiens
  misc_RNA (1)...(19): siRNA sense strand
guaaaugcaucuuggacaa

SEQ ID NO: 1634617 - RNA, 19 nt, Homo sapiens
  misc_RNA (1)...(19): siRNA sense strand
ccaccaagauguauguuug

SEQ ID NO: 1634618 - RNA, 19 nt, Homo sapiens
  misc_RNA (1)...(19): siRNA sense strand
gcaaccaacuaccucauau

SEQ ID NO: 1634619 - RNA, 19 nt, Homo sapiens
  misc_RNA (1)...(19): siRNA sense strand
cagcagaucuuacagcaau

SEQ ID NO: 1634620 - RNA, 19 nt, Homo sapiens
  misc_RNA (1)...(19): siRNA sense strand
gaagucugguuucauguug

SEQ ID NO: 1634621 - RNA, 19 nt, Homo sapiens
  misc_RNA (1)...(19): siRNA sense strand
ugaagaagaugacuuugug

SEQ ID NO: 1634622 - RNA, 19 nt, Homo sapiens
  misc_RNA (1)...(19): siRNA sense strand
gaaggaagaggcugacuau

SEQ ID NO: 1634623 - RNA, 19 nt, Homo sapiens
  misc_RNA (1)...(19): siRNA sense strand
gaagaaaacugugguguug

SEQ ID NO: 1634624 - RNA, 19 nt, Homo sapiens
  misc_RNA (1)...(19): siRNA sense strand
gguaagagaacuacagaaa

SEQ ID NO: 1634625 - RNA, 19 nt, Homo sapiens
  misc_RNA (1)...(19): siRNA sense strand
gcaaacuggaugaggauua

SEQ ID NO: 1634626 - RNA, 19 nt, Homo sapiens
  misc_RNA (1)...(19): siRNA sense strand
gaccugaucagcccuguua

SEQ ID NO: 1634627 - RNA, 19 nt, Homo sapiens
  misc_RNA (1)...(19): siRNA sense strand
gcaacuuggugguucguuu

SEQ ID NO: 1634628 - RNA, 19 nt, Homo sapiens
  misc_RNA (1)...(19): siRNA sense strand
gggacuaacugcuuccauu

SEQ ID NO: 1634629 - RNA, 19 nt, Homo sapiens
  misc_RNA (1)...(19): siRNA sense strand
ggaauaugguuguuugaag

SEQ ID NO: 1634630 - RNA, 19 nt, Homo sapiens
  misc_RNA (1)...(19): siRNA sense strand
acacagcaguugucuuaaa

SEQ ID NO: 1634631 - RNA, 19 nt, Homo sapiens
  misc_RNA (1)...(19): siRNA sense strand
ucaggaacauaucagauuu

SEQ ID NO: 1634632 - RNA, 19 nt, Homo sapiens
  misc_RNA (1)...(19): siRNA sense strand
auacacagcaguugucuua

SEQ ID NO: 1634633 - RNA, 19 nt, Homo sapiens
  misc_RNA (1)...(19): siRNA sense strand
caagaagcaauucaugaua

SEQ ID NO: 1634634 - RNA, 19 nt, Homo sapiens
  misc_RNA (1)...(19): siRNA sense strand
gcaguuaugauuuagcuaa

SEQ ID NO: 1634635 - RNA, 19 nt, Homo sapiens
  misc_RNA (1)...(19): siRNA sense strand
ccaaugagcuguguacgau

SEQ ID NO: 1634636 - RNA, 19 nt, Homo sapiens
  misc_RNA (1)...(19): siRNA sense strand
gaagagguacuuaggaaau

SEQ ID NO: 1634637 - RNA, 19 nt, Homo sapiens
  misc_RNA (1)...(19): siRNA sense strand
ggacuaacugcuuccauuu

SEQ ID NO: 1634638 - RNA, 19 nt, Homo sapiens
  misc_RNA (1)...(19): siRNA sense strand
accagaaacugccaaauuu

SEQ ID NO: 1634639 - RNA, 19 nt, Homo sapiens
  misc_RNA (1)...(19): siRNA sense strand
cgaacuggaugaccauuug

SEQ ID NO: 1634640 - RNA, 19 nt, Homo sapiens
  misc_RNA (1)...(19): siRNA sense strand
ugaugaggaugaagaaauu

SEQ ID NO: 1634641 - RNA, 19 nt, Homo sapiens
  misc_RNA (1)...(19): siRNA sense strand
aagaggagcugcacaggaa

SEQ ID NO: 1634642 - RNA, 19 nt, Homo sapiens
  misc_RNA (1)...(19): siRNA sense strand
ggaauuagaagaagcacuu

SEQ ID NO: 1634643 - RNA, 19 nt, Homo sapiens
  misc_RNA (1)...(19): siRNA sense strand
aaagacugcugauggaauu

SEQ ID NO: 1634644 - RNA, 19 nt, Homo sapiens
  misc_RNA (1)...(19): siRNA sense strand
gcaccagguucucauuaug

SEQ ID NO: 1634645 - RNA, 19 nt, Homo sapiens
  misc_RNA (1)...(19): siRNA sense strand
ggucgaaguuacaggauug

SEQ ID NO: 1634646 - RNA, 19 nt, Homo sapiens
  misc_RNA (1)...(19): siRNA sense strand
cagagucacuguggaagua

SEQ ID NO: 1634647 - RNA, 19 nt, Homo sapiens
  misc_RNA (1)...(19): siRNA sense strand
ugaggaggaugaagagaaa

SEQ ID NO: 1634648 - RNA, 19 nt, Homo sapiens
  misc_RNA (1)...(19): siRNA sense strand
cugcugggcugcuauuuaa

SEQ ID NO: 1634649 - RNA, 19 nt, Homo sapiens
  misc_RNA (1)...(19): siRNA sense strand
ccaaggaaaucagcuaaau

SEQ ID NO: 1634650 - RNA, 19 nt, Homo sapiens
  misc_RNA (1)...(19): siRNA sense strand
uagcugauguguacacuga

SEQ ID NO: 1634651 - RNA, 19 nt, Homo sapiens
  misc_RNA (1)...(19): siRNA sense strand
caagugauccguuuacuca

SEQ ID NO: 1634652 - RNA, 19 nt, Homo sapiens
  misc_RNA (1)...(19): siRNA sense strand
gauggaagcagaauucaga

SEQ ID NO: 1634653 - RNA, 19 nt, Homo sapiens
  misc_RNA (1)...(19): siRNA sense strand
ccagaaacugccaaauuua

SEQ ID NO: 1634654 - RNA, 19 nt, Homo sapiens
  misc_RNA (1)...(19): siRNA sense strand
gaucuuacagcaauuaaug

SEQ ID NO: 1634655 - RNA, 19 nt, Homo sapiens
  misc_RNA (1)...(19): siRNA sense strand
caagggcacccaucucuaa

SEQ ID NO: 1634656 - RNA, 19 nt, Homo sapiens
  misc_RNA (1)...(19): siRNA sense strand
gagauggaaccaagaguuu

SEQ ID NO: 1634657 - RNA, 19 nt, Homo sapiens
  misc_RNA (1)...(19): siRNA sense strand
gaaaugcaaggaauggauu

SEQ ID NO: 1634658 - RNA, 19 nt, Homo sapiens
  misc_RNA (1)...(19): siRNA sense strand
ggucugcccuggucaacaa

SEQ ID NO: 1634659 - RNA, 19 nt, Homo sapiens
  misc_RNA (1)...(19): siRNA sense strand
gcaugguggugucaauauu

SEQ ID NO: 1634660 - RNA, 19 nt, Homo sapiens
  misc_RNA (1)...(19): siRNA sense strand
cagcaucacuguggagaaa

SEQ ID NO: 1634661 - RNA, 19 nt, Homo sapiens
  misc_RNA (1)...(19): siRNA sense strand
cacaagaugcuuuggaaua

SEQ ID NO: 1634662 - RNA, 19 nt, Homo sapiens
  misc_RNA (1)...(19): siRNA sense strand
ugacagaagugggcuuuau

SEQ ID NO: 1634663 - RNA, 19 nt, Homo sapiens
  misc_RNA (1)...(19): siRNA sense strand
caacaagugucagcuguca

SEQ ID NO: 1634664 - RNA, 19 nt, Homo sapiens
  misc_RNA (1)...(19): siRNA sense strand
agaagaggauauugaaguu

SEQ ID NO: 1634665 - RNA, 19 nt, Homo sapiens
  misc_RNA (1)...(19): siRNA sense strand
ugauggaaaugcuaacaaa

SEQ ID NO: 1634666 - RNA, 19 nt, Homo sapiens
  misc_RNA (1)...(19): siRNA sense strand
gaaauacccgugcaaccaa

SEQ ID NO: 1634667 - RNA, 19 nt, Homo sapiens
  misc_RNA (1)...(19): siRNA sense strand
guuaaugacuccagcacuu

SEQ ID NO: 1634668 - RNA, 19 nt, Homo sapiens
  misc_RNA (1)...(19): siRNA sense strand
ggaauacucaaaccuagaa

SEQ ID NO: 1634669 - RNA, 19 nt, Homo sapiens
  misc_RNA (1)...(19): siRNA sense strand
ugucagaacucauucagau

SEQ ID NO: 1634670 - RNA, 19 nt, Homo sapiens
  misc_RNA (1)...(19): siRNA sense strand
gcagaucuuacagcaauua

SEQ ID NO: 1634671 - RNA, 19 nt, Homo sapiens
  misc_RNA (1)...(19): siRNA sense strand
gagguuaccauauccauug

SEQ ID NO: 1634672 - RNA, 19 nt, Homo sapiens
  misc_RNA (1)...(19): siRNA sense strand
gagaccaaccugcuuauug

SEQ ID NO: 1634673 - RNA, 19 nt, Homo sapiens
  misc_RNA (1)...(19): siRNA sense strand
gagcuggcuuauaucagua

SEQ ID NO: 1634674 - RNA, 19 nt, Homo sapiens
  misc_RNA (1)...(19): siRNA sense strand
caaacugcucgaaaucuua

SEQ ID NO: 1634675 - RNA, 19 nt, Homo sapiens
  misc_RNA (1)...(19): siRNA sense strand
ggacauggcauugggaaga

SEQ ID NO: 1634676 - RNA, 19 nt, Homo sapiens
  misc_RNA (1)...(19): siRNA sense strand
gaagagaaagaagaggaua

SEQ ID NO: 1634677 - RNA, 19 nt, Homo sapiens
  misc_RNA (1)...(19): siRNA sense strand
ccacugauucugcauauga

SEQ ID NO: 1634678 - RNA, 19 nt, Homo sapiens
  misc_RNA (1)...(19): siRNA sense strand
caucaccacauaucuauuu

SEQ ID NO: 1634679 - RNA, 19 nt, Homo sapiens
  misc_RNA (1)...(19): siRNA sense strand
gaagcucuauccuccugaa

SEQ ID NO: 1634680 - RNA, 19 nt, Homo sapiens
  misc_RNA (1)...(19): siRNA sense strand
ccagaguguuugagggaua

SEQ ID NO: 1634681 - RNA, 19 nt, Homo sapiens
  misc_RNA (1)...(19): siRNA sense strand
gagcuugauuugcaugaug

SEQ ID NO: 1634682 - RNA, 19 nt, Homo sapiens
  misc_RNA (1)...(19): siRNA sense strand
ggaaagagacuguuaaaua

SEQ ID NO: 1634683 - RNA, 19 nt, Homo sapiens
  misc_RNA (1)...(19): siRNA sense strand
gggaaagucugcagaauaa

SEQ ID NO: 1634684 - RNA, 19 nt, Homo sapiens
  misc_RNA (1)...(19): siRNA sense strand
gcacccaucucuaauuaua

SEQ ID NO: 1634685 - RNA, 19 nt, Homo sapiens
  misc_RNA (1)...(19): siRNA sense strand
uaaaguagcuggaaugaug

SEQ ID NO: 1634686 - RNA, 19 nt, Homo sapiens
  misc_RNA (1)...(19): siRNA sense strand
gaagaagucugguuucaug

SEQ ID NO: 1634687 - RNA, 19 nt, Homo sapiens
  misc_RNA (1)...(19): siRNA sense strand
cuaaagagcuguccuauca

SEQ ID NO: 1634688 - RNA, 19 nt, Homo sapiens
  misc_RNA (1)...(19): siRNA sense strand
ggaagaggcugacuaugaa

SEQ ID NO: 1634689 - RNA, 19 nt, Homo sapiens
  misc_RNA (1)...(19): siRNA sense strand
gagcagagcccuucuauug

SEQ ID NO: 1634690 - RNA, 19 nt, Homo sapiens
  misc_RNA (1)...(19): siRNA sense strand
uagcaaagcuguugaagaa

SEQ ID NO: 1634691 - RNA, 19 nt, Homo sapiens
  misc_RNA (1)...(19): siRNA sense strand
gaaaagaucuugagaaaca

SEQ ID NO: 1634692 - RNA, 19 nt, Homo sapiens
  misc_RNA (1)...(19): siRNA sense strand
gaauaucgauccuauguuc

SEQ ID NO: 1634693 - RNA, 19 nt, Homo sapiens
  misc_RNA (1)...(19): siRNA sense strand
gcacuagaauuuaaaccua

SEQ ID NO: 1634694 - RNA, 19 nt, Homo sapiens
  misc_RNA (1)...(19): siRNA sense strand
gauccuauguucaaucuaa

SEQ ID NO: 1634695 - RNA, 19 nt, Homo sapiens
  misc_RNA (1)...(19): siRNA sense strand
gcaaagcuguugaagaaga

SEQ ID NO: 1634696 - RNA, 19 nt, Homo sapiens
  misc_RNA (1)...(19): siRNA sense strand
gggcacccaucucuaauua

SEQ ID NO: 1634697 - RNA, 19 nt, Homo sapiens
  misc_RNA (1)...(19): siRNA sense strand
gaagacauuuauugcagua

SEQ ID NO: 1634698 - RNA, 19 nt, Homo sapiens
  misc_RNA (1)...(19): siRNA sense strand
gaaagaagaggauauugaa

SEQ ID NO: 1634699 - RNA, 19 nt, Homo sapiens
  misc_RNA (1)...(19): siRNA sense strand
cagcaaaucuuucaucuca

SEQ ID NO: 1634700 - RNA, 19 nt, Homo sapiens
  misc_RNA (1)...(19): siRNA sense strand
ccaauuaacucaccucuuc

SEQ ID NO: 1634701 - RNA, 19 nt, Homo sapiens
  misc_RNA (1)...(19): siRNA sense strand
gaaaugugauccagaggaa

SEQ ID NO: 1634702 - RNA, 19 nt, Homo sapiens
  misc_RNA (1)...(19): siRNA sense strand
gaauaugguuguuugaaga

SEQ ID NO: 1634703 - RNA, 19 nt, Homo sapiens
  misc_RNA (1)...(19): siRNA sense strand
caauggcaguuaugauuua

SEQ ID NO: 1634704 - RNA, 19 nt, Homo sapiens
  misc_RNA (1)...(19): siRNA sense strand
gagaauugcuugaaaugga

SEQ ID NO: 1634705 - RNA, 19 nt, Homo sapiens
  misc_RNA (1)...(19): siRNA sense strand
aaaggaagcuggcaaacaa

SEQ ID NO: 1634706 - RNA, 19 nt, Homo sapiens
  misc_RNA (1)...(19): siRNA sense strand
gcaaaucuuucaucucaau

SEQ ID NO: 1634707 - RNA, 19 nt, Homo sapiens
  misc_RNA (1)...(19): siRNA sense strand
agaagaggguguugauaua

SEQ ID NO: 1634708 - RNA, 19 nt, Homo sapiens
  misc_RNA (1)...(19): siRNA sense strand
uuacaagacuucaccagua

SEQ ID NO: 1634709 - RNA, 19 nt, Homo sapiens
  misc_RNA (1)...(19): siRNA sense strand
uagauacugugcuagauua

SEQ ID NO: 1634710 - RNA, 19 nt, Homo sapiens
  misc_RNA (1)...(19): siRNA sense strand
caagauguauguuugauca

SEQ ID NO: 1634711 - RNA, 19 nt, Homo sapiens
  misc_RNA (1)...(19): siRNA sense strand
ccaagcaccuuuaugaaga

SEQ ID NO: 1634712 - RNA, 19 nt, Homo sapiens
  misc_RNA (1)...(19): siRNA sense strand
gcaguugucuuaaacagau

SEQ ID NO: 1634713 - RNA, 19 nt, Homo sapiens
  misc_RNA (1)...(19): siRNA sense strand
aagcagcucuggaucauaa

SEQ ID NO: 1634714 - RNA, 19 nt, Homo sapiens
  misc_RNA (1)...(19): siRNA sense strand
uaaccaagcaccuuuauga

SEQ ID NO: 1634715 - RNA, 19 nt, Homo sapiens
  misc_RNA (1)...(19): siRNA sense strand
gaaucagccucgcaacaaa

SEQ ID NO: 1634716 - RNA, 19 nt, Homo sapiens
  misc_RNA (1)...(19): siRNA sense strand
guaaaugcaucuuggacaa

SEQ ID NO: 1634717 - RNA, 19 nt, Homo sapiens
  misc_RNA (1)...(19): siRNA sense strand
ccaccaagauguauguuug

SEQ ID NO: 1634718 - RNA, 19 nt, Homo sapiens
  misc_RNA (1)...(19): siRNA sense strand
gcaaccaacuaccucauau

SEQ ID NO: 1634719 - RNA, 19 nt, Homo sapiens
  misc_RNA (1)...(19): siRNA sense strand
cagcagaucuuacagcaau

SEQ ID NO: 1634720 - RNA, 19 nt, Homo sapiens
  misc_RNA (1)...(19): siRNA sense strand
gaagucugguuucauguug

SEQ ID NO: 1634721 - RNA, 19 nt, Homo sapiens
  misc_RNA (1)...(19): siRNA sense strand
ugaagaagaugacuuugug

SEQ ID NO: 1634722 - RNA, 19 nt, Homo sapiens
  misc_RNA (1)...(19): siRNA sense strand
gaaggaagaggcugacuau

SEQ ID NO: 1634723 - RNA, 19 nt, Homo sapiens
  misc_RNA (1)...(19): siRNA sense strand
gaagaaaacugugguguug

SEQ ID NO: 1634724 - RNA, 19 nt, Homo sapiens
  misc_RNA (1)...(19): siRNA sense strand
gguaagagaacuacagaaa

SEQ ID NO: 1634725 - RNA, 19 nt, Homo sapiens
  misc_RNA (1)...(19): siRNA sense strand
gcaaacuggaugaggauua

SEQ ID NO: 1634726 - RNA, 19 nt, Homo sapiens
  misc_RNA (1)...(19): siRNA sense strand
gaccugaucagcccuguua

SEQ ID NO: 1634727 - RNA, 19 nt, Homo sapiens
  misc_RNA (1)...(19): siRNA sense strand
gcaacuuggugguucguuu

SEQ ID NO: 1634728 - RNA, 19 nt, Homo sapiens
  misc_RNA (1)...(19): siRNA sense strand
gggacuaacugcuuccauu

SEQ ID NO: 1634729 - RNA, 19 nt, Homo sapiens
  misc_RNA (1)...(19): siRNA sense strand
ggaauaugguuguuugaag

SEQ ID NO: 1634730 - RNA, 19 nt, Homo sapiens
  misc_RNA (1)...(19): siRNA sense strand
acacagcaguugucuuaaa

SEQ ID NO: 1634731 - RNA, 19 nt, Homo sapiens
  misc_RNA (1)...(19): siRNA sense strand
ucaggaacauaucagauuu

SEQ ID NO: 1634732 - RNA, 19 nt, Homo sapiens
  misc_RNA (1)...(19): siRNA sense strand
auacacagcaguugucuua

SEQ ID NO: 1634733 - RNA, 19 nt, Homo sapiens
  misc_RNA (1)...(19): siRNA sense strand
caagaagcaauucaugaua

SEQ ID NO: 1634734 - RNA, 19 nt, Homo sapiens
  misc_RNA (1)...(19): siRNA sense strand
gcaguuaugauuuagcuaa

SEQ ID NO: 1634735 - RNA, 19 nt, Homo sapiens
  misc_RNA (1)...(19): siRNA sense strand
ccaaugagcuguguacgau

SEQ ID NO: 1634736 - RNA, 19 nt, Homo sapiens
  misc_RNA (1)...(19): siRNA sense strand
gaagagguacuuaggaaau

SEQ ID NO: 1634737 - RNA, 19 nt, Homo sapiens
  misc_RNA (1)...(19): siRNA sense strand
ggacuaacugcuuccauuu

SEQ ID NO: 1634738 - RNA, 19 nt, Homo sapiens
  misc_RNA (1)...(19): siRNA sense strand
accagaaacugccaaauuu

SEQ ID NO: 1634739 - RNA, 19 nt, Homo sapiens
  misc_RNA (1)...(19): siRNA sense strand
cgaacuggaugaccauuug

SEQ ID NO: 1634740 - RNA, 19 nt, Homo sapiens
  misc_RNA (1)...(19): siRNA sense strand
ugaugaggaugaagaaauu

SEQ ID NO: 1634741 - RNA, 19 nt, Homo sapiens
  misc_RNA (1)...(19): siRNA sense strand
aagaggagcugcacaggaa

SEQ ID NO: 1634742 - RNA, 19 nt, Homo sapiens
  misc_RNA (1)...(19): siRNA sense strand
ggaauuagaagaagcacuu

SEQ ID NO: 1634743 - RNA, 19 nt, Homo sapiens
  misc_RNA (1)...(19): siRNA sense strand
aaagacugcugauggaauu

SEQ ID NO: 1634744 - RNA, 19 nt, Homo sapiens
  misc_RNA (1)...(19): siRNA sense strand
gcaccagguucucauuaug

SEQ ID NO: 1634745 - RNA, 19 nt, Homo sapiens
  misc_RNA (1)...(19): siRNA sense strand
ggucgaaguuacaggauug

SEQ ID NO: 1634746 - RNA, 19 nt, Homo sapiens
  misc_RNA (1)...(19): siRNA sense strand
cagagucacuguggaagua

SEQ ID NO: 1634747 - RNA, 19 nt, Homo sapiens
  misc_RNA (1)...(19): siRNA sense strand
ugaggaggaugaagagaaa

SEQ ID NO: 1634748 - RNA, 19 nt, Homo sapiens
  misc_RNA (1)...(19): siRNA sense strand
cugcugggcugcuauuuaa

SEQ ID NO: 1634749 - RNA, 19 nt, Homo sapiens
  misc_RNA (1)...(19): siRNA sense strand
ccaaggaaaucagcuaaau

SEQ ID NO: 1634750 - RNA, 19 nt, Homo sapiens
  misc_RNA (1)...(19): siRNA sense strand
uagcugauguguacacuga

SEQ ID NO: 1634751 - RNA, 19 nt, Homo sapiens
  misc_RNA (1)...(19): siRNA sense strand
caagugauccguuuacuca

SEQ ID NO: 1634752 - RNA, 19 nt, Homo sapiens
  misc_RNA (1)...(19): siRNA sense strand
gauggaagcagaauucaga

SEQ ID NO: 1634753 - RNA, 19 nt, Homo sapiens
  misc_RNA (1)...(19): siRNA sense strand
ccagaaacugccaaauuua

SEQ ID NO: 1634754 - RNA, 19 nt, Homo sapiens
  misc_RNA (1)...(19): siRNA sense strand
gaucuuacagcaauuaaug

SEQ ID NO: 1634755 - RNA, 19 nt, Homo sapiens
  misc_RNA (1)...(19): siRNA sense strand
caagggcacccaucucuaa

SEQ ID NO: 1634756 - RNA, 19 nt, Homo sapiens
  misc_RNA (1)...(19): siRNA sense strand
gagauggaaccaagaguuu

SEQ ID NO: 1634757 - RNA, 19 nt, Homo sapiens
  misc_RNA (1)...(19): siRNA sense strand
gaaaugcaaggaauggauu

SEQ ID NO: 1634758 - RNA, 19 nt, Homo sapiens
  misc_RNA (1)...(19): siRNA sense strand
ggucugcccuggucaacaa

SEQ ID NO: 1634759 - RNA, 19 nt, Homo sapiens
  misc_RNA (1)...(19): siRNA sense strand
gcaugguggugucaauauu

SEQ ID NO: 1634760 - RNA, 19 nt, Homo sapiens
  misc_RNA (1)...(19): siRNA sense strand
cagcaucacuguggagaaa

SEQ ID NO: 1634761 - RNA, 19 nt, Homo sapiens
  misc_RNA (1)...(19): siRNA sense strand
cacaagaugcuuuggaaua

SEQ ID NO: 1634762 - RNA, 19 nt, Homo sapiens
  misc_RNA (1)...(19): siRNA sense strand
ugacagaagugggcuuuau

SEQ ID NO: 1634763 - RNA, 19 nt, Homo sapiens
  misc_RNA (1)...(19): siRNA sense strand
caacaagugucagcuguca

SEQ ID NO: 1634764 - RNA, 19 nt, Homo sapiens
  misc_RNA (1)...(19): siRNA sense strand
agaagaggauauugaaguu

SEQ ID NO: 1634765 - RNA, 19 nt, Homo sapiens
  misc_RNA (1)...(19): siRNA sense strand
ugauggaaaugcuaacaaa

SEQ ID NO: 1634766 - RNA, 19 nt, Homo sapiens
  misc_RNA (1)...(19): siRNA sense strand
gaaauacccgugcaaccaa

SEQ ID NO: 1634767 - RNA, 19 nt, Homo sapiens
  misc_RNA (1)...(19): siRNA sense strand
guuaaugacuccagcacuu

SEQ ID NO: 1634768 - RNA, 19 nt, Homo sapiens
  misc_RNA (1)...(19): siRNA sense strand
ggaauacucaaaccuagaa

SEQ ID NO: 1634769 - RNA, 19 nt, Homo sapiens
  misc_RNA (1)...(19): siRNA sense strand
ugucagaacucauucagau

SEQ ID NO: 1634770 - RNA, 19 nt, Homo sapiens
  misc_RNA (1)...(19): siRNA sense strand
gcagaucuuacagcaauua

SEQ ID NO: 1634771 - RNA, 19 nt, Homo sapiens
  misc_RNA (1)...(19): siRNA sense strand
gagguuaccauauccauug

SEQ ID NO: 1634772 - RNA, 19 nt, Homo sapiens
  misc_RNA (1)...(19): siRNA sense strand
gagaccaaccugcuuauug

SEQ ID NO: 1634773 - RNA, 19 nt, Homo sapiens
  misc_RNA (1)...(19): siRNA sense strand
gagcuggcuuauaucagua

SEQ ID NO: 1634774 - RNA, 19 nt, Homo sapiens
  misc_RNA (1)...(19): siRNA sense strand
caaacugcucgaaaucuua

SEQ ID NO: 1634775 - RNA, 19 nt, Homo sapiens
  misc_RNA (1)...(19): siRNA sense strand
ggacauggcauugggaaga

SEQ ID NO: 1634776 - RNA, 19 nt, Homo sapiens
  misc_RNA (1)...(19): siRNA sense strand
gaagagaaagaagaggaua

SEQ ID NO: 1634777 - RNA, 19 nt, Homo sapiens
  misc_RNA (1)...(19): siRNA sense strand
ccacugauucugcauauga

SEQ ID NO: 1634778 - RNA, 19 nt, Homo sapiens
  misc_RNA (1)...(19): siRNA sense strand
caucaccacauaucuauuu

SEQ ID NO: 1634779 - RNA, 19 nt, Homo sapiens
  misc_RNA (1)...(19): siRNA sense strand
gaagcucuauccuccugaa

SEQ ID NO: 1634780 - RNA, 19 nt, Homo sapiens
  misc_RNA (1)...(19): siRNA sense strand
ccagaguguuugagggaua

SEQ ID NO: 1634781 - RNA, 19 nt, Homo sapiens
  misc_RNA (1)...(19): siRNA sense strand
gagcuugauuugcaugaug

SEQ ID NO: 1634782 - RNA, 19 nt, Homo sapiens
  misc_RNA (1)...(19): siRNA sense strand
uaaggaggcuuucaacaug

SEQ ID NO: 1634783 - RNA, 19 nt, Homo sapiens
  misc_RNA (1)...(19): siRNA sense strand
gaaccgugauggcuucauu

SEQ ID NO: 1634784 - RNA, 19 nt, Homo sapiens
  misc_RNA (1)...(19): siRNA sense strand
aaacauggcgccaaggaua

SEQ ID NO: 1634785 - RNA, 19 nt, Homo sapiens
  misc_RNA (1)...(19): siRNA sense strand
gggaggcacccauugauaa

SEQ ID NO: 1634786 - RNA, 19 nt, Homo sapiens
  misc_RNA (1)...(19): siRNA sense strand
gaaaggcaacuucaacuac

SEQ ID NO: 1634787 - RNA, 19 nt, Homo sapiens
  misc_RNA (1)...(19): siRNA sense strand
cgugauggcuucauugaca

SEQ ID NO: 1634788 - RNA, 19 nt, Homo sapiens
  misc_RNA (1)...(19): siRNA sense strand
gauaagaaaggcaacuuca

SEQ ID NO: 1634789 - RNA, 19 nt, Homo sapiens
  misc_RNA (1)...(19): siRNA sense strand
caacaugauugaccagaac

SEQ ID NO: 1634790 - RNA, 19 nt, Homo sapiens
  misc_RNA (1)...(19): siRNA sense strand
agaaaggcaacuucaacua

SEQ ID NO: 1634791 - RNA, 19 nt, Homo sapiens
  misc_RNA (1)...(19): siRNA sense strand
cauccaaugucuucgcaau

SEQ ID NO: 1634792 - RNA, 19 nt, Homo sapiens
  misc_RNA (1)...(19): siRNA sense strand
ccaaugucuucgcaauguu

SEQ ID NO: 1634793 - RNA, 19 nt, Homo sapiens
  misc_RNA (1)...(19): siRNA sense strand
caaugucuucgcaauguuu

SEQ ID NO: 1634794 - RNA, 19 nt, Homo sapiens
  misc_RNA (1)...(19): siRNA sense strand
uaagaaaggcaacuucaac

SEQ ID NO: 1634795 - RNA, 19 nt, Homo sapiens
  misc_RNA (1)...(19): siRNA sense strand
aaggaggcuuucaacauga

SEQ ID NO: 1634796 - RNA, 19 nt, Homo sapiens
  misc_RNA (1)...(19): siRNA sense strand
ccaaggauaaagacgacua

SEQ ID NO: 1634797 - RNA, 19 nt, Homo sapiens
  misc_RNA (1)...(19): siRNA sense strand
ggaaguggacgagauguac

SEQ ID NO: 1634798 - RNA, 19 nt, Homo sapiens
  misc_RNA (1)...(19): siRNA sense strand
uuaaggaggcuuucaacau

SEQ ID NO: 1634799 - RNA, 19 nt, Homo sapiens
  misc_RNA (1)...(19): siRNA sense strand
aggcacccauugauaagaa

SEQ ID NO: 1634800 - RNA, 19 nt, Homo sapiens
  misc_RNA (1)...(19): siRNA sense strand
uccaaugucuucgcaaugu

SEQ ID NO: 1634801 - RNA, 19 nt, Homo sapiens
  misc_RNA (1)...(19): siRNA sense strand
ggaggcacccauugauaag

SEQ ID NO: 1634802 - RNA, 19 nt, Homo sapiens
  misc_RNA (1)...(19): siRNA sense strand
gugauggcuucauugacaa

SEQ ID NO: 1634803 - RNA, 19 nt, Homo sapiens
  misc_RNA (1)...(19): siRNA sense strand
aagccaagaccaccaagaa

SEQ ID NO: 1634804 - RNA, 19 nt, Homo sapiens
  misc_RNA (1)...(19): siRNA sense strand
cgggaggcacccauugaua

SEQ ID NO: 1634805 - RNA, 19 nt, Homo sapiens
  misc_RNA (1)...(19): siRNA sense strand
ucaaacauggcgccaagga

SEQ ID NO: 1634806 - RNA, 19 nt, Homo sapiens
  misc_RNA (1)...(19): siRNA sense strand
ccaaagccaagaccaccaa

SEQ ID NO: 1634807 - RNA, 19 nt, Homo sapiens
  misc_RNA (1)...(19): siRNA sense strand
ucccagauccaggaguuua

SEQ ID NO: 1634808 - RNA, 19 nt, Homo sapiens
  misc_RNA (1)...(19): siRNA sense strand
ucacccgcauccucaaaca

SEQ ID NO: 1634809 - RNA, 19 nt, Homo sapiens
  misc_RNA (1)...(19): siRNA sense strand
ggcacccauugauaagaaa

SEQ ID NO: 1634810 - RNA, 19 nt, Homo sapiens
  misc_RNA (1)...(19): siRNA sense strand
aggaggaccugcacgacau

SEQ ID NO: 1634811 - RNA, 19 nt, Homo sapiens
  misc_RNA (1)...(19): siRNA sense strand
guaccgggaggcacccauu

SEQ ID NO: 1634812 - RNA, 19 nt, Homo sapiens
  misc_RNA (1)...(19): siRNA sense strand
ugaggaaguggacgagaug

SEQ ID NO: 1634813 - RNA, 19 nt, Homo sapiens
  misc_RNA (1)...(19): siRNA sense strand
agucccagauccaggaguu

SEQ ID NO: 1634814 - RNA, 19 nt, Homo sapiens
  misc_RNA (1)...(19): siRNA sense strand
uaaggaggcuuucaacaug

SEQ ID NO: 1634815 - RNA, 19 nt, Homo sapiens
  misc_RNA (1)...(19): siRNA sense strand
gaaccgugauggcuucauu

SEQ ID NO: 1634816 - RNA, 19 nt, Homo sapiens
  misc_RNA (1)...(19): siRNA sense strand
aaacauggcgccaaggaua

SEQ ID NO: 1634817 - RNA, 19 nt, Homo sapiens
  misc_RNA (1)...(19): siRNA sense strand
gggaggcacccauugauaa

SEQ ID NO: 1634818 - RNA, 19 nt, Homo sapiens
  misc_RNA (1)...(19): siRNA sense strand
gaaaggcaacuucaacuac

SEQ ID NO: 1634819 - RNA, 19 nt, Homo sapiens
  misc_RNA (1)...(19): siRNA sense strand
cgugauggcuucauugaca

SEQ ID NO: 1634820 - RNA, 19 nt, Homo sapiens
  misc_RNA (1)...(19): siRNA sense strand
gauaagaaaggcaacuuca

SEQ ID NO: 1634821 - RNA, 19 nt, Homo sapiens
  misc_RNA (1)...(19): siRNA sense strand
caacaugauugaccagaac

SEQ ID NO: 1634822 - RNA, 19 nt, Homo sapiens
  misc_RNA (1)...(19): siRNA sense strand
agaaaggcaacuucaacua

SEQ ID NO: 1634823 - RNA, 19 nt, Homo sapiens
  misc_RNA (1)...(19): siRNA sense strand
cauccaaugucuucgcaau

SEQ ID NO: 1634824 - RNA, 19 nt, Homo sapiens
  misc_RNA (1)...(19): siRNA sense strand
ccaaugucuucgcaauguu

SEQ ID NO: 1634825 - RNA, 19 nt, Homo sapiens
  misc_RNA (1)...(19): siRNA sense strand
caaugucuucgcaauguuu

SEQ ID NO: 1634826 - RNA, 19 nt, Homo sapiens
  misc_RNA (1)...(19): siRNA sense strand
uaagaaaggcaacuucaac

SEQ ID NO: 1634827 - RNA, 19 nt, Homo sapiens
  misc_RNA (1)...(19): siRNA sense strand
aaggaggcuuucaacauga

SEQ ID NO: 1634828 - RNA, 19 nt, Homo sapiens
  misc_RNA (1)...(19): siRNA sense strand
ccaaggauaaagacgacua

SEQ ID NO: 1634829 - RNA, 19 nt, Homo sapiens
  misc_RNA (1)...(19): siRNA sense strand
ggaaguggacgagauguac

SEQ ID NO: 1634830 - RNA, 19 nt, Homo sapiens
  misc_RNA (1)...(19): siRNA sense strand
uuaaggaggcuuucaacau

SEQ ID NO: 1634831 - RNA, 19 nt, Homo sapiens
  misc_RNA (1)...(19): siRNA sense strand
aggcacccauugauaagaa

SEQ ID NO: 1634832 - RNA, 19 nt, Homo sapiens
  misc_RNA (1)...(19): siRNA sense strand
uccaaugucuucgcaaugu

SEQ ID NO: 1634833 - RNA, 19 nt, Homo sapiens
  misc_RNA (1)...(19): siRNA sense strand
ggaggcacccauugauaag

SEQ ID NO: 1634834 - RNA, 19 nt, Homo sapiens
  misc_RNA (1)...(19): siRNA sense strand
gugauggcuucauugacaa

SEQ ID NO: 1634835 - RNA, 19 nt, Homo sapiens
  misc_RNA (1)...(19): siRNA sense strand
aagccaagaccaccaagaa

SEQ ID NO: 1634836 - RNA, 19 nt, Homo sapiens
  misc_RNA (1)...(19): siRNA sense strand
cgggaggcacccauugaua

SEQ ID NO: 1634837 - RNA, 19 nt, Homo sapiens
  misc_RNA (1)...(19): siRNA sense strand
ucaaacauggcgccaagga

SEQ ID NO: 1634838 - RNA, 19 nt, Homo sapiens
  misc_RNA (1)...(19): siRNA sense strand
ccaaagccaagaccaccaa

SEQ ID NO: 1634839 - RNA, 19 nt, Homo sapiens
  misc_RNA (1)...(19): siRNA sense strand
ucccagauccaggaguuua

SEQ ID NO: 1634840 - RNA, 19 nt, Homo sapiens
  misc_RNA (1)...(19): siRNA sense strand
ucacccgcauccucaaaca

SEQ ID NO: 1634841 - RNA, 19 nt, Homo sapiens
  misc_RNA (1)...(19): siRNA sense strand
ggcacccauugauaagaaa

SEQ ID NO: 1634842 - RNA, 19 nt, Homo sapiens
  misc_RNA (1)...(19): siRNA sense strand
aggaggaccugcacgacau

SEQ ID NO: 1634843 - RNA, 19 nt, Homo sapiens
  misc_RNA (1)...(19): siRNA sense strand
guaccgggaggcacccauu

SEQ ID NO: 1634844 - RNA, 19 nt, Homo sapiens
  misc_RNA (1)...(19): siRNA sense strand
ugaggaaguggacgagaug

SEQ ID NO: 1634845 - RNA, 19 nt, Homo sapiens
  misc_RNA (1)...(19): siRNA sense strand
agucccagauccaggaguu

SEQ ID NO: 1634846 - RNA, 19 nt, Homo sapiens
  misc_RNA (1)...(19): siRNA sense strand
gcagaaggcucaguagcua

SEQ ID NO: 1634847 - RNA, 19 nt, Homo sapiens
  misc_RNA (1)...(19): siRNA sense strand
gagaagaaauccaucauac

SEQ ID NO: 1634848 - RNA, 19 nt, Homo sapiens
  misc_RNA (1)...(19): siRNA sense strand
gaaauccaucauaccauua

SEQ ID NO: 1634849 - RNA, 19 nt, Homo sapiens
  misc_RNA (1)...(19): siRNA sense strand
uaacuuggauccacuuaca

SEQ ID NO: 1634850 - RNA, 19 nt, Homo sapiens
  misc_RNA (1)...(19): siRNA sense strand
gaagaaauccaucauacca

SEQ ID NO: 1634851 - RNA, 19 nt, Homo sapiens
  misc_RNA (1)...(19): siRNA sense strand
agaaauccaucauaccauu

SEQ ID NO: 1634852 - RNA, 19 nt, Homo sapiens
  misc_RNA (1)...(19): siRNA sense strand
uacagaaacuuaugggauu

SEQ ID NO: 1634853 - RNA, 19 nt, Homo sapiens
  misc_RNA (1)...(19): siRNA sense strand
guggagaauuaauggguua

SEQ ID NO: 1634854 - RNA, 19 nt, Homo sapiens
  misc_RNA (1)...(19): siRNA sense strand
uaaagcagaaggcucagua

SEQ ID NO: 1634855 - RNA, 19 nt, Homo sapiens
  misc_RNA (1)...(19): siRNA sense strand
gaauuucgacgccuugguu

SEQ ID NO: 1634856 - RNA, 19 nt, Homo sapiens
  misc_RNA (1)...(19): siRNA sense strand
aaacuuaugggauuccuuu

SEQ ID NO: 1634857 - RNA, 19 nt, Homo sapiens
  misc_RNA (1)...(19): siRNA sense strand
uggguuauauuauggguaa

SEQ ID NO: 1634858 - RNA, 19 nt, Homo sapiens
  misc_RNA (1)...(19): siRNA sense strand
ugugaggccugaagacauu

SEQ ID NO: 1634859 - RNA, 19 nt, Homo sapiens
  misc_RNA (1)...(19): siRNA sense strand
ugagaagaaauccaucaua

SEQ ID NO: 1634860 - RNA, 19 nt, Homo sapiens
  misc_RNA (1)...(19): siRNA sense strand
ccagggauacugagaagaa

SEQ ID NO: 1634861 - RNA, 19 nt, Homo sapiens
  misc_RNA (1)...(19): siRNA sense strand
cuuaugggauuccuuucua

SEQ ID NO: 1634862 - RNA, 19 nt, Homo sapiens
  misc_RNA (1)...(19): siRNA sense strand
ggccugaagacauugaaua

SEQ ID NO: 1634863 - RNA, 19 nt, Homo sapiens
  misc_RNA (1)...(19): siRNA sense strand
ggagaauuaauggguuaua

SEQ ID NO: 1634864 - RNA, 19 nt, Homo sapiens
  misc_RNA (1)...(19): siRNA sense strand
gccugaagacauugaauaa

SEQ ID NO: 1634865 - RNA, 19 nt, Homo sapiens
  misc_RNA (1)...(19): siRNA sense strand
uauuauggguaaagcagaa

SEQ ID NO: 1634866 - RNA, 19 nt, Homo sapiens
  misc_RNA (1)...(19): siRNA sense strand
ugggauuccuuucuaccua

SEQ ID NO: 1634867 - RNA, 19 nt, Homo sapiens
  misc_RNA (1)...(19): siRNA sense strand
ccacuuacagaaacuuaug

SEQ ID NO: 1634868 - RNA, 19 nt, Homo sapiens
  misc_RNA (1)...(19): siRNA sense strand
cagggauacugagaagaaa

SEQ ID NO: 1634869 - RNA, 19 nt, Homo sapiens
  misc_RNA (1)...(19): siRNA sense strand
ggaguuacuagaggagauu

SEQ ID NO: 1634870 - RNA, 19 nt, Homo sapiens
  misc_RNA (1)...(19): siRNA sense strand
cucaguagcuagggaagaa

SEQ ID NO: 1634871 - RNA, 19 nt, Homo sapiens
  misc_RNA (1)...(19): siRNA sense strand
caucauaccauuaccucau

SEQ ID NO: 1634872 - RNA, 19 nt, Homo sapiens
  misc_RNA (1)...(19): siRNA sense strand
gggauacugagaagaaauc

SEQ ID NO: 1634873 - RNA, 19 nt, Homo sapiens
  misc_RNA (1)...(19): siRNA sense strand
acagaaacuuaugggauuc

SEQ ID NO: 1634874 - RNA, 19 nt, Homo sapiens
  misc_RNA (1)...(19): siRNA sense strand
ggauuccuuucuaccuaca

SEQ ID NO: 1634875 - RNA, 19 nt, Homo sapiens
  misc_RNA (1)...(19): siRNA sense strand
gccuugguuuggcugcuaa

SEQ ID NO: 1634876 - RNA, 19 nt, Homo sapiens
  misc_RNA (1)...(19): siRNA sense strand
gaaacuuaugggauuccuu

SEQ ID NO: 1634877 - RNA, 19 nt, Homo sapiens
  misc_RNA (1)...(19): siRNA sense strand
gcagaaggcucaguagcua

SEQ ID NO: 1634878 - RNA, 19 nt, Homo sapiens
  misc_RNA (1)...(19): siRNA sense strand
gagaagaaauccaucauac

SEQ ID NO: 1634879 - RNA, 19 nt, Homo sapiens
  misc_RNA (1)...(19): siRNA sense strand
gaaauccaucauaccauua

SEQ ID NO: 1634880 - RNA, 19 nt, Homo sapiens
  misc_RNA (1)...(19): siRNA sense strand
uaacuuggauccacuuaca

SEQ ID NO: 1634881 - RNA, 19 nt, Homo sapiens
  misc_RNA (1)...(19): siRNA sense strand
gaagaaauccaucauacca

SEQ ID NO: 1634882 - RNA, 19 nt, Homo sapiens
  misc_RNA (1)...(19): siRNA sense strand
agaaauccaucauaccauu

SEQ ID NO: 1634883 - RNA, 19 nt, Homo sapiens
  misc_RNA (1)...(19): siRNA sense strand
uacagaaacuuaugggauu

SEQ ID NO: 1634884 - RNA, 19 nt, Homo sapiens
  misc_RNA (1)...(19): siRNA sense strand
guggagaauuaauggguua

SEQ ID NO: 1634885 - RNA, 19 nt, Homo sapiens
  misc_RNA (1)...(19): siRNA sense strand
uaaagcagaaggcucagua

SEQ ID NO: 1634886 - RNA, 19 nt, Homo sapiens
  misc_RNA (1)...(19): siRNA sense strand
gaauuucgacgccuugguu

SEQ ID NO: 1634887 - RNA, 19 nt, Homo sapiens
  misc_RNA (1)...(19): siRNA sense strand
aaacuuaugggauuccuuu

SEQ ID NO: 1634888 - RNA, 19 nt, Homo sapiens
  misc_RNA (1)...(19): siRNA sense strand
uggguuauauuauggguaa

SEQ ID NO: 1634889 - RNA, 19 nt, Homo sapiens
  misc_RNA (1)...(19): siRNA sense strand
ugugaggccugaagacauu

SEQ ID NO: 1634890 - RNA, 19 nt, Homo sapiens
  misc_RNA (1)...(19): siRNA sense strand
ugagaagaaauccaucaua

SEQ ID NO: 1634891 - RNA, 19 nt, Homo sapiens
  misc_RNA (1)...(19): siRNA sense strand
ccagggauacugagaagaa

SEQ ID NO: 1634892 - RNA, 19 nt, Homo sapiens
  misc_RNA (1)...(19): siRNA sense strand
cuuaugggauuccuuucua

SEQ ID NO: 1634893 - RNA, 19 nt, Homo sapiens
  misc_RNA (1)...(19): siRNA sense strand
ggccugaagacauugaaua

SEQ ID NO: 1634894 - RNA, 19 nt, Homo sapiens
  misc_RNA (1)...(19): siRNA sense strand
ggagaauuaauggguuaua

SEQ ID NO: 1634895 - RNA, 19 nt, Homo sapiens
  misc_RNA (1)...(19): siRNA sense strand
gccugaagacauugaauaa

SEQ ID NO: 1634896 - RNA, 19 nt, Homo sapiens
  misc_RNA (1)...(19): siRNA sense strand
uauuauggguaaagcagaa

SEQ ID NO: 1634897 - RNA, 19 nt, Homo sapiens
  misc_RNA (1)...(19): siRNA sense strand
ugggauuccuuucuaccua

SEQ ID NO: 1634898 - RNA, 19 nt, Homo sapiens
  misc_RNA (1)...(19): siRNA sense strand
ccacuuacagaaacuuaug

SEQ ID NO: 1634899 - RNA, 19 nt, Homo sapiens
  misc_RNA (1)...(19): siRNA sense strand
cagggauacugagaagaaa

SEQ ID NO: 1634900 - RNA, 19 nt, Homo sapiens
  misc_RNA (1)...(19): siRNA sense strand
ggaguuacuagaggagauu

SEQ ID NO: 1634901 - RNA, 19 nt, Homo sapiens
  misc_RNA (1)...(19): siRNA sense strand
cucaguagcuagggaagaa

SEQ ID NO: 1634902 - RNA, 19 nt, Homo sapiens
  misc_RNA (1)...(19): siRNA sense strand
caucauaccauuaccucau

SEQ ID NO: 1634903 - RNA, 19 nt, Homo sapiens
  misc_RNA (1)...(19): siRNA sense strand
gggauacugagaagaaauc

SEQ ID NO: 1634904 - RNA, 19 nt, Homo sapiens
  misc_RNA (1)...(19): siRNA sense strand
acagaaacuuaugggauuc

SEQ ID NO: 1634905 - RNA, 19 nt, Homo sapiens
  misc_RNA (1)...(19): siRNA sense strand
ggauuccuuucuaccuaca

SEQ ID NO: 1634906 - RNA, 19 nt, Homo sapiens
  misc_RNA (1)...(19): siRNA sense strand
gccuugguuuggcugcuaa

SEQ ID NO: 1634907 - RNA, 19 nt, Homo sapiens
  misc_RNA (1)...(19): siRNA sense strand
gaaacuuaugggauuccuu

SEQ ID NO: 1634908 - RNA, 19 nt, Homo sapiens
  misc_RNA (1)...(19): siRNA sense strand
gcagaaggcucaguagcua

SEQ ID NO: 1634909 - RNA, 19 nt, Homo sapiens
  misc_RNA (1)...(19): siRNA sense strand
uaacuuggauccacuuaca

SEQ ID NO: 1634910 - RNA, 19 nt, Homo sapiens
  misc_RNA (1)...(19): siRNA sense strand
uacagaaacuuaugggauu

SEQ ID NO: 1634911 - RNA, 19 nt, Homo sapiens
  misc_RNA (1)...(19): siRNA sense strand
guggagaauuaauggguua

SEQ ID NO: 1634912 - RNA, 19 nt, Homo sapiens
  misc_RNA (1)...(19): siRNA sense strand
uaaagcagaaggcucagua

SEQ ID NO: 1634913 - RNA, 19 nt, Homo sapiens
  misc_RNA (1)...(19): siRNA sense strand
gaauuucgacgccuugguu

SEQ ID NO: 1634914 - RNA, 19 nt, Homo sapiens
  misc_RNA (1)...(19): siRNA sense strand
aaacuuaugggauuccuuu

SEQ ID NO: 1634915 - RNA, 19 nt, Homo sapiens
  misc_RNA (1)...(19): siRNA sense strand
uggguuauauuauggguaa

SEQ ID NO: 1634916 - RNA, 19 nt, Homo sapiens
  misc_RNA (1)...(19): siRNA sense strand
cuuaugggauuccuuucua

SEQ ID NO: 1634917 - RNA, 19 nt, Homo sapiens
  misc_RNA (1)...(19): siRNA sense strand
ggagaauuaauggguuaua

SEQ ID NO: 1634918 - RNA, 19 nt, Homo sapiens
  misc_RNA (1)...(19): siRNA sense strand
uauuauggguaaagcagaa

SEQ ID NO: 1634919 - RNA, 19 nt, Homo sapiens
  misc_RNA (1)...(19): siRNA sense strand
ugggauuccuuucuaccua

SEQ ID NO: 1634920 - RNA, 19 nt, Homo sapiens
  misc_RNA (1)...(19): siRNA sense strand
ccacuuacagaaacuuaug

SEQ ID NO: 1634921 - RNA, 19 nt, Homo sapiens
  misc_RNA (1)...(19): siRNA sense strand
ggaguuacuagaggagauu

SEQ ID NO: 1634922 - RNA, 19 nt, Homo sapiens
  misc_RNA (1)...(19): siRNA sense strand
cucaguagcuagggaagaa

SEQ ID NO: 1634923 - RNA, 19 nt, Homo sapiens
  misc_RNA (1)...(19): siRNA sense strand
acagaaacuuaugggauuc

SEQ ID NO: 1634924 - RNA, 19 nt, Homo sapiens
  misc_RNA (1)...(19): siRNA sense strand
ggauuccuuucuaccuaca

SEQ ID NO: 1634925 - RNA, 19 nt, Homo sapiens
  misc_RNA (1)...(19): siRNA sense strand
gccuugguuuggcugcuaa

SEQ ID NO: 1634926 - RNA, 19 nt, Homo sapiens
  misc_RNA (1)...(19): siRNA sense strand
gaaacuuaugggauuccuu

SEQ ID NO: 1634927 - RNA, 19 nt, Homo sapiens
  misc_RNA (1)...(19): siRNA sense strand
gcagaaggcucaguagcua

SEQ ID NO: 1634928 - RNA, 19 nt, Homo sapiens
  misc_RNA (1)...(19): siRNA sense strand
gagaagaaauccaucauac

SEQ ID NO: 1634929 - RNA, 19 nt, Homo sapiens
  misc_RNA (1)...(19): siRNA sense strand
gaaauccaucauaccauua

SEQ ID NO: 1634930 - RNA, 19 nt, Homo sapiens
  misc_RNA (1)...(19): siRNA sense strand
uaacuuggauccacuuaca

SEQ ID NO: 1634931 - RNA, 19 nt, Homo sapiens
  misc_RNA (1)...(19): siRNA sense strand
gaagaaauccaucauacca

SEQ ID NO: 1634932 - RNA, 19 nt, Homo sapiens
  misc_RNA (1)...(19): siRNA sense strand
agaaauccaucauaccauu

SEQ ID NO: 1634933 - RNA, 19 nt, Homo sapiens
  misc_RNA (1)...(19): siRNA sense strand
uacagaaacuuaugggauu

SEQ ID NO: 1634934 - RNA, 19 nt, Homo sapiens
  misc_RNA (1)...(19): siRNA sense strand
guggagaauuaauggguua

SEQ ID NO: 1634935 - RNA, 19 nt, Homo sapiens
  misc_RNA (1)...(19): siRNA sense strand
uaaagcagaaggcucagua

SEQ ID NO: 1634936 - RNA, 19 nt, Homo sapiens
  misc_RNA (1)...(19): siRNA sense strand
gaauuucgacgccuugguu

SEQ ID NO: 1634937 - RNA, 19 nt, Homo sapiens
  misc_RNA (1)...(19): siRNA sense strand
aaacuuaugggauuccuuu

SEQ ID NO: 1634938 - RNA, 19 nt, Homo sapiens
  misc_RNA (1)...(19): siRNA sense strand
uggguuauauuauggguaa

SEQ ID NO: 1634939 - RNA, 19 nt, Homo sapiens
  misc_RNA (1)...(19): siRNA sense strand
ugugaggccugaagacauu

SEQ ID NO: 1634940 - RNA, 19 nt, Homo sapiens
  misc_RNA (1)...(19): siRNA sense strand
ugagaagaaauccaucaua

SEQ ID NO: 1634941 - RNA, 19 nt, Homo sapiens
  misc_RNA (1)...(19): siRNA sense strand
ccagggauacugagaagaa

SEQ ID NO: 1634942 - RNA, 19 nt, Homo sapiens
  misc_RNA (1)...(19): siRNA sense strand
cuuaugggauuccuuucua

SEQ ID NO: 1634943 - RNA, 19 nt, Homo sapiens
  misc_RNA (1)...(19): siRNA sense strand
ggccugaagacauugaaua

SEQ ID NO: 1634944 - RNA, 19 nt, Homo sapiens
  misc_RNA (1)...(19): siRNA sense strand
ggagaauuaauggguuaua

SEQ ID NO: 1634945 - RNA, 19 nt, Homo sapiens
  misc_RNA (1)...(19): siRNA sense strand
gccugaagacauugaauaa

SEQ ID NO: 1634946 - RNA, 19 nt, Homo sapiens
  misc_RNA (1)...(19): siRNA sense strand
uauuauggguaaagcagaa

SEQ ID NO: 1634947 - RNA, 19 nt, Homo sapiens
  misc_RNA (1)...(19): siRNA sense strand
ugggauuccuuucuaccua

SEQ ID NO: 1634948 - RNA, 19 nt, Homo sapiens
  misc_RNA (1)...(19): siRNA sense strand
ccacuuacagaaacuuaug

SEQ ID NO: 1634949 - RNA, 19 nt, Homo sapiens
  misc_RNA (1)...(19): siRNA sense strand
cagggauacugagaagaaa

SEQ ID NO: 1634950 - RNA, 19 nt, Homo sapiens
  misc_RNA (1)...(19): siRNA sense strand
ggaguuacuagaggagauu

SEQ ID NO: 1634951 - RNA, 19 nt, Homo sapiens
  misc_RNA (1)...(19): siRNA sense strand
cucaguagcuagggaagaa

SEQ ID NO: 1634952 - RNA, 19 nt, Homo sapiens
  misc_RNA (1)...(19): siRNA sense strand
caucauaccauuaccucau

SEQ ID NO: 1634953 - RNA, 19 nt, Homo sapiens
  misc_RNA (1)...(19): siRNA sense strand
gggauacugagaagaaauc

SEQ ID NO: 1634954 - RNA, 19 nt, Homo sapiens
  misc_RNA (1)...(19): siRNA sense strand
acagaaacuuaugggauuc

SEQ ID NO: 1634955 - RNA, 19 nt, Homo sapiens
  misc_RNA (1)...(19): siRNA sense strand
ggauuccuuucuaccuaca

SEQ ID NO: 1634956 - RNA, 19 nt, Homo sapiens
  misc_RNA (1)...(19): siRNA sense strand
gccuugguuuggcugcuaa

SEQ ID NO: 1634957 - RNA, 19 nt, Homo sapiens
  misc_RNA (1)...(19): siRNA sense strand
gaaacuuaugggauuccuu

SEQ ID NO: 1634958 - RNA, 19 nt, Homo sapiens
  misc_RNA (1)...(19): siRNA sense strand
gcagaaggcucaguagcua

SEQ ID NO: 1634959 - RNA, 19 nt, Homo sapiens
  misc_RNA (1)...(19): siRNA sense strand
gagaagaaauccaucauac

SEQ ID NO: 1634960 - RNA, 19 nt, Homo sapiens
  misc_RNA (1)...(19): siRNA sense strand
gaaauccaucauaccauua

SEQ ID NO: 1634961 - RNA, 19 nt, Homo sapiens
  misc_RNA (1)...(19): siRNA sense strand
uaacuuggauccacuuaca

SEQ ID NO: 1634962 - RNA, 19 nt, Homo sapiens
  misc_RNA (1)...(19): siRNA sense strand
gaagaaauccaucauacca

SEQ ID NO: 1634963 - RNA, 19 nt, Homo sapiens
  misc_RNA (1)...(19): siRNA sense strand
agaaauccaucauaccauu

SEQ ID NO: 1634964 - RNA, 19 nt, Homo sapiens
  misc_RNA (1)...(19): siRNA sense strand
uacagaaacuuaugggauu

SEQ ID NO: 1634965 - RNA, 19 nt, Homo sapiens
  misc_RNA (1)...(19): siRNA sense strand
guggagaauuaauggguua

SEQ ID NO: 1634966 - RNA, 19 nt, Homo sapiens
  misc_RNA (1)...(19): siRNA sense strand
uaaagcagaaggcucagua

SEQ ID NO: 1634967 - RNA, 19 nt, Homo sapiens
  misc_RNA (1)...(19): siRNA sense strand
gaauuucgacgccuugguu

SEQ ID NO: 1634968 - RNA, 19 nt, Homo sapiens
  misc_RNA (1)...(19): siRNA sense strand
aaacuuaugggauuccuuu

SEQ ID NO: 1634969 - RNA, 19 nt, Homo sapiens
  misc_RNA (1)...(19): siRNA sense strand
uggguuauauuauggguaa

SEQ ID NO: 1634970 - RNA, 19 nt, Homo sapiens
  misc_RNA (1)...(19): siRNA sense strand
ugugaggccugaagacauu

SEQ ID NO: 1634971 - RNA, 19 nt, Homo sapiens
  misc_RNA (1)...(19): siRNA sense strand
ugagaagaaauccaucaua

SEQ ID NO: 1634972 - RNA, 19 nt, Homo sapiens
  misc_RNA (1)...(19): siRNA sense strand
ccagggauacugagaagaa

SEQ ID NO: 1634973 - RNA, 19 nt, Homo sapiens
  misc_RNA (1)...(19): siRNA sense strand
cuuaugggauuccuuucua

SEQ ID NO: 1634974 - RNA, 19 nt, Homo sapiens
  misc_RNA (1)...(19): siRNA sense strand
ggccugaagacauugaaua

SEQ ID NO: 1634975 - RNA, 19 nt, Homo sapiens
  misc_RNA (1)...(19): siRNA sense strand
ggagaauuaauggguuaua

SEQ ID NO: 1634976 - RNA, 19 nt, Homo sapiens
  misc_RNA (1)...(19): siRNA sense strand
gccugaagacauugaauaa

SEQ ID NO: 1634977 - RNA, 19 nt, Homo sapiens
  misc_RNA (1)...(19): siRNA sense strand
uauuauggguaaagcagaa

SEQ ID NO: 1634978 - RNA, 19 nt, Homo sapiens
  misc_RNA (1)...(19): siRNA sense strand
ugggauuccuuucuaccua

SEQ ID NO: 1634979 - RNA, 19 nt, Homo sapiens
  misc_RNA (1)...(19): siRNA sense strand
ccacuuacagaaacuuaug

SEQ ID NO: 1634980 - RNA, 19 nt, Homo sapiens
  misc_RNA (1)...(19): siRNA sense strand
cagggauacugagaagaaa

SEQ ID NO: 1634981 - RNA, 19 nt, Homo sapiens
  misc_RNA (1)...(19): siRNA sense strand
ggaguuacuagaggagauu

SEQ ID NO: 1634982 - RNA, 19 nt, Homo sapiens
  misc_RNA (1)...(19): siRNA sense strand
cucaguagcuagggaagaa

SEQ ID NO: 1634983 - RNA, 19 nt, Homo sapiens
  misc_RNA (1)...(19): siRNA sense strand
caucauaccauuaccucau

SEQ ID NO: 1634984 - RNA, 19 nt, Homo sapiens
  misc_RNA (1)...(19): siRNA sense strand
gggauacugagaagaaauc

SEQ ID NO: 1634985 - RNA, 19 nt, Homo sapiens
  misc_RNA (1)...(19): siRNA sense strand
acagaaacuuaugggauuc

SEQ ID NO: 1634986 - RNA, 19 nt, Homo sapiens
  misc_RNA (1)...(19): siRNA sense strand
ggauuccuuucuaccuaca

SEQ ID NO: 1634987 - RNA, 19 nt, Homo sapiens
  misc_RNA (1)...(19): siRNA sense strand
gccuugguuuggcugcuaa

SEQ ID NO: 1634988 - RNA, 19 nt, Homo sapiens
  misc_RNA (1)...(19): siRNA sense strand
gaaacuuaugggauuccuu

SEQ ID NO: 1634989 - RNA, 19 nt, Homo sapiens
  misc_RNA (1)...(19): siRNA sense strand
gcagaaggcucaguagcua

SEQ ID NO: 1634990 - RNA, 19 nt, Homo sapiens
  misc_RNA (1)...(19): siRNA sense strand
uaacuuggauccacuuaca

SEQ ID NO: 1634991 - RNA, 19 nt, Homo sapiens
  misc_RNA (1)...(19): siRNA sense strand
uacagaaacuuaugggauu

SEQ ID NO: 1634992 - RNA, 19 nt, Homo sapiens
  misc_RNA (1)...(19): siRNA sense strand
guggagaauuaauggguua

SEQ ID NO: 1634993 - RNA, 19 nt, Homo sapiens
  misc_RNA (1)...(19): siRNA sense strand
uaaagcagaaggcucagua

SEQ ID NO: 1634994 - RNA, 19 nt, Homo sapiens
  misc_RNA (1)...(19): siRNA sense strand
gaauuucgacgccuugguu

SEQ ID NO: 1634995 - RNA, 19 nt, Homo sapiens
  misc_RNA (1)...(19): siRNA sense strand
aaacuuaugggauuccuuu

SEQ ID NO: 1634996 - RNA, 19 nt, Homo sapiens
  misc_RNA (1)...(19): siRNA sense strand
uggguuauauuauggguaa

SEQ ID NO: 1634997 - RNA, 19 nt, Homo sapiens
  misc_RNA (1)...(19): siRNA sense strand
cuuaugggauuccuuucua

SEQ ID NO: 1634998 - RNA, 19 nt, Homo sapiens
  misc_RNA (1)...(19): siRNA sense strand
ggagaauuaauggguuaua

SEQ ID NO: 1634999 - RNA, 19 nt, Homo sapiens
  misc_RNA (1)...(19): siRNA sense strand
uauuauggguaaagcagaa

SEQ ID NO: 1635000 - RNA, 19 nt, Homo sapiens
  misc_RNA (1)...(19): siRNA sense strand
ugggauuccuuucuaccua

SEQ ID NO: 1635001 - RNA, 19 nt, Homo sapiens
  misc_RNA (1)...(19): siRNA sense strand
ccacuuacagaaacuuaug

SEQ ID NO: 1635002 - RNA, 19 nt, Homo sapiens
  misc_RNA (1)...(19): siRNA sense strand
ggaguuacuagaggagauu

SEQ ID NO: 1635003 - RNA, 19 nt, Homo sapiens
  misc_RNA (1)...(19): siRNA sense strand
cucaguagcuagggaagaa

SEQ ID NO: 1635004 - RNA, 19 nt, Homo sapiens
  misc_RNA (1)...(19): siRNA sense strand
acagaaacuuaugggauuc

SEQ ID NO: 1635005 - RNA, 19 nt, Homo sapiens
  misc_RNA (1)...(19): siRNA sense strand
ggauuccuuucuaccuaca

SEQ ID NO: 1635006 - RNA, 19 nt, Homo sapiens
  misc_RNA (1)...(19): siRNA sense strand
gccuugguuuggcugcuaa

SEQ ID NO: 1635007 - RNA, 19 nt, Homo sapiens
  misc_RNA (1)...(19): siRNA sense strand
gaaacuuaugggauuccuu

SEQ ID NO: 1635008 - RNA, 19 nt, Homo sapiens
  misc_RNA (1)...(19): siRNA sense strand
ggaaagaacaucaagauua

SEQ ID NO: 1635009 - RNA, 19 nt, Homo sapiens
  misc_RNA (1)...(19): siRNA sense strand
gcagaaaggugccgacuuc

SEQ ID NO: 1635010 - RNA, 19 nt, Homo sapiens
  misc_RNA (1)...(19): siRNA sense strand
gaagggagauguggucauu

SEQ ID NO: 1635011 - RNA, 19 nt, Homo sapiens
  misc_RNA (1)...(19): siRNA sense strand
gaagggagccacucucaaa

SEQ ID NO: 1635012 - RNA, 19 nt, Homo sapiens
  misc_RNA (1)...(19): siRNA sense strand
gaacuucucucauggaacu

SEQ ID NO: 1635013 - RNA, 19 nt, Homo sapiens
  misc_RNA (1)...(19): siRNA sense strand
ugaaggagaugauuaaguc

SEQ ID NO: 1635014 - RNA, 19 nt, Homo sapiens
  misc_RNA (1)...(19): siRNA sense strand
gauuaagucuggaaugaau

SEQ ID NO: 1635015 - RNA, 19 nt, Homo sapiens
  misc_RNA (1)...(19): siRNA sense strand
ggcaucaucuguaccauug

SEQ ID NO: 1635016 - RNA, 19 nt, Homo sapiens
  misc_RNA (1)...(19): siRNA sense strand
gaauguggcucgucugaac

SEQ ID NO: 1635017 - RNA, 19 nt, Homo sapiens
  misc_RNA (1)...(19): siRNA sense strand
cgucugaacuucucucaug

SEQ ID NO: 1635018 - RNA, 19 nt, Homo sapiens
  misc_RNA (1)...(19): siRNA sense strand
guucggagguuugaugaaa

SEQ ID NO: 1635019 - RNA, 19 nt, Homo sapiens
  misc_RNA (1)...(19): siRNA sense strand
gcagugauguggccaaugc

SEQ ID NO: 1635020 - RNA, 19 nt, Homo sapiens
  misc_RNA (1)...(19): siRNA sense strand
gcucagaagaugaugauug

SEQ ID NO: 1635021 - RNA, 19 nt, Homo sapiens
  misc_RNA (1)...(19): siRNA sense strand
gggacugccuucauucaga

SEQ ID NO: 1635022 - RNA, 19 nt, Homo sapiens
  misc_RNA (1)...(19): siRNA sense strand
ggaagguccugggagagaa

SEQ ID NO: 1635023 - RNA, 19 nt, Homo sapiens
  misc_RNA (1)...(19): siRNA sense strand
gaacuuugccaugaauguu

SEQ ID NO: 1635024 - RNA, 19 nt, Homo sapiens
  misc_RNA (1)...(19): siRNA sense strand
gaagugggcagcaagaucu

SEQ ID NO: 1635025 - RNA, 19 nt, Homo sapiens
  misc_RNA (1)...(19): siRNA sense strand
gcacagccacggaaagcuu

SEQ ID NO: 1635026 - RNA, 19 nt, Homo sapiens
  misc_RNA (1)...(19): siRNA sense strand
cgagcaggauguugauaug

SEQ ID NO: 1635027 - RNA, 19 nt, Homo sapiens
  misc_RNA (1)...(19): siRNA sense strand
ggagagaagggaaagaaca

SEQ ID NO: 1635028 - RNA, 19 nt, Homo sapiens
  misc_RNA (1)...(19): siRNA sense strand
gauccgaacugggcucauc

SEQ ID NO: 1635029 - RNA, 19 nt, Homo sapiens
  misc_RNA (1)...(19): siRNA sense strand
caucaagauuaucagcaaa

SEQ ID NO: 1635030 - RNA, 19 nt, Homo sapiens
  misc_RNA (1)...(19): siRNA sense strand
ggauguugauaugguguuu

SEQ ID NO: 1635031 - RNA, 19 nt, Homo sapiens
  misc_RNA (1)...(19): siRNA sense strand
gggaaagaacaucaagauu

SEQ ID NO: 1635032 - RNA, 19 nt, Homo sapiens
  misc_RNA (1)...(19): siRNA sense strand
gcggagaccaucaagaaug

SEQ ID NO: 1635033 - RNA, 19 nt, Homo sapiens
  misc_RNA (1)...(19): siRNA sense strand
ggugaacuuugccaugaau

SEQ ID NO: 1635034 - RNA, 19 nt, Homo sapiens
  misc_RNA (1)...(19): siRNA sense strand
cugcagagguggagcugaa

SEQ ID NO: 1635035 - RNA, 19 nt, Homo sapiens
  misc_RNA (1)...(19): siRNA sense strand
cgggugaacuuugccauga

SEQ ID NO: 1635036 - RNA, 19 nt, Homo sapiens
  misc_RNA (1)...(19): siRNA sense strand
gagaagggaaagaacauca

SEQ ID NO: 1635037 - RNA, 19 nt, Homo sapiens
  misc_RNA (1)...(19): siRNA sense strand
gaacacuggcaucaucugu

SEQ ID NO: 1635038 - RNA, 19 nt, Homo sapiens
  misc_RNA (1)...(19): siRNA sense strand
cggagaccaucaagaaugu

SEQ ID NO: 1635039 - RNA, 19 nt, Homo sapiens
  misc_RNA (1)...(19): siRNA sense strand
uggagagcaugaucaagaa

SEQ ID NO: 1635040 - RNA, 19 nt, Homo sapiens
  misc_RNA (1)...(19): siRNA sense strand
gaucaguggagacguugaa

SEQ ID NO: 1635041 - RNA, 19 nt, Homo sapiens
  misc_RNA (1)...(19): siRNA sense strand
ugagauuccugcagagaag

SEQ ID NO: 1635042 - RNA, 19 nt, Homo sapiens
  misc_RNA (1)...(19): siRNA sense strand
guggugaucuaggcauuga

SEQ ID NO: 1635043 - RNA, 19 nt, Homo sapiens
  misc_RNA (1)...(19): siRNA sense strand
ggaagugggcagcaagauc

SEQ ID NO: 1635044 - RNA, 19 nt, Homo sapiens
  misc_RNA (1)...(19): siRNA sense strand
gaagggaaagaacaucaag

SEQ ID NO: 1635045 - RNA, 19 nt, Homo sapiens
  misc_RNA (1)...(19): siRNA sense strand
caugcugucuggagaaaca

SEQ ID NO: 1635046 - RNA, 19 nt, Homo sapiens
  misc_RNA (1)...(19): siRNA sense strand
acaucaagauuaucagcaa

SEQ ID NO: 1635047 - RNA, 19 nt, Homo sapiens
  misc_RNA (1)...(19): siRNA sense strand
ugggaagccugucaucugu

SEQ ID NO: 1635048 - RNA, 19 nt, Homo sapiens
  misc_RNA (1)...(19): siRNA sense strand
ccggaacacuggcaucauc

SEQ ID NO: 1635049 - RNA, 19 nt, Homo sapiens
  misc_RNA (1)...(19): siRNA sense strand
gggugaacuuugccaugaa

SEQ ID NO: 1635050 - RNA, 19 nt, Homo sapiens
  misc_RNA (1)...(19): siRNA sense strand
gagagaagggaaagaacau

SEQ ID NO: 1635051 - RNA, 19 nt, Homo sapiens
  misc_RNA (1)...(19): siRNA sense strand
caugguggcucguggugau

SEQ ID NO: 1635052 - RNA, 19 nt, Homo sapiens
  misc_RNA (1)...(19): siRNA sense strand
gcaagaagggugugaaccu

SEQ ID NO: 1635053 - RNA, 19 nt, Homo sapiens
  misc_RNA (1)...(19): siRNA sense strand
augauuaagucuggaauga

SEQ ID NO: 1635054 - RNA, 19 nt, Homo sapiens
  misc_RNA (1)...(19): siRNA sense strand
acacauuccuggagcacau

SEQ ID NO: 1635055 - RNA, 19 nt, Homo sapiens
  misc_RNA (1)...(19): siRNA sense strand
gaugaugggcuuauuucuc

SEQ ID NO: 1635056 - RNA, 19 nt, Homo sapiens
  misc_RNA (1)...(19): siRNA sense strand
acacuggcaucaucuguac

SEQ ID NO: 1635057 - RNA, 19 nt, Homo sapiens
  misc_RNA (1)...(19): siRNA sense strand
ggaaaagugugacgagaac

SEQ ID NO: 1635058 - RNA, 19 nt, Homo sapiens
  misc_RNA (1)...(19): siRNA sense strand
uccaggaucugaaguuugg

SEQ ID NO: 1635059 - RNA, 19 nt, Homo sapiens
  misc_RNA (1)...(19): siRNA sense strand
ugacggagguggaaaaugg

SEQ ID NO: 1635060 - RNA, 19 nt, Homo sapiens
  misc_RNA (1)...(19): siRNA sense strand
acaagaacaucugcaaggu

SEQ ID NO: 1635061 - RNA, 19 nt, Homo sapiens
  misc_RNA (1)...(19): siRNA sense strand
uuauuucucuccaggugaa

SEQ ID NO: 1635062 - RNA, 19 nt, Homo sapiens
  misc_RNA (1)...(19): siRNA sense strand
agggagauguggucauugu

SEQ ID NO: 1635063 - RNA, 19 nt, Homo sapiens
  misc_RNA (1)...(19): siRNA sense strand
uggcccagcuucccgauca

SEQ ID NO: 1635064 - RNA, 19 nt, Homo sapiens
  misc_RNA (1)...(19): siRNA sense strand
gagaugauuaagucuggaa

SEQ ID NO: 1635065 - RNA, 19 nt, Homo sapiens
  misc_RNA (1)...(19): siRNA sense strand
gcaagaucuacguggauga

SEQ ID NO: 1635066 - RNA, 19 nt, Homo sapiens
  misc_RNA (1)...(19): siRNA sense strand
cuggagagcaugaucaaga

SEQ ID NO: 1635067 - RNA, 19 nt, Homo sapiens
  misc_RNA (1)...(19): siRNA sense strand
cguugaaggagaugauuaa

SEQ ID NO: 1635068 - RNA, 19 nt, Homo sapiens
  misc_RNA (1)...(19): siRNA sense strand
gcagagguggagcugaaga

SEQ ID NO: 1635069 - RNA, 19 nt, Homo sapiens
  misc_RNA (1)...(19): siRNA sense strand
cucagaagaugaugauugg

SEQ ID NO: 1635070 - RNA, 19 nt, Homo sapiens
  misc_RNA (1)...(19): siRNA sense strand
ucugauguccaugaaguua

SEQ ID NO: 1635071 - RNA, 19 nt, Homo sapiens
  misc_RNA (1)...(19): siRNA sense strand
cugaacuucucucauggaa

SEQ ID NO: 1635072 - RNA, 19 nt, Homo sapiens
  misc_RNA (1)...(19): siRNA sense strand
gaugauuaagucuggaaug

SEQ ID NO: 1635073 - RNA, 19 nt, Homo sapiens
  misc_RNA (1)...(19): siRNA sense strand
augaugggcuuauuucucu

SEQ ID NO: 1635074 - RNA, 19 nt, Homo sapiens
  misc_RNA (1)...(19): siRNA sense strand
guggaugaugggcuuauuu

SEQ ID NO: 1635075 - RNA, 19 nt, Homo sapiens
  misc_RNA (1)...(19): siRNA sense strand
ggugaucuaggcauugaga

SEQ ID NO: 1635076 - RNA, 19 nt, Homo sapiens
  misc_RNA (1)...(19): siRNA sense strand
ggaccuccgggugaacuuu

SEQ ID NO: 1635077 - RNA, 19 nt, Homo sapiens
  misc_RNA (1)...(19): siRNA sense strand
agccgggacugccuucauu

SEQ ID NO: 1635078 - RNA, 19 nt, Homo sapiens
  misc_RNA (1)...(19): siRNA sense strand
caguggagacguugaagga

SEQ ID NO: 1635079 - RNA, 19 nt, Homo sapiens
  misc_RNA (1)...(19): siRNA sense strand
gauaugguguuugcgucau

SEQ ID NO: 1635080 - RNA, 19 nt, Homo sapiens
  misc_RNA (1)...(19): siRNA sense strand
gcccguugcuguggcucua

SEQ ID NO: 1635081 - RNA, 19 nt, Homo sapiens
  misc_RNA (1)...(19): siRNA sense strand
gacacuaaaggaccugaga

SEQ ID NO: 1635082 - RNA, 19 nt, Homo sapiens
  misc_RNA (1)...(19): siRNA sense strand
cuguggcucuagacacuaa

SEQ ID NO: 1635083 - RNA, 19 nt, Homo sapiens
  misc_RNA (1)...(19): siRNA sense strand
ccuguaccguggcaucuuc

SEQ ID NO: 1635084 - RNA, 19 nt, Homo sapiens
  misc_RNA (1)...(19): siRNA sense strand
ucggagguuugaugaaauc

SEQ ID NO: 1635085 - RNA, 19 nt, Homo sapiens
  misc_RNA (1)...(19): siRNA sense strand
uggcuggacuacaagaaca

SEQ ID NO: 1635086 - RNA, 19 nt, Homo sapiens
  misc_RNA (1)...(19): siRNA sense strand
caagaucuacguggaugau

SEQ ID NO: 1635087 - RNA, 19 nt, Homo sapiens
  misc_RNA (1)...(19): siRNA sense strand
gcaaaaucgagaaucauga

SEQ ID NO: 1635088 - RNA, 19 nt, Homo sapiens
  misc_RNA (1)...(19): siRNA sense strand
gggucgagcaggauguuga

SEQ ID NO: 1635089 - RNA, 19 nt, Homo sapiens
  misc_RNA (1)...(19): siRNA sense strand
ucagcaaaaucgagaauca

SEQ ID NO: 1635090 - RNA, 19 nt, Homo sapiens
  misc_RNA (1)...(19): siRNA sense strand
cccgaucaguggagacguu

SEQ ID NO: 1635091 - RNA, 19 nt, Homo sapiens
  misc_RNA (1)...(19): siRNA sense strand
augcggagaccaucaagaa

SEQ ID NO: 1635092 - RNA, 19 nt, Homo sapiens
  misc_RNA (1)...(19): siRNA sense strand
uggagacguugaaggagau

SEQ ID NO: 1635093 - RNA, 19 nt, Homo sapiens
  misc_RNA (1)...(19): siRNA sense strand
gcagcaagaagggugugaa

SEQ ID NO: 1635094 - RNA, 19 nt, Homo sapiens
  misc_RNA (1)...(19): siRNA sense strand
ggaccugagauccgaacug

SEQ ID NO: 1635095 - RNA, 19 nt, Homo sapiens
  misc_RNA (1)...(19): siRNA sense strand
gguggcucguggugaucua

SEQ ID NO: 1635096 - RNA, 19 nt, Homo sapiens
  misc_RNA (1)...(19): siRNA sense strand
uccuguggcuggacuacaa

SEQ ID NO: 1635097 - RNA, 19 nt, Homo sapiens
  misc_RNA (1)...(19): siRNA sense strand
gggagccacucucaaaauc

SEQ ID NO: 1635098 - RNA, 19 nt, Homo sapiens
  misc_RNA (1)...(19): siRNA sense strand
ggaaagaacaucaagauua

SEQ ID NO: 1635099 - RNA, 19 nt, Homo sapiens
  misc_RNA (1)...(19): siRNA sense strand
gcagaaaggugccgacuuc

SEQ ID NO: 1635100 - RNA, 19 nt, Homo sapiens
  misc_RNA (1)...(19): siRNA sense strand
gaagggagauguggucauu

SEQ ID NO: 1635101 - RNA, 19 nt, Homo sapiens
  misc_RNA (1)...(19): siRNA sense strand
gaagggagccacucucaaa

SEQ ID NO: 1635102 - RNA, 19 nt, Homo sapiens
  misc_RNA (1)...(19): siRNA sense strand
gaacuucucucauggaacu

SEQ ID NO: 1635103 - RNA, 19 nt, Homo sapiens
  misc_RNA (1)...(19): siRNA sense strand
ugaaggagaugauuaaguc

SEQ ID NO: 1635104 - RNA, 19 nt, Homo sapiens
  misc_RNA (1)...(19): siRNA sense strand
gauuaagucuggaaugaau

SEQ ID NO: 1635105 - RNA, 19 nt, Homo sapiens
  misc_RNA (1)...(19): siRNA sense strand
ggcaucaucuguaccauug

SEQ ID NO: 1635106 - RNA, 19 nt, Homo sapiens
  misc_RNA (1)...(19): siRNA sense strand
gaauguggcucgucugaac

SEQ ID NO: 1635107 - RNA, 19 nt, Homo sapiens
  misc_RNA (1)...(19): siRNA sense strand
cgucugaacuucucucaug

SEQ ID NO: 1635108 - RNA, 19 nt, Homo sapiens
  misc_RNA (1)...(19): siRNA sense strand
guucggagguuugaugaaa

SEQ ID NO: 1635109 - RNA, 19 nt, Homo sapiens
  misc_RNA (1)...(19): siRNA sense strand
gcagugauguggccaaugc

SEQ ID NO: 1635110 - RNA, 19 nt, Homo sapiens
  misc_RNA (1)...(19): siRNA sense strand
gcucagaagaugaugauug

SEQ ID NO: 1635111 - RNA, 19 nt, Homo sapiens
  misc_RNA (1)...(19): siRNA sense strand
gggacugccuucauucaga

SEQ ID NO: 1635112 - RNA, 19 nt, Homo sapiens
  misc_RNA (1)...(19): siRNA sense strand
ggaagguccugggagagaa

SEQ ID NO: 1635113 - RNA, 19 nt, Homo sapiens
  misc_RNA (1)...(19): siRNA sense strand
gaacuuugccaugaauguu

SEQ ID NO: 1635114 - RNA, 19 nt, Homo sapiens
  misc_RNA (1)...(19): siRNA sense strand
gaagugggcagcaagaucu

SEQ ID NO: 1635115 - RNA, 19 nt, Homo sapiens
  misc_RNA (1)...(19): siRNA sense strand
gcacagccacggaaagcuu

SEQ ID NO: 1635116 - RNA, 19 nt, Homo sapiens
  misc_RNA (1)...(19): siRNA sense strand
cgagcaggauguugauaug

SEQ ID NO: 1635117 - RNA, 19 nt, Homo sapiens
  misc_RNA (1)...(19): siRNA sense strand
ggagagaagggaaagaaca

SEQ ID NO: 1635118 - RNA, 19 nt, Homo sapiens
  misc_RNA (1)...(19): siRNA sense strand
gauccgaacugggcucauc

SEQ ID NO: 1635119 - RNA, 19 nt, Homo sapiens
  misc_RNA (1)...(19): siRNA sense strand
caucaagauuaucagcaaa

SEQ ID NO: 1635120 - RNA, 19 nt, Homo sapiens
  misc_RNA (1)...(19): siRNA sense strand
ggauguugauaugguguuu

SEQ ID NO: 1635121 - RNA, 19 nt, Homo sapiens
  misc_RNA (1)...(19): siRNA sense strand
gggaaagaacaucaagauu

SEQ ID NO: 1635122 - RNA, 19 nt, Homo sapiens
  misc_RNA (1)...(19): siRNA sense strand
gcggagaccaucaagaaug

SEQ ID NO: 1635123 - RNA, 19 nt, Homo sapiens
  misc_RNA (1)...(19): siRNA sense strand
ggugaacuuugccaugaau

SEQ ID NO: 1635124 - RNA, 19 nt, Homo sapiens
  misc_RNA (1)...(19): siRNA sense strand
cugcagagguggagcugaa

SEQ ID NO: 1635125 - RNA, 19 nt, Homo sapiens
  misc_RNA (1)...(19): siRNA sense strand
cgggugaacuuugccauga

SEQ ID NO: 1635126 - RNA, 19 nt, Homo sapiens
  misc_RNA (1)...(19): siRNA sense strand
gagaagggaaagaacauca

SEQ ID NO: 1635127 - RNA, 19 nt, Homo sapiens
  misc_RNA (1)...(19): siRNA sense strand
gaacacuggcaucaucugu

SEQ ID NO: 1635128 - RNA, 19 nt, Homo sapiens
  misc_RNA (1)...(19): siRNA sense strand
cggagaccaucaagaaugu

SEQ ID NO: 1635129 - RNA, 19 nt, Homo sapiens
  misc_RNA (1)...(19): siRNA sense strand
uggagagcaugaucaagaa

SEQ ID NO: 1635130 - RNA, 19 nt, Homo sapiens
  misc_RNA (1)...(19): siRNA sense strand
gaucaguggagacguugaa

SEQ ID NO: 1635131 - RNA, 19 nt, Homo sapiens
  misc_RNA (1)...(19): siRNA sense strand
ugagauuccugcagagaag

SEQ ID NO: 1635132 - RNA, 19 nt, Homo sapiens
  misc_RNA (1)...(19): siRNA sense strand
guggugaucuaggcauuga

SEQ ID NO: 1635133 - RNA, 19 nt, Homo sapiens
  misc_RNA (1)...(19): siRNA sense strand
ggaagugggcagcaagauc

SEQ ID NO: 1635134 - RNA, 19 nt, Homo sapiens
  misc_RNA (1)...(19): siRNA sense strand
gaagggaaagaacaucaag

SEQ ID NO: 1635135 - RNA, 19 nt, Homo sapiens
  misc_RNA (1)...(19): siRNA sense strand
caugcugucuggagaaaca

SEQ ID NO: 1635136 - RNA, 19 nt, Homo sapiens
  misc_RNA (1)...(19): siRNA sense strand
acaucaagauuaucagcaa

SEQ ID NO: 1635137 - RNA, 19 nt, Homo sapiens
  misc_RNA (1)...(19): siRNA sense strand
ugggaagccugucaucugu

SEQ ID NO: 1635138 - RNA, 19 nt, Homo sapiens
  misc_RNA (1)...(19): siRNA sense strand
ccggaacacuggcaucauc

SEQ ID NO: 1635139 - RNA, 19 nt, Homo sapiens
  misc_RNA (1)...(19): siRNA sense strand
gggugaacuuugccaugaa

SEQ ID NO: 1635140 - RNA, 19 nt, Homo sapiens
  misc_RNA (1)...(19): siRNA sense strand
gagagaagggaaagaacau

SEQ ID NO: 1635141 - RNA, 19 nt, Homo sapiens
  misc_RNA (1)...(19): siRNA sense strand
caugguggcucguggugau

SEQ ID NO: 1635142 - RNA, 19 nt, Homo sapiens
  misc_RNA (1)...(19): siRNA sense strand
gcaagaagggugugaaccu

SEQ ID NO: 1635143 - RNA, 19 nt, Homo sapiens
  misc_RNA (1)...(19): siRNA sense strand
augauuaagucuggaauga

SEQ ID NO: 1635144 - RNA, 19 nt, Homo sapiens
  misc_RNA (1)...(19): siRNA sense strand
acacauuccuggagcacau

SEQ ID NO: 1635145 - RNA, 19 nt, Homo sapiens
  misc_RNA (1)...(19): siRNA sense strand
gaugaugggcuuauuucuc

SEQ ID NO: 1635146 - RNA, 19 nt, Homo sapiens
  misc_RNA (1)...(19): siRNA sense strand
acacuggcaucaucuguac

SEQ ID NO: 1635147 - RNA, 19 nt, Homo sapiens
  misc_RNA (1)...(19): siRNA sense strand
ggaaaagugugacgagaac

SEQ ID NO: 1635148 - RNA, 19 nt, Homo sapiens
  misc_RNA (1)...(19): siRNA sense strand
uccaggaucugaaguuugg

SEQ ID NO: 1635149 - RNA, 19 nt, Homo sapiens
  misc_RNA (1)...(19): siRNA sense strand
ugacggagguggaaaaugg

SEQ ID NO: 1635150 - RNA, 19 nt, Homo sapiens
  misc_RNA (1)...(19): siRNA sense strand
acaagaacaucugcaaggu

SEQ ID NO: 1635151 - RNA, 19 nt, Homo sapiens
  misc_RNA (1)...(19): siRNA sense strand
uuauuucucuccaggugaa

SEQ ID NO: 1635152 - RNA, 19 nt, Homo sapiens
  misc_RNA (1)...(19): siRNA sense strand
agggagauguggucauugu

SEQ ID NO: 1635153 - RNA, 19 nt, Homo sapiens
  misc_RNA (1)...(19): siRNA sense strand
uggcccagcuucccgauca

SEQ ID NO: 1635154 - RNA, 19 nt, Homo sapiens
  misc_RNA (1)...(19): siRNA sense strand
gagaugauuaagucuggaa

SEQ ID NO: 1635155 - RNA, 19 nt, Homo sapiens
  misc_RNA (1)...(19): siRNA sense strand
gcaagaucuacguggauga

SEQ ID NO: 1635156 - RNA, 19 nt, Homo sapiens
  misc_RNA (1)...(19): siRNA sense strand
cuggagagcaugaucaaga

SEQ ID NO: 1635157 - RNA, 19 nt, Homo sapiens
  misc_RNA (1)...(19): siRNA sense strand
cguugaaggagaugauuaa

SEQ ID NO: 1635158 - RNA, 19 nt, Homo sapiens
  misc_RNA (1)...(19): siRNA sense strand
gcagagguggagcugaaga

SEQ ID NO: 1635159 - RNA, 19 nt, Homo sapiens
  misc_RNA (1)...(19): siRNA sense strand
cucagaagaugaugauugg

SEQ ID NO: 1635160 - RNA, 19 nt, Homo sapiens
  misc_RNA (1)...(19): siRNA sense strand
ucugauguccaugaaguua

SEQ ID NO: 1635161 - RNA, 19 nt, Homo sapiens
  misc_RNA (1)...(19): siRNA sense strand
cugaacuucucucauggaa

SEQ ID NO: 1635162 - RNA, 19 nt, Homo sapiens
  misc_RNA (1)...(19): siRNA sense strand
gaugauuaagucuggaaug

SEQ ID NO: 1635163 - RNA, 19 nt, Homo sapiens
  misc_RNA (1)...(19): siRNA sense strand
augaugggcuuauuucucu

SEQ ID NO: 1635164 - RNA, 19 nt, Homo sapiens
  misc_RNA (1)...(19): siRNA sense strand
guggaugaugggcuuauuu

SEQ ID NO: 1635165 - RNA, 19 nt, Homo sapiens
  misc_RNA (1)...(19): siRNA sense strand
ggugaucuaggcauugaga

SEQ ID NO: 1635166 - RNA, 19 nt, Homo sapiens
  misc_RNA (1)...(19): siRNA sense strand
ggaccuccgggugaacuuu

SEQ ID NO: 1635167 - RNA, 19 nt, Homo sapiens
  misc_RNA (1)...(19): siRNA sense strand
agccgggacugccuucauu

SEQ ID NO: 1635168 - RNA, 19 nt, Homo sapiens
  misc_RNA (1)...(19): siRNA sense strand
caguggagacguugaagga

SEQ ID NO: 1635169 - RNA, 19 nt, Homo sapiens
  misc_RNA (1)...(19): siRNA sense strand
gauaugguguuugcgucau

SEQ ID NO: 1635170 - RNA, 19 nt, Homo sapiens
  misc_RNA (1)...(19): siRNA sense strand
gcccguugcuguggcucua

SEQ ID NO: 1635171 - RNA, 19 nt, Homo sapiens
  misc_RNA (1)...(19): siRNA sense strand
gacacuaaaggaccugaga

SEQ ID NO: 1635172 - RNA, 19 nt, Homo sapiens
  misc_RNA (1)...(19): siRNA sense strand
cuguggcucuagacacuaa

SEQ ID NO: 1635173 - RNA, 19 nt, Homo sapiens
  misc_RNA (1)...(19): siRNA sense strand
ccuguaccguggcaucuuc

SEQ ID NO: 1635174 - RNA, 19 nt, Homo sapiens
  misc_RNA (1)...(19): siRNA sense strand
ucggagguuugaugaaauc

SEQ ID NO: 1635175 - RNA, 19 nt, Homo sapiens
  misc_RNA (1)...(19): siRNA sense strand
uggcuggacuacaagaaca

SEQ ID NO: 1635176 - RNA, 19 nt, Homo sapiens
  misc_RNA (1)...(19): siRNA sense strand
caagaucuacguggaugau

SEQ ID NO: 1635177 - RNA, 19 nt, Homo sapiens
  misc_RNA (1)...(19): siRNA sense strand
gcaaaaucgagaaucauga

SEQ ID NO: 1635178 - RNA, 19 nt, Homo sapiens
  misc_RNA (1)...(19): siRNA sense strand
gggucgagcaggauguuga

SEQ ID NO: 1635179 - RNA, 19 nt, Homo sapiens
  misc_RNA (1)...(19): siRNA sense strand
ucagcaaaaucgagaauca

SEQ ID NO: 1635180 - RNA, 19 nt, Homo sapiens
  misc_RNA (1)...(19): siRNA sense strand
cccgaucaguggagacguu

SEQ ID NO: 1635181 - RNA, 19 nt, Homo sapiens
  misc_RNA (1)...(19): siRNA sense strand
augcggagaccaucaagaa

SEQ ID NO: 1635182 - RNA, 19 nt, Homo sapiens
  misc_RNA (1)...(19): siRNA sense strand
uggagacguugaaggagau

SEQ ID NO: 1635183 - RNA, 19 nt, Homo sapiens
  misc_RNA (1)...(19): siRNA sense strand
gcagcaagaagggugugaa

SEQ ID NO: 1635184 - RNA, 19 nt, Homo sapiens
  misc_RNA (1)...(19): siRNA sense strand
ggaccugagauccgaacug

SEQ ID NO: 1635185 - RNA, 19 nt, Homo sapiens
  misc_RNA (1)...(19): siRNA sense strand
gguggcucguggugaucua

SEQ ID NO: 1635186 - RNA, 19 nt, Homo sapiens
  misc_RNA (1)...(19): siRNA sense strand
uccuguggcuggacuacaa

SEQ ID NO: 1635187 - RNA, 19 nt, Homo sapiens
  misc_RNA (1)...(19): siRNA sense strand
gggagccacucucaaaauc

SEQ ID NO: 1635188 - RNA, 19 nt, Homo sapiens
  misc_RNA (1)...(19): siRNA sense strand
ggaaagaacaucaagauua

SEQ ID NO: 1635189 - RNA, 19 nt, Homo sapiens
  misc_RNA (1)...(19): siRNA sense strand
gcagaaaggugccgacuuc

SEQ ID NO: 1635190 - RNA, 19 nt, Homo sapiens
  misc_RNA (1)...(19): siRNA sense strand
gaagggagauguggucauu

SEQ ID NO: 1635191 - RNA, 19 nt, Homo sapiens
  misc_RNA (1)...(19): siRNA sense strand
gaagggagccacucucaaa

SEQ ID NO: 1635192 - RNA, 19 nt, Homo sapiens
  misc_RNA (1)...(19): siRNA sense strand
gaacuucucucauggaacu

SEQ ID NO: 1635193 - RNA, 19 nt, Homo sapiens
  misc_RNA (1)...(19): siRNA sense strand
ugaaggagaugauuaaguc

SEQ ID NO: 1635194 - RNA, 19 nt, Homo sapiens
  misc_RNA (1)...(19): siRNA sense strand
gauuaagucuggaaugaau

SEQ ID NO: 1635195 - RNA, 19 nt, Homo sapiens
  misc_RNA (1)...(19): siRNA sense strand
ggcaucaucuguaccauug

SEQ ID NO: 1635196 - RNA, 19 nt, Homo sapiens
  misc_RNA (1)...(19): siRNA sense strand
gaauguggcucgucugaac

SEQ ID NO: 1635197 - RNA, 19 nt, Homo sapiens
  misc_RNA (1)...(19): siRNA sense strand
cgucugaacuucucucaug

SEQ ID NO: 1635198 - RNA, 19 nt, Homo sapiens
  misc_RNA (1)...(19): siRNA sense strand
guucggagguuugaugaaa

SEQ ID NO: 1635199 - RNA, 19 nt, Homo sapiens
  misc_RNA (1)...(19): siRNA sense strand
gcagugauguggccaaugc

SEQ ID NO: 1635200 - RNA, 19 nt, Homo sapiens
  misc_RNA (1)...(19): siRNA sense strand
gcucagaagaugaugauug

SEQ ID NO: 1635201 - RNA, 19 nt, Homo sapiens
  misc_RNA (1)...(19): siRNA sense strand
gggacugccuucauucaga

SEQ ID NO: 1635202 - RNA, 19 nt, Homo sapiens
  misc_RNA (1)...(19): siRNA sense strand
ggaagguccugggagagaa

SEQ ID NO: 1635203 - RNA, 19 nt, Homo sapiens
  misc_RNA (1)...(19): siRNA sense strand
gaacuuugccaugaauguu

SEQ ID NO: 1635204 - RNA, 19 nt, Homo sapiens
  misc_RNA (1)...(19): siRNA sense strand
gaagugggcagcaagaucu

SEQ ID NO: 1635205 - RNA, 19 nt, Homo sapiens
  misc_RNA (1)...(19): siRNA sense strand
gcacagccacggaaagcuu

SEQ ID NO: 1635206 - RNA, 19 nt, Homo sapiens
  misc_RNA (1)...(19): siRNA sense strand
cgagcaggauguugauaug

SEQ ID NO: 1635207 - RNA, 19 nt, Homo sapiens
  misc_RNA (1)...(19): siRNA sense strand
ggagagaagggaaagaaca

SEQ ID NO: 1635208 - RNA, 19 nt, Homo sapiens
  misc_RNA (1)...(19): siRNA sense strand
gauccgaacugggcucauc

SEQ ID NO: 1635209 - RNA, 19 nt, Homo sapiens
  misc_RNA (1)...(19): siRNA sense strand
caucaagauuaucagcaaa

SEQ ID NO: 1635210 - RNA, 19 nt, Homo sapiens
  misc_RNA (1)...(19): siRNA sense strand
ggauguugauaugguguuu

SEQ ID NO: 1635211 - RNA, 19 nt, Homo sapiens
  misc_RNA (1)...(19): siRNA sense strand
gggaaagaacaucaagauu

SEQ ID NO: 1635212 - RNA, 19 nt, Homo sapiens
  misc_RNA (1)...(19): siRNA sense strand
gcggagaccaucaagaaug

SEQ ID NO: 1635213 - RNA, 19 nt, Homo sapiens
  misc_RNA (1)...(19): siRNA sense strand
ggugaacuuugccaugaau

SEQ ID NO: 1635214 - RNA, 19 nt, Homo sapiens
  misc_RNA (1)...(19): siRNA sense strand
cugcagagguggagcugaa

SEQ ID NO: 1635215 - RNA, 19 nt, Homo sapiens
  misc_RNA (1)...(19): siRNA sense strand
cgggugaacuuugccauga

SEQ ID NO: 1635216 - RNA, 19 nt, Homo sapiens
  misc_RNA (1)...(19): siRNA sense strand
gagaagggaaagaacauca

SEQ ID NO: 1635217 - RNA, 19 nt, Homo sapiens
  misc_RNA (1)...(19): siRNA sense strand
gaacacuggcaucaucugu

SEQ ID NO: 1635218 - RNA, 19 nt, Homo sapiens
  misc_RNA (1)...(19): siRNA sense strand
cggagaccaucaagaaugu

SEQ ID NO: 1635219 - RNA, 19 nt, Homo sapiens
  misc_RNA (1)...(19): siRNA sense strand
uggagagcaugaucaagaa

SEQ ID NO: 1635220 - RNA, 19 nt, Homo sapiens
  misc_RNA (1)...(19): siRNA sense strand
gaucaguggagacguugaa

SEQ ID NO: 1635221 - RNA, 19 nt, Homo sapiens
  misc_RNA (1)...(19): siRNA sense strand
ugagauuccugcagagaag

SEQ ID NO: 1635222 - RNA, 19 nt, Homo sapiens
  misc_RNA (1)...(19): siRNA sense strand
guggugaucuaggcauuga

SEQ ID NO: 1635223 - RNA, 19 nt, Homo sapiens
  misc_RNA (1)...(19): siRNA sense strand
ggaagugggcagcaagauc

SEQ ID NO: 1635224 - RNA, 19 nt, Homo sapiens
  misc_RNA (1)...(19): siRNA sense strand
gaagggaaagaacaucaag

SEQ ID NO: 1635225 - RNA, 19 nt, Homo sapiens
  misc_RNA (1)...(19): siRNA sense strand
caugcugucuggagaaaca

SEQ ID NO: 1635226 - RNA, 19 nt, Homo sapiens
  misc_RNA (1)...(19): siRNA sense strand
acaucaagauuaucagcaa

SEQ ID NO: 1635227 - RNA, 19 nt, Homo sapiens
  misc_RNA (1)...(19): siRNA sense strand
ugggaagccugucaucugu

SEQ ID NO: 1635228 - RNA, 19 nt, Homo sapiens
  misc_RNA (1)...(19): siRNA sense strand
ccggaacacuggcaucauc

SEQ ID NO: 1635229 - RNA, 19 nt, Homo sapiens
  misc_RNA (1)...(19): siRNA sense strand
gggugaacuuugccaugaa

SEQ ID NO: 1635230 - RNA, 19 nt, Homo sapiens
  misc_RNA (1)...(19): siRNA sense strand
gagagaagggaaagaacau

SEQ ID NO: 1635231 - RNA, 19 nt, Homo sapiens
  misc_RNA (1)...(19): siRNA sense strand
caugguggcucguggugau

SEQ ID NO: 1635232 - RNA, 19 nt, Homo sapiens
  misc_RNA (1)...(19): siRNA sense strand
gcaagaagggugugaaccu

SEQ ID NO: 1635233 - RNA, 19 nt, Homo sapiens
  misc_RNA (1)...(19): siRNA sense strand
augauuaagucuggaauga

SEQ ID NO: 1635234 - RNA, 19 nt, Homo sapiens
  misc_RNA (1)...(19): siRNA sense strand
acacauuccuggagcacau

SEQ ID NO: 1635235 - RNA, 19 nt, Homo sapiens
  misc_RNA (1)...(19): siRNA sense strand
gaugaugggcuuauuucuc

SEQ ID NO: 1635236 - RNA, 19 nt, Homo sapiens
  misc_RNA (1)...(19): siRNA sense strand
acacuggcaucaucuguac

SEQ ID NO: 1635237 - RNA, 19 nt, Homo sapiens
  misc_RNA (1)...(19): siRNA sense strand
ggaaaagugugacgagaac

SEQ ID NO: 1635238 - RNA, 19 nt, Homo sapiens
  misc_RNA (1)...(19): siRNA sense strand
uccaggaucugaaguuugg

SEQ ID NO: 1635239 - RNA, 19 nt, Homo sapiens
  misc_RNA (1)...(19): siRNA sense strand
ugacggagguggaaaaugg

SEQ ID NO: 1635240 - RNA, 19 nt, Homo sapiens
  misc_RNA (1)...(19): siRNA sense strand
acaagaacaucugcaaggu

SEQ ID NO: 1635241 - RNA, 19 nt, Homo sapiens
  misc_RNA (1)...(19): siRNA sense strand
uuauuucucuccaggugaa

SEQ ID NO: 1635242 - RNA, 19 nt, Homo sapiens
  misc_RNA (1)...(19): siRNA sense strand
agggagauguggucauugu

SEQ ID NO: 1635243 - RNA, 19 nt, Homo sapiens
  misc_RNA (1)...(19): siRNA sense strand
uggcccagcuucccgauca

SEQ ID NO: 1635244 - RNA, 19 nt, Homo sapiens
  misc_RNA (1)...(19): siRNA sense strand
gagaugauuaagucuggaa

SEQ ID NO: 1635245 - RNA, 19 nt, Homo sapiens
  misc_RNA (1)...(19): siRNA sense strand
gcaagaucuacguggauga

SEQ ID NO: 1635246 - RNA, 19 nt, Homo sapiens
  misc_RNA (1)...(19): siRNA sense strand
cuggagagcaugaucaaga

SEQ ID NO: 1635247 - RNA, 19 nt, Homo sapiens
  misc_RNA (1)...(19): siRNA sense strand
cguugaaggagaugauuaa

SEQ ID NO: 1635248 - RNA, 19 nt, Homo sapiens
  misc_RNA (1)...(19): siRNA sense strand
gcagagguggagcugaaga

SEQ ID NO: 1635249 - RNA, 19 nt, Homo sapiens
  misc_RNA (1)...(19): siRNA sense strand
cucagaagaugaugauugg

SEQ ID NO: 1635250 - RNA, 19 nt, Homo sapiens
  misc_RNA (1)...(19): siRNA sense strand
ucugauguccaugaaguua

SEQ ID NO: 1635251 - RNA, 19 nt, Homo sapiens
  misc_RNA (1)...(19): siRNA sense strand
cugaacuucucucauggaa

SEQ ID NO: 1635252 - RNA, 19 nt, Homo sapiens
  misc_RNA (1)...(19): siRNA sense strand
gaugauuaagucuggaaug

SEQ ID NO: 1635253 - RNA, 19 nt, Homo sapiens
  misc_RNA (1)...(19): siRNA sense strand
augaugggcuuauuucucu

SEQ ID NO: 1635254 - RNA, 19 nt, Homo sapiens
  misc_RNA (1)...(19): siRNA sense strand
guggaugaugggcuuauuu

SEQ ID NO: 1635255 - RNA, 19 nt, Homo sapiens
  misc_RNA (1)...(19): siRNA sense strand
ggugaucuaggcauugaga

SEQ ID NO: 1635256 - RNA, 19 nt, Homo sapiens
  misc_RNA (1)...(19): siRNA sense strand
ggaccuccgggugaacuuu

SEQ ID NO: 1635257 - RNA, 19 nt, Homo sapiens
  misc_RNA (1)...(19): siRNA sense strand
agccgggacugccuucauu

SEQ ID NO: 1635258 - RNA, 19 nt, Homo sapiens
  misc_RNA (1)...(19): siRNA sense strand
caguggagacguugaagga

SEQ ID NO: 1635259 - RNA, 19 nt, Homo sapiens
  misc_RNA (1)...(19): siRNA sense strand
gauaugguguuugcgucau

SEQ ID NO: 1635260 - RNA, 19 nt, Homo sapiens
  misc_RNA (1)...(19): siRNA sense strand
gcccguugcuguggcucua

SEQ ID NO: 1635261 - RNA, 19 nt, Homo sapiens
  misc_RNA (1)...(19): siRNA sense strand
gacacuaaaggaccugaga

SEQ ID NO: 1635262 - RNA, 19 nt, Homo sapiens
  misc_RNA (1)...(19): siRNA sense strand
cuguggcucuagacacuaa

SEQ ID NO: 1635263 - RNA, 19 nt, Homo sapiens
  misc_RNA (1)...(19): siRNA sense strand
ccuguaccguggcaucuuc

SEQ ID NO: 1635264 - RNA, 19 nt, Homo sapiens
  misc_RNA (1)...(19): siRNA sense strand
ucggagguuugaugaaauc

SEQ ID NO: 1635265 - RNA, 19 nt, Homo sapiens
  misc_RNA (1)...(19): siRNA sense strand
uggcuggacuacaagaaca

SEQ ID NO: 1635266 - RNA, 19 nt, Homo sapiens
  misc_RNA (1)...(19): siRNA sense strand
caagaucuacguggaugau

SEQ ID NO: 1635267 - RNA, 19 nt, Homo sapiens
  misc_RNA (1)...(19): siRNA sense strand
gcaaaaucgagaaucauga

SEQ ID NO: 1635268 - RNA, 19 nt, Homo sapiens
  misc_RNA (1)...(19): siRNA sense strand
gggucgagcaggauguuga

SEQ ID NO: 1635269 - RNA, 19 nt, Homo sapiens
  misc_RNA (1)...(19): siRNA sense strand
ucagcaaaaucgagaauca

SEQ ID NO: 1635270 - RNA, 19 nt, Homo sapiens
  misc_RNA (1)...(19): siRNA sense strand
cccgaucaguggagacguu

SEQ ID NO: 1635271 - RNA, 19 nt, Homo sapiens
  misc_RNA (1)...(19): siRNA sense strand
augcggagaccaucaagaa

SEQ ID NO: 1635272 - RNA, 19 nt, Homo sapiens
  misc_RNA (1)...(19): siRNA sense strand
uggagacguugaaggagau

SEQ ID NO: 1635273 - RNA, 19 nt, Homo sapiens
  misc_RNA (1)...(19): siRNA sense strand
gcagcaagaagggugugaa

SEQ ID NO: 1635274 - RNA, 19 nt, Homo sapiens
  misc_RNA (1)...(19): siRNA sense strand
ggaccugagauccgaacug

SEQ ID NO: 1635275 - RNA, 19 nt, Homo sapiens
  misc_RNA (1)...(19): siRNA sense strand
gguggcucguggugaucua

SEQ ID NO: 1635276 - RNA, 19 nt, Homo sapiens
  misc_RNA (1)...(19): siRNA sense strand
uccuguggcuggacuacaa

SEQ ID NO: 1635277 - RNA, 19 nt, Homo sapiens
  misc_RNA (1)...(19): siRNA sense strand
gggagccacucucaaaauc

SEQ ID NO: 1635278 - RNA, 19 nt, Homo sapiens
  misc_RNA (1)...(19): siRNA sense strand
gagaagauccugcacugua

SEQ ID NO: 1635279 - RNA, 19 nt, Homo sapiens
  misc_RNA (1)...(19): siRNA sense strand
gaacagggcgugccuagga

SEQ ID NO: 1635280 - RNA, 19 nt, Homo sapiens
  misc_RNA (1)...(19): siRNA sense strand
ggacagugcuucagcuaca

SEQ ID NO: 1635281 - RNA, 19 nt, Homo sapiens
  misc_RNA (1)...(19): siRNA sense strand
ccaagaacaucacccagau

SEQ ID NO: 1635282 - RNA, 19 nt, Homo sapiens
  misc_RNA (1)...(19): siRNA sense strand
uggacaagcugguggagaa

SEQ ID NO: 1635283 - RNA, 19 nt, Homo sapiens
  misc_RNA (1)...(19): siRNA sense strand
gcacuguucccagauaaga

SEQ ID NO: 1635284 - RNA, 19 nt, Homo sapiens
  misc_RNA (1)...(19): siRNA sense strand
ccacagagucccugguuca

SEQ ID NO: 1635285 - RNA, 19 nt, Homo sapiens
  misc_RNA (1)...(19): siRNA sense strand
agaagauccugcacuguag

SEQ ID NO: 1635286 - RNA, 19 nt, Homo sapiens
  misc_RNA (1)...(19): siRNA sense strand
ccaaguccauccagaacag

SEQ ID NO: 1635287 - RNA, 19 nt, Homo sapiens
  misc_RNA (1)...(19): siRNA sense strand
uggcacuguucccagauaa

SEQ ID NO: 1635288 - RNA, 19 nt, Homo sapiens
  misc_RNA (1)...(19): siRNA sense strand
cccaacaccuucccacagu

SEQ ID NO: 1635289 - RNA, 19 nt, Homo sapiens
  misc_RNA (1)...(19): siRNA sense strand
uguccucccugccaugcua

SEQ ID NO: 1635290 - RNA, 19 nt, Homo sapiens
  misc_RNA (1)...(19): siRNA sense strand
acaagcugguggagaagau

SEQ ID NO: 1635291 - RNA, 19 nt, Homo sapiens
  misc_RNA (1)...(19): siRNA sense strand
ggagaagauccugcacugu

SEQ ID NO: 1635292 - RNA, 19 nt, Homo sapiens
  misc_RNA (1)...(19): siRNA sense strand
gcugugaggccaaguccau

SEQ ID NO: 1635293 - RNA, 19 nt, Homo sapiens
  misc_RNA (1)...(19): siRNA sense strand
gagaagauccugcacugua

SEQ ID NO: 1635294 - RNA, 19 nt, Homo sapiens
  misc_RNA (1)...(19): siRNA sense strand
gaacagggcgugccuagga

SEQ ID NO: 1635295 - RNA, 19 nt, Homo sapiens
  misc_RNA (1)...(19): siRNA sense strand
ggacagugcuucagcuaca

SEQ ID NO: 1635296 - RNA, 19 nt, Homo sapiens
  misc_RNA (1)...(19): siRNA sense strand
ccaagaacaucacccagau

SEQ ID NO: 1635297 - RNA, 19 nt, Homo sapiens
  misc_RNA (1)...(19): siRNA sense strand
uggacaagcugguggagaa

SEQ ID NO: 1635298 - RNA, 19 nt, Homo sapiens
  misc_RNA (1)...(19): siRNA sense strand
gcacuguucccagauaaga

SEQ ID NO: 1635299 - RNA, 19 nt, Homo sapiens
  misc_RNA (1)...(19): siRNA sense strand
ccacagagucccugguuca

SEQ ID NO: 1635300 - RNA, 19 nt, Homo sapiens
  misc_RNA (1)...(19): siRNA sense strand
agaagauccugcacuguag

SEQ ID NO: 1635301 - RNA, 19 nt, Homo sapiens
  misc_RNA (1)...(19): siRNA sense strand
ccaaguccauccagaacag

SEQ ID NO: 1635302 - RNA, 19 nt, Homo sapiens
  misc_RNA (1)...(19): siRNA sense strand
uggcacuguucccagauaa

SEQ ID NO: 1635303 - RNA, 19 nt, Homo sapiens
  misc_RNA (1)...(19): siRNA sense strand
cccaacaccuucccacagu

SEQ ID NO: 1635304 - RNA, 19 nt, Homo sapiens
  misc_RNA (1)...(19): siRNA sense strand
uguccucccugccaugcua

SEQ ID NO: 1635305 - RNA, 19 nt, Homo sapiens
  misc_RNA (1)...(19): siRNA sense strand
acaagcugguggagaagau

SEQ ID NO: 1635306 - RNA, 19 nt, Homo sapiens
  misc_RNA (1)...(19): siRNA sense strand
ggagaagauccugcacugu

SEQ ID NO: 1635307 - RNA, 19 nt, Homo sapiens
  misc_RNA (1)...(19): siRNA sense strand
gcugugaggccaaguccau

SEQ ID NO: 1635308 - RNA, 19 nt, Homo sapiens
  misc_RNA (1)...(19): siRNA sense strand
gcuaagggcucugcucgua

SEQ ID NO: 1635309 - RNA, 19 nt, Homo sapiens
  misc_RNA (1)...(19): siRNA sense strand
gaacggggcugucuaugga

SEQ ID NO: 1635310 - RNA, 19 nt, Homo sapiens
  misc_RNA (1)...(19): siRNA sense strand
caagagccgucccuccaau

SEQ ID NO: 1635311 - RNA, 19 nt, Homo sapiens
  misc_RNA (1)...(19): siRNA sense strand
gagccgucccuccaauuaa

SEQ ID NO: 1635312 - RNA, 19 nt, Homo sapiens
  misc_RNA (1)...(19): siRNA sense strand
uaagggcucugcucguagu

SEQ ID NO: 1635313 - RNA, 19 nt, Homo sapiens
  misc_RNA (1)...(19): siRNA sense strand
gcacgacaucucagacuuc

SEQ ID NO: 1635314 - RNA, 19 nt, Homo sapiens
  misc_RNA (1)...(19): siRNA sense strand
ugcuguggcucuuugagua

SEQ ID NO: 1635315 - RNA, 19 nt, Homo sapiens
  misc_RNA (1)...(19): siRNA sense strand
agagccgucccuccaauua

SEQ ID NO: 1635316 - RNA, 19 nt, Homo sapiens
  misc_RNA (1)...(19): siRNA sense strand
ucgcugcaguccuccauga

SEQ ID NO: 1635317 - RNA, 19 nt, Homo sapiens
  misc_RNA (1)...(19): siRNA sense strand
ggcacgacaucucagacuu

SEQ ID NO: 1635318 - RNA, 19 nt, Homo sapiens
  misc_RNA (1)...(19): siRNA sense strand
uaugaggacagcaauguau

SEQ ID NO: 1635319 - RNA, 19 nt, Homo sapiens
  misc_RNA (1)...(19): siRNA sense strand
ccgccuggcuguagagaag

SEQ ID NO: 1635320 - RNA, 19 nt, Homo sapiens
  misc_RNA (1)...(19): siRNA sense strand
guugucacgcguccuguuu

SEQ ID NO: 1635321 - RNA, 19 nt, Homo sapiens
  misc_RNA (1)...(19): siRNA sense strand
uccaugaccuaccucuaug

SEQ ID NO: 1635322 - RNA, 19 nt, Homo sapiens
  misc_RNA (1)...(19): siRNA sense strand
gcuguggcucuuugaguau

SEQ ID NO: 1635323 - RNA, 19 nt, Homo sapiens
  misc_RNA (1)...(19): siRNA sense strand
cuaugaggacagcaaugua

SEQ ID NO: 1635324 - RNA, 19 nt, Homo sapiens
  misc_RNA (1)...(19): siRNA sense strand
cuccaugaccuaccucuau

SEQ ID NO: 1635325 - RNA, 19 nt, Homo sapiens
  misc_RNA (1)...(19): siRNA sense strand
gcuaagggcucugcucgua

SEQ ID NO: 1635326 - RNA, 19 nt, Homo sapiens
  misc_RNA (1)...(19): siRNA sense strand
gaacggggcugucuaugga

SEQ ID NO: 1635327 - RNA, 19 nt, Homo sapiens
  misc_RNA (1)...(19): siRNA sense strand
uaagggcucugcucguagu

SEQ ID NO: 1635328 - RNA, 19 nt, Homo sapiens
  misc_RNA (1)...(19): siRNA sense strand
guugucacgcguccuguuu

SEQ ID NO: 1635329 - RNA, 19 nt, Homo sapiens
  misc_RNA (1)...(19): siRNA sense strand
uaaagaagcugaagagaag

SEQ ID NO: 1635330 - RNA, 19 nt, Homo sapiens
  misc_RNA (1)...(19): siRNA sense strand
caaccuagguggauucuug

SEQ ID NO: 1635331 - RNA, 19 nt, Homo sapiens
  misc_RNA (1)...(19): siRNA sense strand
acacugaaguucucucaua

SEQ ID NO: 1635332 - RNA, 19 nt, Homo sapiens
  misc_RNA (1)...(19): siRNA sense strand
gaccagaccuugcugauca

SEQ ID NO: 1635333 - RNA, 19 nt, Homo sapiens
  misc_RNA (1)...(19): siRNA sense strand
gcaggacccuuugguuuaa

SEQ ID NO: 1635334 - RNA, 19 nt, Homo sapiens
  misc_RNA (1)...(19): siRNA sense strand
cagaagaaguggagaauca

SEQ ID NO: 1635335 - RNA, 19 nt, Homo sapiens
  misc_RNA (1)...(19): siRNA sense strand
ugagacagcuuucaagaau

SEQ ID NO: 1635336 - RNA, 19 nt, Homo sapiens
  misc_RNA (1)...(19): siRNA sense strand
cugaaguucucucauaaua

SEQ ID NO: 1635337 - RNA, 19 nt, Homo sapiens
  misc_RNA (1)...(19): siRNA sense strand
gaauucaaccagaaaguaa

SEQ ID NO: 1635338 - RNA, 19 nt, Homo sapiens
  misc_RNA (1)...(19): siRNA sense strand
gagacagcuuucaagaaua

SEQ ID NO: 1635339 - RNA, 19 nt, Homo sapiens
  misc_RNA (1)...(19): siRNA sense strand
ugacagugaugcagaagaa

SEQ ID NO: 1635340 - RNA, 19 nt, Homo sapiens
  misc_RNA (1)...(19): siRNA sense strand
guucguauaucuaauggaa

SEQ ID NO: 1635341 - RNA, 19 nt, Homo sapiens
  misc_RNA (1)...(19): siRNA sense strand
cagaagaauucaaccagaa

SEQ ID NO: 1635342 - RNA, 19 nt, Homo sapiens
  misc_RNA (1)...(19): siRNA sense strand
gaucaagacagaccaauuc

SEQ ID NO: 1635343 - RNA, 19 nt, Homo sapiens
  misc_RNA (1)...(19): siRNA sense strand
caaauaagacuccacuugu

SEQ ID NO: 1635344 - RNA, 19 nt, Homo sapiens
  misc_RNA (1)...(19): siRNA sense strand
agacagcuuucaagaauau

SEQ ID NO: 1635345 - RNA, 19 nt, Homo sapiens
  misc_RNA (1)...(19): siRNA sense strand
caucaaggguuaaucaucu

SEQ ID NO: 1635346 - RNA, 19 nt, Homo sapiens
  misc_RNA (1)...(19): siRNA sense strand
uuuaaggccugauuucaaa

SEQ ID NO: 1635347 - RNA, 19 nt, Homo sapiens
  misc_RNA (1)...(19): siRNA sense strand
cgaaaguauucuucaaugu

SEQ ID NO: 1635348 - RNA, 19 nt, Homo sapiens
  misc_RNA (1)...(19): siRNA sense strand
ggagaucuuugcaccaaca

SEQ ID NO: 1635349 - RNA, 19 nt, Homo sapiens
  misc_RNA (1)...(19): siRNA sense strand
gagaugugcccuaggauug

SEQ ID NO: 1635350 - RNA, 19 nt, Homo sapiens
  misc_RNA (1)...(19): siRNA sense strand
ucaaauaagacuccacuug

SEQ ID NO: 1635351 - RNA, 19 nt, Homo sapiens
  misc_RNA (1)...(19): siRNA sense strand
gagaagauguuaaaaugug

SEQ ID NO: 1635352 - RNA, 19 nt, Homo sapiens
  misc_RNA (1)...(19): siRNA sense strand
gagaaucaguuuguggaau

SEQ ID NO: 1635353 - RNA, 19 nt, Homo sapiens
  misc_RNA (1)...(19): siRNA sense strand
ggagaugugcccuaggauu

SEQ ID NO: 1635354 - RNA, 19 nt, Homo sapiens
  misc_RNA (1)...(19): siRNA sense strand
cacugaaguucucucauaa

SEQ ID NO: 1635355 - RNA, 19 nt, Homo sapiens
  misc_RNA (1)...(19): siRNA sense strand
gcaccagcauccaguccuu

SEQ ID NO: 1635356 - RNA, 19 nt, Homo sapiens
  misc_RNA (1)...(19): siRNA sense strand
cagcauugacucccuuuaa

SEQ ID NO: 1635357 - RNA, 19 nt, Homo sapiens
  misc_RNA (1)...(19): siRNA sense strand
uuaaagaagcugaagagaa

SEQ ID NO: 1635358 - RNA, 19 nt, Homo sapiens
  misc_RNA (1)...(19): siRNA sense strand
cgaagacgauacugugaca

SEQ ID NO: 1635359 - RNA, 19 nt, Homo sapiens
  misc_RNA (1)...(19): siRNA sense strand
guggagaugugcccuagga

SEQ ID NO: 1635360 - RNA, 19 nt, Homo sapiens
  misc_RNA (1)...(19): siRNA sense strand
gacccagguuugacaguga

SEQ ID NO: 1635361 - RNA, 19 nt, Homo sapiens
  misc_RNA (1)...(19): siRNA sense strand
aaauaagacuccacuuguc

SEQ ID NO: 1635362 - RNA, 19 nt, Homo sapiens
  misc_RNA (1)...(19): siRNA sense strand
cugcauagauggcaauucu

SEQ ID NO: 1635363 - RNA, 19 nt, Homo sapiens
  misc_RNA (1)...(19): siRNA sense strand
ggccaaugcuccagcgaau

SEQ ID NO: 1635364 - RNA, 19 nt, Homo sapiens
  misc_RNA (1)...(19): siRNA sense strand
agaaucaguuuguggaauc

SEQ ID NO: 1635365 - RNA, 19 nt, Homo sapiens
  misc_RNA (1)...(19): siRNA sense strand
acgaaaguauucuucaaug

SEQ ID NO: 1635366 - RNA, 19 nt, Homo sapiens
  misc_RNA (1)...(19): siRNA sense strand
cugaagagaagauguuaaa

SEQ ID NO: 1635367 - RNA, 19 nt, Homo sapiens
  misc_RNA (1)...(19): siRNA sense strand
ugacucccuuuaacccuuu

SEQ ID NO: 1635368 - RNA, 19 nt, Homo sapiens
  misc_RNA (1)...(19): siRNA sense strand
cagaucaaccagaagaauu

SEQ ID NO: 1635369 - RNA, 19 nt, Homo sapiens
  misc_RNA (1)...(19): siRNA sense strand
ugcaggacccuuugguuua

SEQ ID NO: 1635370 - RNA, 19 nt, Homo sapiens
  misc_RNA (1)...(19): siRNA sense strand
gcacaaccuagguggauuc

SEQ ID NO: 1635371 - RNA, 19 nt, Homo sapiens
  misc_RNA (1)...(19): siRNA sense strand
gacagaccaauuccaguuu

SEQ ID NO: 1635372 - RNA, 19 nt, Homo sapiens
  misc_RNA (1)...(19): siRNA sense strand
caaacgaaaguauucuuca

SEQ ID NO: 1635373 - RNA, 19 nt, Homo sapiens
  misc_RNA (1)...(19): siRNA sense strand
ggacacugaaguucucuca

SEQ ID NO: 1635374 - RNA, 19 nt, Homo sapiens
  misc_RNA (1)...(19): siRNA sense strand
gcagaucaaccagaagaau

SEQ ID NO: 1635375 - RNA, 19 nt, Homo sapiens
  misc_RNA (1)...(19): siRNA sense strand
ggugagacagcuuucaaga

SEQ ID NO: 1635376 - RNA, 19 nt, Homo sapiens
  misc_RNA (1)...(19): siRNA sense strand
uaagucuagugcagcguuu

SEQ ID NO: 1635377 - RNA, 19 nt, Homo sapiens
  misc_RNA (1)...(19): siRNA sense strand
agacagaccaauuccaguu

SEQ ID NO: 1635378 - RNA, 19 nt, Homo sapiens
  misc_RNA (1)...(19): siRNA sense strand
guaguagacccagguuuga

SEQ ID NO: 1635379 - RNA, 19 nt, Homo sapiens
  misc_RNA (1)...(19): siRNA sense strand
gaaguggagaaucaguuug

SEQ ID NO: 1635380 - RNA, 19 nt, Homo sapiens
  misc_RNA (1)...(19): siRNA sense strand
agaauucaaccagaaagua

SEQ ID NO: 1635381 - RNA, 19 nt, Homo sapiens
  misc_RNA (1)...(19): siRNA sense strand
gaagaauucaaccagaaag

SEQ ID NO: 1635382 - RNA, 19 nt, Homo sapiens
  misc_RNA (1)...(19): siRNA sense strand
gcccgauccugcauagaug

SEQ ID NO: 1635383 - RNA, 19 nt, Homo sapiens
  misc_RNA (1)...(19): siRNA sense strand
acagaccaauuccaguuug

SEQ ID NO: 1635384 - RNA, 19 nt, Homo sapiens
  misc_RNA (1)...(19): siRNA sense strand
aaauauggacacugaaguu

SEQ ID NO: 1635385 - RNA, 19 nt, Homo sapiens
  misc_RNA (1)...(19): siRNA sense strand
ggagaaucaguuuguggaa

SEQ ID NO: 1635386 - RNA, 19 nt, Homo sapiens
  misc_RNA (1)...(19): siRNA sense strand
gaagaaguggagaaucagu

SEQ ID NO: 1635387 - RNA, 19 nt, Homo sapiens
  misc_RNA (1)...(19): siRNA sense strand
gacauuccaguuucaguga

SEQ ID NO: 1635388 - RNA, 19 nt, Homo sapiens
  misc_RNA (1)...(19): siRNA sense strand
caaguggugagacagcuuu

SEQ ID NO: 1635389 - RNA, 19 nt, Homo sapiens
  misc_RNA (1)...(19): siRNA sense strand
gaaguaguagacccagguu

SEQ ID NO: 1635390 - RNA, 19 nt, Homo sapiens
  misc_RNA (1)...(19): siRNA sense strand
cuauaucacaccuuaaaga

SEQ ID NO: 1635391 - RNA, 19 nt, Homo sapiens
  misc_RNA (1)...(19): siRNA sense strand
agaaguggagaaucaguuu

SEQ ID NO: 1635392 - RNA, 19 nt, Homo sapiens
  misc_RNA (1)...(19): siRNA sense strand
gugagacagcuuucaagaa

SEQ ID NO: 1635393 - RNA, 19 nt, Homo sapiens
  misc_RNA (1)...(19): siRNA sense strand
guuuaaggccugauuucaa

SEQ ID NO: 1635394 - RNA, 19 nt, Homo sapiens
  misc_RNA (1)...(19): siRNA sense strand
gaugugcccuaggauugga

SEQ ID NO: 1635395 - RNA, 19 nt, Homo sapiens
  misc_RNA (1)...(19): siRNA sense strand
agaagaauucaaccagaaa

SEQ ID NO: 1635396 - RNA, 19 nt, Homo sapiens
  misc_RNA (1)...(19): siRNA sense strand
acgucuauaucacaccuua

SEQ ID NO: 1635397 - RNA, 19 nt, Homo sapiens
  misc_RNA (1)...(19): siRNA sense strand
cauggugcccuacgucuau

SEQ ID NO: 1635398 - RNA, 19 nt, Homo sapiens
  misc_RNA (1)...(19): siRNA sense strand
auaugcagaucaaccagaa

SEQ ID NO: 1635399 - RNA, 19 nt, Homo sapiens
  misc_RNA (1)...(19): siRNA sense strand
gucuauaucacaccuuaaa

SEQ ID NO: 1635400 - RNA, 19 nt, Homo sapiens
  misc_RNA (1)...(19): siRNA sense strand
gcagcauugacucccuuua

SEQ ID NO: 1635401 - RNA, 19 nt, Homo sapiens
  misc_RNA (1)...(19): siRNA sense strand
gauucuuggcugcugcuua

SEQ ID NO: 1635402 - RNA, 19 nt, Homo sapiens
  misc_RNA (1)...(19): siRNA sense strand
guuugacagugaugcagaa

SEQ ID NO: 1635403 - RNA, 19 nt, Homo sapiens
  misc_RNA (1)...(19): siRNA sense strand
ucaaacgaaaguauucuuc

SEQ ID NO: 1635404 - RNA, 19 nt, Homo sapiens
  misc_RNA (1)...(19): siRNA sense strand
gcugaagagaagauguuaa

SEQ ID NO: 1635405 - RNA, 19 nt, Homo sapiens
  misc_RNA (1)...(19): siRNA sense strand
aaggguuaaucaucucauu

SEQ ID NO: 1635406 - RNA, 19 nt, Homo sapiens
  misc_RNA (1)...(19): siRNA sense strand
ggcacaaccuagguggauu

SEQ ID NO: 1635407 - RNA, 19 nt, Homo sapiens
  misc_RNA (1)...(19): siRNA sense strand
gagaggucaggauggcuaa

SEQ ID NO: 1635408 - RNA, 19 nt, Homo sapiens
  misc_RNA (1)...(19): siRNA sense strand
uugcaggacccuuugguuu

SEQ ID NO: 1635409 - RNA, 19 nt, Homo sapiens
  misc_RNA (1)...(19): siRNA sense strand
uaugugaagacaauagcua

SEQ ID NO: 1635410 - RNA, 19 nt, Homo sapiens
  misc_RNA (1)...(19): siRNA sense strand
cugcgacacuguggacuga

SEQ ID NO: 1635411 - RNA, 19 nt, Homo sapiens
  misc_RNA (1)...(19): siRNA sense strand
aguaguagacccagguuug

SEQ ID NO: 1635412 - RNA, 19 nt, Homo sapiens
  misc_RNA (1)...(19): siRNA sense strand
agacuccacuuguccuucu

SEQ ID NO: 1635413 - RNA, 19 nt, Homo sapiens
  misc_RNA (1)...(19): siRNA sense strand
gcacugaauuuuggagauc

SEQ ID NO: 1635414 - RNA, 19 nt, Homo sapiens
  misc_RNA (1)...(19): siRNA sense strand
gaagcugaagagaagaugu

SEQ ID NO: 1635415 - RNA, 19 nt, Homo sapiens
  misc_RNA (1)...(19): siRNA sense strand
ucgcugaaguacccaucaa

SEQ ID NO: 1635416 - RNA, 19 nt, Homo sapiens
  misc_RNA (1)...(19): siRNA sense strand
uauggacacugaaguucuc

SEQ ID NO: 1635417 - RNA, 19 nt, Homo sapiens
  misc_RNA (1)...(19): siRNA sense strand
gcagaagaaguggagaauc

SEQ ID NO: 1635418 - RNA, 19 nt, Homo sapiens
  misc_RNA (1)...(19): siRNA sense strand
caucuaccacuguaaugug

SEQ ID NO: 1635419 - RNA, 19 nt, Homo sapiens
  misc_RNA (1)...(19): siRNA sense strand
ugaucaagacagaccaauu

SEQ ID NO: 1635420 - RNA, 19 nt, Homo sapiens
  misc_RNA (1)...(19): siRNA sense strand
gggcacaaccuagguggau

SEQ ID NO: 1635421 - RNA, 19 nt, Homo sapiens
  misc_RNA (1)...(19): siRNA sense strand
cacccugacauuccaguuu

SEQ ID NO: 1635422 - RNA, 19 nt, Homo sapiens
  misc_RNA (1)...(19): siRNA sense strand
gaucaaccagaagaauuca

SEQ ID NO: 1635423 - RNA, 19 nt, Homo sapiens
  misc_RNA (1)...(19): siRNA sense strand
gcugcuuacucgcugaagu

SEQ ID NO: 1635424 - RNA, 19 nt, Homo sapiens
  misc_RNA (1)...(19): siRNA sense strand
caguuucagugaucuuugg

SEQ ID NO: 1635425 - RNA, 19 nt, Homo sapiens
  misc_RNA (1)...(19): siRNA sense strand
ugacagaauacaucuacca

SEQ ID NO: 1635426 - RNA, 19 nt, Homo sapiens
  misc_RNA (1)...(19): siRNA sense strand
auaugacuauuccuuaugg

SEQ ID NO: 1635427 - RNA, 19 nt, Homo sapiens
  misc_RNA (1)...(19): siRNA sense strand
agaucaaccagaagaauuc

SEQ ID NO: 1635428 - RNA, 19 nt, Homo sapiens
  misc_RNA (1)...(19): siRNA sense strand
ccuuacgaccacauucaua

SEQ ID NO: 1635429 - RNA, 19 nt, Homo sapiens
  misc_RNA (1)...(19): siRNA sense strand
gaugauuggucuucugaau

SEQ ID NO: 1635430 - RNA, 19 nt, Homo sapiens
  misc_RNA (1)...(19): siRNA sense strand
gggagaagauguauaugag

SEQ ID NO: 1635431 - RNA, 19 nt, Homo sapiens
  misc_RNA (1)...(19): siRNA sense strand
gugccuaugucaucguaua

SEQ ID NO: 1635432 - RNA, 19 nt, Homo sapiens
  misc_RNA (1)...(19): siRNA sense strand
guaaauucaucgagacauc

SEQ ID NO: 1635433 - RNA, 19 nt, Homo sapiens
  misc_RNA (1)...(19): siRNA sense strand
gcugggagaagauguauau

SEQ ID NO: 1635434 - RNA, 19 nt, Homo sapiens
  misc_RNA (1)...(19): siRNA sense strand
cagcuuggccagccucuuu

SEQ ID NO: 1635435 - RNA, 19 nt, Homo sapiens
  misc_RNA (1)...(19): siRNA sense strand
gguguucgacuguaaauuc

SEQ ID NO: 1635436 - RNA, 19 nt, Homo sapiens
  misc_RNA (1)...(19): siRNA sense strand
gaacagcugggagaagaug

SEQ ID NO: 1635437 - RNA, 19 nt, Homo sapiens
  misc_RNA (1)...(19): siRNA sense strand
ggagaagauguauaugaga

SEQ ID NO: 1635438 - RNA, 19 nt, Homo sapiens
  misc_RNA (1)...(19): siRNA sense strand
gaccgaggcagcuuugaga

SEQ ID NO: 1635439 - RNA, 19 nt, Homo sapiens
  misc_RNA (1)...(19): siRNA sense strand
gcagaccgaggcagcuuug

SEQ ID NO: 1635440 - RNA, 19 nt, Homo sapiens
  misc_RNA (1)...(19): siRNA sense strand
ccaaucagccucccucaac

SEQ ID NO: 1635441 - RNA, 19 nt, Homo sapiens
  misc_RNA (1)...(19): siRNA sense strand
ugggagaagauguauauga

SEQ ID NO: 1635442 - RNA, 19 nt, Homo sapiens
  misc_RNA (1)...(19): siRNA sense strand
acaccgagcaggaagcaaa

SEQ ID NO: 1635443 - RNA, 19 nt, Homo sapiens
  misc_RNA (1)...(19): siRNA sense strand
gcugugguguucgacugua

SEQ ID NO: 1635444 - RNA, 19 nt, Homo sapiens
  misc_RNA (1)...(19): siRNA sense strand
guucgacuguaaauucauc

SEQ ID NO: 1635445 - RNA, 19 nt, Homo sapiens
  misc_RNA (1)...(19): siRNA sense strand
augaacagcugggagaaga

SEQ ID NO: 1635446 - RNA, 19 nt, Homo sapiens
  misc_RNA (1)...(19): siRNA sense strand
guguucgacuguaaauuca

SEQ ID NO: 1635447 - RNA, 19 nt, Homo sapiens
  misc_RNA (1)...(19): siRNA sense strand
cagugccuaugucaucgua

SEQ ID NO: 1635448 - RNA, 19 nt, Homo sapiens
  misc_RNA (1)...(19): siRNA sense strand
ccgagaaacuggauaaaag

SEQ ID NO: 1635449 - RNA, 19 nt, Homo sapiens
  misc_RNA (1)...(19): siRNA sense strand
caauguggccgagcucuuc

SEQ ID NO: 1635450 - RNA, 19 nt, Homo sapiens
  misc_RNA (1)...(19): siRNA sense strand
caaucuggccgugcucuga

SEQ ID NO: 1635451 - RNA, 19 nt, Homo sapiens
  misc_RNA (1)...(19): siRNA sense strand
ccucugagcuccgcaucca

SEQ ID NO: 1635452 - RNA, 19 nt, Homo sapiens
  misc_RNA (1)...(19): siRNA sense strand
ccacgcugcagcacaaugu

SEQ ID NO: 1635453 - RNA, 19 nt, Homo sapiens
  misc_RNA (1)...(19): siRNA sense strand
gaauccagcgacucugaag

SEQ ID NO: 1635454 - RNA, 19 nt, Homo sapiens
  misc_RNA (1)...(19): siRNA sense strand
ggaaaagccucaaaaugaa

SEQ ID NO: 1635455 - RNA, 19 nt, Homo sapiens
  misc_RNA (1)...(19): siRNA sense strand
gaaggaagaugcaaaagag

SEQ ID NO: 1635456 - RNA, 19 nt, Homo sapiens
  misc_RNA (1)...(19): siRNA sense strand
gaggacagauucaucaaaa

SEQ ID NO: 1635457 - RNA, 19 nt, Homo sapiens
  misc_RNA (1)...(19): siRNA sense strand
agacggaaccucagauuug

SEQ ID NO: 1635458 - RNA, 19 nt, Homo sapiens
  misc_RNA (1)...(19): siRNA sense strand
uaccagacauccagaguuc

SEQ ID NO: 1635459 - RNA, 19 nt, Homo sapiens
  misc_RNA (1)...(19): siRNA sense strand
aaacaacacaagaccaauu

SEQ ID NO: 1635460 - RNA, 19 nt, Homo sapiens
  misc_RNA (1)...(19): siRNA sense strand
cggaaugccuuaccagaca

SEQ ID NO: 1635461 - RNA, 19 nt, Homo sapiens
  misc_RNA (1)...(19): siRNA sense strand
caacacaagaccaauugga

SEQ ID NO: 1635462 - RNA, 19 nt, Homo sapiens
  misc_RNA (1)...(19): siRNA sense strand
acacaagaccaauuggaaa

SEQ ID NO: 1635463 - RNA, 19 nt, Homo sapiens
  misc_RNA (1)...(19): siRNA sense strand
uggaaaagccucaaaauga

SEQ ID NO: 1635464 - RNA, 19 nt, Homo sapiens
  misc_RNA (1)...(19): siRNA sense strand
ggaaugccuuaccagacau

SEQ ID NO: 1635465 - RNA, 19 nt, Homo sapiens
  misc_RNA (1)...(19): siRNA sense strand
ccacagacggaaccucaga

SEQ ID NO: 1635466 - RNA, 19 nt, Homo sapiens
  misc_RNA (1)...(19): siRNA sense strand
cagacggaaccucagauuu

SEQ ID NO: 1635467 - RNA, 19 nt, Homo sapiens
  misc_RNA (1)...(19): siRNA sense strand
gacggaaccucagauuugc

SEQ ID NO: 1635468 - RNA, 19 nt, Homo sapiens
  misc_RNA (1)...(19): siRNA sense strand
ggaagaugcaaaagagaaa

SEQ ID NO: 1635469 - RNA, 19 nt, Homo sapiens
  misc_RNA (1)...(19): siRNA sense strand
aacaacacaagaccaauug

SEQ ID NO: 1635470 - RNA, 19 nt, Homo sapiens
  misc_RNA (1)...(19): siRNA sense strand
acagacggaaccucagauu

SEQ ID NO: 1635471 - RNA, 19 nt, Homo sapiens
  misc_RNA (1)...(19): siRNA sense strand
aacacaagaccaauuggaa

SEQ ID NO: 1635472 - RNA, 19 nt, Homo sapiens
  misc_RNA (1)...(19): siRNA sense strand
agucuggggucgccaauuu

SEQ ID NO: 1635473 - RNA, 19 nt, Homo sapiens
  misc_RNA (1)...(19): siRNA sense strand
ggaaaagccucaaaaugaa

SEQ ID NO: 1635474 - RNA, 19 nt, Homo sapiens
  misc_RNA (1)...(19): siRNA sense strand
gaaggaagaugcaaaagag

SEQ ID NO: 1635475 - RNA, 19 nt, Homo sapiens
  misc_RNA (1)...(19): siRNA sense strand
gaggacagauucaucaaaa

SEQ ID NO: 1635476 - RNA, 19 nt, Homo sapiens
  misc_RNA (1)...(19): siRNA sense strand
agacggaaccucagauuug

SEQ ID NO: 1635477 - RNA, 19 nt, Homo sapiens
  misc_RNA (1)...(19): siRNA sense strand
uaccagacauccagaguuc

SEQ ID NO: 1635478 - RNA, 19 nt, Homo sapiens
  misc_RNA (1)...(19): siRNA sense strand
aaacaacacaagaccaauu

SEQ ID NO: 1635479 - RNA, 19 nt, Homo sapiens
  misc_RNA (1)...(19): siRNA sense strand
cggaaugccuuaccagaca

SEQ ID NO: 1635480 - RNA, 19 nt, Homo sapiens
  misc_RNA (1)...(19): siRNA sense strand
caacacaagaccaauugga

SEQ ID NO: 1635481 - RNA, 19 nt, Homo sapiens
  misc_RNA (1)...(19): siRNA sense strand
acacaagaccaauuggaaa

SEQ ID NO: 1635482 - RNA, 19 nt, Homo sapiens
  misc_RNA (1)...(19): siRNA sense strand
uggaaaagccucaaaauga

SEQ ID NO: 1635483 - RNA, 19 nt, Homo sapiens
  misc_RNA (1)...(19): siRNA sense strand
ggaaugccuuaccagacau

SEQ ID NO: 1635484 - RNA, 19 nt, Homo sapiens
  misc_RNA (1)...(19): siRNA sense strand
ccacagacggaaccucaga

SEQ ID NO: 1635485 - RNA, 19 nt, Homo sapiens
  misc_RNA (1)...(19): siRNA sense strand
cagacggaaccucagauuu

SEQ ID NO: 1635486 - RNA, 19 nt, Homo sapiens
  misc_RNA (1)...(19): siRNA sense strand
gacggaaccucagauuugc

SEQ ID NO: 1635487 - RNA, 19 nt, Homo sapiens
  misc_RNA (1)...(19): siRNA sense strand
ggaagaugcaaaagagaaa

SEQ ID NO: 1635488 - RNA, 19 nt, Homo sapiens
  misc_RNA (1)...(19): siRNA sense strand
aacaacacaagaccaauug

SEQ ID NO: 1635489 - RNA, 19 nt, Homo sapiens
  misc_RNA (1)...(19): siRNA sense strand
acagacggaaccucagauu

SEQ ID NO: 1635490 - RNA, 19 nt, Homo sapiens
  misc_RNA (1)...(19): siRNA sense strand
aacacaagaccaauuggaa

SEQ ID NO: 1635491 - RNA, 19 nt, Homo sapiens
  misc_RNA (1)...(19): siRNA sense strand
agucuggggucgccaauuu

SEQ ID NO: 1635492 - RNA, 19 nt, Homo sapiens
  misc_RNA (1)...(19): siRNA sense strand
ggaaaagccucaaaaugaa

SEQ ID NO: 1635493 - RNA, 19 nt, Homo sapiens
  misc_RNA (1)...(19): siRNA sense strand
gaaggaagaugcaaaagag

SEQ ID NO: 1635494 - RNA, 19 nt, Homo sapiens
  misc_RNA (1)...(19): siRNA sense strand
gaggacagauucaucaaaa

SEQ ID NO: 1635495 - RNA, 19 nt, Homo sapiens
  misc_RNA (1)...(19): siRNA sense strand
agacggaaccucagauuug

SEQ ID NO: 1635496 - RNA, 19 nt, Homo sapiens
  misc_RNA (1)...(19): siRNA sense strand
uaccagacauccagaguuc

SEQ ID NO: 1635497 - RNA, 19 nt, Homo sapiens
  misc_RNA (1)...(19): siRNA sense strand
aaacaacacaagaccaauu

SEQ ID NO: 1635498 - RNA, 19 nt, Homo sapiens
  misc_RNA (1)...(19): siRNA sense strand
cggaaugccuuaccagaca

SEQ ID NO: 1635499 - RNA, 19 nt, Homo sapiens
  misc_RNA (1)...(19): siRNA sense strand
caacacaagaccaauugga

SEQ ID NO: 1635500 - RNA, 19 nt, Homo sapiens
  misc_RNA (1)...(19): siRNA sense strand
acacaagaccaauuggaaa

SEQ ID NO: 1635501 - RNA, 19 nt, Homo sapiens
  misc_RNA (1)...(19): siRNA sense strand
uggaaaagccucaaaauga

SEQ ID NO: 1635502 - RNA, 19 nt, Homo sapiens
  misc_RNA (1)...(19): siRNA sense strand
ggaaugccuuaccagacau

SEQ ID NO: 1635503 - RNA, 19 nt, Homo sapiens
  misc_RNA (1)...(19): siRNA sense strand
ccacagacggaaccucaga

SEQ ID NO: 1635504 - RNA, 19 nt, Homo sapiens
  misc_RNA (1)...(19): siRNA sense strand
cagacggaaccucagauuu

SEQ ID NO: 1635505 - RNA, 19 nt, Homo sapiens
  misc_RNA (1)...(19): siRNA sense strand
gacggaaccucagauuugc

SEQ ID NO: 1635506 - RNA, 19 nt, Homo sapiens
  misc_RNA (1)...(19): siRNA sense strand
ggaagaugcaaaagagaaa

SEQ ID NO: 1635507 - RNA, 19 nt, Homo sapiens
  misc_RNA (1)...(19): siRNA sense strand
aacaacacaagaccaauug

SEQ ID NO: 1635508 - RNA, 19 nt, Homo sapiens
  misc_RNA (1)...(19): siRNA sense strand
acagacggaaccucagauu

SEQ ID NO: 1635509 - RNA, 19 nt, Homo sapiens
  misc_RNA (1)...(19): siRNA sense strand
aacacaagaccaauuggaa

SEQ ID NO: 1635510 - RNA, 19 nt, Homo sapiens
  misc_RNA (1)...(19): siRNA sense strand
agucuggggucgccaauuu

SEQ ID NO: 1635511 - RNA, 19 nt, Homo sapiens
  misc_RNA (1)...(19): siRNA sense strand
gaguaaagcuuaugaguga

SEQ ID NO: 1635512 - RNA, 19 nt, Homo sapiens
  misc_RNA (1)...(19): siRNA sense strand
gaauauggacuaugacuua

SEQ ID NO: 1635513 - RNA, 19 nt, Homo sapiens
  misc_RNA (1)...(19): siRNA sense strand
gaacugaacuuugccuuug

SEQ ID NO: 1635514 - RNA, 19 nt, Homo sapiens
  misc_RNA (1)...(19): siRNA sense strand
gcaaugagaugcuguuuag

SEQ ID NO: 1635515 - RNA, 19 nt, Homo sapiens
  misc_RNA (1)...(19): siRNA sense strand
gggaggaccuggccaauuu

SEQ ID NO: 1635516 - RNA, 19 nt, Homo sapiens
  misc_RNA (1)...(19): siRNA sense strand
aaacaagccucccaacuaa

SEQ ID NO: 1635517 - RNA, 19 nt, Homo sapiens
  misc_RNA (1)...(19): siRNA sense strand
caagagaggaguauauuua

SEQ ID NO: 1635518 - RNA, 19 nt, Homo sapiens
  misc_RNA (1)...(19): siRNA sense strand
caacaagacucacaacuuc

SEQ ID NO: 1635519 - RNA, 19 nt, Homo sapiens
  misc_RNA (1)...(19): siRNA sense strand
ggaacagaauacagaaaua

SEQ ID NO: 1635520 - RNA, 19 nt, Homo sapiens
  misc_RNA (1)...(19): siRNA sense strand
gaacuuugccuuugaagaa

SEQ ID NO: 1635521 - RNA, 19 nt, Homo sapiens
  misc_RNA (1)...(19): siRNA sense strand
gagugaagcuucuguguga

SEQ ID NO: 1635522 - RNA, 19 nt, Homo sapiens
  misc_RNA (1)...(19): siRNA sense strand
gauaagaggugggccauga

SEQ ID NO: 1635523 - RNA, 19 nt, Homo sapiens
  misc_RNA (1)...(19): siRNA sense strand
gugaauaucugucaacuuc

SEQ ID NO: 1635524 - RNA, 19 nt, Homo sapiens
  misc_RNA (1)...(19): siRNA sense strand
gagagaagcuuugcucaau

SEQ ID NO: 1635525 - RNA, 19 nt, Homo sapiens
  misc_RNA (1)...(19): siRNA sense strand
aaaggaauauggacuauga

SEQ ID NO: 1635526 - RNA, 19 nt, Homo sapiens
  misc_RNA (1)...(19): siRNA sense strand
gagaagcuuugcucaauug

SEQ ID NO: 1635527 - RNA, 19 nt, Homo sapiens
  misc_RNA (1)...(19): siRNA sense strand
caacuucucuucuacacaa

SEQ ID NO: 1635528 - RNA, 19 nt, Homo sapiens
  misc_RNA (1)...(19): siRNA sense strand
gaacaacgauuugcaggau

SEQ ID NO: 1635529 - RNA, 19 nt, Homo sapiens
  misc_RNA (1)...(19): siRNA sense strand
gagaaagccuggagugugu

SEQ ID NO: 1635530 - RNA, 19 nt, Homo sapiens
  misc_RNA (1)...(19): siRNA sense strand
uaaagcaguuguugaagaa

SEQ ID NO: 1635531 - RNA, 19 nt, Homo sapiens
  misc_RNA (1)...(19): siRNA sense strand
gcagcuauguucuauaugu

SEQ ID NO: 1635532 - RNA, 19 nt, Homo sapiens
  misc_RNA (1)...(19): siRNA sense strand
uaagacauccaaaguguua

SEQ ID NO: 1635533 - RNA, 19 nt, Homo sapiens
  misc_RNA (1)...(19): siRNA sense strand
gaaugaagaucgaguaaaa

SEQ ID NO: 1635534 - RNA, 19 nt, Homo sapiens
  misc_RNA (1)...(19): siRNA sense strand
ccaagucgcugccaaagga

SEQ ID NO: 1635535 - RNA, 19 nt, Homo sapiens
  misc_RNA (1)...(19): siRNA sense strand
ggaucuggcuucuguuauu

SEQ ID NO: 1635536 - RNA, 19 nt, Homo sapiens
  misc_RNA (1)...(19): siRNA sense strand
gagagacuguccuuagaaa

SEQ ID NO: 1635537 - RNA, 19 nt, Homo sapiens
  misc_RNA (1)...(19): siRNA sense strand
gacuaugacuuacguguuu

SEQ ID NO: 1635538 - RNA, 19 nt, Homo sapiens
  misc_RNA (1)...(19): siRNA sense strand
gcuggaaucuugcaaccua

SEQ ID NO: 1635539 - RNA, 19 nt, Homo sapiens
  misc_RNA (1)...(19): siRNA sense strand
cagcagagguuuaaguaug

SEQ ID NO: 1635540 - RNA, 19 nt, Homo sapiens
  misc_RNA (1)...(19): siRNA sense strand
ugaaggaauugugaaguua

SEQ ID NO: 1635541 - RNA, 19 nt, Homo sapiens
  misc_RNA (1)...(19): siRNA sense strand
cauccaagcuguaaucuuc

SEQ ID NO: 1635542 - RNA, 19 nt, Homo sapiens
  misc_RNA (1)...(19): siRNA sense strand
ggauaucucuacuucuuug

SEQ ID NO: 1635543 - RNA, 19 nt, Homo sapiens
  misc_RNA (1)...(19): siRNA sense strand
gaaauuaaccagcugaaag

SEQ ID NO: 1635544 - RNA, 19 nt, Homo sapiens
  misc_RNA (1)...(19): siRNA sense strand
gcaggaugauggagugaaa

SEQ ID NO: 1635545 - RNA, 19 nt, Homo sapiens
  misc_RNA (1)...(19): siRNA sense strand
gaauuggaccuguaccaua

SEQ ID NO: 1635546 - RNA, 19 nt, Homo sapiens
  misc_RNA (1)...(19): siRNA sense strand
gaagaaucaccauuaugua

SEQ ID NO: 1635547 - RNA, 19 nt, Homo sapiens
  misc_RNA (1)...(19): siRNA sense strand
aagcuuugcucaauugaua

SEQ ID NO: 1635548 - RNA, 19 nt, Homo sapiens
  misc_RNA (1)...(19): siRNA sense strand
ggaauacugugguuugaca

SEQ ID NO: 1635549 - RNA, 19 nt, Homo sapiens
  misc_RNA (1)...(19): siRNA sense strand
cagaauaccuuaggauaug

SEQ ID NO: 1635550 - RNA, 19 nt, Homo sapiens
  misc_RNA (1)...(19): siRNA sense strand
ucagggagcugcuggaguu

SEQ ID NO: 1635551 - RNA, 19 nt, Homo sapiens
  misc_RNA (1)...(19): siRNA sense strand
caggauaucucuacuucuu

SEQ ID NO: 1635552 - RNA, 19 nt, Homo sapiens
  misc_RNA (1)...(19): siRNA sense strand
aaucugaugucucuaguuu

SEQ ID NO: 1635553 - RNA, 19 nt, Homo sapiens
  misc_RNA (1)...(19): siRNA sense strand
aguagccucuuguuuauua

SEQ ID NO: 1635554 - RNA, 19 nt, Homo sapiens
  misc_RNA (1)...(19): siRNA sense strand
ggaguauauuuaccaguuu

SEQ ID NO: 1635555 - RNA, 19 nt, Homo sapiens
  misc_RNA (1)...(19): siRNA sense strand
ugagauauccaaacuguaa

SEQ ID NO: 1635556 - RNA, 19 nt, Homo sapiens
  misc_RNA (1)...(19): siRNA sense strand
caaaugaacacuugagaga

SEQ ID NO: 1635557 - RNA, 19 nt, Homo sapiens
  misc_RNA (1)...(19): siRNA sense strand
ucccaaagguugccauuaa

SEQ ID NO: 1635558 - RNA, 19 nt, Homo sapiens
  misc_RNA (1)...(19): siRNA sense strand
gaaaguauucaguucacua

SEQ ID NO: 1635559 - RNA, 19 nt, Homo sapiens
  misc_RNA (1)...(19): siRNA sense strand
aaacaaccuuggugagaaa

SEQ ID NO: 1635560 - RNA, 19 nt, Homo sapiens
  misc_RNA (1)...(19): siRNA sense strand
gaucuggcuucuguuauuu

SEQ ID NO: 1635561 - RNA, 19 nt, Homo sapiens
  misc_RNA (1)...(19): siRNA sense strand
guucugugcuucauacaaa

SEQ ID NO: 1635562 - RNA, 19 nt, Homo sapiens
  misc_RNA (1)...(19): siRNA sense strand
ggugagaaaggcaauguua

SEQ ID NO: 1635563 - RNA, 19 nt, Homo sapiens
  misc_RNA (1)...(19): siRNA sense strand
cuucaaagcacaaguuaua

SEQ ID NO: 1635564 - RNA, 19 nt, Homo sapiens
  misc_RNA (1)...(19): siRNA sense strand
gcuguaaucuucaggacuu

SEQ ID NO: 1635565 - RNA, 19 nt, Homo sapiens
  misc_RNA (1)...(19): siRNA sense strand
ugaauauccugcaucauga

SEQ ID NO: 1635566 - RNA, 19 nt, Homo sapiens
  misc_RNA (1)...(19): siRNA sense strand
ugacacagaugaagugcuu

SEQ ID NO: 1635567 - RNA, 19 nt, Homo sapiens
  misc_RNA (1)...(19): siRNA sense strand
caaugaauauccugcauca

SEQ ID NO: 1635568 - RNA, 19 nt, Homo sapiens
  misc_RNA (1)...(19): siRNA sense strand
ugaagucuccuaaguguaa

SEQ ID NO: 1635569 - RNA, 19 nt, Homo sapiens
  misc_RNA (1)...(19): siRNA sense strand
caaacuggcuacaagacaa

SEQ ID NO: 1635570 - RNA, 19 nt, Homo sapiens
  misc_RNA (1)...(19): siRNA sense strand
uggaggagcuaaacaaaga

SEQ ID NO: 1635571 - RNA, 19 nt, Homo sapiens
  misc_RNA (1)...(19): siRNA sense strand
cuaaagcaguuguugaaga

SEQ ID NO: 1635572 - RNA, 19 nt, Homo sapiens
  misc_RNA (1)...(19): siRNA sense strand
uaagccagauuguaacuau

SEQ ID NO: 1635573 - RNA, 19 nt, Homo sapiens
  misc_RNA (1)...(19): siRNA sense strand
gaucucuccucugcucuua

SEQ ID NO: 1635574 - RNA, 19 nt, Homo sapiens
  misc_RNA (1)...(19): siRNA sense strand
ggagaaggguggugauguc

SEQ ID NO: 1635575 - RNA, 19 nt, Homo sapiens
  misc_RNA (1)...(19): siRNA sense strand
gcaagagaggaguauauuu

SEQ ID NO: 1635576 - RNA, 19 nt, Homo sapiens
  misc_RNA (1)...(19): siRNA sense strand
uauccaaacuguaacauuc

SEQ ID NO: 1635577 - RNA, 19 nt, Homo sapiens
  misc_RNA (1)...(19): siRNA sense strand
gaacagaauacagaaauag

SEQ ID NO: 1635578 - RNA, 19 nt, Homo sapiens
  misc_RNA (1)...(19): siRNA sense strand
cugaaucugucaaccaaua

SEQ ID NO: 1635579 - RNA, 19 nt, Homo sapiens
  misc_RNA (1)...(19): siRNA sense strand
acaagaaucugaugcaucu

SEQ ID NO: 1635580 - RNA, 19 nt, Homo sapiens
  misc_RNA (1)...(19): siRNA sense strand
cuguuuaccugcuauauuu

SEQ ID NO: 1635581 - RNA, 19 nt, Homo sapiens
  misc_RNA (1)...(19): siRNA sense strand
gcuaaacaaagaggaauua

SEQ ID NO: 1635582 - RNA, 19 nt, Homo sapiens
  misc_RNA (1)...(19): siRNA sense strand
ggaauugcagagaaagaua

SEQ ID NO: 1635583 - RNA, 19 nt, Homo sapiens
  misc_RNA (1)...(19): siRNA sense strand
gcucuuaucugcaacaaaa

SEQ ID NO: 1635584 - RNA, 19 nt, Homo sapiens
  misc_RNA (1)...(19): siRNA sense strand
ugagagaauuggaccugua

SEQ ID NO: 1635585 - RNA, 19 nt, Homo sapiens
  misc_RNA (1)...(19): siRNA sense strand
ccaaagguugccauuaaua

SEQ ID NO: 1635586 - RNA, 19 nt, Homo sapiens
  misc_RNA (1)...(19): siRNA sense strand
gaacuaaggcacccaaacu

SEQ ID NO: 1635587 - RNA, 19 nt, Homo sapiens
  misc_RNA (1)...(19): siRNA sense strand
gaugguggaguaaagcuua

SEQ ID NO: 1635588 - RNA, 19 nt, Homo sapiens
  misc_RNA (1)...(19): siRNA sense strand
uuagaaagcuguggucuca

SEQ ID NO: 1635589 - RNA, 19 nt, Homo sapiens
  misc_RNA (1)...(19): siRNA sense strand
ggcaagaucucuguucugu

SEQ ID NO: 1635590 - RNA, 19 nt, Homo sapiens
  misc_RNA (1)...(19): siRNA sense strand
ucauuaagccagauuguaa

SEQ ID NO: 1635591 - RNA, 19 nt, Homo sapiens
  misc_RNA (1)...(19): siRNA sense strand
gcuggaagcugugggaguu

SEQ ID NO: 1635592 - RNA, 19 nt, Homo sapiens
  misc_RNA (1)...(19): siRNA sense strand
gcacccaaacuguaaacua

SEQ ID NO: 1635593 - RNA, 19 nt, Homo sapiens
  misc_RNA (1)...(19): siRNA sense strand
cuggaaagccugaagauuu

SEQ ID NO: 1635594 - RNA, 19 nt, Homo sapiens
  misc_RNA (1)...(19): siRNA sense strand
ggaucaaacuggcuacaag

SEQ ID NO: 1635595 - RNA, 19 nt, Homo sapiens
  misc_RNA (1)...(19): siRNA sense strand
gaauaucugucaacuucuc

SEQ ID NO: 1635596 - RNA, 19 nt, Homo sapiens
  misc_RNA (1)...(19): siRNA sense strand
uaacugugguauuugagaa

SEQ ID NO: 1635597 - RNA, 19 nt, Homo sapiens
  misc_RNA (1)...(19): siRNA sense strand
ugaagaaucaccauuaugu

SEQ ID NO: 1635598 - RNA, 19 nt, Homo sapiens
  misc_RNA (1)...(19): siRNA sense strand
guugaagaaucaccauuau

SEQ ID NO: 1635599 - RNA, 19 nt, Homo sapiens
  misc_RNA (1)...(19): siRNA sense strand
uagagagacuguccuuaga

SEQ ID NO: 1635600 - RNA, 19 nt, Homo sapiens
  misc_RNA (1)...(19): siRNA sense strand
gaaccugaguuugcacugu

SEQ ID NO: 1635601 - RNA, 19 nt, Homo sapiens
  misc_RNA (1)...(19): siRNA sense strand
cuuaggauaugaaggaauu

SEQ ID NO: 1635602 - RNA, 19 nt, Homo sapiens
  misc_RNA (1)...(19): siRNA sense strand
uaccauagcaaccuugaua

SEQ ID NO: 1635603 - RNA, 19 nt, Homo sapiens
  misc_RNA (1)...(19): siRNA sense strand
guauggaaguauuaggaaa

SEQ ID NO: 1635604 - RNA, 19 nt, Homo sapiens
  misc_RNA (1)...(19): siRNA sense strand
ggagaggacuuuuaacugu

SEQ ID NO: 1635605 - RNA, 19 nt, Homo sapiens
  misc_RNA (1)...(19): siRNA sense strand
gcuauguucuauauguuga

SEQ ID NO: 1635606 - RNA, 19 nt, Homo sapiens
  misc_RNA (1)...(19): siRNA sense strand
cuaagagacuaaagcaguu

SEQ ID NO: 1635607 - RNA, 19 nt, Homo sapiens
  misc_RNA (1)...(19): siRNA sense strand
ccaguguccuuccucauga

SEQ ID NO: 1635608 - RNA, 19 nt, Homo sapiens
  misc_RNA (1)...(19): siRNA sense strand
acucacaacuucuaagaga

SEQ ID NO: 1635609 - RNA, 19 nt, Homo sapiens
  misc_RNA (1)...(19): siRNA sense strand
caaagguugccauuaauau

SEQ ID NO: 1635610 - RNA, 19 nt, Homo sapiens
  misc_RNA (1)...(19): siRNA sense strand
gaaggaauugugaaguuau

SEQ ID NO: 1635611 - RNA, 19 nt, Homo sapiens
  misc_RNA (1)...(19): siRNA sense strand
gcugugugauggaugagaa

SEQ ID NO: 1635612 - RNA, 19 nt, Homo sapiens
  misc_RNA (1)...(19): siRNA sense strand
ggacugugaggucugauuc

SEQ ID NO: 1635613 - RNA, 19 nt, Homo sapiens
  misc_RNA (1)...(19): siRNA sense strand
ggaugagaauugucaagcu

SEQ ID NO: 1635614 - RNA, 19 nt, Homo sapiens
  misc_RNA (1)...(19): siRNA sense strand
ugugauggaugagaauugu

SEQ ID NO: 1635615 - RNA, 19 nt, Homo sapiens
  misc_RNA (1)...(19): siRNA sense strand
ccccaaaacugaccaugaa

SEQ ID NO: 1635616 - RNA, 19 nt, Homo sapiens
  misc_RNA (1)...(19): siRNA sense strand
gugggccugugcauuguug

SEQ ID NO: 1635617 - RNA, 19 nt, Homo sapiens
  misc_RNA (1)...(19): siRNA sense strand
gaauugucaagcuggagaa

SEQ ID NO: 1635618 - RNA, 19 nt, Homo sapiens
  misc_RNA (1)...(19): siRNA sense strand
gggcggugauuguccaaaa

SEQ ID NO: 1635619 - RNA, 19 nt, Homo sapiens
  misc_RNA (1)...(19): siRNA sense strand
ggacugugaggucugauuc

SEQ ID NO: 1635620 - RNA, 19 nt, Homo sapiens
  misc_RNA (1)...(19): siRNA sense strand
ggaugagaauugucaagcu

SEQ ID NO: 1635621 - RNA, 19 nt, Homo sapiens
  misc_RNA (1)...(19): siRNA sense strand
ccccaaaacugaccaugaa

SEQ ID NO: 1635622 - RNA, 19 nt, Homo sapiens
  misc_RNA (1)...(19): siRNA sense strand
gaauugucaagcuggagaa

SEQ ID NO: 1635623 - RNA, 19 nt, Homo sapiens
  misc_RNA (1)...(19): siRNA sense strand
ggacugugaggucugauuc

SEQ ID NO: 1635624 - RNA, 19 nt, Homo sapiens
  misc_RNA (1)...(19): siRNA sense strand
ggaugagaauugucaagcu

SEQ ID NO: 1635625 - RNA, 19 nt, Homo sapiens
  misc_RNA (1)...(19): siRNA sense strand
ccccaaaacugaccaugaa

SEQ ID NO: 1635626 - RNA, 19 nt, Homo sapiens
  misc_RNA (1)...(19): siRNA sense strand
gaauugucaagcuggagaa

SEQ ID NO: 1635627 - RNA, 19 nt, Homo sapiens
  misc_RNA (1)...(19): siRNA sense strand
ggacugugaggucugauuc

SEQ ID NO: 1635628 - RNA, 19 nt, Homo sapiens
  misc_RNA (1)...(19): siRNA sense strand
ggaugagaauugucaagcu

SEQ ID NO: 1635629 - RNA, 19 nt, Homo sapiens
  misc_RNA (1)...(19): siRNA sense strand
ccccaaaacugaccaugaa

SEQ ID NO: 1635630 - RNA, 19 nt, Homo sapiens
  misc_RNA (1)...(19): siRNA sense strand
gaauugucaagcuggagaa

SEQ ID NO: 1635631 - RNA, 19 nt, Homo sapiens
  misc_RNA (1)...(19): siRNA sense strand
gcaauuguguuuggauuua

SEQ ID NO: 1635632 - RNA, 19 nt, Homo sapiens
  misc_RNA (1)...(19): siRNA sense strand
cuacuugacuuuaucacua

SEQ ID NO: 1635633 - RNA, 19 nt, Homo sapiens
  misc_RNA (1)...(19): siRNA sense strand
cggccucgcugccuacuuu

SEQ ID NO: 1635634 - RNA, 19 nt, Homo sapiens
  misc_RNA (1)...(19): siRNA sense strand
ucacuaugcuguaugaaaa

SEQ ID NO: 1635635 - RNA, 19 nt, Homo sapiens
  misc_RNA (1)...(19): siRNA sense strand
ugcagugccuuucuucuga

SEQ ID NO: 1635636 - RNA, 19 nt, Homo sapiens
  misc_RNA (1)...(19): siRNA sense strand
ucacugagccacuuaaugc

SEQ ID NO: 1635637 - RNA, 19 nt, Homo sapiens
  misc_RNA (1)...(19): siRNA sense strand
ccacaaaaguaaaaucauc

SEQ ID NO: 1635638 - RNA, 19 nt, Homo sapiens
  misc_RNA (1)...(19): siRNA sense strand
guguuuggauuuauagcaa

SEQ ID NO: 1635639 - RNA, 19 nt, Homo sapiens
  misc_RNA (1)...(19): siRNA sense strand
gacaggacuucagcugaga

SEQ ID NO: 1635640 - RNA, 19 nt, Homo sapiens
  misc_RNA (1)...(19): siRNA sense strand
guauugcacuccauuuuau

SEQ ID NO: 1635641 - RNA, 19 nt, Homo sapiens
  misc_RNA (1)...(19): siRNA sense strand
uuaucacuaugcuguauga

SEQ ID NO: 1635642 - RNA, 19 nt, Homo sapiens
  misc_RNA (1)...(19): siRNA sense strand
gagaaaaccugaaaauacc

SEQ ID NO: 1635643 - RNA, 19 nt, Homo sapiens
  misc_RNA (1)...(19): siRNA sense strand
ggacuucagcugagauugc

SEQ ID NO: 1635644 - RNA, 19 nt, Homo sapiens
  misc_RNA (1)...(19): siRNA sense strand
caucugugaagaaguugua

SEQ ID NO: 1635645 - RNA, 19 nt, Homo sapiens
  misc_RNA (1)...(19): siRNA sense strand
guuccuacuugacuuuauc

SEQ ID NO: 1635646 - RNA, 19 nt, Homo sapiens
  misc_RNA (1)...(19): siRNA sense strand
gagaguugauaccacaaaa

SEQ ID NO: 1635647 - RNA, 19 nt, Homo sapiens
  misc_RNA (1)...(19): siRNA sense strand
cugagucuccuuauacuga

SEQ ID NO: 1635648 - RNA, 19 nt, Homo sapiens
  misc_RNA (1)...(19): siRNA sense strand
cugcaauuguguuuggauu

SEQ ID NO: 1635649 - RNA, 19 nt, Homo sapiens
  misc_RNA (1)...(19): siRNA sense strand
guugauaccacaaaaguaa

SEQ ID NO: 1635650 - RNA, 19 nt, Homo sapiens
  misc_RNA (1)...(19): siRNA sense strand
gagucuccuuauacugauu

SEQ ID NO: 1635651 - RNA, 19 nt, Homo sapiens
  misc_RNA (1)...(19): siRNA sense strand
ugagaaaaccugaaaauac

SEQ ID NO: 1635652 - RNA, 19 nt, Homo sapiens
  misc_RNA (1)...(19): siRNA sense strand
aagcugcagugccuuucuu

SEQ ID NO: 1635653 - RNA, 19 nt, Homo sapiens
  misc_RNA (1)...(19): siRNA sense strand
ucuucugagucuccuuaua

SEQ ID NO: 1635654 - RNA, 19 nt, Homo sapiens
  misc_RNA (1)...(19): siRNA sense strand
ugagccacuuaaugccuaa

SEQ ID NO: 1635655 - RNA, 19 nt, Homo sapiens
  misc_RNA (1)...(19): siRNA sense strand
uauguggaggacuuuauuu

SEQ ID NO: 1635656 - RNA, 19 nt, Homo sapiens
  misc_RNA (1)...(19): siRNA sense strand
uuguuggcauccaucauuu

SEQ ID NO: 1635657 - RNA, 19 nt, Homo sapiens
  misc_RNA (1)...(19): siRNA sense strand
uacuuuauguggaggacuu

SEQ ID NO: 1635658 - RNA, 19 nt, Homo sapiens
  misc_RNA (1)...(19): siRNA sense strand
gcaggcagaugaugaagua

SEQ ID NO: 1635659 - RNA, 19 nt, Homo sapiens
  misc_RNA (1)...(19): siRNA sense strand
cagcagagauccaagaaga

SEQ ID NO: 1635660 - RNA, 19 nt, Homo sapiens
  misc_RNA (1)...(19): siRNA sense strand
gaagacaugccgcuauuug

SEQ ID NO: 1635661 - RNA, 19 nt, Homo sapiens
  misc_RNA (1)...(19): siRNA sense strand
gcaaggauguguacaacag

SEQ ID NO: 1635662 - RNA, 19 nt, Homo sapiens
  misc_RNA (1)...(19): siRNA sense strand
gagcugguguuggccaaua

SEQ ID NO: 1635663 - RNA, 19 nt, Homo sapiens
  misc_RNA (1)...(19): siRNA sense strand
gaacuucaccuugagcauu

SEQ ID NO: 1635664 - RNA, 19 nt, Homo sapiens
  misc_RNA (1)...(19): siRNA sense strand
cagcacaagugauaagaug

SEQ ID NO: 1635665 - RNA, 19 nt, Homo sapiens
  misc_RNA (1)...(19): siRNA sense strand
uagcagagauugaagacau

SEQ ID NO: 1635666 - RNA, 19 nt, Homo sapiens
  misc_RNA (1)...(19): siRNA sense strand
ccgcagagccacaguguuu

SEQ ID NO: 1635667 - RNA, 19 nt, Homo sapiens
  misc_RNA (1)...(19): siRNA sense strand
caauauugcugaaagugau

SEQ ID NO: 1635668 - RNA, 19 nt, Homo sapiens
  misc_RNA (1)...(19): siRNA sense strand
ugaugucacuggagaagaa

SEQ ID NO: 1635669 - RNA, 19 nt, Homo sapiens
  misc_RNA (1)...(19): siRNA sense strand
gagcauagugggcuguauu

SEQ ID NO: 1635670 - RNA, 19 nt, Homo sapiens
  misc_RNA (1)...(19): siRNA sense strand
acacuucguugccacauug

SEQ ID NO: 1635671 - RNA, 19 nt, Homo sapiens
  misc_RNA (1)...(19): siRNA sense strand
gcuguggccuacaucauug

SEQ ID NO: 1635672 - RNA, 19 nt, Homo sapiens
  misc_RNA (1)...(19): siRNA sense strand
ccaagcggcugcagaagca

SEQ ID NO: 1635673 - RNA, 19 nt, Homo sapiens
  misc_RNA (1)...(19): siRNA sense strand
cagagugggugacagacaa

SEQ ID NO: 1635674 - RNA, 19 nt, Homo sapiens
  misc_RNA (1)...(19): siRNA sense strand
gagggugacuucucuacca

SEQ ID NO: 1635675 - RNA, 19 nt, Homo sapiens
  misc_RNA (1)...(19): siRNA sense strand
agccagaacuucaccuuga

SEQ ID NO: 1635676 - RNA, 19 nt, Homo sapiens
  misc_RNA (1)...(19): siRNA sense strand
gagaugacgcuggcaacua

SEQ ID NO: 1635677 - RNA, 19 nt, Homo sapiens
  misc_RNA (1)...(19): siRNA sense strand
ggacuuggcugcgcguaac

SEQ ID NO: 1635678 - RNA, 19 nt, Homo sapiens
  misc_RNA (1)...(19): siRNA sense strand
cgccacagcacaagugaua

SEQ ID NO: 1635679 - RNA, 19 nt, Homo sapiens
  misc_RNA (1)...(19): siRNA sense strand
gaggaggccauguuccauu

SEQ ID NO: 1635680 - RNA, 19 nt, Homo sapiens
  misc_RNA (1)...(19): siRNA sense strand
gguaugaggaggccauguu

SEQ ID NO: 1635681 - RNA, 19 nt, Homo sapiens
  misc_RNA (1)...(19): siRNA sense strand
caaacucuaucggcugaug

SEQ ID NO: 1635682 - RNA, 19 nt, Homo sapiens
  misc_RNA (1)...(19): siRNA sense strand
augaaguacuggcagauuu

SEQ ID NO: 1635683 - RNA, 19 nt, Homo sapiens
  misc_RNA (1)...(19): siRNA sense strand
uugaagacaugccgcuauu

SEQ ID NO: 1635684 - RNA, 19 nt, Homo sapiens
  misc_RNA (1)...(19): siRNA sense strand
ccaauauugcugaaaguga

SEQ ID NO: 1635685 - RNA, 19 nt, Homo sapiens
  misc_RNA (1)...(19): siRNA sense strand
gcugaugugggaaguguuu

SEQ ID NO: 1635686 - RNA, 19 nt, Homo sapiens
  misc_RNA (1)...(19): siRNA sense strand
gcacaagugauaagaugca

SEQ ID NO: 1635687 - RNA, 19 nt, Homo sapiens
  misc_RNA (1)...(19): siRNA sense strand
gcagagauccaagaagaag

SEQ ID NO: 1635688 - RNA, 19 nt, Homo sapiens
  misc_RNA (1)...(19): siRNA sense strand
gcgaggagccagagaugga

SEQ ID NO: 1635689 - RNA, 19 nt, Homo sapiens
  misc_RNA (1)...(19): siRNA sense strand
gccaacgccuccuucaaca

SEQ ID NO: 1635690 - RNA, 19 nt, Homo sapiens
  misc_RNA (1)...(19): siRNA sense strand
cauguuccauugccaguuc

SEQ ID NO: 1635691 - RNA, 19 nt, Homo sapiens
  misc_RNA (1)...(19): siRNA sense strand
acacuugcauugccuccaa

SEQ ID NO: 1635692 - RNA, 19 nt, Homo sapiens
  misc_RNA (1)...(19): siRNA sense strand
gaugaaguacuggcagauu

SEQ ID NO: 1635693 - RNA, 19 nt, Homo sapiens
  misc_RNA (1)...(19): siRNA sense strand
gcaagaagcgcugcaaagc

SEQ ID NO: 1635694 - RNA, 19 nt, Homo sapiens
  misc_RNA (1)...(19): siRNA sense strand
caacgccuccuucaacauc

SEQ ID NO: 1635695 - RNA, 19 nt, Homo sapiens
  misc_RNA (1)...(19): siRNA sense strand
aagaugauccagaccauug

SEQ ID NO: 1635696 - RNA, 19 nt, Homo sapiens
  misc_RNA (1)...(19): siRNA sense strand
guuuacacauggagagaug

SEQ ID NO: 1635697 - RNA, 19 nt, Homo sapiens
  misc_RNA (1)...(19): siRNA sense strand
ggcagcagccugagcuuug

SEQ ID NO: 1635698 - RNA, 19 nt, Homo sapiens
  misc_RNA (1)...(19): siRNA sense strand
ggcagaugaugaaguacug

SEQ ID NO: 1635699 - RNA, 19 nt, Homo sapiens
  misc_RNA (1)...(19): siRNA sense strand
agaugacgcuggcaacuac

SEQ ID NO: 1635700 - RNA, 19 nt, Homo sapiens
  misc_RNA (1)...(19): siRNA sense strand
ugaaguacuggcagauuug

SEQ ID NO: 1635701 - RNA, 19 nt, Homo sapiens
  misc_RNA (1)...(19): siRNA sense strand
gugcugaugugggaagugu

SEQ ID NO: 1635702 - RNA, 19 nt, Homo sapiens
  misc_RNA (1)...(19): siRNA sense strand
cagcaaggauguguacaac

SEQ ID NO: 1635703 - RNA, 19 nt, Homo sapiens
  misc_RNA (1)...(19): siRNA sense strand
ccucaacggugggccuuug

SEQ ID NO: 1635704 - RNA, 19 nt, Homo sapiens
  misc_RNA (1)...(19): siRNA sense strand
ucaccuagcagagauugaa

SEQ ID NO: 1635705 - RNA, 19 nt, Homo sapiens
  misc_RNA (1)...(19): siRNA sense strand
cagcugguccugagcauag

SEQ ID NO: 1635706 - RNA, 19 nt, Homo sapiens
  misc_RNA (1)...(19): siRNA sense strand
ggccuucggugugcugaug

SEQ ID NO: 1635707 - RNA, 19 nt, Homo sapiens
  misc_RNA (1)...(19): siRNA sense strand
ggccaauauugcugaaagu

SEQ ID NO: 1635708 - RNA, 19 nt, Homo sapiens
  misc_RNA (1)...(19): siRNA sense strand
aggaggccauguuccauug

SEQ ID NO: 1635709 - RNA, 19 nt, Homo sapiens
  misc_RNA (1)...(19): siRNA sense strand
cauugcugaugaaagcuuu

SEQ ID NO: 1635710 - RNA, 19 nt, Homo sapiens
  misc_RNA (1)...(19): siRNA sense strand
aaccagagcguacgacugu

SEQ ID NO: 1635711 - RNA, 19 nt, Homo sapiens
  misc_RNA (1)...(19): siRNA sense strand
aagaagaaguggccuugac

SEQ ID NO: 1635712 - RNA, 19 nt, Homo sapiens
  misc_RNA (1)...(19): siRNA sense strand
gggcagcagccugagcuuu

SEQ ID NO: 1635713 - RNA, 19 nt, Homo sapiens
  misc_RNA (1)...(19): siRNA sense strand
ccacagcacaagugauaag

SEQ ID NO: 1635714 - RNA, 19 nt, Homo sapiens
  misc_RNA (1)...(19): siRNA sense strand
acaagaugauccagaccau

SEQ ID NO: 1635715 - RNA, 19 nt, Homo sapiens
  misc_RNA (1)...(19): siRNA sense strand
aacuucaccuugagcauug

SEQ ID NO: 1635716 - RNA, 19 nt, Homo sapiens
  misc_RNA (1)...(19): siRNA sense strand
caagaugauccagaccauu

SEQ ID NO: 1635717 - RNA, 19 nt, Homo sapiens
  misc_RNA (1)...(19): siRNA sense strand
ucagcaaggauguguacaa

SEQ ID NO: 1635718 - RNA, 19 nt, Homo sapiens
  misc_RNA (1)...(19): siRNA sense strand
gcagaagguggcccuaugc

SEQ ID NO: 1635719 - RNA, 19 nt, Homo sapiens
  misc_RNA (1)...(19): siRNA sense strand
gcagccagaacuucaccuu

SEQ ID NO: 1635720 - RNA, 19 nt, Homo sapiens
  misc_RNA (1)...(19): siRNA sense strand
gcagcagccugagcuuugc

SEQ ID NO: 1635721 - RNA, 19 nt, Homo sapiens
  misc_RNA (1)...(19): siRNA sense strand
ggucagugcccagagacaa

SEQ ID NO: 1635722 - RNA, 19 nt, Homo sapiens
  misc_RNA (1)...(19): siRNA sense strand
ccagauucgugcccauguc

SEQ ID NO: 1635723 - RNA, 19 nt, Homo sapiens
  misc_RNA (1)...(19): siRNA sense strand
uggccaauauugcugaaag

SEQ ID NO: 1635724 - RNA, 19 nt, Homo sapiens
  misc_RNA (1)...(19): siRNA sense strand
gggaucuaccgcugcauug

SEQ ID NO: 1635725 - RNA, 19 nt, Homo sapiens
  misc_RNA (1)...(19): siRNA sense strand
gccagaacuucaccuugag

SEQ ID NO: 1635726 - RNA, 19 nt, Homo sapiens
  misc_RNA (1)...(19): siRNA sense strand
cagagcaaccacacaguca

SEQ ID NO: 1635727 - RNA, 19 nt, Homo sapiens
  misc_RNA (1)...(19): siRNA sense strand
augagacucccaucacuaa

SEQ ID NO: 1635728 - RNA, 19 nt, Homo sapiens
  misc_RNA (1)...(19): siRNA sense strand
guacccagacagccauugu

SEQ ID NO: 1635729 - RNA, 19 nt, Homo sapiens
  misc_RNA (1)...(19): siRNA sense strand
gcaguggcucuuugaggau

SEQ ID NO: 1635730 - RNA, 19 nt, Homo sapiens
  misc_RNA (1)...(19): siRNA sense strand
acgcugggacccugcauuu

SEQ ID NO: 1635731 - RNA, 19 nt, Homo sapiens
  misc_RNA (1)...(19): siRNA sense strand
aagacaugccgcuauuuga

SEQ ID NO: 1635732 - RNA, 19 nt, Homo sapiens
  misc_RNA (1)...(19): siRNA sense strand
acacuucaccuagcagaga

SEQ ID NO: 1635733 - RNA, 19 nt, Homo sapiens
  misc_RNA (1)...(19): siRNA sense strand
gcauugcugaugaaagcuu

SEQ ID NO: 1635734 - RNA, 19 nt, Homo sapiens
  misc_RNA (1)...(19): siRNA sense strand
ccuggagggugacuucucu

SEQ ID NO: 1635735 - RNA, 19 nt, Homo sapiens
  misc_RNA (1)...(19): siRNA sense strand
agcagaagguggcccuaug

SEQ ID NO: 1635736 - RNA, 19 nt, Homo sapiens
  misc_RNA (1)...(19): siRNA sense strand
aaacgccacagcacaagug

SEQ ID NO: 1635737 - RNA, 19 nt, Homo sapiens
  misc_RNA (1)...(19): siRNA sense strand
ugaagacaugccgcuauuu

SEQ ID NO: 1635738 - RNA, 19 nt, Homo sapiens
  misc_RNA (1)...(19): siRNA sense strand
guaugaggaggccauguuc

SEQ ID NO: 1635739 - RNA, 19 nt, Homo sapiens
  misc_RNA (1)...(19): siRNA sense strand
cagccauugucuucaucaa

SEQ ID NO: 1635740 - RNA, 19 nt, Homo sapiens
  misc_RNA (1)...(19): siRNA sense strand
cacacuucguugccacauu

SEQ ID NO: 1635741 - RNA, 19 nt, Homo sapiens
  misc_RNA (1)...(19): siRNA sense strand
caaccgcuuugugcauaag

SEQ ID NO: 1635742 - RNA, 19 nt, Homo sapiens
  misc_RNA (1)...(19): siRNA sense strand
gaugaugucacuggagaag

SEQ ID NO: 1635743 - RNA, 19 nt, Homo sapiens
  misc_RNA (1)...(19): siRNA sense strand
aaagugaugcuggugucua

SEQ ID NO: 1635744 - RNA, 19 nt, Homo sapiens
  misc_RNA (1)...(19): siRNA sense strand
gcaggcagaugaugaagua

SEQ ID NO: 1635745 - RNA, 19 nt, Homo sapiens
  misc_RNA (1)...(19): siRNA sense strand
cagcagagauccaagaaga

SEQ ID NO: 1635746 - RNA, 19 nt, Homo sapiens
  misc_RNA (1)...(19): siRNA sense strand
gaagacaugccgcuauuug

SEQ ID NO: 1635747 - RNA, 19 nt, Homo sapiens
  misc_RNA (1)...(19): siRNA sense strand
gcaaggauguguacaacag

SEQ ID NO: 1635748 - RNA, 19 nt, Homo sapiens
  misc_RNA (1)...(19): siRNA sense strand
gagcugguguuggccaaua

SEQ ID NO: 1635749 - RNA, 19 nt, Homo sapiens
  misc_RNA (1)...(19): siRNA sense strand
gaacuucaccuugagcauu

SEQ ID NO: 1635750 - RNA, 19 nt, Homo sapiens
  misc_RNA (1)...(19): siRNA sense strand
cagcacaagugauaagaug

SEQ ID NO: 1635751 - RNA, 19 nt, Homo sapiens
  misc_RNA (1)...(19): siRNA sense strand
uagcagagauugaagacau

SEQ ID NO: 1635752 - RNA, 19 nt, Homo sapiens
  misc_RNA (1)...(19): siRNA sense strand
ccgcagagccacaguguuu

SEQ ID NO: 1635753 - RNA, 19 nt, Homo sapiens
  misc_RNA (1)...(19): siRNA sense strand
caauauugcugaaagugau

SEQ ID NO: 1635754 - RNA, 19 nt, Homo sapiens
  misc_RNA (1)...(19): siRNA sense strand
ugaugucacuggagaagaa

SEQ ID NO: 1635755 - RNA, 19 nt, Homo sapiens
  misc_RNA (1)...(19): siRNA sense strand
gagcauagugggcuguauu

SEQ ID NO: 1635756 - RNA, 19 nt, Homo sapiens
  misc_RNA (1)...(19): siRNA sense strand
acacuucguugccacauug

SEQ ID NO: 1635757 - RNA, 19 nt, Homo sapiens
  misc_RNA (1)...(19): siRNA sense strand
gcuguggccuacaucauug

SEQ ID NO: 1635758 - RNA, 19 nt, Homo sapiens
  misc_RNA (1)...(19): siRNA sense strand
ccaagcggcugcagaagca

SEQ ID NO: 1635759 - RNA, 19 nt, Homo sapiens
  misc_RNA (1)...(19): siRNA sense strand
cagagugggugacagacaa

SEQ ID NO: 1635760 - RNA, 19 nt, Homo sapiens
  misc_RNA (1)...(19): siRNA sense strand
gagggugacuucucuacca

SEQ ID NO: 1635761 - RNA, 19 nt, Homo sapiens
  misc_RNA (1)...(19): siRNA sense strand
agccagaacuucaccuuga

SEQ ID NO: 1635762 - RNA, 19 nt, Homo sapiens
  misc_RNA (1)...(19): siRNA sense strand
gagaugacgcuggcaacua

SEQ ID NO: 1635763 - RNA, 19 nt, Homo sapiens
  misc_RNA (1)...(19): siRNA sense strand
ggacuuggcugcgcguaac

SEQ ID NO: 1635764 - RNA, 19 nt, Homo sapiens
  misc_RNA (1)...(19): siRNA sense strand
cgccacagcacaagugaua

SEQ ID NO: 1635765 - RNA, 19 nt, Homo sapiens
  misc_RNA (1)...(19): siRNA sense strand
gaggaggccauguuccauu

SEQ ID NO: 1635766 - RNA, 19 nt, Homo sapiens
  misc_RNA (1)...(19): siRNA sense strand
gguaugaggaggccauguu

SEQ ID NO: 1635767 - RNA, 19 nt, Homo sapiens
  misc_RNA (1)...(19): siRNA sense strand
caaacucuaucggcugaug

SEQ ID NO: 1635768 - RNA, 19 nt, Homo sapiens
  misc_RNA (1)...(19): siRNA sense strand
augaaguacuggcagauuu

SEQ ID NO: 1635769 - RNA, 19 nt, Homo sapiens
  misc_RNA (1)...(19): siRNA sense strand
uugaagacaugccgcuauu

SEQ ID NO: 1635770 - RNA, 19 nt, Homo sapiens
  misc_RNA (1)...(19): siRNA sense strand
ccaauauugcugaaaguga

SEQ ID NO: 1635771 - RNA, 19 nt, Homo sapiens
  misc_RNA (1)...(19): siRNA sense strand
gcugaugugggaaguguuu

SEQ ID NO: 1635772 - RNA, 19 nt, Homo sapiens
  misc_RNA (1)...(19): siRNA sense strand
gcacaagugauaagaugca

SEQ ID NO: 1635773 - RNA, 19 nt, Homo sapiens
  misc_RNA (1)...(19): siRNA sense strand
gcagagauccaagaagaag

SEQ ID NO: 1635774 - RNA, 19 nt, Homo sapiens
  misc_RNA (1)...(19): siRNA sense strand
gcgaggagccagagaugga

SEQ ID NO: 1635775 - RNA, 19 nt, Homo sapiens
  misc_RNA (1)...(19): siRNA sense strand
gccaacgccuccuucaaca

SEQ ID NO: 1635776 - RNA, 19 nt, Homo sapiens
  misc_RNA (1)...(19): siRNA sense strand
cauguuccauugccaguuc

SEQ ID NO: 1635777 - RNA, 19 nt, Homo sapiens
  misc_RNA (1)...(19): siRNA sense strand
acacuugcauugccuccaa

SEQ ID NO: 1635778 - RNA, 19 nt, Homo sapiens
  misc_RNA (1)...(19): siRNA sense strand
gaugaaguacuggcagauu

SEQ ID NO: 1635779 - RNA, 19 nt, Homo sapiens
  misc_RNA (1)...(19): siRNA sense strand
gcaagaagcgcugcaaagc

SEQ ID NO: 1635780 - RNA, 19 nt, Homo sapiens
  misc_RNA (1)...(19): siRNA sense strand
caacgccuccuucaacauc

SEQ ID NO: 1635781 - RNA, 19 nt, Homo sapiens
  misc_RNA (1)...(19): siRNA sense strand
aagaugauccagaccauug

SEQ ID NO: 1635782 - RNA, 19 nt, Homo sapiens
  misc_RNA (1)...(19): siRNA sense strand
guuuacacauggagagaug

SEQ ID NO: 1635783 - RNA, 19 nt, Homo sapiens
  misc_RNA (1)...(19): siRNA sense strand
ggcagcagccugagcuuug

SEQ ID NO: 1635784 - RNA, 19 nt, Homo sapiens
  misc_RNA (1)...(19): siRNA sense strand
ggcagaugaugaaguacug

SEQ ID NO: 1635785 - RNA, 19 nt, Homo sapiens
  misc_RNA (1)...(19): siRNA sense strand
agaugacgcuggcaacuac

SEQ ID NO: 1635786 - RNA, 19 nt, Homo sapiens
  misc_RNA (1)...(19): siRNA sense strand
ugaaguacuggcagauuug

SEQ ID NO: 1635787 - RNA, 19 nt, Homo sapiens
  misc_RNA (1)...(19): siRNA sense strand
gugcugaugugggaagugu

SEQ ID NO: 1635788 - RNA, 19 nt, Homo sapiens
  misc_RNA (1)...(19): siRNA sense strand
cagcaaggauguguacaac

SEQ ID NO: 1635789 - RNA, 19 nt, Homo sapiens
  misc_RNA (1)...(19): siRNA sense strand
ccucaacggugggccuuug

SEQ ID NO: 1635790 - RNA, 19 nt, Homo sapiens
  misc_RNA (1)...(19): siRNA sense strand
ucaccuagcagagauugaa

SEQ ID NO: 1635791 - RNA, 19 nt, Homo sapiens
  misc_RNA (1)...(19): siRNA sense strand
cagcugguccugagcauag

SEQ ID NO: 1635792 - RNA, 19 nt, Homo sapiens
  misc_RNA (1)...(19): siRNA sense strand
ggccuucggugugcugaug

SEQ ID NO: 1635793 - RNA, 19 nt, Homo sapiens
  misc_RNA (1)...(19): siRNA sense strand
ggccaauauugcugaaagu

SEQ ID NO: 1635794 - RNA, 19 nt, Homo sapiens
  misc_RNA (1)...(19): siRNA sense strand
aggaggccauguuccauug

SEQ ID NO: 1635795 - RNA, 19 nt, Homo sapiens
  misc_RNA (1)...(19): siRNA sense strand
cauugcugaugaaagcuuu

SEQ ID NO: 1635796 - RNA, 19 nt, Homo sapiens
  misc_RNA (1)...(19): siRNA sense strand
aaccagagcguacgacugu

SEQ ID NO: 1635797 - RNA, 19 nt, Homo sapiens
  misc_RNA (1)...(19): siRNA sense strand
aagaagaaguggccuugac

SEQ ID NO: 1635798 - RNA, 19 nt, Homo sapiens
  misc_RNA (1)...(19): siRNA sense strand
gggcagcagccugagcuuu

SEQ ID NO: 1635799 - RNA, 19 nt, Homo sapiens
  misc_RNA (1)...(19): siRNA sense strand
ccacagcacaagugauaag

SEQ ID NO: 1635800 - RNA, 19 nt, Homo sapiens
  misc_RNA (1)...(19): siRNA sense strand
acaagaugauccagaccau

SEQ ID NO: 1635801 - RNA, 19 nt, Homo sapiens
  misc_RNA (1)...(19): siRNA sense strand
aacuucaccuugagcauug

SEQ ID NO: 1635802 - RNA, 19 nt, Homo sapiens
  misc_RNA (1)...(19): siRNA sense strand
caagaugauccagaccauu

SEQ ID NO: 1635803 - RNA, 19 nt, Homo sapiens
  misc_RNA (1)...(19): siRNA sense strand
ucagcaaggauguguacaa

SEQ ID NO: 1635804 - RNA, 19 nt, Homo sapiens
  misc_RNA (1)...(19): siRNA sense strand
gcagaagguggcccuaugc

SEQ ID NO: 1635805 - RNA, 19 nt, Homo sapiens
  misc_RNA (1)...(19): siRNA sense strand
gcagccagaacuucaccuu

SEQ ID NO: 1635806 - RNA, 19 nt, Homo sapiens
  misc_RNA (1)...(19): siRNA sense strand
gcagcagccugagcuuugc

SEQ ID NO: 1635807 - RNA, 19 nt, Homo sapiens
  misc_RNA (1)...(19): siRNA sense strand
ggucagugcccagagacaa

SEQ ID NO: 1635808 - RNA, 19 nt, Homo sapiens
  misc_RNA (1)...(19): siRNA sense strand
ccagauucgugcccauguc

SEQ ID NO: 1635809 - RNA, 19 nt, Homo sapiens
  misc_RNA (1)...(19): siRNA sense strand
uggccaauauugcugaaag

SEQ ID NO: 1635810 - RNA, 19 nt, Homo sapiens
  misc_RNA (1)...(19): siRNA sense strand
gggaucuaccgcugcauug

SEQ ID NO: 1635811 - RNA, 19 nt, Homo sapiens
  misc_RNA (1)...(19): siRNA sense strand
gccagaacuucaccuugag

SEQ ID NO: 1635812 - RNA, 19 nt, Homo sapiens
  misc_RNA (1)...(19): siRNA sense strand
cagagcaaccacacaguca

SEQ ID NO: 1635813 - RNA, 19 nt, Homo sapiens
  misc_RNA (1)...(19): siRNA sense strand
augagacucccaucacuaa

SEQ ID NO: 1635814 - RNA, 19 nt, Homo sapiens
  misc_RNA (1)...(19): siRNA sense strand
guacccagacagccauugu

SEQ ID NO: 1635815 - RNA, 19 nt, Homo sapiens
  misc_RNA (1)...(19): siRNA sense strand
gcaguggcucuuugaggau

SEQ ID NO: 1635816 - RNA, 19 nt, Homo sapiens
  misc_RNA (1)...(19): siRNA sense strand
acgcugggacccugcauuu

SEQ ID NO: 1635817 - RNA, 19 nt, Homo sapiens
  misc_RNA (1)...(19): siRNA sense strand
aagacaugccgcuauuuga

SEQ ID NO: 1635818 - RNA, 19 nt, Homo sapiens
  misc_RNA (1)...(19): siRNA sense strand
acacuucaccuagcagaga

SEQ ID NO: 1635819 - RNA, 19 nt, Homo sapiens
  misc_RNA (1)...(19): siRNA sense strand
gcauugcugaugaaagcuu

SEQ ID NO: 1635820 - RNA, 19 nt, Homo sapiens
  misc_RNA (1)...(19): siRNA sense strand
ccuggagggugacuucucu

SEQ ID NO: 1635821 - RNA, 19 nt, Homo sapiens
  misc_RNA (1)...(19): siRNA sense strand
agcagaagguggcccuaug

SEQ ID NO: 1635822 - RNA, 19 nt, Homo sapiens
  misc_RNA (1)...(19): siRNA sense strand
aaacgccacagcacaagug

SEQ ID NO: 1635823 - RNA, 19 nt, Homo sapiens
  misc_RNA (1)...(19): siRNA sense strand
ugaagacaugccgcuauuu

SEQ ID NO: 1635824 - RNA, 19 nt, Homo sapiens
  misc_RNA (1)...(19): siRNA sense strand
guaugaggaggccauguuc

SEQ ID NO: 1635825 - RNA, 19 nt, Homo sapiens
  misc_RNA (1)...(19): siRNA sense strand
cagccauugucuucaucaa

SEQ ID NO: 1635826 - RNA, 19 nt, Homo sapiens
  misc_RNA (1)...(19): siRNA sense strand
cacacuucguugccacauu

SEQ ID NO: 1635827 - RNA, 19 nt, Homo sapiens
  misc_RNA (1)...(19): siRNA sense strand
caaccgcuuugugcauaag

SEQ ID NO: 1635828 - RNA, 19 nt, Homo sapiens
  misc_RNA (1)...(19): siRNA sense strand
gaugaugucacuggagaag

SEQ ID NO: 1635829 - RNA, 19 nt, Homo sapiens
  misc_RNA (1)...(19): siRNA sense strand
aaagugaugcuggugucua

SEQ ID NO: 1635830 - RNA, 19 nt, Homo sapiens
  misc_RNA (1)...(19): siRNA sense strand
gcaggcagaugaugaagua

SEQ ID NO: 1635831 - RNA, 19 nt, Homo sapiens
  misc_RNA (1)...(19): siRNA sense strand
cagcagagauccaagaaga

SEQ ID NO: 1635832 - RNA, 19 nt, Homo sapiens
  misc_RNA (1)...(19): siRNA sense strand
gaagacaugccgcuauuug

SEQ ID NO: 1635833 - RNA, 19 nt, Homo sapiens
  misc_RNA (1)...(19): siRNA sense strand
gcaaggauguguacaacag

SEQ ID NO: 1635834 - RNA, 19 nt, Homo sapiens
  misc_RNA (1)...(19): siRNA sense strand
gagcugguguuggccaaua

SEQ ID NO: 1635835 - RNA, 19 nt, Homo sapiens
  misc_RNA (1)...(19): siRNA sense strand
gaacuucaccuugagcauu

SEQ ID NO: 1635836 - RNA, 19 nt, Homo sapiens
  misc_RNA (1)...(19): siRNA sense strand
cagcacaagugauaagaug

SEQ ID NO: 1635837 - RNA, 19 nt, Homo sapiens
  misc_RNA (1)...(19): siRNA sense strand
uagcagagauugaagacau

SEQ ID NO: 1635838 - RNA, 19 nt, Homo sapiens
  misc_RNA (1)...(19): siRNA sense strand
ccgcagagccacaguguuu

SEQ ID NO: 1635839 - RNA, 19 nt, Homo sapiens
  misc_RNA (1)...(19): siRNA sense strand
caauauugcugaaagugau

SEQ ID NO: 1635840 - RNA, 19 nt, Homo sapiens
  misc_RNA (1)...(19): siRNA sense strand
ugaugucacuggagaagaa

SEQ ID NO: 1635841 - RNA, 19 nt, Homo sapiens
  misc_RNA (1)...(19): siRNA sense strand
gagcauagugggcuguauu

SEQ ID NO: 1635842 - RNA, 19 nt, Homo sapiens
  misc_RNA (1)...(19): siRNA sense strand
acacuucguugccacauug

SEQ ID NO: 1635843 - RNA, 19 nt, Homo sapiens
  misc_RNA (1)...(19): siRNA sense strand
gcuguggccuacaucauug

SEQ ID NO: 1635844 - RNA, 19 nt, Homo sapiens
  misc_RNA (1)...(19): siRNA sense strand
ccaagcggcugcagaagca

SEQ ID NO: 1635845 - RNA, 19 nt, Homo sapiens
  misc_RNA (1)...(19): siRNA sense strand
cagagugggugacagacaa

SEQ ID NO: 1635846 - RNA, 19 nt, Homo sapiens
  misc_RNA (1)...(19): siRNA sense strand
gagggugacuucucuacca

SEQ ID NO: 1635847 - RNA, 19 nt, Homo sapiens
  misc_RNA (1)...(19): siRNA sense strand
agccagaacuucaccuuga

SEQ ID NO: 1635848 - RNA, 19 nt, Homo sapiens
  misc_RNA (1)...(19): siRNA sense strand
gagaugacgcuggcaacua

SEQ ID NO: 1635849 - RNA, 19 nt, Homo sapiens
  misc_RNA (1)...(19): siRNA sense strand
ggacuuggcugcgcguaac

SEQ ID NO: 1635850 - RNA, 19 nt, Homo sapiens
  misc_RNA (1)...(19): siRNA sense strand
cgccacagcacaagugaua

SEQ ID NO: 1635851 - RNA, 19 nt, Homo sapiens
  misc_RNA (1)...(19): siRNA sense strand
gaggaggccauguuccauu

SEQ ID NO: 1635852 - RNA, 19 nt, Homo sapiens
  misc_RNA (1)...(19): siRNA sense strand
gguaugaggaggccauguu

SEQ ID NO: 1635853 - RNA, 19 nt, Homo sapiens
  misc_RNA (1)...(19): siRNA sense strand
caaacucuaucggcugaug

SEQ ID NO: 1635854 - RNA, 19 nt, Homo sapiens
  misc_RNA (1)...(19): siRNA sense strand
augaaguacuggcagauuu

SEQ ID NO: 1635855 - RNA, 19 nt, Homo sapiens
  misc_RNA (1)...(19): siRNA sense strand
uugaagacaugccgcuauu

SEQ ID NO: 1635856 - RNA, 19 nt, Homo sapiens
  misc_RNA (1)...(19): siRNA sense strand
ccaauauugcugaaaguga

SEQ ID NO: 1635857 - RNA, 19 nt, Homo sapiens
  misc_RNA (1)...(19): siRNA sense strand
gcugaugugggaaguguuu

SEQ ID NO: 1635858 - RNA, 19 nt, Homo sapiens
  misc_RNA (1)...(19): siRNA sense strand
gcacaagugauaagaugca

SEQ ID NO: 1635859 - RNA, 19 nt, Homo sapiens
  misc_RNA (1)...(19): siRNA sense strand
gcagagauccaagaagaag

SEQ ID NO: 1635860 - RNA, 19 nt, Homo sapiens
  misc_RNA (1)...(19): siRNA sense strand
gcgaggagccagagaugga

SEQ ID NO: 1635861 - RNA, 19 nt, Homo sapiens
  misc_RNA (1)...(19): siRNA sense strand
gccaacgccuccuucaaca

SEQ ID NO: 1635862 - RNA, 19 nt, Homo sapiens
  misc_RNA (1)...(19): siRNA sense strand
cauguuccauugccaguuc

SEQ ID NO: 1635863 - RNA, 19 nt, Homo sapiens
  misc_RNA (1)...(19): siRNA sense strand
acacuugcauugccuccaa

SEQ ID NO: 1635864 - RNA, 19 nt, Homo sapiens
  misc_RNA (1)...(19): siRNA sense strand
gaugaaguacuggcagauu

SEQ ID NO: 1635865 - RNA, 19 nt, Homo sapiens
  misc_RNA (1)...(19): siRNA sense strand
gcaagaagcgcugcaaagc

SEQ ID NO: 1635866 - RNA, 19 nt, Homo sapiens
  misc_RNA (1)...(19): siRNA sense strand
caacgccuccuucaacauc

SEQ ID NO: 1635867 - RNA, 19 nt, Homo sapiens
  misc_RNA (1)...(19): siRNA sense strand
aagaugauccagaccauug

SEQ ID NO: 1635868 - RNA, 19 nt, Homo sapiens
  misc_RNA (1)...(19): siRNA sense strand
guuuacacauggagagaug

SEQ ID NO: 1635869 - RNA, 19 nt, Homo sapiens
  misc_RNA (1)...(19): siRNA sense strand
ggcagcagccugagcuuug

SEQ ID NO: 1635870 - RNA, 19 nt, Homo sapiens
  misc_RNA (1)...(19): siRNA sense strand
ggcagaugaugaaguacug

SEQ ID NO: 1635871 - RNA, 19 nt, Homo sapiens
  misc_RNA (1)...(19): siRNA sense strand
agaugacgcuggcaacuac

SEQ ID NO: 1635872 - RNA, 19 nt, Homo sapiens
  misc_RNA (1)...(19): siRNA sense strand
ugaaguacuggcagauuug

SEQ ID NO: 1635873 - RNA, 19 nt, Homo sapiens
  misc_RNA (1)...(19): siRNA sense strand
gugcugaugugggaagugu

SEQ ID NO: 1635874 - RNA, 19 nt, Homo sapiens
  misc_RNA (1)...(19): siRNA sense strand
cagcaaggauguguacaac

SEQ ID NO: 1635875 - RNA, 19 nt, Homo sapiens
  misc_RNA (1)...(19): siRNA sense strand
ccucaacggugggccuuug

SEQ ID NO: 1635876 - RNA, 19 nt, Homo sapiens
  misc_RNA (1)...(19): siRNA sense strand
ucaccuagcagagauugaa

SEQ ID NO: 1635877 - RNA, 19 nt, Homo sapiens
  misc_RNA (1)...(19): siRNA sense strand
cagcugguccugagcauag

SEQ ID NO: 1635878 - RNA, 19 nt, Homo sapiens
  misc_RNA (1)...(19): siRNA sense strand
ggccuucggugugcugaug

SEQ ID NO: 1635879 - RNA, 19 nt, Homo sapiens
  misc_RNA (1)...(19): siRNA sense strand
ggccaauauugcugaaagu

SEQ ID NO: 1635880 - RNA, 19 nt, Homo sapiens
  misc_RNA (1)...(19): siRNA sense strand
aggaggccauguuccauug

SEQ ID NO: 1635881 - RNA, 19 nt, Homo sapiens
  misc_RNA (1)...(19): siRNA sense strand
cauugcugaugaaagcuuu

SEQ ID NO: 1635882 - RNA, 19 nt, Homo sapiens
  misc_RNA (1)...(19): siRNA sense strand
aaccagagcguacgacugu

SEQ ID NO: 1635883 - RNA, 19 nt, Homo sapiens
  misc_RNA (1)...(19): siRNA sense strand
aagaagaaguggccuugac

SEQ ID NO: 1635884 - RNA, 19 nt, Homo sapiens
  misc_RNA (1)...(19): siRNA sense strand
gggcagcagccugagcuuu

SEQ ID NO: 1635885 - RNA, 19 nt, Homo sapiens
  misc_RNA (1)...(19): siRNA sense strand
ccacagcacaagugauaag

SEQ ID NO: 1635886 - RNA, 19 nt, Homo sapiens
  misc_RNA (1)...(19): siRNA sense strand
acaagaugauccagaccau

SEQ ID NO: 1635887 - RNA, 19 nt, Homo sapiens
  misc_RNA (1)...(19): siRNA sense strand
aacuucaccuugagcauug

SEQ ID NO: 1635888 - RNA, 19 nt, Homo sapiens
  misc_RNA (1)...(19): siRNA sense strand
caagaugauccagaccauu

SEQ ID NO: 1635889 - RNA, 19 nt, Homo sapiens
  misc_RNA (1)...(19): siRNA sense strand
ucagcaaggauguguacaa

SEQ ID NO: 1635890 - RNA, 19 nt, Homo sapiens
  misc_RNA (1)...(19): siRNA sense strand
gcagaagguggcccuaugc

SEQ ID NO: 1635891 - RNA, 19 nt, Homo sapiens
  misc_RNA (1)...(19): siRNA sense strand
gcagccagaacuucaccuu

SEQ ID NO: 1635892 - RNA, 19 nt, Homo sapiens
  misc_RNA (1)...(19): siRNA sense strand
gcagcagccugagcuuugc

SEQ ID NO: 1635893 - RNA, 19 nt, Homo sapiens
  misc_RNA (1)...(19): siRNA sense strand
ggucagugcccagagacaa

SEQ ID NO: 1635894 - RNA, 19 nt, Homo sapiens
  misc_RNA (1)...(19): siRNA sense strand
ccagauucgugcccauguc

SEQ ID NO: 1635895 - RNA, 19 nt, Homo sapiens
  misc_RNA (1)...(19): siRNA sense strand
uggccaauauugcugaaag

SEQ ID NO: 1635896 - RNA, 19 nt, Homo sapiens
  misc_RNA (1)...(19): siRNA sense strand
gggaucuaccgcugcauug

SEQ ID NO: 1635897 - RNA, 19 nt, Homo sapiens
  misc_RNA (1)...(19): siRNA sense strand
gccagaacuucaccuugag

SEQ ID NO: 1635898 - RNA, 19 nt, Homo sapiens
  misc_RNA (1)...(19): siRNA sense strand
cagagcaaccacacaguca

SEQ ID NO: 1635899 - RNA, 19 nt, Homo sapiens
  misc_RNA (1)...(19): siRNA sense strand
augagacucccaucacuaa

SEQ ID NO: 1635900 - RNA, 19 nt, Homo sapiens
  misc_RNA (1)...(19): siRNA sense strand
guacccagacagccauugu

SEQ ID NO: 1635901 - RNA, 19 nt, Homo sapiens
  misc_RNA (1)...(19): siRNA sense strand
gcaguggcucuuugaggau

SEQ ID NO: 1635902 - RNA, 19 nt, Homo sapiens
  misc_RNA (1)...(19): siRNA sense strand
acgcugggacccugcauuu

SEQ ID NO: 1635903 - RNA, 19 nt, Homo sapiens
  misc_RNA (1)...(19): siRNA sense strand
aagacaugccgcuauuuga

SEQ ID NO: 1635904 - RNA, 19 nt, Homo sapiens
  misc_RNA (1)...(19): siRNA sense strand
acacuucaccuagcagaga

SEQ ID NO: 1635905 - RNA, 19 nt, Homo sapiens
  misc_RNA (1)...(19): siRNA sense strand
gcauugcugaugaaagcuu

SEQ ID NO: 1635906 - RNA, 19 nt, Homo sapiens
  misc_RNA (1)...(19): siRNA sense strand
ccuggagggugacuucucu

SEQ ID NO: 1635907 - RNA, 19 nt, Homo sapiens
  misc_RNA (1)...(19): siRNA sense strand
agcagaagguggcccuaug

SEQ ID NO: 1635908 - RNA, 19 nt, Homo sapiens
  misc_RNA (1)...(19): siRNA sense strand
aaacgccacagcacaagug

SEQ ID NO: 1635909 - RNA, 19 nt, Homo sapiens
  misc_RNA (1)...(19): siRNA sense strand
ugaagacaugccgcuauuu

SEQ ID NO: 1635910 - RNA, 19 nt, Homo sapiens
  misc_RNA (1)...(19): siRNA sense strand
guaugaggaggccauguuc

SEQ ID NO: 1635911 - RNA, 19 nt, Homo sapiens
  misc_RNA (1)...(19): siRNA sense strand
cagccauugucuucaucaa

SEQ ID NO: 1635912 - RNA, 19 nt, Homo sapiens
  misc_RNA (1)...(19): siRNA sense strand
cacacuucguugccacauu

SEQ ID NO: 1635913 - RNA, 19 nt, Homo sapiens
  misc_RNA (1)...(19): siRNA sense strand
caaccgcuuugugcauaag

SEQ ID NO: 1635914 - RNA, 19 nt, Homo sapiens
  misc_RNA (1)...(19): siRNA sense strand
gaugaugucacuggagaag

SEQ ID NO: 1635915 - RNA, 19 nt, Homo sapiens
  misc_RNA (1)...(19): siRNA sense strand
aaagugaugcuggugucua

SEQ ID NO: 1635916 - RNA, 19 nt, Homo sapiens
  misc_RNA (1)...(19): siRNA sense strand
gcaggcagaugaugaagua

SEQ ID NO: 1635917 - RNA, 19 nt, Homo sapiens
  misc_RNA (1)...(19): siRNA sense strand
cagcagagauccaagaaga

SEQ ID NO: 1635918 - RNA, 19 nt, Homo sapiens
  misc_RNA (1)...(19): siRNA sense strand
gaagacaugccgcuauuug

SEQ ID NO: 1635919 - RNA, 19 nt, Homo sapiens
  misc_RNA (1)...(19): siRNA sense strand
gcaaggauguguacaacag

SEQ ID NO: 1635920 - RNA, 19 nt, Homo sapiens
  misc_RNA (1)...(19): siRNA sense strand
gagcugguguuggccaaua

SEQ ID NO: 1635921 - RNA, 19 nt, Homo sapiens
  misc_RNA (1)...(19): siRNA sense strand
gaacuucaccuugagcauu

SEQ ID NO: 1635922 - RNA, 19 nt, Homo sapiens
  misc_RNA (1)...(19): siRNA sense strand
cagcacaagugauaagaug

SEQ ID NO: 1635923 - RNA, 19 nt, Homo sapiens
  misc_RNA (1)...(19): siRNA sense strand
uagcagagauugaagacau

SEQ ID NO: 1635924 - RNA, 19 nt, Homo sapiens
  misc_RNA (1)...(19): siRNA sense strand
ccgcagagccacaguguuu

SEQ ID NO: 1635925 - RNA, 19 nt, Homo sapiens
  misc_RNA (1)...(19): siRNA sense strand
caauauugcugaaagugau

SEQ ID NO: 1635926 - RNA, 19 nt, Homo sapiens
  misc_RNA (1)...(19): siRNA sense strand
ugaugucacuggagaagaa

SEQ ID NO: 1635927 - RNA, 19 nt, Homo sapiens
  misc_RNA (1)...(19): siRNA sense strand
gagcauagugggcuguauu

SEQ ID NO: 1635928 - RNA, 19 nt, Homo sapiens
  misc_RNA (1)...(19): siRNA sense strand
acacuucguugccacauug

SEQ ID NO: 1635929 - RNA, 19 nt, Homo sapiens
  misc_RNA (1)...(19): siRNA sense strand
gcuguggccuacaucauug

SEQ ID NO: 1635930 - RNA, 19 nt, Homo sapiens
  misc_RNA (1)...(19): siRNA sense strand
ccaagcggcugcagaagca

SEQ ID NO: 1635931 - RNA, 19 nt, Homo sapiens
  misc_RNA (1)...(19): siRNA sense strand
cagagugggugacagacaa

SEQ ID NO: 1635932 - RNA, 19 nt, Homo sapiens
  misc_RNA (1)...(19): siRNA sense strand
gagggugacuucucuacca

SEQ ID NO: 1635933 - RNA, 19 nt, Homo sapiens
  misc_RNA (1)...(19): siRNA sense strand
agccagaacuucaccuuga

SEQ ID NO: 1635934 - RNA, 19 nt, Homo sapiens
  misc_RNA (1)...(19): siRNA sense strand
gagaugacgcuggcaacua

SEQ ID NO: 1635935 - RNA, 19 nt, Homo sapiens
  misc_RNA (1)...(19): siRNA sense strand
ggacuuggcugcgcguaac

SEQ ID NO: 1635936 - RNA, 19 nt, Homo sapiens
  misc_RNA (1)...(19): siRNA sense strand
cgccacagcacaagugaua

SEQ ID NO: 1635937 - RNA, 19 nt, Homo sapiens
  misc_RNA (1)...(19): siRNA sense strand
gaggaggccauguuccauu

SEQ ID NO: 1635938 - RNA, 19 nt, Homo sapiens
  misc_RNA (1)...(19): siRNA sense strand
gguaugaggaggccauguu

SEQ ID NO: 1635939 - RNA, 19 nt, Homo sapiens
  misc_RNA (1)...(19): siRNA sense strand
caaacucuaucggcugaug

SEQ ID NO: 1635940 - RNA, 19 nt, Homo sapiens
  misc_RNA (1)...(19): siRNA sense strand
augaaguacuggcagauuu

SEQ ID NO: 1635941 - RNA, 19 nt, Homo sapiens
  misc_RNA (1)...(19): siRNA sense strand
uugaagacaugccgcuauu

SEQ ID NO: 1635942 - RNA, 19 nt, Homo sapiens
  misc_RNA (1)...(19): siRNA sense strand
ccaauauugcugaaaguga

SEQ ID NO: 1635943 - RNA, 19 nt, Homo sapiens
  misc_RNA (1)...(19): siRNA sense strand
gcugaugugggaaguguuu

SEQ ID NO: 1635944 - RNA, 19 nt, Homo sapiens
  misc_RNA (1)...(19): siRNA sense strand
gcacaagugauaagaugca

SEQ ID NO: 1635945 - RNA, 19 nt, Homo sapiens
  misc_RNA (1)...(19): siRNA sense strand
gcagagauccaagaagaag

SEQ ID NO: 1635946 - RNA, 19 nt, Homo sapiens
  misc_RNA (1)...(19): siRNA sense strand
gcgaggagccagagaugga

SEQ ID NO: 1635947 - RNA, 19 nt, Homo sapiens
  misc_RNA (1)...(19): siRNA sense strand
gccaacgccuccuucaaca

SEQ ID NO: 1635948 - RNA, 19 nt, Homo sapiens
  misc_RNA (1)...(19): siRNA sense strand
cauguuccauugccaguuc

SEQ ID NO: 1635949 - RNA, 19 nt, Homo sapiens
  misc_RNA (1)...(19): siRNA sense strand
acacuugcauugccuccaa

SEQ ID NO: 1635950 - RNA, 19 nt, Homo sapiens
  misc_RNA (1)...(19): siRNA sense strand
gaugaaguacuggcagauu

SEQ ID NO: 1635951 - RNA, 19 nt, Homo sapiens
  misc_RNA (1)...(19): siRNA sense strand
gcaagaagcgcugcaaagc

SEQ ID NO: 1635952 - RNA, 19 nt, Homo sapiens
  misc_RNA (1)...(19): siRNA sense strand
caacgccuccuucaacauc

SEQ ID NO: 1635953 - RNA, 19 nt, Homo sapiens
  misc_RNA (1)...(19): siRNA sense strand
aagaugauccagaccauug

SEQ ID NO: 1635954 - RNA, 19 nt, Homo sapiens
  misc_RNA (1)...(19): siRNA sense strand
guuuacacauggagagaug

SEQ ID NO: 1635955 - RNA, 19 nt, Homo sapiens
  misc_RNA (1)...(19): siRNA sense strand
ggcagcagccugagcuuug

SEQ ID NO: 1635956 - RNA, 19 nt, Homo sapiens
  misc_RNA (1)...(19): siRNA sense strand
ggcagaugaugaaguacug

SEQ ID NO: 1635957 - RNA, 19 nt, Homo sapiens
  misc_RNA (1)...(19): siRNA sense strand
agaugacgcuggcaacuac

SEQ ID NO: 1635958 - RNA, 19 nt, Homo sapiens
  misc_RNA (1)...(19): siRNA sense strand
ugaaguacuggcagauuug

SEQ ID NO: 1635959 - RNA, 19 nt, Homo sapiens
  misc_RNA (1)...(19): siRNA sense strand
gugcugaugugggaagugu

SEQ ID NO: 1635960 - RNA, 19 nt, Homo sapiens
  misc_RNA (1)...(19): siRNA sense strand
cagcaaggauguguacaac

SEQ ID NO: 1635961 - RNA, 19 nt, Homo sapiens
  misc_RNA (1)...(19): siRNA sense strand
ccucaacggugggccuuug

SEQ ID NO: 1635962 - RNA, 19 nt, Homo sapiens
  misc_RNA (1)...(19): siRNA sense strand
ucaccuagcagagauugaa

SEQ ID NO: 1635963 - RNA, 19 nt, Homo sapiens
  misc_RNA (1)...(19): siRNA sense strand
cagcugguccugagcauag

SEQ ID NO: 1635964 - RNA, 19 nt, Homo sapiens
  misc_RNA (1)...(19): siRNA sense strand
ggccuucggugugcugaug

SEQ ID NO: 1635965 - RNA, 19 nt, Homo sapiens
  misc_RNA (1)...(19): siRNA sense strand
ggccaauauugcugaaagu

SEQ ID NO: 1635966 - RNA, 19 nt, Homo sapiens
  misc_RNA (1)...(19): siRNA sense strand
aggaggccauguuccauug

SEQ ID NO: 1635967 - RNA, 19 nt, Homo sapiens
  misc_RNA (1)...(19): siRNA sense strand
cauugcugaugaaagcuuu

SEQ ID NO: 1635968 - RNA, 19 nt, Homo sapiens
  misc_RNA (1)...(19): siRNA sense strand
aaccagagcguacgacugu

SEQ ID NO: 1635969 - RNA, 19 nt, Homo sapiens
  misc_RNA (1)...(19): siRNA sense strand
aagaagaaguggccuugac

SEQ ID NO: 1635970 - RNA, 19 nt, Homo sapiens
  misc_RNA (1)...(19): siRNA sense strand
gggcagcagccugagcuuu

SEQ ID NO: 1635971 - RNA, 19 nt, Homo sapiens
  misc_RNA (1)...(19): siRNA sense strand
ccacagcacaagugauaag

SEQ ID NO: 1635972 - RNA, 19 nt, Homo sapiens
  misc_RNA (1)...(19): siRNA sense strand
acaagaugauccagaccau

SEQ ID NO: 1635973 - RNA, 19 nt, Homo sapiens
  misc_RNA (1)...(19): siRNA sense strand
aacuucaccuugagcauug

SEQ ID NO: 1635974 - RNA, 19 nt, Homo sapiens
  misc_RNA (1)...(19): siRNA sense strand
caagaugauccagaccauu

SEQ ID NO: 1635975 - RNA, 19 nt, Homo sapiens
  misc_RNA (1)...(19): siRNA sense strand
ucagcaaggauguguacaa

SEQ ID NO: 1635976 - RNA, 19 nt, Homo sapiens
  misc_RNA (1)...(19): siRNA sense strand
gcagaagguggcccuaugc

SEQ ID NO: 1635977 - RNA, 19 nt, Homo sapiens
  misc_RNA (1)...(19): siRNA sense strand
gcagccagaacuucaccuu

SEQ ID NO: 1635978 - RNA, 19 nt, Homo sapiens
  misc_RNA (1)...(19): siRNA sense strand
gcagcagccugagcuuugc

SEQ ID NO: 1635979 - RNA, 19 nt, Homo sapiens
  misc_RNA (1)...(19): siRNA sense strand
ggucagugcccagagacaa

SEQ ID NO: 1635980 - RNA, 19 nt, Homo sapiens
  misc_RNA (1)...(19): siRNA sense strand
ccagauucgugcccauguc

SEQ ID NO: 1635981 - RNA, 19 nt, Homo sapiens
  misc_RNA (1)...(19): siRNA sense strand
uggccaauauugcugaaag

SEQ ID NO: 1635982 - RNA, 19 nt, Homo sapiens
  misc_RNA (1)...(19): siRNA sense strand
gggaucuaccgcugcauug

SEQ ID NO: 1635983 - RNA, 19 nt, Homo sapiens
  misc_RNA (1)...(19): siRNA sense strand
gccagaacuucaccuugag

SEQ ID NO: 1635984 - RNA, 19 nt, Homo sapiens
  misc_RNA (1)...(19): siRNA sense strand
cagagcaaccacacaguca

SEQ ID NO: 1635985 - RNA, 19 nt, Homo sapiens
  misc_RNA (1)...(19): siRNA sense strand
augagacucccaucacuaa

SEQ ID NO: 1635986 - RNA, 19 nt, Homo sapiens
  misc_RNA (1)...(19): siRNA sense strand
guacccagacagccauugu

SEQ ID NO: 1635987 - RNA, 19 nt, Homo sapiens
  misc_RNA (1)...(19): siRNA sense strand
gcaguggcucuuugaggau

SEQ ID NO: 1635988 - RNA, 19 nt, Homo sapiens
  misc_RNA (1)...(19): siRNA sense strand
acgcugggacccugcauuu

SEQ ID NO: 1635989 - RNA, 19 nt, Homo sapiens
  misc_RNA (1)...(19): siRNA sense strand
aagacaugccgcuauuuga

SEQ ID NO: 1635990 - RNA, 19 nt, Homo sapiens
  misc_RNA (1)...(19): siRNA sense strand
acacuucaccuagcagaga

SEQ ID NO: 1635991 - RNA, 19 nt, Homo sapiens
  misc_RNA (1)...(19): siRNA sense strand
gcauugcugaugaaagcuu

SEQ ID NO: 1635992 - RNA, 19 nt, Homo sapiens
  misc_RNA (1)...(19): siRNA sense strand
ccuggagggugacuucucu

SEQ ID NO: 1635993 - RNA, 19 nt, Homo sapiens
  misc_RNA (1)...(19): siRNA sense strand
agcagaagguggcccuaug

SEQ ID NO: 1635994 - RNA, 19 nt, Homo sapiens
  misc_RNA (1)...(19): siRNA sense strand
aaacgccacagcacaagug

SEQ ID NO: 1635995 - RNA, 19 nt, Homo sapiens
  misc_RNA (1)...(19): siRNA sense strand
ugaagacaugccgcuauuu

SEQ ID NO: 1635996 - RNA, 19 nt, Homo sapiens
  misc_RNA (1)...(19): siRNA sense strand
guaugaggaggccauguuc

SEQ ID NO: 1635997 - RNA, 19 nt, Homo sapiens
  misc_RNA (1)...(19): siRNA sense strand
cagccauugucuucaucaa

SEQ ID NO: 1635998 - RNA, 19 nt, Homo sapiens
  misc_RNA (1)...(19): siRNA sense strand
cacacuucguugccacauu

SEQ ID NO: 1635999 - RNA, 19 nt, Homo sapiens
  misc_RNA (1)...(19): siRNA sense strand
caaccgcuuugugcauaag

SEQ ID NO: 1636000 - RNA, 19 nt, Homo sapiens
  misc_RNA (1)...(19): siRNA sense strand
gaugaugucacuggagaag

SEQ ID NO: 1636001 - RNA, 19 nt, Homo sapiens
  misc_RNA (1)...(19): siRNA sense strand
aaagugaugcuggugucua

SEQ ID NO: 1636002 - RNA, 19 nt, Homo sapiens
  misc_RNA (1)...(19): siRNA sense strand
cagcagagauccaagaaga

SEQ ID NO: 1636003 - RNA, 19 nt, Homo sapiens
  misc_RNA (1)...(19): siRNA sense strand
gaagacaugccgcuauuug

SEQ ID NO: 1636004 - RNA, 19 nt, Homo sapiens
  misc_RNA (1)...(19): siRNA sense strand
gagcugguguuggccaaua

SEQ ID NO: 1636005 - RNA, 19 nt, Homo sapiens
  misc_RNA (1)...(19): siRNA sense strand
gaacuucaccuugagcauu

SEQ ID NO: 1636006 - RNA, 19 nt, Homo sapiens
  misc_RNA (1)...(19): siRNA sense strand
cagcacaagugauaagaug

SEQ ID NO: 1636007 - RNA, 19 nt, Homo sapiens
  misc_RNA (1)...(19): siRNA sense strand
uagcagagauugaagacau

SEQ ID NO: 1636008 - RNA, 19 nt, Homo sapiens
  misc_RNA (1)...(19): siRNA sense strand
ccgcagagccacaguguuu

SEQ ID NO: 1636009 - RNA, 19 nt, Homo sapiens
  misc_RNA (1)...(19): siRNA sense strand
caauauugcugaaagugau

SEQ ID NO: 1636010 - RNA, 19 nt, Homo sapiens
  misc_RNA (1)...(19): siRNA sense strand
ugaugucacuggagaagaa

SEQ ID NO: 1636011 - RNA, 19 nt, Homo sapiens
  misc_RNA (1)...(19): siRNA sense strand
gagcauagugggcuguauu

SEQ ID NO: 1636012 - RNA, 19 nt, Homo sapiens
  misc_RNA (1)...(19): siRNA sense strand
acacuucguugccacauug

SEQ ID NO: 1636013 - RNA, 19 nt, Homo sapiens
  misc_RNA (1)...(19): siRNA sense strand
gcuguggccuacaucauug

SEQ ID NO: 1636014 - RNA, 19 nt, Homo sapiens
  misc_RNA (1)...(19): siRNA sense strand
ccaagcggcugcagaagca

SEQ ID NO: 1636015 - RNA, 19 nt, Homo sapiens
  misc_RNA (1)...(19): siRNA sense strand
cagagugggugacagacaa

SEQ ID NO: 1636016 - RNA, 19 nt, Homo sapiens
  misc_RNA (1)...(19): siRNA sense strand
agccagaacuucaccuuga

SEQ ID NO: 1636017 - RNA, 19 nt, Homo sapiens
  misc_RNA (1)...(19): siRNA sense strand
gagaugacgcuggcaacua

SEQ ID NO: 1636018 - RNA, 19 nt, Homo sapiens
  misc_RNA (1)...(19): siRNA sense strand
cgccacagcacaagugaua

SEQ ID NO: 1636019 - RNA, 19 nt, Homo sapiens
  misc_RNA (1)...(19): siRNA sense strand
gaggaggccauguuccauu

SEQ ID NO: 1636020 - RNA, 19 nt, Homo sapiens
  misc_RNA (1)...(19): siRNA sense strand
gguaugaggaggccauguu

SEQ ID NO: 1636021 - RNA, 19 nt, Homo sapiens
  misc_RNA (1)...(19): siRNA sense strand
uugaagacaugccgcuauu

SEQ ID NO: 1636022 - RNA, 19 nt, Homo sapiens
  misc_RNA (1)...(19): siRNA sense strand
ccaauauugcugaaaguga

SEQ ID NO: 1636023 - RNA, 19 nt, Homo sapiens
  misc_RNA (1)...(19): siRNA sense strand
gcacaagugauaagaugca

SEQ ID NO: 1636024 - RNA, 19 nt, Homo sapiens
  misc_RNA (1)...(19): siRNA sense strand
gcagagauccaagaagaag

SEQ ID NO: 1636025 - RNA, 19 nt, Homo sapiens
  misc_RNA (1)...(19): siRNA sense strand
gcgaggagccagagaugga

SEQ ID NO: 1636026 - RNA, 19 nt, Homo sapiens
  misc_RNA (1)...(19): siRNA sense strand
gccaacgccuccuucaaca

SEQ ID NO: 1636027 - RNA, 19 nt, Homo sapiens
  misc_RNA (1)...(19): siRNA sense strand
cauguuccauugccaguuc

SEQ ID NO: 1636028 - RNA, 19 nt, Homo sapiens
  misc_RNA (1)...(19): siRNA sense strand
acacuugcauugccuccaa

SEQ ID NO: 1636029 - RNA, 19 nt, Homo sapiens
  misc_RNA (1)...(19): siRNA sense strand
gcaagaagcgcugcaaagc

SEQ ID NO: 1636030 - RNA, 19 nt, Homo sapiens
  misc_RNA (1)...(19): siRNA sense strand
caacgccuccuucaacauc

SEQ ID NO: 1636031 - RNA, 19 nt, Homo sapiens
  misc_RNA (1)...(19): siRNA sense strand
ggcagcagccugagcuuug

SEQ ID NO: 1636032 - RNA, 19 nt, Homo sapiens
  misc_RNA (1)...(19): siRNA sense strand
aagaugauccagaccauug

SEQ ID NO: 1636033 - RNA, 19 nt, Homo sapiens
  misc_RNA (1)...(19): siRNA sense strand
agaugacgcuggcaacuac

SEQ ID NO: 1636034 - RNA, 19 nt, Homo sapiens
  misc_RNA (1)...(19): siRNA sense strand
ccucaacggugggccuuug

SEQ ID NO: 1636035 - RNA, 19 nt, Homo sapiens
  misc_RNA (1)...(19): siRNA sense strand
ucaccuagcagagauugaa

SEQ ID NO: 1636036 - RNA, 19 nt, Homo sapiens
  misc_RNA (1)...(19): siRNA sense strand
cagcugguccugagcauag

SEQ ID NO: 1636037 - RNA, 19 nt, Homo sapiens
  misc_RNA (1)...(19): siRNA sense strand
ggccaauauugcugaaagu

SEQ ID NO: 1636038 - RNA, 19 nt, Homo sapiens
  misc_RNA (1)...(19): siRNA sense strand
aggaggccauguuccauug

SEQ ID NO: 1636039 - RNA, 19 nt, Homo sapiens
  misc_RNA (1)...(19): siRNA sense strand
cauugcugaugaaagcuuu

SEQ ID NO: 1636040 - RNA, 19 nt, Homo sapiens
  misc_RNA (1)...(19): siRNA sense strand
aaccagagcguacgacugu

SEQ ID NO: 1636041 - RNA, 19 nt, Homo sapiens
  misc_RNA (1)...(19): siRNA sense strand
aagaagaaguggccuugac

SEQ ID NO: 1636042 - RNA, 19 nt, Homo sapiens
  misc_RNA (1)...(19): siRNA sense strand
aacuucaccuugagcauug

SEQ ID NO: 1636043 - RNA, 19 nt, Homo sapiens
  misc_RNA (1)...(19): siRNA sense strand
ccacagcacaagugauaag

SEQ ID NO: 1636044 - RNA, 19 nt, Homo sapiens
  misc_RNA (1)...(19): siRNA sense strand
acaagaugauccagaccau

SEQ ID NO: 1636045 - RNA, 19 nt, Homo sapiens
  misc_RNA (1)...(19): siRNA sense strand
gggcagcagccugagcuuu

SEQ ID NO: 1636046 - RNA, 19 nt, Homo sapiens
  misc_RNA (1)...(19): siRNA sense strand
caagaugauccagaccauu

SEQ ID NO: 1636047 - RNA, 19 nt, Homo sapiens
  misc_RNA (1)...(19): siRNA sense strand
cagagcaaccacacaguca

SEQ ID NO: 1636048 - RNA, 19 nt, Homo sapiens
  misc_RNA (1)...(19): siRNA sense strand
ccagauucgugcccauguc

SEQ ID NO: 1636049 - RNA, 19 nt, Homo sapiens
  misc_RNA (1)...(19): siRNA sense strand
uggccaauauugcugaaag

SEQ ID NO: 1636050 - RNA, 19 nt, Homo sapiens
  misc_RNA (1)...(19): siRNA sense strand
gggaucuaccgcugcauug

SEQ ID NO: 1636051 - RNA, 19 nt, Homo sapiens
  misc_RNA (1)...(19): siRNA sense strand
gccagaacuucaccuugag

SEQ ID NO: 1636052 - RNA, 19 nt, Homo sapiens
  misc_RNA (1)...(19): siRNA sense strand
gcagcagccugagcuuugc

SEQ ID NO: 1636053 - RNA, 19 nt, Homo sapiens
  misc_RNA (1)...(19): siRNA sense strand
gcagccagaacuucaccuu

SEQ ID NO: 1636054 - RNA, 19 nt, Homo sapiens
  misc_RNA (1)...(19): siRNA sense strand
augagacucccaucacuaa

SEQ ID NO: 1636055 - RNA, 19 nt, Homo sapiens
  misc_RNA (1)...(19): siRNA sense strand
guacccagacagccauugu

SEQ ID NO: 1636056 - RNA, 19 nt, Homo sapiens
  misc_RNA (1)...(19): siRNA sense strand
gcaguggcucuuugaggau

SEQ ID NO: 1636057 - RNA, 19 nt, Homo sapiens
  misc_RNA (1)...(19): siRNA sense strand
acgcugggacccugcauuu

SEQ ID NO: 1636058 - RNA, 19 nt, Homo sapiens
  misc_RNA (1)...(19): siRNA sense strand
aagacaugccgcuauuuga

SEQ ID NO: 1636059 - RNA, 19 nt, Homo sapiens
  misc_RNA (1)...(19): siRNA sense strand
acacuucaccuagcagaga

SEQ ID NO: 1636060 - RNA, 19 nt, Homo sapiens
  misc_RNA (1)...(19): siRNA sense strand
gcauugcugaugaaagcuu

SEQ ID NO: 1636061 - RNA, 19 nt, Homo sapiens
  misc_RNA (1)...(19): siRNA sense strand
aaacgccacagcacaagug

SEQ ID NO: 1636062 - RNA, 19 nt, Homo sapiens
  misc_RNA (1)...(19): siRNA sense strand
ugaagacaugccgcuauuu

SEQ ID NO: 1636063 - RNA, 19 nt, Homo sapiens
  misc_RNA (1)...(19): siRNA sense strand
guaugaggaggccauguuc

SEQ ID NO: 1636064 - RNA, 19 nt, Homo sapiens
  misc_RNA (1)...(19): siRNA sense strand
cacacuucguugccacauu

SEQ ID NO: 1636065 - RNA, 19 nt, Homo sapiens
  misc_RNA (1)...(19): siRNA sense strand
cagccauugucuucaucaa

SEQ ID NO: 1636066 - RNA, 19 nt, Homo sapiens
  misc_RNA (1)...(19): siRNA sense strand
gaugaugucacuggagaag

SEQ ID NO: 1636067 - RNA, 19 nt, Homo sapiens
  misc_RNA (1)...(19): siRNA sense strand
aaagugaugcuggugucua

SEQ ID NO: 1636068 - RNA, 19 nt, Homo sapiens
  misc_RNA (1)...(19): siRNA sense strand
ggaauuccaucugggauua

SEQ ID NO: 1636069 - RNA, 19 nt, Homo sapiens
  misc_RNA (1)...(19): siRNA sense strand
ggaugggacuccuggaauu

SEQ ID NO: 1636070 - RNA, 19 nt, Homo sapiens
  misc_RNA (1)...(19): siRNA sense strand
gagacacgguggagaacua

SEQ ID NO: 1636071 - RNA, 19 nt, Homo sapiens
  misc_RNA (1)...(19): siRNA sense strand
gaaguucacaauugucuuu

SEQ ID NO: 1636072 - RNA, 19 nt, Homo sapiens
  misc_RNA (1)...(19): siRNA sense strand
caacaacaaugcuggaagu

SEQ ID NO: 1636073 - RNA, 19 nt, Homo sapiens
  misc_RNA (1)...(19): siRNA sense strand
aaaagaagcuucaggguaa

SEQ ID NO: 1636074 - RNA, 19 nt, Homo sapiens
  misc_RNA (1)...(19): siRNA sense strand
aaacaugugucgugggauu

SEQ ID NO: 1636075 - RNA, 19 nt, Homo sapiens
  misc_RNA (1)...(19): siRNA sense strand
gcaaccagacucuuucaaa

SEQ ID NO: 1636076 - RNA, 19 nt, Homo sapiens
  misc_RNA (1)...(19): siRNA sense strand
uggccaauguugacaauaa

SEQ ID NO: 1636077 - RNA, 19 nt, Homo sapiens
  misc_RNA (1)...(19): siRNA sense strand
caucugggauuauggaaau

SEQ ID NO: 1636078 - RNA, 19 nt, Homo sapiens
  misc_RNA (1)...(19): siRNA sense strand
gucgugggauuccaacaua

SEQ ID NO: 1636079 - RNA, 19 nt, Homo sapiens
  misc_RNA (1)...(19): siRNA sense strand
gaagucaugcccuccauuc

SEQ ID NO: 1636080 - RNA, 19 nt, Homo sapiens
  misc_RNA (1)...(19): siRNA sense strand
caaccagacucuuucaaaa

SEQ ID NO: 1636081 - RNA, 19 nt, Homo sapiens
  misc_RNA (1)...(19): siRNA sense strand
gaagugggcagcagucagu

SEQ ID NO: 1636082 - RNA, 19 nt, Homo sapiens
  misc_RNA (1)...(19): siRNA sense strand
ccaagggccugauguacuc

SEQ ID NO: 1636083 - RNA, 19 nt, Homo sapiens
  misc_RNA (1)...(19): siRNA sense strand
auacauggcugaggagaug

SEQ ID NO: 1636084 - RNA, 19 nt, Homo sapiens
  misc_RNA (1)...(19): siRNA sense strand
cagugagugucaacaauga

SEQ ID NO: 1636085 - RNA, 19 nt, Homo sapiens
  misc_RNA (1)...(19): siRNA sense strand
ugucaacaaugaacacaau

SEQ ID NO: 1636086 - RNA, 19 nt, Homo sapiens
  misc_RNA (1)...(19): siRNA sense strand
ucgaugaccugagcaaguu

SEQ ID NO: 1636087 - RNA, 19 nt, Homo sapiens
  misc_RNA (1)...(19): siRNA sense strand
ucaaugaugacaacaacaa

SEQ ID NO: 1636088 - RNA, 19 nt, Homo sapiens
  misc_RNA (1)...(19): siRNA sense strand
gucaugcccuccauucaau

SEQ ID NO: 1636089 - RNA, 19 nt, Homo sapiens
  misc_RNA (1)...(19): siRNA sense strand
caaaagaagacaugcauug

SEQ ID NO: 1636090 - RNA, 19 nt, Homo sapiens
  misc_RNA (1)...(19): siRNA sense strand
ugucuuugcuggacuucuu

SEQ ID NO: 1636091 - RNA, 19 nt, Homo sapiens
  misc_RNA (1)...(19): siRNA sense strand
aaagaagacaugcauugug

SEQ ID NO: 1636092 - RNA, 19 nt, Homo sapiens
  misc_RNA (1)...(19): siRNA sense strand
ugcccuagcuaacuauaau

SEQ ID NO: 1636093 - RNA, 19 nt, Homo sapiens
  misc_RNA (1)...(19): siRNA sense strand
ggaagucaugcccuccauu

SEQ ID NO: 1636094 - RNA, 19 nt, Homo sapiens
  misc_RNA (1)...(19): siRNA sense strand
gucagugagugucaacaau

SEQ ID NO: 1636095 - RNA, 19 nt, Homo sapiens
  misc_RNA (1)...(19): siRNA sense strand
guggagacacgguggagaa

SEQ ID NO: 1636096 - RNA, 19 nt, Homo sapiens
  misc_RNA (1)...(19): siRNA sense strand
ucagugagugucaacaaug

SEQ ID NO: 1636097 - RNA, 19 nt, Homo sapiens
  misc_RNA (1)...(19): siRNA sense strand
ucagucaacccaaacaaag

SEQ ID NO: 1636098 - RNA, 19 nt, Homo sapiens
  misc_RNA (1)...(19): siRNA sense strand
cgaccaguguacuauggau

SEQ ID NO: 1636099 - RNA, 19 nt, Homo sapiens
  misc_RNA (1)...(19): siRNA sense strand
acaauguggccaauguuga

SEQ ID NO: 1636100 - RNA, 19 nt, Homo sapiens
  misc_RNA (1)...(19): siRNA sense strand
uguacucagucaacccaaa

SEQ ID NO: 1636101 - RNA, 19 nt, Homo sapiens
  misc_RNA (1)...(19): siRNA sense strand
cuccugcccuagcuaacua

SEQ ID NO: 1636102 - RNA, 19 nt, Homo sapiens
  misc_RNA (1)...(19): siRNA sense strand
gcccuagcuaacuauaaua

SEQ ID NO: 1636103 - RNA, 19 nt, Homo sapiens
  misc_RNA (1)...(19): siRNA sense strand
ggauuauggaaauggcuuu

SEQ ID NO: 1636104 - RNA, 19 nt, Homo sapiens
  misc_RNA (1)...(19): siRNA sense strand
ggccaauguugacaauaac

SEQ ID NO: 1636105 - RNA, 19 nt, Homo sapiens
  misc_RNA (1)...(19): siRNA sense strand
uauggauuguggacauuuc

SEQ ID NO: 1636106 - RNA, 19 nt, Homo sapiens
  misc_RNA (1)...(19): siRNA sense strand
gaugggacuccuggaauuc

SEQ ID NO: 1636107 - RNA, 19 nt, Homo sapiens
  misc_RNA (1)...(19): siRNA sense strand
ucaacaaugaacacaaugu

SEQ ID NO: 1636108 - RNA, 19 nt, Homo sapiens
  misc_RNA (1)...(19): siRNA sense strand
gaccaguguacuauggauu

SEQ ID NO: 1636109 - RNA, 19 nt, Homo sapiens
  misc_RNA (1)...(19): siRNA sense strand
gacaacaacaaugcuggaa

SEQ ID NO: 1636110 - RNA, 19 nt, Homo sapiens
  misc_RNA (1)...(19): siRNA sense strand
ccaguguacuauggauugu

SEQ ID NO: 1636111 - RNA, 19 nt, Homo sapiens
  misc_RNA (1)...(19): siRNA sense strand
guucacaauugucuuugcu

SEQ ID NO: 1636112 - RNA, 19 nt, Homo sapiens
  misc_RNA (1)...(19): siRNA sense strand
gcacaaaaugaacaaggaa

SEQ ID NO: 1636113 - RNA, 19 nt, Homo sapiens
  misc_RNA (1)...(19): siRNA sense strand
cacgaccaguguacuaugg

SEQ ID NO: 1636114 - RNA, 19 nt, Homo sapiens
  misc_RNA (1)...(19): siRNA sense strand
uggcugaggagaugcaaga

SEQ ID NO: 1636115 - RNA, 19 nt, Homo sapiens
  misc_RNA (1)...(19): siRNA sense strand
gaaagaagaccuaguauuu

SEQ ID NO: 1636116 - RNA, 19 nt, Homo sapiens
  misc_RNA (1)...(19): siRNA sense strand
guaaauggcuuggaugaua

SEQ ID NO: 1636117 - RNA, 19 nt, Homo sapiens
  misc_RNA (1)...(19): siRNA sense strand
gcaguucucuucuguuuaa

SEQ ID NO: 1636118 - RNA, 19 nt, Homo sapiens
  misc_RNA (1)...(19): siRNA sense strand
gaaagcaguucucuucugu

SEQ ID NO: 1636119 - RNA, 19 nt, Homo sapiens
  misc_RNA (1)...(19): siRNA sense strand
aaacaugaguggcaaguaa

SEQ ID NO: 1636120 - RNA, 19 nt, Homo sapiens
  misc_RNA (1)...(19): siRNA sense strand
uaagaaagaagaccuagua

SEQ ID NO: 1636121 - RNA, 19 nt, Homo sapiens
  misc_RNA (1)...(19): siRNA sense strand
ugacauuggugauacugua

SEQ ID NO: 1636122 - RNA, 19 nt, Homo sapiens
  misc_RNA (1)...(19): siRNA sense strand
uaaauggcuuggaugauau

SEQ ID NO: 1636123 - RNA, 19 nt, Homo sapiens
  misc_RNA (1)...(19): siRNA sense strand
aagcaguucucuucuguuu

SEQ ID NO: 1636124 - RNA, 19 nt, Homo sapiens
  misc_RNA (1)...(19): siRNA sense strand
gggaggcaauguaguaguu

SEQ ID NO: 1636125 - RNA, 19 nt, Homo sapiens
  misc_RNA (1)...(19): siRNA sense strand
aaggaaaucuucuacacaa

SEQ ID NO: 1636126 - RNA, 19 nt, Homo sapiens
  misc_RNA (1)...(19): siRNA sense strand
gaguuacagugaaugauga

SEQ ID NO: 1636127 - RNA, 19 nt, Homo sapiens
  misc_RNA (1)...(19): siRNA sense strand
uaugcuagcucuaaagaug

SEQ ID NO: 1636128 - RNA, 19 nt, Homo sapiens
  misc_RNA (1)...(19): siRNA sense strand
gcucuaaagaugccauuaa

SEQ ID NO: 1636129 - RNA, 19 nt, Homo sapiens
  misc_RNA (1)...(19): siRNA sense strand
guaaggaaaucuucuacac

SEQ ID NO: 1636130 - RNA, 19 nt, Homo sapiens
  misc_RNA (1)...(19): siRNA sense strand
aaagcaagaugauuuaugc

SEQ ID NO: 1636131 - RNA, 19 nt, Homo sapiens
  misc_RNA (1)...(19): siRNA sense strand
ggaguuacagugaaugaug

SEQ ID NO: 1636132 - RNA, 19 nt, Homo sapiens
  misc_RNA (1)...(19): siRNA sense strand
caaaagagucuaagaaaga

SEQ ID NO: 1636133 - RNA, 19 nt, Homo sapiens
  misc_RNA (1)...(19): siRNA sense strand
ugaaguugcuaccucugaa

SEQ ID NO: 1636134 - RNA, 19 nt, Homo sapiens
  misc_RNA (1)...(19): siRNA sense strand
gaaaguaaggaaaucuucu

SEQ ID NO: 1636135 - RNA, 19 nt, Homo sapiens
  misc_RNA (1)...(19): siRNA sense strand
agaaagaagaccuaguauu

SEQ ID NO: 1636136 - RNA, 19 nt, Homo sapiens
  misc_RNA (1)...(19): siRNA sense strand
cucuaaagaugccauuaaa

SEQ ID NO: 1636137 - RNA, 19 nt, Homo sapiens
  misc_RNA (1)...(19): siRNA sense strand
gaucuuggugggugacauu

SEQ ID NO: 1636138 - RNA, 19 nt, Homo sapiens
  misc_RNA (1)...(19): siRNA sense strand
guucgacacuuggagagaa

SEQ ID NO: 1636139 - RNA, 19 nt, Homo sapiens
  misc_RNA (1)...(19): siRNA sense strand
guacgaugccacauacgaa

SEQ ID NO: 1636140 - RNA, 19 nt, Homo sapiens
  misc_RNA (1)...(19): siRNA sense strand
gaggcaauguaguaguuuc

SEQ ID NO: 1636141 - RNA, 19 nt, Homo sapiens
  misc_RNA (1)...(19): siRNA sense strand
ggaagcaaagcagaucuug

SEQ ID NO: 1636142 - RNA, 19 nt, Homo sapiens
  misc_RNA (1)...(19): siRNA sense strand
ucugaaugauugccgauau

SEQ ID NO: 1636143 - RNA, 19 nt, Homo sapiens
  misc_RNA (1)...(19): siRNA sense strand
gcaauguaguaguuucacu

SEQ ID NO: 1636144 - RNA, 19 nt, Homo sapiens
  misc_RNA (1)...(19): siRNA sense strand
uggcuuggaugauauuaag

SEQ ID NO: 1636145 - RNA, 19 nt, Homo sapiens
  misc_RNA (1)...(19): siRNA sense strand
aaagagaaagaaagcaguu

SEQ ID NO: 1636146 - RNA, 19 nt, Homo sapiens
  misc_RNA (1)...(19): siRNA sense strand
gaaguugcuaccucugaau

SEQ ID NO: 1636147 - RNA, 19 nt, Homo sapiens
  misc_RNA (1)...(19): siRNA sense strand
uaaggaaaucuucuacaca

SEQ ID NO: 1636148 - RNA, 19 nt, Homo sapiens
  misc_RNA (1)...(19): siRNA sense strand
ugauuuaugcuagcucuaa

SEQ ID NO: 1636149 - RNA, 19 nt, Homo sapiens
  misc_RNA (1)...(19): siRNA sense strand
auucugggcuccugaaagu

SEQ ID NO: 1636150 - RNA, 19 nt, Homo sapiens
  misc_RNA (1)...(19): siRNA sense strand
caauguaguaguuucacuu

SEQ ID NO: 1636151 - RNA, 19 nt, Homo sapiens
  misc_RNA (1)...(19): siRNA sense strand
aagcaaagcagaucuuggu

SEQ ID NO: 1636152 - RNA, 19 nt, Homo sapiens
  misc_RNA (1)...(19): siRNA sense strand
ggaggcaauguaguaguuu

SEQ ID NO: 1636153 - RNA, 19 nt, Homo sapiens
  misc_RNA (1)...(19): siRNA sense strand
cugaaugauugccgauaug

SEQ ID NO: 1636154 - RNA, 19 nt, Homo sapiens
  misc_RNA (1)...(19): siRNA sense strand
uaaggaccguucgacacuu

SEQ ID NO: 1636155 - RNA, 19 nt, Homo sapiens
  misc_RNA (1)...(19): siRNA sense strand
uacagugaaugaugaaguc

SEQ ID NO: 1636156 - RNA, 19 nt, Homo sapiens
  misc_RNA (1)...(19): siRNA sense strand
gaaacaaaagagucuaaga

SEQ ID NO: 1636157 - RNA, 19 nt, Homo sapiens
  misc_RNA (1)...(19): siRNA sense strand
gccgauaugcuuuguacga

SEQ ID NO: 1636158 - RNA, 19 nt, Homo sapiens
  misc_RNA (1)...(19): siRNA sense strand
gugaaguugcuaccucuga

SEQ ID NO: 1636159 - RNA, 19 nt, Homo sapiens
  misc_RNA (1)...(19): siRNA sense strand
aaggaccguucgacacuug

SEQ ID NO: 1636160 - RNA, 19 nt, Homo sapiens
  misc_RNA (1)...(19): siRNA sense strand
ugaaaguaaggaaaucuuc

SEQ ID NO: 1636161 - RNA, 19 nt, Homo sapiens
  misc_RNA (1)...(19): siRNA sense strand
uaaacaugaguggcaagua

SEQ ID NO: 1636162 - RNA, 19 nt, Homo sapiens
  misc_RNA (1)...(19): siRNA sense strand
ccgauaugcuuuguacgau

SEQ ID NO: 1636163 - RNA, 19 nt, Homo sapiens
  misc_RNA (1)...(19): siRNA sense strand
cuucuggaguuacagugaa

SEQ ID NO: 1636164 - RNA, 19 nt, Homo sapiens
  misc_RNA (1)...(19): siRNA sense strand
gauauuaaggaccguucga

SEQ ID NO: 1636165 - RNA, 19 nt, Homo sapiens
  misc_RNA (1)...(19): siRNA sense strand
gcuuggaugauauuaagga

SEQ ID NO: 1636166 - RNA, 19 nt, Homo sapiens
  misc_RNA (1)...(19): siRNA sense strand
guugcuaccucugaaugau

SEQ ID NO: 1636167 - RNA, 19 nt, Homo sapiens
  misc_RNA (1)...(19): siRNA sense strand
uuuaagcgaugacaaaaga

SEQ ID NO: 1636168 - RNA, 19 nt, Homo sapiens
  misc_RNA (1)...(19): siRNA sense strand
ugcuaccucugaaugauug

SEQ ID NO: 1636169 - RNA, 19 nt, Homo sapiens
  misc_RNA (1)...(19): siRNA sense strand
gaugccacauacgaaacaa

SEQ ID NO: 1636170 - RNA, 19 nt, Homo sapiens
  misc_RNA (1)...(19): siRNA sense strand
cuacacaagaggagaucaa

SEQ ID NO: 1636171 - RNA, 19 nt, Homo sapiens
  misc_RNA (1)...(19): siRNA sense strand
aaugauugccgauaugcuu

SEQ ID NO: 1636172 - RNA, 19 nt, Homo sapiens
  misc_RNA (1)...(19): siRNA sense strand
gugggugacauuggugaua

SEQ ID NO: 1636173 - RNA, 19 nt, Homo sapiens
  misc_RNA (1)...(19): siRNA sense strand
cgacacuuggagagaaauu

SEQ ID NO: 1636174 - RNA, 19 nt, Homo sapiens
  misc_RNA (1)...(19): siRNA sense strand
aaguaaauggcuuggauga

SEQ ID NO: 1636175 - RNA, 19 nt, Homo sapiens
  misc_RNA (1)...(19): siRNA sense strand
acaaaagagucuaagaaag

SEQ ID NO: 1636176 - RNA, 19 nt, Homo sapiens
  misc_RNA (1)...(19): siRNA sense strand
gaaagaagaccuaguauuu

SEQ ID NO: 1636177 - RNA, 19 nt, Homo sapiens
  misc_RNA (1)...(19): siRNA sense strand
guaaauggcuuggaugaua

SEQ ID NO: 1636178 - RNA, 19 nt, Homo sapiens
  misc_RNA (1)...(19): siRNA sense strand
gcaguucucuucuguuuaa

SEQ ID NO: 1636179 - RNA, 19 nt, Homo sapiens
  misc_RNA (1)...(19): siRNA sense strand
gaaagcaguucucuucugu

SEQ ID NO: 1636180 - RNA, 19 nt, Homo sapiens
  misc_RNA (1)...(19): siRNA sense strand
aaacaugaguggcaaguaa

SEQ ID NO: 1636181 - RNA, 19 nt, Homo sapiens
  misc_RNA (1)...(19): siRNA sense strand
uaagaaagaagaccuagua

SEQ ID NO: 1636182 - RNA, 19 nt, Homo sapiens
  misc_RNA (1)...(19): siRNA sense strand
ugacauuggugauacugua

SEQ ID NO: 1636183 - RNA, 19 nt, Homo sapiens
  misc_RNA (1)...(19): siRNA sense strand
uaaauggcuuggaugauau

SEQ ID NO: 1636184 - RNA, 19 nt, Homo sapiens
  misc_RNA (1)...(19): siRNA sense strand
aagcaguucucuucuguuu

SEQ ID NO: 1636185 - RNA, 19 nt, Homo sapiens
  misc_RNA (1)...(19): siRNA sense strand
gggaggcaauguaguaguu

SEQ ID NO: 1636186 - RNA, 19 nt, Homo sapiens
  misc_RNA (1)...(19): siRNA sense strand
aaggaaaucuucuacacaa

SEQ ID NO: 1636187 - RNA, 19 nt, Homo sapiens
  misc_RNA (1)...(19): siRNA sense strand
gaguuacagugaaugauga

SEQ ID NO: 1636188 - RNA, 19 nt, Homo sapiens
  misc_RNA (1)...(19): siRNA sense strand
uaugcuagcucuaaagaug

SEQ ID NO: 1636189 - RNA, 19 nt, Homo sapiens
  misc_RNA (1)...(19): siRNA sense strand
gcucuaaagaugccauuaa

SEQ ID NO: 1636190 - RNA, 19 nt, Homo sapiens
  misc_RNA (1)...(19): siRNA sense strand
guaaggaaaucuucuacac

SEQ ID NO: 1636191 - RNA, 19 nt, Homo sapiens
  misc_RNA (1)...(19): siRNA sense strand
aaagcaagaugauuuaugc

SEQ ID NO: 1636192 - RNA, 19 nt, Homo sapiens
  misc_RNA (1)...(19): siRNA sense strand
ggaguuacagugaaugaug

SEQ ID NO: 1636193 - RNA, 19 nt, Homo sapiens
  misc_RNA (1)...(19): siRNA sense strand
caaaagagucuaagaaaga

SEQ ID NO: 1636194 - RNA, 19 nt, Homo sapiens
  misc_RNA (1)...(19): siRNA sense strand
ugaaguugcuaccucugaa

SEQ ID NO: 1636195 - RNA, 19 nt, Homo sapiens
  misc_RNA (1)...(19): siRNA sense strand
gaaaguaaggaaaucuucu

SEQ ID NO: 1636196 - RNA, 19 nt, Homo sapiens
  misc_RNA (1)...(19): siRNA sense strand
agaaagaagaccuaguauu

SEQ ID NO: 1636197 - RNA, 19 nt, Homo sapiens
  misc_RNA (1)...(19): siRNA sense strand
cucuaaagaugccauuaaa

SEQ ID NO: 1636198 - RNA, 19 nt, Homo sapiens
  misc_RNA (1)...(19): siRNA sense strand
gaucuuggugggugacauu

SEQ ID NO: 1636199 - RNA, 19 nt, Homo sapiens
  misc_RNA (1)...(19): siRNA sense strand
guucgacacuuggagagaa

SEQ ID NO: 1636200 - RNA, 19 nt, Homo sapiens
  misc_RNA (1)...(19): siRNA sense strand
guacgaugccacauacgaa

SEQ ID NO: 1636201 - RNA, 19 nt, Homo sapiens
  misc_RNA (1)...(19): siRNA sense strand
gaggcaauguaguaguuuc

SEQ ID NO: 1636202 - RNA, 19 nt, Homo sapiens
  misc_RNA (1)...(19): siRNA sense strand
ggaagcaaagcagaucuug

SEQ ID NO: 1636203 - RNA, 19 nt, Homo sapiens
  misc_RNA (1)...(19): siRNA sense strand
ucugaaugauugccgauau

SEQ ID NO: 1636204 - RNA, 19 nt, Homo sapiens
  misc_RNA (1)...(19): siRNA sense strand
gcaauguaguaguuucacu

SEQ ID NO: 1636205 - RNA, 19 nt, Homo sapiens
  misc_RNA (1)...(19): siRNA sense strand
uggcuuggaugauauuaag

SEQ ID NO: 1636206 - RNA, 19 nt, Homo sapiens
  misc_RNA (1)...(19): siRNA sense strand
aaagagaaagaaagcaguu

SEQ ID NO: 1636207 - RNA, 19 nt, Homo sapiens
  misc_RNA (1)...(19): siRNA sense strand
gaaguugcuaccucugaau

SEQ ID NO: 1636208 - RNA, 19 nt, Homo sapiens
  misc_RNA (1)...(19): siRNA sense strand
uaaggaaaucuucuacaca

SEQ ID NO: 1636209 - RNA, 19 nt, Homo sapiens
  misc_RNA (1)...(19): siRNA sense strand
ugauuuaugcuagcucuaa

SEQ ID NO: 1636210 - RNA, 19 nt, Homo sapiens
  misc_RNA (1)...(19): siRNA sense strand
auucugggcuccugaaagu

SEQ ID NO: 1636211 - RNA, 19 nt, Homo sapiens
  misc_RNA (1)...(19): siRNA sense strand
caauguaguaguuucacuu

SEQ ID NO: 1636212 - RNA, 19 nt, Homo sapiens
  misc_RNA (1)...(19): siRNA sense strand
aagcaaagcagaucuuggu

SEQ ID NO: 1636213 - RNA, 19 nt, Homo sapiens
  misc_RNA (1)...(19): siRNA sense strand
ggaggcaauguaguaguuu

SEQ ID NO: 1636214 - RNA, 19 nt, Homo sapiens
  misc_RNA (1)...(19): siRNA sense strand
cugaaugauugccgauaug

SEQ ID NO: 1636215 - RNA, 19 nt, Homo sapiens
  misc_RNA (1)...(19): siRNA sense strand
uaaggaccguucgacacuu

SEQ ID NO: 1636216 - RNA, 19 nt, Homo sapiens
  misc_RNA (1)...(19): siRNA sense strand
uacagugaaugaugaaguc

SEQ ID NO: 1636217 - RNA, 19 nt, Homo sapiens
  misc_RNA (1)...(19): siRNA sense strand
gaaacaaaagagucuaaga

SEQ ID NO: 1636218 - RNA, 19 nt, Homo sapiens
  misc_RNA (1)...(19): siRNA sense strand
gccgauaugcuuuguacga

SEQ ID NO: 1636219 - RNA, 19 nt, Homo sapiens
  misc_RNA (1)...(19): siRNA sense strand
gugaaguugcuaccucuga

SEQ ID NO: 1636220 - RNA, 19 nt, Homo sapiens
  misc_RNA (1)...(19): siRNA sense strand
aaggaccguucgacacuug

SEQ ID NO: 1636221 - RNA, 19 nt, Homo sapiens
  misc_RNA (1)...(19): siRNA sense strand
ugaaaguaaggaaaucuuc

SEQ ID NO: 1636222 - RNA, 19 nt, Homo sapiens
  misc_RNA (1)...(19): siRNA sense strand
uaaacaugaguggcaagua

SEQ ID NO: 1636223 - RNA, 19 nt, Homo sapiens
  misc_RNA (1)...(19): siRNA sense strand
ccgauaugcuuuguacgau

SEQ ID NO: 1636224 - RNA, 19 nt, Homo sapiens
  misc_RNA (1)...(19): siRNA sense strand
cuucuggaguuacagugaa

SEQ ID NO: 1636225 - RNA, 19 nt, Homo sapiens
  misc_RNA (1)...(19): siRNA sense strand
gauauuaaggaccguucga

SEQ ID NO: 1636226 - RNA, 19 nt, Homo sapiens
  misc_RNA (1)...(19): siRNA sense strand
gcuuggaugauauuaagga

SEQ ID NO: 1636227 - RNA, 19 nt, Homo sapiens
  misc_RNA (1)...(19): siRNA sense strand
guugcuaccucugaaugau

SEQ ID NO: 1636228 - RNA, 19 nt, Homo sapiens
  misc_RNA (1)...(19): siRNA sense strand
uuuaagcgaugacaaaaga

SEQ ID NO: 1636229 - RNA, 19 nt, Homo sapiens
  misc_RNA (1)...(19): siRNA sense strand
ugcuaccucugaaugauug

SEQ ID NO: 1636230 - RNA, 19 nt, Homo sapiens
  misc_RNA (1)...(19): siRNA sense strand
gaugccacauacgaaacaa

SEQ ID NO: 1636231 - RNA, 19 nt, Homo sapiens
  misc_RNA (1)...(19): siRNA sense strand
cuacacaagaggagaucaa

SEQ ID NO: 1636232 - RNA, 19 nt, Homo sapiens
  misc_RNA (1)...(19): siRNA sense strand
aaugauugccgauaugcuu

SEQ ID NO: 1636233 - RNA, 19 nt, Homo sapiens
  misc_RNA (1)...(19): siRNA sense strand
gugggugacauuggugaua

SEQ ID NO: 1636234 - RNA, 19 nt, Homo sapiens
  misc_RNA (1)...(19): siRNA sense strand
cgacacuuggagagaaauu

SEQ ID NO: 1636235 - RNA, 19 nt, Homo sapiens
  misc_RNA (1)...(19): siRNA sense strand
aaguaaauggcuuggauga

SEQ ID NO: 1636236 - RNA, 19 nt, Homo sapiens
  misc_RNA (1)...(19): siRNA sense strand
acaaaagagucuaagaaag

SEQ ID NO: 1636237 - RNA, 19 nt, Homo sapiens
  misc_RNA (1)...(19): siRNA sense strand
gaaagaagaccuaguauuu

SEQ ID NO: 1636238 - RNA, 19 nt, Homo sapiens
  misc_RNA (1)...(19): siRNA sense strand
guaaauggcuuggaugaua

SEQ ID NO: 1636239 - RNA, 19 nt, Homo sapiens
  misc_RNA (1)...(19): siRNA sense strand
gcaguucucuucuguuuaa

SEQ ID NO: 1636240 - RNA, 19 nt, Homo sapiens
  misc_RNA (1)...(19): siRNA sense strand
gaaagcaguucucuucugu

SEQ ID NO: 1636241 - RNA, 19 nt, Homo sapiens
  misc_RNA (1)...(19): siRNA sense strand
aaacaugaguggcaaguaa

SEQ ID NO: 1636242 - RNA, 19 nt, Homo sapiens
  misc_RNA (1)...(19): siRNA sense strand
uaagaaagaagaccuagua

SEQ ID NO: 1636243 - RNA, 19 nt, Homo sapiens
  misc_RNA (1)...(19): siRNA sense strand
ugacauuggugauacugua

SEQ ID NO: 1636244 - RNA, 19 nt, Homo sapiens
  misc_RNA (1)...(19): siRNA sense strand
uaaauggcuuggaugauau

SEQ ID NO: 1636245 - RNA, 19 nt, Homo sapiens
  misc_RNA (1)...(19): siRNA sense strand
aagcaguucucuucuguuu

SEQ ID NO: 1636246 - RNA, 19 nt, Homo sapiens
  misc_RNA (1)...(19): siRNA sense strand
gggaggcaauguaguaguu

SEQ ID NO: 1636247 - RNA, 19 nt, Homo sapiens
  misc_RNA (1)...(19): siRNA sense strand
aaggaaaucuucuacacaa

SEQ ID NO: 1636248 - RNA, 19 nt, Homo sapiens
  misc_RNA (1)...(19): siRNA sense strand
gaguuacagugaaugauga

SEQ ID NO: 1636249 - RNA, 19 nt, Homo sapiens
  misc_RNA (1)...(19): siRNA sense strand
uaugcuagcucuaaagaug

SEQ ID NO: 1636250 - RNA, 19 nt, Homo sapiens
  misc_RNA (1)...(19): siRNA sense strand
gcucuaaagaugccauuaa

SEQ ID NO: 1636251 - RNA, 19 nt, Homo sapiens
  misc_RNA (1)...(19): siRNA sense strand
guaaggaaaucuucuacac

SEQ ID NO: 1636252 - RNA, 19 nt, Homo sapiens
  misc_RNA (1)...(19): siRNA sense strand
aaagcaagaugauuuaugc

SEQ ID NO: 1636253 - RNA, 19 nt, Homo sapiens
  misc_RNA (1)...(19): siRNA sense strand
ggaguuacagugaaugaug

SEQ ID NO: 1636254 - RNA, 19 nt, Homo sapiens
  misc_RNA (1)...(19): siRNA sense strand
caaaagagucuaagaaaga

SEQ ID NO: 1636255 - RNA, 19 nt, Homo sapiens
  misc_RNA (1)...(19): siRNA sense strand
ugaaguugcuaccucugaa

SEQ ID NO: 1636256 - RNA, 19 nt, Homo sapiens
  misc_RNA (1)...(19): siRNA sense strand
gaaaguaaggaaaucuucu

SEQ ID NO: 1636257 - RNA, 19 nt, Homo sapiens
  misc_RNA (1)...(19): siRNA sense strand
agaaagaagaccuaguauu

SEQ ID NO: 1636258 - RNA, 19 nt, Homo sapiens
  misc_RNA (1)...(19): siRNA sense strand
cucuaaagaugccauuaaa

SEQ ID NO: 1636259 - RNA, 19 nt, Homo sapiens
  misc_RNA (1)...(19): siRNA sense strand
gaucuuggugggugacauu

SEQ ID NO: 1636260 - RNA, 19 nt, Homo sapiens
  misc_RNA (1)...(19): siRNA sense strand
guucgacacuuggagagaa

SEQ ID NO: 1636261 - RNA, 19 nt, Homo sapiens
  misc_RNA (1)...(19): siRNA sense strand
guacgaugccacauacgaa

SEQ ID NO: 1636262 - RNA, 19 nt, Homo sapiens
  misc_RNA (1)...(19): siRNA sense strand
gaggcaauguaguaguuuc

SEQ ID NO: 1636263 - RNA, 19 nt, Homo sapiens
  misc_RNA (1)...(19): siRNA sense strand
ggaagcaaagcagaucuug

SEQ ID NO: 1636264 - RNA, 19 nt, Homo sapiens
  misc_RNA (1)...(19): siRNA sense strand
ucugaaugauugccgauau

SEQ ID NO: 1636265 - RNA, 19 nt, Homo sapiens
  misc_RNA (1)...(19): siRNA sense strand
gcaauguaguaguuucacu

SEQ ID NO: 1636266 - RNA, 19 nt, Homo sapiens
  misc_RNA (1)...(19): siRNA sense strand
uggcuuggaugauauuaag

SEQ ID NO: 1636267 - RNA, 19 nt, Homo sapiens
  misc_RNA (1)...(19): siRNA sense strand
aaagagaaagaaagcaguu

SEQ ID NO: 1636268 - RNA, 19 nt, Homo sapiens
  misc_RNA (1)...(19): siRNA sense strand
gaaguugcuaccucugaau

SEQ ID NO: 1636269 - RNA, 19 nt, Homo sapiens
  misc_RNA (1)...(19): siRNA sense strand
uaaggaaaucuucuacaca

SEQ ID NO: 1636270 - RNA, 19 nt, Homo sapiens
  misc_RNA (1)...(19): siRNA sense strand
ugauuuaugcuagcucuaa

SEQ ID NO: 1636271 - RNA, 19 nt, Homo sapiens
  misc_RNA (1)...(19): siRNA sense strand
auucugggcuccugaaagu

SEQ ID NO: 1636272 - RNA, 19 nt, Homo sapiens
  misc_RNA (1)...(19): siRNA sense strand
caauguaguaguuucacuu

SEQ ID NO: 1636273 - RNA, 19 nt, Homo sapiens
  misc_RNA (1)...(19): siRNA sense strand
aagcaaagcagaucuuggu

SEQ ID NO: 1636274 - RNA, 19 nt, Homo sapiens
  misc_RNA (1)...(19): siRNA sense strand
ggaggcaauguaguaguuu

SEQ ID NO: 1636275 - RNA, 19 nt, Homo sapiens
  misc_RNA (1)...(19): siRNA sense strand
cugaaugauugccgauaug

SEQ ID NO: 1636276 - RNA, 19 nt, Homo sapiens
  misc_RNA (1)...(19): siRNA sense strand
uaaggaccguucgacacuu

SEQ ID NO: 1636277 - RNA, 19 nt, Homo sapiens
  misc_RNA (1)...(19): siRNA sense strand
uacagugaaugaugaaguc

SEQ ID NO: 1636278 - RNA, 19 nt, Homo sapiens
  misc_RNA (1)...(19): siRNA sense strand
gaaacaaaagagucuaaga

SEQ ID NO: 1636279 - RNA, 19 nt, Homo sapiens
  misc_RNA (1)...(19): siRNA sense strand
gccgauaugcuuuguacga

SEQ ID NO: 1636280 - RNA, 19 nt, Homo sapiens
  misc_RNA (1)...(19): siRNA sense strand
gugaaguugcuaccucuga

SEQ ID NO: 1636281 - RNA, 19 nt, Homo sapiens
  misc_RNA (1)...(19): siRNA sense strand
aaggaccguucgacacuug

SEQ ID NO: 1636282 - RNA, 19 nt, Homo sapiens
  misc_RNA (1)...(19): siRNA sense strand
ugaaaguaaggaaaucuuc

SEQ ID NO: 1636283 - RNA, 19 nt, Homo sapiens
  misc_RNA (1)...(19): siRNA sense strand
uaaacaugaguggcaagua

SEQ ID NO: 1636284 - RNA, 19 nt, Homo sapiens
  misc_RNA (1)...(19): siRNA sense strand
ccgauaugcuuuguacgau

SEQ ID NO: 1636285 - RNA, 19 nt, Homo sapiens
  misc_RNA (1)...(19): siRNA sense strand
cuucuggaguuacagugaa

SEQ ID NO: 1636286 - RNA, 19 nt, Homo sapiens
  misc_RNA (1)...(19): siRNA sense strand
gauauuaaggaccguucga

SEQ ID NO: 1636287 - RNA, 19 nt, Homo sapiens
  misc_RNA (1)...(19): siRNA sense strand
gcuuggaugauauuaagga

SEQ ID NO: 1636288 - RNA, 19 nt, Homo sapiens
  misc_RNA (1)...(19): siRNA sense strand
guugcuaccucugaaugau

SEQ ID NO: 1636289 - RNA, 19 nt, Homo sapiens
  misc_RNA (1)...(19): siRNA sense strand
uuuaagcgaugacaaaaga

SEQ ID NO: 1636290 - RNA, 19 nt, Homo sapiens
  misc_RNA (1)...(19): siRNA sense strand
ugcuaccucugaaugauug

SEQ ID NO: 1636291 - RNA, 19 nt, Homo sapiens
  misc_RNA (1)...(19): siRNA sense strand
gaugccacauacgaaacaa

SEQ ID NO: 1636292 - RNA, 19 nt, Homo sapiens
  misc_RNA (1)...(19): siRNA sense strand
cuacacaagaggagaucaa

SEQ ID NO: 1636293 - RNA, 19 nt, Homo sapiens
  misc_RNA (1)...(19): siRNA sense strand
aaugauugccgauaugcuu

SEQ ID NO: 1636294 - RNA, 19 nt, Homo sapiens
  misc_RNA (1)...(19): siRNA sense strand
gugggugacauuggugaua

SEQ ID NO: 1636295 - RNA, 19 nt, Homo sapiens
  misc_RNA (1)...(19): siRNA sense strand
cgacacuuggagagaaauu

SEQ ID NO: 1636296 - RNA, 19 nt, Homo sapiens
  misc_RNA (1)...(19): siRNA sense strand
aaguaaauggcuuggauga

SEQ ID NO: 1636297 - RNA, 19 nt, Homo sapiens
  misc_RNA (1)...(19): siRNA sense strand
acaaaagagucuaagaaag

SEQ ID NO: 1636298 - RNA, 19 nt, Homo sapiens
  misc_RNA (1)...(19): siRNA sense strand
gaaagaagaccuaguauuu

SEQ ID NO: 1636299 - RNA, 19 nt, Homo sapiens
  misc_RNA (1)...(19): siRNA sense strand
guaaauggcuuggaugaua

SEQ ID NO: 1636300 - RNA, 19 nt, Homo sapiens
  misc_RNA (1)...(19): siRNA sense strand
gcaguucucuucuguuuaa

SEQ ID NO: 1636301 - RNA, 19 nt, Homo sapiens
  misc_RNA (1)...(19): siRNA sense strand
gaaagcaguucucuucugu

SEQ ID NO: 1636302 - RNA, 19 nt, Homo sapiens
  misc_RNA (1)...(19): siRNA sense strand
aaacaugaguggcaaguaa

SEQ ID NO: 1636303 - RNA, 19 nt, Homo sapiens
  misc_RNA (1)...(19): siRNA sense strand
uaagaaagaagaccuagua

SEQ ID NO: 1636304 - RNA, 19 nt, Homo sapiens
  misc_RNA (1)...(19): siRNA sense strand
ugacauuggugauacugua

SEQ ID NO: 1636305 - RNA, 19 nt, Homo sapiens
  misc_RNA (1)...(19): siRNA sense strand
uaaauggcuuggaugauau

SEQ ID NO: 1636306 - RNA, 19 nt, Homo sapiens
  misc_RNA (1)...(19): siRNA sense strand
aagcaguucucuucuguuu

SEQ ID NO: 1636307 - RNA, 19 nt, Homo sapiens
  misc_RNA (1)...(19): siRNA sense strand
gggaggcaauguaguaguu

SEQ ID NO: 1636308 - RNA, 19 nt, Homo sapiens
  misc_RNA (1)...(19): siRNA sense strand
aaggaaaucuucuacacaa

SEQ ID NO: 1636309 - RNA, 19 nt, Homo sapiens
  misc_RNA (1)...(19): siRNA sense strand
gaguuacagugaaugauga

SEQ ID NO: 1636310 - RNA, 19 nt, Homo sapiens
  misc_RNA (1)...(19): siRNA sense strand
uaugcuagcucuaaagaug

SEQ ID NO: 1636311 - RNA, 19 nt, Homo sapiens
  misc_RNA (1)...(19): siRNA sense strand
gcucuaaagaugccauuaa

SEQ ID NO: 1636312 - RNA, 19 nt, Homo sapiens
  misc_RNA (1)...(19): siRNA sense strand
guaaggaaaucuucuacac

SEQ ID NO: 1636313 - RNA, 19 nt, Homo sapiens
  misc_RNA (1)...(19): siRNA sense strand
aaagcaagaugauuuaugc

SEQ ID NO: 1636314 - RNA, 19 nt, Homo sapiens
  misc_RNA (1)...(19): siRNA sense strand
ggaguuacagugaaugaug

SEQ ID NO: 1636315 - RNA, 19 nt, Homo sapiens
  misc_RNA (1)...(19): siRNA sense strand
caaaagagucuaagaaaga

SEQ ID NO: 1636316 - RNA, 19 nt, Homo sapiens
  misc_RNA (1)...(19): siRNA sense strand
ugaaguugcuaccucugaa

SEQ ID NO: 1636317 - RNA, 19 nt, Homo sapiens
  misc_RNA (1)...(19): siRNA sense strand
gaaaguaaggaaaucuucu

SEQ ID NO: 1636318 - RNA, 19 nt, Homo sapiens
  misc_RNA (1)...(19): siRNA sense strand
agaaagaagaccuaguauu

SEQ ID NO: 1636319 - RNA, 19 nt, Homo sapiens
  misc_RNA (1)...(19): siRNA sense strand
cucuaaagaugccauuaaa

SEQ ID NO: 1636320 - RNA, 19 nt, Homo sapiens
  misc_RNA (1)...(19): siRNA sense strand
gaucuuggugggugacauu

SEQ ID NO: 1636321 - RNA, 19 nt, Homo sapiens
  misc_RNA (1)...(19): siRNA sense strand
guucgacacuuggagagaa

SEQ ID NO: 1636322 - RNA, 19 nt, Homo sapiens
  misc_RNA (1)...(19): siRNA sense strand
guacgaugccacauacgaa

SEQ ID NO: 1636323 - RNA, 19 nt, Homo sapiens
  misc_RNA (1)...(19): siRNA sense strand
gaggcaauguaguaguuuc

SEQ ID NO: 1636324 - RNA, 19 nt, Homo sapiens
  misc_RNA (1)...(19): siRNA sense strand
ggaagcaaagcagaucuug

SEQ ID NO: 1636325 - RNA, 19 nt, Homo sapiens
  misc_RNA (1)...(19): siRNA sense strand
ucugaaugauugccgauau

SEQ ID NO: 1636326 - RNA, 19 nt, Homo sapiens
  misc_RNA (1)...(19): siRNA sense strand
gcaauguaguaguuucacu

SEQ ID NO: 1636327 - RNA, 19 nt, Homo sapiens
  misc_RNA (1)...(19): siRNA sense strand
uggcuuggaugauauuaag

SEQ ID NO: 1636328 - RNA, 19 nt, Homo sapiens
  misc_RNA (1)...(19): siRNA sense strand
aaagagaaagaaagcaguu

SEQ ID NO: 1636329 - RNA, 19 nt, Homo sapiens
  misc_RNA (1)...(19): siRNA sense strand
gaaguugcuaccucugaau

SEQ ID NO: 1636330 - RNA, 19 nt, Homo sapiens
  misc_RNA (1)...(19): siRNA sense strand
uaaggaaaucuucuacaca

SEQ ID NO: 1636331 - RNA, 19 nt, Homo sapiens
  misc_RNA (1)...(19): siRNA sense strand
ugauuuaugcuagcucuaa

SEQ ID NO: 1636332 - RNA, 19 nt, Homo sapiens
  misc_RNA (1)...(19): siRNA sense strand
auucugggcuccugaaagu

SEQ ID NO: 1636333 - RNA, 19 nt, Homo sapiens
  misc_RNA (1)...(19): siRNA sense strand
caauguaguaguuucacuu

SEQ ID NO: 1636334 - RNA, 19 nt, Homo sapiens
  misc_RNA (1)...(19): siRNA sense strand
aagcaaagcagaucuuggu

SEQ ID NO: 1636335 - RNA, 19 nt, Homo sapiens
  misc_RNA (1)...(19): siRNA sense strand
ggaggcaauguaguaguuu

SEQ ID NO: 1636336 - RNA, 19 nt, Homo sapiens
  misc_RNA (1)...(19): siRNA sense strand
cugaaugauugccgauaug

SEQ ID NO: 1636337 - RNA, 19 nt, Homo sapiens
  misc_RNA (1)...(19): siRNA sense strand
uaaggaccguucgacacuu

SEQ ID NO: 1636338 - RNA, 19 nt, Homo sapiens
  misc_RNA (1)...(19): siRNA sense strand
uacagugaaugaugaaguc

SEQ ID NO: 1636339 - RNA, 19 nt, Homo sapiens
  misc_RNA (1)...(19): siRNA sense strand
gaaacaaaagagucuaaga

SEQ ID NO: 1636340 - RNA, 19 nt, Homo sapiens
  misc_RNA (1)...(19): siRNA sense strand
gccgauaugcuuuguacga

SEQ ID NO: 1636341 - RNA, 19 nt, Homo sapiens
  misc_RNA (1)...(19): siRNA sense strand
gugaaguugcuaccucuga

SEQ ID NO: 1636342 - RNA, 19 nt, Homo sapiens
  misc_RNA (1)...(19): siRNA sense strand
aaggaccguucgacacuug

SEQ ID NO: 1636343 - RNA, 19 nt, Homo sapiens
  misc_RNA (1)...(19): siRNA sense strand
ugaaaguaaggaaaucuuc

SEQ ID NO: 1636344 - RNA, 19 nt, Homo sapiens
  misc_RNA (1)...(19): siRNA sense strand
uaaacaugaguggcaagua

SEQ ID NO: 1636345 - RNA, 19 nt, Homo sapiens
  misc_RNA (1)...(19): siRNA sense strand
ccgauaugcuuuguacgau

SEQ ID NO: 1636346 - RNA, 19 nt, Homo sapiens
  misc_RNA (1)...(19): siRNA sense strand
cuucuggaguuacagugaa

SEQ ID NO: 1636347 - RNA, 19 nt, Homo sapiens
  misc_RNA (1)...(19): siRNA sense strand
gauauuaaggaccguucga

SEQ ID NO: 1636348 - RNA, 19 nt, Homo sapiens
  misc_RNA (1)...(19): siRNA sense strand
gcuuggaugauauuaagga

SEQ ID NO: 1636349 - RNA, 19 nt, Homo sapiens
  misc_RNA (1)...(19): siRNA sense strand
guugcuaccucugaaugau

SEQ ID NO: 1636350 - RNA, 19 nt, Homo sapiens
  misc_RNA (1)...(19): siRNA sense strand
uuuaagcgaugacaaaaga

SEQ ID NO: 1636351 - RNA, 19 nt, Homo sapiens
  misc_RNA (1)...(19): siRNA sense strand
ugcuaccucugaaugauug

SEQ ID NO: 1636352 - RNA, 19 nt, Homo sapiens
  misc_RNA (1)...(19): siRNA sense strand
gaugccacauacgaaacaa

SEQ ID NO: 1636353 - RNA, 19 nt, Homo sapiens
  misc_RNA (1)...(19): siRNA sense strand
cuacacaagaggagaucaa

SEQ ID NO: 1636354 - RNA, 19 nt, Homo sapiens
  misc_RNA (1)...(19): siRNA sense strand
aaugauugccgauaugcuu

SEQ ID NO: 1636355 - RNA, 19 nt, Homo sapiens
  misc_RNA (1)...(19): siRNA sense strand
gugggugacauuggugaua

SEQ ID NO: 1636356 - RNA, 19 nt, Homo sapiens
  misc_RNA (1)...(19): siRNA sense strand
cgacacuuggagagaaauu

SEQ ID NO: 1636357 - RNA, 19 nt, Homo sapiens
  misc_RNA (1)...(19): siRNA sense strand
aaguaaauggcuuggauga

SEQ ID NO: 1636358 - RNA, 19 nt, Homo sapiens
  misc_RNA (1)...(19): siRNA sense strand
acaaaagagucuaagaaag

SEQ ID NO: 1636359 - RNA, 19 nt, Homo sapiens
  misc_RNA (1)...(19): siRNA sense strand
gaaguggacuccucagaua

SEQ ID NO: 1636360 - RNA, 19 nt, Homo sapiens
  misc_RNA (1)...(19): siRNA sense strand
ugaaacaucuguacaagaa

SEQ ID NO: 1636361 - RNA, 19 nt, Homo sapiens
  misc_RNA (1)...(19): siRNA sense strand
gaaaugccaucaaggauca

SEQ ID NO: 1636362 - RNA, 19 nt, Homo sapiens
  misc_RNA (1)...(19): siRNA sense strand
caaacuccaugacagauuu

SEQ ID NO: 1636363 - RNA, 19 nt, Homo sapiens
  misc_RNA (1)...(19): siRNA sense strand
acagaugucuucuugagua

SEQ ID NO: 1636364 - RNA, 19 nt, Homo sapiens
  misc_RNA (1)...(19): siRNA sense strand
gaaacucucaucaauggua

SEQ ID NO: 1636365 - RNA, 19 nt, Homo sapiens
  misc_RNA (1)...(19): siRNA sense strand
ugaaaggacuccagagaga

SEQ ID NO: 1636366 - RNA, 19 nt, Homo sapiens
  misc_RNA (1)...(19): siRNA sense strand
gaggguggcuuaguggaua

SEQ ID NO: 1636367 - RNA, 19 nt, Homo sapiens
  misc_RNA (1)...(19): siRNA sense strand
ggaauuugucucccuguua

SEQ ID NO: 1636368 - RNA, 19 nt, Homo sapiens
  misc_RNA (1)...(19): siRNA sense strand
cagaaacucucaucaaugg

SEQ ID NO: 1636369 - RNA, 19 nt, Homo sapiens
  misc_RNA (1)...(19): siRNA sense strand
gaauuugucucccuguuag

SEQ ID NO: 1636370 - RNA, 19 nt, Homo sapiens
  misc_RNA (1)...(19): siRNA sense strand
gcagaaauuguuaacgaua

SEQ ID NO: 1636371 - RNA, 19 nt, Homo sapiens
  misc_RNA (1)...(19): siRNA sense strand
ggaaggaaggccagacuaa

SEQ ID NO: 1636372 - RNA, 19 nt, Homo sapiens
  misc_RNA (1)...(19): siRNA sense strand
gcacagagaagaccagugu

SEQ ID NO: 1636373 - RNA, 19 nt, Homo sapiens
  misc_RNA (1)...(19): siRNA sense strand
gaaucggugucccggcuua

SEQ ID NO: 1636374 - RNA, 19 nt, Homo sapiens
  misc_RNA (1)...(19): siRNA sense strand
caggucagcuccuccagua

SEQ ID NO: 1636375 - RNA, 19 nt, Homo sapiens
  misc_RNA (1)...(19): siRNA sense strand
ggacaaaugccaaaugagu

SEQ ID NO: 1636376 - RNA, 19 nt, Homo sapiens
  misc_RNA (1)...(19): siRNA sense strand
cacagaaacucucaucaau

SEQ ID NO: 1636377 - RNA, 19 nt, Homo sapiens
  misc_RNA (1)...(19): siRNA sense strand
aaacaucuguacaagaaga

SEQ ID NO: 1636378 - RNA, 19 nt, Homo sapiens
  misc_RNA (1)...(19): siRNA sense strand
caggguaacuucccaacaa

SEQ ID NO: 1636379 - RNA, 19 nt, Homo sapiens
  misc_RNA (1)...(19): siRNA sense strand
gaucucaauuccuguaauc

SEQ ID NO: 1636380 - RNA, 19 nt, Homo sapiens
  misc_RNA (1)...(19): siRNA sense strand
aaucugaccuagaggcuaa

SEQ ID NO: 1636381 - RNA, 19 nt, Homo sapiens
  misc_RNA (1)...(19): siRNA sense strand
aaggacaaaugccaaauga

SEQ ID NO: 1636382 - RNA, 19 nt, Homo sapiens
  misc_RNA (1)...(19): siRNA sense strand
gaaggacaaaugccaaaug

SEQ ID NO: 1636383 - RNA, 19 nt, Homo sapiens
  misc_RNA (1)...(19): siRNA sense strand
caauagacaaagacagaua

SEQ ID NO: 1636384 - RNA, 19 nt, Homo sapiens
  misc_RNA (1)...(19): siRNA sense strand
ccacagaaacucucaucaa

SEQ ID NO: 1636385 - RNA, 19 nt, Homo sapiens
  misc_RNA (1)...(19): siRNA sense strand
gauacaggcuccgagucua

SEQ ID NO: 1636386 - RNA, 19 nt, Homo sapiens
  misc_RNA (1)...(19): siRNA sense strand
gcagaucucaauuccugua

SEQ ID NO: 1636387 - RNA, 19 nt, Homo sapiens
  misc_RNA (1)...(19): siRNA sense strand
cgaaggcaauggaagugaa

SEQ ID NO: 1636388 - RNA, 19 nt, Homo sapiens
  misc_RNA (1)...(19): siRNA sense strand
ccucuaccaucaaauaaug

SEQ ID NO: 1636389 - RNA, 19 nt, Homo sapiens
  misc_RNA (1)...(19): siRNA sense strand
cagcugagcagaaugaaga

SEQ ID NO: 1636390 - RNA, 19 nt, Homo sapiens
  misc_RNA (1)...(19): siRNA sense strand
ggaaguggacuccucagau

SEQ ID NO: 1636391 - RNA, 19 nt, Homo sapiens
  misc_RNA (1)...(19): siRNA sense strand
gcagcugcccucaauguga

SEQ ID NO: 1636392 - RNA, 19 nt, Homo sapiens
  misc_RNA (1)...(19): siRNA sense strand
caucaaggaucacaguucu

SEQ ID NO: 1636393 - RNA, 19 nt, Homo sapiens
  misc_RNA (1)...(19): siRNA sense strand
gagaagaccaguguaaagu

SEQ ID NO: 1636394 - RNA, 19 nt, Homo sapiens
  misc_RNA (1)...(19): siRNA sense strand
gauagugagguagcuguua

SEQ ID NO: 1636395 - RNA, 19 nt, Homo sapiens
  misc_RNA (1)...(19): siRNA sense strand
ucucaucaaugguaaagga

SEQ ID NO: 1636396 - RNA, 19 nt, Homo sapiens
  misc_RNA (1)...(19): siRNA sense strand
gcacucagccugccaagac

SEQ ID NO: 1636397 - RNA, 19 nt, Homo sapiens
  misc_RNA (1)...(19): siRNA sense strand
aaacucucaucaaugguaa

SEQ ID NO: 1636398 - RNA, 19 nt, Homo sapiens
  misc_RNA (1)...(19): siRNA sense strand
gaaggcaauggaagugaaa

SEQ ID NO: 1636399 - RNA, 19 nt, Homo sapiens
  misc_RNA (1)...(19): siRNA sense strand
ggcaauagacaaagacaga

SEQ ID NO: 1636400 - RNA, 19 nt, Homo sapiens
  misc_RNA (1)...(19): siRNA sense strand
cugcagaaauuguuaacga

SEQ ID NO: 1636401 - RNA, 19 nt, Homo sapiens
  misc_RNA (1)...(19): siRNA sense strand
cagaugucuucuugaguaa

SEQ ID NO: 1636402 - RNA, 19 nt, Homo sapiens
  misc_RNA (1)...(19): siRNA sense strand
ggaucacaguucuucauca

SEQ ID NO: 1636403 - RNA, 19 nt, Homo sapiens
  misc_RNA (1)...(19): siRNA sense strand
cauuaauacuuccaagaug

SEQ ID NO: 1636404 - RNA, 19 nt, Homo sapiens
  misc_RNA (1)...(19): siRNA sense strand
ggaaauuagauccuguuau

SEQ ID NO: 1636405 - RNA, 19 nt, Homo sapiens
  misc_RNA (1)...(19): siRNA sense strand
caaagucaagaccauacua

SEQ ID NO: 1636406 - RNA, 19 nt, Homo sapiens
  misc_RNA (1)...(19): siRNA sense strand
cagccucuaccaucaaaua

SEQ ID NO: 1636407 - RNA, 19 nt, Homo sapiens
  misc_RNA (1)...(19): siRNA sense strand
guaacuucccaacaagaua

SEQ ID NO: 1636408 - RNA, 19 nt, Homo sapiens
  misc_RNA (1)...(19): siRNA sense strand
acagagaagaccaguguaa

SEQ ID NO: 1636409 - RNA, 19 nt, Homo sapiens
  misc_RNA (1)...(19): siRNA sense strand
gggaaauuagauccuguua

SEQ ID NO: 1636410 - RNA, 19 nt, Homo sapiens
  misc_RNA (1)...(19): siRNA sense strand
gggaacggguacaaagcaa

SEQ ID NO: 1636411 - RNA, 19 nt, Homo sapiens
  misc_RNA (1)...(19): siRNA sense strand
ucagugcccuucagcaaca

SEQ ID NO: 1636412 - RNA, 19 nt, Homo sapiens
  misc_RNA (1)...(19): siRNA sense strand
uaccacaacuucugagagu

SEQ ID NO: 1636413 - RNA, 19 nt, Homo sapiens
  misc_RNA (1)...(19): siRNA sense strand
ucagggcaauagacaaaga

SEQ ID NO: 1636414 - RNA, 19 nt, Homo sapiens
  misc_RNA (1)...(19): siRNA sense strand
cagaaauuguuaacgauac

SEQ ID NO: 1636415 - RNA, 19 nt, Homo sapiens
  misc_RNA (1)...(19): siRNA sense strand
gaucacaguucuucaucac

SEQ ID NO: 1636416 - RNA, 19 nt, Homo sapiens
  misc_RNA (1)...(19): siRNA sense strand
gcuguuacucucaucgaua

SEQ ID NO: 1636417 - RNA, 19 nt, Homo sapiens
  misc_RNA (1)...(19): siRNA sense strand
gaacggguacaaagcaagu

SEQ ID NO: 1636418 - RNA, 19 nt, Homo sapiens
  misc_RNA (1)...(19): siRNA sense strand
cuaugcaugucuucauuga

SEQ ID NO: 1636419 - RNA, 19 nt, Homo sapiens
  misc_RNA (1)...(19): siRNA sense strand
gagucuacaugagcccaua

SEQ ID NO: 1636420 - RNA, 19 nt, Homo sapiens
  misc_RNA (1)...(19): siRNA sense strand
ggaaaccacgaccaaguca

SEQ ID NO: 1636421 - RNA, 19 nt, Homo sapiens
  misc_RNA (1)...(19): siRNA sense strand
augcaugucuucauugaug

SEQ ID NO: 1636422 - RNA, 19 nt, Homo sapiens
  misc_RNA (1)...(19): siRNA sense strand
aaacaaugccaacuuccaa

SEQ ID NO: 1636423 - RNA, 19 nt, Homo sapiens
  misc_RNA (1)...(19): siRNA sense strand
caucaaugguaaaggaaag

SEQ ID NO: 1636424 - RNA, 19 nt, Homo sapiens
  misc_RNA (1)...(19): siRNA sense strand
aaccagauuugcaaaguca

SEQ ID NO: 1636425 - RNA, 19 nt, Homo sapiens
  misc_RNA (1)...(19): siRNA sense strand
uguuaacgauacagagaaa

SEQ ID NO: 1636426 - RNA, 19 nt, Homo sapiens
  misc_RNA (1)...(19): siRNA sense strand
agauaucuguggaugcuau

SEQ ID NO: 1636427 - RNA, 19 nt, Homo sapiens
  misc_RNA (1)...(19): siRNA sense strand
cagagaagaccaguguaaa

SEQ ID NO: 1636428 - RNA, 19 nt, Homo sapiens
  misc_RNA (1)...(19): siRNA sense strand
ccacaacuucugagaguca

SEQ ID NO: 1636429 - RNA, 19 nt, Homo sapiens
  misc_RNA (1)...(19): siRNA sense strand
ccaaacuccaugacagauu

SEQ ID NO: 1636430 - RNA, 19 nt, Homo sapiens
  misc_RNA (1)...(19): siRNA sense strand
ccauuaauacuuccaagau

SEQ ID NO: 1636431 - RNA, 19 nt, Homo sapiens
  misc_RNA (1)...(19): siRNA sense strand
gaugucuucuugaguaaaa

SEQ ID NO: 1636432 - RNA, 19 nt, Homo sapiens
  misc_RNA (1)...(19): siRNA sense strand
uaagggaacggguacaaag

SEQ ID NO: 1636433 - RNA, 19 nt, Homo sapiens
  misc_RNA (1)...(19): siRNA sense strand
caucaaauaaugacugucu

SEQ ID NO: 1636434 - RNA, 19 nt, Homo sapiens
  misc_RNA (1)...(19): siRNA sense strand
uaacuucccaacaagauag

SEQ ID NO: 1636435 - RNA, 19 nt, Homo sapiens
  misc_RNA (1)...(19): siRNA sense strand
ugagcagaaugaagaaagu

SEQ ID NO: 1636436 - RNA, 19 nt, Homo sapiens
  misc_RNA (1)...(19): siRNA sense strand
agacgaggguauccaccaa

SEQ ID NO: 1636437 - RNA, 19 nt, Homo sapiens
  misc_RNA (1)...(19): siRNA sense strand
uccagaaccugucaguugu

SEQ ID NO: 1636438 - RNA, 19 nt, Homo sapiens
  misc_RNA (1)...(19): siRNA sense strand
agauaguucugucuugcaa

SEQ ID NO: 1636439 - RNA, 19 nt, Homo sapiens
  misc_RNA (1)...(19): siRNA sense strand
gcaaggaaaaccagauuug

SEQ ID NO: 1636440 - RNA, 19 nt, Homo sapiens
  misc_RNA (1)...(19): siRNA sense strand
ccuagaggcuaaggaagga

SEQ ID NO: 1636441 - RNA, 19 nt, Homo sapiens
  misc_RNA (1)...(19): siRNA sense strand
ugaccuagaggcuaaggaa

SEQ ID NO: 1636442 - RNA, 19 nt, Homo sapiens
  misc_RNA (1)...(19): siRNA sense strand
uuccaaaucugaccuagag

SEQ ID NO: 1636443 - RNA, 19 nt, Homo sapiens
  misc_RNA (1)...(19): siRNA sense strand
gggaaggaaggccagacua

SEQ ID NO: 1636444 - RNA, 19 nt, Homo sapiens
  misc_RNA (1)...(19): siRNA sense strand
ucucaucgauacuucucaa

SEQ ID NO: 1636445 - RNA, 19 nt, Homo sapiens
  misc_RNA (1)...(19): siRNA sense strand
gaacauggggaaauuagau

SEQ ID NO: 1636446 - RNA, 19 nt, Homo sapiens
  misc_RNA (1)...(19): siRNA sense strand
aaaccagauuugcaaaguc

SEQ ID NO: 1636447 - RNA, 19 nt, Homo sapiens
  misc_RNA (1)...(19): siRNA sense strand
ccaguggacacaguucuaa

SEQ ID NO: 1636448 - RNA, 19 nt, Homo sapiens
  misc_RNA (1)...(19): siRNA sense strand
acagaaacucucaucaaug

SEQ ID NO: 1636449 - RNA, 19 nt, Homo sapiens
  misc_RNA (1)...(19): siRNA sense strand
ucaaggaucacaguucuuc

SEQ ID NO: 1636450 - RNA, 19 nt, Homo sapiens
  misc_RNA (1)...(19): siRNA sense strand
gggaaaugccaucaaggau

SEQ ID NO: 1636451 - RNA, 19 nt, Homo sapiens
  misc_RNA (1)...(19): siRNA sense strand
cagauccgaggguggcuua

SEQ ID NO: 1636452 - RNA, 19 nt, Homo sapiens
  misc_RNA (1)...(19): siRNA sense strand
uacagccucuaccaucaaa

SEQ ID NO: 1636453 - RNA, 19 nt, Homo sapiens
  misc_RNA (1)...(19): siRNA sense strand
gguaacuucccaacaagau

SEQ ID NO: 1636454 - RNA, 19 nt, Homo sapiens
  misc_RNA (1)...(19): siRNA sense strand
acacaguucuaagcaagga

SEQ ID NO: 1636455 - RNA, 19 nt, Homo sapiens
  misc_RNA (1)...(19): siRNA sense strand
gaaggaaggccagacuaac

SEQ ID NO: 1636456 - RNA, 19 nt, Homo sapiens
  misc_RNA (1)...(19): siRNA sense strand
ggaggagccagcagacaca

SEQ ID NO: 1636457 - RNA, 19 nt, Homo sapiens
  misc_RNA (1)...(19): siRNA sense strand
caacaagauaguucugucu

SEQ ID NO: 1636458 - RNA, 19 nt, Homo sapiens
  misc_RNA (1)...(19): siRNA sense strand
uaaaaccaguugccacaga

SEQ ID NO: 1636459 - RNA, 19 nt, Homo sapiens
  misc_RNA (1)...(19): siRNA sense strand
gaaguggacuccucagaua

SEQ ID NO: 1636460 - RNA, 19 nt, Homo sapiens
  misc_RNA (1)...(19): siRNA sense strand
ugaaacaucuguacaagaa

SEQ ID NO: 1636461 - RNA, 19 nt, Homo sapiens
  misc_RNA (1)...(19): siRNA sense strand
gaaaugccaucaaggauca

SEQ ID NO: 1636462 - RNA, 19 nt, Homo sapiens
  misc_RNA (1)...(19): siRNA sense strand
caaacuccaugacagauuu

SEQ ID NO: 1636463 - RNA, 19 nt, Homo sapiens
  misc_RNA (1)...(19): siRNA sense strand
acagaugucuucuugagua

SEQ ID NO: 1636464 - RNA, 19 nt, Homo sapiens
  misc_RNA (1)...(19): siRNA sense strand
gaaacucucaucaauggua

SEQ ID NO: 1636465 - RNA, 19 nt, Homo sapiens
  misc_RNA (1)...(19): siRNA sense strand
ugaaaggacuccagagaga

SEQ ID NO: 1636466 - RNA, 19 nt, Homo sapiens
  misc_RNA (1)...(19): siRNA sense strand
gaggguggcuuaguggaua

SEQ ID NO: 1636467 - RNA, 19 nt, Homo sapiens
  misc_RNA (1)...(19): siRNA sense strand
ggaauuugucucccuguua

SEQ ID NO: 1636468 - RNA, 19 nt, Homo sapiens
  misc_RNA (1)...(19): siRNA sense strand
cagaaacucucaucaaugg

SEQ ID NO: 1636469 - RNA, 19 nt, Homo sapiens
  misc_RNA (1)...(19): siRNA sense strand
gaauuugucucccuguuag

SEQ ID NO: 1636470 - RNA, 19 nt, Homo sapiens
  misc_RNA (1)...(19): siRNA sense strand
gcagaaauuguuaacgaua

SEQ ID NO: 1636471 - RNA, 19 nt, Homo sapiens
  misc_RNA (1)...(19): siRNA sense strand
ggaaggaaggccagacuaa

SEQ ID NO: 1636472 - RNA, 19 nt, Homo sapiens
  misc_RNA (1)...(19): siRNA sense strand
gcacagagaagaccagugu

SEQ ID NO: 1636473 - RNA, 19 nt, Homo sapiens
  misc_RNA (1)...(19): siRNA sense strand
gaaucggugucccggcuua

SEQ ID NO: 1636474 - RNA, 19 nt, Homo sapiens
  misc_RNA (1)...(19): siRNA sense strand
caggucagcuccuccagua

SEQ ID NO: 1636475 - RNA, 19 nt, Homo sapiens
  misc_RNA (1)...(19): siRNA sense strand
ggacaaaugccaaaugagu

SEQ ID NO: 1636476 - RNA, 19 nt, Homo sapiens
  misc_RNA (1)...(19): siRNA sense strand
cacagaaacucucaucaau

SEQ ID NO: 1636477 - RNA, 19 nt, Homo sapiens
  misc_RNA (1)...(19): siRNA sense strand
aaacaucuguacaagaaga

SEQ ID NO: 1636478 - RNA, 19 nt, Homo sapiens
  misc_RNA (1)...(19): siRNA sense strand
caggguaacuucccaacaa

SEQ ID NO: 1636479 - RNA, 19 nt, Homo sapiens
  misc_RNA (1)...(19): siRNA sense strand
gaucucaauuccuguaauc

SEQ ID NO: 1636480 - RNA, 19 nt, Homo sapiens
  misc_RNA (1)...(19): siRNA sense strand
aaucugaccuagaggcuaa

SEQ ID NO: 1636481 - RNA, 19 nt, Homo sapiens
  misc_RNA (1)...(19): siRNA sense strand
aaggacaaaugccaaauga

SEQ ID NO: 1636482 - RNA, 19 nt, Homo sapiens
  misc_RNA (1)...(19): siRNA sense strand
gaaggacaaaugccaaaug

SEQ ID NO: 1636483 - RNA, 19 nt, Homo sapiens
  misc_RNA (1)...(19): siRNA sense strand
caauagacaaagacagaua

SEQ ID NO: 1636484 - RNA, 19 nt, Homo sapiens
  misc_RNA (1)...(19): siRNA sense strand
ccacagaaacucucaucaa

SEQ ID NO: 1636485 - RNA, 19 nt, Homo sapiens
  misc_RNA (1)...(19): siRNA sense strand
gauacaggcuccgagucua

SEQ ID NO: 1636486 - RNA, 19 nt, Homo sapiens
  misc_RNA (1)...(19): siRNA sense strand
gcagaucucaauuccugua

SEQ ID NO: 1636487 - RNA, 19 nt, Homo sapiens
  misc_RNA (1)...(19): siRNA sense strand
cgaaggcaauggaagugaa

SEQ ID NO: 1636488 - RNA, 19 nt, Homo sapiens
  misc_RNA (1)...(19): siRNA sense strand
ccucuaccaucaaauaaug

SEQ ID NO: 1636489 - RNA, 19 nt, Homo sapiens
  misc_RNA (1)...(19): siRNA sense strand
cagcugagcagaaugaaga

SEQ ID NO: 1636490 - RNA, 19 nt, Homo sapiens
  misc_RNA (1)...(19): siRNA sense strand
ggaaguggacuccucagau

SEQ ID NO: 1636491 - RNA, 19 nt, Homo sapiens
  misc_RNA (1)...(19): siRNA sense strand
gcagcugcccucaauguga

SEQ ID NO: 1636492 - RNA, 19 nt, Homo sapiens
  misc_RNA (1)...(19): siRNA sense strand
caucaaggaucacaguucu

SEQ ID NO: 1636493 - RNA, 19 nt, Homo sapiens
  misc_RNA (1)...(19): siRNA sense strand
gagaagaccaguguaaagu

SEQ ID NO: 1636494 - RNA, 19 nt, Homo sapiens
  misc_RNA (1)...(19): siRNA sense strand
gauagugagguagcuguua

SEQ ID NO: 1636495 - RNA, 19 nt, Homo sapiens
  misc_RNA (1)...(19): siRNA sense strand
ucucaucaaugguaaagga

SEQ ID NO: 1636496 - RNA, 19 nt, Homo sapiens
  misc_RNA (1)...(19): siRNA sense strand
gcacucagccugccaagac

SEQ ID NO: 1636497 - RNA, 19 nt, Homo sapiens
  misc_RNA (1)...(19): siRNA sense strand
aaacucucaucaaugguaa

SEQ ID NO: 1636498 - RNA, 19 nt, Homo sapiens
  misc_RNA (1)...(19): siRNA sense strand
gaaggcaauggaagugaaa

SEQ ID NO: 1636499 - RNA, 19 nt, Homo sapiens
  misc_RNA (1)...(19): siRNA sense strand
ggcaauagacaaagacaga

SEQ ID NO: 1636500 - RNA, 19 nt, Homo sapiens
  misc_RNA (1)...(19): siRNA sense strand
cugcagaaauuguuaacga

SEQ ID NO: 1636501 - RNA, 19 nt, Homo sapiens
  misc_RNA (1)...(19): siRNA sense strand
cagaugucuucuugaguaa

SEQ ID NO: 1636502 - RNA, 19 nt, Homo sapiens
  misc_RNA (1)...(19): siRNA sense strand
ggaucacaguucuucauca

SEQ ID NO: 1636503 - RNA, 19 nt, Homo sapiens
  misc_RNA (1)...(19): siRNA sense strand
cauuaauacuuccaagaug

SEQ ID NO: 1636504 - RNA, 19 nt, Homo sapiens
  misc_RNA (1)...(19): siRNA sense strand
ggaaauuagauccuguuau

SEQ ID NO: 1636505 - RNA, 19 nt, Homo sapiens
  misc_RNA (1)...(19): siRNA sense strand
caaagucaagaccauacua

SEQ ID NO: 1636506 - RNA, 19 nt, Homo sapiens
  misc_RNA (1)...(19): siRNA sense strand
cagccucuaccaucaaaua

SEQ ID NO: 1636507 - RNA, 19 nt, Homo sapiens
  misc_RNA (1)...(19): siRNA sense strand
guaacuucccaacaagaua

SEQ ID NO: 1636508 - RNA, 19 nt, Homo sapiens
  misc_RNA (1)...(19): siRNA sense strand
acagagaagaccaguguaa

SEQ ID NO: 1636509 - RNA, 19 nt, Homo sapiens
  misc_RNA (1)...(19): siRNA sense strand
gggaaauuagauccuguua

SEQ ID NO: 1636510 - RNA, 19 nt, Homo sapiens
  misc_RNA (1)...(19): siRNA sense strand
gggaacggguacaaagcaa

SEQ ID NO: 1636511 - RNA, 19 nt, Homo sapiens
  misc_RNA (1)...(19): siRNA sense strand
ucagugcccuucagcaaca

SEQ ID NO: 1636512 - RNA, 19 nt, Homo sapiens
  misc_RNA (1)...(19): siRNA sense strand
uaccacaacuucugagagu

SEQ ID NO: 1636513 - RNA, 19 nt, Homo sapiens
  misc_RNA (1)...(19): siRNA sense strand
ucagggcaauagacaaaga

SEQ ID NO: 1636514 - RNA, 19 nt, Homo sapiens
  misc_RNA (1)...(19): siRNA sense strand
cagaaauuguuaacgauac

SEQ ID NO: 1636515 - RNA, 19 nt, Homo sapiens
  misc_RNA (1)...(19): siRNA sense strand
gaucacaguucuucaucac

SEQ ID NO: 1636516 - RNA, 19 nt, Homo sapiens
  misc_RNA (1)...(19): siRNA sense strand
gcuguuacucucaucgaua

SEQ ID NO: 1636517 - RNA, 19 nt, Homo sapiens
  misc_RNA (1)...(19): siRNA sense strand
gaacggguacaaagcaagu

SEQ ID NO: 1636518 - RNA, 19 nt, Homo sapiens
  misc_RNA (1)...(19): siRNA sense strand
cuaugcaugucuucauuga

SEQ ID NO: 1636519 - RNA, 19 nt, Homo sapiens
  misc_RNA (1)...(19): siRNA sense strand
gagucuacaugagcccaua

SEQ ID NO: 1636520 - RNA, 19 nt, Homo sapiens
  misc_RNA (1)...(19): siRNA sense strand
ggaaaccacgaccaaguca

SEQ ID NO: 1636521 - RNA, 19 nt, Homo sapiens
  misc_RNA (1)...(19): siRNA sense strand
augcaugucuucauugaug

SEQ ID NO: 1636522 - RNA, 19 nt, Homo sapiens
  misc_RNA (1)...(19): siRNA sense strand
aaacaaugccaacuuccaa

SEQ ID NO: 1636523 - RNA, 19 nt, Homo sapiens
  misc_RNA (1)...(19): siRNA sense strand
caucaaugguaaaggaaag

SEQ ID NO: 1636524 - RNA, 19 nt, Homo sapiens
  misc_RNA (1)...(19): siRNA sense strand
aaccagauuugcaaaguca

SEQ ID NO: 1636525 - RNA, 19 nt, Homo sapiens
  misc_RNA (1)...(19): siRNA sense strand
uguuaacgauacagagaaa

SEQ ID NO: 1636526 - RNA, 19 nt, Homo sapiens
  misc_RNA (1)...(19): siRNA sense strand
agauaucuguggaugcuau

SEQ ID NO: 1636527 - RNA, 19 nt, Homo sapiens
  misc_RNA (1)...(19): siRNA sense strand
cagagaagaccaguguaaa

SEQ ID NO: 1636528 - RNA, 19 nt, Homo sapiens
  misc_RNA (1)...(19): siRNA sense strand
ccacaacuucugagaguca

SEQ ID NO: 1636529 - RNA, 19 nt, Homo sapiens
  misc_RNA (1)...(19): siRNA sense strand
ccaaacuccaugacagauu

SEQ ID NO: 1636530 - RNA, 19 nt, Homo sapiens
  misc_RNA (1)...(19): siRNA sense strand
ccauuaauacuuccaagau

SEQ ID NO: 1636531 - RNA, 19 nt, Homo sapiens
  misc_RNA (1)...(19): siRNA sense strand
gaugucuucuugaguaaaa

SEQ ID NO: 1636532 - RNA, 19 nt, Homo sapiens
  misc_RNA (1)...(19): siRNA sense strand
uaagggaacggguacaaag

SEQ ID NO: 1636533 - RNA, 19 nt, Homo sapiens
  misc_RNA (1)...(19): siRNA sense strand
caucaaauaaugacugucu

SEQ ID NO: 1636534 - RNA, 19 nt, Homo sapiens
  misc_RNA (1)...(19): siRNA sense strand
uaacuucccaacaagauag

SEQ ID NO: 1636535 - RNA, 19 nt, Homo sapiens
  misc_RNA (1)...(19): siRNA sense strand
ugagcagaaugaagaaagu

SEQ ID NO: 1636536 - RNA, 19 nt, Homo sapiens
  misc_RNA (1)...(19): siRNA sense strand
agacgaggguauccaccaa

SEQ ID NO: 1636537 - RNA, 19 nt, Homo sapiens
  misc_RNA (1)...(19): siRNA sense strand
uccagaaccugucaguugu

SEQ ID NO: 1636538 - RNA, 19 nt, Homo sapiens
  misc_RNA (1)...(19): siRNA sense strand
agauaguucugucuugcaa

SEQ ID NO: 1636539 - RNA, 19 nt, Homo sapiens
  misc_RNA (1)...(19): siRNA sense strand
gcaaggaaaaccagauuug

SEQ ID NO: 1636540 - RNA, 19 nt, Homo sapiens
  misc_RNA (1)...(19): siRNA sense strand
ccuagaggcuaaggaagga

SEQ ID NO: 1636541 - RNA, 19 nt, Homo sapiens
  misc_RNA (1)...(19): siRNA sense strand
ugaccuagaggcuaaggaa

SEQ ID NO: 1636542 - RNA, 19 nt, Homo sapiens
  misc_RNA (1)...(19): siRNA sense strand
uuccaaaucugaccuagag

SEQ ID NO: 1636543 - RNA, 19 nt, Homo sapiens
  misc_RNA (1)...(19): siRNA sense strand
gggaaggaaggccagacua

SEQ ID NO: 1636544 - RNA, 19 nt, Homo sapiens
  misc_RNA (1)...(19): siRNA sense strand
ucucaucgauacuucucaa

SEQ ID NO: 1636545 - RNA, 19 nt, Homo sapiens
  misc_RNA (1)...(19): siRNA sense strand
gaacauggggaaauuagau

SEQ ID NO: 1636546 - RNA, 19 nt, Homo sapiens
  misc_RNA (1)...(19): siRNA sense strand
aaaccagauuugcaaaguc

SEQ ID NO: 1636547 - RNA, 19 nt, Homo sapiens
  misc_RNA (1)...(19): siRNA sense strand
ccaguggacacaguucuaa

SEQ ID NO: 1636548 - RNA, 19 nt, Homo sapiens
  misc_RNA (1)...(19): siRNA sense strand
acagaaacucucaucaaug

SEQ ID NO: 1636549 - RNA, 19 nt, Homo sapiens
  misc_RNA (1)...(19): siRNA sense strand
ucaaggaucacaguucuuc

SEQ ID NO: 1636550 - RNA, 19 nt, Homo sapiens
  misc_RNA (1)...(19): siRNA sense strand
gggaaaugccaucaaggau

SEQ ID NO: 1636551 - RNA, 19 nt, Homo sapiens
  misc_RNA (1)...(19): siRNA sense strand
cagauccgaggguggcuua

SEQ ID NO: 1636552 - RNA, 19 nt, Homo sapiens
  misc_RNA (1)...(19): siRNA sense strand
uacagccucuaccaucaaa

SEQ ID NO: 1636553 - RNA, 19 nt, Homo sapiens
  misc_RNA (1)...(19): siRNA sense strand
gguaacuucccaacaagau

SEQ ID NO: 1636554 - RNA, 19 nt, Homo sapiens
  misc_RNA (1)...(19): siRNA sense strand
acacaguucuaagcaagga

SEQ ID NO: 1636555 - RNA, 19 nt, Homo sapiens
  misc_RNA (1)...(19): siRNA sense strand
gaaggaaggccagacuaac

SEQ ID NO: 1636556 - RNA, 19 nt, Homo sapiens
  misc_RNA (1)...(19): siRNA sense strand
ggaggagccagcagacaca

SEQ ID NO: 1636557 - RNA, 19 nt, Homo sapiens
  misc_RNA (1)...(19): siRNA sense strand
caacaagauaguucugucu

SEQ ID NO: 1636558 - RNA, 19 nt, Homo sapiens
  misc_RNA (1)...(19): siRNA sense strand
uaaaaccaguugccacaga

SEQ ID NO: 1636559 - RNA, 19 nt, Homo sapiens
  misc_RNA (1)...(19): siRNA sense strand
gcaagaguguccaguaugu

SEQ ID NO: 1636560 - RNA, 19 nt, Homo sapiens
  misc_RNA (1)...(19): siRNA sense strand
gaccuucgaauguaauaua

SEQ ID NO: 1636561 - RNA, 19 nt, Homo sapiens
  misc_RNA (1)...(19): siRNA sense strand
gcgcgaccuucgaauguaa

SEQ ID NO: 1636562 - RNA, 19 nt, Homo sapiens
  misc_RNA (1)...(19): siRNA sense strand
gggaagcuguggucagugu

SEQ ID NO: 1636563 - RNA, 19 nt, Homo sapiens
  misc_RNA (1)...(19): siRNA sense strand
agaagguugucccgcuuua

SEQ ID NO: 1636564 - RNA, 19 nt, Homo sapiens
  misc_RNA (1)...(19): siRNA sense strand
gggcuuccacuucucauuu

SEQ ID NO: 1636565 - RNA, 19 nt, Homo sapiens
  misc_RNA (1)...(19): siRNA sense strand
cggcaagaguguccaguau

SEQ ID NO: 1636566 - RNA, 19 nt, Homo sapiens
  misc_RNA (1)...(19): siRNA sense strand
ucaaugcccaugagccuuu

SEQ ID NO: 1636567 - RNA, 19 nt, Homo sapiens
  misc_RNA (1)...(19): siRNA sense strand
gagaagguugucccgcuuu

SEQ ID NO: 1636568 - RNA, 19 nt, Homo sapiens
  misc_RNA (1)...(19): siRNA sense strand
guggccaccuguacuguug

SEQ ID NO: 1636569 - RNA, 19 nt, Homo sapiens
  misc_RNA (1)...(19): siRNA sense strand
ggcgcgaccuucgaaugua

SEQ ID NO: 1636570 - RNA, 19 nt, Homo sapiens
  misc_RNA (1)...(19): siRNA sense strand
aagaguguccaguauguaa

SEQ ID NO: 1636571 - RNA, 19 nt, Homo sapiens
  misc_RNA (1)...(19): siRNA sense strand
ccacuucucauuugguguu

SEQ ID NO: 1636572 - RNA, 19 nt, Homo sapiens
  misc_RNA (1)...(19): siRNA sense strand
caagaguguccaguaugua

SEQ ID NO: 1636573 - RNA, 19 nt, Homo sapiens
  misc_RNA (1)...(19): siRNA sense strand
ggcuuccacuucucauuug

SEQ ID NO: 1636574 - RNA, 19 nt, Homo sapiens
  misc_RNA (1)...(19): siRNA sense strand
gccccaggaucccagauua

SEQ ID NO: 1636575 - RNA, 19 nt, Homo sapiens
  misc_RNA (1)...(19): siRNA sense strand
gaagcuguggucagugugu

SEQ ID NO: 1636576 - RNA, 19 nt, Homo sapiens
  misc_RNA (1)...(19): siRNA sense strand
ggauucccucuuccuguuu

SEQ ID NO: 1636577 - RNA, 19 nt, Homo sapiens
  misc_RNA (1)...(19): siRNA sense strand
gaagguugucccgcuuuau

SEQ ID NO: 1636578 - RNA, 19 nt, Homo sapiens
  misc_RNA (1)...(19): siRNA sense strand
gaucagcagagagaagguu

SEQ ID NO: 1636579 - RNA, 19 nt, Homo sapiens
  misc_RNA (1)...(19): siRNA sense strand
gauucccucuuccuguuuc

SEQ ID NO: 1636580 - RNA, 19 nt, Homo sapiens
  misc_RNA (1)...(19): siRNA sense strand
ggagacugcucgggaagcu

SEQ ID NO: 1636581 - RNA, 19 nt, Homo sapiens
  misc_RNA (1)...(19): siRNA sense strand
ucaccaccgucuucaaugc

SEQ ID NO: 1636582 - RNA, 19 nt, Homo sapiens
  misc_RNA (1)...(19): siRNA sense strand
gccuccagcuggcaggauu

SEQ ID NO: 1636583 - RNA, 19 nt, Homo sapiens
  misc_RNA (1)...(19): siRNA sense strand
ggcaagaguguccaguaug

SEQ ID NO: 1636584 - RNA, 19 nt, Homo sapiens
  misc_RNA (1)...(19): siRNA sense strand
cauuugguguuggugcuuu

SEQ ID NO: 1636585 - RNA, 19 nt, Homo sapiens
  misc_RNA (1)...(19): siRNA sense strand
uuccagccauuuggugaua

SEQ ID NO: 1636586 - RNA, 19 nt, Homo sapiens
  misc_RNA (1)...(19): siRNA sense strand
ucgggaagcuguggucagu

SEQ ID NO: 1636587 - RNA, 19 nt, Homo sapiens
  misc_RNA (1)...(19): siRNA sense strand
cccaggaucccagauuaaa

SEQ ID NO: 1636588 - RNA, 19 nt, Homo sapiens
  misc_RNA (1)...(19): siRNA sense strand
gcgaccuucgaauguaaua

SEQ ID NO: 1636589 - RNA, 19 nt, Homo sapiens
  misc_RNA (1)...(19): siRNA sense strand
ggacaaagaugagaucaag

SEQ ID NO: 1636590 - RNA, 19 nt, Homo sapiens
  misc_RNA (1)...(19): siRNA sense strand
cuaggaagcuugacuguug

SEQ ID NO: 1636591 - RNA, 19 nt, Homo sapiens
  misc_RNA (1)...(19): siRNA sense strand
ggaguuggcuaaacaagug

SEQ ID NO: 1636592 - RNA, 19 nt, Homo sapiens
  misc_RNA (1)...(19): siRNA sense strand
ggaagcaccucuuugagau

SEQ ID NO: 1636593 - RNA, 19 nt, Homo sapiens
  misc_RNA (1)...(19): siRNA sense strand
ggacacaggugacugaacu

SEQ ID NO: 1636594 - RNA, 19 nt, Homo sapiens
  misc_RNA (1)...(19): siRNA sense strand
ggcgggaacuggcuuauga

SEQ ID NO: 1636595 - RNA, 19 nt, Homo sapiens
  misc_RNA (1)...(19): siRNA sense strand
gcaaguuucuggaugaagu

SEQ ID NO: 1636596 - RNA, 19 nt, Homo sapiens
  misc_RNA (1)...(19): siRNA sense strand
caagaugaguguccagaau

SEQ ID NO: 1636597 - RNA, 19 nt, Homo sapiens
  misc_RNA (1)...(19): siRNA sense strand
gggagaagccacuguuuga

SEQ ID NO: 1636598 - RNA, 19 nt, Homo sapiens
  misc_RNA (1)...(19): siRNA sense strand
gggaucagcuuuucuacua

SEQ ID NO: 1636599 - RNA, 19 nt, Homo sapiens
  misc_RNA (1)...(19): siRNA sense strand
ugagggaccugcaggauuc

SEQ ID NO: 1636600 - RNA, 19 nt, Homo sapiens
  misc_RNA (1)...(19): siRNA sense strand
gaaauaaagcugcggaacu

SEQ ID NO: 1636601 - RNA, 19 nt, Homo sapiens
  misc_RNA (1)...(19): siRNA sense strand
ggauuuauuucucuacaag

SEQ ID NO: 1636602 - RNA, 19 nt, Homo sapiens
  misc_RNA (1)...(19): siRNA sense strand
gggaagcaccucuuugaga

SEQ ID NO: 1636603 - RNA, 19 nt, Homo sapiens
  misc_RNA (1)...(19): siRNA sense strand
aaacgaaugucccgguuag

SEQ ID NO: 1636604 - RNA, 19 nt, Homo sapiens
  misc_RNA (1)...(19): siRNA sense strand
guucaggcauacucaaaug

SEQ ID NO: 1636605 - RNA, 19 nt, Homo sapiens
  misc_RNA (1)...(19): siRNA sense strand
cagaggagcaucaugaaga

SEQ ID NO: 1636606 - RNA, 19 nt, Homo sapiens
  misc_RNA (1)...(19): siRNA sense strand
auuacaaccugcucagaua

SEQ ID NO: 1636607 - RNA, 19 nt, Homo sapiens
  misc_RNA (1)...(19): siRNA sense strand
acucaaaugucaacaagau

SEQ ID NO: 1636608 - RNA, 19 nt, Homo sapiens
  misc_RNA (1)...(19): siRNA sense strand
ucaaaugucaacaagauga

SEQ ID NO: 1636609 - RNA, 19 nt, Homo sapiens
  misc_RNA (1)...(19): siRNA sense strand
gaaugucccgguuagaaga

SEQ ID NO: 1636610 - RNA, 19 nt, Homo sapiens
  misc_RNA (1)...(19): siRNA sense strand
aaauaaagcugcggaacuc

SEQ ID NO: 1636611 - RNA, 19 nt, Homo sapiens
  misc_RNA (1)...(19): siRNA sense strand
agaggagcaucaugaagaa

SEQ ID NO: 1636612 - RNA, 19 nt, Homo sapiens
  misc_RNA (1)...(19): siRNA sense strand
agagggaaauggaggaguu

SEQ ID NO: 1636613 - RNA, 19 nt, Homo sapiens
  misc_RNA (1)...(19): siRNA sense strand
cagggaagcaccucuuuga

SEQ ID NO: 1636614 - RNA, 19 nt, Homo sapiens
  misc_RNA (1)...(19): siRNA sense strand
ccagggauuuauuucucua

SEQ ID NO: 1636615 - RNA, 19 nt, Homo sapiens
  misc_RNA (1)...(19): siRNA sense strand
aaacacagccagcucuuca

SEQ ID NO: 1636616 - RNA, 19 nt, Homo sapiens
  misc_RNA (1)...(19): siRNA sense strand
gagaagccacuguuugaca

SEQ ID NO: 1636617 - RNA, 19 nt, Homo sapiens
  misc_RNA (1)...(19): siRNA sense strand
gggauuuauuucucuacaa

SEQ ID NO: 1636618 - RNA, 19 nt, Homo sapiens
  misc_RNA (1)...(19): siRNA sense strand
aagcagaggagcaucauga

SEQ ID NO: 1636619 - RNA, 19 nt, Homo sapiens
  misc_RNA (1)...(19): siRNA sense strand
gggcagcgccuagaggaaa

SEQ ID NO: 1636620 - RNA, 19 nt, Homo sapiens
  misc_RNA (1)...(19): siRNA sense strand
ggagugcugaccugagaaa

SEQ ID NO: 1636621 - RNA, 19 nt, Homo sapiens
  misc_RNA (1)...(19): siRNA sense strand
acaucaugcuggaaauaaa

SEQ ID NO: 1636622 - RNA, 19 nt, Homo sapiens
  misc_RNA (1)...(19): siRNA sense strand
uaaagcugcggaacucuga

SEQ ID NO: 1636623 - RNA, 19 nt, Homo sapiens
  misc_RNA (1)...(19): siRNA sense strand
caaccuuccucaggcaaau

SEQ ID NO: 1636624 - RNA, 19 nt, Homo sapiens
  misc_RNA (1)...(19): siRNA sense strand
ggaggaaccagcuguugca

SEQ ID NO: 1636625 - RNA, 19 nt, Homo sapiens
  misc_RNA (1)...(19): siRNA sense strand
gcaaacacagccagcucuu

SEQ ID NO: 1636626 - RNA, 19 nt, Homo sapiens
  misc_RNA (1)...(19): siRNA sense strand
acagguagaggacccagua

SEQ ID NO: 1636627 - RNA, 19 nt, Homo sapiens
  misc_RNA (1)...(19): siRNA sense strand
ucugcaaguuucuggauga

SEQ ID NO: 1636628 - RNA, 19 nt, Homo sapiens
  misc_RNA (1)...(19): siRNA sense strand
aaauacaucaugcuggaaa

SEQ ID NO: 1636629 - RNA, 19 nt, Homo sapiens
  misc_RNA (1)...(19): siRNA sense strand
ggagcaucaugaagaacug

SEQ ID NO: 1636630 - RNA, 19 nt, Homo sapiens
  misc_RNA (1)...(19): siRNA sense strand
gaaguucaggcauacucaa

SEQ ID NO: 1636631 - RNA, 19 nt, Homo sapiens
  misc_RNA (1)...(19): siRNA sense strand
ggagcaguguguggacuuc

SEQ ID NO: 1636632 - RNA, 19 nt, Homo sapiens
  misc_RNA (1)...(19): siRNA sense strand
auacucaaaugucaacaag

SEQ ID NO: 1636633 - RNA, 19 nt, Homo sapiens
  misc_RNA (1)...(19): siRNA sense strand
aagcaccucuuugagauca

SEQ ID NO: 1636634 - RNA, 19 nt, Homo sapiens
  misc_RNA (1)...(19): siRNA sense strand
guacgagaggagugugaaa

SEQ ID NO: 1636635 - RNA, 19 nt, Homo sapiens
  misc_RNA (1)...(19): siRNA sense strand
gcggugcucuccagaacag

SEQ ID NO: 1636636 - RNA, 19 nt, Homo sapiens
  misc_RNA (1)...(19): siRNA sense strand
gcagaggagcaucaugaag

SEQ ID NO: 1636637 - RNA, 19 nt, Homo sapiens
  misc_RNA (1)...(19): siRNA sense strand
gaggaggaaccagcuguug

SEQ ID NO: 1636638 - RNA, 19 nt, Homo sapiens
  misc_RNA (1)...(19): siRNA sense strand
caggcauacucaaauguca

SEQ ID NO: 1636639 - RNA, 19 nt, Homo sapiens
  misc_RNA (1)...(19): siRNA sense strand
gcaaccuuccucaggcaaa

SEQ ID NO: 1636640 - RNA, 19 nt, Homo sapiens
  misc_RNA (1)...(19): siRNA sense strand
gugagggaccugcaggauu

SEQ ID NO: 1636641 - RNA, 19 nt, Homo sapiens
  misc_RNA (1)...(19): siRNA sense strand
agggagugcugaccugaga

SEQ ID NO: 1636642 - RNA, 19 nt, Homo sapiens
  misc_RNA (1)...(19): siRNA sense strand
gugcagcccugggaagaag

SEQ ID NO: 1636643 - RNA, 19 nt, Homo sapiens
  misc_RNA (1)...(19): siRNA sense strand
gaucaagccccagggauuu

SEQ ID NO: 1636644 - RNA, 19 nt, Homo sapiens
  misc_RNA (1)...(19): siRNA sense strand
gaagcaccucuuugagauc

SEQ ID NO: 1636645 - RNA, 19 nt, Homo sapiens
  misc_RNA (1)...(19): siRNA sense strand
gagggaaauggaggaguuu

SEQ ID NO: 1636646 - RNA, 19 nt, Homo sapiens
  misc_RNA (1)...(19): siRNA sense strand
uacaucaugcuggaaauaa

SEQ ID NO: 1636647 - RNA, 19 nt, Homo sapiens
  misc_RNA (1)...(19): siRNA sense strand
ccucccugcugaagcugua

SEQ ID NO: 1636648 - RNA, 19 nt, Homo sapiens
  misc_RNA (1)...(19): siRNA sense strand
gagaggagugugaaaagaa

SEQ ID NO: 1636649 - RNA, 19 nt, Homo sapiens
  misc_RNA (1)...(19): siRNA sense strand
caaggacaaagaugagauc

SEQ ID NO: 1636650 - RNA, 19 nt, Homo sapiens
  misc_RNA (1)...(19): siRNA sense strand
ccagggaagcaccucuuug

SEQ ID NO: 1636651 - RNA, 19 nt, Homo sapiens
  misc_RNA (1)...(19): siRNA sense strand
cgaaugucccgguuagaag

SEQ ID NO: 1636652 - RNA, 19 nt, Homo sapiens
  misc_RNA (1)...(19): siRNA sense strand
cgggcuggcugaagaagca

SEQ ID NO: 1636653 - RNA, 19 nt, Homo sapiens
  misc_RNA (1)...(19): siRNA sense strand
auacaucaugcuggaaaua

SEQ ID NO: 1636654 - RNA, 19 nt, Homo sapiens
  misc_RNA (1)...(19): siRNA sense strand
gcucccagcgugacaugga

SEQ ID NO: 1636655 - RNA, 19 nt, Homo sapiens
  misc_RNA (1)...(19): siRNA sense strand
uacaggggcuggucacuga

SEQ ID NO: 1636656 - RNA, 19 nt, Homo sapiens
  misc_RNA (1)...(19): siRNA sense strand
gaagcagaggagcaucaug

SEQ ID NO: 1636657 - RNA, 19 nt, Homo sapiens
  misc_RNA (1)...(19): siRNA sense strand
gaucagcuuuucuacuaca

SEQ ID NO: 1636658 - RNA, 19 nt, Homo sapiens
  misc_RNA (1)...(19): siRNA sense strand
cuacuacaaggacaaagau

SEQ ID NO: 1636659 - RNA, 19 nt, Homo sapiens
  misc_RNA (1)...(19): siRNA sense strand
caucaugcuggaaauaaag

SEQ ID NO: 1636660 - RNA, 19 nt, Homo sapiens
  misc_RNA (1)...(19): siRNA sense strand
ggacccaguaaccaucaug

SEQ ID NO: 1636661 - RNA, 19 nt, Homo sapiens
  misc_RNA (1)...(19): siRNA sense strand
gaggacccaguaaccauca

SEQ ID NO: 1636662 - RNA, 19 nt, Homo sapiens
  misc_RNA (1)...(19): siRNA sense strand
guagaggacccaguaacca

SEQ ID NO: 1636663 - RNA, 19 nt, Homo sapiens
  misc_RNA (1)...(19): siRNA sense strand
ugaagaagcagaggagcau

SEQ ID NO: 1636664 - RNA, 19 nt, Homo sapiens
  misc_RNA (1)...(19): siRNA sense strand
acuacaaggacaaagauga

SEQ ID NO: 1636665 - RNA, 19 nt, Homo sapiens
  misc_RNA (1)...(19): siRNA sense strand
caaguuucuggaugaaguu

SEQ ID NO: 1636666 - RNA, 19 nt, Homo sapiens
  misc_RNA (1)...(19): siRNA sense strand
gaacauugacucccuguac

SEQ ID NO: 1636667 - RNA, 19 nt, Homo sapiens
  misc_RNA (1)...(19): siRNA sense strand
caucagagccacagacaga

SEQ ID NO: 1636668 - RNA, 19 nt, Homo sapiens
  misc_RNA (1)...(19): siRNA sense strand
caacgucaaccucagcaaa

SEQ ID NO: 1636669 - RNA, 19 nt, Homo sapiens
  misc_RNA (1)...(19): siRNA sense strand
gcaucagggucaugguuca

SEQ ID NO: 1636670 - RNA, 19 nt, Homo sapiens
  misc_RNA (1)...(19): siRNA sense strand
gguaccacuuccacuaugu

SEQ ID NO: 1636671 - RNA, 19 nt, Homo sapiens
  misc_RNA (1)...(19): siRNA sense strand
cagggagucugcauucaag

SEQ ID NO: 1636672 - RNA, 19 nt, Homo sapiens
  misc_RNA (1)...(19): siRNA sense strand
ggagcagccuggccaaaau

SEQ ID NO: 1636673 - RNA, 19 nt, Homo sapiens
  misc_RNA (1)...(19): siRNA sense strand
gccagaggccagucagaug

SEQ ID NO: 1636674 - RNA, 19 nt, Homo sapiens
  misc_RNA (1)...(19): siRNA sense strand
ggagcugcuggacgaguuu

SEQ ID NO: 1636675 - RNA, 19 nt, Homo sapiens
  misc_RNA (1)...(19): siRNA sense strand
aaaucaacaucgucuacca

SEQ ID NO: 1636676 - RNA, 19 nt, Homo sapiens
  misc_RNA (1)...(19): siRNA sense strand
uggagcugcuggacgaguu

SEQ ID NO: 1636677 - RNA, 19 nt, Homo sapiens
  misc_RNA (1)...(19): siRNA sense strand
aacauugacucccuguaca

SEQ ID NO: 1636678 - RNA, 19 nt, Homo sapiens
  misc_RNA (1)...(19): siRNA sense strand
cuacacaacaccuccuaca

SEQ ID NO: 1636679 - RNA, 19 nt, Homo sapiens
  misc_RNA (1)...(19): siRNA sense strand
gaggagcagccuggccaaa

SEQ ID NO: 1636680 - RNA, 19 nt, Homo sapiens
  misc_RNA (1)...(19): siRNA sense strand
aaaguacucugcuggauua

SEQ ID NO: 1636681 - RNA, 19 nt, Homo sapiens
  misc_RNA (1)...(19): siRNA sense strand
guacucugcuggauuagaa

SEQ ID NO: 1636682 - RNA, 19 nt, Homo sapiens
  misc_RNA (1)...(19): siRNA sense strand
gagcacacccagcaaauga

SEQ ID NO: 1636683 - RNA, 19 nt, Homo sapiens
  misc_RNA (1)...(19): siRNA sense strand
ccuccgggcugaagacuuu

SEQ ID NO: 1636684 - RNA, 19 nt, Homo sapiens
  misc_RNA (1)...(19): siRNA sense strand
ugaaggagcggcagaaguu

SEQ ID NO: 1636685 - RNA, 19 nt, Homo sapiens
  misc_RNA (1)...(19): siRNA sense strand
ggauuagaauuacuuagca

SEQ ID NO: 1636686 - RNA, 19 nt, Homo sapiens
  misc_RNA (1)...(19): siRNA sense strand
uagaauccaugacagcaaa

SEQ ID NO: 1636687 - RNA, 19 nt, Homo sapiens
  misc_RNA (1)...(19): siRNA sense strand
uagaauuacuuagcaggua

SEQ ID NO: 1636688 - RNA, 19 nt, Homo sapiens
  misc_RNA (1)...(19): siRNA sense strand
cagaagagccaaagacugu

SEQ ID NO: 1636689 - RNA, 19 nt, Homo sapiens
  misc_RNA (1)...(19): siRNA sense strand
caaaguacucugcuggauu

SEQ ID NO: 1636690 - RNA, 19 nt, Homo sapiens
  misc_RNA (1)...(19): siRNA sense strand
cuggagagcugguggauag

SEQ ID NO: 1636691 - RNA, 19 nt, Homo sapiens
  misc_RNA (1)...(19): siRNA sense strand
ccugaacucuggaggagaa

SEQ ID NO: 1636692 - RNA, 19 nt, Homo sapiens
  misc_RNA (1)...(19): siRNA sense strand
gccaaagacugugcaagug

SEQ ID NO: 1636693 - RNA, 19 nt, Homo sapiens
  misc_RNA (1)...(19): siRNA sense strand
gaaagaugcaaacauaugc

SEQ ID NO: 1636694 - RNA, 19 nt, Homo sapiens
  misc_RNA (1)...(19): siRNA sense strand
gcagugugaauuagaaaga

SEQ ID NO: 1636695 - RNA, 19 nt, Homo sapiens
  misc_RNA (1)...(19): siRNA sense strand
agaacaaccugcugcaucu

SEQ ID NO: 1636696 - RNA, 19 nt, Homo sapiens
  misc_RNA (1)...(19): siRNA sense strand
agaauuacuuagcagguau

SEQ ID NO: 1636697 - RNA, 19 nt, Homo sapiens
  misc_RNA (1)...(19): siRNA sense strand
gaggagaagagaacacugu

SEQ ID NO: 1636698 - RNA, 19 nt, Homo sapiens
  misc_RNA (1)...(19): siRNA sense strand
gaaggagcggcagaaguuu

SEQ ID NO: 1636699 - RNA, 19 nt, Homo sapiens
  misc_RNA (1)...(19): siRNA sense strand
agaaagaugcaaacauaug

SEQ ID NO: 1636700 - RNA, 19 nt, Homo sapiens
  misc_RNA (1)...(19): siRNA sense strand
ccaaaguacucugcuggau

SEQ ID NO: 1636701 - RNA, 19 nt, Homo sapiens
  misc_RNA (1)...(19): siRNA sense strand
gcgagguggucaugcuuuc

SEQ ID NO: 1636702 - RNA, 19 nt, Homo sapiens
  misc_RNA (1)...(19): siRNA sense strand
uuuaaucgcagacuuagaa

SEQ ID NO: 1636703 - RNA, 19 nt, Homo sapiens
  misc_RNA (1)...(19): siRNA sense strand
ugucauccauggaagugaa

SEQ ID NO: 1636704 - RNA, 19 nt, Homo sapiens
  misc_RNA (1)...(19): siRNA sense strand
agaagguccuggaaaugga

SEQ ID NO: 1636705 - RNA, 19 nt, Homo sapiens
  misc_RNA (1)...(19): siRNA sense strand
uaagaggaaggaacuugaa

SEQ ID NO: 1636706 - RNA, 19 nt, Homo sapiens
  misc_RNA (1)...(19): siRNA sense strand
agacuuaugugggcagugu

SEQ ID NO: 1636707 - RNA, 19 nt, Homo sapiens
  misc_RNA (1)...(19): siRNA sense strand
ggaagugaacguggacaug

SEQ ID NO: 1636708 - RNA, 19 nt, Homo sapiens
  misc_RNA (1)...(19): siRNA sense strand
gcccauaggcagcauguca

SEQ ID NO: 1636709 - RNA, 19 nt, Homo sapiens
  misc_RNA (1)...(19): siRNA sense strand
caacuggagaauuacaaga

SEQ ID NO: 1636710 - RNA, 19 nt, Homo sapiens
  misc_RNA (1)...(19): siRNA sense strand
agcaggacauggagcagua

SEQ ID NO: 1636711 - RNA, 19 nt, Homo sapiens
  misc_RNA (1)...(19): siRNA sense strand
acuggagaauuacaagaaa

SEQ ID NO: 1636712 - RNA, 19 nt, Homo sapiens
  misc_RNA (1)...(19): siRNA sense strand
agacuuagaauccaugaca

SEQ ID NO: 1636713 - RNA, 19 nt, Homo sapiens
  misc_RNA (1)...(19): siRNA sense strand
uugaggagguagagaacaa

SEQ ID NO: 1636714 - RNA, 19 nt, Homo sapiens
  misc_RNA (1)...(19): siRNA sense strand
ugacagcaaaucugacuca

SEQ ID NO: 1636715 - RNA, 19 nt, Homo sapiens
  misc_RNA (1)...(19): siRNA sense strand
ggagcacacccagcaaaug

SEQ ID NO: 1636716 - RNA, 19 nt, Homo sapiens
  misc_RNA (1)...(19): siRNA sense strand
cagcuuuaaucgcagacuu

SEQ ID NO: 1636717 - RNA, 19 nt, Homo sapiens
  misc_RNA (1)...(19): siRNA sense strand
gcaucuggaagacuuaugu

SEQ ID NO: 1636718 - RNA, 19 nt, Homo sapiens
  misc_RNA (1)...(19): siRNA sense strand
gcuggauuagaauuacuua

SEQ ID NO: 1636719 - RNA, 19 nt, Homo sapiens
  misc_RNA (1)...(19): siRNA sense strand
agauggaccugauggacau

SEQ ID NO: 1636720 - RNA, 19 nt, Homo sapiens
  misc_RNA (1)...(19): siRNA sense strand
gcacacccagcaaaugaag

SEQ ID NO: 1636721 - RNA, 19 nt, Homo sapiens
  misc_RNA (1)...(19): siRNA sense strand
cuuagcagguaugaggaua

SEQ ID NO: 1636722 - RNA, 19 nt, Homo sapiens
  misc_RNA (1)...(19): siRNA sense strand
cagaagguccuggaaaugg

SEQ ID NO: 1636723 - RNA, 19 nt, Homo sapiens
  misc_RNA (1)...(19): siRNA sense strand
gcaacuggagaauuacaag

SEQ ID NO: 1636724 - RNA, 19 nt, Homo sapiens
  misc_RNA (1)...(19): siRNA sense strand
gaauuagaaagaugcaaac

SEQ ID NO: 1636725 - RNA, 19 nt, Homo sapiens
  misc_RNA (1)...(19): siRNA sense strand
ggauacaugggcugcacuu

SEQ ID NO: 1636726 - RNA, 19 nt, Homo sapiens
  misc_RNA (1)...(19): siRNA sense strand
aagcaaaagugaaaagcaa

SEQ ID NO: 1636727 - RNA, 19 nt, Homo sapiens
  misc_RNA (1)...(19): siRNA sense strand
ggauagcgagguggucaug

SEQ ID NO: 1636728 - RNA, 19 nt, Homo sapiens
  misc_RNA (1)...(19): siRNA sense strand
ugggcagugugaauuagaa

SEQ ID NO: 1636729 - RNA, 19 nt, Homo sapiens
  misc_RNA (1)...(19): siRNA sense strand
gaauuacuuagcagguaug

SEQ ID NO: 1636730 - RNA, 19 nt, Homo sapiens
  misc_RNA (1)...(19): siRNA sense strand
gcagacuuagaauccauga

SEQ ID NO: 1636731 - RNA, 19 nt, Homo sapiens
  misc_RNA (1)...(19): siRNA sense strand
auacaugggcugcacuuca

SEQ ID NO: 1636732 - RNA, 19 nt, Homo sapiens
  misc_RNA (1)...(19): siRNA sense strand
gggcagugugaauuagaaa

SEQ ID NO: 1636733 - RNA, 19 nt, Homo sapiens
  misc_RNA (1)...(19): siRNA sense strand
ucacagaagagccaaagac

SEQ ID NO: 1636734 - RNA, 19 nt, Homo sapiens
  misc_RNA (1)...(19): siRNA sense strand
aauaagaggaaggaacuug

SEQ ID NO: 1636735 - RNA, 19 nt, Homo sapiens
  misc_RNA (1)...(19): siRNA sense strand
ugagcgugcagcaggauuu

SEQ ID NO: 1636736 - RNA, 19 nt, Homo sapiens
  misc_RNA (1)...(19): siRNA sense strand
gaacaaccugcugcaucug

SEQ ID NO: 1636737 - RNA, 19 nt, Homo sapiens
  misc_RNA (1)...(19): siRNA sense strand
uggagcagauggaccugau

SEQ ID NO: 1636738 - RNA, 19 nt, Homo sapiens
  misc_RNA (1)...(19): siRNA sense strand
auaagaggaaggaacuuga

SEQ ID NO: 1636739 - RNA, 19 nt, Homo sapiens
  misc_RNA (1)...(19): siRNA sense strand
aaaguacucugcuggauua

SEQ ID NO: 1636740 - RNA, 19 nt, Homo sapiens
  misc_RNA (1)...(19): siRNA sense strand
guacucugcuggauuagaa

SEQ ID NO: 1636741 - RNA, 19 nt, Homo sapiens
  misc_RNA (1)...(19): siRNA sense strand
gagcacacccagcaaauga

SEQ ID NO: 1636742 - RNA, 19 nt, Homo sapiens
  misc_RNA (1)...(19): siRNA sense strand
ccuccgggcugaagacuuu

SEQ ID NO: 1636743 - RNA, 19 nt, Homo sapiens
  misc_RNA (1)...(19): siRNA sense strand
ugaaggagcggcagaaguu

SEQ ID NO: 1636744 - RNA, 19 nt, Homo sapiens
  misc_RNA (1)...(19): siRNA sense strand
ggauuagaauuacuuagca

SEQ ID NO: 1636745 - RNA, 19 nt, Homo sapiens
  misc_RNA (1)...(19): siRNA sense strand
uagaauccaugacagcaaa

SEQ ID NO: 1636746 - RNA, 19 nt, Homo sapiens
  misc_RNA (1)...(19): siRNA sense strand
uagaauuacuuagcaggua

SEQ ID NO: 1636747 - RNA, 19 nt, Homo sapiens
  misc_RNA (1)...(19): siRNA sense strand
cagaagagccaaagacugu

SEQ ID NO: 1636748 - RNA, 19 nt, Homo sapiens
  misc_RNA (1)...(19): siRNA sense strand
caaaguacucugcuggauu

SEQ ID NO: 1636749 - RNA, 19 nt, Homo sapiens
  misc_RNA (1)...(19): siRNA sense strand
cuggagagcugguggauag

SEQ ID NO: 1636750 - RNA, 19 nt, Homo sapiens
  misc_RNA (1)...(19): siRNA sense strand
ccugaacucuggaggagaa

SEQ ID NO: 1636751 - RNA, 19 nt, Homo sapiens
  misc_RNA (1)...(19): siRNA sense strand
gccaaagacugugcaagug

SEQ ID NO: 1636752 - RNA, 19 nt, Homo sapiens
  misc_RNA (1)...(19): siRNA sense strand
gaaagaugcaaacauaugc

SEQ ID NO: 1636753 - RNA, 19 nt, Homo sapiens
  misc_RNA (1)...(19): siRNA sense strand
gcagugugaauuagaaaga

SEQ ID NO: 1636754 - RNA, 19 nt, Homo sapiens
  misc_RNA (1)...(19): siRNA sense strand
agaacaaccugcugcaucu

SEQ ID NO: 1636755 - RNA, 19 nt, Homo sapiens
  misc_RNA (1)...(19): siRNA sense strand
agaauuacuuagcagguau

SEQ ID NO: 1636756 - RNA, 19 nt, Homo sapiens
  misc_RNA (1)...(19): siRNA sense strand
gaggagaagagaacacugu

SEQ ID NO: 1636757 - RNA, 19 nt, Homo sapiens
  misc_RNA (1)...(19): siRNA sense strand
gaaggagcggcagaaguuu

SEQ ID NO: 1636758 - RNA, 19 nt, Homo sapiens
  misc_RNA (1)...(19): siRNA sense strand
agaaagaugcaaacauaug

SEQ ID NO: 1636759 - RNA, 19 nt, Homo sapiens
  misc_RNA (1)...(19): siRNA sense strand
ccaaaguacucugcuggau

SEQ ID NO: 1636760 - RNA, 19 nt, Homo sapiens
  misc_RNA (1)...(19): siRNA sense strand
gcgagguggucaugcuuuc

SEQ ID NO: 1636761 - RNA, 19 nt, Homo sapiens
  misc_RNA (1)...(19): siRNA sense strand
uuuaaucgcagacuuagaa

SEQ ID NO: 1636762 - RNA, 19 nt, Homo sapiens
  misc_RNA (1)...(19): siRNA sense strand
ugucauccauggaagugaa

SEQ ID NO: 1636763 - RNA, 19 nt, Homo sapiens
  misc_RNA (1)...(19): siRNA sense strand
agaagguccuggaaaugga

SEQ ID NO: 1636764 - RNA, 19 nt, Homo sapiens
  misc_RNA (1)...(19): siRNA sense strand
uaagaggaaggaacuugaa

SEQ ID NO: 1636765 - RNA, 19 nt, Homo sapiens
  misc_RNA (1)...(19): siRNA sense strand
agacuuaugugggcagugu

SEQ ID NO: 1636766 - RNA, 19 nt, Homo sapiens
  misc_RNA (1)...(19): siRNA sense strand
ggaagugaacguggacaug

SEQ ID NO: 1636767 - RNA, 19 nt, Homo sapiens
  misc_RNA (1)...(19): siRNA sense strand
gcccauaggcagcauguca

SEQ ID NO: 1636768 - RNA, 19 nt, Homo sapiens
  misc_RNA (1)...(19): siRNA sense strand
caacuggagaauuacaaga

SEQ ID NO: 1636769 - RNA, 19 nt, Homo sapiens
  misc_RNA (1)...(19): siRNA sense strand
agcaggacauggagcagua

SEQ ID NO: 1636770 - RNA, 19 nt, Homo sapiens
  misc_RNA (1)...(19): siRNA sense strand
acuggagaauuacaagaaa

SEQ ID NO: 1636771 - RNA, 19 nt, Homo sapiens
  misc_RNA (1)...(19): siRNA sense strand
agacuuagaauccaugaca

SEQ ID NO: 1636772 - RNA, 19 nt, Homo sapiens
  misc_RNA (1)...(19): siRNA sense strand
uugaggagguagagaacaa

SEQ ID NO: 1636773 - RNA, 19 nt, Homo sapiens
  misc_RNA (1)...(19): siRNA sense strand
ugacagcaaaucugacuca

SEQ ID NO: 1636774 - RNA, 19 nt, Homo sapiens
  misc_RNA (1)...(19): siRNA sense strand
ggagcacacccagcaaaug

SEQ ID NO: 1636775 - RNA, 19 nt, Homo sapiens
  misc_RNA (1)...(19): siRNA sense strand
cagcuuuaaucgcagacuu

SEQ ID NO: 1636776 - RNA, 19 nt, Homo sapiens
  misc_RNA (1)...(19): siRNA sense strand
gcaucuggaagacuuaugu

SEQ ID NO: 1636777 - RNA, 19 nt, Homo sapiens
  misc_RNA (1)...(19): siRNA sense strand
gcuggauuagaauuacuua

SEQ ID NO: 1636778 - RNA, 19 nt, Homo sapiens
  misc_RNA (1)...(19): siRNA sense strand
agauggaccugauggacau

SEQ ID NO: 1636779 - RNA, 19 nt, Homo sapiens
  misc_RNA (1)...(19): siRNA sense strand
gcacacccagcaaaugaag

SEQ ID NO: 1636780 - RNA, 19 nt, Homo sapiens
  misc_RNA (1)...(19): siRNA sense strand
cuuagcagguaugaggaua

SEQ ID NO: 1636781 - RNA, 19 nt, Homo sapiens
  misc_RNA (1)...(19): siRNA sense strand
cagaagguccuggaaaugg

SEQ ID NO: 1636782 - RNA, 19 nt, Homo sapiens
  misc_RNA (1)...(19): siRNA sense strand
gcaacuggagaauuacaag

SEQ ID NO: 1636783 - RNA, 19 nt, Homo sapiens
  misc_RNA (1)...(19): siRNA sense strand
gaauuagaaagaugcaaac

SEQ ID NO: 1636784 - RNA, 19 nt, Homo sapiens
  misc_RNA (1)...(19): siRNA sense strand
ggauacaugggcugcacuu

SEQ ID NO: 1636785 - RNA, 19 nt, Homo sapiens
  misc_RNA (1)...(19): siRNA sense strand
aagcaaaagugaaaagcaa

SEQ ID NO: 1636786 - RNA, 19 nt, Homo sapiens
  misc_RNA (1)...(19): siRNA sense strand
ggauagcgagguggucaug

SEQ ID NO: 1636787 - RNA, 19 nt, Homo sapiens
  misc_RNA (1)...(19): siRNA sense strand
ugggcagugugaauuagaa

SEQ ID NO: 1636788 - RNA, 19 nt, Homo sapiens
  misc_RNA (1)...(19): siRNA sense strand
gaauuacuuagcagguaug

SEQ ID NO: 1636789 - RNA, 19 nt, Homo sapiens
  misc_RNA (1)...(19): siRNA sense strand
gcagacuuagaauccauga

SEQ ID NO: 1636790 - RNA, 19 nt, Homo sapiens
  misc_RNA (1)...(19): siRNA sense strand
auacaugggcugcacuuca

SEQ ID NO: 1636791 - RNA, 19 nt, Homo sapiens
  misc_RNA (1)...(19): siRNA sense strand
gggcagugugaauuagaaa

SEQ ID NO: 1636792 - RNA, 19 nt, Homo sapiens
  misc_RNA (1)...(19): siRNA sense strand
ucacagaagagccaaagac

SEQ ID NO: 1636793 - RNA, 19 nt, Homo sapiens
  misc_RNA (1)...(19): siRNA sense strand
aauaagaggaaggaacuug

SEQ ID NO: 1636794 - RNA, 19 nt, Homo sapiens
  misc_RNA (1)...(19): siRNA sense strand
ugagcgugcagcaggauuu

SEQ ID NO: 1636795 - RNA, 19 nt, Homo sapiens
  misc_RNA (1)...(19): siRNA sense strand
gaacaaccugcugcaucug

SEQ ID NO: 1636796 - RNA, 19 nt, Homo sapiens
  misc_RNA (1)...(19): siRNA sense strand
uggagcagauggaccugau

SEQ ID NO: 1636797 - RNA, 19 nt, Homo sapiens
  misc_RNA (1)...(19): siRNA sense strand
auaagaggaaggaacuuga

SEQ ID NO: 1636798 - RNA, 19 nt, Homo sapiens
  misc_RNA (1)...(19): siRNA sense strand
gagcacacccagcaaauga

SEQ ID NO: 1636799 - RNA, 19 nt, Homo sapiens
  misc_RNA (1)...(19): siRNA sense strand
ugaaggagcggcagaaguu

SEQ ID NO: 1636800 - RNA, 19 nt, Homo sapiens
  misc_RNA (1)...(19): siRNA sense strand
uagaauccaugacagcaaa

SEQ ID NO: 1636801 - RNA, 19 nt, Homo sapiens
  misc_RNA (1)...(19): siRNA sense strand
ccugaacucuggaggagaa

SEQ ID NO: 1636802 - RNA, 19 nt, Homo sapiens
  misc_RNA (1)...(19): siRNA sense strand
gcagugugaauuagaaaga

SEQ ID NO: 1636803 - RNA, 19 nt, Homo sapiens
  misc_RNA (1)...(19): siRNA sense strand
gaaagaugcaaacauaugc

SEQ ID NO: 1636804 - RNA, 19 nt, Homo sapiens
  misc_RNA (1)...(19): siRNA sense strand
agaacaaccugcugcaucu

SEQ ID NO: 1636805 - RNA, 19 nt, Homo sapiens
  misc_RNA (1)...(19): siRNA sense strand
agaaagaugcaaacauaug

SEQ ID NO: 1636806 - RNA, 19 nt, Homo sapiens
  misc_RNA (1)...(19): siRNA sense strand
gaggagaagagaacacugu

SEQ ID NO: 1636807 - RNA, 19 nt, Homo sapiens
  misc_RNA (1)...(19): siRNA sense strand
gaaggagcggcagaaguuu

SEQ ID NO: 1636808 - RNA, 19 nt, Homo sapiens
  misc_RNA (1)...(19): siRNA sense strand
agacuuaugugggcagugu

SEQ ID NO: 1636809 - RNA, 19 nt, Homo sapiens
  misc_RNA (1)...(19): siRNA sense strand
ugucauccauggaagugaa

SEQ ID NO: 1636810 - RNA, 19 nt, Homo sapiens
  misc_RNA (1)...(19): siRNA sense strand
agaagguccuggaaaugga

SEQ ID NO: 1636811 - RNA, 19 nt, Homo sapiens
  misc_RNA (1)...(19): siRNA sense strand
uaagaggaaggaacuugaa

SEQ ID NO: 1636812 - RNA, 19 nt, Homo sapiens
  misc_RNA (1)...(19): siRNA sense strand
uuuaaucgcagacuuagaa

SEQ ID NO: 1636813 - RNA, 19 nt, Homo sapiens
  misc_RNA (1)...(19): siRNA sense strand
ggaagugaacguggacaug

SEQ ID NO: 1636814 - RNA, 19 nt, Homo sapiens
  misc_RNA (1)...(19): siRNA sense strand
gcccauaggcagcauguca

SEQ ID NO: 1636815 - RNA, 19 nt, Homo sapiens
  misc_RNA (1)...(19): siRNA sense strand
caacuggagaauuacaaga

SEQ ID NO: 1636816 - RNA, 19 nt, Homo sapiens
  misc_RNA (1)...(19): siRNA sense strand
agcaggacauggagcagua

SEQ ID NO: 1636817 - RNA, 19 nt, Homo sapiens
  misc_RNA (1)...(19): siRNA sense strand
acuggagaauuacaagaaa

SEQ ID NO: 1636818 - RNA, 19 nt, Homo sapiens
  misc_RNA (1)...(19): siRNA sense strand
agacuuagaauccaugaca

SEQ ID NO: 1636819 - RNA, 19 nt, Homo sapiens
  misc_RNA (1)...(19): siRNA sense strand
uugaggagguagagaacaa

SEQ ID NO: 1636820 - RNA, 19 nt, Homo sapiens
  misc_RNA (1)...(19): siRNA sense strand
ugacagcaaaucugacuca

SEQ ID NO: 1636821 - RNA, 19 nt, Homo sapiens
  misc_RNA (1)...(19): siRNA sense strand
ggagcacacccagcaaaug

SEQ ID NO: 1636822 - RNA, 19 nt, Homo sapiens
  misc_RNA (1)...(19): siRNA sense strand
gcaucuggaagacuuaugu

SEQ ID NO: 1636823 - RNA, 19 nt, Homo sapiens
  misc_RNA (1)...(19): siRNA sense strand
cagcuuuaaucgcagacuu

SEQ ID NO: 1636824 - RNA, 19 nt, Homo sapiens
  misc_RNA (1)...(19): siRNA sense strand
gcacacccagcaaaugaag

SEQ ID NO: 1636825 - RNA, 19 nt, Homo sapiens
  misc_RNA (1)...(19): siRNA sense strand
agauggaccugauggacau

SEQ ID NO: 1636826 - RNA, 19 nt, Homo sapiens
  misc_RNA (1)...(19): siRNA sense strand
gcaacuggagaauuacaag

SEQ ID NO: 1636827 - RNA, 19 nt, Homo sapiens
  misc_RNA (1)...(19): siRNA sense strand
cagaagguccuggaaaugg

SEQ ID NO: 1636828 - RNA, 19 nt, Homo sapiens
  misc_RNA (1)...(19): siRNA sense strand
gaauuagaaagaugcaaac

SEQ ID NO: 1636829 - RNA, 19 nt, Homo sapiens
  misc_RNA (1)...(19): siRNA sense strand
ugggcagugugaauuagaa

SEQ ID NO: 1636830 - RNA, 19 nt, Homo sapiens
  misc_RNA (1)...(19): siRNA sense strand
gcagacuuagaauccauga

SEQ ID NO: 1636831 - RNA, 19 nt, Homo sapiens
  misc_RNA (1)...(19): siRNA sense strand
gggcagugugaauuagaaa

SEQ ID NO: 1636832 - RNA, 19 nt, Homo sapiens
  misc_RNA (1)...(19): siRNA sense strand
aauaagaggaaggaacuug

SEQ ID NO: 1636833 - RNA, 19 nt, Homo sapiens
  misc_RNA (1)...(19): siRNA sense strand
gaacaaccugcugcaucug

SEQ ID NO: 1636834 - RNA, 19 nt, Homo sapiens
  misc_RNA (1)...(19): siRNA sense strand
uggagcagauggaccugau

SEQ ID NO: 1636835 - RNA, 19 nt, Homo sapiens
  misc_RNA (1)...(19): siRNA sense strand
auaagaggaaggaacuuga

SEQ ID NO: 1636836 - RNA, 19 nt, Homo sapiens
  misc_RNA (1)...(19): siRNA sense strand
caaaguaugugcuucagua

SEQ ID NO: 1636837 - RNA, 19 nt, Homo sapiens
  misc_RNA (1)...(19): siRNA sense strand
gcaguuaagugaugcaauu

SEQ ID NO: 1636838 - RNA, 19 nt, Homo sapiens
  misc_RNA (1)...(19): siRNA sense strand
ggacugaaauuaagcuugu

SEQ ID NO: 1636839 - RNA, 19 nt, Homo sapiens
  misc_RNA (1)...(19): siRNA sense strand
ggagaauuguugaagauga

SEQ ID NO: 1636840 - RNA, 19 nt, Homo sapiens
  misc_RNA (1)...(19): siRNA sense strand
gcaaaucugcaaacacuaa

SEQ ID NO: 1636841 - RNA, 19 nt, Homo sapiens
  misc_RNA (1)...(19): siRNA sense strand
gagaauuguugaagaugaa

SEQ ID NO: 1636842 - RNA, 19 nt, Homo sapiens
  misc_RNA (1)...(19): siRNA sense strand
ggagauuuccauguuauua

SEQ ID NO: 1636843 - RNA, 19 nt, Homo sapiens
  misc_RNA (1)...(19): siRNA sense strand
guacagcacauucauuauu

SEQ ID NO: 1636844 - RNA, 19 nt, Homo sapiens
  misc_RNA (1)...(19): siRNA sense strand
cagaagcgcuccaguaucu

SEQ ID NO: 1636845 - RNA, 19 nt, Homo sapiens
  misc_RNA (1)...(19): siRNA sense strand
aaaaggaacuggagaauug

SEQ ID NO: 1636846 - RNA, 19 nt, Homo sapiens
  misc_RNA (1)...(19): siRNA sense strand
aagauaccgucaugaauuu

SEQ ID NO: 1636847 - RNA, 19 nt, Homo sapiens
  misc_RNA (1)...(19): siRNA sense strand
aaagauaccgucaugaauu

SEQ ID NO: 1636848 - RNA, 19 nt, Homo sapiens
  misc_RNA (1)...(19): siRNA sense strand
auagugcacuugaugcuua

SEQ ID NO: 1636849 - RNA, 19 nt, Homo sapiens
  misc_RNA (1)...(19): siRNA sense strand
caacauagugcacuugaug

SEQ ID NO: 1636850 - RNA, 19 nt, Homo sapiens
  misc_RNA (1)...(19): siRNA sense strand
ugacagaaauggugaaucg

SEQ ID NO: 1636851 - RNA, 19 nt, Homo sapiens
  misc_RNA (1)...(19): siRNA sense strand
cagaagcaguuaagugaug

SEQ ID NO: 1636852 - RNA, 19 nt, Homo sapiens
  misc_RNA (1)...(19): siRNA sense strand
ugcaaacacuaacagaaua

SEQ ID NO: 1636853 - RNA, 19 nt, Homo sapiens
  misc_RNA (1)...(19): siRNA sense strand
ugacauuacuggagaaguc

SEQ ID NO: 1636854 - RNA, 19 nt, Homo sapiens
  misc_RNA (1)...(19): siRNA sense strand
ccacagaaauggccugacu

SEQ ID NO: 1636855 - RNA, 19 nt, Homo sapiens
  misc_RNA (1)...(19): siRNA sense strand
caaacgaguuauggacuga

SEQ ID NO: 1636856 - RNA, 19 nt, Homo sapiens
  misc_RNA (1)...(19): siRNA sense strand
guuauggacugaaauuaag

SEQ ID NO: 1636857 - RNA, 19 nt, Homo sapiens
  misc_RNA (1)...(19): siRNA sense strand
ucagaauuauccacuguug

SEQ ID NO: 1636858 - RNA, 19 nt, Homo sapiens
  misc_RNA (1)...(19): siRNA sense strand
gcaaacacuaacagaauau

SEQ ID NO: 1636859 - RNA, 19 nt, Homo sapiens
  misc_RNA (1)...(19): siRNA sense strand
gaacuggagaauuguugaa

SEQ ID NO: 1636860 - RNA, 19 nt, Homo sapiens
  misc_RNA (1)...(19): siRNA sense strand
ccguacagcacauucauua

SEQ ID NO: 1636861 - RNA, 19 nt, Homo sapiens
  misc_RNA (1)...(19): siRNA sense strand
gagaagauuuuccacagaa

SEQ ID NO: 1636862 - RNA, 19 nt, Homo sapiens
  misc_RNA (1)...(19): siRNA sense strand
gaacucagcgaugcaaauc

SEQ ID NO: 1636863 - RNA, 19 nt, Homo sapiens
  misc_RNA (1)...(19): siRNA sense strand
gaagaugaaccaaacaaaa

SEQ ID NO: 1636864 - RNA, 19 nt, Homo sapiens
  misc_RNA (1)...(19): siRNA sense strand
gauaccgucaugaauuuaa

SEQ ID NO: 1636865 - RNA, 19 nt, Homo sapiens
  misc_RNA (1)...(19): siRNA sense strand
gcaaauucagaagcaguua

SEQ ID NO: 1636866 - RNA, 19 nt, Homo sapiens
  misc_RNA (1)...(19): siRNA sense strand
gaaggaaaucagaauuauc

SEQ ID NO: 1636867 - RNA, 19 nt, Homo sapiens
  misc_RNA (1)...(19): siRNA sense strand
gcccagagcaaauucagaa

SEQ ID NO: 1636868 - RNA, 19 nt, Homo sapiens
  misc_RNA (1)...(19): siRNA sense strand
ggagaagucccaggauaau

SEQ ID NO: 1636869 - RNA, 19 nt, Homo sapiens
  misc_RNA (1)...(19): siRNA sense strand
cauuaaagccaacauagug

SEQ ID NO: 1636870 - RNA, 19 nt, Homo sapiens
  misc_RNA (1)...(19): siRNA sense strand
caaauucagaagcaguuaa

SEQ ID NO: 1636871 - RNA, 19 nt, Homo sapiens
  misc_RNA (1)...(19): siRNA sense strand
cgucaugaauuuaagucaa

SEQ ID NO: 1636872 - RNA, 19 nt, Homo sapiens
  misc_RNA (1)...(19): siRNA sense strand
ucuugaaucuguugaagga

SEQ ID NO: 1636873 - RNA, 19 nt, Homo sapiens
  misc_RNA (1)...(19): siRNA sense strand
cagagcaaauucagaagca

SEQ ID NO: 1636874 - RNA, 19 nt, Homo sapiens
  misc_RNA (1)...(19): siRNA sense strand
ggccugacuugcugacaga

SEQ ID NO: 1636875 - RNA, 19 nt, Homo sapiens
  misc_RNA (1)...(19): siRNA sense strand
cgaguuauggacugaaauu

SEQ ID NO: 1636876 - RNA, 19 nt, Homo sapiens
  misc_RNA (1)...(19): siRNA sense strand
ggaacucagcgaugcaaau

SEQ ID NO: 1636877 - RNA, 19 nt, Homo sapiens
  misc_RNA (1)...(19): siRNA sense strand
aaucagaauuauccacugu

SEQ ID NO: 1636878 - RNA, 19 nt, Homo sapiens
  misc_RNA (1)...(19): siRNA sense strand
uugaaucuguugaaggaaa

SEQ ID NO: 1636879 - RNA, 19 nt, Homo sapiens
  misc_RNA (1)...(19): siRNA sense strand
ccgaucgaguggccauuaa

SEQ ID NO: 1636880 - RNA, 19 nt, Homo sapiens
  misc_RNA (1)...(19): siRNA sense strand
aguaugugcuucaguaaca

SEQ ID NO: 1636881 - RNA, 19 nt, Homo sapiens
  misc_RNA (1)...(19): siRNA sense strand
gaguuauggacugaaauua

SEQ ID NO: 1636882 - RNA, 19 nt, Homo sapiens
  misc_RNA (1)...(19): siRNA sense strand
gaaaacacuugauccugau

SEQ ID NO: 1636883 - RNA, 19 nt, Homo sapiens
  misc_RNA (1)...(19): siRNA sense strand
ggaacuggagaauuguuga

SEQ ID NO: 1636884 - RNA, 19 nt, Homo sapiens
  misc_RNA (1)...(19): siRNA sense strand
uggagaagucccaggauaa

SEQ ID NO: 1636885 - RNA, 19 nt, Homo sapiens
  misc_RNA (1)...(19): siRNA sense strand
gaagucccaggauaauguu

SEQ ID NO: 1636886 - RNA, 19 nt, Homo sapiens
  misc_RNA (1)...(19): siRNA sense strand
uaaaagauaccgucaugaa

SEQ ID NO: 1636887 - RNA, 19 nt, Homo sapiens
  misc_RNA (1)...(19): siRNA sense strand
ugaagaugaaccaaacaaa

SEQ ID NO: 1636888 - RNA, 19 nt, Homo sapiens
  misc_RNA (1)...(19): siRNA sense strand
uagcauuauuggcagagaa

SEQ ID NO: 1636889 - RNA, 19 nt, Homo sapiens
  misc_RNA (1)...(19): siRNA sense strand
acagaaauggccugacuug

SEQ ID NO: 1636890 - RNA, 19 nt, Homo sapiens
  misc_RNA (1)...(19): siRNA sense strand
agaagucccaggauaaugu

SEQ ID NO: 1636891 - RNA, 19 nt, Homo sapiens
  misc_RNA (1)...(19): siRNA sense strand
gcagaagcgcuccaguauc

SEQ ID NO: 1636892 - RNA, 19 nt, Homo sapiens
  misc_RNA (1)...(19): siRNA sense strand
ugaaucuguugaaggaaau

SEQ ID NO: 1636893 - RNA, 19 nt, Homo sapiens
  misc_RNA (1)...(19): siRNA sense strand
gugcuucaguaacauucaa

SEQ ID NO: 1636894 - RNA, 19 nt, Homo sapiens
  misc_RNA (1)...(19): siRNA sense strand
ggccauuaaagccaacaua

SEQ ID NO: 1636895 - RNA, 19 nt, Homo sapiens
  misc_RNA (1)...(19): siRNA sense strand
gagaagucccaggauaaug

SEQ ID NO: 1636896 - RNA, 19 nt, Homo sapiens
  misc_RNA (1)...(19): siRNA sense strand
uaucaaaguaugugcuuca

SEQ ID NO: 1636897 - RNA, 19 nt, Homo sapiens
  misc_RNA (1)...(19): siRNA sense strand
gaucgaguggccauuaaag

SEQ ID NO: 1636898 - RNA, 19 nt, Homo sapiens
  misc_RNA (1)...(19): siRNA sense strand
cuggagaauuguugaagau

SEQ ID NO: 1636899 - RNA, 19 nt, Homo sapiens
  misc_RNA (1)...(19): siRNA sense strand
gccgaucgaguggccauua

SEQ ID NO: 1636900 - RNA, 19 nt, Homo sapiens
  misc_RNA (1)...(19): siRNA sense strand
uugcuuugccuuugacuaa

SEQ ID NO: 1636901 - RNA, 19 nt, Homo sapiens
  misc_RNA (1)...(19): siRNA sense strand
guuaagugaugcaauuagc

SEQ ID NO: 1636902 - RNA, 19 nt, Homo sapiens
  misc_RNA (1)...(19): siRNA sense strand
acucagcgaugcaaaucug

SEQ ID NO: 1636903 - RNA, 19 nt, Homo sapiens
  misc_RNA (1)...(19): siRNA sense strand
gcuuugccuuugacuaauc

SEQ ID NO: 1636904 - RNA, 19 nt, Homo sapiens
  misc_RNA (1)...(19): siRNA sense strand
cugcaaacacuaacagaau

SEQ ID NO: 1636905 - RNA, 19 nt, Homo sapiens
  misc_RNA (1)...(19): siRNA sense strand
guugaaggaaaucagaauu

SEQ ID NO: 1636906 - RNA, 19 nt, Homo sapiens
  misc_RNA (1)...(19): siRNA sense strand
uagcagcccagagcaaauu

SEQ ID NO: 1636907 - RNA, 19 nt, Homo sapiens
  misc_RNA (1)...(19): siRNA sense strand
agaaauggugaaucgcuuu

SEQ ID NO: 1636908 - RNA, 19 nt, Homo sapiens
  misc_RNA (1)...(19): siRNA sense strand
aaaguaugugcuucaguaa

SEQ ID NO: 1636909 - RNA, 19 nt, Homo sapiens
  misc_RNA (1)...(19): siRNA sense strand
gccauuaaagccaacauag

SEQ ID NO: 1636910 - RNA, 19 nt, Homo sapiens
  misc_RNA (1)...(19): siRNA sense strand
agaaauggccugacuugcu

SEQ ID NO: 1636911 - RNA, 19 nt, Homo sapiens
  misc_RNA (1)...(19): siRNA sense strand
gacguccagcugagaaauu

SEQ ID NO: 1636912 - RNA, 19 nt, Homo sapiens
  misc_RNA (1)...(19): siRNA sense strand
caguuaagugaugcaauua

SEQ ID NO: 1636913 - RNA, 19 nt, Homo sapiens
  misc_RNA (1)...(19): siRNA sense strand
uucagaagcaguuaaguga

SEQ ID NO: 1636914 - RNA, 19 nt, Homo sapiens
  misc_RNA (1)...(19): siRNA sense strand
ccaacauagugcacuugau

SEQ ID NO: 1636915 - RNA, 19 nt, Homo sapiens
  misc_RNA (1)...(19): siRNA sense strand
gccaacauagugcacuuga

SEQ ID NO: 1636916 - RNA, 19 nt, Homo sapiens
  misc_RNA (1)...(19): siRNA sense strand
acguccagcugagaaauuu

SEQ ID NO: 1636917 - RNA, 19 nt, Homo sapiens
  misc_RNA (1)...(19): siRNA sense strand
ccauuaaagccaacauagu

SEQ ID NO: 1636918 - RNA, 19 nt, Homo sapiens
  misc_RNA (1)...(19): siRNA sense strand
ugcagaagcgcuccaguau

SEQ ID NO: 1636919 - RNA, 19 nt, Homo sapiens
  misc_RNA (1)...(19): siRNA sense strand
aacgaguuauggacugaaa

SEQ ID NO: 1636920 - RNA, 19 nt, Homo sapiens
  misc_RNA (1)...(19): siRNA sense strand
cugacuugcugacagaaau

SEQ ID NO: 1636921 - RNA, 19 nt, Homo sapiens
  misc_RNA (1)...(19): siRNA sense strand
acuggagaauuguugaaga

SEQ ID NO: 1636922 - RNA, 19 nt, Homo sapiens
  misc_RNA (1)...(19): siRNA sense strand
gccuuugcuuugccuuuga

SEQ ID NO: 1636923 - RNA, 19 nt, Homo sapiens
  misc_RNA (1)...(19): siRNA sense strand
uguugaagaugaaccaaac

SEQ ID NO: 1636924 - RNA, 19 nt, Homo sapiens
  misc_RNA (1)...(19): siRNA sense strand
augcagaagcgcuccagua

SEQ ID NO: 1636925 - RNA, 19 nt, Homo sapiens
  misc_RNA (1)...(19): siRNA sense strand
aauuauccacuguugcuuu

SEQ ID NO: 1636926 - RNA, 19 nt, Homo sapiens
  misc_RNA (1)...(19): siRNA sense strand
caaaguaugugcuucagua

SEQ ID NO: 1636927 - RNA, 19 nt, Homo sapiens
  misc_RNA (1)...(19): siRNA sense strand
gcaguuaagugaugcaauu

SEQ ID NO: 1636928 - RNA, 19 nt, Homo sapiens
  misc_RNA (1)...(19): siRNA sense strand
ggacugaaauuaagcuugu

SEQ ID NO: 1636929 - RNA, 19 nt, Homo sapiens
  misc_RNA (1)...(19): siRNA sense strand
ggagaauuguugaagauga

SEQ ID NO: 1636930 - RNA, 19 nt, Homo sapiens
  misc_RNA (1)...(19): siRNA sense strand
gcaaaucugcaaacacuaa

SEQ ID NO: 1636931 - RNA, 19 nt, Homo sapiens
  misc_RNA (1)...(19): siRNA sense strand
gagaauuguugaagaugaa

SEQ ID NO: 1636932 - RNA, 19 nt, Homo sapiens
  misc_RNA (1)...(19): siRNA sense strand
ggagauuuccauguuauua

SEQ ID NO: 1636933 - RNA, 19 nt, Homo sapiens
  misc_RNA (1)...(19): siRNA sense strand
guacagcacauucauuauu

SEQ ID NO: 1636934 - RNA, 19 nt, Homo sapiens
  misc_RNA (1)...(19): siRNA sense strand
aaaaggaacuggagaauug

SEQ ID NO: 1636935 - RNA, 19 nt, Homo sapiens
  misc_RNA (1)...(19): siRNA sense strand
aagauaccgucaugaauuu

SEQ ID NO: 1636936 - RNA, 19 nt, Homo sapiens
  misc_RNA (1)...(19): siRNA sense strand
aaagauaccgucaugaauu

SEQ ID NO: 1636937 - RNA, 19 nt, Homo sapiens
  misc_RNA (1)...(19): siRNA sense strand
auagugcacuugaugcuua

SEQ ID NO: 1636938 - RNA, 19 nt, Homo sapiens
  misc_RNA (1)...(19): siRNA sense strand
caacauagugcacuugaug

SEQ ID NO: 1636939 - RNA, 19 nt, Homo sapiens
  misc_RNA (1)...(19): siRNA sense strand
ugacagaaauggugaaucg

SEQ ID NO: 1636940 - RNA, 19 nt, Homo sapiens
  misc_RNA (1)...(19): siRNA sense strand
cagaagcaguuaagugaug

SEQ ID NO: 1636941 - RNA, 19 nt, Homo sapiens
  misc_RNA (1)...(19): siRNA sense strand
ugcaaacacuaacagaaua

SEQ ID NO: 1636942 - RNA, 19 nt, Homo sapiens
  misc_RNA (1)...(19): siRNA sense strand
ugacauuacuggagaaguc

SEQ ID NO: 1636943 - RNA, 19 nt, Homo sapiens
  misc_RNA (1)...(19): siRNA sense strand
ccacagaaauggccugacu

SEQ ID NO: 1636944 - RNA, 19 nt, Homo sapiens
  misc_RNA (1)...(19): siRNA sense strand
caaacgaguuauggacuga

SEQ ID NO: 1636945 - RNA, 19 nt, Homo sapiens
  misc_RNA (1)...(19): siRNA sense strand
guuauggacugaaauuaag

SEQ ID NO: 1636946 - RNA, 19 nt, Homo sapiens
  misc_RNA (1)...(19): siRNA sense strand
ucagaauuauccacuguug

SEQ ID NO: 1636947 - RNA, 19 nt, Homo sapiens
  misc_RNA (1)...(19): siRNA sense strand
gcaaacacuaacagaauau

SEQ ID NO: 1636948 - RNA, 19 nt, Homo sapiens
  misc_RNA (1)...(19): siRNA sense strand
gaacuggagaauuguugaa

SEQ ID NO: 1636949 - RNA, 19 nt, Homo sapiens
  misc_RNA (1)...(19): siRNA sense strand
ccguacagcacauucauua

SEQ ID NO: 1636950 - RNA, 19 nt, Homo sapiens
  misc_RNA (1)...(19): siRNA sense strand
gagaagauuuuccacagaa

SEQ ID NO: 1636951 - RNA, 19 nt, Homo sapiens
  misc_RNA (1)...(19): siRNA sense strand
gaacucagcgaugcaaauc

SEQ ID NO: 1636952 - RNA, 19 nt, Homo sapiens
  misc_RNA (1)...(19): siRNA sense strand
gaagaugaaccaaacaaaa

SEQ ID NO: 1636953 - RNA, 19 nt, Homo sapiens
  misc_RNA (1)...(19): siRNA sense strand
gauaccgucaugaauuuaa

SEQ ID NO: 1636954 - RNA, 19 nt, Homo sapiens
  misc_RNA (1)...(19): siRNA sense strand
gcaaauucagaagcaguua

SEQ ID NO: 1636955 - RNA, 19 nt, Homo sapiens
  misc_RNA (1)...(19): siRNA sense strand
gaaggaaaucagaauuauc

SEQ ID NO: 1636956 - RNA, 19 nt, Homo sapiens
  misc_RNA (1)...(19): siRNA sense strand
gcccagagcaaauucagaa

SEQ ID NO: 1636957 - RNA, 19 nt, Homo sapiens
  misc_RNA (1)...(19): siRNA sense strand
ggagaagucccaggauaau

SEQ ID NO: 1636958 - RNA, 19 nt, Homo sapiens
  misc_RNA (1)...(19): siRNA sense strand
cauuaaagccaacauagug

SEQ ID NO: 1636959 - RNA, 19 nt, Homo sapiens
  misc_RNA (1)...(19): siRNA sense strand
caaauucagaagcaguuaa

SEQ ID NO: 1636960 - RNA, 19 nt, Homo sapiens
  misc_RNA (1)...(19): siRNA sense strand
cgucaugaauuuaagucaa

SEQ ID NO: 1636961 - RNA, 19 nt, Homo sapiens
  misc_RNA (1)...(19): siRNA sense strand
ucuugaaucuguugaagga

SEQ ID NO: 1636962 - RNA, 19 nt, Homo sapiens
  misc_RNA (1)...(19): siRNA sense strand
cagagcaaauucagaagca

SEQ ID NO: 1636963 - RNA, 19 nt, Homo sapiens
  misc_RNA (1)...(19): siRNA sense strand
ggccugacuugcugacaga

SEQ ID NO: 1636964 - RNA, 19 nt, Homo sapiens
  misc_RNA (1)...(19): siRNA sense strand
cgaguuauggacugaaauu

SEQ ID NO: 1636965 - RNA, 19 nt, Homo sapiens
  misc_RNA (1)...(19): siRNA sense strand
ggaacucagcgaugcaaau

SEQ ID NO: 1636966 - RNA, 19 nt, Homo sapiens
  misc_RNA (1)...(19): siRNA sense strand
uugaaucuguugaaggaaa

SEQ ID NO: 1636967 - RNA, 19 nt, Homo sapiens
  misc_RNA (1)...(19): siRNA sense strand
aaucagaauuauccacugu

SEQ ID NO: 1636968 - RNA, 19 nt, Homo sapiens
  misc_RNA (1)...(19): siRNA sense strand
ccgaucgaguggccauuaa

SEQ ID NO: 1636969 - RNA, 19 nt, Homo sapiens
  misc_RNA (1)...(19): siRNA sense strand
aguaugugcuucaguaaca

SEQ ID NO: 1636970 - RNA, 19 nt, Homo sapiens
  misc_RNA (1)...(19): siRNA sense strand
gaguuauggacugaaauua

SEQ ID NO: 1636971 - RNA, 19 nt, Homo sapiens
  misc_RNA (1)...(19): siRNA sense strand
gaaaacacuugauccugau

SEQ ID NO: 1636972 - RNA, 19 nt, Homo sapiens
  misc_RNA (1)...(19): siRNA sense strand
ggaacuggagaauuguuga

SEQ ID NO: 1636973 - RNA, 19 nt, Homo sapiens
  misc_RNA (1)...(19): siRNA sense strand
uggagaagucccaggauaa

SEQ ID NO: 1636974 - RNA, 19 nt, Homo sapiens
  misc_RNA (1)...(19): siRNA sense strand
gaagucccaggauaauguu

SEQ ID NO: 1636975 - RNA, 19 nt, Homo sapiens
  misc_RNA (1)...(19): siRNA sense strand
uaaaagauaccgucaugaa

SEQ ID NO: 1636976 - RNA, 19 nt, Homo sapiens
  misc_RNA (1)...(19): siRNA sense strand
ugaagaugaaccaaacaaa

SEQ ID NO: 1636977 - RNA, 19 nt, Homo sapiens
  misc_RNA (1)...(19): siRNA sense strand
uagcauuauuggcagagaa

SEQ ID NO: 1636978 - RNA, 19 nt, Homo sapiens
  misc_RNA (1)...(19): siRNA sense strand
acagaaauggccugacuug

SEQ ID NO: 1636979 - RNA, 19 nt, Homo sapiens
  misc_RNA (1)...(19): siRNA sense strand
agaagucccaggauaaugu

SEQ ID NO: 1636980 - RNA, 19 nt, Homo sapiens
  misc_RNA (1)...(19): siRNA sense strand
ugaaucuguugaaggaaau

SEQ ID NO: 1636981 - RNA, 19 nt, Homo sapiens
  misc_RNA (1)...(19): siRNA sense strand
gagaagucccaggauaaug

SEQ ID NO: 1636982 - RNA, 19 nt, Homo sapiens
  misc_RNA (1)...(19): siRNA sense strand
ggccauuaaagccaacaua

SEQ ID NO: 1636983 - RNA, 19 nt, Homo sapiens
  misc_RNA (1)...(19): siRNA sense strand
gugcuucaguaacauucaa

SEQ ID NO: 1636984 - RNA, 19 nt, Homo sapiens
  misc_RNA (1)...(19): siRNA sense strand
uaucaaaguaugugcuuca

SEQ ID NO: 1636985 - RNA, 19 nt, Homo sapiens
  misc_RNA (1)...(19): siRNA sense strand
gaucgaguggccauuaaag

SEQ ID NO: 1636986 - RNA, 19 nt, Homo sapiens
  misc_RNA (1)...(19): siRNA sense strand
cuggagaauuguugaagau

SEQ ID NO: 1636987 - RNA, 19 nt, Homo sapiens
  misc_RNA (1)...(19): siRNA sense strand
gccgaucgaguggccauua

SEQ ID NO: 1636988 - RNA, 19 nt, Homo sapiens
  misc_RNA (1)...(19): siRNA sense strand
uugcuuugccuuugacuaa

SEQ ID NO: 1636989 - RNA, 19 nt, Homo sapiens
  misc_RNA (1)...(19): siRNA sense strand
guuaagugaugcaauuagc

SEQ ID NO: 1636990 - RNA, 19 nt, Homo sapiens
  misc_RNA (1)...(19): siRNA sense strand
guugaaggaaaucagaauu

SEQ ID NO: 1636991 - RNA, 19 nt, Homo sapiens
  misc_RNA (1)...(19): siRNA sense strand
gcuuugccuuugacuaauc

SEQ ID NO: 1636992 - RNA, 19 nt, Homo sapiens
  misc_RNA (1)...(19): siRNA sense strand
cugcaaacacuaacagaau

SEQ ID NO: 1636993 - RNA, 19 nt, Homo sapiens
  misc_RNA (1)...(19): siRNA sense strand
uagcagcccagagcaaauu

SEQ ID NO: 1636994 - RNA, 19 nt, Homo sapiens
  misc_RNA (1)...(19): siRNA sense strand
acucagcgaugcaaaucug

SEQ ID NO: 1636995 - RNA, 19 nt, Homo sapiens
  misc_RNA (1)...(19): siRNA sense strand
aaaguaugugcuucaguaa

SEQ ID NO: 1636996 - RNA, 19 nt, Homo sapiens
  misc_RNA (1)...(19): siRNA sense strand
agaaauggugaaucgcuuu

SEQ ID NO: 1636997 - RNA, 19 nt, Homo sapiens
  misc_RNA (1)...(19): siRNA sense strand
gacguccagcugagaaauu

SEQ ID NO: 1636998 - RNA, 19 nt, Homo sapiens
  misc_RNA (1)...(19): siRNA sense strand
agaaauggccugacuugcu

SEQ ID NO: 1636999 - RNA, 19 nt, Homo sapiens
  misc_RNA (1)...(19): siRNA sense strand
caguuaagugaugcaauua

SEQ ID NO: 1637000 - RNA, 19 nt, Homo sapiens
  misc_RNA (1)...(19): siRNA sense strand
uucagaagcaguuaaguga

SEQ ID NO: 1637001 - RNA, 19 nt, Homo sapiens
  misc_RNA (1)...(19): siRNA sense strand
ccaacauagugcacuugau

SEQ ID NO: 1637002 - RNA, 19 nt, Homo sapiens
  misc_RNA (1)...(19): siRNA sense strand
gccauuaaagccaacauag

SEQ ID NO: 1637003 - RNA, 19 nt, Homo sapiens
  misc_RNA (1)...(19): siRNA sense strand
gccaacauagugcacuuga

SEQ ID NO: 1637004 - RNA, 19 nt, Homo sapiens
  misc_RNA (1)...(19): siRNA sense strand
acguccagcugagaaauuu

SEQ ID NO: 1637005 - RNA, 19 nt, Homo sapiens
  misc_RNA (1)...(19): siRNA sense strand
acuggagaauuguugaaga

SEQ ID NO: 1637006 - RNA, 19 nt, Homo sapiens
  misc_RNA (1)...(19): siRNA sense strand
aacgaguuauggacugaaa

SEQ ID NO: 1637007 - RNA, 19 nt, Homo sapiens
  misc_RNA (1)...(19): siRNA sense strand
cugacuugcugacagaaau

SEQ ID NO: 1637008 - RNA, 19 nt, Homo sapiens
  misc_RNA (1)...(19): siRNA sense strand
ccauuaaagccaacauagu

SEQ ID NO: 1637009 - RNA, 19 nt, Homo sapiens
  misc_RNA (1)...(19): siRNA sense strand
gccuuugcuuugccuuuga

SEQ ID NO: 1637010 - RNA, 19 nt, Homo sapiens
  misc_RNA (1)...(19): siRNA sense strand
uguugaagaugaaccaaac

SEQ ID NO: 1637011 - RNA, 19 nt, Homo sapiens
  misc_RNA (1)...(19): siRNA sense strand
aauuauccacuguugcuuu

SEQ ID NO: 1637012 - RNA, 19 nt, Homo sapiens
  misc_RNA (1)...(19): siRNA sense strand
gagcgcagcugcaagauuc

SEQ ID NO: 1637013 - RNA, 19 nt, Homo sapiens
  misc_RNA (1)...(19): siRNA sense strand
gcaugaagcuggaguacga

SEQ ID NO: 1637014 - RNA, 19 nt, Homo sapiens
  misc_RNA (1)...(19): siRNA sense strand
ggaagcaguuggugaaugg

SEQ ID NO: 1637015 - RNA, 19 nt, Homo sapiens
  misc_RNA (1)...(19): siRNA sense strand
gcugcaagauucagaagaa

SEQ ID NO: 1637016 - RNA, 19 nt, Homo sapiens
  misc_RNA (1)...(19): siRNA sense strand
cgcaaacccuucagugaua

SEQ ID NO: 1637017 - RNA, 19 nt, Homo sapiens
  misc_RNA (1)...(19): siRNA sense strand
ugaauuugcugucaaguuc

SEQ ID NO: 1637018 - RNA, 19 nt, Homo sapiens
  misc_RNA (1)...(19): siRNA sense strand
gagccuaaguuugaauuug

SEQ ID NO: 1637019 - RNA, 19 nt, Homo sapiens
  misc_RNA (1)...(19): siRNA sense strand
gggaagaggaggagaaaga

SEQ ID NO: 1637020 - RNA, 19 nt, Homo sapiens
  misc_RNA (1)...(19): siRNA sense strand
gcaagauucagaagaagaa

SEQ ID NO: 1637021 - RNA, 19 nt, Homo sapiens
  misc_RNA (1)...(19): siRNA sense strand
ucauugagccuaaguuuga

SEQ ID NO: 1637022 - RNA, 19 nt, Homo sapiens
  misc_RNA (1)...(19): siRNA sense strand
cuacaaugccuaccugaaa

SEQ ID NO: 1637023 - RNA, 19 nt, Homo sapiens
  misc_RNA (1)...(19): siRNA sense strand
acagugaccuggcccuauu

SEQ ID NO: 1637024 - RNA, 19 nt, Homo sapiens
  misc_RNA (1)...(19): siRNA sense strand
gcaaacccuucagugauau

SEQ ID NO: 1637025 - RNA, 19 nt, Homo sapiens
  misc_RNA (1)...(19): siRNA sense strand
gaagaagaaccgcaacaag

SEQ ID NO: 1637026 - RNA, 19 nt, Homo sapiens
  misc_RNA (1)...(19): siRNA sense strand
gcacugggcaugucacaca

SEQ ID NO: 1637027 - RNA, 19 nt, Homo sapiens
  misc_RNA (1)...(19): siRNA sense strand
ccacuacgguguucaugca

SEQ ID NO: 1637028 - RNA, 19 nt, Homo sapiens
  misc_RNA (1)...(19): siRNA sense strand
gaccuggcccuauucauug

SEQ ID NO: 1637029 - RNA, 19 nt, Homo sapiens
  misc_RNA (1)...(19): siRNA sense strand
ccaagcacaucuacaaugc

SEQ ID NO: 1637030 - RNA, 19 nt, Homo sapiens
  misc_RNA (1)...(19): siRNA sense strand
ugaccuggcccuauucauu

SEQ ID NO: 1637031 - RNA, 19 nt, Homo sapiens
  misc_RNA (1)...(19): siRNA sense strand
ucacugaguucgccaagag

SEQ ID NO: 1637032 - RNA, 19 nt, Homo sapiens
  misc_RNA (1)...(19): siRNA sense strand
ggaaguggcagaggcagaa

SEQ ID NO: 1637033 - RNA, 19 nt, Homo sapiens
  misc_RNA (1)...(19): siRNA sense strand
gugauaucauugagccuaa

SEQ ID NO: 1637034 - RNA, 19 nt, Homo sapiens
  misc_RNA (1)...(19): siRNA sense strand
caacggcaguggcuuuguc

SEQ ID NO: 1637035 - RNA, 19 nt, Homo sapiens
  misc_RNA (1)...(19): siRNA sense strand
uaucauugagccuaaguuu

SEQ ID NO: 1637036 - RNA, 19 nt, Homo sapiens
  misc_RNA (1)...(19): siRNA sense strand
agguuacccuucucaagua

SEQ ID NO: 1637037 - RNA, 19 nt, Homo sapiens
  misc_RNA (1)...(19): siRNA sense strand
agaagaaccgcaacaagug

SEQ ID NO: 1637038 - RNA, 19 nt, Homo sapiens
  misc_RNA (1)...(19): siRNA sense strand
aagaagaaccgcaacaagu

SEQ ID NO: 1637039 - RNA, 19 nt, Homo sapiens
  misc_RNA (1)...(19): siRNA sense strand
gaucagcgugcacgucuuc

SEQ ID NO: 1637040 - RNA, 19 nt, Homo sapiens
  misc_RNA (1)...(19): siRNA sense strand
caaguucaacgcccuggaa

SEQ ID NO: 1637041 - RNA, 19 nt, Homo sapiens
  misc_RNA (1)...(19): siRNA sense strand
gcaacaagugccaguacug

SEQ ID NO: 1637042 - RNA, 19 nt, Homo sapiens
  misc_RNA (1)...(19): siRNA sense strand
gcaugucacacaacgcuau

SEQ ID NO: 1637043 - RNA, 19 nt, Homo sapiens
  misc_RNA (1)...(19): siRNA sense strand
gcggcagccucaacaugga

SEQ ID NO: 1637044 - RNA, 19 nt, Homo sapiens
  misc_RNA (1)...(19): siRNA sense strand
cuacgguguucaugcaugu

SEQ ID NO: 1637045 - RNA, 19 nt, Homo sapiens
  misc_RNA (1)...(19): siRNA sense strand
gguuacccuucucaaguau

SEQ ID NO: 1637046 - RNA, 19 nt, Homo sapiens
  misc_RNA (1)...(19): siRNA sense strand
cagguuacccuucucaagu

SEQ ID NO: 1637047 - RNA, 19 nt, Homo sapiens
  misc_RNA (1)...(19): siRNA sense strand
gaagcuggaguacgagaag

SEQ ID NO: 1637048 - RNA, 19 nt, Homo sapiens
  misc_RNA (1)...(19): siRNA sense strand
agaaggggcugguguggaa

SEQ ID NO: 1637049 - RNA, 19 nt, Homo sapiens
  misc_RNA (1)...(19): siRNA sense strand
ccgcaaacccuucagugau

SEQ ID NO: 1637050 - RNA, 19 nt, Homo sapiens
  misc_RNA (1)...(19): siRNA sense strand
uccacgacaucgagacauu

SEQ ID NO: 1637051 - RNA, 19 nt, Homo sapiens
  misc_RNA (1)...(19): siRNA sense strand
acccuucagugauaucauu

SEQ ID NO: 1637052 - RNA, 19 nt, Homo sapiens
  misc_RNA (1)...(19): siRNA sense strand
ccucuaucgucaacaagga

SEQ ID NO: 1637053 - RNA, 19 nt, Homo sapiens
  misc_RNA (1)...(19): siRNA sense strand
gcagcugcaagauucagaa

SEQ ID NO: 1637054 - RNA, 19 nt, Homo sapiens
  misc_RNA (1)...(19): siRNA sense strand
ggaagaggaggagaaagag

SEQ ID NO: 1637055 - RNA, 19 nt, Homo sapiens
  misc_RNA (1)...(19): siRNA sense strand
caaggacgggcugcuggua

SEQ ID NO: 1637056 - RNA, 19 nt, Homo sapiens
  misc_RNA (1)...(19): siRNA sense strand
ucagcagccucuuccucaa

SEQ ID NO: 1637057 - RNA, 19 nt, Homo sapiens
  misc_RNA (1)...(19): siRNA sense strand
ucuccaagcacaucuacaa

SEQ ID NO: 1637058 - RNA, 19 nt, Homo sapiens
  misc_RNA (1)...(19): siRNA sense strand
uggaagcaguuggugaaug

SEQ ID NO: 1637059 - RNA, 19 nt, Homo sapiens
  misc_RNA (1)...(19): siRNA sense strand
agaagaagaaccgcaacaa

SEQ ID NO: 1637060 - RNA, 19 nt, Homo sapiens
  misc_RNA (1)...(19): siRNA sense strand
gaauuugcugucaaguuca

SEQ ID NO: 1637061 - RNA, 19 nt, Homo sapiens
  misc_RNA (1)...(19): siRNA sense strand
aagggcuucuuccgucgua

SEQ ID NO: 1637062 - RNA, 19 nt, Homo sapiens
  misc_RNA (1)...(19): siRNA sense strand
cgucguacgauccgcauga

SEQ ID NO: 1637063 - RNA, 19 nt, Homo sapiens
  misc_RNA (1)...(19): siRNA sense strand
uggaguacgagaaguguga

SEQ ID NO: 1637064 - RNA, 19 nt, Homo sapiens
  misc_RNA (1)...(19): siRNA sense strand
ccuggaacuugaugacagu

SEQ ID NO: 1637065 - RNA, 19 nt, Homo sapiens
  misc_RNA (1)...(19): siRNA sense strand
cauugagccuaaguuugaa

SEQ ID NO: 1637066 - RNA, 19 nt, Homo sapiens
  misc_RNA (1)...(19): siRNA sense strand
uggccucuaucgucaacaa

SEQ ID NO: 1637067 - RNA, 19 nt, Homo sapiens
  misc_RNA (1)...(19): siRNA sense strand
gggcuuccacuacgguguu

SEQ ID NO: 1637068 - RNA, 19 nt, Homo sapiens
  misc_RNA (1)...(19): siRNA sense strand
uacaaugccuaccugaaaa

SEQ ID NO: 1637069 - RNA, 19 nt, Homo sapiens
  misc_RNA (1)...(19): siRNA sense strand
gauccacgacaucgagaca

SEQ ID NO: 1637070 - RNA, 19 nt, Homo sapiens
  misc_RNA (1)...(19): siRNA sense strand
gacagugaccuggcccuau

SEQ ID NO: 1637071 - RNA, 19 nt, Homo sapiens
  misc_RNA (1)...(19): siRNA sense strand
gagcgcagcugcaagauuc

SEQ ID NO: 1637072 - RNA, 19 nt, Homo sapiens
  misc_RNA (1)...(19): siRNA sense strand
gcaugaagcuggaguacga

SEQ ID NO: 1637073 - RNA, 19 nt, Homo sapiens
  misc_RNA (1)...(19): siRNA sense strand
ggaagcaguuggugaaugg

SEQ ID NO: 1637074 - RNA, 19 nt, Homo sapiens
  misc_RNA (1)...(19): siRNA sense strand
gcugcaagauucagaagaa

SEQ ID NO: 1637075 - RNA, 19 nt, Homo sapiens
  misc_RNA (1)...(19): siRNA sense strand
cgcaaacccuucagugaua

SEQ ID NO: 1637076 - RNA, 19 nt, Homo sapiens
  misc_RNA (1)...(19): siRNA sense strand
ugaauuugcugucaaguuc

SEQ ID NO: 1637077 - RNA, 19 nt, Homo sapiens
  misc_RNA (1)...(19): siRNA sense strand
gagccuaaguuugaauuug

SEQ ID NO: 1637078 - RNA, 19 nt, Homo sapiens
  misc_RNA (1)...(19): siRNA sense strand
gggaagaggaggagaaaga

SEQ ID NO: 1637079 - RNA, 19 nt, Homo sapiens
  misc_RNA (1)...(19): siRNA sense strand
gcaagauucagaagaagaa

SEQ ID NO: 1637080 - RNA, 19 nt, Homo sapiens
  misc_RNA (1)...(19): siRNA sense strand
ucauugagccuaaguuuga

SEQ ID NO: 1637081 - RNA, 19 nt, Homo sapiens
  misc_RNA (1)...(19): siRNA sense strand
cuacaaugccuaccugaaa

SEQ ID NO: 1637082 - RNA, 19 nt, Homo sapiens
  misc_RNA (1)...(19): siRNA sense strand
acagugaccuggcccuauu

SEQ ID NO: 1637083 - RNA, 19 nt, Homo sapiens
  misc_RNA (1)...(19): siRNA sense strand
gcaaacccuucagugauau

SEQ ID NO: 1637084 - RNA, 19 nt, Homo sapiens
  misc_RNA (1)...(19): siRNA sense strand
gaagaagaaccgcaacaag

SEQ ID NO: 1637085 - RNA, 19 nt, Homo sapiens
  misc_RNA (1)...(19): siRNA sense strand
gcacugggcaugucacaca

SEQ ID NO: 1637086 - RNA, 19 nt, Homo sapiens
  misc_RNA (1)...(19): siRNA sense strand
ccacuacgguguucaugca

SEQ ID NO: 1637087 - RNA, 19 nt, Homo sapiens
  misc_RNA (1)...(19): siRNA sense strand
gaccuggcccuauucauug

SEQ ID NO: 1637088 - RNA, 19 nt, Homo sapiens
  misc_RNA (1)...(19): siRNA sense strand
ccaagcacaucuacaaugc

SEQ ID NO: 1637089 - RNA, 19 nt, Homo sapiens
  misc_RNA (1)...(19): siRNA sense strand
ugaccuggcccuauucauu

SEQ ID NO: 1637090 - RNA, 19 nt, Homo sapiens
  misc_RNA (1)...(19): siRNA sense strand
ucacugaguucgccaagag

SEQ ID NO: 1637091 - RNA, 19 nt, Homo sapiens
  misc_RNA (1)...(19): siRNA sense strand
ggaaguggcagaggcagaa

SEQ ID NO: 1637092 - RNA, 19 nt, Homo sapiens
  misc_RNA (1)...(19): siRNA sense strand
gugauaucauugagccuaa

SEQ ID NO: 1637093 - RNA, 19 nt, Homo sapiens
  misc_RNA (1)...(19): siRNA sense strand
caacggcaguggcuuuguc

SEQ ID NO: 1637094 - RNA, 19 nt, Homo sapiens
  misc_RNA (1)...(19): siRNA sense strand
uaucauugagccuaaguuu

SEQ ID NO: 1637095 - RNA, 19 nt, Homo sapiens
  misc_RNA (1)...(19): siRNA sense strand
agguuacccuucucaagua

SEQ ID NO: 1637096 - RNA, 19 nt, Homo sapiens
  misc_RNA (1)...(19): siRNA sense strand
agaagaaccgcaacaagug

SEQ ID NO: 1637097 - RNA, 19 nt, Homo sapiens
  misc_RNA (1)...(19): siRNA sense strand
aagaagaaccgcaacaagu

SEQ ID NO: 1637098 - RNA, 19 nt, Homo sapiens
  misc_RNA (1)...(19): siRNA sense strand
gaucagcgugcacgucuuc

SEQ ID NO: 1637099 - RNA, 19 nt, Homo sapiens
  misc_RNA (1)...(19): siRNA sense strand
caaguucaacgcccuggaa

SEQ ID NO: 1637100 - RNA, 19 nt, Homo sapiens
  misc_RNA (1)...(19): siRNA sense strand
gcaacaagugccaguacug

SEQ ID NO: 1637101 - RNA, 19 nt, Homo sapiens
  misc_RNA (1)...(19): siRNA sense strand
gcaugucacacaacgcuau

SEQ ID NO: 1637102 - RNA, 19 nt, Homo sapiens
  misc_RNA (1)...(19): siRNA sense strand
gcggcagccucaacaugga

SEQ ID NO: 1637103 - RNA, 19 nt, Homo sapiens
  misc_RNA (1)...(19): siRNA sense strand
cuacgguguucaugcaugu

SEQ ID NO: 1637104 - RNA, 19 nt, Homo sapiens
  misc_RNA (1)...(19): siRNA sense strand
gguuacccuucucaaguau

SEQ ID NO: 1637105 - RNA, 19 nt, Homo sapiens
  misc_RNA (1)...(19): siRNA sense strand
cagguuacccuucucaagu

SEQ ID NO: 1637106 - RNA, 19 nt, Homo sapiens
  misc_RNA (1)...(19): siRNA sense strand
gaagcuggaguacgagaag

SEQ ID NO: 1637107 - RNA, 19 nt, Homo sapiens
  misc_RNA (1)...(19): siRNA sense strand
agaaggggcugguguggaa

SEQ ID NO: 1637108 - RNA, 19 nt, Homo sapiens
  misc_RNA (1)...(19): siRNA sense strand
ccgcaaacccuucagugau

SEQ ID NO: 1637109 - RNA, 19 nt, Homo sapiens
  misc_RNA (1)...(19): siRNA sense strand
uccacgacaucgagacauu

SEQ ID NO: 1637110 - RNA, 19 nt, Homo sapiens
  misc_RNA (1)...(19): siRNA sense strand
acccuucagugauaucauu

SEQ ID NO: 1637111 - RNA, 19 nt, Homo sapiens
  misc_RNA (1)...(19): siRNA sense strand
ccucuaucgucaacaagga

SEQ ID NO: 1637112 - RNA, 19 nt, Homo sapiens
  misc_RNA (1)...(19): siRNA sense strand
gcagcugcaagauucagaa

SEQ ID NO: 1637113 - RNA, 19 nt, Homo sapiens
  misc_RNA (1)...(19): siRNA sense strand
ggaagaggaggagaaagag

SEQ ID NO: 1637114 - RNA, 19 nt, Homo sapiens
  misc_RNA (1)...(19): siRNA sense strand
caaggacgggcugcuggua

SEQ ID NO: 1637115 - RNA, 19 nt, Homo sapiens
  misc_RNA (1)...(19): siRNA sense strand
ucagcagccucuuccucaa

SEQ ID NO: 1637116 - RNA, 19 nt, Homo sapiens
  misc_RNA (1)...(19): siRNA sense strand
ucuccaagcacaucuacaa

SEQ ID NO: 1637117 - RNA, 19 nt, Homo sapiens
  misc_RNA (1)...(19): siRNA sense strand
uggaagcaguuggugaaug

SEQ ID NO: 1637118 - RNA, 19 nt, Homo sapiens
  misc_RNA (1)...(19): siRNA sense strand
agaagaagaaccgcaacaa

SEQ ID NO: 1637119 - RNA, 19 nt, Homo sapiens
  misc_RNA (1)...(19): siRNA sense strand
gaauuugcugucaaguuca

SEQ ID NO: 1637120 - RNA, 19 nt, Homo sapiens
  misc_RNA (1)...(19): siRNA sense strand
aagggcuucuuccgucgua

SEQ ID NO: 1637121 - RNA, 19 nt, Homo sapiens
  misc_RNA (1)...(19): siRNA sense strand
cgucguacgauccgcauga

SEQ ID NO: 1637122 - RNA, 19 nt, Homo sapiens
  misc_RNA (1)...(19): siRNA sense strand
uggaguacgagaaguguga

SEQ ID NO: 1637123 - RNA, 19 nt, Homo sapiens
  misc_RNA (1)...(19): siRNA sense strand
ccuggaacuugaugacagu

SEQ ID NO: 1637124 - RNA, 19 nt, Homo sapiens
  misc_RNA (1)...(19): siRNA sense strand
cauugagccuaaguuugaa

SEQ ID NO: 1637125 - RNA, 19 nt, Homo sapiens
  misc_RNA (1)...(19): siRNA sense strand
uggccucuaucgucaacaa

SEQ ID NO: 1637126 - RNA, 19 nt, Homo sapiens
  misc_RNA (1)...(19): siRNA sense strand
gggcuuccacuacgguguu

SEQ ID NO: 1637127 - RNA, 19 nt, Homo sapiens
  misc_RNA (1)...(19): siRNA sense strand
uacaaugccuaccugaaaa

SEQ ID NO: 1637128 - RNA, 19 nt, Homo sapiens
  misc_RNA (1)...(19): siRNA sense strand
gauccacgacaucgagaca

SEQ ID NO: 1637129 - RNA, 19 nt, Homo sapiens
  misc_RNA (1)...(19): siRNA sense strand
gacagugaccuggcccuau

SEQ ID NO: 1637130 - RNA, 19 nt, Homo sapiens
  misc_RNA (1)...(19): siRNA sense strand
gaauugcgauggagaagaa

SEQ ID NO: 1637131 - RNA, 19 nt, Homo sapiens
  misc_RNA (1)...(19): siRNA sense strand
caagaagaauugcgaugga

SEQ ID NO: 1637132 - RNA, 19 nt, Homo sapiens
  misc_RNA (1)...(19): siRNA sense strand
aaagaaaguugaacaagag

SEQ ID NO: 1637133 - RNA, 19 nt, Homo sapiens
  misc_RNA (1)...(19): siRNA sense strand
gagcuucgccucagggaaa

SEQ ID NO: 1637134 - RNA, 19 nt, Homo sapiens
  misc_RNA (1)...(19): siRNA sense strand
gaaaguugaacaagaggaa

SEQ ID NO: 1637135 - RNA, 19 nt, Homo sapiens
  misc_RNA (1)...(19): siRNA sense strand
gaagaauugcgauggagaa

SEQ ID NO: 1637136 - RNA, 19 nt, Homo sapiens
  misc_RNA (1)...(19): siRNA sense strand
ggagaaggaaacugucauu

SEQ ID NO: 1637137 - RNA, 19 nt, Homo sapiens
  misc_RNA (1)...(19): siRNA sense strand
gaucaucagagacaaguau

SEQ ID NO: 1637138 - RNA, 19 nt, Homo sapiens
  misc_RNA (1)...(19): siRNA sense strand
acaaguaugugaggaaugu

SEQ ID NO: 1637139 - RNA, 19 nt, Homo sapiens
  misc_RNA (1)...(19): siRNA sense strand
gagaaggaaacugucauuu

SEQ ID NO: 1637140 - RNA, 19 nt, Homo sapiens
  misc_RNA (1)...(19): siRNA sense strand
cagcaucuguugcaucaag

SEQ ID NO: 1637141 - RNA, 19 nt, Homo sapiens
  misc_RNA (1)...(19): siRNA sense strand
cuaugaagcuggagauguc

SEQ ID NO: 1637142 - RNA, 19 nt, Homo sapiens
  misc_RNA (1)...(19): siRNA sense strand
caucugcccugcacucaca

SEQ ID NO: 1637143 - RNA, 19 nt, Homo sapiens
  misc_RNA (1)...(19): siRNA sense strand
gucagcaucuguugcauca

SEQ ID NO: 1637144 - RNA, 19 nt, Homo sapiens
  misc_RNA (1)...(19): siRNA sense strand
gcaucuggcuggagugcau

SEQ ID NO: 1637145 - RNA, 19 nt, Homo sapiens
  misc_RNA (1)...(19): siRNA sense strand
ggucuaagccccucauuga

SEQ ID NO: 1637146 - RNA, 19 nt, Homo sapiens
  misc_RNA (1)...(19): siRNA sense strand
gagacaaguaugugaggaa

SEQ ID NO: 1637147 - RNA, 19 nt, Homo sapiens
  misc_RNA (1)...(19): siRNA sense strand
gaugucuccuucuacaaca

SEQ ID NO: 1637148 - RNA, 19 nt, Homo sapiens
  misc_RNA (1)...(19): siRNA sense strand
agaggauucucccuuugaa

SEQ ID NO: 1637149 - RNA, 19 nt, Homo sapiens
  misc_RNA (1)...(19): siRNA sense strand
cagagagauucgacaguca

SEQ ID NO: 1637150 - RNA, 19 nt, Homo sapiens
  misc_RNA (1)...(19): siRNA sense strand
ucagaggaccggagaagug

SEQ ID NO: 1637151 - RNA, 19 nt, Homo sapiens
  misc_RNA (1)...(19): siRNA sense strand
gaggaccggagaaguguga

SEQ ID NO: 1637152 - RNA, 19 nt, Homo sapiens
  misc_RNA (1)...(19): siRNA sense strand
ggacccaccagagccuaua

SEQ ID NO: 1637153 - RNA, 19 nt, Homo sapiens
  misc_RNA (1)...(19): siRNA sense strand
agacaaguaugugaggaau

SEQ ID NO: 1637154 - RNA, 19 nt, Homo sapiens
  misc_RNA (1)...(19): siRNA sense strand
aaucaaggcccaagaggau

SEQ ID NO: 1637155 - RNA, 19 nt, Homo sapiens
  misc_RNA (1)...(19): siRNA sense strand
gcagagagugccugacaac

SEQ ID NO: 1637156 - RNA, 19 nt, Homo sapiens
  misc_RNA (1)...(19): siRNA sense strand
ggaaaagaaaguugaacaa

SEQ ID NO: 1637157 - RNA, 19 nt, Homo sapiens
  misc_RNA (1)...(19): siRNA sense strand
ggacuaugaagcuggagau

SEQ ID NO: 1637158 - RNA, 19 nt, Homo sapiens
  misc_RNA (1)...(19): siRNA sense strand
cccuggagauguuuggaaa

SEQ ID NO: 1637159 - RNA, 19 nt, Homo sapiens
  misc_RNA (1)...(19): siRNA sense strand
ucuggacccuggagauguu

SEQ ID NO: 1637160 - RNA, 19 nt, Homo sapiens
  misc_RNA (1)...(19): siRNA sense strand
gccaggagaaggaaacugu

SEQ ID NO: 1637161 - RNA, 19 nt, Homo sapiens
  misc_RNA (1)...(19): siRNA sense strand
caucagagacaaguaugug

SEQ ID NO: 1637162 - RNA, 19 nt, Homo sapiens
  misc_RNA (1)...(19): siRNA sense strand
ugacaacccagagagauuc

SEQ ID NO: 1637163 - RNA, 19 nt, Homo sapiens
  misc_RNA (1)...(19): siRNA sense strand
agaaggaaacugucauuuu

SEQ ID NO: 1637164 - RNA, 19 nt, Homo sapiens
  misc_RNA (1)...(19): siRNA sense strand
gaaaagaaaguugaacaag

SEQ ID NO: 1637165 - RNA, 19 nt, Homo sapiens
  misc_RNA (1)...(19): siRNA sense strand
ugaagagggccugaaacuu

SEQ ID NO: 1637166 - RNA, 19 nt, Homo sapiens
  misc_RNA (1)...(19): siRNA sense strand
aauguguccugcucuguca

SEQ ID NO: 1637167 - RNA, 19 nt, Homo sapiens
  misc_RNA (1)...(19): siRNA sense strand
guccugcucugucaacaac

SEQ ID NO: 1637168 - RNA, 19 nt, Homo sapiens
  misc_RNA (1)...(19): siRNA sense strand
caucaagaaacuucaaagg

SEQ ID NO: 1637169 - RNA, 19 nt, Homo sapiens
  misc_RNA (1)...(19): siRNA sense strand
ugaaaucaaggcccaagag

SEQ ID NO: 1637170 - RNA, 19 nt, Homo sapiens
  misc_RNA (1)...(19): siRNA sense strand
gcaucaagaaacuucaaag

SEQ ID NO: 1637171 - RNA, 19 nt, Homo sapiens
  misc_RNA (1)...(19): siRNA sense strand
ggaauguguccugcucugu

SEQ ID NO: 1637172 - RNA, 19 nt, Homo sapiens
  misc_RNA (1)...(19): siRNA sense strand
gaauugcgauggagaagaa

SEQ ID NO: 1637173 - RNA, 19 nt, Homo sapiens
  misc_RNA (1)...(19): siRNA sense strand
caagaagaauugcgaugga

SEQ ID NO: 1637174 - RNA, 19 nt, Homo sapiens
  misc_RNA (1)...(19): siRNA sense strand
aaagaaaguugaacaagag

SEQ ID NO: 1637175 - RNA, 19 nt, Homo sapiens
  misc_RNA (1)...(19): siRNA sense strand
gagcuucgccucagggaaa

SEQ ID NO: 1637176 - RNA, 19 nt, Homo sapiens
  misc_RNA (1)...(19): siRNA sense strand
gaaaguugaacaagaggaa

SEQ ID NO: 1637177 - RNA, 19 nt, Homo sapiens
  misc_RNA (1)...(19): siRNA sense strand
gaagaauugcgauggagaa

SEQ ID NO: 1637178 - RNA, 19 nt, Homo sapiens
  misc_RNA (1)...(19): siRNA sense strand
ggagaaggaaacugucauu

SEQ ID NO: 1637179 - RNA, 19 nt, Homo sapiens
  misc_RNA (1)...(19): siRNA sense strand
gaucaucagagacaaguau

SEQ ID NO: 1637180 - RNA, 19 nt, Homo sapiens
  misc_RNA (1)...(19): siRNA sense strand
acaaguaugugaggaaugu

SEQ ID NO: 1637181 - RNA, 19 nt, Homo sapiens
  misc_RNA (1)...(19): siRNA sense strand
gagaaggaaacugucauuu

SEQ ID NO: 1637182 - RNA, 19 nt, Homo sapiens
  misc_RNA (1)...(19): siRNA sense strand
cagcaucuguugcaucaag

SEQ ID NO: 1637183 - RNA, 19 nt, Homo sapiens
  misc_RNA (1)...(19): siRNA sense strand
cuaugaagcuggagauguc

SEQ ID NO: 1637184 - RNA, 19 nt, Homo sapiens
  misc_RNA (1)...(19): siRNA sense strand
caucugcccugcacucaca

SEQ ID NO: 1637185 - RNA, 19 nt, Homo sapiens
  misc_RNA (1)...(19): siRNA sense strand
gucagcaucuguugcauca

SEQ ID NO: 1637186 - RNA, 19 nt, Homo sapiens
  misc_RNA (1)...(19): siRNA sense strand
gcaucuggcuggagugcau

SEQ ID NO: 1637187 - RNA, 19 nt, Homo sapiens
  misc_RNA (1)...(19): siRNA sense strand
ggucuaagccccucauuga

SEQ ID NO: 1637188 - RNA, 19 nt, Homo sapiens
  misc_RNA (1)...(19): siRNA sense strand
gagacaaguaugugaggaa

SEQ ID NO: 1637189 - RNA, 19 nt, Homo sapiens
  misc_RNA (1)...(19): siRNA sense strand
gaugucuccuucuacaaca

SEQ ID NO: 1637190 - RNA, 19 nt, Homo sapiens
  misc_RNA (1)...(19): siRNA sense strand
agaggauucucccuuugaa

SEQ ID NO: 1637191 - RNA, 19 nt, Homo sapiens
  misc_RNA (1)...(19): siRNA sense strand
cagagagauucgacaguca

SEQ ID NO: 1637192 - RNA, 19 nt, Homo sapiens
  misc_RNA (1)...(19): siRNA sense strand
ucagaggaccggagaagug

SEQ ID NO: 1637193 - RNA, 19 nt, Homo sapiens
  misc_RNA (1)...(19): siRNA sense strand
gaggaccggagaaguguga

SEQ ID NO: 1637194 - RNA, 19 nt, Homo sapiens
  misc_RNA (1)...(19): siRNA sense strand
ggacccaccagagccuaua

SEQ ID NO: 1637195 - RNA, 19 nt, Homo sapiens
  misc_RNA (1)...(19): siRNA sense strand
agacaaguaugugaggaau

SEQ ID NO: 1637196 - RNA, 19 nt, Homo sapiens
  misc_RNA (1)...(19): siRNA sense strand
aaucaaggcccaagaggau

SEQ ID NO: 1637197 - RNA, 19 nt, Homo sapiens
  misc_RNA (1)...(19): siRNA sense strand
gcagagagugccugacaac

SEQ ID NO: 1637198 - RNA, 19 nt, Homo sapiens
  misc_RNA (1)...(19): siRNA sense strand
ggaaaagaaaguugaacaa

SEQ ID NO: 1637199 - RNA, 19 nt, Homo sapiens
  misc_RNA (1)...(19): siRNA sense strand
ggacuaugaagcuggagau

SEQ ID NO: 1637200 - RNA, 19 nt, Homo sapiens
  misc_RNA (1)...(19): siRNA sense strand
cccuggagauguuuggaaa

SEQ ID NO: 1637201 - RNA, 19 nt, Homo sapiens
  misc_RNA (1)...(19): siRNA sense strand
ucuggacccuggagauguu

SEQ ID NO: 1637202 - RNA, 19 nt, Homo sapiens
  misc_RNA (1)...(19): siRNA sense strand
gccaggagaaggaaacugu

SEQ ID NO: 1637203 - RNA, 19 nt, Homo sapiens
  misc_RNA (1)...(19): siRNA sense strand
caucagagacaaguaugug

SEQ ID NO: 1637204 - RNA, 19 nt, Homo sapiens
  misc_RNA (1)...(19): siRNA sense strand
ugacaacccagagagauuc

SEQ ID NO: 1637205 - RNA, 19 nt, Homo sapiens
  misc_RNA (1)...(19): siRNA sense strand
agaaggaaacugucauuuu

SEQ ID NO: 1637206 - RNA, 19 nt, Homo sapiens
  misc_RNA (1)...(19): siRNA sense strand
gaaaagaaaguugaacaag

SEQ ID NO: 1637207 - RNA, 19 nt, Homo sapiens
  misc_RNA (1)...(19): siRNA sense strand
ugaagagggccugaaacuu

SEQ ID NO: 1637208 - RNA, 19 nt, Homo sapiens
  misc_RNA (1)...(19): siRNA sense strand
aauguguccugcucuguca

SEQ ID NO: 1637209 - RNA, 19 nt, Homo sapiens
  misc_RNA (1)...(19): siRNA sense strand
guccugcucugucaacaac

SEQ ID NO: 1637210 - RNA, 19 nt, Homo sapiens
  misc_RNA (1)...(19): siRNA sense strand
caucaagaaacuucaaagg

SEQ ID NO: 1637211 - RNA, 19 nt, Homo sapiens
  misc_RNA (1)...(19): siRNA sense strand
ugaaaucaaggcccaagag

SEQ ID NO: 1637212 - RNA, 19 nt, Homo sapiens
  misc_RNA (1)...(19): siRNA sense strand
gcaucaagaaacuucaaag

SEQ ID NO: 1637213 - RNA, 19 nt, Homo sapiens
  misc_RNA (1)...(19): siRNA sense strand
ggaauguguccugcucugu

SEQ ID NO: 1637214 - RNA, 19 nt, Homo sapiens
  misc_RNA (1)...(19): siRNA sense strand
gaauugcgauggagaagaa

SEQ ID NO: 1637215 - RNA, 19 nt, Homo sapiens
  misc_RNA (1)...(19): siRNA sense strand
caagaagaauugcgaugga

SEQ ID NO: 1637216 - RNA, 19 nt, Homo sapiens
  misc_RNA (1)...(19): siRNA sense strand
aaagaaaguugaacaagag

SEQ ID NO: 1637217 - RNA, 19 nt, Homo sapiens
  misc_RNA (1)...(19): siRNA sense strand
gagcuucgccucagggaaa

SEQ ID NO: 1637218 - RNA, 19 nt, Homo sapiens
  misc_RNA (1)...(19): siRNA sense strand
gaaaguugaacaagaggaa

SEQ ID NO: 1637219 - RNA, 19 nt, Homo sapiens
  misc_RNA (1)...(19): siRNA sense strand
gaagaauugcgauggagaa

SEQ ID NO: 1637220 - RNA, 19 nt, Homo sapiens
  misc_RNA (1)...(19): siRNA sense strand
ggagaaggaaacugucauu

SEQ ID NO: 1637221 - RNA, 19 nt, Homo sapiens
  misc_RNA (1)...(19): siRNA sense strand
gaucaucagagacaaguau

SEQ ID NO: 1637222 - RNA, 19 nt, Homo sapiens
  misc_RNA (1)...(19): siRNA sense strand
acaaguaugugaggaaugu

SEQ ID NO: 1637223 - RNA, 19 nt, Homo sapiens
  misc_RNA (1)...(19): siRNA sense strand
gagaaggaaacugucauuu

SEQ ID NO: 1637224 - RNA, 19 nt, Homo sapiens
  misc_RNA (1)...(19): siRNA sense strand
cagcaucuguugcaucaag

SEQ ID NO: 1637225 - RNA, 19 nt, Homo sapiens
  misc_RNA (1)...(19): siRNA sense strand
cuaugaagcuggagauguc

SEQ ID NO: 1637226 - RNA, 19 nt, Homo sapiens
  misc_RNA (1)...(19): siRNA sense strand
caucugcccugcacucaca

SEQ ID NO: 1637227 - RNA, 19 nt, Homo sapiens
  misc_RNA (1)...(19): siRNA sense strand
gucagcaucuguugcauca

SEQ ID NO: 1637228 - RNA, 19 nt, Homo sapiens
  misc_RNA (1)...(19): siRNA sense strand
gcaucuggcuggagugcau

SEQ ID NO: 1637229 - RNA, 19 nt, Homo sapiens
  misc_RNA (1)...(19): siRNA sense strand
ggucuaagccccucauuga

SEQ ID NO: 1637230 - RNA, 19 nt, Homo sapiens
  misc_RNA (1)...(19): siRNA sense strand
gagacaaguaugugaggaa

SEQ ID NO: 1637231 - RNA, 19 nt, Homo sapiens
  misc_RNA (1)...(19): siRNA sense strand
gaugucuccuucuacaaca

SEQ ID NO: 1637232 - RNA, 19 nt, Homo sapiens
  misc_RNA (1)...(19): siRNA sense strand
agaggauucucccuuugaa

SEQ ID NO: 1637233 - RNA, 19 nt, Homo sapiens
  misc_RNA (1)...(19): siRNA sense strand
cagagagauucgacaguca

SEQ ID NO: 1637234 - RNA, 19 nt, Homo sapiens
  misc_RNA (1)...(19): siRNA sense strand
ucagaggaccggagaagug

SEQ ID NO: 1637235 - RNA, 19 nt, Homo sapiens
  misc_RNA (1)...(19): siRNA sense strand
gaggaccggagaaguguga

SEQ ID NO: 1637236 - RNA, 19 nt, Homo sapiens
  misc_RNA (1)...(19): siRNA sense strand
ggacccaccagagccuaua

SEQ ID NO: 1637237 - RNA, 19 nt, Homo sapiens
  misc_RNA (1)...(19): siRNA sense strand
agacaaguaugugaggaau

SEQ ID NO: 1637238 - RNA, 19 nt, Homo sapiens
  misc_RNA (1)...(19): siRNA sense strand
aaucaaggcccaagaggau

SEQ ID NO: 1637239 - RNA, 19 nt, Homo sapiens
  misc_RNA (1)...(19): siRNA sense strand
gcagagagugccugacaac

SEQ ID NO: 1637240 - RNA, 19 nt, Homo sapiens
  misc_RNA (1)...(19): siRNA sense strand
ggaaaagaaaguugaacaa

SEQ ID NO: 1637241 - RNA, 19 nt, Homo sapiens
  misc_RNA (1)...(19): siRNA sense strand
ggacuaugaagcuggagau

SEQ ID NO: 1637242 - RNA, 19 nt, Homo sapiens
  misc_RNA (1)...(19): siRNA sense strand
cccuggagauguuuggaaa

SEQ ID NO: 1637243 - RNA, 19 nt, Homo sapiens
  misc_RNA (1)...(19): siRNA sense strand
ucuggacccuggagauguu

SEQ ID NO: 1637244 - RNA, 19 nt, Homo sapiens
  misc_RNA (1)...(19): siRNA sense strand
gccaggagaaggaaacugu

SEQ ID NO: 1637245 - RNA, 19 nt, Homo sapiens
  misc_RNA (1)...(19): siRNA sense strand
caucagagacaaguaugug

SEQ ID NO: 1637246 - RNA, 19 nt, Homo sapiens
  misc_RNA (1)...(19): siRNA sense strand
ugacaacccagagagauuc

SEQ ID NO: 1637247 - RNA, 19 nt, Homo sapiens
  misc_RNA (1)...(19): siRNA sense strand
agaaggaaacugucauuuu

SEQ ID NO: 1637248 - RNA, 19 nt, Homo sapiens
  misc_RNA (1)...(19): siRNA sense strand
gaaaagaaaguugaacaag

SEQ ID NO: 1637249 - RNA, 19 nt, Homo sapiens
  misc_RNA (1)...(19): siRNA sense strand
ugaagagggccugaaacuu

SEQ ID NO: 1637250 - RNA, 19 nt, Homo sapiens
  misc_RNA (1)...(19): siRNA sense strand
aauguguccugcucuguca

SEQ ID NO: 1637251 - RNA, 19 nt, Homo sapiens
  misc_RNA (1)...(19): siRNA sense strand
guccugcucugucaacaac

SEQ ID NO: 1637252 - RNA, 19 nt, Homo sapiens
  misc_RNA (1)...(19): siRNA sense strand
caucaagaaacuucaaagg

SEQ ID NO: 1637253 - RNA, 19 nt, Homo sapiens
  misc_RNA (1)...(19): siRNA sense strand
ugaaaucaaggcccaagag

SEQ ID NO: 1637254 - RNA, 19 nt, Homo sapiens
  misc_RNA (1)...(19): siRNA sense strand
gcaucaagaaacuucaaag

SEQ ID NO: 1637255 - RNA, 19 nt, Homo sapiens
  misc_RNA (1)...(19): siRNA sense strand
ggaauguguccugcucugu

SEQ ID NO: 1637256 - RNA, 19 nt, Homo sapiens
  misc_RNA (1)...(19): siRNA sense strand
gaauugcgauggagaagaa

SEQ ID NO: 1637257 - RNA, 19 nt, Homo sapiens
  misc_RNA (1)...(19): siRNA sense strand
caagaagaauugcgaugga

SEQ ID NO: 1637258 - RNA, 19 nt, Homo sapiens
  misc_RNA (1)...(19): siRNA sense strand
aaagaaaguugaacaagag

SEQ ID NO: 1637259 - RNA, 19 nt, Homo sapiens
  misc_RNA (1)...(19): siRNA sense strand
gagcuucgccucagggaaa

SEQ ID NO: 1637260 - RNA, 19 nt, Homo sapiens
  misc_RNA (1)...(19): siRNA sense strand
gaaaguugaacaagaggaa

SEQ ID NO: 1637261 - RNA, 19 nt, Homo sapiens
  misc_RNA (1)...(19): siRNA sense strand
gaagaauugcgauggagaa

SEQ ID NO: 1637262 - RNA, 19 nt, Homo sapiens
  misc_RNA (1)...(19): siRNA sense strand
ggagaaggaaacugucauu

SEQ ID NO: 1637263 - RNA, 19 nt, Homo sapiens
  misc_RNA (1)...(19): siRNA sense strand
gaucaucagagacaaguau

SEQ ID NO: 1637264 - RNA, 19 nt, Homo sapiens
  misc_RNA (1)...(19): siRNA sense strand
acaaguaugugaggaaugu

SEQ ID NO: 1637265 - RNA, 19 nt, Homo sapiens
  misc_RNA (1)...(19): siRNA sense strand
gagaaggaaacugucauuu

SEQ ID NO: 1637266 - RNA, 19 nt, Homo sapiens
  misc_RNA (1)...(19): siRNA sense strand
cagcaucuguugcaucaag

SEQ ID NO: 1637267 - RNA, 19 nt, Homo sapiens
  misc_RNA (1)...(19): siRNA sense strand
cuaugaagcuggagauguc

SEQ ID NO: 1637268 - RNA, 19 nt, Homo sapiens
  misc_RNA (1)...(19): siRNA sense strand
caucugcccugcacucaca

SEQ ID NO: 1637269 - RNA, 19 nt, Homo sapiens
  misc_RNA (1)...(19): siRNA sense strand
gucagcaucuguugcauca

SEQ ID NO: 1637270 - RNA, 19 nt, Homo sapiens
  misc_RNA (1)...(19): siRNA sense strand
gcaucuggcuggagugcau

SEQ ID NO: 1637271 - RNA, 19 nt, Homo sapiens
  misc_RNA (1)...(19): siRNA sense strand
ggucuaagccccucauuga

SEQ ID NO: 1637272 - RNA, 19 nt, Homo sapiens
  misc_RNA (1)...(19): siRNA sense strand
gagacaaguaugugaggaa

SEQ ID NO: 1637273 - RNA, 19 nt, Homo sapiens
  misc_RNA (1)...(19): siRNA sense strand
gaugucuccuucuacaaca

SEQ ID NO: 1637274 - RNA, 19 nt, Homo sapiens
  misc_RNA (1)...(19): siRNA sense strand
agaggauucucccuuugaa

SEQ ID NO: 1637275 - RNA, 19 nt, Homo sapiens
  misc_RNA (1)...(19): siRNA sense strand
cagagagauucgacaguca

SEQ ID NO: 1637276 - RNA, 19 nt, Homo sapiens
  misc_RNA (1)...(19): siRNA sense strand
ucagaggaccggagaagug

SEQ ID NO: 1637277 - RNA, 19 nt, Homo sapiens
  misc_RNA (1)...(19): siRNA sense strand
gaggaccggagaaguguga

SEQ ID NO: 1637278 - RNA, 19 nt, Homo sapiens
  misc_RNA (1)...(19): siRNA sense strand
ggacccaccagagccuaua

SEQ ID NO: 1637279 - RNA, 19 nt, Homo sapiens
  misc_RNA (1)...(19): siRNA sense strand
agacaaguaugugaggaau

SEQ ID NO: 1637280 - RNA, 19 nt, Homo sapiens
  misc_RNA (1)...(19): siRNA sense strand
aaucaaggcccaagaggau

SEQ ID NO: 1637281 - RNA, 19 nt, Homo sapiens
  misc_RNA (1)...(19): siRNA sense strand
gcagagagugccugacaac

SEQ ID NO: 1637282 - RNA, 19 nt, Homo sapiens
  misc_RNA (1)...(19): siRNA sense strand
ggaaaagaaaguugaacaa

SEQ ID NO: 1637283 - RNA, 19 nt, Homo sapiens
  misc_RNA (1)...(19): siRNA sense strand
ggacuaugaagcuggagau

SEQ ID NO: 1637284 - RNA, 19 nt, Homo sapiens
  misc_RNA (1)...(19): siRNA sense strand
cccuggagauguuuggaaa

SEQ ID NO: 1637285 - RNA, 19 nt, Homo sapiens
  misc_RNA (1)...(19): siRNA sense strand
ucuggacccuggagauguu

SEQ ID NO: 1637286 - RNA, 19 nt, Homo sapiens
  misc_RNA (1)...(19): siRNA sense strand
gccaggagaaggaaacugu

SEQ ID NO: 1637287 - RNA, 19 nt, Homo sapiens
  misc_RNA (1)...(19): siRNA sense strand
caucagagacaaguaugug

SEQ ID NO: 1637288 - RNA, 19 nt, Homo sapiens
  misc_RNA (1)...(19): siRNA sense strand
ugacaacccagagagauuc

SEQ ID NO: 1637289 - RNA, 19 nt, Homo sapiens
  misc_RNA (1)...(19): siRNA sense strand
agaaggaaacugucauuuu

SEQ ID NO: 1637290 - RNA, 19 nt, Homo sapiens
  misc_RNA (1)...(19): siRNA sense strand
gaaaagaaaguugaacaag

SEQ ID NO: 1637291 - RNA, 19 nt, Homo sapiens
  misc_RNA (1)...(19): siRNA sense strand
ugaagagggccugaaacuu

SEQ ID NO: 1637292 - RNA, 19 nt, Homo sapiens
  misc_RNA (1)...(19): siRNA sense strand
aauguguccugcucuguca

SEQ ID NO: 1637293 - RNA, 19 nt, Homo sapiens
  misc_RNA (1)...(19): siRNA sense strand
guccugcucugucaacaac

SEQ ID NO: 1637294 - RNA, 19 nt, Homo sapiens
  misc_RNA (1)...(19): siRNA sense strand
caucaagaaacuucaaagg

SEQ ID NO: 1637295 - RNA, 19 nt, Homo sapiens
  misc_RNA (1)...(19): siRNA sense strand
ugaaaucaaggcccaagag

SEQ ID NO: 1637296 - RNA, 19 nt, Homo sapiens
  misc_RNA (1)...(19): siRNA sense strand
gcaucaagaaacuucaaag

SEQ ID NO: 1637297 - RNA, 19 nt, Homo sapiens
  misc_RNA (1)...(19): siRNA sense strand
ggaauguguccugcucugu

SEQ ID NO: 1637298 - RNA, 19 nt, Homo sapiens
  misc_RNA (1)...(19): siRNA sense strand
ugaagaagcucaucacuga

SEQ ID NO: 1637299 - RNA, 19 nt, Homo sapiens
  misc_RNA (1)...(19): siRNA sense strand
ugaaggacaucaucaaaga

SEQ ID NO: 1637300 - RNA, 19 nt, Homo sapiens
  misc_RNA (1)...(19): siRNA sense strand
gaugaaaguccucaaguuu

SEQ ID NO: 1637301 - RNA, 19 nt, Homo sapiens
  misc_RNA (1)...(19): siRNA sense strand
aaagaaggaucccaaggaa

SEQ ID NO: 1637302 - RNA, 19 nt, Homo sapiens
  misc_RNA (1)...(19): siRNA sense strand
gaccgccacucucacauuu

SEQ ID NO: 1637303 - RNA, 19 nt, Homo sapiens
  misc_RNA (1)...(19): siRNA sense strand
gauacaucauucacucuuu

SEQ ID NO: 1637304 - RNA, 19 nt, Homo sapiens
  misc_RNA (1)...(19): siRNA sense strand
agacgaagauucccaucaa

SEQ ID NO: 1637305 - RNA, 19 nt, Homo sapiens
  misc_RNA (1)...(19): siRNA sense strand
gagaagguauuugggauuc

SEQ ID NO: 1637306 - RNA, 19 nt, Homo sapiens
  misc_RNA (1)...(19): siRNA sense strand
gcucggacaugcugaagga

SEQ ID NO: 1637307 - RNA, 19 nt, Homo sapiens
  misc_RNA (1)...(19): siRNA sense strand
gaagguauuugggauucaa

SEQ ID NO: 1637308 - RNA, 19 nt, Homo sapiens
  misc_RNA (1)...(19): siRNA sense strand
caagggagggcaaaugauu

SEQ ID NO: 1637309 - RNA, 19 nt, Homo sapiens
  misc_RNA (1)...(19): siRNA sense strand
agaaguaccuggacuaugc

SEQ ID NO: 1637310 - RNA, 19 nt, Homo sapiens
  misc_RNA (1)...(19): siRNA sense strand
ugaaguaccuuuuggcuaa

SEQ ID NO: 1637311 - RNA, 19 nt, Homo sapiens
  misc_RNA (1)...(19): siRNA sense strand
ugauaagaaugaccacuug

SEQ ID NO: 1637312 - RNA, 19 nt, Homo sapiens
  misc_RNA (1)...(19): siRNA sense strand
ugacaaugccugccacuga

SEQ ID NO: 1637313 - RNA, 19 nt, Homo sapiens
  misc_RNA (1)...(19): siRNA sense strand
ggccugcgcucuuacuaug

SEQ ID NO: 1637314 - RNA, 19 nt, Homo sapiens
  misc_RNA (1)...(19): siRNA sense strand
gagauuagagcucgaaugg

SEQ ID NO: 1637315 - RNA, 19 nt, Homo sapiens
  misc_RNA (1)...(19): siRNA sense strand
ccauguggcugauacaaag

SEQ ID NO: 1637316 - RNA, 19 nt, Homo sapiens
  misc_RNA (1)...(19): siRNA sense strand
agaugaaaguccucaaguu

SEQ ID NO: 1637317 - RNA, 19 nt, Homo sapiens
  misc_RNA (1)...(19): siRNA sense strand
gcucuucgcuggccuuggu

SEQ ID NO: 1637318 - RNA, 19 nt, Homo sapiens
  misc_RNA (1)...(19): siRNA sense strand
ggaaugggcagcucaguac

SEQ ID NO: 1637319 - RNA, 19 nt, Homo sapiens
  misc_RNA (1)...(19): siRNA sense strand
gaaggacaucaucaaagaa

SEQ ID NO: 1637320 - RNA, 19 nt, Homo sapiens
  misc_RNA (1)...(19): siRNA sense strand
gauggaagcggauuugaag

SEQ ID NO: 1637321 - RNA, 19 nt, Homo sapiens
  misc_RNA (1)...(19): siRNA sense strand
ggagaagguauuugggauu

SEQ ID NO: 1637322 - RNA, 19 nt, Homo sapiens
  misc_RNA (1)...(19): siRNA sense strand
cuaaagaccagacgaagau

SEQ ID NO: 1637323 - RNA, 19 nt, Homo sapiens
  misc_RNA (1)...(19): siRNA sense strand
agaaggaucccaaggaaug

SEQ ID NO: 1637324 - RNA, 19 nt, Homo sapiens
  misc_RNA (1)...(19): siRNA sense strand
gcuaaagaccagacgaaga

SEQ ID NO: 1637325 - RNA, 19 nt, Homo sapiens
  misc_RNA (1)...(19): siRNA sense strand
gggaggugcugcgcaaguu

SEQ ID NO: 1637326 - RNA, 19 nt, Homo sapiens
  misc_RNA (1)...(19): siRNA sense strand
caaagaauacacugaugug

SEQ ID NO: 1637327 - RNA, 19 nt, Homo sapiens
  misc_RNA (1)...(19): siRNA sense strand
cgagaguggugcaggucua

SEQ ID NO: 1637328 - RNA, 19 nt, Homo sapiens
  misc_RNA (1)...(19): siRNA sense strand
gauacaaaggucaauacaa

SEQ ID NO: 1637329 - RNA, 19 nt, Homo sapiens
  misc_RNA (1)...(19): siRNA sense strand
uaugagaccagcaagauga

SEQ ID NO: 1637330 - RNA, 19 nt, Homo sapiens
  misc_RNA (1)...(19): siRNA sense strand
ggacaucaucaaagaauac

SEQ ID NO: 1637331 - RNA, 19 nt, Homo sapiens
  misc_RNA (1)...(19): siRNA sense strand
gcugaaggacaucaucaaa

SEQ ID NO: 1637332 - RNA, 19 nt, Homo sapiens
  misc_RNA (1)...(19): siRNA sense strand
gagugcagcugcccagucu

SEQ ID NO: 1637333 - RNA, 19 nt, Homo sapiens
  misc_RNA (1)...(19): siRNA sense strand
ugaaaguccucaaguuugc

SEQ ID NO: 1637334 - RNA, 19 nt, Homo sapiens
  misc_RNA (1)...(19): siRNA sense strand
gcagaaguaccuggacuau

SEQ ID NO: 1637335 - RNA, 19 nt, Homo sapiens
  misc_RNA (1)...(19): siRNA sense strand
gaggauggcagcagugauc

SEQ ID NO: 1637336 - RNA, 19 nt, Homo sapiens
  misc_RNA (1)...(19): siRNA sense strand
auacaucauucacucuuug

SEQ ID NO: 1637337 - RNA, 19 nt, Homo sapiens
  misc_RNA (1)...(19): siRNA sense strand
guauuugggauucaauuga

SEQ ID NO: 1637338 - RNA, 19 nt, Homo sapiens
  misc_RNA (1)...(19): siRNA sense strand
agcagaagcuaaagccaaa

SEQ ID NO: 1637339 - RNA, 19 nt, Homo sapiens
  misc_RNA (1)...(19): siRNA sense strand
gcccugggauacaucauuc

SEQ ID NO: 1637340 - RNA, 19 nt, Homo sapiens
  misc_RNA (1)...(19): siRNA sense strand
caaggucaaagccaagaaa

SEQ ID NO: 1637341 - RNA, 19 nt, Homo sapiens
  misc_RNA (1)...(19): siRNA sense strand
ugacagugacccagaaugu

SEQ ID NO: 1637342 - RNA, 19 nt, Homo sapiens
  misc_RNA (1)...(19): siRNA sense strand
ggaaauugauaagaaugac

SEQ ID NO: 1637343 - RNA, 19 nt, Homo sapiens
  misc_RNA (1)...(19): siRNA sense strand
ucccugagaucaccuaaag

SEQ ID NO: 1637344 - RNA, 19 nt, Homo sapiens
  misc_RNA (1)...(19): siRNA sense strand
gauccaggcgggagcagaa

SEQ ID NO: 1637345 - RNA, 19 nt, Homo sapiens
  misc_RNA (1)...(19): siRNA sense strand
ggauacaucauucacucuu

SEQ ID NO: 1637346 - RNA, 19 nt, Homo sapiens
  misc_RNA (1)...(19): siRNA sense strand
ucaaagaauacacugaugu

SEQ ID NO: 1637347 - RNA, 19 nt, Homo sapiens
  misc_RNA (1)...(19): siRNA sense strand
cagcugacaccaagaaaca

SEQ ID NO: 1637348 - RNA, 19 nt, Homo sapiens
  misc_RNA (1)...(19): siRNA sense strand
gcucgaugaugcagacucu

SEQ ID NO: 1637349 - RNA, 19 nt, Homo sapiens
  misc_RNA (1)...(19): siRNA sense strand
caagcugggucugcucaug

SEQ ID NO: 1637350 - RNA, 19 nt, Homo sapiens
  misc_RNA (1)...(19): siRNA sense strand
gcugauacaaaggucaaua

SEQ ID NO: 1637351 - RNA, 19 nt, Homo sapiens
  misc_RNA (1)...(19): siRNA sense strand
caacugggacgaagcugau

SEQ ID NO: 1637352 - RNA, 19 nt, Homo sapiens
  misc_RNA (1)...(19): siRNA sense strand
gggaacgacuaaggacuca

SEQ ID NO: 1637353 - RNA, 19 nt, Homo sapiens
  misc_RNA (1)...(19): siRNA sense strand
cugccaagcuccagucauc

SEQ ID NO: 1637354 - RNA, 19 nt, Homo sapiens
  misc_RNA (1)...(19): siRNA sense strand
auaagaaugaccacuugua

SEQ ID NO: 1637355 - RNA, 19 nt, Homo sapiens
  misc_RNA (1)...(19): siRNA sense strand
cccgaaaggugaagcaucu

SEQ ID NO: 1637356 - RNA, 19 nt, Homo sapiens
  misc_RNA (1)...(19): siRNA sense strand
cugaugaguuugugaagca

SEQ ID NO: 1637357 - RNA, 19 nt, Homo sapiens
  misc_RNA (1)...(19): siRNA sense strand
gguauuugggauucaauug

SEQ ID NO: 1637358 - RNA, 19 nt, Homo sapiens
  misc_RNA (1)...(19): siRNA sense strand
gacgaagauucccaucaag

SEQ ID NO: 1637359 - RNA, 19 nt, Homo sapiens
  misc_RNA (1)...(19): siRNA sense strand
uaagaaugaccacuuguac

SEQ ID NO: 1637360 - RNA, 19 nt, Homo sapiens
  misc_RNA (1)...(19): siRNA sense strand
ggcgggagcagaagcuaaa

SEQ ID NO: 1637361 - RNA, 19 nt, Homo sapiens
  misc_RNA (1)...(19): siRNA sense strand
ggacaguagcucgaugaug

SEQ ID NO: 1637362 - RNA, 19 nt, Homo sapiens
  misc_RNA (1)...(19): siRNA sense strand
gagaguggugcaggucuaa

SEQ ID NO: 1637363 - RNA, 19 nt, Homo sapiens
  misc_RNA (1)...(19): siRNA sense strand
agaaugaccacuuguacau

SEQ ID NO: 1637364 - RNA, 19 nt, Homo sapiens
  misc_RNA (1)...(19): siRNA sense strand
gcaagggagggcaaaugau

SEQ ID NO: 1637365 - RNA, 19 nt, Homo sapiens
  misc_RNA (1)...(19): siRNA sense strand
gaccacuuguacauucuuc

SEQ ID NO: 1637366 - RNA, 19 nt, Homo sapiens
  misc_RNA (1)...(19): siRNA sense strand
gauggcagcagugaucaga

SEQ ID NO: 1637367 - RNA, 19 nt, Homo sapiens
  misc_RNA (1)...(19): siRNA sense strand
cgauggaagcggauuugaa

SEQ ID NO: 1637368 - RNA, 19 nt, Homo sapiens
  misc_RNA (1)...(19): siRNA sense strand
caagaugaaaguccucaag

SEQ ID NO: 1637369 - RNA, 19 nt, Homo sapiens
  misc_RNA (1)...(19): siRNA sense strand
gauaagaaugaccacuugu

SEQ ID NO: 1637370 - RNA, 19 nt, Homo sapiens
  misc_RNA (1)...(19): siRNA sense strand
aggacaucaucaaagaaua

SEQ ID NO: 1637371 - RNA, 19 nt, Homo sapiens
  misc_RNA (1)...(19): siRNA sense strand
ccagugaggcugucaucug

SEQ ID NO: 1637372 - RNA, 19 nt, Homo sapiens
  misc_RNA (1)...(19): siRNA sense strand
gcugacaccaagaaacaga

SEQ ID NO: 1637373 - RNA, 19 nt, Homo sapiens
  misc_RNA (1)...(19): siRNA sense strand
cuucuuagcaucaucuuca

SEQ ID NO: 1637374 - RNA, 19 nt, Homo sapiens
  misc_RNA (1)...(19): siRNA sense strand
gcugacugauacccagguu

SEQ ID NO: 1637375 - RNA, 19 nt, Homo sapiens
  misc_RNA (1)...(19): siRNA sense strand
uggcagcagugaucagagu

SEQ ID NO: 1637376 - RNA, 19 nt, Homo sapiens
  misc_RNA (1)...(19): siRNA sense strand
uagcagcugacaccaagaa

SEQ ID NO: 1637377 - RNA, 19 nt, Homo sapiens
  misc_RNA (1)...(19): siRNA sense strand
agacaccgaaggccucaaa

SEQ ID NO: 1637378 - RNA, 19 nt, Homo sapiens
  misc_RNA (1)...(19): siRNA sense strand
gcauacugggaacgacuaa

SEQ ID NO: 1637379 - RNA, 19 nt, Homo sapiens
  misc_RNA (1)...(19): siRNA sense strand
ggaggugcugcgcaaguug

SEQ ID NO: 1637380 - RNA, 19 nt, Homo sapiens
  misc_RNA (1)...(19): siRNA sense strand
uacaaaggcucaggagacu

SEQ ID NO: 1637381 - RNA, 19 nt, Homo sapiens
  misc_RNA (1)...(19): siRNA sense strand
cugcucauggugcuucuua

SEQ ID NO: 1637382 - RNA, 19 nt, Homo sapiens
  misc_RNA (1)...(19): siRNA sense strand
gaaguaccuuuuggcuaaa

SEQ ID NO: 1637383 - RNA, 19 nt, Homo sapiens
  misc_RNA (1)...(19): siRNA sense strand
gcaccuuagagcccacuga

SEQ ID NO: 1637384 - RNA, 19 nt, Homo sapiens
  misc_RNA (1)...(19): siRNA sense strand
ccgccacucucacauuugg

SEQ ID NO: 1637385 - RNA, 19 nt, Homo sapiens
  misc_RNA (1)...(19): siRNA sense strand
ugaccgccacucucacauu

SEQ ID NO: 1637386 - RNA, 19 nt, Homo sapiens
  misc_RNA (1)...(19): siRNA sense strand
guaccgagaggcgauggaa

SEQ ID NO: 1637387 - RNA, 19 nt, Homo sapiens
  misc_RNA (1)...(19): siRNA sense strand
gagaccagcaagaugaaag

SEQ ID NO: 1637388 - RNA, 19 nt, Homo sapiens
  misc_RNA (1)...(19): siRNA sense strand
ugcaagggagggcaaauga

SEQ ID NO: 1637389 - RNA, 19 nt, Homo sapiens
  misc_RNA (1)...(19): siRNA sense strand
uaucggacccugggccaaa

SEQ ID NO: 1637390 - RNA, 19 nt, Homo sapiens
  misc_RNA (1)...(19): siRNA sense strand
ggucucagaggaugugaag

SEQ ID NO: 1637391 - RNA, 19 nt, Homo sapiens
  misc_RNA (1)...(19): siRNA sense strand
aaggacaucaucaaagaau

SEQ ID NO: 1637392 - RNA, 19 nt, Homo sapiens
  misc_RNA (1)...(19): siRNA sense strand
ccugugguuucuccuacaa

SEQ ID NO: 1637393 - RNA, 19 nt, Homo sapiens
  misc_RNA (1)...(19): siRNA sense strand
gcucuggugccugugguuu

SEQ ID NO: 1637394 - RNA, 19 nt, Homo sapiens
  misc_RNA (1)...(19): siRNA sense strand
aggaaugggcagcucagua

SEQ ID NO: 1637395 - RNA, 19 nt, Homo sapiens
  misc_RNA (1)...(19): siRNA sense strand
gaaggaucccaaggaaugg

SEQ ID NO: 1637396 - RNA, 19 nt, Homo sapiens
  misc_RNA (1)...(19): siRNA sense strand
gggccugcgcucuuacuau

SEQ ID NO: 1637397 - RNA, 19 nt, Homo sapiens
  misc_RNA (1)...(19): siRNA sense strand
ugacugauacccagguucu

SEQ ID NO: 1637398 - RNA, 19 nt, Homo sapiens
  misc_RNA (1)...(19): siRNA sense strand
ugaagaagcucaucacuga

SEQ ID NO: 1637399 - RNA, 19 nt, Homo sapiens
  misc_RNA (1)...(19): siRNA sense strand
ugaaggacaucaucaaaga

SEQ ID NO: 1637400 - RNA, 19 nt, Homo sapiens
  misc_RNA (1)...(19): siRNA sense strand
gaugaaaguccucaaguuu

SEQ ID NO: 1637401 - RNA, 19 nt, Homo sapiens
  misc_RNA (1)...(19): siRNA sense strand
aaagaaggaucccaaggaa

SEQ ID NO: 1637402 - RNA, 19 nt, Homo sapiens
  misc_RNA (1)...(19): siRNA sense strand
gaccgccacucucacauuu

SEQ ID NO: 1637403 - RNA, 19 nt, Homo sapiens
  misc_RNA (1)...(19): siRNA sense strand
gauacaucauucacucuuu

SEQ ID NO: 1637404 - RNA, 19 nt, Homo sapiens
  misc_RNA (1)...(19): siRNA sense strand
agacgaagauucccaucaa

SEQ ID NO: 1637405 - RNA, 19 nt, Homo sapiens
  misc_RNA (1)...(19): siRNA sense strand
gagaagguauuugggauuc

SEQ ID NO: 1637406 - RNA, 19 nt, Homo sapiens
  misc_RNA (1)...(19): siRNA sense strand
gcucggacaugcugaagga

SEQ ID NO: 1637407 - RNA, 19 nt, Homo sapiens
  misc_RNA (1)...(19): siRNA sense strand
gaagguauuugggauucaa

SEQ ID NO: 1637408 - RNA, 19 nt, Homo sapiens
  misc_RNA (1)...(19): siRNA sense strand
caagggagggcaaaugauu

SEQ ID NO: 1637409 - RNA, 19 nt, Homo sapiens
  misc_RNA (1)...(19): siRNA sense strand
agaaguaccuggacuaugc

SEQ ID NO: 1637410 - RNA, 19 nt, Homo sapiens
  misc_RNA (1)...(19): siRNA sense strand
ugaaguaccuuuuggcuaa

SEQ ID NO: 1637411 - RNA, 19 nt, Homo sapiens
  misc_RNA (1)...(19): siRNA sense strand
ugauaagaaugaccacuug

SEQ ID NO: 1637412 - RNA, 19 nt, Homo sapiens
  misc_RNA (1)...(19): siRNA sense strand
ugacaaugccugccacuga

SEQ ID NO: 1637413 - RNA, 19 nt, Homo sapiens
  misc_RNA (1)...(19): siRNA sense strand
ggccugcgcucuuacuaug

SEQ ID NO: 1637414 - RNA, 19 nt, Homo sapiens
  misc_RNA (1)...(19): siRNA sense strand
gagauuagagcucgaaugg

SEQ ID NO: 1637415 - RNA, 19 nt, Homo sapiens
  misc_RNA (1)...(19): siRNA sense strand
ccauguggcugauacaaag

SEQ ID NO: 1637416 - RNA, 19 nt, Homo sapiens
  misc_RNA (1)...(19): siRNA sense strand
agaugaaaguccucaaguu

SEQ ID NO: 1637417 - RNA, 19 nt, Homo sapiens
  misc_RNA (1)...(19): siRNA sense strand
gcucuucgcuggccuuggu

SEQ ID NO: 1637418 - RNA, 19 nt, Homo sapiens
  misc_RNA (1)...(19): siRNA sense strand
ggaaugggcagcucaguac

SEQ ID NO: 1637419 - RNA, 19 nt, Homo sapiens
  misc_RNA (1)...(19): siRNA sense strand
gaaggacaucaucaaagaa

SEQ ID NO: 1637420 - RNA, 19 nt, Homo sapiens
  misc_RNA (1)...(19): siRNA sense strand
gauggaagcggauuugaag

SEQ ID NO: 1637421 - RNA, 19 nt, Homo sapiens
  misc_RNA (1)...(19): siRNA sense strand
ggagaagguauuugggauu

SEQ ID NO: 1637422 - RNA, 19 nt, Homo sapiens
  misc_RNA (1)...(19): siRNA sense strand
cuaaagaccagacgaagau

SEQ ID NO: 1637423 - RNA, 19 nt, Homo sapiens
  misc_RNA (1)...(19): siRNA sense strand
agaaggaucccaaggaaug

SEQ ID NO: 1637424 - RNA, 19 nt, Homo sapiens
  misc_RNA (1)...(19): siRNA sense strand
gcuaaagaccagacgaaga

SEQ ID NO: 1637425 - RNA, 19 nt, Homo sapiens
  misc_RNA (1)...(19): siRNA sense strand
gggaggugcugcgcaaguu

SEQ ID NO: 1637426 - RNA, 19 nt, Homo sapiens
  misc_RNA (1)...(19): siRNA sense strand
caaagaauacacugaugug

SEQ ID NO: 1637427 - RNA, 19 nt, Homo sapiens
  misc_RNA (1)...(19): siRNA sense strand
cgagaguggugcaggucua

SEQ ID NO: 1637428 - RNA, 19 nt, Homo sapiens
  misc_RNA (1)...(19): siRNA sense strand
gauacaaaggucaauacaa

SEQ ID NO: 1637429 - RNA, 19 nt, Homo sapiens
  misc_RNA (1)...(19): siRNA sense strand
uaugagaccagcaagauga

SEQ ID NO: 1637430 - RNA, 19 nt, Homo sapiens
  misc_RNA (1)...(19): siRNA sense strand
ggacaucaucaaagaauac

SEQ ID NO: 1637431 - RNA, 19 nt, Homo sapiens
  misc_RNA (1)...(19): siRNA sense strand
gcugaaggacaucaucaaa

SEQ ID NO: 1637432 - RNA, 19 nt, Homo sapiens
  misc_RNA (1)...(19): siRNA sense strand
gagugcagcugcccagucu

SEQ ID NO: 1637433 - RNA, 19 nt, Homo sapiens
  misc_RNA (1)...(19): siRNA sense strand
ugaaaguccucaaguuugc

SEQ ID NO: 1637434 - RNA, 19 nt, Homo sapiens
  misc_RNA (1)...(19): siRNA sense strand
gcagaaguaccuggacuau

SEQ ID NO: 1637435 - RNA, 19 nt, Homo sapiens
  misc_RNA (1)...(19): siRNA sense strand
gaggauggcagcagugauc

SEQ ID NO: 1637436 - RNA, 19 nt, Homo sapiens
  misc_RNA (1)...(19): siRNA sense strand
auacaucauucacucuuug

SEQ ID NO: 1637437 - RNA, 19 nt, Homo sapiens
  misc_RNA (1)...(19): siRNA sense strand
guauuugggauucaauuga

SEQ ID NO: 1637438 - RNA, 19 nt, Homo sapiens
  misc_RNA (1)...(19): siRNA sense strand
agcagaagcuaaagccaaa

SEQ ID NO: 1637439 - RNA, 19 nt, Homo sapiens
  misc_RNA (1)...(19): siRNA sense strand
gcccugggauacaucauuc

SEQ ID NO: 1637440 - RNA, 19 nt, Homo sapiens
  misc_RNA (1)...(19): siRNA sense strand
caaggucaaagccaagaaa

SEQ ID NO: 1637441 - RNA, 19 nt, Homo sapiens
  misc_RNA (1)...(19): siRNA sense strand
ugacagugacccagaaugu

SEQ ID NO: 1637442 - RNA, 19 nt, Homo sapiens
  misc_RNA (1)...(19): siRNA sense strand
ggaaauugauaagaaugac

SEQ ID NO: 1637443 - RNA, 19 nt, Homo sapiens
  misc_RNA (1)...(19): siRNA sense strand
ucccugagaucaccuaaag

SEQ ID NO: 1637444 - RNA, 19 nt, Homo sapiens
  misc_RNA (1)...(19): siRNA sense strand
gauccaggcgggagcagaa

SEQ ID NO: 1637445 - RNA, 19 nt, Homo sapiens
  misc_RNA (1)...(19): siRNA sense strand
ggauacaucauucacucuu

SEQ ID NO: 1637446 - RNA, 19 nt, Homo sapiens
  misc_RNA (1)...(19): siRNA sense strand
ucaaagaauacacugaugu

SEQ ID NO: 1637447 - RNA, 19 nt, Homo sapiens
  misc_RNA (1)...(19): siRNA sense strand
cagcugacaccaagaaaca

SEQ ID NO: 1637448 - RNA, 19 nt, Homo sapiens
  misc_RNA (1)...(19): siRNA sense strand
gcucgaugaugcagacucu

SEQ ID NO: 1637449 - RNA, 19 nt, Homo sapiens
  misc_RNA (1)...(19): siRNA sense strand
caagcugggucugcucaug

SEQ ID NO: 1637450 - RNA, 19 nt, Homo sapiens
  misc_RNA (1)...(19): siRNA sense strand
gcugauacaaaggucaaua

SEQ ID NO: 1637451 - RNA, 19 nt, Homo sapiens
  misc_RNA (1)...(19): siRNA sense strand
caacugggacgaagcugau

SEQ ID NO: 1637452 - RNA, 19 nt, Homo sapiens
  misc_RNA (1)...(19): siRNA sense strand
gggaacgacuaaggacuca

SEQ ID NO: 1637453 - RNA, 19 nt, Homo sapiens
  misc_RNA (1)...(19): siRNA sense strand
cugccaagcuccagucauc

SEQ ID NO: 1637454 - RNA, 19 nt, Homo sapiens
  misc_RNA (1)...(19): siRNA sense strand
auaagaaugaccacuugua

SEQ ID NO: 1637455 - RNA, 19 nt, Homo sapiens
  misc_RNA (1)...(19): siRNA sense strand
cccgaaaggugaagcaucu

SEQ ID NO: 1637456 - RNA, 19 nt, Homo sapiens
  misc_RNA (1)...(19): siRNA sense strand
cugaugaguuugugaagca

SEQ ID NO: 1637457 - RNA, 19 nt, Homo sapiens
  misc_RNA (1)...(19): siRNA sense strand
gguauuugggauucaauug

SEQ ID NO: 1637458 - RNA, 19 nt, Homo sapiens
  misc_RNA (1)...(19): siRNA sense strand
gacgaagauucccaucaag

SEQ ID NO: 1637459 - RNA, 19 nt, Homo sapiens
  misc_RNA (1)...(19): siRNA sense strand
uaagaaugaccacuuguac

SEQ ID NO: 1637460 - RNA, 19 nt, Homo sapiens
  misc_RNA (1)...(19): siRNA sense strand
ggcgggagcagaagcuaaa

SEQ ID NO: 1637461 - RNA, 19 nt, Homo sapiens
  misc_RNA (1)...(19): siRNA sense strand
ggacaguagcucgaugaug

SEQ ID NO: 1637462 - RNA, 19 nt, Homo sapiens
  misc_RNA (1)...(19): siRNA sense strand
gagaguggugcaggucuaa

SEQ ID NO: 1637463 - RNA, 19 nt, Homo sapiens
  misc_RNA (1)...(19): siRNA sense strand
agaaugaccacuuguacau

SEQ ID NO: 1637464 - RNA, 19 nt, Homo sapiens
  misc_RNA (1)...(19): siRNA sense strand
gcaagggagggcaaaugau

SEQ ID NO: 1637465 - RNA, 19 nt, Homo sapiens
  misc_RNA (1)...(19): siRNA sense strand
gaccacuuguacauucuuc

SEQ ID NO: 1637466 - RNA, 19 nt, Homo sapiens
  misc_RNA (1)...(19): siRNA sense strand
gauggcagcagugaucaga

SEQ ID NO: 1637467 - RNA, 19 nt, Homo sapiens
  misc_RNA (1)...(19): siRNA sense strand
cgauggaagcggauuugaa

SEQ ID NO: 1637468 - RNA, 19 nt, Homo sapiens
  misc_RNA (1)...(19): siRNA sense strand
caagaugaaaguccucaag

SEQ ID NO: 1637469 - RNA, 19 nt, Homo sapiens
  misc_RNA (1)...(19): siRNA sense strand
gauaagaaugaccacuugu

SEQ ID NO: 1637470 - RNA, 19 nt, Homo sapiens
  misc_RNA (1)...(19): siRNA sense strand
aggacaucaucaaagaaua

SEQ ID NO: 1637471 - RNA, 19 nt, Homo sapiens
  misc_RNA (1)...(19): siRNA sense strand
ccagugaggcugucaucug

SEQ ID NO: 1637472 - RNA, 19 nt, Homo sapiens
  misc_RNA (1)...(19): siRNA sense strand
gcugacaccaagaaacaga

SEQ ID NO: 1637473 - RNA, 19 nt, Homo sapiens
  misc_RNA (1)...(19): siRNA sense strand
cuucuuagcaucaucuuca

SEQ ID NO: 1637474 - RNA, 19 nt, Homo sapiens
  misc_RNA (1)...(19): siRNA sense strand
gcugacugauacccagguu

SEQ ID NO: 1637475 - RNA, 19 nt, Homo sapiens
  misc_RNA (1)...(19): siRNA sense strand
uggcagcagugaucagagu

SEQ ID NO: 1637476 - RNA, 19 nt, Homo sapiens
  misc_RNA (1)...(19): siRNA sense strand
uagcagcugacaccaagaa

SEQ ID NO: 1637477 - RNA, 19 nt, Homo sapiens
  misc_RNA (1)...(19): siRNA sense strand
agacaccgaaggccucaaa

SEQ ID NO: 1637478 - RNA, 19 nt, Homo sapiens
  misc_RNA (1)...(19): siRNA sense strand
gcauacugggaacgacuaa

SEQ ID NO: 1637479 - RNA, 19 nt, Homo sapiens
  misc_RNA (1)...(19): siRNA sense strand
ggaggugcugcgcaaguug

SEQ ID NO: 1637480 - RNA, 19 nt, Homo sapiens
  misc_RNA (1)...(19): siRNA sense strand
uacaaaggcucaggagacu

SEQ ID NO: 1637481 - RNA, 19 nt, Homo sapiens
  misc_RNA (1)...(19): siRNA sense strand
cugcucauggugcuucuua

SEQ ID NO: 1637482 - RNA, 19 nt, Homo sapiens
  misc_RNA (1)...(19): siRNA sense strand
gaaguaccuuuuggcuaaa

SEQ ID NO: 1637483 - RNA, 19 nt, Homo sapiens
  misc_RNA (1)...(19): siRNA sense strand
gcaccuuagagcccacuga

SEQ ID NO: 1637484 - RNA, 19 nt, Homo sapiens
  misc_RNA (1)...(19): siRNA sense strand
ccgccacucucacauuugg

SEQ ID NO: 1637485 - RNA, 19 nt, Homo sapiens
  misc_RNA (1)...(19): siRNA sense strand
ugaccgccacucucacauu

SEQ ID NO: 1637486 - RNA, 19 nt, Homo sapiens
  misc_RNA (1)...(19): siRNA sense strand
guaccgagaggcgauggaa

SEQ ID NO: 1637487 - RNA, 19 nt, Homo sapiens
  misc_RNA (1)...(19): siRNA sense strand
gagaccagcaagaugaaag

SEQ ID NO: 1637488 - RNA, 19 nt, Homo sapiens
  misc_RNA (1)...(19): siRNA sense strand
ugcaagggagggcaaauga

SEQ ID NO: 1637489 - RNA, 19 nt, Homo sapiens
  misc_RNA (1)...(19): siRNA sense strand
uaucggacccugggccaaa

SEQ ID NO: 1637490 - RNA, 19 nt, Homo sapiens
  misc_RNA (1)...(19): siRNA sense strand
ggucucagaggaugugaag

SEQ ID NO: 1637491 - RNA, 19 nt, Homo sapiens
  misc_RNA (1)...(19): siRNA sense strand
aaggacaucaucaaagaau

SEQ ID NO: 1637492 - RNA, 19 nt, Homo sapiens
  misc_RNA (1)...(19): siRNA sense strand
ccugugguuucuccuacaa

SEQ ID NO: 1637493 - RNA, 19 nt, Homo sapiens
  misc_RNA (1)...(19): siRNA sense strand
gcucuggugccugugguuu

SEQ ID NO: 1637494 - RNA, 19 nt, Homo sapiens
  misc_RNA (1)...(19): siRNA sense strand
aggaaugggcagcucagua

SEQ ID NO: 1637495 - RNA, 19 nt, Homo sapiens
  misc_RNA (1)...(19): siRNA sense strand
gaaggaucccaaggaaugg

SEQ ID NO: 1637496 - RNA, 19 nt, Homo sapiens
  misc_RNA (1)...(19): siRNA sense strand
gggccugcgcucuuacuau

SEQ ID NO: 1637497 - RNA, 19 nt, Homo sapiens
  misc_RNA (1)...(19): siRNA sense strand
ugacugauacccagguucu

SEQ ID NO: 1637498 - RNA, 19 nt, Homo sapiens
  misc_RNA (1)...(19): siRNA sense strand
gaaaugaguuguucaccuu

SEQ ID NO: 1637499 - RNA, 19 nt, Homo sapiens
  misc_RNA (1)...(19): siRNA sense strand
gaccugagcuccuaugauu

SEQ ID NO: 1637500 - RNA, 19 nt, Homo sapiens
  misc_RNA (1)...(19): siRNA sense strand
ggaagacaaugaaaugagu

SEQ ID NO: 1637501 - RNA, 19 nt, Homo sapiens
  misc_RNA (1)...(19): siRNA sense strand
gauaaggaauuccaacucu

SEQ ID NO: 1637502 - RNA, 19 nt, Homo sapiens
  misc_RNA (1)...(19): siRNA sense strand
gagaucauccagcacuuua

SEQ ID NO: 1637503 - RNA, 19 nt, Homo sapiens
  misc_RNA (1)...(19): siRNA sense strand
uaaccggucuccaugaugu

SEQ ID NO: 1637504 - RNA, 19 nt, Homo sapiens
  misc_RNA (1)...(19): siRNA sense strand
gauggaagacaaugaaaug

SEQ ID NO: 1637505 - RNA, 19 nt, Homo sapiens
  misc_RNA (1)...(19): siRNA sense strand
uccaugauguugaugagua

SEQ ID NO: 1637506 - RNA, 19 nt, Homo sapiens
  misc_RNA (1)...(19): siRNA sense strand
ugacggggcuccugaugua

SEQ ID NO: 1637507 - RNA, 19 nt, Homo sapiens
  misc_RNA (1)...(19): siRNA sense strand
ggagaucauccagcacuuu

SEQ ID NO: 1637508 - RNA, 19 nt, Homo sapiens
  misc_RNA (1)...(19): siRNA sense strand
gaagacaaugaaaugaguu

SEQ ID NO: 1637509 - RNA, 19 nt, Homo sapiens
  misc_RNA (1)...(19): siRNA sense strand
caagcgggaugucuacuac

SEQ ID NO: 1637510 - RNA, 19 nt, Homo sapiens
  misc_RNA (1)...(19): siRNA sense strand
cagcagaguggacacguuu

SEQ ID NO: 1637511 - RNA, 19 nt, Homo sapiens
  misc_RNA (1)...(19): siRNA sense strand
aaacugcuacaacuggaua

SEQ ID NO: 1637512 - RNA, 19 nt, Homo sapiens
  misc_RNA (1)...(19): siRNA sense strand
uaaggaauuccaacucuuc

SEQ ID NO: 1637513 - RNA, 19 nt, Homo sapiens
  misc_RNA (1)...(19): siRNA sense strand
aaugaguuguucaccuuaa

SEQ ID NO: 1637514 - RNA, 19 nt, Homo sapiens
  misc_RNA (1)...(19): siRNA sense strand
gagauggaagacaaugaaa

SEQ ID NO: 1637515 - RNA, 19 nt, Homo sapiens
  misc_RNA (1)...(19): siRNA sense strand
ugagauggaagacaaugaa

SEQ ID NO: 1637516 - RNA, 19 nt, Homo sapiens
  misc_RNA (1)...(19): siRNA sense strand
ccaugauguugaugaguau

SEQ ID NO: 1637517 - RNA, 19 nt, Homo sapiens
  misc_RNA (1)...(19): siRNA sense strand
ccuccuagcugcucugaac

SEQ ID NO: 1637518 - RNA, 19 nt, Homo sapiens
  misc_RNA (1)...(19): siRNA sense strand
gaucauccagcacuuuaag

SEQ ID NO: 1637519 - RNA, 19 nt, Homo sapiens
  misc_RNA (1)...(19): siRNA sense strand
uagcugcucugaacauugc

SEQ ID NO: 1637520 - RNA, 19 nt, Homo sapiens
  misc_RNA (1)...(19): siRNA sense strand
ggucccacccgcaucauug

SEQ ID NO: 1637521 - RNA, 19 nt, Homo sapiens
  misc_RNA (1)...(19): siRNA sense strand
ggcuauggcuccacuacca

SEQ ID NO: 1637522 - RNA, 19 nt, Homo sapiens
  misc_RNA (1)...(19): siRNA sense strand
ggauaaggaauuccaacuc

SEQ ID NO: 1637523 - RNA, 19 nt, Homo sapiens
  misc_RNA (1)...(19): siRNA sense strand
acaacuggauaaggaauuc

SEQ ID NO: 1637524 - RNA, 19 nt, Homo sapiens
  misc_RNA (1)...(19): siRNA sense strand
gccaggugcugagccagaa

SEQ ID NO: 1637525 - RNA, 19 nt, Homo sapiens
  misc_RNA (1)...(19): siRNA sense strand
auaaggaauuccaacucuu

SEQ ID NO: 1637526 - RNA, 19 nt, Homo sapiens
  misc_RNA (1)...(19): siRNA sense strand
ucagcagaguggacacguu

SEQ ID NO: 1637527 - RNA, 19 nt, Homo sapiens
  misc_RNA (1)...(19): siRNA sense strand
ggaccugagcuccuaugau

SEQ ID NO: 1637528 - RNA, 19 nt, Homo sapiens
  misc_RNA (1)...(19): siRNA sense strand
ccuagcugcucugaacauu

SEQ ID NO: 1637529 - RNA, 19 nt, Homo sapiens
  misc_RNA (1)...(19): siRNA sense strand
uguaaccggucuccaugau

SEQ ID NO: 1637530 - RNA, 19 nt, Homo sapiens
  misc_RNA (1)...(19): siRNA sense strand
ucgcagcgccuucaaacug

SEQ ID NO: 1637531 - RNA, 19 nt, Homo sapiens
  misc_RNA (1)...(19): siRNA sense strand
ugcuacaacuggauaagga

SEQ ID NO: 1637532 - RNA, 19 nt, Homo sapiens
  misc_RNA (1)...(19): siRNA sense strand
caaaggacaagcgggaugu

SEQ ID NO: 1637533 - RNA, 19 nt, Homo sapiens
  misc_RNA (1)...(19): siRNA sense strand
gaugugacgcuccucuaca

SEQ ID NO: 1637534 - RNA, 19 nt, Homo sapiens
  misc_RNA (1)...(19): siRNA sense strand
ggagcagccggaacucuag

SEQ ID NO: 1637535 - RNA, 19 nt, Homo sapiens
  misc_RNA (1)...(19): siRNA sense strand
guuacccacuggaccuaga

SEQ ID NO: 1637536 - RNA, 19 nt, Homo sapiens
  misc_RNA (1)...(19): siRNA sense strand
aaaugaguuguucaccuua

SEQ ID NO: 1637537 - RNA, 19 nt, Homo sapiens
  misc_RNA (1)...(19): siRNA sense strand
acaagcgggaugucuacua

SEQ ID NO: 1637538 - RNA, 19 nt, Homo sapiens
  misc_RNA (1)...(19): siRNA sense strand
ugauguugaugaguauaug

SEQ ID NO: 1637539 - RNA, 19 nt, Homo sapiens
  misc_RNA (1)...(19): siRNA sense strand
gggaugugacgcuccucua

SEQ ID NO: 1637540 - RNA, 19 nt, Homo sapiens
  misc_RNA (1)...(19): siRNA sense strand
gcuuuguggccaagauauu

SEQ ID NO: 1637541 - RNA, 19 nt, Homo sapiens
  misc_RNA (1)...(19): siRNA sense strand
gcuacaacuggauaaggaa

SEQ ID NO: 1637542 - RNA, 19 nt, Homo sapiens
  misc_RNA (1)...(19): siRNA sense strand
cuguggaccugcaggcuau

SEQ ID NO: 1637543 - RNA, 19 nt, Homo sapiens
  misc_RNA (1)...(19): siRNA sense strand
gcggcucagaguacaagua

SEQ ID NO: 1637544 - RNA, 19 nt, Homo sapiens
  misc_RNA (1)...(19): siRNA sense strand
ggaugugacgcuccucuac

SEQ ID NO: 1637545 - RNA, 19 nt, Homo sapiens
  misc_RNA (1)...(19): siRNA sense strand
gcucgcagcgccuucaaac

SEQ ID NO: 1637546 - RNA, 19 nt, Homo sapiens
  misc_RNA (1)...(19): siRNA sense strand
gaaaugaguuguucaccuu

SEQ ID NO: 1637547 - RNA, 19 nt, Homo sapiens
  misc_RNA (1)...(19): siRNA sense strand
gaccugagcuccuaugauu

SEQ ID NO: 1637548 - RNA, 19 nt, Homo sapiens
  misc_RNA (1)...(19): siRNA sense strand
ggaagacaaugaaaugagu

SEQ ID NO: 1637549 - RNA, 19 nt, Homo sapiens
  misc_RNA (1)...(19): siRNA sense strand
gauaaggaauuccaacucu

SEQ ID NO: 1637550 - RNA, 19 nt, Homo sapiens
  misc_RNA (1)...(19): siRNA sense strand
gagaucauccagcacuuua

SEQ ID NO: 1637551 - RNA, 19 nt, Homo sapiens
  misc_RNA (1)...(19): siRNA sense strand
uaaccggucuccaugaugu

SEQ ID NO: 1637552 - RNA, 19 nt, Homo sapiens
  misc_RNA (1)...(19): siRNA sense strand
gauggaagacaaugaaaug

SEQ ID NO: 1637553 - RNA, 19 nt, Homo sapiens
  misc_RNA (1)...(19): siRNA sense strand
uccaugauguugaugagua

SEQ ID NO: 1637554 - RNA, 19 nt, Homo sapiens
  misc_RNA (1)...(19): siRNA sense strand
ugacggggcuccugaugua

SEQ ID NO: 1637555 - RNA, 19 nt, Homo sapiens
  misc_RNA (1)...(19): siRNA sense strand
ggagaucauccagcacuuu

SEQ ID NO: 1637556 - RNA, 19 nt, Homo sapiens
  misc_RNA (1)...(19): siRNA sense strand
gaagacaaugaaaugaguu

SEQ ID NO: 1637557 - RNA, 19 nt, Homo sapiens
  misc_RNA (1)...(19): siRNA sense strand
caagcgggaugucuacuac

SEQ ID NO: 1637558 - RNA, 19 nt, Homo sapiens
  misc_RNA (1)...(19): siRNA sense strand
cagcagaguggacacguuu

SEQ ID NO: 1637559 - RNA, 19 nt, Homo sapiens
  misc_RNA (1)...(19): siRNA sense strand
aaacugcuacaacuggaua

SEQ ID NO: 1637560 - RNA, 19 nt, Homo sapiens
  misc_RNA (1)...(19): siRNA sense strand
uaaggaauuccaacucuuc

SEQ ID NO: 1637561 - RNA, 19 nt, Homo sapiens
  misc_RNA (1)...(19): siRNA sense strand
aaugaguuguucaccuuaa

SEQ ID NO: 1637562 - RNA, 19 nt, Homo sapiens
  misc_RNA (1)...(19): siRNA sense strand
gagauggaagacaaugaaa

SEQ ID NO: 1637563 - RNA, 19 nt, Homo sapiens
  misc_RNA (1)...(19): siRNA sense strand
ugagauggaagacaaugaa

SEQ ID NO: 1637564 - RNA, 19 nt, Homo sapiens
  misc_RNA (1)...(19): siRNA sense strand
ccaugauguugaugaguau

SEQ ID NO: 1637565 - RNA, 19 nt, Homo sapiens
  misc_RNA (1)...(19): siRNA sense strand
ccuccuagcugcucugaac

SEQ ID NO: 1637566 - RNA, 19 nt, Homo sapiens
  misc_RNA (1)...(19): siRNA sense strand
gaucauccagcacuuuaag

SEQ ID NO: 1637567 - RNA, 19 nt, Homo sapiens
  misc_RNA (1)...(19): siRNA sense strand
uagcugcucugaacauugc

SEQ ID NO: 1637568 - RNA, 19 nt, Homo sapiens
  misc_RNA (1)...(19): siRNA sense strand
ggucccacccgcaucauug

SEQ ID NO: 1637569 - RNA, 19 nt, Homo sapiens
  misc_RNA (1)...(19): siRNA sense strand
ggcuauggcuccacuacca

SEQ ID NO: 1637570 - RNA, 19 nt, Homo sapiens
  misc_RNA (1)...(19): siRNA sense strand
ggauaaggaauuccaacuc

SEQ ID NO: 1637571 - RNA, 19 nt, Homo sapiens
  misc_RNA (1)...(19): siRNA sense strand
acaacuggauaaggaauuc

SEQ ID NO: 1637572 - RNA, 19 nt, Homo sapiens
  misc_RNA (1)...(19): siRNA sense strand
gccaggugcugagccagaa

SEQ ID NO: 1637573 - RNA, 19 nt, Homo sapiens
  misc_RNA (1)...(19): siRNA sense strand
auaaggaauuccaacucuu

SEQ ID NO: 1637574 - RNA, 19 nt, Homo sapiens
  misc_RNA (1)...(19): siRNA sense strand
ucagcagaguggacacguu

SEQ ID NO: 1637575 - RNA, 19 nt, Homo sapiens
  misc_RNA (1)...(19): siRNA sense strand
ggaccugagcuccuaugau

SEQ ID NO: 1637576 - RNA, 19 nt, Homo sapiens
  misc_RNA (1)...(19): siRNA sense strand
ccuagcugcucugaacauu

SEQ ID NO: 1637577 - RNA, 19 nt, Homo sapiens
  misc_RNA (1)...(19): siRNA sense strand
uguaaccggucuccaugau

SEQ ID NO: 1637578 - RNA, 19 nt, Homo sapiens
  misc_RNA (1)...(19): siRNA sense strand
ucgcagcgccuucaaacug

SEQ ID NO: 1637579 - RNA, 19 nt, Homo sapiens
  misc_RNA (1)...(19): siRNA sense strand
ugcuacaacuggauaagga

SEQ ID NO: 1637580 - RNA, 19 nt, Homo sapiens
  misc_RNA (1)...(19): siRNA sense strand
caaaggacaagcgggaugu

SEQ ID NO: 1637581 - RNA, 19 nt, Homo sapiens
  misc_RNA (1)...(19): siRNA sense strand
gaugugacgcuccucuaca

SEQ ID NO: 1637582 - RNA, 19 nt, Homo sapiens
  misc_RNA (1)...(19): siRNA sense strand
ggagcagccggaacucuag

SEQ ID NO: 1637583 - RNA, 19 nt, Homo sapiens
  misc_RNA (1)...(19): siRNA sense strand
guuacccacuggaccuaga

SEQ ID NO: 1637584 - RNA, 19 nt, Homo sapiens
  misc_RNA (1)...(19): siRNA sense strand
aaaugaguuguucaccuua

SEQ ID NO: 1637585 - RNA, 19 nt, Homo sapiens
  misc_RNA (1)...(19): siRNA sense strand
acaagcgggaugucuacua

SEQ ID NO: 1637586 - RNA, 19 nt, Homo sapiens
  misc_RNA (1)...(19): siRNA sense strand
ugauguugaugaguauaug

SEQ ID NO: 1637587 - RNA, 19 nt, Homo sapiens
  misc_RNA (1)...(19): siRNA sense strand
gggaugugacgcuccucua

SEQ ID NO: 1637588 - RNA, 19 nt, Homo sapiens
  misc_RNA (1)...(19): siRNA sense strand
gcuuuguggccaagauauu

SEQ ID NO: 1637589 - RNA, 19 nt, Homo sapiens
  misc_RNA (1)...(19): siRNA sense strand
gcuacaacuggauaaggaa

SEQ ID NO: 1637590 - RNA, 19 nt, Homo sapiens
  misc_RNA (1)...(19): siRNA sense strand
cuguggaccugcaggcuau

SEQ ID NO: 1637591 - RNA, 19 nt, Homo sapiens
  misc_RNA (1)...(19): siRNA sense strand
gcggcucagaguacaagua

SEQ ID NO: 1637592 - RNA, 19 nt, Homo sapiens
  misc_RNA (1)...(19): siRNA sense strand
ggaugugacgcuccucuac

SEQ ID NO: 1637593 - RNA, 19 nt, Homo sapiens
  misc_RNA (1)...(19): siRNA sense strand
gcucgcagcgccuucaaac

SEQ ID NO: 1637594 - RNA, 19 nt, Homo sapiens
  misc_RNA (1)...(19): siRNA sense strand
gaaaugaguuguucaccuu

SEQ ID NO: 1637595 - RNA, 19 nt, Homo sapiens
  misc_RNA (1)...(19): siRNA sense strand
gaccugagcuccuaugauu

SEQ ID NO: 1637596 - RNA, 19 nt, Homo sapiens
  misc_RNA (1)...(19): siRNA sense strand
ggaagacaaugaaaugagu

SEQ ID NO: 1637597 - RNA, 19 nt, Homo sapiens
  misc_RNA (1)...(19): siRNA sense strand
gauaaggaauuccaacucu

SEQ ID NO: 1637598 - RNA, 19 nt, Homo sapiens
  misc_RNA (1)...(19): siRNA sense strand
gagaucauccagcacuuua

SEQ ID NO: 1637599 - RNA, 19 nt, Homo sapiens
  misc_RNA (1)...(19): siRNA sense strand
uaaccggucuccaugaugu

SEQ ID NO: 1637600 - RNA, 19 nt, Homo sapiens
  misc_RNA (1)...(19): siRNA sense strand
gauggaagacaaugaaaug

SEQ ID NO: 1637601 - RNA, 19 nt, Homo sapiens
  misc_RNA (1)...(19): siRNA sense strand
uccaugauguugaugagua

SEQ ID NO: 1637602 - RNA, 19 nt, Homo sapiens
  misc_RNA (1)...(19): siRNA sense strand
ugacggggcuccugaugua

SEQ ID NO: 1637603 - RNA, 19 nt, Homo sapiens
  misc_RNA (1)...(19): siRNA sense strand
ggagaucauccagcacuuu

SEQ ID NO: 1637604 - RNA, 19 nt, Homo sapiens
  misc_RNA (1)...(19): siRNA sense strand
gaagacaaugaaaugaguu

SEQ ID NO: 1637605 - RNA, 19 nt, Homo sapiens
  misc_RNA (1)...(19): siRNA sense strand
caagcgggaugucuacuac

SEQ ID NO: 1637606 - RNA, 19 nt, Homo sapiens
  misc_RNA (1)...(19): siRNA sense strand
cagcagaguggacacguuu

SEQ ID NO: 1637607 - RNA, 19 nt, Homo sapiens
  misc_RNA (1)...(19): siRNA sense strand
aaacugcuacaacuggaua

SEQ ID NO: 1637608 - RNA, 19 nt, Homo sapiens
  misc_RNA (1)...(19): siRNA sense strand
uaaggaauuccaacucuuc

SEQ ID NO: 1637609 - RNA, 19 nt, Homo sapiens
  misc_RNA (1)...(19): siRNA sense strand
aaugaguuguucaccuuaa

SEQ ID NO: 1637610 - RNA, 19 nt, Homo sapiens
  misc_RNA (1)...(19): siRNA sense strand
gagauggaagacaaugaaa

SEQ ID NO: 1637611 - RNA, 19 nt, Homo sapiens
  misc_RNA (1)...(19): siRNA sense strand
ugagauggaagacaaugaa

SEQ ID NO: 1637612 - RNA, 19 nt, Homo sapiens
  misc_RNA (1)...(19): siRNA sense strand
ccaugauguugaugaguau

SEQ ID NO: 1637613 - RNA, 19 nt, Homo sapiens
  misc_RNA (1)...(19): siRNA sense strand
ccuccuagcugcucugaac

SEQ ID NO: 1637614 - RNA, 19 nt, Homo sapiens
  misc_RNA (1)...(19): siRNA sense strand
gaucauccagcacuuuaag

SEQ ID NO: 1637615 - RNA, 19 nt, Homo sapiens
  misc_RNA (1)...(19): siRNA sense strand
uagcugcucugaacauugc

SEQ ID NO: 1637616 - RNA, 19 nt, Homo sapiens
  misc_RNA (1)...(19): siRNA sense strand
ggucccacccgcaucauug

SEQ ID NO: 1637617 - RNA, 19 nt, Homo sapiens
  misc_RNA (1)...(19): siRNA sense strand
ggcuauggcuccacuacca

SEQ ID NO: 1637618 - RNA, 19 nt, Homo sapiens
  misc_RNA (1)...(19): siRNA sense strand
ggauaaggaauuccaacuc

SEQ ID NO: 1637619 - RNA, 19 nt, Homo sapiens
  misc_RNA (1)...(19): siRNA sense strand
acaacuggauaaggaauuc

SEQ ID NO: 1637620 - RNA, 19 nt, Homo sapiens
  misc_RNA (1)...(19): siRNA sense strand
gccaggugcugagccagaa

SEQ ID NO: 1637621 - RNA, 19 nt, Homo sapiens
  misc_RNA (1)...(19): siRNA sense strand
auaaggaauuccaacucuu

SEQ ID NO: 1637622 - RNA, 19 nt, Homo sapiens
  misc_RNA (1)...(19): siRNA sense strand
ucagcagaguggacacguu

SEQ ID NO: 1637623 - RNA, 19 nt, Homo sapiens
  misc_RNA (1)...(19): siRNA sense strand
ggaccugagcuccuaugau

SEQ ID NO: 1637624 - RNA, 19 nt, Homo sapiens
  misc_RNA (1)...(19): siRNA sense strand
ccuagcugcucugaacauu

SEQ ID NO: 1637625 - RNA, 19 nt, Homo sapiens
  misc_RNA (1)...(19): siRNA sense strand
uguaaccggucuccaugau

SEQ ID NO: 1637626 - RNA, 19 nt, Homo sapiens
  misc_RNA (1)...(19): siRNA sense strand
ucgcagcgccuucaaacug

SEQ ID NO: 1637627 - RNA, 19 nt, Homo sapiens
  misc_RNA (1)...(19): siRNA sense strand
ugcuacaacuggauaagga

SEQ ID NO: 1637628 - RNA, 19 nt, Homo sapiens
  misc_RNA (1)...(19): siRNA sense strand
caaaggacaagcgggaugu

SEQ ID NO: 1637629 - RNA, 19 nt, Homo sapiens
  misc_RNA (1)...(19): siRNA sense strand
gaugugacgcuccucuaca

SEQ ID NO: 1637630 - RNA, 19 nt, Homo sapiens
  misc_RNA (1)...(19): siRNA sense strand
ggagcagccggaacucuag

SEQ ID NO: 1637631 - RNA, 19 nt, Homo sapiens
  misc_RNA (1)...(19): siRNA sense strand
guuacccacuggaccuaga

SEQ ID NO: 1637632 - RNA, 19 nt, Homo sapiens
  misc_RNA (1)...(19): siRNA sense strand
aaaugaguuguucaccuua

SEQ ID NO: 1637633 - RNA, 19 nt, Homo sapiens
  misc_RNA (1)...(19): siRNA sense strand
acaagcgggaugucuacua

SEQ ID NO: 1637634 - RNA, 19 nt, Homo sapiens
  misc_RNA (1)...(19): siRNA sense strand
ugauguugaugaguauaug

SEQ ID NO: 1637635 - RNA, 19 nt, Homo sapiens
  misc_RNA (1)...(19): siRNA sense strand
gggaugugacgcuccucua

SEQ ID NO: 1637636 - RNA, 19 nt, Homo sapiens
  misc_RNA (1)...(19): siRNA sense strand
gcuuuguggccaagauauu

SEQ ID NO: 1637637 - RNA, 19 nt, Homo sapiens
  misc_RNA (1)...(19): siRNA sense strand
gcuacaacuggauaaggaa

SEQ ID NO: 1637638 - RNA, 19 nt, Homo sapiens
  misc_RNA (1)...(19): siRNA sense strand
cuguggaccugcaggcuau

SEQ ID NO: 1637639 - RNA, 19 nt, Homo sapiens
  misc_RNA (1)...(19): siRNA sense strand
gcggcucagaguacaagua

SEQ ID NO: 1637640 - RNA, 19 nt, Homo sapiens
  misc_RNA (1)...(19): siRNA sense strand
ggaugugacgcuccucuac

SEQ ID NO: 1637641 - RNA, 19 nt, Homo sapiens
  misc_RNA (1)...(19): siRNA sense strand
gcucgcagcgccuucaaac

SEQ ID NO: 1637642 - RNA, 19 nt, Homo sapiens
  misc_RNA (1)...(19): siRNA sense strand
gaaagaagcugcacuaaua

SEQ ID NO: 1637643 - RNA, 19 nt, Homo sapiens
  misc_RNA (1)...(19): siRNA sense strand
gaaagucgcuuaagaaaga

SEQ ID NO: 1637644 - RNA, 19 nt, Homo sapiens
  misc_RNA (1)...(19): siRNA sense strand
ugaaggagcucuugaauaa

SEQ ID NO: 1637645 - RNA, 19 nt, Homo sapiens
  misc_RNA (1)...(19): siRNA sense strand
gcaaagaacuccaauagau

SEQ ID NO: 1637646 - RNA, 19 nt, Homo sapiens
  misc_RNA (1)...(19): siRNA sense strand
gaaagaaagucgcuuaaga

SEQ ID NO: 1637647 - RNA, 19 nt, Homo sapiens
  misc_RNA (1)...(19): siRNA sense strand
ggaaagaagugguggauug

SEQ ID NO: 1637648 - RNA, 19 nt, Homo sapiens
  misc_RNA (1)...(19): siRNA sense strand
guacaaauccucuuccuua

SEQ ID NO: 1637649 - RNA, 19 nt, Homo sapiens
  misc_RNA (1)...(19): siRNA sense strand
ggacggagaugcccauuau

SEQ ID NO: 1637650 - RNA, 19 nt, Homo sapiens
  misc_RNA (1)...(19): siRNA sense strand
uacagaagcucucaaauuu

SEQ ID NO: 1637651 - RNA, 19 nt, Homo sapiens
  misc_RNA (1)...(19): siRNA sense strand
gcaccuaccuguccagaaa

SEQ ID NO: 1637652 - RNA, 19 nt, Homo sapiens
  misc_RNA (1)...(19): siRNA sense strand
gaauaaacauccaggaguu

SEQ ID NO: 1637653 - RNA, 19 nt, Homo sapiens
  misc_RNA (1)...(19): siRNA sense strand
gagaaauccuugauaguga

SEQ ID NO: 1637654 - RNA, 19 nt, Homo sapiens
  misc_RNA (1)...(19): siRNA sense strand
caaauggccuguccaaaug

SEQ ID NO: 1637655 - RNA, 19 nt, Homo sapiens
  misc_RNA (1)...(19): siRNA sense strand
ggaagaaggucauccgaau

SEQ ID NO: 1637656 - RNA, 19 nt, Homo sapiens
  misc_RNA (1)...(19): siRNA sense strand
gcagagcaguucaugguuu

SEQ ID NO: 1637657 - RNA, 19 nt, Homo sapiens
  misc_RNA (1)...(19): siRNA sense strand
ucucacaagucaucuauua

SEQ ID NO: 1637658 - RNA, 19 nt, Homo sapiens
  misc_RNA (1)...(19): siRNA sense strand
caagagagaugagcaaaug

SEQ ID NO: 1637659 - RNA, 19 nt, Homo sapiens
  misc_RNA (1)...(19): siRNA sense strand
gagcauagauccugacagu

SEQ ID NO: 1637660 - RNA, 19 nt, Homo sapiens
  misc_RNA (1)...(19): siRNA sense strand
cgaauaccuucaccucuua

SEQ ID NO: 1637661 - RNA, 19 nt, Homo sapiens
  misc_RNA (1)...(19): siRNA sense strand
caaagagaaugaacaacaa

SEQ ID NO: 1637662 - RNA, 19 nt, Homo sapiens
  misc_RNA (1)...(19): siRNA sense strand
caccaaagcuggagaagga

SEQ ID NO: 1637663 - RNA, 19 nt, Homo sapiens
  misc_RNA (1)...(19): siRNA sense strand
gaaggaaguuggcuggaau

SEQ ID NO: 1637664 - RNA, 19 nt, Homo sapiens
  misc_RNA (1)...(19): siRNA sense strand
ggacaagugcuuacugaaa

SEQ ID NO: 1637665 - RNA, 19 nt, Homo sapiens
  misc_RNA (1)...(19): siRNA sense strand
guaccagguucaagagaua

SEQ ID NO: 1637666 - RNA, 19 nt, Homo sapiens
  misc_RNA (1)...(19): siRNA sense strand
gaagaaggucauccgaaua

SEQ ID NO: 1637667 - RNA, 19 nt, Homo sapiens
  misc_RNA (1)...(19): siRNA sense strand
gacaagugcuuacugaaau

SEQ ID NO: 1637668 - RNA, 19 nt, Homo sapiens
  misc_RNA (1)...(19): siRNA sense strand
gcuaugccauugccuuuaa

SEQ ID NO: 1637669 - RNA, 19 nt, Homo sapiens
  misc_RNA (1)...(19): siRNA sense strand
gaacaucacccuuccaaag

SEQ ID NO: 1637670 - RNA, 19 nt, Homo sapiens
  misc_RNA (1)...(19): siRNA sense strand
ccaaguccaugauuuaaug

SEQ ID NO: 1637671 - RNA, 19 nt, Homo sapiens
  misc_RNA (1)...(19): siRNA sense strand
ucaaacuucuucaggauuu

SEQ ID NO: 1637672 - RNA, 19 nt, Homo sapiens
  misc_RNA (1)...(19): siRNA sense strand
ccagggaagucaccaguuu

SEQ ID NO: 1637673 - RNA, 19 nt, Homo sapiens
  misc_RNA (1)...(19): siRNA sense strand
ggucaucaauguuauguuc

SEQ ID NO: 1637674 - RNA, 19 nt, Homo sapiens
  misc_RNA (1)...(19): siRNA sense strand
gaagcucucaaauuuguua

SEQ ID NO: 1637675 - RNA, 19 nt, Homo sapiens
  misc_RNA (1)...(19): siRNA sense strand
cagaagcucucaaauuugu

SEQ ID NO: 1637676 - RNA, 19 nt, Homo sapiens
  misc_RNA (1)...(19): siRNA sense strand
ggaguuaauguccaaauaa

SEQ ID NO: 1637677 - RNA, 19 nt, Homo sapiens
  misc_RNA (1)...(19): siRNA sense strand
acaggaagcuugugaguuc

SEQ ID NO: 1637678 - RNA, 19 nt, Homo sapiens
  misc_RNA (1)...(19): siRNA sense strand
gaagcugcacuaauagaua

SEQ ID NO: 1637679 - RNA, 19 nt, Homo sapiens
  misc_RNA (1)...(19): siRNA sense strand
caugagaggugcuuucuuc

SEQ ID NO: 1637680 - RNA, 19 nt, Homo sapiens
  misc_RNA (1)...(19): siRNA sense strand
caagcugacuggagauauu

SEQ ID NO: 1637681 - RNA, 19 nt, Homo sapiens
  misc_RNA (1)...(19): siRNA sense strand
uaacaggacuagcuuucaa

SEQ ID NO: 1637682 - RNA, 19 nt, Homo sapiens
  misc_RNA (1)...(19): siRNA sense strand
ggagaaauguuagcuugga

SEQ ID NO: 1637683 - RNA, 19 nt, Homo sapiens
  misc_RNA (1)...(19): siRNA sense strand
ggagaugcccauuaugaaa

SEQ ID NO: 1637684 - RNA, 19 nt, Homo sapiens
  misc_RNA (1)...(19): siRNA sense strand
gccaccagcuggaugauuu

SEQ ID NO: 1637685 - RNA, 19 nt, Homo sapiens
  misc_RNA (1)...(19): siRNA sense strand
uaaaggaaacugugagauu

SEQ ID NO: 1637686 - RNA, 19 nt, Homo sapiens
  misc_RNA (1)...(19): siRNA sense strand
gaaccagucucccgagucu

SEQ ID NO: 1637687 - RNA, 19 nt, Homo sapiens
  misc_RNA (1)...(19): siRNA sense strand
cuacagaagcucucaaauu

SEQ ID NO: 1637688 - RNA, 19 nt, Homo sapiens
  misc_RNA (1)...(19): siRNA sense strand
caauuucacuaccuuauuc

SEQ ID NO: 1637689 - RNA, 19 nt, Homo sapiens
  misc_RNA (1)...(19): siRNA sense strand
ucacuguccuggcugauaa

SEQ ID NO: 1637690 - RNA, 19 nt, Homo sapiens
  misc_RNA (1)...(19): siRNA sense strand
ggagaaauccuugauagug

SEQ ID NO: 1637691 - RNA, 19 nt, Homo sapiens
  misc_RNA (1)...(19): siRNA sense strand
gcacacaucagcuuacaau

SEQ ID NO: 1637692 - RNA, 19 nt, Homo sapiens
  misc_RNA (1)...(19): siRNA sense strand
gaaacauucuggacacaag

SEQ ID NO: 1637693 - RNA, 19 nt, Homo sapiens
  misc_RNA (1)...(19): siRNA sense strand
caaagaacuccaauagauu

SEQ ID NO: 1637694 - RNA, 19 nt, Homo sapiens
  misc_RNA (1)...(19): siRNA sense strand
uuacuaagcuggugaaacu

SEQ ID NO: 1637695 - RNA, 19 nt, Homo sapiens
  misc_RNA (1)...(19): siRNA sense strand
ccaguuuccuucaguacua

SEQ ID NO: 1637696 - RNA, 19 nt, Homo sapiens
  misc_RNA (1)...(19): siRNA sense strand
aaugguaguugaggaauua

SEQ ID NO: 1637697 - RNA, 19 nt, Homo sapiens
  misc_RNA (1)...(19): siRNA sense strand
gcuccaaguccaugauuua

SEQ ID NO: 1637698 - RNA, 19 nt, Homo sapiens
  misc_RNA (1)...(19): siRNA sense strand
uagaagacauccuggaaau

SEQ ID NO: 1637699 - RNA, 19 nt, Homo sapiens
  misc_RNA (1)...(19): siRNA sense strand
aaagaaagaaagucgcuua

SEQ ID NO: 1637700 - RNA, 19 nt, Homo sapiens
  misc_RNA (1)...(19): siRNA sense strand
gcaagaaugagaauggauu

SEQ ID NO: 1637701 - RNA, 19 nt, Homo sapiens
  misc_RNA (1)...(19): siRNA sense strand
gaacaaccccgucuaugua

SEQ ID NO: 1637702 - RNA, 19 nt, Homo sapiens
  misc_RNA (1)...(19): siRNA sense strand
uuacagcacuuuauagcuu

SEQ ID NO: 1637703 - RNA, 19 nt, Homo sapiens
  misc_RNA (1)...(19): siRNA sense strand
cccaaucaaucuugucaua

SEQ ID NO: 1637704 - RNA, 19 nt, Homo sapiens
  misc_RNA (1)...(19): siRNA sense strand
uuacuaagcgcuaaucgua

SEQ ID NO: 1637705 - RNA, 19 nt, Homo sapiens
  misc_RNA (1)...(19): siRNA sense strand
uaagaaagaagcugcacua

SEQ ID NO: 1637706 - RNA, 19 nt, Homo sapiens
  misc_RNA (1)...(19): siRNA sense strand
aaagaaagucgcuuaagaa

SEQ ID NO: 1637707 - RNA, 19 nt, Homo sapiens
  misc_RNA (1)...(19): siRNA sense strand
gaugguacuugugguaauu

SEQ ID NO: 1637708 - RNA, 19 nt, Homo sapiens
  misc_RNA (1)...(19): siRNA sense strand
cuaaggagguucaguuaca

SEQ ID NO: 1637709 - RNA, 19 nt, Homo sapiens
  misc_RNA (1)...(19): siRNA sense strand
gauuggcaccuacuauaua

SEQ ID NO: 1637710 - RNA, 19 nt, Homo sapiens
  misc_RNA (1)...(19): siRNA sense strand
uagauacacugcuacagaa

SEQ ID NO: 1637711 - RNA, 19 nt, Homo sapiens
  misc_RNA (1)...(19): siRNA sense strand
ggauucaguuacaucauga

SEQ ID NO: 1637712 - RNA, 19 nt, Homo sapiens
  misc_RNA (1)...(19): siRNA sense strand
ccaaaugguugacuucagu

SEQ ID NO: 1637713 - RNA, 19 nt, Homo sapiens
  misc_RNA (1)...(19): siRNA sense strand
ucaaauggccuguccaaau

SEQ ID NO: 1637714 - RNA, 19 nt, Homo sapiens
  misc_RNA (1)...(19): siRNA sense strand
acaagugcuuacugaaaua

SEQ ID NO: 1637715 - RNA, 19 nt, Homo sapiens
  misc_RNA (1)...(19): siRNA sense strand
caagucaucuauuaucuac

SEQ ID NO: 1637716 - RNA, 19 nt, Homo sapiens
  misc_RNA (1)...(19): siRNA sense strand
aaucauauccuucuuccua

SEQ ID NO: 1637717 - RNA, 19 nt, Homo sapiens
  misc_RNA (1)...(19): siRNA sense strand
gcaaucuacucugcaaaga

SEQ ID NO: 1637718 - RNA, 19 nt, Homo sapiens
  misc_RNA (1)...(19): siRNA sense strand
caacuaagcacccagaaag

SEQ ID NO: 1637719 - RNA, 19 nt, Homo sapiens
  misc_RNA (1)...(19): siRNA sense strand
gcuguuaccugcauagagu

SEQ ID NO: 1637720 - RNA, 19 nt, Homo sapiens
  misc_RNA (1)...(19): siRNA sense strand
caggagaaauacauaccua

SEQ ID NO: 1637721 - RNA, 19 nt, Homo sapiens
  misc_RNA (1)...(19): siRNA sense strand
aaaggaaacugugagauuc

SEQ ID NO: 1637722 - RNA, 19 nt, Homo sapiens
  misc_RNA (1)...(19): siRNA sense strand
gcacaauucugaggacaca

SEQ ID NO: 1637723 - RNA, 19 nt, Homo sapiens
  misc_RNA (1)...(19): siRNA sense strand
gggauuggcaccuacuaua

SEQ ID NO: 1637724 - RNA, 19 nt, Homo sapiens
  misc_RNA (1)...(19): siRNA sense strand
acuaauagauacacugcua

SEQ ID NO: 1637725 - RNA, 19 nt, Homo sapiens
  misc_RNA (1)...(19): siRNA sense strand
gagaaauguuagcuuggaa

SEQ ID NO: 1637726 - RNA, 19 nt, Homo sapiens
  misc_RNA (1)...(19): siRNA sense strand
guaccaagaccuaugagaa

SEQ ID NO: 1637727 - RNA, 19 nt, Homo sapiens
  misc_RNA (1)...(19): siRNA sense strand
ccgaauaccuucaccucuu

SEQ ID NO: 1637728 - RNA, 19 nt, Homo sapiens
  misc_RNA (1)...(19): siRNA sense strand
gagguucaguuacaucugu

SEQ ID NO: 1637729 - RNA, 19 nt, Homo sapiens
  misc_RNA (1)...(19): siRNA sense strand
caagcuaucuggaagacau

SEQ ID NO: 1637730 - RNA, 19 nt, Homo sapiens
  misc_RNA (1)...(19): siRNA sense strand
gcuggaugauuucaauuau

SEQ ID NO: 1637731 - RNA, 19 nt, Homo sapiens
  misc_RNA (1)...(19): siRNA sense strand
aagaagcgcugcuacaaca

SEQ ID NO: 1637732 - RNA, 19 nt, Homo sapiens
  misc_RNA (1)...(19): siRNA sense strand
guaaccaccugaccuucuu

SEQ ID NO: 1637733 - RNA, 19 nt, Homo sapiens
  misc_RNA (1)...(19): siRNA sense strand
gcacucacuuccaccugaa

SEQ ID NO: 1637734 - RNA, 19 nt, Homo sapiens
  misc_RNA (1)...(19): siRNA sense strand
ucucaucaauucccuuauu

SEQ ID NO: 1637735 - RNA, 19 nt, Homo sapiens
  misc_RNA (1)...(19): siRNA sense strand
guugaggaauuaaaggaaa

SEQ ID NO: 1637736 - RNA, 19 nt, Homo sapiens
  misc_RNA (1)...(19): siRNA sense strand
cuacuggucuguuacuaug

SEQ ID NO: 1637737 - RNA, 19 nt, Homo sapiens
  misc_RNA (1)...(19): siRNA sense strand
gaaaggcugacaagcaaga

SEQ ID NO: 1637738 - RNA, 19 nt, Homo sapiens
  misc_RNA (1)...(19): siRNA sense strand
gaagacacgaucaaacugu

SEQ ID NO: 1637739 - RNA, 19 nt, Homo sapiens
  misc_RNA (1)...(19): siRNA sense strand
gaugggaauuucucaccaa

SEQ ID NO: 1637740 - RNA, 19 nt, Homo sapiens
  misc_RNA (1)...(19): siRNA sense strand
auacauaccuacucuccaa

SEQ ID NO: 1637741 - RNA, 19 nt, Homo sapiens
  misc_RNA (1)...(19): siRNA sense strand
gaauuaaaggaaacuguga

SEQ ID NO: 1637742 - RNA, 19 nt, Homo sapiens
  misc_RNA (1)...(19): siRNA sense strand
caaaguggcugaaaguuua

SEQ ID NO: 1637743 - RNA, 19 nt, Homo sapiens
  misc_RNA (1)...(19): siRNA sense strand
gaagaaaucuggcaagagu

SEQ ID NO: 1637744 - RNA, 19 nt, Homo sapiens
  misc_RNA (1)...(19): siRNA sense strand
cgacagacauuguuugaaa

SEQ ID NO: 1637745 - RNA, 19 nt, Homo sapiens
  misc_RNA (1)...(19): siRNA sense strand
gaauaugacccuuugauaa

SEQ ID NO: 1637746 - RNA, 19 nt, Homo sapiens
  misc_RNA (1)...(19): siRNA sense strand
ugaagaaccuuuccauuga

SEQ ID NO: 1637747 - RNA, 19 nt, Homo sapiens
  misc_RNA (1)...(19): siRNA sense strand
uuacaaagaugcaagauga

SEQ ID NO: 1637748 - RNA, 19 nt, Homo sapiens
  misc_RNA (1)...(19): siRNA sense strand
ggagggagauauacauuug

SEQ ID NO: 1637749 - RNA, 19 nt, Homo sapiens
  misc_RNA (1)...(19): siRNA sense strand
gaagacaucauuacaaaga

SEQ ID NO: 1637750 - RNA, 19 nt, Homo sapiens
  misc_RNA (1)...(19): siRNA sense strand
ggacccaguugaagcaaua

SEQ ID NO: 1637751 - RNA, 19 nt, Homo sapiens
  misc_RNA (1)...(19): siRNA sense strand
ggaauaugacccuuugaua

SEQ ID NO: 1637752 - RNA, 19 nt, Homo sapiens
  misc_RNA (1)...(19): siRNA sense strand
gaagugggaauucaucuuu

SEQ ID NO: 1637753 - RNA, 19 nt, Homo sapiens
  misc_RNA (1)...(19): siRNA sense strand
gcaagcagaagcacaagua

SEQ ID NO: 1637754 - RNA, 19 nt, Homo sapiens
  misc_RNA (1)...(19): siRNA sense strand
gcacagaucgacagacauu

SEQ ID NO: 1637755 - RNA, 19 nt, Homo sapiens
  misc_RNA (1)...(19): siRNA sense strand
ggcuggaacuggcagauua

SEQ ID NO: 1637756 - RNA, 19 nt, Homo sapiens
  misc_RNA (1)...(19): siRNA sense strand
gaacacaacagaaauggau

SEQ ID NO: 1637757 - RNA, 19 nt, Homo sapiens
  misc_RNA (1)...(19): siRNA sense strand
gcuaugagauaaccaguca

SEQ ID NO: 1637758 - RNA, 19 nt, Homo sapiens
  misc_RNA (1)...(19): siRNA sense strand
gcaaagagcccagccaaca

SEQ ID NO: 1637759 - RNA, 19 nt, Homo sapiens
  misc_RNA (1)...(19): siRNA sense strand
ggagauauacauuugaaga

SEQ ID NO: 1637760 - RNA, 19 nt, Homo sapiens
  misc_RNA (1)...(19): siRNA sense strand
gaugaagagugacagcuau

SEQ ID NO: 1637761 - RNA, 19 nt, Homo sapiens
  misc_RNA (1)...(19): siRNA sense strand
ggacauccggaaacagaua

SEQ ID NO: 1637762 - RNA, 19 nt, Homo sapiens
  misc_RNA (1)...(19): siRNA sense strand
ccaaaguggcugaaaguuu

SEQ ID NO: 1637763 - RNA, 19 nt, Homo sapiens
  misc_RNA (1)...(19): siRNA sense strand
gaugcaagaugacaagaca

SEQ ID NO: 1637764 - RNA, 19 nt, Homo sapiens
  misc_RNA (1)...(19): siRNA sense strand
uccaagaucuuaagaaaca

SEQ ID NO: 1637765 - RNA, 19 nt, Homo sapiens
  misc_RNA (1)...(19): siRNA sense strand
gaagaaccuuuccauugag

SEQ ID NO: 1637766 - RNA, 19 nt, Homo sapiens
  misc_RNA (1)...(19): siRNA sense strand
uguccaagaucuuaagaaa

SEQ ID NO: 1637767 - RNA, 19 nt, Homo sapiens
  misc_RNA (1)...(19): siRNA sense strand
guacucagccaaccaauca

SEQ ID NO: 1637768 - RNA, 19 nt, Homo sapiens
  misc_RNA (1)...(19): siRNA sense strand
ggaacuggcagauuaugaa

SEQ ID NO: 1637769 - RNA, 19 nt, Homo sapiens
  misc_RNA (1)...(19): siRNA sense strand
aaagauggagggagauaua

SEQ ID NO: 1637770 - RNA, 19 nt, Homo sapiens
  misc_RNA (1)...(19): siRNA sense strand
ccaagaggguagaagaaau

SEQ ID NO: 1637771 - RNA, 19 nt, Homo sapiens
  misc_RNA (1)...(19): siRNA sense strand
caugaucguuuacugcaaa

SEQ ID NO: 1637772 - RNA, 19 nt, Homo sapiens
  misc_RNA (1)...(19): siRNA sense strand
gcgaugacguugcuuugug

SEQ ID NO: 1637773 - RNA, 19 nt, Homo sapiens
  misc_RNA (1)...(19): siRNA sense strand
ggaccaguuucuacgauuc

SEQ ID NO: 1637774 - RNA, 19 nt, Homo sapiens
  misc_RNA (1)...(19): siRNA sense strand
ugcaguggcuuaugaagaa

SEQ ID NO: 1637775 - RNA, 19 nt, Homo sapiens
  misc_RNA (1)...(19): siRNA sense strand
acauagagaugagcaaaga

SEQ ID NO: 1637776 - RNA, 19 nt, Homo sapiens
  misc_RNA (1)...(19): siRNA sense strand
ggacauagagaugagcaaa

SEQ ID NO: 1637777 - RNA, 19 nt, Homo sapiens
  misc_RNA (1)...(19): siRNA sense strand
gaggacauccggaaacaga

SEQ ID NO: 1637778 - RNA, 19 nt, Homo sapiens
  misc_RNA (1)...(19): siRNA sense strand
uagaagaaaucuggcaaga

SEQ ID NO: 1637779 - RNA, 19 nt, Homo sapiens
  misc_RNA (1)...(19): siRNA sense strand
cuacaucuuuccaaucuca

SEQ ID NO: 1637780 - RNA, 19 nt, Homo sapiens
  misc_RNA (1)...(19): siRNA sense strand
gaucagcgaugacguugcu

SEQ ID NO: 1637781 - RNA, 19 nt, Homo sapiens
  misc_RNA (1)...(19): siRNA sense strand
gaagcacaaguaaagauug

SEQ ID NO: 1637782 - RNA, 19 nt, Homo sapiens
  misc_RNA (1)...(19): siRNA sense strand
ucgaugagauauugaagga

SEQ ID NO: 1637783 - RNA, 19 nt, Homo sapiens
  misc_RNA (1)...(19): siRNA sense strand
aagcacaaguaaagauuga

SEQ ID NO: 1637784 - RNA, 19 nt, Homo sapiens
  misc_RNA (1)...(19): siRNA sense strand
ggaauucaucuuuaugcaa

SEQ ID NO: 1637785 - RNA, 19 nt, Homo sapiens
  misc_RNA (1)...(19): siRNA sense strand
ucagaacagucaagagcuu

SEQ ID NO: 1637786 - RNA, 19 nt, Homo sapiens
  misc_RNA (1)...(19): siRNA sense strand
gcgaggaagugggaauuca

SEQ ID NO: 1637787 - RNA, 19 nt, Homo sapiens
  misc_RNA (1)...(19): siRNA sense strand
ucaaaugcuuaccaggauu

SEQ ID NO: 1637788 - RNA, 19 nt, Homo sapiens
  misc_RNA (1)...(19): siRNA sense strand
ucuacaagcugaugaagag

SEQ ID NO: 1637789 - RNA, 19 nt, Homo sapiens
  misc_RNA (1)...(19): siRNA sense strand
gggcuucucuuucgaugag

SEQ ID NO: 1637790 - RNA, 19 nt, Homo sapiens
  misc_RNA (1)...(19): siRNA sense strand
gaacugcugggaaccugaa

SEQ ID NO: 1637791 - RNA, 19 nt, Homo sapiens
  misc_RNA (1)...(19): siRNA sense strand
agaaaucuggcaagaguuu

SEQ ID NO: 1637792 - RNA, 19 nt, Homo sapiens
  misc_RNA (1)...(19): siRNA sense strand
gggaccaguuucuacgauu

SEQ ID NO: 1637793 - RNA, 19 nt, Homo sapiens
  misc_RNA (1)...(19): siRNA sense strand
ggcuacaucuuuccaaucu

SEQ ID NO: 1637794 - RNA, 19 nt, Homo sapiens
  misc_RNA (1)...(19): siRNA sense strand
gucaaaugcuuaccaggau

SEQ ID NO: 1637795 - RNA, 19 nt, Homo sapiens
  misc_RNA (1)...(19): siRNA sense strand
acaagcugaugaagaguga

SEQ ID NO: 1637796 - RNA, 19 nt, Homo sapiens
  misc_RNA (1)...(19): siRNA sense strand
agacaagacagaaaggaaa

SEQ ID NO: 1637797 - RNA, 19 nt, Homo sapiens
  misc_RNA (1)...(19): siRNA sense strand
aagugggaauucaucuuua

SEQ ID NO: 1637798 - RNA, 19 nt, Homo sapiens
  misc_RNA (1)...(19): siRNA sense strand
gacauugugcaguggcuua

SEQ ID NO: 1637799 - RNA, 19 nt, Homo sapiens
  misc_RNA (1)...(19): siRNA sense strand
gaacgcacagaucgacaga

SEQ ID NO: 1637800 - RNA, 19 nt, Homo sapiens
  misc_RNA (1)...(19): siRNA sense strand
gggaauucaucuuuaugca

SEQ ID NO: 1637801 - RNA, 19 nt, Homo sapiens
  misc_RNA (1)...(19): siRNA sense strand
gcagaagcacaaguaaaga

SEQ ID NO: 1637802 - RNA, 19 nt, Homo sapiens
  misc_RNA (1)...(19): siRNA sense strand
caagaggguagaagaaauc

SEQ ID NO: 1637803 - RNA, 19 nt, Homo sapiens
  misc_RNA (1)...(19): siRNA sense strand
augaagaaccuuuccauug

SEQ ID NO: 1637804 - RNA, 19 nt, Homo sapiens
  misc_RNA (1)...(19): siRNA sense strand
uaugagauaaccagucaaa

SEQ ID NO: 1637805 - RNA, 19 nt, Homo sapiens
  misc_RNA (1)...(19): siRNA sense strand
ucacagguacugacauugu

SEQ ID NO: 1637806 - RNA, 19 nt, Homo sapiens
  misc_RNA (1)...(19): siRNA sense strand
ggaagugggaauucaucuu

SEQ ID NO: 1637807 - RNA, 19 nt, Homo sapiens
  misc_RNA (1)...(19): siRNA sense strand
uguaagaggacaaugcaaa

SEQ ID NO: 1637808 - RNA, 19 nt, Homo sapiens
  misc_RNA (1)...(19): siRNA sense strand
gauggcaccuuuuaucguu

SEQ ID NO: 1637809 - RNA, 19 nt, Homo sapiens
  misc_RNA (1)...(19): siRNA sense strand
caagcagaagcacaaguaa

SEQ ID NO: 1637810 - RNA, 19 nt, Homo sapiens
  misc_RNA (1)...(19): siRNA sense strand
ucaaagauggagggagaua

SEQ ID NO: 1637811 - RNA, 19 nt, Homo sapiens
  misc_RNA (1)...(19): siRNA sense strand
gagauaaccagucaaaaug

SEQ ID NO: 1637812 - RNA, 19 nt, Homo sapiens
  misc_RNA (1)...(19): siRNA sense strand
gccaagaggguagaagaaa

SEQ ID NO: 1637813 - RNA, 19 nt, Homo sapiens
  misc_RNA (1)...(19): siRNA sense strand
uguggaauaugacccuuug

SEQ ID NO: 1637814 - RNA, 19 nt, Homo sapiens
  misc_RNA (1)...(19): siRNA sense strand
gaucgacagacauuguuug

SEQ ID NO: 1637815 - RNA, 19 nt, Homo sapiens
  misc_RNA (1)...(19): siRNA sense strand
agaaauggauauccgaaaa

SEQ ID NO: 1637816 - RNA, 19 nt, Homo sapiens
  misc_RNA (1)...(19): siRNA sense strand
ggaaaauuuuggauaguca

SEQ ID NO: 1637817 - RNA, 19 nt, Homo sapiens
  misc_RNA (1)...(19): siRNA sense strand
gaacuggcagauuaugaag

SEQ ID NO: 1637818 - RNA, 19 nt, Homo sapiens
  misc_RNA (1)...(19): siRNA sense strand
ggcagauuaugaagcagaa

SEQ ID NO: 1637819 - RNA, 19 nt, Homo sapiens
  misc_RNA (1)...(19): siRNA sense strand
agaggacaaugcaaaauaa

SEQ ID NO: 1637820 - RNA, 19 nt, Homo sapiens
  misc_RNA (1)...(19): siRNA sense strand
agggagauauacauuugaa

SEQ ID NO: 1637821 - RNA, 19 nt, Homo sapiens
  misc_RNA (1)...(19): siRNA sense strand
caaagaugcaagaugacaa

SEQ ID NO: 1637822 - RNA, 19 nt, Homo sapiens
  misc_RNA (1)...(19): siRNA sense strand
gcagaaaacuuagcaagac

SEQ ID NO: 1637823 - RNA, 19 nt, Homo sapiens
  misc_RNA (1)...(19): siRNA sense strand
uaugccaucuaucucugua

SEQ ID NO: 1637824 - RNA, 19 nt, Homo sapiens
  misc_RNA (1)...(19): siRNA sense strand
cggaacaauauguggaaua

SEQ ID NO: 1637825 - RNA, 19 nt, Homo sapiens
  misc_RNA (1)...(19): siRNA sense strand
uguauggcgugacugaaga

SEQ ID NO: 1637826 - RNA, 19 nt, Homo sapiens
  misc_RNA (1)...(19): siRNA sense strand
aguaaagauugaccggaaa

SEQ ID NO: 1637827 - RNA, 19 nt, Homo sapiens
  misc_RNA (1)...(19): siRNA sense strand
gaaacaaccccuacaggau

SEQ ID NO: 1637828 - RNA, 19 nt, Homo sapiens
  misc_RNA (1)...(19): siRNA sense strand
acgcacagaucgacagaca

SEQ ID NO: 1637829 - RNA, 19 nt, Homo sapiens
  misc_RNA (1)...(19): siRNA sense strand
agaagcacaaguaaagauu

SEQ ID NO: 1637830 - RNA, 19 nt, Homo sapiens
  misc_RNA (1)...(19): siRNA sense strand
ugaugaagagugacagcua

SEQ ID NO: 1637831 - RNA, 19 nt, Homo sapiens
  misc_RNA (1)...(19): siRNA sense strand
ccggaaacagauaacauuu

SEQ ID NO: 1637832 - RNA, 19 nt, Homo sapiens
  misc_RNA (1)...(19): siRNA sense strand
gaagagucccaggcacaga

SEQ ID NO: 1637833 - RNA, 19 nt, Homo sapiens
  misc_RNA (1)...(19): siRNA sense strand
aaaugucgacguuugaaga

SEQ ID NO: 1637834 - RNA, 19 nt, Homo sapiens
  misc_RNA (1)...(19): siRNA sense strand
cagaaauggauauccgaaa

SEQ ID NO: 1637835 - RNA, 19 nt, Homo sapiens
  misc_RNA (1)...(19): siRNA sense strand
gugcaguggcuuaugaaga

SEQ ID NO: 1637836 - RNA, 19 nt, Homo sapiens
  misc_RNA (1)...(19): siRNA sense strand
gagggagauauacauuuga

SEQ ID NO: 1637837 - RNA, 19 nt, Homo sapiens
  misc_RNA (1)...(19): siRNA sense strand
gacauccggaaacagauaa

SEQ ID NO: 1637838 - RNA, 19 nt, Homo sapiens
  misc_RNA (1)...(19): siRNA sense strand
cagaagcacaaguaaagau

SEQ ID NO: 1637839 - RNA, 19 nt, Homo sapiens
  misc_RNA (1)...(19): siRNA sense strand
agugggaauucaucuuuau

SEQ ID NO: 1637840 - RNA, 19 nt, Homo sapiens
  misc_RNA (1)...(19): siRNA sense strand
uaugaagaaccuuuccauu

SEQ ID NO: 1637841 - RNA, 19 nt, Homo sapiens
  misc_RNA (1)...(19): siRNA sense strand
ggccaagaggguagaagaa

SEQ ID NO: 1637842 - RNA, 19 nt, Homo sapiens
  misc_RNA (1)...(19): siRNA sense strand
caacacugccuuugaauua

SEQ ID NO: 1637843 - RNA, 19 nt, Homo sapiens
  misc_RNA (1)...(19): siRNA sense strand
ccagaaauguguuuguauu

SEQ ID NO: 1637844 - RNA, 19 nt, Homo sapiens
  misc_RNA (1)...(19): siRNA sense strand
gaaauguguuuguauugug

SEQ ID NO: 1637845 - RNA, 19 nt, Homo sapiens
  misc_RNA (1)...(19): siRNA sense strand
gaagggccgucuaucaauc

SEQ ID NO: 1637846 - RNA, 19 nt, Homo sapiens
  misc_RNA (1)...(19): siRNA sense strand
caaucaauguguaaaccua

SEQ ID NO: 1637847 - RNA, 19 nt, Homo sapiens
  misc_RNA (1)...(19): siRNA sense strand
auacaacacugccuuugaa

SEQ ID NO: 1637848 - RNA, 19 nt, Homo sapiens
  misc_RNA (1)...(19): siRNA sense strand
gagaacagcccacauugca

SEQ ID NO: 1637849 - RNA, 19 nt, Homo sapiens
  misc_RNA (1)...(19): siRNA sense strand
uuacugggacuauuaauga

SEQ ID NO: 1637850 - RNA, 19 nt, Homo sapiens
  misc_RNA (1)...(19): siRNA sense strand
gaggaagggccgucuauca

SEQ ID NO: 1637851 - RNA, 19 nt, Homo sapiens
  misc_RNA (1)...(19): siRNA sense strand
acacugccuuugaauuaaa

SEQ ID NO: 1637852 - RNA, 19 nt, Homo sapiens
  misc_RNA (1)...(19): siRNA sense strand
ccuauuacugggacuauua

SEQ ID NO: 1637853 - RNA, 19 nt, Homo sapiens
  misc_RNA (1)...(19): siRNA sense strand
ggaagggccgucuaucaau

SEQ ID NO: 1637854 - RNA, 19 nt, Homo sapiens
  misc_RNA (1)...(19): siRNA sense strand
gaggggaucccauuuauuu

SEQ ID NO: 1637855 - RNA, 19 nt, Homo sapiens
  misc_RNA (1)...(19): siRNA sense strand
gaccagcccaucauucuga

SEQ ID NO: 1637856 - RNA, 19 nt, Homo sapiens
  misc_RNA (1)...(19): siRNA sense strand
ggccgucuaucaaucaaug

SEQ ID NO: 1637857 - RNA, 19 nt, Homo sapiens
  misc_RNA (1)...(19): siRNA sense strand
gcagaggggaucccauuua

SEQ ID NO: 1637858 - RNA, 19 nt, Homo sapiens
  misc_RNA (1)...(19): siRNA sense strand
cugggacuauuaaugauuu

SEQ ID NO: 1637859 - RNA, 19 nt, Homo sapiens
  misc_RNA (1)...(19): siRNA sense strand
cagcccacauugcagcuaa

SEQ ID NO: 1637860 - RNA, 19 nt, Homo sapiens
  misc_RNA (1)...(19): siRNA sense strand
gugagaagguuggagaaca

SEQ ID NO: 1637861 - RNA, 19 nt, Homo sapiens
  misc_RNA (1)...(19): siRNA sense strand
cagaaauguguuuguauug

SEQ ID NO: 1637862 - RNA, 19 nt, Homo sapiens
  misc_RNA (1)...(19): siRNA sense strand
cauacaacacugccuuuga

SEQ ID NO: 1637863 - RNA, 19 nt, Homo sapiens
  misc_RNA (1)...(19): siRNA sense strand
gagagaccagcccaucauu

SEQ ID NO: 1637864 - RNA, 19 nt, Homo sapiens
  misc_RNA (1)...(19): siRNA sense strand
gagaccagcccaucauucu

SEQ ID NO: 1637865 - RNA, 19 nt, Homo sapiens
  misc_RNA (1)...(19): siRNA sense strand
aauccagaauccagaaaug

SEQ ID NO: 1637866 - RNA, 19 nt, Homo sapiens
  misc_RNA (1)...(19): siRNA sense strand
gucuaucaaucaaugugua

SEQ ID NO: 1637867 - RNA, 19 nt, Homo sapiens
  misc_RNA (1)...(19): siRNA sense strand
ccacgaagugacaguguga

SEQ ID NO: 1637868 - RNA, 19 nt, Homo sapiens
  misc_RNA (1)...(19): siRNA sense strand
gaauccagaauccagaaau

SEQ ID NO: 1637869 - RNA, 19 nt, Homo sapiens
  misc_RNA (1)...(19): siRNA sense strand
guuaucacaugcaaguauc

SEQ ID NO: 1637870 - RNA, 19 nt, Homo sapiens
  misc_RNA (1)...(19): siRNA sense strand
gcaguuccacgaagugaca

SEQ ID NO: 1637871 - RNA, 19 nt, Homo sapiens
  misc_RNA (1)...(19): siRNA sense strand
ggaauccagaauccagaaa

SEQ ID NO: 1637872 - RNA, 19 nt, Homo sapiens
  misc_RNA (1)...(19): siRNA sense strand
ugagaagguuggagaacag

SEQ ID NO: 1637873 - RNA, 19 nt, Homo sapiens
  misc_RNA (1)...(19): siRNA sense strand
aacacugccuuugaauuaa

SEQ ID NO: 1637874 - RNA, 19 nt, Homo sapiens
  misc_RNA (1)...(19): siRNA sense strand
gcuguuaucacaugcaagu

SEQ ID NO: 1637875 - RNA, 19 nt, Homo sapiens
  misc_RNA (1)...(19): siRNA sense strand
ccuccacccuugagucugu

SEQ ID NO: 1637876 - RNA, 19 nt, Homo sapiens
  misc_RNA (1)...(19): siRNA sense strand
ggagaacagcccacauugc

SEQ ID NO: 1637877 - RNA, 19 nt, Homo sapiens
  misc_RNA (1)...(19): siRNA sense strand
uaaaagagcagaagaucau

SEQ ID NO: 1637878 - RNA, 19 nt, Homo sapiens
  misc_RNA (1)...(19): siRNA sense strand
cagaggggaucccauuuau

SEQ ID NO: 1637879 - RNA, 19 nt, Homo sapiens
  misc_RNA (1)...(19): siRNA sense strand
auccagaaauguguuugua

SEQ ID NO: 1637880 - RNA, 19 nt, Homo sapiens
  misc_RNA (1)...(19): siRNA sense strand
ccagaauccagaaaugugu

SEQ ID NO: 1637881 - RNA, 19 nt, Homo sapiens
  misc_RNA (1)...(19): siRNA sense strand
ucagaaccuuguggcaguu

SEQ ID NO: 1637882 - RNA, 19 nt, Homo sapiens
  misc_RNA (1)...(19): siRNA sense strand
acaacacugccuuugaauu

SEQ ID NO: 1637883 - RNA, 19 nt, Homo sapiens
  misc_RNA (1)...(19): siRNA sense strand
gggaauccagaauccagaa

SEQ ID NO: 1637884 - RNA, 19 nt, Homo sapiens
  misc_RNA (1)...(19): siRNA sense strand
aggaagggccgucuaucaa

SEQ ID NO: 1637885 - RNA, 19 nt, Homo sapiens
  misc_RNA (1)...(19): siRNA sense strand
cuugggaagucauacaaca

SEQ ID NO: 1637886 - RNA, 19 nt, Homo sapiens
  misc_RNA (1)...(19): siRNA sense strand
ccacauugcagcuaaaaga

SEQ ID NO: 1637887 - RNA, 19 nt, Homo sapiens
  misc_RNA (1)...(19): siRNA sense strand
cuauuacugggacuauuaa

SEQ ID NO: 1637888 - RNA, 19 nt, Homo sapiens
  misc_RNA (1)...(19): siRNA sense strand
uucauugccuccuccaaga

SEQ ID NO: 1637889 - RNA, 19 nt, Homo sapiens
  misc_RNA (1)...(19): siRNA sense strand
cacuguugcuguuaucaca

SEQ ID NO: 1637890 - RNA, 19 nt, Homo sapiens
  misc_RNA (1)...(19): siRNA sense strand
guguuuguauugugagaag

SEQ ID NO: 1637891 - RNA, 19 nt, Homo sapiens
  misc_RNA (1)...(19): siRNA sense strand
gcccaucauucugacuuca

SEQ ID NO: 1637892 - RNA, 19 nt, Homo sapiens
  misc_RNA (1)...(19): siRNA sense strand
ggaacaagcucaugcaaug

SEQ ID NO: 1637893 - RNA, 19 nt, Homo sapiens
  misc_RNA (1)...(19): siRNA sense strand
gaacaaagcgcuuaagugu

SEQ ID NO: 1637894 - RNA, 19 nt, Homo sapiens
  misc_RNA (1)...(19): siRNA sense strand
ggagauaguggaauuaaua

SEQ ID NO: 1637895 - RNA, 19 nt, Homo sapiens
  misc_RNA (1)...(19): siRNA sense strand
gaacaugggaagaguauuu

SEQ ID NO: 1637896 - RNA, 19 nt, Homo sapiens
  misc_RNA (1)...(19): siRNA sense strand
gauaaucuauguagcaaga

SEQ ID NO: 1637897 - RNA, 19 nt, Homo sapiens
  misc_RNA (1)...(19): siRNA sense strand
aaacacaucuucccuuuca

SEQ ID NO: 1637898 - RNA, 19 nt, Homo sapiens
  misc_RNA (1)...(19): siRNA sense strand
acaaagcgcuuaaguguca

SEQ ID NO: 1637899 - RNA, 19 nt, Homo sapiens
  misc_RNA (1)...(19): siRNA sense strand
gaaaacacaucuucccuuu

SEQ ID NO: 1637900 - RNA, 19 nt, Homo sapiens
  misc_RNA (1)...(19): siRNA sense strand
acaacaugguguccuauua

SEQ ID NO: 1637901 - RNA, 19 nt, Homo sapiens
  misc_RNA (1)...(19): siRNA sense strand
ggaagaaauuagaugacaa

SEQ ID NO: 1637902 - RNA, 19 nt, Homo sapiens
  misc_RNA (1)...(19): siRNA sense strand
gaagcuggcagaauuuauu

SEQ ID NO: 1637903 - RNA, 19 nt, Homo sapiens
  misc_RNA (1)...(19): siRNA sense strand
caagaaaucccaaggacaa

SEQ ID NO: 1637904 - RNA, 19 nt, Homo sapiens
  misc_RNA (1)...(19): siRNA sense strand
gggauaagaucuggaacuu

SEQ ID NO: 1637905 - RNA, 19 nt, Homo sapiens
  misc_RNA (1)...(19): siRNA sense strand
cagacuaacuuuccacuuc

SEQ ID NO: 1637906 - RNA, 19 nt, Homo sapiens
  misc_RNA (1)...(19): siRNA sense strand
gaugacaaaguucuagaua

SEQ ID NO: 1637907 - RNA, 19 nt, Homo sapiens
  misc_RNA (1)...(19): siRNA sense strand
gaacccaaagcaugaaauu

SEQ ID NO: 1637908 - RNA, 19 nt, Homo sapiens
  misc_RNA (1)...(19): siRNA sense strand
ggcaaacuauucaucgauu

SEQ ID NO: 1637909 - RNA, 19 nt, Homo sapiens
  misc_RNA (1)...(19): siRNA sense strand
gagauuugaugaagauuac

SEQ ID NO: 1637910 - RNA, 19 nt, Homo sapiens
  misc_RNA (1)...(19): siRNA sense strand
gggaagaaauuagaugaca

SEQ ID NO: 1637911 - RNA, 19 nt, Homo sapiens
  misc_RNA (1)...(19): siRNA sense strand
ugagagauuugaugaagau

SEQ ID NO: 1637912 - RNA, 19 nt, Homo sapiens
  misc_RNA (1)...(19): siRNA sense strand
gcaaacuauucaucgauuc

SEQ ID NO: 1637913 - RNA, 19 nt, Homo sapiens
  misc_RNA (1)...(19): siRNA sense strand
caaacaccguauucucuau

SEQ ID NO: 1637914 - RNA, 19 nt, Homo sapiens
  misc_RNA (1)...(19): siRNA sense strand
gcgcuuaagugucaacuac

SEQ ID NO: 1637915 - RNA, 19 nt, Homo sapiens
  misc_RNA (1)...(19): siRNA sense strand
ccugaugaccugcuuauuu

SEQ ID NO: 1637916 - RNA, 19 nt, Homo sapiens
  misc_RNA (1)...(19): siRNA sense strand
gaugaagauuacaagaaga

SEQ ID NO: 1637917 - RNA, 19 nt, Homo sapiens
  misc_RNA (1)...(19): siRNA sense strand
ggaacaaagcgcuuaagug

SEQ ID NO: 1637918 - RNA, 19 nt, Homo sapiens
  misc_RNA (1)...(19): siRNA sense strand
cuuaggaucugguuuggaa

SEQ ID NO: 1637919 - RNA, 19 nt, Homo sapiens
  misc_RNA (1)...(19): siRNA sense strand
caacauggacucaggagau

SEQ ID NO: 1637920 - RNA, 19 nt, Homo sapiens
  misc_RNA (1)...(19): siRNA sense strand
cugaugaccugcuuauuuc

SEQ ID NO: 1637921 - RNA, 19 nt, Homo sapiens
  misc_RNA (1)...(19): siRNA sense strand
uucagaagcuggcagaauu

SEQ ID NO: 1637922 - RNA, 19 nt, Homo sapiens
  misc_RNA (1)...(19): siRNA sense strand
ugaugaagauuacaagaag

SEQ ID NO: 1637923 - RNA, 19 nt, Homo sapiens
  misc_RNA (1)...(19): siRNA sense strand
agaauccaauggcaaacua

SEQ ID NO: 1637924 - RNA, 19 nt, Homo sapiens
  misc_RNA (1)...(19): siRNA sense strand
gaagaagaacccaaagcau

SEQ ID NO: 1637925 - RNA, 19 nt, Homo sapiens
  misc_RNA (1)...(19): siRNA sense strand
agaagaacccaaagcauga

SEQ ID NO: 1637926 - RNA, 19 nt, Homo sapiens
  misc_RNA (1)...(19): siRNA sense strand
cagaauuuauugggaagaa

SEQ ID NO: 1637927 - RNA, 19 nt, Homo sapiens
  misc_RNA (1)...(19): siRNA sense strand
ccaccauccuugcuagaga

SEQ ID NO: 1637928 - RNA, 19 nt, Homo sapiens
  misc_RNA (1)...(19): siRNA sense strand
cuauuaccauuuccaaaga

SEQ ID NO: 1637929 - RNA, 19 nt, Homo sapiens
  misc_RNA (1)...(19): siRNA sense strand
ugaaggugauguggagaaa

SEQ ID NO: 1637930 - RNA, 19 nt, Homo sapiens
  misc_RNA (1)...(19): siRNA sense strand
gaaugagagauuugaugaa

SEQ ID NO: 1637931 - RNA, 19 nt, Homo sapiens
  misc_RNA (1)...(19): siRNA sense strand
agaaugagagauuugauga

SEQ ID NO: 1637932 - RNA, 19 nt, Homo sapiens
  misc_RNA (1)...(19): siRNA sense strand
ucaacuacgugaagggaau

SEQ ID NO: 1637933 - RNA, 19 nt, Homo sapiens
  misc_RNA (1)...(19): siRNA sense strand
gacaaacaccguauucucu

SEQ ID NO: 1637934 - RNA, 19 nt, Homo sapiens
  misc_RNA (1)...(19): siRNA sense strand
gugggaagccaaagacaaa

SEQ ID NO: 1637935 - RNA, 19 nt, Homo sapiens
  misc_RNA (1)...(19): siRNA sense strand
gaugaccugcuuauuucua

SEQ ID NO: 1637936 - RNA, 19 nt, Homo sapiens
  misc_RNA (1)...(19): siRNA sense strand
gaagaacccaaagcaugaa

SEQ ID NO: 1637937 - RNA, 19 nt, Homo sapiens
  misc_RNA (1)...(19): siRNA sense strand
caaagacaaacaccguauu

SEQ ID NO: 1637938 - RNA, 19 nt, Homo sapiens
  misc_RNA (1)...(19): siRNA sense strand
aacauggacucaggagaua

SEQ ID NO: 1637939 - RNA, 19 nt, Homo sapiens
  misc_RNA (1)...(19): siRNA sense strand
caucaacgauuuccuuucc

SEQ ID NO: 1637940 - RNA, 19 nt, Homo sapiens
  misc_RNA (1)...(19): siRNA sense strand
ccugugacaucugggauaa

SEQ ID NO: 1637941 - RNA, 19 nt, Homo sapiens
  misc_RNA (1)...(19): siRNA sense strand
cagaagcuggcagaauuua

SEQ ID NO: 1637942 - RNA, 19 nt, Homo sapiens
  misc_RNA (1)...(19): siRNA sense strand
acaaacaccguauucucua

SEQ ID NO: 1637943 - RNA, 19 nt, Homo sapiens
  misc_RNA (1)...(19): siRNA sense strand
ugugacaucugggauaaga

SEQ ID NO: 1637944 - RNA, 19 nt, Homo sapiens
  misc_RNA (1)...(19): siRNA sense strand
caacaugguguccuauuac

SEQ ID NO: 1637945 - RNA, 19 nt, Homo sapiens
  misc_RNA (1)...(19): siRNA sense strand
aaugagagauuugaugaag

SEQ ID NO: 1637946 - RNA, 19 nt, Homo sapiens
  misc_RNA (1)...(19): siRNA sense strand
ccacuccauuucuccauuc

SEQ ID NO: 1637947 - RNA, 19 nt, Homo sapiens
  misc_RNA (1)...(19): siRNA sense strand
augaggacaugaagaagaa

SEQ ID NO: 1637948 - RNA, 19 nt, Homo sapiens
  misc_RNA (1)...(19): siRNA sense strand
gguguccuauuaccauuuc

SEQ ID NO: 1637949 - RNA, 19 nt, Homo sapiens
  misc_RNA (1)...(19): siRNA sense strand
caccauccuugcuagagaa

SEQ ID NO: 1637950 - RNA, 19 nt, Homo sapiens
  misc_RNA (1)...(19): siRNA sense strand
ccaaagacaaacaccguau

SEQ ID NO: 1637951 - RNA, 19 nt, Homo sapiens
  misc_RNA (1)...(19): siRNA sense strand
cucaggagauaguggaauu

SEQ ID NO: 1637952 - RNA, 19 nt, Homo sapiens
  misc_RNA (1)...(19): siRNA sense strand
ucagaagcuggcagaauuu

SEQ ID NO: 1637953 - RNA, 19 nt, Homo sapiens
  misc_RNA (1)...(19): siRNA sense strand
ugaagaagaacccaaagca

SEQ ID NO: 1637954 - RNA, 19 nt, Homo sapiens
  misc_RNA (1)...(19): siRNA sense strand
ucuaugaggacaugaagaa

SEQ ID NO: 1637955 - RNA, 19 nt, Homo sapiens
  misc_RNA (1)...(19): siRNA sense strand
gauggaacaaagcgcuuaa

SEQ ID NO: 1637956 - RNA, 19 nt, Homo sapiens
  misc_RNA (1)...(19): siRNA sense strand
caggagauaguggaauuaa

SEQ ID NO: 1637957 - RNA, 19 nt, Homo sapiens
  misc_RNA (1)...(19): siRNA sense strand
aaagacaaacaccguauuc

SEQ ID NO: 1637958 - RNA, 19 nt, Homo sapiens
  misc_RNA (1)...(19): siRNA sense strand
gaaaucccaaggacaacau

SEQ ID NO: 1637959 - RNA, 19 nt, Homo sapiens
  misc_RNA (1)...(19): siRNA sense strand
cauuacacuucguuugaug

SEQ ID NO: 1637960 - RNA, 19 nt, Homo sapiens
  misc_RNA (1)...(19): siRNA sense strand
cagaaugagagauuugaug

SEQ ID NO: 1637961 - RNA, 19 nt, Homo sapiens
  misc_RNA (1)...(19): siRNA sense strand
guaaacgggcaccgacuca

SEQ ID NO: 1637962 - RNA, 19 nt, Homo sapiens
  misc_RNA (1)...(19): siRNA sense strand
ccaggaacaugggaagagu

SEQ ID NO: 1637963 - RNA, 19 nt, Homo sapiens
  misc_RNA (1)...(19): siRNA sense strand
ccauuacacuucguuugau

SEQ ID NO: 1637964 - RNA, 19 nt, Homo sapiens
  misc_RNA (1)...(19): siRNA sense strand
uaugaggacaugaagaaga

SEQ ID NO: 1637965 - RNA, 19 nt, Homo sapiens
  misc_RNA (1)...(19): siRNA sense strand
gcuuaagugucaacuacgu

SEQ ID NO: 1637966 - RNA, 19 nt, Homo sapiens
  misc_RNA (1)...(19): siRNA sense strand
gagauaguggaauuaauac

SEQ ID NO: 1637967 - RNA, 19 nt, Homo sapiens
  misc_RNA (1)...(19): siRNA sense strand
acgauuuccuuuccucgaa

SEQ ID NO: 1637968 - RNA, 19 nt, Homo sapiens
  misc_RNA (1)...(19): siRNA sense strand
ucaccguggcucagaauga

SEQ ID NO: 1637969 - RNA, 19 nt, Homo sapiens
  misc_RNA (1)...(19): siRNA sense strand
gagacuggaagaaacacuu

SEQ ID NO: 1637970 - RNA, 19 nt, Homo sapiens
  misc_RNA (1)...(19): siRNA sense strand
gauggugggaagccaaaga

SEQ ID NO: 1637971 - RNA, 19 nt, Homo sapiens
  misc_RNA (1)...(19): siRNA sense strand
ggaagaguauuuugagacu

SEQ ID NO: 1637972 - RNA, 19 nt, Homo sapiens
  misc_RNA (1)...(19): siRNA sense strand
ccuauuaccauuuccaaag

SEQ ID NO: 1637973 - RNA, 19 nt, Homo sapiens
  misc_RNA (1)...(19): siRNA sense strand
cuccauuucuccauucaug

SEQ ID NO: 1637974 - RNA, 19 nt, Homo sapiens
  misc_RNA (1)...(19): siRNA sense strand
ggugggaagccaaagacaa

SEQ ID NO: 1637975 - RNA, 19 nt, Homo sapiens
  misc_RNA (1)...(19): siRNA sense strand
cguauucucuaucucuucu

SEQ ID NO: 1637976 - RNA, 19 nt, Homo sapiens
  misc_RNA (1)...(19): siRNA sense strand
ucaggagauaguggaauua

SEQ ID NO: 1637977 - RNA, 19 nt, Homo sapiens
  misc_RNA (1)...(19): siRNA sense strand
uucucuaucucuucuauga

SEQ ID NO: 1637978 - RNA, 19 nt, Homo sapiens
  misc_RNA (1)...(19): siRNA sense strand
gaacaagcucaugcaaugc

SEQ ID NO: 1637979 - RNA, 19 nt, Homo sapiens
  misc_RNA (1)...(19): siRNA sense strand
gugggagacuggaagaaac

SEQ ID NO: 1637980 - RNA, 19 nt, Homo sapiens
  misc_RNA (1)...(19): siRNA sense strand
caucgauuccugcugaaau

SEQ ID NO: 1637981 - RNA, 19 nt, Homo sapiens
  misc_RNA (1)...(19): siRNA sense strand
caugaaacagaauccaaug

SEQ ID NO: 1637982 - RNA, 19 nt, Homo sapiens
  misc_RNA (1)...(19): siRNA sense strand
acacuucguuugaugucau

SEQ ID NO: 1637983 - RNA, 19 nt, Homo sapiens
  misc_RNA (1)...(19): siRNA sense strand
uccauuacacuucguuuga

SEQ ID NO: 1637984 - RNA, 19 nt, Homo sapiens
  misc_RNA (1)...(19): siRNA sense strand
agacaaacaccguauucuc

SEQ ID NO: 1637985 - RNA, 19 nt, Homo sapiens
  misc_RNA (1)...(19): siRNA sense strand
gaauccaauggcaaacuau

SEQ ID NO: 1637986 - RNA, 19 nt, Homo sapiens
  misc_RNA (1)...(19): siRNA sense strand
uagcaagaaaucccaagga

SEQ ID NO: 1637987 - RNA, 19 nt, Homo sapiens
  misc_RNA (1)...(19): siRNA sense strand
acugauaccagacuaacuu

SEQ ID NO: 1637988 - RNA, 19 nt, Homo sapiens
  misc_RNA (1)...(19): siRNA sense strand
ucaugaaacagaauccaau

SEQ ID NO: 1637989 - RNA, 19 nt, Homo sapiens
  misc_RNA (1)...(19): siRNA sense strand
acaugaagaagaacccaaa

SEQ ID NO: 1637990 - RNA, 19 nt, Homo sapiens
  misc_RNA (1)...(19): siRNA sense strand
caacuacgugaagggaauu

SEQ ID NO: 1637991 - RNA, 19 nt, Homo sapiens
  misc_RNA (1)...(19): siRNA sense strand
agaagaaaaugacugauac

SEQ ID NO: 1637992 - RNA, 19 nt, Homo sapiens
  misc_RNA (1)...(19): siRNA sense strand
gaacucugauccaguauau

SEQ ID NO: 1637993 - RNA, 19 nt, Homo sapiens
  misc_RNA (1)...(19): siRNA sense strand
ggacagauacucagaaaga

SEQ ID NO: 1637994 - RNA, 19 nt, Homo sapiens
  misc_RNA (1)...(19): siRNA sense strand
gaaggaacuuguacaaaca

SEQ ID NO: 1637995 - RNA, 19 nt, Homo sapiens
  misc_RNA (1)...(19): siRNA sense strand
caaauaaacuggacaccau

SEQ ID NO: 1637996 - RNA, 19 nt, Homo sapiens
  misc_RNA (1)...(19): siRNA sense strand
ggaggaagguuguggacuu

SEQ ID NO: 1637997 - RNA, 19 nt, Homo sapiens
  misc_RNA (1)...(19): siRNA sense strand
ggaaaguggccacagauaa

SEQ ID NO: 1637998 - RNA, 19 nt, Homo sapiens
  misc_RNA (1)...(19): siRNA sense strand
gaaaguggccacagauaau

SEQ ID NO: 1637999 - RNA, 19 nt, Homo sapiens
  misc_RNA (1)...(19): siRNA sense strand
gaagggaggagagaagaua

SEQ ID NO: 1638000 - RNA, 19 nt, Homo sapiens
  misc_RNA (1)...(19): siRNA sense strand
ccacagguuugcagaaaug

SEQ ID NO: 1638001 - RNA, 19 nt, Homo sapiens
  misc_RNA (1)...(19): siRNA sense strand
gaucagacacauuucgaaa

SEQ ID NO: 1638002 - RNA, 19 nt, Homo sapiens
  misc_RNA (1)...(19): siRNA sense strand
cuucaaaccuggugcauuc

SEQ ID NO: 1638003 - RNA, 19 nt, Homo sapiens
  misc_RNA (1)...(19): siRNA sense strand
ggaccugccuaauuaccuu

SEQ ID NO: 1638004 - RNA, 19 nt, Homo sapiens
  misc_RNA (1)...(19): siRNA sense strand
ccagcuggcuuucaagaug

SEQ ID NO: 1638005 - RNA, 19 nt, Homo sapiens
  misc_RNA (1)...(19): siRNA sense strand
ggagagaagauagguauug

SEQ ID NO: 1638006 - RNA, 19 nt, Homo sapiens
  misc_RNA (1)...(19): siRNA sense strand
agaaggaacuuguacaaac

SEQ ID NO: 1638007 - RNA, 19 nt, Homo sapiens
  misc_RNA (1)...(19): siRNA sense strand
gaggagagaagauagguau

SEQ ID NO: 1638008 - RNA, 19 nt, Homo sapiens
  misc_RNA (1)...(19): siRNA sense strand
gaagacauguuuucacugu

SEQ ID NO: 1638009 - RNA, 19 nt, Homo sapiens
  misc_RNA (1)...(19): siRNA sense strand
ggaagccuguucgcaagaa

SEQ ID NO: 1638010 - RNA, 19 nt, Homo sapiens
  misc_RNA (1)...(19): siRNA sense strand
ucagaaagagccaggauga

SEQ ID NO: 1638011 - RNA, 19 nt, Homo sapiens
  misc_RNA (1)...(19): siRNA sense strand
ggaacucugauccaguaua

SEQ ID NO: 1638012 - RNA, 19 nt, Homo sapiens
  misc_RNA (1)...(19): siRNA sense strand
ccaggauucucgcaggaaa

SEQ ID NO: 1638013 - RNA, 19 nt, Homo sapiens
  misc_RNA (1)...(19): siRNA sense strand
ggaaaacaguagaagaaau

SEQ ID NO: 1638014 - RNA, 19 nt, Homo sapiens
  misc_RNA (1)...(19): siRNA sense strand
ggggaacucugauccagua

SEQ ID NO: 1638015 - RNA, 19 nt, Homo sapiens
  misc_RNA (1)...(19): siRNA sense strand
gauagguauugcggaguuu

SEQ ID NO: 1638016 - RNA, 19 nt, Homo sapiens
  misc_RNA (1)...(19): siRNA sense strand
gagagaagauagguauugc

SEQ ID NO: 1638017 - RNA, 19 nt, Homo sapiens
  misc_RNA (1)...(19): siRNA sense strand
gaucacauucgcugacuuc

SEQ ID NO: 1638018 - RNA, 19 nt, Homo sapiens
  misc_RNA (1)...(19): siRNA sense strand
ccagaaggaacuuguacaa

SEQ ID NO: 1638019 - RNA, 19 nt, Homo sapiens
  misc_RNA (1)...(19): siRNA sense strand
acacuugccuuuuagaauu

SEQ ID NO: 1638020 - RNA, 19 nt, Homo sapiens
  misc_RNA (1)...(19): siRNA sense strand
ggccacagauaaugauuuu

SEQ ID NO: 1638021 - RNA, 19 nt, Homo sapiens
  misc_RNA (1)...(19): siRNA sense strand
ccauccagcuggcuuucaa

SEQ ID NO: 1638022 - RNA, 19 nt, Homo sapiens
  misc_RNA (1)...(19): siRNA sense strand
gaaaacaguagaagaaauc

SEQ ID NO: 1638023 - RNA, 19 nt, Homo sapiens
  misc_RNA (1)...(19): siRNA sense strand
cuggacagauacucagaaa

SEQ ID NO: 1638024 - RNA, 19 nt, Homo sapiens
  misc_RNA (1)...(19): siRNA sense strand
agauagguauugcggaguu

SEQ ID NO: 1638025 - RNA, 19 nt, Homo sapiens
  misc_RNA (1)...(19): siRNA sense strand
ggaggagagaagauaggua

SEQ ID NO: 1638026 - RNA, 19 nt, Homo sapiens
  misc_RNA (1)...(19): siRNA sense strand
gguugccgcugccaugaug

SEQ ID NO: 1638027 - RNA, 19 nt, Homo sapiens
  misc_RNA (1)...(19): siRNA sense strand
ggaccuggagcgcuggaaa

SEQ ID NO: 1638028 - RNA, 19 nt, Homo sapiens
  misc_RNA (1)...(19): siRNA sense strand
ucagacacauuucgaaagc

SEQ ID NO: 1638029 - RNA, 19 nt, Homo sapiens
  misc_RNA (1)...(19): siRNA sense strand
cagaaggaacuuguacaaa

SEQ ID NO: 1638030 - RNA, 19 nt, Homo sapiens
  misc_RNA (1)...(19): siRNA sense strand
cagcuggcuuucaagaugu

SEQ ID NO: 1638031 - RNA, 19 nt, Homo sapiens
  misc_RNA (1)...(19): siRNA sense strand
ucgaguuccuuccugugua

SEQ ID NO: 1638032 - RNA, 19 nt, Homo sapiens
  misc_RNA (1)...(19): siRNA sense strand
caaaccuggugcauucauc

SEQ ID NO: 1638033 - RNA, 19 nt, Homo sapiens
  misc_RNA (1)...(19): siRNA sense strand
guauauacggccuguguuc

SEQ ID NO: 1638034 - RNA, 19 nt, Homo sapiens
  misc_RNA (1)...(19): siRNA sense strand
cggaaaguggccacagaua

SEQ ID NO: 1638035 - RNA, 19 nt, Homo sapiens
  misc_RNA (1)...(19): siRNA sense strand
ccagguggcccucaugaca

SEQ ID NO: 1638036 - RNA, 19 nt, Homo sapiens
  misc_RNA (1)...(19): siRNA sense strand
gaccucaccugcgccaauc

SEQ ID NO: 1638037 - RNA, 19 nt, Homo sapiens
  misc_RNA (1)...(19): siRNA sense strand
ggaucagacacauuucgaa

SEQ ID NO: 1638038 - RNA, 19 nt, Homo sapiens
  misc_RNA (1)...(19): siRNA sense strand
gacagauacucagaaagag

SEQ ID NO: 1638039 - RNA, 19 nt, Homo sapiens
  misc_RNA (1)...(19): siRNA sense strand
ucgcugacuuccacagguu

SEQ ID NO: 1638040 - RNA, 19 nt, Homo sapiens
  misc_RNA (1)...(19): siRNA sense strand
gaugaagggaggagagaag

SEQ ID NO: 1638041 - RNA, 19 nt, Homo sapiens
  misc_RNA (1)...(19): siRNA sense strand
ucaugacacugacgcucuu

SEQ ID NO: 1638042 - RNA, 19 nt, Homo sapiens
  misc_RNA (1)...(19): siRNA sense strand
agaaagagccaggaugaag

SEQ ID NO: 1638043 - RNA, 19 nt, Homo sapiens
  misc_RNA (1)...(19): siRNA sense strand
caacgugcggcgagucaug

SEQ ID NO: 1638044 - RNA, 19 nt, Homo sapiens
  misc_RNA (1)...(19): siRNA sense strand
ccaaguggaaaucgaguuc

SEQ ID NO: 1638045 - RNA, 19 nt, Homo sapiens
  misc_RNA (1)...(19): siRNA sense strand
uucgaaagcugugcagaga

SEQ ID NO: 1638046 - RNA, 19 nt, Homo sapiens
  misc_RNA (1)...(19): siRNA sense strand
ccaugacgauguccuccau

SEQ ID NO: 1638047 - RNA, 19 nt, Homo sapiens
  misc_RNA (1)...(19): siRNA sense strand
gggcgcaguccaacggaaa

SEQ ID NO: 1638048 - RNA, 19 nt, Homo sapiens
  misc_RNA (1)...(19): siRNA sense strand
gaagccuguucgcaagaag

SEQ ID NO: 1638049 - RNA, 19 nt, Homo sapiens
  misc_RNA (1)...(19): siRNA sense strand
cgaguuccuuccuguguac

SEQ ID NO: 1638050 - RNA, 19 nt, Homo sapiens
  misc_RNA (1)...(19): siRNA sense strand
gcucacgcugugucaguuu

SEQ ID NO: 1638051 - RNA, 19 nt, Homo sapiens
  misc_RNA (1)...(19): siRNA sense strand
cgaccuauuccgagccauu

SEQ ID NO: 1638052 - RNA, 19 nt, Homo sapiens
  misc_RNA (1)...(19): siRNA sense strand
uuucugacuugcuggaaga

SEQ ID NO: 1638053 - RNA, 19 nt, Homo sapiens
  misc_RNA (1)...(19): siRNA sense strand
ucgcagaggaauaccugua

SEQ ID NO: 1638054 - RNA, 19 nt, Homo sapiens
  misc_RNA (1)...(19): siRNA sense strand
caguauauacggccugugu

SEQ ID NO: 1638055 - RNA, 19 nt, Homo sapiens
  misc_RNA (1)...(19): siRNA sense strand
aacggaaaguggccacaga

SEQ ID NO: 1638056 - RNA, 19 nt, Homo sapiens
  misc_RNA (1)...(19): siRNA sense strand
uuccacagguuugcagaaa

SEQ ID NO: 1638057 - RNA, 19 nt, Homo sapiens
  misc_RNA (1)...(19): siRNA sense strand
gcuaaaaccagaaaagcuu

SEQ ID NO: 1638058 - RNA, 19 nt, Homo sapiens
  misc_RNA (1)...(19): siRNA sense strand
acaaccaaguggaaaucga

SEQ ID NO: 1638059 - RNA, 19 nt, Homo sapiens
  misc_RNA (1)...(19): siRNA sense strand
uaaacuggacaccaucaca

SEQ ID NO: 1638060 - RNA, 19 nt, Homo sapiens
  misc_RNA (1)...(19): siRNA sense strand
caccugcgccaaucccaaa

SEQ ID NO: 1638061 - RNA, 19 nt, Homo sapiens
  misc_RNA (1)...(19): siRNA sense strand
caggaaaacaguagaagaa

SEQ ID NO: 1638062 - RNA, 19 nt, Homo sapiens
  misc_RNA (1)...(19): siRNA sense strand
ccauugaccaagaggagaa

SEQ ID NO: 1638063 - RNA, 19 nt, Homo sapiens
  misc_RNA (1)...(19): siRNA sense strand
gaccuggagcgcuggaaau

SEQ ID NO: 1638064 - RNA, 19 nt, Homo sapiens
  misc_RNA (1)...(19): siRNA sense strand
aaaguggccacagauaaug

SEQ ID NO: 1638065 - RNA, 19 nt, Homo sapiens
  misc_RNA (1)...(19): siRNA sense strand
acccggaucagacacauuu

SEQ ID NO: 1638066 - RNA, 19 nt, Homo sapiens
  misc_RNA (1)...(19): siRNA sense strand
gaccuauuccgagccauug

SEQ ID NO: 1638067 - RNA, 19 nt, Homo sapiens
  misc_RNA (1)...(19): siRNA sense strand
cagaaagagccaggaugaa

SEQ ID NO: 1638068 - RNA, 19 nt, Homo sapiens
  misc_RNA (1)...(19): siRNA sense strand
cugccuaauuaccuucaaa

SEQ ID NO: 1638069 - RNA, 19 nt, Homo sapiens
  misc_RNA (1)...(19): siRNA sense strand
aaacuggacaccaucacau

SEQ ID NO: 1638070 - RNA, 19 nt, Homo sapiens
  misc_RNA (1)...(19): siRNA sense strand
aaaguacucugcuggauua

SEQ ID NO: 1638071 - RNA, 19 nt, Homo sapiens
  misc_RNA (1)...(19): siRNA sense strand
guacucugcuggauuagaa

SEQ ID NO: 1638072 - RNA, 19 nt, Homo sapiens
  misc_RNA (1)...(19): siRNA sense strand
gagcacacccagcaaauga

SEQ ID NO: 1638073 - RNA, 19 nt, Homo sapiens
  misc_RNA (1)...(19): siRNA sense strand
ccuccgggcugaagacuuu

SEQ ID NO: 1638074 - RNA, 19 nt, Homo sapiens
  misc_RNA (1)...(19): siRNA sense strand
ugaaggagcggcagaaguu

SEQ ID NO: 1638075 - RNA, 19 nt, Homo sapiens
  misc_RNA (1)...(19): siRNA sense strand
ggauuagaauuacuuagca

SEQ ID NO: 1638076 - RNA, 19 nt, Homo sapiens
  misc_RNA (1)...(19): siRNA sense strand
uagaauccaugacagcaaa

SEQ ID NO: 1638077 - RNA, 19 nt, Homo sapiens
  misc_RNA (1)...(19): siRNA sense strand
uagaauuacuuagcaggua

SEQ ID NO: 1638078 - RNA, 19 nt, Homo sapiens
  misc_RNA (1)...(19): siRNA sense strand
cagaagagccaaagacugu

SEQ ID NO: 1638079 - RNA, 19 nt, Homo sapiens
  misc_RNA (1)...(19): siRNA sense strand
caaaguacucugcuggauu

SEQ ID NO: 1638080 - RNA, 19 nt, Homo sapiens
  misc_RNA (1)...(19): siRNA sense strand
cuggagagcugguggauag

SEQ ID NO: 1638081 - RNA, 19 nt, Homo sapiens
  misc_RNA (1)...(19): siRNA sense strand
ccugaacucuggaggagaa

SEQ ID NO: 1638082 - RNA, 19 nt, Homo sapiens
  misc_RNA (1)...(19): siRNA sense strand
gccaaagacugugcaagug

SEQ ID NO: 1638083 - RNA, 19 nt, Homo sapiens
  misc_RNA (1)...(19): siRNA sense strand
gaaagaugcaaacauaugc

SEQ ID NO: 1638084 - RNA, 19 nt, Homo sapiens
  misc_RNA (1)...(19): siRNA sense strand
gcagugugaauuagaaaga

SEQ ID NO: 1638085 - RNA, 19 nt, Homo sapiens
  misc_RNA (1)...(19): siRNA sense strand
agaacaaccugcugcaucu

SEQ ID NO: 1638086 - RNA, 19 nt, Homo sapiens
  misc_RNA (1)...(19): siRNA sense strand
agaauuacuuagcagguau

SEQ ID NO: 1638087 - RNA, 19 nt, Homo sapiens
  misc_RNA (1)...(19): siRNA sense strand
gaggagaagagaacacugu

SEQ ID NO: 1638088 - RNA, 19 nt, Homo sapiens
  misc_RNA (1)...(19): siRNA sense strand
gaaggagcggcagaaguuu

SEQ ID NO: 1638089 - RNA, 19 nt, Homo sapiens
  misc_RNA (1)...(19): siRNA sense strand
agaaagaugcaaacauaug

SEQ ID NO: 1638090 - RNA, 19 nt, Homo sapiens
  misc_RNA (1)...(19): siRNA sense strand
ccaaaguacucugcuggau

SEQ ID NO: 1638091 - RNA, 19 nt, Homo sapiens
  misc_RNA (1)...(19): siRNA sense strand
gcgagguggucaugcuuuc

SEQ ID NO: 1638092 - RNA, 19 nt, Homo sapiens
  misc_RNA (1)...(19): siRNA sense strand
uuuaaucgcagacuuagaa

SEQ ID NO: 1638093 - RNA, 19 nt, Homo sapiens
  misc_RNA (1)...(19): siRNA sense strand
ugucauccauggaagugaa

SEQ ID NO: 1638094 - RNA, 19 nt, Homo sapiens
  misc_RNA (1)...(19): siRNA sense strand
agaagguccuggaaaugga

SEQ ID NO: 1638095 - RNA, 19 nt, Homo sapiens
  misc_RNA (1)...(19): siRNA sense strand
uaagaggaaggaacuugaa

SEQ ID NO: 1638096 - RNA, 19 nt, Homo sapiens
  misc_RNA (1)...(19): siRNA sense strand
agacuuaugugggcagugu

SEQ ID NO: 1638097 - RNA, 19 nt, Homo sapiens
  misc_RNA (1)...(19): siRNA sense strand
ggaagugaacguggacaug

SEQ ID NO: 1638098 - RNA, 19 nt, Homo sapiens
  misc_RNA (1)...(19): siRNA sense strand
gcccauaggcagcauguca

SEQ ID NO: 1638099 - RNA, 19 nt, Homo sapiens
  misc_RNA (1)...(19): siRNA sense strand
caacuggagaauuacaaga

SEQ ID NO: 1638100 - RNA, 19 nt, Homo sapiens
  misc_RNA (1)...(19): siRNA sense strand
agcaggacauggagcagua

SEQ ID NO: 1638101 - RNA, 19 nt, Homo sapiens
  misc_RNA (1)...(19): siRNA sense strand
acuggagaauuacaagaaa

SEQ ID NO: 1638102 - RNA, 19 nt, Homo sapiens
  misc_RNA (1)...(19): siRNA sense strand
agacuuagaauccaugaca

SEQ ID NO: 1638103 - RNA, 19 nt, Homo sapiens
  misc_RNA (1)...(19): siRNA sense strand
uugaggagguagagaacaa

SEQ ID NO: 1638104 - RNA, 19 nt, Homo sapiens
  misc_RNA (1)...(19): siRNA sense strand
ugacagcaaaucugacuca

SEQ ID NO: 1638105 - RNA, 19 nt, Homo sapiens
  misc_RNA (1)...(19): siRNA sense strand
ggagcacacccagcaaaug

SEQ ID NO: 1638106 - RNA, 19 nt, Homo sapiens
  misc_RNA (1)...(19): siRNA sense strand
cagcuuuaaucgcagacuu

SEQ ID NO: 1638107 - RNA, 19 nt, Homo sapiens
  misc_RNA (1)...(19): siRNA sense strand
gcaucuggaagacuuaugu

SEQ ID NO: 1638108 - RNA, 19 nt, Homo sapiens
  misc_RNA (1)...(19): siRNA sense strand
gcuggauuagaauuacuua

SEQ ID NO: 1638109 - RNA, 19 nt, Homo sapiens
  misc_RNA (1)...(19): siRNA sense strand
agauggaccugauggacau

SEQ ID NO: 1638110 - RNA, 19 nt, Homo sapiens
  misc_RNA (1)...(19): siRNA sense strand
gcacacccagcaaaugaag

SEQ ID NO: 1638111 - RNA, 19 nt, Homo sapiens
  misc_RNA (1)...(19): siRNA sense strand
cuuagcagguaugaggaua

SEQ ID NO: 1638112 - RNA, 19 nt, Homo sapiens
  misc_RNA (1)...(19): siRNA sense strand
cagaagguccuggaaaugg

SEQ ID NO: 1638113 - RNA, 19 nt, Homo sapiens
  misc_RNA (1)...(19): siRNA sense strand
gcaacuggagaauuacaag

SEQ ID NO: 1638114 - RNA, 19 nt, Homo sapiens
  misc_RNA (1)...(19): siRNA sense strand
gaauuagaaagaugcaaac

SEQ ID NO: 1638115 - RNA, 19 nt, Homo sapiens
  misc_RNA (1)...(19): siRNA sense strand
ggauacaugggcugcacuu

SEQ ID NO: 1638116 - RNA, 19 nt, Homo sapiens
  misc_RNA (1)...(19): siRNA sense strand
aagcaaaagugaaaagcaa

SEQ ID NO: 1638117 - RNA, 19 nt, Homo sapiens
  misc_RNA (1)...(19): siRNA sense strand
ggauagcgagguggucaug

SEQ ID NO: 1638118 - RNA, 19 nt, Homo sapiens
  misc_RNA (1)...(19): siRNA sense strand
ugggcagugugaauuagaa

SEQ ID NO: 1638119 - RNA, 19 nt, Homo sapiens
  misc_RNA (1)...(19): siRNA sense strand
gaauuacuuagcagguaug

SEQ ID NO: 1638120 - RNA, 19 nt, Homo sapiens
  misc_RNA (1)...(19): siRNA sense strand
gcagacuuagaauccauga

SEQ ID NO: 1638121 - RNA, 19 nt, Homo sapiens
  misc_RNA (1)...(19): siRNA sense strand
auacaugggcugcacuuca

SEQ ID NO: 1638122 - RNA, 19 nt, Homo sapiens
  misc_RNA (1)...(19): siRNA sense strand
gggcagugugaauuagaaa

SEQ ID NO: 1638123 - RNA, 19 nt, Homo sapiens
  misc_RNA (1)...(19): siRNA sense strand
ucacagaagagccaaagac

SEQ ID NO: 1638124 - RNA, 19 nt, Homo sapiens
  misc_RNA (1)...(19): siRNA sense strand
aauaagaggaaggaacuug

SEQ ID NO: 1638125 - RNA, 19 nt, Homo sapiens
  misc_RNA (1)...(19): siRNA sense strand
ugagcgugcagcaggauuu

SEQ ID NO: 1638126 - RNA, 19 nt, Homo sapiens
  misc_RNA (1)...(19): siRNA sense strand
gaacaaccugcugcaucug

SEQ ID NO: 1638127 - RNA, 19 nt, Homo sapiens
  misc_RNA (1)...(19): siRNA sense strand
uggagcagauggaccugau

SEQ ID NO: 1638128 - RNA, 19 nt, Homo sapiens
  misc_RNA (1)...(19): siRNA sense strand
auaagaggaaggaacuuga

SEQ ID NO: 1638129 - RNA, 19 nt, Homo sapiens
  misc_RNA (1)...(19): siRNA sense strand
aaaguacucugcuggauua

SEQ ID NO: 1638130 - RNA, 19 nt, Homo sapiens
  misc_RNA (1)...(19): siRNA sense strand
guacucugcuggauuagaa

SEQ ID NO: 1638131 - RNA, 19 nt, Homo sapiens
  misc_RNA (1)...(19): siRNA sense strand
gagcacacccagcaaauga

SEQ ID NO: 1638132 - RNA, 19 nt, Homo sapiens
  misc_RNA (1)...(19): siRNA sense strand
ccuccgggcugaagacuuu

SEQ ID NO: 1638133 - RNA, 19 nt, Homo sapiens
  misc_RNA (1)...(19): siRNA sense strand
ugaaggagcggcagaaguu

SEQ ID NO: 1638134 - RNA, 19 nt, Homo sapiens
  misc_RNA (1)...(19): siRNA sense strand
ggauuagaauuacuuagca

SEQ ID NO: 1638135 - RNA, 19 nt, Homo sapiens
  misc_RNA (1)...(19): siRNA sense strand
uagaauccaugacagcaaa

SEQ ID NO: 1638136 - RNA, 19 nt, Homo sapiens
  misc_RNA (1)...(19): siRNA sense strand
uagaauuacuuagcaggua

SEQ ID NO: 1638137 - RNA, 19 nt, Homo sapiens
  misc_RNA (1)...(19): siRNA sense strand
cagaagagccaaagacugu

SEQ ID NO: 1638138 - RNA, 19 nt, Homo sapiens
  misc_RNA (1)...(19): siRNA sense strand
caaaguacucugcuggauu

SEQ ID NO: 1638139 - RNA, 19 nt, Homo sapiens
  misc_RNA (1)...(19): siRNA sense strand
cuggagagcugguggauag

SEQ ID NO: 1638140 - RNA, 19 nt, Homo sapiens
  misc_RNA (1)...(19): siRNA sense strand
ccugaacucuggaggagaa

SEQ ID NO: 1638141 - RNA, 19 nt, Homo sapiens
  misc_RNA (1)...(19): siRNA sense strand
gccaaagacugugcaagug

SEQ ID NO: 1638142 - RNA, 19 nt, Homo sapiens
  misc_RNA (1)...(19): siRNA sense strand
gaaagaugcaaacauaugc

SEQ ID NO: 1638143 - RNA, 19 nt, Homo sapiens
  misc_RNA (1)...(19): siRNA sense strand
gcagugugaauuagaaaga

SEQ ID NO: 1638144 - RNA, 19 nt, Homo sapiens
  misc_RNA (1)...(19): siRNA sense strand
agaacaaccugcugcaucu

SEQ ID NO: 1638145 - RNA, 19 nt, Homo sapiens
  misc_RNA (1)...(19): siRNA sense strand
agaauuacuuagcagguau

SEQ ID NO: 1638146 - RNA, 19 nt, Homo sapiens
  misc_RNA (1)...(19): siRNA sense strand
gaggagaagagaacacugu

SEQ ID NO: 1638147 - RNA, 19 nt, Homo sapiens
  misc_RNA (1)...(19): siRNA sense strand
gaaggagcggcagaaguuu

SEQ ID NO: 1638148 - RNA, 19 nt, Homo sapiens
  misc_RNA (1)...(19): siRNA sense strand
agaaagaugcaaacauaug

SEQ ID NO: 1638149 - RNA, 19 nt, Homo sapiens
  misc_RNA (1)...(19): siRNA sense strand
ccaaaguacucugcuggau

SEQ ID NO: 1638150 - RNA, 19 nt, Homo sapiens
  misc_RNA (1)...(19): siRNA sense strand
gcgagguggucaugcuuuc

SEQ ID NO: 1638151 - RNA, 19 nt, Homo sapiens
  misc_RNA (1)...(19): siRNA sense strand
uuuaaucgcagacuuagaa

SEQ ID NO: 1638152 - RNA, 19 nt, Homo sapiens
  misc_RNA (1)...(19): siRNA sense strand
ugucauccauggaagugaa

SEQ ID NO: 1638153 - RNA, 19 nt, Homo sapiens
  misc_RNA (1)...(19): siRNA sense strand
agaagguccuggaaaugga

SEQ ID NO: 1638154 - RNA, 19 nt, Homo sapiens
  misc_RNA (1)...(19): siRNA sense strand
uaagaggaaggaacuugaa

SEQ ID NO: 1638155 - RNA, 19 nt, Homo sapiens
  misc_RNA (1)...(19): siRNA sense strand
agacuuaugugggcagugu

SEQ ID NO: 1638156 - RNA, 19 nt, Homo sapiens
  misc_RNA (1)...(19): siRNA sense strand
ggaagugaacguggacaug

SEQ ID NO: 1638157 - RNA, 19 nt, Homo sapiens
  misc_RNA (1)...(19): siRNA sense strand
gcccauaggcagcauguca

SEQ ID NO: 1638158 - RNA, 19 nt, Homo sapiens
  misc_RNA (1)...(19): siRNA sense strand
caacuggagaauuacaaga

SEQ ID NO: 1638159 - RNA, 19 nt, Homo sapiens
  misc_RNA (1)...(19): siRNA sense strand
agcaggacauggagcagua

SEQ ID NO: 1638160 - RNA, 19 nt, Homo sapiens
  misc_RNA (1)...(19): siRNA sense strand
acuggagaauuacaagaaa

SEQ ID NO: 1638161 - RNA, 19 nt, Homo sapiens
  misc_RNA (1)...(19): siRNA sense strand
agacuuagaauccaugaca

SEQ ID NO: 1638162 - RNA, 19 nt, Homo sapiens
  misc_RNA (1)...(19): siRNA sense strand
uugaggagguagagaacaa

SEQ ID NO: 1638163 - RNA, 19 nt, Homo sapiens
  misc_RNA (1)...(19): siRNA sense strand
ugacagcaaaucugacuca

SEQ ID NO: 1638164 - RNA, 19 nt, Homo sapiens
  misc_RNA (1)...(19): siRNA sense strand
ggagcacacccagcaaaug

SEQ ID NO: 1638165 - RNA, 19 nt, Homo sapiens
  misc_RNA (1)...(19): siRNA sense strand
cagcuuuaaucgcagacuu

SEQ ID NO: 1638166 - RNA, 19 nt, Homo sapiens
  misc_RNA (1)...(19): siRNA sense strand
gcaucuggaagacuuaugu

SEQ ID NO: 1638167 - RNA, 19 nt, Homo sapiens
  misc_RNA (1)...(19): siRNA sense strand
gcuggauuagaauuacuua

SEQ ID NO: 1638168 - RNA, 19 nt, Homo sapiens
  misc_RNA (1)...(19): siRNA sense strand
agauggaccugauggacau

SEQ ID NO: 1638169 - RNA, 19 nt, Homo sapiens
  misc_RNA (1)...(19): siRNA sense strand
gcacacccagcaaaugaag

SEQ ID NO: 1638170 - RNA, 19 nt, Homo sapiens
  misc_RNA (1)...(19): siRNA sense strand
cuuagcagguaugaggaua

SEQ ID NO: 1638171 - RNA, 19 nt, Homo sapiens
  misc_RNA (1)...(19): siRNA sense strand
cagaagguccuggaaaugg

SEQ ID NO: 1638172 - RNA, 19 nt, Homo sapiens
  misc_RNA (1)...(19): siRNA sense strand
gcaacuggagaauuacaag

SEQ ID NO: 1638173 - RNA, 19 nt, Homo sapiens
  misc_RNA (1)...(19): siRNA sense strand
gaauuagaaagaugcaaac

SEQ ID NO: 1638174 - RNA, 19 nt, Homo sapiens
  misc_RNA (1)...(19): siRNA sense strand
ggauacaugggcugcacuu

SEQ ID NO: 1638175 - RNA, 19 nt, Homo sapiens
  misc_RNA (1)...(19): siRNA sense strand
aagcaaaagugaaaagcaa

SEQ ID NO: 1638176 - RNA, 19 nt, Homo sapiens
  misc_RNA (1)...(19): siRNA sense strand
ggauagcgagguggucaug

SEQ ID NO: 1638177 - RNA, 19 nt, Homo sapiens
  misc_RNA (1)...(19): siRNA sense strand
ugggcagugugaauuagaa

SEQ ID NO: 1638178 - RNA, 19 nt, Homo sapiens
  misc_RNA (1)...(19): siRNA sense strand
gaauuacuuagcagguaug

SEQ ID NO: 1638179 - RNA, 19 nt, Homo sapiens
  misc_RNA (1)...(19): siRNA sense strand
gcagacuuagaauccauga

SEQ ID NO: 1638180 - RNA, 19 nt, Homo sapiens
  misc_RNA (1)...(19): siRNA sense strand
auacaugggcugcacuuca

SEQ ID NO: 1638181 - RNA, 19 nt, Homo sapiens
  misc_RNA (1)...(19): siRNA sense strand
gggcagugugaauuagaaa

SEQ ID NO: 1638182 - RNA, 19 nt, Homo sapiens
  misc_RNA (1)...(19): siRNA sense strand
ucacagaagagccaaagac

SEQ ID NO: 1638183 - RNA, 19 nt, Homo sapiens
  misc_RNA (1)...(19): siRNA sense strand
aauaagaggaaggaacuug

SEQ ID NO: 1638184 - RNA, 19 nt, Homo sapiens
  misc_RNA (1)...(19): siRNA sense strand
ugagcgugcagcaggauuu

SEQ ID NO: 1638185 - RNA, 19 nt, Homo sapiens
  misc_RNA (1)...(19): siRNA sense strand
gaacaaccugcugcaucug

SEQ ID NO: 1638186 - RNA, 19 nt, Homo sapiens
  misc_RNA (1)...(19): siRNA sense strand
uggagcagauggaccugau

SEQ ID NO: 1638187 - RNA, 19 nt, Homo sapiens
  misc_RNA (1)...(19): siRNA sense strand
auaagaggaaggaacuuga

SEQ ID NO: 1638188 - RNA, 19 nt, Homo sapiens
  misc_RNA (1)...(19): siRNA sense strand
gagcacacccagcaaauga

SEQ ID NO: 1638189 - RNA, 19 nt, Homo sapiens
  misc_RNA (1)...(19): siRNA sense strand
ugaaggagcggcagaaguu

SEQ ID NO: 1638190 - RNA, 19 nt, Homo sapiens
  misc_RNA (1)...(19): siRNA sense strand
uagaauccaugacagcaaa

SEQ ID NO: 1638191 - RNA, 19 nt, Homo sapiens
  misc_RNA (1)...(19): siRNA sense strand
ccugaacucuggaggagaa

SEQ ID NO: 1638192 - RNA, 19 nt, Homo sapiens
  misc_RNA (1)...(19): siRNA sense strand
gcagugugaauuagaaaga

SEQ ID NO: 1638193 - RNA, 19 nt, Homo sapiens
  misc_RNA (1)...(19): siRNA sense strand
gaaagaugcaaacauaugc

SEQ ID NO: 1638194 - RNA, 19 nt, Homo sapiens
  misc_RNA (1)...(19): siRNA sense strand
agaacaaccugcugcaucu

SEQ ID NO: 1638195 - RNA, 19 nt, Homo sapiens
  misc_RNA (1)...(19): siRNA sense strand
agaaagaugcaaacauaug

SEQ ID NO: 1638196 - RNA, 19 nt, Homo sapiens
  misc_RNA (1)...(19): siRNA sense strand
gaggagaagagaacacugu

SEQ ID NO: 1638197 - RNA, 19 nt, Homo sapiens
  misc_RNA (1)...(19): siRNA sense strand
gaaggagcggcagaaguuu

SEQ ID NO: 1638198 - RNA, 19 nt, Homo sapiens
  misc_RNA (1)...(19): siRNA sense strand
agacuuaugugggcagugu

SEQ ID NO: 1638199 - RNA, 19 nt, Homo sapiens
  misc_RNA (1)...(19): siRNA sense strand
ugucauccauggaagugaa

SEQ ID NO: 1638200 - RNA, 19 nt, Homo sapiens
  misc_RNA (1)...(19): siRNA sense strand
agaagguccuggaaaugga

SEQ ID NO: 1638201 - RNA, 19 nt, Homo sapiens
  misc_RNA (1)...(19): siRNA sense strand
uaagaggaaggaacuugaa

SEQ ID NO: 1638202 - RNA, 19 nt, Homo sapiens
  misc_RNA (1)...(19): siRNA sense strand
uuuaaucgcagacuuagaa

SEQ ID NO: 1638203 - RNA, 19 nt, Homo sapiens
  misc_RNA (1)...(19): siRNA sense strand
ggaagugaacguggacaug

SEQ ID NO: 1638204 - RNA, 19 nt, Homo sapiens
  misc_RNA (1)...(19): siRNA sense strand
gcccauaggcagcauguca

SEQ ID NO: 1638205 - RNA, 19 nt, Homo sapiens
  misc_RNA (1)...(19): siRNA sense strand
caacuggagaauuacaaga

SEQ ID NO: 1638206 - RNA, 19 nt, Homo sapiens
  misc_RNA (1)...(19): siRNA sense strand
agcaggacauggagcagua

SEQ ID NO: 1638207 - RNA, 19 nt, Homo sapiens
  misc_RNA (1)...(19): siRNA sense strand
acuggagaauuacaagaaa

SEQ ID NO: 1638208 - RNA, 19 nt, Homo sapiens
  misc_RNA (1)...(19): siRNA sense strand
agacuuagaauccaugaca

SEQ ID NO: 1638209 - RNA, 19 nt, Homo sapiens
  misc_RNA (1)...(19): siRNA sense strand
uugaggagguagagaacaa

SEQ ID NO: 1638210 - RNA, 19 nt, Homo sapiens
  misc_RNA (1)...(19): siRNA sense strand
ugacagcaaaucugacuca

SEQ ID NO: 1638211 - RNA, 19 nt, Homo sapiens
  misc_RNA (1)...(19): siRNA sense strand
ggagcacacccagcaaaug

SEQ ID NO: 1638212 - RNA, 19 nt, Homo sapiens
  misc_RNA (1)...(19): siRNA sense strand
gcaucuggaagacuuaugu

SEQ ID NO: 1638213 - RNA, 19 nt, Homo sapiens
  misc_RNA (1)...(19): siRNA sense strand
cagcuuuaaucgcagacuu

SEQ ID NO: 1638214 - RNA, 19 nt, Homo sapiens
  misc_RNA (1)...(19): siRNA sense strand
gcacacccagcaaaugaag

SEQ ID NO: 1638215 - RNA, 19 nt, Homo sapiens
  misc_RNA (1)...(19): siRNA sense strand
agauggaccugauggacau

SEQ ID NO: 1638216 - RNA, 19 nt, Homo sapiens
  misc_RNA (1)...(19): siRNA sense strand
gcaacuggagaauuacaag

SEQ ID NO: 1638217 - RNA, 19 nt, Homo sapiens
  misc_RNA (1)...(19): siRNA sense strand
cagaagguccuggaaaugg

SEQ ID NO: 1638218 - RNA, 19 nt, Homo sapiens
  misc_RNA (1)...(19): siRNA sense strand
gaauuagaaagaugcaaac

SEQ ID NO: 1638219 - RNA, 19 nt, Homo sapiens
  misc_RNA (1)...(19): siRNA sense strand
ugggcagugugaauuagaa

SEQ ID NO: 1638220 - RNA, 19 nt, Homo sapiens
  misc_RNA (1)...(19): siRNA sense strand
gcagacuuagaauccauga

SEQ ID NO: 1638221 - RNA, 19 nt, Homo sapiens
  misc_RNA (1)...(19): siRNA sense strand
gggcagugugaauuagaaa

SEQ ID NO: 1638222 - RNA, 19 nt, Homo sapiens
  misc_RNA (1)...(19): siRNA sense strand
aauaagaggaaggaacuug

SEQ ID NO: 1638223 - RNA, 19 nt, Homo sapiens
  misc_RNA (1)...(19): siRNA sense strand
gaacaaccugcugcaucug

SEQ ID NO: 1638224 - RNA, 19 nt, Homo sapiens
  misc_RNA (1)...(19): siRNA sense strand
uggagcagauggaccugau

SEQ ID NO: 1638225 - RNA, 19 nt, Homo sapiens
  misc_RNA (1)...(19): siRNA sense strand
auaagaggaaggaacuuga

SEQ ID NO: 1638226 - RNA, 19 nt, Homo sapiens
  misc_RNA (1)...(19): siRNA sense strand
gaagaagcaucgagacuug

SEQ ID NO: 1638227 - RNA, 19 nt, Homo sapiens
  misc_RNA (1)...(19): siRNA sense strand
gggaagaucugauuaaggu

SEQ ID NO: 1638228 - RNA, 19 nt, Homo sapiens
  misc_RNA (1)...(19): siRNA sense strand
gauaguggaugguaagaug

SEQ ID NO: 1638229 - RNA, 19 nt, Homo sapiens
  misc_RNA (1)...(19): siRNA sense strand
gaaucaaagucgagcauga

SEQ ID NO: 1638230 - RNA, 19 nt, Homo sapiens
  misc_RNA (1)...(19): siRNA sense strand
gcagaacaaugaauaccaa

SEQ ID NO: 1638231 - RNA, 19 nt, Homo sapiens
  misc_RNA (1)...(19): siRNA sense strand
agaaggaaaucaccacgua

SEQ ID NO: 1638232 - RNA, 19 nt, Homo sapiens
  misc_RNA (1)...(19): siRNA sense strand
gaccaucaacggaagauua

SEQ ID NO: 1638233 - RNA, 19 nt, Homo sapiens
  misc_RNA (1)...(19): siRNA sense strand
gaccaaugcucagauuauu

SEQ ID NO: 1638234 - RNA, 19 nt, Homo sapiens
  misc_RNA (1)...(19): siRNA sense strand
gaacaaugaauaccaagug

SEQ ID NO: 1638235 - RNA, 19 nt, Homo sapiens
  misc_RNA (1)...(19): siRNA sense strand
cacgaaaucugcuuuggaa

SEQ ID NO: 1638236 - RNA, 19 nt, Homo sapiens
  misc_RNA (1)...(19): siRNA sense strand
gaugaccaaugcucagauu

SEQ ID NO: 1638237 - RNA, 19 nt, Homo sapiens
  misc_RNA (1)...(19): siRNA sense strand
ucaagugaaugaaauccaa

SEQ ID NO: 1638238 - RNA, 19 nt, Homo sapiens
  misc_RNA (1)...(19): siRNA sense strand
aaacccaccuggagaagga

SEQ ID NO: 1638239 - RNA, 19 nt, Homo sapiens
  misc_RNA (1)...(19): siRNA sense strand
ccaaagaucaaggccauaa

SEQ ID NO: 1638240 - RNA, 19 nt, Homo sapiens
  misc_RNA (1)...(19): siRNA sense strand
gcacgaaaucugcuuugga

SEQ ID NO: 1638241 - RNA, 19 nt, Homo sapiens
  misc_RNA (1)...(19): siRNA sense strand
ggacacgggaagaaucaaa

SEQ ID NO: 1638242 - RNA, 19 nt, Homo sapiens
  misc_RNA (1)...(19): siRNA sense strand
ccagggaagaucugauuaa

SEQ ID NO: 1638243 - RNA, 19 nt, Homo sapiens
  misc_RNA (1)...(19): siRNA sense strand
gaacuggagcggcagaaca

SEQ ID NO: 1638244 - RNA, 19 nt, Homo sapiens
  misc_RNA (1)...(19): siRNA sense strand
caaagucgagcaugaaagu

SEQ ID NO: 1638245 - RNA, 19 nt, Homo sapiens
  misc_RNA (1)...(19): siRNA sense strand
gaaauggagaagcaucaug

SEQ ID NO: 1638246 - RNA, 19 nt, Homo sapiens
  misc_RNA (1)...(19): siRNA sense strand
cagauuauucuucucauug

SEQ ID NO: 1638247 - RNA, 19 nt, Homo sapiens
  misc_RNA (1)...(19): siRNA sense strand
ggauggcaguggaugacuu

SEQ ID NO: 1638248 - RNA, 19 nt, Homo sapiens
  misc_RNA (1)...(19): siRNA sense strand
ggacacuugguauaaagaa

SEQ ID NO: 1638249 - RNA, 19 nt, Homo sapiens
  misc_RNA (1)...(19): siRNA sense strand
gagcagacaaggugacauc

SEQ ID NO: 1638250 - RNA, 19 nt, Homo sapiens
  misc_RNA (1)...(19): siRNA sense strand
gaagggacacgggaagaau

SEQ ID NO: 1638251 - RNA, 19 nt, Homo sapiens
  misc_RNA (1)...(19): siRNA sense strand
gaacugaagcgcacauucc

SEQ ID NO: 1638252 - RNA, 19 nt, Homo sapiens
  misc_RNA (1)...(19): siRNA sense strand
gcucagauuauucuucuca

SEQ ID NO: 1638253 - RNA, 19 nt, Homo sapiens
  misc_RNA (1)...(19): siRNA sense strand
ugaccaaugcucagauuau

SEQ ID NO: 1638254 - RNA, 19 nt, Homo sapiens
  misc_RNA (1)...(19): siRNA sense strand
uuaguucuuugucaaguga

SEQ ID NO: 1638255 - RNA, 19 nt, Homo sapiens
  misc_RNA (1)...(19): siRNA sense strand
caucaacggaagauuaguu

SEQ ID NO: 1638256 - RNA, 19 nt, Homo sapiens
  misc_RNA (1)...(19): siRNA sense strand
caucgagacuuggacacuu

SEQ ID NO: 1638257 - RNA, 19 nt, Homo sapiens
  misc_RNA (1)...(19): siRNA sense strand
cagggaagaucugauuaag

SEQ ID NO: 1638258 - RNA, 19 nt, Homo sapiens
  misc_RNA (1)...(19): siRNA sense strand
gauuaguucuuugucaagu

SEQ ID NO: 1638259 - RNA, 19 nt, Homo sapiens
  misc_RNA (1)...(19): siRNA sense strand
ggcaguggaugacuucaac

SEQ ID NO: 1638260 - RNA, 19 nt, Homo sapiens
  misc_RNA (1)...(19): siRNA sense strand
ccaaugcucagauuauucu

SEQ ID NO: 1638261 - RNA, 19 nt, Homo sapiens
  misc_RNA (1)...(19): siRNA sense strand
gagacuuggacacuuggua

SEQ ID NO: 1638262 - RNA, 19 nt, Homo sapiens
  misc_RNA (1)...(19): siRNA sense strand
ggacaugcaagagaucauc

SEQ ID NO: 1638263 - RNA, 19 nt, Homo sapiens
  misc_RNA (1)...(19): siRNA sense strand
ugaaugaaauccaaaagca

SEQ ID NO: 1638264 - RNA, 19 nt, Homo sapiens
  misc_RNA (1)...(19): siRNA sense strand
caagugaaugaaauccaaa

SEQ ID NO: 1638265 - RNA, 19 nt, Homo sapiens
  misc_RNA (1)...(19): siRNA sense strand
gacuuggacacuugguaua

SEQ ID NO: 1638266 - RNA, 19 nt, Homo sapiens
  misc_RNA (1)...(19): siRNA sense strand
cuuggacacuugguauaaa

SEQ ID NO: 1638267 - RNA, 19 nt, Homo sapiens
  misc_RNA (1)...(19): siRNA sense strand
gaaaucugcuuuggaaaac

SEQ ID NO: 1638268 - RNA, 19 nt, Homo sapiens
  misc_RNA (1)...(19): siRNA sense strand
cgaaaucugcuuuggaaaa

SEQ ID NO: 1638269 - RNA, 19 nt, Homo sapiens
  misc_RNA (1)...(19): siRNA sense strand
ugacauccacgaacugaag

SEQ ID NO: 1638270 - RNA, 19 nt, Homo sapiens
  misc_RNA (1)...(19): siRNA sense strand
aaauggagaagcaucaugu

SEQ ID NO: 1638271 - RNA, 19 nt, Homo sapiens
  misc_RNA (1)...(19): siRNA sense strand
agaagaagcaucgagacuu

SEQ ID NO: 1638272 - RNA, 19 nt, Homo sapiens
  misc_RNA (1)...(19): siRNA sense strand
ggugacauccacgaacuga

SEQ ID NO: 1638273 - RNA, 19 nt, Homo sapiens
  misc_RNA (1)...(19): siRNA sense strand
gaagcaucaugugccaagu

SEQ ID NO: 1638274 - RNA, 19 nt, Homo sapiens
  misc_RNA (1)...(19): siRNA sense strand
uggagcggcagaacaauga

SEQ ID NO: 1638275 - RNA, 19 nt, Homo sapiens
  misc_RNA (1)...(19): siRNA sense strand
aaucaaagucgagcaugaa

SEQ ID NO: 1638276 - RNA, 19 nt, Homo sapiens
  misc_RNA (1)...(19): siRNA sense strand
agacuuggacacuugguau

SEQ ID NO: 1638277 - RNA, 19 nt, Homo sapiens
  misc_RNA (1)...(19): siRNA sense strand
agcaucaugugccaaguga

SEQ ID NO: 1638278 - RNA, 19 nt, Homo sapiens
  misc_RNA (1)...(19): siRNA sense strand
gauggcaguggaugacuuc

SEQ ID NO: 1638279 - RNA, 19 nt, Homo sapiens
  misc_RNA (1)...(19): siRNA sense strand
ugaagggacacgggaagaa

SEQ ID NO: 1638280 - RNA, 19 nt, Homo sapiens
  misc_RNA (1)...(19): siRNA sense strand
uggaugacuucaaccucaa

SEQ ID NO: 1638281 - RNA, 19 nt, Homo sapiens
  misc_RNA (1)...(19): siRNA sense strand
uccaggacaugcaagagau

SEQ ID NO: 1638282 - RNA, 19 nt, Homo sapiens
  misc_RNA (1)...(19): siRNA sense strand
ggagaccaucaacggaaga

SEQ ID NO: 1638283 - RNA, 19 nt, Homo sapiens
  misc_RNA (1)...(19): siRNA sense strand
uaacccaggagaccaucaa

SEQ ID NO: 1638284 - RNA, 19 nt, Homo sapiens
  misc_RNA (1)...(19): siRNA sense strand
gaagaagcaucgagacuug

SEQ ID NO: 1638285 - RNA, 19 nt, Homo sapiens
  misc_RNA (1)...(19): siRNA sense strand
gggaagaucugauuaaggu

SEQ ID NO: 1638286 - RNA, 19 nt, Homo sapiens
  misc_RNA (1)...(19): siRNA sense strand
gaaucaaagucgagcauga

SEQ ID NO: 1638287 - RNA, 19 nt, Homo sapiens
  misc_RNA (1)...(19): siRNA sense strand
gcagaacaaugaauaccaa

SEQ ID NO: 1638288 - RNA, 19 nt, Homo sapiens
  misc_RNA (1)...(19): siRNA sense strand
agaaggaaaucaccacgua

SEQ ID NO: 1638289 - RNA, 19 nt, Homo sapiens
  misc_RNA (1)...(19): siRNA sense strand
gaccaucaacggaagauua

SEQ ID NO: 1638290 - RNA, 19 nt, Homo sapiens
  misc_RNA (1)...(19): siRNA sense strand
gaacaaugaauaccaagug

SEQ ID NO: 1638291 - RNA, 19 nt, Homo sapiens
  misc_RNA (1)...(19): siRNA sense strand
cacgaaaucugcuuuggaa

SEQ ID NO: 1638292 - RNA, 19 nt, Homo sapiens
  misc_RNA (1)...(19): siRNA sense strand
ucaagugaaugaaauccaa

SEQ ID NO: 1638293 - RNA, 19 nt, Homo sapiens
  misc_RNA (1)...(19): siRNA sense strand
aaacccaccuggagaagga

SEQ ID NO: 1638294 - RNA, 19 nt, Homo sapiens
  misc_RNA (1)...(19): siRNA sense strand
ccaaagaucaaggccauaa

SEQ ID NO: 1638295 - RNA, 19 nt, Homo sapiens
  misc_RNA (1)...(19): siRNA sense strand
gcacgaaaucugcuuugga

SEQ ID NO: 1638296 - RNA, 19 nt, Homo sapiens
  misc_RNA (1)...(19): siRNA sense strand
ggacacgggaagaaucaaa

SEQ ID NO: 1638297 - RNA, 19 nt, Homo sapiens
  misc_RNA (1)...(19): siRNA sense strand
ccagggaagaucugauuaa

SEQ ID NO: 1638298 - RNA, 19 nt, Homo sapiens
  misc_RNA (1)...(19): siRNA sense strand
gaacuggagcggcagaaca

SEQ ID NO: 1638299 - RNA, 19 nt, Homo sapiens
  misc_RNA (1)...(19): siRNA sense strand
caaagucgagcaugaaagu

SEQ ID NO: 1638300 - RNA, 19 nt, Homo sapiens
  misc_RNA (1)...(19): siRNA sense strand
ggacacuugguauaaagaa

SEQ ID NO: 1638301 - RNA, 19 nt, Homo sapiens
  misc_RNA (1)...(19): siRNA sense strand
gagcagacaaggugacauc

SEQ ID NO: 1638302 - RNA, 19 nt, Homo sapiens
  misc_RNA (1)...(19): siRNA sense strand
gaagggacacgggaagaau

SEQ ID NO: 1638303 - RNA, 19 nt, Homo sapiens
  misc_RNA (1)...(19): siRNA sense strand
gaacugaagcgcacauucc

SEQ ID NO: 1638304 - RNA, 19 nt, Homo sapiens
  misc_RNA (1)...(19): siRNA sense strand
uuaguucuuugucaaguga

SEQ ID NO: 1638305 - RNA, 19 nt, Homo sapiens
  misc_RNA (1)...(19): siRNA sense strand
caucaacggaagauuaguu

SEQ ID NO: 1638306 - RNA, 19 nt, Homo sapiens
  misc_RNA (1)...(19): siRNA sense strand
caucgagacuuggacacuu

SEQ ID NO: 1638307 - RNA, 19 nt, Homo sapiens
  misc_RNA (1)...(19): siRNA sense strand
cagggaagaucugauuaag

SEQ ID NO: 1638308 - RNA, 19 nt, Homo sapiens
  misc_RNA (1)...(19): siRNA sense strand
gauuaguucuuugucaagu

SEQ ID NO: 1638309 - RNA, 19 nt, Homo sapiens
  misc_RNA (1)...(19): siRNA sense strand
gagacuuggacacuuggua

SEQ ID NO: 1638310 - RNA, 19 nt, Homo sapiens
  misc_RNA (1)...(19): siRNA sense strand
ggacaugcaagagaucauc

SEQ ID NO: 1638311 - RNA, 19 nt, Homo sapiens
  misc_RNA (1)...(19): siRNA sense strand
ugaaugaaauccaaaagca

SEQ ID NO: 1638312 - RNA, 19 nt, Homo sapiens
  misc_RNA (1)...(19): siRNA sense strand
caagugaaugaaauccaaa

SEQ ID NO: 1638313 - RNA, 19 nt, Homo sapiens
  misc_RNA (1)...(19): siRNA sense strand
gacuuggacacuugguaua

SEQ ID NO: 1638314 - RNA, 19 nt, Homo sapiens
  misc_RNA (1)...(19): siRNA sense strand
ugacauccacgaacugaag

SEQ ID NO: 1638315 - RNA, 19 nt, Homo sapiens
  misc_RNA (1)...(19): siRNA sense strand
cuuggacacuugguauaaa

SEQ ID NO: 1638316 - RNA, 19 nt, Homo sapiens
  misc_RNA (1)...(19): siRNA sense strand
gaaaucugcuuuggaaaac

SEQ ID NO: 1638317 - RNA, 19 nt, Homo sapiens
  misc_RNA (1)...(19): siRNA sense strand
cgaaaucugcuuuggaaaa

SEQ ID NO: 1638318 - RNA, 19 nt, Homo sapiens
  misc_RNA (1)...(19): siRNA sense strand
agaagaagcaucgagacuu

SEQ ID NO: 1638319 - RNA, 19 nt, Homo sapiens
  misc_RNA (1)...(19): siRNA sense strand
ggugacauccacgaacuga

SEQ ID NO: 1638320 - RNA, 19 nt, Homo sapiens
  misc_RNA (1)...(19): siRNA sense strand
gaagcaucaugugccaagu

SEQ ID NO: 1638321 - RNA, 19 nt, Homo sapiens
  misc_RNA (1)...(19): siRNA sense strand
uggagcggcagaacaauga

SEQ ID NO: 1638322 - RNA, 19 nt, Homo sapiens
  misc_RNA (1)...(19): siRNA sense strand
aaucaaagucgagcaugaa

SEQ ID NO: 1638323 - RNA, 19 nt, Homo sapiens
  misc_RNA (1)...(19): siRNA sense strand
agcaucaugugccaaguga

SEQ ID NO: 1638324 - RNA, 19 nt, Homo sapiens
  misc_RNA (1)...(19): siRNA sense strand
agacuuggacacuugguau

SEQ ID NO: 1638325 - RNA, 19 nt, Homo sapiens
  misc_RNA (1)...(19): siRNA sense strand
ugaagggacacgggaagaa

SEQ ID NO: 1638326 - RNA, 19 nt, Homo sapiens
  misc_RNA (1)...(19): siRNA sense strand
uccaggacaugcaagagau

SEQ ID NO: 1638327 - RNA, 19 nt, Homo sapiens
  misc_RNA (1)...(19): siRNA sense strand
ggagaccaucaacggaaga

SEQ ID NO: 1638328 - RNA, 19 nt, Homo sapiens
  misc_RNA (1)...(19): siRNA sense strand
uaacccaggagaccaucaa

SEQ ID NO: 1638329 - RNA, 19 nt, Homo sapiens
  misc_RNA (1)...(19): siRNA sense strand
ggagacaucuuccgagaaa

SEQ ID NO: 1638330 - RNA, 19 nt, Homo sapiens
  misc_RNA (1)...(19): siRNA sense strand
gaaagagccugucaucagu

SEQ ID NO: 1638331 - RNA, 19 nt, Homo sapiens
  misc_RNA (1)...(19): siRNA sense strand
ggagaagucugcaagaugu

SEQ ID NO: 1638332 - RNA, 19 nt, Homo sapiens
  misc_RNA (1)...(19): siRNA sense strand
ccucagagcuguucaggaa

SEQ ID NO: 1638333 - RNA, 19 nt, Homo sapiens
  misc_RNA (1)...(19): siRNA sense strand
gcgauggacuucacagauu

SEQ ID NO: 1638334 - RNA, 19 nt, Homo sapiens
  misc_RNA (1)...(19): siRNA sense strand
gcucaacccucuccuacuu

SEQ ID NO: 1638335 - RNA, 19 nt, Homo sapiens
  misc_RNA (1)...(19): siRNA sense strand
ucacugugcucaucaagaa

SEQ ID NO: 1638336 - RNA, 19 nt, Homo sapiens
  misc_RNA (1)...(19): siRNA sense strand
gagaaacggacucugauaa

SEQ ID NO: 1638337 - RNA, 19 nt, Homo sapiens
  misc_RNA (1)...(19): siRNA sense strand
gagaaacaggcgauaauuu

SEQ ID NO: 1638338 - RNA, 19 nt, Homo sapiens
  misc_RNA (1)...(19): siRNA sense strand
gaagcugccucccaucuca

SEQ ID NO: 1638339 - RNA, 19 nt, Homo sapiens
  misc_RNA (1)...(19): siRNA sense strand
ggaaagagccugucaucag

SEQ ID NO: 1638340 - RNA, 19 nt, Homo sapiens
  misc_RNA (1)...(19): siRNA sense strand
ccaccaacguguccuugua

SEQ ID NO: 1638341 - RNA, 19 nt, Homo sapiens
  misc_RNA (1)...(19): siRNA sense strand
ggaggaaaauuugacauua

SEQ ID NO: 1638342 - RNA, 19 nt, Homo sapiens
  misc_RNA (1)...(19): siRNA sense strand
caagaacaauaucgacuuc

SEQ ID NO: 1638343 - RNA, 19 nt, Homo sapiens
  misc_RNA (1)...(19): siRNA sense strand
ggauccagagcaugaauua

SEQ ID NO: 1638344 - RNA, 19 nt, Homo sapiens
  misc_RNA (1)...(19): siRNA sense strand
gaugacaaacuuucucaaa

SEQ ID NO: 1638345 - RNA, 19 nt, Homo sapiens
  misc_RNA (1)...(19): siRNA sense strand
caaagccgacauuaaagua

SEQ ID NO: 1638346 - RNA, 19 nt, Homo sapiens
  misc_RNA (1)...(19): siRNA sense strand
gcagugauguuuuccagua

SEQ ID NO: 1638347 - RNA, 19 nt, Homo sapiens
  misc_RNA (1)...(19): siRNA sense strand
agaauggagugaagaaguu

SEQ ID NO: 1638348 - RNA, 19 nt, Homo sapiens
  misc_RNA (1)...(19): siRNA sense strand
cgauggacuucacagauuu

SEQ ID NO: 1638349 - RNA, 19 nt, Homo sapiens
  misc_RNA (1)...(19): siRNA sense strand
gagccaaagccgacauuaa

SEQ ID NO: 1638350 - RNA, 19 nt, Homo sapiens
  misc_RNA (1)...(19): siRNA sense strand
gaauacuacuacaggaaga

SEQ ID NO: 1638351 - RNA, 19 nt, Homo sapiens
  misc_RNA (1)...(19): siRNA sense strand
gaaacggacucugauaaaa

SEQ ID NO: 1638352 - RNA, 19 nt, Homo sapiens
  misc_RNA (1)...(19): siRNA sense strand
aagaggagaucguggagaa

SEQ ID NO: 1638353 - RNA, 19 nt, Homo sapiens
  misc_RNA (1)...(19): siRNA sense strand
ucagauacgccaaguacua

SEQ ID NO: 1638354 - RNA, 19 nt, Homo sapiens
  misc_RNA (1)...(19): siRNA sense strand
gcuuugcucuggugaguga

SEQ ID NO: 1638355 - RNA, 19 nt, Homo sapiens
  misc_RNA (1)...(19): siRNA sense strand
gcaguacaguggcuucaag

SEQ ID NO: 1638356 - RNA, 19 nt, Homo sapiens
  misc_RNA (1)...(19): siRNA sense strand
gguuuaaacaucacuugua

SEQ ID NO: 1638357 - RNA, 19 nt, Homo sapiens
  misc_RNA (1)...(19): siRNA sense strand
gaacagugccgaaaacuuc

SEQ ID NO: 1638358 - RNA, 19 nt, Homo sapiens
  misc_RNA (1)...(19): siRNA sense strand
cuucaagaguccuuacuga

SEQ ID NO: 1638359 - RNA, 19 nt, Homo sapiens
  misc_RNA (1)...(19): siRNA sense strand
gaagaagugcgaguccauu

SEQ ID NO: 1638360 - RNA, 19 nt, Homo sapiens
  misc_RNA (1)...(19): siRNA sense strand
gagaauggagugaagaagu

SEQ ID NO: 1638361 - RNA, 19 nt, Homo sapiens
  misc_RNA (1)...(19): siRNA sense strand
ccuguguggucaacgaaua

SEQ ID NO: 1638362 - RNA, 19 nt, Homo sapiens
  misc_RNA (1)...(19): siRNA sense strand
gccaaguacuacaaggaaa

SEQ ID NO: 1638363 - RNA, 19 nt, Homo sapiens
  misc_RNA (1)...(19): siRNA sense strand
aaacuucacugugcucauc

SEQ ID NO: 1638364 - RNA, 19 nt, Homo sapiens
  misc_RNA (1)...(19): siRNA sense strand
agaaacggacucugauaaa

SEQ ID NO: 1638365 - RNA, 19 nt, Homo sapiens
  misc_RNA (1)...(19): siRNA sense strand
agccaaagccgacauuaaa

SEQ ID NO: 1638366 - RNA, 19 nt, Homo sapiens
  misc_RNA (1)...(19): siRNA sense strand
gaagugcgaguccauugug

SEQ ID NO: 1638367 - RNA, 19 nt, Homo sapiens
  misc_RNA (1)...(19): siRNA sense strand
gcgguugugucccgaguau

SEQ ID NO: 1638368 - RNA, 19 nt, Homo sapiens
  misc_RNA (1)...(19): siRNA sense strand
ugcugucgcucccauauuu

SEQ ID NO: 1638369 - RNA, 19 nt, Homo sapiens
  misc_RNA (1)...(19): siRNA sense strand
ugagaaacggacucugaua

SEQ ID NO: 1638370 - RNA, 19 nt, Homo sapiens
  misc_RNA (1)...(19): siRNA sense strand
ucacugccgucccaaauac

SEQ ID NO: 1638371 - RNA, 19 nt, Homo sapiens
  misc_RNA (1)...(19): siRNA sense strand
uuucagauguggcaauuca

SEQ ID NO: 1638372 - RNA, 19 nt, Homo sapiens
  misc_RNA (1)...(19): siRNA sense strand
guuuaaacaucacuuguac

SEQ ID NO: 1638373 - RNA, 19 nt, Homo sapiens
  misc_RNA (1)...(19): siRNA sense strand
gcuggaggauccggaaaga

SEQ ID NO: 1638374 - RNA, 19 nt, Homo sapiens
  misc_RNA (1)...(19): siRNA sense strand
gggagaagucugcaagaug

SEQ ID NO: 1638375 - RNA, 19 nt, Homo sapiens
  misc_RNA (1)...(19): siRNA sense strand
guugagaaacggacucuga

SEQ ID NO: 1638376 - RNA, 19 nt, Homo sapiens
  misc_RNA (1)...(19): siRNA sense strand
ggauagcagaggugaaaga

SEQ ID NO: 1638377 - RNA, 19 nt, Homo sapiens
  misc_RNA (1)...(19): siRNA sense strand
gagcugugcugccggaaaa

SEQ ID NO: 1638378 - RNA, 19 nt, Homo sapiens
  misc_RNA (1)...(19): siRNA sense strand
cgagaaacaggcgauaauu

SEQ ID NO: 1638379 - RNA, 19 nt, Homo sapiens
  misc_RNA (1)...(19): siRNA sense strand
ggauggacccgcagagcaa

SEQ ID NO: 1638380 - RNA, 19 nt, Homo sapiens
  misc_RNA (1)...(19): siRNA sense strand
ccacaagacucagaaucca

SEQ ID NO: 1638381 - RNA, 19 nt, Homo sapiens
  misc_RNA (1)...(19): siRNA sense strand
aauccacagugucccauuu

SEQ ID NO: 1638382 - RNA, 19 nt, Homo sapiens
  misc_RNA (1)...(19): siRNA sense strand
gaggagaucguggagaaug

SEQ ID NO: 1638383 - RNA, 19 nt, Homo sapiens
  misc_RNA (1)...(19): siRNA sense strand
gugcucaucaagaacaaua

SEQ ID NO: 1638384 - RNA, 19 nt, Homo sapiens
  misc_RNA (1)...(19): siRNA sense strand
ggaacucuuucuucgugau

SEQ ID NO: 1638385 - RNA, 19 nt, Homo sapiens
  misc_RNA (1)...(19): siRNA sense strand
agaaguuggugcacagugu

SEQ ID NO: 1638386 - RNA, 19 nt, Homo sapiens
  misc_RNA (1)...(19): siRNA sense strand
gaggauccggaaagaguuu

SEQ ID NO: 1638387 - RNA, 19 nt, Homo sapiens
  misc_RNA (1)...(19): siRNA sense strand
uuauccagcugguugugua

SEQ ID NO: 1638388 - RNA, 19 nt, Homo sapiens
  misc_RNA (1)...(19): siRNA sense strand
gaucaucuuuuccuacguu

SEQ ID NO: 1638389 - RNA, 19 nt, Homo sapiens
  misc_RNA (1)...(19): siRNA sense strand
guacaguggcuucaagagu

SEQ ID NO: 1638390 - RNA, 19 nt, Homo sapiens
  misc_RNA (1)...(19): siRNA sense strand
cuacugggacugcaaccua

SEQ ID NO: 1638391 - RNA, 19 nt, Homo sapiens
  misc_RNA (1)...(19): siRNA sense strand
ucaguucugugcacaccaa

SEQ ID NO: 1638392 - RNA, 19 nt, Homo sapiens
  misc_RNA (1)...(19): siRNA sense strand
gaugaaucccacauuagga

SEQ ID NO: 1638393 - RNA, 19 nt, Homo sapiens
  misc_RNA (1)...(19): siRNA sense strand
ccaaagccgacauuaaagu

SEQ ID NO: 1638394 - RNA, 19 nt, Homo sapiens
  misc_RNA (1)...(19): siRNA sense strand
ggucaacgaauacuacuac

SEQ ID NO: 1638395 - RNA, 19 nt, Homo sapiens
  misc_RNA (1)...(19): siRNA sense strand
agacuacaccuucccuuug

SEQ ID NO: 1638396 - RNA, 19 nt, Homo sapiens
  misc_RNA (1)...(19): siRNA sense strand
cagacuacaccuucccuuu

SEQ ID NO: 1638397 - RNA, 19 nt, Homo sapiens
  misc_RNA (1)...(19): siRNA sense strand
ggaagaagugcgaguccau

SEQ ID NO: 1638398 - RNA, 19 nt, Homo sapiens
  misc_RNA (1)...(19): siRNA sense strand
acaacuacaccacgagaaa

SEQ ID NO: 1638399 - RNA, 19 nt, Homo sapiens
  misc_RNA (1)...(19): siRNA sense strand
caaacuuucucaaaacaga

SEQ ID NO: 1638400 - RNA, 19 nt, Homo sapiens
  misc_RNA (1)...(19): siRNA sense strand
ggagccaaagccgacauua

SEQ ID NO: 1638401 - RNA, 19 nt, Homo sapiens
  misc_RNA (1)...(19): siRNA sense strand
guucaucgacuuccucauc

SEQ ID NO: 1638402 - RNA, 19 nt, Homo sapiens
  misc_RNA (1)...(19): siRNA sense strand
ucaagaacaauaucgacuu

SEQ ID NO: 1638403 - RNA, 19 nt, Homo sapiens
  misc_RNA (1)...(19): siRNA sense strand
gacuacaccuucccuuugc

SEQ ID NO: 1638404 - RNA, 19 nt, Homo sapiens
  misc_RNA (1)...(19): siRNA sense strand
ggaggauccggaaagaguu

SEQ ID NO: 1638405 - RNA, 19 nt, Homo sapiens
  misc_RNA (1)...(19): siRNA sense strand
aagccgacauuaaaguaug

SEQ ID NO: 1638406 - RNA, 19 nt, Homo sapiens
  misc_RNA (1)...(19): siRNA sense strand
gcggaaagagccugucauc

SEQ ID NO: 1638407 - RNA, 19 nt, Homo sapiens
  misc_RNA (1)...(19): siRNA sense strand
agaaacaggcgauaauuuu

SEQ ID NO: 1638408 - RNA, 19 nt, Homo sapiens
  misc_RNA (1)...(19): siRNA sense strand
gaacucuuucuucgugaug

SEQ ID NO: 1638409 - RNA, 19 nt, Homo sapiens
  misc_RNA (1)...(19): siRNA sense strand
ggccugcucucuugaacag

SEQ ID NO: 1638410 - RNA, 19 nt, Homo sapiens
  misc_RNA (1)...(19): siRNA sense strand
gaauggagugaagaaguug

SEQ ID NO: 1638411 - RNA, 19 nt, Homo sapiens
  misc_RNA (1)...(19): siRNA sense strand
gcugucgcucccauauuua

SEQ ID NO: 1638412 - RNA, 19 nt, Homo sapiens
  misc_RNA (1)...(19): siRNA sense strand
gggccaagaagucccaaga

SEQ ID NO: 1638413 - RNA, 19 nt, Homo sapiens
  misc_RNA (1)...(19): siRNA sense strand
ucacucggauccagagcau

SEQ ID NO: 1638414 - RNA, 19 nt, Homo sapiens
  misc_RNA (1)...(19): siRNA sense strand
gacaaacuuucucaaaaca

SEQ ID NO: 1638415 - RNA, 19 nt, Homo sapiens
  misc_RNA (1)...(19): siRNA sense strand
guauguguccuuuguggau

SEQ ID NO: 1638416 - RNA, 19 nt, Homo sapiens
  misc_RNA (1)...(19): siRNA sense strand
aguaugagacgaacaaagu

SEQ ID NO: 1638417 - RNA, 19 nt, Homo sapiens
  misc_RNA (1)...(19): siRNA sense strand
ugacaaacuuucucaaaac

SEQ ID NO: 1638418 - RNA, 19 nt, Homo sapiens
  misc_RNA (1)...(19): siRNA sense strand
ggagcugugcugccggaaa

SEQ ID NO: 1638419 - RNA, 19 nt, Homo sapiens
  misc_RNA (1)...(19): siRNA sense strand
gauacgccaaguacuacaa

SEQ ID NO: 1638420 - RNA, 19 nt, Homo sapiens
  misc_RNA (1)...(19): siRNA sense strand
caucacugccgucccaaau

SEQ ID NO: 1638421 - RNA, 19 nt, Homo sapiens
  misc_RNA (1)...(19): siRNA sense strand
gaccguugguuccaucacu

SEQ ID NO: 1638422 - RNA, 19 nt, Homo sapiens
  misc_RNA (1)...(19): siRNA sense strand
ccgagaaacaggcgauaau

SEQ ID NO: 1638423 - RNA, 19 nt, Homo sapiens
  misc_RNA (1)...(19): siRNA sense strand
caagaccugcgauggacuu

SEQ ID NO: 1638424 - RNA, 19 nt, Homo sapiens
  misc_RNA (1)...(19): siRNA sense strand
cccaggacauggcugacuu

SEQ ID NO: 1638425 - RNA, 19 nt, Homo sapiens
  misc_RNA (1)...(19): siRNA sense strand
gaauccacagugucccauu

SEQ ID NO: 1638426 - RNA, 19 nt, Homo sapiens
  misc_RNA (1)...(19): siRNA sense strand
aagaguuuccgaagaguga

SEQ ID NO: 1638427 - RNA, 19 nt, Homo sapiens
  misc_RNA (1)...(19): siRNA sense strand
gauggacuucacagauuug

SEQ ID NO: 1638428 - RNA, 19 nt, Homo sapiens
  misc_RNA (1)...(19): siRNA sense strand
agacaucuuccgagaaaca

SEQ ID NO: 1638429 - RNA, 19 nt, Homo sapiens
  misc_RNA (1)...(19): siRNA sense strand
gaaagagccugucaucagu

SEQ ID NO: 1638430 - RNA, 19 nt, Homo sapiens
  misc_RNA (1)...(19): siRNA sense strand
ggaaagagccugucaucag

SEQ ID NO: 1638431 - RNA, 19 nt, Homo sapiens
  misc_RNA (1)...(19): siRNA sense strand
ggauccagagcaugaauua

SEQ ID NO: 1638432 - RNA, 19 nt, Homo sapiens
  misc_RNA (1)...(19): siRNA sense strand
gaugacaaacuuucucaaa

SEQ ID NO: 1638433 - RNA, 19 nt, Homo sapiens
  misc_RNA (1)...(19): siRNA sense strand
gcagugauguuuuccagua

SEQ ID NO: 1638434 - RNA, 19 nt, Homo sapiens
  misc_RNA (1)...(19): siRNA sense strand
agaauggagugaagaaguu

SEQ ID NO: 1638435 - RNA, 19 nt, Homo sapiens
  misc_RNA (1)...(19): siRNA sense strand
aagaggagaucguggagaa

SEQ ID NO: 1638436 - RNA, 19 nt, Homo sapiens
  misc_RNA (1)...(19): siRNA sense strand
gcuuugcucuggugaguga

SEQ ID NO: 1638437 - RNA, 19 nt, Homo sapiens
  misc_RNA (1)...(19): siRNA sense strand
gagaauggagugaagaagu

SEQ ID NO: 1638438 - RNA, 19 nt, Homo sapiens
  misc_RNA (1)...(19): siRNA sense strand
gcgguugugucccgaguau

SEQ ID NO: 1638439 - RNA, 19 nt, Homo sapiens
  misc_RNA (1)...(19): siRNA sense strand
ggauagcagaggugaaaga

SEQ ID NO: 1638440 - RNA, 19 nt, Homo sapiens
  misc_RNA (1)...(19): siRNA sense strand
ggauggacccgcagagcaa

SEQ ID NO: 1638441 - RNA, 19 nt, Homo sapiens
  misc_RNA (1)...(19): siRNA sense strand
gaggagaucguggagaaug

SEQ ID NO: 1638442 - RNA, 19 nt, Homo sapiens
  misc_RNA (1)...(19): siRNA sense strand
ggaacucuuucuucgugau

SEQ ID NO: 1638443 - RNA, 19 nt, Homo sapiens
  misc_RNA (1)...(19): siRNA sense strand
agaaguuggugcacagugu

SEQ ID NO: 1638444 - RNA, 19 nt, Homo sapiens
  misc_RNA (1)...(19): siRNA sense strand
gaucaucuuuuccuacguu

SEQ ID NO: 1638445 - RNA, 19 nt, Homo sapiens
  misc_RNA (1)...(19): siRNA sense strand
ucaguucugugcacaccaa

SEQ ID NO: 1638446 - RNA, 19 nt, Homo sapiens
  misc_RNA (1)...(19): siRNA sense strand
agacuacaccuucccuuug

SEQ ID NO: 1638447 - RNA, 19 nt, Homo sapiens
  misc_RNA (1)...(19): siRNA sense strand
cagacuacaccuucccuuu

SEQ ID NO: 1638448 - RNA, 19 nt, Homo sapiens
  misc_RNA (1)...(19): siRNA sense strand
caaacuuucucaaaacaga

SEQ ID NO: 1638449 - RNA, 19 nt, Homo sapiens
  misc_RNA (1)...(19): siRNA sense strand
gcggaaagagccugucauc

SEQ ID NO: 1638450 - RNA, 19 nt, Homo sapiens
  misc_RNA (1)...(19): siRNA sense strand
gaacucuuucuucgugaug

SEQ ID NO: 1638451 - RNA, 19 nt, Homo sapiens
  misc_RNA (1)...(19): siRNA sense strand
gacuacaccuucccuuugc

SEQ ID NO: 1638452 - RNA, 19 nt, Homo sapiens
  misc_RNA (1)...(19): siRNA sense strand
gaauggagugaagaaguug

SEQ ID NO: 1638453 - RNA, 19 nt, Homo sapiens
  misc_RNA (1)...(19): siRNA sense strand
ucacucggauccagagcau

SEQ ID NO: 1638454 - RNA, 19 nt, Homo sapiens
  misc_RNA (1)...(19): siRNA sense strand
aguaugagacgaacaaagu

SEQ ID NO: 1638455 - RNA, 19 nt, Homo sapiens
  misc_RNA (1)...(19): siRNA sense strand
gacaaacuuucucaaaaca

SEQ ID NO: 1638456 - RNA, 19 nt, Homo sapiens
  misc_RNA (1)...(19): siRNA sense strand
ugacaaacuuucucaaaac

SEQ ID NO: 1638457 - RNA, 19 nt, Homo sapiens
  misc_RNA (1)...(19): siRNA sense strand
aagagccugucaucaguuc

SEQ ID NO: 1638458 - RNA, 19 nt, Homo sapiens
  misc_RNA (1)...(19): siRNA sense strand
gccaagagcagcgguugug

SEQ ID NO: 1638459 - RNA, 19 nt, Homo sapiens
  misc_RNA (1)...(19): siRNA sense strand
acucggauccagagcauga

SEQ ID NO: 1638460 - RNA, 19 nt, Homo sapiens
  misc_RNA (1)...(19): siRNA sense strand
ggagaucguggagaaugga

SEQ ID NO: 1638461 - RNA, 19 nt, Homo sapiens
  misc_RNA (1)...(19): siRNA sense strand
uccagagcaugaauuaugg

SEQ ID NO: 1638462 - RNA, 19 nt, Homo sapiens
  misc_RNA (1)...(19): siRNA sense strand
caacaaagccugucaaguu

SEQ ID NO: 1638463 - RNA, 19 nt, Homo sapiens
  misc_RNA (1)...(19): siRNA sense strand
gaauggaucuucccuuuca

SEQ ID NO: 1638464 - RNA, 19 nt, Homo sapiens
  misc_RNA (1)...(19): siRNA sense strand
ggaccaagcuuccucaacu

SEQ ID NO: 1638465 - RNA, 19 nt, Homo sapiens
  misc_RNA (1)...(19): siRNA sense strand
gaaccgcgacuucaacaaa

SEQ ID NO: 1638466 - RNA, 19 nt, Homo sapiens
  misc_RNA (1)...(19): siRNA sense strand
gcaaccagaugucuuccuu

SEQ ID NO: 1638467 - RNA, 19 nt, Homo sapiens
  misc_RNA (1)...(19): siRNA sense strand
gcagagagauaagaaagca

SEQ ID NO: 1638468 - RNA, 19 nt, Homo sapiens
  misc_RNA (1)...(19): siRNA sense strand
agaccuaccuggaggauga

SEQ ID NO: 1638469 - RNA, 19 nt, Homo sapiens
  misc_RNA (1)...(19): siRNA sense strand
gaaaagcacugaaguugag

SEQ ID NO: 1638470 - RNA, 19 nt, Homo sapiens
  misc_RNA (1)...(19): siRNA sense strand
acaaccagcuccuugaaga

SEQ ID NO: 1638471 - RNA, 19 nt, Homo sapiens
  misc_RNA (1)...(19): siRNA sense strand
cugaauggaucuucccuuu

SEQ ID NO: 1638472 - RNA, 19 nt, Homo sapiens
  misc_RNA (1)...(19): siRNA sense strand
gugcaaauccucucucuag

SEQ ID NO: 1638473 - RNA, 19 nt, Homo sapiens
  misc_RNA (1)...(19): siRNA sense strand
agccauugcuuccucguua

SEQ ID NO: 1638474 - RNA, 19 nt, Homo sapiens
  misc_RNA (1)...(19): siRNA sense strand
gcacugaaguugagauccu

SEQ ID NO: 1638475 - RNA, 19 nt, Homo sapiens
  misc_RNA (1)...(19): siRNA sense strand
ggagaaagagugccagucu

SEQ ID NO: 1638476 - RNA, 19 nt, Homo sapiens
  misc_RNA (1)...(19): siRNA sense strand
gaaguugagauccuagaga

SEQ ID NO: 1638477 - RNA, 19 nt, Homo sapiens
  misc_RNA (1)...(19): siRNA sense strand
gaauauuacgcggcugaua

SEQ ID NO: 1638478 - RNA, 19 nt, Homo sapiens
  misc_RNA (1)...(19): siRNA sense strand
ucgcugagcuaccgggaaa

SEQ ID NO: 1638479 - RNA, 19 nt, Homo sapiens
  misc_RNA (1)...(19): siRNA sense strand
aacaaagccugucaaguuc

SEQ ID NO: 1638480 - RNA, 19 nt, Homo sapiens
  misc_RNA (1)...(19): siRNA sense strand
uaagcuauccuguccgaaa

SEQ ID NO: 1638481 - RNA, 19 nt, Homo sapiens
  misc_RNA (1)...(19): siRNA sense strand
gagauaagaaagcaagugu

SEQ ID NO: 1638482 - RNA, 19 nt, Homo sapiens
  misc_RNA (1)...(19): siRNA sense strand
gagaguggguccagaaucc

SEQ ID NO: 1638483 - RNA, 19 nt, Homo sapiens
  misc_RNA (1)...(19): siRNA sense strand
caagugugcuauacaucga

SEQ ID NO: 1638484 - RNA, 19 nt, Homo sapiens
  misc_RNA (1)...(19): siRNA sense strand
caagacggcugaggagaag

SEQ ID NO: 1638485 - RNA, 19 nt, Homo sapiens
  misc_RNA (1)...(19): siRNA sense strand
gccaguacgugaccugugu

SEQ ID NO: 1638486 - RNA, 19 nt, Homo sapiens
  misc_RNA (1)...(19): siRNA sense strand
ggaagaacuggccuacaga

SEQ ID NO: 1638487 - RNA, 19 nt, Homo sapiens
  misc_RNA (1)...(19): siRNA sense strand
gaaguaggaaugcuagucu

SEQ ID NO: 1638488 - RNA, 19 nt, Homo sapiens
  misc_RNA (1)...(19): siRNA sense strand
gaugagaguggguccagaa

SEQ ID NO: 1638489 - RNA, 19 nt, Homo sapiens
  misc_RNA (1)...(19): siRNA sense strand
aaguugagauccuagagaa

SEQ ID NO: 1638490 - RNA, 19 nt, Homo sapiens
  misc_RNA (1)...(19): siRNA sense strand
cgacuacaggguccgguua

SEQ ID NO: 1638491 - RNA, 19 nt, Homo sapiens
  misc_RNA (1)...(19): siRNA sense strand
ggagacguguugggcaguu

SEQ ID NO: 1638492 - RNA, 19 nt, Homo sapiens
  misc_RNA (1)...(19): siRNA sense strand
uggaagaacuggccuacag

SEQ ID NO: 1638493 - RNA, 19 nt, Homo sapiens
  misc_RNA (1)...(19): siRNA sense strand
ugaccuguguggagaccua

SEQ ID NO: 1638494 - RNA, 19 nt, Homo sapiens
  misc_RNA (1)...(19): siRNA sense strand
gaccaagcuuccucaacug

SEQ ID NO: 1638495 - RNA, 19 nt, Homo sapiens
  misc_RNA (1)...(19): siRNA sense strand
cuaauuccaugcguucuau

SEQ ID NO: 1638496 - RNA, 19 nt, Homo sapiens
  misc_RNA (1)...(19): siRNA sense strand
aaauuggacucuugcaagu

SEQ ID NO: 1638497 - RNA, 19 nt, Homo sapiens
  misc_RNA (1)...(19): siRNA sense strand
gauuauggccugcgaaggu

SEQ ID NO: 1638498 - RNA, 19 nt, Homo sapiens
  misc_RNA (1)...(19): siRNA sense strand
ggccaugugugcaacaaag

SEQ ID NO: 1638499 - RNA, 19 nt, Homo sapiens
  misc_RNA (1)...(19): siRNA sense strand
auuggacucuugcaaguaa

SEQ ID NO: 1638500 - RNA, 19 nt, Homo sapiens
  misc_RNA (1)...(19): siRNA sense strand
uggacgagguggacuacaa

SEQ ID NO: 1638501 - RNA, 19 nt, Homo sapiens
  misc_RNA (1)...(19): siRNA sense strand
gagguggugcccaagauga

SEQ ID NO: 1638502 - RNA, 19 nt, Homo sapiens
  misc_RNA (1)...(19): siRNA sense strand
caccaagaguccuuuuaua

SEQ ID NO: 1638503 - RNA, 19 nt, Homo sapiens
  misc_RNA (1)...(19): siRNA sense strand
gaugcaaccagaugucuuc

SEQ ID NO: 1638504 - RNA, 19 nt, Homo sapiens
  misc_RNA (1)...(19): siRNA sense strand
gguuucacagugucucuua

SEQ ID NO: 1638505 - RNA, 19 nt, Homo sapiens
  misc_RNA (1)...(19): siRNA sense strand
gguccagaauccaccacaa

SEQ ID NO: 1638506 - RNA, 19 nt, Homo sapiens
  misc_RNA (1)...(19): siRNA sense strand
gauucgaacuccucaucuc

SEQ ID NO: 1638507 - RNA, 19 nt, Homo sapiens
  misc_RNA (1)...(19): siRNA sense strand
gaggaggccaugugugcaa

SEQ ID NO: 1638508 - RNA, 19 nt, Homo sapiens
  misc_RNA (1)...(19): siRNA sense strand
gaggaaacucagcgcagaa

SEQ ID NO: 1638509 - RNA, 19 nt, Homo sapiens
  misc_RNA (1)...(19): siRNA sense strand
acaagacggcugaggagaa

SEQ ID NO: 1638510 - RNA, 19 nt, Homo sapiens
  misc_RNA (1)...(19): siRNA sense strand
uuacgcggcugauauaagc

SEQ ID NO: 1638511 - RNA, 19 nt, Homo sapiens
  misc_RNA (1)...(19): siRNA sense strand
cagugucucuuaaaaguuu

SEQ ID NO: 1638512 - RNA, 19 nt, Homo sapiens
  misc_RNA (1)...(19): siRNA sense strand
caaagccugucaaguucgu

SEQ ID NO: 1638513 - RNA, 19 nt, Homo sapiens
  misc_RNA (1)...(19): siRNA sense strand
ugacaaccagcuccuugaa

SEQ ID NO: 1638514 - RNA, 19 nt, Homo sapiens
  misc_RNA (1)...(19): siRNA sense strand
agucuggcauaaacauaaa

SEQ ID NO: 1638515 - RNA, 19 nt, Homo sapiens
  misc_RNA (1)...(19): siRNA sense strand
gauuuggagucaagaaagc

SEQ ID NO: 1638516 - RNA, 19 nt, Homo sapiens
  misc_RNA (1)...(19): siRNA sense strand
agacggcugaggagaagua

SEQ ID NO: 1638517 - RNA, 19 nt, Homo sapiens
  misc_RNA (1)...(19): siRNA sense strand
guccagaauccaccacaaa

SEQ ID NO: 1638518 - RNA, 19 nt, Homo sapiens
  misc_RNA (1)...(19): siRNA sense strand
ucgcguggcucuggacguu

SEQ ID NO: 1638519 - RNA, 19 nt, Homo sapiens
  misc_RNA (1)...(19): siRNA sense strand
ggacgagguggacuacaag

SEQ ID NO: 1638520 - RNA, 19 nt, Homo sapiens
  misc_RNA (1)...(19): siRNA sense strand
caucaucugugcgaucucu

SEQ ID NO: 1638521 - RNA, 19 nt, Homo sapiens
  misc_RNA (1)...(19): siRNA sense strand
ggacuucaaccaggacauc

SEQ ID NO: 1638522 - RNA, 19 nt, Homo sapiens
  misc_RNA (1)...(19): siRNA sense strand
gcuagcuugugccugaaug

SEQ ID NO: 1638523 - RNA, 19 nt, Homo sapiens
  misc_RNA (1)...(19): siRNA sense strand
gcgcagaaggcuagcuugu

SEQ ID NO: 1638524 - RNA, 19 nt, Homo sapiens
  misc_RNA (1)...(19): siRNA sense strand
gcaacaaagccugucaagu

SEQ ID NO: 1638525 - RNA, 19 nt, Homo sapiens
  misc_RNA (1)...(19): siRNA sense strand
ucgaacuccucaucucuuc

SEQ ID NO: 1638526 - RNA, 19 nt, Homo sapiens
  misc_RNA (1)...(19): siRNA sense strand
ggagguggugcccaagaug

SEQ ID NO: 1638527 - RNA, 19 nt, Homo sapiens
  misc_RNA (1)...(19): siRNA sense strand
guuucacagugucucuuaa

SEQ ID NO: 1638528 - RNA, 19 nt, Homo sapiens
  misc_RNA (1)...(19): siRNA sense strand
ccacguucguuugaaguag

SEQ ID NO: 1638529 - RNA, 19 nt, Homo sapiens
  misc_RNA (1)...(19): siRNA sense strand
gaggccaugugugcaacaa

SEQ ID NO: 1638530 - RNA, 19 nt, Homo sapiens
  misc_RNA (1)...(19): siRNA sense strand
gaagcugguggaguacauu

SEQ ID NO: 1638531 - RNA, 19 nt, Homo sapiens
  misc_RNA (1)...(19): siRNA sense strand
gauuguaaagagaaacaga

SEQ ID NO: 1638532 - RNA, 19 nt, Homo sapiens
  misc_RNA (1)...(19): siRNA sense strand
uagucuggcauaaacauaa

SEQ ID NO: 1638533 - RNA, 19 nt, Homo sapiens
  misc_RNA (1)...(19): siRNA sense strand
ggaggaagacgaggaagac

SEQ ID NO: 1638534 - RNA, 19 nt, Homo sapiens
  misc_RNA (1)...(19): siRNA sense strand
ugcaaauccucucucuaga

SEQ ID NO: 1638535 - RNA, 19 nt, Homo sapiens
  misc_RNA (1)...(19): siRNA sense strand
gccaucaucugugcgaucu

SEQ ID NO: 1638536 - RNA, 19 nt, Homo sapiens
  misc_RNA (1)...(19): siRNA sense strand
cacaugaacccgaaaauga

SEQ ID NO: 1638537 - RNA, 19 nt, Homo sapiens
  misc_RNA (1)...(19): siRNA sense strand
ucguuagccucacagaaug

SEQ ID NO: 1638538 - RNA, 19 nt, Homo sapiens
  misc_RNA (1)...(19): siRNA sense strand
auacaucgaaggacacaug

SEQ ID NO: 1638539 - RNA, 19 nt, Homo sapiens
  misc_RNA (1)...(19): siRNA sense strand
caagaguccuuuuauacca

SEQ ID NO: 1638540 - RNA, 19 nt, Homo sapiens
  misc_RNA (1)...(19): siRNA sense strand
gaaaagugaaaacccaaga

SEQ ID NO: 1638541 - RNA, 19 nt, Homo sapiens
  misc_RNA (1)...(19): siRNA sense strand
ucaggcagagagauaagaa

SEQ ID NO: 1638542 - RNA, 19 nt, Homo sapiens
  misc_RNA (1)...(19): siRNA sense strand
guugagauccuagagaagu

SEQ ID NO: 1638543 - RNA, 19 nt, Homo sapiens
  misc_RNA (1)...(19): siRNA sense strand
uggaccugguggugaagua

SEQ ID NO: 1638544 - RNA, 19 nt, Homo sapiens
  misc_RNA (1)...(19): siRNA sense strand
gcccgaggccaucaucugu

SEQ ID NO: 1638545 - RNA, 19 nt, Homo sapiens
  misc_RNA (1)...(19): siRNA sense strand
cacugaaguugagauccua

SEQ ID NO: 1638546 - RNA, 19 nt, Homo sapiens
  misc_RNA (1)...(19): siRNA sense strand
gcccgaaccgcgacuucaa

SEQ ID NO: 1638547 - RNA, 19 nt, Homo sapiens
  misc_RNA (1)...(19): siRNA sense strand
ggaugcaaccagaugucuu

SEQ ID NO: 1638548 - RNA, 19 nt, Homo sapiens
  misc_RNA (1)...(19): siRNA sense strand
gccauugcuuccucguuag

SEQ ID NO: 1638549 - RNA, 19 nt, Homo sapiens
  misc_RNA (1)...(19): siRNA sense strand
cgacacggagagagacaug

SEQ ID NO: 1638550 - RNA, 19 nt, Homo sapiens
  misc_RNA (1)...(19): siRNA sense strand
uggugugucucccucauca

SEQ ID NO: 1638551 - RNA, 19 nt, Homo sapiens
  misc_RNA (1)...(19): siRNA sense strand
caucgaaggacacaugaac

SEQ ID NO: 1638552 - RNA, 19 nt, Homo sapiens
  misc_RNA (1)...(19): siRNA sense strand
agacgaggagccaccaaga

SEQ ID NO: 1638553 - RNA, 19 nt, Homo sapiens
  misc_RNA (1)...(19): siRNA sense strand
gaagacgaggagccaccaa

SEQ ID NO: 1638554 - RNA, 19 nt, Homo sapiens
  misc_RNA (1)...(19): siRNA sense strand
ggagaaugcccugcgaaaa

SEQ ID NO: 1638555 - RNA, 19 nt, Homo sapiens
  misc_RNA (1)...(19): siRNA sense strand
uggagaaugcccugcgaaa

SEQ ID NO: 1638556 - RNA, 19 nt, Homo sapiens
  misc_RNA (1)...(19): siRNA sense strand
gaacagaaguuacagaaug

SEQ ID NO: 1638557 - RNA, 19 nt, Homo sapiens
  misc_RNA (1)...(19): siRNA sense strand
gggaaacucuggaagaaua

SEQ ID NO: 1638558 - RNA, 19 nt, Homo sapiens
  misc_RNA (1)...(19): siRNA sense strand
ggaauuugcugaagugaaa

SEQ ID NO: 1638559 - RNA, 19 nt, Homo sapiens
  misc_RNA (1)...(19): siRNA sense strand
gaaccaagccgaaaccaua

SEQ ID NO: 1638560 - RNA, 19 nt, Homo sapiens
  misc_RNA (1)...(19): siRNA sense strand
gaagaacacuccagaggau

SEQ ID NO: 1638561 - RNA, 19 nt, Homo sapiens
  misc_RNA (1)...(19): siRNA sense strand
caaauacgaugaagaaacu

SEQ ID NO: 1638562 - RNA, 19 nt, Homo sapiens
  misc_RNA (1)...(19): siRNA sense strand
gaagaaagagcugaacauu

SEQ ID NO: 1638563 - RNA, 19 nt, Homo sapiens
  misc_RNA (1)...(19): siRNA sense strand
acagagaaccagaaacuua

SEQ ID NO: 1638564 - RNA, 19 nt, Homo sapiens
  misc_RNA (1)...(19): siRNA sense strand
ggaggaagcugagcauaag

SEQ ID NO: 1638565 - RNA, 19 nt, Homo sapiens
  misc_RNA (1)...(19): siRNA sense strand
cagaaugacuuugcagaaa

SEQ ID NO: 1638566 - RNA, 19 nt, Homo sapiens
  misc_RNA (1)...(19): siRNA sense strand
caaggaauuugcugaagug

SEQ ID NO: 1638567 - RNA, 19 nt, Homo sapiens
  misc_RNA (1)...(19): siRNA sense strand
ggaagaauacaacaaggaa

SEQ ID NO: 1638568 - RNA, 19 nt, Homo sapiens
  misc_RNA (1)...(19): siRNA sense strand
ccauagcucuugagaagga

SEQ ID NO: 1638569 - RNA, 19 nt, Homo sapiens
  misc_RNA (1)...(19): siRNA sense strand
ugaagaaacuacugcaaag

SEQ ID NO: 1638570 - RNA, 19 nt, Homo sapiens
  misc_RNA (1)...(19): siRNA sense strand
aaagugagcaguccagaaa

SEQ ID NO: 1638571 - RNA, 19 nt, Homo sapiens
  misc_RNA (1)...(19): siRNA sense strand
gcugaagaguuuccaagga

SEQ ID NO: 1638572 - RNA, 19 nt, Homo sapiens
  misc_RNA (1)...(19): siRNA sense strand
augaagaggugaagaaaga

SEQ ID NO: 1638573 - RNA, 19 nt, Homo sapiens
  misc_RNA (1)...(19): siRNA sense strand
ucaaacaacuggaagaaaa

SEQ ID NO: 1638574 - RNA, 19 nt, Homo sapiens
  misc_RNA (1)...(19): siRNA sense strand
aaccauagcucuugagaag

SEQ ID NO: 1638575 - RNA, 19 nt, Homo sapiens
  misc_RNA (1)...(19): siRNA sense strand
gaauaugaacagacacuga

SEQ ID NO: 1638576 - RNA, 19 nt, Homo sapiens
  misc_RNA (1)...(19): siRNA sense strand
caacaaggaauuugcugaa

SEQ ID NO: 1638577 - RNA, 19 nt, Homo sapiens
  misc_RNA (1)...(19): siRNA sense strand
gaucaugacggaccuugaa

SEQ ID NO: 1638578 - RNA, 19 nt, Homo sapiens
  misc_RNA (1)...(19): siRNA sense strand
gagagaggcggagaccuua

SEQ ID NO: 1638579 - RNA, 19 nt, Homo sapiens
  misc_RNA (1)...(19): siRNA sense strand
gaaagugagcaguccagaa

SEQ ID NO: 1638580 - RNA, 19 nt, Homo sapiens
  misc_RNA (1)...(19): siRNA sense strand
gagauugaaaugaucauga

SEQ ID NO: 1638581 - RNA, 19 nt, Homo sapiens
  misc_RNA (1)...(19): siRNA sense strand
ucaccaagcugcgggagaa

SEQ ID NO: 1638582 - RNA, 19 nt, Homo sapiens
  misc_RNA (1)...(19): siRNA sense strand
gccgggaguucaagaagaa

SEQ ID NO: 1638583 - RNA, 19 nt, Homo sapiens
  misc_RNA (1)...(19): siRNA sense strand
uagggaaacucuggaagaa

SEQ ID NO: 1638584 - RNA, 19 nt, Homo sapiens
  misc_RNA (1)...(19): siRNA sense strand
aaacagcacacucaaacaa

SEQ ID NO: 1638585 - RNA, 19 nt, Homo sapiens
  misc_RNA (1)...(19): siRNA sense strand
gagcugaacauucugaagu

SEQ ID NO: 1638586 - RNA, 19 nt, Homo sapiens
  misc_RNA (1)...(19): siRNA sense strand
gacagcaacuccagcucaa

SEQ ID NO: 1638587 - RNA, 19 nt, Homo sapiens
  misc_RNA (1)...(19): siRNA sense strand
aacagaaguuacagaauga

SEQ ID NO: 1638588 - RNA, 19 nt, Homo sapiens
  misc_RNA (1)...(19): siRNA sense strand
ugagaaggaacagaaguua

SEQ ID NO: 1638589 - RNA, 19 nt, Homo sapiens
  misc_RNA (1)...(19): siRNA sense strand
gaaaccauagcucuugaga

SEQ ID NO: 1638590 - RNA, 19 nt, Homo sapiens
  misc_RNA (1)...(19): siRNA sense strand
aucaagagguuacgauaaa

SEQ ID NO: 1638591 - RNA, 19 nt, Homo sapiens
  misc_RNA (1)...(19): siRNA sense strand
guucagagccuacaaacag

SEQ ID NO: 1638592 - RNA, 19 nt, Homo sapiens
  misc_RNA (1)...(19): siRNA sense strand
gcagcuuucuugaaugucu

SEQ ID NO: 1638593 - RNA, 19 nt, Homo sapiens
  misc_RNA (1)...(19): siRNA sense strand
cgacgagauugaaaugauc

SEQ ID NO: 1638594 - RNA, 19 nt, Homo sapiens
  misc_RNA (1)...(19): siRNA sense strand
ccgagaauaugaacagaca

SEQ ID NO: 1638595 - RNA, 19 nt, Homo sapiens
  misc_RNA (1)...(19): siRNA sense strand
gaauacaacaaggaauuug

SEQ ID NO: 1638596 - RNA, 19 nt, Homo sapiens
  misc_RNA (1)...(19): siRNA sense strand
aaacagagaaccagaaacu

SEQ ID NO: 1638597 - RNA, 19 nt, Homo sapiens
  misc_RNA (1)...(19): siRNA sense strand
ugaaacagagaaccagaaa

SEQ ID NO: 1638598 - RNA, 19 nt, Homo sapiens
  misc_RNA (1)...(19): siRNA sense strand
gcuccagccuagaaguuga

SEQ ID NO: 1638599 - RNA, 19 nt, Homo sapiens
  misc_RNA (1)...(19): siRNA sense strand
ucaaaggccaggcugacua

SEQ ID NO: 1638600 - RNA, 19 nt, Homo sapiens
  misc_RNA (1)...(19): siRNA sense strand
gaacacuccagaggauuug

SEQ ID NO: 1638601 - RNA, 19 nt, Homo sapiens
  misc_RNA (1)...(19): siRNA sense strand
caaaggccgacgagauuga

SEQ ID NO: 1638602 - RNA, 19 nt, Homo sapiens
  misc_RNA (1)...(19): siRNA sense strand
gcaaaggccgacgagauug

SEQ ID NO: 1638603 - RNA, 19 nt, Homo sapiens
  misc_RNA (1)...(19): siRNA sense strand
gauaaaagcacuuaaagag

SEQ ID NO: 1638604 - RNA, 19 nt, Homo sapiens
  misc_RNA (1)...(19): siRNA sense strand
acaaggaauuugcugaagu

SEQ ID NO: 1638605 - RNA, 19 nt, Homo sapiens
  misc_RNA (1)...(19): siRNA sense strand
gaagaauacaacaaggaau

SEQ ID NO: 1638606 - RNA, 19 nt, Homo sapiens
  misc_RNA (1)...(19): siRNA sense strand
gagauugaugcacugagua

SEQ ID NO: 1638607 - RNA, 19 nt, Homo sapiens
  misc_RNA (1)...(19): siRNA sense strand
ccgacgagauugaaaugau

SEQ ID NO: 1638608 - RNA, 19 nt, Homo sapiens
  misc_RNA (1)...(19): siRNA sense strand
gaaaauccgagaauaugaa

SEQ ID NO: 1638609 - RNA, 19 nt, Homo sapiens
  misc_RNA (1)...(19): siRNA sense strand
aaccaaauacgaugaagaa

SEQ ID NO: 1638610 - RNA, 19 nt, Homo sapiens
  misc_RNA (1)...(19): siRNA sense strand
gaaagcugcaggagacaca

SEQ ID NO: 1638611 - RNA, 19 nt, Homo sapiens
  misc_RNA (1)...(19): siRNA sense strand
aaucaagagguuacgauaa

SEQ ID NO: 1638612 - RNA, 19 nt, Homo sapiens
  misc_RNA (1)...(19): siRNA sense strand
caaaggccaggcugacuau

SEQ ID NO: 1638613 - RNA, 19 nt, Homo sapiens
  misc_RNA (1)...(19): siRNA sense strand
cuacaaacagcccuggaaa

SEQ ID NO: 1638614 - RNA, 19 nt, Homo sapiens
  misc_RNA (1)...(19): siRNA sense strand
ccgaaaccauagcucuuga

SEQ ID NO: 1638615 - RNA, 19 nt, Homo sapiens
  misc_RNA (1)...(19): siRNA sense strand
ggaacagaaguuacagaau

SEQ ID NO: 1638616 - RNA, 19 nt, Homo sapiens
  misc_RNA (1)...(19): siRNA sense strand
cagaauuauuugaccugaa

SEQ ID NO: 1638617 - RNA, 19 nt, Homo sapiens
  misc_RNA (1)...(19): siRNA sense strand
uggaggaagcugagcauaa

SEQ ID NO: 1638618 - RNA, 19 nt, Homo sapiens
  misc_RNA (1)...(19): siRNA sense strand
aaaucaagagguuacgaua

SEQ ID NO: 1638619 - RNA, 19 nt, Homo sapiens
  misc_RNA (1)...(19): siRNA sense strand
gaaccggcaggaugaaagu

SEQ ID NO: 1638620 - RNA, 19 nt, Homo sapiens
  misc_RNA (1)...(19): siRNA sense strand
uaagggaacagcucucauc

SEQ ID NO: 1638621 - RNA, 19 nt, Homo sapiens
  misc_RNA (1)...(19): siRNA sense strand
ccaaauacgaugaagaaac

SEQ ID NO: 1638622 - RNA, 19 nt, Homo sapiens
  misc_RNA (1)...(19): siRNA sense strand
cagccuagaaguugaguug

SEQ ID NO: 1638623 - RNA, 19 nt, Homo sapiens
  misc_RNA (1)...(19): siRNA sense strand
agagauugaugcacugagu

SEQ ID NO: 1638624 - RNA, 19 nt, Homo sapiens
  misc_RNA (1)...(19): siRNA sense strand
cgccgcugcugaagaguuu

SEQ ID NO: 1638625 - RNA, 19 nt, Homo sapiens
  misc_RNA (1)...(19): siRNA sense strand
ugcaaaggccgacgagauu

SEQ ID NO: 1638626 - RNA, 19 nt, Homo sapiens
  misc_RNA (1)...(19): siRNA sense strand
gaugaagaaacuacugcaa

SEQ ID NO: 1638627 - RNA, 19 nt, Homo sapiens
  misc_RNA (1)...(19): siRNA sense strand
agaaggaacagaaguuaca

SEQ ID NO: 1638628 - RNA, 19 nt, Homo sapiens
  misc_RNA (1)...(19): siRNA sense strand
cagagaaccagaaacuuag

SEQ ID NO: 1638629 - RNA, 19 nt, Homo sapiens
  misc_RNA (1)...(19): siRNA sense strand
ugaaguccauggaguuugc

SEQ ID NO: 1638630 - RNA, 19 nt, Homo sapiens
  misc_RNA (1)...(19): siRNA sense strand
aggccaggcugacuaugaa

SEQ ID NO: 1638631 - RNA, 19 nt, Homo sapiens
  misc_RNA (1)...(19): siRNA sense strand
gagaaaauccgagaauaug

SEQ ID NO: 1638632 - RNA, 19 nt, Homo sapiens
  misc_RNA (1)...(19): siRNA sense strand
gcaacuccagcucaaagug

SEQ ID NO: 1638633 - RNA, 19 nt, Homo sapiens
  misc_RNA (1)...(19): siRNA sense strand
agaacacuccagaggauuu

SEQ ID NO: 1638634 - RNA, 19 nt, Homo sapiens
  misc_RNA (1)...(19): siRNA sense strand
gaagaaacuacugcaaagg

SEQ ID NO: 1638635 - RNA, 19 nt, Homo sapiens
  misc_RNA (1)...(19): siRNA sense strand
ggaagcugagcauaagguu

SEQ ID NO: 1638636 - RNA, 19 nt, Homo sapiens
  misc_RNA (1)...(19): siRNA sense strand
cagaucccguaccagcuuu

SEQ ID NO: 1638637 - RNA, 19 nt, Homo sapiens
  misc_RNA (1)...(19): siRNA sense strand
agagagaggcggagaccuu

SEQ ID NO: 1638638 - RNA, 19 nt, Homo sapiens
  misc_RNA (1)...(19): siRNA sense strand
aagcugagcauaagguuca

SEQ ID NO: 1638639 - RNA, 19 nt, Homo sapiens
  misc_RNA (1)...(19): siRNA sense strand
agaaugacuuugcagaaaa

SEQ ID NO: 1638640 - RNA, 19 nt, Homo sapiens
  misc_RNA (1)...(19): siRNA sense strand
aaccagaaacuuagggaaa

SEQ ID NO: 1638641 - RNA, 19 nt, Homo sapiens
  misc_RNA (1)...(19): siRNA sense strand
gaauucggccagccagauc

SEQ ID NO: 1638642 - RNA, 19 nt, Homo sapiens
  misc_RNA (1)...(19): siRNA sense strand
ggagagauugaugcacuga

SEQ ID NO: 1638643 - RNA, 19 nt, Homo sapiens
  misc_RNA (1)...(19): siRNA sense strand
aauaugaacagacacugaa

SEQ ID NO: 1638644 - RNA, 19 nt, Homo sapiens
  misc_RNA (1)...(19): siRNA sense strand
ugcacgauauugaaacaga

SEQ ID NO: 1638645 - RNA, 19 nt, Homo sapiens
  misc_RNA (1)...(19): siRNA sense strand
aagaaagagcugaacauuc

SEQ ID NO: 1638646 - RNA, 19 nt, Homo sapiens
  misc_RNA (1)...(19): siRNA sense strand
gaaaaccaaauacgaugaa

SEQ ID NO: 1638647 - RNA, 19 nt, Homo sapiens
  misc_RNA (1)...(19): siRNA sense strand
acagaaugacuuugcagaa

SEQ ID NO: 1638648 - RNA, 19 nt, Homo sapiens
  misc_RNA (1)...(19): siRNA sense strand
cagcuuucuugaaugucua

SEQ ID NO: 1638649 - RNA, 19 nt, Homo sapiens
  misc_RNA (1)...(19): siRNA sense strand
gagaauaugaacagacacu

SEQ ID NO: 1638650 - RNA, 19 nt, Homo sapiens
  misc_RNA (1)...(19): siRNA sense strand
ccaagcugcgggagaauuc

SEQ ID NO: 1638651 - RNA, 19 nt, Homo sapiens
  misc_RNA (1)...(19): siRNA sense strand
ugaacauucugaaguccau

SEQ ID NO: 1638652 - RNA, 19 nt, Homo sapiens
  misc_RNA (1)...(19): siRNA sense strand
aaagagcugaacauucuga

SEQ ID NO: 1638653 - RNA, 19 nt, Homo sapiens
  misc_RNA (1)...(19): siRNA sense strand
ccagaucccguaccagcuu

SEQ ID NO: 1638654 - RNA, 19 nt, Homo sapiens
  misc_RNA (1)...(19): siRNA sense strand
agauugaugcacugaguaa

SEQ ID NO: 1638655 - RNA, 19 nt, Homo sapiens
  misc_RNA (1)...(19): siRNA sense strand
ugaagaaagagcugaacau

SEQ ID NO: 1638656 - RNA, 19 nt, Homo sapiens
  misc_RNA (1)...(19): siRNA sense strand
gaacagaaguuacagaaug

SEQ ID NO: 1638657 - RNA, 19 nt, Homo sapiens
  misc_RNA (1)...(19): siRNA sense strand
gggaaacucuggaagaaua

SEQ ID NO: 1638658 - RNA, 19 nt, Homo sapiens
  misc_RNA (1)...(19): siRNA sense strand
ggaauuugcugaagugaaa

SEQ ID NO: 1638659 - RNA, 19 nt, Homo sapiens
  misc_RNA (1)...(19): siRNA sense strand
gaaccaagccgaaaccaua

SEQ ID NO: 1638660 - RNA, 19 nt, Homo sapiens
  misc_RNA (1)...(19): siRNA sense strand
gaagaacacuccagaggau

SEQ ID NO: 1638661 - RNA, 19 nt, Homo sapiens
  misc_RNA (1)...(19): siRNA sense strand
caaauacgaugaagaaacu

SEQ ID NO: 1638662 - RNA, 19 nt, Homo sapiens
  misc_RNA (1)...(19): siRNA sense strand
gaagaaagagcugaacauu

SEQ ID NO: 1638663 - RNA, 19 nt, Homo sapiens
  misc_RNA (1)...(19): siRNA sense strand
acagagaaccagaaacuua

SEQ ID NO: 1638664 - RNA, 19 nt, Homo sapiens
  misc_RNA (1)...(19): siRNA sense strand
ggaggaagcugagcauaag

SEQ ID NO: 1638665 - RNA, 19 nt, Homo sapiens
  misc_RNA (1)...(19): siRNA sense strand
cagaaugacuuugcagaaa

SEQ ID NO: 1638666 - RNA, 19 nt, Homo sapiens
  misc_RNA (1)...(19): siRNA sense strand
caaggaauuugcugaagug

SEQ ID NO: 1638667 - RNA, 19 nt, Homo sapiens
  misc_RNA (1)...(19): siRNA sense strand
ggaagaauacaacaaggaa

SEQ ID NO: 1638668 - RNA, 19 nt, Homo sapiens
  misc_RNA (1)...(19): siRNA sense strand
ccauagcucuugagaagga

SEQ ID NO: 1638669 - RNA, 19 nt, Homo sapiens
  misc_RNA (1)...(19): siRNA sense strand
ugaagaaacuacugcaaag

SEQ ID NO: 1638670 - RNA, 19 nt, Homo sapiens
  misc_RNA (1)...(19): siRNA sense strand
aaagugagcaguccagaaa

SEQ ID NO: 1638671 - RNA, 19 nt, Homo sapiens
  misc_RNA (1)...(19): siRNA sense strand
gcugaagaguuuccaagga

SEQ ID NO: 1638672 - RNA, 19 nt, Homo sapiens
  misc_RNA (1)...(19): siRNA sense strand
augaagaggugaagaaaga

SEQ ID NO: 1638673 - RNA, 19 nt, Homo sapiens
  misc_RNA (1)...(19): siRNA sense strand
ucaaacaacuggaagaaaa

SEQ ID NO: 1638674 - RNA, 19 nt, Homo sapiens
  misc_RNA (1)...(19): siRNA sense strand
aaccauagcucuugagaag

SEQ ID NO: 1638675 - RNA, 19 nt, Homo sapiens
  misc_RNA (1)...(19): siRNA sense strand
gaauaugaacagacacuga

SEQ ID NO: 1638676 - RNA, 19 nt, Homo sapiens
  misc_RNA (1)...(19): siRNA sense strand
caacaaggaauuugcugaa

SEQ ID NO: 1638677 - RNA, 19 nt, Homo sapiens
  misc_RNA (1)...(19): siRNA sense strand
gaucaugacggaccuugaa

SEQ ID NO: 1638678 - RNA, 19 nt, Homo sapiens
  misc_RNA (1)...(19): siRNA sense strand
gagagaggcggagaccuua

SEQ ID NO: 1638679 - RNA, 19 nt, Homo sapiens
  misc_RNA (1)...(19): siRNA sense strand
gaaagugagcaguccagaa

SEQ ID NO: 1638680 - RNA, 19 nt, Homo sapiens
  misc_RNA (1)...(19): siRNA sense strand
gagauugaaaugaucauga

SEQ ID NO: 1638681 - RNA, 19 nt, Homo sapiens
  misc_RNA (1)...(19): siRNA sense strand
ucaccaagcugcgggagaa

SEQ ID NO: 1638682 - RNA, 19 nt, Homo sapiens
  misc_RNA (1)...(19): siRNA sense strand
gccgggaguucaagaagaa

SEQ ID NO: 1638683 - RNA, 19 nt, Homo sapiens
  misc_RNA (1)...(19): siRNA sense strand
uagggaaacucuggaagaa

SEQ ID NO: 1638684 - RNA, 19 nt, Homo sapiens
  misc_RNA (1)...(19): siRNA sense strand
aaacagcacacucaaacaa

SEQ ID NO: 1638685 - RNA, 19 nt, Homo sapiens
  misc_RNA (1)...(19): siRNA sense strand
gagcugaacauucugaagu

SEQ ID NO: 1638686 - RNA, 19 nt, Homo sapiens
  misc_RNA (1)...(19): siRNA sense strand
gacagcaacuccagcucaa

SEQ ID NO: 1638687 - RNA, 19 nt, Homo sapiens
  misc_RNA (1)...(19): siRNA sense strand
aacagaaguuacagaauga

SEQ ID NO: 1638688 - RNA, 19 nt, Homo sapiens
  misc_RNA (1)...(19): siRNA sense strand
ugagaaggaacagaaguua

SEQ ID NO: 1638689 - RNA, 19 nt, Homo sapiens
  misc_RNA (1)...(19): siRNA sense strand
gaaaccauagcucuugaga

SEQ ID NO: 1638690 - RNA, 19 nt, Homo sapiens
  misc_RNA (1)...(19): siRNA sense strand
aucaagagguuacgauaaa

SEQ ID NO: 1638691 - RNA, 19 nt, Homo sapiens
  misc_RNA (1)...(19): siRNA sense strand
guucagagccuacaaacag

SEQ ID NO: 1638692 - RNA, 19 nt, Homo sapiens
  misc_RNA (1)...(19): siRNA sense strand
gcagcuuucuugaaugucu

SEQ ID NO: 1638693 - RNA, 19 nt, Homo sapiens
  misc_RNA (1)...(19): siRNA sense strand
cgacgagauugaaaugauc

SEQ ID NO: 1638694 - RNA, 19 nt, Homo sapiens
  misc_RNA (1)...(19): siRNA sense strand
ccgagaauaugaacagaca

SEQ ID NO: 1638695 - RNA, 19 nt, Homo sapiens
  misc_RNA (1)...(19): siRNA sense strand
gaauacaacaaggaauuug

SEQ ID NO: 1638696 - RNA, 19 nt, Homo sapiens
  misc_RNA (1)...(19): siRNA sense strand
aaacagagaaccagaaacu

SEQ ID NO: 1638697 - RNA, 19 nt, Homo sapiens
  misc_RNA (1)...(19): siRNA sense strand
ugaaacagagaaccagaaa

SEQ ID NO: 1638698 - RNA, 19 nt, Homo sapiens
  misc_RNA (1)...(19): siRNA sense strand
gcuccagccuagaaguuga

SEQ ID NO: 1638699 - RNA, 19 nt, Homo sapiens
  misc_RNA (1)...(19): siRNA sense strand
ucaaaggccaggcugacua

SEQ ID NO: 1638700 - RNA, 19 nt, Homo sapiens
  misc_RNA (1)...(19): siRNA sense strand
gaacacuccagaggauuug

SEQ ID NO: 1638701 - RNA, 19 nt, Homo sapiens
  misc_RNA (1)...(19): siRNA sense strand
caaaggccgacgagauuga

SEQ ID NO: 1638702 - RNA, 19 nt, Homo sapiens
  misc_RNA (1)...(19): siRNA sense strand
gcaaaggccgacgagauug

SEQ ID NO: 1638703 - RNA, 19 nt, Homo sapiens
  misc_RNA (1)...(19): siRNA sense strand
gauaaaagcacuuaaagag

SEQ ID NO: 1638704 - RNA, 19 nt, Homo sapiens
  misc_RNA (1)...(19): siRNA sense strand
acaaggaauuugcugaagu

SEQ ID NO: 1638705 - RNA, 19 nt, Homo sapiens
  misc_RNA (1)...(19): siRNA sense strand
gaagaauacaacaaggaau

SEQ ID NO: 1638706 - RNA, 19 nt, Homo sapiens
  misc_RNA (1)...(19): siRNA sense strand
gagauugaugcacugagua

SEQ ID NO: 1638707 - RNA, 19 nt, Homo sapiens
  misc_RNA (1)...(19): siRNA sense strand
ccgacgagauugaaaugau

SEQ ID NO: 1638708 - RNA, 19 nt, Homo sapiens
  misc_RNA (1)...(19): siRNA sense strand
gaaaauccgagaauaugaa

SEQ ID NO: 1638709 - RNA, 19 nt, Homo sapiens
  misc_RNA (1)...(19): siRNA sense strand
aaccaaauacgaugaagaa

SEQ ID NO: 1638710 - RNA, 19 nt, Homo sapiens
  misc_RNA (1)...(19): siRNA sense strand
gaaagcugcaggagacaca

SEQ ID NO: 1638711 - RNA, 19 nt, Homo sapiens
  misc_RNA (1)...(19): siRNA sense strand
aaucaagagguuacgauaa

SEQ ID NO: 1638712 - RNA, 19 nt, Homo sapiens
  misc_RNA (1)...(19): siRNA sense strand
caaaggccaggcugacuau

SEQ ID NO: 1638713 - RNA, 19 nt, Homo sapiens
  misc_RNA (1)...(19): siRNA sense strand
cuacaaacagcccuggaaa

SEQ ID NO: 1638714 - RNA, 19 nt, Homo sapiens
  misc_RNA (1)...(19): siRNA sense strand
ccgaaaccauagcucuuga

SEQ ID NO: 1638715 - RNA, 19 nt, Homo sapiens
  misc_RNA (1)...(19): siRNA sense strand
ggaacagaaguuacagaau

SEQ ID NO: 1638716 - RNA, 19 nt, Homo sapiens
  misc_RNA (1)...(19): siRNA sense strand
cagaauuauuugaccugaa

SEQ ID NO: 1638717 - RNA, 19 nt, Homo sapiens
  misc_RNA (1)...(19): siRNA sense strand
uggaggaagcugagcauaa

SEQ ID NO: 1638718 - RNA, 19 nt, Homo sapiens
  misc_RNA (1)...(19): siRNA sense strand
aaaucaagagguuacgaua

SEQ ID NO: 1638719 - RNA, 19 nt, Homo sapiens
  misc_RNA (1)...(19): siRNA sense strand
gaaccggcaggaugaaagu

SEQ ID NO: 1638720 - RNA, 19 nt, Homo sapiens
  misc_RNA (1)...(19): siRNA sense strand
uaagggaacagcucucauc

SEQ ID NO: 1638721 - RNA, 19 nt, Homo sapiens
  misc_RNA (1)...(19): siRNA sense strand
ccaaauacgaugaagaaac

SEQ ID NO: 1638722 - RNA, 19 nt, Homo sapiens
  misc_RNA (1)...(19): siRNA sense strand
cagccuagaaguugaguug

SEQ ID NO: 1638723 - RNA, 19 nt, Homo sapiens
  misc_RNA (1)...(19): siRNA sense strand
agagauugaugcacugagu

SEQ ID NO: 1638724 - RNA, 19 nt, Homo sapiens
  misc_RNA (1)...(19): siRNA sense strand
cgccgcugcugaagaguuu

SEQ ID NO: 1638725 - RNA, 19 nt, Homo sapiens
  misc_RNA (1)...(19): siRNA sense strand
ugcaaaggccgacgagauu

SEQ ID NO: 1638726 - RNA, 19 nt, Homo sapiens
  misc_RNA (1)...(19): siRNA sense strand
gaugaagaaacuacugcaa

SEQ ID NO: 1638727 - RNA, 19 nt, Homo sapiens
  misc_RNA (1)...(19): siRNA sense strand
agaaggaacagaaguuaca

SEQ ID NO: 1638728 - RNA, 19 nt, Homo sapiens
  misc_RNA (1)...(19): siRNA sense strand
cagagaaccagaaacuuag

SEQ ID NO: 1638729 - RNA, 19 nt, Homo sapiens
  misc_RNA (1)...(19): siRNA sense strand
ugaaguccauggaguuugc

SEQ ID NO: 1638730 - RNA, 19 nt, Homo sapiens
  misc_RNA (1)...(19): siRNA sense strand
aggccaggcugacuaugaa

SEQ ID NO: 1638731 - RNA, 19 nt, Homo sapiens
  misc_RNA (1)...(19): siRNA sense strand
gagaaaauccgagaauaug

SEQ ID NO: 1638732 - RNA, 19 nt, Homo sapiens
  misc_RNA (1)...(19): siRNA sense strand
gcaacuccagcucaaagug

SEQ ID NO: 1638733 - RNA, 19 nt, Homo sapiens
  misc_RNA (1)...(19): siRNA sense strand
agaacacuccagaggauuu

SEQ ID NO: 1638734 - RNA, 19 nt, Homo sapiens
  misc_RNA (1)...(19): siRNA sense strand
gaagaaacuacugcaaagg

SEQ ID NO: 1638735 - RNA, 19 nt, Homo sapiens
  misc_RNA (1)...(19): siRNA sense strand
ggaagcugagcauaagguu

SEQ ID NO: 1638736 - RNA, 19 nt, Homo sapiens
  misc_RNA (1)...(19): siRNA sense strand
cagaucccguaccagcuuu

SEQ ID NO: 1638737 - RNA, 19 nt, Homo sapiens
  misc_RNA (1)...(19): siRNA sense strand
agagagaggcggagaccuu

SEQ ID NO: 1638738 - RNA, 19 nt, Homo sapiens
  misc_RNA (1)...(19): siRNA sense strand
aagcugagcauaagguuca

SEQ ID NO: 1638739 - RNA, 19 nt, Homo sapiens
  misc_RNA (1)...(19): siRNA sense strand
agaaugacuuugcagaaaa

SEQ ID NO: 1638740 - RNA, 19 nt, Homo sapiens
  misc_RNA (1)...(19): siRNA sense strand
aaccagaaacuuagggaaa

SEQ ID NO: 1638741 - RNA, 19 nt, Homo sapiens
  misc_RNA (1)...(19): siRNA sense strand
gaauucggccagccagauc

SEQ ID NO: 1638742 - RNA, 19 nt, Homo sapiens
  misc_RNA (1)...(19): siRNA sense strand
ggagagauugaugcacuga

SEQ ID NO: 1638743 - RNA, 19 nt, Homo sapiens
  misc_RNA (1)...(19): siRNA sense strand
aauaugaacagacacugaa

SEQ ID NO: 1638744 - RNA, 19 nt, Homo sapiens
  misc_RNA (1)...(19): siRNA sense strand
ugcacgauauugaaacaga

SEQ ID NO: 1638745 - RNA, 19 nt, Homo sapiens
  misc_RNA (1)...(19): siRNA sense strand
aagaaagagcugaacauuc

SEQ ID NO: 1638746 - RNA, 19 nt, Homo sapiens
  misc_RNA (1)...(19): siRNA sense strand
gaaaaccaaauacgaugaa

SEQ ID NO: 1638747 - RNA, 19 nt, Homo sapiens
  misc_RNA (1)...(19): siRNA sense strand
acagaaugacuuugcagaa

SEQ ID NO: 1638748 - RNA, 19 nt, Homo sapiens
  misc_RNA (1)...(19): siRNA sense strand
cagcuuucuugaaugucua

SEQ ID NO: 1638749 - RNA, 19 nt, Homo sapiens
  misc_RNA (1)...(19): siRNA sense strand
gagaauaugaacagacacu

SEQ ID NO: 1638750 - RNA, 19 nt, Homo sapiens
  misc_RNA (1)...(19): siRNA sense strand
ccaagcugcgggagaauuc

SEQ ID NO: 1638751 - RNA, 19 nt, Homo sapiens
  misc_RNA (1)...(19): siRNA sense strand
ugaacauucugaaguccau

SEQ ID NO: 1638752 - RNA, 19 nt, Homo sapiens
  misc_RNA (1)...(19): siRNA sense strand
aaagagcugaacauucuga

SEQ ID NO: 1638753 - RNA, 19 nt, Homo sapiens
  misc_RNA (1)...(19): siRNA sense strand
ccagaucccguaccagcuu

SEQ ID NO: 1638754 - RNA, 19 nt, Homo sapiens
  misc_RNA (1)...(19): siRNA sense strand
agauugaugcacugaguaa

SEQ ID NO: 1638755 - RNA, 19 nt, Homo sapiens
  misc_RNA (1)...(19): siRNA sense strand
ugaagaaagagcugaacau

SEQ ID NO: 1638756 - RNA, 19 nt, Homo sapiens
  misc_RNA (1)...(19): siRNA sense strand
gaacagaaguuacagaaug

SEQ ID NO: 1638757 - RNA, 19 nt, Homo sapiens
  misc_RNA (1)...(19): siRNA sense strand
gggaaacucuggaagaaua

SEQ ID NO: 1638758 - RNA, 19 nt, Homo sapiens
  misc_RNA (1)...(19): siRNA sense strand
ggaauuugcugaagugaaa

SEQ ID NO: 1638759 - RNA, 19 nt, Homo sapiens
  misc_RNA (1)...(19): siRNA sense strand
gaaccaagccgaaaccaua

SEQ ID NO: 1638760 - RNA, 19 nt, Homo sapiens
  misc_RNA (1)...(19): siRNA sense strand
gaagaacacuccagaggau

SEQ ID NO: 1638761 - RNA, 19 nt, Homo sapiens
  misc_RNA (1)...(19): siRNA sense strand
caaauacgaugaagaaacu

SEQ ID NO: 1638762 - RNA, 19 nt, Homo sapiens
  misc_RNA (1)...(19): siRNA sense strand
gaagaaagagcugaacauu

SEQ ID NO: 1638763 - RNA, 19 nt, Homo sapiens
  misc_RNA (1)...(19): siRNA sense strand
acagagaaccagaaacuua

SEQ ID NO: 1638764 - RNA, 19 nt, Homo sapiens
  misc_RNA (1)...(19): siRNA sense strand
ggaggaagcugagcauaag

SEQ ID NO: 1638765 - RNA, 19 nt, Homo sapiens
  misc_RNA (1)...(19): siRNA sense strand
cagaaugacuuugcagaaa

SEQ ID NO: 1638766 - RNA, 19 nt, Homo sapiens
  misc_RNA (1)...(19): siRNA sense strand
caaggaauuugcugaagug

SEQ ID NO: 1638767 - RNA, 19 nt, Homo sapiens
  misc_RNA (1)...(19): siRNA sense strand
ggaagaauacaacaaggaa

SEQ ID NO: 1638768 - RNA, 19 nt, Homo sapiens
  misc_RNA (1)...(19): siRNA sense strand
ccauagcucuugagaagga

SEQ ID NO: 1638769 - RNA, 19 nt, Homo sapiens
  misc_RNA (1)...(19): siRNA sense strand
ugaagaaacuacugcaaag

SEQ ID NO: 1638770 - RNA, 19 nt, Homo sapiens
  misc_RNA (1)...(19): siRNA sense strand
aaagugagcaguccagaaa

SEQ ID NO: 1638771 - RNA, 19 nt, Homo sapiens
  misc_RNA (1)...(19): siRNA sense strand
gcugaagaguuuccaagga

SEQ ID NO: 1638772 - RNA, 19 nt, Homo sapiens
  misc_RNA (1)...(19): siRNA sense strand
augaagaggugaagaaaga

SEQ ID NO: 1638773 - RNA, 19 nt, Homo sapiens
  misc_RNA (1)...(19): siRNA sense strand
ucaaacaacuggaagaaaa

SEQ ID NO: 1638774 - RNA, 19 nt, Homo sapiens
  misc_RNA (1)...(19): siRNA sense strand
aaccauagcucuugagaag

SEQ ID NO: 1638775 - RNA, 19 nt, Homo sapiens
  misc_RNA (1)...(19): siRNA sense strand
gaauaugaacagacacuga

SEQ ID NO: 1638776 - RNA, 19 nt, Homo sapiens
  misc_RNA (1)...(19): siRNA sense strand
caacaaggaauuugcugaa

SEQ ID NO: 1638777 - RNA, 19 nt, Homo sapiens
  misc_RNA (1)...(19): siRNA sense strand
gaucaugacggaccuugaa

SEQ ID NO: 1638778 - RNA, 19 nt, Homo sapiens
  misc_RNA (1)...(19): siRNA sense strand
gagagaggcggagaccuua

SEQ ID NO: 1638779 - RNA, 19 nt, Homo sapiens
  misc_RNA (1)...(19): siRNA sense strand
gaaagugagcaguccagaa

SEQ ID NO: 1638780 - RNA, 19 nt, Homo sapiens
  misc_RNA (1)...(19): siRNA sense strand
gagauugaaaugaucauga

SEQ ID NO: 1638781 - RNA, 19 nt, Homo sapiens
  misc_RNA (1)...(19): siRNA sense strand
ucaccaagcugcgggagaa

SEQ ID NO: 1638782 - RNA, 19 nt, Homo sapiens
  misc_RNA (1)...(19): siRNA sense strand
gccgggaguucaagaagaa

SEQ ID NO: 1638783 - RNA, 19 nt, Homo sapiens
  misc_RNA (1)...(19): siRNA sense strand
uagggaaacucuggaagaa

SEQ ID NO: 1638784 - RNA, 19 nt, Homo sapiens
  misc_RNA (1)...(19): siRNA sense strand
aaacagcacacucaaacaa

SEQ ID NO: 1638785 - RNA, 19 nt, Homo sapiens
  misc_RNA (1)...(19): siRNA sense strand
gagcugaacauucugaagu

SEQ ID NO: 1638786 - RNA, 19 nt, Homo sapiens
  misc_RNA (1)...(19): siRNA sense strand
gacagcaacuccagcucaa

SEQ ID NO: 1638787 - RNA, 19 nt, Homo sapiens
  misc_RNA (1)...(19): siRNA sense strand
aacagaaguuacagaauga

SEQ ID NO: 1638788 - RNA, 19 nt, Homo sapiens
  misc_RNA (1)...(19): siRNA sense strand
ugagaaggaacagaaguua

SEQ ID NO: 1638789 - RNA, 19 nt, Homo sapiens
  misc_RNA (1)...(19): siRNA sense strand
gaaaccauagcucuugaga

SEQ ID NO: 1638790 - RNA, 19 nt, Homo sapiens
  misc_RNA (1)...(19): siRNA sense strand
aucaagagguuacgauaaa

SEQ ID NO: 1638791 - RNA, 19 nt, Homo sapiens
  misc_RNA (1)...(19): siRNA sense strand
guucagagccuacaaacag

SEQ ID NO: 1638792 - RNA, 19 nt, Homo sapiens
  misc_RNA (1)...(19): siRNA sense strand
gcagcuuucuugaaugucu

SEQ ID NO: 1638793 - RNA, 19 nt, Homo sapiens
  misc_RNA (1)...(19): siRNA sense strand
cgacgagauugaaaugauc

SEQ ID NO: 1638794 - RNA, 19 nt, Homo sapiens
  misc_RNA (1)...(19): siRNA sense strand
ccgagaauaugaacagaca

SEQ ID NO: 1638795 - RNA, 19 nt, Homo sapiens
  misc_RNA (1)...(19): siRNA sense strand
gaauacaacaaggaauuug

SEQ ID NO: 1638796 - RNA, 19 nt, Homo sapiens
  misc_RNA (1)...(19): siRNA sense strand
aaacagagaaccagaaacu

SEQ ID NO: 1638797 - RNA, 19 nt, Homo sapiens
  misc_RNA (1)...(19): siRNA sense strand
ugaaacagagaaccagaaa

SEQ ID NO: 1638798 - RNA, 19 nt, Homo sapiens
  misc_RNA (1)...(19): siRNA sense strand
gcuccagccuagaaguuga

SEQ ID NO: 1638799 - RNA, 19 nt, Homo sapiens
  misc_RNA (1)...(19): siRNA sense strand
ucaaaggccaggcugacua

SEQ ID NO: 1638800 - RNA, 19 nt, Homo sapiens
  misc_RNA (1)...(19): siRNA sense strand
gaacacuccagaggauuug

SEQ ID NO: 1638801 - RNA, 19 nt, Homo sapiens
  misc_RNA (1)...(19): siRNA sense strand
caaaggccgacgagauuga

SEQ ID NO: 1638802 - RNA, 19 nt, Homo sapiens
  misc_RNA (1)...(19): siRNA sense strand
gcaaaggccgacgagauug

SEQ ID NO: 1638803 - RNA, 19 nt, Homo sapiens
  misc_RNA (1)...(19): siRNA sense strand
gauaaaagcacuuaaagag

SEQ ID NO: 1638804 - RNA, 19 nt, Homo sapiens
  misc_RNA (1)...(19): siRNA sense strand
acaaggaauuugcugaagu

SEQ ID NO: 1638805 - RNA, 19 nt, Homo sapiens
  misc_RNA (1)...(19): siRNA sense strand
gaagaauacaacaaggaau

SEQ ID NO: 1638806 - RNA, 19 nt, Homo sapiens
  misc_RNA (1)...(19): siRNA sense strand
gagauugaugcacugagua

SEQ ID NO: 1638807 - RNA, 19 nt, Homo sapiens
  misc_RNA (1)...(19): siRNA sense strand
ccgacgagauugaaaugau

SEQ ID NO: 1638808 - RNA, 19 nt, Homo sapiens
  misc_RNA (1)...(19): siRNA sense strand
gaaaauccgagaauaugaa

SEQ ID NO: 1638809 - RNA, 19 nt, Homo sapiens
  misc_RNA (1)...(19): siRNA sense strand
aaccaaauacgaugaagaa

SEQ ID NO: 1638810 - RNA, 19 nt, Homo sapiens
  misc_RNA (1)...(19): siRNA sense strand
gaaagcugcaggagacaca

SEQ ID NO: 1638811 - RNA, 19 nt, Homo sapiens
  misc_RNA (1)...(19): siRNA sense strand
aaucaagagguuacgauaa

SEQ ID NO: 1638812 - RNA, 19 nt, Homo sapiens
  misc_RNA (1)...(19): siRNA sense strand
caaaggccaggcugacuau

SEQ ID NO: 1638813 - RNA, 19 nt, Homo sapiens
  misc_RNA (1)...(19): siRNA sense strand
cuacaaacagcccuggaaa

SEQ ID NO: 1638814 - RNA, 19 nt, Homo sapiens
  misc_RNA (1)...(19): siRNA sense strand
ccgaaaccauagcucuuga

SEQ ID NO: 1638815 - RNA, 19 nt, Homo sapiens
  misc_RNA (1)...(19): siRNA sense strand
ggaacagaaguuacagaau

SEQ ID NO: 1638816 - RNA, 19 nt, Homo sapiens
  misc_RNA (1)...(19): siRNA sense strand
cagaauuauuugaccugaa

SEQ ID NO: 1638817 - RNA, 19 nt, Homo sapiens
  misc_RNA (1)...(19): siRNA sense strand
uggaggaagcugagcauaa

SEQ ID NO: 1638818 - RNA, 19 nt, Homo sapiens
  misc_RNA (1)...(19): siRNA sense strand
aaaucaagagguuacgaua

SEQ ID NO: 1638819 - RNA, 19 nt, Homo sapiens
  misc_RNA (1)...(19): siRNA sense strand
gaaccggcaggaugaaagu

SEQ ID NO: 1638820 - RNA, 19 nt, Homo sapiens
  misc_RNA (1)...(19): siRNA sense strand
uaagggaacagcucucauc

SEQ ID NO: 1638821 - RNA, 19 nt, Homo sapiens
  misc_RNA (1)...(19): siRNA sense strand
ccaaauacgaugaagaaac

SEQ ID NO: 1638822 - RNA, 19 nt, Homo sapiens
  misc_RNA (1)...(19): siRNA sense strand
cagccuagaaguugaguug

SEQ ID NO: 1638823 - RNA, 19 nt, Homo sapiens
  misc_RNA (1)...(19): siRNA sense strand
agagauugaugcacugagu

SEQ ID NO: 1638824 - RNA, 19 nt, Homo sapiens
  misc_RNA (1)...(19): siRNA sense strand
cgccgcugcugaagaguuu

SEQ ID NO: 1638825 - RNA, 19 nt, Homo sapiens
  misc_RNA (1)...(19): siRNA sense strand
ugcaaaggccgacgagauu

SEQ ID NO: 1638826 - RNA, 19 nt, Homo sapiens
  misc_RNA (1)...(19): siRNA sense strand
gaugaagaaacuacugcaa

SEQ ID NO: 1638827 - RNA, 19 nt, Homo sapiens
  misc_RNA (1)...(19): siRNA sense strand
agaaggaacagaaguuaca

SEQ ID NO: 1638828 - RNA, 19 nt, Homo sapiens
  misc_RNA (1)...(19): siRNA sense strand
cagagaaccagaaacuuag

SEQ ID NO: 1638829 - RNA, 19 nt, Homo sapiens
  misc_RNA (1)...(19): siRNA sense strand
ugaaguccauggaguuugc

SEQ ID NO: 1638830 - RNA, 19 nt, Homo sapiens
  misc_RNA (1)...(19): siRNA sense strand
aggccaggcugacuaugaa

SEQ ID NO: 1638831 - RNA, 19 nt, Homo sapiens
  misc_RNA (1)...(19): siRNA sense strand
gagaaaauccgagaauaug

SEQ ID NO: 1638832 - RNA, 19 nt, Homo sapiens
  misc_RNA (1)...(19): siRNA sense strand
gcaacuccagcucaaagug

SEQ ID NO: 1638833 - RNA, 19 nt, Homo sapiens
  misc_RNA (1)...(19): siRNA sense strand
agaacacuccagaggauuu

SEQ ID NO: 1638834 - RNA, 19 nt, Homo sapiens
  misc_RNA (1)...(19): siRNA sense strand
gaagaaacuacugcaaagg

SEQ ID NO: 1638835 - RNA, 19 nt, Homo sapiens
  misc_RNA (1)...(19): siRNA sense strand
ggaagcugagcauaagguu

SEQ ID NO: 1638836 - RNA, 19 nt, Homo sapiens
  misc_RNA (1)...(19): siRNA sense strand
cagaucccguaccagcuuu

SEQ ID NO: 1638837 - RNA, 19 nt, Homo sapiens
  misc_RNA (1)...(19): siRNA sense strand
agagagaggcggagaccuu

SEQ ID NO: 1638838 - RNA, 19 nt, Homo sapiens
  misc_RNA (1)...(19): siRNA sense strand
aagcugagcauaagguuca

SEQ ID NO: 1638839 - RNA, 19 nt, Homo sapiens
  misc_RNA (1)...(19): siRNA sense strand
agaaugacuuugcagaaaa

SEQ ID NO: 1638840 - RNA, 19 nt, Homo sapiens
  misc_RNA (1)...(19): siRNA sense strand
aaccagaaacuuagggaaa

SEQ ID NO: 1638841 - RNA, 19 nt, Homo sapiens
  misc_RNA (1)...(19): siRNA sense strand
gaauucggccagccagauc

SEQ ID NO: 1638842 - RNA, 19 nt, Homo sapiens
  misc_RNA (1)...(19): siRNA sense strand
ggagagauugaugcacuga

SEQ ID NO: 1638843 - RNA, 19 nt, Homo sapiens
  misc_RNA (1)...(19): siRNA sense strand
aauaugaacagacacugaa

SEQ ID NO: 1638844 - RNA, 19 nt, Homo sapiens
  misc_RNA (1)...(19): siRNA sense strand
ugcacgauauugaaacaga

SEQ ID NO: 1638845 - RNA, 19 nt, Homo sapiens
  misc_RNA (1)...(19): siRNA sense strand
aagaaagagcugaacauuc

SEQ ID NO: 1638846 - RNA, 19 nt, Homo sapiens
  misc_RNA (1)...(19): siRNA sense strand
gaaaaccaaauacgaugaa

SEQ ID NO: 1638847 - RNA, 19 nt, Homo sapiens
  misc_RNA (1)...(19): siRNA sense strand
acagaaugacuuugcagaa

SEQ ID NO: 1638848 - RNA, 19 nt, Homo sapiens
  misc_RNA (1)...(19): siRNA sense strand
cagcuuucuugaaugucua

SEQ ID NO: 1638849 - RNA, 19 nt, Homo sapiens
  misc_RNA (1)...(19): siRNA sense strand
gagaauaugaacagacacu

SEQ ID NO: 1638850 - RNA, 19 nt, Homo sapiens
  misc_RNA (1)...(19): siRNA sense strand
ccaagcugcgggagaauuc

SEQ ID NO: 1638851 - RNA, 19 nt, Homo sapiens
  misc_RNA (1)...(19): siRNA sense strand
ugaacauucugaaguccau

SEQ ID NO: 1638852 - RNA, 19 nt, Homo sapiens
  misc_RNA (1)...(19): siRNA sense strand
aaagagcugaacauucuga

SEQ ID NO: 1638853 - RNA, 19 nt, Homo sapiens
  misc_RNA (1)...(19): siRNA sense strand
ccagaucccguaccagcuu

SEQ ID NO: 1638854 - RNA, 19 nt, Homo sapiens
  misc_RNA (1)...(19): siRNA sense strand
agauugaugcacugaguaa

SEQ ID NO: 1638855 - RNA, 19 nt, Homo sapiens
  misc_RNA (1)...(19): siRNA sense strand
ugaagaaagagcugaacau

SEQ ID NO: 1638856 - RNA, 19 nt, Homo sapiens
  misc_RNA (1)...(19): siRNA sense strand
ucacggccaucgccaagua

SEQ ID NO: 1638857 - RNA, 19 nt, Homo sapiens
  misc_RNA (1)...(19): siRNA sense strand
caacugauuucuaccugau

SEQ ID NO: 1638858 - RNA, 19 nt, Homo sapiens
  misc_RNA (1)...(19): siRNA sense strand
uuaacgacguggccaaauu

SEQ ID NO: 1638859 - RNA, 19 nt, Homo sapiens
  misc_RNA (1)...(19): siRNA sense strand
ccaugcagcugaaugacaa

SEQ ID NO: 1638860 - RNA, 19 nt, Homo sapiens
  misc_RNA (1)...(19): siRNA sense strand
guguuuggcuucuuugcua

SEQ ID NO: 1638861 - RNA, 19 nt, Homo sapiens
  misc_RNA (1)...(19): siRNA sense strand
gcccucaucuacuuugcua

SEQ ID NO: 1638862 - RNA, 19 nt, Homo sapiens
  misc_RNA (1)...(19): siRNA sense strand
caagacagaagaagagaau

SEQ ID NO: 1638863 - RNA, 19 nt, Homo sapiens
  misc_RNA (1)...(19): siRNA sense strand
gaccacagcccacaagaca

SEQ ID NO: 1638864 - RNA, 19 nt, Homo sapiens
  misc_RNA (1)...(19): siRNA sense strand
ccacagcccacaagacaga

SEQ ID NO: 1638865 - RNA, 19 nt, Homo sapiens
  misc_RNA (1)...(19): siRNA sense strand
gauuucuaccugaucuuua

SEQ ID NO: 1638866 - RNA, 19 nt, Homo sapiens
  misc_RNA (1)...(19): siRNA sense strand
cgacucggacucugacuga

SEQ ID NO: 1638867 - RNA, 19 nt, Homo sapiens
  misc_RNA (1)...(19): siRNA sense strand
ggccuuguacuuccucuuu

SEQ ID NO: 1638868 - RNA, 19 nt, Homo sapiens
  misc_RNA (1)...(19): siRNA sense strand
ccacaagacagaagaagag

SEQ ID NO: 1638869 - RNA, 19 nt, Homo sapiens
  misc_RNA (1)...(19): siRNA sense strand
caaagccgcugggguguuu

SEQ ID NO: 1638870 - RNA, 19 nt, Homo sapiens
  misc_RNA (1)...(19): siRNA sense strand
uaacgacguggccaaauuc

SEQ ID NO: 1638871 - RNA, 19 nt, Homo sapiens
  misc_RNA (1)...(19): siRNA sense strand
ggccaaauuccucaaacaa

SEQ ID NO: 1638872 - RNA, 19 nt, Homo sapiens
  misc_RNA (1)...(19): siRNA sense strand
agacagaagaagagaauuc

SEQ ID NO: 1638873 - RNA, 19 nt, Homo sapiens
  misc_RNA (1)...(19): siRNA sense strand
ggcuugugcuggcccauga

SEQ ID NO: 1638874 - RNA, 19 nt, Homo sapiens
  misc_RNA (1)...(19): siRNA sense strand
guuugcaacugauuucuac

SEQ ID NO: 1638875 - RNA, 19 nt, Homo sapiens
  misc_RNA (1)...(19): siRNA sense strand
ggucucucauucaucacuu

SEQ ID NO: 1638876 - RNA, 19 nt, Homo sapiens
  misc_RNA (1)...(19): siRNA sense strand
gccuuguacuuccucuuug

SEQ ID NO: 1638877 - RNA, 19 nt, Homo sapiens
  misc_RNA (1)...(19): siRNA sense strand
gccaaauuccucaaacaag

SEQ ID NO: 1638878 - RNA, 19 nt, Homo sapiens
  misc_RNA (1)...(19): siRNA sense strand
ccaucguguuugcaacuga

SEQ ID NO: 1638879 - RNA, 19 nt, Homo sapiens
  misc_RNA (1)...(19): siRNA sense strand
caucguguuugcaacugau

SEQ ID NO: 1638880 - RNA, 19 nt, Homo sapiens
  misc_RNA (1)...(19): siRNA sense strand
uggccaaauuccucaaaca

SEQ ID NO: 1638881 - RNA, 19 nt, Homo sapiens
  misc_RNA (1)...(19): siRNA sense strand
gcuaccaucguguuugcaa

SEQ ID NO: 1638882 - RNA, 19 nt, Homo sapiens
  misc_RNA (1)...(19): siRNA sense strand
ugauuucuaccugaucuuu

SEQ ID NO: 1638883 - RNA, 19 nt, Homo sapiens
  misc_RNA (1)...(19): siRNA sense strand
ucacggccaucgccaagua

SEQ ID NO: 1638884 - RNA, 19 nt, Homo sapiens
  misc_RNA (1)...(19): siRNA sense strand
caacugauuucuaccugau

SEQ ID NO: 1638885 - RNA, 19 nt, Homo sapiens
  misc_RNA (1)...(19): siRNA sense strand
uuaacgacguggccaaauu

SEQ ID NO: 1638886 - RNA, 19 nt, Homo sapiens
  misc_RNA (1)...(19): siRNA sense strand
ccaugcagcugaaugacaa

SEQ ID NO: 1638887 - RNA, 19 nt, Homo sapiens
  misc_RNA (1)...(19): siRNA sense strand
guguuuggcuucuuugcua

SEQ ID NO: 1638888 - RNA, 19 nt, Homo sapiens
  misc_RNA (1)...(19): siRNA sense strand
gcccucaucuacuuugcua

SEQ ID NO: 1638889 - RNA, 19 nt, Homo sapiens
  misc_RNA (1)...(19): siRNA sense strand
caagacagaagaagagaau

SEQ ID NO: 1638890 - RNA, 19 nt, Homo sapiens
  misc_RNA (1)...(19): siRNA sense strand
gaccacagcccacaagaca

SEQ ID NO: 1638891 - RNA, 19 nt, Homo sapiens
  misc_RNA (1)...(19): siRNA sense strand
ccacagcccacaagacaga

SEQ ID NO: 1638892 - RNA, 19 nt, Homo sapiens
  misc_RNA (1)...(19): siRNA sense strand
gauuucuaccugaucuuua

SEQ ID NO: 1638893 - RNA, 19 nt, Homo sapiens
  misc_RNA (1)...(19): siRNA sense strand
cgacucggacucugacuga

SEQ ID NO: 1638894 - RNA, 19 nt, Homo sapiens
  misc_RNA (1)...(19): siRNA sense strand
ggccuuguacuuccucuuu

SEQ ID NO: 1638895 - RNA, 19 nt, Homo sapiens
  misc_RNA (1)...(19): siRNA sense strand
ccacaagacagaagaagag

SEQ ID NO: 1638896 - RNA, 19 nt, Homo sapiens
  misc_RNA (1)...(19): siRNA sense strand
caaagccgcugggguguuu

SEQ ID NO: 1638897 - RNA, 19 nt, Homo sapiens
  misc_RNA (1)...(19): siRNA sense strand
uaacgacguggccaaauuc

SEQ ID NO: 1638898 - RNA, 19 nt, Homo sapiens
  misc_RNA (1)...(19): siRNA sense strand
ggccaaauuccucaaacaa

SEQ ID NO: 1638899 - RNA, 19 nt, Homo sapiens
  misc_RNA (1)...(19): siRNA sense strand
agacagaagaagagaauuc

SEQ ID NO: 1638900 - RNA, 19 nt, Homo sapiens
  misc_RNA (1)...(19): siRNA sense strand
ggcuugugcuggcccauga

SEQ ID NO: 1638901 - RNA, 19 nt, Homo sapiens
  misc_RNA (1)...(19): siRNA sense strand
guuugcaacugauuucuac

SEQ ID NO: 1638902 - RNA, 19 nt, Homo sapiens
  misc_RNA (1)...(19): siRNA sense strand
ggucucucauucaucacuu

SEQ ID NO: 1638903 - RNA, 19 nt, Homo sapiens
  misc_RNA (1)...(19): siRNA sense strand
gccuuguacuuccucuuug

SEQ ID NO: 1638904 - RNA, 19 nt, Homo sapiens
  misc_RNA (1)...(19): siRNA sense strand
gccaaauuccucaaacaag

SEQ ID NO: 1638905 - RNA, 19 nt, Homo sapiens
  misc_RNA (1)...(19): siRNA sense strand
ccaucguguuugcaacuga

SEQ ID NO: 1638906 - RNA, 19 nt, Homo sapiens
  misc_RNA (1)...(19): siRNA sense strand
caucguguuugcaacugau

SEQ ID NO: 1638907 - RNA, 19 nt, Homo sapiens
  misc_RNA (1)...(19): siRNA sense strand
uggccaaauuccucaaaca

SEQ ID NO: 1638908 - RNA, 19 nt, Homo sapiens
  misc_RNA (1)...(19): siRNA sense strand
gcuaccaucguguuugcaa

SEQ ID NO: 1638909 - RNA, 19 nt, Homo sapiens
  misc_RNA (1)...(19): siRNA sense strand
ugauuucuaccugaucuuu

SEQ ID NO: 1638910 - RNA, 19 nt, Homo sapiens
  misc_RNA (1)...(19): siRNA sense strand
ucacggccaucgccaagua

SEQ ID NO: 1638911 - RNA, 19 nt, Homo sapiens
  misc_RNA (1)...(19): siRNA sense strand
caacugauuucuaccugau

SEQ ID NO: 1638912 - RNA, 19 nt, Homo sapiens
  misc_RNA (1)...(19): siRNA sense strand
uuaacgacguggccaaauu

SEQ ID NO: 1638913 - RNA, 19 nt, Homo sapiens
  misc_RNA (1)...(19): siRNA sense strand
ccaugcagcugaaugacaa

SEQ ID NO: 1638914 - RNA, 19 nt, Homo sapiens
  misc_RNA (1)...(19): siRNA sense strand
guguuuggcuucuuugcua

SEQ ID NO: 1638915 - RNA, 19 nt, Homo sapiens
  misc_RNA (1)...(19): siRNA sense strand
gcccucaucuacuuugcua

SEQ ID NO: 1638916 - RNA, 19 nt, Homo sapiens
  misc_RNA (1)...(19): siRNA sense strand
caagacagaagaagagaau

SEQ ID NO: 1638917 - RNA, 19 nt, Homo sapiens
  misc_RNA (1)...(19): siRNA sense strand
gaccacagcccacaagaca

SEQ ID NO: 1638918 - RNA, 19 nt, Homo sapiens
  misc_RNA (1)...(19): siRNA sense strand
ccacagcccacaagacaga

SEQ ID NO: 1638919 - RNA, 19 nt, Homo sapiens
  misc_RNA (1)...(19): siRNA sense strand
gauuucuaccugaucuuua

SEQ ID NO: 1638920 - RNA, 19 nt, Homo sapiens
  misc_RNA (1)...(19): siRNA sense strand
cgacucggacucugacuga

SEQ ID NO: 1638921 - RNA, 19 nt, Homo sapiens
  misc_RNA (1)...(19): siRNA sense strand
ggccuuguacuuccucuuu

SEQ ID NO: 1638922 - RNA, 19 nt, Homo sapiens
  misc_RNA (1)...(19): siRNA sense strand
ccacaagacagaagaagag

SEQ ID NO: 1638923 - RNA, 19 nt, Homo sapiens
  misc_RNA (1)...(19): siRNA sense strand
caaagccgcugggguguuu

SEQ ID NO: 1638924 - RNA, 19 nt, Homo sapiens
  misc_RNA (1)...(19): siRNA sense strand
uaacgacguggccaaauuc

SEQ ID NO: 1638925 - RNA, 19 nt, Homo sapiens
  misc_RNA (1)...(19): siRNA sense strand
ggccaaauuccucaaacaa

SEQ ID NO: 1638926 - RNA, 19 nt, Homo sapiens
  misc_RNA (1)...(19): siRNA sense strand
agacagaagaagagaauuc

SEQ ID NO: 1638927 - RNA, 19 nt, Homo sapiens
  misc_RNA (1)...(19): siRNA sense strand
ggcuugugcuggcccauga

SEQ ID NO: 1638928 - RNA, 19 nt, Homo sapiens
  misc_RNA (1)...(19): siRNA sense strand
guuugcaacugauuucuac

SEQ ID NO: 1638929 - RNA, 19 nt, Homo sapiens
  misc_RNA (1)...(19): siRNA sense strand
ggucucucauucaucacuu

SEQ ID NO: 1638930 - RNA, 19 nt, Homo sapiens
  misc_RNA (1)...(19): siRNA sense strand
gccuuguacuuccucuuug

SEQ ID NO: 1638931 - RNA, 19 nt, Homo sapiens
  misc_RNA (1)...(19): siRNA sense strand
gccaaauuccucaaacaag

SEQ ID NO: 1638932 - RNA, 19 nt, Homo sapiens
  misc_RNA (1)...(19): siRNA sense strand
ccaucguguuugcaacuga

SEQ ID NO: 1638933 - RNA, 19 nt, Homo sapiens
  misc_RNA (1)...(19): siRNA sense strand
caucguguuugcaacugau

SEQ ID NO: 1638934 - RNA, 19 nt, Homo sapiens
  misc_RNA (1)...(19): siRNA sense strand
uggccaaauuccucaaaca

SEQ ID NO: 1638935 - RNA, 19 nt, Homo sapiens
  misc_RNA (1)...(19): siRNA sense strand
gcuaccaucguguuugcaa

SEQ ID NO: 1638936 - RNA, 19 nt, Homo sapiens
  misc_RNA (1)...(19): siRNA sense strand
ugauuucuaccugaucuuu

SEQ ID NO: 1638937 - RNA, 19 nt, Homo sapiens
  misc_RNA (1)...(19): siRNA sense strand
ucacggccaucgccaagua

SEQ ID NO: 1638938 - RNA, 19 nt, Homo sapiens
  misc_RNA (1)...(19): siRNA sense strand
caacugauuucuaccugau

SEQ ID NO: 1638939 - RNA, 19 nt, Homo sapiens
  misc_RNA (1)...(19): siRNA sense strand
uuaacgacguggccaaauu

SEQ ID NO: 1638940 - RNA, 19 nt, Homo sapiens
  misc_RNA (1)...(19): siRNA sense strand
guguuuggcuucuuugcua

SEQ ID NO: 1638941 - RNA, 19 nt, Homo sapiens
  misc_RNA (1)...(19): siRNA sense strand
gcccucaucuacuuugcua

SEQ ID NO: 1638942 - RNA, 19 nt, Homo sapiens
  misc_RNA (1)...(19): siRNA sense strand
caagacagaagaagagaau

SEQ ID NO: 1638943 - RNA, 19 nt, Homo sapiens
  misc_RNA (1)...(19): siRNA sense strand
gaccacagcccacaagaca

SEQ ID NO: 1638944 - RNA, 19 nt, Homo sapiens
  misc_RNA (1)...(19): siRNA sense strand
ccacagcccacaagacaga

SEQ ID NO: 1638945 - RNA, 19 nt, Homo sapiens
  misc_RNA (1)...(19): siRNA sense strand
gauuucuaccugaucuuua

SEQ ID NO: 1638946 - RNA, 19 nt, Homo sapiens
  misc_RNA (1)...(19): siRNA sense strand
cgacucggacucugacuga

SEQ ID NO: 1638947 - RNA, 19 nt, Homo sapiens
  misc_RNA (1)...(19): siRNA sense strand
caaagccgcugggguguuu

SEQ ID NO: 1638948 - RNA, 19 nt, Homo sapiens
  misc_RNA (1)...(19): siRNA sense strand
ccacaagacagaagaagag

SEQ ID NO: 1638949 - RNA, 19 nt, Homo sapiens
  misc_RNA (1)...(19): siRNA sense strand
uaacgacguggccaaauuc

SEQ ID NO: 1638950 - RNA, 19 nt, Homo sapiens
  misc_RNA (1)...(19): siRNA sense strand
ggccaaauuccucaaacaa

SEQ ID NO: 1638951 - RNA, 19 nt, Homo sapiens
  misc_RNA (1)...(19): siRNA sense strand
agacagaagaagagaauuc

SEQ ID NO: 1638952 - RNA, 19 nt, Homo sapiens
  misc_RNA (1)...(19): siRNA sense strand
ggcuugugcuggcccauga

SEQ ID NO: 1638953 - RNA, 19 nt, Homo sapiens
  misc_RNA (1)...(19): siRNA sense strand
guuugcaacugauuucuac

SEQ ID NO: 1638954 - RNA, 19 nt, Homo sapiens
  misc_RNA (1)...(19): siRNA sense strand
ccaucguguuugcaacuga

SEQ ID NO: 1638955 - RNA, 19 nt, Homo sapiens
  misc_RNA (1)...(19): siRNA sense strand
gccaaauuccucaaacaag

SEQ ID NO: 1638956 - RNA, 19 nt, Homo sapiens
  misc_RNA (1)...(19): siRNA sense strand
caucguguuugcaacugau

SEQ ID NO: 1638957 - RNA, 19 nt, Homo sapiens
  misc_RNA (1)...(19): siRNA sense strand
uggccaaauuccucaaaca

SEQ ID NO: 1638958 - RNA, 19 nt, Homo sapiens
  misc_RNA (1)...(19): siRNA sense strand
gcuaccaucguguuugcaa

SEQ ID NO: 1638959 - RNA, 19 nt, Homo sapiens
  misc_RNA (1)...(19): siRNA sense strand
ugauuucuaccugaucuuu

SEQ ID NO: 1638960 - RNA, 19 nt, Homo sapiens
  misc_RNA (1)...(19): siRNA sense strand
ucacggccaucgccaagua

SEQ ID NO: 1638961 - RNA, 19 nt, Homo sapiens
  misc_RNA (1)...(19): siRNA sense strand
caacugauuucuaccugau

SEQ ID NO: 1638962 - RNA, 19 nt, Homo sapiens
  misc_RNA (1)...(19): siRNA sense strand
uuaacgacguggccaaauu

SEQ ID NO: 1638963 - RNA, 19 nt, Homo sapiens
  misc_RNA (1)...(19): siRNA sense strand
ccaugcagcugaaugacaa

SEQ ID NO: 1638964 - RNA, 19 nt, Homo sapiens
  misc_RNA (1)...(19): siRNA sense strand
guguuuggcuucuuugcua

SEQ ID NO: 1638965 - RNA, 19 nt, Homo sapiens
  misc_RNA (1)...(19): siRNA sense strand
gcccucaucuacuuugcua

SEQ ID NO: 1638966 - RNA, 19 nt, Homo sapiens
  misc_RNA (1)...(19): siRNA sense strand
caagacagaagaagagaau

SEQ ID NO: 1638967 - RNA, 19 nt, Homo sapiens
  misc_RNA (1)...(19): siRNA sense strand
gaccacagcccacaagaca

SEQ ID NO: 1638968 - RNA, 19 nt, Homo sapiens
  misc_RNA (1)...(19): siRNA sense strand
ccacagcccacaagacaga

SEQ ID NO: 1638969 - RNA, 19 nt, Homo sapiens
  misc_RNA (1)...(19): siRNA sense strand
gauuucuaccugaucuuua

SEQ ID NO: 1638970 - RNA, 19 nt, Homo sapiens
  misc_RNA (1)...(19): siRNA sense strand
cgacucggacucugacuga

SEQ ID NO: 1638971 - RNA, 19 nt, Homo sapiens
  misc_RNA (1)...(19): siRNA sense strand
ggccuuguacuuccucuuu

SEQ ID NO: 1638972 - RNA, 19 nt, Homo sapiens
  misc_RNA (1)...(19): siRNA sense strand
ccacaagacagaagaagag

SEQ ID NO: 1638973 - RNA, 19 nt, Homo sapiens
  misc_RNA (1)...(19): siRNA sense strand
caaagccgcugggguguuu

SEQ ID NO: 1638974 - RNA, 19 nt, Homo sapiens
  misc_RNA (1)...(19): siRNA sense strand
uaacgacguggccaaauuc

SEQ ID NO: 1638975 - RNA, 19 nt, Homo sapiens
  misc_RNA (1)...(19): siRNA sense strand
ggccaaauuccucaaacaa

SEQ ID NO: 1638976 - RNA, 19 nt, Homo sapiens
  misc_RNA (1)...(19): siRNA sense strand
agacagaagaagagaauuc

SEQ ID NO: 1638977 - RNA, 19 nt, Homo sapiens
  misc_RNA (1)...(19): siRNA sense strand
ggcuugugcuggcccauga

SEQ ID NO: 1638978 - RNA, 19 nt, Homo sapiens
  misc_RNA (1)...(19): siRNA sense strand
guuugcaacugauuucuac

SEQ ID NO: 1638979 - RNA, 19 nt, Homo sapiens
  misc_RNA (1)...(19): siRNA sense strand
ggucucucauucaucacuu

SEQ ID NO: 1638980 - RNA, 19 nt, Homo sapiens
  misc_RNA (1)...(19): siRNA sense strand
gccuuguacuuccucuuug

SEQ ID NO: 1638981 - RNA, 19 nt, Homo sapiens
  misc_RNA (1)...(19): siRNA sense strand
gccaaauuccucaaacaag

SEQ ID NO: 1638982 - RNA, 19 nt, Homo sapiens
  misc_RNA (1)...(19): siRNA sense strand
ccaucguguuugcaacuga

SEQ ID NO: 1638983 - RNA, 19 nt, Homo sapiens
  misc_RNA (1)...(19): siRNA sense strand
caucguguuugcaacugau

SEQ ID NO: 1638984 - RNA, 19 nt, Homo sapiens
  misc_RNA (1)...(19): siRNA sense strand
uggccaaauuccucaaaca

SEQ ID NO: 1638985 - RNA, 19 nt, Homo sapiens
  misc_RNA (1)...(19): siRNA sense strand
gcuaccaucguguuugcaa

SEQ ID NO: 1638986 - RNA, 19 nt, Homo sapiens
  misc_RNA (1)...(19): siRNA sense strand
ugauuucuaccugaucuuu

SEQ ID NO: 1638987 - RNA, 19 nt, Homo sapiens
  misc_RNA (1)...(19): siRNA sense strand
ucacggccaucgccaagua

SEQ ID NO: 1638988 - RNA, 19 nt, Homo sapiens
  misc_RNA (1)...(19): siRNA sense strand
caacugauuucuaccugau

SEQ ID NO: 1638989 - RNA, 19 nt, Homo sapiens
  misc_RNA (1)...(19): siRNA sense strand
uuaacgacguggccaaauu

SEQ ID NO: 1638990 - RNA, 19 nt, Homo sapiens
  misc_RNA (1)...(19): siRNA sense strand
ccaugcagcugaaugacaa

SEQ ID NO: 1638991 - RNA, 19 nt, Homo sapiens
  misc_RNA (1)...(19): siRNA sense strand
guguuuggcuucuuugcua

SEQ ID NO: 1638992 - RNA, 19 nt, Homo sapiens
  misc_RNA (1)...(19): siRNA sense strand
gcccucaucuacuuugcua

SEQ ID NO: 1638993 - RNA, 19 nt, Homo sapiens
  misc_RNA (1)...(19): siRNA sense strand
caagacagaagaagagaau

SEQ ID NO: 1638994 - RNA, 19 nt, Homo sapiens
  misc_RNA (1)...(19): siRNA sense strand
gaccacagcccacaagaca

SEQ ID NO: 1638995 - RNA, 19 nt, Homo sapiens
  misc_RNA (1)...(19): siRNA sense strand
ccacagcccacaagacaga

SEQ ID NO: 1638996 - RNA, 19 nt, Homo sapiens
  misc_RNA (1)...(19): siRNA sense strand
gauuucuaccugaucuuua

SEQ ID NO: 1638997 - RNA, 19 nt, Homo sapiens
  misc_RNA (1)...(19): siRNA sense strand
cgacucggacucugacuga

SEQ ID NO: 1638998 - RNA, 19 nt, Homo sapiens
  misc_RNA (1)...(19): siRNA sense strand
ggccuuguacuuccucuuu

SEQ ID NO: 1638999 - RNA, 19 nt, Homo sapiens
  misc_RNA (1)...(19): siRNA sense strand
ccacaagacagaagaagag

SEQ ID NO: 1639000 - RNA, 19 nt, Homo sapiens
  misc_RNA (1)...(19): siRNA sense strand
caaagccgcugggguguuu

SEQ ID NO: 1639001 - RNA, 19 nt, Homo sapiens
  misc_RNA (1)...(19): siRNA sense strand
uaacgacguggccaaauuc

SEQ ID NO: 1639002 - RNA, 19 nt, Homo sapiens
  misc_RNA (1)...(19): siRNA sense strand
ggccaaauuccucaaacaa

SEQ ID NO: 1639003 - RNA, 19 nt, Homo sapiens
  misc_RNA (1)...(19): siRNA sense strand
agacagaagaagagaauuc

SEQ ID NO: 1639004 - RNA, 19 nt, Homo sapiens
  misc_RNA (1)...(19): siRNA sense strand
ggcuugugcuggcccauga

SEQ ID NO: 1639005 - RNA, 19 nt, Homo sapiens
  misc_RNA (1)...(19): siRNA sense strand
guuugcaacugauuucuac

SEQ ID NO: 1639006 - RNA, 19 nt, Homo sapiens
  misc_RNA (1)...(19): siRNA sense strand
ggucucucauucaucacuu

SEQ ID NO: 1639007 - RNA, 19 nt, Homo sapiens
  misc_RNA (1)...(19): siRNA sense strand
gccuuguacuuccucuuug

SEQ ID NO: 1639008 - RNA, 19 nt, Homo sapiens
  misc_RNA (1)...(19): siRNA sense strand
gccaaauuccucaaacaag

SEQ ID NO: 1639009 - RNA, 19 nt, Homo sapiens
  misc_RNA (1)...(19): siRNA sense strand
ccaucguguuugcaacuga

SEQ ID NO: 1639010 - RNA, 19 nt, Homo sapiens
  misc_RNA (1)...(19): siRNA sense strand
caucguguuugcaacugau

SEQ ID NO: 1639011 - RNA, 19 nt, Homo sapiens
  misc_RNA (1)...(19): siRNA sense strand
uggccaaauuccucaaaca

SEQ ID NO: 1639012 - RNA, 19 nt, Homo sapiens
  misc_RNA (1)...(19): siRNA sense strand
gcuaccaucguguuugcaa

SEQ ID NO: 1639013 - RNA, 19 nt, Homo sapiens
  misc_RNA (1)...(19): siRNA sense strand
ugauuucuaccugaucuuu

SEQ ID NO: 1639014 - RNA, 19 nt, Homo sapiens
  misc_RNA (1)...(19): siRNA sense strand
ucacggccaucgccaagua

SEQ ID NO: 1639015 - RNA, 19 nt, Homo sapiens
  misc_RNA (1)...(19): siRNA sense strand
caacugauuucuaccugau

SEQ ID NO: 1639016 - RNA, 19 nt, Homo sapiens
  misc_RNA (1)...(19): siRNA sense strand
uuaacgacguggccaaauu

SEQ ID NO: 1639017 - RNA, 19 nt, Homo sapiens
  misc_RNA (1)...(19): siRNA sense strand
ccaugcagcugaaugacaa

SEQ ID NO: 1639018 - RNA, 19 nt, Homo sapiens
  misc_RNA (1)...(19): siRNA sense strand
guguuuggcuucuuugcua

SEQ ID NO: 1639019 - RNA, 19 nt, Homo sapiens
  misc_RNA (1)...(19): siRNA sense strand
gcccucaucuacuuugcua

SEQ ID NO: 1639020 - RNA, 19 nt, Homo sapiens
  misc_RNA (1)...(19): siRNA sense strand
caagacagaagaagagaau

SEQ ID NO: 1639021 - RNA, 19 nt, Homo sapiens
  misc_RNA (1)...(19): siRNA sense strand
gaccacagcccacaagaca

SEQ ID NO: 1639022 - RNA, 19 nt, Homo sapiens
  misc_RNA (1)...(19): siRNA sense strand
ccacagcccacaagacaga

SEQ ID NO: 1639023 - RNA, 19 nt, Homo sapiens
  misc_RNA (1)...(19): siRNA sense strand
gauuucuaccugaucuuua

SEQ ID NO: 1639024 - RNA, 19 nt, Homo sapiens
  misc_RNA (1)...(19): siRNA sense strand
cgacucggacucugacuga

SEQ ID NO: 1639025 - RNA, 19 nt, Homo sapiens
  misc_RNA (1)...(19): siRNA sense strand
ggccuuguacuuccucuuu

SEQ ID NO: 1639026 - RNA, 19 nt, Homo sapiens
  misc_RNA (1)...(19): siRNA sense strand
ccacaagacagaagaagag

SEQ ID NO: 1639027 - RNA, 19 nt, Homo sapiens
  misc_RNA (1)...(19): siRNA sense strand
caaagccgcugggguguuu

SEQ ID NO: 1639028 - RNA, 19 nt, Homo sapiens
  misc_RNA (1)...(19): siRNA sense strand
uaacgacguggccaaauuc

SEQ ID NO: 1639029 - RNA, 19 nt, Homo sapiens
  misc_RNA (1)...(19): siRNA sense strand
ggccaaauuccucaaacaa

SEQ ID NO: 1639030 - RNA, 19 nt, Homo sapiens
  misc_RNA (1)...(19): siRNA sense strand
agacagaagaagagaauuc

SEQ ID NO: 1639031 - RNA, 19 nt, Homo sapiens
  misc_RNA (1)...(19): siRNA sense strand
ggcuugugcuggcccauga

SEQ ID NO: 1639032 - RNA, 19 nt, Homo sapiens
  misc_RNA (1)...(19): siRNA sense strand
guuugcaacugauuucuac

SEQ ID NO: 1639033 - RNA, 19 nt, Homo sapiens
  misc_RNA (1)...(19): siRNA sense strand
ggucucucauucaucacuu

SEQ ID NO: 1639034 - RNA, 19 nt, Homo sapiens
  misc_RNA (1)...(19): siRNA sense strand
gccuuguacuuccucuuug

SEQ ID NO: 1639035 - RNA, 19 nt, Homo sapiens
  misc_RNA (1)...(19): siRNA sense strand
gccaaauuccucaaacaag

SEQ ID NO: 1639036 - RNA, 19 nt, Homo sapiens
  misc_RNA (1)...(19): siRNA sense strand
ccaucguguuugcaacuga

SEQ ID NO: 1639037 - RNA, 19 nt, Homo sapiens
  misc_RNA (1)...(19): siRNA sense strand
caucguguuugcaacugau

SEQ ID NO: 1639038 - RNA, 19 nt, Homo sapiens
  misc_RNA (1)...(19): siRNA sense strand
uggccaaauuccucaaaca

SEQ ID NO: 1639039 - RNA, 19 nt, Homo sapiens
  misc_RNA (1)...(19): siRNA sense strand
gcuaccaucguguuugcaa

SEQ ID NO: 1639040 - RNA, 19 nt, Homo sapiens
  misc_RNA (1)...(19): siRNA sense strand
ugauuucuaccugaucuuu

SEQ ID NO: 1639041 - RNA, 19 nt, Homo sapiens
  misc_RNA (1)...(19): siRNA sense strand
ucacggccaucgccaagua

SEQ ID NO: 1639042 - RNA, 19 nt, Homo sapiens
  misc_RNA (1)...(19): siRNA sense strand
caacugauuucuaccugau

SEQ ID NO: 1639043 - RNA, 19 nt, Homo sapiens
  misc_RNA (1)...(19): siRNA sense strand
uuaacgacguggccaaauu

SEQ ID NO: 1639044 - RNA, 19 nt, Homo sapiens
  misc_RNA (1)...(19): siRNA sense strand
guguuuggcuucuuugcua

SEQ ID NO: 1639045 - RNA, 19 nt, Homo sapiens
  misc_RNA (1)...(19): siRNA sense strand
gcccucaucuacuuugcua

SEQ ID NO: 1639046 - RNA, 19 nt, Homo sapiens
  misc_RNA (1)...(19): siRNA sense strand
caagacagaagaagagaau

SEQ ID NO: 1639047 - RNA, 19 nt, Homo sapiens
  misc_RNA (1)...(19): siRNA sense strand
gaccacagcccacaagaca

SEQ ID NO: 1639048 - RNA, 19 nt, Homo sapiens
  misc_RNA (1)...(19): siRNA sense strand
ccacagcccacaagacaga

SEQ ID NO: 1639049 - RNA, 19 nt, Homo sapiens
  misc_RNA (1)...(19): siRNA sense strand
gauuucuaccugaucuuua

SEQ ID NO: 1639050 - RNA, 19 nt, Homo sapiens
  misc_RNA (1)...(19): siRNA sense strand
cgacucggacucugacuga

SEQ ID NO: 1639051 - RNA, 19 nt, Homo sapiens
  misc_RNA (1)...(19): siRNA sense strand
caaagccgcugggguguuu

SEQ ID NO: 1639052 - RNA, 19 nt, Homo sapiens
  misc_RNA (1)...(19): siRNA sense strand
ccacaagacagaagaagag

SEQ ID NO: 1639053 - RNA, 19 nt, Homo sapiens
  misc_RNA (1)...(19): siRNA sense strand
uaacgacguggccaaauuc

SEQ ID NO: 1639054 - RNA, 19 nt, Homo sapiens
  misc_RNA (1)...(19): siRNA sense strand
ggccaaauuccucaaacaa

SEQ ID NO: 1639055 - RNA, 19 nt, Homo sapiens
  misc_RNA (1)...(19): siRNA sense strand
agacagaagaagagaauuc

SEQ ID NO: 1639056 - RNA, 19 nt, Homo sapiens
  misc_RNA (1)...(19): siRNA sense strand
ggcuugugcuggcccauga

SEQ ID NO: 1639057 - RNA, 19 nt, Homo sapiens
  misc_RNA (1)...(19): siRNA sense strand
guuugcaacugauuucuac

SEQ ID NO: 1639058 - RNA, 19 nt, Homo sapiens
  misc_RNA (1)...(19): siRNA sense strand
ccaucguguuugcaacuga

SEQ ID NO: 1639059 - RNA, 19 nt, Homo sapiens
  misc_RNA (1)...(19): siRNA sense strand
gccaaauuccucaaacaag

SEQ ID NO: 1639060 - RNA, 19 nt, Homo sapiens
  misc_RNA (1)...(19): siRNA sense strand
caucguguuugcaacugau

SEQ ID NO: 1639061 - RNA, 19 nt, Homo sapiens
  misc_RNA (1)...(19): siRNA sense strand
uggccaaauuccucaaaca

SEQ ID NO: 1639062 - RNA, 19 nt, Homo sapiens
  misc_RNA (1)...(19): siRNA sense strand
gcuaccaucguguuugcaa

SEQ ID NO: 1639063 - RNA, 19 nt, Homo sapiens
  misc_RNA (1)...(19): siRNA sense strand
ugauuucuaccugaucuuu

SEQ ID NO: 1639064 - RNA, 19 nt, Homo sapiens
  misc_RNA (1)...(19): siRNA sense strand
gaaauuagcagauugguaa

SEQ ID NO: 1639065 - RNA, 19 nt, Homo sapiens
  misc_RNA (1)...(19): siRNA sense strand
ggaaauaccguguuuguaa

SEQ ID NO: 1639066 - RNA, 19 nt, Homo sapiens
  misc_RNA (1)...(19): siRNA sense strand
gguaagaagugcaaauuau

SEQ ID NO: 1639067 - RNA, 19 nt, Homo sapiens
  misc_RNA (1)...(19): siRNA sense strand
caagauaccuuacgcacaa

SEQ ID NO: 1639068 - RNA, 19 nt, Homo sapiens
  misc_RNA (1)...(19): siRNA sense strand
guucaggaguuucaauuua

SEQ ID NO: 1639069 - RNA, 19 nt, Homo sapiens
  misc_RNA (1)...(19): siRNA sense strand
ucaaagaccuucuguguuc

SEQ ID NO: 1639070 - RNA, 19 nt, Homo sapiens
  misc_RNA (1)...(19): siRNA sense strand
gaugauaacugcuuuacug

SEQ ID NO: 1639071 - RNA, 19 nt, Homo sapiens
  misc_RNA (1)...(19): siRNA sense strand
gaacaguagcgcaguauuu

SEQ ID NO: 1639072 - RNA, 19 nt, Homo sapiens
  misc_RNA (1)...(19): siRNA sense strand
cuagaagucuguaauauug

SEQ ID NO: 1639073 - RNA, 19 nt, Homo sapiens
  misc_RNA (1)...(19): siRNA sense strand
gaaauaccguguuuguaau

SEQ ID NO: 1639074 - RNA, 19 nt, Homo sapiens
  misc_RNA (1)...(19): siRNA sense strand
gggcaacgauguaucaaga

SEQ ID NO: 1639075 - RNA, 19 nt, Homo sapiens
  misc_RNA (1)...(19): siRNA sense strand
caucaaaccuuuccuuuac

SEQ ID NO: 1639076 - RNA, 19 nt, Homo sapiens
  misc_RNA (1)...(19): siRNA sense strand
ccauuaaacugcuggcuaa

SEQ ID NO: 1639077 - RNA, 19 nt, Homo sapiens
  misc_RNA (1)...(19): siRNA sense strand
ugaaauggcucauguaacu

SEQ ID NO: 1639078 - RNA, 19 nt, Homo sapiens
  misc_RNA (1)...(19): siRNA sense strand
ucaagaagcuaacagacaa

SEQ ID NO: 1639079 - RNA, 19 nt, Homo sapiens
  misc_RNA (1)...(19): siRNA sense strand
caagaccucugacugauuc

SEQ ID NO: 1639080 - RNA, 19 nt, Homo sapiens
  misc_RNA (1)...(19): siRNA sense strand
gggaacuucuuauucaauu

SEQ ID NO: 1639081 - RNA, 19 nt, Homo sapiens
  misc_RNA (1)...(19): siRNA sense strand
cgagaagccugcaucaguu

SEQ ID NO: 1639082 - RNA, 19 nt, Homo sapiens
  misc_RNA (1)...(19): siRNA sense strand
guauuaugcucaccuggua

SEQ ID NO: 1639083 - RNA, 19 nt, Homo sapiens
  misc_RNA (1)...(19): siRNA sense strand
ggacaaagaacaugacagu

SEQ ID NO: 1639084 - RNA, 19 nt, Homo sapiens
  misc_RNA (1)...(19): siRNA sense strand
guacagauucaccaagaua

SEQ ID NO: 1639085 - RNA, 19 nt, Homo sapiens
  misc_RNA (1)...(19): siRNA sense strand
gaacaaugagacggaaaua

SEQ ID NO: 1639086 - RNA, 19 nt, Homo sapiens
  misc_RNA (1)...(19): siRNA sense strand
gaacuucagcugcuaacuu

SEQ ID NO: 1639087 - RNA, 19 nt, Homo sapiens
  misc_RNA (1)...(19): siRNA sense strand
aaucagacuuccacuauga

SEQ ID NO: 1639088 - RNA, 19 nt, Homo sapiens
  misc_RNA (1)...(19): siRNA sense strand
gcagugcagagaagaaaua

SEQ ID NO: 1639089 - RNA, 19 nt, Homo sapiens
  misc_RNA (1)...(19): siRNA sense strand
gugcagagaagaaauauug

SEQ ID NO: 1639090 - RNA, 19 nt, Homo sapiens
  misc_RNA (1)...(19): siRNA sense strand
gcacaauguacuucgcuua

SEQ ID NO: 1639091 - RNA, 19 nt, Homo sapiens
  misc_RNA (1)...(19): siRNA sense strand
ccaaagagauaaaagguuu

SEQ ID NO: 1639092 - RNA, 19 nt, Homo sapiens
  misc_RNA (1)...(19): siRNA sense strand
uacacgaucuguuucuaua

SEQ ID NO: 1639093 - RNA, 19 nt, Homo sapiens
  misc_RNA (1)...(19): siRNA sense strand
ccacuagaagucuguaaua

SEQ ID NO: 1639094 - RNA, 19 nt, Homo sapiens
  misc_RNA (1)...(19): siRNA sense strand
aaacuugugccuaaagaua

SEQ ID NO: 1639095 - RNA, 19 nt, Homo sapiens
  misc_RNA (1)...(19): siRNA sense strand
caaggugucaaucaaauuu

SEQ ID NO: 1639096 - RNA, 19 nt, Homo sapiens
  misc_RNA (1)...(19): siRNA sense strand
uaauucaguucauguguga

SEQ ID NO: 1639097 - RNA, 19 nt, Homo sapiens
  misc_RNA (1)...(19): siRNA sense strand
ggguauggcuacacaaugu

SEQ ID NO: 1639098 - RNA, 19 nt, Homo sapiens
  misc_RNA (1)...(19): siRNA sense strand
aaccuuuccuuuacaguua

SEQ ID NO: 1639099 - RNA, 19 nt, Homo sapiens
  misc_RNA (1)...(19): siRNA sense strand
ugccaaggcuguacagauu

SEQ ID NO: 1639100 - RNA, 19 nt, Homo sapiens
  misc_RNA (1)...(19): siRNA sense strand
ugacagugcugaaggaagu

SEQ ID NO: 1639101 - RNA, 19 nt, Homo sapiens
  misc_RNA (1)...(19): siRNA sense strand
aacuucagcugcuaacuua

SEQ ID NO: 1639102 - RNA, 19 nt, Homo sapiens
  misc_RNA (1)...(19): siRNA sense strand
ucggagggaucaauaauau

SEQ ID NO: 1639103 - RNA, 19 nt, Homo sapiens
  misc_RNA (1)...(19): siRNA sense strand
ucacagaccagcugcguaa

SEQ ID NO: 1639104 - RNA, 19 nt, Homo sapiens
  misc_RNA (1)...(19): siRNA sense strand
ggaaauuagcagauuggua

SEQ ID NO: 1639105 - RNA, 19 nt, Homo sapiens
  misc_RNA (1)...(19): siRNA sense strand
caaagcacaaccuguaauu

SEQ ID NO: 1639106 - RNA, 19 nt, Homo sapiens
  misc_RNA (1)...(19): siRNA sense strand
acaucacacucgauuauuu

SEQ ID NO: 1639107 - RNA, 19 nt, Homo sapiens
  misc_RNA (1)...(19): siRNA sense strand
caucaaagaccuucugugu

SEQ ID NO: 1639108 - RNA, 19 nt, Homo sapiens
  misc_RNA (1)...(19): siRNA sense strand
gcaacgauguaucaagaag

SEQ ID NO: 1639109 - RNA, 19 nt, Homo sapiens
  misc_RNA (1)...(19): siRNA sense strand
gauaaaagguuugaagguu

SEQ ID NO: 1639110 - RNA, 19 nt, Homo sapiens
  misc_RNA (1)...(19): siRNA sense strand
gaccagcugcguaagauuu

SEQ ID NO: 1639111 - RNA, 19 nt, Homo sapiens
  misc_RNA (1)...(19): siRNA sense strand
uaacagacaaucagacuuc

SEQ ID NO: 1639112 - RNA, 19 nt, Homo sapiens
  misc_RNA (1)...(19): siRNA sense strand
gaucaaggcaacagcaaga

SEQ ID NO: 1639113 - RNA, 19 nt, Homo sapiens
  misc_RNA (1)...(19): siRNA sense strand
gcagagaagaaauauugaa

SEQ ID NO: 1639114 - RNA, 19 nt, Homo sapiens
  misc_RNA (1)...(19): siRNA sense strand
ucccaaagauugaugucua

SEQ ID NO: 1639115 - RNA, 19 nt, Homo sapiens
  misc_RNA (1)...(19): siRNA sense strand
guaagaagugcaaauuaug

SEQ ID NO: 1639116 - RNA, 19 nt, Homo sapiens
  misc_RNA (1)...(19): siRNA sense strand
caaacucugucaaacuugu

SEQ ID NO: 1639117 - RNA, 19 nt, Homo sapiens
  misc_RNA (1)...(19): siRNA sense strand
ucaucaaaccuuuccuuua

SEQ ID NO: 1639118 - RNA, 19 nt, Homo sapiens
  misc_RNA (1)...(19): siRNA sense strand
gauagacaagaggaaauua

SEQ ID NO: 1639119 - RNA, 19 nt, Homo sapiens
  misc_RNA (1)...(19): siRNA sense strand
gugugaaguucuugauauu

SEQ ID NO: 1639120 - RNA, 19 nt, Homo sapiens
  misc_RNA (1)...(19): siRNA sense strand
ggagaaagacuaucaaccu

SEQ ID NO: 1639121 - RNA, 19 nt, Homo sapiens
  misc_RNA (1)...(19): siRNA sense strand
ucaaacuugugccuaaaga

SEQ ID NO: 1639122 - RNA, 19 nt, Homo sapiens
  misc_RNA (1)...(19): siRNA sense strand
cgacaucugcccuccauga

SEQ ID NO: 1639123 - RNA, 19 nt, Homo sapiens
  misc_RNA (1)...(19): siRNA sense strand
caaggaggccugccaguca

SEQ ID NO: 1639124 - RNA, 19 nt, Homo sapiens
  misc_RNA (1)...(19): siRNA sense strand
gaagugacucauuguggaa

SEQ ID NO: 1639125 - RNA, 19 nt, Homo sapiens
  misc_RNA (1)...(19): siRNA sense strand
gagcaaccaagaccucuga

SEQ ID NO: 1639126 - RNA, 19 nt, Homo sapiens
  misc_RNA (1)...(19): siRNA sense strand
gaacaugacagugcugaag

SEQ ID NO: 1639127 - RNA, 19 nt, Homo sapiens
  misc_RNA (1)...(19): siRNA sense strand
gggcaaacccauuaaacug

SEQ ID NO: 1639128 - RNA, 19 nt, Homo sapiens
  misc_RNA (1)...(19): siRNA sense strand
gagaagccugcaucaguuu

SEQ ID NO: 1639129 - RNA, 19 nt, Homo sapiens
  misc_RNA (1)...(19): siRNA sense strand
guucaagucaagaauguaa

SEQ ID NO: 1639130 - RNA, 19 nt, Homo sapiens
  misc_RNA (1)...(19): siRNA sense strand
gcagggcaacgauguauca

SEQ ID NO: 1639131 - RNA, 19 nt, Homo sapiens
  misc_RNA (1)...(19): siRNA sense strand
gaauuagacaagccaauca

SEQ ID NO: 1639132 - RNA, 19 nt, Homo sapiens
  misc_RNA (1)...(19): siRNA sense strand
aaacaucuccucaaacucu

SEQ ID NO: 1639133 - RNA, 19 nt, Homo sapiens
  misc_RNA (1)...(19): siRNA sense strand
acaccuaccugccacuaga

SEQ ID NO: 1639134 - RNA, 19 nt, Homo sapiens
  misc_RNA (1)...(19): siRNA sense strand
ugugugaaguucuugauau

SEQ ID NO: 1639135 - RNA, 19 nt, Homo sapiens
  misc_RNA (1)...(19): siRNA sense strand
ugagguagauauuaaacca

SEQ ID NO: 1639136 - RNA, 19 nt, Homo sapiens
  misc_RNA (1)...(19): siRNA sense strand
ccaaggcuguacagauuca

SEQ ID NO: 1639137 - RNA, 19 nt, Homo sapiens
  misc_RNA (1)...(19): siRNA sense strand
uggaagaaguggcaauauc

SEQ ID NO: 1639138 - RNA, 19 nt, Homo sapiens
  misc_RNA (1)...(19): siRNA sense strand
agaaaggguuggaagaagu

SEQ ID NO: 1639139 - RNA, 19 nt, Homo sapiens
  misc_RNA (1)...(19): siRNA sense strand
gcaucaguuuggagaaaga

SEQ ID NO: 1639140 - RNA, 19 nt, Homo sapiens
  misc_RNA (1)...(19): siRNA sense strand
ggaagugaaacguguagga

SEQ ID NO: 1639141 - RNA, 19 nt, Homo sapiens
  misc_RNA (1)...(19): siRNA sense strand
ccacacaggaguugaaauc

SEQ ID NO: 1639142 - RNA, 19 nt, Homo sapiens
  misc_RNA (1)...(19): siRNA sense strand
ggacggaaucggacaguag

SEQ ID NO: 1639143 - RNA, 19 nt, Homo sapiens
  misc_RNA (1)...(19): siRNA sense strand
aagaggaaauuagcagauu

SEQ ID NO: 1639144 - RNA, 19 nt, Homo sapiens
  misc_RNA (1)...(19): siRNA sense strand
agagaacaguagcgcagua

SEQ ID NO: 1639145 - RNA, 19 nt, Homo sapiens
  misc_RNA (1)...(19): siRNA sense strand
ggaauuagacaagccaauc

SEQ ID NO: 1639146 - RNA, 19 nt, Homo sapiens
  misc_RNA (1)...(19): siRNA sense strand
gaaaggguuggaagaagug

SEQ ID NO: 1639147 - RNA, 19 nt, Homo sapiens
  misc_RNA (1)...(19): siRNA sense strand
gcaguuuaggcagguauua

SEQ ID NO: 1639148 - RNA, 19 nt, Homo sapiens
  misc_RNA (1)...(19): siRNA sense strand
aaacucggagggaucaaua

SEQ ID NO: 1639149 - RNA, 19 nt, Homo sapiens
  misc_RNA (1)...(19): siRNA sense strand
caaucagacuuccacuaug

SEQ ID NO: 1639150 - RNA, 19 nt, Homo sapiens
  misc_RNA (1)...(19): siRNA sense strand
uaccguguuuguaauguaa

SEQ ID NO: 1639151 - RNA, 19 nt, Homo sapiens
  misc_RNA (1)...(19): siRNA sense strand
ggaacaaugagacggaaau

SEQ ID NO: 1639152 - RNA, 19 nt, Homo sapiens
  misc_RNA (1)...(19): siRNA sense strand
agacaucacacucgauuau

SEQ ID NO: 1639153 - RNA, 19 nt, Homo sapiens
  misc_RNA (1)...(19): siRNA sense strand
gcaccuaugcuccaguaug

SEQ ID NO: 1639154 - RNA, 19 nt, Homo sapiens
  misc_RNA (1)...(19): siRNA sense strand
acaaucagacuuccacuau

SEQ ID NO: 1639155 - RNA, 19 nt, Homo sapiens
  misc_RNA (1)...(19): siRNA sense strand
cucaaacucugucaaacuu

SEQ ID NO: 1639156 - RNA, 19 nt, Homo sapiens
  misc_RNA (1)...(19): siRNA sense strand
caaguugaaaucccaaaga

SEQ ID NO: 1639157 - RNA, 19 nt, Homo sapiens
  misc_RNA (1)...(19): siRNA sense strand
gcugaaggaagucacguuu

SEQ ID NO: 1639158 - RNA, 19 nt, Homo sapiens
  misc_RNA (1)...(19): siRNA sense strand
uaccugcaccagcguauua

SEQ ID NO: 1639159 - RNA, 19 nt, Homo sapiens
  misc_RNA (1)...(19): siRNA sense strand
uaucccagcuggaacaaca

SEQ ID NO: 1639160 - RNA, 19 nt, Homo sapiens
  misc_RNA (1)...(19): siRNA sense strand
aggcagguauuauauuaug

SEQ ID NO: 1639161 - RNA, 19 nt, Homo sapiens
  misc_RNA (1)...(19): siRNA sense strand
cacuagaagucuguaauau

SEQ ID NO: 1639162 - RNA, 19 nt, Homo sapiens
  misc_RNA (1)...(19): siRNA sense strand
gcauuuagagccagauauc

SEQ ID NO: 1639163 - RNA, 19 nt, Homo sapiens
  misc_RNA (1)...(19): siRNA sense strand
cagccaugcuucugcaaau

SEQ ID NO: 1639164 - RNA, 19 nt, Homo sapiens
  misc_RNA (1)...(19): siRNA sense strand
gaaauuagcagauugguaa

SEQ ID NO: 1639165 - RNA, 19 nt, Homo sapiens
  misc_RNA (1)...(19): siRNA sense strand
ggaaauaccguguuuguaa

SEQ ID NO: 1639166 - RNA, 19 nt, Homo sapiens
  misc_RNA (1)...(19): siRNA sense strand
gguaagaagugcaaauuau

SEQ ID NO: 1639167 - RNA, 19 nt, Homo sapiens
  misc_RNA (1)...(19): siRNA sense strand
caagauaccuuacgcacaa

SEQ ID NO: 1639168 - RNA, 19 nt, Homo sapiens
  misc_RNA (1)...(19): siRNA sense strand
guucaggaguuucaauuua

SEQ ID NO: 1639169 - RNA, 19 nt, Homo sapiens
  misc_RNA (1)...(19): siRNA sense strand
ucaaagaccuucuguguuc

SEQ ID NO: 1639170 - RNA, 19 nt, Homo sapiens
  misc_RNA (1)...(19): siRNA sense strand
gaugauaacugcuuuacug

SEQ ID NO: 1639171 - RNA, 19 nt, Homo sapiens
  misc_RNA (1)...(19): siRNA sense strand
gaacaguagcgcaguauuu

SEQ ID NO: 1639172 - RNA, 19 nt, Homo sapiens
  misc_RNA (1)...(19): siRNA sense strand
cuagaagucuguaauauug

SEQ ID NO: 1639173 - RNA, 19 nt, Homo sapiens
  misc_RNA (1)...(19): siRNA sense strand
gaaauaccguguuuguaau

SEQ ID NO: 1639174 - RNA, 19 nt, Homo sapiens
  misc_RNA (1)...(19): siRNA sense strand
gggcaacgauguaucaaga

SEQ ID NO: 1639175 - RNA, 19 nt, Homo sapiens
  misc_RNA (1)...(19): siRNA sense strand
caucaaaccuuuccuuuac

SEQ ID NO: 1639176 - RNA, 19 nt, Homo sapiens
  misc_RNA (1)...(19): siRNA sense strand
ugaaauggcucauguaacu

SEQ ID NO: 1639177 - RNA, 19 nt, Homo sapiens
  misc_RNA (1)...(19): siRNA sense strand
ucaagaagcuaacagacaa

SEQ ID NO: 1639178 - RNA, 19 nt, Homo sapiens
  misc_RNA (1)...(19): siRNA sense strand
caagaccucugacugauuc

SEQ ID NO: 1639179 - RNA, 19 nt, Homo sapiens
  misc_RNA (1)...(19): siRNA sense strand
gggaacuucuuauucaauu

SEQ ID NO: 1639180 - RNA, 19 nt, Homo sapiens
  misc_RNA (1)...(19): siRNA sense strand
cgagaagccugcaucaguu

SEQ ID NO: 1639181 - RNA, 19 nt, Homo sapiens
  misc_RNA (1)...(19): siRNA sense strand
guauuaugcucaccuggua

SEQ ID NO: 1639182 - RNA, 19 nt, Homo sapiens
  misc_RNA (1)...(19): siRNA sense strand
ggacaaagaacaugacagu

SEQ ID NO: 1639183 - RNA, 19 nt, Homo sapiens
  misc_RNA (1)...(19): siRNA sense strand
guacagauucaccaagaua

SEQ ID NO: 1639184 - RNA, 19 nt, Homo sapiens
  misc_RNA (1)...(19): siRNA sense strand
gaacaaugagacggaaaua

SEQ ID NO: 1639185 - RNA, 19 nt, Homo sapiens
  misc_RNA (1)...(19): siRNA sense strand
gaacuucagcugcuaacuu

SEQ ID NO: 1639186 - RNA, 19 nt, Homo sapiens
  misc_RNA (1)...(19): siRNA sense strand
aaucagacuuccacuauga

SEQ ID NO: 1639187 - RNA, 19 nt, Homo sapiens
  misc_RNA (1)...(19): siRNA sense strand
gcagugcagagaagaaaua

SEQ ID NO: 1639188 - RNA, 19 nt, Homo sapiens
  misc_RNA (1)...(19): siRNA sense strand
gugcagagaagaaauauug

SEQ ID NO: 1639189 - RNA, 19 nt, Homo sapiens
  misc_RNA (1)...(19): siRNA sense strand
gcacaauguacuucgcuua

SEQ ID NO: 1639190 - RNA, 19 nt, Homo sapiens
  misc_RNA (1)...(19): siRNA sense strand
ccaaagagauaaaagguuu

SEQ ID NO: 1639191 - RNA, 19 nt, Homo sapiens
  misc_RNA (1)...(19): siRNA sense strand
uacacgaucuguuucuaua

SEQ ID NO: 1639192 - RNA, 19 nt, Homo sapiens
  misc_RNA (1)...(19): siRNA sense strand
ccacuagaagucuguaaua

SEQ ID NO: 1639193 - RNA, 19 nt, Homo sapiens
  misc_RNA (1)...(19): siRNA sense strand
aaacuugugccuaaagaua

SEQ ID NO: 1639194 - RNA, 19 nt, Homo sapiens
  misc_RNA (1)...(19): siRNA sense strand
ggguauggcuacacaaugu

SEQ ID NO: 1639195 - RNA, 19 nt, Homo sapiens
  misc_RNA (1)...(19): siRNA sense strand
aaccuuuccuuuacaguua

SEQ ID NO: 1639196 - RNA, 19 nt, Homo sapiens
  misc_RNA (1)...(19): siRNA sense strand
ugccaaggcuguacagauu

SEQ ID NO: 1639197 - RNA, 19 nt, Homo sapiens
  misc_RNA (1)...(19): siRNA sense strand
ugacagugcugaaggaagu

SEQ ID NO: 1639198 - RNA, 19 nt, Homo sapiens
  misc_RNA (1)...(19): siRNA sense strand
aacuucagcugcuaacuua

SEQ ID NO: 1639199 - RNA, 19 nt, Homo sapiens
  misc_RNA (1)...(19): siRNA sense strand
ucggagggaucaauaauau

SEQ ID NO: 1639200 - RNA, 19 nt, Homo sapiens
  misc_RNA (1)...(19): siRNA sense strand
ucacagaccagcugcguaa

SEQ ID NO: 1639201 - RNA, 19 nt, Homo sapiens
  misc_RNA (1)...(19): siRNA sense strand
ggaaauuagcagauuggua

SEQ ID NO: 1639202 - RNA, 19 nt, Homo sapiens
  misc_RNA (1)...(19): siRNA sense strand
gcaacgauguaucaagaag

SEQ ID NO: 1639203 - RNA, 19 nt, Homo sapiens
  misc_RNA (1)...(19): siRNA sense strand
acaucacacucgauuauuu

SEQ ID NO: 1639204 - RNA, 19 nt, Homo sapiens
  misc_RNA (1)...(19): siRNA sense strand
caucaaagaccuucugugu

SEQ ID NO: 1639205 - RNA, 19 nt, Homo sapiens
  misc_RNA (1)...(19): siRNA sense strand
uaacagacaaucagacuuc

SEQ ID NO: 1639206 - RNA, 19 nt, Homo sapiens
  misc_RNA (1)...(19): siRNA sense strand
gauaaaagguuugaagguu

SEQ ID NO: 1639207 - RNA, 19 nt, Homo sapiens
  misc_RNA (1)...(19): siRNA sense strand
gaccagcugcguaagauuu

SEQ ID NO: 1639208 - RNA, 19 nt, Homo sapiens
  misc_RNA (1)...(19): siRNA sense strand
gaucaaggcaacagcaaga

SEQ ID NO: 1639209 - RNA, 19 nt, Homo sapiens
  misc_RNA (1)...(19): siRNA sense strand
gcagagaagaaauauugaa

SEQ ID NO: 1639210 - RNA, 19 nt, Homo sapiens
  misc_RNA (1)...(19): siRNA sense strand
guaagaagugcaaauuaug

SEQ ID NO: 1639211 - RNA, 19 nt, Homo sapiens
  misc_RNA (1)...(19): siRNA sense strand
caaacucugucaaacuugu

SEQ ID NO: 1639212 - RNA, 19 nt, Homo sapiens
  misc_RNA (1)...(19): siRNA sense strand
ucaucaaaccuuuccuuua

SEQ ID NO: 1639213 - RNA, 19 nt, Homo sapiens
  misc_RNA (1)...(19): siRNA sense strand
gauagacaagaggaaauua

SEQ ID NO: 1639214 - RNA, 19 nt, Homo sapiens
  misc_RNA (1)...(19): siRNA sense strand
gugugaaguucuugauauu

SEQ ID NO: 1639215 - RNA, 19 nt, Homo sapiens
  misc_RNA (1)...(19): siRNA sense strand
ggagaaagacuaucaaccu

SEQ ID NO: 1639216 - RNA, 19 nt, Homo sapiens
  misc_RNA (1)...(19): siRNA sense strand
ucaaacuugugccuaaaga

SEQ ID NO: 1639217 - RNA, 19 nt, Homo sapiens
  misc_RNA (1)...(19): siRNA sense strand
caaggaggccugccaguca

SEQ ID NO: 1639218 - RNA, 19 nt, Homo sapiens
  misc_RNA (1)...(19): siRNA sense strand
gaagugacucauuguggaa

SEQ ID NO: 1639219 - RNA, 19 nt, Homo sapiens
  misc_RNA (1)...(19): siRNA sense strand
gcagggcaacgauguauca

SEQ ID NO: 1639220 - RNA, 19 nt, Homo sapiens
  misc_RNA (1)...(19): siRNA sense strand
gaacaugacagugcugaag

SEQ ID NO: 1639221 - RNA, 19 nt, Homo sapiens
  misc_RNA (1)...(19): siRNA sense strand
gagaagccugcaucaguuu

SEQ ID NO: 1639222 - RNA, 19 nt, Homo sapiens
  misc_RNA (1)...(19): siRNA sense strand
gagcaaccaagaccucuga

SEQ ID NO: 1639223 - RNA, 19 nt, Homo sapiens
  misc_RNA (1)...(19): siRNA sense strand
guucaagucaagaauguaa

SEQ ID NO: 1639224 - RNA, 19 nt, Homo sapiens
  misc_RNA (1)...(19): siRNA sense strand
acaccuaccugccacuaga

SEQ ID NO: 1639225 - RNA, 19 nt, Homo sapiens
  misc_RNA (1)...(19): siRNA sense strand
aaacaucuccucaaacucu

SEQ ID NO: 1639226 - RNA, 19 nt, Homo sapiens
  misc_RNA (1)...(19): siRNA sense strand
agagaacaguagcgcagua

SEQ ID NO: 1639227 - RNA, 19 nt, Homo sapiens
  misc_RNA (1)...(19): siRNA sense strand
ccaaggcuguacagauuca

SEQ ID NO: 1639228 - RNA, 19 nt, Homo sapiens
  misc_RNA (1)...(19): siRNA sense strand
uggaagaaguggcaauauc

SEQ ID NO: 1639229 - RNA, 19 nt, Homo sapiens
  misc_RNA (1)...(19): siRNA sense strand
agaaaggguuggaagaagu

SEQ ID NO: 1639230 - RNA, 19 nt, Homo sapiens
  misc_RNA (1)...(19): siRNA sense strand
gcaucaguuuggagaaaga

SEQ ID NO: 1639231 - RNA, 19 nt, Homo sapiens
  misc_RNA (1)...(19): siRNA sense strand
ggaagugaaacguguagga

SEQ ID NO: 1639232 - RNA, 19 nt, Homo sapiens
  misc_RNA (1)...(19): siRNA sense strand
ccacacaggaguugaaauc

SEQ ID NO: 1639233 - RNA, 19 nt, Homo sapiens
  misc_RNA (1)...(19): siRNA sense strand
ggacggaaucggacaguag

SEQ ID NO: 1639234 - RNA, 19 nt, Homo sapiens
  misc_RNA (1)...(19): siRNA sense strand
aagaggaaauuagcagauu

SEQ ID NO: 1639235 - RNA, 19 nt, Homo sapiens
  misc_RNA (1)...(19): siRNA sense strand
caaucagacuuccacuaug

SEQ ID NO: 1639236 - RNA, 19 nt, Homo sapiens
  misc_RNA (1)...(19): siRNA sense strand
gaaaggguuggaagaagug

SEQ ID NO: 1639237 - RNA, 19 nt, Homo sapiens
  misc_RNA (1)...(19): siRNA sense strand
uaccguguuuguaauguaa

SEQ ID NO: 1639238 - RNA, 19 nt, Homo sapiens
  misc_RNA (1)...(19): siRNA sense strand
gcaguuuaggcagguauua

SEQ ID NO: 1639239 - RNA, 19 nt, Homo sapiens
  misc_RNA (1)...(19): siRNA sense strand
aaacucggagggaucaaua

SEQ ID NO: 1639240 - RNA, 19 nt, Homo sapiens
  misc_RNA (1)...(19): siRNA sense strand
acaaucagacuuccacuau

SEQ ID NO: 1639241 - RNA, 19 nt, Homo sapiens
  misc_RNA (1)...(19): siRNA sense strand
ggaacaaugagacggaaau

SEQ ID NO: 1639242 - RNA, 19 nt, Homo sapiens
  misc_RNA (1)...(19): siRNA sense strand
agacaucacacucgauuau

SEQ ID NO: 1639243 - RNA, 19 nt, Homo sapiens
  misc_RNA (1)...(19): siRNA sense strand
gcaccuaugcuccaguaug

SEQ ID NO: 1639244 - RNA, 19 nt, Homo sapiens
  misc_RNA (1)...(19): siRNA sense strand
cucaaacucugucaaacuu

SEQ ID NO: 1639245 - RNA, 19 nt, Homo sapiens
  misc_RNA (1)...(19): siRNA sense strand
gcugaaggaagucacguuu

SEQ ID NO: 1639246 - RNA, 19 nt, Homo sapiens
  misc_RNA (1)...(19): siRNA sense strand
uaccugcaccagcguauua

SEQ ID NO: 1639247 - RNA, 19 nt, Homo sapiens
  misc_RNA (1)...(19): siRNA sense strand
uaucccagcuggaacaaca

SEQ ID NO: 1639248 - RNA, 19 nt, Homo sapiens
  misc_RNA (1)...(19): siRNA sense strand
aggcagguauuauauuaug

SEQ ID NO: 1639249 - RNA, 19 nt, Homo sapiens
  misc_RNA (1)...(19): siRNA sense strand
cacuagaagucuguaauau

SEQ ID NO: 1639250 - RNA, 19 nt, Homo sapiens
  misc_RNA (1)...(19): siRNA sense strand
gcauuuagagccagauauc

SEQ ID NO: 1639251 - RNA, 19 nt, Homo sapiens
  misc_RNA (1)...(19): siRNA sense strand
cagccaugcuucugcaaau

SEQ ID NO: 1639252 - RNA, 19 nt, Homo sapiens
  misc_RNA (1)...(19): siRNA sense strand
agaggaaauuagcagauug

SEQ ID NO: 1639253 - RNA, 19 nt, Homo sapiens
  misc_RNA (1)...(19): siRNA sense strand
guacacgaucuguuucuau

SEQ ID NO: 1639254 - RNA, 19 nt, Homo sapiens
  misc_RNA (1)...(19): siRNA sense strand
cagaaaggguuggaagaag

SEQ ID NO: 1639255 - RNA, 19 nt, Homo sapiens
  misc_RNA (1)...(19): siRNA sense strand
uaagucaacucgguucaag

SEQ ID NO: 1639256 - RNA, 19 nt, Homo sapiens
  misc_RNA (1)...(19): siRNA sense strand
ugcguaagauuucuaagga

SEQ ID NO: 1639257 - RNA, 19 nt, Homo sapiens
  misc_RNA (1)...(19): siRNA sense strand
gacaaucagacuuccacua

SEQ ID NO: 1639258 - RNA, 19 nt, Homo sapiens
  misc_RNA (1)...(19): siRNA sense strand
cacaauguacuucgcuuaa

SEQ ID NO: 1639259 - RNA, 19 nt, Homo sapiens
  misc_RNA (1)...(19): siRNA sense strand
uaccagcucugccacacuu

SEQ ID NO: 1639260 - RNA, 19 nt, Homo sapiens
  misc_RNA (1)...(19): siRNA sense strand
caccuaugcuccaguaugg

SEQ ID NO: 1639261 - RNA, 19 nt, Homo sapiens
  misc_RNA (1)...(19): siRNA sense strand
cuacucguaucaucuuuua

SEQ ID NO: 1639262 - RNA, 19 nt, Homo sapiens
  misc_RNA (1)...(19): siRNA sense strand
ggcaauaucccagcuggaa

SEQ ID NO: 1639263 - RNA, 19 nt, Homo sapiens
  misc_RNA (1)...(19): siRNA sense strand
gagacaucacacucgauua

SEQ ID NO: 1639264 - RNA, 19 nt, Homo sapiens
  misc_RNA (1)...(19): siRNA sense strand
ggaaagaacuggaaagaaa

SEQ ID NO: 1639265 - RNA, 19 nt, Homo sapiens
  misc_RNA (1)...(19): siRNA sense strand
gaagaaagguuacgacaga

SEQ ID NO: 1639266 - RNA, 19 nt, Homo sapiens
  misc_RNA (1)...(19): siRNA sense strand
gcacugaaguccuuauuug

SEQ ID NO: 1639267 - RNA, 19 nt, Homo sapiens
  misc_RNA (1)...(19): siRNA sense strand
gagaauggcugcuuuggaa

SEQ ID NO: 1639268 - RNA, 19 nt, Homo sapiens
  misc_RNA (1)...(19): siRNA sense strand
caucaaaucugaagaaaug

SEQ ID NO: 1639269 - RNA, 19 nt, Homo sapiens
  misc_RNA (1)...(19): siRNA sense strand
gaaaagaucucaucaaauc

SEQ ID NO: 1639270 - RNA, 19 nt, Homo sapiens
  misc_RNA (1)...(19): siRNA sense strand
ggaauuaugugccugagaa

SEQ ID NO: 1639271 - RNA, 19 nt, Homo sapiens
  misc_RNA (1)...(19): siRNA sense strand
caauuggccuuaaagaaua

SEQ ID NO: 1639272 - RNA, 19 nt, Homo sapiens
  misc_RNA (1)...(19): siRNA sense strand
ggaagaccuugcuaaagua

SEQ ID NO: 1639273 - RNA, 19 nt, Homo sapiens
  misc_RNA (1)...(19): siRNA sense strand
gaacagagccaaaugaaag

SEQ ID NO: 1639274 - RNA, 19 nt, Homo sapiens
  misc_RNA (1)...(19): siRNA sense strand
gaacgacacucgccuaugg

SEQ ID NO: 1639275 - RNA, 19 nt, Homo sapiens
  misc_RNA (1)...(19): siRNA sense strand
ccacaaagcucuggaugaa

SEQ ID NO: 1639276 - RNA, 19 nt, Homo sapiens
  misc_RNA (1)...(19): siRNA sense strand
caaagaagaugcagaugga

SEQ ID NO: 1639277 - RNA, 19 nt, Homo sapiens
  misc_RNA (1)...(19): siRNA sense strand
gaagaaacacaacacgaua

SEQ ID NO: 1639278 - RNA, 19 nt, Homo sapiens
  misc_RNA (1)...(19): siRNA sense strand
cuaaagaacucaauguaug

SEQ ID NO: 1639279 - RNA, 19 nt, Homo sapiens
  misc_RNA (1)...(19): siRNA sense strand
gagaaucacuacucuugaa

SEQ ID NO: 1639280 - RNA, 19 nt, Homo sapiens
  misc_RNA (1)...(19): siRNA sense strand
ggacauaaaccaugaacaa

SEQ ID NO: 1639281 - RNA, 19 nt, Homo sapiens
  misc_RNA (1)...(19): siRNA sense strand
agaaauugcugaacugaaa

SEQ ID NO: 1639282 - RNA, 19 nt, Homo sapiens
  misc_RNA (1)...(19): siRNA sense strand
gagcaaugaucgagugauu

SEQ ID NO: 1639283 - RNA, 19 nt, Homo sapiens
  misc_RNA (1)...(19): siRNA sense strand
uaauugagcuccaagaaau

SEQ ID NO: 1639284 - RNA, 19 nt, Homo sapiens
  misc_RNA (1)...(19): siRNA sense strand
gaagaaagucagagugaaa

SEQ ID NO: 1639285 - RNA, 19 nt, Homo sapiens
  misc_RNA (1)...(19): siRNA sense strand
gagaagagguacgagauga

SEQ ID NO: 1639286 - RNA, 19 nt, Homo sapiens
  misc_RNA (1)...(19): siRNA sense strand
gcaacgagauguccgugaa

SEQ ID NO: 1639287 - RNA, 19 nt, Homo sapiens
  misc_RNA (1)...(19): siRNA sense strand
cauaaaccaugaacaagaa

SEQ ID NO: 1639288 - RNA, 19 nt, Homo sapiens
  misc_RNA (1)...(19): siRNA sense strand
gggaacagcuccuugaaag

SEQ ID NO: 1639289 - RNA, 19 nt, Homo sapiens
  misc_RNA (1)...(19): siRNA sense strand
caacauugaagaaagguua

SEQ ID NO: 1639290 - RNA, 19 nt, Homo sapiens
  misc_RNA (1)...(19): siRNA sense strand
acaaagagcuaaugauucu

SEQ ID NO: 1639291 - RNA, 19 nt, Homo sapiens
  misc_RNA (1)...(19): siRNA sense strand
ggagaagaaucaagaacug

SEQ ID NO: 1639292 - RNA, 19 nt, Homo sapiens
  misc_RNA (1)...(19): siRNA sense strand
caaagaagcauuaggacaa

SEQ ID NO: 1639293 - RNA, 19 nt, Homo sapiens
  misc_RNA (1)...(19): siRNA sense strand
gaaagucagagugaaauaa

SEQ ID NO: 1639294 - RNA, 19 nt, Homo sapiens
  misc_RNA (1)...(19): siRNA sense strand
gaguagcacuugaaagaug

SEQ ID NO: 1639295 - RNA, 19 nt, Homo sapiens
  misc_RNA (1)...(19): siRNA sense strand
ugaaagcacugaaguccuu

SEQ ID NO: 1639296 - RNA, 19 nt, Homo sapiens
  misc_RNA (1)...(19): siRNA sense strand
caggaugccuugggacuua

SEQ ID NO: 1639297 - RNA, 19 nt, Homo sapiens
  misc_RNA (1)...(19): siRNA sense strand
gagaagaaagucagaguga

SEQ ID NO: 1639298 - RNA, 19 nt, Homo sapiens
  misc_RNA (1)...(19): siRNA sense strand
gugcaugaccucaaugaua

SEQ ID NO: 1639299 - RNA, 19 nt, Homo sapiens
  misc_RNA (1)...(19): siRNA sense strand
gauagaagguuugaugaag

SEQ ID NO: 1639300 - RNA, 19 nt, Homo sapiens
  misc_RNA (1)...(19): siRNA sense strand
ggaaagagaauuuaacaac

SEQ ID NO: 1639301 - RNA, 19 nt, Homo sapiens
  misc_RNA (1)...(19): siRNA sense strand
ugcaugaccucaaugauaa

SEQ ID NO: 1639302 - RNA, 19 nt, Homo sapiens
  misc_RNA (1)...(19): siRNA sense strand
cugaagaaaugaacacaaa

SEQ ID NO: 1639303 - RNA, 19 nt, Homo sapiens
  misc_RNA (1)...(19): siRNA sense strand
gcaaacaaucuuauagaga

SEQ ID NO: 1639304 - RNA, 19 nt, Homo sapiens
  misc_RNA (1)...(19): siRNA sense strand
ucgcagcacuuacuaaaga

SEQ ID NO: 1639305 - RNA, 19 nt, Homo sapiens
  misc_RNA (1)...(19): siRNA sense strand
ggcauuaaguccuccauug

SEQ ID NO: 1639306 - RNA, 19 nt, Homo sapiens
  misc_RNA (1)...(19): siRNA sense strand
ugaaagggaagaagaaauu

SEQ ID NO: 1639307 - RNA, 19 nt, Homo sapiens
  misc_RNA (1)...(19): siRNA sense strand
gaacgugcccagcaagcua

SEQ ID NO: 1639308 - RNA, 19 nt, Homo sapiens
  misc_RNA (1)...(19): siRNA sense strand
gaagagagaaucacuacuc

SEQ ID NO: 1639309 - RNA, 19 nt, Homo sapiens
  misc_RNA (1)...(19): siRNA sense strand
acacaaagagcuaaugauu

SEQ ID NO: 1639310 - RNA, 19 nt, Homo sapiens
  misc_RNA (1)...(19): siRNA sense strand
gcuagugucuuggcaaaug

SEQ ID NO: 1639311 - RNA, 19 nt, Homo sapiens
  misc_RNA (1)...(19): siRNA sense strand
gcacuugaaagauguaguu

SEQ ID NO: 1639312 - RNA, 19 nt, Homo sapiens
  misc_RNA (1)...(19): siRNA sense strand
aaaggacauucguggcuua

SEQ ID NO: 1639313 - RNA, 19 nt, Homo sapiens
  misc_RNA (1)...(19): siRNA sense strand
gagcacuucuggccuuaga

SEQ ID NO: 1639314 - RNA, 19 nt, Homo sapiens
  misc_RNA (1)...(19): siRNA sense strand
ucaauuggccuuaaagaau

SEQ ID NO: 1639315 - RNA, 19 nt, Homo sapiens
  misc_RNA (1)...(19): siRNA sense strand
agacaaccauaaaguguga

SEQ ID NO: 1639316 - RNA, 19 nt, Homo sapiens
  misc_RNA (1)...(19): siRNA sense strand
gauguaguuuguuagaaga

SEQ ID NO: 1639317 - RNA, 19 nt, Homo sapiens
  misc_RNA (1)...(19): siRNA sense strand
cugagaagguuaaauuaug

SEQ ID NO: 1639318 - RNA, 19 nt, Homo sapiens
  misc_RNA (1)...(19): siRNA sense strand
gguacgagaugacaagaca

SEQ ID NO: 1639319 - RNA, 19 nt, Homo sapiens
  misc_RNA (1)...(19): siRNA sense strand
ugacgugucugauggugaa

SEQ ID NO: 1639320 - RNA, 19 nt, Homo sapiens
  misc_RNA (1)...(19): siRNA sense strand
gcaguuagaagaaacacaa

SEQ ID NO: 1639321 - RNA, 19 nt, Homo sapiens
  misc_RNA (1)...(19): siRNA sense strand
guaauugagcuccaagaaa

SEQ ID NO: 1639322 - RNA, 19 nt, Homo sapiens
  misc_RNA (1)...(19): siRNA sense strand
gaagaaauugcugaacuga

SEQ ID NO: 1639323 - RNA, 19 nt, Homo sapiens
  misc_RNA (1)...(19): siRNA sense strand
caaagaagaaaggcauuaa

SEQ ID NO: 1639324 - RNA, 19 nt, Homo sapiens
  misc_RNA (1)...(19): siRNA sense strand
gaugacaagacaaccauaa

SEQ ID NO: 1639325 - RNA, 19 nt, Homo sapiens
  misc_RNA (1)...(19): siRNA sense strand
gagagagacucaagaaacg

SEQ ID NO: 1639326 - RNA, 19 nt, Homo sapiens
  misc_RNA (1)...(19): siRNA sense strand
gguacaaacucuuaaugag

SEQ ID NO: 1639327 - RNA, 19 nt, Homo sapiens
  misc_RNA (1)...(19): siRNA sense strand
gaagaccuugcuaaaguaa

SEQ ID NO: 1639328 - RNA, 19 nt, Homo sapiens
  misc_RNA (1)...(19): siRNA sense strand
aggaagaccuugcuaaagu

SEQ ID NO: 1639329 - RNA, 19 nt, Homo sapiens
  misc_RNA (1)...(19): siRNA sense strand
caugagcggucucuuagga

SEQ ID NO: 1639330 - RNA, 19 nt, Homo sapiens
  misc_RNA (1)...(19): siRNA sense strand
ggaagaagaaauugcugaa

SEQ ID NO: 1639331 - RNA, 19 nt, Homo sapiens
  misc_RNA (1)...(19): siRNA sense strand
uggacaaacuggcaaagaa

SEQ ID NO: 1639332 - RNA, 19 nt, Homo sapiens
  misc_RNA (1)...(19): siRNA sense strand
ccaaagaagaaaggcauua

SEQ ID NO: 1639333 - RNA, 19 nt, Homo sapiens
  misc_RNA (1)...(19): siRNA sense strand
ggaacagagccaaaugaaa

SEQ ID NO: 1639334 - RNA, 19 nt, Homo sapiens
  misc_RNA (1)...(19): siRNA sense strand
agaccuugcuaaaguaauu

SEQ ID NO: 1639335 - RNA, 19 nt, Homo sapiens
  misc_RNA (1)...(19): siRNA sense strand
gaacugaaagcagaaagga

SEQ ID NO: 1639336 - RNA, 19 nt, Homo sapiens
  misc_RNA (1)...(19): siRNA sense strand
gcagggaacagcuccuuga

SEQ ID NO: 1639337 - RNA, 19 nt, Homo sapiens
  misc_RNA (1)...(19): siRNA sense strand
uaaaagacgugcuuguuug

SEQ ID NO: 1639338 - RNA, 19 nt, Homo sapiens
  misc_RNA (1)...(19): siRNA sense strand
gcaaauaaagauucuaugc

SEQ ID NO: 1639339 - RNA, 19 nt, Homo sapiens
  misc_RNA (1)...(19): siRNA sense strand
cuugaaagauguaguuugu

SEQ ID NO: 1639340 - RNA, 19 nt, Homo sapiens
  misc_RNA (1)...(19): siRNA sense strand
acaccaggcugcuguuaga

SEQ ID NO: 1639341 - RNA, 19 nt, Homo sapiens
  misc_RNA (1)...(19): siRNA sense strand
agagagcgauuacgaguag

SEQ ID NO: 1639342 - RNA, 19 nt, Homo sapiens
  misc_RNA (1)...(19): siRNA sense strand
caagacaaccauaaagugu

SEQ ID NO: 1639343 - RNA, 19 nt, Homo sapiens
  misc_RNA (1)...(19): siRNA sense strand
uagacaaucuuggucguuu

SEQ ID NO: 1639344 - RNA, 19 nt, Homo sapiens
  misc_RNA (1)...(19): siRNA sense strand
aaacacaacacgauaagga

SEQ ID NO: 1639345 - RNA, 19 nt, Homo sapiens
  misc_RNA (1)...(19): siRNA sense strand
ggcuucaacuucaucuuaa

SEQ ID NO: 1639346 - RNA, 19 nt, Homo sapiens
  misc_RNA (1)...(19): siRNA sense strand
gagagacacggcaacauug

SEQ ID NO: 1639347 - RNA, 19 nt, Homo sapiens
  misc_RNA (1)...(19): siRNA sense strand
caagaaaucauaaguaagc

SEQ ID NO: 1639348 - RNA, 19 nt, Homo sapiens
  misc_RNA (1)...(19): siRNA sense strand
caagaaacgcuggccuuaa

SEQ ID NO: 1639349 - RNA, 19 nt, Homo sapiens
  misc_RNA (1)...(19): siRNA sense strand
guuaaauuaugaccggaaa

SEQ ID NO: 1639350 - RNA, 19 nt, Homo sapiens
  misc_RNA (1)...(19): siRNA sense strand
acuaagaggugcuucacuu

SEQ ID NO: 1639351 - RNA, 19 nt, Homo sapiens
  misc_RNA (1)...(19): siRNA sense strand
cagcuuguccuaaacauug

SEQ ID NO: 1639352 - RNA, 19 nt, Homo sapiens
  misc_RNA (1)...(19): siRNA sense strand
cgaagaacauaauaaacgu

SEQ ID NO: 1639353 - RNA, 19 nt, Homo sapiens
  misc_RNA (1)...(19): siRNA sense strand
cgaggaagaccuugcuaaa

SEQ ID NO: 1639354 - RNA, 19 nt, Homo sapiens
  misc_RNA (1)...(19): siRNA sense strand
gagcuaaugauucuuaaag

SEQ ID NO: 1639355 - RNA, 19 nt, Homo sapiens
  misc_RNA (1)...(19): siRNA sense strand
gaaagggaagaagaaauug

SEQ ID NO: 1639356 - RNA, 19 nt, Homo sapiens
  misc_RNA (1)...(19): siRNA sense strand
cgagagcccuucgguuaga

SEQ ID NO: 1639357 - RNA, 19 nt, Homo sapiens
  misc_RNA (1)...(19): siRNA sense strand
cagcucaguugaccugcua

SEQ ID NO: 1639358 - RNA, 19 nt, Homo sapiens
  misc_RNA (1)...(19): siRNA sense strand
ugaccucaaugauaaacuu

SEQ ID NO: 1639359 - RNA, 19 nt, Homo sapiens
  misc_RNA (1)...(19): siRNA sense strand
ucaagaaacgcuggccuua

SEQ ID NO: 1639360 - RNA, 19 nt, Homo sapiens
  misc_RNA (1)...(19): siRNA sense strand
uaaaguaauugagcuccaa

SEQ ID NO: 1639361 - RNA, 19 nt, Homo sapiens
  misc_RNA (1)...(19): siRNA sense strand
ggaggaagcccggagacaa

SEQ ID NO: 1639362 - RNA, 19 nt, Homo sapiens
  misc_RNA (1)...(19): siRNA sense strand
ggacauucguggcuuagcu

SEQ ID NO: 1639363 - RNA, 19 nt, Homo sapiens
  misc_RNA (1)...(19): siRNA sense strand
gaagguuugaugaagauga

SEQ ID NO: 1639364 - RNA, 19 nt, Homo sapiens
  misc_RNA (1)...(19): siRNA sense strand
ggaaagaacuggaaagaaa

SEQ ID NO: 1639365 - RNA, 19 nt, Homo sapiens
  misc_RNA (1)...(19): siRNA sense strand
gaagaaagguuacgacaga

SEQ ID NO: 1639366 - RNA, 19 nt, Homo sapiens
  misc_RNA (1)...(19): siRNA sense strand
gcacugaaguccuuauuug

SEQ ID NO: 1639367 - RNA, 19 nt, Homo sapiens
  misc_RNA (1)...(19): siRNA sense strand
gagaauggcugcuuuggaa

SEQ ID NO: 1639368 - RNA, 19 nt, Homo sapiens
  misc_RNA (1)...(19): siRNA sense strand
caucaaaucugaagaaaug

SEQ ID NO: 1639369 - RNA, 19 nt, Homo sapiens
  misc_RNA (1)...(19): siRNA sense strand
gaaaagaucucaucaaauc

SEQ ID NO: 1639370 - RNA, 19 nt, Homo sapiens
  misc_RNA (1)...(19): siRNA sense strand
ggaauuaugugccugagaa

SEQ ID NO: 1639371 - RNA, 19 nt, Homo sapiens
  misc_RNA (1)...(19): siRNA sense strand
caauuggccuuaaagaaua

SEQ ID NO: 1639372 - RNA, 19 nt, Homo sapiens
  misc_RNA (1)...(19): siRNA sense strand
ggaagaccuugcuaaagua

SEQ ID NO: 1639373 - RNA, 19 nt, Homo sapiens
  misc_RNA (1)...(19): siRNA sense strand
gaacagagccaaaugaaag

SEQ ID NO: 1639374 - RNA, 19 nt, Homo sapiens
  misc_RNA (1)...(19): siRNA sense strand
gaacgacacucgccuaugg

SEQ ID NO: 1639375 - RNA, 19 nt, Homo sapiens
  misc_RNA (1)...(19): siRNA sense strand
ccacaaagcucuggaugaa

SEQ ID NO: 1639376 - RNA, 19 nt, Homo sapiens
  misc_RNA (1)...(19): siRNA sense strand
caaagaagaugcagaugga

SEQ ID NO: 1639377 - RNA, 19 nt, Homo sapiens
  misc_RNA (1)...(19): siRNA sense strand
gaagaaacacaacacgaua

SEQ ID NO: 1639378 - RNA, 19 nt, Homo sapiens
  misc_RNA (1)...(19): siRNA sense strand
cuaaagaacucaauguaug

SEQ ID NO: 1639379 - RNA, 19 nt, Homo sapiens
  misc_RNA (1)...(19): siRNA sense strand
gagaaucacuacucuugaa

SEQ ID NO: 1639380 - RNA, 19 nt, Homo sapiens
  misc_RNA (1)...(19): siRNA sense strand
ggacauaaaccaugaacaa

SEQ ID NO: 1639381 - RNA, 19 nt, Homo sapiens
  misc_RNA (1)...(19): siRNA sense strand
agaaauugcugaacugaaa

SEQ ID NO: 1639382 - RNA, 19 nt, Homo sapiens
  misc_RNA (1)...(19): siRNA sense strand
gagcaaugaucgagugauu

SEQ ID NO: 1639383 - RNA, 19 nt, Homo sapiens
  misc_RNA (1)...(19): siRNA sense strand
uaauugagcuccaagaaau

SEQ ID NO: 1639384 - RNA, 19 nt, Homo sapiens
  misc_RNA (1)...(19): siRNA sense strand
gaagaaagucagagugaaa

SEQ ID NO: 1639385 - RNA, 19 nt, Homo sapiens
  misc_RNA (1)...(19): siRNA sense strand
gagaagagguacgagauga

SEQ ID NO: 1639386 - RNA, 19 nt, Homo sapiens
  misc_RNA (1)...(19): siRNA sense strand
gcaacgagauguccgugaa

SEQ ID NO: 1639387 - RNA, 19 nt, Homo sapiens
  misc_RNA (1)...(19): siRNA sense strand
cauaaaccaugaacaagaa

SEQ ID NO: 1639388 - RNA, 19 nt, Homo sapiens
  misc_RNA (1)...(19): siRNA sense strand
gggaacagcuccuugaaag

SEQ ID NO: 1639389 - RNA, 19 nt, Homo sapiens
  misc_RNA (1)...(19): siRNA sense strand
caacauugaagaaagguua

SEQ ID NO: 1639390 - RNA, 19 nt, Homo sapiens
  misc_RNA (1)...(19): siRNA sense strand
acaaagagcuaaugauucu

SEQ ID NO: 1639391 - RNA, 19 nt, Homo sapiens
  misc_RNA (1)...(19): siRNA sense strand
ggagaagaaucaagaacug

SEQ ID NO: 1639392 - RNA, 19 nt, Homo sapiens
  misc_RNA (1)...(19): siRNA sense strand
caaagaagcauuaggacaa

SEQ ID NO: 1639393 - RNA, 19 nt, Homo sapiens
  misc_RNA (1)...(19): siRNA sense strand
gaaagucagagugaaauaa

SEQ ID NO: 1639394 - RNA, 19 nt, Homo sapiens
  misc_RNA (1)...(19): siRNA sense strand
gaguagcacuugaaagaug

SEQ ID NO: 1639395 - RNA, 19 nt, Homo sapiens
  misc_RNA (1)...(19): siRNA sense strand
ugaaagcacugaaguccuu

SEQ ID NO: 1639396 - RNA, 19 nt, Homo sapiens
  misc_RNA (1)...(19): siRNA sense strand
caggaugccuugggacuua

SEQ ID NO: 1639397 - RNA, 19 nt, Homo sapiens
  misc_RNA (1)...(19): siRNA sense strand
gagaagaaagucagaguga

SEQ ID NO: 1639398 - RNA, 19 nt, Homo sapiens
  misc_RNA (1)...(19): siRNA sense strand
gugcaugaccucaaugaua

SEQ ID NO: 1639399 - RNA, 19 nt, Homo sapiens
  misc_RNA (1)...(19): siRNA sense strand
gauagaagguuugaugaag

SEQ ID NO: 1639400 - RNA, 19 nt, Homo sapiens
  misc_RNA (1)...(19): siRNA sense strand
ggaaagagaauuuaacaac

SEQ ID NO: 1639401 - RNA, 19 nt, Homo sapiens
  misc_RNA (1)...(19): siRNA sense strand
ugcaugaccucaaugauaa

SEQ ID NO: 1639402 - RNA, 19 nt, Homo sapiens
  misc_RNA (1)...(19): siRNA sense strand
cugaagaaaugaacacaaa

SEQ ID NO: 1639403 - RNA, 19 nt, Homo sapiens
  misc_RNA (1)...(19): siRNA sense strand
gcaaacaaucuuauagaga

SEQ ID NO: 1639404 - RNA, 19 nt, Homo sapiens
  misc_RNA (1)...(19): siRNA sense strand
ucgcagcacuuacuaaaga

SEQ ID NO: 1639405 - RNA, 19 nt, Homo sapiens
  misc_RNA (1)...(19): siRNA sense strand
ggcauuaaguccuccauug

SEQ ID NO: 1639406 - RNA, 19 nt, Homo sapiens
  misc_RNA (1)...(19): siRNA sense strand
ugaaagggaagaagaaauu

SEQ ID NO: 1639407 - RNA, 19 nt, Homo sapiens
  misc_RNA (1)...(19): siRNA sense strand
gaacgugcccagcaagcua

SEQ ID NO: 1639408 - RNA, 19 nt, Homo sapiens
  misc_RNA (1)...(19): siRNA sense strand
gaagagagaaucacuacuc

SEQ ID NO: 1639409 - RNA, 19 nt, Homo sapiens
  misc_RNA (1)...(19): siRNA sense strand
acacaaagagcuaaugauu

SEQ ID NO: 1639410 - RNA, 19 nt, Homo sapiens
  misc_RNA (1)...(19): siRNA sense strand
gcuagugucuuggcaaaug

SEQ ID NO: 1639411 - RNA, 19 nt, Homo sapiens
  misc_RNA (1)...(19): siRNA sense strand
gcacuugaaagauguaguu

SEQ ID NO: 1639412 - RNA, 19 nt, Homo sapiens
  misc_RNA (1)...(19): siRNA sense strand
aaaggacauucguggcuua

SEQ ID NO: 1639413 - RNA, 19 nt, Homo sapiens
  misc_RNA (1)...(19): siRNA sense strand
gagcacuucuggccuuaga

SEQ ID NO: 1639414 - RNA, 19 nt, Homo sapiens
  misc_RNA (1)...(19): siRNA sense strand
ucaauuggccuuaaagaau

SEQ ID NO: 1639415 - RNA, 19 nt, Homo sapiens
  misc_RNA (1)...(19): siRNA sense strand
agacaaccauaaaguguga

SEQ ID NO: 1639416 - RNA, 19 nt, Homo sapiens
  misc_RNA (1)...(19): siRNA sense strand
gauguaguuuguuagaaga

SEQ ID NO: 1639417 - RNA, 19 nt, Homo sapiens
  misc_RNA (1)...(19): siRNA sense strand
cugagaagguuaaauuaug

SEQ ID NO: 1639418 - RNA, 19 nt, Homo sapiens
  misc_RNA (1)...(19): siRNA sense strand
gguacgagaugacaagaca

SEQ ID NO: 1639419 - RNA, 19 nt, Homo sapiens
  misc_RNA (1)...(19): siRNA sense strand
ugacgugucugauggugaa

SEQ ID NO: 1639420 - RNA, 19 nt, Homo sapiens
  misc_RNA (1)...(19): siRNA sense strand
gcaguuagaagaaacacaa

SEQ ID NO: 1639421 - RNA, 19 nt, Homo sapiens
  misc_RNA (1)...(19): siRNA sense strand
guaauugagcuccaagaaa

SEQ ID NO: 1639422 - RNA, 19 nt, Homo sapiens
  misc_RNA (1)...(19): siRNA sense strand
gaagaaauugcugaacuga

SEQ ID NO: 1639423 - RNA, 19 nt, Homo sapiens
  misc_RNA (1)...(19): siRNA sense strand
caaagaagaaaggcauuaa

SEQ ID NO: 1639424 - RNA, 19 nt, Homo sapiens
  misc_RNA (1)...(19): siRNA sense strand
gaugacaagacaaccauaa

SEQ ID NO: 1639425 - RNA, 19 nt, Homo sapiens
  misc_RNA (1)...(19): siRNA sense strand
gagagagacucaagaaacg

SEQ ID NO: 1639426 - RNA, 19 nt, Homo sapiens
  misc_RNA (1)...(19): siRNA sense strand
gguacaaacucuuaaugag

SEQ ID NO: 1639427 - RNA, 19 nt, Homo sapiens
  misc_RNA (1)...(19): siRNA sense strand
gaagaccuugcuaaaguaa

SEQ ID NO: 1639428 - RNA, 19 nt, Homo sapiens
  misc_RNA (1)...(19): siRNA sense strand
aggaagaccuugcuaaagu

SEQ ID NO: 1639429 - RNA, 19 nt, Homo sapiens
  misc_RNA (1)...(19): siRNA sense strand
caugagcggucucuuagga

SEQ ID NO: 1639430 - RNA, 19 nt, Homo sapiens
  misc_RNA (1)...(19): siRNA sense strand
ggaagaagaaauugcugaa

SEQ ID NO: 1639431 - RNA, 19 nt, Homo sapiens
  misc_RNA (1)...(19): siRNA sense strand
uggacaaacuggcaaagaa

SEQ ID NO: 1639432 - RNA, 19 nt, Homo sapiens
  misc_RNA (1)...(19): siRNA sense strand
ccaaagaagaaaggcauua

SEQ ID NO: 1639433 - RNA, 19 nt, Homo sapiens
  misc_RNA (1)...(19): siRNA sense strand
ggaacagagccaaaugaaa

SEQ ID NO: 1639434 - RNA, 19 nt, Homo sapiens
  misc_RNA (1)...(19): siRNA sense strand
agaccuugcuaaaguaauu

SEQ ID NO: 1639435 - RNA, 19 nt, Homo sapiens
  misc_RNA (1)...(19): siRNA sense strand
gaacugaaagcagaaagga

SEQ ID NO: 1639436 - RNA, 19 nt, Homo sapiens
  misc_RNA (1)...(19): siRNA sense strand
gcagggaacagcuccuuga

SEQ ID NO: 1639437 - RNA, 19 nt, Homo sapiens
  misc_RNA (1)...(19): siRNA sense strand
uaaaagacgugcuuguuug

SEQ ID NO: 1639438 - RNA, 19 nt, Homo sapiens
  misc_RNA (1)...(19): siRNA sense strand
gcaaauaaagauucuaugc

SEQ ID NO: 1639439 - RNA, 19 nt, Homo sapiens
  misc_RNA (1)...(19): siRNA sense strand
cuugaaagauguaguuugu

SEQ ID NO: 1639440 - RNA, 19 nt, Homo sapiens
  misc_RNA (1)...(19): siRNA sense strand
acaccaggcugcuguuaga

SEQ ID NO: 1639441 - RNA, 19 nt, Homo sapiens
  misc_RNA (1)...(19): siRNA sense strand
agagagcgauuacgaguag

SEQ ID NO: 1639442 - RNA, 19 nt, Homo sapiens
  misc_RNA (1)...(19): siRNA sense strand
caagacaaccauaaagugu

SEQ ID NO: 1639443 - RNA, 19 nt, Homo sapiens
  misc_RNA (1)...(19): siRNA sense strand
uagacaaucuuggucguuu

SEQ ID NO: 1639444 - RNA, 19 nt, Homo sapiens
  misc_RNA (1)...(19): siRNA sense strand
aaacacaacacgauaagga

SEQ ID NO: 1639445 - RNA, 19 nt, Homo sapiens
  misc_RNA (1)...(19): siRNA sense strand
ggcuucaacuucaucuuaa

SEQ ID NO: 1639446 - RNA, 19 nt, Homo sapiens
  misc_RNA (1)...(19): siRNA sense strand
gagagacacggcaacauug

SEQ ID NO: 1639447 - RNA, 19 nt, Homo sapiens
  misc_RNA (1)...(19): siRNA sense strand
caagaaaucauaaguaagc

SEQ ID NO: 1639448 - RNA, 19 nt, Homo sapiens
  misc_RNA (1)...(19): siRNA sense strand
caagaaacgcuggccuuaa

SEQ ID NO: 1639449 - RNA, 19 nt, Homo sapiens
  misc_RNA (1)...(19): siRNA sense strand
guuaaauuaugaccggaaa

SEQ ID NO: 1639450 - RNA, 19 nt, Homo sapiens
  misc_RNA (1)...(19): siRNA sense strand
acuaagaggugcuucacuu

SEQ ID NO: 1639451 - RNA, 19 nt, Homo sapiens
  misc_RNA (1)...(19): siRNA sense strand
cagcuuguccuaaacauug

SEQ ID NO: 1639452 - RNA, 19 nt, Homo sapiens
  misc_RNA (1)...(19): siRNA sense strand
cgaagaacauaauaaacgu

SEQ ID NO: 1639453 - RNA, 19 nt, Homo sapiens
  misc_RNA (1)...(19): siRNA sense strand
cgaggaagaccuugcuaaa

SEQ ID NO: 1639454 - RNA, 19 nt, Homo sapiens
  misc_RNA (1)...(19): siRNA sense strand
gagcuaaugauucuuaaag

SEQ ID NO: 1639455 - RNA, 19 nt, Homo sapiens
  misc_RNA (1)...(19): siRNA sense strand
gaaagggaagaagaaauug

SEQ ID NO: 1639456 - RNA, 19 nt, Homo sapiens
  misc_RNA (1)...(19): siRNA sense strand
cgagagcccuucgguuaga

SEQ ID NO: 1639457 - RNA, 19 nt, Homo sapiens
  misc_RNA (1)...(19): siRNA sense strand
cagcucaguugaccugcua

SEQ ID NO: 1639458 - RNA, 19 nt, Homo sapiens
  misc_RNA (1)...(19): siRNA sense strand
ugaccucaaugauaaacuu

SEQ ID NO: 1639459 - RNA, 19 nt, Homo sapiens
  misc_RNA (1)...(19): siRNA sense strand
ucaagaaacgcuggccuua

SEQ ID NO: 1639460 - RNA, 19 nt, Homo sapiens
  misc_RNA (1)...(19): siRNA sense strand
uaaaguaauugagcuccaa

SEQ ID NO: 1639461 - RNA, 19 nt, Homo sapiens
  misc_RNA (1)...(19): siRNA sense strand
ggaggaagcccggagacaa

SEQ ID NO: 1639462 - RNA, 19 nt, Homo sapiens
  misc_RNA (1)...(19): siRNA sense strand
ggacauucguggcuuagcu

SEQ ID NO: 1639463 - RNA, 19 nt, Homo sapiens
  misc_RNA (1)...(19): siRNA sense strand
gaagguuugaugaagauga

SEQ ID NO: 1639464 - RNA, 19 nt, Homo sapiens
  misc_RNA (1)...(19): siRNA sense strand
ucacggccaucgccaagua

SEQ ID NO: 1639465 - RNA, 19 nt, Homo sapiens
  misc_RNA (1)...(19): siRNA sense strand
caacugauuucuaccugau

SEQ ID NO: 1639466 - RNA, 19 nt, Homo sapiens
  misc_RNA (1)...(19): siRNA sense strand
uuaacgacguggccaaauu

SEQ ID NO: 1639467 - RNA, 19 nt, Homo sapiens
  misc_RNA (1)...(19): siRNA sense strand
ccaugcagcugaaugacaa

SEQ ID NO: 1639468 - RNA, 19 nt, Homo sapiens
  misc_RNA (1)...(19): siRNA sense strand
guguuuggcuucuuugcua

SEQ ID NO: 1639469 - RNA, 19 nt, Homo sapiens
  misc_RNA (1)...(19): siRNA sense strand
gcccucaucuacuuugcua

SEQ ID NO: 1639470 - RNA, 19 nt, Homo sapiens
  misc_RNA (1)...(19): siRNA sense strand
caagacagaagaagagaau

SEQ ID NO: 1639471 - RNA, 19 nt, Homo sapiens
  misc_RNA (1)...(19): siRNA sense strand
gaccacagcccacaagaca

SEQ ID NO: 1639472 - RNA, 19 nt, Homo sapiens
  misc_RNA (1)...(19): siRNA sense strand
ccacagcccacaagacaga

SEQ ID NO: 1639473 - RNA, 19 nt, Homo sapiens
  misc_RNA (1)...(19): siRNA sense strand
gauuucuaccugaucuuua

SEQ ID NO: 1639474 - RNA, 19 nt, Homo sapiens
  misc_RNA (1)...(19): siRNA sense strand
cgacucggacucugacuga

SEQ ID NO: 1639475 - RNA, 19 nt, Homo sapiens
  misc_RNA (1)...(19): siRNA sense strand
ggccuuguacuuccucuuu

SEQ ID NO: 1639476 - RNA, 19 nt, Homo sapiens
  misc_RNA (1)...(19): siRNA sense strand
ccacaagacagaagaagag

SEQ ID NO: 1639477 - RNA, 19 nt, Homo sapiens
  misc_RNA (1)...(19): siRNA sense strand
caaagccgcugggguguuu

SEQ ID NO: 1639478 - RNA, 19 nt, Homo sapiens
  misc_RNA (1)...(19): siRNA sense strand
uaacgacguggccaaauuc

SEQ ID NO: 1639479 - RNA, 19 nt, Homo sapiens
  misc_RNA (1)...(19): siRNA sense strand
ggccaaauuccucaaacaa

SEQ ID NO: 1639480 - RNA, 19 nt, Homo sapiens
  misc_RNA (1)...(19): siRNA sense strand
agacagaagaagagaauuc

SEQ ID NO: 1639481 - RNA, 19 nt, Homo sapiens
  misc_RNA (1)...(19): siRNA sense strand
ggcuugugcuggcccauga

SEQ ID NO: 1639482 - RNA, 19 nt, Homo sapiens
  misc_RNA (1)...(19): siRNA sense strand
guuugcaacugauuucuac

SEQ ID NO: 1639483 - RNA, 19 nt, Homo sapiens
  misc_RNA (1)...(19): siRNA sense strand
ggucucucauucaucacuu

SEQ ID NO: 1639484 - RNA, 19 nt, Homo sapiens
  misc_RNA (1)...(19): siRNA sense strand
gccuuguacuuccucuuug

SEQ ID NO: 1639485 - RNA, 19 nt, Homo sapiens
  misc_RNA (1)...(19): siRNA sense strand
gccaaauuccucaaacaag

SEQ ID NO: 1639486 - RNA, 19 nt, Homo sapiens
  misc_RNA (1)...(19): siRNA sense strand
ccaucguguuugcaacuga

SEQ ID NO: 1639487 - RNA, 19 nt, Homo sapiens
  misc_RNA (1)...(19): siRNA sense strand
caucguguuugcaacugau

SEQ ID NO: 1639488 - RNA, 19 nt, Homo sapiens
  misc_RNA (1)...(19): siRNA sense strand
uggccaaauuccucaaaca

SEQ ID NO: 1639489 - RNA, 19 nt, Homo sapiens
  misc_RNA (1)...(19): siRNA sense strand
gcuaccaucguguuugcaa

SEQ ID NO: 1639490 - RNA, 19 nt, Homo sapiens
  misc_RNA (1)...(19): siRNA sense strand
ugauuucuaccugaucuuu

SEQ ID NO: 1639491 - RNA, 19 nt, Homo sapiens
  misc_RNA (1)...(19): siRNA sense strand
ucacggccaucgccaagua

SEQ ID NO: 1639492 - RNA, 19 nt, Homo sapiens
  misc_RNA (1)...(19): siRNA sense strand
caacugauuucuaccugau

SEQ ID NO: 1639493 - RNA, 19 nt, Homo sapiens
  misc_RNA (1)...(19): siRNA sense strand
uuaacgacguggccaaauu

SEQ ID NO: 1639494 - RNA, 19 nt, Homo sapiens
  misc_RNA (1)...(19): siRNA sense strand
ccaugcagcugaaugacaa

SEQ ID NO: 1639495 - RNA, 19 nt, Homo sapiens
  misc_RNA (1)...(19): siRNA sense strand
guguuuggcuucuuugcua

SEQ ID NO: 1639496 - RNA, 19 nt, Homo sapiens
  misc_RNA (1)...(19): siRNA sense strand
gcccucaucuacuuugcua

SEQ ID NO: 1639497 - RNA, 19 nt, Homo sapiens
  misc_RNA (1)...(19): siRNA sense strand
caagacagaagaagagaau

SEQ ID NO: 1639498 - RNA, 19 nt, Homo sapiens
  misc_RNA (1)...(19): siRNA sense strand
gaccacagcccacaagaca

SEQ ID NO: 1639499 - RNA, 19 nt, Homo sapiens
  misc_RNA (1)...(19): siRNA sense strand
ccacagcccacaagacaga

SEQ ID NO: 1639500 - RNA, 19 nt, Homo sapiens
  misc_RNA (1)...(19): siRNA sense strand
gauuucuaccugaucuuua

SEQ ID NO: 1639501 - RNA, 19 nt, Homo sapiens
  misc_RNA (1)...(19): siRNA sense strand
cgacucggacucugacuga

SEQ ID NO: 1639502 - RNA, 19 nt, Homo sapiens
  misc_RNA (1)...(19): siRNA sense strand
ggccuuguacuuccucuuu

SEQ ID NO: 1639503 - RNA, 19 nt, Homo sapiens
  misc_RNA (1)...(19): siRNA sense strand
ccacaagacagaagaagag

SEQ ID NO: 1639504 - RNA, 19 nt, Homo sapiens
  misc_RNA (1)...(19): siRNA sense strand
caaagccgcugggguguuu

SEQ ID NO: 1639505 - RNA, 19 nt, Homo sapiens
  misc_RNA (1)...(19): siRNA sense strand
uaacgacguggccaaauuc

SEQ ID NO: 1639506 - RNA, 19 nt, Homo sapiens
  misc_RNA (1)...(19): siRNA sense strand
ggccaaauuccucaaacaa

SEQ ID NO: 1639507 - RNA, 19 nt, Homo sapiens
  misc_RNA (1)...(19): siRNA sense strand
agacagaagaagagaauuc

SEQ ID NO: 1639508 - RNA, 19 nt, Homo sapiens
  misc_RNA (1)...(19): siRNA sense strand
ggcuugugcuggcccauga

SEQ ID NO: 1639509 - RNA, 19 nt, Homo sapiens
  misc_RNA (1)...(19): siRNA sense strand
guuugcaacugauuucuac

SEQ ID NO: 1639510 - RNA, 19 nt, Homo sapiens
  misc_RNA (1)...(19): siRNA sense strand
ggucucucauucaucacuu

SEQ ID NO: 1639511 - RNA, 19 nt, Homo sapiens
  misc_RNA (1)...(19): siRNA sense strand
gccuuguacuuccucuuug

SEQ ID NO: 1639512 - RNA, 19 nt, Homo sapiens
  misc_RNA (1)...(19): siRNA sense strand
gccaaauuccucaaacaag

SEQ ID NO: 1639513 - RNA, 19 nt, Homo sapiens
  misc_RNA (1)...(19): siRNA sense strand
ccaucguguuugcaacuga

SEQ ID NO: 1639514 - RNA, 19 nt, Homo sapiens
  misc_RNA (1)...(19): siRNA sense strand
caucguguuugcaacugau

SEQ ID NO: 1639515 - RNA, 19 nt, Homo sapiens
  misc_RNA (1)...(19): siRNA sense strand
uggccaaauuccucaaaca

SEQ ID NO: 1639516 - RNA, 19 nt, Homo sapiens
  misc_RNA (1)...(19): siRNA sense strand
gcuaccaucguguuugcaa

SEQ ID NO: 1639517 - RNA, 19 nt, Homo sapiens
  misc_RNA (1)...(19): siRNA sense strand
ugauuucuaccugaucuuu

SEQ ID NO: 1639518 - RNA, 19 nt, Homo sapiens
  misc_RNA (1)...(19): siRNA sense strand
ucacggccaucgccaagua

SEQ ID NO: 1639519 - RNA, 19 nt, Homo sapiens
  misc_RNA (1)...(19): siRNA sense strand
caacugauuucuaccugau

SEQ ID NO: 1639520 - RNA, 19 nt, Homo sapiens
  misc_RNA (1)...(19): siRNA sense strand
uuaacgacguggccaaauu

SEQ ID NO: 1639521 - RNA, 19 nt, Homo sapiens
  misc_RNA (1)...(19): siRNA sense strand
ccaugcagcugaaugacaa

SEQ ID NO: 1639522 - RNA, 19 nt, Homo sapiens
  misc_RNA (1)...(19): siRNA sense strand
guguuuggcuucuuugcua

SEQ ID NO: 1639523 - RNA, 19 nt, Homo sapiens
  misc_RNA (1)...(19): siRNA sense strand
gcccucaucuacuuugcua

SEQ ID NO: 1639524 - RNA, 19 nt, Homo sapiens
  misc_RNA (1)...(19): siRNA sense strand
caagacagaagaagagaau

SEQ ID NO: 1639525 - RNA, 19 nt, Homo sapiens
  misc_RNA (1)...(19): siRNA sense strand
gaccacagcccacaagaca

SEQ ID NO: 1639526 - RNA, 19 nt, Homo sapiens
  misc_RNA (1)...(19): siRNA sense strand
ccacagcccacaagacaga

SEQ ID NO: 1639527 - RNA, 19 nt, Homo sapiens
  misc_RNA (1)...(19): siRNA sense strand
gauuucuaccugaucuuua

SEQ ID NO: 1639528 - RNA, 19 nt, Homo sapiens
  misc_RNA (1)...(19): siRNA sense strand
cgacucggacucugacuga

SEQ ID NO: 1639529 - RNA, 19 nt, Homo sapiens
  misc_RNA (1)...(19): siRNA sense strand
ggccuuguacuuccucuuu

SEQ ID NO: 1639530 - RNA, 19 nt, Homo sapiens
  misc_RNA (1)...(19): siRNA sense strand
ccacaagacagaagaagag

SEQ ID NO: 1639531 - RNA, 19 nt, Homo sapiens
  misc_RNA (1)...(19): siRNA sense strand
caaagccgcugggguguuu

SEQ ID NO: 1639532 - RNA, 19 nt, Homo sapiens
  misc_RNA (1)...(19): siRNA sense strand
uaacgacguggccaaauuc

SEQ ID NO: 1639533 - RNA, 19 nt, Homo sapiens
  misc_RNA (1)...(19): siRNA sense strand
ggccaaauuccucaaacaa

SEQ ID NO: 1639534 - RNA, 19 nt, Homo sapiens
  misc_RNA (1)...(19): siRNA sense strand
agacagaagaagagaauuc

SEQ ID NO: 1639535 - RNA, 19 nt, Homo sapiens
  misc_RNA (1)...(19): siRNA sense strand
ggcuugugcuggcccauga

SEQ ID NO: 1639536 - RNA, 19 nt, Homo sapiens
  misc_RNA (1)...(19): siRNA sense strand
guuugcaacugauuucuac

SEQ ID NO: 1639537 - RNA, 19 nt, Homo sapiens
  misc_RNA (1)...(19): siRNA sense strand
ggucucucauucaucacuu

SEQ ID NO: 1639538 - RNA, 19 nt, Homo sapiens
  misc_RNA (1)...(19): siRNA sense strand
gccuuguacuuccucuuug

SEQ ID NO: 1639539 - RNA, 19 nt, Homo sapiens
  misc_RNA (1)...(19): siRNA sense strand
gccaaauuccucaaacaag

SEQ ID NO: 1639540 - RNA, 19 nt, Homo sapiens
  misc_RNA (1)...(19): siRNA sense strand
ccaucguguuugcaacuga

SEQ ID NO: 1639541 - RNA, 19 nt, Homo sapiens
  misc_RNA (1)...(19): siRNA sense strand
caucguguuugcaacugau

SEQ ID NO: 1639542 - RNA, 19 nt, Homo sapiens
  misc_RNA (1)...(19): siRNA sense strand
uggccaaauuccucaaaca

SEQ ID NO: 1639543 - RNA, 19 nt, Homo sapiens
  misc_RNA (1)...(19): siRNA sense strand
gcuaccaucguguuugcaa

SEQ ID NO: 1639544 - RNA, 19 nt, Homo sapiens
  misc_RNA (1)...(19): siRNA sense strand
ugauuucuaccugaucuuu

SEQ ID NO: 1639545 - RNA, 19 nt, Homo sapiens
  misc_RNA (1)...(19): siRNA sense strand
ucacggccaucgccaagua

SEQ ID NO: 1639546 - RNA, 19 nt, Homo sapiens
  misc_RNA (1)...(19): siRNA sense strand
caacugauuucuaccugau

SEQ ID NO: 1639547 - RNA, 19 nt, Homo sapiens
  misc_RNA (1)...(19): siRNA sense strand
uuaacgacguggccaaauu

SEQ ID NO: 1639548 - RNA, 19 nt, Homo sapiens
  misc_RNA (1)...(19): siRNA sense strand
guguuuggcuucuuugcua

SEQ ID NO: 1639549 - RNA, 19 nt, Homo sapiens
  misc_RNA (1)...(19): siRNA sense strand
gcccucaucuacuuugcua

SEQ ID NO: 1639550 - RNA, 19 nt, Homo sapiens
  misc_RNA (1)...(19): siRNA sense strand
caagacagaagaagagaau

SEQ ID NO: 1639551 - RNA, 19 nt, Homo sapiens
  misc_RNA (1)...(19): siRNA sense strand
gaccacagcccacaagaca

SEQ ID NO: 1639552 - RNA, 19 nt, Homo sapiens
  misc_RNA (1)...(19): siRNA sense strand
ccacagcccacaagacaga

SEQ ID NO: 1639553 - RNA, 19 nt, Homo sapiens
  misc_RNA (1)...(19): siRNA sense strand
gauuucuaccugaucuuua

SEQ ID NO: 1639554 - RNA, 19 nt, Homo sapiens
  misc_RNA (1)...(19): siRNA sense strand
cgacucggacucugacuga

SEQ ID NO: 1639555 - RNA, 19 nt, Homo sapiens
  misc_RNA (1)...(19): siRNA sense strand
caaagccgcugggguguuu

SEQ ID NO: 1639556 - RNA, 19 nt, Homo sapiens
  misc_RNA (1)...(19): siRNA sense strand
ccacaagacagaagaagag

SEQ ID NO: 1639557 - RNA, 19 nt, Homo sapiens
  misc_RNA (1)...(19): siRNA sense strand
uaacgacguggccaaauuc

SEQ ID NO: 1639558 - RNA, 19 nt, Homo sapiens
  misc_RNA (1)...(19): siRNA sense strand
ggccaaauuccucaaacaa

SEQ ID NO: 1639559 - RNA, 19 nt, Homo sapiens
  misc_RNA (1)...(19): siRNA sense strand
agacagaagaagagaauuc

SEQ ID NO: 1639560 - RNA, 19 nt, Homo sapiens
  misc_RNA (1)...(19): siRNA sense strand
ggcuugugcuggcccauga

SEQ ID NO: 1639561 - RNA, 19 nt, Homo sapiens
  misc_RNA (1)...(19): siRNA sense strand
guuugcaacugauuucuac

SEQ ID NO: 1639562 - RNA, 19 nt, Homo sapiens
  misc_RNA (1)...(19): siRNA sense strand
ccaucguguuugcaacuga

SEQ ID NO: 1639563 - RNA, 19 nt, Homo sapiens
  misc_RNA (1)...(19): siRNA sense strand
gccaaauuccucaaacaag

SEQ ID NO: 1639564 - RNA, 19 nt, Homo sapiens
  misc_RNA (1)...(19): siRNA sense strand
caucguguuugcaacugau

SEQ ID NO: 1639565 - RNA, 19 nt, Homo sapiens
  misc_RNA (1)...(19): siRNA sense strand
uggccaaauuccucaaaca

SEQ ID NO: 1639566 - RNA, 19 nt, Homo sapiens
  misc_RNA (1)...(19): siRNA sense strand
gcuaccaucguguuugcaa

SEQ ID NO: 1639567 - RNA, 19 nt, Homo sapiens
  misc_RNA (1)...(19): siRNA sense strand
ugauuucuaccugaucuuu

SEQ ID NO: 1639568 - RNA, 19 nt, Homo sapiens
  misc_RNA (1)...(19): siRNA sense strand
ucacggccaucgccaagua

SEQ ID NO: 1639569 - RNA, 19 nt, Homo sapiens
  misc_RNA (1)...(19): siRNA sense strand
caacugauuucuaccugau

SEQ ID NO: 1639570 - RNA, 19 nt, Homo sapiens
  misc_RNA (1)...(19): siRNA sense strand
uuaacgacguggccaaauu

SEQ ID NO: 1639571 - RNA, 19 nt, Homo sapiens
  misc_RNA (1)...(19): siRNA sense strand
ccaugcagcugaaugacaa

SEQ ID NO: 1639572 - RNA, 19 nt, Homo sapiens
  misc_RNA (1)...(19): siRNA sense strand
guguuuggcuucuuugcua

SEQ ID NO: 1639573 - RNA, 19 nt, Homo sapiens
  misc_RNA (1)...(19): siRNA sense strand
gcccucaucuacuuugcua

SEQ ID NO: 1639574 - RNA, 19 nt, Homo sapiens
  misc_RNA (1)...(19): siRNA sense strand
caagacagaagaagagaau

SEQ ID NO: 1639575 - RNA, 19 nt, Homo sapiens
  misc_RNA (1)...(19): siRNA sense strand
gaccacagcccacaagaca

SEQ ID NO: 1639576 - RNA, 19 nt, Homo sapiens
  misc_RNA (1)...(19): siRNA sense strand
ccacagcccacaagacaga

SEQ ID NO: 1639577 - RNA, 19 nt, Homo sapiens
  misc_RNA (1)...(19): siRNA sense strand
gauuucuaccugaucuuua

SEQ ID NO: 1639578 - RNA, 19 nt, Homo sapiens
  misc_RNA (1)...(19): siRNA sense strand
cgacucggacucugacuga

SEQ ID NO: 1639579 - RNA, 19 nt, Homo sapiens
  misc_RNA (1)...(19): siRNA sense strand
ggccuuguacuuccucuuu

SEQ ID NO: 1639580 - RNA, 19 nt, Homo sapiens
  misc_RNA (1)...(19): siRNA sense strand
ccacaagacagaagaagag

SEQ ID NO: 1639581 - RNA, 19 nt, Homo sapiens
  misc_RNA (1)...(19): siRNA sense strand
caaagccgcugggguguuu

SEQ ID NO: 1639582 - RNA, 19 nt, Homo sapiens
  misc_RNA (1)...(19): siRNA sense strand
uaacgacguggccaaauuc

SEQ ID NO: 1639583 - RNA, 19 nt, Homo sapiens
  misc_RNA (1)...(19): siRNA sense strand
ggccaaauuccucaaacaa

SEQ ID NO: 1639584 - RNA, 19 nt, Homo sapiens
  misc_RNA (1)...(19): siRNA sense strand
agacagaagaagagaauuc

SEQ ID NO: 1639585 - RNA, 19 nt, Homo sapiens
  misc_RNA (1)...(19): siRNA sense strand
ggcuugugcuggcccauga

SEQ ID NO: 1639586 - RNA, 19 nt, Homo sapiens
  misc_RNA (1)...(19): siRNA sense strand
guuugcaacugauuucuac

SEQ ID NO: 1639587 - RNA, 19 nt, Homo sapiens
  misc_RNA (1)...(19): siRNA sense strand
ggucucucauucaucacuu

SEQ ID NO: 1639588 - RNA, 19 nt, Homo sapiens
  misc_RNA (1)...(19): siRNA sense strand
gccuuguacuuccucuuug

SEQ ID NO: 1639589 - RNA, 19 nt, Homo sapiens
  misc_RNA (1)...(19): siRNA sense strand
gccaaauuccucaaacaag

SEQ ID NO: 1639590 - RNA, 19 nt, Homo sapiens
  misc_RNA (1)...(19): siRNA sense strand
ccaucguguuugcaacuga

SEQ ID NO: 1639591 - RNA, 19 nt, Homo sapiens
  misc_RNA (1)...(19): siRNA sense strand
caucguguuugcaacugau

SEQ ID NO: 1639592 - RNA, 19 nt, Homo sapiens
  misc_RNA (1)...(19): siRNA sense strand
uggccaaauuccucaaaca

SEQ ID NO: 1639593 - RNA, 19 nt, Homo sapiens
  misc_RNA (1)...(19): siRNA sense strand
gcuaccaucguguuugcaa

SEQ ID NO: 1639594 - RNA, 19 nt, Homo sapiens
  misc_RNA (1)...(19): siRNA sense strand
ugauuucuaccugaucuuu

SEQ ID NO: 1639595 - RNA, 19 nt, Homo sapiens
  misc_RNA (1)...(19): siRNA sense strand
ucacggccaucgccaagua

SEQ ID NO: 1639596 - RNA, 19 nt, Homo sapiens
  misc_RNA (1)...(19): siRNA sense strand
caacugauuucuaccugau

SEQ ID NO: 1639597 - RNA, 19 nt, Homo sapiens
  misc_RNA (1)...(19): siRNA sense strand
uuaacgacguggccaaauu

SEQ ID NO: 1639598 - RNA, 19 nt, Homo sapiens
  misc_RNA (1)...(19): siRNA sense strand
ccaugcagcugaaugacaa

SEQ ID NO: 1639599 - RNA, 19 nt, Homo sapiens
  misc_RNA (1)...(19): siRNA sense strand
guguuuggcuucuuugcua

SEQ ID NO: 1639600 - RNA, 19 nt, Homo sapiens
  misc_RNA (1)...(19): siRNA sense strand
gcccucaucuacuuugcua

SEQ ID NO: 1639601 - RNA, 19 nt, Homo sapiens
  misc_RNA (1)...(19): siRNA sense strand
caagacagaagaagagaau

SEQ ID NO: 1639602 - RNA, 19 nt, Homo sapiens
  misc_RNA (1)...(19): siRNA sense strand
gaccacagcccacaagaca

SEQ ID NO: 1639603 - RNA, 19 nt, Homo sapiens
  misc_RNA (1)...(19): siRNA sense strand
ccacagcccacaagacaga

SEQ ID NO: 1639604 - RNA, 19 nt, Homo sapiens
  misc_RNA (1)...(19): siRNA sense strand
gauuucuaccugaucuuua

SEQ ID NO: 1639605 - RNA, 19 nt, Homo sapiens
  misc_RNA (1)...(19): siRNA sense strand
cgacucggacucugacuga

SEQ ID NO: 1639606 - RNA, 19 nt, Homo sapiens
  misc_RNA (1)...(19): siRNA sense strand
ggccuuguacuuccucuuu

SEQ ID NO: 1639607 - RNA, 19 nt, Homo sapiens
  misc_RNA (1)...(19): siRNA sense strand
ccacaagacagaagaagag

SEQ ID NO: 1639608 - RNA, 19 nt, Homo sapiens
  misc_RNA (1)...(19): siRNA sense strand
caaagccgcugggguguuu

SEQ ID NO: 1639609 - RNA, 19 nt, Homo sapiens
  misc_RNA (1)...(19): siRNA sense strand
uaacgacguggccaaauuc

SEQ ID NO: 1639610 - RNA, 19 nt, Homo sapiens
  misc_RNA (1)...(19): siRNA sense strand
ggccaaauuccucaaacaa

SEQ ID NO: 1639611 - RNA, 19 nt, Homo sapiens
  misc_RNA (1)...(19): siRNA sense strand
agacagaagaagagaauuc

SEQ ID NO: 1639612 - RNA, 19 nt, Homo sapiens
  misc_RNA (1)...(19): siRNA sense strand
ggcuugugcuggcccauga

SEQ ID NO: 1639613 - RNA, 19 nt, Homo sapiens
  misc_RNA (1)...(19): siRNA sense strand
guuugcaacugauuucuac

SEQ ID NO: 1639614 - RNA, 19 nt, Homo sapiens
  misc_RNA (1)...(19): siRNA sense strand
ggucucucauucaucacuu

SEQ ID NO: 1639615 - RNA, 19 nt, Homo sapiens
  misc_RNA (1)...(19): siRNA sense strand
gccuuguacuuccucuuug

SEQ ID NO: 1639616 - RNA, 19 nt, Homo sapiens
  misc_RNA (1)...(19): siRNA sense strand
gccaaauuccucaaacaag

SEQ ID NO: 1639617 - RNA, 19 nt, Homo sapiens
  misc_RNA (1)...(19): siRNA sense strand
ccaucguguuugcaacuga

SEQ ID NO: 1639618 - RNA, 19 nt, Homo sapiens
  misc_RNA (1)...(19): siRNA sense strand
caucguguuugcaacugau

SEQ ID NO: 1639619 - RNA, 19 nt, Homo sapiens
  misc_RNA (1)...(19): siRNA sense strand
uggccaaauuccucaaaca

SEQ ID NO: 1639620 - RNA, 19 nt, Homo sapiens
  misc_RNA (1)...(19): siRNA sense strand
gcuaccaucguguuugcaa

SEQ ID NO: 1639621 - RNA, 19 nt, Homo sapiens
  misc_RNA (1)...(19): siRNA sense strand
ugauuucuaccugaucuuu

SEQ ID NO: 1639622 - RNA, 19 nt, Homo sapiens
  misc_RNA (1)...(19): siRNA sense strand
ucacggccaucgccaagua

SEQ ID NO: 1639623 - RNA, 19 nt, Homo sapiens
  misc_RNA (1)...(19): siRNA sense strand
caacugauuucuaccugau

SEQ ID NO: 1639624 - RNA, 19 nt, Homo sapiens
  misc_RNA (1)...(19): siRNA sense strand
uuaacgacguggccaaauu

SEQ ID NO: 1639625 - RNA, 19 nt, Homo sapiens
  misc_RNA (1)...(19): siRNA sense strand
ccaugcagcugaaugacaa

SEQ ID NO: 1639626 - RNA, 19 nt, Homo sapiens
  misc_RNA (1)...(19): siRNA sense strand
guguuuggcuucuuugcua

SEQ ID NO: 1639627 - RNA, 19 nt, Homo sapiens
  misc_RNA (1)...(19): siRNA sense strand
gcccucaucuacuuugcua

SEQ ID NO: 1639628 - RNA, 19 nt, Homo sapiens
  misc_RNA (1)...(19): siRNA sense strand
caagacagaagaagagaau

SEQ ID NO: 1639629 - RNA, 19 nt, Homo sapiens
  misc_RNA (1)...(19): siRNA sense strand
gaccacagcccacaagaca

SEQ ID NO: 1639630 - RNA, 19 nt, Homo sapiens
  misc_RNA (1)...(19): siRNA sense strand
ccacagcccacaagacaga

SEQ ID NO: 1639631 - RNA, 19 nt, Homo sapiens
  misc_RNA (1)...(19): siRNA sense strand
gauuucuaccugaucuuua

SEQ ID NO: 1639632 - RNA, 19 nt, Homo sapiens
  misc_RNA (1)...(19): siRNA sense strand
cgacucggacucugacuga

SEQ ID NO: 1639633 - RNA, 19 nt, Homo sapiens
  misc_RNA (1)...(19): siRNA sense strand
ggccuuguacuuccucuuu

SEQ ID NO: 1639634 - RNA, 19 nt, Homo sapiens
  misc_RNA (1)...(19): siRNA sense strand
ccacaagacagaagaagag

SEQ ID NO: 1639635 - RNA, 19 nt, Homo sapiens
  misc_RNA (1)...(19): siRNA sense strand
caaagccgcugggguguuu

SEQ ID NO: 1639636 - RNA, 19 nt, Homo sapiens
  misc_RNA (1)...(19): siRNA sense strand
uaacgacguggccaaauuc

SEQ ID NO: 1639637 - RNA, 19 nt, Homo sapiens
  misc_RNA (1)...(19): siRNA sense strand
ggccaaauuccucaaacaa

SEQ ID NO: 1639638 - RNA, 19 nt, Homo sapiens
  misc_RNA (1)...(19): siRNA sense strand
agacagaagaagagaauuc

SEQ ID NO: 1639639 - RNA, 19 nt, Homo sapiens
  misc_RNA (1)...(19): siRNA sense strand
ggcuugugcuggcccauga

SEQ ID NO: 1639640 - RNA, 19 nt, Homo sapiens
  misc_RNA (1)...(19): siRNA sense strand
guuugcaacugauuucuac

SEQ ID NO: 1639641 - RNA, 19 nt, Homo sapiens
  misc_RNA (1)...(19): siRNA sense strand
ggucucucauucaucacuu

SEQ ID NO: 1639642 - RNA, 19 nt, Homo sapiens
  misc_RNA (1)...(19): siRNA sense strand
gccuuguacuuccucuuug

SEQ ID NO: 1639643 - RNA, 19 nt, Homo sapiens
  misc_RNA (1)...(19): siRNA sense strand
gccaaauuccucaaacaag

SEQ ID NO: 1639644 - RNA, 19 nt, Homo sapiens
  misc_RNA (1)...(19): siRNA sense strand
ccaucguguuugcaacuga

SEQ ID NO: 1639645 - RNA, 19 nt, Homo sapiens
  misc_RNA (1)...(19): siRNA sense strand
caucguguuugcaacugau

SEQ ID NO: 1639646 - RNA, 19 nt, Homo sapiens
  misc_RNA (1)...(19): siRNA sense strand
uggccaaauuccucaaaca

SEQ ID NO: 1639647 - RNA, 19 nt, Homo sapiens
  misc_RNA (1)...(19): siRNA sense strand
gcuaccaucguguuugcaa

SEQ ID NO: 1639648 - RNA, 19 nt, Homo sapiens
  misc_RNA (1)...(19): siRNA sense strand
ugauuucuaccugaucuuu

SEQ ID NO: 1639649 - RNA, 19 nt, Homo sapiens
  misc_RNA (1)...(19): siRNA sense strand
ucacggccaucgccaagua

SEQ ID NO: 1639650 - RNA, 19 nt, Homo sapiens
  misc_RNA (1)...(19): siRNA sense strand
caacugauuucuaccugau

SEQ ID NO: 1639651 - RNA, 19 nt, Homo sapiens
  misc_RNA (1)...(19): siRNA sense strand
uuaacgacguggccaaauu

SEQ ID NO: 1639652 - RNA, 19 nt, Homo sapiens
  misc_RNA (1)...(19): siRNA sense strand
guguuuggcuucuuugcua

SEQ ID NO: 1639653 - RNA, 19 nt, Homo sapiens
  misc_RNA (1)...(19): siRNA sense strand
gcccucaucuacuuugcua

SEQ ID NO: 1639654 - RNA, 19 nt, Homo sapiens
  misc_RNA (1)...(19): siRNA sense strand
caagacagaagaagagaau

SEQ ID NO: 1639655 - RNA, 19 nt, Homo sapiens
  misc_RNA (1)...(19): siRNA sense strand
gaccacagcccacaagaca

SEQ ID NO: 1639656 - RNA, 19 nt, Homo sapiens
  misc_RNA (1)...(19): siRNA sense strand
ccacagcccacaagacaga

SEQ ID NO: 1639657 - RNA, 19 nt, Homo sapiens
  misc_RNA (1)...(19): siRNA sense strand
gauuucuaccugaucuuua

SEQ ID NO: 1639658 - RNA, 19 nt, Homo sapiens
  misc_RNA (1)...(19): siRNA sense strand
cgacucggacucugacuga

SEQ ID NO: 1639659 - RNA, 19 nt, Homo sapiens
  misc_RNA (1)...(19): siRNA sense strand
caaagccgcugggguguuu

SEQ ID NO: 1639660 - RNA, 19 nt, Homo sapiens
  misc_RNA (1)...(19): siRNA sense strand
ccacaagacagaagaagag

SEQ ID NO: 1639661 - RNA, 19 nt, Homo sapiens
  misc_RNA (1)...(19): siRNA sense strand
uaacgacguggccaaauuc

SEQ ID NO: 1639662 - RNA, 19 nt, Homo sapiens
  misc_RNA (1)...(19): siRNA sense strand
ggccaaauuccucaaacaa

SEQ ID NO: 1639663 - RNA, 19 nt, Homo sapiens
  misc_RNA (1)...(19): siRNA sense strand
agacagaagaagagaauuc

SEQ ID NO: 1639664 - RNA, 19 nt, Homo sapiens
  misc_RNA (1)...(19): siRNA sense strand
ggcuugugcuggcccauga

SEQ ID NO: 1639665 - RNA, 19 nt, Homo sapiens
  misc_RNA (1)...(19): siRNA sense strand
guuugcaacugauuucuac

SEQ ID NO: 1639666 - RNA, 19 nt, Homo sapiens
  misc_RNA (1)...(19): siRNA sense strand
ccaucguguuugcaacuga

SEQ ID NO: 1639667 - RNA, 19 nt, Homo sapiens
  misc_RNA (1)...(19): siRNA sense strand
gccaaauuccucaaacaag

SEQ ID NO: 1639668 - RNA, 19 nt, Homo sapiens
  misc_RNA (1)...(19): siRNA sense strand
caucguguuugcaacugau

SEQ ID NO: 1639669 - RNA, 19 nt, Homo sapiens
  misc_RNA (1)...(19): siRNA sense strand
uggccaaauuccucaaaca

SEQ ID NO: 1639670 - RNA, 19 nt, Homo sapiens
  misc_RNA (1)...(19): siRNA sense strand
gcuaccaucguguuugcaa

SEQ ID NO: 1639671 - RNA, 19 nt, Homo sapiens
  misc_RNA (1)...(19): siRNA sense strand
ugauuucuaccugaucuuu

SEQ ID NO: 1639672 - RNA, 19 nt, Homo sapiens
  misc_RNA (1)...(19): siRNA sense strand
gcaaguaacucucuucuua

SEQ ID NO: 1639673 - RNA, 19 nt, Homo sapiens
  misc_RNA (1)...(19): siRNA sense strand
gaaaggagcugaagauagu

SEQ ID NO: 1639674 - RNA, 19 nt, Homo sapiens
  misc_RNA (1)...(19): siRNA sense strand
gcaaagaaguggacauuga

SEQ ID NO: 1639675 - RNA, 19 nt, Homo sapiens
  misc_RNA (1)...(19): siRNA sense strand
caacagcgaugcacuauug

SEQ ID NO: 1639676 - RNA, 19 nt, Homo sapiens
  misc_RNA (1)...(19): siRNA sense strand
caacagaaccagucaauuu

SEQ ID NO: 1639677 - RNA, 19 nt, Homo sapiens
  misc_RNA (1)...(19): siRNA sense strand
gcaguuaucuucaguuuua

SEQ ID NO: 1639678 - RNA, 19 nt, Homo sapiens
  misc_RNA (1)...(19): siRNA sense strand
guacaagggucaccuaguu

SEQ ID NO: 1639679 - RNA, 19 nt, Homo sapiens
  misc_RNA (1)...(19): siRNA sense strand
caacuugacuggcuccuuu

SEQ ID NO: 1639680 - RNA, 19 nt, Homo sapiens
  misc_RNA (1)...(19): siRNA sense strand
caacaugccuggaauucaa

SEQ ID NO: 1639681 - RNA, 19 nt, Homo sapiens
  misc_RNA (1)...(19): siRNA sense strand
guagggauauugaaauuga

SEQ ID NO: 1639682 - RNA, 19 nt, Homo sapiens
  misc_RNA (1)...(19): siRNA sense strand
ucacagcacucaauaguug

SEQ ID NO: 1639683 - RNA, 19 nt, Homo sapiens
  misc_RNA (1)...(19): siRNA sense strand
gcaacagucuccucuuuau

SEQ ID NO: 1639684 - RNA, 19 nt, Homo sapiens
  misc_RNA (1)...(19): siRNA sense strand
ccacuggcauccucuauaa

SEQ ID NO: 1639685 - RNA, 19 nt, Homo sapiens
  misc_RNA (1)...(19): siRNA sense strand
gaaaagcaguuaaccagua

SEQ ID NO: 1639686 - RNA, 19 nt, Homo sapiens
  misc_RNA (1)...(19): siRNA sense strand
ggaaugagaugaugucacu

SEQ ID NO: 1639687 - RNA, 19 nt, Homo sapiens
  misc_RNA (1)...(19): siRNA sense strand
gaaaacaucucaaacauag

SEQ ID NO: 1639688 - RNA, 19 nt, Homo sapiens
  misc_RNA (1)...(19): siRNA sense strand
gcaguaugauuaagaguga

SEQ ID NO: 1639689 - RNA, 19 nt, Homo sapiens
  misc_RNA (1)...(19): siRNA sense strand
gcaaggcuuuccuacagua

SEQ ID NO: 1639690 - RNA, 19 nt, Homo sapiens
  misc_RNA (1)...(19): siRNA sense strand
ugacaacacuucuuucuca

SEQ ID NO: 1639691 - RNA, 19 nt, Homo sapiens
  misc_RNA (1)...(19): siRNA sense strand
gagaugaugucacuucaau

SEQ ID NO: 1639692 - RNA, 19 nt, Homo sapiens
  misc_RNA (1)...(19): siRNA sense strand
gaaacucagucuagagaga

SEQ ID NO: 1639693 - RNA, 19 nt, Homo sapiens
  misc_RNA (1)...(19): siRNA sense strand
gcagcaggcuacacaguuu

SEQ ID NO: 1639694 - RNA, 19 nt, Homo sapiens
  misc_RNA (1)...(19): siRNA sense strand
gaaaggagaagaagaagug

SEQ ID NO: 1639695 - RNA, 19 nt, Homo sapiens
  misc_RNA (1)...(19): siRNA sense strand
uaaugaaccuguaguguug

SEQ ID NO: 1639696 - RNA, 19 nt, Homo sapiens
  misc_RNA (1)...(19): siRNA sense strand
uaucaggccugcagaguaa

SEQ ID NO: 1639697 - RNA, 19 nt, Homo sapiens
  misc_RNA (1)...(19): siRNA sense strand
ugaaggcacuacuguuaua

SEQ ID NO: 1639698 - RNA, 19 nt, Homo sapiens
  misc_RNA (1)...(19): siRNA sense strand
gaggaaugcugaugucgaa

SEQ ID NO: 1639699 - RNA, 19 nt, Homo sapiens
  misc_RNA (1)...(19): siRNA sense strand
gcagucaaccaacauauuu

SEQ ID NO: 1639700 - RNA, 19 nt, Homo sapiens
  misc_RNA (1)...(19): siRNA sense strand
gacaaucaaccucaaguua

SEQ ID NO: 1639701 - RNA, 19 nt, Homo sapiens
  misc_RNA (1)...(19): siRNA sense strand
uugcauagcuguucaguga

SEQ ID NO: 1639702 - RNA, 19 nt, Homo sapiens
  misc_RNA (1)...(19): siRNA sense strand
gaacucaauuucuccacuu

SEQ ID NO: 1639703 - RNA, 19 nt, Homo sapiens
  misc_RNA (1)...(19): siRNA sense strand
gggaauauauguagugaca

SEQ ID NO: 1639704 - RNA, 19 nt, Homo sapiens
  misc_RNA (1)...(19): siRNA sense strand
caaagcaccucacuaugug

SEQ ID NO: 1639705 - RNA, 19 nt, Homo sapiens
  misc_RNA (1)...(19): siRNA sense strand
caucaggaauguucuuauu

SEQ ID NO: 1639706 - RNA, 19 nt, Homo sapiens
  misc_RNA (1)...(19): siRNA sense strand
acaacaagguaaugguuua

SEQ ID NO: 1639707 - RNA, 19 nt, Homo sapiens
  misc_RNA (1)...(19): siRNA sense strand
gcaaaugcagugugaauug

SEQ ID NO: 1639708 - RNA, 19 nt, Homo sapiens
  misc_RNA (1)...(19): siRNA sense strand
agaaacaucuguagcauca

SEQ ID NO: 1639709 - RNA, 19 nt, Homo sapiens
  misc_RNA (1)...(19): siRNA sense strand
caacaagucagucaaauuc

SEQ ID NO: 1639710 - RNA, 19 nt, Homo sapiens
  misc_RNA (1)...(19): siRNA sense strand
ggaacuauuucaucagaau

SEQ ID NO: 1639711 - RNA, 19 nt, Homo sapiens
  misc_RNA (1)...(19): siRNA sense strand
gcacuacuguuauagaagu

SEQ ID NO: 1639712 - RNA, 19 nt, Homo sapiens
  misc_RNA (1)...(19): siRNA sense strand
cagaguaacuggacgaaau

SEQ ID NO: 1639713 - RNA, 19 nt, Homo sapiens
  misc_RNA (1)...(19): siRNA sense strand
ucaggaauguucuuauuug

SEQ ID NO: 1639714 - RNA, 19 nt, Homo sapiens
  misc_RNA (1)...(19): siRNA sense strand
uuacagggcucuucaguuc

SEQ ID NO: 1639715 - RNA, 19 nt, Homo sapiens
  misc_RNA (1)...(19): siRNA sense strand
uguaagcccuggaauguuu

SEQ ID NO: 1639716 - RNA, 19 nt, Homo sapiens
  misc_RNA (1)...(19): siRNA sense strand
uggaagaucucaugauguu

SEQ ID NO: 1639717 - RNA, 19 nt, Homo sapiens
  misc_RNA (1)...(19): siRNA sense strand
gaaaacacguuaucuaauc

SEQ ID NO: 1639718 - RNA, 19 nt, Homo sapiens
  misc_RNA (1)...(19): siRNA sense strand
uggaagagcugaaaguguu

SEQ ID NO: 1639719 - RNA, 19 nt, Homo sapiens
  misc_RNA (1)...(19): siRNA sense strand
ccagagacccugacaacua

SEQ ID NO: 1639720 - RNA, 19 nt, Homo sapiens
  misc_RNA (1)...(19): siRNA sense strand
gcuggaagaucucaugaug

SEQ ID NO: 1639721 - RNA, 19 nt, Homo sapiens
  misc_RNA (1)...(19): siRNA sense strand
agaagaaacuggaacacaa

SEQ ID NO: 1639722 - RNA, 19 nt, Homo sapiens
  misc_RNA (1)...(19): siRNA sense strand
gaucaacucagcaaacauu

SEQ ID NO: 1639723 - RNA, 19 nt, Homo sapiens
  misc_RNA (1)...(19): siRNA sense strand
gaagagcccuauguugugu

SEQ ID NO: 1639724 - RNA, 19 nt, Homo sapiens
  misc_RNA (1)...(19): siRNA sense strand
ccauagcucuccucagauu

SEQ ID NO: 1639725 - RNA, 19 nt, Homo sapiens
  misc_RNA (1)...(19): siRNA sense strand
acagcaagcuccaauauca

SEQ ID NO: 1639726 - RNA, 19 nt, Homo sapiens
  misc_RNA (1)...(19): siRNA sense strand
cagcagacuucucacauga

SEQ ID NO: 1639727 - RNA, 19 nt, Homo sapiens
  misc_RNA (1)...(19): siRNA sense strand
gaguuaauaucaugaggaa

SEQ ID NO: 1639728 - RNA, 19 nt, Homo sapiens
  misc_RNA (1)...(19): siRNA sense strand
gaacuggaguaaagaagag

SEQ ID NO: 1639729 - RNA, 19 nt, Homo sapiens
  misc_RNA (1)...(19): siRNA sense strand
caacaacaacagagcauuu

SEQ ID NO: 1639730 - RNA, 19 nt, Homo sapiens
  misc_RNA (1)...(19): siRNA sense strand
gaacaaaugcagccuccaa

SEQ ID NO: 1639731 - RNA, 19 nt, Homo sapiens
  misc_RNA (1)...(19): siRNA sense strand
gcagcagucuucucauuca

SEQ ID NO: 1639732 - RNA, 19 nt, Homo sapiens
  misc_RNA (1)...(19): siRNA sense strand
gaaaugaaacuucuacaac

SEQ ID NO: 1639733 - RNA, 19 nt, Homo sapiens
  misc_RNA (1)...(19): siRNA sense strand
uaccagaccagauaauuua

SEQ ID NO: 1639734 - RNA, 19 nt, Homo sapiens
  misc_RNA (1)...(19): siRNA sense strand
aaauacaacuccuugcaaa

SEQ ID NO: 1639735 - RNA, 19 nt, Homo sapiens
  misc_RNA (1)...(19): siRNA sense strand
cagcaguuaucuucaguuu

SEQ ID NO: 1639736 - RNA, 19 nt, Homo sapiens
  misc_RNA (1)...(19): siRNA sense strand
gcaccgaacucaauuucuc

SEQ ID NO: 1639737 - RNA, 19 nt, Homo sapiens
  misc_RNA (1)...(19): siRNA sense strand
guaaugagaauguucaaga

SEQ ID NO: 1639738 - RNA, 19 nt, Homo sapiens
  misc_RNA (1)...(19): siRNA sense strand
gaaauacaacuccuugcaa

SEQ ID NO: 1639739 - RNA, 19 nt, Homo sapiens
  misc_RNA (1)...(19): siRNA sense strand
gaacaacaugccuggaauu

SEQ ID NO: 1639740 - RNA, 19 nt, Homo sapiens
  misc_RNA (1)...(19): siRNA sense strand
ggaaaugaaacuucuacaa

SEQ ID NO: 1639741 - RNA, 19 nt, Homo sapiens
  misc_RNA (1)...(19): siRNA sense strand
gcagacuucucacaugaug

SEQ ID NO: 1639742 - RNA, 19 nt, Homo sapiens
  misc_RNA (1)...(19): siRNA sense strand
ugagucagcuucagaauac

SEQ ID NO: 1639743 - RNA, 19 nt, Homo sapiens
  misc_RNA (1)...(19): siRNA sense strand
cagagacccugacaacuau

SEQ ID NO: 1639744 - RNA, 19 nt, Homo sapiens
  misc_RNA (1)...(19): siRNA sense strand
gaagaucucaugauguuca

SEQ ID NO: 1639745 - RNA, 19 nt, Homo sapiens
  misc_RNA (1)...(19): siRNA sense strand
gcguagggauauugaaauu

SEQ ID NO: 1639746 - RNA, 19 nt, Homo sapiens
  misc_RNA (1)...(19): siRNA sense strand
ccaaagcaccucacuaugu

SEQ ID NO: 1639747 - RNA, 19 nt, Homo sapiens
  misc_RNA (1)...(19): siRNA sense strand
ugaaccaacugcagaauuc

SEQ ID NO: 1639748 - RNA, 19 nt, Homo sapiens
  misc_RNA (1)...(19): siRNA sense strand
cagagucaguccacaguuu

SEQ ID NO: 1639749 - RNA, 19 nt, Homo sapiens
  misc_RNA (1)...(19): siRNA sense strand
gaauagugguacccaacaa

SEQ ID NO: 1639750 - RNA, 19 nt, Homo sapiens
  misc_RNA (1)...(19): siRNA sense strand
gauuaagagugaagauguu

SEQ ID NO: 1639751 - RNA, 19 nt, Homo sapiens
  misc_RNA (1)...(19): siRNA sense strand
caaacacccucuucuccaa

SEQ ID NO: 1639752 - RNA, 19 nt, Homo sapiens
  misc_RNA (1)...(19): siRNA sense strand
ucuaugaucuucucccaaa

SEQ ID NO: 1639753 - RNA, 19 nt, Homo sapiens
  misc_RNA (1)...(19): siRNA sense strand
gacaaaugcuggaagaucu

SEQ ID NO: 1639754 - RNA, 19 nt, Homo sapiens
  misc_RNA (1)...(19): siRNA sense strand
ccugaggacuugcuggaua

SEQ ID NO: 1639755 - RNA, 19 nt, Homo sapiens
  misc_RNA (1)...(19): siRNA sense strand
caacagcaagcuccaauau

SEQ ID NO: 1639756 - RNA, 19 nt, Homo sapiens
  misc_RNA (1)...(19): siRNA sense strand
gcaagggaaugagaugaug

SEQ ID NO: 1639757 - RNA, 19 nt, Homo sapiens
  misc_RNA (1)...(19): siRNA sense strand
guacagugguuaauuuguc

SEQ ID NO: 1639758 - RNA, 19 nt, Homo sapiens
  misc_RNA (1)...(19): siRNA sense strand
ggaaaggagcugaagauag

SEQ ID NO: 1639759 - RNA, 19 nt, Homo sapiens
  misc_RNA (1)...(19): siRNA sense strand
guaaagaagagcccuaugu

SEQ ID NO: 1639760 - RNA, 19 nt, Homo sapiens
  misc_RNA (1)...(19): siRNA sense strand
caccaaacaugauauucaa

SEQ ID NO: 1639761 - RNA, 19 nt, Homo sapiens
  misc_RNA (1)...(19): siRNA sense strand
caaccaacauauuucuuuc

SEQ ID NO: 1639762 - RNA, 19 nt, Homo sapiens
  misc_RNA (1)...(19): siRNA sense strand
ucacuucaaucuggaaauu

SEQ ID NO: 1639763 - RNA, 19 nt, Homo sapiens
  misc_RNA (1)...(19): siRNA sense strand
gagaaacucagucuagaga

SEQ ID NO: 1639764 - RNA, 19 nt, Homo sapiens
  misc_RNA (1)...(19): siRNA sense strand
gugaagauguuacuccaau

SEQ ID NO: 1639765 - RNA, 19 nt, Homo sapiens
  misc_RNA (1)...(19): siRNA sense strand
gaagaggccaugaaagcaa

SEQ ID NO: 1639766 - RNA, 19 nt, Homo sapiens
  misc_RNA (1)...(19): siRNA sense strand
gaauguaaaugugaagaag

SEQ ID NO: 1639767 - RNA, 19 nt, Homo sapiens
  misc_RNA (1)...(19): siRNA sense strand
gagcaccaguuccuacaau

SEQ ID NO: 1639768 - RNA, 19 nt, Homo sapiens
  misc_RNA (1)...(19): siRNA sense strand
caagagaaacucagucuag

SEQ ID NO: 1639769 - RNA, 19 nt, Homo sapiens
  misc_RNA (1)...(19): siRNA sense strand
gauccuagcaacaacauga

SEQ ID NO: 1639770 - RNA, 19 nt, Homo sapiens
  misc_RNA (1)...(19): siRNA sense strand
caacagcccaugcaauuuc

SEQ ID NO: 1639771 - RNA, 19 nt, Homo sapiens
  misc_RNA (1)...(19): siRNA sense strand
aaacaucuguagcaucaau

SEQ ID NO: 1639772 - RNA, 19 nt, Homo sapiens
  misc_RNA (1)...(19): siRNA sense strand
gcaaguaacucucuucuua

SEQ ID NO: 1639773 - RNA, 19 nt, Homo sapiens
  misc_RNA (1)...(19): siRNA sense strand
gaaaggagcugaagauagu

SEQ ID NO: 1639774 - RNA, 19 nt, Homo sapiens
  misc_RNA (1)...(19): siRNA sense strand
gcaaagaaguggacauuga

SEQ ID NO: 1639775 - RNA, 19 nt, Homo sapiens
  misc_RNA (1)...(19): siRNA sense strand
caacagcgaugcacuauug

SEQ ID NO: 1639776 - RNA, 19 nt, Homo sapiens
  misc_RNA (1)...(19): siRNA sense strand
caacagaaccagucaauuu

SEQ ID NO: 1639777 - RNA, 19 nt, Homo sapiens
  misc_RNA (1)...(19): siRNA sense strand
gcaguuaucuucaguuuua

SEQ ID NO: 1639778 - RNA, 19 nt, Homo sapiens
  misc_RNA (1)...(19): siRNA sense strand
guacaagggucaccuaguu

SEQ ID NO: 1639779 - RNA, 19 nt, Homo sapiens
  misc_RNA (1)...(19): siRNA sense strand
caacuugacuggcuccuuu

SEQ ID NO: 1639780 - RNA, 19 nt, Homo sapiens
  misc_RNA (1)...(19): siRNA sense strand
caacaugccuggaauucaa

SEQ ID NO: 1639781 - RNA, 19 nt, Homo sapiens
  misc_RNA (1)...(19): siRNA sense strand
guagggauauugaaauuga

SEQ ID NO: 1639782 - RNA, 19 nt, Homo sapiens
  misc_RNA (1)...(19): siRNA sense strand
ucacagcacucaauaguug

SEQ ID NO: 1639783 - RNA, 19 nt, Homo sapiens
  misc_RNA (1)...(19): siRNA sense strand
gcaacagucuccucuuuau

SEQ ID NO: 1639784 - RNA, 19 nt, Homo sapiens
  misc_RNA (1)...(19): siRNA sense strand
ccacuggcauccucuauaa

SEQ ID NO: 1639785 - RNA, 19 nt, Homo sapiens
  misc_RNA (1)...(19): siRNA sense strand
gaaaagcaguuaaccagua

SEQ ID NO: 1639786 - RNA, 19 nt, Homo sapiens
  misc_RNA (1)...(19): siRNA sense strand
ggaaugagaugaugucacu

SEQ ID NO: 1639787 - RNA, 19 nt, Homo sapiens
  misc_RNA (1)...(19): siRNA sense strand
gaaaacaucucaaacauag

SEQ ID NO: 1639788 - RNA, 19 nt, Homo sapiens
  misc_RNA (1)...(19): siRNA sense strand
gcaguaugauuaagaguga

SEQ ID NO: 1639789 - RNA, 19 nt, Homo sapiens
  misc_RNA (1)...(19): siRNA sense strand
gcaaggcuuuccuacagua

SEQ ID NO: 1639790 - RNA, 19 nt, Homo sapiens
  misc_RNA (1)...(19): siRNA sense strand
ugacaacacuucuuucuca

SEQ ID NO: 1639791 - RNA, 19 nt, Homo sapiens
  misc_RNA (1)...(19): siRNA sense strand
gagaugaugucacuucaau

SEQ ID NO: 1639792 - RNA, 19 nt, Homo sapiens
  misc_RNA (1)...(19): siRNA sense strand
gaaacucagucuagagaga

SEQ ID NO: 1639793 - RNA, 19 nt, Homo sapiens
  misc_RNA (1)...(19): siRNA sense strand
gcagcaggcuacacaguuu

SEQ ID NO: 1639794 - RNA, 19 nt, Homo sapiens
  misc_RNA (1)...(19): siRNA sense strand
gaaaggagaagaagaagug

SEQ ID NO: 1639795 - RNA, 19 nt, Homo sapiens
  misc_RNA (1)...(19): siRNA sense strand
uaaugaaccuguaguguug

SEQ ID NO: 1639796 - RNA, 19 nt, Homo sapiens
  misc_RNA (1)...(19): siRNA sense strand
uaucaggccugcagaguaa

SEQ ID NO: 1639797 - RNA, 19 nt, Homo sapiens
  misc_RNA (1)...(19): siRNA sense strand
ugaaggcacuacuguuaua

SEQ ID NO: 1639798 - RNA, 19 nt, Homo sapiens
  misc_RNA (1)...(19): siRNA sense strand
gaggaaugcugaugucgaa

SEQ ID NO: 1639799 - RNA, 19 nt, Homo sapiens
  misc_RNA (1)...(19): siRNA sense strand
gcagucaaccaacauauuu

SEQ ID NO: 1639800 - RNA, 19 nt, Homo sapiens
  misc_RNA (1)...(19): siRNA sense strand
gacaaucaaccucaaguua

SEQ ID NO: 1639801 - RNA, 19 nt, Homo sapiens
  misc_RNA (1)...(19): siRNA sense strand
uugcauagcuguucaguga

SEQ ID NO: 1639802 - RNA, 19 nt, Homo sapiens
  misc_RNA (1)...(19): siRNA sense strand
gaacucaauuucuccacuu

SEQ ID NO: 1639803 - RNA, 19 nt, Homo sapiens
  misc_RNA (1)...(19): siRNA sense strand
gggaauauauguagugaca

SEQ ID NO: 1639804 - RNA, 19 nt, Homo sapiens
  misc_RNA (1)...(19): siRNA sense strand
caaagcaccucacuaugug

SEQ ID NO: 1639805 - RNA, 19 nt, Homo sapiens
  misc_RNA (1)...(19): siRNA sense strand
caucaggaauguucuuauu

SEQ ID NO: 1639806 - RNA, 19 nt, Homo sapiens
  misc_RNA (1)...(19): siRNA sense strand
acaacaagguaaugguuua

SEQ ID NO: 1639807 - RNA, 19 nt, Homo sapiens
  misc_RNA (1)...(19): siRNA sense strand
gcaaaugcagugugaauug

SEQ ID NO: 1639808 - RNA, 19 nt, Homo sapiens
  misc_RNA (1)...(19): siRNA sense strand
gcacuacuguuauagaagu

SEQ ID NO: 1639809 - RNA, 19 nt, Homo sapiens
  misc_RNA (1)...(19): siRNA sense strand
caacaagucagucaaauuc

SEQ ID NO: 1639810 - RNA, 19 nt, Homo sapiens
  misc_RNA (1)...(19): siRNA sense strand
ggaacuauuucaucagaau

SEQ ID NO: 1639811 - RNA, 19 nt, Homo sapiens
  misc_RNA (1)...(19): siRNA sense strand
cagaguaacuggacgaaau

SEQ ID NO: 1639812 - RNA, 19 nt, Homo sapiens
  misc_RNA (1)...(19): siRNA sense strand
ucaggaauguucuuauuug

SEQ ID NO: 1639813 - RNA, 19 nt, Homo sapiens
  misc_RNA (1)...(19): siRNA sense strand
uuacagggcucuucaguuc

SEQ ID NO: 1639814 - RNA, 19 nt, Homo sapiens
  misc_RNA (1)...(19): siRNA sense strand
uguaagcccuggaauguuu

SEQ ID NO: 1639815 - RNA, 19 nt, Homo sapiens
  misc_RNA (1)...(19): siRNA sense strand
uggaagaucucaugauguu

SEQ ID NO: 1639816 - RNA, 19 nt, Homo sapiens
  misc_RNA (1)...(19): siRNA sense strand
gaaaacacguuaucuaauc

SEQ ID NO: 1639817 - RNA, 19 nt, Homo sapiens
  misc_RNA (1)...(19): siRNA sense strand
uggaagagcugaaaguguu

SEQ ID NO: 1639818 - RNA, 19 nt, Homo sapiens
  misc_RNA (1)...(19): siRNA sense strand
ccagagacccugacaacua

SEQ ID NO: 1639819 - RNA, 19 nt, Homo sapiens
  misc_RNA (1)...(19): siRNA sense strand
gcuggaagaucucaugaug

SEQ ID NO: 1639820 - RNA, 19 nt, Homo sapiens
  misc_RNA (1)...(19): siRNA sense strand
agaagaaacuggaacacaa

SEQ ID NO: 1639821 - RNA, 19 nt, Homo sapiens
  misc_RNA (1)...(19): siRNA sense strand
gaucaacucagcaaacauu

SEQ ID NO: 1639822 - RNA, 19 nt, Homo sapiens
  misc_RNA (1)...(19): siRNA sense strand
gaagagcccuauguugugu

SEQ ID NO: 1639823 - RNA, 19 nt, Homo sapiens
  misc_RNA (1)...(19): siRNA sense strand
ccauagcucuccucagauu

SEQ ID NO: 1639824 - RNA, 19 nt, Homo sapiens
  misc_RNA (1)...(19): siRNA sense strand
acagcaagcuccaauauca

SEQ ID NO: 1639825 - RNA, 19 nt, Homo sapiens
  misc_RNA (1)...(19): siRNA sense strand
cagcagacuucucacauga

SEQ ID NO: 1639826 - RNA, 19 nt, Homo sapiens
  misc_RNA (1)...(19): siRNA sense strand
gaguuaauaucaugaggaa

SEQ ID NO: 1639827 - RNA, 19 nt, Homo sapiens
  misc_RNA (1)...(19): siRNA sense strand
gaacuggaguaaagaagag

SEQ ID NO: 1639828 - RNA, 19 nt, Homo sapiens
  misc_RNA (1)...(19): siRNA sense strand
caacaacaacagagcauuu

SEQ ID NO: 1639829 - RNA, 19 nt, Homo sapiens
  misc_RNA (1)...(19): siRNA sense strand
gaacaaaugcagccuccaa

SEQ ID NO: 1639830 - RNA, 19 nt, Homo sapiens
  misc_RNA (1)...(19): siRNA sense strand
gcagcagucuucucauuca

SEQ ID NO: 1639831 - RNA, 19 nt, Homo sapiens
  misc_RNA (1)...(19): siRNA sense strand
gaaaugaaacuucuacaac

SEQ ID NO: 1639832 - RNA, 19 nt, Homo sapiens
  misc_RNA (1)...(19): siRNA sense strand
uaccagaccagauaauuua

SEQ ID NO: 1639833 - RNA, 19 nt, Homo sapiens
  misc_RNA (1)...(19): siRNA sense strand
aaauacaacuccuugcaaa

SEQ ID NO: 1639834 - RNA, 19 nt, Homo sapiens
  misc_RNA (1)...(19): siRNA sense strand
cagcaguuaucuucaguuu

SEQ ID NO: 1639835 - RNA, 19 nt, Homo sapiens
  misc_RNA (1)...(19): siRNA sense strand
gcaccgaacucaauuucuc

SEQ ID NO: 1639836 - RNA, 19 nt, Homo sapiens
  misc_RNA (1)...(19): siRNA sense strand
guaaugagaauguucaaga

SEQ ID NO: 1639837 - RNA, 19 nt, Homo sapiens
  misc_RNA (1)...(19): siRNA sense strand
gaaauacaacuccuugcaa

SEQ ID NO: 1639838 - RNA, 19 nt, Homo sapiens
  misc_RNA (1)...(19): siRNA sense strand
gaacaacaugccuggaauu

SEQ ID NO: 1639839 - RNA, 19 nt, Homo sapiens
  misc_RNA (1)...(19): siRNA sense strand
ggaaaugaaacuucuacaa

SEQ ID NO: 1639840 - RNA, 19 nt, Homo sapiens
  misc_RNA (1)...(19): siRNA sense strand
gcagacuucucacaugaug

SEQ ID NO: 1639841 - RNA, 19 nt, Homo sapiens
  misc_RNA (1)...(19): siRNA sense strand
ugagucagcuucagaauac

SEQ ID NO: 1639842 - RNA, 19 nt, Homo sapiens
  misc_RNA (1)...(19): siRNA sense strand
cagagacccugacaacuau

SEQ ID NO: 1639843 - RNA, 19 nt, Homo sapiens
  misc_RNA (1)...(19): siRNA sense strand
gaagaucucaugauguuca

SEQ ID NO: 1639844 - RNA, 19 nt, Homo sapiens
  misc_RNA (1)...(19): siRNA sense strand
gcguagggauauugaaauu

SEQ ID NO: 1639845 - RNA, 19 nt, Homo sapiens
  misc_RNA (1)...(19): siRNA sense strand
ccaaagcaccucacuaugu

SEQ ID NO: 1639846 - RNA, 19 nt, Homo sapiens
  misc_RNA (1)...(19): siRNA sense strand
ugaaccaacugcagaauuc

SEQ ID NO: 1639847 - RNA, 19 nt, Homo sapiens
  misc_RNA (1)...(19): siRNA sense strand
cagagucaguccacaguuu

SEQ ID NO: 1639848 - RNA, 19 nt, Homo sapiens
  misc_RNA (1)...(19): siRNA sense strand
gaauagugguacccaacaa

SEQ ID NO: 1639849 - RNA, 19 nt, Homo sapiens
  misc_RNA (1)...(19): siRNA sense strand
gauuaagagugaagauguu

SEQ ID NO: 1639850 - RNA, 19 nt, Homo sapiens
  misc_RNA (1)...(19): siRNA sense strand
caaacacccucuucuccaa

SEQ ID NO: 1639851 - RNA, 19 nt, Homo sapiens
  misc_RNA (1)...(19): siRNA sense strand
gacaaaugcuggaagaucu

SEQ ID NO: 1639852 - RNA, 19 nt, Homo sapiens
  misc_RNA (1)...(19): siRNA sense strand
ccugaggacuugcuggaua

SEQ ID NO: 1639853 - RNA, 19 nt, Homo sapiens
  misc_RNA (1)...(19): siRNA sense strand
caacagcaagcuccaauau

SEQ ID NO: 1639854 - RNA, 19 nt, Homo sapiens
  misc_RNA (1)...(19): siRNA sense strand
gcaagggaaugagaugaug

SEQ ID NO: 1639855 - RNA, 19 nt, Homo sapiens
  misc_RNA (1)...(19): siRNA sense strand
guacagugguuaauuuguc

SEQ ID NO: 1639856 - RNA, 19 nt, Homo sapiens
  misc_RNA (1)...(19): siRNA sense strand
ggaaaggagcugaagauag

SEQ ID NO: 1639857 - RNA, 19 nt, Homo sapiens
  misc_RNA (1)...(19): siRNA sense strand
guaaagaagagcccuaugu

SEQ ID NO: 1639858 - RNA, 19 nt, Homo sapiens
  misc_RNA (1)...(19): siRNA sense strand
caccaaacaugauauucaa

SEQ ID NO: 1639859 - RNA, 19 nt, Homo sapiens
  misc_RNA (1)...(19): siRNA sense strand
caaccaacauauuucuuuc

SEQ ID NO: 1639860 - RNA, 19 nt, Homo sapiens
  misc_RNA (1)...(19): siRNA sense strand
ucacuucaaucuggaaauu

SEQ ID NO: 1639861 - RNA, 19 nt, Homo sapiens
  misc_RNA (1)...(19): siRNA sense strand
gagaaacucagucuagaga

SEQ ID NO: 1639862 - RNA, 19 nt, Homo sapiens
  misc_RNA (1)...(19): siRNA sense strand
gugaagauguuacuccaau

SEQ ID NO: 1639863 - RNA, 19 nt, Homo sapiens
  misc_RNA (1)...(19): siRNA sense strand
gaagaggccaugaaagcaa

SEQ ID NO: 1639864 - RNA, 19 nt, Homo sapiens
  misc_RNA (1)...(19): siRNA sense strand
gaauguaaaugugaagaag

SEQ ID NO: 1639865 - RNA, 19 nt, Homo sapiens
  misc_RNA (1)...(19): siRNA sense strand
gagcaccaguuccuacaau

SEQ ID NO: 1639866 - RNA, 19 nt, Homo sapiens
  misc_RNA (1)...(19): siRNA sense strand
caagagaaacucagucuag

SEQ ID NO: 1639867 - RNA, 19 nt, Homo sapiens
  misc_RNA (1)...(19): siRNA sense strand
uaaagaagagcccuauguu

SEQ ID NO: 1639868 - RNA, 19 nt, Homo sapiens
  misc_RNA (1)...(19): siRNA sense strand
caacagcccaugcaauuuc

SEQ ID NO: 1639869 - RNA, 19 nt, Homo sapiens
  misc_RNA (1)...(19): siRNA sense strand
gauccuagcaacaacauga

SEQ ID NO: 1639870 - RNA, 19 nt, Homo sapiens
  misc_RNA (1)...(19): siRNA sense strand
cagcaaggcuuuccuacag

SEQ ID NO: 1639871 - RNA, 19 nt, Homo sapiens
  misc_RNA (1)...(19): siRNA sense strand
gcagucaccacuacaagaa

SEQ ID NO: 1639872 - RNA, 19 nt, Homo sapiens
  misc_RNA (1)...(19): siRNA sense strand
gcaaguaacucucuucuua

SEQ ID NO: 1639873 - RNA, 19 nt, Homo sapiens
  misc_RNA (1)...(19): siRNA sense strand
gaaaggagcugaagauagu

SEQ ID NO: 1639874 - RNA, 19 nt, Homo sapiens
  misc_RNA (1)...(19): siRNA sense strand
gcaaagaaguggacauuga

SEQ ID NO: 1639875 - RNA, 19 nt, Homo sapiens
  misc_RNA (1)...(19): siRNA sense strand
caacagcgaugcacuauug

SEQ ID NO: 1639876 - RNA, 19 nt, Homo sapiens
  misc_RNA (1)...(19): siRNA sense strand
caacagaaccagucaauuu

SEQ ID NO: 1639877 - RNA, 19 nt, Homo sapiens
  misc_RNA (1)...(19): siRNA sense strand
gcaguuaucuucaguuuua

SEQ ID NO: 1639878 - RNA, 19 nt, Homo sapiens
  misc_RNA (1)...(19): siRNA sense strand
guacaagggucaccuaguu

SEQ ID NO: 1639879 - RNA, 19 nt, Homo sapiens
  misc_RNA (1)...(19): siRNA sense strand
caacuugacuggcuccuuu

SEQ ID NO: 1639880 - RNA, 19 nt, Homo sapiens
  misc_RNA (1)...(19): siRNA sense strand
caacaugccuggaauucaa

SEQ ID NO: 1639881 - RNA, 19 nt, Homo sapiens
  misc_RNA (1)...(19): siRNA sense strand
guagggauauugaaauuga

SEQ ID NO: 1639882 - RNA, 19 nt, Homo sapiens
  misc_RNA (1)...(19): siRNA sense strand
ucacagcacucaauaguug

SEQ ID NO: 1639883 - RNA, 19 nt, Homo sapiens
  misc_RNA (1)...(19): siRNA sense strand
gcaacagucuccucuuuau

SEQ ID NO: 1639884 - RNA, 19 nt, Homo sapiens
  misc_RNA (1)...(19): siRNA sense strand
ccacuggcauccucuauaa

SEQ ID NO: 1639885 - RNA, 19 nt, Homo sapiens
  misc_RNA (1)...(19): siRNA sense strand
gaaaagcaguuaaccagua

SEQ ID NO: 1639886 - RNA, 19 nt, Homo sapiens
  misc_RNA (1)...(19): siRNA sense strand
ggaaugagaugaugucacu

SEQ ID NO: 1639887 - RNA, 19 nt, Homo sapiens
  misc_RNA (1)...(19): siRNA sense strand
gaaaacaucucaaacauag

SEQ ID NO: 1639888 - RNA, 19 nt, Homo sapiens
  misc_RNA (1)...(19): siRNA sense strand
gcaguaugauuaagaguga

SEQ ID NO: 1639889 - RNA, 19 nt, Homo sapiens
  misc_RNA (1)...(19): siRNA sense strand
gcaaggcuuuccuacagua

SEQ ID NO: 1639890 - RNA, 19 nt, Homo sapiens
  misc_RNA (1)...(19): siRNA sense strand
ugacaacacuucuuucuca

SEQ ID NO: 1639891 - RNA, 19 nt, Homo sapiens
  misc_RNA (1)...(19): siRNA sense strand
gagaugaugucacuucaau

SEQ ID NO: 1639892 - RNA, 19 nt, Homo sapiens
  misc_RNA (1)...(19): siRNA sense strand
gaaacucagucuagagaga

SEQ ID NO: 1639893 - RNA, 19 nt, Homo sapiens
  misc_RNA (1)...(19): siRNA sense strand
gcagcaggcuacacaguuu

SEQ ID NO: 1639894 - RNA, 19 nt, Homo sapiens
  misc_RNA (1)...(19): siRNA sense strand
gaaaggagaagaagaagug

SEQ ID NO: 1639895 - RNA, 19 nt, Homo sapiens
  misc_RNA (1)...(19): siRNA sense strand
uaaugaaccuguaguguug

SEQ ID NO: 1639896 - RNA, 19 nt, Homo sapiens
  misc_RNA (1)...(19): siRNA sense strand
uaucaggccugcagaguaa

SEQ ID NO: 1639897 - RNA, 19 nt, Homo sapiens
  misc_RNA (1)...(19): siRNA sense strand
ugaaggcacuacuguuaua

SEQ ID NO: 1639898 - RNA, 19 nt, Homo sapiens
  misc_RNA (1)...(19): siRNA sense strand
gaggaaugcugaugucgaa

SEQ ID NO: 1639899 - RNA, 19 nt, Homo sapiens
  misc_RNA (1)...(19): siRNA sense strand
gcagucaaccaacauauuu

SEQ ID NO: 1639900 - RNA, 19 nt, Homo sapiens
  misc_RNA (1)...(19): siRNA sense strand
gacaaucaaccucaaguua

SEQ ID NO: 1639901 - RNA, 19 nt, Homo sapiens
  misc_RNA (1)...(19): siRNA sense strand
uugcauagcuguucaguga

SEQ ID NO: 1639902 - RNA, 19 nt, Homo sapiens
  misc_RNA (1)...(19): siRNA sense strand
gaacucaauuucuccacuu

SEQ ID NO: 1639903 - RNA, 19 nt, Homo sapiens
  misc_RNA (1)...(19): siRNA sense strand
gggaauauauguagugaca

SEQ ID NO: 1639904 - RNA, 19 nt, Homo sapiens
  misc_RNA (1)...(19): siRNA sense strand
caaagcaccucacuaugug

SEQ ID NO: 1639905 - RNA, 19 nt, Homo sapiens
  misc_RNA (1)...(19): siRNA sense strand
caucaggaauguucuuauu

SEQ ID NO: 1639906 - RNA, 19 nt, Homo sapiens
  misc_RNA (1)...(19): siRNA sense strand
acaacaagguaaugguuua

SEQ ID NO: 1639907 - RNA, 19 nt, Homo sapiens
  misc_RNA (1)...(19): siRNA sense strand
gcaaaugcagugugaauug

SEQ ID NO: 1639908 - RNA, 19 nt, Homo sapiens
  misc_RNA (1)...(19): siRNA sense strand
gcacuacuguuauagaagu

SEQ ID NO: 1639909 - RNA, 19 nt, Homo sapiens
  misc_RNA (1)...(19): siRNA sense strand
caacaagucagucaaauuc

SEQ ID NO: 1639910 - RNA, 19 nt, Homo sapiens
  misc_RNA (1)...(19): siRNA sense strand
ggaacuauuucaucagaau

SEQ ID NO: 1639911 - RNA, 19 nt, Homo sapiens
  misc_RNA (1)...(19): siRNA sense strand
cagaguaacuggacgaaau

SEQ ID NO: 1639912 - RNA, 19 nt, Homo sapiens
  misc_RNA (1)...(19): siRNA sense strand
ucaggaauguucuuauuug

SEQ ID NO: 1639913 - RNA, 19 nt, Homo sapiens
  misc_RNA (1)...(19): siRNA sense strand
uuacagggcucuucaguuc

SEQ ID NO: 1639914 - RNA, 19 nt, Homo sapiens
  misc_RNA (1)...(19): siRNA sense strand
uguaagcccuggaauguuu

SEQ ID NO: 1639915 - RNA, 19 nt, Homo sapiens
  misc_RNA (1)...(19): siRNA sense strand
uggaagaucucaugauguu

SEQ ID NO: 1639916 - RNA, 19 nt, Homo sapiens
  misc_RNA (1)...(19): siRNA sense strand
gaaaacacguuaucuaauc

SEQ ID NO: 1639917 - RNA, 19 nt, Homo sapiens
  misc_RNA (1)...(19): siRNA sense strand
uggaagagcugaaaguguu

SEQ ID NO: 1639918 - RNA, 19 nt, Homo sapiens
  misc_RNA (1)...(19): siRNA sense strand
ccagagacccugacaacua

SEQ ID NO: 1639919 - RNA, 19 nt, Homo sapiens
  misc_RNA (1)...(19): siRNA sense strand
gcuggaagaucucaugaug

SEQ ID NO: 1639920 - RNA, 19 nt, Homo sapiens
  misc_RNA (1)...(19): siRNA sense strand
agaagaaacuggaacacaa

SEQ ID NO: 1639921 - RNA, 19 nt, Homo sapiens
  misc_RNA (1)...(19): siRNA sense strand
gaucaacucagcaaacauu

SEQ ID NO: 1639922 - RNA, 19 nt, Homo sapiens
  misc_RNA (1)...(19): siRNA sense strand
gaagagcccuauguugugu

SEQ ID NO: 1639923 - RNA, 19 nt, Homo sapiens
  misc_RNA (1)...(19): siRNA sense strand
ccauagcucuccucagauu

SEQ ID NO: 1639924 - RNA, 19 nt, Homo sapiens
  misc_RNA (1)...(19): siRNA sense strand
acagcaagcuccaauauca

SEQ ID NO: 1639925 - RNA, 19 nt, Homo sapiens
  misc_RNA (1)...(19): siRNA sense strand
cagcagacuucucacauga

SEQ ID NO: 1639926 - RNA, 19 nt, Homo sapiens
  misc_RNA (1)...(19): siRNA sense strand
gaguuaauaucaugaggaa

SEQ ID NO: 1639927 - RNA, 19 nt, Homo sapiens
  misc_RNA (1)...(19): siRNA sense strand
gaacuggaguaaagaagag

SEQ ID NO: 1639928 - RNA, 19 nt, Homo sapiens
  misc_RNA (1)...(19): siRNA sense strand
caacaacaacagagcauuu

SEQ ID NO: 1639929 - RNA, 19 nt, Homo sapiens
  misc_RNA (1)...(19): siRNA sense strand
gaacaaaugcagccuccaa

SEQ ID NO: 1639930 - RNA, 19 nt, Homo sapiens
  misc_RNA (1)...(19): siRNA sense strand
gcagcagucuucucauuca

SEQ ID NO: 1639931 - RNA, 19 nt, Homo sapiens
  misc_RNA (1)...(19): siRNA sense strand
gaaaugaaacuucuacaac

SEQ ID NO: 1639932 - RNA, 19 nt, Homo sapiens
  misc_RNA (1)...(19): siRNA sense strand
uaccagaccagauaauuua

SEQ ID NO: 1639933 - RNA, 19 nt, Homo sapiens
  misc_RNA (1)...(19): siRNA sense strand
aaauacaacuccuugcaaa

SEQ ID NO: 1639934 - RNA, 19 nt, Homo sapiens
  misc_RNA (1)...(19): siRNA sense strand
cagcaguuaucuucaguuu

SEQ ID NO: 1639935 - RNA, 19 nt, Homo sapiens
  misc_RNA (1)...(19): siRNA sense strand
gcaccgaacucaauuucuc

SEQ ID NO: 1639936 - RNA, 19 nt, Homo sapiens
  misc_RNA (1)...(19): siRNA sense strand
guaaugagaauguucaaga

SEQ ID NO: 1639937 - RNA, 19 nt, Homo sapiens
  misc_RNA (1)...(19): siRNA sense strand
gaaauacaacuccuugcaa

SEQ ID NO: 1639938 - RNA, 19 nt, Homo sapiens
  misc_RNA (1)...(19): siRNA sense strand
gaacaacaugccuggaauu

SEQ ID NO: 1639939 - RNA, 19 nt, Homo sapiens
  misc_RNA (1)...(19): siRNA sense strand
ggaaaugaaacuucuacaa

SEQ ID NO: 1639940 - RNA, 19 nt, Homo sapiens
  misc_RNA (1)...(19): siRNA sense strand
gcagacuucucacaugaug

SEQ ID NO: 1639941 - RNA, 19 nt, Homo sapiens
  misc_RNA (1)...(19): siRNA sense strand
ugagucagcuucagaauac

SEQ ID NO: 1639942 - RNA, 19 nt, Homo sapiens
  misc_RNA (1)...(19): siRNA sense strand
cagagacccugacaacuau

SEQ ID NO: 1639943 - RNA, 19 nt, Homo sapiens
  misc_RNA (1)...(19): siRNA sense strand
gaagaucucaugauguuca

SEQ ID NO: 1639944 - RNA, 19 nt, Homo sapiens
  misc_RNA (1)...(19): siRNA sense strand
gcguagggauauugaaauu

SEQ ID NO: 1639945 - RNA, 19 nt, Homo sapiens
  misc_RNA (1)...(19): siRNA sense strand
ccaaagcaccucacuaugu

SEQ ID NO: 1639946 - RNA, 19 nt, Homo sapiens
  misc_RNA (1)...(19): siRNA sense strand
ugaaccaacugcagaauuc

SEQ ID NO: 1639947 - RNA, 19 nt, Homo sapiens
  misc_RNA (1)...(19): siRNA sense strand
cagagucaguccacaguuu

SEQ ID NO: 1639948 - RNA, 19 nt, Homo sapiens
  misc_RNA (1)...(19): siRNA sense strand
gaauagugguacccaacaa

SEQ ID NO: 1639949 - RNA, 19 nt, Homo sapiens
  misc_RNA (1)...(19): siRNA sense strand
gauuaagagugaagauguu

SEQ ID NO: 1639950 - RNA, 19 nt, Homo sapiens
  misc_RNA (1)...(19): siRNA sense strand
caaacacccucuucuccaa

SEQ ID NO: 1639951 - RNA, 19 nt, Homo sapiens
  misc_RNA (1)...(19): siRNA sense strand
gacaaaugcuggaagaucu

SEQ ID NO: 1639952 - RNA, 19 nt, Homo sapiens
  misc_RNA (1)...(19): siRNA sense strand
ccugaggacuugcuggaua

SEQ ID NO: 1639953 - RNA, 19 nt, Homo sapiens
  misc_RNA (1)...(19): siRNA sense strand
caacagcaagcuccaauau

SEQ ID NO: 1639954 - RNA, 19 nt, Homo sapiens
  misc_RNA (1)...(19): siRNA sense strand
gcaagggaaugagaugaug

SEQ ID NO: 1639955 - RNA, 19 nt, Homo sapiens
  misc_RNA (1)...(19): siRNA sense strand
guacagugguuaauuuguc

SEQ ID NO: 1639956 - RNA, 19 nt, Homo sapiens
  misc_RNA (1)...(19): siRNA sense strand
ggaaaggagcugaagauag

SEQ ID NO: 1639957 - RNA, 19 nt, Homo sapiens
  misc_RNA (1)...(19): siRNA sense strand
guaaagaagagcccuaugu

SEQ ID NO: 1639958 - RNA, 19 nt, Homo sapiens
  misc_RNA (1)...(19): siRNA sense strand
caccaaacaugauauucaa

SEQ ID NO: 1639959 - RNA, 19 nt, Homo sapiens
  misc_RNA (1)...(19): siRNA sense strand
caaccaacauauuucuuuc

SEQ ID NO: 1639960 - RNA, 19 nt, Homo sapiens
  misc_RNA (1)...(19): siRNA sense strand
ucacuucaaucuggaaauu

SEQ ID NO: 1639961 - RNA, 19 nt, Homo sapiens
  misc_RNA (1)...(19): siRNA sense strand
gagaaacucagucuagaga

SEQ ID NO: 1639962 - RNA, 19 nt, Homo sapiens
  misc_RNA (1)...(19): siRNA sense strand
gugaagauguuacuccaau

SEQ ID NO: 1639963 - RNA, 19 nt, Homo sapiens
  misc_RNA (1)...(19): siRNA sense strand
gaagaggccaugaaagcaa

SEQ ID NO: 1639964 - RNA, 19 nt, Homo sapiens
  misc_RNA (1)...(19): siRNA sense strand
gaauguaaaugugaagaag

SEQ ID NO: 1639965 - RNA, 19 nt, Homo sapiens
  misc_RNA (1)...(19): siRNA sense strand
gagcaccaguuccuacaau

SEQ ID NO: 1639966 - RNA, 19 nt, Homo sapiens
  misc_RNA (1)...(19): siRNA sense strand
caagagaaacucagucuag

SEQ ID NO: 1639967 - RNA, 19 nt, Homo sapiens
  misc_RNA (1)...(19): siRNA sense strand
uaaagaagagcccuauguu

SEQ ID NO: 1639968 - RNA, 19 nt, Homo sapiens
  misc_RNA (1)...(19): siRNA sense strand
caacagcccaugcaauuuc

SEQ ID NO: 1639969 - RNA, 19 nt, Homo sapiens
  misc_RNA (1)...(19): siRNA sense strand
gauccuagcaacaacauga

SEQ ID NO: 1639970 - RNA, 19 nt, Homo sapiens
  misc_RNA (1)...(19): siRNA sense strand
cagcaaggcuuuccuacag

SEQ ID NO: 1639971 - RNA, 19 nt, Homo sapiens
  misc_RNA (1)...(19): siRNA sense strand
gcagucaccacuacaagaa

SEQ ID NO: 1639972 - RNA, 19 nt, Homo sapiens
  misc_RNA (1)...(19): siRNA sense strand
gcaaguaacucucuucuua

SEQ ID NO: 1639973 - RNA, 19 nt, Homo sapiens
  misc_RNA (1)...(19): siRNA sense strand
gaaaggagcugaagauagu

SEQ ID NO: 1639974 - RNA, 19 nt, Homo sapiens
  misc_RNA (1)...(19): siRNA sense strand
gcaaagaaguggacauuga

SEQ ID NO: 1639975 - RNA, 19 nt, Homo sapiens
  misc_RNA (1)...(19): siRNA sense strand
caacagcgaugcacuauug

SEQ ID NO: 1639976 - RNA, 19 nt, Homo sapiens
  misc_RNA (1)...(19): siRNA sense strand
caacagaaccagucaauuu

SEQ ID NO: 1639977 - RNA, 19 nt, Homo sapiens
  misc_RNA (1)...(19): siRNA sense strand
gcaguuaucuucaguuuua

SEQ ID NO: 1639978 - RNA, 19 nt, Homo sapiens
  misc_RNA (1)...(19): siRNA sense strand
guacaagggucaccuaguu

SEQ ID NO: 1639979 - RNA, 19 nt, Homo sapiens
  misc_RNA (1)...(19): siRNA sense strand
caacuugacuggcuccuuu

SEQ ID NO: 1639980 - RNA, 19 nt, Homo sapiens
  misc_RNA (1)...(19): siRNA sense strand
caacaugccuggaauucaa

SEQ ID NO: 1639981 - RNA, 19 nt, Homo sapiens
  misc_RNA (1)...(19): siRNA sense strand
guagggauauugaaauuga

SEQ ID NO: 1639982 - RNA, 19 nt, Homo sapiens
  misc_RNA (1)...(19): siRNA sense strand
ucacagcacucaauaguug

SEQ ID NO: 1639983 - RNA, 19 nt, Homo sapiens
  misc_RNA (1)...(19): siRNA sense strand
gcaacagucuccucuuuau

SEQ ID NO: 1639984 - RNA, 19 nt, Homo sapiens
  misc_RNA (1)...(19): siRNA sense strand
ccacuggcauccucuauaa

SEQ ID NO: 1639985 - RNA, 19 nt, Homo sapiens
  misc_RNA (1)...(19): siRNA sense strand
gaaaagcaguuaaccagua

SEQ ID NO: 1639986 - RNA, 19 nt, Homo sapiens
  misc_RNA (1)...(19): siRNA sense strand
ggaaugagaugaugucacu

SEQ ID NO: 1639987 - RNA, 19 nt, Homo sapiens
  misc_RNA (1)...(19): siRNA sense strand
gaaaacaucucaaacauag

SEQ ID NO: 1639988 - RNA, 19 nt, Homo sapiens
  misc_RNA (1)...(19): siRNA sense strand
gcaguaugauuaagaguga

SEQ ID NO: 1639989 - RNA, 19 nt, Homo sapiens
  misc_RNA (1)...(19): siRNA sense strand
gcaaggcuuuccuacagua

SEQ ID NO: 1639990 - RNA, 19 nt, Homo sapiens
  misc_RNA (1)...(19): siRNA sense strand
ugacaacacuucuuucuca

SEQ ID NO: 1639991 - RNA, 19 nt, Homo sapiens
  misc_RNA (1)...(19): siRNA sense strand
gagaugaugucacuucaau

SEQ ID NO: 1639992 - RNA, 19 nt, Homo sapiens
  misc_RNA (1)...(19): siRNA sense strand
gaaacucagucuagagaga

SEQ ID NO: 1639993 - RNA, 19 nt, Homo sapiens
  misc_RNA (1)...(19): siRNA sense strand
gcagcaggcuacacaguuu

SEQ ID NO: 1639994 - RNA, 19 nt, Homo sapiens
  misc_RNA (1)...(19): siRNA sense strand
gaaaggagaagaagaagug

SEQ ID NO: 1639995 - RNA, 19 nt, Homo sapiens
  misc_RNA (1)...(19): siRNA sense strand
uaaugaaccuguaguguug

SEQ ID NO: 1639996 - RNA, 19 nt, Homo sapiens
  misc_RNA (1)...(19): siRNA sense strand
uaucaggccugcagaguaa

SEQ ID NO: 1639997 - RNA, 19 nt, Homo sapiens
  misc_RNA (1)...(19): siRNA sense strand
ugaaggcacuacuguuaua

SEQ ID NO: 1639998 - RNA, 19 nt, Homo sapiens
  misc_RNA (1)...(19): siRNA sense strand
gaggaaugcugaugucgaa

SEQ ID NO: 1639999 - RNA, 19 nt, Homo sapiens
  misc_RNA (1)...(19): siRNA sense strand
gcagucaaccaacauauuu

SEQ ID NO: 1640000 - RNA, 19 nt, Homo sapiens
  misc_RNA (1)...(19): siRNA sense strand
gacaaucaaccucaaguua

SEQ ID NO: 1640001 - RNA, 19 nt, Homo sapiens
  misc_RNA (1)...(19): siRNA sense strand
uugcauagcuguucaguga

SEQ ID NO: 1640002 - RNA, 19 nt, Homo sapiens
  misc_RNA (1)...(19): siRNA sense strand
gaacucaauuucuccacuu

SEQ ID NO: 1640003 - RNA, 19 nt, Homo sapiens
  misc_RNA (1)...(19): siRNA sense strand
gggaauauauguagugaca

SEQ ID NO: 1640004 - RNA, 19 nt, Homo sapiens
  misc_RNA (1)...(19): siRNA sense strand
caaagcaccucacuaugug

SEQ ID NO: 1640005 - RNA, 19 nt, Homo sapiens
  misc_RNA (1)...(19): siRNA sense strand
caucaggaauguucuuauu

SEQ ID NO: 1640006 - RNA, 19 nt, Homo sapiens
  misc_RNA (1)...(19): siRNA sense strand
acaacaagguaaugguuua

SEQ ID NO: 1640007 - RNA, 19 nt, Homo sapiens
  misc_RNA (1)...(19): siRNA sense strand
gcaaaugcagugugaauug

SEQ ID NO: 1640008 - RNA, 19 nt, Homo sapiens
  misc_RNA (1)...(19): siRNA sense strand
gcacuacuguuauagaagu

SEQ ID NO: 1640009 - RNA, 19 nt, Homo sapiens
  misc_RNA (1)...(19): siRNA sense strand
caacaagucagucaaauuc

SEQ ID NO: 1640010 - RNA, 19 nt, Homo sapiens
  misc_RNA (1)...(19): siRNA sense strand
ggaacuauuucaucagaau

SEQ ID NO: 1640011 - RNA, 19 nt, Homo sapiens
  misc_RNA (1)...(19): siRNA sense strand
cagaguaacuggacgaaau

SEQ ID NO: 1640012 - RNA, 19 nt, Homo sapiens
  misc_RNA (1)...(19): siRNA sense strand
ucaggaauguucuuauuug

SEQ ID NO: 1640013 - RNA, 19 nt, Homo sapiens
  misc_RNA (1)...(19): siRNA sense strand
uuacagggcucuucaguuc

SEQ ID NO: 1640014 - RNA, 19 nt, Homo sapiens
  misc_RNA (1)...(19): siRNA sense strand
uguaagcccuggaauguuu

SEQ ID NO: 1640015 - RNA, 19 nt, Homo sapiens
  misc_RNA (1)...(19): siRNA sense strand
uggaagaucucaugauguu

SEQ ID NO: 1640016 - RNA, 19 nt, Homo sapiens
  misc_RNA (1)...(19): siRNA sense strand
gaaaacacguuaucuaauc

SEQ ID NO: 1640017 - RNA, 19 nt, Homo sapiens
  misc_RNA (1)...(19): siRNA sense strand
uggaagagcugaaaguguu

SEQ ID NO: 1640018 - RNA, 19 nt, Homo sapiens
  misc_RNA (1)...(19): siRNA sense strand
ccagagacccugacaacua

SEQ ID NO: 1640019 - RNA, 19 nt, Homo sapiens
  misc_RNA (1)...(19): siRNA sense strand
gcuggaagaucucaugaug

SEQ ID NO: 1640020 - RNA, 19 nt, Homo sapiens
  misc_RNA (1)...(19): siRNA sense strand
agaagaaacuggaacacaa

SEQ ID NO: 1640021 - RNA, 19 nt, Homo sapiens
  misc_RNA (1)...(19): siRNA sense strand
gaucaacucagcaaacauu

SEQ ID NO: 1640022 - RNA, 19 nt, Homo sapiens
  misc_RNA (1)...(19): siRNA sense strand
gaagagcccuauguugugu

SEQ ID NO: 1640023 - RNA, 19 nt, Homo sapiens
  misc_RNA (1)...(19): siRNA sense strand
ccauagcucuccucagauu

SEQ ID NO: 1640024 - RNA, 19 nt, Homo sapiens
  misc_RNA (1)...(19): siRNA sense strand
acagcaagcuccaauauca

SEQ ID NO: 1640025 - RNA, 19 nt, Homo sapiens
  misc_RNA (1)...(19): siRNA sense strand
cagcagacuucucacauga

SEQ ID NO: 1640026 - RNA, 19 nt, Homo sapiens
  misc_RNA (1)...(19): siRNA sense strand
gaguuaauaucaugaggaa

SEQ ID NO: 1640027 - RNA, 19 nt, Homo sapiens
  misc_RNA (1)...(19): siRNA sense strand
gaacuggaguaaagaagag

SEQ ID NO: 1640028 - RNA, 19 nt, Homo sapiens
  misc_RNA (1)...(19): siRNA sense strand
caacaacaacagagcauuu

SEQ ID NO: 1640029 - RNA, 19 nt, Homo sapiens
  misc_RNA (1)...(19): siRNA sense strand
gaacaaaugcagccuccaa

SEQ ID NO: 1640030 - RNA, 19 nt, Homo sapiens
  misc_RNA (1)...(19): siRNA sense strand
gcagcagucuucucauuca

SEQ ID NO: 1640031 - RNA, 19 nt, Homo sapiens
  misc_RNA (1)...(19): siRNA sense strand
gaaaugaaacuucuacaac

SEQ ID NO: 1640032 - RNA, 19 nt, Homo sapiens
  misc_RNA (1)...(19): siRNA sense strand
uaccagaccagauaauuua

SEQ ID NO: 1640033 - RNA, 19 nt, Homo sapiens
  misc_RNA (1)...(19): siRNA sense strand
aaauacaacuccuugcaaa

SEQ ID NO: 1640034 - RNA, 19 nt, Homo sapiens
  misc_RNA (1)...(19): siRNA sense strand
cagcaguuaucuucaguuu

SEQ ID NO: 1640035 - RNA, 19 nt, Homo sapiens
  misc_RNA (1)...(19): siRNA sense strand
gcaccgaacucaauuucuc

SEQ ID NO: 1640036 - RNA, 19 nt, Homo sapiens
  misc_RNA (1)...(19): siRNA sense strand
guaaugagaauguucaaga

SEQ ID NO: 1640037 - RNA, 19 nt, Homo sapiens
  misc_RNA (1)...(19): siRNA sense strand
gaaauacaacuccuugcaa

SEQ ID NO: 1640038 - RNA, 19 nt, Homo sapiens
  misc_RNA (1)...(19): siRNA sense strand
gaacaacaugccuggaauu

SEQ ID NO: 1640039 - RNA, 19 nt, Homo sapiens
  misc_RNA (1)...(19): siRNA sense strand
ggaaaugaaacuucuacaa

SEQ ID NO: 1640040 - RNA, 19 nt, Homo sapiens
  misc_RNA (1)...(19): siRNA sense strand
gcagacuucucacaugaug

SEQ ID NO: 1640041 - RNA, 19 nt, Homo sapiens
  misc_RNA (1)...(19): siRNA sense strand
ugagucagcuucagaauac

SEQ ID NO: 1640042 - RNA, 19 nt, Homo sapiens
  misc_RNA (1)...(19): siRNA sense strand
cagagacccugacaacuau

SEQ ID NO: 1640043 - RNA, 19 nt, Homo sapiens
  misc_RNA (1)...(19): siRNA sense strand
gaagaucucaugauguuca

SEQ ID NO: 1640044 - RNA, 19 nt, Homo sapiens
  misc_RNA (1)...(19): siRNA sense strand
gcguagggauauugaaauu

SEQ ID NO: 1640045 - RNA, 19 nt, Homo sapiens
  misc_RNA (1)...(19): siRNA sense strand
ccaaagcaccucacuaugu

SEQ ID NO: 1640046 - RNA, 19 nt, Homo sapiens
  misc_RNA (1)...(19): siRNA sense strand
ugaaccaacugcagaauuc

SEQ ID NO: 1640047 - RNA, 19 nt, Homo sapiens
  misc_RNA (1)...(19): siRNA sense strand
cagagucaguccacaguuu

SEQ ID NO: 1640048 - RNA, 19 nt, Homo sapiens
  misc_RNA (1)...(19): siRNA sense strand
gaauagugguacccaacaa

SEQ ID NO: 1640049 - RNA, 19 nt, Homo sapiens
  misc_RNA (1)...(19): siRNA sense strand
gauuaagagugaagauguu

SEQ ID NO: 1640050 - RNA, 19 nt, Homo sapiens
  misc_RNA (1)...(19): siRNA sense strand
caaacacccucuucuccaa

SEQ ID NO: 1640051 - RNA, 19 nt, Homo sapiens
  misc_RNA (1)...(19): siRNA sense strand
gacaaaugcuggaagaucu

SEQ ID NO: 1640052 - RNA, 19 nt, Homo sapiens
  misc_RNA (1)...(19): siRNA sense strand
ccugaggacuugcuggaua

SEQ ID NO: 1640053 - RNA, 19 nt, Homo sapiens
  misc_RNA (1)...(19): siRNA sense strand
caacagcaagcuccaauau

SEQ ID NO: 1640054 - RNA, 19 nt, Homo sapiens
  misc_RNA (1)...(19): siRNA sense strand
gcaagggaaugagaugaug

SEQ ID NO: 1640055 - RNA, 19 nt, Homo sapiens
  misc_RNA (1)...(19): siRNA sense strand
guacagugguuaauuuguc

SEQ ID NO: 1640056 - RNA, 19 nt, Homo sapiens
  misc_RNA (1)...(19): siRNA sense strand
ggaaaggagcugaagauag

SEQ ID NO: 1640057 - RNA, 19 nt, Homo sapiens
  misc_RNA (1)...(19): siRNA sense strand
guaaagaagagcccuaugu

SEQ ID NO: 1640058 - RNA, 19 nt, Homo sapiens
  misc_RNA (1)...(19): siRNA sense strand
caccaaacaugauauucaa

SEQ ID NO: 1640059 - RNA, 19 nt, Homo sapiens
  misc_RNA (1)...(19): siRNA sense strand
caaccaacauauuucuuuc

SEQ ID NO: 1640060 - RNA, 19 nt, Homo sapiens
  misc_RNA (1)...(19): siRNA sense strand
ucacuucaaucuggaaauu

SEQ ID NO: 1640061 - RNA, 19 nt, Homo sapiens
  misc_RNA (1)...(19): siRNA sense strand
gagaaacucagucuagaga

SEQ ID NO: 1640062 - RNA, 19 nt, Homo sapiens
  misc_RNA (1)...(19): siRNA sense strand
gugaagauguuacuccaau

SEQ ID NO: 1640063 - RNA, 19 nt, Homo sapiens
  misc_RNA (1)...(19): siRNA sense strand
gaagaggccaugaaagcaa

SEQ ID NO: 1640064 - RNA, 19 nt, Homo sapiens
  misc_RNA (1)...(19): siRNA sense strand
gaauguaaaugugaagaag

SEQ ID NO: 1640065 - RNA, 19 nt, Homo sapiens
  misc_RNA (1)...(19): siRNA sense strand
gagcaccaguuccuacaau

SEQ ID NO: 1640066 - RNA, 19 nt, Homo sapiens
  misc_RNA (1)...(19): siRNA sense strand
caagagaaacucagucuag

SEQ ID NO: 1640067 - RNA, 19 nt, Homo sapiens
  misc_RNA (1)...(19): siRNA sense strand
uaaagaagagcccuauguu

SEQ ID NO: 1640068 - RNA, 19 nt, Homo sapiens
  misc_RNA (1)...(19): siRNA sense strand
caacagcccaugcaauuuc

SEQ ID NO: 1640069 - RNA, 19 nt, Homo sapiens
  misc_RNA (1)...(19): siRNA sense strand
gauccuagcaacaacauga

SEQ ID NO: 1640070 - RNA, 19 nt, Homo sapiens
  misc_RNA (1)...(19): siRNA sense strand
cagcaaggcuuuccuacag

SEQ ID NO: 1640071 - RNA, 19 nt, Homo sapiens
  misc_RNA (1)...(19): siRNA sense strand
gcagucaccacuacaagaa

SEQ ID NO: 1640072 - RNA, 19 nt, Homo sapiens
  misc_RNA (1)...(19): siRNA sense strand
gcaaguaacucucuucuua

SEQ ID NO: 1640073 - RNA, 19 nt, Homo sapiens
  misc_RNA (1)...(19): siRNA sense strand
gaaaggagcugaagauagu

SEQ ID NO: 1640074 - RNA, 19 nt, Homo sapiens
  misc_RNA (1)...(19): siRNA sense strand
gcaaagaaguggacauuga

SEQ ID NO: 1640075 - RNA, 19 nt, Homo sapiens
  misc_RNA (1)...(19): siRNA sense strand
caacagcgaugcacuauug

SEQ ID NO: 1640076 - RNA, 19 nt, Homo sapiens
  misc_RNA (1)...(19): siRNA sense strand
caacagaaccagucaauuu

SEQ ID NO: 1640077 - RNA, 19 nt, Homo sapiens
  misc_RNA (1)...(19): siRNA sense strand
gcaguuaucuucaguuuua

SEQ ID NO: 1640078 - RNA, 19 nt, Homo sapiens
  misc_RNA (1)...(19): siRNA sense strand
guacaagggucaccuaguu

SEQ ID NO: 1640079 - RNA, 19 nt, Homo sapiens
  misc_RNA (1)...(19): siRNA sense strand
caacuugacuggcuccuuu

SEQ ID NO: 1640080 - RNA, 19 nt, Homo sapiens
  misc_RNA (1)...(19): siRNA sense strand
caacaugccuggaauucaa

SEQ ID NO: 1640081 - RNA, 19 nt, Homo sapiens
  misc_RNA (1)...(19): siRNA sense strand
guagggauauugaaauuga

SEQ ID NO: 1640082 - RNA, 19 nt, Homo sapiens
  misc_RNA (1)...(19): siRNA sense strand
ucacagcacucaauaguug

SEQ ID NO: 1640083 - RNA, 19 nt, Homo sapiens
  misc_RNA (1)...(19): siRNA sense strand
gcaacagucuccucuuuau

SEQ ID NO: 1640084 - RNA, 19 nt, Homo sapiens
  misc_RNA (1)...(19): siRNA sense strand
ccacuggcauccucuauaa

SEQ ID NO: 1640085 - RNA, 19 nt, Homo sapiens
  misc_RNA (1)...(19): siRNA sense strand
gaaaagcaguuaaccagua

SEQ ID NO: 1640086 - RNA, 19 nt, Homo sapiens
  misc_RNA (1)...(19): siRNA sense strand
ggaaugagaugaugucacu

SEQ ID NO: 1640087 - RNA, 19 nt, Homo sapiens
  misc_RNA (1)...(19): siRNA sense strand
gaaaacaucucaaacauag

SEQ ID NO: 1640088 - RNA, 19 nt, Homo sapiens
  misc_RNA (1)...(19): siRNA sense strand
gcaguaugauuaagaguga

SEQ ID NO: 1640089 - RNA, 19 nt, Homo sapiens
  misc_RNA (1)...(19): siRNA sense strand
gcaaggcuuuccuacagua

SEQ ID NO: 1640090 - RNA, 19 nt, Homo sapiens
  misc_RNA (1)...(19): siRNA sense strand
ugacaacacuucuuucuca

SEQ ID NO: 1640091 - RNA, 19 nt, Homo sapiens
  misc_RNA (1)...(19): siRNA sense strand
gagaugaugucacuucaau

SEQ ID NO: 1640092 - RNA, 19 nt, Homo sapiens
  misc_RNA (1)...(19): siRNA sense strand
gaaacucagucuagagaga

SEQ ID NO: 1640093 - RNA, 19 nt, Homo sapiens
  misc_RNA (1)...(19): siRNA sense strand
gcagcaggcuacacaguuu

SEQ ID NO: 1640094 - RNA, 19 nt, Homo sapiens
  misc_RNA (1)...(19): siRNA sense strand
gaaaggagaagaagaagug

SEQ ID NO: 1640095 - RNA, 19 nt, Homo sapiens
  misc_RNA (1)...(19): siRNA sense strand
uaaugaaccuguaguguug

SEQ ID NO: 1640096 - RNA, 19 nt, Homo sapiens
  misc_RNA (1)...(19): siRNA sense strand
uaucaggccugcagaguaa

SEQ ID NO: 1640097 - RNA, 19 nt, Homo sapiens
  misc_RNA (1)...(19): siRNA sense strand
ugaaggcacuacuguuaua

SEQ ID NO: 1640098 - RNA, 19 nt, Homo sapiens
  misc_RNA (1)...(19): siRNA sense strand
gaggaaugcugaugucgaa

SEQ ID NO: 1640099 - RNA, 19 nt, Homo sapiens
  misc_RNA (1)...(19): siRNA sense strand
gcagucaaccaacauauuu

SEQ ID NO: 1640100 - RNA, 19 nt, Homo sapiens
  misc_RNA (1)...(19): siRNA sense strand
gacaaucaaccucaaguua

SEQ ID NO: 1640101 - RNA, 19 nt, Homo sapiens
  misc_RNA (1)...(19): siRNA sense strand
uugcauagcuguucaguga

SEQ ID NO: 1640102 - RNA, 19 nt, Homo sapiens
  misc_RNA (1)...(19): siRNA sense strand
gaacucaauuucuccacuu

SEQ ID NO: 1640103 - RNA, 19 nt, Homo sapiens
  misc_RNA (1)...(19): siRNA sense strand
gggaauauauguagugaca

SEQ ID NO: 1640104 - RNA, 19 nt, Homo sapiens
  misc_RNA (1)...(19): siRNA sense strand
caaagcaccucacuaugug

SEQ ID NO: 1640105 - RNA, 19 nt, Homo sapiens
  misc_RNA (1)...(19): siRNA sense strand
caucaggaauguucuuauu

SEQ ID NO: 1640106 - RNA, 19 nt, Homo sapiens
  misc_RNA (1)...(19): siRNA sense strand
acaacaagguaaugguuua

SEQ ID NO: 1640107 - RNA, 19 nt, Homo sapiens
  misc_RNA (1)...(19): siRNA sense strand
gcaaaugcagugugaauug

SEQ ID NO: 1640108 - RNA, 19 nt, Homo sapiens
  misc_RNA (1)...(19): siRNA sense strand
gcacuacuguuauagaagu

SEQ ID NO: 1640109 - RNA, 19 nt, Homo sapiens
  misc_RNA (1)...(19): siRNA sense strand
caacaagucagucaaauuc

SEQ ID NO: 1640110 - RNA, 19 nt, Homo sapiens
  misc_RNA (1)...(19): siRNA sense strand
ggaacuauuucaucagaau

SEQ ID NO: 1640111 - RNA, 19 nt, Homo sapiens
  misc_RNA (1)...(19): siRNA sense strand
cagaguaacuggacgaaau

SEQ ID NO: 1640112 - RNA, 19 nt, Homo sapiens
  misc_RNA (1)...(19): siRNA sense strand
ucaggaauguucuuauuug

SEQ ID NO: 1640113 - RNA, 19 nt, Homo sapiens
  misc_RNA (1)...(19): siRNA sense strand
uuacagggcucuucaguuc

SEQ ID NO: 1640114 - RNA, 19 nt, Homo sapiens
  misc_RNA (1)...(19): siRNA sense strand
uguaagcccuggaauguuu

SEQ ID NO: 1640115 - RNA, 19 nt, Homo sapiens
  misc_RNA (1)...(19): siRNA sense strand
uggaagaucucaugauguu

SEQ ID NO: 1640116 - RNA, 19 nt, Homo sapiens
  misc_RNA (1)...(19): siRNA sense strand
gaaaacacguuaucuaauc

SEQ ID NO: 1640117 - RNA, 19 nt, Homo sapiens
  misc_RNA (1)...(19): siRNA sense strand
uggaagagcugaaaguguu

SEQ ID NO: 1640118 - RNA, 19 nt, Homo sapiens
  misc_RNA (1)...(19): siRNA sense strand
ccagagacccugacaacua

SEQ ID NO: 1640119 - RNA, 19 nt, Homo sapiens
  misc_RNA (1)...(19): siRNA sense strand
gcuggaagaucucaugaug

SEQ ID NO: 1640120 - RNA, 19 nt, Homo sapiens
  misc_RNA (1)...(19): siRNA sense strand
agaagaaacuggaacacaa

SEQ ID NO: 1640121 - RNA, 19 nt, Homo sapiens
  misc_RNA (1)...(19): siRNA sense strand
gaucaacucagcaaacauu

SEQ ID NO: 1640122 - RNA, 19 nt, Homo sapiens
  misc_RNA (1)...(19): siRNA sense strand
gaagagcccuauguugugu

SEQ ID NO: 1640123 - RNA, 19 nt, Homo sapiens
  misc_RNA (1)...(19): siRNA sense strand
ccauagcucuccucagauu

SEQ ID NO: 1640124 - RNA, 19 nt, Homo sapiens
  misc_RNA (1)...(19): siRNA sense strand
acagcaagcuccaauauca

SEQ ID NO: 1640125 - RNA, 19 nt, Homo sapiens
  misc_RNA (1)...(19): siRNA sense strand
cagcagacuucucacauga

SEQ ID NO: 1640126 - RNA, 19 nt, Homo sapiens
  misc_RNA (1)...(19): siRNA sense strand
gaguuaauaucaugaggaa

SEQ ID NO: 1640127 - RNA, 19 nt, Homo sapiens
  misc_RNA (1)...(19): siRNA sense strand
gaacuggaguaaagaagag

SEQ ID NO: 1640128 - RNA, 19 nt, Homo sapiens
  misc_RNA (1)...(19): siRNA sense strand
caacaacaacagagcauuu

SEQ ID NO: 1640129 - RNA, 19 nt, Homo sapiens
  misc_RNA (1)...(19): siRNA sense strand
gaacaaaugcagccuccaa

SEQ ID NO: 1640130 - RNA, 19 nt, Homo sapiens
  misc_RNA (1)...(19): siRNA sense strand
gcagcagucuucucauuca

SEQ ID NO: 1640131 - RNA, 19 nt, Homo sapiens
  misc_RNA (1)...(19): siRNA sense strand
gaaaugaaacuucuacaac

SEQ ID NO: 1640132 - RNA, 19 nt, Homo sapiens
  misc_RNA (1)...(19): siRNA sense strand
uaccagaccagauaauuua

SEQ ID NO: 1640133 - RNA, 19 nt, Homo sapiens
  misc_RNA (1)...(19): siRNA sense strand
aaauacaacuccuugcaaa

SEQ ID NO: 1640134 - RNA, 19 nt, Homo sapiens
  misc_RNA (1)...(19): siRNA sense strand
cagcaguuaucuucaguuu

SEQ ID NO: 1640135 - RNA, 19 nt, Homo sapiens
  misc_RNA (1)...(19): siRNA sense strand
gcaccgaacucaauuucuc

SEQ ID NO: 1640136 - RNA, 19 nt, Homo sapiens
  misc_RNA (1)...(19): siRNA sense strand
guaaugagaauguucaaga

SEQ ID NO: 1640137 - RNA, 19 nt, Homo sapiens
  misc_RNA (1)...(19): siRNA sense strand
gaaauacaacuccuugcaa

SEQ ID NO: 1640138 - RNA, 19 nt, Homo sapiens
  misc_RNA (1)...(19): siRNA sense strand
gaacaacaugccuggaauu

SEQ ID NO: 1640139 - RNA, 19 nt, Homo sapiens
  misc_RNA (1)...(19): siRNA sense strand
ggaaaugaaacuucuacaa

SEQ ID NO: 1640140 - RNA, 19 nt, Homo sapiens
  misc_RNA (1)...(19): siRNA sense strand
gcagacuucucacaugaug

SEQ ID NO: 1640141 - RNA, 19 nt, Homo sapiens
  misc_RNA (1)...(19): siRNA sense strand
ugagucagcuucagaauac

SEQ ID NO: 1640142 - RNA, 19 nt, Homo sapiens
  misc_RNA (1)...(19): siRNA sense strand
cagagacccugacaacuau

SEQ ID NO: 1640143 - RNA, 19 nt, Homo sapiens
  misc_RNA (1)...(19): siRNA sense strand
gaagaucucaugauguuca

SEQ ID NO: 1640144 - RNA, 19 nt, Homo sapiens
  misc_RNA (1)...(19): siRNA sense strand
gcguagggauauugaaauu

SEQ ID NO: 1640145 - RNA, 19 nt, Homo sapiens
  misc_RNA (1)...(19): siRNA sense strand
ccaaagcaccucacuaugu

SEQ ID NO: 1640146 - RNA, 19 nt, Homo sapiens
  misc_RNA (1)...(19): siRNA sense strand
ugaaccaacugcagaauuc

SEQ ID NO: 1640147 - RNA, 19 nt, Homo sapiens
  misc_RNA (1)...(19): siRNA sense strand
cagagucaguccacaguuu

SEQ ID NO: 1640148 - RNA, 19 nt, Homo sapiens
  misc_RNA (1)...(19): siRNA sense strand
gaauagugguacccaacaa

SEQ ID NO: 1640149 - RNA, 19 nt, Homo sapiens
  misc_RNA (1)...(19): siRNA sense strand
gauuaagagugaagauguu

SEQ ID NO: 1640150 - RNA, 19 nt, Homo sapiens
  misc_RNA (1)...(19): siRNA sense strand
caaacacccucuucuccaa

SEQ ID NO: 1640151 - RNA, 19 nt, Homo sapiens
  misc_RNA (1)...(19): siRNA sense strand
gacaaaugcuggaagaucu

SEQ ID NO: 1640152 - RNA, 19 nt, Homo sapiens
  misc_RNA (1)...(19): siRNA sense strand
ccugaggacuugcuggaua

SEQ ID NO: 1640153 - RNA, 19 nt, Homo sapiens
  misc_RNA (1)...(19): siRNA sense strand
caacagcaagcuccaauau

SEQ ID NO: 1640154 - RNA, 19 nt, Homo sapiens
  misc_RNA (1)...(19): siRNA sense strand
gcaagggaaugagaugaug

SEQ ID NO: 1640155 - RNA, 19 nt, Homo sapiens
  misc_RNA (1)...(19): siRNA sense strand
guacagugguuaauuuguc

SEQ ID NO: 1640156 - RNA, 19 nt, Homo sapiens
  misc_RNA (1)...(19): siRNA sense strand
ggaaaggagcugaagauag

SEQ ID NO: 1640157 - RNA, 19 nt, Homo sapiens
  misc_RNA (1)...(19): siRNA sense strand
guaaagaagagcccuaugu

SEQ ID NO: 1640158 - RNA, 19 nt, Homo sapiens
  misc_RNA (1)...(19): siRNA sense strand
caccaaacaugauauucaa

SEQ ID NO: 1640159 - RNA, 19 nt, Homo sapiens
  misc_RNA (1)...(19): siRNA sense strand
caaccaacauauuucuuuc

SEQ ID NO: 1640160 - RNA, 19 nt, Homo sapiens
  misc_RNA (1)...(19): siRNA sense strand
ucacuucaaucuggaaauu

SEQ ID NO: 1640161 - RNA, 19 nt, Homo sapiens
  misc_RNA (1)...(19): siRNA sense strand
gagaaacucagucuagaga

SEQ ID NO: 1640162 - RNA, 19 nt, Homo sapiens
  misc_RNA (1)...(19): siRNA sense strand
gugaagauguuacuccaau

SEQ ID NO: 1640163 - RNA, 19 nt, Homo sapiens
  misc_RNA (1)...(19): siRNA sense strand
gaagaggccaugaaagcaa

SEQ ID NO: 1640164 - RNA, 19 nt, Homo sapiens
  misc_RNA (1)...(19): siRNA sense strand
gaauguaaaugugaagaag

SEQ ID NO: 1640165 - RNA, 19 nt, Homo sapiens
  misc_RNA (1)...(19): siRNA sense strand
gagcaccaguuccuacaau

SEQ ID NO: 1640166 - RNA, 19 nt, Homo sapiens
  misc_RNA (1)...(19): siRNA sense strand
caagagaaacucagucuag

SEQ ID NO: 1640167 - RNA, 19 nt, Homo sapiens
  misc_RNA (1)...(19): siRNA sense strand
uaaagaagagcccuauguu

SEQ ID NO: 1640168 - RNA, 19 nt, Homo sapiens
  misc_RNA (1)...(19): siRNA sense strand
caacagcccaugcaauuuc

SEQ ID NO: 1640169 - RNA, 19 nt, Homo sapiens
  misc_RNA (1)...(19): siRNA sense strand
gauccuagcaacaacauga

SEQ ID NO: 1640170 - RNA, 19 nt, Homo sapiens
  misc_RNA (1)...(19): siRNA sense strand
cagcaaggcuuuccuacag

SEQ ID NO: 1640171 - RNA, 19 nt, Homo sapiens
  misc_RNA (1)...(19): siRNA sense strand
gcagucaccacuacaagaa

SEQ ID NO: 1640172 - RNA, 19 nt, Homo sapiens
  misc_RNA (1)...(19): siRNA sense strand
gaagaacgcacccauguua

SEQ ID NO: 1640173 - RNA, 19 nt, Homo sapiens
  misc_RNA (1)...(19): siRNA sense strand
gaacaccggugagguauau

SEQ ID NO: 1640174 - RNA, 19 nt, Homo sapiens
  misc_RNA (1)...(19): siRNA sense strand
caacaugaacugccagaug

SEQ ID NO: 1640175 - RNA, 19 nt, Homo sapiens
  misc_RNA (1)...(19): siRNA sense strand
cgauuaaaguacugcauga

SEQ ID NO: 1640176 - RNA, 19 nt, Homo sapiens
  misc_RNA (1)...(19): siRNA sense strand
gacgaacaccggugaggua

SEQ ID NO: 1640177 - RNA, 19 nt, Homo sapiens
  misc_RNA (1)...(19): siRNA sense strand
caacaucacagucacauac

SEQ ID NO: 1640178 - RNA, 19 nt, Homo sapiens
  misc_RNA (1)...(19): siRNA sense strand
cuauuggugugccgauuaa

SEQ ID NO: 1640179 - RNA, 19 nt, Homo sapiens
  misc_RNA (1)...(19): siRNA sense strand
gaacgcacccauguuaaag

SEQ ID NO: 1640180 - RNA, 19 nt, Homo sapiens
  misc_RNA (1)...(19): siRNA sense strand
ggaaugggacguggaaaca

SEQ ID NO: 1640181 - RNA, 19 nt, Homo sapiens
  misc_RNA (1)...(19): siRNA sense strand
auacauccguggcagcaaa

SEQ ID NO: 1640182 - RNA, 19 nt, Homo sapiens
  misc_RNA (1)...(19): siRNA sense strand
ugccugacaugcugaagaa

SEQ ID NO: 1640183 - RNA, 19 nt, Homo sapiens
  misc_RNA (1)...(19): siRNA sense strand
ggaagaggacguggaaugg

SEQ ID NO: 1640184 - RNA, 19 nt, Homo sapiens
  misc_RNA (1)...(19): siRNA sense strand
aagcagaggacaacaugaa

SEQ ID NO: 1640185 - RNA, 19 nt, Homo sapiens
  misc_RNA (1)...(19): siRNA sense strand
caaguggccgcaagaggaa

SEQ ID NO: 1640186 - RNA, 19 nt, Homo sapiens
  misc_RNA (1)...(19): siRNA sense strand
agaacgcacccauguuaaa

SEQ ID NO: 1640187 - RNA, 19 nt, Homo sapiens
  misc_RNA (1)...(19): siRNA sense strand
gcacagcuggagcagguau

SEQ ID NO: 1640188 - RNA, 19 nt, Homo sapiens
  misc_RNA (1)...(19): siRNA sense strand
gaagcagaggacaacauga

SEQ ID NO: 1640189 - RNA, 19 nt, Homo sapiens
  misc_RNA (1)...(19): siRNA sense strand
ucuauuggugugccgauua

SEQ ID NO: 1640190 - RNA, 19 nt, Homo sapiens
  misc_RNA (1)...(19): siRNA sense strand
ugaagcagaggacaacaug

SEQ ID NO: 1640191 - RNA, 19 nt, Homo sapiens
  misc_RNA (1)...(19): siRNA sense strand
caucacagucacauacaga

SEQ ID NO: 1640192 - RNA, 19 nt, Homo sapiens
  misc_RNA (1)...(19): siRNA sense strand
ugaagaacgcacccauguu

SEQ ID NO: 1640193 - RNA, 19 nt, Homo sapiens
  misc_RNA (1)...(19): siRNA sense strand
acagucacauacagagaug

SEQ ID NO: 1640194 - RNA, 19 nt, Homo sapiens
  misc_RNA (1)...(19): siRNA sense strand
aaugggacguggaaacauc

SEQ ID NO: 1640195 - RNA, 19 nt, Homo sapiens
  misc_RNA (1)...(19): siRNA sense strand
cgaacaccggugagguaua

SEQ ID NO: 1640196 - RNA, 19 nt, Homo sapiens
  misc_RNA (1)...(19): siRNA sense strand
gcagaggacaacaugaacu

SEQ ID NO: 1640197 - RNA, 19 nt, Homo sapiens
  misc_RNA (1)...(19): siRNA sense strand
agaggaagaggacguggaa

SEQ ID NO: 1640198 - RNA, 19 nt, Homo sapiens
  misc_RNA (1)...(19): siRNA sense strand
ccaacaucacagucacaua

SEQ ID NO: 1640199 - RNA, 19 nt, Homo sapiens
  misc_RNA (1)...(19): siRNA sense strand
cugaagaacgcacccaugu

SEQ ID NO: 1640200 - RNA, 19 nt, Homo sapiens
  misc_RNA (1)...(19): siRNA sense strand
aagaacgcacccauguuaa

SEQ ID NO: 1640201 - RNA, 19 nt, Homo sapiens
  misc_RNA (1)...(19): siRNA sense strand
cagaggacaacaugaacug

SEQ ID NO: 1640202 - RNA, 19 nt, Homo sapiens
  misc_RNA (1)...(19): siRNA sense strand
aggaagaggacguggaaug

SEQ ID NO: 1640203 - RNA, 19 nt, Homo sapiens
  misc_RNA (1)...(19): siRNA sense strand
ucacagucacauacagaga

SEQ ID NO: 1640204 - RNA, 19 nt, Homo sapiens
  misc_RNA (1)...(19): siRNA sense strand
gaaugggacguggaaacau

SEQ ID NO: 1640205 - RNA, 19 nt, Homo sapiens
  misc_RNA (1)...(19): siRNA sense strand
gcagagaagucuuguagaa

SEQ ID NO: 1640206 - RNA, 19 nt, Homo sapiens
  misc_RNA (1)...(19): siRNA sense strand
gaaauuagcaccauugcaa

SEQ ID NO: 1640207 - RNA, 19 nt, Homo sapiens
  misc_RNA (1)...(19): siRNA sense strand
ugacuuuccucaucuguua

SEQ ID NO: 1640208 - RNA, 19 nt, Homo sapiens
  misc_RNA (1)...(19): siRNA sense strand
caucacaacuccaucuaaa

SEQ ID NO: 1640209 - RNA, 19 nt, Homo sapiens
  misc_RNA (1)...(19): siRNA sense strand
cacaacaacuugaaacaaa

SEQ ID NO: 1640210 - RNA, 19 nt, Homo sapiens
  misc_RNA (1)...(19): siRNA sense strand
cagcaugccuugcgaagaa

SEQ ID NO: 1640211 - RNA, 19 nt, Homo sapiens
  misc_RNA (1)...(19): siRNA sense strand
caaaugcuauugucaguca

SEQ ID NO: 1640212 - RNA, 19 nt, Homo sapiens
  misc_RNA (1)...(19): siRNA sense strand
gaaguuaauccuagugaug

SEQ ID NO: 1640213 - RNA, 19 nt, Homo sapiens
  misc_RNA (1)...(19): siRNA sense strand
agagaagucuuguagaaau

SEQ ID NO: 1640214 - RNA, 19 nt, Homo sapiens
  misc_RNA (1)...(19): siRNA sense strand
gaacaucagaccaucacaa

SEQ ID NO: 1640215 - RNA, 19 nt, Homo sapiens
  misc_RNA (1)...(19): siRNA sense strand
aaagugaucccaccuauuc

SEQ ID NO: 1640216 - RNA, 19 nt, Homo sapiens
  misc_RNA (1)...(19): siRNA sense strand
gcuucuaacucauuguauu

SEQ ID NO: 1640217 - RNA, 19 nt, Homo sapiens
  misc_RNA (1)...(19): siRNA sense strand
gagaagucuuguagaaauc

SEQ ID NO: 1640218 - RNA, 19 nt, Homo sapiens
  misc_RNA (1)...(19): siRNA sense strand
cuaaagugaucccaccuau

SEQ ID NO: 1640219 - RNA, 19 nt, Homo sapiens
  misc_RNA (1)...(19): siRNA sense strand
ggaaauagugaccgaguag

SEQ ID NO: 1640220 - RNA, 19 nt, Homo sapiens
  misc_RNA (1)...(19): siRNA sense strand
gagcuucuaacucauugua

SEQ ID NO: 1640221 - RNA, 19 nt, Homo sapiens
  misc_RNA (1)...(19): siRNA sense strand
acaacuggcucauagacuu

SEQ ID NO: 1640222 - RNA, 19 nt, Homo sapiens
  misc_RNA (1)...(19): siRNA sense strand
gcacaaucacaacaacuug

SEQ ID NO: 1640223 - RNA, 19 nt, Homo sapiens
  misc_RNA (1)...(19): siRNA sense strand
gcucauagacuugcagaga

SEQ ID NO: 1640224 - RNA, 19 nt, Homo sapiens
  misc_RNA (1)...(19): siRNA sense strand
gcaauucuacaucuaaagu

SEQ ID NO: 1640225 - RNA, 19 nt, Homo sapiens
  misc_RNA (1)...(19): siRNA sense strand
gaaucuuccuucacaacug

SEQ ID NO: 1640226 - RNA, 19 nt, Homo sapiens
  misc_RNA (1)...(19): siRNA sense strand
ucaaagggauuuuaaagug

SEQ ID NO: 1640227 - RNA, 19 nt, Homo sapiens
  misc_RNA (1)...(19): siRNA sense strand
gaucaagaaaucccugaga

SEQ ID NO: 1640228 - RNA, 19 nt, Homo sapiens
  misc_RNA (1)...(19): siRNA sense strand
ggugcaguguggugacuuu

SEQ ID NO: 1640229 - RNA, 19 nt, Homo sapiens
  misc_RNA (1)...(19): siRNA sense strand
gacaaacucaccaaagaug

SEQ ID NO: 1640230 - RNA, 19 nt, Homo sapiens
  misc_RNA (1)...(19): siRNA sense strand
uugacaaacucaccaaaga

SEQ ID NO: 1640231 - RNA, 19 nt, Homo sapiens
  misc_RNA (1)...(19): siRNA sense strand
gaauugaacaucagaccau

SEQ ID NO: 1640232 - RNA, 19 nt, Homo sapiens
  misc_RNA (1)...(19): siRNA sense strand
cuucacaacuggcucauag

SEQ ID NO: 1640233 - RNA, 19 nt, Homo sapiens
  misc_RNA (1)...(19): siRNA sense strand
gugcaacaauauccuuuua

SEQ ID NO: 1640234 - RNA, 19 nt, Homo sapiens
  misc_RNA (1)...(19): siRNA sense strand
ucagcaaacuccacaaagg

SEQ ID NO: 1640235 - RNA, 19 nt, Homo sapiens
  misc_RNA (1)...(19): siRNA sense strand
uggaaauagugaccgagua

SEQ ID NO: 1640236 - RNA, 19 nt, Homo sapiens
  misc_RNA (1)...(19): siRNA sense strand
agaaaucccugagacagau

SEQ ID NO: 1640237 - RNA, 19 nt, Homo sapiens
  misc_RNA (1)...(19): siRNA sense strand
uuagcaccauugcaaguaa

SEQ ID NO: 1640238 - RNA, 19 nt, Homo sapiens
  misc_RNA (1)...(19): siRNA sense strand
ugggacggcuggacuauca

SEQ ID NO: 1640239 - RNA, 19 nt, Homo sapiens
  misc_RNA (1)...(19): siRNA sense strand
gcuauugucagucagcaaa

SEQ ID NO: 1640240 - RNA, 19 nt, Homo sapiens
  misc_RNA (1)...(19): siRNA sense strand
acuaccaccuugaaguuaa

SEQ ID NO: 1640241 - RNA, 19 nt, Homo sapiens
  misc_RNA (1)...(19): siRNA sense strand
gaaaacaguggcacaauca

SEQ ID NO: 1640242 - RNA, 19 nt, Homo sapiens
  misc_RNA (1)...(19): siRNA sense strand
gcugcaauucuacaucuaa

SEQ ID NO: 1640243 - RNA, 19 nt, Homo sapiens
  misc_RNA (1)...(19): siRNA sense strand
guaacuaccaccuugaagu

SEQ ID NO: 1640244 - RNA, 19 nt, Homo sapiens
  misc_RNA (1)...(19): siRNA sense strand
cagagaagucuuguagaaa

SEQ ID NO: 1640245 - RNA, 19 nt, Homo sapiens
  misc_RNA (1)...(19): siRNA sense strand
gaucccaccuauucguagu

SEQ ID NO: 1640246 - RNA, 19 nt, Homo sapiens
  misc_RNA (1)...(19): siRNA sense strand
cuccugagauaauaaugaa

SEQ ID NO: 1640247 - RNA, 19 nt, Homo sapiens
  misc_RNA (1)...(19): siRNA sense strand
gagggagacugcaaaugcu

SEQ ID NO: 1640248 - RNA, 19 nt, Homo sapiens
  misc_RNA (1)...(19): siRNA sense strand
gccucuggguggacaagua

SEQ ID NO: 1640249 - RNA, 19 nt, Homo sapiens
  misc_RNA (1)...(19): siRNA sense strand
ugaaacaaacucucaaagg

SEQ ID NO: 1640250 - RNA, 19 nt, Homo sapiens
  misc_RNA (1)...(19): siRNA sense strand
uaaagugaucccaccuauu

SEQ ID NO: 1640251 - RNA, 19 nt, Homo sapiens
  misc_RNA (1)...(19): siRNA sense strand
caucagaccaucacaacuc

SEQ ID NO: 1640252 - RNA, 19 nt, Homo sapiens
  misc_RNA (1)...(19): siRNA sense strand
ggagacugcaaaugcuauu

SEQ ID NO: 1640253 - RNA, 19 nt, Homo sapiens
  misc_RNA (1)...(19): siRNA sense strand
ucauagacuugcagagaag

SEQ ID NO: 1640254 - RNA, 19 nt, Homo sapiens
  misc_RNA (1)...(19): siRNA sense strand
caacuggcucauagacuug

SEQ ID NO: 1640255 - RNA, 19 nt, Homo sapiens
  misc_RNA (1)...(19): siRNA sense strand
cugcaauucuacaucuaaa

SEQ ID NO: 1640256 - RNA, 19 nt, Homo sapiens
  misc_RNA (1)...(19): siRNA sense strand
gugcugcaauucuacaucu

SEQ ID NO: 1640257 - RNA, 19 nt, Homo sapiens
  misc_RNA (1)...(19): siRNA sense strand
ucacaacaacuugaaacaa

SEQ ID NO: 1640258 - RNA, 19 nt, Homo sapiens
  misc_RNA (1)...(19): siRNA sense strand
gaguagucauucaggagau

SEQ ID NO: 1640259 - RNA, 19 nt, Homo sapiens
  misc_RNA (1)...(19): siRNA sense strand
uuguauuccuccugagaua

SEQ ID NO: 1640260 - RNA, 19 nt, Homo sapiens
  misc_RNA (1)...(19): siRNA sense strand
cucauagacuugcagagaa

SEQ ID NO: 1640261 - RNA, 19 nt, Homo sapiens
  misc_RNA (1)...(19): siRNA sense strand
gaucuugugcugcaauucu

SEQ ID NO: 1640262 - RNA, 19 nt, Homo sapiens
  misc_RNA (1)...(19): siRNA sense strand
gguauuauugacagaaguu

SEQ ID NO: 1640263 - RNA, 19 nt, Homo sapiens
  misc_RNA (1)...(19): siRNA sense strand
caaacucucaaagggauuu

SEQ ID NO: 1640264 - RNA, 19 nt, Homo sapiens
  misc_RNA (1)...(19): siRNA sense strand
uuccucaucuguuagugua

SEQ ID NO: 1640265 - RNA, 19 nt, Homo sapiens
  misc_RNA (1)...(19): siRNA sense strand
ugacaaacucaccaaagau

SEQ ID NO: 1640266 - RNA, 19 nt, Homo sapiens
  misc_RNA (1)...(19): siRNA sense strand
guauucuacgugaacuuua

SEQ ID NO: 1640267 - RNA, 19 nt, Homo sapiens
  misc_RNA (1)...(19): siRNA sense strand
gaccaucaggugcuggaaa

SEQ ID NO: 1640268 - RNA, 19 nt, Homo sapiens
  misc_RNA (1)...(19): siRNA sense strand
gcaacaauauccuuuuacu

SEQ ID NO: 1640269 - RNA, 19 nt, Homo sapiens
  misc_RNA (1)...(19): siRNA sense strand
ugaaguuaauccuagugau

SEQ ID NO: 1640270 - RNA, 19 nt, Homo sapiens
  misc_RNA (1)...(19): siRNA sense strand
agacagauugggaggugua

SEQ ID NO: 1640271 - RNA, 19 nt, Homo sapiens
  misc_RNA (1)...(19): siRNA sense strand
gagugcaacaauauccuuu

SEQ ID NO: 1640272 - RNA, 19 nt, Homo sapiens
  misc_RNA (1)...(19): siRNA sense strand
ggcacaaucacaacaacuu

SEQ ID NO: 1640273 - RNA, 19 nt, Homo sapiens
  misc_RNA (1)...(19): siRNA sense strand
ugagggagacugcaaaugc

SEQ ID NO: 1640274 - RNA, 19 nt, Homo sapiens
  misc_RNA (1)...(19): siRNA sense strand
cuaccaccuugaaguuaau

SEQ ID NO: 1640275 - RNA, 19 nt, Homo sapiens
  misc_RNA (1)...(19): siRNA sense strand
ugaacuuuaugguguugga

SEQ ID NO: 1640276 - RNA, 19 nt, Homo sapiens
  misc_RNA (1)...(19): siRNA sense strand
uguggugacuuuccucauc

SEQ ID NO: 1640277 - RNA, 19 nt, Homo sapiens
  misc_RNA (1)...(19): siRNA sense strand
acaacaacuugaaacaaac

SEQ ID NO: 1640278 - RNA, 19 nt, Homo sapiens
  misc_RNA (1)...(19): siRNA sense strand
ucaagaaaucccugagaca

SEQ ID NO: 1640279 - RNA, 19 nt, Homo sapiens
  misc_RNA (1)...(19): siRNA sense strand
guagaaaucucagaaaagc

SEQ ID NO: 1640280 - RNA, 19 nt, Homo sapiens
  misc_RNA (1)...(19): siRNA sense strand
ccaucacaacuccaucuaa

SEQ ID NO: 1640281 - RNA, 19 nt, Homo sapiens
  misc_RNA (1)...(19): siRNA sense strand
uacugcagaucaagaaauc

SEQ ID NO: 1640282 - RNA, 19 nt, Homo sapiens
  misc_RNA (1)...(19): siRNA sense strand
guauuccuccugagauaau

SEQ ID NO: 1640283 - RNA, 19 nt, Homo sapiens
  misc_RNA (1)...(19): siRNA sense strand
aagaaaucccugagacaga

SEQ ID NO: 1640284 - RNA, 19 nt, Homo sapiens
  misc_RNA (1)...(19): siRNA sense strand
uagugaugcuggaaauagu

SEQ ID NO: 1640285 - RNA, 19 nt, Homo sapiens
  misc_RNA (1)...(19): siRNA sense strand
gauugggagguguaucuga

SEQ ID NO: 1640286 - RNA, 19 nt, Homo sapiens
  misc_RNA (1)...(19): siRNA sense strand
gaagucuuguagaaaucuc

SEQ ID NO: 1640287 - RNA, 19 nt, Homo sapiens
  misc_RNA (1)...(19): siRNA sense strand
gugaucccaccuauucgua

SEQ ID NO: 1640288 - RNA, 19 nt, Homo sapiens
  misc_RNA (1)...(19): siRNA sense strand
gcaguguggugacuuuccu

SEQ ID NO: 1640289 - RNA, 19 nt, Homo sapiens
  misc_RNA (1)...(19): siRNA sense strand
acaaucacaacaacuugaa

SEQ ID NO: 1640290 - RNA, 19 nt, Homo sapiens
  misc_RNA (1)...(19): siRNA sense strand
cacaaucacaacaacuuga

SEQ ID NO: 1640291 - RNA, 19 nt, Homo sapiens
  misc_RNA (1)...(19): siRNA sense strand
gaaauagugaccgaguagu

SEQ ID NO: 1640292 - RNA, 19 nt, Homo sapiens
  misc_RNA (1)...(19): siRNA sense strand
ugcaaaugcuauugucagu

SEQ ID NO: 1640293 - RNA, 19 nt, Homo sapiens
  misc_RNA (1)...(19): siRNA sense strand
guggugacuuuccucaucu

SEQ ID NO: 1640294 - RNA, 19 nt, Homo sapiens
  misc_RNA (1)...(19): siRNA sense strand
caaucacaacaacuugaaa

SEQ ID NO: 1640295 - RNA, 19 nt, Homo sapiens
  misc_RNA (1)...(19): siRNA sense strand
ugaaaacaguggcacaauc

SEQ ID NO: 1640296 - RNA, 19 nt, Homo sapiens
  misc_RNA (1)...(19): siRNA sense strand
aaacaguggcacaaucaca

SEQ ID NO: 1640297 - RNA, 19 nt, Homo sapiens
  misc_RNA (1)...(19): siRNA sense strand
gacugcaaaugcuauuguc

SEQ ID NO: 1640298 - RNA, 19 nt, Homo sapiens
  misc_RNA (1)...(19): siRNA sense strand
gcagagugcaacaauaucc

SEQ ID NO: 1640299 - RNA, 19 nt, Homo sapiens
  misc_RNA (1)...(19): siRNA sense strand
guuaguguacggaccauca

SEQ ID NO: 1640300 - RNA, 19 nt, Homo sapiens
  misc_RNA (1)...(19): siRNA sense strand
caacaacuugaaacaaacu

SEQ ID NO: 1640301 - RNA, 19 nt, Homo sapiens
  misc_RNA (1)...(19): siRNA sense strand
gggagacugcaaaugcuau

SEQ ID NO: 1640302 - RNA, 19 nt, Homo sapiens
  misc_RNA (1)...(19): siRNA sense strand
ggacggcuggacuaucaca

SEQ ID NO: 1640303 - RNA, 19 nt, Homo sapiens
  misc_RNA (1)...(19): siRNA sense strand
ccuccugagauaauaauga

SEQ ID NO: 1640304 - RNA, 19 nt, Homo sapiens
  misc_RNA (1)...(19): siRNA sense strand
uguauucuacgugaacuuu

SEQ ID NO: 1640305 - RNA, 19 nt, Homo sapiens
  misc_RNA (1)...(19): siRNA sense strand
gaaauuagcaccauugcaa

SEQ ID NO: 1640306 - RNA, 19 nt, Homo sapiens
  misc_RNA (1)...(19): siRNA sense strand
ugacuuuccucaucuguua

SEQ ID NO: 1640307 - RNA, 19 nt, Homo sapiens
  misc_RNA (1)...(19): siRNA sense strand
caucacaacuccaucuaaa

SEQ ID NO: 1640308 - RNA, 19 nt, Homo sapiens
  misc_RNA (1)...(19): siRNA sense strand
cacaacaacuugaaacaaa

SEQ ID NO: 1640309 - RNA, 19 nt, Homo sapiens
  misc_RNA (1)...(19): siRNA sense strand
cagcaugccuugcgaagaa

SEQ ID NO: 1640310 - RNA, 19 nt, Homo sapiens
  misc_RNA (1)...(19): siRNA sense strand
gaaguuaauccuagugaug

SEQ ID NO: 1640311 - RNA, 19 nt, Homo sapiens
  misc_RNA (1)...(19): siRNA sense strand
gaacaucagaccaucacaa

SEQ ID NO: 1640312 - RNA, 19 nt, Homo sapiens
  misc_RNA (1)...(19): siRNA sense strand
aaagugaucccaccuauuc

SEQ ID NO: 1640313 - RNA, 19 nt, Homo sapiens
  misc_RNA (1)...(19): siRNA sense strand
cuaaagugaucccaccuau

SEQ ID NO: 1640314 - RNA, 19 nt, Homo sapiens
  misc_RNA (1)...(19): siRNA sense strand
ggaaauagugaccgaguag

SEQ ID NO: 1640315 - RNA, 19 nt, Homo sapiens
  misc_RNA (1)...(19): siRNA sense strand
gcacaaucacaacaacuug

SEQ ID NO: 1640316 - RNA, 19 nt, Homo sapiens
  misc_RNA (1)...(19): siRNA sense strand
gcaauucuacaucuaaagu

SEQ ID NO: 1640317 - RNA, 19 nt, Homo sapiens
  misc_RNA (1)...(19): siRNA sense strand
gaaucuuccuucacaacug

SEQ ID NO: 1640318 - RNA, 19 nt, Homo sapiens
  misc_RNA (1)...(19): siRNA sense strand
ggugcaguguggugacuuu

SEQ ID NO: 1640319 - RNA, 19 nt, Homo sapiens
  misc_RNA (1)...(19): siRNA sense strand
gacaaacucaccaaagaug

SEQ ID NO: 1640320 - RNA, 19 nt, Homo sapiens
  misc_RNA (1)...(19): siRNA sense strand
ucaaagggauuuuaaagug

SEQ ID NO: 1640321 - RNA, 19 nt, Homo sapiens
  misc_RNA (1)...(19): siRNA sense strand
uugacaaacucaccaaaga

SEQ ID NO: 1640322 - RNA, 19 nt, Homo sapiens
  misc_RNA (1)...(19): siRNA sense strand
gaauugaacaucagaccau

SEQ ID NO: 1640323 - RNA, 19 nt, Homo sapiens
  misc_RNA (1)...(19): siRNA sense strand
cuucacaacuggcucauag

SEQ ID NO: 1640324 - RNA, 19 nt, Homo sapiens
  misc_RNA (1)...(19): siRNA sense strand
uggaaauagugaccgagua

SEQ ID NO: 1640325 - RNA, 19 nt, Homo sapiens
  misc_RNA (1)...(19): siRNA sense strand
uuagcaccauugcaaguaa

SEQ ID NO: 1640326 - RNA, 19 nt, Homo sapiens
  misc_RNA (1)...(19): siRNA sense strand
ugggacggcuggacuauca

SEQ ID NO: 1640327 - RNA, 19 nt, Homo sapiens
  misc_RNA (1)...(19): siRNA sense strand
acuaccaccuugaaguuaa

SEQ ID NO: 1640328 - RNA, 19 nt, Homo sapiens
  misc_RNA (1)...(19): siRNA sense strand
gaaaacaguggcacaauca

SEQ ID NO: 1640329 - RNA, 19 nt, Homo sapiens
  misc_RNA (1)...(19): siRNA sense strand
gcugcaauucuacaucuaa

SEQ ID NO: 1640330 - RNA, 19 nt, Homo sapiens
  misc_RNA (1)...(19): siRNA sense strand
guaacuaccaccuugaagu

SEQ ID NO: 1640331 - RNA, 19 nt, Homo sapiens
  misc_RNA (1)...(19): siRNA sense strand
gccucuggguggacaagua

SEQ ID NO: 1640332 - RNA, 19 nt, Homo sapiens
  misc_RNA (1)...(19): siRNA sense strand
gaucccaccuauucguagu

SEQ ID NO: 1640333 - RNA, 19 nt, Homo sapiens
  misc_RNA (1)...(19): siRNA sense strand
ugaaacaaacucucaaagg

SEQ ID NO: 1640334 - RNA, 19 nt, Homo sapiens
  misc_RNA (1)...(19): siRNA sense strand
uaaagugaucccaccuauu

SEQ ID NO: 1640335 - RNA, 19 nt, Homo sapiens
  misc_RNA (1)...(19): siRNA sense strand
caucagaccaucacaacuc

SEQ ID NO: 1640336 - RNA, 19 nt, Homo sapiens
  misc_RNA (1)...(19): siRNA sense strand
cugcaauucuacaucuaaa

SEQ ID NO: 1640337 - RNA, 19 nt, Homo sapiens
  misc_RNA (1)...(19): siRNA sense strand
gugcugcaauucuacaucu

SEQ ID NO: 1640338 - RNA, 19 nt, Homo sapiens
  misc_RNA (1)...(19): siRNA sense strand
ucacaacaacuugaaacaa

SEQ ID NO: 1640339 - RNA, 19 nt, Homo sapiens
  misc_RNA (1)...(19): siRNA sense strand
gaguagucauucaggagau

SEQ ID NO: 1640340 - RNA, 19 nt, Homo sapiens
  misc_RNA (1)...(19): siRNA sense strand
gaucuugugcugcaauucu

SEQ ID NO: 1640341 - RNA, 19 nt, Homo sapiens
  misc_RNA (1)...(19): siRNA sense strand
gguauuauugacagaaguu

SEQ ID NO: 1640342 - RNA, 19 nt, Homo sapiens
  misc_RNA (1)...(19): siRNA sense strand
caaacucucaaagggauuu

SEQ ID NO: 1640343 - RNA, 19 nt, Homo sapiens
  misc_RNA (1)...(19): siRNA sense strand
ugacaaacucaccaaagau

SEQ ID NO: 1640344 - RNA, 19 nt, Homo sapiens
  misc_RNA (1)...(19): siRNA sense strand
uuccucaucuguuagugua

SEQ ID NO: 1640345 - RNA, 19 nt, Homo sapiens
  misc_RNA (1)...(19): siRNA sense strand
gaccaucaggugcuggaaa

SEQ ID NO: 1640346 - RNA, 19 nt, Homo sapiens
  misc_RNA (1)...(19): siRNA sense strand
guauucuacgugaacuuua

SEQ ID NO: 1640347 - RNA, 19 nt, Homo sapiens
  misc_RNA (1)...(19): siRNA sense strand
ugaaguuaauccuagugau

SEQ ID NO: 1640348 - RNA, 19 nt, Homo sapiens
  misc_RNA (1)...(19): siRNA sense strand
ggcacaaucacaacaacuu

SEQ ID NO: 1640349 - RNA, 19 nt, Homo sapiens
  misc_RNA (1)...(19): siRNA sense strand
ugaacuuuaugguguugga

SEQ ID NO: 1640350 - RNA, 19 nt, Homo sapiens
  misc_RNA (1)...(19): siRNA sense strand
uguggugacuuuccucauc

SEQ ID NO: 1640351 - RNA, 19 nt, Homo sapiens
  misc_RNA (1)...(19): siRNA sense strand
cuaccaccuugaaguuaau

SEQ ID NO: 1640352 - RNA, 19 nt, Homo sapiens
  misc_RNA (1)...(19): siRNA sense strand
ccaucacaacuccaucuaa

SEQ ID NO: 1640353 - RNA, 19 nt, Homo sapiens
  misc_RNA (1)...(19): siRNA sense strand
acaacaacuugaaacaaac

SEQ ID NO: 1640354 - RNA, 19 nt, Homo sapiens
  misc_RNA (1)...(19): siRNA sense strand
gcaguguggugacuuuccu

SEQ ID NO: 1640355 - RNA, 19 nt, Homo sapiens
  misc_RNA (1)...(19): siRNA sense strand
gugaucccaccuauucgua

SEQ ID NO: 1640356 - RNA, 19 nt, Homo sapiens
  misc_RNA (1)...(19): siRNA sense strand
acaaucacaacaacuugaa

SEQ ID NO: 1640357 - RNA, 19 nt, Homo sapiens
  misc_RNA (1)...(19): siRNA sense strand
cacaaucacaacaacuuga

SEQ ID NO: 1640358 - RNA, 19 nt, Homo sapiens
  misc_RNA (1)...(19): siRNA sense strand
uagugaugcuggaaauagu

SEQ ID NO: 1640359 - RNA, 19 nt, Homo sapiens
  misc_RNA (1)...(19): siRNA sense strand
guggugacuuuccucaucu

SEQ ID NO: 1640360 - RNA, 19 nt, Homo sapiens
  misc_RNA (1)...(19): siRNA sense strand
caaucacaacaacuugaaa

SEQ ID NO: 1640361 - RNA, 19 nt, Homo sapiens
  misc_RNA (1)...(19): siRNA sense strand
ugaaaacaguggcacaauc

SEQ ID NO: 1640362 - RNA, 19 nt, Homo sapiens
  misc_RNA (1)...(19): siRNA sense strand
gaaauagugaccgaguagu

SEQ ID NO: 1640363 - RNA, 19 nt, Homo sapiens
  misc_RNA (1)...(19): siRNA sense strand
guuaguguacggaccauca

SEQ ID NO: 1640364 - RNA, 19 nt, Homo sapiens
  misc_RNA (1)...(19): siRNA sense strand
caacaacuugaaacaaacu

SEQ ID NO: 1640365 - RNA, 19 nt, Homo sapiens
  misc_RNA (1)...(19): siRNA sense strand
aaacaguggcacaaucaca

SEQ ID NO: 1640366 - RNA, 19 nt, Homo sapiens
  misc_RNA (1)...(19): siRNA sense strand
gaccaucacaacuccaucu

SEQ ID NO: 1640367 - RNA, 19 nt, Homo sapiens
  misc_RNA (1)...(19): siRNA sense strand
ggacggcuggacuaucaca

SEQ ID NO: 1640368 - RNA, 19 nt, Homo sapiens
  misc_RNA (1)...(19): siRNA sense strand
cuagugaugcuggaaauag

SEQ ID NO: 1640369 - RNA, 19 nt, Homo sapiens
  misc_RNA (1)...(19): siRNA sense strand
uguauucuacgugaacuuu

SEQ ID NO: 1640370 - RNA, 19 nt, Homo sapiens
  misc_RNA (1)...(19): siRNA sense strand
gcagagaagucuuguagaa

SEQ ID NO: 1640371 - RNA, 19 nt, Homo sapiens
  misc_RNA (1)...(19): siRNA sense strand
gaaauuagcaccauugcaa

SEQ ID NO: 1640372 - RNA, 19 nt, Homo sapiens
  misc_RNA (1)...(19): siRNA sense strand
ugacuuuccucaucuguua

SEQ ID NO: 1640373 - RNA, 19 nt, Homo sapiens
  misc_RNA (1)...(19): siRNA sense strand
caucacaacuccaucuaaa

SEQ ID NO: 1640374 - RNA, 19 nt, Homo sapiens
  misc_RNA (1)...(19): siRNA sense strand
cacaacaacuugaaacaaa

SEQ ID NO: 1640375 - RNA, 19 nt, Homo sapiens
  misc_RNA (1)...(19): siRNA sense strand
cagcaugccuugcgaagaa

SEQ ID NO: 1640376 - RNA, 19 nt, Homo sapiens
  misc_RNA (1)...(19): siRNA sense strand
caaaugcuauugucaguca

SEQ ID NO: 1640377 - RNA, 19 nt, Homo sapiens
  misc_RNA (1)...(19): siRNA sense strand
gaaguuaauccuagugaug

SEQ ID NO: 1640378 - RNA, 19 nt, Homo sapiens
  misc_RNA (1)...(19): siRNA sense strand
agagaagucuuguagaaau

SEQ ID NO: 1640379 - RNA, 19 nt, Homo sapiens
  misc_RNA (1)...(19): siRNA sense strand
gaacaucagaccaucacaa

SEQ ID NO: 1640380 - RNA, 19 nt, Homo sapiens
  misc_RNA (1)...(19): siRNA sense strand
aaagugaucccaccuauuc

SEQ ID NO: 1640381 - RNA, 19 nt, Homo sapiens
  misc_RNA (1)...(19): siRNA sense strand
gcuucuaacucauuguauu

SEQ ID NO: 1640382 - RNA, 19 nt, Homo sapiens
  misc_RNA (1)...(19): siRNA sense strand
gagaagucuuguagaaauc

SEQ ID NO: 1640383 - RNA, 19 nt, Homo sapiens
  misc_RNA (1)...(19): siRNA sense strand
cuaaagugaucccaccuau

SEQ ID NO: 1640384 - RNA, 19 nt, Homo sapiens
  misc_RNA (1)...(19): siRNA sense strand
ggaaauagugaccgaguag

SEQ ID NO: 1640385 - RNA, 19 nt, Homo sapiens
  misc_RNA (1)...(19): siRNA sense strand
gagcuucuaacucauugua

SEQ ID NO: 1640386 - RNA, 19 nt, Homo sapiens
  misc_RNA (1)...(19): siRNA sense strand
acaacuggcucauagacuu

SEQ ID NO: 1640387 - RNA, 19 nt, Homo sapiens
  misc_RNA (1)...(19): siRNA sense strand
gcacaaucacaacaacuug

SEQ ID NO: 1640388 - RNA, 19 nt, Homo sapiens
  misc_RNA (1)...(19): siRNA sense strand
gcucauagacuugcagaga

SEQ ID NO: 1640389 - RNA, 19 nt, Homo sapiens
  misc_RNA (1)...(19): siRNA sense strand
gcaauucuacaucuaaagu

SEQ ID NO: 1640390 - RNA, 19 nt, Homo sapiens
  misc_RNA (1)...(19): siRNA sense strand
gaaucuuccuucacaacug

SEQ ID NO: 1640391 - RNA, 19 nt, Homo sapiens
  misc_RNA (1)...(19): siRNA sense strand
ucaaagggauuuuaaagug

SEQ ID NO: 1640392 - RNA, 19 nt, Homo sapiens
  misc_RNA (1)...(19): siRNA sense strand
gaucaagaaaucccugaga

SEQ ID NO: 1640393 - RNA, 19 nt, Homo sapiens
  misc_RNA (1)...(19): siRNA sense strand
ggugcaguguggugacuuu

SEQ ID NO: 1640394 - RNA, 19 nt, Homo sapiens
  misc_RNA (1)...(19): siRNA sense strand
gacaaacucaccaaagaug

SEQ ID NO: 1640395 - RNA, 19 nt, Homo sapiens
  misc_RNA (1)...(19): siRNA sense strand
uugacaaacucaccaaaga

SEQ ID NO: 1640396 - RNA, 19 nt, Homo sapiens
  misc_RNA (1)...(19): siRNA sense strand
gaauugaacaucagaccau

SEQ ID NO: 1640397 - RNA, 19 nt, Homo sapiens
  misc_RNA (1)...(19): siRNA sense strand
cuucacaacuggcucauag

SEQ ID NO: 1640398 - RNA, 19 nt, Homo sapiens
  misc_RNA (1)...(19): siRNA sense strand
gugcaacaauauccuuuua

SEQ ID NO: 1640399 - RNA, 19 nt, Homo sapiens
  misc_RNA (1)...(19): siRNA sense strand
ucagcaaacuccacaaagg

SEQ ID NO: 1640400 - RNA, 19 nt, Homo sapiens
  misc_RNA (1)...(19): siRNA sense strand
uggaaauagugaccgagua

SEQ ID NO: 1640401 - RNA, 19 nt, Homo sapiens
  misc_RNA (1)...(19): siRNA sense strand
agaaaucccugagacagau

SEQ ID NO: 1640402 - RNA, 19 nt, Homo sapiens
  misc_RNA (1)...(19): siRNA sense strand
uuagcaccauugcaaguaa

SEQ ID NO: 1640403 - RNA, 19 nt, Homo sapiens
  misc_RNA (1)...(19): siRNA sense strand
ugggacggcuggacuauca

SEQ ID NO: 1640404 - RNA, 19 nt, Homo sapiens
  misc_RNA (1)...(19): siRNA sense strand
gcuauugucagucagcaaa

SEQ ID NO: 1640405 - RNA, 19 nt, Homo sapiens
  misc_RNA (1)...(19): siRNA sense strand
acuaccaccuugaaguuaa

SEQ ID NO: 1640406 - RNA, 19 nt, Homo sapiens
  misc_RNA (1)...(19): siRNA sense strand
gaaaacaguggcacaauca

SEQ ID NO: 1640407 - RNA, 19 nt, Homo sapiens
  misc_RNA (1)...(19): siRNA sense strand
gcugcaauucuacaucuaa

SEQ ID NO: 1640408 - RNA, 19 nt, Homo sapiens
  misc_RNA (1)...(19): siRNA sense strand
guaacuaccaccuugaagu

SEQ ID NO: 1640409 - RNA, 19 nt, Homo sapiens
  misc_RNA (1)...(19): siRNA sense strand
cagagaagucuuguagaaa

SEQ ID NO: 1640410 - RNA, 19 nt, Homo sapiens
  misc_RNA (1)...(19): siRNA sense strand
gaucccaccuauucguagu

SEQ ID NO: 1640411 - RNA, 19 nt, Homo sapiens
  misc_RNA (1)...(19): siRNA sense strand
cuccugagauaauaaugaa

SEQ ID NO: 1640412 - RNA, 19 nt, Homo sapiens
  misc_RNA (1)...(19): siRNA sense strand
gagggagacugcaaaugcu

SEQ ID NO: 1640413 - RNA, 19 nt, Homo sapiens
  misc_RNA (1)...(19): siRNA sense strand
gccucuggguggacaagua

SEQ ID NO: 1640414 - RNA, 19 nt, Homo sapiens
  misc_RNA (1)...(19): siRNA sense strand
ugaaacaaacucucaaagg

SEQ ID NO: 1640415 - RNA, 19 nt, Homo sapiens
  misc_RNA (1)...(19): siRNA sense strand
uaaagugaucccaccuauu

SEQ ID NO: 1640416 - RNA, 19 nt, Homo sapiens
  misc_RNA (1)...(19): siRNA sense strand
caucagaccaucacaacuc

SEQ ID NO: 1640417 - RNA, 19 nt, Homo sapiens
  misc_RNA (1)...(19): siRNA sense strand
ggagacugcaaaugcuauu

SEQ ID NO: 1640418 - RNA, 19 nt, Homo sapiens
  misc_RNA (1)...(19): siRNA sense strand
ucauagacuugcagagaag

SEQ ID NO: 1640419 - RNA, 19 nt, Homo sapiens
  misc_RNA (1)...(19): siRNA sense strand
caacuggcucauagacuug

SEQ ID NO: 1640420 - RNA, 19 nt, Homo sapiens
  misc_RNA (1)...(19): siRNA sense strand
cugcaauucuacaucuaaa

SEQ ID NO: 1640421 - RNA, 19 nt, Homo sapiens
  misc_RNA (1)...(19): siRNA sense strand
gugcugcaauucuacaucu

SEQ ID NO: 1640422 - RNA, 19 nt, Homo sapiens
  misc_RNA (1)...(19): siRNA sense strand
ucacaacaacuugaaacaa

SEQ ID NO: 1640423 - RNA, 19 nt, Homo sapiens
  misc_RNA (1)...(19): siRNA sense strand
gaguagucauucaggagau

SEQ ID NO: 1640424 - RNA, 19 nt, Homo sapiens
  misc_RNA (1)...(19): siRNA sense strand
uuguauuccuccugagaua

SEQ ID NO: 1640425 - RNA, 19 nt, Homo sapiens
  misc_RNA (1)...(19): siRNA sense strand
cucauagacuugcagagaa

SEQ ID NO: 1640426 - RNA, 19 nt, Homo sapiens
  misc_RNA (1)...(19): siRNA sense strand
gaucuugugcugcaauucu

SEQ ID NO: 1640427 - RNA, 19 nt, Homo sapiens
  misc_RNA (1)...(19): siRNA sense strand
gguauuauugacagaaguu

SEQ ID NO: 1640428 - RNA, 19 nt, Homo sapiens
  misc_RNA (1)...(19): siRNA sense strand
caaacucucaaagggauuu

SEQ ID NO: 1640429 - RNA, 19 nt, Homo sapiens
  misc_RNA (1)...(19): siRNA sense strand
uuccucaucuguuagugua

SEQ ID NO: 1640430 - RNA, 19 nt, Homo sapiens
  misc_RNA (1)...(19): siRNA sense strand
ugacaaacucaccaaagau

SEQ ID NO: 1640431 - RNA, 19 nt, Homo sapiens
  misc_RNA (1)...(19): siRNA sense strand
guauucuacgugaacuuua

SEQ ID NO: 1640432 - RNA, 19 nt, Homo sapiens
  misc_RNA (1)...(19): siRNA sense strand
gaccaucaggugcuggaaa

SEQ ID NO: 1640433 - RNA, 19 nt, Homo sapiens
  misc_RNA (1)...(19): siRNA sense strand
gcaacaauauccuuuuacu

SEQ ID NO: 1640434 - RNA, 19 nt, Homo sapiens
  misc_RNA (1)...(19): siRNA sense strand
ugaaguuaauccuagugau

SEQ ID NO: 1640435 - RNA, 19 nt, Homo sapiens
  misc_RNA (1)...(19): siRNA sense strand
agacagauugggaggugua

SEQ ID NO: 1640436 - RNA, 19 nt, Homo sapiens
  misc_RNA (1)...(19): siRNA sense strand
gagugcaacaauauccuuu

SEQ ID NO: 1640437 - RNA, 19 nt, Homo sapiens
  misc_RNA (1)...(19): siRNA sense strand
ggcacaaucacaacaacuu

SEQ ID NO: 1640438 - RNA, 19 nt, Homo sapiens
  misc_RNA (1)...(19): siRNA sense strand
ugagggagacugcaaaugc

SEQ ID NO: 1640439 - RNA, 19 nt, Homo sapiens
  misc_RNA (1)...(19): siRNA sense strand
cuaccaccuugaaguuaau

SEQ ID NO: 1640440 - RNA, 19 nt, Homo sapiens
  misc_RNA (1)...(19): siRNA sense strand
ugaacuuuaugguguugga

SEQ ID NO: 1640441 - RNA, 19 nt, Homo sapiens
  misc_RNA (1)...(19): siRNA sense strand
uguggugacuuuccucauc

SEQ ID NO: 1640442 - RNA, 19 nt, Homo sapiens
  misc_RNA (1)...(19): siRNA sense strand
acaacaacuugaaacaaac

SEQ ID NO: 1640443 - RNA, 19 nt, Homo sapiens
  misc_RNA (1)...(19): siRNA sense strand
ucaagaaaucccugagaca

SEQ ID NO: 1640444 - RNA, 19 nt, Homo sapiens
  misc_RNA (1)...(19): siRNA sense strand
guagaaaucucagaaaagc

SEQ ID NO: 1640445 - RNA, 19 nt, Homo sapiens
  misc_RNA (1)...(19): siRNA sense strand
ccaucacaacuccaucuaa

SEQ ID NO: 1640446 - RNA, 19 nt, Homo sapiens
  misc_RNA (1)...(19): siRNA sense strand
uacugcagaucaagaaauc

SEQ ID NO: 1640447 - RNA, 19 nt, Homo sapiens
  misc_RNA (1)...(19): siRNA sense strand
guauuccuccugagauaau

SEQ ID NO: 1640448 - RNA, 19 nt, Homo sapiens
  misc_RNA (1)...(19): siRNA sense strand
aagaaaucccugagacaga

SEQ ID NO: 1640449 - RNA, 19 nt, Homo sapiens
  misc_RNA (1)...(19): siRNA sense strand
uagugaugcuggaaauagu

SEQ ID NO: 1640450 - RNA, 19 nt, Homo sapiens
  misc_RNA (1)...(19): siRNA sense strand
gauugggagguguaucuga

SEQ ID NO: 1640451 - RNA, 19 nt, Homo sapiens
  misc_RNA (1)...(19): siRNA sense strand
gaagucuuguagaaaucuc

SEQ ID NO: 1640452 - RNA, 19 nt, Homo sapiens
  misc_RNA (1)...(19): siRNA sense strand
gugaucccaccuauucgua

SEQ ID NO: 1640453 - RNA, 19 nt, Homo sapiens
  misc_RNA (1)...(19): siRNA sense strand
gcaguguggugacuuuccu

SEQ ID NO: 1640454 - RNA, 19 nt, Homo sapiens
  misc_RNA (1)...(19): siRNA sense strand
acaaucacaacaacuugaa

SEQ ID NO: 1640455 - RNA, 19 nt, Homo sapiens
  misc_RNA (1)...(19): siRNA sense strand
cacaaucacaacaacuuga

SEQ ID NO: 1640456 - RNA, 19 nt, Homo sapiens
  misc_RNA (1)...(19): siRNA sense strand
gaaauagugaccgaguagu

SEQ ID NO: 1640457 - RNA, 19 nt, Homo sapiens
  misc_RNA (1)...(19): siRNA sense strand
ugcaaaugcuauugucagu

SEQ ID NO: 1640458 - RNA, 19 nt, Homo sapiens
  misc_RNA (1)...(19): siRNA sense strand
guggugacuuuccucaucu

SEQ ID NO: 1640459 - RNA, 19 nt, Homo sapiens
  misc_RNA (1)...(19): siRNA sense strand
caaucacaacaacuugaaa

SEQ ID NO: 1640460 - RNA, 19 nt, Homo sapiens
  misc_RNA (1)...(19): siRNA sense strand
ugaaaacaguggcacaauc

SEQ ID NO: 1640461 - RNA, 19 nt, Homo sapiens
  misc_RNA (1)...(19): siRNA sense strand
aaacaguggcacaaucaca

SEQ ID NO: 1640462 - RNA, 19 nt, Homo sapiens
  misc_RNA (1)...(19): siRNA sense strand
gacugcaaaugcuauuguc

SEQ ID NO: 1640463 - RNA, 19 nt, Homo sapiens
  misc_RNA (1)...(19): siRNA sense strand
gcagagugcaacaauaucc

SEQ ID NO: 1640464 - RNA, 19 nt, Homo sapiens
  misc_RNA (1)...(19): siRNA sense strand
guuaguguacggaccauca

SEQ ID NO: 1640465 - RNA, 19 nt, Homo sapiens
  misc_RNA (1)...(19): siRNA sense strand
caacaacuugaaacaaacu

SEQ ID NO: 1640466 - RNA, 19 nt, Homo sapiens
  misc_RNA (1)...(19): siRNA sense strand
gggagacugcaaaugcuau

SEQ ID NO: 1640467 - RNA, 19 nt, Homo sapiens
  misc_RNA (1)...(19): siRNA sense strand
ggacggcuggacuaucaca

SEQ ID NO: 1640468 - RNA, 19 nt, Homo sapiens
  misc_RNA (1)...(19): siRNA sense strand
ccuccugagauaauaauga

SEQ ID NO: 1640469 - RNA, 19 nt, Homo sapiens
  misc_RNA (1)...(19): siRNA sense strand
uguauucuacgugaacuuu

SEQ ID NO: 1640470 - RNA, 19 nt, Homo sapiens
  misc_RNA (1)...(19): siRNA sense strand
gaaauuagcaccauugcaa

SEQ ID NO: 1640471 - RNA, 19 nt, Homo sapiens
  misc_RNA (1)...(19): siRNA sense strand
ugacuuuccucaucuguua

SEQ ID NO: 1640472 - RNA, 19 nt, Homo sapiens
  misc_RNA (1)...(19): siRNA sense strand
caucacaacuccaucuaaa

SEQ ID NO: 1640473 - RNA, 19 nt, Homo sapiens
  misc_RNA (1)...(19): siRNA sense strand
cacaacaacuugaaacaaa

SEQ ID NO: 1640474 - RNA, 19 nt, Homo sapiens
  misc_RNA (1)...(19): siRNA sense strand
cagcaugccuugcgaagaa

SEQ ID NO: 1640475 - RNA, 19 nt, Homo sapiens
  misc_RNA (1)...(19): siRNA sense strand
gaaguuaauccuagugaug

SEQ ID NO: 1640476 - RNA, 19 nt, Homo sapiens
  misc_RNA (1)...(19): siRNA sense strand
gaacaucagaccaucacaa

SEQ ID NO: 1640477 - RNA, 19 nt, Homo sapiens
  misc_RNA (1)...(19): siRNA sense strand
aaagugaucccaccuauuc

SEQ ID NO: 1640478 - RNA, 19 nt, Homo sapiens
  misc_RNA (1)...(19): siRNA sense strand
cuaaagugaucccaccuau

SEQ ID NO: 1640479 - RNA, 19 nt, Homo sapiens
  misc_RNA (1)...(19): siRNA sense strand
ggaaauagugaccgaguag

SEQ ID NO: 1640480 - RNA, 19 nt, Homo sapiens
  misc_RNA (1)...(19): siRNA sense strand
gcacaaucacaacaacuug

SEQ ID NO: 1640481 - RNA, 19 nt, Homo sapiens
  misc_RNA (1)...(19): siRNA sense strand
gcaauucuacaucuaaagu

SEQ ID NO: 1640482 - RNA, 19 nt, Homo sapiens
  misc_RNA (1)...(19): siRNA sense strand
gaaucuuccuucacaacug

SEQ ID NO: 1640483 - RNA, 19 nt, Homo sapiens
  misc_RNA (1)...(19): siRNA sense strand
ggugcaguguggugacuuu

SEQ ID NO: 1640484 - RNA, 19 nt, Homo sapiens
  misc_RNA (1)...(19): siRNA sense strand
gacaaacucaccaaagaug

SEQ ID NO: 1640485 - RNA, 19 nt, Homo sapiens
  misc_RNA (1)...(19): siRNA sense strand
ucaaagggauuuuaaagug

SEQ ID NO: 1640486 - RNA, 19 nt, Homo sapiens
  misc_RNA (1)...(19): siRNA sense strand
uugacaaacucaccaaaga

SEQ ID NO: 1640487 - RNA, 19 nt, Homo sapiens
  misc_RNA (1)...(19): siRNA sense strand
gaauugaacaucagaccau

SEQ ID NO: 1640488 - RNA, 19 nt, Homo sapiens
  misc_RNA (1)...(19): siRNA sense strand
cuucacaacuggcucauag

SEQ ID NO: 1640489 - RNA, 19 nt, Homo sapiens
  misc_RNA (1)...(19): siRNA sense strand
uggaaauagugaccgagua

SEQ ID NO: 1640490 - RNA, 19 nt, Homo sapiens
  misc_RNA (1)...(19): siRNA sense strand
uuagcaccauugcaaguaa

SEQ ID NO: 1640491 - RNA, 19 nt, Homo sapiens
  misc_RNA (1)...(19): siRNA sense strand
ugggacggcuggacuauca

SEQ ID NO: 1640492 - RNA, 19 nt, Homo sapiens
  misc_RNA (1)...(19): siRNA sense strand
acuaccaccuugaaguuaa

SEQ ID NO: 1640493 - RNA, 19 nt, Homo sapiens
  misc_RNA (1)...(19): siRNA sense strand
gaaaacaguggcacaauca

SEQ ID NO: 1640494 - RNA, 19 nt, Homo sapiens
  misc_RNA (1)...(19): siRNA sense strand
gcugcaauucuacaucuaa

SEQ ID NO: 1640495 - RNA, 19 nt, Homo sapiens
  misc_RNA (1)...(19): siRNA sense strand
guaacuaccaccuugaagu

SEQ ID NO: 1640496 - RNA, 19 nt, Homo sapiens
  misc_RNA (1)...(19): siRNA sense strand
gccucuggguggacaagua

SEQ ID NO: 1640497 - RNA, 19 nt, Homo sapiens
  misc_RNA (1)...(19): siRNA sense strand
gaucccaccuauucguagu

SEQ ID NO: 1640498 - RNA, 19 nt, Homo sapiens
  misc_RNA (1)...(19): siRNA sense strand
ugaaacaaacucucaaagg

SEQ ID NO: 1640499 - RNA, 19 nt, Homo sapiens
  misc_RNA (1)...(19): siRNA sense strand
uaaagugaucccaccuauu

SEQ ID NO: 1640500 - RNA, 19 nt, Homo sapiens
  misc_RNA (1)...(19): siRNA sense strand
caucagaccaucacaacuc

SEQ ID NO: 1640501 - RNA, 19 nt, Homo sapiens
  misc_RNA (1)...(19): siRNA sense strand
cugcaauucuacaucuaaa

SEQ ID NO: 1640502 - RNA, 19 nt, Homo sapiens
  misc_RNA (1)...(19): siRNA sense strand
gugcugcaauucuacaucu

SEQ ID NO: 1640503 - RNA, 19 nt, Homo sapiens
  misc_RNA (1)...(19): siRNA sense strand
ucacaacaacuugaaacaa

SEQ ID NO: 1640504 - RNA, 19 nt, Homo sapiens
  misc_RNA (1)...(19): siRNA sense strand
gaguagucauucaggagau

SEQ ID NO: 1640505 - RNA, 19 nt, Homo sapiens
  misc_RNA (1)...(19): siRNA sense strand
gaucuugugcugcaauucu

SEQ ID NO: 1640506 - RNA, 19 nt, Homo sapiens
  misc_RNA (1)...(19): siRNA sense strand
gguauuauugacagaaguu

SEQ ID NO: 1640507 - RNA, 19 nt, Homo sapiens
  misc_RNA (1)...(19): siRNA sense strand
caaacucucaaagggauuu

SEQ ID NO: 1640508 - RNA, 19 nt, Homo sapiens
  misc_RNA (1)...(19): siRNA sense strand
ugacaaacucaccaaagau

SEQ ID NO: 1640509 - RNA, 19 nt, Homo sapiens
  misc_RNA (1)...(19): siRNA sense strand
uuccucaucuguuagugua

SEQ ID NO: 1640510 - RNA, 19 nt, Homo sapiens
  misc_RNA (1)...(19): siRNA sense strand
gaccaucaggugcuggaaa

SEQ ID NO: 1640511 - RNA, 19 nt, Homo sapiens
  misc_RNA (1)...(19): siRNA sense strand
guauucuacgugaacuuua

SEQ ID NO: 1640512 - RNA, 19 nt, Homo sapiens
  misc_RNA (1)...(19): siRNA sense strand
ugaaguuaauccuagugau

SEQ ID NO: 1640513 - RNA, 19 nt, Homo sapiens
  misc_RNA (1)...(19): siRNA sense strand
ggcacaaucacaacaacuu

SEQ ID NO: 1640514 - RNA, 19 nt, Homo sapiens
  misc_RNA (1)...(19): siRNA sense strand
ugaacuuuaugguguugga

SEQ ID NO: 1640515 - RNA, 19 nt, Homo sapiens
  misc_RNA (1)...(19): siRNA sense strand
uguggugacuuuccucauc

SEQ ID NO: 1640516 - RNA, 19 nt, Homo sapiens
  misc_RNA (1)...(19): siRNA sense strand
cuaccaccuugaaguuaau

SEQ ID NO: 1640517 - RNA, 19 nt, Homo sapiens
  misc_RNA (1)...(19): siRNA sense strand
ccaucacaacuccaucuaa

SEQ ID NO: 1640518 - RNA, 19 nt, Homo sapiens
  misc_RNA (1)...(19): siRNA sense strand
acaacaacuugaaacaaac

SEQ ID NO: 1640519 - RNA, 19 nt, Homo sapiens
  misc_RNA (1)...(19): siRNA sense strand
gcaguguggugacuuuccu

SEQ ID NO: 1640520 - RNA, 19 nt, Homo sapiens
  misc_RNA (1)...(19): siRNA sense strand
gugaucccaccuauucgua

SEQ ID NO: 1640521 - RNA, 19 nt, Homo sapiens
  misc_RNA (1)...(19): siRNA sense strand
acaaucacaacaacuugaa

SEQ ID NO: 1640522 - RNA, 19 nt, Homo sapiens
  misc_RNA (1)...(19): siRNA sense strand
cacaaucacaacaacuuga

SEQ ID NO: 1640523 - RNA, 19 nt, Homo sapiens
  misc_RNA (1)...(19): siRNA sense strand
uagugaugcuggaaauagu

SEQ ID NO: 1640524 - RNA, 19 nt, Homo sapiens
  misc_RNA (1)...(19): siRNA sense strand
guggugacuuuccucaucu

SEQ ID NO: 1640525 - RNA, 19 nt, Homo sapiens
  misc_RNA (1)...(19): siRNA sense strand
caaucacaacaacuugaaa

SEQ ID NO: 1640526 - RNA, 19 nt, Homo sapiens
  misc_RNA (1)...(19): siRNA sense strand
ugaaaacaguggcacaauc

SEQ ID NO: 1640527 - RNA, 19 nt, Homo sapiens
  misc_RNA (1)...(19): siRNA sense strand
gaaauagugaccgaguagu

SEQ ID NO: 1640528 - RNA, 19 nt, Homo sapiens
  misc_RNA (1)...(19): siRNA sense strand
guuaguguacggaccauca

SEQ ID NO: 1640529 - RNA, 19 nt, Homo sapiens
  misc_RNA (1)...(19): siRNA sense strand
caacaacuugaaacaaacu

SEQ ID NO: 1640530 - RNA, 19 nt, Homo sapiens
  misc_RNA (1)...(19): siRNA sense strand
aaacaguggcacaaucaca

SEQ ID NO: 1640531 - RNA, 19 nt, Homo sapiens
  misc_RNA (1)...(19): siRNA sense strand
gaccaucacaacuccaucu

SEQ ID NO: 1640532 - RNA, 19 nt, Homo sapiens
  misc_RNA (1)...(19): siRNA sense strand
ggacggcuggacuaucaca

SEQ ID NO: 1640533 - RNA, 19 nt, Homo sapiens
  misc_RNA (1)...(19): siRNA sense strand
cuagugaugcuggaaauag

SEQ ID NO: 1640534 - RNA, 19 nt, Homo sapiens
  misc_RNA (1)...(19): siRNA sense strand
uguauucuacgugaacuuu

SEQ ID NO: 1640535 - RNA, 19 nt, Homo sapiens
  misc_RNA (1)...(19): siRNA sense strand
ggagauggaucaagcauua

SEQ ID NO: 1640536 - RNA, 19 nt, Homo sapiens
  misc_RNA (1)...(19): siRNA sense strand
gaaauccgcuugccucuaa

SEQ ID NO: 1640537 - RNA, 19 nt, Homo sapiens
  misc_RNA (1)...(19): siRNA sense strand
ggauaaaucuggcuaauug

SEQ ID NO: 1640538 - RNA, 19 nt, Homo sapiens
  misc_RNA (1)...(19): siRNA sense strand
gaacaggaauuaagccuuu

SEQ ID NO: 1640539 - RNA, 19 nt, Homo sapiens
  misc_RNA (1)...(19): siRNA sense strand
gagagaaucuucagagaaa

SEQ ID NO: 1640540 - RNA, 19 nt, Homo sapiens
  misc_RNA (1)...(19): siRNA sense strand
ggaacucaauaacgaaaua

SEQ ID NO: 1640541 - RNA, 19 nt, Homo sapiens
  misc_RNA (1)...(19): siRNA sense strand
gaugaugcgucuuugguua

SEQ ID NO: 1640542 - RNA, 19 nt, Homo sapiens
  misc_RNA (1)...(19): siRNA sense strand
ugacaacacugaaguagaa

SEQ ID NO: 1640543 - RNA, 19 nt, Homo sapiens
  misc_RNA (1)...(19): siRNA sense strand
gcucuuaacugcuguguug

SEQ ID NO: 1640544 - RNA, 19 nt, Homo sapiens
  misc_RNA (1)...(19): siRNA sense strand
gcaggaagcuacauucugu

SEQ ID NO: 1640545 - RNA, 19 nt, Homo sapiens
  misc_RNA (1)...(19): siRNA sense strand
gcaaacaacuagaaaccaa

SEQ ID NO: 1640546 - RNA, 19 nt, Homo sapiens
  misc_RNA (1)...(19): siRNA sense strand
ggacaaauccuuaaaagua

SEQ ID NO: 1640547 - RNA, 19 nt, Homo sapiens
  misc_RNA (1)...(19): siRNA sense strand
gaaaccagaugcagcaaau

SEQ ID NO: 1640548 - RNA, 19 nt, Homo sapiens
  misc_RNA (1)...(19): siRNA sense strand
agaagaagcugaagcagaa

SEQ ID NO: 1640549 - RNA, 19 nt, Homo sapiens
  misc_RNA (1)...(19): siRNA sense strand
gcucugacauucacuacua

SEQ ID NO: 1640550 - RNA, 19 nt, Homo sapiens
  misc_RNA (1)...(19): siRNA sense strand
ggagagggcugaacucaag

SEQ ID NO: 1640551 - RNA, 19 nt, Homo sapiens
  misc_RNA (1)...(19): siRNA sense strand
gacauucacuacuacauuu

SEQ ID NO: 1640552 - RNA, 19 nt, Homo sapiens
  misc_RNA (1)...(19): siRNA sense strand
ggacuuauccagaugauga

SEQ ID NO: 1640553 - RNA, 19 nt, Homo sapiens
  misc_RNA (1)...(19): siRNA sense strand
uuaaugaccucuucaguga

SEQ ID NO: 1640554 - RNA, 19 nt, Homo sapiens
  misc_RNA (1)...(19): siRNA sense strand
ggcgaugccucuuugaaua

SEQ ID NO: 1640555 - RNA, 19 nt, Homo sapiens
  misc_RNA (1)...(19): siRNA sense strand
gcagaaaauugaagugaua

SEQ ID NO: 1640556 - RNA, 19 nt, Homo sapiens
  misc_RNA (1)...(19): siRNA sense strand
gaucaagcauuagcagaaa

SEQ ID NO: 1640557 - RNA, 19 nt, Homo sapiens
  misc_RNA (1)...(19): siRNA sense strand
gaagugauacgugaaauug

SEQ ID NO: 1640558 - RNA, 19 nt, Homo sapiens
  misc_RNA (1)...(19): siRNA sense strand
caagugaauuccaguguug

SEQ ID NO: 1640559 - RNA, 19 nt, Homo sapiens
  misc_RNA (1)...(19): siRNA sense strand
uguuggaucuuacacauua

SEQ ID NO: 1640560 - RNA, 19 nt, Homo sapiens
  misc_RNA (1)...(19): siRNA sense strand
ucaagaacauagcaaagaa

SEQ ID NO: 1640561 - RNA, 19 nt, Homo sapiens
  misc_RNA (1)...(19): siRNA sense strand
gaacguccaucaauaaagc

SEQ ID NO: 1640562 - RNA, 19 nt, Homo sapiens
  misc_RNA (1)...(19): siRNA sense strand
acaaacaguugguguggua

SEQ ID NO: 1640563 - RNA, 19 nt, Homo sapiens
  misc_RNA (1)...(19): siRNA sense strand
cugaauaucuccucaaugu

SEQ ID NO: 1640564 - RNA, 19 nt, Homo sapiens
  misc_RNA (1)...(19): siRNA sense strand
gaacauagcaaagaaaguc

SEQ ID NO: 1640565 - RNA, 19 nt, Homo sapiens
  misc_RNA (1)...(19): siRNA sense strand
gaauuccaguguugaagaa

SEQ ID NO: 1640566 - RNA, 19 nt, Homo sapiens
  misc_RNA (1)...(19): siRNA sense strand
ccucaggccuugauaagaa

SEQ ID NO: 1640567 - RNA, 19 nt, Homo sapiens
  misc_RNA (1)...(19): siRNA sense strand
cagcagaagugaugaaagu

SEQ ID NO: 1640568 - RNA, 19 nt, Homo sapiens
  misc_RNA (1)...(19): siRNA sense strand
ucacaucuauaaccacaaa

SEQ ID NO: 1640569 - RNA, 19 nt, Homo sapiens
  misc_RNA (1)...(19): siRNA sense strand
uaacugcuguguugaugaa

SEQ ID NO: 1640570 - RNA, 19 nt, Homo sapiens
  misc_RNA (1)...(19): siRNA sense strand
gacgaaaucuagcccuuug

SEQ ID NO: 1640571 - RNA, 19 nt, Homo sapiens
  misc_RNA (1)...(19): siRNA sense strand
gggcugaacucaagauugg

SEQ ID NO: 1640572 - RNA, 19 nt, Homo sapiens
  misc_RNA (1)...(19): siRNA sense strand
ccaaggcuauuacuccaaa

SEQ ID NO: 1640573 - RNA, 19 nt, Homo sapiens
  misc_RNA (1)...(19): siRNA sense strand
cuacaaaccuauuggaaag

SEQ ID NO: 1640574 - RNA, 19 nt, Homo sapiens
  misc_RNA (1)...(19): siRNA sense strand
ggauaaugaugauaugaca

SEQ ID NO: 1640575 - RNA, 19 nt, Homo sapiens
  misc_RNA (1)...(19): siRNA sense strand
ucaguuacuuugucagaaa

SEQ ID NO: 1640576 - RNA, 19 nt, Homo sapiens
  misc_RNA (1)...(19): siRNA sense strand
gaagagaacacuuuugauu

SEQ ID NO: 1640577 - RNA, 19 nt, Homo sapiens
  misc_RNA (1)...(19): siRNA sense strand
ggauggcgaugccucuuug

SEQ ID NO: 1640578 - RNA, 19 nt, Homo sapiens
  misc_RNA (1)...(19): siRNA sense strand
aacagaacguccaucaaua

SEQ ID NO: 1640579 - RNA, 19 nt, Homo sapiens
  misc_RNA (1)...(19): siRNA sense strand
gaauaucuccucaaugucu

SEQ ID NO: 1640580 - RNA, 19 nt, Homo sapiens
  misc_RNA (1)...(19): siRNA sense strand
gauagaaccagccaacaga

SEQ ID NO: 1640581 - RNA, 19 nt, Homo sapiens
  misc_RNA (1)...(19): siRNA sense strand
caaagcgacuccucacauc

SEQ ID NO: 1640582 - RNA, 19 nt, Homo sapiens
  misc_RNA (1)...(19): siRNA sense strand
aaacagaacguccaucaau

SEQ ID NO: 1640583 - RNA, 19 nt, Homo sapiens
  misc_RNA (1)...(19): siRNA sense strand
gaucuucuuuacagcauug

SEQ ID NO: 1640584 - RNA, 19 nt, Homo sapiens
  misc_RNA (1)...(19): siRNA sense strand
gcgagagaaucuucagaga

SEQ ID NO: 1640585 - RNA, 19 nt, Homo sapiens
  misc_RNA (1)...(19): siRNA sense strand
caaaggccauccaagaaag

SEQ ID NO: 1640586 - RNA, 19 nt, Homo sapiens
  misc_RNA (1)...(19): siRNA sense strand
cagcagauaccaucaguga

SEQ ID NO: 1640587 - RNA, 19 nt, Homo sapiens
  misc_RNA (1)...(19): siRNA sense strand
acgcaacacuuuugaauua

SEQ ID NO: 1640588 - RNA, 19 nt, Homo sapiens
  misc_RNA (1)...(19): siRNA sense strand
acaggaagaugcacugaau

SEQ ID NO: 1640589 - RNA, 19 nt, Homo sapiens
  misc_RNA (1)...(19): siRNA sense strand
agaggaaggugaacuagau

SEQ ID NO: 1640590 - RNA, 19 nt, Homo sapiens
  misc_RNA (1)...(19): siRNA sense strand
cagaaaaggugaccgaaaa

SEQ ID NO: 1640591 - RNA, 19 nt, Homo sapiens
  misc_RNA (1)...(19): siRNA sense strand
gaaaucuacuacaucuauc

SEQ ID NO: 1640592 - RNA, 19 nt, Homo sapiens
  misc_RNA (1)...(19): siRNA sense strand
ccagugaaaucuacuacau

SEQ ID NO: 1640593 - RNA, 19 nt, Homo sapiens
  misc_RNA (1)...(19): siRNA sense strand
aaauuugucugcaaucuca

SEQ ID NO: 1640594 - RNA, 19 nt, Homo sapiens
  misc_RNA (1)...(19): siRNA sense strand
gcuacaaaccuauuggaaa

SEQ ID NO: 1640595 - RNA, 19 nt, Homo sapiens
  misc_RNA (1)...(19): siRNA sense strand
aaagcaacauucauucuuc

SEQ ID NO: 1640596 - RNA, 19 nt, Homo sapiens
  misc_RNA (1)...(19): siRNA sense strand
cgacuccucacaucuauaa

SEQ ID NO: 1640597 - RNA, 19 nt, Homo sapiens
  misc_RNA (1)...(19): siRNA sense strand
gaaaccaauugugaaguca

SEQ ID NO: 1640598 - RNA, 19 nt, Homo sapiens
  misc_RNA (1)...(19): siRNA sense strand
ggaaauacuaaguuuguuc

SEQ ID NO: 1640599 - RNA, 19 nt, Homo sapiens
  misc_RNA (1)...(19): siRNA sense strand
caagauguauccaaugacu

SEQ ID NO: 1640600 - RNA, 19 nt, Homo sapiens
  misc_RNA (1)...(19): siRNA sense strand
gaaagacaccagcagaagu

SEQ ID NO: 1640601 - RNA, 19 nt, Homo sapiens
  misc_RNA (1)...(19): siRNA sense strand
gaaaucuagcccuuugaaa

SEQ ID NO: 1640602 - RNA, 19 nt, Homo sapiens
  misc_RNA (1)...(19): siRNA sense strand
ggagagcguugucaagaac

SEQ ID NO: 1640603 - RNA, 19 nt, Homo sapiens
  misc_RNA (1)...(19): siRNA sense strand
guacaagaacagccuggua

SEQ ID NO: 1640604 - RNA, 19 nt, Homo sapiens
  misc_RNA (1)...(19): siRNA sense strand
acagaacguccaucaauaa

SEQ ID NO: 1640605 - RNA, 19 nt, Homo sapiens
  misc_RNA (1)...(19): siRNA sense strand
caccuagacuggaauugaa

SEQ ID NO: 1640606 - RNA, 19 nt, Homo sapiens
  misc_RNA (1)...(19): siRNA sense strand
ggccauccaagaaagauua

SEQ ID NO: 1640607 - RNA, 19 nt, Homo sapiens
  misc_RNA (1)...(19): siRNA sense strand
cgaaaccaauugugaaguc

SEQ ID NO: 1640608 - RNA, 19 nt, Homo sapiens
  misc_RNA (1)...(19): siRNA sense strand
cagaugacauuccugaaag

SEQ ID NO: 1640609 - RNA, 19 nt, Homo sapiens
  misc_RNA (1)...(19): siRNA sense strand
ugcaagauguauccaauga

SEQ ID NO: 1640610 - RNA, 19 nt, Homo sapiens
  misc_RNA (1)...(19): siRNA sense strand
ggaucaagcauuagcagaa

SEQ ID NO: 1640611 - RNA, 19 nt, Homo sapiens
  misc_RNA (1)...(19): siRNA sense strand
ccugaaagcucacucuucu

SEQ ID NO: 1640612 - RNA, 19 nt, Homo sapiens
  misc_RNA (1)...(19): siRNA sense strand
gcgaugccucuuugaauaa

SEQ ID NO: 1640613 - RNA, 19 nt, Homo sapiens
  misc_RNA (1)...(19): siRNA sense strand
gaugcuugcuacaaaccua

SEQ ID NO: 1640614 - RNA, 19 nt, Homo sapiens
  misc_RNA (1)...(19): siRNA sense strand
gaugagaaacgcaagaauc

SEQ ID NO: 1640615 - RNA, 19 nt, Homo sapiens
  misc_RNA (1)...(19): siRNA sense strand
ucaagugaauuccaguguu

SEQ ID NO: 1640616 - RNA, 19 nt, Homo sapiens
  misc_RNA (1)...(19): siRNA sense strand
guacuucaaacucucuuaa

SEQ ID NO: 1640617 - RNA, 19 nt, Homo sapiens
  misc_RNA (1)...(19): siRNA sense strand
aaccagaugcagcaaauua

SEQ ID NO: 1640618 - RNA, 19 nt, Homo sapiens
  misc_RNA (1)...(19): siRNA sense strand
gaauuuaugccauccaaag

SEQ ID NO: 1640619 - RNA, 19 nt, Homo sapiens
  misc_RNA (1)...(19): siRNA sense strand
caagggagaauuaaguaga

SEQ ID NO: 1640620 - RNA, 19 nt, Homo sapiens
  misc_RNA (1)...(19): siRNA sense strand
cgggaucucuggaugcaaa

SEQ ID NO: 1640621 - RNA, 19 nt, Homo sapiens
  misc_RNA (1)...(19): siRNA sense strand
gugcaagacgcaacacuuu

SEQ ID NO: 1640622 - RNA, 19 nt, Homo sapiens
  misc_RNA (1)...(19): siRNA sense strand
gugauagccuugguucuga

SEQ ID NO: 1640623 - RNA, 19 nt, Homo sapiens
  misc_RNA (1)...(19): siRNA sense strand
caucagacccaaagguuga

SEQ ID NO: 1640624 - RNA, 19 nt, Homo sapiens
  misc_RNA (1)...(19): siRNA sense strand
ggagaauuaaguagagaaa

SEQ ID NO: 1640625 - RNA, 19 nt, Homo sapiens
  misc_RNA (1)...(19): siRNA sense strand
cugggaagaugauguaaau

SEQ ID NO: 1640626 - RNA, 19 nt, Homo sapiens
  misc_RNA (1)...(19): siRNA sense strand
gaaacgcaagaaucccaua

SEQ ID NO: 1640627 - RNA, 19 nt, Homo sapiens
  misc_RNA (1)...(19): siRNA sense strand
uaacggugaugcucugaca

SEQ ID NO: 1640628 - RNA, 19 nt, Homo sapiens
  misc_RNA (1)...(19): siRNA sense strand
gaaacagaacguccaucaa

SEQ ID NO: 1640629 - RNA, 19 nt, Homo sapiens
  misc_RNA (1)...(19): siRNA sense strand
gcuacauucuguucccaaa

SEQ ID NO: 1640630 - RNA, 19 nt, Homo sapiens
  misc_RNA (1)...(19): siRNA sense strand
aaagcuacuucuccaguga

SEQ ID NO: 1640631 - RNA, 19 nt, Homo sapiens
  misc_RNA (1)...(19): siRNA sense strand
gaaggauaaaucuggcuaa

SEQ ID NO: 1640632 - RNA, 19 nt, Homo sapiens
  misc_RNA (1)...(19): siRNA sense strand
ucuggaaacuguauaucuu

SEQ ID NO: 1640633 - RNA, 19 nt, Homo sapiens
  misc_RNA (1)...(19): siRNA sense strand
gaucaguuacuuugucaga

SEQ ID NO: 1640634 - RNA, 19 nt, Homo sapiens
  misc_RNA (1)...(19): siRNA sense strand
ccaggaggaacaggaauua

SEQ ID NO: 1640635 - RNA, 19 nt, Homo sapiens
  misc_RNA (1)...(19): siRNA sense strand
ugagagagauccugaguuu

SEQ ID NO: 1640636 - RNA, 19 nt, Homo sapiens
  misc_RNA (1)...(19): siRNA sense strand
ggaccuagcccugaacaua

SEQ ID NO: 1640637 - RNA, 19 nt, Homo sapiens
  misc_RNA (1)...(19): siRNA sense strand
gaaaggauuugccagaucu

SEQ ID NO: 1640638 - RNA, 19 nt, Homo sapiens
  misc_RNA (1)...(19): siRNA sense strand
aaauagagauggagauguu

SEQ ID NO: 1640639 - RNA, 19 nt, Homo sapiens
  misc_RNA (1)...(19): siRNA sense strand
caacagaucagagaacaaa

SEQ ID NO: 1640640 - RNA, 19 nt, Homo sapiens
  misc_RNA (1)...(19): siRNA sense strand
gacaaagaguugagaaaca

SEQ ID NO: 1640641 - RNA, 19 nt, Homo sapiens
  misc_RNA (1)...(19): siRNA sense strand
gcgaaaggcuaucuuagag

SEQ ID NO: 1640642 - RNA, 19 nt, Homo sapiens
  misc_RNA (1)...(19): siRNA sense strand
gcaaugggaggaagaagaa

SEQ ID NO: 1640643 - RNA, 19 nt, Homo sapiens
  misc_RNA (1)...(19): siRNA sense strand
gaacagacaacagaucaga

SEQ ID NO: 1640644 - RNA, 19 nt, Homo sapiens
  misc_RNA (1)...(19): siRNA sense strand
auauguaccuuguggauuu

SEQ ID NO: 1640645 - RNA, 19 nt, Homo sapiens
  misc_RNA (1)...(19): siRNA sense strand
gagaaaggauuugccagau

SEQ ID NO: 1640646 - RNA, 19 nt, Homo sapiens
  misc_RNA (1)...(19): siRNA sense strand
uggauuacguggacucuuu

SEQ ID NO: 1640647 - RNA, 19 nt, Homo sapiens
  misc_RNA (1)...(19): siRNA sense strand
acaaagaguugagaaacaa

SEQ ID NO: 1640648 - RNA, 19 nt, Homo sapiens
  misc_RNA (1)...(19): siRNA sense strand
cacagaagaucauagacaa

SEQ ID NO: 1640649 - RNA, 19 nt, Homo sapiens
  misc_RNA (1)...(19): siRNA sense strand
gagaaagggacgacgauga

SEQ ID NO: 1640650 - RNA, 19 nt, Homo sapiens
  misc_RNA (1)...(19): siRNA sense strand
ccacggaccuagcccugaa

SEQ ID NO: 1640651 - RNA, 19 nt, Homo sapiens
  misc_RNA (1)...(19): siRNA sense strand
gacaugauuuccuauuaca

SEQ ID NO: 1640652 - RNA, 19 nt, Homo sapiens
  misc_RNA (1)...(19): siRNA sense strand
gugaagaauggguggauua

SEQ ID NO: 1640653 - RNA, 19 nt, Homo sapiens
  misc_RNA (1)...(19): siRNA sense strand
uggaugacaugauuuccua

SEQ ID NO: 1640654 - RNA, 19 nt, Homo sapiens
  misc_RNA (1)...(19): siRNA sense strand
aaggagacuuuauagauga

SEQ ID NO: 1640655 - RNA, 19 nt, Homo sapiens
  misc_RNA (1)...(19): siRNA sense strand
gaaagagaggcccugaaga

SEQ ID NO: 1640656 - RNA, 19 nt, Homo sapiens
  misc_RNA (1)...(19): siRNA sense strand
gaucauagacaagcgcaaa

SEQ ID NO: 1640657 - RNA, 19 nt, Homo sapiens
  misc_RNA (1)...(19): siRNA sense strand
gacaacagaucagagaaca

SEQ ID NO: 1640658 - RNA, 19 nt, Homo sapiens
  misc_RNA (1)...(19): siRNA sense strand
gaacuucagcgccagcaau

SEQ ID NO: 1640659 - RNA, 19 nt, Homo sapiens
  misc_RNA (1)...(19): siRNA sense strand
caaaguagaagucauuguc

SEQ ID NO: 1640660 - RNA, 19 nt, Homo sapiens
  misc_RNA (1)...(19): siRNA sense strand
aaaagaagguggaacagaa

SEQ ID NO: 1640661 - RNA, 19 nt, Homo sapiens
  misc_RNA (1)...(19): siRNA sense strand
gagacaaagaguugagaaa

SEQ ID NO: 1640662 - RNA, 19 nt, Homo sapiens
  misc_RNA (1)...(19): siRNA sense strand
ugacaugauuuccuauuac

SEQ ID NO: 1640663 - RNA, 19 nt, Homo sapiens
  misc_RNA (1)...(19): siRNA sense strand
aaagcgaaaggcuaucuua

SEQ ID NO: 1640664 - RNA, 19 nt, Homo sapiens
  misc_RNA (1)...(19): siRNA sense strand
gagauguuauugggccuuu

SEQ ID NO: 1640665 - RNA, 19 nt, Homo sapiens
  misc_RNA (1)...(19): siRNA sense strand
uagaggauauguaccuugu

SEQ ID NO: 1640666 - RNA, 19 nt, Homo sapiens
  misc_RNA (1)...(19): siRNA sense strand
ucacacagaagaucauaga

SEQ ID NO: 1640667 - RNA, 19 nt, Homo sapiens
  misc_RNA (1)...(19): siRNA sense strand
uagcaaaguagaagucauu

SEQ ID NO: 1640668 - RNA, 19 nt, Homo sapiens
  misc_RNA (1)...(19): siRNA sense strand
ggucagaagagaacugguu

SEQ ID NO: 1640669 - RNA, 19 nt, Homo sapiens
  misc_RNA (1)...(19): siRNA sense strand
gagaaacaagcagaugaaa

SEQ ID NO: 1640670 - RNA, 19 nt, Homo sapiens
  misc_RNA (1)...(19): siRNA sense strand
gaugacaugauuuccuauu

SEQ ID NO: 1640671 - RNA, 19 nt, Homo sapiens
  misc_RNA (1)...(19): siRNA sense strand
gaccagagccacggaccua

SEQ ID NO: 1640672 - RNA, 19 nt, Homo sapiens
  misc_RNA (1)...(19): siRNA sense strand
gaacagaagaagaaaauag

SEQ ID NO: 1640673 - RNA, 19 nt, Homo sapiens
  misc_RNA (1)...(19): siRNA sense strand
ggucgaagaggcagucaga

SEQ ID NO: 1640674 - RNA, 19 nt, Homo sapiens
  misc_RNA (1)...(19): siRNA sense strand
gaugaaaaccuuagagaug

SEQ ID NO: 1640675 - RNA, 19 nt, Homo sapiens
  misc_RNA (1)...(19): siRNA sense strand
gagacuuuauagaugaaga

SEQ ID NO: 1640676 - RNA, 19 nt, Homo sapiens
  misc_RNA (1)...(19): siRNA sense strand
gaacaaaacgagaaaacau

SEQ ID NO: 1640677 - RNA, 19 nt, Homo sapiens
  misc_RNA (1)...(19): siRNA sense strand
agaaaggauuugccagauc

SEQ ID NO: 1640678 - RNA, 19 nt, Homo sapiens
  misc_RNA (1)...(19): siRNA sense strand
aaagagaggcccugaagag

SEQ ID NO: 1640679 - RNA, 19 nt, Homo sapiens
  misc_RNA (1)...(19): siRNA sense strand
gaagaaguagaggauaugu

SEQ ID NO: 1640680 - RNA, 19 nt, Homo sapiens
  misc_RNA (1)...(19): siRNA sense strand
gccgucagauuacuuugug

SEQ ID NO: 1640681 - RNA, 19 nt, Homo sapiens
  misc_RNA (1)...(19): siRNA sense strand
ugagaaacaagcagaugaa

SEQ ID NO: 1640682 - RNA, 19 nt, Homo sapiens
  misc_RNA (1)...(19): siRNA sense strand
gaugaagaaguagaggaua

SEQ ID NO: 1640683 - RNA, 19 nt, Homo sapiens
  misc_RNA (1)...(19): siRNA sense strand
aagaauggguggauuacgu

SEQ ID NO: 1640684 - RNA, 19 nt, Homo sapiens
  misc_RNA (1)...(19): siRNA sense strand
gaaacaagcagaugaaaac

SEQ ID NO: 1640685 - RNA, 19 nt, Homo sapiens
  misc_RNA (1)...(19): siRNA sense strand
gcccguacauuaugaagac

SEQ ID NO: 1640686 - RNA, 19 nt, Homo sapiens
  misc_RNA (1)...(19): siRNA sense strand
ggauauguaccuuguggau

SEQ ID NO: 1640687 - RNA, 19 nt, Homo sapiens
  misc_RNA (1)...(19): siRNA sense strand
augaagaaguagaggauau

SEQ ID NO: 1640688 - RNA, 19 nt, Homo sapiens
  misc_RNA (1)...(19): siRNA sense strand
uagacaagcgcaaagaaau

SEQ ID NO: 1640689 - RNA, 19 nt, Homo sapiens
  misc_RNA (1)...(19): siRNA sense strand
cgaagaggcagucagaucu

SEQ ID NO: 1640690 - RNA, 19 nt, Homo sapiens
  misc_RNA (1)...(19): siRNA sense strand
gauauguaccuuguggauu

SEQ ID NO: 1640691 - RNA, 19 nt, Homo sapiens
  misc_RNA (1)...(19): siRNA sense strand
gaugcugcgugaacagaca

SEQ ID NO: 1640692 - RNA, 19 nt, Homo sapiens
  misc_RNA (1)...(19): siRNA sense strand
gugaacagacaacagauca

SEQ ID NO: 1640693 - RNA, 19 nt, Homo sapiens
  misc_RNA (1)...(19): siRNA sense strand
cguacauuaugaagacauu

SEQ ID NO: 1640694 - RNA, 19 nt, Homo sapiens
  misc_RNA (1)...(19): siRNA sense strand
uuacaaacaagugacauga

SEQ ID NO: 1640695 - RNA, 19 nt, Homo sapiens
  misc_RNA (1)...(19): siRNA sense strand
gcaaaguagaagucauugu

SEQ ID NO: 1640696 - RNA, 19 nt, Homo sapiens
  misc_RNA (1)...(19): siRNA sense strand
acacagaagaucauagaca

SEQ ID NO: 1640697 - RNA, 19 nt, Homo sapiens
  misc_RNA (1)...(19): siRNA sense strand
gaaaauagagauggagaug

SEQ ID NO: 1640698 - RNA, 19 nt, Homo sapiens
  misc_RNA (1)...(19): siRNA sense strand
agacaagcgcaaagaaaug

SEQ ID NO: 1640699 - RNA, 19 nt, Homo sapiens
  misc_RNA (1)...(19): siRNA sense strand
agaaguagaggauauguac

SEQ ID NO: 1640700 - RNA, 19 nt, Homo sapiens
  misc_RNA (1)...(19): siRNA sense strand
agaaagagaggcccugaag

SEQ ID NO: 1640701 - RNA, 19 nt, Homo sapiens
  misc_RNA (1)...(19): siRNA sense strand
gaccuagcccugaacauac

SEQ ID NO: 1640702 - RNA, 19 nt, Homo sapiens
  misc_RNA (1)...(19): siRNA sense strand
acagacaacagaucagaga

SEQ ID NO: 1640703 - RNA, 19 nt, Homo sapiens
  misc_RNA (1)...(19): siRNA sense strand
uaugaagacauucgggaaa

SEQ ID NO: 1640704 - RNA, 19 nt, Homo sapiens
  misc_RNA (1)...(19): siRNA sense strand
cauagacaagcgcaaagaa

SEQ ID NO: 1640705 - RNA, 19 nt, Homo sapiens
  misc_RNA (1)...(19): siRNA sense strand
cgagaaaacauaaaggaaa

SEQ ID NO: 1640706 - RNA, 19 nt, Homo sapiens
  misc_RNA (1)...(19): siRNA sense strand
gaagguggaacagaagaag

SEQ ID NO: 1640707 - RNA, 19 nt, Homo sapiens
  misc_RNA (1)...(19): siRNA sense strand
agagagauccugaguuugc

SEQ ID NO: 1640708 - RNA, 19 nt, Homo sapiens
  misc_RNA (1)...(19): siRNA sense strand
gaagaggcagucagaucuc

SEQ ID NO: 1640709 - RNA, 19 nt, Homo sapiens
  misc_RNA (1)...(19): siRNA sense strand
gcccagaguagcaaaguag

SEQ ID NO: 1640710 - RNA, 19 nt, Homo sapiens
  misc_RNA (1)...(19): siRNA sense strand
ucaaaacucuggaugacau

SEQ ID NO: 1640711 - RNA, 19 nt, Homo sapiens
  misc_RNA (1)...(19): siRNA sense strand
ggauuacguggacucuuug

SEQ ID NO: 1640712 - RNA, 19 nt, Homo sapiens
  misc_RNA (1)...(19): siRNA sense strand
gagauggagauguuauugg

SEQ ID NO: 1640713 - RNA, 19 nt, Homo sapiens
  misc_RNA (1)...(19): siRNA sense strand
auagacaagcgcaaagaaa

SEQ ID NO: 1640714 - RNA, 19 nt, Homo sapiens
  misc_RNA (1)...(19): siRNA sense strand
gagaugcugcgugaacaga

SEQ ID NO: 1640715 - RNA, 19 nt, Homo sapiens
  misc_RNA (1)...(19): siRNA sense strand
gggaggaagaagaaagaga

SEQ ID NO: 1640716 - RNA, 19 nt, Homo sapiens
  misc_RNA (1)...(19): siRNA sense strand
caucuggugcccauagaga

SEQ ID NO: 1640717 - RNA, 19 nt, Homo sapiens
  misc_RNA (1)...(19): siRNA sense strand
ccagaguagcaaaguagaa

SEQ ID NO: 1640718 - RNA, 19 nt, Homo sapiens
  misc_RNA (1)...(19): siRNA sense strand
uagagaugcugcgugaaca

SEQ ID NO: 1640719 - RNA, 19 nt, Homo sapiens
  misc_RNA (1)...(19): siRNA sense strand
gcuguaugagaaaggauuu

SEQ ID NO: 1640720 - RNA, 19 nt, Homo sapiens
  misc_RNA (1)...(19): siRNA sense strand
gucagaagagaacugguuu

SEQ ID NO: 1640721 - RNA, 19 nt, Homo sapiens
  misc_RNA (1)...(19): siRNA sense strand
guagcaaaguagaagucau

SEQ ID NO: 1640722 - RNA, 19 nt, Homo sapiens
  misc_RNA (1)...(19): siRNA sense strand
gacaagcgcaaagaaaugg

SEQ ID NO: 1640723 - RNA, 19 nt, Homo sapiens
  misc_RNA (1)...(19): siRNA sense strand
gaagauaugagaaaagaac

SEQ ID NO: 1640724 - RNA, 19 nt, Homo sapiens
  misc_RNA (1)...(19): siRNA sense strand
cgagacaaagaguugagaa

SEQ ID NO: 1640725 - RNA, 19 nt, Homo sapiens
  misc_RNA (1)...(19): siRNA sense strand
ugaagaaguagaggauaug

SEQ ID NO: 1640726 - RNA, 19 nt, Homo sapiens
  misc_RNA (1)...(19): siRNA sense strand
gcugagagagauccugagu

SEQ ID NO: 1640727 - RNA, 19 nt, Homo sapiens
  misc_RNA (1)...(19): siRNA sense strand
ggacgacgaugaggaaaac

SEQ ID NO: 1640728 - RNA, 19 nt, Homo sapiens
  misc_RNA (1)...(19): siRNA sense strand
uagagauggagauguuauu

SEQ ID NO: 1640729 - RNA, 19 nt, Homo sapiens
  misc_RNA (1)...(19): siRNA sense strand
acaagcagaugaaaaccuu

SEQ ID NO: 1640730 - RNA, 19 nt, Homo sapiens
  misc_RNA (1)...(19): siRNA sense strand
agaaagggacgacgaugag

SEQ ID NO: 1640731 - RNA, 19 nt, Homo sapiens
  misc_RNA (1)...(19): siRNA sense strand
ggaccgcggaaaagaauuu

SEQ ID NO: 1640732 - RNA, 19 nt, Homo sapiens
  misc_RNA (1)...(19): siRNA sense strand
ggagugggaccgcggaaaa

SEQ ID NO: 1640733 - RNA, 19 nt, Homo sapiens
  misc_RNA (1)...(19): siRNA sense strand
gaagaagaaaauagagaug

SEQ ID NO: 1640734 - RNA, 19 nt, Homo sapiens
  misc_RNA (1)...(19): siRNA sense strand
agagauggagauguuauug

SEQ ID NO: 1640735 - RNA, 19 nt, Homo sapiens
  misc_RNA (1)...(19): siRNA sense strand
gaagaucaaccaucaaaua

SEQ ID NO: 1640736 - RNA, 19 nt, Homo sapiens
  misc_RNA (1)...(19): siRNA sense strand
gaugaagacucugcuguuu

SEQ ID NO: 1640737 - RNA, 19 nt, Homo sapiens
  misc_RNA (1)...(19): siRNA sense strand
gaagccaggucauuugaug

SEQ ID NO: 1640738 - RNA, 19 nt, Homo sapiens
  misc_RNA (1)...(19): siRNA sense strand
gcugaagaguuuaccuaua

SEQ ID NO: 1640739 - RNA, 19 nt, Homo sapiens
  misc_RNA (1)...(19): siRNA sense strand
gaaguacacucagcaaaca

SEQ ID NO: 1640740 - RNA, 19 nt, Homo sapiens
  misc_RNA (1)...(19): siRNA sense strand
gaaguuacagacacguuua

SEQ ID NO: 1640741 - RNA, 19 nt, Homo sapiens
  misc_RNA (1)...(19): siRNA sense strand
ggauuuggcucuuccuaug

SEQ ID NO: 1640742 - RNA, 19 nt, Homo sapiens
  misc_RNA (1)...(19): siRNA sense strand
gugaguuucuauccaaaua

SEQ ID NO: 1640743 - RNA, 19 nt, Homo sapiens
  misc_RNA (1)...(19): siRNA sense strand
ccagggaugucuucucuug

SEQ ID NO: 1640744 - RNA, 19 nt, Homo sapiens
  misc_RNA (1)...(19): siRNA sense strand
ccuauaggcuguuauuuca

SEQ ID NO: 1640745 - RNA, 19 nt, Homo sapiens
  misc_RNA (1)...(19): siRNA sense strand
caucugcaauggugaguuu

SEQ ID NO: 1640746 - RNA, 19 nt, Homo sapiens
  misc_RNA (1)...(19): siRNA sense strand
gaagaaaauuguagcagaa

SEQ ID NO: 1640747 - RNA, 19 nt, Homo sapiens
  misc_RNA (1)...(19): siRNA sense strand
ccaccaggccuucuuauug

SEQ ID NO: 1640748 - RNA, 19 nt, Homo sapiens
  misc_RNA (1)...(19): siRNA sense strand
ucaaauaccuguggagagu

SEQ ID NO: 1640749 - RNA, 19 nt, Homo sapiens
  misc_RNA (1)...(19): siRNA sense strand
gcaccacuccagaacauuu

SEQ ID NO: 1640750 - RNA, 19 nt, Homo sapiens
  misc_RNA (1)...(19): siRNA sense strand
ggacguggaacuccugauu

SEQ ID NO: 1640751 - RNA, 19 nt, Homo sapiens
  misc_RNA (1)...(19): siRNA sense strand
acguggaacuccugauuua

SEQ ID NO: 1640752 - RNA, 19 nt, Homo sapiens
  misc_RNA (1)...(19): siRNA sense strand
cugaagaguuuaccuauag

SEQ ID NO: 1640753 - RNA, 19 nt, Homo sapiens
  misc_RNA (1)...(19): siRNA sense strand
gcucccagcuguccugaau

SEQ ID NO: 1640754 - RNA, 19 nt, Homo sapiens
  misc_RNA (1)...(19): siRNA sense strand
caagacuucugcucagguu

SEQ ID NO: 1640755 - RNA, 19 nt, Homo sapiens
  misc_RNA (1)...(19): siRNA sense strand
ugaagacucugcuguuuac

SEQ ID NO: 1640756 - RNA, 19 nt, Homo sapiens
  misc_RNA (1)...(19): siRNA sense strand
gcacuucuguggccuacuc

SEQ ID NO: 1640757 - RNA, 19 nt, Homo sapiens
  misc_RNA (1)...(19): siRNA sense strand
gacaguugccuuaauguga

SEQ ID NO: 1640758 - RNA, 19 nt, Homo sapiens
  misc_RNA (1)...(19): siRNA sense strand
cagaagaucaaccaucaaa

SEQ ID NO: 1640759 - RNA, 19 nt, Homo sapiens
  misc_RNA (1)...(19): siRNA sense strand
aaauaccuguggagaguuu

SEQ ID NO: 1640760 - RNA, 19 nt, Homo sapiens
  misc_RNA (1)...(19): siRNA sense strand
gaucaaccaucaaauaccu

SEQ ID NO: 1640761 - RNA, 19 nt, Homo sapiens
  misc_RNA (1)...(19): siRNA sense strand
cgugaacauuuacgaguuu

SEQ ID NO: 1640762 - RNA, 19 nt, Homo sapiens
  misc_RNA (1)...(19): siRNA sense strand
ccaaauaucccagaagauc

SEQ ID NO: 1640763 - RNA, 19 nt, Homo sapiens
  misc_RNA (1)...(19): siRNA sense strand
gcgugaacauuuacgaguu

SEQ ID NO: 1640764 - RNA, 19 nt, Homo sapiens
  misc_RNA (1)...(19): siRNA sense strand
gaauacaggcagccaagga

SEQ ID NO: 1640765 - RNA, 19 nt, Homo sapiens
  misc_RNA (1)...(19): siRNA sense strand
ggaugaagacucugcuguu

SEQ ID NO: 1640766 - RNA, 19 nt, Homo sapiens
  misc_RNA (1)...(19): siRNA sense strand
cccagaagaucaaccauca

SEQ ID NO: 1640767 - RNA, 19 nt, Homo sapiens
  misc_RNA (1)...(19): siRNA sense strand
caccauagauucccagcau

SEQ ID NO: 1640768 - RNA, 19 nt, Homo sapiens
  misc_RNA (1)...(19): siRNA sense strand
acaguugccuuaaugugaa

SEQ ID NO: 1640769 - RNA, 19 nt, Homo sapiens
  misc_RNA (1)...(19): siRNA sense strand
gaugucuucucuugcaaug

SEQ ID NO: 1640770 - RNA, 19 nt, Homo sapiens
  misc_RNA (1)...(19): siRNA sense strand
guggagaguuuaucuuucu

SEQ ID NO: 1640771 - RNA, 19 nt, Homo sapiens
  misc_RNA (1)...(19): siRNA sense strand
gaccugcccuacacacuca

SEQ ID NO: 1640772 - RNA, 19 nt, Homo sapiens
  misc_RNA (1)...(19): siRNA sense strand
gcagucacccugaaguaug

SEQ ID NO: 1640773 - RNA, 19 nt, Homo sapiens
  misc_RNA (1)...(19): siRNA sense strand
uggaacuccugauuuacua

SEQ ID NO: 1640774 - RNA, 19 nt, Homo sapiens
  misc_RNA (1)...(19): siRNA sense strand
gaguuucuauccaaauauc

SEQ ID NO: 1640775 - RNA, 19 nt, Homo sapiens
  misc_RNA (1)...(19): siRNA sense strand
caucucagcugcgaauaca

SEQ ID NO: 1640776 - RNA, 19 nt, Homo sapiens
  misc_RNA (1)...(19): siRNA sense strand
caccaggccuucuuauugg

SEQ ID NO: 1640777 - RNA, 19 nt, Homo sapiens
  misc_RNA (1)...(19): siRNA sense strand
ucugugagcgugaacauuu

SEQ ID NO: 1640778 - RNA, 19 nt, Homo sapiens
  misc_RNA (1)...(19): siRNA sense strand
cuacgagaaugaggagaaa

SEQ ID NO: 1640779 - RNA, 19 nt, Homo sapiens
  misc_RNA (1)...(19): siRNA sense strand
gaacauuuacgaguuugug

SEQ ID NO: 1640780 - RNA, 19 nt, Homo sapiens
  misc_RNA (1)...(19): siRNA sense strand
ggacaguugccuuaaugug

SEQ ID NO: 1640781 - RNA, 19 nt, Homo sapiens
  misc_RNA (1)...(19): siRNA sense strand
gaauuacaagacaagauga

SEQ ID NO: 1640782 - RNA, 19 nt, Homo sapiens
  misc_RNA (1)...(19): siRNA sense strand
uagcagaauuacaagacaa

SEQ ID NO: 1640783 - RNA, 19 nt, Homo sapiens
  misc_RNA (1)...(19): siRNA sense strand
guagcagaauuacaagaca

SEQ ID NO: 1640784 - RNA, 19 nt, Homo sapiens
  misc_RNA (1)...(19): siRNA sense strand
caacuuugaacuacgagaa

SEQ ID NO: 1640785 - RNA, 19 nt, Homo sapiens
  misc_RNA (1)...(19): siRNA sense strand
caauguggguaaccuccaa

SEQ ID NO: 1640786 - RNA, 19 nt, Homo sapiens
  misc_RNA (1)...(19): siRNA sense strand
gccaaggaaacacugauuu

SEQ ID NO: 1640787 - RNA, 19 nt, Homo sapiens
  misc_RNA (1)...(19): siRNA sense strand
caaauaucccagaagauca

SEQ ID NO: 1640788 - RNA, 19 nt, Homo sapiens
  misc_RNA (1)...(19): siRNA sense strand
ugucuucucuugcaaugug

SEQ ID NO: 1640789 - RNA, 19 nt, Homo sapiens
  misc_RNA (1)...(19): siRNA sense strand
cuuuacagauggagaaguu

SEQ ID NO: 1640790 - RNA, 19 nt, Homo sapiens
  misc_RNA (1)...(19): siRNA sense strand
cagugccgcugaagaguau

SEQ ID NO: 1640791 - RNA, 19 nt, Homo sapiens
  misc_RNA (1)...(19): siRNA sense strand
gacguggaacuccugauuu

SEQ ID NO: 1640792 - RNA, 19 nt, Homo sapiens
  misc_RNA (1)...(19): siRNA sense strand
uugagaagguccaauccaa

SEQ ID NO: 1640793 - RNA, 19 nt, Homo sapiens
  misc_RNA (1)...(19): siRNA sense strand
cugugagcgugaacauuua

SEQ ID NO: 1640794 - RNA, 19 nt, Homo sapiens
  misc_RNA (1)...(19): siRNA sense strand
uaaagaaguuaggaucaac

SEQ ID NO: 1640795 - RNA, 19 nt, Homo sapiens
  misc_RNA (1)...(19): siRNA sense strand
gagaaugaggagaaaguuc

SEQ ID NO: 1640796 - RNA, 19 nt, Homo sapiens
  misc_RNA (1)...(19): siRNA sense strand
agaauuacaagacaagaug

SEQ ID NO: 1640797 - RNA, 19 nt, Homo sapiens
  misc_RNA (1)...(19): siRNA sense strand
ccagugccgcugaagagua

SEQ ID NO: 1640798 - RNA, 19 nt, Homo sapiens
  misc_RNA (1)...(19): siRNA sense strand
ggagcugccucuggaagca

SEQ ID NO: 1640799 - RNA, 19 nt, Homo sapiens
  misc_RNA (1)...(19): siRNA sense strand
cagucacccugaaguaugu

SEQ ID NO: 1640800 - RNA, 19 nt, Homo sapiens
  misc_RNA (1)...(19): siRNA sense strand
gauuuggcucuuccuauga

SEQ ID NO: 1640801 - RNA, 19 nt, Homo sapiens
  misc_RNA (1)...(19): siRNA sense strand
gcaauggugaguuucuauc

SEQ ID NO: 1640802 - RNA, 19 nt, Homo sapiens
  misc_RNA (1)...(19): siRNA sense strand
gaacuccugauuuacuaca

SEQ ID NO: 1640803 - RNA, 19 nt, Homo sapiens
  misc_RNA (1)...(19): siRNA sense strand
gagaagguccaauccaacu

SEQ ID NO: 1640804 - RNA, 19 nt, Homo sapiens
  misc_RNA (1)...(19): siRNA sense strand
ccagcuguccugaauccua

SEQ ID NO: 1640805 - RNA, 19 nt, Homo sapiens
  misc_RNA (1)...(19): siRNA sense strand
gagaaguuacagacacguu

SEQ ID NO: 1640806 - RNA, 19 nt, Homo sapiens
  misc_RNA (1)...(19): siRNA sense strand
caccacuccagaacauuua

SEQ ID NO: 1640807 - RNA, 19 nt, Homo sapiens
  misc_RNA (1)...(19): siRNA sense strand
uauaggcuguuauuucaac

SEQ ID NO: 1640808 - RNA, 19 nt, Homo sapiens
  misc_RNA (1)...(19): siRNA sense strand
uaggagaggacaagacuuc

SEQ ID NO: 1640809 - RNA, 19 nt, Homo sapiens
  misc_RNA (1)...(19): siRNA sense strand
ggucgucuaaggacaguug

SEQ ID NO: 1640810 - RNA, 19 nt, Homo sapiens
  misc_RNA (1)...(19): siRNA sense strand
guuaggaucaacagacaga

SEQ ID NO: 1640811 - RNA, 19 nt, Homo sapiens
  misc_RNA (1)...(19): siRNA sense strand
ggaccgcucgggaaguaug

SEQ ID NO: 1640812 - RNA, 19 nt, Homo sapiens
  misc_RNA (1)...(19): siRNA sense strand
auccaaauaucccagaaga

SEQ ID NO: 1640813 - RNA, 19 nt, Homo sapiens
  misc_RNA (1)...(19): siRNA sense strand
guuuguggcuggugugucu

SEQ ID NO: 1640814 - RNA, 19 nt, Homo sapiens
  misc_RNA (1)...(19): siRNA sense strand
ugucugcaacuuugaacua

SEQ ID NO: 1640815 - RNA, 19 nt, Homo sapiens
  misc_RNA (1)...(19): siRNA sense strand
guuuaccuauaggcuguua

SEQ ID NO: 1640816 - RNA, 19 nt, Homo sapiens
  misc_RNA (1)...(19): siRNA sense strand
uuggaggccuucuuugugu

SEQ ID NO: 1640817 - RNA, 19 nt, Homo sapiens
  misc_RNA (1)...(19): siRNA sense strand
ggagaggacaagacuucug

SEQ ID NO: 1640818 - RNA, 19 nt, Homo sapiens
  misc_RNA (1)...(19): siRNA sense strand
agaaguuacagacacguuu

SEQ ID NO: 1640819 - RNA, 19 nt, Homo sapiens
  misc_RNA (1)...(19): siRNA sense strand
augaagacucugcuguuua

SEQ ID NO: 1640820 - RNA, 19 nt, Homo sapiens
  misc_RNA (1)...(19): siRNA sense strand
gcuggugugucugcaacuu

SEQ ID NO: 1640821 - RNA, 19 nt, Homo sapiens
  misc_RNA (1)...(19): siRNA sense strand
gggaugucuucucuugcaa

SEQ ID NO: 1640822 - RNA, 19 nt, Homo sapiens
  misc_RNA (1)...(19): siRNA sense strand
uggcaccacuccagaacau

SEQ ID NO: 1640823 - RNA, 19 nt, Homo sapiens
  misc_RNA (1)...(19): siRNA sense strand
ugaaguacacucagcaaac

SEQ ID NO: 1640824 - RNA, 19 nt, Homo sapiens
  misc_RNA (1)...(19): siRNA sense strand
aaauaucccagaagaucaa

SEQ ID NO: 1640825 - RNA, 19 nt, Homo sapiens
  misc_RNA (1)...(19): siRNA sense strand
cggcagucacccugaagua

SEQ ID NO: 1640826 - RNA, 19 nt, Homo sapiens
  misc_RNA (1)...(19): siRNA sense strand
gccaccaggccuucuuauu

SEQ ID NO: 1640827 - RNA, 19 nt, Homo sapiens
  misc_RNA (1)...(19): siRNA sense strand
ggagagugaagcuuaugca

SEQ ID NO: 1640828 - RNA, 19 nt, Homo sapiens
  misc_RNA (1)...(19): siRNA sense strand
gugaaguacacucagcaaa

SEQ ID NO: 1640829 - RNA, 19 nt, Homo sapiens
  misc_RNA (1)...(19): siRNA sense strand
uuaccuauaggcuguuauu

SEQ ID NO: 1640830 - RNA, 19 nt, Homo sapiens
  misc_RNA (1)...(19): siRNA sense strand
ccaaggaaacacugauuuu

SEQ ID NO: 1640831 - RNA, 19 nt, Homo sapiens
  misc_RNA (1)...(19): siRNA sense strand
ccgcaccaacuaugagaaa

SEQ ID NO: 1640832 - RNA, 19 nt, Homo sapiens
  misc_RNA (1)...(19): siRNA sense strand
gagccagugccgcugaaga

SEQ ID NO: 1640833 - RNA, 19 nt, Homo sapiens
  misc_RNA (1)...(19): siRNA sense strand
cugcaauggugaguuucua

SEQ ID NO: 1640834 - RNA, 19 nt, Homo sapiens
  misc_RNA (1)...(19): siRNA sense strand
uggugugucugcaacuuug

SEQ ID NO: 1640835 - RNA, 19 nt, Homo sapiens
  misc_RNA (1)...(19): siRNA sense strand
gaagaucaaccaucaaaua

SEQ ID NO: 1640836 - RNA, 19 nt, Homo sapiens
  misc_RNA (1)...(19): siRNA sense strand
gaugaagacucugcuguuu

SEQ ID NO: 1640837 - RNA, 19 nt, Homo sapiens
  misc_RNA (1)...(19): siRNA sense strand
gaagccaggucauuugaug

SEQ ID NO: 1640838 - RNA, 19 nt, Homo sapiens
  misc_RNA (1)...(19): siRNA sense strand
gcugaagaguuuaccuaua

SEQ ID NO: 1640839 - RNA, 19 nt, Homo sapiens
  misc_RNA (1)...(19): siRNA sense strand
gaaguacacucagcaaaca

SEQ ID NO: 1640840 - RNA, 19 nt, Homo sapiens
  misc_RNA (1)...(19): siRNA sense strand
gaaguuacagacacguuua

SEQ ID NO: 1640841 - RNA, 19 nt, Homo sapiens
  misc_RNA (1)...(19): siRNA sense strand
ggauuuggcucuuccuaug

SEQ ID NO: 1640842 - RNA, 19 nt, Homo sapiens
  misc_RNA (1)...(19): siRNA sense strand
gugaguuucuauccaaaua

SEQ ID NO: 1640843 - RNA, 19 nt, Homo sapiens
  misc_RNA (1)...(19): siRNA sense strand
ccagggaugucuucucuug

SEQ ID NO: 1640844 - RNA, 19 nt, Homo sapiens
  misc_RNA (1)...(19): siRNA sense strand
ccuauaggcuguuauuuca

SEQ ID NO: 1640845 - RNA, 19 nt, Homo sapiens
  misc_RNA (1)...(19): siRNA sense strand
caucugcaauggugaguuu

SEQ ID NO: 1640846 - RNA, 19 nt, Homo sapiens
  misc_RNA (1)...(19): siRNA sense strand
gaagaaaauuguagcagaa

SEQ ID NO: 1640847 - RNA, 19 nt, Homo sapiens
  misc_RNA (1)...(19): siRNA sense strand
ccaccaggccuucuuauug

SEQ ID NO: 1640848 - RNA, 19 nt, Homo sapiens
  misc_RNA (1)...(19): siRNA sense strand
ucaaauaccuguggagagu

SEQ ID NO: 1640849 - RNA, 19 nt, Homo sapiens
  misc_RNA (1)...(19): siRNA sense strand
gcaccacuccagaacauuu

SEQ ID NO: 1640850 - RNA, 19 nt, Homo sapiens
  misc_RNA (1)...(19): siRNA sense strand
ggacguggaacuccugauu

SEQ ID NO: 1640851 - RNA, 19 nt, Homo sapiens
  misc_RNA (1)...(19): siRNA sense strand
acguggaacuccugauuua

SEQ ID NO: 1640852 - RNA, 19 nt, Homo sapiens
  misc_RNA (1)...(19): siRNA sense strand
cugaagaguuuaccuauag

SEQ ID NO: 1640853 - RNA, 19 nt, Homo sapiens
  misc_RNA (1)...(19): siRNA sense strand
gcucccagcuguccugaau

SEQ ID NO: 1640854 - RNA, 19 nt, Homo sapiens
  misc_RNA (1)...(19): siRNA sense strand
caagacuucugcucagguu

SEQ ID NO: 1640855 - RNA, 19 nt, Homo sapiens
  misc_RNA (1)...(19): siRNA sense strand
ugaagacucugcuguuuac

SEQ ID NO: 1640856 - RNA, 19 nt, Homo sapiens
  misc_RNA (1)...(19): siRNA sense strand
gcacuucuguggccuacuc

SEQ ID NO: 1640857 - RNA, 19 nt, Homo sapiens
  misc_RNA (1)...(19): siRNA sense strand
gacaguugccuuaauguga

SEQ ID NO: 1640858 - RNA, 19 nt, Homo sapiens
  misc_RNA (1)...(19): siRNA sense strand
cagaagaucaaccaucaaa

SEQ ID NO: 1640859 - RNA, 19 nt, Homo sapiens
  misc_RNA (1)...(19): siRNA sense strand
aaauaccuguggagaguuu

SEQ ID NO: 1640860 - RNA, 19 nt, Homo sapiens
  misc_RNA (1)...(19): siRNA sense strand
gaucaaccaucaaauaccu

SEQ ID NO: 1640861 - RNA, 19 nt, Homo sapiens
  misc_RNA (1)...(19): siRNA sense strand
cgugaacauuuacgaguuu

SEQ ID NO: 1640862 - RNA, 19 nt, Homo sapiens
  misc_RNA (1)...(19): siRNA sense strand
ccaaauaucccagaagauc

SEQ ID NO: 1640863 - RNA, 19 nt, Homo sapiens
  misc_RNA (1)...(19): siRNA sense strand
gcgugaacauuuacgaguu

SEQ ID NO: 1640864 - RNA, 19 nt, Homo sapiens
  misc_RNA (1)...(19): siRNA sense strand
gaauacaggcagccaagga

SEQ ID NO: 1640865 - RNA, 19 nt, Homo sapiens
  misc_RNA (1)...(19): siRNA sense strand
ggaugaagacucugcuguu

SEQ ID NO: 1640866 - RNA, 19 nt, Homo sapiens
  misc_RNA (1)...(19): siRNA sense strand
cccagaagaucaaccauca

SEQ ID NO: 1640867 - RNA, 19 nt, Homo sapiens
  misc_RNA (1)...(19): siRNA sense strand
caccauagauucccagcau

SEQ ID NO: 1640868 - RNA, 19 nt, Homo sapiens
  misc_RNA (1)...(19): siRNA sense strand
acaguugccuuaaugugaa

SEQ ID NO: 1640869 - RNA, 19 nt, Homo sapiens
  misc_RNA (1)...(19): siRNA sense strand
gaugucuucucuugcaaug

SEQ ID NO: 1640870 - RNA, 19 nt, Homo sapiens
  misc_RNA (1)...(19): siRNA sense strand
guggagaguuuaucuuucu

SEQ ID NO: 1640871 - RNA, 19 nt, Homo sapiens
  misc_RNA (1)...(19): siRNA sense strand
gaccugcccuacacacuca

SEQ ID NO: 1640872 - RNA, 19 nt, Homo sapiens
  misc_RNA (1)...(19): siRNA sense strand
gcagucacccugaaguaug

SEQ ID NO: 1640873 - RNA, 19 nt, Homo sapiens
  misc_RNA (1)...(19): siRNA sense strand
uggaacuccugauuuacua

SEQ ID NO: 1640874 - RNA, 19 nt, Homo sapiens
  misc_RNA (1)...(19): siRNA sense strand
gaguuucuauccaaauauc

SEQ ID NO: 1640875 - RNA, 19 nt, Homo sapiens
  misc_RNA (1)...(19): siRNA sense strand
caucucagcugcgaauaca

SEQ ID NO: 1640876 - RNA, 19 nt, Homo sapiens
  misc_RNA (1)...(19): siRNA sense strand
caccaggccuucuuauugg

SEQ ID NO: 1640877 - RNA, 19 nt, Homo sapiens
  misc_RNA (1)...(19): siRNA sense strand
ucugugagcgugaacauuu

SEQ ID NO: 1640878 - RNA, 19 nt, Homo sapiens
  misc_RNA (1)...(19): siRNA sense strand
cuacgagaaugaggagaaa

SEQ ID NO: 1640879 - RNA, 19 nt, Homo sapiens
  misc_RNA (1)...(19): siRNA sense strand
gaacauuuacgaguuugug

SEQ ID NO: 1640880 - RNA, 19 nt, Homo sapiens
  misc_RNA (1)...(19): siRNA sense strand
ggacaguugccuuaaugug

SEQ ID NO: 1640881 - RNA, 19 nt, Homo sapiens
  misc_RNA (1)...(19): siRNA sense strand
gaauuacaagacaagauga

SEQ ID NO: 1640882 - RNA, 19 nt, Homo sapiens
  misc_RNA (1)...(19): siRNA sense strand
uagcagaauuacaagacaa

SEQ ID NO: 1640883 - RNA, 19 nt, Homo sapiens
  misc_RNA (1)...(19): siRNA sense strand
guagcagaauuacaagaca

SEQ ID NO: 1640884 - RNA, 19 nt, Homo sapiens
  misc_RNA (1)...(19): siRNA sense strand
caacuuugaacuacgagaa

SEQ ID NO: 1640885 - RNA, 19 nt, Homo sapiens
  misc_RNA (1)...(19): siRNA sense strand
caauguggguaaccuccaa

SEQ ID NO: 1640886 - RNA, 19 nt, Homo sapiens
  misc_RNA (1)...(19): siRNA sense strand
gccaaggaaacacugauuu

SEQ ID NO: 1640887 - RNA, 19 nt, Homo sapiens
  misc_RNA (1)...(19): siRNA sense strand
caaauaucccagaagauca

SEQ ID NO: 1640888 - RNA, 19 nt, Homo sapiens
  misc_RNA (1)...(19): siRNA sense strand
ugucuucucuugcaaugug

SEQ ID NO: 1640889 - RNA, 19 nt, Homo sapiens
  misc_RNA (1)...(19): siRNA sense strand
cuuuacagauggagaaguu

SEQ ID NO: 1640890 - RNA, 19 nt, Homo sapiens
  misc_RNA (1)...(19): siRNA sense strand
cagugccgcugaagaguau

SEQ ID NO: 1640891 - RNA, 19 nt, Homo sapiens
  misc_RNA (1)...(19): siRNA sense strand
gacguggaacuccugauuu

SEQ ID NO: 1640892 - RNA, 19 nt, Homo sapiens
  misc_RNA (1)...(19): siRNA sense strand
uugagaagguccaauccaa

SEQ ID NO: 1640893 - RNA, 19 nt, Homo sapiens
  misc_RNA (1)...(19): siRNA sense strand
cugugagcgugaacauuua

SEQ ID NO: 1640894 - RNA, 19 nt, Homo sapiens
  misc_RNA (1)...(19): siRNA sense strand
uaaagaaguuaggaucaac

SEQ ID NO: 1640895 - RNA, 19 nt, Homo sapiens
  misc_RNA (1)...(19): siRNA sense strand
gagaaugaggagaaaguuc

SEQ ID NO: 1640896 - RNA, 19 nt, Homo sapiens
  misc_RNA (1)...(19): siRNA sense strand
agaauuacaagacaagaug

SEQ ID NO: 1640897 - RNA, 19 nt, Homo sapiens
  misc_RNA (1)...(19): siRNA sense strand
ccagugccgcugaagagua

SEQ ID NO: 1640898 - RNA, 19 nt, Homo sapiens
  misc_RNA (1)...(19): siRNA sense strand
ggagcugccucuggaagca

SEQ ID NO: 1640899 - RNA, 19 nt, Homo sapiens
  misc_RNA (1)...(19): siRNA sense strand
cagucacccugaaguaugu

SEQ ID NO: 1640900 - RNA, 19 nt, Homo sapiens
  misc_RNA (1)...(19): siRNA sense strand
gauuuggcucuuccuauga

SEQ ID NO: 1640901 - RNA, 19 nt, Homo sapiens
  misc_RNA (1)...(19): siRNA sense strand
gcaauggugaguuucuauc

SEQ ID NO: 1640902 - RNA, 19 nt, Homo sapiens
  misc_RNA (1)...(19): siRNA sense strand
gaacuccugauuuacuaca

SEQ ID NO: 1640903 - RNA, 19 nt, Homo sapiens
  misc_RNA (1)...(19): siRNA sense strand
gagaagguccaauccaacu

SEQ ID NO: 1640904 - RNA, 19 nt, Homo sapiens
  misc_RNA (1)...(19): siRNA sense strand
ccagcuguccugaauccua

SEQ ID NO: 1640905 - RNA, 19 nt, Homo sapiens
  misc_RNA (1)...(19): siRNA sense strand
gagaaguuacagacacguu

SEQ ID NO: 1640906 - RNA, 19 nt, Homo sapiens
  misc_RNA (1)...(19): siRNA sense strand
caccacuccagaacauuua

SEQ ID NO: 1640907 - RNA, 19 nt, Homo sapiens
  misc_RNA (1)...(19): siRNA sense strand
uauaggcuguuauuucaac

SEQ ID NO: 1640908 - RNA, 19 nt, Homo sapiens
  misc_RNA (1)...(19): siRNA sense strand
uaggagaggacaagacuuc

SEQ ID NO: 1640909 - RNA, 19 nt, Homo sapiens
  misc_RNA (1)...(19): siRNA sense strand
ggucgucuaaggacaguug

SEQ ID NO: 1640910 - RNA, 19 nt, Homo sapiens
  misc_RNA (1)...(19): siRNA sense strand
guuaggaucaacagacaga

SEQ ID NO: 1640911 - RNA, 19 nt, Homo sapiens
  misc_RNA (1)...(19): siRNA sense strand
ggaccgcucgggaaguaug

SEQ ID NO: 1640912 - RNA, 19 nt, Homo sapiens
  misc_RNA (1)...(19): siRNA sense strand
auccaaauaucccagaaga

SEQ ID NO: 1640913 - RNA, 19 nt, Homo sapiens
  misc_RNA (1)...(19): siRNA sense strand
guuuguggcuggugugucu

SEQ ID NO: 1640914 - RNA, 19 nt, Homo sapiens
  misc_RNA (1)...(19): siRNA sense strand
ugucugcaacuuugaacua

SEQ ID NO: 1640915 - RNA, 19 nt, Homo sapiens
  misc_RNA (1)...(19): siRNA sense strand
guuuaccuauaggcuguua

SEQ ID NO: 1640916 - RNA, 19 nt, Homo sapiens
  misc_RNA (1)...(19): siRNA sense strand
uuggaggccuucuuugugu

SEQ ID NO: 1640917 - RNA, 19 nt, Homo sapiens
  misc_RNA (1)...(19): siRNA sense strand
ggagaggacaagacuucug

SEQ ID NO: 1640918 - RNA, 19 nt, Homo sapiens
  misc_RNA (1)...(19): siRNA sense strand
agaaguuacagacacguuu

SEQ ID NO: 1640919 - RNA, 19 nt, Homo sapiens
  misc_RNA (1)...(19): siRNA sense strand
augaagacucugcuguuua

SEQ ID NO: 1640920 - RNA, 19 nt, Homo sapiens
  misc_RNA (1)...(19): siRNA sense strand
gcuggugugucugcaacuu

SEQ ID NO: 1640921 - RNA, 19 nt, Homo sapiens
  misc_RNA (1)...(19): siRNA sense strand
gggaugucuucucuugcaa

SEQ ID NO: 1640922 - RNA, 19 nt, Homo sapiens
  misc_RNA (1)...(19): siRNA sense strand
uggcaccacuccagaacau

SEQ ID NO: 1640923 - RNA, 19 nt, Homo sapiens
  misc_RNA (1)...(19): siRNA sense strand
ugaaguacacucagcaaac

SEQ ID NO: 1640924 - RNA, 19 nt, Homo sapiens
  misc_RNA (1)...(19): siRNA sense strand
aaauaucccagaagaucaa

SEQ ID NO: 1640925 - RNA, 19 nt, Homo sapiens
  misc_RNA (1)...(19): siRNA sense strand
cggcagucacccugaagua

SEQ ID NO: 1640926 - RNA, 19 nt, Homo sapiens
  misc_RNA (1)...(19): siRNA sense strand
gccaccaggccuucuuauu

SEQ ID NO: 1640927 - RNA, 19 nt, Homo sapiens
  misc_RNA (1)...(19): siRNA sense strand
ggagagugaagcuuaugca

SEQ ID NO: 1640928 - RNA, 19 nt, Homo sapiens
  misc_RNA (1)...(19): siRNA sense strand
gugaaguacacucagcaaa

SEQ ID NO: 1640929 - RNA, 19 nt, Homo sapiens
  misc_RNA (1)...(19): siRNA sense strand
uuaccuauaggcuguuauu

SEQ ID NO: 1640930 - RNA, 19 nt, Homo sapiens
  misc_RNA (1)...(19): siRNA sense strand
ccaaggaaacacugauuuu

SEQ ID NO: 1640931 - RNA, 19 nt, Homo sapiens
  misc_RNA (1)...(19): siRNA sense strand
ccgcaccaacuaugagaaa

SEQ ID NO: 1640932 - RNA, 19 nt, Homo sapiens
  misc_RNA (1)...(19): siRNA sense strand
gagccagugccgcugaaga

SEQ ID NO: 1640933 - RNA, 19 nt, Homo sapiens
  misc_RNA (1)...(19): siRNA sense strand
cugcaauggugaguuucua

SEQ ID NO: 1640934 - RNA, 19 nt, Homo sapiens
  misc_RNA (1)...(19): siRNA sense strand
uggugugucugcaacuuug

SEQ ID NO: 1640935 - RNA, 19 nt, Homo sapiens
  misc_RNA (1)...(19): siRNA sense strand
acacagaacuggauuuaua

SEQ ID NO: 1640936 - RNA, 19 nt, Homo sapiens
  misc_RNA (1)...(19): siRNA sense strand
gaccauaacucuuacguaa

SEQ ID NO: 1640937 - RNA, 19 nt, Homo sapiens
  misc_RNA (1)...(19): siRNA sense strand
ggaauaaaccaguaacuaa

SEQ ID NO: 1640938 - RNA, 19 nt, Homo sapiens
  misc_RNA (1)...(19): siRNA sense strand
gagcagcacuauuacagua

SEQ ID NO: 1640939 - RNA, 19 nt, Homo sapiens
  misc_RNA (1)...(19): siRNA sense strand
gaagaagguucaauuugga

SEQ ID NO: 1640940 - RNA, 19 nt, Homo sapiens
  misc_RNA (1)...(19): siRNA sense strand
ggaauuacuugacacagaa

SEQ ID NO: 1640941 - RNA, 19 nt, Homo sapiens
  misc_RNA (1)...(19): siRNA sense strand
gcacaaaggcccaacuuga

SEQ ID NO: 1640942 - RNA, 19 nt, Homo sapiens
  misc_RNA (1)...(19): siRNA sense strand
gaaagagacacagauauuu

SEQ ID NO: 1640943 - RNA, 19 nt, Homo sapiens
  misc_RNA (1)...(19): siRNA sense strand
gauagaagcaggacuagaa

SEQ ID NO: 1640944 - RNA, 19 nt, Homo sapiens
  misc_RNA (1)...(19): siRNA sense strand
gagaaaagccucccaauaa

SEQ ID NO: 1640945 - RNA, 19 nt, Homo sapiens
  misc_RNA (1)...(19): siRNA sense strand
uagaacagauccauuagaa

SEQ ID NO: 1640946 - RNA, 19 nt, Homo sapiens
  misc_RNA (1)...(19): siRNA sense strand
ucauggagcucguuucaaa

SEQ ID NO: 1640947 - RNA, 19 nt, Homo sapiens
  misc_RNA (1)...(19): siRNA sense strand
ucacugaacuuaggagaaa

SEQ ID NO: 1640948 - RNA, 19 nt, Homo sapiens
  misc_RNA (1)...(19): siRNA sense strand
caaaauauguucuggcuuu

SEQ ID NO: 1640949 - RNA, 19 nt, Homo sapiens
  misc_RNA (1)...(19): siRNA sense strand
ggagaaaguauacagaauu

SEQ ID NO: 1640950 - RNA, 19 nt, Homo sapiens
  misc_RNA (1)...(19): siRNA sense strand
aagaagacuugguuugaua

SEQ ID NO: 1640951 - RNA, 19 nt, Homo sapiens
  misc_RNA (1)...(19): siRNA sense strand
gagcagccaucaucaggaa

SEQ ID NO: 1640952 - RNA, 19 nt, Homo sapiens
  misc_RNA (1)...(19): siRNA sense strand
gaugcaggcuggagaagaa

SEQ ID NO: 1640953 - RNA, 19 nt, Homo sapiens
  misc_RNA (1)...(19): siRNA sense strand
ggaaacaacacuaccgaaa

SEQ ID NO: 1640954 - RNA, 19 nt, Homo sapiens
  misc_RNA (1)...(19): siRNA sense strand
ggagagcgauagagaagau

SEQ ID NO: 1640955 - RNA, 19 nt, Homo sapiens
  misc_RNA (1)...(19): siRNA sense strand
ucgaagagauucauacaga

SEQ ID NO: 1640956 - RNA, 19 nt, Homo sapiens
  misc_RNA (1)...(19): siRNA sense strand
acaaugaagucugaagaua

SEQ ID NO: 1640957 - RNA, 19 nt, Homo sapiens
  misc_RNA (1)...(19): siRNA sense strand
ugacacagauggcuacaau

SEQ ID NO: 1640958 - RNA, 19 nt, Homo sapiens
  misc_RNA (1)...(19): siRNA sense strand
gaaacgguguagagacuau

SEQ ID NO: 1640959 - RNA, 19 nt, Homo sapiens
  misc_RNA (1)...(19): siRNA sense strand
gaacagauccauuagaaaa

SEQ ID NO: 1640960 - RNA, 19 nt, Homo sapiens
  misc_RNA (1)...(19): siRNA sense strand
gcaaagaaagcaauaucaa

SEQ ID NO: 1640961 - RNA, 19 nt, Homo sapiens
  misc_RNA (1)...(19): siRNA sense strand
ccucugcaguugauaauaa

SEQ ID NO: 1640962 - RNA, 19 nt, Homo sapiens
  misc_RNA (1)...(19): siRNA sense strand
gaagcaguauuaaacaauc

SEQ ID NO: 1640963 - RNA, 19 nt, Homo sapiens
  misc_RNA (1)...(19): siRNA sense strand
gcuggaagcugccaaacga

SEQ ID NO: 1640964 - RNA, 19 nt, Homo sapiens
  misc_RNA (1)...(19): siRNA sense strand
gagaagaagucacugaacu

SEQ ID NO: 1640965 - RNA, 19 nt, Homo sapiens
  misc_RNA (1)...(19): siRNA sense strand
cacagaagauguuaauuuc

SEQ ID NO: 1640966 - RNA, 19 nt, Homo sapiens
  misc_RNA (1)...(19): siRNA sense strand
aaacaacacuaccgaaagu

SEQ ID NO: 1640967 - RNA, 19 nt, Homo sapiens
  misc_RNA (1)...(19): siRNA sense strand
ucaagaugaugaugaagaa

SEQ ID NO: 1640968 - RNA, 19 nt, Homo sapiens
  misc_RNA (1)...(19): siRNA sense strand
ggaaagggaucugguaaaa

SEQ ID NO: 1640969 - RNA, 19 nt, Homo sapiens
  misc_RNA (1)...(19): siRNA sense strand
caaugaagucugaagauaa

SEQ ID NO: 1640970 - RNA, 19 nt, Homo sapiens
  misc_RNA (1)...(19): siRNA sense strand
gaaggaagcacccaacagu

SEQ ID NO: 1640971 - RNA, 19 nt, Homo sapiens
  misc_RNA (1)...(19): siRNA sense strand
aaaaguuccuccagaauua

SEQ ID NO: 1640972 - RNA, 19 nt, Homo sapiens
  misc_RNA (1)...(19): siRNA sense strand
gaagagauucauacagaga

SEQ ID NO: 1640973 - RNA, 19 nt, Homo sapiens
  misc_RNA (1)...(19): siRNA sense strand
agaagaagguucaauuugg

SEQ ID NO: 1640974 - RNA, 19 nt, Homo sapiens
  misc_RNA (1)...(19): siRNA sense strand
caaaagagauuaugaucga

SEQ ID NO: 1640975 - RNA, 19 nt, Homo sapiens
  misc_RNA (1)...(19): siRNA sense strand
gacaaugaaucucguucuu

SEQ ID NO: 1640976 - RNA, 19 nt, Homo sapiens
  misc_RNA (1)...(19): siRNA sense strand
aggaagagaucacuaagga

SEQ ID NO: 1640977 - RNA, 19 nt, Homo sapiens
  misc_RNA (1)...(19): siRNA sense strand
ggacucagaaucaaggaaa

SEQ ID NO: 1640978 - RNA, 19 nt, Homo sapiens
  misc_RNA (1)...(19): siRNA sense strand
gaagugauccaguaguugu

SEQ ID NO: 1640979 - RNA, 19 nt, Homo sapiens
  misc_RNA (1)...(19): siRNA sense strand
agaaagagacacagauauu

SEQ ID NO: 1640980 - RNA, 19 nt, Homo sapiens
  misc_RNA (1)...(19): siRNA sense strand
gacaagagcagaagcugaa

SEQ ID NO: 1640981 - RNA, 19 nt, Homo sapiens
  misc_RNA (1)...(19): siRNA sense strand
uuaccaaguugaaagauga

SEQ ID NO: 1640982 - RNA, 19 nt, Homo sapiens
  misc_RNA (1)...(19): siRNA sense strand
ucagaaagagacacagaua

SEQ ID NO: 1640983 - RNA, 19 nt, Homo sapiens
  misc_RNA (1)...(19): siRNA sense strand
gggcggagucgcaguuaua

SEQ ID NO: 1640984 - RNA, 19 nt, Homo sapiens
  misc_RNA (1)...(19): siRNA sense strand
gaaacaacacuaccgaaag

SEQ ID NO: 1640985 - RNA, 19 nt, Homo sapiens
  misc_RNA (1)...(19): siRNA sense strand
cauuggagauuucugcauu

SEQ ID NO: 1640986 - RNA, 19 nt, Homo sapiens
  misc_RNA (1)...(19): siRNA sense strand
ugacacagaacuggauuua

SEQ ID NO: 1640987 - RNA, 19 nt, Homo sapiens
  misc_RNA (1)...(19): siRNA sense strand
agacucagaugcagaagga

SEQ ID NO: 1640988 - RNA, 19 nt, Homo sapiens
  misc_RNA (1)...(19): siRNA sense strand
guacggaagcaguauuaaa

SEQ ID NO: 1640989 - RNA, 19 nt, Homo sapiens
  misc_RNA (1)...(19): siRNA sense strand
gaaggugcccuaauccaau

SEQ ID NO: 1640990 - RNA, 19 nt, Homo sapiens
  misc_RNA (1)...(19): siRNA sense strand
acuuacagguugcuuauaa

SEQ ID NO: 1640991 - RNA, 19 nt, Homo sapiens
  misc_RNA (1)...(19): siRNA sense strand
ucagcaaacuuaaugaaca

SEQ ID NO: 1640992 - RNA, 19 nt, Homo sapiens
  misc_RNA (1)...(19): siRNA sense strand
acaaaggcccaacuugaua

SEQ ID NO: 1640993 - RNA, 19 nt, Homo sapiens
  misc_RNA (1)...(19): siRNA sense strand
gaccacccaugccaaagaa

SEQ ID NO: 1640994 - RNA, 19 nt, Homo sapiens
  misc_RNA (1)...(19): siRNA sense strand
aaagagaggcuucgugaga

SEQ ID NO: 1640995 - RNA, 19 nt, Homo sapiens
  misc_RNA (1)...(19): siRNA sense strand
aagaagaauuucaggaaga

SEQ ID NO: 1640996 - RNA, 19 nt, Homo sapiens
  misc_RNA (1)...(19): siRNA sense strand
gaaauugaagauugucaga

SEQ ID NO: 1640997 - RNA, 19 nt, Homo sapiens
  misc_RNA (1)...(19): siRNA sense strand
cagaaggaauuacuugaca

SEQ ID NO: 1640998 - RNA, 19 nt, Homo sapiens
  misc_RNA (1)...(19): siRNA sense strand
gaaaauagaagccgugaug

SEQ ID NO: 1640999 - RNA, 19 nt, Homo sapiens
  misc_RNA (1)...(19): siRNA sense strand
caacauacgaagaagcaaa

SEQ ID NO: 1641000 - RNA, 19 nt, Homo sapiens
  misc_RNA (1)...(19): siRNA sense strand
gcaaccaguucuguuccua

SEQ ID NO: 1641001 - RNA, 19 nt, Homo sapiens
  misc_RNA (1)...(19): siRNA sense strand
ccaccuccaccaauucuua

SEQ ID NO: 1641002 - RNA, 19 nt, Homo sapiens
  misc_RNA (1)...(19): siRNA sense strand
cgaaaguuggucugaauuu

SEQ ID NO: 1641003 - RNA, 19 nt, Homo sapiens
  misc_RNA (1)...(19): siRNA sense strand
gaagaugcaggcuggagaa

SEQ ID NO: 1641004 - RNA, 19 nt, Homo sapiens
  misc_RNA (1)...(19): siRNA sense strand
uuugaaggcugcacagaaa

SEQ ID NO: 1641005 - RNA, 19 nt, Homo sapiens
  misc_RNA (1)...(19): siRNA sense strand
aacaaucgcuuuauuaagg

SEQ ID NO: 1641006 - RNA, 19 nt, Homo sapiens
  misc_RNA (1)...(19): siRNA sense strand
ucagaagaagguucaauuu

SEQ ID NO: 1641007 - RNA, 19 nt, Homo sapiens
  misc_RNA (1)...(19): siRNA sense strand
cuacaaagaagacuugguu

SEQ ID NO: 1641008 - RNA, 19 nt, Homo sapiens
  misc_RNA (1)...(19): siRNA sense strand
ggauaguaguggacucaga

SEQ ID NO: 1641009 - RNA, 19 nt, Homo sapiens
  misc_RNA (1)...(19): siRNA sense strand
gaugugaaucuuccuggua

SEQ ID NO: 1641010 - RNA, 19 nt, Homo sapiens
  misc_RNA (1)...(19): siRNA sense strand
aggaagcacccaacaguua

SEQ ID NO: 1641011 - RNA, 19 nt, Homo sapiens
  misc_RNA (1)...(19): siRNA sense strand
gaaaaguuccuccagaauu

SEQ ID NO: 1641012 - RNA, 19 nt, Homo sapiens
  misc_RNA (1)...(19): siRNA sense strand
cagaagaagguucaauuug

SEQ ID NO: 1641013 - RNA, 19 nt, Homo sapiens
  misc_RNA (1)...(19): siRNA sense strand
acaaacacuuccagaccua

SEQ ID NO: 1641014 - RNA, 19 nt, Homo sapiens
  misc_RNA (1)...(19): siRNA sense strand
cgaagucgaaguuggagua

SEQ ID NO: 1641015 - RNA, 19 nt, Homo sapiens
  misc_RNA (1)...(19): siRNA sense strand
ggaagcaguauuaaacaau

SEQ ID NO: 1641016 - RNA, 19 nt, Homo sapiens
  misc_RNA (1)...(19): siRNA sense strand
auaccaagcuugaacuuag

SEQ ID NO: 1641017 - RNA, 19 nt, Homo sapiens
  misc_RNA (1)...(19): siRNA sense strand
gauaguaguggacucagaa

SEQ ID NO: 1641018 - RNA, 19 nt, Homo sapiens
  misc_RNA (1)...(19): siRNA sense strand
gaaaagccucccaauaaaa

SEQ ID NO: 1641019 - RNA, 19 nt, Homo sapiens
  misc_RNA (1)...(19): siRNA sense strand
ggacuaacaucaggggaua

SEQ ID NO: 1641020 - RNA, 19 nt, Homo sapiens
  misc_RNA (1)...(19): siRNA sense strand
caaagaaacgguguagaga

SEQ ID NO: 1641021 - RNA, 19 nt, Homo sapiens
  misc_RNA (1)...(19): siRNA sense strand
aaagagacacagauauuug

SEQ ID NO: 1641022 - RNA, 19 nt, Homo sapiens
  misc_RNA (1)...(19): siRNA sense strand
ggcauggaauaaaccagua

SEQ ID NO: 1641023 - RNA, 19 nt, Homo sapiens
  misc_RNA (1)...(19): siRNA sense strand
ggagauuucugcauuuacg

SEQ ID NO: 1641024 - RNA, 19 nt, Homo sapiens
  misc_RNA (1)...(19): siRNA sense strand
aaagaagacuugguuugau

SEQ ID NO: 1641025 - RNA, 19 nt, Homo sapiens
  misc_RNA (1)...(19): siRNA sense strand
aaacuggcauggaauaaac

SEQ ID NO: 1641026 - RNA, 19 nt, Homo sapiens
  misc_RNA (1)...(19): siRNA sense strand
gcaguaauuacauucaaga

SEQ ID NO: 1641027 - RNA, 19 nt, Homo sapiens
  misc_RNA (1)...(19): siRNA sense strand
gccaaacgagggauucuuu

SEQ ID NO: 1641028 - RNA, 19 nt, Homo sapiens
  misc_RNA (1)...(19): siRNA sense strand
caggaggcauugaaacuuc

SEQ ID NO: 1641029 - RNA, 19 nt, Homo sapiens
  misc_RNA (1)...(19): siRNA sense strand
gcccaggcuuucagaagaa

SEQ ID NO: 1641030 - RNA, 19 nt, Homo sapiens
  misc_RNA (1)...(19): siRNA sense strand
gaauacaaagaguuaccua

SEQ ID NO: 1641031 - RNA, 19 nt, Homo sapiens
  misc_RNA (1)...(19): siRNA sense strand
gaguuaaaggcauuaugua

SEQ ID NO: 1641032 - RNA, 19 nt, Homo sapiens
  misc_RNA (1)...(19): siRNA sense strand
ucaaagggcaagaucuaaa

SEQ ID NO: 1641033 - RNA, 19 nt, Homo sapiens
  misc_RNA (1)...(19): siRNA sense strand
agaaggaagagaucacuaa

SEQ ID NO: 1641034 - RNA, 19 nt, Homo sapiens
  misc_RNA (1)...(19): siRNA sense strand
uaacuuacagguugcuuau

SEQ ID NO: 1641035 - RNA, 19 nt, Homo sapiens
  misc_RNA (1)...(19): siRNA sense strand
gcaaguaacucucuucuua

SEQ ID NO: 1641036 - RNA, 19 nt, Homo sapiens
  misc_RNA (1)...(19): siRNA sense strand
gaaaggagcugaagauagu

SEQ ID NO: 1641037 - RNA, 19 nt, Homo sapiens
  misc_RNA (1)...(19): siRNA sense strand
gcaaagaaguggacauuga

SEQ ID NO: 1641038 - RNA, 19 nt, Homo sapiens
  misc_RNA (1)...(19): siRNA sense strand
caacagcgaugcacuauug

SEQ ID NO: 1641039 - RNA, 19 nt, Homo sapiens
  misc_RNA (1)...(19): siRNA sense strand
caacagaaccagucaauuu

SEQ ID NO: 1641040 - RNA, 19 nt, Homo sapiens
  misc_RNA (1)...(19): siRNA sense strand
gcaguuaucuucaguuuua

SEQ ID NO: 1641041 - RNA, 19 nt, Homo sapiens
  misc_RNA (1)...(19): siRNA sense strand
guacaagggucaccuaguu

SEQ ID NO: 1641042 - RNA, 19 nt, Homo sapiens
  misc_RNA (1)...(19): siRNA sense strand
caacuugacuggcuccuuu

SEQ ID NO: 1641043 - RNA, 19 nt, Homo sapiens
  misc_RNA (1)...(19): siRNA sense strand
caacaugccuggaauucaa

SEQ ID NO: 1641044 - RNA, 19 nt, Homo sapiens
  misc_RNA (1)...(19): siRNA sense strand
guagggauauugaaauuga

SEQ ID NO: 1641045 - RNA, 19 nt, Homo sapiens
  misc_RNA (1)...(19): siRNA sense strand
ucacagcacucaauaguug

SEQ ID NO: 1641046 - RNA, 19 nt, Homo sapiens
  misc_RNA (1)...(19): siRNA sense strand
gcaacagucuccucuuuau

SEQ ID NO: 1641047 - RNA, 19 nt, Homo sapiens
  misc_RNA (1)...(19): siRNA sense strand
ccacuggcauccucuauaa

SEQ ID NO: 1641048 - RNA, 19 nt, Homo sapiens
  misc_RNA (1)...(19): siRNA sense strand
gaaaagcaguuaaccagua

SEQ ID NO: 1641049 - RNA, 19 nt, Homo sapiens
  misc_RNA (1)...(19): siRNA sense strand
ggaaugagaugaugucacu

SEQ ID NO: 1641050 - RNA, 19 nt, Homo sapiens
  misc_RNA (1)...(19): siRNA sense strand
gaaaacaucucaaacauag

SEQ ID NO: 1641051 - RNA, 19 nt, Homo sapiens
  misc_RNA (1)...(19): siRNA sense strand
gcaguaugauuaagaguga

SEQ ID NO: 1641052 - RNA, 19 nt, Homo sapiens
  misc_RNA (1)...(19): siRNA sense strand
gcaaggcuuuccuacagua

SEQ ID NO: 1641053 - RNA, 19 nt, Homo sapiens
  misc_RNA (1)...(19): siRNA sense strand
ugacaacacuucuuucuca

SEQ ID NO: 1641054 - RNA, 19 nt, Homo sapiens
  misc_RNA (1)...(19): siRNA sense strand
gagaugaugucacuucaau

SEQ ID NO: 1641055 - RNA, 19 nt, Homo sapiens
  misc_RNA (1)...(19): siRNA sense strand
gaaacucagucuagagaga

SEQ ID NO: 1641056 - RNA, 19 nt, Homo sapiens
  misc_RNA (1)...(19): siRNA sense strand
gcagcaggcuacacaguuu

SEQ ID NO: 1641057 - RNA, 19 nt, Homo sapiens
  misc_RNA (1)...(19): siRNA sense strand
gaaaggagaagaagaagug

SEQ ID NO: 1641058 - RNA, 19 nt, Homo sapiens
  misc_RNA (1)...(19): siRNA sense strand
uaaugaaccuguaguguug

SEQ ID NO: 1641059 - RNA, 19 nt, Homo sapiens
  misc_RNA (1)...(19): siRNA sense strand
uaucaggccugcagaguaa

SEQ ID NO: 1641060 - RNA, 19 nt, Homo sapiens
  misc_RNA (1)...(19): siRNA sense strand
ugaaggcacuacuguuaua

SEQ ID NO: 1641061 - RNA, 19 nt, Homo sapiens
  misc_RNA (1)...(19): siRNA sense strand
gaggaaugcugaugucgaa

SEQ ID NO: 1641062 - RNA, 19 nt, Homo sapiens
  misc_RNA (1)...(19): siRNA sense strand
gcagucaaccaacauauuu

SEQ ID NO: 1641063 - RNA, 19 nt, Homo sapiens
  misc_RNA (1)...(19): siRNA sense strand
gacaaucaaccucaaguua

SEQ ID NO: 1641064 - RNA, 19 nt, Homo sapiens
  misc_RNA (1)...(19): siRNA sense strand
uugcauagcuguucaguga

SEQ ID NO: 1641065 - RNA, 19 nt, Homo sapiens
  misc_RNA (1)...(19): siRNA sense strand
gaacucaauuucuccacuu

SEQ ID NO: 1641066 - RNA, 19 nt, Homo sapiens
  misc_RNA (1)...(19): siRNA sense strand
gggaauauauguagugaca

SEQ ID NO: 1641067 - RNA, 19 nt, Homo sapiens
  misc_RNA (1)...(19): siRNA sense strand
caaagcaccucacuaugug

SEQ ID NO: 1641068 - RNA, 19 nt, Homo sapiens
  misc_RNA (1)...(19): siRNA sense strand
caucaggaauguucuuauu

SEQ ID NO: 1641069 - RNA, 19 nt, Homo sapiens
  misc_RNA (1)...(19): siRNA sense strand
acaacaagguaaugguuua

SEQ ID NO: 1641070 - RNA, 19 nt, Homo sapiens
  misc_RNA (1)...(19): siRNA sense strand
gcaaaugcagugugaauug

SEQ ID NO: 1641071 - RNA, 19 nt, Homo sapiens
  misc_RNA (1)...(19): siRNA sense strand
agaaacaucuguagcauca

SEQ ID NO: 1641072 - RNA, 19 nt, Homo sapiens
  misc_RNA (1)...(19): siRNA sense strand
caacaagucagucaaauuc

SEQ ID NO: 1641073 - RNA, 19 nt, Homo sapiens
  misc_RNA (1)...(19): siRNA sense strand
ggaacuauuucaucagaau

SEQ ID NO: 1641074 - RNA, 19 nt, Homo sapiens
  misc_RNA (1)...(19): siRNA sense strand
gcacuacuguuauagaagu

SEQ ID NO: 1641075 - RNA, 19 nt, Homo sapiens
  misc_RNA (1)...(19): siRNA sense strand
cagaguaacuggacgaaau

SEQ ID NO: 1641076 - RNA, 19 nt, Homo sapiens
  misc_RNA (1)...(19): siRNA sense strand
ucaggaauguucuuauuug

SEQ ID NO: 1641077 - RNA, 19 nt, Homo sapiens
  misc_RNA (1)...(19): siRNA sense strand
uuacagggcucuucaguuc

SEQ ID NO: 1641078 - RNA, 19 nt, Homo sapiens
  misc_RNA (1)...(19): siRNA sense strand
uguaagcccuggaauguuu

SEQ ID NO: 1641079 - RNA, 19 nt, Homo sapiens
  misc_RNA (1)...(19): siRNA sense strand
uggaagaucucaugauguu

SEQ ID NO: 1641080 - RNA, 19 nt, Homo sapiens
  misc_RNA (1)...(19): siRNA sense strand
gaaaacacguuaucuaauc

SEQ ID NO: 1641081 - RNA, 19 nt, Homo sapiens
  misc_RNA (1)...(19): siRNA sense strand
uggaagagcugaaaguguu

SEQ ID NO: 1641082 - RNA, 19 nt, Homo sapiens
  misc_RNA (1)...(19): siRNA sense strand
ccagagacccugacaacua

SEQ ID NO: 1641083 - RNA, 19 nt, Homo sapiens
  misc_RNA (1)...(19): siRNA sense strand
gcuggaagaucucaugaug

SEQ ID NO: 1641084 - RNA, 19 nt, Homo sapiens
  misc_RNA (1)...(19): siRNA sense strand
agaagaaacuggaacacaa

SEQ ID NO: 1641085 - RNA, 19 nt, Homo sapiens
  misc_RNA (1)...(19): siRNA sense strand
gaucaacucagcaaacauu

SEQ ID NO: 1641086 - RNA, 19 nt, Homo sapiens
  misc_RNA (1)...(19): siRNA sense strand
gaagagcccuauguugugu

SEQ ID NO: 1641087 - RNA, 19 nt, Homo sapiens
  misc_RNA (1)...(19): siRNA sense strand
ccauagcucuccucagauu

SEQ ID NO: 1641088 - RNA, 19 nt, Homo sapiens
  misc_RNA (1)...(19): siRNA sense strand
acagcaagcuccaauauca

SEQ ID NO: 1641089 - RNA, 19 nt, Homo sapiens
  misc_RNA (1)...(19): siRNA sense strand
cagcagacuucucacauga

SEQ ID NO: 1641090 - RNA, 19 nt, Homo sapiens
  misc_RNA (1)...(19): siRNA sense strand
gaguuaauaucaugaggaa

SEQ ID NO: 1641091 - RNA, 19 nt, Homo sapiens
  misc_RNA (1)...(19): siRNA sense strand
gaacuggaguaaagaagag

SEQ ID NO: 1641092 - RNA, 19 nt, Homo sapiens
  misc_RNA (1)...(19): siRNA sense strand
caacaacaacagagcauuu

SEQ ID NO: 1641093 - RNA, 19 nt, Homo sapiens
  misc_RNA (1)...(19): siRNA sense strand
gaacaaaugcagccuccaa

SEQ ID NO: 1641094 - RNA, 19 nt, Homo sapiens
  misc_RNA (1)...(19): siRNA sense strand
gcagcagucuucucauuca

SEQ ID NO: 1641095 - RNA, 19 nt, Homo sapiens
  misc_RNA (1)...(19): siRNA sense strand
gaaaugaaacuucuacaac

SEQ ID NO: 1641096 - RNA, 19 nt, Homo sapiens
  misc_RNA (1)...(19): siRNA sense strand
uaccagaccagauaauuua

SEQ ID NO: 1641097 - RNA, 19 nt, Homo sapiens
  misc_RNA (1)...(19): siRNA sense strand
aaauacaacuccuugcaaa

SEQ ID NO: 1641098 - RNA, 19 nt, Homo sapiens
  misc_RNA (1)...(19): siRNA sense strand
cagcaguuaucuucaguuu

SEQ ID NO: 1641099 - RNA, 19 nt, Homo sapiens
  misc_RNA (1)...(19): siRNA sense strand
gcaccgaacucaauuucuc

SEQ ID NO: 1641100 - RNA, 19 nt, Homo sapiens
  misc_RNA (1)...(19): siRNA sense strand
guaaugagaauguucaaga

SEQ ID NO: 1641101 - RNA, 19 nt, Homo sapiens
  misc_RNA (1)...(19): siRNA sense strand
gaaauacaacuccuugcaa

SEQ ID NO: 1641102 - RNA, 19 nt, Homo sapiens
  misc_RNA (1)...(19): siRNA sense strand
gaacaacaugccuggaauu

SEQ ID NO: 1641103 - RNA, 19 nt, Homo sapiens
  misc_RNA (1)...(19): siRNA sense strand
ggaaaugaaacuucuacaa

SEQ ID NO: 1641104 - RNA, 19 nt, Homo sapiens
  misc_RNA (1)...(19): siRNA sense strand
gcagacuucucacaugaug

SEQ ID NO: 1641105 - RNA, 19 nt, Homo sapiens
  misc_RNA (1)...(19): siRNA sense strand
ugagucagcuucagaauac

SEQ ID NO: 1641106 - RNA, 19 nt, Homo sapiens
  misc_RNA (1)...(19): siRNA sense strand
cagagacccugacaacuau

SEQ ID NO: 1641107 - RNA, 19 nt, Homo sapiens
  misc_RNA (1)...(19): siRNA sense strand
gaagaucucaugauguuca

SEQ ID NO: 1641108 - RNA, 19 nt, Homo sapiens
  misc_RNA (1)...(19): siRNA sense strand
gcguagggauauugaaauu

SEQ ID NO: 1641109 - RNA, 19 nt, Homo sapiens
  misc_RNA (1)...(19): siRNA sense strand
ccaaagcaccucacuaugu

SEQ ID NO: 1641110 - RNA, 19 nt, Homo sapiens
  misc_RNA (1)...(19): siRNA sense strand
ugaaccaacugcagaauuc

SEQ ID NO: 1641111 - RNA, 19 nt, Homo sapiens
  misc_RNA (1)...(19): siRNA sense strand
cagagucaguccacaguuu

SEQ ID NO: 1641112 - RNA, 19 nt, Homo sapiens
  misc_RNA (1)...(19): siRNA sense strand
gaauagugguacccaacaa

SEQ ID NO: 1641113 - RNA, 19 nt, Homo sapiens
  misc_RNA (1)...(19): siRNA sense strand
gauuaagagugaagauguu

SEQ ID NO: 1641114 - RNA, 19 nt, Homo sapiens
  misc_RNA (1)...(19): siRNA sense strand
caaacacccucuucuccaa

SEQ ID NO: 1641115 - RNA, 19 nt, Homo sapiens
  misc_RNA (1)...(19): siRNA sense strand
ucuaugaucuucucccaaa

SEQ ID NO: 1641116 - RNA, 19 nt, Homo sapiens
  misc_RNA (1)...(19): siRNA sense strand
gacaaaugcuggaagaucu

SEQ ID NO: 1641117 - RNA, 19 nt, Homo sapiens
  misc_RNA (1)...(19): siRNA sense strand
ccugaggacuugcuggaua

SEQ ID NO: 1641118 - RNA, 19 nt, Homo sapiens
  misc_RNA (1)...(19): siRNA sense strand
caacagcaagcuccaauau

SEQ ID NO: 1641119 - RNA, 19 nt, Homo sapiens
  misc_RNA (1)...(19): siRNA sense strand
gcaagggaaugagaugaug

SEQ ID NO: 1641120 - RNA, 19 nt, Homo sapiens
  misc_RNA (1)...(19): siRNA sense strand
guacagugguuaauuuguc

SEQ ID NO: 1641121 - RNA, 19 nt, Homo sapiens
  misc_RNA (1)...(19): siRNA sense strand
ggaaaggagcugaagauag

SEQ ID NO: 1641122 - RNA, 19 nt, Homo sapiens
  misc_RNA (1)...(19): siRNA sense strand
guaaagaagagcccuaugu

SEQ ID NO: 1641123 - RNA, 19 nt, Homo sapiens
  misc_RNA (1)...(19): siRNA sense strand
caccaaacaugauauucaa

SEQ ID NO: 1641124 - RNA, 19 nt, Homo sapiens
  misc_RNA (1)...(19): siRNA sense strand
caaccaacauauuucuuuc

SEQ ID NO: 1641125 - RNA, 19 nt, Homo sapiens
  misc_RNA (1)...(19): siRNA sense strand
ucacuucaaucuggaaauu

SEQ ID NO: 1641126 - RNA, 19 nt, Homo sapiens
  misc_RNA (1)...(19): siRNA sense strand
gagaaacucagucuagaga

SEQ ID NO: 1641127 - RNA, 19 nt, Homo sapiens
  misc_RNA (1)...(19): siRNA sense strand
gugaagauguuacuccaau

SEQ ID NO: 1641128 - RNA, 19 nt, Homo sapiens
  misc_RNA (1)...(19): siRNA sense strand
gaagaggccaugaaagcaa

SEQ ID NO: 1641129 - RNA, 19 nt, Homo sapiens
  misc_RNA (1)...(19): siRNA sense strand
gaauguaaaugugaagaag

SEQ ID NO: 1641130 - RNA, 19 nt, Homo sapiens
  misc_RNA (1)...(19): siRNA sense strand
gagcaccaguuccuacaau

SEQ ID NO: 1641131 - RNA, 19 nt, Homo sapiens
  misc_RNA (1)...(19): siRNA sense strand
caagagaaacucagucuag

SEQ ID NO: 1641132 - RNA, 19 nt, Homo sapiens
  misc_RNA (1)...(19): siRNA sense strand
gauccuagcaacaacauga

SEQ ID NO: 1641133 - RNA, 19 nt, Homo sapiens
  misc_RNA (1)...(19): siRNA sense strand
caacagcccaugcaauuuc

SEQ ID NO: 1641134 - RNA, 19 nt, Homo sapiens
  misc_RNA (1)...(19): siRNA sense strand
aaacaucuguagcaucaau

SEQ ID NO: 1641135 - RNA, 19 nt, Homo sapiens
  misc_RNA (1)...(19): siRNA sense strand
gcaaguaacucucuucuua

SEQ ID NO: 1641136 - RNA, 19 nt, Homo sapiens
  misc_RNA (1)...(19): siRNA sense strand
gaaaggagcugaagauagu

SEQ ID NO: 1641137 - RNA, 19 nt, Homo sapiens
  misc_RNA (1)...(19): siRNA sense strand
gcaaagaaguggacauuga

SEQ ID NO: 1641138 - RNA, 19 nt, Homo sapiens
  misc_RNA (1)...(19): siRNA sense strand
caacagcgaugcacuauug

SEQ ID NO: 1641139 - RNA, 19 nt, Homo sapiens
  misc_RNA (1)...(19): siRNA sense strand
caacagaaccagucaauuu

SEQ ID NO: 1641140 - RNA, 19 nt, Homo sapiens
  misc_RNA (1)...(19): siRNA sense strand
gcaguuaucuucaguuuua

SEQ ID NO: 1641141 - RNA, 19 nt, Homo sapiens
  misc_RNA (1)...(19): siRNA sense strand
guacaagggucaccuaguu

SEQ ID NO: 1641142 - RNA, 19 nt, Homo sapiens
  misc_RNA (1)...(19): siRNA sense strand
caacuugacuggcuccuuu

SEQ ID NO: 1641143 - RNA, 19 nt, Homo sapiens
  misc_RNA (1)...(19): siRNA sense strand
caacaugccuggaauucaa

SEQ ID NO: 1641144 - RNA, 19 nt, Homo sapiens
  misc_RNA (1)...(19): siRNA sense strand
guagggauauugaaauuga

SEQ ID NO: 1641145 - RNA, 19 nt, Homo sapiens
  misc_RNA (1)...(19): siRNA sense strand
ucacagcacucaauaguug

SEQ ID NO: 1641146 - RNA, 19 nt, Homo sapiens
  misc_RNA (1)...(19): siRNA sense strand
gcaacagucuccucuuuau

SEQ ID NO: 1641147 - RNA, 19 nt, Homo sapiens
  misc_RNA (1)...(19): siRNA sense strand
ccacuggcauccucuauaa

SEQ ID NO: 1641148 - RNA, 19 nt, Homo sapiens
  misc_RNA (1)...(19): siRNA sense strand
gaaaagcaguuaaccagua

SEQ ID NO: 1641149 - RNA, 19 nt, Homo sapiens
  misc_RNA (1)...(19): siRNA sense strand
ggaaugagaugaugucacu

SEQ ID NO: 1641150 - RNA, 19 nt, Homo sapiens
  misc_RNA (1)...(19): siRNA sense strand
gaaaacaucucaaacauag

SEQ ID NO: 1641151 - RNA, 19 nt, Homo sapiens
  misc_RNA (1)...(19): siRNA sense strand
gcaguaugauuaagaguga

SEQ ID NO: 1641152 - RNA, 19 nt, Homo sapiens
  misc_RNA (1)...(19): siRNA sense strand
gcaaggcuuuccuacagua

SEQ ID NO: 1641153 - RNA, 19 nt, Homo sapiens
  misc_RNA (1)...(19): siRNA sense strand
ugacaacacuucuuucuca

SEQ ID NO: 1641154 - RNA, 19 nt, Homo sapiens
  misc_RNA (1)...(19): siRNA sense strand
gagaugaugucacuucaau

SEQ ID NO: 1641155 - RNA, 19 nt, Homo sapiens
  misc_RNA (1)...(19): siRNA sense strand
gaaacucagucuagagaga

SEQ ID NO: 1641156 - RNA, 19 nt, Homo sapiens
  misc_RNA (1)...(19): siRNA sense strand
gcagcaggcuacacaguuu

SEQ ID NO: 1641157 - RNA, 19 nt, Homo sapiens
  misc_RNA (1)...(19): siRNA sense strand
gaaaggagaagaagaagug

SEQ ID NO: 1641158 - RNA, 19 nt, Homo sapiens
  misc_RNA (1)...(19): siRNA sense strand
uaaugaaccuguaguguug

SEQ ID NO: 1641159 - RNA, 19 nt, Homo sapiens
  misc_RNA (1)...(19): siRNA sense strand
uaucaggccugcagaguaa

SEQ ID NO: 1641160 - RNA, 19 nt, Homo sapiens
  misc_RNA (1)...(19): siRNA sense strand
ugaaggcacuacuguuaua

SEQ ID NO: 1641161 - RNA, 19 nt, Homo sapiens
  misc_RNA (1)...(19): siRNA sense strand
gaggaaugcugaugucgaa

SEQ ID NO: 1641162 - RNA, 19 nt, Homo sapiens
  misc_RNA (1)...(19): siRNA sense strand
gcagucaaccaacauauuu

SEQ ID NO: 1641163 - RNA, 19 nt, Homo sapiens
  misc_RNA (1)...(19): siRNA sense strand
gacaaucaaccucaaguua

SEQ ID NO: 1641164 - RNA, 19 nt, Homo sapiens
  misc_RNA (1)...(19): siRNA sense strand
uugcauagcuguucaguga

SEQ ID NO: 1641165 - RNA, 19 nt, Homo sapiens
  misc_RNA (1)...(19): siRNA sense strand
gaacucaauuucuccacuu

SEQ ID NO: 1641166 - RNA, 19 nt, Homo sapiens
  misc_RNA (1)...(19): siRNA sense strand
gggaauauauguagugaca

SEQ ID NO: 1641167 - RNA, 19 nt, Homo sapiens
  misc_RNA (1)...(19): siRNA sense strand
caaagcaccucacuaugug

SEQ ID NO: 1641168 - RNA, 19 nt, Homo sapiens
  misc_RNA (1)...(19): siRNA sense strand
caucaggaauguucuuauu

SEQ ID NO: 1641169 - RNA, 19 nt, Homo sapiens
  misc_RNA (1)...(19): siRNA sense strand
acaacaagguaaugguuua

SEQ ID NO: 1641170 - RNA, 19 nt, Homo sapiens
  misc_RNA (1)...(19): siRNA sense strand
gcaaaugcagugugaauug

SEQ ID NO: 1641171 - RNA, 19 nt, Homo sapiens
  misc_RNA (1)...(19): siRNA sense strand
gcacuacuguuauagaagu

SEQ ID NO: 1641172 - RNA, 19 nt, Homo sapiens
  misc_RNA (1)...(19): siRNA sense strand
caacaagucagucaaauuc

SEQ ID NO: 1641173 - RNA, 19 nt, Homo sapiens
  misc_RNA (1)...(19): siRNA sense strand
ggaacuauuucaucagaau

SEQ ID NO: 1641174 - RNA, 19 nt, Homo sapiens
  misc_RNA (1)...(19): siRNA sense strand
cagaguaacuggacgaaau

SEQ ID NO: 1641175 - RNA, 19 nt, Homo sapiens
  misc_RNA (1)...(19): siRNA sense strand
ucaggaauguucuuauuug

SEQ ID NO: 1641176 - RNA, 19 nt, Homo sapiens
  misc_RNA (1)...(19): siRNA sense strand
uuacagggcucuucaguuc

SEQ ID NO: 1641177 - RNA, 19 nt, Homo sapiens
  misc_RNA (1)...(19): siRNA sense strand
uguaagcccuggaauguuu

SEQ ID NO: 1641178 - RNA, 19 nt, Homo sapiens
  misc_RNA (1)...(19): siRNA sense strand
uggaagaucucaugauguu

SEQ ID NO: 1641179 - RNA, 19 nt, Homo sapiens
  misc_RNA (1)...(19): siRNA sense strand
gaaaacacguuaucuaauc

SEQ ID NO: 1641180 - RNA, 19 nt, Homo sapiens
  misc_RNA (1)...(19): siRNA sense strand
uggaagagcugaaaguguu

SEQ ID NO: 1641181 - RNA, 19 nt, Homo sapiens
  misc_RNA (1)...(19): siRNA sense strand
ccagagacccugacaacua

SEQ ID NO: 1641182 - RNA, 19 nt, Homo sapiens
  misc_RNA (1)...(19): siRNA sense strand
gcuggaagaucucaugaug

SEQ ID NO: 1641183 - RNA, 19 nt, Homo sapiens
  misc_RNA (1)...(19): siRNA sense strand
agaagaaacuggaacacaa

SEQ ID NO: 1641184 - RNA, 19 nt, Homo sapiens
  misc_RNA (1)...(19): siRNA sense strand
gaucaacucagcaaacauu

SEQ ID NO: 1641185 - RNA, 19 nt, Homo sapiens
  misc_RNA (1)...(19): siRNA sense strand
gaagagcccuauguugugu

SEQ ID NO: 1641186 - RNA, 19 nt, Homo sapiens
  misc_RNA (1)...(19): siRNA sense strand
ccauagcucuccucagauu

SEQ ID NO: 1641187 - RNA, 19 nt, Homo sapiens
  misc_RNA (1)...(19): siRNA sense strand
acagcaagcuccaauauca

SEQ ID NO: 1641188 - RNA, 19 nt, Homo sapiens
  misc_RNA (1)...(19): siRNA sense strand
cagcagacuucucacauga

SEQ ID NO: 1641189 - RNA, 19 nt, Homo sapiens
  misc_RNA (1)...(19): siRNA sense strand
gaguuaauaucaugaggaa

SEQ ID NO: 1641190 - RNA, 19 nt, Homo sapiens
  misc_RNA (1)...(19): siRNA sense strand
gaacuggaguaaagaagag

SEQ ID NO: 1641191 - RNA, 19 nt, Homo sapiens
  misc_RNA (1)...(19): siRNA sense strand
caacaacaacagagcauuu

SEQ ID NO: 1641192 - RNA, 19 nt, Homo sapiens
  misc_RNA (1)...(19): siRNA sense strand
gaacaaaugcagccuccaa

SEQ ID NO: 1641193 - RNA, 19 nt, Homo sapiens
  misc_RNA (1)...(19): siRNA sense strand
gcagcagucuucucauuca

SEQ ID NO: 1641194 - RNA, 19 nt, Homo sapiens
  misc_RNA (1)...(19): siRNA sense strand
gaaaugaaacuucuacaac

SEQ ID NO: 1641195 - RNA, 19 nt, Homo sapiens
  misc_RNA (1)...(19): siRNA sense strand
uaccagaccagauaauuua

SEQ ID NO: 1641196 - RNA, 19 nt, Homo sapiens
  misc_RNA (1)...(19): siRNA sense strand
aaauacaacuccuugcaaa

SEQ ID NO: 1641197 - RNA, 19 nt, Homo sapiens
  misc_RNA (1)...(19): siRNA sense strand
cagcaguuaucuucaguuu

SEQ ID NO: 1641198 - RNA, 19 nt, Homo sapiens
  misc_RNA (1)...(19): siRNA sense strand
gcaccgaacucaauuucuc

SEQ ID NO: 1641199 - RNA, 19 nt, Homo sapiens
  misc_RNA (1)...(19): siRNA sense strand
guaaugagaauguucaaga

SEQ ID NO: 1641200 - RNA, 19 nt, Homo sapiens
  misc_RNA (1)...(19): siRNA sense strand
gaaauacaacuccuugcaa

SEQ ID NO: 1641201 - RNA, 19 nt, Homo sapiens
  misc_RNA (1)...(19): siRNA sense strand
gaacaacaugccuggaauu

SEQ ID NO: 1641202 - RNA, 19 nt, Homo sapiens
  misc_RNA (1)...(19): siRNA sense strand
ggaaaugaaacuucuacaa

SEQ ID NO: 1641203 - RNA, 19 nt, Homo sapiens
  misc_RNA (1)...(19): siRNA sense strand
gcagacuucucacaugaug

SEQ ID NO: 1641204 - RNA, 19 nt, Homo sapiens
  misc_RNA (1)...(19): siRNA sense strand
ugagucagcuucagaauac

SEQ ID NO: 1641205 - RNA, 19 nt, Homo sapiens
  misc_RNA (1)...(19): siRNA sense strand
cagagacccugacaacuau

SEQ ID NO: 1641206 - RNA, 19 nt, Homo sapiens
  misc_RNA (1)...(19): siRNA sense strand
gaagaucucaugauguuca

SEQ ID NO: 1641207 - RNA, 19 nt, Homo sapiens
  misc_RNA (1)...(19): siRNA sense strand
gcguagggauauugaaauu

SEQ ID NO: 1641208 - RNA, 19 nt, Homo sapiens
  misc_RNA (1)...(19): siRNA sense strand
ccaaagcaccucacuaugu

SEQ ID NO: 1641209 - RNA, 19 nt, Homo sapiens
  misc_RNA (1)...(19): siRNA sense strand
ugaaccaacugcagaauuc

SEQ ID NO: 1641210 - RNA, 19 nt, Homo sapiens
  misc_RNA (1)...(19): siRNA sense strand
cagagucaguccacaguuu

SEQ ID NO: 1641211 - RNA, 19 nt, Homo sapiens
  misc_RNA (1)...(19): siRNA sense strand
gaauagugguacccaacaa

SEQ ID NO: 1641212 - RNA, 19 nt, Homo sapiens
  misc_RNA (1)...(19): siRNA sense strand
gauuaagagugaagauguu

SEQ ID NO: 1641213 - RNA, 19 nt, Homo sapiens
  misc_RNA (1)...(19): siRNA sense strand
caaacacccucuucuccaa

SEQ ID NO: 1641214 - RNA, 19 nt, Homo sapiens
  misc_RNA (1)...(19): siRNA sense strand
gacaaaugcuggaagaucu

SEQ ID NO: 1641215 - RNA, 19 nt, Homo sapiens
  misc_RNA (1)...(19): siRNA sense strand
ccugaggacuugcuggaua

SEQ ID NO: 1641216 - RNA, 19 nt, Homo sapiens
  misc_RNA (1)...(19): siRNA sense strand
caacagcaagcuccaauau

SEQ ID NO: 1641217 - RNA, 19 nt, Homo sapiens
  misc_RNA (1)...(19): siRNA sense strand
gcaagggaaugagaugaug

SEQ ID NO: 1641218 - RNA, 19 nt, Homo sapiens
  misc_RNA (1)...(19): siRNA sense strand
guacagugguuaauuuguc

SEQ ID NO: 1641219 - RNA, 19 nt, Homo sapiens
  misc_RNA (1)...(19): siRNA sense strand
ggaaaggagcugaagauag

SEQ ID NO: 1641220 - RNA, 19 nt, Homo sapiens
  misc_RNA (1)...(19): siRNA sense strand
guaaagaagagcccuaugu

SEQ ID NO: 1641221 - RNA, 19 nt, Homo sapiens
  misc_RNA (1)...(19): siRNA sense strand
caccaaacaugauauucaa

SEQ ID NO: 1641222 - RNA, 19 nt, Homo sapiens
  misc_RNA (1)...(19): siRNA sense strand
caaccaacauauuucuuuc

SEQ ID NO: 1641223 - RNA, 19 nt, Homo sapiens
  misc_RNA (1)...(19): siRNA sense strand
ucacuucaaucuggaaauu

SEQ ID NO: 1641224 - RNA, 19 nt, Homo sapiens
  misc_RNA (1)...(19): siRNA sense strand
gagaaacucagucuagaga

SEQ ID NO: 1641225 - RNA, 19 nt, Homo sapiens
  misc_RNA (1)...(19): siRNA sense strand
gugaagauguuacuccaau

SEQ ID NO: 1641226 - RNA, 19 nt, Homo sapiens
  misc_RNA (1)...(19): siRNA sense strand
gaagaggccaugaaagcaa

SEQ ID NO: 1641227 - RNA, 19 nt, Homo sapiens
  misc_RNA (1)...(19): siRNA sense strand
gaauguaaaugugaagaag

SEQ ID NO: 1641228 - RNA, 19 nt, Homo sapiens
  misc_RNA (1)...(19): siRNA sense strand
gagcaccaguuccuacaau

SEQ ID NO: 1641229 - RNA, 19 nt, Homo sapiens
  misc_RNA (1)...(19): siRNA sense strand
caagagaaacucagucuag

SEQ ID NO: 1641230 - RNA, 19 nt, Homo sapiens
  misc_RNA (1)...(19): siRNA sense strand
uaaagaagagcccuauguu

SEQ ID NO: 1641231 - RNA, 19 nt, Homo sapiens
  misc_RNA (1)...(19): siRNA sense strand
caacagcccaugcaauuuc

SEQ ID NO: 1641232 - RNA, 19 nt, Homo sapiens
  misc_RNA (1)...(19): siRNA sense strand
gauccuagcaacaacauga

SEQ ID NO: 1641233 - RNA, 19 nt, Homo sapiens
  misc_RNA (1)...(19): siRNA sense strand
cagcaaggcuuuccuacag

SEQ ID NO: 1641234 - RNA, 19 nt, Homo sapiens
  misc_RNA (1)...(19): siRNA sense strand
gcagucaccacuacaagaa

SEQ ID NO: 1641235 - RNA, 19 nt, Homo sapiens
  misc_RNA (1)...(19): siRNA sense strand
gcaaguaacucucuucuua

SEQ ID NO: 1641236 - RNA, 19 nt, Homo sapiens
  misc_RNA (1)...(19): siRNA sense strand
gaaaggagcugaagauagu

SEQ ID NO: 1641237 - RNA, 19 nt, Homo sapiens
  misc_RNA (1)...(19): siRNA sense strand
gcaaagaaguggacauuga

SEQ ID NO: 1641238 - RNA, 19 nt, Homo sapiens
  misc_RNA (1)...(19): siRNA sense strand
caacagcgaugcacuauug

SEQ ID NO: 1641239 - RNA, 19 nt, Homo sapiens
  misc_RNA (1)...(19): siRNA sense strand
caacagaaccagucaauuu

SEQ ID NO: 1641240 - RNA, 19 nt, Homo sapiens
  misc_RNA (1)...(19): siRNA sense strand
gcaguuaucuucaguuuua

SEQ ID NO: 1641241 - RNA, 19 nt, Homo sapiens
  misc_RNA (1)...(19): siRNA sense strand
guacaagggucaccuaguu

SEQ ID NO: 1641242 - RNA, 19 nt, Homo sapiens
  misc_RNA (1)...(19): siRNA sense strand
caacuugacuggcuccuuu

SEQ ID NO: 1641243 - RNA, 19 nt, Homo sapiens
  misc_RNA (1)...(19): siRNA sense strand
caacaugccuggaauucaa

SEQ ID NO: 1641244 - RNA, 19 nt, Homo sapiens
  misc_RNA (1)...(19): siRNA sense strand
guagggauauugaaauuga

SEQ ID NO: 1641245 - RNA, 19 nt, Homo sapiens
  misc_RNA (1)...(19): siRNA sense strand
ucacagcacucaauaguug

SEQ ID NO: 1641246 - RNA, 19 nt, Homo sapiens
  misc_RNA (1)...(19): siRNA sense strand
gcaacagucuccucuuuau

SEQ ID NO: 1641247 - RNA, 19 nt, Homo sapiens
  misc_RNA (1)...(19): siRNA sense strand
ccacuggcauccucuauaa

SEQ ID NO: 1641248 - RNA, 19 nt, Homo sapiens
  misc_RNA (1)...(19): siRNA sense strand
gaaaagcaguuaaccagua

SEQ ID NO: 1641249 - RNA, 19 nt, Homo sapiens
  misc_RNA (1)...(19): siRNA sense strand
ggaaugagaugaugucacu

SEQ ID NO: 1641250 - RNA, 19 nt, Homo sapiens
  misc_RNA (1)...(19): siRNA sense strand
gaaaacaucucaaacauag

SEQ ID NO: 1641251 - RNA, 19 nt, Homo sapiens
  misc_RNA (1)...(19): siRNA sense strand
gcaguaugauuaagaguga

SEQ ID NO: 1641252 - RNA, 19 nt, Homo sapiens
  misc_RNA (1)...(19): siRNA sense strand
gcaaggcuuuccuacagua

SEQ ID NO: 1641253 - RNA, 19 nt, Homo sapiens
  misc_RNA (1)...(19): siRNA sense strand
ugacaacacuucuuucuca

SEQ ID NO: 1641254 - RNA, 19 nt, Homo sapiens
  misc_RNA (1)...(19): siRNA sense strand
gagaugaugucacuucaau

SEQ ID NO: 1641255 - RNA, 19 nt, Homo sapiens
  misc_RNA (1)...(19): siRNA sense strand
gaaacucagucuagagaga

SEQ ID NO: 1641256 - RNA, 19 nt, Homo sapiens
  misc_RNA (1)...(19): siRNA sense strand
gcagcaggcuacacaguuu

SEQ ID NO: 1641257 - RNA, 19 nt, Homo sapiens
  misc_RNA (1)...(19): siRNA sense strand
gaaaggagaagaagaagug

SEQ ID NO: 1641258 - RNA, 19 nt, Homo sapiens
  misc_RNA (1)...(19): siRNA sense strand
uaaugaaccuguaguguug

SEQ ID NO: 1641259 - RNA, 19 nt, Homo sapiens
  misc_RNA (1)...(19): siRNA sense strand
uaucaggccugcagaguaa

SEQ ID NO: 1641260 - RNA, 19 nt, Homo sapiens
  misc_RNA (1)...(19): siRNA sense strand
ugaaggcacuacuguuaua

SEQ ID NO: 1641261 - RNA, 19 nt, Homo sapiens
  misc_RNA (1)...(19): siRNA sense strand
gaggaaugcugaugucgaa

SEQ ID NO: 1641262 - RNA, 19 nt, Homo sapiens
  misc_RNA (1)...(19): siRNA sense strand
gcagucaaccaacauauuu

SEQ ID NO: 1641263 - RNA, 19 nt, Homo sapiens
  misc_RNA (1)...(19): siRNA sense strand
gacaaucaaccucaaguua

SEQ ID NO: 1641264 - RNA, 19 nt, Homo sapiens
  misc_RNA (1)...(19): siRNA sense strand
uugcauagcuguucaguga

SEQ ID NO: 1641265 - RNA, 19 nt, Homo sapiens
  misc_RNA (1)...(19): siRNA sense strand
gaacucaauuucuccacuu

SEQ ID NO: 1641266 - RNA, 19 nt, Homo sapiens
  misc_RNA (1)...(19): siRNA sense strand
gggaauauauguagugaca

SEQ ID NO: 1641267 - RNA, 19 nt, Homo sapiens
  misc_RNA (1)...(19): siRNA sense strand
caaagcaccucacuaugug

SEQ ID NO: 1641268 - RNA, 19 nt, Homo sapiens
  misc_RNA (1)...(19): siRNA sense strand
caucaggaauguucuuauu

SEQ ID NO: 1641269 - RNA, 19 nt, Homo sapiens
  misc_RNA (1)...(19): siRNA sense strand
acaacaagguaaugguuua

SEQ ID NO: 1641270 - RNA, 19 nt, Homo sapiens
  misc_RNA (1)...(19): siRNA sense strand
gcaaaugcagugugaauug

SEQ ID NO: 1641271 - RNA, 19 nt, Homo sapiens
  misc_RNA (1)...(19): siRNA sense strand
gcacuacuguuauagaagu

SEQ ID NO: 1641272 - RNA, 19 nt, Homo sapiens
  misc_RNA (1)...(19): siRNA sense strand
caacaagucagucaaauuc

SEQ ID NO: 1641273 - RNA, 19 nt, Homo sapiens
  misc_RNA (1)...(19): siRNA sense strand
ggaacuauuucaucagaau

SEQ ID NO: 1641274 - RNA, 19 nt, Homo sapiens
  misc_RNA (1)...(19): siRNA sense strand
cagaguaacuggacgaaau

SEQ ID NO: 1641275 - RNA, 19 nt, Homo sapiens
  misc_RNA (1)...(19): siRNA sense strand
ucaggaauguucuuauuug

SEQ ID NO: 1641276 - RNA, 19 nt, Homo sapiens
  misc_RNA (1)...(19): siRNA sense strand
uuacagggcucuucaguuc

SEQ ID NO: 1641277 - RNA, 19 nt, Homo sapiens
  misc_RNA (1)...(19): siRNA sense strand
uguaagcccuggaauguuu

SEQ ID NO: 1641278 - RNA, 19 nt, Homo sapiens
  misc_RNA (1)...(19): siRNA sense strand
uggaagaucucaugauguu

SEQ ID NO: 1641279 - RNA, 19 nt, Homo sapiens
  misc_RNA (1)...(19): siRNA sense strand
gaaaacacguuaucuaauc

SEQ ID NO: 1641280 - RNA, 19 nt, Homo sapiens
  misc_RNA (1)...(19): siRNA sense strand
uggaagagcugaaaguguu

SEQ ID NO: 1641281 - RNA, 19 nt, Homo sapiens
  misc_RNA (1)...(19): siRNA sense strand
ccagagacccugacaacua

SEQ ID NO: 1641282 - RNA, 19 nt, Homo sapiens
  misc_RNA (1)...(19): siRNA sense strand
gcuggaagaucucaugaug

SEQ ID NO: 1641283 - RNA, 19 nt, Homo sapiens
  misc_RNA (1)...(19): siRNA sense strand
agaagaaacuggaacacaa

SEQ ID NO: 1641284 - RNA, 19 nt, Homo sapiens
  misc_RNA (1)...(19): siRNA sense strand
gaucaacucagcaaacauu

SEQ ID NO: 1641285 - RNA, 19 nt, Homo sapiens
  misc_RNA (1)...(19): siRNA sense strand
gaagagcccuauguugugu

SEQ ID NO: 1641286 - RNA, 19 nt, Homo sapiens
  misc_RNA (1)...(19): siRNA sense strand
ccauagcucuccucagauu

SEQ ID NO: 1641287 - RNA, 19 nt, Homo sapiens
  misc_RNA (1)...(19): siRNA sense strand
acagcaagcuccaauauca

SEQ ID NO: 1641288 - RNA, 19 nt, Homo sapiens
  misc_RNA (1)...(19): siRNA sense strand
cagcagacuucucacauga

SEQ ID NO: 1641289 - RNA, 19 nt, Homo sapiens
  misc_RNA (1)...(19): siRNA sense strand
gaguuaauaucaugaggaa

SEQ ID NO: 1641290 - RNA, 19 nt, Homo sapiens
  misc_RNA (1)...(19): siRNA sense strand
gaacuggaguaaagaagag

SEQ ID NO: 1641291 - RNA, 19 nt, Homo sapiens
  misc_RNA (1)...(19): siRNA sense strand
caacaacaacagagcauuu

SEQ ID NO: 1641292 - RNA, 19 nt, Homo sapiens
  misc_RNA (1)...(19): siRNA sense strand
gaacaaaugcagccuccaa

SEQ ID NO: 1641293 - RNA, 19 nt, Homo sapiens
  misc_RNA (1)...(19): siRNA sense strand
gcagcagucuucucauuca

SEQ ID NO: 1641294 - RNA, 19 nt, Homo sapiens
  misc_RNA (1)...(19): siRNA sense strand
gaaaugaaacuucuacaac

SEQ ID NO: 1641295 - RNA, 19 nt, Homo sapiens
  misc_RNA (1)...(19): siRNA sense strand
uaccagaccagauaauuua

SEQ ID NO: 1641296 - RNA, 19 nt, Homo sapiens
  misc_RNA (1)...(19): siRNA sense strand
aaauacaacuccuugcaaa

SEQ ID NO: 1641297 - RNA, 19 nt, Homo sapiens
  misc_RNA (1)...(19): siRNA sense strand
cagcaguuaucuucaguuu

SEQ ID NO: 1641298 - RNA, 19 nt, Homo sapiens
  misc_RNA (1)...(19): siRNA sense strand
gcaccgaacucaauuucuc

SEQ ID NO: 1641299 - RNA, 19 nt, Homo sapiens
  misc_RNA (1)...(19): siRNA sense strand
guaaugagaauguucaaga

SEQ ID NO: 1641300 - RNA, 19 nt, Homo sapiens
  misc_RNA (1)...(19): siRNA sense strand
gaaauacaacuccuugcaa

SEQ ID NO: 1641301 - RNA, 19 nt, Homo sapiens
  misc_RNA (1)...(19): siRNA sense strand
gaacaacaugccuggaauu

SEQ ID NO: 1641302 - RNA, 19 nt, Homo sapiens
  misc_RNA (1)...(19): siRNA sense strand
ggaaaugaaacuucuacaa

SEQ ID NO: 1641303 - RNA, 19 nt, Homo sapiens
  misc_RNA (1)...(19): siRNA sense strand
gcagacuucucacaugaug

SEQ ID NO: 1641304 - RNA, 19 nt, Homo sapiens
  misc_RNA (1)...(19): siRNA sense strand
ugagucagcuucagaauac

SEQ ID NO: 1641305 - RNA, 19 nt, Homo sapiens
  misc_RNA (1)...(19): siRNA sense strand
cagagacccugacaacuau

SEQ ID NO: 1641306 - RNA, 19 nt, Homo sapiens
  misc_RNA (1)...(19): siRNA sense strand
gaagaucucaugauguuca

SEQ ID NO: 1641307 - RNA, 19 nt, Homo sapiens
  misc_RNA (1)...(19): siRNA sense strand
gcguagggauauugaaauu

SEQ ID NO: 1641308 - RNA, 19 nt, Homo sapiens
  misc_RNA (1)...(19): siRNA sense strand
ccaaagcaccucacuaugu

SEQ ID NO: 1641309 - RNA, 19 nt, Homo sapiens
  misc_RNA (1)...(19): siRNA sense strand
ugaaccaacugcagaauuc

SEQ ID NO: 1641310 - RNA, 19 nt, Homo sapiens
  misc_RNA (1)...(19): siRNA sense strand
cagagucaguccacaguuu

SEQ ID NO: 1641311 - RNA, 19 nt, Homo sapiens
  misc_RNA (1)...(19): siRNA sense strand
gaauagugguacccaacaa

SEQ ID NO: 1641312 - RNA, 19 nt, Homo sapiens
  misc_RNA (1)...(19): siRNA sense strand
gauuaagagugaagauguu

SEQ ID NO: 1641313 - RNA, 19 nt, Homo sapiens
  misc_RNA (1)...(19): siRNA sense strand
caaacacccucuucuccaa

SEQ ID NO: 1641314 - RNA, 19 nt, Homo sapiens
  misc_RNA (1)...(19): siRNA sense strand
gacaaaugcuggaagaucu

SEQ ID NO: 1641315 - RNA, 19 nt, Homo sapiens
  misc_RNA (1)...(19): siRNA sense strand
ccugaggacuugcuggaua

SEQ ID NO: 1641316 - RNA, 19 nt, Homo sapiens
  misc_RNA (1)...(19): siRNA sense strand
caacagcaagcuccaauau

SEQ ID NO: 1641317 - RNA, 19 nt, Homo sapiens
  misc_RNA (1)...(19): siRNA sense strand
gcaagggaaugagaugaug

SEQ ID NO: 1641318 - RNA, 19 nt, Homo sapiens
  misc_RNA (1)...(19): siRNA sense strand
guacagugguuaauuuguc

SEQ ID NO: 1641319 - RNA, 19 nt, Homo sapiens
  misc_RNA (1)...(19): siRNA sense strand
ggaaaggagcugaagauag

SEQ ID NO: 1641320 - RNA, 19 nt, Homo sapiens
  misc_RNA (1)...(19): siRNA sense strand
guaaagaagagcccuaugu

SEQ ID NO: 1641321 - RNA, 19 nt, Homo sapiens
  misc_RNA (1)...(19): siRNA sense strand
caccaaacaugauauucaa

SEQ ID NO: 1641322 - RNA, 19 nt, Homo sapiens
  misc_RNA (1)...(19): siRNA sense strand
caaccaacauauuucuuuc

SEQ ID NO: 1641323 - RNA, 19 nt, Homo sapiens
  misc_RNA (1)...(19): siRNA sense strand
ucacuucaaucuggaaauu

SEQ ID NO: 1641324 - RNA, 19 nt, Homo sapiens
  misc_RNA (1)...(19): siRNA sense strand
gagaaacucagucuagaga

SEQ ID NO: 1641325 - RNA, 19 nt, Homo sapiens
  misc_RNA (1)...(19): siRNA sense strand
gugaagauguuacuccaau

SEQ ID NO: 1641326 - RNA, 19 nt, Homo sapiens
  misc_RNA (1)...(19): siRNA sense strand
gaagaggccaugaaagcaa

SEQ ID NO: 1641327 - RNA, 19 nt, Homo sapiens
  misc_RNA (1)...(19): siRNA sense strand
gaauguaaaugugaagaag

SEQ ID NO: 1641328 - RNA, 19 nt, Homo sapiens
  misc_RNA (1)...(19): siRNA sense strand
gagcaccaguuccuacaau

SEQ ID NO: 1641329 - RNA, 19 nt, Homo sapiens
  misc_RNA (1)...(19): siRNA sense strand
caagagaaacucagucuag

SEQ ID NO: 1641330 - RNA, 19 nt, Homo sapiens
  misc_RNA (1)...(19): siRNA sense strand
uaaagaagagcccuauguu

SEQ ID NO: 1641331 - RNA, 19 nt, Homo sapiens
  misc_RNA (1)...(19): siRNA sense strand
caacagcccaugcaauuuc

SEQ ID NO: 1641332 - RNA, 19 nt, Homo sapiens
  misc_RNA (1)...(19): siRNA sense strand
gauccuagcaacaacauga

SEQ ID NO: 1641333 - RNA, 19 nt, Homo sapiens
  misc_RNA (1)...(19): siRNA sense strand
cagcaaggcuuuccuacag

SEQ ID NO: 1641334 - RNA, 19 nt, Homo sapiens
  misc_RNA (1)...(19): siRNA sense strand
gcagucaccacuacaagaa

SEQ ID NO: 1641335 - RNA, 19 nt, Homo sapiens
  misc_RNA (1)...(19): siRNA sense strand
gcaaguaacucucuucuua

SEQ ID NO: 1641336 - RNA, 19 nt, Homo sapiens
  misc_RNA (1)...(19): siRNA sense strand
gaaaggagcugaagauagu

SEQ ID NO: 1641337 - RNA, 19 nt, Homo sapiens
  misc_RNA (1)...(19): siRNA sense strand
gcaaagaaguggacauuga

SEQ ID NO: 1641338 - RNA, 19 nt, Homo sapiens
  misc_RNA (1)...(19): siRNA sense strand
caacagcgaugcacuauug

SEQ ID NO: 1641339 - RNA, 19 nt, Homo sapiens
  misc_RNA (1)...(19): siRNA sense strand
caacagaaccagucaauuu

SEQ ID NO: 1641340 - RNA, 19 nt, Homo sapiens
  misc_RNA (1)...(19): siRNA sense strand
gcaguuaucuucaguuuua

SEQ ID NO: 1641341 - RNA, 19 nt, Homo sapiens
  misc_RNA (1)...(19): siRNA sense strand
guacaagggucaccuaguu

SEQ ID NO: 1641342 - RNA, 19 nt, Homo sapiens
  misc_RNA (1)...(19): siRNA sense strand
caacuugacuggcuccuuu

SEQ ID NO: 1641343 - RNA, 19 nt, Homo sapiens
  misc_RNA (1)...(19): siRNA sense strand
caacaugccuggaauucaa

SEQ ID NO: 1641344 - RNA, 19 nt, Homo sapiens
  misc_RNA (1)...(19): siRNA sense strand
guagggauauugaaauuga

SEQ ID NO: 1641345 - RNA, 19 nt, Homo sapiens
  misc_RNA (1)...(19): siRNA sense strand
ucacagcacucaauaguug

SEQ ID NO: 1641346 - RNA, 19 nt, Homo sapiens
  misc_RNA (1)...(19): siRNA sense strand
gcaacagucuccucuuuau

SEQ ID NO: 1641347 - RNA, 19 nt, Homo sapiens
  misc_RNA (1)...(19): siRNA sense strand
ccacuggcauccucuauaa

SEQ ID NO: 1641348 - RNA, 19 nt, Homo sapiens
  misc_RNA (1)...(19): siRNA sense strand
gaaaagcaguuaaccagua

SEQ ID NO: 1641349 - RNA, 19 nt, Homo sapiens
  misc_RNA (1)...(19): siRNA sense strand
ggaaugagaugaugucacu

SEQ ID NO: 1641350 - RNA, 19 nt, Homo sapiens
  misc_RNA (1)...(19): siRNA sense strand
gaaaacaucucaaacauag

SEQ ID NO: 1641351 - RNA, 19 nt, Homo sapiens
  misc_RNA (1)...(19): siRNA sense strand
gcaguaugauuaagaguga

SEQ ID NO: 1641352 - RNA, 19 nt, Homo sapiens
  misc_RNA (1)...(19): siRNA sense strand
gcaaggcuuuccuacagua

SEQ ID NO: 1641353 - RNA, 19 nt, Homo sapiens
  misc_RNA (1)...(19): siRNA sense strand
ugacaacacuucuuucuca

SEQ ID NO: 1641354 - RNA, 19 nt, Homo sapiens
  misc_RNA (1)...(19): siRNA sense strand
gagaugaugucacuucaau

SEQ ID NO: 1641355 - RNA, 19 nt, Homo sapiens
  misc_RNA (1)...(19): siRNA sense strand
gaaacucagucuagagaga

SEQ ID NO: 1641356 - RNA, 19 nt, Homo sapiens
  misc_RNA (1)...(19): siRNA sense strand
gcagcaggcuacacaguuu

SEQ ID NO: 1641357 - RNA, 19 nt, Homo sapiens
  misc_RNA (1)...(19): siRNA sense strand
gaaaggagaagaagaagug

SEQ ID NO: 1641358 - RNA, 19 nt, Homo sapiens
  misc_RNA (1)...(19): siRNA sense strand
uaaugaaccuguaguguug

SEQ ID NO: 1641359 - RNA, 19 nt, Homo sapiens
  misc_RNA (1)...(19): siRNA sense strand
uaucaggccugcagaguaa

SEQ ID NO: 1641360 - RNA, 19 nt, Homo sapiens
  misc_RNA (1)...(19): siRNA sense strand
ugaaggcacuacuguuaua

SEQ ID NO: 1641361 - RNA, 19 nt, Homo sapiens
  misc_RNA (1)...(19): siRNA sense strand
gaggaaugcugaugucgaa

SEQ ID NO: 1641362 - RNA, 19 nt, Homo sapiens
  misc_RNA (1)...(19): siRNA sense strand
gcagucaaccaacauauuu

SEQ ID NO: 1641363 - RNA, 19 nt, Homo sapiens
  misc_RNA (1)...(19): siRNA sense strand
gacaaucaaccucaaguua

SEQ ID NO: 1641364 - RNA, 19 nt, Homo sapiens
  misc_RNA (1)...(19): siRNA sense strand
uugcauagcuguucaguga

SEQ ID NO: 1641365 - RNA, 19 nt, Homo sapiens
  misc_RNA (1)...(19): siRNA sense strand
gaacucaauuucuccacuu

SEQ ID NO: 1641366 - RNA, 19 nt, Homo sapiens
  misc_RNA (1)...(19): siRNA sense strand
gggaauauauguagugaca

SEQ ID NO: 1641367 - RNA, 19 nt, Homo sapiens
  misc_RNA (1)...(19): siRNA sense strand
caaagcaccucacuaugug

SEQ ID NO: 1641368 - RNA, 19 nt, Homo sapiens
  misc_RNA (1)...(19): siRNA sense strand
caucaggaauguucuuauu

SEQ ID NO: 1641369 - RNA, 19 nt, Homo sapiens
  misc_RNA (1)...(19): siRNA sense strand
acaacaagguaaugguuua

SEQ ID NO: 1641370 - RNA, 19 nt, Homo sapiens
  misc_RNA (1)...(19): siRNA sense strand
gcaaaugcagugugaauug

SEQ ID NO: 1641371 - RNA, 19 nt, Homo sapiens
  misc_RNA (1)...(19): siRNA sense strand
gcacuacuguuauagaagu

SEQ ID NO: 1641372 - RNA, 19 nt, Homo sapiens
  misc_RNA (1)...(19): siRNA sense strand
caacaagucagucaaauuc

SEQ ID NO: 1641373 - RNA, 19 nt, Homo sapiens
  misc_RNA (1)...(19): siRNA sense strand
ggaacuauuucaucagaau

SEQ ID NO: 1641374 - RNA, 19 nt, Homo sapiens
  misc_RNA (1)...(19): siRNA sense strand
cagaguaacuggacgaaau

SEQ ID NO: 1641375 - RNA, 19 nt, Homo sapiens
  misc_RNA (1)...(19): siRNA sense strand
ucaggaauguucuuauuug

SEQ ID NO: 1641376 - RNA, 19 nt, Homo sapiens
  misc_RNA (1)...(19): siRNA sense strand
uuacagggcucuucaguuc

SEQ ID NO: 1641377 - RNA, 19 nt, Homo sapiens
  misc_RNA (1)...(19): siRNA sense strand
uguaagcccuggaauguuu

SEQ ID NO: 1641378 - RNA, 19 nt, Homo sapiens
  misc_RNA (1)...(19): siRNA sense strand
uggaagaucucaugauguu

SEQ ID NO: 1641379 - RNA, 19 nt, Homo sapiens
  misc_RNA (1)...(19): siRNA sense strand
gaaaacacguuaucuaauc

SEQ ID NO: 1641380 - RNA, 19 nt, Homo sapiens
  misc_RNA (1)...(19): siRNA sense strand
uggaagagcugaaaguguu

SEQ ID NO: 1641381 - RNA, 19 nt, Homo sapiens
  misc_RNA (1)...(19): siRNA sense strand
ccagagacccugacaacua

SEQ ID NO: 1641382 - RNA, 19 nt, Homo sapiens
  misc_RNA (1)...(19): siRNA sense strand
gcuggaagaucucaugaug

SEQ ID NO: 1641383 - RNA, 19 nt, Homo sapiens
  misc_RNA (1)...(19): siRNA sense strand
agaagaaacuggaacacaa

SEQ ID NO: 1641384 - RNA, 19 nt, Homo sapiens
  misc_RNA (1)...(19): siRNA sense strand
gaucaacucagcaaacauu

SEQ ID NO: 1641385 - RNA, 19 nt, Homo sapiens
  misc_RNA (1)...(19): siRNA sense strand
gaagagcccuauguugugu

SEQ ID NO: 1641386 - RNA, 19 nt, Homo sapiens
  misc_RNA (1)...(19): siRNA sense strand
ccauagcucuccucagauu

SEQ ID NO: 1641387 - RNA, 19 nt, Homo sapiens
  misc_RNA (1)...(19): siRNA sense strand
acagcaagcuccaauauca

SEQ ID NO: 1641388 - RNA, 19 nt, Homo sapiens
  misc_RNA (1)...(19): siRNA sense strand
cagcagacuucucacauga

SEQ ID NO: 1641389 - RNA, 19 nt, Homo sapiens
  misc_RNA (1)...(19): siRNA sense strand
gaguuaauaucaugaggaa

SEQ ID NO: 1641390 - RNA, 19 nt, Homo sapiens
  misc_RNA (1)...(19): siRNA sense strand
gaacuggaguaaagaagag

SEQ ID NO: 1641391 - RNA, 19 nt, Homo sapiens
  misc_RNA (1)...(19): siRNA sense strand
caacaacaacagagcauuu

SEQ ID NO: 1641392 - RNA, 19 nt, Homo sapiens
  misc_RNA (1)...(19): siRNA sense strand
gaacaaaugcagccuccaa

SEQ ID NO: 1641393 - RNA, 19 nt, Homo sapiens
  misc_RNA (1)...(19): siRNA sense strand
gcagcagucuucucauuca

SEQ ID NO: 1641394 - RNA, 19 nt, Homo sapiens
  misc_RNA (1)...(19): siRNA sense strand
gaaaugaaacuucuacaac

SEQ ID NO: 1641395 - RNA, 19 nt, Homo sapiens
  misc_RNA (1)...(19): siRNA sense strand
uaccagaccagauaauuua

SEQ ID NO: 1641396 - RNA, 19 nt, Homo sapiens
  misc_RNA (1)...(19): siRNA sense strand
aaauacaacuccuugcaaa

SEQ ID NO: 1641397 - RNA, 19 nt, Homo sapiens
  misc_RNA (1)...(19): siRNA sense strand
cagcaguuaucuucaguuu

SEQ ID NO: 1641398 - RNA, 19 nt, Homo sapiens
  misc_RNA (1)...(19): siRNA sense strand
gcaccgaacucaauuucuc

SEQ ID NO: 1641399 - RNA, 19 nt, Homo sapiens
  misc_RNA (1)...(19): siRNA sense strand
guaaugagaauguucaaga

SEQ ID NO: 1641400 - RNA, 19 nt, Homo sapiens
  misc_RNA (1)...(19): siRNA sense strand
gaaauacaacuccuugcaa

SEQ ID NO: 1641401 - RNA, 19 nt, Homo sapiens
  misc_RNA (1)...(19): siRNA sense strand
gaacaacaugccuggaauu

SEQ ID NO: 1641402 - RNA, 19 nt, Homo sapiens
  misc_RNA (1)...(19): siRNA sense strand
ggaaaugaaacuucuacaa

SEQ ID NO: 1641403 - RNA, 19 nt, Homo sapiens
  misc_RNA (1)...(19): siRNA sense strand
gcagacuucucacaugaug

SEQ ID NO: 1641404 - RNA, 19 nt, Homo sapiens
  misc_RNA (1)...(19): siRNA sense strand
ugagucagcuucagaauac

SEQ ID NO: 1641405 - RNA, 19 nt, Homo sapiens
  misc_RNA (1)...(19): siRNA sense strand
cagagacccugacaacuau

SEQ ID NO: 1641406 - RNA, 19 nt, Homo sapiens
  misc_RNA (1)...(19): siRNA sense strand
gaagaucucaugauguuca

SEQ ID NO: 1641407 - RNA, 19 nt, Homo sapiens
  misc_RNA (1)...(19): siRNA sense strand
gcguagggauauugaaauu

SEQ ID NO: 1641408 - RNA, 19 nt, Homo sapiens
  misc_RNA (1)...(19): siRNA sense strand
ccaaagcaccucacuaugu

SEQ ID NO: 1641409 - RNA, 19 nt, Homo sapiens
  misc_RNA (1)...(19): siRNA sense strand
ugaaccaacugcagaauuc

SEQ ID NO: 1641410 - RNA, 19 nt, Homo sapiens
  misc_RNA (1)...(19): siRNA sense strand
cagagucaguccacaguuu

SEQ ID NO: 1641411 - RNA, 19 nt, Homo sapiens
  misc_RNA (1)...(19): siRNA sense strand
gaauagugguacccaacaa

SEQ ID NO: 1641412 - RNA, 19 nt, Homo sapiens
  misc_RNA (1)...(19): siRNA sense strand
gauuaagagugaagauguu

SEQ ID NO: 1641413 - RNA, 19 nt, Homo sapiens
  misc_RNA (1)...(19): siRNA sense strand
caaacacccucuucuccaa

SEQ ID NO: 1641414 - RNA, 19 nt, Homo sapiens
  misc_RNA (1)...(19): siRNA sense strand
gacaaaugcuggaagaucu

SEQ ID NO: 1641415 - RNA, 19 nt, Homo sapiens
  misc_RNA (1)...(19): siRNA sense strand
ccugaggacuugcuggaua

SEQ ID NO: 1641416 - RNA, 19 nt, Homo sapiens
  misc_RNA (1)...(19): siRNA sense strand
caacagcaagcuccaauau

SEQ ID NO: 1641417 - RNA, 19 nt, Homo sapiens
  misc_RNA (1)...(19): siRNA sense strand
gcaagggaaugagaugaug

SEQ ID NO: 1641418 - RNA, 19 nt, Homo sapiens
  misc_RNA (1)...(19): siRNA sense strand
guacagugguuaauuuguc

SEQ ID NO: 1641419 - RNA, 19 nt, Homo sapiens
  misc_RNA (1)...(19): siRNA sense strand
ggaaaggagcugaagauag

SEQ ID NO: 1641420 - RNA, 19 nt, Homo sapiens
  misc_RNA (1)...(19): siRNA sense strand
guaaagaagagcccuaugu

SEQ ID NO: 1641421 - RNA, 19 nt, Homo sapiens
  misc_RNA (1)...(19): siRNA sense strand
caccaaacaugauauucaa

SEQ ID NO: 1641422 - RNA, 19 nt, Homo sapiens
  misc_RNA (1)...(19): siRNA sense strand
caaccaacauauuucuuuc

SEQ ID NO: 1641423 - RNA, 19 nt, Homo sapiens
  misc_RNA (1)...(19): siRNA sense strand
ucacuucaaucuggaaauu

SEQ ID NO: 1641424 - RNA, 19 nt, Homo sapiens
  misc_RNA (1)...(19): siRNA sense strand
gagaaacucagucuagaga

SEQ ID NO: 1641425 - RNA, 19 nt, Homo sapiens
  misc_RNA (1)...(19): siRNA sense strand
gugaagauguuacuccaau

SEQ ID NO: 1641426 - RNA, 19 nt, Homo sapiens
  misc_RNA (1)...(19): siRNA sense strand
gaagaggccaugaaagcaa

SEQ ID NO: 1641427 - RNA, 19 nt, Homo sapiens
  misc_RNA (1)...(19): siRNA sense strand
gaauguaaaugugaagaag

SEQ ID NO: 1641428 - RNA, 19 nt, Homo sapiens
  misc_RNA (1)...(19): siRNA sense strand
gagcaccaguuccuacaau

SEQ ID NO: 1641429 - RNA, 19 nt, Homo sapiens
  misc_RNA (1)...(19): siRNA sense strand
caagagaaacucagucuag

SEQ ID NO: 1641430 - RNA, 19 nt, Homo sapiens
  misc_RNA (1)...(19): siRNA sense strand
uaaagaagagcccuauguu

SEQ ID NO: 1641431 - RNA, 19 nt, Homo sapiens
  misc_RNA (1)...(19): siRNA sense strand
caacagcccaugcaauuuc

SEQ ID NO: 1641432 - RNA, 19 nt, Homo sapiens
  misc_RNA (1)...(19): siRNA sense strand
gauccuagcaacaacauga

SEQ ID NO: 1641433 - RNA, 19 nt, Homo sapiens
  misc_RNA (1)...(19): siRNA sense strand
cagcaaggcuuuccuacag

SEQ ID NO: 1641434 - RNA, 19 nt, Homo sapiens
  misc_RNA (1)...(19): siRNA sense strand
gcagucaccacuacaagaa

SEQ ID NO: 1641435 - RNA, 19 nt, Homo sapiens
  misc_RNA (1)...(19): siRNA sense strand
gcaaguaacucucuucuua

SEQ ID NO: 1641436 - RNA, 19 nt, Homo sapiens
  misc_RNA (1)...(19): siRNA sense strand
gaaaggagcugaagauagu

SEQ ID NO: 1641437 - RNA, 19 nt, Homo sapiens
  misc_RNA (1)...(19): siRNA sense strand
gcaaagaaguggacauuga

SEQ ID NO: 1641438 - RNA, 19 nt, Homo sapiens
  misc_RNA (1)...(19): siRNA sense strand
caacagcgaugcacuauug

SEQ ID NO: 1641439 - RNA, 19 nt, Homo sapiens
  misc_RNA (1)...(19): siRNA sense strand
caacagaaccagucaauuu

SEQ ID NO: 1641440 - RNA, 19 nt, Homo sapiens
  misc_RNA (1)...(19): siRNA sense strand
gcaguuaucuucaguuuua

SEQ ID NO: 1641441 - RNA, 19 nt, Homo sapiens
  misc_RNA (1)...(19): siRNA sense strand
guacaagggucaccuaguu

SEQ ID NO: 1641442 - RNA, 19 nt, Homo sapiens
  misc_RNA (1)...(19): siRNA sense strand
caacuugacuggcuccuuu

SEQ ID NO: 1641443 - RNA, 19 nt, Homo sapiens
  misc_RNA (1)...(19): siRNA sense strand
caacaugccuggaauucaa

SEQ ID NO: 1641444 - RNA, 19 nt, Homo sapiens
  misc_RNA (1)...(19): siRNA sense strand
guagggauauugaaauuga

SEQ ID NO: 1641445 - RNA, 19 nt, Homo sapiens
  misc_RNA (1)...(19): siRNA sense strand
ucacagcacucaauaguug

SEQ ID NO: 1641446 - RNA, 19 nt, Homo sapiens
  misc_RNA (1)...(19): siRNA sense strand
gcaacagucuccucuuuau

SEQ ID NO: 1641447 - RNA, 19 nt, Homo sapiens
  misc_RNA (1)...(19): siRNA sense strand
ccacuggcauccucuauaa

SEQ ID NO: 1641448 - RNA, 19 nt, Homo sapiens
  misc_RNA (1)...(19): siRNA sense strand
gaaaagcaguuaaccagua

SEQ ID NO: 1641449 - RNA, 19 nt, Homo sapiens
  misc_RNA (1)...(19): siRNA sense strand
ggaaugagaugaugucacu

SEQ ID NO: 1641450 - RNA, 19 nt, Homo sapiens
  misc_RNA (1)...(19): siRNA sense strand
gaaaacaucucaaacauag

SEQ ID NO: 1641451 - RNA, 19 nt, Homo sapiens
  misc_RNA (1)...(19): siRNA sense strand
gcaguaugauuaagaguga

SEQ ID NO: 1641452 - RNA, 19 nt, Homo sapiens
  misc_RNA (1)...(19): siRNA sense strand
gcaaggcuuuccuacagua

SEQ ID NO: 1641453 - RNA, 19 nt, Homo sapiens
  misc_RNA (1)...(19): siRNA sense strand
ugacaacacuucuuucuca

SEQ ID NO: 1641454 - RNA, 19 nt, Homo sapiens
  misc_RNA (1)...(19): siRNA sense strand
gagaugaugucacuucaau

SEQ ID NO: 1641455 - RNA, 19 nt, Homo sapiens
  misc_RNA (1)...(19): siRNA sense strand
gaaacucagucuagagaga

SEQ ID NO: 1641456 - RNA, 19 nt, Homo sapiens
  misc_RNA (1)...(19): siRNA sense strand
gcagcaggcuacacaguuu

SEQ ID NO: 1641457 - RNA, 19 nt, Homo sapiens
  misc_RNA (1)...(19): siRNA sense strand
gaaaggagaagaagaagug

SEQ ID NO: 1641458 - RNA, 19 nt, Homo sapiens
  misc_RNA (1)...(19): siRNA sense strand
uaaugaaccuguaguguug

SEQ ID NO: 1641459 - RNA, 19 nt, Homo sapiens
  misc_RNA (1)...(19): siRNA sense strand
uaucaggccugcagaguaa

SEQ ID NO: 1641460 - RNA, 19 nt, Homo sapiens
  misc_RNA (1)...(19): siRNA sense strand
ugaaggcacuacuguuaua

SEQ ID NO: 1641461 - RNA, 19 nt, Homo sapiens
  misc_RNA (1)...(19): siRNA sense strand
gaggaaugcugaugucgaa

SEQ ID NO: 1641462 - RNA, 19 nt, Homo sapiens
  misc_RNA (1)...(19): siRNA sense strand
gcagucaaccaacauauuu

SEQ ID NO: 1641463 - RNA, 19 nt, Homo sapiens
  misc_RNA (1)...(19): siRNA sense strand
gacaaucaaccucaaguua

SEQ ID NO: 1641464 - RNA, 19 nt, Homo sapiens
  misc_RNA (1)...(19): siRNA sense strand
uugcauagcuguucaguga

SEQ ID NO: 1641465 - RNA, 19 nt, Homo sapiens
  misc_RNA (1)...(19): siRNA sense strand
gaacucaauuucuccacuu

SEQ ID NO: 1641466 - RNA, 19 nt, Homo sapiens
  misc_RNA (1)...(19): siRNA sense strand
gggaauauauguagugaca

SEQ ID NO: 1641467 - RNA, 19 nt, Homo sapiens
  misc_RNA (1)...(19): siRNA sense strand
caaagcaccucacuaugug

SEQ ID NO: 1641468 - RNA, 19 nt, Homo sapiens
  misc_RNA (1)...(19): siRNA sense strand
caucaggaauguucuuauu

SEQ ID NO: 1641469 - RNA, 19 nt, Homo sapiens
  misc_RNA (1)...(19): siRNA sense strand
acaacaagguaaugguuua

SEQ ID NO: 1641470 - RNA, 19 nt, Homo sapiens
  misc_RNA (1)...(19): siRNA sense strand
gcaaaugcagugugaauug

SEQ ID NO: 1641471 - RNA, 19 nt, Homo sapiens
  misc_RNA (1)...(19): siRNA sense strand
gcacuacuguuauagaagu

SEQ ID NO: 1641472 - RNA, 19 nt, Homo sapiens
  misc_RNA (1)...(19): siRNA sense strand
caacaagucagucaaauuc

SEQ ID NO: 1641473 - RNA, 19 nt, Homo sapiens
  misc_RNA (1)...(19): siRNA sense strand
ggaacuauuucaucagaau

SEQ ID NO: 1641474 - RNA, 19 nt, Homo sapiens
  misc_RNA (1)...(19): siRNA sense strand
cagaguaacuggacgaaau

SEQ ID NO: 1641475 - RNA, 19 nt, Homo sapiens
  misc_RNA (1)...(19): siRNA sense strand
ucaggaauguucuuauuug

SEQ ID NO: 1641476 - RNA, 19 nt, Homo sapiens
  misc_RNA (1)...(19): siRNA sense strand
uuacagggcucuucaguuc

SEQ ID NO: 1641477 - RNA, 19 nt, Homo sapiens
  misc_RNA (1)...(19): siRNA sense strand
uguaagcccuggaauguuu

SEQ ID NO: 1641478 - RNA, 19 nt, Homo sapiens
  misc_RNA (1)...(19): siRNA sense strand
uggaagaucucaugauguu

SEQ ID NO: 1641479 - RNA, 19 nt, Homo sapiens
  misc_RNA (1)...(19): siRNA sense strand
gaaaacacguuaucuaauc

SEQ ID NO: 1641480 - RNA, 19 nt, Homo sapiens
  misc_RNA (1)...(19): siRNA sense strand
uggaagagcugaaaguguu

SEQ ID NO: 1641481 - RNA, 19 nt, Homo sapiens
  misc_RNA (1)...(19): siRNA sense strand
ccagagacccugacaacua

SEQ ID NO: 1641482 - RNA, 19 nt, Homo sapiens
  misc_RNA (1)...(19): siRNA sense strand
gcuggaagaucucaugaug

SEQ ID NO: 1641483 - RNA, 19 nt, Homo sapiens
  misc_RNA (1)...(19): siRNA sense strand
agaagaaacuggaacacaa

SEQ ID NO: 1641484 - RNA, 19 nt, Homo sapiens
  misc_RNA (1)...(19): siRNA sense strand
gaucaacucagcaaacauu

SEQ ID NO: 1641485 - RNA, 19 nt, Homo sapiens
  misc_RNA (1)...(19): siRNA sense strand
gaagagcccuauguugugu

SEQ ID NO: 1641486 - RNA, 19 nt, Homo sapiens
  misc_RNA (1)...(19): siRNA sense strand
ccauagcucuccucagauu

SEQ ID NO: 1641487 - RNA, 19 nt, Homo sapiens
  misc_RNA (1)...(19): siRNA sense strand
acagcaagcuccaauauca

SEQ ID NO: 1641488 - RNA, 19 nt, Homo sapiens
  misc_RNA (1)...(19): siRNA sense strand
cagcagacuucucacauga

SEQ ID NO: 1641489 - RNA, 19 nt, Homo sapiens
  misc_RNA (1)...(19): siRNA sense strand
gaguuaauaucaugaggaa

SEQ ID NO: 1641490 - RNA, 19 nt, Homo sapiens
  misc_RNA (1)...(19): siRNA sense strand
gaacuggaguaaagaagag

SEQ ID NO: 1641491 - RNA, 19 nt, Homo sapiens
  misc_RNA (1)...(19): siRNA sense strand
caacaacaacagagcauuu

SEQ ID NO: 1641492 - RNA, 19 nt, Homo sapiens
  misc_RNA (1)...(19): siRNA sense strand
gaacaaaugcagccuccaa

SEQ ID NO: 1641493 - RNA, 19 nt, Homo sapiens
  misc_RNA (1)...(19): siRNA sense strand
gcagcagucuucucauuca

SEQ ID NO: 1641494 - RNA, 19 nt, Homo sapiens
  misc_RNA (1)...(19): siRNA sense strand
gaaaugaaacuucuacaac

SEQ ID NO: 1641495 - RNA, 19 nt, Homo sapiens
  misc_RNA (1)...(19): siRNA sense strand
uaccagaccagauaauuua

SEQ ID NO: 1641496 - RNA, 19 nt, Homo sapiens
  misc_RNA (1)...(19): siRNA sense strand
aaauacaacuccuugcaaa

SEQ ID NO: 1641497 - RNA, 19 nt, Homo sapiens
  misc_RNA (1)...(19): siRNA sense strand
cagcaguuaucuucaguuu

SEQ ID NO: 1641498 - RNA, 19 nt, Homo sapiens
  misc_RNA (1)...(19): siRNA sense strand
gcaccgaacucaauuucuc

SEQ ID NO: 1641499 - RNA, 19 nt, Homo sapiens
  misc_RNA (1)...(19): siRNA sense strand
guaaugagaauguucaaga

SEQ ID NO: 1641500 - RNA, 19 nt, Homo sapiens
  misc_RNA (1)...(19): siRNA sense strand
gaaauacaacuccuugcaa

SEQ ID NO: 1641501 - RNA, 19 nt, Homo sapiens
  misc_RNA (1)...(19): siRNA sense strand
gaacaacaugccuggaauu

SEQ ID NO: 1641502 - RNA, 19 nt, Homo sapiens
  misc_RNA (1)...(19): siRNA sense strand
ggaaaugaaacuucuacaa

SEQ ID NO: 1641503 - RNA, 19 nt, Homo sapiens
  misc_RNA (1)...(19): siRNA sense strand
gcagacuucucacaugaug

SEQ ID NO: 1641504 - RNA, 19 nt, Homo sapiens
  misc_RNA (1)...(19): siRNA sense strand
ugagucagcuucagaauac

SEQ ID NO: 1641505 - RNA, 19 nt, Homo sapiens
  misc_RNA (1)...(19): siRNA sense strand
cagagacccugacaacuau

SEQ ID NO: 1641506 - RNA, 19 nt, Homo sapiens
  misc_RNA (1)...(19): siRNA sense strand
gaagaucucaugauguuca

SEQ ID NO: 1641507 - RNA, 19 nt, Homo sapiens
  misc_RNA (1)...(19): siRNA sense strand
gcguagggauauugaaauu

SEQ ID NO: 1641508 - RNA, 19 nt, Homo sapiens
  misc_RNA (1)...(19): siRNA sense strand
ccaaagcaccucacuaugu

SEQ ID NO: 1641509 - RNA, 19 nt, Homo sapiens
  misc_RNA (1)...(19): siRNA sense strand
ugaaccaacugcagaauuc

SEQ ID NO: 1641510 - RNA, 19 nt, Homo sapiens
  misc_RNA (1)...(19): siRNA sense strand
cagagucaguccacaguuu

SEQ ID NO: 1641511 - RNA, 19 nt, Homo sapiens
  misc_RNA (1)...(19): siRNA sense strand
gaauagugguacccaacaa

SEQ ID NO: 1641512 - RNA, 19 nt, Homo sapiens
  misc_RNA (1)...(19): siRNA sense strand
gauuaagagugaagauguu

SEQ ID NO: 1641513 - RNA, 19 nt, Homo sapiens
  misc_RNA (1)...(19): siRNA sense strand
caaacacccucuucuccaa

SEQ ID NO: 1641514 - RNA, 19 nt, Homo sapiens
  misc_RNA (1)...(19): siRNA sense strand
gacaaaugcuggaagaucu

SEQ ID NO: 1641515 - RNA, 19 nt, Homo sapiens
  misc_RNA (1)...(19): siRNA sense strand
ccugaggacuugcuggaua

SEQ ID NO: 1641516 - RNA, 19 nt, Homo sapiens
  misc_RNA (1)...(19): siRNA sense strand
caacagcaagcuccaauau

SEQ ID NO: 1641517 - RNA, 19 nt, Homo sapiens
  misc_RNA (1)...(19): siRNA sense strand
gcaagggaaugagaugaug

SEQ ID NO: 1641518 - RNA, 19 nt, Homo sapiens
  misc_RNA (1)...(19): siRNA sense strand
guacagugguuaauuuguc

SEQ ID NO: 1641519 - RNA, 19 nt, Homo sapiens
  misc_RNA (1)...(19): siRNA sense strand
ggaaaggagcugaagauag

SEQ ID NO: 1641520 - RNA, 19 nt, Homo sapiens
  misc_RNA (1)...(19): siRNA sense strand
guaaagaagagcccuaugu

SEQ ID NO: 1641521 - RNA, 19 nt, Homo sapiens
  misc_RNA (1)...(19): siRNA sense strand
caccaaacaugauauucaa

SEQ ID NO: 1641522 - RNA, 19 nt, Homo sapiens
  misc_RNA (1)...(19): siRNA sense strand
caaccaacauauuucuuuc

SEQ ID NO: 1641523 - RNA, 19 nt, Homo sapiens
  misc_RNA (1)...(19): siRNA sense strand
ucacuucaaucuggaaauu

SEQ ID NO: 1641524 - RNA, 19 nt, Homo sapiens
  misc_RNA (1)...(19): siRNA sense strand
gagaaacucagucuagaga

SEQ ID NO: 1641525 - RNA, 19 nt, Homo sapiens
  misc_RNA (1)...(19): siRNA sense strand
gugaagauguuacuccaau

SEQ ID NO: 1641526 - RNA, 19 nt, Homo sapiens
  misc_RNA (1)...(19): siRNA sense strand
gaagaggccaugaaagcaa

SEQ ID NO: 1641527 - RNA, 19 nt, Homo sapiens
  misc_RNA (1)...(19): siRNA sense strand
gaauguaaaugugaagaag

SEQ ID NO: 1641528 - RNA, 19 nt, Homo sapiens
  misc_RNA (1)...(19): siRNA sense strand
gagcaccaguuccuacaau

SEQ ID NO: 1641529 - RNA, 19 nt, Homo sapiens
  misc_RNA (1)...(19): siRNA sense strand
caagagaaacucagucuag

SEQ ID NO: 1641530 - RNA, 19 nt, Homo sapiens
  misc_RNA (1)...(19): siRNA sense strand
uaaagaagagcccuauguu

SEQ ID NO: 1641531 - RNA, 19 nt, Homo sapiens
  misc_RNA (1)...(19): siRNA sense strand
caacagcccaugcaauuuc

SEQ ID NO: 1641532 - RNA, 19 nt, Homo sapiens
  misc_RNA (1)...(19): siRNA sense strand
gauccuagcaacaacauga

SEQ ID NO: 1641533 - RNA, 19 nt, Homo sapiens
  misc_RNA (1)...(19): siRNA sense strand
cagcaaggcuuuccuacag

SEQ ID NO: 1641534 - RNA, 19 nt, Homo sapiens
  misc_RNA (1)...(19): siRNA sense strand
gcagucaccacuacaagaa

SEQ ID NO: 1641535 - RNA, 19 nt, Homo sapiens
  misc_RNA (1)...(19): siRNA sense strand
gcacggagcuggucuuugg

SEQ ID NO: 1641536 - RNA, 19 nt, Homo sapiens
  misc_RNA (1)...(19): siRNA sense strand
ugaaagagcccacuacaaa

SEQ ID NO: 1641537 - RNA, 19 nt, Homo sapiens
  misc_RNA (1)...(19): siRNA sense strand
gcagaaaccagcaagauga

SEQ ID NO: 1641538 - RNA, 19 nt, Homo sapiens
  misc_RNA (1)...(19): siRNA sense strand
gaagaggcuuugagagaug

SEQ ID NO: 1641539 - RNA, 19 nt, Homo sapiens
  misc_RNA (1)...(19): siRNA sense strand
gcacuucccugagaucuuc

SEQ ID NO: 1641540 - RNA, 19 nt, Homo sapiens
  misc_RNA (1)...(19): siRNA sense strand
gcagaaaugcugaagauca

SEQ ID NO: 1641541 - RNA, 19 nt, Homo sapiens
  misc_RNA (1)...(19): siRNA sense strand
ggaaagaggcaccuuaucu

SEQ ID NO: 1641542 - RNA, 19 nt, Homo sapiens
  misc_RNA (1)...(19): siRNA sense strand
agagaucacucaaagauuc

SEQ ID NO: 1641543 - RNA, 19 nt, Homo sapiens
  misc_RNA (1)...(19): siRNA sense strand
uccaagagcucaugcagaa

SEQ ID NO: 1641544 - RNA, 19 nt, Homo sapiens
  misc_RNA (1)...(19): siRNA sense strand
gaaagcucaucacccaaga

SEQ ID NO: 1641545 - RNA, 19 nt, Homo sapiens
  misc_RNA (1)...(19): siRNA sense strand
gaugaaaguccuggaguuu

SEQ ID NO: 1641546 - RNA, 19 nt, Homo sapiens
  misc_RNA (1)...(19): siRNA sense strand
ugagugugaucuucuuaaa

SEQ ID NO: 1641547 - RNA, 19 nt, Homo sapiens
  misc_RNA (1)...(19): siRNA sense strand
gauggaaagaggcaccuua

SEQ ID NO: 1641548 - RNA, 19 nt, Homo sapiens
  misc_RNA (1)...(19): siRNA sense strand
agugugaucuucuuaaaug

SEQ ID NO: 1641549 - RNA, 19 nt, Homo sapiens
  misc_RNA (1)...(19): siRNA sense strand
gaaagagcccacuacaaag

SEQ ID NO: 1641550 - RNA, 19 nt, Homo sapiens
  misc_RNA (1)...(19): siRNA sense strand
cagaaaugcugaagaucau

SEQ ID NO: 1641551 - RNA, 19 nt, Homo sapiens
  misc_RNA (1)...(19): siRNA sense strand
ugaagaggcuuugagagau

SEQ ID NO: 1641552 - RNA, 19 nt, Homo sapiens
  misc_RNA (1)...(19): siRNA sense strand
ccaggaagacgaagauguu

SEQ ID NO: 1641553 - RNA, 19 nt, Homo sapiens
  misc_RNA (1)...(19): siRNA sense strand
gacccaggaucucaagguu

SEQ ID NO: 1641554 - RNA, 19 nt, Homo sapiens
  misc_RNA (1)...(19): siRNA sense strand
caacauccacugagagauc

SEQ ID NO: 1641555 - RNA, 19 nt, Homo sapiens
  misc_RNA (1)...(19): siRNA sense strand
gcacuacagccaugacuag

SEQ ID NO: 1641556 - RNA, 19 nt, Homo sapiens
  misc_RNA (1)...(19): siRNA sense strand
gaaaugcugaagaucauca

SEQ ID NO: 1641557 - RNA, 19 nt, Homo sapiens
  misc_RNA (1)...(19): siRNA sense strand
ggaagacgaagauguuagu

SEQ ID NO: 1641558 - RNA, 19 nt, Homo sapiens
  misc_RNA (1)...(19): siRNA sense strand
gaaaccagcaagaugaaag

SEQ ID NO: 1641559 - RNA, 19 nt, Homo sapiens
  misc_RNA (1)...(19): siRNA sense strand
gaagaggaaaucugggaau

SEQ ID NO: 1641560 - RNA, 19 nt, Homo sapiens
  misc_RNA (1)...(19): siRNA sense strand
gagagaucacucaaagauu

SEQ ID NO: 1641561 - RNA, 19 nt, Homo sapiens
  misc_RNA (1)...(19): siRNA sense strand
aaggagcacuucccugaga

SEQ ID NO: 1641562 - RNA, 19 nt, Homo sapiens
  misc_RNA (1)...(19): siRNA sense strand
aggcagaaaugcugaagau

SEQ ID NO: 1641563 - RNA, 19 nt, Homo sapiens
  misc_RNA (1)...(19): siRNA sense strand
aagauucucuaaccaggaa

SEQ ID NO: 1641564 - RNA, 19 nt, Homo sapiens
  misc_RNA (1)...(19): siRNA sense strand
aagaggaaaucugggaauu

SEQ ID NO: 1641565 - RNA, 19 nt, Homo sapiens
  misc_RNA (1)...(19): siRNA sense strand
cuucuuaaauggcaacugu

SEQ ID NO: 1641566 - RNA, 19 nt, Homo sapiens
  misc_RNA (1)...(19): siRNA sense strand
agaugaaaguccuggaguu

SEQ ID NO: 1641567 - RNA, 19 nt, Homo sapiens
  misc_RNA (1)...(19): siRNA sense strand
gcgacgagagccaagauga

SEQ ID NO: 1641568 - RNA, 19 nt, Homo sapiens
  misc_RNA (1)...(19): siRNA sense strand
caacugugcccgugaagag

SEQ ID NO: 1641569 - RNA, 19 nt, Homo sapiens
  misc_RNA (1)...(19): siRNA sense strand
cgaagauguuagugcaguu

SEQ ID NO: 1641570 - RNA, 19 nt, Homo sapiens
  misc_RNA (1)...(19): siRNA sense strand
agaggcaccuuaucuuugg

SEQ ID NO: 1641571 - RNA, 19 nt, Homo sapiens
  misc_RNA (1)...(19): siRNA sense strand
gcucaucacccaagaucug

SEQ ID NO: 1641572 - RNA, 19 nt, Homo sapiens
  misc_RNA (1)...(19): siRNA sense strand
ucacucaaagauucucuaa

SEQ ID NO: 1641573 - RNA, 19 nt, Homo sapiens
  misc_RNA (1)...(19): siRNA sense strand
uuugagagaugaagaagag

SEQ ID NO: 1641574 - RNA, 19 nt, Homo sapiens
  misc_RNA (1)...(19): siRNA sense strand
ccaaggaaugggcuucuga

SEQ ID NO: 1641575 - RNA, 19 nt, Homo sapiens
  misc_RNA (1)...(19): siRNA sense strand
gagagaugaagaagagaga

SEQ ID NO: 1641576 - RNA, 19 nt, Homo sapiens
  misc_RNA (1)...(19): siRNA sense strand
gcacuggaucugauaaagg

SEQ ID NO: 1641577 - RNA, 19 nt, Homo sapiens
  misc_RNA (1)...(19): siRNA sense strand
caggaagacgaagauguua

SEQ ID NO: 1641578 - RNA, 19 nt, Homo sapiens
  misc_RNA (1)...(19): siRNA sense strand
acucaaagauucucuaacc

SEQ ID NO: 1641579 - RNA, 19 nt, Homo sapiens
  misc_RNA (1)...(19): siRNA sense strand
ucugaugccucuacugagu

SEQ ID NO: 1641580 - RNA, 19 nt, Homo sapiens
  misc_RNA (1)...(19): siRNA sense strand
cccaggagccucagagaga

SEQ ID NO: 1641581 - RNA, 19 nt, Homo sapiens
  misc_RNA (1)...(19): siRNA sense strand
gaagauguuagugcaguuc

SEQ ID NO: 1641582 - RNA, 19 nt, Homo sapiens
  misc_RNA (1)...(19): siRNA sense strand
gagccaagaugaggaaaau

SEQ ID NO: 1641583 - RNA, 19 nt, Homo sapiens
  misc_RNA (1)...(19): siRNA sense strand
gcuaugucaugcacuggau

SEQ ID NO: 1641584 - RNA, 19 nt, Homo sapiens
  misc_RNA (1)...(19): siRNA sense strand
gcuccgugcccgugagaaa

SEQ ID NO: 1641585 - RNA, 19 nt, Homo sapiens
  misc_RNA (1)...(19): siRNA sense strand
cagaaaccagcaagaugaa

SEQ ID NO: 1641586 - RNA, 19 nt, Homo sapiens
  misc_RNA (1)...(19): siRNA sense strand
caagagcucaugcagaaac

SEQ ID NO: 1641587 - RNA, 19 nt, Homo sapiens
  misc_RNA (1)...(19): siRNA sense strand
uaaccaggaagacgaagau

SEQ ID NO: 1641588 - RNA, 19 nt, Homo sapiens
  misc_RNA (1)...(19): siRNA sense strand
ccacuacaaaggcagaaau

SEQ ID NO: 1641589 - RNA, 19 nt, Homo sapiens
  misc_RNA (1)...(19): siRNA sense strand
cgagagccaagaugaggaa

SEQ ID NO: 1641590 - RNA, 19 nt, Homo sapiens
  misc_RNA (1)...(19): siRNA sense strand
augaagaggcuuugagaga

SEQ ID NO: 1641591 - RNA, 19 nt, Homo sapiens
  misc_RNA (1)...(19): siRNA sense strand
gagugugaucuucuuaaau

SEQ ID NO: 1641592 - RNA, 19 nt, Homo sapiens
  misc_RNA (1)...(19): siRNA sense strand
cuucugaugccucuacuga

SEQ ID NO: 1641593 - RNA, 19 nt, Homo sapiens
  misc_RNA (1)...(19): siRNA sense strand
gucaugcacuggaucugau

SEQ ID NO: 1641594 - RNA, 19 nt, Homo sapiens
  misc_RNA (1)...(19): siRNA sense strand
aaagagcccacuacaaagg

SEQ ID NO: 1641595 - RNA, 19 nt, Homo sapiens
  misc_RNA (1)...(19): siRNA sense strand
ucuuuggccuugccuugaa

SEQ ID NO: 1641596 - RNA, 19 nt, Homo sapiens
  misc_RNA (1)...(19): siRNA sense strand
caaaggcagaaaugcugaa

SEQ ID NO: 1641597 - RNA, 19 nt, Homo sapiens
  misc_RNA (1)...(19): siRNA sense strand
gcaacugugcccgugaaga

SEQ ID NO: 1641598 - RNA, 19 nt, Homo sapiens
  misc_RNA (1)...(19): siRNA sense strand
gcgcacggagcuggucuuu

SEQ ID NO: 1641599 - RNA, 19 nt, Homo sapiens
  misc_RNA (1)...(19): siRNA sense strand
caaggaaugggcuucugau

SEQ ID NO: 1641600 - RNA, 19 nt, Homo sapiens
  misc_RNA (1)...(19): siRNA sense strand
gcaggugcccaacagugau

SEQ ID NO: 1641601 - RNA, 19 nt, Homo sapiens
  misc_RNA (1)...(19): siRNA sense strand
gaagacgaagauguuagug

SEQ ID NO: 1641602 - RNA, 19 nt, Homo sapiens
  misc_RNA (1)...(19): siRNA sense strand
agccaugacuagugcguau

SEQ ID NO: 1641603 - RNA, 19 nt, Homo sapiens
  misc_RNA (1)...(19): siRNA sense strand
aagaggcuuugagagauga

SEQ ID NO: 1641604 - RNA, 19 nt, Homo sapiens
  misc_RNA (1)...(19): siRNA sense strand
cuacaaaggcagaaaugcu

SEQ ID NO: 1641605 - RNA, 19 nt, Homo sapiens
  misc_RNA (1)...(19): siRNA sense strand
ccacauccaguagcucuuc

SEQ ID NO: 1641606 - RNA, 19 nt, Homo sapiens
  misc_RNA (1)...(19): siRNA sense strand
gaaccgagcuggcuugcua

SEQ ID NO: 1641607 - RNA, 19 nt, Homo sapiens
  misc_RNA (1)...(19): siRNA sense strand
ucagaucacuuuccaguug

SEQ ID NO: 1641608 - RNA, 19 nt, Homo sapiens
  misc_RNA (1)...(19): siRNA sense strand
gaagacauaugagcuacuc

SEQ ID NO: 1641609 - RNA, 19 nt, Homo sapiens
  misc_RNA (1)...(19): siRNA sense strand
cuacagguuuauauccaua

SEQ ID NO: 1641610 - RNA, 19 nt, Homo sapiens
  misc_RNA (1)...(19): siRNA sense strand
cagcagugauccuauuguu

SEQ ID NO: 1641611 - RNA, 19 nt, Homo sapiens
  misc_RNA (1)...(19): siRNA sense strand
ccaguuggauguaugaaag

SEQ ID NO: 1641612 - RNA, 19 nt, Homo sapiens
  misc_RNA (1)...(19): siRNA sense strand
gacaagcacaagucuauau

SEQ ID NO: 1641613 - RNA, 19 nt, Homo sapiens
  misc_RNA (1)...(19): siRNA sense strand
gcagugauccuauuguuuu

SEQ ID NO: 1641614 - RNA, 19 nt, Homo sapiens
  misc_RNA (1)...(19): siRNA sense strand
gcccagcagugauccuauu

SEQ ID NO: 1641615 - RNA, 19 nt, Homo sapiens
  misc_RNA (1)...(19): siRNA sense strand
ccucaugguucaacuuuua

SEQ ID NO: 1641616 - RNA, 19 nt, Homo sapiens
  misc_RNA (1)...(19): siRNA sense strand
caaggucaguguggaguau

SEQ ID NO: 1641617 - RNA, 19 nt, Homo sapiens
  misc_RNA (1)...(19): siRNA sense strand
gauaucacccaccagaguu

SEQ ID NO: 1641618 - RNA, 19 nt, Homo sapiens
  misc_RNA (1)...(19): siRNA sense strand
cagaaccuuugaccgcuuu

SEQ ID NO: 1641619 - RNA, 19 nt, Homo sapiens
  misc_RNA (1)...(19): siRNA sense strand
ccacagccuuugaggaagu

SEQ ID NO: 1641620 - RNA, 19 nt, Homo sapiens
  misc_RNA (1)...(19): siRNA sense strand
gugacaagcacaagucuau

SEQ ID NO: 1641621 - RNA, 19 nt, Homo sapiens
  misc_RNA (1)...(19): siRNA sense strand
gcaaggucaguguggagua

SEQ ID NO: 1641622 - RNA, 19 nt, Homo sapiens
  misc_RNA (1)...(19): siRNA sense strand
uuaagaauccaguaucaga

SEQ ID NO: 1641623 - RNA, 19 nt, Homo sapiens
  misc_RNA (1)...(19): siRNA sense strand
cgaauucccagaaccuuug

SEQ ID NO: 1641624 - RNA, 19 nt, Homo sapiens
  misc_RNA (1)...(19): siRNA sense strand
uaccacagccuuugaggaa

SEQ ID NO: 1641625 - RNA, 19 nt, Homo sapiens
  misc_RNA (1)...(19): siRNA sense strand
caagcacaagucuauauug

SEQ ID NO: 1641626 - RNA, 19 nt, Homo sapiens
  misc_RNA (1)...(19): siRNA sense strand
gcccagugauggauucaag

SEQ ID NO: 1641627 - RNA, 19 nt, Homo sapiens
  misc_RNA (1)...(19): siRNA sense strand
gaagguaauuaagaaucca

SEQ ID NO: 1641628 - RNA, 19 nt, Homo sapiens
  misc_RNA (1)...(19): siRNA sense strand
guuuauauccauacacaga

SEQ ID NO: 1641629 - RNA, 19 nt, Homo sapiens
  misc_RNA (1)...(19): siRNA sense strand
uccaguaucagaucacuuu

SEQ ID NO: 1641630 - RNA, 19 nt, Homo sapiens
  misc_RNA (1)...(19): siRNA sense strand
aaacuuaccacagccuuug

SEQ ID NO: 1641631 - RNA, 19 nt, Homo sapiens
  misc_RNA (1)...(19): siRNA sense strand
gcuacagguuuauauccau

SEQ ID NO: 1641632 - RNA, 19 nt, Homo sapiens
  misc_RNA (1)...(19): siRNA sense strand
ggaggccguaggcuuauug

SEQ ID NO: 1641633 - RNA, 19 nt, Homo sapiens
  misc_RNA (1)...(19): siRNA sense strand
gguaauuaagaauccagua

SEQ ID NO: 1641634 - RNA, 19 nt, Homo sapiens
  misc_RNA (1)...(19): siRNA sense strand
ugacaagcacaagucuaua

SEQ ID NO: 1641635 - RNA, 19 nt, Homo sapiens
  misc_RNA (1)...(19): siRNA sense strand
caagguagggaagacauau

SEQ ID NO: 1641636 - RNA, 19 nt, Homo sapiens
  misc_RNA (1)...(19): siRNA sense strand
ucaagguagggaagacaua

SEQ ID NO: 1641637 - RNA, 19 nt, Homo sapiens
  misc_RNA (1)...(19): siRNA sense strand
ccaccagaguuugcugaug

SEQ ID NO: 1641638 - RNA, 19 nt, Homo sapiens
  misc_RNA (1)...(19): siRNA sense strand
ccaucccgguugucaguga

SEQ ID NO: 1641639 - RNA, 19 nt, Homo sapiens
  misc_RNA (1)...(19): siRNA sense strand
acaagcacaagucuauauu

SEQ ID NO: 1641640 - RNA, 19 nt, Homo sapiens
  misc_RNA (1)...(19): siRNA sense strand
cagaagcuuuugaagguaa

SEQ ID NO: 1641641 - RNA, 19 nt, Homo sapiens
  misc_RNA (1)...(19): siRNA sense strand
ggccucaugguucaacuuu

SEQ ID NO: 1641642 - RNA, 19 nt, Homo sapiens
  misc_RNA (1)...(19): siRNA sense strand
cuauauuguugaagaaugg

SEQ ID NO: 1641643 - RNA, 19 nt, Homo sapiens
  misc_RNA (1)...(19): siRNA sense strand
agaguuugcugaugcugau

SEQ ID NO: 1641644 - RNA, 19 nt, Homo sapiens
  misc_RNA (1)...(19): siRNA sense strand
agaauccaguaucagauca

SEQ ID NO: 1641645 - RNA, 19 nt, Homo sapiens
  misc_RNA (1)...(19): siRNA sense strand
ugaagguaauuaagaaucc

SEQ ID NO: 1641646 - RNA, 19 nt, Homo sapiens
  misc_RNA (1)...(19): siRNA sense strand
uaagaauccaguaucagau

SEQ ID NO: 1641647 - RNA, 19 nt, Homo sapiens
  misc_RNA (1)...(19): siRNA sense strand
gagcuacucaacugugaca

SEQ ID NO: 1641648 - RNA, 19 nt, Homo sapiens
  misc_RNA (1)...(19): siRNA sense strand
uugcugaugcugauggaua

SEQ ID NO: 1641649 - RNA, 19 nt, Homo sapiens
  misc_RNA (1)...(19): siRNA sense strand
cuggcuugcuacagguuua

SEQ ID NO: 1641650 - RNA, 19 nt, Homo sapiens
  misc_RNA (1)...(19): siRNA sense strand
gaauucccagaaccuuuga

SEQ ID NO: 1641651 - RNA, 19 nt, Homo sapiens
  misc_RNA (1)...(19): siRNA sense strand
ccgaauucccagaaccuuu

SEQ ID NO: 1641652 - RNA, 19 nt, Homo sapiens
  misc_RNA (1)...(19): siRNA sense strand
ggaguauacagagaagaug

SEQ ID NO: 1641653 - RNA, 19 nt, Homo sapiens
  misc_RNA (1)...(19): siRNA sense strand
cacagccuuugaggaagua

SEQ ID NO: 1641654 - RNA, 19 nt, Homo sapiens
  misc_RNA (1)...(19): siRNA sense strand
gaauaaggcuuguaguaaa

SEQ ID NO: 1641655 - RNA, 19 nt, Homo sapiens
  misc_RNA (1)...(19): siRNA sense strand
cgaaauugauuccuuguua

SEQ ID NO: 1641656 - RNA, 19 nt, Homo sapiens
  misc_RNA (1)...(19): siRNA sense strand
gcacagauauuacgcauuc

SEQ ID NO: 1641657 - RNA, 19 nt, Homo sapiens
  misc_RNA (1)...(19): siRNA sense strand
gcaaccagcugugauauuu

SEQ ID NO: 1641658 - RNA, 19 nt, Homo sapiens
  misc_RNA (1)...(19): siRNA sense strand
gagcaugaaucuucuagaa

SEQ ID NO: 1641659 - RNA, 19 nt, Homo sapiens
  misc_RNA (1)...(19): siRNA sense strand
gaaucuggguugaauaauu

SEQ ID NO: 1641660 - RNA, 19 nt, Homo sapiens
  misc_RNA (1)...(19): siRNA sense strand
ggagagcaaucguuugaaa

SEQ ID NO: 1641661 - RNA, 19 nt, Homo sapiens
  misc_RNA (1)...(19): siRNA sense strand
gugaauggcagaagaauua

SEQ ID NO: 1641662 - RNA, 19 nt, Homo sapiens
  misc_RNA (1)...(19): siRNA sense strand
gcaauuacaucuggcauau

SEQ ID NO: 1641663 - RNA, 19 nt, Homo sapiens
  misc_RNA (1)...(19): siRNA sense strand
ugaaugagauuauggauca

SEQ ID NO: 1641664 - RNA, 19 nt, Homo sapiens
  misc_RNA (1)...(19): siRNA sense strand
gaaaguuuguuccuccuau

SEQ ID NO: 1641665 - RNA, 19 nt, Homo sapiens
  misc_RNA (1)...(19): siRNA sense strand
uaacucagcucaugaucga

SEQ ID NO: 1641666 - RNA, 19 nt, Homo sapiens
  misc_RNA (1)...(19): siRNA sense strand
caacaaaucggccacaaga

SEQ ID NO: 1641667 - RNA, 19 nt, Homo sapiens
  misc_RNA (1)...(19): siRNA sense strand
ucaauuagauggagcaaca

SEQ ID NO: 1641668 - RNA, 19 nt, Homo sapiens
  misc_RNA (1)...(19): siRNA sense strand
caaagacucucuguuggaa

SEQ ID NO: 1641669 - RNA, 19 nt, Homo sapiens
  misc_RNA (1)...(19): siRNA sense strand
caucucugcuucauccuua

SEQ ID NO: 1641670 - RNA, 19 nt, Homo sapiens
  misc_RNA (1)...(19): siRNA sense strand
ccaaagaugauugaacuua

SEQ ID NO: 1641671 - RNA, 19 nt, Homo sapiens
  misc_RNA (1)...(19): siRNA sense strand
ccaauccaauacugaauaa

SEQ ID NO: 1641672 - RNA, 19 nt, Homo sapiens
  misc_RNA (1)...(19): siRNA sense strand
ggaagauauugcaggagua

SEQ ID NO: 1641673 - RNA, 19 nt, Homo sapiens
  misc_RNA (1)...(19): siRNA sense strand
ggaucaaguucgacccaua

SEQ ID NO: 1641674 - RNA, 19 nt, Homo sapiens
  misc_RNA (1)...(19): siRNA sense strand
ggcaggaucucaacaaaca

SEQ ID NO: 1641675 - RNA, 19 nt, Homo sapiens
  misc_RNA (1)...(19): siRNA sense strand
caucagugguaauccauaa

SEQ ID NO: 1641676 - RNA, 19 nt, Homo sapiens
  misc_RNA (1)...(19): siRNA sense strand
gaacaauuauggguagauc

SEQ ID NO: 1641677 - RNA, 19 nt, Homo sapiens
  misc_RNA (1)...(19): siRNA sense strand
gaagaaauugaacagauug

SEQ ID NO: 1641678 - RNA, 19 nt, Homo sapiens
  misc_RNA (1)...(19): siRNA sense strand
ugacauugcuaccauaaca

SEQ ID NO: 1641679 - RNA, 19 nt, Homo sapiens
  misc_RNA (1)...(19): siRNA sense strand
ugaauaaggcuuguaguaa

SEQ ID NO: 1641680 - RNA, 19 nt, Homo sapiens
  misc_RNA (1)...(19): siRNA sense strand
agacaucuuuacugguuua

SEQ ID NO: 1641681 - RNA, 19 nt, Homo sapiens
  misc_RNA (1)...(19): siRNA sense strand
ccaguaaauugggaagaua

SEQ ID NO: 1641682 - RNA, 19 nt, Homo sapiens
  misc_RNA (1)...(19): siRNA sense strand
ggaaccugcucuugcauca

SEQ ID NO: 1641683 - RNA, 19 nt, Homo sapiens
  misc_RNA (1)...(19): siRNA sense strand
gaccuaguguuucuccaaa

SEQ ID NO: 1641684 - RNA, 19 nt, Homo sapiens
  misc_RNA (1)...(19): siRNA sense strand
gauauuacgcauucaguau

SEQ ID NO: 1641685 - RNA, 19 nt, Homo sapiens
  misc_RNA (1)...(19): siRNA sense strand
gcaacauucuuuagcaucu

SEQ ID NO: 1641686 - RNA, 19 nt, Homo sapiens
  misc_RNA (1)...(19): siRNA sense strand
uaucuaaccagucuuguuu

SEQ ID NO: 1641687 - RNA, 19 nt, Homo sapiens
  misc_RNA (1)...(19): siRNA sense strand
uaaggaggccacugucuuu

SEQ ID NO: 1641688 - RNA, 19 nt, Homo sapiens
  misc_RNA (1)...(19): siRNA sense strand
gcaucagggucuucauaug

SEQ ID NO: 1641689 - RNA, 19 nt, Homo sapiens
  misc_RNA (1)...(19): siRNA sense strand
acaaaucggccacaagaaa

SEQ ID NO: 1641690 - RNA, 19 nt, Homo sapiens
  misc_RNA (1)...(19): siRNA sense strand
gagcaacaacaucuucuga

SEQ ID NO: 1641691 - RNA, 19 nt, Homo sapiens
  misc_RNA (1)...(19): siRNA sense strand
ggaguagaauuugcuaaag

SEQ ID NO: 1641692 - RNA, 19 nt, Homo sapiens
  misc_RNA (1)...(19): siRNA sense strand
ggaggccacugucuuugau

SEQ ID NO: 1641693 - RNA, 19 nt, Homo sapiens
  misc_RNA (1)...(19): siRNA sense strand
gcagacaugacacagcuuu

SEQ ID NO: 1641694 - RNA, 19 nt, Homo sapiens
  misc_RNA (1)...(19): siRNA sense strand
aaaguuuguuccuccuaua

SEQ ID NO: 1641695 - RNA, 19 nt, Homo sapiens
  misc_RNA (1)...(19): siRNA sense strand
ggacuuaauguguucuuau

SEQ ID NO: 1641696 - RNA, 19 nt, Homo sapiens
  misc_RNA (1)...(19): siRNA sense strand
gaccgaaggcagaugcaua

SEQ ID NO: 1641697 - RNA, 19 nt, Homo sapiens
  misc_RNA (1)...(19): siRNA sense strand
gaaauugaacagauuguac

SEQ ID NO: 1641698 - RNA, 19 nt, Homo sapiens
  misc_RNA (1)...(19): siRNA sense strand
cagcugugauauuuauuga

SEQ ID NO: 1641699 - RNA, 19 nt, Homo sapiens
  misc_RNA (1)...(19): siRNA sense strand
aaacagauagugacaagug

SEQ ID NO: 1641700 - RNA, 19 nt, Homo sapiens
  misc_RNA (1)...(19): siRNA sense strand
acccauagcuuacauugau

SEQ ID NO: 1641701 - RNA, 19 nt, Homo sapiens
  misc_RNA (1)...(19): siRNA sense strand
ucacagcucugcaaaagaa

SEQ ID NO: 1641702 - RNA, 19 nt, Homo sapiens
  misc_RNA (1)...(19): siRNA sense strand
gcucuugcaucagugguaa

SEQ ID NO: 1641703 - RNA, 19 nt, Homo sapiens
  misc_RNA (1)...(19): siRNA sense strand
cauaacaccggaucaaguu

SEQ ID NO: 1641704 - RNA, 19 nt, Homo sapiens
  misc_RNA (1)...(19): siRNA sense strand
gaagaagaaauugaacaga

SEQ ID NO: 1641705 - RNA, 19 nt, Homo sapiens
  misc_RNA (1)...(19): siRNA sense strand
caaccagcugugauauuua

SEQ ID NO: 1641706 - RNA, 19 nt, Homo sapiens
  misc_RNA (1)...(19): siRNA sense strand
guucuuaucuaaccagucu

SEQ ID NO: 1641707 - RNA, 19 nt, Homo sapiens
  misc_RNA (1)...(19): siRNA sense strand
ccaggucugugcuaccaaa

SEQ ID NO: 1641708 - RNA, 19 nt, Homo sapiens
  misc_RNA (1)...(19): siRNA sense strand
gaucugugcaccugaguga

SEQ ID NO: 1641709 - RNA, 19 nt, Homo sapiens
  misc_RNA (1)...(19): siRNA sense strand
uuuacaaacugcugacauu

SEQ ID NO: 1641710 - RNA, 19 nt, Homo sapiens
  misc_RNA (1)...(19): siRNA sense strand
cagccugccuacauuuaaa

SEQ ID NO: 1641711 - RNA, 19 nt, Homo sapiens
  misc_RNA (1)...(19): siRNA sense strand
acaaacagauagugacaag

SEQ ID NO: 1641712 - RNA, 19 nt, Homo sapiens
  misc_RNA (1)...(19): siRNA sense strand
ucacaccauuguuuggaaa

SEQ ID NO: 1641713 - RNA, 19 nt, Homo sapiens
  misc_RNA (1)...(19): siRNA sense strand
gaaaacauaggacuuaaug

SEQ ID NO: 1641714 - RNA, 19 nt, Homo sapiens
  misc_RNA (1)...(19): siRNA sense strand
gacuuaauguguucuuauc

SEQ ID NO: 1641715 - RNA, 19 nt, Homo sapiens
  misc_RNA (1)...(19): siRNA sense strand
gaacugugcgaccuagugu

SEQ ID NO: 1641716 - RNA, 19 nt, Homo sapiens
  misc_RNA (1)...(19): siRNA sense strand
caaaucggccacaagaaau

SEQ ID NO: 1641717 - RNA, 19 nt, Homo sapiens
  misc_RNA (1)...(19): siRNA sense strand
gaaccagcacauccaguug

SEQ ID NO: 1641718 - RNA, 19 nt, Homo sapiens
  misc_RNA (1)...(19): siRNA sense strand
caacaaacagauagugaca

SEQ ID NO: 1641719 - RNA, 19 nt, Homo sapiens
  misc_RNA (1)...(19): siRNA sense strand
ccuauucgcaguuuacaaa

SEQ ID NO: 1641720 - RNA, 19 nt, Homo sapiens
  misc_RNA (1)...(19): siRNA sense strand
acagcagucugaugcguuu

SEQ ID NO: 1641721 - RNA, 19 nt, Homo sapiens
  misc_RNA (1)...(19): siRNA sense strand
gaagauaauggcccaaagg

SEQ ID NO: 1641722 - RNA, 19 nt, Homo sapiens
  misc_RNA (1)...(19): siRNA sense strand
cauaggacuuaauguguuc

SEQ ID NO: 1641723 - RNA, 19 nt, Homo sapiens
  misc_RNA (1)...(19): siRNA sense strand
gggcaaacucugagauuuc

SEQ ID NO: 1641724 - RNA, 19 nt, Homo sapiens
  misc_RNA (1)...(19): siRNA sense strand
aaccagcugugauauuuau

SEQ ID NO: 1641725 - RNA, 19 nt, Homo sapiens
  misc_RNA (1)...(19): siRNA sense strand
caccauaaaggaaauaguu

SEQ ID NO: 1641726 - RNA, 19 nt, Homo sapiens
  misc_RNA (1)...(19): siRNA sense strand
ggucugugcuaccaaacug

SEQ ID NO: 1641727 - RNA, 19 nt, Homo sapiens
  misc_RNA (1)...(19): siRNA sense strand
gccaggaaacagauaguaa

SEQ ID NO: 1641728 - RNA, 19 nt, Homo sapiens
  misc_RNA (1)...(19): siRNA sense strand
caucuuuacugguuuaagg

SEQ ID NO: 1641729 - RNA, 19 nt, Homo sapiens
  misc_RNA (1)...(19): siRNA sense strand
gaguagaauuugcuaaagc

SEQ ID NO: 1641730 - RNA, 19 nt, Homo sapiens
  misc_RNA (1)...(19): siRNA sense strand
cugaauaaggcuuguagua

SEQ ID NO: 1641731 - RNA, 19 nt, Homo sapiens
  misc_RNA (1)...(19): siRNA sense strand
gugcaucagggucuucaua

SEQ ID NO: 1641732 - RNA, 19 nt, Homo sapiens
  misc_RNA (1)...(19): siRNA sense strand
caggaaacagauaguaauu

SEQ ID NO: 1641733 - RNA, 19 nt, Homo sapiens
  misc_RNA (1)...(19): siRNA sense strand
gaagauauugcaggaguag

SEQ ID NO: 1641734 - RNA, 19 nt, Homo sapiens
  misc_RNA (1)...(19): siRNA sense strand
caaguucgacccauagcuu

SEQ ID NO: 1641735 - RNA, 19 nt, Homo sapiens
  misc_RNA (1)...(19): siRNA sense strand
cuucauccuuaacuucuaa

SEQ ID NO: 1641736 - RNA, 19 nt, Homo sapiens
  misc_RNA (1)...(19): siRNA sense strand
uuaccuaacucagcucaug

SEQ ID NO: 1641737 - RNA, 19 nt, Homo sapiens
  misc_RNA (1)...(19): siRNA sense strand
gaucaaguucgacccauag

SEQ ID NO: 1641738 - RNA, 19 nt, Homo sapiens
  misc_RNA (1)...(19): siRNA sense strand
gggcaacauucuuuagcau

SEQ ID NO: 1641739 - RNA, 19 nt, Homo sapiens
  misc_RNA (1)...(19): siRNA sense strand
guugaggccagacaucuuu

SEQ ID NO: 1641740 - RNA, 19 nt, Homo sapiens
  misc_RNA (1)...(19): siRNA sense strand
cuaaagccaccauaaagga

SEQ ID NO: 1641741 - RNA, 19 nt, Homo sapiens
  misc_RNA (1)...(19): siRNA sense strand
guuggaaccugcucuugca

SEQ ID NO: 1641742 - RNA, 19 nt, Homo sapiens
  misc_RNA (1)...(19): siRNA sense strand
cuaauuggcaagugcauug

SEQ ID NO: 1641743 - RNA, 19 nt, Homo sapiens
  misc_RNA (1)...(19): siRNA sense strand
gaaaaucacagcucugcaa

SEQ ID NO: 1641744 - RNA, 19 nt, Homo sapiens
  misc_RNA (1)...(19): siRNA sense strand
ccaugucacaccauuguuu

SEQ ID NO: 1641745 - RNA, 19 nt, Homo sapiens
  misc_RNA (1)...(19): siRNA sense strand
ugucuuugaucuuccuaaa

SEQ ID NO: 1641746 - RNA, 19 nt, Homo sapiens
  misc_RNA (1)...(19): siRNA sense strand
ucaaagacucucuguugga

SEQ ID NO: 1641747 - RNA, 19 nt, Homo sapiens
  misc_RNA (1)...(19): siRNA sense strand
ugggcaaacucugagauuu

SEQ ID NO: 1641748 - RNA, 19 nt, Homo sapiens
  misc_RNA (1)...(19): siRNA sense strand
ccaggaaacagauaguaau

SEQ ID NO: 1641749 - RNA, 19 nt, Homo sapiens
  misc_RNA (1)...(19): siRNA sense strand
gugcauugcuagucagucu

SEQ ID NO: 1641750 - RNA, 19 nt, Homo sapiens
  misc_RNA (1)...(19): siRNA sense strand
uaaagccaccauaaaggaa

SEQ ID NO: 1641751 - RNA, 19 nt, Homo sapiens
  misc_RNA (1)...(19): siRNA sense strand
guaaauugggaagauauug

SEQ ID NO: 1641752 - RNA, 19 nt, Homo sapiens
  misc_RNA (1)...(19): siRNA sense strand
auucaaagacucucuguug

SEQ ID NO: 1641753 - RNA, 19 nt, Homo sapiens
  misc_RNA (1)...(19): siRNA sense strand
cagggaggcuucucuuggu

SEQ ID NO: 1641754 - RNA, 19 nt, Homo sapiens
  misc_RNA (1)...(19): siRNA sense strand
gaaaggagaucacagagaa

SEQ ID NO: 1641755 - RNA, 19 nt, Homo sapiens
  misc_RNA (1)...(19): siRNA sense strand
gggaauagcuuaucuuguu

SEQ ID NO: 1641756 - RNA, 19 nt, Homo sapiens
  misc_RNA (1)...(19): siRNA sense strand
ucaaagcgcuacucgauua

SEQ ID NO: 1641757 - RNA, 19 nt, Homo sapiens
  misc_RNA (1)...(19): siRNA sense strand
caacucagcucgucaauca

SEQ ID NO: 1641758 - RNA, 19 nt, Homo sapiens
  misc_RNA (1)...(19): siRNA sense strand
ggaauagcuuaucuuguua

SEQ ID NO: 1641759 - RNA, 19 nt, Homo sapiens
  misc_RNA (1)...(19): siRNA sense strand
gaccaaggaucgaggagua

SEQ ID NO: 1641760 - RNA, 19 nt, Homo sapiens
  misc_RNA (1)...(19): siRNA sense strand
gaaagugauuacagacauu

SEQ ID NO: 1641761 - RNA, 19 nt, Homo sapiens
  misc_RNA (1)...(19): siRNA sense strand
gcaguuaucucagaauugu

SEQ ID NO: 1641762 - RNA, 19 nt, Homo sapiens
  misc_RNA (1)...(19): siRNA sense strand
aaagguacauccaucagua

SEQ ID NO: 1641763 - RNA, 19 nt, Homo sapiens
  misc_RNA (1)...(19): siRNA sense strand
gccauuacauuucuucaaa

SEQ ID NO: 1641764 - RNA, 19 nt, Homo sapiens
  misc_RNA (1)...(19): siRNA sense strand
gauucugucuuaucuguaa

SEQ ID NO: 1641765 - RNA, 19 nt, Homo sapiens
  misc_RNA (1)...(19): siRNA sense strand
acaaguaguucgagagaaa

SEQ ID NO: 1641766 - RNA, 19 nt, Homo sapiens
  misc_RNA (1)...(19): siRNA sense strand
cagagaaagugauuacaga

SEQ ID NO: 1641767 - RNA, 19 nt, Homo sapiens
  misc_RNA (1)...(19): siRNA sense strand
gaacguggaauacaaguag

SEQ ID NO: 1641768 - RNA, 19 nt, Homo sapiens
  misc_RNA (1)...(19): siRNA sense strand
gcaagcauuucuuaaaggu

SEQ ID NO: 1641769 - RNA, 19 nt, Homo sapiens
  misc_RNA (1)...(19): siRNA sense strand
gaugaacauuugcaacuca

SEQ ID NO: 1641770 - RNA, 19 nt, Homo sapiens
  misc_RNA (1)...(19): siRNA sense strand
cagcagcgauuacuagaca

SEQ ID NO: 1641771 - RNA, 19 nt, Homo sapiens
  misc_RNA (1)...(19): siRNA sense strand
ugucuuaucuguaacuaug

SEQ ID NO: 1641772 - RNA, 19 nt, Homo sapiens
  misc_RNA (1)...(19): siRNA sense strand
cagcaguuaucucagaauu

SEQ ID NO: 1641773 - RNA, 19 nt, Homo sapiens
  misc_RNA (1)...(19): siRNA sense strand
gaaggagacuuaagaaaag

SEQ ID NO: 1641774 - RNA, 19 nt, Homo sapiens
  misc_RNA (1)...(19): siRNA sense strand
agaagucuauuaucacaga

SEQ ID NO: 1641775 - RNA, 19 nt, Homo sapiens
  misc_RNA (1)...(19): siRNA sense strand
ggaaaggagaucacagaga

SEQ ID NO: 1641776 - RNA, 19 nt, Homo sapiens
  misc_RNA (1)...(19): siRNA sense strand
ggaugaagcagauucuaug

SEQ ID NO: 1641777 - RNA, 19 nt, Homo sapiens
  misc_RNA (1)...(19): siRNA sense strand
gaacauuugcaacucauca

SEQ ID NO: 1641778 - RNA, 19 nt, Homo sapiens
  misc_RNA (1)...(19): siRNA sense strand
caacagcagcgauuacuag

SEQ ID NO: 1641779 - RNA, 19 nt, Homo sapiens
  misc_RNA (1)...(19): siRNA sense strand
ggaaguagcggagagaaca

SEQ ID NO: 1641780 - RNA, 19 nt, Homo sapiens
  misc_RNA (1)...(19): siRNA sense strand
cuaugucagucgaauaauu

SEQ ID NO: 1641781 - RNA, 19 nt, Homo sapiens
  misc_RNA (1)...(19): siRNA sense strand
uagaagcuguggucaagga

SEQ ID NO: 1641782 - RNA, 19 nt, Homo sapiens
  misc_RNA (1)...(19): siRNA sense strand
ugaugaacguggaauacaa

SEQ ID NO: 1641783 - RNA, 19 nt, Homo sapiens
  misc_RNA (1)...(19): siRNA sense strand
gagggaauagcuuaucuug

SEQ ID NO: 1641784 - RNA, 19 nt, Homo sapiens
  misc_RNA (1)...(19): siRNA sense strand
gugaugagggaauagcuua

SEQ ID NO: 1641785 - RNA, 19 nt, Homo sapiens
  misc_RNA (1)...(19): siRNA sense strand
acagaagucuauuaucaca

SEQ ID NO: 1641786 - RNA, 19 nt, Homo sapiens
  misc_RNA (1)...(19): siRNA sense strand
gaugaagcagauucuauga

SEQ ID NO: 1641787 - RNA, 19 nt, Homo sapiens
  misc_RNA (1)...(19): siRNA sense strand
ugaguuaaaugcaucugau

SEQ ID NO: 1641788 - RNA, 19 nt, Homo sapiens
  misc_RNA (1)...(19): siRNA sense strand
guaacuaugucagucgaau

SEQ ID NO: 1641789 - RNA, 19 nt, Homo sapiens
  misc_RNA (1)...(19): siRNA sense strand
ucaacuccaugaugugguu

SEQ ID NO: 1641790 - RNA, 19 nt, Homo sapiens
  misc_RNA (1)...(19): siRNA sense strand
uacuagacauugccaagaa

SEQ ID NO: 1641791 - RNA, 19 nt, Homo sapiens
  misc_RNA (1)...(19): siRNA sense strand
uaacuaugucagucgaaua

SEQ ID NO: 1641792 - RNA, 19 nt, Homo sapiens
  misc_RNA (1)...(19): siRNA sense strand
gacguaccauggagaagga

SEQ ID NO: 1641793 - RNA, 19 nt, Homo sapiens
  misc_RNA (1)...(19): siRNA sense strand
ugacaaaugccuagcagau

SEQ ID NO: 1641794 - RNA, 19 nt, Homo sapiens
  misc_RNA (1)...(19): siRNA sense strand
ggagaucacagagaaagug

SEQ ID NO: 1641795 - RNA, 19 nt, Homo sapiens
  misc_RNA (1)...(19): siRNA sense strand
caacucaucagccuuugug

SEQ ID NO: 1641796 - RNA, 19 nt, Homo sapiens
  misc_RNA (1)...(19): siRNA sense strand
gaagucuauuaucacagaa

SEQ ID NO: 1641797 - RNA, 19 nt, Homo sapiens
  misc_RNA (1)...(19): siRNA sense strand
ugagaaaauugauggagua

SEQ ID NO: 1641798 - RNA, 19 nt, Homo sapiens
  misc_RNA (1)...(19): siRNA sense strand
agaaagugauuacagacau

SEQ ID NO: 1641799 - RNA, 19 nt, Homo sapiens
  misc_RNA (1)...(19): siRNA sense strand
cagaaggagacuuaagaaa

SEQ ID NO: 1641800 - RNA, 19 nt, Homo sapiens
  misc_RNA (1)...(19): siRNA sense strand
gagaaagugauuacagaca

SEQ ID NO: 1641801 - RNA, 19 nt, Homo sapiens
  misc_RNA (1)...(19): siRNA sense strand
ccgauucugucuuaucugu

SEQ ID NO: 1641802 - RNA, 19 nt, Homo sapiens
  misc_RNA (1)...(19): siRNA sense strand
caaaauguguggaugaagu

SEQ ID NO: 1641803 - RNA, 19 nt, Homo sapiens
  misc_RNA (1)...(19): siRNA sense strand
agauugugauucuggauga

SEQ ID NO: 1641804 - RNA, 19 nt, Homo sapiens
  misc_RNA (1)...(19): siRNA sense strand
gcucgucaaucaacuccau

SEQ ID NO: 1641805 - RNA, 19 nt, Homo sapiens
  misc_RNA (1)...(19): siRNA sense strand
gaaaaccacccgauucugu

SEQ ID NO: 1641806 - RNA, 19 nt, Homo sapiens
  misc_RNA (1)...(19): siRNA sense strand
guaguucgagagaaaguga

SEQ ID NO: 1641807 - RNA, 19 nt, Homo sapiens
  misc_RNA (1)...(19): siRNA sense strand
gcagcgauuacuagacauu

SEQ ID NO: 1641808 - RNA, 19 nt, Homo sapiens
  misc_RNA (1)...(19): siRNA sense strand
ggccugaacuuuuccgauu

SEQ ID NO: 1641809 - RNA, 19 nt, Homo sapiens
  misc_RNA (1)...(19): siRNA sense strand
gacaaaugccuagcagaug

SEQ ID NO: 1641810 - RNA, 19 nt, Homo sapiens
  misc_RNA (1)...(19): siRNA sense strand
guggaaaggagaucacaga

SEQ ID NO: 1641811 - RNA, 19 nt, Homo sapiens
  misc_RNA (1)...(19): siRNA sense strand
ucagaaggagacuuaagaa

SEQ ID NO: 1641812 - RNA, 19 nt, Homo sapiens
  misc_RNA (1)...(19): siRNA sense strand
gaaguagcggagagaacaa

SEQ ID NO: 1641813 - RNA, 19 nt, Homo sapiens
  misc_RNA (1)...(19): siRNA sense strand
uaugucagucgaauaauug

SEQ ID NO: 1641814 - RNA, 19 nt, Homo sapiens
  misc_RNA (1)...(19): siRNA sense strand
guucuugaguuaaaugcau

SEQ ID NO: 1641815 - RNA, 19 nt, Homo sapiens
  misc_RNA (1)...(19): siRNA sense strand
ggcagcagcuagagaacuc

SEQ ID NO: 1641816 - RNA, 19 nt, Homo sapiens
  misc_RNA (1)...(19): siRNA sense strand
caaagcgcuacucgauuaa

SEQ ID NO: 1641817 - RNA, 19 nt, Homo sapiens
  misc_RNA (1)...(19): siRNA sense strand
gucagaaggagacuuaaga

SEQ ID NO: 1641818 - RNA, 19 nt, Homo sapiens
  misc_RNA (1)...(19): siRNA sense strand
ggaagccguguccgccuuu

SEQ ID NO: 1641819 - RNA, 19 nt, Homo sapiens
  misc_RNA (1)...(19): siRNA sense strand
cugauaaacagaagucuau

SEQ ID NO: 1641820 - RNA, 19 nt, Homo sapiens
  misc_RNA (1)...(19): siRNA sense strand
aauuagugaugagggaaua

SEQ ID NO: 1641821 - RNA, 19 nt, Homo sapiens
  misc_RNA (1)...(19): siRNA sense strand
uaagacguaccauggagaa

SEQ ID NO: 1641822 - RNA, 19 nt, Homo sapiens
  misc_RNA (1)...(19): siRNA sense strand
uagcggagagaacaagaaa

SEQ ID NO: 1641823 - RNA, 19 nt, Homo sapiens
  misc_RNA (1)...(19): siRNA sense strand
acuagaagcuguggucaag

SEQ ID NO: 1641824 - RNA, 19 nt, Homo sapiens
  misc_RNA (1)...(19): siRNA sense strand
caggcagcuuuaagacgua

SEQ ID NO: 1641825 - RNA, 19 nt, Homo sapiens
  misc_RNA (1)...(19): siRNA sense strand
gucaggaagucgcucagau

SEQ ID NO: 1641826 - RNA, 19 nt, Homo sapiens
  misc_RNA (1)...(19): siRNA sense strand
uugccgaaguugacaaaug

SEQ ID NO: 1641827 - RNA, 19 nt, Homo sapiens
  misc_RNA (1)...(19): siRNA sense strand
agaaggagacuuaagaaaa

SEQ ID NO: 1641828 - RNA, 19 nt, Homo sapiens
  misc_RNA (1)...(19): siRNA sense strand
ucaggaagucgcucagaug

SEQ ID NO: 1641829 - RNA, 19 nt, Homo sapiens
  misc_RNA (1)...(19): siRNA sense strand
accacccgauucugucuua

SEQ ID NO: 1641830 - RNA, 19 nt, Homo sapiens
  misc_RNA (1)...(19): siRNA sense strand
uccaugaugugguuguaga

SEQ ID NO: 1641831 - RNA, 19 nt, Homo sapiens
  misc_RNA (1)...(19): siRNA sense strand
cuucaaagcgcuacucgau

SEQ ID NO: 1641832 - RNA, 19 nt, Homo sapiens
  misc_RNA (1)...(19): siRNA sense strand
ccauuacauuucuucaaag

SEQ ID NO: 1641833 - RNA, 19 nt, Homo sapiens
  misc_RNA (1)...(19): siRNA sense strand
gacauugccaagaaggaaa

SEQ ID NO: 1641834 - RNA, 19 nt, Homo sapiens
  misc_RNA (1)...(19): siRNA sense strand
gaugaacguggaauacaag

SEQ ID NO: 1641835 - RNA, 19 nt, Homo sapiens
  misc_RNA (1)...(19): siRNA sense strand
ccauggagaaggagucgaa

SEQ ID NO: 1641836 - RNA, 19 nt, Homo sapiens
  misc_RNA (1)...(19): siRNA sense strand
caauuaacugugucaggaa

SEQ ID NO: 1641837 - RNA, 19 nt, Homo sapiens
  misc_RNA (1)...(19): siRNA sense strand
gauugugauucuggaugaa

SEQ ID NO: 1641838 - RNA, 19 nt, Homo sapiens
  misc_RNA (1)...(19): siRNA sense strand
augcagcaguuaucucaga

SEQ ID NO: 1641839 - RNA, 19 nt, Homo sapiens
  misc_RNA (1)...(19): siRNA sense strand
caucagccuuugugcaacu

SEQ ID NO: 1641840 - RNA, 19 nt, Homo sapiens
  misc_RNA (1)...(19): siRNA sense strand
caagcauuucuuaaaggua

SEQ ID NO: 1641841 - RNA, 19 nt, Homo sapiens
  misc_RNA (1)...(19): siRNA sense strand
gaacuuuuccgauuaagag

SEQ ID NO: 1641842 - RNA, 19 nt, Homo sapiens
  misc_RNA (1)...(19): siRNA sense strand
ugaugcagcaguuaucuca

SEQ ID NO: 1641843 - RNA, 19 nt, Homo sapiens
  misc_RNA (1)...(19): siRNA sense strand
agauggugcugaugaacau

SEQ ID NO: 1641844 - RNA, 19 nt, Homo sapiens
  misc_RNA (1)...(19): siRNA sense strand
agugucagaaggagacuua

SEQ ID NO: 1641845 - RNA, 19 nt, Homo sapiens
  misc_RNA (1)...(19): siRNA sense strand
ucaacagcagcgauuacua

SEQ ID NO: 1641846 - RNA, 19 nt, Homo sapiens
  misc_RNA (1)...(19): siRNA sense strand
aacuaugucagucgaauaa

SEQ ID NO: 1641847 - RNA, 19 nt, Homo sapiens
  misc_RNA (1)...(19): siRNA sense strand
gagaaggagucgaaaacca

SEQ ID NO: 1641848 - RNA, 19 nt, Homo sapiens
  misc_RNA (1)...(19): siRNA sense strand
uaaagguacauccaucagu

SEQ ID NO: 1641849 - RNA, 19 nt, Homo sapiens
  misc_RNA (1)...(19): siRNA sense strand
gcggagagaacaagaaagc

SEQ ID NO: 1641850 - RNA, 19 nt, Homo sapiens
  misc_RNA (1)...(19): siRNA sense strand
ggagcagaucuuccuaauc

SEQ ID NO: 1641851 - RNA, 19 nt, Homo sapiens
  misc_RNA (1)...(19): siRNA sense strand
gaugagggaauagcuuauc

SEQ ID NO: 1641852 - RNA, 19 nt, Homo sapiens
  misc_RNA (1)...(19): siRNA sense strand
gccugaacuuuuccgauua

SEQ ID NO: 1641853 - RNA, 19 nt, Homo sapiens
  misc_RNA (1)...(19): siRNA sense strand
aagcgcuacucgauuaaca

SEQ ID NO: 1641854 - RNA, 19 nt, Homo sapiens
  misc_RNA (1)...(19): siRNA sense strand
gaaaggagaucacagagaa

SEQ ID NO: 1641855 - RNA, 19 nt, Homo sapiens
  misc_RNA (1)...(19): siRNA sense strand
gggaauagcuuaucuuguu

SEQ ID NO: 1641856 - RNA, 19 nt, Homo sapiens
  misc_RNA (1)...(19): siRNA sense strand
ucaaagcgcuacucgauua

SEQ ID NO: 1641857 - RNA, 19 nt, Homo sapiens
  misc_RNA (1)...(19): siRNA sense strand
caacucagcucgucaauca

SEQ ID NO: 1641858 - RNA, 19 nt, Homo sapiens
  misc_RNA (1)...(19): siRNA sense strand
ggaauagcuuaucuuguua

SEQ ID NO: 1641859 - RNA, 19 nt, Homo sapiens
  misc_RNA (1)...(19): siRNA sense strand
gaccaaggaucgaggagua

SEQ ID NO: 1641860 - RNA, 19 nt, Homo sapiens
  misc_RNA (1)...(19): siRNA sense strand
gaaagugauuacagacauu

SEQ ID NO: 1641861 - RNA, 19 nt, Homo sapiens
  misc_RNA (1)...(19): siRNA sense strand
gcaguuaucucagaauugu

SEQ ID NO: 1641862 - RNA, 19 nt, Homo sapiens
  misc_RNA (1)...(19): siRNA sense strand
aaagguacauccaucagua

SEQ ID NO: 1641863 - RNA, 19 nt, Homo sapiens
  misc_RNA (1)...(19): siRNA sense strand
gccauuacauuucuucaaa

SEQ ID NO: 1641864 - RNA, 19 nt, Homo sapiens
  misc_RNA (1)...(19): siRNA sense strand
gauucugucuuaucuguaa

SEQ ID NO: 1641865 - RNA, 19 nt, Homo sapiens
  misc_RNA (1)...(19): siRNA sense strand
acaaguaguucgagagaaa

SEQ ID NO: 1641866 - RNA, 19 nt, Homo sapiens
  misc_RNA (1)...(19): siRNA sense strand
cagagaaagugauuacaga

SEQ ID NO: 1641867 - RNA, 19 nt, Homo sapiens
  misc_RNA (1)...(19): siRNA sense strand
gaacguggaauacaaguag

SEQ ID NO: 1641868 - RNA, 19 nt, Homo sapiens
  misc_RNA (1)...(19): siRNA sense strand
gcaagcauuucuuaaaggu

SEQ ID NO: 1641869 - RNA, 19 nt, Homo sapiens
  misc_RNA (1)...(19): siRNA sense strand
gaugaacauuugcaacuca

SEQ ID NO: 1641870 - RNA, 19 nt, Homo sapiens
  misc_RNA (1)...(19): siRNA sense strand
cagcagcgauuacuagaca

SEQ ID NO: 1641871 - RNA, 19 nt, Homo sapiens
  misc_RNA (1)...(19): siRNA sense strand
ugucuuaucuguaacuaug

SEQ ID NO: 1641872 - RNA, 19 nt, Homo sapiens
  misc_RNA (1)...(19): siRNA sense strand
cagcaguuaucucagaauu

SEQ ID NO: 1641873 - RNA, 19 nt, Homo sapiens
  misc_RNA (1)...(19): siRNA sense strand
gaaggagacuuaagaaaag

SEQ ID NO: 1641874 - RNA, 19 nt, Homo sapiens
  misc_RNA (1)...(19): siRNA sense strand
agaagucuauuaucacaga

SEQ ID NO: 1641875 - RNA, 19 nt, Homo sapiens
  misc_RNA (1)...(19): siRNA sense strand
ggaaaggagaucacagaga

SEQ ID NO: 1641876 - RNA, 19 nt, Homo sapiens
  misc_RNA (1)...(19): siRNA sense strand
ggaugaagcagauucuaug

SEQ ID NO: 1641877 - RNA, 19 nt, Homo sapiens
  misc_RNA (1)...(19): siRNA sense strand
gaacauuugcaacucauca

SEQ ID NO: 1641878 - RNA, 19 nt, Homo sapiens
  misc_RNA (1)...(19): siRNA sense strand
caacagcagcgauuacuag

SEQ ID NO: 1641879 - RNA, 19 nt, Homo sapiens
  misc_RNA (1)...(19): siRNA sense strand
ggaaguagcggagagaaca

SEQ ID NO: 1641880 - RNA, 19 nt, Homo sapiens
  misc_RNA (1)...(19): siRNA sense strand
cuaugucagucgaauaauu

SEQ ID NO: 1641881 - RNA, 19 nt, Homo sapiens
  misc_RNA (1)...(19): siRNA sense strand
uagaagcuguggucaagga

SEQ ID NO: 1641882 - RNA, 19 nt, Homo sapiens
  misc_RNA (1)...(19): siRNA sense strand
ugaugaacguggaauacaa

SEQ ID NO: 1641883 - RNA, 19 nt, Homo sapiens
  misc_RNA (1)...(19): siRNA sense strand
gagggaauagcuuaucuug

SEQ ID NO: 1641884 - RNA, 19 nt, Homo sapiens
  misc_RNA (1)...(19): siRNA sense strand
gugaugagggaauagcuua

SEQ ID NO: 1641885 - RNA, 19 nt, Homo sapiens
  misc_RNA (1)...(19): siRNA sense strand
acagaagucuauuaucaca

SEQ ID NO: 1641886 - RNA, 19 nt, Homo sapiens
  misc_RNA (1)...(19): siRNA sense strand
gaugaagcagauucuauga

SEQ ID NO: 1641887 - RNA, 19 nt, Homo sapiens
  misc_RNA (1)...(19): siRNA sense strand
ugaguuaaaugcaucugau

SEQ ID NO: 1641888 - RNA, 19 nt, Homo sapiens
  misc_RNA (1)...(19): siRNA sense strand
guaacuaugucagucgaau

SEQ ID NO: 1641889 - RNA, 19 nt, Homo sapiens
  misc_RNA (1)...(19): siRNA sense strand
ucaacuccaugaugugguu

SEQ ID NO: 1641890 - RNA, 19 nt, Homo sapiens
  misc_RNA (1)...(19): siRNA sense strand
uacuagacauugccaagaa

SEQ ID NO: 1641891 - RNA, 19 nt, Homo sapiens
  misc_RNA (1)...(19): siRNA sense strand
uaacuaugucagucgaaua

SEQ ID NO: 1641892 - RNA, 19 nt, Homo sapiens
  misc_RNA (1)...(19): siRNA sense strand
gacguaccauggagaagga

SEQ ID NO: 1641893 - RNA, 19 nt, Homo sapiens
  misc_RNA (1)...(19): siRNA sense strand
ugacaaaugccuagcagau

SEQ ID NO: 1641894 - RNA, 19 nt, Homo sapiens
  misc_RNA (1)...(19): siRNA sense strand
ggagaucacagagaaagug

SEQ ID NO: 1641895 - RNA, 19 nt, Homo sapiens
  misc_RNA (1)...(19): siRNA sense strand
caacucaucagccuuugug

SEQ ID NO: 1641896 - RNA, 19 nt, Homo sapiens
  misc_RNA (1)...(19): siRNA sense strand
gaagucuauuaucacagaa

SEQ ID NO: 1641897 - RNA, 19 nt, Homo sapiens
  misc_RNA (1)...(19): siRNA sense strand
ugagaaaauugauggagua

SEQ ID NO: 1641898 - RNA, 19 nt, Homo sapiens
  misc_RNA (1)...(19): siRNA sense strand
agaaagugauuacagacau

SEQ ID NO: 1641899 - RNA, 19 nt, Homo sapiens
  misc_RNA (1)...(19): siRNA sense strand
cagaaggagacuuaagaaa

SEQ ID NO: 1641900 - RNA, 19 nt, Homo sapiens
  misc_RNA (1)...(19): siRNA sense strand
gagaaagugauuacagaca

SEQ ID NO: 1641901 - RNA, 19 nt, Homo sapiens
  misc_RNA (1)...(19): siRNA sense strand
ccgauucugucuuaucugu

SEQ ID NO: 1641902 - RNA, 19 nt, Homo sapiens
  misc_RNA (1)...(19): siRNA sense strand
caaaauguguggaugaagu

SEQ ID NO: 1641903 - RNA, 19 nt, Homo sapiens
  misc_RNA (1)...(19): siRNA sense strand
agauugugauucuggauga

SEQ ID NO: 1641904 - RNA, 19 nt, Homo sapiens
  misc_RNA (1)...(19): siRNA sense strand
gcucgucaaucaacuccau

SEQ ID NO: 1641905 - RNA, 19 nt, Homo sapiens
  misc_RNA (1)...(19): siRNA sense strand
gaaaaccacccgauucugu

SEQ ID NO: 1641906 - RNA, 19 nt, Homo sapiens
  misc_RNA (1)...(19): siRNA sense strand
guaguucgagagaaaguga

SEQ ID NO: 1641907 - RNA, 19 nt, Homo sapiens
  misc_RNA (1)...(19): siRNA sense strand
gcagcgauuacuagacauu

SEQ ID NO: 1641908 - RNA, 19 nt, Homo sapiens
  misc_RNA (1)...(19): siRNA sense strand
ggccugaacuuuuccgauu

SEQ ID NO: 1641909 - RNA, 19 nt, Homo sapiens
  misc_RNA (1)...(19): siRNA sense strand
gacaaaugccuagcagaug

SEQ ID NO: 1641910 - RNA, 19 nt, Homo sapiens
  misc_RNA (1)...(19): siRNA sense strand
guggaaaggagaucacaga

SEQ ID NO: 1641911 - RNA, 19 nt, Homo sapiens
  misc_RNA (1)...(19): siRNA sense strand
ucagaaggagacuuaagaa

SEQ ID NO: 1641912 - RNA, 19 nt, Homo sapiens
  misc_RNA (1)...(19): siRNA sense strand
gaaguagcggagagaacaa

SEQ ID NO: 1641913 - RNA, 19 nt, Homo sapiens
  misc_RNA (1)...(19): siRNA sense strand
uaugucagucgaauaauug

SEQ ID NO: 1641914 - RNA, 19 nt, Homo sapiens
  misc_RNA (1)...(19): siRNA sense strand
guucuugaguuaaaugcau

SEQ ID NO: 1641915 - RNA, 19 nt, Homo sapiens
  misc_RNA (1)...(19): siRNA sense strand
ggcagcagcuagagaacuc

SEQ ID NO: 1641916 - RNA, 19 nt, Homo sapiens
  misc_RNA (1)...(19): siRNA sense strand
caaagcgcuacucgauuaa

SEQ ID NO: 1641917 - RNA, 19 nt, Homo sapiens
  misc_RNA (1)...(19): siRNA sense strand
gucagaaggagacuuaaga

SEQ ID NO: 1641918 - RNA, 19 nt, Homo sapiens
  misc_RNA (1)...(19): siRNA sense strand
ggaagccguguccgccuuu

SEQ ID NO: 1641919 - RNA, 19 nt, Homo sapiens
  misc_RNA (1)...(19): siRNA sense strand
cugauaaacagaagucuau

SEQ ID NO: 1641920 - RNA, 19 nt, Homo sapiens
  misc_RNA (1)...(19): siRNA sense strand
aauuagugaugagggaaua

SEQ ID NO: 1641921 - RNA, 19 nt, Homo sapiens
  misc_RNA (1)...(19): siRNA sense strand
uaagacguaccauggagaa

SEQ ID NO: 1641922 - RNA, 19 nt, Homo sapiens
  misc_RNA (1)...(19): siRNA sense strand
uagcggagagaacaagaaa

SEQ ID NO: 1641923 - RNA, 19 nt, Homo sapiens
  misc_RNA (1)...(19): siRNA sense strand
acuagaagcuguggucaag

SEQ ID NO: 1641924 - RNA, 19 nt, Homo sapiens
  misc_RNA (1)...(19): siRNA sense strand
caggcagcuuuaagacgua

SEQ ID NO: 1641925 - RNA, 19 nt, Homo sapiens
  misc_RNA (1)...(19): siRNA sense strand
gucaggaagucgcucagau

SEQ ID NO: 1641926 - RNA, 19 nt, Homo sapiens
  misc_RNA (1)...(19): siRNA sense strand
uugccgaaguugacaaaug

SEQ ID NO: 1641927 - RNA, 19 nt, Homo sapiens
  misc_RNA (1)...(19): siRNA sense strand
agaaggagacuuaagaaaa

SEQ ID NO: 1641928 - RNA, 19 nt, Homo sapiens
  misc_RNA (1)...(19): siRNA sense strand
ucaggaagucgcucagaug

SEQ ID NO: 1641929 - RNA, 19 nt, Homo sapiens
  misc_RNA (1)...(19): siRNA sense strand
accacccgauucugucuua

SEQ ID NO: 1641930 - RNA, 19 nt, Homo sapiens
  misc_RNA (1)...(19): siRNA sense strand
uccaugaugugguuguaga

SEQ ID NO: 1641931 - RNA, 19 nt, Homo sapiens
  misc_RNA (1)...(19): siRNA sense strand
cuucaaagcgcuacucgau

SEQ ID NO: 1641932 - RNA, 19 nt, Homo sapiens
  misc_RNA (1)...(19): siRNA sense strand
ccauuacauuucuucaaag

SEQ ID NO: 1641933 - RNA, 19 nt, Homo sapiens
  misc_RNA (1)...(19): siRNA sense strand
gacauugccaagaaggaaa

SEQ ID NO: 1641934 - RNA, 19 nt, Homo sapiens
  misc_RNA (1)...(19): siRNA sense strand
gaugaacguggaauacaag

SEQ ID NO: 1641935 - RNA, 19 nt, Homo sapiens
  misc_RNA (1)...(19): siRNA sense strand
ccauggagaaggagucgaa

SEQ ID NO: 1641936 - RNA, 19 nt, Homo sapiens
  misc_RNA (1)...(19): siRNA sense strand
caauuaacugugucaggaa

SEQ ID NO: 1641937 - RNA, 19 nt, Homo sapiens
  misc_RNA (1)...(19): siRNA sense strand
gauugugauucuggaugaa

SEQ ID NO: 1641938 - RNA, 19 nt, Homo sapiens
  misc_RNA (1)...(19): siRNA sense strand
augcagcaguuaucucaga

SEQ ID NO: 1641939 - RNA, 19 nt, Homo sapiens
  misc_RNA (1)...(19): siRNA sense strand
caucagccuuugugcaacu

SEQ ID NO: 1641940 - RNA, 19 nt, Homo sapiens
  misc_RNA (1)...(19): siRNA sense strand
caagcauuucuuaaaggua

SEQ ID NO: 1641941 - RNA, 19 nt, Homo sapiens
  misc_RNA (1)...(19): siRNA sense strand
gaacuuuuccgauuaagag

SEQ ID NO: 1641942 - RNA, 19 nt, Homo sapiens
  misc_RNA (1)...(19): siRNA sense strand
ugaugcagcaguuaucuca

SEQ ID NO: 1641943 - RNA, 19 nt, Homo sapiens
  misc_RNA (1)...(19): siRNA sense strand
agauggugcugaugaacau

SEQ ID NO: 1641944 - RNA, 19 nt, Homo sapiens
  misc_RNA (1)...(19): siRNA sense strand
agugucagaaggagacuua

SEQ ID NO: 1641945 - RNA, 19 nt, Homo sapiens
  misc_RNA (1)...(19): siRNA sense strand
ucaacagcagcgauuacua

SEQ ID NO: 1641946 - RNA, 19 nt, Homo sapiens
  misc_RNA (1)...(19): siRNA sense strand
aacuaugucagucgaauaa

SEQ ID NO: 1641947 - RNA, 19 nt, Homo sapiens
  misc_RNA (1)...(19): siRNA sense strand
gagaaggagucgaaaacca

SEQ ID NO: 1641948 - RNA, 19 nt, Homo sapiens
  misc_RNA (1)...(19): siRNA sense strand
uaaagguacauccaucagu

SEQ ID NO: 1641949 - RNA, 19 nt, Homo sapiens
  misc_RNA (1)...(19): siRNA sense strand
gcggagagaacaagaaagc

SEQ ID NO: 1641950 - RNA, 19 nt, Homo sapiens
  misc_RNA (1)...(19): siRNA sense strand
ggagcagaucuuccuaauc

SEQ ID NO: 1641951 - RNA, 19 nt, Homo sapiens
  misc_RNA (1)...(19): siRNA sense strand
gaugagggaauagcuuauc

SEQ ID NO: 1641952 - RNA, 19 nt, Homo sapiens
  misc_RNA (1)...(19): siRNA sense strand
gccugaacuuuuccgauua

SEQ ID NO: 1641953 - RNA, 19 nt, Homo sapiens
  misc_RNA (1)...(19): siRNA sense strand
aagcgcuacucgauuaaca

SEQ ID NO: 1641954 - RNA, 19 nt, Homo sapiens
  misc_RNA (1)...(19): siRNA sense strand
gagcaccgcuuccacauga

SEQ ID NO: 1641955 - RNA, 19 nt, Homo sapiens
  misc_RNA (1)...(19): siRNA sense strand
caagacaugucccaaguuu

SEQ ID NO: 1641956 - RNA, 19 nt, Homo sapiens
  misc_RNA (1)...(19): siRNA sense strand
gaagaccugugcaagauag

SEQ ID NO: 1641957 - RNA, 19 nt, Homo sapiens
  misc_RNA (1)...(19): siRNA sense strand
gggagcagaugaaggugua

SEQ ID NO: 1641958 - RNA, 19 nt, Homo sapiens
  misc_RNA (1)...(19): siRNA sense strand
ggccaguaauguuaaagua

SEQ ID NO: 1641959 - RNA, 19 nt, Homo sapiens
  misc_RNA (1)...(19): siRNA sense strand
ccaguaauguuaaaguaga

SEQ ID NO: 1641960 - RNA, 19 nt, Homo sapiens
  misc_RNA (1)...(19): siRNA sense strand
gcagaagaccugugcaaga

SEQ ID NO: 1641961 - RNA, 19 nt, Homo sapiens
  misc_RNA (1)...(19): siRNA sense strand
caagauaggaucagagaga

SEQ ID NO: 1641962 - RNA, 19 nt, Homo sapiens
  misc_RNA (1)...(19): siRNA sense strand
gcaacgggcugucgcucaa

SEQ ID NO: 1641963 - RNA, 19 nt, Homo sapiens
  misc_RNA (1)...(19): siRNA sense strand
gggcgugccugugaaauga

SEQ ID NO: 1641964 - RNA, 19 nt, Homo sapiens
  misc_RNA (1)...(19): siRNA sense strand
cagaagaccugugcaagau

SEQ ID NO: 1641965 - RNA, 19 nt, Homo sapiens
  misc_RNA (1)...(19): siRNA sense strand
gcucuaugccucagaaauu

SEQ ID NO: 1641966 - RNA, 19 nt, Homo sapiens
  misc_RNA (1)...(19): siRNA sense strand
ccaaugugcucaugguuca

SEQ ID NO: 1641967 - RNA, 19 nt, Homo sapiens
  misc_RNA (1)...(19): siRNA sense strand
gaaggagaacgaaaugaug

SEQ ID NO: 1641968 - RNA, 19 nt, Homo sapiens
  misc_RNA (1)...(19): siRNA sense strand
ggaagaaugugcggaggau

SEQ ID NO: 1641969 - RNA, 19 nt, Homo sapiens
  misc_RNA (1)...(19): siRNA sense strand
agaagaaacuaaucacagu

SEQ ID NO: 1641970 - RNA, 19 nt, Homo sapiens
  misc_RNA (1)...(19): siRNA sense strand
caacaacgccaucaacuac

SEQ ID NO: 1641971 - RNA, 19 nt, Homo sapiens
  misc_RNA (1)...(19): siRNA sense strand
caaggcagcucggcuuugu

SEQ ID NO: 1641972 - RNA, 19 nt, Homo sapiens
  misc_RNA (1)...(19): siRNA sense strand
ugguaaaccucacaaaugu

SEQ ID NO: 1641973 - RNA, 19 nt, Homo sapiens
  misc_RNA (1)...(19): siRNA sense strand
gcgcagcggucucaucuac

SEQ ID NO: 1641974 - RNA, 19 nt, Homo sapiens
  misc_RNA (1)...(19): siRNA sense strand
gaugaagucccacgugaug

SEQ ID NO: 1641975 - RNA, 19 nt, Homo sapiens
  misc_RNA (1)...(19): siRNA sense strand
ggacagcaaagcuccaaga

SEQ ID NO: 1641976 - RNA, 19 nt, Homo sapiens
  misc_RNA (1)...(19): siRNA sense strand
acagugaaauggcagaaga

SEQ ID NO: 1641977 - RNA, 19 nt, Homo sapiens
  misc_RNA (1)...(19): siRNA sense strand
aaagagcgcugccacaacu

SEQ ID NO: 1641978 - RNA, 19 nt, Homo sapiens
  misc_RNA (1)...(19): siRNA sense strand
gaaugggcgugccugugaa

SEQ ID NO: 1641979 - RNA, 19 nt, Homo sapiens
  misc_RNA (1)...(19): siRNA sense strand
ucagagugaugaagagaau

SEQ ID NO: 1641980 - RNA, 19 nt, Homo sapiens
  misc_RNA (1)...(19): siRNA sense strand
agaugaagguguacaagug

SEQ ID NO: 1641981 - RNA, 19 nt, Homo sapiens
  misc_RNA (1)...(19): siRNA sense strand
ggacgcacuccguugguaa

SEQ ID NO: 1641982 - RNA, 19 nt, Homo sapiens
  misc_RNA (1)...(19): siRNA sense strand
caaguaacgucgccaaacg

SEQ ID NO: 1641983 - RNA, 19 nt, Homo sapiens
  misc_RNA (1)...(19): siRNA sense strand
agacaugucccaaguuuca

SEQ ID NO: 1641984 - RNA, 19 nt, Homo sapiens
  misc_RNA (1)...(19): siRNA sense strand
ucaacaacgccaucaacua

SEQ ID NO: 1641985 - RNA, 19 nt, Homo sapiens
  misc_RNA (1)...(19): siRNA sense strand
acagagucguggccaguaa

SEQ ID NO: 1641986 - RNA, 19 nt, Homo sapiens
  misc_RNA (1)...(19): siRNA sense strand
ggaccaagccaucaacaac

SEQ ID NO: 1641987 - RNA, 19 nt, Homo sapiens
  misc_RNA (1)...(19): siRNA sense strand
agaacgaaaugaugaaguc

SEQ ID NO: 1641988 - RNA, 19 nt, Homo sapiens
  misc_RNA (1)...(19): siRNA sense strand
gcucaugguucacaaaaga

SEQ ID NO: 1641989 - RNA, 19 nt, Homo sapiens
  misc_RNA (1)...(19): siRNA sense strand
uaagcgauacuccagauga

SEQ ID NO: 1641990 - RNA, 19 nt, Homo sapiens
  misc_RNA (1)...(19): siRNA sense strand
ugaugagggucaagacaug

SEQ ID NO: 1641991 - RNA, 19 nt, Homo sapiens
  misc_RNA (1)...(19): siRNA sense strand
gucaagacaugucccaagu

SEQ ID NO: 1641992 - RNA, 19 nt, Homo sapiens
  misc_RNA (1)...(19): siRNA sense strand
acuaaagugugauaucugu

SEQ ID NO: 1641993 - RNA, 19 nt, Homo sapiens
  misc_RNA (1)...(19): siRNA sense strand
uggacagacuagcaaguaa

SEQ ID NO: 1641994 - RNA, 19 nt, Homo sapiens
  misc_RNA (1)...(19): siRNA sense strand
aaacagcgaagcucuuuag

SEQ ID NO: 1641995 - RNA, 19 nt, Homo sapiens
  misc_RNA (1)...(19): siRNA sense strand
agaaugggcgugccuguga

SEQ ID NO: 1641996 - RNA, 19 nt, Homo sapiens
  misc_RNA (1)...(19): siRNA sense strand
aagaaugugcggaggauuu

SEQ ID NO: 1641997 - RNA, 19 nt, Homo sapiens
  misc_RNA (1)...(19): siRNA sense strand
ggaaaacuaaagugugaua

SEQ ID NO: 1641998 - RNA, 19 nt, Homo sapiens
  misc_RNA (1)...(19): siRNA sense strand
agaaugugcggaggauuua

SEQ ID NO: 1641999 - RNA, 19 nt, Homo sapiens
  misc_RNA (1)...(19): siRNA sense strand
ggaggcauucgacuuccua

SEQ ID NO: 1642000 - RNA, 19 nt, Homo sapiens
  misc_RNA (1)...(19): siRNA sense strand
uauuguggccgaagcuaua

SEQ ID NO: 1642001 - RNA, 19 nt, Homo sapiens
  misc_RNA (1)...(19): siRNA sense strand
gaguucucgucgcacauaa

SEQ ID NO: 1642002 - RNA, 19 nt, Homo sapiens
  misc_RNA (1)...(19): siRNA sense strand
ucaaaugccaccucugcaa

SEQ ID NO: 1642003 - RNA, 19 nt, Homo sapiens
  misc_RNA (1)...(19): siRNA sense strand
gagaaggagaacgaaauga

SEQ ID NO: 1642004 - RNA, 19 nt, Homo sapiens
  misc_RNA (1)...(19): siRNA sense strand
cgagaaggagaacgaaaug

SEQ ID NO: 1642005 - RNA, 19 nt, Homo sapiens
  misc_RNA (1)...(19): siRNA sense strand
guacccagucauuaaagaa

SEQ ID NO: 1642006 - RNA, 19 nt, Homo sapiens
  misc_RNA (1)...(19): siRNA sense strand
ugccacaacuacuuggaaa

SEQ ID NO: 1642007 - RNA, 19 nt, Homo sapiens
  misc_RNA (1)...(19): siRNA sense strand
gcacuccguugguaaaccu

SEQ ID NO: 1642008 - RNA, 19 nt, Homo sapiens
  misc_RNA (1)...(19): siRNA sense strand
gcagcggucucaucuaccu

SEQ ID NO: 1642009 - RNA, 19 nt, Homo sapiens
  misc_RNA (1)...(19): siRNA sense strand
ccacggacaccgagagcaa

SEQ ID NO: 1642010 - RNA, 19 nt, Homo sapiens
  misc_RNA (1)...(19): siRNA sense strand
gcggaggauuuacgaaugc

SEQ ID NO: 1642011 - RNA, 19 nt, Homo sapiens
  misc_RNA (1)...(19): siRNA sense strand
aaggagaacgaaaugauga

SEQ ID NO: 1642012 - RNA, 19 nt, Homo sapiens
  misc_RNA (1)...(19): siRNA sense strand
gcaaguaacgucgccaaac

SEQ ID NO: 1642013 - RNA, 19 nt, Homo sapiens
  misc_RNA (1)...(19): siRNA sense strand
gucguggccaguaauguua

SEQ ID NO: 1642014 - RNA, 19 nt, Homo sapiens
  misc_RNA (1)...(19): siRNA sense strand
gauaucugugggaucauuu

SEQ ID NO: 1642015 - RNA, 19 nt, Homo sapiens
  misc_RNA (1)...(19): siRNA sense strand
uguaagcgauacuccagau

SEQ ID NO: 1642016 - RNA, 19 nt, Homo sapiens
  misc_RNA (1)...(19): siRNA sense strand
gauuuacgaaugcuugaug

SEQ ID NO: 1642017 - RNA, 19 nt, Homo sapiens
  misc_RNA (1)...(19): siRNA sense strand
gggccucauucacccagaa

SEQ ID NO: 1642018 - RNA, 19 nt, Homo sapiens
  misc_RNA (1)...(19): siRNA sense strand
agaaggagaacgaaaugau

SEQ ID NO: 1642019 - RNA, 19 nt, Homo sapiens
  misc_RNA (1)...(19): siRNA sense strand
cucuaugccucagaaauuu

SEQ ID NO: 1642020 - RNA, 19 nt, Homo sapiens
  misc_RNA (1)...(19): siRNA sense strand
gucgggaguuggaggcauu

SEQ ID NO: 1642021 - RNA, 19 nt, Homo sapiens
  misc_RNA (1)...(19): siRNA sense strand
gccaggaccgguacgaguu

SEQ ID NO: 1642022 - RNA, 19 nt, Homo sapiens
  misc_RNA (1)...(19): siRNA sense strand
ggacagacuagcaaguaac

SEQ ID NO: 1642023 - RNA, 19 nt, Homo sapiens
  misc_RNA (1)...(19): siRNA sense strand
auaaacagcgaagcucuuu

SEQ ID NO: 1642024 - RNA, 19 nt, Homo sapiens
  misc_RNA (1)...(19): siRNA sense strand
guugguaaaccucacaaau

SEQ ID NO: 1642025 - RNA, 19 nt, Homo sapiens
  misc_RNA (1)...(19): siRNA sense strand
ucaucuaccugaccaacca

SEQ ID NO: 1642026 - RNA, 19 nt, Homo sapiens
  misc_RNA (1)...(19): siRNA sense strand
gagcaacagcugccaagac

SEQ ID NO: 1642027 - RNA, 19 nt, Homo sapiens
  misc_RNA (1)...(19): siRNA sense strand
gagaacgaaaugaugaagu

SEQ ID NO: 1642028 - RNA, 19 nt, Homo sapiens
  misc_RNA (1)...(19): siRNA sense strand
agaagaccugugcaagaua

SEQ ID NO: 1642029 - RNA, 19 nt, Homo sapiens
  misc_RNA (1)...(19): siRNA sense strand
ugaaaugaauggggaagaa

SEQ ID NO: 1642030 - RNA, 19 nt, Homo sapiens
  misc_RNA (1)...(19): siRNA sense strand
gaagaaugugcggaggauu

SEQ ID NO: 1642031 - RNA, 19 nt, Homo sapiens
  misc_RNA (1)...(19): siRNA sense strand
agagcucuaugccucagaa

SEQ ID NO: 1642032 - RNA, 19 nt, Homo sapiens
  misc_RNA (1)...(19): siRNA sense strand
aaacguaagagcucuaugc

SEQ ID NO: 1642033 - RNA, 19 nt, Homo sapiens
  misc_RNA (1)...(19): siRNA sense strand
gacagagucguggccagua

SEQ ID NO: 1642034 - RNA, 19 nt, Homo sapiens
  misc_RNA (1)...(19): siRNA sense strand
uugguaaaccucacaaaug

SEQ ID NO: 1642035 - RNA, 19 nt, Homo sapiens
  misc_RNA (1)...(19): siRNA sense strand
gcgcugccacaacuacuug

SEQ ID NO: 1642036 - RNA, 19 nt, Homo sapiens
  misc_RNA (1)...(19): siRNA sense strand
ggagcaccgcuuccacaug

SEQ ID NO: 1642037 - RNA, 19 nt, Homo sapiens
  misc_RNA (1)...(19): siRNA sense strand
gcuacgagaaggagaacga

SEQ ID NO: 1642038 - RNA, 19 nt, Homo sapiens
  misc_RNA (1)...(19): siRNA sense strand
gauauuguggccgaagcua

SEQ ID NO: 1642039 - RNA, 19 nt, Homo sapiens
  misc_RNA (1)...(19): siRNA sense strand
aagauaggaucagagagau

SEQ ID NO: 1642040 - RNA, 19 nt, Homo sapiens
  misc_RNA (1)...(19): siRNA sense strand
uguacccagucauuaaaga

SEQ ID NO: 1642041 - RNA, 19 nt, Homo sapiens
  misc_RNA (1)...(19): siRNA sense strand
guuggaggcauucgacuuc

SEQ ID NO: 1642042 - RNA, 19 nt, Homo sapiens
  misc_RNA (1)...(19): siRNA sense strand
cuuccuggaucacgucaug

SEQ ID NO: 1642043 - RNA, 19 nt, Homo sapiens
  misc_RNA (1)...(19): siRNA sense strand
ugaagucccacgugaugga

SEQ ID NO: 1642044 - RNA, 19 nt, Homo sapiens
  misc_RNA (1)...(19): siRNA sense strand
acaacuacuuggaaagcau

SEQ ID NO: 1642045 - RNA, 19 nt, Homo sapiens
  misc_RNA (1)...(19): siRNA sense strand
auaaagagcgcugccacaa

SEQ ID NO: 1642046 - RNA, 19 nt, Homo sapiens
  misc_RNA (1)...(19): siRNA sense strand
gugcggaggauuuacgaau

SEQ ID NO: 1642047 - RNA, 19 nt, Homo sapiens
  misc_RNA (1)...(19): siRNA sense strand
gacgcacuccguugguaaa

SEQ ID NO: 1642048 - RNA, 19 nt, Homo sapiens
  misc_RNA (1)...(19): siRNA sense strand
cagaugaagguguacaagu

SEQ ID NO: 1642049 - RNA, 19 nt, Homo sapiens
  misc_RNA (1)...(19): siRNA sense strand
cgauguaccagcugcacaa

SEQ ID NO: 1642050 - RNA, 19 nt, Homo sapiens
  misc_RNA (1)...(19): siRNA sense strand
gcuccaagagugacagagu

SEQ ID NO: 1642051 - RNA, 19 nt, Homo sapiens
  misc_RNA (1)...(19): siRNA sense strand
ucaagacaugucccaaguu

SEQ ID NO: 1642052 - RNA, 19 nt, Homo sapiens
  misc_RNA (1)...(19): siRNA sense strand
cccagucauuaaagaagaa

SEQ ID NO: 1642053 - RNA, 19 nt, Homo sapiens
  misc_RNA (1)...(19): siRNA sense strand
ugcggaggauuuacgaaug

SEQ ID NO: 1642054 - RNA, 19 nt, Homo sapiens
  misc_RNA (1)...(19): siRNA sense strand
ucacagacauugccaaagu

SEQ ID NO: 1642055 - RNA, 19 nt, Homo sapiens
  misc_RNA (1)...(19): siRNA sense strand
caagcaccaucaagccuua

SEQ ID NO: 1642056 - RNA, 19 nt, Homo sapiens
  misc_RNA (1)...(19): siRNA sense strand
gaacaaucaccacaacaug

SEQ ID NO: 1642057 - RNA, 19 nt, Homo sapiens
  misc_RNA (1)...(19): siRNA sense strand
gaaaacuggugagacaaua

SEQ ID NO: 1642058 - RNA, 19 nt, Homo sapiens
  misc_RNA (1)...(19): siRNA sense strand
gggacugucucgcguauca

SEQ ID NO: 1642059 - RNA, 19 nt, Homo sapiens
  misc_RNA (1)...(19): siRNA sense strand
ucuauuaccugaagaaguc

SEQ ID NO: 1642060 - RNA, 19 nt, Homo sapiens
  misc_RNA (1)...(19): siRNA sense strand
caguucaccuugaucauga

SEQ ID NO: 1642061 - RNA, 19 nt, Homo sapiens
  misc_RNA (1)...(19): siRNA sense strand
ggaacaaucaccacaacau

SEQ ID NO: 1642062 - RNA, 19 nt, Homo sapiens
  misc_RNA (1)...(19): siRNA sense strand
caucaaguacccacugaaa

SEQ ID NO: 1642063 - RNA, 19 nt, Homo sapiens
  misc_RNA (1)...(19): siRNA sense strand
ggaauucuaccggaucuau

SEQ ID NO: 1642064 - RNA, 19 nt, Homo sapiens
  misc_RNA (1)...(19): siRNA sense strand
cagaggugaugacagcaaa

SEQ ID NO: 1642065 - RNA, 19 nt, Homo sapiens
  misc_RNA (1)...(19): siRNA sense strand
uggcagcacucuauaagca

SEQ ID NO: 1642066 - RNA, 19 nt, Homo sapiens
  misc_RNA (1)...(19): siRNA sense strand
ggcaggauuugcucaagga

SEQ ID NO: 1642067 - RNA, 19 nt, Homo sapiens
  misc_RNA (1)...(19): siRNA sense strand
aaggcuacauucagaacua

SEQ ID NO: 1642068 - RNA, 19 nt, Homo sapiens
  misc_RNA (1)...(19): siRNA sense strand
gugauguucuggcaggauu

SEQ ID NO: 1642069 - RNA, 19 nt, Homo sapiens
  misc_RNA (1)...(19): siRNA sense strand
gcaguucaccuugaucaug

SEQ ID NO: 1642070 - RNA, 19 nt, Homo sapiens
  misc_RNA (1)...(19): siRNA sense strand
aaacuacaaguacgacaaa

SEQ ID NO: 1642071 - RNA, 19 nt, Homo sapiens
  misc_RNA (1)...(19): siRNA sense strand
acacuaugcuguauuuggu

SEQ ID NO: 1642072 - RNA, 19 nt, Homo sapiens
  misc_RNA (1)...(19): siRNA sense strand
aaacuggugagacaauaaa

SEQ ID NO: 1642073 - RNA, 19 nt, Homo sapiens
  misc_RNA (1)...(19): siRNA sense strand
aauucuaccggaucuauua

SEQ ID NO: 1642074 - RNA, 19 nt, Homo sapiens
  misc_RNA (1)...(19): siRNA sense strand
gcaagcgggugcugcucau

SEQ ID NO: 1642075 - RNA, 19 nt, Homo sapiens
  misc_RNA (1)...(19): siRNA sense strand
cuacguggcagcacucuau

SEQ ID NO: 1642076 - RNA, 19 nt, Homo sapiens
  misc_RNA (1)...(19): siRNA sense strand
aaaugacgcugugcucugu

SEQ ID NO: 1642077 - RNA, 19 nt, Homo sapiens
  misc_RNA (1)...(19): siRNA sense strand
gaauucuaccggaucuauu

SEQ ID NO: 1642078 - RNA, 19 nt, Homo sapiens
  misc_RNA (1)...(19): siRNA sense strand
cuucgugucugaccucuuc

SEQ ID NO: 1642079 - RNA, 19 nt, Homo sapiens
  misc_RNA (1)...(19): siRNA sense strand
gcagaggugaugacagcaa

SEQ ID NO: 1642080 - RNA, 19 nt, Homo sapiens
  misc_RNA (1)...(19): siRNA sense strand
ccugguggccugcugcaua

SEQ ID NO: 1642081 - RNA, 19 nt, Homo sapiens
  misc_RNA (1)...(19): siRNA sense strand
guggccugcugcauaguuu

SEQ ID NO: 1642082 - RNA, 19 nt, Homo sapiens
  misc_RNA (1)...(19): siRNA sense strand
acaagcaccaucccaguga

SEQ ID NO: 1642083 - RNA, 19 nt, Homo sapiens
  misc_RNA (1)...(19): siRNA sense strand
ugacagcaaaguccaggaa

SEQ ID NO: 1642084 - RNA, 19 nt, Homo sapiens
  misc_RNA (1)...(19): siRNA sense strand
cuggugagacaauaaauga

SEQ ID NO: 1642085 - RNA, 19 nt, Homo sapiens
  misc_RNA (1)...(19): siRNA sense strand
caggaacaaucaccacaac

SEQ ID NO: 1642086 - RNA, 19 nt, Homo sapiens
  misc_RNA (1)...(19): siRNA sense strand
gccaucagccagucuuuca

SEQ ID NO: 1642087 - RNA, 19 nt, Homo sapiens
  misc_RNA (1)...(19): siRNA sense strand
ggaucuauuaccugaagaa

SEQ ID NO: 1642088 - RNA, 19 nt, Homo sapiens
  misc_RNA (1)...(19): siRNA sense strand
gaccucuucugccucuuca

SEQ ID NO: 1642089 - RNA, 19 nt, Homo sapiens
  misc_RNA (1)...(19): siRNA sense strand
ccggaucuauuaccugaag

SEQ ID NO: 1642090 - RNA, 19 nt, Homo sapiens
  misc_RNA (1)...(19): siRNA sense strand
cacagacauugccaaagug

SEQ ID NO: 1642091 - RNA, 19 nt, Homo sapiens
  misc_RNA (1)...(19): siRNA sense strand
aacaaucaccacaacauga

SEQ ID NO: 1642092 - RNA, 19 nt, Homo sapiens
  misc_RNA (1)...(19): siRNA sense strand
gugggcugcuuccucuuug

SEQ ID NO: 1642093 - RNA, 19 nt, Homo sapiens
  misc_RNA (1)...(19): siRNA sense strand
uuucaccuguggacauuau

SEQ ID NO: 1642094 - RNA, 19 nt, Homo sapiens
  misc_RNA (1)...(19): siRNA sense strand
caagcaccaucccagugau

SEQ ID NO: 1642095 - RNA, 19 nt, Homo sapiens
  misc_RNA (1)...(19): siRNA sense strand
auucagaacuacagaugca

SEQ ID NO: 1642096 - RNA, 19 nt, Homo sapiens
  misc_RNA (1)...(19): siRNA sense strand
ugaucaugauggccuucua

SEQ ID NO: 1642097 - RNA, 19 nt, Homo sapiens
  misc_RNA (1)...(19): siRNA sense strand
gaucaugauggccuucuac

SEQ ID NO: 1642098 - RNA, 19 nt, Homo sapiens
  misc_RNA (1)...(19): siRNA sense strand
ccuuucaccuguggacauu

SEQ ID NO: 1642099 - RNA, 19 nt, Homo sapiens
  misc_RNA (1)...(19): siRNA sense strand
ccugcguccucacuucuug

SEQ ID NO: 1642100 - RNA, 19 nt, Homo sapiens
  misc_RNA (1)...(19): siRNA sense strand
ccugcuauccggaaggaaa

SEQ ID NO: 1642101 - RNA, 19 nt, Homo sapiens
  misc_RNA (1)...(19): siRNA sense strand
ugcuguauuuggugcuaua

SEQ ID NO: 1642102 - RNA, 19 nt, Homo sapiens
  misc_RNA (1)...(19): siRNA sense strand
ucacagacauugccaaagu

SEQ ID NO: 1642103 - RNA, 19 nt, Homo sapiens
  misc_RNA (1)...(19): siRNA sense strand
caagcaccaucaagccuua

SEQ ID NO: 1642104 - RNA, 19 nt, Homo sapiens
  misc_RNA (1)...(19): siRNA sense strand
gaacaaucaccacaacaug

SEQ ID NO: 1642105 - RNA, 19 nt, Homo sapiens
  misc_RNA (1)...(19): siRNA sense strand
gaaaacuggugagacaaua

SEQ ID NO: 1642106 - RNA, 19 nt, Homo sapiens
  misc_RNA (1)...(19): siRNA sense strand
gggacugucucgcguauca

SEQ ID NO: 1642107 - RNA, 19 nt, Homo sapiens
  misc_RNA (1)...(19): siRNA sense strand
ucuauuaccugaagaaguc

SEQ ID NO: 1642108 - RNA, 19 nt, Homo sapiens
  misc_RNA (1)...(19): siRNA sense strand
caguucaccuugaucauga

SEQ ID NO: 1642109 - RNA, 19 nt, Homo sapiens
  misc_RNA (1)...(19): siRNA sense strand
ggaacaaucaccacaacau

SEQ ID NO: 1642110 - RNA, 19 nt, Homo sapiens
  misc_RNA (1)...(19): siRNA sense strand
caucaaguacccacugaaa

SEQ ID NO: 1642111 - RNA, 19 nt, Homo sapiens
  misc_RNA (1)...(19): siRNA sense strand
ggaauucuaccggaucuau

SEQ ID NO: 1642112 - RNA, 19 nt, Homo sapiens
  misc_RNA (1)...(19): siRNA sense strand
cagaggugaugacagcaaa

SEQ ID NO: 1642113 - RNA, 19 nt, Homo sapiens
  misc_RNA (1)...(19): siRNA sense strand
uggcagcacucuauaagca

SEQ ID NO: 1642114 - RNA, 19 nt, Homo sapiens
  misc_RNA (1)...(19): siRNA sense strand
ggcaggauuugcucaagga

SEQ ID NO: 1642115 - RNA, 19 nt, Homo sapiens
  misc_RNA (1)...(19): siRNA sense strand
aaggcuacauucagaacua

SEQ ID NO: 1642116 - RNA, 19 nt, Homo sapiens
  misc_RNA (1)...(19): siRNA sense strand
gugauguucuggcaggauu

SEQ ID NO: 1642117 - RNA, 19 nt, Homo sapiens
  misc_RNA (1)...(19): siRNA sense strand
gcaguucaccuugaucaug

SEQ ID NO: 1642118 - RNA, 19 nt, Homo sapiens
  misc_RNA (1)...(19): siRNA sense strand
aaacuacaaguacgacaaa

SEQ ID NO: 1642119 - RNA, 19 nt, Homo sapiens
  misc_RNA (1)...(19): siRNA sense strand
acacuaugcuguauuuggu

SEQ ID NO: 1642120 - RNA, 19 nt, Homo sapiens
  misc_RNA (1)...(19): siRNA sense strand
aaacuggugagacaauaaa

SEQ ID NO: 1642121 - RNA, 19 nt, Homo sapiens
  misc_RNA (1)...(19): siRNA sense strand
aauucuaccggaucuauua

SEQ ID NO: 1642122 - RNA, 19 nt, Homo sapiens
  misc_RNA (1)...(19): siRNA sense strand
gcaagcgggugcugcucau

SEQ ID NO: 1642123 - RNA, 19 nt, Homo sapiens
  misc_RNA (1)...(19): siRNA sense strand
cuacguggcagcacucuau

SEQ ID NO: 1642124 - RNA, 19 nt, Homo sapiens
  misc_RNA (1)...(19): siRNA sense strand
aaaugacgcugugcucugu

SEQ ID NO: 1642125 - RNA, 19 nt, Homo sapiens
  misc_RNA (1)...(19): siRNA sense strand
gaauucuaccggaucuauu

SEQ ID NO: 1642126 - RNA, 19 nt, Homo sapiens
  misc_RNA (1)...(19): siRNA sense strand
cuucgugucugaccucuuc

SEQ ID NO: 1642127 - RNA, 19 nt, Homo sapiens
  misc_RNA (1)...(19): siRNA sense strand
gcagaggugaugacagcaa

SEQ ID NO: 1642128 - RNA, 19 nt, Homo sapiens
  misc_RNA (1)...(19): siRNA sense strand
ccugguggccugcugcaua

SEQ ID NO: 1642129 - RNA, 19 nt, Homo sapiens
  misc_RNA (1)...(19): siRNA sense strand
guggccugcugcauaguuu

SEQ ID NO: 1642130 - RNA, 19 nt, Homo sapiens
  misc_RNA (1)...(19): siRNA sense strand
acaagcaccaucccaguga

SEQ ID NO: 1642131 - RNA, 19 nt, Homo sapiens
  misc_RNA (1)...(19): siRNA sense strand
ugacagcaaaguccaggaa

SEQ ID NO: 1642132 - RNA, 19 nt, Homo sapiens
  misc_RNA (1)...(19): siRNA sense strand
cuggugagacaauaaauga

SEQ ID NO: 1642133 - RNA, 19 nt, Homo sapiens
  misc_RNA (1)...(19): siRNA sense strand
caggaacaaucaccacaac

SEQ ID NO: 1642134 - RNA, 19 nt, Homo sapiens
  misc_RNA (1)...(19): siRNA sense strand
gccaucagccagucuuuca

SEQ ID NO: 1642135 - RNA, 19 nt, Homo sapiens
  misc_RNA (1)...(19): siRNA sense strand
ggaucuauuaccugaagaa

SEQ ID NO: 1642136 - RNA, 19 nt, Homo sapiens
  misc_RNA (1)...(19): siRNA sense strand
gaccucuucugccucuuca

SEQ ID NO: 1642137 - RNA, 19 nt, Homo sapiens
  misc_RNA (1)...(19): siRNA sense strand
ccggaucuauuaccugaag

SEQ ID NO: 1642138 - RNA, 19 nt, Homo sapiens
  misc_RNA (1)...(19): siRNA sense strand
cacagacauugccaaagug

SEQ ID NO: 1642139 - RNA, 19 nt, Homo sapiens
  misc_RNA (1)...(19): siRNA sense strand
aacaaucaccacaacauga

SEQ ID NO: 1642140 - RNA, 19 nt, Homo sapiens
  misc_RNA (1)...(19): siRNA sense strand
gugggcugcuuccucuuug

SEQ ID NO: 1642141 - RNA, 19 nt, Homo sapiens
  misc_RNA (1)...(19): siRNA sense strand
uuucaccuguggacauuau

SEQ ID NO: 1642142 - RNA, 19 nt, Homo sapiens
  misc_RNA (1)...(19): siRNA sense strand
caagcaccaucccagugau

SEQ ID NO: 1642143 - RNA, 19 nt, Homo sapiens
  misc_RNA (1)...(19): siRNA sense strand
auucagaacuacagaugca

SEQ ID NO: 1642144 - RNA, 19 nt, Homo sapiens
  misc_RNA (1)...(19): siRNA sense strand
ugaucaugauggccuucua

SEQ ID NO: 1642145 - RNA, 19 nt, Homo sapiens
  misc_RNA (1)...(19): siRNA sense strand
gaucaugauggccuucuac

SEQ ID NO: 1642146 - RNA, 19 nt, Homo sapiens
  misc_RNA (1)...(19): siRNA sense strand
ccuuucaccuguggacauu

SEQ ID NO: 1642147 - RNA, 19 nt, Homo sapiens
  misc_RNA (1)...(19): siRNA sense strand
ccugcguccucacuucuug

SEQ ID NO: 1642148 - RNA, 19 nt, Homo sapiens
  misc_RNA (1)...(19): siRNA sense strand
ccugcuauccggaaggaaa

SEQ ID NO: 1642149 - RNA, 19 nt, Homo sapiens
  misc_RNA (1)...(19): siRNA sense strand
ugcuguauuuggugcuaua

SEQ ID NO: 1642150 - RNA, 19 nt, Homo sapiens
  misc_RNA (1)...(19): siRNA sense strand
gaagagaucuggaaauuca

SEQ ID NO: 1642151 - RNA, 19 nt, Homo sapiens
  misc_RNA (1)...(19): siRNA sense strand
caaguccgauccaguguua

SEQ ID NO: 1642152 - RNA, 19 nt, Homo sapiens
  misc_RNA (1)...(19): siRNA sense strand
gaagaggcuuugagagaug

SEQ ID NO: 1642153 - RNA, 19 nt, Homo sapiens
  misc_RNA (1)...(19): siRNA sense strand
gagaggagcacuuaaucua

SEQ ID NO: 1642154 - RNA, 19 nt, Homo sapiens
  misc_RNA (1)...(19): siRNA sense strand
gaggagcacuuaaucuaug

SEQ ID NO: 1642155 - RNA, 19 nt, Homo sapiens
  misc_RNA (1)...(19): siRNA sense strand
gaugaaaguccucgaguuu

SEQ ID NO: 1642156 - RNA, 19 nt, Homo sapiens
  misc_RNA (1)...(19): siRNA sense strand
ugagagagcccauuaugaa

SEQ ID NO: 1642157 - RNA, 19 nt, Homo sapiens
  misc_RNA (1)...(19): siRNA sense strand
gcacuacugccacgacuuu

SEQ ID NO: 1642158 - RNA, 19 nt, Homo sapiens
  misc_RNA (1)...(19): siRNA sense strand
guacaaggaucacuucacu

SEQ ID NO: 1642159 - RNA, 19 nt, Homo sapiens
  misc_RNA (1)...(19): siRNA sense strand
ggugugaucuucuuaaagg

SEQ ID NO: 1642160 - RNA, 19 nt, Homo sapiens
  misc_RNA (1)...(19): siRNA sense strand
gcugaagguuguugaugaa

SEQ ID NO: 1642161 - RNA, 19 nt, Homo sapiens
  misc_RNA (1)...(19): siRNA sense strand
aggaagagaucuggaaauu

SEQ ID NO: 1642162 - RNA, 19 nt, Homo sapiens
  misc_RNA (1)...(19): siRNA sense strand
ugacgaaggugccaaaugc

SEQ ID NO: 1642163 - RNA, 19 nt, Homo sapiens
  misc_RNA (1)...(19): siRNA sense strand
gauggaaaccugagcaaug

SEQ ID NO: 1642164 - RNA, 19 nt, Homo sapiens
  misc_RNA (1)...(19): siRNA sense strand
gcugaaaccaccaagauga

SEQ ID NO: 1642165 - RNA, 19 nt, Homo sapiens
  misc_RNA (1)...(19): siRNA sense strand
gcuccgugcucgugagaaa

SEQ ID NO: 1642166 - RNA, 19 nt, Homo sapiens
  misc_RNA (1)...(19): siRNA sense strand
guaaguucaucacccaaga

SEQ ID NO: 1642167 - RNA, 19 nt, Homo sapiens
  misc_RNA (1)...(19): siRNA sense strand
ccuacacccucgucaguaa

SEQ ID NO: 1642168 - RNA, 19 nt, Homo sapiens
  misc_RNA (1)...(19): siRNA sense strand
ggaaaccugagcaaugauu

SEQ ID NO: 1642169 - RNA, 19 nt, Homo sapiens
  misc_RNA (1)...(19): siRNA sense strand
gcuuggagcucgucuuugg

SEQ ID NO: 1642170 - RNA, 19 nt, Homo sapiens
  misc_RNA (1)...(19): siRNA sense strand
gcacuucauucuacguaag

SEQ ID NO: 1642171 - RNA, 19 nt, Homo sapiens
  misc_RNA (1)...(19): siRNA sense strand
ugaagaggcuuugagagau

SEQ ID NO: 1642172 - RNA, 19 nt, Homo sapiens
  misc_RNA (1)...(19): siRNA sense strand
aaggaucacuucacugaga

SEQ ID NO: 1642173 - RNA, 19 nt, Homo sapiens
  misc_RNA (1)...(19): siRNA sense strand
caggaaugcugaugcacuu

SEQ ID NO: 1642174 - RNA, 19 nt, Homo sapiens
  misc_RNA (1)...(19): siRNA sense strand
acaaggaucacuucacuga

SEQ ID NO: 1642175 - RNA, 19 nt, Homo sapiens
  misc_RNA (1)...(19): siRNA sense strand
cagauaugcugaagguugu

SEQ ID NO: 1642176 - RNA, 19 nt, Homo sapiens
  misc_RNA (1)...(19): siRNA sense strand
gaaggcagauaugcugaag

SEQ ID NO: 1642177 - RNA, 19 nt, Homo sapiens
  misc_RNA (1)...(19): siRNA sense strand
gaaggaagacaacccuagu

SEQ ID NO: 1642178 - RNA, 19 nt, Homo sapiens
  misc_RNA (1)...(19): siRNA sense strand
agcuaaaccucaccaauga

SEQ ID NO: 1642179 - RNA, 19 nt, Homo sapiens
  misc_RNA (1)...(19): siRNA sense strand
gccacaacauccacugaga

SEQ ID NO: 1642180 - RNA, 19 nt, Homo sapiens
  misc_RNA (1)...(19): siRNA sense strand
uaccgaaucugacgaaggu

SEQ ID NO: 1642181 - RNA, 19 nt, Homo sapiens
  misc_RNA (1)...(19): siRNA sense strand
gcugaugcacuucauucua

SEQ ID NO: 1642182 - RNA, 19 nt, Homo sapiens
  misc_RNA (1)...(19): siRNA sense strand
aagcuaaaccucaccaaug

SEQ ID NO: 1642183 - RNA, 19 nt, Homo sapiens
  misc_RNA (1)...(19): siRNA sense strand
agaugaaaguccucgaguu

SEQ ID NO: 1642184 - RNA, 19 nt, Homo sapiens
  misc_RNA (1)...(19): siRNA sense strand
caagaucuggugcaggaaa

SEQ ID NO: 1642185 - RNA, 19 nt, Homo sapiens
  misc_RNA (1)...(19): siRNA sense strand
ggaagagaucuggaaauuc

SEQ ID NO: 1642186 - RNA, 19 nt, Homo sapiens
  misc_RNA (1)...(19): siRNA sense strand
auggaaaccugagcaauga

SEQ ID NO: 1642187 - RNA, 19 nt, Homo sapiens
  misc_RNA (1)...(19): siRNA sense strand
caaaugccaaggugaggaa

SEQ ID NO: 1642188 - RNA, 19 nt, Homo sapiens
  misc_RNA (1)...(19): siRNA sense strand
ugacuucccaucccauuau

SEQ ID NO: 1642189 - RNA, 19 nt, Homo sapiens
  misc_RNA (1)...(19): siRNA sense strand
guugggagccuaugaugga

SEQ ID NO: 1642190 - RNA, 19 nt, Homo sapiens
  misc_RNA (1)...(19): siRNA sense strand
ggagaggagcacuuaaucu

SEQ ID NO: 1642191 - RNA, 19 nt, Homo sapiens
  misc_RNA (1)...(19): siRNA sense strand
ggaaugcugaugcacuuca

SEQ ID NO: 1642192 - RNA, 19 nt, Homo sapiens
  misc_RNA (1)...(19): siRNA sense strand
gaaaccaccaagaugaaag

SEQ ID NO: 1642193 - RNA, 19 nt, Homo sapiens
  misc_RNA (1)...(19): siRNA sense strand
gaaugcugaugcacuucau

SEQ ID NO: 1642194 - RNA, 19 nt, Homo sapiens
  misc_RNA (1)...(19): siRNA sense strand
ugauggagaggagcacuua

SEQ ID NO: 1642195 - RNA, 19 nt, Homo sapiens
  misc_RNA (1)...(19): siRNA sense strand
ugcugaagguuguugauga

SEQ ID NO: 1642196 - RNA, 19 nt, Homo sapiens
  misc_RNA (1)...(19): siRNA sense strand
aggcagauaugcugaaggu

SEQ ID NO: 1642197 - RNA, 19 nt, Homo sapiens
  misc_RNA (1)...(19): siRNA sense strand
gagagagcccauuaugaag

SEQ ID NO: 1642198 - RNA, 19 nt, Homo sapiens
  misc_RNA (1)...(19): siRNA sense strand
ugggugugaucuucuuaaa

SEQ ID NO: 1642199 - RNA, 19 nt, Homo sapiens
  misc_RNA (1)...(19): siRNA sense strand
gagagaugaggaagagaga

SEQ ID NO: 1642200 - RNA, 19 nt, Homo sapiens
  misc_RNA (1)...(19): siRNA sense strand
gaggaagagaucuggaaau

SEQ ID NO: 1642201 - RNA, 19 nt, Homo sapiens
  misc_RNA (1)...(19): siRNA sense strand
ugucauguaccgaaucuga

SEQ ID NO: 1642202 - RNA, 19 nt, Homo sapiens
  misc_RNA (1)...(19): siRNA sense strand
cgaggaagagaucuggaaa

SEQ ID NO: 1642203 - RNA, 19 nt, Homo sapiens
  misc_RNA (1)...(19): siRNA sense strand
gaagguuguugaugaaaag

SEQ ID NO: 1642204 - RNA, 19 nt, Homo sapiens
  misc_RNA (1)...(19): siRNA sense strand
cugaugcacuucauucuac

SEQ ID NO: 1642205 - RNA, 19 nt, Homo sapiens
  misc_RNA (1)...(19): siRNA sense strand
gcucgucuuuggccuugau

SEQ ID NO: 1642206 - RNA, 19 nt, Homo sapiens
  misc_RNA (1)...(19): siRNA sense strand
ggaagagagagcccaaguc

SEQ ID NO: 1642207 - RNA, 19 nt, Homo sapiens
  misc_RNA (1)...(19): siRNA sense strand
ucuuuggccuugauuugaa

SEQ ID NO: 1642208 - RNA, 19 nt, Homo sapiens
  misc_RNA (1)...(19): siRNA sense strand
cuaaaccucaccaaugaug

SEQ ID NO: 1642209 - RNA, 19 nt, Homo sapiens
  misc_RNA (1)...(19): siRNA sense strand
ccgagagccuaugcugaaa

SEQ ID NO: 1642210 - RNA, 19 nt, Homo sapiens
  misc_RNA (1)...(19): siRNA sense strand
caacucugccaccgaggaa

SEQ ID NO: 1642211 - RNA, 19 nt, Homo sapiens
  misc_RNA (1)...(19): siRNA sense strand
ugaaaccaccaagaugaaa

SEQ ID NO: 1642212 - RNA, 19 nt, Homo sapiens
  misc_RNA (1)...(19): siRNA sense strand
guucaucacccaagaucug

SEQ ID NO: 1642213 - RNA, 19 nt, Homo sapiens
  misc_RNA (1)...(19): siRNA sense strand
ccgcuuggagcucgucuuu

SEQ ID NO: 1642214 - RNA, 19 nt, Homo sapiens
  misc_RNA (1)...(19): siRNA sense strand
uaagcuaaaccucaccaau

SEQ ID NO: 1642215 - RNA, 19 nt, Homo sapiens
  misc_RNA (1)...(19): siRNA sense strand
augaagaggcuuugagaga

SEQ ID NO: 1642216 - RNA, 19 nt, Homo sapiens
  misc_RNA (1)...(19): siRNA sense strand
gugacuucccaucccauua

SEQ ID NO: 1642217 - RNA, 19 nt, Homo sapiens
  misc_RNA (1)...(19): siRNA sense strand
agaggagcacuuaaucuau

SEQ ID NO: 1642218 - RNA, 19 nt, Homo sapiens
  misc_RNA (1)...(19): siRNA sense strand
gagaucuggaaauucauga

SEQ ID NO: 1642219 - RNA, 19 nt, Homo sapiens
  misc_RNA (1)...(19): siRNA sense strand
gcugugucauguaccgaau

SEQ ID NO: 1642220 - RNA, 19 nt, Homo sapiens
  misc_RNA (1)...(19): siRNA sense strand
uccgagagccuaugcugaa

SEQ ID NO: 1642221 - RNA, 19 nt, Homo sapiens
  misc_RNA (1)...(19): siRNA sense strand
gauggagaggagcacuuaa

SEQ ID NO: 1642222 - RNA, 19 nt, Homo sapiens
  misc_RNA (1)...(19): siRNA sense strand
ugaagguuguugaugaaaa

SEQ ID NO: 1642223 - RNA, 19 nt, Homo sapiens
  misc_RNA (1)...(19): siRNA sense strand
cgucuuuggccuugauuug

SEQ ID NO: 1642224 - RNA, 19 nt, Homo sapiens
  misc_RNA (1)...(19): siRNA sense strand
cugcagcugugucauguac

SEQ ID NO: 1642225 - RNA, 19 nt, Homo sapiens
  misc_RNA (1)...(19): siRNA sense strand
gacuucccaucccauuaug

SEQ ID NO: 1642226 - RNA, 19 nt, Homo sapiens
  misc_RNA (1)...(19): siRNA sense strand
gagagccuaugcugaaacc

SEQ ID NO: 1642227 - RNA, 19 nt, Homo sapiens
  misc_RNA (1)...(19): siRNA sense strand
gcaggugcccaacagugau

SEQ ID NO: 1642228 - RNA, 19 nt, Homo sapiens
  misc_RNA (1)...(19): siRNA sense strand
gaauguguugggagccuau

SEQ ID NO: 1642229 - RNA, 19 nt, Homo sapiens
  misc_RNA (1)...(19): siRNA sense strand
aagaggcuuugagagauga

SEQ ID NO: 1642230 - RNA, 19 nt, Homo sapiens
  misc_RNA (1)...(19): siRNA sense strand
aaaccucaccaaugaugga

SEQ ID NO: 1642231 - RNA, 19 nt, Homo sapiens
  misc_RNA (1)...(19): siRNA sense strand
gaagagaucuggaaauuca

SEQ ID NO: 1642232 - RNA, 19 nt, Homo sapiens
  misc_RNA (1)...(19): siRNA sense strand
caaguccgauccaguguua

SEQ ID NO: 1642233 - RNA, 19 nt, Homo sapiens
  misc_RNA (1)...(19): siRNA sense strand
gaagaggcuuugagagaug

SEQ ID NO: 1642234 - RNA, 19 nt, Homo sapiens
  misc_RNA (1)...(19): siRNA sense strand
gagaggagcacuuaaucua

SEQ ID NO: 1642235 - RNA, 19 nt, Homo sapiens
  misc_RNA (1)...(19): siRNA sense strand
gaggagcacuuaaucuaug

SEQ ID NO: 1642236 - RNA, 19 nt, Homo sapiens
  misc_RNA (1)...(19): siRNA sense strand
gaugaaaguccucgaguuu

SEQ ID NO: 1642237 - RNA, 19 nt, Homo sapiens
  misc_RNA (1)...(19): siRNA sense strand
ugagagagcccauuaugaa

SEQ ID NO: 1642238 - RNA, 19 nt, Homo sapiens
  misc_RNA (1)...(19): siRNA sense strand
gcacuacugccacgacuuu

SEQ ID NO: 1642239 - RNA, 19 nt, Homo sapiens
  misc_RNA (1)...(19): siRNA sense strand
guacaaggaucacuucacu

SEQ ID NO: 1642240 - RNA, 19 nt, Homo sapiens
  misc_RNA (1)...(19): siRNA sense strand
ggugugaucuucuuaaagg

SEQ ID NO: 1642241 - RNA, 19 nt, Homo sapiens
  misc_RNA (1)...(19): siRNA sense strand
gcugaagguuguugaugaa

SEQ ID NO: 1642242 - RNA, 19 nt, Homo sapiens
  misc_RNA (1)...(19): siRNA sense strand
aggaagagaucuggaaauu

SEQ ID NO: 1642243 - RNA, 19 nt, Homo sapiens
  misc_RNA (1)...(19): siRNA sense strand
ugacgaaggugccaaaugc

SEQ ID NO: 1642244 - RNA, 19 nt, Homo sapiens
  misc_RNA (1)...(19): siRNA sense strand
gauggaaaccugagcaaug

SEQ ID NO: 1642245 - RNA, 19 nt, Homo sapiens
  misc_RNA (1)...(19): siRNA sense strand
gcugaaaccaccaagauga

SEQ ID NO: 1642246 - RNA, 19 nt, Homo sapiens
  misc_RNA (1)...(19): siRNA sense strand
gcuccgugcucgugagaaa

SEQ ID NO: 1642247 - RNA, 19 nt, Homo sapiens
  misc_RNA (1)...(19): siRNA sense strand
guaaguucaucacccaaga

SEQ ID NO: 1642248 - RNA, 19 nt, Homo sapiens
  misc_RNA (1)...(19): siRNA sense strand
ccuacacccucgucaguaa

SEQ ID NO: 1642249 - RNA, 19 nt, Homo sapiens
  misc_RNA (1)...(19): siRNA sense strand
ggaaaccugagcaaugauu

SEQ ID NO: 1642250 - RNA, 19 nt, Homo sapiens
  misc_RNA (1)...(19): siRNA sense strand
gcuuggagcucgucuuugg

SEQ ID NO: 1642251 - RNA, 19 nt, Homo sapiens
  misc_RNA (1)...(19): siRNA sense strand
gcacuucauucuacguaag

SEQ ID NO: 1642252 - RNA, 19 nt, Homo sapiens
  misc_RNA (1)...(19): siRNA sense strand
ugaagaggcuuugagagau

SEQ ID NO: 1642253 - RNA, 19 nt, Homo sapiens
  misc_RNA (1)...(19): siRNA sense strand
aaggaucacuucacugaga

SEQ ID NO: 1642254 - RNA, 19 nt, Homo sapiens
  misc_RNA (1)...(19): siRNA sense strand
caggaaugcugaugcacuu

SEQ ID NO: 1642255 - RNA, 19 nt, Homo sapiens
  misc_RNA (1)...(19): siRNA sense strand
acaaggaucacuucacuga

SEQ ID NO: 1642256 - RNA, 19 nt, Homo sapiens
  misc_RNA (1)...(19): siRNA sense strand
cagauaugcugaagguugu

SEQ ID NO: 1642257 - RNA, 19 nt, Homo sapiens
  misc_RNA (1)...(19): siRNA sense strand
gaaggcagauaugcugaag

SEQ ID NO: 1642258 - RNA, 19 nt, Homo sapiens
  misc_RNA (1)...(19): siRNA sense strand
gaaggaagacaacccuagu

SEQ ID NO: 1642259 - RNA, 19 nt, Homo sapiens
  misc_RNA (1)...(19): siRNA sense strand
agcuaaaccucaccaauga

SEQ ID NO: 1642260 - RNA, 19 nt, Homo sapiens
  misc_RNA (1)...(19): siRNA sense strand
gccacaacauccacugaga

SEQ ID NO: 1642261 - RNA, 19 nt, Homo sapiens
  misc_RNA (1)...(19): siRNA sense strand
uaccgaaucugacgaaggu

SEQ ID NO: 1642262 - RNA, 19 nt, Homo sapiens
  misc_RNA (1)...(19): siRNA sense strand
gcugaugcacuucauucua

SEQ ID NO: 1642263 - RNA, 19 nt, Homo sapiens
  misc_RNA (1)...(19): siRNA sense strand
aagcuaaaccucaccaaug

SEQ ID NO: 1642264 - RNA, 19 nt, Homo sapiens
  misc_RNA (1)...(19): siRNA sense strand
agaugaaaguccucgaguu

SEQ ID NO: 1642265 - RNA, 19 nt, Homo sapiens
  misc_RNA (1)...(19): siRNA sense strand
caagaucuggugcaggaaa

SEQ ID NO: 1642266 - RNA, 19 nt, Homo sapiens
  misc_RNA (1)...(19): siRNA sense strand
ggaagagaucuggaaauuc

SEQ ID NO: 1642267 - RNA, 19 nt, Homo sapiens
  misc_RNA (1)...(19): siRNA sense strand
auggaaaccugagcaauga

SEQ ID NO: 1642268 - RNA, 19 nt, Homo sapiens
  misc_RNA (1)...(19): siRNA sense strand
caaaugccaaggugaggaa

SEQ ID NO: 1642269 - RNA, 19 nt, Homo sapiens
  misc_RNA (1)...(19): siRNA sense strand
ugacuucccaucccauuau

SEQ ID NO: 1642270 - RNA, 19 nt, Homo sapiens
  misc_RNA (1)...(19): siRNA sense strand
guugggagccuaugaugga

SEQ ID NO: 1642271 - RNA, 19 nt, Homo sapiens
  misc_RNA (1)...(19): siRNA sense strand
ggagaggagcacuuaaucu

SEQ ID NO: 1642272 - RNA, 19 nt, Homo sapiens
  misc_RNA (1)...(19): siRNA sense strand
ggaaugcugaugcacuuca

SEQ ID NO: 1642273 - RNA, 19 nt, Homo sapiens
  misc_RNA (1)...(19): siRNA sense strand
gaaaccaccaagaugaaag

SEQ ID NO: 1642274 - RNA, 19 nt, Homo sapiens
  misc_RNA (1)...(19): siRNA sense strand
gaaugcugaugcacuucau

SEQ ID NO: 1642275 - RNA, 19 nt, Homo sapiens
  misc_RNA (1)...(19): siRNA sense strand
ugauggagaggagcacuua

SEQ ID NO: 1642276 - RNA, 19 nt, Homo sapiens
  misc_RNA (1)...(19): siRNA sense strand
ugcugaagguuguugauga

SEQ ID NO: 1642277 - RNA, 19 nt, Homo sapiens
  misc_RNA (1)...(19): siRNA sense strand
aggcagauaugcugaaggu

SEQ ID NO: 1642278 - RNA, 19 nt, Homo sapiens
  misc_RNA (1)...(19): siRNA sense strand
gagagagcccauuaugaag

SEQ ID NO: 1642279 - RNA, 19 nt, Homo sapiens
  misc_RNA (1)...(19): siRNA sense strand
ugggugugaucuucuuaaa

SEQ ID NO: 1642280 - RNA, 19 nt, Homo sapiens
  misc_RNA (1)...(19): siRNA sense strand
gagagaugaggaagagaga

SEQ ID NO: 1642281 - RNA, 19 nt, Homo sapiens
  misc_RNA (1)...(19): siRNA sense strand
gaggaagagaucuggaaau

SEQ ID NO: 1642282 - RNA, 19 nt, Homo sapiens
  misc_RNA (1)...(19): siRNA sense strand
ugucauguaccgaaucuga

SEQ ID NO: 1642283 - RNA, 19 nt, Homo sapiens
  misc_RNA (1)...(19): siRNA sense strand
cgaggaagagaucuggaaa

SEQ ID NO: 1642284 - RNA, 19 nt, Homo sapiens
  misc_RNA (1)...(19): siRNA sense strand
gaagguuguugaugaaaag

SEQ ID NO: 1642285 - RNA, 19 nt, Homo sapiens
  misc_RNA (1)...(19): siRNA sense strand
cugaugcacuucauucuac

SEQ ID NO: 1642286 - RNA, 19 nt, Homo sapiens
  misc_RNA (1)...(19): siRNA sense strand
gcucgucuuuggccuugau

SEQ ID NO: 1642287 - RNA, 19 nt, Homo sapiens
  misc_RNA (1)...(19): siRNA sense strand
ggaagagagagcccaaguc

SEQ ID NO: 1642288 - RNA, 19 nt, Homo sapiens
  misc_RNA (1)...(19): siRNA sense strand
ucuuuggccuugauuugaa

SEQ ID NO: 1642289 - RNA, 19 nt, Homo sapiens
  misc_RNA (1)...(19): siRNA sense strand
cuaaaccucaccaaugaug

SEQ ID NO: 1642290 - RNA, 19 nt, Homo sapiens
  misc_RNA (1)...(19): siRNA sense strand
ccgagagccuaugcugaaa

SEQ ID NO: 1642291 - RNA, 19 nt, Homo sapiens
  misc_RNA (1)...(19): siRNA sense strand
caacucugccaccgaggaa

SEQ ID NO: 1642292 - RNA, 19 nt, Homo sapiens
  misc_RNA (1)...(19): siRNA sense strand
ugaaaccaccaagaugaaa

SEQ ID NO: 1642293 - RNA, 19 nt, Homo sapiens
  misc_RNA (1)...(19): siRNA sense strand
guucaucacccaagaucug

SEQ ID NO: 1642294 - RNA, 19 nt, Homo sapiens
  misc_RNA (1)...(19): siRNA sense strand
ccgcuuggagcucgucuuu

SEQ ID NO: 1642295 - RNA, 19 nt, Homo sapiens
  misc_RNA (1)...(19): siRNA sense strand
uaagcuaaaccucaccaau

SEQ ID NO: 1642296 - RNA, 19 nt, Homo sapiens
  misc_RNA (1)...(19): siRNA sense strand
augaagaggcuuugagaga

SEQ ID NO: 1642297 - RNA, 19 nt, Homo sapiens
  misc_RNA (1)...(19): siRNA sense strand
gugacuucccaucccauua

SEQ ID NO: 1642298 - RNA, 19 nt, Homo sapiens
  misc_RNA (1)...(19): siRNA sense strand
agaggagcacuuaaucuau

SEQ ID NO: 1642299 - RNA, 19 nt, Homo sapiens
  misc_RNA (1)...(19): siRNA sense strand
gagaucuggaaauucauga

SEQ ID NO: 1642300 - RNA, 19 nt, Homo sapiens
  misc_RNA (1)...(19): siRNA sense strand
gcugugucauguaccgaau

SEQ ID NO: 1642301 - RNA, 19 nt, Homo sapiens
  misc_RNA (1)...(19): siRNA sense strand
uccgagagccuaugcugaa

SEQ ID NO: 1642302 - RNA, 19 nt, Homo sapiens
  misc_RNA (1)...(19): siRNA sense strand
gauggagaggagcacuuaa

SEQ ID NO: 1642303 - RNA, 19 nt, Homo sapiens
  misc_RNA (1)...(19): siRNA sense strand
ugaagguuguugaugaaaa

SEQ ID NO: 1642304 - RNA, 19 nt, Homo sapiens
  misc_RNA (1)...(19): siRNA sense strand
cgucuuuggccuugauuug

SEQ ID NO: 1642305 - RNA, 19 nt, Homo sapiens
  misc_RNA (1)...(19): siRNA sense strand
cugcagcugugucauguac

SEQ ID NO: 1642306 - RNA, 19 nt, Homo sapiens
  misc_RNA (1)...(19): siRNA sense strand
gacuucccaucccauuaug

SEQ ID NO: 1642307 - RNA, 19 nt, Homo sapiens
  misc_RNA (1)...(19): siRNA sense strand
gagagccuaugcugaaacc

SEQ ID NO: 1642308 - RNA, 19 nt, Homo sapiens
  misc_RNA (1)...(19): siRNA sense strand
gcaggugcccaacagugau

SEQ ID NO: 1642309 - RNA, 19 nt, Homo sapiens
  misc_RNA (1)...(19): siRNA sense strand
gaauguguugggagccuau

SEQ ID NO: 1642310 - RNA, 19 nt, Homo sapiens
  misc_RNA (1)...(19): siRNA sense strand
aagaggcuuugagagauga

SEQ ID NO: 1642311 - RNA, 19 nt, Homo sapiens
  misc_RNA (1)...(19): siRNA sense strand
aaaccucaccaaugaugga

SEQ ID NO: 1642312 - RNA, 19 nt, Homo sapiens
  misc_RNA (1)...(19): siRNA sense strand
gaagagaucuggaaauuca

SEQ ID NO: 1642313 - RNA, 19 nt, Homo sapiens
  misc_RNA (1)...(19): siRNA sense strand
caaguccgauccaguguua

SEQ ID NO: 1642314 - RNA, 19 nt, Homo sapiens
  misc_RNA (1)...(19): siRNA sense strand
gaagaggcuuugagagaug

SEQ ID NO: 1642315 - RNA, 19 nt, Homo sapiens
  misc_RNA (1)...(19): siRNA sense strand
gagaggagcacuuaaucua

SEQ ID NO: 1642316 - RNA, 19 nt, Homo sapiens
  misc_RNA (1)...(19): siRNA sense strand
gaggagcacuuaaucuaug

SEQ ID NO: 1642317 - RNA, 19 nt, Homo sapiens
  misc_RNA (1)...(19): siRNA sense strand
gaugaaaguccucgaguuu

SEQ ID NO: 1642318 - RNA, 19 nt, Homo sapiens
  misc_RNA (1)...(19): siRNA sense strand
ugagagagcccauuaugaa

SEQ ID NO: 1642319 - RNA, 19 nt, Homo sapiens
  misc_RNA (1)...(19): siRNA sense strand
gcacuacugccacgacuuu

SEQ ID NO: 1642320 - RNA, 19 nt, Homo sapiens
  misc_RNA (1)...(19): siRNA sense strand
guacaaggaucacuucacu

SEQ ID NO: 1642321 - RNA, 19 nt, Homo sapiens
  misc_RNA (1)...(19): siRNA sense strand
ggugugaucuucuuaaagg

SEQ ID NO: 1642322 - RNA, 19 nt, Homo sapiens
  misc_RNA (1)...(19): siRNA sense strand
gcugaagguuguugaugaa

SEQ ID NO: 1642323 - RNA, 19 nt, Homo sapiens
  misc_RNA (1)...(19): siRNA sense strand
aggaagagaucuggaaauu

SEQ ID NO: 1642324 - RNA, 19 nt, Homo sapiens
  misc_RNA (1)...(19): siRNA sense strand
ugacgaaggugccaaaugc

SEQ ID NO: 1642325 - RNA, 19 nt, Homo sapiens
  misc_RNA (1)...(19): siRNA sense strand
gauggaaaccugagcaaug

SEQ ID NO: 1642326 - RNA, 19 nt, Homo sapiens
  misc_RNA (1)...(19): siRNA sense strand
gcugaaaccaccaagauga

SEQ ID NO: 1642327 - RNA, 19 nt, Homo sapiens
  misc_RNA (1)...(19): siRNA sense strand
gcuccgugcucgugagaaa

SEQ ID NO: 1642328 - RNA, 19 nt, Homo sapiens
  misc_RNA (1)...(19): siRNA sense strand
guaaguucaucacccaaga

SEQ ID NO: 1642329 - RNA, 19 nt, Homo sapiens
  misc_RNA (1)...(19): siRNA sense strand
ccuacacccucgucaguaa

SEQ ID NO: 1642330 - RNA, 19 nt, Homo sapiens
  misc_RNA (1)...(19): siRNA sense strand
ggaaaccugagcaaugauu

SEQ ID NO: 1642331 - RNA, 19 nt, Homo sapiens
  misc_RNA (1)...(19): siRNA sense strand
gcuuggagcucgucuuugg

SEQ ID NO: 1642332 - RNA, 19 nt, Homo sapiens
  misc_RNA (1)...(19): siRNA sense strand
gcacuucauucuacguaag

SEQ ID NO: 1642333 - RNA, 19 nt, Homo sapiens
  misc_RNA (1)...(19): siRNA sense strand
ugaagaggcuuugagagau

SEQ ID NO: 1642334 - RNA, 19 nt, Homo sapiens
  misc_RNA (1)...(19): siRNA sense strand
aaggaucacuucacugaga

SEQ ID NO: 1642335 - RNA, 19 nt, Homo sapiens
  misc_RNA (1)...(19): siRNA sense strand
caggaaugcugaugcacuu

SEQ ID NO: 1642336 - RNA, 19 nt, Homo sapiens
  misc_RNA (1)...(19): siRNA sense strand
acaaggaucacuucacuga

SEQ ID NO: 1642337 - RNA, 19 nt, Homo sapiens
  misc_RNA (1)...(19): siRNA sense strand
cagauaugcugaagguugu

SEQ ID NO: 1642338 - RNA, 19 nt, Homo sapiens
  misc_RNA (1)...(19): siRNA sense strand
gaaggcagauaugcugaag

SEQ ID NO: 1642339 - RNA, 19 nt, Homo sapiens
  misc_RNA (1)...(19): siRNA sense strand
gaaggaagacaacccuagu

SEQ ID NO: 1642340 - RNA, 19 nt, Homo sapiens
  misc_RNA (1)...(19): siRNA sense strand
agcuaaaccucaccaauga

SEQ ID NO: 1642341 - RNA, 19 nt, Homo sapiens
  misc_RNA (1)...(19): siRNA sense strand
gccacaacauccacugaga

SEQ ID NO: 1642342 - RNA, 19 nt, Homo sapiens
  misc_RNA (1)...(19): siRNA sense strand
uaccgaaucugacgaaggu

SEQ ID NO: 1642343 - RNA, 19 nt, Homo sapiens
  misc_RNA (1)...(19): siRNA sense strand
gcugaugcacuucauucua

SEQ ID NO: 1642344 - RNA, 19 nt, Homo sapiens
  misc_RNA (1)...(19): siRNA sense strand
aagcuaaaccucaccaaug

SEQ ID NO: 1642345 - RNA, 19 nt, Homo sapiens
  misc_RNA (1)...(19): siRNA sense strand
agaugaaaguccucgaguu

SEQ ID NO: 1642346 - RNA, 19 nt, Homo sapiens
  misc_RNA (1)...(19): siRNA sense strand
caagaucuggugcaggaaa

SEQ ID NO: 1642347 - RNA, 19 nt, Homo sapiens
  misc_RNA (1)...(19): siRNA sense strand
ggaagagaucuggaaauuc

SEQ ID NO: 1642348 - RNA, 19 nt, Homo sapiens
  misc_RNA (1)...(19): siRNA sense strand
auggaaaccugagcaauga

SEQ ID NO: 1642349 - RNA, 19 nt, Homo sapiens
  misc_RNA (1)...(19): siRNA sense strand
caaaugccaaggugaggaa

SEQ ID NO: 1642350 - RNA, 19 nt, Homo sapiens
  misc_RNA (1)...(19): siRNA sense strand
ugacuucccaucccauuau

SEQ ID NO: 1642351 - RNA, 19 nt, Homo sapiens
  misc_RNA (1)...(19): siRNA sense strand
guugggagccuaugaugga

SEQ ID NO: 1642352 - RNA, 19 nt, Homo sapiens
  misc_RNA (1)...(19): siRNA sense strand
ggagaggagcacuuaaucu

SEQ ID NO: 1642353 - RNA, 19 nt, Homo sapiens
  misc_RNA (1)...(19): siRNA sense strand
ggaaugcugaugcacuuca

SEQ ID NO: 1642354 - RNA, 19 nt, Homo sapiens
  misc_RNA (1)...(19): siRNA sense strand
gaaaccaccaagaugaaag

SEQ ID NO: 1642355 - RNA, 19 nt, Homo sapiens
  misc_RNA (1)...(19): siRNA sense strand
gaaugcugaugcacuucau

SEQ ID NO: 1642356 - RNA, 19 nt, Homo sapiens
  misc_RNA (1)...(19): siRNA sense strand
ugauggagaggagcacuua

SEQ ID NO: 1642357 - RNA, 19 nt, Homo sapiens
  misc_RNA (1)...(19): siRNA sense strand
ugcugaagguuguugauga

SEQ ID NO: 1642358 - RNA, 19 nt, Homo sapiens
  misc_RNA (1)...(19): siRNA sense strand
aggcagauaugcugaaggu

SEQ ID NO: 1642359 - RNA, 19 nt, Homo sapiens
  misc_RNA (1)...(19): siRNA sense strand
gagagagcccauuaugaag

SEQ ID NO: 1642360 - RNA, 19 nt, Homo sapiens
  misc_RNA (1)...(19): siRNA sense strand
ugggugugaucuucuuaaa

SEQ ID NO: 1642361 - RNA, 19 nt, Homo sapiens
  misc_RNA (1)...(19): siRNA sense strand
gagagaugaggaagagaga

SEQ ID NO: 1642362 - RNA, 19 nt, Homo sapiens
  misc_RNA (1)...(19): siRNA sense strand
gaggaagagaucuggaaau

SEQ ID NO: 1642363 - RNA, 19 nt, Homo sapiens
  misc_RNA (1)...(19): siRNA sense strand
ugucauguaccgaaucuga

SEQ ID NO: 1642364 - RNA, 19 nt, Homo sapiens
  misc_RNA (1)...(19): siRNA sense strand
cgaggaagagaucuggaaa

SEQ ID NO: 1642365 - RNA, 19 nt, Homo sapiens
  misc_RNA (1)...(19): siRNA sense strand
gaagguuguugaugaaaag

SEQ ID NO: 1642366 - RNA, 19 nt, Homo sapiens
  misc_RNA (1)...(19): siRNA sense strand
cugaugcacuucauucuac

SEQ ID NO: 1642367 - RNA, 19 nt, Homo sapiens
  misc_RNA (1)...(19): siRNA sense strand
gcucgucuuuggccuugau

SEQ ID NO: 1642368 - RNA, 19 nt, Homo sapiens
  misc_RNA (1)...(19): siRNA sense strand
ggaagagagagcccaaguc

SEQ ID NO: 1642369 - RNA, 19 nt, Homo sapiens
  misc_RNA (1)...(19): siRNA sense strand
ucuuuggccuugauuugaa

SEQ ID NO: 1642370 - RNA, 19 nt, Homo sapiens
  misc_RNA (1)...(19): siRNA sense strand
cuaaaccucaccaaugaug

SEQ ID NO: 1642371 - RNA, 19 nt, Homo sapiens
  misc_RNA (1)...(19): siRNA sense strand
ccgagagccuaugcugaaa

SEQ ID NO: 1642372 - RNA, 19 nt, Homo sapiens
  misc_RNA (1)...(19): siRNA sense strand
caacucugccaccgaggaa

SEQ ID NO: 1642373 - RNA, 19 nt, Homo sapiens
  misc_RNA (1)...(19): siRNA sense strand
ugaaaccaccaagaugaaa

SEQ ID NO: 1642374 - RNA, 19 nt, Homo sapiens
  misc_RNA (1)...(19): siRNA sense strand
guucaucacccaagaucug

SEQ ID NO: 1642375 - RNA, 19 nt, Homo sapiens
  misc_RNA (1)...(19): siRNA sense strand
ccgcuuggagcucgucuuu

SEQ ID NO: 1642376 - RNA, 19 nt, Homo sapiens
  misc_RNA (1)...(19): siRNA sense strand
uaagcuaaaccucaccaau

SEQ ID NO: 1642377 - RNA, 19 nt, Homo sapiens
  misc_RNA (1)...(19): siRNA sense strand
augaagaggcuuugagaga

SEQ ID NO: 1642378 - RNA, 19 nt, Homo sapiens
  misc_RNA (1)...(19): siRNA sense strand
gugacuucccaucccauua

SEQ ID NO: 1642379 - RNA, 19 nt, Homo sapiens
  misc_RNA (1)...(19): siRNA sense strand
agaggagcacuuaaucuau

SEQ ID NO: 1642380 - RNA, 19 nt, Homo sapiens
  misc_RNA (1)...(19): siRNA sense strand
gagaucuggaaauucauga

SEQ ID NO: 1642381 - RNA, 19 nt, Homo sapiens
  misc_RNA (1)...(19): siRNA sense strand
gcugugucauguaccgaau

SEQ ID NO: 1642382 - RNA, 19 nt, Homo sapiens
  misc_RNA (1)...(19): siRNA sense strand
uccgagagccuaugcugaa

SEQ ID NO: 1642383 - RNA, 19 nt, Homo sapiens
  misc_RNA (1)...(19): siRNA sense strand
gauggagaggagcacuuaa

SEQ ID NO: 1642384 - RNA, 19 nt, Homo sapiens
  misc_RNA (1)...(19): siRNA sense strand
ugaagguuguugaugaaaa

SEQ ID NO: 1642385 - RNA, 19 nt, Homo sapiens
  misc_RNA (1)...(19): siRNA sense strand
cgucuuuggccuugauuug

SEQ ID NO: 1642386 - RNA, 19 nt, Homo sapiens
  misc_RNA (1)...(19): siRNA sense strand
cugcagcugugucauguac

SEQ ID NO: 1642387 - RNA, 19 nt, Homo sapiens
  misc_RNA (1)...(19): siRNA sense strand
gacuucccaucccauuaug

SEQ ID NO: 1642388 - RNA, 19 nt, Homo sapiens
  misc_RNA (1)...(19): siRNA sense strand
gagagccuaugcugaaacc

SEQ ID NO: 1642389 - RNA, 19 nt, Homo sapiens
  misc_RNA (1)...(19): siRNA sense strand
gcaggugcccaacagugau

SEQ ID NO: 1642390 - RNA, 19 nt, Homo sapiens
  misc_RNA (1)...(19): siRNA sense strand
gaauguguugggagccuau

SEQ ID NO: 1642391 - RNA, 19 nt, Homo sapiens
  misc_RNA (1)...(19): siRNA sense strand
aagaggcuuugagagauga

SEQ ID NO: 1642392 - RNA, 19 nt, Homo sapiens
  misc_RNA (1)...(19): siRNA sense strand
aaaccucaccaaugaugga

SEQ ID NO: 1642393 - RNA, 19 nt, Homo sapiens
  misc_RNA (1)...(19): siRNA sense strand
ggacgucauuggauguuua

SEQ ID NO: 1642394 - RNA, 19 nt, Homo sapiens
  misc_RNA (1)...(19): siRNA sense strand
uaucaacacuucacucuuu

SEQ ID NO: 1642395 - RNA, 19 nt, Homo sapiens
  misc_RNA (1)...(19): siRNA sense strand
gaaguuauguucucugaag

SEQ ID NO: 1642396 - RNA, 19 nt, Homo sapiens
  misc_RNA (1)...(19): siRNA sense strand
caccauaccuaccacauaa

SEQ ID NO: 1642397 - RNA, 19 nt, Homo sapiens
  misc_RNA (1)...(19): siRNA sense strand
ggagagugcuaguucuuau

SEQ ID NO: 1642398 - RNA, 19 nt, Homo sapiens
  misc_RNA (1)...(19): siRNA sense strand
agacaaaccuaguaaagau

SEQ ID NO: 1642399 - RNA, 19 nt, Homo sapiens
  misc_RNA (1)...(19): siRNA sense strand
gagcgacgguucucuacuu

SEQ ID NO: 1642400 - RNA, 19 nt, Homo sapiens
  misc_RNA (1)...(19): siRNA sense strand
ucucauacuugguugaaua

SEQ ID NO: 1642401 - RNA, 19 nt, Homo sapiens
  misc_RNA (1)...(19): siRNA sense strand
agaauaugauccugcuuua

SEQ ID NO: 1642402 - RNA, 19 nt, Homo sapiens
  misc_RNA (1)...(19): siRNA sense strand
ggacaucacucaggaccuu

SEQ ID NO: 1642403 - RNA, 19 nt, Homo sapiens
  misc_RNA (1)...(19): siRNA sense strand
ugaauuaagucgccuugaa

SEQ ID NO: 1642404 - RNA, 19 nt, Homo sapiens
  misc_RNA (1)...(19): siRNA sense strand
gcucaucaaccucauuaua

SEQ ID NO: 1642405 - RNA, 19 nt, Homo sapiens
  misc_RNA (1)...(19): siRNA sense strand
gaauugccaucuugugaau

SEQ ID NO: 1642406 - RNA, 19 nt, Homo sapiens
  misc_RNA (1)...(19): siRNA sense strand
caacaggacacucugauug

SEQ ID NO: 1642407 - RNA, 19 nt, Homo sapiens
  misc_RNA (1)...(19): siRNA sense strand
gaagacaaaccuaguaaag

SEQ ID NO: 1642408 - RNA, 19 nt, Homo sapiens
  misc_RNA (1)...(19): siRNA sense strand
gcuagccacugccaauaaa

SEQ ID NO: 1642409 - RNA, 19 nt, Homo sapiens
  misc_RNA (1)...(19): siRNA sense strand
gcacuuguauuggaauugu

SEQ ID NO: 1642410 - RNA, 19 nt, Homo sapiens
  misc_RNA (1)...(19): siRNA sense strand
ugaagaaauugcagaacuu

SEQ ID NO: 1642411 - RNA, 19 nt, Homo sapiens
  misc_RNA (1)...(19): siRNA sense strand
gcaccauaccuaccacaua

SEQ ID NO: 1642412 - RNA, 19 nt, Homo sapiens
  misc_RNA (1)...(19): siRNA sense strand
gaagugcugcuacugauau

SEQ ID NO: 1642413 - RNA, 19 nt, Homo sapiens
  misc_RNA (1)...(19): siRNA sense strand
ugacuuggcccuuagcuuu

SEQ ID NO: 1642414 - RNA, 19 nt, Homo sapiens
  misc_RNA (1)...(19): siRNA sense strand
agacugaauuucuggguuu

SEQ ID NO: 1642415 - RNA, 19 nt, Homo sapiens
  misc_RNA (1)...(19): siRNA sense strand
gacaggaauugguuaacuu

SEQ ID NO: 1642416 - RNA, 19 nt, Homo sapiens
  misc_RNA (1)...(19): siRNA sense strand
caucagacauacagaguuc

SEQ ID NO: 1642417 - RNA, 19 nt, Homo sapiens
  misc_RNA (1)...(19): siRNA sense strand
ccacuuguaugaaauuauc

SEQ ID NO: 1642418 - RNA, 19 nt, Homo sapiens
  misc_RNA (1)...(19): siRNA sense strand
gaaaauaugucagguucaa

SEQ ID NO: 1642419 - RNA, 19 nt, Homo sapiens
  misc_RNA (1)...(19): siRNA sense strand
cauauuaccagcuuuagaa

SEQ ID NO: 1642420 - RNA, 19 nt, Homo sapiens
  misc_RNA (1)...(19): siRNA sense strand
gcuuagaauugccaucuug

SEQ ID NO: 1642421 - RNA, 19 nt, Homo sapiens
  misc_RNA (1)...(19): siRNA sense strand
gaggagcaguccagcuuau

SEQ ID NO: 1642422 - RNA, 19 nt, Homo sapiens
  misc_RNA (1)...(19): siRNA sense strand
gggcauauuaccagcuuua

SEQ ID NO: 1642423 - RNA, 19 nt, Homo sapiens
  misc_RNA (1)...(19): siRNA sense strand
aaacacagggaauuucuaa

SEQ ID NO: 1642424 - RNA, 19 nt, Homo sapiens
  misc_RNA (1)...(19): siRNA sense strand
ugauacagauccugaacuu

SEQ ID NO: 1642425 - RNA, 19 nt, Homo sapiens
  misc_RNA (1)...(19): siRNA sense strand
uaagucgccuugaagaaau

SEQ ID NO: 1642426 - RNA, 19 nt, Homo sapiens
  misc_RNA (1)...(19): siRNA sense strand
ccacauaaagaacuacauu

SEQ ID NO: 1642427 - RNA, 19 nt, Homo sapiens
  misc_RNA (1)...(19): siRNA sense strand
acagggaauuucuaacaaa

SEQ ID NO: 1642428 - RNA, 19 nt, Homo sapiens
  misc_RNA (1)...(19): siRNA sense strand
gaagaaauugcagaacuug

SEQ ID NO: 1642429 - RNA, 19 nt, Homo sapiens
  misc_RNA (1)...(19): siRNA sense strand
ucaucaaccucauuauaga

SEQ ID NO: 1642430 - RNA, 19 nt, Homo sapiens
  misc_RNA (1)...(19): siRNA sense strand
cgacgguucucuacuuuua

SEQ ID NO: 1642431 - RNA, 19 nt, Homo sapiens
  misc_RNA (1)...(19): siRNA sense strand
uaaagaagugauucccaua

SEQ ID NO: 1642432 - RNA, 19 nt, Homo sapiens
  misc_RNA (1)...(19): siRNA sense strand
ucucacugcuccuuuacua

SEQ ID NO: 1642433 - RNA, 19 nt, Homo sapiens
  misc_RNA (1)...(19): siRNA sense strand
ggcaucaucuuuaccuuca

SEQ ID NO: 1642434 - RNA, 19 nt, Homo sapiens
  misc_RNA (1)...(19): siRNA sense strand
gcgaagugcugcuacugau

SEQ ID NO: 1642435 - RNA, 19 nt, Homo sapiens
  misc_RNA (1)...(19): siRNA sense strand
uaacacugcauaccagaaa

SEQ ID NO: 1642436 - RNA, 19 nt, Homo sapiens
  misc_RNA (1)...(19): siRNA sense strand
ggaggagcaguccagcuua

SEQ ID NO: 1642437 - RNA, 19 nt, Homo sapiens
  misc_RNA (1)...(19): siRNA sense strand
caacagaaugaugaugaua

SEQ ID NO: 1642438 - RNA, 19 nt, Homo sapiens
  misc_RNA (1)...(19): siRNA sense strand
gcaggaggcacaacagaau

SEQ ID NO: 1642439 - RNA, 19 nt, Homo sapiens
  misc_RNA (1)...(19): siRNA sense strand
uaugucagguucaaggaaa

SEQ ID NO: 1642440 - RNA, 19 nt, Homo sapiens
  misc_RNA (1)...(19): siRNA sense strand
gaacuuguggcaucaucuu

SEQ ID NO: 1642441 - RNA, 19 nt, Homo sapiens
  misc_RNA (1)...(19): siRNA sense strand
auugccaucuugugaauua

SEQ ID NO: 1642442 - RNA, 19 nt, Homo sapiens
  misc_RNA (1)...(19): siRNA sense strand
cagaagacaaaccuaguaa

SEQ ID NO: 1642443 - RNA, 19 nt, Homo sapiens
  misc_RNA (1)...(19): siRNA sense strand
ugucaaacaugggcauauu

SEQ ID NO: 1642444 - RNA, 19 nt, Homo sapiens
  misc_RNA (1)...(19): siRNA sense strand
gucauuggauguuuagaau

SEQ ID NO: 1642445 - RNA, 19 nt, Homo sapiens
  misc_RNA (1)...(19): siRNA sense strand
cugcaccacuuguaugaaa

SEQ ID NO: 1642446 - RNA, 19 nt, Homo sapiens
  misc_RNA (1)...(19): siRNA sense strand
gugaugaaauuugggagaa

SEQ ID NO: 1642447 - RNA, 19 nt, Homo sapiens
  misc_RNA (1)...(19): siRNA sense strand
gcaaauacaacagaagaca

SEQ ID NO: 1642448 - RNA, 19 nt, Homo sapiens
  misc_RNA (1)...(19): siRNA sense strand
uagaauaugauccugcuuu

SEQ ID NO: 1642449 - RNA, 19 nt, Homo sapiens
  misc_RNA (1)...(19): siRNA sense strand
gaaauuaucaaaggcaucu

SEQ ID NO: 1642450 - RNA, 19 nt, Homo sapiens
  misc_RNA (1)...(19): siRNA sense strand
gaauuaagucgccuugaag

SEQ ID NO: 1642451 - RNA, 19 nt, Homo sapiens
  misc_RNA (1)...(19): siRNA sense strand
aauuaugacuuggcccuua

SEQ ID NO: 1642452 - RNA, 19 nt, Homo sapiens
  misc_RNA (1)...(19): siRNA sense strand
uaacagaugaagcaacaga

SEQ ID NO: 1642453 - RNA, 19 nt, Homo sapiens
  misc_RNA (1)...(19): siRNA sense strand
cucaggaccuuguggauga

SEQ ID NO: 1642454 - RNA, 19 nt, Homo sapiens
  misc_RNA (1)...(19): siRNA sense strand
uugcacaacuaacagauga

SEQ ID NO: 1642455 - RNA, 19 nt, Homo sapiens
  misc_RNA (1)...(19): siRNA sense strand
gcaccacuuguaugaaauu

SEQ ID NO: 1642456 - RNA, 19 nt, Homo sapiens
  misc_RNA (1)...(19): siRNA sense strand
ggacugcaccacuuguaug

SEQ ID NO: 1642457 - RNA, 19 nt, Homo sapiens
  misc_RNA (1)...(19): siRNA sense strand
ucaugugugugaagauuug

SEQ ID NO: 1642458 - RNA, 19 nt, Homo sapiens
  misc_RNA (1)...(19): siRNA sense strand
cacagggaauuucuaacaa

SEQ ID NO: 1642459 - RNA, 19 nt, Homo sapiens
  misc_RNA (1)...(19): siRNA sense strand
gauccugagcugaaacaaa

SEQ ID NO: 1642460 - RNA, 19 nt, Homo sapiens
  misc_RNA (1)...(19): siRNA sense strand
cagccaaguuuaaagaagu

SEQ ID NO: 1642461 - RNA, 19 nt, Homo sapiens
  misc_RNA (1)...(19): siRNA sense strand
aaagcuggaugugaugaaa

SEQ ID NO: 1642462 - RNA, 19 nt, Homo sapiens
  misc_RNA (1)...(19): siRNA sense strand
ucagacugcccaacuauug

SEQ ID NO: 1642463 - RNA, 19 nt, Homo sapiens
  misc_RNA (1)...(19): siRNA sense strand
gcauguugcaggaagauga

SEQ ID NO: 1642464 - RNA, 19 nt, Homo sapiens
  misc_RNA (1)...(19): siRNA sense strand
agagauuguuggcauguug

SEQ ID NO: 1642465 - RNA, 19 nt, Homo sapiens
  misc_RNA (1)...(19): siRNA sense strand
agacauacagaguucagua

SEQ ID NO: 1642466 - RNA, 19 nt, Homo sapiens
  misc_RNA (1)...(19): siRNA sense strand
uagaauugccaucuuguga

SEQ ID NO: 1642467 - RNA, 19 nt, Homo sapiens
  misc_RNA (1)...(19): siRNA sense strand
gucaaacaugggcauauua

SEQ ID NO: 1642468 - RNA, 19 nt, Homo sapiens
  misc_RNA (1)...(19): siRNA sense strand
acuaacagaugaagcaaca

SEQ ID NO: 1642469 - RNA, 19 nt, Homo sapiens
  misc_RNA (1)...(19): siRNA sense strand
uaaauccuaacacugcaua

SEQ ID NO: 1642470 - RNA, 19 nt, Homo sapiens
  misc_RNA (1)...(19): siRNA sense strand
acagaagacaaaccuagua

SEQ ID NO: 1642471 - RNA, 19 nt, Homo sapiens
  misc_RNA (1)...(19): siRNA sense strand
cacaacagaaugaugauga

SEQ ID NO: 1642472 - RNA, 19 nt, Homo sapiens
  misc_RNA (1)...(19): siRNA sense strand
uuaagucgccuugaagaaa

SEQ ID NO: 1642473 - RNA, 19 nt, Homo sapiens
  misc_RNA (1)...(19): siRNA sense strand
caaauacaacagaagacaa

SEQ ID NO: 1642474 - RNA, 19 nt, Homo sapiens
  misc_RNA (1)...(19): siRNA sense strand
uagcaaauacaacagaaga

SEQ ID NO: 1642475 - RNA, 19 nt, Homo sapiens
  misc_RNA (1)...(19): siRNA sense strand
aaagacaggaauugguuaa

SEQ ID NO: 1642476 - RNA, 19 nt, Homo sapiens
  misc_RNA (1)...(19): siRNA sense strand
cagaugaagcaacagauga

SEQ ID NO: 1642477 - RNA, 19 nt, Homo sapiens
  misc_RNA (1)...(19): siRNA sense strand
gaauaugauccugcuuuau

SEQ ID NO: 1642478 - RNA, 19 nt, Homo sapiens
  misc_RNA (1)...(19): siRNA sense strand
gaggagcguuuugaugaua

SEQ ID NO: 1642479 - RNA, 19 nt, Homo sapiens
  misc_RNA (1)...(19): siRNA sense strand
cgaagugcugcuacugaua

SEQ ID NO: 1642480 - RNA, 19 nt, Homo sapiens
  misc_RNA (1)...(19): siRNA sense strand
gcauauuaccagcuuuaga

SEQ ID NO: 1642481 - RNA, 19 nt, Homo sapiens
  misc_RNA (1)...(19): siRNA sense strand
ucugaagaauguauaaugg

SEQ ID NO: 1642482 - RNA, 19 nt, Homo sapiens
  misc_RNA (1)...(19): siRNA sense strand
caccacuuguaugaaauua

SEQ ID NO: 1642483 - RNA, 19 nt, Homo sapiens
  misc_RNA (1)...(19): siRNA sense strand
aauaugauccugcuuuauc

SEQ ID NO: 1642484 - RNA, 19 nt, Homo sapiens
  misc_RNA (1)...(19): siRNA sense strand
acuauuggcacuuguauug

SEQ ID NO: 1642485 - RNA, 19 nt, Homo sapiens
  misc_RNA (1)...(19): siRNA sense strand
ugaagcaacagaugaggaa

SEQ ID NO: 1642486 - RNA, 19 nt, Homo sapiens
  misc_RNA (1)...(19): siRNA sense strand
aagaagugauucccauauc

SEQ ID NO: 1642487 - RNA, 19 nt, Homo sapiens
  misc_RNA (1)...(19): siRNA sense strand
acacagggaauuucuaaca

SEQ ID NO: 1642488 - RNA, 19 nt, Homo sapiens
  misc_RNA (1)...(19): siRNA sense strand
aaagaagugauucccauau

SEQ ID NO: 1642489 - RNA, 19 nt, Homo sapiens
  misc_RNA (1)...(19): siRNA sense strand
gguacgagaguuugucaug

SEQ ID NO: 1642490 - RNA, 19 nt, Homo sapiens
  misc_RNA (1)...(19): siRNA sense strand
uguucucacugcuccuuua

SEQ ID NO: 1642491 - RNA, 19 nt, Homo sapiens
  misc_RNA (1)...(19): siRNA sense strand
ccuaccacauaaagaacua

SEQ ID NO: 1642492 - RNA, 19 nt, Homo sapiens
  misc_RNA (1)...(19): siRNA sense strand
caacuauuggcacuuguau

SEQ ID NO: 1642493 - RNA, 19 nt, Homo sapiens
  misc_RNA (1)...(19): siRNA sense strand
gaugaacucugccauaaua

SEQ ID NO: 1642494 - RNA, 19 nt, Homo sapiens
  misc_RNA (1)...(19): siRNA sense strand
gaagagaugugguuuaaca

SEQ ID NO: 1642495 - RNA, 19 nt, Homo sapiens
  misc_RNA (1)...(19): siRNA sense strand
gaagauacguuaccauugu

SEQ ID NO: 1642496 - RNA, 19 nt, Homo sapiens
  misc_RNA (1)...(19): siRNA sense strand
ggaaagcacuggaagaugu

SEQ ID NO: 1642497 - RNA, 19 nt, Homo sapiens
  misc_RNA (1)...(19): siRNA sense strand
ggacgucauuggauguuua

SEQ ID NO: 1642498 - RNA, 19 nt, Homo sapiens
  misc_RNA (1)...(19): siRNA sense strand
uaucaacacuucacucuuu

SEQ ID NO: 1642499 - RNA, 19 nt, Homo sapiens
  misc_RNA (1)...(19): siRNA sense strand
gaaguuauguucucugaag

SEQ ID NO: 1642500 - RNA, 19 nt, Homo sapiens
  misc_RNA (1)...(19): siRNA sense strand
guacagacauuuaaaggau

SEQ ID NO: 1642501 - RNA, 19 nt, Homo sapiens
  misc_RNA (1)...(19): siRNA sense strand
gaagaagagaugugguuua

SEQ ID NO: 1642502 - RNA, 19 nt, Homo sapiens
  misc_RNA (1)...(19): siRNA sense strand
caccauaccuaccacauaa

SEQ ID NO: 1642503 - RNA, 19 nt, Homo sapiens
  misc_RNA (1)...(19): siRNA sense strand
ggagagugcuaguucuuau

SEQ ID NO: 1642504 - RNA, 19 nt, Homo sapiens
  misc_RNA (1)...(19): siRNA sense strand
aagaagagaugugguuuaa

SEQ ID NO: 1642505 - RNA, 19 nt, Homo sapiens
  misc_RNA (1)...(19): siRNA sense strand
ccagaacacuagaagauga

SEQ ID NO: 1642506 - RNA, 19 nt, Homo sapiens
  misc_RNA (1)...(19): siRNA sense strand
agacaaaccuaguaaagau

SEQ ID NO: 1642507 - RNA, 19 nt, Homo sapiens
  misc_RNA (1)...(19): siRNA sense strand
ggacaucacucaggaccuu

SEQ ID NO: 1642508 - RNA, 19 nt, Homo sapiens
  misc_RNA (1)...(19): siRNA sense strand
gagcgacgguucucuacuu

SEQ ID NO: 1642509 - RNA, 19 nt, Homo sapiens
  misc_RNA (1)...(19): siRNA sense strand
ucucauacuugguugaaua

SEQ ID NO: 1642510 - RNA, 19 nt, Homo sapiens
  misc_RNA (1)...(19): siRNA sense strand
agaauaugauccugcuuua

SEQ ID NO: 1642511 - RNA, 19 nt, Homo sapiens
  misc_RNA (1)...(19): siRNA sense strand
ugaauuaagucgccuugaa

SEQ ID NO: 1642512 - RNA, 19 nt, Homo sapiens
  misc_RNA (1)...(19): siRNA sense strand
gcucaucaaccucauuaua

SEQ ID NO: 1642513 - RNA, 19 nt, Homo sapiens
  misc_RNA (1)...(19): siRNA sense strand
gcaagauaaucccaaacuu

SEQ ID NO: 1642514 - RNA, 19 nt, Homo sapiens
  misc_RNA (1)...(19): siRNA sense strand
gaauugccaucuugugaau

SEQ ID NO: 1642515 - RNA, 19 nt, Homo sapiens
  misc_RNA (1)...(19): siRNA sense strand
ucacagauaucgaagagau

SEQ ID NO: 1642516 - RNA, 19 nt, Homo sapiens
  misc_RNA (1)...(19): siRNA sense strand
caacaggacacucugauug

SEQ ID NO: 1642517 - RNA, 19 nt, Homo sapiens
  misc_RNA (1)...(19): siRNA sense strand
gaagacaaaccuaguaaag

SEQ ID NO: 1642518 - RNA, 19 nt, Homo sapiens
  misc_RNA (1)...(19): siRNA sense strand
gcuagccacugccaauaaa

SEQ ID NO: 1642519 - RNA, 19 nt, Homo sapiens
  misc_RNA (1)...(19): siRNA sense strand
gcacuuguauuggaauugu

SEQ ID NO: 1642520 - RNA, 19 nt, Homo sapiens
  misc_RNA (1)...(19): siRNA sense strand
caaagagaaaggcaagaua

SEQ ID NO: 1642521 - RNA, 19 nt, Homo sapiens
  misc_RNA (1)...(19): siRNA sense strand
ugaagaaauugcagaacuu

SEQ ID NO: 1642522 - RNA, 19 nt, Homo sapiens
  misc_RNA (1)...(19): siRNA sense strand
gacaguaugcguuccauuu

SEQ ID NO: 1642523 - RNA, 19 nt, Homo sapiens
  misc_RNA (1)...(19): siRNA sense strand
gcaccauaccuaccacaua

SEQ ID NO: 1642524 - RNA, 19 nt, Homo sapiens
  misc_RNA (1)...(19): siRNA sense strand
gaagugcugcuacugauau

SEQ ID NO: 1642525 - RNA, 19 nt, Homo sapiens
  misc_RNA (1)...(19): siRNA sense strand
ugacuuggcccuuagcuuu

SEQ ID NO: 1642526 - RNA, 19 nt, Homo sapiens
  misc_RNA (1)...(19): siRNA sense strand
aaagagaaaggcaagauaa

SEQ ID NO: 1642527 - RNA, 19 nt, Homo sapiens
  misc_RNA (1)...(19): siRNA sense strand
uacaaccgcuacauaauga

SEQ ID NO: 1642528 - RNA, 19 nt, Homo sapiens
  misc_RNA (1)...(19): siRNA sense strand
agacugaauuucuggguuu

SEQ ID NO: 1642529 - RNA, 19 nt, Homo sapiens
  misc_RNA (1)...(19): siRNA sense strand
gacaggaauugguuaacuu

SEQ ID NO: 1642530 - RNA, 19 nt, Homo sapiens
  misc_RNA (1)...(19): siRNA sense strand
caucagacauacagaguuc

SEQ ID NO: 1642531 - RNA, 19 nt, Homo sapiens
  misc_RNA (1)...(19): siRNA sense strand
ccacuuguaugaaauuauc

SEQ ID NO: 1642532 - RNA, 19 nt, Homo sapiens
  misc_RNA (1)...(19): siRNA sense strand
uaacugcucauguaauuga

SEQ ID NO: 1642533 - RNA, 19 nt, Homo sapiens
  misc_RNA (1)...(19): siRNA sense strand
cggcagcuauuacuacaaa

SEQ ID NO: 1642534 - RNA, 19 nt, Homo sapiens
  misc_RNA (1)...(19): siRNA sense strand
uaacacagaugaagaugac

SEQ ID NO: 1642535 - RNA, 19 nt, Homo sapiens
  misc_RNA (1)...(19): siRNA sense strand
gaaagcacuggaagaugua

SEQ ID NO: 1642536 - RNA, 19 nt, Homo sapiens
  misc_RNA (1)...(19): siRNA sense strand
gaaaauaugucagguucaa

SEQ ID NO: 1642537 - RNA, 19 nt, Homo sapiens
  misc_RNA (1)...(19): siRNA sense strand
cauauuaccagcuuuagaa

SEQ ID NO: 1642538 - RNA, 19 nt, Homo sapiens
  misc_RNA (1)...(19): siRNA sense strand
gcuuagaauugccaucuug

SEQ ID NO: 1642539 - RNA, 19 nt, Homo sapiens
  misc_RNA (1)...(19): siRNA sense strand
gaggagcaguccagcuuau

SEQ ID NO: 1642540 - RNA, 19 nt, Homo sapiens
  misc_RNA (1)...(19): siRNA sense strand
gggcauauuaccagcuuua

SEQ ID NO: 1642541 - RNA, 19 nt, Homo sapiens
  misc_RNA (1)...(19): siRNA sense strand
aaacacagggaauuucuaa

SEQ ID NO: 1642542 - RNA, 19 nt, Homo sapiens
  misc_RNA (1)...(19): siRNA sense strand
ugauacagauccugaacuu

SEQ ID NO: 1642543 - RNA, 19 nt, Homo sapiens
  misc_RNA (1)...(19): siRNA sense strand
ggaagauacguuaccauug

SEQ ID NO: 1642544 - RNA, 19 nt, Homo sapiens
  misc_RNA (1)...(19): siRNA sense strand
gcuacaaucugaugaacuc

SEQ ID NO: 1642545 - RNA, 19 nt, Homo sapiens
  misc_RNA (1)...(19): siRNA sense strand
uaagucgccuugaagaaau

SEQ ID NO: 1642546 - RNA, 19 nt, Homo sapiens
  misc_RNA (1)...(19): siRNA sense strand
ccacauaaagaacuacauu

SEQ ID NO: 1642547 - RNA, 19 nt, Homo sapiens
  misc_RNA (1)...(19): siRNA sense strand
acagggaauuucuaacaaa

SEQ ID NO: 1642548 - RNA, 19 nt, Homo sapiens
  misc_RNA (1)...(19): siRNA sense strand
gaagaaauugcagaacuug

SEQ ID NO: 1642549 - RNA, 19 nt, Homo sapiens
  misc_RNA (1)...(19): siRNA sense strand
cgacgguucucuacuuuua

SEQ ID NO: 1642550 - RNA, 19 nt, Homo sapiens
  misc_RNA (1)...(19): siRNA sense strand
ccagucaucuacaacaaau

SEQ ID NO: 1642551 - RNA, 19 nt, Homo sapiens
  misc_RNA (1)...(19): siRNA sense strand
gaagaugacauggaagaug

SEQ ID NO: 1642552 - RNA, 19 nt, Homo sapiens
  misc_RNA (1)...(19): siRNA sense strand
agaugaagaugacauggaa

SEQ ID NO: 1642553 - RNA, 19 nt, Homo sapiens
  misc_RNA (1)...(19): siRNA sense strand
uggaagauguagauuaugu

SEQ ID NO: 1642554 - RNA, 19 nt, Homo sapiens
  misc_RNA (1)...(19): siRNA sense strand
cugaugaacucugccauaa

SEQ ID NO: 1642555 - RNA, 19 nt, Homo sapiens
  misc_RNA (1)...(19): siRNA sense strand
ucaucaaccucauuauaga

SEQ ID NO: 1642556 - RNA, 19 nt, Homo sapiens
  misc_RNA (1)...(19): siRNA sense strand
uaaagaagugauucccaua

SEQ ID NO: 1642557 - RNA, 19 nt, Homo sapiens
  misc_RNA (1)...(19): siRNA sense strand
ggaugaagauaaggaagau

SEQ ID NO: 1642558 - RNA, 19 nt, Homo sapiens
  misc_RNA (1)...(19): siRNA sense strand
ucgaagagaugccagaaca

SEQ ID NO: 1642559 - RNA, 19 nt, Homo sapiens
  misc_RNA (1)...(19): siRNA sense strand
ggaagauguagauuaugua

SEQ ID NO: 1642560 - RNA, 19 nt, Homo sapiens
  misc_RNA (1)...(19): siRNA sense strand
ucucacugcuccuuuacua

SEQ ID NO: 1642561 - RNA, 19 nt, Homo sapiens
  misc_RNA (1)...(19): siRNA sense strand
ggcaucaucuuuaccuuca

SEQ ID NO: 1642562 - RNA, 19 nt, Homo sapiens
  misc_RNA (1)...(19): siRNA sense strand
cggcagagcccaaguuuca

SEQ ID NO: 1642563 - RNA, 19 nt, Homo sapiens
  misc_RNA (1)...(19): siRNA sense strand
uggagaagcuguagugucu

SEQ ID NO: 1642564 - RNA, 19 nt, Homo sapiens
  misc_RNA (1)...(19): siRNA sense strand
gcgaagugcugcuacugau

SEQ ID NO: 1642565 - RNA, 19 nt, Homo sapiens
  misc_RNA (1)...(19): siRNA sense strand
gcaggaggcacaacagaau

SEQ ID NO: 1642566 - RNA, 19 nt, Homo sapiens
  misc_RNA (1)...(19): siRNA sense strand
ucgugggucugguagauua

SEQ ID NO: 1642567 - RNA, 19 nt, Homo sapiens
  misc_RNA (1)...(19): siRNA sense strand
uaacacugcauaccagaaa

SEQ ID NO: 1642568 - RNA, 19 nt, Homo sapiens
  misc_RNA (1)...(19): siRNA sense strand
aaacugagauuugaacaac

SEQ ID NO: 1642569 - RNA, 19 nt, Homo sapiens
  misc_RNA (1)...(19): siRNA sense strand
ggaucccgcuacaaucuga

SEQ ID NO: 1642570 - RNA, 19 nt, Homo sapiens
  misc_RNA (1)...(19): siRNA sense strand
ggaggagcaguccagcuua

SEQ ID NO: 1642571 - RNA, 19 nt, Homo sapiens
  misc_RNA (1)...(19): siRNA sense strand
caacagaaugaugaugaua

SEQ ID NO: 1642572 - RNA, 19 nt, Homo sapiens
  misc_RNA (1)...(19): siRNA sense strand
uaugucagguucaaggaaa

SEQ ID NO: 1642573 - RNA, 19 nt, Homo sapiens
  misc_RNA (1)...(19): siRNA sense strand
acuggaagauguagauuau

SEQ ID NO: 1642574 - RNA, 19 nt, Homo sapiens
  misc_RNA (1)...(19): siRNA sense strand
gaacuuguggcaucaucuu

SEQ ID NO: 1642575 - RNA, 19 nt, Homo sapiens
  misc_RNA (1)...(19): siRNA sense strand
auugccaucuugugaauua

SEQ ID NO: 1642576 - RNA, 19 nt, Homo sapiens
  misc_RNA (1)...(19): siRNA sense strand
cagaagacaaaccuaguaa

SEQ ID NO: 1642577 - RNA, 19 nt, Homo sapiens
  misc_RNA (1)...(19): siRNA sense strand
ugucaaacaugggcauauu

SEQ ID NO: 1642578 - RNA, 19 nt, Homo sapiens
  misc_RNA (1)...(19): siRNA sense strand
gucauuggauguuuagaau

SEQ ID NO: 1642579 - RNA, 19 nt, Homo sapiens
  misc_RNA (1)...(19): siRNA sense strand
cugcaccacuuguaugaaa

SEQ ID NO: 1642580 - RNA, 19 nt, Homo sapiens
  misc_RNA (1)...(19): siRNA sense strand
gaauuaagucgccuugaag

SEQ ID NO: 1642581 - RNA, 19 nt, Homo sapiens
  misc_RNA (1)...(19): siRNA sense strand
aagauaaucccaaacuuga

SEQ ID NO: 1642582 - RNA, 19 nt, Homo sapiens
  misc_RNA (1)...(19): siRNA sense strand
gcaaauacaacagaagaca

SEQ ID NO: 1642583 - RNA, 19 nt, Homo sapiens
  misc_RNA (1)...(19): siRNA sense strand
gugaugaaauuugggagaa

SEQ ID NO: 1642584 - RNA, 19 nt, Homo sapiens
  misc_RNA (1)...(19): siRNA sense strand
uagaauaugauccugcuuu

SEQ ID NO: 1642585 - RNA, 19 nt, Homo sapiens
  misc_RNA (1)...(19): siRNA sense strand
gaaauuaucaaaggcaucu

SEQ ID NO: 1642586 - RNA, 19 nt, Homo sapiens
  misc_RNA (1)...(19): siRNA sense strand
uaacagaugaagcaacaga

SEQ ID NO: 1642587 - RNA, 19 nt, Homo sapiens
  misc_RNA (1)...(19): siRNA sense strand
gagcccaaguuucaagcuu

SEQ ID NO: 1642588 - RNA, 19 nt, Homo sapiens
  misc_RNA (1)...(19): siRNA sense strand
ggaagauggagaagcugua

SEQ ID NO: 1642589 - RNA, 19 nt, Homo sapiens
  misc_RNA (1)...(19): siRNA sense strand
aucauuaacugcucaugua

SEQ ID NO: 1642590 - RNA, 19 nt, Homo sapiens
  misc_RNA (1)...(19): siRNA sense strand
caauggaucccgcuacaau

SEQ ID NO: 1642591 - RNA, 19 nt, Homo sapiens
  misc_RNA (1)...(19): siRNA sense strand
aauuaugacuuggcccuua

SEQ ID NO: 1642592 - RNA, 19 nt, Homo sapiens
  misc_RNA (1)...(19): siRNA sense strand
ccaguggaacgaagacuaa

SEQ ID NO: 1642593 - RNA, 19 nt, Homo sapiens
  misc_RNA (1)...(19): siRNA sense strand
ggacgucauuggauguuua

SEQ ID NO: 1642594 - RNA, 19 nt, Homo sapiens
  misc_RNA (1)...(19): siRNA sense strand
uaucaacacuucacucuuu

SEQ ID NO: 1642595 - RNA, 19 nt, Homo sapiens
  misc_RNA (1)...(19): siRNA sense strand
gaaguuauguucucugaag

SEQ ID NO: 1642596 - RNA, 19 nt, Homo sapiens
  misc_RNA (1)...(19): siRNA sense strand
caccauaccuaccacauaa

SEQ ID NO: 1642597 - RNA, 19 nt, Homo sapiens
  misc_RNA (1)...(19): siRNA sense strand
ggagagugcuaguucuuau

SEQ ID NO: 1642598 - RNA, 19 nt, Homo sapiens
  misc_RNA (1)...(19): siRNA sense strand
agacaaaccuaguaaagau

SEQ ID NO: 1642599 - RNA, 19 nt, Homo sapiens
  misc_RNA (1)...(19): siRNA sense strand
gagcgacgguucucuacuu

SEQ ID NO: 1642600 - RNA, 19 nt, Homo sapiens
  misc_RNA (1)...(19): siRNA sense strand
ucucauacuugguugaaua

SEQ ID NO: 1642601 - RNA, 19 nt, Homo sapiens
  misc_RNA (1)...(19): siRNA sense strand
agaauaugauccugcuuua

SEQ ID NO: 1642602 - RNA, 19 nt, Homo sapiens
  misc_RNA (1)...(19): siRNA sense strand
ggacaucacucaggaccuu

SEQ ID NO: 1642603 - RNA, 19 nt, Homo sapiens
  misc_RNA (1)...(19): siRNA sense strand
ugaauuaagucgccuugaa

SEQ ID NO: 1642604 - RNA, 19 nt, Homo sapiens
  misc_RNA (1)...(19): siRNA sense strand
gcucaucaaccucauuaua

SEQ ID NO: 1642605 - RNA, 19 nt, Homo sapiens
  misc_RNA (1)...(19): siRNA sense strand
gaauugccaucuugugaau

SEQ ID NO: 1642606 - RNA, 19 nt, Homo sapiens
  misc_RNA (1)...(19): siRNA sense strand
caacaggacacucugauug

SEQ ID NO: 1642607 - RNA, 19 nt, Homo sapiens
  misc_RNA (1)...(19): siRNA sense strand
gaagacaaaccuaguaaag

SEQ ID NO: 1642608 - RNA, 19 nt, Homo sapiens
  misc_RNA (1)...(19): siRNA sense strand
gcuagccacugccaauaaa

SEQ ID NO: 1642609 - RNA, 19 nt, Homo sapiens
  misc_RNA (1)...(19): siRNA sense strand
gcacuuguauuggaauugu

SEQ ID NO: 1642610 - RNA, 19 nt, Homo sapiens
  misc_RNA (1)...(19): siRNA sense strand
ugaagaaauugcagaacuu

SEQ ID NO: 1642611 - RNA, 19 nt, Homo sapiens
  misc_RNA (1)...(19): siRNA sense strand
gcaccauaccuaccacaua

SEQ ID NO: 1642612 - RNA, 19 nt, Homo sapiens
  misc_RNA (1)...(19): siRNA sense strand
gaagugcugcuacugauau

SEQ ID NO: 1642613 - RNA, 19 nt, Homo sapiens
  misc_RNA (1)...(19): siRNA sense strand
ugacuuggcccuuagcuuu

SEQ ID NO: 1642614 - RNA, 19 nt, Homo sapiens
  misc_RNA (1)...(19): siRNA sense strand
agacugaauuucuggguuu

SEQ ID NO: 1642615 - RNA, 19 nt, Homo sapiens
  misc_RNA (1)...(19): siRNA sense strand
gacaggaauugguuaacuu

SEQ ID NO: 1642616 - RNA, 19 nt, Homo sapiens
  misc_RNA (1)...(19): siRNA sense strand
caucagacauacagaguuc

SEQ ID NO: 1642617 - RNA, 19 nt, Homo sapiens
  misc_RNA (1)...(19): siRNA sense strand
ccacuuguaugaaauuauc

SEQ ID NO: 1642618 - RNA, 19 nt, Homo sapiens
  misc_RNA (1)...(19): siRNA sense strand
gaaaauaugucagguucaa

SEQ ID NO: 1642619 - RNA, 19 nt, Homo sapiens
  misc_RNA (1)...(19): siRNA sense strand
cauauuaccagcuuuagaa

SEQ ID NO: 1642620 - RNA, 19 nt, Homo sapiens
  misc_RNA (1)...(19): siRNA sense strand
gcuuagaauugccaucuug

SEQ ID NO: 1642621 - RNA, 19 nt, Homo sapiens
  misc_RNA (1)...(19): siRNA sense strand
gaggagcaguccagcuuau

SEQ ID NO: 1642622 - RNA, 19 nt, Homo sapiens
  misc_RNA (1)...(19): siRNA sense strand
gggcauauuaccagcuuua

SEQ ID NO: 1642623 - RNA, 19 nt, Homo sapiens
  misc_RNA (1)...(19): siRNA sense strand
aaacacagggaauuucuaa

SEQ ID NO: 1642624 - RNA, 19 nt, Homo sapiens
  misc_RNA (1)...(19): siRNA sense strand
ugauacagauccugaacuu

SEQ ID NO: 1642625 - RNA, 19 nt, Homo sapiens
  misc_RNA (1)...(19): siRNA sense strand
uaagucgccuugaagaaau

SEQ ID NO: 1642626 - RNA, 19 nt, Homo sapiens
  misc_RNA (1)...(19): siRNA sense strand
ccacauaaagaacuacauu

SEQ ID NO: 1642627 - RNA, 19 nt, Homo sapiens
  misc_RNA (1)...(19): siRNA sense strand
acagggaauuucuaacaaa

SEQ ID NO: 1642628 - RNA, 19 nt, Homo sapiens
  misc_RNA (1)...(19): siRNA sense strand
gaagaaauugcagaacuug

SEQ ID NO: 1642629 - RNA, 19 nt, Homo sapiens
  misc_RNA (1)...(19): siRNA sense strand
ucaucaaccucauuauaga

SEQ ID NO: 1642630 - RNA, 19 nt, Homo sapiens
  misc_RNA (1)...(19): siRNA sense strand
cgacgguucucuacuuuua

SEQ ID NO: 1642631 - RNA, 19 nt, Homo sapiens
  misc_RNA (1)...(19): siRNA sense strand
uaaagaagugauucccaua

SEQ ID NO: 1642632 - RNA, 19 nt, Homo sapiens
  misc_RNA (1)...(19): siRNA sense strand
ucucacugcuccuuuacua

SEQ ID NO: 1642633 - RNA, 19 nt, Homo sapiens
  misc_RNA (1)...(19): siRNA sense strand
ggcaucaucuuuaccuuca

SEQ ID NO: 1642634 - RNA, 19 nt, Homo sapiens
  misc_RNA (1)...(19): siRNA sense strand
gcgaagugcugcuacugau

SEQ ID NO: 1642635 - RNA, 19 nt, Homo sapiens
  misc_RNA (1)...(19): siRNA sense strand
uaacacugcauaccagaaa

SEQ ID NO: 1642636 - RNA, 19 nt, Homo sapiens
  misc_RNA (1)...(19): siRNA sense strand
ggaggagcaguccagcuua

SEQ ID NO: 1642637 - RNA, 19 nt, Homo sapiens
  misc_RNA (1)...(19): siRNA sense strand
caacagaaugaugaugaua

SEQ ID NO: 1642638 - RNA, 19 nt, Homo sapiens
  misc_RNA (1)...(19): siRNA sense strand
gcaggaggcacaacagaau

SEQ ID NO: 1642639 - RNA, 19 nt, Homo sapiens
  misc_RNA (1)...(19): siRNA sense strand
uaugucagguucaaggaaa

SEQ ID NO: 1642640 - RNA, 19 nt, Homo sapiens
  misc_RNA (1)...(19): siRNA sense strand
gaacuuguggcaucaucuu

SEQ ID NO: 1642641 - RNA, 19 nt, Homo sapiens
  misc_RNA (1)...(19): siRNA sense strand
auugccaucuugugaauua

SEQ ID NO: 1642642 - RNA, 19 nt, Homo sapiens
  misc_RNA (1)...(19): siRNA sense strand
cagaagacaaaccuaguaa

SEQ ID NO: 1642643 - RNA, 19 nt, Homo sapiens
  misc_RNA (1)...(19): siRNA sense strand
ugucaaacaugggcauauu

SEQ ID NO: 1642644 - RNA, 19 nt, Homo sapiens
  misc_RNA (1)...(19): siRNA sense strand
gucauuggauguuuagaau

SEQ ID NO: 1642645 - RNA, 19 nt, Homo sapiens
  misc_RNA (1)...(19): siRNA sense strand
cugcaccacuuguaugaaa

SEQ ID NO: 1642646 - RNA, 19 nt, Homo sapiens
  misc_RNA (1)...(19): siRNA sense strand
gugaugaaauuugggagaa

SEQ ID NO: 1642647 - RNA, 19 nt, Homo sapiens
  misc_RNA (1)...(19): siRNA sense strand
gcaaauacaacagaagaca

SEQ ID NO: 1642648 - RNA, 19 nt, Homo sapiens
  misc_RNA (1)...(19): siRNA sense strand
uagaauaugauccugcuuu

SEQ ID NO: 1642649 - RNA, 19 nt, Homo sapiens
  misc_RNA (1)...(19): siRNA sense strand
gaaauuaucaaaggcaucu

SEQ ID NO: 1642650 - RNA, 19 nt, Homo sapiens
  misc_RNA (1)...(19): siRNA sense strand
gaauuaagucgccuugaag

SEQ ID NO: 1642651 - RNA, 19 nt, Homo sapiens
  misc_RNA (1)...(19): siRNA sense strand
aauuaugacuuggcccuua

SEQ ID NO: 1642652 - RNA, 19 nt, Homo sapiens
  misc_RNA (1)...(19): siRNA sense strand
uaacagaugaagcaacaga

SEQ ID NO: 1642653 - RNA, 19 nt, Homo sapiens
  misc_RNA (1)...(19): siRNA sense strand
cucaggaccuuguggauga

SEQ ID NO: 1642654 - RNA, 19 nt, Homo sapiens
  misc_RNA (1)...(19): siRNA sense strand
uugcacaacuaacagauga

SEQ ID NO: 1642655 - RNA, 19 nt, Homo sapiens
  misc_RNA (1)...(19): siRNA sense strand
gcaccacuuguaugaaauu

SEQ ID NO: 1642656 - RNA, 19 nt, Homo sapiens
  misc_RNA (1)...(19): siRNA sense strand
ggacugcaccacuuguaug

SEQ ID NO: 1642657 - RNA, 19 nt, Homo sapiens
  misc_RNA (1)...(19): siRNA sense strand
ucaugugugugaagauuug

SEQ ID NO: 1642658 - RNA, 19 nt, Homo sapiens
  misc_RNA (1)...(19): siRNA sense strand
cacagggaauuucuaacaa

SEQ ID NO: 1642659 - RNA, 19 nt, Homo sapiens
  misc_RNA (1)...(19): siRNA sense strand
gauccugagcugaaacaaa

SEQ ID NO: 1642660 - RNA, 19 nt, Homo sapiens
  misc_RNA (1)...(19): siRNA sense strand
cagccaaguuuaaagaagu

SEQ ID NO: 1642661 - RNA, 19 nt, Homo sapiens
  misc_RNA (1)...(19): siRNA sense strand
aaagcuggaugugaugaaa

SEQ ID NO: 1642662 - RNA, 19 nt, Homo sapiens
  misc_RNA (1)...(19): siRNA sense strand
ucagacugcccaacuauug

SEQ ID NO: 1642663 - RNA, 19 nt, Homo sapiens
  misc_RNA (1)...(19): siRNA sense strand
gcauguugcaggaagauga

SEQ ID NO: 1642664 - RNA, 19 nt, Homo sapiens
  misc_RNA (1)...(19): siRNA sense strand
agagauuguuggcauguug

SEQ ID NO: 1642665 - RNA, 19 nt, Homo sapiens
  misc_RNA (1)...(19): siRNA sense strand
agacauacagaguucagua

SEQ ID NO: 1642666 - RNA, 19 nt, Homo sapiens
  misc_RNA (1)...(19): siRNA sense strand
uagaauugccaucuuguga

SEQ ID NO: 1642667 - RNA, 19 nt, Homo sapiens
  misc_RNA (1)...(19): siRNA sense strand
gucaaacaugggcauauua

SEQ ID NO: 1642668 - RNA, 19 nt, Homo sapiens
  misc_RNA (1)...(19): siRNA sense strand
acuaacagaugaagcaaca

SEQ ID NO: 1642669 - RNA, 19 nt, Homo sapiens
  misc_RNA (1)...(19): siRNA sense strand
uaaauccuaacacugcaua

SEQ ID NO: 1642670 - RNA, 19 nt, Homo sapiens
  misc_RNA (1)...(19): siRNA sense strand
acagaagacaaaccuagua

SEQ ID NO: 1642671 - RNA, 19 nt, Homo sapiens
  misc_RNA (1)...(19): siRNA sense strand
cacaacagaaugaugauga

SEQ ID NO: 1642672 - RNA, 19 nt, Homo sapiens
  misc_RNA (1)...(19): siRNA sense strand
uuaagucgccuugaagaaa

SEQ ID NO: 1642673 - RNA, 19 nt, Homo sapiens
  misc_RNA (1)...(19): siRNA sense strand
caaauacaacagaagacaa

SEQ ID NO: 1642674 - RNA, 19 nt, Homo sapiens
  misc_RNA (1)...(19): siRNA sense strand
uagcaaauacaacagaaga

SEQ ID NO: 1642675 - RNA, 19 nt, Homo sapiens
  misc_RNA (1)...(19): siRNA sense strand
aaagacaggaauugguuaa

SEQ ID NO: 1642676 - RNA, 19 nt, Homo sapiens
  misc_RNA (1)...(19): siRNA sense strand
cagaugaagcaacagauga

SEQ ID NO: 1642677 - RNA, 19 nt, Homo sapiens
  misc_RNA (1)...(19): siRNA sense strand
gaauaugauccugcuuuau

SEQ ID NO: 1642678 - RNA, 19 nt, Homo sapiens
  misc_RNA (1)...(19): siRNA sense strand
gaggagcguuuugaugaua

SEQ ID NO: 1642679 - RNA, 19 nt, Homo sapiens
  misc_RNA (1)...(19): siRNA sense strand
cgaagugcugcuacugaua

SEQ ID NO: 1642680 - RNA, 19 nt, Homo sapiens
  misc_RNA (1)...(19): siRNA sense strand
gcauauuaccagcuuuaga

SEQ ID NO: 1642681 - RNA, 19 nt, Homo sapiens
  misc_RNA (1)...(19): siRNA sense strand
ucugaagaauguauaaugg

SEQ ID NO: 1642682 - RNA, 19 nt, Homo sapiens
  misc_RNA (1)...(19): siRNA sense strand
caccacuuguaugaaauua

SEQ ID NO: 1642683 - RNA, 19 nt, Homo sapiens
  misc_RNA (1)...(19): siRNA sense strand
aauaugauccugcuuuauc

SEQ ID NO: 1642684 - RNA, 19 nt, Homo sapiens
  misc_RNA (1)...(19): siRNA sense strand
acuauuggcacuuguauug

SEQ ID NO: 1642685 - RNA, 19 nt, Homo sapiens
  misc_RNA (1)...(19): siRNA sense strand
ugaagcaacagaugaggaa

SEQ ID NO: 1642686 - RNA, 19 nt, Homo sapiens
  misc_RNA (1)...(19): siRNA sense strand
aagaagugauucccauauc

SEQ ID NO: 1642687 - RNA, 19 nt, Homo sapiens
  misc_RNA (1)...(19): siRNA sense strand
acacagggaauuucuaaca

SEQ ID NO: 1642688 - RNA, 19 nt, Homo sapiens
  misc_RNA (1)...(19): siRNA sense strand
aaagaagugauucccauau

SEQ ID NO: 1642689 - RNA, 19 nt, Homo sapiens
  misc_RNA (1)...(19): siRNA sense strand
gguacgagaguuugucaug

SEQ ID NO: 1642690 - RNA, 19 nt, Homo sapiens
  misc_RNA (1)...(19): siRNA sense strand
uguucucacugcuccuuua

SEQ ID NO: 1642691 - RNA, 19 nt, Homo sapiens
  misc_RNA (1)...(19): siRNA sense strand
ccuaccacauaaagaacua

SEQ ID NO: 1642692 - RNA, 19 nt, Homo sapiens
  misc_RNA (1)...(19): siRNA sense strand
caacuauuggcacuuguau

SEQ ID NO: 1642693 - RNA, 19 nt, Homo sapiens
  misc_RNA (1)...(19): siRNA sense strand
gaugaacucugccauaaua

SEQ ID NO: 1642694 - RNA, 19 nt, Homo sapiens
  misc_RNA (1)...(19): siRNA sense strand
gaagagaugugguuuaaca

SEQ ID NO: 1642695 - RNA, 19 nt, Homo sapiens
  misc_RNA (1)...(19): siRNA sense strand
gaagauacguuaccauugu

SEQ ID NO: 1642696 - RNA, 19 nt, Homo sapiens
  misc_RNA (1)...(19): siRNA sense strand
ggaaagcacuggaagaugu

SEQ ID NO: 1642697 - RNA, 19 nt, Homo sapiens
  misc_RNA (1)...(19): siRNA sense strand
ggacgucauuggauguuua

SEQ ID NO: 1642698 - RNA, 19 nt, Homo sapiens
  misc_RNA (1)...(19): siRNA sense strand
uaucaacacuucacucuuu

SEQ ID NO: 1642699 - RNA, 19 nt, Homo sapiens
  misc_RNA (1)...(19): siRNA sense strand
gaaguuauguucucugaag

SEQ ID NO: 1642700 - RNA, 19 nt, Homo sapiens
  misc_RNA (1)...(19): siRNA sense strand
guacagacauuuaaaggau

SEQ ID NO: 1642701 - RNA, 19 nt, Homo sapiens
  misc_RNA (1)...(19): siRNA sense strand
gaagaagagaugugguuua

SEQ ID NO: 1642702 - RNA, 19 nt, Homo sapiens
  misc_RNA (1)...(19): siRNA sense strand
caccauaccuaccacauaa

SEQ ID NO: 1642703 - RNA, 19 nt, Homo sapiens
  misc_RNA (1)...(19): siRNA sense strand
ggagagugcuaguucuuau

SEQ ID NO: 1642704 - RNA, 19 nt, Homo sapiens
  misc_RNA (1)...(19): siRNA sense strand
aagaagagaugugguuuaa

SEQ ID NO: 1642705 - RNA, 19 nt, Homo sapiens
  misc_RNA (1)...(19): siRNA sense strand
ccagaacacuagaagauga

SEQ ID NO: 1642706 - RNA, 19 nt, Homo sapiens
  misc_RNA (1)...(19): siRNA sense strand
agacaaaccuaguaaagau

SEQ ID NO: 1642707 - RNA, 19 nt, Homo sapiens
  misc_RNA (1)...(19): siRNA sense strand
ggacaucacucaggaccuu

SEQ ID NO: 1642708 - RNA, 19 nt, Homo sapiens
  misc_RNA (1)...(19): siRNA sense strand
gagcgacgguucucuacuu

SEQ ID NO: 1642709 - RNA, 19 nt, Homo sapiens
  misc_RNA (1)...(19): siRNA sense strand
ucucauacuugguugaaua

SEQ ID NO: 1642710 - RNA, 19 nt, Homo sapiens
  misc_RNA (1)...(19): siRNA sense strand
agaauaugauccugcuuua

SEQ ID NO: 1642711 - RNA, 19 nt, Homo sapiens
  misc_RNA (1)...(19): siRNA sense strand
ugaauuaagucgccuugaa

SEQ ID NO: 1642712 - RNA, 19 nt, Homo sapiens
  misc_RNA (1)...(19): siRNA sense strand
gcucaucaaccucauuaua

SEQ ID NO: 1642713 - RNA, 19 nt, Homo sapiens
  misc_RNA (1)...(19): siRNA sense strand
gcaagauaaucccaaacuu

SEQ ID NO: 1642714 - RNA, 19 nt, Homo sapiens
  misc_RNA (1)...(19): siRNA sense strand
gaauugccaucuugugaau

SEQ ID NO: 1642715 - RNA, 19 nt, Homo sapiens
  misc_RNA (1)...(19): siRNA sense strand
ucacagauaucgaagagau

SEQ ID NO: 1642716 - RNA, 19 nt, Homo sapiens
  misc_RNA (1)...(19): siRNA sense strand
caacaggacacucugauug

SEQ ID NO: 1642717 - RNA, 19 nt, Homo sapiens
  misc_RNA (1)...(19): siRNA sense strand
gaagacaaaccuaguaaag

SEQ ID NO: 1642718 - RNA, 19 nt, Homo sapiens
  misc_RNA (1)...(19): siRNA sense strand
gcuagccacugccaauaaa

SEQ ID NO: 1642719 - RNA, 19 nt, Homo sapiens
  misc_RNA (1)...(19): siRNA sense strand
gcacuuguauuggaauugu

SEQ ID NO: 1642720 - RNA, 19 nt, Homo sapiens
  misc_RNA (1)...(19): siRNA sense strand
caaagagaaaggcaagaua

SEQ ID NO: 1642721 - RNA, 19 nt, Homo sapiens
  misc_RNA (1)...(19): siRNA sense strand
ugaagaaauugcagaacuu

SEQ ID NO: 1642722 - RNA, 19 nt, Homo sapiens
  misc_RNA (1)...(19): siRNA sense strand
gacaguaugcguuccauuu

SEQ ID NO: 1642723 - RNA, 19 nt, Homo sapiens
  misc_RNA (1)...(19): siRNA sense strand
gcaccauaccuaccacaua

SEQ ID NO: 1642724 - RNA, 19 nt, Homo sapiens
  misc_RNA (1)...(19): siRNA sense strand
gaagugcugcuacugauau

SEQ ID NO: 1642725 - RNA, 19 nt, Homo sapiens
  misc_RNA (1)...(19): siRNA sense strand
ugacuuggcccuuagcuuu

SEQ ID NO: 1642726 - RNA, 19 nt, Homo sapiens
  misc_RNA (1)...(19): siRNA sense strand
aaagagaaaggcaagauaa

SEQ ID NO: 1642727 - RNA, 19 nt, Homo sapiens
  misc_RNA (1)...(19): siRNA sense strand
uacaaccgcuacauaauga

SEQ ID NO: 1642728 - RNA, 19 nt, Homo sapiens
  misc_RNA (1)...(19): siRNA sense strand
agacugaauuucuggguuu

SEQ ID NO: 1642729 - RNA, 19 nt, Homo sapiens
  misc_RNA (1)...(19): siRNA sense strand
gacaggaauugguuaacuu

SEQ ID NO: 1642730 - RNA, 19 nt, Homo sapiens
  misc_RNA (1)...(19): siRNA sense strand
caucagacauacagaguuc

SEQ ID NO: 1642731 - RNA, 19 nt, Homo sapiens
  misc_RNA (1)...(19): siRNA sense strand
ccacuuguaugaaauuauc

SEQ ID NO: 1642732 - RNA, 19 nt, Homo sapiens
  misc_RNA (1)...(19): siRNA sense strand
uaacugcucauguaauuga

SEQ ID NO: 1642733 - RNA, 19 nt, Homo sapiens
  misc_RNA (1)...(19): siRNA sense strand
cggcagcuauuacuacaaa

SEQ ID NO: 1642734 - RNA, 19 nt, Homo sapiens
  misc_RNA (1)...(19): siRNA sense strand
uaacacagaugaagaugac

SEQ ID NO: 1642735 - RNA, 19 nt, Homo sapiens
  misc_RNA (1)...(19): siRNA sense strand
gaaagcacuggaagaugua

SEQ ID NO: 1642736 - RNA, 19 nt, Homo sapiens
  misc_RNA (1)...(19): siRNA sense strand
gaaaauaugucagguucaa

SEQ ID NO: 1642737 - RNA, 19 nt, Homo sapiens
  misc_RNA (1)...(19): siRNA sense strand
cauauuaccagcuuuagaa

SEQ ID NO: 1642738 - RNA, 19 nt, Homo sapiens
  misc_RNA (1)...(19): siRNA sense strand
gcuuagaauugccaucuug

SEQ ID NO: 1642739 - RNA, 19 nt, Homo sapiens
  misc_RNA (1)...(19): siRNA sense strand
gaggagcaguccagcuuau

SEQ ID NO: 1642740 - RNA, 19 nt, Homo sapiens
  misc_RNA (1)...(19): siRNA sense strand
gggcauauuaccagcuuua

SEQ ID NO: 1642741 - RNA, 19 nt, Homo sapiens
  misc_RNA (1)...(19): siRNA sense strand
aaacacagggaauuucuaa

SEQ ID NO: 1642742 - RNA, 19 nt, Homo sapiens
  misc_RNA (1)...(19): siRNA sense strand
ugauacagauccugaacuu

SEQ ID NO: 1642743 - RNA, 19 nt, Homo sapiens
  misc_RNA (1)...(19): siRNA sense strand
ggaagauacguuaccauug

SEQ ID NO: 1642744 - RNA, 19 nt, Homo sapiens
  misc_RNA (1)...(19): siRNA sense strand
gcuacaaucugaugaacuc

SEQ ID NO: 1642745 - RNA, 19 nt, Homo sapiens
  misc_RNA (1)...(19): siRNA sense strand
uaagucgccuugaagaaau

SEQ ID NO: 1642746 - RNA, 19 nt, Homo sapiens
  misc_RNA (1)...(19): siRNA sense strand
ccacauaaagaacuacauu

SEQ ID NO: 1642747 - RNA, 19 nt, Homo sapiens
  misc_RNA (1)...(19): siRNA sense strand
acagggaauuucuaacaaa

SEQ ID NO: 1642748 - RNA, 19 nt, Homo sapiens
  misc_RNA (1)...(19): siRNA sense strand
gaagaaauugcagaacuug

SEQ ID NO: 1642749 - RNA, 19 nt, Homo sapiens
  misc_RNA (1)...(19): siRNA sense strand
cgacgguucucuacuuuua

SEQ ID NO: 1642750 - RNA, 19 nt, Homo sapiens
  misc_RNA (1)...(19): siRNA sense strand
ccagucaucuacaacaaau

SEQ ID NO: 1642751 - RNA, 19 nt, Homo sapiens
  misc_RNA (1)...(19): siRNA sense strand
gaagaugacauggaagaug

SEQ ID NO: 1642752 - RNA, 19 nt, Homo sapiens
  misc_RNA (1)...(19): siRNA sense strand
agaugaagaugacauggaa

SEQ ID NO: 1642753 - RNA, 19 nt, Homo sapiens
  misc_RNA (1)...(19): siRNA sense strand
uggaagauguagauuaugu

SEQ ID NO: 1642754 - RNA, 19 nt, Homo sapiens
  misc_RNA (1)...(19): siRNA sense strand
cugaugaacucugccauaa

SEQ ID NO: 1642755 - RNA, 19 nt, Homo sapiens
  misc_RNA (1)...(19): siRNA sense strand
ucaucaaccucauuauaga

SEQ ID NO: 1642756 - RNA, 19 nt, Homo sapiens
  misc_RNA (1)...(19): siRNA sense strand
uaaagaagugauucccaua

SEQ ID NO: 1642757 - RNA, 19 nt, Homo sapiens
  misc_RNA (1)...(19): siRNA sense strand
ggaugaagauaaggaagau

SEQ ID NO: 1642758 - RNA, 19 nt, Homo sapiens
  misc_RNA (1)...(19): siRNA sense strand
ucgaagagaugccagaaca

SEQ ID NO: 1642759 - RNA, 19 nt, Homo sapiens
  misc_RNA (1)...(19): siRNA sense strand
ggaagauguagauuaugua

SEQ ID NO: 1642760 - RNA, 19 nt, Homo sapiens
  misc_RNA (1)...(19): siRNA sense strand
ucucacugcuccuuuacua

SEQ ID NO: 1642761 - RNA, 19 nt, Homo sapiens
  misc_RNA (1)...(19): siRNA sense strand
ggcaucaucuuuaccuuca

SEQ ID NO: 1642762 - RNA, 19 nt, Homo sapiens
  misc_RNA (1)...(19): siRNA sense strand
cggcagagcccaaguuuca

SEQ ID NO: 1642763 - RNA, 19 nt, Homo sapiens
  misc_RNA (1)...(19): siRNA sense strand
uggagaagcuguagugucu

SEQ ID NO: 1642764 - RNA, 19 nt, Homo sapiens
  misc_RNA (1)...(19): siRNA sense strand
gcgaagugcugcuacugau

SEQ ID NO: 1642765 - RNA, 19 nt, Homo sapiens
  misc_RNA (1)...(19): siRNA sense strand
gcaggaggcacaacagaau

SEQ ID NO: 1642766 - RNA, 19 nt, Homo sapiens
  misc_RNA (1)...(19): siRNA sense strand
ucgugggucugguagauua

SEQ ID NO: 1642767 - RNA, 19 nt, Homo sapiens
  misc_RNA (1)...(19): siRNA sense strand
uaacacugcauaccagaaa

SEQ ID NO: 1642768 - RNA, 19 nt, Homo sapiens
  misc_RNA (1)...(19): siRNA sense strand
aaacugagauuugaacaac

SEQ ID NO: 1642769 - RNA, 19 nt, Homo sapiens
  misc_RNA (1)...(19): siRNA sense strand
ggaucccgcuacaaucuga

SEQ ID NO: 1642770 - RNA, 19 nt, Homo sapiens
  misc_RNA (1)...(19): siRNA sense strand
ggaggagcaguccagcuua

SEQ ID NO: 1642771 - RNA, 19 nt, Homo sapiens
  misc_RNA (1)...(19): siRNA sense strand
caacagaaugaugaugaua

SEQ ID NO: 1642772 - RNA, 19 nt, Homo sapiens
  misc_RNA (1)...(19): siRNA sense strand
uaugucagguucaaggaaa

SEQ ID NO: 1642773 - RNA, 19 nt, Homo sapiens
  misc_RNA (1)...(19): siRNA sense strand
acuggaagauguagauuau

SEQ ID NO: 1642774 - RNA, 19 nt, Homo sapiens
  misc_RNA (1)...(19): siRNA sense strand
gaacuuguggcaucaucuu

SEQ ID NO: 1642775 - RNA, 19 nt, Homo sapiens
  misc_RNA (1)...(19): siRNA sense strand
auugccaucuugugaauua

SEQ ID NO: 1642776 - RNA, 19 nt, Homo sapiens
  misc_RNA (1)...(19): siRNA sense strand
cagaagacaaaccuaguaa

SEQ ID NO: 1642777 - RNA, 19 nt, Homo sapiens
  misc_RNA (1)...(19): siRNA sense strand
ugucaaacaugggcauauu

SEQ ID NO: 1642778 - RNA, 19 nt, Homo sapiens
  misc_RNA (1)...(19): siRNA sense strand
gucauuggauguuuagaau

SEQ ID NO: 1642779 - RNA, 19 nt, Homo sapiens
  misc_RNA (1)...(19): siRNA sense strand
cugcaccacuuguaugaaa

SEQ ID NO: 1642780 - RNA, 19 nt, Homo sapiens
  misc_RNA (1)...(19): siRNA sense strand
gaauuaagucgccuugaag

SEQ ID NO: 1642781 - RNA, 19 nt, Homo sapiens
  misc_RNA (1)...(19): siRNA sense strand
aagauaaucccaaacuuga

SEQ ID NO: 1642782 - RNA, 19 nt, Homo sapiens
  misc_RNA (1)...(19): siRNA sense strand
gcaaauacaacagaagaca

SEQ ID NO: 1642783 - RNA, 19 nt, Homo sapiens
  misc_RNA (1)...(19): siRNA sense strand
gugaugaaauuugggagaa

SEQ ID NO: 1642784 - RNA, 19 nt, Homo sapiens
  misc_RNA (1)...(19): siRNA sense strand
uagaauaugauccugcuuu

SEQ ID NO: 1642785 - RNA, 19 nt, Homo sapiens
  misc_RNA (1)...(19): siRNA sense strand
gaaauuaucaaaggcaucu

SEQ ID NO: 1642786 - RNA, 19 nt, Homo sapiens
  misc_RNA (1)...(19): siRNA sense strand
uaacagaugaagcaacaga

SEQ ID NO: 1642787 - RNA, 19 nt, Homo sapiens
  misc_RNA (1)...(19): siRNA sense strand
gagcccaaguuucaagcuu

SEQ ID NO: 1642788 - RNA, 19 nt, Homo sapiens
  misc_RNA (1)...(19): siRNA sense strand
ggaagauggagaagcugua

SEQ ID NO: 1642789 - RNA, 19 nt, Homo sapiens
  misc_RNA (1)...(19): siRNA sense strand
aucauuaacugcucaugua

SEQ ID NO: 1642790 - RNA, 19 nt, Homo sapiens
  misc_RNA (1)...(19): siRNA sense strand
caauggaucccgcuacaau

SEQ ID NO: 1642791 - RNA, 19 nt, Homo sapiens
  misc_RNA (1)...(19): siRNA sense strand
aauuaugacuuggcccuua

SEQ ID NO: 1642792 - RNA, 19 nt, Homo sapiens
  misc_RNA (1)...(19): siRNA sense strand
ccaguggaacgaagacuaa

SEQ ID NO: 1642793 - RNA, 19 nt, Homo sapiens
  misc_RNA (1)...(19): siRNA sense strand
ggaaguagcucagaaguuu

SEQ ID NO: 1642794 - RNA, 19 nt, Homo sapiens
  misc_RNA (1)...(19): siRNA sense strand
ucaaacagcuggccaugaa

SEQ ID NO: 1642795 - RNA, 19 nt, Homo sapiens
  misc_RNA (1)...(19): siRNA sense strand
ccaaaggcuuguccuauga

SEQ ID NO: 1642796 - RNA, 19 nt, Homo sapiens
  misc_RNA (1)...(19): siRNA sense strand
gagaugggauaaguucaua

SEQ ID NO: 1642797 - RNA, 19 nt, Homo sapiens
  misc_RNA (1)...(19): siRNA sense strand
caaggaagcucugaugauc

SEQ ID NO: 1642798 - RNA, 19 nt, Homo sapiens
  misc_RNA (1)...(19): siRNA sense strand
gaagagaugggauaaguuc

SEQ ID NO: 1642799 - RNA, 19 nt, Homo sapiens
  misc_RNA (1)...(19): siRNA sense strand
gaagaguggucagugaaga

SEQ ID NO: 1642800 - RNA, 19 nt, Homo sapiens
  misc_RNA (1)...(19): siRNA sense strand
gcucagaaguuuguggaaa

SEQ ID NO: 1642801 - RNA, 19 nt, Homo sapiens
  misc_RNA (1)...(19): siRNA sense strand
gccaaaggcuuguccuaug

SEQ ID NO: 1642802 - RNA, 19 nt, Homo sapiens
  misc_RNA (1)...(19): siRNA sense strand
gccaugaacucuaucaagu

SEQ ID NO: 1642803 - RNA, 19 nt, Homo sapiens
  misc_RNA (1)...(19): siRNA sense strand
gacgaagaguggucaguga

SEQ ID NO: 1642804 - RNA, 19 nt, Homo sapiens
  misc_RNA (1)...(19): siRNA sense strand
ggaagaagagaugggauaa

SEQ ID NO: 1642805 - RNA, 19 nt, Homo sapiens
  misc_RNA (1)...(19): siRNA sense strand
ggccauggauuugcuuuga

SEQ ID NO: 1642806 - RNA, 19 nt, Homo sapiens
  misc_RNA (1)...(19): siRNA sense strand
ccaaagauguggcugucau

SEQ ID NO: 1642807 - RNA, 19 nt, Homo sapiens
  misc_RNA (1)...(19): siRNA sense strand
gaaacuggugucugacuug

SEQ ID NO: 1642808 - RNA, 19 nt, Homo sapiens
  misc_RNA (1)...(19): siRNA sense strand
gcucugaugcugaacacua

SEQ ID NO: 1642809 - RNA, 19 nt, Homo sapiens
  misc_RNA (1)...(19): siRNA sense strand
aagaagagaugggauaagu

SEQ ID NO: 1642810 - RNA, 19 nt, Homo sapiens
  misc_RNA (1)...(19): siRNA sense strand
gcugaacacuaccagaauc

SEQ ID NO: 1642811 - RNA, 19 nt, Homo sapiens
  misc_RNA (1)...(19): siRNA sense strand
agauguggcuacaaaguga

SEQ ID NO: 1642812 - RNA, 19 nt, Homo sapiens
  misc_RNA (1)...(19): siRNA sense strand
aguggucagugaagacuua

SEQ ID NO: 1642813 - RNA, 19 nt, Homo sapiens
  misc_RNA (1)...(19): siRNA sense strand
ccaugaacucuaucaagua

SEQ ID NO: 1642814 - RNA, 19 nt, Homo sapiens
  misc_RNA (1)...(19): siRNA sense strand
caugaacucuaucaaguac

SEQ ID NO: 1642815 - RNA, 19 nt, Homo sapiens
  misc_RNA (1)...(19): siRNA sense strand
gcaggguacuuccauagac

SEQ ID NO: 1642816 - RNA, 19 nt, Homo sapiens
  misc_RNA (1)...(19): siRNA sense strand
auggaaaucuggaagaaga

SEQ ID NO: 1642817 - RNA, 19 nt, Homo sapiens
  misc_RNA (1)...(19): siRNA sense strand
gagagcaccaugacgaaga

SEQ ID NO: 1642818 - RNA, 19 nt, Homo sapiens
  misc_RNA (1)...(19): siRNA sense strand
aaacuggugucugacuuga

SEQ ID NO: 1642819 - RNA, 19 nt, Homo sapiens
  misc_RNA (1)...(19): siRNA sense strand
agugaagacuuaccaggaa

SEQ ID NO: 1642820 - RNA, 19 nt, Homo sapiens
  misc_RNA (1)...(19): siRNA sense strand
gcagauguggcuacaaagu

SEQ ID NO: 1642821 - RNA, 19 nt, Homo sapiens
  misc_RNA (1)...(19): siRNA sense strand
ucauggaaaucuggaagaa

SEQ ID NO: 1642822 - RNA, 19 nt, Homo sapiens
  misc_RNA (1)...(19): siRNA sense strand
ugaaacuggugucugacuu

SEQ ID NO: 1642823 - RNA, 19 nt, Homo sapiens
  misc_RNA (1)...(19): siRNA sense strand
gaaguagcucagaaguuug

SEQ ID NO: 1642824 - RNA, 19 nt, Homo sapiens
  misc_RNA (1)...(19): siRNA sense strand
uggaugcucugaugcugaa

SEQ ID NO: 1642825 - RNA, 19 nt, Homo sapiens
  misc_RNA (1)...(19): siRNA sense strand
uggaagaagagaugggaua

SEQ ID NO: 1642826 - RNA, 19 nt, Homo sapiens
  misc_RNA (1)...(19): siRNA sense strand
cuacaaggaagcucugaug

SEQ ID NO: 1642827 - RNA, 19 nt, Homo sapiens
  misc_RNA (1)...(19): siRNA sense strand
auagaagucugucccaucu

SEQ ID NO: 1642828 - RNA, 19 nt, Homo sapiens
  misc_RNA (1)...(19): siRNA sense strand
aaaaggacauccccauaga

SEQ ID NO: 1642829 - RNA, 19 nt, Homo sapiens
  misc_RNA (1)...(19): siRNA sense strand
aaaggcuuguccuaugauu

SEQ ID NO: 1642830 - RNA, 19 nt, Homo sapiens
  misc_RNA (1)...(19): siRNA sense strand
guacccuguuggagaguga

SEQ ID NO: 1642831 - RNA, 19 nt, Homo sapiens
  misc_RNA (1)...(19): siRNA sense strand
ugcugaaacuggugucuga

SEQ ID NO: 1642832 - RNA, 19 nt, Homo sapiens
  misc_RNA (1)...(19): siRNA sense strand
gauaaguucauagcagaug

SEQ ID NO: 1642833 - RNA, 19 nt, Homo sapiens
  misc_RNA (1)...(19): siRNA sense strand
ggaaaucuggaagaagaga

SEQ ID NO: 1642834 - RNA, 19 nt, Homo sapiens
  misc_RNA (1)...(19): siRNA sense strand
caggguacuuccauagaca

SEQ ID NO: 1642835 - RNA, 19 nt, Homo sapiens
  misc_RNA (1)...(19): siRNA sense strand
cuaaccaggugcugaaacu

SEQ ID NO: 1642836 - RNA, 19 nt, Homo sapiens
  misc_RNA (1)...(19): siRNA sense strand
agaagucugucccaucucu

SEQ ID NO: 1642837 - RNA, 19 nt, Homo sapiens
  misc_RNA (1)...(19): siRNA sense strand
cacccugaguuuauuggaa

SEQ ID NO: 1642838 - RNA, 19 nt, Homo sapiens
  misc_RNA (1)...(19): siRNA sense strand
ugaugacccagcuauguuu

SEQ ID NO: 1642839 - RNA, 19 nt, Homo sapiens
  misc_RNA (1)...(19): siRNA sense strand
gcucugaugacccagcuau

SEQ ID NO: 1642840 - RNA, 19 nt, Homo sapiens
  misc_RNA (1)...(19): siRNA sense strand
gaagaagagaugggauaag

SEQ ID NO: 1642841 - RNA, 19 nt, Homo sapiens
  misc_RNA (1)...(19): siRNA sense strand
ugaacucuaucaaguacag

SEQ ID NO: 1642842 - RNA, 19 nt, Homo sapiens
  misc_RNA (1)...(19): siRNA sense strand
cauucuggaugcucugaug

SEQ ID NO: 1642843 - RNA, 19 nt, Homo sapiens
  misc_RNA (1)...(19): siRNA sense strand
gaagucugucccaucucua

SEQ ID NO: 1642844 - RNA, 19 nt, Homo sapiens
  misc_RNA (1)...(19): siRNA sense strand
acaaggaagcucugaugau

SEQ ID NO: 1642845 - RNA, 19 nt, Homo sapiens
  misc_RNA (1)...(19): siRNA sense strand
uguccuaugauuucuauga

SEQ ID NO: 1642846 - RNA, 19 nt, Homo sapiens
  misc_RNA (1)...(19): siRNA sense strand
gccacuccuugcaugacua

SEQ ID NO: 1642847 - RNA, 19 nt, Homo sapiens
  misc_RNA (1)...(19): siRNA sense strand
gaugacccagcuauguuug

SEQ ID NO: 1642848 - RNA, 19 nt, Homo sapiens
  misc_RNA (1)...(19): siRNA sense strand
cagauguggcuacaaagug

SEQ ID NO: 1642849 - RNA, 19 nt, Homo sapiens
  misc_RNA (1)...(19): siRNA sense strand
ugauuucuaugaggucuuc

SEQ ID NO: 1642850 - RNA, 19 nt, Homo sapiens
  misc_RNA (1)...(19): siRNA sense strand
cagcuggccaugaacucua

SEQ ID NO: 1642851 - RNA, 19 nt, Homo sapiens
  misc_RNA (1)...(19): siRNA sense strand
ggccaugaacucuaucaag

SEQ ID NO: 1642852 - RNA, 19 nt, Homo sapiens
  misc_RNA (1)...(19): siRNA sense strand
uacaaggaagcucugauga

SEQ ID NO: 1642853 - RNA, 19 nt, Homo sapiens
  misc_RNA (1)...(19): siRNA sense strand
cuuguccuaugauuucuau

SEQ ID NO: 1642854 - RNA, 19 nt, Homo sapiens
  misc_RNA (1)...(19): siRNA sense strand
ggacauccccauagaaguc

SEQ ID NO: 1642855 - RNA, 19 nt, Homo sapiens
  misc_RNA (1)...(19): siRNA sense strand
acccugaguuuauuggaau

SEQ ID NO: 1642856 - RNA, 19 nt, Homo sapiens
  misc_RNA (1)...(19): siRNA sense strand
ggcaggguacuuccauaga

SEQ ID NO: 1642857 - RNA, 19 nt, Homo sapiens
  misc_RNA (1)...(19): siRNA sense strand
caaaggcuuguccuaugau

SEQ ID NO: 1642858 - RNA, 19 nt, Homo sapiens
  misc_RNA (1)...(19): siRNA sense strand
ggaaguagcucagaaguuu

SEQ ID NO: 1642859 - RNA, 19 nt, Homo sapiens
  misc_RNA (1)...(19): siRNA sense strand
ucaaacagcuggccaugaa

SEQ ID NO: 1642860 - RNA, 19 nt, Homo sapiens
  misc_RNA (1)...(19): siRNA sense strand
ccaaaggcuuguccuauga

SEQ ID NO: 1642861 - RNA, 19 nt, Homo sapiens
  misc_RNA (1)...(19): siRNA sense strand
gagaugggauaaguucaua

SEQ ID NO: 1642862 - RNA, 19 nt, Homo sapiens
  misc_RNA (1)...(19): siRNA sense strand
caaggaagcucugaugauc

SEQ ID NO: 1642863 - RNA, 19 nt, Homo sapiens
  misc_RNA (1)...(19): siRNA sense strand
gaagagaugggauaaguuc

SEQ ID NO: 1642864 - RNA, 19 nt, Homo sapiens
  misc_RNA (1)...(19): siRNA sense strand
gaagaguggucagugaaga

SEQ ID NO: 1642865 - RNA, 19 nt, Homo sapiens
  misc_RNA (1)...(19): siRNA sense strand
gcucagaaguuuguggaaa

SEQ ID NO: 1642866 - RNA, 19 nt, Homo sapiens
  misc_RNA (1)...(19): siRNA sense strand
gccaaaggcuuguccuaug

SEQ ID NO: 1642867 - RNA, 19 nt, Homo sapiens
  misc_RNA (1)...(19): siRNA sense strand
gccaugaacucuaucaagu

SEQ ID NO: 1642868 - RNA, 19 nt, Homo sapiens
  misc_RNA (1)...(19): siRNA sense strand
gacgaagaguggucaguga

SEQ ID NO: 1642869 - RNA, 19 nt, Homo sapiens
  misc_RNA (1)...(19): siRNA sense strand
ggaagaagagaugggauaa

SEQ ID NO: 1642870 - RNA, 19 nt, Homo sapiens
  misc_RNA (1)...(19): siRNA sense strand
ggccauggauuugcuuuga

SEQ ID NO: 1642871 - RNA, 19 nt, Homo sapiens
  misc_RNA (1)...(19): siRNA sense strand
ccaaagauguggcugucau

SEQ ID NO: 1642872 - RNA, 19 nt, Homo sapiens
  misc_RNA (1)...(19): siRNA sense strand
gaaacuggugucugacuug

SEQ ID NO: 1642873 - RNA, 19 nt, Homo sapiens
  misc_RNA (1)...(19): siRNA sense strand
gcucugaugcugaacacua

SEQ ID NO: 1642874 - RNA, 19 nt, Homo sapiens
  misc_RNA (1)...(19): siRNA sense strand
aagaagagaugggauaagu

SEQ ID NO: 1642875 - RNA, 19 nt, Homo sapiens
  misc_RNA (1)...(19): siRNA sense strand
gcugaacacuaccagaauc

SEQ ID NO: 1642876 - RNA, 19 nt, Homo sapiens
  misc_RNA (1)...(19): siRNA sense strand
agauguggcuacaaaguga

SEQ ID NO: 1642877 - RNA, 19 nt, Homo sapiens
  misc_RNA (1)...(19): siRNA sense strand
aguggucagugaagacuua

SEQ ID NO: 1642878 - RNA, 19 nt, Homo sapiens
  misc_RNA (1)...(19): siRNA sense strand
ccaugaacucuaucaagua

SEQ ID NO: 1642879 - RNA, 19 nt, Homo sapiens
  misc_RNA (1)...(19): siRNA sense strand
caugaacucuaucaaguac

SEQ ID NO: 1642880 - RNA, 19 nt, Homo sapiens
  misc_RNA (1)...(19): siRNA sense strand
gcaggguacuuccauagac

SEQ ID NO: 1642881 - RNA, 19 nt, Homo sapiens
  misc_RNA (1)...(19): siRNA sense strand
auggaaaucuggaagaaga

SEQ ID NO: 1642882 - RNA, 19 nt, Homo sapiens
  misc_RNA (1)...(19): siRNA sense strand
gagagcaccaugacgaaga

SEQ ID NO: 1642883 - RNA, 19 nt, Homo sapiens
  misc_RNA (1)...(19): siRNA sense strand
aaacuggugucugacuuga

SEQ ID NO: 1642884 - RNA, 19 nt, Homo sapiens
  misc_RNA (1)...(19): siRNA sense strand
agugaagacuuaccaggaa

SEQ ID NO: 1642885 - RNA, 19 nt, Homo sapiens
  misc_RNA (1)...(19): siRNA sense strand
gcagauguggcuacaaagu

SEQ ID NO: 1642886 - RNA, 19 nt, Homo sapiens
  misc_RNA (1)...(19): siRNA sense strand
ucauggaaaucuggaagaa

SEQ ID NO: 1642887 - RNA, 19 nt, Homo sapiens
  misc_RNA (1)...(19): siRNA sense strand
ugaaacuggugucugacuu

SEQ ID NO: 1642888 - RNA, 19 nt, Homo sapiens
  misc_RNA (1)...(19): siRNA sense strand
gaaguagcucagaaguuug

SEQ ID NO: 1642889 - RNA, 19 nt, Homo sapiens
  misc_RNA (1)...(19): siRNA sense strand
uggaugcucugaugcugaa

SEQ ID NO: 1642890 - RNA, 19 nt, Homo sapiens
  misc_RNA (1)...(19): siRNA sense strand
uggaagaagagaugggaua

SEQ ID NO: 1642891 - RNA, 19 nt, Homo sapiens
  misc_RNA (1)...(19): siRNA sense strand
cuacaaggaagcucugaug

SEQ ID NO: 1642892 - RNA, 19 nt, Homo sapiens
  misc_RNA (1)...(19): siRNA sense strand
auagaagucugucccaucu

SEQ ID NO: 1642893 - RNA, 19 nt, Homo sapiens
  misc_RNA (1)...(19): siRNA sense strand
aaaaggacauccccauaga

SEQ ID NO: 1642894 - RNA, 19 nt, Homo sapiens
  misc_RNA (1)...(19): siRNA sense strand
aaaggcuuguccuaugauu

SEQ ID NO: 1642895 - RNA, 19 nt, Homo sapiens
  misc_RNA (1)...(19): siRNA sense strand
guacccuguuggagaguga

SEQ ID NO: 1642896 - RNA, 19 nt, Homo sapiens
  misc_RNA (1)...(19): siRNA sense strand
ugcugaaacuggugucuga

SEQ ID NO: 1642897 - RNA, 19 nt, Homo sapiens
  misc_RNA (1)...(19): siRNA sense strand
gauaaguucauagcagaug

SEQ ID NO: 1642898 - RNA, 19 nt, Homo sapiens
  misc_RNA (1)...(19): siRNA sense strand
ggaaaucuggaagaagaga

SEQ ID NO: 1642899 - RNA, 19 nt, Homo sapiens
  misc_RNA (1)...(19): siRNA sense strand
caggguacuuccauagaca

SEQ ID NO: 1642900 - RNA, 19 nt, Homo sapiens
  misc_RNA (1)...(19): siRNA sense strand
cuaaccaggugcugaaacu

SEQ ID NO: 1642901 - RNA, 19 nt, Homo sapiens
  misc_RNA (1)...(19): siRNA sense strand
agaagucugucccaucucu

SEQ ID NO: 1642902 - RNA, 19 nt, Homo sapiens
  misc_RNA (1)...(19): siRNA sense strand
cacccugaguuuauuggaa

SEQ ID NO: 1642903 - RNA, 19 nt, Homo sapiens
  misc_RNA (1)...(19): siRNA sense strand
ugaugacccagcuauguuu

SEQ ID NO: 1642904 - RNA, 19 nt, Homo sapiens
  misc_RNA (1)...(19): siRNA sense strand
gcucugaugacccagcuau

SEQ ID NO: 1642905 - RNA, 19 nt, Homo sapiens
  misc_RNA (1)...(19): siRNA sense strand
gaagaagagaugggauaag

SEQ ID NO: 1642906 - RNA, 19 nt, Homo sapiens
  misc_RNA (1)...(19): siRNA sense strand
ugaacucuaucaaguacag

SEQ ID NO: 1642907 - RNA, 19 nt, Homo sapiens
  misc_RNA (1)...(19): siRNA sense strand
cauucuggaugcucugaug

SEQ ID NO: 1642908 - RNA, 19 nt, Homo sapiens
  misc_RNA (1)...(19): siRNA sense strand
gaagucugucccaucucua

SEQ ID NO: 1642909 - RNA, 19 nt, Homo sapiens
  misc_RNA (1)...(19): siRNA sense strand
acaaggaagcucugaugau

SEQ ID NO: 1642910 - RNA, 19 nt, Homo sapiens
  misc_RNA (1)...(19): siRNA sense strand
uguccuaugauuucuauga

SEQ ID NO: 1642911 - RNA, 19 nt, Homo sapiens
  misc_RNA (1)...(19): siRNA sense strand
gccacuccuugcaugacua

SEQ ID NO: 1642912 - RNA, 19 nt, Homo sapiens
  misc_RNA (1)...(19): siRNA sense strand
gaugacccagcuauguuug

SEQ ID NO: 1642913 - RNA, 19 nt, Homo sapiens
  misc_RNA (1)...(19): siRNA sense strand
cagauguggcuacaaagug

SEQ ID NO: 1642914 - RNA, 19 nt, Homo sapiens
  misc_RNA (1)...(19): siRNA sense strand
ugauuucuaugaggucuuc

SEQ ID NO: 1642915 - RNA, 19 nt, Homo sapiens
  misc_RNA (1)...(19): siRNA sense strand
cagcuggccaugaacucua

SEQ ID NO: 1642916 - RNA, 19 nt, Homo sapiens
  misc_RNA (1)...(19): siRNA sense strand
ggccaugaacucuaucaag

SEQ ID NO: 1642917 - RNA, 19 nt, Homo sapiens
  misc_RNA (1)...(19): siRNA sense strand
uacaaggaagcucugauga

SEQ ID NO: 1642918 - RNA, 19 nt, Homo sapiens
  misc_RNA (1)...(19): siRNA sense strand
cuuguccuaugauuucuau

SEQ ID NO: 1642919 - RNA, 19 nt, Homo sapiens
  misc_RNA (1)...(19): siRNA sense strand
ggacauccccauagaaguc

SEQ ID NO: 1642920 - RNA, 19 nt, Homo sapiens
  misc_RNA (1)...(19): siRNA sense strand
acccugaguuuauuggaau

SEQ ID NO: 1642921 - RNA, 19 nt, Homo sapiens
  misc_RNA (1)...(19): siRNA sense strand
ggcaggguacuuccauaga

SEQ ID NO: 1642922 - RNA, 19 nt, Homo sapiens
  misc_RNA (1)...(19): siRNA sense strand
caaaggcuuguccuaugau

SEQ ID NO: 1642923 - RNA, 19 nt, Homo sapiens
  misc_RNA (1)...(19): siRNA sense strand
ggugugaucuucuuaaaug

SEQ ID NO: 1642924 - RNA, 19 nt, Homo sapiens
  misc_RNA (1)...(19): siRNA sense strand
gaagagaucugggaauucc

SEQ ID NO: 1642925 - RNA, 19 nt, Homo sapiens
  misc_RNA (1)...(19): siRNA sense strand
ggaagcucaucaccaaaga

SEQ ID NO: 1642926 - RNA, 19 nt, Homo sapiens
  misc_RNA (1)...(19): siRNA sense strand
gaggagcacucagucuuug

SEQ ID NO: 1642927 - RNA, 19 nt, Homo sapiens
  misc_RNA (1)...(19): siRNA sense strand
gccuugagcugaauaaagu

SEQ ID NO: 1642928 - RNA, 19 nt, Homo sapiens
  misc_RNA (1)...(19): siRNA sense strand
gaugaaaguccuggaguuu

SEQ ID NO: 1642929 - RNA, 19 nt, Homo sapiens
  misc_RNA (1)...(19): siRNA sense strand
gggccucaguguugucuuu

SEQ ID NO: 1642930 - RNA, 19 nt, Homo sapiens
  misc_RNA (1)...(19): siRNA sense strand
gagaaaugcugaaaauugu

SEQ ID NO: 1642931 - RNA, 19 nt, Homo sapiens
  misc_RNA (1)...(19): siRNA sense strand
ggagaaaugcugaaaauug

SEQ ID NO: 1642932 - RNA, 19 nt, Homo sapiens
  misc_RNA (1)...(19): siRNA sense strand
ccuggaagcucaucaccaa

SEQ ID NO: 1642933 - RNA, 19 nt, Homo sapiens
  misc_RNA (1)...(19): siRNA sense strand
aggaagagaucugggaauu

SEQ ID NO: 1642934 - RNA, 19 nt, Homo sapiens
  misc_RNA (1)...(19): siRNA sense strand
gagaggagcacucagucuu

SEQ ID NO: 1642935 - RNA, 19 nt, Homo sapiens
  misc_RNA (1)...(19): siRNA sense strand
uuacgaagaagcuuugaaa

SEQ ID NO: 1642936 - RNA, 19 nt, Homo sapiens
  misc_RNA (1)...(19): siRNA sense strand
gaaaccagcaagaugaaag

SEQ ID NO: 1642937 - RNA, 19 nt, Homo sapiens
  misc_RNA (1)...(19): siRNA sense strand
cuucuuaaauggcaacuca

SEQ ID NO: 1642938 - RNA, 19 nt, Homo sapiens
  misc_RNA (1)...(19): siRNA sense strand
gaauauguugggagucuau

SEQ ID NO: 1642939 - RNA, 19 nt, Homo sapiens
  misc_RNA (1)...(19): siRNA sense strand
gaaaauuguuggcaaaagg

SEQ ID NO: 1642940 - RNA, 19 nt, Homo sapiens
  misc_RNA (1)...(19): siRNA sense strand
aggaaucccugcucaguuc

SEQ ID NO: 1642941 - RNA, 19 nt, Homo sapiens
  misc_RNA (1)...(19): siRNA sense strand
gaggaaucccugcucaguu

SEQ ID NO: 1642942 - RNA, 19 nt, Homo sapiens
  misc_RNA (1)...(19): siRNA sense strand
agaugaaaguccuggaguu

SEQ ID NO: 1642943 - RNA, 19 nt, Homo sapiens
  misc_RNA (1)...(19): siRNA sense strand
uuaaauggcaacucagcua

SEQ ID NO: 1642944 - RNA, 19 nt, Homo sapiens
  misc_RNA (1)...(19): siRNA sense strand
gcucaguuccugggacuuu

SEQ ID NO: 1642945 - RNA, 19 nt, Homo sapiens
  misc_RNA (1)...(19): siRNA sense strand
ggaagagaucugggaauuc

SEQ ID NO: 1642946 - RNA, 19 nt, Homo sapiens
  misc_RNA (1)...(19): siRNA sense strand
cccaacccauuacgaagaa

SEQ ID NO: 1642947 - RNA, 19 nt, Homo sapiens
  misc_RNA (1)...(19): siRNA sense strand
cagggucguuggugcaguu

SEQ ID NO: 1642948 - RNA, 19 nt, Homo sapiens
  misc_RNA (1)...(19): siRNA sense strand
ugggugugaucuucuuaaa

SEQ ID NO: 1642949 - RNA, 19 nt, Homo sapiens
  misc_RNA (1)...(19): siRNA sense strand
gcugaaaauuguuggcaaa

SEQ ID NO: 1642950 - RNA, 19 nt, Homo sapiens
  misc_RNA (1)...(19): siRNA sense strand
ucacugaagcagaggaaga

SEQ ID NO: 1642951 - RNA, 19 nt, Homo sapiens
  misc_RNA (1)...(19): siRNA sense strand
gcuccgugcccgugagaaa

SEQ ID NO: 1642952 - RNA, 19 nt, Homo sapiens
  misc_RNA (1)...(19): siRNA sense strand
agaggagcacucagucuuu

SEQ ID NO: 1642953 - RNA, 19 nt, Homo sapiens
  misc_RNA (1)...(19): siRNA sense strand
ccgagagccuaugcugaaa

SEQ ID NO: 1642954 - RNA, 19 nt, Homo sapiens
  misc_RNA (1)...(19): siRNA sense strand
gcucaucaccaaagaucug

SEQ ID NO: 1642955 - RNA, 19 nt, Homo sapiens
  misc_RNA (1)...(19): siRNA sense strand
aaagaucuggugcaggaaa

SEQ ID NO: 1642956 - RNA, 19 nt, Homo sapiens
  misc_RNA (1)...(19): siRNA sense strand
gcggguguuucauccacaa

SEQ ID NO: 1642957 - RNA, 19 nt, Homo sapiens
  misc_RNA (1)...(19): siRNA sense strand
gaaaugcugaaaauuguug

SEQ ID NO: 1642958 - RNA, 19 nt, Homo sapiens
  misc_RNA (1)...(19): siRNA sense strand
uaagagcccaagcgaagau

SEQ ID NO: 1642959 - RNA, 19 nt, Homo sapiens
  misc_RNA (1)...(19): siRNA sense strand
ugaauauguugggagucua

SEQ ID NO: 1642960 - RNA, 19 nt, Homo sapiens
  misc_RNA (1)...(19): siRNA sense strand
aagcgaagauccucuaacc

SEQ ID NO: 1642961 - RNA, 19 nt, Homo sapiens
  misc_RNA (1)...(19): siRNA sense strand
acacuuacaccuucaucga

SEQ ID NO: 1642962 - RNA, 19 nt, Homo sapiens
  misc_RNA (1)...(19): siRNA sense strand
ggagaggagcacucagucu

SEQ ID NO: 1642963 - RNA, 19 nt, Homo sapiens
  misc_RNA (1)...(19): siRNA sense strand
ccaagcgaagauccucuaa

SEQ ID NO: 1642964 - RNA, 19 nt, Homo sapiens
  misc_RNA (1)...(19): siRNA sense strand
gugccuucccaacccauua

SEQ ID NO: 1642965 - RNA, 19 nt, Homo sapiens
  misc_RNA (1)...(19): siRNA sense strand
uccgagagccuaugcugaa

SEQ ID NO: 1642966 - RNA, 19 nt, Homo sapiens
  misc_RNA (1)...(19): siRNA sense strand
gaggaagagaucugggaau

SEQ ID NO: 1642967 - RNA, 19 nt, Homo sapiens
  misc_RNA (1)...(19): siRNA sense strand
aaagggagaaaugcugaaa

SEQ ID NO: 1642968 - RNA, 19 nt, Homo sapiens
  misc_RNA (1)...(19): siRNA sense strand
caaagggagaaaugcugaa

SEQ ID NO: 1642969 - RNA, 19 nt, Homo sapiens
  misc_RNA (1)...(19): siRNA sense strand
ugcaguuccuguuguacaa

SEQ ID NO: 1642970 - RNA, 19 nt, Homo sapiens
  misc_RNA (1)...(19): siRNA sense strand
uggugcaguuccuguugua

SEQ ID NO: 1642971 - RNA, 19 nt, Homo sapiens
  misc_RNA (1)...(19): siRNA sense strand
cugaauauguugggagucu

SEQ ID NO: 1642972 - RNA, 19 nt, Homo sapiens
  misc_RNA (1)...(19): siRNA sense strand
ccauuacgaagaagcuuug

SEQ ID NO: 1642973 - RNA, 19 nt, Homo sapiens
  misc_RNA (1)...(19): siRNA sense strand
gagagccuaugcugaaacc

SEQ ID NO: 1642974 - RNA, 19 nt, Homo sapiens
  misc_RNA (1)...(19): siRNA sense strand
gaagcucaucaccaaagau

SEQ ID NO: 1642975 - RNA, 19 nt, Homo sapiens
  misc_RNA (1)...(19): siRNA sense strand
ggaagucagggucguuggu

SEQ ID NO: 1642976 - RNA, 19 nt, Homo sapiens
  misc_RNA (1)...(19): siRNA sense strand
ugaagcagaggaagaagag

SEQ ID NO: 1642977 - RNA, 19 nt, Homo sapiens
  misc_RNA (1)...(19): siRNA sense strand
ggccacacuuacaccuuca

SEQ ID NO: 1642978 - RNA, 19 nt, Homo sapiens
  misc_RNA (1)...(19): siRNA sense strand
ggccuugagcugaauaaag

SEQ ID NO: 1642979 - RNA, 19 nt, Homo sapiens
  misc_RNA (1)...(19): siRNA sense strand
ggaguucuaucacaaauug

SEQ ID NO: 1642980 - RNA, 19 nt, Homo sapiens
  misc_RNA (1)...(19): siRNA sense strand
guacaucggucaugacaga

SEQ ID NO: 1642981 - RNA, 19 nt, Homo sapiens
  misc_RNA (1)...(19): siRNA sense strand
ggagcugccuggugaagua

SEQ ID NO: 1642982 - RNA, 19 nt, Homo sapiens
  misc_RNA (1)...(19): siRNA sense strand
ugaaguaccuggaggagaa

SEQ ID NO: 1642983 - RNA, 19 nt, Homo sapiens
  misc_RNA (1)...(19): siRNA sense strand
gacagaaccaugcaagaua

SEQ ID NO: 1642984 - RNA, 19 nt, Homo sapiens
  misc_RNA (1)...(19): siRNA sense strand
gaaagcagagggaguucua

SEQ ID NO: 1642985 - RNA, 19 nt, Homo sapiens
  misc_RNA (1)...(19): siRNA sense strand
ccaagaagcggaaaugaga

SEQ ID NO: 1642986 - RNA, 19 nt, Homo sapiens
  misc_RNA (1)...(19): siRNA sense strand
agacgacaguucaaacaaa

SEQ ID NO: 1642987 - RNA, 19 nt, Homo sapiens
  misc_RNA (1)...(19): siRNA sense strand
acagaaccaugcaagauau

SEQ ID NO: 1642988 - RNA, 19 nt, Homo sapiens
  misc_RNA (1)...(19): siRNA sense strand
gcaaggaccacacacucaa

SEQ ID NO: 1642989 - RNA, 19 nt, Homo sapiens
  misc_RNA (1)...(19): siRNA sense strand
ggacaucaacgcccacauc

SEQ ID NO: 1642990 - RNA, 19 nt, Homo sapiens
  misc_RNA (1)...(19): siRNA sense strand
caaagcagacgacaguuca

SEQ ID NO: 1642991 - RNA, 19 nt, Homo sapiens
  misc_RNA (1)...(19): siRNA sense strand
uuaacgagcuggacauuuu

SEQ ID NO: 1642992 - RNA, 19 nt, Homo sapiens
  misc_RNA (1)...(19): siRNA sense strand
gcgaccgucuugcaucuga

SEQ ID NO: 1642993 - RNA, 19 nt, Homo sapiens
  misc_RNA (1)...(19): siRNA sense strand
gaagaaguucaucgccaaa

SEQ ID NO: 1642994 - RNA, 19 nt, Homo sapiens
  misc_RNA (1)...(19): siRNA sense strand
gacgacaguucaaacaaag

SEQ ID NO: 1642995 - RNA, 19 nt, Homo sapiens
  misc_RNA (1)...(19): siRNA sense strand
agagggaguucuaucacaa

SEQ ID NO: 1642996 - RNA, 19 nt, Homo sapiens
  misc_RNA (1)...(19): siRNA sense strand
gcagacgacaguucaaaca

SEQ ID NO: 1642997 - RNA, 19 nt, Homo sapiens
  misc_RNA (1)...(19): siRNA sense strand
gaaccaugcaagauauugu

SEQ ID NO: 1642998 - RNA, 19 nt, Homo sapiens
  misc_RNA (1)...(19): siRNA sense strand
ggaccacacacucaaguuc

SEQ ID NO: 1642999 - RNA, 19 nt, Homo sapiens
  misc_RNA (1)...(19): siRNA sense strand
caaaacagcacuuagauuc

SEQ ID NO: 1643000 - RNA, 19 nt, Homo sapiens
  misc_RNA (1)...(19): siRNA sense strand
gcacuacagacccaagaug

SEQ ID NO: 1643001 - RNA, 19 nt, Homo sapiens
  misc_RNA (1)...(19): siRNA sense strand
gucacuagguggagauuca

SEQ ID NO: 1643002 - RNA, 19 nt, Homo sapiens
  misc_RNA (1)...(19): siRNA sense strand
cagagggaguucuaucaca

SEQ ID NO: 1643003 - RNA, 19 nt, Homo sapiens
  misc_RNA (1)...(19): siRNA sense strand
ugagaaagcagagggaguu

SEQ ID NO: 1643004 - RNA, 19 nt, Homo sapiens
  misc_RNA (1)...(19): siRNA sense strand
acucaaccuuucauccuuu

SEQ ID NO: 1643005 - RNA, 19 nt, Homo sapiens
  misc_RNA (1)...(19): siRNA sense strand
ccaugcaagauauuguuua

SEQ ID NO: 1643006 - RNA, 19 nt, Homo sapiens
  misc_RNA (1)...(19): siRNA sense strand
caugcaagauauuguuuac

SEQ ID NO: 1643007 - RNA, 19 nt, Homo sapiens
  misc_RNA (1)...(19): siRNA sense strand
gagggaguucuaucacaaa

SEQ ID NO: 1643008 - RNA, 19 nt, Homo sapiens
  misc_RNA (1)...(19): siRNA sense strand
guaccaggccuccaagaag

SEQ ID NO: 1643009 - RNA, 19 nt, Homo sapiens
  misc_RNA (1)...(19): siRNA sense strand
ugacagaaccaugcaagau

SEQ ID NO: 1643010 - RNA, 19 nt, Homo sapiens
  misc_RNA (1)...(19): siRNA sense strand
gguaccaggccuccaagaa

SEQ ID NO: 1643011 - RNA, 19 nt, Homo sapiens
  misc_RNA (1)...(19): siRNA sense strand
ccaaagcagacgacaguuc

SEQ ID NO: 1643012 - RNA, 19 nt, Homo sapiens
  misc_RNA (1)...(19): siRNA sense strand
gcaaaacagcacuuagauu

SEQ ID NO: 1643013 - RNA, 19 nt, Homo sapiens
  misc_RNA (1)...(19): siRNA sense strand
gacaucaacgcccacauca

SEQ ID NO: 1643014 - RNA, 19 nt, Homo sapiens
  misc_RNA (1)...(19): siRNA sense strand
caagaagcggaaaugagaa

SEQ ID NO: 1643015 - RNA, 19 nt, Homo sapiens
  misc_RNA (1)...(19): siRNA sense strand
ggggagaccugcucugcaa

SEQ ID NO: 1643016 - RNA, 19 nt, Homo sapiens
  misc_RNA (1)...(19): siRNA sense strand
cucaaccuuucauccuuua

SEQ ID NO: 1643017 - RNA, 19 nt, Homo sapiens
  misc_RNA (1)...(19): siRNA sense strand
cggaggaggacaacgacua

SEQ ID NO: 1643018 - RNA, 19 nt, Homo sapiens
  misc_RNA (1)...(19): siRNA sense strand
ggaggaggacaacgacuac

SEQ ID NO: 1643019 - RNA, 19 nt, Homo sapiens
  misc_RNA (1)...(19): siRNA sense strand
ggcaaggaccacacacuca

SEQ ID NO: 1643020 - RNA, 19 nt, Homo sapiens
  misc_RNA (1)...(19): siRNA sense strand
aagaagcggaaaugagaaa

SEQ ID NO: 1643021 - RNA, 19 nt, Homo sapiens
  misc_RNA (1)...(19): siRNA sense strand
ugcaguacaucggucauga

SEQ ID NO: 1643022 - RNA, 19 nt, Homo sapiens
  misc_RNA (1)...(19): siRNA sense strand
aagcggaaaugagaaagca

SEQ ID NO: 1643023 - RNA, 19 nt, Homo sapiens
  misc_RNA (1)...(19): siRNA sense strand
aaccaaagcagacgacagu

SEQ ID NO: 1643024 - RNA, 19 nt, Homo sapiens
  misc_RNA (1)...(19): siRNA sense strand
ggaguguaacagcagcaaa

SEQ ID NO: 1643025 - RNA, 19 nt, Homo sapiens
  misc_RNA (1)...(19): siRNA sense strand
gggaguucuaucacaaauu

SEQ ID NO: 1643026 - RNA, 19 nt, Homo sapiens
  misc_RNA (1)...(19): siRNA sense strand
cagacgacaguucaaacaa

SEQ ID NO: 1643027 - RNA, 19 nt, Homo sapiens
  misc_RNA (1)...(19): siRNA sense strand
uaacgagcuggacauuuua

SEQ ID NO: 1643028 - RNA, 19 nt, Homo sapiens
  misc_RNA (1)...(19): siRNA sense strand
ggaaagugcugucugcuaa

SEQ ID NO: 1643029 - RNA, 19 nt, Homo sapiens
  misc_RNA (1)...(19): siRNA sense strand
gcugagggcucucuguaua

SEQ ID NO: 1643030 - RNA, 19 nt, Homo sapiens
  misc_RNA (1)...(19): siRNA sense strand
gagcauaguucgagagaug

SEQ ID NO: 1643031 - RNA, 19 nt, Homo sapiens
  misc_RNA (1)...(19): siRNA sense strand
cagcacagcucauccauca

SEQ ID NO: 1643032 - RNA, 19 nt, Homo sapiens
  misc_RNA (1)...(19): siRNA sense strand
cgaacaggaugaugacauu

SEQ ID NO: 1643033 - RNA, 19 nt, Homo sapiens
  misc_RNA (1)...(19): siRNA sense strand
gcagaaagagcuugcagaa

SEQ ID NO: 1643034 - RNA, 19 nt, Homo sapiens
  misc_RNA (1)...(19): siRNA sense strand
gaagugaggguaccagcua

SEQ ID NO: 1643035 - RNA, 19 nt, Homo sapiens
  misc_RNA (1)...(19): siRNA sense strand
ggauccaguugcaaugaua

SEQ ID NO: 1643036 - RNA, 19 nt, Homo sapiens
  misc_RNA (1)...(19): siRNA sense strand
ggaauuacaagcauugaau

SEQ ID NO: 1643037 - RNA, 19 nt, Homo sapiens
  misc_RNA (1)...(19): siRNA sense strand
gcacagcucauccaucaau

SEQ ID NO: 1643038 - RNA, 19 nt, Homo sapiens
  misc_RNA (1)...(19): siRNA sense strand
uuacugcccuggacuuaaa

SEQ ID NO: 1643039 - RNA, 19 nt, Homo sapiens
  misc_RNA (1)...(19): siRNA sense strand
agauggagcuguugggaaa

SEQ ID NO: 1643040 - RNA, 19 nt, Homo sapiens
  misc_RNA (1)...(19): siRNA sense strand
uguggaugauuaucgauua

SEQ ID NO: 1643041 - RNA, 19 nt, Homo sapiens
  misc_RNA (1)...(19): siRNA sense strand
ggacuuaaacccagaaagg

SEQ ID NO: 1643042 - RNA, 19 nt, Homo sapiens
  misc_RNA (1)...(19): siRNA sense strand
ugcuggaucuuaccucuua

SEQ ID NO: 1643043 - RNA, 19 nt, Homo sapiens
  misc_RNA (1)...(19): siRNA sense strand
ggacaaaggaugcaaagcu

SEQ ID NO: 1643044 - RNA, 19 nt, Homo sapiens
  misc_RNA (1)...(19): siRNA sense strand
ucuggacuguggaugauua

SEQ ID NO: 1643045 - RNA, 19 nt, Homo sapiens
  misc_RNA (1)...(19): siRNA sense strand
gaaucuggacuguggauga

SEQ ID NO: 1643046 - RNA, 19 nt, Homo sapiens
  misc_RNA (1)...(19): siRNA sense strand
gagcuguugggaaagauua

SEQ ID NO: 1643047 - RNA, 19 nt, Homo sapiens
  misc_RNA (1)...(19): siRNA sense strand
acagagcaauguguaauga

SEQ ID NO: 1643048 - RNA, 19 nt, Homo sapiens
  misc_RNA (1)...(19): siRNA sense strand
agcaaagucugcauaaaga

SEQ ID NO: 1643049 - RNA, 19 nt, Homo sapiens
  misc_RNA (1)...(19): siRNA sense strand
ggaugaaacuucugaucac

SEQ ID NO: 1643050 - RNA, 19 nt, Homo sapiens
  misc_RNA (1)...(19): siRNA sense strand
gcaggaauuacaagcauug

SEQ ID NO: 1643051 - RNA, 19 nt, Homo sapiens
  misc_RNA (1)...(19): siRNA sense strand
gaugaaacuucugaucaca

SEQ ID NO: 1643052 - RNA, 19 nt, Homo sapiens
  misc_RNA (1)...(19): siRNA sense strand
ugaaacuucugaucacaca

SEQ ID NO: 1643053 - RNA, 19 nt, Homo sapiens
  misc_RNA (1)...(19): siRNA sense strand
gcucgcacguugucagugu

SEQ ID NO: 1643054 - RNA, 19 nt, Homo sapiens
  misc_RNA (1)...(19): siRNA sense strand
cagcaaagucugcauaaag

SEQ ID NO: 1643055 - RNA, 19 nt, Homo sapiens
  misc_RNA (1)...(19): siRNA sense strand
ggcauggaccgcaggguua

SEQ ID NO: 1643056 - RNA, 19 nt, Homo sapiens
  misc_RNA (1)...(19): siRNA sense strand
gggaaagugcugucugcua

SEQ ID NO: 1643057 - RNA, 19 nt, Homo sapiens
  misc_RNA (1)...(19): siRNA sense strand
uuauugaucuccgaacaaa

SEQ ID NO: 1643058 - RNA, 19 nt, Homo sapiens
  misc_RNA (1)...(19): siRNA sense strand
cuuagcagcuucaaaugau

SEQ ID NO: 1643059 - RNA, 19 nt, Homo sapiens
  misc_RNA (1)...(19): siRNA sense strand
ggguuaagcuuugggaagu

SEQ ID NO: 1643060 - RNA, 19 nt, Homo sapiens
  misc_RNA (1)...(19): siRNA sense strand
gaucuacgcagcaaagucu

SEQ ID NO: 1643061 - RNA, 19 nt, Homo sapiens
  misc_RNA (1)...(19): siRNA sense strand
gguuaagcuuugggaagua

SEQ ID NO: 1643062 - RNA, 19 nt, Homo sapiens
  misc_RNA (1)...(19): siRNA sense strand
gauuacugcccuggacuua

SEQ ID NO: 1643063 - RNA, 19 nt, Homo sapiens
  misc_RNA (1)...(19): siRNA sense strand
gcuacugccuugugugucu

SEQ ID NO: 1643064 - RNA, 19 nt, Homo sapiens
  misc_RNA (1)...(19): siRNA sense strand
ccgaacaaaugcuaucaag

SEQ ID NO: 1643065 - RNA, 19 nt, Homo sapiens
  misc_RNA (1)...(19): siRNA sense strand
gaucuccgaacaaaugcua

SEQ ID NO: 1643066 - RNA, 19 nt, Homo sapiens
  misc_RNA (1)...(19): siRNA sense strand
ccucuuagcagcuucaaau

SEQ ID NO: 1643067 - RNA, 19 nt, Homo sapiens
  misc_RNA (1)...(19): siRNA sense strand
caguccagguucccgguua

SEQ ID NO: 1643068 - RNA, 19 nt, Homo sapiens
  misc_RNA (1)...(19): siRNA sense strand
cuaaguuccugcuggacaa

SEQ ID NO: 1643069 - RNA, 19 nt, Homo sapiens
  misc_RNA (1)...(19): siRNA sense strand
gaccgcaggguuaagcuuu

SEQ ID NO: 1643070 - RNA, 19 nt, Homo sapiens
  misc_RNA (1)...(19): siRNA sense strand
gcauaaagacaguguuugc

SEQ ID NO: 1643071 - RNA, 19 nt, Homo sapiens
  misc_RNA (1)...(19): siRNA sense strand
gaacaggaugaugacauug

SEQ ID NO: 1643072 - RNA, 19 nt, Homo sapiens
  misc_RNA (1)...(19): siRNA sense strand
cgaccggacucucaaacuc

SEQ ID NO: 1643073 - RNA, 19 nt, Homo sapiens
  misc_RNA (1)...(19): siRNA sense strand
agucaacgcugugcaguuc

SEQ ID NO: 1643074 - RNA, 19 nt, Homo sapiens
  misc_RNA (1)...(19): siRNA sense strand
uggcaguaaugcaggaauu

SEQ ID NO: 1643075 - RNA, 19 nt, Homo sapiens
  misc_RNA (1)...(19): siRNA sense strand
guuaagcuuugggaaguau

SEQ ID NO: 1643076 - RNA, 19 nt, Homo sapiens
  misc_RNA (1)...(19): siRNA sense strand
gagagcauaguucgagaga

SEQ ID NO: 1643077 - RNA, 19 nt, Homo sapiens
  misc_RNA (1)...(19): siRNA sense strand
gcauggaccgcaggguuaa

SEQ ID NO: 1643078 - RNA, 19 nt, Homo sapiens
  misc_RNA (1)...(19): siRNA sense strand
ggaccagaguugucuucag

SEQ ID NO: 1643079 - RNA, 19 nt, Homo sapiens
  misc_RNA (1)...(19): siRNA sense strand
ugauagugcuggaucuuac

SEQ ID NO: 1643080 - RNA, 19 nt, Homo sapiens
  misc_RNA (1)...(19): siRNA sense strand
ugucuucgaugcacaugau

SEQ ID NO: 1643081 - RNA, 19 nt, Homo sapiens
  misc_RNA (1)...(19): siRNA sense strand
caaagcagcacagcucauc

SEQ ID NO: 1643082 - RNA, 19 nt, Homo sapiens
  misc_RNA (1)...(19): siRNA sense strand
gacuguggaugauuaucga

SEQ ID NO: 1643083 - RNA, 19 nt, Homo sapiens
  misc_RNA (1)...(19): siRNA sense strand
gcaggauccaguugcaaug

SEQ ID NO: 1643084 - RNA, 19 nt, Homo sapiens
  misc_RNA (1)...(19): siRNA sense strand
gcucacagggaaaguggaa

SEQ ID NO: 1643085 - RNA, 19 nt, Homo sapiens
  misc_RNA (1)...(19): siRNA sense strand
agagcaauguguaaugagu

SEQ ID NO: 1643086 - RNA, 19 nt, Homo sapiens
  misc_RNA (1)...(19): siRNA sense strand
ugggaaguauuuggagaaa

SEQ ID NO: 1643087 - RNA, 19 nt, Homo sapiens
  misc_RNA (1)...(19): siRNA sense strand
ugagggcucucuguauauc

SEQ ID NO: 1643088 - RNA, 19 nt, Homo sapiens
  misc_RNA (1)...(19): siRNA sense strand
uaagcuuugggaaguauuu

SEQ ID NO: 1643089 - RNA, 19 nt, Homo sapiens
  misc_RNA (1)...(19): siRNA sense strand
aaagugcugucugcuaagu

SEQ ID NO: 1643090 - RNA, 19 nt, Homo sapiens
  misc_RNA (1)...(19): siRNA sense strand
ggacuguggaugauuaucg

SEQ ID NO: 1643091 - RNA, 19 nt, Homo sapiens
  misc_RNA (1)...(19): siRNA sense strand
uggaugaaacuucugauca

SEQ ID NO: 1643092 - RNA, 19 nt, Homo sapiens
  misc_RNA (1)...(19): siRNA sense strand
cugcauaaagacaguguuu

SEQ ID NO: 1643093 - RNA, 19 nt, Homo sapiens
  misc_RNA (1)...(19): siRNA sense strand
aggacaauguggauacuca

SEQ ID NO: 1643094 - RNA, 19 nt, Homo sapiens
  misc_RNA (1)...(19): siRNA sense strand
uuagcagcuucaaaugauu

SEQ ID NO: 1643095 - RNA, 19 nt, Homo sapiens
  misc_RNA (1)...(19): siRNA sense strand
gaaagugcugucugcuaag

SEQ ID NO: 1643096 - RNA, 19 nt, Homo sapiens
  misc_RNA (1)...(19): siRNA sense strand
gcuggacaaugcgcggauu

SEQ ID NO: 1643097 - RNA, 19 nt, Homo sapiens
  misc_RNA (1)...(19): siRNA sense strand
gcuaucaagcagacauuca

SEQ ID NO: 1643098 - RNA, 19 nt, Homo sapiens
  misc_RNA (1)...(19): siRNA sense strand
gacuuaaacccagaaagga

SEQ ID NO: 1643099 - RNA, 19 nt, Homo sapiens
  misc_RNA (1)...(19): siRNA sense strand
cggauugucucaggaaguc

SEQ ID NO: 1643100 - RNA, 19 nt, Homo sapiens
  misc_RNA (1)...(19): siRNA sense strand
gauccaguugcaaugauau

SEQ ID NO: 1643101 - RNA, 19 nt, Homo sapiens
  misc_RNA (1)...(19): siRNA sense strand
cauuguggaugaaacuucu

SEQ ID NO: 1643102 - RNA, 19 nt, Homo sapiens
  misc_RNA (1)...(19): siRNA sense strand
ugcagaagcagcaaaggaa

SEQ ID NO: 1643103 - RNA, 19 nt, Homo sapiens
  misc_RNA (1)...(19): siRNA sense strand
gggacacagugggaaagug

SEQ ID NO: 1643104 - RNA, 19 nt, Homo sapiens
  misc_RNA (1)...(19): siRNA sense strand
gacgcucugucucuuccuu

SEQ ID NO: 1643105 - RNA, 19 nt, Homo sapiens
  misc_RNA (1)...(19): siRNA sense strand
ggagcuguugggaaagauu

SEQ ID NO: 1643106 - RNA, 19 nt, Homo sapiens
  misc_RNA (1)...(19): siRNA sense strand
ucuuagcagcuucaaauga

SEQ ID NO: 1643107 - RNA, 19 nt, Homo sapiens
  misc_RNA (1)...(19): siRNA sense strand
uucgagagauggagcuguu

SEQ ID NO: 1643108 - RNA, 19 nt, Homo sapiens
  misc_RNA (1)...(19): siRNA sense strand
gcgcggauugucucaggaa

SEQ ID NO: 1643109 - RNA, 19 nt, Homo sapiens
  misc_RNA (1)...(19): siRNA sense strand
aaucuggacuguggaugau

SEQ ID NO: 1643110 - RNA, 19 nt, Homo sapiens
  misc_RNA (1)...(19): siRNA sense strand
ggaccgcaggguuaagcuu

SEQ ID NO: 1643111 - RNA, 19 nt, Homo sapiens
  misc_RNA (1)...(19): siRNA sense strand
cagcuacugccuugugugu

SEQ ID NO: 1643112 - RNA, 19 nt, Homo sapiens
  misc_RNA (1)...(19): siRNA sense strand
guuauugaucuccgaacaa

SEQ ID NO: 1643113 - RNA, 19 nt, Homo sapiens
  misc_RNA (1)...(19): siRNA sense strand
ggaaagugcugucugcuaa

SEQ ID NO: 1643114 - RNA, 19 nt, Homo sapiens
  misc_RNA (1)...(19): siRNA sense strand
gcugagggcucucuguaua

SEQ ID NO: 1643115 - RNA, 19 nt, Homo sapiens
  misc_RNA (1)...(19): siRNA sense strand
gagcauaguucgagagaug

SEQ ID NO: 1643116 - RNA, 19 nt, Homo sapiens
  misc_RNA (1)...(19): siRNA sense strand
cagcacagcucauccauca

SEQ ID NO: 1643117 - RNA, 19 nt, Homo sapiens
  misc_RNA (1)...(19): siRNA sense strand
cgaacaggaugaugacauu

SEQ ID NO: 1643118 - RNA, 19 nt, Homo sapiens
  misc_RNA (1)...(19): siRNA sense strand
gcagaaagagcuugcagaa

SEQ ID NO: 1643119 - RNA, 19 nt, Homo sapiens
  misc_RNA (1)...(19): siRNA sense strand
gaagugaggguaccagcua

SEQ ID NO: 1643120 - RNA, 19 nt, Homo sapiens
  misc_RNA (1)...(19): siRNA sense strand
ggauccaguugcaaugaua

SEQ ID NO: 1643121 - RNA, 19 nt, Homo sapiens
  misc_RNA (1)...(19): siRNA sense strand
ggaauuacaagcauugaau

SEQ ID NO: 1643122 - RNA, 19 nt, Homo sapiens
  misc_RNA (1)...(19): siRNA sense strand
gcacagcucauccaucaau

SEQ ID NO: 1643123 - RNA, 19 nt, Homo sapiens
  misc_RNA (1)...(19): siRNA sense strand
uuacugcccuggacuuaaa

SEQ ID NO: 1643124 - RNA, 19 nt, Homo sapiens
  misc_RNA (1)...(19): siRNA sense strand
agauggagcuguugggaaa

SEQ ID NO: 1643125 - RNA, 19 nt, Homo sapiens
  misc_RNA (1)...(19): siRNA sense strand
uguggaugauuaucgauua

SEQ ID NO: 1643126 - RNA, 19 nt, Homo sapiens
  misc_RNA (1)...(19): siRNA sense strand
ggacuuaaacccagaaagg

SEQ ID NO: 1643127 - RNA, 19 nt, Homo sapiens
  misc_RNA (1)...(19): siRNA sense strand
ugcuggaucuuaccucuua

SEQ ID NO: 1643128 - RNA, 19 nt, Homo sapiens
  misc_RNA (1)...(19): siRNA sense strand
ggacaaaggaugcaaagcu

SEQ ID NO: 1643129 - RNA, 19 nt, Homo sapiens
  misc_RNA (1)...(19): siRNA sense strand
ucuggacuguggaugauua

SEQ ID NO: 1643130 - RNA, 19 nt, Homo sapiens
  misc_RNA (1)...(19): siRNA sense strand
gaaucuggacuguggauga

SEQ ID NO: 1643131 - RNA, 19 nt, Homo sapiens
  misc_RNA (1)...(19): siRNA sense strand
gagcuguugggaaagauua

SEQ ID NO: 1643132 - RNA, 19 nt, Homo sapiens
  misc_RNA (1)...(19): siRNA sense strand
acagagcaauguguaauga

SEQ ID NO: 1643133 - RNA, 19 nt, Homo sapiens
  misc_RNA (1)...(19): siRNA sense strand
agcaaagucugcauaaaga

SEQ ID NO: 1643134 - RNA, 19 nt, Homo sapiens
  misc_RNA (1)...(19): siRNA sense strand
ggaugaaacuucugaucac

SEQ ID NO: 1643135 - RNA, 19 nt, Homo sapiens
  misc_RNA (1)...(19): siRNA sense strand
gcaggaauuacaagcauug

SEQ ID NO: 1643136 - RNA, 19 nt, Homo sapiens
  misc_RNA (1)...(19): siRNA sense strand
gaugaaacuucugaucaca

SEQ ID NO: 1643137 - RNA, 19 nt, Homo sapiens
  misc_RNA (1)...(19): siRNA sense strand
ugaaacuucugaucacaca

SEQ ID NO: 1643138 - RNA, 19 nt, Homo sapiens
  misc_RNA (1)...(19): siRNA sense strand
gcucgcacguugucagugu

SEQ ID NO: 1643139 - RNA, 19 nt, Homo sapiens
  misc_RNA (1)...(19): siRNA sense strand
cagcaaagucugcauaaag

SEQ ID NO: 1643140 - RNA, 19 nt, Homo sapiens
  misc_RNA (1)...(19): siRNA sense strand
ggcauggaccgcaggguua

SEQ ID NO: 1643141 - RNA, 19 nt, Homo sapiens
  misc_RNA (1)...(19): siRNA sense strand
gggaaagugcugucugcua

SEQ ID NO: 1643142 - RNA, 19 nt, Homo sapiens
  misc_RNA (1)...(19): siRNA sense strand
uuauugaucuccgaacaaa

SEQ ID NO: 1643143 - RNA, 19 nt, Homo sapiens
  misc_RNA (1)...(19): siRNA sense strand
cuuagcagcuucaaaugau

SEQ ID NO: 1643144 - RNA, 19 nt, Homo sapiens
  misc_RNA (1)...(19): siRNA sense strand
ggguuaagcuuugggaagu

SEQ ID NO: 1643145 - RNA, 19 nt, Homo sapiens
  misc_RNA (1)...(19): siRNA sense strand
gaucuacgcagcaaagucu

SEQ ID NO: 1643146 - RNA, 19 nt, Homo sapiens
  misc_RNA (1)...(19): siRNA sense strand
gguuaagcuuugggaagua

SEQ ID NO: 1643147 - RNA, 19 nt, Homo sapiens
  misc_RNA (1)...(19): siRNA sense strand
gauuacugcccuggacuua

SEQ ID NO: 1643148 - RNA, 19 nt, Homo sapiens
  misc_RNA (1)...(19): siRNA sense strand
gcuacugccuugugugucu

SEQ ID NO: 1643149 - RNA, 19 nt, Homo sapiens
  misc_RNA (1)...(19): siRNA sense strand
ccgaacaaaugcuaucaag

SEQ ID NO: 1643150 - RNA, 19 nt, Homo sapiens
  misc_RNA (1)...(19): siRNA sense strand
gaucuccgaacaaaugcua

SEQ ID NO: 1643151 - RNA, 19 nt, Homo sapiens
  misc_RNA (1)...(19): siRNA sense strand
ccucuuagcagcuucaaau

SEQ ID NO: 1643152 - RNA, 19 nt, Homo sapiens
  misc_RNA (1)...(19): siRNA sense strand
caguccagguucccgguua

SEQ ID NO: 1643153 - RNA, 19 nt, Homo sapiens
  misc_RNA (1)...(19): siRNA sense strand
cuaaguuccugcuggacaa

SEQ ID NO: 1643154 - RNA, 19 nt, Homo sapiens
  misc_RNA (1)...(19): siRNA sense strand
gaccgcaggguuaagcuuu

SEQ ID NO: 1643155 - RNA, 19 nt, Homo sapiens
  misc_RNA (1)...(19): siRNA sense strand
gcauaaagacaguguuugc

SEQ ID NO: 1643156 - RNA, 19 nt, Homo sapiens
  misc_RNA (1)...(19): siRNA sense strand
gaacaggaugaugacauug

SEQ ID NO: 1643157 - RNA, 19 nt, Homo sapiens
  misc_RNA (1)...(19): siRNA sense strand
cgaccggacucucaaacuc

SEQ ID NO: 1643158 - RNA, 19 nt, Homo sapiens
  misc_RNA (1)...(19): siRNA sense strand
agucaacgcugugcaguuc

SEQ ID NO: 1643159 - RNA, 19 nt, Homo sapiens
  misc_RNA (1)...(19): siRNA sense strand
uggcaguaaugcaggaauu

SEQ ID NO: 1643160 - RNA, 19 nt, Homo sapiens
  misc_RNA (1)...(19): siRNA sense strand
guuaagcuuugggaaguau

SEQ ID NO: 1643161 - RNA, 19 nt, Homo sapiens
  misc_RNA (1)...(19): siRNA sense strand
gagagcauaguucgagaga

SEQ ID NO: 1643162 - RNA, 19 nt, Homo sapiens
  misc_RNA (1)...(19): siRNA sense strand
gcauggaccgcaggguuaa

SEQ ID NO: 1643163 - RNA, 19 nt, Homo sapiens
  misc_RNA (1)...(19): siRNA sense strand
ggaccagaguugucuucag

SEQ ID NO: 1643164 - RNA, 19 nt, Homo sapiens
  misc_RNA (1)...(19): siRNA sense strand
ugauagugcuggaucuuac

SEQ ID NO: 1643165 - RNA, 19 nt, Homo sapiens
  misc_RNA (1)...(19): siRNA sense strand
ugucuucgaugcacaugau

SEQ ID NO: 1643166 - RNA, 19 nt, Homo sapiens
  misc_RNA (1)...(19): siRNA sense strand
caaagcagcacagcucauc

SEQ ID NO: 1643167 - RNA, 19 nt, Homo sapiens
  misc_RNA (1)...(19): siRNA sense strand
gacuguggaugauuaucga

SEQ ID NO: 1643168 - RNA, 19 nt, Homo sapiens
  misc_RNA (1)...(19): siRNA sense strand
gcaggauccaguugcaaug

SEQ ID NO: 1643169 - RNA, 19 nt, Homo sapiens
  misc_RNA (1)...(19): siRNA sense strand
gcucacagggaaaguggaa

SEQ ID NO: 1643170 - RNA, 19 nt, Homo sapiens
  misc_RNA (1)...(19): siRNA sense strand
agagcaauguguaaugagu

SEQ ID NO: 1643171 - RNA, 19 nt, Homo sapiens
  misc_RNA (1)...(19): siRNA sense strand
ugggaaguauuuggagaaa

SEQ ID NO: 1643172 - RNA, 19 nt, Homo sapiens
  misc_RNA (1)...(19): siRNA sense strand
ugagggcucucuguauauc

SEQ ID NO: 1643173 - RNA, 19 nt, Homo sapiens
  misc_RNA (1)...(19): siRNA sense strand
uaagcuuugggaaguauuu

SEQ ID NO: 1643174 - RNA, 19 nt, Homo sapiens
  misc_RNA (1)...(19): siRNA sense strand
aaagugcugucugcuaagu

SEQ ID NO: 1643175 - RNA, 19 nt, Homo sapiens
  misc_RNA (1)...(19): siRNA sense strand
ggacuguggaugauuaucg

SEQ ID NO: 1643176 - RNA, 19 nt, Homo sapiens
  misc_RNA (1)...(19): siRNA sense strand
uggaugaaacuucugauca

SEQ ID NO: 1643177 - RNA, 19 nt, Homo sapiens
  misc_RNA (1)...(19): siRNA sense strand
cugcauaaagacaguguuu

SEQ ID NO: 1643178 - RNA, 19 nt, Homo sapiens
  misc_RNA (1)...(19): siRNA sense strand
aggacaauguggauacuca

SEQ ID NO: 1643179 - RNA, 19 nt, Homo sapiens
  misc_RNA (1)...(19): siRNA sense strand
uuagcagcuucaaaugauu

SEQ ID NO: 1643180 - RNA, 19 nt, Homo sapiens
  misc_RNA (1)...(19): siRNA sense strand
gaaagugcugucugcuaag

SEQ ID NO: 1643181 - RNA, 19 nt, Homo sapiens
  misc_RNA (1)...(19): siRNA sense strand
gcuggacaaugcgcggauu

SEQ ID NO: 1643182 - RNA, 19 nt, Homo sapiens
  misc_RNA (1)...(19): siRNA sense strand
gcuaucaagcagacauuca

SEQ ID NO: 1643183 - RNA, 19 nt, Homo sapiens
  misc_RNA (1)...(19): siRNA sense strand
gacuuaaacccagaaagga

SEQ ID NO: 1643184 - RNA, 19 nt, Homo sapiens
  misc_RNA (1)...(19): siRNA sense strand
cggauugucucaggaaguc

SEQ ID NO: 1643185 - RNA, 19 nt, Homo sapiens
  misc_RNA (1)...(19): siRNA sense strand
gauccaguugcaaugauau

SEQ ID NO: 1643186 - RNA, 19 nt, Homo sapiens
  misc_RNA (1)...(19): siRNA sense strand
cauuguggaugaaacuucu

SEQ ID NO: 1643187 - RNA, 19 nt, Homo sapiens
  misc_RNA (1)...(19): siRNA sense strand
ugcagaagcagcaaaggaa

SEQ ID NO: 1643188 - RNA, 19 nt, Homo sapiens
  misc_RNA (1)...(19): siRNA sense strand
gggacacagugggaaagug

SEQ ID NO: 1643189 - RNA, 19 nt, Homo sapiens
  misc_RNA (1)...(19): siRNA sense strand
gacgcucugucucuuccuu

SEQ ID NO: 1643190 - RNA, 19 nt, Homo sapiens
  misc_RNA (1)...(19): siRNA sense strand
ggagcuguugggaaagauu

SEQ ID NO: 1643191 - RNA, 19 nt, Homo sapiens
  misc_RNA (1)...(19): siRNA sense strand
ucuuagcagcuucaaauga

SEQ ID NO: 1643192 - RNA, 19 nt, Homo sapiens
  misc_RNA (1)...(19): siRNA sense strand
uucgagagauggagcuguu

SEQ ID NO: 1643193 - RNA, 19 nt, Homo sapiens
  misc_RNA (1)...(19): siRNA sense strand
gcgcggauugucucaggaa

SEQ ID NO: 1643194 - RNA, 19 nt, Homo sapiens
  misc_RNA (1)...(19): siRNA sense strand
aaucuggacuguggaugau

SEQ ID NO: 1643195 - RNA, 19 nt, Homo sapiens
  misc_RNA (1)...(19): siRNA sense strand
ggaccgcaggguuaagcuu

SEQ ID NO: 1643196 - RNA, 19 nt, Homo sapiens
  misc_RNA (1)...(19): siRNA sense strand
cagcuacugccuugugugu

SEQ ID NO: 1643197 - RNA, 19 nt, Homo sapiens
  misc_RNA (1)...(19): siRNA sense strand
guuauugaucuccgaacaa

SEQ ID NO: 1643198 - RNA, 19 nt, Homo sapiens
  misc_RNA (1)...(19): siRNA sense strand
ggaaagugcugucugcuaa

SEQ ID NO: 1643199 - RNA, 19 nt, Homo sapiens
  misc_RNA (1)...(19): siRNA sense strand
gcugagggcucucuguaua

SEQ ID NO: 1643200 - RNA, 19 nt, Homo sapiens
  misc_RNA (1)...(19): siRNA sense strand
gagcauaguucgagagaug

SEQ ID NO: 1643201 - RNA, 19 nt, Homo sapiens
  misc_RNA (1)...(19): siRNA sense strand
cagcacagcucauccauca

SEQ ID NO: 1643202 - RNA, 19 nt, Homo sapiens
  misc_RNA (1)...(19): siRNA sense strand
ggauccaguugcaaugaua

SEQ ID NO: 1643203 - RNA, 19 nt, Homo sapiens
  misc_RNA (1)...(19): siRNA sense strand
ggaauuacaagcauugaau

SEQ ID NO: 1643204 - RNA, 19 nt, Homo sapiens
  misc_RNA (1)...(19): siRNA sense strand
gcacagcucauccaucaau

SEQ ID NO: 1643205 - RNA, 19 nt, Homo sapiens
  misc_RNA (1)...(19): siRNA sense strand
uuacugcccuggacuuaaa

SEQ ID NO: 1643206 - RNA, 19 nt, Homo sapiens
  misc_RNA (1)...(19): siRNA sense strand
agauggagcuguugggaaa

SEQ ID NO: 1643207 - RNA, 19 nt, Homo sapiens
  misc_RNA (1)...(19): siRNA sense strand
uguggaugauuaucgauua

SEQ ID NO: 1643208 - RNA, 19 nt, Homo sapiens
  misc_RNA (1)...(19): siRNA sense strand
ggacuuaaacccagaaagg

SEQ ID NO: 1643209 - RNA, 19 nt, Homo sapiens
  misc_RNA (1)...(19): siRNA sense strand
ugcuggaucuuaccucuua

SEQ ID NO: 1643210 - RNA, 19 nt, Homo sapiens
  misc_RNA (1)...(19): siRNA sense strand
ggacaaaggaugcaaagcu

SEQ ID NO: 1643211 - RNA, 19 nt, Homo sapiens
  misc_RNA (1)...(19): siRNA sense strand
ucuggacuguggaugauua

SEQ ID NO: 1643212 - RNA, 19 nt, Homo sapiens
  misc_RNA (1)...(19): siRNA sense strand
gaaucuggacuguggauga

SEQ ID NO: 1643213 - RNA, 19 nt, Homo sapiens
  misc_RNA (1)...(19): siRNA sense strand
gagcuguugggaaagauua

SEQ ID NO: 1643214 - RNA, 19 nt, Homo sapiens
  misc_RNA (1)...(19): siRNA sense strand
acagagcaauguguaauga

SEQ ID NO: 1643215 - RNA, 19 nt, Homo sapiens
  misc_RNA (1)...(19): siRNA sense strand
agcaaagucugcauaaaga

SEQ ID NO: 1643216 - RNA, 19 nt, Homo sapiens
  misc_RNA (1)...(19): siRNA sense strand
gcaggaauuacaagcauug

SEQ ID NO: 1643217 - RNA, 19 nt, Homo sapiens
  misc_RNA (1)...(19): siRNA sense strand
cagcaaagucugcauaaag

SEQ ID NO: 1643218 - RNA, 19 nt, Homo sapiens
  misc_RNA (1)...(19): siRNA sense strand
gcucgcacguugucagugu

SEQ ID NO: 1643219 - RNA, 19 nt, Homo sapiens
  misc_RNA (1)...(19): siRNA sense strand
gggaaagugcugucugcua

SEQ ID NO: 1643220 - RNA, 19 nt, Homo sapiens
  misc_RNA (1)...(19): siRNA sense strand
uuauugaucuccgaacaaa

SEQ ID NO: 1643221 - RNA, 19 nt, Homo sapiens
  misc_RNA (1)...(19): siRNA sense strand
cuuagcagcuucaaaugau

SEQ ID NO: 1643222 - RNA, 19 nt, Homo sapiens
  misc_RNA (1)...(19): siRNA sense strand
gaucuacgcagcaaagucu

SEQ ID NO: 1643223 - RNA, 19 nt, Homo sapiens
  misc_RNA (1)...(19): siRNA sense strand
ggguuaagcuuugggaagu

SEQ ID NO: 1643224 - RNA, 19 nt, Homo sapiens
  misc_RNA (1)...(19): siRNA sense strand
gauuacugcccuggacuua

SEQ ID NO: 1643225 - RNA, 19 nt, Homo sapiens
  misc_RNA (1)...(19): siRNA sense strand
gguuaagcuuugggaagua

SEQ ID NO: 1643226 - RNA, 19 nt, Homo sapiens
  misc_RNA (1)...(19): siRNA sense strand
ccucuuagcagcuucaaau

SEQ ID NO: 1643227 - RNA, 19 nt, Homo sapiens
  misc_RNA (1)...(19): siRNA sense strand
ccgaacaaaugcuaucaag

SEQ ID NO: 1643228 - RNA, 19 nt, Homo sapiens
  misc_RNA (1)...(19): siRNA sense strand
gaucuccgaacaaaugcua

SEQ ID NO: 1643229 - RNA, 19 nt, Homo sapiens
  misc_RNA (1)...(19): siRNA sense strand
cuaaguuccugcuggacaa

SEQ ID NO: 1643230 - RNA, 19 nt, Homo sapiens
  misc_RNA (1)...(19): siRNA sense strand
cgaccggacucucaaacuc

SEQ ID NO: 1643231 - RNA, 19 nt, Homo sapiens
  misc_RNA (1)...(19): siRNA sense strand
gaccgcaggguuaagcuuu

SEQ ID NO: 1643232 - RNA, 19 nt, Homo sapiens
  misc_RNA (1)...(19): siRNA sense strand
gcauaaagacaguguuugc

SEQ ID NO: 1643233 - RNA, 19 nt, Homo sapiens
  misc_RNA (1)...(19): siRNA sense strand
uggcaguaaugcaggaauu

SEQ ID NO: 1643234 - RNA, 19 nt, Homo sapiens
  misc_RNA (1)...(19): siRNA sense strand
guuaagcuuugggaaguau

SEQ ID NO: 1643235 - RNA, 19 nt, Homo sapiens
  misc_RNA (1)...(19): siRNA sense strand
gagagcauaguucgagaga

SEQ ID NO: 1643236 - RNA, 19 nt, Homo sapiens
  misc_RNA (1)...(19): siRNA sense strand
ggaccagaguugucuucag

SEQ ID NO: 1643237 - RNA, 19 nt, Homo sapiens
  misc_RNA (1)...(19): siRNA sense strand
ugauagugcuggaucuuac

SEQ ID NO: 1643238 - RNA, 19 nt, Homo sapiens
  misc_RNA (1)...(19): siRNA sense strand
gacuguggaugauuaucga

SEQ ID NO: 1643239 - RNA, 19 nt, Homo sapiens
  misc_RNA (1)...(19): siRNA sense strand
caaagcagcacagcucauc

SEQ ID NO: 1643240 - RNA, 19 nt, Homo sapiens
  misc_RNA (1)...(19): siRNA sense strand
gcaggauccaguugcaaug

SEQ ID NO: 1643241 - RNA, 19 nt, Homo sapiens
  misc_RNA (1)...(19): siRNA sense strand
gcucacagggaaaguggaa

SEQ ID NO: 1643242 - RNA, 19 nt, Homo sapiens
  misc_RNA (1)...(19): siRNA sense strand
agagcaauguguaaugagu

SEQ ID NO: 1643243 - RNA, 19 nt, Homo sapiens
  misc_RNA (1)...(19): siRNA sense strand
ugggaaguauuuggagaaa

SEQ ID NO: 1643244 - RNA, 19 nt, Homo sapiens
  misc_RNA (1)...(19): siRNA sense strand
ugagggcucucuguauauc

SEQ ID NO: 1643245 - RNA, 19 nt, Homo sapiens
  misc_RNA (1)...(19): siRNA sense strand
ggacuguggaugauuaucg

SEQ ID NO: 1643246 - RNA, 19 nt, Homo sapiens
  misc_RNA (1)...(19): siRNA sense strand
uaagcuuugggaaguauuu

SEQ ID NO: 1643247 - RNA, 19 nt, Homo sapiens
  misc_RNA (1)...(19): siRNA sense strand
aaagugcugucugcuaagu

SEQ ID NO: 1643248 - RNA, 19 nt, Homo sapiens
  misc_RNA (1)...(19): siRNA sense strand
cugcauaaagacaguguuu

SEQ ID NO: 1643249 - RNA, 19 nt, Homo sapiens
  misc_RNA (1)...(19): siRNA sense strand
uuagcagcuucaaaugauu

SEQ ID NO: 1643250 - RNA, 19 nt, Homo sapiens
  misc_RNA (1)...(19): siRNA sense strand
gaaagugcugucugcuaag

SEQ ID NO: 1643251 - RNA, 19 nt, Homo sapiens
  misc_RNA (1)...(19): siRNA sense strand
gcuggacaaugcgcggauu

SEQ ID NO: 1643252 - RNA, 19 nt, Homo sapiens
  misc_RNA (1)...(19): siRNA sense strand
gcuaucaagcagacauuca

SEQ ID NO: 1643253 - RNA, 19 nt, Homo sapiens
  misc_RNA (1)...(19): siRNA sense strand
gacuuaaacccagaaagga

SEQ ID NO: 1643254 - RNA, 19 nt, Homo sapiens
  misc_RNA (1)...(19): siRNA sense strand
cggauugucucaggaaguc

SEQ ID NO: 1643255 - RNA, 19 nt, Homo sapiens
  misc_RNA (1)...(19): siRNA sense strand
gauccaguugcaaugauau

SEQ ID NO: 1643256 - RNA, 19 nt, Homo sapiens
  misc_RNA (1)...(19): siRNA sense strand
gggacacagugggaaagug

SEQ ID NO: 1643257 - RNA, 19 nt, Homo sapiens
  misc_RNA (1)...(19): siRNA sense strand
ggagcuguugggaaagauu

SEQ ID NO: 1643258 - RNA, 19 nt, Homo sapiens
  misc_RNA (1)...(19): siRNA sense strand
gcgcggauugucucaggaa

SEQ ID NO: 1643259 - RNA, 19 nt, Homo sapiens
  misc_RNA (1)...(19): siRNA sense strand
aaucuggacuguggaugau

SEQ ID NO: 1643260 - RNA, 19 nt, Homo sapiens
  misc_RNA (1)...(19): siRNA sense strand
uucgagagauggagcuguu

SEQ ID NO: 1643261 - RNA, 19 nt, Homo sapiens
  misc_RNA (1)...(19): siRNA sense strand
ucuuagcagcuucaaauga

SEQ ID NO: 1643262 - RNA, 19 nt, Homo sapiens
  misc_RNA (1)...(19): siRNA sense strand
ggaccgcaggguuaagcuu

SEQ ID NO: 1643263 - RNA, 19 nt, Homo sapiens
  misc_RNA (1)...(19): siRNA sense strand
guuauugaucuccgaacaa

SEQ ID NO: 1643264 - RNA, 19 nt, Homo sapiens
  misc_RNA (1)...(19): siRNA sense strand
gaaaggagaucacagagaa

SEQ ID NO: 1643265 - RNA, 19 nt, Homo sapiens
  misc_RNA (1)...(19): siRNA sense strand
gggaauagcuuaucuuguu

SEQ ID NO: 1643266 - RNA, 19 nt, Homo sapiens
  misc_RNA (1)...(19): siRNA sense strand
ucaaagcgcuacucgauua

SEQ ID NO: 1643267 - RNA, 19 nt, Homo sapiens
  misc_RNA (1)...(19): siRNA sense strand
caacucagcucgucaauca

SEQ ID NO: 1643268 - RNA, 19 nt, Homo sapiens
  misc_RNA (1)...(19): siRNA sense strand
ggaauagcuuaucuuguua

SEQ ID NO: 1643269 - RNA, 19 nt, Homo sapiens
  misc_RNA (1)...(19): siRNA sense strand
gaccaaggaucgaggagua

SEQ ID NO: 1643270 - RNA, 19 nt, Homo sapiens
  misc_RNA (1)...(19): siRNA sense strand
gaaagugauuacagacauu

SEQ ID NO: 1643271 - RNA, 19 nt, Homo sapiens
  misc_RNA (1)...(19): siRNA sense strand
gcaguuaucucagaauugu

SEQ ID NO: 1643272 - RNA, 19 nt, Homo sapiens
  misc_RNA (1)...(19): siRNA sense strand
aaagguacauccaucagua

SEQ ID NO: 1643273 - RNA, 19 nt, Homo sapiens
  misc_RNA (1)...(19): siRNA sense strand
gccauuacauuucuucaaa

SEQ ID NO: 1643274 - RNA, 19 nt, Homo sapiens
  misc_RNA (1)...(19): siRNA sense strand
gauucugucuuaucuguaa

SEQ ID NO: 1643275 - RNA, 19 nt, Homo sapiens
  misc_RNA (1)...(19): siRNA sense strand
acaaguaguucgagagaaa

SEQ ID NO: 1643276 - RNA, 19 nt, Homo sapiens
  misc_RNA (1)...(19): siRNA sense strand
cagagaaagugauuacaga

SEQ ID NO: 1643277 - RNA, 19 nt, Homo sapiens
  misc_RNA (1)...(19): siRNA sense strand
gaacguggaauacaaguag

SEQ ID NO: 1643278 - RNA, 19 nt, Homo sapiens
  misc_RNA (1)...(19): siRNA sense strand
gcaagcauuucuuaaaggu

SEQ ID NO: 1643279 - RNA, 19 nt, Homo sapiens
  misc_RNA (1)...(19): siRNA sense strand
gaugaacauuugcaacuca

SEQ ID NO: 1643280 - RNA, 19 nt, Homo sapiens
  misc_RNA (1)...(19): siRNA sense strand
cagcagcgauuacuagaca

SEQ ID NO: 1643281 - RNA, 19 nt, Homo sapiens
  misc_RNA (1)...(19): siRNA sense strand
ugucuuaucuguaacuaug

SEQ ID NO: 1643282 - RNA, 19 nt, Homo sapiens
  misc_RNA (1)...(19): siRNA sense strand
cagcaguuaucucagaauu

SEQ ID NO: 1643283 - RNA, 19 nt, Homo sapiens
  misc_RNA (1)...(19): siRNA sense strand
gaaggagacuuaagaaaag

SEQ ID NO: 1643284 - RNA, 19 nt, Homo sapiens
  misc_RNA (1)...(19): siRNA sense strand
agaagucuauuaucacaga

SEQ ID NO: 1643285 - RNA, 19 nt, Homo sapiens
  misc_RNA (1)...(19): siRNA sense strand
ggaaaggagaucacagaga

SEQ ID NO: 1643286 - RNA, 19 nt, Homo sapiens
  misc_RNA (1)...(19): siRNA sense strand
ggaugaagcagauucuaug

SEQ ID NO: 1643287 - RNA, 19 nt, Homo sapiens
  misc_RNA (1)...(19): siRNA sense strand
gaacauuugcaacucauca

SEQ ID NO: 1643288 - RNA, 19 nt, Homo sapiens
  misc_RNA (1)...(19): siRNA sense strand
caacagcagcgauuacuag

SEQ ID NO: 1643289 - RNA, 19 nt, Homo sapiens
  misc_RNA (1)...(19): siRNA sense strand
ggaaguagcggagagaaca

SEQ ID NO: 1643290 - RNA, 19 nt, Homo sapiens
  misc_RNA (1)...(19): siRNA sense strand
cuaugucagucgaauaauu

SEQ ID NO: 1643291 - RNA, 19 nt, Homo sapiens
  misc_RNA (1)...(19): siRNA sense strand
uagaagcuguggucaagga

SEQ ID NO: 1643292 - RNA, 19 nt, Homo sapiens
  misc_RNA (1)...(19): siRNA sense strand
ugaugaacguggaauacaa

SEQ ID NO: 1643293 - RNA, 19 nt, Homo sapiens
  misc_RNA (1)...(19): siRNA sense strand
gagggaauagcuuaucuug

SEQ ID NO: 1643294 - RNA, 19 nt, Homo sapiens
  misc_RNA (1)...(19): siRNA sense strand
gugaugagggaauagcuua

SEQ ID NO: 1643295 - RNA, 19 nt, Homo sapiens
  misc_RNA (1)...(19): siRNA sense strand
acagaagucuauuaucaca

SEQ ID NO: 1643296 - RNA, 19 nt, Homo sapiens
  misc_RNA (1)...(19): siRNA sense strand
gaugaagcagauucuauga

SEQ ID NO: 1643297 - RNA, 19 nt, Homo sapiens
  misc_RNA (1)...(19): siRNA sense strand
ugaguuaaaugcaucugau

SEQ ID NO: 1643298 - RNA, 19 nt, Homo sapiens
  misc_RNA (1)...(19): siRNA sense strand
guaacuaugucagucgaau

SEQ ID NO: 1643299 - RNA, 19 nt, Homo sapiens
  misc_RNA (1)...(19): siRNA sense strand
ucaacuccaugaugugguu

SEQ ID NO: 1643300 - RNA, 19 nt, Homo sapiens
  misc_RNA (1)...(19): siRNA sense strand
uacuagacauugccaagaa

SEQ ID NO: 1643301 - RNA, 19 nt, Homo sapiens
  misc_RNA (1)...(19): siRNA sense strand
uaacuaugucagucgaaua

SEQ ID NO: 1643302 - RNA, 19 nt, Homo sapiens
  misc_RNA (1)...(19): siRNA sense strand
gacguaccauggagaagga

SEQ ID NO: 1643303 - RNA, 19 nt, Homo sapiens
  misc_RNA (1)...(19): siRNA sense strand
ugacaaaugccuagcagau

SEQ ID NO: 1643304 - RNA, 19 nt, Homo sapiens
  misc_RNA (1)...(19): siRNA sense strand
ggagaucacagagaaagug

SEQ ID NO: 1643305 - RNA, 19 nt, Homo sapiens
  misc_RNA (1)...(19): siRNA sense strand
caacucaucagccuuugug

SEQ ID NO: 1643306 - RNA, 19 nt, Homo sapiens
  misc_RNA (1)...(19): siRNA sense strand
gaagucuauuaucacagaa

SEQ ID NO: 1643307 - RNA, 19 nt, Homo sapiens
  misc_RNA (1)...(19): siRNA sense strand
ugagaaaauugauggagua

SEQ ID NO: 1643308 - RNA, 19 nt, Homo sapiens
  misc_RNA (1)...(19): siRNA sense strand
agaaagugauuacagacau

SEQ ID NO: 1643309 - RNA, 19 nt, Homo sapiens
  misc_RNA (1)...(19): siRNA sense strand
cagaaggagacuuaagaaa

SEQ ID NO: 1643310 - RNA, 19 nt, Homo sapiens
  misc_RNA (1)...(19): siRNA sense strand
gagaaagugauuacagaca

SEQ ID NO: 1643311 - RNA, 19 nt, Homo sapiens
  misc_RNA (1)...(19): siRNA sense strand
ccgauucugucuuaucugu

SEQ ID NO: 1643312 - RNA, 19 nt, Homo sapiens
  misc_RNA (1)...(19): siRNA sense strand
caaaauguguggaugaagu

SEQ ID NO: 1643313 - RNA, 19 nt, Homo sapiens
  misc_RNA (1)...(19): siRNA sense strand
agauugugauucuggauga

SEQ ID NO: 1643314 - RNA, 19 nt, Homo sapiens
  misc_RNA (1)...(19): siRNA sense strand
gcucgucaaucaacuccau

SEQ ID NO: 1643315 - RNA, 19 nt, Homo sapiens
  misc_RNA (1)...(19): siRNA sense strand
gaaaaccacccgauucugu

SEQ ID NO: 1643316 - RNA, 19 nt, Homo sapiens
  misc_RNA (1)...(19): siRNA sense strand
guaguucgagagaaaguga

SEQ ID NO: 1643317 - RNA, 19 nt, Homo sapiens
  misc_RNA (1)...(19): siRNA sense strand
gcagcgauuacuagacauu

SEQ ID NO: 1643318 - RNA, 19 nt, Homo sapiens
  misc_RNA (1)...(19): siRNA sense strand
ggccugaacuuuuccgauu

SEQ ID NO: 1643319 - RNA, 19 nt, Homo sapiens
  misc_RNA (1)...(19): siRNA sense strand
gacaaaugccuagcagaug

SEQ ID NO: 1643320 - RNA, 19 nt, Homo sapiens
  misc_RNA (1)...(19): siRNA sense strand
guggaaaggagaucacaga

SEQ ID NO: 1643321 - RNA, 19 nt, Homo sapiens
  misc_RNA (1)...(19): siRNA sense strand
ucagaaggagacuuaagaa

SEQ ID NO: 1643322 - RNA, 19 nt, Homo sapiens
  misc_RNA (1)...(19): siRNA sense strand
gaaguagcggagagaacaa

SEQ ID NO: 1643323 - RNA, 19 nt, Homo sapiens
  misc_RNA (1)...(19): siRNA sense strand
uaugucagucgaauaauug

SEQ ID NO: 1643324 - RNA, 19 nt, Homo sapiens
  misc_RNA (1)...(19): siRNA sense strand
guucuugaguuaaaugcau

SEQ ID NO: 1643325 - RNA, 19 nt, Homo sapiens
  misc_RNA (1)...(19): siRNA sense strand
ggcagcagcuagagaacuc

SEQ ID NO: 1643326 - RNA, 19 nt, Homo sapiens
  misc_RNA (1)...(19): siRNA sense strand
caaagcgcuacucgauuaa

SEQ ID NO: 1643327 - RNA, 19 nt, Homo sapiens
  misc_RNA (1)...(19): siRNA sense strand
gucagaaggagacuuaaga

SEQ ID NO: 1643328 - RNA, 19 nt, Homo sapiens
  misc_RNA (1)...(19): siRNA sense strand
ggaagccguguccgccuuu

SEQ ID NO: 1643329 - RNA, 19 nt, Homo sapiens
  misc_RNA (1)...(19): siRNA sense strand
cugauaaacagaagucuau

SEQ ID NO: 1643330 - RNA, 19 nt, Homo sapiens
  misc_RNA (1)...(19): siRNA sense strand
aauuagugaugagggaaua

SEQ ID NO: 1643331 - RNA, 19 nt, Homo sapiens
  misc_RNA (1)...(19): siRNA sense strand
uaagacguaccauggagaa

SEQ ID NO: 1643332 - RNA, 19 nt, Homo sapiens
  misc_RNA (1)...(19): siRNA sense strand
uagcggagagaacaagaaa

SEQ ID NO: 1643333 - RNA, 19 nt, Homo sapiens
  misc_RNA (1)...(19): siRNA sense strand
acuagaagcuguggucaag

SEQ ID NO: 1643334 - RNA, 19 nt, Homo sapiens
  misc_RNA (1)...(19): siRNA sense strand
caggcagcuuuaagacgua

SEQ ID NO: 1643335 - RNA, 19 nt, Homo sapiens
  misc_RNA (1)...(19): siRNA sense strand
gucaggaagucgcucagau

SEQ ID NO: 1643336 - RNA, 19 nt, Homo sapiens
  misc_RNA (1)...(19): siRNA sense strand
uugccgaaguugacaaaug

SEQ ID NO: 1643337 - RNA, 19 nt, Homo sapiens
  misc_RNA (1)...(19): siRNA sense strand
agaaggagacuuaagaaaa

SEQ ID NO: 1643338 - RNA, 19 nt, Homo sapiens
  misc_RNA (1)...(19): siRNA sense strand
ucaggaagucgcucagaug

SEQ ID NO: 1643339 - RNA, 19 nt, Homo sapiens
  misc_RNA (1)...(19): siRNA sense strand
accacccgauucugucuua

SEQ ID NO: 1643340 - RNA, 19 nt, Homo sapiens
  misc_RNA (1)...(19): siRNA sense strand
uccaugaugugguuguaga

SEQ ID NO: 1643341 - RNA, 19 nt, Homo sapiens
  misc_RNA (1)...(19): siRNA sense strand
cuucaaagcgcuacucgau

SEQ ID NO: 1643342 - RNA, 19 nt, Homo sapiens
  misc_RNA (1)...(19): siRNA sense strand
ccauuacauuucuucaaag

SEQ ID NO: 1643343 - RNA, 19 nt, Homo sapiens
  misc_RNA (1)...(19): siRNA sense strand
gacauugccaagaaggaaa

SEQ ID NO: 1643344 - RNA, 19 nt, Homo sapiens
  misc_RNA (1)...(19): siRNA sense strand
gaugaacguggaauacaag

SEQ ID NO: 1643345 - RNA, 19 nt, Homo sapiens
  misc_RNA (1)...(19): siRNA sense strand
ccauggagaaggagucgaa

SEQ ID NO: 1643346 - RNA, 19 nt, Homo sapiens
  misc_RNA (1)...(19): siRNA sense strand
caauuaacugugucaggaa

SEQ ID NO: 1643347 - RNA, 19 nt, Homo sapiens
  misc_RNA (1)...(19): siRNA sense strand
gauugugauucuggaugaa

SEQ ID NO: 1643348 - RNA, 19 nt, Homo sapiens
  misc_RNA (1)...(19): siRNA sense strand
augcagcaguuaucucaga

SEQ ID NO: 1643349 - RNA, 19 nt, Homo sapiens
  misc_RNA (1)...(19): siRNA sense strand
caucagccuuugugcaacu

SEQ ID NO: 1643350 - RNA, 19 nt, Homo sapiens
  misc_RNA (1)...(19): siRNA sense strand
caagcauuucuuaaaggua

SEQ ID NO: 1643351 - RNA, 19 nt, Homo sapiens
  misc_RNA (1)...(19): siRNA sense strand
gaacuuuuccgauuaagag

SEQ ID NO: 1643352 - RNA, 19 nt, Homo sapiens
  misc_RNA (1)...(19): siRNA sense strand
ugaugcagcaguuaucuca

SEQ ID NO: 1643353 - RNA, 19 nt, Homo sapiens
  misc_RNA (1)...(19): siRNA sense strand
agauggugcugaugaacau

SEQ ID NO: 1643354 - RNA, 19 nt, Homo sapiens
  misc_RNA (1)...(19): siRNA sense strand
agugucagaaggagacuua

SEQ ID NO: 1643355 - RNA, 19 nt, Homo sapiens
  misc_RNA (1)...(19): siRNA sense strand
ucaacagcagcgauuacua

SEQ ID NO: 1643356 - RNA, 19 nt, Homo sapiens
  misc_RNA (1)...(19): siRNA sense strand
aacuaugucagucgaauaa

SEQ ID NO: 1643357 - RNA, 19 nt, Homo sapiens
  misc_RNA (1)...(19): siRNA sense strand
gagaaggagucgaaaacca

SEQ ID NO: 1643358 - RNA, 19 nt, Homo sapiens
  misc_RNA (1)...(19): siRNA sense strand
uaaagguacauccaucagu

SEQ ID NO: 1643359 - RNA, 19 nt, Homo sapiens
  misc_RNA (1)...(19): siRNA sense strand
gcggagagaacaagaaagc

SEQ ID NO: 1643360 - RNA, 19 nt, Homo sapiens
  misc_RNA (1)...(19): siRNA sense strand
ggagcagaucuuccuaauc

SEQ ID NO: 1643361 - RNA, 19 nt, Homo sapiens
  misc_RNA (1)...(19): siRNA sense strand
gaugagggaauagcuuauc

SEQ ID NO: 1643362 - RNA, 19 nt, Homo sapiens
  misc_RNA (1)...(19): siRNA sense strand
gccugaacuuuuccgauua

SEQ ID NO: 1643363 - RNA, 19 nt, Homo sapiens
  misc_RNA (1)...(19): siRNA sense strand
aagcgcuacucgauuaaca

SEQ ID NO: 1643364 - RNA, 19 nt, Homo sapiens
  misc_RNA (1)...(19): siRNA sense strand
gaaaggagaucacagagaa

SEQ ID NO: 1643365 - RNA, 19 nt, Homo sapiens
  misc_RNA (1)...(19): siRNA sense strand
gggaauagcuuaucuuguu

SEQ ID NO: 1643366 - RNA, 19 nt, Homo sapiens
  misc_RNA (1)...(19): siRNA sense strand
ucaaagcgcuacucgauua

SEQ ID NO: 1643367 - RNA, 19 nt, Homo sapiens
  misc_RNA (1)...(19): siRNA sense strand
caacucagcucgucaauca

SEQ ID NO: 1643368 - RNA, 19 nt, Homo sapiens
  misc_RNA (1)...(19): siRNA sense strand
ggaauagcuuaucuuguua

SEQ ID NO: 1643369 - RNA, 19 nt, Homo sapiens
  misc_RNA (1)...(19): siRNA sense strand
gaccaaggaucgaggagua

SEQ ID NO: 1643370 - RNA, 19 nt, Homo sapiens
  misc_RNA (1)...(19): siRNA sense strand
gaaagugauuacagacauu

SEQ ID NO: 1643371 - RNA, 19 nt, Homo sapiens
  misc_RNA (1)...(19): siRNA sense strand
gcaguuaucucagaauugu

SEQ ID NO: 1643372 - RNA, 19 nt, Homo sapiens
  misc_RNA (1)...(19): siRNA sense strand
aaagguacauccaucagua

SEQ ID NO: 1643373 - RNA, 19 nt, Homo sapiens
  misc_RNA (1)...(19): siRNA sense strand
gccauuacauuucuucaaa

SEQ ID NO: 1643374 - RNA, 19 nt, Homo sapiens
  misc_RNA (1)...(19): siRNA sense strand
gauucugucuuaucuguaa

SEQ ID NO: 1643375 - RNA, 19 nt, Homo sapiens
  misc_RNA (1)...(19): siRNA sense strand
acaaguaguucgagagaaa

SEQ ID NO: 1643376 - RNA, 19 nt, Homo sapiens
  misc_RNA (1)...(19): siRNA sense strand
cagagaaagugauuacaga

SEQ ID NO: 1643377 - RNA, 19 nt, Homo sapiens
  misc_RNA (1)...(19): siRNA sense strand
gaacguggaauacaaguag

SEQ ID NO: 1643378 - RNA, 19 nt, Homo sapiens
  misc_RNA (1)...(19): siRNA sense strand
gcaagcauuucuuaaaggu

SEQ ID NO: 1643379 - RNA, 19 nt, Homo sapiens
  misc_RNA (1)...(19): siRNA sense strand
gaugaacauuugcaacuca

SEQ ID NO: 1643380 - RNA, 19 nt, Homo sapiens
  misc_RNA (1)...(19): siRNA sense strand
cagcagcgauuacuagaca

SEQ ID NO: 1643381 - RNA, 19 nt, Homo sapiens
  misc_RNA (1)...(19): siRNA sense strand
ugucuuaucuguaacuaug

SEQ ID NO: 1643382 - RNA, 19 nt, Homo sapiens
  misc_RNA (1)...(19): siRNA sense strand
cagcaguuaucucagaauu

SEQ ID NO: 1643383 - RNA, 19 nt, Homo sapiens
  misc_RNA (1)...(19): siRNA sense strand
gaaggagacuuaagaaaag

SEQ ID NO: 1643384 - RNA, 19 nt, Homo sapiens
  misc_RNA (1)...(19): siRNA sense strand
agaagucuauuaucacaga

SEQ ID NO: 1643385 - RNA, 19 nt, Homo sapiens
  misc_RNA (1)...(19): siRNA sense strand
ggaaaggagaucacagaga

SEQ ID NO: 1643386 - RNA, 19 nt, Homo sapiens
  misc_RNA (1)...(19): siRNA sense strand
ggaugaagcagauucuaug

SEQ ID NO: 1643387 - RNA, 19 nt, Homo sapiens
  misc_RNA (1)...(19): siRNA sense strand
gaacauuugcaacucauca

SEQ ID NO: 1643388 - RNA, 19 nt, Homo sapiens
  misc_RNA (1)...(19): siRNA sense strand
caacagcagcgauuacuag

SEQ ID NO: 1643389 - RNA, 19 nt, Homo sapiens
  misc_RNA (1)...(19): siRNA sense strand
ggaaguagcggagagaaca

SEQ ID NO: 1643390 - RNA, 19 nt, Homo sapiens
  misc_RNA (1)...(19): siRNA sense strand
cuaugucagucgaauaauu

SEQ ID NO: 1643391 - RNA, 19 nt, Homo sapiens
  misc_RNA (1)...(19): siRNA sense strand
uagaagcuguggucaagga

SEQ ID NO: 1643392 - RNA, 19 nt, Homo sapiens
  misc_RNA (1)...(19): siRNA sense strand
ugaugaacguggaauacaa

SEQ ID NO: 1643393 - RNA, 19 nt, Homo sapiens
  misc_RNA (1)...(19): siRNA sense strand
gagggaauagcuuaucuug

SEQ ID NO: 1643394 - RNA, 19 nt, Homo sapiens
  misc_RNA (1)...(19): siRNA sense strand
gugaugagggaauagcuua

SEQ ID NO: 1643395 - RNA, 19 nt, Homo sapiens
  misc_RNA (1)...(19): siRNA sense strand
acagaagucuauuaucaca

SEQ ID NO: 1643396 - RNA, 19 nt, Homo sapiens
  misc_RNA (1)...(19): siRNA sense strand
gaugaagcagauucuauga

SEQ ID NO: 1643397 - RNA, 19 nt, Homo sapiens
  misc_RNA (1)...(19): siRNA sense strand
ugaguuaaaugcaucugau

SEQ ID NO: 1643398 - RNA, 19 nt, Homo sapiens
  misc_RNA (1)...(19): siRNA sense strand
guaacuaugucagucgaau

SEQ ID NO: 1643399 - RNA, 19 nt, Homo sapiens
  misc_RNA (1)...(19): siRNA sense strand
ucaacuccaugaugugguu

SEQ ID NO: 1643400 - RNA, 19 nt, Homo sapiens
  misc_RNA (1)...(19): siRNA sense strand
uacuagacauugccaagaa

SEQ ID NO: 1643401 - RNA, 19 nt, Homo sapiens
  misc_RNA (1)...(19): siRNA sense strand
uaacuaugucagucgaaua

SEQ ID NO: 1643402 - RNA, 19 nt, Homo sapiens
  misc_RNA (1)...(19): siRNA sense strand
gacguaccauggagaagga

SEQ ID NO: 1643403 - RNA, 19 nt, Homo sapiens
  misc_RNA (1)...(19): siRNA sense strand
ugacaaaugccuagcagau

SEQ ID NO: 1643404 - RNA, 19 nt, Homo sapiens
  misc_RNA (1)...(19): siRNA sense strand
ggagaucacagagaaagug

SEQ ID NO: 1643405 - RNA, 19 nt, Homo sapiens
  misc_RNA (1)...(19): siRNA sense strand
caacucaucagccuuugug

SEQ ID NO: 1643406 - RNA, 19 nt, Homo sapiens
  misc_RNA (1)...(19): siRNA sense strand
gaagucuauuaucacagaa

SEQ ID NO: 1643407 - RNA, 19 nt, Homo sapiens
  misc_RNA (1)...(19): siRNA sense strand
ugagaaaauugauggagua

SEQ ID NO: 1643408 - RNA, 19 nt, Homo sapiens
  misc_RNA (1)...(19): siRNA sense strand
agaaagugauuacagacau

SEQ ID NO: 1643409 - RNA, 19 nt, Homo sapiens
  misc_RNA (1)...(19): siRNA sense strand
cagaaggagacuuaagaaa

SEQ ID NO: 1643410 - RNA, 19 nt, Homo sapiens
  misc_RNA (1)...(19): siRNA sense strand
gagaaagugauuacagaca

SEQ ID NO: 1643411 - RNA, 19 nt, Homo sapiens
  misc_RNA (1)...(19): siRNA sense strand
ccgauucugucuuaucugu

SEQ ID NO: 1643412 - RNA, 19 nt, Homo sapiens
  misc_RNA (1)...(19): siRNA sense strand
caaaauguguggaugaagu

SEQ ID NO: 1643413 - RNA, 19 nt, Homo sapiens
  misc_RNA (1)...(19): siRNA sense strand
agauugugauucuggauga

SEQ ID NO: 1643414 - RNA, 19 nt, Homo sapiens
  misc_RNA (1)...(19): siRNA sense strand
gcucgucaaucaacuccau

SEQ ID NO: 1643415 - RNA, 19 nt, Homo sapiens
  misc_RNA (1)...(19): siRNA sense strand
gaaaaccacccgauucugu

SEQ ID NO: 1643416 - RNA, 19 nt, Homo sapiens
  misc_RNA (1)...(19): siRNA sense strand
guaguucgagagaaaguga

SEQ ID NO: 1643417 - RNA, 19 nt, Homo sapiens
  misc_RNA (1)...(19): siRNA sense strand
gcagcgauuacuagacauu

SEQ ID NO: 1643418 - RNA, 19 nt, Homo sapiens
  misc_RNA (1)...(19): siRNA sense strand
ggccugaacuuuuccgauu

SEQ ID NO: 1643419 - RNA, 19 nt, Homo sapiens
  misc_RNA (1)...(19): siRNA sense strand
gacaaaugccuagcagaug

SEQ ID NO: 1643420 - RNA, 19 nt, Homo sapiens
  misc_RNA (1)...(19): siRNA sense strand
guggaaaggagaucacaga

SEQ ID NO: 1643421 - RNA, 19 nt, Homo sapiens
  misc_RNA (1)...(19): siRNA sense strand
ucagaaggagacuuaagaa

SEQ ID NO: 1643422 - RNA, 19 nt, Homo sapiens
  misc_RNA (1)...(19): siRNA sense strand
gaaguagcggagagaacaa

SEQ ID NO: 1643423 - RNA, 19 nt, Homo sapiens
  misc_RNA (1)...(19): siRNA sense strand
uaugucagucgaauaauug

SEQ ID NO: 1643424 - RNA, 19 nt, Homo sapiens
  misc_RNA (1)...(19): siRNA sense strand
guucuugaguuaaaugcau

SEQ ID NO: 1643425 - RNA, 19 nt, Homo sapiens
  misc_RNA (1)...(19): siRNA sense strand
ggcagcagcuagagaacuc

SEQ ID NO: 1643426 - RNA, 19 nt, Homo sapiens
  misc_RNA (1)...(19): siRNA sense strand
caaagcgcuacucgauuaa

SEQ ID NO: 1643427 - RNA, 19 nt, Homo sapiens
  misc_RNA (1)...(19): siRNA sense strand
gucagaaggagacuuaaga

SEQ ID NO: 1643428 - RNA, 19 nt, Homo sapiens
  misc_RNA (1)...(19): siRNA sense strand
ggaagccguguccgccuuu

SEQ ID NO: 1643429 - RNA, 19 nt, Homo sapiens
  misc_RNA (1)...(19): siRNA sense strand
cugauaaacagaagucuau

SEQ ID NO: 1643430 - RNA, 19 nt, Homo sapiens
  misc_RNA (1)...(19): siRNA sense strand
aauuagugaugagggaaua

SEQ ID NO: 1643431 - RNA, 19 nt, Homo sapiens
  misc_RNA (1)...(19): siRNA sense strand
uaagacguaccauggagaa

SEQ ID NO: 1643432 - RNA, 19 nt, Homo sapiens
  misc_RNA (1)...(19): siRNA sense strand
uagcggagagaacaagaaa

SEQ ID NO: 1643433 - RNA, 19 nt, Homo sapiens
  misc_RNA (1)...(19): siRNA sense strand
acuagaagcuguggucaag

SEQ ID NO: 1643434 - RNA, 19 nt, Homo sapiens
  misc_RNA (1)...(19): siRNA sense strand
caggcagcuuuaagacgua

SEQ ID NO: 1643435 - RNA, 19 nt, Homo sapiens
  misc_RNA (1)...(19): siRNA sense strand
gucaggaagucgcucagau

SEQ ID NO: 1643436 - RNA, 19 nt, Homo sapiens
  misc_RNA (1)...(19): siRNA sense strand
uugccgaaguugacaaaug

SEQ ID NO: 1643437 - RNA, 19 nt, Homo sapiens
  misc_RNA (1)...(19): siRNA sense strand
agaaggagacuuaagaaaa

SEQ ID NO: 1643438 - RNA, 19 nt, Homo sapiens
  misc_RNA (1)...(19): siRNA sense strand
ucaggaagucgcucagaug

SEQ ID NO: 1643439 - RNA, 19 nt, Homo sapiens
  misc_RNA (1)...(19): siRNA sense strand
accacccgauucugucuua

SEQ ID NO: 1643440 - RNA, 19 nt, Homo sapiens
  misc_RNA (1)...(19): siRNA sense strand
uccaugaugugguuguaga

SEQ ID NO: 1643441 - RNA, 19 nt, Homo sapiens
  misc_RNA (1)...(19): siRNA sense strand
cuucaaagcgcuacucgau

SEQ ID NO: 1643442 - RNA, 19 nt, Homo sapiens
  misc_RNA (1)...(19): siRNA sense strand
ccauuacauuucuucaaag

SEQ ID NO: 1643443 - RNA, 19 nt, Homo sapiens
  misc_RNA (1)...(19): siRNA sense strand
gacauugccaagaaggaaa

SEQ ID NO: 1643444 - RNA, 19 nt, Homo sapiens
  misc_RNA (1)...(19): siRNA sense strand
gaugaacguggaauacaag

SEQ ID NO: 1643445 - RNA, 19 nt, Homo sapiens
  misc_RNA (1)...(19): siRNA sense strand
ccauggagaaggagucgaa

SEQ ID NO: 1643446 - RNA, 19 nt, Homo sapiens
  misc_RNA (1)...(19): siRNA sense strand
caauuaacugugucaggaa

SEQ ID NO: 1643447 - RNA, 19 nt, Homo sapiens
  misc_RNA (1)...(19): siRNA sense strand
gauugugauucuggaugaa

SEQ ID NO: 1643448 - RNA, 19 nt, Homo sapiens
  misc_RNA (1)...(19): siRNA sense strand
augcagcaguuaucucaga

SEQ ID NO: 1643449 - RNA, 19 nt, Homo sapiens
  misc_RNA (1)...(19): siRNA sense strand
caucagccuuugugcaacu

SEQ ID NO: 1643450 - RNA, 19 nt, Homo sapiens
  misc_RNA (1)...(19): siRNA sense strand
caagcauuucuuaaaggua

SEQ ID NO: 1643451 - RNA, 19 nt, Homo sapiens
  misc_RNA (1)...(19): siRNA sense strand
gaacuuuuccgauuaagag

SEQ ID NO: 1643452 - RNA, 19 nt, Homo sapiens
  misc_RNA (1)...(19): siRNA sense strand
ugaugcagcaguuaucuca

SEQ ID NO: 1643453 - RNA, 19 nt, Homo sapiens
  misc_RNA (1)...(19): siRNA sense strand
agauggugcugaugaacau

SEQ ID NO: 1643454 - RNA, 19 nt, Homo sapiens
  misc_RNA (1)...(19): siRNA sense strand
agugucagaaggagacuua

SEQ ID NO: 1643455 - RNA, 19 nt, Homo sapiens
  misc_RNA (1)...(19): siRNA sense strand
ucaacagcagcgauuacua

SEQ ID NO: 1643456 - RNA, 19 nt, Homo sapiens
  misc_RNA (1)...(19): siRNA sense strand
aacuaugucagucgaauaa

SEQ ID NO: 1643457 - RNA, 19 nt, Homo sapiens
  misc_RNA (1)...(19): siRNA sense strand
gagaaggagucgaaaacca

SEQ ID NO: 1643458 - RNA, 19 nt, Homo sapiens
  misc_RNA (1)...(19): siRNA sense strand
uaaagguacauccaucagu

SEQ ID NO: 1643459 - RNA, 19 nt, Homo sapiens
  misc_RNA (1)...(19): siRNA sense strand
gcggagagaacaagaaagc

SEQ ID NO: 1643460 - RNA, 19 nt, Homo sapiens
  misc_RNA (1)...(19): siRNA sense strand
ggagcagaucuuccuaauc

SEQ ID NO: 1643461 - RNA, 19 nt, Homo sapiens
  misc_RNA (1)...(19): siRNA sense strand
gaugagggaauagcuuauc

SEQ ID NO: 1643462 - RNA, 19 nt, Homo sapiens
  misc_RNA (1)...(19): siRNA sense strand
gccugaacuuuuccgauua

SEQ ID NO: 1643463 - RNA, 19 nt, Homo sapiens
  misc_RNA (1)...(19): siRNA sense strand
aagcgcuacucgauuaaca

SEQ ID NO: 1643464 - RNA, 19 nt, Homo sapiens
  misc_RNA (1)...(19): siRNA sense strand
gaacugcuguggucacuuu

SEQ ID NO: 1643465 - RNA, 19 nt, Homo sapiens
  misc_RNA (1)...(19): siRNA sense strand
agaaggagauucacagaga

SEQ ID NO: 1643466 - RNA, 19 nt, Homo sapiens
  misc_RNA (1)...(19): siRNA sense strand
gccaacagcccuaacauuu

SEQ ID NO: 1643467 - RNA, 19 nt, Homo sapiens
  misc_RNA (1)...(19): siRNA sense strand
ggaagcgaaugaggaguuu

SEQ ID NO: 1643468 - RNA, 19 nt, Homo sapiens
  misc_RNA (1)...(19): siRNA sense strand
gcacaugaagcgacaaaga

SEQ ID NO: 1643469 - RNA, 19 nt, Homo sapiens
  misc_RNA (1)...(19): siRNA sense strand
gcaagcaagcacuauauga

SEQ ID NO: 1643470 - RNA, 19 nt, Homo sapiens
  misc_RNA (1)...(19): siRNA sense strand
caacagcccuaacauuugc

SEQ ID NO: 1643471 - RNA, 19 nt, Homo sapiens
  misc_RNA (1)...(19): siRNA sense strand
caacauagucaauuugcuu

SEQ ID NO: 1643472 - RNA, 19 nt, Homo sapiens
  misc_RNA (1)...(19): siRNA sense strand
caagcaagcacuauaugaa

SEQ ID NO: 1643473 - RNA, 19 nt, Homo sapiens
  misc_RNA (1)...(19): siRNA sense strand
ccaaccaugugacaccuuu

SEQ ID NO: 1643474 - RNA, 19 nt, Homo sapiens
  misc_RNA (1)...(19): siRNA sense strand
ccacuccucugcugcuauu

SEQ ID NO: 1643475 - RNA, 19 nt, Homo sapiens
  misc_RNA (1)...(19): siRNA sense strand
gaugugguacaaccucuua

SEQ ID NO: 1643476 - RNA, 19 nt, Homo sapiens
  misc_RNA (1)...(19): siRNA sense strand
agcaagcacuauaugaaua

SEQ ID NO: 1643477 - RNA, 19 nt, Homo sapiens
  misc_RNA (1)...(19): siRNA sense strand
ugacaaagcagagcacaug

SEQ ID NO: 1643478 - RNA, 19 nt, Homo sapiens
  misc_RNA (1)...(19): siRNA sense strand
uguguagacuugacuauca

SEQ ID NO: 1643479 - RNA, 19 nt, Homo sapiens
  misc_RNA (1)...(19): siRNA sense strand
ccaacagcccuaacauuug

SEQ ID NO: 1643480 - RNA, 19 nt, Homo sapiens
  misc_RNA (1)...(19): siRNA sense strand
gaccaugugugcggugcua

SEQ ID NO: 1643481 - RNA, 19 nt, Homo sapiens
  misc_RNA (1)...(19): siRNA sense strand
agacuugacuaucacuaau

SEQ ID NO: 1643482 - RNA, 19 nt, Homo sapiens
  misc_RNA (1)...(19): siRNA sense strand
gcgcaagcaagcacuauau

SEQ ID NO: 1643483 - RNA, 19 nt, Homo sapiens
  misc_RNA (1)...(19): siRNA sense strand
agagagaccuggccaagac

SEQ ID NO: 1643484 - RNA, 19 nt, Homo sapiens
  misc_RNA (1)...(19): siRNA sense strand
gacuaucacuaaucugcuu

SEQ ID NO: 1643485 - RNA, 19 nt, Homo sapiens
  misc_RNA (1)...(19): siRNA sense strand
gaccacaacauagucaauu

SEQ ID NO: 1643486 - RNA, 19 nt, Homo sapiens
  misc_RNA (1)...(19): siRNA sense strand
caagaaggagauucacaga

SEQ ID NO: 1643487 - RNA, 19 nt, Homo sapiens
  misc_RNA (1)...(19): siRNA sense strand
uaacauuugccaagucuuc

SEQ ID NO: 1643488 - RNA, 19 nt, Homo sapiens
  misc_RNA (1)...(19): siRNA sense strand
uauccaagaugugguacaa

SEQ ID NO: 1643489 - RNA, 19 nt, Homo sapiens
  misc_RNA (1)...(19): siRNA sense strand
cucaagagauucugugcuu

SEQ ID NO: 1643490 - RNA, 19 nt, Homo sapiens
  misc_RNA (1)...(19): siRNA sense strand
ccacaacauagucaauuug

SEQ ID NO: 1643491 - RNA, 19 nt, Homo sapiens
  misc_RNA (1)...(19): siRNA sense strand
gggaagcgaaugaggaguu

SEQ ID NO: 1643492 - RNA, 19 nt, Homo sapiens
  misc_RNA (1)...(19): siRNA sense strand
gagcacaugaagcgacaaa

SEQ ID NO: 1643493 - RNA, 19 nt, Homo sapiens
  misc_RNA (1)...(19): siRNA sense strand
ccucuuacccugcaaguuc

SEQ ID NO: 1643494 - RNA, 19 nt, Homo sapiens
  misc_RNA (1)...(19): siRNA sense strand
gacuggcuguguagacuug

SEQ ID NO: 1643495 - RNA, 19 nt, Homo sapiens
  misc_RNA (1)...(19): siRNA sense strand
caaagcagagcacaugaag

SEQ ID NO: 1643496 - RNA, 19 nt, Homo sapiens
  misc_RNA (1)...(19): siRNA sense strand
gcaagcacuauaugaauac

SEQ ID NO: 1643497 - RNA, 19 nt, Homo sapiens
  misc_RNA (1)...(19): siRNA sense strand
ucaggguccucauuuccaa

SEQ ID NO: 1643498 - RNA, 19 nt, Homo sapiens
  misc_RNA (1)...(19): siRNA sense strand
accacaacauagucaauuu

SEQ ID NO: 1643499 - RNA, 19 nt, Homo sapiens
  misc_RNA (1)...(19): siRNA sense strand
ugacaccuuucgaccacaa

SEQ ID NO: 1643500 - RNA, 19 nt, Homo sapiens
  misc_RNA (1)...(19): siRNA sense strand
cagcguccuucgcagauuc

SEQ ID NO: 1643501 - RNA, 19 nt, Homo sapiens
  misc_RNA (1)...(19): siRNA sense strand
gacaaagcagagcacauga

SEQ ID NO: 1643502 - RNA, 19 nt, Homo sapiens
  misc_RNA (1)...(19): siRNA sense strand
uagacuugacuaucacuaa

SEQ ID NO: 1643503 - RNA, 19 nt, Homo sapiens
  misc_RNA (1)...(19): siRNA sense strand
gcugguggccaaggaauug

SEQ ID NO: 1643504 - RNA, 19 nt, Homo sapiens
  misc_RNA (1)...(19): siRNA sense strand
gcccuaacauuugccaagu

SEQ ID NO: 1643505 - RNA, 19 nt, Homo sapiens
  misc_RNA (1)...(19): siRNA sense strand
agucagcccagucuucuuu

SEQ ID NO: 1643506 - RNA, 19 nt, Homo sapiens
  misc_RNA (1)...(19): siRNA sense strand
gaggaagaggccaccaaug

SEQ ID NO: 1643507 - RNA, 19 nt, Homo sapiens
  misc_RNA (1)...(19): siRNA sense strand
ccuaacauuugccaagucu

SEQ ID NO: 1643508 - RNA, 19 nt, Homo sapiens
  misc_RNA (1)...(19): siRNA sense strand
aagcaagcacuauaugaau

SEQ ID NO: 1643509 - RNA, 19 nt, Homo sapiens
  misc_RNA (1)...(19): siRNA sense strand
cuauaugaauacgcaagaa

SEQ ID NO: 1643510 - RNA, 19 nt, Homo sapiens
  misc_RNA (1)...(19): siRNA sense strand
gcucacuccagcugacaaa

SEQ ID NO: 1643511 - RNA, 19 nt, Homo sapiens
  misc_RNA (1)...(19): siRNA sense strand
acaaagcagagcacaugaa

SEQ ID NO: 1643512 - RNA, 19 nt, Homo sapiens
  misc_RNA (1)...(19): siRNA sense strand
gggaguugguggagucacu

SEQ ID NO: 1643513 - RNA, 19 nt, Homo sapiens
  misc_RNA (1)...(19): siRNA sense strand
ucagagagucaaggaaguu

SEQ ID NO: 1643514 - RNA, 19 nt, Homo sapiens
  misc_RNA (1)...(19): siRNA sense strand
aggaagaggccaccaaugg

SEQ ID NO: 1643515 - RNA, 19 nt, Homo sapiens
  misc_RNA (1)...(19): siRNA sense strand
gaauacgcaagaaggagau

SEQ ID NO: 1643516 - RNA, 19 nt, Homo sapiens
  misc_RNA (1)...(19): siRNA sense strand
ggagcgcaagcaagcacua

SEQ ID NO: 1643517 - RNA, 19 nt, Homo sapiens
  misc_RNA (1)...(19): siRNA sense strand
cagagagucaaggaaguuu

SEQ ID NO: 1643518 - RNA, 19 nt, Homo sapiens
  misc_RNA (1)...(19): siRNA sense strand
ccacagccucugccuccaa

SEQ ID NO: 1643519 - RNA, 19 nt, Homo sapiens
  misc_RNA (1)...(19): siRNA sense strand
ugaggaagaggccaccaau

SEQ ID NO: 1643520 - RNA, 19 nt, Homo sapiens
  misc_RNA (1)...(19): siRNA sense strand
guagacuugacuaucacua

SEQ ID NO: 1643521 - RNA, 19 nt, Homo sapiens
  misc_RNA (1)...(19): siRNA sense strand
caugugccauuggguguca

SEQ ID NO: 1643522 - RNA, 19 nt, Homo sapiens
  misc_RNA (1)...(19): siRNA sense strand
gaacugcuguggucacuuu

SEQ ID NO: 1643523 - RNA, 19 nt, Homo sapiens
  misc_RNA (1)...(19): siRNA sense strand
agaaggagauucacagaga

SEQ ID NO: 1643524 - RNA, 19 nt, Homo sapiens
  misc_RNA (1)...(19): siRNA sense strand
gccaacagcccuaacauuu

SEQ ID NO: 1643525 - RNA, 19 nt, Homo sapiens
  misc_RNA (1)...(19): siRNA sense strand
ggaagcgaaugaggaguuu

SEQ ID NO: 1643526 - RNA, 19 nt, Homo sapiens
  misc_RNA (1)...(19): siRNA sense strand
gcacaugaagcgacaaaga

SEQ ID NO: 1643527 - RNA, 19 nt, Homo sapiens
  misc_RNA (1)...(19): siRNA sense strand
gcaagcaagcacuauauga

SEQ ID NO: 1643528 - RNA, 19 nt, Homo sapiens
  misc_RNA (1)...(19): siRNA sense strand
caacagcccuaacauuugc

SEQ ID NO: 1643529 - RNA, 19 nt, Homo sapiens
  misc_RNA (1)...(19): siRNA sense strand
caacauagucaauuugcuu

SEQ ID NO: 1643530 - RNA, 19 nt, Homo sapiens
  misc_RNA (1)...(19): siRNA sense strand
caagcaagcacuauaugaa

SEQ ID NO: 1643531 - RNA, 19 nt, Homo sapiens
  misc_RNA (1)...(19): siRNA sense strand
ccaaccaugugacaccuuu

SEQ ID NO: 1643532 - RNA, 19 nt, Homo sapiens
  misc_RNA (1)...(19): siRNA sense strand
ccacuccucugcugcuauu

SEQ ID NO: 1643533 - RNA, 19 nt, Homo sapiens
  misc_RNA (1)...(19): siRNA sense strand
gaugugguacaaccucuua

SEQ ID NO: 1643534 - RNA, 19 nt, Homo sapiens
  misc_RNA (1)...(19): siRNA sense strand
agcaagcacuauaugaaua

SEQ ID NO: 1643535 - RNA, 19 nt, Homo sapiens
  misc_RNA (1)...(19): siRNA sense strand
ugacaaagcagagcacaug

SEQ ID NO: 1643536 - RNA, 19 nt, Homo sapiens
  misc_RNA (1)...(19): siRNA sense strand
uguguagacuugacuauca

SEQ ID NO: 1643537 - RNA, 19 nt, Homo sapiens
  misc_RNA (1)...(19): siRNA sense strand
ccaacagcccuaacauuug

SEQ ID NO: 1643538 - RNA, 19 nt, Homo sapiens
  misc_RNA (1)...(19): siRNA sense strand
gaccaugugugcggugcua

SEQ ID NO: 1643539 - RNA, 19 nt, Homo sapiens
  misc_RNA (1)...(19): siRNA sense strand
agacuugacuaucacuaau

SEQ ID NO: 1643540 - RNA, 19 nt, Homo sapiens
  misc_RNA (1)...(19): siRNA sense strand
gcgcaagcaagcacuauau

SEQ ID NO: 1643541 - RNA, 19 nt, Homo sapiens
  misc_RNA (1)...(19): siRNA sense strand
agagagaccuggccaagac

SEQ ID NO: 1643542 - RNA, 19 nt, Homo sapiens
  misc_RNA (1)...(19): siRNA sense strand
gacuaucacuaaucugcuu

SEQ ID NO: 1643543 - RNA, 19 nt, Homo sapiens
  misc_RNA (1)...(19): siRNA sense strand
gaccacaacauagucaauu

SEQ ID NO: 1643544 - RNA, 19 nt, Homo sapiens
  misc_RNA (1)...(19): siRNA sense strand
caagaaggagauucacaga

SEQ ID NO: 1643545 - RNA, 19 nt, Homo sapiens
  misc_RNA (1)...(19): siRNA sense strand
uaacauuugccaagucuuc

SEQ ID NO: 1643546 - RNA, 19 nt, Homo sapiens
  misc_RNA (1)...(19): siRNA sense strand
uauccaagaugugguacaa

SEQ ID NO: 1643547 - RNA, 19 nt, Homo sapiens
  misc_RNA (1)...(19): siRNA sense strand
cucaagagauucugugcuu

SEQ ID NO: 1643548 - RNA, 19 nt, Homo sapiens
  misc_RNA (1)...(19): siRNA sense strand
ccacaacauagucaauuug

SEQ ID NO: 1643549 - RNA, 19 nt, Homo sapiens
  misc_RNA (1)...(19): siRNA sense strand
gggaagcgaaugaggaguu

SEQ ID NO: 1643550 - RNA, 19 nt, Homo sapiens
  misc_RNA (1)...(19): siRNA sense strand
gagcacaugaagcgacaaa

SEQ ID NO: 1643551 - RNA, 19 nt, Homo sapiens
  misc_RNA (1)...(19): siRNA sense strand
ccucuuacccugcaaguuc

SEQ ID NO: 1643552 - RNA, 19 nt, Homo sapiens
  misc_RNA (1)...(19): siRNA sense strand
gacuggcuguguagacuug

SEQ ID NO: 1643553 - RNA, 19 nt, Homo sapiens
  misc_RNA (1)...(19): siRNA sense strand
caaagcagagcacaugaag

SEQ ID NO: 1643554 - RNA, 19 nt, Homo sapiens
  misc_RNA (1)...(19): siRNA sense strand
gcaagcacuauaugaauac

SEQ ID NO: 1643555 - RNA, 19 nt, Homo sapiens
  misc_RNA (1)...(19): siRNA sense strand
ucaggguccucauuuccaa

SEQ ID NO: 1643556 - RNA, 19 nt, Homo sapiens
  misc_RNA (1)...(19): siRNA sense strand
accacaacauagucaauuu

SEQ ID NO: 1643557 - RNA, 19 nt, Homo sapiens
  misc_RNA (1)...(19): siRNA sense strand
ugacaccuuucgaccacaa

SEQ ID NO: 1643558 - RNA, 19 nt, Homo sapiens
  misc_RNA (1)...(19): siRNA sense strand
cagcguccuucgcagauuc

SEQ ID NO: 1643559 - RNA, 19 nt, Homo sapiens
  misc_RNA (1)...(19): siRNA sense strand
gacaaagcagagcacauga

SEQ ID NO: 1643560 - RNA, 19 nt, Homo sapiens
  misc_RNA (1)...(19): siRNA sense strand
uagacuugacuaucacuaa

SEQ ID NO: 1643561 - RNA, 19 nt, Homo sapiens
  misc_RNA (1)...(19): siRNA sense strand
gcugguggccaaggaauug

SEQ ID NO: 1643562 - RNA, 19 nt, Homo sapiens
  misc_RNA (1)...(19): siRNA sense strand
gcccuaacauuugccaagu

SEQ ID NO: 1643563 - RNA, 19 nt, Homo sapiens
  misc_RNA (1)...(19): siRNA sense strand
agucagcccagucuucuuu

SEQ ID NO: 1643564 - RNA, 19 nt, Homo sapiens
  misc_RNA (1)...(19): siRNA sense strand
gaggaagaggccaccaaug

SEQ ID NO: 1643565 - RNA, 19 nt, Homo sapiens
  misc_RNA (1)...(19): siRNA sense strand
ccuaacauuugccaagucu

SEQ ID NO: 1643566 - RNA, 19 nt, Homo sapiens
  misc_RNA (1)...(19): siRNA sense strand
aagcaagcacuauaugaau

SEQ ID NO: 1643567 - RNA, 19 nt, Homo sapiens
  misc_RNA (1)...(19): siRNA sense strand
cuauaugaauacgcaagaa

SEQ ID NO: 1643568 - RNA, 19 nt, Homo sapiens
  misc_RNA (1)...(19): siRNA sense strand
gcucacuccagcugacaaa

SEQ ID NO: 1643569 - RNA, 19 nt, Homo sapiens
  misc_RNA (1)...(19): siRNA sense strand
acaaagcagagcacaugaa

SEQ ID NO: 1643570 - RNA, 19 nt, Homo sapiens
  misc_RNA (1)...(19): siRNA sense strand
gggaguugguggagucacu

SEQ ID NO: 1643571 - RNA, 19 nt, Homo sapiens
  misc_RNA (1)...(19): siRNA sense strand
ucagagagucaaggaaguu

SEQ ID NO: 1643572 - RNA, 19 nt, Homo sapiens
  misc_RNA (1)...(19): siRNA sense strand
aggaagaggccaccaaugg

SEQ ID NO: 1643573 - RNA, 19 nt, Homo sapiens
  misc_RNA (1)...(19): siRNA sense strand
gaauacgcaagaaggagau

SEQ ID NO: 1643574 - RNA, 19 nt, Homo sapiens
  misc_RNA (1)...(19): siRNA sense strand
ggagcgcaagcaagcacua

SEQ ID NO: 1643575 - RNA, 19 nt, Homo sapiens
  misc_RNA (1)...(19): siRNA sense strand
cagagagucaaggaaguuu

SEQ ID NO: 1643576 - RNA, 19 nt, Homo sapiens
  misc_RNA (1)...(19): siRNA sense strand
ccacagccucugccuccaa

SEQ ID NO: 1643577 - RNA, 19 nt, Homo sapiens
  misc_RNA (1)...(19): siRNA sense strand
ugaggaagaggccaccaau

SEQ ID NO: 1643578 - RNA, 19 nt, Homo sapiens
  misc_RNA (1)...(19): siRNA sense strand
guagacuugacuaucacua

SEQ ID NO: 1643579 - RNA, 19 nt, Homo sapiens
  misc_RNA (1)...(19): siRNA sense strand
caugugccauuggguguca

SEQ ID NO: 1643580 - RNA, 19 nt, Homo sapiens
  misc_RNA (1)...(19): siRNA sense strand
gaacugcuguggucacuuu

SEQ ID NO: 1643581 - RNA, 19 nt, Homo sapiens
  misc_RNA (1)...(19): siRNA sense strand
ggaagcgaaugaggaguuu

SEQ ID NO: 1643582 - RNA, 19 nt, Homo sapiens
  misc_RNA (1)...(19): siRNA sense strand
gcacaugaagcgacaaaga

SEQ ID NO: 1643583 - RNA, 19 nt, Homo sapiens
  misc_RNA (1)...(19): siRNA sense strand
caacauagucaauuugcuu

SEQ ID NO: 1643584 - RNA, 19 nt, Homo sapiens
  misc_RNA (1)...(19): siRNA sense strand
ccaaccaugugacaccuuu

SEQ ID NO: 1643585 - RNA, 19 nt, Homo sapiens
  misc_RNA (1)...(19): siRNA sense strand
ccacuccucugcugcuauu

SEQ ID NO: 1643586 - RNA, 19 nt, Homo sapiens
  misc_RNA (1)...(19): siRNA sense strand
gaugugguacaaccucuua

SEQ ID NO: 1643587 - RNA, 19 nt, Homo sapiens
  misc_RNA (1)...(19): siRNA sense strand
ugacaaagcagagcacaug

SEQ ID NO: 1643588 - RNA, 19 nt, Homo sapiens
  misc_RNA (1)...(19): siRNA sense strand
uguguagacuugacuauca

SEQ ID NO: 1643589 - RNA, 19 nt, Homo sapiens
  misc_RNA (1)...(19): siRNA sense strand
gaccaugugugcggugcua

SEQ ID NO: 1643590 - RNA, 19 nt, Homo sapiens
  misc_RNA (1)...(19): siRNA sense strand
agacuugacuaucacuaau

SEQ ID NO: 1643591 - RNA, 19 nt, Homo sapiens
  misc_RNA (1)...(19): siRNA sense strand
agagagaccuggccaagac

SEQ ID NO: 1643592 - RNA, 19 nt, Homo sapiens
  misc_RNA (1)...(19): siRNA sense strand
gacuaucacuaaucugcuu

SEQ ID NO: 1643593 - RNA, 19 nt, Homo sapiens
  misc_RNA (1)...(19): siRNA sense strand
gaccacaacauagucaauu

SEQ ID NO: 1643594 - RNA, 19 nt, Homo sapiens
  misc_RNA (1)...(19): siRNA sense strand
uauccaagaugugguacaa

SEQ ID NO: 1643595 - RNA, 19 nt, Homo sapiens
  misc_RNA (1)...(19): siRNA sense strand
cucaagagauucugugcuu

SEQ ID NO: 1643596 - RNA, 19 nt, Homo sapiens
  misc_RNA (1)...(19): siRNA sense strand
ccacaacauagucaauuug

SEQ ID NO: 1643597 - RNA, 19 nt, Homo sapiens
  misc_RNA (1)...(19): siRNA sense strand
gggaagcgaaugaggaguu

SEQ ID NO: 1643598 - RNA, 19 nt, Homo sapiens
  misc_RNA (1)...(19): siRNA sense strand
gagcacaugaagcgacaaa

SEQ ID NO: 1643599 - RNA, 19 nt, Homo sapiens
  misc_RNA (1)...(19): siRNA sense strand
ccucuuacccugcaaguuc

SEQ ID NO: 1643600 - RNA, 19 nt, Homo sapiens
  misc_RNA (1)...(19): siRNA sense strand
gacuggcuguguagacuug

SEQ ID NO: 1643601 - RNA, 19 nt, Homo sapiens
  misc_RNA (1)...(19): siRNA sense strand
caaagcagagcacaugaag

SEQ ID NO: 1643602 - RNA, 19 nt, Homo sapiens
  misc_RNA (1)...(19): siRNA sense strand
ucaggguccucauuuccaa

SEQ ID NO: 1643603 - RNA, 19 nt, Homo sapiens
  misc_RNA (1)...(19): siRNA sense strand
accacaacauagucaauuu

SEQ ID NO: 1643604 - RNA, 19 nt, Homo sapiens
  misc_RNA (1)...(19): siRNA sense strand
ugacaccuuucgaccacaa

SEQ ID NO: 1643605 - RNA, 19 nt, Homo sapiens
  misc_RNA (1)...(19): siRNA sense strand
cagcguccuucgcagauuc

SEQ ID NO: 1643606 - RNA, 19 nt, Homo sapiens
  misc_RNA (1)...(19): siRNA sense strand
gacaaagcagagcacauga

SEQ ID NO: 1643607 - RNA, 19 nt, Homo sapiens
  misc_RNA (1)...(19): siRNA sense strand
uagacuugacuaucacuaa

SEQ ID NO: 1643608 - RNA, 19 nt, Homo sapiens
  misc_RNA (1)...(19): siRNA sense strand
gcugguggccaaggaauug

SEQ ID NO: 1643609 - RNA, 19 nt, Homo sapiens
  misc_RNA (1)...(19): siRNA sense strand
agucagcccagucuucuuu

SEQ ID NO: 1643610 - RNA, 19 nt, Homo sapiens
  misc_RNA (1)...(19): siRNA sense strand
gaggaagaggccaccaaug

SEQ ID NO: 1643611 - RNA, 19 nt, Homo sapiens
  misc_RNA (1)...(19): siRNA sense strand
gcucacuccagcugacaaa

SEQ ID NO: 1643612 - RNA, 19 nt, Homo sapiens
  misc_RNA (1)...(19): siRNA sense strand
acaaagcagagcacaugaa

SEQ ID NO: 1643613 - RNA, 19 nt, Homo sapiens
  misc_RNA (1)...(19): siRNA sense strand
gggaguugguggagucacu

SEQ ID NO: 1643614 - RNA, 19 nt, Homo sapiens
  misc_RNA (1)...(19): siRNA sense strand
ucagagagucaaggaaguu

SEQ ID NO: 1643615 - RNA, 19 nt, Homo sapiens
  misc_RNA (1)...(19): siRNA sense strand
aggaagaggccaccaaugg

SEQ ID NO: 1643616 - RNA, 19 nt, Homo sapiens
  misc_RNA (1)...(19): siRNA sense strand
cagagagucaaggaaguuu

SEQ ID NO: 1643617 - RNA, 19 nt, Homo sapiens
  misc_RNA (1)...(19): siRNA sense strand
ccacagccucugccuccaa

SEQ ID NO: 1643618 - RNA, 19 nt, Homo sapiens
  misc_RNA (1)...(19): siRNA sense strand
ugaggaagaggccaccaau

SEQ ID NO: 1643619 - RNA, 19 nt, Homo sapiens
  misc_RNA (1)...(19): siRNA sense strand
guagacuugacuaucacua

SEQ ID NO: 1643620 - RNA, 19 nt, Homo sapiens
  misc_RNA (1)...(19): siRNA sense strand
caugugccauuggguguca

SEQ ID NO: 1643621 - RNA, 19 nt, Homo sapiens
  misc_RNA (1)...(19): siRNA sense strand
gcaaguaacucucuucuua

SEQ ID NO: 1643622 - RNA, 19 nt, Homo sapiens
  misc_RNA (1)...(19): siRNA sense strand
gaaaggagcugaagauagu

SEQ ID NO: 1643623 - RNA, 19 nt, Homo sapiens
  misc_RNA (1)...(19): siRNA sense strand
gcaaagaaguggacauuga

SEQ ID NO: 1643624 - RNA, 19 nt, Homo sapiens
  misc_RNA (1)...(19): siRNA sense strand
caacagcgaugcacuauug

SEQ ID NO: 1643625 - RNA, 19 nt, Homo sapiens
  misc_RNA (1)...(19): siRNA sense strand
caacagaaccagucaauuu

SEQ ID NO: 1643626 - RNA, 19 nt, Homo sapiens
  misc_RNA (1)...(19): siRNA sense strand
gcaguuaucuucaguuuua

SEQ ID NO: 1643627 - RNA, 19 nt, Homo sapiens
  misc_RNA (1)...(19): siRNA sense strand
guacaagggucaccuaguu

SEQ ID NO: 1643628 - RNA, 19 nt, Homo sapiens
  misc_RNA (1)...(19): siRNA sense strand
caacuugacuggcuccuuu

SEQ ID NO: 1643629 - RNA, 19 nt, Homo sapiens
  misc_RNA (1)...(19): siRNA sense strand
caacaugccuggaauucaa

SEQ ID NO: 1643630 - RNA, 19 nt, Homo sapiens
  misc_RNA (1)...(19): siRNA sense strand
guagggauauugaaauuga

SEQ ID NO: 1643631 - RNA, 19 nt, Homo sapiens
  misc_RNA (1)...(19): siRNA sense strand
ucacagcacucaauaguug

SEQ ID NO: 1643632 - RNA, 19 nt, Homo sapiens
  misc_RNA (1)...(19): siRNA sense strand
gcaacagucuccucuuuau

SEQ ID NO: 1643633 - RNA, 19 nt, Homo sapiens
  misc_RNA (1)...(19): siRNA sense strand
ccacuggcauccucuauaa

SEQ ID NO: 1643634 - RNA, 19 nt, Homo sapiens
  misc_RNA (1)...(19): siRNA sense strand
gaaaagcaguuaaccagua

SEQ ID NO: 1643635 - RNA, 19 nt, Homo sapiens
  misc_RNA (1)...(19): siRNA sense strand
ggaaugagaugaugucacu

SEQ ID NO: 1643636 - RNA, 19 nt, Homo sapiens
  misc_RNA (1)...(19): siRNA sense strand
gaaaacaucucaaacauag

SEQ ID NO: 1643637 - RNA, 19 nt, Homo sapiens
  misc_RNA (1)...(19): siRNA sense strand
gcaguaugauuaagaguga

SEQ ID NO: 1643638 - RNA, 19 nt, Homo sapiens
  misc_RNA (1)...(19): siRNA sense strand
gcaaggcuuuccuacagua

SEQ ID NO: 1643639 - RNA, 19 nt, Homo sapiens
  misc_RNA (1)...(19): siRNA sense strand
ugacaacacuucuuucuca

SEQ ID NO: 1643640 - RNA, 19 nt, Homo sapiens
  misc_RNA (1)...(19): siRNA sense strand
gagaugaugucacuucaau

SEQ ID NO: 1643641 - RNA, 19 nt, Homo sapiens
  misc_RNA (1)...(19): siRNA sense strand
gaaacucagucuagagaga

SEQ ID NO: 1643642 - RNA, 19 nt, Homo sapiens
  misc_RNA (1)...(19): siRNA sense strand
gcagcaggcuacacaguuu

SEQ ID NO: 1643643 - RNA, 19 nt, Homo sapiens
  misc_RNA (1)...(19): siRNA sense strand
gaaaggagaagaagaagug

SEQ ID NO: 1643644 - RNA, 19 nt, Homo sapiens
  misc_RNA (1)...(19): siRNA sense strand
uaaugaaccuguaguguug

SEQ ID NO: 1643645 - RNA, 19 nt, Homo sapiens
  misc_RNA (1)...(19): siRNA sense strand
uaucaggccugcagaguaa

SEQ ID NO: 1643646 - RNA, 19 nt, Homo sapiens
  misc_RNA (1)...(19): siRNA sense strand
ugaaggcacuacuguuaua

SEQ ID NO: 1643647 - RNA, 19 nt, Homo sapiens
  misc_RNA (1)...(19): siRNA sense strand
gaggaaugcugaugucgaa

SEQ ID NO: 1643648 - RNA, 19 nt, Homo sapiens
  misc_RNA (1)...(19): siRNA sense strand
gcagucaaccaacauauuu

SEQ ID NO: 1643649 - RNA, 19 nt, Homo sapiens
  misc_RNA (1)...(19): siRNA sense strand
gacaaucaaccucaaguua

SEQ ID NO: 1643650 - RNA, 19 nt, Homo sapiens
  misc_RNA (1)...(19): siRNA sense strand
uugcauagcuguucaguga

SEQ ID NO: 1643651 - RNA, 19 nt, Homo sapiens
  misc_RNA (1)...(19): siRNA sense strand
gaacucaauuucuccacuu

SEQ ID NO: 1643652 - RNA, 19 nt, Homo sapiens
  misc_RNA (1)...(19): siRNA sense strand
gggaauauauguagugaca

SEQ ID NO: 1643653 - RNA, 19 nt, Homo sapiens
  misc_RNA (1)...(19): siRNA sense strand
caaagcaccucacuaugug

SEQ ID NO: 1643654 - RNA, 19 nt, Homo sapiens
  misc_RNA (1)...(19): siRNA sense strand
caucaggaauguucuuauu

SEQ ID NO: 1643655 - RNA, 19 nt, Homo sapiens
  misc_RNA (1)...(19): siRNA sense strand
acaacaagguaaugguuua

SEQ ID NO: 1643656 - RNA, 19 nt, Homo sapiens
  misc_RNA (1)...(19): siRNA sense strand
gcaaaugcagugugaauug

SEQ ID NO: 1643657 - RNA, 19 nt, Homo sapiens
  misc_RNA (1)...(19): siRNA sense strand
agaaacaucuguagcauca

SEQ ID NO: 1643658 - RNA, 19 nt, Homo sapiens
  misc_RNA (1)...(19): siRNA sense strand
caacaagucagucaaauuc

SEQ ID NO: 1643659 - RNA, 19 nt, Homo sapiens
  misc_RNA (1)...(19): siRNA sense strand
ggaacuauuucaucagaau

SEQ ID NO: 1643660 - RNA, 19 nt, Homo sapiens
  misc_RNA (1)...(19): siRNA sense strand
gcacuacuguuauagaagu

SEQ ID NO: 1643661 - RNA, 19 nt, Homo sapiens
  misc_RNA (1)...(19): siRNA sense strand
cagaguaacuggacgaaau

SEQ ID NO: 1643662 - RNA, 19 nt, Homo sapiens
  misc_RNA (1)...(19): siRNA sense strand
ucaggaauguucuuauuug

SEQ ID NO: 1643663 - RNA, 19 nt, Homo sapiens
  misc_RNA (1)...(19): siRNA sense strand
uuacagggcucuucaguuc

SEQ ID NO: 1643664 - RNA, 19 nt, Homo sapiens
  misc_RNA (1)...(19): siRNA sense strand
uguaagcccuggaauguuu

SEQ ID NO: 1643665 - RNA, 19 nt, Homo sapiens
  misc_RNA (1)...(19): siRNA sense strand
uggaagaucucaugauguu

SEQ ID NO: 1643666 - RNA, 19 nt, Homo sapiens
  misc_RNA (1)...(19): siRNA sense strand
gaaaacacguuaucuaauc

SEQ ID NO: 1643667 - RNA, 19 nt, Homo sapiens
  misc_RNA (1)...(19): siRNA sense strand
uggaagagcugaaaguguu

SEQ ID NO: 1643668 - RNA, 19 nt, Homo sapiens
  misc_RNA (1)...(19): siRNA sense strand
ccagagacccugacaacua

SEQ ID NO: 1643669 - RNA, 19 nt, Homo sapiens
  misc_RNA (1)...(19): siRNA sense strand
gcuggaagaucucaugaug

SEQ ID NO: 1643670 - RNA, 19 nt, Homo sapiens
  misc_RNA (1)...(19): siRNA sense strand
agaagaaacuggaacacaa

SEQ ID NO: 1643671 - RNA, 19 nt, Homo sapiens
  misc_RNA (1)...(19): siRNA sense strand
gaucaacucagcaaacauu

SEQ ID NO: 1643672 - RNA, 19 nt, Homo sapiens
  misc_RNA (1)...(19): siRNA sense strand
gaagagcccuauguugugu

SEQ ID NO: 1643673 - RNA, 19 nt, Homo sapiens
  misc_RNA (1)...(19): siRNA sense strand
ccauagcucuccucagauu

SEQ ID NO: 1643674 - RNA, 19 nt, Homo sapiens
  misc_RNA (1)...(19): siRNA sense strand
acagcaagcuccaauauca

SEQ ID NO: 1643675 - RNA, 19 nt, Homo sapiens
  misc_RNA (1)...(19): siRNA sense strand
cagcagacuucucacauga

SEQ ID NO: 1643676 - RNA, 19 nt, Homo sapiens
  misc_RNA (1)...(19): siRNA sense strand
gaguuaauaucaugaggaa

SEQ ID NO: 1643677 - RNA, 19 nt, Homo sapiens
  misc_RNA (1)...(19): siRNA sense strand
gaacuggaguaaagaagag

SEQ ID NO: 1643678 - RNA, 19 nt, Homo sapiens
  misc_RNA (1)...(19): siRNA sense strand
caacaacaacagagcauuu

SEQ ID NO: 1643679 - RNA, 19 nt, Homo sapiens
  misc_RNA (1)...(19): siRNA sense strand
gaacaaaugcagccuccaa

SEQ ID NO: 1643680 - RNA, 19 nt, Homo sapiens
  misc_RNA (1)...(19): siRNA sense strand
gcagcagucuucucauuca

SEQ ID NO: 1643681 - RNA, 19 nt, Homo sapiens
  misc_RNA (1)...(19): siRNA sense strand
gaaaugaaacuucuacaac

SEQ ID NO: 1643682 - RNA, 19 nt, Homo sapiens
  misc_RNA (1)...(19): siRNA sense strand
uaccagaccagauaauuua

SEQ ID NO: 1643683 - RNA, 19 nt, Homo sapiens
  misc_RNA (1)...(19): siRNA sense strand
aaauacaacuccuugcaaa

SEQ ID NO: 1643684 - RNA, 19 nt, Homo sapiens
  misc_RNA (1)...(19): siRNA sense strand
cagcaguuaucuucaguuu

SEQ ID NO: 1643685 - RNA, 19 nt, Homo sapiens
  misc_RNA (1)...(19): siRNA sense strand
gcaccgaacucaauuucuc

SEQ ID NO: 1643686 - RNA, 19 nt, Homo sapiens
  misc_RNA (1)...(19): siRNA sense strand
guaaugagaauguucaaga

SEQ ID NO: 1643687 - RNA, 19 nt, Homo sapiens
  misc_RNA (1)...(19): siRNA sense strand
gaaauacaacuccuugcaa

SEQ ID NO: 1643688 - RNA, 19 nt, Homo sapiens
  misc_RNA (1)...(19): siRNA sense strand
gaacaacaugccuggaauu

SEQ ID NO: 1643689 - RNA, 19 nt, Homo sapiens
  misc_RNA (1)...(19): siRNA sense strand
ggaaaugaaacuucuacaa

SEQ ID NO: 1643690 - RNA, 19 nt, Homo sapiens
  misc_RNA (1)...(19): siRNA sense strand
gcagacuucucacaugaug

SEQ ID NO: 1643691 - RNA, 19 nt, Homo sapiens
  misc_RNA (1)...(19): siRNA sense strand
ugagucagcuucagaauac

SEQ ID NO: 1643692 - RNA, 19 nt, Homo sapiens
  misc_RNA (1)...(19): siRNA sense strand
cagagacccugacaacuau

SEQ ID NO: 1643693 - RNA, 19 nt, Homo sapiens
  misc_RNA (1)...(19): siRNA sense strand
gaagaucucaugauguuca

SEQ ID NO: 1643694 - RNA, 19 nt, Homo sapiens
  misc_RNA (1)...(19): siRNA sense strand
gcguagggauauugaaauu

SEQ ID NO: 1643695 - RNA, 19 nt, Homo sapiens
  misc_RNA (1)...(19): siRNA sense strand
ccaaagcaccucacuaugu

SEQ ID NO: 1643696 - RNA, 19 nt, Homo sapiens
  misc_RNA (1)...(19): siRNA sense strand
ugaaccaacugcagaauuc

SEQ ID NO: 1643697 - RNA, 19 nt, Homo sapiens
  misc_RNA (1)...(19): siRNA sense strand
cagagucaguccacaguuu

SEQ ID NO: 1643698 - RNA, 19 nt, Homo sapiens
  misc_RNA (1)...(19): siRNA sense strand
gaauagugguacccaacaa

SEQ ID NO: 1643699 - RNA, 19 nt, Homo sapiens
  misc_RNA (1)...(19): siRNA sense strand
gauuaagagugaagauguu

SEQ ID NO: 1643700 - RNA, 19 nt, Homo sapiens
  misc_RNA (1)...(19): siRNA sense strand
caaacacccucuucuccaa

SEQ ID NO: 1643701 - RNA, 19 nt, Homo sapiens
  misc_RNA (1)...(19): siRNA sense strand
ucuaugaucuucucccaaa

SEQ ID NO: 1643702 - RNA, 19 nt, Homo sapiens
  misc_RNA (1)...(19): siRNA sense strand
gacaaaugcuggaagaucu

SEQ ID NO: 1643703 - RNA, 19 nt, Homo sapiens
  misc_RNA (1)...(19): siRNA sense strand
ccugaggacuugcuggaua

SEQ ID NO: 1643704 - RNA, 19 nt, Homo sapiens
  misc_RNA (1)...(19): siRNA sense strand
caacagcaagcuccaauau

SEQ ID NO: 1643705 - RNA, 19 nt, Homo sapiens
  misc_RNA (1)...(19): siRNA sense strand
gcaagggaaugagaugaug

SEQ ID NO: 1643706 - RNA, 19 nt, Homo sapiens
  misc_RNA (1)...(19): siRNA sense strand
guacagugguuaauuuguc

SEQ ID NO: 1643707 - RNA, 19 nt, Homo sapiens
  misc_RNA (1)...(19): siRNA sense strand
ggaaaggagcugaagauag

SEQ ID NO: 1643708 - RNA, 19 nt, Homo sapiens
  misc_RNA (1)...(19): siRNA sense strand
guaaagaagagcccuaugu

SEQ ID NO: 1643709 - RNA, 19 nt, Homo sapiens
  misc_RNA (1)...(19): siRNA sense strand
caccaaacaugauauucaa

SEQ ID NO: 1643710 - RNA, 19 nt, Homo sapiens
  misc_RNA (1)...(19): siRNA sense strand
caaccaacauauuucuuuc

SEQ ID NO: 1643711 - RNA, 19 nt, Homo sapiens
  misc_RNA (1)...(19): siRNA sense strand
ucacuucaaucuggaaauu

SEQ ID NO: 1643712 - RNA, 19 nt, Homo sapiens
  misc_RNA (1)...(19): siRNA sense strand
gagaaacucagucuagaga

SEQ ID NO: 1643713 - RNA, 19 nt, Homo sapiens
  misc_RNA (1)...(19): siRNA sense strand
gugaagauguuacuccaau

SEQ ID NO: 1643714 - RNA, 19 nt, Homo sapiens
  misc_RNA (1)...(19): siRNA sense strand
gaagaggccaugaaagcaa

SEQ ID NO: 1643715 - RNA, 19 nt, Homo sapiens
  misc_RNA (1)...(19): siRNA sense strand
gaauguaaaugugaagaag

SEQ ID NO: 1643716 - RNA, 19 nt, Homo sapiens
  misc_RNA (1)...(19): siRNA sense strand
gagcaccaguuccuacaau

SEQ ID NO: 1643717 - RNA, 19 nt, Homo sapiens
  misc_RNA (1)...(19): siRNA sense strand
caagagaaacucagucuag

SEQ ID NO: 1643718 - RNA, 19 nt, Homo sapiens
  misc_RNA (1)...(19): siRNA sense strand
gauccuagcaacaacauga

SEQ ID NO: 1643719 - RNA, 19 nt, Homo sapiens
  misc_RNA (1)...(19): siRNA sense strand
caacagcccaugcaauuuc

SEQ ID NO: 1643720 - RNA, 19 nt, Homo sapiens
  misc_RNA (1)...(19): siRNA sense strand
aaacaucuguagcaucaau

SEQ ID NO: 1643721 - RNA, 19 nt, Homo sapiens
  misc_RNA (1)...(19): siRNA sense strand
gcaaguaacucucuucuua

SEQ ID NO: 1643722 - RNA, 19 nt, Homo sapiens
  misc_RNA (1)...(19): siRNA sense strand
gaaaggagcugaagauagu

SEQ ID NO: 1643723 - RNA, 19 nt, Homo sapiens
  misc_RNA (1)...(19): siRNA sense strand
gcaaagaaguggacauuga

SEQ ID NO: 1643724 - RNA, 19 nt, Homo sapiens
  misc_RNA (1)...(19): siRNA sense strand
caacagcgaugcacuauug

SEQ ID NO: 1643725 - RNA, 19 nt, Homo sapiens
  misc_RNA (1)...(19): siRNA sense strand
caacagaaccagucaauuu

SEQ ID NO: 1643726 - RNA, 19 nt, Homo sapiens
  misc_RNA (1)...(19): siRNA sense strand
gcaguuaucuucaguuuua

SEQ ID NO: 1643727 - RNA, 19 nt, Homo sapiens
  misc_RNA (1)...(19): siRNA sense strand
guacaagggucaccuaguu

SEQ ID NO: 1643728 - RNA, 19 nt, Homo sapiens
  misc_RNA (1)...(19): siRNA sense strand
caacuugacuggcuccuuu

SEQ ID NO: 1643729 - RNA, 19 nt, Homo sapiens
  misc_RNA (1)...(19): siRNA sense strand
caacaugccuggaauucaa

SEQ ID NO: 1643730 - RNA, 19 nt, Homo sapiens
  misc_RNA (1)...(19): siRNA sense strand
guagggauauugaaauuga

SEQ ID NO: 1643731 - RNA, 19 nt, Homo sapiens
  misc_RNA (1)...(19): siRNA sense strand
ucacagcacucaauaguug

SEQ ID NO: 1643732 - RNA, 19 nt, Homo sapiens
  misc_RNA (1)...(19): siRNA sense strand
gcaacagucuccucuuuau

SEQ ID NO: 1643733 - RNA, 19 nt, Homo sapiens
  misc_RNA (1)...(19): siRNA sense strand
ccacuggcauccucuauaa

SEQ ID NO: 1643734 - RNA, 19 nt, Homo sapiens
  misc_RNA (1)...(19): siRNA sense strand
gaaaagcaguuaaccagua

SEQ ID NO: 1643735 - RNA, 19 nt, Homo sapiens
  misc_RNA (1)...(19): siRNA sense strand
ggaaugagaugaugucacu

SEQ ID NO: 1643736 - RNA, 19 nt, Homo sapiens
  misc_RNA (1)...(19): siRNA sense strand
gaaaacaucucaaacauag

SEQ ID NO: 1643737 - RNA, 19 nt, Homo sapiens
  misc_RNA (1)...(19): siRNA sense strand
gcaguaugauuaagaguga

SEQ ID NO: 1643738 - RNA, 19 nt, Homo sapiens
  misc_RNA (1)...(19): siRNA sense strand
gcaaggcuuuccuacagua

SEQ ID NO: 1643739 - RNA, 19 nt, Homo sapiens
  misc_RNA (1)...(19): siRNA sense strand
ugacaacacuucuuucuca

SEQ ID NO: 1643740 - RNA, 19 nt, Homo sapiens
  misc_RNA (1)...(19): siRNA sense strand
gagaugaugucacuucaau

SEQ ID NO: 1643741 - RNA, 19 nt, Homo sapiens
  misc_RNA (1)...(19): siRNA sense strand
gaaacucagucuagagaga

SEQ ID NO: 1643742 - RNA, 19 nt, Homo sapiens
  misc_RNA (1)...(19): siRNA sense strand
gcagcaggcuacacaguuu

SEQ ID NO: 1643743 - RNA, 19 nt, Homo sapiens
  misc_RNA (1)...(19): siRNA sense strand
gaaaggagaagaagaagug

SEQ ID NO: 1643744 - RNA, 19 nt, Homo sapiens
  misc_RNA (1)...(19): siRNA sense strand
uaaugaaccuguaguguug

SEQ ID NO: 1643745 - RNA, 19 nt, Homo sapiens
  misc_RNA (1)...(19): siRNA sense strand
uaucaggccugcagaguaa

SEQ ID NO: 1643746 - RNA, 19 nt, Homo sapiens
  misc_RNA (1)...(19): siRNA sense strand
ugaaggcacuacuguuaua

SEQ ID NO: 1643747 - RNA, 19 nt, Homo sapiens
  misc_RNA (1)...(19): siRNA sense strand
gaggaaugcugaugucgaa

SEQ ID NO: 1643748 - RNA, 19 nt, Homo sapiens
  misc_RNA (1)...(19): siRNA sense strand
gcagucaaccaacauauuu

SEQ ID NO: 1643749 - RNA, 19 nt, Homo sapiens
  misc_RNA (1)...(19): siRNA sense strand
gacaaucaaccucaaguua

SEQ ID NO: 1643750 - RNA, 19 nt, Homo sapiens
  misc_RNA (1)...(19): siRNA sense strand
uugcauagcuguucaguga

SEQ ID NO: 1643751 - RNA, 19 nt, Homo sapiens
  misc_RNA (1)...(19): siRNA sense strand
gaacucaauuucuccacuu

SEQ ID NO: 1643752 - RNA, 19 nt, Homo sapiens
  misc_RNA (1)...(19): siRNA sense strand
gggaauauauguagugaca

SEQ ID NO: 1643753 - RNA, 19 nt, Homo sapiens
  misc_RNA (1)...(19): siRNA sense strand
caaagcaccucacuaugug

SEQ ID NO: 1643754 - RNA, 19 nt, Homo sapiens
  misc_RNA (1)...(19): siRNA sense strand
caucaggaauguucuuauu

SEQ ID NO: 1643755 - RNA, 19 nt, Homo sapiens
  misc_RNA (1)...(19): siRNA sense strand
acaacaagguaaugguuua

SEQ ID NO: 1643756 - RNA, 19 nt, Homo sapiens
  misc_RNA (1)...(19): siRNA sense strand
gcaaaugcagugugaauug

SEQ ID NO: 1643757 - RNA, 19 nt, Homo sapiens
  misc_RNA (1)...(19): siRNA sense strand
gcacuacuguuauagaagu

SEQ ID NO: 1643758 - RNA, 19 nt, Homo sapiens
  misc_RNA (1)...(19): siRNA sense strand
caacaagucagucaaauuc

SEQ ID NO: 1643759 - RNA, 19 nt, Homo sapiens
  misc_RNA (1)...(19): siRNA sense strand
ggaacuauuucaucagaau

SEQ ID NO: 1643760 - RNA, 19 nt, Homo sapiens
  misc_RNA (1)...(19): siRNA sense strand
cagaguaacuggacgaaau

SEQ ID NO: 1643761 - RNA, 19 nt, Homo sapiens
  misc_RNA (1)...(19): siRNA sense strand
ucaggaauguucuuauuug

SEQ ID NO: 1643762 - RNA, 19 nt, Homo sapiens
  misc_RNA (1)...(19): siRNA sense strand
uuacagggcucuucaguuc

SEQ ID NO: 1643763 - RNA, 19 nt, Homo sapiens
  misc_RNA (1)...(19): siRNA sense strand
uguaagcccuggaauguuu

SEQ ID NO: 1643764 - RNA, 19 nt, Homo sapiens
  misc_RNA (1)...(19): siRNA sense strand
uggaagaucucaugauguu

SEQ ID NO: 1643765 - RNA, 19 nt, Homo sapiens
  misc_RNA (1)...(19): siRNA sense strand
gaaaacacguuaucuaauc

SEQ ID NO: 1643766 - RNA, 19 nt, Homo sapiens
  misc_RNA (1)...(19): siRNA sense strand
uggaagagcugaaaguguu

SEQ ID NO: 1643767 - RNA, 19 nt, Homo sapiens
  misc_RNA (1)...(19): siRNA sense strand
ccagagacccugacaacua

SEQ ID NO: 1643768 - RNA, 19 nt, Homo sapiens
  misc_RNA (1)...(19): siRNA sense strand
gcuggaagaucucaugaug

SEQ ID NO: 1643769 - RNA, 19 nt, Homo sapiens
  misc_RNA (1)...(19): siRNA sense strand
agaagaaacuggaacacaa

SEQ ID NO: 1643770 - RNA, 19 nt, Homo sapiens
  misc_RNA (1)...(19): siRNA sense strand
gaucaacucagcaaacauu

SEQ ID NO: 1643771 - RNA, 19 nt, Homo sapiens
  misc_RNA (1)...(19): siRNA sense strand
gaagagcccuauguugugu

SEQ ID NO: 1643772 - RNA, 19 nt, Homo sapiens
  misc_RNA (1)...(19): siRNA sense strand
ccauagcucuccucagauu

SEQ ID NO: 1643773 - RNA, 19 nt, Homo sapiens
  misc_RNA (1)...(19): siRNA sense strand
acagcaagcuccaauauca

SEQ ID NO: 1643774 - RNA, 19 nt, Homo sapiens
  misc_RNA (1)...(19): siRNA sense strand
cagcagacuucucacauga

SEQ ID NO: 1643775 - RNA, 19 nt, Homo sapiens
  misc_RNA (1)...(19): siRNA sense strand
gaguuaauaucaugaggaa

SEQ ID NO: 1643776 - RNA, 19 nt, Homo sapiens
  misc_RNA (1)...(19): siRNA sense strand
gaacuggaguaaagaagag

SEQ ID NO: 1643777 - RNA, 19 nt, Homo sapiens
  misc_RNA (1)...(19): siRNA sense strand
caacaacaacagagcauuu

SEQ ID NO: 1643778 - RNA, 19 nt, Homo sapiens
  misc_RNA (1)...(19): siRNA sense strand
gaacaaaugcagccuccaa

SEQ ID NO: 1643779 - RNA, 19 nt, Homo sapiens
  misc_RNA (1)...(19): siRNA sense strand
gcagcagucuucucauuca

SEQ ID NO: 1643780 - RNA, 19 nt, Homo sapiens
  misc_RNA (1)...(19): siRNA sense strand
gaaaugaaacuucuacaac

SEQ ID NO: 1643781 - RNA, 19 nt, Homo sapiens
  misc_RNA (1)...(19): siRNA sense strand
uaccagaccagauaauuua

SEQ ID NO: 1643782 - RNA, 19 nt, Homo sapiens
  misc_RNA (1)...(19): siRNA sense strand
aaauacaacuccuugcaaa

SEQ ID NO: 1643783 - RNA, 19 nt, Homo sapiens
  misc_RNA (1)...(19): siRNA sense strand
cagcaguuaucuucaguuu

SEQ ID NO: 1643784 - RNA, 19 nt, Homo sapiens
  misc_RNA (1)...(19): siRNA sense strand
gcaccgaacucaauuucuc

SEQ ID NO: 1643785 - RNA, 19 nt, Homo sapiens
  misc_RNA (1)...(19): siRNA sense strand
guaaugagaauguucaaga

SEQ ID NO: 1643786 - RNA, 19 nt, Homo sapiens
  misc_RNA (1)...(19): siRNA sense strand
gaaauacaacuccuugcaa

SEQ ID NO: 1643787 - RNA, 19 nt, Homo sapiens
  misc_RNA (1)...(19): siRNA sense strand
gaacaacaugccuggaauu

SEQ ID NO: 1643788 - RNA, 19 nt, Homo sapiens
  misc_RNA (1)...(19): siRNA sense strand
ggaaaugaaacuucuacaa

SEQ ID NO: 1643789 - RNA, 19 nt, Homo sapiens
  misc_RNA (1)...(19): siRNA sense strand
gcagacuucucacaugaug

SEQ ID NO: 1643790 - RNA, 19 nt, Homo sapiens
  misc_RNA (1)...(19): siRNA sense strand
ugagucagcuucagaauac

SEQ ID NO: 1643791 - RNA, 19 nt, Homo sapiens
  misc_RNA (1)...(19): siRNA sense strand
cagagacccugacaacuau

SEQ ID NO: 1643792 - RNA, 19 nt, Homo sapiens
  misc_RNA (1)...(19): siRNA sense strand
gaagaucucaugauguuca

SEQ ID NO: 1643793 - RNA, 19 nt, Homo sapiens
  misc_RNA (1)...(19): siRNA sense strand
gcguagggauauugaaauu

SEQ ID NO: 1643794 - RNA, 19 nt, Homo sapiens
  misc_RNA (1)...(19): siRNA sense strand
ccaaagcaccucacuaugu

SEQ ID NO: 1643795 - RNA, 19 nt, Homo sapiens
  misc_RNA (1)...(19): siRNA sense strand
ugaaccaacugcagaauuc

SEQ ID NO: 1643796 - RNA, 19 nt, Homo sapiens
  misc_RNA (1)...(19): siRNA sense strand
cagagucaguccacaguuu

SEQ ID NO: 1643797 - RNA, 19 nt, Homo sapiens
  misc_RNA (1)...(19): siRNA sense strand
gaauagugguacccaacaa

SEQ ID NO: 1643798 - RNA, 19 nt, Homo sapiens
  misc_RNA (1)...(19): siRNA sense strand
gauuaagagugaagauguu

SEQ ID NO: 1643799 - RNA, 19 nt, Homo sapiens
  misc_RNA (1)...(19): siRNA sense strand
caaacacccucuucuccaa

SEQ ID NO: 1643800 - RNA, 19 nt, Homo sapiens
  misc_RNA (1)...(19): siRNA sense strand
gacaaaugcuggaagaucu

SEQ ID NO: 1643801 - RNA, 19 nt, Homo sapiens
  misc_RNA (1)...(19): siRNA sense strand
ccugaggacuugcuggaua

SEQ ID NO: 1643802 - RNA, 19 nt, Homo sapiens
  misc_RNA (1)...(19): siRNA sense strand
caacagcaagcuccaauau

SEQ ID NO: 1643803 - RNA, 19 nt, Homo sapiens
  misc_RNA (1)...(19): siRNA sense strand
gcaagggaaugagaugaug

SEQ ID NO: 1643804 - RNA, 19 nt, Homo sapiens
  misc_RNA (1)...(19): siRNA sense strand
guacagugguuaauuuguc

SEQ ID NO: 1643805 - RNA, 19 nt, Homo sapiens
  misc_RNA (1)...(19): siRNA sense strand
ggaaaggagcugaagauag

SEQ ID NO: 1643806 - RNA, 19 nt, Homo sapiens
  misc_RNA (1)...(19): siRNA sense strand
guaaagaagagcccuaugu

SEQ ID NO: 1643807 - RNA, 19 nt, Homo sapiens
  misc_RNA (1)...(19): siRNA sense strand
caccaaacaugauauucaa

SEQ ID NO: 1643808 - RNA, 19 nt, Homo sapiens
  misc_RNA (1)...(19): siRNA sense strand
caaccaacauauuucuuuc

SEQ ID NO: 1643809 - RNA, 19 nt, Homo sapiens
  misc_RNA (1)...(19): siRNA sense strand
ucacuucaaucuggaaauu

SEQ ID NO: 1643810 - RNA, 19 nt, Homo sapiens
  misc_RNA (1)...(19): siRNA sense strand
gagaaacucagucuagaga

SEQ ID NO: 1643811 - RNA, 19 nt, Homo sapiens
  misc_RNA (1)...(19): siRNA sense strand
gugaagauguuacuccaau

SEQ ID NO: 1643812 - RNA, 19 nt, Homo sapiens
  misc_RNA (1)...(19): siRNA sense strand
gaagaggccaugaaagcaa

SEQ ID NO: 1643813 - RNA, 19 nt, Homo sapiens
  misc_RNA (1)...(19): siRNA sense strand
gaauguaaaugugaagaag

SEQ ID NO: 1643814 - RNA, 19 nt, Homo sapiens
  misc_RNA (1)...(19): siRNA sense strand
gagcaccaguuccuacaau

SEQ ID NO: 1643815 - RNA, 19 nt, Homo sapiens
  misc_RNA (1)...(19): siRNA sense strand
caagagaaacucagucuag

SEQ ID NO: 1643816 - RNA, 19 nt, Homo sapiens
  misc_RNA (1)...(19): siRNA sense strand
uaaagaagagcccuauguu

SEQ ID NO: 1643817 - RNA, 19 nt, Homo sapiens
  misc_RNA (1)...(19): siRNA sense strand
caacagcccaugcaauuuc

SEQ ID NO: 1643818 - RNA, 19 nt, Homo sapiens
  misc_RNA (1)...(19): siRNA sense strand
gauccuagcaacaacauga

SEQ ID NO: 1643819 - RNA, 19 nt, Homo sapiens
  misc_RNA (1)...(19): siRNA sense strand
cagcaaggcuuuccuacag

SEQ ID NO: 1643820 - RNA, 19 nt, Homo sapiens
  misc_RNA (1)...(19): siRNA sense strand
gcagucaccacuacaagaa

SEQ ID NO: 1643821 - RNA, 19 nt, Homo sapiens
  misc_RNA (1)...(19): siRNA sense strand
gcaaguaacucucuucuua

SEQ ID NO: 1643822 - RNA, 19 nt, Homo sapiens
  misc_RNA (1)...(19): siRNA sense strand
gaaaggagcugaagauagu

SEQ ID NO: 1643823 - RNA, 19 nt, Homo sapiens
  misc_RNA (1)...(19): siRNA sense strand
gcaaagaaguggacauuga

SEQ ID NO: 1643824 - RNA, 19 nt, Homo sapiens
  misc_RNA (1)...(19): siRNA sense strand
caacagcgaugcacuauug

SEQ ID NO: 1643825 - RNA, 19 nt, Homo sapiens
  misc_RNA (1)...(19): siRNA sense strand
caacagaaccagucaauuu

SEQ ID NO: 1643826 - RNA, 19 nt, Homo sapiens
  misc_RNA (1)...(19): siRNA sense strand
gcaguuaucuucaguuuua

SEQ ID NO: 1643827 - RNA, 19 nt, Homo sapiens
  misc_RNA (1)...(19): siRNA sense strand
guacaagggucaccuaguu

SEQ ID NO: 1643828 - RNA, 19 nt, Homo sapiens
  misc_RNA (1)...(19): siRNA sense strand
caacuugacuggcuccuuu

SEQ ID NO: 1643829 - RNA, 19 nt, Homo sapiens
  misc_RNA (1)...(19): siRNA sense strand
caacaugccuggaauucaa

SEQ ID NO: 1643830 - RNA, 19 nt, Homo sapiens
  misc_RNA (1)...(19): siRNA sense strand
guagggauauugaaauuga

SEQ ID NO: 1643831 - RNA, 19 nt, Homo sapiens
  misc_RNA (1)...(19): siRNA sense strand
ucacagcacucaauaguug

SEQ ID NO: 1643832 - RNA, 19 nt, Homo sapiens
  misc_RNA (1)...(19): siRNA sense strand
gcaacagucuccucuuuau

SEQ ID NO: 1643833 - RNA, 19 nt, Homo sapiens
  misc_RNA (1)...(19): siRNA sense strand
ccacuggcauccucuauaa

SEQ ID NO: 1643834 - RNA, 19 nt, Homo sapiens
  misc_RNA (1)...(19): siRNA sense strand
gaaaagcaguuaaccagua

SEQ ID NO: 1643835 - RNA, 19 nt, Homo sapiens
  misc_RNA (1)...(19): siRNA sense strand
ggaaugagaugaugucacu

SEQ ID NO: 1643836 - RNA, 19 nt, Homo sapiens
  misc_RNA (1)...(19): siRNA sense strand
gaaaacaucucaaacauag

SEQ ID NO: 1643837 - RNA, 19 nt, Homo sapiens
  misc_RNA (1)...(19): siRNA sense strand
gcaguaugauuaagaguga

SEQ ID NO: 1643838 - RNA, 19 nt, Homo sapiens
  misc_RNA (1)...(19): siRNA sense strand
gcaaggcuuuccuacagua

SEQ ID NO: 1643839 - RNA, 19 nt, Homo sapiens
  misc_RNA (1)...(19): siRNA sense strand
ugacaacacuucuuucuca

SEQ ID NO: 1643840 - RNA, 19 nt, Homo sapiens
  misc_RNA (1)...(19): siRNA sense strand
gagaugaugucacuucaau

SEQ ID NO: 1643841 - RNA, 19 nt, Homo sapiens
  misc_RNA (1)...(19): siRNA sense strand
gaaacucagucuagagaga

SEQ ID NO: 1643842 - RNA, 19 nt, Homo sapiens
  misc_RNA (1)...(19): siRNA sense strand
gcagcaggcuacacaguuu

SEQ ID NO: 1643843 - RNA, 19 nt, Homo sapiens
  misc_RNA (1)...(19): siRNA sense strand
gaaaggagaagaagaagug

SEQ ID NO: 1643844 - RNA, 19 nt, Homo sapiens
  misc_RNA (1)...(19): siRNA sense strand
uaaugaaccuguaguguug

SEQ ID NO: 1643845 - RNA, 19 nt, Homo sapiens
  misc_RNA (1)...(19): siRNA sense strand
uaucaggccugcagaguaa

SEQ ID NO: 1643846 - RNA, 19 nt, Homo sapiens
  misc_RNA (1)...(19): siRNA sense strand
ugaaggcacuacuguuaua

SEQ ID NO: 1643847 - RNA, 19 nt, Homo sapiens
  misc_RNA (1)...(19): siRNA sense strand
gaggaaugcugaugucgaa

SEQ ID NO: 1643848 - RNA, 19 nt, Homo sapiens
  misc_RNA (1)...(19): siRNA sense strand
gcagucaaccaacauauuu

SEQ ID NO: 1643849 - RNA, 19 nt, Homo sapiens
  misc_RNA (1)...(19): siRNA sense strand
gacaaucaaccucaaguua

SEQ ID NO: 1643850 - RNA, 19 nt, Homo sapiens
  misc_RNA (1)...(19): siRNA sense strand
uugcauagcuguucaguga

SEQ ID NO: 1643851 - RNA, 19 nt, Homo sapiens
  misc_RNA (1)...(19): siRNA sense strand
gaacucaauuucuccacuu

SEQ ID NO: 1643852 - RNA, 19 nt, Homo sapiens
  misc_RNA (1)...(19): siRNA sense strand
gggaauauauguagugaca

SEQ ID NO: 1643853 - RNA, 19 nt, Homo sapiens
  misc_RNA (1)...(19): siRNA sense strand
caaagcaccucacuaugug

SEQ ID NO: 1643854 - RNA, 19 nt, Homo sapiens
  misc_RNA (1)...(19): siRNA sense strand
caucaggaauguucuuauu

SEQ ID NO: 1643855 - RNA, 19 nt, Homo sapiens
  misc_RNA (1)...(19): siRNA sense strand
acaacaagguaaugguuua

SEQ ID NO: 1643856 - RNA, 19 nt, Homo sapiens
  misc_RNA (1)...(19): siRNA sense strand
gcaaaugcagugugaauug

SEQ ID NO: 1643857 - RNA, 19 nt, Homo sapiens
  misc_RNA (1)...(19): siRNA sense strand
gcacuacuguuauagaagu

SEQ ID NO: 1643858 - RNA, 19 nt, Homo sapiens
  misc_RNA (1)...(19): siRNA sense strand
caacaagucagucaaauuc

SEQ ID NO: 1643859 - RNA, 19 nt, Homo sapiens
  misc_RNA (1)...(19): siRNA sense strand
ggaacuauuucaucagaau

SEQ ID NO: 1643860 - RNA, 19 nt, Homo sapiens
  misc_RNA (1)...(19): siRNA sense strand
cagaguaacuggacgaaau

SEQ ID NO: 1643861 - RNA, 19 nt, Homo sapiens
  misc_RNA (1)...(19): siRNA sense strand
ucaggaauguucuuauuug

SEQ ID NO: 1643862 - RNA, 19 nt, Homo sapiens
  misc_RNA (1)...(19): siRNA sense strand
uuacagggcucuucaguuc

SEQ ID NO: 1643863 - RNA, 19 nt, Homo sapiens
  misc_RNA (1)...(19): siRNA sense strand
uguaagcccuggaauguuu

SEQ ID NO: 1643864 - RNA, 19 nt, Homo sapiens
  misc_RNA (1)...(19): siRNA sense strand
uggaagaucucaugauguu

SEQ ID NO: 1643865 - RNA, 19 nt, Homo sapiens
  misc_RNA (1)...(19): siRNA sense strand
gaaaacacguuaucuaauc

SEQ ID NO: 1643866 - RNA, 19 nt, Homo sapiens
  misc_RNA (1)...(19): siRNA sense strand
uggaagagcugaaaguguu

SEQ ID NO: 1643867 - RNA, 19 nt, Homo sapiens
  misc_RNA (1)...(19): siRNA sense strand
ccagagacccugacaacua

SEQ ID NO: 1643868 - RNA, 19 nt, Homo sapiens
  misc_RNA (1)...(19): siRNA sense strand
gcuggaagaucucaugaug

SEQ ID NO: 1643869 - RNA, 19 nt, Homo sapiens
  misc_RNA (1)...(19): siRNA sense strand
agaagaaacuggaacacaa

SEQ ID NO: 1643870 - RNA, 19 nt, Homo sapiens
  misc_RNA (1)...(19): siRNA sense strand
gaucaacucagcaaacauu

SEQ ID NO: 1643871 - RNA, 19 nt, Homo sapiens
  misc_RNA (1)...(19): siRNA sense strand
gaagagcccuauguugugu

SEQ ID NO: 1643872 - RNA, 19 nt, Homo sapiens
  misc_RNA (1)...(19): siRNA sense strand
ccauagcucuccucagauu

SEQ ID NO: 1643873 - RNA, 19 nt, Homo sapiens
  misc_RNA (1)...(19): siRNA sense strand
acagcaagcuccaauauca

SEQ ID NO: 1643874 - RNA, 19 nt, Homo sapiens
  misc_RNA (1)...(19): siRNA sense strand
cagcagacuucucacauga

SEQ ID NO: 1643875 - RNA, 19 nt, Homo sapiens
  misc_RNA (1)...(19): siRNA sense strand
gaguuaauaucaugaggaa

SEQ ID NO: 1643876 - RNA, 19 nt, Homo sapiens
  misc_RNA (1)...(19): siRNA sense strand
gaacuggaguaaagaagag

SEQ ID NO: 1643877 - RNA, 19 nt, Homo sapiens
  misc_RNA (1)...(19): siRNA sense strand
caacaacaacagagcauuu

SEQ ID NO: 1643878 - RNA, 19 nt, Homo sapiens
  misc_RNA (1)...(19): siRNA sense strand
gaacaaaugcagccuccaa

SEQ ID NO: 1643879 - RNA, 19 nt, Homo sapiens
  misc_RNA (1)...(19): siRNA sense strand
gcagcagucuucucauuca

SEQ ID NO: 1643880 - RNA, 19 nt, Homo sapiens
  misc_RNA (1)...(19): siRNA sense strand
gaaaugaaacuucuacaac

SEQ ID NO: 1643881 - RNA, 19 nt, Homo sapiens
  misc_RNA (1)...(19): siRNA sense strand
uaccagaccagauaauuua

SEQ ID NO: 1643882 - RNA, 19 nt, Homo sapiens
  misc_RNA (1)...(19): siRNA sense strand
aaauacaacuccuugcaaa

SEQ ID NO: 1643883 - RNA, 19 nt, Homo sapiens
  misc_RNA (1)...(19): siRNA sense strand
cagcaguuaucuucaguuu

SEQ ID NO: 1643884 - RNA, 19 nt, Homo sapiens
  misc_RNA (1)...(19): siRNA sense strand
gcaccgaacucaauuucuc

SEQ ID NO: 1643885 - RNA, 19 nt, Homo sapiens
  misc_RNA (1)...(19): siRNA sense strand
guaaugagaauguucaaga

SEQ ID NO: 1643886 - RNA, 19 nt, Homo sapiens
  misc_RNA (1)...(19): siRNA sense strand
gaaauacaacuccuugcaa

SEQ ID NO: 1643887 - RNA, 19 nt, Homo sapiens
  misc_RNA (1)...(19): siRNA sense strand
gaacaacaugccuggaauu

SEQ ID NO: 1643888 - RNA, 19 nt, Homo sapiens
  misc_RNA (1)...(19): siRNA sense strand
ggaaaugaaacuucuacaa

SEQ ID NO: 1643889 - RNA, 19 nt, Homo sapiens
  misc_RNA (1)...(19): siRNA sense strand
gcagacuucucacaugaug

SEQ ID NO: 1643890 - RNA, 19 nt, Homo sapiens
  misc_RNA (1)...(19): siRNA sense strand
ugagucagcuucagaauac

SEQ ID NO: 1643891 - RNA, 19 nt, Homo sapiens
  misc_RNA (1)...(19): siRNA sense strand
cagagacccugacaacuau

SEQ ID NO: 1643892 - RNA, 19 nt, Homo sapiens
  misc_RNA (1)...(19): siRNA sense strand
gaagaucucaugauguuca

SEQ ID NO: 1643893 - RNA, 19 nt, Homo sapiens
  misc_RNA (1)...(19): siRNA sense strand
gcguagggauauugaaauu

SEQ ID NO: 1643894 - RNA, 19 nt, Homo sapiens
  misc_RNA (1)...(19): siRNA sense strand
ccaaagcaccucacuaugu

SEQ ID NO: 1643895 - RNA, 19 nt, Homo sapiens
  misc_RNA (1)...(19): siRNA sense strand
ugaaccaacugcagaauuc

SEQ ID NO: 1643896 - RNA, 19 nt, Homo sapiens
  misc_RNA (1)...(19): siRNA sense strand
cagagucaguccacaguuu

SEQ ID NO: 1643897 - RNA, 19 nt, Homo sapiens
  misc_RNA (1)...(19): siRNA sense strand
gaauagugguacccaacaa

SEQ ID NO: 1643898 - RNA, 19 nt, Homo sapiens
  misc_RNA (1)...(19): siRNA sense strand
gauuaagagugaagauguu

SEQ ID NO: 1643899 - RNA, 19 nt, Homo sapiens
  misc_RNA (1)...(19): siRNA sense strand
caaacacccucuucuccaa

SEQ ID NO: 1643900 - RNA, 19 nt, Homo sapiens
  misc_RNA (1)...(19): siRNA sense strand
gacaaaugcuggaagaucu

SEQ ID NO: 1643901 - RNA, 19 nt, Homo sapiens
  misc_RNA (1)...(19): siRNA sense strand
ccugaggacuugcuggaua

SEQ ID NO: 1643902 - RNA, 19 nt, Homo sapiens
  misc_RNA (1)...(19): siRNA sense strand
caacagcaagcuccaauau

SEQ ID NO: 1643903 - RNA, 19 nt, Homo sapiens
  misc_RNA (1)...(19): siRNA sense strand
gcaagggaaugagaugaug

SEQ ID NO: 1643904 - RNA, 19 nt, Homo sapiens
  misc_RNA (1)...(19): siRNA sense strand
guacagugguuaauuuguc

SEQ ID NO: 1643905 - RNA, 19 nt, Homo sapiens
  misc_RNA (1)...(19): siRNA sense strand
ggaaaggagcugaagauag

SEQ ID NO: 1643906 - RNA, 19 nt, Homo sapiens
  misc_RNA (1)...(19): siRNA sense strand
guaaagaagagcccuaugu

SEQ ID NO: 1643907 - RNA, 19 nt, Homo sapiens
  misc_RNA (1)...(19): siRNA sense strand
caccaaacaugauauucaa

SEQ ID NO: 1643908 - RNA, 19 nt, Homo sapiens
  misc_RNA (1)...(19): siRNA sense strand
caaccaacauauuucuuuc

SEQ ID NO: 1643909 - RNA, 19 nt, Homo sapiens
  misc_RNA (1)...(19): siRNA sense strand
ucacuucaaucuggaaauu

SEQ ID NO: 1643910 - RNA, 19 nt, Homo sapiens
  misc_RNA (1)...(19): siRNA sense strand
gagaaacucagucuagaga

SEQ ID NO: 1643911 - RNA, 19 nt, Homo sapiens
  misc_RNA (1)...(19): siRNA sense strand
gugaagauguuacuccaau

SEQ ID NO: 1643912 - RNA, 19 nt, Homo sapiens
  misc_RNA (1)...(19): siRNA sense strand
gaagaggccaugaaagcaa

SEQ ID NO: 1643913 - RNA, 19 nt, Homo sapiens
  misc_RNA (1)...(19): siRNA sense strand
gaauguaaaugugaagaag

SEQ ID NO: 1643914 - RNA, 19 nt, Homo sapiens
  misc_RNA (1)...(19): siRNA sense strand
gagcaccaguuccuacaau

SEQ ID NO: 1643915 - RNA, 19 nt, Homo sapiens
  misc_RNA (1)...(19): siRNA sense strand
caagagaaacucagucuag

SEQ ID NO: 1643916 - RNA, 19 nt, Homo sapiens
  misc_RNA (1)...(19): siRNA sense strand
uaaagaagagcccuauguu

SEQ ID NO: 1643917 - RNA, 19 nt, Homo sapiens
  misc_RNA (1)...(19): siRNA sense strand
caacagcccaugcaauuuc

SEQ ID NO: 1643918 - RNA, 19 nt, Homo sapiens
  misc_RNA (1)...(19): siRNA sense strand
gauccuagcaacaacauga

SEQ ID NO: 1643919 - RNA, 19 nt, Homo sapiens
  misc_RNA (1)...(19): siRNA sense strand
cagcaaggcuuuccuacag

SEQ ID NO: 1643920 - RNA, 19 nt, Homo sapiens
  misc_RNA (1)...(19): siRNA sense strand
gcagucaccacuacaagaa

SEQ ID NO: 1643921 - RNA, 19 nt, Homo sapiens
  misc_RNA (1)...(19): siRNA sense strand
gcaaguaacucucuucuua

SEQ ID NO: 1643922 - RNA, 19 nt, Homo sapiens
  misc_RNA (1)...(19): siRNA sense strand
gaaaggagcugaagauagu

SEQ ID NO: 1643923 - RNA, 19 nt, Homo sapiens
  misc_RNA (1)...(19): siRNA sense strand
gcaaagaaguggacauuga

SEQ ID NO: 1643924 - RNA, 19 nt, Homo sapiens
  misc_RNA (1)...(19): siRNA sense strand
caacagcgaugcacuauug

SEQ ID NO: 1643925 - RNA, 19 nt, Homo sapiens
  misc_RNA (1)...(19): siRNA sense strand
caacagaaccagucaauuu

SEQ ID NO: 1643926 - RNA, 19 nt, Homo sapiens
  misc_RNA (1)...(19): siRNA sense strand
gcaguuaucuucaguuuua

SEQ ID NO: 1643927 - RNA, 19 nt, Homo sapiens
  misc_RNA (1)...(19): siRNA sense strand
guacaagggucaccuaguu

SEQ ID NO: 1643928 - RNA, 19 nt, Homo sapiens
  misc_RNA (1)...(19): siRNA sense strand
caacuugacuggcuccuuu

SEQ ID NO: 1643929 - RNA, 19 nt, Homo sapiens
  misc_RNA (1)...(19): siRNA sense strand
caacaugccuggaauucaa

SEQ ID NO: 1643930 - RNA, 19 nt, Homo sapiens
  misc_RNA (1)...(19): siRNA sense strand
guagggauauugaaauuga

SEQ ID NO: 1643931 - RNA, 19 nt, Homo sapiens
  misc_RNA (1)...(19): siRNA sense strand
ucacagcacucaauaguug

SEQ ID NO: 1643932 - RNA, 19 nt, Homo sapiens
  misc_RNA (1)...(19): siRNA sense strand
gcaacagucuccucuuuau

SEQ ID NO: 1643933 - RNA, 19 nt, Homo sapiens
  misc_RNA (1)...(19): siRNA sense strand
ccacuggcauccucuauaa

SEQ ID NO: 1643934 - RNA, 19 nt, Homo sapiens
  misc_RNA (1)...(19): siRNA sense strand
gaaaagcaguuaaccagua

SEQ ID NO: 1643935 - RNA, 19 nt, Homo sapiens
  misc_RNA (1)...(19): siRNA sense strand
ggaaugagaugaugucacu

SEQ ID NO: 1643936 - RNA, 19 nt, Homo sapiens
  misc_RNA (1)...(19): siRNA sense strand
gaaaacaucucaaacauag

SEQ ID NO: 1643937 - RNA, 19 nt, Homo sapiens
  misc_RNA (1)...(19): siRNA sense strand
gcaguaugauuaagaguga

SEQ ID NO: 1643938 - RNA, 19 nt, Homo sapiens
  misc_RNA (1)...(19): siRNA sense strand
gcaaggcuuuccuacagua

SEQ ID NO: 1643939 - RNA, 19 nt, Homo sapiens
  misc_RNA (1)...(19): siRNA sense strand
ugacaacacuucuuucuca

SEQ ID NO: 1643940 - RNA, 19 nt, Homo sapiens
  misc_RNA (1)...(19): siRNA sense strand
gagaugaugucacuucaau

SEQ ID NO: 1643941 - RNA, 19 nt, Homo sapiens
  misc_RNA (1)...(19): siRNA sense strand
gaaacucagucuagagaga

SEQ ID NO: 1643942 - RNA, 19 nt, Homo sapiens
  misc_RNA (1)...(19): siRNA sense strand
gcagcaggcuacacaguuu

SEQ ID NO: 1643943 - RNA, 19 nt, Homo sapiens
  misc_RNA (1)...(19): siRNA sense strand
gaaaggagaagaagaagug

SEQ ID NO: 1643944 - RNA, 19 nt, Homo sapiens
  misc_RNA (1)...(19): siRNA sense strand
uaaugaaccuguaguguug

SEQ ID NO: 1643945 - RNA, 19 nt, Homo sapiens
  misc_RNA (1)...(19): siRNA sense strand
uaucaggccugcagaguaa

SEQ ID NO: 1643946 - RNA, 19 nt, Homo sapiens
  misc_RNA (1)...(19): siRNA sense strand
ugaaggcacuacuguuaua

SEQ ID NO: 1643947 - RNA, 19 nt, Homo sapiens
  misc_RNA (1)...(19): siRNA sense strand
gaggaaugcugaugucgaa

SEQ ID NO: 1643948 - RNA, 19 nt, Homo sapiens
  misc_RNA (1)...(19): siRNA sense strand
gcagucaaccaacauauuu

SEQ ID NO: 1643949 - RNA, 19 nt, Homo sapiens
  misc_RNA (1)...(19): siRNA sense strand
gacaaucaaccucaaguua

SEQ ID NO: 1643950 - RNA, 19 nt, Homo sapiens
  misc_RNA (1)...(19): siRNA sense strand
uugcauagcuguucaguga

SEQ ID NO: 1643951 - RNA, 19 nt, Homo sapiens
  misc_RNA (1)...(19): siRNA sense strand
gaacucaauuucuccacuu

SEQ ID NO: 1643952 - RNA, 19 nt, Homo sapiens
  misc_RNA (1)...(19): siRNA sense strand
gggaauauauguagugaca

SEQ ID NO: 1643953 - RNA, 19 nt, Homo sapiens
  misc_RNA (1)...(19): siRNA sense strand
caaagcaccucacuaugug

SEQ ID NO: 1643954 - RNA, 19 nt, Homo sapiens
  misc_RNA (1)...(19): siRNA sense strand
caucaggaauguucuuauu

SEQ ID NO: 1643955 - RNA, 19 nt, Homo sapiens
  misc_RNA (1)...(19): siRNA sense strand
acaacaagguaaugguuua

SEQ ID NO: 1643956 - RNA, 19 nt, Homo sapiens
  misc_RNA (1)...(19): siRNA sense strand
gcaaaugcagugugaauug

SEQ ID NO: 1643957 - RNA, 19 nt, Homo sapiens
  misc_RNA (1)...(19): siRNA sense strand
gcacuacuguuauagaagu

SEQ ID NO: 1643958 - RNA, 19 nt, Homo sapiens
  misc_RNA (1)...(19): siRNA sense strand
caacaagucagucaaauuc

SEQ ID NO: 1643959 - RNA, 19 nt, Homo sapiens
  misc_RNA (1)...(19): siRNA sense strand
ggaacuauuucaucagaau

SEQ ID NO: 1643960 - RNA, 19 nt, Homo sapiens
  misc_RNA (1)...(19): siRNA sense strand
cagaguaacuggacgaaau

SEQ ID NO: 1643961 - RNA, 19 nt, Homo sapiens
  misc_RNA (1)...(19): siRNA sense strand
ucaggaauguucuuauuug

SEQ ID NO: 1643962 - RNA, 19 nt, Homo sapiens
  misc_RNA (1)...(19): siRNA sense strand
uuacagggcucuucaguuc

SEQ ID NO: 1643963 - RNA, 19 nt, Homo sapiens
  misc_RNA (1)...(19): siRNA sense strand
uguaagcccuggaauguuu

SEQ ID NO: 1643964 - RNA, 19 nt, Homo sapiens
  misc_RNA (1)...(19): siRNA sense strand
uggaagaucucaugauguu

SEQ ID NO: 1643965 - RNA, 19 nt, Homo sapiens
  misc_RNA (1)...(19): siRNA sense strand
gaaaacacguuaucuaauc

SEQ ID NO: 1643966 - RNA, 19 nt, Homo sapiens
  misc_RNA (1)...(19): siRNA sense strand
uggaagagcugaaaguguu

SEQ ID NO: 1643967 - RNA, 19 nt, Homo sapiens
  misc_RNA (1)...(19): siRNA sense strand
ccagagacccugacaacua

SEQ ID NO: 1643968 - RNA, 19 nt, Homo sapiens
  misc_RNA (1)...(19): siRNA sense strand
gcuggaagaucucaugaug

SEQ ID NO: 1643969 - RNA, 19 nt, Homo sapiens
  misc_RNA (1)...(19): siRNA sense strand
agaagaaacuggaacacaa

SEQ ID NO: 1643970 - RNA, 19 nt, Homo sapiens
  misc_RNA (1)...(19): siRNA sense strand
gaucaacucagcaaacauu

SEQ ID NO: 1643971 - RNA, 19 nt, Homo sapiens
  misc_RNA (1)...(19): siRNA sense strand
gaagagcccuauguugugu

SEQ ID NO: 1643972 - RNA, 19 nt, Homo sapiens
  misc_RNA (1)...(19): siRNA sense strand
ccauagcucuccucagauu

SEQ ID NO: 1643973 - RNA, 19 nt, Homo sapiens
  misc_RNA (1)...(19): siRNA sense strand
acagcaagcuccaauauca

SEQ ID NO: 1643974 - RNA, 19 nt, Homo sapiens
  misc_RNA (1)...(19): siRNA sense strand
cagcagacuucucacauga

SEQ ID NO: 1643975 - RNA, 19 nt, Homo sapiens
  misc_RNA (1)...(19): siRNA sense strand
gaguuaauaucaugaggaa

SEQ ID NO: 1643976 - RNA, 19 nt, Homo sapiens
  misc_RNA (1)...(19): siRNA sense strand
gaacuggaguaaagaagag

SEQ ID NO: 1643977 - RNA, 19 nt, Homo sapiens
  misc_RNA (1)...(19): siRNA sense strand
caacaacaacagagcauuu

SEQ ID NO: 1643978 - RNA, 19 nt, Homo sapiens
  misc_RNA (1)...(19): siRNA sense strand
gaacaaaugcagccuccaa

SEQ ID NO: 1643979 - RNA, 19 nt, Homo sapiens
  misc_RNA (1)...(19): siRNA sense strand
gcagcagucuucucauuca

SEQ ID NO: 1643980 - RNA, 19 nt, Homo sapiens
  misc_RNA (1)...(19): siRNA sense strand
gaaaugaaacuucuacaac

SEQ ID NO: 1643981 - RNA, 19 nt, Homo sapiens
  misc_RNA (1)...(19): siRNA sense strand
uaccagaccagauaauuua

SEQ ID NO: 1643982 - RNA, 19 nt, Homo sapiens
  misc_RNA (1)...(19): siRNA sense strand
aaauacaacuccuugcaaa

SEQ ID NO: 1643983 - RNA, 19 nt, Homo sapiens
  misc_RNA (1)...(19): siRNA sense strand
cagcaguuaucuucaguuu

SEQ ID NO: 1643984 - RNA, 19 nt, Homo sapiens
  misc_RNA (1)...(19): siRNA sense strand
gcaccgaacucaauuucuc

SEQ ID NO: 1643985 - RNA, 19 nt, Homo sapiens
  misc_RNA (1)...(19): siRNA sense strand
guaaugagaauguucaaga

SEQ ID NO: 1643986 - RNA, 19 nt, Homo sapiens
  misc_RNA (1)...(19): siRNA sense strand
gaaauacaacuccuugcaa

SEQ ID NO: 1643987 - RNA, 19 nt, Homo sapiens
  misc_RNA (1)...(19): siRNA sense strand
gaacaacaugccuggaauu

SEQ ID NO: 1643988 - RNA, 19 nt, Homo sapiens
  misc_RNA (1)...(19): siRNA sense strand
ggaaaugaaacuucuacaa

SEQ ID NO: 1643989 - RNA, 19 nt, Homo sapiens
  misc_RNA (1)...(19): siRNA sense strand
gcagacuucucacaugaug

SEQ ID NO: 1643990 - RNA, 19 nt, Homo sapiens
  misc_RNA (1)...(19): siRNA sense strand
ugagucagcuucagaauac

SEQ ID NO: 1643991 - RNA, 19 nt, Homo sapiens
  misc_RNA (1)...(19): siRNA sense strand
cagagacccugacaacuau

SEQ ID NO: 1643992 - RNA, 19 nt, Homo sapiens
  misc_RNA (1)...(19): siRNA sense strand
gaagaucucaugauguuca

SEQ ID NO: 1643993 - RNA, 19 nt, Homo sapiens
  misc_RNA (1)...(19): siRNA sense strand
gcguagggauauugaaauu

SEQ ID NO: 1643994 - RNA, 19 nt, Homo sapiens
  misc_RNA (1)...(19): siRNA sense strand
ccaaagcaccucacuaugu

SEQ ID NO: 1643995 - RNA, 19 nt, Homo sapiens
  misc_RNA (1)...(19): siRNA sense strand
ugaaccaacugcagaauuc

SEQ ID NO: 1643996 - RNA, 19 nt, Homo sapiens
  misc_RNA (1)...(19): siRNA sense strand
cagagucaguccacaguuu

SEQ ID NO: 1643997 - RNA, 19 nt, Homo sapiens
  misc_RNA (1)...(19): siRNA sense strand
gaauagugguacccaacaa

SEQ ID NO: 1643998 - RNA, 19 nt, Homo sapiens
  misc_RNA (1)...(19): siRNA sense strand
gauuaagagugaagauguu

SEQ ID NO: 1643999 - RNA, 19 nt, Homo sapiens
  misc_RNA (1)...(19): siRNA sense strand
caaacacccucuucuccaa

SEQ ID NO: 1644000 - RNA, 19 nt, Homo sapiens
  misc_RNA (1)...(19): siRNA sense strand
gacaaaugcuggaagaucu

SEQ ID NO: 1644001 - RNA, 19 nt, Homo sapiens
  misc_RNA (1)...(19): siRNA sense strand
ccugaggacuugcuggaua

SEQ ID NO: 1644002 - RNA, 19 nt, Homo sapiens
  misc_RNA (1)...(19): siRNA sense strand
caacagcaagcuccaauau

SEQ ID NO: 1644003 - RNA, 19 nt, Homo sapiens
  misc_RNA (1)...(19): siRNA sense strand
gcaagggaaugagaugaug

SEQ ID NO: 1644004 - RNA, 19 nt, Homo sapiens
  misc_RNA (1)...(19): siRNA sense strand
guacagugguuaauuuguc

SEQ ID NO: 1644005 - RNA, 19 nt, Homo sapiens
  misc_RNA (1)...(19): siRNA sense strand
ggaaaggagcugaagauag

SEQ ID NO: 1644006 - RNA, 19 nt, Homo sapiens
  misc_RNA (1)...(19): siRNA sense strand
guaaagaagagcccuaugu

SEQ ID NO: 1644007 - RNA, 19 nt, Homo sapiens
  misc_RNA (1)...(19): siRNA sense strand
caccaaacaugauauucaa

SEQ ID NO: 1644008 - RNA, 19 nt, Homo sapiens
  misc_RNA (1)...(19): siRNA sense strand
caaccaacauauuucuuuc

SEQ ID NO: 1644009 - RNA, 19 nt, Homo sapiens
  misc_RNA (1)...(19): siRNA sense strand
ucacuucaaucuggaaauu

SEQ ID NO: 1644010 - RNA, 19 nt, Homo sapiens
  misc_RNA (1)...(19): siRNA sense strand
gagaaacucagucuagaga

SEQ ID NO: 1644011 - RNA, 19 nt, Homo sapiens
  misc_RNA (1)...(19): siRNA sense strand
gugaagauguuacuccaau

SEQ ID NO: 1644012 - RNA, 19 nt, Homo sapiens
  misc_RNA (1)...(19): siRNA sense strand
gaagaggccaugaaagcaa

SEQ ID NO: 1644013 - RNA, 19 nt, Homo sapiens
  misc_RNA (1)...(19): siRNA sense strand
gaauguaaaugugaagaag

SEQ ID NO: 1644014 - RNA, 19 nt, Homo sapiens
  misc_RNA (1)...(19): siRNA sense strand
gagcaccaguuccuacaau

SEQ ID NO: 1644015 - RNA, 19 nt, Homo sapiens
  misc_RNA (1)...(19): siRNA sense strand
caagagaaacucagucuag

SEQ ID NO: 1644016 - RNA, 19 nt, Homo sapiens
  misc_RNA (1)...(19): siRNA sense strand
uaaagaagagcccuauguu

SEQ ID NO: 1644017 - RNA, 19 nt, Homo sapiens
  misc_RNA (1)...(19): siRNA sense strand
caacagcccaugcaauuuc

SEQ ID NO: 1644018 - RNA, 19 nt, Homo sapiens
  misc_RNA (1)...(19): siRNA sense strand
gauccuagcaacaacauga

SEQ ID NO: 1644019 - RNA, 19 nt, Homo sapiens
  misc_RNA (1)...(19): siRNA sense strand
cagcaaggcuuuccuacag

SEQ ID NO: 1644020 - RNA, 19 nt, Homo sapiens
  misc_RNA (1)...(19): siRNA sense strand
gcagucaccacuacaagaa

SEQ ID NO: 1644021 - RNA, 19 nt, Homo sapiens
  misc_RNA (1)...(19): siRNA sense strand
gcaaguaacucucuucuua

SEQ ID NO: 1644022 - RNA, 19 nt, Homo sapiens
  misc_RNA (1)...(19): siRNA sense strand
gaaaggagcugaagauagu

SEQ ID NO: 1644023 - RNA, 19 nt, Homo sapiens
  misc_RNA (1)...(19): siRNA sense strand
gcaaagaaguggacauuga

SEQ ID NO: 1644024 - RNA, 19 nt, Homo sapiens
  misc_RNA (1)...(19): siRNA sense strand
caacagcgaugcacuauug

SEQ ID NO: 1644025 - RNA, 19 nt, Homo sapiens
  misc_RNA (1)...(19): siRNA sense strand
caacagaaccagucaauuu

SEQ ID NO: 1644026 - RNA, 19 nt, Homo sapiens
  misc_RNA (1)...(19): siRNA sense strand
gcaguuaucuucaguuuua

SEQ ID NO: 1644027 - RNA, 19 nt, Homo sapiens
  misc_RNA (1)...(19): siRNA sense strand
guacaagggucaccuaguu

SEQ ID NO: 1644028 - RNA, 19 nt, Homo sapiens
  misc_RNA (1)...(19): siRNA sense strand
caacuugacuggcuccuuu

SEQ ID NO: 1644029 - RNA, 19 nt, Homo sapiens
  misc_RNA (1)...(19): siRNA sense strand
caacaugccuggaauucaa

SEQ ID NO: 1644030 - RNA, 19 nt, Homo sapiens
  misc_RNA (1)...(19): siRNA sense strand
guagggauauugaaauuga

SEQ ID NO: 1644031 - RNA, 19 nt, Homo sapiens
  misc_RNA (1)...(19): siRNA sense strand
ucacagcacucaauaguug

SEQ ID NO: 1644032 - RNA, 19 nt, Homo sapiens
  misc_RNA (1)...(19): siRNA sense strand
gcaacagucuccucuuuau

SEQ ID NO: 1644033 - RNA, 19 nt, Homo sapiens
  misc_RNA (1)...(19): siRNA sense strand
ccacuggcauccucuauaa

SEQ ID NO: 1644034 - RNA, 19 nt, Homo sapiens
  misc_RNA (1)...(19): siRNA sense strand
gaaaagcaguuaaccagua

SEQ ID NO: 1644035 - RNA, 19 nt, Homo sapiens
  misc_RNA (1)...(19): siRNA sense strand
ggaaugagaugaugucacu

SEQ ID NO: 1644036 - RNA, 19 nt, Homo sapiens
  misc_RNA (1)...(19): siRNA sense strand
gaaaacaucucaaacauag

SEQ ID NO: 1644037 - RNA, 19 nt, Homo sapiens
  misc_RNA (1)...(19): siRNA sense strand
gcaguaugauuaagaguga

SEQ ID NO: 1644038 - RNA, 19 nt, Homo sapiens
  misc_RNA (1)...(19): siRNA sense strand
gcaaggcuuuccuacagua

SEQ ID NO: 1644039 - RNA, 19 nt, Homo sapiens
  misc_RNA (1)...(19): siRNA sense strand
ugacaacacuucuuucuca

SEQ ID NO: 1644040 - RNA, 19 nt, Homo sapiens
  misc_RNA (1)...(19): siRNA sense strand
gagaugaugucacuucaau

SEQ ID NO: 1644041 - RNA, 19 nt, Homo sapiens
  misc_RNA (1)...(19): siRNA sense strand
gaaacucagucuagagaga

SEQ ID NO: 1644042 - RNA, 19 nt, Homo sapiens
  misc_RNA (1)...(19): siRNA sense strand
gcagcaggcuacacaguuu

SEQ ID NO: 1644043 - RNA, 19 nt, Homo sapiens
  misc_RNA (1)...(19): siRNA sense strand
gaaaggagaagaagaagug

SEQ ID NO: 1644044 - RNA, 19 nt, Homo sapiens
  misc_RNA (1)...(19): siRNA sense strand
uaaugaaccuguaguguug

SEQ ID NO: 1644045 - RNA, 19 nt, Homo sapiens
  misc_RNA (1)...(19): siRNA sense strand
uaucaggccugcagaguaa

SEQ ID NO: 1644046 - RNA, 19 nt, Homo sapiens
  misc_RNA (1)...(19): siRNA sense strand
ugaaggcacuacuguuaua

SEQ ID NO: 1644047 - RNA, 19 nt, Homo sapiens
  misc_RNA (1)...(19): siRNA sense strand
gaggaaugcugaugucgaa

SEQ ID NO: 1644048 - RNA, 19 nt, Homo sapiens
  misc_RNA (1)...(19): siRNA sense strand
gcagucaaccaacauauuu

SEQ ID NO: 1644049 - RNA, 19 nt, Homo sapiens
  misc_RNA (1)...(19): siRNA sense strand
gacaaucaaccucaaguua

SEQ ID NO: 1644050 - RNA, 19 nt, Homo sapiens
  misc_RNA (1)...(19): siRNA sense strand
uugcauagcuguucaguga

SEQ ID NO: 1644051 - RNA, 19 nt, Homo sapiens
  misc_RNA (1)...(19): siRNA sense strand
gaacucaauuucuccacuu

SEQ ID NO: 1644052 - RNA, 19 nt, Homo sapiens
  misc_RNA (1)...(19): siRNA sense strand
gggaauauauguagugaca

SEQ ID NO: 1644053 - RNA, 19 nt, Homo sapiens
  misc_RNA (1)...(19): siRNA sense strand
caaagcaccucacuaugug

SEQ ID NO: 1644054 - RNA, 19 nt, Homo sapiens
  misc_RNA (1)...(19): siRNA sense strand
caucaggaauguucuuauu

SEQ ID NO: 1644055 - RNA, 19 nt, Homo sapiens
  misc_RNA (1)...(19): siRNA sense strand
acaacaagguaaugguuua

SEQ ID NO: 1644056 - RNA, 19 nt, Homo sapiens
  misc_RNA (1)...(19): siRNA sense strand
gcaaaugcagugugaauug

SEQ ID NO: 1644057 - RNA, 19 nt, Homo sapiens
  misc_RNA (1)...(19): siRNA sense strand
gcacuacuguuauagaagu

SEQ ID NO: 1644058 - RNA, 19 nt, Homo sapiens
  misc_RNA (1)...(19): siRNA sense strand
caacaagucagucaaauuc

SEQ ID NO: 1644059 - RNA, 19 nt, Homo sapiens
  misc_RNA (1)...(19): siRNA sense strand
ggaacuauuucaucagaau

SEQ ID NO: 1644060 - RNA, 19 nt, Homo sapiens
  misc_RNA (1)...(19): siRNA sense strand
cagaguaacuggacgaaau

SEQ ID NO: 1644061 - RNA, 19 nt, Homo sapiens
  misc_RNA (1)...(19): siRNA sense strand
ucaggaauguucuuauuug

SEQ ID NO: 1644062 - RNA, 19 nt, Homo sapiens
  misc_RNA (1)...(19): siRNA sense strand
uuacagggcucuucaguuc

SEQ ID NO: 1644063 - RNA, 19 nt, Homo sapiens
  misc_RNA (1)...(19): siRNA sense strand
uguaagcccuggaauguuu

SEQ ID NO: 1644064 - RNA, 19 nt, Homo sapiens
  misc_RNA (1)...(19): siRNA sense strand
uggaagaucucaugauguu

SEQ ID NO: 1644065 - RNA, 19 nt, Homo sapiens
  misc_RNA (1)...(19): siRNA sense strand
gaaaacacguuaucuaauc

SEQ ID NO: 1644066 - RNA, 19 nt, Homo sapiens
  misc_RNA (1)...(19): siRNA sense strand
uggaagagcugaaaguguu

SEQ ID NO: 1644067 - RNA, 19 nt, Homo sapiens
  misc_RNA (1)...(19): siRNA sense strand
ccagagacccugacaacua

SEQ ID NO: 1644068 - RNA, 19 nt, Homo sapiens
  misc_RNA (1)...(19): siRNA sense strand
gcuggaagaucucaugaug

SEQ ID NO: 1644069 - RNA, 19 nt, Homo sapiens
  misc_RNA (1)...(19): siRNA sense strand
agaagaaacuggaacacaa

SEQ ID NO: 1644070 - RNA, 19 nt, Homo sapiens
  misc_RNA (1)...(19): siRNA sense strand
gaucaacucagcaaacauu

SEQ ID NO: 1644071 - RNA, 19 nt, Homo sapiens
  misc_RNA (1)...(19): siRNA sense strand
gaagagcccuauguugugu

SEQ ID NO: 1644072 - RNA, 19 nt, Homo sapiens
  misc_RNA (1)...(19): siRNA sense strand
ccauagcucuccucagauu

SEQ ID NO: 1644073 - RNA, 19 nt, Homo sapiens
  misc_RNA (1)...(19): siRNA sense strand
acagcaagcuccaauauca

SEQ ID NO: 1644074 - RNA, 19 nt, Homo sapiens
  misc_RNA (1)...(19): siRNA sense strand
cagcagacuucucacauga

SEQ ID NO: 1644075 - RNA, 19 nt, Homo sapiens
  misc_RNA (1)...(19): siRNA sense strand
gaguuaauaucaugaggaa

SEQ ID NO: 1644076 - RNA, 19 nt, Homo sapiens
  misc_RNA (1)...(19): siRNA sense strand
gaacuggaguaaagaagag

SEQ ID NO: 1644077 - RNA, 19 nt, Homo sapiens
  misc_RNA (1)...(19): siRNA sense strand
caacaacaacagagcauuu

SEQ ID NO: 1644078 - RNA, 19 nt, Homo sapiens
  misc_RNA (1)...(19): siRNA sense strand
gaacaaaugcagccuccaa

SEQ ID NO: 1644079 - RNA, 19 nt, Homo sapiens
  misc_RNA (1)...(19): siRNA sense strand
gcagcagucuucucauuca

SEQ ID NO: 1644080 - RNA, 19 nt, Homo sapiens
  misc_RNA (1)...(19): siRNA sense strand
gaaaugaaacuucuacaac

SEQ ID NO: 1644081 - RNA, 19 nt, Homo sapiens
  misc_RNA (1)...(19): siRNA sense strand
uaccagaccagauaauuua

SEQ ID NO: 1644082 - RNA, 19 nt, Homo sapiens
  misc_RNA (1)...(19): siRNA sense strand
aaauacaacuccuugcaaa

SEQ ID NO: 1644083 - RNA, 19 nt, Homo sapiens
  misc_RNA (1)...(19): siRNA sense strand
cagcaguuaucuucaguuu

SEQ ID NO: 1644084 - RNA, 19 nt, Homo sapiens
  misc_RNA (1)...(19): siRNA sense strand
gcaccgaacucaauuucuc

SEQ ID NO: 1644085 - RNA, 19 nt, Homo sapiens
  misc_RNA (1)...(19): siRNA sense strand
guaaugagaauguucaaga

SEQ ID NO: 1644086 - RNA, 19 nt, Homo sapiens
  misc_RNA (1)...(19): siRNA sense strand
gaaauacaacuccuugcaa

SEQ ID NO: 1644087 - RNA, 19 nt, Homo sapiens
  misc_RNA (1)...(19): siRNA sense strand
gaacaacaugccuggaauu

SEQ ID NO: 1644088 - RNA, 19 nt, Homo sapiens
  misc_RNA (1)...(19): siRNA sense strand
ggaaaugaaacuucuacaa

SEQ ID NO: 1644089 - RNA, 19 nt, Homo sapiens
  misc_RNA (1)...(19): siRNA sense strand
gcagacuucucacaugaug

SEQ ID NO: 1644090 - RNA, 19 nt, Homo sapiens
  misc_RNA (1)...(19): siRNA sense strand
ugagucagcuucagaauac

SEQ ID NO: 1644091 - RNA, 19 nt, Homo sapiens
  misc_RNA (1)...(19): siRNA sense strand
cagagacccugacaacuau

SEQ ID NO: 1644092 - RNA, 19 nt, Homo sapiens
  misc_RNA (1)...(19): siRNA sense strand
gaagaucucaugauguuca

SEQ ID NO: 1644093 - RNA, 19 nt, Homo sapiens
  misc_RNA (1)...(19): siRNA sense strand
gcguagggauauugaaauu

SEQ ID NO: 1644094 - RNA, 19 nt, Homo sapiens
  misc_RNA (1)...(19): siRNA sense strand
ccaaagcaccucacuaugu

SEQ ID NO: 1644095 - RNA, 19 nt, Homo sapiens
  misc_RNA (1)...(19): siRNA sense strand
ugaaccaacugcagaauuc

SEQ ID NO: 1644096 - RNA, 19 nt, Homo sapiens
  misc_RNA (1)...(19): siRNA sense strand
cagagucaguccacaguuu

SEQ ID NO: 1644097 - RNA, 19 nt, Homo sapiens
  misc_RNA (1)...(19): siRNA sense strand
gaauagugguacccaacaa

SEQ ID NO: 1644098 - RNA, 19 nt, Homo sapiens
  misc_RNA (1)...(19): siRNA sense strand
gauuaagagugaagauguu

SEQ ID NO: 1644099 - RNA, 19 nt, Homo sapiens
  misc_RNA (1)...(19): siRNA sense strand
caaacacccucuucuccaa

SEQ ID NO: 1644100 - RNA, 19 nt, Homo sapiens
  misc_RNA (1)...(19): siRNA sense strand
gacaaaugcuggaagaucu

SEQ ID NO: 1644101 - RNA, 19 nt, Homo sapiens
  misc_RNA (1)...(19): siRNA sense strand
ccugaggacuugcuggaua

SEQ ID NO: 1644102 - RNA, 19 nt, Homo sapiens
  misc_RNA (1)...(19): siRNA sense strand
caacagcaagcuccaauau

SEQ ID NO: 1644103 - RNA, 19 nt, Homo sapiens
  misc_RNA (1)...(19): siRNA sense strand
gcaagggaaugagaugaug

SEQ ID NO: 1644104 - RNA, 19 nt, Homo sapiens
  misc_RNA (1)...(19): siRNA sense strand
guacagugguuaauuuguc

SEQ ID NO: 1644105 - RNA, 19 nt, Homo sapiens
  misc_RNA (1)...(19): siRNA sense strand
ggaaaggagcugaagauag

SEQ ID NO: 1644106 - RNA, 19 nt, Homo sapiens
  misc_RNA (1)...(19): siRNA sense strand
guaaagaagagcccuaugu

SEQ ID NO: 1644107 - RNA, 19 nt, Homo sapiens
  misc_RNA (1)...(19): siRNA sense strand
caccaaacaugauauucaa

SEQ ID NO: 1644108 - RNA, 19 nt, Homo sapiens
  misc_RNA (1)...(19): siRNA sense strand
caaccaacauauuucuuuc

SEQ ID NO: 1644109 - RNA, 19 nt, Homo sapiens
  misc_RNA (1)...(19): siRNA sense strand
ucacuucaaucuggaaauu

SEQ ID NO: 1644110 - RNA, 19 nt, Homo sapiens
  misc_RNA (1)...(19): siRNA sense strand
gagaaacucagucuagaga

SEQ ID NO: 1644111 - RNA, 19 nt, Homo sapiens
  misc_RNA (1)...(19): siRNA sense strand
gugaagauguuacuccaau

SEQ ID NO: 1644112 - RNA, 19 nt, Homo sapiens
  misc_RNA (1)...(19): siRNA sense strand
gaagaggccaugaaagcaa

SEQ ID NO: 1644113 - RNA, 19 nt, Homo sapiens
  misc_RNA (1)...(19): siRNA sense strand
gaauguaaaugugaagaag

SEQ ID NO: 1644114 - RNA, 19 nt, Homo sapiens
  misc_RNA (1)...(19): siRNA sense strand
gagcaccaguuccuacaau

SEQ ID NO: 1644115 - RNA, 19 nt, Homo sapiens
  misc_RNA (1)...(19): siRNA sense strand
caagagaaacucagucuag

SEQ ID NO: 1644116 - RNA, 19 nt, Homo sapiens
  misc_RNA (1)...(19): siRNA sense strand
uaaagaagagcccuauguu

SEQ ID NO: 1644117 - RNA, 19 nt, Homo sapiens
  misc_RNA (1)...(19): siRNA sense strand
caacagcccaugcaauuuc

SEQ ID NO: 1644118 - RNA, 19 nt, Homo sapiens
  misc_RNA (1)...(19): siRNA sense strand
gauccuagcaacaacauga

SEQ ID NO: 1644119 - RNA, 19 nt, Homo sapiens
  misc_RNA (1)...(19): siRNA sense strand
cagcaaggcuuuccuacag

SEQ ID NO: 1644120 - RNA, 19 nt, Homo sapiens
  misc_RNA (1)...(19): siRNA sense strand
gcagucaccacuacaagaa

SEQ ID NO: 1644121 - RNA, 19 nt, Homo sapiens
  misc_RNA (1)...(19): siRNA sense strand
gcaucgaucuuaaccauaa

SEQ ID NO: 1644122 - RNA, 19 nt, Homo sapiens
  misc_RNA (1)...(19): siRNA sense strand
ggacgccgauccaugguuu

SEQ ID NO: 1644123 - RNA, 19 nt, Homo sapiens
  misc_RNA (1)...(19): siRNA sense strand
ccaaugaccuauuccuuga

SEQ ID NO: 1644124 - RNA, 19 nt, Homo sapiens
  misc_RNA (1)...(19): siRNA sense strand
ggaagaagcuaacucuaac

SEQ ID NO: 1644125 - RNA, 19 nt, Homo sapiens
  misc_RNA (1)...(19): siRNA sense strand
ggacggcgaucuauaugau

SEQ ID NO: 1644126 - RNA, 19 nt, Homo sapiens
  misc_RNA (1)...(19): siRNA sense strand
gaggacggcucaacauuca

SEQ ID NO: 1644127 - RNA, 19 nt, Homo sapiens
  misc_RNA (1)...(19): siRNA sense strand
gcaguaaucuggccaugca

SEQ ID NO: 1644128 - RNA, 19 nt, Homo sapiens
  misc_RNA (1)...(19): siRNA sense strand
gagcaucgaucuuaaccau

SEQ ID NO: 1644129 - RNA, 19 nt, Homo sapiens
  misc_RNA (1)...(19): siRNA sense strand
ugaggaagcugaugaagca

SEQ ID NO: 1644130 - RNA, 19 nt, Homo sapiens
  misc_RNA (1)...(19): siRNA sense strand
caaguucccucacgagaau

SEQ ID NO: 1644131 - RNA, 19 nt, Homo sapiens
  misc_RNA (1)...(19): siRNA sense strand
ggaggacggcgaucuauau

SEQ ID NO: 1644132 - RNA, 19 nt, Homo sapiens
  misc_RNA (1)...(19): siRNA sense strand
gcaguaaucaaguggauga

SEQ ID NO: 1644133 - RNA, 19 nt, Homo sapiens
  misc_RNA (1)...(19): siRNA sense strand
ggaacucugucuggaggua

SEQ ID NO: 1644134 - RNA, 19 nt, Homo sapiens
  misc_RNA (1)...(19): siRNA sense strand
cggaagaagcuaacucuaa

SEQ ID NO: 1644135 - RNA, 19 nt, Homo sapiens
  misc_RNA (1)...(19): siRNA sense strand
gcuaugagaucgccuacca

SEQ ID NO: 1644136 - RNA, 19 nt, Homo sapiens
  misc_RNA (1)...(19): siRNA sense strand
caugaacccugauggcuau

SEQ ID NO: 1644137 - RNA, 19 nt, Homo sapiens
  misc_RNA (1)...(19): siRNA sense strand
ggauucgagucaucaagaa

SEQ ID NO: 1644138 - RNA, 19 nt, Homo sapiens
  misc_RNA (1)...(19): siRNA sense strand
gcaauuucgugcucaccaa

SEQ ID NO: 1644139 - RNA, 19 nt, Homo sapiens
  misc_RNA (1)...(19): siRNA sense strand
caacaucacccgcaucuac

SEQ ID NO: 1644140 - RNA, 19 nt, Homo sapiens
  misc_RNA (1)...(19): siRNA sense strand
gaagcuguaugugauggaa

SEQ ID NO: 1644141 - RNA, 19 nt, Homo sapiens
  misc_RNA (1)...(19): siRNA sense strand
gaacagcauguccggauuc

SEQ ID NO: 1644142 - RNA, 19 nt, Homo sapiens
  misc_RNA (1)...(19): siRNA sense strand
ugacccggcugcucucuga

SEQ ID NO: 1644143 - RNA, 19 nt, Homo sapiens
  misc_RNA (1)...(19): siRNA sense strand
aaccagagcaucgaucuua

SEQ ID NO: 1644144 - RNA, 19 nt, Homo sapiens
  misc_RNA (1)...(19): siRNA sense strand
gggauccucugacccucua

SEQ ID NO: 1644145 - RNA, 19 nt, Homo sapiens
  misc_RNA (1)...(19): siRNA sense strand
ggacacggagcuugggauu

SEQ ID NO: 1644146 - RNA, 19 nt, Homo sapiens
  misc_RNA (1)...(19): siRNA sense strand
gaacugucgggucaccuuu

SEQ ID NO: 1644147 - RNA, 19 nt, Homo sapiens
  misc_RNA (1)...(19): siRNA sense strand
cuacguggcuggcaugcau

SEQ ID NO: 1644148 - RNA, 19 nt, Homo sapiens
  misc_RNA (1)...(19): siRNA sense strand
gggcuaccauucagugaca

SEQ ID NO: 1644149 - RNA, 19 nt, Homo sapiens
  misc_RNA (1)...(19): siRNA sense strand
ggagugggagaacaacaaa

SEQ ID NO: 1644150 - RNA, 19 nt, Homo sapiens
  misc_RNA (1)...(19): siRNA sense strand
cuguggagcuguccuguga

SEQ ID NO: 1644151 - RNA, 19 nt, Homo sapiens
  misc_RNA (1)...(19): siRNA sense strand
ugggauggacgcaguauuu

SEQ ID NO: 1644152 - RNA, 19 nt, Homo sapiens
  misc_RNA (1)...(19): siRNA sense strand
gaacaaccagagcaucgau

SEQ ID NO: 1644153 - RNA, 19 nt, Homo sapiens
  misc_RNA (1)...(19): siRNA sense strand
caucauacaagguccaguu

SEQ ID NO: 1644154 - RNA, 19 nt, Homo sapiens
  misc_RNA (1)...(19): siRNA sense strand
gggcaguaaucaaguggau

SEQ ID NO: 1644155 - RNA, 19 nt, Homo sapiens
  misc_RNA (1)...(19): siRNA sense strand
ggccugaagcuguauguga

SEQ ID NO: 1644156 - RNA, 19 nt, Homo sapiens
  misc_RNA (1)...(19): siRNA sense strand
acuuucagcaucacaauua

SEQ ID NO: 1644157 - RNA, 19 nt, Homo sapiens
  misc_RNA (1)...(19): siRNA sense strand
gccugaagcuguaugugau

SEQ ID NO: 1644158 - RNA, 19 nt, Homo sapiens
  misc_RNA (1)...(19): siRNA sense strand
ugaugaagcagguacaaga

SEQ ID NO: 1644159 - RNA, 19 nt, Homo sapiens
  misc_RNA (1)...(19): siRNA sense strand
ucaccaagacucccaaaca

SEQ ID NO: 1644160 - RNA, 19 nt, Homo sapiens
  misc_RNA (1)...(19): siRNA sense strand
gaacccugauggcuaugag

SEQ ID NO: 1644161 - RNA, 19 nt, Homo sapiens
  misc_RNA (1)...(19): siRNA sense strand
acacggagcuugggauugc

SEQ ID NO: 1644162 - RNA, 19 nt, Homo sapiens
  misc_RNA (1)...(19): siRNA sense strand
ucagcuaccuacacaccaa

SEQ ID NO: 1644163 - RNA, 19 nt, Homo sapiens
  misc_RNA (1)...(19): siRNA sense strand
gacuucagcuaccuacaca

SEQ ID NO: 1644164 - RNA, 19 nt, Homo sapiens
  misc_RNA (1)...(19): siRNA sense strand
caccaagacucccaaacag

SEQ ID NO: 1644165 - RNA, 19 nt, Homo sapiens
  misc_RNA (1)...(19): siRNA sense strand
ugaagaagcggaagaagcu

SEQ ID NO: 1644166 - RNA, 19 nt, Homo sapiens
  misc_RNA (1)...(19): siRNA sense strand
agaacagcauguccggauu

SEQ ID NO: 1644167 - RNA, 19 nt, Homo sapiens
  misc_RNA (1)...(19): siRNA sense strand
cgaggacggcucaacauuc

SEQ ID NO: 1644168 - RNA, 19 nt, Homo sapiens
  misc_RNA (1)...(19): siRNA sense strand
ggaacugucgggucaccuu

SEQ ID NO: 1644169 - RNA, 19 nt, Homo sapiens
  misc_RNA (1)...(19): siRNA sense strand
ggacaaggacacggagcuu

SEQ ID NO: 1644170 - RNA, 19 nt, Homo sapiens
  misc_RNA (1)...(19): siRNA sense strand
aagacgcccuccucaccua

SEQ ID NO: 1644171 - RNA, 19 nt, Homo sapiens
  misc_RNA (1)...(19): siRNA sense strand
gaagaagcggaagaagcua

SEQ ID NO: 1644172 - RNA, 19 nt, Homo sapiens
  misc_RNA (1)...(19): siRNA sense strand
ggacggcucaacauucagu

SEQ ID NO: 1644173 - RNA, 19 nt, Homo sapiens
  misc_RNA (1)...(19): siRNA sense strand
ugucuaugcuggcaguaau

SEQ ID NO: 1644174 - RNA, 19 nt, Homo sapiens
  misc_RNA (1)...(19): siRNA sense strand
cauacaagguccaguucag

SEQ ID NO: 1644175 - RNA, 19 nt, Homo sapiens
  misc_RNA (1)...(19): siRNA sense strand
gaggacggcgaucuauaug

SEQ ID NO: 1644176 - RNA, 19 nt, Homo sapiens
  misc_RNA (1)...(19): siRNA sense strand
gaaugacuucagcuaccua

SEQ ID NO: 1644177 - RNA, 19 nt, Homo sapiens
  misc_RNA (1)...(19): siRNA sense strand
ccucugacccucuagacuu

SEQ ID NO: 1644178 - RNA, 19 nt, Homo sapiens
  misc_RNA (1)...(19): siRNA sense strand
cagaaacuccagugcugaa

SEQ ID NO: 1644179 - RNA, 19 nt, Homo sapiens
  misc_RNA (1)...(19): siRNA sense strand
uaacgggaccucagaacag

SEQ ID NO: 1644180 - RNA, 19 nt, Homo sapiens
  misc_RNA (1)...(19): siRNA sense strand
gccaugaggaagcugauga

SEQ ID NO: 1644181 - RNA, 19 nt, Homo sapiens
  misc_RNA (1)...(19): siRNA sense strand
aguauuuccugccaauuca

SEQ ID NO: 1644182 - RNA, 19 nt, Homo sapiens
  misc_RNA (1)...(19): siRNA sense strand
accagaugaugcuguguuu

SEQ ID NO: 1644183 - RNA, 19 nt, Homo sapiens
  misc_RNA (1)...(19): siRNA sense strand
caccguggcuccugaaacg

SEQ ID NO: 1644184 - RNA, 19 nt, Homo sapiens
  misc_RNA (1)...(19): siRNA sense strand
ugccauugcccacuuacua

SEQ ID NO: 1644185 - RNA, 19 nt, Homo sapiens
  misc_RNA (1)...(19): siRNA sense strand
gaccucaacacaccacugu

SEQ ID NO: 1644186 - RNA, 19 nt, Homo sapiens
  misc_RNA (1)...(19): siRNA sense strand
gaagcagguacaagagcaa

SEQ ID NO: 1644187 - RNA, 19 nt, Homo sapiens
  misc_RNA (1)...(19): siRNA sense strand
caauucagacccagaaacu

SEQ ID NO: 1644188 - RNA, 19 nt, Homo sapiens
  misc_RNA (1)...(19): siRNA sense strand
cuacacaccaacugcuuug

SEQ ID NO: 1644189 - RNA, 19 nt, Homo sapiens
  misc_RNA (1)...(19): siRNA sense strand
ccaaccaucaccugccauu

SEQ ID NO: 1644190 - RNA, 19 nt, Homo sapiens
  misc_RNA (1)...(19): siRNA sense strand
caguauuuccugccaauuc

SEQ ID NO: 1644191 - RNA, 19 nt, Homo sapiens
  misc_RNA (1)...(19): siRNA sense strand
accagagcaucgaucuuaa

SEQ ID NO: 1644192 - RNA, 19 nt, Homo sapiens
  misc_RNA (1)...(19): siRNA sense strand
gaagaagcuaacucuaacu

SEQ ID NO: 1644193 - RNA, 19 nt, Homo sapiens
  misc_RNA (1)...(19): siRNA sense strand
gaugaagcagguacaagag

SEQ ID NO: 1644194 - RNA, 19 nt, Homo sapiens
  misc_RNA (1)...(19): siRNA sense strand
acaaguucccucacgagaa

SEQ ID NO: 1644195 - RNA, 19 nt, Homo sapiens
  misc_RNA (1)...(19): siRNA sense strand
cagcuaacgggaccucaga

SEQ ID NO: 1644196 - RNA, 19 nt, Homo sapiens
  misc_RNA (1)...(19): siRNA sense strand
ggaacaaccagagcaucga

SEQ ID NO: 1644197 - RNA, 19 nt, Homo sapiens
  misc_RNA (1)...(19): siRNA sense strand
gagcaaugccccaacauca

SEQ ID NO: 1644198 - RNA, 19 nt, Homo sapiens
  misc_RNA (1)...(19): siRNA sense strand
cucugacccucuagacuuu

SEQ ID NO: 1644199 - RNA, 19 nt, Homo sapiens
  misc_RNA (1)...(19): siRNA sense strand
caccugccauugcccacuu

SEQ ID NO: 1644200 - RNA, 19 nt, Homo sapiens
  misc_RNA (1)...(19): siRNA sense strand
aagaagcggaagaagcuaa

SEQ ID NO: 1644201 - RNA, 19 nt, Homo sapiens
  misc_RNA (1)...(19): siRNA sense strand
gcggaagaagcuaacucua

SEQ ID NO: 1644202 - RNA, 19 nt, Homo sapiens
  misc_RNA (1)...(19): siRNA sense strand
caagagcaaugccccaaca

SEQ ID NO: 1644203 - RNA, 19 nt, Homo sapiens
  misc_RNA (1)...(19): siRNA sense strand
gcacggcaacaucaucaac

SEQ ID NO: 1644204 - RNA, 19 nt, Homo sapiens
  misc_RNA (1)...(19): siRNA sense strand
caacugcuuugaggucacu

SEQ ID NO: 1644205 - RNA, 19 nt, Homo sapiens
  misc_RNA (1)...(19): siRNA sense strand
gaacucugucuggagguau

SEQ ID NO: 1644206 - RNA, 19 nt, Homo sapiens
  misc_RNA (1)...(19): siRNA sense strand
cggauucgagucaucaaga

SEQ ID NO: 1644207 - RNA, 19 nt, Homo sapiens
  misc_RNA (1)...(19): siRNA sense strand
uggaggacggcgaucuaua

SEQ ID NO: 1644208 - RNA, 19 nt, Homo sapiens
  misc_RNA (1)...(19): siRNA sense strand
ccgaggacggcucaacauu

SEQ ID NO: 1644209 - RNA, 19 nt, Homo sapiens
  misc_RNA (1)...(19): siRNA sense strand
ccaguccuuuggucuugga

SEQ ID NO: 1644210 - RNA, 19 nt, Homo sapiens
  misc_RNA (1)...(19): siRNA sense strand
acugucgggucaccuuuga

SEQ ID NO: 1644211 - RNA, 19 nt, Homo sapiens
  misc_RNA (1)...(19): siRNA sense strand
gccgagggcuaccauucag

SEQ ID NO: 1644212 - RNA, 19 nt, Homo sapiens
  misc_RNA (1)...(19): siRNA sense strand
ccgggagcaugaaugacuu

SEQ ID NO: 1644213 - RNA, 19 nt, Homo sapiens
  misc_RNA (1)...(19): siRNA sense strand
ggacaagccuggggagcau

SEQ ID NO: 1644214 - RNA, 19 nt, Homo sapiens
  misc_RNA (1)...(19): siRNA sense strand
uguaugugauggaaauguc

SEQ ID NO: 1644215 - RNA, 19 nt, Homo sapiens
  misc_RNA (1)...(19): siRNA sense strand
acccgcaucuacagcauug

SEQ ID NO: 1644216 - RNA, 19 nt, Homo sapiens
  misc_RNA (1)...(19): siRNA sense strand
ucccugcgaguuucagaua

SEQ ID NO: 1644217 - RNA, 19 nt, Homo sapiens
  misc_RNA (1)...(19): siRNA sense strand
gaacugcuguggucacuuu

SEQ ID NO: 1644218 - RNA, 19 nt, Homo sapiens
  misc_RNA (1)...(19): siRNA sense strand
agaaggagauucacagaga

SEQ ID NO: 1644219 - RNA, 19 nt, Homo sapiens
  misc_RNA (1)...(19): siRNA sense strand
gccaacagcccuaacauuu

SEQ ID NO: 1644220 - RNA, 19 nt, Homo sapiens
  misc_RNA (1)...(19): siRNA sense strand
ggaagcgaaugaggaguuu

SEQ ID NO: 1644221 - RNA, 19 nt, Homo sapiens
  misc_RNA (1)...(19): siRNA sense strand
gcacaugaagcgacaaaga

SEQ ID NO: 1644222 - RNA, 19 nt, Homo sapiens
  misc_RNA (1)...(19): siRNA sense strand
gcaagcaagcacuauauga

SEQ ID NO: 1644223 - RNA, 19 nt, Homo sapiens
  misc_RNA (1)...(19): siRNA sense strand
caacagcccuaacauuugc

SEQ ID NO: 1644224 - RNA, 19 nt, Homo sapiens
  misc_RNA (1)...(19): siRNA sense strand
caacauagucaauuugcuu

SEQ ID NO: 1644225 - RNA, 19 nt, Homo sapiens
  misc_RNA (1)...(19): siRNA sense strand
caagcaagcacuauaugaa

SEQ ID NO: 1644226 - RNA, 19 nt, Homo sapiens
  misc_RNA (1)...(19): siRNA sense strand
ccaaccaugugacaccuuu

SEQ ID NO: 1644227 - RNA, 19 nt, Homo sapiens
  misc_RNA (1)...(19): siRNA sense strand
ccacuccucugcugcuauu

SEQ ID NO: 1644228 - RNA, 19 nt, Homo sapiens
  misc_RNA (1)...(19): siRNA sense strand
gaugugguacaaccucuua

SEQ ID NO: 1644229 - RNA, 19 nt, Homo sapiens
  misc_RNA (1)...(19): siRNA sense strand
agcaagcacuauaugaaua

SEQ ID NO: 1644230 - RNA, 19 nt, Homo sapiens
  misc_RNA (1)...(19): siRNA sense strand
ugacaaagcagagcacaug

SEQ ID NO: 1644231 - RNA, 19 nt, Homo sapiens
  misc_RNA (1)...(19): siRNA sense strand
uguguagacuugacuauca

SEQ ID NO: 1644232 - RNA, 19 nt, Homo sapiens
  misc_RNA (1)...(19): siRNA sense strand
ccaacagcccuaacauuug

SEQ ID NO: 1644233 - RNA, 19 nt, Homo sapiens
  misc_RNA (1)...(19): siRNA sense strand
gaccaugugugcggugcua

SEQ ID NO: 1644234 - RNA, 19 nt, Homo sapiens
  misc_RNA (1)...(19): siRNA sense strand
agacuugacuaucacuaau

SEQ ID NO: 1644235 - RNA, 19 nt, Homo sapiens
  misc_RNA (1)...(19): siRNA sense strand
gcgcaagcaagcacuauau

SEQ ID NO: 1644236 - RNA, 19 nt, Homo sapiens
  misc_RNA (1)...(19): siRNA sense strand
agagagaccuggccaagac

SEQ ID NO: 1644237 - RNA, 19 nt, Homo sapiens
  misc_RNA (1)...(19): siRNA sense strand
gacuaucacuaaucugcuu

SEQ ID NO: 1644238 - RNA, 19 nt, Homo sapiens
  misc_RNA (1)...(19): siRNA sense strand
gaccacaacauagucaauu

SEQ ID NO: 1644239 - RNA, 19 nt, Homo sapiens
  misc_RNA (1)...(19): siRNA sense strand
caagaaggagauucacaga

SEQ ID NO: 1644240 - RNA, 19 nt, Homo sapiens
  misc_RNA (1)...(19): siRNA sense strand
uaacauuugccaagucuuc

SEQ ID NO: 1644241 - RNA, 19 nt, Homo sapiens
  misc_RNA (1)...(19): siRNA sense strand
uauccaagaugugguacaa

SEQ ID NO: 1644242 - RNA, 19 nt, Homo sapiens
  misc_RNA (1)...(19): siRNA sense strand
cucaagagauucugugcuu

SEQ ID NO: 1644243 - RNA, 19 nt, Homo sapiens
  misc_RNA (1)...(19): siRNA sense strand
ccacaacauagucaauuug

SEQ ID NO: 1644244 - RNA, 19 nt, Homo sapiens
  misc_RNA (1)...(19): siRNA sense strand
gggaagcgaaugaggaguu

SEQ ID NO: 1644245 - RNA, 19 nt, Homo sapiens
  misc_RNA (1)...(19): siRNA sense strand
gagcacaugaagcgacaaa

SEQ ID NO: 1644246 - RNA, 19 nt, Homo sapiens
  misc_RNA (1)...(19): siRNA sense strand
ccucuuacccugcaaguuc

SEQ ID NO: 1644247 - RNA, 19 nt, Homo sapiens
  misc_RNA (1)...(19): siRNA sense strand
gacuggcuguguagacuug

SEQ ID NO: 1644248 - RNA, 19 nt, Homo sapiens
  misc_RNA (1)...(19): siRNA sense strand
caaagcagagcacaugaag

SEQ ID NO: 1644249 - RNA, 19 nt, Homo sapiens
  misc_RNA (1)...(19): siRNA sense strand
gcaagcacuauaugaauac

SEQ ID NO: 1644250 - RNA, 19 nt, Homo sapiens
  misc_RNA (1)...(19): siRNA sense strand
ucaggguccucauuuccaa

SEQ ID NO: 1644251 - RNA, 19 nt, Homo sapiens
  misc_RNA (1)...(19): siRNA sense strand
accacaacauagucaauuu

SEQ ID NO: 1644252 - RNA, 19 nt, Homo sapiens
  misc_RNA (1)...(19): siRNA sense strand
ugacaccuuucgaccacaa

SEQ ID NO: 1644253 - RNA, 19 nt, Homo sapiens
  misc_RNA (1)...(19): siRNA sense strand
cagcguccuucgcagauuc

SEQ ID NO: 1644254 - RNA, 19 nt, Homo sapiens
  misc_RNA (1)...(19): siRNA sense strand
gacaaagcagagcacauga

SEQ ID NO: 1644255 - RNA, 19 nt, Homo sapiens
  misc_RNA (1)...(19): siRNA sense strand
uagacuugacuaucacuaa

SEQ ID NO: 1644256 - RNA, 19 nt, Homo sapiens
  misc_RNA (1)...(19): siRNA sense strand
gcugguggccaaggaauug

SEQ ID NO: 1644257 - RNA, 19 nt, Homo sapiens
  misc_RNA (1)...(19): siRNA sense strand
gcccuaacauuugccaagu

SEQ ID NO: 1644258 - RNA, 19 nt, Homo sapiens
  misc_RNA (1)...(19): siRNA sense strand
agucagcccagucuucuuu

SEQ ID NO: 1644259 - RNA, 19 nt, Homo sapiens
  misc_RNA (1)...(19): siRNA sense strand
gaggaagaggccaccaaug

SEQ ID NO: 1644260 - RNA, 19 nt, Homo sapiens
  misc_RNA (1)...(19): siRNA sense strand
ccuaacauuugccaagucu

SEQ ID NO: 1644261 - RNA, 19 nt, Homo sapiens
  misc_RNA (1)...(19): siRNA sense strand
aagcaagcacuauaugaau

SEQ ID NO: 1644262 - RNA, 19 nt, Homo sapiens
  misc_RNA (1)...(19): siRNA sense strand
cuauaugaauacgcaagaa

SEQ ID NO: 1644263 - RNA, 19 nt, Homo sapiens
  misc_RNA (1)...(19): siRNA sense strand
gcucacuccagcugacaaa

SEQ ID NO: 1644264 - RNA, 19 nt, Homo sapiens
  misc_RNA (1)...(19): siRNA sense strand
acaaagcagagcacaugaa

SEQ ID NO: 1644265 - RNA, 19 nt, Homo sapiens
  misc_RNA (1)...(19): siRNA sense strand
gggaguugguggagucacu

SEQ ID NO: 1644266 - RNA, 19 nt, Homo sapiens
  misc_RNA (1)...(19): siRNA sense strand
ucagagagucaaggaaguu

SEQ ID NO: 1644267 - RNA, 19 nt, Homo sapiens
  misc_RNA (1)...(19): siRNA sense strand
aggaagaggccaccaaugg

SEQ ID NO: 1644268 - RNA, 19 nt, Homo sapiens
  misc_RNA (1)...(19): siRNA sense strand
gaauacgcaagaaggagau

SEQ ID NO: 1644269 - RNA, 19 nt, Homo sapiens
  misc_RNA (1)...(19): siRNA sense strand
ggagcgcaagcaagcacua

SEQ ID NO: 1644270 - RNA, 19 nt, Homo sapiens
  misc_RNA (1)...(19): siRNA sense strand
cagagagucaaggaaguuu

SEQ ID NO: 1644271 - RNA, 19 nt, Homo sapiens
  misc_RNA (1)...(19): siRNA sense strand
ccacagccucugccuccaa

SEQ ID NO: 1644272 - RNA, 19 nt, Homo sapiens
  misc_RNA (1)...(19): siRNA sense strand
ugaggaagaggccaccaau

SEQ ID NO: 1644273 - RNA, 19 nt, Homo sapiens
  misc_RNA (1)...(19): siRNA sense strand
guagacuugacuaucacua

SEQ ID NO: 1644274 - RNA, 19 nt, Homo sapiens
  misc_RNA (1)...(19): siRNA sense strand
caugugccauuggguguca

SEQ ID NO: 1644275 - RNA, 19 nt, Homo sapiens
  misc_RNA (1)...(19): siRNA sense strand
gaacugcuguggucacuuu

SEQ ID NO: 1644276 - RNA, 19 nt, Homo sapiens
  misc_RNA (1)...(19): siRNA sense strand
agaaggagauucacagaga

SEQ ID NO: 1644277 - RNA, 19 nt, Homo sapiens
  misc_RNA (1)...(19): siRNA sense strand
gccaacagcccuaacauuu

SEQ ID NO: 1644278 - RNA, 19 nt, Homo sapiens
  misc_RNA (1)...(19): siRNA sense strand
ggaagcgaaugaggaguuu

SEQ ID NO: 1644279 - RNA, 19 nt, Homo sapiens
  misc_RNA (1)...(19): siRNA sense strand
gcacaugaagcgacaaaga

SEQ ID NO: 1644280 - RNA, 19 nt, Homo sapiens
  misc_RNA (1)...(19): siRNA sense strand
gcaagcaagcacuauauga

SEQ ID NO: 1644281 - RNA, 19 nt, Homo sapiens
  misc_RNA (1)...(19): siRNA sense strand
caacagcccuaacauuugc

SEQ ID NO: 1644282 - RNA, 19 nt, Homo sapiens
  misc_RNA (1)...(19): siRNA sense strand
caacauagucaauuugcuu

SEQ ID NO: 1644283 - RNA, 19 nt, Homo sapiens
  misc_RNA (1)...(19): siRNA sense strand
caagcaagcacuauaugaa

SEQ ID NO: 1644284 - RNA, 19 nt, Homo sapiens
  misc_RNA (1)...(19): siRNA sense strand
ccaaccaugugacaccuuu

SEQ ID NO: 1644285 - RNA, 19 nt, Homo sapiens
  misc_RNA (1)...(19): siRNA sense strand
ccacuccucugcugcuauu

SEQ ID NO: 1644286 - RNA, 19 nt, Homo sapiens
  misc_RNA (1)...(19): siRNA sense strand
gaugugguacaaccucuua

SEQ ID NO: 1644287 - RNA, 19 nt, Homo sapiens
  misc_RNA (1)...(19): siRNA sense strand
agcaagcacuauaugaaua

SEQ ID NO: 1644288 - RNA, 19 nt, Homo sapiens
  misc_RNA (1)...(19): siRNA sense strand
ugacaaagcagagcacaug

SEQ ID NO: 1644289 - RNA, 19 nt, Homo sapiens
  misc_RNA (1)...(19): siRNA sense strand
uguguagacuugacuauca

SEQ ID NO: 1644290 - RNA, 19 nt, Homo sapiens
  misc_RNA (1)...(19): siRNA sense strand
ccaacagcccuaacauuug

SEQ ID NO: 1644291 - RNA, 19 nt, Homo sapiens
  misc_RNA (1)...(19): siRNA sense strand
gaccaugugugcggugcua

SEQ ID NO: 1644292 - RNA, 19 nt, Homo sapiens
  misc_RNA (1)...(19): siRNA sense strand
agacuugacuaucacuaau

SEQ ID NO: 1644293 - RNA, 19 nt, Homo sapiens
  misc_RNA (1)...(19): siRNA sense strand
gcgcaagcaagcacuauau

SEQ ID NO: 1644294 - RNA, 19 nt, Homo sapiens
  misc_RNA (1)...(19): siRNA sense strand
agagagaccuggccaagac

SEQ ID NO: 1644295 - RNA, 19 nt, Homo sapiens
  misc_RNA (1)...(19): siRNA sense strand
gacuaucacuaaucugcuu

SEQ ID NO: 1644296 - RNA, 19 nt, Homo sapiens
  misc_RNA (1)...(19): siRNA sense strand
gaccacaacauagucaauu

SEQ ID NO: 1644297 - RNA, 19 nt, Homo sapiens
  misc_RNA (1)...(19): siRNA sense strand
caagaaggagauucacaga

SEQ ID NO: 1644298 - RNA, 19 nt, Homo sapiens
  misc_RNA (1)...(19): siRNA sense strand
uaacauuugccaagucuuc

SEQ ID NO: 1644299 - RNA, 19 nt, Homo sapiens
  misc_RNA (1)...(19): siRNA sense strand
uauccaagaugugguacaa

SEQ ID NO: 1644300 - RNA, 19 nt, Homo sapiens
  misc_RNA (1)...(19): siRNA sense strand
cucaagagauucugugcuu

SEQ ID NO: 1644301 - RNA, 19 nt, Homo sapiens
  misc_RNA (1)...(19): siRNA sense strand
ccacaacauagucaauuug

SEQ ID NO: 1644302 - RNA, 19 nt, Homo sapiens
  misc_RNA (1)...(19): siRNA sense strand
gggaagcgaaugaggaguu

SEQ ID NO: 1644303 - RNA, 19 nt, Homo sapiens
  misc_RNA (1)...(19): siRNA sense strand
gagcacaugaagcgacaaa

SEQ ID NO: 1644304 - RNA, 19 nt, Homo sapiens
  misc_RNA (1)...(19): siRNA sense strand
ccucuuacccugcaaguuc

SEQ ID NO: 1644305 - RNA, 19 nt, Homo sapiens
  misc_RNA (1)...(19): siRNA sense strand
gacuggcuguguagacuug

SEQ ID NO: 1644306 - RNA, 19 nt, Homo sapiens
  misc_RNA (1)...(19): siRNA sense strand
caaagcagagcacaugaag

SEQ ID NO: 1644307 - RNA, 19 nt, Homo sapiens
  misc_RNA (1)...(19): siRNA sense strand
gcaagcacuauaugaauac

SEQ ID NO: 1644308 - RNA, 19 nt, Homo sapiens
  misc_RNA (1)...(19): siRNA sense strand
ucaggguccucauuuccaa

SEQ ID NO: 1644309 - RNA, 19 nt, Homo sapiens
  misc_RNA (1)...(19): siRNA sense strand
accacaacauagucaauuu

SEQ ID NO: 1644310 - RNA, 19 nt, Homo sapiens
  misc_RNA (1)...(19): siRNA sense strand
ugacaccuuucgaccacaa

SEQ ID NO: 1644311 - RNA, 19 nt, Homo sapiens
  misc_RNA (1)...(19): siRNA sense strand
cagcguccuucgcagauuc

SEQ ID NO: 1644312 - RNA, 19 nt, Homo sapiens
  misc_RNA (1)...(19): siRNA sense strand
gacaaagcagagcacauga

SEQ ID NO: 1644313 - RNA, 19 nt, Homo sapiens
  misc_RNA (1)...(19): siRNA sense strand
uagacuugacuaucacuaa

SEQ ID NO: 1644314 - RNA, 19 nt, Homo sapiens
  misc_RNA (1)...(19): siRNA sense strand
gcugguggccaaggaauug

SEQ ID NO: 1644315 - RNA, 19 nt, Homo sapiens
  misc_RNA (1)...(19): siRNA sense strand
gcccuaacauuugccaagu

SEQ ID NO: 1644316 - RNA, 19 nt, Homo sapiens
  misc_RNA (1)...(19): siRNA sense strand
agucagcccagucuucuuu

SEQ ID NO: 1644317 - RNA, 19 nt, Homo sapiens
  misc_RNA (1)...(19): siRNA sense strand
gaggaagaggccaccaaug

SEQ ID NO: 1644318 - RNA, 19 nt, Homo sapiens
  misc_RNA (1)...(19): siRNA sense strand
ccuaacauuugccaagucu

SEQ ID NO: 1644319 - RNA, 19 nt, Homo sapiens
  misc_RNA (1)...(19): siRNA sense strand
aagcaagcacuauaugaau

SEQ ID NO: 1644320 - RNA, 19 nt, Homo sapiens
  misc_RNA (1)...(19): siRNA sense strand
cuauaugaauacgcaagaa

SEQ ID NO: 1644321 - RNA, 19 nt, Homo sapiens
  misc_RNA (1)...(19): siRNA sense strand
gcucacuccagcugacaaa

SEQ ID NO: 1644322 - RNA, 19 nt, Homo sapiens
  misc_RNA (1)...(19): siRNA sense strand
acaaagcagagcacaugaa

SEQ ID NO: 1644323 - RNA, 19 nt, Homo sapiens
  misc_RNA (1)...(19): siRNA sense strand
gggaguugguggagucacu

SEQ ID NO: 1644324 - RNA, 19 nt, Homo sapiens
  misc_RNA (1)...(19): siRNA sense strand
ucagagagucaaggaaguu

SEQ ID NO: 1644325 - RNA, 19 nt, Homo sapiens
  misc_RNA (1)...(19): siRNA sense strand
aggaagaggccaccaaugg

SEQ ID NO: 1644326 - RNA, 19 nt, Homo sapiens
  misc_RNA (1)...(19): siRNA sense strand
gaauacgcaagaaggagau

SEQ ID NO: 1644327 - RNA, 19 nt, Homo sapiens
  misc_RNA (1)...(19): siRNA sense strand
ggagcgcaagcaagcacua

SEQ ID NO: 1644328 - RNA, 19 nt, Homo sapiens
  misc_RNA (1)...(19): siRNA sense strand
cagagagucaaggaaguuu

SEQ ID NO: 1644329 - RNA, 19 nt, Homo sapiens
  misc_RNA (1)...(19): siRNA sense strand
ccacagccucugccuccaa

SEQ ID NO: 1644330 - RNA, 19 nt, Homo sapiens
  misc_RNA (1)...(19): siRNA sense strand
ugaggaagaggccaccaau

SEQ ID NO: 1644331 - RNA, 19 nt, Homo sapiens
  misc_RNA (1)...(19): siRNA sense strand
guagacuugacuaucacua

SEQ ID NO: 1644332 - RNA, 19 nt, Homo sapiens
  misc_RNA (1)...(19): siRNA sense strand
caugugccauuggguguca

SEQ ID NO: 1644333 - RNA, 19 nt, Homo sapiens
  misc_RNA (1)...(19): siRNA sense strand
gaacugcuguggucacuuu

SEQ ID NO: 1644334 - RNA, 19 nt, Homo sapiens
  misc_RNA (1)...(19): siRNA sense strand
ggaagcgaaugaggaguuu

SEQ ID NO: 1644335 - RNA, 19 nt, Homo sapiens
  misc_RNA (1)...(19): siRNA sense strand
gcacaugaagcgacaaaga

SEQ ID NO: 1644336 - RNA, 19 nt, Homo sapiens
  misc_RNA (1)...(19): siRNA sense strand
caacauagucaauuugcuu

SEQ ID NO: 1644337 - RNA, 19 nt, Homo sapiens
  misc_RNA (1)...(19): siRNA sense strand
ccaaccaugugacaccuuu

SEQ ID NO: 1644338 - RNA, 19 nt, Homo sapiens
  misc_RNA (1)...(19): siRNA sense strand
ccacuccucugcugcuauu

SEQ ID NO: 1644339 - RNA, 19 nt, Homo sapiens
  misc_RNA (1)...(19): siRNA sense strand
gaugugguacaaccucuua

SEQ ID NO: 1644340 - RNA, 19 nt, Homo sapiens
  misc_RNA (1)...(19): siRNA sense strand
ugacaaagcagagcacaug

SEQ ID NO: 1644341 - RNA, 19 nt, Homo sapiens
  misc_RNA (1)...(19): siRNA sense strand
uguguagacuugacuauca

SEQ ID NO: 1644342 - RNA, 19 nt, Homo sapiens
  misc_RNA (1)...(19): siRNA sense strand
gaccaugugugcggugcua

SEQ ID NO: 1644343 - RNA, 19 nt, Homo sapiens
  misc_RNA (1)...(19): siRNA sense strand
agacuugacuaucacuaau

SEQ ID NO: 1644344 - RNA, 19 nt, Homo sapiens
  misc_RNA (1)...(19): siRNA sense strand
agagagaccuggccaagac

SEQ ID NO: 1644345 - RNA, 19 nt, Homo sapiens
  misc_RNA (1)...(19): siRNA sense strand
gacuaucacuaaucugcuu

SEQ ID NO: 1644346 - RNA, 19 nt, Homo sapiens
  misc_RNA (1)...(19): siRNA sense strand
gaccacaacauagucaauu

SEQ ID NO: 1644347 - RNA, 19 nt, Homo sapiens
  misc_RNA (1)...(19): siRNA sense strand
uauccaagaugugguacaa

SEQ ID NO: 1644348 - RNA, 19 nt, Homo sapiens
  misc_RNA (1)...(19): siRNA sense strand
cucaagagauucugugcuu

SEQ ID NO: 1644349 - RNA, 19 nt, Homo sapiens
  misc_RNA (1)...(19): siRNA sense strand
ccacaacauagucaauuug

SEQ ID NO: 1644350 - RNA, 19 nt, Homo sapiens
  misc_RNA (1)...(19): siRNA sense strand
gggaagcgaaugaggaguu

SEQ ID NO: 1644351 - RNA, 19 nt, Homo sapiens
  misc_RNA (1)...(19): siRNA sense strand
gagcacaugaagcgacaaa

SEQ ID NO: 1644352 - RNA, 19 nt, Homo sapiens
  misc_RNA (1)...(19): siRNA sense strand
ccucuuacccugcaaguuc

SEQ ID NO: 1644353 - RNA, 19 nt, Homo sapiens
  misc_RNA (1)...(19): siRNA sense strand
gacuggcuguguagacuug

SEQ ID NO: 1644354 - RNA, 19 nt, Homo sapiens
  misc_RNA (1)...(19): siRNA sense strand
caaagcagagcacaugaag

SEQ ID NO: 1644355 - RNA, 19 nt, Homo sapiens
  misc_RNA (1)...(19): siRNA sense strand
ucaggguccucauuuccaa

SEQ ID NO: 1644356 - RNA, 19 nt, Homo sapiens
  misc_RNA (1)...(19): siRNA sense strand
accacaacauagucaauuu

SEQ ID NO: 1644357 - RNA, 19 nt, Homo sapiens
  misc_RNA (1)...(19): siRNA sense strand
ugacaccuuucgaccacaa

SEQ ID NO: 1644358 - RNA, 19 nt, Homo sapiens
  misc_RNA (1)...(19): siRNA sense strand
cagcguccuucgcagauuc

SEQ ID NO: 1644359 - RNA, 19 nt, Homo sapiens
  misc_RNA (1)...(19): siRNA sense strand
gacaaagcagagcacauga

SEQ ID NO: 1644360 - RNA, 19 nt, Homo sapiens
  misc_RNA (1)...(19): siRNA sense strand
uagacuugacuaucacuaa

SEQ ID NO: 1644361 - RNA, 19 nt, Homo sapiens
  misc_RNA (1)...(19): siRNA sense strand
gcugguggccaaggaauug

SEQ ID NO: 1644362 - RNA, 19 nt, Homo sapiens
  misc_RNA (1)...(19): siRNA sense strand
agucagcccagucuucuuu

SEQ ID NO: 1644363 - RNA, 19 nt, Homo sapiens
  misc_RNA (1)...(19): siRNA sense strand
gaggaagaggccaccaaug

SEQ ID NO: 1644364 - RNA, 19 nt, Homo sapiens
  misc_RNA (1)...(19): siRNA sense strand
gcucacuccagcugacaaa

SEQ ID NO: 1644365 - RNA, 19 nt, Homo sapiens
  misc_RNA (1)...(19): siRNA sense strand
acaaagcagagcacaugaa

SEQ ID NO: 1644366 - RNA, 19 nt, Homo sapiens
  misc_RNA (1)...(19): siRNA sense strand
gggaguugguggagucacu

SEQ ID NO: 1644367 - RNA, 19 nt, Homo sapiens
  misc_RNA (1)...(19): siRNA sense strand
ucagagagucaaggaaguu

SEQ ID NO: 1644368 - RNA, 19 nt, Homo sapiens
  misc_RNA (1)...(19): siRNA sense strand
aggaagaggccaccaaugg

SEQ ID NO: 1644369 - RNA, 19 nt, Homo sapiens
  misc_RNA (1)...(19): siRNA sense strand
cagagagucaaggaaguuu

SEQ ID NO: 1644370 - RNA, 19 nt, Homo sapiens
  misc_RNA (1)...(19): siRNA sense strand
ccacagccucugccuccaa

SEQ ID NO: 1644371 - RNA, 19 nt, Homo sapiens
  misc_RNA (1)...(19): siRNA sense strand
ugaggaagaggccaccaau

SEQ ID NO: 1644372 - RNA, 19 nt, Homo sapiens
  misc_RNA (1)...(19): siRNA sense strand
guagacuugacuaucacua

SEQ ID NO: 1644373 - RNA, 19 nt, Homo sapiens
  misc_RNA (1)...(19): siRNA sense strand
caugugccauuggguguca

SEQ ID NO: 1644374 - RNA, 19 nt, Homo sapiens
  misc_RNA (1)...(19): siRNA sense strand
guacuuugaugcugaagaa

SEQ ID NO: 1644375 - RNA, 19 nt, Homo sapiens
  misc_RNA (1)...(19): siRNA sense strand
ggagccggcugggcaaaua

SEQ ID NO: 1644376 - RNA, 19 nt, Homo sapiens
  misc_RNA (1)...(19): siRNA sense strand
gcaaccagauaugcuauga

SEQ ID NO: 1644377 - RNA, 19 nt, Homo sapiens
  misc_RNA (1)...(19): siRNA sense strand
ucuacuaucugaacaagaa

SEQ ID NO: 1644378 - RNA, 19 nt, Homo sapiens
  misc_RNA (1)...(19): siRNA sense strand
gcaaauacuacgucaagga

SEQ ID NO: 1644379 - RNA, 19 nt, Homo sapiens
  misc_RNA (1)...(19): siRNA sense strand
ggagaggucuaaggcaaug

SEQ ID NO: 1644380 - RNA, 19 nt, Homo sapiens
  misc_RNA (1)...(19): siRNA sense strand
ggaaauggaacagguuaug

SEQ ID NO: 1644381 - RNA, 19 nt, Homo sapiens
  misc_RNA (1)...(19): siRNA sense strand
ccagauaugcuaugacugu

SEQ ID NO: 1644382 - RNA, 19 nt, Homo sapiens
  misc_RNA (1)...(19): siRNA sense strand
gaaauggaacagguuaugu

SEQ ID NO: 1644383 - RNA, 19 nt, Homo sapiens
  misc_RNA (1)...(19): siRNA sense strand
aaucugcccucacugaaga

SEQ ID NO: 1644384 - RNA, 19 nt, Homo sapiens
  misc_RNA (1)...(19): siRNA sense strand
gcagauguggagcccauuu

SEQ ID NO: 1644385 - RNA, 19 nt, Homo sapiens
  misc_RNA (1)...(19): siRNA sense strand
agaaagggcagaagccaaa

SEQ ID NO: 1644386 - RNA, 19 nt, Homo sapiens
  misc_RNA (1)...(19): siRNA sense strand
gggcaaauacuacgucaag

SEQ ID NO: 1644387 - RNA, 19 nt, Homo sapiens
  misc_RNA (1)...(19): siRNA sense strand
ucaggaauuuaacuaggaa

SEQ ID NO: 1644388 - RNA, 19 nt, Homo sapiens
  misc_RNA (1)...(19): siRNA sense strand
gaaaucauucauagcagau

SEQ ID NO: 1644389 - RNA, 19 nt, Homo sapiens
  misc_RNA (1)...(19): siRNA sense strand
gcgaccagaucacguggau

SEQ ID NO: 1644390 - RNA, 19 nt, Homo sapiens
  misc_RNA (1)...(19): siRNA sense strand
ccucuuacgcaaccagaua

SEQ ID NO: 1644391 - RNA, 19 nt, Homo sapiens
  misc_RNA (1)...(19): siRNA sense strand
ucaccugcaucuacuaucu

SEQ ID NO: 1644392 - RNA, 19 nt, Homo sapiens
  misc_RNA (1)...(19): siRNA sense strand
aaauugcccuggaguacau

SEQ ID NO: 1644393 - RNA, 19 nt, Homo sapiens
  misc_RNA (1)...(19): siRNA sense strand
acgaagugcagcccucuua

SEQ ID NO: 1644394 - RNA, 19 nt, Homo sapiens
  misc_RNA (1)...(19): siRNA sense strand
ucugcuaccuggacaacuu

SEQ ID NO: 1644395 - RNA, 19 nt, Homo sapiens
  misc_RNA (1)...(19): siRNA sense strand
gaggggaaaucauucauag

SEQ ID NO: 1644396 - RNA, 19 nt, Homo sapiens
  misc_RNA (1)...(19): siRNA sense strand
ucgacaggcugguccucua

SEQ ID NO: 1644397 - RNA, 19 nt, Homo sapiens
  misc_RNA (1)...(19): siRNA sense strand
guaggaacccacacgaagu

SEQ ID NO: 1644398 - RNA, 19 nt, Homo sapiens
  misc_RNA (1)...(19): siRNA sense strand
gaaucugcccucacugaag

SEQ ID NO: 1644399 - RNA, 19 nt, Homo sapiens
  misc_RNA (1)...(19): siRNA sense strand
cgggaaauggaacagguua

SEQ ID NO: 1644400 - RNA, 19 nt, Homo sapiens
  misc_RNA (1)...(19): siRNA sense strand
caucuacuaucugaacaag

SEQ ID NO: 1644401 - RNA, 19 nt, Homo sapiens
  misc_RNA (1)...(19): siRNA sense strand
aaccagauaugcuaugacu

SEQ ID NO: 1644402 - RNA, 19 nt, Homo sapiens
  misc_RNA (1)...(19): siRNA sense strand
ugcccucacugaagacuga

SEQ ID NO: 1644403 - RNA, 19 nt, Homo sapiens
  misc_RNA (1)...(19): siRNA sense strand
aaucauucauagcagaugu

SEQ ID NO: 1644404 - RNA, 19 nt, Homo sapiens
  misc_RNA (1)...(19): siRNA sense strand
gcaucuacuaucugaacaa

SEQ ID NO: 1644405 - RNA, 19 nt, Homo sapiens
  misc_RNA (1)...(19): siRNA sense strand
ugaaucugcccucacugaa

SEQ ID NO: 1644406 - RNA, 19 nt, Homo sapiens
  misc_RNA (1)...(19): siRNA sense strand
gaaaauugcccuggaguac

SEQ ID NO: 1644407 - RNA, 19 nt, Homo sapiens
  misc_RNA (1)...(19): siRNA sense strand
caucaccugcaucuacuau

SEQ ID NO: 1644408 - RNA, 19 nt, Homo sapiens
  misc_RNA (1)...(19): siRNA sense strand
cugaaucugcccucacuga

SEQ ID NO: 1644409 - RNA, 19 nt, Homo sapiens
  misc_RNA (1)...(19): siRNA sense strand
uucaggaauuuaacuagga

SEQ ID NO: 1644410 - RNA, 19 nt, Homo sapiens
  misc_RNA (1)...(19): siRNA sense strand
gaggcuggaccuggagaaa

SEQ ID NO: 1644411 - RNA, 19 nt, Homo sapiens
  misc_RNA (1)...(19): siRNA sense strand
gaagugcagcccucuuacg

SEQ ID NO: 1644412 - RNA, 19 nt, Homo sapiens
  misc_RNA (1)...(19): siRNA sense strand
cgaaacagcuauauaaaga

SEQ ID NO: 1644413 - RNA, 19 nt, Homo sapiens
  misc_RNA (1)...(19): siRNA sense strand
gcacaaggacaauauuuaa

SEQ ID NO: 1644414 - RNA, 19 nt, Homo sapiens
  misc_RNA (1)...(19): siRNA sense strand
caagacaucuaccauccua

SEQ ID NO: 1644415 - RNA, 19 nt, Homo sapiens
  misc_RNA (1)...(19): siRNA sense strand
ugacagagauacacuuguu

SEQ ID NO: 1644416 - RNA, 19 nt, Homo sapiens
  misc_RNA (1)...(19): siRNA sense strand
gugcgaaacagcuauauaa

SEQ ID NO: 1644417 - RNA, 19 nt, Homo sapiens
  misc_RNA (1)...(19): siRNA sense strand
gauucugccucaucuguaa

SEQ ID NO: 1644418 - RNA, 19 nt, Homo sapiens
  misc_RNA (1)...(19): siRNA sense strand
ggaccgauccugagcuuug

SEQ ID NO: 1644419 - RNA, 19 nt, Homo sapiens
  misc_RNA (1)...(19): siRNA sense strand
gagaagaguaauugagaaa

SEQ ID NO: 1644420 - RNA, 19 nt, Homo sapiens
  misc_RNA (1)...(19): siRNA sense strand
ggacaauauuuaagaaagg

SEQ ID NO: 1644421 - RNA, 19 nt, Homo sapiens
  misc_RNA (1)...(19): siRNA sense strand
ccacagacccugaaugauc

SEQ ID NO: 1644422 - RNA, 19 nt, Homo sapiens
  misc_RNA (1)...(19): siRNA sense strand
ggaaugaaagcacuaguca

SEQ ID NO: 1644423 - RNA, 19 nt, Homo sapiens
  misc_RNA (1)...(19): siRNA sense strand
cagaaugccuugagaagag

SEQ ID NO: 1644424 - RNA, 19 nt, Homo sapiens
  misc_RNA (1)...(19): siRNA sense strand
ugaguaccauucagaaguu

SEQ ID NO: 1644425 - RNA, 19 nt, Homo sapiens
  misc_RNA (1)...(19): siRNA sense strand
gaagaagagaaaguugaua

SEQ ID NO: 1644426 - RNA, 19 nt, Homo sapiens
  misc_RNA (1)...(19): siRNA sense strand
ugauauaagugaagaugga

SEQ ID NO: 1644427 - RNA, 19 nt, Homo sapiens
  misc_RNA (1)...(19): siRNA sense strand
gcauagaguugacuuucca

SEQ ID NO: 1644428 - RNA, 19 nt, Homo sapiens
  misc_RNA (1)...(19): siRNA sense strand
caugauauccugacagaga

SEQ ID NO: 1644429 - RNA, 19 nt, Homo sapiens
  misc_RNA (1)...(19): siRNA sense strand
gcguagggcucugaacauu

SEQ ID NO: 1644430 - RNA, 19 nt, Homo sapiens
  misc_RNA (1)...(19): siRNA sense strand
gacauugaguacaggcuuu

SEQ ID NO: 1644431 - RNA, 19 nt, Homo sapiens
  misc_RNA (1)...(19): siRNA sense strand
aagugaagauggaaugaaa

SEQ ID NO: 1644432 - RNA, 19 nt, Homo sapiens
  misc_RNA (1)...(19): siRNA sense strand
ccucauugcugcauuucaa

SEQ ID NO: 1644433 - RNA, 19 nt, Homo sapiens
  misc_RNA (1)...(19): siRNA sense strand
ggccacagacccugaauga

SEQ ID NO: 1644434 - RNA, 19 nt, Homo sapiens
  misc_RNA (1)...(19): siRNA sense strand
gguuggcacugcaugauau

SEQ ID NO: 1644435 - RNA, 19 nt, Homo sapiens
  misc_RNA (1)...(19): siRNA sense strand
ugaaagcacuagucacucu

SEQ ID NO: 1644436 - RNA, 19 nt, Homo sapiens
  misc_RNA (1)...(19): siRNA sense strand
ugagaagaguaauugagaa

SEQ ID NO: 1644437 - RNA, 19 nt, Homo sapiens
  misc_RNA (1)...(19): siRNA sense strand
ggaagaagagaaaguugau

SEQ ID NO: 1644438 - RNA, 19 nt, Homo sapiens
  misc_RNA (1)...(19): siRNA sense strand
guagggcucugaacauuuu

SEQ ID NO: 1644439 - RNA, 19 nt, Homo sapiens
  misc_RNA (1)...(19): siRNA sense strand
gaacaugucguggaagaag

SEQ ID NO: 1644440 - RNA, 19 nt, Homo sapiens
  misc_RNA (1)...(19): siRNA sense strand
gaguugacuuuccaucuuc

SEQ ID NO: 1644441 - RNA, 19 nt, Homo sapiens
  misc_RNA (1)...(19): siRNA sense strand
cauccuagccugugcgaaa

SEQ ID NO: 1644442 - RNA, 19 nt, Homo sapiens
  misc_RNA (1)...(19): siRNA sense strand
gcgaaacagcuauauaaag

SEQ ID NO: 1644443 - RNA, 19 nt, Homo sapiens
  misc_RNA (1)...(19): siRNA sense strand
agaguugacuuuccaucuu

SEQ ID NO: 1644444 - RNA, 19 nt, Homo sapiens
  misc_RNA (1)...(19): siRNA sense strand
gagcaccaauauggccuuu

SEQ ID NO: 1644445 - RNA, 19 nt, Homo sapiens
  misc_RNA (1)...(19): siRNA sense strand
caccacagccuacagaaau

SEQ ID NO: 1644446 - RNA, 19 nt, Homo sapiens
  misc_RNA (1)...(19): siRNA sense strand
uggaacaugucguggaaga

SEQ ID NO: 1644447 - RNA, 19 nt, Homo sapiens
  misc_RNA (1)...(19): siRNA sense strand
cagaaauauuacagaguug

SEQ ID NO: 1644448 - RNA, 19 nt, Homo sapiens
  misc_RNA (1)...(19): siRNA sense strand
ggacaggcaagacaucuac

SEQ ID NO: 1644449 - RNA, 19 nt, Homo sapiens
  misc_RNA (1)...(19): siRNA sense strand
uggacuggauguugaauca

SEQ ID NO: 1644450 - RNA, 19 nt, Homo sapiens
  misc_RNA (1)...(19): siRNA sense strand
ccuggaacaugucguggaa

SEQ ID NO: 1644451 - RNA, 19 nt, Homo sapiens
  misc_RNA (1)...(19): siRNA sense strand
uagcacaaggacaauauuu

SEQ ID NO: 1644452 - RNA, 19 nt, Homo sapiens
  misc_RNA (1)...(19): siRNA sense strand
gcuagcacaaggacaauau

SEQ ID NO: 1644453 - RNA, 19 nt, Homo sapiens
  misc_RNA (1)...(19): siRNA sense strand
cuagugaucuuggaugaag

SEQ ID NO: 1644454 - RNA, 19 nt, Homo sapiens
  misc_RNA (1)...(19): siRNA sense strand
gaguaccauucagaaguuu

SEQ ID NO: 1644455 - RNA, 19 nt, Homo sapiens
  misc_RNA (1)...(19): siRNA sense strand
gacuuuccaucuucaguuc

SEQ ID NO: 1644456 - RNA, 19 nt, Homo sapiens
  misc_RNA (1)...(19): siRNA sense strand
cacagacccugaaugaucu

SEQ ID NO: 1644457 - RNA, 19 nt, Homo sapiens
  misc_RNA (1)...(19): siRNA sense strand
ugcaugauauccugacaga

SEQ ID NO: 1644458 - RNA, 19 nt, Homo sapiens
  misc_RNA (1)...(19): siRNA sense strand
agucagacauugccaacau

SEQ ID NO: 1644459 - RNA, 19 nt, Homo sapiens
  misc_RNA (1)...(19): siRNA sense strand
ggcacccgcucaagucaga

SEQ ID NO: 1644460 - RNA, 19 nt, Homo sapiens
  misc_RNA (1)...(19): siRNA sense strand
gaagaccgacugccacacu

SEQ ID NO: 1644461 - RNA, 19 nt, Homo sapiens
  misc_RNA (1)...(19): siRNA sense strand
gacagagauacacuuguuu

SEQ ID NO: 1644462 - RNA, 19 nt, Homo sapiens
  misc_RNA (1)...(19): siRNA sense strand
ccagaaugccuugagaaga

SEQ ID NO: 1644463 - RNA, 19 nt, Homo sapiens
  misc_RNA (1)...(19): siRNA sense strand
cauuucaagucaccagaga

SEQ ID NO: 1644464 - RNA, 19 nt, Homo sapiens
  misc_RNA (1)...(19): siRNA sense strand
uggcagacauugaguacag

SEQ ID NO: 1644465 - RNA, 19 nt, Homo sapiens
  misc_RNA (1)...(19): siRNA sense strand
accacagccuacagaaaua

SEQ ID NO: 1644466 - RNA, 19 nt, Homo sapiens
  misc_RNA (1)...(19): siRNA sense strand
gcacuagucacucuuucca

SEQ ID NO: 1644467 - RNA, 19 nt, Homo sapiens
  misc_RNA (1)...(19): siRNA sense strand
gagaaaguugauauaagug

SEQ ID NO: 1644468 - RNA, 19 nt, Homo sapiens
  misc_RNA (1)...(19): siRNA sense strand
guaccauucagaaguuuau

SEQ ID NO: 1644469 - RNA, 19 nt, Homo sapiens
  misc_RNA (1)...(19): siRNA sense strand
gaaagcacuagucacucuu

SEQ ID NO: 1644470 - RNA, 19 nt, Homo sapiens
  misc_RNA (1)...(19): siRNA sense strand
ucagaugaccgaggaauag

SEQ ID NO: 1644471 - RNA, 19 nt, Homo sapiens
  misc_RNA (1)...(19): siRNA sense strand
acagagauacacuuguuug

SEQ ID NO: 1644472 - RNA, 19 nt, Homo sapiens
  misc_RNA (1)...(19): siRNA sense strand
ggguuggcacugcaugaua

SEQ ID NO: 1644473 - RNA, 19 nt, Homo sapiens
  misc_RNA (1)...(19): siRNA sense strand
gauauaagugaagauggaa

SEQ ID NO: 1644474 - RNA, 19 nt, Homo sapiens
  misc_RNA (1)...(19): siRNA sense strand
caucuucaguucgaauaca

SEQ ID NO: 1644475 - RNA, 19 nt, Homo sapiens
  misc_RNA (1)...(19): siRNA sense strand
caccagagaccugauuguu

SEQ ID NO: 1644476 - RNA, 19 nt, Homo sapiens
  misc_RNA (1)...(19): siRNA sense strand
agcacaaggacaauauuua

SEQ ID NO: 1644477 - RNA, 19 nt, Homo sapiens
  misc_RNA (1)...(19): siRNA sense strand
ggagaccucagcacucaag

SEQ ID NO: 1644478 - RNA, 19 nt, Homo sapiens
  misc_RNA (1)...(19): siRNA sense strand
ccgcucaagucagacauug

SEQ ID NO: 1644479 - RNA, 19 nt, Homo sapiens
  misc_RNA (1)...(19): siRNA sense strand
uggaagaagagaaaguuga

SEQ ID NO: 1644480 - RNA, 19 nt, Homo sapiens
  misc_RNA (1)...(19): siRNA sense strand
aagcagacgccaugacuca

SEQ ID NO: 1644481 - RNA, 19 nt, Homo sapiens
  misc_RNA (1)...(19): siRNA sense strand
uugcagagcaccaauaugg

SEQ ID NO: 1644482 - RNA, 19 nt, Homo sapiens
  misc_RNA (1)...(19): siRNA sense strand
ucaccacagccuacagaaa

SEQ ID NO: 1644483 - RNA, 19 nt, Homo sapiens
  misc_RNA (1)...(19): siRNA sense strand
uaagugaagauggaaugaa

SEQ ID NO: 1644484 - RNA, 19 nt, Homo sapiens
  misc_RNA (1)...(19): siRNA sense strand
ugacuuuccaucuucaguu

SEQ ID NO: 1644485 - RNA, 19 nt, Homo sapiens
  misc_RNA (1)...(19): siRNA sense strand
acacuuguuugugcauaga

SEQ ID NO: 1644486 - RNA, 19 nt, Homo sapiens
  misc_RNA (1)...(19): siRNA sense strand
gacauucugaguaccauuc

SEQ ID NO: 1644487 - RNA, 19 nt, Homo sapiens
  misc_RNA (1)...(19): siRNA sense strand
ugacucaggacgcccagaa

SEQ ID NO: 1644488 - RNA, 19 nt, Homo sapiens
  misc_RNA (1)...(19): siRNA sense strand
acagccuacagaaauauua

SEQ ID NO: 1644489 - RNA, 19 nt, Homo sapiens
  misc_RNA (1)...(19): siRNA sense strand
ccacagccuacagaaauau

SEQ ID NO: 1644490 - RNA, 19 nt, Homo sapiens
  misc_RNA (1)...(19): siRNA sense strand
gggacaggcaagacaucua

SEQ ID NO: 1644491 - RNA, 19 nt, Homo sapiens
  misc_RNA (1)...(19): siRNA sense strand
gaugaccgaggaauagaca

SEQ ID NO: 1644492 - RNA, 19 nt, Homo sapiens
  misc_RNA (1)...(19): siRNA sense strand
uauaagugaagauggaaug

SEQ ID NO: 1644493 - RNA, 19 nt, Homo sapiens
  misc_RNA (1)...(19): siRNA sense strand
ccucaucuguaacuaucug

SEQ ID NO: 1644494 - RNA, 19 nt, Homo sapiens
  misc_RNA (1)...(19): siRNA sense strand
ucacagaaaauaccagauu

SEQ ID NO: 1644495 - RNA, 19 nt, Homo sapiens
  misc_RNA (1)...(19): siRNA sense strand
gugcauagaguugacuuuc

SEQ ID NO: 1644496 - RNA, 19 nt, Homo sapiens
  misc_RNA (1)...(19): siRNA sense strand
auacacuuguuugugcaua

SEQ ID NO: 1644497 - RNA, 19 nt, Homo sapiens
  misc_RNA (1)...(19): siRNA sense strand
ggacauucugaguaccauu

SEQ ID NO: 1644498 - RNA, 19 nt, Homo sapiens
  misc_RNA (1)...(19): siRNA sense strand
gaaacagcuauauaaagac

SEQ ID NO: 1644499 - RNA, 19 nt, Homo sapiens
  misc_RNA (1)...(19): siRNA sense strand
ccugacuccugaacucaug

SEQ ID NO: 1644500 - RNA, 19 nt, Homo sapiens
  misc_RNA (1)...(19): siRNA sense strand
gcccagaaugccuugagaa

SEQ ID NO: 1644501 - RNA, 19 nt, Homo sapiens
  misc_RNA (1)...(19): siRNA sense strand
cguagggcucugaacauuu

SEQ ID NO: 1644502 - RNA, 19 nt, Homo sapiens
  misc_RNA (1)...(19): siRNA sense strand
ggaacaugucguggaagaa

SEQ ID NO: 1644503 - RNA, 19 nt, Homo sapiens
  misc_RNA (1)...(19): siRNA sense strand
uugagaagaguaauugaga

SEQ ID NO: 1644504 - RNA, 19 nt, Homo sapiens
  misc_RNA (1)...(19): siRNA sense strand
cgaccaagaucaggaaccu

SEQ ID NO: 1644505 - RNA, 19 nt, Homo sapiens
  misc_RNA (1)...(19): siRNA sense strand
aaugaaagcacuagucacu

SEQ ID NO: 1644506 - RNA, 19 nt, Homo sapiens
  misc_RNA (1)...(19): siRNA sense strand
ugucguggaagaagagaaa

SEQ ID NO: 1644507 - RNA, 19 nt, Homo sapiens
  misc_RNA (1)...(19): siRNA sense strand
ugccucaucuguaacuauc

SEQ ID NO: 1644508 - RNA, 19 nt, Homo sapiens
  misc_RNA (1)...(19): siRNA sense strand
ccauucagaaguuuaucaa

SEQ ID NO: 1644509 - RNA, 19 nt, Homo sapiens
  misc_RNA (1)...(19): siRNA sense strand
caucuguaacuaucuguca

SEQ ID NO: 1644510 - RNA, 19 nt, Homo sapiens
  misc_RNA (1)...(19): siRNA sense strand
ccgaggaauagacaucauu

SEQ ID NO: 1644511 - RNA, 19 nt, Homo sapiens
  misc_RNA (1)...(19): siRNA sense strand
gcacaaggacaauauuuaa

SEQ ID NO: 1644512 - RNA, 19 nt, Homo sapiens
  misc_RNA (1)...(19): siRNA sense strand
ugacagagauacacuuguu

SEQ ID NO: 1644513 - RNA, 19 nt, Homo sapiens
  misc_RNA (1)...(19): siRNA sense strand
gauucugccucaucuguaa

SEQ ID NO: 1644514 - RNA, 19 nt, Homo sapiens
  misc_RNA (1)...(19): siRNA sense strand
ggaccgauccugagcuuug

SEQ ID NO: 1644515 - RNA, 19 nt, Homo sapiens
  misc_RNA (1)...(19): siRNA sense strand
gagaagaguaauugagaaa

SEQ ID NO: 1644516 - RNA, 19 nt, Homo sapiens
  misc_RNA (1)...(19): siRNA sense strand
ggacaauauuuaagaaagg

SEQ ID NO: 1644517 - RNA, 19 nt, Homo sapiens
  misc_RNA (1)...(19): siRNA sense strand
ggaaugaaagcacuaguca

SEQ ID NO: 1644518 - RNA, 19 nt, Homo sapiens
  misc_RNA (1)...(19): siRNA sense strand
cagaaugccuugagaagag

SEQ ID NO: 1644519 - RNA, 19 nt, Homo sapiens
  misc_RNA (1)...(19): siRNA sense strand
gaagaagagaaaguugaua

SEQ ID NO: 1644520 - RNA, 19 nt, Homo sapiens
  misc_RNA (1)...(19): siRNA sense strand
ugauauaagugaagaugga

SEQ ID NO: 1644521 - RNA, 19 nt, Homo sapiens
  misc_RNA (1)...(19): siRNA sense strand
gcauagaguugacuuucca

SEQ ID NO: 1644522 - RNA, 19 nt, Homo sapiens
  misc_RNA (1)...(19): siRNA sense strand
caugauauccugacagaga

SEQ ID NO: 1644523 - RNA, 19 nt, Homo sapiens
  misc_RNA (1)...(19): siRNA sense strand
gcguagggcucugaacauu

SEQ ID NO: 1644524 - RNA, 19 nt, Homo sapiens
  misc_RNA (1)...(19): siRNA sense strand
gacauugaguacaggcuuu

SEQ ID NO: 1644525 - RNA, 19 nt, Homo sapiens
  misc_RNA (1)...(19): siRNA sense strand
aagugaagauggaaugaaa

SEQ ID NO: 1644526 - RNA, 19 nt, Homo sapiens
  misc_RNA (1)...(19): siRNA sense strand
ccucauugcugcauuucaa

SEQ ID NO: 1644527 - RNA, 19 nt, Homo sapiens
  misc_RNA (1)...(19): siRNA sense strand
ugagaagaguaauugagaa

SEQ ID NO: 1644528 - RNA, 19 nt, Homo sapiens
  misc_RNA (1)...(19): siRNA sense strand
gguuggcacugcaugauau

SEQ ID NO: 1644529 - RNA, 19 nt, Homo sapiens
  misc_RNA (1)...(19): siRNA sense strand
ugaaagcacuagucacucu

SEQ ID NO: 1644530 - RNA, 19 nt, Homo sapiens
  misc_RNA (1)...(19): siRNA sense strand
ggaagaagagaaaguugau

SEQ ID NO: 1644531 - RNA, 19 nt, Homo sapiens
  misc_RNA (1)...(19): siRNA sense strand
guagggcucugaacauuuu

SEQ ID NO: 1644532 - RNA, 19 nt, Homo sapiens
  misc_RNA (1)...(19): siRNA sense strand
gaacaugucguggaagaag

SEQ ID NO: 1644533 - RNA, 19 nt, Homo sapiens
  misc_RNA (1)...(19): siRNA sense strand
gaguugacuuuccaucuuc

SEQ ID NO: 1644534 - RNA, 19 nt, Homo sapiens
  misc_RNA (1)...(19): siRNA sense strand
agaguugacuuuccaucuu

SEQ ID NO: 1644535 - RNA, 19 nt, Homo sapiens
  misc_RNA (1)...(19): siRNA sense strand
gagcaccaauauggccuuu

SEQ ID NO: 1644536 - RNA, 19 nt, Homo sapiens
  misc_RNA (1)...(19): siRNA sense strand
caccacagccuacagaaau

SEQ ID NO: 1644537 - RNA, 19 nt, Homo sapiens
  misc_RNA (1)...(19): siRNA sense strand
uggaacaugucguggaaga

SEQ ID NO: 1644538 - RNA, 19 nt, Homo sapiens
  misc_RNA (1)...(19): siRNA sense strand
cagaaauauuacagaguug

SEQ ID NO: 1644539 - RNA, 19 nt, Homo sapiens
  misc_RNA (1)...(19): siRNA sense strand
ccuggaacaugucguggaa

SEQ ID NO: 1644540 - RNA, 19 nt, Homo sapiens
  misc_RNA (1)...(19): siRNA sense strand
uagcacaaggacaauauuu

SEQ ID NO: 1644541 - RNA, 19 nt, Homo sapiens
  misc_RNA (1)...(19): siRNA sense strand
uggacuggauguugaauca

SEQ ID NO: 1644542 - RNA, 19 nt, Homo sapiens
  misc_RNA (1)...(19): siRNA sense strand
cuagugaucuuggaugaag

SEQ ID NO: 1644543 - RNA, 19 nt, Homo sapiens
  misc_RNA (1)...(19): siRNA sense strand
gcuagcacaaggacaauau

SEQ ID NO: 1644544 - RNA, 19 nt, Homo sapiens
  misc_RNA (1)...(19): siRNA sense strand
gacuuuccaucuucaguuc

SEQ ID NO: 1644545 - RNA, 19 nt, Homo sapiens
  misc_RNA (1)...(19): siRNA sense strand
ggcacccgcucaagucaga

SEQ ID NO: 1644546 - RNA, 19 nt, Homo sapiens
  misc_RNA (1)...(19): siRNA sense strand
ugcaugauauccugacaga

SEQ ID NO: 1644547 - RNA, 19 nt, Homo sapiens
  misc_RNA (1)...(19): siRNA sense strand
agucagacauugccaacau

SEQ ID NO: 1644548 - RNA, 19 nt, Homo sapiens
  misc_RNA (1)...(19): siRNA sense strand
gacagagauacacuuguuu

SEQ ID NO: 1644549 - RNA, 19 nt, Homo sapiens
  misc_RNA (1)...(19): siRNA sense strand
ccagaaugccuugagaaga

SEQ ID NO: 1644550 - RNA, 19 nt, Homo sapiens
  misc_RNA (1)...(19): siRNA sense strand
cauuucaagucaccagaga

SEQ ID NO: 1644551 - RNA, 19 nt, Homo sapiens
  misc_RNA (1)...(19): siRNA sense strand
uggcagacauugaguacag

SEQ ID NO: 1644552 - RNA, 19 nt, Homo sapiens
  misc_RNA (1)...(19): siRNA sense strand
accacagccuacagaaaua

SEQ ID NO: 1644553 - RNA, 19 nt, Homo sapiens
  misc_RNA (1)...(19): siRNA sense strand
gcacuagucacucuuucca

SEQ ID NO: 1644554 - RNA, 19 nt, Homo sapiens
  misc_RNA (1)...(19): siRNA sense strand
gagaaaguugauauaagug

SEQ ID NO: 1644555 - RNA, 19 nt, Homo sapiens
  misc_RNA (1)...(19): siRNA sense strand
gaaagcacuagucacucuu

SEQ ID NO: 1644556 - RNA, 19 nt, Homo sapiens
  misc_RNA (1)...(19): siRNA sense strand
gauauaagugaagauggaa

SEQ ID NO: 1644557 - RNA, 19 nt, Homo sapiens
  misc_RNA (1)...(19): siRNA sense strand
ucagaugaccgaggaauag

SEQ ID NO: 1644558 - RNA, 19 nt, Homo sapiens
  misc_RNA (1)...(19): siRNA sense strand
acagagauacacuuguuug

SEQ ID NO: 1644559 - RNA, 19 nt, Homo sapiens
  misc_RNA (1)...(19): siRNA sense strand
ggguuggcacugcaugaua

SEQ ID NO: 1644560 - RNA, 19 nt, Homo sapiens
  misc_RNA (1)...(19): siRNA sense strand
caucuucaguucgaauaca

SEQ ID NO: 1644561 - RNA, 19 nt, Homo sapiens
  misc_RNA (1)...(19): siRNA sense strand
caccagagaccugauuguu

SEQ ID NO: 1644562 - RNA, 19 nt, Homo sapiens
  misc_RNA (1)...(19): siRNA sense strand
uggaagaagagaaaguuga

SEQ ID NO: 1644563 - RNA, 19 nt, Homo sapiens
  misc_RNA (1)...(19): siRNA sense strand
agcacaaggacaauauuua

SEQ ID NO: 1644564 - RNA, 19 nt, Homo sapiens
  misc_RNA (1)...(19): siRNA sense strand
ccgcucaagucagacauug

SEQ ID NO: 1644565 - RNA, 19 nt, Homo sapiens
  misc_RNA (1)...(19): siRNA sense strand
aagcagacgccaugacuca

SEQ ID NO: 1644566 - RNA, 19 nt, Homo sapiens
  misc_RNA (1)...(19): siRNA sense strand
uugcagagcaccaauaugg

SEQ ID NO: 1644567 - RNA, 19 nt, Homo sapiens
  misc_RNA (1)...(19): siRNA sense strand
ucaccacagccuacagaaa

SEQ ID NO: 1644568 - RNA, 19 nt, Homo sapiens
  misc_RNA (1)...(19): siRNA sense strand
uaagugaagauggaaugaa

SEQ ID NO: 1644569 - RNA, 19 nt, Homo sapiens
  misc_RNA (1)...(19): siRNA sense strand
ugacuuuccaucuucaguu

SEQ ID NO: 1644570 - RNA, 19 nt, Homo sapiens
  misc_RNA (1)...(19): siRNA sense strand
acacuuguuugugcauaga

SEQ ID NO: 1644571 - RNA, 19 nt, Homo sapiens
  misc_RNA (1)...(19): siRNA sense strand
ccucaucuguaacuaucug

SEQ ID NO: 1644572 - RNA, 19 nt, Homo sapiens
  misc_RNA (1)...(19): siRNA sense strand
acagccuacagaaauauua

SEQ ID NO: 1644573 - RNA, 19 nt, Homo sapiens
  misc_RNA (1)...(19): siRNA sense strand
ccacagccuacagaaauau

SEQ ID NO: 1644574 - RNA, 19 nt, Homo sapiens
  misc_RNA (1)...(19): siRNA sense strand
ugacucaggacgcccagaa

SEQ ID NO: 1644575 - RNA, 19 nt, Homo sapiens
  misc_RNA (1)...(19): siRNA sense strand
uauaagugaagauggaaug

SEQ ID NO: 1644576 - RNA, 19 nt, Homo sapiens
  misc_RNA (1)...(19): siRNA sense strand
gaugaccgaggaauagaca

SEQ ID NO: 1644577 - RNA, 19 nt, Homo sapiens
  misc_RNA (1)...(19): siRNA sense strand
ccugacuccugaacucaug

SEQ ID NO: 1644578 - RNA, 19 nt, Homo sapiens
  misc_RNA (1)...(19): siRNA sense strand
gugcauagaguugacuuuc

SEQ ID NO: 1644579 - RNA, 19 nt, Homo sapiens
  misc_RNA (1)...(19): siRNA sense strand
auacacuuguuugugcaua

SEQ ID NO: 1644580 - RNA, 19 nt, Homo sapiens
  misc_RNA (1)...(19): siRNA sense strand
ucacagaaaauaccagauu

SEQ ID NO: 1644581 - RNA, 19 nt, Homo sapiens
  misc_RNA (1)...(19): siRNA sense strand
ggaacaugucguggaagaa

SEQ ID NO: 1644582 - RNA, 19 nt, Homo sapiens
  misc_RNA (1)...(19): siRNA sense strand
gcccagaaugccuugagaa

SEQ ID NO: 1644583 - RNA, 19 nt, Homo sapiens
  misc_RNA (1)...(19): siRNA sense strand
cguagggcucugaacauuu

SEQ ID NO: 1644584 - RNA, 19 nt, Homo sapiens
  misc_RNA (1)...(19): siRNA sense strand
ugucguggaagaagagaaa

SEQ ID NO: 1644585 - RNA, 19 nt, Homo sapiens
  misc_RNA (1)...(19): siRNA sense strand
uugagaagaguaauugaga

SEQ ID NO: 1644586 - RNA, 19 nt, Homo sapiens
  misc_RNA (1)...(19): siRNA sense strand
aaugaaagcacuagucacu

SEQ ID NO: 1644587 - RNA, 19 nt, Homo sapiens
  misc_RNA (1)...(19): siRNA sense strand
ugccucaucuguaacuauc

SEQ ID NO: 1644588 - RNA, 19 nt, Homo sapiens
  misc_RNA (1)...(19): siRNA sense strand
caucuguaacuaucuguca

SEQ ID NO: 1644589 - RNA, 19 nt, Homo sapiens
  misc_RNA (1)...(19): siRNA sense strand
ccgaggaauagacaucauu

SEQ ID NO: 1644590 - RNA, 19 nt, Homo sapiens
  misc_RNA (1)...(19): siRNA sense strand
gaaaauguguggcggauua

SEQ ID NO: 1644591 - RNA, 19 nt, Homo sapiens
  misc_RNA (1)...(19): siRNA sense strand
gcacuaugauuccauuaaa

SEQ ID NO: 1644592 - RNA, 19 nt, Homo sapiens
  misc_RNA (1)...(19): siRNA sense strand
uggaagaacugcugaagaa

SEQ ID NO: 1644593 - RNA, 19 nt, Homo sapiens
  misc_RNA (1)...(19): siRNA sense strand
aaauaaggauccaugauga

SEQ ID NO: 1644594 - RNA, 19 nt, Homo sapiens
  misc_RNA (1)...(19): siRNA sense strand
caacaggaguuucauggau

SEQ ID NO: 1644595 - RNA, 19 nt, Homo sapiens
  misc_RNA (1)...(19): siRNA sense strand
ggagacaucagaagcuuaa

SEQ ID NO: 1644596 - RNA, 19 nt, Homo sapiens
  misc_RNA (1)...(19): siRNA sense strand
gauccaugaugaccuuaaa

SEQ ID NO: 1644597 - RNA, 19 nt, Homo sapiens
  misc_RNA (1)...(19): siRNA sense strand
acaggaguuucauggauua

SEQ ID NO: 1644598 - RNA, 19 nt, Homo sapiens
  misc_RNA (1)...(19): siRNA sense strand
caaggugauugcccauuga

SEQ ID NO: 1644599 - RNA, 19 nt, Homo sapiens
  misc_RNA (1)...(19): siRNA sense strand
ugacauugcucuugaacuc

SEQ ID NO: 1644600 - RNA, 19 nt, Homo sapiens
  misc_RNA (1)...(19): siRNA sense strand
ucaaggugauugcccauug

SEQ ID NO: 1644601 - RNA, 19 nt, Homo sapiens
  misc_RNA (1)...(19): siRNA sense strand
gcacaucagcaaucauaga

SEQ ID NO: 1644602 - RNA, 19 nt, Homo sapiens
  misc_RNA (1)...(19): siRNA sense strand
gaagaacugcugaagaaag

SEQ ID NO: 1644603 - RNA, 19 nt, Homo sapiens
  misc_RNA (1)...(19): siRNA sense strand
aguaagaaaucaaguggaa

SEQ ID NO: 1644604 - RNA, 19 nt, Homo sapiens
  misc_RNA (1)...(19): siRNA sense strand
caauaugucaggaaagaaa

SEQ ID NO: 1644605 - RNA, 19 nt, Homo sapiens
  misc_RNA (1)...(19): siRNA sense strand
aagaacugcugaagaaaga

SEQ ID NO: 1644606 - RNA, 19 nt, Homo sapiens
  misc_RNA (1)...(19): siRNA sense strand
caucagaagcuuaaaggaa

SEQ ID NO: 1644607 - RNA, 19 nt, Homo sapiens
  misc_RNA (1)...(19): siRNA sense strand
gcccauugauuguucaguu

SEQ ID NO: 1644608 - RNA, 19 nt, Homo sapiens
  misc_RNA (1)...(19): siRNA sense strand
gaagagugacugcaugcaa

SEQ ID NO: 1644609 - RNA, 19 nt, Homo sapiens
  misc_RNA (1)...(19): siRNA sense strand
cguauagucuguccuuaug

SEQ ID NO: 1644610 - RNA, 19 nt, Homo sapiens
  misc_RNA (1)...(19): siRNA sense strand
ggugauugcccauugauug

SEQ ID NO: 1644611 - RNA, 19 nt, Homo sapiens
  misc_RNA (1)...(19): siRNA sense strand
gguucgauauucaaaguug

SEQ ID NO: 1644612 - RNA, 19 nt, Homo sapiens
  misc_RNA (1)...(19): siRNA sense strand
uuacauguguuuccaucaa

SEQ ID NO: 1644613 - RNA, 19 nt, Homo sapiens
  misc_RNA (1)...(19): siRNA sense strand
aagagugacugcaugcaaa

SEQ ID NO: 1644614 - RNA, 19 nt, Homo sapiens
  misc_RNA (1)...(19): siRNA sense strand
uuaggacacuaguaagaaa

SEQ ID NO: 1644615 - RNA, 19 nt, Homo sapiens
  misc_RNA (1)...(19): siRNA sense strand
aagcacaucagcaaucaua

SEQ ID NO: 1644616 - RNA, 19 nt, Homo sapiens
  misc_RNA (1)...(19): siRNA sense strand
ggguugacauugcucuuga

SEQ ID NO: 1644617 - RNA, 19 nt, Homo sapiens
  misc_RNA (1)...(19): siRNA sense strand
gguauuuaaugcucuguca

SEQ ID NO: 1644618 - RNA, 19 nt, Homo sapiens
  misc_RNA (1)...(19): siRNA sense strand
ggccauguuugcuggauau

SEQ ID NO: 1644619 - RNA, 19 nt, Homo sapiens
  misc_RNA (1)...(19): siRNA sense strand
gggcaauggcagaagguua

SEQ ID NO: 1644620 - RNA, 19 nt, Homo sapiens
  misc_RNA (1)...(19): siRNA sense strand
gaacuguagaucuuuguca

SEQ ID NO: 1644621 - RNA, 19 nt, Homo sapiens
  misc_RNA (1)...(19): siRNA sense strand
gacaucagccagugcacua

SEQ ID NO: 1644622 - RNA, 19 nt, Homo sapiens
  misc_RNA (1)...(19): siRNA sense strand
ucaagcacaucagcaauca

SEQ ID NO: 1644623 - RNA, 19 nt, Homo sapiens
  misc_RNA (1)...(19): siRNA sense strand
ucaguuugcugcuaacgau

SEQ ID NO: 1644624 - RNA, 19 nt, Homo sapiens
  misc_RNA (1)...(19): siRNA sense strand
ggacuggguugacauugcu

SEQ ID NO: 1644625 - RNA, 19 nt, Homo sapiens
  misc_RNA (1)...(19): siRNA sense strand
ggacagauggugugauggu

SEQ ID NO: 1644626 - RNA, 19 nt, Homo sapiens
  misc_RNA (1)...(19): siRNA sense strand
ucaaaaggcugaagcaaca

SEQ ID NO: 1644627 - RNA, 19 nt, Homo sapiens
  misc_RNA (1)...(19): siRNA sense strand
ggaagaacugcugaagaaa

SEQ ID NO: 1644628 - RNA, 19 nt, Homo sapiens
  misc_RNA (1)...(19): siRNA sense strand
gggcuugcuuaauaaacaa

SEQ ID NO: 1644629 - RNA, 19 nt, Homo sapiens
  misc_RNA (1)...(19): siRNA sense strand
ggacuccuuacauguguuu

SEQ ID NO: 1644630 - RNA, 19 nt, Homo sapiens
  misc_RNA (1)...(19): siRNA sense strand
ggugaaacaaguaagaaau

SEQ ID NO: 1644631 - RNA, 19 nt, Homo sapiens
  misc_RNA (1)...(19): siRNA sense strand
acagcgaauuuaccacaaa

SEQ ID NO: 1644632 - RNA, 19 nt, Homo sapiens
  misc_RNA (1)...(19): siRNA sense strand
aacaggaguuucauggauu

SEQ ID NO: 1644633 - RNA, 19 nt, Homo sapiens
  misc_RNA (1)...(19): siRNA sense strand
uuauggggcuugcuuaaua

SEQ ID NO: 1644634 - RNA, 19 nt, Homo sapiens
  misc_RNA (1)...(19): siRNA sense strand
ggcaauggcagaagguuau

SEQ ID NO: 1644635 - RNA, 19 nt, Homo sapiens
  misc_RNA (1)...(19): siRNA sense strand
gacagcgaauuuaccacaa

SEQ ID NO: 1644636 - RNA, 19 nt, Homo sapiens
  misc_RNA (1)...(19): siRNA sense strand
gaacucgggacuccuuaca

SEQ ID NO: 1644637 - RNA, 19 nt, Homo sapiens
  misc_RNA (1)...(19): siRNA sense strand
gcaagacuuuuaucugaug

SEQ ID NO: 1644638 - RNA, 19 nt, Homo sapiens
  misc_RNA (1)...(19): siRNA sense strand
cccauugauuguucaguuu

SEQ ID NO: 1644639 - RNA, 19 nt, Homo sapiens
  misc_RNA (1)...(19): siRNA sense strand
cccaaugguucgauauuca

SEQ ID NO: 1644640 - RNA, 19 nt, Homo sapiens
  misc_RNA (1)...(19): siRNA sense strand
ugggacagauggugugaug

SEQ ID NO: 1644641 - RNA, 19 nt, Homo sapiens
  misc_RNA (1)...(19): siRNA sense strand
gcuaauggagacaucagaa

SEQ ID NO: 1644642 - RNA, 19 nt, Homo sapiens
  misc_RNA (1)...(19): siRNA sense strand
ggaguuucauggauuacag

SEQ ID NO: 1644643 - RNA, 19 nt, Homo sapiens
  misc_RNA (1)...(19): siRNA sense strand
gcaacaggaguuucaugga

SEQ ID NO: 1644644 - RNA, 19 nt, Homo sapiens
  misc_RNA (1)...(19): siRNA sense strand
agacauggugaaacaagua

SEQ ID NO: 1644645 - RNA, 19 nt, Homo sapiens
  misc_RNA (1)...(19): siRNA sense strand
gcaugcaaacgacaauaug

SEQ ID NO: 1644646 - RNA, 19 nt, Homo sapiens
  misc_RNA (1)...(19): siRNA sense strand
gaacugcugaagaaagaca

SEQ ID NO: 1644647 - RNA, 19 nt, Homo sapiens
  misc_RNA (1)...(19): siRNA sense strand
gauuacaguccauggaaga

SEQ ID NO: 1644648 - RNA, 19 nt, Homo sapiens
  misc_RNA (1)...(19): siRNA sense strand
gauugcccauugauuguuc

SEQ ID NO: 1644649 - RNA, 19 nt, Homo sapiens
  misc_RNA (1)...(19): siRNA sense strand
gccagagacagcgaauuua

SEQ ID NO: 1644650 - RNA, 19 nt, Homo sapiens
  misc_RNA (1)...(19): siRNA sense strand
ggacacuaguaagaaaaua

SEQ ID NO: 1644651 - RNA, 19 nt, Homo sapiens
  misc_RNA (1)...(19): siRNA sense strand
uggaauagacauuaacugu

SEQ ID NO: 1644652 - RNA, 19 nt, Homo sapiens
  misc_RNA (1)...(19): siRNA sense strand
gacagauggugugaugguu

SEQ ID NO: 1644653 - RNA, 19 nt, Homo sapiens
  misc_RNA (1)...(19): siRNA sense strand
gacauggugaaacaaguaa

SEQ ID NO: 1644654 - RNA, 19 nt, Homo sapiens
  misc_RNA (1)...(19): siRNA sense strand
acucgggacuccuuacaug

SEQ ID NO: 1644655 - RNA, 19 nt, Homo sapiens
  misc_RNA (1)...(19): siRNA sense strand
agccagagacagcgaauuu

SEQ ID NO: 1644656 - RNA, 19 nt, Homo sapiens
  misc_RNA (1)...(19): siRNA sense strand
cauguuugcuggauaugag

SEQ ID NO: 1644657 - RNA, 19 nt, Homo sapiens
  misc_RNA (1)...(19): siRNA sense strand
cuauaccuguaauugcuaa

SEQ ID NO: 1644658 - RNA, 19 nt, Homo sapiens
  misc_RNA (1)...(19): siRNA sense strand
uaagaaaucaaguggaaac

SEQ ID NO: 1644659 - RNA, 19 nt, Homo sapiens
  misc_RNA (1)...(19): siRNA sense strand
aaagaucccauagaaaugu

SEQ ID NO: 1644660 - RNA, 19 nt, Homo sapiens
  misc_RNA (1)...(19): siRNA sense strand
gcuaacgaugcaagacuuu

SEQ ID NO: 1644661 - RNA, 19 nt, Homo sapiens
  misc_RNA (1)...(19): siRNA sense strand
gugaaacaaguaagaaauc

SEQ ID NO: 1644662 - RNA, 19 nt, Homo sapiens
  misc_RNA (1)...(19): siRNA sense strand
uaucugaugcugcucguau

SEQ ID NO: 1644663 - RNA, 19 nt, Homo sapiens
  misc_RNA (1)...(19): siRNA sense strand
caagacauggugaaacaag

SEQ ID NO: 1644664 - RNA, 19 nt, Homo sapiens
  misc_RNA (1)...(19): siRNA sense strand
auaguugugaucuguguua

SEQ ID NO: 1644665 - RNA, 19 nt, Homo sapiens
  misc_RNA (1)...(19): siRNA sense strand
gguugacauugcucuugaa

SEQ ID NO: 1644666 - RNA, 19 nt, Homo sapiens
  misc_RNA (1)...(19): siRNA sense strand
gggacuggguugacauugc

SEQ ID NO: 1644667 - RNA, 19 nt, Homo sapiens
  misc_RNA (1)...(19): siRNA sense strand
gaggaaaccccacugaaau

SEQ ID NO: 1644668 - RNA, 19 nt, Homo sapiens
  misc_RNA (1)...(19): siRNA sense strand
gcucguauagucuguccuu

SEQ ID NO: 1644669 - RNA, 19 nt, Homo sapiens
  misc_RNA (1)...(19): siRNA sense strand
uaacgaugcaagacuuuua

SEQ ID NO: 1644670 - RNA, 19 nt, Homo sapiens
  misc_RNA (1)...(19): siRNA sense strand
guaagaaaucaaguggaaa

SEQ ID NO: 1644671 - RNA, 19 nt, Homo sapiens
  misc_RNA (1)...(19): siRNA sense strand
guacaugauggaaaagaua

SEQ ID NO: 1644672 - RNA, 19 nt, Homo sapiens
  misc_RNA (1)...(19): siRNA sense strand
ccagagacagcgaauuuac

SEQ ID NO: 1644673 - RNA, 19 nt, Homo sapiens
  misc_RNA (1)...(19): siRNA sense strand
ccaaugguucgauauucaa

SEQ ID NO: 1644674 - RNA, 19 nt, Homo sapiens
  misc_RNA (1)...(19): siRNA sense strand
ggauccaugaugaccuuaa

SEQ ID NO: 1644675 - RNA, 19 nt, Homo sapiens
  misc_RNA (1)...(19): siRNA sense strand
gcggauuacugggacagau

SEQ ID NO: 1644676 - RNA, 19 nt, Homo sapiens
  misc_RNA (1)...(19): siRNA sense strand
gacaucagaagcuuaaagg

SEQ ID NO: 1644677 - RNA, 19 nt, Homo sapiens
  misc_RNA (1)...(19): siRNA sense strand
acaaguaagaaaucaagug

SEQ ID NO: 1644678 - RNA, 19 nt, Homo sapiens
  misc_RNA (1)...(19): siRNA sense strand
caaugguucgauauucaaa

SEQ ID NO: 1644679 - RNA, 19 nt, Homo sapiens
  misc_RNA (1)...(19): siRNA sense strand
cggccauguuugcuggaua

SEQ ID NO: 1644680 - RNA, 19 nt, Homo sapiens
  misc_RNA (1)...(19): siRNA sense strand
gcugaagcaacaggaguuu

SEQ ID NO: 1644681 - RNA, 19 nt, Homo sapiens
  misc_RNA (1)...(19): siRNA sense strand
caugaugaccuuaaaagaa

SEQ ID NO: 1644682 - RNA, 19 nt, Homo sapiens
  misc_RNA (1)...(19): siRNA sense strand
cauggugaaacaaguaaga

SEQ ID NO: 1644683 - RNA, 19 nt, Homo sapiens
  misc_RNA (1)...(19): siRNA sense strand
gucuauaccuguaauugcu

SEQ ID NO: 1644684 - RNA, 19 nt, Homo sapiens
  misc_RNA (1)...(19): siRNA sense strand
gugauugcccauugauugu

SEQ ID NO: 1644685 - RNA, 19 nt, Homo sapiens
  misc_RNA (1)...(19): siRNA sense strand
ugaugcugcucguauaguc

SEQ ID NO: 1644686 - RNA, 19 nt, Homo sapiens
  misc_RNA (1)...(19): siRNA sense strand
ucauagauuaccuuacaga

SEQ ID NO: 1644687 - RNA, 19 nt, Homo sapiens
  misc_RNA (1)...(19): siRNA sense strand
cgggacuccuuacaugugu

SEQ ID NO: 1644688 - RNA, 19 nt, Homo sapiens
  misc_RNA (1)...(19): siRNA sense strand
caugcaaacgacaauaugu

SEQ ID NO: 1644689 - RNA, 19 nt, Homo sapiens
  misc_RNA (1)...(19): siRNA sense strand
aaaagucugugccccaaug

SEQ ID NO: 1644690 - RNA, 19 nt, Homo sapiens
  misc_RNA (1)...(19): siRNA sense strand
ggaagcagcuggccaccaa

SEQ ID NO: 1644691 - RNA, 19 nt, Homo sapiens
  misc_RNA (1)...(19): siRNA sense strand
gccaagcgcgugaccauua

SEQ ID NO: 1644692 - RNA, 19 nt, Homo sapiens
  misc_RNA (1)...(19): siRNA sense strand
ccaagcgcgugaccauuau

SEQ ID NO: 1644693 - RNA, 19 nt, Homo sapiens
  misc_RNA (1)...(19): siRNA sense strand
cgagaucgcgcaggacuuu

SEQ ID NO: 1644694 - RNA, 19 nt, Homo sapiens
  misc_RNA (1)...(19): siRNA sense strand
ugaccauuaugcccaagga

SEQ ID NO: 1644695 - RNA, 19 nt, Homo sapiens
  misc_RNA (1)...(19): siRNA sense strand
gagaucgcgcaggacuuua

SEQ ID NO: 1644696 - RNA, 19 nt, Homo sapiens
  misc_RNA (1)...(19): siRNA sense strand
agaucgcgcaggacuuuaa

SEQ ID NO: 1644697 - RNA, 19 nt, Homo sapiens
  misc_RNA (1)...(19): siRNA sense strand
ccaaacaccugcaacuuaa

SEQ ID NO: 1644698 - RNA, 19 nt, Homo sapiens
  misc_RNA (1)...(19): siRNA sense strand
ggaagaaucugugaagcua

SEQ ID NO: 1644699 - RNA, 19 nt, Homo sapiens
  misc_RNA (1)...(19): siRNA sense strand
caauaaaccugaugguaaa

SEQ ID NO: 1644700 - RNA, 19 nt, Homo sapiens
  misc_RNA (1)...(19): siRNA sense strand
gaaccagcaugaagaacua

SEQ ID NO: 1644701 - RNA, 19 nt, Homo sapiens
  misc_RNA (1)...(19): siRNA sense strand
ggagugaaaucuuccuuau

SEQ ID NO: 1644702 - RNA, 19 nt, Homo sapiens
  misc_RNA (1)...(19): siRNA sense strand
cuaucaaggugaagaauua

SEQ ID NO: 1644703 - RNA, 19 nt, Homo sapiens
  misc_RNA (1)...(19): siRNA sense strand
ggaaucuacugaacaauca

SEQ ID NO: 1644704 - RNA, 19 nt, Homo sapiens
  misc_RNA (1)...(19): siRNA sense strand
cagcagaagcuaacaauuu

SEQ ID NO: 1644705 - RNA, 19 nt, Homo sapiens
  misc_RNA (1)...(19): siRNA sense strand
ucaauaaaccugaugguaa

SEQ ID NO: 1644706 - RNA, 19 nt, Homo sapiens
  misc_RNA (1)...(19): siRNA sense strand
gcaguguuauugauggaua

SEQ ID NO: 1644707 - RNA, 19 nt, Homo sapiens
  misc_RNA (1)...(19): siRNA sense strand
gauauggagugaaaucuuc

SEQ ID NO: 1644708 - RNA, 19 nt, Homo sapiens
  misc_RNA (1)...(19): siRNA sense strand
agcagaagcuaacaauuua

SEQ ID NO: 1644709 - RNA, 19 nt, Homo sapiens
  misc_RNA (1)...(19): siRNA sense strand
ccacaggaauucagauaug

SEQ ID NO: 1644710 - RNA, 19 nt, Homo sapiens
  misc_RNA (1)...(19): siRNA sense strand
aaacauuccugaagccauu

SEQ ID NO: 1644711 - RNA, 19 nt, Homo sapiens
  misc_RNA (1)...(19): siRNA sense strand
caaaugacuugcagaccaa

SEQ ID NO: 1644712 - RNA, 19 nt, Homo sapiens
  misc_RNA (1)...(19): siRNA sense strand
gcacaaugaucagcucaau

SEQ ID NO: 1644713 - RNA, 19 nt, Homo sapiens
  misc_RNA (1)...(19): siRNA sense strand
gcaguuggagagugaaaua

SEQ ID NO: 1644714 - RNA, 19 nt, Homo sapiens
  misc_RNA (1)...(19): siRNA sense strand
caaggagguuguugcugua

SEQ ID NO: 1644715 - RNA, 19 nt, Homo sapiens
  misc_RNA (1)...(19): siRNA sense strand
gcuagccuaugcaauauga

SEQ ID NO: 1644716 - RNA, 19 nt, Homo sapiens
  misc_RNA (1)...(19): siRNA sense strand
cuucaaggcuuauauaaag

SEQ ID NO: 1644717 - RNA, 19 nt, Homo sapiens
  misc_RNA (1)...(19): siRNA sense strand
agugaaaucuuccuuauca

SEQ ID NO: 1644718 - RNA, 19 nt, Homo sapiens
  misc_RNA (1)...(19): siRNA sense strand
gaauucagauauggaguga

SEQ ID NO: 1644719 - RNA, 19 nt, Homo sapiens
  misc_RNA (1)...(19): siRNA sense strand
guacuucaaggcuuauaua

SEQ ID NO: 1644720 - RNA, 19 nt, Homo sapiens
  misc_RNA (1)...(19): siRNA sense strand
gaucagcucaauacaggua

SEQ ID NO: 1644721 - RNA, 19 nt, Homo sapiens
  misc_RNA (1)...(19): siRNA sense strand
gagccuagauauuaaagag

SEQ ID NO: 1644722 - RNA, 19 nt, Homo sapiens
  misc_RNA (1)...(19): siRNA sense strand
cccgagagccuagauauua

SEQ ID NO: 1644723 - RNA, 19 nt, Homo sapiens
  misc_RNA (1)...(19): siRNA sense strand
gcugggagcuguaauagac

SEQ ID NO: 1644724 - RNA, 19 nt, Homo sapiens
  misc_RNA (1)...(19): siRNA sense strand
guagucaucuuuaucacau

SEQ ID NO: 1644725 - RNA, 19 nt, Homo sapiens
  misc_RNA (1)...(19): siRNA sense strand
ccgagagccuagauauuaa

SEQ ID NO: 1644726 - RNA, 19 nt, Homo sapiens
  misc_RNA (1)...(19): siRNA sense strand
aaagaucuaucaaggugaa

SEQ ID NO: 1644727 - RNA, 19 nt, Homo sapiens
  misc_RNA (1)...(19): siRNA sense strand
uggaguacuucaaggcuua

SEQ ID NO: 1644728 - RNA, 19 nt, Homo sapiens
  misc_RNA (1)...(19): siRNA sense strand
ugacuggauucauugguuu

SEQ ID NO: 1644729 - RNA, 19 nt, Homo sapiens
  misc_RNA (1)...(19): siRNA sense strand
caagcacaaugauagcaaa

SEQ ID NO: 1644730 - RNA, 19 nt, Homo sapiens
  misc_RNA (1)...(19): siRNA sense strand
caacugccaaggacacaua

SEQ ID NO: 1644731 - RNA, 19 nt, Homo sapiens
  misc_RNA (1)...(19): siRNA sense strand
caaggacacauacaacaaa

SEQ ID NO: 1644732 - RNA, 19 nt, Homo sapiens
  misc_RNA (1)...(19): siRNA sense strand
gaguuucccauacgaauuu

SEQ ID NO: 1644733 - RNA, 19 nt, Homo sapiens
  misc_RNA (1)...(19): siRNA sense strand
ugagauacauguacaacca

SEQ ID NO: 1644734 - RNA, 19 nt, Homo sapiens
  misc_RNA (1)...(19): siRNA sense strand
gaccacaggaauucagaua

SEQ ID NO: 1644735 - RNA, 19 nt, Homo sapiens
  misc_RNA (1)...(19): siRNA sense strand
ugaccauuccuuugaguua

SEQ ID NO: 1644736 - RNA, 19 nt, Homo sapiens
  misc_RNA (1)...(19): siRNA sense strand
uaaugggacugacccuuau

SEQ ID NO: 1644737 - RNA, 19 nt, Homo sapiens
  misc_RNA (1)...(19): siRNA sense strand
aagaaucugugaagcuauu

SEQ ID NO: 1644738 - RNA, 19 nt, Homo sapiens
  misc_RNA (1)...(19): siRNA sense strand
ggugaagaauuaccacauc

SEQ ID NO: 1644739 - RNA, 19 nt, Homo sapiens
  misc_RNA (1)...(19): siRNA sense strand
gaagauggguggggaagaa

SEQ ID NO: 1644740 - RNA, 19 nt, Homo sapiens
  misc_RNA (1)...(19): siRNA sense strand
acacauccauuccuguuuc

SEQ ID NO: 1644741 - RNA, 19 nt, Homo sapiens
  misc_RNA (1)...(19): siRNA sense strand
gaaaagacauaugaaugga

SEQ ID NO: 1644742 - RNA, 19 nt, Homo sapiens
  misc_RNA (1)...(19): siRNA sense strand
caaagucggaaucuacuga

SEQ ID NO: 1644743 - RNA, 19 nt, Homo sapiens
  misc_RNA (1)...(19): siRNA sense strand
caauauaucaagcacaaug

SEQ ID NO: 1644744 - RNA, 19 nt, Homo sapiens
  misc_RNA (1)...(19): siRNA sense strand
aaagagaucaaugggaaua

SEQ ID NO: 1644745 - RNA, 19 nt, Homo sapiens
  misc_RNA (1)...(19): siRNA sense strand
ggagguuguugcuguaucu

SEQ ID NO: 1644746 - RNA, 19 nt, Homo sapiens
  misc_RNA (1)...(19): siRNA sense strand
cugauuccuuggcuacuua

SEQ ID NO: 1644747 - RNA, 19 nt, Homo sapiens
  misc_RNA (1)...(19): siRNA sense strand
guacaaccaggaaucaguu

SEQ ID NO: 1644748 - RNA, 19 nt, Homo sapiens
  misc_RNA (1)...(19): siRNA sense strand
gaagaggaggagccaguga

SEQ ID NO: 1644749 - RNA, 19 nt, Homo sapiens
  misc_RNA (1)...(19): siRNA sense strand
gugacuggauucauugguu

SEQ ID NO: 1644750 - RNA, 19 nt, Homo sapiens
  misc_RNA (1)...(19): siRNA sense strand
agagaucaaugggaauaaa

SEQ ID NO: 1644751 - RNA, 19 nt, Homo sapiens
  misc_RNA (1)...(19): siRNA sense strand
gagacuggaguuucccaua

SEQ ID NO: 1644752 - RNA, 19 nt, Homo sapiens
  misc_RNA (1)...(19): siRNA sense strand
agucugauauuucuuguuc

SEQ ID NO: 1644753 - RNA, 19 nt, Homo sapiens
  misc_RNA (1)...(19): siRNA sense strand
gcccuuagcacaaugauca

SEQ ID NO: 1644754 - RNA, 19 nt, Homo sapiens
  misc_RNA (1)...(19): siRNA sense strand
gagauucagccacaguauu

SEQ ID NO: 1644755 - RNA, 19 nt, Homo sapiens
  misc_RNA (1)...(19): siRNA sense strand
gagagauucagccacagua

SEQ ID NO: 1644756 - RNA, 19 nt, Homo sapiens
  misc_RNA (1)...(19): siRNA sense strand
auaaugggacugacccuua

SEQ ID NO: 1644757 - RNA, 19 nt, Homo sapiens
  misc_RNA (1)...(19): siRNA sense strand
agaauuaccacaucccaaa

SEQ ID NO: 1644758 - RNA, 19 nt, Homo sapiens
  misc_RNA (1)...(19): siRNA sense strand
gaugaaacugcauuaaauc

SEQ ID NO: 1644759 - RNA, 19 nt, Homo sapiens
  misc_RNA (1)...(19): siRNA sense strand
cugauggacuucauguuga

SEQ ID NO: 1644760 - RNA, 19 nt, Homo sapiens
  misc_RNA (1)...(19): siRNA sense strand
uccaauauaucaagcacaa

SEQ ID NO: 1644761 - RNA, 19 nt, Homo sapiens
  misc_RNA (1)...(19): siRNA sense strand
accaaacaccugcaacuua

SEQ ID NO: 1644762 - RNA, 19 nt, Homo sapiens
  misc_RNA (1)...(19): siRNA sense strand
gccuagauauuaaagagau

SEQ ID NO: 1644763 - RNA, 19 nt, Homo sapiens
  misc_RNA (1)...(19): siRNA sense strand
ggaguuucccauacgaauu

SEQ ID NO: 1644764 - RNA, 19 nt, Homo sapiens
  misc_RNA (1)...(19): siRNA sense strand
agauucagccacaguauuu

SEQ ID NO: 1644765 - RNA, 19 nt, Homo sapiens
  misc_RNA (1)...(19): siRNA sense strand
uagcuagccuaugcaauau

SEQ ID NO: 1644766 - RNA, 19 nt, Homo sapiens
  misc_RNA (1)...(19): siRNA sense strand
gcagggacagaaacaguug

SEQ ID NO: 1644767 - RNA, 19 nt, Homo sapiens
  misc_RNA (1)...(19): siRNA sense strand
gggcauauauccgguacuc

SEQ ID NO: 1644768 - RNA, 19 nt, Homo sapiens
  misc_RNA (1)...(19): siRNA sense strand
ccaaggacacauacaacaa

SEQ ID NO: 1644769 - RNA, 19 nt, Homo sapiens
  misc_RNA (1)...(19): siRNA sense strand
gguuguugcuguaucuguu

SEQ ID NO: 1644770 - RNA, 19 nt, Homo sapiens
  misc_RNA (1)...(19): siRNA sense strand
ucaucaagcuuucccuaca

SEQ ID NO: 1644771 - RNA, 19 nt, Homo sapiens
  misc_RNA (1)...(19): siRNA sense strand
aagaugaccauuccuuuga

SEQ ID NO: 1644772 - RNA, 19 nt, Homo sapiens
  misc_RNA (1)...(19): siRNA sense strand
gguuggagacuacaaugaa

SEQ ID NO: 1644773 - RNA, 19 nt, Homo sapiens
  misc_RNA (1)...(19): siRNA sense strand
gucggaaucuacugaacaa

SEQ ID NO: 1644774 - RNA, 19 nt, Homo sapiens
  misc_RNA (1)...(19): siRNA sense strand
ucaaagaugaccauuccuu

SEQ ID NO: 1644775 - RNA, 19 nt, Homo sapiens
  misc_RNA (1)...(19): siRNA sense strand
cgaugguggugccaaauuc

SEQ ID NO: 1644776 - RNA, 19 nt, Homo sapiens
  misc_RNA (1)...(19): siRNA sense strand
acaaugaucagcucaauac

SEQ ID NO: 1644777 - RNA, 19 nt, Homo sapiens
  misc_RNA (1)...(19): siRNA sense strand
cagggaaccuuugauaguc

SEQ ID NO: 1644778 - RNA, 19 nt, Homo sapiens
  misc_RNA (1)...(19): siRNA sense strand
cgagagaccacaggaauuc

SEQ ID NO: 1644779 - RNA, 19 nt, Homo sapiens
  misc_RNA (1)...(19): siRNA sense strand
gaccauuccuuugaguuag

SEQ ID NO: 1644780 - RNA, 19 nt, Homo sapiens
  misc_RNA (1)...(19): siRNA sense strand
agacaucuguaucaucaag

SEQ ID NO: 1644781 - RNA, 19 nt, Homo sapiens
  misc_RNA (1)...(19): siRNA sense strand
gccacaguauuugcccuua

SEQ ID NO: 1644782 - RNA, 19 nt, Homo sapiens
  misc_RNA (1)...(19): siRNA sense strand
gcuaccucauccuggcuua

SEQ ID NO: 1644783 - RNA, 19 nt, Homo sapiens
  misc_RNA (1)...(19): siRNA sense strand
uagccuaugcaauaugaua

SEQ ID NO: 1644784 - RNA, 19 nt, Homo sapiens
  misc_RNA (1)...(19): siRNA sense strand
ggagagugaaauagaugaa

SEQ ID NO: 1644785 - RNA, 19 nt, Homo sapiens
  misc_RNA (1)...(19): siRNA sense strand
guuggagagugaaauagau

SEQ ID NO: 1644786 - RNA, 19 nt, Homo sapiens
  misc_RNA (1)...(19): siRNA sense strand
uaaggaagaaucugugaag

SEQ ID NO: 1644787 - RNA, 19 nt, Homo sapiens
  misc_RNA (1)...(19): siRNA sense strand
ccugauggacuucauguug

SEQ ID NO: 1644788 - RNA, 19 nt, Homo sapiens
  misc_RNA (1)...(19): siRNA sense strand
gaugaccauuccuuugagu

SEQ ID NO: 1644789 - RNA, 19 nt, Homo sapiens
  misc_RNA (1)...(19): siRNA sense strand
acaccaaagucggaaucua

SEQ ID NO: 1644790 - RNA, 19 nt, Homo sapiens
  misc_RNA (1)...(19): siRNA sense strand
gaccaaacaccugcaacuu

SEQ ID NO: 1644791 - RNA, 19 nt, Homo sapiens
  misc_RNA (1)...(19): siRNA sense strand
ggaaaagacauaugaaugg

SEQ ID NO: 1644792 - RNA, 19 nt, Homo sapiens
  misc_RNA (1)...(19): siRNA sense strand
ucagggaaccuuugauagu

SEQ ID NO: 1644793 - RNA, 19 nt, Homo sapiens
  misc_RNA (1)...(19): siRNA sense strand
gaucuaucaaggugaagaa

SEQ ID NO: 1644794 - RNA, 19 nt, Homo sapiens
  misc_RNA (1)...(19): siRNA sense strand
ccgguacucuggagaauac

SEQ ID NO: 1644795 - RNA, 19 nt, Homo sapiens
  misc_RNA (1)...(19): siRNA sense strand
gaagaaucugugaagcuau

SEQ ID NO: 1644796 - RNA, 19 nt, Homo sapiens
  misc_RNA (1)...(19): siRNA sense strand
gaauuaccacaucccaaau

SEQ ID NO: 1644797 - RNA, 19 nt, Homo sapiens
  misc_RNA (1)...(19): siRNA sense strand
ccaaacaccugcaacuuaa

SEQ ID NO: 1644798 - RNA, 19 nt, Homo sapiens
  misc_RNA (1)...(19): siRNA sense strand
ggaagaaucugugaagcua

SEQ ID NO: 1644799 - RNA, 19 nt, Homo sapiens
  misc_RNA (1)...(19): siRNA sense strand
caauaaaccugaugguaaa

SEQ ID NO: 1644800 - RNA, 19 nt, Homo sapiens
  misc_RNA (1)...(19): siRNA sense strand
gaaccagcaugaagaacua

SEQ ID NO: 1644801 - RNA, 19 nt, Homo sapiens
  misc_RNA (1)...(19): siRNA sense strand
ggagugaaaucuuccuuau

SEQ ID NO: 1644802 - RNA, 19 nt, Homo sapiens
  misc_RNA (1)...(19): siRNA sense strand
cuaucaaggugaagaauua

SEQ ID NO: 1644803 - RNA, 19 nt, Homo sapiens
  misc_RNA (1)...(19): siRNA sense strand
cagcagaagcuaacaauuu

SEQ ID NO: 1644804 - RNA, 19 nt, Homo sapiens
  misc_RNA (1)...(19): siRNA sense strand
ucaauaaaccugaugguaa

SEQ ID NO: 1644805 - RNA, 19 nt, Homo sapiens
  misc_RNA (1)...(19): siRNA sense strand
gcaguguuauugauggaua

SEQ ID NO: 1644806 - RNA, 19 nt, Homo sapiens
  misc_RNA (1)...(19): siRNA sense strand
gauauggagugaaaucuuc

SEQ ID NO: 1644807 - RNA, 19 nt, Homo sapiens
  misc_RNA (1)...(19): siRNA sense strand
agcagaagcuaacaauuua

SEQ ID NO: 1644808 - RNA, 19 nt, Homo sapiens
  misc_RNA (1)...(19): siRNA sense strand
ccacaggaauucagauaug

SEQ ID NO: 1644809 - RNA, 19 nt, Homo sapiens
  misc_RNA (1)...(19): siRNA sense strand
aaacauuccugaagccauu

SEQ ID NO: 1644810 - RNA, 19 nt, Homo sapiens
  misc_RNA (1)...(19): siRNA sense strand
caaaugacuugcagaccaa

SEQ ID NO: 1644811 - RNA, 19 nt, Homo sapiens
  misc_RNA (1)...(19): siRNA sense strand
gcacaaugaucagcucaau

SEQ ID NO: 1644812 - RNA, 19 nt, Homo sapiens
  misc_RNA (1)...(19): siRNA sense strand
gcaguuggagagugaaaua

SEQ ID NO: 1644813 - RNA, 19 nt, Homo sapiens
  misc_RNA (1)...(19): siRNA sense strand
caaggagguuguugcugua

SEQ ID NO: 1644814 - RNA, 19 nt, Homo sapiens
  misc_RNA (1)...(19): siRNA sense strand
gcuagccuaugcaauauga

SEQ ID NO: 1644815 - RNA, 19 nt, Homo sapiens
  misc_RNA (1)...(19): siRNA sense strand
cuucaaggcuuauauaaag

SEQ ID NO: 1644816 - RNA, 19 nt, Homo sapiens
  misc_RNA (1)...(19): siRNA sense strand
agugaaaucuuccuuauca

SEQ ID NO: 1644817 - RNA, 19 nt, Homo sapiens
  misc_RNA (1)...(19): siRNA sense strand
gaauucagauauggaguga

SEQ ID NO: 1644818 - RNA, 19 nt, Homo sapiens
  misc_RNA (1)...(19): siRNA sense strand
guacuucaaggcuuauaua

SEQ ID NO: 1644819 - RNA, 19 nt, Homo sapiens
  misc_RNA (1)...(19): siRNA sense strand
gaucagcucaauacaggua

SEQ ID NO: 1644820 - RNA, 19 nt, Homo sapiens
  misc_RNA (1)...(19): siRNA sense strand
gagccuagauauuaaagag

SEQ ID NO: 1644821 - RNA, 19 nt, Homo sapiens
  misc_RNA (1)...(19): siRNA sense strand
cccgagagccuagauauua

SEQ ID NO: 1644822 - RNA, 19 nt, Homo sapiens
  misc_RNA (1)...(19): siRNA sense strand
gcugggagcuguaauagac

SEQ ID NO: 1644823 - RNA, 19 nt, Homo sapiens
  misc_RNA (1)...(19): siRNA sense strand
guagucaucuuuaucacau

SEQ ID NO: 1644824 - RNA, 19 nt, Homo sapiens
  misc_RNA (1)...(19): siRNA sense strand
ccgagagccuagauauuaa

SEQ ID NO: 1644825 - RNA, 19 nt, Homo sapiens
  misc_RNA (1)...(19): siRNA sense strand
aaagaucuaucaaggugaa

SEQ ID NO: 1644826 - RNA, 19 nt, Homo sapiens
  misc_RNA (1)...(19): siRNA sense strand
uggaguacuucaaggcuua

SEQ ID NO: 1644827 - RNA, 19 nt, Homo sapiens
  misc_RNA (1)...(19): siRNA sense strand
ugacuggauucauugguuu

SEQ ID NO: 1644828 - RNA, 19 nt, Homo sapiens
  misc_RNA (1)...(19): siRNA sense strand
caagcacaaugauagcaaa

SEQ ID NO: 1644829 - RNA, 19 nt, Homo sapiens
  misc_RNA (1)...(19): siRNA sense strand
caacugccaaggacacaua

SEQ ID NO: 1644830 - RNA, 19 nt, Homo sapiens
  misc_RNA (1)...(19): siRNA sense strand
caaggacacauacaacaaa

SEQ ID NO: 1644831 - RNA, 19 nt, Homo sapiens
  misc_RNA (1)...(19): siRNA sense strand
gaguuucccauacgaauuu

SEQ ID NO: 1644832 - RNA, 19 nt, Homo sapiens
  misc_RNA (1)...(19): siRNA sense strand
ugagauacauguacaacca

SEQ ID NO: 1644833 - RNA, 19 nt, Homo sapiens
  misc_RNA (1)...(19): siRNA sense strand
gaccacaggaauucagaua

SEQ ID NO: 1644834 - RNA, 19 nt, Homo sapiens
  misc_RNA (1)...(19): siRNA sense strand
ugaccauuccuuugaguua

SEQ ID NO: 1644835 - RNA, 19 nt, Homo sapiens
  misc_RNA (1)...(19): siRNA sense strand
uaaugggacugacccuuau

SEQ ID NO: 1644836 - RNA, 19 nt, Homo sapiens
  misc_RNA (1)...(19): siRNA sense strand
aagaaucugugaagcuauu

SEQ ID NO: 1644837 - RNA, 19 nt, Homo sapiens
  misc_RNA (1)...(19): siRNA sense strand
ggugaagaauuaccacauc

SEQ ID NO: 1644838 - RNA, 19 nt, Homo sapiens
  misc_RNA (1)...(19): siRNA sense strand
gaagauggguggggaagaa

SEQ ID NO: 1644839 - RNA, 19 nt, Homo sapiens
  misc_RNA (1)...(19): siRNA sense strand
acacauccauuccuguuuc

SEQ ID NO: 1644840 - RNA, 19 nt, Homo sapiens
  misc_RNA (1)...(19): siRNA sense strand
gaaaagacauaugaaugga

SEQ ID NO: 1644841 - RNA, 19 nt, Homo sapiens
  misc_RNA (1)...(19): siRNA sense strand
caaagucggaaucuacuga

SEQ ID NO: 1644842 - RNA, 19 nt, Homo sapiens
  misc_RNA (1)...(19): siRNA sense strand
caauauaucaagcacaaug

SEQ ID NO: 1644843 - RNA, 19 nt, Homo sapiens
  misc_RNA (1)...(19): siRNA sense strand
aaagagaucaaugggaaua

SEQ ID NO: 1644844 - RNA, 19 nt, Homo sapiens
  misc_RNA (1)...(19): siRNA sense strand
ggagguuguugcuguaucu

SEQ ID NO: 1644845 - RNA, 19 nt, Homo sapiens
  misc_RNA (1)...(19): siRNA sense strand
cugauuccuuggcuacuua

SEQ ID NO: 1644846 - RNA, 19 nt, Homo sapiens
  misc_RNA (1)...(19): siRNA sense strand
guacaaccaggaaucaguu

SEQ ID NO: 1644847 - RNA, 19 nt, Homo sapiens
  misc_RNA (1)...(19): siRNA sense strand
gugacuggauucauugguu

SEQ ID NO: 1644848 - RNA, 19 nt, Homo sapiens
  misc_RNA (1)...(19): siRNA sense strand
gaagaggaggagccaguga

SEQ ID NO: 1644849 - RNA, 19 nt, Homo sapiens
  misc_RNA (1)...(19): siRNA sense strand
agagaucaaugggaauaaa

SEQ ID NO: 1644850 - RNA, 19 nt, Homo sapiens
  misc_RNA (1)...(19): siRNA sense strand
gagacuggaguuucccaua

SEQ ID NO: 1644851 - RNA, 19 nt, Homo sapiens
  misc_RNA (1)...(19): siRNA sense strand
agucugauauuucuuguuc

SEQ ID NO: 1644852 - RNA, 19 nt, Homo sapiens
  misc_RNA (1)...(19): siRNA sense strand
gcccuuagcacaaugauca

SEQ ID NO: 1644853 - RNA, 19 nt, Homo sapiens
  misc_RNA (1)...(19): siRNA sense strand
gagauucagccacaguauu

SEQ ID NO: 1644854 - RNA, 19 nt, Homo sapiens
  misc_RNA (1)...(19): siRNA sense strand
gaugaaacugcauuaaauc

SEQ ID NO: 1644855 - RNA, 19 nt, Homo sapiens
  misc_RNA (1)...(19): siRNA sense strand
auaaugggacugacccuua

SEQ ID NO: 1644856 - RNA, 19 nt, Homo sapiens
  misc_RNA (1)...(19): siRNA sense strand
agaauuaccacaucccaaa

SEQ ID NO: 1644857 - RNA, 19 nt, Homo sapiens
  misc_RNA (1)...(19): siRNA sense strand
gagagauucagccacagua

SEQ ID NO: 1644858 - RNA, 19 nt, Homo sapiens
  misc_RNA (1)...(19): siRNA sense strand
cugauggacuucauguuga

SEQ ID NO: 1644859 - RNA, 19 nt, Homo sapiens
  misc_RNA (1)...(19): siRNA sense strand
uccaauauaucaagcacaa

SEQ ID NO: 1644860 - RNA, 19 nt, Homo sapiens
  misc_RNA (1)...(19): siRNA sense strand
accaaacaccugcaacuua

SEQ ID NO: 1644861 - RNA, 19 nt, Homo sapiens
  misc_RNA (1)...(19): siRNA sense strand
gccuagauauuaaagagau

SEQ ID NO: 1644862 - RNA, 19 nt, Homo sapiens
  misc_RNA (1)...(19): siRNA sense strand
ggaguuucccauacgaauu

SEQ ID NO: 1644863 - RNA, 19 nt, Homo sapiens
  misc_RNA (1)...(19): siRNA sense strand
agauucagccacaguauuu

SEQ ID NO: 1644864 - RNA, 19 nt, Homo sapiens
  misc_RNA (1)...(19): siRNA sense strand
uagcuagccuaugcaauau

SEQ ID NO: 1644865 - RNA, 19 nt, Homo sapiens
  misc_RNA (1)...(19): siRNA sense strand
gcagggacagaaacaguug

SEQ ID NO: 1644866 - RNA, 19 nt, Homo sapiens
  misc_RNA (1)...(19): siRNA sense strand
gggcauauauccgguacuc

SEQ ID NO: 1644867 - RNA, 19 nt, Homo sapiens
  misc_RNA (1)...(19): siRNA sense strand
ccaaggacacauacaacaa

SEQ ID NO: 1644868 - RNA, 19 nt, Homo sapiens
  misc_RNA (1)...(19): siRNA sense strand
aagaugaccauuccuuuga

SEQ ID NO: 1644869 - RNA, 19 nt, Homo sapiens
  misc_RNA (1)...(19): siRNA sense strand
ucaucaagcuuucccuaca

SEQ ID NO: 1644870 - RNA, 19 nt, Homo sapiens
  misc_RNA (1)...(19): siRNA sense strand
gguuguugcuguaucuguu

SEQ ID NO: 1644871 - RNA, 19 nt, Homo sapiens
  misc_RNA (1)...(19): siRNA sense strand
gguuggagacuacaaugaa

SEQ ID NO: 1644872 - RNA, 19 nt, Homo sapiens
  misc_RNA (1)...(19): siRNA sense strand
ucaaagaugaccauuccuu

SEQ ID NO: 1644873 - RNA, 19 nt, Homo sapiens
  misc_RNA (1)...(19): siRNA sense strand
cgaugguggugccaaauuc

SEQ ID NO: 1644874 - RNA, 19 nt, Homo sapiens
  misc_RNA (1)...(19): siRNA sense strand
acaaugaucagcucaauac

SEQ ID NO: 1644875 - RNA, 19 nt, Homo sapiens
  misc_RNA (1)...(19): siRNA sense strand
cagggaaccuuugauaguc

SEQ ID NO: 1644876 - RNA, 19 nt, Homo sapiens
  misc_RNA (1)...(19): siRNA sense strand
cgagagaccacaggaauuc

SEQ ID NO: 1644877 - RNA, 19 nt, Homo sapiens
  misc_RNA (1)...(19): siRNA sense strand
gccacaguauuugcccuua

SEQ ID NO: 1644878 - RNA, 19 nt, Homo sapiens
  misc_RNA (1)...(19): siRNA sense strand
agacaucuguaucaucaag

SEQ ID NO: 1644879 - RNA, 19 nt, Homo sapiens
  misc_RNA (1)...(19): siRNA sense strand
gaccauuccuuugaguuag

SEQ ID NO: 1644880 - RNA, 19 nt, Homo sapiens
  misc_RNA (1)...(19): siRNA sense strand
gcuaccucauccuggcuua

SEQ ID NO: 1644881 - RNA, 19 nt, Homo sapiens
  misc_RNA (1)...(19): siRNA sense strand
uagccuaugcaauaugaua

SEQ ID NO: 1644882 - RNA, 19 nt, Homo sapiens
  misc_RNA (1)...(19): siRNA sense strand
ggagagugaaauagaugaa

SEQ ID NO: 1644883 - RNA, 19 nt, Homo sapiens
  misc_RNA (1)...(19): siRNA sense strand
guuggagagugaaauagau

SEQ ID NO: 1644884 - RNA, 19 nt, Homo sapiens
  misc_RNA (1)...(19): siRNA sense strand
uaaggaagaaucugugaag

SEQ ID NO: 1644885 - RNA, 19 nt, Homo sapiens
  misc_RNA (1)...(19): siRNA sense strand
ggaaaagacauaugaaugg

SEQ ID NO: 1644886 - RNA, 19 nt, Homo sapiens
  misc_RNA (1)...(19): siRNA sense strand
acaccaaagucggaaucua

SEQ ID NO: 1644887 - RNA, 19 nt, Homo sapiens
  misc_RNA (1)...(19): siRNA sense strand
gaugaccauuccuuugagu

SEQ ID NO: 1644888 - RNA, 19 nt, Homo sapiens
  misc_RNA (1)...(19): siRNA sense strand
ccugauggacuucauguug

SEQ ID NO: 1644889 - RNA, 19 nt, Homo sapiens
  misc_RNA (1)...(19): siRNA sense strand
gaccaaacaccugcaacuu

SEQ ID NO: 1644890 - RNA, 19 nt, Homo sapiens
  misc_RNA (1)...(19): siRNA sense strand
ucagggaaccuuugauagu

SEQ ID NO: 1644891 - RNA, 19 nt, Homo sapiens
  misc_RNA (1)...(19): siRNA sense strand
guuagaugaaacugcauua

SEQ ID NO: 1644892 - RNA, 19 nt, Homo sapiens
  misc_RNA (1)...(19): siRNA sense strand
ccgguacucuggagaauac

SEQ ID NO: 1644893 - RNA, 19 nt, Homo sapiens
  misc_RNA (1)...(19): siRNA sense strand
gaagaaucugugaagcuau

SEQ ID NO: 1644894 - RNA, 19 nt, Homo sapiens
  misc_RNA (1)...(19): siRNA sense strand
gaauuaccacaucccaaau

SEQ ID NO: 1644895 - RNA, 19 nt, Homo sapiens
  misc_RNA (1)...(19): siRNA sense strand
gaucuaucaaggugaagaa

SEQ ID NO: 1644896 - RNA, 19 nt, Homo sapiens
  misc_RNA (1)...(19): siRNA sense strand
ggaaccagcaugaagaacu

SEQ ID NO: 1644897 - RNA, 19 nt, Homo sapiens
  misc_RNA (1)...(19): siRNA sense strand
ugacugacauugccaagua

SEQ ID NO: 1644898 - RNA, 19 nt, Homo sapiens
  misc_RNA (1)...(19): siRNA sense strand
gaggaggacucucauacaa

SEQ ID NO: 1644899 - RNA, 19 nt, Homo sapiens
  misc_RNA (1)...(19): siRNA sense strand
gcacucaaauuccuuuauc

SEQ ID NO: 1644900 - RNA, 19 nt, Homo sapiens
  misc_RNA (1)...(19): siRNA sense strand
cuacauaugucgagggaau

SEQ ID NO: 1644901 - RNA, 19 nt, Homo sapiens
  misc_RNA (1)...(19): siRNA sense strand
gagcucugguugcaauauu

SEQ ID NO: 1644902 - RNA, 19 nt, Homo sapiens
  misc_RNA (1)...(19): siRNA sense strand
ggaggacucucauacaacu

SEQ ID NO: 1644903 - RNA, 19 nt, Homo sapiens
  misc_RNA (1)...(19): siRNA sense strand
gaagggagacugggcaaga

SEQ ID NO: 1644904 - RNA, 19 nt, Homo sapiens
  misc_RNA (1)...(19): siRNA sense strand
caacaacugggaaucacua

SEQ ID NO: 1644905 - RNA, 19 nt, Homo sapiens
  misc_RNA (1)...(19): siRNA sense strand
gggaaugcagaaagaguua

SEQ ID NO: 1644906 - RNA, 19 nt, Homo sapiens
  misc_RNA (1)...(19): siRNA sense strand
cugcagcgaugguuacauu

SEQ ID NO: 1644907 - RNA, 19 nt, Homo sapiens
  misc_RNA (1)...(19): siRNA sense strand
cagcgaugguuacauugaa

SEQ ID NO: 1644908 - RNA, 19 nt, Homo sapiens
  misc_RNA (1)...(19): siRNA sense strand
uguaucggauuucuucaaa

SEQ ID NO: 1644909 - RNA, 19 nt, Homo sapiens
  misc_RNA (1)...(19): siRNA sense strand
guacguggcccucgaugug

SEQ ID NO: 1644910 - RNA, 19 nt, Homo sapiens
  misc_RNA (1)...(19): siRNA sense strand
gcagcgaugguuacauuga

SEQ ID NO: 1644911 - RNA, 19 nt, Homo sapiens
  misc_RNA (1)...(19): siRNA sense strand
uguguugacuggacucauu

SEQ ID NO: 1644912 - RNA, 19 nt, Homo sapiens
  misc_RNA (1)...(19): siRNA sense strand
uuucucgaguuucugauua

SEQ ID NO: 1644913 - RNA, 19 nt, Homo sapiens
  misc_RNA (1)...(19): siRNA sense strand
auacaacucugcaugaaac

SEQ ID NO: 1644914 - RNA, 19 nt, Homo sapiens
  misc_RNA (1)...(19): siRNA sense strand
gcgaugguuacauugaaua

SEQ ID NO: 1644915 - RNA, 19 nt, Homo sapiens
  misc_RNA (1)...(19): siRNA sense strand
cuguauauguaucggauuu

SEQ ID NO: 1644916 - RNA, 19 nt, Homo sapiens
  misc_RNA (1)...(19): siRNA sense strand
acacugcaauuuggucuug

SEQ ID NO: 1644917 - RNA, 19 nt, Homo sapiens
  misc_RNA (1)...(19): siRNA sense strand
ucgagggaaugcagaaaga

SEQ ID NO: 1644918 - RNA, 19 nt, Homo sapiens
  misc_RNA (1)...(19): siRNA sense strand
ccacuggagcgauguguug

SEQ ID NO: 1644919 - RNA, 19 nt, Homo sapiens
  misc_RNA (1)...(19): siRNA sense strand
gcagguuguccuucuauuc

SEQ ID NO: 1644920 - RNA, 19 nt, Homo sapiens
  misc_RNA (1)...(19): siRNA sense strand
ccucacuucuuggauguuu

SEQ ID NO: 1644921 - RNA, 19 nt, Homo sapiens
  misc_RNA (1)...(19): siRNA sense strand
ucagggagcucugguugca

SEQ ID NO: 1644922 - RNA, 19 nt, Homo sapiens
  misc_RNA (1)...(19): siRNA sense strand
acaaagccauuggaaccuu

SEQ ID NO: 1644923 - RNA, 19 nt, Homo sapiens
  misc_RNA (1)...(19): siRNA sense strand
caugaaacaccaacaacug

SEQ ID NO: 1644924 - RNA, 19 nt, Homo sapiens
  misc_RNA (1)...(19): siRNA sense strand
ucucgaguuucugauuaua

SEQ ID NO: 1644925 - RNA, 19 nt, Homo sapiens
  misc_RNA (1)...(19): siRNA sense strand
ggaaugcagaaagaguuaa

SEQ ID NO: 1644926 - RNA, 19 nt, Homo sapiens
  misc_RNA (1)...(19): siRNA sense strand
guauauguaucggauuucu

SEQ ID NO: 1644927 - RNA, 19 nt, Homo sapiens
  misc_RNA (1)...(19): siRNA sense strand
cagguuguccuucuauuca

SEQ ID NO: 1644928 - RNA, 19 nt, Homo sapiens
  misc_RNA (1)...(19): siRNA sense strand
cauacaacucugcaugaaa

SEQ ID NO: 1644929 - RNA, 19 nt, Homo sapiens
  misc_RNA (1)...(19): siRNA sense strand
gacugacauugccaaguau

SEQ ID NO: 1644930 - RNA, 19 nt, Homo sapiens
  misc_RNA (1)...(19): siRNA sense strand
gaaucacuauccgagcaau

SEQ ID NO: 1644931 - RNA, 19 nt, Homo sapiens
  misc_RNA (1)...(19): siRNA sense strand
gcaugaaacaccaacaacu

SEQ ID NO: 1644932 - RNA, 19 nt, Homo sapiens
  misc_RNA (1)...(19): siRNA sense strand
ggcagguuguccuucuauu

SEQ ID NO: 1644933 - RNA, 19 nt, Homo sapiens
  misc_RNA (1)...(19): siRNA sense strand
ucaacugcagcgaugguua

SEQ ID NO: 1644934 - RNA, 19 nt, Homo sapiens
  misc_RNA (1)...(19): siRNA sense strand
ggccucacuucuuggaugu
